United States Patent Application Publication US 2007/0283459 A1 - sequence listing, part 3

SEQ ID NO: 14773 - DNA, 355 bp, Glycine max
tgcaattctcacatgttcaagacatagccgaggcagccatgtgcagtatatgaattgcaattatcagtgttcttattaggcctatcctgaagccaaaggaaatgagatcggaattcctcgccgaattccaatgccacattatcacgaaataacgaggcaaacatgtccatacatgaattggagtcatacgattacttattaggcctatcctgaagccagaggaactgcgatcgatactcctcgaagagtcccagttcgaccttttcatgaaacaaggaggcaacattgttcatatctgagttgtaattatgagcttccttattgggcctctcctgaagccaacggaaatgagatc

SEQ ID NO: 14774 - DNA, 232 bp, Glycine max
catgcagcgatgctgctcataaccgcaatatggaatcctcggggatcgaagacaggaagccggagattctgataagcgcaggaggttgattatggtcgtatgtgccggtgcctgcaaagtcgtatgcgactgcgaatactgacacatatccttccgcccgcctaattcgataagcatgctgcgcacaatctgtgacttaactgacattaattgctctgcgctaactgccagc

SEQ ID NO: 14775 - DNA, 406 bp, Glycine max
cgacacacggaagcttcctatggacatgtaaagtgaacctacgagtgcacgaacttcagcctctgaccactcactactgctatctaccggctcaactcgtccgggactcaacggagacatagctcgcctctgaccctaagctttactagatgacaggcatacgaaccgtcagtgatcctggtgacagcacctccgatcgtctcagcaacgcgaccggcgcatcgtacatcgccgtctgctatgtcaaattcgatgaggccacaggcgcccgtgacgttacagtgatctataccgagcctccgtagaagcttgtcaggaagctcgactggtcaaatgacgttctctttactggtggatgggctaaaagtggtttatattatgaaactgtcacaaaaatatttaagaa

SEQ ID NO: 14776 - DNA, 428 bp, Glycine max
cttaattattaacacttccttagttcaatatggggaagccctgcactctctctctttcttccctttgcttgctactctcgtcgagtgcatgctttgctattagctccagcaagctcaacgagtgccaactcaacaacctcaacgcgttggaacccgaccaccgcgttgagtccgaaggtggtttgattcaaacatggaactctcaacaccctgagctgaaatgcgccggtgtcactgtttccaaactcaccctcaaccgcaatggcctccacttgccatcttactcaccttatccccggatgatcatcatcgcccaagggaaaggagcacttggagttgcaattccaggatgtcctgagacgtttgaggagccacatgaacaatcaaacagaagaggctcaaggtcgcagaagcagcagctacaggac

SEQ ID NO: 14777 - DNA, 268 bp, Glycine max
cttaattattaacacttccttagttcaatatggggaagccctggactctctctctttcttccttacgcttgctactcttgtcgagtgcatgctatgctattagctacagcaagctcaacgagtgccaactcaacaacctcaacgcgttggaacccgaccacctggttaagtccgaatggggattgattcaaacatggtactgtcaacaccctgagctgaaatgctccgatcggactgtttccaaacttacccttaaccgaaatggcct

SEQ ID NO: 14778 - DNA, 176 bp, Glycine max
caagcagcgatgttgctcatagccgaaatatcgaatcctcggagatcgaagacaggaagccggagattctgaaaagcggaggaggttgtcttccgccgcctgtgccggtgcctgcgccgccgcaagcgacggcgaagacggattacatgtccttcgacccgtcggattcaatcccg

SEQ ID NO: 14779 - DNA, 292 bp, Glycine max
gcaaaaatgaagctccctatggacttggaaagtgaaccaactagttcaggaaattcaaccactgagcagaaactacagccatcaaagagcaataattctcgtgtgttttatggcagcagagctttcttctgatctttagcttccctagttcatgggaatacgagcagtcactgtagattcttagaagaaaactgattttagtagtgaagtgaaataatcaatgtactatcctgagtggtttccccttctgcatttcataacatgttgattgaaccttacagggaatataact

SEQ ID NO: 14780 - DNA, 316 bp, Glycine max
gcaaaaatgaagctccttatggacttggaaagagaacctacgggatcaagaaattcaacacaacatgagcagaaactacagccgtaaaagagcattaagtgaatcgagcgttatgtggtgccagagccttgcttctgatctcgtgctggtcttggtcgtgggactacgagcagtcactgttgattgttagaagaaaactgattttagtagtgaagtgaaatactcaatgtactatcctgtgtggtttccccttctgtatttcatcacatgttggttgtagcttacagggaatatagctttgtactctcacaagctt

SEQ ID NO: 14781 - DNA, 355 bp, Glycine max
agcaagcagcaagcgagacactgaacaccacaacacaaaccgcacaagagaaaagcgcacaggcaaagaatcttgcagcacaagcaaaggacgcaacgttagagaagggtcagcaaggctatgctgtgacaaaggacaccatttcaagtgcagcgaaaaccgcttcggagaaaactgcgccagtggcagagaaggccaaagactacactcttcaggctgcggagaaggccaagagtgcgggtggcacaacggcgagttacgtcggagagaaagcggtgcaggccaaggatgtcgccgtggagagtgtgaagagtgcggctgggtatgctgccaaggtggctgctgatttgaggga

SEQ ID NO: 14782 - DNA, 344 bp, Glycine max
cagcgtgaccgctcttagttggagttgagtgctaactgcttcgctggggtcagtttgggtctcattaaaggcgatagaggatgagacacaggcttactccttgaaatgctctaacgcatacgaacttaattcgcaaaccaaaagggacgcatttcctatcgcgcagagctccatcaaacgactggcacagctctacacccttgaggactaccggatggaccatgttcatcaaaagccaaacacaatctttctactcaagcatgctgccgccatttgcatgaggttggaccttagctggagagccatacttaccttgtggaacaacgacaactgagactactaca

SEQ ID NO: 14783 - DNA, 374 bp, Glycine max
tcagcacgaatgtccttcgaaggagttgatgggaactgttttcctggcgatcagtttgtgtctcattaaaggtgagagaggatgagaataaccctttctacttgagaagctctaacagcttccaaactctctttgagaaccaaaacggtcgcattcgtctcctccagagattcaacaaacgctccccacaactcgagaaccttcgagactaccggattgtccagtttcagtcaaaacccagcacaatccttttccccaaccatgctgacgccgatttcctcctcttagtccttagcgggagagccatacttaccttggtgaacaacgacgacagagactcctacaaccttaacccttgcgatgcccagagaatc

SEQ ID NO: 14784 - DNA, 158 bp, Glycine max
ctcgaacgatgacagttctagattgtctgtacgaggaagttttgatgcatgtattgatgatcaaaatcacacgatgcatgctgaagcaatatggagtgctctgaatgatgtagcctccagtagcagaagaggcactggacaatctggtggttggacgt

SEQ ID NO: 14785 - DNA, 254 bp, Glycine max
tgcaggtcccgctcgagccgtttatcctctgtgatgataaacttgagctggctaacacacatgaattctttgctggacattctccagcggattcttggttaccaatttttgtgaattgtctttatcctgtaagtcatttaccttcagaagctgtcgctgcaaatgttgcttatccaaatgcacttgatcatgatcctgccgatgcgaacttgagttctaaagagcacagaaaggcccactatgatgactttctt

SEQ ID NO: 14786 - DNA, 177 bp, Glycine max
tagatatcttgtagaaaccaacaaactgcaagaattcaatctgatataaaaaaaagaaaactaaaaaaattcaaaccattaaaaaaatgtatcgaaagaataaaaatggggcggccgccatttacagagctatctgaaccggcaattaacccaggtccggttcctaaaggcgtccca

SEQ ID NO: 14787 - DNA, 370 bp, Glycine max
  modified_base (334)..(334): a, c, g, t, unknown, or other
gtgaagctagtgatgttgcacagaacacaaaagattatgctgctcagaagaccaaggactatgccagcggtggtgcgcagaagaccaaggattatgccagcggtggtgcgcagaagaccaaggactatgcaagtgatgctgcgcagaagaccaaggactatgcaagtgatggtgctcaaaagagcaaagaatatgcggttgatgtagcactgaatgccaaagattatgctcaaaaaagcaaagattacgcaggtgatgctgcacagaatgtcaaagattatgcacgtgatgcagtgcacaagagaaaagagtattctggtgatgcttctaacangagcaaagaggcttttgattatgccagtgagacggt

SEQ ID NO: 14788 - DNA, 229 bp, Glycine max
cggctagggatgatgatgacagttctctatcccatgtacgaggaagttttgatgcatgtattgatgatcaaaatcacacgatgcatgctgaagcaatatggagtgctctgaatgatgtagcctccagtagcagaagaggcactggacaatctggtggttggacgtcatctgaggatgagccagaggcaatggagcatgatgatgatgataggaacttgagttttaaaga

SEQ ID NO: 14789 - DNA, 354 bp, Glycine max
gttattatcaaataattaattaaattcctcgtggaatcttgttgaagccatgtctacagctggtcaggtcatcaagtgcagagctgcggtggcatgggaagcacggaagccactatcgatagaaaccatagaagtggcaccaccccagaaaggtgaagtgcgtttgaagatcctcttcaactccctttgccgtacagatgtttactggtgggatgctaagggccagactccgctgtttcctcgtatcttaggccacgaagcttcggggattgtggagagcgtgggcaagggtgtgacacatctgaaaccaggtgaccatgctctgccaatattcactgtggagtgtggtgaatg

SEQ ID NO: 14790 - DNA, 383 bp, Glycine max
tccggtttggttaacggacgagaaaggcaacccggtgcacctcacggctgtggcaaccaatgcacacaaatctatgcttcagaatgacaccccacaagagcttcctcactccaagagttcaagctcgtctgaagatgaagggcatggagagaggatcaggaagggactgaaggataacatagaagaaaagttaccagctggagaaggagtagtgaaggagaataaacacaccaacaattgctgcttctacttctacaacagatactagtgatgctaatcaccacccaaccactgagcatgagaagaagagtatcatagacaagattaaagaaaaattccaataaatcagcagtgaatattaatatatattcacgaattgaagc

SEQ ID NO: 14791 - DNA, 310 bp, Glycine max
  modified_base (279)..(279): a, c, g, t, unknown, or other
cgaaaaggagaagatgaaatgggatatgcagatggaggaaatcgaagcgattatggagaaaatttgggacctccacgataagctcagcgacgccattcactccgtctccagatcccactttctcacttccgtcaaaaccctcaaactcaacaactctccaccgcaccttcccaacgccgccgtcgccgctgccgatgaccgctcctccggtttcgttttcgtcaaggactttagaccgctcgccgtcgccgataacgacaacgatgacgatgactccgncgtccgcgaagccaagagcctcaacgccatc

SEQ ID NO: 14792 - DNA, 150 bp, Glycine max
agactttgaggcatcttcgcttgcacttcgacaccagtacgctcacaaacgtggctgccctgcgtgagcaagcggcatacacactgttagacggcacctgcatactcagactcatcgtggcaccttccatgatcaacatctgctagcctg

SEQ ID NO: 14793 - DNA, 329 bp, Glycine max
tgatccttctttttctccttgaactcaaacatggcagatgaggtggttctgctagatttctggccaagtccatttgggatgagggtcaggattgcacttgctgaaaagggtatcaaatatgagtacaaagaagaggacttgaggaacaagagtcctcttctcctccaaatgaacccggttcacaagaagattccggttctcatccacaatggcaaacccatttgtgaatccctcattgctgttcagtacattgaggaggttcggaatgacagaaatcccttgttgccttctgacccttaccagatagctcaggctagattctgggctga

SEQ ID NO: 14794 - DNA, 328 bp, Glycine max
ttgtctttgaacactcatcaccatggccaagcttgttctttccctttgtttccttcttttcagtggctgcttcgctctgagagagcaggcacagcaaaatgagtgccagatccaaaagctgaaggccctaaaaccggataaccgaatagagtcggaaggtgggttcattgagacctggaaccctaacaacaagccattccagtgtgccggtgttgccctctctcgctgcacccttaaccgcaatgcccttcgtagaccttcctacaccaacggtccccaggaaatctacatacaacaaggtaatggaatttttggcatgatattcccg

SEQ ID NO: 14795 - DNA, 274 bp, Glycine max
cagcatcgccgcttgcactacctcatcccggagatgtccctcacgggttcccaactcctagctctcctctccgtcgttcaccttggtgcaatgctgttcctcctatcacggatcgatgtcatcgacagcctcttgaagatgtcggagtgcacgtcactgttcatatactgtagcccggtgctggtgcacgccgacttatccataagaatgacggagaccgacgtggcttccggcgtagcatgcagactgtcagaactcgagtggttctcatggg

SEQ ID NO: 14796 - DNA, 357 bp, Glycine max
aaacaaagagaaaaaaaaacccttagccaacacaaccatcatggccacctctgctattcagcaatcagcattcactggtcaaactgctctgaagcagctcaatgaggtcggaccgcagaaccggggcgcccggcaagggtggacctaccaggcccggaaccgtcaaaagggctcctaaaagcattgggaagggcccggccggtccaaggtcctggggcccatgctcgaagcaaattccatcataccggacgggagattacctggggacctccggagggaacactgctgaattatcagtggacccggaaaccttggccaggaaccgggagctggaggtgattcacagcagatgggcaa

SEQ ID NO: 14797 - DNA, 203 bp, Glycine max
cgcgtaagcataacattgctaaagctggcacgacatcatgaacagaaccacatccccacaagcatgaatgactcagtagacaaactggtaatcttcctagcaaagagagatggcatagacaagctggtgaagacgttccagtacgtgtcaaagctcgtaaactggcacgtggaagctacgcaccccgacacatccaagaggtt

SEQ ID NO: 14798 - DNA, 188 bp, Glycine max
ggcagcggcattctgaacctcatcccggagatgtccctcacgggttcccaactcctagctctcctcgccggcgttccccttggtgcaatgctgctcctcctctccggcatctcgctcatcgccagcctcttggggctggcggtggcgacgccgctcttcatcttcttcagcccgctgctggtccccgc

SEQ ID NO: 14799 - DNA, 408 bp, Glycine max
ataaacgaagaagttagtaatatgtttccctctgagtcactagagaaagagagagggaaatggctttcacgatatccagatctgaatctgctttgaaagatagagagaggaaggagtgtgtaacaccagagggtatgatatcgagccagcttggcaatcgtcgaaggcatcttttcatcaaagcatggacaaacatgcaatcctccgacgcatcaggcaacgcaggtttaataccagagccaaaaccgctctggaagctctcataggcacctcagaagccaacatcaacacaaccactgggcaagaacacttgtggcttcaactgggtgactctttctcttgtccttaactgattgaatcaccctaagctacccatctataaataccatccctagatcactacttatg

SEQ ID NO: 14800 - DNA, 318 bp, Glycine max
gagattgcaaaattctcttccgtttcaggattacggtttcaccgttacagctgagaacatggcataaccacagcgaatctctctgcgtatctttgcgctgctcctcttgatttccacctcttcgtttcagcttctccgcgcttccgatgacgccgatgatgatgcgatcttctatgattcgttcgacgaggattttgaagaccgttgggttgcgtctccgaaagatgagtacagtggcgtctggaaacatgccaggagtgaggcacatgatgactatgggcttcttgtcagcgagacagcatggaaatatgctatagt

SEQ ID NO: 14801 - DNA, 333 bp, Glycine max
  modified_base (113)..(113): a, c, g, t, unknown, or other
  modified_base (201)..(201): a, c, g, t, unknown, or other
  modified_base (209)..(209): a, c, g, t, unknown, or other
  modified_base (323)..(324): a, c, g, t, unknown, or other
ggagacaagaaaaatgagccatggtggcctaagatgcaaactcgtgaagagctagttgaagcttgcgctatcatcatatggactgcttcagcacttcatgcagctgttaattntggacagtatccctatggaggtttaatcttaaaccgtccaactcttagtaggcgattcatgcctgagaaaggttctgctgagtatgangagctgangaagaatccccagaaggcttacttgaagactattacaccaaagtttcagacccttattgacctttctgttatagaaatcttgtcaaggcatgcatctgatgaggtgtaccttgnngagagggac

SEQ ID NO: 14802 - DNA, 328 bp, Glycine max
gaagatcttatcatcgattgcatggcttatgggattactctgttctgaagtacgatgggcctaacttcgtcgacgctggcgcatacatagcatggagtattgcttcacactgtgcctgagcatcatgagaaatatgaagatcatgtccactctatcggcgagaaagcaagtgccgatactcagaaacggtatgcagcgctggatgcgaaggactggatcacgatgcccatagtacctctgacagataaaacgaaggattgactcgcacactagattctgacaaacatgtggtgcagagctgacaggaacccaataatctcataatgca

SEQ ID NO: 14803 - DNA, 395 bp, Glycine max
  modified_base (373)..(373): a, c, g, t, unknown, or other
ctcgagccgctcgagccgggaagaactaacaagaggcgtaagcgtaaacttgtccgaagaataacaccgggaaagaaagagagtgaagaagggtataagcgtccttgtgaaggcactagggtgttctgaactgatcctctccctgggtctggcactgtaaaattcaacgtcaaccccataatatacttgaagaaacgcttccatcttctctctatttgtttcaacttcagttatgcgtttctctctctagccagccatcatcactatgtcatccccaaactccgtccctcagtcccacgcgccgctccttctcccgcgccccgatgccgccgcccgccttcccatcctagcgctcctcctcggccgccgcggncactccgccgtggtccgggaga

SEQ ID NO: 14804 - DNA, 181 bp, Glycine max
tgaaggactaatttaaaataaactaagtatttggctacaacggggattaaaggctgaaactaaaatatagaccttgtgatacatagcatatgttgcgcttgacactgatgcatgtgcttcatgagacacatgaagatcatgtagactcttttgttgagaacgcaattatcgtaattaaaaa

SEQ ID NO: 14805 - DNA, 404 bp, Glycine max
gagaagctagagagaaagaattgatcgatgaaaatgcacggaggaaagaaagcgggagagtccattaaggaaacagctacaaacattggtgcttctgccaaggctggcatggagaagaccaaggccactgtccaagagaaggcagaaagaatgacagcacgtgatccggtgcaaaaggagtcggcaacccaaaggaaagaggcaaagatgaaccaggcgaagctggacaagcaggcggagcgtaagcataacacggtggccaaacagtccgccaccacggatgtgcacatgggacatggacaccacaccaccgtaaccgtcactggaaccgacacgtattccaccaccggagaatatggtaaacccatggggagccaccagacgtcggcaatgcctggccatgg

SEQ ID NO: 14806 - DNA, 424 bp, Glycine max
gttgaagctatgggaagcagattgggaagaagagtggtgcagttggcgaacctccccataaagcttctgatgccgaacagcttcaccaacatccacgaaatcgctctcaagaccattccttcggccacgaagatcgagatcaagcgcgtccttcaatccctctacggcttcgatgtcgataaggtccgaacgctcaacatggagggcaagaagaagaagcgtggtggcttgttgattgcaaaacccgactacaaaaaagcctacgtcaccctcaaaacccctctctccatttacccggatctctacccgatccgaatcatcgatgaggacatgaagaggatcaataagcaagccaagtccagcctcgttcaggaccacgaggcccacaccgaggcccaccaccactggctccatgaccgaagga

SEQ ID NO: 14807 - DNA, 396 bp, Glycine max
ctcaaaaaagagaagtgactgatgcaattgaaaagccaaacataaacgagtcaaatgctgttcaggataatgtttttcagcatcaccttcccttgcgtcaggaaattttggctcataaaaggaaggcagttactttgaaaagagaagggaaactaacagaagctaaggaggaacttccgcaggccaagctgttggagaagggcttggaggatggaaatatgctgccagacactgcctcttcctctgcctctgccactgtgaactatgcttcccatgcatcaaatgttgtacaaaagaaacaagaatcgtcaaatgttagtgcaaagccattgagtagtcgtgatcgatttaaattgcaacaggagtctctagggcacaaacgtcaagccctaaagc

SEQ ID NO: 14808 - DNA, 366 bp, Glycine max
  modified_base (358)..(358): a, c, g, t, unknown, or other
tttcctctctatgtactttgtctaaaaatataagaattaggaaatgctaaagaagcagaagaaacatatggagttcaacttgagaatatttagcaagttcgtgtagatgaaaactttaaatatttcaacttgagaaagaatgacagtccatttcccatgattgaaatgatgattttgtttgtactttgaccttatttttttaactggcttttgcttcttctgatattgggatttgggaatttgtcaccggtcctttttttctcattttgcccaacatgtatttgatcaagtatgtgggagaactgaattgaatagcaacacattactttttttatgtataaaaaaaaaaacctaacanaaaaaaga

SEQ ID NO: 14809 - DNA, 337 bp, Glycine max
cttggtgatgctcagcatgttgaagaggcagagaagataggactggactggatggatgtagaagccttgaaaaagctaaacaaaaataagaagttggtgaagaagctagctaaaaaataccatgcttttttagcatctgaagcagtcattaagcagattcctcgtcttttgggtcctggtctcaacaaagcaggaaagttccctacacttgttactcaccaggaaactcttgagtcaaaggttaatgagtctaaggccatggttaaatttcaacttaagaaagtgctctgcatgggagtagctgtgggcaatgttagtatggaggaaaagcaaatct

SEQ ID NO: 14810 - DNA, 317 bp, Glycine max
gggtcagttggctgggcaaaccctgtaaaaaggctaagaacagattctgggaagagaagaccaagccatacatagggtttccctttctcgggatataaggatggtaaataatggacatattgctactagtctcaggaagaattttagtggccctttcatagagtttacccccatactgttaatatagaattaggcctttaaaaaagtgcattttacggctacctaaatggttaaaatgtaagttctccaatttttttgtttggatatcttcatcgtgcagttgcagctacagctattaaaacttttctttagatgat

SEQ ID NO: 14811 - DNA, 309 bp, Glycine max
aaatttgtttaaattgtctcttgatgatgttgaaactcctaaaggttgcatgttggatcttaaaatttctcagtctaaaattgcactgtccaagaacacagttggaggaactattctgcgtagtgatctattggcaaattttctgacagagggcaattttagagcaagtgttgatttgcagcgcactcatcgtattaaaggaatgattaaaatggtggccacagttggtattcctgagaatacaggtatatcattggcctgtgctatgaatagttcttttagggggcgtgccaggtctgatatttacac

SEQ ID NO: 14812 - DNA, 429 bp, Glycine max
tgactcgttcttcttcgtcgttatcttcttcttttgttgtttgtgtgtttgttttttctctcacctgaaaatgtcttgctgcggtggtaactgtggttgcggaagcgcctgcaagtgcggcaacggctgcggaggctgcaagatgtacccagacttgagctacaccgagtcaaccaccaccgagaccttggtcatgggagtggcaccagttaaggctcaattcgagagtgctgaaatgggtgttcccgctgagaacgatggctgcaaatgtggagctaactgcacctgcaacccctgcacttgcaagtgaggtgttggagagctaaagcttcaagcagaaatggcccttaggaaatatgataaaaactatatgtagtttcaaactttcaaaatattgtataaggaataatgtgcacttttgtggtttgg

SEQ ID NO: 14813 - DNA, 311 bp, Glycine max
  modified_base (284)..(284): a, c, g, t, unknown, or other
ggggacttacgttagggaaacgccaccaaatgctgcgtcatctcatcaccatcatggaatctccaatgctcatgaaccaaatgctcgctccatataaaattaatgaagagtactgttcagtaggagaacaagacttcttggacttgattagcttaactctcagtgattggtgttagagtactgttgttgaggatggttaattttataattaagggctgggaattggggagttagtatatattcctaatcctaattatgtgcatctttaatttatggaataactntgttttttgttttaacttctgataaaa

SEQ ID NO: 14814 - DNA, 372 bp, Glycine max
atccttttatattactatagtttaagaaaggttcaccaattgtttcaggtgggttgaaatgatggctcctgttttctcaagagctgcttggcgttgcatttggtatatgatccaggtgcacccttctctcatttaatgttactgctgaagaattactataaacattgctttgctaagattactttatttattcaccattcatggtttactttattttacagaatgacttgatccatgcatggggtctagatatgcagctaggctactgtgctcaggcatgttaaaagctccttaatttctcgtttcagtttgatgagttccatttctacatgttgaatattcccctgatgccttaatcctcgttaatttttt

SEQ ID NO: 14815 - DNA, 346 bp, Glycine max
  modified_base (329)..(329): a, c, g, t, unknown, or other
tacaagacgacatttttaacatgcttgacgacacggacaatgtgcccgagcgtgactcggtgcagggtcttgactcagtgatcaaaagcttcgaggatgagataaatgctccaggttcggattctggttccggtgacccggcccaggaacccgactccggggagctacaatctaacttgggctatcttctagaagccttcgacgacgagctcgggttgccgccgacggtgggtgacggcgaggaaatgggtcgggctgccccggaaatggcggagcttgccaggttcgtgggatttgaagacgacatacccagttatgatgcattcggntttgggtcggggtttac

SEQ ID NO: 14816 - DNA, 392 bp, Glycine max
gctgctaaggaaagatacgagagggcaaaccaagcgacaagtgaagctgccaaagagagaaacaagcaggcaaataaagaggcaacaaaagcaaaagatgtcacaagagaaatggatcaacaaggcaatcttaaaacagaaaatgagacacaggacaatgaccagaagggttatggtggagcaaagtacaccattggtagtgtggaccacattactacaccatttattgtagaggccaatcttaaatcagaaaatcaggatcaagacaatggccaaaagggttatggtggagcaaaagacacaattggtagtgtagaccacattactacaccacttgctgaaaaggccaaagctgctggtagcaccactgctcagtatgttggggagaaagc

SEQ ID NO: 14817 - DNA, 285 bp, Glycine max
gagagggcaaaccaagcgacaagagaagcaagcaaagagagaaacaagcaggcaaataaagaagcaacaaaggcaaaagatgtcacaagagaaatggagcaacaaggcaatcttaaaacagaaaatgagacacaggacaatgaccagaaaggatataggggagcaaagaacaccattggtagcgtggaccacattactacaccattaattgcagaggccaatctgaaatcagaaaaatagatacaagacaatggccaagaaggttatggaggagcaaaggacaca

SEQ ID NO: 14818 - DNA, 347 bp, Glycine max
gatgatgaatgtcatagggctgagtctgagtctggtgttaacttcactggcagcagcgagcaccatcgtcaaagaagggcacagagttgtcgtggttgaatacgaccaaggtggccatcagaacaccaaaatctcaatatcaccagaacaacctacgcatgctaatcttaaagatcccatttgcgacgcctatggaaaatgcaagcacaaaatcgtggatgcaatggagaagtctcaagaggtcatccatgagaagaaggacgagattgccgccaacaaggaggcagcacgccaagttgctggtaaaaccaagaagagagtgtatgataaaacccgtcatgtccacg

SEQ ID NO: 14819 - DNA, 305 bp, Glycine max
cgtcattatcctaaaaacttgcagattttcacatcccaaacaacatgaagggaaagttcatgtttctgtcggagctcctttgtgccacttttcatgtctgcttctctattatcgaccgattagttgccaacggcaactttgagttgggtccaaagcccttcggcctaaaaggaacagtggtggtgggcgggagccactcgatcccagaatgggagatctacggctttgtagagtacataaaatccggccaaaagcaaagtgacatgttgctcgtcgtcccagagggagcctacccggtgcgccta

SEQ ID NO: 14820 - DNA, 225 bp, Glycine max
aagaaataattgatctttgaaaatgcagggaggaaagaaagctggagagtccatcaaggaaacagctgcaaacattggtgcttctgccaaggctggcatggagaaaaccaaggccactgtccaggagaaggcagaaagaatgacggcacgtgatccgatgcaaaaggagttggcaacccagaggatagaggcaaagatgagccaggcagagctggacaagcaggc

SEQ ID NO: 14821 - DNA, 355 bp, Glycine max
  modified_base (299)..(299): a, c, g, t, unknown, or other
attcaaaggccatagtggtactagtgattaatgaaggagaagcaaacattgaacttgttggcattaaagaacaacaacagaggcagcaacaggaagagcaacctttggaagtgcggaaatatagagctgaattgtctgaacaagatatatttgtaatcccagcaggttatccagttgtggtcaacgctacctcagatctgaatttctttgcttttggtatcaatgccgagaacaaccagaggaacttccttgcaggttcgaaagacaatgtgataagccagatacctagtcaagtgcangagcttgcgttccctgggtctgcaaaagatattgagaacctaataaagagccaaag

SEQ ID NO: 14822 - DNA, 407 bp, Glycine max
  modified_base (328)..(328): a, c, g, t, unknown, or other
agttgtggtcaacgctacctcaaatctgaatttctttgctattggtattaatgccgagaacaaccagaggaacttcctcgcaggttcgcaagacaatgtgataagccagatacctagtcaagtgcaggagcttgcattccctgggtctgcacaagctgttgagaagctattaaagaaccaaagagaatcctactttgtggatgctcagcctaagaagaaagaggaggggaataagggaagaaagggtcctttgtcttcaattttgagggctttttactgaattagtatgacctaaaatgtatgctgtaataacttcataatgagccanggaaggattgggctatggtacctttgactaaaccttaacctttgattaattaaatgaccggctattaagcgcttggttt

SEQ ID NO: 14823 - DNA, 290 bp, Glycine max
tcacctcatcacatctgaatatctcacgccgaagaccgtgcgttgaaatcttgcaaggacgagatccaagcatcgttgttttccttcccagaatttacgctcttcttactatcatcaagatacaaaatggaatatcgacggaccagtggtaggcaggaaaccggtggccgtgacagaagacaatctaaaagggaacaggcatatcaggactctcttattgaggatttgtcacaggattttcgtttgccaatcaaccacaggccatcagaaaatgttgatctggacaacgt

SEQ ID NO: 14824 - DNA, 271 bp, Glycine max
ggctcgaggaactattctgcgtagtgatctattggcaaattttctgacagagggcaattttagagcaagtgttgatttgcagcgcactcatcgtattaaaggaatgattaaaatggtggccacagttggtattcctgagaatacaggtatatcattggcctgtgctatgaatagatcttttagggggcgtgccagttctgatatttacaccatctgctctcaagactgtgaattatggaatcctgcttgcacaaaagccatgactatgtca

SEQ ID NO: 14825 - DNA, 405 bp, Glycine max
caataccaaaatgaccaagcttacaattctcctcatcgctcttctcttcatcgcccacacctgctgcgcctccaaatggcaacagcaccagcaagagagctgccgcgagcagctcaaggggatcaacctcaacccctgtgagcacatcatggagaagatccaagctggccgccgcggcgaggacggcagcgacgaagatcacattctcatcaggaccatgccgggaagaatcaactacatcaggaagaaggaaggaaaagaagaagaagaagaaggacacatgcagaagtgctgcagcgaaatgagcgagctgaaaagccccatatgccagtgcaaagcgctacagaagataatggataaccagagcgagcaactggaggggaaagagaagaagcagatggagag

SEQ ID NO: 14826 - DNA, 386 bp, Glycine max
attctctccattgtctttgaacactcatcaccatggccaagcttgttctttccctttgtttccttcttttcagtggctgcttcgctctgagagagcaggcacagcaaaatgagtgccagatccaaaagctgaatgccctcaaaccggataaccgtatagagtcggaaggtgggttcattgagacctggaaccctaacaacaagccattccagtgtgccggtgttgccctctctcgctgcacccttaaccgcaatgcccttcgtagaccttcctacaccaacggtccccaggaaatctacatacaacaaggtaatggtatttttggcatgatattcccgggttgtcctagcacttatcaagagccgcaagaatctcagcaacgagga

SEQ ID NO: 14827 - DNA, 316 bp, Glycine max
catgattggtgtgcagcagtgagaaaactgttgaacctactgcttgatggaactgtaaatacaggagatcatccttccttgtatctcgcgctttcagagatgggtctccttcacaaagctgtaaggagaaacagcaagcagttagtggagtgtcttttgagatatgttcctgagaatatttctgataaactaggacctgaagacaaggcactggttgatggcgagaatcagaccttcttgtttagacctgatgttgttggtcctgctgggttgacaccactccatatagcagcccgggaaagatggttctgaggat

SEQ ID NO: 14828 - DNA, 439 bp, Glycine max
gtgattttctcaagagaaactttaagcagatgtctaatgttttgtgggtggctcctgaggacaaggcgagtttatggtcacaacttcattatgtttcgtgtaataatctggaaatgcaagaagcttatcttgtcaatctcgtaaatgtgttacgagaattgtatttgcacagtccagaggaagctcgccaattgagaaggaaagctctctctcgtattgaatggctgcaaaaagctgatgtgcctaccatagcacagattgaagagttccattcgatgcagaggatgatgaatgctcctgattcaaatgataatattgatttactggtgagcattgatttgttgggtttacaaggaacaggtaaagcttttccaaacaaaattggttttgatgataagcctgtggtggctaacacacaagaattctttgatggaaaatt

SEQ ID NO: 14829 - DNA, 275 bp, Glycine max
ctaattttcaaataagtcgaactatctaaatataaaactctgaaccggttaaaatagtttaaaatcaattcagttcaatttttttaccaaactaatttttgcacacccctaaccaaaatcagttgggttggttatttaagctttatgtaaaaaaaaaaaaaaaaaaaaaaaggtgtgaatgaaaacattagatagcttaaagagaagtaaagcattacatatatttgaaatatgatgtcataactcataaggcataacatgctatggcttggttc

SEQ ID NO: 14830 - DNA, 286 bp, Glycine max
aagaaaacaattatcagcaataattaaattataggcacgattctggcatgtccaattctcaacagaatgagcttcattattcaaccgccaacggggacgagaggtcaaacccttgtttagccaacacgcgctgcagcttctgctttccctgttgcttcggttcccgtcgcgactcggccaccctcgggttcgggtggtgggagcgcgtgcgagccacgtcgtcatggtccgagtcgcgcttcgaggcgcaaccggtgaccgggagttccggtgggccgtggtggtc

SEQ ID NO: 14831 - DNA, 389 bp, Glycine max
gatagttcagtgtctacaataccaggtgattttgtcattggtgttaagttgacaaccataaacaatatgtgtgcatatgggctcaatcctggtatttcagttctcgtcttttgggcaccattcctcagtctatttcacagcaaactgtttggaatcaaatggcaacagtgagaacaccattgaattttgatcctagcaagcaaagcttttgtcaattttctattgaccttcttggtggaggaattttagtggacaaaactggagattggatcacacttatacaaaattctccaattagtaacttgttgagagttgctgcttggaaaaaaagctgtttaatggttaagattgtgatgtctgggaatgcagcaatcaaaaagaatgattgg

SEQ ID NO: 14832 - DNA, 400 bp, Glycine max
gcagaaagagaagcattagcaaaagcaagaagaactagtctaagcagaaatggcctcttcagtgatggcatctgtggccctcaaacctgcccctttcactgttgagaagtcctcagttagaggccttccctccctctcaaggaactcctcttcattcagagttgtggccagtggtggcaagaagatcaagactgacaagccttatggaattaatggtggcatggctttgagggaaggagttgatgcatctggcaagaaaggaaagggaaagggcgtttaccagtttgtagacaaatacggtgctaatgtcgatggttacagtcctatctacgacaccaaggactggtctccaaccggtgatgtctacgctggcggtacgactggcttggctatctgggct

SEQ ID NO: 14833 - DNA, 366 bp, Glycine max
ctctacaatggcctcagccgcatcccccaccactttctctctcctccactccgccaccccttcctcctcctccaccgccacctccgcctccccctccccctcgcgcgtgcagctcacctcctccctccgcgcccgcccgctgcgccgcctgggcttcgccgcggcggacccgctgctcgcggcgagtgtagcggcgcgcgtggcggcggtgagaggaggaggaaagggcgcgaggggggtggtgtcgatggcgaagaagagcgtgggggacctgagcgcggcggacctgaaggggaagaaggtcttcgtcagggccgacctcaacgtcccgctcgacgacaaccagaacatcaccgacgacaccag

SEQ ID NO: 14834 - DNA, 339 bp, Glycine max
aaatggcaacagtgagaacaccattgaattttgattctagcaagcagagcttttgtcaattttctattgaccttctcggtggaggaattttagtggacaaaactggagattggatcacacttatacaaaattctccaattagtaacttgttgagagttgctgcttggaagaaaggttgtttaatggtcaagattgtgatgtctgggaatgcagcagtcaaaaggagtgattgggcctcattggtacaagtgtttttaacaaacagcaacagtacagagcattttgatgcatgtaagtggacaaaatcagaaccacattcctggggaataatcttcccaa

SEQ ID NO: 14835 - DNA, 100 bp, Glycine max
caactacgtagtcgaggttggaatattttgtactgaatatcctcatgttttcttcaagtttagttaaaaaataatagatactcagcatgtcatttctctg

SEQ ID NO: 14836 - DNA, 340 bp, Glycine max
agcaaatcctaaaaagttcactgagatatatagaactatcttcaatttcacaaaatgaagaaagtgtttgtcacatttgtagctctgctagttgtatttggtcttacagtgacagcttcagagtcaaagccaccagtcacaacaaattcagcaccaaatgactacaattgttcacaagtgatgaataacttgtttggttcgtgcgtagattacctcattggtggagatgctgttccttcaggtgtttgttgccaaagtgttaatgcagtgaaagcatcaacacaaacacaaattcaacgagtggctgcatgtatgtgctattacaacgtagcaactaaac

SEQ ID NO: 14837 - DNA, 317 bp, Glycine max
caccaccagcacgctctcttccatttttccgcaaaacaaacacagttcacatacttttccctcactttctcggcggccaaacgccataaaaatggcgtcgaaggtggcgctgatggcgctgttctccgtctcgctcatgttctctccgtcgcaatccgcggacttcagcgtagatataggctacgaatccgtgaatgaggcggaggtgaacctgatgcccagccaatccctgatctccgtcatgagcaacgagatgtccaaacgcagatcgacggcgctgatctccttccatgacggcgaccgcatcctcagagagg

SEQ ID NO: 14838 - DNA, 355 bp, Glycine max
  modified_base (284)..(284): a, c, g, t, unknown, or other
cgtgatccgatgcaaaaggagttggcaacccagaagaaagaggcaaagatgagccaggcagagctggacaagcaggcggcgcgtcagcataacacggcggcgaagcaggctgccacggcagggcacatgggacaacccatggggacccatcagacgtcagctatgcccggtcatggaaccggacagcccacgggccatgtcaccgagggagtggtgggctcacaccctattggaaccaacagaggcccgggtgggactgctacggcccataatacccgtgcggngggaaacccaaatgattatgggtatggaactgggggtacttacaattaaataatgatgatttagaaaagga

SEQ ID NO: 14839 - DNA, 251 bp, Glycine max
cggctcgagattaaaaatttcacttttatatccatgtaaattgcatggaggccatgtgtttatttataagaactaattctattgttaaaaaatcaatacatctttagtaaattaatgtaattcacaattatatataaaattcaaaattagtgtcattactataactgttcaatcaaaatatctatcaaaagttaaaagcgaatagaatggataatcttcaatttttctatggctaaaaattcaattatacc

SEQ ID NO: 14840 - DNA, 328 bp, Glycine max
ttatcttttagacttccgcatattggcgttcaactccgaaccgggcaccctttttctgccttaccatgcttacgctgattaccttagcgttatacaaaacgggactgccattcttaccttggtgaacaacgacgactgagactcttacaacctttaatctgtcgatgccctaatagtccctgcatgaaccacatactatgtggttacccctagctacgacgagtttttcttaatgataacactcgtcatatcttttaacaaacccggtagatttgagagtttctttctatctatcactcaaactcaacatttctacatgcaagggttc

SEQ ID NO: 14841 - DNA, 229 bp, Glycine max
ccagtgcatgaccttcaactggcttgtagtgctgttttactgctccccttatcattttcatttttttttttttaaacttctgcacacaagcacttgctttcctttttccaagcaatatatactatagtaactggaagaggtctatccgggtcagcataattttctagtatgtgatgagttaattttatagaacaacctagcctacaagttacaacaggctgtatttaat

SEQ ID NO: 14842 - DNA, 210 bp, Glycine max
cggctcgagcggctcgagctcagcaaaaaacactgtagcttccaagctcggatacggcgacagcactgaaacaactcaaacaagccatcaagaacagaacacaggcaatgaaaaaccatcaacaatctcatcagcaaccttctgcaatcactgataaagctgtaactgccaaaaatgttgtagcttcaaagctcggatatggcgacaaca

SEQ ID NO: 14843 - DNA, 390 bp, Glycine max
  modified_base (345)..(345): a, c, g, t, unknown, or other
ggaaggtggtgacattaacaaacagtacacaaacatcaccttcacaccaacacaggcagatcgctttgtcttggcattccgaaattggctgaggcgacatggcaatggccaaccagaatggtttggaaacagcagcgaccagccattgccatcaactgtgttatcaaaacgtcagatgttggatagatttgaacagcacactctcaagtgttcatcatgtaaagcagcatatgagggattccaaacatggcagaaagtcctaattggggcaacagttgtgttttgtgcaacatcagggatcccatcagatttccagttgcgtgtacttttggctggactcgcagntgtcagcgcagccatagcttttgccctataccactccaaaagaat

SEQ ID NO: 14844 - DNA, 389 bp, Glycine max
gtcccagtcttgcaccttaaaaccatccaatccaattgaattctccagagagaagaagaaacttaatcgatcatcacttcacttcactaatacatcatggcagacgagacccagaacaagtatgagagctctgaggttgaggtccaggatcgtggtgtttttgactttctcggtaagaaaaaggatgaagaagacaagcctcatcctcaggaggaggtcatcgccaccgagtttcaaaaagtcactgtctcagaccaaggagagaacaagcacagcctcttagaaaagcttcaccgatctgacagcagctctagctcttcaagtgaggaggaaggagaaaatggaaagaaaaggaggaggaggagaaaggaaaggaagggcttgaagaa

SEQ ID NO: 14845 - DNA, 336 bp, Glycine max
gcttggagaaccagcatcgccagatgcctatgagatgctatctagctgggaaccaagagcaagagatggtaaaatatcacccagagcaaggaggtcatcaaagccggagaggaacgcatcaccaggaagaagagaacgaaggaggcagcatattgagtggcttcaacctggaatactcggaacatgcagtcatcgtggacaagcagatagcgaaaaacgtacaaggagagagcgaaagcgaagacaagggagccattgagacagagaaaggaggcctgagcgtgattaaaccacccacggacgagcagcagctgagaccccaggaagaggaagaag

SEQ ID NO: 14846 - DNA, 398 bp, Glycine max
cggctcgagcggctcgagctcagcaaaaaacactgtagcttccaagctcggatacggcgacagcactgaaacaactcaaacaagccatcaagaacagaacacaggcaatgaaaaaccatcaacaatctcatcagcaacctctgcaatcactgataaagctgtaactgccaaaaatgttgtagcttcaaagctcggatatggcgacaacactgaaacaactcaaaccactctagcaaggaatcaagaagagaacacaggcaacgagaaaccctcaacaatctcatcagaaacctctgctttagctgataaagatgcctcggcaaaaaacagtgttgcctctaagcttggtttcggtgacacagcaggaacacatgaagagaagagaactaaccatgctg

SEQ ID NO: 14847 - DNA, 313 bp, Glycine max
ttaggttcttgcatgatcgtgctggtgaaggtgatggtgaactgcagagcattctgtcacgttctgttcaagatttgttggctgtcactgaacagatttatgccatcactgaccgcacaaaactcgtggatgccattaagtgcttaaaggctgctatgttaaatgctgttcctattgttagagcctctgatgttgatcaagatgatcacaagcagcacataaatgcaagtctagctcattaattctcgatcccttaattgttattccttcctaattttggtgtcacataccttacgtacggttttgcagggca

SEQ ID NO: 14848 - DNA, 303 bp, Glycine max
agaacagttggtgcaactaatgtttgaaacattcaatatatcaggattttatgcctcagaacaagcagtgttatcactctatgctgtgggacgtatctcaggctgcactgttgatattggacatggaaaaatagtggaaagaatcatgtacttaggctgctatattcggtaacataggttcctaggattaatttatcagcagtttcacagttccaccatgccagatattgcaccggtaattgagggtgctgttcaccacatcgcctcgagaagatttgagtttggaagtactgatctaactaa

SEQ ID NO: 14849 - DNA, 383 bp, Glycine max
  modified_base (343)..(343): a, c, g, t, unknown, or other
cagccctccaataatgttgtcagtgatggcaagcatgataatgtgactggtaaatctttagcagactctaaagtttcccctaaaaaggatgcttttcaggtgaagtctggcgtctgggctgattcactaagccgtggactgattgatctcaatataactgctcctaaaaaagtatcccttgtggatgttggaattgtgggtggattgagtgatggatccgatgaaagggagaaaggccctccaccttcattttacatggggagagctatgggttcaggatctggtcttggaatgggtaggtctggattcactccttcacagccaatagctggagacgactttntctcaaaccttggaaaccaacaacaataaatttggtgggg

SEQ ID NO: 14850 - DNA, 464 bp, Glycine max
aaaatgcaatctatgtccctgacgctgagcaagaggctctccaattcaaagcctctcttcagaatctcttccagcctcgtcgctcacgcatcctccgccacaacctctccgccgccaccttcgccgccagtcccctctccctccgccctcaacagcctcctcaccgctccgtggtccgccactcagtcacgcggaatcacgctttccggatctgatattagagtcgggaatctcattggaaaccgaggacgcgctcacgagggttctaaaactgtaatcgccttctggaaggaccggccaaagcacttcctgaggttccgcctcaaagggtacttggtatgccaccagtgctactacaggaggatggtgccgaaaggaaagaacgaaaccgtggattgagtaaggcaacgaagaccaagagagagcagctcctaaaagctactgcaagtgcctctcttcttcta

SEQ ID NO: 14851 - DNA, 192 bp, Glycine max
tgaagaagaagaagaagaccaagacgaggatgaggagcaaggacaagggaggccagaaaggggaaggtctgagtcttaaagaggaccacgaagaccttagaattagaacccctttcacttcaactcttaaagggttccaactttttttaaaaacccatattggcaacgttggggtcttcaaaaggtcaacca

SEQ ID NO: 14852 - DNA, 213 bp, Glycine max
aaaaaaaaaaagaagaaaaaaaaaaaaaaaaaaaaaaaaaaaaaaggaaaaaaaacaaaaaaaaaaaaagaaaaaaaaaaaaaaaaaaaaaaaaaaaaggggggaaacaaaacaagagaacccagagaccagaaaaataaaatagggtgagaaacttgcaagcacaccatggcacacaaaagagagagactgatgccaacatagaccgaaaca

SEQ ID NO: 14853 - DNA, 381 bp, Glycine max
gacatattcatgaacactaattaagtggttctaaattgaaaagctttctagctggtcataatatcaccattactgatggtattgacaaaactagtgcaactttgcaatttagaaagttagcagattgtgattttctcaagagaaactttaagcagatgtctaatgttttgtgggtggctcctgaggacaaggcgagtttatggtcacaacttcattatgtttcgtgtaataatctggaaatgcaagaagcttatcttgtcaatctcgtaaatgtgttacgagaattgtatttgcacagtccagaggaagctcgccaattgagaaggaaagctctctctcgtattgaatggctgcaaaaagctgatgtgcctaccatagcac

SEQ ID NO: 14854 - DNA, 316 bp, Glycine max
aaattcacaatttttggttaaacttcatctattgaccgtactacacccgcgagaactgcaccgaactcgtggaataaatcactgcaccgtcccactccgtaaaaccctaattcgttcacacctaaacccttttccttttgttgtttttcttcacttccaaggcttcactttctcagaattaaaacaaatgcttttcttttttctttttcttttttggtttcttattcagctggttatttattctccttcatcttcacgccctgttccttgtcgaggaaaagacccattccatcacccatgtatgatgtaacaaaca

SEQ ID NO: 14855 - DNA, 295 bp, Glycine max
atctccgagactaccgcattttggagttcaactccaaacccaacacccttcttctcccccaccatgctgacgctgattacctcatcgttatccttaacgggactgccattcttaccttggtgaacaacgacgaccgagactcttacaaccttcaatctggcgatgccctaagagtccctgcaggaaccacatactatgtggttaaccctgacaacgacgagaatctcagaatgataacactcgccatacccgttaacaaacccggtagattgagagttctttctatctagcactc

SEQ ID NO: 14856 - DNA, 226 bp, Glycine max
  modified_base (212)..(212): a, c, g, t, unknown, or other
ataacaatgtcgttgattccaagtttcttcggcaccgggcgaagaaccaacgtcttcgaccccttctccctcgacgtgtgggacccattccatggcttccccggcaccaccgccctctccgctccgcgctccgagacggcggccttcgccaacacgcgcatcgactggaaggagacggcggaggcgcacgtgttcaaggcagacctgccggngctgaagaaggaag

SEQ ID NO: 14857 - DNA, 339 bp, Glycine max
  modified_base (297)..(297): a, c, g, t, unknown, or other
ggaatttctctgttcattgccactaatatatgtgaaaacatgatatggaaagcatttagccccaccaccattaacagtggacgtggagctgaatttgagggtgctgtcattgctctattccatttgttgataactagaacagacaaggttcgtgcccttcgtgaagcattttaccggcaaaaccttcccaatgtgacaaatctgcttgctaccgttttgatcttcctaattgtgatatacttccaaggattccgtgtggttttgcctgtgagatcaaagaatgcccgtggacagcangtgtcgtatccaatcaagtattttatacctccaacatgccca

SEQ ID NO: 14858 - DNA, 233 bp, Glycine max
tgagaatttaacttttcaatgccactaatactatgtgtgaacggggtatgaaaagcatttaaccggaccacccttaacagtggtcgtgtaacaaaatgaaagggagcatatattgcactactccatgtgtatatatctataatatagagggtgggagcacaaatagaagcatttgtcacgataattgttattaatgtgacaaataatttagctaccgtactgctcttcttaat

SEQ ID NO: 14859 - DNA, 299 bp, Glycine max
cccgcctcggtgatgcaatccgccgcaaccgaaaacctccgcgccggcgtcgtgggccgccaagacatctccgacgtggcgaggaacgaaggcgtgagcgtgaccgaaaccaaagtgggctgccaccgcgtcatcacggagttcgtgggaagacacgtggtggggcagttcgtggagcccgacgtcccaatgaacacccaaggcaccgcgctggaccgtgacgccataaccatcggcaaggctttcgaggcatcggcgatagccgaagcaggcgacaagccgttggatgaaagcaaccc

SEQ ID NO: 14860 - DNA, 290 bp, Glycine max
gcgcattactatgtgcaatgagtgtgtttaaatattacatactagttcacaaatgcaaaaggacaatcgctcctcagatatcaacaaaaagattcgcacagcacttgggaaaggtaagaaaattgtttttcttactagagttgatccttttccagtagctctactggctgttctttttggcgttaaaaatgaaattctgagttccaacgccactaaccctatgctgacgcgacttcttgagaactgtaagagtctcaaatatctggtggataagtgtcctttggcattgg

SEQ ID NO: 14861 - DNA, 329 bp, Glycine max
ctcctcacgagtacccaattctgggtctcaacctgttgagattacttgtgcagaataggattgctgaattccatactgagttggaattgctttcatctgctgctcttgagaatccttgcattaagcatgctgtggagttggaacaatcttttatggaaggggcttacaatcgtgtcttgagtgcacgacaaacagtgccacatgatacatacgtttatttaatggatcttttggcaaaaactgtcaaagatgaaatacctggttgcagggagaaggcttatgactatttttaaataaaggttgttaaccaaatgtggctgtcctctttt

SEQ ID NO: 14862 - DNA, 311 bp, Glycine max
ttgagagcacaatttggctactagccaaagcttatgtcatcgtaaatgactcttgctaccatcaactcatgagccattggttaaatactcatgcggcgatggagccattcgtcatagcaacacaccgacatcttagcgtgcttcacccaatttacaagcttctgactcctcactatcgtaacaacatgaacatcaacgcacttgccaggcaatctttaataaatgctaatggcttaataaaaccaacctttttgccttaaaagatttttgggaaaatgttttcggcggttattaaaaatggggttttaatt

SEQ ID NO: 14863 - DNA, 374 bp, Glycine max
  modified_base (294)..(294): a, c, g, t, unknown, or other
cgccaattgagaaggaaagctctctctcgtattgaatggctgcaaaaagctgatgtgcctaccatagcacagattgaagagttccattcgatgcagaggatgatgaatgctcctgattcaaatgataatatcgatctactgttgagcattgatttgttgggtttacaaggagcaggtaaagcttttccaaacaagattgtttttgatgataagcttgtgttggctaacacacaggaattctttgatggaaattttccagtggattcttggttaccaatttttgtgaattgtctntatcctgtaagtcaattaccttcagacgctgtcgttgtaaatgttacatgtggtagtggacgtgtggtttacccaccact

SEQ ID NO: 14864 - DNA, 132 bp, Glycine max
tggaatagaagtagattcaactggaaaagaaatatgccctctcactggtgtgcaatcacccaatgagctcgataaggggattggactagtctttacatctccattacatgccctttttatcgccgaaagcta

SEQ ID NO: 14865 - DNA, 407 bp, Glycine max
  modified_base (378)..(378): a, c, g, t, unknown, or other
acggcactgagttattagtaattgtgttgtgttgtgttgagcagagagaaggatcaagaaaggataagaagaaagagggaatagggttagggttagggttagggttaggttgaggatgccgaagaacaagggaaagggaggtaagaacaggaagaggggaaagaacgaggcggacgacgagaagcgagagctggtgttcaaggaggacgggcaggagtacgcgcaggtgctccggatgctgggtaacgggcggtgcgaggcgatgtgcatcgacgggacgaagaggctctgccacatccgcgggaagatgcacaagaaggtgtggatcgccgccggagacatcatcctggttggactcagggactaccaggacgacanggctgacgtcatcctcaagtacatgcccg

SEQ ID NO: 14866 - DNA, 330 bp, Glycine max
ctagtgggtgctgtcagagttcaacattttctgagttcactcactttttctcgcttccaaccttccttttctctgcgagcattttccgctatggccgaagaatttgtgaagggcactgttcatcaaaacggcgtcgctgtcatcaccctcgatcgccccaaagctctcaacgccatgaacctagatatggatgtaaagtataaaagttatcttgatgaatgggaatctgatccaagggtcaaatgcgtactggttgatagtagctcgcctcgtgccttttgcgctggtatggatataaaaggggtggtggttgaaatacaaaaggagaaa

SEQ ID NO: 14867 - DNA, 344 bp, Glycine max
caatatcctagtataccttaataaataatttaagatactatgatgagagcacggttcccattactgttgctgggacttgttttcctggcttcagtttctgtctcatttggcattgcttactgggaaaaagagaaccccaaacacaacaagtgtctccagagttgcaatagcgagagagactcgtacaggaaccaagcatgccacgctcgttgcaacctccttaaggtggagaaagaagaatgtgaagaaggtgaaattccacgaccacgaccacgaccacaacacccggagagggaacctcatcaacccggtgagaaggaggaagacgaagatgagcaaccacg

SEQ ID NO: 14868 - DNA, 262 bp, Glycine max
gcgtcccactatctccaacggatatggtcgtttaactgaagttggtcctgacgatgatgaaaagagttggcttcaaagactcaatctcatgcttacctttaccaacatcacccagagatctatgagtactattcactacaactcacatgcaacgaagatagcactggtgatcgatggcagagggcatcttcaaatatcatgtccacacatgtcatcaaggtcgtcacactcgaagcatgataagagtagcccttcataccat

SEQ ID NO: 14869 - DNA, 422 bp, Glycine max
  modified_base (303)..(303): a, c, g, t, unknown, or other
  modified_base (310)..(310): a, c, g, t, unknown, or other
  modified_base (381)..(381): a, c, g, t, unknown, or other
  modified_base (385)..(385): a, c, g, t, unknown, or other
aaaggatcaacttgggatgaaatagactatgaatttcttggaaatctgagtggtgatccatacatccttcacacaaacgttttcagccaaggcaagggggacagggaacaacaattctatctatggtttgacccaactgctgatttccacacttactccatcatgtggaacccccagaggattatattctcagttgatggcactcccattagagagttcaagaactcggaggctattggggttcccttcccaaagaatcagccaatgaggatatattctagtttgtggaatgctgatgactgngcaacangaggtggacttgtgaagacagattggacacaagctccgttcacagctttctacagaaacttcaatgctgangctngcatatggtcttcttgagcatcttcttgcgctaaaac

SEQ ID NO: 14870 - DNA, 384 bp, Glycine max
  modified_base (370)..(370): a, c, g, t, unknown, or other
acctcatcaaaaggaagaggaaaagcacgaatggcaacacaagcaggaaaagcaccaaggaaaggaaagtgaagaagaagaagaagaccaagacgaggatgaggagcaagacaaagagagccaagaaagtgaaggttctgagtctcaaagagaaccacgaagacataagaataagaacccttttcacttcaactctaaaaggttccaaactctcttcaaaaaccaatatggccacgttcgcgtcctccagaggttcaacaaacgctcccaacagcttcagaatctgcgagactaccgcatgttggagttcaactccaaacccaaacacccttcttctcccccaccatgctgacgctgattacctcatcgntatccttaacggga

SEQ ID NO: 14871 - DNA, 216 bp, Glycine max
tcatagcagaaatcggttatgaaccttgcaaacccagtgaggatgacaaggaaaactactaatgaacaagtgttatgcatgtaagctctctctccaacggacaaagccccctttatgctttgtttgttatgtaaggaatgactaaataaacttggaataaaacttcctctcttttcgtggcccataatttgctttctgcaaatctgggtcttcttt

SEQ ID NO: 14872 - DNA, 398 bp, Glycine max
agcatttggaaatttggctgatgacaccatcaattttgaggcttttccccacaagctggtgcagtttggagagattcaggaaaaagttgtgttgaaattttcacaagaggaatttcttacagcttggtcaactcaggtgcgtcccgcaacgactctgttggctgatgggtgcccatatttgtatgctatggtgcatgatagttcagtgtctacaataccaggtgattttgtcattggtgttaagttgacaaccataaacaatatgtgtgcatatgggctcaatcctggtatttcaggttctcgtcttttgggcaccattcctcagtccatttcacagcaaacttgttggaatcaaatggcaacagtgagaacaccattgaattttgattctagcaagc

SEQ ID NO: 14873 - DNA, 398 bp, Glycine max
attttgtacaacaaaatcgtagtcgaacatgtgactttcaggttattaacacgacactctaaccaattaaactaacggtccaattatcttataaaatgaataatgttattatatataacactaagtttttttaatgtatatttaatgtgtatgtaaatttaaataataaattttttgacaattagttttgatataactcatacgaattatttaatctgtatactttttttataaataaaaaatatttactattaaaaaaataatttattaatttttttttaaaaaaaacttacggatcacgtaatccttatgagttaactcatacggattatgtgattcatatgagtcatacggattatgtgatccgtaaaaataaaaaacacttaagaatatttttg

SEQ ID NO: 14874 - DNA, 366 bp, Glycine max
gttcgttcgggcgtttgtcccatttgtggctagtgtgctgataaaagcgtggaaggaatcagattgcagtggtgacatggaagtcatattggggggcatggcttctctggaggatgagatttcatggttcaagacagaagccaacaagtggggtatttcactttctgacgttgttcctcagcaggctaacaaaaactattgtgggttgctggaaagtttaatgagtccagacgcggaatatactgtggctattacagcattttgggctattgaaacggtgtatcaagagagctttgcccactgcattgaagaaggctccaaaaccccaccagaactgaaggagacttgtgtaagatggggcaatga

SEQ ID NO: 14875 - DNA, 407 bp, Glycine max
aaagattttcatttatacaccgggggaatttatgatggagaaaactgtacaagtccgtatgggattaatcactttgttttacttgtgggttatggttcagcggatggtgtagattactggatagcgaaaaattcatggggagaagattggggagaagatggttacatttggatccaaagaaacacgggtaatttattaggagtgtgtgggatgaattatttcgcttcatacccaaccaaagaggaatcagaaacactggtgtctgctcgcgttaaaggtcatcgaagagttgatcactctcctctttgagccgtaaaggttcaatacaacgagtgcttgttttcttagggacaagcattgtacttatgtatgattctgtgtaaccatgagtcttccacgttgtacta

SEQ ID NO: 14876 - DNA, 322 bp, Glycine max
aaaaaaaaaattaaaaaaaaaaaaaaaaaaaaaaaaaaaagaaaaaaaaaaaaaaaaaaaaagaaaaaaaaaaaaaaaaaaaaaaaaaaaaaaaaaaaaaaaaaaaaaaaggaaaaaaaaaaaaaaaaaaaaaaaaaaaaaaaaaaaaaaaaaaaaaaaaaaaaaaaaaaggggggggccccaaattggaaaagggtgtccccggaaaaatatgcgagacccgggacttagggggttccaagtgttaaataggggggggcttaaaagagctgacaaaaaaggggccgaaatcatttcctgggaaaaaaggggtaccccaaaa

SEQ ID NO: 14877 - DNA, 379 bp, Glycine max
catgcatgtgtgtggtggacactgtaaccgtgccgtcacttatgccgctctgcttggtggaaggatctgcgaacttagagcatatgactctcgggtatattaacttactatgttctatagtgcctgctctatagttgaggcttgtcactaacaacatgagaccacctgtgatgacatagtcaataaggcttggagcgattcactggcttgaacttaaaattgctttcacatttgggctcatatacacagcttatgctacttgtattgatcatcacacgggtagcgtcggctcaattatagcctgatctatcgcattctcggtcactgactacatgctctctggcggtccgcttgatcgagcatgcttaaatcactctaa

SEQ ID NO: 14878 - DNA, 271 bp, Glycine max
  modified_base (216)..(216): a, c, g, t, unknown, or other
gttgcgtgagaagcagtgtggaggtggctgataacggggaatgtatttagctttgagagtctttaaattttctgtatttgttgtaatgttagtagttccttaaattggccagatggagtttatgtgtttgtaaatgcagggatgctaacggaataaaatggccacttgtattgctatcccttgtgctagcataatagaaagggttgaatcgcgctncaaagctctcacatttcgtctggtgtacacagactttgctactgctattgatcct

SEQ ID NO: 14879 - DNA, 182 bp, Glycine max
attaaaaaaaatttaaaatttaaaaacaaacaaaacacacagggaattttgtttataacaagcggggacttttgtcaattttctattgaccttctctataagaggaatattactggacaaaaactcgggattgtttcacacttattacaacactctgctatttaattactcgctgtgccctt

SEQ ID NO: 14880 - DNA, 271 bp, Glycine max
gtttggaatcaaatggcaacagtgagaacaccattgaattttgattctagcaagcagagcttttgtcaattttctattgaccttctcggtggaggaattttagtggacaaaactggagattggatcacacttatacaaaattctccaattagtaacttgttgagagttgctgcttggaagaaaggctgtttaatggttaagattgtgatgtctgggaatgcagcagtcaaaaggagtgattgggcctcattggtacaagtgtttttaaaca

SEQ ID NO: 14881 - DNA, 284 bp, Glycine max
aaaattcttccaccaagttatgggtttccttgtgttgcttcttttctccctcttaggtctctcttctagttccagcatatcaactcatcgttccatattggaccttgacctaaccaagtttaccacacagaaacaggtgtcttcactgttccaactatggaagagtgagcatggacgtgtctaccataaccacgaagaagaggcaaagagacttgagattttcaagaataacttgaactatatcagggacatgaatgcaaacagaaaatcaccccattctcatc

SEQ ID NO: 14882 - DNA, 431 bp, Glycine max
  modified_base (389)..(389): a, c, g, t, unknown, or other
ggacaagcttagttgccaagttggaatcaatccatactccatggaatggaccggtttggccaacagactactgagtaagggcaacgatattctgtgttgcgattatgctagttttgatggtttgattaccaagcaagttatgagcaagatggcagaaatgataaacagtctttgtggtggtgatgaaaaattgatgcgtgaaaggacgcacctgctgttggcttgttgttcaaggatggcaatttgtaaaaaagatgtttggagagttgaatgtggaataccttctggatttccgctcacagttatttgcaatagcatttttaatgagatgctcattagatatagctatgaaaaattactgcgtcaggctaaagctccaagtatgtttntacaatccttaaaaaatttgtttctttgagtgtgtatggtga

SEQ ID NO: 14883 - DNA, 315 bp, Glycine max
  modified_base (257)..(257): a, c, g, t, unknown, or other
caagaagctaaaggagatgagccttgaagaacgtaaaaacactactccacgcacggtgatgattggaggaaaggcatttgcaacatacacaaatgctataaggatagtcaggttggtgaatgatgtcggtgctgttgtcaacagtgatcctgaggtcaacggctacttgaaggttgtgtttgtcccaaattacaatgtgtctgtggcagaagtgctgattccaggaagtgagctttctcagcatattagcactgcangcatggaagcaagtggcacaagcaacatgaaatttgctttaaatgggtgccttataat

SEQ ID NO: 14884 - DNA, 420 bp, Glycine max
cactctttgcctcgcaccttcaacttaaccttttctactcataatcttaacaacttgctagaagaagataaagaaagagaaaaagtgtgtgtgtgtgagagagagcaatggctggctcgtgggcacgccgttctctgattgttctggctatcatttccttcggatgtttatttgcaatttccattgctaaggaggaagccacaaaattggggacggtcatcgggattgatcttggaacgacctattcatgtgttggtgtttacaagaacggccatgttgaaatataacccatggatcaaggaaccggattaacccatcggggggtggtttcaacgaccgggagagactaattggagaggctggcaagaatcttgcagctggcaacccaaaaaggaccatctttgatggtaagagacttat

SEQ ID NO: 14885 - DNA, 413 bp, Glycine max
gtagagaggaagggcagcagcaaggggagcagaggctgcaagagagcgtgattgtggaaatctcgaaggaacagattcgggcactgagcaaacgtgccaaatctagttcaaggaaaaccatttcttctgaagataaaccttttaacttgagaagccgcgaccccatctactccaacaagcttggcaagttctttgagatcaccccagagaaaaacccccagcttcgggacttggatatcttcctcagtattgtggatatgaacgagggagctcttcttctaccacacttcaattcaaaggcgatagtgatactggtaattaatgaaggagatgcaaacattgaacttgttggcctaaaagaacaacaacaggagcagcaacaggaagagcaacctttggaagtgcggaaatat

SEQ ID NO: 14886 - DNA, 390 bp, Glycine max
  modified_base (267)..(267): a, c, g, t, unknown, or other
cagcggctcaagtaaccagttgctccaaaagtcagatgcaagggttcaaaatctgaaaccagagacaaggattcaaaaatctgacgatcgattgtttacacttgctgctattgggcttactatagcaattgtggttcttttgctgaagaagttcattaaatctacagaatatggtgctgttttcatggatgaatcttagatgaattatttgctcgtgttagcttcaatatcaagattcttagcccaggtatagtcgataggaaaatntagaacttctctgatattttatgatctttgaattgtacgaatggcttgtaattatgggtatataaatatatactacagctatgagttcgggaagcagggtctactatgtggaagtacaagtac

SEQ ID NO: 14887 - DNA, 117 bp, Glycine max
ccaagaccgtcaccagaagatctttgggcctggtgagggggcctttctgtagaggcaacccaaatgtgcctacaaaatgtaccacaattaaaaagctcctcgtgaatgaattggtct

SEQ ID NO: 14888 - DNA, 291 bp, Glycine max
cctagattcagccacagttggaaaaaaaaaaaaagttgttcgagatggcacgtacgaagcaaactgctcgtaagtccacaggaggaaaggcacctaggaagcagctcgcaaccaaggctgcacgtaagtctgcaccaactactggtggtgtgaagaagccacatcgttatcgtcctggtaccgttgctcttcgtgagattaggaaataccagaagagtaccgagcttttgatcaggaagctccccttccaaaagctggttcgtgaaattgctcaagacttcaagactgatc

SEQ ID NO: 14889 - DNA, 429 bp, Glycine max
  modified_base (406)..(406): a, c, g, t, unknown, or other
cgtgatccgatgcaaaaggagttggcaacccagaagaaagaggcaaagatgagccaggcagagctggacaagcaggcggcgcgtcagcataacacggcggcgaagcaggctgccacggcagggcacatgggacaacccatggggacccatcagacgtcagctatgcccggtcatggaaccggacagcccacgggccatgtcaccgagggagtggtgggctcacaccctattggaaccaacagaggcccgggtgggactgctacggcccataatacccgtgcggggggaaacccaaatgattatgggtatggaactgggggtacttacaattaaataatgatgatttagaaaaagaaagctacgacccataaagaggtttagttaagagtatgacttttggtgtggntatcttctcgtttgggtatcttt

SEQ ID NO: 14890 - DNA, 89 bp, Glycine max
tgaaaaattaaattgtgaaagaaaaataaatacaaaaggagacggacacaaacgcacgggagacagaaaataatggggcgcgctaacaa

SEQ ID NO: 14891 - DNA, 371 bp, Glycine max
tgttggcagagttggcttaaacaatggttctggaaaatcaaaaagtctacagaacttgacaatgcaactcagaaaatgttgtaaccatccctacctctttgtgggtgactatgatatccataaacacaaggaggagattttcagagcatcaggaaagtttgaacttcttgaccgtttgcttccaaaacttcgtagagctggtcacagagtcctccttttttctcagatgactcggctcatggacattcttgaaatttatctgcgacttaatgattgtaaatgtcttagacttgatggctcaacaaaaacttgaggaagaggttccctactacgggaatttaatgcacctgattctgcatactttatgtttc

SEQ ID NO: 14892 - DNA, 52 bp, Glycine max
aaaacttatttgatgcttttttattgaattttaacttttatgatttttgttg

SEQ ID NO: 14893 - DNA, 52 bp, Glycine max; identical to SEQ ID NO: 14892

SEQ ID NO: 14894 - DNA, 325 bp, Glycine max
acgagacccatagtgctgccaaattatagtaactctcttgctctatctgaagaagaagaagttctgaagaagcatgtgtggaggtgctatcatctcagacttcattggtgtgaagcgtggccgcaacctcgccgcgcaggaactgtggtccgagcttgaccctttctctgacctccttggcttcgataccaccaccaccaccaccaaccaaccaccccttccagacaaaaaagtggtgtcatcatgtgagaagaagaagaagaaaagtgtgagtgcagaaaagaagagtggtgggcgagctcggaagaacgtgtacagaggaatc

SEQ ID NO: 14895 - DNA, 323 bp, Glycine max
gttccacaggctactgccagatcttctgaaaatgcggaatcctctgcatgatctggaatttgtgttttcttttgcttgttcgtttgtttaattcaataaaggaaattaggcatgaccctcttgttgagtatgctctgcctatttgaaaatttgcacacctcttttaattatcgtaatgatgtgtgaagtgtgtgttaattgaaaaaaaataaactaacatatctatacatctaattatcttaaaccttaaaatgataaaacttggaatatcaaaaaaaaaaaacggggcgccccccatttaggggcctttccaccccggaatt

SEQ ID NO: 14896 - DNA, 328 bp, Glycine max
atcatttctttttaataccaactcgctctttattattttcagttactaatcctagttatttgatttatatactttttttatagtaaatacatgagatagaatattcaaaatggaatatttctattattttattcttcatccaatgactatacattcattatatttttgtgtaaatagaggaaaaactcgatggaaaaatggtggtttaattctatgttgtttaataggaagttagaatacaggtgtgaattaagtaaatcaatggatagtcttggtcctattgaaaataccagtctaagggaagaccctaaaattttaaccgatatag

SEQ ID NO: 14897 - DNA, 269 bp, Glycine max
agtctaggccttaaatttgttcgcgagcatgcgactttgagggtaggaacacgacactgtcacctacaaaacttacgctccaattctcttataaacagaattatggtgttatatataacactgagttacatcaatgtctatttaaagagtatgtacattcttacaataacatttaatactatttctattcatatatcttataccaatcattctatccttatactgttatcataaataaaatatatttactatttataccattttttatt

SEQ ID NO: 14898 - DNA, 407 bp, Glycine max
taaatacctgaagccatctgttgctggttttcttttgcaaaaggaacttgattaccttgttggggcagtatcaaaccccaaaaggccatttgctgccattgttggtggttccaaagtctcatctaaaattggagtgattgagtcacttttagaaaaagttgacatccttcttcttggtggaggaatgatcttcacattttacaaggcacaaggtctttcagtgggttcatcccttgtagaagaagataagttggatcttgctacatcactacttgcaaaagccaaggaaaagggggtgtctctcttgttaccaagtgatgtggtgattgcagacaaatttgctcctgatgctaatagcaaagtcgtgccagcatctgccatccctgatggctggatgggattggata

SEQ ID NO: 14899 - DNA, 344 bp, Glycine max
gacatatcagttactttttgttactcatttttattattcggtggggcccaatccatttggattctagagtatcttctattttgtgcctcttgctctggaaataaataagattattaaataaaggaatgggtggatcttctattttcttcttgtacactattttaaggattaactaaacttattcttaactttctgtattgtgtaaagcatattgaccttttgatattataaatgggccttatttagaaaataaataaaaaaaaagggccggcctccactaatgagctctgttcacctcgaattaatttccgaccctgtcctttaagccttccaacttttcctat

SEQ ID NO: 14900 - DNA, 381 bp, Glycine max
  modified_base (345)..(345): a, c, g, t, unknown, or other
ctcgagccggctcgagcaaaaaaagcttcatcatcatcttcttcttctctgcatcatcacaatggctgaagtacgttcacaacaacaacaaccccagcatgtgcaagtccacgcaaccacaacacacaccccacaacaccatggcggggaaggtggcagcggcattctgaacctcatcccggagatgtccctcacgggttcccaactcctagctctcctcgccggcgttccccttggtgcaatgctgctcctcctctccggcatctcgctcatcgccagcctcttggggctggcggtggcgacgccgctcttcatcttcttcagcccgctgctggtccccgccgncttcgccataggaatggcggtgaccgccgtgcttgc

SEQ ID NO: 14901 - DNA, 107 bp, Glycine max
cagagcaagatgatcacgacatatatatataactagatcatgatgccacacttgctctgttcagcaataaattataatggaaattaataaattagttatgccttttc

SEQ ID NO: 14902 - DNA, 400 bp, Glycine max
gaaattttaagcacatttcacaatcagaccggcatagtcatgtgctcctacctcccaatgttcaccagctttaatagaacaaggggtggcttgattcaattgaaccatggcaggcctcagcctctccaatatgttgtcaatgcagcctttttggctgctctttacagtgattatctcgatgctgctgatacacctggatggtattgtggacccaatttcttctcgactgatgtccttcgagactttgcaaagacccagattgattacatccttgggaagaaccctcggaaaatgagctatattgtaggttttggtaatcattatccaaaacatgttcaccatagaggtgcgtctataccgaagaacaaggttaagtacaactgtaaaggaggatggaaat

SEQ ID NO: 14903 - DNA, 398 bp, Glycine max
cttcgcacccttctccctccatcgaagggagatggcaacatcagctggttcgtggaagggtctggagaggatgagcgtggagcagctgaaggcggtgaaagagcaaggcgatctggaagttaatcttctccaagaaagcctctccaacattcgcaccgccaccacccgcctggagatcgcctcctccgccctcaacgatctctctctccgcccccaaggcaaccaaatcctcgtccccctcaccgcctccctctacgtccccgccactctccacgactcccaacacgtcctcgtcgacgtcggcaccggctacttcatccagaagaccatgccccaaggcaaacattactgcgaccgcaaaatcaacttgctcaaatctaactttgatcaactcctcg

SEQ ID NO: 14904 - DNA, 384 bp, Glycine max
cgagactcaaggtccatgagtgtgcctgtgcgaccacacacatacgattattgatcaagttagcttagctaggccaaagtaagaaagaaagaaacattgaagctggaaacgcatgtgttggctccaccgtttgctttggtattttgctatgtgatgatgacgacgacgatccaacggtgcatgtgtgttgacctgttcctagtagtagtagtagcatgtgtacagctattgtagaatgtagataggtacactactacacgttgttgtcatgtgatcatagaaaggtctctcaccgtacaaaaaaaaaaaaaagtgatagaaggtctatttgatagaccttctaattaatatatgttgaattattattagcatgtgttacatcta

SEQ ID NO: 14905 - DNA, 390 bp, Glycine max
cacgcacgcttacctcagtcccggaactcggatcgagcgccaatcctttttgttttgccatctatagcatcgaactggggcccagttcttctgtgcctgacataacacacattgcaattttccattgcacgcacaggatcatacatgctgctgattcacctattaatatcgaccgactgcccatcattgatttgccacgctactgggatctttttaagcttctccaatctcgattgcactttattacaagcttttgcagaatcacacataggcaggttctccacgcaataaaccatctgattatagacatccatttactgtgaaacgttctaatactgtactggaatttacattcacaagccttaattgactatcttacatgcgctatta

SEQ ID NO: 14906 - DNA, 397 bp, Glycine max
  modified_base (350)..(350): a, c, g, t, unknown, or other
gggaccctttgaaccctaatctccacccaaacccattttcccgggaaattgccttggaaaagaaagagcgaagaggaaaatgcagaatcacaggctgaagcagcagcagcagcagcaacaacaagctcttatgcagcaagctcttctccaacaacagtctctctaccaccctggcctccttgctcctcctcagattgaaccatatccaagtggaaatttgcctcctggttttgatccaagtacttgccgcagtgtgtatgttgggaacatccatacacaggtaactgagccgcttttgcaagaagttttctcgggtactggcccagttgaaggttgtaagcttatcaganaggataagtcatcctatggattcattcattactttgatcgcagatct

SEQ ID NO: 14907 - DNA, 402 bp, Glycine max
atggatgcagtagctacggcgaaaccgcttctgtcactgtcgtttttgcttttgctaccgtcttttcttccgatcgccgtcgcttacagacccggcgacatcgttcccatgagccgcatgggtcaataccactcctcgcgaaccgtgtggcaggacctcattggccgtcactgccccatcttcgcagtgaatcgcgaggtgttgatgcccatacccaagcccacgggttacactggtgcggatgcttataaaatatcgtttcaagttggcagggaaaagtttttaatcccgtggcttcttgtggtgaatcgaaaaagcacggaggtcccaatgattgaagtagatctgaggtattcaggaagtgatttgcatggtgtcacagctaaaagttgggatatgcct

SEQ ID NO: 14908 - DNA, 293 bp, Glycine max
gtgtctggtttttttttttttgtttccgttttttttttttattttctttttttacttttttttggccgaaaaaccgggggaaaaggggcacgcaaaaatccctgtttacccaaacccaaaactttttaaaccctggggcgggccccctggaagggaatcccctgcccctgaccctaaaacccatggggaaagggtgccccccttccattccaaaccaaagggggattttccctttgggggcccagttaataaccttggggggtccctttaaaccccccatgggaacggaaggg

SEQ ID NO: 14909 - DNA, 259 bp, Glycine max
atgttttcattatccactgctactccccagcatgggactggtattattcgcctggcgaccgggttttaatactattggagtcttttacatgccccgcgtacatcgatgtcaacagcctcatgcgcaaataccattcgaccctaaccataaccgaagactctgtattgaccttcactctcacatcatcatagggaattcctatatcttactccgtaaacaataatactacggtgtacaccgtttccaatcctaataaaat

SEQ ID NO: 14910 - DNA, 412 bp, Glycine max
  modified_base (368)..(368): a, c, g, t, unknown, or other
  modified_base (375)..(375): a, c, g, t, unknown, or other
atccttttgtgttaaataggtggatgggaaaattgactttcccccagggcacttcccgaagtgttaagagaatgcctctttctatagggggaggagctggtgcaaagaatgctattctcatgaatatgccaaatgctgttctttcaatgtggagatattttgttggagatctcgtctttgaagtttctaagatgacttctccctacattaaatgtacagtctctttcttcatagcatttggaaatttggctgatgataccatcaattttgaggcttttccccacaagctggtgcagtttggagagattcaggaaaaagttgtattgaaattttcacaagaggaatttcttacagcttggtcaactcangtgcgtnctgcaacaactctgttggctgatgggtgttcatattt

SEQ ID NO: 14911 - DNA, 409 bp, Glycine max
cgcattttggagttcaactccaaacccaacacccttcttctcccccaccatgctgacgctgattacctcatcgttatccttaacgggactgccattcttaccttggtgaacaacgacgaccgagactcttacaaccttcaatctggcgatgccctaagagtccctgcaggaaccacatactatgtggttaaccctgacaacgacgagaatctcagaatgataacactcgccatacccgttaacaaacccggtagatttgagagtttcttcctatctagcactcaagctcaacagtcctacttgcaagggttcagcaagaatattctagaggcctcatacgacaccaaattcgaggagataaacaaggttctgtttggtagagaggaggtgcagcaacaaggggaggaga

SEQ ID NO: 14912 - DNA, 397 bp, Glycine max
attgaacttatctctcttctcacttctgttgttataagtaacttccctcatcattacaaaacaatcctccacaggtttcaaaatgctgaaatcgggcatgggaattgaggagagaaagcaagtgaagaagccagcacaagccagctcgagaaaagggtgtatgagagggaaaggaggtcccgagaatgctagttgcacctacaaaggtgtgaggcagagaacatggggaaaatgggttgctgaaatccgtgaacccaatcgaggtgctaggctctggctcgggacttttgagacctctcatgaagctgctttggcttatgatgctgctgcacgtaagctctatggctctgatgccaaactcaacttaccagagctctctatcaaatcacaatctcag

SEQ ID NO: 14913 - DNA, 442 bp, Glycine max
ggatctagaaactttagtagtgaaccctctctataaaacctctgccttctttcattcggtgcctattcccattttcttcctctaaaccctaaacaactctttctcttcttccttcgctcgttgttctccctcgcgtagatcgacaatggcggagacagagacgtttgctttccaggctgagatcaaccagctcctcagtctcatcatcaacaccttctactccaacaaggagattttccttcgtgaactcatcagcaacgcctccgatgctttggacaagattcgatttgagagtttgacagataagagcaagctcgatgctcagccagagttgttcattcatattattccagacaagactaacaatacactgaccattgttgacagtggtattggcatgaccaaagctgatttggtgaacaacttgggtacaattgctaga

SEQ ID NO: 14914 - DNA, 142 bp, Glycine max
  modified_base (60)..(60): a, c, g, t, unknown, or other
cgatctataaaccttactaatgaaccctctctataaggcctctgccttctttcattcggngcctattcccattttcttactctaaaccctaaacaactctttctcttcttacttccctccatattctccctctcgtaaatcc

SEQ ID NO: 14915 - DNA, 461 bp, Glycine max
ctttcaccacttgaagattctccttttcaaatttcaacctttttcccccaaaactaacaaacccctcttcttctcaatcattgcatggctcttcactgattctataataataatttcagattcgtttttcgttttttgttaccatggagttgatttcaggtctaccagaggacgtagcccgagactgtttgattagggttccctatgatcaattcccggcggttgcttcagtctgcaaaggctggagcgcggagattcactcgccggactttcaccgtcggaggagaaccaccaaacaagcccagaaaatcctcgtcacggttcagtccaagatagactccgataaaacccgaaccggtttgctcgcgaagtccaccaccaacccggtttaccggctcagcgtattcgaaccgaagacgggttcatggtgcgagttacccctgtgacccgaactcgctttc

SEQ ID NO: 14916 - DNA, 392 bp, Glycine max
ctttctctccttcaaaatcgttgtcaatttcgcctctttctttctcaactcccttagattctctccatcgggtcttcaaaaatgcggatgagctgcaatggatgtcgagttctcagaaaaggttgcagtgaaaattgcagcatcagaccctgtttacaatggatcaaaagcccagaatctcaagccaatgctactgtgtttcttgccaagttctacggccgtgctggtctaatgaacctggttaacgcaggccccgaacatcttcgtccagcgatctttcgttcgttgttgtacgaggcatgcggtcggatattgaacccgatttacgggtctgtcgggttgttatggtccgggagctggcagctatgtcaagccgccgtgaaaacgtcttg

SEQ ID NO: 14917 - DNA, 422 bp, Glycine max
agaagaagaagaaaagatggtgggaccagtgagacctcagtttgtgctggtttgttcttacattgttcagcttatatactcttttcatggttgttacgctatttattcttattattattctatgtttttttatttttttttttttatttttttttttttttttctatattattttatttttattttttttttttttatattttttattttttatatttatttttatttattatttttatatttttttaatattattttttctaattttttttttttgtttatatttattttatattattattttttttaatattattttttattatttttatttatttaatatttttttttcatttatttatattttatttttttatttatttttattttttattatattttttttatttaattttttttat

SEQ ID NO: 14918 - DNA, 280 bp, Glycine max
caaataataaactaatattatcaattaatccccaaggttcgttattattaaacgatggtatttgatttgtcaaatacatcattattgtatactcttttatatgtatggcgcaacccaatttttgttttttttttttcaatttttaatctcctatccctttttttaattttggaatcgaaatatctaatctaaataatccaaaaattcactcttaatcttgacagtgatatatgttgtatatgtaaatcctagatgtaaaaataggcagacttctgcctaa

SEQ ID NO: 14919 - DNA, 225 bp, Glycine max
agctggcataagagtattaccagctttttctgttccacaggctactgccagatcttctgaaaatgcggaatcctctgcatgatctggaatttgtgttttctttcgcttgttcgtttgtttaattcaataaaggaaattaggcatgaccctcttgtgagtatgctcttgctatttgaaaatttcacacctctttaaattgcgtatgatgtggaaggtgtgtatttt

SEQ ID NO: 14920 - DNA, 238 bp, Glycine max
  modified_base (22)..(23): a, c, g, t, unknown, or other
  modified_base (27)..(27): a, c, g, t, unknown, or other
gggccgacccgacgcgaacgannaatnaagcacacaataaacttttatgatttactaatacacaccgaaacaagggattgtggcgataatagtatgatggaaccacatacataatctaatgtatactcattttatatgcatagagcaacccaaccatagctttttttttttcaattattaatatcctaaccctctttttaattgtggaataaaaatatctaatctaaataatacaaaa

SEQ ID NO: 14921 - DNA, 402 bp, Glycine max
  modified_base (350)..(350): a, c, g, t, unknown, or other
ctgaggctcccctcacctctctctccgaaatccccaaattgcctgtgaatgctagaaaccctaggcacgttcgatttgatgctctcccatttgcaatcaagggcgagcgcattcggttcttgcacgcaaggctggtactaccgctgcatcggcctcgatccctgaattcatcattctttctcgcaccatctttttctattccgattcgatttgttgttgttgttgttgttgttgtgtttttgtttccttccttgacgaatcatcacgatgttgatgagcaagcagaagaagagccagatccagaacgcgaagaggttgttgataagcatcaatgtgctggggagcgcggngcccattagatttgtggtaaacgaggaggagcttgtggcgcggtgatagaca

SEQ ID NO: 14922 - DNA, 199 bp, Glycine max
aaatgtgggacctgcaccataagctcagtgacgccattcactccgtcctcagatcccactttctcactttcgtcaaatccctcaaacactacaactctccatccgaccttcccaacgccgccgtctccactgccgatgaccgctccttcggtttccgtttcgtcaaagactttagaccggtcgccttcaacaataacca

SEQ ID NO: 14923 - DNA, 363 bp, Glycine max
tgaggtacactacttttcgttggtgtcatgtgatcatataaagggctctcaccgtacaaaaaaaaaaaaaaaagggattgaaagtctatttgatagaccttctaatttatatatgtggaattattattagcatgtgttacatctaatttattaagcttgcctttggctattctcaactttttatgtctttttaaatttattattttttattcctactgtgtttacttttttaattcaatatcttttgttttttatttactactataaaataatttaaataaaatcaattttaagttaaaaaatatattattattattatattttattatattctactttatttttattctattttcttattat

SEQ ID NO: 14924 - DNA, 147 bp, Glycine max
gtacactactttacgtttttgacacgtgaccatagaatgggattgtgttggacatctcgtctttgaagattctaagatgacttctccctacattaaatgtacagacacattcttcataacaattagcatgagtgtcatctaaattat

SEQ ID NO: 14925 - DNA, 319 bp, Glycine max
gaatttgcctaatgcctgtccttcaatgtggagggattgggttatagatctcgggtttgaagtttctaagatgacttctccctacattaaatgtacagtctctttcttcatagcatttggaaatttggctgatgacaccatcaattttgaggcttttccccacaagctggtgcagtttggagagattcaggaaaaagttgtattgaaattttcacaagaagaattttcttacaacttggtcaactcatgtgcgttcttccacaacctctgtggctgatgggtgtccataattggtatgctattggtgcattgatagttc

SEQ ID NO: 14926 - DNA, 290 bp, Glycine max
gtacactactacacgttgttgtcatgtgatcatagaaaggtctctcaccgtacaaaaaaaaaaaaaaaagtgatagaaggtctatttgatagaccttctaattaatatatgttgaattattattagcatgtgttacatctaatttattaggcgtgcctttgtcttttctcatttttttaggtctttttaaattgagtatcgtgatatcctactgtgtttactttttcatttcaatatcttttgttttttatgtactactataatataattaatataaaacaattttagtt

SEQ ID NO: 14927 - DNA, 242 bp, Glycine max
gaatatgccaaatgctgttctttcaatgtggagatattttgttggagatctcgtctttgaagtttctaagatgacttctccctacattaaatgtacagtctctttcttcatagcatttggaaatttggctgatgacaccatcaattttgaggcttttccccacaagctggtgcagtttgaaaagattcaggaaaaagttgaattgaaattttcacagaggaatttcttacagcttggtcaac

SEQ ID NO: 14928 - DNA, 363 bp, Glycine max
ggatctagaaaccctagtagtgaaccctctctataaaacctcttccttctttcattcggtgcctattcccattttcttcctctaaaccctaaacaactctttctcttcttccttcgctcggtggttctccctcgcgtagatcgacaatggcggagacagagacgtttgctttccaggctgagatcaaccagctcctcagtctcatcatcaacaccttctactgcaacaaggagattttccttcgtgaactcatcagcaacgcctccgatcctttggacaagattcgatttgagagtttgacagataagagcaagctcgatgctcagccagagtgttcattcatattattcagacaagactaac

SEQ ID NO: 14929 - DNA, 176 bp, Glycine max
cactcttcgttttgctttttcaacttaaccttttctactggtaagggtaacaacttgctagaataagataaagaaagagtaaaagtgtgtgtgtgtgagagagagctatggctggcttgtgggcacgcctttctctgattgttctggctttgatttgctacgcgatgtttatatgc

SEQ ID NO: 14930 - DNA, 167 bp, Glycine max
ccattttcgtttccagaagatcttggggactccaggtacaggttttacaaaaacgggatccagttactactattttaaaatactacaattaaatgtttacactttctgttattatgcttaccataccaatcttgatttttttttttttctctttaaattattttata

SEQ ID NO: 14931 - DNA, 397 bp, Glycine max
  modified_base (384)..(384): a, c, g, t, unknown, or other
ctcgagccgctcgagccgctcgagccgatttcatcgattctctcccttctctttctctctgcgacaccagatgatggagacgacggcgaagcgaaacgctgtcgttgcgccaatcgcggcgttgttgttggtggtgctactcgcggcgagtgtggtggtggaggctcaggagaactcggacgtgaagacgctggtgaagcacatgcacgggaagaagtactgcgacaaaggatgggaatgtaagggctggtcaatttactgttgtaacctcactattactgattatttccagacctaccagttcgagaatctcttctccaagcggaactcgccggtggcgcacgccgtcggattttgggactaccactcgttcatcgccgctgncgcgcttttcgag

SEQ ID NO: 14932 - DNA, 347 bp, Glycine max
cgtgatccgattcaaattgagttggcaacccagaagaaaggggcggagatgagccaggcagagctggacaagcaggcggcgcgtcagcataacacggcggcgaagcaggctgccacggcagggcacatgggacaacccatggggacccatcagacgtcagctatgcccggtcatggaaccggactagtcacggtccttttctcctatggagtggtgtgctcacaccctattggaaccaacagatgcccgggtgggactgctacggcccataatacccgttcggggggaaacccaaatgattatgggtatggaactgggggtacttacaattaaataatgatgaattt

SEQ ID NO: 14933 - DNA, 325 bp, Glycine max
gctagtctgcccgcaggacgcacgcatacgatcccttggatgaattccaaggccacattttcaagaaatagggatgcatatatgttcatatctgaattgcaatcatttgatggcttattaggcctatcctgaagccacaggaaatgagatcggaattcctgcgcgaattgcaagttcacattttcaagatataacgacgcacaaatggtcatatatgacttggaattatctgttcccttatcatgcctattctgtagccaaacgaaatgagatcggtattcctagcggaattacaattccacattgtcaagatacaaggatgcac

SEQ ID NO: 14934 - DNA, 427 bp, Glycine max
  modified_base (400)..(400): a, c, g, t, unknown, or other
  modified_base (417)..(417): a, c, g, t, unknown, or other
agttattatcaaataattaattaaattcctcgtggaatcttgttgaagccatgtctacagctggtcaggtcatcaagtgcagagctgcggtggcatgggaagcagggaagccactatcgatagaaaccatagaagtggcaccaccccagaaaggtgaagtgcgtttgaagatcctcttcaactccctttgccgtacagatgtttactggtgggatgctaagggccagactccgctgtttcctcgtatcttaagccacgaagcttcggggattgtggagagcgtgggcaagggtgtgacacatctgaaaccaggtgaccatgctctcccaatattcactggggagtgtggtgaatgcacctattgcaagtctgaagagagcaacctgtgtgagcttctcangatcaacactgacaaangagtgatgct

SEQ ID NO: 14935 - DNA, 424 bp, Glycine max
aaagcttaagcttttgaccaaagccttttcctggatgtaacatggaaagtccccactctgtgaacagtccaagaagaaccctcagcctatcgaaaaagcagagggcaactgtatccttttttgaccccgatgacataacctctggctttggattgtctggcgatcatggccctaagccttctgaagtttatggttttgtaggttctattaccactgttgatgctacagttattttcttggtatgggcatatgctccagaatcatggctacaatctgttggcatctcttactatcctagcagatattgcgctctagcagtaccaacttatgtgatggtgaccattgtattggtgctgggattctacattggccttaacttcatttcaacaccttcccctgcatctttaaacacttgtttcgatga

SEQ ID NO: 14936 - DNA, 231 bp, Glycine max
cggctcgagataaaaattttcttctttatatccatataaattgcatggagtccaggttatttattcataagaaccaattccattgtttaaaaatcaagaattcttaagtaatttaagttactccatactcatataaaattttcaaaatcagtgcacatactagtactgatcaaccattatatcttttattcagtttaaatctattagaattgaaaaactttaattttccta

SEQ ID NO: 14937 - DNA, 423 bp, Glycine max
gaatgcggacagatggagaaaccaagtttgtgttgcacaaaatagaagcgattgatgaggctaacttgggatatagctatagcgtacttgggggagatgggttgccagacacagtggagaagatcacattcgaatgcaaattggctgctggcgccaacggagggtctgctgggaagctaactgtcaaataccaaaccaaaggagatgctcagcccaaccaagacgacctcaaaattggcaaagccaagtctgatgctcttttcaaggccgttgaagcttaccttttggcccatcctgattacaactgatcctcttcatcactattcagtcagcaacgaccttgctgtatattatatacaagagttttcttgccttgtgtggagctttatccaatcactgtgtgtggtgtgtgcttaagtaaaa

SEQ ID NO: 14938 - DNA, 269 bp, Glycine max
gcaagtgttgatttgcagcgcactcatcgtattagaggaatgattaaaatggtggccacagttggtattcctgagaatacaggtatagcattggcctgtgctatgaatagttcttttagggggcgcgccagttctgatatttacaccatctgctctcaagactgtgaattgtggaatcctgcttgcacaaaagcaatgactatgtcatttaatccaaacccgtgttctgatgcatggagtttggaatttttgacgcgtaccggatttca

SEQ ID NO: 14939 - DNA, 396 bp, Glycine max
gcatgtgtacgatttgcagcgcactcatcgtatcagaggaatgggtgaaatggcggccacagatgggattcctgagaatacacgtatagcattggcctgtgctatgaatagttcttttaggaggcgcgccagctctgatatttacaccatctgctctcaagactgcgaattgtggaatcctgcttgcacaaaagcaatgactatgtcattgaatccaaacccgtgttctcatacatggagcttggaatttttgaagcgtaccacatctcattggaatatcattggtgtcagtgcgcggactgccaccctaatgcatgacgttcatgttacaattgattggtttattgcctctgaagaatgtgtacccaagacctattgtgttttaaatacacaaaa

SEQ ID NO: 14940 - DNA, 433 bp, Glycine max
  modified_base (315)..(315): a, c, g, t, unknown, or other
gcacgttttgattttcagcgcactcatcgtattaggggaatgggtaaaatggtggccacagttggtattcctgacaatacacgtatagcattggcctgtgctatgaatacttcttttagggggcgcgccagttctgatatttacaccatctgctctcaagactgtgaattgtggaatcctgcttgcacaaaagcaatgactatgtcatttaatccaaacccgtgttctgatgcatggagtttgcaatttttgaagcgtaccggatttcattgtgatatcatttgtgtcactgggtgaactgccaccccaatgcangatgttcaggttacaattgattggtttatttcctctcacgaatgtgttcccaggacctattgtgttttaaatacacacaattcttttgtgttaaataggtggatgggaaaactgactt

SEQ ID NO: 14941 - DNA, 265 bp, Glycine max
cggctcgagataaaaaaagtctcctttatatctatttaaattgcatggattccattttttttatttataagaattaattcgattgtaaaaaaatcaagaattcttaagtaaattaagtaaattcagatttatataaaaaattcaaaattagtgtcattactattactgatcaatcaaaatatctatcaaaagtaaaaagcgaagagaagggaaaaactttaatttttttatggtaaaaaattcaattatacctgttatttcacaa

SEQ ID NO: 14942 - DNA, 334 bp, Glycine max
  modified_base (269)..(269): a, c, g, t, unknown, or other
cttaattattaacacttccttagttcaatatggggaagcccttcactctctctctttcttccctttgcttgctactcttgtcgagtgcatgctttgctattagctccagcaagctcaacgagtgccaactcaacaacctcaacgcgttggaacccgaccaccgcgttgagtccgaaggtggtttgattcaaacatggaactctcaacaccctgagctgaaatgcgccggtgtcactgtttccaaactcaccctcaaccgcaatggcctncacttgccatcttactcaccttatccccggatgatcatcatcgcccaaaggaaaagagcactttg

SEQ ID NO: 14943 - DNA, 411 bp, Glycine max
cagggtttccttttctcacttggagctcccaattgaaacccaatttcgtaatccctccacactttctcgttcggaaaactcgcgaattggaaagacatcgacggctccgcgtgatacgttctcttcctgtctggttatcaatgttggctattagtgcaattgcatctttgcccgtattaccaccagtcagaagaggtggccactgcattgaacagaatgttgtttccacattgagctttccaagacgactacagacaactaataattcaatatctctgagtagtacacagtttccattcggtagaagaagctcgtctacgcagcccgcaactattatatgggctggagctttgaatgccagaagtggtgcaaagcaaacccaaactggtacttggcaggcttctaccatta

SEQ ID NO: 14944 - DNA, 417 bp, Glycine max
  modified_base (385)..(385): a, c, g, t, unknown, or other
gttgcagaccgagctagctagctagcaagcaagcacagagatggaggcaaagcgaggccatgccctcatgtgcttggcacgtgtttcactcttcctctgcgctctaaccctatccgctgctcacggaagcaccacggttcaagacatcgcgagaaagttgaaactcggggacaacgagcttctgcgcacggagaagaagttcaaggttttcatggagaattacgggaggagctactccacagaggaggagtatttgcgccgtttggggattttcgcccagaacatggtcagagcggcggagcatcaagcgctggaccccaccgccgtccacggcgtcacgcagttctccgatctcaccgaggacgagtttgagaagctctacacntgcgtcaatggcggcttcccgtcatcgaataa

SEQ ID NO: 14945 - DNA, 109 bp, Glycine max
tgtaaatgtaggcttgttccggttttggagcttatgtgaaatgctataaagcacaaaaatgtatagtagtatcccattttttgtgtagaatagaactttttttttcgtc

SEQ ID NO: 14946 - DNA, 444 bp, Glycine max
gttttagaacatggtgggattgccactgatgatgattatccttacagagctaaagagggtagatgcaaagccaataagatacaagacaaggttacaattgacggatatgaaactctaataatgtcagatgagagtacagaatcagagacagagcaagcgttcttaagcgccatccttgagcaaccaattagtgtctccattgatgcaaaagattttcatttatacaccgggggaatttatgatggagaaaactgtacaagtccgtatgggattaatcactttgttttacttgtgggttatggttcagcggatggtgtagattactggatagcgaaaaattcatggggagaagattggggagaagatgggtacatttggatccaaagaaacacgggtaatttattaggagtgtgtgggatgaattatttcgcttcatacccaacc

SEQ ID NO: 14947 - DNA, 368 bp, Glycine max
cttctctgcatccaaaatgccaggtcttaccatcggagacactattcctgatcttcaagttgaaactaaccaaggcaaaatcaagcttcatcagttctgtgctgatggctggaccatccttttctctcacccaggtgatttcaccccggtttgtaccactgagcttggtaagatggctcagtatgctaaggagttttatcaacgaggagtgaagctcttaggtttatcttgtgatgatgtgcaatcccacaatgagtggatcaaggacattgaagcctacacttcaggtgcgaaagtgaataatccaataatggctgatccgaagagaggaaatattaaagcaacttaacatggttgaccctgatgag

SEQ ID NO: 14948 - DNA, 405 bp, Glycine max
ctcgagccgaatcggctcgagaacacactctgtgaaaaagggggagtttcttattccttctagacgcttccattgatcggcgatttctgatacatggcggagcatcacgaacacgaggaagtgaagggtgagtccttgttggagaagatttctgggaagatccacgaccacgattcctcgtcttcgtcggattccgacaacgacaaaaccagcgccactgattccttcaagtctaatgttttcaggcttttcggcagagaaaagcccattcatcatgttcttggcggtggaaaaccggctgatgtttttctatggagaaacaagaagatatccgcatcgacactcggagttgcgaccgctatatgggttccggttgaattgcttgagtaccacctcctgactttg

SEQ ID NO: 14949 - DNA, 294 bp, Glycine max
acacaaaaaaaaaaaacaactgcaaaatgcaaaattttaaacgtgccccactccacaccttcatcctttaccactatctgatgcacagatctcttatgatatcaaaaaaaataaaatattattcacctcattatatatacatcctttaaaaaatcaatcaaaaacttttaacatctaaccttttcttttttattattccttcattactctctcaactctcaatataccctttttctctctttgacgccataaaccacccttcactcatttaaaaatcaaacccttgctatataa

SEQ ID NO: 14950 - DNA, 387 bp, Glycine max
agaaacacaggagggacacatgtgattgttactactaggttgtgcaaagtaatgagctatgatactattcagcttcttcctttgccattatctgatgcaatgattctgatgataggaagaaaaatgaaagattatccagcagatgagatagacatccttgaaaaattcaatgagaaacttggaaggttgagctttggcttgtggatgattggttcattactgtctgaacttgcaataggcccttcttctctctttgaggccataaaccaggtgtcactcattgaagattcaaactcttgctatatgagcattgcagaagggcaatggtgcaagagcaacccttttctcatgaagaccctcctcttttgtttggagactttggaaaaa

SEQ ID NO: 14951 - DNA, 270 bp, Glycine max
ctcgagccgaataagggttcctctttccttctctagcacaatttacaatctcaatggctggaatttgctgtggtgttgttggagaaggtgacactccggctccactcgagcccactcctcgccccttcaagcgccggaatttggacatcttacctttaaaatatatcgccgacatgcccatgccgacgccgagggtttacggaagcgtcccaagctcaacctcagggactgcgataacgcaattgaaaattgcgacgaatgcactggaca

SEQ ID NO: 14952 - DNA, 380 bp, Glycine max
  modified_base (370)..(370): a, c, g, t, unknown, or other
agtcgatgcccaccctatccgagctatgaagttttctgtctcacctgttgttcgtgttgctgttcaatgtaaggttgcatcagatcttcccaagcttgttgaaggtcttaagcggttggctaagtcagatcctatggttgtttgtaccattgaggagtctggtgaacacattgttgctggtgcaggagagcttcatcttgagatctgtttgaaggacttgcaggatgatttcatgggtggagctgagattatcaaatctgaccctgttgtgtcattcagggagactgttttggagagatcatgccgcaccgtgatgagcaaatcacccaacatgcacaaccgtctgtacatggaagcaagaccattggangaagtcttgc

SEQ ID NO: 14953 - DNA, 445 bp, Glycine max
  modified_base (429)..(429): a, c, g, t, unknown, or other
actagttcaatatcctagtataccttaataaataatttaagagactatgatgagagcacggttcccattactgttgctgggacttgttttcctggcttcagtttctgtctcatttggcattgcttactgggaaaaagagaaccccaaacacaacaagtgtctccagagttgcaatagcgagagagactcgtacaggaaccaagcatgccacgctcgttgcaacctccttaaggtggagaaagaagaatgtgaagaaggtgaaattccacgaccacgaccacgaccacaacacccggagagggaacctcagcaacccggtgagaaggaggaagacgaagatgagcaaccacgtccaatcccattcccacgcccacaacctcgtcaagaagaagagcacgagcagagagaggaacaggaatggcctcgcanggaggaaaaacgcgga

SEQ ID NO: 14954 - DNA, 333 bp, Glycine max
gagggtactaatatgaacagaatctcctctcaacacctttgccttgctgcagttcgcaactgcaactgcactcaaatataaatatatatacatatatatatatatatatatatatgtattacttcatggtcacacatagttaagtttattaattactaggtagctggttttgaatagggtagttggtagttatagttgttgtcccagatatggaagaagcaggtttaggagattgttgttcctcgaattcgacgattacgaggaagagcgataagcgaaagcagcaacaccaacaacaagagaagccatacagaggaataaggatgaggaagt

SEQ ID NO: 14955 - DNA, 422 bp, Glycine max
atatcatgttaattttgtaaattggctatttgtgatttgtccatacgtgcttgccccaattcatttttctaatgatttgagcatacccgcaactcttagttcttgaatagcacatttatatgtattttttttcactttattttctgtacgggcaactcaatgctctaagaacttcaaagcattgtactaggaagaagctcgttatactacattatgagtttctcctttgattcctcattttaaaataataataattattataatttattttgtaaattcatttcctatgtagttccagttagttttttttttttttggaaaacattaccaggtcccctgaaggaaggttagtggaaatgttaaaaaaaacaggagaaatttgtataattgtataaaacttcagggaaattgaggtaatttac

SEQ ID NO: 14956 - DNA, 441 bp, Glycine max
atgctctcccaatattcactggggagtgtggtgaatgcacctattgcaagtctgaagagagcaacctgtgtgagcttctcaggatcaacactgacagaggagtgatgctcagtgatggcaaaacaaggttctccaaaaatggacaacctatttaccacttcgttggaacctccactttcagtgaatacactgttctccatgaaggatgtgtcgccaagatcaaccctgctgcccctcttgacaaagttgctgttgtcagttgtggattctgcacaggttttggggctactgtgaatgttgcaaagccaaagcctaataatactgttgctgtatttggattaagagctgttggtcttgctgcctgtgaaggggcaagggtttctggtgcatctagaatcatcggcgttgatttacttaccaatcgatttgaacaagccaaac

SEQ ID NO: 14957 - DNA, 347 bp, Glycine max
cacaacctggggtcacgtgtttgggtgttatgaatggaggaatgcaacctagagctgaaattaccttaggggcacgtcagttggaagagaacctggtggtgttcgatcttgcaaggtcaagggttgggtttagcacctcatcactgcactcgcatggagtcaaatgtgctgacctcttcaactttgccaatgcatgatgagccaagatcgcgagactttttataatatgcttatttataattaagcaagcatctactacatgttatggttaataaaagtaataatgtaagaataaagactttgaactaaataataatatgaacgattctctttcgttggtcaatgaa

SEQ ID NO: 14958 - DNA, 379 bp, Glycine max
ctcgagccgaatcggctcgagcggctcgagaaatgaccaagttcacaatcctcctcatctctcttctcttctgcatcgcccacacttgcagcgcctccaaatggcagcaccagcaagatagctgccgcaagcagctccagggggtgaacctcacgccctgcgagaagcacatcatggagaagatccaaggccgcggcgatgacgatgatgatgatgacgacgacaatcacattctcaggaccatgcggggaagaatcaactacataaggaggaacgaaggaaaagacgaagacgaagaagaagaaggacacatgcagaagtgctgcacagaaatgagcgagctgaagagccccaaatgccagtgcaaaacgctgcagaa

SEQ ID NO: 14959 - DNA, 294 bp, Glycine max
agttcagtgtgtcgtttaaaaatgtcgcagttgctggataaagccaagaacttcgtgtcggagaaagtaaatgatatggccaagccggaggcgagtgtcactgacgtggacttcaagcgcgtgagcaaagataatgtcgagtacttggccaaggtctctgttcgtaacccttattcaacttccatacccatttgtgagatcaactactctttcaaaagcgcatgcagggagatagcatcagggaaaattccagacccaggatcgttgaaggcaaaggacacaacaatggtggat

SEQ ID NO: 14960 - DNA, 447 bp, Glycine max
atagcatttggaaatttggctgatgacaccatcaattttgaggcttttccccacaagctggtgcagtttggagagattcaggaaaaagttgtattgaaattttcacaagaggaatttcttacagcttggtcaactcaggtgcgtcctgcaacaactctgttggctgatgggtgtccatatttgtatgctatggtgcatgatagttcagtgtctacaataccaggtgattttgtcattggtgttaagttgacaaccataaacaatatgtgtgcatatgggctcaatcctggtatttcacgttctcgtcttttgggcaccattcctcagtctatttcacagcaaactgtttggaatcaaatggcaacagtgagaacaccattgaattttgattctagcaagcagagcttttgtcaattttctattgaccttctcggtggaggaatttta

SEQ ID NO: 14961 - DNA, 408 bp, Glycine max
  modified_base (377)..(377): a, c, g, t, unknown, or other
cttaattattaacacttccttagttcaatatggggaagcccttcactctctctctttcttccctttgcttgctactcttgtcgagtgcatgctttgctattagctccagcaagctcaacgagtgccaactcaacaacctcaacgcgttggaacccgaccaccgcgttgagtccgaaggtggtttgattcaaacatggaactctcaacaccctgagctgaaatgcgccggtgtcactgtttccaaactcaccctcaaccgcaatggcctccacttgccatcttactcaccttatccccggatgatcatcatcgcccaagggaaaggagcacttggagttgcaattccaggatgtcctgagacgtttgaggagccacangaacaatcaaacagaagaggctcaaggtcgc

SEQ ID NO: 14962 - DNA, 271 bp, Glycine max
aaaggccccagctcaattattaattctataccaccgcactactgacgggcatttgactaattgtcactgaagcctgagcttgctacacccgacaagaccatgactataccattcgctcccccctgcacaactagtgctaccctatcaccctcaaaccctggcaatcaccgcatacctgtccgtcttaatgccttcggaaagcaacatgctaccttatacatcatgctctaaaaatctcaggtctcactacgtccatacttacactctaccc

SEQ ID NO: 14963 - DNA, 415 bp, Glycine max
aggctcttcaaaagatacggcaaagttgatagagttgaaatgaaacctgttttctgtggaaacctggatttcgacgcgcgtcaatctgacgtggagaggctcttcagaagatacggcaaagttgatagagttgacatgaaatccgggtttgcttttgtctacatggaagatgaacgtgatgctgagtatgcaatcagaaggcttgatagaacagaatttggtagaaagggtcgccggattcgtgttgagtggactaagcaagaacgtgacagtagaagatcaggtggtgattccagaaaatcttcatctaattcaagaccatccaaaactttggttgttataaattttgatcctgttcatgccaggacaagggatctggaaagacattttgattcctatgggaaaatattaaata

SEQ ID NO: 14964 - DNA, 230 bp, Glycine max
cacacaactactacaagtactttcttacaatcaaaaccaacaaccactatggcaaggtatcaaaaacacttccatgatcaaggtccccagggtgaccaattttgcaaccgttataagcaaaccgaccaataccggaacccctgttcatgctgctaagtgcacctatgtagccaccaaaactgctgctggtggttacagtgatgacattaataagcaacattgattccacc

SEQ ID NO: 14965 - DNA, 415 bp, Glycine max
  modified_base (385)..(385): a, c, g, t, unknown, or other
gattactatagtcaacagcagcagcaaaatcctgcaccttcatctgatgggactgcttacaattacagccagccaccttcctctggttataaccaaccgggacagggctatgctcaagatggctatggtggatatcatgcgccaccacaattagggtatggtcagccaccatcatattgatcagcagcaaggttatagcttaactccccaacttatggtagcaacccagctcaagagggccacactgccaactatggatcccagggggattcaacccaagctccacctgcccagcctccaagtcaaggttatggtacaagccaacaacctagcccaaatgctgccaactatccaccacaagctcagccaggttatggcgtgcccncaaccttccaaccagcagcttatggtagtc

SEQ ID NO: 14966 - DNA, 430 bp, Glycine max
  modified_base (306)..(306): a, c, g, t, unknown, or other
gtcaacggcagcctcatcctccttctccaccctcttctccttggtcctgcctccaaagccacaccctcctcccatcatcactcgcttgccactccagaagctccgtgccaagcatcaggaccaggaccaccactcgtcggcggagctgtccgccgtggcgaacccgtcccacgcgcatgcgaacacgctcttcttacggtcggcgtacaacgtgcaggtggcggtggacgagaacgagccggaggagacgctccttacccggttccggagagaggtcatgacagccggagtcattcaggagtgcangcggagacggttcttcgacatcacgcaggaggaaacgaagcgcaagaaccgcgaagctgccaagcgtaagagcagaagccggcgctctcaatcgagattgtaaccacacaacaagccggatgtt

SEQ ID NO: 14967 - DNA, 389 bp, Glycine max
tgctagttttgatggtttgattaccaagcaagttttgagcaaaatggcagaaatgataaacagtctttgtggtggtgatgcaaaattgatgcgtgaaaggacacacctgctgttggcttgttgttcaaggatggcaatttgtaagaaagatgtttggagagttgaatgtggaatcccttctggatttccgctcacagttatttgcaatagcatttttaatgagatgctcattagatatagctatgaaaaattactgcgccaggctagagctccaagcatgtttttacaatccttcaaaaattttgtttctttgtgtgtgtatggtgatgataacttaattagtgttcatgaatatgtcaagccttactttagtggttctaaattgaaaa

SEQ ID NO: 14968 - DNA, 342 bp, Glycine max
cttcttcacatttcattttctttacttctttaatggcccaggatttctccaaagctgttgatgacggcctcaagctctccaaacgcatatacttcgggaaggacagggcggtggcacctcctaaacctccgccgccgatgacgcgctccgccaccgcgtttctcccctcggcgccgatggtctacgcggtgatctccgatccagggatcgtggacaaccccgacatcccgagctaccaaccgcacgtgtacggaaggtgtgatcctccagcgttgattccgcttcagatgaacgctattcagatggaagctgattgctaccacgaaacccgggttatcacag

SEQ ID NO: 14969 - DNA, 392 bp, Glycine max
ctcgagccgctgaaaactgatcaaaaccctgttggagatgcaaaggttaagaagacatcgaagttcgaggattttaagattgagaaccgaacatcatcatcctcggcgttgtcggatgaatattcttcttcttcttcttcgcccgaatccgatattactttcttggatttctcggattcttgtgaaacaacatgcaatcttgggttggacttggaaaagtatccttccgtggagattgattgggcagctttatctgagtcatgaatgatgttagtggttttgtctttgttgaacggtttaatgatttgatgtgttttaggtttttttttcatgtgtcttgggcagcaactgcaacgaaattttttaccgttgaagcaggtgctatgctgagt

SEQ ID NO: 14970 - DNA, 351 bp, Glycine max
tgtatagagctctttcaatagcgcattcagggagatagcattatggaaaatgcgagacccaggatcgctgaatgcaaatgacacaacaatggtagatgtgccagttaatgatccatacagcatattgatgagctagacaaatgacatttgacgctgactgggacatatactatcaattggatcttggtctggatattgatgttcctgacattggcatcttcaccatttctctgtctcacaatggatagatcatgctaccaaccctatctaccatgttcagctaatcgcatgcacaaaacttaggataaaatgaatgcattgcacactccatgatcgatgtgcatgttttac

SEQ ID NO: 14971 - DNA, 222 bp, Glycine max
ggaaaaagatgttgtaatggaaaatcaagattgcaagagtgtgggagatacagatgtcaacaaatccactcattcttgaaaagctaaaactggagaatattttgaggtacctattgaagaagaaaaatccaatgcttcttattgagaactacctgcattgaaagataaaattgatgacaaagtttttctgagaaaggatttaagaaaagattgagcaaccac

SEQ ID NO: 14972 - DNA, 394 bp, Glycine max
cctccactgctgcatctcagaatcgggacgccgtcgtcctcactacatcgtccctattagcacactagattttgccaaaaagatcaaattttgaagcaattgtttttgtgggcaacattcattctttcctatccctcgaaaaatcaattttcggcttcgggcatcggaaatggagaaggtgatgaacattctgaagccgaagccaaatccgcagcaactattgagggattggcagcgcaggcttcgccaagagtgtcgcaacattgagcgccaaattcgcgatatacagagagaagaaaaaaatgtgcagaaggctattagagaagctgcaaagaggaatgacatgggctctgcaaaggcacttgccaaggaacttgtgagatctaggcaaact

SEQ ID NO: 14973 - DNA, 282 bp, Glycine max
ttagtattagaatcaaagaaaagaatatatgaaaggattgatggttgaaaatgcaaggaggaaagaaagcggcagagtccattaaggaaacagctacaaacattggtgcttctgccaaggctggcatggataagaccaaggccactgtccatgagaaggcagaaagaatgacagcacgtgatccggtgcaaaaggagttggcaacccaaaagaaagatgcaaagattaaccaggctgatctggacaagcatgcggctcgtcagcataacacggcagccaaac

SEQ ID NO: 14974 - DNA, 334 bp, Glycine max
aaatgaccaagttcacaatactgctgataggtctgaatttatgggtgacccagacttgcagagcgtccaaatggcagctccagcaagatacgatgtcgaagattggtacatgtggtcatagctgacgtcctgagagaaccacatcatggataagatacacgcgacaagaatctacaccatgatgatcatgacgacaacaattagattctcatgaccatgcggggaagactcaactacctaaggtggaactgcagacaagacgacgacgtaacacaagaaggacacatgccgaaatgatggacagacacgagcgacatgagaagcacaacatgcc

SEQ ID NO: 14975 - DNA, 397 bp, Glycine max
  modified_base (382)..(382): a, c, g, t, unknown, or other
gaaagtcttccatagccccccaaaaatgaagagcacgatcttctgggctctctttctcttttgtgccttcaccacctcatacctaccttcagccatcgctgatttcgtgctcgataatgaaggtaaccctcttgaaaatggtggcacatattatatcttgtcagacataacagcatttggtggaataagagcagccccaacgggaaatgaaagatgccctctcactgtggtgcaatctcgcaatgagctcgacaaagggattggaacaatcatctcgtccccatatcgaatccgttttatcgccgaaggccatcctttgagccttaagttcgattcatttgcagttataatgctgtgtgttggaattcctaccgagtggtcntgtgtggaggatcta

SEQ ID NO: 14976 - DNA, 320 bp, Glycine max
  modified_base (247)..(247): a, c, g, t, unknown, or other
gtaaaggggcagatgacctcgatcatctctgtgagccaacagacgtggtcctctcgaaggcaaaagactctgacagtctttgaaaggtaaaaggcagatgttgttgatagtctctgcatgacaaaagactctgatagtccttgaaaagtaaaggagcagatgaccttgattgtcttcgcaagacaaaagactctaatagtctttgaaaagtaaagggcatatgaccttgattgtctctgcatgacanaagactctgatagtctttaaaaagtaaaaagcagatgaccttgattgtctctgcatgacaaaagactctgata

SEQ ID NO: 14977 - DNA, 255 bp, Glycine max
gtaaaggggcagatgacctcgatcatctctgtgagccaacagacgtggtcctctcgaaagcaaaagactctgacagtctttgaaaggtaaaaggcacatgttgttgatagtctctgcatgacaaaagactctgatagtccttgaaaagtaaaggagcatatgaccttgattgtcttctcaagacataagactctaatagtctttgaaaagtaaagggcatatgaccttgattgtctctgcatgacaaaagactct

SEQ ID NO: 14978 - DNA, 361 bp, Glycine max
gcaggccaagcgctaaaacgctcccgcatcaccacgaagaaacccggatccgcgaccgcaggcccacccatgtcgcgtgagcgccaagaacgtgagcgcctctacgaacaatgccttcaagccccaacccctctccgccacctcacccaaaaggagcgcgaacgcgaagcggagcgcgagaaattgggcctcatcagcaaggatcggcagcgagaaatcgacatgatgaagcgaaaagacgacaaatttaaggtttcggagaagcccacgattattgggacacctgggttggatacgtgagttaggtttggtgatgtggacaagtgccgaatatgatttgacggtggaggatggagaggtg

SEQ ID NO: 14979 - DNA, 362 bp, Glycine max
cgggactgtaactagccgcagcacgaggagcagcctcaggaggagaaggatgtctcacaggaagttcgagcacccaaggcacggttcactgggatttcttcccaggaagcgtgctgctcgtcacaggggaaaagtgaaggcattccccaaggatgacccatccaaggcacccaagctcactgcattcttgggttacaaggccggtatgactcacattgttagagaggtcgagaagccaggatcaaagcttcacaagaaggaaacttgtgagcctgttacaattattgagacccctccaatggttattgttggtgttgtgggttatgtgaaaactccacgtggtctccgaacattgaacactg

SEQ ID NO: 14980 - DNA, 185 bp, Glycine max
aaaaaaaaaaaaaaaaatcgcaaacgtgcaaaatttaaaacggccatccccaacaaaaaaaaaaaaaaaaaaatctccctccctcccactataaaactcatctccccctaaaaaaattcccaccccttccctcaaatctacccaccttcccctaatataactctcattaaatcttcccttatatc

SEQ ID NO: 14981 - DNA, 318 bp, Glycine max
  modified_base (62)..(62): a, c, g, t, unknown, or other
gtctttgaacactcatcaccatggccaagcttgttctttccctttgtttccttcttttcagnggctgcttcgctctgagagagcaagcacagcaaaatgagtgccagatccaaaagctgaatgccctcaaaccggataaccgtatagagtcggaaggtgggttcattgagacctggaaccctaacaacaagccattccagtgtgccggtgttgccctctctcgctgcacccttaaccgcaatgcccttcgtagaccttcctacaccaacggtccccaggaaatctacatacaacaagggtatggtatttttgcatgat

SEQ ID NO: 14982 - DNA, 224 bp, Glycine max
  modified_base (39)..(39): a, c, g, t, unknown, or other
aattcccaaccttttttctgtttcttccacaccattaancatagcaccatttgatcattttcatagcgcatccaccacaccctccaccaccaccaccgctctgtccaaccttacgcatcataccccaatcatcaacaattaatcgcccaccacctactattccacacctcttataccccaatacaaattccacatcgttccttccactcctaccctcttttcct

SEQ ID NO: 14983 - DNA, 352 bp, Glycine max
  modified_base (236)..(236): a, c, g, t, unknown, or other
  modified_base (320)..(320): a, c, g, t, unknown, or other
gccgatgagtcgcatgctgtcgtttacgaggatgctcggcagggaaaagaaggggaacgtgtcgccgtcgtcgtgcggcggcggcgattgtagctccgccgcggagcgaggtgagcgagaggagactcagtgagtcggtgactcgggtgctgacgtggcacttgttggaagcggaaaaacttgggttgttggcgcgtggcggtgtgtaatagtgacgtttctggattttaatgtangcggtgagcggcgcgtgagttaggtggcgcgagatactgacgtagaatggttttgggatgaacataaatgatgtacttattcgntgatatatatattgtttctttatttgtttctt

SEQ ID NO: 14984 - DNA, 391 bp, Glycine max
ggtggatacctaggcacccagagacgaggaagggcgtagtaatgtacgaaatgcttcggggaggcatggtccgagtagtatgtggaagcagcaatgaagatgagacagaatgccaaaacatgaggtttaaggttaaggaaggtgatgcttttctggtgcctaggtttcatccaatggctcagatgtcattcaatgatggaccatttgtttttctcggcttcagcacttcagcaaagaaaaaccatcctcaatttttggcgggaaaggggtcagtgcttcatattctagacaaaaggatactggctacctctttcggtgtgagtaacataaccattgaccagcttctgcgttcttccgaggattccattatttttgggtgcagtttcctgtt

SEQ ID NO: 14985 - DNA, 405 bp, Glycine max
aaaaattacattgaacaatccaggttcaaaagcaggtgcatacggtttgaggagttaccctactactctgggaagaatgtttctgatttactcttcccgcaagagcagttttctcaacactatttttctgtttgtgggaatggggttgacaacactgttttgcaagatgtgacagatacaggtggtgacttccctcttgatgaatcatatggacaagatcctgataatgatattggaggatatccaaacaccagtgaaagccatctgccttgtacttcaacagaagatactaaatttgtcaatggattgaattctttagacacaccatgttcagacatcaatgttgaaaaaatagagtctgttaaaaatgacacatcaagcaacaatttctgtcaaaatgatgat

SEQ ID NO: 14986 - DNA, 327 bp, Glycine max
gaaagacaatgtgataagccatatacctagtcaagttcatgaggttgctttgcctagttctgcagaagatattgagaacctaataaagagccaaagtgagtcctactttgtggatgctcatcctcagcagaaagaggaggggaacaagggaagaaagggtcctttgtcttcaattttgagggctttttactgaataagtatgtactactaaaatgtatgctgtaatagctcatattgagcgaggaaagtatctttctatttaactataacttgagctccatctattaataaataaatcagcatatgatgcttttgttttgtgtaaaa

SEQ ID NO: 14987 - DNA, 150 bp, Glycine max
gggtttacaccgagcagccacacctcccgcagcagccatggttctcaaaacggaactatgccgattcagtggtgccaagatctacccaggaaagggcatcagatttgttcgtggtgattctcaggttttcctgtttgcaaactcaaaaat

SEQ ID NO: 14988 - DNA, 413 bp, Glycine max
gaaattattgttattattgtaataatttcatgaatcccatgcaggtggcatagcttaaccaaccaattgtggccactgcagacaacatgtttctgtggccactgcagacaaaatcttaatttgttcaccacagaaacatgttgtctgcagtggacaaattaagattttgtgctagtgtgttgttctgttgggagttgcgtcacggtggaatcattcatgagtgatggtaaggtaaatattagtggtacctactactagggtgaggcaatgtttattaagaattgggttttgttaattggtgttcttagctgattgattaagaatattatattattggagtgtgagaagaacttgcttgctacatatgatatgattaaatagtggaatcaaatcacatagtggcatctatgcat

SEQ ID NO: 14989 - DNA, 408 bp, Glycine max
gtgatcacacaacataagcatatatatagaaagatgtcaggggcgcaaggagcacaaccaaaggagtcaaaaacagcaacaacatatgagtcagtagaaggaggagagaaccgaacaaggactgacttgctttcaagggaggatcaaggctgcattcaagtggaaaaacttcaggagaaggtccatgatcctgctggcaaaggtggtcctgtctttggtgctggcaaagatgaagacaaacaagaccttggagttactggcacaggctaattaacctactatatatattactactatatactatatagtgtatgagtatagtatatacccaaaaagtactagtctctcttgtgatcatggtgctgcttcaaaatctttggtttgggtttgagtttatgtaaattaatg

SEQ ID NO: 14990 - DNA, 391 bp, Glycine max
accagctcgaccagatgcctaggagattctatcttgctgggaacgaatatcgagagtttctaaaatatcagcaagagcaaggaggtcatcaaagccagaaaggaaagcatcagcaagaagaagaaaacgaaggaggcagcatattgagtggcttcaccctggaattcttggaacatgcattcagcgtggacaagcagatagcgaaaaacctacaaggagagaacgaaggggaagacaagggagccattgtgacagtgaaaggaggtctgagcgtgataaaaccacccacggacgagcagcaacaaagaccccaggaagaggaagaagaagaagaggatgagaagccacagtgcaagggtaaagacaaacactgtcaacgcccccgaggaag

SEQ ID NO: 14991 - DNA, 404 bp, Glycine max
  modified_base (298)..(298): a, c, g, t, unknown, or other
acacgttatctttactttttctcttcatcacagttcaatctttactcaaagagtatagaagatgaggaagaattgcaacttggagcttcgccttttccctccttccctctccgatcttcgccccatgatggaagcagaagttagtgagagaccccaacaacaggtcggccaccatcaacagcaacagcaaccacaaccacaacatccgctgaccattttctatgatggcaagatttcagtttcagatgtcacagagcttcaggtatatacatatatgctccttttgtttatcaactgntcttatttatttctttaatttttcatttaattaaaggaatctctttctctatattttttggaaaaaatataaaccttgaattggtgggggaaacacccgggaaaaa

SEQ ID NO: 14992 - DNA, 295 bp, Glycine max
acactttatcttttttttctcttttcatcacaattcaatctttgctcaaatagtatatatttaccaccaataattacaacttcaatcttctccttttcccttcttccctatcccatctttcccccatgattgaatcacatattagttatataccccaacatcatttcttccaccatcaacatcaacagcaaccacaaccacaacattctcttaccattttctatgatcgcaatatttcattttcatatctcacatatctttaactatatacatatattctccttttctttatcac

SEQ ID NO: 14993 - DNA, 227 bp, Glycine max
taccaagcaagttatgagcaagatggcagaaatgagcaacagtggttgtggtgatgatgaaaaactgatgcttgaaacgtcacacttgctgttggcttgtctttcatggatggcacattgtaggagcgatatttggagagataaatgtgcaacacgttgtgcatcatcgatagcagctgtttccactagcacatcatacgatgtccatattctatgatggcatgatt

SEQ ID NO: 14994 - DNA, 161 bp, Glycine max
cggatcaaacgaaactttattccacacgatgaaagcctcctaataagcaactttcaaccaaaacctcacataaatctgcaccaactactcaacagtctaacaaaccccaccataattaatctcatacctcatctcatccccagattataaaataccattat

SEQ ID NO: 14995 - DNA, 345 bp, Glycine max
caaacttattaacactttccttagttcaatatggggaagcccgtgttcactctctctctttcttccctttgcttgctactcttgtcgagtgcatgctttgctattacctccagcaagttcaacgagtgccaactcaacaacctcaacgcgttggaacccgaccaccgcgttgagtccgaaggtggtcttattgaaacatggaactctcaacaccctgagctgcaatgcgccggtgtcactgtttccaaacgcaccctcaaccgcaacggcctccacttgccatcttactcaccttatccccaaatgatcattgtcgttcaagggaagggagcaattggatttgca

SEQ ID NO: 14996 - DNA, 399 bp, Glycine max
cgaccaccatcattacctttcttcttctacaacacaacctccaatgatcaatttcccgcgagatctgttaagaaccttcgtgggagtgaacaacaacagcaataaaaacaataacaacagtcagcaccacaatttgcctatgccagtggtgaagttagaggatgagaaagaagagctggaactaagtctcggcctttcgatgaatggtagatttggggtggaccctacagcgaagaagataaagagaacaacctcgataccggagtttgtgcgcgacgaggagatgggatatgctgctgcgatggggtgcacggggtctctggtgaggacgtgttcgcttccgacggagacggaagaggagtggcggaagaggaaggagttgcagacgctgcggcgggt

SEQ ID NO: 14997 - DNA, 149 bp, Glycine max
ggtctcagggctgcaacatgcatattctacacatgtgcttagtgttgagtgggtgattttttcatttattaatatcaaagttttattattgtagctcactctaccaaatatttggagcaaaaaaaatcaacaacaactgatagcccaac

SEQ ID NO: 14998 - DNA, 298 bp, Glycine max
agctggtcaaactaagggccgaactgaggaatagacgaaccatgggatgggcaatattggagagaaggctcaagctgcaaaggagaagacccaggaaatggcccaagctgcaaaggagaagacccaacaaacagcccaagctgccaaggacaagacttgcgacactatccaagcggcatacgagaagacccaacacaatacaggagctgctcaacaaaagacctcagagatgggccagtccacgaaggaatcggtccagtcagggaaggacaacacccaatggttcctgcagcaaaca

SEQ ID NO: 14999 - DNA, 319 bp, Glycine max
gtcagtcttagtgaacaacagctccttgactgtgacaaccagggggacataacagaaaagacttcatgtgacaatgggtgtaatggaggtcttatgacaaatgcctacaattatttgctcgagtctggtgggttggaggaggagtcttcatatccctacactggggagagaggtgaatgcaagtttgatccagagaaaatagcagttaagatcacaaatttcaccaatatccctgctgatgagaaccaaatttgccgataattagtaaaaaatggtccacttgctatgggcgtgaatgcaattttcatgcaaacataca

SEQ ID NO: 15000 - DNA, 400 bp, Glycine max
  modified_base (375)..(375): a, c, g, t, unknown, or other
  modified_base (383)..(383): a, c, g, t, unknown, or other
ggagactctcatagaatgaatacaggtcttaatggtcacagcaggttatcagagcgcacaccatatagctcaagggaggatcatgtttcaagatatggtactgataggtcttcagggccatctgcttatgatcaatcaagtgctccagagcataatgtaaaccatggcaacagaggcttgaggagtgaagatcggaatcttgaacctcttgctcatttgcaagggtcaatagtctctcagaatgcttcttcagagaagatttggacagaagaacgactgacggacatgtccttgtcagcaataagggaatactacagtgctagagatgagaacgaacttgctttatgtgtcaaagatttgaactcttcgagcttncatccttncatggcttctctatggg

SEQ ID NO: 15001 - DNA, 320 bp, Glycine max
aattcccagctcatgtggtgtttcagtcacaacacatctcttacaggcacacgatcatcatcatagtagatccaccatcccctccaccaccaccaccgctgtggacaaccttacgtatcaaaccacaatcataaacatctaaataccggccacctcctactacacactctcctcaaccctgatacaaattcctgaccggtaactttaattttaccaccatttcctatacccacttgtatcatatgatcgaccaaaccatcaacataactcattacatgtcaccaaattacattccgttacaatataacacaacttaccat

SEQ ID NO: 15002 - DNA, 125 bp, Glycine max
ctggcggctatagaatcctttataacctgaacgacgagtgctacacttgtatgtttgtttacaccaacagaagaaggctcctacaagaggccatggctgatatcacagcaacagaggtatcaatc

SEQ ID NO: 15003 - DNA, 167 bp, Glycine max
aatcgaggcaacaggcagagcaacctttgtaagtgcggaaatatagagctgaattgtgtgaacaagatatatttgtaatcccagcaggttatccagttgtggtcaacgctacctcagatctgaatttctttgcttttggtatcaatgccgagaacaaccagaggaac

SEQ ID NO: 15004 - DNA, 368 bp, Glycine max
atcatgttgacatgtctgaggaagggagggtgactgtgtttttggccaagccactcaagtgcaagcctgttccgcgtttcactccgttcgctgcctgaagactgtgaatggaatggtttctctagttgtgtgtgctttacctactctatatttttaccttatttttgcttactttgtggcactagtatttgttttgggaagtagcgttgcttctgtaaacttggtggcaggggtatattatttatggaaataagtggtggcttggtaggtattcccgtccatttttttaatgctggctaataatttaaaggagttaatcaagccaatgaatacagaatggctgctactatttctttttggtttttatt

SEQ ID NO: 15005 - DNA, 350 bp, Glycine max
tgggaatgcatcaatcaaaatgagtgattcgggcctcattggtacgggtgtgtgtaacaaacagcaacagtacagaccattttgatgcatgtaagtggacaaaatcagaaccacattcctgggaattgatcttcccaatagaggtatgtggtcctaataatggctttgaaatgtggagtcctgagtgggcaaatcaaacttcatgccatttgagtttccttaatgacaatcccaaacagtctacagtttttgatattatcttgcgaatctctcaacattttgaaattgctggtaatacttttatgccagctttttctgtttcacaagctacttgccaatattttgaaaat

SEQ ID NO: 15006 - DNA, 373 bp, Glycine max
  modified_base (26)..(26): a, c, g, t, unknown, or other
gaaataattgatctttgaaaatgcanggaggaaagaaagctggagaggtccatcaaggaaacagctgcaaacattggtgcttctgccaaggctggcatggagaaaaccaaggccactgtccaggagaaggcagaaagaatgacggcacgtgatccgatgcaaaaggagttggcaacccagaagaaagaggcaaagatgagccaggcagagctggacaagcaggcggcgcgtcagcataacacggcggcgaagcaggctgccacggcagggcacatgggacaacccatggggacccatcagacgtcagctatgctccgtcatggaaccggacagcccacgggccatgtcaccgagggagtggtgggctcacacc

SEQ ID NO: 15007 - DNA, 258 bp, Glycine max
cggctggctataaaatcctcttaaccagttgttgctgctgcgttgcacttcagtttacagctcccgaaaatggctcctccaagaggtcgtggtggttttggtggtggcggtgggttcaggggtggtggtaggggtgacagaggcagaggatggggcggtggaagaagtatgagagacaggggcacattcttcaaagcttgccgaaggtgcttacggggcttgggcgcgaaagccggcacgggtgttggccccaaatac

SEQ ID NO: 15008 - DNA, 220 bp, Glycine max
gcaacaggaagagcaacctttggaagtgcggaaatatagagctgaattgtctgaacaagatatatttgtaatcccagcaggttatccagctgtggtcaacgctacctcagatctgaatttctttgctgttggtatcaatgccgagaacaaccagaggaacttccttgcaggttcgaaagacaatgtgataagccagatacctagtcaagtgcaggagctt

SEQ ID NO: 15009 - DNA, 435 bp, Glycine max
  modified_base (342)..(342): a, c, g, t, unknown, or other
  modified_base (353)..(353): a, c, g, t, unknown, or other
  modified_base (375)..(375): a, c, g, t, unknown, or other
  modified_base (395)..(395): a, c, g, t, unknown, or other
cttgcaagaggctcatgatattggggaatcattgcaagagaaggttgagcttttgcctgagattgagcgtgcttttgttcatcttgattatgagtatagtcacaaacctgagcatgctcaagcacactcttagcagcaatcaggaaaagcaatgcctttgttgttcatttccttttccctttcatctcccgttagttgtatatgcgaaccatttctggttgttcggaatctgaacttaagggcaagtcactgagaagttggctatcaatcccaaatttctggcagccctgataatatcccaaatgtatatcacgataggtttatcaagcaagaccctttcangttccatttanggtaaatagaatcttactactntcttttccattccccctttntgtacagtgcactctttcggccttaattcatgatgtaagg

SEQ ID NO: 15010 - DNA, 315 bp, Glycine max
gtttggggtcaagcatggacttggatgttaccatttcaaaaagggagataggtatgctggaaagtactttggagataaaatacatggctatgatgattaccactttgccaatggtcactattaccaatgttcatggcacgaatgtcgtacgcaaggttatggcatgaatatgtttcgaaatggtgatggaagatgtggtgaatgggatgctggcaacctgaaactatatctaccaccacagaatgatgctatcatacgcacagttcaagctgctaggaaaacagctgataatgctataaatcttgcccggaagga

SEQ ID NO: 15011 - DNA, 340 bp, Glycine max
cttttggggaagaggtcgagtttcacagcagcaatggtgtacgtgaaggctgagaaatcaaaagcctacttcaagagatatcaagtcaagttcaagagaagaagagagggaaaaaccgattaccgtgccaggattcggttgattaatcaggacaagaacaaatataacactccgaaataccgatttgttgttcgctttagcaacaaggacattgttgcacaaataatatctgctagcattgctggcgatattgttcttgctgcagcatatgcacatgagctgccacaatatggtcttgaagtagggcttacaaattatgctgcagcttattgcactggtc

SEQ ID NO: 15012 - DNA, 373 bp, Glycine max
aaaagaaagcacgttgaagattgtaacttgtaacaacaactatggctagcgagggcagcgaagagttcaggctagtgtcaccggcgttcaaaaacggggggaagttaccgaggcactacaccgacgatggtcagggtacgaagaagaacatatcccctccattggagtggtataacctcccggaggggacgaagactcttgccctcgtggtggaggatattgatgcgaccgattctggtgggcccatggtgccatggactcactgggtcgtcgcaaacatcttggccacggtgaagggcttgccggagggattttccggcaagtcggccgagatggggggcgactacgcggcgatcaaggaggggaacaatga

SEQ ID NO: 15013 - DNA, 351 bp, Glycine max
  modified_base (83)..(83): a, c, g, t, unknown, or other
cccagaaactacgtgtttagtcgccacgactccaatcgtagcgcgtcgggactctgtcgctttctgcgccgtctgccgatctnccgacaatggctgacccaaatgagcaagaagagaaagttcgtagctgatggagtgttcttcgctgaactgaacgaggttctgacacgagagttggccgaggacggttactccggcgtggaagttagggttacgccgatgcgcaccgaaatcataactagagccaccagaacccaagctgttctcggtgagaacgggagggagaatacgggaacttacctctgcggctcacaagaggttcaagtttcccgagaacagtgctgaacttta

SEQ ID NO: 15014 - DNA, 280 bp, Glycine max
atctggtgttagaatggatagttcctctcatcagcgcctccccgtcaacgaaaacgacccagaagacatgcttctctatggcatcatcacttcatgccaagaaaaaaaagtgaccatcaaccaagagcaagtgaataagaagaggagcagcttccgcggcgtgcggaggcggccgtgggggaagttcgcggcggagataagagactccacgcggcatggcgtgagggtgtggcttgcgacattcgacaacctcaaggccgccgcgctggcttatgaccaa

SEQ ID NO: 15015 - DNA, 361 bp, Glycine max
gttatttgtaatagcatttttaatgagatgctcattagatatgggtatgaaaaattactgcgccaggctaaagctccaagtatgtttttacaatccttcaaaaattttgtttctttgtgtgtgtatggtgatgataacttaattagtgctcatgaatatgtcaagccttactttagtggttctaaattgaaaagctttctagctggtcataatatcaccattactgatggtattgacaaaactagtgcaactttgcaatttagaaagttagcagattgtgattttctcaagagaaactttaagcagatgtctaatgttctgtgggtggcttctgaagacaaggcgagtttatggtcacaac

SEQ ID NO: 15016 - DNA, 311 bp, Glycine max
taaaattctcaattctaacgccactaatcctatacttactctacttcttcacaactgtcaaattggtaaatatctgatttattagtgtccttttgcattactgaactagcatgtaatatcttattcacttaaataaaacgcattactatttgcaatcagtctgtttaaatataaaacaaataaaaatataattcaactacaacatcaacaattacactttatcaccaaatttaataaaaaaaaaaaataaaattgtctaccacccactaataaacttctttaccacacaattaattcctaacctatacctt

SEQ ID NO: 15017 - DNA, 403 bp, Glycine max
ttcaaaggccatagtggtactagtgattaatgaaggagaagcagacattgaacttgttggcattaaagaacaacaacagaggcagcaacaggaagagcaacctttggaagtgcggaaatatagagctgaattgtctgaacaagatatatttgtaatcccagcaggttatccagttgtggtcaacgctacctcagatctgaatttctttgcttttggtatcaatgccgagaacaaccagaggaacttccttgcaggttcgaaagacaatgtgataagccagatacctagtcaagtgcaggagcttgcgttccctgggtctgcaaaagatattgagaacctaataaagagccaaagtgagtcctactttgtggatgctcagcctcagcagaaagaagaagggaac

SEQ ID NO: 15018 - DNA, 298 bp, Glycine max
ccgtaatggaaggcctgatgctgaatatgttaaatggaggtggcggccaaatgggtgcataattccaagtttgaatgcaactgattttctggagaggttgcgtgggcagaggctagtttttgttggggattcactgaacaggaacatgtgggagtcacttgtatgcattctccgtcaaagcatcaataaaaagaaacgggtttttgaaatttctggaagaagggaatttaagaagaaaggtgtctatgcttttagatttgaggtgagttttctaatcacttctatgatgtttgtgtat

SEQ ID NO: 15019 - DNA, 432 bp, Glycine max
  modified_base (388)..(388): a, c, g, t, unknown, or other
gttgctgtacttgttggagtgccaaacaaagatgatgcattcggaactcatccagtgaatttcttgaacgagagaactctaaagggtaccttctacggaaactacaaaccccgcactgatcttccttctgttgtggagaagtacatgaatggggaattggaactggagaaattcatcactcacacagttccattctcagagattaacaaggcttttgattacatgctgaaaggggagtccatcagatgcatcattcgaatgggggagtaaatctatatcagaccaatgatgacatgacatggtccctgttggaggactgagttctctttctggttgtgaaaagaagaaaataaatttcatatatgatatatatccctttaggattatngaatttgtgaaaacttgggagtttgaatgtagagaatgataggg

SEQ ID NO: 15020 - DNA, 190 bp, Glycine max
aagaatcaaagaaaggggtggtggctgcttcaaaagcttagtaagttttttatttccagaacatcatagttttcgcagcagcaaactaacaaattactcatatcatataataagatggcccgttctctctcgcaagccaaacgtattggtgtcctttgtgctcaatctatctccctaattcccgttcatc

SEQ ID NO: 15021 - DNA, 363 bp, Glycine max
  modified_base (5)..(6): a, c, g, t, unknown, or other
  modified_base (31)..(31): a, c, g, t, unknown, or other
  modified_base (79)..(79): a, c, g, t, unknown, or other
gtttnnatatattcatgaaaaagttgtattnaaattttcggaccggtatattttttacagcttggtcaactcaaatacntcctgcaacaactctgttggctgatgggtgcccatatttgtatgctatggtgcatgatagttcagtgtctacaataccacgtgattttgtcattggtgttaacttgacaaccataaacaatatgcgtgcatatggcctcaatcctgctatttcaggttctcgtcttttgggcaccattcctcagtccatttcacaccaaactgtttggaatcaaatggcaacagtgagaacaccatttaatctttattctaccacgcagagcttttctcaattctctattaatc

SEQ ID NO: 15022 - DNA, 256 bp, Glycine max
  modified_base (6)..(6): a, c, g, t, unknown, or other
  modified_base (26)..(27): a, c, g, t, unknown, or other
  modified_base (31)..(31): a, c, g, t, unknown, or other
  modified_base (84)..(84): a, c, g, t, unknown, or other
gtttanaaatattttttaaaaacccnnactnaaattcccgcgcccgcctttttataacacattggtcacctcaaaaacctcctncaacaattttttcctctaataatttcccatatttctatactattccccattatccttcacatactacaattccacttgattttatcattactcttaatcctacacaccattaacaatatatatccatatactctcaatccttctatttcatcttctcatcctttcttcacca

SEQ ID NO: 15023 - DNA, 450 bp, Glycine max
  modified_base (75)..(75): a, c, g, t, unknown, or other
gaaaatttgaagagtttgtttattgtgaaaaaaagaaaaatgcaggcggcaaagaaagccatagagacctttaangaaaccgcagccaacattggcgcctctgccaagtctggcttggagaaaaccaaggccactatccaagagaagaatgagaagatgaatgcagaagatcaaactcaaatggatatggctaccaagaggaaagaagagaagatcaaccaggctgagatggagaagcagcaggcccgtaagtactacgccgctgcaaaacaatacgccatggctgagcacatggcaaagggcaaccacgacaccgccgggcctagaatcgagactgccacacacatcaccagtgggcccgggactgacaatgctatgtactctaacactgggcctgggactgagactgccacgtacaccactagtgggcttgggcatgacaatgctata

SEQ ID NO: 15024 - DNA, 327 bp, Glycine max
ccccattacatttttctgtatttcagggttaaaaattcacacgtttattttataatttggaaatcgtgacaccaaccctacaccaccatggcctccttacacaaattttttgcttttgccctcgctcttctcctccttgcctcccctctccttcaatttgctagatctcactcagactcctaagatttaatggaggctgctgaaaaatcaaatcatatcgacattgttaatcatcatgtccaaaacttttctgatggtaccttcccttctgctccagtaattcaaacaataagtgttttttcaaaaaatattgctatatttataaca

SEQ ID NO: 15025 - DNA, 400 bp, Glycine max
  modified_base (5)..(5): a, c, g, t, unknown, or other
  modified_base (48)..(48): a, c, g, t, unknown, or other
actcnagcttcaaaacggtattacatactatatgtcaccaattataanagcagccgtctttttaataaaactagattcacctctaaaaaaaatatgccctctcactctattccaatcacccaattatctctataacacgattgcactattctttacatctccattacataccctttttatcgccaaacgctatcctttgagcattaactttggttcatttacacttataacgctgtgtgccaacattcctacttacttcgctattgtacaaatacattttctacaaacttttaaactttcttcacgcgatacaatataatctttctttaatattcaaatattttccccctaatacaatttctttaacctttatttcttttcacaacaacctttaaataac

SEQ ID NO: 15026 - DNA, 313 bp, Glycine max
atttttaaaaaaactaacacaaatgggcaggtttaatgaaatcatctcacacaatcaacctaatctcacaactaaaaaattataccgtaatactctcaaattcccaacctcatcttctaaaaataaaaaatcaaatacgatcatatattaatcacaatccattataatcttattcaacctaacctaaagccaatctataatataactgaattcctaaagcaaatccacctccacattctcaaaataaaaagatccaaaaatattcatataataatagaaactatttctcatattataatacctatcctacaac

SEQ ID NO: 15027 - DNA, 345 bp, Glycine max
  modified_base (11)..(11): a, c, g, t, unknown, or other
gaaaaaaaaanaatattaataaaaaaaaaaaaaaaaaaaaaaaaagggcgggtttttaaaaaatatattgccaactaaaaaaaaaaaaaaaaaaaataaaataaaatcaaaataaaaaataaaaaaaaaaaaaaaataaaaaaaaaaaatctgccccccccctcctaatataattctttcccccccctaattatatcccacccctcccccttatacttccccatttttttttttataaaacctataaaaatctttctaaaaatattcaaaaattttttctttttaaaaaaattttttcccttaaaaatcccccaaaaataaatcccccaaaataaaatattaaaa

SEQ ID NO: 15028 - DNA, 162 bp, Glycine max
  modified_base (71)..(71): a, c, g, t, unknown, or other
aaaatatcagcagcagcagcaaggaggttcccaaagccagaaaggaaagcaacaagaagaagaaaacgaangaagcaacatattgagtggcttcgcccctgaattcttgaaaagaacgttcggcgtgaacatgcaaatagtgagaaacctacaaggtgagaa

SEQ ID NO: 15029 - DNA, 218 bp, Glycine max
caccaccacactaacaccgggttgggggcatccgacgaatattgcacctacaatacccgacaattaattgcaggacccagactctgaagtcgtaccacctatcacctatagagagtttgcctcacagcttgtcgtacacacggtcataaatgttatctatgtgaaatatttattctttcacattttcccacaacttaccagccgcatgcataaactgt

SEQ ID NO: 15030 - DNA, 182 bp, Glycine max
actatgcatattggtaccttgccgataaggcaagggatgggacgagagggcaaaggattatggaagttatgctcaaggtagaattaatgaggccacacaaggagcttattagtcatgcctgcttatatatgcatgagtgtatgaggttgaattgaaggtggtgatggtggtggatctctttt

SEQ ID NO: 15031 - DNA, 404 bp, Glycine max
attcttcgtttcttctctgaccattttcaattcttcacacaacaggcattcatataatcatatctgacaatttgtcacacactttaactttactacttacttgcccaattaactatttcatcgtcatatgctaaaaagctttcaactttaaagttaaccataaagaaaagctctctgtgaaagaaaaaagcaacaaccaaattgatcttcggttctgggttacaattgaaatgctgaagctctctgaggtcgttcatgacatataagcagttcagaatttatcgctacttgctaagcatttagtttagcactacccttctgcttctgccacaacgtaaaaagatggcagctctggtcaatgctgcaacaagtgagaaacttgcttgaactgactggatgaaaaa

SEQ ID NO: 15032 - DNA, 407 bp, Glycine max
caaagaattgatatttttttacatccacttttctatatggcaaagggtgaggcgttatgtttacggtacagaccccatttatttattacaacgcttgaagcaaagaaactcttggtgagcacctaccatggccgaacaaggagctttacttcccatgaccctgttgtttcctcatatggaaaaactcagttcatttattgacaactgagtgacgatatctatccttggtatggaggattgaatgtttttttggtacaatgaggatttaatgttaattgattatctttcacggacttcggttaccgcatattttagcttaatttcttatttaaatatttctatagatgatggtaaaaaaaatatattttttcactatttattatgacatataagtaaaataaaatata

SEQ ID NO: 15033 - DNA, 367 bp, Glycine max
gaagggggtctttcttttccatgttgccaacttgctaataataagaggatcaagttgttttgttttgttgctttttgttcaagaaacgaggtcgcatgttcatgcacctggggaagaagagaaggtgatgtagcacagaatgccaaagattatgctcaaaagagcaaagattatgcgggtgatgctgtacagaatatcaaagattatgcaaatgatgcagcgcacaagagcaaagattatgctggtgatgcttctcacaagagcaaagaagcttctgattatgccagtgagacggctcagaagaccaaagactatgttggtgatgctgctcaaaaaagcaaagaggcttctgaatatgctaatgatg

SEQ ID NO: 15034 - DNA, 284 bp, Glycine max
ccgtaatggaaggcctgatgctgaatatgttaaatggaggtggcggccaaatgggtgcataattccaagtttgaatgcaactgattttctggagaggttgcgtgggcagaggctagtttttgttggggattcactgaacaggaacatgtgggagtcacttgtatgcattctccgtcaaagcatcaataaaaagaaacgggtttttgaaatttctggaagaagggaatttaagaagaaaggtgtctatgcttttagatttgaagtgagttttctaatcacttcta

SEQ ID NO: 15035 - DNA, 428 bp, Glycine max
  modified_base (41)..(41): a, c, g, t, unknown, or other
ttcactataacagtgctgttatagtgaaagatttaaatttnaagggaacgcatgttaatagtagagaagagggggaaccacggcaaattattaagattgaaggtcctatccacagctcaaatgtgatgctctactccaaagatcagaaggtagcaagccgtgtggggcataaagtccttgataatggtaaaaaagtccgctaccttataaaaactggtgaaataattgatagtgcacagaactggaagaaactgaaggaggctactaagcaaactgaagaagctactgctgctgctgcctagttttacctacgtaattcattcattcactactaatgtaactctagcagtacttgttgtgatctctcttccattttgttatctaatgtatatttttggtcttgctattgatctccatataatgaaacc

SEQ ID NO: 15036 - DNA, 342 bp, Glycine max
ccgcagtgtatggactgatgctaaatatgttaaatggatgcggcggactgatggttacataattccaagatggaatgtaactgatgttctggagaggttgcgtgggcagaggctagtttttgttggggattcactgaacaggaacatgtgggagtcacttgtatgcattctccgtcaaagcatcaataaaaagaaacgggtttttgaaatttctggaagaagggaatttaagaagaaaggtgtctatgcttttagatttgaggtgagttttctaatcacttctatgatgtttgtgtatgtgtagtgtgaaaagtgaatcttgcatgggtatggggctgacta

SEQ ID NO: 15037 - DNA, 396 bp, Glycine max
gacgaaaacggcaccccaaaaccctcgtctcttgggcgcgccctggactggacccccatccacatttgggacaaagaaaccggtagcgttgccagcttcgccgcttccttcaacttcaccttctatgcccctgacacaaaaaggcttgcagatgggcttgccttctttctcgcaccaattgacactaagccacaaacacatgcaggttatcttggtcttttcaacgaaaacgagtctggtgatcaagtcgtcgctgttgagtttgacactttccggaactcttgggatccaccaaatccacacatcggaattaacgtcaattctatcagatccatcaaaacgacgtcttgtgatttggccaacaataaagtagccaaggttctcattacctatgat

SEQ ID NO: 15038 - DNA, 387 bp, Glycine max
cccaattctaattctcttaatttcctttccccaaaaaacaaaggcaaaaacggaaacatggctctttctttcaattccctcacactctccccattattctcctcttcttccacttttgctcttcccaccaccgctgcttcaagagtacacgtgattctgcccccgaagcccttgaacggtgttcgattctccgcacccaaaaggaggactgacgcggtggtcgtctccgccgccgccgaggactcgatttcgccgccggttcctccggcggagagcgagaaagagaatgtttccgtggagaagcttccgttggagtcgaagttgaaggagagagaggagcagaagctgaggatgaagctggcgaaaaaaataaggttgagacggaaa

SEQ ID NO: 15039 - DNA, 390 bp, Glycine max
cggctcgaggctcatcatcaggtgaaggaatttctttaccagaacatatgcagtttaagacatgcacaaatgatgattatgaaaaaggaagaatttctgctatgcacctaatgaaagataagttttgctctatctatgaccaatctgatacacgttctgtatttgatgatttgaacctccccactccacaagccagggtaaatcaggaacatcagaaaaattacattgaacaatccaggttcaaaagcaggtgcatacattttgaggagttaccctactactctgggaagaatgtttctgatttactcttcccgcaagagcagttttctcaacactatttttctggttgtgggaatggggttgacaacacttgtttgcaagatgtgacag

SEQ ID NO: 15040 - DNA, 374 bp, Glycine max
  modified_base (361)..(361): a, c, g, t, unknown, or other
gcaccagtttcaccgcacgaatatcttgttgtttggagcgatcgcgagaaaagctctgtaaacatgttggtttaccaggacctccttacaggtgatgagcttctctctgactccttccgttacaaggaaattgagaatggaatgctgtgggaagttgaggggaagtgggttgttaaaggagcagttgatgtagacattggtgcaaacccttctgctgagggtggaggagaagatgagggagttgatgatgcacctgttaaggttgttgacattgttgacacattcagacttcaggagcaacccgcattcgataagaagcagtttgttaccttcatgaagaggtttatcaagaatttgactnccaagctcgatgc

SEQ ID NO: 15041 - DNA, 210 bp, Glycine max
ttagaattagaaacaaagaaccgaagaaagccaagaggacatcgatgacaacgcattacggaaagatagcggtatagtccattcaggaaacagctacaaacattgatgcttctgccaaggctggcatggacaagaccaaggccactgtccaagagaaggcagaaagaatgacagcacgtgatccggtgcaaaaggagttggcaacccaaa

SEQ ID NO: 15042 - DNA, 446 bp, Glycine max
cggctcgaggctcatcatcaggtgaaggaatttctttaccagagcatatgcagtttaagacatgcacaaatgatgattatgaaaaaggaagaatttctgctatgcacctaatgaaagataagttttgctctatctatgaccaatctgatacacgttctgtatttgatgatttgaacctccccactccacaagccagggtaaatcaggaacatcagaaaaattacattgaacaatccaggttcaaaagcaggtgcatacattttgaggagttaccctactactctgggaagaatgtttctgatttactcttcccgcaggagcagttttctcaacactatttttctggttgtgggaatggggttgacaacactgttttgcaagatgtgacagatacaggtggtgacttccctcttgatgaatcatatggacaagatcctgataatgat

SEQ ID NO: 15043 - DNA, 370 bp, Glycine max
cggctcgaggctcatcatcaggtgaaggaatttctttaccagagcatatgcagtttaagacatgcacaaatgatgattatgaaaaaggaagaatttctgctatgcacctaatgaaagataagttttgctctatctatgaccaatctgatacacgttctgtatttgatgatttgaacctccccactccacaagccagggtaaatcaggaacatcagaaaaattacattgaacaatccaggttcaaaagcaggtgcatacattttgaggagttaccctactactctgggaagaatgtttctgatttactctttccgcaggagcagttttctcaacactatttttctgtttgggggaatggggttgacaacac

SEQ ID NO: 15044 - DNA, 351 bp, Glycine max
acacaactacaagaaagaacttccttataaccaaaaccaacaacaactatggcaagttatcagaagcactacgatgatcagggtcgcaaggtcgacgagtatggcaatgttgagaggcaaactgacgaatatggcaacccggttcatgccactagtgtcacttatgtagccaccaaaagtgttggtggctacaatgatgacgctaataagcaacatgatattactggtgtctatcccgagaaagacaccggtagacatcattttggtcgtggttacgacggtgacactaacaagcaacatgatgctactggtgtttatcccggaatagacattggtagagatcatgggact

SEQ ID NO: 15045 - DNA, 114 bp, Glycine max
ctcaaaactcttgtctttcattttgataattcccacactatggctgagcttcactaccaacaacaacaccaatacccttaccgataccctaatgatccatacgaacaacaaact

SEQ ID NO: 15046 - DNA, 286 bp, Glycine max
ctcaaaactcttgtctttcatcatgataattccgacactatggctgagcttcactaccaacaacaacaccaataccctcaccgataccctaatgatccatacgaacaacaaactagctactccactcaggtcgtcaaggcggccaccgtcgtcaccgaaggcggctccctcttgatcctcgcctagttgatccttgccggcaccatcatcgccctcaccatcgtcacaccaccgatcgtcatcttcagtccggttctcgtccccacggtgatcaccgtcgcgctgc

SEQ ID NO: 15047 - DNA, 239 bp, Glycine max
ctcataactctagtctttcattatgataattcccgcactatgggtgagcttcactaccaacaacaacaccaataccctcaccgataccctaatgatccatacgaacaacatactagctactccactcaggtcgtcaaggcggccaccgacgtcaccgacgtcggctccctctagatcctcgcctaattgatccttgccggcaccatcatagccctcaccatgctcacaccaccgatcgt

SEQ ID NO: 15048 - DNA, 420 bp, Glycine max
  modified_base (112)..(112): a, c, g, t, unknown, or other
  modified_base (242)..(242): a, c, g, t, unknown, or other
  modified_base (317)..(317): a, c, g, t, unknown, or other
caccgcattaaagaatttaagatatactatgatgagagcgcggtggccattactgttgctgggagttgttttcctggcatcagtttctgtctcatttggcattgcgtattgngaaaagcagaaccccagtcacaacaagtgcctccgaagttgcaatagcgagaaagactcctacaggaaccaagcatgccacgctcgttgcaacctccttaaggtggaggaagaagaagaatgcgaagaangtcaaattccacgaccacgaccacaacacccggagagggaacgtcagcaacacggtgagaaggaggaagacgaangtgagcagccacgtccattcccattcccacgcccacgccaacctcatcaagaggaagagcacgagcagaaggaggaacacgaatggcatcgcagggaggaaaa

SEQ ID NO: 15049 - DNA, 357 bp, Glycine max
  modified_base (71)..(71): a, c, g, t, unknown, or other
  modified_base (187)..(187): a, c, g, t, unknown, or other
ggacgaccttcttcatctcatcaaagttgactttttgagcgaattgaatcaggcttgagaaggtatcctantgttgtttgttcaccttcatctccatgatggaatactgtaaagatgtcctcagctgtcttgattcggatacctctcttaagatattcatgtgtctggatgatctggctgatcttgntccggttacttgtgtctcgcgatcttggagacactttgtgatagcaaatggtctttgcaagcagctatgcttgagaatgtttcctcagttatctagagttgcttttgttggtgaactgaatcaaaatggaacgaaggaacatgcaaaggttggatctagctattctatgg

SEQ ID NO: 15050 - DNA, 385 bp, Glycine max
  modified_base (6)..(6): a, c, g, t, unknown, or other
agcacngttcccattactgttgctgggacttgttttcctggctggagtttctgtctcatttggcattgcttactgggaaaaagagaaccccaaacacaacaagtgtctccagagttgcaatagcgagagagactcgtacaggaaccaagcatgccacgctcgttgcaacctccttaaggtggagaaagaagaatgtgaagaaggtgaaattccacgaccacgaccacgaccacaacacccggagagggaacctcagcaacccggtgagaaggaggaagacgaagatgagcaaccacgtccaatcccattcccacgcccacaacctcgtcaagaagaagagcacgagcagagagaggaacaggaatggcctcgcaaggaggaaaaa

SEQ ID NO: 15051 - DNA, 388 bp, Glycine max
  modified_base (70)..(70): a, c, g, t, unknown, or other
  modified_base (85)..(85): a, c, g, t, unknown, or other
gcttcctcgaatcgtgttgatgcggcagcagtcccctaccctgccgcacccacaagcttggcggtgttcnacatcaacaccatcnaggagccatggctgaagcacctcaacaacaccatcgaggagccatggctgaagcacctcaacaacaccacccctctcccccaagacaataataaaccctccctccccgcccctattctccacaaactcaacttgctcgacgccaccgatgccccccaatcctgggatgagattagcaaaacactccaagacctcaaatccccctccacctcaccccaacaacaacctcaacctccacaaaagaccaagtccttccacacggtggaagagctagacgccaagctcaaccccaagcccgaaccca

SEQ ID NO: 15052 - DNA, 342 bp, Glycine max
caccgcattaaagaatttaacatatactatgatgagagcgcgggtgccattactgtagctgggagttgcaaacctaccctatgccaaatgtaaaaaaaccgaggtagaagaagaagaccctgagctcgtaacatgcaaacaccaatgccaacagccacagcaatacactgagggtgacaaagcggtatgcttgcaaagatgtgacaggtatcatcgtatgaagcaagagcgagagaaacaaatccaagaggaaactcgtgagaagaaagaggaggaaagccgtgaaagggaagaagaacaacaagagcaacatgaagaacaagatgaaaatccctacatttt

SEQ ID NO: 15053 - DNA, 494 bp, Glycine max
acaacgcacgcgcgcgtacgtctggacttaaagtccaggcctttacaacggcctttttgtggagataaacaaggttctctggggtgcagaggaggggcagcaacaagggcagtaaaggctgcaagagagtgtgattgtggaaatctcaaagaaacaaattcgggaactgagcaaacatgccaaatctagttcaaggaaaaccatttcttctgaagataaacctttcaacttgagaagccgcgaccccatctattccaacaagcttggcaagttgtttgagattaacccagagaaaaaccctcagcttcgggacttggatgtcttcctcagtgttgtggatatgaacgagggagctctttttctgccacacttcaattcaaaggccatagtggtactagtgattaatgaaggagaagcaaacattgaacttgttggcattaaagaacaacaacagaggcagcaacaggaagagcaaccttttgaagtgcggaaat

SEQ ID NO: 15054 - DNA, 272 bp, Glycine max
  modified_base (20)..(22): a, c, g, t, unknown, or other
  modified_base (79)..(79): a, c, g, t, unknown, or other
  modified_base (83)..(83): a, c, g, t, unknown, or other
  modified_base (85)..(85): a, c, g, t, unknown, or other
  modified_base (88)..(88): a, c, g, t, unknown, or other
ctttatcactatatccatannnctgccaaattatactaactcgctttctctatataaagaagagcaccctctaaaaaancatntnttnacttcctatcatctcacacttcatttttctgaaccataacctcaacctcccctcacattaacttttttcctatcttgaccctttctcttacctccttctcttccataccaccaccaccaccaccaaccaaccaccccttccatacaaaaaaatcccctcatcatcttataacaacaataacaaa

SEQ ID NO: 15055 - DNA, 286 bp, Glycine max
tgacaccaatagacatcatggaactaccggtgtctatggtatagacaccgataggcaacaacatgggactactggtggctatgccggtgacactggtaggcaacatgggaacatcggtggcccttactatggaaccaacaccgcagacaccggtactggtcccagaagtggaaccacgggcggcaccggttatggaggcactggtggcactgattatggaacaactggtggcactggttatggaaatggaactgggtatggagtcaacacttggggtgcgcacact

SEQ ID NO: 15056 - DNA, 343 bp, Glycine max
  modified_base (266)..(266): a, c, g, t, unknown, or other
ccaaaacagtaaagctaacttcaacacctttaattttctaaaagtgattcagcggctgaataccaagcggagaagatgagtcaggagcagccacggcgtcccaaaggccaaaaccccatcaaatacggcgacgtttttgtcgtctccggcgaccttgcacagaagcccgtcgcaccggaagatgctgccatgatgcaaagcgcggaaactcgagtgctcggacaaacccaacccggcggagcagcttccgtcatgcaatctgccgncaccaggaatgaacaggctggccttgtcggtcacccggacgtcaccgacgttaccggcgaccgtggcgtcacagtca

SEQ ID NO: 15057 - DNA, 296 bp, Glycine max
  modified_base (262)..(262): a, c, g, t, unknown, or other
ttcaggtactgcgtttcggaagcagacacagatggctcgtacgaagcaaagcgctcgtaagtccacaggaggaaaggctcctaggaagcagcttgcaaccaaggctgcacgtaagtctgcaccaactactggtggtgtgaagaagccccaccgttatcgtcctggtaccgttgctcttcgtgagattaggaaataccagaagagtaccgagcttttgatccggaagctcccctttcagaagctggttcgtgaaattgctcangacttcaagactgatctgcgtttccagagccacg

SEQ ID NO: 15058 - DNA, 284 bp, Glycine max
ttcatgtactgcgtttcggaatcagacacagatttatcgtactgagcaaagcgctcataagttcacaggatgaaaggctcctacgaagcatcttgcaaccaaggctgcacgtaagtctgcaccaactactggtgttgtgaataagccccatcgtattcgtcctggtaccgttgctcttcgtgagattaggaaataccataagagtaccgagcttttgatccgtaagctccccttccacaggctgattcgtgaaattgctcatgacttcaagactgatctgcatt

SEQ ID NO: 15059 - DNA, 370 bp, Glycine max
atttggaaatttggctgatgacaccatcaattttgaggctttggcccacaagctggtgcagtttggagagattcaggtaaaagttgtattgaaattttcacaagacgaatttcttacagcttggtcaactcacgtgcgtcctgctacaactctgttggctgatgggtgtccatatgtgtatgctatggtgcatgatagttcagtgtctacaataccaggtgattttgtcattggtgttaagttgacaaccatgaacaatatgtgtgcatatgggctcaatcccgggaagtcacgttcctggctttgggcaccattcctaagtctatttcacagcatactgtttggaatcaaatggcaacagtgagaacac

SEQ ID NO: 15060 - DNA, 193 bp, Glycine max
cttctaaatggtttggtgaaaattagaaaaatggtcccgcctggttcacactttgaagccaagggttcccaactattatattccgggattaaggttattggcttgcttggccaacggaccaaatttggggaccttgaacccttgaggaaattaaggaaggaattattgacccattgggatggacttttgacaa

SEQ ID NO: 15061 - DNA, 277 bp, Glycine max
gctaatgctgatcatataaccttagactatgatattatacatctggcacacggcattaatctatgctcatgatgctgatcagaaatcaaattgcttatcttgagatgctttacagattaccatactatatgttataagctgcatcatataagacatatgaatatgctaataactctgcacataatactaaacataatcctactcagtacaccatggactatctaagtaatgcatctaatgctactaattacactaaactcactgctccttataaaac

SEQ ID NO: 15062 - DNA, 346 bp, Glycine max
acaaaggcaaaagatgtcacaagagagaagggtcaacaaggcagtcttaaagcaggaaatgagacacaagacattggccaaaagggttatggtggagcaaaggataccattggtagagtggacaacattactacaccacttgctaaaaaggctcaagttgctggtagcaccactgttcagtatgctggagagaaatcagcacaagccaaagatgctacggtaggatcaatggagaaaactacaaaggatgctaaaggaagagaaaaagcaggaaccaaaggtcaaacaaagaagggtggtggtgaggaacaaggaaaaagaagagaagaaacaggagaagaaaaac

SEQ ID NO: 15063 - DNA, 340 bp, Glycine max
gtccttaaacactcatcagtcatcaccatggccaagctagtttgttccctttgttttctgcttttcagtggctgctgcttcgctttcagttccagagagcagcctcagcaaaacgagtgccagatccaaaaactcaatgccctcaaaccggataaccgtatagagtcagaaggagggctcattgagacatggaaccctaacaacaagccattccagtgtgccggtgttgccctctctcgctgcaccctcaaccgcaacgcccttcgtagaccttcctacaccaacggtccccaggaaatctacatccaacaaggtaaggggatttttggcatgatatacc

SEQ ID NO: 15064 - DNA, 320 bp, Glycine max
cgctgctgccgaaacccttccggaaccctaaggtaagtgagtgatcagtggttgagaatggtggagaaggcgaagggtagaaaggaggaggtggttacacgtgagtacaccattaacctgcacaagcgcctccatggctgcacatttaagaagaaagctcctaaagctattaaggagataaggaaatttgcccaaaaagccatggggaccaatgatgtgagggtggatgtcaagttgaacaagtttgactggagccagggaatcaggagtgttccaaggaggattagagtaagaattgctcgcaagagaaatgatgatga

SEQ ID NO: 15065 - DNA, 350 bp, Glycine max
ggtgatgctgctcagaaaaccaaagactatgccagtgacactgcacagacatcaaaggactatgctggtgatgctgctcagaaatcaaagggctatgttggtgatgctgcacaaaagaccaaagaatatgttggtgatgcagcacagaagacaaaggattatgccactgacgcagcacagaagaccaaagattatgctactcagaagaccaaggactatgcaagtgatgcaactgatgctgcaaagaagactaaagattatgctgctcagaagactaaggactatgcaagtgaagctagtgatgttgcacagaacacataagattatgctgctcagaagaccaaggacta

SEQ ID NO: 15066 - DNA, 307 bp, Glycine max
  modified_base (11)..(11): a, c, g, t, unknown, or other
ttggtccttanacactcatcagtcatcaccatggccaagctagtgctttccctttgttttctgcttttcagtggctgctgcttcgctttcagttccagagagcaggctcagcaaaacgagtgccagatccaaaaactcaatgccctcaaaccggataaccgtatagagtcagaaggagggctcattgagacatggaaccctaacaacaagccattccagtgtgccggtgttgccctctctcgctgcaccctcaaccgcaacgcccttcgtagaccttcctacaccaacggtccccaggaaatctaca

SEQ ID NO: 15067 - DNA, 375 bp, Glycine max
  modified_base (352)..(352): a, c, g, t, unknown, or other
tttcaatttctgatactgtgaagagtgaaaaaatgccgcaagagttggcatgggatttggaggagcttcgccacctccacagcatcgtcaaaagacctcgaactctctctctactctcctccgaaattcgcatcctcgaaaagttatcgtcatcagaggagccttctgcgcaggcttcgcagattccggcgccgattacgaccggaactaaggtggcgccttcagttgcactgaattatgccgcactcgcttcgttcagttgggatcaggatagcgacaaagttaagatatatgtgttaatggagggaattgatgaagacaaggttgaatctgagtttaagtcaatgtcatntgatgttaagttccatgatgttc

SEQ ID NO: 15068 - DNA, 222 bp, Glycine max
atcctagtacaccgtattaaagaatttaagatatactatgatgggagcgcgggtcccattactgttgctgggagttgctatcctggcatcagtttctgactgatttggcattgcgtattgagaaaagcataaccccactcacaacaagtgcctacgaagttgcaatagccagaaagactcctacaggaaccaagcatgccacgctcgttgcaacctccttaa

SEQ ID NO: 15069 - DNA, 419 bp, Glycine max
  modified_base (297)..(297): a, c, g, t, unknown, or other
  modified_base (341)..(341): a, c, g, t, unknown, or other
tcgaggaaattacactcttcacattgatgaaggaatggccattaaatgacctctctatgatgagcctgaccatatacctgtgcatactgaagataagatattttacactgaagacgatttccgtgattttctgacccgccggggttggatatgtctaagagaatttgacagctacagaaatattgacaacatggatgatcttcgacctggtgccatatatcgtggtgtgagttgaaagcaggtacatggtgtggtcaatgttcagctaccataaaatgtctggagaactgtggtggngactgttcagatctttgatgtatgtgcggcactaacctggaatngtatttgttttaagttttgataatgcttgttataagtttatataagaaaaggaactaggtcctttgcacaaattccgg

SEQ ID NO: 15070 - DNA, 414 bp, Glycine max
  modified_base (364)..(364): a, c, g, t, unknown, or other
gtcgcaatcgcagtcgcagtcgcagtgtgtcacgctctccttgcaattcccgcagaagaaggtactctccatcccctgtgtctcatcgccactcgagaactttcaggcgccgctcttctttccacaagcgccgtcgaaagcacagaacctcttccttcccctctctttcacgcagacccacttccaaacccaagaaagatcaaaacaaaagcgagcgttaacacgaggaagagttgaaactattggaagaagagactgcaagaagactggaagaaagcaattccgaaaaatgttgaggagaagcttatcacagaggaagtcaagttagaaatagaaaagcgcgtagcagagggagtgaagaaantgtttgatgatgttgaagctcaacttgaaaaagaaaaggaagatgctctt

SEQ ID NO: 15071 - DNA, 128 bp, Glycine max
atttgttgactatttcaattgagataaaaaagtgtaatttagggtcccagctgatccaactctccctccccttattcttgcttgtatatactgagttttttttttctcgtaaaaattaaataattctt

SEQ ID NO: 15072 - DNA, 130 bp, Glycine max
caataattccttcacttgcagaacttagctctctgggtccatgagaataacttgattagtgttagccctaaaatttacctttaaaccttaccacagtgccaccacacattgtacaaatgcacacacacaa

SEQ ID NO: 15073 - DNA, 414 bp, Glycine max
ctccccgcccaaaccctaactacctaccctattcggctttctcgcatccatcatgaaaggaggaaagttcaagaccgaatctaagagagcccatgccaaacttgctgtgaataagaagggcgccgtcaccaagactaggaaaccccccggaaaggggaaggcatcgaaagatcctaacaagccaaagaggcctccaagtgctttcttcgttttcatggaggaattcaggaaggtgttcaacacggaacattcctacaacaaagcagcgtctgctgtgggcaaagctgctggagcataatggaagacgatgtctgatgctgaaaaagcaccttatgtggcaaagtctgagaaaaggaaagtggagtacgagaagaacatgatagcttataacacgaaacatgcggaaggtcctac

SEQ ID NO: 15074 - DNA, 238 bp, Glycine max
accaagttaatgttgcaatcgcattataataaccggccaaaggtgattgatagaaatttgcaagtttgaaaagaaacattgcatctcatccaccaaacaaggccgagcctgattaaaaggcaaggccaggagaaactggtgatccgggtgggacttgtggcgagaaccttgaaggttaacaacattttggtgaaagaaagaaccagggaaggaaaaccagggaagaaccaattgggac

SEQ ID NO: 15075 - DNA, 398 bp, Glycine max
gcacgggacagcttaaacgacgccgcgctgatcaacgactccttacgtaaaggacgacggtgtcagacaaacggtgccggttggtggtgccgccacgctattacgctaatcgtatccatcaccctcatcaaaacccctcctttctcttaatttagaaaccctaattcagaagaaaaaagtcaccttctccagaatttgcgcgaacagggtaatggcatcttcttcagactcatggatgaaggaatataatgaagctgtgaaacttgctgatgatatcactggcatgatttctgaacgtagttcattccctgcatctggaccagaaacccagcgacatgcatctgctataagaaggaagatcacgatattggggaccagacttgatagcttgcaatctc

SEQ ID NO: 15076 - DNA, 250 bp, Glycine max
  modified_base (12)..(12): a, c, g, t, unknown, or other
  modified_base (21)..(21): a, c, g, t, unknown, or other
  modified_base (226)..(226): a, c, g, t, unknown, or other
tgagagtgcggnttcctttgntggtgttgctgcgaaactgtttggctgcatgagtttgtgtctcattaaaggtgagagacgatgagtataaccatttctacttgagaagctctaacagcttccaaactctctttgagaaaccaaacggtcgcattcgactcctgcagagattcaacaaacgcttcccacaacttgagaaccttcgagactaccggattgttcagantcagtcaaaacccaacacaatcct

SEQ ID NO: 15077 - DNA, 432 bp, Glycine max
ctcgaacccgtccaaccgcttcagccccccacttccaaaaagaagcttcctgggacccaaacccaccaccacttttgccaggttttcaaaacccttccattattcaggtcccaaaggccaccaagattgccatttttaaaagccaacctgccaattttgcaaccccggtcaatccacttatggtaactatttaaccaacaaaagtggttgttgcttccatgattacccttattaaccaccatgatataactggtgccaatccagagaaaagacaccggtagacatcattttggtcgtggttacgacggtgacactaacaagcaacatgatgctactggtgtttatcccggaatagacattggtagagatcatgggactacccgtggttatggcctatacaccgacagacatcatggaactttctgggtgaat

SEQ ID NO: 15078 - DNA, 225 bp, Glycine max
gtttagcctttctatcacctgaaaatgtcttgctgcagtggtagactgcgttgccgaagcgcctgcacgtgctgtaacagctgcagaagctgctagatgtatccagacttgagcgacaccgagtctagcaccaccgagaccttgatcatcggagtggcaccagctaatgctgaatttgagagtgctgatataggcgttcccgctgagaacgattgctgcaaatgc

SEQ ID NO: 15079 - DNA, 91 bp, Glycine max
attttcaaatctgtatctagtcaccatcaatttagaggattctgaccaaatgctggtacattttgtagagattcaggataatgtagtattg

SEQ ID NO: 15080 - DNA, 263 bp, Glycine max
caatttcatactatctctacaccgtgaagagaaggctaattccggtctattcctacaccataaacctttactcttaatgccctattacttgaatcatcttcatttaccttaacaaccaccaacaacacgcaccttatggtaacccggaacccttatcaaattccataaattacattccgggcaaaaaccctaccttcttgttcgggttcaaaagaaccacctggtccttcaaaccccgaaaatagacctttttatgccaccca

SEQ ID NO: 15081 - DNA, 366 bp, Glycine max
gtgaacaagtcctcaagtttccaccacctcatgtcattcaagtgagtaagtgtgcatggatgaccgatgaagaatttgcaagagagatggttgcgggtgtaaatccatgcgtaattcgtggtcttcaagagtttcctccaaaaagcaatctggatcctacaatctatggtgagcaaaccagtaagataacagcagatgcccttgatctagatggatacacagtggacgaggcactagcaagtcggaggttatttatgttagattaccatgatgtattcatgccatatataaggcggataaatcagacatatgccaaggcttatgcgacaaggactatcctttttctgagagaaaatggaaccttaa

SEQ ID NO: 15082 - DNA, 308 bp, Glycine max
gcagaccgagctagctagctagcacgcaagcacagacatggaggcaaagcgaggccatgccctcatgtgcttggcacgtgtttcactcttcctgtgcgctctaaccctatccgctgctcacggaagcaccacggttcaagacatcgcgagaaagttgaaactcggggacaacgagcttctgcgcacggagaagaagttcaaggttttcatggagaattacgggaggagctactccacagaagatgagtatttgcgcctgttggggattttcgcccagaacatggtcaaagcggcagagcatcaggcgc

SEQ ID NO: 15083 - DNA, 299 bp, Glycine max
gcagaccgagctagctagctagcaagcaagcacagagatggagggaaagcgaggccatgccctcatgtgcttggcacgtgtttcactcttcctctgcgctctaaccctatccgctgctcacggaagcaccacggttcaagacatcgcgagaaagttgaaactcggggacaacgagcttctgcgcacggagaagaagttcaaggttttcatggagaattacgggaggagctactccacagaggaggagtatttgcgccgtttggggattttcgcccagaacatggtcagagcggcggagc

SEQ ID NO: 15084 - DNA, 336 bp, Glycine max
acagaacgaagccacgcatgataataacaatacccttcttcgtggcttccctgtccactcggcactcacaattctcaacccaaccaccccctattaaccctcaccgcaatctctgattcgatcttcttcaatttcggggtttcccatataccacaaggcataggcctgtgtgaatttgcgatatgctgggtaattgtcgccaagacccaatctcttgggtactcctttaccaacccccaccgccgcattaatcgtttttctattggaatcggacaaaggttccactgcgactgacactttcaaaggccaaaaaaatgctcgattcggtccttctgg

SEQ ID NO: 15085 - DNA, 406 bp, Glycine max
  modified_base (267)..(267): a, c, g, t, unknown, or other
  modified_base (381)..(381): a, c, g, t, unknown, or other
caattttggttaagagtcttgaaaaagcaagagaaaaaaaaatggcaaccatggcaaccatttctgatcaacctagagggtcctactcctatggaacctcatatggagcaccctatggaaccacgtatgagaccaacaccagcattaacaacccaccttcacgccaaacagtgaagttcataactgctgccactattggcatcacacttttgctcctgtctgggttgaccctcacaggcactgtcataggtttgatcattgcaaccnctcttcttggtatcttcagccccatccttgtccctgctgcgtttgtgctggtcctagttgcttctggctttttgttctctgggggctgtggtgtggctgccattgctgctttgncttggattacaactatgggtctggg

SEQ ID NO: 15086 - DNA, 247 bp, Glycine max
gaaagcacaacaagaacgatcagcagctattctctcacgggcattgaaaatgtgccatgataagctggtgaaaggagagagtattattcttcatggagacgcaagggaaatgatttgtgaagccgcagagcaaatgcaaattaatctactagtcttgggtagccgtggccttggcacgctcaaaaggacatttcttggaaatgtaagcgactattgcgcacatcatgcaaaaacaccgatccttatt

SEQ ID NO: 15087 - DNA, 268 bp, Glycine max
cgctgctgactaaaacacttctgaacctttaagtgggtttgtggtgattaattccgaatggaggataatgactagggatcaaatggaggattcagatacacctaaagccaatgatatacctagacgtgcttgtcatgtctggtcatcttacacagaagctcctcaaactattagatactttcataatgccattcactgaaacatgagtactcttacttacacagcctatctgaacatctaccgttatgcattctgccagctccaggaa

SEQ ID NO: 15088 - DNA, 105 bp, Glycine max
tccccccttccttaacctcggattccgcttcgagcatttccaagattcattttaagctaaccaaaccaaactcgacttggttgatcctctagttttgccaaacac

SEQ ID NO: 15089 - DNA, 183 bp, Glycine max
aaattctgagttctaacgccactaatcctatgctgacccggctgcttgaaaactgtaagagtctcaaatatctggttgatgagtgtccttttgcatttgtgaactagtatgtaatattttattcacttaaataaagcgcattactatgtgcaatgagtgtgtttaaatgtaataaaagagaca

SEQ ID NO: 15090 - DNA, 336 bp, Glycine max
taaaattcttccaccaagttatgggtttccttgggttgcttcgttgctccctcttaggtctctcttctagttccagcatatcaactcatcgttccatattggaccttgacctaaccaagtttaccacacagaaacaggtgtcttcactgttccaactatggaagagtgagcatggacgtgtctaccataaccacgaagaagaggcaaagagacttgagattttcaagaataacttgaactatatcagggacatgaatgcaaacagaaaatcaccccattctcatcgtttaggattgaacaagtttgctgacatcactcctcaagagttcagcaaaa

SEQ ID NO: 15091 - DNA, 310 bp, Glycine max
gtctttctatatcctcagcaacacactcggaaaaatgtagggggactagaatcttttgttccaaacaaaaacgtatgaattggtcggtttttctccggagtcgtcttcacttttctccgagtttttattatcatcatctctctcgtgtccctgtctccatctccatctcttagtttcttcttcaaatggcagaagttgaagacatagacaaccctcatcacgaccaccatcattacctttcttcttctacaacacaacctccaatgatcaatttcccgcgagatctgttaagaaccttcgtgggagtgaa

SEQ ID NO: 15092 - DNA, 135 bp, Glycine max
ctctcaagccatttctttctataatctaaaccaccctaataacactcacgttattttatcctcatgtaatagccaacacaatatgacacggctcttacaataccatacttgactttacaataccaatcattaaca

SEQ ID NO: 15093 - DNA, 134 bp, Glycine max
taggctttataataactcagtaaagccactttcttcgttgcgtgaaaaatagcttgatcccgtgctaccacgccagcagcatctgctttttttgttattccttttggttctggggtggaatctacgtataaaag

SEQ ID NO: 15094 - DNA, 365 bp, Glycine max
taaaattcttccaccaagttatgggtttccttgtgttgcttctgttgtccctcttaggtctctcttctagttccagcatatcaactcatcgttccatattggaccttgacctaaccaagtttaccacacagaaacaggtgtcttcactgttccaactatggaagagtgagcatggacgtgtctaccataaccacgaagaagaggcaaagagacttgagattttcaagaataacttgaactatatcagggacatgaatgcaaacagaaaatcaccccattctcatcgtttaggattgaacaagtttgctgacatcactcctcaagagttcagcaaaaagtacttgcaagctcccaaagatgtgtcg

SEQ ID NO: 15095 - DNA, 311 bp, Glycine max
gttcaatatcctagtacaccgtattaaagaatttaagatgtacgtatgatgagagcgcggttcccattactgttgctgggagttgttttcctggcatcagtttctgtctcatttggcattgcgtattgggaaaagcagaaccccagtcacaacaagtgcctccgaagttgcaatagcgagaaagactcctacaggaaccaagcatgccacgctcgttgcaacctccttaaggtggaggaagaagaagaatgcgaagaaggtcaaattccacgaccacgaccacaacacccggagagggaacgtcagcaaca

SEQ ID NO: 15096 - DNA, 349 bp, Glycine max
ctcaccgattgctagaatggaatttcgatgctcagtcaggtcgtttaccattctcttctctcttgctcttgcaggagagagccatgtccatgcatcgctacctgaggaagattattgggaagctgtttggccaaacactcccattcccactgcactgcgagagcttctaaagcctctccctgcaggtgttgaaatcgatgaactccctaagcaaattgatgatacacagtacccaaaaacattcttctataaagaagaccttcatccaggcaaaacaatgaaagtacaattcaccaagcgtccctatgcacaaccttatggtgtatatacatggttaacggatattaaa

SEQ ID NO: 15097 - DNA, 260 bp, Glycine max
  modified_base (247)..(247): a, c, g, t, unknown, or other
caaaacagtaaagctaacttcaacacctttaattttctagaaggaattcagcggctgaataccaagcggagaagatgagtcaggagcagccacggcgtcccaaaggccaaaaccccatcaaatacggcgacgtttttgtcgtctccggcgaccttgcacagaagcccgtcgcaccggaagatgctgccatgatgcaaagcgcggaaactcgagtgctcggacaaacccaacccggcggagcagcttncgtcatgcaatct

SEQ ID NO: 15098 - DNA, 186 bp, Glycine max
gagaggccgaccgagagagcgagggagcatggaggagggaaagttgagagagctgaagcaattcatagagatatgcaagtccaatccctcacttctccacaatccatctctttcattcttcaagacttatcttctcaacctcggtgctcgcatccctccccaacccaaaacggaaccaggtgattt

SEQ ID NO: 15099 - DNA, 60 bp, Glycine max
caagctgttgagaagctattaaagaaccaaagagaatcctacggtgtggatgctcagcct

SEQ ID NO: 15100 - DNA, 244 bp, Glycine max
ctccgatctacagatagatgagatgaattttagacgcactgatcgattgcaccattctcttctcgtctgctctcctctaaaggaatatctcgccacatattaaatgttgcaagctcactgaagatgaggatgcacgccttttggttttgactttattattctctattcaaaagtatcctattcgtctgttacttttacataatctgtactccatgttgaactattgaatattgataatgctcct

SEQ ID NO: 15101 - DNA, 366 bp, Glycine max
ccacaccctataaataaacactctttgtgtgtctgcattttgagtgattccctgattcttcatccatagacatggccaccgtcacttctgcagccgttgctattccctcattcactggcctcaaggcaagcgcaggcaaagtgagtgccgcagttaaagtctcagctccccaagccacaaggttgggcatcaaggcttcgctgaaagacgttggagtcgctgttgtggccactgccgcgagtgcagtgctggctagcaacgccatggccattgaagtgttgctgggtggtgatgacgggtctctggctttcgttcccaacaatttctccgtggcctctggggagaagatcgtgttcaagaacaacg

SEQ ID NO: 15102 - DNA, 222 bp, Glycine max
tgaaatccaaaactggcggaaacggtctcactctcactctcacaaacgagacggccgtcgccgcatcggcactcgggaggtccgcggtgccggaggcgggtgcggccggcgaaggacttggccgagagccggcggctggtggccggcatcatggcgcggcggagcctccgatacttcttcctgctgccgctggtgtacatctcggggctgctgatgtgcgtg

SEQ ID NO: 15103 - DNA, 347 bp, Glycine max
aggaaataattgatctttgaaaatgcagggaggaaagaaagctggagagtccatcaaggaaacagctgcaaacattggtgcttctgccaaggctggcatggagaaaaccaaggccactgtccaggagaaggcagaaagaatgacggcacgtgatccgatgcaaaaggagttggcaacccagaagaaagaggcaaagatgagccaggcagagctggacaagcaggcggcgcgtcagcataacacggcggcgaagcaggctgccacggcagggcacatgggacaacccatggggacccatcagacgtcagctatgcccggtcatggaacccgacagcccacgggccatg

SEQ ID NO: 15104 - DNA, 236 bp, Glycine max
ctcgagccgttatcagtatcattcattgtcactacgattgttcgtgaagcaagtattactcttgagaagaattaaaagatcatcatcacaataacaagatgagttcaggaattagagcatggagtgtggcagctagtgttggaattgtggaggccttgaaagaccaaggcatatgcacgtggaatcatgcattaagatcaagctaacaccatcgtaaaaaccatggtgggtcattc

SEQ ID NO: 15105 - DNA, 314 bp, Glycine max
tgatgacttgggctgtgaagttagcagcctcctgtgcagggtcagtcatcatgaaccaccctggtcagattggaaatggctatgcccctgtcctcgactgccacacttctcacattgctgtcaagtttgctgaactcatgaccaagattgacaggcgatccggcaaagagcttgagaaggagcccaagtttttgaagaacggtgatgctggttttgttaagatgattccaaccaaacccatggttggtgaaactttctccgagtatccttcacttggtaggtttgctggtagggacatgcgtcaaactgttgct

SEQ ID NO: 15106 - DNA, 372 bp, Glycine max
caaaacagtaaagctaacttcaacacctttaattttctggaaggaattcagcggctgaataccaagcggagaagatgagtcaggagcagccacggcgtcccaaaggccaaaaccccatcaaatacggcgacgtttttgtcgtctccggcgaccttgcacagaagcccgtcgcaccggaagatgctgccatgatgcaaagcgcggaaactcgagtgctcggacaaacccaacccggcggagcagcttccgtcatgcaatctgccgccaccaggaatgaacaggctggccttgtcggtcaccgggacgtcaccgacgttaccggcgaccgtggcgtcacagtcacagaaactaaagtccctggaagacgcatta

SEQ ID NO: 15107 - DNA, 333 bp, Glycine max
ctcgagccgaatcggctcgaggattgggagagttggaagactcggctcctttcagcttgcccttcatgtttgctttcctatcacttcaatcagcactccactagtccttcaccgtctccgatttacctgttgaaggcttggcgtgttgatcaaaaaggattgctacatgatattaatgaaatcctgtgcaaccttgaacttattattcagagagtcaaagcgatgccaaccccatatggaagggtgttagacatgttctttatcactgatgggatggaattgcttcacaccaaacagaggccagattatcgttgtgaatatctgattgatgct

SEQ ID NO: 15108 - DNA, 208 bp, Glycine max
ctcgcaccgaatcttctccacgattgccagagtgggcagactcggctcctttcagcttgcccttcatgttagctttcctatcactccaatcagcactccactactccttcaccgactgccagttacctgttcaagggttggtccgctcatcaaaaaagattgctacatgacatcaatgaaatcctcagcaaccttgaacttattattc

SEQ ID NO: 15109 - DNA, 396 bp, Glycine max
accttacgcattccatttctctctattcgctctctttcaatcacaacaacatggccgaacgtggaggcggagaccgtgccggtttcggtcgcggctttggcggtcgtggacgcggcggcgacaggggacgagggcggcgcagggcaggagggcgccgcgacgaggaggagaagtgggtcccagtgacgaagctggggcgcctggtgaaggaggggaaaattcggagcctggagcagatctacctacactcgctcccaatcaaggagcaccaaatcattgacaccctcgtggggcccaccctgaaggacgaggtgatgaagatcatgcccgtccagaagcagacccgcgccggtcagcgaacccgcttcaagggcttcgtggtggtcggcgacaaca

SEQ ID NO: 15110 - DNA, 296 bp, Glycine max
cctcgtgacacttcttacctccctcttctgattatcttctacttacatcatctgcactcatctctccctatcggaccctgacctaaccaactttaccacacaacaacaatcgtattcactactccaaccatagcacagtcatcatctacatgtctaccattaccacaaagaagaggcttcgacacttgcaaatttcacgcataacttgaactatcttatgtacaagaactcatactgaaaatcaccccattcatcatcgttactatctaacaatatcactgacatgactcctcaac

SEQ ID NO: 15111 - DNA, 387 bp, Glycine max
  modified_base (265)..(265): a, c, g, t, unknown, or other
caacaatgaagacactcctgttgttgccgtttctattatggacaccaacagcttggagaaccagctcgaccagatgcctaggagattctatcttgctgggaaccaagagcaagagtttctaaaatatcagcaagagcaaggaggtcatcaaagccagaaaggaaagcatcagcaagaagaagaaaacgaaggaggcagcatattgagtggcttcaccctggaattcttggaacatgcattcagcgtggacaagcagatagcgaanaacctacaatgagagaacgaaagggaagacaagggagccattgtgacagtgaaaggaggtctgagcgtgataaaaccacccacggacgagcagcaacaaagacctcaggaagaggaagaaga

SEQ ID NO: 15112 - DNA, 377 bp, Glycine max
gctgaactcatgaccaagattgacaggcgatccggcaaatgtcgtgataaggagcccaagtttttgaagaacggtgatgctggttttgttaagatgattccaaccaaacccatggttgttgaaactttctccgagtatcctccacttggtaggtttgctgttagggacatgcgtcaaactgttgctgtgggagtcatcaagaacgttgagaagaaggatcctaccggagccaaggtcaccaaggctgcccagaagaagaagtgaatcgtgcgggctggttcatcaggggatgttggttacaataaatgttggtttcttttctgtactcttgtgtcttcttttctagggagcttgtttttccgacaaaagttgaagtc

SEQ ID NO: 15113 - DNA, 396 bp, Glycine max
  modified_base (382)..(382): a, c, g, t, unknown, or other
cggggctacccgctgagtttaagcatatcaataagcggaggagaagaaactaacaaggattcccttagtaacggcgagcgaaccgggaaaagcccaccatgaaaatcggtcgccctcggcgtccgaattgtagtctggagaagcgtcctcagtggcggaccgggcccaagtcccctggaagggggcgccagagagggtgagagccccgtcgtgcccggaccctgtcgcaccacgaggcgctgtcggcgagtcgggttgtttgggaatgcagccccaatcgggcggtaaattccgtccaaagctaaatactggcgagagaccgatagcgaacaagtaccgcgagggaaagatgaaaaagactttgaaaagagagtcaaagagnagaaaaatggaaaa

SEQ ID NO: 15114 - DNA, 370 bp, Glycine max
cacaaaaggatattgatgtcagcccaatctctcgccgtttaggtgtaactgtgctcattggtgctgctgctgttggctccaaagtccaacctgctgatgcagcctatggtgaagctgccaatgtgtttggaaagccaaagacagacacagatttcctgccatacaatggagatggattcaaactatctattccctcaaagtggaacccaagcaaagaagttgagtacacgggtcaggttgttagatatgaagataactttgactcaaccaccaacgtggttgtcaccatcactccaactgataagaagtccatcactgactatggttcacccgaagagttcctctctaaggtggattatttactaggaaa

SEQ ID NO: 15115 - DNA, 322 bp, Glycine max
tttgagtatgtgtcattcaagaccaatgatagaccctcgatgggagaccttgcaggggcaaactcattgttgaacgcattgccagaggaagtgattcagcacacttttaacctaaagagccagcaggccaggcaggtgaagaacaacaaccctttcagcttcctggttccacctcaggagtctcagaggagagctgtggcttagagagccctttttgcatgtgctaccacacttttgtccttttgggctctagctagtgctggtagcagtaaataagaatgaataaaagaaacaaaagcttagatgccctttgttaagtgta

SEQ ID NO: 15116 - DNA, 378 bp, Glycine max
tatatcaatcctggtaattgaagatggattaatattatcagtcgcagttggatgttggtattttcaaattctggaacgctgtgaacagtgactgtatgatttgaaaatgtgaaggactgtatctaactcaaaacttaagtctcaaaataaataatgcacgagaggtttgcatcttttcatgttagattgttgtagtcatattgcaatagtgcttctccttttcatgtacatcatcattggtggagattggatacaaagatcaatagcatgggcttgttttcaatcttaaccgagaggattaagactcttatttccagctgatcttgtcgacaatacattttttttaatcaagaaaacctgctttatttacttgctttt

SEQ ID NO: 15117 - DNA, 306 bp, Glycine max
gagtttctgatgatgaattcaataactataagcttgtgttcgctccacagcaagctgaggatgacaaatgtggggatattgggattagtattgatcatgatgatggaaccaggcgtttggtggtgtctaagaacaaaccgttagtggttcagtttcaaaaacttgataaagaatcactggccaagaaaaatcatggcctttctcgcagtgagtgagacacatgtgtgagagtactaaataaatgctttggttgcacgaaatcattacactaaataaaataatcaaagcttatatatggccttccgc

SEQ ID NO: 15118 - DNA, 109 bp, Glycine max
tccaataacatcatctattaacaccacaccacttctacctccgctgtattttcaaaattaaatcggcacaaccaaccaccactcctcttccatctttaccctaattcca

SEQ ID NO: 15119 - DNA, 339 bp, Glycine max
atgtcatcttcattcttgtttttaactacaggaaggtgtacaacaacttgttcttggtttatacatcatcaggggtgacaacatgtatgtcccttactctatcatttttaaatttgtgcatcatttagatttcattttgtggcactatttatatacactaaaaaatgtatggtttccgtttggtcattgcagaagtgttgttggtgaactagatgaagaactggattctagtctggatttgtcaaaactcagagctcatcccttgaaacctgttatccattgaggtgaaatactatgtgatggatttaatgaatgcatgcctactgggtggaaagagtc

SEQ ID NO: 15120 - DNA, 144 bp, Glycine max
cttactatcgagactaaatacccttctattaactaaacactggaactaataggcgtacaatatttctgtatactgagctgtattatactttggtttaatcatatgcattacttcatgctgtgtaaaattgttatccgcatataa

SEQ ID NO: 15121 - DNA, 377 bp, Glycine max
cctgagatttattcaagtttcttgtttaggtgcatctcgtgtgtctccatctaggatgctcagaactaaatcagctgctgaggaaatgattttaagggaactacctgaggccacaatcttgaaacctgctgtaatgattggtacagaggatcggattttgaatccatgggctcattttgctaaaaagtatggctttcttccgttgtttggagatgggagcacaaagatccaacctgtttatgttattgatgttgctgctgcactcacttcactcttgaaggatgatggcactagcatgggaaaaatttatgaactgggtggtccagagatctttactgtgcatgaattggcagacgttatgtttgatacaattcgag

SEQ ID NO: 15122 - DNA, 331 bp, Glycine max
cggtactgccttttttacctagttaaacaacgccgaccgagccgcttacaaccttcaatctggcgatgccttaagagtccctgcaggaaccacatactatgtgcttaaccctgacaactactagaatctcataatgatcacactcgtcatacccgttaacaaacccggttgatttgagagtttcttcctatctagcactcaagctcaacagtcctacttgcaagggttcagcaagaatattctagaggcctcatacgacaccaaattccaggagataaacaaggttctgtttggtaaataggaagggcagcaacaatgggaggagaggctt

SEQ ID NO: 15123 - DNA, 377 bp, Glycine max
  modified_base (45)..(45): a, c, g, t, unknown, or other
gttatgggtttccttgtgttgcttcttttctccctcttaggtgtncgcttctagttccagcatatcaactcatcgttccatattggaccttgacctaaccaagtttaccacacagaaacaggtgtcttcactgttccaactatggaagagtgagcatggacgtgtctaccataaccacgaagaagaggcaaagagacttgagattttcaagaataacttgaactatatcagggacatgaatgcaaacagaaaatcaccccattctcatcgtttaggattgaacaagtttgctgacatcactcctcaagagttcagcaaaaagtacttgcaagctcccaaggatgtgtcgcaacaaatcaaaatggccaacaagaaaa

SEQ ID NO: 15124 - DNA, 325 bp, Glycine max
tatatcaatcctggtaattgaagatggattaatattatcgggctgaattggatgttggtattttcaaattctggaaggctgtgaacagtgactgtatgatttgaaaatgtgaaggactgtatctaactcaaaacttaagtctcaaaataaataatgcacgagaggtttgcatcttttcatgttagattgttgtagtcatattgcaatagtgcttctccttttcatgtacatcatcattggtggagattggatacaaagatcaatagcatgggcttgttttcaatcttaaccgagaggattaagactcttatttccagctgatctt

SEQ ID NO: 15125 - DNA, 343 bp, Glycine max
  modified_base (287)..(287): a, c, g, t, unknown, or other
ctcagggatagcgaaaattcatgggagaagatgggagaagagggggatttggatccaaagaaacacgggtaatttattaggagtgtacagaatcagagacagagcaagcgttcttaagcgccatccttgagcaaccaattagtgtctccattgatgcaaaagattttcatttatacaccgggggaatttatgatggagaaaactgtacaagtccgtatgggattaatcactttgttttacttgtgggttatggttcagcggatggtgtagattactggatagcgaanaattcatggggagaagattggggagaagatggttacattttggatccaaagaaaca

SEQ ID NO: 15126 - DNA, 396 bp, Glycine max
  modified_base (354)..(354): a, c, g, t, unknown, or other
tgcttgcaagcatggcgaagagcaaggaagacataaccgatggaacatcacaagcaaggctttcagaagatgaagcagtgagagtggcctacgagcatggctcaccccttgaaggaggaaagattgctgactctcaaccagttgacttgttttcaagtgcacacaatatgccaaagagtggccaaacaacaatggattcaaacactagtgatcaatctcagatgcaacgtgatacacaagaagggggttctaaagaattcaccactggagctcctggatagccccaaaaggggctcctccagcaatgggtcataaattttgaaggcaataatatagacaaccttattaaatatngttacttttgtgtggtttggtctgccctttggttctttttta

SEQ ID NO: 15127 - DNA, 387 bp, Glycine max
  modified_base (305)..(305): a, c, g, t, unknown, or other
tctttgggttcctgtaggaggcggtggatgggaggtctgaggtggggccctatgaggcgggagtaggtgaccaccaggaaagcggcggcgacgacgacgaccattgcaatcaagggcggactgaagtcaaccgccggcgagtttgacggtgggggaaagaaagacttgtggaggattggtgttggtgttagagatggagatggggcccaatgaggtggctgagaaggagccatcatgatgatgagaaaatggtaagaataaacaaaaaagagatgaatagggttttagtgctacaaacaaagcanagagagagagagagtgcagttgggtttaatgcagatagatacaaacgttgacttgtggtgtgtgcttctttttttttatttt

SEQ ID NO: 15128 - DNA, 388 bp, Glycine max
  modified_base (354)..(354): a, c, g, t, unknown, or other
cacaatcacatgcacagtttttgcattgtattttggatcgttgctaaatgttctccaaagacgagttggagaggaagaaagacttttgaaagataaagttgcaaacaaagcagtgttccttcgtcgagtactatctaaactatctgccaagcttagaggcagatcgttggaattgactccaccagctccctcgtggtcatcatcatcgtcctttgttactccaaaattgattcttagagtactagtggttgcaagaattgcctttgcatggcaatactattcacaatgatatctgccaactaagtagttttacttgtactattgcatgtattttcatgtacaatacaaactttncactgcccgatgtgcctgcgtgcattcatgactt

SEQ ID NO: 15129 - DNA, 291 bp, Glycine max
ctgtacatcatatatttaccatcctcagaattttcgcagaagtgaaaaccctaactctagcaatcaatataacaacacaagcatacaaaaatgactcacaatgcgaattttttcaagggtaaatcatacaacaaattaattcttcacaattgtcactacaaagtttctgttactcgcaaacgaaatagattcctgaagccattcaatgatacaaaggatatggatactgatcgcgatgatagtaaattcattaaccactacaattatatcaaagcacctactctaacaact

SEQ ID NO: 15130 - DNA, 236 bp, Glycine max
atttctctatcattatgacaatgattcgttcaaacccacgacgcgtttttcacctttctcttcttctcctattcctctattcttcctcaaccgaatccctcagatttctaatccaatccaaccacaccaaatgcatcttccaggatatctacagcaattacatgaccgttatctagtaccaaattgttagccccaactaaagtcaacctctaccagatacccacacattcaccgtc

SEQ ID NO: 15131 - DNA, 337 bp, Glycine max
aaacaacactctggctctccctccaccgccccaggccatggcgggcgagcctctgctccgccccccgccccgcaggcgccgaggccaaagcggcctcggcctccgtcggggcgcaccaacctagcctcctgcgtggtggccaccatcttcctaatcttcatcatcatcgttatcctcattgtatactacaccgtcttcaaaccccaggaccccaaaatcgccgtcaacgccgtccagctcccctccttctccgtcgctaacggcaccgtcaacttcactttctcccagtacgcctccgttagaaaccctaaccgtgccgcgttcacccactacgaca

SEQ ID NO: 15132 - DNA, 331 bp, Glycine max
accactactactcactcactgcagatctcaattgcatcggggtgcatggctaccatcgttagcatcaaggcccgccagatcttcgacagtcgtggcaatccaactgtcgaggtggatatgacttgctactatggtacttttaccagatctgctgttccaagtggtgcatccactgggatttatgaggcccttgaattgagagatggaggatctgactaccttggaaaggctgtatcaaacgctcgtgacaatgtgaacaccgacattggccctgctttgattggcaaggacccaactgagcagactgctattgacaacttaatggatcaac

SEQ ID NO: 15133 - DNA, 353 bp, Glycine max
  modified_base (42)..(43): a, c, g, t, unknown, or other
  modified_base (73)..(73): a, c, g, t, unknown, or other
ggctcgaggacgtttggtattgcttcatggagcctgccatgnnggttggttttagtacaaggtggctgctttnttgaaatccaatggacaccaagtcacatctctagacatggctgcatcaggcatccatccaaagcaggtacacgacctcaattcaatttcagaatattttgagccattaatgtactttctagggtctttgccaacagaggagcgtgtaatccttgtgggtcacagctttggtggggcatgcatatctgtagctatcgaaatgctccctaccaagattgctgctgcggtatttgttgccgcttggatgccttctcctgacctaagcttttccactctccttc

SEQ ID NO: 15134 - DNA, 343 bp, Glycine max
  modified_base (47)..(47): a, c, g, t, unknown, or other
ccccaccttccttaacacccccattacaaatctctgtatttcaggcnttttttattcacacattggattgaagtttggaaatttgacacctaccccacaccatcatggcctgcatcgacaaattttgggttttcgccctcgctcttctcctcctcgcttcccctctcctccaagttgctaggtgccagtcagactctgatgatgtaatggaggctgctgaagaatcatgtgatattggcattgttggtgatgatgtccaagactttggtgatgggactttcccttctgctccaagaattgaaacaataagtgtatctccgaaaaatagtgcaagattgataac

SEQ ID NO: 15135 - DNA, 263 bp, Glycine max
ctcaatcctatttaaaaaatataaaccgaaatttcaatcgcagatatattttatatttctactcacaagaatatacactaccattattaacaagcatctcataaaatctaactctcaataattacttcccaacaactcatactccaactatcttataacaatccttcctaaatctagcttctatcttaacttataaacacaataccataattatatataatcaatacttcactccttactttaccgtcactaaaaccaaaacc

SEQ ID NO: 15136 - DNA, 288 bp, Glycine max
  modified_base (4)..(4): a, c, g, t, unknown, or other
  modified_base (178)..(178): a, c, g, t, unknown, or other
ctcnagccactttagccgaaaaaaaaaaccctaaaaagtcgtcaaaattttcaaatatcatgaaaccaaaaaaccttcaaacaaacaaactcaagcggcatccaaaccactagtaatcttgtcaccccttcaattaattcatactatgtacctgcatgccaaccatattaacatatangatatcctttaaatcttggacaaaataccaacatatatgttacctatgcgaaatatttttcctatcaaatttctcaacaacatacacacctaagatataaattttaaaac

SEQ ID NO: 15137 - DNA, 388 bp, Glycine max
ctccaactccattgttggaatctggtttgcaaaaagacggagggttaattgtggaatattttggaaggatgtcttacgttgctcataacgttaatcagccccaagagaaagatttgttggagggaaatttttcctttgatattaaatctcgctctagattggaaaaagtttcctctacaaaagcacaatttgttagtggaaaaaccttcaaatatgatataattggtgctggttcacattcttcagatgattttcctgaaaaggaagatcaagaaaaacccaaaaagattgatgccagattgagacaaagaatagatcctcaatacaatgaggttcaggctcaaatggaaaccaaattgtttaaattgtctcttgatgatgttgaaac

SEQ ID NO: 15138 - DNA, 386 bp, Glycine max
cgaaaaagatttcttgttcttattagaagatcgtgattggatgccggtatgtttggtaaaaagaaagaaaaatattcttctttgagaataataaaaaaggaaagtgttcaattggaacatgaaaacgtgacagaattggtcctagttactcttcggaacggaatagaagaaggggagagattctcgaaccgaactaggaaacggatccaatgacttcaaaagaattgaacgaggagccatatgaagtgaaaatctcatgtacggttctgtagagtggcagtaagggtgacttatctgtcaacttttccactattacacccaaaaaaccaaactctgctttacgtaaagttgccagagtacgcttaacctctggatttgaaattact

SEQ ID NO: 15139 - DNA, 321 bp, Glycine max
ggagtttccaaggctagtaagggtgagagctcaggcttcgggggataacaaagacaactctgtggaagtacaacatgttaacaagggtgaccatggaaccgcggttgagaagaagccacgcagaacttccatggacatttcaccatttggtctcttggacccgtggtcacccatgaggagcatgcgccagattttggacacgatggaccgaattttcgaagataccatgacattcccaggaagaaacgtgggaacaggggagatccttgccccttgggacatcaaagatgaagaacatgaaatcagaatgaggtttgacat

SEQ ID NO: 15140 - DNA, 292 bp, Glycine max
agagctcataagctgatatctcgaggggaaatgcatgggggtgatagaccatattcaatgtttgaagggctagggggcatggcttacctctttttggatatgagtgatccttccttgtctaaatttccagcttatgaactctgagaatctacatgttttggaaaggagactatgtataaccgtatctcatatgaccaatgtaaatgttgtcaaaataaaatgagtcagtcttggtagggatatatatatactttttatgaagtttgagttatgtgagaaccttgtgcttttt

SEQ ID NO: 15141 - DNA, 353 bp, Glycine max
aagaggaagagtcaaaagagagaaacagaactttgcaggggagaaaaaaaattatatatataaaagcgagaagagaacgtgcagtgagtcacagtcatataaaaaaagcaaaggcaccattatcgttttccaacaacctctaccctaactccgtcataacagtttgtgcttactcgacgcgacacttcaactgtgaaacgcacgcgacgtagtttatataaacgcgcctgcctttccgattgtgcagtcagcaagacgatgacctgatccaaattattttccatctcttatatcactgtctaatttccgataggaagaaacttaatgattcttgcttgaaatcgaggtggctt

SEQ ID NO: 15142 - DNA, 321 bp, Glycine max
ctccaaagtcccagcacacccatttccgttctttgtcctggaggggtttagtctttggaaaaataaccgttgagacagcaaaatatgaagtgatcaaatccacaagtgagtacgaaatccgtaagtatgcaccatcagtagtggctgaagtcacatatgacccttcacagttcaagggaaacaaagatggtggctttatgattttggccaattacattggcgctgtggggaagccccagaacaccaagcctgaaaagattgccatgactgcaccggtcataacaaaggacagtgttggtggtggtggcagtgatggtgaga

SEQ ID NO: 15143 - DNA, 123 bp, Glycine max
cccaatactatttacttgatatatttcaccctttcaacttcgcagatttttcaaattttaagcgtccataaactttaaaacttccagtatcaggcctatccaaatgtctaaattgctattact

SEQ ID NO: 15144 - DNA, 348 bp, Glycine max
gtgagaaacaaagaaaggaaataattgatctttgaaaatgcggggaggaaagaaagctggagagtccatcaaggaaacagctgcaaacattggtgcttctgccaaggctggcatggagaaaaccaaggccactgtccaggacaaggcagaaagaatgacggcacgtgatccgatgcaaaaggagttggcaacccagaagaaagaggcaaagatgagccaagcagagctggacaagcaagcggcgcgtcaacataacacggcagcgaatcaggctgccactgcagggcacatgggacaacccatggggacccatcagacgtcagctatgcccggtcatggaacccgaca

SEQ ID NO: 15145 - DNA, 323 bp, Glycine max
caaataagacattgtttggtctggatacttgctcgaatttggtggaatcatttaaattgtatttgattaactaaaccgcaacgcgcaatcacttttactacgaactggctaactctcaggcaagtggttcggacgctgattccagcaacaagccgctggtgctcgcactgtatgacgctctaaactccggcgactccgacgccgtcgtgaagatcgtcacccctgactctccgtgagggtttcatggtccgccctcacaccagaaattgatgcgcatgctcaccggcgacttcgcttcccacaactcacatcgcttactttcg

SEQ ID NO: 15146 - DNA, 272 bp, Glycine max
  modified_base (34)..(34): a, c, g, t, unknown, or other
gtctgtctttttttctctttctctctctagattntctttcggcttcttctttatgagccctaactcggggccccatagtcgtcgctgctagctagccatgtcgctgaggaaggtcttccgctcccgcaagttctccaaatcgttcaaagaggtgctgccggcggatggcgccgccgtcgaaggcggagtcgccggcaccgtcgaggaggcggcgaatgggaataataatgggtggtctagcatgctgccggagatcctcggcgagatcgtgc

SEQ ID NO: 15147 - DNA, 170 bp, Glycine max
catctgcatctgtttgtgttcgacagaacagggaccttaaagctttgggtcgagaatcctaaccctgggtaacaaccggttgaggtacgaaatcgcacaaaccgcttacatcaaattcatccttcactccctcaaacacccaaccttcggcgtcaacggggtcttgatcg

SEQ ID NO: 15148 - DNA, 415 bp, Glycine max
gaggatgagaaaaagatggaactggaacatgtgaccagcttgtcaagaagagatcatgaaagaccaaatcccttttttcgagtgagagcagttagcttgggtggttggttggttactgaaggttggatcaaaccttctctcttcgatggcattccaaacaaagacttattggatggaactagtcttcggttcaagtctgtgtcaacagggaaatatctatgtgccaagtctggagggggaaatgtcctacttgcgaacggcacaggtgcttcaacggcttgggaaacaattacattgtggaggataaacgaagatactttcagactaagggtgttcaacaaacagtttgtggggttagatgggattaacgttgttgctgtttccgatactcccatccattctgacacgtttcgaa

SEQ ID NO: 15149 - DNA, 332 bp, Glycine max
gggaagggaactttgccctaagcacactttactatggtgagtacaacaacaatggggctggttctagcaccactgctagggttaattggcctggccgcaaagtcatcaatagggatgaggctaccaggtacacggttgatgctttcttgcaagggacatggatcaatggcacaggtgtaccagctcaactaggcctgtacagttaaaaggctctaattaacatcatcatgtttaataaatatgtataccagttgagttgaatgctccatctaatttaatgtattctaatgttatttatttgaaagggattaataatactattatttatgatt

SEQ ID NO: 15150 - DNA, 403 bp, Glycine max
atagatctgattggagagcgaggtggtgtccattggacttgtgtaattaaaacatctaaatagacacctgttaagatggaggacaactatggtgctgccgctatttactgctatcattctcttcgcttttattccgaatggattgttagcagttccttccaccgtcccggcattcctttggtcatcacattatgaactggcctctgaaaatctattgaaggaatctgtaaattaccaagtcatttctccgaaggatctagcacaatctattttatctgaagcaggctggtcaaattttctgcgcataggaaagaaattccatgagcctctgaatctggcactcttattcgctggtatacagttacaaccgacagatttaagcatgaacaaacattcaaactca

SEQ ID NO: 15151 - DNA, 408 bp, Glycine max
tctctctattcccttcttcaacatttttagcttcttctcttgctcaaatccccctatcttcaaaatttcaaggttatcactctaaagacagatttttttcttaaatgactgtggctatcgctgtttggagtgctggtcttcacttcagtgctgctacgaagcctcatagtagcttgaggcctttggagaaaatcatttgcactgcccctttcttcaaggcctcatctgggtttgctgctactaagccattctgcatccttaacacaacacgattgtcatattctggaactactattatccctcgagcagcacctgtcactgatgtggaggacgggaatcatggtgagactgataccattccaactcccgtagttataattgaccaagactctgatcctgatgctaccg

SEQ ID NO: 15152 - DNA, 400 bp, Glycine max
tctctctattcccttcttcaacatttttagcttcgtctctttctcaaatccccctatcttcaaaatttcaaggttatcactctaaagacagatttttttcttaaatgactgtggctatggctgtttggagtgctggtcttcacttcagtgctgctacgaatcctcatagtatcttgaggcctttggagaaaatcatttgcactgcccctttcttcaaggcctcatctgtgtttgctgctactaagccattctgcatccttaacacaacatgattgtcatattctggaactacaattatccctcgatcagcacctgttactgatgttgaagacgggaatcatggtgagactgataccattccaacttcagtagttataattgacctagactcttatcctta

SEQ ID NO: 15153 - DNA, 311 bp, Glycine max
agctgctgttcctgcgcgtgaacaagcctcatgttagccatagccatggttaagcataacaatgttatccccaacggacacttccgtaagcactggcagatctatgtgaagacctggttcaatcagccagcacggaagacaagaatacggttgtctcgtcagaagaaagctgtgaagatcttccccaaacctacatctggacctattagacccattgtacatggtcaaactttgaaatacaacatgaaagtgagagctggaaggggattttcccttgaagaactcaaggcagctgggattcccaaaaagct

SEQ ID NO: 15154 - DNA, 407 bp, Glycine max
atagatctgaatggagagcgaggtggtgtccattgcagttgtctaatgaaaacaacaaaatagacacctgttaagaaggaggacaacgatggtgctgccgctatttactgctttcattctctttgcttttattccgaatggattgttagcagttccttccaccgtcccggcattcctttggtcatcacattatgaactggcctctgaaaatatattgaaggaatctgtaaattaccaagtcatttctccgaaggatctagcacaatctattttatctgaagcaggctgatcaaattttctgcgcataggaaagaaatttcatgagcctctggatctggcactcttattcgttggtagagagttacaatcttcagatctaagcatgaacaaacatgcagactcagctc

SEQ ID NO: 15155 - DNA, 390 bp, Glycine max
agctcagtcaatagcagctgcagatgctattcctttgctgcagtacttaatccagtctggcccacctcgctttcaggagaaggcagaatttttattgcagtgtttgccaggaacgttggtggtgatcatcaagtgtggtaacaatatgaagcaatctgttggaaacccaagtgtttttttgcaagcttacactaggaaacactcctccaaggcaaaccaaggtggtctcaactggccctaatccggagtgggatgagagctttacatggtcgtttgagagtcctccaaaaggtcagaagcttcacatttcttgcaaaaacaagagcaaaatgggaaagagttcatttgggaaagtgacgatccaagattgatcgggtagtaatgcttgga

SEQ ID NO: 15156 - DNA, 408 bp, Glycine max
gagagtatttgtatccaaaaaatggtgaaccacgtctcaaactattctcctttattcatcatcttggttttgcttgtcaaaggtcaaatagaagtgcaaggagatttatgtgtaaaagctttgaattattgtgaaacccaagatgattgtaaactaaagtgtatagccccgcgcaaggatgggtttgcgtattgcgataacacacacacgtgttcctgttttttctattgttaattaggcaagctttgaaaagtgctattttccaccttctcgctaaaccaatctggaaggcttagtaagcatccgctaagcgcatcactcatgggctaagcgtgaggaagactctggaagaagatgagttgtacaggttcactaagcgcaccgcttcagttcatccgctaagcgaga

SEQ ID NO: 15157 - DNA, 252 bp, Glycine max
tgttaagaaactgctaacagaagctggtggtcttgttgccattcgaatctaaagctagtgtctttctgcttcgtttgcatcttctgctgcgtaaagttgattcttttctgattcttccgtagatttcatctctgaaactagttctaatactttatctacagatctctatattctacgtgaaggtttgcttttgatccggcttgagagtttcgatagactttgattttaactctttaagagccatatgctcac

SEQ ID NO: 15158 - DNA, 189 bp, Glycine max
gtttgtggtctgtcttatgtggacacaattcctagcagttacaacataatgtcatttgagtggtctttggccccctagcaagttatctgtaccgttacaaattaatggtccacacatacaggatttatgtacttttaggttattagcataatagttgaacaattgaattaataaattaattatgttatg

SEQ ID NO: 15159 - DNA, 342 bp, Glycine max
ggcaacctcatctttgtcttcaattttcattggaacatcagctattcagattacagagttggctgttcaacccctgggaaatataagattgtcttggattcagatgatgccttgttcggtggcttcagtcggctcaatcacactgctgagtacttcacctcagaaggatggtatgatgaccgacctcgatcctttcttatctatgcaccttctagaacagcagtggtttatgcccttgcagatgatgttgaacctaccctagcagatgaagctgaacctgccctaacagatgaagctgaaccagatccagttgatccttgatgacaattttctgggatgctg

SEQ ID NO: 15160 - DNA, 186 bp, Glycine max
ttccattccttttttctgcttactttacgagagaaaggaaaggcaatagtgtatgtgtatataaacaaaagtttatagcataaataattgatcttggttaaaagcaaaatatattataaacaataaagaatgaaaatttttctggtgttgaaaaagagaacagaggaaatgagagaaagatcaacg

SEQ ID NO: 15161 - DNA, 413 bp, Glycine max
agagttggttctttctttccccaatttgtgagtgttactattgaatcgattggattgacatggcgagcgcgatggttgaggacgccaacttcgaagatgaccagctcgccaatatgaccaccgacgacgtcgtcagagcttctcgtcttctcgacaacgagattcgcatcctcaaagaagagttgcagaggaccaatttggagttggaatcgtacaaggacaagatcaaggagaatcaggagaagattaagctcaataagcagttgccctacctcgttgggaacatcgttgagatattggaaatgaacccagaagacgaagctgaagaagatggtgccaatattgatcttgactcacaaaggaagggaaagtgtgttgtgctaaagacttctactcgacagacaatctttcta

SEQ ID NO: 15162 - DNA, 368 bp, Glycine max
tgatgaggaggattcctttgaggaagtttctttgagtgcagcggtcagtggtgttgagggtttggactatatggaaagaattcctcttgccacatctgagggttttccccatgtgctttcacgcaaaaatggtgaaaaaggcaaaaggagatttgtttctggggatggtgaagagatgacattgattccgggaaccagtgttgaagaggcttacaataagctaatagttgaacttgagaaaagtgttcctacattggttggcattgaatgtcccaaggatgagaaacttcctcgtcgcaaaatttttgacaaacctaagacgcgctgcttcactattctccctattgagtttaatcttgtggttcgtc

SEQ ID NO: 15163 - DNA, 416 bp, Glycine max
  modified_base (383)..(383): a, c, g, t, unknown, or other
aaaggaactcctgtgtttcctaaggtaaagttctcatacatgtcttgcattattactttatattgttatttatcttatgctaaatttaattttaattcctctgtaattctcaatattcgagtttagtccttctattttttccatgattttaacttttagattttaaaaaattcacaattttagttcaatctttaattttacatgcatgtctatctttcttttactttttatattttaatcaaataaattattttttaattgtgaaatgttaatttcaacctcaccataatactaggtgatacatcatcatcaaccttaaacggtaaacatgcaaaattaaggattggaaaaaaattgtgaattttctaaaatttacgactaanattgcagaaaaaataagaaattaaaattataaa

SEQ ID NO: 15164 - DNA, 305 bp, Glycine max
gtataccttaataaataatttaagatactatgatgagagcgcggttcccattactgttgctgggacttgttttcctggcttcagtttctgtctcatttggcattgcttactgggaaaaagagaaccccaaacacaacaagtgtctccagagttgcaatagcgagagagactcgtacaggaaccaagcatgccacgctcgttgcaacctccttaaggtggagaaagaagaatgtgaagaaggtgaaattccacgaccacgaccacgaccacaacacccggagagggaacctcaacaacccggtgag

SEQ ID NO: 15165 - DNA, 308 bp, Glycine max
cagaaatagatagagaacttcaagtgaggctgagggtgacaggtatctagagagagcactagtactctaaaagtctattatattcttcaaaatatgaccatgcatcgcgagtcttgggcttttgtcttcggcgttatgggcaacatcatctcctttggagtgttccttgctccattgccaaccttttaccaaatctacaagaagaaatccactgaaggtttccagtcacttccttatgttgttgcactgttcagtgcaatgctttggatttactatgctttcgtgaaaaggtaaactgccctccttct

SEQ ID NO: 15166 - DNA, 110 bp, Glycine max
atgaaaagaaaggcttgttagtagtgctacgagttaggtgccatagaatgccaggctcagactaccataatttcctttcctaattaaatctgggataggtgtacaataca

SEQ ID NO: 15167 - DNA, 412 bp, Glycine max
gtagacatcttcatctgcatacaagtatttataaggtgcatgtaccaagcacttgctggaatactctcttgccagtgaccacctcatcgaatgctcatacaatttcttcaattactgctgctacttctactttaccagaggacactacaccgacagcgatgtcgccgtcgaccactgccgccccgcgtctactgagatctacgacttcactgatccgaatgccgcttactctgaatgtgtattagaatcggccaccgtaaataacgtaaacgctaaccgaaaccgctatcgtcaatgcgacctggacggcaacggcgtttttatctacgatggtccggtgcttacgcctgctacataaatggagcccgatgaaggttacactgtgtgcgagtagcgccgtcagaatgccatt

SEQ ID NO: 15168 - DNA, 414 bp, Glycine max
aggagcacatgattatgcttgtctgattgtgaaaggtcctagctaccagttttcacaagctttaacagaaccaaaggtggcttgattcaattaaaccatggtaggcctcagcctctccaatatgtggtcaatgcggcctttttggctgccctatatagtgattatcttgatgctgctgatacacctggatggtattgtggacctaatttcttttcaaccgacgtgctccgtagctttgccaagtcccagattgattacatccttggaaataacccaaggaaaatgagttatgtcgtaggttttggtaatcattacccaaaacacgtccaccatagaggagcatctgtaccgaagaacaagatcaagtatagctgtaaaggtggatggaaatggaaggacacttctaagccaaac

SEQ ID NO: 15169 - DNA, 152 bp, Glycine max
ggaaaaactgccaatagtcaaacgtccttatttgatttggagtgctctgcagtttttttaatcagggaatggtatttttatatgtaaatttgtgaaaataatatattaacttttgtttggatacatcatacatagattaatatttttgtttt

SEQ ID NO: 15170 - DNA, 317 bp, Glycine max
gctaatctcatgaaattgctcctaccaagactaggattagcgccataccttcctccagttgaggagggtgcatattctgcgtcgaagagagcatttgaggccttgaacactcatcttgcctccaatacttaccttgttggccattctgttacccttgctgacatcatatcaacatgctacttgtatttaggattcatccatctcttagttaagagcttcacctctgagttccctcacgttgtacgatacttttggaccttggtcaaccagccttacttcagaaagattctaggccatggtaagctatctgaggctgt

SEQ ID NO: 15171 - DNA, 323 bp, Glycine max
cgcacaaagcggcgctcgaagcctttgtctccttgagctgcggtcggtgctaccactatcaccaccaccaccactgctatcaccgctatcaccaccgtcatgacatctagctgttcaagtgcttctgccggtggcggtggatcgtcttcatccaccacctttgaggacgaagaggaagacatggctaattgtttgattctgctagcacaaggaagagtaggacgggaccctcctcatcatcacaaggacctatgtggtgatgtcaagacagagaacggtagcaccaaaattgatcatgtatatggtcatgaatgcaaaacatg

SEQ ID NO: 15172 - DNA, 172 bp, Glycine max
gtcactgacctatcttggaagagttttgaagttaaaaccttgaaaccgctttgcctttagattctgattctgagtctctgctgctatatatggcgccacgcgtatttcttgtgttggggatgttgctgatggtgtgccttgttaaggtttcgtctgatccacagagagaaga

SEQ ID NO: 15173 - DNA, 154 bp, Glycine max
gtagacatcttgatctgcatattatgatttagaacctgaacgttagtaggcttctcctgaaataaacacttgtttgtgttcaaataattgaatgatcatttcattgtctcaatttgtgctgttttatcaattctaaaagttgacattatattgc

SEQ ID NO: 15174 - DNA, 311 bp, Glycine max
tggttatctagctccagagtatatgcaaagtggcagagcaactgagaagtctgatgtgtatagctttggtgtgttgacactcgaagtgctgagtggaaagcgaccaacagacgcagcattcattgaaaagggcctcaatattgttggttggttgaattttctaattacagaaaataggccgagggaaattgtcgaccctctatgtgaaggggtgcaaatggagagccttgatgccttgctctctgtggctattcagagtgtatcctcaagtccagatgatcgacccactatgcaccgagtggtgcaattgc

SEQ ID NO: 15175 - DNA, 405 bp, Glycine max
agattattccttagctcctactactcttgttcatcgttctggctcgaattcacgcttgcacgacgatgctgctccgatgattattacgcactctgtgttctcgagccgaaagcaacatcagcaacatcagagttataatgttccacagcgtcatcaagtgttcgtggttgaagccaatggcaaaaagggaatgatgtctcgtcaatttcagcgcaatgctcctactcctttacccaagattgaagacgatggcaatcccaaattcgtcatcttcattcgcatggccaatgtatacctttggtaccctcttagtatcgtatcatgcggcaccactgctaaaataatggttgcagctaaagataatattctcggcaagtatatctacaaagacactcttgatagaaa

SEQ ID NO: 15176 - DNA, 372 bp, Glycine max
ctctctcacaagtctcaccaacttccactctcatgggtgacgctcaccaatgctttcctcgctccttccttcgccgttcacggtggtagggtttccgatccgcgctccattcctcttttctctcttccctccgacgccttcttccgctccccaacctccctctccagggacaagaacattctatatgcttctgcttatgatttgaatgcagttggttcagcttcactgcaatctggtgacaatcctgatagtcttcctatgccaatagttctaatagatcaagaatcagattctgaagcaacaattgtgcagcttagctttgggaatcgccttggagctcttcttgacacgatgaaagcatttaatgatttg

SEQ ID NO: 15177 - DNA, 403 bp, Glycine max
accgcggagcatttgcaaactgttccagatgatgagtctcgtgtcacctgcatcaaaacttcttctcccaacggcaagaggatctcctctcctaattgtgacgtgggatcatcacctactactcgcagaggtgggaggaagttgatattacaatctatctcttcatttccttctctcacccctcaccattagaatgaagatcttcttcttcggcttaagttagcctacccccacccctcttcccttggttcacgttttcagtttgttgcagttggagctgtatgcttagggtgaatgtacatgattgagtttcgttttactttcgtaatatgtttgttccgttcatttcataatgtacaacttcagttcagttgtataatatctatcttaactgatggttatc

SEQ ID NO: 15178 - DNA, 341 bp, Glycine max
tccctcgttgaaatgaaaatgggttcttctttgtggactttgtgtctaattttggcttcactagcctcttctgcattctgtgcctttccacggatgccagtggatgttccattcggcagaaactacgttcccacttgggcttttgatcacatcaaatacttcaatggaggttctgagattcaacttcatcttgacaagtacactggtactggcttccagtccaaagggtcatacttgtttggtcacttcagcatgaacataaagatggttcctggcgattcagctggcacagtcactgctttttatttatcttctcaaaatgcggatcacgatgagataga

SEQ ID NO: 15179 - DNA, 256 bp, Glycine max
  modified_base (148)..(148): a, c, g, t, unknown, or other
ggatgtcagactagaaatggggttagaggaaaatatttgcacgctggaggctcacgagatcattgctcgcccttcacgtgctgacttctacaacccaaaagctggtcgcattagcaccctcaacagtctcacccttccagcccttcgncaattcggactcagtgcccaatatgttgtcctctacaggaatggaatttactctccacattggaacttgaacgcgaacagtgtgatctatgtgactcgagggaaagga

SEQ ID NO: 15180 - DNA, 166 bp, Glycine max
ggcggtggtcatccatttagggccaatgctctggcttaccttgccaggttttgcagaaacctgaaagtcctaaatctttggggatgtgttaaagctgcttccgatactgctttacaggcttttggacaatactgcattcagctacaatctttgaaccttggatggt

SEQ ID NO: 15181 - DNA, 415 bp, Glycine max
ggaagtaggaatgtctctgaacgcgctggttcgtggtcctggctcgaattcacgcttccacgacgatgctgctccgatgattattaggcactctctgttttcgagccgaaagcaacagcagcagcagcagagttataaggttccacagcgtcatcaagtgttcgtggttgaagccaagggcaaaaagggaatgatgtctcgtcaatttcagcgcaatgctcctcctcctttacccaagattgaagacgatggcaatcccaaattcgtcatcttcattcgcatggccaatgtatacctttggtaccctcttagtatcgtatcaggcggcaccactgctaaaataatggttgcagctaaagataattttctcggcaagtatatctacaaagacactcttgatagaaatctcgctgct

SEQ ID NO: 15182 - DNA, 282 bp, Glycine max
gacatttcagtgatagagatatagtcaaggcatgcgtttgatgaggtctaccttggccaaatggataatccaaattggactacagattcaaaggcattggaagctttcaaaaagtttggaaacaaactggcagatattgagggaaaaatcacacataggatcaatgatccaagtctgataagccgacatgggccagttcagcttccatactcattgctccatcgttcaagtgaggaagggatgtggttcaaagggattcccaacagtatcttcatctaaaat

SEQ ID NO: 15183 - DNA, 259 bp, Glycine max
caaagggactcgttgttcttctcccaggttattcagaaaagcagagtggtgaagatttgctgcattggtgctggatatgtggggagtcctactatggcagtcattgcacttaagtgcccatccatcgaagacgcatgtggtgatatctataaatcccagattgcaaactggaacagtgaccagatttgtatctatgaacctggccttgaaggtgttgtgaaggaatgccaagtcaagaacctctttttcatcactgatg

SEQ ID NO: 15184 - DNA, 366 bp, Glycine max
  modified_base (206)..(206): a, c, g, t, unknown, or other
cactctataagagctatgacgcacgctgacctaagcccgggattcgggttcgggatgggccccaacgagccttctgagctgtctatccatgagaacgcctatggcttggctagatacgctgtcatatgccatgagaatggcctggttcccattgttgagcctgagatccttgttgatggacctcatgacattcacaagtgtgccgncgtcaccgagcgtgtccttgcagcatgctacaaggctttgaatgatcaccatgtccttcttgagggtaccctattgaagccaaacatggtcacccctggatcccaatctgctaaggttttccctcatgtggttgccgagcacactgtcagagcccttcag

SEQ ID NO: 15185 - DNA, 260 bp, Glycine max
agaaaacaaagcatatgtggtctgaaatgctcaaatggacggaggaattcggagctgacacgatcacggaggacttcgaattcaaagaacttgatgaagtcttgcactattatcctcaaggccatgatggactggaccaagatggaagacctgtgtacatagagagattatgccaattcgatgccacgaatatgatgcatgtcacatccatggatcgctacgtcacataccacgcaaaggagcttgagaggacatttgat

SEQ ID NO: 15186 - DNA, 386 bp, Glycine max
caaattcaggtaatgctattctggcattagcatcaaatgccattcacctgctctggaaatggcagcgaaatgagcgtaactcatctggcaaggccactgctaccttgcaacctcagttgtggcaaccatcgagtggcatcctgatgacaaatgacattgctgatagcaatcctgaggatgctgtaccctgctttgcgttgtccaaaaatgactcgtatgtaatgtctgcatcacgagggaagatatctctgttcaatatgatgacttttaagactatgacaactttcatgcctccgacacctgcggcaacctttctagctttccatcctcaggattacaatattatcgctataggcatggatgattcctctattcaaatatataat

SEQ ID NO: 15187 - DNA, 278 bp, Glycine max
tcttgacatccgcttcaacttctattctcttttgaaacacttagaagagaaaaaaaaaatgtctgcgttccttttgcttttcctaggtgtttcttctcagttgatcgggggactcaatacacctttaccatcttcaatctattgaaacctcggaaccattctcagcatagatggaggtgggataaggggtatcattccagctgtagttcttgaccacttcgataaggctcttcaagcatgggataaaagtgcatcactagcaaagtatttggatgtca

SEQ ID NO: 15188 - DNA, 338 bp, Glycine max
caagcttagtgacactatagccaatacaagagtcaatgttgcagatgccattagagaccccattgtttttcccccttggttagataaatccgttgctggtttctagaacgctcttcttcaaggcgtgccgcaaacttttgcatccgaatccccgtttgttttggcagaagccatggccgatgacttcgacttcgcagataaagttcctccttcgttcgatcgcgtgggaaatgtgatcaaggattctggatccaaagcgttcaatccgggtttaattgtcctcctggttgttggtgggttgcttttgacattcctcattggaaattatgtgctctaca

SEQ ID NO: 15189 - DNA, 254 bp, Glycine max
gttgcagtgttatgcatccctttggatgccacttgttccaatgcttgggaatatgtcttttgggatagttatcatccaacagaaggagtttacagaaagctcgtaaattatgttcttgaaaagtacatagatcgattgttttgagctcgattaagtttgcctacgggaagtaatatcaattattagttatgttgatgtcaacgaagacaatgaatattttgatttgtctagttttggtgtgattgttcggtact

SEQ ID NO: 15190 - DNA, 83 bp, Glycine max
atttgcttggtctcctaacaaggaacttcttattgcgatagttgtattatgtccattgtcatatagttgggtttgtttttggt

SEQ ID NO: 15191 - DNA, 99 bp, Glycine max
caatgcttagtgacactatagccaatacaagagtcagggttgcagatgccattagagaccccattgtttataccccttggttagatatatccttttctt

SEQ ID NO: 15192 - DNA, 405 bp, Glycine max
ctctcactcacatacacacactgaactaaaaaacaggaaaagagacatggctgagcaaaccttcatcatgatcaagcctgatggcgtccaaagaggccttattggcgagatcattaacagatttgacaagaaaggtttctacttgaaaggtttgaaacttgttactgtggaccgtccttttgctgagaagcactatgctgatttgtctgccaagcctttctttagtggtttggtggattacattatctctggccctgttgttgccatgatctgggagggcaagaatgttgttacaactggccgaaagattatcggagccacaaacccagctcaatctgagcctggaactatccgtggtgactgtgccattgacattggaaggaatgttatccatggaagcgatgc

SEQ ID NO: 15193 - DNA, 418 bp, Glycine max
ctctaagccactaaccctcgctggtctgaaaggcagtaaaagagacactgctgagcaagccttcatcatgatcaagcctgatggcgtccaaagaggccttattggcgagatcattagcagatttgacaagaaaggtttctacttgaaaggtttgaaacttgttactgtggaccgtccttttgctgagaagcactatgctgatttgtctgccaagcctttctttactggtttggtggattacattatctctggccctgttgttgccatgatctggcagggcaagaatgttgttacaactggcctaaagattatcggagccacaaacccagctcaatctgagcctggaactatccgtggtgactttgccattgacattggaaggaatgttatccatggaagtgatgcaattgaaagtgct

SEQ ID NO: 15194 - DNA, 413 bp, Glycine max
catggcttcctcgtgtgcttcctctgccattgcaggtgttggcatctccacaccaagttcccagaagaatggatcactcttgggaagcacaaaagcttcttttcttagtgggaggaaactgaaggtgaacaactttacagcaccagttggagcacgatccagcactacagtttgcgcagttgctgagcctgataggcctctgtggttcccaggcagcacccctcctccatggctagatggcagtttgccaggagattttggctttgatcctctaggtcttgcatctgatcctgagagcctgagatggaatgtccaagcagagcttgtgcactgcagatgggccatgttgggagctgctggcattttcatcccagaattcctcacaaagattggtatcctgaacaccccttcat

SEQ ID NO: 15195 - DNA, 259 bp, Glycine max
gaaggcgtcttcataaacgcctttcttctccgtttgcgttgcctcgttcgaattcgctgtttgatctgcgaaaatgagagagcgcatctcgatccacattggtcacgctggtatccaggtcggaaatgctcgctgtgagctctactgcctcgagcacggcatccgtcccgatgggcaaatgcctagtgacaagactgttcgcagccttgatgatgccgacatgacttccgacagcctgactgaatccggattgcacgtt

SEQ ID NO: 15196 - DNA, 110 bp, Glycine max
ggaagaaactcatgcatgcggttcagtatgatagctacagtggaggacctgctgacttaaagcatgttgaagttcccatacctactccctgcaaagattagtgtttgatt

SEQ ID NO: 15197 - DNA, 268 bp, Glycine max
tctgaatcgaaactaatggcttcagagacagaggtgttaaatattatgtcctctgttttcgaacgcttcgagagaaacatgtctctgtttctgcccttcatcttcggcttctctgacgccacctcaggacgagatagcgacgacccagatcacgaaactgctcacacagaaggttcactgcgtcaaagaataatcttggggaaccccttgactcatggcatggtggtgatcgacggcggtttgagcctcgaagctctgcttcgcgaac

SEQ ID NO: 15198 - DNA, 196 bp, Glycine max
tgggttgaggctgctttggagatttttcttcccctttaagatgaacccgggcctaggtccaattttccaatgattcctaatccttttggaccaatccacttggggaagggctcttaatagaaggttaatagaattcttttcaaaattaaagaatcctttaaatcctaaggctgaaaaactaaaatcaaaggtttta

SEQ ID NO: 15199 - DNA, 215 bp, Glycine max
tgcaaagcacaatgcaaagctcatccttgagttaaaaaacggcgacaggttcttccatggctctctcatccccatccttggctggcaaggccgtgaagctgggcccttcagccccagaagtgggaagggtgagcatgaggaagaccggcaccaagcaggtctcctcaagaagcccttggttcgggccataccgagtcaagtgcttgggcccattc

SEQ ID NO: 15200 - DNA, 419 bp, Glycine max
ctctcactcacaaacacacactgaactaaaaaacatcaaaagagacatggctgagcaaaccttcatcatgatcaagcctgatggcgtccaaagaggccttattggcgagatcattagcagatttgagaagaaaggtttctacttgaaaggtttgaaacttgttactgtggaccgtccttttgctgagaagcactatgctgatttgtctgccaagcctttctttagtggtttggtggattacattatctctggccctgttgttgccatgatctgggagggcaagaatgttgttacaactggccgaaagattatcggagccacaaacccagctcaatctgagcctggaactatccgtggtgactttgccattgacattggaaggaatgttatccattggaagtgatgcagttgaaagtgct

SEQ ID NO: 15201 - DNA, 406 bp, Glycine max
ctcgagccgtgctgccaaagtgacaggcatgcttcttgagagggaccagactgaagttctgcatttgcttgagtcgccagaagccctgaaagcaaaggtggctgaggcaatggacgtcctaaggaatgttgctcagcagcaggctggcggtactgctgatcagctggcttccttatctcttaatgacaaccttgcttcttaaggtttatatcttggagtttactgaccgatgatgaattgttacactgtgcactggcttggatacagattacatgtcgagcgtgaaaagggaaacttgaatgcttctcattaccattaacacatttggaattgttgtggagtcaattgacctctctatctctctaattcatgccccatggaagccaacgcttacaaccatgaagct

SEQ ID NO: 15202 - DNA, 416 bp, Glycine max
tccaacaacaatcatcacatgtttgcaagggaggaaggtcaatttgaccggttcaaagctttgaatgcaccaccctttgagaccaatcacaacaacaacaacttccatttgatgtttggttccccttgtgatttggcatcctttgatttcaaggaggatatgcaaggaggagtagtagggatggatgctcttcagaaacagcctgatatctctatttggtaccagtgaaaatgacagcttaaagcttgaaacctcctcatcatcttcatctatcatggactcttttattttccttctaaaagggttggcacccccctaatcatgtgaagttcctttggccgaaaaagggtttcactgcaattttcttcacatgtaatcctgtaggcccagtagaactaaataatattttaagcttg

SEQ ID NO: 15203 - DNA, 226 bp, Glycine max
agctgagaagcgcttggccgagtatggggaggatcggccgagtatggtcgacgtcttgtggaatcttgaatatgctttgcagcttcaggagacctgatcatcactcatggaacctgaagatgacagcacaaaccacattactggaattgaattagcacgtattgagccttttgataacactgttagtatgatgagatggcggcatctattccacagatgatgatgc

SEQ ID NO: 15204 - DNA, 414 bp, Glycine max
aaaatgagaaggatcaagatacctgtaccaccagctgatgaaagaaaaaaggtaattgaagatgttgacaaagatcggagatatgccattgatgcagcaattgtgcgcattatgaagagtaggaaaattttgggtcatcaacaactagttttggagtgtgttgagcagttgggccgcatgttcaagcctgatatcaaagcaatcaagaagaggatcgaagatctcatcactcgggactacctggaaagggacaaagataacccaaacaccttcaggtatctggcataaatggaagttactaatgtatagagtggccagtgttatggcctgcaaaaagcactggggtttgcctgaatttaatttctagggaagtacagttgaaaatgcttaaagttacacaattctgtaaatgat

SEQ ID NO: 15205 - DNA, 144 bp, Glycine max
agcaaatctgcatagcgatggctccttcgaagctcttcgtatttgcgctttcagttaccctgatttttgccatcgttggggccgaagccgatgtttccgtcgaatgagccactccagatcctgataccttcgtcatcaatatcc

SEQ ID NO: 15206 - DNA, 372 bp, Glycine max
agtaagactgctaaagacaactataatatgagaatctacatagaaacagagtgaaaatgtaaacttcaagctagcactattacaaaagggccccaaaaaataatacaaatctccttgcctttgtagagtcctcaatcaaaattacatatggttcttctctctttagaattaagatttctggcacgagatgaaccactaagtaaaagaaatgccacctcttagaactcaaagcaaggatatcatcgaattgctgaagatttctcgtgatgaacaaagcacatttagttccatgaggacatttagagatgtttctgatgcctctttatggaatcaatccagatattatgcctttgaccgtctaaattcaaacca

SEQ ID NO: 15207 - DNA, 226 bp, Glycine max
ggaatcccgaggtgggtgtctctagaacagtgagaaattggcagttatggtggaccgaggaattccgatactactattcttattctactactagtcttccaaggaaggggatcactattcaaaacattcttaatttgtccctttaatggcactcttttttccttatctttgagagactggacacaaatttttactgtgttcacagcgacaattggtcccgggggca

SEQ ID NO: 15208 - DNA, 382 bp, Glycine max
atccccccctagctacagagcagccaaaggggaggaataataataagcctatattctaaggccggaaaaataaaaaaggaataacaaaaatgtctggaaaggtaattatctcggctgtttctctcatcctggtggttggagtggccataggtgtggtggtggccgtcaacaagaagggcgaggatcccacacttcaatctcaacaaaaatcagtaggggttatctgccaaaacactgatgaccagaagctctgccacgaaaccctaagctccgtgaagggcatggacaccgctgatccaaaggcttacatcgccaaagcggtgaaagccaccatggacagcgtgaccagtgccttcaacatgagtgataggctcagtaccga

SEQ ID NO: 15209 - DNA, 418 bp, Glycine max
tagctgacaagtctgttgtttaaagtgcatccggctaaactggaaagtttcaggtgttgcattctatataaccccttttatatgaagtagataggatttacttcttaaaataagcagaaatagtttagacaaaacacactaaaaaatcaaaaaaacttcttattattaaaacaagcgcttatttcaacaaataagtttaaacaaattggcccttaatcttaaaagaaaaaggggttataggatatagcttgtttttaagacccttaattctcagaagtttttttccatataaattgctgagaaaaactctgaaacactttttatttttgagtgtttttttcttctgaaaacttaataattataaattttattaaacatatattttgattaaaaagcatttttttcataaagacaacac

SEQ ID NO: 15210 - DNA, 408 bp, Glycine max
tccttccggcctaaggatgatcgtttaatgggcaagacactgcgaagatctgaagtcaaggtccttctaagaatgcttccagactatcatcatcatgtgaagtcatatgaaaatacacttatcacaaaattttttggtctgcacaggattaaaccttcaagtggtcaaaagtttcgctttgttgtaatgggaaatatgttctgcacagacttaaggatccatcggaggtttgatttaaaaggttcttcccttggaagatcatcagacaagatagaaattgatgagagtactacgctcaaagatttggatctgaactacagcttctacctggaaccatcttggcgagagtctttactaaagcagattgaaatagacagcaaatttttggaagcacagcacattatggat

SEQ ID NO: 15211 - DNA, 390 bp, Glycine max
caatcggccagcaccaacagcatcggcggcgacagtcactgtccgacaacaacacttccgcggcgaaaaatgtctctggtggcgaacgaggatttccagcacattctgcgtgtgctgaacaccaacgtggatgggaagcagaagataatgttcgctatgacctccatcaagggtattggaaggagattcgccaacatcgcttgcaagaaggccgatgttgacatgaacaaaagggctggtgagttgagtgctgcagagttggatagtgtgatgactgtggtggcgaaccctaggcaattcaagatcccggattggtttttgaacaggaagaaggattacaaggatggaaagtactctcaggttgtgtctaatgctcttgatatgaagctc

SEQ ID NO: 15212 - DNA, 166 bp, Glycine max
aagcaggattagttgacaccagtgtaacatagaaggaaaaacatagttacagttggagtgattagatccagattcccaataacgacacaaccaatgcataagaaagcaagtaaaaagggagcaacatgggggtcaatggcatcttcaactttaaaggagttcaaaa

SEQ ID NO: 15213 - DNA, 420 bp, Glycine max
ctttgcgatggccatttgtttagggtgaatttgtttaaactaagtaactttaaaataagtgttttttatataagcgcttttttatgaagtagataggatttacttcttaaaataagcagaaatagtttagacaaaacacactaaaaaatcaaaaaaacttcttattattaaaacaagcgcttatttcaacaaataagtttaaacaaattggcccttaatcttaaaagaaaaaggggttataggatatagcttgtttttaagacccttaattctcagaagtttttttccatataaattgctgagaaaaactctgaaacactttttatttttgagtgtttttttcttctgaaaacttaataattataaattttattaaacatatattttgattaaaaagcatttttttcataaagacaacac

SEQ ID NO: 15214 - DNA, 411 bp, Glycine max
aaaaaaagtcttaatttgcttcttgttcttcttcttgtctctgtcgtttgttctcttgatctttgatctctgtgttatatgttgtagcataagaagtaaacaacacacacatatataaatatttgtaagatatatatatatatatatatgatcatgggttttcttcacaagctttgggacgaaacgctggcgggtacggcaccggaaacgggtctggggaagctccgaaagtacaattcgttctccggcggaatctccgtccggtcaacggtggcagaggcagttccgataagtcgcagcatcaccattgttcggtcccagtctggtttcggaagcaccaccacctctgcttcttcttctccttctggatctaccacccctcgcttcgccttaactcgtaacacttctatg

SEQ ID NO: 15215 - DNA, 416 bp, Glycine max
  modified_base (387)..(387): a, c, g, t, unknown, or other
gttccaaaatgtgtccaaggagggtttgaaacttgggaaagattcaaaagacaaggaactgaaggaatcttttaaggatcttaccaagtggtggaaaactgctctttccaaagacaatgttgatgatgtgaagatttccaaccgattagataacactccttgtgtagtggtgacatcaaaatttggttggagtgctaacatggagagaatcatgcagtctcaaactttgtcagatgctagcaagcaagcatacatgcgcggcaagagggttcttgagatcaatcctaggcaccctattatcaaggagctccgagagagagtagtaaagaaccctgaggattgaggtgtgaagcatacagcacagctgatgtaccagactgcactctntgaaagcggcttcctgcttgatgatccca

SEQ ID NO: 15216 - DNA, 291 bp, Glycine max
tttctgcttcggttgcatcttctgctgcgtaaagttgattcttttcttattcttttcggagatttcatctcttgaactaggtctaatactttatctaccgatctctatattctaggtgaaggtttgcttttgatccggcttgggagttttgatagacttgattttaactctttaagagccatatgctcacagtggtcggatatagtacatcagaagttcacacaagagatatatataattaaccttgggtaccacctgcagaatgtcattccgcaacatagttcgtgatgt

SEQ ID NO: 15217 - DNA, 347 bp, Glycine max
  modified_base (93)..(93): a, c, g, t, unknown, or other
  modified_base (193)..(193): a, c, g, t, unknown, or other
  modified_base (217)..(217): a, c, g, t, unknown, or other
cccaattcttcccccttcacccacccaacatatctgtctagtgccaattaataagccccccttcacattaaccctggggtcacccaactactntgaactccttaccataccattacaataattatcaaacctaaccagtaaaaatggtgaccgtggaggaaatccgcaacgctcagcgttcccatggacccgncaccatcttggccttcggcaccgncacgccgtccaactgcgtctcccaagccgattaccctgactactacttccgcattaccaacagcgaacacatgactgatctcaaagaaaagttcaagcgcatgtgtgaaaagtccatgataaagaagcga

SEQ ID NO: 15218 - DNA, 123 bp, Glycine max
tgaaaggggaatggacttaattggcttcaaaggaaggaaatgccagggccaaaaggtggggctggaaccaaatttctttaaggggaaaggcaaaggtgttggccaaaaatgcccggttgaaat

SEQ ID NO: 15219 - DNA, 129 bp, Glycine max
gaaaaccctacctaaccgtttcaagatgcaaatcttcgttaagaccctaactggtaagaccatcactctcgaagtcgagagttcagataccatagacaatgtaaaggccaaaattcaagacaaggaagg

SEQ ID NO: 15220 - DNA, 333 bp, Glycine max
actcggaattcaactcgagagtatttattctttggttcaacaatttcagattgtgtctatggtaaaatgtacatatacataacaatcccagattattaactacaccaccttataatatcaccaaatactcaatataaccaccaactacatcctcacaccttctcgtattatctacaacaatattcacatcctcaaaaaacagttgcagaaaaccaatttcaatttccaatcctacaaagacaaaatcaatgataatcattataatattaacttcaataagcatataccctaccttattataaacatcacttacatatttcaaatgaacccata

SEQ ID NO: 15221 - DNA, 415 bp, Glycine max
agcagaatgaattgagtgacacaaagcacactgaagggggatacaacaacatggaaaatcagaacaacaacaacaacaactacttctacaacagcaaggatgctttcggtaagcaaaatgaattgagtgacacaaagtacactgaaggaggatacaactccatggagaatcagaacaacaacaaatattactacaacaacgacaatgctgccaatgggaagtacttctacaacaacaatgatgctgccaacaacaggtactacaaaaccaaagctgtcaacaacaattacaatgatgagaggcagggtttgagtgacacgaggtttatggagggtggaaaatacttctatgacgttaactctgagaagtacaaccatccaacacaatatggaggctcaaccagaggaatgaactc

SEQ ID NO: 15222 - DNA, 415 bp, Glycine max
gtttgattgtcctagctttgagcaacatcatgaagatctccattctctttatcacaatcttttcttgtggttttcttggaaatgttgtttcaaatgctagtcctcttccatatgaagctatttttaactttggtgactctataagtgatactggaaatgctgctcataaccacccacctatgcctggcaatagtccttatggttcaacatactttaaacatccttctggacgtatgtcaaatggacgactaatcatagattttatagccgaggcatatgggatgccaatgttgccagcctatttgaatctcaccaaaggacaagacattaagaaaggagtgaattttgcatacgctggttcaactgcacttgataaggattttttagtacaaaaaagaatcaatatagaggaagc

SEQ ID NO: 15223 - DNA, 423 bp, Glycine max
ttcaggcttaaagagagaacctggcagtcgaaaacatgtcttccttggatgccttcgccgacaacttgaccgtcaactcttcttccactaaccaccacgacgaaaacgaggacaacttctccggttacggcggctactcctccttcaccggaggattctccgccgacggcgatgtcgccgtcgaccactccgccgccgcgtcgccggagatctacggcttcactgatccgaatcccgcttactctcagtctcccttcgaatcggccaccgtagagaacggaaacgaaaacggaaacggctatggccaaggcgacggcgacggcgacggcgtttttatctccgatggtccggtgcttccgcctcctacggaaatggagcccgaggaaggttacgctcttcgcgagtggcgccgtcagaatgcca

SEQ ID NO: 15224 - DNA, 349 bp, Glycine max
  modified_base (314)..(314): a, c, g, t, unknown, or other
cacaactacaagaaagaacttccttataaccaaaaccaacgacaactatggcaagttatcagaagcactacgatgatcagggtcgcaaggtcgacgagtatggcaatgttgagaggcaaactgacgaatatggcaacccggttcatgccactagtgtcacttatgtagccaccaaaagtgttggtggctacaatgatgacgctaataagcaacatgatattactggtgtctatcccgagaaagacaccggtagacatcattttggtcgtggttacgacggtgacactaacaagcaacatgatgctactggtgtntatccccgaatagacattggtagagatcatgggac

SEQ ID NO: 15225 - DNA, 357 bp, Glycine max
  modified_base (118)..(118): a, c, g, t, unknown, or other
cccaaattcattttaatcctaattctgcacttcttgatcattcgatttttctcctcaagatgcagatattcgtaaaaactttgaccggcaagaccatcacccttgaggtggaatcctncgacaccattgacaacgtaaaagctaagattcaagacaaggaaaggatcccaccttgaccagcagaaaattaattttggcgggtaaacaacttgaggatggtcgcacccttgccgattacaacatccaaaaggaatcaaccctccatctcgtgcttcgcctcaggggtggcatgcaaatctttgtcaagactttgaccgggaagaaccataacccttgaggtggaatccttggacacca

SEQ ID NO: 15226 - DNA, 336 bp, Glycine max
gccctctatgtatgattatcaccgcagcattgggttcccttgtcttagccgaacaagttcatctaggaagtatatttggggccattctcattgtgtgcggactttacactgtggtgtggggcaaaagcaaagaccgtaagagcacaacagaaatagagaaaggcgaaagccaagaattgccaataaagaacggtacaaaatcagcgtcagacatatttgatggcattgaaatcaatgttccttctgaggtgttgaagaaaggaggaaggaaaaatgtcccaccagcaacaacaacaactacaacatcatgaaggtgcttttataggactagcacta

SEQ ID NO: 15227 - DNA, 334 bp, Glycine max
  modified_base (320)..(320): a, c, g, t, unknown, or other
gtgcaatcctatttcagcttgttacaggaagaacgcctttcgctggaaacaatcaaatacagttactacaaaatattatgaaatcaacagaattgcagtttccgtctgatagccaaagtctgagttttgaatgcaaagatttgtgtcagaaattgctacgtcggaatccagtggaacgtctaacttttgaagaattctttaaccatccattcctttctcagaagcaaacagaacaggatgagccattgagggatcgaagttctccaaggctggttggtgggttttggtctacagggtctgaccctttgagaagaactgangaaaattatcaaga

SEQ ID NO: 15228 - DNA, 324 bp, Glycine max
  modified_base (5)..(5): a, c, g, t, unknown, or other
  modified_base (197)..(197): a, c, g, t, unknown, or other
tgtangtgtgtgtgttggtgcacactctacacacttacacggatagaaaagagagagacagaaaaggatcaaatagttaaaacctttggttctttccctccatagttgcatttttccattcaacaacacaacacctcagacagacatcatggaggcaggttacaatcctcgtaccgtcgaagaggtctgtagggatntcaagggtcgcagagctgctttgattaaagccctcaccaccgatgctgaagaggtctaccagcagtgcgatcccgagaaggaaaatctttgcctctatggatttccaagtgagcaggtgcgaagtca

SEQ ID NO: 15229 - DNA, 402 bp, Glycine max
aaaaaaaaaaaaaaaaaaaaaaaaaaaaaaaaaaaagaaaagaaaaaaaaaaaaaagaaaaaaaaaaaaaaaaaaaaaaaaaaaaaaaaaaaaaacccaaaaaaaaaaaaaaaaaaaaaaaaaaaaaaaaaaaaaaaaaaaaaaaaagggggccccccaatataggaccttttccccccggaataaaatccggacccgtcccctgaggggtcccaattttcccataagggagggcctttaaaaccttgggaaaaaaagggaaaaaccttttcccggggaaaaattttttccccttcaaattcccccaaaaaatacaacccggaacctaaaaggtaaaacccggggggcccaaaaggggggcccacccccaaataatggggtggccccaattgccccttttcc

SEQ ID NO: 15230 - DNA, 393 bp, Glycine max
gtataggcgtgccaaggtcttgttaattttgagcgttaagtgctgcagctaatcagatcccaagaccttggcctaccttgccatacagaaaaaaaaaaagcaaaaaaaaagccaaggtttggagccaacaaaaataaacacaaagcacaagtcatggaaagaataatggttggaagtgcaacaaaggttgctttcaccctcttggccactttcgccattgtcattccatgccttgaggctggcattgctgagtttgacgattttctcaaagcccaagctgatgaagcccataaaattgctcttgattcctatgtcccagagccccacgatgtctcccatgaactcaatttccatgttcatatggcactggaaaactccacatggagggaacta

SEQ ID NO: 15231 - DNA, 422 bp, Glycine max
  modified_base (277)..(277): a, c, g, t, unknown, or other
  modified_base (330)..(330): a, c, g, t, unknown, or other
ttcaaatccaaatggccctttacattacactaataattggggtcctagtaaacaccctagtactctataaatagcatttgcatgcaccttaatcttcaccaaaatactcctcttggcatcttgtgttgtgtccctcttttaagctatttccttctcttaacacaattggttgtgccaattgccatagtcaccaaccaattaacaaaggtatatatatcatcatatcatcaccaaatgaaaaatattgggttgttttttcttgtggtggtggctactnttgtggtggcagccacagctggtagcttttaccaagactttgaaataacgtgnggtggtgagcgtgccaaaatctatgagaatggaaaccttctcacactctcccttgacagagcctctggctctggctttcgttccaaaaaaga

SEQ ID NO: 15232 - DNA, 298 bp, Glycine max
caaaacactcataacacaaagcacaaagcaaagctcatccttgagttaaaaaatggcagcagcttcttccatggctctctcatccccatccttggctggcaaggccgtgaagctgggcccatcagccccagaagtgggaagggtgagcatgaggaagaccgtcaccaagcaagtctcctcaggaagcccatggtacggcccagaccgagtcaagtacttgggcccattctctggcgagcccccgtcctacctaaccggtgagttcccaggcgactacggctgggacactgctgggctt

SEQ ID NO: 15233 - DNA, 422 bp, Glycine max
cgaaaaccctaaattgaattcgaatacacaacatgcagcaggggggaggatctgagacggaagtaacatgggaagaccagcagaacatcaacaaattcggaaggttgaataatcgctttcacgagcttgaggatgagatcaaaatcgcaaaggaaacaaatgataatttggaggatgcaagcaacgagttgattctcacagatgaagaggtcattcggtttcaaataggagaggtttttgctcatgtgccataggatgaagttgagaacaggatagaacagataaaagaggtgacaagccagaaattagcaaaacttgaagaggagaaagaatctattcttgctcagatggctgaactcaagaaaattttgtatgcgaagttcaatgactcgatcaatcttgaggaggattagtaactttct

SEQ ID NO: 15234 - DNA, 401 bp, Glycine max
ccaaaaacttaaatggaagagagatccacagcatgcagcagggcagaggatctgatgacagaagtaacatgatgaagaccagcgaaacatcaacaaattcggaaggttgaataatcgctttcacgagcttgaggatgagatcaaaatcgcaaaggaaacaaatgataatttggaggatgcaagcaacgagttgattctcacagatgaagaggtcattcggtttcaaataggagaggtttttgctcatgtgccaaaggatgaagttgagaacaggatagaacagataaaagaggtgacaagccagaaattagcaaaacttgaagaggagaaagaatctattcttgctcagatggctgaactcaagaaaattttgtatgcgaagttcaatgactcgatcaatc

SEQ ID NO: 15235 - DNA, 98 bp, Glycine max
ggctggccaaaccaacacgcttgtcaaatggaacctggtgaaggtggtccgcggcacttgacacttgacccctgattcctaactccttaatggcccct

SEQ ID NO: 15236 - DNA, 209 bp, Glycine max
agtaggagcagcagcacattcctcgggactcgtgaagttcggtactagcgtgtggggattttaaatcaagggcgacgcggtgtaaaaagtggccgtggtgtcgccgtggccgaagtgagaatgactctggaccgagcaacgtcggcggcgacttaccggaggaagccgtcttgggaggagagggagaacaaccggaggagagagagaag

SEQ ID NO: 15237 - DNA, 190 bp, Glycine max
aaaactttaggagtcttttggtttcagttttgttttagctgtttatcatcattccttcttagcagtgaattcgaaggggacttagatgttgtatttttattttttttcaacttctagcaaatgagagtttgaataaattgaaaagctagaaagaaaggttttcttggtaaaatggaagttggggattagt

SEQ ID NO: 15238 - DNA, 417 bp, Glycine max
attaattacttgtgagtgtttccaaaacacatagagcatatggtaagatccggggactaccgcacccacgtttcaaaagttgagagggagtctagtaccgttgaataccctaatgctcacgtttccctcaacaagaaggttgtttacgaggaaagtgagatagagggttcccaccaccaccaccaccacctcttccataggcaccaccacccagagactcgtgagagtgttaaggtggtagagtatgagcaagttcctgagaggcgcgtcgctgaagttgtctacgaagagaacaggacagtgtggccttgaatggcttactagctagggttgaacttcttatggtgtttggctactttgctaagcaggccacctagtatatcaaaattaatcaccagtgtgcttatattaaataaa

SEQ ID NO: 15239 - DNA, 349 bp, Glycine max
ggcgagtgagtcgcaaaactgggtattcatggtgactgcagagacctcaaccaacattgccgttatcaagtattggggtaaaagagacgaaaccttgatcttaccggttaacgatagtatcagtctcactctcgatccctcccacctctgcaccaccaccactgttgccgtcagttccgctttccaccaagatcgcatgtggctcaatgccaagtgtaggagatttctctttctgggggcaggttccagagctgtttaagggagatccgtgctcgtgcttgtgatgttgaggatgaaaataagggtataaagatcacaaaggaggattgggccaaattgcacctacaca

SEQ ID NO: 15240 - DNA, 296 bp, Glycine max
gcaagtttcgtcacgccggaacgatgaccggcggcggatccacggggaggttgccgacgtggaaggagagagagaacaacaagaggagagagagaagacgaagagcgattgcagctaagatctacactggccttcgagcccaggggaactacaagcttccaaagcactgcgacaacaacgaggtcctgaaagctctctgcgccgaagctggctggatcgtggaagaagatggcacaacttatcgaaagggatgtaagagacccacgagtgagattggaggaacagcattgaactta

SEQ ID NO: 15241 - DNA, 216 bp, Glycine max
tcatcgtcatataaacaaattccaacttaattaaaaaaaaaaaaaaatacttcctcccactacaaaactaatcaacccaataactaatctcccaactcatccccctctaaacacaccagctttacctcataaccaatacattaaaacttaccataatcatctacatacattcttcctatatcaaatcctaatccactcacaatttcacacaacata

SEQ ID NO: 15242 - DNA, 457 bp, Glycine max
  modified_base (192)..(192): a, c, g, t, unknown, or other
  modified_base (251)..(251): a, c, g, t, unknown, or other
  modified_base (298)..(298): a, c, g, t, unknown, or other
  modified_base (301)..(301): a, c, g, t, unknown, or other
  modified_base (377)..(377): a, c, g, t, unknown, or other
tccccccttccttagcccggaattccgcttcaagttaaaaaagttccttgccattggttgaaggaagaaggaatgggtttggcagtccgaaccttccggttttcaacttccccaaacaccttcccttcaaaacttcctggcttcgagaaattggccagagtacggtgcacgcccctgcttgatcaatgcccncacgggagacgtctacagctacgaggaggtggaaagcaccgccagaaaggtggcgcggnggctgaagaaagagggcgtggaacagggccaggtcatcatgatcctnctncccaattgccccgaattcgtcttctcgtttcttggcgcatcccaccgcggtgccatggccactgctgccaaccctntcttcacccccgccgagattgcaaagcaagcccatgcctccaatgccaagctcctcatcacccaggcctcttactacgac

SEQ ID NO: 15243 - DNA, 313 bp, Glycine max
cacacaacaaacatatctcttcctcttctgtccctcaatggaaggatcaggatccggtgtggttacagtctacggcaacggcgccatcaccgagaccaagaagtcccccttctccgtcaaagtcggcctagcccagatgctccgcggcggcgtcatcatggacgtcgtcgacgccgagcaggcccgcatcgcggaggaggccggtgcctgcgcggtgatggccctggagcgtgtccccgccgacatccgggcccagggcggcgtggcccgcatgagcgatccgcagctcatcaaggatatcaagccggccgtc

SEQ ID NO: 15244 - DNA, 166 bp, Glycine max
attccattctctctgtgtatttccctacctctcccttcaggatgcatatcttcgtcaagaccctcaccggcaagaccatcacccttgaggtggaaagctctgacaccatcgacaacgtcaaggccaagatccaggacagggaaggaatccccccgcaccagaaacg

SEQ ID NO: 15245 - DNA, 390 bp, Glycine max
tctcggtgaattccaattccacattttcaagaaataaggaggcaaaaatgtgcatatatgaattggaattatttgttttcttattaggcctatcctgaagccaaaggaaatgagatcggaattcctcggggaattccaattccacattttcaagaaataaggaggcaaaaatgttcatatatgaattggaattatttgttttcttattaggcctatcctgaagccaaaggaaatgagatcggaattcctcggggaattccaattccacattttcaagaaataaggaggcaaaaatgttcatatatgaattggaatcatttgttttcttattaggcctatcctgaagccaaaggaaatgagatcggaattcctcgggggtaccgagctcga

SEQ ID NO: 15246 - DNA, 87 bp, Glycine max
gaggccccaccaccctttgtgcctgcaatcttaactttgggggatcctgctgtggttgtagggaccaatgcctattttccaaccctt

SEQ ID NO: 15247 - DNA, 222 bp, Glycine max
tttacattacactaataattgggctcctagtaaacaccctagtactctataaatagcatttgcatgcaccttagtcttcaccaaaatactcctcttggcatcttgtgttgtgtccctcttttaagctatttccttctcttaacacaattggttgtgccaattgccatagtcaccaaccaataacaaaggtatatatatcatcatatcatcaccaaatgaaaa

SEQ ID NO: 15248 - DNA, 228 bp, Glycine max
cctggttacaccaagggtgatggtcttggtgctgagattgtgggcactcacatcctagcaaacactgcgttgatctctaccgatgccaaacgtagcgtcagagactccgatgttcacattgcttcacccttcacaattggaatcgctgatctcttggaaaagtcggtaaccatgcttgattgtcaaaaccggcatcgatgctgcccgcaaatacagcgcgattaagcc

SEQ ID NO: 15249 - DNA, 276 bp, Glycine max
tcttaatgttatccgttacccttaattcattggcaccccaggtgcagtcttagcgcgcaggcgctctgaccatagttccaacacttactgatctatccattgatttccctgtggttacagtgtgtaaccagccaacagtgtggaggctcaacatggtacggtccaggtccatgtatgtgagcaccagttgtgtccttaatgatatcactagcctgtccaggattgagagtcttgattatgatcatgcttatcagctctacagcttctagatctgtc

SEQ ID NO: 15250 - DNA, 323 bp, Glycine max
agtggggggacacataagcagcaatgtcaatgacaaaggagatatcttttcagttccttcgaaccaatatgcagaattcaatatgttcctggatcctttagcagccaagatagtgtttgaatcagaagttaacatcacactcatcccactcaacacacagcgcagagtaagatcattttcaaccattataggcgagttgcgtagaacaccaagaacacccgaggctgtattttctgagcgtctgctgtcaaggctataccgtttaaagcaaacccataacagatatcagcatatggacacattcttgggggaaattctaaggc

SEQ ID NO: 15251 - DNA, 426 bp, Glycine max
ggagagtttgatcctcttgacttcgaaatctgacggttctggtgcatcagaagaggaaatagtagacctgactgagcctaggtttgaatcattttgcatcacaaatggcaatgccccatgaaaaatatacacccggcacgggcagagagatgcagatggcagaagcctgaggagtttatgttgtgtgaactggtggtacacctctgttgcttgttctaccacccgtcactgtgcatggctctatgagatatcataagagatgctgcaattattctgttttaattatcttggtctacatgtttttttcatgttttgaaaggaaaagctcacaggtgttgtttgatgagcactgaaaagtattcgtttgtttcttgtacagaaaatcataggatgataggaaattctggttcttctttatttggagag

SEQ ID NO: 15252 - DNA, 387 bp, Glycine max
ggagattgttatcctcttgacttctaaatctgacggttctgttgcatcagaagaggaaatagtacacctgactgagcctaggtttgaatcattttgcatcacaaatggcaatgccccatgaaaaatatacacccggcacggtcagagagatgcagatggcacaagcctgaagagtttatgtcgtgtgaactggtggtacacctctgatgcttgatctaccacccgtcactgtgcatggctctatgagatatcataatagatgctgcaattattctgttctaattatcttggtctacatgtttttttcatgttctgaatggaacagctcacaggtgttgattgatgagcactgaaaagtattcgtttgattcttgtacagaaaatcat

SEQ ID NO: 15253 - DNA, 280 bp, Glycine max
  modified_base (224)..(224): a, c, g, t, unknown, or other
  modified_base (271)..(271): a, c, g, t, unknown, or other
tctgcttcgcgttgaccaaccagaagtgtaaggtttcattcaatgggcaacgcttaacttctaacaatatcttccgccgtccttaccgcggtcgttgaaaggccttgaactttaggcgttcaagttggtttcccgggcagaatcagaattggcaatctatgccaaaagtcttttccgggcttggctggcaaaagccgcaacgcttgtggccccaaatacaccgngaattaacctctgggagacagagtgctgattaaaattaaaggagccnaagggaaaa

SEQ ID NO: 15254 - DNA, 416 bp, Glycine max
caccatttccctctcgattgtgagacttgttgttgttaactgaacttttctgagcaagaatgtctgggcgtggaaagggaggcaagggtttgggaaagggaggagcgaaacgacaccgtaaggtgctgcgcgataacattcagggaatcaccaagcccgcgattcggcgtttggctcgtaggggtggcgtgaagcgtatcagtggtctcatctacgaagagacacgtggcgtgctcaagatctttttggagaacgtgattcgtgacgccgttacctacactgagcatgctaggagaaagaccgttacggcaatggacgtggtttatgctctcaagagacagggaaagaccctctacggatttgggggctagggttttttaatttaatgggtaggttctttggttttggaggctaat

SEQ ID NO: 15255 - DNA, 116 bp, Glycine max
atcaaaggtgcctagttcccaaacacccaaactttttttttgcggggaccaggccctaacctttttggaacttccctttcggaacacagatattctttccggcggttctttcggtt

SEQ ID NO: 15256 - DNA, 192 bp, Glycine max
caagaacgcaccatatatatataatatacttaaggggtgcatggttttcttctctacattggcagaatagctagcactccatgaaaaatgtgtatggttcgggcattgacttcctgtgaagggacttgattattattaatattcataatttattggtgttcaccttttggtggaataaatctatattttatc

SEQ ID NO: 15257 - DNA, 237 bp, Glycine max
  modified_base (176)..(176): a, c, g, t, unknown, or other
gcggtgtactgaaggaatgtcttctgcagcgttacttcagcagagaacttaagtgcagtgttcagggagcagaatcagatttaatactaacttgccgaaagcttttggatgaaaggcaaggtttgaatgtcatccgatttcttcaagcaattaatgcacggcacgacctcactganggtctgaaggacttgcaatgtaaaacacttatatttgcaggtgagagtagtccattccatg

SEQ ID NO: 15258 - DNA, 411 bp, Glycine max
attgttaaaagtttctttatttcaagtgaagttagttagttgtatttatatacacaatcatgtcaatgagatcaattggtacaagccttagccttatggtatggcttgtaattgcaacatcagcattagcaaaatctgataaccccccagtcctagacacacaaggcaaccctcttgagcctggcaaagattactacatcaaacctgccataaccgacgttggaggccgcgtcactttgttaagcagaaacaatccatgccctctatatgtaggtcaagagaattctgatgcagcagagggcttaccccttttcttcaccccttttgcagaagaagatgatgttgtgaaggtgaagggacttcaaggtgacattctcagctgcctcaatatgtgtgcagggcacaaattgg

SEQ ID NO: 15259 - DNA, 355 bp, Glycine max
caccacctctcttttcatcatcgcttcaattaacacttcctttcgttgttttcctctgatttttttggtggttgatggcgtgggcgaataagcgaggtgactcaaaaaatgcagggtttatgagaacgttggtggtggtgttgttggtgttgctatcggggttttggtgtgtttccggtgtgaaagaaggaaaaagaaatgcttacgcgacgatgatgtacgtaggtacgccgagggactacgaattctacatagccatacgcgtgcttcttatatcgctggctacgctcgacgctcaaaccgatcttgttgtcattgctatccttgatgttcctcctccatggattcgagctct

SEQ ID NO: 15260 - DNA, 393 bp, Glycine max
gagatttataagcatcctaaagaagaaagaatagcccgaacttggggaaccactggccctggcctaccctatgttgaacaaactataaccaatgctggaaattggttgattgggggtgacctagaggtcattgaaccaatccagtacaatgatggacttgatcattttcggctgtcttcagcagaactccgtgcagagttcacaaggcgcaatgcagatgctgtgtttgccttccagctccggaatcctgttcacaatggccacgctttgctaatgactgacacccgtaggcggcttcttgagatgggttataagaatcctgtcctcttgcttcatccactgcgaggctacaccaaagctgatgatgttccacttgattggcgaatgaaacaa

SEQ ID NO: 15261 - DNA, 380 bp, Glycine max
ctaaaccacaccattcgcatcacaacacttggttgtttgttaccatcttccaaaaatatcatgctcctaacgtaaaaatcctcggtttcaacgttcaactgcgatctctaaacaaaaccatggcatcactctcaggcatttgctcctcttccccaactctcaaaaaattcccgaaccaatccccatcgttgaccgaccctctccgcaaagaccacgtgtccttccccgcccgccgcgccgatcggactctcagcctcgcgccccctcctcgtgcggtggctcgtgaagtttccgacggagcattggcggcgatgaagaaagggttggagaaagatccgcgcgcgctgtggcggagatacgtggattggctgtaccagcac

SEQ ID NO: 15262 - DNA, 375 bp, Glycine max
gttgcctcaaactcaaaggatgaccctgcaaaagaagctctggaccttaaaaggccaggtaataatcatgaaccaccctggtcagattggaaatggctatgcccctgtcctcgactgccacacttatcacattgctgccaagtttgctgaactcatgaccaagattgacaggcgatccggcaaagagcttgagaaggagcccaagtttttgaagaactgtgatgctggctttgataagatgattccaaccaaacccatggtttgtgaaactctgtccgagtatcctacacttggtaggttcgctgttagggacatgcgtcaaactgttgctgtgggagtcatcaagaacgttgagaagaacgatcctaccggagc

SEQ ID NO: 15263 - DNA, 379 bp, Glycine max
  modified_base (363)..(363): a, c, g, t, unknown, or other
atttatcgtccattctctctcactccataattgcttcttgctttggtcgatccattcggtgatcactgatcagtggtttggtgttgttgatagagaaaatgcattccagccctttgcttcttgaggaacccattaagatggcatccatccttgagccatccaagcctactttttttccggctatgacgaaaattgttggcacacttggtccaaagtcacgatcagttgatataatttcccattgccttgatgcatgaatgtctgtggcaaggtttgacttttcatggcgtgatccagattaccatcaagagacattggaaaattgagagttgctatcaaaagtaccaagaaactctgtgcggntatgctagaatactgg

SEQ ID NO: 15264 - DNA, 326 bp, Glycine max
gggcatccagagaagacagggaaagtcataatcgtggatcacgtgcttcgacccgaaggcaacgaactcttcacagacgttggcatcgcattcgacatgatgcttctcgctcacaacgccggtggcaaagagaggaccgaagagaactggaagtggctgttcaaggaaaccggtttcgcgcgttacaacatcatcaagatcaacgctctcccttccatcattgaggcgtttccaatctgaagaagatgccactaccacaactgcatgtggtttttatgttgcatgtgttggtggtattattaacagctatatgatcttcgttttaa

SEQ ID NO: 15265 - DNA, 97 bp, Glycine max
ctcaaccactatagataaccatgagacacactccgaagattggtggtcacggtgtctttgggggttataatatattggtattggtggtgaacaattt

SEQ ID NO: 15266 - DNA, 391 bp, Glycine max
tttcactccaaaccttccttccttccttgtttgctccaaagaatgggagataacaatgtcaacctcccacccgggtttcgcttctaccccacagatgaagagcttgttgttcatttccttcaaagaaaggcaaatcttcttccttgccatccagatgtcatccctgatcttgaactctacccttatgatccttgggaacttcatggtagagctttggcagagggaaagcaatggtactactacagcagaaggacacaaaatagggtcactagcaatggctattggatgccaatgggaatggaagagccagtgatttcaaactctagcaacaagagagttggcatgaagaaatattatgtgttccatttgggagaagcccctgatgcaacac

SEQ ID NO: 15267 - DNA, 340 bp, Glycine max
  modified_base (318)..(318): a, c, g, t, unknown, or other
caagaatcttcctatttacatcactgaaaatggcatggctgaatcaaggaatgactcaataccagtcaatgaagcccgcaaggatagtataaggattagataccatgatggccatcttaaattccttcttcaagcgatcaaggaaggtgttaatttgaagggctattatgcatggtcattttcggacagttttgaatgggatgctggttacacagttcgattcgggctcatatatgtggattacaagaacaacttgaaaagataccccaagttctctgctttttggttgcaaaagttccttctcaagtgatctgaatntagtgttcctttgacatgtcta

SEQ ID NO: 15268 - DNA, 369 bp, Glycine max
aacatattctcctctcattctcactcaaaacacaaaatccgaactaaggtgaaaatgaaggcatcacgcattgctttgttcactttggtggtgcttctttttgtggctgaagttcaagtgtcaaaggcagtgacctgcagcccagtgcagctgagtgcatgtgtgagtgcaataacctcttcaaccccttcatcaaacctatgctgctccaagatcaaggaacagaaaccatgcctttgccaatatcttaagaaccccaatctcaagaagtttggtgactcttctaatgcaaagggaagtgctaacacttgtggaacttcctttccaaagtgctaaagggttactaaatttgaagtgggtttaaattct

SEQ ID NO: 15269 - DNA, 302 bp, Glycine max
ctttctctctcatgttgtagtatctcactagtgtttttcagtcgtttctgaaccacacaaacatcaccaccgaacaatgccgacggggttaccggcggcgaattccttagtggcgccggacgaagaggggtgggtgtgggggcagatcaaggcggaggcgcgccgcgacgccgagtcggagcctgctttggcgagctacctctactcgacgatcctctcgcactcgtcgctcgagcgttctctgtcttttcacctcggaaataagctctgttcctccacgcttctctcgacgctcctttacg

SEQ ID NO: 15270 - DNA, 372 bp, Glycine max
ctttgcttcattttatttatagagacactctaatagatgatgaagagctctttatgtcacgttcatcattcttgccttcggtttctgaatcatttgcagcaaagttgttagctgctgcagaaaagtatggtttgccaagacttaagctgatgtgtgagtctgtactttgcaaagacatctctatagattctgttgcctatattctggctcttgctgatcgttatcgtgcaacagaattgaagtctgtctgtctacaattttctgctgaaaaccttgtcgctgtgatgcaatctgatggttttgagtatcttaaggaaaattgtcccttgctgcaatcagaactgctaaagacctgtgctggatgccaggagg

SEQ ID NO: 15271 - DNA, 423 bp, Glycine max
ggggcccaccacactacccttaattcaaatctcattctctaacctttgactctgccttactcactctctactttgctcatcatcgtagatgaaccaacacttctagtctctcttactttataaccatgtaaaaatgagtcacctaatgaaaaattagtagcttcttgttgtgctttttattttgtttgtgttgagataaatttgtttgtttgtttggtattgttttgtgttttatgaattatttgatgggtgaagaaggagaagtggtgagaaagcaaggacaaaggggtgttggtggagataagtggtacttgtatagctgcttacaagactgtaaatattggtgctgtttaatacacgagactagttctctttcgatggtcccttttgagtgaaaaaccttgtcttctcagctttctttcg

SEQ ID NO: 15272 - DNA, 423 bp, Glycine max
  modified_base (401)..(401): a, c, g, t, unknown, or other
tcgagcttcaaaccctctctctcttttttctctttctctctttgaagctctgtgagaaaccttaactgtgtaattgcaatggctgatgcttctgtggcaccaccaccttcactgaaagatgagcttgacattgtgatccccaccataaggaaccttgactttcttgagatgtggaggccattctttcagccttaccatttgatcattgttcaagatggtgaccccaccaaaaccatcaaggttcctcctggctttgactatgagctctacaaccgcaatgacatcaacaagcttttgggtccaagggcctcttgcatctccttcaaggactccgcgtgtcgctgcttcggctacatggtgtccaagaagaagtacatcttcaccattgatgatgactgctntgttgccaatgatccatctgga

SEQ ID NO: 15273 - DNA, 390 bp, Glycine max
ggcgagtgagtctcaacactgcctatgtcatggacactgctgagacccgaaccaacattgccgttatcaagtattgctgtaaaagagacgaaaccttgatcttaccggttaacgatagtatcagtctcactctcgatccctcccacctgtgcaccaccaccactgttgccgtcagttccgctttccaccaagatcgcatgtggctcaatgccaagtgtaggagatttctctttctgggggcaggttccagagctgtttaagggagatccgtgctcgtgcttgtgatgttgaggatgaaaataagggtataaagatcacaaaggaggattgggccaaattgcacctacacattgcttcgtacaacaacttccctactgcagcaggactggc

SEQ ID NO: 15274 - DNA, 334 bp, Glycine max
cacatcttaaccttgttcttaccagatggctgcctcagttgaactcttatttttgtcctttctctcgttgttcatctctttctccatagctcaaacctctttcagaccaaaggcacttgttcttcctgtaaccaaagatgtttctgcctcagttcctcagtatgtcacacaaatcaaacaaagaaccccacttgtggcagtgaaactaactgttgatcttggtggtggctacttgtgggtgaattgtgaaaagggctatgtctcatccacctctagaccagcccgttgtggctctgctcagagctcgcttttcgggttatatggttgcagtact

SEQ ID NO: 15275 - DNA, 407 bp, Glycine max
agctgttcgagaaaagccgcgtccgaccaaaggacgtgggcgtcctagtagtgaactgcagcatcttcaacccgacaccatcactctcagcgatgatcataaaccactacaagatgagagggaacattctgagctacaacctcggcggaatggggtgcagcgcggggatcattggtgtggacttggccaaggatattctccaggcgaaccctaataactacgcggtggtggtgagcacggagatggtggggtacaactggtaccaggggaaggacaggtctatgcttatcccgaatagcttcttccgcatggggtgttctgctgttctgctttccaaccgtcgaagggactatagccgcgcaaagtaccgtcttgaacacattgttcgcacgcataacggtgccgat

SEQ ID NO: 15276 - DNA, 290 bp, Glycine max
ctccacggcagagacatatacatgtacagaggagagaaagcgttctgtaaccctgagtgtcgatcgagtcaaataacgatggactataggaaggaacggtgtaccacagaagcttcaaggtctgcgtaaatgtctagttcgtcatatacatgggaacaaatattttcaactgggattcttgcgctttagcgtgactctctgggtgcagaacataattacttaaccagagattgatgatgctactacgtacatacataataatatacggctatactattattcatgacagc

SEQ ID NO: 15277 - DNA, 362 bp, Glycine max
atggatcagaaagtcgatttcagtgctccgcattccatgggaaccactatcatcggcgttacttacaacggcggtgtcgatctcggagccgactctcgaaccagcactggagtgtatgttgccaaccgagcatcggacaaaatcacacagctcactgataatgtttacgtgtgtcgctctggatcggctgctgattctcagattgtctctgactatgtgcgctacttacttcaccaacacacgatacaacttggacaacctgcgacagtttaaggtgctgcaaaccttgtccggcttttcgcattttaccatgagaatttcgtaccgaccgggttaattggtggtggttgggataaatatga

SEQ ID NO: 15278 - DNA, 222 bp, Glycine max
agaaagtcttccatagccccccaaaaatgaagagcaccatggtctgtgctctctttctcttttgtgccttcaccacctcatacctaccttcagccatcgctgatttcgtgctcgataatgaaggtaaccctcttgaaaatggtggcacatattatatcttgtcagacataacagcatttggtggaataagagcaagcccaacgggaaatgaaagatgccctc

SEQ ID NO: 15279 - DNA, 399 bp, Glycine max
attgaattttgattctagcaagcagagcttttgtcaatttgctattgaccttctcggtggaggaattttagtggacaaaactggagattggatcacacttatacaaaattctccaattagtaacttgttgagagttgctgcttggaagaaaggctgtttaatggttaagattgtgatgtctgggaatgcagcagtcaaaaggagtgattgggcctgattggtacaagtgtttctaacaaacagcaacagtacagagcattttgatgcatgtaagtggacaaaatctgaaccacattccttggaattgatccttccaattgaagtattgggtcctaaatatgggtttgaaatggtgaagtcttaattggccaaataaacctcattgcctttggattttcc

SEQ ID NO: 15280 - DNA, 401 bp, Glycine max
ctcgagccgaatcggctcgagcacctttctcctaaaacatgtccagtgggttcttcttcttctattacaacaacgtcgtccaagaccatgaccatggccatggccacgatcctgctcctgttcacggtcttcgcggtttcatcggccctagacatgtcgataatctcgtacgacaacgcccacgccgccacgtcgcgcagcgacgaggagctgatgtccatgtacgagcagtggctagtaaagcacggcaaggtgtacaacgcgctcggagagaaggagaagaggttccagatcttcaaggacaacctgcgattcatcgacgaccacaactcccaagaggaccgaacctacaagctcggactgaaccggttcgcggatctcaccaacgaggagtacagggc

SEQ ID NO: 15281 - DNA, 303 bp, Glycine max
atagctagaagcaataagatgaaaatgaaagtgcttgttttgtttgttgctacagttttggtagcatatgaatgccatggctcagactaccagaagttccctctccaaatgaaaactgggtttggtgggcaatacagcaatgaggtggcatgtgccagttggaggcttggcgtggaagcaaacaacgtagtcaagtggcaaactgttcctgcagcttgcggagagtacatagctgactacgttctaggagaccaatatagatcagattccaaaacagttaaccaacaagcttatttctatgct

SEQ ID NO: 15282 - DNA, 338 bp, Glycine max
  modified_base (254)..(254): a, c, g, t, unknown, or other
aaaagaaagctcagatattataatcctagacgataactttggatcagtggtaaaggttgtccgatggggccgctctgtatatgcaaatattcagaaatttatccagtttcagctcacggttaatgttgctgctcttgtaataaatgttgtggcagcaataacttctggtgatgttcctttaaatgcagtgcagcttttgtgggtcaaccttatcatggatacacttggggcgcttgcactggctactgaaccgncaacagaccgactaatgcacagatcaccagttggccgaagagaatctcttataacaaatatcatgtggagaaacttgatcgtac

SEQ ID NO: 15283 - DNA, 385 bp, Glycine max
  modified_base (337)..(337): a, c, g, t, unknown, or other
gcaaacttcaacttgtaatcaagggagagagaaaatttcaagcacaaaaaatggcggagaagaaagtggtgatcctaggaggtggtgttgccggtgccaaccttgcaaaaactatacaacgtcaagccaacgtcacccttattgatccgaaggaatattttgagattccatgggcaagtttgaggggattggttgagccaacttttgctgaaaggatagtgatcaaccatagagagtacttcaaaaagggtaaccttgttgtatccagtgctgtcaacataactgaaactgcagtggtgactgaagatggccagcagattgcctatgactatcttgntattgccactggacacacagaaccaatccccaaaaccaggagtgaaag

SEQ ID NO: 15284 - DNA, 339 bp, Glycine max
gaattgttatgggatctcttggtatcaggggtacgacctgatgatgtatgctcacaggttggtttatgtttcaaaagggctaaatcagagagcaatggaattgagatggtgaccgaaaagggacaaagagagttatcagctaaagatactgctttgtgcacttcctgtcagatgcttgtggtttggattcagaatcaactaaaacaaaagaagaccaaggagatagtattcaactatgtaaatcagctgtgcgagagcttgccaagtccaaatggagagtcagtagtagactgtaatagcatttatggattgccaaacatcacgtttactggtggagac

SEQ ID NO: 15285 - DNA, 342 bp, Glycine max
cttccaataatcaccctggagaagattgaagacagtgttgagttcataagctcgaggcctaaagctttagctatttatgccttcacgaaaaaccaaactctgcagagaagaatggtatctgaaacatcatcaggaagtcttgtattcaacgatgcaattctacaatacgtagcggataccctaccatttggaggagttggtgaatgtgggtttgcatcaaggatcttagattctactgctattactattactttatactgaacataccacaatgaagtgtcattaatagactgtaattacggagatggattttgtggaatcgcatatactactagattcaga

SEQ ID NO: 15286 - DNA, 394 bp, Glycine max
gctggattacgtggaaaggcgctgagaataactcatgactatcgtgatttgctttgggaatctgccgaggggcattgcgtgcctaatgcaggttttttcgaagatgttgtctttgaggatccttctttgttacaagcttctcatgattctgatttgactgatgctgtcggtgagacatcaattgatcagcacaacaactcaaaaggtgatggaccggaggaatctctagatgtaaatgagttccaacctgattctaaccctgcattgacgatgccaaatggtaatgaaaatgataccgctgctgaagtaactgaaggcgtggctgatctgaatatacgggatactgcctctgctaatgacccagatgaccaacagactctatcaactgcatacg

SEQ ID NO: 15287 - DNA, 395 bp, Glycine max
aacgaacaattttagcttcaaacacacacaaacacatcgggatcagcttcatcactctccgacacttgaaactctcatgttgttcctctagaaacctcttccgcaccaccgtggaattttcctgctacttttgcacaaaacacacactctgcttctattataattcatgcttgtccttgtccttgtccttgtgctggtttttttctagatagggtttgcactttttaatcagaactagccaagaccaggtacagaaagtactgtgttagttaaaaaaaaaaaaactttcatcaattattatcaactttattcggtagtgtagccttgtaggtgaactatgtgtcaggattctgaagtttgattctcttttatattgattgaatagttgtgtgtag

SEQ ID NO: 15288 - DNA, 395 bp, Glycine max
  modified_base (264)..(264): a, c, g, t, unknown, or other
gtcaaagacaatgtcagggatcattcacaagattgaggagacccttcatgtgggaggccacaagaaggaggaggagcacaagggtgagcagcaccatggtggagaatacaaaggggagcatcatggtgaacacagtactgaatacaaaggagagcatcatgttggtgagcacaagccggagcaccatggaggagaagagcacaaagaggggttcctagacaagatcaaggacaagatccacggcgaggaaggtggcgccaccgncgagggcgagaagaagaagaagaagaaggagaagaagaagcatgaacatggccatgacagcagcagcagcagtgacagtgattagattatctcccactgctgcatcacctatatatcttataaggtgtatg

SEQ ID NO: 15289 - DNA, 403 bp, Glycine max
gttcagcagagttttggaggctatcaaggctaatttcaatgacaaatatgacgagtacagaaagaaatggggtggtggaatcatgggatccaaatctcaagcgaaaaccagagcaaaggagaagcttcttgccaaggaagctgctcagaggatgaattaggaggagtttcttatatcttgttgctttgcgaatgctattaagtttgttttttaatgtactcttttaattattgtcttcataaaaacatttgttattcacatgagctagagtatttcgctaaaatctcctgccgactgttccaattcctgaacccttggattactttaattttggtagtggacttttttcgggtactttatgaaggaactgcattaggatgcagttgcatccaattttttaaaa

SEQ ID NO: 15290 - DNA, 360 bp, Glycine max
ctaactcctaactccaacttgacctacatttctatttcccgggcgaagctattcgatctcgatctcaatttccaatccacagatcacaatgctaactcgtaaacgactcgtcgtttctctctctctcgccactctccttctcttctcatccctctctctctctctctgcgataaaacccgccctcaaaacgacaacaaaaaaaacaacaacgacgacgacgaagatctcagcttcctcgaggaatccgatgacgctgccaccacttctcaccaaggccattttccagatcccgacgagttcgacgaggacgacggcgacgaccaggacgacttcggcgacttcgctggcttcgaccactc

SEQ ID NO: 15291 - DNA, 398 bp, Glycine max
ctccatctttgatcgctggtgcaaatatcaagggcttcactgcaatttcagttctacctgctcctcccccgagctattttctgggttacactcttccttctggtcatccctgtaatactttcacacttcctccttcaccggcagataaaaagcgaactgggccacgaccatgcccagtatgttaccttcccgtggatgaagccattgcacttatgccaaagtttccgtcaccttctccagtacttaagaacttagcatttatctatgaagaaactcttagcagggatggtgaatttggtggttcggactttggtggatatcctactttgaggcagagaaatgaatcttttgatatacgagagtcaatgagtgtgcactgtggatttgttagaggaact

SEQ ID NO: 15292 - DNA, 394 bp, Glycine max
  modified_base (334)..(334): a, c, g, t, unknown, or other
cttcgcttccgatttcattggtttatttatttatctgtggggcaattttttactacacaggttcgcaattctcaatctttgctttatttattgcctattcatgtagaattaattttctgccatcgtaacttttgaaactcccttttaatcggtttgaatgttaattgtttcttttttgaatttaacgacttggatggtgtaataatcgatgagatactcaaactgagatgtattaaattaaatgatttgttcttggtgtatttatgctgcttattatgatatgggctatgataatatatggctaataattgttctggtttgagctacagcacanattgtgagaggtcatcgtgacaaactccagcagttcttaacaataactggagccagcgag

SEQ ID NO: 15293 - DNA, 270 bp, Glycine max
ctacgacgtggcgtccaaactaagccacacggctaataaagacggccggcacactttcactgcatcaagaaaggaagaaacataccgaatgagagcatcaaactcttcttcttcgatttccattgcgaagcgttactttttcttcttctttctcttcattgtcttcgctcttcgatcttcgtccggggactgctccgaataccaccaccaccactcgccgatggccacgatcggaggcttacacgactcccaaggctctcaaaacagcgt

SEQ ID NO: 15294 - DNA, 278 bp, Glycine max
ctcttctctctcagaaaccctaatggcagagcgcggaggtggcgaacgtggcggcgaccgtggcggtttcggacgcggcttcggcgggcgagggcgcggaggcgacaggggccgcggccggcgtagaggtccccgccgcgaggaggaggagaagtgggtcccggtgactaagctgggacgcctggtgaaggaaggaagaatccgaagcctggagcagatctacctacactcgctgcccatcaaagagcaccagatcatcgacatgctggtgggcccca

SEQ ID NO: 15295 - DNA, 401 bp, Glycine max
cacaaacaaagaagagagcaaaatgaagagtgcgatttgtgggagaatcctctctcccaaccacgtcttcaaaccaggggacacacattcaatttgtaaaggaccatactccaatctttgtgtacccatggttgtattggcaacagggcctggtataggaggtggggtgctggaaaagccagttattgaaaaagtcacccctggccgtgagtctgaatttgatttaaagaaatcacggaaatcggcaccgccctatcgtgtaatattgcacaacgacaactttaataaacgggaatacgtggtccaagtgctgatgaaggtcatccctggaatgacccttgataatgcagttaatatcatgcaagaagcacactacaatggattgtcagtggtgatcatct

SEQ ID NO: 15296 - DNA, 320 bp, Glycine max
gtttctttccttctctctctctggagctagcgcgagtgacgcggacggcgaagatagagtcagatcggaagcggaagaaggcgtcgacctcggcggcggagaaggagaaccggaataagcataagaagtcgaagatgtcgtcgtcgtcgtcgaagggtggtggcggtattgaggttagggcttcgcacatattgataaagcacgaaggttctagaaagaaggcctcgtggaaggatcctgaaagtcgcatcatcaagagcacaaccagagaaaacgcggtttctcagctcaaggccctccgcgacgacatcgtttcgggc

SEQ ID NO: 15297 - DNA, 315 bp, Glycine max
ctctgcgctctttctctccgtctcctacaattcgagttgcggcttttgttgccctaatgtcaaccatgcctcgccgtagctcctgtggaagatctgcccatactgctcatcgggctgctcctacgaatgctccaattcaccatgctccttctacagccactgctcatattggtggtggatctatgctagttggcattggttcaaccatagctcaaggtatggcttgtggcaccatacgtgcagtggcactcttgtctgcacatgcagacatggctccgcttatcagctcacgtgcatcagttactacataggctg

SEQ ID NO: 15298 - DNA, 402 bp, Glycine max
  modified_base (207)..(207): a, c, g, t, unknown, or other
gttcttgcaggttctctgcttggcttcttagggcaaatggggtcccttgctagagcaagccactttcaggaaccgtcaacgtctctaactttccgaacagactgatggcagtggtcccaatactctttgtaaacccaaggttgctgcaaagttaatggagaagctcgctcttcctttttcaaaaggtcaaactgtatacattctgcnaggtgaatagaatcagggagtttcagcaaaacagtaagatagtagctactcacacggattgtcctgaagtacttatatgggatgttgaaactcaacctaatcgtcatgctgttctgggggctaccacttctcgtccagacttggtattaactggtcataaggataatgctgaatttgctctggctatgtgcccaa

SEQ ID NO: 15299 - DNA, 376 bp, Glycine max
accatggccaagcttgctctttccctttggttccttctttggagtggctgcttcgctctgagagagcaggcacagcaaaatgagtgccagatccaaaagctgaatgccctcaaaccggataaccgtatagagtcggaaggtgggttcattgagacctggaaccctaacaacaagccattccagtgtgccggtgttgccctctctcgctgcacccttaaccgcaatgcccttcgtagaccttcctacaccaacggtccccaggaaatctacatacaacaaggtaatggtatttttggcatgatattcccgggttgtcctagcacttatcaagagccgcaagaatctcagcaacgaggacgaagccagaggccccaag

SEQ ID NO: 15300 - DNA, 403 bp, Glycine max
gaaatttaagtgaggagctagagaatgatgatgaagtctgctatgtgtgcagtggtggttgtagcacttcttcttctggcggaggtggggcccatggctgaggctgtgacatgcaccccaacagagttgagtccgtgtcttccagcaatcacttccggtgctaaaccttccaatgcttgttgcacgaagctgaagcagcaaaaaccatgcttatgtggctacctcaaaaacgctagcttgaagcagtatgttaactctcctaatgcccgaaaaaccgttgcttcttgtgggattccctttccaacttgttaattaattaagccttcttataattaaagtgtgggatatatatatatatatagataaacagtttaatttatacacactttgatcctacaaagca

SEQ ID NO: 15301 - DNA, 390 bp, Glycine max
cttcagatccaaccaattccatcgtcaccaggaacacacccgttttgcctattcagctttacctctcactcttcaactgtgtctctgataaggttcaaccctttttttgctctctatgccattccaacagattttgatgattctgcatgctctatgtagcttactctgcagttgggaagggcataccagaacaagagtgtaattgcagtgcacggatttattaatagtcttgtagatctgttggctttttcaggatgggcaagtgcaagggttgtggaaagttaggaagaatgaggccaagtcatatgagtgcttatgaattttctctgatgctggctcctgttgtttctgtttgggattgcatagttcgcaaaatgaggtactcctaca

SEQ ID NO: 15302 - DNA, 250 bp, Glycine max
ggtggattcaacttcgatgcgaaattgcggagagagagcacagatgttgaagacttgttcatagcccacattgttggaatggataccctggcccgtggcctgaggaatgctgccaagttgattgaggatggttctcttgctgagcttgttcgtaagcgttatcagagttttgacactgaaattggggctcaaatagaggctggtaaggctgactttgaactgcttgagaagaaggtcaaggaatggggag

SEQ ID NO: 15303 - DNA, 315 bp, Glycine max
  modified_base (66)..(66): a, c, g, t, unknown, or other
  modified_base (69)..(69): a, c, g, t, unknown, or other
  modified_base (72)..(72): a, c, g, t, unknown, or other
  modified_base (75)..(75): a, c, g, t, unknown, or other
gtcattgcctttaccatctcagtctcaactctctccaacaaccacaatggctctcttgggcgccgnctnctnctncgctcgcatcattccctccgtctcactctcttcctcttctcgctccttcttctcactctcatcctcttcttccaaactccaatgcttgcgctcctctcctcgtatttcgcacctctttctcaatcagcgaagagcggaggttcgcgtttcgagtggaagatacggaactgtgtcggcaccgaagtcagttgcgtctgatcctgatcagttgaagagcgccagagaagatatcaaggagct

SEQ ID NO: 15304 - DNA, 258 bp, Glycine max
gaaccattctgcgtagtgatctattggcaaattttttgacagaaggcaattttagagcaagtgttgatttgcagcgcactcattgtattaaaggaatgattaaaatggcggccacagttggtattcctgagaatacaggtatcgcattggcctgtgctatgaatagttcttttagggggcgtgccagttctgatatttacaccatctgctctcaagactgtgaaatatgggaatcctgctgcacaaatgcaatgacta

SEQ ID NO: 15305 - DNA, 325 bp, Glycine max
  modified_base (86)..(86): a, c, g, t, unknown, or other
aattgccattaacgtataagttgaaagacttgggagtaacgaaagacgatgatagtatttctgtcacactggctcccatatatggngacaagcctgttacaattaaggacgtaaggataaagcgtgtttatcctgaggtggacgatgaataaatctaaattatgtgtgtgctactgctagggttggttcctccaagggatactctatctgtcattggtggttccttaattagggtgttgtagtaattttccttggaacttaatagatccctttcatctgtgagggatactatgtaatggtaataataaatgttggtttaatggtt

SEQ ID NO: 15306 - DNA, 375 bp, Glycine max
ctttgatgctaaccacaaaaacacagcacaacacaactcgtgccatttcagtcggcaattctggaaaaagtcaaatcattctggaattttcattcatttgagagaaaagagaaaaacaagtgttctttgaatctgttgaaggtggtgatttgatttgatttgaataattcacataaccaattcatctattcattatctctccgatctttcaatggattctgacttctggacctcgcgtcttgccgccgctaaacgccaatacacgcttcagcatcaccatcccaactcttacttaaaatcggttggaatccaatattttgatattgaagaagaagttagaccccgttttccttggccctaatggtattaaaacct

SEQ ID NO: 15307 - DNA, 298 bp, Glycine max
  modified_base (234)..(234): a, c, g, t, unknown, or other
caaccaaccctttcccaaaaccactgacccacgcgtccaaattgccggtaacttcgcccccgttccggaacaccccgtcgaacattctctccccgttattggcacaatccccgacgccattaacggcgtctacctccgtaacggcgccaacccattgttcaagccaaaagcgggccaccacctcttcgacggcgacggaatggtccacgccgttaaattcaatgacggcaccgncagctacgcgtgccgcttcaccgaaacgcagcgtctcatgcaagagcgcaaattgggaaaacct

SEQ ID NO: 15308 - DNA, 277 bp, Glycine max
tgggacttcaggagagaaggggaagtttgggctgaccaccggtcagattcttagggttgcgaagaacctggacctcgcgggcatgctggattgcctgcaactgctggattttcatattgggtctcagattccctcaacagcgatgcttgctgatggtgtgggagaagctgcgcagatctactgcgagttggatcggctcggggcgaacatgcgagtcatcgatattggaggtggactgggcatagattacgacggttccaaatcgtgtgactctgat

SEQ ID NO: 15309 - DNA, 381 bp, Glycine max
  modified_base (363)..(363): a, c, g, t, unknown, or other
ctccattgtctttgaacactcatcaccatggccaagcttgggctttccctttgtttccttcttttcagtggctgcttcgctctgagagagcaggcacagcaaaatgagtgccagatccaaaagctgaatgccctcaaaccggataaccgtatagagtcggaaggtgggttcattgagacctggaaccctaacaacaagccattccagtgtgccggtgttgccctctctcgctgcacccttaaccgcaatgcccttcgtagaccttcctacaccaacggtccccaggaaatctacatacaacaaggtaatggtatttttggcatgatattcccgggttgtcctagcacttatcaagagccgcangaatctcagcaacgagga

SEQ ID NO: 15310 - DNA, 292 bp, Glycine max
agaaaaaccaattgcaaaaaaatatagaatagatgactatttgggcatgccttgtaatatgctggttcttggttttactacatatccagcggttgggtggtatagggttgaattaatgcgttcgtccttaagtagaatcgaatcattcttgtttctggatattcaatcctaattttcatttttggggtcaatttttattattggattcagaatcttttatttgcagctacttggtctagtttgaacgagtgtgatttgaaattgacaatctttgggatcgcttaactaataa

SEQ ID NO: 15311 - DNA, 380 bp, Glycine max
ggattccacctcttcccgtccttcgagacggttgttgtgctgcttgctcttcaggttgacctgggattgaatctaaagaatcttgatttacattttgagatatggagggagtttgtttctggacaaattgctaccagtatcggttttttgcattccaagaagtgcttgattggcgagttttcatccttggagattttcttcgggtttcctttgttaattgcacttagggttctgctccgctttaatgatcagcacagggtacgtgatgctacattcttctgatacaggtgctgcatcttaagtgcacttgtacaatgcattgctgacccaacattcagttaaaacttttggaagtgctgctttgtgttccacgggaacaa

SEQ ID NO: 15312 - DNA, 277 bp, Glycine max
ttccccagctagggttgatgatgatgctctagaggctggtgagattaattctcctgagctttcaagtgatgattagaatgatgagggtgacttggtaaaagaagctggttattggtctgaccaggtgattgatggcaacgaaccaattttaacttaaagcgatccagtggctgaacctgttgcgagttagactggtactttgacaagcactgtttcaaagagatgctcctttaaagtggacttaactgttccaaagcaagggacccctaatgccccc

SEQ ID NO: 15313 - DNA, 411 bp, Glycine max
ctttgagttcttgggaaacagaaccgggcaaccttatattgtgcaaacaaatgtgttcaccggtggcaagggtgacagagaacaaagaatctacctctggtttgaccctacaagagaatatcacagatactcagtgctatggaacatgtaccagattgttttctatgtggatgactacccaataagggtgttcaagaacagcaatgacttgggagtgaagttcccatttaaccaaccaatgaagatatacaacagtttgtggaatgctgatgactgggccacaaggggtggtttggagaaaacagattggtccaaagcccccttcatagcctcctacaagggcttccacattgatggttgtgaggcctcagtgaatgccaagttctgtgacacacaaggcaagaagtggtg

SEQ ID NO: 15314 - DNA, 370 bp, Glycine max
  modified_base (319)..(319): a, c, g, t, unknown, or other
atttatcgtccattctctctcactccataattgcttcttgctttggtcgatccattcggtgatcactgatcagtggtttggtgttgttgatagagaaaatgcattccagccctttgcttcttgaggaacccattaggatggcatccatccttgagccatccaagcctactttttttccggctatgacgaaaattgttggcacacttggtccaaagtcacgatcagttgatataatttcccattgccttgatgcaggaatgtctgtggcaaggtttgacttttcatggggtgatccagaataccatcaagagacattggnaaatttgagagttgctatcaaaagtaccaagaaactctgtgcggttatgct

SEQ ID NO: 15315 - DNA, 319 bp, Glycine max
cacatattcaatggcttcctctcttctctctccatcattcacttccttcccccgcataaagaaggatgtctctctctctgctttcacttctcagcgatgcttcaaagcgcttccaaggagaataatccgttgtgctgtggcggcgcctcagcgccaaccttccaccactggatcagtgaggactgcaatgaccatgactgagaagatactggccagagcttctgagaaggtacagctgacccctggcgataatgtttgggtcaatgttgatattttgatgacacatgatgtgtgtggccctggttctattgggattttc

SEQ ID NO: 15316 - DNA, 337 bp, Glycine max
gaacgctgcttcacgtcttagggtcatcagtgcccgttcgtgcagcatcagcaggatacctgccaatgccagatttgcaagttccgttgccacacaacaatcctcttctggtttgggtggattatttggatggctcactggagaccgatccagttctttaccatctctggatttaccgcttacgggcgttacacttaccgcttcattgcctgattttgctgcgcccggaaaaactattattactacacttccaaatggactcaaagtggcctctgaaacatcaccgactgccactgcgtctgttggcttatatgtagattgaggttcaatatacgag

SEQ ID NO: 15317 - DNA, 395 bp, Glycine max
gtgattgtctttgtatcacgaaaactatacgattcgattcgttggtttcaatggacaccttcttcaattctcaatcttcttcttcttcgagaagccgctggagttacgatactctcaagaatttccgtgagatctctccgctggttcagaatcacatcaaacgggtttattttacgttatgttgcgctgtggtggctgcttgctgtggagcttttcttcatgttctgtggaacattgggggttttctcaccacgttggcttccattggaagcatgggttggttgctatctacaccccctggtgaagagcaaaagaggttgtctctggtgatggcttcggccttgtttcaaggcgcttccattggacctctgattgatttggctattgccattgat

SEQ ID NO: 15318 - DNA, 347 bp, Glycine max
attgagtcaagaatggaaatcttaacgggggggtttggcatactattgctgctggtgggagaacctaaaacaaccccctggttcacttttcaccaagagaaaaagctgtcacaattcaagaacaaacttcatcaaaagattcaaaagttagctactcctcctttatcagccttggcatcaccacctgcttcctcttcagaaacaaacaagagtgggagggtgttgtacgtgagtgaatatggtgcagacccaacagggtctgaagaaagcagtgatggcattttgaaagctgctgaagatgcttttgagttgcagaagggtgttgagttggttggaggagtgaatga

SEQ ID NO: 15319 - DNA, 231 bp, Glycine max
ctttgttttcctttgttattttttgtttcccctctcatcacgtctgcaattctctgtctccaaacatgccattttctagtcttggatttgagttattataattataaatgttctgtttattattttgtgttaagtaagctggtttcccaaatttagacattgaaagtggcatatgctttcatactgtataaataaaagtagcattctttaattctctcatttccttcttag

SEQ ID NO: 15320 - DNA, 404 bp, Glycine max
tcataacacaaagcacaaagcaaagctcatccttgagttaaaaaatggcagcagcttcttccatggctctctcatccccatccttggctggcaaggccgtgaagctgggcccatcagccccagaagtgggaagggtgagcatgaggaagaccgtcaccaagcaggtctcctcaggaagcccatggtacggcccagaccgagtcaagtacttgggcccattctctggcgagcccccgtcctacctaaccggtgagttcccaggcgactacggctgggacactgctgggctttccgcagacccagaaaccttcgccaagaaccgtgaactcgaagtgatccactccaggtgggccatgctcggagccttgggctgcgtcttcccggagttgctgtcccgcaacggg

SEQ ID NO: 15321 - DNA, 401 bp, Glycine max
ccataacacatagcacaaagcaaagctcatccttgagttagaaaatggcagcaggttcgtacatggctctctcatccacatccttggctggcaaggccgagaagctgctcccatcagccccagaagtaggaagggtcagcatgaggaagaccgtcaccaagcatgtctcctcaggaagcccatggtacagcccagaccgagtcaagtacttgggcccattctctggcgagcccccgtcctacctaaccggtgagttcccaggcgactacggctgggacactgctgggctttccgcagacccagaaaccttcaccaagaaccgggaactcgaagtgatccactccaagtgggccatgctcggagccttgggctgcgtcatcccggaattgctggcccgcaac

SEQ ID NO: 15322 - DNA, 344 bp, Glycine max
aaaaaaaaaaaaaaaaaaaaaaaaaaaaaaaaaaaaaaaaagaaaaaaaaaaaaaaaaaaaaaaaaaaaaaaaaaaaaaaaaaaaaaaaaaaaaaaaaaaaaaaaaaaaaaaaaaaaaaaaaaaaaaaaaaaaaaaaaaataaaaaaaaaaataaaaaataatgggtcagccttgatatgaaaacctactaccctgtaaaaaaacaaacaacagttccagggtgttgaacatgattgaatataggggagatctctaaagattgtgaagaaaacagcgatagcatttttacaggtgaaaaagatgctcccgaaaaatttaaccaagattagttacctggaagatt

SEQ ID NO: 15323 - DNA, 227 bp, Glycine max
cctctctctgtctccgcctttcgcattgcaagcgctctctgtctttgcttttccttccccctttcagtttcttcaacgctgcaactatccatggcaaaccgctggctcagacccgaggtgtatccactgttcgctgcggttggtgccgctgttgggatctgtggattccaattggttcgtaatatctgcatcaaccctgaagtcagggtgaacaaagaaggaagaaa

SEQ ID NO: 15324 - DNA, 380 bp, Glycine max
gatctttcttctctttttctctctctatcctcatggctgagaatttggacgacggcgagttctggctgccgccgcagttcctcgtcgacgacgacgtcgtcgtatttccgacaccctttgaagcaaagtttccgcctttgtccgacgacgccgttttgttcccgtacggttctcccgttgattccaccgttggtggctccagcgagaccgagagcgacgaggaagagcaactcgttgccgagttaactcgccacttaactcgctcctctcttcaacctgacaccgagtctgtgggtcggtttgtgtctggttctcctcaatccacgctttgcgcgtttggaagtgggtgtagttgcggcaaagggtcgagccagggtagc

SEQ ID NO: 15325 - DNA, 208 bp, Glycine max
  modified_base (26)..(26): a, c, g, t, unknown, or other
gagttctacttctccctatgcattgnttgagttcttcatcggcttgctacaagtccaggcgattctggaccctgccgatttcctcgctctgcaaaacattcgtaaggctctggaagacatgccaggttccgatttcttttccacttgggatttcaccgcagacccatgcaacttcgccggcgtttactgcgactccgaccagatcatt

SEQ ID NO: 15326 - DNA, 406 bp, Glycine max
  modified_base (285)..(285): a, c, g, t, unknown, or other
cgccaccgtcgagtacgagaccgagaaccgccactacgccgacgtggactgccccggccacgccgactacgtcaagaacatgatcaccggcgccgcccagatggacggcgccatccttgtcgtctccggcgccgacggccccatgccccaaaccaaagaacacatcctcttagccaagcaagtcggtgtccccaacatggtcgtcttcctcaacaagcaagaccaagtcgacgacgaagagcttctccaactagtcgaactcgaagttcgcgaccttcttacctnctacgaattccccggtgacgatacccccatcgtctccggctccgcactcttagccctagaagcccttatggcgaaccctgccatcaaacgcggcgacaacgagtgggtcgacaaaatctac

SEQ ID NO: 15327 - DNA, 389 bp, Glycine max
aatcaatcaaagaattctgtgttttcaaatgctttgtcaagtccagtacgtcgaagccttcaacattatcaaattggtgagggaggatgctacaccaatgttctctccatggggaatggaaaccggaacactgaacctggctttcttaatcagcaaagcagggattcaaatgcagtgagctccaatgattctgccatggatatgcatgcagactagttctgtctattggtttattaattgggaattcttaactcaccagcctttgcaacagctacaaaagaagctaacaaccttcggaattccgtatctgggtttgctcattggatcctgcaagaaacgacaggaggatggaacccaatctgttaaccttttactatgcttacgtcaac

SEQ ID NO: 15328 - DNA, 348 bp, Glycine max
atcttcttctcttcgcgtagcgcgtcgtcccccgcaacgacgtcgtttcatggtcgcgttggtgttgtgctggttctctatgcgaaaatcttctgagggcttctcggcgatgagtggagtaattcattctctggtgtttgattccgcatttccatttttaaatttctctgtctcccatgtaagaaatgtttgattggaacgacgaagagcttggtaacatagtatggggtgaaggtggtgagggtgatgatcatattgtgccttatccggaggcaagtgaagatcttaatgacaagaaagaatggagtcaggaagcttctgctactaaactgattgactagaagagaa

SEQ ID NO: 15329 - DNA, 377 bp, Glycine max
  modified_base (278)..(278): a, c, g, t, unknown, or other
  modified_base (359)..(359): a, c, g, t, unknown, or other
aaccactactactcactcactgcagatctcaattgcatcgctgtccatggctaccatcgttagcatcaaggcccgccagatcttcgacagtcgtggcaatccaactgtcgaggtggatttgacttgctccgatggtacttttgccagagctgctgttccaagtggtgcatctactgggatttatgaggcccttgaattgagagatggaggatctgactaccttggaaagggtgtatcaaaggctgttgacaatgtgaacaccgtcattggccctgctntgattggcaaggacccaactgagcagactgctattgacaacttaatggttcaacagcttgatggaactgttaacgaatggngttggtgcaagcaaaagc

SEQ ID NO: 15330 - DNA, 186 bp, Glycine max
  modified_base (92)..(92): a, c, g, t, unknown, or other
ggatgaaaaggggttcttctttggggactttgtgtctaaatgtggcttgactagcctcttctgcattctgtgcctttccacggaggccaatngatgttccattcggcagaaactacgttcccacttgggcttttgatcacatcaaatacttcaatggaggttctgagattcaacttcatcttgaca

SEQ ID NO: 15331 - DNA, 344 bp, Glycine max
  modified_base (328)..(328): a, c, g, t, unknown, or other
caaccctctttttctcttaatttctcatcatatcatatctatgtaatcttacacatatattaagacatagatataatttttttcgttttatttttccttgcatgggctgttaagataagatgtctcgcacgtgctcacagtgcggcaacaacggccacaactcgcggacatgcaccgacggtggcgccgccgcttcctgcggcgggtctcccagggagaacggcatcatgctgttcggcgtaagagttatgaccgaagctaactcctccttccggaagagcgccagcatgaacaacctctcacagtacgacgcggaatccaacgccgncgacgccggctacgcc

SEQ ID NO: 15332 - DNA, 402 bp, Glycine max
  modified_base (22)..(22): a, c, g, t, unknown, or other
ctcgattattcccgtgggcctncctcatcagcatgttggagaggctaatccttcagatgacttgactctttttgtggctttagatgaacatgggaaagctgaaggtgttctatttgaggatgatggtgatggatatgaattcactaaaggcagttatttattaacacattatgtggctgaacttaaatcatcagttgttacagtgagtgtccacaaaactgatggatcatgggaaagacctaaacgccgcttgcatattcaattattgctgggtgggggtgcaatgcttgatacatggggaactgatggagaagttctgcaactaattttgccttcggaagatgaggtgttgaagctagtatctactagtgagaagaattacaaggaccgtttggaaaatgc

SEQ ID NO: 15333 - DNA, 315 bp, Glycine max
ctttgggagcacaagacattgatgagacccttcgtggataaattgactgccacagttgatccacatgggtgtaaaatgtacgtgctgaagccactggcttgagttttctgaaacaaatttttggattgcagcttttggagtaactgatgtcaatatttgtttttcttgctgagtgataacttgtacacgagcttcacttcaataaaccttttcatttgcttctattgatagaagcttgatacgttatttagtgtaccagctcaatggaatcagtcacttagatgatataataaaatgaagctgtttgcatgcaaa

SEQ ID NO: 15334 - DNA, 358 bp, Glycine max
  modified_base (319)..(319): a, c, g, t, unknown, or other
attaaggatttccttctcactgccagaaggaaggatgcgaggtcagtgaagatcaagaggagcagagatgtggttaagttcaaggtcagatgctccaagtacctctacacactttgtgtgtttgacccagagaaagctgataaattgaagcaatctcttcctccaggtttgagtgttcaagacctgtaaaggtactgggcgagagatcaagaagaagcaattcattgattcttctgaagtttgattctctgtagttgaagcttgagatttttgtcagttggtcttttattatagattattgctaagacatggttgattntatctgttttggaaaatgaaacttgaatttatgtctaaa

SEQ ID NO: 15335 - DNA, 271 bp, Glycine max
agaaggtactttggcctatagtgatgattaaggaaggcgaggagcctgtttacttttgggatgcttgttcagattttctgcccttaatggacctatctggcacatttcgcacttatgattgaagatcgaaaactatctgtttagtctggtcagacgcttgcatctgcattcaatgttcaataccatagttggttcttagcgatagatcaagcataagcaactccttgattcttattaaatttgattctttccaatttgatcttcgaatttt

SEQ ID NO: 15336 - DNA, 402 bp, Glycine max
agaaaatgaaagtccttgttttctttgttgctataggtctagcagcatggcattgccatggctcagaccatgaccatgaccatggccacacctaccaaattttccctctgagaatgaaaactggccatggtggccactacattccggaggtatcatgccaaagttggaggcttggtgtggaagcacacaacgtcattgactggaaaaccgttcctcaagattgcgagggatatattgggaactacatgcttggcgaacaatatagatcagactccaaaatagttaaccaacaagctttctatgctaaaaccctcaatatcactgccaaaaccgcatgggtgttcgacatagatgagactacactctctaatcttccttactatgctgaccatggatttgggg

SEQ ID NO: 15337 - DNA, 402 bp, Glycine max
gtgattcaattgaagagatagtgtcttcaacagaggaaggggatgaatcagatgagaatgagataatatttcagcagctcaattgtttggtacttgaacatttaggaaagctgagaaggttctacaaagggagtttaagtttcccgtccttggaggaattcacagtaaagtattgcaagaggatggaaagtttgtgtgcaggtaaagtcaaaacagacaagctgttacaagtgacattccattggtcagaaggtgttatcccattggaaactgatctgaactctgccatgcaaaagcgataggcatttctggcaagggtatgtctttttattcaactgttgttataatacaccgtgtcagaaatttagtttttactagtatgttacgtgacaagattaattt

SEQ ID NO: 15338 - DNA, 292 bp, Glycine max
gagccttctttctttttctggtttcatggcatcaaggaacggcaacattcaggcaatatctcgcagccgaaaacatcaaaactcagccgtgacgatcgcccttggccgcaggagggggacccacaagaaacactctggtggtggtgatggcaattgcagttccccagttgtgaattcttgggaaggtggttccaagaaaagtgaggtttctgcgaggaagctcgctgctgggttgtggcagatgcagtatattcaagtctcaagggatcatcatgctgctgcttttggacac

SEQ ID NO: 15339 - DNA, 310 bp, Glycine max
gccaatggtatcttgaatgtctctgccgaggacaagaccacaaggcatgaagaacaaagatcaccatcaccaacgacaagggtagactatcgaaggatgagattgagaagatggtccaagaggcggagaagtacaaggccgaagatgacgagcacaagaagaaggtcgacgcaaagaatgctttggagaactatgcctacaacatgaggaacaccattaaggatgagaagattgcatcaaagctttctgatgacgacaagaagaaaatcgaagatgccatcgagagtgctattcagtggttggatggaaa

SEQ ID NO: 15340 - DNA, 404 bp, Glycine max
gttagtacaaaaaagggttacttcagcttccacatatcttgaagaattgatcaatgggcaagtctgtagttgagaagctactttggatggcaattgtgtgcttggtgctgggtgtaatttccattactcccaaggcccaagcagcagtgacatgcaaccaggtggtgagcaacctcaccccatgcatttcttatgtgctcaatggtggcaaaaccgtgcctggcccttgctgcaatgggatcaagaccctctttaacctcgctcactccacaccagaccgtcaaaccgtttgcaagtgcataaagaacgctgttagtgcgttccattatggcaagtccaatgtggaccgtgctgctgctcttcctaagcagtgtggggttaacattccttaccagatcagccct

SEQ ID NO: 15341 - DNA, 387 bp, Glycine max
ctctcaaacacacaagccaaacccaaacacaacaacacaaagaaaaaaagagcacaaacagaccaattccaacggttgaattttttggctgaagacaccccaccgacgttagtcaaataaaacatgtcttgctccgtcgcggtttccaattcgccggtgttctctccttcttcttccctcttctgctcgaagccctccatcatctcttcttcgccggaatccctctcgctctctctctcgcatctcaaaccttccaactcttctacgacgtcgtcttgttcttcaccctctgctgctgcttcttcatcttcttctccttcttctccgtttcggcttcgccttcccaagccttccaccgtgttctctgcttcttcttctgcttcgtct

SEQ ID NO: 15342 - DNA, 267 bp, Glycine max
ctcgagccgattcggctcgagcttctccaaagagaaagaacggcaagcaaagcatagtagcctaattcactttacacctaccaccctgcttctaactcaattccatttttcttccttattcctctctcaaaccataatatgcagactctttcgccgcctacttccaacgctctcaatttgaagcacgttcttcgcccgcgtcgagtcgcgcctagccgaatctttgtcaaatgcgccttcgcgtctgagcccgccagctacggggtc

SEQ ID NO: 15343 - DNA, 402 bp, Glycine max
  modified_base (64)..(64): a, c, g, t, unknown, or other
  modified_base (96)..(96): a, c, g, t, unknown, or other
caaaactatagactataatgatccaacaagggtttgttcttacgaggctggccagcaagtcttncttggccaaccagaagtatacttgtatataangtgttgagggagaatacatatatttgagatcacatgcaggcttgcagccaattctttactgtgacgaaaatggcagcaatgcagtatgtccagtatagtgtttgcaaatggaaccgaaaagccacgagttactagaggaggactgcaaggagcaaaacttactaacaaattttatagtttaaatattatagttatttgccttatgatgatagaaattgatgttatagcatgcatgtcaaatattcaaagatagaatatatgattcttgttctgatctcaagcatttatagtctcatggataatgta

SEQ ID NO: 15344 - DNA, 246 bp, Glycine max
cagtattgttgattaggtgtgacagaccagcagaagggaagaagatggacttactggggttatgggcaattttcggcccgcgtcccggcgctgtcttcggcgccggatggtggatctggcttgacgcggtcgtctgcagcttggtcaccgttccctttcttcactaccttaccggaattgtcgcatcttttgcggctctgatgttcaattgcgttagaaaagaagacatcgattattctccatatg

SEQ ID NO: 15345 - DNA, 314 bp, Glycine max
attgagtcaagaatgagattctcagcggtgtgttttgtcatactattgctgctggtggtagaactagaagcaaccacatgtttcactttcaacaaagagaaaaagctgtcagaattcaagaccaaacttcatcaaaagattcaaaagttagctactcctcctttatcagccttggcatcaccacctgcttcctcttcagaaacaaacaagagtgggagggtgttgtacgtgagtgaatatggtgcagacccaacagggtctgaagaaagcagtgatggcattttgaaagctgttgaagatgcttttgagttgca

SEQ ID NO: 15346 - DNA, 282 bp, Glycine max
ctgccgcccgtcgtcgccgattcttcatttgcatcaaaaccctcattctctaatgccgccgcgttccgcgcctcttcgcctgtgttccacccgcaacaacgccttggcaatagcaccttccgattcttctcattcaatttcgacaaaggctttgcgcagaaggtatttgataaaccggccgccgcggtgacctcgggcttctcgcgttaccgcgaggcaattgggctgcaaatcgaggcggtcctcaagagggatactccctttctggggggcccccgttgc

SEQ ID NO: 15347 - DNA, 252 bp, Glycine max
gtgaaatttctgtctaatgatgaacttgcttatgcatgaacggataatacactgggattatgggatgtgaaggaaaacttgtcagttcgtactttcaaaggccatgcaaatgacaataactttgttgtccttacagttatcactgaatacattacgtgtgtcacttgaaactaatgaagtatacgtgttctacaaagtaataatgcgacctatgactcgcctctaactcctctcctcttcatatgaatgacc

SEQ ID NO: 15348 - DNA, 441 bp, Glycine max
gtgaaagtgagaaaaaataaaaatcaaagagcataatgtcagggatcattcacaagattggggagacccttcatgtgggagggcacaagaaggaggaggagcataagggtgagcaccatgctggagaatacaaaggggagcaccatggtgaacacagtagtgagtacaaaggagagcatcatggtgaacacaaagctggagagtaccatggtgagcacaagccagagcacaaagaggggttcctagacaaagtcaaggacaagatccatggtgagggcggcgccgccgagggcgagaagaagaagaaggagaagaagaagaaggagcatggccatgagcatggccatgacagcagcagcagcagtgacagtgattaaactgctgcatcacctatatatttaaaaggtttatgggaccatagtagcgagggctgtgccttaa

SEQ ID NO: 15349 - DNA, 415 bp, Glycine max
gtctcttctctctcagaaaccctaatggcagagcgcggaggtggcgaacgtggcggcgaccgtggcggtttcggacgcggcttcggcgggcgagggcgcggaggcgacaggggccgcggccggcgtagaggtccccgccgcgaggaggaggagaagtgggtcccggtgactaagctgggacgcctggtgaaggaaggaagaatccgaagcctggagcagatctacctccactcgctgcccatcaaagagcaccagatcatcgacacgctggtgggccccaccctgaaggacgaggtgatgaagatcacgccggttcagaagcagacccgggccgggcagagaacccgtttcaaggccttcgtggtcgtcggcgacaacaacggccacgtgggtctaggcgtgaagtgcagcaagg

SEQ ID NO: 15350 - DNA, 440 bp, Glycine max
tgctcctgatgatctagaaggtttggatgcttctgctgcacgtgttgcaaatttgctgtctacagaacctgcagacattaagcttggtgttggagggttcagtatgggagcagctactgccctgtactccgtgtcctgctttactgctggaaaatatgggaatggcaatccttatccggccaacctaagtgcagctgttggtttaagtggctggcttccatgctcaaagaccttgagtaacaagttacaaggggtagatgaagctacaaggcgtgctcagtcctttcctgttttgctgtgtcatggaaaagttgacgatgttgatccttataagtttggtgagaaatcatcgaagtgcttaagttcaactggatttcatgatgtaacttttaaagcttataatgggcttggacactacacaattccagaagagatggatg

SEQ ID NO: 15351 - DNA, 433 bp, Glycine max
ccacatgcaagatggatcggaacgtgtgggtgagggacactgggagggcccggaagacttggcctacgacgctgcggcacgtgtcgtttataccgggtgtgaggatgggtggatcaagcgagtcacggtgaatgactcggtggttgactcggcggttgaagattgggtcaacacaggaggaaggccacttggactagttttgaagccgaatggagaactcatagttgctgatgcggaaaagggactgctgagagtgtcaagtgagaaggagattgagttgctggtagatgagtttgaggggttaaaattcaaactcacagatggtgttgatatagcagatgatggtacaatttatttcacagatgcatcacacaaataccccgtgaaggatgctgtgtttgacgtcttagaagggaagccaaatggaagattc

SEQ ID NO: 15352 - DNA, 445 bp, Glycine max
ctctgctcgtgcctctagggttatcatatctccatttccatggcctggctctcagtttccaagaatcttaagctatgggaaagtctgacccaaccgggagcgctgcataccggagagcaccatgctggacaatacaaaggggagcaccatggtgaacacagtagtgagtacaaaggagagcatcatggtgaacacaaagctggagagtaccatggtgagcacaagccagagcacaaagaggggttcctagacaaagtcaaggacaagatccatggtgagggcggcgccgccgagggcgagaagaagaagaaggagaagaagaagaaggagcatggccatgagcatggccatgacagcagcagcagcagtgacagtgattaaactgctgcatcacctatatatttaaaaggtttatgggaccatagtagcgagggctgtgccttaa

SEQ ID NO: 15353 - DNA, 371 bp, Glycine max
gggtcgagaaaagaagtatggcaggcatgttcatggaataagggaagatgtggatgagagagctttcttcccagaagcatcaggatcagctaggagctatacagactcgtaccaacaactatcaatgagctcctacaagtcctattcaaactccaactttcagaacattaataatgatgccaccaccaacccaagacagcaagagcagcaactacaacaacaacaacactgttttgttttaaggacagacttcaaatcaacaaggccaagcaaagagaaagaagctgagacaacaacaggtcagagaccccttcaaccgttctttggggaagggccaccaaagaacacaacagcagattcctggctagatc

SEQ ID NO: 15354 - DNA, 411 bp, Glycine max
  modified_base (344)..(344): a, c, g, t, unknown, or other
  modified_base (353)..(353): a, c, g, t, unknown, or other
  modified_base (355)..(355): a, c, g, t, unknown, or other
ggaagagcaacctttggaagtgcggaaatatagagccgaattgtctgaacaagatatatttgtaatcccagcaggttatccagttgtggtcaacgctacctcaaatctgaatttctttgctattggtattaatgccgagaacaaccagaggaacttcctcgcaggttcgcaagacaatgtgataagccagatacctagtcaagtgcaagagcttgcattccctgggtctgcacaagctgttgagaagctattaaagaaccaaagagaatcctactttgtggatgctcagcctaagaagaaagaggacgggaataagggaagaaagggtcctttgtcttcaattntgagggctntntactgaataagtatgtactaaaatgtatgctgtaatagctcatagtgagcgaggaa

SEQ ID NO: 15355 - DNA, 303 bp, Glycine max
gattgtcaggcctattttaagaattggctacaaagtgtccccgaactcccctcgtcatcatctttataatgctattcctccggttcactggaagtgatgccaactcaatctgttgctaaatcaattattttgatcctgagcaatttggttgctccggtatgcatgccatttctccattattatcatcgggcaataaagacatctcaacagtgttatataattgaatgagagcttaatttctggaatctaacaagtaataacatgccactcatttttagattaatatagtagcaattcttagtc

SEQ ID NO: 15356 - DNA, 371 bp, Glycine max
  modified_base (312)..(312): a, c, g, t, unknown, or other
cgcacctgctgctaatcgctgtttgtctgttcacctcttcgtccgcttccaagatcggagaaaatggggggtaaaccaccaattccaagcttgacttaactggccaacatgttctgccaatggaaatacccgaccaagatgttcgcggacacaacctttgagccccaccttcaaggtgaaaggcttagcgtttaaccggtattcatggctgacgactcataactcttatgctctggcgggggcgagatcggccaccgggtctgtcattgaggcccctatgaaccaagaagacaaagttgatgaacaactcanaaacggagttagaggatgtatgttggatatgtatgattgtcaaaacgacatctggttgt

SEQ ID NO: 15357 - DNA, 378 bp, Glycine max
ctctgctcgtgcctctagggttatcatatctccatttccatttcctctctctcagtttccaagaatcttaagctatgggaaagtcttacccaaccgtgagcgctgattaccagaaggccgttgagaaggcgaagaagaagctcagaggcttcatcgctgagaagagatgcgctcctctaatgctccgtttggcatggcactctgctggaacttacgacgtgagctcgaagaccggtggtcccttcggaaccataaagcacccctccgaactcgctcacggcgctaacaacggtcttgacatcgctgttaggcttttggagccactcaaagcggagtttcctattttgagctacgccgatttctaccagttggctggcg

SEQ ID NO: 15358 - DNA, 416 bp, Glycine max
gctgcaaataacaagatcttcatgatgaacctttctgctccctttatatgtgagttctttaagggtgcactggacaaagttctgccatatatggattatgtttttggaaatgaaactgaagcaagaacattttctaaagctcaaggctgggagactgataatgttgaagaaatagctttaaagatttctcaattgccaaatgcatcagaaaaacatacaaggattactgttatcacccaaggtgcagatcctgtttgtgtcgctgaggatggaaaagtaaaattgtatcctgtgatactattacctatagagaaattaattgatacaaatggagcatgagatgcttttgcgggaagatttctttcgcaattggttaagcagaagcccattgaagaatgtgtgagagctgggtgtta

SEQ ID NO: 15359 - DNA, 356 bp, Glycine max
gagaagaaaagcataacaagcagagcacattgtttagtgctagcattgccaggtcaaggccatatcaatcccatgcttcaattctccaagctattggagcgtcaaggggtgagaataacacttgttactactcgtttctattccaagaatttgcacaacgtgccttcttccattgctcttgaaaccatttctgatgggtttgatgaagttgggccccaagaggctgggagccccaagcctatatagatcgcttgtgccaagttgatcaagaaacctttcatgagcttcttgagaaacttggcaaatcaggaaaccatgttgattgagttatttatgattcattcttcccttgggca

SEQ ID NO: 15360 - DNA, 147 bp, Glycine max
ggaatttgtgttttcttttgcttgttcgtttgtttaattcagtaaaggaaattaggcatgaccctcttgttgagtatgctctgcctatttgaaaatttccacacctcttttaattatcgtaatgatgtgtgaagtgtgtgttatttt

SEQ ID NO: 15361 - DNA, 408 bp, Glycine max
gtgttccatcattttgaaagaagcaaatttcgctgcggttaggattactattgggggtgggtattcaatgtggaatatactgaccccacctctggtcatacacacgttgcatccgctgagactgccaatgagaccctcacacgctatatcactcctaagagatgcgctcctctgatgacacattatacatgcaactctaatgagacttacgacgtgagctacacgaccggcggtcccttcgtaaccatacagcacaatatgctactcgatcactggtctaactactgtcttgacttaactgttatgctatcacagtcactcacatcatactatcctattttgtgctacgccaattccttccagcctaatggcattgctaccttacatttcatgtgttgaccttaattt

SEQ ID NO: 15362 - DNA, 422 bp, Glycine max
aaagaaggtgagaagaagatcaaggagcagtttcataccgagaccttggacaatgttcagaaactcactggcatcacccttgacattgtgagtggtttgtccaacatcctcgagaagttcgggttgaagtttaatcttaaacccgcgtctcgccgtcttctcggcaaggatgggttgcccacttggttctctgctgctgatcgtaagcttttgggtcgtggatggagatcacgtgtcaagcccaatgttgtggttgcccaggatggcactggtcagttcaaaaccgttgccgatgctattgcttcctacccaaaggataacaaaagtagatacattatctacgttaaggctggtgtctatgacgagtacatcaccgttcccaagagttcaaagaacattctcatgtacggtgatggccctgc

SEQ ID NO: 15363 - DNA, 403 bp, Glycine max
ctcgagccgaatcggctcgagcggctcgagcggctcgagctcgagccgaatcggctcgagcaaacactagcaaagggaaggaaaagtaccttccccaataacccttctcttcgaattggcttctctcatcggagggaaacaatcaataaaagaaaaacaaaacccacaaaaagattataaccaaaaaaggatgaaaggaaaaggactagggtccgcaagttctctcatcctagtggtgggtgtgggaaatggcgtggatgctgaagttcaaaagcccaaagggcgtgaacaacatcaacaatggaggagaattgaaaccagcaacaaggccgtgacagcgtagtgccaaggctcagacgaccagaaactgtgccacgaggttctgtcatcttcgaacagcaca

SEQ ID NO: 15364 - DNA, 278 bp, Glycine max
ctcgagccgattcggctcgagatttcattccccatcaaatctcttgcttctctctcctcatttccaaagttcccaactttcctaacccgagatctggtgaattgaattgaaattgaaattgttgtcgtggttgctgctgctgcagctgcaaggaatgccgctgatattagcgaaaagcgattcgatccagattcgcgaggtgtggaacgataacctggaagaggagttcgcgttgattcgcgaaattgtggacaactacccttacatcgccatggaca

SEQ ID NO: 15365 - DNA, 434 bp, Glycine max
cttttccttcactttcccgagaaaaaaaaaacactctttcactttcttgactacggtctcacttcgacatggctcgtactaagcaaactgctcgcaagtccaccggcggcaaggcgccacgtaagcagttggcgaccaaggccgcccggaagtccgctcccgcgaccggaggagtgaagaagccccaccgcttcaggccgggaaccgtggcgctgagggaaatcagaaagtatcagaagagcaccgagcttctcatcaggaagcttccgtttcagagactcgtgagggaaatcgcgcaggacttcaagaccgatttgcgttttcagagtaacgccgtttctgcgcttcaagaagctgctgaggcctacctcgttgggttgttcgaggacactaaaccttgcgcgattcatgcatagagggttaccattatgcct

SEQ ID NO: 15366 - DNA, 412 bp, Glycine max
ctcgagccgaatcggctcgagagcatttccacgacattcttcgagagataaaagaaaattgagaacagcaagccactcaagtattctattctgtgctgtaatctacaccgttgaagatttgatgtatgcaaaactctcacggatacaacagagggactgatgagttacaacttacaacaactttaaagtagtagacttgtatgaagaattattccatgtggtgaaattggtgtgtcatagtaaattcaggcattgatagaaacttcacctttgtagtttgtccaaagggttagttgtgaaatggcagcttgtctatttgagttggacactatgttaggttaggggaggacaaatactagcagaaaccttgaaatgggacatatcagttcctgttgcatataagctagtccac

SEQ ID NO: 15367 - DNA, 350 bp, Glycine max
cattagtattccttctatcaacattctatctattctatccatgtgctcaattatatgctgaccattctttcttcttctattgcttatgttatttgactgccacacaggatggttcaatcaacaatgaagaggaaacgaaggaagggttgactagaatgaaccaatcggataacagaactcgttcacattcatcctcaccatcaactcataaccgtcacagaaaattgaggaaaccagctactactacttgtgcaaggaaactgcagaaatccataatctgcagaacacttggcgagctagaacttgacgaagtaaatggtcttatggatcttggtttcacgttcaagaaa

SEQ ID NO: 15368 - DNA, 288 bp, Glycine max
cattagtactacttctatcaacattctatctattctattcatgagctcaattttatgctgaccattctttcttcatcttttgcttatgttatttgactgccacacaggatggttcaatcaacactgacgaggataccaaggaagggtttactagaatgaaccaatcagataacagaactcgttcacattcattctcaccatcaactctgaacctatacagaaaattgaggaaaccatctactactacttgcgctaggaaactgcataaatccataatctgcagaacac

SEQ ID NO: 15369 - DNA, 437 bp, Glycine max
  modified_base (424)..(424): a, c, g, t, unknown, or other
gggaaaccaactaaggaataccctttcaaaatggcttgttctgtgtcatccatggtttctaccaccctcctcctaattaccatctgcacactgtcctcacttctgtcagttgcatctgcagcaacagaggagggacgaacaaggccattcaaaagggtctatgcctttggagactctttcacagacactggcaacacccaaaatgcagaaggtccaagtggctttggccatgtttcaaactctccctatggaaccactttctttaaccactccaccaataggtactcagatggtaggcttgtgattgattttgtggctgaagcactttcactgccttacttgcccccctaccgtcatagcaaaggcaatgacacttttggtgttaactttgctgttgctggttccacagccataaaccatttgntctttgtcaagca

SEQ ID NO: 15370 - DNA, 436 bp, Glycine max
  modified_base (345)..(345): a, c, g, t, unknown, or other
atttgcgtttactgatctcaagtcttccacctcactgtcgtagcgtagtgattgtggggtttctcttctcagttctcatcgtgacgatcttgctgctccgaaaaagggttttcctaacatcgcccattcaatttccgggctgttcagttcgtgaatagactgttgtttgttctaaaaagtagtggatagtaaaaattatcgaacttttttaagagaaaaatgcagagtaaagaagcagttgtggaagatggggaaataaagagtgtgactgctgtacggtctgaaattgatgggtggaccaattttggggatgatgacataatgcaacagcagtatacaattcangctgaggaagccaagaaggttccatttgtgggtgacaaggaaccactgagtagcttagctgctgaatataaattaggcagtcctatcttgc

SEQ ID NO: 15371 - DNA, 431 bp, Glycine max
tctagagagagaaactcgcagtcgcagacatgtcttggttcgatgccttcgccgacgacttgaacgtcaactcttcttgcactcaccaccacgacgaagacgaggacaacttctccggttacggcggctactcctccttcaccggaggattctacgccgacggcgatgtcgccgtcgaccactccggcgacgcgtcgccggagatctacggcttcactgatccgaatcccggttactctcagtctcccttcgaatcggccaccgtcgagaacggtaacgaaaacggcaacggctatggccaaggcgacggcgacggcgacggcgtttttatctacgatggtccggtgcttccgcctcctacggaaatggagcccgaggaaggttacgctcttcgcgagtggcgccgtccgaatgccattcagctagaggag

SEQ ID NO: 15372 - DNA, 433 bp, Glycine max
agaaaaatgaaggaaatgataactctaattctggaggaaagcaacttgagaatggagataaaactgaacaaattgatgaacaggccaagaagccagatgtagatatggaagaaaatgatctgaatgatacaaacaataaattagaaaatgattcagatgaaattaagaacagtcatgtgaacggcgaaaatgtgattgctgaaaggcctgaaggtgaagaagctcaaaagcaagaagttgaaccagcagagaaagttgccgaagaagctgctaatactgcggagactgaaaaatccctactgactgaattagaaaaagaaaagaatgaggagaaaacagatactgcgactctagaggctaatgggggaggcgagaaagagaatcctaatgctgcacaaatgtaatatggttatttggagctgtgcacagtgaa

SEQ ID NO: 15373 - DNA, 429 bp, Glycine max
  modified_base (420)..(420): a, c, g, t, unknown, or other
catcactacacgagcaagacgctgtgtatatacgttctgttcattcattcagaagcagcgtgggtgtgtgttttgcttcagagaatctttctcctaatggaacagctgaagccaagcgctcctaactcatcccctctcactccactcgccttcttggacagagcagccaccgtctacgcccacgtcccttccctagtctacaaccacaccaccttcacctggtccctcacgcgccgccgatgcctacagctcgcctactccctctcctccctcggcatccgccgcggcagcgtcgtctacgtcctcgccccgaacgtacccgccatgtacgagctccacttcgccgtccctttcggcggcgcaattctcaacaacatcaacacccggctcgacgcccgcaccgtctgcgtcatccttcgncacgcgaac

SEQ ID NO: 15374 - DNA, 398 bp, Glycine max
ctcctacaatttcctaaaatggccactctttcctcctacgacgacttcatcttcactgccttagctttcttcatatctggcctaattatattgctcaaacagaaatccaaatccaaaaagttcaacctccctgcaggaccccccgggtggcctattgttgggaacctcttacaagttgctcgttctgggaaacctttctttgagtatgtgaacgatgtgagactcaaatatggctcaatcttcaccctcaagatgggaacaaggaccatgatcatcctcaccgacgcaaaactggtccacgaggccatgatccaaaatggtgcaacctacgccaccaggccccccgagaaccccatcagaaccatcttcagcgaaaacaagttcaccgtgaatgcagc

SEQ ID NO: 15375 - DNA, 441 bp, Glycine max
gtgttggaagccaaagatggaactatttctgttgcttcatctggcaaggtatgattgatactttctgcttcatctgcaactgtccagcatagagaccacaagatccacacaaggccagtgttggggagacttgaggggagtaaacaccggatagatttatccctgtggagggaccacgtaaagaaacctgatattacactttaatcaaaaaccttatgactcaaatttataagttttcttcttacttatatggtgttcaatcttttcacttctattcgatgcgggaaaaattgacttacattatgtatgaaatatcaagtttaatttattgttttatgtattgtgatgacggaattttcgtaggctagtttttggtggtttgtctacaaagtcgtacaaggagccacggactctataaaaatttccacatttatgggttta

SEQ ID NO: 15376 - DNA, 388 bp, Glycine max
  modified_base (331)..(331): a, c, g, t, unknown, or other
  modified_base (338)..(338): a, c, g, t, unknown, or other
gaagaagccaaaaagaacttcgccggagctctaacggcgaggcccaactccgatgagccgaaaccggcaccggtgccagctgttcccccgaagaaggtcatcatcaagagcgctgatatgatccccgacatgcagaaggaggccgttgatatcgccgtcgccgcgtttgagaagtacaatgtggagaaagacgttgcggagcagataaagaaggagttcgataagaggcatggccccacgtggcattgtatcgttggacgtaattttggctcatatgtgactcatgaaacaaaccactttggttatttctacttggatcagaaagcggttntactctntaaatctggctagccttattgtggtagcaaagaagttgagatctatggga

SEQ ID NO: 15377 - DNA, 427 bp, Glycine max
gagagagagagagagaaagagagagagagagaggttaggctatggctgatgagagcgtcgttgagtccccagtgaagaggcagagagatgatgatgaagaaaatgaggtctctgtttccatggatgtggagggtggcaaagaccctcttagtaacggtttatcatctgtgattcctgggtggttctctgaaattagttcaatgtggcctggagaggctcactccttgaaggtggaaaagattttgtttcaaggaaagtctgaataccagaatgtcatggtcttccagtcatcaacatatggcaaggttcttgttttagatggagtaattcagctaacagaaagggatgaatgtgcctaccaagaaatgatcactcatcttcctctttgctctattccaaaccccaaaaaggttttggttatcggtgg

SEQ ID NO: 15378 - DNA, 404 bp, Glycine max
cagcaataaaagacattataccactgatggagaaaaccactgcattgagagctccttagcttatcattgccgaggatgtcactggtgaggctttggccacccttgtcgtgaataagctgcgtggtatccttaacgttgctgccattaaagctcctggctttggtgagcggcgaaaggccctgcttcaagacatcgctatattgactggtgctgagttccaagctagcgatctgggtctgcttgatgaaaacacctcagtggagcagcttggcttggctaggaaaattaccatctgcaaggattctaccactgtcattgctgatgctgcgacacaggatgagttgcaagccatggttgctcatgtaaaagaggagctgtctcagacagactcagtatatgatact

SEQ ID NO: 15379 - DNA, 413 bp, Glycine max
ggggaccccaaggcacaccatcacatggggttgctgacactgcaaatgggccacacacacatttataaaatgacaggttgtgaataggtcctacccatgtgagtgatgccagtgccactttctctttcatagatatttctctctctaccctttagattctctttcatgacaggaaaggacatgcacagatctaaaagtagggtagatgcccacacgtatgacaaaagtggccagttactcgaatcttttggggtctgtggccttgtgactgagttactgtgctatacttttttttgtattttttttttaactttccctctttgaagttttcaagaacccctaggtgtttgtggaaaaccaaatatgttaagtgagaaaaaaggtttaaaatttaaaatcagagtggcatatcg

SEQ ID NO: 15380 - DNA, 413 bp, Glycine max
ggaagaggtaatgatgcaggatatggtggaagaggcagtgattctaattatggagggagggggactgctgcttctggcagaggtggaggccgtgggtttgaccatgactcccagaggaatgataggggtcggagcccagacaagggatctagttggagtgatcgcttcaaaagcgtcaaccgggatcgcagtcgtagtcctgacagggctgcactacctcaacattcccaaggtggcagctttcacaaggcaatgatggaacgtggtggtggtggtggtgatcgcaataagagctttaaccgggaccgaagccgcagtcctagccctcatagacaggagaagtgcccagcggttcgagatcgttccccaagttacagttttcatcaatcaatgatgggacgaggtcagtcatc

SEQ ID NO: 15381 - DNA, 442 bp, Glycine max
ctcaatagagagaaagagagagaaatggctttcacgatttcgagatctcaatctgctttgacagatagagagaaggagaatcttgacaacttagttgacaaggagtgtgcaaccacagagggtatgatatcgagccagctcaagttgaagtcttctttgtcatccaaagcgtcttctcatcaaagcatggacaaacatgcaatccttcgacgtatcaggcaacgcaggtttaataacaaagccaaaaccgctctggaagctctcataggcacctcagaagccaacaataccggcactgcccaagaacagaagtggcttcaactgggtgactctttctcatctccttaactggaaacacaatctccccccagtttgcaacccatctataaataccctctttagtttccttcacccaacaaagtcatcttttccatacgcttgc

SEQ ID NO: 15382 - DNA, 426 bp, Glycine max
gttggaaagagccatttaattacttttttcagtactgagtggacattggcaccaaacaagcatggatacaatcaagtccttcaagggctacggcaaaatagacgagttggagcaacaagcctatcagaagaagacacgtaagcgcctgataatcatcgcagtctcttccatcgttctatttgcggtgatcatcgccgcggtcgcaagggttgtgatacacaagcgcaacacctcatcatcgccctcctctgactcgcccccgcaaactgagttaaccccggccgcgtcactcaaagcggtttgccacgtgactcagtaccctaacctcgtgcttctccgcaatctactcgttaccggaatccaacaccactgattccgagctcctcttcaagctctctctccgcgtcgccattgacgagctctcga

SEQ ID NO: 15383 - DNA, 430 bp, Glycine max
agcaaattcactgaaataatttcaccaatcaaagctgtggcactctctagggagagggacaaagatgctgccaacatcaagaagttgcttgaggaaggggatttggtgatttgccctgaaggcaccacttgtagagagcaattcctcttgaggttcagtgccctctttgctgagctaaccgatagaattgtcccggtcgccatcaacaccaagcaaagcgtgttctacgggacatccgttcgcggccacaagctgttggatccttattttgtattcatgaatcccatgccaacttatgagatcactttcttgaaccagttgcctgcagaactcacctgcaagggagggaaatctgcgatcgaggtcgcaaattatattcagagggttcttgcagggactctcgggtttgagtgcaccaatttgactagga

SEQ ID NO: 15384 - DNA, 422 bp, Glycine max
  modified_base (407)..(407): a, c, g, t, unknown, or other
tagagatcttaaaactagtaatattttactggatgcaaattgggatcccaaaatatcagactttgggttggcgcgatcatttttgggagatcaagttgaggcaaacacaaatagggtggctggaacatatggttacatgcctcctgagtatgctgcacgggggcatttctcagttaaatcggatgtctttagttacggcgtgatagtactagagattgtaagtgggaagaaaaacagggatttttcggacccagaacactacaataatctacttggacatgcgtggaggttatggactgaaaaaaaggccttgggaactattgaataaactgtcaggagaatgctcgccctctgaagtcgtacgatgcatacaagtaggcctattatgtgtgcaacaaagaccacangataggccacacatg

SEQ ID NO: 15385 - DNA, 363 bp, Glycine max
aattgtttaaacctaattctcatttcttcatcgttcgattctgctcctcctaaagatgcagatcttcgtgaaaactttgaccggtaagaccatcacccttgaggtggagtcctccgacaccatcgataacgtgaaagctaagattcaagacaaggaagggatcccacctgaccagcagagacttatctttgcgggtaaacagcttgaggatggtcgaacccttgccgactacaacatccaaaaggaatccactctccacctcgtgcttcgcctcaggggtggcatgcaaatctttgtcaagactttgactggcaagaccatcaccctcgaggtcgaatcctcggacaccattgataatgtcaa

SEQ ID NO: 15386 - DNA, 261 bp, Glycine max
ctcaattcatttaaatagtgagaaaagtctttcacgagctggtgatcctaacaagtttggactgatatattaacgtagaattctgcctcatcatataactagtagcacacatccacttattgatgataatacgtacatgcctgattactatccaactcatctacatcgctctattcgatcttatcatagtcattaccgcaagaataccctttctcactcgactctagtcaaaactttgcacctgactctctaagtatacta

SEQ ID NO: 15387 - DNA, 337 bp, Glycine max
attgcaacatagttggtgcaatgcttttggttgatacttatgataccaatcctgaaaatgcagttcgtagtatttttgttgcgcctttcagaggcggaaggcccattcgggtggttacatttccgaataccattgtgcagattgaaccagacatgaattcaaggtttcagcttttgagtaccactaccaatggtgattttgttcaagggaaagatctcgcaatggttaaagttaatgtagcatgtgctgctgttggcttgacatcaagttacactccaactccattggtggaatctggtttgcaaaaagacagagggttaattgtggagtattttgg

SEQ ID NO: 15388 - DNA, 374 bp, Glycine max
aggaaaatggagaaacattagattagattgttgtcatccacgtttggctttgcattgctgtctgtgtagatctttaattatttggagagaggaaagaagagttctactccacatgttccctgtccccttctggatccttcctttctttcctgtatacttttcgttgcttgttctgccgagccattgagtgggtgttaacgctcttttttctcctcaaccaagacatttgacgtgttgtattgtaattcttttcccctatataatatgcttagcatatctatcattgtcttttcttgtagccgaatgagttgatgaatgttctcttcatgtccgctagtgcccatcaatttaacttgaccgtgtctttttcatta

SEQ ID NO: 15389 - DNA, 409 bp, Glycine max
  modified_base (360)..(360): a, c, g, t, unknown, or other
tgaatttgtgaaagagaccaaagatagaggcatgttggcaagttggtgtccccaagaggaggttttggctcacccagcggttgggggattcttgacacattgtggttggaattcaacgttggagagtgtgtgtgaaggggttccaatgttgtgttggcctttctttgcggagcaacaaaccaattgtcgattttgttgcaaggagtgggggattgggttggagatagaggatgttaagagggagaaagttgaagcacttgtgagggagttgatggatggggaaaagggtaaggagatgaacgcatgagctttggagtggaagaaattggcacacgaggctgcttcgagtccacatgggtnctccgttgtgaacatggacaacgtggttcgtcaagttcttaataacaaa

SEQ ID NO: 15390 - DNA, 394 bp, Glycine max
gaagaagtcagtaaccatcgtcgtgagcgaagatccataatgatgcagttaccaattgcaataacacactcattgtggttatcgaaatttgatcgcagcgtcgagaagaatgggaagtttgggagcgattctgaaacattcagatgacttttaccctctgctgaagctgaaaatggcggcgaagaacgccgagaagcagaacccggcggagccggacttggcggtctgctacacaatgctccacagggtttctcgaagtttcgccctcgtcattcagcaactcggcaccgagcttcgcaacgccgtttgcataatttatttggttctgcgagctctcgacaccgttgaggatgatactagcatagaaacagatgtcaaggtgccaatactgata

SEQ ID NO: 15391 - DNA, 430 bp, Glycine max
attaactaagcatatatagcgtgtaagacagtgagaaaaaaagtgttgtgtagagagaaatggctaggtggtgcatcttggtggttcttgcccttgtcgtggttgcaagtgccagaaacatgcccaatgacgcaggtttggaggaccagaagaacttcctcgggtatgggttctctggagttggcaacaatgggcttccctttggaggagtgggttctgggtttgatggtaatatgggtgggccttctgggctcggtggatttggaggattcggtgggcctagcgggctcggaggtcttggtaacggtgaagggcccaaccttcctctcccttgagagttgagaccacacaccttcgtgtttcttattttcggtcgctattatcatagcctatatagtgtttcttttagtgtttagttcaagaaaataat

SEQ ID NO: 15392 - DNA, 435 bp, Glycine max
  modified_base (416)..(416): a, c, g, t, unknown, or other
ctctctttctctctctagaattctcagatttgcggggcgagatgatgcagcagccaggacccggcatggcacctcccaccatgggccagcagccgccgcaacagtaccagcagcctccgccgcagcagcagcaaccctacgtcatgatgccgccgcaggcccaggccccgcaggccatgtgggccccctccgcccagcctccgcctcagcagcagcccgccagcgccgacgaggtccgaaccctctggatcggggatctgcagtactggatggacgagaactatctctatacctgctttgctcacaccggcgaggttacatcggttaaagtaattcgaaacaagcaaactagtcaatctgaaggttatgggtttattgagtttaatagtcgtgctggagctgagagaattcttcanacatataatggggcaataa

SEQ ID NO: 15393 - DNA, 413 bp, Glycine max
tgccatttcaatccccagtttcttcttcaacgtcctcttacgagcagatcccaattctgcttcccagtttcaaaccctaattccctcattcccatggcctcagaagagcccactgtcgcggtggaacccgctcccgaacctgccaccgccgagcctcccccggaggagaaggaggagcccaaacctgaagccaaggctaagaaaaccaaggaacccaaacctaaaaaggtttccagaccacgcaaccctgccactcatccttcctacgaggagatgattaaagacgcaattacctcgctgaaggagaaaaccggttcgagccaacacgcgattgcgaagttcatcgaggagaagcacaagcagcttccaccgaacttcatgaagcttcttctctaccatttgaagaaacttgt

SEQ ID NO: 15394 - DNA, 387 bp, Glycine max
  modified_base (351)..(351): a, c, g, t, unknown, or other
ctcgagccgaatcggctcgagccatggtacggcccagaccgcgtcaagtacttgggcccattctctggcgagcccccgtcctacctcactggcgagttcccaggtgactacggctgggacactgctgggctttcggccgacccagaaaccttcgccagaaaccgtgagctcgaagtgatccactccaggtgggccatgctcggggccttgggctgcgtcttccccgaactgttgtcccgcaacggggtcaagtttggagaagctgtgtggttcaaggccgggtcccagatcttcagcgagggtgggctggactacttgggcaacccaagccttgtccacgcccagagcatnctcgccatctgggccacccaagttatcctaatgggt

SEQ ID NO: 15395 - DNA, 369 bp, Glycine max
  modified_base (305)..(305): a, c, g, t, unknown, or other
gagagagcaactgcacgcactgtaactcctaacttcccagatcggcttcttcctcttttctcttcggtgattgttggaactcagagagcttctttgatggaacagttccagaaggttgagaagataggccaatggacctaccgcgtcctttaccagggtcgcgaccgggttaccaacaagaccattccgtttaagaagattccccttgaaccagaaggataagggggtcccaagaacggccattcgcaagattcctctctggaaggaattgcaccacaggaacattgttaggttgcaggatgtantgcacgatgagaagagtttgtatctggtttttgagtaccttgacttagatctaaagaagcacat

SEQ ID NO: 15396 - DNA, 397 bp, Glycine max
tagcatagtagctatgacatgcacatcgctcccttagctcggctcgcaattcgagtcgaggagagtatgaggcatgcgagaactcggagtaggaaattgatacagtatcaaggaccaaagcgcaaactctaaaggataaaaactgcggttacagctcatgactgtttcattatttaataacgatactgatactgaatccgcaagactactttcaacttacgaagctccgctggtaacgtcgcctcaataagaccgtctgtgaagtgactccattgtctcggactcaacatccatacccggcaggatacggagggtcaccagaagacaacaggcggctcatcgacggaaacgttggcagcaacaccttgaccatagcaataaccatgaccggcctcgt

SEQ ID NO: 15397 - DNA, 393 bp, Glycine max
cgggtattgcttatcatatgaacaaggaaactagtgctcatgcacccagtaccatgatgattaaggtggtcgctcctcctgagagaaagcacagtctctctattggtggttatatcttggaatcacttatcaccttccaacagatgttgatctacacgggtgaatatgatgaatatgtgccacatatccgttatcacaagtgcttctaaagttgcataaacgtcgagctggatggtgaacaagctcttaatgcacccaatcctagaccatattatactctagtacgtctgacttatttactgtttgaacattcaccatcctaatatatctatctagctgacactatgataccataccgcgaatagtttataaccattctacggtagtgaacct

SEQ ID NO: 15398 - DNA, 349 bp, Glycine max
aacaaccaaagcaagcgccatttacggctgttcatgaacgcgggcgccggcggaggaacacggtggagatccgttccgtttactcatccggcgacgtttgaaacgatggcgatggagaaggatctcaagaacaagatcaaatcatatctcgaatcgtttctcaaggcgaagcagtattaccggaaactcggccgcgcgtggaagaggagctatctcttgtatggtgcctcctgcaccggaaaatcgagcttcgtcgcctcgatggcgaacttcctctgctacgacgtgtacgacgtggatctttgcaagattcgcggcgttacggatctgtagtttctgatgactgaaa

SEQ ID NO: 15399 - DNA, 308 bp, Glycine max
  modified_base (245)..(245): a, c, g, t, unknown, or other
  modified_base (286)..(286): a, c, g, t, unknown, or other
attctcttcacttttaagttaaatagtttttcattgtttcatggaatctacaatggctgcttcaacaatggctctctcttcatcatcattggctggccaagctatcaagcttgccccctccacccctcagcttggtgttggaagggttagcatgaagaaaacagcctccaagactggttcttctggaagcccatggtacggcccagaccgtgtcaagtacttgggcccattctctggtgagcccncatcctacctcactggtgaattcccaggtgactatggttgngacactgctgggctttctgctg

SEQ ID NO: 15400 - DNA, 407 bp, Glycine max
caactggggtggttttctgacatgaacaagtacaaccttatgggtgatcttcctaagaagtcttggcccaagaaactgaaacagatgaagcagttctggcttggtcagagactcaaggcctcaagggcttacctgaaaactttattcaacaaatctggttgctcagacaagttctgcgccagtgctgcagcaagcaacaacattggagcggagaagaagtcatcaaggtgcaaagagtgtcagaacaagtacatgaaggttgcaaggagaaacccttttgagagtttctatgatggcaagcaccaggtaacttgttctatcatgaagagcatcaaaagagagatgcttgaagttgaagatgatttctgtgaccacaggaggtctttctctggggttggtcaacgaca

SEQ ID NO: 15401 - DNA, 405 bp, Glycine max
  modified_base (204)..(204): a, c, g, t, unknown, or other
  modified_base (345)..(345): a, c, g, t, unknown, or other
  modified_base (366)..(366): a, c, g, t, unknown, or other
  modified_base (373)..(373): a, c, g, t, unknown, or other
ggctcgaggaagcagaagccatggaaaccaacacactcccaaaccagcagacaccaaaaaccaaaaggcaaatcttcatactctcaggtcaaagcaacatggcccgtcgtggcggggttatcagggacgctaacaaccgtaagcggtgggacggcgtggtttcgccggagagccgctccgatccattcatccttcgccttccgncacccttcaatgggaacccgggaacgagccccttcacgtcgacattgactccagaaaggcttgcggcgtgggccccggcatggtcttcgcgaacgcgctgctgcggcggagcgtggtggtgggcgagctgggtctggtccnctgcgccgtgagcggcaccgncatgaangagtgggcgcgtgtggaggaactgtacgagaa

SEQ ID NO: 15402 - DNA, 298 bp, Glycine max
aaaaaaaggaatcaaaagccatggaaaccaacacactccgaggccggcagacaccaaaagccaaaaggcaaatcttcatactctcaggtcaaagcaacatggccggtcgtggcacgggttatcagggacgctaacaaccgtaagcagtaggacggggtggctcctacggagagccgataccaggcattaattctgggactgtccgtcacagtgcaatgggttcccctctaacgagcccctttacgacgacagggactccagaaaggctagcggcgtcggcccaaacatggtcttcgcg

SEQ ID NO: 15403 - DNA, 339 bp, Glycine max
  modified_base (77)..(77): a, c, g, t, unknown, or other
gaaaagcagaaatggcggcggctacggcgatttctcagctaggctgtttttccgccgtccaccgcagctcacacctncggcgccgctcgtttctgttcccttcccctcgctccaagttatcggttgttatgagtctggagaggcatgacacggatactgctgggtctgataccaaaaatacactaagttatgcagttgatgtgtcaaagctacatgttgaagaaaagaagaactcatattcaacaaaagatggccatgatgctgaaaaaatagggtttggagaggcaacacaggaaagtgtcgatcaaccgaaaaggactgcatagattcatgacttct

SEQ ID NO: 15404 - DNA, 326 bp, Glycine max
gcccggtgcacatagaattgccttatacaatcaagaatacactgacactaaccagtctaggaatgcagttaagtgaccgatgtcggacatgtacgactatgagaacgatatatggctctgaaactcatttccacggtcaatgctagaacttcactgcattatgaccgtctattaatactttgaaagaagtgcatgcgttcttgactgataatccaactgacattgagaccatcataactgaagactatgcgcacactcactaggagttgactaatgtgttcacatgtgcatatactggatcagtattagttccctgtgaccaagac

SEQ ID NO: 15405 - DNA, 439 bp, Glycine max
cttcacttgttgctcgtcttagtttctgtgttgtgtcagttgtattgctatatcctaattaaacttcaccctcaaaatgagtgatcccacactagcacaaccacacctagtcgaagtccacacaacactcgaaaccgttgttaccacacacaaccataaccatagaccctcaataaatgcctcaggtgaaaagaagaaaattgtgggggtgttctacaaagggaatgagtatgctaaattgaaccccaatttcgtggggtgtgttgaaggagcattgggtatacgtgagtggctggaatcacagggtcatcagtacattgtcactgatgacaaagaaggaccagattctgaacttgagaaacacattccagatgcccatgtcatcatatctactccatttcaccccgcctatgtcaccgcggaaagaataaagaaagcg

SEQ ID NO: 15406 - DNA, 430 bp, Glycine max
gagacatgctagcatgcctgcacgtctactctagagtgatcccctcggtgaattccaattccacattttcaagaaataaggaggcaaaaatgttggtatatgaattggaattatttgttttcttattaggcctatcctgaagccaaaggaaatgagatcggaattcctcggggaattccaattccacattttcaagaaataaggaggcaaaaatgttcatatatgaattggaattatttgttttcttattaggcctatcctgaagccaaaggaaatgagatcggaattcctcggggaattccaattccacattttcaagaaataacgaggcaaaaatgttcatatatgaattggaattatttgatttcttattaggcctatcctgaagccaaaggaaatgagatcggaattcctcggaggtaccgagctc

SEQ ID NO: 15407 - DNA, 350 bp, Glycine max
caaaacaccaccaccaccacctcgctctcttcttccctgcttgacaatttttattttaatgatactattttgttattgttaagacggcatcatcagggaaatggatcgggtgaagggtccatggagcccagaagaggacgaggctttgcggaggctggttcaagcccacgggcctcgaaactggtcggtgataagcaagtccgttccgggacgatccgggaaatcgtgccgcttacggtggtgcaaccagctctcgccgcatgtggcccatcgtcccttctcgccggacgaggacgaagccatcgtcagggctcacgccaggttcggcaacaagtgggccaccatagctc

SEQ ID NO: 15408 - DNA, 418 bp, Glycine max
  modified_base (393)..(393): a, c, g, t, unknown, or other
aacaacttctaacacatacactactctctctctctctcttattgtatggccgccaattccagtagccgagggatcaccgccttagggaagcgagtcgccaaccggatctggacttccaacgcacctcctctcacttcaaggaggggagcatacagtagcggctcagtgtacgacaagaaccctgatgatgagatccagtctgggcaggtcccagacgatgtgatccaggcggcaacacaatccggcaaatactgggccccacatccacagactggggtatttgggccccccggaggaggtgaccaaactgcttctgccattcactctgatgcgctggaggagaaagcctggtttcgccccaccagtctcgaggatttcgagaagcctcacacncttccttaacaaccatgggaggaca

SEQ ID NO: 15409 - DNA, 408 bp, Glycine max
  modified_base (9)..(9): a, c, g, t, unknown, or other
cttcttctncaccatctcttcgcccataacctaattagtgctcaagcacaaaacatcaatttctctatgatcatgatgatgatgatgggttcaaacacaaaaccccttgtgcacctttctcttctaattttggttctcttttcttcttcaaccgaatccctcagattcgaactccaatctgggcacaccaaatgcatctccgaggacatcaagagcaattccatgaccgtgggcaagtaccaaattgttaactccaacgagggtcagcctcttcccgattcccacagagtcaccgtcagggtgacttcgtcttatgggaacaactatcactacggggatcgcgttcagacggggcattttgcgtttgcggcagtggaggctggagattacatgacttgcttttgggct

SEQ ID NO: 15410 - DNA, 406 bp, Glycine max
ggggttggcagtctgcctgttgcacaactactctgtcaatggatacacttcctgcagtggccaacaagagacatgctcgggtaggcggccgaaacatgagtgggagtgctttcaacaagctgcttaatccacttgcagcagaaagtcatgatctgtcaaaccctgttgacctcaaggaccattgggcaaaacatggaacgaaccgatgcatcacaataaagtagagggcgagacattgtttctggggcagcattacacgaatagaaactgcttttagtgatcaattatggattctcaagtcgaatgagaaaaataatgttaagtgtaaaggccatccgggagagctaatgatttagagtatgcccttgcttatatctaggatgcataagcctggtggaggctggct

SEQ ID NO: 15411 - DNA, 407 bp, Glycine max
  modified_base (62)..(62): a, c, g, t, unknown, or other
  modified_base (83)..(83): a, c, g, t, unknown, or other
  modified_base (90)..(90): a, c, g, t, unknown, or other
  modified_base (204)..(204): a, c, g, t, unknown, or other
  modified_base (321)..(321): a, c, g, t, unknown, or other
  modified_base (338)..(338): a, c, g, t, unknown, or other
ctatactctatttttcgcgtcacataaccaaaaaaaataaactgggggagaaacatgttgtntgatgttggggactatgcttnctattgntctctgcatttccacttgcgttctctgagagatgccacccacaagacaagaaagcgttgctccaactccagaaggacctcggcaacccttatcacatcatatcctggaacgcanaggaggattgctgcgagtggttctgctgcgttaagtgtgacgagaaaacaaaccgcgtcattagcgttgccttatcatccccttttccagacaccaatctctcggcccaaatacctncctctgtgggtgacctnccttacctcgagtccctcgtcttccacaaattccccaaactcgtgggcccaatccagcccgcaatcgcc

SEQ ID NO: 15412 - DNA, 385 bp, Glycine max
gaaaactagtaatatggcttcaagaactatatgttttaccattcaagtgactcttgtagtagcttttctaacatcaaaggttgttttatctgatgacactgtgccaattcccgcgaacaaagcacaattaggtgaatggtataatactaatgtggggcctttagatcaaagaaagagcaccatggacccagcattggtgactgctgaagaaggcgctaaggttgtaaaggtgatgcaagatggcagtggggaattcaagaccatcactgatgccattaaaagtatacctagtgggaacactaagcgtgtaattatttacattggagctggaaattataatgagaaaatcacaattgagaagacaaagccttttgtcaccttgtat

SEQ ID NO: 15413 - DNA, 392 bp, Glycine max
tgcagcacatcctgtacctgctcaagaaaagatgagtgctctggttgaagctttgttcgagggaactgagaaaggttttgctaaagaagctgataaaaagaagaactacttttctgttgctgttgcggatgagggatcccagccgttgttgcttcatgctattgaagagttttcttgcaagtctacttcaaatgctttgaaggaggttgccctggttctaaaggcactctacgatgctgatgtgttagaggaagaacacatagtgcagtggtatcaaaagggactgaagggtgataacaagaactctaggatttggaagaatgctcaacctttcattgattggcttcagaatgcagaatcagataccgaggaagaataaattgcctacattc

SEQ ID NO: 15414 - DNA, 218 bp, Glycine max
ttggacttgaaccttgctctcaagcccaaggattggagccggcagggggtcgaccgcgggaggtaccgcccctgcgacttccgaccgcacctgcagcgccagactgaacgcggcgacgccgctcagcagccactggctgcccgccccttagggtgccactcggcagggaaccactgtcatcgacgccatcaacgcctaccctaagaaccaccaaggca

SEQ ID NO: 15415 - DNA, 398 bp, Glycine max
  modified_base (306)..(306): a, c, g, t, unknown, or other
gagaaaagttagggttcacaacttttccttttccttttgcttgcgaatctgaatcaaataatcaatcatccattcattattcatcatgtcgtcggcgaagaaaatcacgctgaagagttcggacggcgaggctttcgaggtggaggaggcggtggcgctggagtcgcagacgataaagcacatgatcgaggacgactgcgccgacagcggcatccctctgccgaacgtgacgagcaagatcctggcgaaggttatcgagtactgcaagaagcacgtcgaggccgcgaatcccgaagacaaaccctncgaggacgatctcaaggcctgggacgctgaattcgtcaaggtcgaccatgccacgctcttcgatctcatcctggctgctaactacttgaaca

SEQ ID NO: 15416 - DNA, 172 bp, Glycine max
  modified_base (9)..(9): a, c, g, t, unknown, or other
catgaagcnctgataatgcatgtagaacaaagctctgaatgggacgttgacaaccggaacgcgtatgatgtaccgatcctcgatgtcatacataacatctactactaaactctgcacttatgctcaatcaatttgcataccaaactcatctcattgagaagaactagatctc

SEQ ID NO: 15417 - DNA, 417 bp, Glycine max
  modified_base (359)..(359): a, c, g, t, unknown, or other
aaacaactgtctaataatgcttatgaagcttccaaaagaaaagggagtgggaggaccaagatttgttcaatccaaacgccattacacagttcacggctgcaacgaatgaagatatatctctctcttctcacctctaattgaccttcaactaccaaaagttcaaaaccttgctagtcatatattgctaagattaaaactaaaaaatattaaacggcttggttgcgcggaactgagatatcaataacaaaaggccttcataaaagtctatttttcatgaacaagagggcaatactcagggtaccacatattgcctcggacatactccacggtttcttcttttgacatgtttgctagctctntgaaccctacatcaccatgtccttcagcctgcttttctgcaaccgctgcatgtacaac

SEQ ID NO: 15418 - DNA, 351 bp, Glycine max
  modified_base (49)..(49): a, c, g, t, unknown, or other
  modified_base (226)..(226): a, c, g, t, unknown, or other
ggccgacttcggccgcctcgagatcgagctggccgaggttgagatgccnggcctcatggcctgccggaccgagttcggcccatctcagcccttcaagggggcccgcatcaccggcttcccttcacatgaccatccagaccgctgtcctcatcgagaccctcaccgctctcggcgccgaggttcgctggtgctcctgcaacatcttctccactcaggaccacgccgncgccgccatcgcccgtgacagcgccgccgtcttcgcctggaagggtgagaccctccaggagtactggtggtgcaccgagcgcgccctcgactggggccccggcggcggccccgacctcatcgtcg

SEQ ID NO: 15419 - DNA, 329 bp, Glycine max
ggccgacttcgtccgactcgagatcgaactggccgacgttgagatggcgatcctcatggcgtgccggaccgagttcggcccatctcagcccttcgaagggggcccagcatcaccggctcccttcacatgaccatgcagaccgctgtcctcatcgagaccctcaccgctctcggcgccgaggttcgctggtgctcctgcaacatcttctccactcaggaccacgccgccgccgccatcgcccgtgacagcgccgccgtcttcgcctggaagggtgagaccctccaggagtactggtggtgcaccgagcgcgccctcgactggggcccccg

SEQ ID NO: 15420 - DNA, 436 bp, Glycine max
aaaatgacggaactttaaggccacttgccatagagttgagtttgccacatcctcagggagatcaatctggtgcttttagtcaagtttttctgcctgcagatgaaggtgttgaaagttctatttggctgctagcaaaggcttatgtagttgtgaatgactcgtgctatcatcaacttgtcagccattggttaaacactcatgcagttgttgagccattcatcatagcaacaaacaggcatctcagtgttgttcaccctatttataaactccttcaccctcactatcgtgacaccatgaacataaatggccttgctcggttatcactggtcaacgacggtggcgttatagaacaaacatttttgtggggaaggtattctgtggaaatgtctgctgtagtttacaaggattgggtttttacagatcaagcattgcctgc

SEQ ID NO: 15421 - DNA, 405 bp, Glycine max
ggcaaatggattaagcaataaaatagtagccattaattttatgaaatatgcaaaaagatgttagttttgcaggtttgttgcctttgaaatgttaattaaatacactgagaagtttaatttcagaatatataaatagttttccaaaaaaaaaaaaaaaaaaaaaaaaaaaaaaaaaaaaaaaaaaaaaaaaaaaaaaaaaaaaaaaaaaaaaaaaaaaaaaaaaaaaaaaaaaaaaaaaaaaaaaaaaaaaaaaggggcggcccccaattagggactttgtaaacccggaattaaattcggaaccggtccttgaagggttacaatttttccttatagggagtcgttttaaactttggcgaaataatggcaatagctgttccctggggaaaattgttttccgttcaa

SEQ ID NO: 15422 - DNA, 392 bp, Glycine max
catgtgtagagaattgtgaaggttttggagcttgcaggaggagtcatggatgagcttgcaagccctgttggtcctaggaaggatgtggtccaaaaccactgccttgagttcatgcaattaatcaaggtccttgtctcccagaaatcaatttattcttttgtctattcatgtatataaaagaaggtggcattatgggtgcaagtcccaaaaagagcacacactaccaaaactgcactagtcttatttaagtggtctcatttaaataattaacgttatataaaattaacagcaggaattatgtaagaatattttatttactttacattaatcgtttgttaggtactggttcagaaattagcaaaataatgaaagaaaagataggattttattga

SEQ ID NO: 15423 - DNA, 414 bp, Glycine max
  modified_base (338)..(338): a, c, g, t, unknown, or other
  modified_base (397)..(397): a, c, g, t, unknown, or other
ctagccgcttgaccaaagttgaaaattttcagaaaccaaaacctcggcctccttttcttttttccttcttcgccactctctccattccttcgatgatttccgaaccggcgagttccctgagaaagagcaactttcaagaccggcgcctcagcatcatcgacgtttcctccgacgacgattcgcttctcgatggaaaccctctcagccaccaacggtcagagaaccaagaacaggccgatgtgttgtacacgccgaactcgaagaagttcgaagacgccgtcaccaaactccaacaatgggaccacgagcctcactccaacgactcatccggtatcggnaaacctaagagaaacagcaaatgcaatctgcgcaagagtttagcctgggacagtgcctntttcaccagcgccgggg

SEQ ID NO: 15424 - DNA, 393 bp, Glycine max
  modified_base (40)..(40): a, c, g, t, unknown, or other
gtgagttaaaagaaccgataatagttgttccttcactctncgctcgctctgccactgagccaagaagatggcctcacaggtttgcaaatctgcttccagagccgcgaggtcccttctatcctctcggtttcactctcaaggacgtgcgcttggggctgctgcggctgtttcattgagcagcaaagtgcctctttttttacggaaagaacggttcttgaaatggatccgcttcttcatcatcatcatcatcatggatttcaggagctcttgctcttcctgccgcagcttacatgttccaagatcaggaggtgcatgcagctgagcttgagcgcactttcattgccattaagcctgatggagtgcagagaggcctgatttctgagattatatctc

SEQ ID NO: 15425 - DNA, 411 bp, Glycine max
gttttgaacctgaattgcctgcaaggaaattggaagcaattgagaggatggggtttgggctgctgaacaaggttgctatggtttttcctcatgtgttttggggggaagatcgagacacatttggatgtctcaatgaacatagtcatcaacgtggggaatttttcctattttactgttaccatacagtttctggaggtccagcacttattgcgctggtggctggtgaagctgcacaagcctttgaatccacagatgcttccattttgctgcatcgggttttgaccgtgttaaaaggaatatttcatcccaaaggcatcattgtgcctgatccaatacagtcaatttgtacaagatggggcagtgatcccctttcttatggttcctactctcatgttagcgttaattcatctg

SEQ ID NO: 15426 - DNA, 394 bp, Glycine max
  modified_base (362)..(362): a, c, g, t, unknown, or other
gaagaggagaaaaagactatggagggtttgaagaagagaaagctggagctggacgaagcaggcaacggtgaattggcttccaaggaagagcttcgcttcctcattgaacctctcgctaaaccccagctcgtcgatcttcttgctaaactagggtcccaatatccttcaattgcagaagaaataaaaagtattgcaagtgcagatcctgcccatcgaaagctttttgttcgtggcttggcctggaataccacttcagaaacattgcgtgctgcatttcaagagcacggagaaattgaggaaggagctgtgatctttgataaagtgacaggaaaatcccgtggctatggatttataactttcanaaatatggaatcaactcagcaagcattgagag

SEQ ID NO: 15427 - DNA, 263 bp, Glycine max
ccttatcatttggcaagatctgatttccctcttcacgagggggggaaatagaatggcatatgatcttcttcaagttgcaatctttttagagagagagggttagaagaacaacatacttgagatctgtcactgtgttcgagttcacgatgccatcgcattttatggtagaaaattaaattgacatgctctgtgaggctctagatcttcaaagcttgcttccttgttcctttgctgcataggatcacattatgagaatgccaaat

SEQ ID NO: 15428 - DNA, 408 bp, Glycine max
gcagaaggaggagaagcagaaagaggagacgaagcaatggcgccgaagaagccccgaaccacgtcgaggaaccctgatttggtcaggggaattggcaaatattcgaggtcgcagatgtaccacaagaggggcatctgggccatcaaggccaaaaacggcggtgttttgcccctccacgatcccaagcccaaacccgaggccccggcccagaagccgcccaagttctacccggccgatgacgtgaagaagcccctcgtcaacaagcacaagcccaagcccgcgaaactcagggctagcattactccagggactgttctgatcctgcttgctgggaggttcaagggaaagagggttgttttcttgaagcagcttccatctggattgcttcttgtaacaggtccctttaag

SEQ ID NO: 15429 - DNA, 285 bp, Glycine max
aaagggtcttcttgtacaaggatttggttccttttggggccatggtgaccatggaatgcctcaacgtagccttgaatactctgatcaaaagcagtaccttgagagggatgagttaccatgtctttgatggctatgcttatgctgatgctgatatcggtctcattcctggaccctttatttcccaaaggtgcagatcaagagtgcttcatacgctgaacttgccctatactacgcaaaatcggacttatcgggctaataaggtgcgcttgtcagatcgcgggatac

SEQ ID NO: 15430 - DNA, 324 bp, Glycine max
atcgtgagatgtacggtagcagacattccgctagttgccaggatgagaacacttgtttctgcagagaccatgaacatccccgacggcgtgagcgtcaaggttaatgccaaggtcatcgaaattgaggaccctcgaggaaaattggtgcgagacttgaagcacttgaatctcgatattcagctcatcactgacgaaaacggttaacggaagctgaaggtggaggcctggctcggttctgggaaaacattcgccggcattcgcaccgcactgtaccacgtggagaatctgatcaccggcgttaccaatggctaccgctacaaaatg

SEQ ID NO: 15431 - DNA, 350 bp, Glycine max
aagatgagaaaaagcaaccacttgatcggtctcttaaacttgctaacattcctgctgtcgattccgatcctaggaggcgggatatggctgagcagcagggcgaacaacaccgactgcctcaagttcctgcagtggccgctcatcatcatcggcgtcagcatcatggtcgtgtccctggcggggttcgccggcgcgtgttaccgcaacaccttcctcatgcggctctacctcgtcgtcatgttcctggtcattgccgttctgatcgggttcatcatattcgcctacgttgtcaccgacaaggggtccggtcggagggtgatgaaccgcgcttacttggagtattatcttga

SEQ ID NO: 15432 - DNA, 256 bp, Glycine max
gttcttgtgattcatggaacggctgacgatgtagtggattgctcccatggtaagcaactttgggaaaattgtaaacaaaagtacgagcccttatggattaaaggcggaaatcactgtgatttggagctttaccctcaatttataaagcacctcatgaaattcatgacggtcattgtgaagtcaccacatcaaaaaactggatctgaccgtttccctgatcaacttgacaaacctaggaacagcatagattttggag

SEQ ID NO: 15433 - DNA, 396 bp, Glycine max
aaacttacaaaacaatggcgttcgcttgtttcctcggcagaggcctcttcgctgctgtcttcatactctctgcttaccaacaatttaatgaatatggagttgatgggggacctgctacaaaagcactcagacctaagtttgatgcctttacacatcaggtgcattctcaagtgggctatcaaattacagagattaatctgaaatgatcaattgctggggctattgctctgaacggtcttgaaggggttcttttcatatatggcagctctcatggagctttgcttctgctactgcaccagctgattgctactccaatgcattatgattgctacaatcatgatagtgaggacagagaatttactcaactgttcatcaaatttacacagaatatggctc

SEQ ID NO: 15434 - DNA, 410 bp, Glycine max
cacataagtgctgaaaagggtggagagtttttcatagacactgagaaacatatgcgaactgtagctactgcagcaagtccaatacctagtccacaaagtagtggagactttggtgcgctgagtccattggttggaggtttcgtcatgagttgtagagttcaaggtgaagggaagcgaagtaaaccatcagtacaactggcaatgcgacacgtgacatgcgtggaggatgctgccatcttcatggcacttgcagcagctgttgacctcagtatcgtggcatgtaaacctttccggaggaaggtcaggagaggtttttggcattcgatgtgatcaacaaggcaaatgtatttataagcactgtcggaactgtcaatgctctgcctttgcttttcattgctgcaatgcttaaa

SEQ ID NO: 15435 - DNA, 286 bp, Glycine max
aaacaaacaaaacaatggcgttcgcttctttcctcggcagagtcctcttcgcttctgtcttcatactctctgcttaccaacaatttaatgaatatggagttgatgggggacctgctacaaaagcactcagacctaagtttgatgcctttacacatcgggtgcattctcaagtgggctttcaaattccagagattaatctgaaatttttaattgctggggctattgctctgaagggtcttggaggggttcttttcatatttggcagctcttttggagctttgcttct

SEQ ID NO: 15436 - DNA, 220 bp, Glycine max
gttcttcttcggcttcgtttttgaggcagttaagtgcaaaaaaggagggttggaaagagagatactataatagtggtagtggtggctggggaatgagctttggagggtgtgaggcaagtgtgaaactaatggaagggtttaacatgcaggggaatgtggggaggaagagggtgatggtagtggttgatgactcataacatttcaagcatgcattgttgtg

SEQ ID NO: 15437 - DNA, 405 bp, Glycine max
gtccaggagcaagctgatgacacaacgtcccaggatagcaattctgacattgttgccaaaactccaccttgtaaaagtgggggaattagttctgctacctcaactcctgttgaccatgctactcctgtttctgtgaatgtttctggtcataacttgtctagtgcacctgttgcagtcctacctggttcaaattctgtgcggaatgtcttagagaatactaatgttatcaattcattatctgtaaatcagtctacctctacaaatgaagaagagattaatagcttccctagccggagaccatctccatcgctttctgatgcaacacttttgaagggcagaagcagcctgtcaaatcaagcaacagccagcattcctcttggttctggaaacatggtttctagcaat

SEQ ID NO: 15438 - DNA, 241 bp, Glycine max
gaacaatagagcatctttcctagttttgtctcaaatcaaacaactctgacggaggatactgctattgctccgcctgaatctccatggctgatccacagccgctgcttctcaacgattccgagccaactcaatttcaaaacacccgaatcgccttccttgacgtctttcgcggcctctctgtttttgtaattaactagctcttttctttctttctttccttgctttctacccaataaattct

SEQ ID NO: 15439 - DNA, 390 bp, Glycine max
gctagaagcaataagatgaaaatgaaagtgcttgatttgtttgctgctacagttgtggcagcatatgaatgccatggctcagactaccagaagttccctctccaaatgaaaactgggtttggtgggcaatacagcaatgaggtggcatgtgccagttggaggcttggcgtggaagcaaacaacgtagtcaagtggcaaactgttcctgcagcttgcggagagtacatagctgactacgttctaggagaccaatatagatcagatttcaaaacagttaaccaacaagcttatttctatgctaaatccctcaaactcaccaacaaagatgtctttgtcttggacgttgacgacactactctgtctaatcttcagtattttgctaaccatgga

SEQ ID NO: 15440 - DNA, 387 bp, Glycine max
cccaattcctaattgtttaaacctaattctcatttcttgatcggtcgattcttctcctcctaaagatgcagatcttcgtgaaaactttgaccggtaagaccatcacccttgacggggagtcctccgacaccatcgatgacgtgaaagctaagattcaagacgaggaacggatcccacctgaccagcagagacttatctttgggggttaacagcttggggatggtcgaacccttgtcgactacaacataccaaaggaatccactcttcaactcgtgcttcgactcaggggtggcatgcatatctttgtcaagactttgactggcaagaccatcaccctcgaagtcgaatcctcggacaccattgataatgtcaaggccaagatccagg

SEQ ID NO: 15441 - DNA, 377 bp, Glycine max
gtttccattcccaattcccaatcgtgttgggtggccatggaggctgtactggcgaactatgcctcttcagatgaagaagaagatcaacagccatccccaccaaaaacgacgacgttttcctcccttcctcaacccaaactttctctgtttcaatcccttcctcaacccaaatcttctctgtttcaatcccttcctccacccagacaaccttccaccgaaagctcttccctccctaaccctaaccctaaccctgaccctaaaccccaaatcgaaaagacacaacccaaacgcgtcgtgcaaatcaggcccccaatcatcccttttccacaacctttaacacacgacgatgacgacgatgacgacgacgacgacgaaga

SEQ ID NO: 15442 - DNA, 388 bp, Glycine max
gcttacagttcctataattttttttctccattagatgaccaagctctgcaactttgcttctcaacatggagtatcgtctcctacccatttttactttactcaatattgcactggtggcaacccatgctgctttaccccctgaagtttactggaagtcggtgcttcctactacgccaatgccaaaagccatcactgatatcctttactctgattgggtggaagagaaaagcagctcagtgcatgttggaggtggaggcgtgaacgtgcatacaggaaaaggaggtggcagtggcaccactgtcaacgttggtggaaaaggaggcggaggcgtaaacgtgcatgcaggccacaagggaaagccagtgcatgtttcaattggctcaaagtc

SEQ ID NO: 15443 - DNA, 406 bp, Glycine max
gaagccattgctagggtacggaatgagaaagctcggagatacttgtgttgcatgcgtaagaagaagccagttcctttctcccaaaagtttcctaatgtagacccccttgctcttcgtgtgttagaaagaatgctggcatttgaacctaaggatcgacctactgctgaagaggctctagcatatccatattttaaaggcttggccaaggttgagagagaaccttctgctcagccagttaccaagatggaatttgaattcgagagacgtaggataacaaaggaagatgtgcgagagcttatataccgagagattctggagtaccatccaaagatgttaaaagaacatctagagggagaagagccaacaggattcatgtatccaagtgctgtggaccacttcaagaaac

SEQ ID NO: 15444 - DNA, 395 bp, Glycine max
tcttagcatttggcaagatctgatttccctcttcacaaggagagaaatagaaaggcatatgatcttcttcaagttgcaatctttttagagagagagggttagaagaacaacatacttgagatctgtcactgtgtttgagttcaggatgccatcggattttctggtagaaaattaaattgctttgctctgtgaggctctagatcttcaaagtttgcttacttgttcttttggtgcataggatcacattaaggaatgccaaatggggacgaaggggaattggttctccagtgtgaagaaagctctcagtcctgactcacaggagaagacagaacagaaatcacgtaaatctacgacgaaatggtttgggaagcacaaattggagacttcagtctcat

SEQ ID NO: 15445 - DNA, 382 bp, Glycine max
agtgagtaggctgccttttctctcttctttctctgttgcgttttgtgaaatctaattcgacatggcgtcacgggacaacaagaaggcgtccagcagccgagccggccgaattcgcaccctctccgatctgaaccgtccctccgccgattccgacagcgactccgatggccctcaggagtattacaccggcggcgaaaagagtggaatgcttgtccaggatccttcaaagggaaatgatgtggatgaaattttcaatcaagctaggcaacttggggctggtgaaaggcctcttgatcagcttcaagagcctccaaggtcaactagctttactggaactggcaggttactctcaggggaaactacacgatctactaataatcag

SEQ ID NO: 15446 - DNA, 404 bp, Glycine max
tcaagatcggctttgctattcctcctggtttgagccctgctgagcttcttgactcgccggttctccttaattcttccaacattctgccatctccaacaactggagcatttgttgctcagagcttcaattggaagagcagttcaggggggaatcagcaaattgtcaaggaagaagacaaaagcttctcaaatttctctttccaaacccgatcaggacctcctgcttcatccacagcaacataccagtcttcaaatgtcacagttcaaacacaacagccatggagttttcaagaggccacgaaacaggataatttttcctcaggaaagggtatgatgaaaactgaaaactcttcttccatgcagagtttttcccctgagattgctagtgtccaaactaaccatagc

SEQ ID NO: 15447 - DNA, 394 bp, Glycine max
ggccgtcggaaagaacaagcgcatctccaaagggaaaaagggtggcaagaagaaggcagctgatccctttgccaagaaggattggtatgacattaaggccccttctctttttcaagtgaaaaatgttggcaaaaccctcgtctctcgtacgcagggtaccaagattgcttctgaaggacttaaacatagagtgtttgaggtctccttggctgatcttcaaggggatgaggatcatgcattcaagaagattaggttgagagctgaagatgtgcaagggaagaatgtcctgacaaatttctggggaatggatttcacaactgacaagctgaggtcattggtgcgaaaatggcaaactctaattgaagcccatgtggatgtgaagacaactgataac

SEQ ID NO: 15448 - DNA, 367 bp, Glycine max
gggactaacattaaggaactttggtcccaaaaagagggaagagcatggtggttcatcaagattcagttttggaagcagctttcggaaaacgggaaagtacgtcaaggaagaagaattcctcattgaaaaaggagcagaagatagtgatggtaatcagaagggatatcacaaacacaaccacaggattactatatctgatgttgtgttcaagcacaggtggagcaacgtgagttcttcagaccttatgtttctgaattcggagatgctgaacgatgcatcaagcaacagattcagcaacttggaatcaaatgctgacatgatgtctagtacaagaagggtggtggaaaatgagcaaattatgaatatt

SEQ ID NO: 15449 - DNA, 365 bp, Glycine max
tcttaacttaacttctggttcccaactttttttttcaaaggccacccagccttttttttaccggtcatgggccaaggcaaaaaccggatcaacggatttggaaagaattggccgtttggttgccagagtcgctctgcaaagagacgatgtggagctcgttgccgttaacgaccctttcattaccaccgattacatgacatacatgtttaaatacgacagtgttcacggacactggaagcatcacgatgtcaccgttaaggacgagaagacccttctcttcggtgacaagccagtcactgtttttggacacaggaaccctgaagagatcccatgggggtcaactggagctgatatcattggtgagt

SEQ ID NO: 15450 - DNA, 396 bp, Glycine max
acgacgcacgcagcagcatcagcttctactcgtgtaatctctgcgtgggctacaatggattccggtgtccaaggttgcatcttagccactttaattctccacgacgaggaaatcccagtcaccgctgagaagatcaacgctctgttgaaggcttctaatgtctccgccgagtcttactggcccagcctcttcgccaagctcgcccagaataagaacatcgaagacctcattttgaacgccggcggtggtggggccgccgttgcagttgccgctcccgtcggcgatggtggtggtgccgctgctgcagccgcacccgtcgccgaggaaaggaaggaagaagtgaaggaagaaagtgacgatgacatgggtttcggcttgttcgattagatcttttat

SEQ ID NO: 15451 - DNA, 289 bp, Glycine max
gggtgaagtcggggaaacgtgtgggggtgagcttggggagggtgcgggagatttggtggtgagggtggaaatgagggtgtcgagcttatgggtcatggtttgcaggttttcactgaaactgagttgatgaatggtgagcttatctatggcgtcttccaacttttcagagttggacttcgaggccatgatagcgagacgagagcaccaaattgttaggaatgcgtttataaattctgggcttcgagggccagactttcctgccttatttcatttaaatggtatttataat

SEQ ID NO: 15452 - DNA, 370 bp, Glycine max
ctcgagccgattcggctcgaggcagaggccgtttaccacgcgcgtgactaccacgcgcgcatcgtctccctcatggaccagctctcacgcgcccagagcctcctcctcaagaccggtgcctcctccatttcgcttccttcctcctcctaaatcataatcacacacacacacatatatatacaaagattgtaataaatttttttcattttctggtcagagtcattgtgattattagatgtatatgatgatgatcatgatcaagatgatccatatcgccggggatcgaatgtgttgtaaaattttgggggatgatggagaatagtttgattggtttagagattcgagacctaattaagtaacgttcttcaaa

SEQ ID NO: 15453 - DNA, 400 bp, Glycine max
  modified_base (283)..(283): a, c, g, t, unknown, or other
  modified_base (293)..(293): a, c, g, t, unknown, or other
cccaaccatgctgacgctgattacctcatcgttatccttaacgggactgccattctttccttggtgaacaacgacgacagagactcctacagacttcaatctggtgatgccctgagagtcccctcaggaaccacatactatgtggtcaaccctgacaacaacgaaaatctcagattaataacactcgccatacccgttaacaagcctggtagatttgagagtttcttcctatctagcactgaagctcaacaatcctacttgcaaggattcagcaggaacattntagaggcctnctacgataccaaattcgaggagataaacaaggttctgtttagtagagaggaagggcagcagcaaggggagcagaggctgcaagagagcgtgattgtggaaatctcga

SEQ ID NO: 15454 - DNA, 119 bp, Glycine max
catcctcctcgttggcctgctcgcctcttggaccttcctctacctcttccgtccctcggatcaacctctcgtcattctcggccgaacattctctgacttcgaaaccctagccctcctct

SEQ ID NO: 15455 - DNA, 305 bp, Glycine max
catgaaactaacaatcagatttggaacgctacacatcaaaggtaaatcgagccaacgcatttaattgtaagtgtcttcatattacctgtgttctgtcacatctttttgcataatattggcactaagtcttttttgatagaaattgtgaagatgtactgttatcattgtatcaactatattgtgcccttctttttttatttgatttggcaaacacggctacttttctccaaataagatggatcatttgtattgccggctttgtgcacaattatctacttgtaagaagtccaatttcgggcaacaac

SEQ ID NO: 15456 - DNA, 368 bp, Glycine max
gtggtttcagtgagtgatcggagttcacttgatccttcataaggcgtcatcatcatcatcatcatcaccgctgattgaagaagatgccgatcagaaacatcgccatcggaaggcctgaagaggctactcaccccgacacgttgaaggcggggttggctgagttcatctgcaccttgatcttcgagttcgccggttcaggttccggcatcgcctacaacaagctcaccgacaacggcgccggcactcccgccggcctcatctgcgcttccatcgaccatgctttcgacctcttcgtcgccgtctccgtcggcgccaacatcttcggcggccacgtcaaccccggcgtcaacttcggcgccttcgtgggc

SEQ ID NO: 15457 - DNA, 320 bp, Glycine max
gaatttagatcaaaacttggaagctccttttgccatggccactagtgctgcacccaaacccaaccaatattatttcttcacattaatccttcatttctgtctcctccttatcatttccacatgcactactcaacaacgcttcaaacaagcccccaaattctacaacttccccagctgtcccaccattcgcctctcacccaccgacacgtgttccgacgaggcagtccacgtggccatgaccctggacgtaacctaccttcgtggcttcatgggcgccatcctctccgttcttcaacattgcttctgccccgaaaacatta

SEQ ID NO: 15458 - DNA, 383 bp, Glycine max
cgaaggacaatgagtgttcggtccaaaaactggaactgtgtattctatgcagattggtaccatcccattcaagctggcagcatcgacggcaccgatgttgctcctcacgataacgccgtttatcgcgctcaactctgttcctacatcggcctctatgacccatttggtgatcccaaggccactggagacccttattgcactctctttgtcgctcgtctatgtcgcctcaccaccgaagatgatctccgcaaggtcatgactaagtatggtcgagtgaagaacttacgcttggatagggacattgtgacgggagcttctcgcggtcatgcttttgttgaatacgagactgaaagggagatgcgacgagcatatatggatgctca

SEQ ID NO: 15459 - DNA, 412 bp, Glycine max
gtatagccctacctttccgttcaagatgcacatcttcgtcaagacgctcaccgtcaagaccattacccttgaggtggaaagctctgacaccatagacaacgtcatggcctagatccatgactaggaacgaatacctccggaccatcaacgattcattttgaccgtatagcatctagatgacgggcgtacctttgctgactactacattcagaaggagagctctcttgaccttgtgctgcgtctgctcggaggcatgcataccttcggtaagacactcaccggcaagaccataaccctagaggctgaaagctacgacaccatcgatgacgtgaaggccatgatccaggacaagggaggtatccccccggaccagcaacgtctcatcttcgccggaaagcagctcgaggacggc

SEQ ID NO: 15460 - DNA, 411 bp, Glycine max
  modified_base (333)..(333): a, c, g, t, unknown, or other
gccgatttccttgagaatgacattcgtgtgaagccagatcttgatgcacttggctctcttggcgatgaagggtggtattgtcttagagcaatactctgggctgccaactatgaactccctaaaactgtaatagcctcacgcaatcctgagcttaataaagctggggtgatattgtcttgtggggcttctttacactgggaagatgggaaagtagcaaccttccactgctccttcttgaccaacttgacaatggatataactgctgttgggacaaaaggaacactacatgttcatgacttcattatcccttatgaagagaaggaagcatcgttntatgcagctacagaaacaggctttgatgaccttgtgtcaaagtggatcccacagccaagcaagcatataataaaaact

SEQ ID NO: 15461 - DNA, 405 bp, Glycine max
gagaagagagatggatccagacgcgttggcaaaggcattcgtggagcactactacagcaccttcgacaccaacaggaacggcttagcgaatctctaccaggagggttccatgctcactttcgaagggcagaagatccaaggcgcttccaacatcgttgccaagctcacctccctcccttttcagcagtgccaccactcaatctccaccgtcgactgccagccctccggcgtcaacgccggcatgctcgtcttcgtcagcggaaaccttcagctcgccggcgaacagcacactctcaagttcagccagatgttccatttgataccaacacctcagggaagctattatgtgttgaatgacatattccgtttaaactatgcatgaagatgtcatatgacccggaaggc

SEQ ID NO: 15462 - DNA, 385 bp, Glycine max
gcagtgatgtgtcataggctaaatttcagaactgcagtattttactgccatgaagtccgtgaaacaacagctttcatggttccattggtggctggtgatggaaccaaaactcaggcacttgctatttgccactcaaatacttctggaatgaatcatcaaatgcttcatcaacttatgggagttgatcctggaactaaccctgtttgccatttccttggaagcaaggccattttatgggtacccaatttatctgtggacactgcctatcagaccaacattgttgcttaattagtccatgcatcttgagcaccatgagaatgagaatgtgtataaaataaattatcatgtgctgtgtgttgtgcaagtactaccttctctagctaga

SEQ ID NO: 15463 - DNA, 324 bp, Glycine max
gccatgtatgttgcaattcaagctgtcttgtctctgtatgcgagtggacgtactacaggtattgcgcttgattctggtgatggtgtgagccacacggtgcccatatatgaagggtatgctcttactcatgcaattcttcggttggaccttgctggccgtgatttaacagagtacttggtgaaaatccttaccgagagaggatactgcttcagcacctctgccgaaaaggaaattgtccgtgatgtgaaggagaaattggcatacgtggcccttgatttcgaacaagatatggagactactaagagtagttctgcagtgggaaag

SEQ ID NO: 15464 - DNA, 323 bp, Glycine max
gtgttcaatcttcaaagacttgaattcttcttacttaggttctgaatggctggaatttgctgtggtgttgtcggagaaggtgacactccggctccactcgagccaactactcgcccctccaggcgccggagtttggacatcttacccttaaaatacatcgctgacatggcggtgccgccgtcggatggttcacggaaacgtcccaagctggatctcagggaccgcgataacgtagttcaaaattgcgacgaatccactggacacaaggtggtgaaaaaagaagccaaagtggaaatccacgacaatatttccgaaacgaaaaa

SEQ ID NO: 15465 - DNA, 379 bp, Glycine max
aaaaatattattaagatgatcaacattattggagcacttgtgctactctttgcattcctctttctcaggtgtgtgtatgcacacgacacaacaacccttgtgcctgcaatcataactttaggtgattctgctgtggatgtagggaacaatgactatcttcccacccttttcaaggctgattaccctgcttatgggagggactctgttaaccaccaacctactgggaggttctgcaatggcaaattagctactgatatcactgctgacacattgagtttcaagacctatgctccagcttatattagcccacatgcttctgggaaaaacctcctaatggaaccaaacttggctgcagtggcttcaggttttgatgaaaatg

SEQ ID NO: 15466 - DNA, 386 bp, Glycine max
  modified_base (381)..(381): a, c, g, t, unknown, or other
ctcgagccggataatgtgtccgattttattagggtaggtggaattcagagactgcaggatggagagtttattgttcaggcaactaaagattgtgttgcaaagacattgaaaagattagaagagaagattcatggccgagtgctgaaccatttgttatatctcatgcgagtttcagaaaaggcttttcaaagacgagttgctttaactcttgctcacctttgttctgcagatgatcaaagaaaaatatttattggatattaagggttggaagtgcttattggggctcctgggttctaataaccccaagcaccagtttgatggagctgtggctttatgcaagttggccaataaagctatgactctgtctcctgtagatgccgnacccc

SEQ ID NO: 15467 - DNA, 328 bp, Glycine max
atctatatctaccatggagcagaatataacccttctgtctggttagtgaatatgagaatggcttcagatcggaaacttgacactttcgaggaggtggcaaagcacgaccagaccaaggattgctggctcatcatttctggcatggtgtatgatgtcacccctatgatggaggatcatcccggaggtgatgaagtagtggcatctgctacaggtaaagatgcatccgatgatgatgaagatgttgtacacagtgaatctgctagagatatgatggaaaagtactacattggcgagattgatcattaacctgaaccactaaaacgtacct

SEQ ID NO: 15468 - DNA, 354 bp, Glycine max
ctggagccaaggtcaccaaggctgcccagaagaagaagtgaatcgtgcggtttggttcatcaggggatgtcgtttcttatggttacaataaatgttggtttcttgcccttgtgtcttcggttctaggtagctttgttttcggacatagtttgaagtctccaccatcatctcgcaacttttgttcccagaattgggttcttgatcgacggtggcaagactccttttatcattctggtttaatgtgttgtgtttgtgagaacccctgattacatttttgttaagcgcatcgagttttagggctttgccgttgcgttgttggtttgctttttaaatgtcaactttatatttgtgttc

SEQ ID NO: 15469 - DNA, 403 bp, Glycine max
  modified_base (351)..(351): a, c, g, t, unknown, or other
gttgagggccaaacaagacaacctggatgccggtttcaagccttggggggctttttttacaaacccaattgcctttttttcatggatattccccattaggacttatggagaaacggacactttaattttccaaaaacccatttcactggtttttaattccaaaaggggtgtacaatgaaatgggttgatgggcaatggcgaaaatacggaaaggctttcttggaaaaatgggtattcggaagctacaatgggaggaactatgtctatctggataaagtatctctgttgttgggttttggtttgtggggtctgggcttcctctttagcttatggacaagccatgggcatggntatggagatcatgaatctaaagaagttccagcttgtgtatcaaattggaatg

SEQ ID NO: 15470 - DNA, 326 bp, Glycine max
cagaaaacggatcgtttcgttggactgatcagatgcagggctaggagcgtagcgtagagataacggcgccatttttaacggtaattggtagaaattccaacttggtctcttgcttactaaatataggacctaataacgattcgctcttagcacttgggtatgtctcgattctgatgtcacacagtcatgaattcatgtaaccgtgacacgaattggtgatatttaacactgctatgcatatatattctatggagtaaaatttgtctattatgaaggcaacattctgaagacgaattattgctggtacaaaaggcactgagacatat

SEQ ID NO: 15471 - DNA, 176 bp, Glycine max
tatactgaatgttttgggatgaagcttttgaggaaaagagatattccagaggagaaatatgccaatgcttttcttggatttggccctgaacaatcccattttgttgtggaattaacatacaattatggggtgacctcatatgatattggaactggatttggacattttgctatcgc

SEQ ID NO: 15472 - DNA, 356 bp, Glycine max
gggaagagtcagtatgtcaaatgggcatggcaagaacgtgtagggttaaattcgttcaacgattctctattctttgatccatctatccgtacttatttcacgaattacatcaagactgtcttgaccatgaaaaatactatcaccggaatcgaatatagaaatgaccccagcattcttggttgggaattgattaatgagcctcgatgcatgtctgatccttcaagtgacactctacaaggatggatagacgaaatgtcaacttttgtcaaaatgattgacaagaaccatctgttgactgtgggtctcgaaggtttttatggtccaaacgatccacaatgtgcaactgtcaaccctga

SEQ ID NO: 15473 - DNA, 313 bp, Glycine max
  modified_base (202)..(202): a, c, g, t, unknown, or other
  modified_base (232)..(232): a, c, g, t, unknown, or other
gtgagtgatcggcgttcactagatccttcataagccgtcatgatcatcatcatcatcaccgttgattgaagaagattccgatcagaaacatcgtcatcggaaggcctgaaaaggctactcaccccgacacgttgaacgcgtggttggctgagttcatgtgcaccttgatcttagtgttctgcggttcaaggtccggcatcgnctacgacatgctcaccgtcaacggtgccgncactgccgccggcctgatgtacgatttcattgtccatgctttcgccctgttcgtcgccgtcttcgtcggggccaacatctt

SEQ ID NO: 15474 - DNA, 297 bp, Glycine max
atccattgcacctttctcttcctccgatggctaatctctcactcttgttcttcggtctcctcctattctccgctgccgtagccaccgtcgaacgaatcgacgatgaagacaaccttctgatccgtcaagtggtgccggacgcggaggaccaccacctgctcaacgcggagcaccacttctccgccttcaagacaaagttcgccaagacctacgccacgcaggaggagcacgaccaccgcttccgtatcttcaagaacaacttgctccgcgccaagtcgcaccagaaattggacccct

SEQ ID NO: 15475 - DNA, 167 bp, Glycine max
gatcattatgtattggtttcttgtgttttggaacaatttgggaattgtggtttttatttttccttatctaagggaaaaaattgaaacgctgtccccgaacaattttgttcttgcacacttttcagaggattaatgagtagctattgctctacttaagtcgtgatttt

SEQ ID NO: 15476 - DNA, 405 bp, Glycine max
caaggatttgaccaagaaactgctgcagttgtaatggctagatttgcttctctgaaaatggagagtgaggaaacatttgatgctacacggtggttggatcggtttctcattcgcctctgttctaaatttggtgactaccgcaaggatgatccatcgtcttttacattaaacccatcattttcacttttccctcagtttatgttcaatctgcgacgctcacagtttgtacaggtttttaacaacagtccagacgagactgcatatttccgcatgttgttagacagggaaaatattagtaatgctgccgttatgaatcaacccgtaattgatatcgtattcatttaatgcactgcctgcaccagcattgttagatgtggcttccattgctgcagacaagattttgtt

SEQ ID NO: 15477 - DNA, 393 bp, Glycine max
cgtttgatcgctaacggaaccgaagccgaagccggtttgattcccgtttttccctctctcactttccccaaccactactccatcgccactggcctctaccctgcttaccacggcatcattaataaccacttcaccgatccactctctggggaacccttttacatgggtaacagccatgaccccaagtggtggctcggggaacccttgtgggaaactgtggtaaaaaacggcttaaaggctgcaacttatttctggcctggttctgaggtaaataaaggtccttggtcttgtcccttcaaatattggcagcactattaatccttcggttgcgtttgaggatagggttgatgcggttttggggtactttgatttgcctagtgatcagattcctga

SEQ ID NO: 15478 - DNA, 399 bp, Glycine max
  modified_base (292)..(292): a, c, g, t, unknown, or other
atcacatactatcaacactataaacattgattctggctctttgctgcagcgagaccaatatgtctttcactgcaaccaagttttcaccttgtcctctacctctcacttccaccacccccagatccaatgacaagcctctctctttctgcttcgatcactccaaacccaacccttcttgctccttacttggatccactcgcaagcttcttcgcttcaatgctctcgctacgcctcatgctcaccctcgtgcttctgcttcccctgctgctgctgttcttctcgaacgaacctncaatctgcttgtcacaaaagatgaaaggttggaactctatgaagacatgatattagggaggttttttgaggacaagtgcgctgagatgtattataggggcaaaatgt

SEQ ID NO: 15479 - DNA, 367 bp, Glycine max
  modified_base (296)..(296): a, c, g, t, unknown, or other
atcacataataacaacactataaacataagaaaaaagggtctgtgatgcaacagagacctaaaagtctttcactgcaaccaagttattcaccttctcctctacctctcacttccaccacccacagatccaatgacaagcctctctctttctccttcgatcactccaaacccaacccttcttgctccttccttggatccactcgcaagcttcttcgcttcaatgctctcgctaggcctcatgctcaccctcgtgcttcttcttcccctgctgctgctgttcttctcgaacgaacctncaatctgctagtcacaaaacaggaagggttgaaactctataaagccatgatattaggaaggttttttgagg

SEQ ID NO: 15480 - DNA, 406 bp, Glycine max
caagattagagtaaagaaaaaatgtttgcagggaaaggggctgtttgattctccagagcggtggcattggcagcaatcgcggtggtagcttgcgttgggcttacacaggcccaacccgaggccaggttcaagtgcaacagcgcgaacatccccacgtgtcgcgcgctcataagctactctcacccgaacaccaccaccctcggcgacatccaaaagctcttcaacgtgaaacacatcctcgacatcgtgggagcgaacaacctcccaagcaacgccacaaaaacatacgcggtgggccccaacgaggttgtgaaggtccctttcccgtgcaggtgcagcaacaacacgggactctcggaccgtgttccgctgtacaggatcaagaaaggggacacgctgtactaca

SEQ ID NO: 15481 - DNA, 302 bp, Glycine max
attgtggggcgcacacattggttggagaacttaagaggctgtctcttgacttttccagaaaaaccaacaccaagtttgattttcataaagagaatttttaaattcttttatcatagttcgttatttttattttttccaactgtagcatacgtatgtagttgagggaaatttagtttgctgttttttttttctttggtgctagagctaggtagataaagctgctagctgcattcaattggagttgtatacatgtataaaaaaattgtattcattttgatataaaatgaaatgattacgtcgtt

SEQ ID NO: 15482 - DNA, 408 bp, Glycine max
  modified_base (266)..(266): a, c, g, t, unknown, or other
cttgacaaggatattaattcattctccatgagagtcagagagtggtattcttggcattttcctgagctggtgaaaattgtaaatgataattatctgtatgccaaagttgcaaaatttattgaggataaggcaaagttggctgaagacacgattccaggcttaactgacatagttggagatgaagataaagcaaaggagattgtggaagctgccaaagcctccatgggacaggatttgtccccagtggacttaatcaatgtccatcnaattgcacagatggtaatggacctatctgagtacagaaagaacttatatgattacctgtttgctaaaatgaatgatattgcaccaaatttggccacttaaatgggtgaagttgttgttgctcgtttgatttcccatgctgga

SEQ ID NO: 15483 - DNA, 379 bp, Glycine max
gaatgggtatacagtgatgggaaatcaacaacatgtgttgcctttattctttcaatgtataaagcggctggaatattcggccctatttctagctccattcaagtaactgaattcacaattcgtgatgcatacatgcttaggatttttgaggataaccaaacacgtctaccaagatggtgcaacaatgagaacgatcggcatccattctgccagattcttggtgaatataggatggaattgcctggctataacaccttggatccttatgccaatatgaacgagcactgtccttcccttccttccacttatgacaggcccttgaaatgttagtctcttctccggcatttccattttctgatttgcctgtaatccatgatct

SEQ ID NO: 15484 - DNA, 396 bp, Glycine max
ggttcggatacctagtggaaaaaaattgttcaaggcttgcagggaacatggccaccccagagtgcgggttggatgcagcaagctcttgatgaatctgtgcgtaatgtgcttacttctgcgacttccaccatttcctaccaacctatttcttctgtgacttcccctgtttcctatcaacttcctgttcctatttctagtaccaatgttaaggtgaatccagggacaacttctcatttttccttaaatgcaagagcttttggacatccttataacccaccttccataaagcctcatgttgcacctcaaacttcccaagatttttttgccacagttagtaaaaaagttttagctccatgtccttgtcttccatcaattaattcacaccttcatcaaaat

SEQ ID NO: 15485 - DNA, 343 bp, Glycine max
aatatatcaaagcaagaaaaaatggggtccgcataatttgctgggatattaacaattgtcattatctcaatgtgtagcatttccttggcacaaaattcgcccaaagatttccttgacgcgcacaatgcagctcgtgcagaggatggtgtcgagccactcgcatggacacgacaccgatcgcagcctacgctcagcaatatgctgactcaaggatcatacagtcgcctagacagcactctcaagggccttatgatgagaacctgcaggccatatacgacgaatgatggggctgtgatacaaagtgatggttaatgcaggtgcttgcgatgacatgcctaacgct

SEQ ID NO: 15486 - DNA, 401 bp, Glycine max
gtaagaaacactgctacagtccctgaaactgatattcaaaaaactttggttgacaatgttacaggaagaaatgccactacattccctgaaactgatactcaaaaaactttggtcgacaattttgtgggaagaagtgcctctacaatccccgaaactgatgataaaaaaactctggctgacaatgatatgggaagaagtgccactacagttcctgaaactgatatccaaaaaactttgcttgataatgttacaggaagcagagacagtgaaaacaatttgcttgacactgttacaggaggcagcgacagaaaatctcaagtacgatcaaataaaccccagagaaagaaagaggtcaaagtacctatgcggttatcaaagcgacttgctggccttgaacctga

SEQ ID NO: 15487 - DNA, 374 bp, Glycine max
tggatgtgaaaaacagtggcaggggaattccattcatgaccttttatctctttcttcttctcctttctgccatctctgttttgtcccatgcttcctctattgcttttcagattaaaggaaatgtgtatccacttgggtattacacggtgaacctcgccattggcaatccccctaaggcttatgaacttgacattgacacaggtagtgatctcacttgggttcagtgtgatgcgccatgcaaaggttgcaccctacctcgcgatcgacaatataaaccacatggcaaccttgtgaaatgtgtggatcccttgtgtgctgcaatccaatcagcaccaaacccctccctgtgttaacccaaatgagcaatgtgacta

SEQ ID NO: 15488 - DNA, 365 bp, Glycine max
attttatccaattgaaattttaaaaatgactgggataaacttaagaattcaattattgaaattgaataagtaaacaatttaattggattggtcgaatggtatcaaaaaaatggagtactaactcccatttcttatttattattgaattaaccgatcaacttgctttgttatcgaacatttctttttgatttcaaaaattttccggaaaaaatttgaatctatttttatatgcgaatcaatcctactacttctggtcctgaggtttctgcgcttgaaaaaaaaaatctgggacgtatcgcccaaataattggtccggtactagatgtagcttttcccccaggtaagatgcctaatatttacaacgc

SEQ ID NO: 15489 - DNA, 401 bp, Glycine max
  modified_base (373)..(373): a, c, g, t, unknown, or other
agaaatttaagtgaggagctagagaatgatgatgaagtctgctatgtgtgcagtggtggttgtagcacttcttcttctggcggaggtggggcccatggctgaggctgtgacatgcaccccaacagagttgagtccgtgtcttccagcaatcacttccggtgctaaaccttccaatgcttgttgcacgaagctgaagcagcaaaaaccatgcttatgtggctacctcataaacgctagcttgaagcagtatgttaactctgctaatgcccgaataaccgttgcttcttgtgggattccctttccaacttgttaattaattaagccttcttataattaacgtgtgggatatatatatatatatagattaacagtntaattatacacactttgatcctacaaag

SEQ ID NO: 15490 - DNA, 406 bp, Glycine max
caaggcttggaggctcagtatttgcttgagagggttgagtgcgtcaaggcttggcaaactcaaccctctcactgctttgcttgagagggttgagtttgtcaagcatagcagtgaaggtgagccatgccaattgtgacgactcattggagacggaattccacgttgacgtgaaaaacgaaggctcaatggatgggacccacacccttctcatattctcgaaaccacccccgggaaaatggtcacacattaaacagtcggtgaccttgcacaagacccatgttcctgctggctccaagcatcgacttaatgttaatgttcattcctgcaaacacttgtccgttgtggaccagtttggggttcgaagaatcccaaccggtgaacatgaactccacattggcgatctcaa

SEQ ID NO: 15491 - DNA, 390 bp, Glycine max
ctccccttccgccgaggaacacaaacaacaacctcaacttaacgcattgtgtgcatgatggaggagatgaaagtttctcggcgggtggagtggtggcagaacatgatgttccccgttcggagggtttggtttgtcgttgccaagcgcctcggcattcgcaaaactgggttactgaagctaagtaatgatgtgagggcatgcgaatatgaggacattcaagtgatgtgggagatactaaacagaaacgaatcagagtttggtcgttcttctagcactaggaaaggcaacaacaagaaagggcattgctggaaattattgaaggtggccaaggtgtcctcaatgcttgttgccgaacatggaccgtgattgctgggtccgtgagaagaaaaa

SEQ ID NO: 15492 - DNA, 348 bp, Glycine max
ggctaattcctacttatccttgcttgtcttgatccttgtagctctgctcctcacccctcaagggcttgctgatgaatctgattcttactataagccaccagtttacaagaaaccaccagtgtacaagcccaagcccaagccacccattcacaagcccaagccacccgtttacaagcccaagccacccgtttacaagaaacccccttatggtaagtacccaccagttcaagacaacgatcacttctaaaccatgcaacaaggcatgttaatgttaactatctactaaaataaagaggttcagttaacctactacgtacgttgctccttttaattcctaaatcgtaattt

SEQ ID NO: 15493 - DNA, 392 bp, Glycine max
aagaggtccaagtcaaatcaatacccaagcacctccctaaggcagattgagaatgtaaactctaaggaagaagttgcgtggtactgtgggaagcgcatggcttacatctacaaagcgaaggtaaagaagaacggaagccactatcgctgcatttggggtaaggtcaccaggcctcatggtaacagtggtatagttcgagctaagttcaagtccaatctgccacctaggtcaatgggtgcaagggttagagtattcatgtatccaagcaatatatgagttatgatggggctgtggtagaaagtgatgaataatgcaggtacttctgatgacatgtctagcgctgttctcttggtgcagccgaaatggctgtgccgagcatctgcactgtgtct

SEQ ID NO: 15494 - DNA, 408 bp, Glycine max
ctcagaccaaatgggctcttgttgttctatgtagacggtgtgtgtgactgtggcatcactggcctctgcagcactctgagccaacccacgcaggccagtggatgtacaatgtggccgaaactacatgcccacatgggcctttgatcacatcaaatatttcaatggcggctctgacattcagcttcatcttgacaagtacactgctactggcttacaatccaaagggtcttacttgtttggtcacttcagcatgtacataaagatggttcctggagattctgctggcacagtcactgctgtctatgtatcttcccaaaacgcggagcatgatgagatagactttgagttcttggggaacagaacaggacaaccttacattctgcaaacaaatgtgttcaccggaggcaa

SEQ ID NO: 15495 - DNA, 310 bp, Glycine max
caagataagaaaaaagaaaaaatgtttgcagggaaaggggctgtttggttctccagagcggtggcgttggcagcaatcgcggtggtagcttgcgttgggcttacacaggcccaacccgaggccaggttcaagtgcaacagcgcgatacattcccacgtgtcgcgcgctcataagctactctcacccgaacaccaccaccctcggcgacatgcaaaagctcttcaacgtgaaacacattctcgacattgtgggaacgaacaaacttccaaacaacggcaccaaaaccttacccggggggccccaccaaggt

SEQ ID NO: 15496 - DNA, 402 bp, Glycine max
  modified_base (271)..(271): a, c, g, t, unknown, or other
cttcctcagtagtgtcatttacgcttctcttctctgcagcggctatgcctaaccctaaggtcttcttcgacatgaccatcggcggtcaatctgctggccgcatcgtgatggagctctacgccgacgtcactccccgcaccgccgagaacttccgcgcgctttgcaccggcgagaagggcgtacggcggagcggcaagcccctccactacaagggctcgtccttccaccgcgtgatcccgagtttcatgtgtcagggtggcgacttcaccgncggaaacggaaccggcggcgagtcgatttatggcgccaagttcgccgacgagaacttcgtgaagaagcacaccggtcccggcatcctctccatggcgaacgccggtcccggaaccaacggatcttagttct

SEQ ID NO: 15497 - DNA, 385 bp, Glycine max
caaaaccctaattcccccaatccaaaaccaatggcaacccttggagaagatgaagaatctgcacctccccaccgccgccgacgccgaatccctcgccttcgaactccacaccgacggggaccaacccgaatccgacatctcctacggcctcaacgttcgtgccgacaaaaatccagaaggaaacaacaaagacgacagtgatggtgctgccccacggcgtcgagttccgctggaggccacggcgctgcagaagctgaaaagcgacctggagaggctgccggaggaccaggggatggaggagttcaaggatgtcgccgtcgagggctacggcgcggcactgctcgccggctatggctggaaagaaggaatggggattgggaggaac

SEQ ID NO: 15498 - DNA, 54 bp, Glycine max
attccatgttaaactggaagttgaggctgtcaaattttctaaattttttttgtc

SEQ ID NO: 15499 - DNA, 411 bp, Glycine max
tggtaatcggatgcttcgcaacatgggctggcaggaaggattggtaccgttttgttcctcctcattacatgagtttttacgtattacatttttttgttattcaagttgtttggtagagcttgatatattattccaaatttcctcttttcagggatatgctagtactttgatcctagacctagataatattttcctctagtttagatatatgtgtatataatacacacacacacacgtatatatattattttcttcagtcattttggacctcaagaattggatgggatacccctggaaatttggtattttctcaacatatccgccgaaggattctaacatttcttcattatggttgtttcttgtattatggataatttgattacagggactaggaaaggatgggagtggaat

SEQ ID NO: 15500 - DNA, 390 bp, Glycine max
gcaccacgtatccctgagaaaagagaggaaccacactctctaagccaaagcaaaagcagcagcagcagcaatggttaaagacacaaagcctttagcctatgctgccaataatggataccaacaaaagggttcttcttttgattttgatcctagcgctccttcaccgtttaagattgcagaaatcagagcttcaataccaaaacattgctgggtcaagaatccatggagatccctcagttatgttctcagggatgtgcttgtaattgctgcattggtggctgcagcaattcacttcgacaactggcttctctggctaatctattgccccattcaaggcacaatgttctgggctctctttggtcttggacatgattgtggccatggaagctt

SEQ ID NO: 15501 - DNA, 343 bp, Glycine max
  modified_base (146)..(146): a, c, g, t, unknown, or other
ctcttttccttgtcctaaccctttttcctattaaaaagaaaaggaataaccaatacaatatacacaatggctttcgctttcaatttcaccaaaaccctaattctcttggtctacctctactgcctgcgtatgcaaacccaagctgnccccatgccctcgtacccgtcaagcccggctctacagcctctgcaagcccaccaacaatgctgggctgagctacaggaccattctgccagaagtgctgggcctgccccgattcaactattacaaggccctcaaagtggagatgctcgtgacccatatacaagtggagaaaaccctcgagttgataagcgtgctcctg

SEQ ID NO: 15502 - DNA, 420 bp, Glycine max
acaaggcttacctagctcgtccatggaagaattactctaggagcatggtcatggacacatacattgatgatttgattgacgctgatgggtatttgccatggcaaggaccagagggtccttctggtatggatacttgcttctatgccgagtaccacaacattggccccggttcagacaaatccaagcgtgtgaaatgggctgggatttggaacctcaattcaaaagctgcacgttggttctcaccatctaagttttttcatggaactgattggattgaagttactggaattccttgctttcctggcgtgcccaaacaccatatgcacaaaaagacaatacttaattggcaataaaagtaatgagttgcaaaatcaagcaatataaattaattaaaaagtaatgattgtgcttctttattct

SEQ ID NO: 15503 - DNA, 399 bp, Glycine max
  modified_base (241)..(241): a, c, g, t, unknown, or other
aagattgcttacttgggaaggccgtggagggtttacgctaaggttgtgatcatggactcgcagatcgatgacatctttgtccctgaagggtacatgccgtggatgggaagtgctttcaaggacacaagcacctactacgagttcaacaacaggggttttggtgctaacactcaaggtagaatcacgtggcctggttttaaggttatcactcccattgaagctactgattactacccagganaattctttgagatcgctaattcgactgagcgtgattcttggatcgttgggtctggggtgccctactcccttggcccaattattgcgctgcctttgccaacagcttaattcatggtcttttttaatgactctaatagaatatacatggtactacatatc

SEQ ID NO: 15504 - DNA, 410 bp, Glycine max
tttctctctcctcgactcgatcccaattccactagggattcggttccgatgcgattccgagcttgttagatccacgacaaggtttcgtttcccagattcttttgtaaaaaaaaattcttcctctgcccaacaggtaagttgtaaaaaaatggaccatgacaagactgggtgccaagctcctcctgaaggtcctatattgtgcatcaacaactgtgggttttttggaagtgcagctaccatgaacatgtgttctaaatgccacaaagacatattgctgaaacaggagcaggccaagcttgcagcatcatccattgggaatattatgaatgggtcatcaagcagcactgaaaaggaacctgttgttgctgctgctgctaatattgatatcccagttattccagtagagccta

SEQ ID NO: 15505 - DNA, 415 bp, Glycine max
cgttgaatagaacaaaatcatgttctaagtttctttagttccgatctccaactttggattgtttgttccaacgacgatgctgtccctttaacacatttgaattctacgcaatttttttaaaaaaaatgcgaaggctgctcgggaagatttctgggttcttgagcaatcgaactatggtgggagtggacaaaacagggaacaaatacttcaccagaaatgaagaggttgatggtatcgtgaaagagaaaagatgggtgatatttaaaggagaggaggatcctacctctatcccagttgaatggatatgttggctgaatgggcagcgtaaaaaggctccaactccagaggaaatgatggaattggaagcaagacgtgaacgtgttagacagaatgttgctcttctcaagaaagaaga

SEQ ID NO: 15506 - DNA, 377 bp, Glycine max
  modified_base (270)..(270): a, c, g, t, unknown, or other
  modified_base (357)..(357): a, c, g, t, unknown, or other
ctttcgctgcgtcctcggttatggcttctcgcaggctctcagcatctctgctccgaccattcctccgtccatctctgccggaatttcaagctccgacccctttccggctattctctgtcccaaacttttccactcgcgtttctccgatcgccattacaaaattacctgggactgaggtattctcacaatttgagtccggtaatggtttagcatcagtgctgagaagctctggaatgggcttgtaccagccagctggggggcttgtaccgncttttgctagcaggtttatgtcaacagaggcaacttctgttgattcttcttctcaagatagttcgatgctggagcctgaaattcctnctcgtatcaaatttaagaga

SEQ ID NO: 15507 - DNA, 371 bp, Glycine max
tttctctctcactccaaacctgcgattctcacccctgcccaatggcttcgcaggagaatggtcgtccattacctaaattcggtgagtgggatgtgaacaatcctgcctcagctgacggttttactgtcatactcaacaaggctagagatgagaagaagactaacacggcaaccccacgtagatctgatcctgtgttcaagaatgagaattataacactcctcaatattctggaaagagaaagtggttttgctgcggctgaatctagaagagggcatgatggatcatgaccctatttgctgtggaccatgatcccgctaatcaagtggagcaaggaatggcttatgatcctatttgctgactgtcacttctt

SEQ ID NO: 15508 - DNA, 408 bp, Glycine max
aagagattcaagaccggcatggctaatgaagaggaacagaagaaccacctcttcggcatcaaagatctcggtcacaagactcttcttcagagtgatgcactctatcagtatatacttgaaaccagtgtctatccaagagagcacgagtgcttgaaagagatacgcaagatgactgcaaaacacccactgaacatcatggcaacaccagcagacgaaggacaacttctgagcatgcttgttaagctcacgaattcaaagaacgccttggaaattggtgtattcactggttactctctgctctccactgccctggctcttccccctgatggaaagatcttggctttggatgtgaatcgcgaatactatgagttaggattgccaataattcaaaaagctggagtggctcac

SEQ ID NO: 15509 - DNA, 342 bp, Glycine max
attcaaatgcaaatggccctttacattacactaataattgggcttctagtaaacaccctagtactctataaatagcatttgcatgcaccttagtcttcaccaaaatactcctcttggcatcttgcgttgtgtccctcttttaagctatttccttctcttaacacaattggatgtgccaattgccatagtcaccaaccaattaacaaaggtatatatatcatcatatcatcaccaaatgaaaaatatctggctgttttttcttggggcggtggctacttttgcggtggcagccacagctggtagcttttaacaagactttgaaataacgtggggtgatgatcg

SEQ ID NO: 15510 - DNA, 395 bp, Glycine max
  modified_base (371)..(371): a, c, g, t, unknown, or other
cctctttcttcctcttcctcagtagtgcgattttcgattctgttctctgcaactatgcctaaccctaaggtcttcttcgacatgaccatcggcggtcaacctgccggccgcatcgtgatggagctctacgccgacgtgactccgagcaccgtcgagaacttccgcgcgctctgcaccggcgagaagggcgccgggcggagcggcaagccccttcactacaaaggctcgtccttccaccgcgtgatcccgaacttcatgtgccatggcggcgacttcaccgtcggaaacggcaccggatgcgagtcgatctacggcgccaagttcgccgacgagaacttcgtgaagaagcacacttgtcccggcatactctncatggcgaacgccggtcccggaac

SEQ ID NO: 15511 - DNA, 378 bp, Glycine max
tggaaaaagcttctggtgcagatatgtgttataatcaataacatcggtgtgctgattgtttacatgattataattggtgatgtgctctctggaacatcttcaagtggagatcatcactatggtatccttgaaggatggtttggtgtgcactggtggacggggcgaacatttgttgtcctttttacaacacttgccatatttgcaccccttgcaagctttaagcgaattgattcattgagattcacatcagccctttcagtcgcacttgcagttgtttttctagtcattgccgtgggaattgcagttgtcaagatattcaatggaagcattgcgatgcccagactcttacctgtcactactgatggggcatcattcttt

SEQ ID NO: 15512 - DNA, 419 bp, Glycine max
caagattgtttttgatgataagcttgtgttggctaacacacgggaattctttgatggaaattttccagtggattcttggttaccaatttttgtgaattgtctttatcctgtaagtcaattaccttcagaagctgtcgttgtaaatgtcacatgtggtagtggacgtgtggtttacccaccactgcttggattagttctgcagttaacaatcgctcctcagatatcaacaaaaggattcgcacagcacttgggaaaggtaagaaaattgtttttcttactagagttgatccttttgcagtagctttactggctgatctttttggtgttaagaatgaaattctgagttctaacgccactaatcctatgctgacgcgacttcttgaaaactgtaagagtctcaaatatctggttgatgagtg

SEQ ID NO: 15513 - DNA, 433 bp, Glycine max
tgctagcatgcctgcacgtctactctagatgatcctctcggtgaattccaattccacattttcaagaaataacgaggcaaaaatgttcatatatgaattggaattatttggtttcttattaagcctatcctgaagccaaatgaaatgagatcggaattcctcggggaattccaattccacattttcaagaaataaggaagcctaaatgttcatatatgaattgcaattatttgctttcttattaagcctatcctgaagccaaaggaaatgagatcggaattcctcggggaattccaattccacattttcaagaaataaggacgcataaatgttcatatatgaattggaattatttggtttcttattaggcctatcctgaaaccaaaggaaatgagatcggaattccttcggggtaccgagctcgaattcccta

SEQ ID NO: 15514 - DNA, 411 bp, Glycine max
tgctagtgttaggtgaattccctcgcttcacatgcatgatcgcaccttcaactctcttcttcttcttcttctccatggctttttttcaaggttttggcgccgtggagttcgttttgtagcatcaccgtatcatcagcttcagcttgctttcaccaaaacggctttactatttggtgtgttccatgtcacaaaaaacgaaaggagatattccttttacccactcctcgtcagggaagatctgaagcagcgctagcagcacacgtcctctaatggacgccgactcctctggagaagaagtggttattaaaacaagaaaaccatatactatcacaaagcaaagagaacgatggacagaggaggaacataacagatttctagaagccttgaagctatacgggcgagcatggcagc

SEQ ID NO: 15515 - DNA, 425 bp, Glycine max
ctcgagccggataatgtgtccgattttattagggtaggtggaattcagagactgcaggatggagagtttattgttcaggcaactaaagattgtgttgcaaagacattgaaaagattagaagagaagattcatggccgagtgctgaaccatttgttatatctcatgcgagtttcagaaaaggcttttcaaagacgagttgctttaactcttgctcacctttgttctgcagatgatcaaagaaaaatatttattgattataatggtttggagttgcttatggggcttcttggctcttataaccccaagcaacagcttgatggagctgtggctttatgcaagttggccaataaagctatgactctgtctcctgtagatgccgtacccccatctacaacaccccaggtctatttgcgagagcagtatgt

SEQ ID NO: 15516 - DNA, 395 bp, Glycine max
gcaggacctaaaccagcagtttatctagaaactgctaaggatttggctgaccgtctgctatctgcttttacggccagtccaactgctattccgtttagtgatgctattctgcatgaaaagtcagcccatccagctcccggaggactgagtagcacatcggaagtttccactttacagcttgagtttaattatctcagtcagatatctgttgatcagaaatatagtttggaagcaatgaaagtcatggagcacatgaagactcttccaaagattgaaggactagttcctatctacattagccctcattctggtgagtttagtggagaaaatattagactgggatctcgtggggacagttactatgagtacttaatcaaagtatggcttcagagtgg

SEQ ID NO: 15517 - DNA, 324 bp, Glycine max
gtcaagaggtgctaccctcattgtatataggtttacatattggtggcagcattgggaatagcagatgttgccaattgaccttactgaagccaaagtgaaatgaaatggggatcccaaggggagtgccccaatgacaatgtggataaatatcgtggcaaaaggggtggacgcagattgggagctgttcggccccgtaataagcctctgccgggtacctgcggaatgccagctgtcctcatgggggaccttctataagatgggcagaataatggacgaagctgaaacctgtgtaaaagagttgtcacgcatacgattcctcacaag

SEQ ID NO: 15518 - DNA, 420 bp, Glycine max
  modified_base (288)..(288): a, c, g, t, unknown, or other
  modified_base (310)..(310): a, c, g, t, unknown, or other
gtctgtctttttttctctttctctctctagattttctttctggttcttctttatgagccctaactcggggccccatagtcgtcgctgctagctagccatgtcgctgaggaaggtcttccgctcccgcaagttctccaaatcgttcaaagaggtgctgccggcggagggcgccgccgtcgagggcggggtcgccggcaccgtcgaggaggcggcgaatgggaataataatgggtggtctagcatgctgccggagatcctcggcgagatcgtgcggcgcgtggacgccgncgaggagcagtggccgaaccgncaaaacgtcgtcgcctgcgcgtgcgtctgcaagaggtggcgtgacatcacgcgcgaggtcgtgcgtgtgccctcgcataccgggaaaatcactttcccttcgtgccttaa

SEQ ID NO: 15519 - DNA, 404 bp, Glycine max
ctctatctttttcttttccttctcctagccctcttccctataggacaaggaataacaaacacaaaaatacacaatggctttcactttcaccagaatcctaattctctttgtctccctctcctctctcatcctcaacacccacgcagcccgtgcgccccgcaccatccagacccgcctctacagcctctgcaagcccaccaccaacatggacctgtgctacaagaccatccttccggaggtggagggcctgtcccgcttcagcaactacaaggccctcgaagtggagatccttgccacccagaaacaggtggagacaacctcgaagctcataacctcgctcctggcgaagactgacaactcgaaagacctgacagaatcgctccagatttgcaaagagcagtacg

SEQ ID NO: 15520 - DNA, 408 bp, Glycine max
agcttctatatcttcagattcagagaccaagtcaaatgatttacctcctcgtaatggttttgaacatatccacactgctccacctccacttcctcagagtccaagattgtcccagaagttatctggtttacaaaattcatcaaataatttagagactagttcaacaagtgctgatcacagcagtgaacagacaaatcttgattcttcagctgaacggagagtagaatctgaaaaagatatggcagatgtacctggatcaggtgacaatttgcgaaaggatgataaagttgttaataatgatgtttctgtggtttctaatacctctacaacatataagcacccaacccatttggtaactccatctgagatattctctaatgcttctttatcttctgatacttcccatac

SEQ ID NO: 15521 - DNA, 412 bp, Glycine max
gtcatttgcaagggatgttttcgcggacaatcagacttctagaagctgggataaaacctgtatatgtttttgatgggaagccacctgatttgaagaaacaagagcttgccaaacgttactccaagagagctgaggctactgaagatttgtcagaagccttagagaccgccaataaggaagacattgaaaaattcagtaaacggacagtgaaggttacaaagcagcataatgacgactgcaaaagacttttaaggctcatgggagtgcccgttgttgaggcaccctcagaagcagaggctcagtgtgctgctctttgtaaagctggaaaggtttatggtgtggcttctgaagacatggattccttaacatttggagctcctaaatttcttcgccacctaatggatccaagctc

SEQ ID NO: 15522 - DNA, 343 bp, Glycine max
gctgaatgcttcatattatctaaaaacagggggtcattttggtatttcaatcaaggctaactgcatagactccacagtccctgctgaagcagtgtttgaaagcgaagtgaacaagttaaaggctgatcaattcaaaccattcgagcaagtcacccttgaaccatttgagagggaccatgcctgtgtggttggtggatacagaatgcccaagaagaaaaaagatgctgctgagtagattgctttccagtagccagtaggcgtgtaccaatgttatttcatgagattcgtgttaattttgattcgaaaccttggttataaaacagttctggtttgaatttaaaaa

SEQ ID NO: 15523 - DNA, 324 bp, Glycine max
caagttattatcaaataattaattaaattccctcgggaatcttgttggagccatgtttacagctggtcaggtcatcaagtgcagagctgcggtggcatgggaagcaaggaagccactatcgatagaaaccatagaagtggcaccaccccagaaaggtgaagtgcgtttgaagatcctcttcaactccctttgccgtacagatgtttactggtgggatgctaagggccagactccgctgtttcctcgtatcttatgccacgaagcttcggggattgtggaaagcgtgggccagggtgtgacacatctgaaaccaggtgaccatgc

SEQ ID NO: 15524 - DNA, 407 bp, Glycine max
ttgcactacatcaaagcacattgttcatatgtgtatgagtgcaattctggtcaacattgaaatgggtcaatttactcatgttacaagctatgttagcaaggcagaacagtcaccagatgcccttgaagcagtaacagttgcaaagctacgatgtgctgcaagattggctaatctagaagccaaaaagtacaagcttgctgcccgaaagtttctagaaacaggacctgaactgggaagtcactataatgacgtaattgcacctcaagatgttgcaacatatggaggactttgtgcacttgcaacatttgatcgggcagagttaaagagtaaagttatagacaattccaacttccgcaatttcttagagttagtaccctgaagtaaggaactgataaatgatttttact

SEQ ID NO: 15525 - DNA, 419 bp, Glycine max
ggagaagggtgagtggaagatctctaaaggctcagagagaagatagcattagaagaacagtatatgtttctgagattgatcagcattcttttttcctggtgtaggttactgaggagcggcttgctgccttattcagcagctgtggacaagtaattgattgccgaatttgtggtgatccacattcagttctccgttttgcttttgttgagtttgcagatgagtatggtgcaaggactgctctaaatcttgggggtaccgtgcttggatactatccggtcagggttcttccttcaaaaactgccattcttccggtgaatcctacattcctgcctaggtcggatgatgagcgtgaaatgtgtgcccggactatctattgtacaaatattgataaaaaggtttctcaagctgaagtgaagaat

SEQ ID NO: 15526 - DNA, 396 bp, Glycine max
atcgtgagagggacggtagcagagattccgtgagttgcaaagatgaggacaattctttctgcagagaccatgaacatcccggacggcgtgagcgtcaaggttaatgccaaggtcatcgaagttgagggcccccgcggaaaattggtgcgagacttcaagcacttgaatctcgattttcagctcatcactgacgaaaacggtaaaaggaagctgaaggtggaggcctggttcggttctcggaaaacatccgccgccattcgcaccgccctgagccacgtggagaatctgatcaccggcgtcaccaagggctaccgctacaaaatgaggttcgtttatgcccattttcccatcaacgcaagcatcggcaacgacaacaagtctattgagatcagaaat

SEQ ID NO: 15527 - DNA, 399 bp, Glycine max
  modified_base (372)..(372): a, c, g, t, unknown, or other
gaaaagaaaataaaaccacaacttcataaaaaaagacttaatgtgcacgccattgtggtgagatagaaagaaagatgcaaatggaattccaaggctaacaacacaacttcaacaaattagggcttttattattctttgcaatcatatcatatccttcactccttcacttcactctcaaaactcccacagttgaagagacatgttggactatgaatgggggaacccgtccacgataatgctctccggaaacgaagacagctccgccgcgggctccgaccaaacccaccgtcaaatcttcgaccactatgcgtcccacacactcatccccgaccacttcctacacgcgccaacgcactccaccgtcaccaccgncgccgcagccaccgtggatttcaccca

SEQ ID NO: 15528 - DNA, 415 bp, Glycine max
ctagccctgttcataggacaaggactcctcgtgggaggagtgtgtcaaggagtgtatcacctgatgcttcaccaaagcgtatcagaaggggaagaggtttcagtgaaagatactcttatgcaagaaggtatagaaccccctctcggtctcctgtgaggtcataccgctacaatggaagaaatgaccgggacagatattctacttacagaaggttttcccctaggcgtttcaggagcccaccaccacgtggaagaactcccccaaggtatcgaagcaggaggagcaggacgccatctgtttcacgcagtccacgatatcgagcccgacgatatagccgaagtaggagcccggttcgcagtcgttccctagttgatagatcccgcccctctcgtgtggagaggcatgcatcttcttc

SEQ ID NO: 15529 - DNA, 409 bp, Glycine max
cttcacaattagaaaaaaaaaaaaaccaaaaatgggcgtttctcgttctcaaaagcctcatgttgtttgtgtgccattcccagcacaaggccacgtgaacccttttatgcaactaagcaaactccttctttgcaccggtttccacataacctttgtgaacaccgagttcaaccacaagcgtttggtgaagtctcttggacaagaatttgtcaagggacaacctcattttcgatttgagaccataccagatgggttgcctccatctgacaaagatgcaacacaaagcattgcagcattgtgtgatgcaactagaaaacatttgtatgagccactcaaagagcttgggaagaaactcaatgcttcacatgaagtgcccttggttacctctatcatctatgatgggctaatg

SEQ ID NO: 15530 - DNA, 407 bp, Glycine max
accaagacgaggatgccatttcgctgtcacctgacatgagcgctggtacagaggaagatagcagaagccagggatctccacgtagagtttactcaatggcccttcacttgcgatcaattgcttcaatcttggaaagcaacctcgaggagaagtccaagttatacaaagaagtctccttgcagcacttgttcttaatgaacaacctgcattatatggctgaaaaggttaaggggtctgaactcaggctcatacatggagatgaatggattcgaaagtgcaattggaagtttcagcagcatgcaatgaaatatgagagagctagttggagtcccattctcaacttgcttaaggatgacggaattcatgttccgggtacaaattcggtctcaaaaagtcttcttaaagag

SEQ ID NO: 15531 - DNA, 420 bp, Glycine max
ttccaatatattccattctctctgtgtatttccctacctctggcttcacgatgcagatcttcgtcaagaccctcaccggcaagaccatcacccttgaggtggaaagctctgacaccatcgacaacgtcaaggccaagatccaggacaaggaaggaatccccccggaccagcaacgtctcattttcgccggaaagcagcttgaggacggtcgtacccttgctgactacaacattcagaaggagagtactcttcacctcgtactccgtctccgtggtggcatgcagatcttcgataagacactcaccggcaagaccataaccctagaggttgaaagctccgacaccatcgatgacgtcaaggccaagatccaggacaacgaaggtattctcccggaccagcaacgtctcatctttgccggaa

SEQ ID NO: 15532 - DNA, 407 bp, Glycine max
ctccaatatattccattctctctgtgtatttccctacctctggcttcacgatgcagatcttcgtcaagaccctcaccggcaagaccatcacccttgaggtggaaagctctgacaccatcgacaacgtcaaggccaagatccaggacaaggaaggaatccccccggaccagcaacgtctcattttcgccggatagcaacttgaggacggccgtacccttgctgactacaacattcagaaagagagtactcttcacctcgtactccgtctccgtggtggcatgcagatcttcgttaagacactcaccggcaagaccataaccctacaggttgaaagctccgacaccatcgataacgtcaaggccaagatccaggacaaggaaggtattcccccggaccagcaacgtctc

SEQ ID NO: 15533 - DNA, 419 bp, Glycine max
gaaaaggaacaccttgaaaactgcatttatgttcccaggcattctttttgctgtcttctttgtgctgaatgctttaatctggggggagcagtcctccggggcagtcccttttggaacaatgtttgctctagtctgcttatggtttggtatatcagtacccttggtctttgttggcagttacttgggttttaaaaagccagcaattgaagacccagtgaagactaataaaattcctaggcaggtacctgagcaggcgtggtatatgaaacctgtcttctcaattcttattggaggcattcttccatttggggcagtgttcatcgagctcttctttatcctgacatcaatatggctgaaccagttctattacatctttggcttccttttcatagtgtttgtgatcctattaatcacctgtg

SEQ ID NO: 15534 - DNA, 372 bp, Glycine max
ggcaacctcatatttgtcttcaattttcattggaacaacagcgattcagattacagagttggctgttcaacccctgggaaatataagattgtcttggattcagatgatgccttgttcggtggcttcaatcggctcaatcacactgctgagtacttcacctgagaaggatggtatgatgaccgacctcgatcctttcttatctatgcaccttctagaacagcagtggtttatgcccttgcagatgatgctgaacctaccctagcagatgaagctgaacctgccctagcagatgaagctgaaccagatccagttgatccttgatgacaatcttctgggatgctgaaatgttacaagtgcacaacggcatggatg

SEQ ID NO: 15535 - DNA, 376 bp, Glycine max
gtgggaatgcctaatgctggtaaaagcactttactcggggctatatcaaaggctaaacctgctggtggtgactatgccttcactactattaggccaaatttggggaatctaaactatgatgatctctcaataactgtggctgatattcctggacttataaaaggcgcacaccaaaatcgtggactcggacatgcgtttatgcgccacatagaacgcacaaaggttcttgcttatgtggtagacttggctgctgctttaaatggaagaaaaggaattccaccatgggaacagctgagagacttaattctagagctagagtaccatcaagatggtttatacaaacgaccattcttgatagctgcaaattagactgatg

SEQ ID NO: 15536 - DNA, 362 bp, Glycine max
caaattccattttccaattcaaaaccctaactccgttcgaagcaccaaatcgtgatggcaccaaaggcagagaagaagccagcagagaagaagcctgtggaggagaagaaatcgacggtgggagacaaggctccggcggagaagaagccaaaggccggaaagaagcttccgaaggagggaggcgccggcggagaaggtaagaagaagaagagaaacaagaagagcgtggagacatacaagatctacatcttcaaggttctgaagcaggttcaccctgacattggtatctcaagcaaggccatgggaatcatgaacagcttcatcaacgacatcttcgagaagcttgcccaggaatcttctag

SEQ ID NO: 15537 - DNA, 368 bp, Glycine max
gaaaccagcaatcggcgattaggagtgagagagatatggagggaattgaaggaaatagcagcagatacagtctgaaaccctcgcgaatttgcaacgaagatgttctgatctgcgtcgacgtcgatcctcagtgcctcgtcgaaatgaaaggtgccaccggtcccaatggcagacccctcacccgtttggactccatcaaacaagccatcgttctcttcgtcaatgccaaactcaccatcaaccccgaacaccgttttgccttcgccactctctccaacaccctcgtctcttgggtcaggaaagagtttagcagtgaaattgagtcaacacttgcagcaatgcgtgttctttcagcttcttcttcttct

SEQ ID NO: 15538 - DNA, 421 bp, Glycine max
acatgattctggagaaatggattcagcatcagaatcaggtaaagccaaaggtgcttcggttgggaagggaaggggaggttcccaaggtgcaggaaggggctctttcgtttatggtggggcacaggtaatgggcaccactggaaatgtggctgttagtcatggagatccaaacttcccagccttcttgccagtcatgcaatttgggggccagcatcctggtggtatgggagttcctgctgttggcatggcattccctggatacgttggtcagcctcaacttggtttgggaaagtctgaaatgacatggctaccagtgttggctggtcctgcaggagctttaggggctacatacccattccttcctgttgatggtgcaagcagtcgacaatctggacaggcctctgcaatgggtacttcaagc

SEQ ID NO: 15539 - DNA, 401 bp, Glycine max
cattctctctgtgtatttccctacctctcccttcaagatgcagatcttcgtcaagaccctcaccggcaagaccatcacccttgaggtggaaagctctgacaccatcgacaacgtcaaggccaagatccaggacaaggaaggaatccccccggaccagcaacgtctcattttcgccggaaagcaacttgaggacggccgtacccttgctgactacaacattcagaaggagagtactcttcacctcgtcctccgtctccgtggtggcatgcagatcttcgttaagacactcaccggcaagaccataaccctagaggttgaaagctccgacaccatcgataacgtcaaggccaagatccaggacaaggagggtatccccccggaccagcaacgtctcatcttcg

SEQ ID NO: 15540 - DNA, 418 bp, Glycine max
  modified_base (405)..(405): a, c, g, t, unknown, or other
ctcataacacaaagcacaaagcaaagctcatccttgagttaaaaaatggcagcagcttcttccatggctctctcatccccatccttggctggcaaggccgtgaagctgggcccatcagccccagaagtgggaagggtgagcatgaggaagaccgtcaccaagcaggtctcctcaggaagcccatggtacggcccagaccgagtcaagtacttgggcccattctctggcgagcccccgtcctacctaaccggtgagttcccaggcgactacggctgggacactgctgggctttccgcagacccagaaaccttcgccaagaaccgtgaactcgaagtgatccactccaggtgggccatgctcggagccttgggctgcgtcttcccggagttgctgtcccgcaacggngtgaagttcggag

SEQ ID NO: 15541 - DNA, 408 bp, Glycine max
cctgaactactgaacaacaacctcttcttcttctctctctctgtttagcataatcattcatcaccacacaagagaaaaaagaaaaagaacaaagaacaaataaacctttttttttttataaaaaaagaaagaaaaggaaataaagttttttgttttttcgatgaaccagaagttcatcggaaagccgccggcgacggtggacctggatcggatgccggagcgtgggtcccaccaccggcgttcccactccgacacctccttccgcttcgccgcgaacttcgacgaccttctcctcttcgacccctccgacttcgacatctccggcctcccgtcgccgctccctctgccatctccggtctccgccggcttggttccgatgtccgtcgactccgacgagtccggcaaaca

SEQ ID NO: 15542 - DNA, 424 bp, Glycine max
  modified_base (373)..(373): a, c, g, t, unknown, or other
tccaacggtgcatcttgatttccgtggaacagtattgaacgtgaagccttcaccagtagtggcagcttttagttccagagggcccaatatggttaccagacagattctgaaaccggacgttattgggcctggggttaacatcttggccgggtggtccgaagcaattgggccatcagggttatccgatgacactcggaaaactcagttcaacatcatgtcaggtacatctatgtcttgtccacacataagtggattggctgccttgttgaaagctgcacatccgcaatggagttctagtgcgataaaatcagccctaatgacaacggcagatgtacacgacaacaccaagtcccaactccgggatgcggcaggnggtgcattttccaacccatgggctcatggtgcgggccacgtgaacccacac

SEQ ID NO: 15543 - DNA, 414 bp, Glycine max
gaaaagatgatgatgtttgaagatatggggttttgtggcgatgtggatatgttatgtgtttctcttggagagggggatattgctgtgagacaaactgaaccggatcctgtagttgaggatgactacagtgatgaagaaattgatgtggatgaacttgagaagaggatgtggagggacaaaatgcgtcacacgcgattgaaagaacaaaccaagtccaaggaagggactgatgcaacaaagcaaaggcaatcccaagagcaggcaaggaggaaaaagatgtcaagagctcaagatggaatactgaagtacatgctgaaaatgatggaagtttgcaaggcacaagggtttgtttatgggataattcctgagaaggggaagccagtgactggagcatcagacaatcttcgtgaatgg

SEQ ID NO: 15544 - DNA, 417 bp, Glycine max
cttgaacccttcaggccgttttgtcattggtggccctcatggcgatgctggtctcaccggccgcaagatcattatcgatacttatggaggatggggtgctcatggtggtggtgctttctccgggaaggaccctaccaaggttgataggagtggtgcttacattgtgagacaggctgctaagagcattgtggcaagtggacttgccagaaggtgcattgtgcaagtgtcttatgccattggtgtgcctgagcctttgtctgtgtctgttgacacctatggcactgggaagatccatgataaggagattctcaacattgtgaaggaaaactttgatttcaggcctggtatgatctccatcaaccttgatctcaagaggggtggaaataacagtttttgaagactgctgcctatggacac

SEQ ID NO: 15545 - DNA, 385 bp, Glycine max
ctcgcacttctagttttggtgttctgagttcgagcgaggaaggtctatgacctgagaaagtcttgctgctgtggtaactgaaggtgcggaagctcctgcaagtgcggcaacggctactgaggctgcaagatgtacctaaacttgaactacactgagtcaaccactaacgagaccttgttcatgggaatggcacctgttaaggctcaattggagagtgctaagaagggtgagaccattgagaacgacggctgcaaatgtggaccatactgctgctgaacgtctgcacttgcaatggaggtgttgggagagcaagcttcaagcagagagttcccttaattacgataatgatgaactattaatgagtaactaagaacttatgtactat

SEQ ID NO: 15546 - DNA, 182 bp, Glycine max
cgaagttccaagtgctgcgttttgatagccgtgcaaaaacgggatgaaatttgaaatgaaaggagtggaatgcgagccgagcaattatgtatatgtactaatgtagtcttcaatttcattttcaacctctgttctcataaaaccctagaaacattcaaacaaagatgtcttagtgggcatgc

SEQ ID NO: 15547 - DNA, 392 bp, Glycine max
gtccaaatacagtggtgctgaaacaacagctagcattgcatttattctttttgttttgggttttaccgtgacacggatcatttactacccattctggattcttaggagtacgagctatgaagttgttcacgccttgaaaatggacctggtggatggtccattatattattatgtgttcaattctcttctatatttcttgcaagttcttcatatatattggtgggttctgatgcttaggatgcttgttaaacaaatgcaagaaaaaggaaaagttagtgaagatatccgatctgattcagaagatgaagatgaacatatacatgatgaatgaacagataaacaagactggatacgatcccattgtgttcaaatggtatcatggttgtcttacc

SEQ ID NO: 15548 - DNA, 400 bp, Glycine max
gttttcgttcaaggtgagaccttgttcccgggcatactctcatgattggactgagtgtccttttgttcatcccggagagaatgctcggaggagagaccccaggaagttccattacagctgtgtgccgtgccctgattttagaaaaggggcttgcaggcgtggagacatgtgtgaatatgctcatggggtgtttgagtgctggctgcacccggctcagtatcggacacgcctctgcaaagatggcaccagttgcaatcgaagggtgtgtttttttgctcacactgcagaggagcttcgtccgctgtatgtgtccactggatctgctgccccttcgccccgttcatctgcttcaggtcctaatgtcatggacatggctgctgccatgagcctttttccagga

SEQ ID NO: 15549 - DNA, 420 bp, Glycine max
agtggagcttgtggcagcccggaaagtgccattgaccaaatcatcagaacagttaccaacaaagtctacaacattacattttcagttggagatgcccaaaatgggtgtcatggatcaatgatggctgaacatttgcgataaagatccttcaaagtttcctataaatctgaaaggaacggaacatccgagactgtaagctttaagttcaaagcaattgcaccaagaaccagactcactttctacaggtccttctaccataccacaattgatgactatggctgtatatgtggccctgacattgatcaagttatagtgttccctgtggcctaaatattagagttccattccatctgtaccagtataatatgtagtaattgagatttttgcaaatcacttgagcttttcttttctataattaca

SEQ ID NO: 15550 - DNA, 409 bp, Glycine max
gcaaacttcaacttgtaatcaagggagagagaaaatttcaagcacaaaaaatggcggagaagaaagtggtgatcctaggaggtggtgttgccggtgccaaccttgcaaaaactatacaacgtcaagccaacgttacccttattgatccgaatgaatattttgagattccatgggcaagtttgaggggattggttgagccaacttttgctgaaaggatagtgatcaaccatagagagtacttcaaaacgggtaaccttgttgtatccaatgctgtcaacataactgaaactgcagtggtgactgaagatggccagcagattgcctatgactatcttgttattgccactggacacacagaaccaatccccaaaaccaggaatgaaagacttgaccaatacaaaggagaaaa

SEQ ID NO: 15551 - DNA, 421 bp, Glycine max
agcaaatttctctttgctggcccatccaaatctgctcacacccttttccaatatatagctccggagctggtgccggttcaatatggtggacttagccgagaggctgaacaggaattcaccacttctgatcctgtcactgaggttacaatcaaacccgcgactaagcatgctgttgagttccctgtttctgagaaaagtcatgctgtttgggaaatccgagtggtgggctgggatgtcagctacggtgctgaatttgttcccggcgctgaggatggttacactgtcatagttcagaagaacaggaaaattggtcccgctgatgagaccgttattaccaacgctttcaaaattggtgaacctggcaagattgtactcaccatagataaccaaacatccaagaagaagaaactcctctacaggt

SEQ ID NO: 15552 - DNA, 329 bp, Glycine max
ctcgagccgttgcatttcgttactttcatttgttgtgcaatcgtacaagttccaaacttctctattttggtattatttgttctcacttctcacacatacagatttgagccttttatattatcatggcttctaaggtggtttcggatttggttatagcgatgatgttgtttggcatgaactgtaactgcactagtgttggccacatgccttcaaccaaagaggaaggtcacgattttcaggagtctaaagccaagaccacacaaactgcgaacaaggccatggaaactggtaaagagggacaagaagccgcagagtcatggacagaatgg

SEQ ID NO: 15553 - DNA, 317 bp, Glycine max
gattaacatccataatcttaagtcagcatattgttcttctttgcctcgcaactgtgtgaaatggaataatgatgtgtatgttttttctaggtatctttacttctttgagaagggaaacctacaagtcaccgttgctgctatccagggcttaattgagttaattatgaatgagatgcagagtgataccacaactcaagatccagctgctaatgctttcttagccagtaccatgcgctatatagagttccagaaacaaaaagggggtgcggtaagcgagaagtatgaagccatcaaggtttcacatgctggatgaccga

SEQ ID NO: 15554 - DNA, 419 bp, Glycine max
tggaaaagctctggtgcagatatgtgttataatcaataacatcggtgtgctgattgtttacatgattataattggtgatgtgctctctggaacatcttcaagtggagatcatcactatggtatccttgaaggatggtttggtgtgcactggtggacggggcgaacatttgttgtcctttttacaacacttgccatatttgcaccccttgcaagctttaagcgaattgattcattgagattcacatcagccctttcagtcgcacttgcagttgtttttctagtcattgccgtgggaattgcagttgtcaagatattcagtggaggcattgcgatgcccagactcttccctgtcactactgatgtggcatcattctttagactattcactgtagttcctgtgtttgtgactgcatatatct

SEQ ID NO: 15555 - DNA, 284 bp, Glycine max
tcgctccagatatagaaaagctcggggtttttttaaaataataatgggggccgtgaggaaacttttttgggaaggcaaggtgtgtaaaaaactggtttaaggaagaagctactgaaacctgtattatgaggttcaaaagctttggctatgccaggaaaatttggaatattacaatatgggtagcaacaggactattgtttggtttagaagggaccttagaattgaggacaatcctgcattagctgctgctgcaaaggaggggtctgtactccctgtgtatatat

SEQ ID NO: 15556 - DNA, 390 bp, Glycine max
  modified_base (352)..(352): a, c, g, t, unknown, or other
ctttcaaacacacaagccaaacccaatcacatcatcacacaggggaaaagagcacagaccgaccaattccaacggttgaattttttggctgaagacaccccaccgacgttagtcaaataaaacatgtcttgctccgtcgcggtttacaattcgtcggtgatctatccttcttattacctattctgctcgaagccctccatcatctcttcttcgccggaatccctctcgatctctatctcgcatctcaaaccttccaactgttctacgacgtcgtcttgttcttcaccctctgctgctgcttattcatcttcttgtgcttattctccgtttcggcttcgccttcccaagcctnccaccgtgttctctgcttcttcgtctgcttcgtctacc

SEQ ID NO: 15557 - DNA, 417 bp, Glycine max
caccgacttgtggaagcgagtctgcaaccagatctggacttgcaaccggccctcagctcctctgactttcaggaggggagcaatagcagctgcatacagtagcagcggcgggtcagtgtatgacaagaaccctgatgatcagatccactctggggcggtcccagacgatgtgatccaggcaacacaatccggcaaatactgggccccacacccacagactggggtatttgggccccccggaggagcaggagacgaagctgcatctgctcccacttccacttgcacttgtgatgccctggaagagaaggcctggtttcgccccaccagtctcgaggatttcgagaagcctcacacacttccttaacaacccctttctttctttcaattaggacatcatatatattatacacaattaaa

SEQ ID NO: 15558 - DNA, 395 bp, Glycine max
tggcaagcaaagcgggggtgaacaaaaacaatggcgacatcgctatgggttttgacatctgtttatttcaacaatgtgtgttttggcaaagcgcttcctctatctcggcccttccttgtatgtctcgctctccgcaaatcccttctatctctgtgcacgcgccgacgaaccttcgccgtccgcgccgaatcccaaaacggggccgatgccgtccccgcacactacgacttcgacctcttgaccatcggcgccggcagctgcggcgtccgagccgctcgcttcgatgtcaactacggcgcttccgtcggcatgtgcgagcttcctttgtccactatctcctgcgaaaccaccggaggcgtcggcggaacctgtgtaatacgaggatgtgtgccaaa

SEQ ID NO: 15559 - DNA, 325 bp, Glycine max
gaacaaaagagaagtaatggagagtgaacttatgctgcataggatgcggatgaagtacaagcatgaaaccgcactcttggaagacaacataggactctctggatttactcccttcacttccaagtttgtctccagtgaagaggaatatctcgattcacatgatgtcatgataaaccggcttgcgcggacacggtctactgcagtacagcatttgccttataatgaaaccaacgtttccatagcatctgccgctagtacaaagcaagagttcacgatgagatatgtgccacatgcatggcctcataaactgtatgcactcgagcca

SEQ ID NO: 15560 - DNA, 420 bp, Glycine max
cccaccaatattttgctttctcttttcttttcctgcttataactgccttttgttttggttttaattccacctcatattttatatgtgttccaaacttcttcttggaatgtcccttccttaatacccctcaaagaaaagccaccttaacatctctttctctgaaaattctctttagagagatagagagaggaagaaagaatggcagcttgcactgtctactcaacacaatctctgagcacaaattgctccatctcaaccccatcaaagacgcaactcagtttttttccaccaaaagcaggtagttttctggaggaacagcaagaagggcagctgcagcagcagaagaagctatgtgataacatgtgcagcaggtgactcacagacagtggtgattggcctggctgcagacttcaggtgtgg

SEQ ID NO: 15561 - DNA, 413 bp, Glycine max
gctaggcatctctgaaatcaggcaagtgaaaaccaaaaatagaatggtctcacagacagttgaactcttaaagaatgagattcctctggagcaggaatcagtggttttagctgaagatgctgtaaatggtctcgttcttgtggacatcataaatggcttttgcacagttggtgctggaaatctggctccaagagaatccaatacgcagatttcgggaatgatcagtgaatcagcaaggctggctagagtgttctgtgagaagaatttgccggttatggctttcctggattctcaccatcctaacaagccagaggacccttatccccctcactgtattggtggctctgatgaatcaaatctggttccagcattaagatggctagagaatgaacctaatgtaacaatcaggcgaa

SEQ ID NO: 15562 - DNA, 405 bp, Glycine max
ggagcccaagtttttgaagaacggtgatgctggttttgttaagatgattccaaccaaacccatggttgttgaaactttctccgagtatcctccacttggtaggtttgctgttagggacatgcgtcaaactgttgctgtgggagtcatcaagaacgttgagaagaaggatcctaccggagccaaggtcaccaaggctgcccagaagaagaagtgaatcgtgcgggctggttcatcaggggatgttggttacaataaatgttggtttcttttctgtactcttgtgtcttcttttctaggtagcttgtttttcggacaaagtttgaagtctccaccatcatctcgcaactgttgttcccagaactgggttcttgatcgacggtggcaaaattgctcttatttatctgt

SEQ ID NO: 15563 - DNA, 411 bp, Glycine max
cacagttagtacaaaaaagggttacttcagcttccacatatcttgaagaattgatcaatgggcaagtctgtagttgagaagctactttggatggcaattgtgtgcttggtgctgggtgtaatttccattactcccaaggcccaagcagcagtgacatgcaaccaggtggtgagcaacctcaccccatgcatttcttatgtgctcaatggtggcaaaaccgtgcctggcccttgctgcaatgggatcaagaccctctttaacctcgctcactccacaccagaccgccaaaccgtttgcaagtgcataaagaacgctgttagtgcgttccattatggcaagtccaatgtggaccgtgctgctgctcttcctaagcagtgtggggttaacatttcttaccagatcagccctttc

SEQ ID NO: 15564 - DNA, 341 bp, Glycine max
atatcttcttatagcttcatcccaaaaagctcttttcgttctaaatttgattccttagttcagcattctattattatatatggcttcttcaccttcctcagaaaacaaaaacctagagggagtagctggtggtgccggagagaaacccattccacttggtgagaacgttctgcagaagcatgctgcattctttgacttgaataaagatggggtcatctacccatgggagacttttaaagggttgcgtgaaatcgggactggggttctgctgtccgttggaggtgctattctcatcaatgtgcttctcagtcagagtactcgtcccggaaagtttccatcta

SEQ ID NO: 15565 - DNA, 390 bp, Glycine max
  modified_base (181)..(181): a, c, g, t, unknown, or other
gcctgctgagattgttggaaagcgtgttaggtataaaattgatggttccaagattatgaaggtctttttggaccccaaggagcgaaacaataccgagtacaagttggagacttttgctgcagtatacaggaaactttcaggcaaaggtgtcgtgtttgagtatcctactaccgaggcttangttctatttgttagctttgaatttcttcctgaattacatatggtggatgctggttttgttaagttggctttaattctggattttctttaattacttatagaaaatactgtgtcctggtttatcaatgtagaatttgatatattttcttgtaacattctatgaatccggatttttaagattttaacatcctatgaatccggatttttaag

SEQ ID NO: 15566 - DNA, 414 bp, Glycine max
gcaactacagttccatcaatgattattgatgaatcaccacagaaaacagaacgaggagagattaaaccacaaaatcctcctctgcaagatcagataccggatccagaacactcggaagctcaacattcagctcctaagtcaccagctgtttcttcatccaaatctgaggataggggagatgccaatttagatacttcaccaaaggctactaatcatgagatgaaccaagcaatttctgagaaccccgattccaacaaaatgaagggcagaaaacctgtagaccgttcctcatgtggttccaacacaacctctagcagtgaagagactgagttactagagaaggatgagaaagaaaaggaagagcccaaaacacctgatgcgaacgttttagataccgagcttagtaatcgtcga

SEQ ID NO: 15567 - DNA, 275 bp, Glycine max
gtgcaagtcactgagaagttgctagctatcaatctcaactttgtggcagccctgataatattccaaatgtatatcacgataggcttatcaggcaagaccctttcagattccatttaggggaaatagaatttgctaccttcttttccattcccccttttttgtacagtgcactctttttaccttaattcaggatttaaggtgtgtgtgtgctggtgtttgttaatttctaacatgtgcaagtatataatataatacaatggagtggatttcttatt

SEQ ID NO: 15568 - DNA, 324 bp, Glycine max
cttcactttaaagttacatagttattcattggtttacttaatgtacaatggctgcttcaacaatgactgtctcttcatcatcattggctggccaagctatcaagcttgccccctccacccctgagcttggtgctggaagggttagcatgaggaaaacagcctccaagactgttttcctaagaagcccatggtacggaccagaccgtgtcaagtacttgggcccattctctggtgagcccccatactatcttactggtgaattcccaggtgactatggttgggacactgctgggctttctgctgacccacagacttttgccaaaa

SEQ ID NO: 15569 - DNA, 419 bp, Glycine max
atttatcacctcattttctgatgaaaaaagttacacctttggggacgcccaagagaagaaccaacgagatcgaggaccttcttctgcttctgcttccgccttttccttcgcgcttcggtgctgcccacctacactcattccgtccaaacccctttttgtctgaaaaatcaaaccttaatttctgcgtttttttctattggatccaacttcactcgccggctagagtttcccgaggcactaccctattgggtctaatcattcgagttcttcgattaacgtgaatttgggtcagagacctcatcatcagagctggcaggtggcgggtaaaagaaaatttgcaggttgaccggtagatatagcaaaggagagtagaaaccctagaagaagaagaagaaaaagaagcaatccccatataagaa

SEQ ID NO: 15570 - DNA, 359 bp, Glycine max
agattctgtaactaatgatgggaaagaggtcatcaaaggcaacatcttgagtcaagtcaccaatgcttcacaaatgataaagctggaaaaggatccacatgctgcatttgcattaattattgatgggaaaactctaacatatgctttaaaagatgatgtcaagcaccaatttttgggattggctgttggttgtgcatctgttatttgctgtcgtgtgtctccaaagcaaaaagcattggtaacaaggttagtgaaagaaggaactgggaaaaccactttagccataggtgatggtgcaaatgatgttggcatgattcaagaagctgacattggtgttggaatcagtggggttgaaagta

SEQ ID NO: 15571 - DNA, 405 bp, Glycine max
gaaaaaatgggttcttcttcttctatgtggacggtgtgtgtgattttggcatcactggcctctgcagcactctgtgccaacccacgcaggccagtggatgtacaatttggccgaaactacgtgcccacatgggcctttgatcacatcaaatatttcaatggtggttctgacattcagcttcatcttgacaagtacactggtactggcttccagtccaaagggtcttacttgtttggtcacttcagcatgtacataaagatggttcctggagattctgctggcacagtcactgctttctatttatcttcccaaaacgcggagcatgatgagatagactttgagttcttggggaacagaacaggacaaccttacattctgcaaaccaaagtgttcaccggaggcaag

SEQ ID NO: 15572 - DNA, 416 bp, Glycine max
gttttctggcacacaagaaaagtgtgccacatgtggcaaaactgcttatccattagagaaggtaacagtggaagggcaggcctatcacaaatcatgtttcaagtgttcacatggtggatgtcccataacgccatcgaattatgcagcccttgagggcattttgtattgcaagcaccacttctcccagctttttaaggagaaagggagctataatcatcttactaagtctgcatcagtcaaacgggcagccgcagccacagcagcagcaacaacagctgcctctgttccagaatcttgaatgttggttccttcaattgccttttctttttcaaatacattttggtttgtgaagcacgtgtttgtatgtgtggcctttttggttattgattgttctctcgtgactttgatcatttctg

SEQ ID NO: 15573 - DNA, 413 bp, Glycine max
taaaaatcatgatgtgtatcttttaataagtagcatagttacgtgctatcaaatatactattgttaaaatcttgcatactgttttagacaagaagcaaaaaaggggaattggtgagttacctattctatgatgtatagggtatcattaaggtaaattaaattagattcgatggaataatttgatatgatatgattgataaaaattggcgttactttagcatgcgatcaatgtgattagaggtttgatcctgatgtccacgcatatagaataacatttggtaggacttggagaaactaattgcttaaatgcattatagtatttcgagggattaatctctgactctcaaccatagataccttgggttaaaaacagataataagatttgatccagtgtaaattagtggcatttcaa

SEQ ID NO: 15574 - DNA, 419 bp, Glycine max
agaaatttaagtgaggagctagagaatgatgatgaagtctgctatgtgtgcagtggtggttgtagcacttcttcttctggcggaagaggggcccatggctgatgctgtgacatgcaccccaacagagttgagtccgtgtcttccagcaatcacttccggtgctaaaccttgcaatgcttggtgcacgaagctgaggcagcaaaaaccatgcttatgtggctacctcaaaaacgctagcttgaagcagtatgtgaactctcctaatgcccgacaaaccgttgcttcttgtgggattccctttccaacttgttaattaattaagccttcttataattaaagtgtgggatatatatatatatatagataaacagtttaatttatacacactttgatcctacaaagcatcttgacacaagcat

SEQ ID NO: 15575 - DNA, 359 bp, Glycine max
acaaatcccacatgttctcacagataaaagagatacgttttggcaattcaattgatgaattaggagttgtaggtcacctctcttgcacctcataacagctctaaatcaacacacacaaatattagtcaaaaccgtaaattaaataacacactacttctacaatccataatatatatacacacacaatacaaaaaatatcaacagagtccccaaccttaatcaatccacatttaaattataagaaacgcccttcaagatacaaacaatgtcatctcgcattgttgccgaaaatgctctatcggtcaccaatattgtcacgccttcatatttcgacctaatggaactggacgatcttacgc

SEQ ID NO: 15576 - DNA, 381 bp, Glycine max
gaaccaagaaaccaagcaaatcattgttctctctgtcctgtgttttgtgatttcccccttcaagccaccaccaatggccaacaacgagatgcaagttgagaggggtttggacttggaaaggtacatggggcgttggtatgagatagcctctttcccttcaaggaaccagcccaaggatggcgtgaacaccagagccacatacactcttaggaatgatggcactgtgcaagtgctcaacgagacttggagtaatggcaagagagggcacatagagggaactgcttttaagtctaaccgcacaagtgatgaagccaagttcaaggtcaagttttatgtccctccctttttgcctatcattcctgtaacaggggactactgggt

SEQ ID NO: 15577 - DNA, 376 bp, Glycine max
gcaatgacagctatattagaatggttagccccgctcgctcgcaacgggcttagatggcaatccgagagaagctatgagcaacactgctttgtttccaggacaaatgtgttgctggtgcaaaccctttattttgcaagtcaagaaaaaacagaagcaataatcactgagcttcttgtgggtctgaattatgtgtggagatatgctagggagttcaataaaaaagctctgctagactgtggcagtggtggggtagatattggatattctcaactaaatggataagcaatttttatgaagctcatgtgaggttctcttttcaacaaaagtgcagtacctgacaagtgattgggatgaatcttttcaggcacaccaattc

SEQ ID NO: 15578 - DNA, 429 bp, Glycine max
tatcacttgagggcagatatacatcgacaggcagctgtggaataggcagatatacccaccaatcaacgtcctcccatcactatctcggttgatgaagagtgctattggtgagggaatgactagaagggatcattctgatgtgtccaaccagctctatgcaaattatgctattggaaaggatgtccaggcaatgaaagcagtggttggagaagaagcactttcatctgaggacctgctgtatctggaatttttggagaagtttggagaggaagtttgttgcccagggagcctatgacacccgcaatatattccagtcacttgatcttgcatggactttactccggattttccctcgtgaacttcttcatcgtataccagccaagactctggaccagttttacagcagagatgctggtaattgatgattaa

SEQ ID NO: 15579 - DNA, 397 bp, Glycine max
gcgcgccatggctggcatcaccacctcccccttcaaactcgctcaggttccgactctcttctcttcttctgattccaaactcttcggccttcccctctccaatccctattccctcaaattcgacccttcttctctctccactacctctctctcctacgtcaaagcccgctactacggcggcggcggcggccctccccgctcccccaacgactcccgcttccgcaagtcctccgattccgacgacgacgataaagctctcgacctctccactctcaggtcagataccgtgaggcttattgatcagagccagaatatggtcggagtagtgtcaattgatgacgccattcaaatgggctgaaggatgtcgaacttggactggtaatattatccccagatg

SEQ ID NO: 15580 - DNA, 307 bp, Glycine max
aaagggcttgggagtgaagttcccctttgaccaacccatgaaggtgtacaacagcttgtggaatgctgatgactgggccacaaggggtggtttggagaaaacagattggtccaaagcacccttcatagcagaatacaaagggttccacgttgatgggtgtgaagcttcagtgaatgcaaagttctgtgctacacaaggcaagaggtggtgggatcaagcacagtatcatgatcttgatgcttctcaatggagatggctcacgtgggtgcgcaggaaatacaccatctacaactactgcactgacaga

SEQ ID NO: 15581 - DNA, 364 bp, Glycine max
aatttctggccctatagtggtggcaggagtgttatgtttcatagctggttcaatatctagtgctggtggaattggtggtggtggacttttcataccaatattaaccattgtggctagcctagacctcaaaacagcttcaagtttgtcagctttcatggtcacaggagggtcaattgcaaatgtcatgtgcaaccttcgtgccacaaatcctaaacttggtggcaagtcattgattgactatgacatagcacttttatcagaaccttgtatgctgctaggagtgagtgttggagtcatatgcaaccttgtgttcccagaatggttgattaccatgctatttggtgggtttctaaactgggctacc

SEQ ID NO: 15582 - DNA, 303 bp, Glycine max
caaatattttctttttttcctttatctctcttcattcagaaaacaatgtctcgctgctgatttgcagtcttcttgtgttgactggaaaatgatgtacccttgattcccataaagagctattgaaactattatattagctgaaaaaaaaaaaaaaaaaaaaaaaagaacaaaaaaaactaaagatactcaaacccaaaattaacttctgtcagggaccgattaaaactaccctacgaatattcgttgaaagctaccttggatatgttgcttacacctaatgacctttttgcgacccaaatcaca

SEQ ID NO: 15583 - DNA, 409 bp, Glycine max
caacatacacaaagcaaagcatgggagtgactctggagtttatgacacagaaggacgttatgtgccagcaaatattgagaacatattcagtaagtatgctcgtacagtacctgacaagctcacacttggggagctctgggacttgacagagggaaaccgaaatgcttttgacatatttggctggcttgcagcaaaatttgaatggggggttctgtacattctggcaagggatgaggaaggtttcctgtcttaaagaagctgttagaagatgctttgatgggagcttatttgaatactgtgctaaaatgcatactactagtgatgccaagatgagttgaaattggattatgcagtgtgcataggtacgtgtgatgtgtcgttctgttagacatgttagtggtgtaatgtg

SEQ ID NO: 15584 - DNA, 427 bp, Glycine max
  modified_base (122)..(123): a, c, g, t, unknown, or other
aagagctatgacgtcgctgcccgctggattcggtcggatatcgatgggtctccttctttagcgctttagctcgtaccgcgacatggaaggtatcgaggaattagatgtcggaatcggagcgnntcgtcgagaaattatattgcatcaaatatcgatacctctgagattgtcgccatcaagatggaaagcaagaagaccaagcatccgcagctattgtatgaagcaaagttatatagtattcttcaaggagaaagtggtgttccaagtatgaagtggtgtggcacagatggagacaataatgttctagttattgatcttttggggcggagtcttgaggactcttttgtctattgcgggaaaaagttttcattaaaaacggtttttatgttggccgatcagatgctgacaagaatagagtacatgcatt

SEQ ID NO: 15585 - DNA, 202 bp, Glycine max
tcggactctctcggcaaattccaattacacatatctaacaaataaggagccacaaatgttcatatatgaattgcaattattcgtcttcttattagaccctatcctgaagccaaaggaaatgacatcggaattcctcggggaattccaatttcacattttcaagacataaggaggcacaaatgttcatatatgaattgaaata

SEQ ID NO: 15586 - DNA, 309 bp, Glycine max
aattattttattttattggcgaatgttggtggttggttgggatgggattccaacccataacctatgtgcttccctttttccttcttttctttctttacaatttagaccaaccttgtatctctatcattctgaattattaacgttgtcgtgttttgtgttttgtgttgtgcaggggacaattatctgaagccgtatgtaatttcggaaccggaggtaacggtaactgagcgtagtgaggaggatgagtgtttgatatttaggagtgatgggctatgggacacagtgcaaaacgacatcgcatgcaaagtg

SEQ ID NO: 15587 - DNA, 307 bp, Glycine max
gcgagacaaaggagccgtcactaacgtcaaggaccaaggggcgtgtggttcgtgttggtctttcagtacgacgggagcgttggaaggagctcattatctggccactggtgagctcgtgagccttagcgagcaacagcttgtggattgcgatcacgtgtgtgatccagaagaatatggagcgtgtgactcaggctgtaatggtgggttgatgaacaacgcatttgagtacatacttcagtctgggggagtacagaaagaaaaggactatccatacaccgggagagatggcacctgcaaatttgacaaa

SEQ ID NO: 15588 - DNA, 409 bp, Glycine max
atcatatcattcgagctctgaatgcttctctctccataataacaaaaccaacaccctctttctctttctctcttcttcatttccaatgctgcagcaatctgcaagcttcataggcactacgacagacccaattgaattcccgagaaagaattgaagagaaaaaaccgtaaagttaggatcttttgtgtgatttcgatgggtgcgtacagagcggacgatgattacgactacttgttcaaggtggtgttgatcggagactcaggcgttgggaaatcgaacctcttgtctcgtttcacgaagaacgaattcagcttggaatccaaatccaccattggcgtcgaattcgccacccgcagcatccacgtcgatgacaagatcgtcaaggctcaaatttggaacacggaaggcc

SEQ ID NO: 15589 - DNA, 416 bp, Glycine max
tagattgctcttttctccttcgctcttccctttcccattccgattcctattcctcctttccctctcctctccgctcctccaattccccccaaactttctccctccgccgcttcgccgccgcctctctcgcttgccctccaccgccgccgccgcccctcgacgccatggcccagaaaatcggaaagtccacgcgccgccccggtgcctcctccaaggcccgcgtctatgccgatgtcaacgtcgttcgccccaaggaatattgggactacgagtccctcaacgtccagtggggggagcaagatgattatgaggtggtgagaaaggtgggtagggggaaatacagtgaggtgttcgaaggtgttcactgcaccgacggtgagaaatgtgtcattaagatcctgaaacccgtgaagaag

SEQ ID NO: 15590 - DNA, 338 bp, Glycine max
ctcctcctacttagagccattagatcgaattcgatgcatttcggatttgatctgatggttttggacttctaattagtctaagatggacaaggttacgaggttggcaacagaaaagggtgcggtggactttaccgcgagctcttggtgcctgagctatgcactcaacattctgatgcaagatcttggagcgatccctgtggttcatgaattcgtctgagaccctgtgggcaatgaaatagaggtagctataacggggtttgtgtggcctactactgttactgctgtgttcatcggaaggaatctggagttggacacctatgatggcatgatcctacgac

SEQ ID NO: 15591 - DNA, 364 bp, Glycine max
gaaaagtgtttcatttgtttctcccaagtcagaacacatcacggcacaactaaacaacaatgtcgatcgctttttccttctttactgcactctcttccaaatccgttccatccttttccctctctaccccttctctctgttttcgcctcactcccctccgccgtcccaccgatcgcttttaccctctctgctcctccgccggaggacctggcggcggatccttcggaggccacggcggtcccggacacggaggacatggtggcggcggcggcggcggcggtcacgacaacgacgacaatgagagaaagaacgaggctttattggtggtggcggaagcggggaggtcgttggagagcgtgccggc

SEQ ID NO: 15592 - DNA, 418 bp, Glycine max
gttgagtgaataatagttaataatttaaaattcacatcataatggaaccttagcatcgaaggacaaattatagaatgttgtgtgtgtataaattccaccaaagccaccccaccaaattcctcctcatcaaaccaagacatagcaaacgatccaaactcttttttcatttgcagcatcaaaatgagtggtagcaacgatggtagcggcagctggagctctaggtttttgaaggtggctagtgcagctgccgctacagccgccgttgccggcggtttatatgccattctttcatcctcaacctctgctagctctgagatggaagtgccgtttggcagcgcacggcgtgagagcaaagaacgtgacgatggtggctccgggtctcatcctcgcgagggtgccaccacggtcagtcgttgga

SEQ ID NO: 15593 - DNA, 440 bp, Glycine max
gttatcaagaggttcctcatgaagggcccatgtgcgatctgttgtggtctgagccagatgataggtgtggctggggaatttctcctcgtggtgctggatatacatttggccaggatatatccgaacaatttaatcacacaaacaagcttaagttaattgctagagctcatcagctggttatggatggatttaactgggctcatgaacaaaaggtggttaccatttttagtgcacctaactactgttatcgatgtgggaacatggcctccattttagaggttgatgattccatgggccacacatttatccagtttgatcctgctcccaggagaggagaacctgatgtcacccgtagaacgcctgattacttcttatgatgttgctgctgctgcatatcatacttggggtcgagttacatctcattctgcacaaatttcaag

SEQ ID NO: 15594 - DNA, 342 bp, Glycine max
gtctttctactccaagaaaccagctaaaagatcttttgaagacagagtcaggaaaccaacttgatatgccaacagcaaacctcgtctgtaagatgcgacgagtgaacttggattcgtgaatgttcctaactaacttcaagcaaccgagccccttccaccctctctccctttttccagacatgtttttgcgttgcagaggagattcttttacatcggcaatgcctacttgcagttttttgtcatgtgggtgaatatacctattacctacttgcatattgaatttgtaactagttacaaaagggatacaatctcctgcatattatatcttctgttttatcggag

SEQ ID NO: 15595 - DNA, 449 bp, Glycine max
  modified_base (434)..(434): a, c, g, t, unknown, or other
caactccactcttagctgccattggtttttcttcttccatttctcgtcctttctaagcttttttcgattacccatttggagattctgtcctaatggctcttgctccttccaaagtttcctccttttccgggttttctcccaaacccagtgttggggatgctctgaaaaacccaacttgctctgtttctctgagctttgcgaatgtgaaacttggaagcagaaacccttagggtttgtgcctcaactgtgcctctctcaggggtgattttcgaacccttcgaggaggttaagaagggtgaacttgctgttccaacggctccccaagtctcgcttgctcgtcagaactacgctgatgagtgtgaatctgccattaatgagcagataaatgtggaatacaatgcttcctatgcgtaccactccttggttgcatactntgacagggacaacgt

SEQ ID NO: 15596 - DNA, 433 bp, Glycine max
ctcgagccgatacggctcgagaaacacacatgctcaaccatggcagcaccaggttcagagacaaagtcaccatcatcctcgaacacgcagcttacgctgaaaccaatcccaggcagctacggaatgccgttttttggagcaataagcgacagacacaactacttctaccaccaaggacgcgacaagttcttcgcgacgaggattgaaaaacacaactccaccgtgatccgaaccaacatgcctccggggcccttcatctcctcggaccctcgtgtcgtcgcgttgttggacggtgcctccttcccgatcctcttcgacaacgacaaggtcgagaagcttcacgttctcgacggcaccttcatgccttccaccaagttcaaccggcgggtttcgcgtctgcgcctacctcgacaccaccgaacccaaccacgca

SEQ ID NO: 15597 - DNA, 335 bp, Glycine max
gttgaaaacacataagaaaaaaaatgggttcttctctgtggacctgtctgattttgttatcacttgcttctgcttccttcgccgccaacccaagagcaccaattgatgtgccatttggcagaaactatgtgcctacctgggcctttgatcacatcaaatacctcaatggtggttctgagattcagcttcatcttgataaatacacaggtactggcttccaatcaaaagggtcctacttgtttggtcacttcagcatgtacataaaattggttgctggtgattcagctggcacagtcactgctttctatttatcatccacaaactcagaacatgat

SEQ ID NO: 15598 - DNA, 416 bp, Glycine max
  modified_base (330)..(330): a, c, g, t, unknown, or other
gaactttgctgatatagaaaagcagattaatgcttttgcaaagaaggcaaatgatggaactttatcaattgatgagatggctggaggcactcttacaatatcaaatggtggtgtttatggaagccttttgagtacccctattatcaaccctcctcagtctgcaatcttgggtatgcattccatagtgagccgtccaacggttgttggaggaaatattgtcccaagaccattgatgtacgtggctctaacatatgaccacagaattattgatggaagagaggctgtgttctttctgcgacgcatcaaagatattgtggaggatcctcgtangcttctgctcgacatatgaagtgaacctctaatttaaaatggagtaaattaaacctcaaaattcaaatcccttaaggggacccctt

SEQ ID NO: 15599 - DNA, 400 bp, Glycine max
ctcgagccgctcgagccgcaagtacttccttacaatcaaaaccaacgacaactatggcaagttatcaaaagcactacgatgatcagggtcgcaaggttgacgagtatggcaacgttgagaagcaaaccgacgaatacggcaaccctgttcatgctgctagtgtcacctatgtagccaccagaactgctgctggtggttacagtgatgacattaataagcaacatgataccaccaatgcctacggcgtagacactggtagacagcattctagtggtggctacgatggtgacactaataaacatcatggaactactggtggctataatgatgacaccaatagacatcatggaacctacggtgtctatggtatagacaccgataggcaacaacatgggactac

SEQ ID NO: 15600 - DNA, 392 bp, Glycine max
gctaaatccaccttttcaaagaagaaagcaagggggtttgatgaagaacggactttaactactcacaggcaaattgatgagaaagaggaagctccagatgaagatgatggtgatgataacgtgcaatggctgacagatacatcacttgatgctgctcgtcaacgtatccaagaacagttaagtgctgtgacagctgatatggttatgctttctacagatgaaccagagaagaagaaaaaagcagcaagtaacggaaaatggggttctcagaatggtaactcaatgcactatgggaccctggttgtgggagtgaaagctaatttgaaggaaggtattggagcgaatgaattgctgcccatctttcagcacatcctgcacctgctcaagaaaag

SEQ ID NO: 15601 - DNA, 384 bp, Glycine max
  modified_base (234)..(234): a, c, g, t, unknown, or other
gttgaatcatgcaagcgtttacgcatcatgaaaggaaaggaggccattggtcgtggtcttgcaccaagagccatggcaaaatccaagaacaggagctagactagtcgcacaattcatgacctgccccatcctttgtaattgcggtgcccagttggcttagttactaaagtaaggataattaagctgcagcagacacggatggacattgctaagtggttgaattatagttaattngtgtcattatggtttgttataatatttcatcaaacaaaacaatgagatgcatgtctaattaagtactaatcatgaacaggaacataatgactctcaatcatgttgttagacttggctttcttatatatcgatctttgcttggtctgtgtg

SEQ ID NO: 15602 - DNA, 412 bp, Glycine max
aaggaacctatgctttcatcagggttcttttgagttccaacaccggggctttggaaattgattccacctgatcaagtgaaagagattcttcaggcttcatctttgtttctttcacacaatttttccaatttagagcacagaaaatgaatggccacaaaaagttgaattctccaaggggagaggttggagagatagacactagggcaccattccaatctgtcaaagctgctggtgttgatttggcgaagtagccatcactagagacagattttctgtcaagagaagatcatcagagaatgtatttgaaaaggagacgcagcttatcttggcccaaaaggaattaaacaagataaagaaacaggtggataatgctgaggccatcaaagccaaagcactttctgagcttgagaat

SEQ ID NO: 15603 - DNA, 384 bp, Glycine max
atgaacttgatcggttcatttacttcatgttacttgactagtggagcattttccaagaccgcagtgaattacaatgcagggtgtaagactgctatggcaaacgtggtacaggcaatagtaatggcactcacactacaatttttggcgccactatttggcttcacccctcttgttgctctctcagctattattatttctgccatgcttgggctcattcattacgaagaagtcatccatctctacaaagttgacaagtttgactttgttatttgcatggctgacttccttggagtcatctttataagcatggacgttggtctcatgctgtctgttggtctcggcgttcttagagcactttcatatgtggctagacctgcgccatgc

SEQ ID NO: 15604 - DNA, 441 bp, Glycine max
agaaaattctctcccttccaatgatcatctgaaattacataggatgatatttatagggttatcaagaactcttcagcattaaaaaaggtgatttataatcagaaaacaagggacagccacacagaagttatcttgaatcagaaaacatgatgctaagaagctcttcaacaccagttcttggatccctcctctcatccttcccagatagtcctaacaacaatattcactcagaaacctgtcatgcacttaaacactttccaccaaccagtgtcccacaaccttatcacaaacttacttgccaccaaacccggtcctttgcatgtggttcttctccaatctctccctcaattggtgagcttgaaaggcaaaacaaaggctttagaagagtccaatctgatgggaacttgcaagacttggcctacttttcttgcaacaatgaag

SEQ ID NO: 15605 - DNA, 365 bp, Glycine max
ttcgatcccaattcttcctcacaccattttcagttcacagggttaggtttaggtcccttgtctggtctggtgtgcaattctccccatacaataacaatacacccactttatcaaccaatcaatcaatatacctagtagtgattagatttagtgatcgatcctctcctttcgttctcaaaccgtagatttagattttagggtttctctcttaatataatcttttgacacttccgtaacaaacaaaaaaattacataaattttcccttataattattattatttggcttttatctttggattaactaggcttgagctatcacaaataattgtttcggagaatggaaagaaaaagggtgcaagttccc

SEQ ID NO: 15606 - DNA, 370 bp, Glycine max
gtttcttgcagcttcacactgtgccactgctccgttttagggttgcaatggcgctgttcctcctctacgagtcggcgtcgggttacgcgctcttggaggcgcacggcctcgacgaaatcgggcacactacggaggccgttcggaactccgtttccgacctcaacaggttcggcaaggtcgtcaagcttcgctccttcaaccccttcaccttcgccctcgacgctctcaaacagtgcaacgccgtttccgaagggctgttgactgatgagctgagaacggttttggagactaacttacctaaagttaaggaaggtaagaagtccaagttcagtttaggtgtatcggatccaaagattggttcccagatatc

SEQ ID NO: 15607 - DNA, 406 bp, Glycine max
atgaacttgttcggttcatttacttcatgttacttgactagtggaccattttccaagaccgcagtgaattacaatgcagggtgtaagactgctatggcaaacgtggtacaggcaatagtaatggcactcacactacaatttttggcgccactatttggcttcacccctcttgttgctctctcagctattattatttctgccatgcttgggctcattcattacgaagaagtcatccatctctacaaagttgacaagtttgactttgttatttgcatggctgccttccttggagtcatctttataagcatggacgttggtctcatgctgtctgttggtctcggcgttcttagagcacttttatatgtggctagacctgcgccatgcaagcttggaaagttacctgaaa

SEQ ID NO: 15608 - DNA, 352 bp, Glycine max
ctcaaaacggtccatgtcctataaatgtacttcgattgggtgtgtgtgccagtgtgttgaacctggtcaatgttacactaggatcaccaccaaccctcccctgttgcaccctcattcagggtttggctgatgttgatgttggtgtttgcctttgcactgtcctcagagctaaccttcttggcatcaacttaaacttgccaatttccttgacattgcttctcaatacctgcagagggaacatccctaatatccagtgttcttaaatttatcttctctagtggaatatacatgtggtctatgaaaaaataaactcatcgcctccatccacaattccacatgttgtctctctcat

SEQ ID NO: 15609 - DNA, 434 bp, Glycine max
cttggcatcttgtgttgtgtccctcttttaagctatttccttctcgtaacacaattggttgtgccaattgccatagtcaccaaccaattaacaaaggtatatatatcatcatatcatcaccaaatgaaaaatattgggttgttatttcttgtggtggtggctacttttgtggtggcagccacagctggtagcttttaccaagactttgaaataacgtggggtggtgagcgtgccaaaatctatgagaatggaaaccttctcacactctcccttgacagagcctctggctctggctttcgttccaaaaaagagtacttgttcggaaaaattgacatgcagctcaagcttgtgcctggtaactctgttgaaccagtaactgcctataattaatcttctttggggcctactcatgacgaattaaactttgagttttt

SEQ ID NO: 15610 - DNA, 355 bp, Glycine max
agcattccatagcctcccataaaaatgaagaatactatcttctctggtctgtttctactttgtgccttcaccacctcatacctaccttcaaccaccgcggtggtcgataccgacggtgatattcttcagaatcctggcacatactttatcttgtccgtttttcgacccggcggcggagtagaattcgccgccactggaaacgaaacttgccctctcactgtcgtgcagactctcttcgggaggggctttccagcaatattatcgtcccggttacgaatccctttcatcggcgaaggacaactcttcagcatcctgttccgtattgtgccatggtgcgccaccactccttttaagt

SEQ ID NO: 15611 - DNA, 409 bp, Glycine max
ctttagcaaattccaattcccaattcccaattcgaaacccttattggtttcagagaaccaaattgagtgatcgtgatggcaccaaaggcagagaagaagccagcggagaagaagcccgcggaggagaagaagtcgacggtgggagacaaggctccggcggagaagaagccaaaggccggaaagaagcttccgaaagagggaggcgccggcggagaagggaagaagaagaagagaaacaagaagagcgtggagacatacaagatctacatcttcaaggttctgaagcaggtccaccctgacattggtatctcaagcaaggccatgggaatcatgaacagcttcatcaacgacatcttcgagaagctttgcccagaatcttctagacttggccgttacaacaggaagccca

SEQ ID NO: 15612 - DNA, 437 bp, Glycine max
ttcaacatctggactattaactcaggacacgatgtacagaaacaggaaaggacatgccattattgcaccagtgggtcagttgctagaacgaaaggcaaacgatttcaaaatatgatccatttctccaaccgaaaggatgtttggagatttgtgcatgaattaggctacagcaatgaatcatcatctaaaaccaaaggggagttgtactcagttgtctgcagcccaatagatgcagccttggtggctactgcaggcggtgatgacagaggatttctctggaagattggccaagcggattgggcttttgagcttcaagattatggccccattgtaagcggtaaaatagcagattatgcaagtcgtcgagttgcaatgggtttcttgaaggttttctgcatctttggatcacttatcatagcattctcaaagctaacatg

SEQ ID NO: 15613 - DNA, 396 bp, Glycine max
gtttctttcttcttctacatccactgcacaattgccacatgaatcattaggtagggtttattctgcaagaaaagcaatgagtgcgtccaggttcatcaagtgtgtcactgtgggtgacggtgccgttggcaagacttgcatgctcatctcctacaccagcaacacttttcctacggactacgtgccaactgtctttgacaatttcagtgcaaatgtagttgtggatggaagcactgcgaatcttgggttgtgggatactgctggccaagaagattacaatagattaagacccttaagctatcgtggagcagatgtattcctgcttgctttctctctcataagcagggctagctatgaaaatgttgccaagaaatggattcctgagttgaggcatta

SEQ ID NO: 15614 - DNA, 443 bp, Glycine max
tttttattctacctaacaccacatggatacgttgccggaggattgtgtttccaaaattctgtcttacacatctccaccagacgcatgtagattctctatggtctcttcaaccctacgctcttccgctgactctgaccttctctggcgaactttctttccttctgattactctgacattgtctcaagggctctcaaccccctctcccttaattcctcttcttcatacaaacaccttttctatgctctttgtcatccactcctcctagatggaggcaacatgagcttcaaattagacaagtcttcgggtaagaaatcttatatcctatctgcaaggcagctttctataacgtggagcaatgaccctttgtattggagctggagaccagttcctgaatcaaggttcaaagaggtggccgagctgagaacggtgaactggttagaaa

SEQ ID NO: 15615 - DNA, 366 bp, Glycine max
gatctttcttctctttttctctctctatcctcatggctgagaatttggacgacggcgagttctggctgccgcgcagttcctcgtcgacgacgacgtcgtcgtatttccgacaccctttgaagcaaagactccgcctttgtccgacgacgccgctttgctcccgtacgcgttctaccgtggattccaccgttggtggctccagcgagaccgagagcgacgaggatacagcacactcgttgccgagcttaactggcctcttatcttgctcctgtgttgcaccttgcaccgagtcttgggcgcggcttgggtctggatatcctatatcctatctgcgcggcagctgactatgacgtggatccatgaccc

SEQ ID NO: 15616 - DNA, 415 bp, Glycine max
ccctcttttaagctatttccttctcttaacacaattggttgtgccgattgccatagtcaccaaccaattaacaaaggtatatatatcatcatatcatcaccaaatgaaaaatattgggttgttttttcttgtggtggtggctacttttgtggtggcagccacagctggtagcttttaccaagactttgaaataacgtggggtggtgagcgtgccaaaatctatgagaatggaaaccttctcacactctcccttgacagagcctctggctctggctttcgttccaaaaaagagtacttgttcggaaaattgacatgcagctcaagcttgtgcctggtaactctgctggaacagtaactgcctattatttatcttctctggggcctactcatgacgaaatagactttgagtttttgg

SEQ ID NO: 15617 - DNA, 416 bp, Glycine max
  modified_base (404)..(404): a, c, g, t, unknown, or other
ctaatatggcaattgaaaaccaagacaacactgtcagagaaatcaagccaaagaacaggagaatcatgggtgctggaggccctgatgatgacgacaataggtggccaccgtggttgaagccactgctgaaagagagcttctttgttcaatgcaagttgcatgctgactctcacaagagcgaatgcaacatgtattgcttggactgtatgaatggccctctctgctctctctgcctcgctcaccacaaggatcaccgtgcaatccagattaggaggtcctcataccatgatgtgatcagagtctctgagattcagaaggtgttggacatcactggtgtccaaacctacattatcaaccagcggcaggggtgtgtttttgaacgagaggcctcaaccaaggccagnaaaaggggtcac

SEQ ID NO: 15618 - DNA, 378 bp, Glycine max
atttgacaggttcatcatcataaccttcaatgaaaagaaatggctgaggcaagcattggcagcaaaagcagcagatggtctttacagggaatgacagctctcgtcaccggtggatccaaaggaatcggatatgctatcgtggaggagttggcacagcttggagccactgtgcacacttgcgctcggaacgaagctgaactcaatgaatccttaaatgaatggaacacaaaaggatacagagtaactggttccgtctgtgacgtggcgtctcgtgcagaaagacaagacctcatagctagagtctccaatgagtttaatggcaaactcaatatccttgtaaacaacgtgggaaccaacgtaccgaaacatacccctgat

SEQ ID NO: 15619 - DNA, 381 bp, Glycine max
  modified_base (49)..(49): a, c, g, t, unknown, or other
gggatattttgcatacatggcaattgatagtctcccagggaatcaagtntgggaaaggatatcgcttctgatcatcccaccaagtcgacgctataagatattggaaggttatcatgcctcgtttgtggagtcagtaccattcaagaccatagctgtattcacaatattacagtttgtgtatttcctaatctgttttggagtgacatggatacctgtaggaggaatactttttccattaccatttttccttctcataactataagagagcatttgcttccaaagatattcaaacctaatcatcttcaagaactagatgcatctgggtacgaggaaattggtggtgctccacatattacacataatataccaccaagggaaaa

SEQ ID NO: 15620 - DNA, 333 bp, Glycine max
ggcttcttctcctcaggtaaatggaaaattggtgaagcgggctatgttgtataaattggaggaaatgttttaattttgtttctcaagttcagcttcttgctgtacaagtaatagactattattagacttgccagaaatcaccaactgggttgctctttctaaccaggttctctaagtcaactttcagtttttgattgttgaggatggtgctggttttggccctgggggatttgcacataccccacagggctcctgatcttcctgctaagttcaaatccatgcttgtccctggcaagatccagcacataatttgtacttgaaaattaatgtatt

SEQ ID NO: 15621 - DNA, 345 bp, Glycine max
ctcgagccgctcgagccgatccaagtaaccaaacacacccgccgagaatgatcccgcgctaattcgaagacggagacaaccaaacgccatagtagtgccgaggcggtgacgatggatcccatcatcctctccgacgaagaagacccttcaacgccgttcccgctccgtcccaagaaacgccgaaccgaaccggatccaaacccaaacccaaaccgcaccgtcttcgtcatcgacgatgacccaacccctcacaaatccgccacaccttctatcgttcccgagactccaatgtccgcgctattcgattccgacattgcaatcgtcaaatgcaccataccttccgat

SEQ ID NO: 15622 - DNA, 318 bp, Glycine max
aatttgatgagttgatggcggctgctgctgctgctgctgaagatggtgaaaatggagatgttgaagagcacactgcataagttcatcgaaggttatacctgtcttgggtgaagatatgtactctttaatgaactgcgcttgtgttgttagtatgtagcggacaaacaaagcaaagaattcgttatatagactggcctgcaatgttgaactatgcaattccttcatttcttttccctataaatagaggctttttgtgtcttagctgttgctgtgttcagttttcgatggataaaaagcattggcacatttaacttgttc

SEQ ID NO: 15623 - DNA, 425 bp, Glycine max
  modified_base (354)..(354): a, c, g, t, unknown, or other
cacaactactacaagtacttccttacaatcaaaaccaacaacaactatggcgagttatcaaaagcactacgatgatcagggtcgcaaggttgacgagtatggcaacgttgagaagcaaaccgacgaatacggcaaccctgttcatgctgctagtgtcacctatgtagccaccagaactgctgctggtggttacagtgatgacattaataagcaacatgataccaccaatgcctacggcgtagacactggtagacagcattctagtggtggctacgatggtgacactaataaacatcatggaactactggtggctataatgatgacaccaatagacatcatggaactataccggnctatggatagacaccgataggcaacaacatgggactactggggctatgtcgtgacactgtaggcaacatgg

SEQ ID NO: 15624 - DNA, 359 bp, Glycine max
gggagtttccccctggcgatttccctttaagtgtccctttttgcttctagcatcaatatactgcagcgcttcaggagcaggacaaggtttatctttgggagttctcaatcttgcaattgtggtaccacagatggggtgtctgcattaagtggtccttgggattccttgtttggtggtggcaacttgccggctttcatggtgggtgctgcggcagccgcgttgagcgccataatggcgattgtcttgctgccaactccaaagccagctgatgaggccaaggcttcaagcatgatggcagggggctttcactagttaaatgggtttttgattgttcagttttgtccccctgctttaataga

SEQ ID NO: 15625 - DNA, 437 bp, Glycine max
gcaaccagacattcccaatacatggagagcaatggaggcactctatgactcagacaaggctagagccataggagtgagcaatttctcttcaaagaagcttcaagatttgttagatatagcaagagtggttcctgctgttaaccaagtggaattgcacccaggatggcagcagccaaagttgcgcgcattttgtgaatctaaagaaattcatctatctggatattctccactaggttcaccagcagctctcaaaagtgatattcttaagaatcctgttgtcacagagattgcagagagattggggaagacaccagcacaagttgcccttcgatggggcttgcaagcaagtcatagtgtgcttcctaagagcactaatgagtccagaatcaaggggaaattttgatatcttgactggtctattcctcaagatttgatga

SEQ ID NO: 15626 - DNA, 445 bp, Glycine max
tggacgctgatgttatcaccattgagaactctcgctccgatgagaagctcctgtcagtcttccgtgaaggtgtgaagtatggtgctggaattggccctggtgtctatgacatccactccccaagaataccaccaactgaagaaatcgctgacagaatcaataagatgcttgcagtgctcgagaagaacatcttgtgggtcaaccctgactgtggtctcaagacccgcaagtacactgaagtgaagccagccctcacaaacatggttgccgcagcaaaactcatccgtaacgaacttgccaagtgaatggtataagaaagtagaatctacaagttccatggttcttcttttaatatacacccaaggaaaattttctataatggggtggttcaattacccggtgtggaatatttagatgtttagcatgctctgtgagcaattgattc

SEQ ID NO: 15627 - DNA, 446 bp, Glycine max
  modified_base (416)..(416): a, c, g, t, unknown, or other
gtcatttaatccaaacccgtgttctgatgcatggagtttggaattgctgaagcgtaccggatttcattgtgatatcatttgtgtcactggatggactgccactccaatgcaggatgttcaggttacaattgattggtttatttcctctcaggaatgtgttcccaggacctattgtgttttaaatccacaaaatccttttgtgttaaataggtggatggggaaactgacttttccccagggcacttcccgaagtgttaaaagaatgcctctttctatagggggaggagctggtgcaaagaatgctattctcatgaatatgccaaatgctgttctttcaatgtggagatattttgttggagatctcgtctttgaagtttctaagatgacttctccctacattaaatgtacagtctctntcttcatagcatttggaaatttggctgatg

SEQ ID NO: 15628 - DNA, 445 bp, Glycine max
accctcctctttattttctttaacacctcctcctctttctgttctgagcaagtatggccgtggaattcatgatggggtacaggaacgacactttcgcggaggataatgcggttcgtgaagctgcgtcggggctagagagcgtcgagaaactcatcaagttgctgtcgcatactcaacaacaataccagacaacctcaaagtcttccatggaaaacatcgacaccgactacacagctgtcgctgacgtcgcggtttctaagttcaagaaggtcatttcgcttctgggccgcaccagaaccggtcacgcgcgttttagaagagcccctgtgcctgtgcctgtgcctgtggcttcacctccaccttcggaaccgagagtctaccgtgctacgccgctgcagcagatcccgccacccacccttcacactcactctgtcactgaccactc

SEQ ID NO: 15629 - DNA, 348 bp, Glycine max
  modified_base (333)..(333): a, c, g, t, unknown, or other
ttcgggagaaaaagcaatccactcagagagctagaagaattcaacgatgcctcactatgatgataaatacggcaatacccgcctctatgtggggcacttatcttcgaggactcgttcccgggatctggagcgtgccttcagcagatatggaagagttcggggtgtggatatgaagaatgatttcgcctttgttgattttagtgatcctcgagatgctgatgatgcaagatataacttggatggtcgggatgttgaatgaagtcgtattattgtggaatttgcaaaaggggctcctcgtgggtcccgggaatattttgggggcaggtcctcctnctggctctggacgct

SEQ ID NO: 15630 - DNA, 375 bp, Glycine max
  modified_base (273)..(273): a, c, g, t, unknown, or other
  modified_base (292)..(292): a, c, g, t, unknown, or other
gggcatcctacaggaattggagtggaaaaatggcacaatataaaatgctttatcattaagagtttgaaccatcaaaacatccatttgtcaattgagaaaggaatttgggctactcaaatcatgaatgaaccgattctagaagaagcttttcataattcaggcagtgtaatccttatatttagtgtcaacatgagtggttccttccaagggtatgcacaaatgatgtcctccattggaagggggagagacaatgtttggagtgagggaactggntaaagtaatcctctggggncgagttttaaggtcaaaatggatgtgtttgaatgatttgcctttccacaagacactgcatctcaagaaatcgttgaatgacta

SEQ ID NO: 15631 - DNA, 427 bp, Glycine max
  modified_base (317)..(317): a, c, g, t, unknown, or other
ccaattcccactcaaccaccaaaccctattcagcatttcccccaaatcaccgtcacaccatgggctcctccgcgatggtgttggacccgaaaccctcatcggagcctccgccgttcctcccgtcgacgaaatcggactaccttcaaggcagcttcggcggcgacgccaccgcctccgacgaggacgacctctacagccgcctgaaatccctccagcgccagctggagttcatcgacatccaggaggagtacgtgaaggatgagcagaagaatctcaagcgccaagctgcttccgagcgcatgaggaggtgaaaccgnatacagtcgggtgccgctcgtcattggcccagttcatggagatggttgaccagaacaacggatcgtcggatccaccaccggatccaactactacgtcaggatcctcagta

SEQ ID NO: 15632 - DNA, 330 bp, Glycine max
ggtgaaaatggcgcagtgtgtgaccaacacattcgtgcaaggaaaagcctgtcttccagttgcagcagctcccactaaaaatgttcggagagcggttcagtgcggtgtgtggtgcaagaagaaggagatacacccgcaattctacgaggaatcgaaggtgtactgcaacggggagctggtgctgacgacaggtgggacccagaaggaatacgtggtggacgtgtggtcggggaaccaccccttctacctcggaagccggtcggcgtctatggtcagcgacgaccaggtcgagaagttccgcaagaagttcggggagctcaaagagatcat

SEQ ID NO: 15633 - DNA, 380 bp, Glycine max
  modified_base (25)..(25): a, c, g, t, unknown, or other
cgaaaccctttctttatcgccaganaattttcaaaccctaaaatccgaatttcgctgatgatctttcctaatcgtcatcataccaaacaatttttcttcatatctgtctccgggagagtcgctttgacgggaaacaagggttttcgctgcaattctaatcggtcaaattggaatcgtcggatcaatttgtcatgaagttcctggagtgttctgctttagatcggcttaatgatttcttgggtaatttgaatctgggagaacgtactatcaaaggatgccttgaagcttatagttgcaaacatgctggatcggataaaaaactcttcatcagtttggagacagagattcttgattatcttgggaaatcatccgacactgat

SEQ ID NO: 15634 - DNA, 413 bp, Glycine max
gcgatgggcaacactagcagctatgtttcaagcagcagcagcagcagcaaatggctgggcttcgtggcggccgtgtggattcaatgcatctccggcaacaactacactttctcaaactactccgacgccctcaaatccctcatgcaccttactcagctccaactcaacaacctcttcgtcgctaaagacgttggcaaagcctttgggcttctggcgggcctcgccttcgaccgcttccccacttgggctattctcctcattggctccgtcgaaggccttattggctaccgagcccaatggcctcgtggtagccagagaattcagcccctcccttactggcagcttggcgtgtttctctgcatgggaggcaacagcaccacttggatgaacacctgccgcttggtaacatgcat

SEQ ID NO: 15635 - DNA, 437 bp, Glycine max
caagattcagcaagtgcgttttggaagcagagaccgaaatacttcgagatggcccgtacaaagcaaactgctcgtaagtcaactggaggaaaagctcccaggaagcagcttgcaaccaaggctgcacgtaagtctgcaccaacaactggtggtgtgaagaagcctcatcgttatcgccctggaactgttgctcttcgtgagattaggaaataccagaagagcactgagctcctaatcaggaagcttcctttccagaggttggttcgtgaaattgcccaggatttcaagactgatctgcgtttccagagccatgctgtgcttgcattgcaagaggctgctgaggcataccttggtgggctctttgaggacactaacctgtgtgccattcacgccccaacgtgggactattatgcccaaggatattcagctggcaagaa

SEQ ID NO: 15636 - DNA, 447 bp, Glycine max
gagaaacatggcttccttaagctccttagtgctgctccttgcaggggtaattctatcccctcaagttcttgcaaactatgagaatcccccagtgtacaagcctcccactgagaaaccaccagtttataagcccccagttgagaagcctcctgtttacaaacctccagttgaaaaccccccaatttataagcctccagtagagaagccaccagtgtacaagcccccagttgagaaacccccagtgtacaagcccccagttgaaaaaccaccagtgtacaagcccccagttgagaaaccaccagtgtacaagcccccagttgaaaaacccccagtttacaagcccccagttgaaaaacccccagtgtacaagcccccagttgaaaaaccaccagtgtacaagcccccagttgagaagcccccagtttacaagcccccagttgagaagcc

SEQ ID NO: 15637 - DNA, 426 bp, Glycine max
  modified_base (384)..(384): a, c, g, t, unknown, or other
cttcaggcacatactcccgcaggttaaatggcgaggatcaaacctcaggctctgctacagcaaagcaaaaggaagaagggtccttctcggataagtgccgtgactgttatattttactttttgattcttgccttggttgggtttttcctgtttgcttcgtacagacattggtccagcagatcaagattacaatccgaagatcacttgtcagtctccgagggtgaaaatacttttgtggactccaagaaatctgagctgcctggatatgctgttttaaatacctctaaaggttctataataatagaactgtacaaggaaagtgctcctgaagttgttgatgaattcattgacttatgtcaaaaaggacacttcaaggggatgctntttcacaaagtaattaagcactatgtgattcaggcaggggat

SEQ ID NO: 15638 - DNA, 438 bp, Glycine max
cgaatcgctcgcgctactcgttatgtttccgcttggtgagtcggagtgtgcttcgctcgcatctgattctgtgaagattggctatctatcgcggatgttgacgcataactcgttcgacgtccgagtcaactcggccgcgttgatcgagatcgtcgtcgccgggacgcactcgccggagctacgcgcggaggtgagcagtgtcgacgaaatctacgacggagtggtggatctgctccggagcccgatctcgcacccgcgcgcgctcaagatcgggatcaaggccttgttcgcgctttgtttggtgaagaatacgcggcagaaggcggtggacgccggcacgccggcggttctagtcgaccggctcgcggacttcgagaagtgcgacgcggagagggcgctggccacggtggagctgctctgccggattccggcgggatg

SEQ ID NO: 15639 - DNA, 448 bp, Glycine max
gggtcatggggatttgaaggataagccatggtggcaaaagatgcaaactcgtgaagagttggttgaagcttccgctaccctcatatggattgcttcagctcttcatgctgctgttaactttggacagtatccatatggaggtttaatcctgaataggccaactattagcaggagattcatgcctgagaaagggtctcctgaatatgatgcgttagctaagaaccctgagaaggagtttttgaagactattactggcaagaaagagaccctcattgaccttacaattatagaaattttatcaaggcaccgcatctgatgagttctaccttgggcagagagaatgcggtgactactggacttctgatgccgggccattagaggccttttaaaggtttggaaagaatcttgaagagattgaaaagaagcttatagagaagaacaataatga

SEQ ID NO: 15640 - DNA, 361 bp, Glycine max
ctctagagtaatggcggaatcagctagaattttctaataatggccaaagacgttgagcaggttacagagcaaggtgaatactccgcgaaggattaccatgacccacctgcggcgccgttgatcgacccagatgagctcactaagtggtccttgtacagagccgccatagctgagttcatagcaacactccttttcctttacatcaccgtgttgaccattattggctacaagagacagagtgacaccaaaatccccggtaacaccgagtgcgacggcgttggcattatgggcatcgcttgggccttaggtggcatgatcttcatgcttgcttactgcaccggcggcatctctggtggacaca

SEQ ID NO: 15641 - DNA, 180 bp, Glycine max
  modified_base (164)..(164): a, c, g, t, unknown, or other
ggagacaagaaaaatgagccatggtggcctaagatgcaaactcgtgaagagctagttgaagcttgcgctatcatcatatggactgcttcagcacttcatgcagctgttaattttggacagtatccctatggaggtttaatcttaaaccggccaactcttagtangcgattcatgcctgaa

SEQ ID NO: 15642 - DNA, 263 bp, Glycine max
cttcattgccatgttgttgcctgagacaaagaacatccccattgaagaaatgcatacagtctggagatcacattggttttggtcaaagattgttccacatgctgatgatgatcgcaagcctgaggctgcccaaagttgaataaagaatgccaatgatatataaggagtgaaaatggaagaagaaaaaaaaaaagaggttgaattcctatgtatcacaagaaatgttgaattattgattagggaaagaatgctctttttcactc

SEQ ID NO: 15643 - DNA, 306 bp, Glycine max
acacaccttgcaaaaaccgctattgttgattaatacctatattctccatatattgacactcattcaactatggaaaactcaacaatgggtagtaattgtcttaccacatgttgtacggggaatttcttcaagaaaaagaaatctctccccattgataccatattcaagcttcctgttcctgttgcaaattcttcttggcctcaaggtggtaattttgctagtggaataatcgatctgggtgggctacaagtgtctcaaatatcaacattcaacaaagtatggggcacctatggcggcggaccggac

SEQ ID NO: 15644 - DNA, 383 bp, Glycine max
gtttgttggactgaacaagggtcacgtcgtcaccaagaaggaattggccccacgcccctcagatcgtaaggggaaaacaagcaagagggtgcactttgtgaggaacctcataagagaggttgctggttttgcaccctatgaaaagcgtataactgagttgctgaaggttgggaaggataagagggcactgaaggttgcaaagagaaagcttggaacccacaaacgtgcaaagaagaagcgtgtggaaatgtccagtgttctcaggaagatgagggctggtggtgctgtgagacacgaagaaataagtcttatttatttactcttttccagattcactagatggacctgtgtattgatggacgagctttcatatttttgctttg

SEQ ID NO: 15645 - DNA, 259 bp, Glycine max
ggcagttatccggggtatcctggttaccaaccacctcagcaacagcaacaaataggatatagttgagaagagaatgttccttttcttctgtaatcttttgtgatacttatcgagttgcgtgtctcttctcgtctcgtggaaaaccgactctgctactctttttcttttttccccttgtttgcttaataacattaaattttatcggagccgccttttgtatccataatacaaacaaaaaacataaaaagtaaagaactga

SEQ ID NO: 15646 - DNA, 350 bp, Glycine max
gcatgaggtttcatctcggacaaaggatcatagagttgatgtgagaagactgtcttaccgtgaattacaagtttttagaaaacgatggcagaaggcagttgaggaggatgaatttttgactattagtatttgttattgaaatggatcgacccaacattcatcctcctcaactgcctcaaactattagcaatttagcaccttctactactttgtaatcgttcaagagttgtgaactgtgaagaatgagttcaacaagccgtgcttggacttggagcgtggcagcaagtgttggagtggtggaggccttgaaggaccagggtatatgcaggtggaacagtgtgatgagatca

SEQ ID NO: 15647 - DNA, 354 bp, Glycine max
aaaaaaaaaaaaaaaaaaaaaaaaaaaaaaaaaaaaaaaaaaaaaagagaaagggaaaaaaaaaaaaaaaaaaaaaaaaaaaaaaaaaaaaaaaaaaaaaaaaaaaaaaaaaaaaaaaaaaaaaaaaaaaaaaaaaaaaaaaaaaaaaaaaggggggccccccaattatgggccttgtaaccccggaaataaattcggacccggcccttgaggggtaccaattttccctaaaagggggccaattaaaaattggggaaaaaaagggcaaaaatttttccctgggaaaaattttattcccttaaaatttcccaaaaaaatacaacccgaaaccataaagttaaaacccggggggcc

SEQ ID NO: 15648 - DNA, 366 bp, Glycine max
aaaaaaaacaaaatttaaataaaaaaaaaataaaacacataaaaaaagtaaaggataaataggtaaataaaacaaaaacattaaaaataaaaaaaaacaaaataaaataaataaaaaaaatataatacaaatataaaaaaaaaacaaaaaataacccatcatataacatataatcaatataccaccaaaaaatcactaaccttaaaaaaaccactttacaaattttcttaaatatactccaatttaataactaacattacaaaaatctacactcaattcacaataaattaaaccccacaatactataaaaaaactattcatatcccaatcaaaaatatttaatcccctatcccttaaaaaacttac

SEQ ID NO: 15649 - DNA, 386 bp, Glycine max
caatcacaattctctgtgaactttctagaatctcgttcttcctttgccttctccttcttcttcaaccctttttctttctctttctttcgcactttcattctctaaaaaaaatctaagtccctttggtcttcatcttctgttctgatccaggtatggcttctaaacgcatcttgaaggagctcaaggatttgcagaaggatcctcctacctcatgcagtgcaggccctgtggctgaggacatgtttcactggcaagccacaatcatgggacctgctgatagcccatatgcaagtggtgttttcctagtttcaattcattttcctcctgactatcccttcaagccacccaaagttgcttttcggacctaaggtgttcacccaaacatc

SEQ ID NO: 15650 - DNA, 451 bp, Glycine max
cgtgacttcatcgaagtcatcttcgagaaccctggcaaggtcattcagtcctacaaccttgacggctattctttcttcgctctcgcggttgagccagggaagtggaccccagagaagaggaagaactacaaccttcttgatgctataagcaggcacaccattcaagtgttccctaactcttgggcagcaatcatgttaacctttgacaacgctggaatgtggaacttgaggtcggagatggcagagaatcgttacctgggacaacagttgtacgtgagtgtcttgtctccaaacaggtctctaagggatgagtacaacctcccagagacccagcttctatgcggaattgtcaaggatatgcctaagccaccaccttactccagttaagaaagtttttctcttctgagatgtatatatatacaccaccagtaagggcggagctagaatttct

SEQ ID NO: 15651 - DNA, 376 bp, Glycine max
ctcttttgctgcatcagaggagttgtaaattaagagcatggctgcagaagctcttgtatcatcatcttctcttaccttctcagcggaggctgcaagacaaagtcttggaccaagatcactccaatctccatttggcttctccagaaaagcctcctttcttgttaaggcagctgctaccccccctgtcaagcaaggatcagacagacctttgtggtttgcatcaaagcaaagtctttcttacttggatggcagccttccgggtgactatggatttgaccctctgggactttcagaccctgaaggaacaggagggttcattgagccgaaatggctagcatatggtgagataatcaatgggtcgtatgcaatggtgggg

SEQ ID NO: 15652 - DNA, 391 bp, Glycine max
gccaatgctatacctgtattctcaggaataccaactgtggcctgtgctatgaatagttcttttagggggcgtgccagttctgatatttacaccatctgctctcaagactgtgaattatggaatcctgcttgcacaaaagcaatgactatgtcatttaatccaaacccgtgttctgatgcatggagtttggaatttctgaagcgtaccggatttcattgtgatatcatttgtgtcactggatggactgccaccccaatgcaggatgttcaggttaccattgattggtttatttcctttcaggaatgtgttcccaagaacctattgtgttttaaatccaccaaaatccttttgggtaaaaataggtggatggggaaactgactttcccccagg

SEQ ID NO: 15653 - DNA, 408 bp, Glycine max
gacacataaacccggcggtgacatttgggctggttttggcgaagaagttgtcgttgcccaaggcgattttctacatcgtgatgcaatgcttgggtgctatttgtggcgctggcgtggtgaagggtttcgaggggaaaacaaaatacggtgcgttgaatggtggtgccaactttgttgcccctggttacaccaagggtgatggtcttggtgctgagattgttggcactttcatccttgtttacaccgttttctccgccaccgatgccaaacgtagcgccagagactcccacgtccccattttggcacccttgccaattgggtccgctgggttcttggttcacttggcaaccatccccatcaccggaactggtatcaaccctgctcgtagtcttggtgctgctatcatct

SEQ ID NO: 15654 - DNA, 325 bp, Glycine max
tcgtaattggctacatagagttccagaggaatgcagagctcgacccagagaagaggttgtacccaggtggcagttacttcgacccattgggcctggcctcagacccagagaagaaagccaccctgatctggatcgaggtactcgtaattggctacatagagttccagaggaatgcagagctcgacccagagaagaggttgtacccaggtggcagttacttcgacccattgggcctggcctcagacccagagaagaaagccacccttcaattggcggagatcaagcacgcccgtcttgccatggtgggcttcttgggccttgcagt

SEQ ID NO: 15655 - DNA, 442 bp, Glycine max
gcacaaagcacgctcatcctagagttacaaaaatggcagcagcctcctccatggctctctcttccccatccttggctggcaaggccgtgaagctgggcccatcagcccgcgaagtcgggagggtcagcatgaggaagaccgtcaccaagcaggcctcctccggaagcccatggtacggcccagaccgcgtcaagtacttgggcccattctctggcgagcccccgtcctacctcactggcgagttcccaggtgactacggctgggacactgctgggctttcggccgacccagaaaccttcgccagaaaccgtgagcctcaagtgatccacttcaggtgggccatgctcggggccttggggctcgtcttccccgaacctgtgtcccgcaaccgggtcaagtttggagaagctgtgggttcaaggcccggtcccagatcttcagc

SEQ ID NO: 15656 - DNA, 364 bp, Glycine max
cgcaagctgtttgttagggagagaagaaagagagaaaaagaaaaatgaaaggacggtggtgagtgctgcttctgcttcatcatcatcagagaagaatggcggctactgtgtcttctgcgtggtcaaagcccggcgcgtgggctctcgattccgaggaacacgaagccgaactccttcaacagaacaacgacaagccactcgccgacttcccctccctcgccgccgccgctgccaagcccaagaagaagaaggcccagacctactccctcgccgaattcaccgccaaacccgacacctcctttgccgaccaagatcccgtcgtcctccccaccggcccccgccagcgcaccgccgaggagctcga

SEQ ID NO: 15657 - DNA, 255 bp, Glycine max
ggctcaaggctgccttggccgccatcgacacctgcgacgcttccattcccggagacgacgacgttctctccgtcaagagtgccatgttccgcaggctgtgcaacattgccattgccatcaccaagcgcttgaacaaacctcttaaattctaaacttgtcgattgtcctttcctttaactcttttttttttttttcatcctgtgtcaatcttaatctgaatatcttccgtaatttcatttacggtattaacagtgc

SEQ ID NO: 15658 - DNA, 355 bp, Glycine max
gaaagataaagcattccatagcctcccataaaaatgaagaatactatcttctctgctctctttctactttgtgccttcaccacctcatacctaccttcaaccaccgcggtggtcgataccgacggtgatattcttcagaatcctggcacatactttatcttgtccgtttttcgacccggcggcggagtagaattcgccgccactggaaacgaaacttgccctctcactgtcgtgcagactctcttcgggaggggctttccagcaatattatcgtcccggttacgaatccctttcatcggcgaaggacaactcttcagcatcctgttccgtattgtgccatggtgcgccaccactc

SEQ ID NO: 15659 - DNA, 340 bp, Glycine max
ggctcgaggaagcagaagccatggaaaccaacacactcccaaaccagcagacaccaaaaaccaaaaggcaaatcttcatactctcaggtcaaagcaacatggccggtcgtggcggggttatcagggacgctaacaaccgtaagcggtgggacggcgtggttccgccggagagccgctccgatccatccatcctccgcctctccgccaccctccaatgggaacccgcgaacgagcccctccacgtcgacattgactccagaaaggcttgcggcgtgggccccggcatggtcttcgcgaacgcgctgctgcggcggcgcgtggtggtgggcgaactgggtct

SEQ ID NO: 15660 - DNA, 370 bp, Glycine max
  modified_base (137)..(137): a, c, g, t, unknown, or other
  modified_base (141)..(141): a, c, g, t, unknown, or other
ccgcttcaagggggtttaccagaccgtggactaatcacctatggcggaaaaccacgacatgaagaacccagccgtgaagcggattctccaggaggtcaaggagatgcaatcaaaccctttccgatgactacatgagncctnccttcttgagggaaaatatatttgaatggcaatttgcgatcagggggcctcgtgatactgaatttgaaggtggtatttatcacggacggattcagctgccttcagaatatcccttcaaacctccttcgtttatgttgctcacacctagtggccgttttgagacccaaaccaagatttgcttgagcatatcaaatcatcaccctgagcattggcaaccatcatggagcgt

SEQ ID NO: 15661 - DNA, 449 bp, Glycine max
gttgattttttttatgaatgcagagaaggtggaagaagacactaaagctgcgatttttatctcaaactccatgaatacatgttcgttttcttgctttgtctatcaaagcttaaatttgtgttttgagccttctccgacgtgcttcccctgccattttcaatttttatctccaaactccatgaatacaggttcgttttcccttcccgtcttcttctatgttttctttttttacctctatttgcatttgtatgcgttttttattttttcactgcatgttcattgtttcttctaaagctgcgatttttatctcataaagcttcgatttttatctccaaattccatgtacagaggttcgttttcttgctttctctatcaaagcttaattttttttgtgttcccgagctttctttgtcgtggttcccccgccattttcattttttatctaaaaa

SEQ ID NO: 15662 - DNA, 425 bp, Glycine max
gatcagtgcctcatttttctttcagttttcctgcttcttctgttggtcaactggttttgagattgccattttcttatcttgtttagtttagcttgtttggttgagaggaattaattattttgtataaaacaatgaaggagagtgtaggaaaccctttgcgtcttcaatctgtgaatcatatctccctcatatgcagatcagtggaacaatcaatggatttctatcagaacgttcttggattttaccccatcaggaggcctggctctttagattttgatggggcatggctattcggctacggaattggaattcatttgctagaagcagagaaccctgaaaagttgccaaagaagaaggaaattaatccaaaggataatcatatatctttccagtgtgagagcatggttgcagtggagaagaagctg

SEQ ID NO: 15663 - DNA, 448 bp, Glycine max
tcggatataaacaataaaataaaataaaacagaagagaaggaaacagaagtaaaaaaaaaataaaatgggttacacaagatcttctcttctgtccgtggctcttgtcttggcattctgttcaagcattcagggtttggacatcaccaaattgttgggcgaatatcccgaatatgcacagttcaacaaatacctaactgaaaccaagctggcggaccaaatcaacagccgtaacgccgttacagtccttgcccttgacgacgccgcaatggcttccctctccggcaagtcgcaagacgccgttaaggccatccttagcacccatgtgctcgtcaacttctacgacgagaagaagctgatggaagccgaaggtagtcgcaccaaggtcgaaaccctattccaatcctccggtgtcgccaagcccaaccagggttacatctacgtggcgct

SEQ ID NO: 15664 - DNA, 410 bp, Glycine max
ctctctctcttcttcttcttcttcttcttgcacgtattgttctaatgcacaaaaataatggccttaaattacaacattgccctcgccttctctacggttctcacgctgcttctccttcccttaccaacccttggggagctcgtgcaggagcagccactagtcctcaagtaccacaacggccaactcctgaaggggcgcatcaccgtcaatctcatctggtacggcaccttcaccccgatccaacggtccataatcgtggacttcataaactcactaagcagcgcgccaaacgcgccgcttccatcgactgccacgtggtggaaaaccacggagaagtacaaggggggaggatcctctgcgctcgtcgtagggaagcagttcctacactcggctaactcgttagggaaaaa

SEQ ID NO: 15665 - DNA, 423 bp, Glycine max
  modified_base (30)..(30): a, c, g, t, unknown, or other
gtgattgtggtgataatgtttgaaagattntgaatttggagagctggaagaagtattgcagtattatcctcaagggtaccatggagttgataaggaaggtaggccagtctacattgagagacttgggaaagcccatccaagccgcctaatgcacgccaccacaatagatcgatatttgaaataccacgtccaggagttcgagaggaccctgcaggagaaatttccagcatgctccatagcagcaaagagacggatttcttcaacaacaacaatatttggatgtacagggcttgggaatgaaaaatttctcacgtactgctgcaaatctcttgtctgctgtgacaaaaatagatagcagttactatcctgagacattacatcacatgtatgttgtcaatgctggttctggctttaagaagatgc

SEQ ID NO: 15666 - DNA, 435 bp, Glycine max
caacactaaaatggcacttccatacccattttcctatctcctcttgctccttctaattctcttatcttctctcccaaacatttcccaagccacctctcgtgccccaaatcgcatgttagccttggttcaaaaccaaccgcttgtactaaaataccacaagggtcctcttctaaagggcaacatcaccctccatttgctatggtacggtacatttacccccacgcaacgatcaatagtcatcgatttccttgaatccctaacctccacgtcagcacctggagccccttcagtttccacgtggtggcaaaccaccgagagctacaggggaggcccctgcaccctcgtcgtagggaaccaaatcctcgatgaaacctactccctcggaaaatcactaaaaaacgaccacctcgtagctcttgcgtcgaatcctaaact

SEQ ID NO: 15667 - DNA, 355 bp, Glycine max
cacattcaaatccaaatggccctttacattacactaataattggcctcctagtaaacaccctagtactctataaatagcatttgcatgcaccttagtcttcaccaaaatactcctcttggcatcttgtgttgtgtccctcttttaagctatttccttctcttaacacaattggttgtgccaattgccatagtcaccaaccaattaacaaaggtatatatatcatcatatcatcaccaaatgaaaaataattggttgttttttcttggtggggtggctaacttttgtggtggcagccacaggtggtagcttttaccaagactttgaaataacctggggtggtgagcgtgccaaaat

SEQ ID NO: 15668 - DNA, 315 bp, Glycine max
caacatacacaaagcaaagcatgggagtgactctggagtttatgacacagaatgacgttatgtgccagcaaatattgagaacatattcagtaagtatgctcgtacagtacctgaacagctcacacttggggagctctgggacttgacagagggaaaccgaaatgcttttgacatatttggctggcttgcagcaaaatttgaatggggggttctgtacattctggcaagggatgaggaaggtttcctgtctaaagaagctgttagaagatgctttgatgggagcttatttgaatactgtgcgttaatgcatactac

SEQ ID NO: 15669 - DNA, 440 bp, Glycine max
agaaagaaattaataaataatttctagagtccagaagtgaacaaccctgctccaccaccacgtaggctttacatgtcccaacaactctcaacatatgatgtattggcacaacatctctgcctttattatggtttatatttcagccacatatataagacccttacattactacatgcatacattttttattcttctacataaactataaccatatactatatcctccacatacatgacaagacactgtacgtacgtaagtacatatgcagcaaatttattcaaagacaacaatattatatatatgcatgcatgcatgatgcacgatgcatctacttgtcactgtgtcctccaggaagcttctccttaatcttgtccataatccctttcttctcgttctgatcaccatgagattggtcatgctgacgatgttccttcctata

SEQ ID NO: 15670 - DNA, 458 bp, Glycine max
ctccctctcgattttaacaaccaactgccaaataattaataatacagtaacgtaaataaaccgaactctggttaatcattgtgacacgttattttaatttttggtagaaagtaaacaacaaaaaattaaatttgattgttgcttattaaagagagggggagggagacaagatacaccaaagtcgtcgctcatggaagacttactcggccttttaaggattcacatcaagcgcggtgtcaacctcgccgttcgtgatgtcaatactagcgatccatacgtcgtcgttaagatgggcaagcagaagctgaagactcgtgtgattaaaaaggatgttaatcctgagtggaaggaagatcttacgctttctgttacagatccaattcatccatttatactgacagtgtatgactatgacactttcagcaaggatgacaaaatgggagatgcagaatgtgaca

SEQ ID NO: 15671 - DNA, 439 bp, Glycine max
  modified_base (201)..(201): a, c, g, t, unknown, or other
ggcagaaacccggacgaactaaattttcaaattttgtttccgatctctgaagaagagagtgatggcggaaccttggagaaacatcgacgtggagaagctgatctcgtacagcgacgacctcgtcaaggtgttgtcggagggtccgcgcgacctcaacaacctctctcactctctccaacaaacacgcgccctttcttcctnctgcgactccgacctcaatgaagctcgctccttcctgcatgactatcagaacaaagtagatgcatgcaagcagaatatagaggaagctagatccgagactgctgctgatggagacccggatcttctacaaagagaactggaggaagaacttgagaaagaacgctggttgaaagaagagtttagagcccatcgtgatgagtttaatgatctagaacagcaatggatttctgtccaagag

SEQ ID NO: 15672 - DNA, 62 bp, Glycine max
caagattattgtaaaaaaaaaagttgtgattcattcaataatgaaaatattagttatcttgc

SEQ ID NO: 15673 - DNA, 442 bp, Glycine max
  modified_base (344)..(344): a, c, g, t, unknown, or other
  modified_base (376)..(376): a, c, g, t, unknown, or other
cgacgagctatttatttcattctcccatgggatttccaatgtcaagtttccgatgactccaatcaacctgcattgatctaaatcccaaacttgcaaatcacgtgtttctccttcgcaaaaccattgttccttgcgaaacagaccgaatagtgtgcatcgccaccgattcacatcacagaactgcatttgagtgactcatggaaccagcttcagctgattcttcatctcaacctactcctccagcttctaatactgatgaacaacactcaaccaaagtgtctggacaacctggcaatgcacatgattcgcaattgtcgtcacccacttctggcatatcatcctgngcaagagatctgaaattcccacaggccctcgngcttggagcacaacagaactcccagaccgaaaatgctggcatgtcagcttttgctcgcctgactgg

SEQ ID NO: 15674 - DNA, 393 bp, Glycine max
gggagagaaaaaaggggaacttggtgggagagagcacagaccacaggggcatgtctcaaaatttgttgcaaagtgtatagttgagggtttggtactttggtttcatttagttaaatttgtttgtgtctggaattgccgcttgtttgaaaatgtctctctttgctgcattttccatttgtaaagttgccaaggatgcagctggagttgcaggaaatgtgtttgcttttgggttgtttgtgtctcccatacccacatttaggaggattatcagaaatgggtcaacagagatgttctcagggttgccatatatttattcccttctgaactgcttgatctgcatgtggtatggcacacctctgatatctgctgataattggttggttacaactgtta

SEQ ID NO: 15675 - DNA, 452 bp, Glycine max
  modified_base (17)..(17): a, c, g, t, unknown, or other
acaataccaggtgattntgtcattggtgttaaagttgacaaccataggcaatatgtgtgcatatgggctcaatcctggtatttcaggttctcgtcttttgggcaccattcctcagtccatttcacagcaaactgtttggaatcaaatggcaacagtgagaacaccattgaattttgattctagcaagcagagcttttgtcaattttctattgaccttctcggtggaggaattttagtggacaaaactggagattggatcacacttatacaaaattctccaattagtaacttgttgagagttgctgcttggaagaaaggctgtttaatggttaagattgtgatgtctgggaatgcagcagtcaaaaggagtgattgggcctcattggtacaagtgtttttaacaaacagcaacagtacagagcattttgatgcatgtaagtggacaaaatcgg

SEQ ID NO: 15676 - DNA, 435 bp, Glycine max
ccagaatgttagtgtctctgtgatggttgggaggaaggattcaaataaggttgctcgtgtaataaacaagtccatgtttgattacatcgatcgttcatcatatagagccttggcttttgattacctagacatatcccctggctacccatttttgtctggcatccgtgcatggatctctttgctattcatggaagatagaaatgaagatctcatggatgtatttgggatccaaatggatttctgtgatgtagcaaattctaaggaagaagtcttgtggctgttggacatgcttgactggaagtaaatgttcaagaaaagtgtggtgccccatcattacaacaaaaagtaattggacattgtgattttatgttaacttgtttgttgatacggggtgcattacaaagtttaccatattatcagcaccaataatttgcg

SEQ ID NO: 15677 - DNA, 400 bp, Glycine max
cttcttccttttcttcaccccgtacattcacaactctggccctcttcaaatctaagaccaaagccgctcctgctaagactaaggttacaaagccaaagcaaaaggttgaagatggtatctttggcacttctggaggatttggttttactaagcagaacgagctctttgtgggtcgtgttgctatgcttggttttgcagcatcactgttgggtgaaggaataactgggaaaggaattctagcacaattgaatctggaaactggaattcccctttatgaagcggagcctcttcttctgtttttcatcctcttcaccctgctaggagccattggaggtttacgtgaccgtggaaaatttgttgatgacgaacctactactgggagtgttattcctccaggcaa

SEQ ID NO: 15678 - DNA, 115 bp, Glycine max
atctgtttagtccccgtttttctggggtttgatcttccttgtatggtttgtgcactaggaaaatttgatggacattcatttcgtatttattatggaatattaacataattgactt

SEQ ID NO: 15679 - DNA, 452 bp, Glycine max
ttcaggtcctgaaggcatggttccagaaaatagtgaagttgctgaaactttgttaggtcaagttgacagggctgctgtattccacaatgcaagtacacggttttgtgatggagcacgctttgggcttggcgcaaaggttggaattagtacaagtcgaattcatgctcgaggtcctgtaggagttgagggttgttgacaaacagatggatattgagagggagtgggcatgtggttgatggagatcaagggatcaattacacttacaaagagttgccactaaaagcataactttgcatgcaacttagctcactttcaagctataacatgctcacctcaacaaagcagcatcacttttctggtctggtatgatatgcagaagttgctgagatgctggccatgtataatcgtaactatcacttgaccctttccagggcctttttcttacctggagc

SEQ ID NO: 15680 - DNA, 452 bp, Glycine max
attcaaggaacatgatttagaaaactgccaagcccacccatattcggtctgtcaaaacttgcaaccatgaactgaagcaccacacatacccacttcctccaaagacatcatttttattacccaatcttccaatttcagagaaaattctttgtgggcatctcttaattaaaaaaatgtcaagcttccccaacacggtggcggaaggccgcaggtccagcaaggcaccggaaaaatccactttttctcagacttgcagcctcttgagccagttcttgaaagaagaacgtgcttctgctgattccacctttcgaattggtgggaaaatggaacccatagcgagtaccaagggtttgttaggaagcctgcaaaactctgatggggctttgaaactaagcgcttctgccatggaatttcttccccagcttgtggaaaacccctgcattaagaagtct

SEQ ID NO: 15681 - DNA, 458 bp, Glycine max
cttactttgcaattgcattcccagattcatttcagacaacgcaacgttagctttcccacatacgctaactcaataaccctttcattccgttcattgctctttccagattctattttgcctcttagaagttggaatagagaactagagctgggtggatggaggatgacaagaggaggaggaagaacaagaagaagaagaacaagcagaacaagaatgtggaaaatggggtgggagaaactgctaatagggatcagaatctgctgagtaatggaaaggatgagcatactaatctttccaagactgcaaatgagcaaagctcgaatgtcgatttgaatggggttggagagacattaagtagggatcacaatctggtaaataatggtaaggatgaacctgctaatctttcaggagtcgctgatgagcaatgcatggatgcagatcggaatggggttgttgaa

SEQ ID NO: 15682 - DNA, 392 bp, Glycine max
aaccaaaccctttttttctcacttttcttccttgcggcctctttctgtgcgttgtgttgcgttcatccctgtttggtgcggtgggagtttttggtcttttcgctgccccccattatcacacggtccctctccatccacgtcatctacgtcttcttcgtatcgtaccctccccaccttcctttcttcctctccctcttctcactatataacaattttctcacccccttagggtttccaaaagccattgtccgatttcgcactgcgcaacccttttctcccaccatgtctccttccacttcctcctcttctccgcaattcattcttccacgcttcttctcacgcgtttgaggctttcggtccatgggcactcgagttcggtcatgcttgctgta

SEQ ID NO: 15683 - DNA, 398 bp, Glycine max
taaaaatcatgatgtgtttcttttaataagtagcatagttactccgatcaaatatactatttttaaaatcttgcatactgttttagacaagaagcaaaaaagtggaattggtgagttacctattctatgatgtatagggtatcattaaggtaaattaaattagattcgatgtaataatttgatatgatatgattgataaaaattggcgttactttagcatgcgatcaatgtgattagaggtttgatcctcatgtccacgcatatagaataacatttggtaggacttggagaaactaattccttaaatgcattttaatatttcgagggattaatttctgactctcaaccatagataccttgggttaaaaacagaaattaggattggatccagtgtaaat

SEQ ID NO: 15684 - DNA, 449 bp, Glycine max
ggcgtcaccctgaaaatgttgaacttgataaagttcaagtggttcgttactgtgctgctgggtctaagccttggaggttcactgggaaggaagagaacatggatagggaagatatcaagatgcttgtgaagaagtggtgggacatatatgaagatgagacactggactacaataacaactctgtcaacgtggaacgtttcacatcggcactattggatgctgggggctttcagtttgtgccagcaccttctgctgcctaatatgcttattatttacagctacaaattaatgttaattaacgacaaagtatatgtattggtatttgctttttttcgtttttgggtcttatatatgaaggaacaacgtctatggttttaatttggatgaccttcttgtatacaaagccacatgtgatctcatacagcttttgattattattaagaaattag

SEQ ID NO: 15685 - DNA, 415 bp, Glycine max
ggcatcttcttctggtagtttagacacctctgcaagtgcaaactcgcttcaccaacttcaccttctccacacaccctttcatgaccacttctttctctgaccttcttgcttctcccacagacaacaacaaaccaccacatggtggtggtggtggtttgtctgagagaactggctctggtgtccccaaattcaagtccacaccaccaccttctctgcctctctctccccctcccatttctccttcttcctacttttctattcctcctggattgagccctgctgagcttcttgactcacctgttctccttaactcttccaacattctgccatctccaacaactggagcatttgttgctcggagcttcaattggaagagcagttccggtgggaaccagcgaatcgtcaaagaagaaga

SEQ ID NO: 15686 - DNA, 412 bp, Glycine max
  modified_base (383)..(383): a, c, g, t, unknown, or other
gccgagttccgccgccagttcctcggcctcaagccgctccgcttcccggcgcacgcccagaaggcgcccatcctccccaccaaggatctccccaaggatttcgattggcgagacaaaggagccgtcactaacgtcaaggaccaaggggcgtgtggttcgtgttggtctttcagtacgacgggagcgttggaaggagctcattatctggccactggtgagctcgtgagccttagcgagcaacagcttgtggattgcgatcacctgtgtgatccagaagaatatggaacgtgtgacttcaggctggaatggtgggttgatgaacaacgcatttgagtacatacttcagtctgggggagtacagaaagaaaaggactatccatacnaccggagagatggcaccttgcaatttgac

SEQ ID NO: 15687 - DNA, 446 bp, Glycine max
ggaatccaatggctggggatgcctgtatgtcttcccataccatggctgatgatctccacatgaaactactgtaccttgagaacagagtggcatttgcaagacttttcttcccttcagaagccaaactagccatggacattgcccatgctgagacaccatctgagtttgctggtctttctgcgtcaaactcaaaaggttcaaatggaaacttaagggaggttgatctcaatgagactcctatagtgcaaaataaaagacttctttctagaatggaagcccttacgaaaacagtggatatggcgcggcgctacttcccacattgctcggaagtgctgcacaagttcatggaagatgacctgcctgactttgtttaccttgaaaagggtactcatgaagagcagagaatcaaaaggacgcgtttcatggagcttaaagatgacgtccac

SEQ ID NO: 15688 - DNA, 405 bp, Glycine max
ggccgacgaagccaaagccaaaggcaacgcagccttctcctccggggactatcctgccgccatccaccacttctccgatgccatcgccctggctccctccaaccatgtcctctattccaaccgatccgccgcatacgcctccctcaaaaactacgcagatgcattagcggatgccaaaaagacagttgaactcaagcccgactggtccaagggttacagccgtctcggtgccgcgcatcttggcctttcccaatacgatgatgctattttggcttacaaaaggggtctcgaaatcgaccctcacaacgagccccttaagtctggtttggcagatgcgcagaaggccttggccgcggcctccaggcctcgcccctcggcctctaaccccttcggtgatgctttctc

SEQ ID NO: 15689 - DNA, 464 bp, Glycine max
  modified_base (449)..(449): a, c, g, t, unknown, or other
  modified_base (454)..(454): a, c, g, t, unknown, or other
gttgaggccagggtggttggaatggggcctaccatgggaaaacaggctgttaggagcattgtggcaggtggactagccagaaggtgcatggggcaggtgtctaatgccattggggtgcccaagcctttgtctgtctttgttgacacctatggcaccgggaagatccatgataaggagattctcaacattgtgaaggagaactttgatttcaggcccggtatgatctccatcaaccttgatctcaagaggggtgggaataacaggttcttgaagactgctgcatatggacactttggcagagaggaccctgactttacattggaagtgggtaaagcccctcaagtgggagaagggcctaagccattcatttcactgcaatgtgctgggagttttttagcgttgcccttataatgtctattatccataactttccacgtaccttgctctgngtttntctctcgtcg

SEQ ID NO: 15690 - DNA, 412 bp, Glycine max
cttcgtctcaaatctcttcgttccttcgattcgttccatttcttccgaaatggccaaagacccagttcgcgttctcgtcactggagctgcagggcaaattgggtatgctcttgtccctatgattgctaggggagtgatgttgggtcctgaccagcccgtgatcctccacatgcttgacattcctccggcagcagagtcattgaatggggttaaaatggaattggtggatgctgcattccctcttcttaaaggtgttgttgccacaactgatgtggttgaggcatgcactggggtcaatattgccgtgatggttggtggattcccaagaaaagaaggtatggagaggaaggatgtgatgactaagaacgtctccatttacaagtcccaggcttctgcccttgaaaagcatgct

SEQ ID NO: 15691 - DNA, 351 bp, Glycine max
ggagttccccttgcgattactttcagtgtcccttttgctctagcggcaatatactgcagcgcttcaggagcaggacaaggtttatctttgggagttctcaatcttgcaattgtggtaccacagatggtggtgtctgcattaagtggtccttgggattccttgtttggtggtggcaacttgccggctttcatggtgggtgctgcggcagccgcgttgagcgccataatggcgattgtcttgctgccaactccaaagccagctgatgaggccaaggcttcaagcatgatggcagggggctttcactagttaatggagttttgcatgtttcagttttgtcccctgctttaatag

SEQ ID NO: 15692 - DNA, 379 bp, Glycine max
tcataacacaaagcacaaagcaaagctcatccttgagttaaaaaatggcagcagcttcttccatggctctctcatccccatccttggctggcaaggccgtgaagctgggcccatcagccccagaagtgggaagggtgagcatgaggaagaccgtcaccaagcaggtctcctcaggaagcccatggtacggcccagaccgagtcaagtacttgggcccattctctggcgagcccccgtcctacctaaccggtgagttcccaggcgactacggctgggacactgctgggctttccgcagacccagaaaccttcgccaagaaccgtgaactcgaagtgatccactccaggtgggccatgctcggagccttgggctgcgtctt

SEQ ID NO: 15693 - DNA, 348 bp, Glycine max
ctcagccactatagataaccatgagacacactccgaagattggtgttcacggtgtctttgtgtgttataatatattggtattgttgttgagcagttttcatgaatcaacatcatcctcttcccactgtaaagcatggttagtgcaatccattcccaccgatatgccccacttatcccatgttccaggcaccctctctactggggatgtacttcggtggctggctgcaaactccaccacgaggcttcacataattggtcagtactggcagctgttaccttctcccaacgatcctcgctctggggactatggttacactcagcatcagatgcatgaatttggtgccgatc

SEQ ID NO: 15694 - DNA, 405 bp, Glycine max
gaaaaccaggttccccatctcacaaatcagtgtgatgggttttgtgtattgtgatttctgctccaacaacagcttttccagacacagctacttcttgccaggtgctgaggtcaaggtagattgcatgttcaaagcactttcagagaaaacctctgagcagatttcactttcagtgaacagaactaccaataagtatgggatgtacaagctggaaatcccttcagtggatggagtgaaatgtgcagaagattctgcagttgtgtcttcttgccaagcaagcttaataggtagttcatcctctgcttgcaatgttcctggctacaaaaccacttctaatgtgatagcaatcaaagcaagaagagccaatctctgcatatacagcttcaatgctttgactttcagacc

SEQ ID NO: 15695 - DNA, 432 bp, Glycine max
aaagaaagaaagaaagaaaaccctagcttaccttttcaactttcaagatgcaaatctttgttaagacactcactggtaagacaatcacccttgaggtggagagttcagataccatagataatgtaaagtccaagattcaagacaaggaagggatcccaccagaccagcaacgtctcatttttgctggcaagcagcttgaggatggacgtacacttgctgattacaacattcaaaaggagtccactctacacttggtgctccgtcttcgcgggtggaatgcaaatctttgttaagaccttgaccggaaagacaatcacccttgaggtcgagagctctgacaccattgacaatgttaaggctaagattcaggacaaagagggtatcccaccagaccaacaaaggcttatctttgcaggaaagcagctagaagat

SEQ ID NO: 15696 - DNA, 346 bp, Glycine max
cgctgctctttctaactttcctttcccgatctccggccataccccatgccgcacgcagattagggaatcgaacttgtgaatggaactgagttgattttctaagatggaaaaggaaaataaggtgaaggacactgcaagtgatgacggttattgttggtggtggttggttcaagaaaggaacaacagctgtattcatcactgttgggttgtttgcattgttggtccgtgtggctgtgtcactgcacccttactccggcgctggcaaccctccgaaatttggggactatgaggctcagagacattggatggagatcaccattaaccttccaattaaaggaatggtata

SEQ ID NO: 15697 - DNA, 437 bp, Glycine max
cagctatgacgtccatgcacgcgtcctagcttgggattccggttcagggtggattcaggaccgatgcttttttcaaaactaatctttccgagggtatgctgttggtgatgttgctactttccctttgaaattatacggtgaattgagaagagttgaacatgttgatcattctcgcaaatcagctgaacaggctgtgaaggccataaaggcagctgaggaaggaagaacagttgaggagtatgattaccttccatacttctattcccgttcatttgatctgtcttggcaattctatggcgacaatgtcggcgacacagtactattcggagacaacaatcctgcgtcgtcaaagcctaagtttgggacatactggattaaagatgggaaagttgttggggtctttctggaaggtggaactcctgaagagaaccaggcta

SEQ ID NO: 15698 - DNA, 419 bp, Glycine max
  modified_base (47)..(47): a, c, g, t, unknown, or other
agctatgacgtcgatgcaccgtactagctcgaatttcggtcgagttncacacatttttttctacaagaactcaaattacaaacgtatgtttcaactctttttgcaccaacttataaaatcctcatatctgttcccaaaagcttgttgtgagaatggacttcggtgaaaagagattcccaccttaaccaacaacaaacacagcctgggaaggagcatgctatgaatccagtaccccaattcactagccctgactacaagccttcaaataaacttcaaggaaagatagcattagtgactgggggtgactctgggattggacgagcggtgtgtaacttgtttgccttagaaggtgctaccgtgggcttcacatatgtgaaggggcatgaagacaaggacgcgaaggacacgttggaaatgat

SEQ ID NO: 15699 - DNA, 397 bp, Glycine max
  modified_base (121)..(121): a, c, g, t, unknown, or other
cttcaagtgcttttaacggaatcgcttctcctccttccttcggtttcaggagccaacgagaacaagagcaaggttccagaagacaaatggtatttagcctacattgtgtattttaccctgngtctcggttaccttctcccatggaacgctttcatcaccgccgttgattacttctcctttctctaccctgacgccagcgttgaccgcatcttcgccgtggtttacatgatagtcgggctggtggggatcttccttataatcctctacagtcacaagtcttacgcctatgtgaagatcaacgttggattggccctattcgtcgtttcgcttctcgtcgttcccctccttgatgccttttacataaagggtccggtcgggttttatagcgggttctacg

SEQ ID NO: 15700 - DNA, 354 bp, Glycine max
  modified_base (317)..(317): a, c, g, t, unknown, or other
tctttctgcaccatcgttctccatttttggctttacaaaaccactgtgtctgattaagggttctttaatatttccaatatttcttgtagtgaaaaagttgttagctaaaagaagaccaagtttttggtgttgtagaaggaagagaagaattaacatgaaaattcagtgtgacgtgtgtgagagagctccagcaacagtgatttgttgcgcggatgaggctgctttgtgtgccaaatgtgacgttgaagttcatgctgcaaacaagcttgcaagcaagcaccaaagacttcttcttcaatgtctatcaagcaagcttnccacatgtgacatttgccaagacaagccagcattcat

SEQ ID NO: 15701 - DNA, 454 bp, Glycine max
caagggatcatcatcccaagatgatgaagatattcagctccaagggatcaatgatgatgataaaaataacaacaactttgaaagcactactaagctagtgaaccttcatcatcttcagcacaaagtaagaaacaaagatgagcatcaagagggtggtggtggtggcgtagataacatggtttctcatgaagagtttgattctattttgtcttttgagaaccttaacaatgctgctggggacaggtccactggggattccatgccagaaaagagttctgaagctgctgctgagtattctgttgatcatcatcatgatatagctgctcatgagaggaacaacattaggcaaaaatctgagaacagtggtgctcctccattgtcatttcttgagaaagtggctctggatgaaagtgttggtcaccaagtggaggagatgattggagtgtctcctatg

SEQ ID NO: 15702 - DNA, 425 bp, Glycine max
attttatggtaagcgatgcaggaggggattgtcgagtcattttgatggaaaatcaaaatcgttctcagatctatctcaaatgagtaatttgagtaatctgaaggagttgcaaaagcaagagagtcctttcaacaagagaagaagggttttgattgcatccaagtggtccagaagatcatctttctattcctggtccaacccacaatccatgcctcttttgcctgtggatgaggatcaggattatgattatgaagaggaagaagaagaagaagatgacgaagaaaaagctagaaaagttccctctgcttcatcttcttcgtcttcctccttggccgaggaaaagaaaccagaagatcaggttcagctaagactcaacagagtgccagaatcttatgctgctcatatgagacttagacttggaagct

SEQ ID NO: 15703 - DNA, 450 bp, Glycine max
gagaaaaaataccaaccatggcaaccatttctactgatcaaccaagaggatcctactcctatggaacctcctatggagcaccctatggaaccacctatgagaccaacagcagcattaacaaccctccttcacgccaaaccgtgaagttcataactgctgcaactattggcatcacactcttactcctgtctgggttgaccctcacaggcactgtcataggtttgatcattgcaacccctcttcttgttatcttcagccccatccttgtccctgctgcgtttgtgctgttcctggttgcttctggctttttgttctctgggggctgtggtgtggctgccattgctgctttatcttggatttacaactacgtttctgggaaccagcctgcgggttctgacacccttgactatgcaaaagggtaccttactgataaggcaagggatgtgaagg

SEQ ID NO: 15704 - DNA, 392 bp, Glycine max
  modified_base (53)..(53): a, c, g, t, unknown, or other
  modified_base (72)..(72): a, c, g, t, unknown, or other
  modified_base (99)..(99): a, c, g, t, unknown, or other
  modified_base (101)..(101): a, c, g, t, unknown, or other
  modified_base (255)..(255): a, c, g, t, unknown, or other
  modified_base (308)..(308): a, c, g, t, unknown, or other
cgatcttttcctctgagaagacgtgtcggtagctgaagcattttataagcctncactttcctgaactagttntaacatacaatctttcaagtacacctncncagcttccatttaagaatggagatcactagaataggccaatggttaagtcttctgatatgtgtactactattactgcagacaaaagggttcctgggggatcacttttgttgaaaatgcagtggcaaaggggcttgttgtttggagggaatcctncagcttaccactttcacaagggatctggagcagggattaaacaactggatagntcacttttgagggaggaggatggtgcaacaacgttactacttgcctttcccgtaaggacactcgattaggttcatctaagaaaa

SEQ ID NO: 15705 - DNA, 304 bp, Glycine max
ggctcgagaaagaagcgatacatgcacctgacggaggagtggctgagagagaacccgaacatgtgcgagtacatggcgccatcgctggacgtgagacaagacgtagtggtgatggaggtgccgaagctgggaaaacaagccgcaacgaaagcgattaaggagtggggtcaaccaaagtcaaagatcacacaccttgtgttctgcaccacttcaggcgtggacatgcccggagcagattaccagctcacgaagcttctcggcctgaggccctccgtgaagcgcctcatgatgtatcagcagggct

SEQ ID NO: 15706 - DNA, 287 bp, Glycine max
aaatattttttagttttaactctacggtatagaagaaatagaaaaggatcatataaaagttttttaaatttaaaacggatcagtacacccggtctacgaatatattctaattatcaacgaatccctcgaattttagggggcatggggattgtaattctttcaacttctagaggtataatgacagatcgagaggctcgattagaaagaattggcggagaagttttatgttatatatggtaatctttctaacacccgaattatatgagaaacttcgatccatttttggt

SEQ ID NO: 15707 - DNA, 360 bp, Glycine max
ggagttcttgagtcctgaaataagccgaacatcactggttggtattgtcaaagatatacgtgagtctatgcttgaagaagttgacttttacaaggaggctgcaaatattgaggcttttaggagatatttagaaacaatgggacttactgggaatgcaacagctccaaaagtgtatcgatactgcagtacaatgaaagttttaactatgcaaagactatatggagttcctcttactgacctagactccataagttcattagtttctaatccagaaaccagccttataactggtctcaatggggtggtttgaagtttgcttgcatgtgaatcttttcatgcagatgtacatgcaggaaatct

SEQ ID NO: 15708 - DNA, 397 bp, Glycine max
  modified_base (274)..(274): a, c, g, t, unknown, or other
gaccaacacttccattcttttttttttttttttttttccaacctaggggggccaaccaatccgcccttaatttgggaaggttcggccgggcaacctcttccttcttaaccggggcctccggccggcgcttttcttccaacgtgccgggaacccccgccggggttcccggcttcgcgaggcgtggaaaaaagtgggccccaacaatcgaaccggcgaaaacgccggttggcgtacatgaaagccctgaccacccacttcctcggctcttccttcncaagctcacagtcaacttcgtcttgccctactcttctcaattggccgcaaaagaggttgatatggtcattgtaccagcaacaactgggcagatgggtgttctcccaggacatgtagcaacaat

SEQ ID NO: 15709 - DNA, 466 bp, Glycine max
  modified_base (164)..(164): a, c, g, t, unknown, or other
  modified_base (167)..(167): a, c, g, t, unknown, or other
  modified_base (170)..(170): a, c, g, t, unknown, or other
ttcagccgacaccaattcttcaatgcgcaccttaacggcttcaaggttaaggaaccgttcctttcggttccccgaaccaccaagctcaggaccgaaaactccaccgtcaaaattgagaattctgacggcgccaaagacgccggagccgtcggatctggcgccgncgncgncgcgggaccggtccccgggattgtggttaaggaggacccgactaagatttttactgataatttgcaaaccagtggggcttacactgccagggaggagagtctcaagaaagaggaggaagcaggaaagctcaaatttgtatgcctttcaaacgatggtgttgatgaacatatggtttggttgattggattgaagaatatatttgctaggcaacttcccaatatgcccaaggagtacattgtccgacttgttatggataggagccataagtctgtaatggttataaggcgcaatcacg

SEQ ID NO: 15710 - DNA, 447 bp, Glycine max
  modified_base (430)..(430): a, c, g, t, unknown, or other
ttcaaggccaggtcaaggttcttaatggttgcaaaaccattcctggacacaaatggttagtcaaattaccaattcatttagattttcaaatatttttcctgcctttacttttcccagagccaatggccacggagcccattgtggaacctgccatttccaatgattgtaagcataatggtgtagctaaggatactgttaatgaagttgtcagtgatgggtttagctcaagggagactataccagtaaagagtcagcatactggtgccgatgacattgcttctgcttcagtagttgaggaaaaagttgaaacaagtccaagagaaaaatcctctgaaaatgttgaaataggcgaaacttgctcatttatgagaagtgctgcatctttgaaggaatgggcaaaagctaaggctgctatgagtggatcactcanaagaaaacgtggtcaga

SEQ ID NO: 15711 - DNA, 422 bp, Glycine max
  modified_base (379)..(379): a, c, g, t, unknown, or other
attgttggagagactactataagtggagatgcatcccgctagactggcctgttgctttgcttcttcaatggccacttacaatatatcatgctgctcgacttgttggaattacagccttgaatcctgaaatcagtgataagttgtacattcattaccttggacctgagaaagagttgctacaacttgctgtgtttggagaattactggcactcttccccggtgtacgaattcatatagaacttgttggacctgcaattcctcctcaaagggatggtgagatgattcacatttctaagtatccttgttgcaatgaagacgaatgtgaatgcaaaataggaagtaaaaatacattcttagaaacacaatctggtatcacttncactttgacattgcaactttggcaaggattctatcatgatcga

SEQ ID NO: 15712 - DNA, 450 bp, Glycine max
cccataaccaacaacatgggactaccgttggttatgctggtgacactggaaggcagcatgggaatacaggtggcctttactatggaaccgacaccgcggacacaggaaccggtcctagaagtggaaacaccggtggcaccggttatggaggcactggtggtactgattatggaacagctggtggcactggttatggaagtggaactggctatggaatcaacactgggggtgcgcacactgaagcagggtatgggaaggagcatcgtcagcatgagcaatctcatggtggtcagcacgagaagaaagggatactggacaagattaaggagaagcttcctggaggacacagtgacaagtagatgcatcgtgcatgcatgcatatagtatatatataataatggtgtctttgaataaatttgctgcatatgtacttggaggatatagcatatg

SEQ ID NO: 15713 - DNA, 425 bp, Glycine max
cagagtttgaactttgaacgttgaaggaacatagaggcagaggttggtcttctctcaccgtagaatcgaatcgagttcactttgatcgtgtgtgtctccgatcttcaaatccgcaacaaccatggtgaggggattgctcaacaagctcgtctctcgctccctctccgtcgccggaaaatggcagcacaaccaactccgccgcctcaacatccacgagtaccagggcgctgaattgatgagcaaacacggagttaatgttccgagaggcgtggctgtttcctctgttgaagaggtcagaaaggccatcaaggaccttttccctaatgaaaatgagttggtggttaagagtcaaattttagccggtggaagaggtttgggaactttcaaaagcggccttaagggaggagtgcacattgttaagactg

SEQ ID NO: 15714 - DNA, 433 bp, Glycine max
  modified_base (427)..(427): a, c, g, t, unknown, or other
ccggttgagcttttttaaaacctacccaccccaccaaattcaatttgccatggagaagtttggtggaaagggaaaacgttccggcggtgtgtaaggaagatgatcagatggatttgccttccggatttcgattccacccgacggatgaagagctcataagccattacctctacaagaaggtcattgacaccaagttctgcgccagggcaattggagaagtggacctcaacaagtccgagccttgggatttgccatggaaagccaaaatgggagaaaaagagtggtactttttctgtgtgagagacagaaaataccccactggcttgagaaccaacagggccacagaagctgggtactggaaagccacagggaaagacaaagagattttcagaggaaaatctttggttggaatgaagaaaactctggntttcta

SEQ ID NO: 15715 - DNA, 326 bp, Glycine max
caactttagtgataccaataaaataaagaaagggttctaaaagtatgtgttgatgctggcagctagttgtaccacatctaacaggctggtccaattgcatgcaccgtgccatgttttcctttaaaactttttttttttttttaggtttcacatggaagtttcttttgtctaggctgtaaatttttgttcagttaatataaaggtttaatttagtaaacaaatccaccacggttcaataggagaagggaataactttttttttaaaggaggacgtttgtgttctgtaattagcattcagttacaataatttatttttattatggttc

SEQ ID NO: 15716 - DNA, 386 bp, Glycine max
  modified_base (263)..(263): a, c, g, t, unknown, or other
agaaactggacaagacaggaaagaaaatgttgtgcagacatctgaaaatgcagctggaaccaagtctggcaagccaaaaataaaaggagtctcattaactgaattatttactccagagcaagtcagggaacatatcactggcctcaggcaatgggttggccagagcaagtcaaaagcagagaagaatcaagcaatggagcattcaatgagtgagaactcctgccaattgtgtgctgtagagaagcttacctttgaaccaccgnctatttattgcacaactttgtggggttcgcattaaaccgaaataatatgtattataccacggggcaccggtgacacaacgggcattatttttgtcttccatgctataatgatgctcgtacaga

SEQ ID NO: 15717 - DNA, 433 bp, Glycine max
  modified_base (136)..(136): a, c, g, t, unknown, or other
  modified_base (406)..(406): a, c, g, t, unknown, or other
ctcgagccgcaagaatattctagaggcctcatacgacaccaaattggaggagataaacaaggttctgtttggtagagaggaggggcagcaacaaggggaagagaggctgaagagagtgtgattgtggaaatctcanagaaacaaattcgggaactgagcaaacatgccaaatctagttcaaggaaaaccatttcttctgaagataaacctttcaacttgagaagccgcgaccccatctattccaacaagcttggcaagttgtttgagattaccccagagaaaaaccctcagcttcgggacttggatgtcttcctcagtgttgtggatatgaacgagggagctctttttctgccacacttcaattcaaaggccatagtggtactagtgattaatgaaggagaagcanacattgaacttgttggcattaaagaac

SEQ ID NO: 15718 - DNA, 429 bp, Glycine max
cataaacccggcggtgacattcgggttgttcctaggacgcaaggtgtcgttgataagggcgttgttgtacatggtggcacagtgtgccggtgctatctgtggtactggattggccaaggggttccaaaaagcatactacaacaggtatggaggtggtgccaactctgttgctgatggctacaacaatggtactgctttgggtgctgagattattggtaccttcgttcttgtctacactgtcttctctgccactgaccctaagaggaacgctagggattcccatgttcctgtactggcgccacttcctattggatttgccgtgttcatggttcacttggctacaatcccaattactggtactggcattaacccagcaaggagtttcggagcagctgtaatttacaacgaagacaaaatctgagatgatca

SEQ ID NO: 15719 - DNA, 371 bp, Glycine max
gtgatggtaactcgacttcacctttatggtaaatgggtcaagaaatgtaaccatgctgagatatatcaagaaatctctgatgaaaacttggagttaatgagggaacggctcatggagacagtaatatggcccacagatgacacaaacacagaaaagattggttgataattcatctcaaatttttactttgtcttccaacctcttcctagtctaggtatattttttgtttcaatatcaatctgttttgtttccaaaattgtcatttgtgtcattttcctttaataggattctcagttttatgttatgtaaattatgtatatatatgtaccttgttaaatacacaatccattatgtatcgctagtttcagatg

SEQ ID NO: 15720 - DNA, 431 bp, Glycine max
  modified_base (322)..(322): a, c, g, t, unknown, or other
ctagaagcaataagatgaaaatgaaagtgcttgttttgtttgttgctacagttttggtagcatatgaatgccatggctcagactaccagaagttccctctccaaatgaaaactgggtttggtgggcaatacagcaatgaggtggcatgtgccagttggaggcttggcgtggaagcaaacaacgtagtcaagtggcaaactgttcctgcagcttgcggagagtacatagctgactacgttctaggagaccaatatagatcagattccaaaacagttaaccaacaagcttatttctatgcttaatcccttaaactcaccaacanagatgtctttgtctttgacgttgacgacactactctctctaatctccagtattttgctaaccatggatttggtgtggaaccacacaatacgacggcgtttaagaactgg

SEQ ID NO: 15721 - DNA, 390 bp, Glycine max
ctgaaaggttcacctatcgataccttgatccgttcctgtcttttggaggagcgatctggtgcggcagcatacaattatgatgcccctggtgcttcctacaccctcaagtggaccttccacaatgatcttggtcttgtttttgtggctgtttaccaacggatccttcacctcttatatgtggaggatctgcttgctatggtgaagcgcgagttttcgcaagtttatgatcccaaaacgactgcataccccgatttcgatgagacctttaggcagctgaagatggaggccctggctcgcaccgaggatttgaagcggtcgaattcaaatcctgttgccgggaatgcgaagaagcaggtgcaggggaatgataaatctggatttgagggaggg

SEQ ID NO: 15722 - DNA, 201 bp, Glycine max
aaaagttagggtttgtaccttggcctttggcttgcaaatctgatgggattagtattcattcattcttaaggtcgccggcaaaaaaaatccccctgaaaagtccgaccgccaagctttccaaggggaccaagccgttgcccctgaatcttaaaccattaagcccctgatccaagaccactgggcccaccgcggcattccttt

SEQ ID NO: 15723 - DNA, 458 bp, Glycine max
cacacttacccccaactaacaataattccttcacttgcagaacttaggttctctgttgcatcatcatcatcttcattagtgttagccctaaacttcaccttcaaccatgaccacagtgccaccacacagtgtccaagtgcacacaacaacacaccgctacgaagccggcgtcgtcccgccggctcgttttgaggcgccgcgttacgaagccggcatcaaggcgccctcttccatttaccattccgagagaggtccgacgacctctcaggttctcgcagttgtcgccggccttccggtcggcggcatcctcctgctcctggcaggactgaccctggctggaactctcaccgggcttgtggtggcaacaccgctcttcatcatcttcagcccggtgctgattccggccacggtcgcaattggcctggccgtggccgggttcctgacgtcgggagtctttg

SEQ ID NO: 15724 - DNA, 226 bp, Glycine max
aattaccttcagaagctggcgttggaaatgtcacatgtggtaatggaccttgtgggttacccaacactgcttggaataattctgcaattaacaatcgctcctcagatatcaacaaaaggattcgcacagcacttgggaaaggtaagaaaattgtttttcttactagagttgatccttttccagtagctttactggctgttctttttggtgttaaaaatgaaattct

SEQ ID NO: 15725 - DNA, 452 bp, Glycine max
  modified_base (325)..(325): a, c, g, t, unknown, or other
cccaactaaccaaaccagctatggcggcgatgcagaggccactcaggagaaccattgcaatcgccaagctacgcgcgtgcttttcctctctccgacccgccgccgccgccgacatcgtcgcgtctcctccgccgcagctcccgccgttcgatcaccagccgcacccttacaacggtcccttcgccgatgaagtcctcgccaagcgcaaaacgttcctcggtccttccgtcttccactactataagaaacctctgaatatcgtggaagggaagatgcaatatctgtatgatgatagtgggaggcgttaccttgatgcatttgcggngatagttactgtttcttgcggacattgccaccctgaaatcttgaatgccatcacggagcagagcaaacttctgcagcatgctacaaccatatatctacatcatacaataggtgattttgctgagtca

SEQ ID NO: 15726 - DNA, 298 bp, Glycine max
aacatattctcctctcattctcactcaaaacacaaaatcctaactaaggtgaaaatgaaggcatcacgcattgctttgttcactttggtggtgcttctttttgtggctgaagttcaagtgtcaaaggcagtgacctgcagcccagtgcagctgagtgcatgtgtgagtgcaataacctcttcaacccctccatcaaacctatgctgctccaagatcaaggaacagaaaccatgcctttgccaatatctcaggaaccccaatctaaaaaagtttgttgactttcctaatgcaaggaaag

SEQ ID NO: 15727 - DNA, 271 bp, Glycine max
  modified_base (46)..(46): a, c, g, t, unknown, or other
tcagcatgttccatgcttttgaatttttcgctttgttaatgaaagnctaacgcacctgttctagttgccgcgttggcgagaaatccagtttccgatttgctccattgaggcatattcactattctgcaagggttgcctctactttctctttccatgcaactattcttattaattcgttcaattgtcgattgcacatttaggttgaacgaaccttacggcttgcactgcaccaccattatctcttaaaggacgcccgccctctaatacactc

SEQ ID NO: 15728 - DNA, 363 bp, Glycine max
ggatctgtatggatctgaaccagatctacacgccgatggtggttttggcctggtctttcatagatctgatgcatggaggctcagatctactgtacagagatactgtagataatcgatgagaagaacgcagatccagccgcttccgcttgttcgatcgctacagacgcttgtatcggattattcatgattgattcataagcagcatgtcttcctccggctatagttgttgcagaactcggatgttgtaaaattagtgtatgatgtgaagctatgggctggaaaatggtgatgtaggagatttcgggacgaaaggcctcaaaacgctttcgtcgttgggttactgagtcctgagtgatcttgtca

SEQ ID NO: 15729 - DNA, 419 bp, Glycine max
gttgtgtccctcttttaagctatttccttctcttaacacaattggttgtgccaattgccatagtcaccaaccaattaacaaaggtatatatatcatcatatcatcaccaaatgaaaaatattgggttgttttttcttgtggtggtggctacttttgtggtggcagccacagctggtagcttttaccaagactttgaaataacgtggggtggtgagcgtgccaaaatctatgagaatggaaaccttctcacactctcccttgacagagcctctggctctggctttcgttccaaaaaagagtacttgttcggaaaaattgacatgcagctcaagcttgtgcctggtaactctgctggaacagtaactgcctattatttatcttctctggggcctactcatgacgaaatagcctttgagttt

SEQ ID NO: 15730 - DNA, 255 bp, Glycine max
ggacaaagccccctttatgctttgtttgttatgtaaggaatgactagataaacttggaataaaacttcctctcttttcgtggcccataatttgctttctgcaaatctgggtcttcttcattccaaaaaaaaaaaaaaaaaaaaaaaaaaaaaaaaaaaaaaaaaaaaaaaaaaaaaaaaaaaaaaaaaaaaaaaaaaaaaaaaaaaaaaaaaaaaaaaaaaaaaaaaaaaaaaaaaaacaaaaaaactagaaaaa

SEQ ID NO: 15731 - DNA, 376 bp, Glycine max
cccgtgtggaggatcccaccattctcatgcttccacatccacacgggccgttcccaatcccttcgcactttcgccagaatccgggtcggacccaggtcgtgggctcctattcgggcatcggcagcgagctcggagagaggggagatagtattggagcagaagccgaagaaggatgacaagaagaagctgcagaagggaatcgcagagttttacgacgagtcttctggcttatgggagaacatttggggcgaccacatgcaccatggcttttatgactcggattccactgtttcgctttcggatcatcgtgctgctcagatccgaatgatccaagagtctcttcgctttgcctctgtttctgaggagcgtagtaaat

SEQ ID NO: 15732 - DNA, 494 bp, Glycine max
ctatgacgtcgcattgccccctacctaagcttcggattccggttcagggttaaccctttttaaccttcccctttggttcttaaccataatcttggtaagtcccttacctacccccaattttcctttcggaattcctctttttcaattctcgatttcctttcttcctttggggtcttcataatccagatcctctcttcgatctagggtttctggcttaattaacaatcaaatgtttaagggaagaatttctatgacgattcgcaaccccatgcgacgaatccgtctcctccactccttctccgtcgtcttcctctactggttctacgttttctcatgaactaactccctctcaatcccctaccctaattcctccaatttccccattttttttctaattaatcagatttgcaaaatcctaatttctctatcctaacaaaaaccccaaattcaaacaaatccaatggcttcgattccgcgtccggcgagttcgggat

SEQ ID NO: 15733 - DNA, 383 bp, Glycine max
gaggagggtactcataacgtagttgacattccacaatgccaagctcatcatcctaatattaatgctgctgtggagctgcttagacggggtattattgaaataggtgttgagccatatattgaagatgaaggtactggtgatttgcgatatgtccagatggctgtgacaacatataacacatctcttcctgcggctcaaagatataagaatggaaaggttcaggttacattggtttggaattcaagaaatgaaaactcacccggttcagacaaactgaatgcattagcaaattttctgtggaaaaatggtggtcaaaggagcaggcttcatttaattcactctgtgtgggccaactttcagacttctactaacaatataatttt

SEQ ID NO: 15734 - DNA, 348 bp, Glycine max
ctcttctgcggcgtagcaatgggacactccaacgtttggaattctgacccaaaaaactacggtcctggttctcgcacttgccgagtgtgtgggaatccacatggattgatcaggaagtatggccttatgtgctgcaggcagtgcttccgtagcaatgccaaggaaattggcttcatcaagtatcgctaaaagagctgttgtcacctacggaccaatattatgttctggcactaggatgttttgaagatgttatgtttgaagaaacttgagacttgtttttttcatctattttattatcagacataatgtgtggaacgaagaatacttttatataaattgttttgcact

SEQ ID NO: 15735 - DNA, 388 bp, Glycine max
cgatgctttcggcaaatggcgaatcttgcattctgagcttccgagtccattaactcactgagtcaaacagccgagtcgagatcgcttaacatgttggacggaatactcggcagaggcttcaccgcgaaatgcaaatcgttgatcaaattgacgaacaggcgaatcgatgtgatacggaggaagagaagagcgacagagaagtttctgaagaaagatattgctgatctattgctcaacggtctcgatatcaatgcctatggaagggcttgtggttgagttaacactgtcctcttgctatggtttcgttgagaattgctgtgaagttgtgttgaagcatctccctgcgatgcagaaactgagtgtccttgccgctgccaatggtctctct

SEQ ID NO: 15736 - DNA, 390 bp, Glycine max
ctggccccaagcacgtcagccttactcccctgatacggttgattatatcaaatctctggatgccgagaaagacatagagcttctgaaatatttcgggtgggatgtcccggttgagtgtgcacgaacactccgaatctccacaatgttattgaagaaaggggttgagagaggtctcactccttatgacattggaagcattatgtgtagggaaaatttgaacaaagaatctgtcatcgaggagattatttgtgaagcccaagaatcattgctacctggcatggaggaatctgtgtttcttgaatctgtctcccagatcatggattcccgccttggatagctttcaaaatagactctctttgattcatagttatataataacaataatatata

SEQ ID NO: 15737 - DNA, 379 bp, Glycine max
attgcaatcaaattagttcattctctttgcgcagttccctacctctcctttcaagatgcagatcttcgtcaagaccctcaccggaaagaccatcacccttgaggtggaaagctctgacaccatcgacaacgtcaaggccaagatccaggacaaggaaggaattcccccggatcagcaacgtctcatcttcgccggaaagcagctcgaggacggccgtaccctcgccgactacaacatccagaaggagtcaacccttcaccttgtccttcgtctccgtggtggcatgcagatcttcgtcaagactctcactggcaaaaccataaccctagaggtcgaaagctctgacaccattgacaacgtcaaggccaagatccaggac

SEQ ID NO: 15738 - DNA, 393 bp, Glycine max
aaacatctcaatgggttcttcttctattacaacatcgcccgcaaccatgaccatggctgcgatcgtgctcctgttcacggtctttgccgtttcctccgccctagacatgtcgataatctcgtacgacagcgcccacgcggacaaggccgccacgttgcgcaccgaggaggagctgatgtccatgtacgagcagtggctcgtgaagcacgggaaggtgtacaacgcgctcggcgagaaggagaagcgcttccagatcttcaaggacaacctgcgattcatcgacgaccacaactccgcggaggaccgaacctacaagctcggactgaaccgggtcgctgatctcaccaacgaggaatacagggcccagtacttggggaaccaagatcgatccca

SEQ ID NO: 15739 - DNA, 270 bp, Glycine max
ggctgttgttcaggtctttgagggtacatctgggattgacaataaatttacaactgtgcaatttaccggagaggtgttaaaaactccagtatcattggacatgcttggccgcatattcaatggttctggaaaaccaattgataatggtccacccatattacccgaggcttacttggacatatcaggaagttccatcaaccctagtgagagaacctatcctgaggagatgatacagacagggattatctaccattgatgtcatgaattcta

SEQ ID NO: 15740 - DNA, 299 bp, Glycine max
ggttcacaatcaatggccactcttacttcaacctagtttggatcaccaatgtggctggagctggtgatgtgaattcagtgtccattaaagggtccaaaactgggtggcagcccatgtcaagaaactgggggcaaaactggcagagcaactcatacctcaatggacaatccctctcttttcaagtcaccaccagtgatggcagaactgtgacaagcttcaatgtggcaccagccaattggcaatttggccagaccttccaaggaagccaattctagagacattattgcaatgagggatag

SEQ ID NO: 15741 - DNA, 424 bp, Glycine max
  modified_base (369)..(369): a, c, g, t, unknown, or other
ggctaactgcaacaaattcagaggcctgaaacccagagagcacgctgcactcaaggactgcgccgaggaaatcagcgacagcgttgaccgcctcagccggtcgctgaaggagctcaagctatgtaaggttaagggtgaggacttcacgtggcacattagcaacgtggagacatgggtcagttctgctttgaccgatgagagcacttgcggcgatggattctccgggaaggcgctgaatgggaagatcaaggactctattagggctaggatgctcaatgttgctcaggttactagcaatgctctctcgcttattaaccactatgctgcacaacactagttgggaacaatgatcttggttgcttaatgctntacttttcttcttttatgtgctctatgtaattattatatatgtgagtctttatag

SEQ ID NO: 15742 - DNA, 337 bp, Glycine max
ggataatatccgtggaaatgctgtcgcatctggacctgttatgactgtccttatggagggtgtcatgaattcttcagaagtgagcgacgttgtgaatgcagcaacgtctcaatcacttgttggtcgcatgggagaagctaaacagatatcagcattagttgcttttctttgccttccggttgcatcatacatcactggacaagttatatgtgttgatgggggtctcacaacttaattagtattctgttaattactatcatttggctgctgaattaaattctaatgtatgcagttggtgtttcctgcaaccccattcatgctttgcatatcattgggc

SEQ ID NO: 15743 - DNA, 280 bp, Glycine max
tcttcctctatataaaccctaccctcaccttcaatttccgtttctctcgtcaaatttatccattcaccacagagtttcttcaatggcccagcctcaaccagagtcccacgccaccaatggctcacacgagccattgctcaaaatcccaaagctccaccaaaacggcgacgtttccgcaaccgctccctttctccgcgtcaagaagctctccgacaaggccgttttgccctctaaggcttcccctctcttccgcggttacgatctctctagcgcggtggag

SEQ ID NO: 15744 - DNA, 368 bp, Glycine max
gttcttcatcatagtcttaaacattaaaccttagcaaaagtcaacaatgctagacatcaaaggctacctcgtactcttcttcctatggttcatatcaaccattctgatacgttccatcttcaagaaaccacagcgtctaagactcccaccgggtcctccaatttcaatacccttgctgggacacgcgccatatctccgttcactgctccaccaagcattgtacaagctatcactgcgctatggacccttgatccacgtcatgatcggttcgaagcacgtggtggtggcgtcgtcggcggagacggccaagcagatcctcaaaacctcggaggaggcattctgcaaccgtcccttaatgatagcgagcg

SEQ ID NO: 15745 - DNA, 377 bp, Glycine max
tgatggtgcaatcacaaaccaagaacttgttcaaagggcaagagagaagctgaagaactccggtttcactcaaaaaccgggactctattgcagtgatcatcatgttgatgctccttttgtgtgttgatctgttctcatctgatgcagagaaagagagaataatatgtgttgtttatagtctgcttgtgtattgctgtatagttggagactcaaaatgaagttaatgttttcatccagttatcatatgctgctctattatcaggaattatattccttcaacattttagcccttgttgtgtctttgctgctacatgaccattgggctgggagaccaaactatcagagcaggttccatgcacccaaccacagattttggc

SEQ ID NO: 15746 - DNA, 309 bp, Glycine max
gctttctttattagcttgctctggaaaagataacagatttgttcggaactaaagtcaagtttggaatgctctcttttgtaatgctgagttgggtggctaattatcttgaggtggaaaagtatctaattttcgtgctgcaatacaaagttccgatttttttttttcgttacatctgatgtactagatttcgtagcactaaaaaggctggtttccaaggaggcaactcttgatttgatgtactgaccaaggaggcaactcgtgtaaatcataaccctgggaaactatgtgcaccatctattgggccttatg

SEQ ID NO: 15747 - DNA, 239 bp, Glycine max
ctcttggcatcttggggtgggtccctcttttaagctattggcttctcttaacacaattgggtgtgccaattgccatagtcaccaaccaattaacaaaggtatatatatcatcatatcatcaccaaatgagaaatattgggttggtttttcttgtggtgggggctacttttgtgggaggcagccacagctggtagcttttaccaagactttgaaataacgtgcggtggtgagcgtgccaa

SEQ ID NO: 15748 - DNA, 305 bp, Glycine max
cggctcgagcggctcgaggagagaagcttaattggtattgtcatgtttttcggatttgcatcggggcaaaggaaaaaatggaggcatccattatgttacctcttgaaaggacttcgtcaattgaaagagagcccaggactcttaatatcaaccaaattcaatccgctagggagttagcaatatatatattgaacacaaagaccatagaagaagcgtccagaattttcacggaggggttgcagccggtggttagtgctgctccaaagatgggttttgggttgagaagttgaagtggtggaattcca

SEQ ID NO: 15749 - DNA, 389 bp, Glycine max
attcatttacatcgtttcatcattttcataattgaatagtgtgcttaatatgatttgatgacctgaccattccgtctcttaaaattgtatgaatagtgattccttggctgcgattggaggcatggatcaaagactggtcatctgggatatacaacatttcttatctcgagccacctgtgaccatgagggtggagtgacatgtttgacatgggttggttcatcgtgtgtggctactggatgcgtggatggaattgtgagattatgggatattcggtctggtgaatgtgtagaaaaattcagggggcactcagatgcccttcaatctctttgtgagtctgctaatggggattatattgtcttgggcttcttggatcatacagcttggggtt

SEQ ID NO: 15750 - DNA, 392 bp, Glycine max
caaacttaattattaacacttccttagttcaatatggggaagcccttcactctctctctttcttccctttgcttgctactcttgtcgagtgcatgctttgctattagctccagcaagctcaacgagtgccaactcaacaacctcaacgcgttggaacccgaccaccgcgttgagtccgaaggtggtttgattcaaacatggaactctcaacaccctgagctgaaatgcgccggtgtcactgtttccaaactcaccctcaaccgcaatggcctccacttgccatcttactcaccttatccccggatgatcatcatcgcccaagggaaaggagcacttggagttgcaattccaggatgtcctgagacgtttgaggagccacaagaacaatcaaa

SEQ ID NO: 15751 - DNA, 380 bp, Glycine max
agacaataaaggcgttacagggaaacaagccccaacagaggaggaatccatggagatcggggatgtaaagccccaacaagggaagcaatccaatgcaaatggaattcaaggatgatatgtcaaatcacaacacatgccaaagacaatagtcatgtttgtcatttttcagctacataatctgcaactgagagcaagaacctctatgatttgatctgctctttaaaaggctgtaatttacttcttgctaagacactggcacctttaattagccgataatattgcatggaaacaagcatgtggtgggtgagtttttattagcttctttcccctggtcttaaggaatttaaggtgggggcttttttctaatggaccacctaacc

SEQ ID NO: 15752 - DNA, 300 bp, Glycine max
ctcttccttttctcttctctgtctaaggggtgccctgagatcacattgaacaatggtgaaggctgtggccgttcttggcagcagtgagggtgtcactggaactattcacttcgttcaggagggaagtggtccaaccaccgtaactggatctcttgctggtcttaagcctggtctccatggtttccatgtccatgccttgggggacactaccaatggttgcctctcaactggatcacatttcaatcctaataacaaggagcatggtgcccctgaggatgagaatcgtcatgctggtgatct

SEQ ID NO: 15753 - DNA, 406 bp, Glycine max
ggctcgagcacaccgtgccccaatggtgggactaatcatagaatattagtgatagtgggtatttttaggctatttgctataatgctcttaggtagtataaaaatactactatactaatgcgagtgtttcgacgtcgtttcatcaaaatccaatactcgagctttcctagggcaggtattgggaagtgtcaccgtccttctttctctttttctgtagtgatttctagcgttatgtatatatagaaagtccaatagaactggaaaaggctgaccaagtagaaataagacacctatgaaatagttgatggtgcagtgatcagaagaatggcgtgtaacagaataggcaaggctcttttcaaccttagttaaagcgatgatgtttgataaggacttatagggttcggttt

SEQ ID NO: 15754 - DNA, 390 bp, Glycine max
cattggtgtggcctagctgttttctcaatgagaaagccttcatctctgcaaagcgcacttttgcgctttggggttcccttgttgcttgttatcaccttctgttatgctacttctactgctgcagcaacaactcaagtttcagggaatgaagagctgccaaagacaaacctaaatgggcatgatgaaaaagcaaaattcggattttttcatcataaaccaatattcaagaaacatattccaattccagtatataaacctgtaccaaagccatttccagtgtataaacctataccaaagccagttccagttccagtgtacaagcctattccaaagccagtgtataagcctattccaaagccagttccagtgtacaagcctataccaaagcca

SEQ ID NO: 15755 - DNA, 381 bp, Glycine max
  modified_base (284)..(284): a, c, g, t, unknown, or other
ctcgagccgattcggctcgaggcttcacgtggaagatggacaactgattgctggaatggaggaggcacacaaacatgtggaagaactaaaatcaaaagccaagcaacttgaggaagaggtcgagaggcaaagaaccgtgatcttagaaggagcagaagagaaacgcgaggccataaggcagctatgtttctcactcgagcactatagagatggctataatatgcttcggcagcatgttatggggcacagacgagttccagttttggctgcctagttaataaatntgaaacgtgatcttgtatattgttttggtgctatcttcatttctgtcttgggatgttttatggttctagtgtatgagtcaaggtcatgtgtactact

SEQ ID NO: 15756 - DNA, 357 bp, Glycine max
  modified_base (329)..(329): a, c, g, t, unknown, or other
tgtcttccgaagcaggaactaaatatggctgacttgttggaatggtcaaagcaagataagaaacgaatgcttcatgtcgtctaccgtgttggtgaccttgatcgcaccatcaaattttacacagaatgtttaggaatgaagcttttgaggcaaagagatatcccagaggagaaatatgctaatgcttttcttggatttggccctgaagaatcccattttgttgttgaattaacatataattatggggttacctcgtatgacattggcgatggctttggacattttgcaattgcaactcaagacatttataaattggttgagcacatcanggccaagggtggaaacatcacaagggaa

SEQ ID NO: 15757 - DNA, 331 bp, Glycine max
ctcgagccgattcggctcgagccatttggagaaatgaattgattcttgtaataatctgtgatctgatgagcagatagaaagagaagagaagttgatgtcaacagcagaagctcctcctccgttccaagaagcagcgcgatgcgttgtgtgcaattgcagtttcaacaccttcagaagaaggcatcactgtcgatcctgtgggagaacattgtgcaatgaacattcatcagatcaaatggctttaccacaatttggcatttactcaaatgtccgagtatgtgctgattgtttcaacaactcacggtctgggagggatgaaccacagacttct

SEQ ID NO: 15758 - DNA, 404 bp, Glycine max
ctggcaagaacaagaactccacagattctgcatctgagagcaagagccacgaggcaagccgatccgacgaacgagatccatcagcggcttcatccgtgacctttgcatcacagcaacagccttcgagctccaccttaagctttgccatacccattaagcaagacccttcagattactggtccatcctggggtaccataattctccccttgacaacactggcatcaggaacactactagtgttactgcaacttcttttccatcctccaacaatggcactactagtagtttgacaccctttcacatggaattctcaaatgccctcacaagtgccggcagtgataacgatgccgcgtttttcagtggaggaggcatctttgttcaagcacaaagtggtcatggtaat

SEQ ID NO: 15759 - DNA, 285 bp, Glycine max
gcaaaaagtacgttgctggaaatggattctacataattggggctcacacggatagtccttgtctcaaactcaagcctgtcaccaaggttgttaaggctgggattttggaagttggtgtccaaacctatggaggtggtctgtggcacacgtggtttgatcgagacttgactgtggcggggagggtcattgtgcgggaagagaatgctggttctgtttcgtactcacatcgccttgttagaattgaggaacctataatgcgaataccgactttggcaattcacttgg

SEQ ID NO: 15760 - DNA, 384 bp, Glycine max
gaatttcgctgttctgactatgcgggatacacatgccagaatagctccatgctcctatctagcctttcggtgtgcaaaaatgtgctgggaaatgatgtttctggacagcattgtgcacccagtgagcctagcatactacagcaactggaagaggttgttgtcatacccaactaccaccgactattccctggtggtgctagaaaattatttaatatatttggtagctcctactgtgatgagactgctaaacggcttgcctgctggatctcaatccagaagtgcgacaaggatggagacaacaggcttcgagtgtgccattctgcatgccagtcttataatctagcatgtggagctttacttgactgctctgatcagacgcttttc

SEQ ID NO: 15761 - DNA, 397 bp, Glycine max
  modified_base (360)..(360): a, c, g, t, unknown, or other
aacacgcaaggtcagcagaaaccccgaattgataaggggaatcggaaagtactcgaggtcgcagatgtaccacaagaggggcatttgggctatcaaggccaaaaacggtggcgttttacctcgccacgaccccaaacccaaacctgaaactcccactgaaaaaccacccaaattttaccccgctgatgatgtcaagaaaccccttgtcaacaagcacaaacccaaaccagctaagctcagggctagcattacccccggaacagtgttgattcttcttgctggtagatttaagggaaagagggtagtgtttttgaagcagctaccttctgggttgctttttgtaacaggtcctttcaaggntaatggagttcctttgagacgtgtgaatcaggcctat

SEQ ID NO: 15762 - DNA, 388 bp, Glycine max
  modified_base (361)..(361): a, c, g, t, unknown, or other
ggtaattatctcggctgtttctctcatcctggtggttggagtggccataggtgtggtggtggccgtcaacaagaagggcgaggatcccacacttcaatctcaacaaaaatcagtaggggttatctgccaaaacactgatgaccagaagctctgccacgaaaccctaagctccgtgaagggcatggacaccgctgatccaaaggcttacatcgccaaggcggtgaaagccaccatggacagcgtgaccagggccttcaacatgagtgataggctcagtaccgagtacggaggcaacgataacggaaccaagatggcccttgatgattgcaaggaccttttgcaatccgctatcgagagcctncaactcaacattgacatggttcacaac

SEQ ID NO: 15763 - DNA, 369 bp, Glycine max
  modified_base (289)..(289): a, c, g, t, unknown, or other
ataaagagagcattacattacaataactctgtctcttttgtttaaaattagggaaacaaggaagcaaaatgacacaatagtccttcttccctgtttccactttccaggttttctccttctcgtttgttgagcgcttttctctccctctccctcttcttcactcagtcagctgccgtagaaattcattatggtggcaacagctgcaacttcatcatttttccctgttacttcaccctcgccggactctggtggagcaggcagcaaacttggtggtgggcctgcgaacctntgaggtctaaaatccaaatctgtgtcttctggtggcttgaaagcaaaagcacaagcccctttgaaattaaatgaaccaca

SEQ ID NO: 15764 - DNA, 419 bp, Glycine max
  modified_base (339)..(339): a, c, g, t, unknown, or other
agaaaaaatgggttcttcttcttctatgtggacggtgtgtgtgattttggcatcactggcctctgcagcactctgtgccaacccacgcaggccagtggatgtacaatttggccgaaactacgtgcccacatgggcctttgatcacatcaaatatttcaatggtggttctgacattcagcttcatcttgacaagtacactggtactggcttccagtccaaagggtcttacttgtttggtcacttcagcatgtacataaagatggttcctggagattctgctggcacagtcactgctttctatttatcttcccaaaacgcggagcatgatgagatagactntgagttcttggggaacagaacaggacaaccttacattctgcaaacaaatgtgttcaccggaggcaagggtgatagagagc

SEQ ID NO: 15765 - DNA, 283 bp, Glycine max
ctctttcaaaagggagaagaaaaggaaaggaaacaaaacgcacatgattattatagcaatggcagaacaaaaccaaaaccagacaactgaaactggaaagcaccaagaggttggccacaagagccttctgcagagtgatgctctttaccagtatattctggagaccagtgtctacccaagagaacctgaatccatgaaagaactgagagaagttgacagcaaaacacccatggaacatcatgacaacctctgcaaacgaagggcaattcttgaacatgctcct

SEQ ID NO: 15766 - DNA, 293 bp, Glycine max
  modified_base (241)..(241): a, c, g, t, unknown, or other
gaaaaaccctaagcaaagcaaagcggtaaggatggggaacacggagaagctgatgaaccagatcatggaattgaaattcacttcgaaatcgctgcagcgtcaatcgcgtaagtgcgagaaggaggagaaatcggagaagctgaaggtgaagaaggcgatcgagaaaggcaacatggacggcgctcgaatctacgcggagaacgcgatccgtaagcgcacggagcagatgaactaccttcgnctggcctcgcgccttgacgccgtggtcgcccgtctcgacacgcaagcgaaaa

SEQ ID NO: 15767 - DNA, 356 bp, Glycine max
gtcaaagacaatgtcagggatcattcacaagattgaggagacccttcatgtgggaggccacaagaaggaggaggagcacaagggtgagcagcaccatggtggagaatacaaaggggagcatcatggtgaacacagtactgaatacaaaggagagcatcatgttggtgagcacaagccggagcaccatggaggagaagagcacaaagaggggttcctagacaagatcaaggacaagatccacggcgaggagggtggcgccaccgccgagggcgagaagaagaagaagaagaaggagaagaagaagcatgaacatggccatgacagcagcaggcacagtgacagtgattagattatct

SEQ ID NO: 15768 - DNA, 240 bp, Glycine max
  modified_base (138)..(138): a, c, g, t, unknown, or other
gttttcgttcaaggtgagaccttgttcccgggcatactctcatgattggactgagtgtccttttgttcatcccggagagaatgctcggaggagagaccccaggaagttccattacagctgtgtgccgtgccctgattntagaaaaggggcttgcaggcgtggagacatgtgtgaatatgctcatggggtgtttgagtgctggctgcacccggctcagtatcggacacgcctctgcaaaga

SEQ ID NO: 15769 - DNA, 416 bp, Glycine max
  modified_base (355)..(355): a, c, g, t, unknown, or other
  modified_base (366)..(366): a, c, g, t, unknown, or other
gcaactggaaaggcaacaagttcatctgatgaatatgctgcaggatttcatgggcggatctcatgatagcatggtgactctagagaacagagtgcgaggtcttgagagaattgttgaagacatgtcacgagatttatccatatcatcaggtcgtagaaactttgcaggatttgaaggatcatctaataggccttctagcaagtataatggttttaatgactattccagttccaagtatggaagaggtggtgatggacgcattccatttggtgaaagatttgcccaatctgatggaaatgctttgggaatgaggggaagagggccatcttggagatctgacatgtctgagggctgngatcatcctgngtatggtgcttctagaaatggtcagatgtcctcaaggaagggctttgggg

SEQ ID NO: 15770 - DNA, 367 bp, Glycine max
tggagcctgcggcttaatattatgacgtagataggatccgaatcaagttattgtcaagatccatttttgtctgaggttaagttattcttatgtgctgtcacaagagaagcaaaggaggaatattattccacctagtgttttctcggcttagagcatttgaaatgtaatcattgggcaaatttcaatccctccagataaacctatgggaagcttcatgggctttcacgaggtggtgattgatgggaggatccatactcttagattacaagaacctatttcagatgtggcgtggatcaaaaagaaggatctaatattgtcaacctgactcaagaaaacttctagtactcatacttgatagttgaatttt

SEQ ID NO: 15771 - DNA, 411 bp, Glycine max
caaatacaaacatggcaatgaagaagttcttgtgggttgttctgtccctttctttggtccttggagtggccaatagctttgattttcacgacaaggatttggagtccgaggaaagcctgtgggacttgtacgagagatggaggagtcaccacacggtttcgcgaagccttggtgacaagcacaagcggtttaacgtgttcaaagcgaatgtgatgcatgtccataacaccaacaaaatggataagccttacaagctgaaactaaacaagtttgctgacatgaccaaccatgaattcaggagtacctatgctggctcaaaggttaatcaccatagaatgttcagagacatgccacgtgggaacgggaccttcatgtatgagaaggttggtagtgttcctgcttcagtggatt

SEQ ID NO: 15772 - DNA, 369 bp, Glycine max
attaactaagcatatatagcgtgtaagacagtgagaaaaaaagtgttgtgtagagagaaatggctaggtggtgcatcttggtggttcttgcccttgtcgtggttgcaagtgccagaaacatgcccaatgacgcaggtttggaggaccagaagaacttcctcgggtatgggttctctggagttggcaacaatgggcttccctttggaggagtgggttctgggtttgatggtaatatgggtgggccttctgggctcggtggatttggaggattcggtgggcctagcgggctcggaggtcttggtaacggtgaagggcccaaccttcctctcccttgggagttgagaccacacaccttcgggtttcttattt

SEQ ID NO: 15773 - DNA, 359 bp, Glycine max
cacataagtgctgaaaagggtggagagtttttcatagacactgagaaacatatgcgaactgtagctactgcagcaagtccaatacctagtccacaaagtagtggagactttggtgcgctgagtccattggttggaggtttcgtcatgagttgtagagttcaaggtgaaaggaagcgaagtaaaccatcagtacaactggcaatgcgacacgtgacatgcgtggaggatgctgccatcttcatggcacttgcagcagctgttgacctcagtatcgtggcatgtaaacctttccggaggaaagtcaggagaggtttttggcattcgatgtgatcaacaaggcaaatgtatttataagcact

SEQ ID NO: 15774 - DNA, 336 bp, Glycine max
tgacaagaagtgccccttcactggcaatgtttccatccgtggccgtatcttggctggaacatgtcacagtgctaagatgaacaggactattattgttaggaggaattatctccattttatcaagaagtaccagaggtacgagaaaaggcactccaacattcctgctcatatatcacctgctttccgtgtgaaggaaggagatcacgttattattggtcaatgcaggccactttctaagactgtgaggttcaatgtgttgaaagtgatcccagctggatcttctagcggtgcaaagaaggcttttactggaatgtgagctttgatttccagttttta

SEQ ID NO: 15775 - DNA, 415 bp, Glycine max
aatttttggaccctttgattgtaaacatttaactgatttacatgttacctaaatgtaagggtaagtctgcgtacaacaaccctgccccatatcttcgcatagtgaagagcctccgggcaatggggtacgaagtttacatgttacctaaatgtggcctaacctacgtgtccgtggactggattgagccctttgaaaacttctgcaatatattaatgttagacattgtaaatataaattgctgcatttttggatttcgcatattaagttggaccaaatatattactcatcattattattattatatggtatttatttaatggaatcaattattgcataaattgacaataggagctactagcttatcatgatcatgatccaaacagatgatgatgttgggaatgaattatggaacata

SEQ ID NO: 15776 - DNA, 337 bp, Glycine max
gagacttgagattttcaagaataacttgaactatatcagggacatgaatgcaaacagaaaatcaccccattctcatcgtttaggattgaacaagtttgctgacatcactcctcaagagttcagcaaaaagtacttgcaagctcccaaggatgtgtcgcagcaaatcaaaatggccaacaagaaaatgaagaaggaacaatatttttgtgaccatccacctgcatcatgggattggaggaaaaaaggtgtcatcacccaagtaaagtaccaagggggctgtggaagcggttgggcgttttctgccacgggagccatagaagcagcacatgcaatagca

SEQ ID NO: 15777 - DNA, 417 bp, Glycine max
aatgggtgttgctttgactgtgtgctcaattcctggtcaagttgcatcagatcgtttggggccaggaaagatggaacttggtcttggaattcatggagaacctggggcagctgtggctgatattcagcccgtaaatgtggtggtttctcatgttctacagcaaatattgtccacggaaacaaactatgtaccgataactcgaggagaaagagtggtccttatggtcaatgggttatgtgccacttcttaccatggaactaatgattatagctggaaaaacagttccaaaattacagctagaacatggattggctgttgatagagtttatacagggtcatttatgacttctcttgatatggcaggtttctcaatttctattatgaaagctgatccaattattctttaacgattagatg

SEQ ID NO: 15778 - DNA, 405 bp, Glycine max
cagctgctttgtatgtgttgcggtgctcagcctcagcctcagcctcaggcagcaccgtttatgaggttcccattttggaattcagttcatccaaagaatccaacaagtgtagtaagggtgcaagcagaagcagcagatatgaatatgaattcaatcccacacgtgctgagtgttgctgggtctgattctgggggtggtgctggaatccaagctgatcttaagacttgtgcggctcgccgtgtctactgttccactgtcattactgctgttactgctcagaacactgctggggttcaaggactcaacattctacctgaggattttgtggcagaccagttgcactctgtgctctctgatatgcatggtcatgtcgtcaaaacaggcatgctggcctctcttaatata

SEQ ID NO: 15779 - DNA, 339 bp, Glycine max
aagcaaaaagaaagaatcccaggcgaggagaaagatggaggggaaggagcaggatgtgtcgttgggagcgaacaagttccccgagagacagccgattgggacggcggcgcagagccaagacgacggcaaggactaccaggagccggcgccggcgccgctggttgacccgacggagtttacgtcatggtcgttttacagagcagggatagcagagtttgtggccacttttctgtttctctacatcaccgtcttaaccgttatgggagtcgccggggctaagtctaagtgtagtaccgttgggattcaaggaatcgcttgggccttcggtggcatgatctt

SEQ ID NO: 15780 - DNA, 362 bp, Glycine max
atagcgcagcctgcagcatgatatcatgacgtcaataggatgccaatcaccgtattgaggccatccatctggcgctgatgcataggctatccttatgctgcacgagcatcgagaagcatcggactaatattatacgagctaaagcccgataggattatagcgataccaatgcgatcattgtgcaagcttcattgtgtgctgatctgcctataccatgctgcataccctatacctatgcggcgatcgatgttaggatccatactctcagactactagatcactactgtagatgtgtcagttatcagtaggacgatctattcttgctgacctgactgcacaaaccttctagtcatcatactcga

SEQ ID NO: 15781 - DNA, 389 bp, Glycine max
gttgtgtttctgagtttcggaagcatggggagattctcgaggactcagttgagagagattgctattgggttggagaagagtgagcaaaggttcttgtgggtcgtgaggagcgagttcgaagagggtgactcgggggagccaccgagtttggacgagttgttgccagaagggtttttggagaggacaaaggaaaaggggttagtggtgagggactgggccccacaggcggcgatactgagtcatgactcggtgggtgggttcgtgactcactgcgggtggaactcggtgttggaggcggtgtgtgaaggtgtgccaatggtggcgtggcctctctacgcagagcagaagctgaataaggtgatctttgtggaaggaatgaaaagtggttt

SEQ ID NO: 15782 - DNA, 373 bp, Glycine max
caagaagaacatatatactgctagggagtatgttgtttatgtttatagtggctgttgctgtgctaatggcatcatcagggcaaagaaacagcactgccaaggaataattggacaacacacaagttgtttatagattgcctagtgcaaagggagaaaaattctcattgttcattggtgtgaataagagaagaagaaaaaatctattaagaaaagagtgcagaaaaagaaataaagcagggagcatagttgatatattcctaattgaaatgcttttatgttttttatttttctgtatatttggacttccaaaatgaaaaaattgtccgatattatatatatatatatatgatttatatataaaatctccaatgtt

SEQ ID NO: 15783 - DNA, 305 bp, Glycine max
aatatctacacaaaagtgttccacttgagtgaaaagtagtgtgttaagaactaaacaatttttcaatggcgtccaagaaacaagaggagcgagctgaggcagctgcgaaagttgctgccaaagaactcgaacaagtcaacagagaaagaagagaccgtgatttcggtgttgttgctgaacaacaacaacaacatcatcaggaagatcaacaaaaacgtggtgtaatcgggtccatgtttaaggcggtgcaagacacctacgagaacgccaaggaagctgtcgttggcaagaaagaagctactaat

SEQ ID NO: 15784 - DNA, 300 bp, Glycine max
ctcttctggtaccaatggggtcctcatcaaactggatttgtttccttttcctcaccacccttttgtttgctcttcaaatcagtgcacgagacaggcagttctttagcaaaggcacccattttgacaaaaacagtgtcgaagagacagaactttccaacaaagaaacaccacaagtgaacaagccagagcaacaaccacctttcattccggggactgaaaacagctatgggctatatggtcatcatgatgggtattacccagttcctttcaccaacaccaaacccaatttttatcaacccc

SEQ ID NO: 15785 - DNA, 189 bp, Glycine max
gtttgtggtctgtcttatgtggacacaattcctagcagttacaacataatgtcatttgagtggtctttggccccctagcaggttatctgtaccgttacaaattaatggtccacacatacaggatttatgtacttttaggttattagcataatagttgaacaattgaattaataaattaattatgttatg

SEQ ID NO: 15786 - DNA, 340 bp, Glycine max
tccagccagaggtgaaatctctagcactggaaattgctaagctgattgataatgacgatggcgttgccgctgcggttgatgcatcccatcgacatctgcctgatgagctgccactgccaactgctattccagcggaggaggaccacttgaatcctttgcagtggctttttctccaacttggaaggttctgttgtgcaccttgtggaggtgtgtaggttctctgcattaattactttttcattttcattgattcattgcagaatacatgttgtacgttgcctagtgaatggctatggcatatccttcattgtcaagtctttagggtgaggactcgactaac

SEQ ID NO: 15787 - DNA, 337 bp, Glycine max
attgtcttgtacagaggaagatatatattctagatatgcgtgcacagagaatgatcaagaaaacaaaatatggaagcaaaaaactaaagaaagaagacaagtctcgttctattttttttttcgtttctggacagtttaaaaaaaggagaaaaagaaaattgtgcagctttccttgggttttgttttggagctaaacaaacgcaatggtatgctccaacattttccttcaactttatatatatgtttttcgtacgtggaaatgtctctccgaggtattttcatgtatacaattttgaaccacaggtaaataccacagcatatagggatttgtctttct

SEQ ID NO: 15788 - DNA, 410 bp, Glycine max
gaagaatttggtcctgagtgggctatgcagcacatgaattcctcaggttttggagatgaacaacaacccacactatttgtatcggatgactattcttcgtgctatctctctgcttgctcctgtgatgggccctgaaatcacttgttcaaacttgttaccagttgttgttgctgcatcaaaagacagagtgcccaacataaagttcaatgtggcaaaggtattagagtccatcttccccatcgttgatcagtctgtggtggagaagactattcgtccatgtctggttgagctcagtgaggatcccgatgttgacgtgcgatttttctccaaccaagcactgcaggcaattgatcatgtcatgatgtctagctaggcagaaatggttccacacgcaattaattaggttgaag

SEQ ID NO: 15789 - DNA, 333 bp, Glycine max
ctcacctacaccctggacgagattgagggtcccttcgagggtacatccgatggaaccgtgaaattcgaggagaaagacggaattgactatgctgctgtcactgttcagcttcccgggggagagcgtgtgccattcctctttaccattaagcagttggtggcatctgggaaaccagacagcttcagtggggagttcctagtgccttcttaccgtggttcctctttcttggaccccaaaggaaggggtgcctcaactggttatgacaatgctgttgctttgcctgctggtggcagaggagatgaagaggaacttgctaaagaaaaccaccagagt

SEQ ID NO: 15790 - DNA, 365 bp, Glycine max
  modified_base (329)..(329): a, c, g, t, unknown, or other
gacaaatggaaggttccgaagtgtgagacacagagtgttggcaaatgggttcaagtccaggctttcaatgatttactttggaggtccacctttgagtgagaaaatagcaccattatcctctctcatgaaaggaaaagaaagtctatataaagagtttacctggtttgagtacaaaaaatcaatctacggttcaagattatctaaaaatagacttgaacattttgaaagaattgcagcttcgtaatatatattctagagaattgtttgagacacttgtcaatacaaaatgggagattacaatatgtagtttgtatactataaatgctttntttttttttttttactttttaagttatttatcaatc

SEQ ID NO: 15791 - DNA, 336 bp, Glycine max
gtttgttggactgaacaagggtcacgtcgtcaccaagaaggaattgcccccacgcccctcagatcgtaaggggaaaacaagcaagagggtgcactttgtgaggaacctcataagagaggttgctggttttgcaccctatgaaaagcgtataactgagttgctgaaggttgggaaggataagagggcactgaaggttgcaaagagaaagcttggaacccacaaacgtgcaaagaagaagcgtgaggaaatgtccagtgttctcaggaagatgaaggctggtggtgctggagacaagaagaaataagtcttaattatttactcttttccagaatcact

SEQ ID NO: 15792 - DNA, 286 bp, Glycine max
  modified_base (271)..(271): a, c, g, t, unknown, or other
aattgtttaaacctaattctcatttcttcatcggtcgatgcttctcctcctaaagatgcagatcttcgtgaaaactttgaccggtaagaccatcacccttgaggtggagtcctccgacaccatcgataacgtgaaagctaagattcaagacaaggaagggatcccacctgaccagcagagacttatctttgcgggtaaacagcttgaggatggtcgaacccttgccgactacaacatccaataggaatccactctccacctcgtgcttcgnctcaggggtggcatg

SEQ ID NO: 15793 - DNA, 404 bp, Glycine max
  modified_base (351)..(351): a, c, g, t, unknown, or other
agcctcgccgactcggttgctatcagcgagtgagagtgagtgagtggttctcttgcagcaacaaggtttagtgacaccaaacagacgggaaatgggtcgtggggtcagtgctggtggtggacagagttccttggattatctctttggcagtggggtacctgccagcagtgcaaatggtgctcgcactcaaaatgcaagtgctccttcaccaccggttgataagcaaagtccagcaccagcaccagcaccagcacctgcacctgcagcagcagcagcaccagcacctgcaccagcaccagcaccagcaccagctgataagcaaattccagctggaattcctggaagtctcanaaacaattaccatcgcgctgatgggcaaaactgtggcaactttctcactgatc

SEQ ID NO: 15794 - DNA, 253 bp, Glycine max
ggacccatctacacgaccgctatcatacaagtagagtgaggcgacacacctagaggacaaagccaagtttacaccaaccacagtctacacgtacgggtcacctggaccacgatacaagtggcctactcctccacacaccatcctatatagtacccatcttcaccacccgcagtgtacaagtgcacatctcctactgctccctacaagcaccaatatccaccacctgcaccctacaagtaccaatatcctccac

SEQ ID NO: 15795 - DNA, 382 bp, Glycine max
gagagaatgatgattgagacggactcaccatactgtgaaggcaagaatactcatgctggaattggttttgttaaatctacatggccttctaagaagaaagagaagtatgatcaagagtgcattgttaaaggccgcaatgaaccttgtttagttaagcaagttcttgaagtggttgctggctgtaaaggcatcaacgatgtgagtaacctcagcagaacattgtaccataacacttgcaggatatttttccctcatgacttggattctgctgctgatgctcttctagctggcggtaattctacataaacatacttgctagtgacttggccttttctttgcttatattcggagctgttctgtagaccaaatcctcattttcttg

SEQ ID NO: 15796 - DNA, 251 bp, Glycine max
gcatgaaacatgaagctttttttgttgacttttgtgaagtttgtgttttgaacctatgtagtctgctgttgtcctcacacaagaaggcataacatattttagcttggcatgcagatttatcaatcttgtgtgaattttttgccgtagcttttaaagttctaaccatccttgatgatgtagcatattgcttaagtgtgtattatgtgtcttaaggtagttgcgtaatgaagtagtgatttatttcgctccgc

SEQ ID NO: 15797 - DNA, 394 bp, Glycine max
cttttgtgttagtgagagaaagttctctctgcttgtctcgcttagactcaaaaccctattgcgtgctttgcaatcgaccccgattatggccaacagtaacctccctcgaagaatcatcaaggaaacgcagcgtttgctcagtgagccaggtaagttgtaatttcgagcaattttttagtgctttagaagctcaagctaagttaaatgggtagtgtttgttgtgcctattattttttgttaaatttgtaaaataccttgagtgtttccttgtggactttcgcaagaattccgtccttggtgtgttttgtcgtactgagttaatttgtttgtgtcttgtgtgatgatctgatgatgcagcaccctgaaattagtgcgtccccttcggaagacaata

SEQ ID NO: 15798 - DNA, 319 bp, Glycine max
ctaatgcagtgaaaaggcctgttcgtattcgtgaattttgatcctaatgtgtttaacaagtaatgttctttctttgacttgattgccttagaattatcgatttatcaagggctccatttgttccctttagattaactttgttgtatgcttcagaatcaaagttcttaccaattttagtcatgatctttattgttgtgtatcatttacactttccaacaagaagagaatgtagtggcagatatgtcaaccaagctaaattgtctatggttacagtttactcatctaaaactaatttgttcagcaaaagaaaatttacaat

SEQ ID NO: 15799 - DNA, 356 bp, Glycine max
ctgggatatgttgctgcatccaaggacccggtgattggaggcagcttacttttaacatacacaactggctatgtttctcctttactcttggctgcttcttttgctggagcactacagagcttgctctcattccgcaagttctcggcatggatcaatcctataagcggagcaatgctgttaggtggtggtgtatatacgttcttagataggctgttcccagtcacaatggtgatgtagaaaatctcttggctcttaacatgctgtgatattttacattaacagttcaatgtatatatgtcatacaagtattcaattcaattggaatagaaatccaaatgagactattgcataccaca

SEQ ID NO: 15800 - DNA, 424 bp, Glycine max
  modified_base (346)..(346): a, c, g, t, unknown, or other
agtttgttgagatagctagaagcaataagatgaaaatgaaagtgcttgttttgtttgttgctacagttttggtagcatatgaatgccatggctcagactaccagaagttccctctccaaatgaaaactgggtttggtgggcaatacagcaatgaggtggcatgtgccagttggaggcttggcgtggaagcaaacaacgtagtcaagtggcaaactgttcctgcagcttgcggagagtacatagctgactacgttctaggagaccaatatagatcagattccaaaacagttaaccaacaagcttatttctatgctaaatccctcaaactcaccaacaaagatgtctntgtcttggacgttgacgacactactctctctaatctccagtattttgctaaccatggatttggtgtggaaccaccaca

SEQ ID NO: 15801 - DNA, 389 bp, Glycine max
ctcaaaaggtgaggtcgaagttctctgtttcttttccttgtgacggcaatgggaaggtgaaaaaaaaggttcccatcataaactttgacacatgaagagagatcacattacgggtttgccaaactaaagaaaaaagttggagtttttgatatggctcaatagctggttccatttgaaagtgttagtagtggtatttgatccttcgtgcaagcaaaaacaacagtgactatctgatataagttttgagaggttatcaaatttcatgctgagggtggtttgaggaatgagagcagaagataatggatttctggccagaatttcttgcaagcagttcgggaagagagtttgtagcaggtggctctggaggcattgctggtataatttcaggt

SEQ ID NO: 15802 - DNA, 232 bp, Glycine max
gtgagaaacatagaaaggaaataattgatctttgaaaatgcgaggaggaaagaaagctggagagtccatcaaggaaacagctgcaaacattggtgcttctgccaaggctggcatggagaaaaccaaggccactgtccaagagaaagcagaaagaatgacggcacgtgatccgatgcaaaaggagttggcaacccaaaagaaagaggcaaagatgaaccaagcagaacttgac

SEQ ID NO: 15803 - DNA, 395 bp, Glycine max
ataaagaaagatcatggcgatggcaaacttggctcgacggaagggttacgccgtcgttttgtcgtcgaggtcgtcgctttgtctgacaaggtggagggggttcgcgtccggatctgacgaaaacgacgtcgtggtcatcggcggcggtcccggcggctacgtggcggccattaaagcggcgcagctgggtctgaaaaccacttgcatcgaaaaacgtggcactctcggcggtacctgcctcaacgtcggatgcatcccttccaaggcacttttgcattcttgccacatgtatcatgaggctaaacatgcatttgccaaccatggggtcaagttctcatctgtcgaggttgatttgccagccatgatggcccaaaaagataaagcagtttctaatc

SEQ ID NO: 15804 - DNA, 407 bp, Glycine max
ccggacgttgcggactgcgaggttagcttcaatgctgaattcaagcctgatgttgaagatgcgtatacgggtatcatacagaacgccacattgatgtcccccaccgatgaaccaatagtgtccaataactttcaagttgttgaactgggaaaattgttgctcaccatacacaatcctaccttgtaaaaaaagaggctactttacaggttcaagatcaaaccctactctgattgagagaaaataacctctggtggtggttttgggtacatgaaggaaattgaacttgaagagtaagaaatatgcatgtcatcattagatcggtccatttttcatctatagctgtggtcgtcagttgtttgcagattgtctttctctgactttggtgaatgatgtgttgcatgtaacac

SEQ ID NO: 15805 - DNA, 423 bp, Glycine max
ctcccttttttcgtgcgcaaactgttcccgttggtctctgtccctctgcacttcacaatcctaccctctcactgtgctatctctcagcatcttcgcaatcacacccttcccagatggccttgcaaacagctactcctccaacaactcccagtgcccaagttgttggtaatgcatttgttgagcagtattaccatattcttcaccattcaccaggttcggtctatcggttttaccaagactctagtgtgataagccgtcctgattccagtggtgtgatgacatcagttacaaccatgaaaggcattaatgagaagattctttcactaaatttcaaggaatttaaagcagagataaagactgcagatgctcaaaaatcatacaaggaaggagtgactgtgttggtgactggatgcttgactggca

SEQ ID NO: 15806 - DNA, 407 bp, Glycine max
  modified_base (353)..(353): a, c, g, t, unknown, or other
  modified_base (363)..(363): a, c, g, t, unknown, or other
cctgaactactgaacaacaacctcttcttcttctctctcggtctgtagcataatcattcatcaccacacaagagaaaaaagaaaaagaacaaagaacaaataaacctttttttttttataaaaaaagaaagaaaaggaaataaagttttttgttttttcgatgaaccagaagttcatcggaaagccgccggcgacggtggacctggatcggatgccggagcgtgggtcccaccaccggcgttcccactccgacaccttcttacgcttcgccgcgaacttcgacgaccttctcctcttcgacccctccgacttcgacatctccggccttccgtcgacgctccctctgccatctncggtctccgncggctggtttcgatgtccgtcgactccgacgagtccggcaaaca

SEQ ID NO: 15807 - DNA, 384 bp, Glycine max
tctcaccattccctccaacctctccaagcccgccgccctgcgccgcaaactaagcccaaagctaaggtccgccgccacaaccaccatcgtctgcagcaccaccaacaacaacaacaacaacaacgtgtcctccgacctgaaggcgttctccgccgcgctggccctctcctccatcctcctctccgcccctctccccgccggcgccgacatctcggggctcaccccatgcaaggagtcgaagcagttcgcgaagcgtgagaagcagtcgataaagaagctggagtcgtcgctgaagctctacgaggcgggcagcgcccccgcactggccattaaggccagcgtggagaagacgaagaggaggttcgacaactacgcgaagcaagg

SEQ ID NO: 15808 - DNA, 408 bp, Glycine max
ggtctttcaagtatgcctgggtgcttgataagcttgagggtgagcgtgaaagaggaatcacaattgatattgccttgtggaagtttgaaaccaccaagtactattgcacagtcattgatgcccctggacacagggatttcatcaagaacatgatcactgggacatcccaagctgactgtgctgttcttatcattgattccactactggtggttatgaagctggaatttcaaaggatggacagactcgtgaacatgctctgctttcattcacccttggtgtgaaacagatgatttgttgctgtaacaagatggatgctactacaccaaagtacttcaaggccaggtatgatgaaattgtgaatgaagtttcttgctatttgaagaaagtaggatacaaccctgacaaga

SEQ ID NO: 15809 - DNA, 408 bp, Glycine max
gccttgtgccgtttgtgttgttttcgggacgaagaagaagatggtgtcaggttctggaatctgcgcaaagcgggtggtggtggacgcgcgccaccacatgctgggtcgtctagcctccatcgtggcgaaggagcttctgaacggccagaaagtggtggtcgttcgctgtgaagagatttgcatctcgggcggtctggtgaggcagaatatgaaatacttgaggttccttcgcaaacgcatgaacaccaaaccctcccatggccccatccacttccgtgccccctccaagatcttctggcgcaccgttcgtggaatgataccacacaagacaaagcgtgggggagctgctcttgctcgtttgaaggtttatgaaggaatccctactccatatgacaagaccaagagaat

SEQ ID NO: 15810 - DNA, 391 bp, Glycine max
ggttgaaccttccggtgtttcctatagatatttcggtgctgcaattgggaagggcaggcaggctgctaaaacagagattgaaaagttaaagcttgctgatatgacatgtcgacaaggggttattgaagtggctaaaattatatatggagttcatgatgaggcaaaggacaaagattttgagctagaaatgagctgggtgtgtgatgagtcaaaccgccaacatgagaaggtcccggatgagcttctagaagaagcaaaggcagctgccaaagcagctcttgaagaaatggatgcagattaatagactagaaatgtttatttcaaagttgcatttcataacttgtaattgagcatttggaacatctataggaaatacaaggcttcgatagtc

SEQ ID NO: 15811 - DNA, 354 bp, Glycine max
ctcgagccgaaaaaaatgggttcttctctgtggacctgtctgattttgttatcacttgcttctgcttccttcgccgccaacccaagagcaccaattgatgtgccatttggcagaaactatgtgcctacctgggcctttgatcacatcaaatacctcaatggtggttctgagattcagcttcatcttgataaatacacaggtactggcttccaatcaaaagggtcctacttgtttggtcacttcagcatgtacataaaattggttgctggtgattcagctggcacagtcactgctttctatttatcatccacaaactcagaacatgatgaaatagactttgaattcttgggaaac

SEQ ID NO: 15812 - DNA, 371 bp, Glycine max
cggctcgagaccaacaccaaaccttaaaattattttgcccgtctgcttctctctctgtctttctcagaagacaactcaaaaaaaccatggacgtgggtcagatgcagagacagtggatcgactacaccaaatccctcttccttgagggcttcctggatggtcagtttctgcaacttcagcagcttcaagatgagaacaaccctgactttgtggtcgaagttgtctctctcttctttgaagattctgaaaggcttctcaaagatctcacctttgccctagatcagaatggtgttgacttcaaaaaagttgatgctcatgtgcaccagttaaagggtagcagttcaagcataggcgcgcaaagggtgaaaaat

SEQ ID NO: 15813 - DNA, 313 bp, Glycine max
cacaaactcagggtagggcagagagagagagagagagagagagagagagagagaatgggagggtgggctatcgcggtgcatggtggcgctggtgtcgaccctaatctcccactcgagcgccaagaagaagcgaaacaacttctcacgcgctgtctcaatcttggaatctctgctctaaattctaatcttcccgccatagatgtcgtcgaacttgtggtgagggaattggaaacggatccgctgttcaattcgggccgtggatctgccctgacagaaaaaggaacggtggagatggaggctagcatcatggatg

SEQ ID NO: 15814 - DNA, 420 bp, Glycine max
ccgcgctgcagtcgccagggaggcagcggcggcggcggagaggccaagaactcgtttggcggccaaaaaagaggagaagccccttacagtaatatccgatcacgctaagaaagacgccgacgccatggctgacgagagcggtggcttgagtgcaaacaagggcgttgcacaagaagatgacaccaacgcagctccttttccggagagggtttttgttggccgacgagtcattggtggtaacgaccggagcactggtgctggtgccactaaggctcgtgaggctgctatgacagttcaaagaaagatggtagattctcagtgtaagaagagcaaaggttggtagactcctcggcttgtttatgggcagtgctctttttcaataaaactcggaacatttcgacagattctgtgtatgcactt

SEQ ID NO: 15815 - DNA, 383 bp, Glycine max
gcggacctcaacctttctctctccggtgatgccttcgacatcatagttaaaatcaaaaacgcattagaacttgcatgccctggtgttgtgtcgtgttccgacatcgtggcacaggccacaagagaccttgttaagatggtcggtggtcctttttaccccgtgaggctggggagaaaggatagcactgaatcagatgctgcgagagtgagtgcaagccttccaacaccaagcatgaccatggaccagatcattgagaagtttacctcaaagggtttcactgttaaaggagatggtggctttgactggggcacacaccattgggttcacacactgcaaggagttcatccacaggatctacaacttcagcaagacctctgatgctg

SEQ ID NO: 15816 - DNA, 418 bp, Glycine max
tttcattctctatttccatttttcggccgtccagaagacgccagcataccactaaagggtccacaggacgaccttcagaacgtgcctcaacaggccgccgaccaaaaacctcagaaactcagcccagatttctacataaaaacttgccccaatgcccaaaaaatcgtggccgatgcacttgcagacatcgttaagaagaatcccggcgctctcggaaacctacttcgccttcaattccatgactgcttcgttaatggatgcgatgcatcgatcttgctagattactcgccaagcggtgacaccgtggagaaaagttcaatggtgaatggtctactcctgaaaggagctgatatgatcgatgacataaagttgaagctggaggagcagtgtcctcaaactgtgtcatgtgctgacacat

SEQ ID NO: 15817 - DNA, 405 bp, Glycine max
ttggtgtgttgatgttttattaaacttttgtactcttgcgttgaaactagttggttaggcaagttttagttttctattttatttcagacttttcaggtgctcatattcttatgatgatcatcaaactgcaaatatagtgagcccattaagctattactgaaatttgttgcagatttgaaattcttctaagatggatacttcttataggactggtggagtcaagtacgagtgcttgctttttgatatggatgacactctttacccattgagcttaggtctcaatttgttttgtcgcaagaacatacaagagtatatgttagaactcttgcatattgaagagagtgaagtgccaaaaatgtgtttggatttgtatagggaatacgggacaactatggcaggattaaa

SEQ ID NO: 15818 - DNA, 94 bp, Glycine max
ctcaaattcactttctgcggatattccttatacctggaggggtccaacaattgtgtacgaaaacgatacatggttgatatccacttggattcct

SEQ ID NO: 15819 - DNA, 417 bp, Glycine max
  modified_base (404)..(404): a, c, g, t, unknown, or other
ctctgagtatcgtatcgttttattattatttctagggctgtcttatcagtatgtattcaaaaccctagctaggtttttggagctccctttctttctttccgatcccaccgtcaaacttgtcattctatatgctttgcagggtccattgaatatgtctccgtcgttggatcttcctcccaagggtggcttcagttttgatctatgccgaagaaacgcaatgcttcaaaacaagggcctcatagccccaacctttctcaaaactggcaccactattgtcggtttagttttccaggatggtgtcattcttggtgctgatactagggcaactgaacgacctatagtggctgataaaaactgtgagagaattcattatatggcacccaacatatattgctgtggagcangcacagctgctga

SEQ ID NO: 15820 - DNA, 213 bp, Glycine max
tgcataaatgactcgctgggctatatggaaaccatggcgggagcgggtgtagatgactaaccggcagccatatggatctacgcagaatgctgggatcacgcaagctctatcctgaccgcttaaggcgatgactatgccatgaacatcgtaccggacgaagagctgactgcaatgcataggttactgtcaactgacgagcataacctatattga

SEQ ID NO: 15821 - DNA, 419 bp, Glycine max
aagcttgttcagtctttcttggaactttgttactctcacacatgtcgggctccgtgcctttggtttcaaccatttttgtcttgcttctgcttctggtggccactgagatgatggggccaacaatggtggcagaagcaagaacttgtgagtctcagagccaccgtttcaaggggccatgtttgagtgacaccaactgtggctctgtttgccgaaccgaacgtttcactggaggacactgccgtggcttccgtcgcagatgcttctgcaccaaacattgttaattttaaaaaattaattaagagtgctttgatagaagatgatagatctatcatctttctactcgtgttgttaattaaccactttgtgtttgagaataagggttacccattctactatgggtttctttggttgcctcttat

SEQ ID NO: 15822 - DNA, 390 bp, Glycine max
  modified_base (317)..(317): a, c, g, t, unknown, or other
gaaaatttgaagagtttgtttattgtgaaaaaaagaaaagggcaggcagcaaagaaagccatagagacctttaaggaaaccgcagccaacattggcgcctctgccaagtctggcttggagaaaaccaaggccactatccaagagaagaatgagaagatgaatgcagaagatcaaactcaaatggatatggctaccaagaggaaagaagagaagatcaaccaggctgagatggagaagcagcaggcccgtaagtactacgccgctgcaaaacaatacgccatggctgagcacatggcaaagggcaaccacgacaccgncgggcctagaatcgagactgccacacacatcaccagtgggcccgggactgacaatgctatgtactctaacact

SEQ ID NO: 15823 - DNA, 409 bp, Glycine max
tccttaggattcaaaataattgtgtgcttttggaacaagagattggaagggacgtttttagaagtaaaaacctattcgtgttgtgtgttggggcgtggcacggcactctttgtctcaactcaactcaatgcaagcccttcgtccactcctttcccatttctgatccaattgggtggccattagtgtgttgactggatgagattgatggacatgcttctaacagttcaataatctttaattcgaaacatggaaacactgctgtcttgtctttttatctctggggctctatagcaacacacaacattttttctgaatttgattcaggtgataatgttaatacaaacttctgtccttagttcagttgaagctggtctatgttatgtatctgatgatgggaaagatgttctat

SEQ ID NO: 15824 - DNA, 415 bp, Glycine max
acttgaagttgcagagagaaaatggattgagaattctctgtcttggctctttctcttgccaactttccttccttgggatcattctgcttctttgctatggaagactcagattcagttgctacgctgatagattccacaacttctaagatacagcagctgcaaaaggcatttgctgaacttgaaagttaccgagctgttactctgaacttgaaatggaaagaactcgaggaacattttcatggtctggagaaatccttgaagaggcgctttcatgaattggaagaccaggaaaaagagtttgagaacaaaacaaggaaggctcaggagatactggagaagcggcaagcagctgtttatgccaaggagcaagccacgttgcagaggcttcaggagaaaagggatgctgctgtatttg

SEQ ID NO: 15825 - DNA, 383 bp, Glycine max
ctcgagccgctcgagccgcgagaattcttcttggcctccgtccaggattcaaccattgtgagaagaaagaggtaggggaaaaaactggtgttccggcgacattgctgtggttttcaacgtataaaccatttcgccggaacccagagaaattaacaatgtcttcccctcataactctgctcctcataattcctcacccgataactccacccctgatgatgccactcccaataactccattcctgataattccacacccgataactccattcccgataattccacacccgataactccacatccaataaatccgctccccataactccacacctgataacgccactcccgataattctacacccaataattccaataaatcacac

SEQ ID NO: 15826 - DNA, 390 bp, Glycine max
atttgtcgtgatgtccaccgtgcagagccagattggaaaagaatattgttaagatacttcaacccagtcggtgcacaccctagcggttgtattggggaggatccccgcggaattccaaacaatctcatgccatttgttcagcaagtagcagttggccgacggcctgcactgacagtttttggaaatgattataatacaactgatggcactggggtatgctctgactgacttaaacttatgcactgaaatttttccatgatgggcacattgctgcgttgcttaaactagatgatcctaatataggttgtgaggtttataacctgggaacaggaaagggaacatcagttttggagatggttcgagcttttgagatggcatctggaaagaaaa

SEQ ID NO: 15827 - DNA, 423 bp, Glycine max
gctttatcatgtggcattactaccaccaatattagcaccagctgaatatgattggaatttcgtttgttctctgtcatgctgctatggcttccttatcgaatatcttactgatgttttgtttgttcaatcttctagcatacccagtttcagttcattcagctggtgaagttccaattaatgtgacaaagcacttttccttctataacttcagcttcagcaacaaccccagattagtccatgatgtgaagctcctaggcagtgccaagttctcaaatgaaaagggtgctcttcaaatccccaatgaatcagaagatataagacaccaagctggtagaggcatctattccttcccaattcgcctgctagatccaagcaccaagactccagcttcatttcaaaccactttctctttccaaatgaaca

SEQ ID NO: 15828 - DNA, 410 bp, Glycine max
ctgacccaaaatccgtcttctctttctttctactccgatgcctgcgttgcttttggtcttggtcgaattgcgaactcagcagcagaagaagttcctcaattgtttcacctcaaattcgattcgaactatgtaaacgccactgtcgcgtcgggtttgttgtctctgtttttgttgcggtgttactgttcctcggttcggatctccgaagcatgaatctcagcaacggaaagggatccatgtcaacccttactgcaagcgtggttatgaaatccggcgacgccgtctccgaccagtttccggcgggtctccgggttctcgtggtggacgatgatcccacgtgtctcatgattcttgagaagatgctccgcacgtgcctgtacgaagttaccaaatgtaatcgagcagaaact

SEQ ID NO: 15829 - DNA, 392 bp, Glycine max
aggcatcgttagcagttttgtagattcaacctcaagttggggagttacgttctaatatatttacacaagactgataagagaaaatgtctctgattccaagtttcttcggtggccgaaggagcagtgttttcgaccctttctccctcgatgtgtgggaccccttcaaggattttccatttcccagttctctttctgctgaaaattcagcgtttgtgagcacacgagtggattggaaggagacaccagaagcacacgtgttcaaggctgatattccagggctgaagaaggaggaagtgaagctggagattcaagatggcagagttcttcagataagcggagagaggaatgttgaaaaagaagacaagaatgatacgtggcatcgcgtggagcga

SEQ ID NO: 15830 - DNA, 420 bp, Glycine max
gaaaatctgaaatttcatttctctctgtataaatatcctgagtccttatcagcttcactatttcgattgaaatcgccgaagaaggtattgacgtcgatgatgaaaatgaaattggtgaaaacattactgcttctcctttgtgtgaaactcttctgttatgcagtgattggtgctcctcaaacttgtcctgctaacaatgaggataaatgcggcgattcagatgaatggaaaggggagtttttccctgacattcccaaaattaaatatgagggtccgtcaagtaagaatgtgctttcatttaaatggtataatgcagaggaggaaattcttgggaagaagatgaaggattggttaagaattagtgttgcattttggcatacattccgtggaacaggtgctgacccatttggtgcacctacc

SEQ ID NO: 15831 - DNA, 136 bp, Glycine max
cttaaatacttacacttccttaatggaatatgggggagcgggttaatatctgtatttctttactttaattgcttacctttgatactgcatactttgacattaacttcagaatgcttaacatgtgccctcttaacca

SEQ ID NO: 15832 - DNA, 409 bp, Glycine max
ctctggtttcgagggtgacaacatgattgagaggtccacggaccttgactggtacaagggaccaactctccttgaggctcttgaccaaatcaatgagcccaagaggccctcagacaagccactcaggcttccattgcaggatgtctacaaaattggtggtattggtaccgtgccagtgggacgtgttgagactggtgtcgtgaagcccggtatggtggtgacttttggtcccactgggctgacaactgaggttaagtctgttgagatgcaccatgaggctctcacagaggctcttccaggtgacaatgttggctttaatgtgaagaatgttgcagtcaaggatctcaagcgtggttttgatgcatccaactccaaggatgaccctgccaaggaagctgccaacttcaca

SEQ ID NO: 15833 - DNA, 242 bp, Glycine max
attttaaccctaggatcctttctcctctcatccacctggagcaaagaatgaaccgggcaatggaagaagataatgaggaagaagagttcaacaccgaaccggtatttgtactcatgatgagtgttaaaaataatactcaggtactgattaattgtcagaacaacaaaaagcttctgggtcgtgtaagggcttttgacaggaactgcaacatggttcttgaaaatgtcaaggagatatggact

SEQ ID NO: 15834 - DNA, 190 bp, Glycine max
ctggatgtcacggcaattttataggtcctccatgaaagagagagagagagaggaaaacgaatccaagggagatatacaaccaccgtccaaaccaccatcaacaacgtacgtcttacgttgctacatggccactcgtgttatccaaccaggattcctaaggaactttcgttccaacaccgtcacaaaaccc

SEQ ID NO: 15835 - DNA, 356 bp, Glycine max
gcaggatgatagtgataatgtcacccgatttttaatgttagcacgagaacctatgattcctggcactgataggcgatttaaggtactcagctaatatagaataattagctggaattattggatagaacacatcacatgtctcctgactcccctattgattggatttatgcttatcaatattaatattgccattgattgtggtgttgatttctcagactagcatagtattttctttagaagagggtcctgggatacttttcaaagcccttgctgtttttgctttgcgccagattaaccttacaaagattgaaagtcgtcctttgcgcaaccaacctctacgagcagatgatagcaac

SEQ ID NO: 15836 - DNA, 346 bp, Glycine max
  modified_base (282)..(282): a, c, g, t, unknown, or other
ctcgagccgattcggctcgaggcttcacgtggaacatgggcaactgattgctggaatggaggaggcacacaaacatgtggaagaactagaatcaaaagccaagcaacttgaggaagaggtcgagaggcaaagaaccgtgatcttagaaggagcagaagagaaacgcgaggccataaggcagctatgtttctcactcgagcactatagagatggctataatatgcttcggcagcatgttatggggcacagacgagttccagctttggctgcctagttaataanatttgaaacgtgatcttgaatattggtttggtgctatcttcatttcagacttgggatggtttat

SEQ ID NO: 15837 - DNA, 368 bp, Glycine max
ctctaataaattttaactctaaaccatggctattaccatggtgcgactctacttcatgctctgcatcacaatcacacaccaaacgattatgtaacccctaacacactcaattaccaatacccattacaacagtacctaccagcttgtcaaatctacctacactcgctcagcctcacgcttacactgacaaactcatcataactccgaagtccctctcccaatttcttcaggaagcgactacacgctttccttaaacttacgctcacacacttctcaattcataaccctttacatggacacatgcagcgacctcctctgggatccatgcactaccttataatgcattctatgcgaaggcaaattcaacg

SEQ ID NO: 15838 - DNA, 415 bp, Glycine max
cttgatacattcgttgctggatggggtgattaagcatctacctgatggagtaccagaaaaggaagaaatcaggagaatgagaacagtggcaaatactgtaggtgttgttaatgatcatgattcagtttgggtaagatcaattttggaggaggttggtggtgcaagtgatggatcatggggcttgttaccatacttatttgccacattcatgacatctaatatttggtccaccacagcatttaatgttgacacagagggttttagtaacaatatccattgcttggcaaggtgcatttctgcagtgattgccggaagtgagtttgttagattggaacgggaacatcagcatcgacagtctttaacaaatggacatgctagtgagggaatggatcccgaattatcaagtcatatgtca

SEQ ID NO: 15839 - DNA, 410 bp, Glycine max
  modified_base (391)..(391): a, c, g, t, unknown, or other
ctgacccaaaatccgtcttctctttctttctactccgatgcctgcgttgcttttggtcttggtcgaattgcgaactcagcagcagaagaagttcctcaattgtttcacctcaaattcgattcgaactatgtaaacgccactgtcgcgtcgggtttgttgtctctgtttttgttgcggtgttactgttcctcggttcggatctccgaagcatgaatctcagcaacggaaagggatccatgtcaacccttactgcaagcgtggttatgaaatccggcgacgccgtctccgaccagtttccggcgggtctccgggttctcgtggtggacgatgatcccacgtgtctcatgattcttgagaagatgctccgcacgtgcctctacgaagttaccanatgtaatcgagcagaaact

SEQ ID NO: 15840 - DNA, 423 bp, Glycine max
gtcagctttttcttgcttccgtagttcatatggcgtgtgtgtcaagtcatcacagtttttctctttgcattggctctagctaaaatttacccctcaacatgtcaagtggtgcagggaaaagtctcctgcgttgactgcactcacaactatgacttatctgatattaaggtttcggtgaggtgtgatggtgtgaaaaaactggctttggctactacagaaaatgatggctccttcaaggttgatcttcccctagaccacacaaaaccttcttcttctgtgaataattgcctagcaaaacttcttggtgggccagttcagctttatgtctcaagggaaaaccaggtatcccaaattatcaagggcaaagatcaaaacagctacaccatctccactttccttagtttcaggacatcatgcccccta

SEQ ID NO: 15841 - DNA, 408 bp, Glycine max
ctgaagatgatccatccacttttttctctcttttcgggcggcgagctgctggttttcttttaccttgctatatcatggcttgggcaatcagtattttgcaacgccggcgacaaagacaagaagcggcagcactagcggcaacccaagttgcttttgttctacaaaccgggcagcgtaggggtctgcagtttgcaataggaccaggaccaccaacaatgaatacacaccaaccggaacaagtgtaatttttgtatgccaccagtgtatgtaacaaggcttgttggaatgccatgcatttttttactcatgatttttctgagctctaatttacatacatagcttgagagactttgagatggtacttaatattctagggtccttaaaccctcaaaaagaaccgctcatttt

SEQ ID NO: 15842 - DNA, 368 bp, Glycine max
ccaagctctcgatgcattagatgagaaaaggggttccacgagggagaaagctttgtcatcgatcattgacgctttcaatagcaacatgcagcatgagtttgtggagaagaaatttgctaccttactacatcaatgtcttgcttcaataaaaaagggatctaaaaaggcatctgctaaggagatagctttggcatctcatgccattggttgtttggccttgactgttggatgcggtgacaatgcccgcgagatatttgaggaatccattcgtcctttggatgaatctctcacatctaggatagatgtttcaaagacaccatcattactggagtgtttggctataatcacttttgttggagggaacgatc

SEQ ID NO: 15843 - DNA, 380 bp, Glycine max
cagaaacccaacttctgttcatatggaaaccagtgcggcgatggatgtcgaggaccaaccttcacccaactccaacaacgttaaacgcttcggccttaaaaactctatccaaaccaatttcggtgatgactatgttttccaaatcgtcccaaaggaagattggagtgcaatggcggtgtcactgtcaacgaacgcagtgaaactctattcacctgtggcgggtcagtattttggagagttcaagggtcactctgaaaccgtcaatcagatttcgttttcgggtccttcaaatccccatattttgtgttcgtgttcttctgatggcaccattagagcttgggacgctcggacatttcagcaggtttcttctatcaatgctg

SEQ ID NO: 15844 - DNA, 420 bp, Glycine max
gaagaggagaaaaagactatggagggtttgaagaagagagagctggagctggacgaagcaggcaacggtgaattggcttccaaggaagagcttcgcttcctcattgaacctctcgctaaaccccagctcgtcgatcttcttgctaaactagggtcccaatatccttcaattgcagaagaaataaaaagtattgcaagtgcagatcctgcccatcgaaagctttttgttcgtggcttggcctggaataccacttcagaaacattgcgtgctgcatttcaagagcacggagaaattgaggaaggagctgtgatctttgataaagtgacaggaaaatcccgtggctatggatttataactttcaaaaatatggaatcaactcagcaagcattgagagcccctagcaagttaattgatgggaga

SEQ ID NO: 15845 - DNA, 371 bp, Glycine max
  modified_base (328)..(328): a, c, g, t, unknown, or other
cacattcatactaaaaataaataaactaatatttgttacagacacatttcttttttagtatgagtagcttaacaaattttatctaatgcattcatactaaaataaaggattatatacgttaacaaataccaattgtcttagataaaattatagaactgtgacagctgtcttcttgctaacctaacatgtcatacccaaatatttataaggcttgaagggaaagtggctcttatcagtggtggtgctagcggtataggtgaggccactgcaagactcttctctaagcatggagcacacgttgtgatagctgatattcaagacgatttgngtctctctctttgcaaacacttggaatccgctttctatgtcca

SEQ ID NO: 15846 - DNA, 259 bp, Glycine max
cacaaagcaactaggcatagtgtgcatgatagggacaacggcaagagctgtgtacagagatgaatggcctaagcgagagcatggatctacggaaggttactctgctcttgccattggatgcaagtgccagatacatgcccaatgacgcttgttgggacgaccagaaaaactaccttggctatggggtctcgggagttggcaacaatggccttccctttgcctgagtgagttctggattcaaatgatataagggtggccc

SEQ ID NO: 15847 - DNA, 416 bp, Glycine max
  modified_base (334)..(334): a, c, g, t, unknown, or other
tcaaaattcttctccttttgtgcttccaactcttggcttggttatattattctctttcactttctgccaacccttggagtcaacatgactatcctcattgagcaatctgatcactttggggctgaagtagaggcaaagactgaaccaataaatgagagagaactggtgttggatggtggatttctgataacacagaccaactcatttgggcacatgtttagggcttataatgatgctgaaagtgagaggcatgaaggagtggagaacttctacagaaaaaatcacacttaccaatcaattgatttcgtgaagaaaatgagagaggagtacgcanaattgaacagggtagagatgagcatatgggaatgttgtgaactccttaatgaagtggtggatgagagtgaccctgacttgga

SEQ ID NO: 15848 - DNA, 358 bp, Glycine max
gaaaagaaaaaaaaaccacaacttcataaaaaaagacttagggtgcacgccattgtggtgagatagaaagaaagatgcaaatggaattccaaggctaacaacacaacttcaacaaattagggcttttattattctttgcaatcatatcatatccttcactccttcacttcactctcaaaactcccacagttgaagagacatgttggactatgaatgggggaacccgtccacgataatgctctccggaaacgaagacagctccgtcgcgggctccgaccaaacccaccgtcaaatcttcgaccactatgcgtcccacacactcatccccgaccacttgctacacgcgccaacgcactcc

SEQ ID NO: 15849 - DNA, 363 bp, Glycine max
  modified_base (26)..(26): a, c, g, t, unknown, or other
atcgacttcatcttcggcgacgcctncgcggtgttccagaactgcaccatggtggtaagaaagccactggagaaccagcagaacatcgtgacagcacaagggaggctcgacaagcaggagaacaccggcttcgtcctccagaaatgcgtgatcaaggccgacaccgacttggtacccctcaaagacacaatcaagaactacctcggaaggccgtggaaggagtattcaagaaccatcatcatggagactcagattgatgacctaattcaccctgatgggtttcttccttgggaagggaactttgccctaagcacactttactatggtgagtacaacaacaatggggctggttctagcaccact

SEQ ID NO: 15850 - DNA, 361 bp, Glycine max
ctcatcagtattgtgggcaatgcccatgtcgactctgagagatgcactaccactggtcacctgcttcacaagcttgaatgcatcgacaatcgtgtcattgaaaggtttgagaaggtagttgatgagatgaacaagaggtctctcaagtttgcctgcgtgctggactaacttagcgctgagcgtgaaagaggaattaccattgatattgctgtgtggaagatcgtaaccacaaagtcttaatgcacattcattgatgcgtctgtacatatggatttgattaataatatgattactgggacataccaatctgactgcgctgatcttatcattggttcgaccactagtcgttttgaagctggta

SEQ ID NO: 15851 - DNA, 405 bp, Glycine max
  modified_base (332)..(332): a, c, g, t, unknown, or other
  modified_base (353)..(353): a, c, g, t, unknown, or other
  modified_base (368)..(369): a, c, g, t, unknown, or other
  modified_base (387)..(387): a, c, g, t, unknown, or other
gcgagattgataacagctggagaagagacagagctgcttgttggtgttaaaaatgatggggattcaagcttgaatgttattgcgatcaaggctagtgttcaccttccttttgatcaccgtatgctggttcaaaatcttactgcacagggttttaacaatggttctgtaccagcctcagcacaagctactttcccatatttatttgcagtcagtaagttcttgcaggcaggaacttttgaccttgtgggcactattatatacgagatagatgaacatccatatcaaagcaccttttttaatggcactgttgaggttgttgaatctggtgcttntcttagcatggaatccgtttntcttgttactcttgnngttgcactccttgtcctnctggggctatggattcat

SEQ ID NO: 15852 - DNA, 330 bp, Glycine max
aaatgatcccaagtttgatcacattgacatcaatgagaagcaaaaggtcttaaatgaatgtgtggaagctgagaactggctcagggagaaaaaacagcatcaggactcgcttccaaaatatgccacccctgtacttttgtcagctgacgtaagaaagaaagctgaagctgtggacaggttttgtaagccaattatgacgaaaccaaagccactgccacccaagccagctacaccagaagcaccagcaaccccacctcctcaaggtggtgagcaacagcaacaaccaccttaagaaaatcctaatgccagtactaatgaaaatgctgggga

SEQ ID NO: 15853 - DNA, 410 bp, Glycine max
ctttcattgaatctctgaacctactcatcaaatctcgatgcctgttaccttccctcacgaaaacgcaccctcttcaatttcaaaccacattcctttacttcaatctcaaaacaaaaccagcagaagtatcggaataaaaacccaaaatattcccccaattccaccaacaaaaacattatcaccaaaaaccaaaagtcacaaaccaaaaacaacgaaaaaaatgacaacaataacaaccacctcgttagcgtcattagaaagctgggccatcctcccattcttcattatgttcctctccatatacttgatcggatacttccttattttccgcaaacaaacccccaagatccgacccgaattctccagctggctgatctcgctctttcacggcacccccgccgcaatcctcg

SEQ ID NO: 15854 - DNA, 397 bp, Glycine max
  modified_base (385)..(385): a, c, g, t, unknown, or other
aattcttccaccaagttatgggtttccttgtgttgcttcgtttgtccctcttaggtctctcttctagttccagcatatcaactcatcgttccatattggaccttgacctaaccaagtttaccacacagaaacaggtgtcttcactgttccaactatggaagagtgagcatggacgtgtctaccataaccacgaagaagaggcaaagagacttgagattttcaagaataacttgaactatatcagggacatgaatgcaaacagaaaatcaccccattctcatcgtttaggattgaacaagtttgctgacatcactcctcaagagttcagcaaaaagtacttgcaagctcccaaggatgtgtcgcagcaaatcaaaatggccaacangaaaatgaagaa

SEQ ID NO: 15855 - DNA, 414 bp, Glycine max
  modified_base (345)..(345): a, c, g, t, unknown, or other
ctgggggagaaattggccctctcaaatataaattcgctgagatcgtatgaagttgtcgatcaagtgaaggaagcgctcgagaaggactgccccggagtggtttcctgtgctgacatcataattatggcatctagagatgctgtctctctgacaggtggacctgagtgggaggtgaggttgggaagattggacagcttgagtgctaatcaagaagactcaaacaacatcatgccaagcccaagagccaacgcaagctctcttattgatctcttccagaaatataaccttactgtgaaagacctagtagcactctcaggatctcactctattggccaaggtcgttgnttctccgtcatgtttaggctatacaatcaatctggaactggaaggcctgaccctgccattgaccctagc

SEQ ID NO: 15856 - DNA, 128 bp, Glycine max
aaggaagcccctcctgaatatcagagctatcttgtccaagtgacgaaaataccaagctgcacaaaactgtaagacctggatcgttggtaagtggatcacgccaagagagcaatactgggcaccacgtg

SEQ ID NO: 15857 - DNA, 414 bp, Glycine max
ttcagaggcatgtttgacagccggatatttttggcgatggttttcgccaccgtggcatttcaagtggtgatagttgaattccttggaacgtttgccagcactgtgcctctaaactggcaattctggttactaagtgtggtaatcggagcagttagcatgcctatagctgctatcctcaagtgcatcccagttgaaagagatactagtaagcagcaccatgatggttatgaagcactgccatctggtcccgagctggcataaaatattataagaggcattaccctggttgctctgctgatttctcctactagtgtagtgtgcttttaatgctgtcattccttacggcattgcaaatttatgtaattttgtaaagacttgataccatacggaatttccaggcatgacaaaacatat

SEQ ID NO: 15858 - DNA, 400 bp, Glycine max
  modified_base (388)..(388): a, c, g, t, unknown, or other
cggctcgagcggctcgagaaaaaggtggataagccaaacagggtttgggatcaaccggcgccgcaaaccaaactggactttactgatcacgtggatggagatggggatagaagcgctgactttttggctaaggagcaaggagagagtatgatggataaagaagagattcttagcagtgatagtgaggttgaagatgatgatgatgatactggaaaggataacatgcctgtggctaaaaagaagggttggttttcctcgatgttccagagtattgcaggaaaggctaatttggagaagtcagacctggaaccagctttgaaagctctgaaagacaggctcatgaccaagaatgtggccgaggaaatagctgagaaactatgtgagtcantggcagcaagtc

SEQ ID NO: 15859 - DNA, 273 bp, Glycine max
attgacatggataaagaggttaatataatccattgcctggaaaactctatagaaaagaggaaaggtcacattgatgctgacaagatggcagtgttgaatggttggcatagaatcgattgtagaacaagagatgcgcttcgccgtagttgtctttctgagctcattgagggttatgaggaatgtgtacgagctttcataacagaaagcacagatggcgatattcttgaactaccaaatcaggaaccttttccatagattgttactgcatgaagt

SEQ ID NO: 15860 - DNA, 387 bp, Glycine max
ctcgagccgattcggctcgagcacaaacctagatttcatgcggaagaggaagatttctagtgacttcaacatgatgatggatcagaaaatctacacatgcgagcatccccaatgcccttacagcgaagttcgccttggtctccatgataggtctgctagggacaatcatcaattgaattgtgcatatagaaacagttctgcagattatggtggtggtcccaatttccatgctactgaggttaagccagtcatattcccccagtcctttgttcaacccaacactacagctcagtctgcaagtttggttgcaccttcatttgatctaactggtcttggagttcctgaggatggccagaaaatgattagtgaccttatgacaatctatga

SEQ ID NO: 15861 - DNA, 398 bp, Glycine max
tctcggtgaagctcaattccacattttcaagaaataaggatgcaaaaatgtgcatatatgaattggaattatgtgttttcttattaggcctatcctgaagccaaaggaaatgagatcggaattcctcggggaattccaattccacattttcaagaaataaggaggcaaaaatgttcatatatgaattggaattattcggtttcttattatgcctatcctgaagccaaaggaaatgagatcggaattcctcggggaattccaattccacattttcaagaaataaggaggcaaaaatgttcatatatgaattggaattatttgttttcttattaggcctatcctgaagccaaaggaaatgagatccgaattcctctgaggtaccgagctcgaattcccta

SEQ ID NO: 15862 - DNA, 410 bp, Glycine max
tttttcaagatattgagaaagatgaatttggcaaagttgcgagttttaagttgcataatcttgttcatgatcttgcacgatctgttacagaagatgtttgttgtgtcacagaaggcaatgatggatctacttggactgaaagaattcaccatctctcagatcataggctgaggcccgattcaatccagttgcatcaagtgaaatctttgaggacctatttattgccacatcagcgtggtggtgcactttctcctgatgtattgaaatgttattctttgcggatgcttcacttaggagaaatggaagaattgccatcttcaattggtgatttaaaacatctaaggtacttgaatctttctgggggcgagtttgaaactctttcagaatcattatgtaaattatggaatttg

SEQ ID NO: 15863 - DNA, 399 bp, Glycine max
gtgatctgaacgatttatacataaactcagctgtgcaaagggatgtttctgggaaccgcaaggctgtggttatccatgtcccctacagattaaggaaaggattccggaagattcatgtcaggcttgtgagagaacttgagaaaaagtttagtggaaaggatgtaatcctgattgccacccggaggatattgaggccaccaaagaaaggttctgctgttcagcgtccccgcacccgaacactcactgctgtacacgaggcaatgctggaagattttgtattgcctgctgaaattgttggaaaacgtgttaggtataaaattgatcggttccagattatgaagggcttttcggaccccaaggagcgaaacaacaccgagtacaaattggaaacttttgctg

SEQ ID NO: 15864 - DNA, 409 bp, Glycine max
gcacaacctcgttccaacagccatggcggttcctgcaacgtcctgagcccctgtccttcgacccatccccaccaaccgttccttctcttccccattccgttcactccccactcccaccacccgaaaacccctaaccgtcttcgccatggcccctaagaagaaggtgaacaagtacaacgaaaactggaaaaaggagtggtttggcgcggggatattctacgaggggagcgaggaagtggaggtggacgtgttcaagaagctggagaagaggaaggttttgagcaacgtggagaaagcaggcttgctctccaaggcagaacaattaggattctcgctctcttccatagagaagctcggcgtcttctccaaagccgaagagctcggcttgctcagcttgctcgaccgagcc

SEQ ID NO: 15865 - DNA, 418 bp, Glycine max
tctatatctatccacacacaacacacacctctggcgtctactccgcacaactccttacacacaaaacacaacacacgctcatgttgttgatgagtggaggcaacaaaaaacatatatccatcactcacaagaccaattgacctttgttcttggtacaattcgattcaaatttttcgcactaaggagagccactcaaggctctgggatgtactatacgccgatcggggttctgattatcagcggcgagaaagttcaagagacacagtgggagaaggagcgataagagagaccatggctttgaaggctttgaaagatacgaaatcgctgtcagcggccgacgtggccggggcggaggctgagatgacggcgtcgtcggcgaagtgctgctgctgtgggctgatggaggagtgcacgcacc

SEQ ID NO: 15866 - DNA, 387 bp, Glycine max
  modified_base (3)..(3): a, c, g, t, unknown, or other
  modified_base (306)..(306): a, c, g, t, unknown, or other
  modified_base (319)..(320): a, c, g, t, unknown, or other
ctntcattgaatctctgaacctactcatcaaatctcgatggctgttaccttccctcacgaaaacgcaccctcttcaatttcaaaccacattcctttacttcaatctcaaaacaaaaccagcagaagtatcggaataaaaacccaaaatattcccccaattccaccaacaaaaacattatcaccaaaaaccaaaagtcacaaaccaaaaacaacgaaaaaaatgacaacaataacaaccacctcgttagcgtcattagaaagctgggccatcctcccattcttcattatgttcctctccatatactngatcggatacttnncttatttccgcaaacaaacccccaagatccgaccccgattctccagctgcctgatctcgctctttca

SEQ ID NO: 15867 - DNA, 415 bp, Glycine max
gtcttcgaaggctttagtgaaggatcaaggttgggtctgtgtcgttgcagttgatattatctgtactacttaatctaatgccagctgccatactttgtcagttgctcaaaagtcatttttggaacctatgatcacttttgctagagctttcccagaaaacttaccctctacacataaccatatgttatgtttgggcaaggtgcataaaatctttcaattttataggactgaattttgctactttttcatatttacctgctccattcttatgtcaattgcaggcaaaggtaaaagtagtgagaaggcaaaagcagaacctactaaggtggagatgcatcgagtggctgttgatattttgaaggaagcagatttcaataaggtaagtaatgcttttctatgccaattcatgtatctt

SEQ ID NO: 15868 - DNA, 417 bp, Glycine max
  modified_base (385)..(385): a, c, g, t, unknown, or other
caccacaccactctctctgctcttcttctacctttgaagggtttaaagtattaagatggcagagacattcctatttacctcagagtcagtgaacgagggacaccctgacaagctctgcgaccaaatctccgatgctgtcctcgacgcttgccttgaacaggacccagacagcaaggttgcctgcgaaacatgcaccaagaccaacttggtcatggtcttcggagagatcaccaccaaggccaacgttgactacgagaagatcgtgcgtgacacctgcaggaacatcggcttcgtctcaaacgatgtgggacttgatgctgacaactgcaaggtccttgtaaacattgagcagcagagccctgatattgcccagggtgtgcacggncaccttaccaaaagacccgaggaaatcggtgc

SEQ ID NO: 15869 - DNA, 335 bp, Glycine max
ccacaagctcagccaggttatggcgtgcccccaacgtccgaaccagcagcttatggtagtcaacctccagcacaatctggttatggatctggctatggaccccctcagacccaaaagcctagtggcacgccgcctgtgtatggacaatcccaatcacctaacacagcaggaggctatggtcaatctggtcatttgcaatctggatatcccccttctcagcccccaccttctggaggatatgcccaaccagagtcaggttctcaaaaagctccaccatctggttacggtggtgcagtgcaacccgggtatggtccaacatcatatggaggtgtccc

SEQ ID NO: 15870 - DNA, 387 bp, Glycine max
ctgacatttttgacaaggaaacagggaaaatggttccaggtattgtgtttgcaagaggaccagctgtggctgtgttgatgctcctggaatcagagggtgagacttatgctgttcttactgaacaggcaagggttcctgttggaagaattattttggaattgcctgctggaatgttggatgatgacaaaggtgattttgttggtactgcagttcgtgaggttgaagaagagattggtatgaagttaaatgtaggagacatggttgacctcactgctttccttgactctgcaactggatgcaaagttttcccttccgggggaggatgtgatgaagaaatcagtatttttctgtacagagggcgtgttgataaagagataatatcacaac

SEQ ID NO: 15871 - DNA, 331 bp, Glycine max
  modified_base (292)..(292): a, c, g, t, unknown, or other
tatttctattccttctatcaacattctatctattgtatgtatgtgctcaattttatgctgaccatactttattcttcttacgcttatgttatacgactgccacaaaggatggctcaatcaacaatgaagaggaaacgaacgaagggttgactagaatgaaccaatcggataacagaactcgttcacattcatcctcaccatcaactcaaaaccgtcacacagaattgaggaaaccagctactactacttgagcaaggaaactgcagaaatccatacgctgcagaacacttgnggagctagaacttgacgaagtatagggttatacggatct

SEQ ID NO: 15872 - DNA, 421 bp, Glycine max
acttcccaccttatggaaaggattttcagggaggaaaccggacgggtcgattttgctatggaaaaatttcttatgacttaatagttgaacaattgcgtattaaggagtatttgcctgcatatttggatccgaatctcaaatctagtgatcttgttaccggcgtgtgatttgtctacggtgcttcaggatacgatcctttgacacccaaaataacgttagttctatcggtatctactcaactagacatgttcagggaatacataggaaagctgaaaggcattgttggagagagcagaacagactacatcctatccaatagtctttatcttgtggtggcaggtagtgacgacattgccaacacctatgatgttgctcacgccagagttttacggtatgacattacttgttacaccgaccttat

SEQ ID NO: 15873 - DNA, 378 bp, Glycine max
tcgagcccagatagtttactcaccatttccgtatgttacttcacggttagtgggtagtggttacatgatatcagcacactttcactcactgtgctttcccgtgacacgcatctatacttgtccagaagaagtaagatccatgaactaacattcccacacgctcgcttcaccatatttgccacccttttaacctcacttcttaaggttattatgctcccttttccttgcttgggaattgggtttggatcggattttcttggctgtaaaaggaaacatagaaagaactaagatgggaagaggtagggtacagctgaagaggatagagaacaagatcaatcgccaagtaactttctgcaaaaggagaggtgggttgctcaa

SEQ ID NO: 15874 - DNA, 390 bp, Glycine max
ttttcagctttcattggtgtggcctagctgttttctcaatgagaaagccttcatctctgcaaagcgcacttttgcgctttggggttcccttgttgcttgttatcaccttctgttatgctacttctactgctgcagcaacaactcaagtttcagggaatgaagagctgccaaagacaaacctaaatgggcatgatgaagaagcaaaattcggattttttcatcataaaccaatattcaagaaacatattccaattccagtatataaacctgtaccaaagccatttccagtgtataaacctataccaaagccagttccagttccagtgtacaagcctattccaaagccagtgtataagcctattccaaagccagttccagtgtacaagccta

SEQ ID NO: 15875 - DNA, 414 bp, Glycine max
  modified_base (401)..(401): a, c, g, t, unknown, or other
cacaaacacacactgaactaaaaaacatcaaaagagacatggctgagcaaaccttcatcatgatcaagcctgatggcgtccaaagaggccttattggcgagatcattagcagatttgagaagaaaggtttctacttgaaaggtttgaaacttgttactgtggaccgtccttttgctgagaagcactatgctgatttgtctgccaagcctttctttagtggtttggtggattacattatctctggccctgttgttgccatgatctgggagggcaagaatgttgttacaactggccgaaagattatcggagccacaaacccaacttaatctgaaccttgaacttatccgggtgactttgccattgacatttgaaaggaatgtatccatggaagtgatgcagtngaaagtgcttaca

SEQ ID NO: 15876 - DNA, 354 bp, Glycine max
caagtttcgtttccaggtttcggcgcaatcggctgctgcttcaaggaaggagagctcgctattctctatcaacaagtaaaatgtcacgtgaagagggtgtcattgcagatgatccagctgctgctgctgctgccatcccaggcgagccaatgtatatcatgactgccttacaacttgtgctcagaaaatctctggcttatggcggtttgacgcgtggccttcatgaaggtgcaaaagtgattgaaaagcatgctgcacaactctgtgttcttgcagaagactgtgaccagcctgactatgttaaactggttaaggccctttgtgcaaagcacaatgttagcctgctgacagttc

SEQ ID NO: 15877 - DNA, 409 bp, Glycine max
ccggcgagcatgcccatcagatgtattctgcattggcaagcgaagcaaggaagcgttgtgaacagccaagtcctgaatgagatctcgcagtgcgtcgaaagcctcaacggcgtcaaagaaggaagatgcaaagcctccctcactttctacagacccaatttacgagaccagtcggtgaccatcgatttcccgcgcgattttctggggatatcgatgctggagcagccgaacaaatactacttcatcattcgcggccagaagattgttctggaggccgattcttctatcttgcttatcatggagaaactccagtcctacaagtccaaagtcgcccttcatttcgagggagtgctgtataaattgggtgactttcagatgagagtcattaaagttgttcccagtcaagcag

SEQ ID NO: 15878 - DNA, 210 bp, Glycine max
  modified_base (169)..(169): a, c, g, t, unknown, or other
cttgctctctctctctgtctctctgtctcctccatggccgtctgcttcagtcccaaacaccctgcttacgatgagatgatatacacagcaatcggagctctgaaggagagggatggttcgagcaagcgagccataggaaagtacatagaacaagtctacaaggaccttncacccactcaccctgctttggtgactcaccatctcaaccga

SEQ ID NO: 15879 - DNA, 411 bp, Glycine max
gttctttctctcgcaatcttcactacattcaccgagcatgtgcattcacattgaatatggctgagactacacaatctaatgctgagttgttggagtggcctaagaaagataagcgccgcttcctgcatgttgtgtatcgtgttggtgatcttgatcgcaccattaagttttatactgaatgttttgggatgaagcttttgaggaaaagagatattccagaggagaaatatgccaatgcttttcttggatttggccctgaacaatcccattttgttgtggaattaacatacaattatggggtgacctcatatgatattggaactggatttggacattttgctatcgcaactccagatgtttacaaattggttgaagacatccgggcttagggtggaaatgtcaccagggagc

SEQ ID NO: 15880 - DNA, 402 bp, Glycine max
gtgcggtgctcttcctgtttcttctctctatcctttcctggattggatggtgaaggattttaatattgcagaaggggaggaagatatcagtgcctatgctggctatattgggtctgcattcatgcttggtagatgtttgacatctatgttgtggggaatgatagctgatcgctatggtagaaaacctgttgtgattataagtgttatttctgttgtcattttcaacatactattcggccttagtacaagtttttggatggctgttattacaagactttttcttggatgttcaaatggtgtgatgggcacaatcaaggctttttcttctgaaatatttcgagaagaatatcaacctctgggactctcaaccgtctctgctgcttggggagtaggtttagcact

SEQ ID NO: 15881 - DNA, 418 bp, Glycine max
gggtgatccaatggcgacccttttccagggattgggagttgtgaacccatcattgtcttcttccaactccaacaacttcctgcttccttctcgaacatccctctctgagagaaaagatggcatatttgtagtcagatctgatgcaagggtaagcagcaaggttctgaaggccggagctcgcaagcatgaattgttggttactaatgcagtcgcaacaaaggaaggcagttctgcggcttctacatcaaaatctgggcatgaacttctcctttttgaggccctacgtgaaggtttggaagaagaaatggagagggatccttgtgtatgtgtcatgggcgaagatgtaggtcactatggacgatcctacaaggtgactaaaggccttgccacaaagtttggggaccttagagttttggac

SEQ ID NO: 15882 - DNA, 355 bp, Glycine max
caacgggattttgcagagcttccgcgttgaaaccatccaaccctcttagcctcatattcgttgtctatacttccctccttccttcgtgtaattacatttttttcatcagcagttccaggaccaaattgatacacaagatcactgtttttttagagagagattgagagaggatgtttggttcaaagaaaactcctctgagagatgctaaacctagttctgttggccatgcccataacccctttgattctgatgaagagacaaacgataaaaagtataattcctctaagaagactttgaccaacaccaacccctttgatgatgaagttgatgttgatgccactggccactcctcgtc

SEQ ID NO: 15883 - DNA, 415 bp, Glycine max
gttactttcatttgttgtgcaatcttacaagttccaaacttctctattttgttattatttgttctcacttctcacacatacagatttgagccttttatattatcatggcttctaaggtggtttcggttttggttatagcgatgatgttgtttgccatgaactgtaactgcactagtgttggccacatgccttcaaccaaagaggaaggtcacgattttcaggagtctaaagccaagaccacacaaactgcgaacaaggccatggaaactggtaaagagggacaagaagccgcagagtcatggacagaatgggctaaagagaaactcagtgaaggtcttggcttcaaacatgatcaggaatccaaagaatccaccactaacaaagtctctgattatgccactgacactgcacagaa

SEQ ID NO: 15884 - DNA, 344 bp, Glycine max
atgcatggttggcacgtactcatatatatgctaaagtaatttacacgctcaagctaaattatgtgaggagtgtattaaacgaaaaaaaaaaagacataaattagagacatcttcagcaaagtgttacggtctaccagaaaagaaattgactttgatttcaagtcttccagactaagaagatcttgagtctaaatacttctaagaggtatcacgttgttgttttattgatgtatcatgtagtttgtgttttctggcctgctgctttaattgattatcttatatcatggctgatgtggctggctgacgggaatattaggctactagatacatgcttaatggcagag

SEQ ID NO: 15885 - DNA, 342 bp, Glycine max
ggaactctttgatataatatagaaagagacagagagagagagacagacaagaagaacaaagatgcaatcttcaaaggagaagctgaaaaacatgaccagtgctgccaaggagcaagtcgacatctataaagcaaaaatagacgagaagacagagaaagcaacggcaagaacagaagaggagagggtgattacccatgaacgtgcaaaggcaaaggaagctgaagcaaagatggagctgcatgaagcaaaagccaggcatgcagcagagaagctaagcaccaaccaatcacattatggtctccaccatggccacaacccttccctggtaggaacaactgagac

SEQ ID NO: 15886 - DNA, 330 bp, Glycine max
attcaaattttgctctatactacacagtacacacactagaagactaatggcttccatcctgcactactttttagccctctctctttcttgctcttttcttttcttcttatccgactcagtcacctctacaaaaccaataaaccttgttgttctacccgttcaaaatgatggttccacagggctccattgggccaacctccaaaaaagaacccctctaatgcaagtaccagtcctggtggacctcaatggaaatcacttgtgggttaactgtgagcagcagtactcatccaaaacgtaccaagcacccttctgccactccactcaatgctc

SEQ ID NO: 15887 - DNA, 439 bp, Glycine max
catccatgctttctgctcctttggattgtgaatctcattttgtgcaaaatgccaaccagcagcagcctaactctcagaatgtggtatctattgaagatgattctgcaaagacactctctgaggagcttgtggatattgaatctgagttgaagttctttcagatgccttatcttgaagggagctggggcgatacttcattggaatccttgctatctggtgacacaactcaggatggtggaaacctcatgaacctttggtgctttgatgacattccttccatggctggtggagttttctgaaccgctttttctttggtctccctgtgtgtaaataaagctacaagttgtttttctctgattttgatttttggtgcatttgttgatctcttgttggacacatccccccatgtgtctgaaaaaaaaaaagttattttcatttt

SEQ ID NO: 15888 - DNA, 380 bp, Glycine max
taaaattcttccaccaagttatgggtttccttgtgttgcttcttttctccctcttaggtctctcttctagttccagcatatcaactcatcgttccatattggaccttgacctaaccaagtttaccacacagaaacaggtgtcttcactgttccaactatggaagagtgagcatggacgtgtctaccataaccacgaagaagaggcacagagacttgagattttcaagaataacttgaactatatcagggacatgaatgcaaacagaaaatcaccccattctcatcgtttaggattgaacaagtttgctgacatcactcctcaagagttcagcaaaaagtacttgcaagctcccaaggatgtgtcgcaacaaatcaaaatg

SEQ ID NO: 15889 - DNA, 280 bp, Glycine max
cagcaaggatgttcccaaagccagaaaggaaagcaacaagaagaagaaaacgaaggaagcaacatattgagtggcttcgcccctgaattcttgaaagaagcgttcggcgtgaacatgcagatagtgagaaacctacaaggtgagaacgaagaggaggatagtggagccattgtgacagtgaaaggaggtctaagagtcacagcttcagccatgatgaagccacagcaagaagaagatgatgatgatgaggaagagcagtcacagctcgtggagacagaca

SEQ ID NO: 15890 - DNA, 407 bp, Glycine max
ggaaggaatactttatcaaacatcctactcttgatcctttgagggaaactcttaagagcttcagtcaaaagaatgaaaaggccttggctaaggcggatgatgctgctcgccatgcattattgaaggatgcagacaagtactgcaaagcccttttgggaagattgtcacaagaccatggatgcatgaagagcgtgacaattctttctgttgtatttgcggttggtgccattttcgtgtaccagaacttgcatttatgggattatagtcaactgacagaaatgttgaacctatcctaggatgacagagttatcctgtggcttgctcggtgcttatgcccagcgtggaccacttcagccgatagtgaggagtgacgaggaatatttaatttattttagccttcaacatag

SEQ ID NO: 15891 - DNA, 409 bp, Glycine max
gaaaggggtggtggctgcttcgaaagcttaataatttgtttatttccagaacatcatagttttcgcagcagcaaactaacaaattactcatatcatataataagatggcccgttctctctcgcaagccaaacgtattggtgtccttgttgctcaatctatctccctaattcccgttcatcggcgaggttacgcagtggcatccgatgtatcggtaagagttggattgggtaatattgggcgaaggaatggaatcgtgggaggtgtagaagagaagcctgatacaagagatggttcaaaagcctactcaactgattgggccccagacccagtaacaggttactataggcccattaaccacacccctgaaattgacccggtggagcttcggcataggttgctccgatcacc

SEQ ID NO: 15892 - DNA, 348 bp, Glycine max
gagacgcatacataggaggttttccgccaaattcgaaaatggtgaaagaaatcgaaactctgacagaagatgaaagacgcgcacttcgtggaagcaaattcgcccctcttccccgcccttccaattccaaacctaggttggctcatccaggtggacccttggcgacgaataaagcagcggctttggccaagtttctggagagaaagctgaaagacccaaatggattggcgtctattaaccctgatatccttgaacttgctgtcaataatgccaaagaaactgtctatgcaagtggtacttctaattcacgaagaaatgttcggcatgtggactcctttggtgactctg

SEQ ID NO: 15893 - DNA, 230 bp, Glycine max
cagggatctggagctttcaacccatcatagtcgtactacatcatctacagcccactgccatactttgtcattgctctatagtcatttttagtacctattaacacttttacctgaagcatcccaaaacacttaccctctacacatcaccatttgctatctttaatcaatttgcactaaagctttcaattctataggactcaattctgctacttctacataaatacctgctc

SEQ ID NO: 15894 - DNA, 365 bp, Glycine max
atcttatcttagcagtagctacccctatcacaacaatactgtattaggcaaaaacaccaaatgggagaggaaaaagagcagcctaagaatgaaaccgagaagaagcccgaggaggtcgacgcagcccccaagaaagacgacggacccatccctgtcgtttacaaactcgacttgcattgcgagggatgcgtcaagaagatcaaacgcacatgtcgccactttcaaggtgtggaaaccgttaaggcagatctatcgtcgaacaaagtgactgttaccggcaaattggatgccgagaagctgcgagataagatcgtccagagaaccaagaagaaagttgacatcatctcagctccgcccaaaaaaga

SEQ ID NO: 15895 - DNA, 401 bp, Glycine max
acaacacacacctctggctctactccgcacaactcctcacacacaagacacaacacacgctcatgttgttgatgagtggaggcaacagaaaacatatatccatcactcacaagaccaattgacctttgttcttggtacaattcgattcaaatttttcgcactaaggagagccactcaaggctctgggatgtactatacgccgttcggggttctgattttcggcggcgagaaggttcaagagacacagtgggagaaggagcgataagagagaccatggctgggaaggttttgaaagaaacgaaatcgctgtcggcggcggaagtagcggaggcggaggctgaaatgacggtgtcgacggtgaagtgctgctgctgtgggctgatggaagagtgcacgcacgc

SEQ ID NO: 15896 - DNA, 306 bp, Glycine max
ggagcacttgctgagagggttgtcttttgggtcatccttggcccgattcaataactctctctctctctcttgctccctacattttcgatcactttaaagtctcaaacgtaatggctgaaagcgcggtgacgaacaggaagcgcagcagcggggacgacgccgtttcggagaatgacagaaagcggaagaatatggtggcacgcaacatggacccggctgaggcgttggccttgacgcggcacgagttcggggagcacggtggcgtaaacatgtcgatcgaggcctcggcgacgttcacggtgatgg

SEQ ID NO: 15897 - DNA, 433 bp, Glycine max
cttaaacactcatcagtcatcaccatggccaagctagttttttccctttgttttctgcttttcagtggctgctgcttcgctttcagttccagagagcagcctcagcaaaacgagtgccagatccaaaaactcaatgccctcaaaccggataaccgtatagagtcagaaggagggctcattgagacatggaaccctaacaacaagccattccagtgtgccggtgttgccctctctcgctgcaccctcaaccgcaacgcccttcgtagaccttcctacaccaacggtccccaggaaatctacatccaacaaggtaagggtatttttggcatgatatacccgggttgtcctagcacatttgaagagcctcaacaacctcaacaaagaggacaaagcagcagaccacaagaccgtcaccagaagatctataacttta

SEQ ID NO: 15898 - DNA, 407 bp, Glycine max
atcttaaaccgtccaactcttagtaggcgattcatgcctgagaaaggttctgctgagtatgaggagctgaggaagaatccccagaaggcttacttgaagactattacaccaaagtttcagacccttattgacctttctgttatagaaatcttgtcaaggcatgcatctgatgaggtgtaccttggggagagggacaatccaaattggacatctgatacaagagcattagaggcttttaaaaggtttggaaataaactggcacaaattgagaataaactctcagagagaaacaacgatgagaaactgagaaaccgttgtggaccagttcaaatgccttatactctgcttttgccttctagtaaggaaggattaactttcagaggaattcccaacagtatctctatctg

SEQ ID NO: 15899 - DNA, 369 bp, Glycine max
caccattgaattttgattctagcaagcagagcttttgtcaattctctattgatcttcttggtggaggaattttagtggacaaaactggagattggatcacacttatacaaaattctccaattagtaacttgttgagagttgctgcttggaagaaaggctgtttaatggttaagattgtgatgtctgggaatgcagcagtcaaaaggagtgattgggcctcattggtacaagtgtttttaacaaacagcaacagtacagagcattttgatgcatgtaagtggaaaaaatcggaaccacattcctgggaattgatcttcccaatagaggtatgcggtcctaataatggttttgaaatgtggagttctgagt

SEQ ID NO: 15900 - DNA, 363 bp, Glycine max
tttcaattatcctcaatccctctagcaattggagcatttcttggtgctacagcccagagtgttcagccaatgatcattggtcgcttacttgctggtataggaattggtgttacatctgctatagtaccactatacatatctgagatttcaccaactgaaattcgtggtgcgctaggatctgttaatcaactttttatatgcattgggattcttctggcactggtggctgggctgcctctggcaggaaaccctatatggtggcggtcaatgtttggcattgcaatagttccatctgtgctgttagcactaggaatggcaatttctccagaaagtccacgctggcttgttcagcaaggcaaaatc

SEQ ID NO: 15901 - DNA, 337 bp, Glycine max
aaaacactttctctctctctctcttactttcgctctctaaaaaaaaaaactcaaaaacaaaacgaagctctcgaccactcgtcgcgacgttgcctttttgaatcgtctcgaatttcactttttcgtttcccttcgttgtttgtatatatatctatcaccgatcaccgatcaccgatcatcgattattaattgctgttgtttttaaaattattgttattattttggtggttgcgattctattttgtgctgtactgtacgacgtcgttggagcgatttcatcgccgtcgcgctggtacggagagattgtttgctgcgtcgtggtgtcggtgaaggatga

SEQ ID NO: 15902 - DNA, 394 bp, Glycine max
gaaggcgaatgaaacgaaggacaagacaatggagaaggctggagagtacacagattatgcttcgcagaaggcgaaagaagccaaggacaaaaaaaccggttccaaggtcggagagtacgcagattatggttctcagaaggcgaaagaaacaaaagatgcaacgaaggaaaaagctggagagtacacagattatgcttcgcagaaggcgaaggaaacgaaggacaagacaatggaaaaggctggagagtacactgattatgcttcgcagaaggcgaaggaaacgaaggacaagacaatggagaaggctggagagtacacagattatgcttcgcagaaggcgaaagaagccaaggacaagacaatggagaagggaggggaatataaagactatgct

SEQ ID NO: 15903 - DNA, 408 bp, Glycine max
gtgacgaattgcatcacacaggctggaattcatgcagctcttgccatggagacccctcagcagaccgacgatttctcatcgtacctgcactcgtatcaggtcgagtatatgtggttgatgtgaaaacaaatccaagggctccatctttgcacaaagttgtcgagcctgccgatatcatacagaagactggattagcttatccacacacatctcactgccttgcttctggtgatataatgatctcgtgtcttggagataaagatggaaatgctgcaggaaatggatttcttcttcttgattctgagtttaatgtgaaaggaaggtgggagaaaccgggtcacagcccactatttgggtatgacttttggtaccaaccacgtcacaataccatgattagcacatcatggg

SEQ ID NO: 15904 - DNA, 407 bp, Glycine max
gctgtagagtaaggctatggtgatttgaaagacaagccatggtggcctaagttgcagacacttgaagaccttgttgaagtttgcctcattatcatatggattgcttcagctctccatgcagccgttaattttggtcagtatccttatggaggtttgataatgaaccgcccaactgcttctagaaggttgcttcctgagaaaggcaccccagaatatgaagaaatgattaataaccatgaaaaggcttatttgagaacaattacatcaaagttgccgactctcattagcctttcagtgatagagatcttgtcgacacatgcttctgatgaggtctaccttggccagaaggacaacccacattggacctctgatcaaaagcattacaagcctttcaaaagtttggaaac

SEQ ID NO: 15905 - DNA, 138 bp, Glycine max
caatttgcttttaccaagctaagggttaccttgaggcgcggggagactccctataaggactgcccattaagctcagcctatcaactcgaatagccgtattgtacctggacctagccaaggctaccacacagacacagg

SEQ ID NO: 15906 - DNA, 199 bp, Glycine max
tagtaatttactttcaccacgcgaggggcagccacggggggccggggagacccctcagaggaccgtctaatagttacagcacatgaactcatatgaccataagggaccttgacctaaccaagaacaccacccagggccacgtgtttgcactgaagcaactatgctagcgagatcatacacaagactaccataacctcta

SEQ ID NO: 15907 - DNA, 322 bp, Glycine max
atcttaaattttccaactcttactaggcgattcatgcctgggaaaggttctgctgagtatgacgagctgatgaagaatccccagaaggcttacttgaacactattacgccaaagtttcatacccttattgacctttctgctatagaaatcttgtgaaggcatgcatctgatgaggggttcctcgaggagagggacaatccaaattgacatctggtccatgagcattaaaggcttataaaatgtttgggcataaactggctcaaattgagaataaactctcatagacaaacaacgattataaactgacaaaccgtgctggacc

SEQ ID NO: 15908 - DNA, 382 bp, Glycine max
cacaaaatgtatcgcgttcttcaccgcgctttctgcaccggcaccgagcccgccaccaccgccaccgtcaccgtttccatcaagtccatttcggaggatctgtacaaggaagtgaagctaaagaatgtggtggagaagttcaagaaagcctcggacatcgaccgcttccgcaaaaaaaccggcatctacgaagacaccgtccgccgcctcgccggcgcccgacgcttccggtggatccgcgacatcctcgagcaccagaagcagtactccgacatctccaacgagggcttctccgcgcgcctcatctccctgtacggcaagtccggcatgaccaagcacgcgcgcaaggtgttcgacgaaatgccgcagcgaaactgcagcc

SEQ ID NO: 15909 - DNA, 374 bp, Glycine max
aagggtatcccctgggacaaacaagatcctggggaagaggctatcgaatcactctcagcagaactcaagctttatgggaagagaggagtctataaagataccaagttgcaggaacaaggtggaaagatatttgaaagagatgggatactatacaactgtgccttctctgtttgtgaccaagggcgaggactgaatgactactgtgtcatgcaactgattgttgtcccagagaatcgtttgcatctgtactttaagaaagggagagttggggatgatccaaatgcagaggagcgattagaagagtgggacaatgtagatgttgctctgaaagagtttgtgaggctctttgaagaaataacaggaaatgagtttga

SEQ ID NO: 15910 - DNA, 411 bp, Glycine max
cccaaacattatgatgggattcctgaatgtgggttgttgatgcaaagcattgaagaattggcactaagatatccttcaacaaaatttgtgaagataatatctactgattgcataccgaactacccggatcggaatcttcccactttgttggtgtacaacaatggagcagtcaaaggaaattatgtgggtttgcatagtttcgggcgaagatgcactcctgaaggtgttgcattagtgttgtgccaatcagatcctgtacttaatgatggccataatggaaatgaggctatcattgaaggagtccgcaaacggtttatagagaaagttgttgctgatcatgaagagggtggtgatgatgattactctagcgattaacattgtttcttgtatttgttgtgttgctttctttgg

SEQ ID NO: 15911 - DNA, 264 bp, Glycine max
aaaaaaaaattcaaaaaaaaaaaaaaaaaaaaaggggaacgggtaaaattaacatcaaagccaaaactaataaaaacagcatagaaactttaaagatccatattgaaccatagccctagccaagtttaccacaacagaaacaggtgtctacactgctccaactatggaagagtgagcatggacgagtctaccatagccaccaggaagacgcaaataggcattggatgatctagaataactcgaacgatatcagggacatgaatg

SEQ ID NO: 15912 - DNA, 410 bp, Glycine max
aacttattaacactttccttagttcaatatggggaagcccttcttcactctctctctttcttccctttgcttgctactcttgtcgagtgcatgctttgctattacctccagcaagttcaacgagtgccaactcaacaacctcaacgcgttggaacccgaccaccgcgttgagtccgaaggtggtcttattgaaacatggaactctcaacaccctgagctgcaatgcgccggtgtcactgtttccaaacgcaccctcaaccgcaacggcctccacttgccatcttactcaccttatccccaaatgatcattgtcgttcaagggaagggagcaattggatttgcatttccgggatgtcctgagacgtttgagaagccacaacagcaatcaagcagaagaggctcaaggtcgc

SEQ ID NO: 15913 - DNA, 377 bp, Glycine max
cgagaggaacaccaggtatgttgatgctgttcttaccattcccaaaggaacattgttccccatgtgtggtatgaatttggcattcgatcgtcagctgattggacctgcaatgtactttggactcatgggtgatggccaacctattggacgatacgatgatatgtgggctggatggtgtgttaaggttatatgtgaccatttgggcttgggagtgaagactggccttccatacatctggcacagcaaagcaagcaacccttttgtcaatctcaaaaaggagtacaagggcatcttctggcaagaagaaatcattccattcttccaaagtgccactctttcaaaagagtgcacgtctgtccaaaaatgttacattgaac

SEQ ID NO: 15914 - DNA, 410 bp, Glycine max
ctttcgcaccttcgaaaatcaattttctgtcttctctgcgtcttcttcctctatcaatcgttttccatggctcgtaccaagcaaaccgctcgcaaatccaccggtggaaaggctcctaggaagcaactcgccaccaaggctgcaaggaaatctgcaccgacaaccggtggagtcaagaagcctcatcgctatcgccctggaactgttgctcttcgtgagatccgaaaataccaaaagagcacagagcttctgatccgcaagctccccttccagcgtcttgttcgtgaaattgcgcaagacttcaagaccgatttgaggttccagagtcacgctgttcttgcgcttcaagaagctgcggaagcttacttggtgggtttgtttgaggacaccaacttgtgtgcgattcacgc

SEQ ID NO: 15915 - DNA, 390 bp, Glycine max
ccgccaccctcggcgcccacgtgactctcacggaccttcctcacgtggttcccaatctccgattcaatgcggacgccaacgccgcggttgtggggcccaccggaggggtaataaccgtcgcgccgctccgttggggccacgctgctgacgtggaagcgattgggcgggagtttgatctcgttctggcgtcggatgtggtgtatcacgatcacctgtacgagccactgctcgaaacgctgcgtttaatgatgctaagtgaaaggaatgggaagatggtgtttgtgatggctcacatgaggaggtggaagaaggagtctgcgttttttaagaaggcgaggaagcacttcaacgtcgacgttttgcacactgacacgccttgtgatgggtcta

SEQ ID NO: 15916 - DNA, 372 bp, Glycine max
gcttctttctgatctttgattttggcacaaaacttaccttgcttcattgcttggcgccttaacttcgtgttcatctaatgcatttttaattgttctacacaaataaatgttttggagttcatttttggttgatttgattgctttgtgttagcaattcagggaggaactgttgaagtggattgaccctgcactgctctcaatttgctgccgaaggaaagggttgggatgggttgtggcttttccaagtacacagcgtgctgcacgggttctgagcaagatggtctggctgctgaggctcaagttgatggtggaaacgaagacaatgttgttgagggtgttgacttgccgtggtttcatgaattcacaattgat

SEQ ID NO: 15917 - DNA, 418 bp, Glycine max
atatcctagtacaccgtattaaagaatttaagatatactatgatgagagcgcggttcccattactgttgctgggagttgttttcctggcatcagtttctgtctcatttggcattgcgtattgggaaaagcagaaccccagtcacaacaagtgcctccgaagttgcaatagcgagaaagactcctacaggaaccaagcatgccacgctcgttgcaacctccttaaggtggaggaagaagaagaatgcgaagaaggtcaaattccacgaccacgaccacaacacccggagagggaacgtcagcaacacggtgagaaggaggaagacgaaggtgagcagccacgtccattcccattcccacgcccacgccaacctcatcaagaggaagagcacgagcagaaggaggaacacgaatggcatc

SEQ ID NO: 15918 - DNA, 416 bp, Glycine max
cttttctgccttagcagagaagttgcgttctgattatgactttggtcacactctgaatgccaaactccttccaagaggagagtcatcagtttctgggcccgtagttaggctgttcaagccattcgatgaactttttgttgacttccaggatttcaatgtggaagctctagagaagtttgttgaggaatctagtacccctgttgttactgtctttaacaatgaaccgagcaatcaccctttcgttgtcaaattcttcaacagtcccaacgcaaaggcaatgttgttcatcaacttcactgccgaaggtgctgaagctatcaaatcaaaataccgtgaagctgctgagcaatataaacaacagggtgtcagctttttggtgggagatgttgagtctagtcaaggtgctttccaggttt

SEQ ID NO: 15919 - DNA, 416 bp, Glycine max
  modified_base (317)..(317): a, c, g, t, unknown, or other
cgtgaaagatgatgcgagacaagaaacggggttgaggaaaatatctgcaccttgaagcttcacgagaacattgctcgcccttcacgcgctgacttctacaaccctaaagctggtcgcattagtaccctcaacagcctcaccctcccagccctccgccaattccaactcagtgcccaatatgttgtcctctacaagaatggaatttactctccacattggaatctgaatgcaaacagtgtgatctatgtgactcgaggacaaggaaaggttagagttgtgaactgccaagggaatgcagtgttcgacggtgagcttangaggggacaattgctggtggtaccacagaacttcgtggtggcggagcaagccggagaacaaggattcgaatacatagtattcaagacacaccacaacgc

SEQ ID NO: 15920 - DNA, 367 bp, Glycine max
ctgaaacataaacaactcaaaccactcaaacaaggaatcaattaaagaacacaggcaatgagaaaccttcaacaatctcatcagcaacctctgcaatagctgataaagctgtctcagccaaaaacaccgtagcttcgaagcttggttttggcgacacagcaacaacaacacaacaagagaagagaactgaccatgctgctgctcctacagaatatggaaaaagtgttgctcagtccctgacagagaaactagctccagtttctggaaaagatgctggtgtaggaagtggtgtgaagtccaaagtttctggaactcaaactagtagtatgggtgtggaacaggacaagggggtttctgtgaaagacta

SEQ ID NO: 15921 - DNA, 420 bp, Glycine max
ggagtcctcaaagatctatgcttacctcttcctctgcatgatctttctctcttccgccactcccattctcggttgtggctactgtggcaaaccccccaaaaagcacaagcctggtaaaacaccaaagacacccaaaacacccgttgttaagccaccagtcaccatccctcccattaatgttcctcccgttgttcttccaccaatagtgaagcccccaggtattctccctccaattccaattattaacccaccaaccacaccagggaagggagggaacactccatgcccaccaccaaagtctcctgcgcaggctacgtgccccattgacacgctcaaacttggtgcctgtgtggatcttcttggagggttggttcacattggtttgggtgaccctgttgcgaaccagtgctgccccgtgct

SEQ ID NO: 15922 - DNA, 376 bp, Glycine max
ttccttcacttgcagcactgttgcatcatcatcttcattgcaaaaccctaaacttcaccttcaaccatgaccacacaagtaccaccacacagtgtccaagtccacacaacaacacaccgctacgaagctggcgtcgtcccccccggagcccgtttcgaaccgccgcgttatgaagccggcgtcaaagcgccctccatttaccattccgagagaggtccaacgactttccaggtcctcgtcgtcctcgccggcctcccggtcggtggcatcctgctcctgctggcgggattgaccctggcaggaaccctcaccggactggcagttgccacgccggtcttcgtcctcttcagcccggtgctggttccagccacggtcg

SEQ ID NO: 15923 - DNA, 412 bp, Glycine max
caaacacttatcatattactaacaaaaatggaactaacattccctcatcaagacgaagatgattccgttgtttctgattgcgagagcggtgtttcgggcagtggagtcgtggtggcaccaccaccaccaccaccacaacaacaacaacgtggttttttcgttaggcttggagaaggtgacgtggttcacgatcttatcaagacaaggtttattcgtggcctcggcatgctcgggcctaaaaccgaggttgtctccgttcgccgaaacgcgtgctccgacgtcgtttcacaggcgcgccttcactcgtttcatgctcacgccagggcggtggcgaggctccgcggcggcgggaatcatgccaacgtgaagtacgcctggtatcgtacgaacggcgaggacgacgtgaacgaca

SEQ ID NO: 15924 - DNA, 287 bp, Glycine max
ctgctgcactttggcttctgctgcgctttcaggtccagagggcagccgtagccatacgagtgccacatccacacactcaatgcactcgacccagatcaccgtatcgagtcagaaggagggctcatagatacatggaaccctaacagcaagccattccaatgtgccggggttgccctctgtcgctgagaccctcaacctgtacgaccttcggagaccttcctacgccaacagtgcccaggaaatctacatccaacaacgtgacggtatttttcgcatgatatacccgg

SEQ ID NO: 15925 - DNA, 378 bp, Glycine max
ctgcttttcagtggctgctgcttcgctttcagttccagagagcagcctcagcaaaacgagtgccagatccaaaaactcaatgccctcaaaccggataaccgtatagagtcagaaggagggctcattgagacatggaaccctaacaacaagccattccagtgtgccggtgttgccctctctcgctgcaccctcaaccgcaacgcccttcgtagaccttcctacaccaacggtccccaggaaatctacatccaacaaggtaagggtatttttggcatgatatacccgggttgtcctagcacatttgaagagcctcaacaacctcaacaaagaggacaaagcagcagaccacaagaccgtcaccagaagatctataacttc

SEQ ID NO: 15926 - DNA, 352 bp, Glycine max
cgaacatttttgctaatgccaaggctggcatggacaagaccaaggccactgtccaagagactgcagaacgagtgacagcgcgtgatccgttgcaaaaggagttggcaacccaaaagacagaggctaagatgaaccaggcggaactggacaagcaggcggctcgtcagtataacacggcggccatacagagcgagaccacggatgtgcacatgggacatgcccaccacaccaccggaaccgggactggaaccgtcacgtattgcaccatcggagaatatggtcagcgcatagtggccgatcagacgtcggcaatgcctggccatggaatcgagcagaccatgggccatgtcac

SEQ ID NO: 15927 - DNA, 364 bp, Glycine max
ctcgagccgctcgagcggctcgagcaagagttgaaggaaatggctgaagcacaactacgagaccagcatggcaaccctgtcccactcaccgatcaatacggtaatccggttatcttaactgacgagcgcggtaatcccgtccaactcactggtgtcgctaccaccgctaccggcacagcaggttctgggtttgggtcctatggtaccggtgcttacggtggtggtgcaagtgcaaccaccgttgcagatcttttggcaacccaaccaaggagtggcagggaggctagagagcttcgtcgttcctccagttcaagctctagctcgtctgaggatgatgggcaaggtgggaggaggaaaaaaggag

SEQ ID NO: 15928 - DNA, 273 bp, Glycine max
ctcttgcgctctacgtccggggcgattgtcacaactgcacgattattcctctatggatcctgcatgcgtaccacgttttcctacagtgtgtagtcctaaagctcggcgtactcatggcaatagcagcctaccgtgagacattgacacccaattacaatcacggacgcctactaaacggctgcctactgtgtgagacctcagatgcccaatgactgagctacctgacattcgttccgttgcggtcactgcaggctctgaagcgctgaaacatgc

SEQ ID NO: 15929 - DNA, 384 bp, Glycine max
cactaacaattccttcacttgcagcactgttgcatcatcatcttcattgcaaaaccctaaacttcaccttcaaccatgaccacacaagtaccaccacacagtgtccaagtccacacaacaacacaccgctacgaagctggcgtcgtcccccccggagcccgtttcgaaccgccgcgttatgaagccggcgtcaaagcgccctccatttaccattccgagagaggtccaacgacttcccaggtcctcgccgtcctcgccggcctcccggtcggtggcatcctgctcctcctggcgggattgaccctggcaggaaccctcaccggactggcagttgccacgccgctcttcgtcctcttcagcccggtgctggttccagccacggtc

SEQ ID NO: 15930 - DNA, 318 bp, Glycine max
ggaataggtgcaagcagcaagtcctatcccaaccctagcgcctaacttcgaaccttcgtcctttctctcttcttccttcagattcatccgtaccgttagttactactggattcgcggttgattgctgctaccgggtttctcctctttcacgtataagatgcacttccggtcatcattttaccaacatgcagattttgagttggtttctgaatataaatggacgccaaacggttcatccagctggttgaggagaagaagaagaaaattatggagagaaaggaagctcctttgaaatgggagcagaagcttgaagctgct

SEQ ID NO: 15931 - DNA, 97 bp, Glycine max
ccgagtatcgagcctcagagacttcgaaattaagtgcggaacgaaacctgcaggactgcgggctatcacgctatagagagtcgccttatactcgagc

SEQ ID NO: 15932 - DNA, 390 bp, Glycine max
agaacctgtcaatcttcagtttggtttttatgggatcagtgcatggccaagtgatggtggcactagtcgtgctggaagtgttgatgagtctagagctgatgggactgatactggtagtagatatgtatcctcttgctgtagctcgccaaggatgtcggatgttgctgcaaaggagctcaaggaagatttctcagtgcatggtagtgatgaagagattgacgatcaaccagaggtgggcagtgatgaggattttagtgatgatggcggcaaacatgcccttgaagaggtaggatcagttgatgaggaatcaacaaaatccgacgaagagtatgatgatcttgcgatgcaagacgtgctggaaactggatattggtcagatgatgaagagta

SEQ ID NO: 15933 - DNA, 419 bp, Glycine max
  modified_base (322)..(322): a, c, g, t, unknown, or other
tgcacaaattatatctgctagcattgccggcgatttagttcttgctacagcatattcacatgagctgccacgatatggtcttgaagtaggacttacaaattatgcagcagcttattgcactggtctcctgttggcccgaagagtcctcaaaacacttgaaatggatgaggagtatgaaggaaatgttgaggctactggagaggattattcagtggaacctgccgagagcaggaggccattccgtgcactccttgatgttggtcttgttaggactacaacaggaaatcgcgtctttggtgcccttaagggagctctggatggnggtttggatattcctcacagcgacaagaggtttgctgggtttgataaggagaagaaagagcttgatgctgaggttcatcgcaaatatgtttttggtg

SEQ ID NO: 15934 - DNA, 413 bp, Glycine max
gggaacatgagttggcggtcggtgaggggaagccgtaagaggaagatggatttcgaactggacctcaaccgtgatccgccgctggttcgagaagaggaggaggaggaggaggagggggggccctcaaggcatcagcagcaccaccaccaccaacaagaacctcaaactcccattgtcgatgtcgacgccattgacgacgatgttgttgaaagctcgcctaggtctttcgctcaggctaagagcaatgctgatgagaggaggagagttcgcaggaggacgactattgttgatttggactcagaagatgggaccggaggagttcctcaaaaccaaacaatcatcaatggcgatctttatgtaaatttggccaacaacagcagttctgcgagtgaaaatgctaagaagacacctga

SEQ ID NO: 15935 - DNA, 438 bp, Glycine max
cggtatttctagatatataactaaaaagaatcgacagaatacgcctagtcgattggaattgagaaaattttgtccccgttgttgcaaacatacaattcacgcagaaataaagaaatagatcaaattgatcgcttgtgtgttacccttcgaaccaaagaacttaacatgtaaaatgatctatttttcttatctatatagatagatctatctgtattctatcatttacagttgaatatatacgaatatcagtatataacaacatatattaaaaaaatgacaacgtatattaaaaaagtcagaatataaaaaccaatcctttatagtattcttggaattaaatgggttttttgaaatagggattaataacccatggaaaaatctaggcgactctctatgaaatccaagcgatctttttcgaggcgattgcccccgatccaa

SEQ ID NO: 15936 - DNA, 327 bp, Glycine max
caagtacttccttacaatcaaaaccaacaacaactatggcaagttatcaaaagcactacgatgatcagggtcgcaaggttgacgagtatggcaacgttgagaagcaaaccgacgaatacggcaaccctgttcatgctgctagtgtcacctatgtagccaccagaactgctgctggtggttacagtgatgacattaataagcaacatgataccaccaatgcctacggcgtagacactggtagacagcattctagtggtggctacgatggtgacactaataaacatcatggaactactggtggctataatgatgacaccaatagacatc

SEQ ID NO: 15937 - DNA, 341 bp, Glycine max
gaacgagggagctcttcttctaccacacttcaattcaaaggcgatagtgatactggtaattaatgaaggagatgcaaacattgaacttgttggcctaaaagaacaacaacaggagcagcaacaggaagagcaacctttggaagtgcggaaatatagagccgaattgtctgaacaagatatatttgtaatcccagcaggttatccagttgtggtcaacgctacctcaaatctgaatttctttgctattggtattaatgccgagaacaaccagaggaacttcctcgcaggttcgcaagacaatgtgataagccagatacctagtcaagtgcaagagcttgcat

SEQ ID NO: 15938 - DNA, 410 bp, Glycine max
caaaacaaattgtttacgttacaaatcgcataataaccgtcctaagtttattgagagaattttgcaagtgtgagaaacatggcatctcgtcaaaacaacaagcaagagcttgatgaaagagcaaggcaaggagagactgttgtcccgggtggaactggtggcaagagcctggaggctcagcaacaccttgctgaaggaaggagcaagggagggcaaacaaggaaggaacagctgggtacagaagggtaccaggaaatgggacgcaaaggagggttgagcactgtggacaaatcaggagaagaacgtgctcaagaagaaggcattggcatcgatgagtccaagttcaagactggtaataacaagaaccagaatcagaacgaagaccaggataagtgataatgtaacaccct

SEQ ID NO: 15939 - DNA, 338 bp, Glycine max
gtgcggttttctttgttggtgttgctgggaactgttttcctggcatcagtttgtgtctcattaaaggtgagagaggatgagaataaccctttctacttgagaagctctaacagcttccaaactctctttgagaaccaaaacggtcgcattcgtctcctccagagattcaacaaacgctccccacaacttgagaaccttcgagactaccggattgtccagtttcagtcaaaacccaacacaatccttctcccccaccatgctgacgccgatttcctcctctttgtccttagcgggagagccatacttaccttggtgaacaacgacgacagagacttcta

SEQ ID NO: 15940 - DNA, 416 bp, Glycine max
agaagaaatggcattgacgagaccatatgcaccatgagacttcgccacaacattggccagacttcatcacctgacatctacaaccctcaagccggtagcgtcacaaccgccaccagccttgacttcccagccctctcgtggctcagactcagtgctgagtttggatctctccgcaagaatgcaatgttcgtgccacactacaacctgaacgcgaacagcataatatacgcattgaatggacgggcattgatacaagtggtgaattgcaacggtgagagagtgtttgatggagagctgcaagagggacgggtgctgatcgtgccacaaaactttgtggtggctgcaagatcacagagtgacaacttcgagtatgtgtcattcaagaccaatgatacacccatgatcggcactcttgc

SEQ ID NO: 15941 - DNA, 264 bp, Glycine max
taggaggcaaaaatgtggataggtgaattggaataatgtgatttcttattaggcctatcctgaatccaaaggaaatgagaacggaattcctcggggaattccaattccacatgttcaagaaataatgaggcaaaaatggtcatatatgaattggaagtagttgttttcttattaggcctatacaggagccaaaggaaattggatcggaattcctcggggaattccaatttcacattgtcaagaaataaggaggcaaaaatgttc

SEQ ID NO: 15942 - DNA, 422 bp, Glycine max
  modified_base (327)..(327): a, c, g, t, unknown, or other
agaaaacctctcgttttctttctctctctctaaaacacgatttccaattttctttctctagaaatgggaacagcaatccttcgttcccacgattgcctccaaggccggttcctccacaacgaagccttcgcgatcgccacgtcacgtgttgcatcgcgaagaaaccctaactctaacaacaataaccataatagcttcgcctcctccgcaaaccagaattgccgccggaagcggagtccggtcaccgatcgagagcgccgtcgatcgccgccgaatctcgtcacgggacacgttaagatcctgaagcgaggcgagaaattgagcctncagaataaaaaccaaagactcgctgtttccgcggagaaccgtttggtgaagaacgatgtgggccctggatttgttatggggttcacggatcgatt

SEQ ID NO: 15943 - DNA, 437 bp, Glycine max
aacatacaatcatggaacaagatcgaaggtttgagctcatcgaccaagcaattcagaagcttgtacacgacaacaccaacaaagtccaagaatccctccataacaatgatgctcaataccaacaccctctttcccaccttctctctgtctctcagttgaaaatgttgaaaggagaagagatacttgagcaattcgaagcttctagttcttctgagccggtggcttctataactcaggaaacagaaagtgaaaatgaggatgctggggaaagtaagggaagtgaaaatgatgagataatcaaagaactgaagaagttgaagaggcagaacttcgtgactcattgtcttctttcggtgatgattgttctcactgtggcttggcaactatcggaggtttctcttattttgaaagtcaaagatggaataagccaccctttt

SEQ ID NO: 15944 - DNA, 402 bp, Glycine max
aaataattgatctttgaaaatgcagggaggaaagaaagctggagagtccatcaaggaaacagctgcaaacattggtgcttctgccaaggctggcatggagaaaaccaaggccactgtccaggagaaggcagaaagaatgacggcacgtgatccgatgcaaaaggagttggcaacccagaagaaagaggcaaagatgagccaggcagagctggacaagcaagcggcgcgtcagcataacacggcggcgaagcaggctgccacggcagggcacatgggacaacccatggggacccatcagacgtcagctatgcccggtcatggaaccggacagcccacgggccatgtcaccgaaggagtggtgggctcacaccctattggaaccaacagaggcccgggtgggac

SEQ ID NO: 15945 - DNA, 197 bp, Glycine max
accccgcatactagacccagaaaaacaacaagggtcaaaggtaaatttgcaaaaaggacagaatctcgcatattataacatttaaagtaaccaggatattcaaaatcctctatttcgagaacatatccttcaacaatttcaccgctactttctatctctaatgtgcaaacagacagtccataacggatgaataatat

SEQ ID NO: 15946 - DNA, 360 bp, Glycine max
aaacagtttgctgtgaaatagactgaggaatggtgcccaaaagacgagaacctgaaataccaggattgagcccatatgcacacatattgtttatttcacagcaaactgtttggaatcaaatggcaacagtgagaacaccattgaattttgattctagcaagcagagtttttgtcaattttctattgaccttctcggtggaggaattttagtggacaaaactggagattggatcacacttatacaaaattctccaattagtaacttgttgagagttgctgcttggaagaaaggctgtttaatggttaagattgtgatgtctgggaatgcagcagtcaaaaggagtgattgggcctcattgg

SEQ ID NO: 15947 - DNA, 331 bp, Glycine max
cttgtactgtgcatgtaactgaggttgaatgggaccaatagaaagaagcagctcacatgggtaaggcagaggagtatgtcgtgtatctcaatcatgctgaggaactgcatttcatgaccccaaagtctgaaccactccaatttactattcaaccttgcacttttgagatctacaactttgtcccagttgaaaagctaggtggcagcatcaaatttgcaccaattgggctcacaaacatgttcaacagtggagggacaattcaagaattggagtgcgttgaggaaggtgcaaaggttaacgttaaaggtgatgggagattccttgcttactc

SEQ ID NO: 15948 - DNA, 272 bp, Glycine max
gaaccagtcccgtggtgaaaccaaaacagctaagcgattcatcaatgacaccatcaggaatgatttccatagaaaatttctgcataaatacatgaagtaagtccttgtgccagaagtccgagttgtttggattttggtctcaacagaacttattaatttgcagtttgtatctaaatgtatgattcaatgttgatggatatatttgtttctcttataaccgtattttaacatgttactcgtagttgctgtaacatggtgtatgcttgttaatg

SEQ ID NO: 15949 - DNA, 375 bp, Glycine max
ctctttctccgagaacaaaacaaaaacaaataaaaatccgcgattcgctcttctcttggaaaagtgaaatccagaagtacgaacgaaagacatgagatcagcgatttagaagtgagagaagatggggttgtcgttcacgaagctgttcaccaggttgtttgcgaagaaggaaatgaggattctgatggtgggtctcgatgctgctggtaagacaaccatcttgtacaagctcaagcttggagaaatcgtcaccactatgcctaccatcggatgtaatgctgagactgtggagtacaagatcatcagcttcactgtgtgggatgttggtggtcaggacaagatccgtccactgtggaagcattatttccagaacac

SEQ ID NO: 15950 - DNA, 290 bp, Glycine max
aattgatgaggcacttgctaaagaaattcgagaatttagaagccccacagatggggagacaaggatgttttatgaaatagtggttgcgcccagctatacagagaagggacttgagattctctgtggaaagtctaagactctaaggattcttgaagcgaagaagaatgaagctggaaagctttcactcagacaagttggtggaggatggttagctcaggattcagatgacttaaccccacaggacatcaagttcaacgtagtctctgagaaggctccacaggatgatgagc

SEQ ID NO: 15951 - DNA, 317 bp, Glycine max
cttgtactctttttatttactaaaacagcatatgatattcaggtggagttcttaccaagtccattttggatgatggtcatgatttctcttgctgaaaaaggtattaaaaatgagtccacacaagaagactctcttaacaagagccctttgttcctcaaaatgaaccccccttacaagaaaaaccccgatctcatacacaattacgcacacacttttgaataactcgatgctattcaaaacacttaggaaatctctaatgacccaaatccctagttgacttctgacacttatcacaaagctcatactaaatatttggc

SEQ ID NO: 15952 - DNA, 387 bp, Glycine max
cacgaaaccatcgtttttaaacgcggctttctactgccacgtcttctctcgctccttaaccttaaaccctaaccctctgctcctcgtttccccgtttcggaaacccgaaacgtttcgcctcgcttcacccgtttcgtgcttatcctcctcctcaatggcggtgcctccgtcttcgctggagaagcaattcgatgactttagggttcagctggaagaatctggaaccttgcgcgaacgaattcgaagcgtcgtttcggagattgagtcctccactaggctcatctatgccacacttcttctcgttcaccagtctcgtaccactcccgagctattagagaaggccaagtctcatgttaatgtgttaaagaagcagttttagcaacttgc

SEQ ID NO: 15953 - DNA, 136 bp, Glycine max
tttctttcgcttgttcgtttgtttaattcaataaaggaaattaggcatgaccctcttgttgagtatgctctgcctatttgaaaatttccacacctcttttaattgtcgtaatgatgtgtgaagtgtgtgttatttt

SEQ ID NO: 15954 - DNA, 387 bp, Glycine max
cttgaactcgaatattcactatggcagatgaggtggttctgctagatttctggccaagtccatttgggatgagggtcaggattgcacttgctgaaaagggtatcaaatatgagtccaaagaagaggacttgcagaacaagagccctttgctcctcaaaatgaacccggttcacaagaaaatcccggttctcatccacaatggcaaacccatttgtgaatctctcgttgctgttcagtacattgaggaggtctggaatgacagaaatcccttgttgccttctgacccttaccagagagctcaggctagattctgggctgactttgttgacaataagatatttgatcttggaagaaagatttggacatcaaagggagaagaaaaagaag

SEQ ID NO: 15955 - DNA, 402 bp, Glycine max
  modified_base (356)..(356): a, c, g, t, unknown, or other
gtgagaacaccattgaattttgatcctagcaagcagagcttttgtcaattttctattgaccttcttggtggaggaattttagtggacaaaactggagattggatcacacttatacaaaattctccaattagtaacttgttgagagttgctgcttggaagaaaggctgtttaatggttaagattgtgatgtctgggaatgcagcagtcaaaaggagtgattgggcctcattggtacaagtgtttctaacaaacagcaacagtacagagcattttgatgcatgtaagtggacaaaatcggaaccacattcctgggaattgatcttcccaatagaggtatgtggtcctaataatggttntgaaatgtggagttctgagtgggcaaatcaaacttcatggcatttg

SEQ ID NO: 15956 - DNA, 239 bp, Glycine max
ctcgagccgtggttatagagggaaggaaaaataattagagtaataataattagagtagcaaatcatacacaaagtaataataattagagtagcaaatcatacacaaattattattactttggttatagagggaaggaaaaatgagttaatgctcatagtttggaggacatgtataaaatcattttgggtatcgtgactatcatgttaattacttgaatgtaatttgtcttaattataat

SEQ ID NO: 15957 - DNA, 417 bp, Glycine max
atccttttcctgataaatgactgaactttaaggccacttgccatagagttgagtttgccacatcctcagggagatcaatctggtgcttttagtcaagtttttctgcctgcagatgaaggtgttgaaagttctatttggctgctagcaaaggcttatgtagttgtgaatgactcgtgctatcatcaacttgtcagccattggttaaacactcatgcagttgttgagccattcatcatagcaacaaacaggcatctcagtgttgttcaccctatttataaactccttcaccctcactatcgtgacaccatgaacataaatggccttgctcggttatcactggtcaacgaccgtggcgttttagaacaaacatttttgtggggaaggtattctgtggaaatgtctgctgtaatttacaag

SEQ ID NO: 15958 - DNA, 256 bp, Glycine max
ctggcggctcgagctcgagccgtggctcagagggaaggataaataattataggaaggataattagagtagcaaatcagacacacagtaataataattagagtagcatatcatacacaaattattattactttggttatagagggaaggaaaaatgagttaatgctcatagttaggaggacatgtataaaatcattttgtgtatcgtgactatcatgctaattacttgaatgtaatatatcttaattataataaatc

SEQ ID NO: 15959 - DNA, 327 bp, Glycine max
ggaaatggctgaagcacaactacgagaccagcatggcaaccctgtcccactcaccgatcaatacggtaatccggttatcttaactgacgagcgcggtaatcccgtccaactcactggtgtcgctaccaccgctaccggcacagcaggttctgggtttgggtcctatggtaccggtgcttacggtggtggtgcaagtgcaaccaccgttgcagatcttttggcaacccaaccaaggagtggcagggaggctagagagcttcgtcgttcctccagttcaagctctagctcgtctgaagatgaatggcaaggtgggaagaagaagaaagg

SEQ ID NO: 15960 - DNA, 388 bp, Glycine max
caagaaataacgaagcacaaggctgcatatataaattggaatgatttgcacacttattaagcctatccttaagccaaaggaaatgagatcggaattcctctgggaattccaattccacattttcaagaaataaggaggccaaaatgttcatatatgaattggaactatttgttttcttattaagcctatcctgaaaccaaaggaaatgagatcggaattcctccgggaattccaattccacattttcaagaaataaggaggcaaaaatgttcatatatgaattggaattatttggtatcttattaagcctatccttaaaccacaagaaattagatccgaaatcctctggtgtacccagcttcaatttcctatttttgagtccatttaa

SEQ ID NO: 15961 - DNA, 367 bp, Glycine max
gcaagactagtccactacccgtgcttaaggaaatcttccgaactgatggtgaacaggcccttaagtttactcctactaaagtaattcaagtgagtaagtctgcatggatgactgatgaagaatctgcaagagaaatgcttgctgctgtaaatccaaacttgattcgctgtcttaaggatttcccttcacgaagcaagctaggtagccaagtctatggtgatcatactagtcaaatcaccaatgatcacctagagcccaacttataagggctcactgtagatgatgcaattcactacaagagattgttcctactcgatcatcatgacccaatcatgccctatttgaggcgaatgaatgcgacctccac

SEQ ID NO: 15962 - DNA, 187 bp, Glycine max
aaaaaaatttaaaaaaaaaaaaaaaaaaaaaaaaaaaagaaaaaaaaaaaaaaaaaaaaaaaaaaaaaaaaaaaaaaaaaaaaaaaaaaaaaaaaaaaacaaaaaaaaaaaaaaaaaagaagaaaaaaaaaaataaaggggtgcccacagattagatactaggccatccagaatttaaaacagatac

SEQ ID NO: 15963 - DNA, 318 bp, Glycine max
gttcaatatcctagtataccttaataaataatttaagatactatgatgagagcacggttcccattactgttgctgggacttgttttcctggcttcagtttctgtctcatttggcattgcttactgggaaaaagagaaccccaaacacaacaagtgtctccagagttgcaatagcgagagagactcgtacaggaaccaagcatgccacgctcgttgcaaccttcttaaggtggagaaagaagaatgtgaagaaggtgaaattccacgaccacgaccacgaccacaacacccggagagggaacctcagcaacccggtgag

SEQ ID NO: 15964 - DNA, 409 bp, Glycine max
tcgagacttgctagcatgcatgcacgcctactctagatgatcctctcggtgaagtccaattcctcattttcaagaaatactgaggcaaaaatgtgcatatatgaatcggaattatttggtgtcttattaggcctatcctgaagccaaaggaaatgagatcggaattcctcggtgaattccaattgcacattttcaagaaataaggatgcaaaaatgctcatatatgaattggaattatttgtggtactcattaggcctatactgaagccaaaggagatgagatcggaattcctcggagaattccaattccacattttcaagaaataaggaagcgaagatgttcatatatgaattgcaattatttgttttcttattaggcctatcctgaagccaaaggaaatgagatcgg

SEQ ID NO: 15965 - DNA, 359 bp, Glycine max
cgctgcaattgtcaacggagctgggcgtatttgacgtgtggcaagatgcgggggctaagctgtctgcgaaagagatagcatccatgcttacctgctacatctaccctgaagcagactcaatgctggatcgccttctagcccttctagcctctcacttcattcttaactggtctctcattctcgaccaccaaaacctggggacctttcataggctctacaccatgaataccgtcgccagattctttgctcggaattctgatggggttttcatgggacccttgatggccctgcgttaagacaagatctttctacataactggtcggagcttaaagattcaattcgggaatggggtattcca

SEQ ID NO: 15966 - DNA, 353 bp, Glycine max
ctcctttactgctatctgtatctctctctctctatgggggagcttgcttgaagcaatggccaaagccttggcatcagagctgctgttcctactagcagctgcaagtaatgtgcatgctgaacagcttgaacttgaaactgatatcaacctctctaccattaccctcaacctgttcactaccccacaccatcaactcttcacccaccagcaaatgctcatcacgcacactaacattaccagcaccaccaccattcagcaccagcaccatcaccagcacatgttgcttgaccttctcaccacaataacactgctacccctagccctgctaagcctactactcaccatcatcacca

SEQ ID NO: 15967 - DNA, 388 bp, Glycine max
  modified_base (323)..(323): a, c, g, t, unknown, or other
  modified_base (347)..(347): a, c, g, t, unknown, or other
aactgcagttgtaagagcgcatgatggccgtggtccaagtacaatgcttacgagtagtattttacaaacgcttggtctttcttctgcagaagaattaatcgggtggacctatgcagatccctcttgggcccggatcgctgcccttgttccagttgtagtgacctgtgcagaggctggggatgaggttgcaaataagatcttgctagattctgtacaagagctagcttcaagtgtcaaagctgttgtagagagacttggattgtgtggtcaagatggaaagagtgcctttccccttgttatggttggcggtgttctcgaagcanataggaggaggtgggatatagganaagaagtaatgaatggcatttccaaatccttttctggggta

SEQ ID NO: 15968 - DNA, 242 bp, Glycine max
cactatcctagtataccttaataaataatttaagatactatgatgagagcacggttcccattactgttgctgggacttgttttcctggcttcagtttctgtctcatttggcatcgcttactgggaaaaagagaaccgctgacacagcaagtgtctccagagccgcaatagcgacagagactcatgcaggaaccaagcatgccacgctcgttgcaacctacctaacgtggagaaagaagaatg

SEQ ID NO: 15969 - DNA, 407 bp, Glycine max
gctacttcggctccatcttctccgatctcctcaaactctatgagcgcagaaccaagcctctatcaccatggggaagacacatggaatgggagctgcccgcaagctgaagtctcaccgtaggagacaaaggtgggctgacaagtcatacaaaaagtctcatctgggaaatgaatggaagaagccttttgctggttcatcccatgccaagggtattgttcttgaaaagattggtattgaggctaagcagcccaactctgccattcgaaaatgtgccagggttcaactcatcaaaaatgggaagaagattgctgcatttgtgccaaatgacggttgcttaaattatattgaagagaatgatgaagtcttgatagctggatttggacgaaaaggtcatgccgtgggtgata

SEQ ID NO: 15970 - DNA, 347 bp, Glycine max
catgaaggaaggaagcagcattatcaacacgacatcggtgaatgcatacaagggaaatgcgaaactattggactacacgtccacgaagggagcaattgtggcctatacaaggggacttgctcttcagttggtgagtaagggaattcgggttaatggggtggctcctgggcctatttggaccccattgataccctcctctttcaaggaggaagaaacggctcaatttggtgcccaggtgccaatgaagagagctggccagcctattgaggttgctccgtcttatgtttttcttgcttgcaaccaatgctcctcttacataactggacaagtccttcaccccaatggtg

SEQ ID NO: 15971 - DNA, 408 bp, Glycine max
aatcggtcggcactgatattaagaagcatttatacacctagaaatgagagcactactggtcgtatcttctacttggggctttaacttatacctacctttcggcaacggccaagacgtgcttgacgtggatggcgatccgattcggaacgggttcatataccacggtttggcggcaattagaagaaaccgtggccgaatagaacgagccgcacttgggaaagacacttggcctataactggaatggcaatctcccaatccaaactctaaggggttagaaattaagttggaatctgcatacccggcctattacataaacgaaaccctaattttgcaaataaagttcagttacccacagcagtgtgaaagaaagaatccttggtgggccatttctaaggatatatctgaag

SEQ ID NO: 15972 - DNA, 112 bp, Glycine max
cttgggaatcaagtttgagttgtttctggataatgaatttccacatactgacactgagtattagggttaatggtcacgttatatgcaaatggggataaaacatcacaggaaa

SEQ ID NO: 15973 - DNA, 410 bp, Glycine max
  modified_base (387)..(387): a, c, g, t, unknown, or other
ctcgagccgttccattctctctgtgtatttccctacctgtcccttcaagatgcagatcttcgtcaagaccctcaccggcaagaccatcacccttgaggtggaaagctctgacaccatcgacaacgtcaaggccaagatccaggacaaggaaggaatccccccggaccagcaacgtctcattttcgccggaaagcaacttgaggacggccgtacccttgctgactacaacattcagaaggagagtactcttcacctcgtcctccgtctccgtggtggcatgcagatcttcgttaagacactcaccggcaagaccataaccctagaggttgaaagctccgacaccatcgataacgtcaaggccaagatccaggacaaggagggtatccncccggaccagcaacgtctcatct

SEQ ID NO: 15974 - DNA, 404 bp, Glycine max
ctcgagccgtttcattctctctgcgtatttccctacctgtggcttcaagatgcagatcttcgtcaagaccctcaccggcaagaccatcacccttgaggtggaaagctctgacaccatcgacaacgtcaaggccaagatccaggacacggaaggaatccccccggaccagcaacgtctcattttcgccggaaagcaacttgaggacggccgtacccttgctgactacaacattcagaaggagagtactcttcacctcgtcctccgtctccgtggtggcatgcagatcttcgttaagacactcaccggcaagaccataaccctagaagttgaaagctccgacaccatcgataacgtcaaggccaagatccaagacaaggagggtatccccccggaccagcaacgtc

SEQ ID NO: 15975 - DNA, 337 bp, Glycine max
tgagatgctcattagatatagctatgaaaaattactgcgccaggctaaagctccaagtatgtttttacaatctttcaaaaattttgtttctttgtgtgtgtatggtgatgataacttaattagtgttcatgaatatgtcaagccttactttagtggttctaaattgaaaagctttctagctggtcataatatcaccattactgatggtattgacaaaactagtgcaactttgcaatttagaaagttagcagattgtgattttctcaagagaaactttaggcagatgtctaatgttttgtgggtggctcctgaggacaaagggaagttatggtcacaa

SEQ ID NO: 15976 - DNA, 379 bp, Glycine max
tggtccttaaacactcatcagtcatcaccatggccaagctagttttttccctttgttttctgcttttcagtggctgctgcttcgctttcagttccagagagcagcctcagcaaaacgagtgccagatccaaaaactcaatgccctcaaaccggataaccgtatagagtcagaaggagggctcattgagacatggaaccctaacaacaagccattccagtgtgccggtgttgccctctctcgctgcaccctcaaccgcaacgcccttcgtagaccttcctacaccaacggtccccaggaaatctacatccaacaaggtaagggtatttttggcatgatatacccgggttgtcctagcacatttgaagagcctcaacaacc

SEQ ID NO: 15977 - DNA, 366 bp, Glycine max
gatgctcattagatatagctatgaaaaattattgcgccaggctaaagctccaagtatgtttttacaatccttcaaaaattttgtttctttgtgtgtgtatggtgatgataacttaattagtgttcatgaatatgtcaagccttactttagtggttctaaattgaaaagctttctagctggtcataatatcaccattactgatggtattgacaaaactagtgcaactttgcaatttagaaagttagcagattgtgattttctcaagagaaactttaagcagatgtctaatgttttgtgggtggctcctgaggacaaggcgagtttatggtcacaacttcattatgtttcgtgtaataatctggaaat

SEQ ID NO: 15978 - DNA, 390 bp, Glycine max
ctgaatcgaacacacgtgagtatgtctgatcacgaagaccatgcagactacgcagacaatgaatcctttgcaaagcgtaggttcagggataggtccaaggaggcattgtccaaacaagccgttaagttagccaaacaagctgaagagcatgaaaggttcatcaacaaggtgactcatcttttgggggttcttggctttggttggttttgcttcatctttggggcaaggccacaagccgttcccttggtatattgtttgttctatgtggtatttgttcctctccgttggatatattacaggttcaagaaatggcattactatctcctggatttttgctattatgccaatacaatcttcttggtttacctccttttctacccaagcaatgaa

SEQ ID NO: 15979 - DNA, 277 bp, Glycine max
tagctgactactaatataatttaccatagatcatatcgtataccggcaagcttcacatacaagaggtcaatctccaaaacatatgtccacggatcgttccaagccagaattgacgaaacaaccccaatcattaaccttttattctctactacatgaaatgccaatcaatttgtatactaattcaacttcggcatttgcctttacactgtttctcgcgttttttcagaaacatagataacctgattcaccacactataaacagtcctataagagacac

SEQ ID NO: 15980 - DNA, 214 bp, Glycine max
aactattaactcgcattcaccccttcctaaaccccgaaatccgctccagaaaaaaattaaagatattctcaacttaaaaaaaaaaaaaaaggggaaaaaaaaaaaaaaaaaaaaaaaaaaaaaaaaaaaaaaaaaaaaaaaaaaaaccaaaaaaaaaaaaaaaaaacaaacaaaaaaaaaaataaaaatatacccaaaaaataaaattattaaa

SEQ ID NO: 15981 - DNA, 404 bp, Glycine max
  modified_base (395)..(395): a, c, g, t, unknown, or other
tgataagcttgtgttggctaacacacaagaattctttgatggaaattttccagtggattcttggttaccaatttttgtgaattgtctttatcctgtaagtcaattaccttcagaagctgtcgttgtaaatgtcacatgtggtagtggacgtgtggtttacccaccactgcttggattagttctgcagttaacaatcgctcctcagatatcaacaaaaggattcgcacagcacttgggaaaggtaagaaaattgtttttcttactagagttgacccttttccagtagctttactggctgttctttttggtgttaagaatgaaattctgagttctaacgccactaatcctatgctgacgcgacttcttgaaaactgtaagagtctcaaatatctggntgatgagtg

SEQ ID NO: 15982 - DNA, 292 bp, Glycine max
ctcgagctgtttcgggacgcactcgctccaaccggacaaggggtgcccaaagcttgattcattgatgcgtgctcacactatgatcactaggagctcttacaccaccatacattgctatggactcaaccataatcccatatcatgcatagggtctggaggcggtgtctacaagttctaccctaaaaggcaccgctgccatatgcaagccagagcttgctaggaacaacaaaactatgtcagctgggacggcattcaattcacataatcagcagacaagattgttgcacatgcc

SEQ ID NO: 15983 - DNA, 438 bp, Glycine max
ccgaacggctttatccttctgctcctggcaggactgacccgggctggaactctcaccgggcaggatgtggctacttattacgcctatactgaaacccaagggcatgagatcgtaattcctccggtaattcctatttcacattttcaagaaataaggaggcaaaaatgttcatatatgaattggaattatttgttttcttattaggcctatcctgaagccaaaggaaatgagatcggaattactcggggaattccaatttcacattttcaagaaataaggaggcaaaaatgttcatatatgaattggaattatttgttctcttattaggcctatcctgaagccaaaggaaatgaaaacggaattcctaggggaattccaattccacattttcaagaaataaagaagcttaaatgatcgtatatgaaatggcattatttt

SEQ ID NO: 15984 - DNA, 391 bp, Glycine max
atcgagaaagagaagaagcatatatatcaaaatggctgcagagatggagagggagtcattgataactgaagctcctaatgcaccagttactgcacagagaagggtcagaaatgacttagaaaattctctaccaaaaccatacttgccaagagcattgaaagctcctgatacgggtcacccaaatggaacagcaggccacaggcaccacaacttatctgttcttcagcagcattgtgctttttttgatcaagatgacaatggaatcatttacccttgggaaacttacatggggctgcgttctattggatttaatgttgttgcatctgttattatggctattgttatcaatgttggattgagttaccccactctacctaattggttcccttct

SEQ ID NO: 15985 - DNA, 422 bp, Glycine max
cactttccttagttcaatatggggaagcccttcttcactctgtctctttcttccctttgcttgctactcttgtcgagtgcatgctttgctattacctccagcaagttcaacgagtgccaactcaacaacctcaacgcgttggaacccgaccaccgcgttgagtccgaaggtggtcttattgaaacatggaactctcaacaccctgagctgcaatgcgccggtgtcactgtttccaaacgcaccctcaaccgcaacggcctccacttgccatcttactcaccttatccccaaatgatcattgtcgttcaagggaagggagcaattggatttgcatttccgggatgtcctgagacgtttgagaagccacaacagcaatcaagcagaagaggctcaaggtcgcagcagcaactacaagacagtca

SEQ ID NO: 15986 - DNA, 422 bp, Glycine max
gcgctgcttcactattctccctatggagtttaatcttgtggtccgtcaaaagtttttaaattttgtgaggttcattatgaagaaaagggacaagcttagttgtcaagttggaatcaacccatactccatggaatggactggtttggccaatagattactgagtaagggcaatgatattctgtgttgcgattatgctagttttgatggtttgattaccaagcaagttatgagcaagatggcagaaatgataaacagtctttgtggtggtgatgaaaaattgatgcgtgaaaggacgcacctgctgttggcttgttgttcaaggatggcaatttgtaagaaagatgtttggagagttgaatgtggaatcccttctggatttccgctcacagttatttgcaatagcatttttaatgagatgctca

SEQ ID NO: 15987 - DNA, 422 bp, Glycine max
ctcgagccgaatcggctcgagcttaagcttgctactgagttgccacactgcataccttaggtcttccgaattcgaagttaatttgcaagatggctaaggaaaaggctcagatcaacattgtggtggttggtcatgtggaccctgaggaggcaaccaccattaacgagctgaagaagcctgttgtggagaaagaagctccagggcatgccatatgagggcatgcacgtacggcctctgaggggaaccagaaaattatgttaacaaaataatctggaaccctaatgtatcagtgtcatcatcagagtgtagtttaagctagctttgctatggttacgttctttgagatgagagtcttgatgaacagtgccattcttatgtattgctttccttgaaagttaatgcatgcttcttatcttcaggct

SEQ ID NO: 15988 - DNA, 409 bp, Glycine max
ggaagagtgcgaaagaaagatcgttctcgatgacagaggggaacggtgacaaaactctgcgaaagatcgcagacgcattcaatgaccttgcaaacgttttcaccgattctcagagcgcagaagcagaggtcaaggttgctcccttctctcatgcctgctctctcgtctcccctctcttcggttgcttgggcgtcgccttcaagttcgccgaaatggattacgtcgccaaggttcatgatctggcaaaggcgttcaagtctattcagaatctgcagtctctgattgagctggatgtgcaagctaacactgttaggaaaggaagtagccatacgcggaatctgctcagagtgaaacgcggacttgacatggtcagagtgctccttgagcagattctagttacagagtatgt

SEQ ID NO: 15989 - DNA, 387 bp, Glycine max
gttgaattgaatcaggttgtctatgctaaaacagacataactgctggggtcaaaaaggctttactgcattcaatcattgaaaagggaatggcctggaattcaatactgcccaaaaatggattaacttggaatgcgaggaagtgatacgtgtgagcttgtctttgagaattgctttgttccagacgaaaatattcttgggaaagaagggaaaggagtctatgtcatgatgtctgggctggatctggagagacttgttttggcagctggtcctcttggtattatgcaagcatgtcttgatgtcgtccttccttatgttcgacaacgagagcagtttggtcgtcctattggggagtttcagtttatacaggggaaaattgctgacatgta

SEQ ID NO: 15990 - DNA, 410 bp, Glycine max
caaaagtgttccacttgagtgaaaagtagtgtgttaagaactaaacaatttttcaatggcgtccaagaaacaagaggagcgagctgaggcagctgcgaaagttgctgccaaagaactcgaacaagtcaacagagaaagaagagaccgtgatttcggtgttgttgctgaacaacaacaacaacatcatcaggaagatcaacaaaaacgtggtgtaatctggtccatgtttaaggcggtgcaagacacctactagatcgccaaggaagctgtcgttgtcaagaaagaagctactaataacgcgtacagtaatacagaggttattcacgatgttaacattcagcccgacgacgtgtcgactacgggggaagtaagggacatatcatccacatagactgatgatatctacgatt

SEQ ID NO: 15991 - DNA, 205 bp, Glycine max
aagaaatgaagagtactatcttctttgctctctttctagtctgtgccttcaccatctgatacctgccttcagccaccgctcagttcgtgctcgacactgatgatgatcctcttcaaaacggtggcacatactatatgttgccagttatgagaggaaggggcggtggaataaaagtagattcatctggaagagaaatatgccctct

SEQ ID NO: 15992 - DNA, 284 bp, Glycine max
tggaaatgcaagaagcttatcttgtcaatctcgtaaatgtgttacgagaactgtatttgcacagtccagaggaagctcgccaactgagaaggaaagctctctctcgtattgaatggctgcaaaaagctgatgtgcctaccatagcacagattgaagagttccattcgatgcagagaatgatgaatgctcctgattcaaatgataatattgatctactgttgaacattgattttgtggtttacaaggagcaggtaaaagcttttccaaataagatcgttttgatg

SEQ ID NO: 15993 - DNA, 377 bp, Glycine max
tggaaatgcttgaagcttatcttgtcaatctcgtaaatgtgttacgagaactgtatttgcacagtccagaggaagctcgccaactgagaaggaaagctctctctcgtattgaatggctgcaaaaagctgatgtgcctaccatagcacagattgaagagttccattcgatgcagagaatgatgaatgctcctgattcaaatgataatattgatctactgttgagcattgatttgttgggtttacaaggagcaggtaaagcttttccaaataagattgtttttgatgataagctcgtgttggctaacacacaggaattctttgatggaaattttccagtggattcttggttaccaatttttgtgaatggtctttatcct

SEQ ID NO: 15994 - DNA, 232 bp, Glycine max
gcaatggtgagagagtgtttgatggagagctgcaagagggaggggtgctgatcgttccacaaaactttgcggtggctgcaaaatcccagagcgataactttgagtatgtgtcattcaagaccaatgatagaccctcgatcggaaaccttgcaggggcaaactcattgttgaacgcattgccaaaggaagtgattcagcacacttttaacctaagaagccagcaggccagcca

SEQ ID NO: 15995 - DNA, 392 bp, Glycine max
atcaacatcactgctagcagtgatagtagaaacaccatcctgactattaaaatatccttcttaatttctggcttgaaatctgcagccatggttccctggtggctttgttttgttccaaggattgtatctttaggaatagaagctgaattatccgagggaagatattcattgtgtcctaatgttgagaccatcaaaatcatcctgggacaataattgtagttaaagtttgcttcccaatttcaataaattaagcttttaccattctatttcaagcaatcctatgtccatcttataataagattgtggttttaaatcacggttttttagatttatttgaggttaaaattttctgatttatataaccaaaagcttgaagcatgcttggcaatctg

SEQ ID NO: 15996 - DNA, 383 bp, Glycine max
agacaacaagaagtttacatttgcagggaaggacaacattgtgagttctctggacaacgttgctaaggagcttgcctttaactatccttctgagatggtgaacggagtattcgaccgaaaggagagtttctttttcccttttgagttgccgagagaggagcgtggtcgtcgcgctgatgcgtgagaggtttagaacaatcaagaaaaggtgtgcatgtggctgaagatcacggggaatgtattaagcttcagagactctttaaattaaattttctgtattttgtgttatatgttactagttctttaaattagccagatggagtttatgtgtatctaaatgcagggatgctaatggaataaaatggccacttgtattgttagct

SEQ ID NO: 15997 - DNA, 389 bp, Glycine max
caacacccatgccgctgttgccgcaacaagaacgcttatatcatgggtggccatactcggtcttgcttcaatattcctctatgccaatatgcttagacttttgggcaaggaaccaccgaacttgttggggttggaagtgagtgaaaaaacaacaacgagaatagcacacacagttcgagcatggattgaagaaggaataaggtggttgttccttgtgggcgcagagaaagagtggcccgtgtttgtgggggctgtggctggattgttatcactatcttatttaggaagttgcatggacctcctaacactagtttatatgggtacgttagtgggaatggcagttccattaacttatgtgaagaacgaggacaagattaaaaggtttgtgg

SEQ ID NO: 15998 - DNA, 348 bp, Glycine max
aacaaactgttgagggatacattgactcaaaccggagaaagtttagtagatgcttcccttatttatgcggacacacactctgctctcttggagctctttcaccaccccacattctatggactaaagtataataccagaacatgttgtgggtatggaggcggtgtctacaactttaaccctaaaattttgtgcggccatatgctagcaagtgcttgtgatgaaccccagaactatgtgagctgggatggcatccatttcacagaagcagcatacaagattgttgcacatgccattctaaatggttctcttttttatcctcctttccctcttcataaacactgtgatctc

SEQ ID NO: 15999 - DNA, 263 bp, Glycine max
aaaaaaaaatcattctaccaaaaacaccaacacactaacaggaagaaaatcaaaaacaagaaataatcaacaaaacaataagcaacaagcacaaagcaaaaccaaactgaaagaaacaaactaccaatcaacaacaactgaataaacaacaaaaagaaaaaccacacaaaaaaaaaaaggggggcccccccgccatcggctcttacacccccagaaaaattttcgcaccatcctttctgggctaacacaattttccttaaaag

SEQ ID NO: 16000 - DNA, 345 bp, Glycine max
tgacaaatttgcttgctactgtcttgatcttcctaattgtgatatacttccaaggtttccgcgtggtcttgcctgtaagatcaaagaatgctcgtggacagcagggttcatatccaatcaaattgttttatacctccaacatgcccatcattcttcagtctgcccttgtttccaatctctacttcatctcccagctgctccaccgtaagtacagcggaaacttcttcgtagatctattgggaaaatggaaggaatctgaatatggaggtggtcagtctgttcctgttggtggcattgcatactatatcactgcaccatccagcttagctgatatggcagccaatc

SEQ ID NO: 16001 - DNA, 438 bp, Glycine max
  modified_base (114)..(114): a, c, g, t, unknown, or other
tcgagcccttaaagcttgattcttactagagttccgaatcctcgacgtaagcgtgaaaaacactacgaattggtgtcttattcatattctagaaaaaccaatttttgaggaatncgatgaatagttcattcgccggccctactcttcacttatcgacgactggcggttgtaggcccggcggtggtggtggcggcggcagcagcaaccgccactgtttccattgacgattttcatctcccgtgtgatcccatctcgtcgcaagagcgtaaagacgaggccatgctagttttaaaatcagatctcatggctgcactcaacaaggaggttaaatcattggttgaagataactggaagtttgaagggccacgttcgcggatccacctcgtatcacatcgaggtggtggtcatctctataggcccacagaaatttcaaagaat

SEQ ID NO: 16002 - DNA, 343 bp, Glycine max
atgggaactatttttcctcctcactctctctctccactcctcaacatcaaaccttcaccctcaagaattctcttggctccctctccgcaacccaagtcaaattctctcttttgctcgaaacccattgtttctagtctcagaaagaaccaaactttatctcctaaaccttcatcaggcacaagctggttggctcatgctcaacaaggcctagcagctttggctatctccttggcactcaactttagcccagttttgttcaatggcaatgcactggcatctgagtttgatgtacttaacgagggtccacccaaagattcttatgtgtttgatgatgcaagagtgc

SEQ ID NO: 16003 - DNA, 336 bp, Glycine max
  modified_base (58)..(58): a, c, g, t, unknown, or other
  modified_base (268)..(268): a, c, g, t, unknown, or other
  modified_base (285)..(285): a, c, g, t, unknown, or other
cagaacagggactcactctcttcgcagcggcactctcggtggctttcatcttctcggngtgagttgtcaagatgtacacatcgaggaagaaaattcacaaggataaggatgctgagccaactgaatttgaggaatcagttggacaggcattgtttgatctagaaaataccaacaatgagctgaaaagtgatctgaaagatttatacataaactcagctgtccaaaatgatgtttctggcaaccgaaaggctgtggttatccatgtccnctacagactaaggaacngggattccgaagattcatgtcaagcttgtgagagaactttgagaaaagttt

SEQ ID NO: 16004 - DNA, 400 bp, Glycine max
taagaaatgaagagtactatcttctttgctctctttctagtttgtgccttcaccatctcatacctgccttcagccaccgctcagttcgtgctcgacactgatgatgatcctcttcaaaacggtggcacatactatatgttgccagttatgagaggaaagggcggtggaatagaagtagattcaactggaaaagaaatatgccctctcactgttgtgcaatcacccaatgagctcgataaggggattggactagtctttacatctccattacatgccctttttatcgccgaaggctatcctttgagcattaagtttggttcatttgcagttataacgctgtgtgccggcatgcctactgagtgggctattgtggagagagagggtctacaagctgttaaac

SEQ ID NO: 16005 - DNA, 408 bp, Glycine max
tgcgatctgttgagtactatcttctttgctctctttctagggtgtgccttcaccatctcatacctgccttcagccaccgctcagttcgagctcgacactgatgatgatcctattcaaaacggtggctcatactatctgttgccagttctgagaggaaagggcggaggaatagaagtcgattcaactgggaacgaaatgtgccctatcactgctgagcaatcacccactgagctcgatcaggggattggactaggctctacatgtacattacatgccctttttatcgtcgtaggctatactctgagcattaagtccgagtcattagcagctataacgctgagtgcccgcatgcgctactgagtgtgctattgtggacagagagggtctacaagctgataaacttgctgg

SEQ ID NO: 16006 - DNA, 413 bp, Glycine max
gagtttttcttctgtttttttttttttttttttctgtctatgatgcatttgactgaactctgattcttttttctttttacatcaactcttggcttcttagtgtgtcacagtgacttcagtcctttctactaagggtgtgtttgacttaagagcaagcctaaattggaaaaggggattttttttttctttcattttggccattcatctctctctggggacattttgttctctctgcaactatggaaaagctaggtttaactgaatctccattccccaagctctcttcagatgagattctggaattggaaagaatatacgaagacatgggaggaaaagtgctaaatcggaagtcatgcctggagattgctaaacgttttagttcctcatcaaatggtgcttgtaaaacttcctta

SEQ ID NO: 16007 - DNA, 408 bp, Glycine max
gagagagcgagcagtttcagacacagagagaggggtttgggattggagggattgacgctgcgtctcttcctcttctctttcgatccatccctcattcctaatcctccaatccaaccacctcagcctcacactcacatatacacatatctgaacgcgtatcgtccctcctatggcttcaaagcgcatcctcaaggatctcaaggacttgcagaaagacccaccaacttcttgcagcgctggtccagtagctgatgacatgttccattggcaagcatcaataatgggtcctgctgatagtccttatgctggacgtgtattcctagtcactattcacttccatacggattatcctttcaagccttctaaggttgcctttaggactaacgtgtttcacccgaacatcaatag

SEQ ID NO: 16008 - DNA, 408 bp, Glycine max
cactcactcacactctcttctgtcatagctgtaccacgtttgtcttctccatctcagcctctgtcccaacaccattctcatggctgctctagctctagcactgcttcttctggctttcactggcacttcaagtgctacatggtgcgtttgcaaggatggaagcgacgcgatcctgcagaaaaccttggactatgcttgtggagctggtgctgactgtaatcctctccaccaaaacgggccttgtttccagcccaacaccgttagggcccactgtaactacgccgtgaacagctacttccaaaggaagggtcaagctcaagggtcctgcgactttgcgggaacagccattgttactgcatctgaccccagctctggcggtacttgtgtctacccttctagtgtcagcgc

SEQ ID NO: 16009 - DNA, 400 bp, Glycine max
aacattctgttgacggatacattgactcaaaccggggaaggtttactagatgcttaccttatttatgcggacacacactctgctctcttggagctctttcaccaccccacattctatggactaaagtataataccagaacatgttgtggctatggaggcggtgtctacaactttaaccctaaaattttgtgcggtcatatgctagcaagtgcttgtgatgaaccccagaactatgtgagctgggatggcatccatttcacagaagcagcaaacaagattgttgcacatgccattctaaatggctctcttttttatcctcctttccctcttcataaacactgtgatctccaacctattggttgatccagtgcttgcagctaggggtctttcgtatttaccg

SEQ ID NO: 16010 - DNA, 405 bp, Glycine max
  modified_base (272)..(272): a, c, g, t, unknown, or other
ctgccagcgtggcagagagagaaactagagagagagagagagcgaacacaccgttcatttctccttcgtcgtcgtcgtcgtttcgccgtcgcattttccggcgaggtttctctgttttgtttaaccgaaatggaggatccgtacgttctcggttggattctgtgctccgtcctgagcctcttggcgctctacagcctggccttcggcggagcgggccgtcgccgcgcttcgccggagaagaggaacgagttatcggagaccgtgacgacctncgccggagaatgcagatcggagaaacgaaacggcgacgctgacgtcatcattgtcggagccggcgtcgccggcgcctgcctgtcgcacactctcggaaaggatgggcgtcgagtacacgtcattgaaagagac

SEQ ID NO: 16011 - DNA, 346 bp, Glycine max
  modified_base (307)..(307): a, c, g, t, unknown, or other
  modified_base (309)..(309): a, c, g, t, unknown, or other
gaagatccctagctcgtaacatgcaaacaccagtgccaacagcaacggcaatacactgagagtgacaagcgaacatgcttgcaacaatgtgacagtatgaagcaagagcgagagaaacaagtcgaagaggaaactcgcgagaaggaagaagaacatcaagagcagcatgaggaggaggaagaccaaaatccctacgtttttgaagaagataaggatttttcgaccagagtcgaaacagaaggtggcagcattcgggttctcaagaagttcactgagaaatccaagcttcttcaaggcattgagaatntncgtttggccatcttagaagctagagcacacacgttcg

SEQ ID NO: 16012 - DNA, 348 bp, Glycine max
gaagatccctagctcgtaacatgcaaacaccagtgccaacgagcaacggcaatacactgagagtgacaagcgaacatgcttgcaacaatgtgacagtatgaagcaagagcgagagaaacaagtcgaagaggaaactcgcgagaaggaagaagaacatcaagagcagcatgaggaggaggaagaccaaaatccctacgtttttgaagaagataaggatttttcgaccagagtcgaaacagaaggtggcagcattcgggttctcaagaagttcactgagaaatccaagcttcttcaaggcattgagaatttccgtttggccatcttagaagctagagcacacacgttcgt

SEQ ID NO: 16013 - DNA, 376 bp, Glycine max
  modified_base (28)..(28): a, c, g, t, unknown, or other
tgataacactcgccatacccgttaacanacccggtagatgtgagagtttcttcctatctagcactcaagctcaacagtcctacttgcaagggttcagcaagaatattctagaggcctcatacgacaccaaattcgaggagataaacaaggttctgtttggtagagaggaggggcagcaacaaggggaggagaggctgcaagagagtgtgattgtggaaatctcaaagaaacaaattcgggaactgagcaaacatgccaaatctagttcaaggaaaaccatttcttctgaagataaacctttcaacttgagaagccgcgaccccatctattccaacaagcttggcaagttgtttgagaataccccagagaaaaaccc

SEQ ID NO: 16014 - DNA, 409 bp, Glycine max
gatgagaacaataagctgattctggcaatattggacaatcaaaatcttggaaaacttgcagaatgtgcccagtaccaagctcagcttcaaaagaatttgatgtatttagctgcaattgctgatgcccagcctcaaacaccagccatgcctccacagatggcaccacaccctgccatgcaaccaggattctatatgcaacatcctcaggctgcagcagcagcaatggctcagcagcagcagcaaggaatgttcccccagaaaatgccattgcaatttggcaatccacatcaaatgcaggaacaacagcagcagctacaccagcaagccatccaaggtcaaatgggactgagacctggaggaataaataatggcatgcatccaatgcacaatgagggcggcaacagcggtg

SEQ ID NO: 16015 - DNA, 423 bp, Glycine max
caaaacaaaaagtttacgttacaaatcgcataataaccgtcctaagtttattgagagaattttgcaagtgtgagaaacatggcatctcgtcaaaacaacaagcaagagcttgatgaaagagcaaggcaaggagagactgttgtcccgggtggaactggtggcaagagcctggaggctcagcaacaccttgctgaaggaaggagcaagggagggcaaacaaggaaggaacagctgggtacagaagggtaccaggaaatgggacgcaaaggagggttgagcactgtggacaaatcaggagaagaacgtgctcaagaggaaggcattggcatcgatgagtccaagttcaggactggtaataacaagaaccagaatcagaacgaagaccaagattagtgataatgtaacacccttcactaacatgtg

SEQ ID NO: 16016 - DNA, 362 bp, Glycine max
ttattccactaaatttccctcaattatttctcaccatcatgaccccctttccttctctcaagaaaaaaaaaagttaatttcttgaacccaatggcttcagagacagaggtgccggatattatttcctctgttttcgaaaggtttcaacaaaacagagacatgtctctgtttctgcccttcctcttcggcttctctgacgccaccccaggacgaaatagcgacgacccagatcacgaaactgctcccacagaagccccacaacgtcaaagaataatcttggtgaaccccttgactcagggcatggtggtgatcgacggtggttcgagcctcgaggctctgtttcgcgaattaccaacggaaaa

SEQ ID NO: 16017 - DNA, 414 bp, Glycine max
ccaaacactctagaatttgcatgcactgttcttcatacaatggcattacgcgagcttcttatgatggggatattgctgctggtatgtcttgctaaggtttcatctgatgttaacatgcaaaaggaagaagatgaagaacttcgctttcctaatcaccctcttatcgtgagagacgggaacagaaggctaatgcaagacatagattgcggaggattgtgcaagacaaggtgcagtgcccattcgaggccaaacgtgtgcaacagggcttgtggcacgtgttgtgtgaggtgcaagtgtgttcccccaggaacttcaggcaacagggagctctgtgggacctgctatactgatatgatcactcacggcaacaagaccaagtgtccgtagagcccggcccattgaaagtcagcccta

SEQ ID NO: 16018 - DNA, 334 bp, Glycine max
ctcgagccgttcgagccgattcggctcgagccgacagccgtgggctgcggtgaccaccacttgggaatgggatgggtttccagcacgtgcaaggggaccattgctgattgcctgggaggggaggagtacgagttggattcggagatcaaccggcgcatcttagccaccaacaagtacatcagctacgttgcgctgcagaggaacactgctccctgctctcgccgcggcgccttctactacaattgccgacccggagcacaggccaatccttacagccgtggctgcagcgccattacgaggtgcaggagctgaattttccctttttttaaaattt

SEQ ID NO: 16019 - DNA, 398 bp, Glycine max
cttgaactcgtttatatactatggcaaatgacgtggttctgcgagagttctgtccaaatccattctggatgaaggtcaggattgcacttgctgaaaagggtatcaaatatgagtccaaagaagaggacttgcagaacaagagccctttgctcctcaaaatgaacccggttcacaagaaaattccagttctcatccacaatggcaaacccatctgttaatctctcgttgctgttcagtacattgaagaggtctggaatgacataaatcccttgttgccttctgacccttaccagagagctcaagctagattcttggctgactttgttgacaataagatattttatcttggaagaaagatttggacatcaaatggagaagacaaaaaatctgcccaaaaa

SEQ ID NO: 16020 - DNA, 382 bp, Glycine max
  modified_base (284)..(284): a, c, g, t, unknown, or other
agccccccaaaaatgaagagcaccatcttctttgctctcgttctcttttgtgccttcaccacctcatacctaccttcagccatcgctgatttcgtgctcgataatgaaggtaaccctcttgaaaatggtggcacatattatatcttgtcagacataacagcatttggtggaataagagcagccccaacgggaaatgaaagatgccctctcactgtggtgcaatctcgcaatgagctcgacaaagggattggaacaatcatctcgtccccatatcgaatccgttntatcgccgaaggccatcctttgagccttaagttcgattcatttgcagttataatgctgtgtgttggaatcctaccgagtggtctgttgtggaggatct

SEQ ID NO: 16021 - DNA, 329 bp, Glycine max
cccatactccatggaatggagtatgggttgattccaacttgacaactaagcttgtcccttttcttcataatgaacccatactccatggaatggactggtttggccaatagattactgagtaagggcaacgatattctgtgttgcgattatgctagttttgatggtttgattaccaagcaagttatgagcaaaatggcagaaatgataaacagtctttgtggtggtgatgcaaaattgatgcgtgaaaggacacacctgctgttggcttgttgttcaaggatggcaatttgtaagaaagatgtttggagagttgaatgtggaatcccttc

SEQ ID NO: 16022 - DNA, 337 bp, Glycine max
  modified_base (228)..(228): a, c, g, t, unknown, or other
  modified_base (261)..(261): a, c, g, t, unknown, or other
ctcgagccgaaatgaccaagttcacaatcctcctcatctgtcttctcttctgcatcgcccacacttgcagcgcctccaaatggcagcaccagcaagatagctgccgcaagcagctccagggggtgaacctcacgccctgcgagaagcacatcatggagaagatccaaggccgcggcgatgacgatgatgatgatgacgacgacaatcacattctcaggaccatgcggngaagaatcaactacataaggaggaacgaagganaagacgaagacgaagaagaagaaagacacatgcagaagtgctgcacagaaatgagcgagctgagaagccccaaatg

SEQ ID NO: 16023 - DNA, 330 bp, Glycine max
ctcgttcctagaagaccaagttcacaatcctcctcatgtctcttctcttctgcatcgcccacacttgcagcgcctccaaatggcagcaccagcaagatagctgccgcaagcagctccagggggtgaacctcacgccctgcgagaagcacatcatggagaagatccaaggccgcggcgatgacgatgatgatgatgacgacgacaatcacattctcaggaccatgcggggaagaatcaactacataaggaggaacgaaggaaaagacgaagacgaagaagaagaaggacacatgcagaagtgctgcacagaaatgagcgagctgagaagcc

SEQ ID NO: 16024 - DNA, 283 bp, Glycine max
cagcctattacgccccttccttctacaacaaacacacactccctctcgagccgtgttatcttctcgagatgcaacacttgcaacgcctacaaacggcactaccagcaccatacctagagtaagcacctccatcgatagaacctgacgccctgctacaagcacatcatggataatatccaatgccagtcatgatcacaaatgatcataatgactaccacaaccacattctcatgaccatgcactgaagaatcaactacctcacgagcaactaacgaaaagacca

SEQ ID NO: 16025 - DNA, 373 bp, Glycine max
gaagtttttaaattttgtgaggttcattatgaagaaaagggacaagcttagttgtcaagttggaatcaacccatattctatggaatggactggtttggccaatagattactgagtaagggcaacgatattctgtgttgcgattatgctagttttgatggtttgattaccaagcaagttatgagcaagatggcagaaatgatcaacagtctttgtggtggtgatgaaaaactgatgcgtgaaaggacacacctgctgttggcttgttgttcaaggatggcaatttgtaagaaagatgtttggagagttgaatgtggaatcccttctggatttccgctcacagttatttgcaatagcatttttaatgagatgctc

SEQ ID NO: 16026 - DNA, 410 bp, Glycine max
acacatggcataaagcaagctcatcctagagttttaaaaatggcagcagcctcctccatggctctctcttccccatccttggctggcaaggccgtgaagctgggcccatcagcccccgaagtcgggagggtcagcatgaggaagaccgtcaccaagcaggcctcctccggaagcccatggtacggcccagaccgcgtcaagtacttgggcccattctctggcgagcccccgtcctacctcactggcgagttcccaggtgactacggctgggacactgctgggctttcggccgacccagaaaccttcgccagaaaccgtgagctcgaagtgatccactccaggtgggccatgctcggggccttgggctgcgtcttccccgaactggtgtcccgcaacggggtcaagtttgg

SEQ ID NO: 16027 - DNA, 420 bp, Glycine max
acctaaccctcacgaaagcccttttcgattccgataactctcgttgttccgaaaccctaaccctaaccgggttttttcgtttgtttggattgaattggcatcggagggaggcgatcgattggaaattggtagtagtagtttagcgttgaagaacgatgtctgctgctgtgtgcggaagcaagagatctttcttcgaagagcttcctccttctccgccactctccaagaggctccgttgttcctcttcgccgattcgattccctcctccttcttccatcgaccaacttcgccctctctttccccacatggacgacttggttcttgagagagctctccaagaatgtggcaatgatatagatgctgccatcaagaggttgaatgagctttgcttgggaactgccgatggaaatggaattgctg

SEQ ID NO: 16028 - DNA, 298 bp, Glycine max
gcgagaacacttttgattttagatcctagcacgcagagcttgggtcggttttctattgaccttgttggtggatgaattttagtggacagaactggagattggatcacacttatacaaaattctccagttagtaacttgttgatgagttgctgcttggaagaaaggctgcttaatggctaagattgcgacgtctgagaatgcaacaagcacaaggagtgattgggcctcattggtacaagggactctaacaaacagcaacaatgcatagcattttgatgcatgtcagtggactaaatcg

SEQ ID NO: 16029 - DNA, 423 bp, Glycine max
aaagcatataagagatggggttagaagggaaggaaacgccgtcgtttatgagggattttctcgataagtgtggtggctgcgccgttattgacggtggttttgccactgaacttgaaaggcatggggcggacctcaatgacgaactctggagtgccaaatgccttattagctccccacatcttgtccgaagggttcacctagattacctcgatgcaggagcaaacataatattaacagcatcttatcaggccactattcaaggttttgaggccaaagggttctctagagaagaaggtgaaactatgcttagaagaagtgtggagattgcacgtgaggcacgagaaatttattatgataggtgcaccaaagattcttctgactttatgagagatgaaagatataggaaacgtcccattttaattg

SEQ ID NO: 16030 - DNA, 328 bp, Glycine max
gaagagggctcgcgggttacttgagcggcaagaaagaggaaactaaagagatggctacggagaccgccgaggcgacagctaataaggcaggtgagatgaaagaggcaacaaagaacaagactgcggagaccgcagaggcagccaataataaggctggccagatcaaggacagagccgctgagacggccgacgccgcaagtgcaatgaccggagagaccgcggatgtggttcagactcatatgcatgatagcattatgattgccaaagataaagaagatgctcttgctactaagaatcttgttcctggtgaagctgcttacaacgagaa

SEQ ID NO: 16031 - DNA, 365 bp, Glycine max
ctcgagcctcgttcgtacacacaccctgcaccttcattgagttgagttcaaaactctgttctttcctccatgaattcaatgtctttaggttccttcatcctcacaccatgcaagttccgcccttttcttcaaaccaaacaccaacccatattccacacactctccccaattcccctgacacaaaaacccacttttcttcgagccacagactcgaacatcgacgcccccatttccctccccgagggcgcgtccttcgtttccatcccagaaatcatcgagaaggactggtccgtgcttgattgcgccgaacaccgaaccactgaccgcattatagcttccggaaacatcgaacagagttcgagggt

SEQ ID NO: 16032 - DNA, 106 bp, Glycine max
ccgactagcgagcgcgtttacctgaaaacaaataccaacttgcttagcgagagggttacttaaaaacccgatcattacaaaggtctactatataaccgtttttcat

SEQ ID NO: 16033 - DNA, 378 bp, Glycine max
gaaaaaagttacctgtttgcgatctcattacaatctccccagtttctaatctcagctaagaaaaaccaaaagatgtctctgattccaggtttcttcggtgcccgaaggagcaacgtcttcgatccattctcactcgacatttgggatcccttcaaggattttcatgttcccacttcttctgtttctgctgaaaattctgcattcgtgagcactcgtgtggattggaaggaaaccccagaggcacacgtgttcaaggctgatattccagggctgaagaaagaggaagtcaaggttcagattgaagatgatagggttcttcagattagcggagagaggaacgttgagaaagaagacaagaacgacacgtggcatcgcgtg

SEQ ID NO: 16034 - DNA, 395 bp, Glycine max
ctgaatcgaacacacgtgagtatgtctgatcacgaagaccatgcagactacgcagacaatgaatcctttgcaaagcgtaggttcagggataggtccaaggaggcattgtccaaacaagccgttaagttagccaaacaagctgaagagcatgaaaggttcatcaacaaggtgactcatcttttgggggttcttggctttggttggttttgcttcatctttggggcaaggccacaagccgttcccttggtatattgtttgttctatgtggtatttgttcctctccgttggatatattacaggttcaagaaatggcattactatctcctggatttttgctattatgccaatacaatcttcttggtttacctccttttctacccaagcaatgaaaagct

SEQ ID NO: 16035 - DNA, 77 bp, Glycine max
atgctttggttgtacgaaatcattacactaaataaaataatcaaagcttagatatgccttccgctaaagccgaatgc

SEQ ID NO: 16036 - DNA, 386 bp, Glycine max
actaactaagaaagtcttccatagccccccaaaaatgaagagcaccatcttctttgctctctttctcttttgtgccttcaccacctcatacctaccttcagccatcgctgatttcgtgctcgataatgaaggtaaccctcttgaaaatggtggcacatattatatcttgtcagacataacagcatttggtggaataagagcagccccaacgggaaatgaaagatgccctctcactgtggtgcaatctcgcaatgagctcgacaaagggattggaacaatcatctcgtccccatatcgaatccgttttatcgccgaaggccatcctttgagccttaagttcgattcatttgcagttataatgctgtgtgttggaattctaccgagtg

SEQ ID NO: 16037 - DNA, 300 bp, Glycine max
acaaacatttatttcctacatagcctcccaaaaatgaagagcgccatcttgtttgctctcgtatctcttttgtgccttcaccatctcatacctaccttcagccatcgctgatttcgtgctcgattatgaatgtaaccctcttgaaaatggtggcacatattatatcttgtcagacataacatcatttggtggaataagagcagccccaacgggaaatgaaagatgccctcttactgtggtgcaatctcgcaatgagctcgacaaagggattggaacaatcatcttgtccacatatcgaat

SEQ ID NO: 16038 - DNA, 352 bp, Glycine max
gaaagctgttaacctatttcccaacaaaacattggctaagcagttgtttctagttgatgcatttaggaaaaatccagtttccgatttgcttgattgaggcatattcagtattctgcaagggttgtcaatactacatttttacatgctactgttattattatgtagatatatgagttatagttctttgaggtcttattgagtctatcctgaagccatgcgaaatgagatcggaattcctcgcggaattccaatatcacattttcaagaaataatgtggctaagatgttcatatatgaattggaattatttgttttcttattaggcctatcctgaagccaaaggatatgagatc

SEQ ID NO: 16039 - DNA, 406 bp, Glycine max
gaatgttgctgttaaggatctcaagcgtggttatgttgcctcgaactcaaaggatgatcctgccaaggaggctgctaacttcactgcccaggttatcatcatgaaccatcctggtcagattggaaatggctatgcccctgttcttgactgccacacttcccacattgctgtcaagtttgctgaactcatgaccaagattgacaggcgatctggcaaagagcttgagaaggaacccaagtttttgaagaatggtgatgctggttttgttaagatgattccgaccaaacccatggtggttgaaactttctctgagtaccccccacttggtcgctatgctgtcagggatatgcgtcaaactgttgctgtgggagtcatcaagaacgtggagaagaaggatcctactgga

SEQ ID NO: 16040 - DNA, 342 bp, Glycine max
cgctgcaattggcaacggagctgggcgtatttgacgtgttgcaagaagcgggggctaagctctctgcgaaagagatagcatccaagctttcctgcgacaacaaccctgaagcagactcaatgctggatcgtcttctagcccttctagcctctcacttcattcttaactggtctctcattctcgaccaccaaaacctggggacctttcagaggctctacaccatcactcccgtcgccagattctttgctcgcaattctgatggggtgtccttgggacccttgatggccttgcttcaagacaagatctttctacatagctggtcggagctgaaagattcaattc

SEQ ID NO: 16041 - DNA, 367 bp, Glycine max
aagcagatgtctaatggtaggtttgtggctcctgaggacaaggcgagtttatggtcacaacttcattatgtttcgtgtaataatctggaaatgcaagaagcttatcttgtcaatctcgtaaatgtgttacgagaattgtatttgcacagtccaaaagaagctcgccaattgaaaaggaaagctctctctcgtattgaatggctgcaaaaagctgatgtgcctaccataacacagattgaagagtttcattcgatgcagaggatgatgaatgctcctgattcaaatgataatattgatctactgttgagcattgatttggtgggtttacaaggagcaagtaaaagctttttcaaaccaggattgtttt

SEQ ID NO: 16042 - DNA, 338 bp, Glycine max
cttttactttgtttaaaagtaaaagagcatataataggtagggccatcagactacggcggtccactggctgatgcttcgctgtcaggtccagagagcacgctcagctaaacgagtgccacatccaggggctcaatgccctcacaccggatgaccgcatagagacagacggagggctccttctgacagggcaccctaagcccacgccattgcagcgtgccagcgtcgccctctctcgctgcaccctcaatcgggacgcccttcatagaccttactacaacaactggccccaggcaatctacatgctacacggtaagggaattagtggcgcgatataccc

SEQ ID NO: 16043 - DNA, 356 bp, Glycine max
  modified_base (309)..(309): a, c, g, t, unknown, or other
  modified_base (338)..(338): a, c, g, t, unknown, or other
gttgtggatggagctacatgtcaaaaacagggagaagcgtctcacatcccttcgtcaacacctctccgactcttctcgttctctccatggcttcgtcctccttcaaggtggcgaggagcaaacgcgttacgacaccgatcacttggagctcttcaggcaagagagttacttcgcttacttgtttggagtcatagagcctggattctatgcagctattgacgttgcaactgggaattctatcctatttgctcctaggttaccttctgagtatgctgtttggttgggggagattaagccactctcctactntaaggaacactacatggttaccacgtgtngcttctcagatgaaaatg

SEQ ID NO: 16044 - DNA, 390 bp, Glycine max
  modified_base (357)..(357): a, c, g, t, unknown, or other
attttctcaagagaaactttaagcagatgtctaatgttttgtgggtggctcctgaggacaaggcgagtttatggtcacaacttcattatgtttcgtgtaataatctggaaatgcaagaagcttatcttgtcaatctcgtaaatgtgttacgagaattgtatttgcacagtccagaggaagctcgccaattgagaaggaaagctctctctcgtattgaatggctgcaaaaagctgatgtgcctaccatagcacagattgaagagtttcattcgatgcagaggatgatgaatgctcctgattcaaatgataatattgatctactgttgagcattgatttgttgggtttacaaggagcangtaaagcttttcaaacaagattgtttttgatga

SEQ ID NO: 16045 - DNA, 365 bp, Glycine max
  modified_base (313)..(313): a, c, g, t, unknown, or other
aaaaaccgccacacctttccgccatggcgctgccatggccggtttttaacaacactgattattatcattggtacctccaatgttgtaatttagcaactcaccactaagctgcattccaatttttctcttaaacaattgggtaaacttgactattttcttggtattgaaatcaaattggtggctgatgggactattctactgactcaaagcaaatatatcagagatttgctttagaaaaccaaaattgtagaagcacaacctatttctttccctatgactgctaattacaagttgaccaaagttggctcgaatntattcagtgattcatctctctataggtctgttgttggtgctcttcaatacac

SEQ ID NO: 16046 - DNA, 414 bp, Glycine max
tagtgcgtccccttcggaagacaatatgcggtatttcaatgtgatgatccttggcccaactcagtcgccttatgaagggggagttttcaagttggaattatttttgccagaagaatatccaatggctgctccaaaggttaggtttctgacaaaaatatatcatccaaacattgataagcttggcaggatatgtcttgacattctgaaagataagtggagtcctgcccttcagattcgcactgtacttttgagtattcaagctcttctaagtgcaccaaacccagatgatccgctttctgagaacattgccaagcattggaaatctaatgaggccgaggcagttgaaacggccaaggaatgggacccgttatatgctagcggcgcttgatgctttggtggaaacttttggctttc

SEQ ID NO: 16047 - DNA, 381 bp, Glycine max
cacagcgtatcctctgctctcgaagatggctcctcccagaggtggtggtgggttcaggggtggtaggggtgacagaggtagaggaaggggtggcggtggaggaagaggaggagacaggggtacgccgttcaaagctagaggcggtggccgtggtggccgcggaggaggcaggggtggtggccgtggcggcggcagaggtggaatgaagggaggtagcaaggttgtggttcagccccataggcatgatggcattttcattgccaagggtaaagaagatgctcttgttactaagaatcttgttcctggtgaagctgtttacaacgagaaaaggattaccgttcagaacgaagacagttccaaagatgagtacagagtttggaa

SEQ ID NO: 16048 - DNA, 317 bp, Glycine max
cgaatacacacgcacgcaaactctagattcggctctagatggataccatttccctgtctcactcactatctccactcctgagcagggaaccttcaccctcatgaatgctctcgtcttcctcctctcatcccacctcaaatactgtcatctgctctaaacccatcatttctagtctcaaaaagaaccaaacaatatctcctaaaccttcatcaagcacaagctattatgctcatgctcaacaaggcctaccagctttcactatctcctagacactcaaccctagcccaattctgatcaatgacaatgcactggcaatc

SEQ ID NO: 16049 - DNA, 402 bp, Glycine max
agtttctgtctcatttggcattgcgtattgggaaaagcagaaccccagtcacaacaagtgcctccgaagttgcaatagcgagaaagactcctacaggaaccaagcatgccacgctcgttgcaacctccttaaggtggaggaagaagaagaatgcgaagaaggtcaaattccacgaccacgactacaacacccggagagggaacgtcagcaacacggtgagaaggaggaagacgaaggtgagcagccacgtccattcccattcccacgcccacgccaacctcatcaagaggaagagcacgagcagaaggaggaacacgaatggcatcgcaaggaggaaaaacacggaggaaagggaagtgaagaggaacaagatgaacgtgaacacccacgcccacaccaacc

SEQ ID NO: 16050 - DNA, 401 bp, Glycine max
agcggttctcggcctctgtatccgatgatgctcgagagccctgaactgcggtggtcgttcatcagaaaagtgtactccataatcgccatccagttgctcgtaaccatcgtcgtcggcgccgtcgtcgtcaccgtccgcccaatcagtgtcttcttcgccaccaccggcgccggactggctctctacatcgtcctcatttttgttccctttataacgttgtgtccactttactactattcccagaagcatcccgtcaattacttgctcctaggggttttcactgtgtctcttggatttgtcgttggattgagttgcgcctttactagcgagaaagttattctggaagctgtcatattgactgctggtgtggtggattggtctgactctatacacattttggc

SEQ ID NO: 16051 - DNA, 419 bp, Glycine max
  modified_base (47)..(47): a, c, g, t, unknown, or other
aataaagatgagtttgaagaacaacatggtggtgctaaaggtgtgtntgttgcttcttttccttgtgggggttacagctgcacgcatggaactgagcttcttcaaaagtgatcagtcatcaagttatgatgatgatgagtattcaaaaccatgctgtgatctctgcatgtgcacacgctcaatgcctcctcaatgcagctgtgaagatattaggctgaattcatgccactcagattgtaagagctgtatgtgcacacgctcacagccaggacagtgtcgttgtcttgacaccaacgacttctgctacaaaccttgcaagtccagagatgactagaaaaactaatagctctctcaaatggacgaagcccctttaggcttttgttgtatgttaggggagacaaattaaacaagaaataaaa

SEQ ID NO: 16052 - DNA, 371 bp, Glycine max
gcccgcatacctactctggaagatcccctcgagtaattccaatacctatattgtcacgacaataatgatgctaaagtgggcatatatgaatcggaagcatgtgttatcttattatgcctatcctgaaaccaaaggaaatgagatcggaattcctcgcagaattccaattccacattttcaagaaatcatgctgcaaacatgtccatatctcactcgcaattatttgtcatctcattaggcctatcctgaagccaaatgaaatcagatcagaattcctcagcgaattccacttacacattctcaagaaataatgacgcaaaaatgaccatatatgaattggaatcatacgttttcttattatggctatcctg

SEQ ID NO: 16053 - DNA, 234 bp, Glycine max
ctactgggattcttcaaatcaaatggcacgtatgtcactgagaaagggaagttcttcttgacctggtattctaacaaattgctgaatcatggtgatcaaatactagatgaagccaacaaagctttcctgggctgtaaagtcaaattagcaatcaaagtatctggaattcactggtggtacaaagttgaaaatcatgctgcagagcttactgctggatattacaaccttaatgat

SEQ ID NO: 16054 - DNA, 311 bp, Glycine max
aaaaatgactggagagacagtgaacccaaaagcttacccgttggccgatgcgcaactcgcaataacaatcttggatcttgtgcaacaagctgccaactacaagcaactaaaaaagggtgctaatgaagcgactaatacactgaacagaggcatttctgagttcgtagagatggccgcagacactgagcctcttgagattctttatcatcttgctctccttgctgaagataagaatgttccctatgtattcgttccatcataacaagcacttgggcgagcatgttgagtctcactgacagggaatgcatggt

SEQ ID NO: 16055 - DNA, 384 bp, Glycine max
cccatttccaaccccacattgaacctaaaaaagcaatgtcacctccaccattttccccccctctctctatttcccttctctttgtcttcctgttagcaccattactcttagctcaatctccaccttctccttctccttcttcttcttcttcttcttctgttgcctgcaaaggcacactatatccaaaactctgccgttccattctctcagccattcgttcatccccttcagacccttatggctatggcaagttctccataaaacaaagcctcaaacaggcaagaaaactagccaaagtctttgaggactttctccaacgccaccaaaaatcaccttccctcaaccatgctgagactgcatcacttggtgactgcagagacctaa

SEQ ID NO: 16056 - DNA, 358 bp, Glycine max
  modified_base (312)..(312): a, c, g, t, unknown, or other
aaaaaaaataaaaaaacaaagaacctaaaaaaagcaaagggaactacaacataaaacaaacctatatataatttacattatctatgacttgctgttagcaccattactcttagctcaatctccaccttctccttctccttcttcttcttcttcttcttctgttgcctgcaaaggcacactatatccaaaactctgccgttccattctctcagccattcgttcatccccttcagacccttatggctatggcaagttctccataaaacaaagcctcaaacaggcaagagaactagccaaagtctttgaggactntctccaacgccaccaaaaatcaccttccctcaaccatgctgagact

SEQ ID NO: 16057 - DNA, 403 bp, Glycine max
agcaaaatgtaccaagttcacaatcctcctcatctctcttgtcttctgcatcgcccacacttgcagcgcctccaaatggcagcaccagcaagatagctgccgcaagcagctccagggggtgaacctcacgccctgcgagaagcacatcatggagaagatccaaggccgcggcgatgacgatgatgatgatgacgacgacaatcacattctcaggaccatgcggggaagaatcaactacataaggaggaacgaaggaaaagacgaagacgaagaagaagaaggacacatgcagaagtgctgcacagaaatgagcgagctgagaagccccaaatgccagtgcaaagcgctgcagaagataatggagaaccagagcgaggaactggaggagaagcagaggaagaaa

SEQ ID NO: 16058 - DNA, 383 bp, Glycine max
gtccttaaacactcatcagtcatcaccatggccaagctagggttttccctttggtttctgcttttcagtggctgctggttcgctttcagttccagagagccgcctcagcaaaacgagtgccagatccaaaaactcaatgccctcaaaccggataaccgtatagagtcagaaagagggctcattgagacatggaaccctaacaacaagccatttcagtgtgccggtgttgccctctctcgctgaacctcaaccgcaacgcccttcgtagaccttactacaccaacggtccccaggaaatctacatccaacaaggtaagggtatttttggcatgatatacccgggttgacctagcacatttgaagagcctcaacaaccttaacca

SEQ ID NO: 16059 - DNA, 421 bp, Glycine max
gttgttttttacatagttaaccaggttggttggaccagtccaaccgggacccggtggcataaccgggccagtttgatttattggaccggcatgcatttggcccggttagatccggcctttttggggtaaacatggcgacccaagcctgattttaaaacccatttcgcgtaaaaaaaaaatgctccaaaaatagcctggtacttgtgtaattgtgttattgaattattatttgtggacttgtgttattaactttaatactttaattgttattttggattttggagtatgaatgaacttttcttaatcaaataatgttagttatatacttatatataatagatacatatataattttaaattttttaatatataccatgaattattgacccaccggttggactattgatccactaccttaagc

SEQ ID NO: 16060 - DNA, 404 bp, Glycine max
gggaatcaaaagggagagatataccaacaataattagcaaggaactacttagtggacccagggaggtacttgttcctcaggcctctccaagtttacgttccgttgcagctgattcaattgaaggccgatcaacattacatcagtatttcaagctgtttcatgaaacttatgtggagtatgcacataaggtgtacctggagctcaagcatcacgcacctcagttgaagaaaatcattaatgaccaacattctcgaataggtgatgcacaacagaaacttttgaaagttgacgagaaagaggctatattacagaaaacgatagatcgtgcaattcaaatgcacaattctttggaagagcgcttgcaacaattaaagaacttaccctgcgtgcacaaaaaaacactg

SEQ ID NO: 16061 - DNA, 402 bp, Glycine max
ggttatttaacacaaagatcctggtataatgttttctgatgctcttggaataattagtttttattacaatttggcttgcacttaattcctcctagatcttgttttattgaccagttgaaaatgtgttccacttcagtgtcctttaaatgcaattttattactgttataaaacatgtctgcaaacttcctgatcccaattgacattttggcagaattagatttgatattgtcatattgataatgagatggaagaggagcaaaattgttggacatgattcccaccttatggcactgattgtttttctcttcttttttctttctcagggtatttgaaaagtcactgcagtatgtgaagcgcttcagccgctataaaaatcccgatgctgttagacaagttcgaga

SEQ ID NO: 16062 - DNA, 370 bp, Glycine max
gcctgcatgtctactctggaggatccccttggggaattccattactttattctcaagaaataaggaggcaaaggtgggcttatatgaattggaagtatgtgttttcttattaggcctatcctgaagccaaaggaaatgagatcggaattcctcggggaattccaattccacattttcaagaaataaggaggcaaaaatgttcatatatgaattgcaattatttgttctcttattaggcctatcctgaagccaaaggaaatgagatcggaattcctcagggaattccaattccacattttcaagaaataatgaagcaaaaatggtcatatatgaattggaattaattgtattcttattaggcctatcctta

SEQ ID NO: 16063 - DNA, 441 bp, Glycine max
gaggatatattgaagaaggatccaacatgtagtgacaccttagcaaaacttatcaagatgcaccaaaatggagactatagtcttgtatctctgctggaaatgattgctttacatttagatgctacagatgcagagtacaatacgtggaaggtgttctcttcatgtttcttgagactgtcttcctacgaagaagactgcatgtcttcatgccccattcaaaatgaagatggacataagcaacattttccccttaacaaaacccctaaaatatttacggatggtatatcaggaaaatcttggaggcttcgctgtaggtggtggctaactaaacatttcagcaatagcaagcttgaatccgagattaatactggtgacttgcagttactcacatacaaagcggcatgtgcatcgtatatgtatggacgggaattcagctatgtt

SEQ ID NO: 16064 - DNA, 141 bp, Glycine max
tatgacatcccatgctccctaacctaagcatttggctcgagccttcctttaaacctaagccgttagcctgaatgggtggtgaagaccttttggcaatggccttccaaaggccttcctgccaaggttggttggtaccttcct

SEQ ID NO: 16065 - DNA, 414 bp, Glycine max
  modified_base (339)..(339): a, c, g, t, unknown, or other
  modified_base (386)..(386): a, c, g, t, unknown, or other
agagagactcgtacaggaaccaagcatgccacgctcgttgcaacctccttaaggtggagaaagaagaatgtgaagaaggtgaaattccacgaccactaccacgaccacaacacccggagagggaacctcagcaacccggtgagaaggaggaagacgaagatgagcaaccacgtccaatcccattcccacgcccacaacctcgtcaagaagaagagcacgagcagagagaggaacaggaatggcctcgcaaggaggaaaaacgcggagaaaagggaagtgaagaggaagatgaggatgaggatgaggaacatgatgaacgtcaattcccattcccacgcncacctcatcagaaggaagagcgaaagcaagaggaagatgaggatgangagcaacagcgagagagcgaagaaagtg

SEQ ID NO: 16066 - DNA, 371 bp, Glycine max
aaacaatttaattcaatctgcctcgatcatggagaggaaaacatttgggtttttgttcttgctcctacttgtcttagcttctgatgtgacggtgaagagagcagaggctaaagattgcttgacaaggaggcacgggttccagggtagatgcttattcgacaggcaatgtgcacatgtgtgcatgagcgatggtttcatcggtggtcagtgccgaggccctcttcgcaaatgcttttgcagcaggccatgttgatcgaaattactactgccaaagaggccatgaaatatacagacagacatatagatcaatagctctaaccgacacatatgtacgtagtgtcggagttctagctagctaggtagcgacgtgt

SEQ ID NO: 16067 - DNA, 379 bp, Glycine max
gttggagatctcgtctttgaagtttctaagatgacttctccctacattaaatgtacagtctctttcttcatagcatttggaaatttggctgatgacaccatcaattttgaggcttttccccacaagctggtgcagtttggagagattcaggaaaaagttgtattgaaattttcacaagaggaatttcttacagcttggtcaactcaggtgcgtcctgcaacaactctgttggctgatgggtgtccatatttgtatgctatggtgcatgatagttcagtgtctacaataccaggtgattttgtcattggtgttaagttgacatccataaacaatatgtgtgcatatgggctcaatcctggtatttcaggttctcgtcttt

SEQ ID NO: 16068 - DNA, 393 bp, Glycine max
gagaatttctcagttagtgtaagcaaatcagcaaatgagattgttgctacttataccaaggatgaaacgggaatggatctagtcattcgtctccctgcatcttatccactaaggcctgtagatgttgattgtacaaggagccttgggattagtgagaccaagcaacggaaatggttgatgtcaatgatgctatttgttcgtaatcagaatggagctttagcagaagctataggaatttggaagcgcaattttgataaagaatttgaaggtgttgaggagtgcccaatctgttacagtgtaatccacaccacaaaccacggtcttcctcggcttgcttgcaagacatgcaaacataaatgtcattctgcttgcctttataaatggttttcaact

SEQ ID NO: 16069 - DNA, 361 bp, Glycine max
gagaaaacatgtaagtagtgagaagaagggagagaatggaggaaaaggcaaaagctgagcagaagaagataggtatgaccgagacttggttgaagaagcaccgtcttctttacaatggagccactagacaccctcttattattagcattcgcgatggcaccatcaacactgcttccttcaaaacatggctcgcacaggattacttgttcgttcgggcgtttgtcccatttgtggctagtgtgctgataaaagcgtggaaggaatcagattgcagtggtgacatggaagtcatattggggggcatggcttctctggaggatgagattttatggttcaagacagaatccaacaagtggggtat

SEQ ID NO: 16070 - DNA, 110 bp, Glycine max
acttacaccaatgacgcatcgtcaatcctgctagaccaaagaatgctcgcatacaatacactacatactcaatcaaatgattgtacacctacaacatgcccatcattcta

SEQ ID NO: 16071 - DNA, 300 bp, Glycine max
tatcacacgcactccacacgtagctcgcaattcaactcgatagtatcccattatcttaaaactgaataccctaaaaccatatgaccgtattattttaaagtatgatcattcatacctgcaaccctaacaacaatccatatcataataccacattttccctctatccctgcaaccataaacacaatgcccttattagacctacctacacccacattccccaatacacatacatacaacaatgtaaagatatttattgcatcataatcccaacttttcctaacacttaatcacaaccataat

SEQ ID NO: 16072 - DNA, 362 bp, Glycine max
ttcaagcggttatgaaccgcctttatattaaacgtcgttgaaagtcaagtacatttaaggaggattccaactacaaccatcataaaaaagttgacatattctaagatgattctttgttacgaaccgtcttagaaagtacgctttctaagatggttcttaataaataatcgtcttagaatatgcacattctaagatgtttcttaggaaagaatcgtcttaaaaagtgagcttggtcatgaagttcttggtcatgaattttgtacataatgcattacataacatggttatactacaactatatcatatacaatgcatttgatgaactaaacttgaaaacaaaaatccaaggtcccaacatttta

SEQ ID NO: 16073 - DNA, 366 bp, Glycine max
gccagatccaaaagctgaatgccctcaaaccggataaccgtagagtcggaaggtgggatcattgagacctggaaccctaacaacaagccattccagagtgccagtgttgccctctatcgctgcacccttaaccgcaatgccctacggagacctttctacaccaacggtccacaggacatctacatacaacaaggtaatggtatttttggcatgatattcccgggttgtcctagcacttatcaagagccgcaagaatcttagcagcgaggacgaagccagaggcctcaagaccgataccatacggtacatcggttcagagagggtgatttgatcgcagtgcctactggtgtagcatggaggatgcac

SEQ ID NO: 16074 - DNA, 369 bp, Glycine max
  modified_base (339)..(339): a, c, g, t, unknown, or other
agctagtgatcaatcatcaacacagagctgagtgtgttggtctgtgaatccaccttcttcttccattggaggaccatttcctcctggaatagaaatactaccacacttttcttttttcacttctctaagttgctaagttaattgctccttcattttttcactcttcgttctcgcgtacccgtgtcacggtaactcgtggtgaagtgttcgaaaatgactgtcacacctaagatctcagttaacgatgggaaacttgttgtccatggtaagaccattctgactggagtgccagacaacgttgtgctgactccaggttctggaaggggtcttgtgactggntgcttttgtggtgccacagcttcacacagc

SEQ ID NO: 16075 - DNA, 377 bp, Glycine max
agctagtgttcaatcatcaacacagagctgagtgtgttggtctgtgaatccaccttcttgttccattggaggaccatttcctcctggaatagaaatactaccacacttttcttttttcacttctctaagttgctaagttaattgctccttcattttttcactcttcgttctcgcgtacccgtgtcacggtaactcgtggtgaagtgttcgaaaatgactgtcacacctaagatctcagttaacgatgggaaacttgtcgtccatggtaagaccattctgactggagtgccagacaacgttgtgctgactccaggttctggaaggggtcttgtgactggtgcttttgttggtgccacagcttcacacagcaaaagtct

SEQ ID NO: 16076 - DNA, 346 bp, Glycine max
aaagcttcatcatcatcttcttcttctctgcatcatcacgagtggctgaagtacgttcacaacaacaacaaccccagcatgtgcaagtccacgcaaccacaacacacaccccacaacaccatggcggtgaaggtggcagcggcattctgaacctcatcccggagatgtccctcacgggttcccaactcctagctctcctcgccggcgttccccttggtgcaatgctgctcctcctctccggcatctcgctcatcgccagcctcttggggctggcggtggcgacgccgctcttcatcttcttcagcccgctgctggtccccgccgccttcgccataggaatggcggt

SEQ ID NO: 16077 - DNA, 311 bp, Glycine max
gagtttttcttctgtttttttagttttttttttctgcctatgaggcatttgactgaactctgattcttttttctttttacatcaactcttggcttcttagtgtgtcacagtgacttcagtcctttctactaaaggtgtgtttgacttatgagcaagcctaaattggaaaaggggattttttttttcttctcattttggccattcatctttctcttgcgacattatgttctctctgcaactatggaaaagctaggattaactgaatctccattccccaagctctcttcagatgaaattctggaattggaaag

SEQ ID NO: 16078 - DNA, 469 bp, Glycine max
atttcttttgattgattagaaattaaaacatgattttttatcgactaaattaaacaatctctaaaaataaaaaaagttatacttttcattaaaacttatgattcaaagagagtttgagaacatttatattatttaaaccattatgagtcatgaaatacccaacacatcaatctcataataaaataggtgttctatcccaatatcatagttcatggttatggagacatcactacttcttgtccctaatttcttggaaaaaatattctgaattttacaacttaccacatatccatagaaagataaatcataaaatcttcatacatataaagcacgcctcttataaagctaatatattaaaacacatccctaggtcataacacatcaaccatccaatttcaattccaaataaaatcatgactgtccaataacattctattctcacttcattcagatggttggactggccact

SEQ ID NO: 16079 - DNA, 377 bp, Glycine max
  modified_base (218)..(218): a, c, g, t, unknown, or other
aaaaaatcctaaccttggcacccatttctactgttcaaccaagaggttcctactcctatggaacctcctatggagcaccctttggaaccacctatgagaccaacagcagcattaacaaccctccttcacgccaaaccgtgaagttcataactgctgcaactattggcatcacactcttactcctgtctgggttgaccctcacaggcactgtcataggnttgatcattgcaacccctcttcttgctatcttcagccccatccttgtccctgctgcgtttgtgctgttactggttgcttctggctttttgttctctgggggctgtagtgtggctgccattgctgctttatcttggatttacaactacgtttctgggaac

SEQ ID NO: 16080 - DNA, 386 bp, Glycine max
agaaaaaagtataagaagatgggtttgaagaacaacatggtggtgctaaaggtgtgtttggtgctacttttccttgtggggggtactactagtgccaacttgaggctgagtaagcttggcctgctcatgaaaagtgatcatcatcaacactcaaatgatgatgagtcttcaaaaccatgctgtgatcaatgcgcatgcacaaagtcaaaccctcctcaatgccgctgttcagatatgaggctgaattcgtgccattcagcttgcaaatcttgtatttgcgcattatcgtatcctgcacagtgtttttgtgttgacataaccgatttctgctatgaaccttgcaaacccagtgaggatgacaaggaaaactactaatgaacaagtgt

SEQ ID NO: 16081 - DNA, 270 bp, Glycine max
actaaagctgataagaaacatttatcaagtatgggtttggacctttcgcaagggaaaatcagaaacaacttgtaggccggagtcattgagcctgcaatgagcaaagtaaaaatcattcagtgcgcaactgaagctgctattaccatcattcgaattgataacatgatcaagctcgacacggatgtcagtgcacatgctcatagctgaacaacggtttataccgatgattactattatcggatccttcgaaactttcaagtttctatgatc

SEQ ID NO: 16082 - DNA, 448 bp, Glycine max
  modified_base (368)..(368): a, c, g, t, unknown, or other
ttctgctctgatagctgctggtggttctgaccctgtccttaggatctgggatcctcgtaagccaggcacttctgctcctgtttttcagtttgcttctcatacttcttgggtttcagcttgcaaatggcatgatcagtcttggtttcatttactttctgcatcctatgatgggaaagttatgttgtgggatctgagaactgcgtggcctctttcagtcattgaatcccacagtgataaggtattgtctgctgactggtggaaaagtgacagtgttatcagtggtggagcagactcgaaactttgcatttcgtcagagatccctgtacagtgaggcaaactttaatcatactatcatagtatggtgattnttttgagatggtgggatagaggcagatttttcttaaattgcttcagaatcagatgcaccaaatttgcagtctcgtaaaat

SEQ ID NO: 16083 - DNA, 334 bp, Glycine max
  modified_base (50)..(50): a, c, g, t, unknown, or other
  modified_base (52)..(53): a, c, g, t, unknown, or other
  modified_base (57)..(57): a, c, g, t, unknown, or other
tatgactcgcatgcacctactaactcggattattcccgggcagagattantnnaagnatttactgcctaaaaggggactttacagggatagtgctaggctagctatctagaaacccaacaaggctgctcctgtgcatgcatcagcccatggtatctggataatgtttgtctttctacatagttatgttttgtttatttttttcattttttacatactgattatttcaactatcctatgatattcatcttttatcttgatatttatctttcaagtttaacttttttccttatattttattaatttatgattctcttattttcttctattttatat

SEQ ID NO: 16084 - DNA, 443 bp, Glycine max
gcttaagccttttaaaaacctgttatggcctatttcttgaaggtgtacaatcacaaaaaaaaaatcgtctccttttctctctgcatttgagcaaagccaaaccacgtctgagtgagtgagttccgttggatggcgacgagcaccaccagcagcggtggcggcggcaccggcacccaaacattcaagccgtaccgtcacctgaaaaccctaaaagaccacgagaacgcggtatcgtgcgtgaagttctcgaacgacggaaccctcctagcctcggcctccctggacaaaaccctaatcatatggtcctccgccaccctcaccctctgccaccgcctcgtgggccactccgagggcatctccgacctggcctggtcctccgactcccactacatctgctccgccttcgacgaccacacccttcgcatctgggacgccaccggcgg

SEQ ID NO: 16085 - DNA, 372 bp, Glycine max
  modified_base (6)..(6): a, c, g, t, unknown, or other
taaatnatgtttgcttaaattatgcaccagctactcacacgggtgttgcatctttaccaggaatgtgggacagaactcttactgggaatggatttttcaagggccttgcaatgactggttgtcggcttggatatattgctggtcccaaagcattttgttgcaacatgtggaaagatccatagtcagttcacttcatgggccagtagtatagctcagaaagctgcagttgctgcattaggactatgccatgctgatggggaggcagtttctaccatggtgaaagcattttaggagcgaaaggatctcttggtaaaaagtcttagagaaatagatggtgtcaagatatctgaaccccagggagcatttcatcta

SEQ ID NO: 16086 - DNA, 342 bp, Glycine max
  modified_base (299)..(299): a, c, g, t, unknown, or other
  modified_base (326)..(326): a, c, g, t, unknown, or other
tccttgacgatcgacgtaaatgaaacaggctttggtggctggctgttcctgtggaaccgttttgggttaactttaacaaaattagttcttaaactgcttgaaccagtaccacactggcccaaaaaaaaaattcatgtgcttaatttctagctgtgagagacaattaagtgtatgaccaataaaatggttttgttgtaggaccaagtctgagagacgccaagcaccacatgaataaaataaccaaagcttggtttgtattgtagccttctctaatgctattggtctggttacatcatctntaattcccctttatatatgcatatgtntattatttattgattt

SEQ ID NO: 16087 - DNA, 416 bp, Glycine max
gttcagcatcgcgcagagaggctcttcctcacaaagcacacacctcttgaaaagttggacaggaagcattttgctaagggtgcatgtggtgtagaaaagaatggggttgctgcagttccacaagaagatggaaattctaaagaaattgcattgatggaagccaaaatgacaaaactttgtcatttgttagaggagacaattgctcgaacaaaagacaatgttgtaaagaagcaagccctaacatatgaggaaatggaagcagaacgtgaggaggaagagacacaagaggactctgaaagcgaagatgaggagcagcagatatataatcccctaaaattaccaatgggatgggatgggaagcctataccttactggctgtataagctacatggtctgggtcaggatttaaagtgtga

SEQ ID NO: 16088 - DNA, 416 bp, Glycine max
gttcttcatcgcgcagagaggctcttcctcacaaagcacgcacctcttgaaaagttggacaggaagcattttgctaagggtgcatgtggtgtagaaaagaatggggttgctgcagttccacaagaagatggaaattctaaagaaattgcattgatggaagccaaaatgacaaaactttgtcatttgttagaggagacaattgctcgaacaaaagacaatgttgtaaagaagcaagccctaacatatgaggaaatggaagcagaacgtgaggaggaagagacacaagaggactctgaaagcgaagatgaggagcagcagatatataatcccctaaaattaccaatgggatgggatgggaagcctataccttactggctgtataagctacatggtctgggtcaggaaattaagtgtga

SEQ ID NO: 16089 - DNA, 408 bp, Glycine max
caaacagcatcagtacagagcattttgatgcatgtaagtggacaaaatcggaaccacattcctgggaattgatcttcccaatagaggtatgtggtcctaataatggttttgaaatgtggagttctgagtgggcaaatcaaacttcatggcatttgagtttccttattgacaatcccaaacagtctacagtttttgatattctcttgggaatttctcaagattttgaaattgctggtaatactcttatgccagctttttctgttccacaggctactgccagatcttctgaaaatgcggaatcctctgcatgatctggaacttgtgttctctttcgcttgttcgtttgtttaattcaataaaggaaattaggcatgaccctcttgatgagtatgctctgcctatttgaaa

SEQ ID NO: 16090 - DNA, 97 bp, Glycine max
tgaaggatgatttttctatagttaaagagctgcctaaagagtggagcttttgcacaagagagttctatggcttggctattcgagaaacccgaatcaa

SEQ ID NO: 16091 - DNA, 404 bp, Glycine max
ccggtcggcggcatcctcctgctcctggcaggactgaccctggctggaactctcaccgggctggtggtggcaacaccgctcttcatcatcttcagcccggtgctgattccggccacggtcgcaattggcctggccgtggccgggttcctgacgtcgggagtctttgggctcacggcgctgtcgtccttctcctggatcctgaactacatccgggagacccagccggcgtcggagaatctggccgctgcggcgaagcaccatctggcggaggcggcggagtacgtggggcagaagaccaaagaagtagggcagaaaaccaaggaagttgggcaggatattcagagcaaggcacaagatacaagggaagcagctgcaagagatgcaagagatgcaaggggagcagc

SEQ ID NO: 16092 - DNA, 449 bp, Glycine max
gtctttactgactaagtaaacattaggtcaccacctgatctcacataaataatgctttaactagcaccgtcacagtggaaggctgttcaaaactatgacaagcgatagccttctcctttaccatactccccctatggggatgcagtacttataaccaaagctgatcttgaatgctatcatagcacaggtgatgctagtatggaactggcgatagttcctaaaatgctgaagactaagcccatgattgcaagattatctagtctgtttgcatccttaaaagtatccggcagtagtgtaccaatgaccaggcggttgccgagttctgagtcacgtgcttgctaagtcatcttgatatgctgtcaagcaggtggcctgtacagaagatgatgatgaagataagtgaaatttgataatttgccaaagtcggtacaattgtgtttcatgaatag

SEQ ID NO: 16093 - DNA, 384 bp, Glycine max
  modified_base (375)..(375): a, c, g, t, unknown, or other
aagagtgtgttggggttgaacacctgaacacaactttaaccctgcttgtcgaatctgtgcattgcttgaacgattgaaccctaatggctgctctcttgaggaggtttgcgagcgccactccgatcccatccaattcctctcacaccaatctccgccttcccttcaccgccatcgccgccatttccggcggagtctccttccttttctaccattcctctcccaacttcgctcattcacaagaagcagaacaagtggaaagtaaaaacatcgcactcgttccggataaatgggtcgagtttaagttgcaggatactgctagggttagtcacaatacccagctattcaggttttcatttgatcccactcagaaattgngtctggata

SEQ ID NO: 16094 - DNA, 338 bp, Glycine max
aggacgaagatttattttctaccaacctagaagcaaatatgggcatatatgaattggaatttttagatcacttattaagcctatactggaaaccaaaggaaatgagatcgggacttcctcgggaattccaaatgccacattttcaagaaatacgggaggcaaaaatgttcatctatgaataggaattatttgctctcttattaggcctatcctgaagccaaaggaaatgagatcggaattcctcggcgaattccaattccacattttcaagacataacgaggcataaatgttcatatatgaatcggaattatgtggtgtcttattaggcctatcctga

SEQ ID NO: 16095 - DNA, 378 bp, Glycine max
cggctcgagcaactacaagaaagaacttccttataaccaaaaccaacaacaactatggcaagttatcagaagcactacgatgatcagggtcgcaaggtcgacgagtatggcaatgttgagaggcaaactgacgaatatggcaacccggttcatgccactagtgtcacttatgtagccaccaaaagtgttggtggctacaatgatgacgctaataagcaacatgatattactggtgtctatcccgagaaagacaccggtagacatcattttggtcgtggttacgacggtgacactaacaagcaacatgatgctactggtgtttatcccggaatagacattggtagagatcatgggactaccggtgtttatggcctaaac

SEQ ID NO: 16096 - DNA, 418 bp, Glycine max
gagtcactagagaaagagagagggaaatggctttcacgatatccagatctgaatctgctttgaaagatagagagaagaaggagtgtgtaacaacagagggtatgatatcgagccagctttgtcatcgtcgaaagcatcttctcatcaaagcatggacaaacatgcaatcctgcgacgcatcaggcaacgcaggtttaataacagagccaaaaccgctctggaagctctcataggcacctcagaagccaacaacaacaccaccactgggcaagaacacttgtggcttcaactgggtgactctttctcttctccttaactcatgaatcacccctcagctacccatctataaataccatccctagatcactacttatgcagctatgaccttgtgaataccacgttcaattggtattttaaa

SEQ ID NO: 16097 - DNA, 370 bp, Glycine max
cggtttctttataaagcacaacgctaaaggtcagcactcagtactcttatgaagatgattacaaggtcatcatgacaatagcatgatgagctcaggaattagtgcttggagtgcggctactagcgctggagatgcgtaggcttatcaagtcatgggcatacattcaatgattcaacccataaggcaacgcaagcataatatcatagcccaaaccggtctggaagctctcataggcacgttagaagccaacaccatcaccaccactggtctagaacacttgtcgacttaactgggtgactctttctctactccttaactgatgaatcaccccttagctacccatctataaataccatccctagatcactac

SEQ ID NO: 16098 - DNA, 380 bp, Glycine max
  modified_base (313)..(313): a, c, g, t, unknown, or other
gttttcctcttctgaatccaccgccaccgcagcgtggacggaatcagagtgcagccatagcagcagcagcagcagcagcagcagcagtcattgaagtgctgctctagtttgaggcacaatgagattggagaaatgctggttttgctcttcaaccgtataccctggacatggaatccagtttgttcgtaatgatgcaaagatttttcggttttgtagatcaaaatgccacaagaactttaaaatgaagagaaatcctcgtaaggtaaagtggaccaaggcatatcgtcgagtgcatggaaaggatatgactcangactcaacctttgagtttgagagaaaacgaaacaggcctgaaagatatgacaggaatcttgcggaga

SEQ ID NO: 16099 - DNA, 318 bp, Glycine max
gttttacttttattaatcaaccgccaccgcaccgtgacgggaagcacatagcagccttagcagcagcagcagcagcaccagcagcagtcattgaagtgctgctctagtttgaggcacaatgagattgcagaaatgctggttttgctcttcaaccgtataccctggacatggaatccagtttgttcgaaatgatgcacagatttttcggttttgtagatcaaactgccacaggaactttaaaatgaagagaactcctcgtaaggtaaagcggaccaaggcatatcgtcgagtgcatggaaaggatatgactcacgactc

SEQ ID NO: 16100 - DNA, 349 bp, Glycine max
gttggagaatttttttaacagggccggattttgaccgaggagtcaacaccttttcccccgaaggacgttggtttcaggttgagtttgcaatcgaagccttcaagctgggatcaactgcgatggggttgaagaccaaagagggtgttgtcctcgcagttgaaaagcgcataacttcgccgttcctggagcctagtagtgttgagaaaattatggaaattgatgaccccataggttgtgcaatgagtgggttgattgcaaatgctcgaacacttgttgagcatgcacgggtggaaactcagaatcataggttctcctatggtgagccgatgactgttgagtccaccaccca

SEQ ID NO: 16101 - DNA, 394 bp, Glycine max
aaaatgacctagttcacaatcctcctcatctctcttctcttctgcatcgcccacacttgcagcgcctccaaatggcagcaccagcaagatagctgccgcaagcagctccagggggtgaacctcacgccctgcgagaagcacatcatggagaagatccaaggccgcggcgatgacgatgatgatgatgacgacgacaatcacattctcaggaccatgcggggaagaatcaactacataaggaggaacgaaggaaaagacgaagacgaagaagaagaaggacacatgcagaagtgctgcacagaaatgagcgagctgagaagccccaaatgccagtgcaaagcgctgcagaagataatggagaaccagagcgaggaactggaagagaagcagaaga

SEQ ID NO: 16102 - DNA, 396 bp, Glycine max
  modified_base (377)..(377): a, c, g, t, unknown, or other
gtcttgctgcggtggtaactgtggttgcggaagctcctgcaagtgcggcaacggctgcggaggctgcaagatgtacccagacttgagctacactgagtcaaccaccaccgagaccttggtcatgggagtggcacctgttaaggctcaatttgagggtgctgaaatgggtgtgcccgctgagaacgatggctgcaaatgtggaccaaactgctcctgcaacccctgcacttgcaagtgaggtgttgggagagcaagcttcaagcagagatagcccttaattaggaataatgataaactattaatgtgtagctaaaaacttatgtattatgtctgtgatggttttcgtgcactctggtgttttgtgttaaacaaacatncttagaataaagtggtcat

SEQ ID NO: 16103 - DNA, 283 bp, Glycine max
aaattaactttgctaacaagaacacccataactcgcctaggttaaatcgaccacaggcgaggcaacgcaacgaggaagaaccaggaacatagcaggcgcaagcaacgccaagacccgatcctaaaccgctacgagaaggacatcaacgagaacatcccacagaaggccaatgaccaggatgatgctgacgacaaccatcacacggacacgaccatgcatgagaagaaccaaacacataaggacgaacgaaggaaaacacaaagacgactaaaaagaaggacac

SEQ ID NO: 16104 - DNA, 465 bp, Glycine max
ctcgagccgattcggctcgagaaaattcttccaccaagttatgggtttccttgtgttgcttcttttctccctcttaggtctctcttctagttccagcatatcaactcatcgttccatattggaccttgacctaaccaagtttaccacacagaaacaggtgtcttcactgttccaactatggaagagtgagcatggacgtgtctaccataaccacgaagaagaggcaaagagacttgagattttcaagaataacttgaactatatcaaggacatgaatgcaaacagaaaatcaccccattctcatcgtttaggattgaacaagtttgctgacatcactcctcaagagttcagcataaagtacttgcaagctcccaaggatgtgtcgcagcatatcataattgccatcatgataatgaagaaggacaatattcttgtgaccatccacctgcatcatgggattggagg

SEQ ID NO: 16105 - DNA, 143 bp, Glycine max
gtgaggggtttttaaaataatttttttagaaatttataaatgatttgttttttgttaaaatatttgtttatttttttgaatgattgtatattataaaatgtggatatttattatttggttattgtttttttaaagataatttt

SEQ ID NO: 16106 - DNA, 399 bp, Glycine max
gggtgacttttatttcctgggagaaaaagatgagccacggctggtacgccgttcgtgcatttttgaggtgccgctgtcatgtttgggcgttgtgcaccaaggtggagtgataactccaaatattatgatattctcgggatttccaaaaatgccagtgtagatgaaatcaagaaggcctatagaaaggcggctatgaagaaccatccagataagggaggagatcctgaacagtttaaggagttaggtcaagcatatgaagctctaagtgatcctgagaagaaagaactgtatgaccagtatggtgaagatgcccttaaagaagggatggggggaggaggctcgtttcataatccatttgatatatttgaatcattttttggaggagcaagcttttgttgt

SEQ ID NO: 16107 - DNA, 406 bp, Glycine max
  modified_base (335)..(335): a, c, g, t, unknown, or other
  modified_base (381)..(381): a, c, g, t, unknown, or other
ttgaaggggttccttttcttccttggagaaaaaggagaagccacggttggaacgccgttcgtgctttttgaaggtgccgttgtaatgtttggccttggtggaccaaggaggattgataactccaaatattatgatattctcgggatttccaaaaatgccagtgaagatgaaatcaagaaggcctatagaaaggcggctatgaagaaccatccagataagggaggagatcctgaaaagtttaaggagttaggtcaagcatatgaagttttaagtgatcctgagaagaaagaactgtatgaccagtatggtgaagatgcccttaaagaagggatggngggaggaggctcgtttcataatccatttgatatatttgaatcattntttggaggagcaaagctttgtggtg

SEQ ID NO: 16108 - DNA, 379 bp, Glycine max
aaaacactcaagttaacttcaacacctttaattttctgaacgaaattcagccacagaatatcaaagggagcgaagatgagtcaggagcagccaaggcgcccccaaggccaagaccccatcaaatacggcgacgtttttgacgtctacggtgaccttgcacagatgcccattgcaccggaagatgctgccatgatgcaaagcgcggaagctcgagtactcggaaaaacccaacccggcggagcttcttccgtcatgcaatccgccgccacaaggaatgaacaggctggtcttgtcggtcaccaggacgtcaccgacatcaccggcgaccatggcgtcacagtcacagaaactacattccatggaagacgcataataaccg

SEQ ID NO: 16109 - DNA, 385 bp, Glycine max
  modified_base (326)..(326): a, c, g, t, unknown, or other
acgcgcttcccacttaccagaccatgatcaacaaccttgatggagtgaaagatgacagcggcacgagcccgagcccgtgggccgtgtggacccgggcctggaccgccgaggaaaacagacacggggatctgctcagaacttatttgtatctctctgggagggttgacatggctaaggtcgaaaagaccgtacattacctcatttcagctggcatggaccctgggacagacaacaacccatatttggggtttgtgtacacgtcattccaagagcgagcaacatttgtggcgcacgggaacacggctcggctcgcgaaggagggcggngatccagtgctggcgcgcctatgcgggaccatcgcagcggacgagaagcggcacgagaa

SEQ ID NO: 16110 - DNA, 394 bp, Glycine max
cacaactactacaagtacttccttacaatcaaaaccaacaacaactatggcaagttatcaaaagcactacgatgatcagggtcgcaaggttgacgagtatggcaacgttgagaagcaaaccgacgaatacggcaaccctgttcatgctgctagtgtcacctatgtagccaccagaactgctgctggtggttacagtgatgacattaataagcaacatgataccaccaatgcctacggcgtagacactggtagacagcattctagtggtggctacgatggtgacactaataaacatcatggaactactggtggctataatgatgacaccaatagacatcatggaactaccggtgtctatggtatagacaccgataggcaacaacatgggactact

SEQ ID NO: 16111 - DNA, 382 bp, Glycine max
cttgaagcttcacgagaacattgctcgcccttaacgcgctgacttctacaaccctaaagctggtcgcattagtaccctcaacagcctcaccctcccagccctccgccaattccaactcagtgcccaatatgttgtcctctacaagaatggaatttactctccacattggaatctgaatgcaaacagtgtgatctatgtgactcgaggacaaggaaaggttagagttgtgaactgccaagggaatgcagtgttcgacggtgagcttaggaggggacaattgctggtggtaccacagaacttcgtggtggcggagcaagccggagaacaaggattcgaatacatagtattcaagacacaccacaacgcagtcactagctacttg

SEQ ID NO: 16112 - DNA, 385 bp, Glycine max
gtgcgccacaatccgccggtgccggaggtccggcgccgttccttctgaagacctacgacatggtggacgatgcctccaccaacgacatcgtttcgtggagctctaccaacaacagcttcgtcgtgtggaaccctcccgagttcgctcgcctccttctcccgacctatttcaagcacaacaacttctccagcttcatccgtcagctcaatacctacggatttcgaaaaatacatccagagcgatgggaatttgctaatgatgagtttctgaaagatcagaagcatcttcttaagaatatatatcgcaggaaacctatccacagtcatagtcatcctccaggttcacttgtagatccagaaagggcagcatttgaggaagaaataga

SEQ ID NO: 16113 - DNA, 354 bp, Glycine max
aaactcaattataaaaacaatgcaaaaaagaacaaaaccgaatattatagaaaaccaaaaaaatggaggacgatgcctacaaccaacgacatcaattaataaaggtctaccaacaacaactgtcctcgtgtgccaccctatcaagttcggtcgggtccttgtagggacctattttaagcacatcatctgctccatcttaattcggcatctcaatacctacagatttcgacagatacatacagagcgatgggaatatgctaatgatgagtttctgccagatcctaaacatgttattccgaatatacatagcaggaaacctatccacagtcataggcattctgcaagttcacttgt

SEQ ID NO: 16114 - DNA, 330 bp, Glycine max
ggaatttactctccacattggaacttgaacgcgaacagtgtgatctatgtgactcgagggaaaggaagagttagagtggtgaactgccaagggaatgcagtgttcgacagttagctaaggaagtgacatattgctagtggagcagatgaagttgctgatatgttcatataggaattgacatgatttgttatattattaggcctattctgaagccaaaggtaatgagaacggaattccttggggaattacaatttcacattttcaagatataacgaggcaataatgttcatatgtgaattggaattatgtggtctcttattaggcctattc

SEQ ID NO: 16115 - DNA, 332 bp, Glycine max
aagagaggtttttttggtcctcactgaccaagccatggcgatgagaaccaaactttctttagctatctttttcttttttcttttagccttattttcaaacctagcctttggcaaatgtaaagaaaccgaggtagaagaagaagaccctgagctcgtaacatgcaaacaccaatgccaacagccacagcaatacactgagggtgacaagcgggtatgcttgcaaagatgtgacaggtatcatcgtatgaagcaagagcgagagaaacaaattccagaggaaactcgtgagaagaaagaagagggaagccctgaaaggggagaagaaccaccag

SEQ ID NO: 16116 - DNA, 372 bp, Glycine max
ctcgagccgaatcggctcgagattttagcctctcttaattcataattcctcaccttcaaatctccattctgcttcattttctgcaaagaacaaacccctttctgaagaaagaatatagtcttcagctggacaaggatcatttattttgaaagacaagtttgtgtgacaatcttatagttctaagaagggtgcaagtgagagctttgctgtgatggcaacccgtagatattcttttggaagggctgatgaggccactcatccagactccatgagggccactttggctgaatttgcatccactttcatctttgtctttgctggagaaggctctagccttgctttggttaagatttaccaggattcagctttctc

SEQ ID NO: 16117 - DNA, 178 bp, Glycine max
caccagggaaggttagggaacactccatgcccaccaccaaagtctcctgcgcaagctacgtgccccattgacacgctcaaacttggtgcctgtgtggatcttcttggagggttggttcacattggtttgggtgaaccctgtgcgaaccaatgctgccccgggcttcaaggggcttgtg

SEQ ID NO: 16118 - DNA, 329 bp, Glycine max
ccgagcgaatccccaattaccaatccaatcctttccaaactcacaaagccatgtctccaggtccggttgtcgacgcttcccctgaggttgatgcagagcatcagcttccctccgtcgatgacgccactcacaagaagataccccaaccacaggaggacgatgctccccttgtcgaggacttgaaggatgatgacaaagacgacgacgatgaatacgacgacgacgacgacgaagatgacaaggaagacgatgctcaaggtggtgctgagggttcaaagcatagcataagtgagaagaagagccgaaaagcaatgttgaagctgggactg

SEQ ID NO: 16119 - DNA, 278 bp, Glycine max
  modified_base (185)..(185): a, c, g, t, unknown, or other
  modified_base (269)..(269): a, c, g, t, unknown, or other
ccgagcgaattcctttataccaatccaatcctcttccaactcacagagccatgtctccaggtcccgttgtcgacgcattccctgaagttgatgcagagcaacaactgtactacgtcgatgacgccactcagaagaagataccccaaccacatgacgacgatgcttcccttgtcgaggacttgaangatgatgacaaagacgacgacgatgaatacgacgacgaccacgactaagatgacaaggaagacgatgctcaatgtggtgcttanggttcaaag

SEQ ID NO: 16120 - DNA, 385 bp, Glycine max
cttaattattaacacttccttagttcaatatggggaagcccttcactctctctctttcttccctttgcttgctactcttgtcgagtgcatgctttgctattagctccagcaagctcaacgagtgccaactcaacaacctcaacgcgttggaacccgaccaccgcgttgagtccgaaggtggtttgattcaaacatggaactctcaacaccctgagctgaaatgcgccggtgtcactgtttccaaactcaccctcaaccgcaatggcctccacttgccatcttactcaccttatccccggatgatcatcatcgcccaagggaaaggagcacttggagttgcaattccaggatgtcctgagacgtttgaggagccacatgaacaatc

SEQ ID NO: 16121 - DNA, 388 bp, Glycine max
  modified_base (355)..(355): a, c, g, t, unknown, or other
gagattcatgaaaaagttgtattgaatctctccaaactgcaccagcttgtggggaaaagcctcaaaattgatggtgtagtttggagagattcaggaaaaagttgtattgaaattttcacaagaggaatttcttacagcttggtcaactcaggtgcgtcctgcaacaactctgttggctgatgggtgtccatatttgtatgctatggtgcatgatagttcagtgtctacaataccaggtgattttgtcattggtgttaagttgacaaccataaacaatatgtgtgcatatgggctcaatcctggtatttcaggttctcgtcttttgggcaccattcctcagtctatttcacagcanactgtttggaatcaaatggcaacagtgagaaca

SEQ ID NO: 16122 - DNA, 375 bp, Glycine max
tggagaagcatcaacaacaagcaccatctaaggaaacaaaggcacagagtgatgaatcagttaaagaaagcagcactgaagggcttccaatggaggatagtccctatgtgaaatacaaggatttggaggattataagcgtcagggttatggtacacaaggtcatcaagaaccaaagacaggtcgtggagctggagccactgaagcacccactctctctggtgctgcagtttcatctgatgcacaagtcgctgccactgatgccattaacagtaaaggagtcccttaattattcacacttcctagaatagatcgttcctttgctaataagaaatcgttttcttaatttggggtggccgtttttaaatgtgtgaaca

SEQ ID NO: 16123 - DNA, 369 bp, Glycine max
caacacctttaattttctaaaagtaattcagcggctgaataccaagcggagaagatgagtcaggagcagccacggcgtcccaaaggccaaaaccccatcaaatacggcgacgtttttgtcgtctccggcgaccttgcacagaagcccgtcgcaccggaagatgctgccatgatgcaaagcgcggaaactcgagtgctcggacaaacccaacccggcggagcagcttccgtcatgcaatctgccgtcaccaggaatgaacaggctggccttgtcggtcaccgggacgtcaccgacgttaccggcgaccgtggcgtcacagtcacagaaactaaagtccctggaagacgcattataaccgaggctgttggt

SEQ ID NO: 16124 - DNA, 422 bp, Glycine max
  modified_base (360)..(360): a, c, g, t, unknown, or other
  modified_base (404)..(404): a, c, g, t, unknown, or other
ggaagatgaggatgaggagcagcagcgagagagcgaagaaggtgaagaatttgaggtaccaagacctaagaataagaacccttttctctttgggtttaacaaggtcgaaacttttttcaaaaaccaatatgggcgcattcgcgttcttcaaaaggtcaacccaaggttcccaaaactttagaatcttcgagactaccggattttgggagtcaaactccaaaccaacaaccttccttctccccaccatgctgacgctgattaccttatcgttatccttaacgggactgccattctttccttggtgaacaacgacgacagagactcctacagacttcaatctggtgatgccctgagagtccnctcaggaaccacatactatgtggtcaaccctgacaacaacgaanatctcagattaataacac

SEQ ID NO: 16125 - DNA, 352 bp, Glycine max
aaggctgtatatctaagccaagagcttggaaaattagcctcaggaaagcatagatgaaacaaaccaaggacgagaacacgatgttgcttgaacttgcacttggataattggttatggctctgtttatgcacttgcgttccacacacactgcaaaatcaaaagcacttcgacatcatccaaacccaccaagtccaaagcctagtcttgccttcataggacaccttcatctcttaatagacaaacttcttcactacgcactcattgacctcttcaaaaaaacatggtcccttattctctatgtactttggctccatgccaaccattgttgcctccacaccagagttgttcaagc

SEQ ID NO: 16126 - DNA, 371 bp, Glycine max
ggatggaaactttgttgccattaaaaggttgacaagagggtgccaagaagaaatgactgcagatttcttgtctgagcttggcattatagtgcacgtggaccacccaaacatagctagattgattggatatggtgttgaaggaggaatgtttcttgttcttcaattgtctccacatggtagcctgtcatccatactttatggacccagagagaaactgaattggaacctcagatataagattgctttggggactgctgatggccttcgctatctgcatggagagtgtcaaagaaggatcattcacaaagacatcaaagcttctaatattcttctctcagaggattttgagcctcagatatctgattttgggc

SEQ ID NO: 16127 - DNA, 258 bp, Glycine max
gtttgttaatgtttcaggttatgaagctgaaatgaattccatgttctctcagattgagtcccctaacagatcacttcatgatcatataattgaagctcttggcaagctcactgttgaacaaggaattcctcctacatcagattcttgggttttgagcaccattttggaaccggcactgctatctcaggctggttctgatttgaataagtccgtttttaaggagccattttggaaggaattaagattggtgccattgat

SEQ ID NO: 16128 - DNA, 192 bp, Glycine max
gataagcttttgttggctaacacacatgaattctttgatggaaattttccagtggattcttggttaccaatttttgtgaattgtctttatcctgtaagtcaattgccttcagaagctgtcgttgtaaatgttacatgtggtagtggacgtggtggtttaccgatcacttgttggattacgtctgcactcaac

SEQ ID NO: 16129 - DNA, 371 bp, Glycine max
ggctggacagcattctgatattctagagtctctgtcgcccaatgtcaggaagcgtgtggaggttcttagagagatccagggtcaacatgatgaattagaggcataattttttgaggagagagctgctcttgaggccatataccaaaaattgtatcaaccactttacacaaagcggtatgaaatagtaaatggtgctactgaagttgaagaaggggcagtgaaagaaacatcaccagatggtgaggaggatcaagagaaaggagtgcctgcattttggcttactgccatgaaaaacaatgaagtgttggctgaggagatctcagagcgtgattaaggtgctcttaagtatctcaaagatatcaagtggagca

SEQ ID NO: 16130 - DNA, 370 bp, Glycine max
aaggttgtttcctcaggccaagagcttggaaaattagcctcacaaaagcaaagatcaaacaaaccaaggacgagaacacgatgttgcttgaacttgcacttggtttattggttttggctctgtttctgcacttgcgtcccacacccactgcaaaatcaaaagcacttcgccatctcccaaacccaccaagcccaaagcctcgtcttcccttcataggacaccttcatctcttaaaagacaaacttctccactacgcactcatcgacctctccaaaaaaacatggtcccttattctctctctactttggctccatgccaaccgttgttgccttcacaccagaattgttcaagctcttcctccaaacgcacg

SEQ ID NO: 16131 - DNA, 396 bp, Glycine max
  modified_base (128)..(128): a, c, g, t, unknown, or other
tcggggaattccaattccacattttcaagaaataaggaggcaaaaatgttcatatatgaatgggaataattggttctcttattaggcctatcctgaagccaaaggaaatgagatcggaattcctcggngaattccaattccacattttcaagaaataaggaggcaaaaatgttcatatatgaattggaattatttgttttcttattaggcctatcctgaagccaaaggaaatgagatcggaattcctcggggaattccaattccacattttcaagaaataaggaggcaaaaatgttcatatatgaattggaattatttgttttcttattaggcctatcctgaagccaaaggaaatgagatcggaattccttcggggtaccgagctcgaattcccta

SEQ ID NO: 16132 - DNA, 86 bp, Glycine max
aaaaaaaattattttaaaaaaaaaaaaaaaaaaaaaaaaaaaaaaaaaaaaaaaaaaaaaaaaaaaaaaaaaaaaaaaaaaaaaaa

SEQ ID NO: 16133 - DNA, 171 bp, Glycine max
cataaggttcgtcccccttaccagccttaccaaaattcacccttaagttcaaagttgccaaaccccgcacggcctttaagatacccagcgttttccccctgaaacttccttaggcccctttccttttccgacctttccgttaaccggatccctgtccgcctttctcccttc

SEQ ID NO: 16134 - DNA, 372 bp, Glycine max
agaagatctatgacgtcgcacgctcgcgtacgttcgcgaaattggtctagtgttgcgtattgttgacacacagggatatcccgggcccctctgtgcgacgggtaatatacgtgtccgtatatgggacccacacgcggtcccggggcctgtctcctggttttggggtaagaatgggtatgggttctggtttctgacacaaggggcattcgcggtattaccaggacaccaaaaaggttttaaccccaaagaagaagttgaagctgctcaagggtttctccaaattagggcttgcatcggatcccgagaaactcgccatgttctatgatcttcaacaaaacctgacctcggatgctggagatgtattactgagag

SEQ ID NO: 16135 - DNA, 581 bp, Glycine max
  modified_base (438)..(438): a, c, g, t, unknown, or other
  modified_base (441)..(442): a, c, g, t, unknown, or other
  modified_base (490)..(491): a, c, g, t, unknown, or other
  modified_base (514)..(515): a, c, g, t, unknown, or other
  modified_base (541)..(541): a, c, g, t, unknown, or other
  modified_base (547)..(547): a, c, g, t, unknown, or other
gctatgaccgtcgcatgccacgcgtaccgtaagcctcagtgaattcggcttcgagtactatacctatgcatgtagaagtgcgagttgtccttttgttaggtagttgcttagggaactaggttttcctaggccattcagtttgtagtcttcatctaaagggtgaagagacggatgacgaagtaacccgtttctacccttgatgaagctctaacccagcttccaaacctcttctttgagaacccaaaacgagtgcgcattcgtcgtccttccagaagattcagaccaaaccgctttccccgacaacttggagaaccccttcgagaactacccggattagtcccaaagtttcagtcatgaaacccaacaccaagtccttcttcccccaaccatgccctgacgccgatttccttcctctttggtccttatgcgggatgagcncanntacttaccttaggtgaaccaacgaccgacatgagaccctcctacaacnncttcaccctgggcgattgcccanngagaatcccagcttggaacccacttnactatnttggggttaaccctcacgacccaccaggaatctc

SEQ ID NO: 16136 - DNA, 438 bp, Glycine max
tcggggaattccaattccacattttcaagaaataaggaggcaaaaatgttcatatatgaattggaattatttgttttcttattaggcctatcctgaagccaaaggaaatgagatcggaattcctcggggaattccaattccacattttcaagaaataaggaggcaaaaatgttcatatatgaattggaattatttgttttcttattaggcctatcctgaagccaaaggaaatgagatcggaattcctcggggaattccaattccacattttcaagaaataaggaggcaaaaatgttcatatatgaattggaattatttgttttcttattaggcctatcctgaagccaaaggaaatgagatcggaattcctcggggaattccaattccacattttcaagaaataaggaggcaaaaatgttcatatatgaattggaatta

SEQ ID NO: 16137 - DNA, 338 bp, Glycine max
tgccttgaaaggagtttttttattagaagggaagcacacagaaattaagcacaacaaaaaccaaaaccttccgggccacattgcaatacttacaaaagaaggaccatgctcatacaccttggtgttcatgcttctcaccagaagcattcaaagccaaaacctcatcacctaataatctacataaagtctaaatgttctttgaacaccttcaacatattagaaaaagtgacaattccaactaagctacaatcatcctcaataacccacaagtagttcactctatgtgcaatggcctggatcatcacagcaaccagggagctctttggatgacacactat

SEQ ID NO: 16138 - DNA, 307 bp, Glycine max
ggccgctttgctggcgtaattacataggctacgtatatcctgacgagcatcagagaaatcgacgctgcaatcagtaagctgcgatcctgacgggactataactgtaccaagcagggtcagatgtgagctacaatatgcgctactatagtcatactctgaagagcatcgaagctgtgatctgttacctaaagaagcatgacgctacatatacctcacgctatatgttattcaacatcattgtacgtcgttcgatcaaaactacgctgtgatcacgtacccttgggaaactcacatcgctctgcgttat

SEQ ID NO: 16139 - DNA, 68 bp, Glycine max
gaattaaatcctgaccgataccgtcaggcgtaccagctatctctatatttagtcctattagagcttgg

SEQ ID NO: 16140 - DNA, 385 bp, Glycine max
tcggggaattccaattccatattttcaagaaataaggaggcaaaaatgtgcatataatgaattggaattatctgctttcttattaggcctatcctgaatccaaaggaaatgagatcggaattcctcggcgaatgccaactccacatgttcaagatacatagtctcaccattcgtcatatatgtgatgtctttattcgttcctgtagaagccctatgctccatcctgaacattttccacatgactttcaacattcttgtgagtgtcgcactgtacaatgtatgttactcaatctactacttcaatgcaatgcttgatctttaccaatgcagtagtattatcttatctctggttttgacttattgtgtaattctcttgatgcaagtt

SEQ ID NO: 16141 - DNA, 58 bp, Glycine max
aaaaaaaaaataaaaaaaaaaaaaaaaaaaaaaaaaaaaaaaaaaaaaaaaaaaaaaa

SEQ ID NO: 16142 - DNA, 269 bp, Glycine max
ctagtggaagcaactagttgtatcaaaatatgagtgttattaatagctttttgtgtatctaaatataagggtatgcttgtgttttcttttgtttttgcaaccacccttttgcttgagtggccactaggctcctgcatgtgcatttttatttttcttgttttggggtcacaactgccaaagcctagttgagtgtgtagctgttgtattttgtcttctacacatattgaataaaatgtgtgaaaccctattttgtatagggatgctaaaaa

SEQ ID NO: 16143 - DNA, 309 bp, Glycine max
tgaaactttcttacccagagcatgtattggtcaaacgggtatcatcagctgaagaaagttttgatagagcgctacaatcattttcctcatgagtgtcgatgattgaatttctttcaagagttgaatggtgtgaggtcttcccgtgcaatttttacaccttatcgtggctattgtattggttgcgtatcttagaacataatcaactgggtaatgtgtcatagtattcaaatttgttatgtttttggtttacttgagtcttgatgttgtaaaagctacatctgacattaatttttaaacatgttcatttaa

SEQ ID NO: 16144 - DNA, 95 bp, Glycine max
cgactagtgatctcgtcttacttgggaattaattactgaccggtacctgcgggggtaccagctcatggtatagcgagtcgtattaaagcttgtca

SEQ ID NO: 16145 - DNA, 418 bp, Glycine max
tcggtgaattccaattctacattttcaagaaataaggaggcgaaaatgttcatatatgaattggaattatttgttttcttattaggcctatcctgaagccaaaggaaatgagatcggaattcctcggggaattccaattccacattttcaagaaataaggaggcaaaaatgttcatatatgaattggaattatttgtttttttattaggcctatccttaatctatttgtaaagtgttcggaattctttgttttattcttttttctactattgtttttattattttttgtttattttatttatttttttaatttattttatattattttttttatgttttttatttttttttatttttttttttaaatttttctttattttttatttttttttttatttttattttttattatttattt

SEQ ID NO: 16146 - DNA, 418 bp, Glycine max
ttcgtcgagaacactcttttaacttcaacacctttaattggctgaacgaaattcagccacagaatatcaaagggagcgaagatgagtcaggagcagccaaggcgcccccaaggccaagaccccatcaaatacggcgacgtttttgacgtctacggtgaccttgcacagatgcccattgcaccggaagatgctgccatgatgcaaagcgcggaagctcgagtactcggaaaaacccaacccggcggagcttcttccgtcatgcaatccgccgccacaaggaatgaacaggctggtcttgtcggtcaccaggacgtcaccgacatcaccggcgaccatggcgtcacagtcacagaaactacattccatggaagacgcataataaccgaggctgttggtggccaggtagtggaacagtatg

SEQ ID NO: 16147 - DNA, 403 bp, Glycine max
cagctatgacgtatgactgcacgcgtcacgtcagctcgggcttcgcgagcttggatcgcgctctagcggtcgacgactagggagattgtcacacctgcgcattaattctctgtacgtatcctgaatgcgtaccacgatttcctacagagtgtagtccgaaagctcgaagtacccatggcaatagttagcaaatgcgagaactcgcacaccaatctaagatcatggacgccgactaacaacgctgcctactgcgaagagagaacagatgaccaagaactgaactacctgaaattcgtgcaattggggaccatgcaggctctgatgcgctgagacatgctgtactaatacgcctaggaacgcgcggatcctgcgaagccaggcgtctacaccgtggaggacgccg

SEQ ID NO: 16148 - DNA, 275 bp, Glycine max
aacttcactaatcttgaatgtgctttaaatctagctatgtactagatagtctcgttcaatgttagtgttcaaattgtggatgtgatttctaatattagtctactactctatatgtagaggcctttctttatgtggaataggtataacatgctgttatgcccgttttgtacttgaaaactatcttataatgaataagaatatgtgaattttgagtattaacaaactggtaaatcctactaataattaaattgcatctctatgttcataaacacgag

SEQ ID NO: 16149 - DNA, 249 bp, Glycine max
ggcaatacatatgtcatacagaatcagatcaataaggttgggcttcaatttcttttgagacatctgcatgattacaattgcttctcagaattctggcttcaaactctttcttctttccatgtacatgattaatttgcgctctatccagcagaagaaaaggccaaaatctagtagtacatgagatgatatgtcatgctatacatgtatctttttgttttggcttcttatatcaatataagaaattcttca

SEQ ID NO: 16150 - DNA, 219 bp, Glycine max
ttaatatacacctggtgataattaattgtttgttgttctgctctatagttgttcctagaaattctcaattccttatgttgttatgaatagtttcaagtgtaggaaattaattgatctacttagttgtaattagtaaatggtgcgtaatgatccatccctcatttctgcatctaactgtattaatggtaatgaattcaagcacattattgtttgtgataa

SEQ ID NO: 16151 - DNA, 160 bp, Glycine max
aataatttctctttcctttttccaatttctctgtcgtccttaggctccgtggtgtccctgtctagtttcggtactgtggaatcttgttaatgatgtgtacttcaattttattaatataatttcttcgttatgtaatagcaaattgttatttgtgtctgaa

SEQ ID NO: 16152 - DNA, 285 bp, Glycine max
tagacgacgttgaccctaggcttttatctctgtgtcgggggctctgaatgtgtcgtttctttcggtgtcgtttttgccttttttttctctttcccatgtcgtttatgggattgcggtgttatggatatcatttcgaaacccttcccctttgaatccttcctttcctttctaaaatatcagtatcatgtggttcgttcatagagtgaatggagtctgttatgagaaacatatcataatatgatgagctaccttcactaaacattaggacctctattattcgcctaa

SEQ ID NO: 16153 - DNA, 77 bp, Glycine max
aaaaaaaaataaaaaaaaaaaaaaaaaaaaaaaaaaaaaggaataaaaaaaaaaaaaaaaaaaaaaaaaaaaaaaaa

SEQ ID NO: 16154 - DNA, 246 bp, Glycine max
gaaaataagttcatataccatctatatttttcacattatgggcaccatcttcgagatttatactattaagctaatgcccattaagtgtacgacttttgcttttaaaactcgttgaaaatcagttttcatctgtttacaaatgcatgtggatatatgatacggaggtgatgtattacaccagtgtattgaataaacagcctgtaccaattaatgacatggtagatgcaaattgtacaagagcaacaa

SEQ ID NO: 16155 - DNA, 227 bp, Glycine max
gagggatggaattcatcgtttgcccaccaaatgaaaatgaaattgtttagaaaataagttaagagataaaatatctagagtttaatgctcagtctactttatgaatggtgcagtttgactcttatttagtagttgaattcagtagttcatgtgatactttatatttaaatatattttttatttttaataaatatttaatgttatgtttgtttttttaaaaaaaagac

SEQ ID NO: 16156 - DNA, 67 bp, Glycine max
  modified_base (11)..(11): a, c, g, t, unknown, or other
aaacaataaangcgttacagggaaacaaagccccaacagaggaagaatacatggaaatcaaaagatg

SEQ ID NO: 16157 - DNA, 317 bp, Glycine max
tcggggaattccaattccacattttcaagaaataaggaggcaaagatggtcatatatgaattggaattatttgttttcttattaggcctatcctgaagccaaaggaaatgagatcggaattcctcggggaattccaattccacattttcaagaaataaggaggcaaaaatgttcatatatgaattggaattatttggtttcttattaggcctatcctgaagccaaaggaaatgagatcggaattcctcggggaattccaattccacattttcaagaaataaggaggcaaaaatgttcatatatgaattggaaattat

SEQ ID NO: 16158 - DNA, 298 bp, Glycine max
cagctcctgattgcatgtgccaagcttagtagtgactagtagtagtatatacttaaattattattattgctcacggatgtagcctgtgtattttatagttcggtgtcttattatttaacattatatctagtgaaaataaaaaagctatttccactcctattcctaatggagtttgttatgttgttcttgataagagtgcttgagagttagttgtgtattgtgtgggagatgtatttatcagatgatggcattcttagcaggagccagccatattattaatttataattttataattca

SEQ ID NO: 16159 - DNA, 379 bp, Glycine max
tcggggaattccaattccacattttcaagaaataaggaggcaaaaatgggcatatatgaattggaattatttgttttcttattaggcctatcctgaagccaaaggaaatgagatcggaattcctcggggaattccaattccacattttcaagaaataaggaggcaaaaatgttcatatatgaattggaattatttgttttcttattaggcctatcctgaagccaaaggaaatgagatcggaattcctcggggaattccaattccacattttcaagaaataaggaggcaaaaatgttcatatatgaattggaattatttggtttcttattaagcctatccctaaacccaaagaaattagaatcgaattcctcgggggtac

SEQ ID NO: 16160 - DNA, 330 bp, Glycine max
caaggaactcaagaacggtcgcttggctatgttctccatgtttggtttctttgttcaggctattgtcactggcaagggccctattcagaacctttacgaccacgttgctgatcctgttgccaacaatgcttgggcttatgccactaactttgtccctggacaatgaggatgcctacatgcaatgcaatcttctgctcccttttgcagttcccttgtgtttaactccattttcactaatgtaactacacctgtgtagcagaaaaatctgtatgagaaccattatatttttatatattagaaatttgggtccccagaaaatatcaactctta

SEQ ID NO: 16161 - DNA, 95 bp, Glycine max
attttaagcagttattgttagtcttttctggttcagcttgtgtcaaagttcgttgtttatttggcaatgaatatctagaatcttgattttgaaaa

SEQ ID NO: 16162 - DNA, 221 bp, Glycine max
gaaagctgataacctatttcccaacaaaacattggctaaccagttgtttctagttgatgcatttaggaaaaatccagtttccgatttgcttgattgaggcatattcagtattctgcaagggttgtttctactttctctttccatgcaactattattattagttagttgaattgtagattgcacatttaggttgaatgaatgttttgtcttgcactgcaaaa

SEQ ID NO: 16163 - DNA, 393 bp, Glycine max
  modified_base (354)..(354): a, c, g, t, unknown, or other
acaacatatagccaacgtaacagaacccgttaatttgtgtattgaattaaaaattgagaggaatcgtgggtatcgtataaaaacactaaaaaactttcaagatggaagttatcctatagatgccacatttatgcctgttcgaaatgtaaatcatagtattcattcttatgtgaatgggaatgaaaaacaagagatactctttctcgaaatatggacaaatggaagtttaactcctaaggaagcgctttatgaagcctcccggaatttgattgatttatttattccctttttacacgcagaagaagataactttaatttagaaaacaatcaacacaaagttactttgcccctttntacttttcatgatatattggctaaggaaaaactaaggaa

SEQ ID NO: 16164 - DNA, 123 bp, Glycine max
cactgggtttcctgcttggtgtcacattcagtaactgaatgtgacagtgggtttcctgcttggtgtttctgttataactttatgatggtgggaatgctatactgttgatttgcagaatttaaa

SEQ ID NO: 16165 - DNA, 129 bp, Glycine max
tcttaagccattttgatttaggggttcctgatcaattcgggggggtctgaattggacgtcctcatttcttgtaacgaagctaattgaattttttttattatatatagtaatctttttagtgtataaaaa

SEQ ID NO: 16166 - DNA, 427 bp, Glycine max
  modified_base (78)..(78): a, c, g, t, unknown, or other
  modified_base (84)..(84): a, c, g, t, unknown, or other
  modified_base (98)..(98): a, c, g, t, unknown, or other
ttttctctttttacacttaaccatgggccgacttttaaccacaggaagcgacttcgccaccactccccagagcacccncgactntgttctaactcctncgacactcacccacttgactcgccccagtttcaactctcccgcgtcgacccggaccttctcaacatgctcaatgatgccgagaacgtcacggagcgtgaccctaccatgcagggtcttgactctgttattaagagtttcgaggaagaaatactttctccgcttccgaacccgaatctagcgtccgaagcagaggtgtttaatccgaacctagggtacttgttggaagcatccgacgacgagctagggttgcccgccgcggtagcgccccgcgaggatgcgacaaatccccaaacacttgattcgggccgggttggatctgacggaatgg

SEQ ID NO: 16167 - DNA, 233 bp, Glycine max
gttgagacaagctttaaattgtttgaactatttaacttacttttgaacttaggcgaagttatttctcatatgaacaatgttactttagatttaagttttgtcgagttttgtttgtggttttgtccgtgaatgttgtacttctgttatttggtccttgcatcggtgtattttttatccataggattttgcatcggtgttggttcgaactatttgggaattttgcttgaaagata

SEQ ID NO: 16168 - DNA, 224 bp, Glycine max
ctcgagccgattcggctcgagatgcactctagtttattccgtggtcatcactcatcagtggtgctacaaattacttttggcttttatgtaatcacccttaccaaggtgaaactctaattcagatagtagatcaacacccaaagcacctaagaaacagtatccaagttttgtccttagtttatctcttttcaatcataatatattagggtaatatcttggtctta

SEQ ID NO: 16169 - DNA, 59 bp, Glycine max
aaaaaataaaaaaaaaaaaaaaaaagaaaaaaaaaaaaaaaaaaaaagaaaaaaaaaaa

SEQ ID NO: 16170 - DNA, 169 bp, Glycine max
aaaaaataaaaattaaaaaaaaaaaaaaaaaaaaaaaaagagaaagagaaaaaaaaaaaaaaggtcaaaccaaaaaataaagacataaaaaactcattaattaattcctgaccgattcctgcaggcttaccaagctttccctttatcgagtgcgattacaactttacgc

SEQ ID NO: 16171 - DNA, 310 bp, Glycine max
tacgcctttattgttttacttaatggacaatggctgatttaacaatgactcaccacgggtagataattgtaatacttcaatatatctatggacgccacactagttacacagctacattgaatgtaaagtaacacttagcaaaacagcattcaagaccacttattaaacaaatatccgaacggtcgatgaatcgacagcagcttatatacctaatggtgtagcatctgaagcctttttcctgaaattcacagcaggactctttaactgggactatgatgcaaattatgatgcataaaatagccaagattat

SEQ ID NO: 16172 - DNA, 199 bp, Glycine max
gcaggatccactttgagcatttactttgctttttgtaggctatttttcagtgtttccggcagacttttaaatatttctttttgcaatgtactcagaagtgcaggccatatgattatgaatgtaagagaatctttacattgatctatgcttatttgagatgtacactcgcaataaaactgtattcccgtgtgccctttaa

SEQ ID NO: 16173 - DNA, 378 bp, Glycine max
tcggggaattccaattccacattttcaagaaataaggaggcaaaaatgttcatatatgaattggaattatttgttttcttattaggcctatcctgaagccaaaggaaatgagatcggaattcctcggggaattccaattccacattttcaagaaataaggaggcaaaaatgttcatatatgaattggaattatttgttttcttattaagcctatcctgaagccaaaggaaatgagatcggaattcctcggggaattccaattccacattttcaagaaataaggaggcaaaaatgttcatatatgaattggaattatttggtttcttattaagcctatcctgaagccaaaggaaatgagatcggaattcctcgggggta

SEQ ID NO: 16174 - DNA, 298 bp, Glycine max
cactgttggacaaaaaccaagtatggccgaatactatttggatgatactagcgaagtaatcaagttacttgaaggacttgcaactgcagcaggaccttctgcgtccataatttatcaggatttgtgaggaacattatagaaactgatacagaaaaacaatcttgtacagaatgatatactttcataggtggattttaaaaggtcaatacttagaaatttacagattagcttattcatgtttttcacataaaaaaaaaaataaaaaagaaaagaaaagaagaaaaaaaaaaaaataaaa

SEQ ID NO: 16175 - DNA, 339 bp, Glycine max
aaacaggccttcttcggcgaaacacaagctgagggtggttttgatccaaatgcagtggccacggctaacatcttagagactgcaacacctgtgattgacgggaagccatactattttttgtctgtgttgacaagaactgctgatggagatgaaggtggcaagcaccacataattagagcaactgtaaaagatggaaaactgttcatttgcaaggctcaagctggagacaagaggtggtttaagggagcaagaagatttgtggagagcgcagcaagttctttcagtgttgcttaaaaaacttcaacagcgggttatatatatatatgctatgtgtaaatc

SEQ ID NO: 16176 - DNA, 140 bp, Glycine max
ggattctttaaaacgggcggcgacttatgaacttggtgacccgggaattaaatcccggccggtacctggaaggcttccaacttttccttatatgaagcggattaaaagcttggccggaattcatgggtcataagttggtt

SEQ ID NO: 16177 - DNA, 223 bp, Glycine max
tcgatcctgggccccttagagcggcccttccacttatgacctcctcaactgggcaattaattacggaccgtaacctgcaggcgtacgagcttgtgctatatggagtgcaattagagctcgacatagccagggacatagccattacccgtcataaagtgtaatacactcacaatttcacacttcatactagccttaaacagcatacgtgaagtctgtggtgcct

SEQ ID NO: 16178 - DNA, 364 bp, Glycine max
tcggggaattccaattccacattttcaagaaataaggaggcaaaaatgttgatatatgaattggaattatttgttttcttattaggcctatcctgaagccaaaggaaatgagatcggaattcctcggggaattccaattccacattttcaagaaataaggaggcaaaaatgttcatatatgaattggaattatttgttttcttattaggcctatcctgaagccaaaggaaatgagatcggaattcctcggggaattccaattccacattttcaagaaataaggaggcaaaaatgttcatatatgaattggaattatttgttttcttattaagcctatcctgaagccaaaagaaatgagatcgga

SEQ ID NO: 16179 - DNA, 109 bp, Glycine max
tgtcagttgattcatgcacagggtgttgcaagtgtgtttgttgtacatgtaaactataatgtagtttgttattttcctgcactgtgtatgaaatgtttgttttgccaaa

SEQ ID NO: 16180 - DNA, 204 bp, Glycine max
tgaaaatcaagctgagttggaaattaaaaggccaagttgacaacaggtttaggttatcatttagcaaaacatttaaggtttgtatatgacctaacagaacaggacattagttaaagatgaaaacccatccaaacagggggttacacacgtacttctcttttcctatgtattgcggtgccttatataaaatttatcaattattga

SEQ ID NO: 16181 - DNA, 337 bp, Glycine max
ataatttcctttaccatatccaccttcccactaactcgaatgtgatccttacaagatgggatccccattacaattttatatcactctttcatgatcacactgataagtctctacactcaatattaacctactgactcctctccacatatatacccatacctctctcaatctcctacatttcatccatctcctgtaacactttttccactcatgaccactacaccatactcatctactttaacaaccccgaaaccttctcataaaatacacatacttactatgatacatcgtataacattactcgcttcacattctccaccctaaaatgactctctta

SEQ ID NO: 16182 - DNA, 292 bp, Glycine max
tcgttgaattccaactccacttaatcaagagatatggaggcttaaatgttgagatgtgaatcgcaattatttgagttctcatatagcctatcctgtaaccctaggatatgagatcggaattcctagtcgtattacaactccacatgatcaagaaatatggatgccatactgtccatatattaattggaatctatactttcacatattaagcctatcctgaagccgggcgaactgcgactagagtgcttggcgacccgggaattaaatacggacctgtaccttcaggcctacc

SEQ ID NO: 16183 - DNA, 372 bp, Glycine max
  modified_base (334)..(334): a, c, g, t, unknown, or other
gaaggatctcaaaagtggttgcaaaatcctcataggaggtgatagcagatgggcaagaataatgctgttctcttaacactggtttgttgtatgtgttcataaacaggttagggtccatgtcaaaaccttattgtcccacttagtatgtattatattaaatgattgtaagagtttcagagttatgctgcccttttgcaatgtattcttttgatttacttaaacttgtttccaaaataggagtaataggatattctgttttctttctctttaaggtttatgtgttcaacacatgcaataaatctaaagggtatggtcattattggccttaacgaanaaaaaaaaaaaagggcgggccgccactagtgagctcgt

SEQ ID NO: 16184 - DNA, 196 bp, Glycine max
ctgggattaattttttgctttccagtattgggaattgagaagtaggacaacgggatttgatttttcagataaagatgtactatgattctgtcatccaccaacaaattacagaatcatagtacatctttatctgaaatttgttggtggatgacattcaatctgtctaataataaaattctatactttcacatttaaa

SEQ ID NO: 16185 - DNA, 210 bp, Glycine max
ctggatgaggcgtcaatgtgtcattctgatccttccgtccagcattctctaattgccttatatactaatccaccatcctccaaatagatcagcgcttttgcaaccattgattcgagtgattcatagtccactctgctcatctgctctctcttcttacagcctacgactcaggaccgccgccgactagtcgagctcgtccacccgctaatt

SEQ ID NO: 16186 - DNA, 420 bp, Glycine max
caccaatgttgccgtaaacatgttgttcacttttgctattgctcaagttttcctagccatgctttgccacttgaagtttggccttttcttcttctttgctgcatttgtgctcatcatgaccctcttcattgccctgttgttgcctgagacaaagaacatccccattgaagaaatgcatttagtgtggaggtcacattggttttggtcaaagattgttccacaggttgataatgatcgcaagccaactactgctcagagttgaatcaaggatgcccattatactgtatgtatatgtgtatgtatatgtgtatgtatatatgtatatgtatatatatatatattgtatatatatgtgtgtatatatatatatataaggactgaaaatgaaaagaaaaaatagagcttgagtccctatgtatc

SEQ ID NO: 16187 - DNA, 286 bp, Glycine max
ataaataaccattgatgtgatttagttcccattatgtgctggtttccgtatattatgtgttgtttcttgattgtagttttcgtagattcttcgttccttgttgtaatgttcttctaggcaatgaattgcatatttcaaacattatccaaaacaccaaagtgtcacaatagctcgagccttctcttgcattttgatttcaatcaaggaactggctcgcattggtagattaaaaaaaaaaaaaataaaaaaaaaataaattaatataaactaaaataaaaaaaggagt

SEQ ID NO: 16188 - DNA, 204 bp, Glycine max
  modified_base (204)..(204): a, c, g, t, unknown, or other
agtagatcgacttagcaactgaagaagcaaggttaagctgcagcagacacagatcgacagagcagggtgttaaaaatatagttaattaaatctgtgtatcattaattatggtttgttatgtaatatatatttcaaacaaagttgtgagatgtcttaagtataaattatgaacagaaacgataataactctaaattatgttgcan

SEQ ID NO: 16189 - DNA, 66 bp, Glycine max
aaaaaaaaaaaaaaaaaaaaaacaaaaaaaaaaaaagaaaaggaaaaaaaaaaaaaaaaaaaaaaa

SEQ ID NO: 16190 - DNA, 291 bp, Glycine max
gtgcaagtcactgagaagttgctagctatcaatctcaactttctggcagccctgataatattccaaatgtatatcacgataggcttatcaggcaagaccctttcagattccatttaggggaaatagaatttgctaccttcttttccattcccccttttttgtacagtgcactctttttaccttaattcaggatttaaggtgtgtgtgtgctggtgtttgttaatttctaacatgtgcaagtatataatataatacaatggagtggatttcttattaaaaaacagaaactgc

SEQ ID NO: 16191 - DNA, 402 bp, Glycine max
aaaaaaaagcctcgtctctcgtgccgattctgcaggacaattgcgttcacccaacctaattgcaattagtgtataagatgagtacgttggatgcaacaagggctgaacttggtcttcttgttttatatttgggcaaggctgaagcaagggacaaaatatgcagggcaatacaatatggttccaaacttttgagtaacggggaacctggtactgctcagaatgtcgacaaaacaaccagcttggcacgaaaagtcttgcgtctttttaaagattgtcaatgacctacatgctttgataagtccaacaccacagggcacttgcctaccgctaattctgttgggaaagttcaagaatgcactactctgcactttcttggttcttgatcaatttgagtggcttggc

SEQ ID NO: 16192 - DNA, 185 bp, Glycine max
  modified_base (5)..(5): a, c, g, t, unknown, or other
tcggngaattccaattccacattttcaagaaataaggaggcaaaaatgttgatatatgaattggaattatttgttttcttattaggcctatcctgaagccaaaggaaatgagatcggaattcctcggggaattccaatttcacattttcaagaaattaggggggcaaaatggtccttttttgaat

SEQ ID NO: 16193 - DNA, 161 bp, Glycine max
tatgacgtcgcctgccctcagcctcgaattcgggttcaggtttttttttttttttttttttttttttttggataatatttggctctgtacttctcattgatcgattatggccgaatgccaatcgaaattagtatatcaatgaagtcttctgtttacattaa

SEQ ID NO: 16194 - DNA, 258 bp, Glycine max
cccgtttgagtcccagaactgcctatacatagtcgcggcagagaccccaaccaagatggccgttatcaagtatctggggtaaaatgagactaaccctcacatcttacacacatacacactatcccaatccaactctcgaaccgtctcacctgcctactaactccactaactcacattaattccctttcgatcactatcccatgtccatcaatgccacctgtcgtacaatcttcattaatgaatcaggcaacacacctg

SEQ ID NO: 16195 - DNA, 299 bp, Glycine max
aatgccgcattacactctatctcataatgcacgccttgcattcctatttattcaacatctcactcatattcagccaccatattgaccacatgatcactatatcattctcttactcactgcactcaaacattccggtcctctactcgttatcatgtcaatcacagacttaattacggacctgtacctacacacgtaccaactctccatataacatgtcatcttacagcttggcgtagtcctggacctagctaaatgccgtgttaaattcgtatccccatacaattccacacaacatacaa

SEQ ID NO: 16196 - DNA, 172 bp, Glycine max
gccaactctttgtattataatgaatgtggttgtcctaaggaggattgggttggatcattttcgttcattacactttatctcattattttcggcttgaagtcctattaattcaacatgtaactcatttttagccacaaaattgacaacatgatgagcataagattttcttaaa

SEQ ID NO: 16197 - DNA, 300 bp, Glycine max
  modified_base (277)..(300): a, c, g, t, unknown, or other
caaactcccaaagtggcgaagcaagacaagaagaaaaagcgacgcggacgcgctcacaagagaatgcaatacaaccgccgattcgtcaccgccgtggtgggattcggaaagaagcgtggaccaaactcctcggagaagtgagggaggcgtgttgaagatcatggtttttcttagtttgtgaaatgtatcacttgttttgatttgattgatgaactcaaacttttatgatagttcttattatggttcaatgaaggagttttttgctaaaaaaaaaaannnnnnnnnnnnnnnnnnnnnnnn

SEQ ID NO: 16198 - DNA, 171 bp, Glycine max
gtaattcggttattggattcatgctacatgagtgtgtaaagaggtaatgggggtgatgactttcttggtcattgtcgtggctttgtgatttctattgcaaatgttgtcttgtaactttgttgtattttcagcaatatatgatatatgatatctatcttaatttctatctta

SEQ ID NO: 16199 - DNA, 469 bp, Glycine max
ctatgacgtcgaatgcacccttccttaacctcggaattggcttcagccaaaattaaaattcattcaagttaatcccttcatgaaggttggctaagggaatgttggcttaagccctttcgtttgcccttcttttaactgcattaaaaaccaaaaaggctaaatcatggcgtaatggtcccggttggcttggaagcctaatagctgactatggggtgcctcttatggcccaagttggaacaggtgtatcctacataccagctggaagtgttccacatggtatttcaaggcgtctgtttagcccaaatccatggtcaccgggtgcatatgagaattggactgttattaaggatatggttcatgttcctgttgtgtacataatcggagcatttatcccagcaaccatgattgcagtactttattactttgaccatagtgtggcttcccagcttgcccagcagaaagagttcaa

SEQ ID NO: 16200 - DNA, 418 bp, Glycine max
  modified_base (386)..(386): a, c, g, t, unknown, or other
tttttctctctctacactcaccaatggacgactctcacaacaggaagcgacttcgccaccactccccaaagcacccccgactttgttctaactcctccgacactcacccacttgactcgccccagtttcaactctcccgcgtcgacccggaccttctcaacatgctcaatgatgccgagaacgtcacggagcgtgaccctaccatgcagggtcttgactctgttattaagagtttcgaggaagaaatactttctccgcttccgaacccgaatctagcgtccgaagcagaggtgtttaatccgaacctagggtacttgttggaagcatccgacgacgagctagggttgccgccggcggtagcgcccggcgaggatgcgacaaatccncaaacacttgattcgggccgggttggatctga

SEQ ID NO: 16201 - DNA, 204 bp, Glycine max; identical to SEQ ID NO: 16180

SEQ ID NO: 16202 - DNA, 308 bp, Glycine max
ggattccaattccacattttcaagaaataaggaggcataaatgttgatatatgaattggaattatttgttttctcattaggcctatcctgaagccaaaggaaatgagatcggaattcctcggggaattccaattccacattttcaagaaataaggaggcacaaatgttcatatatgaattggaattatttgttgtcttattatgcctatcctgaagccaaaagacatgatatcggaattactcggcgaattccaattccacattttcaagagataaggaggcaaaaatggccatatttgaataggaat

SEQ ID NO: 16203 - DNA, 97 bp, Glycine max
ggtataaattgtgggaactggggagggtttatgttctatgttgttttgtactccaatcttttatgaatgtactggggaaacttgttttgtttgatta

SEQ ID NO: 16204 - DNA, 372 bp, Glycine max
  modified_base (250)..(250): a, c, g, t, unknown, or other
  modified_base (307)..(307): a, c, g, t, unknown, or other
  modified_base (330)..(330): a, c, g, t, unknown, or other
tcggggaattccaattccacattttcaagaaataaggaggcaaaaatgttcggtgtgaattggaattatttgttttcttattaggcctatcctgaagccaaaggaaatgagatcggaattcctcggggaattccaattccacattttcaagaaataaggaggcaaaaatgttcatatatgaattggaattatttgttttcttattaggcctatcctgaagccaaaggaaatgagatcggaattcctcggngaattccaattccacattttcaagaaataaggaggcaaaaatgttcatatatgaatnggaaattattgttttcttattangcctatcctgaagccaaaggaaatgagatcggaattcctcgg

SEQ ID NO: 16205 - DNA, 231 bp, Glycine max
ccgatatcctcttctattagctacacactggtactaatatcgtggcattattgctgtgtactgggctgtattataccggggtggactgataggtttaacttcatgctgtctaagatggttatcggcacatagattgaactcagatactaagccggtcgcgtagagattgatttatgatgagactaatgatttaaagaacttatattaattccagaagacttattgctcacc

SEQ ID NO: 16206 - DNA, 54 bp, Glycine max
aaaaaaaaaaaaaaaaaaaaaaaaaaaaaaaaaaaaaaaggggggaaaaaaaaa

SEQ ID NO: 16207 - DNA, 257 bp, Glycine max
gagcttctgctacaatctagcgtctagtgatcctctaaacactccggacaacaggtccccaccgtacctgcgaacactccaacttttcctatcgcgattctgattatagctaaccctattcatacacataactacaccctgtctgaaaatgatgtccactcacaatttcacacaacatactatccggaaccatacagtgtcacccctggatatcctaatcagttatctaacttacacttatctacttacactcactg

SEQ ID NO: 16208 - DNA, 73 bp, Glycine max
cttccatgtatatttgagagtggctttgatttcagtgaatgtgggcccttttgtattaaaaaaaaaaaaaata

SEQ ID NO: 16209 - DNA, 350 bp, Glycine max
  modified_base (43)..(43): a, c, g, t, unknown, or other
tcggtgaattccaattccacattttcaagagatatggaggcanaaatgttcaggtatgaatcggaatctattgtcctcttattatgcctatcctgaagccaaaggaaatgagatcggtacttctcggagaattccaattccacattctcaagatataaggaggcatacatgttcatatatgaatgggaattacttgtatcattattaagcctatcctgaagccaaatgaaatgagatcggaattcctcggagaattccaattccacattctcaagaaataacgaggcagatatgttcatatatgaattggaattattagttaacttattaagcctatcctggaacccaaa

SEQ ID NO: 16210 - DNA, 261 bp, Glycine max
tccattgaacatggcaagtttagaggaaaagggaatccactttgattcccagatcatgatgtgctcttcaaatttttggaaaccttctactgaagcccaaattagagatgacatggcttttaaaaaatagaagacatgttttagataacagttgaacctaaaacctggagtggaatatgatgagagcgattttaaccaaataaaaataaaaaaaaggccggcgccgaattagtgagctcgtcaacccggaaattaattccg

SEQ ID NO: 16211 - DNA, 261 bp, Glycine max
gcatgcacgcgtacgctagctgatcctatcgctggaggccaacacgacattatgaagacaccacgaggcgtaaatgatcatagatgaagggcaaggatgaccgatcatataaggcctatacagaagccaacggatatgaaatcgtgcttccttggggaacttcaatagcacatttccaagagctaacgaggccctactgtccatatatgacttgccattatgatgacacctaatacgcctaatctagatccatacgcaatg

SEQ ID NO: 16212 - DNA, 347 bp, Glycine max
tatactgaagccaacggaaatgaaatcgtacttcactcgcgaactccaataccatattttcaagaactatcgagagcacaactgttcatatatgacttgccattatgagaacacctattacgcctattctaaatccaaacgcaatgagatcggaattactaaggaaattgcaattccacatttacaagcaatatggatgcaaaacttttcatatatgaattgatcacatatatgctcttattaatcctatactgaatccaaatgatatgagatcagaattactcgtagataccgagctcaaataatctatgtgagacatattaaattcgtaatcatatcatatctga

SEQ ID NO: 16213 - DNA, 413 bp, Glycine max
gacaaaggcagcaaatgattcgggtgcggagctgcagaagcagatgggaaggctctctgctgagtttccacatgacaacaaaagggctgccaaaggcagagccaaaatcaacaccaaagttggcataggtggtggtgtctattcagcttcacacagagtgactccactgaatggaacatatgagtatgggttagctgcaccatatgactatcttgttgacaacatgggtgactattattggacatgatctatatggaatgatctgcaagatgctgcattcaacttggctatacactattttgtgctggttttttattttgcccgcctaaatgcttggtctttttgtactacttttttaaagttacaagagatcaaagtcattttttgcgttgtcaagatatcttgtgaatagc

SEQ ID NO: 16214 - DNA, 399 bp, Glycine max
tgcgtcccttctaaggaccttgatggggccggagctttcggcggcgttcggagtgagcgaggacacgttgcggcgcgctgttgatgctcagcatgaggctgtgatactgccatcagcatgggctgcaccaccggaaaatgcagggaagctgaagatggaagaagagccaaatgctattagaagctttgccaatgatgtggttatggatgttttttaatttgaacacttgatttggaataggggttatttggtagtgctagtgcctagtggaattctgtgttgagttttttgttctttatatttagttgagatgtgtgttgtgttctcgagttgtgaataaaatctactttttttgtccaaaaaaaataatattcgatggtgtcaacggacatgccgatt

SEQ ID NO: 16215 - DNA, 179 bp, Glycine max
cttctatcgagatcttcaactaggtatcttcacaacctctattttggggacttgggccacaatgtcttgcagcttggacactttcaatgttaagtataattgaactatactcacgtcaaaattctctccacttgcacaaattacatgcatgctgaaactacactaatagccaaatgcta

SEQ ID NO: 16216 - DNA, 457 bp, Glycine max
attcccgggtcgacccacgcgtccggtaatgaaaaacaagtgctaagaagctccgtgtctctattctcaaacatgtagcaccaaacggaagttggcgtccaagttttataacactaatactgcatataatattattataatatacataacaacagttattgatattgttgtgattgtgtgtgattttggtgtcgtccctttttcttatgtttaaggttgtacggagtttatgtgttgattcaattcgtcgataagaaaccttagtttgatattttgattggttctgtggagagtttttttttctttggtgtggattttggtttgtgctgtttttggttgtgaataacaatggccgatgaaggaaacaaaagcaataacttctattcgatcttggggttgaagaaggaatgcactgaaatggaactaaaagatgcttataggaaacttgcaaaggaat

SEQ ID NO: 16217 - DNA, 263 bp, Glycine max
gtgttattttaaaaaaaaacacacacttcacacatcattacgacaattaaaagaggtgtggaaatgatgtgtgaagtgtgtgttattttaaaaaaaaacaagaagtgccgatggtcagagctgaaaaacgcgtgcaatcgacgtcatgagcacaattgtagagaagatactaaccgataaaaaaaaaggggcgaccaccaattagggagctattggacccgggaattatttccggaccggtacttgaaggcgtacaagttttc

SEQ ID NO: 16218 - DNA, 92 bp, Glycine max
actaaaaaactcataaacccataaattaattccctacctttaccttcaaccataccatctttccctatagtgagtccaattatatcttctct

SEQ ID NO: 16219 - DNA, 264 bp, Glycine max
  modified_base (26)..(26): a, c, g, t, unknown, or other
  modified_base (57)..(57): a, c, g, t, unknown, or other
  modified_base (110)..(110): a, c, g, t, unknown, or other
  modified_base (115)..(115): a, c, g, t, unknown, or other
ctaacctcacacattcttccactccncttcgttctattatcgacaccaccactcttncaccccgctcgttttttataaacttactcgccaccacaatttcctaccattcntacantctcatactttatgtaacaactccaatcaccaaccactttttacccaccatttcttataccacccatttttaaatctaattcacctccatcatcacctcttccacttttttccccttttatccacaaacatatcttcacttcatcacca

SEQ ID NO: 16220 - DNA, 277 bp, Glycine max
tcggtgaattccaattccacattttcaaaaaatataagagccaaaatgggcgtgttttaatttgaaataattcgtttcttaataaaccctttcttgaacccaaagaaaataaaaccgaaatccccggggaatttccatttcacattttcaaaaaataaagaagcaaaaattttcatatattaattggaaatatttggtttcttattaagcctattcttaaacccaaagaaattaaatccgaatttcttcgggaaatcccattccacatttttaaaaa

SEQ ID NO: 16221 - DNA, 330 bp, Glycine max
tcggggaattgcaattccacattctcaagaaataaagaggcagaagcggtcatatgtgaacaggaattctaggttgacttattaggactatcctgaaaccaaacgaaatgagatcggaattcctgggggaaattcactgccccatttccaagaaatgacgcggcaaagctgttcatatatgaattggaattatttgaatccttattaggcctatcctggagccaagggaaatgagatcggaagtgcttatggaattacaattgcacattgtcaagaaataacgaagctaaaatgtgcatatatgaagtgggaatagttggtttcttatta

SEQ ID NO: 16222 - DNA, 123 bp, Glycine max
ccttaagtcagttctggcaaacatgcatggccctgctcttacttacactctggctatttgtaaatctgtacagctctttgaattatcgaaatgatctacgcactgtgagttgttttaaacgta

SEQ ID NO: 16223 - DNA, 146 bp, Glycine max
tcactcactgacttcctacaccactttcaccattttcactcaacttcttcataacgcttattttgaaaaatatccatatcatgatactccctttacatctcataactactctataatattctattcacttaactaaaacacattac

SEQ ID NO: 16224 - DNA, 167 bp, Glycine max
tgaaattctgagttctaacgccactaaccctatgctgacgcgacttcttgagaacgtgtaagaggctcaaatatctggttgatgagtgtccttttgcatttgtgaactagtatgtaatattttattcacttaaataaagcgcattactatgtgcaatgagtgtgttt

SEQ ID NO: 16225 - DNA, 146 bp, Glycine max
tgaaattctgagttctaacgccactttccctattctgactcgacttcttgagaacgataagtgggtcaaatatgtggttgatgagtgtcctcttgcatatatgaactagtatgtaatattttattcacttaaataaagcgcattac

SEQ ID NO: 16226 - DNA, 96 bp, Glycine max
gccgactagtgagctggtttacccgagaatcaatgctggaccggtacatgaagcgtgacaagctttgattatagtgagtcgcattatagcttgcct

SEQ ID NO: 16227 - DNA, 368 bp, Glycine max
ctgggaaccagcctgcgggttatgacacccttgactatgcaaaagggtaccttgccgataaggcaagggatgtaaaggagagggcaaaggattatggaagttatgctcaaggtagaattaatgaggccacacaaggagcttattagtcatgcctgcttatatatgcatgagtgtatgaggttgaattgaaggtggtgatggtggtggtacccttgtggatttgcatgttcaagttctgcagtttattttgaatcttgtttgcattgctctatgtagttctggtttttgtaatctcgtttgtttttgaagctaaatcgttcgccttatttgtgtaaccatcatgttaataaatctcttttgtagctaaa

SEQ ID NO: 16228 - DNA, 286 bp, Glycine max
ttacattagctctggcaggcttctactcctcttcgttctatcatctacaccaccactctttgacccatttgatcttttctagatttaatctcctctacaattttctactgctcgtgcatgtccagactttatgtggcaactccaatcatcaactacttttttccctccagtttttgttccactctgtttttaatttaattcaacttctccatcgtcatttccacttttttcctcgttttctcataaactttgctttcctggttcaccactcttgaaaccttcttat

SEQ ID NO: 16229 - DNA, 377 bp, Glycine max
ggtcctgaattcccggatcgacccacgcgtccaaaaaaacgcacaggttgaaattgatgctctatccatacgtctcaacatcaatgggtgcaaagtgatcatatcccttggtttcagggctccagcatgtgtccgagtcgcaaatgaacttgcaagaggaagtgccaaagctgcaaagatctctattattgactcagtgctcacatcattggccatcgaattccttctgcttatattcttcttatcttttagagaaagacttgcatatatatctacctcaaataaagacgtcgcctttgctgttggggatttgacaccttcgacgtcggtctctatattactgaacagtgttcaacctgtactctcacgagtcgcta

SEQ ID NO: 16230 - DNA, 78 bp, Glycine max
aaaaaaaaaaaagattaaaaaaaaataaaaaaaaagaaaaaaagaaaaaaataaaaaaaaaaaaaaaaaaaaaaaaaa

SEQ ID NO: 16231 - DNA, 74 bp, Glycine max
aaaaaaaaaaaatatttactaaaaaataatattaaagacataatagaaaattataataagaaaaaaaagaataa

SEQ ID NO: 16232 - DNA, 449 bp, Glycine max
cccaatcacgtaatatctccatattccaccaaaaatgaatatcagcatcttctggactctctaactgttatgttccttcaccacctcatacctaccttcatccatcacttatttaatactccataataaaaataaccctcttgaaaatgctgccacatattatatcttgtcagacataacatcatttgatggaataagatcaaccccaactttaaattaaatatgccctctcactgtgatacaatctctcaatgagctctacaaatggattgcaacaatcatctcgtccccatatcgaatccgttttatcgccgaatgccatcctttgagccttaagttcgattcatttccacttataatgctgtctgttggaattcctacctaatggtctcttttggaagatctaccacaaagacccttgctttgttttaaaaaaaatttttgtttta

SEQ ID NO: 16233 - DNA, 86 bp, Glycine max
aaaaaaaaaaaaataaaaaaaaaaaaaaaaaaaaaaaaaaaaagggaaaaaaaaaaaaaaaaaaaaaaaaaaaaaaagaaaaaaaa

SEQ ID NO: 16234 - DNA, 95 bp, Glycine max
caactagggagctccccaacccggaaataaattccgaaccggaacctgaaggcgtaccacctttccctatagaaagccgtataaaaacttggcgg

SEQ ID NO: 16235 - DNA, 474 bp, Glycine max
cgacccacgcgtccgcccacacattttaccaaatacttttataggttttatgcgtcccttctctctttgtcttgcgccatattttccaaccaaaataattattaaaaccaaacgtagctaggcaccacttctaggaatggcaagtgagatatttcttgcccttctgatcacaacctttgtggttgcagcctctgctggtaacttcaaccaagactttgagataacatggggtgatggtcgtgccaaaatcctcaatagtggggaacttctcaccttgtccctagacaagacctctgactctggatttcgttctaagaatgaatacttgtttggaaaaattgacatgcaactaaaactcgtgcctggtaactctgcaggcacaatcacagcttattatctatcttctcttggggatactcatgatgaaattgattttgaatttcttggtaacttgagtggtgatccttatattct

SEQ ID NO: 16236 - DNA, 311 bp, Glycine max
aaaatttaaaaatttaaaaaaaaaaaaaaaaaaaagggaaaaggggaaaaaaaaaaaaaaaaaaaaaaaaaaaaaaaaaaaaaaaaaaaaaaaaaaaaaaaaaaaaaaaaaagggccgccccccaactagggaccccgtcaacccggaaataaattccgacccggaccctgcaggcgacccacctttccctataggaagtcgaataaaacctgggcgaaaaaatggaaaaacctgtttcctgtgaaaaattgttatcccttaacaatcccacacaaaatacaacccgaaaccataaagtgaaaaccctggg

SEQ ID NO: 16237 - DNA, 134 bp, Glycine max
cgctactggagcgacattcaccaccctttttagattctaatccaggcgctattattccagagcacgaaaggtatttcgccaatctaaggtgtcaacgtaaaagccgcttttccttctcgcgcgaaatgtaagct

SEQ ID NO: 16238 - DNA, 352 bp, Glycine max
aacgtacgacataacatgttagaattttgccagcgatagggcagaaaccgggataaggtggtttagcaggcgggatacgatatgctaagagacactgacgtgcattacaaaattggataatgatgctggatgtagattaaccagactggattgtctatataccaggcgctatcatgtgatagctcgatagggcgcgcgccagttgatagtgtgaacgtaaatggagatttgtcttcgtgcgtgaattgcaagagctggattaatgaatatagctaaggctgtagagatgtgagttgcgtatagggcgctctttcgaagcttggctgagtgaactaatgcgctggtgagttcg

SEQ ID NO: 16239 - DNA, 71 bp, Glycine max
aaaaaaaaaaaaaaaaataaaaaaaaaaaaaaaaaaaaaaaaaaaaaaaaggaaaaaaaaaaaaaaaaaaa

SEQ ID NO: 16240 - DNA, 172 bp, Glycine max
ccgggtcgacaaaggtaccattaccttgatgtgcaaaacacaaatagtgcctgaaaatactagaaacgatacgcgccttcactatgatgatacaccatgtgtaatcatggacgatcgctattgcgctttgcacgcaagaccttgactatcacctggatacctgctcgatctt

SEQ ID NO: 16241 - DNA, 319 bp, Glycine max
tcttgaagagcattcactaagttgattgttgtgttgtagtgtgatttactagacttgcctgctgttacacaactggagaaggatgccaaatatgctctgttatatcagcttcttaagatttttcttacccagaggctggatgcatacttagactatcatgctgccaattccaccttgttgaaaagttatggtaagcactgtttatgaatgattatcatttatcaatagttacatatacagggttcttttctactttatgttactatctaaatgttttgatgttatgatgctcttttaggccttgtgcatgaagaatgca

SEQ ID NO: 16242 - DNA, 356 bp, Glycine max
ctcgagccgctcgagccgtgcgattatgctagttttgatggtttgattaccaagcaagttatgagcaaaatggcagaaatgataaacagtctttgtggtggtgatgcaaaattgatgcgtgaaaggacacacctgctgttggcttgttgttcaaggatggcaatttgtaagaaagatgtttggagagttgaatgtggaatcccttctggatttccgctcacagttatttgcaatagcatttttaatgagatgctcattagatatagctatgaaaaattactgcgccaggctagagctccaagcatgtttttacaatccttcaaaaattttggttctttgtgtgggtatggggatga

SEQ ID NO: 16243 - DNA, 336 bp, Glycine max
attctgtccttgtccttgtacaggttactagatatagttgaataatgatgctaacaaaacagtgacttgttcttaaaaccaatttttttatgcagtgccacaacggtcacacactttgctcaacttgcaagacaagggtacacaatcgatgcccaacttgccggcaggaactcggtgatataaggtgtttggcattagagaagatagcagaatcacttgaactgccttgcagatacatttctcttgggtgtccagagatatttccctattacagcaaacttaaacatgaggctatttgtaacttcagaccatacaactgcccttatgccgggtcag

SEQ ID NO: 16244 - DNA, 266 bp, Glycine max
aggaaaaccatcgagaaaccaaaaaccaaaatcaatttagaggaaaaagttggaagaagcatggattctaggcggcgtggtaaaaacgcatctatgcaacgcaagttgcaacaacttcgatcggttacaaattccagtgctgtgaacaaagcctcaattattgtggatgccaccagatacatagaggagctgaagcaaaaagtggatggattgaactcaaagctaggaaccgcggaatcatcaatctcccaagacgaactacccat

SEQ ID NO: 16245 - DNA, 370 bp, Glycine max
cattcttgtttgcttcccaagtctctcgaagcatctttctttctcttcctgcagaagctatccgtgttacttgttcccaagtctccaacaagcaaagtacatggttgatttggaaatccaggtccccagcgcattcgacccgtttgccgaggcgagagaatcagatgcccccggggcaaaggagtatgtgcacatacgaattcagcagaggaatggaaagaagagtctgacaacagtgcaagggctgaagaaggagttcagctacgagaagatcctcaaggacctcaagaaggacttctgctgcaacgggactgtggtgcaggacaaggagcttggcaagattatccaactccaaggcgaccagcgcaag

SEQ ID NO: 16246 - DNA, 333 bp, Glycine max
cattcttgttctctttccaagtctctcgaagcatctttctgtctgttccttcagaatctatgggcgttactcgttcccaagtctccaacaagcaaagtacatggttgatttgaaaatccaagtccccagcgcattcgacccgtttgccgaggcgagagaatcagatgcccccggggcaaaggagtatgtgcacatacgaattcagcagaggaatgaaaagaagagtctgacaacagtgcaagggctgaagaaggagttcagctactagaagatcctcaaggacctcaataaggacttctgctgcaactggactgcggctcatgacaaggagct

SEQ ID NO: 16247 - DNA, 378 bp, Glycine max
tcggggaattccaattccacattttcaagaaataaggaggcaaaaatgttcatatatgaattggaattatttgttttcttattaggcctatcctgaagccaaaggaaatgagatcggaattcctcggggaattccaattccacattttcaagaaataaggaggcaaaaatgttcatatatgaattggaattatttgttttcttattaggcctatcctgaagccaaaggaaatgagatcggaattcctcggggaattccaattccacattttcaagaaataaggaggcaaaaatgttcatatatgaattggaattatttgttttcttattaggcctatcctgaagccaaaggaaatgagatcggaattcctcgggggta

SEQ ID NO: 16248 - DNA, 376 bp, Glycine max
agcgatagctgataagagagataccaacaagaaaagaaaaaaagaagagttgagattccctttgaagaaaagatggcatcccataggcaaagctatgaagctggtcaaactaagggccgaactgaggaaaagacgaaccagacgatgggcaatattggagagaaggctcaagctgcaaaggagaagacccaggaaatggcccaagctgcaaggagaagacccaacaaacagcccaagctgccaaggacaagacttgcgacacttcccaagcggcaaagggagaagacccaacagaatacaggagctgctcaacaaaagacctcagagatgggccagtccacgaaggaatcggcccagtcagggaaggacaacaccc

SEQ ID NO: 16249 - DNA, 234 bp, Glycine max
gagaaacaaactagtacaatatgtaagctgaaatacaaatatattcataaattctgagatgcaaataaaattgaattacatcaacaacaataataataataataacatacttggatgaacatcaaagcatagacaacacctagaaggctagaagtcattctcccaggccaagcaagaaaaaaaaaaaaaaaaaaaaaaaaaaaaaaaaaaaaaaaaaaaaaaaaaaaactaaaa

SEQ ID NO: 16250 - DNA, 349 bp, Glycine max
agaaatcagcacaccacacctccttggctcctccggcatggccaaaaagcgcaagcccaagaagaaaccccacaatcacaatgtaaacctaaaccaaaatcaaaaccaaaaccaaaatcaaaaccaaaacgtcgccgctttgatttcgcgagtaacacatgcagtacagtccttcctctcccaaaacgacctcgttctcctaccttcccaatccctccgtctcgaatccctaatctcatccatcatctcccactctccctcgccgcctctctcttcgccgcacagcgactcctggttccgccgctttcgctccgtctccgattccctatggctccacgccttccgcatg

SEQ ID NO: 16251 - DNA, 288 bp, Glycine max
aattgtttttcttactagagttgatccttttccagtagctctactggctgttctttttggcgttaagaatgaaattctgagttccaacgccactaaccctatgctgacgcgacttcttgagaactgtaagagtctcaaatatctggttgatgagtgtccttttgcatttgtgaactagtatgtaatattttattcacttaaataaagcgcattactatgtgcaatgagtgtgtttaaattttaaaaaaaaacaaaaaaaataaaaaaaaaaaaaaaaaagaaaaattt

SEQ ID NO: 16252 - DNA, 248 bp, Glycine max
gacagatcagatattttacttcacccatttttattagtcttcgttacccaggccatttgtattctacagtatcttctattttgtgcttcgtgctctggaaataaataagataataaaataaaggaatgggtggatcttctattttcttcttgtacgtatttcaagtatgaactaagcttatgcttaactttctgtatggtgtaaagtatatggacattaggatataataattgtgctttattaagaaa

SEQ ID NO: 16253 - DNA, 358 bp, Glycine max
gaaaatttatttctcgttaaagattgtacttttttggtaatactctagctagcggtggcagcgaattgtttaggctcgcgccaccggcgataagcatcgaggggtagttacctgttaactacactgactaagtcactcgttcgaaaaagaacatatcctcttcgttggagtgttacatcactcccaaggggtccaagacccttgccctcattatgggggttatcgatggatcatcatctgatgggcacaccatgccatggacgcgatgcgtcaaaagaaacattccatccacagttataatactgcctgagggattctcaagcattgctaaaatacatggtctgagattacgcggcga

SEQ ID NO: 16254 - DNA, 324 bp, Glycine max
gggagtcagagaaaccctaggtaagaagaaaagatgccggctggtcatggtttgagatcccgcaccagagattccttctctcgtcctttcaggaagaagggaaccatcgccctcaccacatacctgagaacctaccacgtcggcgactatgttgacgtcaaggttaacggtgccgttcacaagggaatgccccacaaattctaccatggccgcaccggacgcgtctggaatgtcaccaaacgtgctgttggcgtcgaagtcaacaagcaggttggcaacagaattataaggaagaggattcatgtgcgggtagagcatgttatg

SEQ ID NO: 16255 - DNA, 376 bp, Glycine max
tcggggaattccaattccacattttcaagaaataaggaggcaaaaatgtgcatatatgaattggaattatttgttttcttattaggcctatcctgaagccaaaggaaatgagatcggaattcctcggggaattccaattccacattttcaagaaataaggaggcaaaaatgttcatatatgaattggaattatttgttttcttattaggcctatcctgaagccaaaggaaatgagatcggaattcctcggggaattccaattccacattttcaagaaataaggaggcaaaaatgttcatatatgaattggaattatttgttttcttattaggcctatcctgaagccaaaggaaatgagatcggaattcctcggggg

SEQ ID NO: 16256 - DNA, 303 bp, Glycine max
gcacgcgacgtaactgggacatctttacttcgattctttttcattcacaccaccacactaacacccagttggtcttcacgagatttagtcaccacaaaaactttcctcaatgccttcaagaccaaactgaacatttctccaacaacaaacaactgctgcttgcccgcctgttgctgttccttccccatgggaatgtaatccaaatacaagatggtggcctacagcctcttccaaagtcacacactaacgtgcctggactttatcacaactcaaaaaaccgtctcattatacacaccgccgtac

SEQ ID NO: 16257 - DNA, 325 bp, Glycine max
aaagattttgctcaaaagagcaaagactatgccggtgatgctctgcacgagatctaatattatgcacattatgcaacgcacaggagcagagaagatgctagggatgctacgccacatgagcaaagactgctttgactacacctgttgtgccagctcaatggaaaagtaactaatttgcgacatctgcgattatactctttaggctgtttaatatgtacgtgggtggcccggatgaccacacagtatactggctgttcagagacaccaggctactctgcgacatatcataacaatgatagggttagattgaccacactctattgac

SEQ ID NO: 16258 - DNA, 361 bp, Glycine max
acaaaacttccacttgagagaaaagtagtgtattaagactacaaattttcaatttttcaatggcgtcgaggcaacaaaaagaggatcgagctgaggcagctgcgaaagttgctgcgaaagaactcgaacaactcaaccgagaaaaagaccgtgatttcagtgttggtgttgcagaccaacaccaacaagaagaacatcagttagatcaacaaaagcgtggtgtaatcggatccatgttcaaggcggtgcaagacacctacgagaacgccaaggaagctgtcgttggcaagaaagaaccttcgacgacgactaactcgtacagtaccagagaggttattcacgacgttgacattcaacccga

SEQ ID NO: 16259 - DNA, 407 bp, Glycine max
gtgacatgcacccctcccgtacctcagcacggaattcgagctgaatgaacattacttaccctaatcaacacccaaaccccggttggtctaaatcgtcttggaaaatgactgatcctcaagacaagtccatgcttcactcttaaccacaaccagctgaaccaacaccaacctcatcatcctcaacgccttgtaacacaaccacctctctaccaccctaggctgcttgctcctaccaagattgaaccataacccagagcaaatatgcctccctggtactatccacaaacttaccccaaaccgtatgttgctaacattcacacacaactaaccgtatcgcctgatgatcatcatctcccaaggactaggagcacttaaagttgcaagctcatcataaactaaaacgcatg

SEQ ID NO: 16260 - DNA, 380 bp, Glycine max
cttaattattttcacttccttagttcaatatggggaagcggttgactctctctctttcttgcctttgcttgctactcttgtcgagtgcatgctttgctattagctccagcaagctcaacgagtgccaactcaacaacctcaacgcgttggaacccgaccaccgcgttgagtccgaaggtggtttgattcaaacatggaactctcaacaccctgagctgaaatgcgccggtgtcactgtttccaaactcaccctcaaccgcaatggcctccacttgccatcttactcaccttatccccggatgatcatcatcgcccaagggaaaggagcacttggagttgcaattccaggatgtcctgagacgcttgaagagccacccaaa

SEQ ID NO: 16261 - DNA, 358 bp, Glycine max
attagaaatgaaaagctgcatggtttttagatgcaggaagagcttctatgagctcaaacttgttgggcccactgtcatcttggttcaacaattaccaaggtagacattttcagggatgcagccaccattatgatcaactacattgaccaaatccgagatcagggttttgaagttgattacttaaatattggtggaggacttgggatagattattatcattctggtgccattcttcctacacctagagatctcattgacactgtacgagatcttgttatttcgcgtggtcttaatctcatcattgaaccagggagatctctgatcgcaaacacatgctgcttagttaaaccgggtgaca

SEQ ID NO: 16262 - DNA, 374 bp, Glycine max
gaacaatctagcttgaaagacatttccaagtacagagctgaagctcaacaaaattcattcaatgctactgaagctgctaaggaaagatacgagagggcaaaccaagcgacaagtgaagctgccaaagagagaaacaagcaggcaaataaggaggcaacaaaggcaaaagatgtcacaagagaaatggatcaacaaggcaatcttaaaacagaaaatgagacacaggacaatgaccagaagggttatggtggagcaaagtacaccattggtagtgtggaccacattactacaccatttattgtagaggccaatcttaaatcagaaaatcagatacaagacaatggccaaaagggttatggtggagcaaaggacac

SEQ ID NO: 16263 - DNA, 194 bp, Glycine max
ctgccccgccccacctcgaatttgctcgtgctagaagacattctctaagtcgactgttggaattacaggggcgctgacttgaaggggaacaccctgtagaaggatgcccactatgctatgtctctgaaattttaagatcttctcacccacggctggcgctttctagactatcacgctgcaattcaaccttgttg

SEQ ID NO: 16264 - DNA, 378 bp, Glycine max
cccacttttgctccgcattgataagggggagttcaagtcaaccccttaccaacctggaacaagaggtcctgtagaagcagataaattactgctggaaaaagctggttatgttcaaacacatggttatagatggatccctccaacattgtagaaagaacaatgttacactagcttgcactaccttaaaatttgttgatgcgtgcacttaataagcttgggaaaatccccttggagcaagactcttccctaatgggtgattttatcaagcatatgaataaatgtggttgacattgtatatttaatattatctgcctacgaatgcagaagaataagtggttgacatggtgcatgtaacgttatttgcttgtgaataaagaa

SEQ ID NO: 16265 - DNA, 207 bp, Glycine max
ccggccctcattccggccgtaactttggtcaatatccatatggggggttcattctgaatcggccaacctcttctagaagggtgcttcctgagaaaggcaccccagaatatgaagaaatggtgaaaaggcatcaaaaggcttatttgagaactattacatcaaaggttcaaactctagttgacctttcagtgatagagatcttgtcaa

SEQ ID NO: 16266 - DNA, 213 bp, Glycine max
gagcaagacaaatagagccaagaaagtgaaggttctgagtctcaaagagaaccacgaagacataacaataagaacccttttcacttcaactctaaaaggttccaaactctcttcaaaaaccaatatggccacgttcgcgtcctccagaggttcaacaaacgctcccaacagcttgagaatctccgagactaccgcattttgtagttcaacttc

SEQ ID NO: 16267 - DNA, 249 bp, Glycine max
tctgaatttagaagcgttgccgaaaacaagatgaggggaatcaagattgatatgaatcgtcttgcaactgaaaaccgtatataaagaaagaaaaatgaattggcttcatcaaatgtttttgtactgacaatattaagaaagtcattggttgggtaggctgagtcatttattggtatgatcgactttctaatttagacgcaaatagaattctgaaatatatatgcaattacttttcctgaaatactttac

SEQ ID NO: 16268 - DNA, 367 bp, Glycine max
caagaaataaaaagagttctgactgaagttcttttgaaggttactgatgaattgtttgacgaaatcgcaaccagagttcttgctgaagatgatcttactgctgaagtgggccacaaggttgccacctcaaatcataaggcatcagcatctcctccctcagctacagttcctaaggcatctgcaaaagttttagttccaatcaaagagaaggtagaaaatgaagacaccagtgaaaactctaattccagctctcctggagatgttttaggtcttggaaattatgggtcctgatgctgatgatggagacaatgaaattgagagttccagtgtgccaacaccttgcaagagatgctgcctatcagtcagg

SEQ ID NO: 16269 - DNA, 365 bp, Glycine max
cactcttcgttcttcgactgtctacgatctgctttctctgaattgtgaaaatgtcgctcggagaaactgcttgttcatacgcagctctcatccttcatgaagatggaattagtgtaactgctgacaagatcagcaccttgttgaaaactgcaaaggttccagtagactcttattggccaaccttgtttgctaaacttgctgagaagaaaaatcttggcgatttgatagcaaatgcggcaggcggtggtgcaccacttgctgttgcagctgccccaattgctgctgctgctggtggtgctgctgacgcagctccagctgctgaggagaaaaagaaggaagaaccggcagaagagagtgatgatgat

SEQ ID NO: 16270 - DNA, 161 bp, Glycine max
gcggtttatgcataaatatatgaaggcatccctgtggatatatgaattggaagggctgcgcgtcgactattgagctcgtcttcccgccaattgatacgtgaccggtacctgctggcgtactcacctttccatattttcagtgatttcagagcgtgacaatg

SEQ ID NO: 16271 - DNA, 296 bp, Glycine max
  modified_base (295)..(295): a, c, g, t, unknown, or other
gagatattgatacaaacaaacaaactcctttgtatatattttggtggtggtgtctcctctagttttgttctgggacattagcaatgtgtagagagtaggaataaaattttgggagatttgttttgacaatgatcacaaatgtaatcatatactattatgttaatttcctttttttttttttaagttgctgcctgcatgtatacagtattagtggaatcagcaattagtaattttgtacgttgctgatgccaacaggaatttatgagaagaaaaaaagagattgaaaacgcctaanc

SEQ ID NO: 16272 - DNA, 354 bp, Glycine max
gaaaattaaaagcacgttaaagattgtaataatttggaaaaactatggctagcgatggcagcgaacagtttaggctagtgtcaccggcgttcagcaacgaggggaagttacctcggaactacactgacgagggccagggtgcgaaaaagaacatatcccctacgttggagtggtacaacctgccggatgggaccaagaccctcgccctcgtagtggaggatatcgattgatccgattcacatgggaccatcatgccatggacacactgggtcgttgcaaacatccctgacactgttaagggcctaccggagggattctactgcaaggctgtcgagatgggcggtgattacgcga

SEQ ID NO: 16273 - DNA, 348 bp, Glycine max
gtatttcgtttgttgttcaatctaacaaacttctctatatcgtttactttttcaacacaccttacacacttctttatttgagcctttcatataaatatcatggcttcgagggtggtttcggttttggtgatagcgatgatgttgtttgccatgaactgtaactgcactagtgttggccacatgccttcaaccaaagaggaaggtcacgattttcaggaggctaaagccaagacaacacatactgcgaacatggccatggaaactggtatagatgggaaagaagccgcacagtcatggacagaatgggctaaagagaaactcactgtatgtcttggcttcaaacatgat

SEQ ID NO: 16274 - DNA, 338 bp, Glycine max
gggttgtttttttgtgtttgtttttgttgtttcttttttttttcttttttttttttttctaacaaaaaatcatagccggttttttccccttccgtttaccctatggttgactgacatgggcgggtacatacgacttcctcctttacgaggaacgtgcaacggtccttataaaaacctaaggctgggggggggaaatttaaacggaaaaaccgggggggggtgggagataattcttgggcacataaaacggcgtggaaagaaacctatgcgggggtcattcatttttcataggcaccaggggggggggtggttcaaaccctatggggattgcccccccc

SEQ ID NO: 16275 - DNA, 362 bp, Glycine max
aaaaaattatatatctatataaatattacattaatacttatactcaaataattatattaaaagattttttaagcaatactaaagttaataaaaattctaatgtatactttaatgttaataggattttaatatacataaatttaaacagaaagtaatttatttaataagtgtaaagcataaattacatttattaaatgcaaaaaattatattaattacatttatagatactgcattaataatattaaatacattttatgaaaagtgataataaaataattaaggtttcatttaaaaatagcatttgactttttctaatttaaaattttttttatagacctatttttaaaacaacgcaattttt

SEQ ID NO: 16276 - DNA, 246 bp, Glycine max
cgcttattggcagcagcagtggcggcaagcaactccatccgcaatgggaatcgatttgaaggcaggaggtaagtccaagaagaccaagcgaaccgcccccaaatccgatgatatctacctcaagcttctcgtcaagctgtaccgttttcttgttcggaggactgggagtaacttcaatgctgttgtcctcaagcgccttttcatgagcaaggtcaacaagcccccgctatccctctctagattgat

SEQ ID NO: 16277 - DNA, 367 bp, Glycine max
gtccatggcctccctcatcgaatctggctggcagtacttgatcacacatttcagtgattttcaactggcgtgtttgggaagtttctttctgcatgaaggtgttttcttcttgtctggacttcccttcatatggcttgagagggcagggtggatgagcaagtacaaaattcaggccaaaaataacacccctgctgctcaggagaaatgtattgttcgcctgttgctttaccattttggtgtcaatctacctgttatggttttttcatatcccgtcttcagatacatgggcatgcggagtagtcttcccctaccgtcctggaaagtagttctaattcaaataatcttttacttcattttggaggacttt

SEQ ID NO: 16278 - DNA, 368 bp, Glycine max
ggagaagcaacaacaacaagcaccatctaaggaaacaaaggcacagagtgatgaatcagttaaagaaagcagcactgaagggcttccaatggaggatagtccctatgtgaaatacaaggatttggaggattataagcgtcagggttatggtacacaaggtcatcaagaaccaaagacaggtcgtggagctggagccactgaagcacccactctctctggtgctgcagtttcatctgatgcacaagtcgctgccactgatgccattaacagtaaaggagtcccttaattattcacacttcctagaatagatcgttcctttgctaataagaaatcgttttcttaatttggggtggcgttttttaaatgtg

SEQ ID NO: 16279 - DNA, 369 bp, Glycine max
gagaagccacaacagcaatcaagcagaagaggctcaaggtcgcagcagcaactacaagacagtcaccagaagattcgtcacttcaatgaaggagacgtactagtgattcctcctggtgttccttactggacctataacactggcgatgaaccagttgttgccatcagtcttcttgacacctccaacttcaacaatcagcttgatcaaaaccccagagtattttaccttgctgggaacccagatatagagcacccagagaccatgcaacaacagcagcagcagaagagtcatggtggacgcaagcaggggcaacaccagcagcaggaggaagaaggtggcagtgtgctcagtggcttcagcaaacatttc

SEQ ID NO: 16280 - DNA, 367 bp, Glycine max
attagatatgaaaagctgcagtggtttttagatgcagtgaaggagcttactaatgagctcaaacttgtatgggcccactgtcatcttggttcaacaattaccaaggtggacattttcagggatgcagccaccattatgatcaactacattgaccaaatccgagatcagggttttgaagtagattacttaaatattggtggaggactcgggatagattattatcattctggtgccattcttgctacacctagagatctcattgacactgtacgagatcttgttatttcgcgtggtcttaatctcatcattgaaccagagagatctctgatcgcaaacacatgctgcttaattaaccgggtgacaggtg

SEQ ID NO: 16281 - DNA, 357 bp, Glycine max
cttaattattaacacttccttagttcaatatggggaagcccttcactctctctctttcttccctttgcttgctactcttgtcgagtgcatgctttgctattagctccagcaagctcaacgagtgccaactcaacaacctcaacgcgttggaacccgaccaccgcgttgagtccgaaggtggtttgattcaaacatggaactctcaacaccctgagctgaaatgcgccggtgtcactgtttccaaactcaccctcaaccgcaatggcctccacttgccatcttactcaccttatccccggatgatcatcatcgcccaagggaaaggagcacttggagttgcaattccaagatgtcctg

SEQ ID NO: 16282 - DNA, 328 bp, Glycine max
  modified_base (325)..(328): a, c, g, t, unknown, or other
ctcgagccgcaggaagtcatgcagcttggtcagtccctttacaaccaaccaggagctgcaggcgcaggagggccaacaccaccacccggtgccgactctggcccctcagaatcctcaggcaagggacccgacggtgatgtcattgatgcagatttcactgactctaaatgagcaggcaactagttattaccaatagagagtatatgttagtattttttcccccattatatgttttcttctgttccaaattcttaataatttttgtcaatggagagtgggtgcgtgtttccttcaaatattagacacggatttcataggttcaaannnn

SEQ ID NO: 16283 - DNA, 363 bp, Glycine max
aacccggcctttagggaaaaaagaaagaaagaaaaaaaaaaaaacccttctttcccctccttctctcttccatagagatttttctccaaagagaaaaaatggcggcagcttcaagaaaatcaagaagtgcagtaattggatccctttcctccaccgctaggttctgcaactctcactttcactcttactctccatcatcttcatcttattcctcagctttcgcctcttccacctccagcttcacttctcgctcctccaccttctttcaccgctcttcctctccgacacgtgtcaacctctgcggttcctccgctccctccgtccgcttctccctcgaccgctccgtctctccgaaccggtcca

SEQ ID NO: 16284 - DNA, 369 bp, Glycine max
cacccgtcctctagggtaaaatgaaagccagaaccgagaagcaacccctctttcccctacttctctcttccatagagattgtcctccaaagagaaaaaatggcggccgcgtgaagaaaatcaatacgcgcacaatttgcatcccttacctccaccgatgcgttctgcatctctcactttcagtcttactatccatcatactcatattattcgtgagctgccgactgttccacctccagcttgactactcgctcctccaccttctttcaccgatcttcctatccgacacgtgtaaacctctgcggttcctccgctccctccgtccgcttctccatcgaccgctccgtctatacgtaccggtccatctctg

SEQ ID NO: 16285 - DNA, 399 bp, Glycine max
tcggggaattccaattccacattttcaagaaataaggaggcaaaaatgttcatatatgaattggaattatttgttttcttattaggcctatcctgaagccaaaggaaatgagatcggaattcctcggggaattccaattccacattttcaagaaataaggaggcaaaaatgttcatatatgaattggaattatttgttttcttattaggcctatcctgaagccaaaggaaatgagatcggaattcctcggggaattccaattccacattgtcaagaaataaggacgcaaaaacgttcatatatgaattggaattatgtggtttcttattaagcctatcctgaaaccaaggaaatgagatcggaattcctcggggtaccgagctcgaattcctatagtga

SEQ ID NO: 16286 - DNA, 288 bp, Glycine max
tgtttcgctgtctctcccatcctttcgcattctcaatacccttttgatttgtgaaaggaaagcaaacatggttgatcaggtccaacaccctacaatcatggacaaggttgctgatcagctccatctacggtctggtctctcatctggtattagaagctatgatggagcctaccgtcacccatctatgtaccaaagaccctcttttgagaatcactcatatgctgcatcgcattctgctgtgatgcccacatgcatagctaccatggatgtgtctgctactgcaacatc

SEQ ID NO: 16287 - DNA, 287 bp, Glycine max
  modified_base (232)..(232): a, c, g, t, unknown, or other
ctgcaaagacaaaggtaccacatgttgaaacgactgggaatgatgatggagggatagatagtgattcacaggcaaggttagacaatttaagaaagatgtaatctttcctctatgatatcatggactctagttttactgggaaaattgatgctcatttgtaccatatagcataattgagaagttgtgcgaagatttgatgaactcatggttataaaatgatggttttcttcanttaactgtgatgcccacatgcaaaagctaccattgatttgtctgctactgcaaca

SEQ ID NO: 16288 - DNA, 104 bp, Glycine max
aaataaaaaaaataaaaaaaaaaaaaaaaaaaaaaaaaaaaaaaaaaaaaaaaaaaaaaaaaaaaaaaaaaaaaaaaaaaaaaaaaaaaaaaaaaaaaaaaaaa

SEQ ID NO: 16289 - DNA, 249 bp, Glycine max
aaaaaaaaaaaaaaaaaaaaaaaaaaaaaaaaaaaaaaaaaaaaaaaggaaaaaaaaaaaaaaaaaaaaaaaaaaaaaaaaaaaaaaaaaaaaaaaaaaaaaaaaaagggggggccgccgactagggagctcgccaacccgggaataaattccggaccggtccctggaggggtaccagctttcccaaaagggaggcgtataaaagctgggggaaataagggccaaagcggttaccgggggaaaaaggta

SEQ ID NO: 16290 - DNA, 405 bp, Glycine max
tcggggaattccaattccacattttcaagaaataaggaggcaaaaatgttcatatatgaattggaattatttgctttcttattaggcctatcctgaagccaaaggaaatgagatcggaattcctcggggaattccaattccacattttcaagaaataaggaggcaaaaatgttcatatatgaattggaattatttgttttcttattaggcctatcctgaagccaaaggaaatgagatcggaattcctcggggaattccaattccacattttcaagaaataaggaggcaaaaatgttcatatatgaattggaattatttgctttcttattaggcctatcctgaagccaaaggaaatgagatcggaattcctcgggggtaccgaactcgaaattcctatagtgagtc

SEQ ID NO: 16291 - DNA, 327 bp, Glycine max
tcggggaattccaattccacattttcaagaaataaggaggcaaaaatgttcatatatgaattggaattatttgttttcttattaggcctatcctgaagccaaaggaaatgagatcggaattcctcggggaattccaattccacattttcaagaaataaggaggcaaaaatgttcatatatgaattggaattatttgttttcttattaggcctatcctgaagccaaaggaaatgagatcggaattcctcggggaattccaattccacatcttcaagagataacgaggcacatatgttcatatatgaattgaaattatctgtttcttat

SEQ ID NO: 16292 - DNA, 328 bp, Glycine max
tcggggaattccaattccacattttcaagaaataaggaggcaaaaatgttcatatatgaattggaattatttgttttcttattaagcctatcctgaagccaaaggaaatgagatcggaattcctcggggaattccaattccacattttcaagaaataaggaggcaaaaatgttcatatatgaattggaattatttgttttcttattaggcctatcctgaagccaaaggaaatgagatcggaatttcctcggggaattccaattccacattttcaagaaataaggaagcaaaaatgttcatatatgaattggaattatttggtttctta

SEQ ID NO: 16293 - DNA, 375 bp, Glycine max
ccaagagagatggaatgttcctcctccttgttctggtcctcggtatagtgaccgaggtgtgcctgctccttatggttgtcatcctagtgaatcagttggttttccaggtcatggatggagatttcctcccccatcaatgaattacagggactccttgccttttagaccccactttgaagatgcaattccagtagcaaaccgaggcccaggcttttggcagccaagatgacaaaaattaccaataaaaaaaaaaaaaaaacaaaactaaaaaccaaaataaaaaagaagaaacaaaaagacacaatagaaaataaataccaaaaaaaaggggcggccgccaactatggacctcgcaaacccgggaataaattccga

SEQ ID NO: 16294 - DNA, 366 bp, Glycine max
tcggggaattccaattccacattttcaagaaataaggaggcaaaaatgttcatatatgaattggaattatttgctttcttattaggcctatcctgaagccaaaggaaatgagatcggaattcctcggggaattccaattccacattttcaagaaataaggaggcaaaaatgttcatatatgaattggaattatttgttttcttattaggcctatcctgaagccaaaggaaatgagatcggaattcctcggggaattccaattccacattttcaagaaataaggaggcaaaaatgttcatatatgaattggaattatttggtttcttattaggcctatcctgaagccaaaagaaatgagatcggaat

SEQ ID NO: 16295 - DNA, 238 bp, Glycine max
gcaagctctgcattgatgagacttccaacttcccgtagagagtcacatagcggagcctgcgctcttccactgctcagctcactgacgatgtacactaggatgagctgctgctgcgagcagaccatacctgactcaaagacagtaatacggccatccacagaatcactagataactcacgtacgaacatgtcatcagactgactgctatcggtcaaataccgtaaaaatggccggccgc

SEQ ID NO: 16296 - DNA, 252 bp, Glycine max
  modified_base (250)..(250): a, c, g, t, unknown, or other
caagaagggggttctaaagaattcaccactggagctcctggatagccccaaaaggggctcctccagcaatgggtcataacatttgaggcaataatatagacaacctaataaaatatgtttacttttgtgtgttttgttctgccctttgtttcttttttatggcatatcatcaatcatgtatggggatgactccctaagtttttcttcgtctaataaagttgaatattttttgtaaggggttaaaaaatanaa

SEQ ID NO: 16297 - DNA, 348 bp, Glycine max
gggagcttgggtagggatagggttttattcagcaacaggtcagagactaaaaatattatctgagaccattaaggcttcattggtttactaataggaaatggatgagaacatattgaccctcttatgcactctgttgactgctgtaataatcatgggctaatacactgtccttgcagattgttgttctagatgtttgatagttcaattttggattttgatgggtagtttcttgtgtacttttggaactaatgggttacaatcccttggcatgtacttatggcatgcataagttgcttcaaaaaaaaaaaaaaagggcggtcgacgactagtgagctttttaacccggga

SEQ ID NO: 16298 - DNA, 92 bp, Glycine max
aactcagtaacaacattcttaactcaaaatggggtatcccgggggggctatcatgccataccgcgttaggttgcgacccatgtgatggggat

SEQ ID NO: 16299 - DNA, 385 bp, Glycine max
ccgggttggtatatcagcaaggctaaccctaaatcgctcttactctgggcggtcgttcaggggaagagatccagcacccctgttgtacgtcaagctcacaaatcaaaagcctactttaagagatatgaagtcaagttcatgagaagaagagagggaaaaaccgattaccgtgccaggattcggttgattaatcaggacaagaacaaatataacactccgaaataccgatttgtggttcgctttagcaacaaggacattgttgcacaaataatatctgctagcattgccggcgatttagttcttgctacagcatattcacatgagctgccacgatatggtcttgaagtacgacttacaaattatgcagcatcttattgcactggtc

SEQ ID NO: 16300 - DNA, 234 bp, Glycine max
  modified_base (14)..(14): a, c, g, t, unknown, or other
gacacacactatanaatagctatgacatgcgctggtgcgtaagctcggacatcctctcacggctatcttatacaccatcaacaccaccacactttcacccaggtggggggccatcatttaatctgagttacaatctgccacggcgcgtgcaaggcagactggatgtggtaacgccactcatcatctattgtttgccagccagttcatgagccacgcggacgggaatgataattc

SEQ ID NO: 16301 - DNA, 235 bp, Glycine max
  modified_base (208)..(208): a, c, g, t, unknown, or other
gaagcttcctggaggacacagtgacaagtagatgcatcgtgcatgcatgcatatgtatatatataatattgttgtctttgaataaatttgctgatatgtccttggaggatatagcatatggttatagtatattatatagaggaataaaaaatgtatccctgtaatgtaagggttctcatatacatggctgaaatataaagcataatanaggcattgatgttgtgccaatacataa

SEQ ID NO: 16302 - DNA, 279 bp, Glycine max
tctcctgtcttgataaataaaacaaaaaaaaaaaaaaaaaaaaaaaaaaaaaaaaaaaaaaaaaaaaaaaaaaaaaaaaaaaaaaaaaaaaaaaaaaaaaaaaaaaaaaaaaaaaaaaaagggggcggcccccaactattgacctcttcaacccggaatttatttccggcccggtccctgaaggcttccaacctttccttatagggagtcgttttaaacctgggcgtaacaagggccatagctgttccctgtgaaaaattgttttccgttaaaatttcc

SEQ ID NO: 16303 - DNA, 374 bp, Glycine max
tcggggaattccaattccacattttcaagaaataaggaggcaaaaatgtgcgatatatgaattggaattatttgttttcttattaggcctatcctgaagccaaaggaaatgagatcggaattcctcggggaattccaattccacattttcaagaaataaggaggcaaaaatgttcatatatgaattggaattatttgttttcttattaggcctatcctgaagccaaaggaaatgagatcggaattcctcggggaattccaattccacattttcaagaaataaggaggcaaaaatgttcatatatgaattggaattatttggtttcttattaggcctatcctgaagccaaaggatatgagatcggaattcctcgg

SEQ ID NO: 16304 - DNA, 210 bp, Glycine max
acttggagatcgagacgatcactccctcttgctgtctgtgctcctcttcctctcggaacgactttggaagttctttgagatcacccctgagaaaaacccacagcttcggacttggatatcttcctcagttctgtggatatcaacgaaggagctcttcttctaccacacttcaattcaaaggccatagtgatactagtgattaatgaagga

SEQ ID NO: 16305 - DNA, 170 bp, Glycine max
ctctcaagcaaccttgttttttaatgttcatattctcacttttacgtcaggggtgatgactggaattttttgcactgactattattcacatctcatgagggcctgactggatgtggctcaaccacaacctagttctgtaaggcccccatgttggcggtccacgcggcggg

SEQ ID NO: 16306 - DNA, 63 bp, Glycine max
  modified_base (1)..(1): a, c, g, t, unknown, or other
natcaaataaattatatattttcaacgggaatgccgcttatccggcgggggcgattgcaagct

SEQ ID NO: 16307 - DNA, 259 bp, Glycine max
gtctggtcagagacatcatgaaataacggctgatcatactagagttcatcgttttccagtatctttactggctgttctttttggcgttaagaatgaaattctgagttctaacgccactaaccctatgctgacgcgacttcttgagaactgtaagagtctcaaatatctggttgatgagtgtccttttgcatttgtgaactagtatgtaatattttattcacttaaataaagcgcattactatgtgcaatgagtgtgttt

SEQ ID NO: 16308 - DNA, 256 bp, Glycine max
atcgcccaacgctcggggagaggcgctttgcgcattcggcgctcttacggttcctgctcactgactcgttgcactcagtcgctcggctaaggatgacggcatcagctaactcaaaggcgacaatactggtatacacagaatcaggggacagcgctggaaaaaccatgtaagcataacgccagaaaagggccaggacccgaaaaaaggcagcgtagatggcgttcatacataggctccgccctcttgtatagcataa

SEQ ID NO: 16309 - DNA, 232 bp, Glycine max
attccctcaacctcaagatttctacccactgattcgattgatcgaataaaaaaactcttggggaattgaacatgatgccttttgtggtgaatgaatgccactattatcagtaatatgtatttctttgcttgtttctcttctcgctagcccgagaaccctctttaggaatttgttcaactttgagttttaggttttgatttttatggaatattaaatttctagtcttgattca

SEQ ID NO: 16310 - DNA, 397 bp, Glycine max
  modified_base (21)..(21): a, c, g, t, unknown, or other
atactaagagctatgacgtcncatgcacgcgcgcgtacgctagcaattcaactcgagtccatgccgtgccctcacgtgagcggcttacccgctctgggggaggcggctcccctgattggagcccatcctcggtccgatcggctcttatgcaacggcttacacagtttacaaaaccggtgagaagctgcaagacagcgcaacgggaaagccctccacgccgttcgatcacggttccggacacgtggaccccgtcgctgtcctcaatccaggactcgtctacgatctaacgggggatgattatttaggttttctctgcgcgttaaactactcagcttccgagatcaacacattggccaagagaaaatttcagtgcgacgcgggcaagcagtacagtgtg

SEQ ID NO: 16311 - DNA, 199 bp, Glycine max
gcaactcagctacggcatcttccattccactttgtgccgcgtcatctccgaaacttggctggcctgcctcaccacacacgaaacggtctgatacgacacactgctatactatgtgacatcgcgtaactggactgacatcacattcactaccctgactcgactctgttcccgacgctgccatgccgtaccgggaaaggct

SEQ ID NO: 16312 - DNA, 436 bp, Glycine max
  modified_base (11)..(11): a, c, g, t, unknown, or other
tgacactatanaagagctatgacatggactgctaccttacctcatccctcagttcgagtccaatcccacatcatcctcatacattgtcgctacaacttgggcttgtggacaatgttacattggcgacgaattaaggctcatctgtaccctacgaaatgagatcaggattcctagcagagagagaatcacacagtgtcacgcaatgaggaggcactgcacgaccatagcataatgcgggttgtatcatgcattaataagacctatacagaatcctaaataccttgtatcgcaattctgtcaggctatccagctccgcacttctgctatattatgcagcacacttagacatatgtgggcgtggctttcatgttatctcttcagaactgtcctgaacccaagctgatggagacccgacttccttgatatgcccaactcg

SEQ ID NO: 16313 - DNA, 99 bp, Glycine max
aaataacatgtgagcaaaatgccatcaaaaggcgaggaacgccttatatgaggagggggtgtcatttggaatatacttcacacccctgaccaggattat

SEQ ID NO: 16314 - DNA, 373 bp, Glycine max
ttacgtgacactatcacaatagctatgacttcacatgcactcctacctaagctcggcattccgatcgcggtcctactggcataccaacaatcaggtctagtacccacgaatagaaccgtgtgcaaatggtcagcaatagggccggatcgcgtgaacgggctatatgctgacttctagccataggttccgatccggtgacctgtatctcaaatatcgacgctctatgatatatgtggctaaagcacgacaacgactcttaggactctctgtcgcatttcctgtgagcatgctagtacgctcatatgtattgacgcttccgattacgcgttacctgagtctgtatatgcctttggcaagctattagctatcccat

SEQ ID NO: 16315 - DNA, 357 bp, Glycine max
tgggaaaaaaaatataatcaggtaattttatattgttcagacattcccattttgagattttatctgttaggaagaggtccttttgcttctgaatgagagtgtccaatgaaagtttggtccttgatgcataattaaattgttctattgagtggtggcaagtcaaaaaggtctcggctttttcgtaagagaatattgttttttttagtaagattatatatggtgttgttgctatatttaaattaaagaacctgcaaggccctgtgtgcttcttgtttcagcattgccattatcttcttcttcttcttcttgttcttcttctcatggctcttatgttaggctatgatccttgttcccatt

SEQ ID NO: 16316 - DNA, 399 bp, Glycine max
tcggggaattccaattccacattttcaagaaataaggaggcaaaaatgttcatatatgaattggaattatttgttttcttattaggcctatcctgaagccaaaggaaatgagatcggaattcctcggggaattccaattccacattttcaagaaataaggaggcaaaaatgttcatatatgaattggaattatttgttttcttattaggcctatcctgaagccaaaggaaatgagatcggaattcctcggggaattccaattccacattttcaagaaataaggaggcaaaaatgttcatatatgaattggaattatttgttttcttattaggcctatcctgaagccaaaggaaatgagatcggaattcctcggggaattccaattccacattttcaaga

SEQ ID NO: 16317 - DNA, 146 bp, Glycine max
caaacttccagagcgtttatcactcaccaaatatgcaagaacaaggggcgagacacaaaaatatcatctgctaattccatgcaatttaataaattgtggaattaatgatcaatcggctaataaatttgatgttttgtagtccaaaa

SEQ ID NO: 16318 - DNA, 92 bp, Glycine max
gaaagacctatggtttgatacataaaaaattcatgttaataagaaaaatttttataaatatattacaagaacaagagatcaaaaaataacag

SEQ ID NO: 16319 - DNA, 294 bp, Glycine max
  modified_base (271)..(271): a, c, g, t, unknown, or other
gttgaaacccgagctgctgatttgcttgacaagctgcggtatatacctagtcgtgaagctctggcacttcgagctgaggttgcttccatggcttcaaatttgaagcgtcagagatcttcgctgaacaaacggataatgaagatcaacgagttaggggtcctgtgtgattgattaaatggacaagtgtggcccttttttgatgcaccccaagtttaattgaataaatcttccggttaaagtaaatggtctacgtataatgcaaacccatgtnccggggcatctttttttggtttc

SEQ ID NO: 16320 - DNA, 419 bp, Glycine max
gggttttcgctcaccggtgtgcagtcgagcccccgaagaaaaagcgaaaatgccgtcgcacgggacattcagaatcaagaagaagttggcgaagaagatgaggcagaacaggcctatcccctactggatccgcatgaggaccgacaacaccatcaggtacaacgcgaagcgccgtcactggcgtcgcaccaagcttggattctgaggtgcttgctttgcctcggttctgtttatccaattaattagtgttttattttcttgagccaaaaacaatgctttggagattttaatattttgcattttgttccaagactatattgtgtaaggaacttattgtagttcagactaatggtggtgttggtcacctttttttaaaagtattttggaaaaaaaaaaaatacaaataaaattatcaatga

SEQ ID NO: 16321 - DNA, 451 bp, Glycine max
ctcgaggaagagaactgagaagcagagcagcggtgtggttgattgggatgtcggatccgtgcgagcgggtgaaaggaggaagattagcattcaaaggaggaatccttgccagtcgctccaaatccattgacaaaaaggggaagaagaagaagaagaacaagggcaaggacaacgacaacaaccctaaccctaaccctaaccctgaagaacaggaactggaacaggaacagaaacaggagcaggaagaaacccccctcctcgaggacgagggcgagggatctgaatacaccatcgatgcggccaagcgtatgaagtacgaacaactgttccctgtcgaagccaagaagttcggttatcaacccaaaaccaacttcaagtcagttgaggatgccctcgatgatcgcgtcaagaagaaggctgatcgctattgtaaatagtaagtctatacttg

SEQ ID NO: 16322 - DNA, 446 bp, Glycine max
gttctttttggctaagccttcaagcagatccaactagggaaatgtaaaattttcaatttttggtatcagtatcccttttccaaaaccttccctcatggtctagatttggaaatcttgtcattggcttacttctgggtgtgccaagatctgttctggtccgttccccccctttttctttttttagatcttgggcttctccatgatgtaatagaacctcaaatttgaaagctttacctttctgagattgctttttttttttttctatccccttccccttttggagtatgaaaattttcctggaaaattagtgagctaggatcactgagtgagagaaaagaaaaaaaaagatgatgaattatttcccggacgaggtaatagagcacatatttgactatgtggtgtcacacagtgatcgaaatgctttgtctttggtgtgtaaaagttgg

SEQ ID NO: 16323 - DNA, 450 bp, Glycine max
cccacgcgtccgattcattcaagattcagcaagtgcgttttggaagcagagaccgaaatacttcgagatggcccgtacaaagcaaactgctcgtaagtcaactggaggaaaagctcccaggaagcagcttgcaaccaaggctgcacgtaagtctgcaccaacaactggtggtgtgaagaagcctcatcgttatcgccctggaactgttgctcttcgtgagattaggaaataccagaagagcactgagctcctaatcaggaagcttcctttccagaggttggttcgtgaaattgcccaggatttcaagactgatctgcgtttccagagccatgctgtgcttgcattgcaagaggctgctgaagcataccttgttgggctctttgaggacactaacttgtgtgccattcacgccaagcgtgtgactattatgcccaaggatattcagctggc

SEQ ID NO: 16324 - DNA, 460 bp, Glycine max
cccacgcgtccggcagccaccactcagagccagcgagtgatgatcgcttcgccgcagtaatcgccggaagcgaattcgccgtttccctgccgagatctctcaatctccgacgactcagatacctctattaattttcctccggttaggttgttagggtataaatagtacgtagtttttccttatttatggcttcggagaatgtgaagaccggggattccgccgtcaccaccatcgtcaatctcgccgaggaggccaagctcgccagagaaggcgtcgtcaaagctcccagctacgccctcgccagcatctgcaagtcgctcgtcgccggtggcgtcgccggaagagtgtcacgtactgcagttgctcctctggaacgattgaaaattttgctgcaggtccagaatcctcataacattaaatacaatggaacagtacaaggcctaaaatatatatggaggac

SEQ ID NO: 16325 - DNA, 362 bp, Glycine max
tctttcctcaaccttctttcttcttatatatcgaacatggctaagtatcattcaagtgggagaagctcttccatgactgctatagccttcctgtttatccttctaatcacttatacaggcacaacagatgcacaatccggggtatgttatggaagacttggcaacaacttaccaacccctcaagaagttgtggccctctacaatcaagccaacattcgcaggatgcgaatctacggtccaagcccagaagtcctcgaagcactaagaagttccaacattgagcttttgctagacattccaaatgacaacctcagaaacctagcatctagccaagacaatgcaaacaaatgggtgcaagacaa

SEQ ID NO: 16326 - DNA, 310 bp, Glycine max
cccacgcgtccggaagatcgatctggtagaaacgatgaaggaactatgggcacaaatggggtcactaatggccactattgtgttcatgtacacaatctttgagcgcttcttccctccacacttgcgtgaaaaacttcaagcctatactcaaaaactcaccaaccatttcaacccttacattcaaataagcttccctgaattctcaagggaaccactgaagaagaatgaagcattcaccagcattcaaacctaactgagtgcgaacttattccagagaggccaaagggttaaagcttaagttgtgaatgat

SEQ ID NO: 16327 - DNA, 452 bp, Glycine max
ctctctttttctatctccttctttctttgtttctgtgtgttcgagattgaagaagatgatggaggctgaacccgagggcatggcccatcatgcgaacctacactacgcacagaaacagcttcaaccctacatgatgatgccgacgcagactcagcccgcttatatgtgggccacatctgtccaaccttcgatccagtcggcggcttcttcacaacgcagcagctccgatgaagtccgtaccctctggatcggtgatttgcaatactgtatggacaaaaattatctctacacctgtctggcacacaccggcgaggtgacttcatgtaaagacattcggaacatactgactatgtcaatcggagggatatcggtttatcgagtttactagtcgtgctaaagctgagagagtgctttaaacatacaatggcaccattatgccaaatgcttggcag

SEQ ID NO: 16328 - DNA, 454 bp, Glycine max
gtgggcatggattctctactggcgaactatgcctcttcagatgaagaagaagatcaacaacggccatcgtgacccaaaacgacttcgttttcctatctttctcagcccaaatcttctctctttcaatcccttccttaacccaaatcctctcctttatcttctctatttcaatctcttcctccacccaaacaacctttcagcgaaagcgcttcactttctaaccctaaccctaaccctaaccctaaaccccaaatcgaagaaccacggcccaaacgcgtcgtgcaattcatgcccccaatcattcctctcccaaaccctacccaactcgacgatgacgactactacgaataataagagcgaaacagacgaaagaacaagttagagtccttcacgcaaacctcatcggtcaaatccttcctcgacagcatatcggctccaaggaacaccggcactc

SEQ ID NO: 16329 - DNA, 455 bp, Glycine max
aaaaaactgaattgtgtgaatcgaaaactaaacattgctattgtaaaagttgcaaatgcttataaacaccctaatattattgcagaatttatagctggacaattaaagaatagagtttcgtttcgtaaagcaatgaaaaaagctattgaattaactgaacaggcgggtacaaaaggagttcaagtacaaattgcaggacgtatcgacggaaaagaaattgcacgtgttgaatggatcagagaaggtagagttcctctacaaaccattcgagcgaaaatcgattattgttgctatacagttcgaactatttatggggttttagggatcaaagtttggatattttctaaataaagaaaaatatattattctttatcttaaatgtgctatattttatcttaaatgtgctatatttttttttagaaaacaaaaaatgaaaaattactcgatttttattt

SEQ ID NO: 16330 - DNA, 449 bp, Glycine max
ctctctttttctctctccttctttctttgtttctgtgtgttcgagattgaagaagatgatgcaggctggacccggcggcatggcccaacaagcgaaccaacaatacgcacagcaacagcaacaaccctacatgatgatgccgccgcagcctcagccccctcagatgtgggccacatcggcccagcctccgtcccagtcggtggctcctccgcaacccaccagcgccgatgaggtccgtaccctctggatcggtgatttgcagtactggatggacgaaaattatctctacacctgtttggcacacaccggcgaggtggcttcagttaaagtcattcggaacaaacaaactagtcaatcggagggatatgggtttattgagtttactagtcgtgctggtgctgagagagtccttcaaacatacaatggcaccattatgccaaatggcgggc

SEQ ID NO: 16331 - DNA, 443 bp, Glycine max
gatgggttattgatatagtattttttttcattacatttagagtaaaagttatgtctgttattgtatgattgatcatcttaatcgtaagttcttaaacctccttttaaagagaacaaaattggtctttttttcagttagactcccaaagtgaaagaaacatggtgcagaatattttgtgtctactcctgatgtaatatgagttgggcaaactgaatcttgaatttctggttttttcttgtataagctgtaattttctgtggtagtccttaccgcatttaatactttgtgcaattaaaaaatcacttggagttctaaattagtactctacagctcttcatctttgactggtacatattttttttttatatcataacagacatttgtaggaacaccattctggatggcacctgaggttattcagaatactgatggatataatgaga

SEQ ID NO: 16332 - DNA, 417 bp, Glycine max
  modified_base (402)..(402): a, c, g, t, unknown, or other
ggaaaaggagggtgaagaggagactgtagacacagctgctgcaaagaagaagaagaagaaggaggaaaaggagaaggagaagaaggcagctgcggcggcagcagcagcagcagcagcagtagcaggaactgtaccagaaaatgaaacagcagaagataaagctgaggtaattgaaccaaagaagaatgattcaaaggctaaaaaagcagctgataagaaagtgccaaagcatgttagggagatgcaagaggcactagctcgaagacaagaagctgaagaaaggaagaaaagagaagaggaagaaaggttaaggaaggaggaagaggagcgacgtatgcaagaggaacttgagagacaagcagaagaggctagacgtagaaaaaaaaatagaaaaacataaanaatgaaactatctag

SEQ ID NO: 16333 - DNA, 449 bp, Glycine max
aaaaaaataaataaaacactaagatccttataagtttccctcgatcggcgaaaatatgtctggtttccggagcaacctctttggtttcaacggaaacaacaatggcactgaggatgcctttaaaaactcaggaggaggaggacaagacttcaaggacgcggagttcaacactggtgtgcaagttgccaaggggtgacacgctccttgcaatggtaacagtaggtctaaaagagcttttaacaactctggttcgggaaaacaggatttcggaaatgctatgtgtaacactggtgctaggtactactaatttatataagaccttcctcttggaggggctggtcttgcaaaacatacatattaatcataggtatggggaataaaaatcacaagtgctcatttgtgggtcatgtgtaagatgtggatacgtatgttggtatatgctaataaat

SEQ ID NO: 16334 - DNA, 218 bp, Glycine max
aacacacacaaacagaggctacgtacgatcaaattaattaagatggcggaagtgaggaacaaacaagtggttctgagggactatgtgagtggttttcctaaggaatccgacatgaacatagttgaaggaaccacaatattgaagcttccacaaggttccaatgatgtgcttctaaaaaatctctacctttcctgtgacccttacatgagaatgctcat

SEQ ID NO: 16335 - DNA, 388 bp, Glycine max
gttttctgttttctttccgtcgacgttctggctgcgtcccaagaatctctgacgccgttgtcggttttctccggccacggctacttccaacggatggcgacgacgaccacggagttcgatctcgattacgagttccccgatctcgattacgaccttcgctatctcagtctcgccggaatcgatgccctcaccgctttccaaaacctattaccggtcagttctctctctctctctctctctctcactcactcactcaattcacgttcgattggagccatctttgccacgccatcaaacatgttctatgacctatgacgtgccaaactgaaaatctattaccgctcgcgcctgacgcttccttaaccctaataacaatgagaataaataa

SEQ ID NO: 16336 - DNA, 444 bp, Glycine max
cttctgtctatacactctatcttctcttcacgagctcttgagattttaaaaacccattaaggggggatctcaccgcgagtttttgcgcaatgccgttactatgaatctagcaccgaattagatttgatacactatctacaaccacatcgctagagataaaaacccttacttcttcaaatggagtcggtgccgtcaactccgcacaggggtggcacatactctcccaagacggcagagtatctgatctgaactttcttcggcgacacgcccttcccactctcatcgaagttctggcagacattgctggagctttatctcaatgatcaatggtccactcagcgtcgttaacacgcttgctagctattaaccaaaaacaattgtcacaccatgcatcttgcgaagattttgttacatctagcgtgctgcttgcaaaagtacatgtct

SEQ ID NO: 16337 - DNA, 295 bp, Glycine max
atcccggtcgaccacgcgtccgggccaattctctcgctgctacatctgtctttccaacgcttgccactgtggtgttctcgagtggctgatggcaatatggttgttgactctttgaatgacgatttgagaatcaacggatcagttgaaccgctgcctgaggactttgatgccacagctgtgattatagatcccgggcctctggcagctgtagacgatgtcatttgtaaggaagaggcgctcatcatttaaggacatgcgaattgggtcattactctgtgaggaaatattcaatacc

SEQ ID NO: 16338 - DNA, 450 bp, Glycine max
gcacaaagcacttgttactagactggttgaggttaaaactggctctacagctctagcaaccggtgatggagcaaacgatgcgggaatgcttgaacaatgccacttcgctgtatgtatcaccgaattagatttgatacactatctacgaccacatcgcgagagaaaaaaacccttacttcttcgaatggggtcggtgccgtcaacgccgcgcaagggtggcgcatactctccggagacggcggagtatctgatcggaactttcgtcggcgacacgcccttccccctctcatcggagttctggcagaaattgctggagcttcctctcaatgttcaatggtccactcagcgtgttcaacaagcttgcgagctattagccaaaaacaattgtcacaccaggcatcttgcgaagattttgttccatctagcgtgctgcttgcaagagtacatgtc

SEQ ID NO: 16339 - DNA, 449 bp, Glycine max
  modified_base (403)..(403): a, c, g, t, unknown, or other
cataacacaaagcacaaagcaaagctcatccttgagttaaaaaatggcagcagcttcttccatggctctctcatccccatccttggctggcaaggccgtgaagctgggcccatcaaccccagaagtgggaagggtgagcatgaggaagaccgtcaccaagcaggtctcctcaggaagcccatggtacggcccagaccgagtcaagtacttgggcccattctctggcgagcccccgtcctacctaaccggtgagttcccaggcgactacggctgggacactgctgggctttccgcagacccagaaaccttcgccaagaaccgtgaactcgaagtgatccactccaggtgggccatgctcggagccttgggctgcgtcttcccggagttgctgtcccgcaacggngtgaagttcggagaagccgtgtggttcaaggccgggtcccagatct

SEQ ID NO: 16340 - DNA, 452 bp, Glycine max
cttctccctctacactctctgttctcttcacgagctcgcgagattttaaaaacccattccgttttgatctcaccgggagtttttgcgcaatgccgttaccctgaatctagcaccgaattagatttgatacactatctacgaccacatcgcgagagaaaaaaacccttacttcttcgaatggggtccgtgccgtcaacgccgcgcaagggtggcgcatactcttcggagacggcggagtatctgatcggaactttcgtcggcgacacgcccttccccctctcatcggagttctggcagaaattgctggagctttctctcaatgttcaatggtccactcagcgtgttcaacaagcttgcgagctattagccaaaaacaattgtcacaccaagcatcttgcgaagattttgttccatctagcgtgctgcttgcaagagtacatgtcttcttctgg

SEQ ID NO: 16341 - DNA, 341 bp, Glycine max
cgataatgcaggagagaagaagaaaaagagaaagaagcagggagagcaggaagaatctcctgaaatgccaagcaagaagaaaggcaaaaaaaagaaaagtgaggactaaagtgaagtcatctactaatcaatcctgtggtgaatgacaaccatttttgtatactcctggcagctcagtagtttgtttggtataatttttgttttcatttttatgcattttgtagctttatacatcctttattattatttaatgggattcgttccatctttcgggacttgagtggataatttgatgcaatcatgtttatgaatggaagatggtggtgcgctaccttttttgt

SEQ ID NO: 16342 - DNA, 360 bp, Glycine max
ctgatcatcaagctgagttagcgtcagttgtgctgaattttataaaggaaacattgaaactggacaagcttaatgctagtccttgatggaatctgcttcatgatgcaatattgcaacttggtaccttagagaactttgctcgtgctggagagagtcgtctttgattttattagagagaaccatttgtgctttgtggctgcaatatctatatcatatgataaataaggttggggacttggtgcctcctagttgtgtcctacgtttttaaagaatgaaaacattagcgtttgtttagtggatggactttgtagaatgatcctactcctacggtcgtaattagtcatgatatttttctttatt

SEQ ID NO: 16343 - DNA, 345 bp, Glycine max
gataaggaaaatgggagtctcaggcaacaatgaagttttagtgacaacaaaggtagttgttgactatgatagagcaagtgagctcaaagcttttgatgacacacaagatggtgttatgggacttactgatgctggtgtcacaaagatccctcttatattccataaccccaaaaattctcatcatgatgaatctgatgatggttcaggtagcacacaactcagtgttcctttcatagaatcttgtggtggttgctgaagatccagctacaaggaaagtggtggttgagaaaatcagacatgcatgtgagacatggggttttttccaagttgttaatcatggaatac

SEQ ID NO: 16344 - DNA, 461 bp, Glycine max
agaaaatgccgtctagtaactgggggtacagacaaccatttaatactttgggatttaaggcccctgggatggacaggtaagttttatgagaaggtatgtgaaacatgtcatattactttgaataaaattgctatttttggcgacaatggaactataattcctggaggtgtaagagtaggtacccctgccatgacgtcaagaggatgtctggaagctgattttgagacaatggctgaatttctcattagagctgcacaaattgcaagcatactgcagagggagcatgggaaattgcagaagacaacattgaagggacttgagagccatagggacattgttgagctccgggcacgggttgaagcttttgcaactcagtttgccatgccgggttttgacatttgaacatgaagtggctggtgaattgccattattgattatttacatattcaacaatggtgggt

SEQ ID NO: 16345 - DNA, 363 bp, Glycine max
cttccttcctaaagaacagaaatgaaaccgtccgtttccgtattgaacgtagccccccaaaaatgccgtccaagttccgattcctaaaactcttcactcaccgtctctctcctagaaccgccgccgtcaatggctcgcaccgcttcctatacggcaaccctctctgcaccatggcggagtccccggagctccctccgtggctcaagttctccgacaccccgacccctccagacgctgactcagacgacaacttcgttatcccttcactcgctcactgggtcgacacccacatgctcactaccaagcccaaagtcctaacgcaatcacccaagcaagacaacctcgacgaactcgaagcaagta

SEQ ID NO: 16346 - DNA, 408 bp, Glycine max
  modified_base (305)..(305): a, c, g, t, unknown, or other
  modified_base (389)..(389): a, c, g, t, unknown, or other
cccacgcgtccgggtaatcgtgagtggtactattcccgaatagcagcaagcaaggcaaggcgtgtgtccgagcagagcaggagtgaaggagaaaaggacccttgtccgtccagtccttattctcttttctcctccctccctcacgcaaccgccaattcctgaaccctaagctagcgccatggctgtcgtttcgcgaagtgcgacgacctatacgcgccactacttaatacgacacgagtttgataggaaaacgaaaacctgcgttgccaataatagtttgtgttactctgctaagaaggctcctncaccgcagaagattgttggtggccgtagagtgattgttgctgcaagccctcccaccgaagacgctgtagttgccactgaccctntcacgaagcaggatctcgt

SEQ ID NO: 16347 - DNA, 302 bp, Glycine max
gatctcgaagccaccgtcatcgacgaagtccgctgctgctcccgccgtcaactcttgcatgccgaacaaggaagatgccgccaacaacttcgccagagatcactacaccggcaactatctaccgggaggagcataatgtagttgacttgtacatcattctccttagatttttaagagatcacgagctgtgttggatgagcttgaatctttgaagcccaaatttaaacatcgggtggaaaaaatgaatgactagcatgtaaaagctccattgcctgaagaaaatgggttcaataaagctttgc

SEQ ID NO: 16348 - DNA, 290 bp, Glycine max
agacaaatccttatcatctataccggtacttgcaactatttcctaatttatgatatcaacaggctaacggggacaagttaatgctatcatatcataaacaaaactatatgtaacgagtcagctgcacagtaccattacagaactctactccaactatacatcgttcaattctaatctattatacatcatccattacgcctactggatgcattatatgtatcatatgaaaaattatcgatacttgccatactccctctactagatacatacatacttaatggatagaatca

SEQ ID NO: 16349 - DNA, 417 bp, Glycine max
ggacgaccttcttgaactgataaaagttcactctgctagtcactacaatctgacttcagaaggtatccgagaacaagatgttcaccttcatcaacatgatggaattctgaaacgaaatcctcagatatcttgactcgaaaacataatcctaacatgattaagtggatgtacaaatcctctgatcctgctcacaatacttgagacttgcaatcatcgatacactctgacagaacctatggactacgcaagcaactatactcaaaaatagatacctagacatatcaatgtgctatagctgaagacctgaatcctagtgctgcgactgaacaatcatagggaggagctagcaactcaattgcactgctatgtatacagagagaacatataaggtctgagtattcaagatgaatctccatg

SEQ ID NO: 16350 - DNA, 338 bp, Glycine max
gctaaaacacaagcagtttctctcaaactgagtcgtgtgaattaaccaagcacatgaagtgaataattttcaaagtacaaacatgaccatggaccggttatcacaaagcagttcggactcacccacacgaggagaccccaaagtgttatccatagagtgtctcaagggaagttccaaagcccacgagtggaccggagacatgcttcaaaccggagacatcgtcgaaaagcttcgaatcggaacttcttctaacgcgcttatcaagcttagatcgccttttaaaaacggcaagagtggcgttaatagaatcctgcaagacttctacaagaagaaagaca

SEQ ID NO: 16351 - DNA, 459 bp, Glycine max
gatcaactgaggagagtgagagaaaagagaagagaagatgacaacacgcttcaagaagaacaggaagaagaggggccacgtcagcgctggccacggtcgaatcggaaagcacaggaagcaccctggaggacgcggtaacgccggaggcatgcaccaccacaggatcctcttcgacaaataccaccctgggttcttcggcaaggtaggaatgcgctattttcacaagcttcgcaacaaattctactctccgatcctcaacatcgacaagctgtggtccctggtcccgcaagaagtgaaggacaaggcctccaaggagaacaaggcgccgctcatcgacgtcacgcagttcgggtactttaaggttctcggaaagggcgttttgccgcagaaccagcccgttgtggtcaaggccaagcttatttccaagatcgctgagaagaagatcaaagaggctggcgg

SEQ ID NO: 16352 - DNA, 452 bp, Glycine max
cccacgcgtccggttttgcagccatggaaacaggcatagcatgctacactcgcgggcctttgctgcctagtgtttcttccaagcactctccaccctccatctctccatcttttggcttgaggagtctgaaatcgagctctttatttggagaatctctaagagtggcatccaaatcaacactaaaggtttcaaagacaaagaatacttcactcgtgaccagatgtgaaattggtgacagtctggaagaattcctcacaaaagcaacaccagataaggggttgatcaggttgttggtgtccatgggagaagcattaagaacaatttccttcaaagtgaagacggcttcttgtggtggaacacaatgtgttaatacttttggggacgagcagcttgcagtggatttgctagctaatcagcttctttttgaggccttaaattactctcatttctgc

SEQ ID NO: 16353 - DNA, 279 bp, Glycine max
cacaacaactccttctactgcctctctctagctagttccttcttcttcttcaaagattctgtgctatataaaatcaaaggaagaaaagaggcctaattaagtagctttcagttgtggaatcatcatattgcagcgttgatggggcatttttcatctgcgttcaataggttggcaaagtcttttgcaacgaagaaagggaggagttctgatgaatgtaatggaagagaagcggcggtagcaatggcaaaggaagcccaaagaaatcacttcatgttgcat

SEQ ID NO: 16354 - DNA, 245 bp, Glycine max
cccactcgtccgatccgtacacctcaacatccgtgaattgcatgcaatatgaaactgcatcacgtcatgcttcacgaacaacaggatgatcaaattccacgaccagtctttcctaccatcgaatcagattgctcaagaagcactctccacgatacacaaacacctaactacttaaccatatacagcatctatgagacaagtactatcctacgttcttatgcaacgtaagaataccctatttttac

SEQ ID NO: 16355 - DNA, 386 bp, Glycine max
cccacgcgtccggattagactcccgaagaaccggaccaggctatggctgggaacgttcgacaccgccgaggaagccgctctggcgtacgacaaggccgcgtacaagctccgaggtgacttcgccaggctcaacttccccaacctccgacaccagggttcctccgtcggtggtgacttcggggagtataagcctcttcattccgccgttgacgccaagcttcaggccatttgcgagggcctggctgagctgcagaaacaggggaagaccgagaagcctccgaggaaaacgcgatccaaactcgcttcttcgccagagaacgacaacaacaacgacaacaactcttgtaaggtcgaaactgcttcctctctctgaaggtcttcgccgt

SEQ ID NO: 16356 - DNA, 416 bp, Glycine max
  modified_base (259)..(259): a, c, g, t, unknown, or other
  modified_base (296)..(296): a, c, g, t, unknown, or other
ctttcatttacacaaaatcatcaatggcaatggcctctcttgcatcctcaagtgttcttttgaacctcttgttcatcgtttctgcgctccattcgggagcagcagcagcaagaattctgagtgaaaaggaggaccaacaacagttgcagttccaataccacaaaggccctcttctcagcggcaatatctctgtcaatctcatatggtacggtagcttcaagccttcccagcgagccatcatctccgatttcatcacctncctttcctcttctccataatccacagcccaaaccatncgtcgccacgtggtggaaaggcactgaaaaatactaccaactcatcaagtcggaactcaaacccagccttacccttgctctcggtgcccaaatcctcgacgagaactactcccttggaaa

SEQ ID NO: 16357 - DNA, 359 bp, Glycine max
cccacgcgtccgcccacgcgtccgtccacgcgtacgcccacgcgtacgctctctcacaataaccactaattctcccaactcaatttctctctcaaccggcccaatttagcataagcccagcatggccaccgcaacagcagcagccacctcgtccttcatggggacgcgcctcctggaggcccactccggggcggggcgggtgcaggcccggttcgggttcggcaagaagaaagccgccgtcccgaagaaagtttccagggggtcgggctctagctccgataggcccctgtggtatccgggcgccaaggcgctcgagtacctggatgggagccctgtcggagactacggattcgacccat

SEQ ID NO: 16358 - DNA, 204 bp, Glycine max
atccctcctctctgctttcatgttttataaaatcatcttctacttttagaacatattcgaccgtgtcttggtgatgttcttctatttgccccttgtgaatcacccggaagaaacccaacttataatttttttaagctaaagccatcagtattcttctagacacttttaaaaaaatctctgatattgagactattgggatcaaaa

SEQ ID NO: 16359 - DNA, 218 bp, Glycine max
attctacaacaactctcgagaaagtacgtatggctgcctacacatcgattagtccttccggctcagtgtgatcatctatcctttcatcctcaaaatccatatttgccgcaactagatcctctatctagctttgttgtcatcaatgcctatccttatccattttccacacgttctttcttaatgccttgccatactataccattttaccttgatggttc

SEQ ID NO: 16360 - DNA, 453 bp, Glycine max
cttcttttctcttctttcttcttcttccatctctttttttctgcttaaggtctacaaaagttctcttcgtcttctcctcctattgaactttggtcatcacacgagaaaacccacgtctggatcttctggtgtaaaggccattagaagccttttagaaattttcaaattgagttggtgtatagtgttgaagggggtgaaatttggagcccagtttgttacttcatttgaaaggtcatagtttgaaccctctttttctggagatttacctgggaaaagatgatgatgtttgaagatatgggattctgtggcgatttggatatgttatgtggttctcttggggatggggatattgctgtgagacaaactgaaccggatcctgtagttgaagatgactacagtgatgaagaaattgatgtggatgaactcgagaagaggatgtggagggacaaaatg

SEQ ID NO: 16361 - DNA, 453 bp, Glycine max
cccacgcgtccggtgagtgtgtgtgataataattgggatcaactaatcaatcaatttgaatggcatcatccaattcggctcagctagaagggaacaaacccgcaaagagaaaacccgtgttcaccaaagtggatcagctcaaacctggaaccaacggtcacacgttggtggctaaggtcttgtcctccgacaccgtcgtacacaaaccgcgaccctcttccgcccacaacctcaaacccactgtcatcgccgagtgcctcatcggcgacgacaccggcaccatcgtcttcaccgctcgcaacgaacaagttgatatgatgaaggctggagctacagtaattattcgcaatgcaaagattgacatgttcaaaggatcaatgaagatggctgttgacaaatggggccgtgttgaagtaactgatcctgcagattttgaagttaaagaggataaca

SEQ ID NO: 16362 - DNA, 451 bp, Glycine max
caaggttggaaagtatgagaagaggatcgacgacatcttgaacaagttcgaccctgtcgttgaaagggtcatcaagaagcgccgtgagatcgtgaggaggagaaagaacggagaggttgttgagggtgaggtcagcggggttttccttgacactttgcttgaattcgctgaggatgagaccatggagatcaaaatcaccaaggaccacatcaagggtcttgttgtcgactttttctcggcaggaacagactccacagcggtggcaacagagtgggcattggcagaactcatcaacaatcctaaggtgttggaaaaggctcgtgaggaggtctacagtgttgtgggaaaggacagacttgtggacgaagttgacactcaaaaccttccttacattagagcaatcgtgaaggagacattccgcatgcacccgccactcccagtggtcaaaaga

SEQ ID NO: 16363 - DNA, 451 bp, Glycine max
gggaaaaataggtgtttacttggtagtcatattaattgtcattggcaaatactgcctaagagactgtgaaggtctggttgttagaaatttggcatgtatttgatttttttcccacgcgtccgcgttttactacgctctcttggactcagttcagtttcacgaccgatcctacaatggcgacagtcacgttttccttttccgctaaaaccctaactctaccttatcaccccaaaaccccaatctccaactttaccccggtaacgaatcttcgcctccctccttctatcgtgacccgaacccgcaattgtaaccggattcgggcggcgctggatggggatttctcggcgaaaaggagcagcagcagcaacaacaacgaccagagggagacgataatgttacctggttgtgactacaaccattggctgattgtgatggagtttccaaaggaccc

SEQ ID NO: 16364 - DNA, 449 bp, Glycine max
  modified_base (356)..(356): a, c, g, t, unknown, or other
  modified_base (422)..(422): a, c, g, t, unknown, or other
tgacgatggaggctcagagctcacattctatgctctcttaaaagcctccattttctccaaacattggttacctttctggagaagattcaatgttgaacctaagtcaccagaagcttttttcggtggccataaatgtagcaatagttgcactgagtataagccagcatgggtatttatcaagaatttgggcaaagacatgtaaagtgagattgaatcagccgtagcaaggggcgaggttccagataatgcgatgaatcagcacagaagattctcagaattgaatcccaaaaataccaagcagaatcatcaacctatcgtgcagataataattgatggaagagacactaatgctgtanatgaagacggatttcaactgccaagagtcgtatacatggcacgcgaaaaacgacacaactaccctnaccacttcaaagctggagcggttaatg

SEQ ID NO: 16365 - DNA, 356 bp, Glycine max
caacctttctcttcctcctcactcaaacttcccctctctacgccgttcctcccaaatggatgcaccaatggagttttggggtgttgaggttaaggttggtcagaccgtgacagctgacccaatggatcctgtggattcatacatacacatatctcaggttgcgctcggagaggcgaaaaaggagaaacctaatgagtctgtggttttgtatttgaaagttggtgaacagaagattgtcttgggaaccctatctagggatggcattcctcatctatcgttggatttggttctggactccgattccgagctttcccacacttcaaaaagtgccagtgtctttttctgtgggtcagagt

SEQ ID NO: 16366 - DNA, 400 bp, Glycine max
accacgcgtccgtcttcctgaacaaagaatatggaagcctcttttcatcactgatgacaggattgtatctggcatttaaactcacgtctgttgttgaaaaggtgcaatccttctttgctgcagtgaaagcattgtcgcgtaaagaaatgcactatggggcttatgcaacatcagagcacgtcaatgcatctggtgatctttgtgctatttgccaggagaagattcatgcttccatcttactacgttgtaaacatattttctgtgaagattgcgtatcagagtggtttgagagtgataggacctgcccattgtgcagggcttttgcaaaacccgcataccttatgtcatttggggatggctatactagcttgtttcttcagctattctgaagtcgtctata

SEQ ID NO: 16367 - DNA, 429 bp, Glycine max
atgaaatgttcaaagatgtgagaatagagaatttagaatgtaattgaattttaacactatggtataccccctacctcatgtggttgaccttgtgtaaaaaaaaaaaaaaaaaaataaaaaaacaaaaaaaaaaaaaaaaaaaaaaaaaaaaaaaaaaacaaaaaaacataataaaaaaaaaaaaaaacataaaaataaaaaaaaaaaaaaaaaaaactattaacaaaaaataaggggcgaacttttaatgtgccaaacttaacatacacgaaaatgtggaacctaatccctcaaaaagtgtaacccaaagtcaattaaggagaacaatgtttaaatcattgaattttggaaaaccgggtgctttaaagatttaataaaggtcgtatatgtccataattagccattttgtgttaaagccaaagggatttt

SEQ ID NO: 16368 - DNA, 133 bp, Glycine max
ttatgactacaaaccaattaagaagccaccagtgtacaagcctccagtgtacaagccaccagtgtacaaaccatcggtttataatcctataatatcggtttacaaacctgaaacaccggtttacaatctacca

SEQ ID NO: 16369 - DNA, 325 bp, Glycine max
ataatctccaaaagaggactcccaaatataattacagttgtgtggagcacagttcgtccggtggtcaaatcatgctgatggaaatagagtttgcattgcttcaatacaagatatatacagaaaatagtatcaaatgtacaagcttctttaaattttgatgggcctcccctgccgttaaatttatgttctcacaactagcatacaatgaatcaacaactttttttattttattattactcacatgttagttcaaaaaaaaaaaacaataggaatatgaaaaacaataaaagaaaaaaaaaagaatagtaaaaataattttgaattt

SEQ ID NO: 16370 - DNA, 182 bp, Glycine max
gttttgttagttattttttaagtagttacgttttcactcttgatcgttagttttagttatttatttatgaaagtgttaatttgtaattaaagaaaaagtgagacttgattggatttcttatgctagattttatcgtatctgtatggtataattaaaaaacatggaagatggatttgttcaag

SEQ ID NO: 16371 - DNA, 446 bp, Glycine max
gtctgctgttagatctgtacccgcctagccattgatttggaaaagtccaacttcaaggatgagtaagcttcagagtgatgctctaagagaagctatctcaggaatcatggctgattccaaggaaaagaacaggaaatttgcggagaccattgaactccaaattgggttgaaaaattatgatcctcagaaggacaagcgtttcagtggctctgctaagttgcctcatattcctcgccccaagatgaagatttgtatgcttggagatgcccagcacgttgaggaggctgagaagataggattggactacatggatgttgaggccttgaagaagcttagcataaacagaaagttggtgaaaaaactagccaaaaaatatcatgcctttttagcctctgaagcagtcatcaagcagatttctcgtctcttgggacctggtctcaacaagg

SEQ ID NO: 16372 - DNA, 324 bp, Glycine max
atttgcgcgaggatttatttgcagggaagcttaaataagggaatgtgataaaggaagcactgaataggcatgacgcggaattattaacctcctcggggagttatgctgaccatcaacttggatacaggaagccagctctaatattgatagttggtgttaactgtcgaaggatgactacatatccggcaaatgctgtcctatagattgaagaatgagcgtgctaagatatcgcaggctgctgatgatgcatgtagagcagctgctagcggtcaggttgaaatatcctccgaacggactggctgcgatattgatgtggctgagatc

SEQ ID NO: 16373 - DNA, 453 bp, Glycine max
gtcggaaaagggatagatcgcctgaaacaagaagtgctgatggtatggatactgagggtgacacacctagcaaaaaacagcgtctgagtagatcactgtcacggtccaggtcagtgtcacgcccaccacatgaagttgtgcctggagaaggcttcaaggattctgctcaaaaggtcaaggcaatcaaacttgcaaagaaatctgtcaagaagagaaacaaggatgcccgtcgtggagaagctgatagagtcatacctaatctgaagcccaagcacttgttttctgggaagcgttccaatggaaaaactgagagacgctaggacaggggatgctgtttaatgcattttagaggacacctgttggcatttttcagggctgccaaaaaaaattgttatttaatgtaagtgttttgttggagtttaaggttctgtgctggcaacatagtttacttat

SEQ ID NO: 16374 - DNA, 443 bp, Glycine max
acaaccttcagtggtgcatgttcatatcaagaggcatttgatgaaggaactgccagatccagatgaggctgttgctcaatggtgtcgagatatatttgtggccaaggatgctttgttagacaaacatatggctgagggtacttttagtgatcaagagctgcaggatactggtcgaccaataaagtctcttctggtagttatatcttgggcgtgtctggttgttgcggggtctgtaaagttcctgcaatggtcttcgttactctcttcctggaagggtgttgcattttcagcttttggtttggcagttgtaactgcacttatccaaattctgattcaattttcacagtcagagcgttcaaactcggccaagatcgcgcctgcaaagtcaaaaaacagggggtcttgatatatttggcgaacttaaagttgcatttatgtgtgat

SEQ ID NO: 16375 - DNA, 454 bp, Glycine max
gtctgctgttagatctgtacccgcctagccattgatttggaaaagtccaacttcaaggatgagtaagcttcagagtgatgctctaagagaagctatctcaggaatcatggctgattccaaggaaaagaacaggaaatttgtggagaccattgaactccaaattgggttgaaaaattatgatccccagaaggacaagcgtttcagtggctctgttaagttgcctcatattcctcgccccaagatgaagatttgtatgcttggagatgcccagcacgttgaggaggctgagaagataggattggactacatggatgttgaggccttgaagaagcttaacaaaaacaaaaagttggtgaaaaaactagccaaaaaatatcatgcctttttagcctctgaagcagtcatcaagcagattcctcgtctcttgggacctggtctcaacaaggcagggaag

SEQ ID NO: 16376 - DNA, 301 bp, Glycine max
cccaaacaagaatcctcaatatgagagatgccgaattgttggctgccaaagaagagatcagctctcttgagaaggaattttcttcatacaaagttcgtgcacatgcacttcttcaaaagaaggatgctgaacttgctgctgcttaagattctgaacaacttaaagctctaaaagaaactcttaaaggatatttgatcaatattttggaaaaaaacttggtttgataatggatattaaattattcaccattggcatccttaatttcttccagaaggtggaaattgaagtataatcattacca

SEQ ID NO: 16377 - DNA, 411 bp, Glycine max
attgatactgggggtttggcacctttcaaaaaacatccttttaatataacactgtcactgtccatgttagtttcaagcccaccacatgaaatttttccttgaaaaagcttcatcgattttgctcaaaaagtcaatgctattaaacttgctaagaaatctgtcaagaatataaacatggatgcccttccttgacaaacttatagagttatacctaatcttaatcccaagcacttgttttctggtaagcaatttcaatttaaaaactgagagacgcttggacatgggatactttttaatgcattttatagtacacctgttagcatttttcaagtcttccaaataaaaatgttatttaatggtaattttttgttggactttaatgttctgtgctggctacataatttacttata

SEQ ID NO: 16378 - DNA, 385 bp, Glycine max
cccacgcgtccgcaacattcaacaatggtacctcaagctttgtcagtgcctgcgagtgccagcttcactatcgcttctcgcaccagaagtccctcccacctcgtattttctcacagaaacccgtgctcgatagcttcttccttaccaaacccatatggccattcatcaggagttgggttatcaagtaaaagccgtggttttcctttaaaacttgatgagaaaaatatccatggtgcgagtacaagttatggtgcaattgaagccaaggggaatccaccaataacacccgcagtgatgactcctggaggacctcttgatctctcatctgttttgtttaggaatcgtataatattcataggacaaccagtcaattcacaagtggctc

SEQ ID NO: 16379 - DNA, 461 bp, Glycine max
agcaaatgagagctatgactgagatgcaaggggttctttgctcaacaagacccatgaggatgggaccagcctctaataaaacccctgccactcagtcccagccaaaagcttcatatctgaattctcaacctcaaggctcacagaatgagaatgatccaaataatacgactatttttgttggcaatttggatcctaatgtaaccgatgatcatctgaggcaagttttcagccagtatggagaattagttcatgtgaagattccagcaggcaagcgatgtgggtttgtccaatttgcagacaggagctgtgctgaagaggcccttcgggtgttgaatgggacgctgttgggtggacaaaatgtgcgtctttcatggggtcgcagtccttcaaacaaacaggctcaggcagatccaaaccagtggaatggtgctgctggtgctggttctggtggtggatattat

SEQ ID NO: 16380 - DNA, 364 bp, Glycine max
tgccacgcgtccgctccaatctgcacccacccccacttacctaccttatctctctgtgtctctctctctcaatcgttcttcacgagagagagagacatggacgccgtcggtcaaaccagaggccttctctctcttcccaccaaccccaaaaccagggtttcgcatcatctgcatccatctcacggcctcaaacaccgttttctctctctaaaacccaaacccctctccgacccttctctctccgacgacgtcgccaaatttcacccctttggcccaaagccccaaaatttattcatctgccgggccgaggccgctgctgccgcagatgggcctgcccagccccgcttcggggaagccgaggtcg

SEQ ID NO: 16381 - DNA, 315 bp, Glycine max
ctttgaacgacgcagaaggttcatccaatctccgaatcctttaatcgcattgcaaccatgtcgaggagaaaggtcagagagccaaaggaggaaaacgtgactcttggcccagctgttagagatggcgaacatgtctttggcgtcgctcgcatatttgcctcctttaatgataccttcattcatgtcactgatctgtctgggagggaaacgcttgtccgcatcactggtggaatgaaggttaaggctgacagagatgaatcatctccttatgctgctatgcttgcagctcaggatgttgctgccagatgcaaggaa

SEQ ID NO: 16382 - DNA, 398 bp, Glycine max
ttgccaggctgtagttgcagctgctataggagcaaagtttggaattgatggaaaccctggtgatttgccaaaatggtatgcagttgttgtggttctcttcatttgcatttacgtatcagcatttgcctggtcatggggtcccctaggttggttggtgcctagtgagatctttcccttggagatccgttcggctgctcaaagtataaatgtgtcggtgaacatgtttttcactttcttgattgcacaagtcttcttgacaatgctttgccacatgaagttcggcttgttcatcttctttgcctttttcgtgttgatcatgacattcttcatctacttcttcttgcctgaaaccaaaggcattcccattgaagaaatgaaccaggtttggaaggcacacc

SEQ ID NO: 16383 - DNA, 371 bp, Glycine max
cacttgttcactcatttacacactcttcccttctccttcttcttattatatctcactctatggttctgggttatactccaccaaactaacctctattcacctctacatattcatacatctgtaatctcccatactactcctacattgcccatgaatcccataacccacacttctattaatacaattcttcccctaacttaccatttcctactaacttgctcttctctgcaccttcctcgctaattccttcattctaatattatcatccgccaactatgttgccttcttccatttgaactcaacaactaagcttcagacggaaacaactgtctccttattactcttacacgagtacactactttcattgtct

SEQ ID NO: 16384 - DNA, 452 bp, Glycine max
cccacgcgtccggttttgcagccatggaaacaggcatagcatgctacactcgcgggcctttgctgcctagtgtttcttccaagcactctccaccctccatctctccatcttttggcttgaggagtctgaaatcgagctctttatttggagaatctctaagagtggcatccaaatcaacactaaaggtttcaaagacaaagaatacttcactcgtgaccagatgtgaaattggtgacagtctggaagaattcctcacaaaagcaacaccagataaggggttgatcaggttgttggtgtccatgggagaagcattaagaacaatttccttcaaagtgaagacggcttcttgtggtggaacacaatgtgttaatacttttggggacgagcagcttgcaatggatttgctagctaatcagcttctttttgaagccttaaattactctcatttctgc

SEQ ID NO: 16385 - DNA, 458 bp, Glycine max
ctttttctcaaccaaaaggggttcaattctttctagttctattacatcgtccgcgaccatgaacatggcgatcgtgcttctgttcatggttttcgcagtttcatcagctttagacatgtcaataatatcacatgacaacgctcatgcggatagggccacgaggcgcaccgacgacgaggtgatgtcaatgttcgaggagtggctggtgaaacacgacaaggtgtacaacgcgctcggtgagaaggagaagaggtttcaaatcttcaagaacaatctgcgctttatcgatgaacgaaactctctgaaccgaacctacaagttgggactcaacgtgttcgctgatctcaccaatgcggagtacagaaccatgtacctgcgaacctgggacgacggtccgaggttggacttggatacgccgtcaagaaccactacgtgccacgtgttggagataccatacc

SEQ ID NO: 16386 - DNA, 348 bp, Glycine max
ggaccagcgaaccgtgcctaatgtgtttattggtggaaaccacattggtggctgtgactcaacaactgccctgcacactcaggggaagctggttcctctgctgatatctgctggagctgttgccaaatcaactgcttaaaggatctcccatttctaggttatgcagttaaataaaaataaaaacccaagtagttgggtcggttatataattcaggtcccagaaactaatgtgtgtattcctgtgtgattctctttaaactacaactctgtcaaacaagtctattgctgaatgaagttatttttgtttaaaaaaaaaaaactaaaaaaaaagaaattaaaacaacaaaa

SEQ ID NO: 16387 - DNA, 458 bp, Glycine max
ctttgactgtaccaaagtcacgcttgctccctctctcaacggcttccctcttcttcctctctctctctctctctctggacacacacatccttggtgttgaacgggtttttgggtgaaggagtagtgttggtggcttcatcttttagtgaataaggatacagcagcatgcggtggtggcttactctctctgttgatgtataccgcaaagtgatttccttgaatctgtattgcaaagttattctgtaactcttaagtcccttttgatcaaaaaaccttttacaatcatctcactcatctcttccttgccttgaatcaatgggatccaatttttttgttgttgttccttgttatgtccgtcagatcagctgaagaaacccacccccagcttgtttcaacctcttcttttcaacttagcctctttaaacattttagttgtcattagtttctagcctttttct

SEQ ID NO: 16388 - DNA, 448 bp, Glycine max
tcattgctagagatctgtctttactgcttcttatgagctcttcctagaggatcaacattgaaaaacactacctcttcagagccacgatataggctaagagtacaaatcgcttccaatgcgtcacgcctcatgtcctgaattgactttactgcgataaaggttgctcaacattctcaacgcatgcaaagattgagaagaaaagaaagatcgtgcagtataaggagaggctcgataagactcttgcctcacctgatcttgcaaatgatgagatgctcaaaaagcttgtccgaagtcaactcccaccttctttagaacctgaagtagaacgatttagagatcaattagtagaaaccaagactgcggaggtgtctcactctcttgatatgctgaggagtgcttcttcagatgatagcggaagatcttatacatgacacactgattggaaatt

SEQ ID NO: 16389 - DNA, 237 bp, Glycine max
aaaaaaaattgtgaaccttaaaatcattagaaccttttgtcagtgaagcctcaagggagtatggtaaaaaaattgacatactttactaagaaaaaaaggggtggccctttttaggggcctaaactttcacatccgtcctggcaacgcattactttttatatggggtaccctaaattaatttaaagggccgatattttaaaatttcccaactggaaaaaccctggggatacccaattt

SEQ ID NO: 16390 - DNA, 405 bp, Glycine max
attctgctcatttgctttgactcctcattatcaaggaaaatggctctcattgggttgctcttgatgggttgtctcacaatgttctactctgctcatgcctatggtggacggtggactaatgctcatgccaccttctatggagggagtgatgcatctgggacaatgggtggggcatgtgggtatgggaatctctacagccaagggtatggaacaaacactgctgctctaagcactgcactgttcaacaatggcttgagctgtggctcttgctatgagattaggtgtgccaatgaccacatgtggtgcctttcaggttctattgtggtcactgccaccaatttctgtcctccaaacaatgccttgcccaacaacaatggtggctggtgtaacccttctcttcaacac

SEQ ID NO: 16391 - DNA, 338 bp, Glycine max
  modified_base (271)..(271): a, c, g, t, unknown, or other
cccacgcgtccgaggggatgggtagaatctcggttgagaatgcttaccctgaagatagagcgagatacaaatgggatgctgcagtgccatccttacccacatgagtatgtagacacatccaagccatgtgcacattctgcatttttcatgggcttgcaaaggaaagaaggagtaagaagtcaagaggggcagcaatttgatatacgtggaacagttgatgaattcagacaagaaataaatatgtacatgtactggaagccaaggatggatnattttggttctcatgttcgtcgaaagcaactccctgcatttggttttctgatgggtacaaacgcact

SEQ ID NO: 16392 - DNA, 307 bp, Glycine max
tggagttattcacagtgagaaattcctaagctccacaattggagccaagaatttgtgaaccatccaattgtcaaagaaagtctgccccctagagatcctgttttctcctttttcaagggtctctatgaaagcctttttggttcaaaatagatttgatgatgtggtgtgagacttagtatttctaagaattatgtgtttgttaaaggcttctatgaaagcctcactgcttcaaaatagattcatgtatgtgagactcagaatctctggggaaaattgtgtgtggtgtggactacttgtttggttggca

SEQ ID NO: 16393 - DNA, 383 bp, Glycine max
agcttctctgttaaaaaaaaattaggcgtctaaagggccaaagaaagttgaagctttttttgttgaggtgaaagtgaaatggttggcaaggataatctgagggctgaggacttgaacttgtgctttaagaagcttatgatggtggccgggagtgggaacagtgagaaaggggtgaacttgaaggttggggtgatcaccgagtggaaggatattcctgtggagcttctgatgcaaattctgtcccttgtggatgatcagacggtgatcatagcttctggagtttgtcgtggatggagagatgctatttactttggccttgctcgtttatcactctcatggtgtagcaagaacatgaatatactggtcctatctcttggttctaa

SEQ ID NO: 16394 - DNA, 371 bp, Glycine max
ctacccatcgtcccactcgtgccattggattgtgctactagtgatgatgctataatcctcatcctaacattctcctgcttgatgggtataccagactctgcgctgggactgcctctttcacccgggactaccaacgttcatgtcagcacaccttgctgcacatgagcatctgcgccaatggtgtattccacgtgtatatctgtatatatcaatgccccgtattagcaacaacactgcctatctaatcactgaactgatgaacattgtcttgcaccatagctcttggtctcagaattagtgtactgacttccactcgttcaacctatcaagttctcttgacgtcactggcaacaatttctatccttcaacaa

SEQ ID NO: 16395 - DNA, 454 bp, Glycine max
cccacgcgtccgctcaacaaatgaatattctcggacaatcattcaacgaatcaaacaacgggagctactcttgttcgtcgccggagactggtagctcctctaacattccaaacacttttcactccgacgaggaagtgcacacactagcttcggcgcgtgctaagaaacgtgcggggcgtcgaatttttaaggagacaagacacccggtgtaccgaggagtacgaaggaggaacaacaacaagtgggtctgcgaggttcgtgttcccaacgacaagtccaccaggatttggcttggaacgtatccagtgcctgagatggccgtacgtgcgcacgacgtcgccgcgctcgcgcttcggggcaagtcggcttgcctcaacttcgccgactcggcgtggcggctgcccttgccggcgtcgacaaatgcgaaggagatacggcgagtggcggctgcggc

SEQ ID NO: 16396 - DNA, 331 bp, Glycine max
gcgggttgggacctagataggcttcaatgtcaatgtctgcgactactatgatcactggacatgagttccttaaacgactttacattaaaaatcaacaggttttgacttgatgaaggatctaatttaataacaccacaaaacagagaaaggtgaaggggttttctcctttcttttggataaatcatgtccttacattctttccaattgtacctttactttttctggctactttgacttttcctgaatgggattactgcttgatcaatgcaaagctattgtaacttgtaagtcaccttatgtgtatatttagaaaataaataaaaattcattc

SEQ ID NO: 16397 - DNA, 452 bp, Glycine max
tccgcttggattgtgtctttagggatgatgctgaaatccctaacctaaaattcccctccctgatggctttaccagaggttgggttgagactgctcctttcacccgttacttccaaccttcttctccgcacagcatgctgttcaatagggcttgcgcttcccgtgtattccacgtttaaagctattgagaacaatgacccatatgagcaacaaaggtgcctattgtattgggcagcttatggttcttttagtgctgcagaaatgtttgctgaaaaattattttcctggattccactctatcatcacatgaagtttgcatttcttgtttggctacagctgcccactcttgatggtgcaagacaaatgtattctagtcacttgcagccattcctgttgaagcatcaagctagaatggatctgattgttgaatttgtgtatggtgcaatgagtaaa

SEQ ID NO: 16398 - DNA, 452 bp, Glycine max
gttatcaacagattcatctcaacatgttcgctctgcactggcttctgttataatgggtatggcaccggtgttagggaaggatgctacaattgagcaacttctgcctattttcctttctcttttgaaagacgagtttcctgatgtcaggctaaatattatcagcaagcttgatcaagtgaaccaggttattggtattgatttgttatctcagtctctgttgccagccatagtagaattagctgaagatcggcactggagagttcgacttgcaatcatagaatacatacccttattggcaagccagttgggtgttggtttttttgatgataagcttggagctctttgcatgcaatggctaaaggacaaggtatactcaatccgtgatgcagccgctaataacatcaaacgcttggcagaagaatttggaccggattgggcaatgcagcacatta

SEQ ID NO: 16399 - DNA, 452 bp, Glycine max
cggataccagcatggaggagattcagaaggatttgtctccattggttacgcagttggcacctgcagaaaatgagaatggagctaaaatacctttcatgatggcaagtgaggggatcaaggagcgaaacatcattcacaaggtcacatcttcattaactggatcaattattgttgaagatgtaatttatgaaaatgttgatagtgaagtcagttgtatttttccttctagagagttggtgtttcgacgccttgtatttgagagagctgcaaatttggtgcagtctgaagctctgctaaaagatgaacagtcacctactaaattggttagtgagacaggcaggaagaaaaacaatgcatcttccaaatctagaaaaagtggatctcagagacacagtattggagcaagcagccagttgaccgtctatcatggctatgtagctagttcttatcat

SEQ ID NO: 16400 - DNA, 359 bp, Glycine max
tgcaaatcagccactgctaccttgtactgccgccccgacgcggccttcctctgcggcgcctgtgactctaaggttcatgccgccaacaagctcgcatcgcgccacccgcgcgtcgtgctctgcgaggtgtgcgagcaggcgcccgcgcatgtgacctgtaaagccgacgccgccgcgctctgccttgcctgcgatcgcgatatccactccgccaaccccctcgccagccgccacgagcgcatccccgtcacgccgttcttcgagtccgtacattcagtcaaggcctcctcgccgatcaacttccaccaccgcttcttctccgacgccgacgctgatgctgacgtcagcaccgaggaggc

SEQ ID NO: 16401 - DNA, 255 bp, Glycine max
  modified_base (125)..(125): a, c, g, t, unknown, or other
  modified_base (141)..(141): a, c, g, t, unknown, or other
atggctggtggtgctgctgattgccagttttggcacaggaatctcgggattaagtgtcgtttgcatgagttggcaaataaaaggagaatttcagtgacaggagcctcaaagctacttgccaatantttatactcttatcgntgaatggtttatctgttggtcccataatggccgattggaataaaccggcccttgtctaatataatgtgatagtgaaggaggaagacttaaaggcactagattctcggttggatc

SEQ ID NO: 16402 - DNA, 236 bp, Glycine max
aataaacgtaccatactgtccaagatgagaaagaataactgatcgagtgctgattcagcggcatatgaggagaattgggacctatcatgataagttggcataacaccctctgatgaataaacttgataagtccaaaataaaggccatttttctgaaactagctttaacggaccaaacggatggacctgttgttttttagccagaattcttttaaccagaatcaggatccatatctg

SEQ ID NO: 16403 - DNA, 332 bp, Glycine max
ctggtatcccaagtgggcgatcctacagcgatattctcttctctcctcctatgcgcctgatctcatgcgaagtggtcattctctttttctctatcactgctgcctgcaaacaaaagatatttatattgcattaaaaagatgaaaaaaaagggcaagagtgtgtggtccttttaagttgaacatgatggaatggccgtctttctcttttgggtatcttcccaaatcaggaaacactttctcatcttccctttcccagtttcacaccctacctcatggaaggctctgtcaacgaacgtcttcattttgggaagattggatatggatgcaatcat

SEQ ID NO: 16404 - DNA, 142 bp, Glycine max
  modified_base (6)..(6): a, c, g, t, unknown, or other
attcgntcctcaaactacttaagaaacactcagtttagcaagtgaatagaagtagtgggggaagcaggggaaaaaattttagtttggaccaaattccagaaaattacccatattatggagacaaatgctaaaattctgattt

SEQ ID NO: 16405 - DNA, 495 bp, Glycine max
  modified_base (9)..(9): a, c, g, t, unknown, or other
  modified_base (239)..(239): a, c, g, t, unknown, or other
  modified_base (380)..(380): a, c, g, t, unknown, or other
cccacgcgnttcgccacgcgtccgcacttatgagagtgatggctgggatgatttctcagatgtgtctgattcatcagagtacttggcctgggactttgtggctggtggcatgggagaatactatgttgatgatagtgatagttacgatggaatgtgggatgatgaagcgaggctagatgagcttcagttcgggttttatgaagggatagaagatgcacgaatgtattggcctgcatctncatagaagctatagctgctgcattacttgtgatcaattggatgcttttctactcttgtaactaatgctttctactttctttaatgtgcttctttgaatgatgtgtttttttttctttaaagtaatgttgggcttgctctgnctagcatatgcataatcgagtgagattgtattgacctaccttagatttcttacttaagtaggaaaaggaagggaaagagaaaggtcccttgttctcacatgttagaggtctacat

SEQ ID NO: 16406 - DNA, 291 bp, Glycine max
gaagattaaaaattcagattagcgttagttttggacctgaggatgagtggatgaactgagatttggatttggatcatgttgagattgcgtttgcttgctctgattttccggcatgaatttcaagagctttggaaacgagaccggcggcggcagagggaggccggcggtgaacttctgcctgacgcggcatccgtcggtgtacttactgacgttcgacgagttcatgaacagcatgggaggttcggagaaagatattgggttcatgaacatggacgagttgctgaagaacat

SEQ ID NO: 16407 - DNA, 364 bp, Glycine max
cccacgcgttcgcccacgcgtccggaaaacagcatcgaacccgtcgtagcagaaaaacttgtcaccatggtttcttccgacaaggatccacgagaggatgtccttcaagcctggtacatggatgatagtgatgaagatcaaagactcccccaccacaaagaacccaaggagtttgtctcgttggaccaacttgctgaacttggagtccttagctggaaactagatgctgataaccatgaaaatgatccagagctgaagaagattcgtgaagagcgtggttacacctacatggatgtttgtgaggtctgcccagagaagttgccaaattatgaacagaaaatcaaaagcttctttgaagagcatc

SEQ ID NO: 16408 - DNA, 318 bp, Glycine max
  modified_base (74)..(74): a, c, g, t, unknown, or other
cgttggcatcatcaagctataaaagaaaagaaaagaaaaaaagaaggttggagttagatacacacacatcacanaaagaaaaaaaaaaaaaagaagctacattgcttcttgttggagacatcaaacatggcaactggtgccaccccagatggattattctggtcagtgtatgaagggtgcatatcctgctacgataactgcgtctagcgacgaccctaccaccgtaactgtggctgtgcactccataacaagtcacttattaattgcacgcacaagctttcaaggtgtaacaatgtgtcataccctatgaggagggca

SEQ ID NO: 16409 - DNA, 454 bp, Glycine max
gcttcattgtttacacgaagccaagggcaaacccaatccaataaacaacactgttcagagacccgtgagtcttcgtcagttccaattcgttaccgcgaaaatgaacgaacccacgagaaaatacccgaagaagaacgaaaaaagatcaaggatcacccagaagaattacaagaagaaagaactaaagaacattctcactttgttctgttcgtggatgcaagagagataaatgaggacaacacaagaaaaagaggacttgatggacggtactacagcgaggtgggagaatccaattacccgaaaaggagaaagaaactcgccggcggtgactcggggagtctccggcgagtctgggtaaaggaactttccgaacgtggtggaggagtgtaacaaacccgaatttccggacaggaattcaaaaaagccttcaaattgcgaaggttaacttttgagc

SEQ ID NO: 16410 - DNA, 333 bp, Glycine max
  modified_base (307)..(307): a, c, g, t, unknown, or other
cccacgcgtccgctcctctgaaacccactgagggtgttgttggcggtgtctgttagtgttcattggggttcacttttcaattgggggattttcttctggaatctgaaattgcatcaatttgggaattttttttgcaaaatgatttcttctgggattaacttggtgatgactgtgattgggtttgcggtgagcaccatgttcattgttttcgtctgcaccaggctcatatgtgcacgaattcacatgaatactgcgaggagatcttttcctattgcatccagatccaatctcagcatgatggagcggngttgccatggtcttgaacgtgtgact

SEQ ID NO: 16411 - DNA, 431 bp, Glycine max
cagaatctgagttctttgaactcaaaccctaaaaaaaacgatgtatcgttttttgtcttccattcgccatggctgtggatcttccctcacatcacttctcgcgccgaaacccacccttccattcgacgccgccctacgatctcgccgtttacctcaaaacgacggtactcttcgaatccctctgctttcatttccgccgttttcgaaatggaaaacaaatttgaagtttagatggcgtcgtttcgatgtgtggatttactcgagactgtggaaatagaaaatcgtgtatgcttataattttttgacggcgtcgtttcgatgtgtggatggatagggattagaggcagtgtttactgttttcaaagagagaaaagagagagagagagagagagagagagagagagaggaaattatgacaaagtgaatgttcg

SEQ ID NO: 16412 - DNA, 205 bp, Glycine max
aaccaaaccatgtctacctccgcagcttctctcgcactcccaaccctcactctccgaactcgacaacctctctgttctccccaatgcttctcctcgtccctctccctcacccctaactccaaacccatttccatttccgccgttttcctcaaaaccacgctttcgtcgtcgtccgccgtggcccttgcgtctcgctttcgtcccc

SEQ ID NO: 16413 - DNA, 414 bp, Glycine max
  modified_base (367)..(368): a, c, g, t, unknown, or other
cccacgcgtccgcccacgcgtccgcaaaacatcagtcatctccttcacaggaaccctaaatctgaaactaccttgactccgctcagccacggctgagaaaatagctcgtcttcacgatccagcgattccgctctccaacgggactgcgcagggtgaagaatcgagaggccagccgccggtgaagaatcgcgcgattcgtctggaaatcgcgattccagcacgattcatgcccgatacagagatttaaccacgattcaggaacaaaaacgagacaacctccgattcgtattggtagcatctggaatcgtatcgaatcgtgcgatacgtatcctgaatcgtacgatactaactaccatgctagagagcnnctatgcataacgaagtttgtttccttaaaggaatcctttttttcct

SEQ ID NO: 16414 - DNA, 373 bp, Glycine max
cccacgcgtccggaaaggaaggaaaaatggagttgttcttctacgcggtgttcggcggtttgggagcggttgttgcagtgacggagctgagcaagagcaacaaggaccgaatcaacacctcttccgcattcaattccttcaagaacaactacctcatcgtctattccctcatgatggctggagattggctacaaggtccatatgtctactacctttacagtacatatggatatgggaagggagacataggacaactcttcattgctggttttgggtcttccatgctctttggaacaattgtcggatctctagctgacaaacaaggccggaagagggcttgtgtgacttactgcataacctacattttgagttg

SEQ ID NO: 16415 - DNA, 411 bp, Glycine max
acgactcctactgcaccaatgcatgaatcctgacggtatttggatcccatgtgtacctaagcgtcaggaggcattacaaacctcactgtaagagctcgctgctaagggactagctcatatgattctaacggcccatatccagaggacagaatttgcgatcgtactgactggacgatggcctacagtaagctaagccgaccttgatgttcacgagagattcacgaaggaatttggagaggaaggttaatactgttggaactctcactcttaaggtccacactgagtctcaaatatattgctataatttgaaatctattatcctttggatccaaattaaatgcatctttgtcatatttggggatgaacaggcccctttaggaccgagatttatttataaaggtcgatactcat

SEQ ID NO: 16416 - DNA, 461 bp, Glycine max
cggcccgggacgaccgacgcgtccgacccagcctccatacacactctctctgagtcggtcgagttgaatcggtgtgagtcagtgaccgactcgaaccatgtcggacgaagatcaccattttgaatgcaaggccgatgctggagcctacaagacctatcctcaacaagccggaaccatccgcaaaagcggttacatcgccatcaagggtcgtccctgcaaggttgctgaaggttctacttacaagactggtaagcacggtcatgccaagtgtcactttgttgggattgatattttcactgccaagaagcttgaagatattgtgccctattctcacaactgtgatgttccccatgtgaatcgtactgattaccagatgattgacattgctgaggatggatttcttagcttgcttactgaaaatgggaacaccaaggattgacctgagcttgctactgatgaga

SEQ ID NO: 16417 - DNA, 411 bp, Glycine max
  modified_base (103)..(103): a, c, g, t, unknown, or other
  modified_base (362)..(362): a, c, g, t, unknown, or other
  modified_base (401)..(401): a, c, g, t, unknown, or other
ggggtatgggagacttcgagacccagatgttttaaggcttctcactcctcttaggtttcagttgtgacaacctctaagtgacaagagtggaacattcattctnttagtggcaatttggctatatatattaagttctgggctgtgagtatattagaacaaatgtccttccgcagcatagttcgtgatgtaagggatggctttggaagcctatcaaggagaagttttgaggtaaggctttctggccataacaggggcaagtcacgcagttcggtccacgagttgcaggatcagccaccggttatacagaacagccggtgggctagccttcctccggagcttcttcgtgatgttattaatagatnggaagcaagcgagagtacatggcctggtcgtaagcatgntggtgcatgt

SEQ ID NO: 16418 - DNA, 415 bp, Glycine max
tcgtcaggttgtgtctaatgctcttgatatgaagctcagggatgacttagagagacttaagaagatcaggaaccaccctgggttgaggcactactggggccttcgggtcccgggtcaggacaccaagaattcctggcccaagggaaaaaactgttggggctttaaaaaaccggtaaccattaaggtttgggctggaaattaaaatttggttaagaaggcatgttggaagtacactacatgttttgaataataccaactttgtatccgtggttaaatggcttgacaatttcaatttggtttgttatttgcatctgagattccgattagttaaataatgttggttttcttagttgtagagaaccttgaatagtatttttgaaatacgaattcagtttgatccgggaaggaaaatttc

SEQ ID NO: 16419 - DNA, 272 bp, Glycine max
tccacgcgtccgaccacgcgttcggcataagcgcgtgtaaccctaattagggtttggaggccgattggagattcacctttcgcgtaatcacagcgctggatccgtaccgtgttcctgcgtctacggaagcgccttttgctcggtccttcgcctgaacacggaagcatgtacggatcccgaggggcaatgttgggaagcggaggggtttcagacggttacaaggttggctcatagagacatagaatgatggaatccaatcgatacttcgcagt

SEQ ID NO: 16420 - DNA, 133 bp, Glycine max
  modified_base (41)..(41): a, c, g, t, unknown, or other
cgaaaacattggttaacacgaggatgtgatacgcggatcangctaaatacacattcatagccaacatgcgaagactcatgagagagatcacatggctgaatacgaacaaggttcttacaggcacgtaagctat

SEQ ID NO: 16421 - DNA, 355 bp, Glycine max
ctcaccttacctcttattccaaatcttaattcaaatggcatcggaaactgagacgtggggctttcatgctctatatcaaccagctcctcagtctaatcatcaacaacttgtacagcaacatggacatctttcttagtgagctcatcatcaatgcatctgatgcttagtacaagacccgatttgagagttttacatactaaatcatgcttgatgctcatccagagtcgttcattcccattttttctgactagaccagctccacattgtctatcattgacaggagcattgccatgactaatgcctaatggatgaatatcactaggtactattgcaaggactggtaccaaggaattta

SEQ ID NO: 16422 - DNA, 360 bp, Glycine max
cgagaggtactttgctcacagatatattttttttttggtctccatcattttctccagagctttcagtttctgtggttcatctttcttcttcttaatctttccccccctctctgtaacatcccgcttctctgaatccctttctgctaatcatctgtctttcaagctaagattttctggtttgtcttttaattcaccaaaaagcacacttagaacgatttttcgaaagccaggtgttttcagaaacgagatccacgttttattgtcgaatttcgctagtcatattaatatttcatcatttttttttcctttgaaaccacccaagagggttatttttgatccctcaaagctaatttctcattt

SEQ ID NO: 16423 - DNA, 395 bp, Glycine max
  modified_base (382)..(382): a, c, g, t, unknown, or other
cccacgcgtccgctcatcaactcatgattacatggtggtagcgatagtaaaatcgagactacccacgcgagtccattggttttctcttagaaccaattcctggagcttgtattgatcagtatccttttaaatccggtcgcagcttgctcttgaatggagctattcattggttggttcaaccctatgatagactctgtgttataattgcatttgatgtgatggaaaaagcgtttctttaaaggcactattctcttccactgcaacacgcacaatcatgttcttcttcttgtgaatatttaaccaaaaagggtgttctgttctgtgcttcaacagttttactgttttgaacatgtgattgtttcttgagagacttctagattgntctgtatatatag

SEQ ID NO: 16424 - DNA, 364 bp, Glycine max
caggactatacctatctatatagtgtatgaaaattctggggggtgaagtcgtttttggggtagttgatggatgttgaaatccttgacggttgtttggtgaaatgagggatgttatcggggttgatgaacttattgagggcctgctttcggccgggttcggatggatttacacgtgcaggttcctatgccggtggtagacaggatggactattgtggtacatggactctgtgcagcacttgtatggggatgcactaatggctgtaatcgaagccaataacatgctggaagatcagagccagattgaatcacgctgtttgagctccaatgaatgcgtaccttatggtaccttcatcggtgtctatg

SEQ ID NO: 16425 - DNA, 509 bp, Glycine max
gcctaaccatatggctacccatctacgaccgaatcctcgtgccgtcgctccaaagggtcaccaaaaaagagggtggcatcacagttcttcaaagaataggctttggcatgttcctctctatactatgcacaatggtgtctggtgtagtggaagaaagaagaaggacattggctttgaccaatcctattggattagagccaagaaaaggtgccatttcttcaatgtcaggtctatggttggttcctcagctaacactggcagggttatctgatgcattcgcgattgtgggacaagttgagtttttctacaaacagtttccagagaacatgaaaagccttgcagcgtctctatttttctgtggcctcgcgggatcaagttatttgagtagtttgctgatttctattatccatagggcgacagctaaatcttcaacttgggaatggttacctcaggatctcaataaggggagattggattatttttattacattataactgctctagaagtc

SEQ ID NO: 16426 - DNA, 443 bp, Glycine max
  modified_base (341)..(341): a, c, g, t, unknown, or other
gctcaacaaggggaaactggtgcaccggatgaggtttggagaaactggtctagtaagaacgcaggcttggaatcattttcaacaacgagcagcatttgaaaaagatcacccgacaaggaataaaagtcaacttttttagagggtggaattttcagctgatttggtcgttatgtgcttctttttctttaactaattaatcctccctttcggccacatatatagaatagaaatcgtgcgacaaacgactgaacgtgtctttctaaagaggaagacgcattgagtcgtcgacagtgtggtcgagtttcgcagcaccagccagtgcaacagtgtagacccatatncttagaggatctcataaatgtgagttcaaatgttaaaattaaggataatgtcaatttctgaaacacttttttatagttcatttttttaatctctcttttaat

SEQ ID NO: 16427 - DNA, 369 bp, Glycine max
  modified_base (318)..(319): a, c, g, t, unknown, or other
cgccgcctcaacatctcaactttcccttcgatctcattctcaggtgttgttgaagcttcctgtgttggcttggtatccctgcaagttctgctgtagcagattccaaggtgaaggtgtcacgttaaagtttctttcatgtttgaacaggctactatccatttgggagcaactgagctgcttggagagtatttttcttcctctaggaaaaattacagaccctcaccacagagacttagttgtatgaacggttggccaccttccattatccttgaaggagattgttcaaggatacagactacctttgaggttgaaattgcnngctgcatataattgaattcagcattttcttgctctgaatatctctggaac

SEQ ID NO: 16428 - DNA, 388 bp, Glycine max
cccacgcgtccgcccacgcgtccgcggaaattgaaggcagatgatctgtttttgatctgtgcaacagatggactttgggagcatttaactgatgaagtggctgttgaaatcatctccagaagtcccagaataggaatagcaaaacgattggtgagagctgcactagaagaggttgcaaagaaaagagaaatgaggtatgaggatctaagaaaaactgataaaggtctaaggcgtcattttcatgatgatattacagtgatcgttctatatctcgatcattcaaaagaatctcaaaatggtagatcaaaacataaaggagtttatgattgcattaatactcctattgatatcttctctctgaactcagatgaagctgatctttaaaatg

SEQ ID NO: 16429 - DNA, 207 bp, Glycine max
atgaaacttattagttcacctcaaccagaatgacctacttatataattatgattcccaggtcactaggtgataggtacttagagtgataatttgagtggacaccactcgaatttctgactgactgactttctaaaaatgccgttcttatattaccattcatacacgatccatcccattgaatcgatttttcataacccgaatgcttt

SEQ ID NO: 16430 - DNA, 229 bp, Glycine max
accacgcgtccgcaataacttcgatgctaaccacttagcatggccactaccattcgaagcctgataggcactaatgggctcatgtgccaagtcatcaccatacggacatgcgtcgtgcacggactcattctaatcatggccggctcctccgccacctacatgttacgcctctactccggagacctctgattcgacccggcctacgaccaaaccgcctcaaacctcctta

SEQ ID NO: 16431 - DNA, 275 bp, Glycine max
ccactgataggcgtcgttttgccccccaaaacccaagaagaaatggcgagttgcatcagcaacactcctaaggaaagcgtggttgacgatcggtgaaggcgtgcgacctcttgtggctattgcagatcctctcgtgacaatagcatctctcatggcatgtgggcacatatccttacagtggatgactaccaagatcttcttgattgtggctggagaaggtctggatgatttctttataaaccacagattgaaaggacatgctgcccttcttatac

SEQ ID NO: 16432 - DNA, 362 bp, Glycine max
ttcttgagtgttttctcagttcctcacatcatgtaccgctttgcaacctccctcgcctccaaagctagaattgccaggagcagcactcatcagattggaagtagggtcacttggaacaggaattatgcggccaaagacattaagtttggtgtggaggctcgggctctgatgcttaagggtgtcgaagagctcggtgatgccggtaaagtaacaatgggccctaaggtgcgtaatgtggttattgagcaaagttatggagcacctaaagtgacgaaagatggagtaaccgctgctaagagcattgaattcaaggacatagtcaagactatcggtgccagtcttgtaaagcaggttgctaatgc

SEQ ID NO: 16433 - DNA, 392 bp, Glycine max
  modified_base (342)..(342): a, c, g, t, unknown, or other
atcacttctgagtttctctcttcacctacactttcctctttcaattcaattcaattcttctttttgggtcagaaactctgtacagttaatcaaaccctacctcacctcaccggttttagctgttaatttaatatatagatagaaatccaaggaagaagatgaagcagtttgccgtccaaaacgtcgtcgttccatcccacgatgagattagcgttgtttgccccaagccccgtcgcctcggcctcttcaacttccccgttaacgatcccactgttagacccttccgctggcatctcagttaccatgttgagccatgtgattcaaactcatctggttcaaatnctctggacaacttactcaccaaggatggggattttgatgtaaagcaatcg

SEQ ID NO: 16434 - DNA, 328 bp, Glycine max
accacgcgtgcgctagatttgaagatcttggcattgcctcactcttgcttgcgccaagatctgtcctggtccgctccccgcctttttctttttttagatcttggtcttatccatgatgtcgtataacttcaaatttgaaagctttacctttctgagattgcttcttttttgcttctatccccttccccttttggagtatgaaaattttcctgcaaaattactgagctacgatcactgagtgagagacaagacttataacgatgatgaattatttcccggacgaggtaatatagcacatatttgactatgtggtgtcacacagtgatcg

SEQ ID NO: 16435 - DNA, 245 bp, Glycine max
  modified_base (74)..(74): a, c, g, t, unknown, or other
ttagatcctgtggctgaaaaacttcgccaacaaagattaatcgaagaagcagattataagggcactaaagaatngttcagtgggggaaaagaaaaagatgaaaagaaccttgacactttcatacccaaatctgagagtgatttcttggagtatgcacagctcatctcacacaagctccgagcttttgagaaaagttatcattatattggcttgctgaaggcagtaatgagactatcaacgatatc

SEQ ID NO: 16436 - DNA, 295 bp, Glycine max
  modified_base (4)..(4): a, c, g, t, unknown, or other
gcgnccacgcgttcgggaacaacagcaggtacaaagggctggccctcgacgacgccgttttggcggacaacaacgccgaagcgaaggccgttagagatgacggccagggtgactgaacggaaaggcagaccggaaactgggttttgaagattctgcatgtgaagtccgtgtgggaagggaaacagcgcaatgaaaaggatggtacggctcatgatcaaactcaaaccaatttcgacgaggaggaggtgtgtgaatgtgatgcttgcggggttgatgaaaatgacagctactgtga

SEQ ID NO: 16437 - DNA, 170 bp, Glycine max
cccacgcgtccggcatcacgtcccttttcaaaccaagttccacagacaccaacaacgctttagctctgtgttctctccgtcaccggcaccggcgatctacatctgaacccggtccaagcaatagatctcagaaatccaaatggagaacctaatgcttttggtcaaccaaa

SEQ ID NO: 16438 - DNA, 364 bp, Glycine max
gttctattctctgaacaatggcgtctctctctcacctcaacaaactcctctgcatgcccccgctcaactcttcaccctctatttcggcaccacgcagcagcgtcggaatttggaccaaacctgtcggaaggccgaggctactggtgcgtgtccgagcggtcacgagcgacgacgagtgggggccggagaaggaggaggcgtacggcggcggcgtagcggtggaggagaaaccgacgaagtcggagacggagacggagaagctgaagaaggccttggtggattcgttttatggcaccgatcgtggactgaaagcaacgagcgaaacgagagcggagatcgttgaactcatcacacagctcgaggc

SEQ ID NO: 16439 - DNA, 406 bp, Glycine max
gttttggagcttatatatgagttagcagagattgaacatggtacagaatttttgtcaaagactagcatgtttcaattgctttcgtcaatgatcagccacaattctatggaatcaattttaagatcaagagcaatgatgataagtggaaggctactgtccaaggatattatatactccttcacggatgaaccttgtgttaaaagctgtatttcgtctattgatggtagacttcagtcattggaagcttcagatagagatgaatgtgaaactgcactagaatcattgagtcatatgggatcatctatccagggagctacattactactctcagggtcatgacctgctgctcgacatgttataaatgctgctattgaacgacaaggaccaacagggcatggtaaacagc

SEQ ID NO: 16440 - DNA, 410 bp, Glycine max
cccacgcgtccgcaacaaccaaccatcaagggaagttagtgagagagagagagagagagagagagcggaagatgaatggtggtgaatcttatggtgctattgagacacagtacataagaaggcatcacaaacatgaaccaagggaaaaccagtgcacctctgcacttgttaaacacataagagctcctgttcaccttgtgtggtcgctggttagaagatttgatcaacctcagaaatataaaccatttgttagcaggtgtatcatgcaaggggacctaggcattggaagcgttagagaagtgaatgttaaatctggccttccagccacaacaagtactgagaggttggaacaactggatgatgaggagcaacaatcttggaataaggataagttggaggtgaccacaggc

SEQ ID NO: 16441 - DNA, 350 bp, Glycine max
tttttgcattctcaaaccaaggacaaatcctagagtttctgctttggttgaaagagagggacctgtgagtgtcacaaacatgggagaggagaatgttaaacaaccgttgttggagaggaagtactacaaggactgcccaggttgcaaagtggatcaagccaaagagttgagtgagggaaagggtgtacctgttaaaaatctttttatcatgtggatggtggtgctgagtgctgcactgactatattcatctgtctctagattcctctatttcatggtgagggatttcaatattgcgaacacagaagctgatattagctcttatgctggatatggtggctctttattcatg

SEQ ID NO: 16442 - DNA, 417 bp, Glycine max
cccacgcgtccgcccacgcgtccggctacttcaccactccaaacccaccacaccaccagtgttcatatctcattctctaacctttcactctgccttactcactctctactttgctcatcatcgtagatgaaccaacacttctagtctctcttactttataaccatgtaaaaatgagtcacctaatgaaaaattagtagcttcttggtgtgctttttattttggttgtgttgagataaatttgtttgtttgtttggtattgttttgtgttttatgaattatttgatgggtgaagaaagagaagtggtgagaaagccaggacaaaggggtgttggtggagataagtgggacttgtatagctggttacaagactgtaaatattggggctgtgtaatacacgagactagttctctttcgat

SEQ ID NO: 16443 - DNA, 470 bp, Glycine max
gttccaaacttcttcttggaatgtcccttccttaatacccctcaaagaaaagccaccttaacatctggtctctgaaaattctctttagagagatagagagaggaagaaagaatggcagcttgcactgtctactcaacacaatctctgagcacaaattgctccatctcaaccccatcaaagacgcaactcagttttttccaccaaaagcaggtagttttctggaggaacagcaagaagggcagctgcagcagcagaagaagctatgtgataacatgtgcagcaggtgactcacagacagtggtgattggcctggctgcagactcagggtgtgggaagagcaccttcatgaggaggctgaccagtgtgtttggaggagcagcagagccaccaaagggtggcaaccctgacttcaacactctcatcagtgacaccaccactgtcatatgcttggatgattaccactctttgga

SEQ ID NO: 16444 - DNA, 191 bp, Glycine max
gaaagaataagggttaatttggcctaattgaaattcggagtgaaactcgggatctcgtccaggcttgcatggaattgaattaataattcaattccatttctattaataaaagagtgaaagcagaaatttaaatggaatgtatagggtggggccaccattatcataaaaaatacttagttaaaaaaacgaaa

SEQ ID NO: 16445 - DNA, 367 bp, Glycine max
gcggacacacgtgctgccacgcttccgggtgaaaggaaagccatttccaatccaatacgcgcaggataggaccctgttggggatacacgcgtacaggttcataccgatcaacttggctcatgggtagtcatgagaactaaattgccatatatgatgcctttaaatgggacgcattcggcagtgggtttcctcaagatgttctgtcttgtccccatatcatatgcagcttatttcctgcacagtcaggtaatatatgctacatcttgtgatgccaacattggtgtttttgatgctgatagcttgaggctcagatgtcgcattgcttcatcaatatgcttgtcaccggcagctttaagtggaagtcaag

SEQ ID NO: 16446 - DNA, 256 bp, Glycine max
  modified_base (235)..(235): a, c, g, t, unknown, or other
cccacgcgtccggcttctgcagaagtagagttccgatgctttgttggtgggcttgcttgggccaccgaccacgatgctctcgagaaagccttctctcaatttggcgaaatcgtcgaatcgaaggtcatcaacgatcgtgaaactggaagatccagagggtttggatttgtgaccttcgccacagagcaagcgatgagagacgcaattgaaggaatgaacggccagaacctcgacngtcgtaatataaccgtgaacg

SEQ ID NO: 16447 - DNA, 410 bp, Glycine max
cccacgcgtccgtccacgcgtccgtcgcaccagtttcaccgcacgaatatcttggtgtttggagcgatccgagaaaaactcttgtaacatgttggtttaccaggacctccttacaggtgatgagcttctctctgactacttccgttacaaggaaattgagaatggaatgctgtgggaagttgaggggaagtgggttgttaaaggagcagttgatgtagacattggtgcaaaccactttgctgagggtggtggagaagatgatggagttgatgatgcagctgttaaggttgttgacattgttgacacattcagactttaggtagcacccgcattcgataagaagcagcttgttacctttcatgaataggtttatcaagaatttgacttccaagctcgatgcagagcaacag

SEQ ID NO: 16448 - DNA, 304 bp, Glycine max
agtaatcattctgtggcaatatagttgatattttggagacaagattcatttcaacttgccttaattgtcaccattggattcacaggttctacatctgcaccaatgagcatgtcatggatcagtttgcctccaataggtcgatgctttgggaaaaattttccctggattttggtaatcgagattgtaacttatgggcttaatccatgcactatgttttaatctgaataatgattggctgacacctatggcaaatctataccttgagagagagacttagaagagagataatttgatgagtgacatg

SEQ ID NO: 16449 - DNA, 137 bp, Glycine max
tcggcttcatagaagtgctttaatgatcacttcaccttcctttgaagttaaaggctccttacttccttcgtgcttagctatttctatgaagctttcagtttcactggaaaatagtgaatacttaacaaggtgatata

SEQ ID NO: 16450 - DNA, 413 bp, Glycine max
  modified_base (339)..(339): a, c, g, t, unknown, or other
gaaaaagctttgaaagatgctggcttgggaagtagacaagtcacaccttttatgaggttacgggtagttggattaacttataaaactagacaagacaaacctaaagaaggcatagtagcaatctggaatccaactgagacacagcgtcaggagttggtggaaggaggagcatatgccatttcaggactcatgccatcaagttctgattctgatatccttcacttggatactagaggatcttctaccaagtggttgccattatcttataattcaaggaaacagtttaagccatttttctgcaatagaaaatcgatcccattgactagcttgggtgacatncctctttccaacgagtttgacattactgcataatgtgtgcatgttggaaggggttatatatcaaatcaacaaag

SEQ ID NO: 16451 - DNA, 368 bp, Glycine max
cccacgcgttcgcaaaggtgctcagatttttgaagctctgggtctttcatcagaagtgattgaaaggtgctttgctggaaccccaagtcgagttgagggtgcaacatttgagatgcttgctcgtgatgctcttaaattgcatgagttagcatttccttctcgggttttctctgctggaagtgctgaagcaaatgcattaccaaatcctggggattatcattggagaaaaggcggtgaaattcacttgaatgatccacttgccatatcaaagcttcaagaggctgccagaactaacagcatagatgcatatgaacagtactctaagctcattcacgagttaaataaagcctgtaatttgcggggacttc

SEQ ID NO: 16452 - DNA, 412 bp, Glycine max
agccaagctaccagtggattaagaaaagttgactcggcaaatgattcagctactggagttacccccagaaaaggaatgattctacctttccaaccacttgcaatgtcttttgacactgttaattactacgtcgacatgcctgcagaaatgagagatcaaggagtgacagaagataggctacaactgcttatgggagtaactaggtcctttaggcctggagtcctaactgcactaatgggagttagtggagctggcaagacaactgtaatggatgtgttagcaggaagaaagactggtggctacatcgaatgagatattataatctctgggtccccaagaaccaagaaatctttgcatgagtctctggttactgtgaacatactgatattcattcaccccaagttactattag

SEQ ID NO: 16453 - DNA, 398 bp, Glycine max
agccttcgggaagaggggaaatggaaatgagtacggggtcggggggggatttggacaccacaaccaggtggaaagttcataacctaaccggcatcggttcaagaactttcgaggccaaaagatgaggaaaccgcaaatttaagcattggtaggagcacttgtttgcttcctcttactcaggatcggaacctcagcatttcccaagtcacaggactaccatgattttgccgaccacggtaccttcctcggaattcccaatgcacttaacgtgatatccaatgtcccttgtctgggtatatggcctggttggacttgtactctgccatcatggaaataactttaggctcagcttgcaaggtgaactatggggctggacatgcttctatgttggcgtggct

SEQ ID NO: 16454 - DNA, 444 bp, Glycine max
gccacccttatgaacattgctgataaccccaccaatgtgcagcttcctggtatgtatgacaaggaagagaatccccgtgtgcccatcatcggcaccggtaacgatttctccacactctatgcgcctctcatccgtgatgggcgtatggagaagttctactgggcaccaacaagggatgaccgcattggtgtctgcactggaatttttcgcaccgattcaattcctgaacaggacgttgtcaagattggtgacaccttgcctggccaatccattgatttctttggtgcactgagggccagagtatatgatgacgaagtgaggaagtggatttctggtgttggtgttgacggcattgggaagaagcttgtgaactcaaaagatggacctccaacctttgagcagcccaagatgactctggagaagctcttgacgtatggtaacatg

SEQ ID NO: 16455 - DNA, 63 bp, Glycine max
tcggagccactttatgaaattacaccatgaatatggcggatgcaaattcctaatttctaagaa

SEQ ID NO: 16456 - DNA, 445 bp, Glycine max
gccacccttatgaacattgctgataaccccaccaatgtgcagcttcctggtatgtaggacaaggaagagaatccccgtgtgcccattattggcaccggtaacgatttcttcacactctatgcgcctctcatccgtgatgggcgtatggagaagttctactgggcaccaacaagggatgaccgcattggtgtctgcactggaatttttcgcaccgattcaattcctgaacaggacgttgtcaagattggtgacaccttgcctggccaatccattgatttctttggtgcactgaaggccagagtatatgatgacgaagtgaggaagtggatttctggtgatggtgttgacggcatttggaagaagcttgtgaactcaaaagatggacctccaacctttgagcagcccaagatgactcttgagaagctcttgacgtatggtaacatgc

SEQ ID NO: 16457 - DNA, 490 bp, Glycine max
  modified_base (165)..(165): a, c, g, t, unknown, or other
  modified_base (309)..(309): a, c, g, t, unknown, or other
  modified_base (342)..(342): a, c, g, t, unknown, or other
  modified_base (358)..(358): a, c, g, t, unknown, or other
  modified_base (401)..(401): a, c, g, t, unknown, or other
  modified_base (404)..(404): a, c, g, t, unknown, or other
ccacctccgatcgaagactagtacatggtgagccaagtaggaaagaggaggcgtcactcgagaggtcaccatgcaacctcacaaacgcttgcatggctgcacattcaagaagaaggctcctaaagcaattaaggagataaggaagtttgctcagaaagcgatggngacgaatgatgtgagagtggatgtgaagctgaacaaggctgtgtggagccagtggattcggagcgtcccgaggaggattagggttcgcattgcccgaaagaggaacgacgattaggatgcaaaggaagagctatattcccttgntactgttgtcgaaatcccccaagatgagctcanaggtttgggaaccaangttattgatgatgaagattgattatgtattgcttacatatctngtntattttatagttgatgcagaattgcgaatatcttttaattttgtgagacattggagatatttaagttgataatatcgattgctttc

SEQ ID NO: 16458 - DNA, 393 bp, Glycine max
accacgcgttcgtccacgcgtccgggaaggtgatgaaggatcttgctatgaggctagagaaactaggagagcacctgctggacttgttgtgtgagaatcttggcctagagaaaggcgtcctcaagaaggctctctatggatcaagaggaccaacttttggcacgcaggttgccaactacactgcatgccccatctcagagactgtgaacggtctatggaccacactgatgccagtggaattatgcttgtatagatgatgacaaggtcagtggactgcagcttctcagagatggccagacagactgacgtgccttctatgcaccactggattgctgataacattggtgatcagctagaggttatcaccaatggtaagcacaagagtgtggagca

SEQ ID NO: 16459 - DNA, 309 bp, Glycine max
aacatccccttttcttcttctcacttctctccaagttttttcttcacatttctctgcctttgatctgcacacacaacaacatccctctaaaaaacatagagggataaaataaaaacatgaagaaatttgtactcaagttagatttgccagatgacaaggcaaagcagaaggccctgaaaacagtttcaacactttcagggattgatgccatctctatggacatgaaggagaagaaattaacagtgataggaacagttgatccagtgaatgttgtgagcaaactccgcaagtattggcagacagacatac

SEQ ID NO: 16460 - DNA, 147 bp, Glycine max
tcgcccacgcgttcgaaaaatatctcctaatgaaaggcggctttcttatgctcaaaaaagggtttcacatgttcctgatatcttttatcgaaagggccttacttaccgagatatttttgcactatcttgaggaccttcacttgggag

SEQ ID NO: 16461 - DNA, 408 bp, Glycine max
aagaacttggttaagaagtgccttgagctcttctttgaaattgcagagaacaaggaggattacaacaagttctatgaggctttctccaagaacttgaagctaggtatccatgaggattcacagaacaagggaaagattgctgaattgctcaggtaccactccaccaagagtggtgatgaaatgacaagccttaaagattatgtgaccaggatgaaggaaggtcagagtgacatctactacatcacaagtgaaagcaagaaggctgttgagaactcttcattcttagagaagttgaagaagaatggatacgaggttctttatatggttgatgccattgatgaatatgctgttggtcaactcaaggaatttgagggcaagaagcttgtctctgccaccaaggaagggctc

SEQ ID NO: 16462 - DNA, 418 bp, Glycine max
  modified_base (73)..(73): a, c, g, t, unknown, or other
  modified_base (217)..(217): a, c, g, t, unknown, or other
tccacgcgtccggtgctgcttaatactttttctcgcctataaaaggtccgccactgcggtacttgggcacttncagaacaactttttaatcatcgaagcccgcgcgagaagaactgtttgcgcggtccaaaacgcgtttccaagctccgtttcaaacccgtcgctatggctacgctcggcgctcgcatggtggccgccgcacccaccgtaactccgncggcctcgctcgacttcgaaaccttcgttttcaagaaggagagattacctcgctggacacgacgagtacatcgcgaaaggagggagggatttgttccctctgttgcagggtgctttcaaggggattaagcagattggcgtcattggatggggttcgcagggacctgctcaggcacagaatttgcgggactcgcttgctgat

SEQ ID NO: 16463 - DNA, 506 bp, Glycine max
  modified_base (1)..(1): a, c, g, t, unknown, or other
  modified_base (10)..(10): a, c, g, t, unknown, or other
  modified_base (36)..(36): a, c, g, t, unknown, or other
nccacgcgtncggatcatgagacctggaatgttcangtgtttagatccattgatggtggggctgctgttgggttcccggagactcctgaagatgctgccagagctggtcttattagtgggaaggataatatcattgatcgtagcattcaagatgcttatattaatgctattcgacgtgcaaagaacttcatctatattgaaaatcagtatttccttggaagctcttttgcctggagtgctgatgatattaagcctgaagacattggtgctttgcatctaatcccaaaggaactttcactcaagattgttagtaagattgaagctggggaaaggtttgctgtgtatgttgtagtcccaatgtggccagagggtgttccagaaagtgcatcagttcatgcaatattggactggcagaagagaacaatggagatgatgtacaaggacattattcaggcactcagagctaagggaatcgatgaagatcctcgaaactatttgacattctt

SEQ ID NO: 16464 - DNA, 171 bp, Glycine max
gacacgcgtacggagattccaaacctcttggattggctgcaactagccttatcctaagggagacaaaggagtacctgaacaatgtaagccgcataatgatcactcattgctcgcgcaggataaagagtaggacagtcctatgaccgctaaggcgaaggccaagaagcacac

SEQ ID NO: 16465 - DNA, 362 bp, Glycine max
gcgctcgaaaattcctacagagagagcgagaaggatgctgaagagagagcaaggcaagtacggctccgggggacctccttggtccttccgttgacgttcacaactcctttgccgatcagaacaataaaagaattgtcttggctcttcaaagtggtctgaagagtgagctgacctgggcgctgaatattcttacgctgctctccttgaaagaaaaggatgacatgcgcatggacgcaactcccattgcaaaaattcccggtttgcttgatgcgctccttgaagttatagatgataggcgtgatatagcactcccaaaggaattagccaagacaacgagggtgaggacgttaggtgcaagttct

SEQ ID NO: 16466 - DNA, 358 bp, Glycine max
tttgcctgtatgtaatcctcaaatacttctctagatcgcggctggccttgtgcaactattctgtctgtatgggtattccctgtttgtctttattccggccctgtgtatgtccgttgtgccactggatatatttagatgggtggttgcaggtgtggcagggttcatgtcagcaacatttgtggcactgaaactgctggcacatattaaatcagcaggtgaaaagtggttcttgattgttgctggcatttctcctgtgcagctggctctagactgtgtactaaaaaattaccttttcacagtatcagtttaagaggaaactggacagtatgaatgaaatatatacagaacgcaagtatag

SEQ ID NO: 16467 - DNA, 393 bp, Glycine max
ctcttctcttcgctcctgcacttgttgtttctttgcccttcatggcatctcaggctagccttctccgtgaaaagcagctcaaagatctttgcaaaaaccccgtcgacggcttctctgccggtttggtcgatgaaaccaacatttttgaatggagtgtcaccataattgggcccgccgatactctctacgaggggggatttttcaatgctattatgagtttcccatccaattacccaaatagtccaccttcagtgaagttcacctcagaaatatggcaccccaatgtatatcctgatggccgggtttgcatatcaattcttcatcctcctggtgaggatccaaatggttatgagcttgcaagtgagcgctggacacctgttcatacggtagaga

SEQ ID NO: 16468 - DNA, 362 bp, Glycine max
  modified_base (284)..(284): a, c, g, t, unknown, or other
caacacactagacaattttccaattcaattatcgattcccctactcacaaaaactaacatgcaatccatttctttgttcaattcctcaccaatattattccatccattttcaccatctaggccatgttctaatggcaagaaaatgaattcgtttgctccaactaaggcttccatgagaggatcagcggatcagaacttcagtggaaggttggtggatgagagcatgataatactgaggaagaggatccatgagatgaacatgatagataggaactatgagcctncttcagattggatggattgggagaagcgctattataacaagtatgactccatcatatgtgaagcagtgggagttttgc

SEQ ID NO: 16469 - DNA, 111 bp, Glycine max
tcgtccacgcgtccgaaaataagacattgtttggtttgggtacttgctcgaatttccctcgatcgcttaaagtgtatttgattaggtaaaccgaacgcggaaatctctttc

SEQ ID NO: 16470 - DNA, 427 bp, Glycine max
attacatgttttgatgtacataggtttattttaccgcttttataggtccatgataggattaacacatgacatgatctgaacttgtcttgatccggactaactctcatgtaagatcattatatctgatgcacttacggctgatgtcaatgttactttattaccatgtctaaacgaatcagctattgaaaaattagtagcttcttggtgcgctattgattttgtttgtgtagagataaatgcgattatttggtcgatattgttttgtggtttatgaatgatatgatggacgtaggaggatatttgatgagaacgcagggtcatacgcctgatggtggagataaatggtactagtatagctgcttactaaaatgtaattattggtgctagataatacacgagactagatctctttccatgctcccttttg

SEQ ID NO: 16471 - DNA, 296 bp, Glycine max
cccacgcgttcgggtaattaggttatgtaggtaattaggcaatttaattgctggtttcagtgtacaggtttagttgaattaaaaaagatgggttgtcatattctctaactgttgaaggattcttgtttctatatgtatgggggagtgtgaccgcgaaatgatagggcaccgggtactcttgataagcgattggtctgtgtaatgccactggggtcattaaaatattgcttagattagacacaaagaatatttcatgctcaaaaaaaaaaaattatgatgcataagaagagctatat

SEQ ID NO: 16472 - DNA, 401 bp, Glycine max
ggaagaggaagatgaagtgggttggtgttcttctgattcgggcgacggcgacggcgacgacgatgtcgaagaacggaaatctcagaatgtggatgccttgctcaggggcaacctcgtggtgaagagacaatcgttgctaccgcgacttctatcagtatcgcaaggagcggctgtttgtagaaagcccttcaaacctccatgctctaaatctcatgcttccgcttccgcttacaatcaagaccttactcgtaagctttccgctcgcaaaaggtttgttccctggggttcttcctctcctattcctattcctattcctagatctgccttagacgactccaaattcaatgttgctgttgctggtgctgatgttgccgaggagctcaagccctctttgccttccg

SEQ ID NO: 16473 - DNA, 379 bp, Glycine max
cagttcatcacaaaagaatgcttgaagttaaaatgacattcaggggccattaaagaaccttctgtcagtataaactctgaagcagtgaatattaaataaatagtatcaatttcgcctcatttttggtacatgggcacaggtatcaacatccgtaaaaaaaaattaagttggactcagcaaccaaaaacatcttacagtctaacactatgattttttataccttggaaattaaagtgcaacattctcatgttcaaacactagcccggtctttaccttctgctgcagcctctaatggctggagagctttgagaggattcataatgacaccatctatgagtccatattccttggcttcttttgcactcatgaaaaagtcacg

SEQ ID NO: 16474 - DNA, 375 bp, Glycine max
attaacgttgggtctttcccgggagagttacctcaaagtccccaaaagcatcataggacacaacagcaacaaagtctcatcctgtgatgaccctcttgacttgtccacacagactaattcacctcatcacagtgctgtttcctccttctccagtggcagggtcaagagggagagggatctcagctgtgaagaagttgtggatgcaaaagagattgatcagagggatcttagctgtgaaggaataataagagccaccgaagaagaagaagacggcgccgccaccagaaagaaacttaggctcaccaaagaacaatctgctttgctagaaaaaagcttcaaacaacatagcaccctcaatcctaaacagaagcaagc

SEQ ID NO: 16475 - DNA, 356 bp, Glycine max
cccacgcgtccggtcttcttcatcaacggtggcgtatggatcaatccgtttgataggaaaaccaggggcatttccaatggctaacgaaatccctcacgatgaggtagtgtgcgttaccggcgccaacggtttcatcggttcgtggctggtccgaaccctcttggagaaggagaacccacgctacaccatccacgccaccatcttccccggctccgacgccttccacctgttcaacctacacccctccgtcgtcagccgactcaccctctttcccgacgacctcctcgacgccgacgtcctctgccgcgccattaccgtctgctacggcgactttcacgtggcctccccctgcaccc

SEQ ID NO: 16476 - DNA, 411 bp, Glycine max
cccacgcgttcgcaaacacgctgttcctacaatcattccaaatgtgcccttccggtcgcaccctcctgccttcctccgtctccgatttccgaccggcattcgacgtcctcgatgccgaccgcgacggcaaaatcagccgcgacgacctccgcgccttctacgccggagtcggcggcggaggagatgacgtgatcggggcaatgatgacagtggctgacaccaataaggacgggttcgtggagtacgaggagttcgagcgcgtggactctgcggagagaaagcccgtggggtactgaggggccatggaggacgtgttcagggtcatggacaaggacggcgacggcaagctcagccaccatgatctgaagacttacatggcctgcgctggttttccggccaccgacaacgaca

SEQ ID NO: 16477 - DNA, 256 bp, Glycine max
aattgttgtaactctatgattcctaaattctctaaaattcgaaattctaatttcgttaggggaaagagattgtttgtgtgtgagtgagtatggctggaaaaggcgagggtcctgctatcggaatcgatttgggaacgacgtactcttgcgtcggcgtgtggcaacacgatcgtgttgaaatcatagccaacgatcagggtaacagaactaccccattctacgtgggttttaccgacacagaacggttgatcggcga

SEQ ID NO: 16478 - DNA, 410 bp, Glycine max
cctaaatctgaacaaagaaagctttccgcatctgtcgttgcgtttcagttacgtgaagaccatcggcgtcaccgaccggagcaacctcgcctgcctgacagaacttaaaaaacccgactcttcaaatttactctacttcataccgaagctccatagtgaacaggaactcagaaacaaatgccattggatatcttaatcttgtgactgaaaaaatatataatgtctgaagaggctggatctatgttggtagttgatgatgatccctccgaccaacgctcactatctttggatgatgcaagcagcacagaggagtcacctgatgaaaccaggctctccttggaaacaacagatgatgctattccatatattggtcaaaggtttgccactcatgatgctgcttatgaattcta

SEQ ID NO: 16479 - DNA, 282 bp, Glycine max
atgcagcgtcaccggtgcgcgactccacgcgtccgggacactttaacagcattctctctctctcgagtctcttcactccgacattgctcgccttcacaccccgcaacacaacggacacattctgagactatttatagttatccccattctggttatgttctttctttcttactccctctcaatcaaaccgtgttagggttagaactaagattagggtttctttactttacccgcgttatgtaatgcgtcgaaaacccgcaattctacccttctttcaacaac

SEQ ID NO: 16480 - DNA, 389 bp, Glycine max
caacacgctatccccattgcttcttctcttctccctctctcgcttcctacttgacggcgccgtttcggtctccagaagatgcttctgagtacttcgcgcttgaactagacatgatgagttcaagtttcaagacatgggctgtgggatttgcacttggaaatgaacgagaggcaacgttggagagctgaagaggatgctttattacgttcttatgtcaaacagtatggtcctagggaatggaatcttgcgtctcagcgcatgaacacatatcttaacagggatgctaagtcgtgcttggagaggtggaagaactaccttaagcctggcatcaaaaaaggctctcttactgaagaagagcagcgccttgtcatccacctttaagcaaaata

SEQ ID NO: 16481 - DNA, 259 bp, Glycine max
  modified_base (99)..(100): a, c, g, t, unknown, or other
  modified_base (189)..(189): a, c, g, t, unknown, or other
  modified_base (191)..(192): a, c, g, t, unknown, or other
  modified_base (203)..(203): a, c, g, t, unknown, or other
  modified_base (205)..(206): a, c, g, t, unknown, or other
  modified_base (229)..(230): a, c, g, t, unknown, or other
  modified_base (243)..(244): a, c, g, t, unknown, or other
ttcccggggtcgacgccacgtcgtctcgtcccacgcccgtctcgtaattttgactggggctatttaatagcatataattgcttagcaaggggcttctannattttaaagggtgttggggttgaaggggtgttggctttaagtgtgcagaatttgcagatagcataggggttttgaaatacatctgcaananngttgtcctagngnnagcatttctttaactttgaatannacataattatgannaatttttttctttca

SEQ ID NO: 16482 - DNA, 333 bp, Glycine max
ctttttctctctcttccctcttcaatcttcacattttctctatggagaatcatggcaacaagcgagtgtgggaccagtcctctgactccaacactcagcgggtcgactcgcccgagtctaagattcgtcgagttgactcgtccgattcgggtattaactcgtccgagtctcaactcgaatcggtcctcgactcgtcggaggtgcagctacaagacgacatttttaacatgcttgacgacacggacaatgtgcccgagcgtgactcggtgcaaggtcttgactcagtgatcaaaagcttcgaggatgagataaatgctccaggttcggattctg

SEQ ID NO: 16483 - DNA, 372 bp, Glycine max
gtggaccattgcggattgagaaaagagaccatcagaataaggaataagagtcacttctataggaaatgaaagttaaattaaaacaaaaaaaagaacttctgttctgctaagaaaatttagcagtctcgagaattatttgtttttaatttaaaaattaagtaatgtaattttattttttttggatagaaaagtttaagtcatgttttttttactacatttggaagaagaaggtatattattatttactcatgatcattgttgttattattagcttggcaagatgtatgtaaatgtctttcctaatgattggaggcaatgaatcaagatttgatgctcttataataaaatgttattaattgctttttatcgctc

SEQ ID NO: 16484 - DNA, 293 bp, Glycine max
ctcgctcctacagtgcatcacaggggcacgcccgaagctaaaagcgcattccgcgtgcattaaagaacctgcggtcactctaaactctgaagcattgaatactaactagataggctcaatatcgcctcatctgcggtacatcgtcaccggtatccacatccgtaacaaaaaatctagctgcactcacaatccccaaacatcttacagtctaacactatgacttcctataccttggacattacagagcatcatcctcatgttcaaacactagcccggtctctaccatgtgctgc

SEQ ID NO: 16485 - DNA, 142 bp, Glycine max
cttccggaaatattggttaaaccggttgaaatttggtcaaggaccctgccaaatgaaaccgagggaaaatctaaggttgccctttttcaggattaaatggaaaagccattggtccttgccttggcaattggccaaaaccggt

SEQ ID NO: 16486 - DNA, 254 bp, Glycine max
  modified_base (239)..(239): a, c, g, t, unknown, or other
attcttacttagctcacactctgcactctcttttcaattctgcttccaacacactttactgcacattctccattttcgttctcacttaattggcgcgttaaacccttcttcattgctgcaacttcacgcgccagatctgcaaaaccattaagctatgcttcagcaccactacgcatagcttattccaaaaatgtgcaattccaatcctaacaaccgtaaccgacacgctccgtcgccgncggagcccaagccca

SEQ ID NO: 16487 - DNA, 340 bp, Glycine max
acgatcaccggtcgcaagatcatcatcgatacttacagccgatggcttgctcatggtgggggtgccttctgcggggaggatcctaccaatgttgatagtagtggtgctcacattgtgagacactctgctaagagcattgaggcaagtatactacccacaaggtgcattacgcaagtgtcttatgccattgctgggcccgagcctttgtctgtctgtgctgacacctatagcacctgcaagatccatgatgagtagattctcaacattgggaagctgaactatgatttcaagcccggtgtgatcttcatcaacccttatctcaacaggggtgggaattaca

SEQ ID NO: 16488 - DNA, 374 bp, Glycine max
ccacgcgtccgccagcgtccgccacctccggaagtcttttgcatccattgggaatgcactgaagaaaatgctgctcccttcatgtgagggtttcccccgtgaaacttgttgaacacccgtgtttctagcatacctgcaccagaagcaccagctcctacattgaaagtccaccagaaaagaataatgagaatggagcaaggcttatgcaatatttgttgcaaatttgcccatgaatgcaacagtggaacagctggaacgtgctttcaagaaatttgggcccattaaacaggatggtattcaagttagaagtaataagcaacagcaatcttgttttggtttgtggatttgaatcggctacttcatgcaaagtgcac

SEQ ID NO: 16489 - DNA, 385 bp, Glycine max
gaacaagcagaacaaacaattctaattccatgtctaggaaatgagcctctacctaatcctgagtggaagaatagcatgtttggtttcacatctcatctcagatatagtttttcacatttattgagaagctagtagttataactttagccttttatatcctaaacgtgatttcttacttctcaactggtttctaaacaggcatgtatgtaaggaattttggatcctcaaagaaaattgaatgccaccatccaaaagaataagattattcattaggggtacttaatcataatcaggagaaggaagaatacatactcggagcatgtggagacttttcttgaaattttggaccaaaagggggtgacagttcctgttctggtgttggttt

SEQ ID NO: 16490 - DNA, 279 bp, Glycine max
gtctaatcactctagctgatgcaaatttctactatttttcaatggcttctgcataggtcaaattgggatactttcatgctgggcttgatatgttcaccggcatactattccctacataaagcctttacaatctactgctacatctatcaatctatagctatcaactaccgtgatactgtaaagttcagaggattccgatctgttacctttggctcatatcaatccatgaatgatactatctgcggaatgaacaaccaatacctttactgattcaacatc

SEQ ID NO: 16491 - DNA, 364 bp, Glycine max
ggaaagttagaaaccctcatcgtcaaagcacgcgttttttctaatctctctctctggacaaatatgtgtggatagatgcaattcaccatgtcgagctcatcgcagtactctgaattttccggccagaaaccggcgaggtcgccggagaaatcgagcttatctcagacttgcagtctgttgagtcaatacatcaaggacaagggtagcttcagagatcttaccctaggaatgacatcatgtgggtcacctgagacatcttgtcaatctgctacaaccatgaacttgtttcctgccaaggaatacatcagggcaccaaagacacctgacagctatggatctgatctctacacaagcttacttctat

SEQ ID NO: 16492 - DNA, 272 bp, Glycine max
tcttcctatcactcgtccaaatctcatgatgtctacataatcatatcaatcatgctattctgctgttctctatgactatgcatttccatccatagatccctaaatctacatttaaaaaggaaaccccaaatctaatgactaaactatcaatcaatcatattaataatccatcaatcaattatcgaataccatactcaaagacctcaatactatcacacacatctataaccgatacttcatcaaccatatctactaccgttcttttctgaatc

SEQ ID NO: 16493 - DNA, 396 bp, Glycine max
cccacgcgtccgaacaaaacaacgacccaactaaccctaattcaacttttccgatgtgatcacttcgagtaaaaattccaaatgagtcgggcacaggatgcaaaccaatcattcttcccttttggaaatccttttaggatgatatcacctaaaagccctaaaatttcttcacagctgttgttaattctacatgcttttgaagcaactttggaagagaggctgaaaaagcttattcccaagagcaaggatgagatcctcagcttgtcttgcatgactttggctatgcagtcactttgtgagagccataatgacattaataccatcataacagagcttgagcttcctgtacatgattgggatgagaaatggatagacgtgtacttgacattagtgtga

SEQ ID NO: 16494 - DNA, 391 bp, Glycine max
gcgcccacgcgtccgcttgtgtctacaatggacatatagcattttccccttcccactcagatccagtgggcgttttttgagccaacggtgctgattcgttcgcgcggaatcttgctcggcatcggcgtgtaagtcatctgtgaattcccttgggcaagatggctttggggaaatatgctacagtagatggtagaagatcgtcgagttggtgttcaacggtgactgttgtcatgtctgaggctctgtgcttggatgacgtctggatgatgacatcatcttcagatgatcctgtgcgtaacggacacgatacccaggagaataagaaccaagtgaaagaacaagcacaggtgatagaagcactgagtgacgtcagcaatagctatacgcggca

SEQ ID NO: 16495 - DNA, 188 bp, Glycine max
tcgaacacacgtatacttctctctgctacttacttcaaatgcccttgtgtctcactggggctttcttaacctcaaaatttttaagaatctctaacccatcctgaacaatcaattccttctttcactcaattgccgacttaatttcttaaattttgcggaattagggtacactttaggaaaattccaaa

SEQ ID NO: 16496 - DNA, 387 bp, Glycine max
gcggccagcgttcggaaagtcctcacttgttatcaaccctaaacgtttctgatctggttccccacgacgccaatgcgttttttcaacacaaccccctttccaaaacccttagggtttattatggatcccaagcatcagtatcgaaactccccgaatacgagatgccatcggtaacatggtgcgtaatccagggtctcaaggagaactcgtttcgcgagtaatcatcttcgattacctcaagtgtttgggaatcatccccgaccaactgcactacctttagctttcctccaccgtcgacgtcatgctcgagcgcgtctagtttctccaaaaattaggtcttaccgtctactacatttacaattacccttttaattttgggttcaattt

SEQ ID NO: 16497 - DNA, 394 bp, Glycine max
attgcagctggaggaattgtggatgctcggggttatgttgctgctctagcacttggtgctcaaggggtctgtctaggcactaggttttgaaatattacttttacattaatcatatttgaggaaattgttctcatattgctgcagtaatttcttagcatatgcagtttttgtgttcaacttaagaatagttgttgcctacgtagaagcctctcatcaggctaataaattgcacagtttattcctcatgagactataattgtattcacttggttgtgaacagatgtacacagttcccccaacatcatcaccatgtccaacctaataatctcaatttatattcgacattttttctggaactattacaccttttcgtatatgtgtttcatgccaagat

SEQ ID NO: 16498 - DNA, 389 bp, Glycine max
cccacgcgtccgcttgtgtctacaatggacatatagcattttccccttcccactcagatccagtgatcgttttttgagccaacggtgctgattcgttcgcgcggaatcttgctcggcgtcggcgtgtaagtcatctgtgaattcccttgggcaagatggctttggggaaatatgctagagtagatggtagaagatcgtcgagttggtgttcaacggtgactgttgtcatgtttgtggctctgtgcttggttggggtttggatgatgacatcatcttcagttgttcctgtgcgtaacggagacgaagcccaggagaataagaaccaagtgaaagaacaagcagaggtgaaagaagcagtgagtgaagtcagcaatagcaatacgcggcag

SEQ ID NO: 16499 - DNA, 337 bp, Glycine max
cgcgttcttttctacggagcctcgaccaagaagaatcgcagtgagaagaagagggggtcagagtgggaaagagaaagagagaattcgtaaaccctaatttcggaaagatcggcgatgactgcctccaaggatcgcgagaacttcgtctacatcgccaaactcgccgagcaggccgagcgttacgaagagatggtggaatcaatgaagaacgttgcgaatctcgacgttgaactgacggtggaggagcggaatttgctttctgttgggtacaagaatgtgattggtgctcgcagagcgtcctggaggatcctgtcttccattgagcagaatgaagaaa

SEQ ID NO: 16500 - DNA, 369 bp, Glycine max
gccacacgtccgcttgtgtctacaatggacatatagcattttccccttcccactcagatccagtgggcgttttttgagccaacggtgctgattcgttcgcgcggaatcttgctcggcgtcggcgtgtcagtcatctgtgaattcccttgggcaagatggctttggggaaatatgctagagtagatggtagaagatcgtcgagttggtgttcaacggtgactgttgtcatgtctgtggctctgtgcttggttggggtttggatgatgacatcatcttcagttgttcctgtgcgtaacggatactatgcccatgagaataagaaccatttgaaagaacaagctcaggtgaaagaatcattgagtgaggtca

SEQ ID NO: 16501 - DNA, 399 bp, Glycine max
gttctctcacacactcattcggtgctccgaatctcagattctaggggtagggttcggaatttctccaccgatcagaaaatgagttcaactggtggttctaccaagggcggaaggggcaagcccaaagcctccaaatccgtttcaagatcgcagaaagctggtctccaattccccgttggaagaatcgctcgattccttaaggctgggaaatacgcctagcgtgttggtgctggtgctcctgtgtacctctctgcagtgctcgaatatctcgctgctgaggttttggaattggctgggaatgctgctagggataacaagaagaatcgtattgttcctaggcacattcagcttgctgtgaggaacgatgaggaactgagcaagcttttggggtctggtacc

SEQ ID NO: 16502 - DNA, 334 bp, Glycine max
acgatcgttttcaatatgcagatcttcgactaaaccctaaccggcaaaacgattacacgggaggtcgagtcctccgacacaatcgattacgtgaaagctaaaatccacgacaaggaaagcattccaccgtatcagcagcatttgaacttcgacggtaaacaactcgaagacggcagaactctcgcagattacaatattcagaatgaatcgacgctgcatctcgttatacgccttaactgaggcatgcaaatcttcgataaaaccctaaccggtaaaacgattactctagatgtcaagtcctctgacaccatcagtaacgtgaaagctgagatcc

SEQ ID NO: 16503 - DNA, 355 bp, Glycine max
cttactttttcgcgctcgctctgttgtgaatagagattcatcacttccactcggcccattctccggtttcttcaaatcgtaaacttttttgggattgaagaccgaatcgttagaaattttcagggtacaatggcttccaacatctcgcccgctgcctttgataaagaacagatatttggaatggctgaaaaggagatggaatatagggttgaattattcaacaagatgacccagacctgtttcaagaagtgtgttgacaataggtacaaggagtctgagctaaatatgggtgaaaatagttgcattgaccgctgtgtttcaaaatactggcatgtgactaatctagttggtcagc

SEQ ID NO: 16504 - DNA, 316 bp, Glycine max
cccacgcgtccgcagaacgtaggtccacacataagtaccacaatcgcaatacggactcacaggtgtacagaacgatttagaagaacgattagaccaaatattctgaaaagcgctttagcttggataagaccatggaatacataaacttataactgaacacattatccgcaggggacatcaagaacgtagaccttttcttcaaaatggacatattccctatcattacaatgtaccacaacactatatatgctgacggctctaacacccacgtacacatagactccggcagcaacgagacgtggtactaccccgtgaa

SEQ ID NO: 16505 - DNA, 378 bp, Glycine max
cccacgcgtccgcaagatttcaggtccaaacaaaacttatcaaaatctcatatactgattcagttggatacataaccatcgagatttactatcaaaccaaaaattctcaaaatctcttcacctctgtgatgaccatggaatacagaaccttagaactcaacatcatatccgcaaaggacatcaagaacgttaacctcttctccaagatggacgtatacgccgtcgttacgctctccggcgaccctctccaccctcagggcgccaccacccacgtccacaaagacgccggcagcaaccccacgtggaactaccccgtgaaattctccgtcaacgaatcgctggccaaagagaatcggttgtctcttgagatcaagctcg

SEQ ID NO: 16506 - DNA, 370 bp, Glycine max
tcccctcctcaacccacgcgtcgagcccacccgtccgcacctccttcgaagtctcaactgttttcccctccgcatgaaaccgaaatccaaagcaccatcacactttcgctatcaactcaatggaaaatgcttcgccctctatcaacatctcctctctaaactttcacttttaccattgaaccatacatcgatgcacacaagaaggttgtccacgttaacctctgaatcttcaagaccaaaatcggaaaataatctctgtaactagttattgatattgaaaaacaagttcccgaatgctaccagggctaaatagggttgaacacatgacagtgagacgaacctaatttttgcgtacaaaaccctgtcataa

SEQ ID NO: 16507 - DNA, 333 bp, Glycine max
acgaagatactccagacctgcatgaggaactctatacacacagacaagggggagctatgggatcaaaagaggaagaagacagagaataatccataagcaatcacatctatatgtagagcacatcatacaggagggctatcaaactcgcagatctaatataatcaggctctcgaggatactgcatacatttcatgcatatggcagcaacggctaggtatcatgctacaaaacgattacactgattgctactgtacatgttccatcaacagggatggcatcacaggataaactagtgactaaaccaagttcatcagacgatcttttgaccactat

SEQ ID NO: 16508 - DNA, 281 bp, Glycine max
gccagccttccgaatttactccactctattcacgggcatacaaattatctaaggaaggttatctacggcttcagctcacaccggctattaactcactccaatatgattggaatatgaagctcatcttttccttataactgtcactaaataccataggccattactcttattccaagggactcttattaattgtttcatgatccttttacaggtaaaagatatgaaagtaaagtcagaaaaatgttaaaggtatagcctatcacatatcggtctgctacact

SEQ ID NO: 16509 - DNA, 423 bp, Glycine max
aaagagctaacaagagattcaagaccggcatggctaatgaagaggaacagaaaaaccacctcttcggcatcaaagatctcggtcacaagactctccttcagagtgatgcactctatcagtatatacttgaaaccagtgtctatccaagagagcacgagtgcttgaaagagatacgcaagatgactgcaaaacacccactgaacatcatggcaacaccagcagacgaaggacaacttctgagcatgcttgttaagctcacgaattcaaagaacgccttggaaattggtgtattcactggttactctctgctctccactgccctggctcttccccctgatggaaagatcttggctttggatgtgaatcgcgaatactatgagttaggattgccaataattcaaaaagctggagtggctcacaaga

SEQ ID NO: 16510 - DNA, 417 bp, Glycine max
cccacgcgtccgcccatactttcaagtttcaactgttttcccctccgcatggaagggaaatccagggcacaggcacactttctctatcaactgagtgggaaatgctttgccctctatcatcatcttctctctaaactttcacttttaccattgaaccatacaacgatgcacacaagaagggtgtccaggtaaaagtctcaatattcaagaggaagattggaaattaatttgtgtaagtggttattgatattgaaaaacaagttcctgaatgctgccagggctcaatagggttgaagacatgacagtgagatgaacctcatttttgcgtacaaaaccctgtcagaaaggcttatttcttctttgacagtgattttaattttgcaatcttatttattcaaattatgcacggataattgg

SEQ ID NO: 16511 - DNA, 368 bp, Glycine max
gtaggccctcatgctgtggtctgaggtaacaatggatcccctggttctatgagtaaagcgaattcagagagttccatcaaacactaattaggacaatgaatccacagctaaaatcacgaatgaaaaagatgaccctgaaaatgcatgctcccctgacaggactagccaagaagttggtaaatctgctaaagtggagcatcataaagaggaaatggtggcacagataacagagattctatcggaatgacctactgaagaaagtttcaagtagcatatagcatattttctccagcatttcatacccgtgtacttatatacagtcttccaagtgagtgtttctacaatacttggcaaattttgattgaaac

SEQ ID NO: 16512 - DNA, 318 bp, Glycine max
acgaccacgcgttcaaacagcacgcagggatcatcatgaaccaccgcctgtctataaagtgagaggagactatagcgccctcatgcataaacatgggacactgcaaccaattgctaacaaaccaactgttataatggccacaactgacaagctagccgactagaacttggcatagatcccaccgtttagaatataatcaatgcgttataacgtgcacatgattactctatacccctatattcgaaaccttattacaccataccacaacttctttaatacaatgtacacacacgcataaaactattacagatatagtca

SEQ ID NO: 16513 - DNA, 374 bp, Glycine max
ttttccactcatttcaactcatttatatttaatccattttttctatcttatctattactcaatatcctacccactttcctttctttatcataattaaactatccaatcaaaaccaatccaataaataaacaaatccattcaataatcaaaaaattaaacatatttattctaaccctctatattaaactataccatttttcaaaaccatatctatcaaccactcatccatctctcctaaagacaatattatttaattcctccaaatataacataaccatattattatatacctccactatcatatatctcttattctattttaaatctatctatccccatatattaatatatatattatccaaacatcccttatt

SEQ ID NO: 16514 - DNA, 245 bp, Glycine max
aatgctctggaaataaaatgcttattcactttaatgatcagggtttacatcagtaaaacttgttattcaaacacctgttactagcataccattaccataagcaccaactcctagcatttaatgtccactcacaaaatgaattatgagaattgacgcaaggcttatgcaatttttgttgcaaatattatcatgaatgctacagtgtaactgatagaacgtgctatcaagaaattttggcctattaa

SEQ ID NO: 16515 - DNA, 390 bp, Glycine max
ggcggctactttagaatcagccttcatcctcttcgcacctcaacggttctccaatagccatcgtggctctgcaaaagcaccgatctccatcaagctccatgcttccacctcccttttcttctcttccaagtcctccttcaaaacgggaagactctgcttccagttatgctccactttgcaagaggtagcagcaacagaagaaacacctgagctaacgcaaccaacagacaacgtaaagaagctgtacgtggttaacttgtcttggtctctgacggcggcagacatcaatgacctctttgcccaaagcggaaccgtaaccgacgtcgagataataaagagcaaagacgggaggagcaagggctatgccttcgttactatggcttcccggga

SEQ ID NO: 16516 - DNA, 416 bp, Glycine max
tgcagtaccgtccggaatcccgggcaaaattctggttcaaactgcaagcaagtttgtggtgtatatggctctctaaagtgagagagatgcgttgcggataaaagggtattgcaaccattgattagaaaaccaataattaaaattggtacaacttctaagtttgacgtacttgaattatgtcatattctcaaccgttgattttctaatcaatggttataactgcacctactgtactgtagaggagctatatttgtgatccttaatacaccaaatcaattttctttaatacaatgttcacatgcttatattgtgatgacagatatgttgttgacagaatggatggtgatttgtgcgctaaaggtcttgatcctgataatgaatatacaaggcaacttattgatcatgttgtatctact

SEQ ID NO: 16517 - DNA, 346 bp, Glycine max
tcgacacacgcgtccagccaaccatgcgcacaatcgtacacacatgcgttcaaattcctagaacttgcacctcaggcacttacggtgtgacatttaaacagtgagttgagctgatctgaattggcaccaaagaaaaaaatacagttttcaatcctaaaccactaacaacttcttgctttcacacttctctgttgccgtgataatctggttgcagaagtttgactcatgcttaataaacttcactaaccactcaacttatatttgccgactaaaatatcccttatataactactaattctcatatgtgagaaaaactgaaccctctaatatcaccatattttacttc

SEQ ID NO: 16518 - DNA, 320 bp, Glycine max
gctactacgaccaagaggagggccacgtgtcctacgaggggatgaggttcgcctcggcggacctgggcacatggggaagcttctgacggcaatgcacaaagagcacgaacaacatgagcggggttttcacggggcagcacgggttggtgttcgatggcgatcacgtgaaggattgcgaaaaagatgagagaggaggggtttttgatattgatgtgaagctttacttaaacattaggcttaggctaggtgacttcataagaagtagctcaagggttagggcgaattgcgagcttcacgttactctggtttcgaggggagtg

SEQ ID NO: 16519 - DNA, 381 bp, Glycine max
gtaactatgtgttgaattggaaacattattgttaaaaacagagaaattgttgtccaggagataacggtatgacagctagattgagagttttgcggggaaaaaattgcaaaaaataaataaatgaaaaattcagtttttaagttctaaaataaaaaaactttgactcttcttcgctgctgggataatttggtttcagttctctttcttctgcgttattaacctcaataatttctcaacttctgtgtcccttgcttattttccccctcatattaattagttctcattgtaaagaggaactgaaactccttcaatctctttgttttacttttttctcggacaccatgattttcgatcaaaggtcaatgcaatctaagtccaacc

SEQ ID NO: 16520 - DNA, 388 bp, Glycine max
tggagattaacatgggaggggtcacagtagaagaggcacttagtactcagagattgttcatattagattaccaagatgcattcatcccatatttgacgaggataaacagcctacctactgcaaaagcttatgccacaaggacaatcctgttcttgaaagatgatggtactttgaagccacttgctattgaattaagcaaaccacatccagatggagataatttgggtcctgagagtatagtggtgttgcctgcaactgaaggtgttgatagtacaatttggctattggccaaggctcatgttattgagaatgactctggatatcatcagctcgtgagccattggttaaatactcatgcagtgatggaaccatttgccatagcaaccaa

SEQ ID NO: 16521 - DNA, 307 bp, Glycine max
ctgatattctgcattttctcgcttacttttcttcagcattcaacaaacttcttcaccctatctatgttgcaatcctttttttccattccctactattccctatcatctctctttgtgttctcatctttttccttttcccaaggcacatgtcaacacatgaaatggatcccgatgtcgttcgctggggtcttcatctcctacatgtctgcacactttctcaccatggttcccctaatattgtaactcaatatgatcctgatttaagtcaacttgaatatgttaccgaaggcttttgccagcatgagta

SEQ ID NO: 16522 - DNA, 357 bp, Glycine max
cgaagattaacatcaaacgtgccgcagacacaacaggcttcttataactcacagattggtaatattaggttaccatgaaacattgataccatatttgacgaggataaacagcatagctagtgcaaaagcttatgccacaaggacaaatctgttcttgaaagatgatggtacttagaagccaatagctatagcattaagcaaaccacatacagatggatataatttgaagcctgagagtatagtcatattggctacaactaaaggcgtcaatagaacaatttggatatcgatcacagctcatattattgccaatgactatggctatcatcaggtcatgagccataggttatatactaa

SEQ ID NO: 16523 - DNA, 148 bp, Glycine max
tcgctcctcaacccacgcgtcgcgctcacacatccggagaaaagttagggttcacatcgatttctcttccttcttcttgcggagtttcatcaatgcatcaatcatccattcattattcatcatgtcgatcacgacacaaaatcacttc

SEQ ID NO: 16524 - DNA, 335 bp, Glycine max
gttttcctgaacccttctgacatttccctgtcctttttttgtcaagggtgggttcggggatttggacttaaaagcatgaaaaaaactttggtaattggatttcctgaattagaagggttattatttcgacttctatgccttaaaatgtaaatttaggttgttattcatacgatgcatccttttccttgagtttttctgttactatggatggacattccagtggggctatatggtggcggataacacaaatgttgtcgagtcaaggtttatttatagatagactactcagattagatttgaaaaggaccacttacactcatgctatggaccaaaaa

SEQ ID NO: 16525 - DNA, 336 bp, Glycine max
gtttggttcagttggggctttgtgttaatctgtttttcacttttccgattatgatggacccggtgaatgaggtgatggagagacggttcttcgggtccaggtactgcttgtggctgaggtggatgatggtcttgatcataagcttggtggcgcttttggttcccaattttgcggattttctgtcccttgtgggaagcagtgtttgtgttgttctgagttttgtgctgcctgcgatgtttcattgtttggtttttaaggaggagttggggtggaggtgtgttctctgggatggggctattgtggtttttgggtttggtattgctgttactgggacct

SEQ ID NO: 16526 - DNA, 370 bp, Glycine max
cccacgcgttcgaccacgcgtccgaccacgcgtgcgctctcttaatttttttcttggatctctgcggtttgactgaattcttaggattgctctgaatcggtttagtcttcttcgttattcttcaaattcctcgtgacagatctaatctaatcaggcttttgggggtgtttcagacattgcatgcatatgggagcagtggttgtgttggatgctataaaaggcctacactgagagctactgtggatgtgccatcaaaagggttggctacacaaggtaacggattgaggaaaccaagttcatcataggatttttggaccactagcacgcatgatatggacaacagcgctgtccagtcgcaggggagcatcta

SEQ ID NO: 16527 - DNA, 110 bp, Glycine max
ttgcatttccagcttttaacgttaaattgagtgcgccgaaacttgaaatgggttaaacggtgtgcctcagcttcgcatcattgaaattttgattgagacaataattagtt

SEQ ID NO: 16528 - DNA, 335 bp, Glycine max
gtcacaatgtccagaatatgaaacacttaaattgagagcgcctaaagttgaaagcgggagacaacggtgttacagcatgctggacatcattgtgatgaagattgtgacaataattaatacaataataactatactataaagcttatattaaaatagctttaaatcatcctcattccagaaataattttgcttcaaacaattataaacatctgtattaacgatactaatacactaacttctgtgaccataacatcatatgcttcacatcatgaccaacgagaatcgctgatataaacggagctttgccgaatatggtttatgatggttacttcatt

SEQ ID NO: 16529 - DNA, 328 bp, Glycine max
ctcccttctgcattgtgtttgctgtgctttggggaatttatcgccgtgtatcattggcttggattggtcaagatattcttggcatcacattgataatcacagttcttcagattgtgcggataccaaatctcaaggttggaactgttcttctcagttgtgccttcctatacgacatattctgggtgtttgtctctaaacggaggctccatgagagtgtgatgatagtggtagctcgaggtgatacgagtggataagatggtctccctatgctactcaagataccacgtatgtttgatccttgcggtggctacatgatcattgggtttgg

SEQ ID NO: 16530 - DNA, 391 bp, Glycine max
cccagcgtgcgcccaccgttcggcccgcatccgtcactcttgctaaattggctatctctatctattctctctgtctgccatggggctctccaaaaccacctccgaatacgacgactctgtccactcaaccttcgcttctcgatatgacagaacttcgcttcccaggtttaagatgccggacgagtcgataccaaaggaggcagcgtatcaaataataaacgatgagttgatgtcggatgggaacccaaggtagaactcggcatcatttgtgacaacctgtataggagccagagagtgataaactcatcaaggctgccattaatcagaactatgttgacatggacgagtatcctgtcaccactgagttacagaatcgatgtgttaacatgat

SEQ ID NO: 16531 - DNA, 262 bp, Glycine max
cccactaggatccatgaacgcctcgaccaacatcctagctcaacaattctgaagagatgctgacacgtatgctaagacattgtcatacaggacattagatgtaaacatttgatatgaatgtagcatcaggaacatacatctgctataccagatgcaccactggcacttaattcctatgctacagagcactacatatgttaacatctctgaaacctacatgcgaatggactcaaggaatagctgagcttactactaccttttg

SEQ ID NO: 16532 - DNA, 413 bp, Glycine max
gcgagatttttttgtacacttgacatgtcttcatattttccaagctttgctacaaaaatcccacgtatgggaaagggatacgatgatgtgttgttcacagtgaccaaccaattagtaaaaatcagttcatgggccaacaactataagggcctgaacctctaaagcagcacattggtttgatcaaatcgccaaattgttcttctcctgtgatggaggacgagcataaaaagttggattctttgcctgaaattgaattatcagagtcagaggaatattccaaggaattggaagtggctgttagagcagtgcaaatggcgtgttccctctgccagagagtgcaggacactttgatttccaacgctgggacaaatcatcgtcaggttcagtccaaggacgacaattctccggttaca

SEQ ID NO: 16533 - DNA, 223 bp, Glycine max
cttacaatggagaggattacaatggtgctaggattgttagtagagcttgtgagctccgtgatgcggtgcatggaatgctctcacagattgatccagcactggttgcatattgcgacaagattgctagccaaggtggcccaattcagttgtctgatgaattaggggattctactttccctgctactcctgttgtgcagctgggtcagagtactagaatgagtgc

SEQ ID NO: 16534 - DNA, 404 bp, Glycine max
cccacgcgtccggaaacttaatcgatcatcacttcacttcactaatacatcatggcagacgagacccagaacaagtatgagagctctgaggttgaggtccaggatcgtggtgtttttgactttctcggtaagaaaaaggatgaagaagacaagcctcatcctcaggaggaggtcatcgccaccgagtttcaaaaagtcactgtctcagaccaaggagagaacaagcacagcctcttagaaaagcttcaccgatctgacagcagctctagctcttcaagtgaggaggaaggagaagatggagagaaaaggaagaagaagaagaaggaaaagaaagggctgaaagagaagatcgaggagaaaatagagggtgatcatcatcatcacaaggttgaggacccaagtgt

SEQ ID NO: 16535 - DNA, 282 bp, Glycine max
cacgcagtgagccaacccgtccgaacatgatggggagctggatacacgttacctgacctttgcgaggggtgaggtagcatcaacagaacttgctatacccgttatgtcggaagacccatcaagaaagcagagcataaagaataacgccatacagactaatacagaaggcatcaccttggagaacacaccttggatgacagaggaatcaagatgactccaaaatctgggagaacctggtggctcataccatacgcagcatagagacactgaaatataaggcat

SEQ ID NO: 16536 - DNA, 362 bp, Glycine max
acgaacactcgtatcctgcgttataagatctacaactggctcagaaatgggccatctggggatacctgaaacctacgcttgttacacaactcacacgcaatggaataggccaactatagcaacccatcccatatcgatttcaattgctgaatggcaaatcatcacatgctcatcaagattatttacgaccagaatttacgcaagaattggactgaaaagtaggctacgtttcaatatttaatggccacttatgccatgatttatcaagctctttgcataactatctttatgaaaacatcttgcaacagcatgacttttggactgaatacagaaagcgccgtggaatacgcttaccttgacac

SEQ ID NO: 16537 - DNA, 408 bp, Glycine max
acacaagccaagtgaaagtgagaaaaaataaaaatcaaagagcatagtgtcagggagcattcacaagattggggagacccttcatgtgggagggcacaagaaggaggaggagcataagggtgagcaccatgctggagaatacaaaggggagcaccatggtgaacacagtagtgagtacaaaggagagcatcatggtgaacacaaagctggagagtaccatggtgagcacaagccagagcacaaataggggttcctagacaaagtcaaggacaagatccatggtgagggctgcgccgccgatggcgagaagaagaagacggagaacaagaagaaggagcatggccatgagcatggccatgacagcagcagcagcagtgacagtgattaaactgctgcattaactatata

SEQ ID NO: 16538 - DNA, 426 bp, Glycine max
cccacgcgtccgattttgatggggagctgtttccacgttacctgagctttgtgaggggtgtggttgattcagatgatcttcctctcaatgtttctcgggagatccttcaagaaagcagaattgtaagaataatgagaaagagacttgtaaggaaggcatttgatatgattcaagaccttgctgaaagtgaaaataaagaggactacaaaaaattctgggagaactttggtaggttcataaaattaggttgcattgaagacactgcaaatcataagcgcattacaccactattgaggttttacacttccaaaagtgaggaggagcttaaaagcctagatgattatgttgaaaatatgggtgaaaaccaaaaggctatcttttatctaacaacttacagcttggagagtgccaaaactgttacatttt

SEQ ID NO: 16539 - DNA, 418 bp, Glycine max
cttcacacaacaaaacttttttctggcattgtagcatcatgactggcagagaaatcctccatatgatgaaggtgaaagcagggtttggaacaccagacacagggaatggaaaaggcaaaatatcaaaacacattacacatggctttcacttgatgaagggcaaatcagcgcatcctatggaagattatttagtttcagaatttaagcaagaaaaggacagagaattaggcttgtttgcaatatttgatggccacttaggccatgatgtagcaagctatttgcagaaccaccttttccaaaacatcttgcaacagcatgacttttggactgagacagaaagcgcagtgaaaaaagcttacgttgaaacagatgagaaaatatttgaacaagaacttgtgttggggcgaagaaggtcaac

SEQ ID NO: 16540 - DNA, 430 bp, Glycine max
tcttactccttacaagatgggcaaattcaatctgtcccataggtatctctatctcggtgtttcctggctatttccatagatttcaattgctgattaattttgcttgcagagttgttttggcaccgctgaccagacagaggtcttacgacaacgtcccacaaccccatgccatcctctactactcccagagaacttccaacggaggccttctcattactgaagccactggcgtctctgacacggctcacggctatccgcacacccctggcatatggactaaagaccatgttcaagcttggaaacccattgtcgatgccgtccacgccaaaagcggtgttttcttctgtcagatttggcacgttcgaaaagtttcaaattcaggtcttttctttttctttaatgcccttaacttcttctttagaactggttt

SEQ ID NO: 16541 - DNA, 401 bp, Glycine max
gtaaaggtgatagcttgccaaccgaaggtgtagaaattgcacacttcagtctggaacaagcacacggcatgatatatacaccatccgatccccttctttttgttgctgtgaaggatcagaatggggtgttgcaaattgctgacgatgaactgcttgaggatccggctatcactagcgctatagatgaagagactgagtttaatgccttggtggaggaagaagctgcgctccttgattcactcttgggtaaaagataaccccatatttacttttttgcagcagagctgtcccagctcccaagacccaccgatgttttgcttttacgtgtttgtttgcatgttgaagaaagaagctactttttgtaacttcttccttaacgcagatcaaaagttaccaaacat

SEQ ID NO: 16542 - DNA, 299 bp, Glycine max
cgggcgcactcaatctgcgacatgatgagctctatctgggggtaccctggctatttgcataaactgcaatcgctgatcacttatggttgcaaagacgtcatcgcaccgctgaccatacagaggtcttacgacaacgatccacatcctcatgccatcctctactactactagagaacttccaactgaggccttctcattactgaagcctctggcgtctgtgacacggatcaaggctatccggacaccactggcatatggactaaaaaccatgatcaagcctggaaacccattgtcgatgc

SEQ ID NO: 16543 - DNA, 272 bp, Glycine max
cacgcgtgcggcaaccgtgcgagctgccggacacattttaattaaatccagcgctccagcacttcaggcgctcacggcctgacagatacatcgtccgctccgctacttatggatgctgcaaagcttctaaatgagaagttccagttcgaattcctgatatctgcctgctgacactgttctcaactgctctattcattaagagacagcttttattctcttgcgcgacgaagaagactcactgctggactacttcgtggatagtatattatccc

SEQ ID NO: 16544 - DNA, 282 bp, Glycine max
cggacgcgtgggtgacagacgaagatgcaccaaattatcgttcaattatacatggctcaatggacaatgcaatcactctgtgctcaacttaagttgccttacaatgcatccagactttcctttcttatatccttttccaatataatcgtgagacttatgacatatctgtgtctcacttcatcaataataaattatagtcaagaagagcaatcattacaaaaaaaatgagccccttggacaataattgtaattataaagttaccccttaaaccttataatgga

SEQ ID NO: 16545 - DNA, 261 bp, Glycine max
  modified_base (252)..(252): a, c, g, t, unknown, or other
cccacgcgtccgcaaagtttgcactgttggagaccataaaagaagctgtaccagaaatgtggtcaccggctatgaagaatgcatggggagaagcttatgatcagctggtcgatgccattaaatctgaaatgaaaccaccctcctcttagactccagtttaagcagttcctttccttccctctcaattctcaaattggtatattaataaaagtgagaaagtttaggcttgtgcttttattttgtgtgaatgtnatatacttt

SEQ ID NO: 16546 - DNA, 331 bp, Glycine max
gccatcatcacagacccaccctggaccgagagggaatggatatgcccctagcctcgactgcgcacttgtcacattgatgccaagattgctgaactcatgaccgacattgacaggcgatgcggctaagagcttgagaaggagcccaagattctgacgaacggtgatgctggctaagctaacacgatgccataccaaacccatgggtgctgcaactttttccgagtattcttcacttggacagtacgctgatagggacacgcgtccaactgttgccgatggagtcatgaggaacgttgctaagaaggatcctaccggagccaaggttaccaag

SEQ ID NO: 16547 - DNA, 390 bp, Glycine max
  modified_base (360)..(360): a, c, g, t, unknown, or other
  modified_base (378)..(378): a, c, g, t, unknown, or other
cggacgcgtgggcggacgcgtgggtggaaaatgaagcctcgtgtcggtggtgctcttgcagtgcacgcaccctcgtgtcaatattcgctgcaattcttctcctattccaaccaaattgcatcgctaagcaacagcaccaaccatgccctccttcatcctgcggcataattggcaacatatcgttcccatttcgcctcaaagacgacccaagccactgcggcgacacaaggtaccagttagattgcgtgaataacgcgacgctgttaaccttgttctcgggaaaataccatgtacaagatatcgattacaagagatacaaaatcaaggttagtgacgcgggtgcagtggaggactcaaatngtttcatccctcgcaatntcttatgggatg

SEQ ID NO: 16548 - DNA, 424 bp, Glycine max
  modified_base (10)..(10): a, c, g, t, unknown, or other
cccacgcgtncggattcgttacaaacgtaaggaatttgatatgaaatactatgttgaatgtgggattgaagtgactgccacaagtactgcaacatgctttctcataatagcacctctggttgtgctatggtgttggaagctactaaagtgggtgtggatcagtgcaagggggaaaaactcttggaaatagaggtcttgagtggctcaccgaactctttaacgaaattatgagggcaaaacccatgccgaaggaatggttggaaaacaacgtttggccaattttttaaaccaagggggtttttcaaaattgggcaaattttaggggaattaactccttgggccaatccttggatcaacaaattcggtacgtgcgtgcatttctttcccatactgcttagatttggactcttatctgcaaatttct

SEQ ID NO: 16549 - DNA, 429 bp, Glycine max
attttgaagaaaatgggtcgtgcaagaatcagcttgaaacatatctcaaatgagagatctcgcaagaaaactttcatggagagaaggaaagtacttataaaaaaaatctctgaattttccaccttgtgtggagttgaagcatgcttgattgtgtatgatgatgggaatggtgacattgaaccagtgacttgtcccaaagaccctgtattggcacactccatacttcaaaactatgagtttcaaaagaatcagagacctcccaagaagtttggtattcaggactttgttgaggataggaagaacatcattgaagctgagatttccaaagtgcataaagagatcaccaacatcaagtatccaacttcggatccaagtttcataaacatggaagaggatcaattgagggccttcattgctctggtggatgct

SEQ ID NO: 16550 - DNA, 423 bp, Glycine max
  modified_base (334)..(334): a, c, g, t, unknown, or other
  modified_base (381)..(381): a, c, g, t, unknown, or other
gggaaataaaaatactccatttacgtttcctgcatgttagtggtgatgagcatgtccgttcttggtgtgggctaaagattaaacaaattagattagttctattgagagctttctgaagttatatacacattctggaagtcagatcttttctgcaggtatttctgacccctactcatttagctatcgtcctagagtatgctgctggtggtgaactcttcgagaggatatgcaatgctggtcgattgagtgaagatgaagcaagatttttctttcaacaactaatatctggagttagctattgtcattccatggtacatatgcattcagaattttnggtgtggtggtaatttaaaagtcccttggaatatcatcttatgcctnctactgcagcaaatatgtcatagagatctgaaattggaaaac

SEQ ID NO: 16551 - DNA, 308 bp, Glycine max
ctctctctaaagtcaccccattatttaccttttaaatcaagtctacacctatggcattcacaacaaatactacaaactttttttacaccatacacctttttttctttttttgaaggtcttaatatctcaaaacctctggttcggattttccaccatgaaccaataactacaacctgggacttgtcgttggtgtttgtgtttgtgtttgtctggttacatggcgtaccataaccaccacaaccttttacaacaagaccttcctccactcaaccatttcccgaaccaatccatgttaccagaccaacaac

SEQ ID NO: 16552 - DNA, 392 bp, Glycine max
acggacgcgtccgaccacgcgtacgtgaaaaaaacgcgatggaagagagaaacttgagcagcgtgtgcaacaagagagaaaaaaatggtggtagtagaaaggttgataataataataataacaaaaatatggcacaggtgaataggaaccggaaccccagtttttcacctgacggtttaaagacaccaagcattggtttcccttgacgaaacttttcaaaaatgtttgaatgccaaatggctttggcttaaaaccaacaaggggccaaaatattggccaaaccccattaattttcccaatggcaacattcccaaattggaagattccaaaacccgtgaactttaaactttggcttttgaatttaatctatttgaaactttgggttcattgga

SEQ ID NO: 16553 - DNA, 386 bp, Glycine max
cacaaaaccaatatcttagttttggtggagagaagagaaattgaaggaaacatacttatcatgacatgaactagatatgacttgccctcttcaactccaccgattcagccctgcaacagacacatccaccgccatcgcaaacggcgtcaactgtccaaagccagcacaaacggcgccgtcaacgcgccgtttattggcgaaagtaggccttagcgtgacggagatggttgctcggcaccacgctcacgcggtggggcccaaccagtgctgctccttcgtgatccaggcgatcgacgcgccggtctccgccgtgtggccggtggtgcggcgcttcgacaacccgcaggcctacaagcacttcgtaaagagctgccacgtggtcgccg

SEQ ID NO: 16554 - DNA, 408 bp, Glycine max
cttcgtcgaacgagtcaccccaccgggtctccacgcgttcacacccgccacttcccccggcagcaacaacttcatcgccgtcgcaaccagaaggccaggctccaattttcgtcacatcgagctattcgacctcgctagtaacgaattcactgagctgactcggttggtctcgcctaattctcaccacctcaacccgttcatctcgcccgattcaacccgggtcggttaccataaatgcagaggagaacccaacgctcacagtaccccacagtttttcctcgagaatgttcggagccccgtccccggtctaactctcttccgcttcgtcggttctttcccggttttcttccccttcggcgaccgaatcgcgtacgtcgagatgcccggagtttatgtcgtgaaccggga

SEQ ID NO: 16555 - DNA, 404 bp, Glycine max
  modified_base (314)..(314): a, c, g, t, unknown, or other
gaaattgtggcttgctggcttttcaaagggcatacaggaaatgcacagaaaggcatctttggttcttgaagatgcagttaggaatatttacactgttgttgcattttgtgctggtaataaggtgatggaactctaccagttgcagttaaataaaatatttaagcaaagctttcttcatggagtggccattggttttggatttggcttttcacagtttctgctctttgcttgtaatgcccttctactttggtacactgcactatgtgtaaataagagttatgtggatctacctactgctctcaaggagtacattngtttctcatttgctacatttgcccttgtggagcctttcgggttggctccttacatacttaagcgacgtaaatctctcatgtcagtgtttg

SEQ ID NO: 16556 - DNA, 386 bp, Glycine max
tggattcgaccctcttcgtcttggtgaagtaccagagaatcttgagaggttcaaagagtcagaactcagtcactgcagatgggccatgcttgctgttccagggattttggttccagaggcattgggcttaggcaactgggtaaaggctcacgaatgggcaacagttcctgggggccaagcaacctacctaggcaatccagcttcattgggcaccctacccaccattctggccattgaaatccttgctatttcctttgtggagcaccaaaggagcatggagaaggacccagagaagaagaaataccctggtggtgcttttgatcctttgggatactcttaggaccctaaaacatttcatgaatacaaagtcccagaacttaagaatg

SEQ ID NO: 16557 - DNA, 377 bp, Glycine max
  modified_base (310)..(310): a, c, g, t, unknown, or other
acccacgcgtacggcccagtccgattccaactaatcctcttcaacttacttgttatcactatcttgctttgtctggcttgaagagtaaacaatgacggtagtagaaaggttgataataataataataacaaaaatatggcacaggtgaagaggaacgggaacattgatcgtggagggttctacctcaaaatggggctttcttttccttttggatctaaggacaagaagaagaagattaagaagaaaaatgaacccttggggaatagttgtagttcgagagttacacctaaaccttctgatggatcagcanagggtggtgttgttgataaggagtggtggaagaagagtcctttaacgtgtaaaagagagtgatagtg

SEQ ID NO: 16558 - DNA, 410 bp, Glycine max
  modified_base (311)..(311): a, c, g, t, unknown, or other
gttgtatactccagggaaacaacctgagaaagtgtgcacctcggtcaaaaaacctgccggcactcgtatctgtgacaccgtgttcaattcggatccaaaaatctgatttatcgggtctcttcccaactcccccaccttcaaccaacttccaccagtagtaaacagaaatacaagcataagcaaaagaagacccgcgacacatcgcaacatcgtatcatgtctgcaacaaacgtccccaaagtgctgttacaactacaaccacccttcaaatcgaacccactctgcgtgccggtgataggactcggcaccgncgcggtccacaacgacggtgacacggtgaaggctgcagtcatagaggctatcaaaactcgttacagacacttcgacaccgcggcacagtacggatcgga

SEQ ID NO: 16559 - DNA, 430 bp, Glycine max
gttaagttggtcatctgtggatggcatgacgaagatgcaccaaattatcgttcaattatacagaacccaatggacatggctaccattctgcagcatgttgataatggtcactatattacaagtgctgcattcctgcaggacatcaatctcattgtttccaatgcgaaagcttacaatggagaggattacaatggtgctaggattgttaggagagcttgtgagctccgtgatgcggtgcatggaatgctctcacagatggatccagcactggttgcatattgcgaacagattgctagccaaagtggcccaattcaggtgtctgatgaattaagggattctactttccctgctactcctgttgtgcaactgggtcagagtactagaatgagtgctcgacttcgtcatgtccaaccagaggttaatatggatc

SEQ ID NO: 16560 - DNA, 426 bp, Glycine max
cccacgcgtccgcttcgatcttgcggatatgtttccttctttcaaacctatgcatgtcataaccgggttgaaagccaaattggataagatgcataacaaggttgacaagatcttagataagatcataaaggagaatcaagcaaataaaggcatgggagaagaaaagaacgaaaatcttgttgaatccacatgtattattcaaacaagtatgctaatggatcaatgtcatttttctgtccttgttataatgtgaaatatatatgaaactacattcaacattaattatgcaggacatatttgcagctggaaccgatacttcagcaaaagtaatagagtgggcaatgtcagaaatgatgagaaatccaggaggaagggagaaggcacaagctgagatcagacaaacgttctgaggaaaagaagcaatca

SEQ ID NO: 16561 - DNA, 409 bp, Glycine max
cccacgcgtccgcccacgcgtccggctgaaagggagcttggaaatgattaaggttgacgtgcaagcgatcaaggagagagagtgaagtgtctccagatttagctcaagacaacaacagcttcttcctccttctcctactcttcacactccatgtgattgattctccttttttttttcaactgtttatttataaataatttcacatggctgcttcctttttttttttaaaaaaaaaaaagatgatttgaaatcacaatgatgtaagttggagaggagtaaattatttgggggctttgatattattgttggtgttcagagatgagagatgggtcatgtggaagtaacctgatcacattgtcttcttcttgctggaacaacaaagctattctttctggccacatgtgaatga

SEQ ID NO: 16562 - DNA, 387 bp, Glycine max
cccacgcgttcgccacgcgtcgcgacctgggttttctggtatatttgggctgctgtacactcatgaatgaaattccatgcaaaactcacaaagctaaacttctttattcgacatatcaacacccagttttcaaaattccattttggtttccctttcttttttcctatataaaccaagctttaatttccttctgaattaaaactccttgatctggtgtgaagatggaccccaatgactggaaattcctttcttatgatagcccttatgaggcgtccttagattcaaaaagtgtctggattggaataactataacttgggcacctaaccaaatttcagaaaggcctaaaaaccatcaaggatttttaatccaagggacccaaaccaggt

SEQ ID NO: 16563 - DNA, 307 bp, Glycine max
  modified_base (57)..(57): a, c, g, t, unknown, or other
tccacgagtcaccaacgcacgaaagccgggatctttcagataatggattcctgttcnaagggtgcataaccgcatggataagctcacactaacccgtcaatttgggatccaattcgggcccttaggaactttgcagaggcagagggtaaatgtaataatatcgattcatacagatacagaagacagggttctctattgattcaaacgctctacctacgagatagggatagagcaagaagaaaaaaccgaggatttcacatagtacttttgggcgaaaaatcgatctgaattttttcggacctttcgc

SEQ ID NO: 16564 - DNA, 119 bp, Glycine max
cgacgatgtacgctcagacctcatattctactttctcttaaacgcctccatcttggtcaaacggtggttacctttatttataatatttaacgtaaaatctagatcatcttaagcttttt

SEQ ID NO: 16565 - DNA, 425 bp, Glycine max
gtggtgttgtgtttttttttttgtttcatctccatctttttcttcaaatttcgcagaagagagactcacaaagatgaagttatcattgaagcatgctttggtgtttgcgttaattggggcgttgtggaacttgcagagggcagagggtatccgatttgtgatagacagagacgagtgtttctcccatgacgtaaagtacgagggtgacacttgtcatgtctcttttcgtggtattaaaggctgattcttcctggcattacggcgacgaaagggtcgatctcgtggtaaaaggaccttctggccagccaattccagattttcgggaccagaccagtgagaaggtcgattttggggcttacaaattcggggtccataaattctgcttcaacaacaagtcttcttatcatgaaactggtgattttgat

SEQ ID NO: 16566 - DNA, 423 bp, Glycine max
cttctacttccctttgttctcaaaccttatcccttatcctcccaaaaccaaaccatgtctaccgccgcagcttctctcgcactcccaaccctcactctccgaactcgacaacctctctgttctccccaatgcttctcctcgtccctctccctcacccctaactccaaacccatttccatttccgccgttttcctcaaaacaacgctgtcgtcgtcgtcgccgttgtcgctgtcggctcgcttcgttccccatgtctctgtgttggagcaagaagaggacaccttccgcgacggaaacgggcccagcttcttccgggaccctaagctctttggcgggaaatctcccttcaatggccacagtgcgcgggtcgcggagctcttcgagagggcggggaatgtggaagtggttgaagttatttatgat

SEQ ID NO: 16567 - DNA, 52 bp, Glycine max
  modified_base (22)..(22): a, c, g, t, unknown, or other
cccacgcgtccgcccacgcgtncgctctctcacgagaagaatactactaact

SEQ ID NO: 16568 - DNA, 293 bp, Glycine max
cccacgcgtccgcaaaacatatgtcgccgaagaactcttgttgccattggaactcatgatctggataaattggagggccctttcacctatgaggctttgccaccttcaagtataacttttacaccattaaagcaggaaagaaacttcagggctgatgagctaatggagttctacaaatcagatttgaaactcaagaaaatcttggcatataatggaggatcttccggtttccccggtatatattaccggtagagaaccggggtatccttaaccccaattattaatggtgcaca

SEQ ID NO: 16569 - DNA, 398 bp, Glycine max
  modified_base (391)..(391): a, c, g, t, unknown, or other
ccgcgttgtgttgtgattgaaaatggagagcgatgttgaagaatctatgcggaagaggcccagggaatatcctttctccgccgattcatcctctcgcaagcaatttgaacaatattctggacggacatttgcaattatgggggaagtgaattttatgcaagatgatgataatcgtttggagattacccgaactaaatttggaagtttgcttaaaagacatggagatttgacagagcggcttgctagggattctgacaagataatatttgagcgtctacagaaagagtttgaagctgcacgagcttcttaaactgaagagatatgtttagacggggaagagtggaatgatggtctactagcttcaataagagaagcggtgcatatggaagcngacagaa

SEQ ID NO: 16570 - DNA, 357 bp, Glycine max
acaacgtaaaagctaagattcaagacaaggaagggatcccacctgaccagcagagacttatcgtttgcgggtaaacaacttgaggatggtcgcacccttgccgattacaacatccaaaaggaatcaaccctccatctcgtgcttcgcctcaggggtggcatgcaaatctttgtcaagactttgaccgggaagaccatcacccttgaggtggaatcctcggacaccattgataatgttaaggccaagatccaggacaaagagggcatccctccagatcagcagaggctgattttcgctggtaaacaacttgaggatggaagaacccttgctgattacaacattcagaaggaatccacc

SEQ ID NO: 16571 - DNA, 354 bp, Glycine max
aaaaaggaaaccctagctggataggtcaaacatcatcatgtcggacgaagagcaccatttcgagtccaaggcagacgccggtgcctccaaaacctaccctcagcaagccggtaccattcgcaagaacggctacatcgtcatcaaaggacgcccctgcaaggttgtggaagtttcgacttccaaaactggaaagcacggtcacgccaagtgccactttgttggaattgatattttcactgccaagaaacttgaggatattgtgccctcttctcacaactgtgatgttcctcatgtgaatcgtactgagtaccagctcattgatattgctgaggatggatttttgagtctgcttac

SEQ ID NO: 16572 - DNA, 403 bp, Glycine max
catagcgtagccatggccatgggattgacctcacaactcctcctttctttgttcatcagtacccttcttcttcttcttccctcttccctttcacaatctaaccagttttgtgacgctggaacttcatccaagctgttgatcaagggcggcaccgttgtgaatgctcaccaccaacaggttgccgatgtctatgtcgaagatggtatcattgttgccatcaatcccactattacggttggagatgaggtgacggtcatagatgccactggcaagtttgtcatgccagggggcattgaccctcacacccacctagagtttgagtttatggatacggaaactgtagatgacttcttcagtggtcaggctgcagcattagctggtgggacaacaatgcacattgact

SEQ ID NO: 16573 - DNA, 433 bp, Glycine max
  modified_base (155)..(155): a, c, g, t, unknown, or other
gattgatcctgattctcgaaatgctggccagaaccgtttacttgcgatgaattacatagatgaaggaaatgatgacaaactttttgaggctcacagggactggggtaggcgatttatgagactatattcacagttcacatcatgggacaactcanaagatcctgaacggcctcttgtgataggatatgtctctcctgaataatttacacattctggggcataattcataaaagctccccttctttaatatgactataccaattattaagggggtggttattcaacaattggcaaagcagattccaaaaccattccggttaaaaaggaaggcttaaaaaaaggtgggatctggaaagatatttatggaaccgattaaaagaagggtggccacatgggtagaggagatcaagttgatattttaatagaacttact

SEQ ID NO: 16574 - DNA, 436 bp, Glycine max
ataaggaggagcctatattggtggtggctgacaggagtaaaaaagaggtgggtgccgatgatgggttttatcttgtgaatgctgatggtgagggtttgaaggtcgagaggggttcgggattgaaggaaaagggtttcactcagagtttaggaactgtgttattggttgttagacctcccaaagaagaaaatgatgaattgagtgacgaagactgggagtgaactcaaatcaaagggaagggaatgattgagttgctaaagaatagcgataacaccacattatatatatatatatatggttttctcaattcaagaattgctagttaactcagctcaatcccctgcctttggtttttgtgtcatgcaaaataaggttctattaatttgggattacatgcaactttcttttggtttccatacttaatagaaggatttaa

SEQ ID NO: 16575 - DNA, 164 bp, Glycine max
  modified_base (28)..(28): a, c, g, t, unknown, or other
gccccgcgctcctcacctcgttactctncgattacgattgcaacctcctcagggggatgtgaagcttttgggtattgtgggaagcccatttgtgtgcagggtccagattgcccttaagttgaagggagttgaatacaaatttttggaagaaaattttgggcaac

SEQ ID NO: 16576 - DNA, 427 bp, Glycine max
cccacgcgtccggcgttctctgagagatgccacccacaagacaagaaagcgttgctccaactgcagaaggacctcggcaacccttatcacatcatatcctggaacgcaaaggaggattgctgcgagtggttctgctgcgttaagtgtgacgagaaaacaaaccgcgtcattagcgttgccttatcatccccttttccagacaccaatctctcggcccaaataccttcctctgtgggtggacctccttacctcgaagtcctcgtcttccacaaattccccaaactcgtgggcccaatccaagcccgaatcggcaaactcaccaaactcaaataccttgatctcttcaacaacaatctctctggcccaatacccgaatttttcgcgcaactcaagaacctcgacgatatcgacctttcctttaacaacc

SEQ ID NO: 16577 - DNA, 56 bp, Glycine max
ctatacttgttccttttgaaggttagaagtgctacaatacaaacaatggcatttat

SEQ ID NO: 16578 - DNA, 355 bp, Glycine max
  modified_base (98)..(98): a, c, g, t, unknown, or other
gttattgttggtgttgtgggttatgtgaaaactccccgtggtctccgaacattgaacactgtgtgggctcagcacttgagtgaggaactgaaacgtangttttataagaactggtgcaagtccaagaagaaggccttcaccaagtactcaaagcagtatgaaactgaagagggaaagaaaaacattgaggcacagctggagaaactgaagaagtatgctactgtggttcgtgttttggctcacacccagatcaggaaaatgaaagggttgaagcagaagaaagcccatatcatggaaattcaggttaatggtggtactattgcacaaaaggtggactttgcatacaagttctttg

SEQ ID NO: 16579 - DNA, 350 bp, Glycine max
cacacttacactatcacacagcattactctcactcaacaacaatgttgccgccagcgggaaccatcgtattcaacaccgtcggaagagtccaatacggtttcgacgttttctctgtcgacctcaatcaccaacagccttcggcccacgccaccgcagaccaccggcttaccgacggtgtctcgattaacttcaacgcacaattcattaacccccaaaacgacgtcgtcttcgtattcgaaagaaccgggtcgccccgcttctacattacaaaacccgacactaaaccccagcctttaccctttctgcccaacgctctcttccacgatcgcccaatcgttaaaaacggaaa

SEQ ID NO: 16580 - DNA, 423 bp, Glycine max
  modified_base (9)..(9): a, c, g, t, unknown, or other
acgcgttcncggacgcgtggggttttagaaacttaaagggaaaactttactgcctatggtggttttatctgacttaagcaatgaagattttttatcccagtttctctttcattatttttaacactatctcctgtggaaaagaaagtgttaaattcctgcttatcatgtataaatatctctaaatgttcttcttatccttggaaaaaatgtgatttgggtgggctatcggattgggggatattttggggttttgggcttaatcctaaatcccctttcttcttttcattactattaatggatggtctatattaccttctgattagcttggacccctttttagtgatggcaattttattaatattatgaacctttcctgggaatttactctctaatttctttcacaacatttttaaggaccacttt

SEQ ID NO: 16581 - DNA, 302 bp, Glycine max
agccaagtgaaagtgagaaaaaataaaaatcaaagagcataatgtcagggatcattcacaagagtggggagacccttcatgtgggagggcacaagaaggaggaggagcataagggtgagcaccatgctggagaatacaaaggggagcaccatggtgaacacagtagtgagtacaaaggagagcatcatggtgaacacaaagctggagagtaccatggtgagcacaagccagagcacatagaggggttcctagacaaagtcaaagacaagatccatggtgagggcggcgccgtcgagggcgag

SEQ ID NO: 16582 - DNA, 161 bp, Glycine max
ctcacacactcaatctttgctttcttgtccaacaatgtcaaacactgaagaagaagaagaagcaactccttcgaaccctaacaatcacagtcaacactccaccaacaacgatgtggaacctcgtgacgacgaagacatcgaagaagacgacgacgacgtcg

SEQ ID NO: 16583 - DNA, 270 bp, Glycine max
tctggttttgctgttgagaacattgtatctgaacatggagagaaggctccaaatgttgtttataaaggaaagttggagaatcaaatgaagattgctgttaagcggtttaataggaatgcttggcctgatgctcggcagtttttgtaaaatcacccgcccaattgggttcttttttaaccttgctcttaactattaattctcctgtagacctgttcatgaccttgcattgcacagatgcattatttatgtactttgcattacttaaacact

SEQ ID NO: 16584 - DNA, 329 bp, Glycine max
cccggggcgacgccgtcctacgccggcgcgttagattgggctctgaagactgtgcgcgcggagggtcccatggcgctttataaggggtttattcctacgatctcgaagcaaggaccgttcactgtggtgctgttcgtgacactggaacaggttcgcaagttgcttaaagatttctgatgaggatgatgacgagaagatgtatgctactttccttttcaataagatgctttttctggttgtgttatgttttaatagtactagtgatgtagttctaggatggcaattttgttattctattaatcaatgagaagtgctgtttattttccgaa

SEQ ID NO: 16585 - DNA, 359 bp, Glycine max
  modified_base (310)..(310): a, c, g, t, unknown, or other
  modified_base (319)..(319): a, c, g, t, unknown, or other
gctcaaggtctccaaagcgaacttaacagtatacattcacccttccaaaagtaaccaagtttccgaagccgttctccgccaactcagctctttgcttttcacgttcagcgaaatcttcgacggcgtcgttttggcctacgatgtcaattccttcgacacgtgcgcaaagatcctctccggcgttcacccttacttcggcgtcaaactcaaggtcaatctgttgctcttttctcccaagccaaacatgctcttaaaagggaagtgggtaaggttacgcaagagtccattcacgttgttgtgcttggctttnctctgcgantatatctgagaaagatatcagggaagaggtcgtgtgcaaa

SEQ ID NO: 16586 - DNA, 383 bp, Glycine max
catgaatttatatcaaaattcccagaaaaataccagacctttgttggagagcgtggggtaaggctttcaggagggcagaaacagagaatagcaattgctagagccctgcttatggacccaaaaattctcctcttggatgaagccaccagtgccctagatgctgaaagcgaatacctagtgcaggatgccatggagtctctcatgaaaggaagaacagttctagtcattgctcacaggttatccacagttaaaactgctgatactgttgcagttatatctgatggccaagtagttgagagaggcaaccatgaagagcttctcagcaagaacggtgtctatactgcattggtcaagagacaactgcaaacaacaaaagccgaaat

SEQ ID NO: 16587 - DNA, 379 bp, Glycine max
cattatcaaatgttagggaggacaactaccggtcctatttgcgcgaagacactgagaagaacaccaaatggagatatggtgcccctccaaattacgacgttgtcaacaagctatatgaagaaggcagaaccaaggtttggcctcagggttcacttgaagagcaggtgcagtctctagtgaagaattgggagatggaaatgttccacaaggtggacctgcaggatttcagatcaatagacccaaagaaatacactttcagcctgaacggaaggaagcctatgactctggaagagatgatgaagcttggtggagggtatataccaatgctgcaaacctctataccagagaaaatgaggccttacaatccctatgaagaaac

SEQ ID NO: 16588 - DNA, 403 bp, Glycine max
  modified_base (379)..(379): a, c, g, t, unknown, or other
gtgacattttagaccttgcttggtccaaaagagggtttctactgtcatcctctgttgataagaccgtgcgcctatggcatgtaggaatcgacagatgtcttagagttttctcccacaataattatgttacatgtgtcaatttcaatcccgtcaatgataattttttcatcagtggttcaattgatggaaaagtacgcatatgggaagttgttcactgtagggttagtgattacattgatatcagagagatagtcacagcagtgtgcttccgtcctgatggaaagggcacaattgtgggtaccatggcaagcaattgccgtttctatgatatcgtagataatcatctgcaattggatgttcagttgtgtttacgaggcanaaagaagacatcagggaaaaagat

SEQ ID NO: 16589 - DNA, 239 bp, Glycine max
aaaaagcttgcatcttcaaggtttcaattttactgcaactggcaatgactctgctgagccttgttcaaactgctacgtgttaaatactttggtccttagattttgttctttgcataatgatgcaagggttctctgcatatctaattctaccctttccattttgacaatattagaaggacaaacttatcaaattgtgctttctactccaaatcttaagtcttttactatcaggggttcta

SEQ ID NO: 16590 - DNA, 132 bp, Glycine max
gaagaaagtggtgatcctaggaggtggtgttgctcggtgccaaccttgcaaaaactatacaagggtaagccggcttcacccttattgatccgaacgaatattttgagattccatgttcaagtttgagggtat

SEQ ID NO: 16591 - DNA, 407 bp, Glycine max
cccacgcgtccggcaagcactagagcacaggtacttctcatctgcacctctgctcacagatcctgttaaacttccaagacccgctcctaagaaggaatctaaggtttcagatgtaatttcaaacgaaggtcctactgtcttgtcacctccaagaaagtctaagagagtaatgccagggcgtgatgggtctgaaagcaattctttgcaaggagaatagttcgatgacaggtgtggtagggtcagacaagccacttgtggatatacgggcaagaatgaacccagtccacatggcactagaattttctctttttggattaaaaccctccaattgaactattattaccaatgcttaccgaatacatttaaaaaggaaattagatccaaaattcttaccgcccaaaccaatg

SEQ ID NO: 16592 - DNA, 355 bp, Glycine max
cccacgcgtccgctcgtcgtcatggagaatagtaacattcagaagcagaatctggatggtcggtacaactcggttttgcttgaattgtctgcatctgatgattatgaagctttcaaaagagaggtggaggaaaaaggcttagatgtgaacgaggcaggcttttggtacggtagaagaattgggtcaaagaagatgggatctgaaacgaggacccctctgatgattgcttctttgtttggaagcgccaaggtgctcaattatattcttcttcagaaaggaagaggtggtgatgtgaacagggtctgtgggtcttgaagggccactgctcttcattgtgctgttgctggtggcttcc

SEQ ID NO: 16593 - DNA, 432 bp, Glycine max
gttaatttcttcacatagagctatcaagatccaacgttaacatgaagaatgttttagtaaggtgagctgcgcgagctctgcttggcggcggtgggcggagctactaccgccagctctcaacggcggcgatcgtggaacagagacaccagcacggtggcggcgcgtttggaagcttccacttgcggaggatgtccactcttccagaggtaaagggtcagcactcagaggagaaaaagaacgaggtcaacgacaccagtaacgccgtcgttacgagttactggggaatcacaaggcccaaggttcgtaaggaggacgggacagagtggccgtggaactgcttcatgccatgggatagttaccactctgatgtgtcaatagacgtgaccaagcatcatacaccaaagtcattaacggacaaggttgcttttaggg

SEQ ID NO: 16594 - DNA, 262 bp, Glycine max
cccacgcgtccgcccacgcgtccgggattttaatttttcttattgtatattccttaccttgggagtatttctttatttatttaattaatatattgtttagatgttggtaataatcagaagtgcgttgtgcgcatggattaccaatggatgaatcctgataatttcttatactatttactaattaggtttgtcaaataatgtacaaccataagtggatgcaaagttttcattttaaatgatgttcattagaggtgctttgagt

SEQ ID NO: 16595 - DNA, 266 bp, Glycine max
cttatgctaccgagaggggggtgatggagtattttgctacttcacttgtctgctcatagatgcgtaatgaagcctcctgctaatggcttatacatatgacgcattatagcacacgtttgcatctactatcattactgacattacctgtgaagattaatatttaaactggagaagtctagaattttttatttttttgatatataagcctatttttgtacttcatttgaaaggtcatagtttgaaccctctttttctggagatttacc

SEQ ID NO: 16596 - DNA, 390 bp, Glycine max
cacaaagaacaaaagacaaagacagagagaaacaatgtcttccccaagcaaacgccgagacatggacttgatgaagctgtcatcaggatgatgagtgattacaaggtggagacggtcaacgatggcatgcaagagttctttgtggaattccacggacccaaagacagtccttatcaaggtggtgtgtggaaagtaagggtggatctacctgatgcctatccttataagtctccatctattggctttgtcaacaaaattttccatcctaatgtggatgagatgtctggttctgtttgcttagatgttattagccagacttggagtccaatgtttgaccttgttaatgtgtttgaggtgtttcttcctcaacttcttctgtaccccaatgca

SEQ ID NO: 16597 - DNA, 408 bp, Glycine max
  modified_base (361)..(361): a, c, g, t, unknown, or other
gcaaaagtaaaaatgtggtttcttggttggaaaggggcatcagggttctcagcctcttccacagccgaacaagtcactcaagggattgatggaaccgccctcaccgccatcgtcacaggagcaacaagtggccttggtctggagaccacccgggttcttgcattgcgcggtgtccatgttgttatggcagtaaggagtctggacagtggtaagaatgtcaaagaaacaatacttaaggaaatcccctcggctaaaattgatgtcatggagttagatctaagctctatggcatcggtaaggaaatttgcagcagattttaattcttctggtcttccactcaatatcctaattaacaatgcangggtgatggcgaactcattcacactttcccaagacaatattgaattg

SEQ ID NO: 16598 - DNA, 280 bp, Glycine max
cccacgcgtccgcccacgcgtccgctggtcatcgttgggatctccatacgccggatctgctagaatacgcttgatccatatgggccttctcgaccacttgtgggacgacaccgtcgcctgcccaaggccgtaaaacggtctcggcaaggctcttgaaaaccccaaaccttacttttcgacctaacttccggcaagggtcccccttgactcgttaatcatactcatataattcaccaacgattttcgttaactacatagtcacaactacaatcgttaaaaa

SEQ ID NO: 16599 - DNA, 384 bp, Glycine max
gggaaattataaatcacagatcactgaggcatcccaatattgtcaggttcaaggaggtaatattgacccctacacatttggctattgtgatggaatacgcttctggaggagagttatttgagcggatatgcaatgcaggacggtttagtgaggatgaggcacgcttcttcttccaacaacttatatcaggggttagctactgtcatgcaatgcaagtatgccatcgtgacttgaagttggagaacacattgctggatggtagtccagctcctcgtttgaagatttgtgattttgggtattcgaagtcctctgtgctacattcacaacctaaatctactgttggtacccctgcatacattgctcctgaagttttgcttaagaagg

SEQ ID NO: 16600 - DNA, 331 bp, Glycine max
cccacgcgtccgcagcaaccagcttgcagaagcagatgagtttgaggacaaaatgaaggaatgggaaagcatctgcaatccaatcattgccaagatgtaccaaggtggtgctggtccagacgtgggtggtgctggtgcagcagaggatgagtatgctgctcctgcttctggtggaagtggtgctggccccaagattgaggaagtggactaaatgtagttgctttcctacagatacctgctttaaaaacttattttactttatgcttattttaatgggatttaatcgcatgatttttggtggatgggattcaaactattttttcctttctga

SEQ ID NO: 16601 - DNA, 215 bp, Glycine max
ggcacgcgtgcgattactcgtcctcatgggcatgctgatttaaccggttcgcaagatcattagcgatacttatggaggatggggtgctcatggtggtggtgctttctccgggaaggaccctaccaatgttgataggagtggtgcttacattgtgagacaagctgctaagagcattgcggcaagtggacttgccagaaggtgcattgtacaagtgt

SEQ ID NO: 16602 - DNA, 438 bp, Glycine max
  modified_base (361)..(361): a, c, g, t, unknown, or other
catcctgcggccagtggcacttttttcactcttatgcttctagggctcaagtactgctcttgccagtttcagggcaatctgcaaaaatttcagatggggcttcagctgctggaagatcggatatatagggcatctttgggttggttttcttttgagccagaatggtatgacacaaactatacaaactttgctcagtgtgaggctcaatctgtttctctatttgttcaataccttacaaatatgaaaggagatactgtccaagttggttcaaaaggaaatggacaagaaaatgggaatcctttggctgatgtgagtgatcaccatcatcctgtttggggtcaaatggagaactatgctgcangaagagaaaaacggaggcagctacttttaatgctttgccagcatgaggctgataggcttgatgtttgggcacagccg

SEQ ID NO: 16603 - DNA, 368 bp, Glycine max
tttctctctccctctctagaaccgtaaccgtcgtttctttctttctctctcctcaaccagagataaagagtcaccttcttatttttctgaatctcgcggcgttgttctttctgctgctgcggctgtggttccggcggcgatgggacagcaatcgttgatctacagcttcgtcgctcgaggcaccgttatcctcgcggagtacaccgagttcaccggaaacttcaccggcgtggcggcgcagtgccttcagaaactcccttccttcaacaacaagttcacctacaactgcgatggccacaccttcaactacctcgtcgataacggattcacttactgtgtggttgccgttgagtctgctggacggcaga

SEQ ID NO: 16604 - DNA, 432 bp, Glycine max
cttgaatcttcgttatccttctttttttctccttgaactcgaatattcactatggcagatgaggtggttctgctagatttctggccaagtccatttgggatgagggtcacgattgcacttgctgaaaagggtatcacatatgagtccaaagaagaggacttgcagaacaagagccctttggtcctcaaaatgaacccgggtcacaagaaaatcccggttctcatccacaatggccaacccatttgtgaatctctcgttgctgctcagtacattgaggaagtctggaatgacagaaatcccttgttgccttctgacccttaccagagagctcatgctcgattctgggctgactatgttgacaataagatatttgatcttggaagaaagatttggacatcaaagggagaagaaaaagaaactgccaaaaaggag

SEQ ID NO: 16605 - DNA, 268 bp, Glycine max
cacaaaaccaatatcttagttttggtggagagaagagaaattgaaggaaacatacttatcatgacatgaactagatatgacttgccctcttcaactccaccgattcagccctgcaacagacacattcaccgccatcgcaaacggcgtcaactgtccaaagccagcacaaacggcgccgtcaacgcgccgtttattggcgaaagtaggccttagcgtgacggagatggttgctcggcaccacgctcacgctgtggtgcccaaccagtgc

SEQ ID NO: 16606 - DNA, 369 bp, Glycine max
ggacttttgatgtctctcttctcaccatcgaggagggtattttcgaggtgaatgccactgctggtgatactcacttgggaggtgaagattttgataacagaatggtgaaccattttgttcaggaattcaagaggaagaacaagaaggatattagtggaaatgccagagctctgaagaggttgagaacagcatgtgagcggtcaaagaggactctctcttctactgctcaaaccaccatagagattgatttcttgtactagtgtattgacttttacacaaccattacctgtgccccgtttgaagagctaaacatggatttattcaggaagtgcatggagcccgtggagaaatttttgcggaatcccaaat

SEQ ID NO: 16607 - DNA, 107 bp, Glycine max
caaagttaactttgtaagtgctactactactgagccactaaactctgcatctggcataaagtcctttctgggtacaaatgtacgcagttcatatccgatgaaatgat

SEQ ID NO: 16608 - DNA, 413 bp, Glycine max
cccacgcgtccgcccacgcgtccggctttattctttttcttcgcttcttctgtagagcacccaggattgaagatgatagaccttgcgcgcgtgcagaaggagcttgtggaatgcagcaaggacgcggagggatcgggcatcaaagtcagtcccaaaaacgacaaccttgctctcttgatcggcaccattcctggccccgtcggaactccatatgaagggggcattttccagattgatatcacattgcctgatgggtacccgtttgaaccccccaagatgcagtttaaaaccaaaggttggcatcctaatatcagcagccaaagtggagctatttgcctggatatcttgaaggaccagtggagcccagcactcactctgaagactgcacttctttctgtgcaagcacttatctc

SEQ ID NO: 16609 - DNA, 435 bp, Glycine max
  modified_base (85)..(85): a, c, g, t, unknown, or other
  modified_base (143)..(143): a, c, g, t, unknown, or other
  modified_base (166)..(166): a, c, g, t, unknown, or other
  modified_base (169)..(169): a, c, g, t, unknown, or other
  modified_base (247)..(247): a, c, g, t, unknown, or other
  modified_base (271)..(271): a, c, g, t, unknown, or other
acacttccaccacccttagtctggaggccggtccggcccaagcgagcccactccgaaaaatgtttgccgtggcgtccatcgccgncggcatacagttcgggtgggctctccagctctctcttctaaccccctacgttcagctnttaggagtcccccacgcggcggnctncttcatctggctctgcgggcccatctccgggctcgtggtacagcccattgtgggctactacagcgaccactgtacctnccgctttggtcgcaggcgcccctntattctcgggggcgccttagccgtcgccgtcgccgtgttcctcattggttacgcagccgatataggatacgcggcgggcgacgacatatcgaaaacgacccgaccccgagcggtcggggtcttcgtcataggattttggatcctagacgtggccaacaacatgc

SEQ ID NO: 16610 - DNA, 425 bp, Glycine max
gacaattcgcagtttgttacctcactttggtttttttctctgcagtaatagaaaaggaagagggaaagaagaagaagaagaagaagaagaagaagatgttgagggttgcagctagaaggctctcttctctctcctcctcctctccgtggcggcccaaccacgccgctttcgcttatgtctctcgaaacgcactcgttgatgaccgcagatccgatccttcctcccatcccctttttcccttcagaagttttgctactgaatccctgatccacccaatataaaacagcattattcctgagattcctgcaactgttactgctgttaagaaccctacttctaagattgtctatgatgagcacaaccatgaaagatttcccccaggtgacccaagcaagaaggcatttgcctacttcgtccttacaggg

SEQ ID NO: 16611 - DNA, 80 bp, Glycine max
taacacgcctacgcccactcatcagagccactttaaccctactccaccaccacacctctactcggtaaaactgccccttt

SEQ ID NO: 16612 - DNA, 391 bp, Glycine max
caaacccactaagatggcttcctttgtatccttcctagtgctgcttcttgcagcccttatcgtcatgcctcaagggcttgctacttactacaaaccaattaagaagccaccagtgtacaagcctccagtgtacaagccaccagtgtacaaaccaccggtttataagccaaaaccaccggtttacaagccgaaaccaccggtttacaagccaccatataagaagccaccatacaagaaaccaccttatggaaagtaccctccagtagaggacaacacccatgcctaaagcaagcaatgaggtctattatctacttaataaataagaggaactgctttgtgttttctagcattgtgatttacaacttcgtagcaatgcatattcttgactctt

SEQ ID NO: 16613 - DNA, 330 bp, Glycine max
ccagaaccttaacaaagatgaggaaggatgtgtcaagccgtttgaccaagtggggagatccagttcctagcaaactgatagagaagattgatgaatatatcccacctgattttgctgagctgctaaatataactgagaattttggaaatggtgcttgtaaaccttgctcctggatacacactgacattatggatgataacatttacatgaaaccaatattgggttggtttaacaacaatggggaatactgagaatcccaccttgggggccaagggttggttgagtaacgatgaagtaaaatcatggggtcctagaatattcctggattta

SEQ ID NO: 16614 - DNA, 422 bp, Glycine max
cccacgcgtccgttttcgatatcaatagcgaaaatgtcatcagctggtgtctctacacttactgtggttcccactgagccattgttgtcaccaaaggcattcccttttccaattccatcacacttgtctttggaagataaatccattttcatatacctctccttttccgggctcattgactcccatccgtgttatggagtgggataccattgaatctgtcaaattcaaaatccaaaggtgtgaaagccttccatttttaacaaacaagcagaagttggtttatgctggccgagagcttgcgcgaagtgatacgccgctcaaggactatggagtaacggatggaaatgttttgcatttggtaatcaaactgtcagaacttcaagtcatcaatgtgaaaacttcttgtgggaaagagttcacgt

SEQ ID NO: 16615 - DNA, 377 bp, Glycine max
cccacgcgtccgcccacgcgtccgggccaggcaagccccactcaaccaccacacctctcctcggtcacgctacccctttctgctcttcttctacctttcaagttttaaaagtataaagatggcagagacattcctatttacctcagagtcggtgaacgagggacaccctgacaagctctgcgaccaaatctccgatgctgtcctcgacgcttgcctcgaccaggacccagacagcaaaattgcctgcaaaacatgcaccaaaaccaactttggtcatggtcttcggagaaatcacgaccaaggccaacgttgactacaagaagatagtccgtgacacctgcaggaccatcggcttcgcctcaaatgatttggaactg

SEQ ID NO: 16616 - DNA, 411 bp, Glycine max
cccacgcgtccgggattgtgaccttggaagcattagaaccttttgccagtgaagccccaaaacaggatccttctccacttccatacttgactgagaaagaacccaaaatctatgatatttccctagaggctcacataaaacctgctgggcatgaagattcgggtgtggtgtcacggactaatctaaagcacttatattggacattgacccaacaacttgctcaccatacaatcaacggttgcaaccttaggccaggcgatctccttggaactgggacagttagtggtcctgagccagagtcccgtgcatgcttgctagaattaacatggaatggacaaaacacagtgtcagtgaatgagttaaatcggaaatttcttgaagatggagacgaagtcatcttaactggatatt

SEQ ID NO: 16617 - DNA, 355 bp, Glycine max
tcttactccttacaatatgggcatattcaatctgtcccataggtatctctatctgatgtttttgcttcctattgccatagatttcaattgctgattaattttgcttgcagagttgttttggcaccgctgaccagacagaggtcttacgacaacgtcccacaaccccatgccatcctctactactcccagagaacttccaactgaggccttctcattactgaatccactggcgtctctgacacggctcaaggctatccgcataccccttgcatatggacttaagaccatgttcaagcttggaaacccattttcgatgccgttcactccaaaggcggtggtttcttctgtcaaattt

SEQ ID NO: 16618 - DNA, 468 bp, Glycine max
  modified_base (385)..(385): a, c, g, t, unknown, or other
caactcagcaaacccctacaaaagctatagaatcactagagactggagaagatgccacagatgaaattggcacggccaagaaagaagttaaaacaagaaacaggaagcctgagtgtccccactcacaaatctctagcactattaactctaccatcatcggaggctggagaagatgcgacagatgagattggcaccctgggaaagaagttaaaacgaaaaacacgaagtgtcggtcgccccccgaagaagtcttttggactagttcagggtcgaccccatttaacacctgatcaagttgtgaatttggatgactatctagataccttggaggacatgcttgttatgcctgaaattgagactacaccatcggatcatctgactcctnctaaccgtttggatgataatgaaatgattgagagctgcaagaagaagctttcttcccttcttgctataaattttccttctttg

SEQ ID NO: 16619 - DNA, 340 bp, Glycine max
actcggtccttaattcccgtgtctggtccactccttacaatccactcgtttctgcaatgctgatcttagcaaatctaatgattatcacatactgcataaagttggtgatattcactccaagggcattatttctcttgtcttaaattcaattcttacattctttcaacaatttaatatgtttcacctactttaatatttttattatatatatattatcttttatattcttttttcaatttatattttatttttatttatttctatattattaatctttttcttatttattttttatttattatttatcatacttttatcttttttttttctatttattttt

SEQ ID NO: 16620 - DNA, 234 bp, Glycine max
taagttcaagagaagtatattagggaataaccgattaccgtgccatgattctgttgatttatcatgacaagaacaaatataacactttgtaataccgattatgtgaatgctatagcaacaatgactttgctgttcaatttatttctgctatcattgctggtgacatagatgttgctgctgtatatgcacatgatctggcacattttggtcttgaagtaaggcttacttattatt

SEQ ID NO: 16621 - DNA, 434 bp, Glycine max
cggacgcgtgggcggacgcgtgggttgtggttgagctttcaaacaagaatcgggtcaccttagtgcaagaggcacgtgtcgggggcatgtatagcagttgctttgagatttctgtcactcaacatgatatattgagggaccttgctcttcatttgagcaaccgtggcagcattcatcaacaccgaaggctagttatggctacacgaaaagaaaatggactactccccaaagaatggtctagatacgaggaccaaccctttgaagcacagattgtttcaatcaacacaggtgaaatgaccaaaatggactggtttgatctggattttcccaaggctgaagtgttgatcattaatttcacatccactgaatactttttgccttcctttatcaataaaatgccaaatttgagggcattgataatattaaccacagta

SEQ ID NO: 16622 - DNA, 405 bp, Glycine max
cccacgcgtccggttgagttctatgctccttggtgtggacactgcaaaaagcttgctccagaatatgaaaagcttggtagcagcttcaagaaagccaaatctgttttaatcggcaaggttgactgtgatgagcacaagagtttgtgcagcaaatatggagtctctgggtacccaacaattcagtggtttccaaaaggatctcttgaacccaaaaagtatgaagggccacgcactgctgattcacttgctgagtttgtaaatacggaaggaggaacaaatgtgaagattgctacagcttctttcaatgtaatggtgcttacatctgaaaattttaatgatgttgtcttatatgaaacccaagatggtctggttgagttttatgcacccctggtgtggacatttgca

SEQ ID NO: 16623 - DNA, 345 bp, Glycine max
cccacgcgtccgcccacgcgtccgaattgattgaaatcaaacctcaccaccgctgctaggtcaagcttctctgtcggtcattgcatctccaatctcgcttcttctctcagattcagataccaattcggtttcttccgaaccaaacttgtttttgagaaattcggcaattgattttccatggccaacaatccgtcacagcttctcccatcagagttgattgaccggtgtataggttcgaaaatttgggtgataatgaagggtgacaaggagcttgttggtactcttagaggctttgatgtttatgtcaacatggtccttgaagatgttactgaatatgagatcact

SEQ ID NO: 16624 - DNA, 342 bp, Glycine max
  modified_base (232)..(232): a, c, g, t, unknown, or other
cattcacctattacatggccattcacttaatgttggacatggaattcagcaccatattttgcatttatgcttcttttctattcatagttctctttaagtcattgctgacatcattctcttccaaacactagaaatagtcactccctcccaattccattggttggtctttacattagagaatcctttcaaatgcgttcccaacacccaaaacaatcttcttagtcacaaaaantaaaaaagtttatatcattgctttcacttgcaaacatacacatgcaatttcattattcagtccttgtacagttgctagtggttcatgtgatgctcttttgcatattcaat

SEQ ID NO: 16625 - DNA, 319 bp, Glycine max
gacagacgtagaaaatccaattaagattgaccatggattattcattgacgaactcatggctgctatctccatcattaccttcagcttgcactactactccttagatggctaaaggcggaagtggagctcttggtgcagagctcactacactcaacactgctgctgacatatgaagaaccaatcgacccaccactcaccgttgaacacacccagctcttaatcgatggacaattcggtgatgctgatactggcataacttttccacagttggaccccaagacaggcgatgtgattacccatgttgctgacgatgaccatg

SEQ ID NO: 16626 - DNA, 408 bp, Glycine max
cccacgcgtccgcccacgcgtccggcctcagttggcaatgcttcacgattagtgtttgatagatctggggaaatctatgtagagacgactggtgggactagaaatagaatcctacctcaagttgataatactcttgataccgaggtgaattactacagagcgacccttgatttcagtggagttttcacgctgtatgctcatccaaggaacaccagtggccaaccaaggtggagaatcatgaactatgttcctgacaacatttgcgatgcaatattcatgattatggtagcggttcctgtggctataatagttattgctccatggaaaatgataggcctacttgcaactgcccttatggctattcactggttgatccaggtaatgaatctgggggatgccaacccaatt

SEQ ID NO: 16627 - DNA, 430 bp, Glycine max
cggacgcgtgggcggtgatccgttggagcatcctcagaaagagacttactggggaaatgtgaatccaatcggtgagaggagctgttacgatgaagggaaaaggactgcggagacgttggccatggattatcatcggggtgctggtgttgaggttcgtattgctcgaattttcaacacatatggaccccgcatgtgtttggatgatgggcgtgttgttagcaattttgttgcacaggctattcgtaaacaaccattgactgtatatggtgatgggaagcaaacaagaagtttccaatatgtctctgatttggttaatgggctggtggctttgatggaaagcgaacatgtgggacctttcaacctgggtaacccaggggagtttaccatgttagagcttgctcaggttgtcaaagaaacaattgattcaagt

SEQ ID NO: 16628 - DNA, 244 bp, Glycine max
cccacgcgtccgatctaatctgctgcctgggtcttcttcagcttctgatgctcctaaagctgacgttgctagcaagaaccttcgatcgctgctatgtcatgcagaatctctgattcactaacttcttaaatgtgcacgatgtgcaacttttaagagtgtttcttggcgaattacaatcactatgtacatctactgcattcgctgaaaatgaagttcaagatagcagatgtgatgagtcattatc

SEQ ID NO: 16629 - DNA, 149 bp, Glycine max
caaaaaggttgctctttttgattccaagggagttcccgttgcaattctcaataatattgagagggataagcggcctaaagaagaaagaatagcccgaacttggggaaccattgcccctggcctaccttatgttgaacaaactataacca

SEQ ID NO: 16630 - DNA, 438 bp, Glycine max
  modified_base (87)..(87): a, c, g, t, unknown, or other
gcagttgtttcatagctcccttacatttcctactccagtgtatcgtgtgattaaggaacaactggatgaagtacttgcaagcttcangaatttgaaaggtcttgaatgcaacctggacaggacatttaatggttctcaccgagtgaagataacagcgaacgccacaaggacagtggcagaagttagaagacctctggaagaactattgagagggaaaaccattgagcatgacagcctcacccctgcagttctccaactcatgttgtccagagatggctttagtcttaaaaactcattgcatcaagagactggaacttatattctttttgacaggcacaacttgaatttacgggtgcttggcttcccaaacatggttgcttctgctcatgagaaagtgatacagttcctactttctctgcatgaataatagctgttaga

SEQ ID NO: 16631 - DNA, 419 bp, Glycine max
  modified_base (152)..(152): a, c, g, t, unknown, or other
aaccacacttctcttcttccattgtctcacgttatcagcatcaacacagtgtcacatccataagcggtgagcttctccctctctctctcaatcatccttttctttgcatcatgttcacattccatcaaaagggtctcacaaagttgtgattntttacccaccccgttcttgaactgaatcttataagcttgccatttgaccctgaaaccaaagaaaaataagattttgtgaaatacgagcttgtcccttccctgatctcttttttctctcaactagttttcaatgcagcaattctggatctgagaaccctttctggatctggttggaatagaagtgaaaattgtgttgcattgttaaattttttttgggtgaatgattggagttcaattttatttggattggtaatagctgatgtgact

SEQ ID NO: 16632 - DNA, 437 bp, Glycine max
  modified_base (209)..(209): a, c, g, t, unknown, or other
cctcaccaaccttatcacaaggtttcgagatcaaggactctctgctagggacatggttgctttatctggagctcacacatttggcaaagcaaggtgtactagtttcagagatcgcatatacaatcaaaccaacattgatagaacatttgcattggccaggcagaggaggtgtcctaggactaatggcacaggtgacaacaatctagcanatctagacttcagaactccagatcattttgacaacaactacttcaaaaaccttctcatcaaaaggggactcctgaattctgatcaggtgcttttcaatggtggatccactgattcactggtaagaacttacagccagaataacaaggcatttgatactgactttgttaaagcaatgattaggatgggagatatcaaacccttaactgggtcacaaggtgagattagga

SEQ ID NO: 16633 - DNA, 227 bp, Glycine max
ctttcccttttgtgggctccttttatagtctccatgtatgtgccaacgtatttttgtttcatggatacgatttctgtcatatttgttgcctgtcacatagacgggtatgtagggtcgccaattgctttattggtaatttttggtgagggatgatataaaaaattttgtttaacttacatcctttttccggcattattttagggttgagagtgtagtccatgagtttt

SEQ ID NO: 16634 - DNA, 436 bp, Glycine max
caccttcccctttgtttctcaacatcattccccaatttccccttctgtattgtttttcttcattgctctttttcaatccccgatttcccccttcttcgttttgtgtcttcataattcagatcctctcttcaatctagggttcctggcttaacgaaatcaaatgtttaaggaagaatttctatgacgattcgcaaccccatgcgacgaatccgtctcctccactccttttccgtcgtcttcctctactggttctacgtcttctcatgaactaaccccctctcaatcccctaatttctccaacatttccccctttttctaattaatcagatctgcaaaaccctaatttccctaaccctaacgaaacccccaaatccaatggcttcgattcaacgcccggcgagtttcggatcgtcggatggaggagatccggtgatgt

SEQ ID NO: 16635 - DNA, 442 bp, Glycine max
attcaactcttctctttctctttctcttctcttctgtcgaagaagaagaagcagaagtagttgcagaaacatgctggagaatcttcaggctcctccgccaacggaatcggccccagtggtgaagcgctatgctcctcccaaccagaggaaccgttctgccaacaggcgcaaatcatctgatcggcttgatcggacaaacagtatcgggaatgacttagaaaagaatcaagttgcttattcaagaagtgttcacattccagatcacggagatgctggtagcagtaatcttcttaatgagaatcactattcaagattaatagctttagaagggtgtagttgtagtgcagctgtccagctgcttaatgatcgttggacaggtgcacttacatctacaataattctaaagattcatctgaaaaggcagttttgtattctagtggga

SEQ ID NO: 16636 - DNA, 422 bp, Glycine max
ctttgtgtttctctcttcaccttcgtctttctttcatttcaattctttgtggttcagaaactgtgtacagttaatcaagcccaacctcacctcacctcacctcacaggttttagttgttaattaaatatatagatagaaatccaaggaagaagatgaagcagtttgccgtccaaaacgtcgtcgctccatcccacgatgagattagcgtggtttgccccaagccccgccgcctcggcctcttcaacttccccgtgaacgatccccctgttagacccttctactggcatctcagttgccaggctgagccatgtgattcaaactcgtctggttcatatcctttggacaacttacttaccaaggatggtgattttgatgtagagcaatcatggccagtggtaacctcgtcgcccccattttctgc

SEQ ID NO: 16637 - DNA, 458 bp, Glycine max
ggcgttacagagagagagagagagagttattatggtgactatggaagagagggcaaggagccgagaggcgaagctggggttgcgagtggaggatctatgggacattcaggaaccacagctaagtcctgatgagaagttcaatgcttgctttgaaagcatacctgtctctgccttccctccacctccttcaaatcaagaaattgagataaaatcagatgccaccctagccgaggcagtaaaaatacttgcagaacacaacattcttagtgcacctgtggtggacgtagatgcacccaatgatgccagttggattgacagatatataggaatagttgagtttgctggaattgttgtttggattctgcatcagtctgaacccacatctccaaggagttcatccggtggagctgctaatacggctgcagtgaatggaataacttctgaagcatttcggcttg

SEQ ID NO: 16638 - DNA, 470 bp, Glycine max
acgaccacgcgtacgcttggattcgattccatcactgatatttctcttctctctctctatctctgcggaatatggcgccgcctgcgccagcagttgaaggcggccaggcgccgcaagggcggcagcaacagccgcaaggagggtttggcctctccggaatcatacgcatggcagttttctggtacttcgcctccaaattcttttcccccaaaaaacctaccgaaccttgcgctctcatctacaatctctatcagaaggcacagcctctggatatgtggctttatctttccgagtacgagaagttcaatgactatggtagtgaaagttctcttgtatggcatgaaaccaatattccgtatgccgtttggagacctgagagtaccaggactctaactttgaagtatcatccgtctgagtctttgaagcataatgggagtctatatgctcatgtattctttgcacactctggc

SEQ ID NO: 16639 - DNA, 379 bp, Glycine max
gcgagaaggccatgaaaaggtggctcatgtatgcaacatgcatccaaattttcagattgaacgttataattgtattaatctgacggaaaccattgaggagtttgattcatcttggaattttatcatcaataaatatgaactcacgaaaaatgattggcttcagtccttgtacagtgctcgtgctcaatgggttccagcatattttcgtgattcattttttgcagcaatatctcctaatcaaggatttgatggttcttttttttatggttttgtcaaccaccagacaacattaccactgttctttaggcagtatgaacaagctttggagtgctggtttgaaaaagaattagaatcagattatgatactatttgtacaacc

SEQ ID NO: 16640 - DNA, 225 bp, Glycine max
cacacgcgtgcgatgatagtgaagctccacaaagactggtgcaagaaacaggctaataattcggctacgacagcgactgttgctggccaagaatctggtacaacaagatgatatctgaaacgatgacctctctggacaatgcttctttcgacggaaagcccaaggtgcaccatcacatccttgatcatgaaggaggaggggatcctatgaacagtgtctgcagtt

SEQ ID NO: 16641 - DNA, 444 bp, Glycine max
aggatcacatgcgtaaagctggtgatgtgtgtttttcgcaagtcttccgtgagcgtggtggggtgactggtatagttgatgatacgcaattatgatgatatgaaatatgctatcaggaaacttgatgactcagaattccgcaatgccttttctcgtgctttcatactggtgagggaatatgatcgaggttattctagaagtcctagtcgtgattcaaggaggagctattctagaagcctcagccgcagtccatgtatctcacgaagccgcagccatagcctcatcataagtcatatctatagtgacaggagcagaagttggtctccgaaaccaaaacactttcgacgttcaatatcttctttcaaggttagttttttaccaagtttgatacattatgcaggttttgtgctcttgtgtcttttattgttgaaattttaaattttg

SEQ ID NO: 16642 - DNA, 429 bp, Glycine max
cccagttcaatgttatgctgatttcatgcgtgctttcagagacactttcaagcacctccttggtgacaccattgtggaaattcaagttgggatgggaccggcaggtgagctgcgttacccttcttacccagagcaaaatgggacatggaatttcccaggaattggtggtttccaatgctatgacaagtatatgttgagtagcttaaaagctgctgctgaagctgagggtaagcctgaatggggaagcacaggccctactgatgctggacactataacaactggccagaagacactcaatttttccgcaaagaaggtggaggctgggatggtccatatggtgaagttttcctcacctggtactctcagatgctgttggaccacggtgacaggattttctcatcagccacgtcaatctttgacaacactgg

SEQ ID NO: 16643 - DNA, 326 bp, Glycine max
tactcggtcctgggttccctggtagacccacgcttacgattgaattcaaaaacttaagttcattccttgtgttttgctttcttcctcaaagccaaacatgtgaaacagagggcggcaactgcgactgctctgacaagactagctgcaccaatggaaacagctatggtgttattgtagagactgagaagagttacatctagactgttgttatggatgtaccagcatctgaacatgatgggaagtgcatgtgtggcactaactgcacttgcacggactgcacctgtggccattaatgaatatgtatgtaaatgtaattgccatgtgtt

SEQ ID NO: 16644 - DNA, 172 bp, Glycine max
cccacgcgtccgctaccatgcttccttgcagtacaccctctcatgcttctgcgctttttatagcccctattttaaatatagcccttgactgtcttttttccatacttcctccacgaataatcatcattatttatatttgcatgtttcttgcatatatcattcaccataattt

SEQ ID NO: 16645 - DNA, 465 bp, Glycine max
cccacgcgtccggaacattactcatacaagctcatctcagagaaagtatccagcggtaataggagagttgtgccatcaatgttctctggccgatcttaggaaatccaccaacaacttcgatcaaaacagagtaattggacgtggattatttagtgaagtatataaaggctctgtacaacataagggtgcttctgattatactgttgcagtaaagcgattcaatgaacgaggattggaagcgttcaagaaggaaatagaattgctctgccagctttttcaccctaattgtgtctctataataggattctgcaaccacataaaagagaagattattgtgtacgagtacatgtccaatggttctctagctgattacctacaaagtggagatgcagaagcattatcgtggaagaaaagactagagatctgcattggagtagctcgtggactacactaccttcacactgg

SEQ ID NO: 16646 - DNA, 372 bp, Glycine max
ttgtttctttgcactccccgcccaaaccctaactggctaccctattccgctttctctcatccatcatgaaaggaggaaagtccaagaccgaatctaagagagccgatgccaaacttgctgtgaataagaagggcgccgccaccaagactaggaaacccgccggaaaggggaaggcagcgaaagatcctaacaagccaaagaggccttcaagtgctttcttcgttttcatggaggaattcatgaaggtgttcaacaaggaacatcccgacaacaaagcagtgtctgctgtgggcaaagctgctggagcaaaatggaagacgatgtctgatgctgaaaaagcaccttatgtggcaaagtctgagaaatggaaag

SEQ ID NO: 16647 - DNA, 477 bp, Glycine max
gtgattttgtttatcataggaggatctgatgtactcgctcgtggatctcaactatattcacgatcatgatggcccttgaaaattctgaaaatatgcaaataaactgtgaggcatctttaaaatgcctccagggcaagggatttccttgcaattttcagagtaatgggagttctatggaaggctttacagagcttaaaaatgagcctggtactcatccttctggggatgttgctgagcctaactgtcacttaggcagtgagtttcttgagccttccaatgaatttcacaccaaacctacttatcaccaaaattacagcacctggacaccctgccattttaactctcacaaggtgcagcaatgccaaatgaatgcttttgagagccattactatccttatcctgttgagaatccacttcaatatgttccaattaatatggttgctcagggttacccgcgtgagcaatatcaggaatttc

SEQ ID NO: 16648 - DNA, 435 bp, Glycine max
  modified_base (360)..(360): a, c, g, t, unknown, or other
cttttctctctctcttcaatttcacccttttagcatttgtacattcctttcccttccttgaagcgttcttaattgcgagaggggatatcggagaagttgattggcctcccattaattgcaggtctgaatgatctgatggagtctaaagttgggaagaagaagtcgtctagtagtaagtcccttttgtacgaagctcctctcgattacaccattgaagacgttcgaccacacggtggaattaagaagttcagatctgctgcttactccaactgcatccgcaagccatcctgagattccctaggttgtgtgacgacatagcccccgtagtcttgcatctgctatattattctagtctcttcntttcccttttcttgttctcttccttgcccttttgttctctctacctatacagcaagactttgtttctttttgagt

SEQ ID NO: 16649 - DNA, 409 bp, Glycine max
  modified_base (383)..(384): a, c, g, t, unknown, or other
gtcttgcatcttcatgatgaagattttagtgtccgattagcctgtcggaataccctgaaacgagtttgcccattgatggaaattgaaggaatgcttgctgtactaaacacacacagtttcctttctgatcatcgaagtgattatgaggactttctccgagacattgcaaagcaatttactcagcatcttccctctagagttgatagttatatggcatcaacagtacaggcttttgacgcaccatggcccataattcaggcaaatgctatatacttctgcagcagcatgctttctctatctgacaatcagcatattttagcttgttatcattcacaggtcttcggtatgctggtgggaaaattgagtcgatcacctgatgctgnntgtagagcaacaagttctgctgctc

SEQ ID NO: 16650 - DNA, 323 bp, Glycine max
aacagccttaaccttcgctgcccccaacgttgtgccattgtcacccacaaatgctgtcttcgagattaccgtctttcctaccaaattgaaagccccgcgctcctcacctcgttactctccgattagggttgcaaccgtggagcccgacacttcaactgtctactacaactctgcgttctcagtgtttcctgcataatcatgctaaactgtattatgggaatcctgcattgcttatatttacctcttaacttatctacattctgtagcttatactttatgagtcttttcttaaatctatttatagagtatttttattctatttt

SEQ ID NO: 16651 - DNA, 474 bp, Glycine max
ggctcctccgacgatcaccatcaccgccaccgccacgtcgaggaggaggaggagatgccgccgctgcgccccccggttcagctcggcgagatcacagcggaggagctcaaggcctacgacggcaccgatcccgagaagcccttgctcatggccatcaaggcccagatctatgatgtctcccagagcaggatgttttatggacctggtggaccttatgccctatttgctggcaaggatgctagcagagccttagcaaagatgtcttttgaagagaaagatctgactggggatatttctggtcttggcccgtttgagcttgatgccttacaagactgggaatataagtttatgagcaagtatgtgaaggttggaactgttaaaagtgaagaagttccagtaactgaaccagagtccattggtgaccattagaatctactttccgtgatattgatgctgctgccaagcctactgata

SEQ ID NO: 16652 - DNA, 173 bp, Glycine max
cttcttcctctctcttctacctttctctctccctcatcctaaccctcaccttcgccgcgcgcgagaaaccccacccctcaccggccaagccaccagccaagcccgccgtgaccaccgtcacctcgccggcaattcaacaagcctgcgccgcgacgcgctttccgcagcaatgc

SEQ ID NO: 16653 - DNA, 409 bp, Glycine max
gctttttgacatgataggcactggctgcattggggcttaagactggtggtactgttcagcagggcgcagagaggctcttgctcacaaagcacacacctcttgaaaagttggacaggaagcattttgctaagggtgcatgtggtgtagaaaagaatggggttgctgcagttccacaagaagatggaaattctaaagaaattgcattgatggaagccaaaatgacaaaactttgtcatttgttagaggagacaattgctcgaacaaaagacaatgttgtaaagaagcaagccctaacatatgaggaaatggaagcagaacgtgaggaggaagagacacaagaggactctgaaagcgaagatgatgagcagcatatatataatcccctaaaattaccaatgggatgggatgg

SEQ ID NO: 16654 - DNA, 428 bp, Glycine max
  modified_base (252)..(252): a, c, g, t, unknown, or other
ccttgagctttctcttgctttttgcttatccaactcctgaacttccaactccaagctttgagtatcacactgctttcgatggtgttgcattgggaattgtctctggggtgcaacaaacataccatcaatttcaccatgccaatgttcctcgtttgttctcgtcagagctgactatacctgtatttctgggaaggatgctattgggaatacctacaattctaattgtgaagttctgcagtaagactctcgcanaatggaccattcctgtggtagcgaacaccttgtgcatcccaataaaatcaaccggctatatacctacactgaatggatctgtgacagggtaaatgtctgataagcttaaacaaggttacttgcaaaagcttctttcccaagcacagggcattcgatgttgatacccggattaggat

SEQ ID NO: 16655 - DNA, 471 bp, Glycine max
cgaatttattttcaaaaaccttctcttttctcaattgggtttccatctttggggtgatttcagtgccatggctccaaaggatcccaagcaagttgctgatgctgcttcttctggtggtgggggtggcttttttgcttctattgcttccagcttgtccaatttcggtagtgccatgtccaaatccgttaatggtttggtgggctacgaggggctggaggttgttaatccagatggaggaactgaagatgctgaagaggaagcaagaaagggacgatggaaacaagaggagcgagatagttactggaaaatgatgcaaaagtatgttggctctgatatcacatcaatggtgacacttccagttatcatttttgaaccaatgacaatgcttcagaaaatggctgagcttatggagtactcttacctgttagatatggcggacaagactgaggatccatacatgagactagtatt

SEQ ID NO: 16656 - DNA, 312 bp, Glycine max
aagaaacgaagatagaatgtgcacagccctaaagacgaattaccagcttagcgaggagatcggtcgcggtcgtttcggcaccatcttccgctgcttccacccactctccaacgaaccctacgcctgcaaactcatcgacaaatccctcctccatgactccaccgaccgcgactgcctccagaacgaacccaaattcatgacccttctttcacctcacccaaacatccttcaaatcttccatgttttcgaggacgaccaatatctctccatagtaatggatctctgccaaccccacacgcttttcgaccgcat

SEQ ID NO: 16657 - DNA, 429 bp, Glycine max
ctttctttttctgtgagcctttctttcaggttcttaacttgatcagtgtgcagtgtccaaatgataagggtagttgcaaattgcaatggctaagcatgatgttgagggtggttccttctctgcaaaggactaccatgatcctcctccagcaccgttgattgatgctgaggaactcacacagtggtccttctacagggctttgattgctgagttcattgccacaatgctcttcctttacatcacagtgctcactgtgattggttacaagagccagagtgatgtaaaggctgggggtgatgtgtgtggtggagttggcattcttggcattgcttgggcctttggtggcatgatcttcattctggtgtactgcactgctggaatctcatggggtcacataaacccagcattgacatttgggctcttcttggc

SEQ ID NO: 16658 - DNA, 449 bp, Glycine max
atggcatctatggcggctataggttctctcaatgttccacgttctgcttcttggcgttcatcgtttgtgggaagaaaaagcgttccacgcagcctttccttctctgcatcacaactttgtggagacaagattcccacagattcagttttattggcaccaaaaataggtcgcagtccagttatcgttactcctaaagcagtttctgattcccaaaactcacaaacgtgccttgatcccgatgctagcagaagtgtgcttggcattatacttggaggtggtgctgggactcggctttatccactcaccaagaagagggcaaagccagctgttcctcttggagctaactataggcttattgatattcctggtagcaactgcttgaatagcaatgtcttcaagatctatgttctcactcaattcaattctgcgtcggtaaaaccgacaccttt

SEQ ID NO: 16659 - DNA, 433 bp, Glycine max
tccacgcgtccgcacgcacgtctctctctctctctcgccatggctatggctatgcaaagcgggatcggagtcggcaagatcctcatcatagcaggagcaggttacaccggcaccgtcctcatcaaaaacggaaaactctcggatttaatcggcgagcttcagttgctggtgaagggattggaaaaatctggggagcatgctgaaggtgaaggtgaatatgctgatgccatagctgctcaggtgcgtcgcctggcgaatgaagttcggcagcttgcatcaaacaggccaatcacagtactgaatgggggttctgaacaaagttatttatcatcccttggcggttcaactgctggcttgggcgctctgggttatggctacatgtggtggaaaggaatttcattctcagatcttatgtatgtgacctgaccgaatt

SEQ ID NO: 16660 - DNA, 423 bp, Glycine max
  modified_base (382)..(382): a, c, g, t, unknown, or other
cccacgcgtccgcccacgcgtccgcccacgcgtccgtttagacttactcatataaataactcagggcggtggctatgtcaaactgagaactaagatcccgctggcggttggcgcaacctttcgatcttcatccaacggggcaacgttggatctgctgaactgaacttctttttatatgcactctgtgatttcactctgcttcgccatcctatgggggacaacaacagcaacaacgatgccttcatgcgcaaccaaaacgccgtcgttcaggcccgcaccaaagcgcagaaccgctccaacgtccttcagctcaaactgattggacagagtcacccaaccggtctcacagcgaacctgttgaagctcttcgagcctaggcctncgttggagtacaagccaccttcggagaaacgaaaatgccca

SEQ ID NO: 16661 - DNA, 267 bp, Glycine max
gacaaagttgttcatggtcattctatgactcatgggacgtatcggcacaaaaaacaagcttggaaaggatctcattctgagaagaatagctcaaggcatgtatctgaacaaacaggccatgaggtgaatcatggctctaatgagcatcgtgatgatgcacatgaggaagaagattgggatcatctgtctaaggacaaaggtgggcataggtttagaaatcaaggcagatcaagaaaacataaatatctgcctggaaatggaatgggc

SEQ ID NO: 16662 - DNA, 452 bp, Glycine max
cttttctctctcttctttgtttgtttctcaacgaaaggcgaaatttcggggatggtgtgtccttgaccttcatagccgcgtgacgttatcattgcctctatccatctctgcttctttctttctttctttctctgctatgctattgctgctaacacccctttggaaccttccctgtttatgatgctttgacttcttcctaaattctgtcccacgttgattgattctctttctctctctctgggttctctggcatcaaagttcgtaccttttgtggtttggatggatctgatgccagtttggttttctggggtgtctgtgttccttaacccactttcctcctttttaggatactcgtctaattgaattttttttccttttttgctcaagttattttctgattttggttcttcagtttgcttatgctgttttggtggcttttggaagtttgaaca

SEQ ID NO: 16663 - DNA, 264 bp, Glycine max
ctcacgcgtcctgtccgtccttttttttcttttttagttgttaatgatctaagtttcccgtttgattttatattatttaaaaacaagcctttcaaatcatccttgcaatgcatattgatacaaaccagaatttactaaatattctgctgatgctacattcattcaaactctgatattaatgaaaatatcatttatcctaaatacaaatatgctattttaaatctatattactgttataatttttaaccaaataacttttaccta

SEQ ID NO: 16664 - DNA, 261 bp, Glycine max
cgggacgacccacgcgaccaggagaggagagcacaaagaaaagcaaacacagacacagcaagagagagcagggaggagaggggaaagggagaaagagagacaccggaggcacaggaaaccaaggacacggaagagcaagagaccaacgagaacaaggacacgcagagaagaccacaacaagagcagacccaggacgcaagagagacgagagcaaacacacaaaccaacccggcgcaacagaaaagcagaaaagccacaacg

SEQ ID NO: 16665 - DNA, 237 bp, Glycine max
caaaaggccatataatttttttttatttgaaataatgtccgggatcattcaggagattgaggagaccctccatgtgggagggcacaagaaagaggagcacataggagaacaccatggtgagcacaaaggtgaacacataggagaacaccatggtgagcacaaaggtgaacacataggagaacaactccattgggagcacaaggagggactttgtgataatatcaaggacaagatcca

SEQ ID NO: 16666 - DNA, 393 bp, Glycine max
aagtcctaaccctatttaacaccttattagctttggtagacccaatagttagtcatcagaagcccttcttctctataatatctatgatccattcactctgagccgtaacagttctaaactccaccatttagtgacacccttaacatgatataatgccatcggtgcattcaagcccgggttactcgatggaaaacccggctttggcgtcgctactccgtcacacgacaggggaaaacaagcgtagcaataaattgtcgagcggaggagggcttttgaaaatgttgaagctgtttcctatgttgagttcgggatgcaaaatggtggcactgctgggaagaccacgaaagatgctgaaggacagtgcgacgaccgggacaatcttcggttaccgga

SEQ ID NO: 16667 - DNA, 159 bp, Glycine max
gtcgaccacgcgtacgagtcctaaccctatgaacaccttattagctcgggtagacccaatagttatggggtataagggcaatttcgggataggatctatgatccaatcactctgagcctgagcagtatctgaactccatcttttattgacacccttatc

SEQ ID NO: 16668 - DNA, 239 bp, Glycine max
gggtttcatagctgctgtaatagcagtttggagcacagccctgcaacagtattacgtgcattgtcttcagaggaagtattctattgggtcatttaacttgttgggccatactgcaccagcacaggcagcaagtttacttctagtaggcccctttatggactactggttgactggcaaacgagttgatgcctacggctatggtttgacatccacgttgttcatcattctggcttgcacta

SEQ ID NO: 16669 - DNA, 431 bp, Glycine max
ggagaaataaattcactaaaagaccaaggaataattagttctaggcattcacgtccatatcttaggagaatccagatcacacaatggcttttcaagtaaactaagatgcatgtcaaatatcatcacaatattcatcatctttaaaaaaatgaggagaggcagaaagtggagacacattatacactatatgctgctgttctcagatttatactgatatctataaagtgttttgtatactcgtgctgcgcatatcgcgtgtcctgctgatttacacatcacgtgttgtggtgacacagtttttatatgagatgtaactctttttgccccaaaaaaaaaaatataaattaaatttatattttattttaatttaaatatttatttattttatttatttatataaatttatattaaaaataaataaaaggggggcc

SEQ ID NO: 16670 - DNA, 451 bp, Glycine max
cttgcttggttatgatattggagtgatgagtggagcagccatatacataaaaagggacctgaaagtctcggacgagcaaatcgagatcctgctcggaatcatcaacctatactctctgataggctcatgtctcgccggcagaacctccgactggataggtcgccgttacacgattgttttcgccggcgccatcttctttgtcggagcacttctcatgggtttctcccccaattattcctttctcatgtttggccgtttcgtcgctggcattggcatcggctacgccctcatgatagcccccgtctacaccgccgaggtctccccggcctcctctcgtggcttcctcacttccttccctgaggtatttattaatggaaggatattaattggatacatatcatactatgcattttcgaagctgacactaaaggtgggatggcgaatgatgctt

SEQ ID NO: 16671 - DNA, 426 bp, Glycine max
cttgcttggttatgatattggagtgatgagtggagcagccatatacatacaaagggacctgaaaggctcggacgagcaaatcgagatcctgctcggaatcatcaacctatactctctgataggctcatgtctcgccggcagaacctccgactggataggtcgccgttacacgattgttttcgccggcgccatcttctttgtcggagcacttctcatgggtttctcccccaattattcctttctcatgtttggccgtttcgacgctggcattggcatcggctacgccctcatgatagcccccgtctacaccgccgaggtctccccggcctcctctcgtggcttcctcacttacttccctgaagtatttattaatggagggatatttattggatacatatcacactatgcattttcgaagctgacact

SEQ ID NO: 16672 - DNA, 384 bp, Glycine max
acgccaaattccaagccaatgtacctccatcttctggtgctacccagccatttccaaagaatgggtcactcatccaggattgtgtggaaagagacttttctttgaacaagctgggttttgcaaatggctttccctccaataacctcatggaatctggaaatcttggtcagtgatcatttcattgcttcaaacaataagctttcaactgtttcaagagcacaaatttcagcaccgtcagtattctatgttccgaacagtgcaccaactcctggttactcttcacttgagataatggggcaggcttttgactccctctctgggaattcattgctggacccttttttcttactgagaaatttctattaaacacccttaaatggaaat

SEQ ID NO: 16673 - DNA, 382 bp, Glycine max
ccaaattccaagccaatgtacctccatcttctggtgctacccagccatttccaaagaatggcgtcactcatccaggattttgtggaaagagacttttctttgaacaagctgggttttgcaaatggcttcccctccaataacctcatggaatctggaaatcttgtcagtggtcatttcattgcttcaaacaataagctttcagctgtttcaagagcacaaatttcagcaccgtcaggattctctgttccgaacagggcaccacctcctggtttctcttcagttgatagaatggtgcatgcttttgactccctctctgggaattcattgctggaccctttattcttactgagaaattcttatcaaacacccttaaatggaaata

SEQ ID NO: 16674 - DNA, 314 bp, Glycine max
cccactcgtacgcccacgcgtccgcctgaatggggaatcacaggccctactgatgctagggggtattacaactggccgggggacactgaatctttcctcaaagaatgtggaggctgggatggggcatatggtgagtttttcctcacctggtactctcagatgctattggaccacggagacaggattctatcatcagccacgtcaatctatgacaacacttgagagaagatctcagagaatgtggctggcattcactggcactatgggtcaaggtctcacgcgccagaactcacagcgctgtattacaacaccct

SEQ ID NO: 16675 - DNA, 465 bp, Glycine max
cccacgcgtccgacaggaagttcttcttcaccaagtgatgctgatttgcaatccctttttgagctccttcaacaaattttgatgaaagtgtctgtttcaagatcagagaacttgtggctaaaggctcttaaattctatgcaaatcaaagacgatattttgataaattggtggagatttctgttgttaccttggtcagagatggtggtagtgaaaatggattttccctttcttctgctattgtaagttttatacttcaaaaggatggaattcagaagaccagagatatctataaacgatttctagctttaccgcttcctggtcttgctttatatagacgttgcattgacctggaaacaaaccttgcatcaataggagataaagatggtcttataaatgccaggaaattatatgaatcttcacttgcaacatatgaccaaaatgtcagcttgtggcaagattactat

SEQ ID NO: 16676 - DNA, 431 bp, Glycine max
cggacgcgtgggcggaacgttgctataaacgttgttgttttcagataaacacgtgactcactggctatctatcaatcgatatctccgagttcagccgaaccaaactccgaagctatggcagagctccaaaccaaggttgaacctgttacggtcccggctccggtggatcccgagccaccgctagctgaggctccgccgctcgagaagaaagcggtggcggtgccaccacctgttccggctgcggcagaggaaaccaaagctcttgttattgtggagaaggagaaggagaatgagaagataccagaacctgtaaaaaagaacgcctcaggtggatcccttgatagagacattgctcttgcagaaatagagaaagagaaacgattgtctaatgtgaaggcttgggaagaaagtgaaaaatccaaagcagagaa

SEQ ID NO: 16677 - DNA, 452 bp, Glycine max
  modified_base (413)..(413): a, c, g, t, unknown, or other
cacaaaagcaaagatcaaacaaaccaaggacgagaacacgatgttgcttgaacttgcacttgggttattggttttggctctgtttctgcacttgcgtcccacacccactgcaaaatcaaaagcacttcgccatctcccaaacccaccaagcccaaagcctcgtcttcccttcataggacaccttcatctcttaaaagacaaacttctccactacgcactcatcgacctctccaaaaaacatggtcccttattctctctctactttggctccatgccaaccgttgttgccttcacaccagaattgttcaagctcttcctccaaacgcacgaggcaacttccttcaacacaaggttccaaacctcagccataagacgcctcacctatgatagctcagtggccatgggtcccttcngaccttactggaagttcgtgaggaagctcatcatgaacg

SEQ ID NO: 16678 - DNA, 322 bp, Glycine max
ctctcgtctccttctgagtccaaactctgctttcttccccacttcaatccctgtgtcctcagggtcgaccggaatactctctcgactacctctctctcctacgtcaaagcccgctactacggctgtcgctgcggacctagccgctcgcccaacgactcccgcttccgcaagtcctacgattccgacgacgacgataaagcttttcgacactcaccagatctcaggtcagataccgggaggctgatcgatcatagccagaacttggtcggagtagtgtcaacagatgacgccatacaaatagctgaatatgtctaacttgact

SEQ ID NO: 16679 - DNA, 332 bp, Glycine max
aaaaaatctctcaacaccttgagaaattttatctgttagtaatttgctactagtgttttacatgctctttcgtctctacggtgtattatagtcatggcatttcaagcagtttccttcaagtccttcgccgttgctcttcttgtggcgcttttcttcgccgccgtcgtcttcgctcaggacttgcctccggcggctgcgcctggacccgatgccggtgccgccggagccgtttcgagctcggtcgccatgattggagctttcctactgttgataatgctcgccatcttcaagcactgagtattatctgatggatccatcttgtgtgaagatta

SEQ ID NO: 16680 - DNA, 468 bp, Glycine max
  modified_base (412)..(412): a, c, g, t, unknown, or other
  modified_base (450)..(450): a, c, g, t, unknown, or other
gagaattatcatacccattaagatgaaaccgtacctacgtccagtattcctattattccttatgcttctcgaccaatccatttcggcgagtgctggtaatttttttgattcattgaaaaaattatttggtccagcattagcaaagataccgagcaagaaagaagatttgaagaaggctgagaaagcgaaggagtggatcgagaaagtgaaggacggcgtagaacttggaatagaaaatgcccctccctcaccgccaaacgaaccaccgaagcaaatcaatattaaaggcctgtctgtcgtcaaggattacttatctgagtacggctacattgaatcctctaggccatttaacaattctttcgaccaggaaacaatgtcagccattaagacctaccagaaattttcaatcttncagttaccggcgttccgaacaaacagcttattcagcanatgttgtccctacgatgc

SEQ ID NO: 16681 - DNA, 479 bp, Glycine max
cccacgcgtccgattgcttccaaatgaatgaatgaatgaatgaatatactactctgtctctcgctatctctctgtctctctcgctcactcactcactcgctatgccatgcttcttgctatgatatgtttctttctttttctttttatgcgacctctggggtccttcactcgctctcttatctgtctctcactttcctaaccctaagaggctgtgaagacggtttcggagtgtggacccgatggatccgtcgccgtcaaacatcctcgccggtggcgcggcaacgttatcggttttttgatttcgttgcagccatccatggcggtgttgttttttaacgaccgatctcattgctgtgccagatctgagcctcaccaaatccctaactgaagatctctccttcgctgacgttatcttaacgcaatgtttgacagagatgtatggaatgagagaaggaaaatgatatttccgatcccatcgt

SEQ ID NO: 16682 - DNA, 253 bp, Glycine max
tcgccacgcgtccgcggacgcgtttggagagcttcgacaccatcgacaacgtcaaggctaagatccaggacaaggagggtattcccccagaccagcagaagctgatcttcgccggcaagcagctcgaggacggacgtacccttgctgactacaacatccagaaagagtcaactcttcacttggtgttgcgtcttcgtggtggtatgcagatcttcgtcaagacccttacgggtaagactattacccttgatgt

SEQ ID NO: 16683 - DNA, 374 bp, Glycine max
atactctttgtctgcatgctatttatcaagttcaatattgtatcatattcaatataggatgatttgagaggttattacaactagtgcaacatgaccaacccaatctaatattatttaaactgagacacttaattcaagtttaatcgatcactaccattctacttcattagtataaaatattgtaactgttaaaagtgtcaaatattaatcgttgttgttttgaccccaagaacaccaccaacaccaaaaacaccaccattttccaaaaacttcaccttcaccttcacctacacaatcttcaaaggcaaacccaccaaccgtatcgccgtcgttaccgataccgtcaccatcttgtcattcaaaatccctatctt

SEQ ID NO: 16684 - DNA, 313 bp, Glycine max
gtagaaactgggtgcagagtatgttcagccgaaataaaacaactagatccaggtcatttagtcgcgttcatagatggacgtctgatggaggaaactcagctacaaatgagaatgggacttctcgcaaacaagatctgtcaagtggtggccagaaaaagcttcataccaatgttcgcatacttaggggtcataatggtgccattactgctctccattgtgttacaaaaagagaagtgtgggatttggtcggtgatcgtgaaaatgctggtttctttattagtggaagcacagactgcttaattaagatctggga

SEQ ID NO: 16685 - DNA, 381 bp, Glycine max
aatcatcacacctgtctaaagctcatacttacacatacttcatttcttttcataccactgaattttttgggggatatgctatataaagaactcatttatcgttatcatactcattttaatttcatttaatttcacttattgttctcaattgcaactatttctcccttctttccccaaaaatttataataaagattgaaaataagtaaagcaaaatggcatttcattggctgacttattgtatgctttaaaatcatgttgaaaaatactttttaagctaatgtactttataaaaagatcacaattcttgttttgactattatccattgtatctgtattgaaacatatgacttaataatttcaacttaccaaacatacactta

SEQ ID NO: 16686 - DNA, 428 bp, Glycine max
cttgcttggttatgatattggagtgatgagtggagcagccatatacataaaaagggacctgaaaggctcggacgagcaaatcgagatcctgctcggaatcatcaacctatactctctgataggctcatgtctcgccggcagaacctccgactggataggtcgccgttacacgattgatttcgccggcgccatcttctttgtcggagcacttctcatgggtttctcccccaattattcctttctcatgtttggccgtttcgtcgctggcattggcatcggctacgccctcatgatagcccccgtctacaccgtcgaggtctccccggcctcctctcgtggcttcctcacttccttccctgaggtatttattaatggagggatattaattggatacatatcaaactatgcattttcgaaactgacactaa

SEQ ID NO: 16687 - DNA, 376 bp, Glycine max
cccacgcgtccgtgtcattgccttccagacctatgcagttggaagcagtggaggatacaagaagggtgtgacagaagcaaaactgaaggttgccataaacggatttggaaggattggaaggaacttcttgaggtgctggcacggtcgcaaagactcccctcttgatgtcattgccatcaacgacaccggtggcgtgaaacaagcctctcaccttctcaagtacgattcgatcctcggaaccttcgatgctgatgtcaagcctgttggcagcgacatcatctctgtcgatggaaaggaaatcaaagttgtctctgaaccgaaccctgccaaccttacttggaaggatttggggatagacttggtgattgaatgaact

SEQ ID NO: 16688 - DNA, 316 bp, Glycine max
tccacgcgtacgtcagattgcaacccaaatttaaaacgaagaagacgatgaagaatatcgtgtcggggactataacaaattcaattcccacaatcaaacatctatactatttgcatcccctgttctctttctatggaaccgacctatcctcggctcctattatcataaaacctattaaacactctaccaatctctctgtcaccaactccgacactttcagcaatagaatcattttatacaccatttaaataatcatttcacccttctaatttcagatctcactcattttcaacctcacttctcaatccaactttct

SEQ ID NO: 16689 - DNA, 434 bp, Glycine max
gtaaataccggtttacaacttctcaccgcaaacgctgggagtgaccagtcgacggtggatgatggggcctcgtcgggggctgaggataagcgtgccaagatgactgagctggcacgactgaaagaggaccttcgaaacatgaatgcagagaaccaaaagctgaaggagatgctcagccatgtcagcagtaactacgcgaacttgcaaatgcatcttgcagcagtactgcaacagcaacagaaccaacgcactgagagcacggaacaagaggttggtcaaggaaaattagctgatgagagaaagcatggagttggcggatgaacggggcctagacaattcctgagtttagttccaagtgaaatagatgatcaattatctaattcttctttccgtgaaaggacttgatcaaccacaccttccagcaattaaaatga

SEQ ID NO: 16690 - DNA, 434 bp, Glycine max
cttacattgccaaggcctgttggcagagccatattcaaagactcacaatgtgccttcagaggtaagaatcctagacagctctcacaaaaaaattggtgttcacctcaagaacaagaagttcatgaccttgatagtggatattccagcaagactcagtcagatccctatcgggttgaacggccctatgaagtggaagtgtcatctgagggaactgtcttagaccatgctgtgagagatcaggaaacataactttagtgttttggataaaaaaaaatgaaaccatattctatcttgatgctgaagccttttcaccaatgcgctagaatttttgtaggtatgactagtgaactagcaaaaatattaggattgttgagaacatgtaaagtttttttttttcttcaagtgaaattaaatatatcgttgcttgttgaaaa

SEQ ID NO: 16691 - DNA, 320 bp, Glycine max
acgcccacgcgtccgcttaaacatagagtgtgtttatgtctccttggctgatcttcaaggggatgaggatcatgcattgaaggggattatgttgagagctgaagatgtgcaagggaagaatgtcctgacaaatttctggggaatggatttcacaactgacaagctgaggtcattggtgcgaaaatggcaaactctaattgaagcccatgtggatgtgaagacaactgatatctacacattgtggatgttctgcattggatttaccaagagaagagctaaccaattgaagtgactctgctatgcacaaataagccatatta

SEQ ID NO: 16692 - DNA, 432 bp, Glycine max
caatctgcttacgaactggactgctatgagtggatactttgattctgtattctctagatatgtagacaggtatccagtcgctgcactttaggcgctcgagatcgagcgtgtgcttgggcctggtggaatcggtgccgttattgtgtccacgagtgactcaatgccaaataatactgattagagctagtaccccagtttcatcttggctgaaaacttgcactgtgatgcatgtgagccatgttaacaacttaactctggttgcatataagaagaacactcgaagaatatcagcatttggaggagccttgcctatcgtatgaatgtcgctctgtgacatggaacaagcgtgcgattccaaagctggagcctattgtgaaggaaagacctgcgggatttgacaaatacgtggcttatttaccaatgcttgttgat

SEQ ID NO: 16693 - DNA, 353 bp, Glycine max
ttacctctccaataaatggatgggactcatagctaaggagacattgcttgagaattgcaggcgcagattccaatgctagggccatgaatacatgcgtgaaggtcaaatattacaggtaagtcttaagatctatatggatttacagtataaagcaatgctgactatattaatgtgttgaatgaaatctgagtttaggtgatgcaacagtgtcctgtctattgtacttatgaggctaccatatgcactaattgctactagcgaccctctgttcatgaacggattgcattcaaatcctgcctcaagctacagcgcattgctatgccaattctgctgctaagatgattagctatacg

SEQ ID NO: 16694 - DNA, 470 bp, Glycine max
ctcaaatattatctatcaaaatcagaacggattcagaatacccacttatatgagttatttgggtctaaactatggttcaattgcaggcttgcttgctgcacgctactgaaaaagaaagaaagaaaatccgtttggatgaatgcgcgagaggaatcaacccaatcaagagaaactctctctcccttctacacttttaagaagaaaaagtgtgtctgatttccaattttgccctcaccttttcgtgatttctcatttatatcctgctccttttcgtttccatttctttgctgctacttccaactccttccattctgaactttgaatctctagggtttaattccccactcatcgaatggaacctcgggttgccaacaagttccgtcttggccgcaagattggtagcggatccttcggcgagatctatctcggtacgaatacccagacaaatgaagaggttgcaattaagctcg

SEQ ID NO: 16695 - DNA, 121 bp, Glycine max
acgctttgtgtcacctgagcttaacatctaaccataacctcccacctttcaccatttctttatgggagggaaatattatctggagcacactcacacacactcacacgtttaactaacattt

SEQ ID NO: 16696 - DNA, 449 bp, Glycine max
ccgctattctactcgcaagcaaatcagaacaagagaagagaatggcaggagcagaggggctgaacagagaacagtacgtgtaccttgcgaagctgtcggagcaggcggagcggtacgaagagatggtggagttcatgcagaaggtggtggtggggtggacgccggcgtcggagctcacggtggaggagcgcaacctcctctcggtggcctacaagaacgtgatcgggtctctgcgtgccgcgtggcgcatcgtgtcctccatcgaacagaaggaggaagggcgcaagaacgacgaccacgtgtccctcgtgaagcactacagatccaaggtcgagaacgagctcacgcaggtctgcgccagcatcctcaacctcctcgactccaacctcgtacccttcgtcttcgccagcgagtccaaggtcttctacttgaagatgaagggcgattac

SEQ ID NO: 16697 - DNA, 228 bp, Glycine max
caaatattatctatcaacatcacttcgaattcacagaacccacttatatttacagcatgtttcaaaacgatggctcaattaccttataacttgttatacactacttttccctaaacaaagtaaatattactgtattattcatctactacaactaaccaaatcattattaactcactatcccttcttcactatttacaaatattaattaatctttattacctacattct

SEQ ID NO: 16698 - DNA, 131 bp, Glycine max
attctactctcatgctaatcataacaatagaatagaatgtcactagcatattagctgaacagataacagtgcgggtacctttcgaagctgtctgagcacgctgagcggtactgaagagatggttgagttca

SEQ ID NO: 16699 - DNA, 308 bp, Glycine max
ctctctctctctctatctttctctttctctaacctttcaactctcggatacatctcgattgggtatctcttctgggtgctctctctattctaatgctgtgagctactttgagtgaaggataataatgactggctttatcttctcgaggggaatgatacaccatcatacaaacgttgcttactctctactctaatgtcttcccaaaacggatctcattaaatctgtattcctcaccgattcttgaatcccagtgctatgctcgaaacctttcttaatattctctataaaccgcttccatctgatccaat

SEQ ID NO: 16700 - DNA, 450 bp, Glycine max
ttacctcaccaagaaatgcatgggactcaaatcaaaagagatatcgctttagaatcgcaagggcagattccaattctagaggccgtgtatcacatgcgagatgggcaaatattacagttaagttccaagatctatatggatatacagtggaagtcaatgcgtactatattaatgtgttgaatgaaatcagggtataggttaggcaacagtgacttgtctattgaacttttgaagctagcattggcgctaattactacttgcaaccctctgctcatgaactgatctccctcaaatcctgcatcaagctatcaacgcttgctaatgccatcacttctgaatacactgattaccacgaggaatcccgactgatactcgttccaagattggattctcattatcagtatctgccaagaataaacttaccgttactgatcactattacaatgattt

SEQ ID NO: 16701 - DNA, 449 bp, Glycine max
cttgcttggttatgatattggagtgatgagtggagcagccatatacataaaaagggacctgaaagtctcggacgagcaaatcgagatcctgctcggaatcatcaacctatactctctgataggctcatgtctcgccggcagaacctccgactggataggtcgccgttacacgattgttttcgccggcgccatcttctttgtcggagcacttctcatgggtttctcccccaattattcctttctcatgtttggccgtttcgtcgctggcattggcatcggctacgccctcatgatagcccccgtctacaccgccgaagtctccccggcctcctctcgtggcttcctcacttccttccctgaggtatttattaatggagggatattaattggatacatatcaaactatgcattttcgaagctgacacttaaggtgggatggcgaatgatgc

SEQ ID NO: 16702 - DNA, 419 bp, Glycine max
cacagaggaaggtataagttttagccctttagattgtttctcttttatcaactgagctggtgtcttttgctcaagtcttggtcttgttttgattttcagagatgaagtttacattgatggccctcacaaattttctagagaaagacatcaagatatctcccctagaaaaactagaatgaattttgttcgaggtagaggaagacttaacaatcgattagattcagttcgaaatgattgggaatctgaccgtgaattttctggtgagttttataacggaccaagtcagtttcggggacccaggcctaaatatgcatctgcttttgccgatactgatatggagtacaataacgttgcacctgatgggtcatatgttggtaatggtcgattacgcagaaagccattgaatgatgggtcttaca

SEQ ID NO: 16703 - DNA, 469 bp, Glycine max
  modified_base (424)..(424): a, c, g, t, unknown, or other
ccaaattccaagccaatgtacctccatcttctggtgctacccagccatttccaaagaatggcgtcactcatccaggattttgtggaaagagacttttctttgaacaagctgggttttgcaaatggcttcccctccaataacctcaaggaatctggaaatcttggcagtggtcatttcattgcttcaaacaataagctttcagctgtttcaagagcacaaatttcagcaccgccaggattctatgttccgaacagggcaccacctcctggtttctcttcagttgagagaatggggcaggcttttgactacctctctgggaattcattgctggacccttctttcttactgagaaattcttatcaaacaccctcaaatggaaatattggtggtccaggtgacgttgaatttatggatcctgctattntggcagttagtaaaggccctgaacagtttaactactttgaaaatg

SEQ ID NO: 16704 - DNA, 451 bp, Glycine max
  modified_base (441)..(441): a, c, g, t, unknown, or other
cttacattgccaaggcctgttggcagagccaaattcaaagactcagaaggtgccttcagaagtaagaatcctagacagctctcacaaaaaaattggtgttcacctcaagaacaagaagtacatgaccttgatagtggagattccagcaagactcagtcagatccctctcgggttgaacggccctatgaagtggaagtgtcatctgagggaactgtctcagaccatgctgtgagagatcaggaaacataactttagtgttttggataaaaaaaaatgaaaccatattctttcttgatgctgaagccttttcaccaatgcgctagaatttttgtaggtatgacgagtgaactagcaaaaatataggattgttgagaacatgtaaagttttttttttctccaagtgaaatgaaatatagtgttgcttgttgaaaaaaaaaaaanaataataact

SEQ ID NO: 16705 - DNA, 288 bp, Glycine max
aactatcctgattactctcacccattgctgcctcattcaccatcaacaactttctctcttacttcgtacgcacaaaaccacgggcagcacccttatcatcgcatttcatccccaccacttttcatatccagaaacccttcttctcacatcccctaattgcccaatacaaccctccttcttcaccctcttgctcttcttcttctgagttgtcctttgttatatgcccattcatggcgtactccaacacgctcttcttccagtctccgtacaacttgcatgttgtttttt

SEQ ID NO: 16706 - DNA, 413 bp, Glycine max
ctcacgcgtccgaccacgcgtccgcccacgcgtccgcccacgcgtccgcccactcgtgcgggggcgacgtcgtcggcgacggatgagtgtttgaattcgatgcccgtcgtggaaccggtggtgccgagaaagggttgcggtgatcgaatcaatgtcagtggcaataagtccaatgaagttgctgttggtgttccgatatggtggaactaccctaacattatttagagattaattttttaaaatttacattatttattatttataacggtcaagcatgatagaagaagttcagtcttaattcaattatagattatagatattgtgagaaagtttacacactttgctaaaaagcttgaatgtcatccttgtctttttttaatttgttttgtttattcatggtatttatgtaaaat

SEQ ID NO: 16707 - DNA, 308 bp, Glycine max
ctcacgcgtccgaccacgcgtccgcccacgcgtccgaccacgcgtccgcccacgcgtccgggggcgacgtcatcgtcgacggaggagtgttagaattcgaagcccgtcgtggaaccggtggtgccgataaatggttgcggtgatcgaatcaatgtcaatgtcaataatgtccaatgaagttgctgttggtgttccgatatcgcttaactaccccaacattatttatagattaatatttataaatttacattatttatcttttataacagtcaatcattatagaagacgtttagctttaattgaattat

SEQ ID NO: 16708 - DNA, 301 bp, Glycine max
ctcacgcgtacgacctcgcgtccgcccacgcgtccgcccatgcgtacgtccactcgggcgggggctacttcgtcggcgtctgctgagcgcttgaattcgaagcccgtcgtggaaccggtggtgccgataaatggttgcgtgagatcgaatcaatgtctgtggcaataaatccaatgtagttgctgttggtgtaccaatattcaataactaccatcaacattatttatagattaatatcttaaaattcacattatttatctttcataactgttaatcattattgaagaatttcaattataat

SEQ ID NO: 16709 - DNA, 274 bp, Glycine max
cttgaaccaggatcagacggctgggaagcgaggacgcgtaaatggatcaaagggcaacgcgcccaagcgcagcaactcgccgcagttagtgtgccgtactgaatccgtcttgtaattttcttacttgacattggatgatgattgaaatgaaaatccttttggtgggattaaattaaatttgctgaacaactactagtacattagtaatgctcttccttagttatggaacaatacaatacaccaagtgcaactgtgcaaattgtgctttgcattc

SEQ ID NO: 16710 - DNA, 472 bp, Glycine max
gtcatcttccccaaccagagatgcgccctacaacatatacttactaaagctttcaactttggagacaccctttcagatgtgagccaaggcccataacacaggggatggatctaagttcctggctaagatactggcagaatggaaagactataatgcccagattgattccagcagtgatgcagataagccaattcgcaaagctcctgccaaaggatcgaacaaggggtgcatgaaaggtaaaggggggccagagaactcacggtgtaactaccgaggtgtcaggcaaaggacttgaggaaagtgggttgctgaaattcgagagccaaacagaggcaatacgctttggctaggtactttgcccactgccattggagctgcccttgcatatgatgaagcggtcatggcaatgtacggctgctgtgccacgctcaacttttccaatgtttcagtttccaggttctctgaggaatct

SEQ ID NO: 16711 - DNA, 373 bp, Glycine max
tcgcccacgcgtccgcccacgcatccgaggacattgtcttccacgggagtcacaatccatattggatatgatgaggagagtggagccttttattgtgtattccaacagtggaagaatgaagtcaatgctcaatatggaaatgtactaaatggaactattacaacttccaaaagcaaatttgatgaatagatagagtcatcatctgcaaaaatgtattttcattattattgacaacttctgcatcagcaaaatatgctgtacgactatgtgctgacatggacctatcatgctgctattgttgagatccgtccttatttcattggccgacttctaactgatgctgattcttgatgatgaattttgtcattatttg

SEQ ID NO: 16712 - DNA, 476 bp, Glycine max
acgtagaaattgatcctttagcatcccttccgattctgcacttccttagtctgctggacaacaagattacatagaaacgaaattacaggctttatgttattaacaagctgaaatccctacgggtgttagatttcaagaaagtgaaaaataaggaacggttggaagccaaaaatttgttttcttcaaaagaagttatagaagaaattcaaaggacacccacaaaaagtgaaactcctaatgtttctgaagtgattgaggaacaacagatgcccaaagtcgttgctcctacacctgagcaaattattgctattaaggctgccattgtgaattctcagactcttgaagaggttgctagacttgaaaaggcattgaagtcaggccagcttcctgcagatttattgttggataatgttgatgaaaaacatgaggacatgattcatgacgatagaggtcaagctgatggagaatctaatgat

SEQ ID NO: 16713 - DNA, 392 bp, Glycine max
cagaagtagaggaataatggagcaggaagagcacgaggtgtacggtgcagacattcccgacgaggggattgacatggacgcagacgccgaacagcaagacgagcaacttgcccccaatcacacaaacaaggaactggaggacatgaagaagaggctgaaggagatcgaggaggaagctagcgccctacgcgaaatgcaggcaaaggttgagaaagagatgggcgctgttcaagattcgtctggcacttctgcgactcaagttgaaaaggatgaagtggatgctcgatcaatctatgttggtaatgttgactatgcatgtacgcctgaagaagtccagcagcattttcagtcctgtggaactgtgaacagggtgacaatactgacagacaaat

SEQ ID NO: 16714 - DNA, 453 bp, Glycine max
acgctatttctctctctacaccttcaaaaatcaaaagtttcttgttgctcatcaaggggtgttgtgttgtatgattttaaaagatggggtcaaatcaacagaagttcccctattttgatctgttcgcagttgggatggaattgcaggtgatttgagcctgacacagagctttcccgcttataagtagtagtgctagtgcagcagagacgatcatgaaccacgtgcacactctaatttccatcacacaggatcttttgtgtgaagaagactagaaaaccagcttcaattatcgagaattgtttgatgggttgatcaaaaatcgctctccaaaccagattcttaacactgaaagtgttaacaagtaacaaagcaagagaaaattatctccgattgcgacatattttcattgtaactcccaaattcaagccggcgctgacggcctttaaacttttc

SEQ ID NO: 16715 - DNA, 432 bp, Glycine max
cccacgcgtccgggcggggctcggaggtgggaatgacgagagggaacagactattaaccagcttctgacggagatggatggcttttctggcaattctggtgttattgttttggctgccactaacagaccggatgttcttgattcggcgttgttgaggcctggccggttcgacaggcaagttactgtggatagacctgatgttgccggcagagttaaaattcttcaggtgcattctagaggaaaagcacttgcaaaggatgttgactttgaaaaaattgcaaggagaacccctggattcactggggctgatctgcagaatctgatgaatgaagcggctattcttgcaaccaggcgtgacctcaaagaaataagtaaagatgagatatctgatgcgcttgaaaggatcatagctggacctgagaagaaaaatgc

SEQ ID NO: 16716 - DNA, 119 bp, Glycine max
acgcccacacatatgctttaacatccattcggattttattcttccttagtcttattaacaatagtattatttataaaggttgttacactctatccgttatttacacacttcaatcctta

SEQ ID NO: 16717 - DNA, 443 bp, Glycine max
tcgtcgacgcgtgctgcaaaggatgcaagatgactgtcacgagcgcgctacaaggaatatatggggtgacgtaagttaacttggaccgaatagccaacaaatcaacacttgtagactacgtaaagccctccaaagccgaacttcgtgtaccataccgaacatcgaagaatgccaagctgtcgccctaccttccatactacgtgcttgcacatttatacacactatcagtgtacgactggaaaacttcactcacgtacttgcgactcatcaaccacgccaacttgtactaactcgcacttactaactcaactgatgttcattatactacagcattaatatacgaatatccctcatctttttctctcatctaacggacattcttcacttgattgtaaatacactgtactaattaggcattctaattatagtcctttaccatttta

SEQ ID NO: 16718 - DNA, 375 bp, Glycine max
aaagggccttggctcgcttttggattaaatttggagaggattcgattgcttctattaccgatttggttcttggaccctctaaagatgaacaagaaagagcaagagcaaagaaaaaggcagaagatactatcatggtaatggaagagcaaggcctaggagacaagaagttctttggaggcaacaatattggaatggaggatatagctcatggatgcctaagtcattggttagaaggcttggaggaaattgtggggatgaaattgagtgagccaaacaaattacctcggttgcatgcgtggacttaaaatttcaagcaaagttctgttattaaagaaaaccttcctgattatgataaactgttgatccatcttgaat

SEQ ID NO: 16719 - DNA, 326 bp, Glycine max
cattatgcttacgaactgcactttaagagtggctactttgattctgtcattatatacagatcgagtctggtatcagagggctgcactttaggcgatcgtgatcgcgcgtgtgcttgagcctgatgataccgttgtcttccttgtgtctactatgaactcattcctcatcactactgatgactagatgacaccccagattcatattggatgaaaacttacactgtgattcacatatgcaatgttgacaaactaacttacgtagctgataagagtaacctactatagtataaccaatgtggactacctcttagtatcggctgaatgaa

SEQ ID NO: 16720 - DNA, 346 bp, Glycine max
acgcccacgcgtccgcccacgcgttcgcccacgcgttcggttcagaaacgcttcacagacaagtataattatgattatgtgaaggacatgcctttggagggacaatacgagtgggttaaattgaagtcataaaagtgaaagtaccaaccttgaaagaagaagaagaagaagaccgtttattaaaaaatcatgccacttgctgacattatttttacgttaatcaattgactttaggtacttcattttatactttgacttttcgtgttttcacggtaagactacgttttggtgaacactttaatcttaatttttctggatctgatggataaattcccttttgtaaaaa

SEQ ID NO: 16721 - DNA, 316 bp, Glycine max
accacgcgtccggtcgttctgaacggaaaagcactggcgcagctaccctgaggcttctctggtcggctcttctctgtggtgagtcaccatggtgagggttagtgtgctgaacgatgctctgaagagcatgtacaatgctgagaaaaggggaaagcgccaagtcatgattaggccatcctccaaagtcattatcaaattccttttggtgatgcaaaagcacggatacatccgagagtttgagtatgttcatgaccacagggctggtaaaatcgtggttgaatcgaacgtgtgactgaacaagtgtggggttattagt

SEQ ID NO: 16722 - DNA, 305 bp, Glycine max
agctactcatcataccggcgcactcaaggcgctggcttcggccctttctttcatcttcccgagagggagcattcagggggagctaacatgccgaacaatgtgtctgacaaagctgacaagggaccacgcatctgacgacgaagcatcagggcaactgtgctcatagaaacacttactgcactgtttcaactgaatgaaattttgtatgaactgaatgaccattcattgcgtttgaactgttagcgttgagattacagtcgcagtcatgttaataccttccaagctcatccagagcgcctcttacc

SEQ ID NO: 16723 - DNA, 387 bp, Glycine max
ctgctcattttggcagtgttctcatcggggggcgtatgtctccctactctttactggctaattaagaactccatctctcttctcaccatcaacaacaaactctcttgcccttcctgcctctgttactgccctacccctctctctctcttccaactttcttccttgctttcgaatctctctctctcacattgttcaattaatgacctctatctaaatgatgatatttacaatcattttgtcgaccttctttactatgatttctagtttcaatagtcttttactgaatcaaacactcttcacattaacataactttttctgaaacccaaatattcgcattttattaccatcaaaactctttttaaatccttacttcaaccttaacattc

SEQ ID NO: 16724 - DNA, 123 bp, Glycine max
gactcgacctgttcatcgatttccgttcacgctcagctccaacgctcctctctaatcttgcactatgctagtgatcctccattactaggacacactcatatacctatcatacaacactttgat

SEQ ID NO: 16725 - DNA, 61 bp, Glycine max
acgacctgtacaatcaccttcttccatgttctactccaacatacaattctaatatctaata

SEQ ID NO: 16726 - DNA, 380 bp, Glycine max
catgggagtcttcacctttgtcgtccgcaaatccggcagcgaatggagcgccaagcggcagtccggcgacatcgaggggtccgccgattccaccttcgatctccaacggaagctcgtgcaagccgctctcgccgttgattcctccggtggagttcagtcctctttctctcccgtgtctcctacctccgctgtgttccaggtgatagtgggtggtgcagtattcgttggacgtggtggtggtgctgttgcatctgcacctgcatgtggtgctgccgcagctgatgctgtcccagctgctgagaaaaaggaagaaaaggtggaggaagagtccgatgatgatatgggattgggactgtttgataagagtttttctgcttttt

SEQ ID NO: 16727 - DNA, 361 bp, Glycine max
ctcactcatcctttcaagttcactttcgacgctggcgaacaattatgcaaccgcacacactgataccatacccttactaagttcattcacctcgacccttatcacactcctataactcgccatcctaaactatcacacctattcctaaaactacttcaacaaaacctactttccaaacataactttgatcgattaatccatcctaaccattctatctttcttaaacctgatctattctaccttatatcaccttctgatcgcaatcatacccgatttcgctcatcttattaccacacatacacctcaaacatacctaagttctcttaccatctatctgaagcatattccattagattctatt

SEQ ID NO: 16728 - DNA, 128 bp, Glycine max
gttaatattccatccagaatggaacactatcattgtaccttcacagaccccatatcatccgtgggggcacaaaattgcttggggactggtaactatgctgaattaaaagcacaatcattcactgatct

SEQ ID NO: 16729 - DNA, 409 bp, Glycine max
acgcacgaagtagaaacacgaaactcataatccatggcgacaccagcgactacgaatcgaatacgagtgtttgtgaacgtgggtcagttaataccttccaccaatgactacacactgaccatgaatgtattcaggttccattcgatcaaatccctcagtaccctctgatctagaccgatggttctattcgaaccctcattctgctttactacatggagtactgtagcaggctcacttttatcgctcttcaatgcctccactaattacctactgtccttctctcattcatcctctatatccatctccacaactacaattttatcaacctcatcgttttcacattctatgtactttctactgtattactatgattacaggcgcctattgcactgatgcatcttattaatgc

SEQ ID NO: 16730 - DNA, 429 bp, Glycine max
cccacgcgtgcgcatggagcaagatacaggctgagattagagctcgtcgtatatgtatggtgacagaagacagaatcaggcggaagataatacattctcaactaaaacttgaggccaagattcatgacctggaggtaacttgtaaagctaacaggttttcagtgatggtattctggactttttcttttcaaactgatgccagtttgctaatcactctttctactacaatgattatgtgtggtttcattggtttctctgttttaaatatgcatttgtgtcattatttcaaatttctatgtctctctaggtgattagttaatgcatataactattgaaacggtgtcatgggatgggtctaccatatgagtcaactgcacttctgaggtctaatatcctatagattgacgtttagacattggaagcatgcgc

SEQ ID NO: 16731 - DNA, 403 bp, Glycine max
cccacgcgtccgggtgagcttgcccttggtcctgaatggaagccacaaaatactgcttcttgtacaggtcagtttcatgggtcccaagctctatgtaaacacaacaccggttgatgtgggaaagaagcccgtgacaggccttcgattgtatttggaaggaaagagaagcaactgcttggcaatccatttacagcacctctcttccctgcccaaaactttccaactccaggatgagcctaacgggaatgcgtctaatgactcttcagaacgcaagtactatgagaaggtccagtggaagagtttctctcacgtttgcacagctcctgttgattcagatgatgacaatgctgtcgtgactggtgctcacttttaagttggagatactggcccttagaaagttcta

SEQ ID NO: 16732 - DNA, 68 bp, Glycine max
gggcgtgacgcccacgcgtctcgggttatttgatgattgctatatacgctattctcgaggtctatcat

SEQ ID NO: 16733 - DNA, 118 bp, Glycine max
cccacacttgaagctcgaatataatactggttcacaatatcgctatctgcgtctcgtctgggatacactactcacgcaggtacattattgaacacactcacttactcattcactccat

SEQ ID NO: 16734 - DNA, 450 bp, Glycine max
acgatcgatttgaaggcaggaggtaagtccaagatgaccaaacgtacagcccccaaatccaatggtatttacctcaagctggtcgtcaagctgtaccgttttcttgttcggaggactggtagtaacttcaatgccgtcatcctcaaacgccttttcatgagcaaggtcaacaagcccccgctatccctctctagattgattcgttacaccaagggaaaggaggataagatagctgtggtagtcggggccgtgaccgatgacattagggtgtatgaagtccctgctctgaatgtaactgccctgaggttcactgaaactgccagagctagaattgagaaggctggtggctaatgccttacctttgatcaactggctcttagagctccactcggccagaatacggttcttcttagaggtcccaagaatgcccgtgaggcttgcaagcacttt

SEQ ID NO: 16735 - DNA, 355 bp, Glycine max
atacggaattatcatacccattaagatgaaaccgtacctacgttcagtattcctattattcgttagccttctctaccagtgcgggtcggctagtgctggtaatttttatgattcatcgaaaaaattattcggtccatcattatcaaagataccgagcaagaaagaagatttgaagaatgctgataaagcgaatgaatggatctagaaagtgaaggacggcgtataacttggaatataaaatgcccctccctcaccgtcaaactaaccaccgaagcaaatcaatattaaaggcctgtctgtcgtcaatgattacttatctgagtactgctacattgaatcctctatgccatttaac

SEQ ID NO: 16736 - DNA, 476 bp, Glycine max
cgcaaatgtgatgcacgcatcgcatcaggaatgcctaaagcgccatctgggtcgacacgagggaacactaatcgcagacgaacacttctcaacacactcactaactcactcactccaagccctagatgactgctccattctttcacatgccacagaagtctgtgatctacgcttatgtcgctcgaggaaccgacattctcactgaatacaccgagtacagtagcaatttcaatactatcgcttttcaatgcctccagaaattgcctactgccattatcacattcacctacaattgccatggccacaccttcaattatctcgatgacaacggttacacatactgtgtacttgctactgaatcagcaggaagacaagtgcctattgcatttttggagcgtattaacgatgattttgtgtcgaaatatgcagggggaaaggctttcacggatcctgccaatagacttaacaaggaattt

SEQ ID NO: 16737 - DNA, 445 bp, Glycine max
aaacaattaacacacacaaacagaggctacgtacgatcaaattaattaagatggcggaagtgaggagacaaacaagtgggtctgagggactatgtgagtggttttcctaaggaatccgacatgaacatagttgaaggaaccacaatattgaagcttccacaaggttccaatgatgtgcttctaaaaaatctctacctttcctgtgacccttacatgagaatgctcatgaccaaggtggaaggcctcgacgtgtttggcacctatacacctggctctccattaacagggtatggagtgtccaaagtcctagaatctggacacccagattacaagaaaggtgatttagtgtggggatctacaaaatgggaagaattcagcttggtgtccccaactcaaatacttttcaaaattgagcacaccgatgttccgctattatattatactg

SEQ ID NO: 16738 - DNA, 364 bp, Glycine max
acgatcatctatcctatcctgacaccgaccatgtacaatagactctctatcgctatccaacgggggaaacaaagataaacgcgtgtctgatcacaaatgtacatcaaaaaggcttctactgctagatatcatacattctgacattaccgacactgctggcaagattctctaatatgttgacataacttgtgcacctccacttgccacgatacttgataatgataatgatctcttgatatgtcttcacactgactagcactcatgctcccaattttaccttgactgtctatggagtagccataatgtcaaaatgaagcttctcaatgtacacgtaacttgcactatcgccacgatttatatgact

SEQ ID NO: 16739 - DNA, 462 bp, Glycine max
gacaactctaaccctagtattggtcccactcttgctgcctaccatacagtccctaatccacgcatgtcatccactgcgtggctgcataacagcagtcagatggctgcacccatgatcagaagtggatccacaccagccatgactgcaccccatcatcatactcacgagtatcatgacgtctctaacttgggctcacgtgccgacactctcgccgccgaccgttctacatcgacttctattgataacaattctacatcaagcagccattgctaatcataatcaccaccatggagcaatgaagcccatgctaatcttgttcatggatactctgcttgctctgttaccaatgatgatatgacttctcactgtggtccacacgacgatattggctcctatttctaggatgcatcgactgataactcatacacactacatgccaacgattactcacaatgacatggc

SEQ ID NO: 16740 - DNA, 426 bp, Glycine max
cccacgcgtccgcccacgcgtccgcccacgcgtccgcccacgcgtccgcccacgcgtccggcggcgacgtcgtcgtcgacggaggagtgtttgaattcgaagcccgccgtggaaccggtggtgccgagaaagggttgcggtgatcgaatcaatgtcggtggcaataagtccaatgaagttgctgttggtgttccgatatggtggaactaccccaacattatttagagattaattttttaaaatttacattatttattttttataacggtcaagcatcatagaagaagttcagttttaattcaattatagattatagatattgtgagaaagttgacacactttgctaaaaagcttgaatgtcatccttgtctttttttaatttgttttttttattcatggtatttatgtaaaatatttatttgtttt

SEQ ID NO: 16741 - DNA, 309 bp, Glycine max
acggcacatcaagtcacatggttgcaatgttcatacattcatctgttgccacatatactgcggcgatgcctcctcaagagcgagaattcaatagtgcaatcagacacacatggctttcaaaagagacccaaaatgtctttataaaaggcataccattattcaccgaatttgcaacctgttaaaacccaatccatttcaatgcccttgaacgaccaattagagatttccatgaggttttaaaaccgttaaaccatgaccatgacaaatttaaggcaaacatcaaaactgttgttcttaaaaaggggattc

SEQ ID NO: 16742 - DNA, 294 bp, Glycine max
tccgagacttaagccgggatttgggtatagggtattcgcgtggcataaggaagacgtgggtcaacgatcgattgggaacaaggtttcgtgaagtgaacgacaatgattccatctgtatccttaagaagcttgtggcagcttagactgtcacatgatccttcaagatccacatctagaagtggttcaccatctacattgaacacattactctcaatgattactagatccatgacggtctgggtcttgaactctactacaactatacacatatatggtgtgattaatgcgtaatat

SEQ ID NO: 16743 - DNA, 379 bp, Glycine max
  modified_base (53)..(53): a, c, g, t, unknown, or other
agcagattcacactatggtatggggcatacataggagcagagtgacaccagangtagtgctgggctgctagattataaatagagggcactcctttgcttaagaagcacacagcagcaagcatcttcttcttaaactagtagtattattcttccattcataatgggtggtttcacattccaggatgaaatcaacttccctgtggcttctgctactctttacaaggccctagttacagatgccgacaacgtcattccaaaagctcttgatttcctcaagagatgttaaaacgtttaaggaaatggtggccccagaaccattaagaagatcaattttcttgaagattgagaaaccaaatttgtgctgtacaaaatttaaagc

SEQ ID NO: 16744 - DNA, 306 bp, Glycine max
cccacgcgtccgagacaaggcactggaaatggctgtagactctttgggattcagctacttgagaattctaatgcagaaggaaatctacaaacagtcacttttgcaggaagggtggttgatgataggtcggttccatctttagatgctgagtctgatcaactttctgaaccttcaaaggccaaccgacctgatattccttcagttagttgcaatgctgaaaaatcatgcctgcagtctccccaggagtcacaatgcacgcaattaaggagctgtacaaaggttcacatgcaaggaatggctgttggg

SEQ ID NO: 16745 - DNA, 413 bp, Glycine max
gtaactaaagaatgatgtgttacacctctggtgcaaaaccttggttgacctcccttttttcaagactggacatattcatacttagaggcaaggctcaggctgagaaggttaagaaggctaaagctaagaaaatccatgcggagaaagataaggggaagcaaatagaaaatccccaagatgacttggtacctcttccttctcctgttactaccgatgtcactatccgagaagacctatgccttttagtggtggtccttctaagaggcaacggttggaaccggtaccggtggatattcctttcgtcatagatggccatactgcttttagtaatagatggccattctacttttttgttaacaaaggaatgggtttcttctctttggaagaaagatttcaacccctaggctctcatt

SEQ ID NO: 16746 - DNA, 370 bp, Glycine max
cccacgcgtacgcacggatacacactacgttctatcaaagccagtgctaggatcaatgaggggaatcaacgaatctacctgagggacttgcatattggatgatctaggcaattatgcgtctagacagaaaactgtaccgcagaacaaagcattgcaccagttcccaaagctggtctggtaagtggaaacctaccttatgctaagacctgcacatgagaatactgatatactcagaaatatgcctctacctcgcaattgcttatgcagtttactcttgctgagaaggatattgattaccacaaagtctcccataatggatctgatataaaaactggagatgctcaaaagggcgctcaaccagttgttccca

SEQ ID NO: 16747 - DNA, 115 bp, Glycine max
cgcatacgatcgtgctccacatacaccactttttcatgtatccttaattaattcgaatgagggaccctacttacggattcttcttgttattactacgcttctatcaaatatattg

SEQ ID NO: 16748 - DNA, 466 bp, Glycine max
atgatgctcatggttctcacttactcatgtcagatttgctttctgacttcatccagaaaaagtcaattacagaatgcactgacatgttgcacaatgggaatacatcaaatctgaacatgatgtccagctcagcaggaaagcctttgcaagcagatggccataccattgatgatggattagccccgccacagacatacaaacagttgcctgatacaacaattaaggtgaatccaaagttatcacagcatgtgaattctgagtcgaagcaagtgctagaagataataaagtttctagaaatgaggatcaggttcttagttctgaaaacgaaaccaaaggcaccgaacatcttgcatttcatcaagttccttctgttgaacaaaatcagaatctagcatctaaacttccagacctcaatttggctgacgtttctaccacggagtctgataatgatactaaggtccaatc

SEQ ID NO: 16749 - DNA, 467 bp, Glycine max
aaaagaatgtaactggcatctaccactactggcaggaaaagaacatagaccgaacattgtgggaactcggtaccttgccacctggactgctgacattttatggattaactgagcccttggatccatcatggcatgttttgggttttggctacaccaatgttgatcctcagttgatagagaggggagctgtattacacttcaatgggaactccaaaccctggttgaagattgggattgagaagtacaagcccctatgggaaaaatatgttgaatactctcatcctttgttgcaacagtgtaacttccattgattttgaattgcatttaaattgatacttcaaaccttggtggaagattcagatacagggctaagctctgttgatggggtaggagaatatattattggccgtttgtaagtctggcaagcttggtgattcttaccaaaaagtgaattcaggtcttgattt

SEQ ID NO: 16750 - DNA, 165 bp, Glycine max
acgcccacgcgtccgcagggatacactctatgatctgtctgaacctatgttcaaatttattaaggtggggatcgtatatacctgcgcgacatgcattttggattatttaggcttctatgaagctcgtccgataactattttgtagaacaaagctaagcatcaatt

SEQ ID NO: 16751 - DNA, 313 bp, Glycine max
gaattcccgttcgaccccgcgtaccttacgaaacgcaatgtccactctacttcactccgctcccacttcttctccttccttctcgggtatcatcactactaagggcgggacctctccaatcactcacatctctctcctaaacggcatccgtaacactgctatcgaaacaattaacttgcacaatggaataccaatcactagctatttcatattcatcgtatacacaaacgcaattcctagttacctttatactccaaacacgcatattcacagatttgtataacctaaactacacctctccttctaatattta

SEQ ID NO: 16752 - DNA, 340 bp, Glycine max
acggaaacctgaaaccctaacaatccctattcaatgacttctcgcgccgacgatttcgaaaaggagtaagctctccgccaccggcgagcgacgacgatgatgacgacggcctcaaggaggacatggacgcgctcgcccgagcctgcatgatcgccgtccctcgccccgacgataattccaccgccgaagatgatattcctgcggaggacccgctcctcctcgccggcgactccatcgttcccgccgccaccgacgactacgacgaccaagacgacctcgagtgtcttaagagagtgcagagcctctaccagcccctgtccattctttcgccgctgacacc

SEQ ID NO: 16753 - DNA, 200 bp, Glycine max
acgtcaactctcttgctactctcttacacttctttcacgatttttccaactacctcccggggagggttattactaaagggggtgacataatgcacacatttaatacataaactcagcacattattcccaactgtcatctaaagcctttccaatcacactgtcatacccctcatgattgattaacccctccacaaacatac

SEQ ID NO: 16754 - DNA, 180 bp, Glycine max
acgatgatactaatggctccctcttccacctgcattacttgccttttacttaccaccctgttgggtgcttttcaaagtaggggaagatactgcccaatcttaatccatgaaatccatacatactaacccactgacaaagaaacacatcttactaacatagacataccattaatgaacata

SEQ ID NO: 16755 - DNA, 432 bp, Glycine max
gttacttggagcccccacatataatcctcagaaaagggttgattgctgggattgagtaccgttttttggctgaacacgtggctgatttcatggcgaagacactcttcttcacgtctctgcttttccgttccactgctgaccacaaacgggacgttgccgaattttgtgggaatgtggagttatgcaggctcactgaacaggtcgttttctctgacccttataaaggttctcaatataatcgttgtacttccccctatcttgatcgtgatgctgaggctgttcgggaagacaatctgctgaagcttgaagttgctgagctgaaatccaagttcattgagagggcccaggcactaatacatggagatctacacactggttctgtgatggttactcgggaatcaactcaagtttttgatccagaattggctttta

SEQ ID NO: 16756 - DNA, 344 bp, Glycine max
acgattacttaacacatcttgattctcatcctcttttatcggcttaattctttgcacaaggggacgttcattacaaacggcagcaggtactatttgccattccacccatattctgagttctttcctttatccatctctttctacattctctctactcctcacccataaaatttcctctcaaaaggttactatcctcatattgatcattttttactcactactcacttgattctctctaattattatcacatctagattacatatttatcatgatttatgaatctattctttcttttatatctattgtacttttatctttgattcattattattaatgatatttc

SEQ ID NO: 16757 - DNA, 356 bp, Glycine max
ggattctgatcctgctgcacatacaccacaatcccatgcaacctagggtgctaagaatcagggacaccacatcctgatgcttctacttctgcgagctcttgctccagttgccgtgtcgctgaatccattcgaactttatgggagtcatgatactatgacaagtcgtactcaaatctccatatacaatgccacatgctgaccgatctgtccagaaagacgctgacctatatacatctcatgctacatcgtgatcaatattcacacgtacctatcggcatctatgattatcaccataccatattcagccgattgatctcggagttgatcactgctgatattaacatgactagtgaaat

SEQ ID NO: 16758 - DNA, 456 bp, Glycine max
gtacaactattctcgtgtgtgttcagtttgaacggtttaggcgaattgttcaccattctagggatctagtcttactaggtctcaaggagagaaagatcatgagcactttgtttgtcgaggaggtacaatgttttggttttcttcatcatcttttttccaagtttttctctgttgtctaaactgaaattatgggttgatgaacttcatgcataacaaatacaagcagcgggtttgtattcgtggaagtcgacctgaggaagaggagatatttcaacttacaatggttcatgtttgatcataatttcttctactacttcatagttcatatcatagtcatacttgtcatgccatttaatatgtgtttgtttgtgtcagattatttgcaaaaaattatgccttttttatttgtttggaaaataattaacaattatatgttgttatcgcaaaatgtgaact

SEQ ID NO: 16759 - DNA, 474 bp, Glycine max
gagggcggtcctcaggtcacgttcgacgccaacgcgcctctgcgcgagagaatattcagctgcagccgcgaagcgattgagaaactcaaagccatagcgaacaaccgccggtggccggaaaacaacaacttcgccggcgagttgttacggaagaaaagcaacgataatctactaaaggagaacaaggcgacgacaattcttgagaactggttcaaggtgaattcaaattcgatttcgaaaccgcaaacggtggaaatttcgtcgtttcaatcagtgtgcgcgcttctgtggcgcggggtgacgcgagcgaggaaatttccttcgtccaaaacgacgacgtttagaatggcggttaactgtcgccaccggttagaacccaaactggaagcgtattacttcgggaacgcgattcagagcgtgcctacttatgcttccgcgggtgaggtgttatccagggatctacggtggtgcgcg

SEQ ID NO: 16760 - DNA, 379 bp, Glycine max
tgttgctatagatatctttatatttttttcccccaaaaatccaagatccaacctttgcttgtaatatctgaggtatcaatcttcatatatttgcttttggtaaggatattgattaggagaactcggtgttttttgttttattgggtgtgtcagaaacttgttttaaggagaagctactgagagagctgttatatgaggttcgaagctttggctatgccatgaaaattttgaattgtacaatatgggtagcaacaggactattgtttggtttaaaagggaccttaaaattgaggacaatcctgcattaactgctgttgcatacgagggttctgtactccctgtgtatgtatggtgcccctaaagaggaaggacaatttta

SEQ ID NO: 16761 - DNA, 140 bp, Glycine max
attactcttgaggccgagtgcactcacgcaatagaccttataaacacagcaatccaataggggattggtatgtctgctcaccaccaaacggtgataataggaagattacacatttaaagaaggacatactcgttacatac

SEQ ID NO: 16762 - DNA, 413 bp, Glycine max
accaggtgaacttggaacccaaggctttgaggagttaaaaatgggattcgaatgtatggggggtactataccatacaatgaccctctccaagaacacgatggcatatatgctatcaagtatgcgttcactaacgtaatcacattatttgatactgcggatgtctatggagccaatgctaacgtactattagttggaaaggcttagaaacagctgcccagaaaaaagattcagatcgccacaaaatttgtgattacttcacgaggattttctgatatgaaaatcaagggttacactgtatatgtgccatcatgcttgtaagctagcttgaaacgtcttaatgttgaatacattgatctctattatcatcacagattggacacatctgtacctatagagtaaacaatgggtgaac

SEQ ID NO: 16763 - DNA, 365 bp, Glycine max
cccacgcgtccggcggcttcaaccttgtagttattctctttcttcttttttagctatccctgtcttgaaaaatctagatctcgttcttccttgatctacgttacgcttttagtgaccggatctgtatggatctgaaccagatctacacgccgatggtggttttggcctggtctttcatagatctgatgcatggaggctcagatctactgtacagaggtgtgcgattcatgttcgtctctcttttggaatctgtttcgtagaaagtcgtttggtcttccatgtcgcatggctcttgaggtatttttttttgcagatactgtagataatcgatgagaagaacgcagatccagccgcttccgcttgtt

SEQ ID NO: 16764 - DNA, 294 bp, Glycine max
cccacgcgtccggctgaaaaaccctaataacaatgggaggaaaatgtccgcacaggaacgtggggaatagaagatattcttacaagaccgctcggcgaaccaaatttgagctgaaaggggacgacatggtttatgcgcagctcaacaaacccgatcaagagagaccccctttacccgtcgactaagatttgcctgggatgggccagtactattgccttcacttggatcggtactttgccaatataactgtgagggatgagcactttaagaccaaacgacacaagaagcggttta

SEQ ID NO: 16765 - DNA, 423 bp, Glycine max
tccacgcgtccggctctctcactcacaaacgcacactgaattcaaaaacatcgaaagagagagtcatggtcgagcaaaccttcatcatgatcaagccagatggcgttcaaagaggccttattggcgagattattagcagatttgagaggaagggtttttacttgaaagggttgaaactcgttactgtggaccgtccttttgctgagaagcactatgctgatttgtctgcaaagcctttctttagtggtttggtggattacattgtctcttgccctgttgttgccatgatctgggagggtaagaatgttgttacaactggccgaaaaattatcggagccacaaacccagcttaatctgagcctgtaactattttaggtgactttgctattgacattggaaagaaatgttatccatggaaatgat

SEQ ID NO: 16766 - DNA, 454 bp, Glycine max
aactgtggcgtcaaaatgggagaatacttctgcaacatctgcaaattcttcgatgatgatgtggagaaagaacaatttcactgtgatgattgtgggatctgcagggttggtggtcgagataattttttccactgcaagaagtgtggatcttgttatgcaattggtctgcgtgataatcatttgtgtgtggagaactccatgcggcatcactgtcccatttgttacgagtacctttttgattcattgaaagacaccattgttatgaaatgtggtcacacaatgcaccatgaatgttacgtatagatgataaaaaatgacaaatattgttgtcccatatgcttcaagtcagtgattgacatgtctaagacgtggaatataattgatgaagagattgaagcaactgtcatgccttaagattatctgaacaggaatgtttggatactatgtaatgact

SEQ ID NO: 16767 - DNA, 361 bp, Glycine max
cccacgcgtccgcccacgcgtccggtggaactggaacattcttctacggttcggtaattcaggcgttgattcgctaccagtatctatcaccaccaatccctattcgtcccttatgctgcatatcccctctcatcacctccattcactccaacgacgccgtttctccgcaaaacggaacgcttcgctttcagacagagcatcagcagcacagcgaagaaccgcttcccgttccgtcactctctgccgctgaagaaaacaaagcaacaacgaagcttcgaaagaagaaagaagacgacgtcgtttccgaagaccgcttcaagctccccaacggaagagaggtttttgaagacaaagcgtacct

SEQ ID NO: 16768 - DNA, 352 bp, Glycine max
tctacacttgcttatcatatcttaaaaactgtctacttattatataacattgtagaaccgtggctagatcttatagatgcacattcaattgtaaaaccacactatttaatactgatatatcaaactatctatcataaagtcctcatatgttaccttcttaagccgataactaaatatgattatgattataattataaatgagtaatattccttgaacattaagaccattcttttcacttctaccttaatgaattagattaaccagactatttatatattgaatgagacaattacatattgtaattatttgtgatcgacttataatagaatttaatgttgaagctaaatttta

SEQ ID NO: 16769 - DNA, 360 bp, Glycine max
cccacgcgtacggatgatctcataatcactatccctaatgatagtatcgttaaaccacaagttcaatatattatacacatcacatctatctctctatcttctatctcttatctatcttcgagcgactgcacaaccatgacaatctccttaaagaccgcaacatacctagaacttaacacgctgactacaccatgatctgtgacctaattatgccttgctcgacaagacactacttatcacttctcctgcgattctcaaattaaccatactgtctctgtaggaccgttacaagtacatcttgtaaccattgctgaccgactcaagatggaattgaaggtggaagctatcgatagtgctacc

SEQ ID NO: 16770 - DNA, 315 bp, Glycine max
  modified_base (144)..(144): a, c, g, t, unknown, or other
ggagaatcatctattttggagaaatacaaacacagaaccgctctcttgggacactcgaatgaaaatagctattggtgctgctcggggcttggcttacttgcacacctcagaaaagcaaatcatatacagagatttcaaagcctncaacatactacttgatgaggattacaacgcataaatttcagattttggcttggcgaaattagggccttcgggtggagattcacacgtgagtacgaggatcatgggaacatatggctatgctgctccagaatacgttgcaacaggacacctttacgtgaaaagtgatgttta

SEQ ID NO: 16771 - DNA, 306 bp, Glycine max
cccacgcgtccgctggtgaatgcgtagaaaaggaaaatatagaaattagcgtgaaaaatgttgggtgtgttcagcagctccatagtgtcgccgccggaggagctcgttgccgccggcagccgtacaccgtctccgaagatgacggctgcggcgctgcggaagtggttcgaggagaagaaccccttcgtagtgtctgtggaagtcggagagcatgtccagctcgcttatacccaccataacgagtcgccgttttagcccagatcctttgctgtgaatgatgagggattctgcttgtttgaaggagcc

SEQ ID NO: 16772 - DNA, 220 bp, Glycine max
tcgccacgcgtccgtctatttctactatcttctgtagtcacttccaacacttattcaattttgagcgttcttttgctctttgtgcattataatcttctcttgtcattacaacccccccgttactcaaatcagaaactctcatttgaagctaacatacatcatatatcaacggatctatctaccttcagacatgatgtattctttcaaccaacgcttctgg

SEQ ID NO: 16773 - DNA, 254 bp, Glycine max
aagtcaatatacctgtattgcgagttctggaaatcaagattcatactggataactattgcatgctggttacgctataaattaaaggagatgctatctagatttaccaaagatttgtgtcaagcttacttcttctctaggagtatagatgttactaataatcacgttgaaagttaagaccccttttatgaccaaattcgcttgtctaattcattttatactgttggaacttaaaaatatgtatttgcatcataat

SEQ ID NO: 16774 - DNA, 420 bp, Glycine max
gccacgcgtacgactgcgattgctataacggtgaaggttactacgatgggagtattgaagagcgccgtcaggaactgctattgcgatgaatagactagacaccagcggcagatgtgcaaacatgaggctggggaatacatgaggaccatgttaaaggttctgagccacatgcacaacagctggtgcgttcactgcgacataaaactgcagaacatactcatattcggtgacggaggcttcaaacttgcggaaagtggacttgcgagggaggcagagcataaacaggagaagagtgaatgcatgacgactacaaaggttatggctgcctatcaagccaccgcgaaatagtgcaaatcgcctaacgatatatgccctaagggatgtaaaattgtgaatatggtgaccaggataccgatgtgg

SEQ ID NO: 16775 - DNA, 346 bp, Glycine max
cccacgcgtacgacacagatggctcgaacgaagcataccgctcgtatgtccacatgatgtgaggctcctaggaagcatcttgcaaccaatgctgcacgtaagtctgcaccaactactggtggtgtgaataagccctacattaatccgactggtaccgttgctcttcatgagatcaggaaataccatattagttccgagctattgatccggaagctcctcttacagaggctgggtcgtgaaattgctcatgacttcaagactgatctgcagttacagagtcacgccgtgcttagcattgcacgaagctactgatgcattcattgtcgggctcaatgaggacactaac

SEQ ID NO: 16776 - DNA, 442 bp, Glycine max
aggactttaggttgggatttgggaattagggttattcgcgtggcgaagatgattgaggtggttttgaacgatcgattggggaagaaggtgcgcgtgaagtgcaacgacgatgataccatcggcgacctgaagaagcttgtggcggctcagactggcacaagagccgacaagatccgcatccagaagtggtacaccatctacaaggatcacatcactctcaaggattacgagatccatgacggcatgggtctcgaactctactacaactaaacacaacaaggtgtgttttatgcgtaatatactatgtgctgggaatgggataagcgctaaatgtaattctgacttgcgaaagttcccatgatttgaaataatgtacatctccaaatgatattgggtattatataccgttgacagcttaagttgctttggtatataacctata

SEQ ID NO: 16777 - DNA, 304 bp, Glycine max
  modified_base (68)..(68): a, c, g, t, unknown, or other
attggggtaaaaaaccaatccgtctgtaactgtcacgtacacacgcagtgtgtctcgtctcgggttancaggtatcgctgattcattcatggaaccctttcgatttcaattgatgccaaattccctgtgcttactcgtttgccgcttcaaatgacgattaaggataatcttattttctcaatctctgaatgtgatgtcctttgcaataagaccaaggagtgaagattctgctgatgtggagaatcctggaaataatttgtatgttacaggcttgtccacaaggataactgacagtgatcttcac

SEQ ID NO: 16778 - DNA, 440 bp, Glycine max
gaattactgggttggccgatgcgttcgttatctataaacaaattgcttcttcctttcttgctatttcttgtctcgctgcaatttcactgatacttacaattatagatgcaacatggatccataccaagctggtgaatattcaggtcgtagtaatcggtacaggcttgctttccagcatatagtgtatatgaattgtagcaatccagagactcagaatggtaagtatgtggatactgctttatacgtcaactgggacttcatagataagtacatatacgctattgctggtgacttaaaagcagaggactttcaagttggatgtcacgtaaagctggttgctctgacatcttggttgggatctggatacaaactattattcctactcttccattcatacagtgttagactatggattttagatttcatggattccctttata

SEQ ID NO: 16779 - DNA, 269 bp, Glycine max
aacttggttgtaatgctaaaaatttgttaggttaattttgatttgttttggaacccagtcgcgcgccagtggattggggtgggtggcggagaaattttacttagaaccatttgttcctgccctgcaattagagttaattatgtctacttgaatttaaagacattatcttttacttcattcttgaatgaagatatctttcgagatttttcgttaatttgcgtctttaaagattctttcattctttaacaaataatttagaaactgtactc

SEQ ID NO: 16780 - DNA, 137 bp, Glycine max
tcctttctctcttgcaaatttcatatcgcgctgactttctcatccaagcatctctccctttttcatttccaatttccccttctcttaactcacctatttctcctccttcctttcccttttctcttcaaattaatact

SEQ ID NO: 16781 - DNA, 338 bp, Glycine max
atccacacaacaacactccttaaaccctaaccaaccatggcttcttccaccttcaccgcaatggccgcttgcaagctttcctcctccgccgccatctcctccttccccacccaccgccgcaccaacgccgtccttctgtccagacgcagccgcgccgccagggtctccgccatggccaaggagttgcacttcaacaaagacggcaccgcaattaggaagctccagagcggtgtgaacaagctcgcggatctggttggggtcacgcttggtcccaagggaaggaatgttgttctcgaaagcaagtacggctcgccgaaaatcgttaacgacggtgtcac

SEQ ID NO: 16782 - DNA, 347 bp, Glycine max
tcgaaagtattttggcctaatgtagaactcttgttcactgttgctccgacctcttatacctggggctattttctcaatcttcacaaagcatcaggccatcctgttcttgtctacatggcatctggaacgttcgcttacgacattgataaactatctgaataagcagctgcaaattttgtgatgcaccagctcaacaagatgtttccaaatgcttctaaaccagttcataatcttgtgtctcgatcgggaacagatccaaactctcttggatgttactcacatgatttatttcgaaaaccaactgatgtgtatgacaagctttcttcacccttggctaatcctattct

SEQ ID NO: 16783 - DNA, 197 bp, Glycine max
gccacgcgtccggggtttgggtttctcttcctcccttggagaaaaagaagagccaccgctgcgacgccgttggtgcatttttgaggtgccgctgtcatgtttgggcgtggtggaccaaggaggagtgataactccaaatattatgatattcttgggatttccaaaaatgccagtgtagatgaaatcaagaaggccta

SEQ ID NO: 16784 - DNA, 378 bp, Glycine max
ctcacgcgtacgtataggacaggcccaacacctgtctaaagccgcgtctgtcgcgtcctgacggtccaagacaagcccctatacccaacctaagagcaatgagtgtaaaacatgagtacgtggcacgcaacacgggctgaactaggtcttctcgcattatattcgggcaaggctgcttcatggtacataatacgcagggcattacagtatgggtccaaatatacgagtatcatgaaaacctgtactgctcataatgccgagctaacaaccagcttggcacgaagagtcttccggctttctaagtcactcaatgacctacatgctttgatcagtccaacgcctcagggcactaacttaccgctatctctgttggtaaag

SEQ ID NO: 16785 - DNA, 210 bp, Glycine max
ataaaacgttccacgtccttttagctaccattcctaacaaactgctaaataaattcacatggggctcttaccatccaaccttaacataattaatatcataataatgtcaaatgcgctagctcttattcccccaactgaacccaactactaccgctagctctcaactacaactatcccaacacacatacaccataacagaggctttacttt

SEQ ID NO: 16786 - DNA, 273 bp, Glycine max
gaaagacttacgaatgcgcaaaaactggagctgcttttgactgctggcattggttctgatggggtagatctcaaagctgcagctgctgctggtctaactgtggcaaaggtcacggcaagcaatgccacatcggctgctgtggatgaactcatgagaattcttattctaattaagaatttcttgcctgtgtgccatccagctcaatagggtgaatggaatgttactggcattgcacatagagcttatgatcatgacggcaagacaatcagaacc

SEQ ID NO: 16787 - DNA, 400 bp, Glycine max
  modified_base (320)..(320): a, c, g, t, unknown, or other
gaaatgatggagaggtggtgaatgattttgatgccaccaaacacatgtcctttggatccaacgagaacaattattttctcccttcaactttctctctttctcctcattctttcattcaccctccttatccttctttttttctttcctaacaacacttcaagagagagagaagacaagaaaaaagtgttgtagtcttgctttagtaacttgcatcaatgggagctggttgttctaaattgtgtctatgctggtgcccctccaactccaaacccaatcttcatgacttacctgataatgagaatgagaaggaggagtcttgngttggcttcaccgagttcaccttggatcaactgagaagtgccacatcgtcatttttacccgacaacatagtctcggaaca

SEQ ID NO: 16788 - DNA, 447 bp, Glycine max
ggaaggatggacttcccttggtgggatcatgctcagcataactgggacagaagctctttttggtgacctagcccattttccagtctcagctgtacagcttgcatttactctagttgtgtttccttgccttcttttagcctattctggtcaagctgcttaccttatgaataacttgacccattcacaagatgctttttatcgttcaattccagatagaatatattggccagtatttattgttgcaacattggcagccgtagttgcaagccaggctacaataactgcaacttttttaattattaagcaagcccttgctcttggatctttccctagagttaaaattgtgtatacatcaaagaaatttcttggccagatatatgttccagatattaattggatccttatgattctttgcattgcttgtaccgctgggttcgaaaataaaac

SEQ ID NO: 16789 - DNA, 381 bp, Glycine max
ggaggaatcaaatgttgatggcttttttgaagatgttttggtgaatggtaaaccatggactggtggagtcccggaggtgtttagtggttcacatgtgtatgtatgtgctcatggaagtcgtgacgtgagatgtggtgtttgtgggccagttctcatcaagaagctgcatgaggaaattgagcttcgaggtttgaaggatcagatatctgttactgcttgttctcatattggtgggcataagtatgctgggaatgtaatcatatacagcccaagagcagatggaaaaattatgggtcactggtatggctatgttactcctaatgatgttcctgatttgttggaccaacatattgcaaagggagaggtcatccaacgactttt

SEQ ID NO: 16790 - DNA, 474 bp, Glycine max
  modified_base (223)..(223): a, c, g, t, unknown, or other
  modified_base (283)..(283): a, c, g, t, unknown, or other
cggatagtgagggagctttcaaaggagctactatctttggacttggaggcaattagtagtggggtgacagatgttgacatggagaaagaggccaagccaagtttttacttaaaacacatcttacctattataattaaaaatcaagttgttcactttgttggatttggtaatcgcctggcatttgatccaatagcatttgaactgcagccttactatgctcttnctaattggggaacttcatatagagacttcgttgcagatgtaattttcatgccctgcaatntgttcccagaatacaagaaaccggtgctttgcttcttaaaagattgcgtgaacattcaagtcttgttggaccattggatcgttatcttgttggtccatttgccgaattaatgaaagagaaaagtgaaagtaatgccaagaaagcatccaagtatctagctttgcatctcagatttgaaattgacatgatag

SEQ ID NO: 16791 - DNA, 410 bp, Glycine max
acatcttgttcaggaattcacgaggaagaacaagaaggatattagtggaaatgccagagcgctgaggaggttgagaacagcatgtgagcgggcaaagaggactctctcttccactgctcaaaccaccatagagattgattccttgtacgagggtattgacttctacacaaccattacccgtgcccgttttgaagagctaaacatggatttattcaggaagtgcatggagcccgtggagaagtgtttgcgggatgccaagatggataagagtaccgtccatgatgttgttcttgttggtggttctactaggattcccaaggttcaacagttgttgcaggacttcttcaacggaaaggaactttgcaagagtattaacccaaatgaagctggtgcttatggtgctgcagtgc

SEQ ID NO: 16792 - DNA, 318 bp, Glycine max
tctatatctctcttgttcttcttcttcttcttgcacgtattgttctaatccacaaaacttggggccttaaataacaacattgacctcgcctaatgtactgttctcacgctgtttgctatttctttaccaacccttggggagctcgtgcaagagcaggctctaatcctcaagtaccacaacagacaaatactgaaggggcgcatcaccgtcaatctgatctgactcggcacctatacccagattcaacgatccataatcgcggacttcataaactcactaagcagcgcgccaaacgcgccgtttccatcgactgccacg

SEQ ID NO: 16793 - DNA, 436 bp, Glycine max
attactttggaggtagagagctctgacacaattgacaatgtgaaggcaaagatccaagacggggagggtattcctccagaccagcaaaggttgatttttgcgggaaagcagcttgaagatggacgtacgctggcagactacaacattcaaaaggagtctacccttcaccttgtccttcgtctgaggggaggtatgcagatctttgtgaagactttgacagggaaaactatcaccttggaggttgaaagttcagacacaattgataatgtcaaggcaaaaatacaggacaaggaaggtatccccccagaccaacagaggttgatctttgctgggaagcaactggaggatggaaggactcttgctgactacaacattcagaaagagtctactcttcaccttgtcttgcgtcttcgtggtgggttttgagtttgagaat

SEQ ID NO: 16794 - DNA, 428 bp, Glycine max
gactccattatctgctttgtatgcatcaaagttgcttcatgaggctggactgcctcctggggttctgaatataatatctggctttggtccaactgccggtgctgctattgctagtcacatggacatagataagcttgctttcactggttcaaccgaaactggaaaaattgtccttgaactggcggctagaagtaaccttaagcctgtaactttggagcttggtgggaaatccccattcattgtatgcgaagatgctgatgtagatgaggctgttgagttagcacactttgcattattctttaatcagggacaatgctgctgtgccgggtctagaacatttgtacacgaacgtgtgtacgaagaatttattgagaaagcaatggcacgcgctttgaaacgtgctgttggagatccatttaaagggggaa

SEQ ID NO: 16795 - DNA, 373 bp, Glycine max
gcaccagcgaaacgctcttcgttatcttttctcagactccgcggcgtagatccgaggagttcgggaaatcctaactcatcatctcaactcaagtcatggctggacttgcacctgagggatcacagttcgatgctcgtcaatatgattctaaaatgagtgacttactttcatctgatggacaggacttcttcacatcctatgacgaggtttatgatagttttgacgctatgggtttgcaggaaaatcttctcaggggaatttacgcatatggttttgagaagccatctgccattcagcaaagggggatagttcccttctgcaagggacttgatgttattcaacaggctcagtctggaactgtgaagacggctac

SEQ ID NO: 16796 - DNA, 343 bp, Glycine max
gcgcggacgcgtgggcggacgcgtgggcggacgcgtgggtccaaacaaaacccatcaaagtctttcgccctcagggatcatatattcattcagttctatacaaaatcctcaaaaactcttcctctctgccatgaccatggaatacagaaccttagaactcaacatcatatccgcaaaggacatcaagaatgttaatctcttctccaagatggacgtatacgccgtcgtttcgatctccggtgaccctattcaccctcagggcgccaccacccacgttcacaaagacgccggcagcaaccccacgtggactacccccggaaattctctgtcaacgaatcgctgg

SEQ ID NO: 16797 - DNA, 385 bp, Glycine max
cccacgcgtccgagcaaactggcttctttggaaagtgaaaatgaagatttgaaacggaaaatgttagaagccgagagcaaaagttcccagtcttttagtgaaaatgaattactggttggaacaaacattcaactgaaaaccaagattgatgaacttgaggaatcattgaaccatgctctatccgagaaggaagccgctgctcaagaacttgtgtctcataagaacagtataactgaactgaatgatttacaatcaaaatcctctgaaattcaatgtgcaaatgaagctctcattctaaaagtagaatcacaattacaagaagcattgcagaggcatactgagaaggaatccgaaaccaaagaattgaatgagaaactgaatacac

SEQ ID NO: 16798 - DNA, 435 bp, Glycine max
aaagagcccagcatagccagaatatgaaacctcacgtttctggtgaaagctctaatttggccgaggagtctagcagatccgtcggagagaagctccaccaggtttgtaaggctgccatggtggcaatcatcaccgatggatccaaccaacctagcagtagtagtaggcttctcaccaatcaaaggttgagcctccaatcagaagacccaattagaaccttaatgttcttggtctcttggagtcacacatagctaattaaatacactcaaaatcgtgaaggaatagatcgattgaaccaaactcttctaagtttggagaaaattgaataaaactatatgggtgggccaaaattcattcatatatgttgtcacatatctatataatattactatgtcaatatatacaatgcaaggagtggcgtaaaaaatcttataa

SEQ ID NO: 16799 - DNA, 397 bp, Glycine max
tgtttccccttttgttttctcaagagttgtctgtgagaacaatctccaagctgttcaggaactgtttttggattggttttctgtgtcaaattcccataggaatgtctttggtgaggaagagtctgacttcaagagtggagaatgttgaggacagccatgacatgtcagtgttggacttgcctgagttggccttggattgcattcttgagaggcttcccccctctgcactgtgtcgaatggccgctgtatgccggtccttgatggagaggtgtgtgagtgatcacctttgggagaggcacatgaagcagaaatggggtagagttattggccctgcttcttataaggagtggaaatggcattttgcttccaaaatgaatgttgggggtcttaagcatgg

SEQ ID NO: 16800 - DNA, 292 bp, Glycine max
catttccataatcactttttcctactttcttctccatccatcccttgactaattagttatccgtcacaactaccaatggccgaagagaaacaccacaagcaccgcctcttccaccaccacaaggacgaggataataagccagtagaaaccgatactggttacgacaacacattatattccaagccttctgatgactatgactctgggttcaacaagccatcgtatgagtcctctggcggtggctatgaaggtgggtacaacaaaacattttattctagtgatgagccagctt

SEQ ID NO: 16801 - DNA, 147 bp, Glycine max
accacgcttccgataatttctaaactgtttgtcacacttacatgaaataacttaattacaggccctaccaagtctttaatcctttctttacatgtctcaatgcctactgtcaacctatgccaaatatctgcacattctccccctaac

SEQ ID NO: 16802 - DNA, 359 bp, Glycine max
tcgcccacgcgtccgatcctagatgctaccaacaaatttgatgagaagctacttcttggtgtcgggggttttggaagggtttacaaggggacccttggagaatggacccatgggggttgtaaaaagggtaacccgagatccgagcaagggcttgctgaatttcggacagaaattggaatggtatctaagcttcgccaccgtcatcttgtgtccctcattggttattgtgatgagaggtcagaaatgattcttgtgtatgaatacatggctaatggacccctccggagtcatttgtatggtacagacctgccgcctctgtcatggaagcagcggcttgagatttgcattggagcagcaag

SEQ ID NO: 16803 - DNA, 312 bp, Glycine max
aattcccgaatcagaaatgactcaagcccagattcaaccagttaaacttggaacccaaggctttgaggtttcaaaattgggattcttatggatagtcgggactggagcgtacaatgaccctttccatgaacatgatggcatatctgatatcaagtatgcgttcagtaagggaatcacattttaagatactgcggatgtttatggagccaatgctaattgacttttggtcggaaaggctttgaagcagcttcccatagaaaagattcagatagtcacaaaattatgtattgcttcactagtgtttcctgatat

SEQ ID NO: 16804 - DNA, 160 bp, Glycine max
aaattttccggaaaaaatttgaatctatttttatatgcgaatcaatcctactacttctgggccttaatattgggcatgttcaaaataataatattataattaaaataaaataatatatttatataatttaaaaaaattatttaaaataatataaaatata

SEQ ID NO: 16805 - DNA, 323 bp, Glycine max
cttctcaccccagtttcactttctcattattttctctcctattgataaagaaacagagagagagagaaaaaaatgcctgcggtaggaggtattagcaacggagggggcaaggagtaccctggaagcctcactccttttgtgacggtaacatgtatagttgcagccatgggtgggttaatcttcggttacgatatcggaatttcaggtactaacatttacacacatgtgtatacgtatgttagtgttttattttgatttaacctatgatcttatgtttttaatgtgtgtgggggttatgatcaggtggggtgacatccatggat

SEQ ID NO: 16806 - DNA, 203 bp, Glycine max
acgacatctcgtgaacacactcatacaaccacccaacacgacatactcccataatccaacatgggcgacatcacattctagggcacatacacacgtctaccaaactagcttccaactatttcttcaaaactcaccttcctacatgtatcagacacacaaaccatacactttctacccgacgccaccttctgtatcatcccttc

SEQ ID NO: 16807 - DNA, 429 bp, Glycine max
cccacgcgtccgaaactctaagcgtatctgctagtacaactacaaatacaaattacaaaacctaagcaaaagcaactttacttagcatagttttcaagttattccatgcttcatctcataaccccgaggcagattattattatcactatataataatacgagagggaaaaaaaatcgaagaggcttgctctgatttcagcgtctacagttttgggcagagaacattaatttttttatattttattttttactttttcctttttctggatttttctgactttctccgtcctcaaattttaaaaacgaagacggagaatcgagaaaggtgattgcgcagaacttagaagtttaattgctttttacacagtttttgtcttctgagttctcaagaatcggtaatggaatagacgaacaagtgagagtgtgagt

SEQ ID NO: 16808 - DNA, 308 bp, Glycine max
aaccaggaagagccacgcggacgaaaacggccaaagcaaccaaaaactaagagaagaacacaggggccaagaaacccgcacaagggagaaggacaaggcaagcagaaccagaagaaggagctgaagcacaaaccacagccaaacaggagggatacaggcatcaagacagcgctagagcgaataagaaccaagcagagaaaggaacggcacgtaagaagctttttgatgatggtgtggtgaagcgtgaggacttatggatcactaacaaactctggatgtcaaatcatgcaccagaagatgtgccaaaa

SEQ ID NO: 16809 - DNA, 315 bp, Glycine max
gagaaaatcagcttcagacagcaagtgatcatttggtgggctggccttatgagaggtgctgtgtcaatcgcacttgcatataatcagttcaccatgtcggggcacacttcactgcgaagcaatgcaatcatgatcacaagcaccatcactgttgtgcttttcagcacagtggtgtttggtctgttgactaagccactcataaggcttttactgccccatactccacatcataaagaatcaagcatcacgataatcacagatccatctactccaagtccaaaatcagtcactatcccacttcttgggagtgcccaa

SEQ ID NO: 16810 - DNA, 377 bp, Glycine max
ctcaccactttgggcctctccatgatgggcttcgggcccgtttggtccaaaagaaaacacgaggccgttccgtcgaagactctgaacggcaataacggctccgaagactcgtaatcgaaattctccgatgtgggcctcgagaatttgcctttgccctgcgtcttgaggttcttcgtggagaacaaattcgggtacgcggtggagagaagcgccgcggcttcgttgtaggtttggttgggtcgcttccgcggtgttctgggtttcttagttgagattgctagcggcgaattgctcgattcggagattgttgaggaaggtgaagaagatgtgtgcgatgtgaaagtagatgaagatggagatttaacgaattcgaaatc

SEQ ID NO: 16811 - DNA, 310 bp, Glycine max
cttgattggagagaaaataaaagagaaagagagagaaaaattgtcttcttgaaacaaaagttcaaaattttcctttctttcattttctctttaattcaactttcaaatttttatcttttctcttattttctttccaccttaacaaatggatcctttattacttccttcaattttcttttaccataccaaaccttccaattaggtcctttcattcctattttaattggccttaggaaactgctttttgtaaaagaggaaaaaggggaatttggaatttgagatttgaaaacttaccccttgaagaaattaa

SEQ ID NO: 16812 - DNA, 155 bp, Glycine max
cgcgctcccatctattccaattccatgactacaccaccgacttcttcctaatcttcacactggcaatcctccgggtgccaccctccctcctcctcctacttccccgattcctttcacctttatcaacccgcaaccactcactacgctttgcccta

SEQ ID NO: 16813 - DNA, 251 bp, Glycine max
cccacgcgtccgcccacgcgttcgaatgctaccagtgttaagaagaccaggaatagaagaggccttcatgagctcccagagccgcttaatgggtctagtctgaacataactgaagaacaagtgaaaaatttgcagaaagaccacttccatggtaacaagtcttctatggtggtttcagtccttgttgatcccagataggctggtgatggtgatgttgatgtcgatggcatgattaggccaaagtcactctc

SEQ ID NO: 16814 - DNA, 246 bp, Glycine max
gacaagcgcgagcgcatgcgtgcgcacacgcgtgcacactaggagagccagttctgattcgcgatagtagcggagtgcaagcgcagtcatgtgtgtcatgtcaggcctgctaacacacatgtagacgtgtacaagctagggctttaatcaccattcacttaagctaaattgaatgcatattcaacgatgtatcctgatcgaggtaatgcagtatctcgcacattacctaatactggataacctcta

SEQ ID NO: 16815 - DNA, 371 bp, Glycine max
gcgtcatctccgattccccgacaatggccacccaaatgagcaagaagagaaagttcgtaggggatggagtgttcttcgctgaactgaacgaggttctgacaagggagttagccgaggacggatactccggcgtggaagttatggttacgccgatgctcaccgaaatcatcatcagagccaccagaacccaagccgttctcgttgagaagggaaggagaattagggaacttaccttggtggttcagaagaggttcaagtttcccgagaacagtgttgaacttcatgctgaaaaggtcaacaataggggtctttgcgctatagcacaagctgagtctctcacgtacaagcttcttggtggtctatctgtgctc

SEQ ID NO: 16816 - DNA, 288 bp, Glycine max
cggacgcgtgggcggacgcgtgggcggacgcgtgggcagccgcgttgactccaacatatgggctggtgcgggaccatcataacttggtgctgagagcagttgtcaggcttcaccagctccgataattccccggcgggggagctatcgaaaattcaagtctggtgaccaccgtaggcggtgagcaaagccttgtgtttggactagaacatggtgatggcgttttggaaggagcatctcaaggcagaccaccagtggatcaatcacagatgggtatcccccaattaaaga

SEQ ID NO: 16817 - DNA, 136 bp, Glycine max
ctcacgcgtccgcatattacatgacacacacttctcttcatccttgtcactaaggccagagggacaagacaattgcgttcacacaaactacgcgtacttattgacaaagatgcactacgttacatgccacacggtc

SEQ ID NO: 16818 - DNA, 435 bp, Glycine max
ataatctcatcattggtccaacatagcccagcctaaaatttaagtagcagaagctagcactagctagttaggtttaatttctgtcttgtaattgagacaatttatgaaataaccgcacaattgattcatgatgaagaagagagtagcaagcaccagcaatgagtcctctaaacttgatcgcaaaaccattgaaaggaaccgcagaactcacatgaaatccctctgccatcagctttcttctcttattcctcccaatctcaaaccagtcaaacccaagttgatgctagggctgcaggaccagctggatcttgcagcaaggtatataagacaaatgacagagagagtagagaaactgaagaggcagaaggagcaagccatgtcaaaccaaagcaatgatggtagaaaaatgttcaacaataatgttgagtccaaatt

SEQ ID NO: 16819 - DNA, 273 bp, Glycine max
taattccctgatcggccgactcgtacgaaaaggataaccttcttttctctctatgtggttgttattcttatttcatacctaaaaaccatgagcaccttttctgctttgtagaattacattatcgtatcaagaaaactctttaactacacgaaaatggtgtctgctaacaaagttattgtcgtgtactgcttctacacccttcttgctcactacaacatcacagattctcctttcactgccttctatcatgctcaacatttattgtttgttaca

SEQ ID NO: 16820 - DNA, 431 bp, Glycine max
cattactccagtatgctgctacagcatcctttctcagtaaattgtacagtgattaccttgatcatctcaaaatgtctggtgcaagttgcaagactgatgcattctcggtggaaatgcttcacgattttgctacttctcaggttagctacatcttggggcaaaaccctatgaaaatgagttatttggtgggctatggtgacaggtttcctctccaggttcatcacagaagtgcatcaatcccttggaataaccaaccctaccgttgtgaagatggtaagaaatggctaaactctaaagatccaaatccacaggttcttttgggagccatggtgggaggaccagacactaatgacaatttcgtggatcataggaccaaccaaaagttcactgagccaaacataacaagcaatgctggcttaattgcaacactt

SEQ ID NO: 16821 - DNA, 51 bp, Glycine max
gagagctgctgcttccgtctgctctcaaaaattagatctagagcatggttc

SEQ ID NO: 16822 - DNA, 416 bp, Glycine max
cccacgcgtccgcccacgcgtccgcttaacttcgtattgtgtcttgagatttttttccttgcacagttgggccctttgtcttccgtgatggccaggtgaagtcttttaaggaaaaggatgaagtggatgcgtggcttttcagcaaccctatgcggcgccttgaagcgcttcattttcggagagaaactacattgttataagctacgatcttcataccaattccaccagtcttcagcagcgatggaagtacgaggatcccacggatttgtttcatcttcctcttcagcttgctgccgatagggaaattgtcagataccttattggtggtgtgaaaatttttaaaattaactcgttatattctgccataattgaattgtatttgtgtttaagagtttggaattgggtgtttctgaggg

SEQ ID NO: 16823 - DNA, 286 bp, Glycine max
ctacgttttgctctacgcctctccctctctctcaaaaatctttctcttcgattttagggttttgttttgctgctgcctccgttccccccttctcataaacaacgcgttttctcttctgcttcgtatctattctttgcttttggttttggttgattcaaggccttcacagcattcgttgcggcattttaatcgatttatccaagcaggactgaatgaactaatggagtctaaaggtgggaaaaagaagtctagtagtagtagtagttaattattgttctacgaagct

SEQ ID NO: 16824 - DNA, 445 bp, Glycine max
cacagatctccccccgattgaaaagaaaagaacttcgatcatatattcctcaggtgactccgacctatgactatatatgacatataatggaccatgcatctctgaggaaagaattgagctgggaatcaagcagcaaaaacggtccccaattcggatatattaacaaccaccacccttcaaaacaaaatttcaccctttcgttttccttatcccatacccctcaaaagaaaaagctggcgattcttcaattctcctcttggttcgtgtcctttactacttcgaatcctcacaacactctctgtagtacacactactaacccaaaagtcactcacctctagaaaaccttaaatctcaaaacccatcaagattttatcacaaagactcaaaactttcacaaaattaaagagacccaattggtttttttctttttaaactgaagtattt

SEQ ID NO: 16825 - DNA, 337 bp, Glycine max
attgccggttcggacgacgcgtacggaagacccctttttctggttattaacagagtcataaaaaaccaaagttctctatgggctgtagctcacatggtgggctaagaatatctgactttggggtggaaagtatggttggcaatgagagtttgagaactgatgtcttgaacttgagctttgagaagcttatgatggttgaatgtggtggaaatagtgggaaaggagtgaacattaaagctggtgtgatcactgagtgtaaggatattccagttgagcttttgatgcaaattttgccacttgtggatgatcaaatggttatcatatcttttgaagtgtg

SEQ ID NO: 16826 - DNA, 446 bp, Glycine max
tggagtcccagacttccacacgagagaaggagtctctcaatctcagggaagtcccagaagcagataaaaccttgggcttggacatggccaagggcagcgcattctgcaagatgggtgaaggttggacatgcatcataactaaaactgaggggcctgatgctggcaaagttttcgttaaatgtggtgaaaattgcacctgtaccattgagggcgaagcagtgtcccaagaattgaatttgccacctgatgttgtgagcagcagtggcagtggagcattctgcaagtgtggtgaagggtggagttgtgtcattttcaggactgaaggccctgatgcaagctctggcaagggctttgctgaatgcgctggacagtgttcttgtactattgatgacaaatccacctaagataaacgatgagtgcatctatgatataatctgatggttatt

SEQ ID NO: 16827 - DNA, 443 bp, Glycine max
aaaaaaagagagccaaaccaaacctttcccgaaacggttcgttttgcccttcttcggaacccggccttctgcgccgctgctgctgctccggtcgccgtcggcgactctccggtaaccgaagaccactgccgatccgtcagaaacctcggatctcggatctgaacgagcgaaacgatgccgtctcacgcggatctggaccggcagatcgagcatctgatggagtgcaagcctctgccggaggccgaggtgaaggcgctgtgcgatcaggcgagggcgattctcgtcgaagagtggaacgttcagccggtgaagtgccccgtcaccgtctgcggcgacattcacggccagttctacgatctcatcgagctctttcggataggaggaaacgctcccgatactaattacctgtttatgggcgattatgtagatcgtgggtactattc

SEQ ID NO: 16828 - DNA, 392 bp, Glycine max
cccacgcgtccggttgaattttaaccaagtgatgcaacaaggtgaggttacaacgcaaggaggtactttggtttcagggtataacaggggtgatccagatttgagagaaatggtttccgctttgacacatgtggtggtgtcttcagggtcaggccagaggagcaccgaatggatccagcaaagtggttttcctatgatgtctgcatcttctctttcatgtttgtcttctttctcttctccttcttcttctggagcctcttgggttggccacaaaagaggcagagaagaagaagagagtagctcttcccataacatgatccaacaacaacaacaaagtgctccaagactcttcagaaacattggtgactttatggtgccttcttaaggagact

SEQ ID NO: 16829 - DNA, 164 bp, Glycine max
cccacgcgttcgaccacgcgttcgaaaaacttttgaaagatattatccaattgaaatttggaaaatgactgggataaacttaagaatttaattattgtaatttaatttgtaaactattaaattcgattggtcgtatggacttaataaatttgggtactatgttt

SEQ ID NO: 16830 - DNA, 57 bp, Glycine max
cttcaattgctgaaattatggatagtctcacttttatatacttcatcatcccttatc

SEQ ID NO: 16831 - DNA, 101 bp, Glycine max
gcgtgtatgaggaatcaccattgatatagctttgaggaagcttgaaacaacaaagtattatggcacaggtattgatgcgccatggacatactggattttca

SEQ ID NO: 16832 - DNA, 222 bp, Glycine max
tcgtccacgcttacgtaaaaatacagcctcaaagaatgagtagatgaacgacgttatgggtaactggggttgttgttgatacaggtcaatcttatctgtcacaatccattctggcgccctcaaaacaccctctaacttaacaaccaatatataaagaaaatgattaaaacttgatcactctttctcttgccagtatcagatcttttttagatatgattttaa

SEQ ID NO: 16833 - DNA, 433 bp, Glycine max
ctttcctcaaccttctttcttcttatatatcgaacatggctaagtatcattcaagtgggaaaagctcttccatgactgctatagccttcctgtttatccttctaatcacttatacaggcacaacagatgcacaatccggggtatgttatggaagacttggcaacaacttaccaacccctcaagaagttgtggccctctacaatcaagccaacattcgcaggatgcgaatctacggtccaagcccagaagtcctcgaagcactaagaggttccaacattgagcttttgctagacattccaaatgacaacctcagaaacctagcatctagccaagacaatgcatacaaatgggtgcaagacaacatcaaaaactatgccaacaatgtcagattcaaatacgtttcagtgggaaaatgaagtgaaaccccgaacac

SEQ ID NO: 16834 - DNA, 274 bp, Glycine max
cccacgcgtccgtcaattctgaacaaagagattctagcgccaatcatggaccacgctacaatggagcattgacactccataggctcaatccaaaccacttgcacactgccagcaggtttgaatcagtacaggcactcatactaggacgtagccattcaagcacagctgacaaggaccctaacaagacatagagaccttctagccctttctacatttacatggccgcaattatatagcatatctggcaagagcatcctaacaacaaattcctccc

SEQ ID NO: 16835 - DNA, 252 bp, Glycine max
gtcaagcgcaaggcgatccacattttatagtttcacaggtgaattaccatgccttctatccggtgcatctcccaccatgatggcgccatcacttccaacctcagtactactaatgccttcccttcacttgccgtatctgcctcaaactcggccacaccgcttttctgcacgctaataacagttgcgtgcaacactctgacctctcaaataatcgttccctctaatggcttctaatgcacaagccgattctta

SEQ ID NO: 16836 - DNA, 432 bp, Glycine max
ggtagagagaacaaaagggcaaggaagaaaacaagaaaaaggagaagagaagagactagatggctggctcagctattggtttcgaaggctatgaaaaaagacttgagatatcattttttgaacatggtgtgtttgctgaccctgaaggaataggcctccgagcattgtccaaagaccaattggacgagattcttaaaccagcagagtgcagtattgttgcatcactttcaaacgattatgttgactcttatgttctgtcagagtcaagcctgttcatctatccttataaaattatcatcaaaacttgtgggactaccaaattgcttctgtccatccctgtcatcctcaagttggctgatgctcttgacattgctgtgaaatctgtgaggtacactcgtggaagtttcatttttcctggggcacagtcttttc

SEQ ID NO: 16837 - DNA, 152 bp, Glycine max
catttacatcgaaagacacaggatactatcattgaacagcttcaattcctattcctgatagcttgcggggctcacgattgatgtcttgttcattactgtctcactttttcatctaaaccagacattgacttatatggtatctttcccaaatt

SEQ ID NO: 16838 - DNA, 425 bp, Glycine max
aaactgagcttagtcagtcagatatgtttgatcctcgtcttcaggcaaaaatactgaatgttgttgacgtctcctatggaggtgagaatgggtttaatcaggctattgaactatctgctgaaattctgtccaatgtgaagtttatccaggaaaagcgactgattggaaaatactttgaggaaatcagccaggatactggaaagtatgtttttggagttgatgatactctaaaagctttggagatgggagctgtcgagacacttattgtctgggaaaatctggatatgaataggtatgtcttataaaatagtgctactggtgaggctgtcattaagcacttctacaaggaacaggattcccaccaaagcaattttctgtatcctgagagcaatgctgattttgagggtcatgagaagttgtctttg

SEQ ID NO: 16839 - DNA, 434 bp, Glycine max
  modified_base (401)..(401): a, c, g, t, unknown, or other
ccaagccccactcaaccaccacaccactctctctgctcttcttctacctttcaagtttttaaagtattaagatggcagagacattcctatttacctcagagtcagtgaacgagggacaccctgacaagctctgcgaccaaatctccgatgctgtcctcgacgcttgccttgaacaggacccagacagcaaggttgcctgcgaaacatgcaccaagaccaacttggtcatggtcttcggagagatcaccaccaaggccaacgttgactacgagaagatcgtgcgtgacacctgcaggaacatcggcttcgtctcaaacgatgtgggacttgatgctgacaactgcaaggtccttgtaaacattgagcagcagagccctgatattgcccagggtgtgcacggncaccttaccaaaagacccgaggaaatcggtgct

SEQ ID NO: 16840 - DNA, 218 bp, Glycine max
cctaaacgtccgaacttatggctgtaacctattcacgtacagactcgcaaaggcattcaaggcgaaaaaaagattcggggaggcgaaaataatcgaaaatccattgatacccgatataggtcaaaacatactaactgcatgctgaatccattaggctctcaatgatacaactctgttgaacttgaatacatcttaatagccatattgataataataaa

SEQ ID NO: 16841 - DNA, 447 bp, Glycine max
cccacgcgtccggctaattaaggttcattgggcattggcggattctatttccttttctcaaagcccaatttgcttcttcttcatggaagcactctccttcatcatccccaaagactcttgttctcttctccttcgcactccttcttcatattcctcttcgtctgtcagaactccgccgccgccacttgctttcttcaaaaccacccaacactctcactcgcctcaccttctccgtcttcgcgtttttgccctccctaaccccgacgccgatgaacccaccaacgacttcgctttagcgtctcatcctcaggaaaatttaagccattctgagactgagagttccgaagatgatcaagatgctccaccacaaatggacatgtcgtggtcaacgatcacagccccagctggaagtggatccggtggtggcaccagggctggacttttcag

SEQ ID NO: 16842 - DNA, 441 bp, Glycine max
cccacgcgtccgtggaactactgataggattatcatggtatctggcgcaataaatgaaatacagagggctgtagaacttatcctttctaagttgctcagtgagcttcatagtgaggatgacaatgatgctgagccaaagacaaaagtgagactcgttgttcctaatggttcatgtggtggaataattggcaagggaggtgctaccattaggtcattcattgaagactctcaggctggcataaagatatctcctcaagataataattactatggacagaatgataggctagtgacgctgacaggatcttttgatgaacagatgcgtgcaattgaattaattgtttcaaagttatctgaagatcctcattatgcacagtccatgaattctccattttcatattctggttatcaaggtgtttcatacacatatgtgctttcgtc

SEQ ID NO: 16843 - DNA, 386 bp, Glycine max
cccacgcgtccggtacatatatggtggaaaccacaatggtcgttaccttaatgatctccatgttctagatttgagaagttggacttggtcgaagattgaagctgaggttgttgaatctactaactcatcctcaataacattcccttgtgctggacattccttgattccatgggaaaataagctcctatcaattgctggtcatacaaaagatcctaatgaatgtatacaagtgaaagtgtttgatctgccaaacgctacatggtcaactctgaagacttatgggaaacccccggtctcacgtggcggacaatcagttacctttgtgggtacaagcttagtaattttctggtggagaatatgcatagagaaactctattgaatgattt

SEQ ID NO: 16844 - DNA, 381 bp, Glycine max
ctttgattgagccagacagagataaaaaatcttgttgcccaagtgagggaaaaagggttgccttggacacttctcaccttgttctctgggttatgttaatttgaaagaagctacttggcatcaagaatgggtccaggtgattggtttaagacaataattagctcaagaaaatcaaaagatggcacatcaaagaaagtaatgactaagatttatacacgaaaaaagtccaatggtttagcaaatggaatcaaaagcaaaaatctatagtcagatggggtattagttgaaactattgctgtaacaaggatccaaacagcattccgagcttatatggctataatatatttacactgctttgtatggttcactaaaattgaagat

SEQ ID NO: 16845 - DNA, 420 bp, Glycine max
atctcaccaaattttgctgagactaattagtaaaatagaggcaaaaaatggaatctaaagaggccatctttgtgaagcttttgctgattctgcatttgtccgttctctgtgtttcacaggattttgatttctactactttgttcagcagtggccaggatcatattgtgacacgacacagaacagctgttgctaccctacaactggaaaacccgctgcagattttggcattcatgggctttggcctaattacaaagatggttcatacccatctaactgtgattcaaacaatcgttttcagccatctcagatatcagacctcactagtagcttgcagaggaactggcccacactagcatgcccaagtgggaatggggttcaattctggacccacgaatgggagaaacactgcacttgtttta

SEQ ID NO: 16846 - DNA, 451 bp, Glycine max
cagcaatcaaatctgtaacctttcagaactcaaaaccccctttcaaatttcatcatgtccgggtatcccaaccagcctcccagctacagctacggcgcgccgccgccgccccaaccctacggtgcccatccgccatcgcaatcatacggggctcctccgccatcgcaatcatacggggctcctccgccaccgcaaccctacggcgcgccgccgcccgctcagccctactccgcctccccctacgcccaaccgtccgccccctacgccgccccctacaacaaacccccgaagaacgagtcccactcccacggcggcggaagcagcggcggctacccggctccggcgtacgcgagcccgttcgcgtcgctggtgccatcggcgttccctccagggacagaccctaacgtggtggcgtgcttccagatggcggaccaggacggaagcggattta

SEQ ID NO: 16847 - DNA, 414 bp, Glycine max
ggaaaagaggagaatgtgaagaaggctcaggaagcccttttggtaagagccaaggccaactcggaggcaactctgggaacctacaagggtaactcaaagcttgctgatggtgcctcagagagcctccatgttgaggactacaagtactgatcaatctaagtgcgggtaggaatcggtattttatgggtacaaccgaattttcttgttaatgagtattgtgcttcgactcttcccagaataataatcgtttggaattttgctttttgtttttcctagtgttccttcatatcaattttagtaattcggtgtattggtcaaacctgtgcaaacaggggaggggatgtaactttgttttcttgatagacaccaccaccttgctgttaacgaggctttgtgtttattttgcaattatct

SEQ ID NO: 16848 - DNA, 448 bp, Glycine max
gcggtgagtgatgttgaacctcagatggatgatgagattgaagatgctccagatggacaattgtgtgttatatgtctaatgaggagaaggcgttctgtcttcattccctgtgggcatcttgtgtgttgccaagggtgtgccatatcagttgaacgtgaagtggcacccaaatgtcccgtttgtcgtcaggagatccgagattcagtgcggatttatgaatcttgaacagacaggctgattgttctgttctctctgcggcagaatcttttatgctttgctaatgagaagaatgttgtttgctttttatttcgataagatatggaatgtggagttgtagggaaaacttgcctttgctcttatttcctgtgaacattcatctggggtagataataggttgtcgaggttaattcgaagccttctcacttctcactctgccaggtcttttggg

SEQ ID NO: 16849 - DNA, 319 bp, Glycine max
cacaagcataagcacaagcacaagcacaagcacttctctaattccctttcacactctattacagatttcacaagtgcttacacttcaaatggctttggaagctcttcaatcacccaccacagccactccatcgtttagtccctttgaagaaaccagtctcagttacttagagacaccgtggacgaaaggaaagcgttctaagcgtagccgcacggagcaacaactgcaacacccttcatgcaccgaggaagagtacctcgctctttgtctcatcatgctcgctcgcggctgctcctgcatgtgtcttcaccgtcaaatc

SEQ ID NO: 16850 - DNA, 432 bp, Glycine max
gaaaaatttcgcgccccagaaaccctagaggaaccctgattcaatcgattcgctgttgccttcgaatttcgttccttggaagattagggagcaatggcaattgcagccccagggcatctgaacgtgaatgaatcacccatttggggatctagaagtgttgattgcttcgagaaattggagcaaattggcgagggcacatatggtcaggtttacatggctaaagagatcaaaactggtgaaattgttgctctgaagaaaatacgaatggacaatgagagagaggggtttcctataactgccatacgagaaatcaaaattctaaagaaactacaccatgaaaatgtgatcaagctgaaggaaattgtgactgatacaggtcctgagaaagatgaacaggggaagccagatggtaacaaatataaaagtggcatc

SEQ ID NO: 16851 - DNA, 390 bp, Glycine max
caaatattatccattacatttacatctgataatttcctcacaaaaatggacggacagagtttgtactcactagtgtttcttgtgcttgctctggccattgtgaacacagtgcatgggcaagggacgcgtgtaggggtctattcgagcacatgcccacgggctgagttcattgttaggtccacaggtcaatcccacgttaggtctgatcctaccttgggtgctgggacgcttccgatgcacttacatgattgctatgtgcaaggttgcgatgcttattgtctcattgtcggtgatggaactgatagaacagcatttgcaaaccttgctttacgaggatttgatgttactgataatgcatagacacagctagaggcttcgtgcccacgaggt

SEQ ID NO: 16852 - DNA, 181 bp, Glycine max
gatagagtgtgaagactcctactaaccattactggctgcagcctatatataaagtaatgcgaggcattgcctatagcatacatgatatgtacagggtcaatggctcgacgtctataagaattacatggacaagacaatactcacgcgatgtaacaccatatatctaaacagcatctgtaat

SEQ ID NO: 16853 - DNA, 402 bp, Glycine max
gcttttgcttggagttcgactcgatgcagggacggttttcaccaccacaactgtgtttaagagcctgcaggaacctattaggaccttccctcagagtatgatatctctttcacaagcgctggtgtcacttgggaggttggataggtacatgtctagcagggaattgatggatgattcggttgagagagaagaagggtgtggtggacacactgctgtggaggtcaaggatggaacctttagctgggatgatgatggccaacttaaagacttgaaaaatattaacttgaagattaataagggggagcttacagcaattggtgggactgtacgctcatggaagtcttctctccttgcttcaattcttggcaagatgcacaaaattttctgggaaggttcaaggtt

SEQ ID NO: 16854 - DNA, 407 bp, Glycine max
cccacgcgtccgatcatcatcccccctttagccaaggtgtcattgagcaagatatacaagatggagttaaaccattaaagaaggaggaaattcatcagggaagttgtgtagagagtacttttaagaccgaggtagcctcacaaaacagtagtcagaaacctctttcacatactaagacgggacatgtttcagttaataatagttctgactgttgtgagaaagttgaagctgatgtgaagtctgaaattttcgaatgggataataaatttgggaattattctaatagattagtagaaacacgtgaaaattttaggaagtctagtgatggtaaaataaagaatgggtttaaacgggaacaggatgctggaagttcatgcattcgaggatcaaatttaactgataagtgt

SEQ ID NO: 16855 - DNA, 445 bp, Glycine max
cacagagcgagcgaaagtagaatctgaaaaacaatggcggcgaagctagacacccacgccgtggcttccgatctgatcgacttcctcaacgcttctccaacggctttccacgccgtcgacgaggcaaagaggcgtttgcgtagcgcggggtaccaccaactctctgagagggaagtgtgggaactgcaaccgggcaacaagtacttcttcaccagaaatcactccaccatcgtcgccttcgccatcggcaaaaagtacgttgctggaaatggattctacataattggggctcacacggatagtccttgtctcaaactcaagcctgtcaccaaggttgttaaggctgggattttggaggttggtgtccaaacctatggaggtggtctgtggcacacgtggtttgatcgagacttgactgtggcggggagggtcattgtgcgggaag

SEQ ID NO: 16856 - DNA, 429 bp, Glycine max
ctttttctctctctacaccttcaaaaatcaaaagttccttgttgctcatcaaggggtgttatggtagatgatttgaaaagatagggtcaaatcaacagaagttcccctattttgatctgttcgcagttgggatggaattgcaggtgatttgagcctgacacagagctttcccgcttataagtagtagtgctagtgcagcagagacgatcatgaaccacgtgcacactctaatttccatcacacaggatcttttgtgtgaagaagactagaaaaccagcttcaattatcgagaattgtttgatgggttgatcaaaaatcgctctccaaaccagattcgtaacactgaaagtgtgaacaagtaacaaagcaagagaaaattatctccgatggcgacatattttcatagtaactccgaaattcaagccggcg

SEQ ID NO: 16857 - DNA, 431 bp, Glycine max
aaaaatttttgaataataattaaaaaattccttcatatttttagagataggagacaaaatttacatggatatagtaagtcttgcttgggctgctttaatggtagttttttcattttctctttccctcgtagtatggggaagaagtggactatagggatactcaaaattgagttaagggatcaaagtacccattttgttttctacttgggtttttcaatttcttaactttaactattgaattaaagtatttcatttatactaattaattgagttcaaatataaacaaatataaaatagatctgcatttcagggttctattatattctagtagtgtaatgtattctatgtatatgtatattatagaaattgaaaatactctttcaatcaaacacagatttgaattatatctatattcgtattttgagaaaatc

SEQ ID NO: 16858 - DNA, 444 bp, Glycine max
  modified_base (429)..(429): a, c, g, t, unknown, or other
cccacgcgtccgttcactccctcttcctctcttaggttcaactctcttcttgtttcctccacgcccctcttcttcttcacgctccaacagcgtttctttccccgccctctccaggaacataaggaaatcggtagaagatagaaagattaataaaaattctgctgtgaaagcagtgtatggtgatgaattttggacacctgcgaggagttcacctcaggatatttggtccataaggagtgatttgcaagtcccatcttccccttatttccctacctatgcacaaggacaagggccaccccccatggttgcggagcgtttccagagtgttataagtcagcttttccaatacaggataatccgttgtggtggagcagtttatgacgatatggcaaacatcatagttgctcagctcctgtacctcgacgctgntgatcctaacaagga

SEQ ID NO: 16859 - DNA, 414 bp, Glycine max
caaaggatgggtgcacgctcaatctctcttgcctcgaacacacgacattactatggttcctcgcctcggattccgcgtcaaactcaagcggccgaccatggaactccgccatgataaccgtacacttgacgatgaagtcgactactactatcatactccgccagccaacatcgtcaagaaggaacttgatcaaacacctattgacattaatactggtctacaactccttactgctaacaccaggagtgaccaatctaccgtggatgacggactgtcatcggatgcagaagataagcgagccataaccaccgagcttgcacagctgcaagtggagcttcaacgcatgaacgctgataacaagaagctgaaagagatgctcagccatgtcaccggtgactacaacgacttgcagat

SEQ ID NO: 16860 - DNA, 445 bp, Glycine max
  modified_base (428)..(428): a, c, g, t, unknown, or other
gcttcacggtgaagcacctaagccacttctccaccctagacgtcctcttgaaaccctactacgagcaccacacttccccctctcaattcatctctctctcgatttacattccagagatagaagaagaaagagagcaatgacagcaacaacagagagcgagaagaagaagcgagaagaagaagaggaaccagaacaagttgtgaacccatgggaagtttcagccaaaggtaaaatcgattacgacaaactcatagatcgtttcggttgccagaagctcggcgaagccctaatttcgcgtctcgagcaactcacctctcgcactcctcacgtctttctacgacgcggcgttttcttcgcccaccgcgatttcgcggagattctggacgcgtacgagaggggcgacaagttctacttgtacaccggacgcngaccttcctccgaagcg

SEQ ID NO: 16861 - DNA, 376 bp, Glycine max
tttctaaggttccaggatcagatctcgttccctcgccactcatcctcggccgcgcgtcgcgcgccacgcgccaccatcaaccgcacctcttgccgtaatggcatctgaagaagttctgaaggctgttttccctttcctggacggtgttgatcttgcttcttgtatggctgttgataagcagtggaaagacatagctagcgatgatttcctttggaaatgtctgtgtgccaagagatggccttcgatctgtaagcaacctaatccttctactttaacctactacaagttttacaaaacctttcataaactccagcaccgtataactcttctccctactagaattttttttgatgatttggagttcttcattgacatt

SEQ ID NO: 16862 - DNA, 372 bp, Glycine max
atctgttctttgtctgtcaaaggaaagaaaaggaaagattagaagagataatgaagagagtgacgtaaacagaagcgcacactacacagttaccaaaatcaggttcaaacgcacagatctgggagaagagacgaagaacaataacaagatgggacaggatcagaaccagagatcgctgatctacgcgttcgagtctagtggaacggcgattctcgacgagtacactgaattcacaggcaacttcaacacaatacgcgttccagtgccttcagaagcttactgcctacaacaacaagttcacctacaactgtgacggtcacaccattaactacctaggcgacaacggattcacttattgagctgttgccgatg

SEQ ID NO: 16863 - DNA, 274 bp, Glycine max
acgaaaaattgttgaatgataattaataaattccttcatatgtatagagataggagggaaaatgtacatggatatagctagtcatgctcgggctgctttaatggaagttctttcattgtctctttccctctcagtatggggaagaagtggcctatacaggattctcaaaagtgagttaatcggatctaagtacccatatttgtttatacttggctttttcaatttctataactttaactattgatttaaagtatttcatttatactaattaatt

SEQ ID NO: 16864 - DNA, 428 bp, Glycine max
tttattcgttcgttttatatggaaaaaaatattgtagcaagttcgtcgtacaaacaaaatgccactattttcggcacgccggtgctgaatatgcaatctgaggtgttttgtcttcttgtatttatacgtgatagttccaaaaagcctaacgcgagagattgattagcttttgaattattgctcgaattattttgaaggaatgatccaaactggttgaaatattcatcatcaacaacctcacgctgttatagatattcgctctctctatcttgctctatctctctctcacacacacacacacacagatcctgacatggacgaagaacaccgatgctaagctgccgaatgtcacagactctgatccaacaactgcgggttctttggtagccttggcaccatgaatctatgatccaaatgctgcagagaca

SEQ ID NO: 16865 - DNA, 257 bp, Glycine max
gtttaagaagcacattgtgggagcaactaaatacccgctctctaagattaaggggttccaggtttttgatggggagagcatgaatgatgatgcttgcttggtctttgcatactacaaggatggtgctgctgatccaacattcttatacttcgcatatgccttaaaggaggttaagagctaattgacataatgtaccaagatatctactcttattctacctaggttcttatatttaagttttgtcctaagttacttaa

SEQ ID NO: 16866 - DNA, 447 bp, Glycine max
gtaactcaagagttgctgttttttttcctcgtgacttctgatttgatttccaccttcactcaggttttaattgggaatctgatataggctttggaggttcttccacttccaaggatgctttcaattatacactacagaggatttttcagtgattgagtgagtggatatgaacatggaaggatcttatgattcatcatgcaatggagaagctggtaacgaaagccttcagatcattaaatactctccttataaaccctgcaccatgatatcattatcatcaccttggtttgttctaagagtgttttatgtgagagtgtgtggcattcaggttgatgaatccaccccagagtttctctctctcaaccatattcctcttagtcctgatacccttttagaggtgaatggtgttaggagcagcatttactctgatggagaagagtcttcagt

SEQ ID NO: 16867 - DNA, 416 bp, Glycine max
gtgattcctatccttcttggctgcaaggataagaataatgcagaggacaattttataggcagtagagtagtagcggagctcaagaatttgttaaaagaatctaaatttagccatctaatggaggttgttttggaagtatctcctgaggccttattcaatgaattattcactaaagtattcaggaattccttgtttgagttatcatctcatcaacatggaaactttgttgttcaagcattaatttcttatgcaagcaatcaagatctgatggagttgatttgggaagaacttgggccaaatttggagggtcttttcaaaatgggaaggtcaggagttgttgcttcacttgttgctgccagtgaaaggcttcatattaatgaacacaagtgctgtcaagtccttgctgaagcagtgtg

SEQ ID NO: 16868 - DNA, 391 bp, Glycine max
accacacgatcgattttattattgccgagcgttctcccgagtggcctcctttttcgctcatttctatggtcatggcgatcctgatggcaattgctctcggaatagacagcgccggatacagcatcccattacggatccgaaagcagcggcttgagtcggctctctagctggctatctcgctctctacggcgcgctcgacgacgatcacggcgaggatcaccgcggccacggccacggtcaccacggtcacgaccacggacccagagactgcccctgcgactaccattgcgatgaagctggtcatggaactctacggaagacccgatggcggcgctatagacgagcctgataagctacacaagtggctgaacaagttgatgatagagaccgt

SEQ ID NO: 16869 - DNA, 317 bp, Glycine max
acgaaatgttatggaggacaactaccggtcctatttgcgctaagacactgagaagaacaccagggggagatatggtgccggtccaaattacgacgttgtcaacaagctatatgaagaatgcataaccaaagtttggccttagggttcacttgaagagcatgtgcattctctattgaataattgggagatggaaatgtttcacaatgtggacctgcatgatttcagagtaatatgatcctaagaaatacacttttagtctgaacgtgaggaatcctatgactttgtaagagttgattaaatttggttgtatggtatat

SEQ ID NO: 16870 - DNA, 360 bp, Glycine max
ctcggcgtccatcggaaatttccaaggtaaaaagatgaatctgaagaacatgaagattccgaacgttccaggcggcggtgcgtcctctgcgctgctgaagcttgggcttcttggtggaattggtttatatgcagctgctaacagtctctacaacgttgaaggaggtcaccgagccattgttttcaaccgtctagttggtgtcaaagacaaggtctatcctgaaggaacacactttatgattccgtggtttgagaggcctgttatctatgatgtccgtgcacgaccccatctagttgagagtacatctggtagtcgtgatctacagatggtgaaaattggacttcgagttcttactttgcc

SEQ ID NO: 16871 - DNA, 428 bp, Glycine max
cccacgcgtccgcccacgcgtccggctaatcatcgaagactacccttacgccaacgacggccgcgtcctctgggacgccctcaaaacctggttcaccgaatacgtgaacctctactacgccgacgatggttctatagtgtcggacactgagctccaagcctggtgggaagagatcagaaccgttggacacggggataaaaaagacgaaccttggtggcctgtcttaaaaacaaagttagatttgattgacattgtgacaacaattgcgtggacgacttccggccaccacgcggctgtgaacttcggacaattctcctttgcggggtatttcccaaacagacccaccattgcaagaaacaacatgcccttggaggacccttcggacgccgaatgggagctggtcttggagaagccggaagtgattatgc

SEQ ID NO: 16872 - DNA, 447 bp, Glycine max
cccacgcgtccgcttctccgataatgatgaccgttccaaaaccgcattcgcctccgacgacggtcccgtggacttcaccgtccgttccatggcggcgcgtgtggccacaatcgacgacgcgctgctgctcaaaacctctcccttaagagaaggatggagcgactggttcgacaagaagagtgtgtttttaagaaaggatagaatgttcagatccaacttcgacgtgcttaaccctctcaacaaccccttgcttcaagatcccgacgccggcgccgccaccaccggactcaccaggggggacagaattgtccagaagtggtggatccatgagttcaagaaagttccattccctggtatcaagaagaaggctcctcttaatgtcaatgtcaacactctcaccaaagttggcatagaacgcagaactttgaatcataaccacaacaacaa

SEQ ID NO: 16873 - DNA, 96 bp, Glycine max
gatatggtcttgggtgttggacaagtattacaccttttttcggtggtttagcatctgatgcgtgaaaacttgagatttctctcaagttgtttcctt

SEQ ID NO: 16874 - DNA, 288 bp, Glycine max
attttcttccttacatggagtttgtcatgccttcactgcttcaatctgcttcacttaagcgggatgtaaccattacatcagcagattcagacaatgagattgaagattctgatgacgaaagtatggagactattactcttggggacaaacgaattggaatcaagactagtgttctagaggaaaaagctacagcatgtaacatgctttgttgctatgctgatgagctgaaggaatgattctttgcatggattgatcacgttgctggaactttagttacactccttaaat

SEQ ID NO: 16875 - DNA, 453 bp, Glycine max
ggaagtctcttcctacttgaagaaagtaggatacaaccctgacaagattccttttgttcctatctctggttttgagggagacaacatgattgagaggtccacaaaccttgactggtacaagggtccaactctgcttgatgcacttgaccagattagtgagcccaagaggccctctgacaagcccctcaggcttccccttcaggatgtgtacaagattggaggtattggaactgtgccagtgggacgtgttgagaccggtgtcttgaagcctggaatggtggtgacttttgcaccaactggactgacaactgaagtcaagtctgtggagatgcaccatgaatctcttacagaggcacatcctggtgacaatgtgggattcaatgttaagaatgttgctgttaaggatttgaagcgtggttatgttgcctcaaactcaaaggatgaccctgcaaa

SEQ ID NO: 16876 - DNA, 307 bp, Glycine max
acgataagtctcttcctacttgaagaaagtaggtttcaaccctgacaagattccttttgggccggtctctggctttgagggagacaacatgactgagaggtccacatacctttactggtacaagggtccaactctgcttgatgcacttgaccagtttagtgtgcccaagaggttctttgtctagtcccttatgctttccctacaagatctgtacaagattggaggtattggaactgtgccaatgtgacgtgttgagacctgcgtcttgaaacctgcaatggtggagacttttgtaccaacttgactg

SEQ ID NO: 16877 - DNA, 370 bp, Glycine max
actttctttgctggtaatcggactaattctctttatatctctcatccccctcctgttactcctccgcttactctgcaatccctattctgttatatcatctgctatttcaacctcctgatttttcttggttttgcctcaccaataatgattctaaactttgaaaattttttctcgaaagccattgtgttttcataatcgagatccagctttttttttgcttggttttaaaaaaatattattttctttcgttcaccctcgaaggttgttttttgatcccctcaaaaagctctcctttctttcttatctttccttggtattttaatgggttgctctattattatacctacttccaatacctttttttgttggt

SEQ ID NO: 16878 - DNA, 281 bp, Glycine max
gccaaaactagggtttagcattgatggcactgtgcaaccgcgtcagatcgggaatctctgggggaccaaattcacgttccttacttcccagcgatccagtctccaacgatccctcgttgcccctttcatttccctcgcctccagaaattacgccaacgtgccgaggccaaaggaatccaaagttaatgtccctttggctttgattggacgttcaggaaaccttgcctctgctttgcatactgcatctgtgaaagccaatgcattggataaggttgagactg

SEQ ID NO: 16879 - DNA, 463 bp, Glycine max
cccacgcgtccgctcgatccagcacataacaatggaaacgcagctttacgtgttttctctgtagattctgctcttaaacgccgtcgttttcaaactctttttttccccttcgcttctctgtctttgtaaccgaaaggggggaaaatataattaacaccgatttcgcgaccaattcttcttctgcgttgaattgggacaacgagaaattggatctcagtttttggcaggaaataaaaattgcatttgagtgtaaaataacagagtatagtgtagggccttgttcttgatactgtgctaaatttgttggatggcggagaaatcatgcatcaagcgccttcagaaggaatatagagccctttgtaaagagccagtttctcatgttgtggctcgtccttctccaagtgatattcttgagtggcattatgtgttggagggaagtgaatgaacaccttttgcaggtgga

SEQ ID NO: 16880 - DNA, 201 bp, Glycine max
gtgattgttgtgactcgatcttcttcgtagttatctagctcataatgtcgaatgagtgaggggggcttttttcacgtgaaaatgtcatgctgcggtggtcacatatggctgcggaagcgcctgcaagtgctgcaacggctgcggatgctgctagatgtacccagagttgatctacaccaaatcaaccaccaactagacctt

SEQ ID NO: 16881 - DNA, 246 bp, Glycine max
gaaggtgctttctgtggcggtttataatcactacaagaggatatttaatgaaacctcttggtacaagtggcctgcaggagattcagataataataatgtgaagactgatgctgttgatgatgatagagttgaacttgagaaaagcaatattctactaatgttgccaacacgattagggaagtcatcactagtgagacctctagatagggtagctaatgttttggctggaaataatatattgtactt

SEQ ID NO: 16882 - DNA, 239 bp, Glycine max
tgacggtgctttcagtcgcgaacgatattgattaccatagtatatccagcacaagatagtgtgggtcatagccttcacttagtccccagggtcccaagagctccacatcgatgaagcttcatataccctaattcgatcacactagctactcatgggagtctacgccaatttccttaatagagtcaatacctttcacatgcaaggcttctactcgacttctaaggtcgccagtccttacc

SEQ ID NO: 16883 - DNA, 465 bp, Glycine max
  modified_base (449)..(449): a, c, g, t, unknown, or other
cccacgcgtccgctcgatccagcacataacaatggaaacgcagctttacgtgttttctctgtagattctgctcttaaacgccgtcgttttcaaactctttttttccccttcgcttctctgtctttgtaaccgaaaggggggaaaatataattaacaccgatttcgcgaccaattcttcttctgcgttgaattgggacaacgagaaattggatctcagtttttggcaggaaataaaaattgcatttgagtgtaaaataacagagtatagtgtagggccttgttcttgatactgtgctaaatttgttggatggcggagaaatcatgcatcaagcgccttcagaaggaatatagagccctttgtaaagagccagtttctcatgttgtggctcgtccttctccaagtgatattcttgagtggcattatgtgttggagggaagtgaaggaacancctttgcaggtggata

SEQ ID NO: 16884 - DNA, 332 bp, Glycine max
atggcgatgtctttctctctctcttttcctctcacactcttcccatctattccctcatggtgtcttctctcttccttcccaataaaaattacccacttctaatcagacaaaaagtagagtggttataagtccatttgtttcttcaggttccacacaacttttaccagaagaaactaacaccttccgttactggctttttctgggtccttggcaaccctttgctgattttcactggcacaatcacaaccaattgtagaagaaatttctgggttatgggttacgggtgccggatagttatataatctgagctgggccccatttcatacgcaact

SEQ ID NO: 16885 - DNA, 376 bp, Glycine max
ctttttctctctgttttttgttctctcttcgcttaaaccctatcgttcttctcgttttcgccgattctcgccatgccgaaagctaaatccgacgccaaagccgccgatagcaggttgaagcggaagggcgctggtgctgggaggaagcaatcgaggaaagctgctaaggaccctaacaagccgaagagaccttcaagcgctttcttcggtttcatgtccgagttcagagagcagttcaagaaggagcattctaacaacaaatccgtcgctgttgtcggcaaagctggtggtgaaaaatggaaatcgctatctgatgctgaaaaggcccctttcgttgctactgctgagaagaagaaacaggagtatgagaaaacta

SEQ ID NO: 16886 - DNA, 349 bp, Glycine max
acaggttcctatgttttgtggatcttactctctagagaaagcagtatctcgcgttgcacgaggggttggtaaaacgggaaaacatctatttttaactgatattgacaatggaaaaccccctcttcttcttcagatggttcgtgattcctaagatattaaattcctgtctgctttacgctccttcaaacaccgtgttgcctatgcaaatgttcgatatgaccaacttgttggatggagtacgttatctatcatgcgtataaaggagctccctaagcgccggcatctttcaagacatgagaagtacccgcatattggtaatgtagaaacagaaaaatctacttttgttgtt

SEQ ID NO: 16887 - DNA, 207 bp, Glycine max
atctcacgcaagaataaagcctgttgctgatacaaccaattgggagaccttagatcatccggcatgcggaagctcgtgcgaatcctcctattgagtttgctactacctacgcccatctttttctgttacccttctttactctaagatagtcttcctatgtctatacgtacatgctcctgtgtattcaactttgtcaatatgtcttgc

SEQ ID NO: 16888 - DNA, 332 bp, Glycine max
atggcgacgtccatctctctgtctaaccctatgacactcttggcatctattccctcatgggctcttctctctgacttcgcaataaaaattacccactgctaatcagacaaaaagtagagtggttataaggccattagatccttcagtttgcacacagctttcaccagaagaaactaacaccttccgttactggctaacactgtgtgcttggcgaccctatgctgattatcactgccacaatcacaaccaattgaagaagaagtttctgggttatggctcacgggtgccgtataggtatataatctgagctgggccccattgcatacgcaact

SEQ ID NO: 16889 - DNA, 343 bp, Glycine max
cccacgcgtccgcccacgcgttcgcccacgcgtccgcccacgcgtccgcccacgcgtccggaacaagttccgcatgtcactgggtctgccggtggcggcgacggtgaactgcgccgacaacaccggcgcgaagaatctctacatcatatcagtgaaggggatcaagggaaggctgaaccggttgccgtcagcttgcgtgggtgacatggttatggccaccgtcaagaagggaaagcctgatctccgtaaaaaggtgctccccgccgtcatcgtccggtagcgcaagccgtggcgccgaaaggacggtgtttacatggacttcgaagataatgctggggtcata

SEQ ID NO: 16890 - DNA, 437 bp, Glycine max
  modified_base (392)..(392): a, c, g, t, unknown, or other
atggcgatgtctttctctctctcttttcctctcacactcttcccatctattccctcatgggttcttctctcttccttcccaataaaaattacccacttctaatcagacaaaaagtagagtggttataagtccatttgtttcttcagtttccacacaactttcaccagaagaaactaacaccttccgttactggctttttctgtgtccttggcaaccctttgctgattttcactgccacaatcacaaccaattgaagaagaagtttctgggttatggttcacgggtgccgtatagttatataatctgagctgggccccattccatacgcaacttttcctccttcattctccttttttttttattgtcttaagaagtgatggacatggaagaanattcaaagttgaatttggatggttttcttcttctcacgaggtttg

SEQ ID NO: 16891 - DNA, 204 bp, Glycine max
cgggacgacccacgcgaacgagaacgcgaaggaagaaacagcaagaaacgacggaaaagacaagacaaaagcgagaggagaggaagcagacagagaaagcagaggagcggccagagcagcagaagaagaggaagaagaggagcaagaagaagcagcgagaacggggacaagcaaccaagaaggaaaaagagaacggacagaagg

SEQ ID NO: 16892 - DNA, 446 bp, Glycine max
  modified_base (311)..(311): a, c, g, t, unknown, or other
aaaattctctctctctctgttccgtgttccgcacccatggccaagtcctcctccaccaccactccacaaaaacctttcctcaacttagacccactcttcttgaaaactccttcttacacttccctcaaagacgtgcttcctttctccgccgctgcttgcaactcccccgccgcgagccaccaccagtacgtgtccatccgcaaccgcctcgtgaagcaggccgcctgggcctacctccagcccatgtccatttcccccagcggcccatcaggcccacacttcttccgccacttctacaacagattctcctnccccacccacaataacaacccttttaccacatgtctcagctttatataccgaaccctacaccgaatactccacgctatcccttgcttccttcatgtattcgaagaatagcacaataacacgtttttttttttttc

SEQ ID NO: 16893 - DNA, 281 bp, Glycine max
ccacgccgtcggttggtaatggatacccattacaaactatgatcaacatgggcgactacgcccgcgtttcaaaagctgagagggaacctatcatggagtattccacaccacgaccaatgatgggcaactaccaccaccctaatgctcaccgtgtcctcaacgagaagattgtttatgaggaggatgtgattggaggatcccttcacaaccatatgcattaccacaaccctgagactcatgaaagagacaaggcggtggagtatgaacaagttcctgagagg

SEQ ID NO: 16894 - DNA, 405 bp, Glycine max
  modified_base (374)..(374): a, c, g, t, unknown, or other
gcaagcctattgttagtctaagtctgggctgcaaagctatatttcttttgggaggaaaatccagagaggatactcccttggcaatgttccttcgaagcggtgatgctgtacttatggctggagatgcaagggaatgctttcatggggttcctcggatcttcacagataaagaaaatgctgaaataggccatcttgagacacggctgacgcatgaagatgatatttgtttcttaaaatacattcaaacatctagaatcaacatcaatatcagacaagttttttgagtagtatgttcttttctttcgaagtgaaatttgttttattagctcaaggaacaaaaaaatgatgtatgatttctatttaacgtgattatngctctatatgacaagccgagtctatcccagc

SEQ ID NO: 16895 - DNA, 462 bp, Glycine max
cttacggcaagaaattgaaaaacgggttaatttaaccctcccttttgtacaatgcgtaatcgatgacctatgtataaatgaataagaattctttggatttgaagaaaaaaaacaactttgctgacatatatttgtttggtcagaagagtcctccgaatattctggtcttatattggtaattgttttcaatattttaaaaataaaaatagcgaagagaggataggctcattacataaaaaattggtaaatttcccataagtaattgagtgtgagagccaaatgaatcgaaagattcatgtttggttcgggaagagatcctagacattttgaaatgaatggaaagagagtctactttcattaagtgatttattagataatcgaaaacagaaaatcttgagaactattcgaaactcagaagaattacgggaaggggccattgaacagctggaaaaagcccaagcc

SEQ ID NO: 16896 - DNA, 455 bp, Glycine max
gtttattccccaattaatgaatggctttgcatatttagatgaagaaaaggccatgtgggggatatgcatccctctccgagagtggagagtattattcccaccgaccgccaactcccctactagacaccgtcaactatcctattcatatgaagaatctctctgccaaggagctgaaacaactcgcggatgaactgcgttctgatgttattttcagtgtttctagaactgggggccatttgggctcaagccttggtgtggtggaactcactgttgcacttcactatgtcttcaatgcccctcaggacaagatactgtgggacgttggtcaccagtcttacccgcataagatactcaccggtagaagggaccagatgcataccatgaggcagacaaatggcttatctggcttaaccaaacgttctgagagtgaaattgattgttttggcactggtcac

SEQ ID NO: 16897 - DNA, 464 bp, Glycine max
tcgcccacgcgtccgcccacgcgtccggttccaaatcccatatggaaataccataaatatgatgggttattcaaacccaaccaagaaggttcatgatcaaattcagctgtatggtgatgtaaaagatcttgatgatttttgtttgaaggctcaactagttaactacatacaatatagagctcttctggagggatggacttcgcgcatgtggaaaaaatatacaggagtattgatttggaagacacaaaatccttggactggtctgagaggtcaattttatgatcatcttcttgaccaaacagcaggtttctatggctgtcgatgtgctgcagagccaattcatgtacagcttaatctggctacatattttatagaggttgttaatactacatccgaagaattgtctaatttagctatggaagtttcagtgtgggacctcgaaggcacatgtccacactacaaag

SEQ ID NO: 16898 - DNA, 292 bp, Glycine max
ataaattttggatttcgcacgtagctagctacagaagacaaaggagccttgagtctcgagggcttgtctgatcggaacgcagccgcaactgccaccgagatctgctctgtgtgtcatgggatggaaagttactggcatacaggttatgtaaaagatgccaaattgtgccatatcctcttcaaatggcagtttaagcgatagaatgccattttcatccaatatagcagctatggttcatgcaatggatcatgagatacatgaatatgctgcaacttattcgagtgagatacat

SEQ ID NO: 16899 - DNA, 431 bp, Glycine max
cggttacggcaagaaattgaaaaacgggttaatttaaccctcccttatgtacaatgcgtaatggaggacctatgtatcaatgaataagaattctttggattcgaagaaaaaaaacaactttgctgacatatatttgtttggtcagaagagtgcttcgaatattctggtcttatattggtaattgttttcaatattttaaaaataaaaatagctacgagaggataggctcattacataaaaaattggtagatttcccataagtaattgagtgtgagagccaaatgaatctacagattcatgtttggttcggtaagagatcctagacattttgaaatgaatggaaagagagtctactttcattcagcgattcattagataatcgataacaggaaatcttgagaactatacgaaacctaggagaattacgggaa

SEQ ID NO: 16900 - DNA, 221 bp, Glycine max
ggctttgaagctaaagtcaacaacacatagctgaggatagatagtttgttcgttgcgttgccatggcggcgtccgagatcggtcgggaactggattcgctgaacgacgaaaagaccataattgagcataaaatctctgcgcttgaagctcaactcacagagattaatgtacaaaacaacgccgtaccatccaacggattgacgcatgacatgattcacaga

SEQ ID NO: 16901 - DNA, 459 bp, Glycine max
atgctctgaacgttctcatggcaatggatattatttccaaggacaaaaaggaaattcaatggaggggccttcctcgtactactgtgaatgatattgaagaactaaagacagagcggcttgggctcaggaatagaattgaaaagaaaacagcctatctgcaggagcttgaggagcaattcataggtcttcagaaccttattcaacgaaacgagcagttatatagctcaggaaatcctcccagtggaggtgtatctttaccttttattttggtacagacacgccctcatgcaactgtggaagtggaaatatcagaagatatgcagcttgttcattttgatttcaatagcactccttttgagctgcatgacgacaattatgttctcaaggcaatgaaatttggtgagagaccacaagatgataatatgacacacaatcttactgacggatgtgaaatttcta

SEQ ID NO: 16902 - DNA, 348 bp, Glycine max
aaaagcttcaactgtgaagctatcttcgtatcgagcatggccaaatatgcatgacagtcggtttgcgctttacaagttgccattgcgggttcccaaagatgaccaagaatatgctggtttatggggaggaacttttggttggcctcctggaaagccttctgaagacaagcctggaaaggcttcatatttatatccgcattcttataacgctttactgtatcaacagcatctgagttcaacacaaattttgtaaggcactcactatgtgttacatgctaacggttcatcaatgattacagctaatatcaatgatcctttatacgaaccctttacctgggacactgatgc

SEQ ID NO: 16903 - DNA, 450 bp, Glycine max
  modified_base (384)..(384): a, c, g, t, unknown, or other
cgaaaatgtggaagagaaggggatttgaagaagaagcagttcaattgataaactcagatttgagagacctaagtctagctggcataggctttggagcctctttcttcggattctttgctgccattgctgctatttatctgttgattttggatcgtacaaactggaagacaaatattctcacagcactactcattccatacattttcttcagcttgccttcattaattttcgacgtcttcaggcgattagcttgtcacgctttattgttatcaattttgcaccatcatttttctgtaatagtaattttcctttttattatcattctacttatgcaggggagagcttggaaaatggattgctgcagttgctgttgtattacgactnttcattcctagacacttccctgattggctggaattgccaggtgctttgattcttcttatcgtcgta

SEQ ID NO: 16904 - DNA, 460 bp, Glycine max
cttgaacgtaacgtttgtcgagatgcaaaagaaagtcaggtattaatttgtttgacttgatttcgagcatgattggtcaattatagtaagaatcaaattgtcacggtttggtgtgtcatgtgtgtccttttaagtttaattgtctatctcagggcttaactctgaagtgccaaatccttattatatatatcctcattcctcaaacgctgtattttatcgatggaattagtgttaaatgctggttatatgaaaatatattacattggcgttagattctctgctttgttagagtttctgtaggaagacaagaatgatcttttataagttataactattactcttggttcatcaagtttgaactgtcttgttaattttcaattccaaattttctttacaggaaagctggaacacctagacctctttggaatgcatcatctcagcttctaatggctgtaggtta

SEQ ID NO: 16905 - DNA, 458 bp, Glycine max
cattaattgtctacgtggtcattcctgtatcatactggggcctcaatgtgtacaatgccaataggtttcccattttctcctcacacttgttcaccgcccaaggtcaaaaatacaacatacctaagattgtagacaaccattttgagctaaatgttgcagagtatgaaaagcaaggtagaattcatctcagtgtgtttttcgctctcacttacggctttggatttgccaccatagcatccaccctcacacatgttgtctgcttctatggaagggagattatggagcggtatcgtgcttcttccaaaggcaaagaagatatccacacataattgatgagaagatacatagacataccttcttggtggtttcattcattgctgctcgtgacacttctggtttctctcgcactatgtatctttctaaaggaccaggttcagatgccctggtggtgacttctc

SEQ ID NO: 16906 - DNA, 285 bp, Glycine max
ctcacgagcttctcagagaggtcctcctacgaattgaatcgtcggagtccacgtggccgctgcggaggagcgtcgtggcttgtggcggagtgtgccgcacctggaggaggctcatcgtcaaggagattgtcaagccacctcaattctcttacaacataaccttccccatctctctcaaacagcctgtcccgagggaacatctacttcagtgcttcattaggcgcaacagtgcctcacagacatattatctgtttctcagtttatctagtgccctaatagctgatg

SEQ ID NO: 16907 - DNA, 262 bp, Glycine max
gaacacatgggaaatgctagagtagggcctggtagttttggtatggttgaatgtcacgtccactgtgcaacaatgcgttcttgaatctggcggactgtgatgtaccagcaggatgtgcatcatccaggacatgtgtggtgccgaaacacctctctatactgataaccttctaaatactgctaaaacaacttctgccgaggcaacatctacttcagtgattgattaggcgcaacaaatgccttatagacatattatctgatat

SEQ ID NO: 16908 - DNA, 246 bp, Glycine max
ctcttcctacttgaagaaagtagtatacatccctgacaagattccttttgatccgatctcttgttttgagggagacaacatgattgataggtccacaaaccttgactggtacaagggtccaactctgcttgatgcacttgaccagattattgagccctagatgccctttgacaagcccctcatgcttacccttcatgatgtgtacatgattgtaggtattggaacttgtgccagtgtgacgtgttt

SEQ ID NO: 16909 - DNA, 232 bp, Glycine max
cgtcaggcttattccccaatcaatgaatggccttgcatatttagatgaagaaaaggccatgttctaggtgtccatccctctgctactgtgtagagtattattcctacctaccgtcatctcccttactacacaccttcaactatcctattcatattaacaatctctctgccaaggagcttaaacaactctctgatgaactgcgttcttactttatttttagtgtttctagaac

SEQ ID NO: 16910 - DNA, 320 bp, Glycine max
ctcaaactctctttcatgcgtccattagattactttcacaccatagtcgttcgcgtacgagagcttatatctctgtaagcgcagaacctcgtgctgcgtttggcggctaatgatgccagggaaaggaccgaaggggtagatcacaggctaaacctgcaccaacgacaaagacaaggacgagaagaaacccatctcgcgaggtgctgtgccagaccttagatcccagttggacgcctgcacctgctcttgaagttaacgacaaccgctaatggcatatctggggccacagctactgtctactttgctgctatctagagata

SEQ ID NO: 16911 - DNA, 358 bp, Glycine max
cagtgacatgtgcctatgatatctactgttttggttagattttacttgagctcattaccggtgacattgaagtcagcaagttagatgatgcctctacaaaggagtggttagagcaaaccttgccttacatcactatatacgataaagaacgggtgactaagattattgacccatcattgatcgtggatgaggacctgttggaagaggtatgggctatggcaattgtggccaatgcatgcttgaatcccaagccttccaaacgccctcctatgaggcatgtcctgaaagcattagataatgcattgaagattgatagagaagaaaattctagctcatcaaggttgaaatcaaactcttc

SEQ ID NO: 16912 - DNA, 354 bp, Glycine max
gttgaacagaaaccctagcaagtggagcaatggcttacgttgaagtcgatgtggcggcagcagcagcagcagggctgccgaagaagagaacgttcaagaagttcagttttcgaggcgtggatctcgatgcacttctcgacatgtccaccgatgaactcgtcaagatgttcagtgcccgcgctcgtagaaggttccagagaggcctcaccagaaagcccatggccttgatcaagaagctccgtaaagcgaaaagggaagctccaccaggtgagaagccataaccagtactcactcaccttcgcaacatgattattgtgcctgagatgattggttccattatcggagtgtacaatg

SEQ ID NO: 16913 - DNA, 413 bp, Glycine max
gccactcgttcgggaaaatattggatacatttctccgaacacgggattacagcatgtgggagattaatggagactacagtgggaaagggaagggttatgaatctatgtcagatgcccatctactatggaagcggagcatgcctcccaagtttcccactacatataactttactcggtttgccatcacattaaatgaacttacccctggattaaaggtctgcttttaactgatactgactattgtgttgccagtttatcttcctttggaagatcttttataatggacaaatgtgctatattttatacctttttacccaccattattaatgcttgcatcacttaggaaacgttttgatcatttctatataatggaggacctaatataaaataatttaaatttaacattaaaagga

SEQ ID NO: 16914 - DNA, 427 bp, Glycine max
ctctttctctgctaaattatttaaattttctctctttctctaattaattccctttgttatgaaaatggctgtggctatggctgcttgcagtcttggacttcacttgagtgctgacaacaccttgagaccttttgaaaaaaccactatcttgaaggccctctctatctctgatgctactaaaccatgttacatttctcacaaaacaagattatcatcttcatcttcaggaataacaatgatcccacgagcaacaacagttattggtactgtggaggatggaaatcaaggagaggctgataccattccaactccggtagttattattgatcaagactctgatccagatgcaactgtggtcgagataacctttggtgatcgccttggggctcttcttgacactatgaatgcgtttaaaaaacttggggct

SEQ ID NO: 16915 - DNA, 447 bp, Glycine max
  modified_base (378)..(378): a, c, g, t, unknown, or other
gttaaaagttaagaagtagcaaagatgttttcattcgggcacaagggtcaaaagataaaggggactatggtggttatgcagaagaatgtgttggatatcaacagcatcaccagtgttgacgggatcgtcggcaccggcttagacttcttaggcagtgcactcgatacagttacttttttagcctcctccatctacatccaacttattagtgctaccaaggctgatggtggtaaaggaaaagttggaaaggctacaaatttgagaggaaagataacattaccaaccataggagctaaggaagaagcatacgatgctcaatttgattgggacagtgacttcggaattcccggtgccatttatattaagaacttcatgcanaacgagttctacctcaagtctttaattctcgaggacattccaaaccatggaaccattcacttcatatgt

SEQ ID NO: 16916 - DNA, 447 bp, Glycine max
attgaaaggtgtgaagtaagggcgatgcgttcattgcggcacaatggtcaaagcataaaggggactatggaggctctgcagaagaatgtgatggatatgaccacgcatacctgagttcacggtatcgtacgatccagcttaaactgctcacgctgtgcactatattcagcatgtagctgagcatagaccatattgattcaactgatcaatgctaccaaggttattggtgggaatgcaaaagtattaaaggatacacaccaataggaaagataacattacgcaaccatatgagctaatgaagaatcatactatagctaatactatagcagacagaaaactgccaatgacgcgtacatgttatattaagatctggacgcttgacgtactgtacataaagtctgtaatgctcgacgacattctaaaccatgtaaccattcacttcatatg

SEQ ID NO: 16917 - DNA, 458 bp, Glycine max
cccacgcgtccgggaaaatattgtctacattactcggaaaatgggatgacagcatgtattatattaatggagactacagtgggaaagggaagggttatgaatctatgtcagatgcccatctactatggaagcggagcaagcctcccaagtttcccactagatataactttactcggtttgccatcacattaaatgaacttacccctggattaaaggtctttttttaactgatactttcttttgtgttgccagtttatcttccttttttttttctttataatggaaaaatgtgctatattttatacctttttaccaccattattagtgcttgcatcactaaggaaacgttttgatcatttctatatcatggaggagctatataaaataatttaaatttaacataaaaggaccaaaatattcatatcactatattttgcatattgtgagtgcttgtgctc

SEQ ID NO: 16918 - DNA, 467 bp, Glycine max
cgacccaagcgacgcgtccaagccacgcgtaacggtaaaatattagtctacattatctcggaaaatgggatgacagcatgtattaggttaatggagactacagtgggaaagggaagggttatgaatctatgtcagatgcccatctactatggaagcggagcaagcctcccaagtttcccactagatataactttactcggtttgccatcacattaaatgaacttacccctggattaaaggtctttttttaactgatactttcttttgtgttgccagtttatcttccttttttttttctttataatggaaaaatgtgctatattttatacctttttaccaccattattagtgcttgcatcactaaggaaacgttttgatcatttctatatcatggaggagctttataaaataatttaaatttaacataaatagaccaaaatattcatatcaactatattttgcatatt

SEQ ID NO: 16919 - DNA, 458 bp, Glycine max
cccacgcgtccggtctctcgtaatcatgcctaagcaaatccacgagattaaggatttccttctcactgccagaaggaaggatgcgaggtcagtgaagatcaagaggagcagagatgtggttaagttcaaggtcagatgctccaagtacctctacacactttgtgtgtttgacccagagaaagctgataaattgaagcaatctcttcctccaggtttgagtgttcaagacctgtaaaggtactgggcgagagatcaagaagaagcaattcattgattcttctgaagtttgattctctgtagttgaagcttgagatttttgtcagttggtcttttattatagattattgctaagacatggttgtttttatctgtttggaaaatgaaacttgaatttatgtctaatggagtattctagtgctgtggaactatatatatgaatttattgtctggtttatttt

SEQ ID NO: 16920 - DNA, 456 bp, Glycine max
  modified_base (285)..(285): a, c, g, t, unknown, or other
gcggctaacaccggaatctgcaaactcaaaagttccatctcttcttccacacatccatcgttaatcattttcccgcaaaatattttctttctctgttctgtgccttcttctccaccgttggttcaaaaatcgcagccgttgatcagattgagccttcgtgttgatcttcatcgccatcatggaggtccgttccaatcccgcctccgacaactcctccgaccaccttcgaccgcccgccgtttcgtccaagcagccgctgccttctcctaccgccgtcgacacctncgccgtttctcagagactccagaaggaattaatggctctcatgatgagtggaggagatctcggggtgtctgcttttcctgatggagagagtatttttacatggattggcacaattgaggtggaaaagggactcagtatgagggtttatcttataaactcttcttacgtttt

SEQ ID NO: 16921 - DNA, 374 bp, Glycine max
cgcttgctttccgtcgctagaaacttccgctccaattgctcctctgatggagctgcaaagagcattgtcttccaatttcagtgtgtgacatggaaattggagaaactgttgagcaatttgccatatgacgatttggacatctcggaggaagtcaaggagcatgtggatttggtgagaacacaattgagacgggccacggataaatatgggtttatgatttcaaagatgccatctcatgaattatgccagccactggctgaagaaattagtcaggttcttggcatatatgaaagcttgttgcacacacaactatgctgacctgaaaatttatcataactacgacagtattcctatcaactttaaatggaaatgct

SEQ ID NO: 16922 - DNA, 439 bp, Glycine max
ggggatgagagagggaggatgaggtgcggttaggagcgatcgacaggtattcgaaagaagggaagcggagtgagacaatggctggtcctggacggcataggagagacggaggtggtggaggcctataagcacgccatcatgaggaggacgggactccccgcgcgtgacctgcgtatattggaccctctcttgtcatacccttctacccttctgggtcgtgagagggccatcgtcatcaacttggagcacatcaaggccatcatcaccgcccacgaggtcctcctactcaactctcgcgacccctccgtcacccccttccttcatgagctccaggccaggatcctccgtcaccaccaccagactctggccgatgccaaccccaaccctgacgacgccatcaagattctccccttcgagttcgtagcccttgatgcctgtc

SEQ ID NO: 16923 - DNA, 461 bp, Glycine max
  modified_base (397)..(397): a, c, g, t, unknown, or other
  modified_base (409)..(409): a, c, g, t, unknown, or other
tccagttcagccctgttggggaaagtaagaaaagtggtgaagtctatagactctttgatggtggcggccagagaaatgagaggagaaaatggatccatttgtttgaaggagtttcagctgtaatattctgtgctgcaattagcgagtatgatcagacactttttgaggatgaaaacagaaacagaatgaccgagactaaggaacttttcgagtggatcctgaagcaaccatgttttgagaaaacatccttcatgttattcttaaacaagtttgacatatttgagaagaagatcctgaaagtcccacttaatgtatgcgagtggttcaaagattaccaaccagtttcaacagggaaacaagaaattgagcatgcttatgagtttgtgaagaaaaaatntgaggagtcatnatttcagagcactgctcctgatcgtgttgatcgcgtctttaggatctaccgg

SEQ ID NO: 16924 - DNA, 463 bp, Glycine max
  modified_base (418)..(418): a, c, g, t, unknown, or other
ctcaaaatccctttcttgtgtcgattagattactttcacaccagagtcgttcgagtacttcaccttctttctctctaagcgcaaaacctcgtactgtttttggcggttaaggatgtcggggaaaggagcgaaggggttgatcacaggcaaaacctccgccgccaacaaagacaaggacaagaagaaacccatctcgcgttcttctcgtgccggccttcagttcccagttggtcgtatccaccggcttttgaagtcaaggacaaccgctaatggtagagttggggccacagctgctgtctactctgctgctatcttggagtatctcactgctgaagtattggagctggcagggaatgctagcaaggatctcaaggtcaaacgtattactccccggcatttacaactagcaatccgcggngatgaagagttggataccctgataaaaggaacaattgctggagga

SEQ ID NO: 16925 - DNA, 274 bp, Glycine max
gagaaactgcgaaaatggcatcggagtcaggtcaaagtcccaatccttcttggttaacgcccaaaaggcttcttatgatattttgtctcattaacatgctaaactatgtgtatcgaggagctttagtcagtaacggtgtcaatggaagtcttgcaacttgcactgactctggaatttgtacaggtggcagtggaattcatggggattttaacttaaacaattttcaagatggagttctgtcatctgcatttatggatggacttctaattgcttt

SEQ ID NO: 16926 - DNA, 491 bp, Glycine max
aaataaaacatctgtggagacaaaatctttgtgaaagcaaatatgggaggcaactggttatgaggactgatgattttgaaaagcctgctcaaacaaatgtcctctgtagcaattggaaggaatggaagcaacctatcatatggtttcaaggaactacagatgctgtggcagctcaatttttcttgaaaaatatacactctcagatgaggattgctgcttttgatttatttggtgatccacaagttctgggatctcagccgaatgtatttggagagctcttgagagttctcatatctccttcaaaagatgttgaagcagctgtcaattgggttattggtggtgaggagaatcctgacatctcattgcatatgcggatgcttatgaataggtccataagagctgtacaggctgcattgcattgcatcaaaaaagtcatagagagtcagcacctaacttctagaccaaaggtgggtgtggtgtcagatacacct

SEQ ID NO: 16927 - DNA, 367 bp, Glycine max
cccacgcgtacgcagtacatctagcacagatgccccaactacaaatgtgtctgcagataccgatggtctggctgcttcgaatttagatgctggtagtaatcttgagcagactattcaacaaattatggacatgggtggtggcaattgggacagagacacagttagtcgtgctcttcgagcagcttataataacccagagcgtgctatagattacttgtattctggaatccctgaagcagcagaagttgctgtgccagttcctcaaacagctgggatttcttctggagcattttctggaggacctaattcatctgccttaaatatgtttccacaggagacgatttctaacacttgtgctggacttgga

SEQ ID NO: 16928 - DNA, 273 bp, Glycine max
gttacacggtcgtaacaagcgcaagcgacctggattaccacggtttgacaggaacacgatccttaacgtcatagtgttctctaagacaccagggtcccatgtgctcaacatcgttgaagttacacataccctaacccgataactctagcttctcatgggagtctaggtcgattcccttaatagagtcaatacttttcacatgaaagactcctactctacttctaagggcgccagtgcttacctgtgcatcgaatatcgcgaaactagtcttta

SEQ ID NO: 16929 - DNA, 301 bp, Glycine max
tttgctctctctctagaattattgaacactgtgtttatggcccatatttaggaagacatgagcgtgatatttactgcctatagaacatttatgtacctggtcatatagacctcaagttggcagatgatagtacacatatgttctagaaaattagacgaacataagtgacatgcttctgataagcaactcatttcacactaccgttacagagatgattcacaatgtgcaatccatagcatacatcatttgtgattgttgaatacattgatgatacatgggagaacaaacccattttggcttc

SEQ ID NO: 16930 - DNA, 463 bp, Glycine max
caacaacagtaccacggtcctgccttaccgatgatgccaaccccactccaagttcggaggaggcctgtctttgaatttgatgatgagcatcttcagaatcaaaagcccaccattccaatggaattgcagattgtcagttcccaacaacattttcgtcttcccgatggttgggtggtcgagaaaaagccccgtccctctcacgagtctcgttttgacaaggcaccggaaggaaatttcgttctttgctatctgttcagagacatctagcaggagaaacaagagactatgttgttgctaacacaatgatgtcaaaaaatgaaaacactgtgagttctaattccatcttttgcaagtttctgtgccttttttggaaatgaaatctgtctggatacaaacacaaagctgaagttacaaacagggcatttctattttccacactatgttgtctggggtacattctgat

SEQ ID NO: 16931 - DNA, 428 bp, Glycine max
atgactccgatgggttcttgaaagacgctattcagatggtgaagcccgcgaagggtactacaactcttgcttttatatttaaagagggtgttatggtagctgctgattctcgagctagcatgggaggatatatatcgtcgcagtctgtgaagaaaattatcgaaatcaatccgtatatgcttgggacaatggctggtggtgctgctgattgccagttttggcacaggaatctcgggattaagtgacaggagcctcaaagctacttgccaatatttcatactcttatcgtggaatgggttcatctgttggtaccatgattgccggatgggatgagacgggccctggtctatattatgttgatagtgaaggaggaagacttaaaggcactagattctcggatggatctggttcaccatatgcttatggtg

SEQ ID NO: 16932 - DNA, 447 bp, Glycine max
cttattctagggacaggaggagcagatgaactggcacccggttaccttaaactagcctatgacattatacacaaagctggaggagtctgcatagctgatgaagtgcaatgtgggtttgcgcgcacaggaagccatttttgcagattggagacacagggtgtgattcctgatatagttaccatggcaaaaggtcttggcaatggtttgccattagcagctgtacttacaactccagaaatagcaagcgtgatggcccaaaaccattaatataatacttttggagagaaccctgtatgttttgctgggggacttgctgagctcagagttcttgacaacgagaggcgtcaatgtcattgtgctgatgtagggtctcactcgattcagcgtctaaaatctatgatgcatgtacatgacattattggatatgtaagaggaagaagcttaatg

SEQ ID NO: 16933 - DNA, 453 bp, Glycine max
gattatcctaagtctttgggaatagtgctgcaatggcttcaagtcaggaggaggtgacccttttgggagctactggaagcccatttgtgtgcagggttcatattgccctcaagttgaagggagttcaatacaaatatgtcgaagaaaatttgaggaacaagagtgaactgcttctcaaatccaacccagttcacaagaaggttccagtgtttattcacaatgagaagcccatagcagagtctcttgtgattgttgaatacattgatgagacatggaagaacaaccccatcttgccttctgatccttaccaaagagccttggctcgtttctggtccaaattcattgatgataaggtttttggtgctgcatggaaatccgttttcacagctgatgagaaagagcgtgagaagaatgttgaggaagcaattgaggctctgcagtttcttgagaatg

SEQ ID NO: 16934 - DNA, 343 bp, Glycine max
gatatccctctctttctttctcatagttttcagttttctgcgaaatcgccgatgctagaatcggggcttcacgatttatccgatgacgccgattacgccgcgtcgcagcaacaaggatctgctagcgtgatgttgcggagtgacagtgccaaacagagttcccctcggaacggtgctgaaattgtattttcgaaggacaatgttgcaattcatccgactcaatttgcgtctgaaagaattagtggaagactgaaattgattaagcaaagctcgtccttgtttatggtaatcgctggggggtttttcaagttactttttggttgtcagcgtcttattgtttatg

SEQ ID NO: 16935 - DNA, 261 bp, Glycine max
gccacgcgtacgttaatatcagatgaatatgagcgtatcacttaaagagatgatgctgctctcgcgtacttatggaatgctatcacaatactggcatgcgttcatctatccacatatgcaattgaaaacttgatggaagagctatcactctatggagcatgctcacgactagctacgatgacagctatcactgggacatgactgcacacttgtctatgtacaatgcaatgcttattatcccagcgatagtgatattgggat

SEQ ID NO: 16936 - DNA, 400 bp, Glycine max
ctcaaggttcctcatcttccattgccattctgaatttggtatcatctgcatgcaccagaaaggggaaaaagtatcgtgaagcagcactttcctctctcgaacaggttataaaagccttggggaatccagagttctttaatatggtttttcccttgttgtttgatctatgcaattcagagcccctaaagtccgggcaagcacctttggccagtgatgctgctggatcagagttgaacagtgttgaagagatttctgttccacataacaaaatagttgactgtttaacctcttgtatccatgtggcacatataaatgatattcttgaaaagcaaaagggcttagcacacatgtatacagcattcttgttacctgaaacataaatggactgtcaaaactacag

SEQ ID NO: 16937 - DNA, 348 bp, Glycine max
attaatttctcgtatcgaaaatcatttccaccaccacaattttttttatttccgtttactaaagattagtaattgtttggtttgtgtgtagattttgattcgattcgattcgattcagtcgaggttttaagcagcagcaagatgtctgggcgtggaaagggaggaaagggattgggaaaaggaggagcaaaacgacatcgtaaggtgctccgcgacaacattcagggaattacgaagccagcgattcgtcgtttggctcgcaggggtggcgtgaagcgtatcatcggtttgatctacgaggagactcgcggtgttctcaagatcttctttgagaatgtcatccgtgac

SEQ ID NO: 16938 - DNA, 445 bp, Glycine max
cccacgcgtacgactttatccatccatcccaaaaagtttgctttggttaatgcccctaacaaatttccatttttattttccctgtttgtgactagagagttgggttcccatgccggttgatttggacaacgcttccacagcttcaggggaagccgccagcgtctcttccttcggccaccaaacaaaacccgacgtcccaaagaaaaaacgaaaccttccggtcatgccagatcccgaagcaaaggtgattgctctatcgccgacggcgctcttggcaacaaaccgttttgtgtgcgagatatgcaacaagggattccagagggaccataatctgcagcttcaccggcggggccacaacctgccgtggaagctgctgcagagggtcaacaaggaggtgcgaaagagagtgtccgtgtgccccgagcccacttgcgtgcaccacgac

SEQ ID NO: 16939 - DNA, 319 bp, Glycine max
ctttcattctcattgccgtcacagagagagacaagaaacaatgaagtttaaccctagggtttcctcaagccgtcgcaagagccgcaaggctcacttcaccgctccgtcgagcgtgcgccgcgtcctgatgagcgcgcctctctccaccgatctccggtcaaagtacaacgtgcggtccattccggttcgcaaggacgacgaggttcaggtcgtgaggggaacctacaagggccgcgagggcaaagtggtccaggtctatcgccgcaagtgggtcatccacatcgagcgcatcacccgcgagaaggttaacggctccacc

SEQ ID NO: 16940 - DNA, 304 bp, Glycine max
gggaagaccaaagatgaactggggaattgactagtgcggcgcgctcctatgattgactgtagacagcggaggtggcggtggtggtgtagacacggcgtgacggggagcattttggatagatgatggtagtaagaggaagaagaagaagagttgtatcgtagaatgagccaaccaacggtgatacttgccactgcgagctatgatcacactgtgcgtttttgggaggccaagagtggccgttgctgccgcaccatccaatatcctgattcgcaagtaatccggctggagatgaccccggataaac

SEQ ID NO: 16941 - DNA, 502 bp, Glycine max
cccacgcgtccgggcaattggttcttgaagtctgctagaaatggtgtccaccccaacgcggagaagatgttgaaaccgagctttggtgagcctgggcagtgtttccccttgaaggatagtagagggtttgtgcagattaggctccgcactgccatcattcctgaggctgtcaccttggaacatgtagcgaagagtgttgcatatgatagatcaagtgctcctaaagactgcagggtctctggttggctgcaggagcataatgctgattctgcaattaatactgaaaagatgcatcttctggcagaatttacatatgaccttgagaagagcaatgctcaaacattcaacgtgttgaattcagcagcttctggtgtcatcaacacggtaaggcttgattttacgttcaaccatggaagcccttcacacacatgtatatatcgctttagagttcacggtcatgagcctgactcggttctatgttgcactggagttataatgttgc

SEQ ID NO: 16942 - DNA, 470 bp, Glycine max
taatgatcttgacgacagatttagatgtctgcaacgtcctaatgtgagaaaagataagtggggatagattgagaggggatagttcttcaactcaggcttggaagatgatgacatctatttgaatgtcagggaaactagtgatatctggcagcacggcatcattcttgaaggaatacaagtttggcctaaacatgtttgatccgtcaaatgattgtacttatgcctaacctgaatggatggtggcgtttgctacagtggatggacaccctgaataatacatactcattatctgtattaattctatttctgatttagcattcatgagatcatgaatacagctcattggttattatttcctgattgaatgtttgttttgcttaaaaatcacatgaatcttaaaattgtcattgatactcttatttgagccaatgcacagaaggcaaaactttgtgtatcaatgatttttatcc

SEQ ID NO: 16943 - DNA, 320 bp, Glycine max
accacgcgtccgcaatatattccattctctctgtgtatttccctacctctcccttcaaggttagtacgatgtcttctgttgttcttcctcgttctttccatgaattgtgtatgttcgttggtctatactatgattattcgattgtgtttcgttaggtttcatcgatcttcaatcctcatactcagattcagcttttattatctttacaacaacgttcttgatttgatgattctctaatctgagatttgctctaattagagctttctcatgccagatccctttacatcaagccttaattgatgattcattaatcgaagatt

SEQ ID NO: 16944 - DNA, 480 bp, Glycine max
cccacgcgtccgatacccctttcttttccttcgttcaagttagaatcttttgcttcactcagtgagccatggatgacgctgagttggacgccgcgttcgggtttccgtctggtttcccctacgagtttgactcggttggggccgaaccggctgattccggttcgaccggaaccgagagcagcgacgaggaagacttcttcgccgggttgactcgccggctgagtcacacctcactcaatgaaacaaggaaggaacaacaaaaactcaatgttcccatctgcaacagcgacaaaaccgagaatcagaagatgatggctcgcggtttggccgggtcgcctcagtctatactgagcggaatcggaagctggtcgggtcggagcggaaggtccggcgacggaagcccgaacgggtcttcccgtgttgcgtcgccaaccacgacgccgttttgaggctcaaacgacgcgttggagtgctgtatgc

SEQ ID NO: 16945 - DNA, 406 bp, Glycine max
gccttatccagtttacggtttcggttccttaccctacctttgacgtatcgaggccttaaatgtgggattaggtctgagcaatctggttggtagaacctttggtcttataaagacaaggtttatgagttgtattagacgatcaaattcctactgccttcgatcctttagctgatgcaaatgctgatgactcgggtgctgtgtcaaaggaggatgtgcatattctcgttcagcagcgaaatggtacgaaaagcctgacaaccgttcatggatggaaagaatatttcagctatcacacgatacttaaagacgttaagaaagagttctgttgccatggaacagtatgtcatgacccagaactaggacaggttattcaacttgaaggtgatcagatgaagagtgtttctac

SEQ ID NO: 16946 - DNA, 481 bp, Glycine max
cccacgcgtccgccctgcattagttaaatttttctgctctgcgtcttcttgggcctctcggccagaatccgagagcaaccctgacccctaaggccaggggtttttctcggcttcttcagattcctgaaatggcgtctgtttcagctttagccaagtacaagctcgtcttcttgggtgaccaatccgtgggcaaaaccagcatcatcactcgcttcatgtacgataaattcgataacacctatcaggctacaattggtattgattttctatcaaaaactatgtatctcgaagatcgaacttcgactgcagttgtgggatacagctggccaggaaagatttagaagtcttattccaagctacattagggactcatctgtagctgttattgtatatgatgttgcaagccggcagacttttctaaatactgcaaagtggattgaagaggtgcgaacagatagaggcagtgatgtcattattgttc

SEQ ID NO: 16947 - DNA, 353 bp, Glycine max
aagagttctttcaacatgcacacagccttaaccttcgctgcccgcaacgttgtgccattggcacccacagagagtgtctcccatattaccatctttcctaccaaattgaaagccccgcgctcctcacctcgttactctccgattagggttgcaaccgtggagcccgacacttcaactgtcgactacaactctgcgttctcagtgtttcctgcagaagcatgcgaaactgtaggaggggaagcctgcatggcggacatgtaccctgaaacgaagctacagccagacgctaagactccacgagtcgttacagagaacgttgagagagagtatcttgaatacgatgatcctaaaac

SEQ ID NO: 16948 - DNA, 441 bp, Glycine max
ctcatatctctctctctctctctctcgctttcgattcgacgcctgaacaagtgaacatgggccctaatcacctgttcttcacgcatttccgcgatggtgctattgcctcacgcattgagggccaacacagaggagctcttacttctgttattgcgattggtgctggaatatctggacttgcagcagcacgaagtctctatgatgcatcttttaaggtgactgtactggagtcacgagataggcttggtggtcgcattcatactgacttgtcatttggctgtccagttgacatgggagcctcatggctacatggaatttgtaatgagaatccattggcttcattgatacgtggcctggggctttcattatatcgtaccaatggtgacaactctgtcttatatgaccaataacttggaaaagtatatgctttttaacatcgat

SEQ ID NO: 16949 - DNA, 209 bp, Glycine max
aggagccaccgcttccaataaatgtagaccagatacatcgaacccgaatatgacacactaagggggatccaattaccgcagccaaagcctaccgaaaagatcagaagagcaaaagagaaacataaaaagagacacaaggaatgacagaacaccttactcaacctgcaccacgacccattacagcccaccaccagtaccagcagcacacc

SEQ ID NO: 16950 - DNA, 499 bp, Glycine max
aattattattaccacagcaaccatgttgccacttccaggtcgtgccggaagccggttgcccgacccgataaaaagaaacgggttgttccggcttctggcatgccgctggtggcggagacctcggcggcggtgtttaggagaccgagcagtgatgattccagggtggcgaggagcaatggtttggagaaggtgacgattctacggaggggccagtcgctcgattcggctgtgaagagcgacgtgtacgccggatcggcgttcgctgtgtctccgtcgccggaagcgcttcctctgccgtctttttcgacgaagaagcaggcctcggcggcggttgatgactccgccacgcgagatctgaggcgtctgctccggctcgaatgaaaacgagtcgggttgctgtcccggatttggatcgggtcggaccccgacaaatgatccatattacagtctctctttctcaccttattattatccagaatattctctttctcgtcttctc

SEQ ID NO: 16951 - DNA, 106 bp, Glycine max
cttggcatcgcatctccactctcccaagaaagaatcatcaatggcgatagagcacaaagacgatctcaaagacgagaagaaccctccaccactccacgaggatgac

SEQ ID NO: 16952 - DNA, 192 bp, Glycine max
cccacgcttccgtccaagcaccattacgccacctgccttacgcaatttacgggtccatctgtggtccaattcgagttcttcagcgacttcttcggatgaaacatccacttactgatgccagagatctcaagaagaagagcaattgaaatgactacgatcatattctgcataatgagcttatagcatagcatg

SEQ ID NO: 16953 - DNA, 494 bp, Glycine max
  modified_base (477)..(477): a, c, g, t, unknown, or other
catactctgattcattagtgaagaaaaatggcaaccatcatcgccggcatcccaactacatcgatcactcgcgcaggtcttgtgctcaaacgacctgttggagcctcgtcctctaccgttcttggattgccagcaatggctaaggcagggaaagtgaggtgctccatggaggaaaagccttcaagcagctcaaatatagggatgggggcatccttgttagcagctgcagttgccgcaaccatgtcaagcccagccatggctttggtggatgagagactcagcactgaaggaaccgggcttccctttgggcttagcaacaacctccttggttggatcctgtttggtgtcttcggtcttatatgggctctctactttgtctacgcttccacccttgaagaagatgaagagtctggattgtccctctaaacccccaagtggcgatgcatgcattgtagaaattgcaaagaattatctctntttctggtgattaaaaa

SEQ ID NO: 16954 - DNA, 182 bp, Glycine max
aacctttggagcttcgacgacctgccttccatggcaggagtcttctgaacaccttcatatgcgtctttatgtaaataaagctgcacgaattgtgatcgtgatgtaggtgatggaatccacaagaagaaaacccgacctggcaggagcagaagcaggggctctgtggcagagaactgctaatc

SEQ ID NO: 16955 - DNA, 113 bp, Glycine max
cccacgcgtccgggcaacggcatctaccaaggaaacaactgatagtgaatctcctaaagatggactctaaagcttctgcattgaaacttgcaattcttggaggtccatacagg

SEQ ID NO: 16956 - DNA, 259 bp, Glycine max
gaaactcatccagataaagactagacccaacaaacgacccgacatacaatactctaaatgaacctccgaacgatgcggccaaggctgtagtcacgggcctactgacaagccagcgtgagagtcatcctcaagagacatctagtagcaatgcttaaccccatgcttaaccattccttcaagcagaactgcattctgtacaggaacccttctcgaaccagtcctccaaccgcaatggccaacccctggtcctaacctggcc

SEQ ID NO: 16957 - DNA, 477 bp, Glycine max
cctttgatcactcttcttctcttgcggctagggttatagcgcagcttcttctagatttaaggaagatgggtaaggaaaaggttcacatcagtattgtggtcattggccatgtcgactctgggaaatccactaccactggtcacctgatttacaagcttggaggcattgacaagcgtgttattgagaggtttgagaaggaagctgctgagatgaacaagacgtctttcaagtatgcctgggtgctggacaaacttaaggctgagcgtgaaagaggaatcaccattgatattgctttgtggaagtttgaaacaacatagtattattgcacagttattgatgcgcctggacatagggatttcattaagaatatgattactgggacataccaagctgactgtgctgttcttatcattgattctaccactggtggctttgaagctggtatttccaaggattgacagactcttgaacatgctc

SEQ ID NO: 16958 - DNA, 295 bp, Glycine max
gtgagaccaagcaacggaaatggttgatgtcaatgatgctatttgttcgtaatcagaatggagctttagcagaagctataggaatttggaagcgcagttttgataaagaattttataggtatttattaattcccagatttgtttcttgtgtaattacaccacataccacggtcttccttggcttgcttgcaagacatgcaaacataaatttgattctgctggcgtttataaatggttttcaacttctcacaaatcattctgcccattgtgtcaatctccattctaaggtttcacc

SEQ ID NO: 16959 - DNA, 277 bp, Glycine max
gcgaaatccccaattaacaccgaaacctctgctacgcaaacactccctccaagctgacttggaatccctatgcatgcggtggcgtgaatctctgatccgccaaaaatgagtggaagggggatgtagagcgagctgagcagagcgagatccgatgccgacgccgacgccgattctcgacgacaaaagaggcctccgttcaatcgacaaagagagacaagcagatacggaagctccattccgatatacaacaatgccaatctcaaagtgctgctcggta

SEQ ID NO: 16960 - DNA, 472 bp, Glycine max
cccacgcgtccggaatcagagttttttttaccactatcaggtttaggattattatctgaaatggcatcggtgtctactcagcaacagttccgttacacgcagccaccatcaaaggtgcttcatttgagaaatttgccgtgggagtgcacagaggacgaactaattgaacttgggaagctatttgggaaagttgtgaacacaaagtgcaatgtcggagcaaatcggaatcaagcttttatagaatttgcagatttaaatcaggcgatcgcaatgatatcatattatgcctcatcgtcggagcctgctcaagtacgagggaaaactgtgtatcttcagtattccaataggcaagaaatagtgaataacataactgcagcagatgttgctggaaatgtactgttggtaacaatcgagggtgaagatgcaaggcttgtcagcattgatgttttacacttggtcttttcagcctttg

SEQ ID NO: 16961 - DNA, 98 bp, Glycine max
cccacgcgtccggaatcagagttttttctaccactatcaggtttacgattattatgtgaagtggtcatcctgtctactcagcttcatttcctttacac

SEQ ID NO: 16962 - DNA, 473 bp, Glycine max
cgcaagtggatggctatcaacccaaaggaatttgtgatgatgatgagattggttctgatgatgaagccacagataatgggaagatcaagcaccatattgaagaagaggaataagaagaaagataagaagagtgtgttggaaagaacaaattagctggctttttgggagagctgttttcatacactccactggcagttgtgagaagaactagaactaaaagcaagatttggccaacaactatgcccaaatgtatacttggtagttttagaaagattagaagtattgtatgctttggcaggaagaggcactattctcggagacttccatggagaccgcattaacaaatggtgttttctaaccgcacaacatatccaatgatggcagcagatgaaaaagccgaggtgtgaaaattttggttcctatgcaaatgatgtgcgtgtgaaaactgtattgctgttttgactgagatggca

SEQ ID NO: 16963 - DNA, 248 bp, Glycine max
  modified_base (63)..(63): a, c, g, t, unknown, or other
ggtttgtacagcgtttgctttgggggcgaaaaattcagccttttccgatttgcaccaaatagnacagagaacaacaccatttggtcagtcttctatgcttctgcctccaatctatggtttgttattcctgaattggtatgctcttcaattgatgcggttcgatttgaaaggattgagggggttgtttgttggaattggactcaaaattagggtatgtgtgttaggatcgtctcgtgtgaatcgattct

SEQ ID NO: 16964 - DNA, 210 bp, Glycine max
gtttgttgttgtaactcgttcttcttcttttgttgttctgtgtttgtgtttgttttttctctcacctgaaaatgtcttgctgcggtggtaactgtggttgcggaagctcctgcaagtgccgcaaccgctgccgaggcttcaagatgtacccagacttgagctacactgagtcaaccaccaccgagaccttggtcatgggagtggcacctg

SEQ ID NO: 16965 - DNA, 409 bp, Glycine max
cccacgcgtccggtttttccgactgtggcccagtttgccagctattgtagaatatactggcacatatacatatgaaggaagtggctttaaggctactgcagcccagcagtatggtgcatctcctttcttaagtggactgaaatccttgtcttccaaaccattccacaaagtttgttcacatattatccgcacagtggcagggtttgagatgtgttatgctgccaaaacttggcatggtggcttcttgggcatgatgatttttggtgctagtgaagtgagtagaaatgtggacttaggtgatgagactacaaccatgctgtgcaagtttgtggttcgtgcattcgattcatctattaccaaggagatcggatcagaccttcagggttggttggatgaccttactgatggt

SEQ ID NO: 16966 - DNA, 106 bp, Glycine max
gcgacgcacagcgtcagaacagaggcggcatcagccacgttcccgggcggggcaccgaaagagcatcgggaatgcccaggaggacacaaggctagacgccggcagc

SEQ ID NO: 16967 - DNA, 279 bp, Glycine max
cccacgcgtccgactagatggtgcttttaggattttccgtgaaatgcctgagagaaatgtggtatgctggagtgctgtaattgcaggctatgttcagaatgaccggtttattgatggatatgaattgatgaaaggatattctgaaagtaggtatgggggtgagtcaatctacctatgctagtgtattcaggtcttgtgcaggattatcggcatttaattggggcacacagttgcatggtcatgctctaaaatctgattttgcatatgacagtataattg

SEQ ID NO: 16968 - DNA, 356 bp, Glycine max
gtttctaaggatgaaattcctccagatgaatatgctttggaacttaatggcgttaccatagtagaaacagcaaaattaggccctcgcccagagaagcctattgagatatatgaatttgagagctagtccattttggtcgaaagtgttagagaaattgttgccattttggaccttgatgttcttttctatccttgtccaagaaatggcccaaatttccgtcgaaaggttctagagatgggtggcaaactgcagttcccctacatggttgacccaaacacaggcgcttcaatgtatgaatcagatgacataattcgggatttggttgacaaaaatggtgatggaaacgtttctctatc

SEQ ID NO: 16969 - DNA, 236 bp, Glycine max
gttgctccatggaggaataaccttattctgtgaaggaaagctgctctagctttttgttgatgggggcgtctctgatggcagctgccagcgctgcatccatgttttgttctttctggttcttggttttgtttattctgtgcactgttgggaccggtctttcctttgtcctcagcaacaatcttcttggttggatccttttctgcggctttttgcttatctggactctctattttgtc

SEQ ID NO: 16970 - DNA, 478 bp, Glycine max
gtttgagatcatgctggagagaagatgttcttgtcctttcttgttctgacagaatccttcggctatccttgcagcttctttctagatactcaagttggctgtcttatgtgctgactgtctcgcaaaagccatatcacaagcactagccctgggtgtgaatgggccgtttcagctgtcatagatgactttatttttgttattcatgatataacatatttggaggagcaggttcatggtgattaccttcaacatgtgcttcagcttttgtcttcatgctcccctgatgttctggaatcaataaggcagagcattttactgagtggtcaatcattaaaatctgtagaacctgtggtcattaaagcattggaggagtcactagttggataatcaagtgaagacttaagacaaatgaatgggataacagcaacctataggatgactaatagacctttacctgggaggcattcaccatatattt

SEQ ID NO: 16971 - DNA, 71 bp, Glycine max
aattccggtcacccaaccttcggcaaccttcctccattctatgaccgaatctaagccaaactacaaaaatg

SEQ ID NO: 16972 - DNA, 103 bp, Glycine max
gccctagatcgcgatctacaacgcgaacagtgccacaacacaacacagcatcaccataataacgacttgaccctgcctgaccttaacacccaccaccccgaga

SEQ ID NO: 16973 - DNA, 376 bp, Glycine max
cccacgcgtccggccgaaggttcatccaatctccgaaggccttcaccggattgcaaccatgtcgaggagaaaggttagagagccaaaggaggaaaacgtgactctgggcccagctgttagagatggtgaacatgtttttggagtcgctcgcatctttgcctccttcaatgacaccttcattcatgtcactgatctgtctgggagggaaacacttgtccgcatcactggcgggatgaaggttaaagctgacagagatgaatcatctccatatgctgctatgcttgctgcgcaagatgttgctgctagatgcaaggaacttggcataactgcttttcatattaaggctcctgccacaggtggaaacaagacaaaaaca

SEQ ID NO: 16974 - DNA, 418 bp, Glycine max
ctctgtcactttgcctacccactaagaaaaatcgatcctttcttatcttacttgcgcatcggttctcttcattcaattcaattttgttgttagtgaaataataatgaggggtagttgagcattcaaacaacccataccctcatttttatgtgtgggataccgtcggacaggtcggtgactccgggagctaaaccacttcttgtttgggatttgtagtagatttggcctaatatttgaattagaccgtgtagaattgcatctggcaataggttgttgagtagtacgcataacgcattgttttgtgttacaaatattcttaagcttttctggggaatttttttagtttgtgggatacaatacaatttgtagctttggttagtgattctccaagatgtcaaaatttgagggtgttattgtc

SEQ ID NO: 16975 - DNA, 492 bp, Glycine max
ccctttctttttttctatacattctttctcttccaccctctttcaaggctccacttttatggttccttgtaatttcttcatcaaagtatcaaacttgtcttctctctctctccttttacttcctctgcatatatgatatattcttccaaaatcctcatctaagggttaattttgttccggacaagtttttattattattattattattttttaaatttcagaatgatttacttataggtttctgatccaaggtttaagatgttatagtttccttgaattctcatctgggttcaacctgtttgatgttttgactgaatcagtttgaaatagtggtgattatctgataccaaacataaaagattcagctctttttcttgtttctttgtcacaagacttggattttgagaatctggaaacatgggttgttgtgcaagtaaagagtcagagccgcaacacaatggttacagacatgcttggactggtggtgtgcac

SEQ ID NO: 16976 - DNA, 357 bp, Glycine max
gccaaccaacttcttctcctttttctgcaatgggttgtttttgatcttcacaatccaagcctgatggtgagccaccccttcttttcaatcctctcaaaacctcttctttgcattccgatatttgtgaatctttttctattttatcatgggtcgctgtcaaaatcccttctttcttcttcttgtttcatggtattcgtgaacaagcatgtaatttttgctctaaaaaattgtactagtttttaagggggagagaatcatgaaatatagtgcataggacaaacaaatttaaaacctttctgttgggatatagatatattgccacattttgtattgaacaattgaagtcctaccctctgt

SEQ ID NO: 16977 - DNA, 205 bp, Glycine max
catcattgtattgtacagcacagccccaacttcttccttgtgttctgttctgttctgttcgagtctttcgctttctcttctctgtttccacgcgattctttcaattttcaatagggatttagtcacatgcttttgttacattctagattccttccttccttacttaaaaattcttatattatgcatcatttctcaccaaccacct

SEQ ID NO: 16978 - DNA, 278 bp, Glycine max
acatagaagagaaagaaagaaaacaaagaggagaaagaaagtagttgagggaggtacaaacagtttgtgcagattgttgagaatgcctttcaagaagcctaatgatcgcctcaggcaaaagctacatagcaagaaacgacggaggcaaattcgagatacaacctagaggactcaacattagttggggaaatgattctcggtactggaaaatgacagaacaaggtcctgcggagctgatccaagtatcatgaggggaggtatccggcgtggtaaactta

SEQ ID NO: 16979 - DNA, 334 bp, Glycine max
ttcaattacaacctaggaactctcacatcttcttactcttaattttctcttcagaccactgagataatggcaagcactcctagcattccatcacacataaaagcttgggcttattctgaatatgggaacacagaagagattctcaaatttgaatctaacatacctataccagacatcaaggaagaccaagtgctcatcaaggttgtggctgcggcccttaacccaatagattataagagggctcatgggtttttgaagaacactgattctccctttcctactgttccggggtactatgttgctggtgtggtggtcaaagtgggaagtcaagtga

SEQ ID NO: 16980 - DNA, 187 bp, Glycine max
cccacgcgtccgcccacgcgtccgaaaagaggggacggtgaagccggggcgagttcacgaaggatggctagggtgcaggctcagcctgccaatgcacatggtctagtggagcaggcataggcataaggcggcagaagggagcaggacaattcagaagatcgaccaaaatgacgagagctcgacggac

SEQ ID NO: 16981 - DNA, 276 bp, Glycine max
aaagattcaacaatggcctctgcttctgctactcttctcaagtcatctcctgttcttgacaagtgcgagtgggtcaaaggccagacccttcgccaacctctcgtgagatgtaacccttactcagcatcagcgtcataccatcaaagctgcttcctatgctgacgagctcgtcaaaaccgccaaaacagtggccttaccggtgcgtggtattttggcgagggatgagtcaaatgcaacctgcgggaagcgtttggcatctattgggttagagaacac

SEQ ID NO: 16982 - DNA, 479 bp, Glycine max
gtaaaggcgaaagactttaggtttggaattgggaattagggttgttcgcgtcacgaagatgatcgaggtggtgttgaacgatcgattggggaagaaggtgcgcgtgaagtgcaacgacgatgacaccatcgtttagctgaataagctggtggcggctcagacgggcacaagagccgacaagatccgcatccagaagtggtacaccatatacaaggatcacatcactctcaaggattacgagatccacgacggcatgggtctcgaactctactacaactaaacacaatgtgtgttttatgcatgatatattactatgatctgggaatgggatgaggcgccaaatgtaattttgacttgcgaaagtccctatgatttgaataatgtacattcccaaatgatattgggtttacataccgatgacaccctaagttgctttgtatatataacctatctgatgacttgttgctaagcttcattaa

SEQ ID NO: 16983 - DNA, 470 bp, Glycine max
gccacgcgtccggtagttgtccctgtcaagctagagaggcagctcaatggcatcaatcaagtggccattctgttgcataatgactgtctttatctctcccaggagattcttgggtttgcatttgagtatcgaacagactttccaagttccatgaaggagcatgctgtgtttgttgatttagctccaagatttcagctgttggcagaagaaatattgcagagacaagttcaccttgttatttataatttgaaggaggctatagatggtgctgatggatttcagaatactcatcagatgaaacagtttgagtcagctaaattcagcatagaccatgttgttatcattctggaaaaagtacatatcatatgggagccacttttgctgccttcaacttacaggagaagcatgtgtacagtcttagagtcaattttctcaaaaattgctagagatatacttctggtagatgacat

SEQ ID NO: 16984 - DNA, 455 bp, Glycine max
gccacgcgtccggcaaaaggccatataatttttttttatttgaaataatgtccgggatcatccacaagagtgaggagaccctccatgtgggagggcacaagaaagaggagcacaaaggagaacaccatggtgagcacaaaggtgaacacaaaggagaacaccatggtgagcacaaaggtgaacacaaaggagaacaacaccatggggagcacaaggagggacttgtggataagatcaaggacatgatccatggtgatggccatgacaagggtgagaaaaagaagaagatggacatgatgaagaaggagcttggacatgaccatcatggtcatagcagcagcattgacagtgattagatcttatatgttaagcaggtgtacggtacgatggttatgaggagcccgaatcccttttcctgcttaatgatataattcaaataaaatagcgattccgga

SEQ ID NO: 16985 - DNA, 390 bp, Glycine max
cccacgcgtccgcccacgcgtccgggaggggtacaccaaatgctaggctttttacaggatgctgataactggagaagatcaccaattaaggatgttactgaatctgatgatgatagtgggggacgaggatatagatcattgcatgattttgctgaaagtcgttatctactgaaacttagatctgcgtatactaatttggaacgtccagaaagtgtttgattgatcaacatcaagcaagtactgactaatttacttggagcaagtcctgcggattgcatgctcttgaatatggatatactttttggatatatagtcttacaggtgatcatttaatgagagatggtaccatatgcattggagagtggaaactattctttttgcgcaacatta

SEQ ID NO: 16986 - DNA, 348 bp, Glycine max
gtttggcctacgactccacgcgtggacctgcgaatctcccctgatcgcatctcaaatctgctatccgtggcttcatatcactcgacggggaccttcgcttgacccatctgaagatccagttgaatctggatctgatcgaaactgtactgactcaaatcctctgcagatctgacgcgcatgatcgccattctcactctgctcatcgtatacgtgcgtcagaaatgtctcttttaccgcaaggcgcactccttcaaatcactgagagttgcaacgattacctacaggaggagttctacgtgttccgagaaattgtcaactagtataactacgaggcgacggattcctagt

SEQ ID NO: 16987 - DNA, 107 bp, Glycine max
cccacgcgttcgggctctacgtgccgacactctcatcgtccaatcgcgaacgtcaaactacagagctatggggatctgaagcttatgttcaatgaccaaggacaagc

SEQ ID NO: 16988 - DNA, 408 bp, Glycine max
attggcgtctttgctcagtgaagatgcatctcaggatgctgctggaaaccctatgaacctttggagcttcgacgacctgccttccatggcaggagtcttctgaacaccttcatatccctttttatgaattgtgatcgtgatgttggtgatggaatccacagcaagaaaaccaacctgcttaaagcatatgtggagtttatttatcttgtagctaatgcagtataggactatatataggtttttatagggtatcctttgtgtgaaactcaagagacctcgttttcaggggattttctgtttgatgtccataaggattatcaattatgttatatatggtctgggatacagtcttgacttacagtttttaacttgggtgttatcattggtatggcaatttgattatgattt

SEQ ID NO: 16989 - DNA, 329 bp, Glycine max
atcctcctctgtctctctctctccaccattgccatggatccttacaagctgctgacatccagcgccttcaattctcccttctggactacaaattctggtgctactgtttggaacaacatcttctttttaacctatgtagctagaggtccaattctgcttgaggattatcatcttgtggagaagcttgcaaactttgacagggaacgtatcctagaacgtgttgtccatgccaggggagctagtgcaaagggtttctttgatgtcacacatgacatttctcacctgacatgtgcagatttccttcgagcccctgtagttcatacgcctgt

SEQ ID NO: 16990 - DNA, 445 bp, Glycine max
agcgagcgaggtagggttttcgttgttcccccgtctttgaattcagttcgcgacgatggggtccatccccgatccaggcgagttgagcgagttgactcagccgagcttcgacgagttccagcgccaaacttccctcatgaccagctgcaccctcctctggaaggagctctccgaccacttctcctccctcgagcaagacctcaaccacaaatccgaagccctcaaacgcaagattcgcaccctcgacaacactacttccgactccctccgcctcctcgatcgccgcgaaacctccctcgacgccacgctccagatcgccctccgcacgctcgacacgcgccgcaccgctgccctctccgccctcctcaccgacgccgacgacatcatcaacagctcccccgacggtgaggtcgacgacaccaccggcctcatcctcaaactcaag

SEQ ID NO: 16991 - DNA, 454 bp, Glycine max
gaaacaactaagggttgctgctcgcatattatctatttcaactgatgaaacgtttacttcagattggtgtgacatgctacctgatgaagctgaggttctagttttaaatcttaactctagccagtacccattaccgaagttcacagaaaatatgagcaaacttaaagttctgatagtcacaaattatggtttccatcgttcagaattaaacaattttgagctacttggttctttatctaacttgaaaagaatcagattggaaaaggtttcagtcccttccctctgcatattgaagaatctgcgaaaattgtcccttcatatgtgtaatacaaggcaagcttttgaaaactgttctatccaaatctcagatgcaatgccaaatcttgtggagatgagcattgactattgtaatgatctggttaaattgcccgatgggctgagtaacatcacccca

SEQ ID NO: 16992 - DNA, 422 bp, Glycine max
  modified_base (197)..(197): a, c, g, t, unknown, or other
gatgaattgaacccaaatactaacgtggtttctcttcaccgattccctttatatacactttttcaattacagttacaggtaatggattaaacaattattagtcggttaataaacacactctctctctactaattctcatcgcattccttttcctctttctccttccaattgagaattcgtttctctaattgacgcanagttcacagtgaaattagtgcaatggaagcggatttcgtcaccagtgacatgctcacactcacgcaggacgctttttacgccaacgataatgatgatgtagctgttgaaggggaaagatgtggaatatgtatggatatggttattgacaggggacttctggattgctgtcagcactggttctgctttgtatgcattgacaactgggctactatcactaatctttg

SEQ ID NO: 16993 - DNA, 499 bp, Glycine max
ggcaactacatccgaccctgcttccatcaacccggccaacgcgcttttgggcatgcccgggtggaaacccggtccccatttccaggatgatatgaagagctatgtgaatgaaggggtgagggtgttggtacatgggaagagcatagttgcggaagatgagttggacaagaggtgggaagaagttactggggaggttattgatgaagtgatcttcttcagcaagcacactgctgccttcaacaagcctgccctgactgttcaccctattggagttcctcatttgcgccaaggcgatgttcccccccaaggcggcagacctggatgggcagctcttccaaatcctaggatggggccttggcttcgccttttgaaaaaccttgcccaagctcataatcttgtccctgaatttgagattactttagaggccactcaccatggaccgttgaccaataagccaaccatgtttttggagattggtagtactgaaaactattggaag

SEQ ID NO: 16994 - DNA, 284 bp, Glycine max
aaaatctttctatataaaaccatgcataaaatggtgccaaaaagataaaggtggatcgtgactagtgggagatttttaagggatggaatcaacaaatttcatgctccaagccggatgtgaccactcaacaccagctgttaaatattttataggtctttttaacagctattaaagaggtagtgaaagatgagggaattagaaagaaggactagtgtatttgtatgtgtaagtacattttgtctttttacttttaaatgagggagttaaattgaaacccatatggc

SEQ ID NO: 16995 - DNA, 442 bp, Glycine max
gttagctacctaaaccctagtctccatacatcaactcgagaggctaaagagactgcaacgttgtgctgtccgtcttgaccgagccagagctatgactaggtccttgattttgccctgtaaaactaatcccaatcacaacagaaataatcaatggcaccgaaacagaccaaggctgataagaagatctcttacgatgctaaactgagcgacctaatggaggagtaccgccaaatcctcgaagaaaactccgacaacttgggatcgaaccagctccagaacattcgcaagggtctacgctgcgactctgttgtgctcatggggaagaacaccatgatgaaacgctatgacaggatgcacgctgagaaaaccggaaacaatgcctatctcaaccttatccccctccttgtcggcaatgtcggattgattttcaccaacggtgacc

SEQ ID NO: 16996 - DNA, 101 bp, Glycine max
  modified_base (22)..(22): a, c, g, t, unknown, or other
cccacgcgtccggaatcagagnattcttgaccactatcacgctcagggatgggagtcttaaggggcgtcggtgtctactcatcaacagttccgttacacgc

SEQ ID NO: 16997 - DNA, 284 bp, Glycine max
acgctccagaaaaaatggcggtgcctctactctcgaagaagatcgtgaagaagaggctgagggagtagcaagaggcctcaaagtgacaggaagattgctgtgaagacaaactggtgaagaccaaggagtagggagaaagagtaagaagagaaagttcaagggatgcactctgatgccgaacattggttatgctttagacaagaagacccgccactatctaccgagtggagtcaagaaatttgttgttcacaatgtgaacgatttggaactgctcatgaagcaca

SEQ ID NO: 16998 - DNA, 478 bp, Glycine max
aatacttcaaacacaacaacttctccagcttcgttagacagttaaacacttacggtttcaggaaggttgatccagatcgctgggaatttgcaaatgagggttttttgaagggtcaaaagcacttgcttaggagtattacacgacgaaaacctgcccatggtcaaaatcatcaacagcctcagcaaccgcatggacagagttcatcggtaggggcatgtgtagaagttgggaagtttgggcttgaggaagaggttgagaggcttaaaagagataagaatgtgctcatgcaagagcttgtgaggttgaggcagcagcaacagaccactgataaccagctgcaaacaatggttcagcgccttcagggaatggagcaacgacagcagcaaatgatgtcattccttgccaaagctgtccagagccctggcttctttgctcagtttgtacaacagcaaaatgacagcaataggcgcataactga

SEQ ID NO: 16999 - DNA, 332 bp, Glycine max
gcgcccacgcgtccgcccacgcgtccgggagtcataacagtgaagaataaaaaagatgaaacaacatttactgttcactttcctgctagtggagaaacgttggttgttagagcttggcatctccgtccatcccttatctggaaggatggaaaatggattgaatcttacaaagtggggacaaatgacagttctacccatgagggtgatacaccaaatgaaaaacgacctaaattgggtagtcatgtggtagatgtaaaagggaaagacaagatgtcaaaaggcattggtgctgtggagtcggcaaaacctgatgagatgacattacttaattt

SEQ ID NO: 17000 - DNA, 103 bp, Glycine max
gtgcgatcccagtgttagtgtgtatttactctctgctcactccgggatcgatattgtcaagaacagatcgaatagccgttcatcgatttgtaggatctgtgag

SEQ ID NO: 17001 - DNA, 446 bp, Glycine max
tgtaaataaaatatttttggagaataaatttgatgctgagatgcactttgctgctgttgcatatgtgggagagagcacactggaccctcttaagtattatcacagtattacgtggaataccttgttggtattggagtctatggctaaatatggtgtgaagacattaatatattctagtacatgtgcaacgtatggggaacctgaaaagatgcctattatagaaataacagaacagaaaccaattaatccatacggaaaagccaagaagatggcagaagatatcatctttgatttttccaaaaattctaagatggcagtaatgattctgagatacttcaatgtgattggatcagacccagagggcatactaggtgaggctccaagacctgaacttcgagaacatggtcgaatttctggtgcctgctttgatgcagctcgtggtatta

SEQ ID NO: 17002 - DNA, 455 bp, Glycine max
attcaatccattctaaacaactttcctcatttacaaagcctccacttacaaaaaagaaaaaaatgcaccatcaatgatctgtgaacaagggaaaccacacacatagctttaattcgatctaattgcttcatggaggaccaaccattatcatcaaaatcaaagactgctgctttggatcaaacccttcattcaattgggtttgaaattgaagacttgtcaccacaaaaaatctctggtcgtctacctgtcacccagaaatgctgccagccattcaaggtgctttatggaggggtatcagcattgatagcagagtctttggcaagcatgggagcacacatggcttctggttacaaaagagtggctggaattcaactaagcatcaaccatttgaaaagagcagagattggtgacttggtctacgctgaagctacacctttaaatgtctgcaaaaccat

SEQ ID NO: 17003 - DNA, 278 bp, Glycine max
tccacgcgtccgagcgagccaatttgttgcaatggatgcgcatcctagcttgtaaggtatctagagactgctcttaaacgccttcgatgtcaaactgtagtagtgccctgcatttctaggtcgtaggtaccggatggagcgaaaatataatgaacagccatatagagaccagttctgcttctgcgtttaattgacacagaaagaagccggatgtcacctttacagtgcaaatacaaattaaatcagacggtaaaatcactgagaatgctgaaggtcct

SEQ ID NO: 17004 - DNA, 177 bp, Glycine max
ttcccgttcgaccacgcgtccgattcaatccattctaaacagctattctcatttacacagactacactttcgataagaataagggcggttctgattgccgttcatagaaggggaagatcagatattgatatgatggttactaagacatacatggctgagctgtacactgctattaaa

SEQ ID NO: 17005 - DNA, 436 bp, Glycine max
aagattaacccagactcagctaaaggctactttttactaggaatgtcaagggctatgttgggactatgggaagagcatcaagtgaccttcacgtggcttcaaagttagattacgatgaatagattagtatggctcttaaaaaggttgaacctaatgcccttaaaatcgatgagcatatgataaaatatgaacgcttaagaaagcaaaagcaacagaaaagagctcctatcaagactgaagcttctattaagaaggagcaagaaactgaagcccaagtacaagcagcattatctgctttaaaagatgggcaagtcatgggtattcactctagtggtgaattggaaaagaagttaaatgctgtatcaaagacattacgcttggcgatcctgtattttactgcaacatggtgtggcccttgatgttcattttccctatt

SEQ ID NO: 17006 - DNA, 441 bp, Glycine max
cccacgcgtccggcaaaatattacggagaactcagttagaatattggtggtttttcttggtgttaccaagggcgaggatggttctctctccaaccaagacaagtcaaaggttttatttacaacgtatatggcatttacaatatatgcttctggggatgtcattatagaatgcaatgtgaaaccaaaccctgatcttcctcctttgccacgtgtgggaatctagttaaatgtggaaaagtctttggatcaagtaacttggtatggaagaggaccatttgagtgttatccagatagaaaagctgcagccctggttgcagtctatgaacataatgttagtgagttgcatgttccttatattgttccgtgggaatcttcatgtaaggcagatgttagatgggcaacatttagatacaaagatgcttttggaatatatgcttctaa

SEQ ID NO: 17007 - DNA, 443 bp, Glycine max
gccaaatactaatgtttcaaataccctgccaaatactaccatcatatccatggctgtgcaaattgtaggttttgatggggttgagatccatggggctcatggctacctgcttgagcaatttatgaaagataaagtgaatgaccgaacagacgaatatggtggatcccttgagaaccgctgccgatttgctttggaagttgttgaagctgttgttaatgagataggggcggacagagttggaattaggctatcgccattcgcagaatattcagagtctggagactctaatccaaaagaattggggctttacatgatgaatgccctcaataagtatggtattctttactgtcacatggtggaaccaagaatgaagactgttggagaaaaaactgaatgccctcataacctggtgcctatgagaaaggccttcaatggcactttta

SEQ ID NO: 17008 - DNA, 384 bp, Glycine max
accgcataagagagaaacacataaatgctgataatcgatgctagcgcgaagacaattgctcgaacagtgtcgttggaggcgccaccattggggattagggttctgcctcggctctaccacgagagggtggtggaccactacgataacccccgcaacgttggatccttcgacaagaacgaccccaccgtcggaacgggtcttgtctgagcacccgcgtgtggtgacgtcatgaaactccagatttaagttgatgacaaaacggtgaagatcgtcaatgcttgctttataaccttcgggagtggatccgctatatgttgcttcttctaaactactgaatgggttaatgaaaagcaaatttatgaagtttttgaccattaaaaacac

SEQ ID NO: 17009 - DNA, 469 bp, Glycine max
  modified_base (424)..(424): a, c, g, t, unknown, or other
cccacgcgtccgcaaaaacactcatcactctatctctctcaaaagtgaaaatgtgtgggggtgctataatttctgatttcatagacgtgaatttgaacagtggtcggaaattgaccacccacaacacccatcatcagcttcacactttctctgatttccacgccacctcttcttccaaacatcaaccatcctaccaggatccaaacctccctaggcctcctccgcttccaaacaaccaaggagtgaagttgaaggctttgactttgaacactggtcgagtacggaagaacgtgtacagaggaataaggcaaaagccatgggggaagtgggctgcagaaataagggacccacgtaagggtgtgcgtgtgtggctgggtactttcaacactgctgaagaagctgctcgtgcttacgacaatgccgncaagcgcattcgccgagacaaggccaagctcaactttcccgacag

SEQ ID NO: 17010 - DNA, 391 bp, Glycine max
  modified_base (140)..(140): a, c, g, t, unknown, or other
ctctgcctaaaaggattgaaagatgggtcaagcactaggttgctatcaagttgatcagtcagatgtggctatcaaggagcattttggaaaatttgatgatgtcctagaacctggatgttattgactgccttgagtgtctngggtaccagattgctggtagtttgtcactgcgtgtgcagcaacttgatgttcgatgtgagacgaaaaccaaggacaatatctttgtcactgtggttgcatctgtgcaataccgagctgtgtctgagaaagcatctgatgcattctataggcttaccaacacaatggagcagatccaatcatatgtttttgatgtcatcagggccagtgtaccaaagttggaattggattctgtctttgagcagaagaatga

SEQ ID NO: 17011 - DNA, 474 bp, Glycine max
ccttggtcaagccctctaggccacttctctacaaccccattaagaattatgggcaagcaagcaaaggaaagcatagccgtttgatggaagagagggcaccttccacagctgaagaatttgagagggttgctcgatggagaatgccaaggaagctcaaaagggggtggcaagtcagagtcttggcaaggcaattgatggtgcagaagaggcttcaataggtaagtcaaaggttgaatcagttaagaataggtacaaagggcatgaatgaaagcagggtttggttaccacaggagggggtgattattatatatataggaaccttttgtgctagctgacttgaaactgtgacatatatagctgttggatatgcagccagagaataagggagtgtcttgtatttccaaaaagcttgtttaattgccagtgtttttgaagcataaagagaccaaacaattgaaaacttttaatctgttt

SEQ ID NO: 17012 - DNA, 337 bp, Glycine max
gtaaacaaaatacgtttgaccggtggggaaccaactattagaaaagatattgaagacatatgtttggaactgtcgaccttgaagggactgaagacattgtcaatgacagtccaagtgatattgccctgagagagagaactttcaaagctgaaagaatgtgggcttaattctgtaaacattagtttagacactctagtaccagcaaagtttgagttgatgacaagacgcaaagggcatgaaaaagtaatggattcaattaatgcaaccatagaccttggatttaagccagttaagggcaatcgtgttgtaatgcgtggatttaatgatgatgaaatct

SEQ ID NO: 17013 - DNA, 266 bp, Glycine max
  modified_base (120)..(120): a, c, g, t, unknown, or other
gccacgcgttcggcggtgacatagtgtatgttatataactgaatcatagtctctgttttagggacagccttctgaatgttcagcatcttaacattcaacacttacgatctcccttaattnagttatggaaaaataaatttgtgccgatcacatttcctgaaacactggcttatacacacagatcatcatgttaaatagtatgttgtatgcttgtcggaactgccatggaagggaacatgattcttactctatggatggcttcttgt

SEQ ID NO: 17014 - DNA, 363 bp, Glycine max
cccacgcgtccgcccacgcgtccggcagcagccacacttcttcgccgtttcagctgaagagccatccgcaggtaagcaatggttaagcataataatgttatcctcattgtgaaacatcggaaactactggcagaactatgtgaagacttggtttaatcaaccagcccgaaagaccagaagacggttggctcggcagaagaaggctgtcaagagtttccccaggcctactgctggatctctcaggcctattgttcatggccagactctgaaatacaacatgaaagtcagagccgtgagaggattttcactggaagaatagaatgctgcatgaattgcgaagaaacgtgctccagctattgggat

SEQ ID NO: 17015 - DNA, 262 bp, Glycine max
gcattttcagaggaaaatggcgggtacggtttcgactttgttcttcttcgggtttatggtttctctgggttgtccttttcagatctccgctgatgaatgcgcagatacggagttcgcactcacattggatcactctaactgttacgacactgacagcaagcacgatttcatcgtcgtcgagttctacgccccatggtgtggtcactgtaagaagcttgctccggagtatgagaaagctgcttctatcttgagtagtcatgat

SEQ ID NO: 17016 - DNA, 432 bp, Glycine max
gcagatcttcattttctatgcacagggaaaccacttggttcaacatggattagagaaactcgtctaaagaatgacttggatgctgatggaaggatcaaggtcgatgagcacttgagagtgaagggcaagagcaacatttttgcaattggagatattacagatgttcaagaaatcaaacaagggatgtatgcaagtgctcatgctcaagtggttgccaagaacctgaagctattgatagagggaggaggcaaagagcgtaagttgggaacatacaaggcacagccaccaatatctatagtttcacttggaaggaaaatagctgttgcacagttcccattcatgactgtgcttggaaggcttcctggcatgatcaagtcaggggatttggttgttgggaaaaccaaaaaggaattaagactcgaacctaatgtt

SEQ ID NO: 17017 - DNA, 450 bp, Glycine max
atctggagggcaagtggcttcatcacccccatttttctgtggatctccacctagcagggcttcaaaccctgtgatccaagatgagcaatttggtagtaatggtaatgagaattttggtgcattttccttggcacccccttcaccatcttcctcagcaagaggctgtgttaggatgaagtttggtcacaccccagctgcagtgaggattgaaggttttaattgccttagcagggataggcgcaactgcagcatttctgctgttgcttaattcaattttaaaccatgaaaaagaaaagaaaaggggattaaagaatcacaaaagttctaagagcagaggagatttttgggactgaggagctaatcttaatttcaatcttattgtattatatgtatataccgttgttcacgagttaatttaaggtgtcatgtataattgagagaaggtgggaa

SEQ ID NO: 17018 - DNA, 439 bp, Glycine max
accacgcgttcgcccacgcgtacgaccacgctttcgctcacgcgttcgaccacgcgtccgttgtttgttgttgatactcgttcttcttcttttgttgttctgtgtttgtgtttgtttttcatctcacctgacaatgtcttgctgctgtggttactgtggttgctgaagctcctgcaagtgcggtaacagctgccgaggctgcaagatgtacccagacttgagctacactgagtcaaccaccacctggaccttggtcatgggagtggcacctgttaaggctcaatttgagggtgctgaaatgggtgtgcccgctgagaacgattgctgcaaatgtggaccaaactgctactgcaacccttgcacttgcaagtgacgtattgtgagatcaagctatacgcatagatagcccttaattaggaataatgagtatctattaatg

SEQ ID NO: 17019 - DNA, 390 bp, Glycine max
gcgtggatcacgcgaccacccttcagaggaagagtaccgtggatcttgactcatcatgcgggctcgcggtggcaccaaccgccgggtcagcactccaccggcgcatccgactccagatgcttccaccaagctcagttacaaatgctccgtttgcaacaagaagcttgccctctgtaccaagcgctcggtggacacaaggccagtcaccatagactcgctgactccggcgaccaagaccaacccaccatgacctacttcggcggcagcttcatcaacaccgactccagaggtaggacccacgaatgctacatctgccacaagtcctttctcaccagacaggccctctgcggacacagacgacgtcactacgaaggtaacagtaatggaaat

SEQ ID NO: 17020 - DNA, 402 bp, Glycine max
ctacagatcaagcgcgatcttgaacgaagacaccatgtacttgccatcttaaatgggctgttttcagttccagaaaccgtatcatcacacgcagtacgtgaagacggaggatcacaattgcttgagctccgacgaggcctgcagtttcttctccgatgaacaagcaccgaccctgcagtggtactgtccagaacattcaagctgagatagaagaaacatgggaaaattggaaaccgctttcagaaattattgtttaatatgtagcacggttgtgttgaacactgtttattgaggttaaatttgtaaaaaaaggtttccacttgccaacataggctgattgaaggttgaaaatgaaacactgtgcataagatagagttacgaatgagtgaacagatatcaatg

SEQ ID NO: 17021 - DNA, 238 bp, Glycine max
attggaagaaagttcgaagataaggaagttcaaagagatatgaagcttgatcctggtaagattgtcaacacggatggaaaaccttcctaccaatggaaaataaaggttgggggacccaaggtttcaacccctaagaaaccagtgccatgattctgactaagattaaagaaactgcggaagcattccatggaaagaaaatttatgatgccgtggatactgtaccagcttacttcaatga

SEQ ID NO: 17022 - DNA, 394 bp, Glycine max
cacaaacacgagcgagagcagcgagctaaggaaaggaaaaaacagcttgttcgagaggtgaccccaaagatcttctctttacgtgctcatgtgaggacccaattcttcttctccttcttccggtgcttggatctgcacttttcggcgttttctttcattctcgcaagcgaactcggtcacgggttaattccaattttgcgcgctggtttttcccgcacgacaaaaagctttcgggaagtatttgtagggtggtcgaaggtcgagaaaggttctagattgacgtggctttggttcgtttgaatcctgaaggggtttgtttgttctaaacctacaattcggccacttcatcttatgaaagattgactcatggatcctgaatgcataaagtttgtat

SEQ ID NO: 17023 - DNA, 94 bp, Glycine max
ataacgagatcgttctaagatcaaacagttcttagcgatgttgcccataacgctgggctaattgctcacacaaacggcgtgtcatatcttcaca

SEQ ID NO: 17024 - DNA, 374 bp, Glycine max
acccacgcgtccggccacgcgtccgtccacgcgtacacatattacccaatcccctcatattatctaggcgtctcttacaccagcatgtcctacaccgcgcctgcggtgcttcccagctataacactacccagcccggacacgaccaggcatgctacaccaccattatagctcctaccaacatcccggacttgccctcctttatcgacaacctgtgcaactcccttcgccacggccttcaacagcaccgatcctgatccgatctcgactacctttcatcgatctctaaacccgagtcctactcctaagccaccctccgtgtccgcaaaaacttcttctactttccgcgtcaactactacgctgtcgtttcactca

SEQ ID NO: 17025 - DNA, 445 bp, Glycine max
  modified_base (413)..(413): a, c, g, t, unknown, or other
cccacgcgtccgattcgagaatggcctcgatatgtgaaggtgcctttccccattgcaaaggcattggcaacaccaagagaaatattactaaacaaggtcccctttccactacctgttcctgagatattaaatctggataagatccaggctttgactacagataccgttgtttcagaaaatgctttgactttcaatgatcttggaattgttcctcacaagctgaagggataccctattgagtttcttatctcatataggaaaggaggcccacaatttggttctactatcagtgaaagggtcactccagattcttggccgtaagattctttggatgtttgatcctgaatcatttttctgtcttgcttgtactaccaccatttaatttcactatttaaaaaaatctgaaatgcttntatatcttcctttcataatctgtagaatatgt

SEQ ID NO: 17026 - DNA, 451 bp, Glycine max
ctggtcctcttcctcctcactatctgcgccgttcttcctcccctgtttcgttccactgagcaacacgctatcagttgcatgacataatacagagtgttcaattagagcataatgggatccaaaaatgcaaatgggaagaaccacaaggacaaaaggaacaaatttaaggataatttgagttctagttattcatcacccagtgatgccaaggttatcctcatcagtgatcctcgatattcaaaggctcacacggatcctcggttccgtgaggctccaaagcgtgaaacgaaggtggctgttgactctcgcttcaaccgcatgttcactcacaagagttttttgccctcttctgctcctgttgacaagagaggcaagcccaagaacaacccaacctctcagcttggttctctgcgccattactacaaaattgatgaaaaggaagttgagcaga

SEQ ID NO: 17027 - DNA, 193 bp, Glycine max
ctggatctcttactccgcactattcaaggcggtcaccatcgcgtgtggcgacctactgaggcgcccagctgtcagccgcttatcatctcacaaagcgtgcacttgaagcgctcagcaaccctgagctgcctgttggcagacccgcaccggctaataggacaactgtactgatagctctggtgctgattgttga

SEQ ID NO: 17028 - DNA, 376 bp, Glycine max
ataaaaggataattactaactatctgagcacgatcttactgccctgttacgatccactgagggacacgctatcagttgcgtgacataatacaaagggttcaattagagcataatgggatccaaaaatgcaaatgggaagaaccacaaggtcaaatggaacaaatttaaggataatttgagttctagttattcatcacccagtgatgccaaggttatcctcatcagtgatcctcgatattcataaggctcacacggatccttggtaccgggaggcttcaaagcgtgaaacgaacgtggctgttgactctcgcttcaaccgcatgttcacttacaaaagttttttgcccttttttgctcatgttgacaagagaggcaa

SEQ ID NO: 17029 - DNA, 310 bp, Glycine max
ggccaagcttagtaaactattcttattctttgttctagagagatcagggaatgtggagattggggtgaaatgagctagtattcggattggatcttggtgtatagagaacataaaaaaaaatggagataaggatttttgtgtcgcagtaagtaaaaagtaagccgaatgatggatgataggatattgtatggttaatgtagttgtttatggaaaattcttggtccattgctattctagtatgaattcttcatatatatttgaatataccaacttttgcttttcaattcaaaggagtcaattgaatgaaaaa

SEQ ID NO: 17030 - DNA, 311 bp, Glycine max
gacacagtcatgtgcactactggcactgtgtctggcttgcactccaacacagatgcgatcaggcaaaatgacattgaaaactggtggatcgtctataattggagaacgcatagtgcaccttttcaatgttcgtgtgatcccaaatatctaaacatgccaagtgaaagagcgaagaaaagtctaagacaatgtctgggatcagttacacgattgatgagacccttcatgtgtgatgccacaagaaagatgaagagcacacatggaagcaacaccatggtggataattcaaaggggagcatcattgtgaacac

SEQ ID NO: 17031 - DNA, 343 bp, Glycine max
gaaagtgagtcttcagagtctctgtcttctttatactttcctcatcaccaaccttctcaaacagttctgaaggatctaataatggttcacatgcttggccttgtttgtacttctaaaggaacatttgctgactgtttgccacatgtggtaacagagctgtgcaatttaggtatcatttctgactcatcacgcgatatggcatctgaaccaccttgcatattcaacaaaaccttcaatcgtgttttccagaaacacctggctttatctataatatgtcatttttggaaacctgatattggacgcttaaacacaacttttcatggttctccatatttcaatgatt

SEQ ID NO: 17032 - DNA, 432 bp, Glycine max
cacccttctttccttttctgcttttcgatctgttgtgttttctgtttcttattgtgatattctcgtgtcgaataataattaaatgtgtttgattgttgatttttgttgttcagatattttaccttcacatgtattgttgataccaaaaacaaaacaagccaagtgaaagagagaagaaaagtcaaagacaatgtcagggatcattcacaagattgaggagacccttcatgtgggaggccacaagaaggaggaggagcacaagggtgagcagcaccatggtggagaatacaaaggggagcatcatggtgaacacagtactgaatacaaaggagagcatcatgttggtgagcacaagccggagcaccatggaggagaagagcacaaagaggggttcctagacaagatcaaggacaagatccacggcgaggaagg

SEQ ID NO: 17033 - DNA, 400 bp, Glycine max
cccacgcgttcggtccaataatactgaaattatgctcacaaaggttaagatgccacttcctgatattaaggctgcagtactggctatggatgattcagtgttagatgttgatcatgtggaaaatctcattaaattttgtcctaccaaagaggaaatagagcttttaaagggatacaccggtgataaggagaatttggggaagtgtgaaaagtattttttggaggtgatgaaagtgccaatagtggagtcaaaattcagatgtttctctttcaagattcactttaggactcacaattcagagttttaagaagagcttaaacacagtgaactctgcctgtgaagaagtcccaaacttattcaaactgaatgagattttaatgaaattctttatttgtgtata

SEQ ID NO: 17034 - DNA, 412 bp, Glycine max
cccacgcgtccgctggtctctggcttccttggtacgggaagaactcaatcttgtccatttccctttgggtgttctttcttcgatctcttcaccttcctttcgaccactctcttatcaccgctcgctttcttaactagagccctctccgttgagtgacgagttcgtgaatattcgcttgagatttgactgcgaagctggttttagagggtttctccaggtgtggtttgatttacagtttctgatgctgaagaaataaaaaagcttgaaggcttttgctcttctgtgtgaaaaatgttggaaagtggtgcgaaattcccaggaataatagatctcaacaaaaattataacaactactatgatttctctcaaagcttttaccataagcctggggagggtaccaatatgtcaattg

SEQ ID NO: 17035 - DNA, 445 bp, Glycine max
  modified_base (374)..(374): a, c, g, t, unknown, or other
ctctctctctctcttcttcttcttcttcttcttgcacgtattgttctaatccacaaaaatgatggccttaaattacaacattgccctcgccttctctacggttctcacgctgcttctccttcccttaccaacccttggggagctcgtgcaggagcagccactagtcctcaagtaccacaacggccaactcctgaaggggcgcatcaccgtcaatctcatctggtacggcaccttcaccccgatccaacggtccataatcgtggacttcataaactcactaagcagcgcgccaaacgcgccgcttccatcgactgccacgtggtggaaaaccacggagaagtacaaggggggaggatcctctgcgctcgtcgtanggaagcagttcctacactcggcttactcgttagggaaaaatctcaaagggaaagacgtcctcgcactcgcg

SEQ ID NO: 17036 - DNA, 180 bp, Glycine max
accacgcttgataaagatctataacaactccttacatgtataatcacaaggatattaatctttccatgcgtattatcattgcttgagcgttgagagtacacttgacccaaggattgtcaactccagtctagatactaaaggagagactaatgcagatgccaagttcaatgccacatatat

SEQ ID NO: 17037 - DNA, 445 bp, Glycine max
ggtgaagtcaacaaagaaagaaaaaaagctttctccgagaaagcttctgttcacgtcagggtccggggtaggcttcttcattgagattgggttggtgttcagtgtgaatgcatttccagtgagataagagaaaaggaacgaggggaagaagcgacttatattaagaaatattaatatacttaatttaatattaatgttcgggtacccccctccggctcgtagttgagaagagctttcgtttaggaaagggctaaatgggtgcgatccctctcgttgagagtcaagggtctcctggagtagaatgcacatcctggatctattaagccggcaagggttcagcattggctttcacgaccgcaaaggggccatctttcagtcggagtagataagatagatatacttaatttaatatcttctattatatattgtaatattataaagaaaa

SEQ ID NO: 17038 - DNA, 443 bp, Glycine max
tgtccatccaaaccttaaaaagattcagtgaagaacaacgttaatggcatctcttggtgtgcaagcagttcatcctcctccattaacatccacctccgacccacctcctctttttgatggcaccaccaggttgtacatcagttattcttgcccctatgcacaacgtgtatggatcgctcggaacttcaagggactaaaagacaagatcaatttggtccctataaaccttcaagacaggccagcttggtataaggagaaagtctaccctgaaaataaggtgccatccttggagcacaatggcaaggtgttgggagaaagtcttgatttgatcaaatatgtagatgaaaactttgaagggacacctttgtttcccagagatcctgccaagaaagagttcggagagcaattgatatcccatgttgatacattcagcagagacctgt

SEQ ID NO: 17039 - DNA, 378 bp, Glycine max
cccacgcgtacgcccacgcgtgcgctggtctagaaaattcagtgctgaaacatggcttcggctactctctctgtagccaaaccagaccttcaggcaaatgggaaaggcttctctgaattctctggcctccgaagctcatcaggcttccttcccttttctagaaaatcttcagaggatttccattctgacattgccttccagacctatgcagttggaagcagtggaggatacacgaagggtgtgacagaagcaaaactgaaggttgccataaacgggtgtggaaagattggaaggaacttcttgaggtgctggcacggtcgcaaagactcccctcttgatgtcattgccatcaacgacaccggcggcgtgaaacaagcc

SEQ ID NO: 17040 - DNA, 443 bp, Glycine max
caaccattgaactttgatatatatgatgacctaagaagcgagctactggatggcaaattattctcccctgtacttgcacatattcaaccagaatcccattatcaagcaaacatcgaatcagatggtcgatatgggcttcaatatggtacaaatgagacaaacatgtcagactttttgaattcagttgttaactgggatcaagtaccctttgaggatcccaattgtcaacagcagagctaccccttgtttaatgttaaggataacatattaaacagcgacttagattctgaacttgccaatatgacagtgagtaacagctcttacactattatatcttttaatctttctaggtaggttctgccttgatagtaaaacatagtagtttccaacttcaggtgtcagctctaacaatctaacatggtttacttgagtctcctgtataa

SEQ ID NO: 17041 - DNA, 377 bp, Glycine max
ttcagttcagccctgtttagagctgtctgctaagtagcgaaggctatcgactctttgatgggcgcgctcatacaaatgaattgggaaagtgtatacatttgtttcaaggacattgagctgtaatattatgatctgcaattatcaagtacgatctatcactatttgtggatgactacatatactgtttgtccgagactaccgaacttctgctgggaatccagaagcaaccatgttttgaaaaagcatccttgatgtcattcttaaacaatttagacatatgttataataagatactgaagctaccacttaatgtattcgactgtttcggataatacctaccattttcaacagggaaacgtgacaatttatcattctta

SEQ ID NO: 17042 - DNA, 282 bp, Glycine max
acgcttccgtatcgttgagaaatatagggaaaaattggattcgctgaaactgcacaagctgctgggcacaaacgttctcaagtgtggcacatgaaatgtgttgcttgaccccaatgaagtctacgaaatctccatggccatatctcggccaaacattcggaaattcgttaaggatgggtttatcatcatgaagccttccactatttacttacgctcgcgtgctagtacgatgaaagacgcacctaacaaaggtcggcactctggttatggttagataaatgg

SEQ ID NO: 17043 - DNA, 287 bp, Glycine max
ttgaagtgatacctctgcatggagcataggacttgctggatgtgttatgaatatggcaataagtcttgcaaggtgttcagccaattggcaccatcattgagacaactaatacagaacgaatattatttactgatgatgcagataaccaattacttgatgaaaattatacgtatattcgtgcaccgtttgatggaaatcatccatttaatgttgtctaatttacatttcacgtgactggaattatccatgataacattcttgtagatatggtcatgcacatcaaaaca

SEQ ID NO: 17044 - DNA, 449 bp, Glycine max
gtgcagtatcgttgagaaataaggggaaaaaatggtgtcgctgaaactgcagaagcggctggccgcaagcgtgctcaagtgtggcagaggaaaggtgtggcttgaccccaatgaagtcaacgaaatctccatggccaattctcggcaaaacatcaggaagttggttaaggatgggtttatcatcaggaagccaaccaagattcactcacgctcgcgtgctcgtaggatgaaggaggcaaagaagaagggccggcactctggttatggtaagagaaagggtacaagggaggcgaggcttcccaccaagatactttggatgagaaggatgcgtgtgctcaggcggttgcttcgtaagtacagggaatcaaagaaaattgacaagcacatgtaccatgatatgtacatgaaggtgaaaggtaatgttttcaagaacaagagagtcttgatgg

SEQ ID NO: 17045 - DNA, 445 bp, Glycine max
gttcgtgtagattttgttgggggttggagtgatacccctccatggagcattgaacgtgctggatgtgttttgaatatggcaataagcttggaaggttttcagccaattggcaccatcatagagacaactaaaacagaaggaatattatttactgatgatgcagagaaccaattatttgttgaagattatacatctatttgtgcaccgtttgatggagatgatccatttcggctggtcaaatctgcattacacgtgactggaattattcatgataacattcttgtagatatgggcatgcacatcaaaacatgggccaatgtcccccggggcagtggattgggtacttctagtatcttggctgctgcagtggtgaaagggcttctccaagtaattgatggggatgatagcactgagaacgttgctagacttgttttagtgttagaac

SEQ ID NO: 17046 - DNA, 347 bp, Glycine max
gtgcagcttcattgagaaatcaggggaaaatatgctgtttcagaaactgcagaagctgctggccgcaagcgtgctcaagcgtggcacaggaaaggcgtggcattgaccccaatgaaatcaacgaaacctccatggccaattctacactaaacattaagaagtctgttaacgatgggtttatcatcaggaatccaaccaagattgactcacgctcgcgtgctcatacgatgaaggaggcaaagaagaagggccaacactctggttatggttcgagaaagggtacaagggaagcgagcattcccaccataatactgtggatgagaacgatgcatctgctcatgcggttg

SEQ ID NO: 17047 - DNA, 419 bp, Glycine max
ttttatccaattgaaattttaaaaatgactgggataaacttaagaattcaattattgaaagtgaataagtaaacaatttaattggattggtcgaatggtatcaaaaaaatggagtactaactcccatttcttatttattattgaattaaccgatcaacttgctttgatatcgaacatttctttttgatttcaaaaatttttcggtaaaaatttgaatctatttttatatgcgaatcaatcctactacttctggtcctgaggtttctgcgcttgaaaaaaaaaatctgggacgtattgcccaaataattgttccggtactagatgtagcttttctcccaggtaagattcctaatatttacaactctctgatagttaacggtcgagatactgatggtcaacacattaatgtgacttgtgaa

SEQ ID NO: 17048 - DNA, 425 bp, Glycine max
acgcttcgtgtagattttgttgggggttggagtgatacccctccatggagcattgaacgtgctggatgtgttttgaatatggcaattagcttggaaggttttcagccaattggcaccatcatagagacaactaaaacagaaggaatattatttactgatgatgcagagaaccaattatttgttgaagattatacatctatttgtgcaccgtctgatggagatgatccatttcggctggtcaaatctgcattacacgttactggaattattcatgataacattcttgtagatatgggcatgcacatcaaaacatgggccaatgtcccccggggcagtggattgggtacttctagtatcttggctgctgcagtggtgaaagggcttttccaagtaattgaatgggatgatagcacttagaacgttgc

SEQ ID NO: 17049 - DNA, 439 bp, Glycine max
gtgctttcccgccgccgctatactgccaccgtctccgccagcgatggcagaagatgattcaaagcctctgaactacatctccgaagtcatactcaagaagaggaaaagcaccgaagcatgggcgttaaggaaaaaagaacagttccagcaaaagaaattccaatccatcagaaagcccgaggatttcatccacgagtatcgcaacaaggaagtggaccttataagaatgaagcggagggtgaagaggaaagtgcctgaagctaactccaacactatgataatcattcggatacaggggaaaaaaagacatgcatcctaggactaggaaggtgttgtacagcttggtgttgaggagaaggttcagagctgagtatgtgaagccaagtgagggaataatggccaagctgcatagggtggaaccatatgtcacctatggata

SEQ ID NO: 17050 - DNA, 248 bp, Glycine max
cccacacacacagttcgtcggaatgggaagggtgattcgcgctcagcgtaagggtgctgggtcggtgttcaagtctcacactcaccaccgcaagggtccggcgaggttccgcagcctctacttctgcaagcgcaacggctacctcaaggtcgtcgtcactgacatcatccacgaccccggtcgcggctcccctctcgccaaggttgcattccgtcacccctttctctacaagaagcacacttatctct

SEQ ID NO: 17051 - DNA, 206 bp, Glycine max
gcggtcatccgtgctagatcacacgcattcagttttcgtgctgtcgtcatgtcaaacagggggagtgctcacatctaacgagaaggggttccagagcgtattcaatgccttaactgggaaaaaagctaaatcggcccgcgtgaaggccgtcacataattggccaagatgcggatacctgaattaaactacaacggcagggtgcgaa

SEQ ID NO: 17052 - DNA, 224 bp, Glycine max
acgcatagttatgggacccaaatcacaggagattgtcgatattcaatttaagagagctgggctactcgatcgtggactacgttctatgaggttgaatggtgaaaaagcgagctggtcaggtattatgaaggtacatcttggactcgacagttaattcacgactgagcaatatactggagatgtgttaaaaactcaagtctgactatacatgcgttgacgcattt

SEQ ID NO: 17053 - DNA, 391 bp, Glycine max
acgcagacgaaagagaccgaaggctacagcgagtttaaagctacagacggtgcgtccgcggccactgccaacgcaattaacatgatgtagtatgtgcaccggatgtcacctggttcgttgtgggcccacagaggacactctcccggtcaaacacttgactctatcgaggttcatgacgtgcatcatgacttgtgctaatactcattacatagcacccttggacgtgatcgacaacattcacatggagacacctcttccgtacttcttgcactcgtaagctggtactacaaagatgtccatctacgaggtctcaaatgcatgttgaacaatataatgaacagactttcagacatacgttacattgactcaagttcaagataccgatactcat

SEQ ID NO: 17054 - DNA, 449 bp, Glycine max
atcgatttatcgctcttttatgtggttggcttcctttcgctctcttctctgcaaatgcttcattccaagatggttaggactctgtaggctgataaagacaacactcataccgttggaaagaaggatgctgctggccatgttgcttaatttagttcttgcttcctttgtcttcttgagttttatcagagacgggagtgcagggatcactagctctttcattcggtcagagtggccggcagttgacatcccccttgatcatgaagcatttgcagttccaaagggttataatgcacctcaacaagtgcacatcacgcaaggtgactatgatggaaaagcagtaatcatctcatgggtgaccacagaagagccagggcacagccatatacagtatggcacatcagagaataaatttcaaactagtgaagaaggcacagttacaaactatactt

SEQ ID NO: 17055 - DNA, 412 bp, Glycine max
gagaaatggcgatggcaatggcgcttcgcatgctttcatcttcaattgacaagcctctgcgcgctctgttcaatgccggttccctctactacaagtcgtctttgcctgatgaagctgtttacgacaaggagcgacccggagttacatggccgaagcagttgaatgctccacttgatgtcgtggatcctgagattgctgatattattgagcttgagaaagctaggcaatggaaggggctagaattgataccgtcagagaatttcacctctgtgtctgtgatgcaagcggttggatcggtattaccaacaaatacagtgaggggtaccctggtgcatgatattatggtggaaatgagtttattgacatggctgaaacactgtgccaaaagcttgccctataagcttttaaattg

SEQ ID NO: 17056 - DNA, 405 bp, Glycine max
accacgcgttcggctgagtatcgttacttgaagcataagtgaaactacagtgaggggtccgtgtagatggtcagcacatgatatatgagctggaaggctacaagggcatactgagggtagctgatgctctggaagacaaaaaccctgaactcaaagcatgggttaaacgagtaagagatgttgctcatgacatggaatacgctatacatgaattcagccattgccttgtagatcaacatggacaacgtaacaattgttcgtttcatatgaactttttcacccggcataagatcgctctaaatatgccaagtatcaaatgcagactggacattatatcccagaaacgttcagacatacctcggataggctcacgctcaaaataacgattggcatcaaggcttgata

SEQ ID NO: 17057 - DNA, 290 bp, Glycine max
atcgatcgatcgctctaattcgtaggtgacttcctttgtgtctattctctgctaattctgagtcgggagatattctgggctgtgcaggctgactaacactacaatcatatccatgtaaataatgaggctgttcactatgatcattaacataattcttgcggacttcgtatgcttaaggttcattacatacggaagtgcatcatatcaatatctgaacgtgtcagacacaagcgttcagcaatggacactatactatgttgatgaaacattggcagcatcattgggacata

SEQ ID NO: 17058 - DNA, 456 bp, Glycine max
gtacggttgctccaaaagcccaatgacttttatgtccactttggcatatgggacactgtgcatgctcctggcaatgagattagccaacactggagattctggtgtttttacatcacctaaccacaaaatacaggttggcaaaatggattattaccaaagacactgtaattgcaacctctttcagtctcatgggaggcataattcaaaattagaatgttttgaatgattctaattgtaattgctattattttatgcatgtggtctttgatgggtgcataaaatgggattcaatatggtccttttgccattccacagaatggattgcccataacactatatcccaaataaaaagtggaggcacactaatcaaggcatggaagcaacttgctaaatatggaaaaataactctttcaaaaatatttgaatatgttaaccagagaaagtgatgaaagtgac

SEQ ID NO: 17059 - DNA, 434 bp, Glycine max
gtagaattggcggtgataggcgaaggaggtggcgactgactagtgaataggcttgttgatggattgatagcaataattgctgttagcgaagcttgggaattgacatttatgggtcgcaatcgcaggtcgcagtcgcagtgtgtcacgctctcctttcaattcccgcaaaagacggtactctgcatcccctgattctcatcgccactcgagaacttccaggcgccgatctccttgccacaagcgccgtctaaagcacagaacctcttcctacccctctctttcacgcaaccccactcccaaacccaagaaagatcaaaacataagcaagcgtcaacactaggaagaattgaaactattctaagaagaaactgcaagacgactggaagaagcaattccaaaaaatgctgacgaaaatcttaacacagaggaaagta

SEQ ID NO: 17060 - DNA, 443 bp, Glycine max
cggacgcgtgggcgcaagtgcccttagacttaattggaccactatcctatgcatgcctttgatttatattataaaataaaaataatactatatataacatgttaattgcttaatatgtgctttaagagtaaagaataacatcgtgaaatcaaattacccctttttcaatacgtgttgaatcatcgatcttggtttgtaatttggttgtatattcacaaaattaataagtatattgtgatgtgattaattcccttctctgttatggtgtacttgccttccctgtattgtccatctccatcgtctgtctattaataagaattcttatgtgatattttcatttcaaaaaaaaaaaaaaataaaaaaaaattaaaaaaaaataaaaaaaaaaaatttataaaaaaataaaataaaaaaaataataaataaatatttttaataatata

SEQ ID NO: 17061 - DNA, 271 bp, Glycine max
atgacgcgttcgcggacgcgtgggcgcaagtgcccttagacttaataggaccactatcctatgcatgcgtttgatttatattataaaataaaaataatactatatataacatggtaatagcttaatatgtgctataagagtaaagaataacatcgtgaaatcaatatacccctttttcaatacgtgttgaatcatagatcttggtttgtaatttggttgtctattcacaaattaaatatatatattgtgatgtgattatattatcatcttt

SEQ ID NO: 17062 - DNA, 62 bp, Glycine max
aacagtacaatatcacagcgattcgcatacgtgggttacgatagcgtgctacgctatctgat

SEQ ID NO: 17063 - DNA, 434 bp, Glycine max
gaagattctctccttttcaaatttcaaaccttttcccccaaaactaacagacccctcttcttcttcgcgctctgtaatctcaatcgtgcatgggtcgtcttcactgattcgataataaaaatctcagattcattcttcgttttctgttacgatggagttgatttcaggtctaccagaggacgtagcccgagactgcttaattaggattccctacgagcaattcccagcggttgcttccgtctgcaaaggctggaacacggagattcactcgccggactttcaccggcgtagaagaaccaccaaacaagcccaggaaatcctcgtcacggttcaatccaatatagactccgaaaaaactcgaaccggtttgctcgcgaagtccaccacgaacccggtttaccggctcagcgtattcgaaccgaaaacgggttcat

SEQ ID NO: 17064 - DNA, 123 bp, Glycine max
cctcacacccccttctgtcaggcaaggggggtgtgcatagggatcattgattccctccaagtgaatatttaacatggcatcaaaaatcatgcagttgcttccttacgtttagtcatgaatgga

SEQ ID NO: 17065 - DNA, 428 bp, Glycine max
cgtttttctctttccaaatctaacttacaccttacaatacatgtcatgtgaactcgtgaagtgtgcagtgtttggtgcttctttttgttctcctctttccttttttggttcacgattccttccctcctcatggagtctctggaacttgttcctcttcttcttcttcatccacgcgcatcaccaccactacaatcaataaggcaacctcgtttcccttctcttctcaatagaaaaactagaaatgccaacttgcgatcattttccgctaaccttcaaggcggcggtggctgcgctacttcacaaggcggtcccttctctttcgaagaccaaacctctcaccacaaagacgatagagctcttctcattgccagagaaaccgacgattttggctatctcgttggcttttcgttgctttctgactctggtct

SEQ ID NO: 17066 - DNA, 448 bp, Glycine max
gaaaatacaagccgtagaagagggctcgctctttcgtgtttttgttcgcgaaggaaactctgtccttagctatcgcgatggatcggtaccagaaggtggagaagccaagagctgaaactccaatcgatgaaaacgagatccggattactagtcagggaaggatgcgcaactacattacttatgccatgagcttgcttcaggagaaaggttctaatgaaattgttttcaaagcaatggggagagctatcaacaaaaccgtgacaattgtggagttgatcaagaggagaattgtgggccttcaccagaatacagcaattggatccactgatatcactgatacttgggagcccctagaggaaggcctccttcctttggagacgacaaggcacgtgtcaatgataacaataaccctttcaaagaaagaactcgatacattgtctgtggggta

SEQ ID NO: 17067 - DNA, 436 bp, Glycine max
cccacgcgtccgtttgttgttgtaactcgttcttcttcttttgttgttctgtgtttgtgtttgttttttctctcacctgaaaatgtcttgctgcggtggtaactgtggttgcggaagctcctgcaagtgcggcaacggctgcggaggctgcaagatgtacccagacttgagctacactgagtcaaccaccaccgagaccttggtcatgggagtggcacctgttaaggctcaatttgagggtgctgaaatgggtgtgcccgctgagaacgatggctgcaaatgtggaccaaactgctcctgcaacccctgcacttgcaagtgaggtgttgggagagcaagcttcaagcagagatagcccttaattaggaataatgataaactattaatgtgtagctaaaaacttatgtattatgtctgtgatggttttcgtgcactc

SEQ ID NO: 17068 - DNA, 338 bp, Glycine max
acataacggaatttatatgatggaagttgatcgagttctaaggccaggaaactatggtctgctctatggtgattgaatcagatccaaggcgtagctacaaacactagctgagacctaatctagaacttgcgaaatacctaatactgattgaagagacgtgtacatcatacattactgtttcactagagcatacttcaggagaatggccattatgcaaaaggtttcaaagccttgaagatagctattaacaaaaccttaacctaggttggaatgatccaaatgataatattgcgacctcaccaggattcagcaattggatccactgatatcactgattc

SEQ ID NO: 17069 - DNA, 169 bp, Glycine max
gctaccaaggttaagagtaattttagcacggtagaggataacggctactagtgatgtagctatttccatcatactcgcacttttggtggatatgacacaatcatcaactgcgatcgatcacaacatgatcagaattactaggcagatagctattcgacactacttccct

SEQ ID NO: 17070 - DNA, 439 bp, Glycine max
caaagttaagggacccaaatttcaagagattgttaatattcgtttaggagatggaactactcggcgtggacaagttctagaggttgatggtgaaaaagctgttgttcaggtatttgaaggtacatctggaatcgacaataaatttacgactgtgcaatttactggagaggtgttaaaaactcctgtctcactagacatgcttggacgcatatttaatggctctggaaaaccaattgataatggtccaccaattttacctgaggcttacctggatatttctggaagttccatcaatcctagtgagcgaacctaccctgaggagatgatacagactggaatatctacaattgatgtcatgaattctattgctagaggtcaaaagatccctctattctcagcagccggtctcccccataatgaaatcgctgcacagatctgt

SEQ ID NO: 17071 - DNA, 246 bp, Glycine max
tgaaattctaaaaatgactgggagatacttaataattcaatcatggaaatctatggattgggcaaattaatcggagggggcgtatggtttcaaaaaaatggtgtactaactcccatttcttattcattatccggattaaccgatcaactagctgtgctatcgaacatatgcttctggtactcaaaaatctcgcggaataaatctgcctctacttatatttgcaccctattcctactactctttggg

SEQ ID NO: 17072 - DNA, 349 bp, Glycine max
gaaaatagttcaacttctctgtctcaatcatttcattatagttttctctcccttggaatcggagcgatctccaggatgaggggctcgtgatttctgtctcactggatgatcaagattaagaattgtttatctacatctgattccatgaagccgtaatcatcctctttgaatccatatgcagcctcatatgtttctctctctataagtggtggcagatggtagaataccttttacagataatgattccaatacttgtgatgggacaatgtgttttcatatgactcattatggtgcttcctaatgaccctgtacatatcaacacttgcttggaatggctctcgaaccccta

SEQ ID NO: 17073 - DNA, 491 bp, Glycine max
  modified_base (448)..(448): a, c, g, t, unknown, or other
cccacgcgtccggttgtgttgcaaacaaagaggagaaaaatatgagttacttgaaccgtgtttggatggcggcgacggtggcggtggcgcagggccacaccgatcccggccacaagtgcaagacggcgctcacctccatccaccacaaccggagccgcctcttctccggcggagccctgtcagatctccggcctctttccggcgtcgtgggatctgacgtggccggctcggtggcggggagctccgacgtggagaatagggtgaggcaagccgacgactctctgaggaaagtgatgtacttgagctgctggggtcagggctgaaccacacgtggcgttatgaacggtggagattgaagtggtggccggagaaagtgacccgggtcgggttcggatctgagttgacctgaccgagtcagatcggatgactcgggtggagagaaaaaccnggaatgttctgatcttgtaataggttatgtgtggatgtatgtg

SEQ ID NO: 17074 - DNA, 389 bp, Glycine max
attcaatccattctaaacaacttttctcatttacaatgccttcacttacaaaaatgaaaagtaagcaccatcaatgatctgtgaacaatggaaaccacacacatagctttaatttgatctaattgcttcatggaggaccaaccattatcatcaaaatcaaagactgctgctatggatcaaacccttcattcaattgggtttgaaattgaagacttgtcaccacaaaaaatctctggtcgtctacctgtcacccagaaatgctgccagccattcaaggtgctttatggaggggtatcagcattgatagtatattctctggcaagcatgggagcacacatggtttctggttacaaaagagtggctggaatttaacttagcattaaccattt

SEQ ID NO: 17075 - DNA, 230 bp, Glycine max
tatgatgactgatgattttgaaaagcctgctcaaacaaatgtcctctgtagcaattggaaggaatggaagcaacctatcatatggtttcaaggaactacagatgctgtggcagctcaatttttcttgaaaaatatacactctcagatgaggattgctgcttttgatttatctggtgatccacaagttctgggatctcagccgaatgtatttggagagctcttgagagttc

SEQ ID NO: 17076 - DNA, 493 bp, Glycine max
aaaaaagtttccatatacacaaagagagtgacgagaaagaaaaatggtgtggaatttgtcggtgtcagcaactagggtagggttccctccgccaaacccaaagaaagagtagaagaaacctacaaaactcatctctataaacaactccgtttgtcactccggcggctttagcaatcactccctccgttttgcgttttggattcatttatctgctgctttatcttaaaggccaagcgataaataacctctctctctctctctctctgtgagattgagaatccgatccttcgtttccgaaattctcgcgagatggacgagaacctgctcgacgatattatccggaggctcgtcgcggcgaagaacggtagaacgacgaagcaggtgcagcttacggaggcagaaattcgacaactctgtgtttcctccaaagagatctttctcagtcaacctaatcttctcgaacttgaggcttctattaagatttgtggagatg

SEQ ID NO: 17077 - DNA, 341 bp, Glycine max
gaatgatagcgaaaaccaaaaaacaagtgtcatcaccttcttctcgtcctttccttgattcggttggttccatctcttcattcatacctggatccgggatctcccaattcctaacttgaaagtttgaagaaggaatagataagtaatggcaggagcagaaccaggggctctgtggcagagaactgctaatcgttgctttgtccagaaagatccataaagagctcccaaattgggcttagactccaaacacctagttcacaggggattttttgtataatgtccattagggttatcaattatgttatatatggtctgggatacagtcttgacttacagttttt

SEQ ID NO: 17078 - DNA, 185 bp, Glycine max
acgctaaatgtacgctcaaccgctcgcatcacacacactctcacgatcatcgctatatacaccgacgcagtgcaaatatcatgagtacacggtaaaccacacacatacctctaattagaattaccacatatctgcgagacctaccactatatgcacatcaaatgctgatggtctggatcaaaatc

SEQ ID NO: 17079 - DNA, 430 bp, Glycine max
ggccgtccttttttttattttttttactttttttttttttttttttttttttttgtaatcggtaatctaaatagtaacccgtcaaagtttctaaattttattccatttccacttttagttatcaagtaaatatgttaactaattacataatagcagtaaattgtcatctcataaaaaaatttggcaaaaaattcatgtgtaatttttttagataaattaaatttttaatttcttgacttgaaaaacaatttatgacatcatactagtaaatgagagattaaaaacataatttaacaaaaaattatatgtatttatcctattaaaattcttgatgacatgataagctatgggcgataaatagtatgggtatgttattagttagtattgttattttacatcatcgactataagtcattaccaaaaaatttaa

SEQ ID NO: 17080 - DNA, 399 bp, Glycine max
  modified_base (65)..(65): a, c, g, t, unknown, or other
cccacgcgtccgaaagttaagcattctcttcctcctagtcttatccttcagttctgtactggcanaactatgcaacccacaagacaaacaagccctactccaaatcaagaaagatcttggaaacccaaccactctctcctcatggcttctaaccactgattgctgcaacagaacatggctaggtgtttcatgcgacaccgacacccaaacataccgcgtcaacgacctcgacctctccgatcttaaccttctcaaaccctactctattccttcctccatagccaacctttcctacttgaattttctttccattagcaggaccccaaccctaatcggtcaaatcctctcagccttcgcttaacttacccaactgctgtatctttatatcatccacaccaa

SEQ ID NO: 17081 - DNA, 272 bp, Glycine max
ggcacgcgtacgaaagttaatcattctggttctactagtcttatctcttctagttgtgaactggggagaactatagcgcccgcgtgacaaacatgccctactgcaaatcttgatagatcttggaaactcgaccactcttttctcatggcttctaaccacttattgctgcaacatatcatggctaggtgtttcatgctactctggcacccatacatattgagtcaacgactactaccttgactagcataaccttctctaaccccactctattt

SEQ ID NO: 17082 - DNA, 247 bp, Glycine max
tatgctttcaagttttaccaattgggcactttgaatagtgtcgtcattaatgctttcatggtcatcaattaaaccccctaaacagcatttatcttgctagccaaattacttattaattaggcacataatgttaaacccataatcctatttgtcacctgattttaggttccaccctaccgattatgaactcattcttcactaccttagtaaaaaggtatcatccatacccttgctctattccatcatt

SEQ ID NO: 17083 - DNA, 354 bp, Glycine max
aaagcattgaattcaaaaacttaagttcattccttgtgttttgctttcttcctcaaaaccaaacatgtcgaacacatgcggcaactgcgactgcgctgacaagactagctgcaccaagggaaacagctatggtgttattgtagagactgagaagagttacatcgagactgttgtcatggatgttccagcagctgagcatgatgggaagtgcaagtgtggcactaactgcacttgcacggactgcacctgtggccattaaggaatatgtatgaaaatgtaattgccatgtgtttggcaatacaaatatccaaataatgtaatcttcgtatgaataaatgtgtgtgctgttatcct

SEQ ID NO: 17084 - DNA, 195 bp, Glycine max
aatacactgattttcacaacatattagtatatatttatatgcatacaatgatgcacacacacgacgagcgcgttctcatgctgaatgcttcaagagctattatctgatactccgtacaattcatctctaacttgtactgcctttcccctctgacgaacacttaattacttatgatctcattggcagtcctgctag

SEQ ID NO: 17085 - DNA, 327 bp, Glycine max
cggacgcgtgggcggacgcgtgggggaatctcttgattgagaaagtgtgttagggtaagagttgtgtcgtgtccacaagacactgggagaaagaaagtgtgtgtaagtggttgtaaactgaatttcaattttctttagccatgagcacacttggtcgcaacaacacccttaactttagccgcagaaaccgattccagcttcttggtttgcaaggccaagacactatggtcaagttcattagcttccgacgcataaagggcaaaccaaaggcaattttttttacaaacttacaggtattcttctttgaataagaacacttttggggag

SEQ ID NO: 17086 - DNA, 413 bp, Glycine max
cccacgcgtccgattgggtggaagaaagtctcaacctttagtcgaaagagcaaggatctgagtgagtgagcgatcatgtgtggtggtgcgattatctccgacttcattccagcgggtcccgccggcggggcgcagcgcgtgaccgtcgacatcctgtggccgaatttgaggaagcggttctcgaagtcgctgctggacgatgatttcgaggcagggttcatagaattcgaggatgactcggaaatcgaggatgtcgatgatgaggacgatgaataggaggatgagttgaagaagaagaagccctttgggttctctcgcttcaacaacaaggctgcttttaagcctctctctcgtggagcatcaactgtgaaatctggggaatcaaaggggcaagcttagaagtgtgccaagag

SEQ ID NO: 17087 - DNA, 386 bp, Glycine max
gataatcctacgtatttgtgaatagtgctgtactggctcgaagtcaggaggaggtgacccggattgtagctactggaaggccatttgagtgcatggatcatattgcccttaagggaaagggaggtcaatacagatatgcataataatatcctgacgtacaactagcacctgctcttcaaatgctacccatttcacaagaaggatacacagtttattcacaatgagaagcccataaagaactttgttttaatgggtcaatacaatgatatatcatgtaatatcaaccccattttgaattgtgatacttaccccataggctaaaattttttctgggccaaattcattgttcataaggaatttggtgctccatttaaattcgtttttac

SEQ ID NO: 17088 - DNA, 293 bp, Glycine max
gcgctcagtttgatgcatattgctatatattccatttgttgaaagattccaaattgtctttgcggacgtggtcaaacatgacatgacatactgaaggcctaaacttgcaacatggtttgaggagttgaataagctaaatgcttatacctagactagagtgtatcctcaggaggatcgttgatcttttcaagaaacgcttcctgcctgaacagtgaacgttgtattgctgcatgctttctctaaaatggatactatgcccatatagcgtcctttcattcacgggatgggatgca

SEQ ID NO: 17089 - DNA, 360 bp, Glycine max
accacgcgtgcgggcaaggatctcaagcgatgttttgtggcatccaactccaaggatgacggtgccgaggaagctgccaactgcacatttcaagtcattatcatgaaccaccctggccagattggaaatggatacgcaccgacgcttgattgcaacacgaggcacattgctgacaaagtttcgtgaaaacttgaccaagattgacaggcgatctggtaaggagcttgagaaggagcccacatctttgaagaatggtgatccacgtatagttaagatgattcccaccaagcacatggtggctggaacttactctgagtatcctccccttagaccatttgctatgagggacattcatgaaac

SEQ ID NO: 17090 - DNA, 492 bp, Glycine max
cccacgcgtccgcccaattccactagggattcaattccgatgcgattccgagcttgttagatccacgacaacgtttcgtttcccagattcttttgtaaaaaaaaataatcttcctttgcccaacaggtaagttggaaaaaaatggaccatgacaagactgggtgccaagctcctcctgaaggtcctatattgtgcatcaacaactgtggattttttggaagtgcagctaccatgaatatgtgttctaaatgccacaaagacatgttgctgaaacaggagcaggccaagcttgcagcatcatccattgggaatattatgaatgggtcttcaagcagcactgaaaaggaacctgttgttgccgctgctgctgctaatgttgatatcccagttattccagtagagcctaaaactgtctctgtgcaacctttatttggttcaggtccagaagggagtggtgaggcaaagctgaaggatggaccaaaacgctgcagc

SEQ ID NO: 17091 - DNA, 389 bp, Glycine max
gtcagctcttagatcctagggatgaaagttgtatatttttagcagtaacacagatttattgggtgtgaagcaatgtgggaaacacatgtgttggtcctagcatttcaaaaaatggttttgttcaatcagtttctgcggcgatttggcagtcccaattgcctgaagattcagtgtctaatagagaatctgtaaaagaggaagtaactaatgttcctgaatctgccttgcctgtccaaaacaaaccttctgagcagataactatgccgaaaccagaagcctatcatgagggaaaatcataaatagaaccggaacatgataagaagaaacagactaaacgtggttcggtgaagagagtttctagtgcaaggcttttcagttgattctgtgtt

SEQ ID NO: 17092 - DNA, 284 bp, Glycine max
cccacgcgtccgaccaattccactagggattcaattcctatgcgattccgagcttgctagggccaccgcggcataccgtccaggagatcgtacgcttacatacaacgatctacctatgctcaacaggcacctcggatcaaactggagcacgacatgactgactgccaagcctgctatgaacgtgccatatcgtacattaacaactgtggattacatgcaagtgcagccaccatgaatatgtgctctaaatcccacacagacatgtttttgaaacaggagcacac

SEQ ID NO: 17093 - DNA, 61 bp, Glycine max
gcgatcacgcgtgcaagtagctgtatgacaccttttttcctgcggatctcgacctagcagg

SEQ ID NO: 17094 - DNA, 388 bp, Glycine max
accacgcgtgcgagatgctcaagctctattcttaaccattggcaaactgctgatcagtgggcgatagattcttagccacgctgcgcttgcaattcattatgatactgggatcaactgcgcactgtctcaggaccagatattaatccagtccgtgcaaggatgactgaatgttattacatgtgtggacgcgacttctgtgaagatgacagagagttcagacagactgaaccttgatatgcacatctgactcatttctgcatgagaactgctcattgtaatgtcccgtacatggaattagactgatatttaggaaccccatttcgtattaaaactctggtggatgtgccgagactctagctggatgtacattctatggttatgcgaggca

SEQ ID NO: 17095 - DNA, 354 bp, Glycine max
gaattcgtatgccatggagtcacccggtatcgagcatgtggtgggtggcgcagaacccaaggacgtcgttacgcccttttcccacagagaagaacctcacaattcccaacccctcaccggcgacggtgccagtcccggaaagatatttataggtggtttagcgagagaaacgaccattgcccaatttatcaagcactttggtaagtatggtgagatcacggattcagttatcatgaaggacaggaaaactgggcatcctcgtggattcgggtttataacatatgcggatccctctgtggtcgattaagtcattgaggaacctcatgtcatcaatggctaacaagttgagattta

SEQ ID NO: 17096 - DNA, 374 bp, Glycine max
gcagaatctcttctgcatggatacttattttacagcataaacacagttgattacatggcagcttttgcaaccatgatcttggcggatcctgccatgttacttgaaggcaatggaatccttgaatggttaaatactcatccatatccttggtcggctctcatcattatttttagctccggagtgttggctttctgtcttaacttctccattttttatgtgattcactccaccactgctgtaacatttaatgttgccggaaatcttaaggttgcagttgccgtccttgtttcttggctgatatttaggaacccaatttcgtatttaaattctgttggatgtgccgtgactcttgtgggatgtacatactatggtta

SEQ ID NO: 17097 - DNA, 87 bp, Glycine max
gttgaatcacagatacacggccatttatattaaagcggaaccactgtttataacggggctgggttaagcaaccgggtgcgtagctta

SEQ ID NO: 17098 - DNA, 461 bp, Glycine max
acagcttcagaatcagatctggtgtggtgtggtggctgttactgttagcacttagcagcgagggccaaagcgtcgatattcatttacatactcgtcgcagcggcgcttctcttattcctctctcattccccggataagcactccggccaccgccaccgccgcctcaagctccgctccaacttcaccctcgccccctcgcgccaccacgccgtcgccttcgaccctctcgtcgctgagctcgagcgccaccgctaggacaaggagtgggagaagcagataatccaccaggcccatcccgaactggagtcggacccggtcccggcccacgagtcccagcccgagtgggacgacttcatggacgccgaggattacctcaatgacgaggacaagtttaatgttaccaacaggttgatactcttgttcccgaagatcgatgtggaccccaccgattggttcgtgac

SEQ ID NO: 17099 - DNA, 372 bp, Glycine max
atcaaagtttcatattctgcacttatcagtgcctttatgacagagctagaacctggtactgtagtcacccagtgtgattatgatcgcttgctattgtcaaccagttcattaatggagaggaatacataatttatgattgaatgcatggatgacttgtcactagaacaacataagttccaattctactatcggagcctgtctcgttaacaagctcattagcaagcatgggtttaaaagataaagtcggataacatggcttgtaaagctgttggataagaacctttgctggatgatgattctttaaatccaatttccaagtcgctcccagagtcatcccggttggagatgcttctcataacaaattaaattttc

SEQ ID NO: 17100 - DNA, 499 bp, Glycine max
caattacaaattacactctttgcctcgcaccttcaacttaaccttttctactgataatctggacaacttgctagaagaagataaagaaagagaaaaagtgtgtgtgtgtgagagagagcaatggctggctcgtgggcacgccgttctctgattgttctggctatcatttccttcggatgtttatttgcaatttccattgctaaggaggaagccacaaaattggggacggtcatcgggattgatcttggaacgacctattcatgtgttggtgtttacaagaacggccatgttgaaatcatagccaatgatcaaggtaaccgtatcaccccatcgtgggttgctttcaccgacagtgagagactaattggagaggctgccaagaatctggcagctgtcaacccagaaaggaccatctttgatgtcaagagacttattggaagaaagttcgaagataaggaagttcaaagagatatgaagcttgttccttataagattgtca

SEQ ID NO: 17101 - DNA, 298 bp, Glycine max
ctgaacctctcactcctaactatctgagccgttcttattatcctgcagcgacccactgaggaacaggctatcagttgcatgacataatacaacagtgttcaattagagcataatgggatccaaatatgcaaatgggaagaaccacaaggacatactagaacacatttaacgataatttgagttctagatattcatcatccagtgatgccaaggatacccttatcagttgatcctatatatttaaaggctcacacggatcctaggttccgatatgcttcaatgcgtgaaacgacagtgg

SEQ ID NO: 17102 - DNA, 350 bp, Glycine max
gatgttacacccaacactctcctctcactctctcacaagctgtgtccaacgttattgctatgaacacacagttcacggcttaacgctctttcgttgttgattgatggaaagctgcatacttcgctaccatcacccaacactcctcactctgacatcaatttcgcacaaaccccacttgagattcttcacagggcctgatctcggtggtggcagtgtctctacttcttcttcatgagcgacatattataggcgaagaccctctatcagagcaagtgctggaacaagctcatgtgagttcagtagcctgaactctagcatggagccacgttccatggtgacgaagttactca

SEQ ID NO: 17103 - DNA, 453 bp, Glycine max
  modified_base (424)..(424): a, c, g, t, unknown, or other
cgctggattcctgagaaagtttcttctgttgattgtgacaagatggtcatggttgcttgtggttggcggcatacaatttctgtttcatctttgggtggcttatacacatatgggtggagcaaatatggccagttaggacatggaaattttgaggattctcttgtgcctcaaaagcttcaagccttgagtgataagttaatcagtcaggtatcgggtggttggaggcatagtatggcactgacgtctactggactactatatggatggggttggaataagtttggacaggttggagttggtgacaatgttgatcgttgctctcctgtgcaagtgaagttcccccatgatcagaaagtagttcagatctcatgtgggtggagacacacaattgctgtaactgaaaaggaaaatgtattttcttggngaagaggcacaaatgggcaacttgggcat

SEQ ID NO: 17104 - DNA, 287 bp, Glycine max
aacactcgttacgacacgcgtccggattccgcatcagagagtagaaaagatggcgcggttgatcacagtggtatggtgcgcggtggcggagctactgtgatccgagtagtgcccgtcacgtgtggaggaggctgtaaaccacataccaatggtgactgcagtgtaggcacgaagtagttcgactgataaggcagcgactgcacgcactgaacagtgctaggattatgatcaggatagcgaagagttaccgaagccaggaatagatgagggagaggtacgagatattc

SEQ ID NO: 17105 - DNA, 482 bp, Glycine max
caactgagttgagaggtccggttaactacaagtatacagatttgaaagctgcaacaaaaaatttcagtgttgaaaataaacttggagaaggaggatttggtgctgtatacaaggggatacacagcacctgagtatgcaatgcaaggccaattgtcagagaaggctgatacctacagttatggtattgtggtcctagaaatcataagtggtcaaaagagtaccaatgttaagattgatgatgagggtcgtgagtaccttcttcaacgagcatggaaactgtacgagagaggcatgcaattggagcttgtggacaaggacatagaccctaatgaatatgatgctgaagaagtgaagaaaatcatagaaattgctttattgtgcactcaagcatctgctgcaacaggccaacaatgtcagaattagtagtgctactcaaaagcaagagcttagtggagcaactgcgaccaactatgcctgtgttt

SEQ ID NO: 17106 - DNA, 428 bp, Glycine max
ctggtccttttgctcctcactatctgcgccgttctttctgccctgtttcgttccactgaggaacacgctatcagttgcatgacataatacagagtgttcaattagagcataatgggatccaaaaatgcaaatgggaagaaccacaaggacaaaaggaacaaatttaaggataattagagttctagttattcatcacccagtgatgccaaggttatcctcatcagtgatcctcgatattcaaaggctcacacggatcctcggttccgtgaggctccaaagcgtgaaacgaatgtggctgttgactctcgcttcaaccgcatgttcactcacaagagttttttgccctcttctgcttctgttgacaagagaggcaagcccaataacaacccaacctctcagcttggttctctgcgccattactacaaaat

SEQ ID NO: 17107 - DNA, 207 bp, Glycine max
ctcacgcgttcgattcaaaagatcaatgctgcacttcatgcaaagacattttcaaaatatgggcacgcggataggttctacaggagcgacctgaggccaaatgagcagctgaccacatgatgcaactctgatggctatacatcacgctgacctgttgtccagacgccctggtaggactggtcaacgtcaactaattgccgatgcact

SEQ ID NO: 17108 - DNA, 54 bp, Glycine max
tacccattactaaacctacacaagcattcatttatagcttatttctcacactca

SEQ ID NO: 17109 - DNA, 411 bp, Glycine max
gttgttgttggatatgaatgaattctgagttcaagagactcacaacatgaagcatatacggtcgaaattggaagagatgagggtatgaatgattacaaaggacgagaaggagaacgtagcgttgctgttgatcggaagcgattcactgaaaagcaataaccttgttctttcacaaggaccataatataccaacatcatcgtcgatctgcttccctcgctaacactgactactaggaatctgaaacagatgtaaaattatctgatgttagtgttcaataatgtgatgacacatattggatcatatgggtttgcaatttgagaggtaatgaatggttttgcgtaattaatgatgatgtcatgcaagtatgatttcaacctctgtggattaagtagtcaagtgccttactatga

SEQ ID NO: 17110 - DNA, 232 bp, Glycine max
ctgctattatcactgtggctataacttacttacaacttgcagctgaggatcatgaatagtggtcggggtcttttctttgtggaggatcaactggcttggtcatctactgctattgctagtaatactactattcacaatcagatatgcatgatattaattcaaacttcgttcttctacaggtacattgtcattatctgctatagtttctttattatgctttgttaattatgtt

SEQ ID NO: 17111 - DNA, 464 bp, Glycine max
  modified_base (379)..(379): a, c, g, t, unknown, or other
attttatgaatgaatgaaaaattaaaggcatgaggggcaagtgtggaaattaaaagaaacggctgcatcgaccagctcgtcacttcttcttcctcttccatttccatttctcggtgttgttgttcttcatccatggctttccctcagcaccacttccaacggcactaccaaagccagcagcaacaacaacaacaacaacaacaacaacaacagcagccacaaaccaaaaacttcaggcaattaatctaattatcctctcaattttttatttatttattgaaatcccaaaccatttcccttcctttccacccttcattttaccaaccctttttgatattttgtttatttttacaatttaatcttctttgcttctttatantttccccctttattgttttcctttgctttcagaaatctgcaaacaatcgatggtcaaatgtcacagcatgtggcgttttacaacc

SEQ ID NO: 17112 - DNA, 180 bp, Glycine max
tcctggccactctccttctcttctctctaggtcttcagcgcatctccacctaggggtaatgaaaatttatatggggaatgttcgcatccgtatttttgtcacctgctatttctacttttgtaaatccacttccactccttaccctatttacaatctttcatgccttctctagcctgttat

SEQ ID NO: 17113 - DNA, 59 bp, Glycine max
tgatgtcgtagaatatgaattaattcagagtttttgatactcacaacatgcagcagtca

SEQ ID NO: 17114 - DNA, 251 bp, Glycine max
gttacgacccgcacgaaaggcgtaacgatctgggcactgcctcggagagagactcggtgaggtagagatgtctgtgaagatgcggactacctgcacctggacagaaagaccctatgaagcttcactgtttcctgggattggctttgggcttttcctgctcaagttatgtggagggcaaagaaggcctacttctgggggggccagagccattagtgagataccactctggaagagcttgaattttaaccttg

SEQ ID NO: 17115 - DNA, 253 bp, Glycine max
gaaagacaaatggcaacaagcgaagaagtggttgcggctgcgccggtggcagccgggctggaggcatggctgaagcacaaactggatagaaaatggacgttttggtgcgacaaccaatccaaacctaaacagggcgcttcttggggtacctctcttctcaaggtctacaccttcgacaccggtgaagagttctggagtttgtatgatcaggtattcaagcccagcaagtgctaattattgcggtttttcactt

SEQ ID NO: 17116 - DNA, 210 bp, Glycine max
accgagggagatgtagtggcatgatatgcgtatgaatcggtaagatggatagaggatagagcactgatggtgtggtggatgtagatgatcgcctgacgtagggagatgatggattggagacatatgacatgtctcgtcgtcgatctattaatcctgtcgtttacgatgacgtccttcttctaggatcttgactagattaatcgcctattg

SEQ ID NO: 17117 - DNA, 427 bp, Glycine max
tgaagatatctctttctcttcaataactcatttttctcttatcatatttggatactcattgccgtctgcacagaaagttgttgaatttggagccatagttactgggtccaaggcctaaagcttccaactttgttttatttcctggtaaataacactgttttcgatcaatttggctttctttttgttgtcgattcagatgggttcgtgccaggaactgtttcttcgttcctaactcctatattcagtgttccggagaaagctttcaagtgttatagttgttaattgctattcttctttcttagtttctgctatgctatgaggctctgagttctctgtaaagtgtgatagacattttatgagttaaagttgaattaaacatctttgatcaatgaatattctgctggttttatagcttgaaatgttttcc

SEQ ID NO: 17118 - DNA, 81 bp, Glycine max
gtgcaaagaacctctgctctcctcttgctattgatagataagaaagaagcgatacgatgtgggacgcgttctgcagggact

SEQ ID NO: 17119 - DNA, 494 bp, Glycine max
  modified_base (377)..(377): a, c, g, t, unknown, or other
  modified_base (458)..(458): a, c, g, t, unknown, or other
cccacgcgtccgcccacgcgtccgctccctcctcatcttctctccccattcggcaaacatgcagcatccaaaatcgaatctttgtttgaaacatggcttcctcctccttcctctgccccgcagcatttaccttctcacagaagccacttcaatccacttttcttcattcctcctctcttctcactctaagcattcttcctaagaaattgagaaaaccccaccaactgagaagcctcatagtggccaaatccaatggcagtgactctgctgatgttcctgaccgtttgatttcagcactttgctacttttaccctttctttgatggcatacagtatggaaaatatgtaatcacacagttctaccctgttcatgccatngttcaaccattggttcctgcaataagagtcttcaagagcttcccttttaatgggttccttgtgttttgaccctttattttngtgtggtgggaaaccccaatttcagtaagtatgtga

SEQ ID NO: 17120 - DNA, 471 bp, Glycine max
ctttagagttggaagatgctaaagaacctccattgaacttacacaagcctaaagaaccctatacagcaacgattgtttctgttgataggctagtgggaccaaaggctcctggggaaacttgtcatattgtgattgatcatggtggaaatgttccctactgggaaggacagagttatggtgttattccaccgggtgaaaatccaaagaaacctggggctcctcataatgttcgactatattcaattgcttctacaaggtatggagacttttttgatggaaaaactgccagcttgtgtgtgcgtcgtgctgtttattatgatcctgagacaggaaaggaagatcctttcaagaatggcatatgtagcaattttttgtgtaattcaaagcctggagacaaaattcagatcacaagcccttcaaggaagataatgcttttacccgaagatgacccaaatgctacccatataatga

SEQ ID NO: 17121 - DNA, 397 bp, Glycine max
ccctctttcaaggctccacttttatgggtccttggaatttcttcatcgaagtatcaaacttgtcttctctctctctccttttacttcctctgcatatatgatatattcttccaaaatcctcatctaagggttaattttgttccggacaagtttttattattattattattattctttaaatttcagaatgatgtacttataagtttctgatccaaggtttaagatgttatagtttccttgaattctcatctgggttcaacctgcttgatgttttgactgaacaacatatgaatattgcacagttatcgatgcgcctggacatagggatttcattaagaatatgattactgggacatcccaagctgactgtgcttgtcttatcattgattcgaccact

SEQ ID NO: 17122 - DNA, 459 bp, Glycine max
cccacgcgtccgcccacgcgtccgcgatcctagcactctcttctgcagctttcgccgacagcttcattcaccatggctgagcaaaccgagaaggcttttttgaaacaaccaaaagtgtttctcagctcgaagaaaactgggaagggaaagagacccggaaagggtgggaaccgcttttggaaatccattgggcttggatttaagactcccagggaagccatcgaaggaacctacattgacaagaagtgccccttcactggcaatgtttccatccgtggccgtatcttggctggaacatgtcacagtgctaagatgaacaggactattattgttaggaggaattatctccattttatcaagaagtaccagaggtacgagaaaaggcactccaacattcctgcttatatatcacctgctttccgtgtgaaggaaggagatcacgttattaatggtcaatgc

SEQ ID NO: 17123 - DNA, 470 bp, Glycine max
aaagactacggaggtgacaagtacataaatggggagattattccttgtaagtaccctaccgaccaaccgaaacgtagcgcaccaaagaatgagagtagaaggtatgagagacggagagatggccctccccctgaccgcagaaggccaagacaagaggccgctgcctccgattcatcctctacatgagccttgcaggtgagtttcagttttgctgatagtaactaatgccaagtgaaagctgctccttatcacagctctatcatgctcatggtcattttatcaaatagaagattgaacttgggttgaattctcatcagatgcatacaatgtttcttgcaagctcaaactggtattttcacaattcatcttgaggaatatgtgcttttggactatgagtatgacatgtgggacaattgttaggtttatttgtctgtgtaatttggaaagctacttatcgtgcaacccagttg

SEQ ID NO: 17124 - DNA, 269 bp, Glycine max
acgcccacgcgtacgatggtacgtgaatatgtccaatttagactatgcttaaaaatgaggaggagggatataaaagtatacatgggatatgtgatatgatatggtagaaaaataaatagaaaaacttgtgttaatgaaatatttgaaataaaaaattgtatactataattactctttaatatttttactggacagaacaatttttttttctgtagactaagaataatgatattcggatattcatatatcataaatgcatatttgatatt

SEQ ID NO: 17125 - DNA, 451 bp, Glycine max
tgaagccgtcctgacagacatgcatgcgccgttcgagcggctcctcgatcggctccagccggcgccgacagcgatccttggctgcgtcgagctccgctggcccatcgccgtagccaatcggaggaatattccggtggctgcgttttggaccatgtccgcgtcgtactattccatgctgcatcacctcgatgtctttgcacgacaccggggtttgaccgtcgataaggatacgatggatggacaagccgagaacatcccgggaatttcttcagctcatttggcagaccttcaaactgtgcttcatgaaaatgatcaacgagtcatgcagcttgctttggaatgtatatcgaaagttcccatagcatattatctttgactcaccacagtccaagagttataagctgaaacagttgagtccttaaaagctaatattccctttccaggctatcct

SEQ ID NO: 17126 - DNA, 345 bp, Glycine max
cgtcacgcctcccgtcctgcatgcatgcgctctattttgcagcttcttaaaaatgcgttatggaactatgggtgtgcatatcatgaatgcttttatgtaacagccaaatgtgtttctcaactcgtagtaaactgataatggaaagagacccgggtatgggtgtgaacactcttatggaaatccactgggcttggctttaatacttccagggaagccatccaatgaacctacattgactagatgtgtcatttaagtgtctatgataccattcgtggccgcatcttggctataacatttcacagtgctaagatgaacatgactattattggtaggaagaattatctt

SEQ ID NO: 17127 - DNA, 404 bp, Glycine max
cccacgcgtccgcccacgcgtccgcccacgcgtccgggcacgctgagcatggaacacagagggctagaactcaagctggcttcagcaaaggatctcaaagacttgaatatattctcaaagatggatgtatatgctgtgctttcactctccggcgatcaaaagaccaagactcccgtccacagaaacggcggcaccaacccaacatggaattttccggtcaagttcacttttgatgaatcggtggcgcggcagaaccgtttggccctcgaaatcaagatccgctccgagcgcgccctcgccaccgataaggacatcggccaggtccacgttcctctcatggaactccttaagcaacctggcgacggtaaatccttccagcacgttagttaccaagtcagaaaacc

SEQ ID NO: 17128 - DNA, 305 bp, Glycine max
cccacgcgtccgatcatgcaccctttcaaatatttggcttgggagcggcaaccttacacagtcgatcatcaatagtaaagctaaccactcgtttgcatagagtagtatatatcattctaagaagtaagaatctcagtaacaccaattagacaatatacagcgactatgaaagcaatgacagcaacgacaacgtttgatgtctctgccgtttgctttcgtgcccctccatctgtgtcaccgaattcatgccacaccagttttttagttataaacttcatgaatcctcacaaggaactacttattaa

SEQ ID NO: 17129 - DNA, 58 bp, Glycine max
tccacgcgtccgcccacgcttcctaccacgcttccggcctctcttacattggggcaca

SEQ ID NO: 17130 - DNA, 473 bp, Glycine max
accaagcgttcggacagtcagagggtaaagctactctcaacatctatgctatgaatcaatgcgtagggtagcagcacgtgtcggtctggtgttccagagacctgctatacactggcttgaagacatggtgaggccgatcagagaatgtgaatgcagcacacgatgcacttcttttccgtaccaagtgcaactcgctcgcacacttcactaagtacaccattcagggtgaatctcaggaagcctacaaggtattggaccacaaaagctactcctactcagatgtttataatgaatcttatccatgtgatgattcgctaacacacccagaaccgattgctgtagactgtctatgaaattcattatgatgattggacttaagacgagttcaaaagacacagactaggcgctgtccaaaattgctctgccactcttaacggttaccacaagcccactgatgctgatcttcttccacg

SEQ ID NO: 17131 - DNA, 359 bp, Glycine max
cttaataccaattttctagggtttatacaattttcgatggcttcttcagatgttgagtaccgttgctttgtcggtgggctcgcttgggccactgacgaccaagctctcgagagagccttctctcagtacggcgaaatcgttgaaacgaagattatcaacgatcgtgagactggaagatccaggggttttggatttgtgaccttcgcctcggagcagtccatgaaagacgccatcgaagggatgaacggccaaaaccttgacggccgtaacatcactgttaacgaagctcagtcccgtggtggctgtggcagcggacgcagttgatgtggtggatatggtggtggtcgcagtggtggata

SEQ ID NO: 17132 - DNA, 450 bp, Glycine max
gccacgcgtccgctgattttctctcttaatccaccatgtcgaatagccaaactcggaattacgatggtagctcatttctcattgacattaccaccactgtgaatgacaccatctgcacactcaaaataagatggcgttttgcttatactgctatttattctagaagggtcatgctttccttggccaacgaaatcatatctaagagaaatacatacactcattcttactctaaactattccaaactcaatctaccgctttcggaagcactcttgatatcattgagccactaattctccaacatgttaccaataatcattattcttaggttcctgatgttgacaaagccagacttgctagcatggtaaaggacataaacttgcaagccttagttgagtttggaagagttgaacgtgttgcacatactcttggaaccattcctgcaaacggaa

SEQ ID NO: 17133 - DNA, 446 bp, Glycine max
atgatgttgatcatggattaaatttagaaaaggctggagctactgctgttgtccgggagaccttggaaccaagtcttcaactagcagctgccgtgcttgctcaggctaaacttcctacatcagagattgcatcgactataaatgaattcagatcccgccatctatctgagctcactgaactatccgaaacaaatggaacttcttttggatatggatataatacaactacgagcagagccaaatctcattccccagattcatcagatgatacgtaagtctatgaaggtaaactggcgacatgaagattgccccatatatacaaagtggaaggtaaaagaaaacagaaaagtgaaaaattgtatagcaacagagtaaatgttccatcatgatgtacagaaatatatatatctgcctaaaaaaatttgattaatcatccttaaatttca

SEQ ID NO: 17134 - DNA, 455 bp, Glycine max
ggcacacgtcagatggtcacggtccacatcctggaaacttgaagccgtttgacatggacgacataccaatccgcagagactccaatttccggttgccacctcaccggtgatggctataggcgtagcagtttccggtatgtacacgctcactccaactctctcttcattcaagcaccccacgcgcctcttctcacgcgctgctttcactgcaaagcttccacttcaatttcgagcttcttcaacgtccttcatcgacaccgaaaccaatccaagagaatccaacgtagtagtagttgaaaaggacgtaagcagtagaagcagcaattcgttggcttgtcccgtatgttacgattccttgacatgtaacggtgatcctggtttctacgtagatactatcactggatctagttttcaatgcagcacctgtcagaaaacatataattggtaccaaacgc

SEQ ID NO: 17135 - DNA, 313 bp, Glycine max
atttcaggaacgttagattcttggcaaagttcataacagaggctggaattcttatgaagagaagccagactggcattagtgcaaaggctcaaaggaaggtcgctagggagataaaaactgcacgagcattcggcttgatgccctttacaacaatgggtacgaagtcttttgtttttgggagaactatgcagaatcttgatgaagactttgcatatcaaagtagggtggcggatatggatggggaacctgatatggaaggagaccatgcttagaacattgatataggtacttatgcttgggggggggtgggggg

SEQ ID NO: 17136 - DNA, 506 bp, Glycine max
cccaccgtccgcccacgcgtccgcaaagaccgagttagaggtgactgttgagagcaagaacggagacctcaagcacctggggtttgtgaggattgctgctattcaaacatttgtgattgtgtcaaatctgtatgagtacgcaaagcagaattctgggcctttgagatccgtcgtaggaacggttgagaacactgtaaccaccattctcggtcctgtctgcaacaaattcaaggacgtgcctgatgatgtccttgtttttgttgacaaaaaggtggatgaagcttcccacaagttcgatgagcacgctcctccttttgctaaacacattgcggatcaagccaagggtgtgattcagaaagtgacttgtgaggcaaggaaagtagcaagtgaagcacaatcttgtgggccaagagcagctgttcattatgttgctacagaatcaaagcattttgggtttgataattcagtaaagttgtggaatggacttaaccacttttcaccatttc

SEQ ID NO: 17137 - DNA, 339 bp, Glycine max
cccacgcgtccgcccacacgtgcgctctgacttacttatagctgcacatgtccgatacacgagtctggcatatcacgatggaatccccaattactgtcgcaacacaagaatcattaccccaaaacccagaattcaacaactaaaccccaatgatacagactgatttatttcaacattcttaatacaaacaaacttcttatacgaaaaatgactttcatacatttcataaacactatagctgctagctatcatcctttttctcacacatctctttttcctcaattccatactcctcttctttcataagattaccccaaacgaattcgctattctaactcc

SEQ ID NO: 17138 - DNA, 155 bp, Glycine max
acgtaaaccctctatatagacacacccagtggatactcttcattgactgagccatagcgtaagggggtctccaattagggagcattgtgtggaacaaagtctaaacctttattcttatgaacatgcatctgaaaagcgttgattcatcatattgt

SEQ ID NO: 17139 - DNA, 401 bp, Glycine max
ttttacaataacccaatcatagtctcactcgggattggttattcttattctaagagataagccaaatccaaaccgaaaagaacaacacaatgaaaggagaatacgtagagcaacagcaacaacatcctaagagtgaaacaccacctagtatgttctcaaagcttcagcctcagcaccatcctttcccgcaccaccctttccaactctccgccgaggatgccaccaccatcaccccgagcaccgttcagaaggccaactcttccggcggcgacggcgcgaccatcgaggttgttcggcgtcccaggggacgtccgtccggttccaaaaacaagcccaagccaccggttatcataacccgtgacccggaacccgctatgagtccctacattttagaagtgtct

SEQ ID NO: 17140 - DNA, 388 bp, Glycine max
tccaaccatacgctcaaaacttttaaacctttatgttggaatctgatggaaatctcaatggacaatcatatcggtggctaacagaaaccaaccactgaatgattcttatggaattgctccaatccatgaaaatggcactcttcgcattgcttaacggacagaaacaatttatttcgactacttatctctccaactcgtcatccaataaaacttcccagtattcacattatggtaagctcgtccttaccaaatccacaactggaaacatctcgtaggatacttttcagcaaccttcaaatacattattgcccggcatgaaactttcaacaaataatagctcacgtaataaagtatagcttacattgtggaaaatcccttctaatccttc

SEQ ID NO: 17141 - DNA, 102 bp, Glycine max
aaactatggatgttcttgttcctcagatgtgtttttgtgtttttattatttaacactcgggaaacttttgggaaattcaattattgaatgcttggttggcag

SEQ ID NO: 17142 - DNA, 500 bp, Glycine max
aattcccgttcgaccgacgcggccgctaaccaattccaaattctcaactttcctaactttatcaaccatccaagaagttgatcaggtactggtctctccttgagttatgaaaccattcacagtcttgaacccaatttcactctttgcacctcaaacaccttatatgcctcaatttcacacccgaaaatgcaaagttcaatctcacaatctgagatctgcatcactgattaccttctaccccaataagttccatctcaatttcaatttccagatatgagcaacatttacataccaatgaaccataccaaccttcaaatgcctcaaatcacatctttctccaagcctacaaagtccttatcaaatctaaacatccgcttaccgttcttgagaaacatctcaatgccttccataacctcaagtcttacaacaactatggtacaaactacaacatcatacttcaattagctcaaccatggattacatcaataaagttacttttt

SEQ ID NO: 17143 - DNA, 401 bp, Glycine max
gcggccgagagctctttgagaaaatctgcagtgctgggcgttctacctaggatgaggctccatggttctgggatcatctcatatctggggtcagctattgacatgctatgcacggatgtcatcaggacttcaagcttgaaaacactttgctggatggaatcccggcacctagtttaaagatatgctattatacgtactcccagtcttcactgcttcattcacaaccaaagtcaactgtgggaactactgcatatattgctccagaacaattgctgatacaagagtatgatggccagcttgcaaatgtctggtcatgcagggtaaccatatatgtgatgctagagggatcatatcctttttcagatcctaatgaacccacagactttctcaagacaattcat

SEQ ID NO: 17144 - DNA, 376 bp, Glycine max
cttacgcaccattgcctgaatgttgatgatttcgaatagatgctggaaactaacagattgtgggtgaccattcagggggatctggagaggatcattctattcggcctagaataaaggtgattgtatattcgatgccataaggtgagatacttactgctgttgccaatttaacagatgcacaaactgaactcatagatgcctaataggacgacgattctgaactatcagtaggacctgcaccaccagctatagactctgatgcagaattatctaatgaatctcaacgccttgaagatgcaaccagtatcatagaagctgaggcaaacagacaccatgatgttcttggagctaaccataatatgaccaatgacaacat

SEQ ID NO: 17145 - DNA, 329 bp, Glycine max
tccacgcgttcgcccacgcgtccgcaaaatgtggatgctttcatgaaattgaaattatcaagggaaaacctcgtccgaggaatgctgtttcatcaacagtggaaggatcttcgaacagtacaaatcctttagatgttgcactatcatgggtacaaaggtgtatagggtttgacactaaattctcaactttgaggtgcctaatagccattccggtcgcatatgagatttatttgccagatttcgcttgactgtatcctacttcacaacatgaagtccatttaaatcatggttttcatgcattttgctcaatggtcaaaaggcctgccatg

SEQ ID NO: 17146 - DNA, 178 bp, Glycine max
tacttgccacccccacgaccctacggaatcctgatcaggcctcgacatccgttgacccacttatgcgacacgctttacaaacgggtcttatgctccagacattgggccgtccatgttcaatgccctatacacatcgtactcaatacctcagccagatacggtgcagaaaacctacaca

SEQ ID NO: 17147 - DNA, 353 bp, Glycine max
cgcttgagtttggaacagaggaaaatccacatgcaaatcatattcaccatcctctaatgcatggctatcacaagagctggattgggctgctcagcaaaggctgagctgggtgcagaagaattacatgatttacaattattgctccgacaaaaacagatttgctcaaggccttccactcgaatgcacacattcgtagaggacttcatcttccactagcacaagtgttacattataatttcatttaccattcttttattttatttccttttaattcctggtcacagtttgtgctcttttacgatgtaaaatatatcgcatgtaaaataacggttctgttatttggatgtcaaaaa

SEQ ID NO: 17148 - DNA, 381 bp, Glycine max
cttcaatcctttcgttattctcttattcatctgtctcttctgaataatccagatgtctttctgcccttttctccgggacgcttgtcgtgaccggatctgtatggatttgatccagatctacacgccgatggtggttttggccgggtctttcatagatctggtgcgtagaggctcagatctacggtaccgaggtgtgtgattcatgttcgtcttgcttttggaatctgtttcgtagaaagtcgtttggtcttgcatatggcatggctcttgaggtatttttttgcaggtacaacagagaatcgatgacaagaacgcagatccgacggtagatccagtcgattccgcttgttcgatcgctacagacccctgtatcggatcatt

SEQ ID NO: 17149 - DNA, 446 bp, Glycine max
ttacctttcgacccactcgtccgtccacgcgtccgttcaaggtgacttcgccattctcaacttttgtaacctccgacaccagggggcctccttcggtggtgacttgggggagtataagcctcttcattccgccgttgacgccaagcttcaggccatttgcgagggcctggctgagctgcacaaacaggggaagaccgagaagcctccgaggaaaacgcgatccaaactcgcttctccgccagagaacgacaacaacatcgacaacaactcttgtaaggtcgaagctgcttcctcctcttctgaaagttcttcgccgctttcggttctgactttcgctgacgtcagcgagccgcaatgggaaagtgaatcggataattctaatctccagatgtacccctcttatgaaatcgactgtgattctctgtgaaaccccgtgttttcttttt

SEQ ID NO: 17150 - DNA, 345 bp, Glycine max
tctcgatcaatcatggctttgcccaatcagctaaccgtcgattaccctactttgaaactcgggatcgtcggtgacggtggtacaggaaagacaacgttcgtgaaaaggcatcttaccggtgaatttgagaagaaatacgaaccgaccattggagtggaggttcacccattggatttcttcacaaactgtggaaagattcgcttctactgttgggatactgccggacaagataagtttggtggcctcacggatggatattatatccatgggcaatgcgccattatcatgtttgatgttactgcccgactaacttacaaaaatgtgcctacctggcatcgggatctt

SEQ ID NO: 17151 - DNA, 62 bp, Glycine max
tcgaccacgcgaccgatagatctatactcatcaccttatcacacgaaccactacggggaaac

SEQ ID NO: 17152 - DNA, 381 bp, Glycine max
attgggtgctaaagatgttgacaatctgtctagacagccagtttcactaactggtgagcgggcttgtgggggacatgtgtttggagataacaatcaggagtttgttgatggtgtcactagcatggaaaccaattgtgaagatccctcagagtgtgtatctcaccacaatgcatctgatggtgtggtgaaaaaacgaaaagtggaggaagatttatcagctgatggaaatcttgttgctgatttttccttaaatgataccagggaaactaagctagaaaaatcaagtattatacaggatgacatgttaatggactatcagggtgcaactgcagctacagcaaatgcgtcagttgctgaacgtgtgatcgagccgactcttgt

SEQ ID NO: 17153 - DNA, 267 bp, Glycine max
gttacacccagtcgcctgcatcttggtggttagagttcgtgtattggtaccctgctaactggtaggggatatagacgctggactgaactatctgttaaagctcattctttgaatggtcaacagtgtatacattgtatgttaattgtacgagatggttgtgttacaatcacaaaatgggaaagtatcacaatgtcgtttgatcatgcttaaaatgccgaggaagaataggatgattattcaattgactacgatggaaatgatcttgat

SEQ ID NO: 17154 - DNA, 253 bp, Glycine max
gtgacagtgggagaaagttaaaacaagaaatgaaaatacaaggtgacaaaataaggatacaaaatgatttgatgagatggattatgcatactgctgttcaattttctaatgctacaaccataagagttttaaatcctgacaagctcacataacaagtacagaatattgctctggagacaagtgactatgatggtgcaggatgactggatgttcatccatgatacttcacaacgtatatctacattaggtgatt

SEQ ID NO: 17155 - DNA, 418 bp, Glycine max
cccacgcgtccgcgttatcaacacattcaccgagtttgaacaagtttacttaaaccacttgaagaaagaattgggacacgaaagagtctttgcggtgggcccggttctgccgattcaaaccggttcgatttcaacaaaaccggaagaacgaggcgggaacagcaccgtttcgcgacatgacatcatggaatggctcgacgcacgtgacaaaggttccgttgtttacgtgtgtttcgggagccgtacgtttctaacgagttcacaaatggaggtgttgacacgtgcgttggaaataagtggggtgaactttgttttgtccgttagggttcctgaaaaaggacaccttgcgaatgagcacggtacggtgccgcgttggttttcagatagggtgaaaggaatgggatttgtgattgaagga

SEQ ID NO: 17156 - DNA, 466 bp, Glycine max
cgaacttatgggagatcttgctgaaattcggggcaaccttcttgcattgcaccgaattgcgcggcctccgtcatgatgagctgggtcaggaaacacttcttaatttgttacttcgtaactaccttcactacaacctatatgatcaggctgagaagttgaggtcgaaggctcctcgatttgaagcacattcaaaccagcagttttgtcgttatctcttctacctagggaaaattcggacaattcagctggagtataccgatgcaaaagagtctctcctgcatgccgtccggaaagctcctgttgctgcacggggttttcgaattcaatgtaacaagtgggctgtgatagtgcgtttactgttgggagaaatacctgagcggactgtcttcatgcataaaggaatggagaaagctctaaggccttactttgagcttacaaatgctgtgcggattggagacttggaact

SEQ ID NO: 17157 - DNA, 263 bp, Glycine max
gaacttatggtagatcttgctgaaattgggtgcaaccttcttgcattgcaccgaggtgccgcccttcttcatggggagctgggtcatgaaacacttcttaatttgttacttcttaactaccttcactacaacctatatgatcaggctgataagttgatgtcgaaggctcctctatttgaagcacattcaatccaacatttttgtcgttatcacttctacctatggaaaattttgacaattcatctttagtatacctattcata

SEQ ID NO: 17158 - DNA, 469 bp, Glycine max
tggaagaagccttttgctggttcatcccatgccaagggtattgttcttgaaaagattggtgttgaggctaagcagcccaactctgccattcgaaaatgtgccagggttcaactcatcaaaaatgggaagaagattgctgcatttgtgccaaatgacggttgcttaaattatattgaagagaatgatgaagtcttgatagctggatttggacgaaaaggtcatgccgtgggtgatattcctggagtcaggttcaaggtcgtgaaggtttctggtgtgtctctcctggcccttttcaaggagaagaaggagaagcctaggtcttaagcttgtgggtcgtgtcctctctatagtctatccaaaaaattattatgaattttgcttcttgagactggatgagttctctgaacaattttgtatctctctaatagtaatttttctgaaacttaaatttggttcgtatgtcgcactt

SEQ ID NO: 17159 - DNA, 458 bp, Glycine max
cccacgcgtccgcccacgcgtccggattccgcaacagagagtagaaaagatggcgcggttgatcacagtggtgtggtgcgcggtggcggtgctactgtgcgccgcggcgggcgcgtcgtgggtggaggaggcggcgaacccgatacgaatggtggcgggggtggaggcggaggtggttcgggtgatagggcagtgccggcgcgcgctgaagtttgctaggttcatgagcaggttcgggaagagttaccgaagcgaggaagagatgagggagaggtacgagatattctcgcaaaacctgaggttcatgcgctcccacaacaagaaccgcttgccctacactctctctgttaatcattttgctgattggacttgggaggagttcaaaagacacagactaggcgctgcccaaaattgctctgccactcttaacggcaaccacaagctcactgatgctgttc

SEQ ID NO: 17160 - DNA, 446 bp, Glycine max
  modified_base (352)..(352): a, c, g, t, unknown, or other
caaattgcaactccttctcggcttttcctaatcagcacgaacacaaacacagagagagacgtggattttgaactgagaagagcgagagagaagctagagaaagagcagagggagaggaaggaaagagcaagactgaaacttcagaaggaaaagaaggccaaagaagaggctcagaagcaaaaggaagccatcgaagctgttcaaagatctcgtcgtattgatgccgctcaagctcaactcaaggctgcccaacagatgcaagataacctacttgctggcggaggaatagtgttttaccgactactagagggctttttttatgaaggcggtggagataagatcaagctacctncttcttgctttgcagaactggctgagcagggtacttttgataagagacagggacccttatactgtcagttggcgttaggtcatgaagaaagcac

SEQ ID NO: 17161 - DNA, 143 bp, Glycine max
cacacagccccgcctacttgcgacccccacgaccctccgaagcccgatcacgcctcgaggccgttgacccacgtcgtccgagctggcgactcattgggccatagcgtgcgcccgccggctgacctcgagcgactcaggaatgg

SEQ ID NO: 17162 - DNA, 378 bp, Glycine max
aatatgaacagaatctcgtctcgacaccttgtctatgcttcagctcgcaactgcaacttccgagaaatataaatatggattactgcatggtcacacatagttaattttattaattactactaggtagctggtttttaataggtagtaagtaagtgtaatcgttgtcttcctgcagatatggaagaagcgggtttaggagattgttgttcctctaatacgactattacgaggaaaagcgagaagcgaaagcatcagcaccaacaacaagagaagccatacagaggaataaggatgaggaaatggggcaagtgggtggctgagattagagaacccaacaagaggtcgaggatctggttgggttcttacgccacccgcgtc

SEQ ID NO: 17163 - DNA, 321 bp, Glycine max
ctctttactaccttaagtcaacaagagccttaaccattctgccctctcttctcttctttggctctctagattgcgtctctcgggtgtcttagaatcacgtacaatctagtcaacatatcagaaatggatgcaattagttgcatggatgagagcaccaccactgagtcactctctataactctttctacaacgtcatcgtcagatacagcgaagacttcttcgatgattacatagtctgagaaagtttctctatccccgactcctgcaaacatactataccgtgttggaagcttctcaagcgcagacgtggatcctgttagc

SEQ ID NO: 17164 - DNA, 347 bp, Glycine max
cggacgcgtgggggagttttattattctctgtcgccaataacgaaggcatatggcgccgtttgcctgttggctacggcaacttaccatcttggattatatcatccagcttacattgcactattctacgataaagtgttctacggttttcaggtttggaggttgttcacaaacttatttttccttggaccattctctatcaattttgggatccgtctcctaatgatagtaaggtatggtgtccaacttgagaaaagaccatttgatcgacggactgctgatttcttgtggatgatgatatttggtgcctttgcactattggtattgtcttctatccccatattttggt

SEQ ID NO: 17165 - DNA, 455 bp, Glycine max
cccacgcgttcgaagagaatcttatgaaagttagaagaaaatgggagtggaggagcagttgttgaggcctggcaggggtcccgggccaattcccggtcagaacgtcaccgttcactgcactggtttcgggaagaacggtgacctttctcagaaattctggagcaccaaggatcctggccaggaccctttcactttcaaaatcggccaaggttctgttatcaaaggatgggatgaaggtgtgcttggcatgcaaattggtgaagatgctcgtctccggtgctctccggattatgcttatggtgctggtggctttccttcttgggggatacagcccaactctgtcttggaatttgaaatcgaaatcttgagtgcacaatgaataccttgggtagtctggtctctggtcccccctaagaataaaatcatcatccatttcatggacttgaattatggat

SEQ ID NO: 17166 - DNA, 252 bp, Glycine max
caatcacttgctgacgacaagatttagcaacttctggagttcactccgacgttggggcgagtcgcgccttttgcacaggggatactggcgcatttccctcgccattaaacacctactacattatcacggaaagattctcaaatccaaggaccacaaacctatctactaatctctccacaatatcaaagaacacctgacgctatcatggatcatatccctgcttttaagagatacacaaaacagcatcaccaa

SEQ ID NO: 17167 - DNA, 445 bp, Glycine max
  modified_base (424)..(424): a, c, g, t, unknown, or other
gtttgctagctctatgacgcattatgacttttgaacagttgcatgcttaggaagcagtgtctgtcaagaaacgttgtattctggtcatataaattgtggtggaaagatagtaacagacaatggaagcacatatgatgatgattcagatactggaggtccagcaagatttcaccgaagtggaacaaaaaaattgggcatatatcaatactggtaactttatggataatgacgctggcgcctattatatcgtgcaaaataaaactttgctttctatggacaatgttgacctatacatggatgctcgagtttcttccatttctcttacttactatggattttgcctgggaaatggaaactacacggttaatctacattttgcggaaatcatgttcattgatgatcaaaaaaacatttaacagcttangaagacgagtatttgcatcta

SEQ ID NO: 17168 - DNA, 325 bp, Glycine max
tacgttgcacccccagcgacccttcgtgagccggatcaggccattatggccgttctacccattcttccgagtacaatgtcgaaggtggtctaagcctgttaaacggagttgcaccgcctgctggacgtcgtgcaggcgtacgtgcattctactgaacaggtgcctcacttcatggagttatgtcagggtcaatgcgctctgaagccattgaactcgttacactctagctctgaaaatactctcttcaagtgcgtacaaccgcttcattgtcaccactactcgactttaccagccagcttgtccatattgtacagaaaggatggca

SEQ ID NO: 17169 - DNA, 465 bp, Glycine max
tccacgcgtccggagacagcaaattggggtctcgatgattatgaacttcgacaatcagtggggcaggctcgctctaaaggaatggctgttaaagcaatggggatcataaatcctggaaaccctactggtcaatgccttactgaagctaatctaagagaggttttgcaattgtgctatcaagaaaatttatccttgcttggagatgacggttaccagactaatatatatcatgatgaacgaccctgcatcagctctagaaaggatctgatggaattgggaccacctataagcagggaagttcagcttatttcttttcactctgtgccaaaacgttattatggtgaatgtggacagctagggggatattttgaaatgaccaacattcctccagagaccagttgatgagaatctaacctaaaaggtgcatcaatatcacttagtccaaatgtccagcacaaatattat

SEQ ID NO: 17170 - DNA, 456 bp, Glycine max
  modified_base (435)..(435): a, c, g, t, unknown, or other
tccacgcgtccgggtgtgtgtgtaggtgcactctctcctttcttacacagagagaaaagagagagaaagaaaaggatgaaatagggaaaacctttgggtctttccctccatagttccatttttccattcaacaacacaacacctcatacagacatcatggaggcaggttacaatcctcgtaccgtcgaagaggtctttagggatttcaagggtcgcagagctgctttgattaaagccctcaccaccgatgttgaagagttctaccagcagtgcgatcccgagaaggaaaatctttgcctttatggattttcaaatgagcagtgggaagtcaatctggcagctgaggaggtgccccctgagcttccagagccagcattgggcattaacttttgccaagagacccggatgcaaaaggggataaggactggctgtctntggttgctgtacacagtgatg

SEQ ID NO: 17171 - DNA, 439 bp, Glycine max
gcacgaatatctagtaggttggagcgatccttgaaaaactctgtacacatgttggtttaccgggacctacttacaggtgatgagcttctctctgactccttccgttacaaggaaattgagaatggaatgctgtcggaagttgaggggaagtgggttgttaaaggagcaattgatgtagacattggtgcaaacccttctgctgagggtggaggagaagatgagggagttgatgatgcacctgttaacgttgatgacattgttgacacattcagacttcaggagcgacccgcattcgataagaagcagtttgctaccttcatgaacaggtttatcaagaatttgactcccaagctcgatgcagagcaacaggagttgtttaagaagcacatcgagggagcaactaaattacctgggccttctttaagattaaagatttcca

SEQ ID NO: 17172 - DNA, 424 bp, Glycine max
cgcatgggtcattacacgtagctttacaaagtccgatgtgtctaagtggttgagggctttaattgatcgagctcggagtgttgagcctggatggaaagtcagtggatttttaattgatgacgctgcagctgaaattgatcttttgagagatatattttgctgtcctgtcctattttcactatggcgtgttcgtagatcatggcttaggaatattgttaagaaatgtagtaacattgagattcagcgggagatttttaagcgtcttgggagaatagtgtacaacatttggggaggtattaatgcatcgcttgccttggaacaattcttgctggattttgttgaccaaactgctttcatggaatatttcaaagtcatgtgggttgcccaaagcgttgaaatgtgtggggccctttcaacgatgaga

SEQ ID NO: 17173 - DNA, 451 bp, Glycine max
cccacgcgtccgcccacgcgtttttccagttcccgcccacgcgtccgcaaagctctctcgctctctgtctcgcgctctgatctgctttgtttcaggagccacccgctcctgcagatttcttttgcggctggagtggaaggccattctcgcaacgtttgagttcagcagatccagaatttttcagaaaacaggtttaggagaatgaagaatacggaacgaattgccaattcggctttagcaggtttaaccttagcgcctcttgttgtgaaagtagatccgaatataaatgttattttgactgcttccctcactgtgtatgagggctgttaccgctccgttaaaccaaccgcaccaactgagacaatgtccaatgaacatgccatgcgtttttccctttgtttggggaaaaatgcaatgttattgtcactcttcttactcttcaagtttctat

SEQ ID NO: 17174 - DNA, 443 bp, Glycine max
cccacgcgtccgataacgtcgattttctctctggtctccagcctcagccaccaggtattgatgtcaaattcaatggggcgctggcggagcccgtggcgccgccgccggagcatccgttgcgattcaattttaaccctgcggtctcggatccgagcgcgattcagcgccagttgcagcaactgcaaattgcggagaacgagcaagctgcgcatcggaggaagggtgaggataattaccccgccggtgattactacgttcaaaaagtgcctgagaagttccccccaccgaattttctggcaagctcgccgggttattggcctgaaaaacatgtttccggcgacgtttatccttcggctgtgacagctacgttcggcggaggggaaaccgtcggttttatatgggtttttccggcgccggggacgttctatcatgcaccggttatg

SEQ ID NO: 17175 - DNA, 52 bp, Glycine max
cccacgcgttcgaaagagaatgtgactttactcatcagttccactagaaagt

SEQ ID NO: 17176 - DNA, 229 bp, Glycine max
gctcacttgtagaagctgctactaatcacggtcataagaccaacaactcacaggatgtgttagctgcacaacatgattctgcataaaccctgtacctgaggtcgcagacattgaattctatctcaaggatctccaagacccgttcgactgttgataaaacactgactgatgctacatatgcatccttactatacgcagacacaactcatgaccccgatgtggaccatat

SEQ ID NO: 17177 - DNA, 367 bp, Glycine max
tcaaattccaattctgaaacgttttttgtgatattttattttggtcttaatcttattttccagtattgatgaaaaggaccatgggttatttgttttgcgtatcaataaaggttaattttattaaaaaaaaaaatactaaaaaaaaagaaaaaaataaaaataaaaataaaaaaaaaaatcaactataaaaataaataaaattttacatataaaaaaatataaaaaaagggcgggccctttttgaggttccaatttaacgtaccgtggattccgaattaatagttttctaatggggttcccaaatttaaattcatgggcctttttttaaaaatgtcaaggcttggaaaatcctctggggttcccaaat

SEQ ID NO: 17178 - DNA, 323 bp, Glycine max
accggatcgttagcacaagttcaggaactatgagtggcttggtgcccatttgttctagaacgcttatgttgggataccaatacatgaggacggtcattggaacttgatcattatttgtgtcccagacaaagaatatgaatcacggccaatcatacttcatttggattctttggggcttgactctagtaaatcagcttttgataatattaaaagctatttgattgaagaaaagaactatatggatcgagaagatgtgtctgtagatgtttcaattgcggatagaatatggaatcgcctccctacgagaattgaatctcagatca

SEQ ID NO: 17179 - DNA, 457 bp, Glycine max
cacaaactaagatcaacatggtttactacactcgcgtttcagaagttgagagggaacctatcatggagtattccagaccacgaccaatgatgggcaactaccaccaccctaatgctcaccgtgtcctcaacgagaagattgtttatgaggaggatgtgattggaggatcccgccacaaccacatgcatcaccaccaccctgagactcatgagagagtcaaggtggtggagtatgaacaagttcctgagaggcgcgttgtctatgaagagaaagttgcttatgacaacgatcgttactactctccaaggtattgaaattggacaaatggaataacacctataacgtgttatcatgtggctttttattaagcaggctacctagtataccaaaaagcaccaactgtggtccttgtactaaataaattcctgcttatatatactggccattatgttatata

SEQ ID NO: 17180 - DNA, 325 bp, Glycine max
taccttgtcaacccaagcgtaccctgctcatccacacacaagcctggacgccctgtctacccatttatcccaagtggagacataagaggactactctaattacaaaactgatatctcgacattccaagcttgccaaaatattattctaactagatttcttatcttatcaacactagaatctcatgacaatttatcacagatttctgatatcctagttaggtactccaccgaggatatacgatgatgcaagaaacctaatttccaagacagtattggcaaatccctcaaataggaccgcaaatccgacagtactaacatgtaaaag

SEQ ID NO: 17181 - DNA, 465 bp, Glycine max
ctccatgtgtttgtgcatgcaggaaagcacgtaaccaaattctctgtttcagcttcctctgggttttgggtacgaacagagttgctctgtttttgacgatggccataaaggcgattgaactgttgaaagggtgcggatcacaagaagaaataatggaagtgcttgctgcggtggcttcggatttgggggatgtgatcgatgatgtgaacaccttgcaggtgattccactgaatggtgcaatgaccaatgaggtttttcagataaactggccaaccaaaaatggtggtgagatcagaaaggttctggttcgtttatatggggaaggtgttgaagttttctttgacagggaagaagaaattcgaaactttgactgtatttcaaagcatggtcaagggcccacgcctttcttttggggccgattcacctctggcatagttgaggagtttattcatgcccgaacttttt

SEQ ID NO: 17182 - DNA, 96 bp, Glycine max
  modified_base (32)..(32): a, c, g, t, unknown, or other
gccaccgtcggagaaaagtggggcactactcnactttttccttttgcttgcgaatcggaatcaaataatcagatcatccggttcattagttcatca

SEQ ID NO: 17183 - DNA, 449 bp, Glycine max
cccacgcgtccgcccacgcgtccgcaaaatgtgtccctattgtgaatccaggtcccttcagagacaaattcttgttattgatcggactgttggtcaaacaactattgtttatagctccaggtttggcagtcctggtgagtgccttgcttcttggcattcaaaactgcatggtgctaactatttgagggggaacgaaccttctttcataagaggtttgaatttgaatttgaacttgaatatgactgagccaactttggctgataaagtatatgggaatctcggaactagcattgaaagtgagatgcatgaagacaccgaagaaattaatgcattgctttactcggacagctatggctattctacccaggatgatgatgattaagttactagcacaatggcacttcttcctaaagggtacaatgaccactcatgataactgtgaaaccctt

SEQ ID NO: 17184 - DNA, 305 bp, Glycine max
ggacacaggtgatgttgaaactttagatgtctaacaggggatctctaatggacaattgaatgcacctcaacttctggataggagtgaataaaagcgtatggaaagtggtggtgttgacaagaaaaagaaaaaaagaaagaggaaggaggttaaagatctcaagtttgaaatggaagtggataaaacaagctcccagttaaaaagaaaggaacgtaagaaaaattatttcgaatcataaaagaagaagcacataaaatccaatgaataaaaaatggactttcctggacaagaaaaaattaaatttg

SEQ ID NO: 17185 - DNA, 305 bp, Glycine max
gtacacatctcttgtttaaacttttgacacctactacatcataggaaatgctggggatacgcggcactttcttcaaggatttggggctagtaaatcttatccaacaaatggcagctgacatgtttaaggacatttatagagtatgcaggacaatgattatagctaacacttgaagatccctaatactccctctcatttacctacttggaagcgttatactaccaaaacgagacattcctgattaatcacaataaactcaactgagagtcaccattcacatacggatataatgccttgtcatgtta

SEQ ID NO: 17186 - DNA, 340 bp, Glycine max
gccacgcgttctgcattgctctttgcaaccttatttctagctaattattatgggtattatggaacctgatatcggggataatggcatacttaatcaaatacacagaggccaacactccttccaatattccatacgcttgactagccactcctcaagctgaacctaaagctgtaaccacagccatcaccatagcaatcatgcatatatacacgcatattgcttatactaatccgtctaacattcaatctgatattaataatgatcttaataatcattttgataatcgtgaggacaaacgtaataacttatggatcaccttctaacaatattcttcatatca

SEQ ID NO: 17187 - DNA, 451 bp, Glycine max
aaaaacggtgcgtttcgatcatgttggttttttccttcctcgctcgcacttctgcgttcaggatcagcatgatctggttgtgggtcgtctcaccccaccgttccgttttcagggaaatgggtctgtggactttacttgaggggtttcttcttcttgcaaatgcgctagcgatattaaatgaggaccgctttcttgcacctagaggatggggcttccaagatttctcgggtggaaggactaagtcgttcaaaggccagcttataggcctcatttatgcaactcagtacctcagagttcctctcatacttctcaattccatctgcatttttgtgaagttggtgtccggatgatgcttactaggtgtttctgtcagatgattgcacaaaggttcttcaagaccaagtttagggttgccaaatccactgtaaaatatcaattgaataatgtcttg

SEQ ID NO: 17188 - DNA, 344 bp, Glycine max
acaagcctgaactaccttgtcaacccaagcgaccctgctgcaactctaacatgccactaggaccttttacccactcttgcgaagatcctgcactgggacggctccgtatagcgctatgtgatacgctagccagagtggcaatgtacggcgagaacgcaagcatcaaagagatccagtacatgaacgaaatagccagcatgtacgattacaaggctcaggcgaagaaacagctctgcaacatgcctctacaacgtgatgcttcaatcccaatgttacaccgagatatgcactatgagcatagacactcttaactataacactaacaacatcgttctacgcttcaa

SEQ ID NO: 17189 - DNA, 457 bp, Glycine max
tccacgcgtccgatcacgcgtccgagcagcttgcgcccatgcgtccggtggaatacaacatatcagatgctggtggcagcttgtgaactacgggaagtgttttcttgtttggacacttatgatcctgattacaagggtgccccatctatgcaggattggaagctggttgagaccctgtgcacatacttgaagcccctttttgatgcagcaaacattctgaccacagcaactcatcccactgttattaccttctttcatgaaatttggaaattgcagttggatctgtctcgtgctgttgtgagtgaggatcctatgatcagcaaccttactaaacccatgcgacataagattgataagtactggagagattgcaggtttggtttggctattgcaactagttaatggatcccctttttgtttcaagatgaagcttggtgagtttaagttcactaaaatc

SEQ ID NO: 17190 - DNA, 460 bp, Glycine max
gaggttttccgttccgaaacgatgtcctccttgccatctccaccagagacagagatcgagagcttctcatccccgtggccgagacccccggcggcgatgccgccgtctccccttcccccaagccatcgtcgtcggcgtcgtccccgcatcattccggacgcgagactttttacaaagttgttagaagctgggcatcaaaaaagtttatgactggatgtgtcattctctttccaattgcaattaccttctatataacatggtggtttattcatttcgtggatggatttttctctcctatctatgctcagcttggaattgatatttctggtcttggattcataactttcataactttcatcttcttggtcggggttttcatgtcatcatggttggggtgcttctggtcctgggggggccttggggagtggttatcaagcgaatgcacttggtctcatattta

SEQ ID NO: 17191 - DNA, 450 bp, Glycine max
tcctctttcaatctccctctaaaacttcacctacccaactttcacatcattttcttttctccgaacaaatgaaaatgaaaataaggaaagccttcatctataaatatagccatcacacactctccccattcgttccactcgttctttagatctatccactcacctgcctcttcctcacccctttctccatctaacgagtaaggaaaaatggcgcgtaagaagatcagagagtatgactcaaagaggttgttgaaggagcactttaagagactttctggcaaggagttgccgatcaagtctgcacaaattactgcatcaactgatttcactgagctacaagagaaggaaccctggctttcatcttctaaattggttgtgaaacctgacattgttatgttggaaaagcgttggcaaaatataagtggtttgagttgccttaaaatttggatt

SEQ ID NO: 17192 - DNA, 420 bp, Glycine max
ataccactctggagaattaatgtttcagagttcgtatttttctctgtaattctggaattttttctcaagaatttgtgttaattgcgaagctttctgtgttctctgtaatggtgcagatttgagctcacatcactgcgattttctcggtggccaagctcaaactgatccaatttcatttctggggtttcatcttttcaccatttcagacaaaaaaattgtgtttttaaagattcctgtaagattgtaaaattttcctgcgcccaaatctgtctcttaaataaacttagcatttaccccctttaaaaaattcaattttttgtgtgatttttttggttgactgggtgtagaagtatctgaatcttcaatgggtagggtttaagtgaagttttgaggttttggaaggtctatcttaattttttc

SEQ ID NO: 17193 - DNA, 439 bp, Glycine max
gaaatcatacattcaggaaggttatcttcactccaccaaagaagaattagcaagaagggtaggaattacagtataggagttgggcaatttgctatttgcttcaagaaatccaatttcgatgcagcaaactttgtgggtggaccaagatacaactttccaggagattactgcagactcagcaattgagatcccaggtgtgactgtctcaaaacagctaatgaggaggcacgtgcacaacctcctaaatatcttaagcccaaaagaaaagggcataatcaggctaagatttggtattgaggatggcaaggagaaaacattgtcagatattggcaaggtgtttggtttgaccaaggatagagtcctacagttggagtgccgagctttgtctaagcttcaagcagtggtttccctcgaaagtcaaggacttgatgcatacata

SEQ ID NO: 17194 - DNA, 386 bp, Glycine max
ctggtttatagatctctgtgaattcgctatataacactcaacctaagatgcagagcgaggaaggacagatcaccgagctttacagtcctaggaagtgctctgccacaaaccgattgattaccgctaaggaccatgcttcggttcaggttaacattgggcatgtggatgagaatggcgtctacaatggccatttctccacttttgctctctgcggcttcatacttgctcagggtgatgctgacagtgccctagatcgcttgtggcataagaagaaagttgaagttaagcatcatttgacacccatgatagttagttactttgctatgtattaatttctacgcttgctaaagatatttgagtactatgattgacgactttgagcaaat

SEQ ID NO: 17195 - DNA, 384 bp, Glycine max
atagaatcgtcgattttctctttttctgactttagggtttcattattttcttgggtagatccatctatctagcttgggagctgcgaaatggacgtcgcagtcactgccttccggtcaccgctgatcatcctccgaagaccggtcaacgagtctgcctcagctcggttcggttccacttttgggttttccagaaagcaacggttcagttcagtatgtatccccaaacacaagcacaagcaaggtcgtagaagagggtttgtagttagagcttctgcatcctcatctccggagtcggatgatgccaagattgctcctcttcagtttgaatcctcaattgggcagttcctttctcagattttgaaagatcatccgcatcttgtgcct

SEQ ID NO: 17196 - DNA, 247 bp, Glycine max
cttatttctccgaacccaatccgaggctataatgttatcctctgatacgtggaatgataagaggaaggtgaaagacagtgcatgggttgtgaaattctgcgttccctggtgcaagcattgtaagaacctgggttctttgtgggatgatttggggaaggcaatggaaggagaagatgaaatagaggttggagaagtcgattgcggcatggacaaagcattgtgttccaaagttgatatttatttcata

SEQ ID NO: 17197 - DNA, 314 bp, Glycine max
gttcgtactacatgttatgcagtcatgaatgtccgagagacaacacaaaggtcttccccagtgatcagcgagatcctgctctcgggcttcaccataaactcttccctaagacgcacgacacacttggtgcaatctttctcagttgttttcctccactggttctacgttttctcatgaactaaattaactgacctcgtacataggagtataaacatagtactcgtgttcttttttcaatactacatcacattcaaatcattaaatctagctagcatattagagttattatttattatcattgcacaaattaaata

SEQ ID NO: 17198 - DNA, 166 bp, Glycine max
cacaacaccatagcctttctctcgctggcccgaacgggagtgtttaccaaccttggcaagcgagctttcgtaaccttatagaacacctttctgcgttacttctttttattcgatattctgtaagccccaaacaagttaaacgattaaacccttacccattttaggc

SEQ ID NO: 17199 - DNA, 320 bp, Glycine max
acgcccacgcgtccggtctctctcactttctctcataataatttgggtttcattgttcggtgctgaagcaaatttgcggtgtagcaggggcaatggaggttcaaagtctcagctttgaggagaacactttgtgggttggctcttttgtggaggctttggtgcttgacactctccttgccactgccaaatctcttgcttgctttctcgttgtgactggatctcttcttacggatgccaataatttattgtcaccaatggtggatggaaggttttctttagaccaaccgtgcaagggaaaacatacttcttaagaaaacaag

SEQ ID NO: 17200 - DNA, 399 bp, Glycine max
cggacgcgtgggcggacgcttgggccaagtgctacagacaccaacaacgctgtagctctctcggctctgtgtcaccggcaccggggatctacatctgaacccgatccagccaatagatctcagaaatccaaatggagaacctaatctctttggtcaacaaaatccagagagcttgcaccgccttatgcgaccacggagaaaacagtgcactccccacactatgggactctcttcccgccatcgccgtcgtcggaggccaggtctcacctccgatccctctctcttactctcttctcttttcatctcataacgattcatatcgaaatctgtatgtctcactgtcagagctcaagaaagtccttcgtcttggaaagcgttgtctgcaaagatttcttaacc

SEQ ID NO: 17201 - DNA, 224 bp, Glycine max
gtaaatggaacccggcatagtgacatcactgatcctaatggccagaacagagacacatataggcccaactgcaatgagtgcatgggcattcatatagatagtcctggtcataatttatcataccgatcctgacatatttagaacatggaacaaatactagctcatccatgaaaaaattcgtcatcactgcatagctaaaaatcccaaatttattatggataaac

SEQ ID NO: 17202 - DNA, 229 bp, Glycine max
gacccaaacggccgacaagaacagaccaacgagaacaccgggaaaataacaaacaaaaccaaaagggaaaccaccagaagccaaggccaggcgaaagcgcaaaccacgcaaaaccacacacagacacaaaaaaccaacaacagcgagaaaaccacaccaacaaacaaagaccaaaaacacaaaaaacacaacacaaacacacgacccaacaacacacacaccaacacaa

SEQ ID NO: 17203 - DNA, 174 bp, Glycine max
gcctgcatgcggagacagctgctatcgggtcttatctgaggctggctccaggggcctatttagaatagcctgccccggattgaggctgcgttatagcactgtgaaatcaagcttggcgaggctactgcacgagattgaatggataccatctgatgagcgagacagttgatctaa

SEQ ID NO: 17204 - DNA, 292 bp, Glycine max
  modified_base (35)..(35): a, c, g, t, unknown, or other
gcttgtggcttttacagaaagctacagtccgatanttgatcacacctccaagtggctttcttaggcaggtgcttacatgcgttcgtctccattactgctcaatatcactgatcaattcatgtttttcgacgacagctaagagtctagatcattatcgcatgaccaatccagtaaaatactagtgaggtattacatacatacatcttgtggactagatattattgcctatattgatgctattcagccaatgaaaagcttgtgtgctaattaaacattatattatatatcctat

SEQ ID NO: 17205 - DNA, 242 bp, Glycine max
accagtgaggtacgcttccaaaagctctcctgatacatgaattttaagacatagaggaatggggggacgaaaatcaagtttgcttgcaagaaggcacttgctgacagtcagccaagaatccgcggaagatttgcaaggactgaagaatctgatgtctagagggaatgtatgacataaaactgattttagtaggaagaaaatagagttgagtatctatatctgatccagctatatggaaaaac

SEQ ID NO: 17206 - DNA, 342 bp, Glycine max
tcgtccacgcgttcgcggagatgtaccctgaaacgtagctacagccagaggctagaactccacgaggcgttacttagaacggtgacagagagtatcttgaatacgatgatcctaaaacggtatttcgaggataggcttgtgatgatcttggacgaactttctgtgagaccgaatatcataagggtgtctactagagaaatgtgaaaaccctttttattgccatgactactgcgttatcaatgtcaaccagtagtaattgtcgtgttgaattgtacatatgtataaggctatggatctcaatttatattggggtgaagtatcgctattaaactttacaataat

SEQ ID NO: 17207 - DNA, 188 bp, Glycine max
gctcttctgaccatgactttgacattttcatcaggtctatacatgtgccaaatgtaccatgagaacatctcatgccctgtcgggcaccatgctcaaccacaacaaagtgatagcaatgtttcgatgagaggcttgtgaaacacctcaagctgtgcaactcgctgggcctgaaagataatatgcatcct

SEQ ID NO: 17208 - DNA, 430 bp, Glycine max
tccacgcgtccgcttttcggaaccaagcgtgtgatcggtttgcgttttgatgattctcaagcgcagaaggagatgagagatggggccatacaagattgttaaggcgtccaatggagatgcttgggttgaagccaatgggcagcagtattctcccagccaagttggtgcttttgttctcaccaagatgaaggaaactgctgaatcatatcttggaaagtcagtttcaaaagctgtaattactgtaccagcttacttcaatgatgctcagaggcaggcaacaaaagatgccggtagaattgctggtcttgatgttcagagaatcatcaatgagcccactgccgctgcactttcctatgggatgaacaacaaggagggtctcattgcagtttttgatcttggaggtggaaccaattttttgatgtgtccatct

SEQ ID NO: 17209 - DNA, 239 bp, Glycine max
ctctttctctctatgaccaatcccaaacccataacacaatttaaaaatgggaggggatctggggccaaagctgatgggaaaaaggaatgaagaggaagaagaacaagaagaagagtttttattgggccaaaaggtttggaatgagaaccatggtatttggatagtggcggtaccagccatatttacaaagggtttcaccttttgaatcaatgttataatcccaactttttttggccata

SEQ ID NO: 17210 - DNA, 434 bp, Glycine max
cgctgttcctacaatcattccattagtgccctaccggtcgcaccctcctccctgcctccgtctccaatttccgacgagcattcgacgtcctcgatgccgaccgcgacagcaaaatcagccgcgacgacctccgcgccttctacgccggagtcggcggcggatgagatgacctgatcggggcaatgatgacagtggctgacaccaataaggacggtttcgtggagtactaggagttcgagcgcatggtctcggcggacagaaagcccgtggggtactgtggggccattagaggacgtgttcatggtcatagacaatgacagcgaccgcctacttatccaccattatcttaagacttacataggctgcgcttgttttccggtcaccgacaacgacatcaacgtccaattttatccgattctgctgcagctaccaaa

SEQ ID NO: 17211 - DNA, 117 bp, Glycine max
aaaagcagtgtatttctattttaatcttgttatgacatcatgggactcttagggttttttgcaaattcatgggggatggatggtttttccattcccaataatacctgacatttttct

SEQ ID NO: 17212 - DNA, 449 bp, Glycine max
cccttatctttctctcttctcatgaccccggttaaaccctaactccctaccctagtccgctttgtctcatccatcatgaaaggaggaaagtccaagaccgaatctaagagagccgatgccaaacttgctgtgaataagaagggcgccgccaccaagactaggaaacccgccggaaaggggaaggcagcgaaagatcctaacaagccaaagaggcctccaagtgctttcttcgttttcatgtaattataatatattgttatctctacgattcatttgacttccgatgcgctctcttatctttcctccgaataattttatcgtcaaaacttttatccttgtccaattggaggaattcaagaaggtgttcaacaaggaacattccgacaacaaagccagtgtctgctttttgtgggcaaagctgctggaacaaaatggaagctatgtctgat

SEQ ID NO: 17213 - DNA, 423 bp, Glycine max
ggcttccctccctcctttgaagttacaaatctgaagagtgtgttgtgttgtgttgaagtaggaagctagcaaagatggttggcatcttatgaggcaataaggggcacaagatcaagggtactgtggtgttgatgagcaagaatgtgttggacttcaacgaaatagtgtccactactcagggtggtttggttggtgctgccaccggcatcttcggtgctgccaccggtattgttggtggagttgtcgatggtgctactgccatcttcagtcgcaacattgccatccagttgatcagtgccaccaagactgatggacttggaaatgggaaagttggaaagcaaacctatttggagaaacatgttgcttcgttaccaaccttggggagacagtgccaagatgcatttttctcaatcggtttatttt

SEQ ID NO: 17214 - DNA, 444 bp, Glycine max
tccacgcgtccgaggattacatcgatccaagtgtcaagagttctaacttcaatcttgaagagggagccaaggtgataattgctgcgcggagcaacaacgagatggatgcatccaaactgaagaacgagttccctgagcttctttccatcaaggaatcactgatcaagtatgtctctgagccaaacaagaaaactgcttaaatatattaaagcggattcatgttttatacatcacacattatgcatttctgtggcgggctacatatatcactcattatttcattggtattttgttgagtattgataagaaccatactacaaaagctagccatgtagttcttggtctcttagctataagcgattcctgtgtcagcatatctacattatattaccagggtttagaagggtgaacccccaagtattattaactgggccagatatggtt

SEQ ID NO: 17215 - DNA, 184 bp, Glycine max
agcgtaccgtcgcggacatctcatgattccctcaacgacatgtcaagacatgttcaaccatcaacaaacttagagattatcatgtcatgattatagcgcagctaccaccgaagctagggtcatataaatcgctgacgataggtatattatcgttataggaatctacgacataacatgactaatg

SEQ ID NO: 17216 - DNA, 203 bp, Glycine max
aaaaaaaaaaaaaaaaaaaaaaaaaaaaaaaaaaaaaaaaaaaaaaaaaaaaaaaaaaaaaaaaaaaaaaaaaaaaaaaaaaaaaaaaaaaaaaaaaaaaaaaaaaaaaaaaaaaaaaaaaaaaaaaaaaaaaaaaaaaaaaaaaaaaaaaaaaaaaaaaaaaaaaaaaaaaaaaaaaaaaaaaaaaaaaaaaaaaaaaaaaa

SEQ ID NO: 17217 - DNA, 306 bp, Glycine max
  modified_base (84)..(84): a, c, g, t, unknown, or other
cccgggctgtattgctgctattggggcacggaatcagaatgagtggcaccaacttagtcttaaacgtcatctgaatctcagttncgcaggcttacgactaattgtgattgattggtgtgaaaaggatgaaaggaaagagtgactttctttttaatattttggatcctaaattttagaagctgcatttgatctttgtatttcggagctatcaagatcggatgtcaatccatccagatctttattgttgaatccccaacacctattataatgtgtactcattctcttgatgctgctgacttgagctcc

SEQ ID NO: 17218 - DNA, 410 bp, Glycine max
acactaccctcaacatagtaaagcagctggtgcaagtgaagcaatggctcaaaccatgttgggcatgtctagtgtctctagcagttattccgtggatttgaagaaagaccttttcctccaattgcagagtcaaagtttaaggcctaagttctctcaactctcattcaacccacttccaccatcaacttcttccttttcttcaccccgtacattcacaaccctggctctcttcaaatctaagacaaaagccgctcctgctaagactaaggttacaaagccaaagcaaaaggttgaagatggtatctttggcacttctggaggatttggttttactaaacagaacgagctctttggggtcgtgttgctatgcttggttttgcaacatcaattgtttggttgaaggaataact

SEQ ID NO: 17219 - DNA, 265 bp, Glycine max
acactaccctcaacatagtaaagcagctggtgcaagtgaagcaatggctcaaacgaggttggtcatgtctagtgtctctagcaggaattccgtggatttgaagaaagaccttttcctacaattgcatagccaaagtgtaaggcctaagttctctcaactctcattcagcccacttccaccatgaacattgtctatttcttcacccggtacattctcaaccctggcttctctataaatgtaacacatatgccggtcctgctaagac

SEQ ID NO: 17220 - DNA, 366 bp, Glycine max
acacgaccatgctcagatttcatacactcatgcttggaatgccatggatagtaccaaatttgagaatgttagtgcccctgccattgatatcgactactggaggcttgacaaggatgcaactctcaaggatgatggcactgtgattagcgctgatgaggctcatcacagggatgttaaccactatgcttctgacattcatcatcaagggaaggaattaaaagaggctcctgctactattggttatcactgagtcattgttgtaaattttttaacaaatctaaaatctaacctttgctggctcatagaccttctagctatttagaccataatgattcaataaaatttatttctattgagcactttaaa

SEQ ID NO: 17221 - DNA, 385 bp, Glycine max
atcacttagtgcagaccccaaaaatgttgttttcattgttagtggacgggggaggaatagggtaagtgactggtttgattcctgtgaaaaacttggaattgctgcagaacatgggtacttcttgagatggtctcacggtggagaatgggaaaactgtggtaagagctccgactttggatggatgcagattgctgaacctgtaatgaaacaatatacagaggcgactgatggctcctcaattgaaagaaaagaaagtgctttggtctggcaataccgtgatgcagaccttggttttggatctgctcaggctaatgaaatgttagatcatctagaaagtgttctggccaatgagcctgttgctgtgaagagtggccagtttattgtt

SEQ ID NO: 17222 - DNA, 455 bp, Glycine max
gacccgggcgacgcgtcacgcgtccctcgatcttcgtccggggactgcttcgaataccaccaccaccactcgccgatggcgacgatcggaggcttacgaggactcccaaggctctcaaaacagcgtctaaaccgaagccctcgctcgattcgccgtagaccaacacaacacgaagcagaattcgcttctggagtttgctagggtggttagggcacatgaacacgttgttgctggtaccctgcatcaccttactcttgaggctattgaggctgctgagaagaagctctatgaagccaaagtgtggttgaaaccatggctgaatttcaaagaactccaagagctcaagcctgctggtgatgcaccatcgtttacctctgctgatcttggtgtcaaaaaggatggtcaccaaccacgatggcaatctgtgccaacacatgaccctcaagtttatgatg

SEQ ID NO: 17223 - DNA, 444 bp, Glycine max
cccacgcgtccgaaaaaacataagaaaagaaaggtgacatggcaaagtgataataatagcttggttctgcgtctcaattcatctcttctctgagtctcaacctaattccccaatcaatcatctttacgtgtttgttcgagaccatggccaaaagccccttcaagcttgaacatcccttggaaagaaggcaggctgagtctgctcgcattagagacaagtatcctgatagaatacctgtgattgttgagaaagctgaaagaagtgacatcccagacatcgataagaagaagtaccttgtcccagcagatttgactgttggccaatttttatgttgtccgtaaaaggattaaggtcagtgcagagaaagctatttttggttttgtcaataacactttacctgcatcttgccgctttgatgtcttctatttatgagggaaaattaag

SEQ ID NO: 17224 - DNA, 472 bp, Glycine max
cccacgcgtccgcaaaataaaatatgaccaaaacattacttctatggatttttttattgatcagcatcctcatgttttcaactactgggagcacatttactacaaaaattgaagatcttgggacttccaggcaacaaaaggaaaccaaaaccatgtacggtgtgatcatggaatcaagcaaaccaaacactcaaagaagaacaaatctaggattgcatgttgttcaacacacaaaggtgtcacagaaagcaaagacaaatggtggagggaataacgtaaaggatcataaggggaagaatagtgcaagcacctattcaatcaacaaatcttcatccttgttcattcccgtgatgcttttgtttggttacttgttttgaattccaaggcttaaatttatttacagtgaaggcacaactagtgatgcttaataacatgatgccgctagtggtactttggatttgtataatacatg

SEQ ID NO: 17225 - DNA, 470 bp, Glycine max
attgactcttctgttcgggaactcttttttctctcaacctcactcttcgggatagatgaatggaagaacactcttgagaaccgtcatccccaaaccacaacaacaccaccaccattgtcgtggtttctcaacatacgacataggaacatgcatttccaccctccaatcatgtgcgcacaatgcaaacctctccaaaggcaaggaacttcacacccacttgctcaaaaacgcgttcttcaaatcccccatcgccatcaccaacctcatcaacatgtactccaagtgctccctcatcaaccattccctcagagtcttcaacttccccacccatcacaacaaaaacatctttgcctacaacgcgctcatcgctggcttccttgcaaacgcgtttccccaacgtgcccttgctcttgataaccaaatgaggcatctaggtattgctcttgacaagttcactttcccgtgtgtca

SEQ ID NO: 17226 - DNA, 452 bp, Glycine max
  modified_base (312)..(312): a, c, g, t, unknown, or other
cttgcttggttatgatattggagtgatgagtggagcagccatatacataaaaagggacctgaaagtctcggacgagcaaatcgagatcctgctcggaatcatcaacctatactctctgataggctcatgtctcgccggcagaacctccgactggataggtcgccgttacacgattgttttcgccggcgccatcttctttgtcggagcacttctcatgggtttctcccccaattattcctttctcatgtttggccgtttcgtcgctggcattggcatcggctacgccctcatgatagcccccgtctacaccgncgaggtctccccggcctcctctcgtggcttcctcacttccttccctgaggtatttattaatggagggatattaattggatacatatcaaactatgcattttcgaagctgacactaaaggtgggatggccaatgatgcttg

SEQ ID NO: 17227 - DNA, 444 bp, Glycine max
cccacgcgtccgaaaaaacataagaaaagaaaggtgacatggcaaagtgataataatagctgtcttctgcgtctcaattcatctcttctctgagtctcaacctaattccccaatcaatcatctttacgtgtttgttcgagaccatggccaaaagccccttcaagcttgaacatcccttggaaagaaggcaggctgagtctgctcgcattagagacaagtatcctgatagaatacctgtgattgttgataaagctgaaagaagtgacatcccagacatcgataagaagaagtaccttgtcccagcatatttgactgttggccaatttttatgttgtccgtaaaaggattaaggtcagtgcagagaaagctattttttgtttttgtcaataacactctaccttcaactgccgctttggaggtctttctatttattgaggaaaatta

SEQ ID NO: 17228 - DNA, 417 bp, Glycine max
gttgatcctgtgaacttatggctgacggggtggttctgttggatacatgggccagcatgtttgggatgagggttaggattgcattagctgaaaagggtgttgagtatgaatacaaggaagaaaatctcaggaacaagagtcctttgcttttgcaaatgaacccaattcacaagaaaattccagttctgatccataatggcaaaccaatttgtgaatctgcaattatagtgcagtacattgatgaggtctggaatgataaagctccaatcttgccctctgacccttatgagagagctcaagccagattctgggtagattacattgacaaaaaggtgtatgacacttggaggaaaatgtggctttctaaaggagaggagcctgatgcaaggaaagaaaggagttatctctatctttaag

SEQ ID NO: 17229 - DNA, 443 bp, Glycine max
acgcccacgcgtccgcgggatcagcacaagattgctaaatgaagttcaacattgcaaatgccaccagtgggtgccagaagaagctggaaatcgatgacgacctgaagcttcgagcattttgggacaagaggatctcccaggaggttcttggtgatgctctgggtgaggagtttaaaggatatgttttcaaaatcaccggtgggtgtgacaaacaaggattccctatgaagcagggagtgctgacccctggtcgtgttcgacttttgctccatagaggaactccttgttaccgtggatatggaaggctcaatggagagcgttgaacgaagtctggtcgtggttgcattggcagttcagatctctctggtttgaacctgggaattgtgaaaaagggggatagtgatttgcccggtgctcactgaatgttgaaaagcccagggatg

SEQ ID NO: 17230 - DNA, 70 bp, Glycine max
tctgatcgatatgatactattatgtgatgtggagggagggagagggaggtagagttgtatatatatgtaa

SEQ ID NO: 17231 - DNA, 393 bp, Glycine max
gttacttcaggaggaattactccgccgtggctgccgcagcggcggcggcggaggctgatgaggaggaagatgaggatgaggcggaggatttggaggaggaggaagaatgtgaagaggaagggagggggagcgaagtggaggaaggggagaaggagagggaagggatgaggaggttggcgaaggcgatagagaggtttggtgaagtgtatgagagaatggaggcgcagaagctgaggcagatggtggatttggagaaacagaggatgcagtttgctaaagatcttgaagtgcagaggatggagatgtttatggacacacaggttcagctcgagagaatcaagcgcgggaaaagatctggctctaacgatatggatagctagccaagtgggcgat

SEQ ID NO: 17232 - DNA, 314 bp, Glycine max
caaaagtgagaaattgtgcgtgtatctggttgctaattcgagtgctattagtctgtggtttggttggtttgtaaccccgctacttgggttatgtttgattgtatattatcctagagaaataaaaattttaaattatcagtacgtattggtattacatgctagtgagctgtggttacatttttctttttttttaaaggagctattgtggttacactgtattccaacataatgcaattgatgtgattataattgccacagcaataattctaaaaacttgatattgtggctacaattacatattattttttagaatc

SEQ ID NO: 17233 - DNA, 131 bp, Glycine max
tcggccaagccgtccgatcatatcccactcttattctatgtcacttaactctatgtatttagcggatatgggggtgaaatattgggtctgtgaattttcgagagaaaaagtgtgcgccctttaatagggtg

SEQ ID NO: 17234 - DNA, 298 bp, Glycine max
aatgaatctgctgcgtgcggatcgctagaacgcctacgagggacgacctggcggcctcaatgactttgaactcacctgactcagctcaaaggctaactatgtggtaatgacactgatacctaattgcactaaccctattgacaggaagattgataagggtctaagtcggcctaaagggctctccagaacctttagatactataccttgcactgatctggctggagaagtagctgatatctgaactgaagttaaagatgctaaagctgcgaacacaagtacttgctaaactcactcatc

SEQ ID NO: 17235 - DNA, 420 bp, Glycine max
caaaatatctatcaaaagtaaaaagcgaagagaatggaaaaactttaatttttttatggtaaaaagttcaattatacctgttatttcacaagaaaaaaaagaaaaaaacccaggatcggttgaatttcaaatattcaaatttaccgatagaatacgaagacttacttcacattttgaattgcaccgaatagactatttaatctaaaaaggtttacgtaaaatttttggaaaaccaccaaaaattgctgtcttaatttgtcaaagacagatagaattacggtataaaaaattaaataaatcaagttgaatatttcataatcacaaaattcttttaaattgaaaagtaattctaaatatatcgatttattagatctttgaattttgatgaacttttttttttaagcgattcataaaaaatta

SEQ ID NO: 17236 - DNA, 481 bp, Glycine max
gcgcaggatccaaagaaacgcattacctctgctcaagttcttgagcacccatggattaaagatggaaatgcttcagacaggccaatagacagtgcagtcctttccagaatgaagcaatttagagcaatgaacaagctaaagaaacttgccttgaaggtcattgctgagaatatgtctgcagaagagatccaaggtttgaaggcaatgtttacaaacatggacactgacaagagtggtgcaatcacctatgaagaactaaaggcaggattgcatagacttggctcaaagcttacagaggctgaagtgaagcatcttatggaagctgctgatgtagatggaaatggctcaattgactacatagaattcatcactgctacaatgcatagacacaaattagaaagagatgaccaacttttcaaggccttccaatattttgataaagacaacagtgggtttattacaagagatgaacttgaaacag

SEQ ID NO: 17237 - DNA, 474 bp, Glycine max
  modified_base (382)..(382): a, c, g, t, unknown, or other
aaagggccttggctcgcttttggattaaatttggagaggattcgattgcttctattaccgatttggttcttggaccctgtaaagatgaacaagaaagagcaagtgcaaagaaaaaggcagaagaaactatcatggtaatggaagagcaaggcctaggagacaagaagttctttggaggcaacaatattggaatggtggatatagctcatggatgcctaagtcattggttagaaggcttggaggaaattgtggggatgaaattgattgagccaaacaaatttactcggttgcatgcgtggactcaaaatttcaagcaagttcctgttattaaagaaaaccttcctgattatgagaaactgttgatccatcttgaatggcgtangcagggatatgttacatagtagaactagaaatcataaaatgggtaatgaaattatgactatagtctataggcctatagtgaataggagttta

SEQ ID NO: 17238 - DNA, 441 bp, Glycine max
cccacgcgtccgctttctaaaaggcctcaaggatacactccggacttaattacgttattttggtagggtcaccgtttcgagatattctaaacttgtactgaaaaatatggagggaaaagaagaggacgtaagagttggagccaacaggtacggagagaggcagccaatagggaccgctgctcaggctaaagactacagagagccaccgtcggcgcctctcttcgaaccgggagagttgtcatcgtggtctttctatagggctggcatagcagagtttgtggccactttcttgttcctctacatcacagtgctgactgtgatgggtgtgttcaaatctaagagcaagtgttccactgtgggtatccaaggcattgcttgggcttttgggggaatgatctttgctcttgtttattccactgctggaatctcagggggtcatat

SEQ ID NO: 17239 - DNA, 334 bp, Glycine max
ctcgaacacccactatctcacgagagtcagggtctcactgagaacttaatcccgttataagggtgcagaaaccgatggatgatattatactctcgtactgatttgtatgccagttaaagaagttaacatgaaacttgaaggcatcatgaactgtgagagtctccctatatgcacatgcgcttaagctggatacttctgagtgccaacgctttaccttctatatgaacctggagagataggatcgtgaccttgatttcacatagtcctatcagaggaagtagccactttcatgtatctgtacatcacagtgattgctgagatgggtgagatcata

SEQ ID NO: 17240 - DNA, 302 bp, Glycine max
cggacgcatgctctatctaaaatgactcaatgtttcactccggacttaattacgttattagggtatggtgaccagttggagatattctatacttgtactgaaaaatatggcaggaaaagaagatgacgttagacttagagccaacaggtaccgtgagaggcagccaatatggaccgttgttcaagctaaagacttcatagtgccaccgttggagcctctcttcaaaccgggagagttgtcatcgtggtctttctattagactggcatagcacagtttgtggccactttcttgtatctctaca

SEQ ID NO: 17241 - DNA, 294 bp, Glycine max
tgccaatggcatttgttcattggtatgtgggttaaggaatggaataaggtgaatggggtggagcccgtgaggatcttgctgctcttgaaaaggactatgaagaggttgtagcataatgcgaataataagaataagaataacacgacgattactcgaaatatagtcaatcattcatcaacattgtcaccagctaccttacctacattttccttcttttctctgtctaatgtctgtccttgtccattgaattttaagcatttttatgttgtgtgctatctctgatcttactattgg

SEQ ID NO: 17242 - DNA, 438 bp, Glycine max
atgactatgactctggtttcaacaagccatcgtatgagtcttctggcggtggctatgaagggggttacaacaaaacatcttattctagtgatgagccagcttctggtggtggctatgaaggtgggtacaagaaaacaggttattctggtggcattgatgagacttctggtggctatggcgctggtggtggtggatactctgacgtcactgatggtggctacggcaaaccaagtggtggctatggcgccgctggtggtggtggtgtgtaccctgacactaccactgatggtgggtacagcaaaacaagtggtggttggtatgatgatgaagttgactattagaaggaagagaagcaccacaagcatcttgagcaccttggtgagttaggtgctgcatcttgttgctgcttacgccttgcatgaaaagcacaatggcata

SEQ ID NO: 17243 - DNA, 465 bp, Glycine max
gccacgcgtccggttcaccctatttacaaacttctgtttcctcactatcgtgacaccatgaacattgattcacttgcccggagatccttggtcaatgccgacggtattatagagaaaacattcttgtggggtaggtactctttggaaatgtctgctgttatttacaaggattgggttttcaccgatcaagcattgcctaatgatcttgtcaagagaggagttgctgttaaggatccatctgctccccatggagttcgacttttgatcgacgactatccttatgcttctgatgggctagagatatgggatgctatcaagtcttgggtggaagaatatgtctcattctactacaagtcagatgaggaacttcaaaaagaccccgagctccaagcttggtggaaagaactcgtagaggtgggtcatggggatttgaaggataagccatggtggcaaaagatgcaaact

SEQ ID NO: 17244 - DNA, 200 bp, Glycine max
tccactcgtccgaaatatgccataattcaatgactggttcgagttcaacattggcgcatgtagacatggggattatggaaaatttatgaggcgttattcgtggagtatgatgtgcctattaatgtaattggagacacatgaataaataacttgtgcttctatgtaaggtgtttcctattgtcagctgaatcaataacttg

SEQ ID NO: 17245 - DNA, 472 bp, Glycine max
  modified_base (424)..(424): a, c, g, t, unknown, or other
cttgttggtattgatcgtaagaagcgagagctcacaaattggctaacagaaaaggagggtccagtgaaggtggtggttggcccaggagggataggtaaaacggcaattgtgaagaatgtgtacaacatgcaagagcaggtaagccttcagaagaagggaacaagctatttcgagttttgtgcatggataaccatgtctgggcctcaagttgatgatcataatatgctgataataaggcagattatagaaaatatactcgagaaggaccccggtgcatcagctacattgcagaaggaaacaacagctatacactctcttataagaaaagtaagagaatacttaaaagataagaggtacctcattgtgtttgatgatgtgcatagttcaaaattttggaatgttatcaagcatgccctaactccanacagaagcaaaagcagtaaggttattatcactacacgagatgaaaatg

SEQ ID NO: 17246 - DNA, 438 bp, Glycine max
atcagctatgtctttcggcaagaactagcactacaacagggcctcacgttgtgggatggccaccaggttgatcttttggaacgagcgatgatgaatcacacgaaaaacaacggtgtctctctgtacaactcagttcggatggtgtcccttatcattgaaaggatctccagtgattcatgtccatgactaaggactataaaaggctatgaaaaaattgtagtgactaaagttgtagtattaatgcatcttgcaatgctcgagtatgtatcatatacaaatactttcatatcatacgacgtaaattcgcgttcatctcatactacataatactgagtggactagaatgtacataaccatattgacaacaaaggttaaagccaaatgtaaaagggtgtactcctaactgtcccacggaaagagaacctacaagatttaaag

SEQ ID NO: 17247 - DNA, 464 bp, Glycine max
ctttgcttccccttagtcaaacagagtaacacaccatccatcctctctctcttctcttcttctgggctctagtttcctgctctagtttcttagaatccgtacggtctaatcaacacagcatactggatgcaattagttgcctggatgagagcaccaccaccgagtcactctccataagtcaggcgaagccttcttcgacgattatgtcgtccgagaaggcttctccttccccgccgccgacgaacaggctgtgcctcgtcagtagcggtgctagctcagtcgtggattccgacggcggcggcggtggtggcagcaccgtggtggagtcgcggaagctcccctcgtacaagtataacggcgtcgtgccccatcccaacggtcgctgaggctcgcagatttacgagaagcaccagctcgtgtggctgagaacgttcaacgaggaagacgatgcagctcgtgcgtac

SEQ ID NO: 17248 - DNA, 427 bp, Glycine max
gtgcatcttctttttgttgttctctcaaactttaacaatctcataaataaataatcagaacgaagaaggggaagaattgaattcgaaaaatcgtagcgtatcgttggttgcgattgaaacggtacgatgggaagaggaaaattcaagagcaagcccaccggtcgccggcagttctccaccccggaagatatgcttgctggaacctctaaccgtcctcgaacttttagacagaaagaagctgagcatgaagaggagcctgaggaagtatctggggatgaatctggagaagaatcagaagaggaaacttctaagaaaaaaggaacacaaggagttattgagattgaaaatcctaactttggtaaaccaaagagcttgaaagcttaaaatgttgattgttggaaaaacaacagaacttttcaagcgtgaa

SEQ ID NO: 17249 - DNA, 326 bp, Glycine max
ttcccagctcgaccgactcatactcataaccctaaccctaatctttctcccactctttcttactaccaaacaatccctaatccacgcatgtcttacactgcttgtgttcacaaaccatctcacatctcttcaaccattaccacaactcgttccactccatccatcactttaccccaccatcattctcacatttcatattttttctctatcttctacctcacattaatacaccatcattaacatctatttaactacaactactaattcttactctacttcaattatatatcatccttaatatcatcatcaccatttgcacaatcaac

SEQ ID NO: 17250 - DNA, 433 bp, Glycine max
  modified_base (370)..(370): a, c, g, t, unknown, or other
  modified_base (373)..(373): a, c, g, t, unknown, or other
caaagccctaggccgctgctgcgtcgtctcgcgccgcttccactccctcgtcccgcaggtcgaaaacgtcgtcgtccgcgtcgactgcgtcatctccgacgacgactcctcttcctccgccgccgcctccgacaagtcccgcggccccttctggaacctcctccgcctcgtcttcggcggaatcgtgaaacccatccaaaccctcggtcagttcctcggccccaaacgcccctcctcctcctccgtcacgtccccttcctccaccacctcctcctcccccctcgccgtcggaaccgacgacgactccgacgccggcgtcacccaccactccccgacgcaggtcctcaaaaacttcaacgagattcgcctnctncggatcgagctccccagcggcgagctaggcatcgaagacggcgtgctcctcaaatggcgc

SEQ ID NO: 17251 - DNA, 381 bp, Glycine max
cccacgcgtacgctaacaccaaatagtaatgcccggacaccgcgagtcaaacttgcagaacgagctggggcgattcattcgcactgccgaagcatttggaggcatctgtattggagccctgacagtgttggcagatttcatgggggccatcggttcacgaacaggaatattgcttgcagtaaccatcatctatcactactttgagacatttgaaaaggagagagctagcgagcttggcttctttggtttctaagttctgccaatgaactctaccacacccttttgtttagggaacgttatacttggaaggccgttaacatcgtaagggatgacatagtctagtttgttgtcattttttttactaagttgttcccttttaac

SEQ ID NO: 17252 - DNA, 432 bp, Glycine max
attagatgtaaccattttgctccctctttactttgtagctgctgaaatgttctcagggtgatataagactaatgggttctggtcatgcatatgaagtatgttggagtcagaagttaaagctagttgctgttgttgtttagttctccactagtcctggttactattataacttttggggaggtttggcaaaatttgaaatttgaggtacaaagcttctggactggacacgaatgtgctggctggagctagatgtgtctctggagtttgggctgcacagggtccaatgcgattggtagtcaataccgtgatggctagaagttttgagagaagtatggaagctggcacattgggaatgattggtcataaacgttttatgagtgacatcccaagtaaaaccagtgagacaaacctatctggttttcgttcgctatc

SEQ ID NO: 17253 - DNA, 440 bp, Glycine max
  modified_base (298)..(298): a, c, g, t, unknown, or other
caacagcaacacgagagccactcagtgatcgcttctcttcttcttcatcttacagggtcaggggtgaagttggttgcatatgttcgtatttggctattgaatgaattgcactagtgttctgctgcaaattttttgacatatattggtgacgggatattttctagatggggggagcatgttctaggaagcaagagtgggataacgaagatagtcttatcagaggactaccacgaagatattgcaaatgcggaagtttgaaatggtggacatcctctttttcttatccatctgtagattntcacctacgaataggaagaatgtccatcactgttggacttatgcatacagaaaataagcgaggatattgataaatataacacattttctatgctaccacgagatataagtcagctaattttcaataatttggtttactcccg

SEQ ID NO: 17254 - DNA, 430 bp, Glycine max
ctatgccaagccgagccagagctacattgagcgcggcgtgttgaaccatcattctggactggcttctacaaagccctataccttctctaactggtactcacctgatggaaaattagatcgggccgtaaatggataacagctgtataagctgtggtaatctgtatactttggattcctaggctacgacactccactaacatagacttcatccgacttgttagcgaatgctgactgatgatccacatgtgcctagggttaactcacttgagaaggatgctccaccgaaatcctgtgaatctggtgattacaaggggaaagagcacctaaagctactgctatgccacacttggaacagatgctatttcatcatggttagagcacttgtactttgactaggagcaaattgagtcatgattgcaattttaagggc

SEQ ID NO: 17255 - DNA, 431 bp, Glycine max
cccacgcgtccggctgtctctcccatcctttcgcattctcaatacccttttgattggtgaagggaaagcaaacatggttgatcaggtccaacaccctacaatcatggacaaggttgctggtcagctccatctccgttctggtctttcatctggtattagaagttatgatggagcctaccgccacccagctatgtaccaaagaccctcttttgggaattactcgaatgctgcattgcagtttcctgtgatgcccacatgcaaagctaccatggatttgtctgctactgcaacatctgcctcacccgtctttgttgctgctccagcagagaaaggccattttcttttagactttctcatgggaggtgtttcagcagctgactccaaaactgctgctgctcccattgaacgtgttaagcttttgatccagaacc

SEQ ID NO: 17256 - DNA, 434 bp, Glycine max
  modified_base (272)..(272): a, c, g, t, unknown, or other
  modified_base (361)..(361): a, c, g, t, unknown, or other
cattcacccatttttctctctcagatttcatttttcttcttcttcttctctctcttctttgtgcttattgtattttatggacaaaggatggggactcacccttgatacctcttcctctcaatctcttccattattcccttccaacgataataagatgtttcctctcctcggattccccgtcaacctcagccgcgcctccaaggaagacgatgaaaaccgcaaagttgtcggtgaagttgacttcttctctgacagaaacaaacctacacctncaccctctcacgaccacaacgttaaacccaacatcgtcaagaaggaaatcgatgaaacacctcttcacattaatactgggttacaactncttactgctaacaccgggagtgaccaatctaccgtggatgacggggtttcatctgatgcagaaaataagcgag

SEQ ID NO: 17257 - DNA, 407 bp, Glycine max
actcggtctttaattctcgactcaaccgtcccttaattccactccttcttctacacatactacatcattttattccatttaaattacataccatattagtaatcttctaaaaagtggagccttccattcattatatcaacactaaaatacattatacatttcttcctaatcaaatctactatatttaactattactacttccaaaaccaaattttataaatatatatattcatcatcttcacatatttattttcattattatatacaacttctacatcatcaaaatatacttcactactatatgcctacattgacttatacttctactaatcttcaaaaccattctcatttcatttctcataatatcatttatttccctacctcttttattttcttatcattatttt

SEQ ID NO: 17258 - DNA, 226 bp, Glycine max
tcttactcttaattttctcttcattaaactcaacgtttccctctattccctctgcgttttttaacttggtgttttcccttaacaaatccgaatttttctttccattacccaaacccaaacttttgaagattccaaataacttgttgttcttcaagaaaaataattcccctaaaaaaatgtattccatttgtgattcccttcccgaaccttctccgaaaaattttcc

SEQ ID NO: 17259 - DNA, 374 bp, Glycine max
ccggagcaaaaaaacttgttacgatggtttcttccgacaaggatccacgagaggaagtccttgaagcatggtacatggatgatagtgatgaagatcaaagactccctcaccacaaagaacccaaggagtttgtctcgttggaccaacttgctgaacttggagtccttagctggaaattagatgctgataaccatgaaaatgatccagagctgaaaaagattcgtgaagagcgtggctacacctacatggatgtctgtgaggtctgcccagaaaagttgtcaaattatgagcagaatatcaaaagcttctttgaagaacatcttcacactgatgaagagatccgcttttgtgctgctggaagcgggtattttgat

SEQ ID NO: 17260 - DNA, 370 bp, Glycine max
ctctctctctctctcttctctctctctctttcttcctttctttaatacttattaattcatctgttttatctttctttctttctttccccttttgtatttctgggttcgatattgttatcggttatttgtgcactgcttccgccggggctattcaggaatcatggctagggttttggctcagtctgttaatgtccctggtctagtggctgagcataggcatggtcagcaaaagggatcaggaaaattaaaaagatcgaccaaaatgatgagtgctttacggacaaatggattaagaatgtcaggtttctcaaggcttcgtactttcaatcctctggatactatgttgagacctggcataaattttcattct

SEQ ID NO: 17261 - DNA, 434 bp, Glycine max
ccagaagaagaagagatcatgacaaagctcaaaaaccctcaactcaatgcaatcgaagaagcgcttaggtctctcagaaaactaacgagaataagagaagaaacaaggcttcaactttgcacccctcggttactctccgcgttacgctcactcgttttgtcgaagcacgtgaacgttcaggtgaacgctctggcatcggtggtgaacctctcgttggagaagagtaataaagtgaagatcgtgcggtcggagatggttccgccgttgatcgaggttttgaagtttggatcctctgaagcgcatgagcacggtgcgggcgcgttgtttagtttggcattggatgatgataacaaaaccgcgattggggtttgggggggtttggcaccggtggcttacatgctccgatccgagagcgagcggacttggcatgactc

SEQ ID NO: 17262 - DNA, 438 bp, Glycine max
  modified_base (345)..(345): a, c, g, t, unknown, or other
caagttgtgaaaccacatcgcaagaaaattcacaagcgatggatccgaagctgaaagagggtgctcagctcttcgatcgcttcaaggcttcgtttctccggaacgacttcgataactgttccaatctcctttctcagctaaaggtgttacttacaggtttcagaagcctgccaccgttgtttgcagatacacctaatgcagttcatgaattaacaatagcaagggatatatatgagcatgctgttgtccttagtgtgaaaattgaggatcaagatgctttcgaaagggatttcttccagttgaagccttattatacagatgcctgcaatcgtcttccaccatctnctcaggagtaccctatactgggtctcaacctgttgagactacttgtgcagaataagattgctgagttccatactgagttggaattgctttcat

SEQ ID NO: 17263 - DNA, 432 bp, Glycine max
cccacgcgttcgcccacgcgtccgggcgatcgaggcgttggattcggacggcgacgggttggtgtgtttggacgatttgatgaatctgatggaggctgctggagaagaagagaagttgaaggatttgagagaagcctttgatatgtatgatactgataggtgtgggtttattactccaaaggccttgacgaggatgctgaagaagttatgggaatctaagtcaatggtagagtgcaaagtgatgataagtaggtttgatttgaatggggatggcatgcttagctttgaagagttcagaattatgatgaagtgactacgatgatggtggggatgattatgatgctacatggacattgattctggcacttggttgcttgcttcatgtgtctattaggttggttaggttggaggggtttcaatttggattgatta

SEQ ID NO: 17264 - DNA, 357 bp, Glycine max
gtgatgtactatctgaagcggaagatttgtgggaagaggctgaagctcgacgtgattcgtgggaccgatgtgtataagtgggatcctgaggatttgcctgggcaatctatattgaaaactggagataggcaatggttctttttctgtcacagagataggaagtatcctaatggtggaaggtctaacctagcaaccagacgtgggtattggaaagcaacgggaaaggatcgtaacgtgatatgcaattctaggtcagctggagtgaaaaagaccctggttttctatgctggcatagctactagtggtgagcggactgattgggtcatgcatgaatataccttggatgaaaaagagctt

SEQ ID NO: 17265 - DNA, 477 bp, Glycine max
ctttgaagctttctctatttgctatgtaagctctataacattttcccctctctagcattctccacgatgtcttaagatcagtttgaggtcttttcttctccagtacaacatgaattacaaaaccaggcagatacagctctgggggatcatctgcggatggattttcagaattcggaacagtatctataaactgagacactggatcatgatttgaatgtgcatctatagcaaatggatttgtaaattcggcattgtcaatttcaatgatatgatcccttgccctagtgtcagaccaaagtgaacattgttcatgctcattattgaggcaatcttcacttccaaaaggattcatatattcaccatagtcagcagtaacaagatcctttctaatagcctgaacctcttgttcgatgctacctgctgcaatgatggaagaacacacgatttccatcactcattatagtggtaaaaatatgt

SEQ ID NO: 17266 - DNA, 446 bp, Glycine max
cccacgcgtccggtgttggattcatccaatgggattttagacaaagctggcagatggcacgtggaggttgagttcagtccacattctgcatcgcaagatcatgttaacccacaaccaagtccagaaagtgaatcaaatgacattggaactgggtttgccatgttcagtcaaaattttggggagtttagttcagggtcagggccaaatcaaaatttggaagtactgaagaaggctgacatttatcccactaatatggaattactgaaatttgaaggtgcaactccccatggtactattgattcatctctcacatcagaatctaatcaacctgatggatggaactttggatttaatttcaattctagttctgtgggtgaagacaatcatagttcagattcatatttcaaaaccaaaaacaatcaggatgataacaacagaaacaatgc

SEQ ID NO: 17267 - DNA, 449 bp, Glycine max
gctcgtataggccattcatctcacataggaccactagacaatctttagatcaaagcgctattgaacatgcatgtgggaacaacaacatactgcagggtgtgacatacatatgttccatgaaaagaataaacgtcgcaagaactgaccactaggaatcttatctatgtgcataggtactggaaagagtacagctgactgatttgagagtactgattgcactgatgaactatgcaatgcccctaaagtgtataaccttaatttatccaatgacgctcgcttgaaatagatacttcatactcactatatatggtcatcaaattagaaatcacaataaaatctttctctatggaagtgacaatggcaaccactactcaagcgattaatcctttctacacattagacttgcattcatttctgatatatccatgacaattgcaaacatacactta

SEQ ID NO: 17268 - DNA, 316 bp, Glycine max
catcaatctactcactatcacactgtgttaccgtcatctactgaatgcatattgcataggccgtacacactacattctgccaggaatggacacttatcagctccgatctcacagcacgagcctgacagtgctcgtgttgcaaatatcaatagtccggctgatagcggcccataatactcccaggattctgatagacaaatactcagcattggacttcagtttttaaggacattctttcctggctgagaaaatcacgtcgaagaatcaagtgtacctgggacaactgcaagttctggcttagatcatgctggaacat

SEQ ID NO: 17269 - DNA, 435 bp, Glycine max
cccacgcgtccgggatcgcagtgatccagattatgaccgtagttatggaaggtatgctaggagtatcccagcctctgctgctaacttggtgccatttaacttgcaaaaagctcaaccttcatttgctcaatacgatgctacatttaaccagttgggtcagatgtcacaaactcaagcctcacttggctatgcaccttcttcaaccccgataatgagtccttttggcaccccaggattgaatcagacatctagtgagggtgcttacctacagtggcctagtgctgcaatgatgtatgctcattcatatgaccaatttagacatggtgttttccaggctccatttggtcaacagccgttgagctttgactattcacagaactattagatgacatttagggggagaatattcaatttggatgcaaaaagttatgttag

SEQ ID NO: 17270 - DNA, 426 bp, Glycine max
aaaccctctctctctctctctctctctctgttcactctcactttttgttttcacctcctcctgatttccaagcacactttctttgtttcttatttcttcctgtctcaattataagtaaaagaaaaacatatttttaaggagattactgggacagctagatgacgcgagcgttcagaattctcgggtccgcggacaacgccacctcgctggcagcggtagcggcgccgccggatgctgttgcgcttgagtcggacttcgtggtgattctcgcggcgctcctctgcgccctcatctgcctggtggatctggtggccgtagcgcggtgcgcctggttccggcaaggctccggcagcggaagctcttcccggcaagccttggcgaacaaaggcctaaagaagaacgtgctgcagtcgctgccgaagttcg

SEQ ID NO: 17271 - DNA, 432 bp, Glycine max
aaaaaatttctagagcgagaaagtgagaggagagagaaagtagctgatcctccatgggctccagcaaggaacgcgaaaactttggctacaccgccaagctcgccgaacaagccgaacgctatgaagaaatggtggaagcaatgaagaatgtggcgaagctgaacgtggaattgacggtcgaggagcggaaccttctgtcggtagggttcaagaacgtggtgggtgctcgtagggcttcgaggaggattctatcgtcgattgaacagaaagaagaagctaaagggaacgatgcgagtgtgaagaggataaaggagtataggcagaaggtggagtctgagttggccaatatcttgagtgatatcatgactgtaattgatgaacaccttattccctctagctctgttggtgaacctagtggttttttctacaaaa

SEQ ID NO: 17272 - DNA, 439 bp, Glycine max
cccacgcgtccgcccacgcgtccgaccatctcttcctctctcagctgtctttttaggccccgttttctcattttcccttttgcaattttcactaacagtccttctttctatcttagctctcagaaacttcaataacaatgaagaaagttgtgttgaaggtggaagtacatgaagacaaaatcaagcaaaaagctatgaaggttgtctctggcatttcaggggttgagtcagtttctgtggacatgaaagacaagaaattgaccgtaattggggacattgatccagtaaaagtagcagccaagctgaggaagctttgtcacgcagaaatagtttcagttggaccagcaaaagaggaaaagaaggaagagcctaaaaaagatgataaaaaggaagatgactagaaaaaaaatccaccaagcgaaattcgtggcagatcaac

SEQ ID NO: 17273 - DNA, 437 bp, Glycine max
gtgattttggtgtcgtccctttttcttatgtttaaggttgtacggagtttatgtggtgattgaattcgtcgataagaaaccttagtttgatattttgattggttctgtggagagtttttttttctttggtgtggtttttggtttgtgctgtttttggttgggaataacaatggccgatgaaggaaacaaaagcaataacttctattcgatcttggggttgaagaaggagtgcactgaattggagctaaagaatgcttataggaaacttgcaaagtaatggcacccagatcgttgttcagcgaccgggaattcagagttagtggaagaagctaagaaaaaatttcaggaaattcgggaagcctattcagttttatctgacgccaactaaaggttatatgtacgacgtgggagtctacgacagggatgacgactagaac

SEQ ID NO: 17274 - DNA, 435 bp, Glycine max
cccacgcgtccgagagttgatgttactcggatttatatcactcttattaacagctggctcacgcatgatagccaatatttgcattccatcaaagttctacaacagtgcttttgctccatgcactagatctgagattgacgaagaaatggaagataatggctctgaagagcgtaaattattgatggcttcttcttatccacacttagttagaaggatgttgaatggaataaatagcagcacctgcaaagagggttatgaaccatttgtttcgtatgaaggcctagagcagttgcaccgattcatttttgtcatggcggtaacgcatatatcttacagttgcctaactatgttgttggccattgtgaagattcacagttggagagtgtgggaggatgaggctcatatggatcggcataattcattaactgaaattac

SEQ ID NO: 17275 - DNA, 463 bp, Glycine max
gcccgttctctctttctataacaccaacaactaacaaccaactttgtcacctctctcgttctccctgctgagataacactctctcgcgagtcgcgatgctcttagctctctcttatttccatcgatggatgcagaaacggtagatctactcaatctctatccaacaggacaagacccactttcccttattcctccatctctttcaatttccctgcacgtgcgaatctattcgcaaattgcacactaaccttttccctttcccttttccttttgcttttcgtatttgtagagttggggttgtagataatgggaggggcaggaatttgaggggaagcgaaaacaaaatcagattttgattagtggggggttcgagaaagtggcgaaaatgaacttgggtgcagccgatgaagaagaatcggctgcacaagttcgtgttcctgcggaaatcgattggcacaaactc

SEQ ID NO: 17276 - DNA, 416 bp, Glycine max
gttgctataaacgttgttgttttcagataaacacgtgactcactatctatctatcaatcgagatctccgagttcagccgaaccaaactccgaagctatggcagagctccaaaccaaggttgaacctgttacggtcccggctccggtggatcccgagccaccgctagctgaggctccgccgctcgagaagaaagcggtggcggtgccaccacctgttccggctgcggcagaggaaaccaaagctcttgttattgtggagaaggagaaggagaatgagaagataccagaacctgtaaaaaagaacgcctcaggtggatcccttgatagagacattgctcttgcagaaatagagaaagagaaacgattgtctaatgtgaaggcttgggaagaaagtgaaaaatcccaagcagagaatta

SEQ ID NO: 17277 - DNA, 504 bp, Glycine max
ccggaatctcaaggctcgacccagagcgtccctatagactatctttatataataatataaataagaataaaaaaataaactaaaaaaaaaagaatctagataaatataaaaataagatatataaggtacaaatagtaaatcgaggtacccattttatgataaactctccttccatttttgttcctctagtaggcctagtatttccggcaattgcaatggcttctttatttctttatgttcaaaaaaacaagattttttagatacagaaaacaaagtaaaattctggggtcttatattccccaatcataatactaaattcaaaaaaaggagagtaatgagtataatctttcgctcagacgatctactgatatattctatggctaggttcgaagaacaagcaatttattttgggccgttttcactttgttaggttcattgaggttattgttcgttgcaatttccaattatcttggtatggatatgttctttatttctgagaaaatt

SEQ ID NO: 17278 - DNA, 475 bp, Glycine max
  modified_base (450)..(450): a, c, g, t, unknown, or other
aaacaattaacacacacaaacagaggctacgtacgatcaaattaattaagatggcggaagtgaggaacaaacaagtggttctgagggactatgtgagtggttttcctaaggaatccgacatgaacatagttgaaggaaccacaatattgaagcttccacaaggttccaatgatgtgcttctaaaaaatctctacctttcctgtgacccttacatgagaatgctcatgaccaaggtggaaggcctcgacgtgtttggcacctatacacctggctctccattaacagggtatggagtgtccaaagtcctagaatctggacacccagattacaagaaaggtgatttagtgtggggatctacaaaatgggaagaattcagcttggtgtccccaactcaaatacttttcaaaattgagcacaccgatgttccgctttcatattatactggtattnctggtatgccgggaatgactgcata

SEQ ID NO: 17279 - DNA, 393 bp, Glycine max
cattaccataatcactatttcctactgtcttctccatccattccttgactaatgaattatccgtcacaactaccaatggccgaagagaaacaccacacgcaccgaactcttccaccaccacacggacgaggataataagccagataaaaccgatactggttacgacaacacatcatattccaagccttctgatgactatgactctggcttcaacatgccatcgtatgagtcttctggcggtggctatgaaagtggttacaacaaaacatgttattctagtgatgatccaggttctggcggagactatgaaggtggatacaagaaaacaggttattctggtggcattgatgagactgttggtggctatggagctggtggtggtggatactctga

SEQ ID NO: 17280 - DNA, 435 bp, Glycine max
ttttctctatcttttgttctgctcagctcgatctacctaccttggttcttctctggtctgtgatttcagtgcagcagcagaaaatgaccatcctcattgagcaacctgcccttgagttacaagttgaaggcaacaatgtgcatgctgaagaaaccaatgagcttgtattggatggtggatttccattgccaaaggatggatatatggccccagaaatcaattcatttggccactccttcagagaatatgatgctgaaagtgagaggcaaaaaggtgtggaggaattttataggttgcaacacatcaaccagacatatgactttgtgaagagaatgcgggaggaatatgggaaattggacaaagctgaaatgggcatttgggaatgttgtgagctgctgaatgaattggtagatgagagcgatcctgatttggacg

SEQ ID NO: 17281 - DNA, 438 bp, Glycine max
cagattagtaccacaaaaatggagaaatagaataactgaatatcgtatagctcaaaataaagatttaaccaaatgcaattcatatgaaaaaagccaattaattctttacaaagaacaacaagtaaacgcattaaaaaaaaaaaattagaaaacaatatagatacgatcttttatcctataattttatcaattatgcagataagaaagactcatatatttatggatatagatccctatttcaagtaaaaaaaaaccaagtgatttcttctaattacaacacgtataaaaaagaattattggatatcatagataatctctttatcaagaattatatatcggaagatgcgattctagatatggaaaaaaatatgtatagaaagtattttgattggatgggaatcaatagagaaaatctaaattcgtccatatcgaatccag

SEQ ID NO: 17282 - DNA, 375 bp, Glycine max
ctgcagtttcgactcagagcgtccctttcacttctcagcagcttctgctcaggctcagaaacgaaaaagggttcggtgttctgttcgcgaggagaccaaagtcgaggggaagccttttaagaagtttgaaaagaaatccccaaagaataaaccgaaattcaagttattcggttaaactaagttggatctggtggttttaacatttgttaatgtggccaattggacccccagattgttatggcacttggttctcctttttgatggtttggacattttggtggattcaagttatttaaggtcgtcttatgttattatcttaaaaccatgtgtggaatggttttggtattaacattatctcctattttgcgtttcttg

SEQ ID NO: 17283 - DNA, 436 bp, Glycine max
gaaattttaaaaatgactgggataaacttaagaattcaattattgaaattgaataagtaaacaatttaattggattggtcgaatggtatcaaaaaaatggagtactaactcccatttcttatttattattgaattaaccgatcaacttgctttgttatcgaacatttctttttgatttcaaaaattttccggaaaaaatttgaatctatttttatatgcgaatcaatcctactacttctggtcctgaggtttctgcgcttgaaaaaaaaaatctgggacgtatcgcccaaataattggtccggtactagatgtagcttttcccccaggtaagatgcctaatatttacaacgctctgatagttaagggtcgagatactgttggtcaacaaattaatgtgacttgtgaagtacagcaattattaagaaataatcgaat

SEQ ID NO: 17284 - DNA, 468 bp, Glycine max
  modified_base (429)..(429): a, c, g, t, unknown, or other
  modified_base (458)..(458): a, c, g, t, unknown, or other
cttgacacgttccaacccacacgtgcacgccgctgtcacttccgactccaaggccgctacttcgcgtgacctaactcaacccgatctcgataatagcggcggcggtgccaacggtaacggaggcggcggtggaggtggaggtggaggtggaggtggaggagaaggaggaggtgataatagcaagggcgaggaaggatctgacggtgacaagaggaaaatggctctgttaatgtctcagaaattcactctagcttatgctgcactcgtcggagtgggtggtgtaatgggttatctcaagagtggcagcaacaagtcacttttggctgggggtttgtctgcatcactgctgtattatgtttatactgagctacctggaagccctgttttcgcatcatctgttggccttggcatatctgctgcacttcttgnggtgatgggttctcgtttcaagaaatcangaaaggtctt

SEQ ID NO: 17285 - DNA, 469 bp, Glycine max
cccacgcgtccgacaagatgcagtttatataggtgagatactcaagtctgttcagatggtcacgggggtgatggaagcccttgtcaaaagagttttattggcagaatcagaaactacttttgagaaggaaaaagtgagtttaggtcaggaagaaattatgcgaaagtctgctcagttagagaatatgtccatgaaattggaggagatggagcgttttgctttgggtacaaatggtattttgaatgacatgcggcaaaaagttgcagatttggtggaagaaacaactagacagagacagcgtgctgctgaaaatgaagaagagctttctagagtgaaacgggagtttgagtctctaaagtcatatgttagtagtctaatcacagttagagaaaccttactttcttcagagaagcaattccaaactattgagaagcttgttgagcggttagttggaaagactacccaattg

SEQ ID NO: 17286 - DNA, 474 bp, Glycine max
gcaagcagcaaacatgatttcttccgtgtcctttccagcgtctcttcccgccgttaacttctccggcaacgccatggcttcggcgtcgtgccgcgtcaaatcccggccaatagtcgccttcgccaccgccactgccaccgctgaagctcgctcttcctggacggagcaaccgagaccttcctatctgaactcctcttgctcttcgctttacgatatcctcggcatccccgctggcgcctctaaccaagaaatcaaggccgcgtaccggcgactagccagagtctgccaccccgacgtggcggccatcgaccggaaaaattcgtccgctgacgaattcatgaagatccacgccgcgtactctactctttctgatcccgacaagcgcgctaactacgatcggagcctattccggcgacaacggccgttgtcgacggcggcggtgttctccggttacacgcgtcggaactgggaaac

SEQ ID NO: 17287 - DNA, 307 bp, Glycine max
attaaaccgttcttgttcgattcaagctcgaagaagaagcgatgagttcgggttgcagccacagcagtgagaaagagaaggagagacatagggtgagtggcacgttgatgatactgtggcacgcgcaccagaacgacgccggatcggtgcgcaagctcctacaagaggatccctagctcgtcaaggccagggactacgacaaccgaacgccgctacatgtggcgtacctccacggctggatcgacttcggcacgtgcctcatcgagttcggcgccgacgtcaacgcgcaagatcgcttggaaaaaca

SEQ ID NO: 17288 - DNA, 442 bp, Glycine max
cagagtgttgtactgtgggatatgccactcggacctccacagcataaagaacgaatggggtgcttccatctatccaatggttcctgggcatgaggtagctggtgtagtaacagaggtgggaagcaaagtagagaagttcaaagttggggacaaggttggtgtgggatgcctggttgattcctgccgcacctgccaaaactgttgtgacaatcttgagaattattgtcctcaatctacgttcacatatggtgccaaatatagagatggaaccatcacatatggaggctactctgactcaatggttgctgatgagcattttgtggttcgcattccagatagattaccacttgatgctgctgcacctcttctttgtgctggcatcactgtgtatagccctctcagatattatggacttgacaagcctggtctgcatgtgggtgtg

SEQ ID NO: 17289 - DNA, 398 bp, Glycine max
cccacgcgtccgctggttactatgaggatggagagtttgggataagattggagaatgtgcttattgtcaaggaggctgatacaactttcaattttggtgatagaggttacttatcttttgaacacattacctgggcaccatatcagacgaagttgattgacctgaaccttctaagtcccgaggagataaattggctgaactcctatcacgccacatgtaggaatattctggcgccatatttggatgaagttgaaaatgcatggctgaagaaagccactgaacctgtaagtgcatgagctgtgtttggagttgaaaagttaaataacttatagatggttcagcgtaattttagtgtcttaccgatccataatactgtaatctagattttagatatcatt

SEQ ID NO: 17290 - DNA, 228 bp, Glycine max
cagaagcatacaaatctatatgcagaattggtacttctctgaatcatagagatggggcgcgagttctactttgctgacacttacttggatcgcagccctaaaaacagagactagaagggctgagacatccctgaagatcccagacctcacttaggatagttatgtcagacaacatattggtactatatcaagctttgctccttaaatgtgttcctcaaaacataccac

SEQ ID NO: 17291 - DNA, 374 bp, Glycine max
ccccgataaagttgatcatggttacccaactggtattggggttaaaaactccctcattgtgcgttggtgtgatcaacttctttggaatggtattcaccttgttagtgccagaatcaaagggaaaatcactggaagagttgagtggggagaatgaagatgatggtgctgaggctatagagatggcagggtctgctatgacggttccagtttaaccaaagtctatgatcaacaaagtagttcataattctagtgatgctattattgtgtgacaatattacttcgggttttctacagctagatgcacatttatgatgtacatatatggttcttggtgctgtaacttttaaaatcaattataaagggtgtgtatttca

SEQ ID NO: 17292 - DNA, 434 bp, Glycine max
cccacgcgtccgccttccttggctgctggttgcacaatggtcctcaagcctgctgggcaaacacctctctcgggcttggtttatgctcatcttgctaagctggctggaattccagatggagtgcttaatgtagtacccggatttggccaaactgcaggtgctgcaataagctcacacatggacattgataaggtaagctttacgggttcaacagaagtggggcgtgaagtaatgcgtgctgcagctaatagtaatttgaaaccagtttcacttgagctaggaggcaagtcacccgtcatagtttttgatgatgctgatgtagataaagctgctggacttgctctcatgggcatcctatttaataagggagaaatttgtgttgcaggctcccgtgtgttggttcaggaagggatctatgatgaatttgagaagaa

SEQ ID NO: 17293 - DNA, 429 bp, Glycine max
cttgttagggcactggattctggaattgtagctcaggcggctcttgatgttttcagtgaggagccaccacccaaagacagcaagttgattctgcatgagctcgttactgcaacacctcatcttggtgccagtaccatggaagctcaggaaggtgtggctattgaaatagcagaagctgttgttggggcattgaaaggggagcttgctgctactgcagtcaatgcaccaatggttccctcagaggtgttaacagaattgaaaccattcattgatcttgcagagaaattgggtaggctagctgtccagcttgtagcatgatgaagccgggtgaaaacagtgaatgtcacttatgccacctttaggggccctgatgatctggacactcgtcttctccgtgccatgataaccaaaggtctgattgagcccata

SEQ ID NO: 17294 - DNA, 467 bp, Glycine max
gctgaagattccaatcggagctcagaaaaaagaaacctaatcgccgatcgcgtcgccgtcgcgccggaagttcgttgttgttctgtgaaattgccggttttaatttttcgttttgtgataattctgagaattagtaacaattattgtggtttttttttctgttaggtaacgttgctgtggttctttttttttcttttttcttttttataatttcgttgccgttttgtaggtgaagatagtcgttttggttgctgctgagttttttgttttctggtgttcgaattgtgtgcaattttgaattctacttgttagttgtgtaatttgtttgttttctatcacttttgtgttctggagttaaaatgttttctaatgagttaagaatcgtttgcttttgtggtacgtagctgtacaatacgatgccttgaattccaaggtttcggtttggtttattttaatttacaaaaacc

SEQ ID NO: 17295 - DNA, 441 bp, Glycine max
cccacgcgtccgcttggagcaaccaaaaggtccaagcttcacaattaatgggcactgggtgaaatgggcaaactgggaatttcatctgagaccagacccaagagctgggatcataatttcacaagccaaggtgagggaccctgacacatcaaagctgagaagtgtaatgtacaaagggttcacctctgagctatttgtgccatacatggatcccacacaagattggtactttaagacatacatggatgctggtgagtatggatttgggttgcaggccaatgccactagaccctttgaatgattgccccatgaatgctaactacaatgatggtgtcattgcctcttccgatggaacaccatatgtccaacccaacattgattgcatttttgagagttatgctggtgacattgcgtggccgacatgcaaagtgcccccatcac

SEQ ID NO: 17296 - DNA, 272 bp, Glycine max
gccacaacaagttcaagcatagtttttgtgatagtgatacttgctctaacatcatgggcatggaggatgttgaattggctatggataaggccaaagaggctagagaggctcctaagggaacaaggccttcaaggaaacccctacaggatattggttggggacttaaaggagattgtgaagttgcaaatggcatctagatccacactgatgatttccatccataatattcctccacctatgtttacacatacgcctgaagaaaccctacgacg

SEQ ID NO: 17297 - DNA, 93 bp, Glycine max
tccacaacatgcgcaagcatagatttgcgcgctcttgatgctcgctcttacatcttgggcgtggaggatgtctcatcggcttttgatcatgcc

SEQ ID NO: 17298 - DNA, 352 bp, Glycine max
cccacgcgttcgatgacatacatgtttaaatacgacagtgttcacggacactggaagcatcacgatgtcaccgttaaggacgagaagacccttctcttcggtgacaaggcagtcactgtttttggacacagaaaccctgaagagatcccatgggggtcaactggagctgacatcattgttgagtccaccggagttttcaccgataaggacaaggctgccgcacatttgaagggtggtgccaagaaagttattatttctgcccccagtaaggatgcccccatgtttgttgttggtgttaatgagcacgagtacaaaccagagcttgatattatttccaacgctagctggacaa

SEQ ID NO: 17299 - DNA, 372 bp, Glycine max
tcttgttctagttcttctaccctcttcttcactcttgttccatcactgctttcagagcttgctatttctctttgaagaagaggggcacagacccatgaagagtctcgtaagtagctgtgcttttagttatagtattaagcactgctctggaaagcaatggagaagatgatcatgaacgatgtaaacaggaagcagtggatcctaggcctcacagcgtgtcaatcttagagttcggagcagttggagacgggaaaacgctgaacacagttgcattccaaaatgcagttttttatgccaagtcatttgctgacaaaggtggggctaaactatatgttccatctggcaagtggcttactggaagttttaacctta

SEQ ID NO: 17300 - DNA, 382 bp, Glycine max
aatgctcgttaaaaccaacgtgccccatgagaccttatctgcacagaatattcaggtccaacatgttccaaaatgtgtgtccaataaggcgctcgagaagatctatgatgagtcacaggtagattttgattataaacaaaattgattgagctctactacaattcccaagacgttgttcttgatctcaccggcaagaatattcacttaccaagaaatgctcgaaagactcaaaagcgaatttgcaccatgacctggcaaaagattcagaattggttttatggagatctgttgcacctgaaactgaatctataaaaaaatggttaggtttatcagcaaggacacttgtttttgaactcaatggggaatgaattcaaaaatttca

SEQ ID NO: 17301 - DNA, 406 bp, Glycine max
  modified_base (1)..(1): a, c, g, t, unknown, or other
nccacgcgtccataagtctttggttggtacatcttcaatggctgaatcaaactcggagccttgtattctggaccagccagctagacctgccaatgaatgtctttcaaagttatactgtcctgctacaaaattccccgcattatgtgaaaatgataatctgtatgatgatttcaacatggatgaagtggatctaaatcttgtgaactatgaagaactttttggtatggccctcagtcattctgaagagctatttgaaaatggtggaattgatagcttgtttgggacaaaagacatgtctgctggagatttcagttgtgaggatgctattgctgctgaggctgtttgcattggaatgtgattcctgggctacactgctgtaatatgaatgcattgcgttattcatata

SEQ ID NO: 17302 - DNA, 385 bp, Glycine max
ggagattgtacggctacaaggatgcagagaagagttgcaaaggaaaaatgttgagcttgaagcaaatcttgaaggtgttgagagcagcaaaggtagcggaagtaaagttcaatatttgagagttccacatcctaagtctggaattgattctatggttgagatcctcaaatgcttgaaagacaaaggagtcgataccagaagcatcaaatcaactttctccccacaggagttgtttgcagtgttagagacagaaactgatgagatgctgatgttgaaagcgctacttggggaacacatgatgaacttgattggaagcttcatttcgatgcccgggaaggttcaaattaaaagcaaaagactattcatttagaatttgaccaaattt

SEQ ID NO: 17303 - DNA, 400 bp, Glycine max
atactttttgacaatggttacaagcaagcgaaactaaaacgacgcgaaggggaaaaagggagatcggagagacagagagatcagtagtatcagagatggggagagggcaagttctgagcgcgtaccgcgcgcttctgaaagcgacacggaaaacattttccggcgacaccatgatgctgaaggaatctgcggtggaagtaaggaagaagttcgaggaaaacaagaacgtgagctccgaggcggagatccagaagcttctcctagaggctgaagaggcctcccatttcatcaccaacatgctcgtccaggcacagctcaatcccgattctggcacttacgcggtgaatccgtgtaaggagcatgctggagcaacgcttgaacttccctccgagaaattatt

SEQ ID NO: 17304 - DNA, 422 bp, Glycine max
gtgcaataaagttggcaactggcaagcaagcaaagcactagaaaaactaggaagagagaagaacccagttgcaacactaattttctctttccctttttttggacttatccttctttctgcaactccaaaatgggttccaaaggggcaaaaaatctagcactctcttcagccttgttgctccttttggtcggttttgcaacctcagacatcaatcaagacaaagcagaatgtacggataaacttcttggtctagctggttgtctttcctatgttggtggcgaagccaaagtccccaccatggattgttgctctggtatcaaagaggttattaacaagagcaagaggtgcctctgcatcctcatcaaagatcgtgatgatcctagtcttggcctcaagatcaacgtcacccttgctttaaaact

SEQ ID NO: 17305 - DNA, 338 bp, Glycine max
gagaaatgggccttcaatgcgaaattgctgcgtgctgctggattgttcgcaggatcaatactacttatgcgaaactatggtgaccttatggcaatctgaaagtagaagaactagttgtctgtcatgagttactattatctactttaccagtaatatgatgtttatgctttttttccctttctttttatcagtaatttgaaaatgaagtggtttttttggtttgaagcttttggtgaacgatggcaatgcttttccgattgggtttactttaatagtaaattctcacatactctggctaagatgtgttggatatgaaatacagtaactattttcgatgt

SEQ ID NO: 17306 - DNA, 476 bp, Glycine max
cattattaagattcaccttagcaatatcatcctgaaagtttattattcacttgtgcaggttttttgagcctttggatttgtgcataagattactactttcgagaagacagcaggatttcaggcactggtgcaattctcagatgcagagactgccacctctgcgaaggatgctttggatggaagaagcatacctaggtatctgctgcctgagcatgtgggaccatgtacccttaggatcacttattccggacattcagatttaagtgtaaagtttcaaagccacaggagcagagactatactaatccttaccttcctgttgctccatcagctgtcgagggaagtggacaggctatggttggtttggatgggaaaagattggagactgagagtaatgttctccttgcatctattgagaacatgcaatatgctgtaacattggatgtcttacacatggttttctctgcttttggccctg

SEQ ID NO: 17307 - DNA, 351 bp, Glycine max
gtcgggataaggaggttgacggagggggagtggatcgatacgatgccgtgttggtcgccgaaaggggatttgatagcgtggtgatcgaacaggcatgaccctaagaatagtgaggtgtttgggatatatttggtggggccaaatgggagtgggttgaggagggttgaggtggcaaagggggtcgaaggaatgaaagagaggttgaaccacgtgtgcttcagccgcgacggagagtggttgctgttcacggagaacttggttggcgtgagtgcggagccggtggtgctgccgaaccagtttcagccgtatggtgatttgtatgtggtgaggttggatgggagtgggttgagg

SEQ ID NO: 17308 - DNA, 464 bp, Glycine max
tccacgcgtccgtagggatacacaagaggttatgttggagcctgggctgaaattaattaaaatgggcaaggaatataccagcaagacatgcattttggatgattttggcttctatgaggctcgtcagaaaactattttggagaagaaagcaaagcaacaattcccaaagcaggtatgggaagggaaacctgctgatgagaagattgagataaatggggaagttaatactcaaaaatctgaagttagctcggaattgctcaaggagtctacccttgctgagaaggatagtgatgaccacaaagttcccgagaatggatctgctacaaaaactggagatgccccaaagggtgctaaaccagttgttcccgagagtaagattgtagccaatggggttgtttctaatggtgtctaagctctactgtgtttgaaggatgcggtccaatacacctcagtggcatatattg

SEQ ID NO: 17309 - DNA, 361 bp, Glycine max
ctctctctctctctctctctctctctctctctctctatatatatatatatatatatatatatatatatattccctcaaaacacttcacaaaaccctctttttattttcccttttcgcgttgattttgttcttcaatttccaaatcgacgttacaatcgcaatcgcaaattgcagaaacgcgcgttcgttccaataatgtctgaccccgctgccgaagaggctgctttcatcgagaagctctacgaatacggcgagcagctcaacaatgccaaggacaagtcgcagaatgtgcaggattaccagggaatcatagatgcggcgaagacgagtgtgaaggcgaagcagctcgccgcgcagctga

SEQ ID NO: 17310 - DNA, 441 bp, Glycine max
cccacgcgtccgcggcaagtggccccaatcccagaagctcctcatcaaggacttcctcaacggaatctccgacgaccaccaccgcgcctccccctctccctccgtctccgactggtggcgcactgtctccctctacaccgaccagaccggcgccaacatctcccgctccgtctccatcgccggcgagtactccgacctccgctactcccacggcacacacctcacccgcctctccgtgcaggacgtcatcgccaccgccgtccaggccaagcccttccccgtcgaccaccgcaacgggatctacctaatcctcaccgccgaagacgtcaccatggaagacttctgccgcgccgtctgcggtttccactacttcaccttcccatccaaggtgggttacacgctcccttacgcctgggtggggaactcaggaaaacagtgtcc

SEQ ID NO: 17311 - DNA, 331 bp, Glycine max
gtctaatcacgtaattacatatgccctcatgtaacactcgtaggtaataactaataattgctggtaacaacaaatataaaaggggatccatatgaacttcttttttttcccaagtcaaccgtcaaacattaacgaattttggatcatcccaccataagtaaatcaagataacagaataagggcataagttttgctaccaatgttgtccagtgtatggccactaaaatcatcccgcacgaggatcgagcacctgcccaataaagagtactgttccagttaaatcttctctgatcaggaacaagaaaggatggtcaactacgaagtctatttt

SEQ ID NO: 17312 - DNA, 441 bp, Glycine max
cccacgcgtccgcccacgcgtccgcccacgcgtccgcgttgacttgctcttcgcctgcacccactcagcactgtttcgccttcacccgcaccaccgccaccgctaccgccacgtcactgagacaattcaacagccaccgtccgcccccactcaccacgaggatctcctcgtcgccttccaccgttgtctgcaaagctgtctccgttaagccccaaaccgaaaccgaaggtctcaacattgctgacgatgtcacacagctcatagggaaaacgccgatggtttacctcaacaatatcgtgaagggttctgtggccaatattgctgcgaagcttgagattatggagccctgttgtagtgtcaaggacaggattggttttagtatgataaatgatgctgagcagagaggagctataacacctgggaagagtatattggtggaac

SEQ ID NO: 17313 - DNA, 416 bp, Glycine max
cgcacagaaagaatcgttttcagaagcagaatgaggttctccgtcatgtctcgcttagcgtttcgcgtttcgagttgcgaaacgatgtcctacatggtcatctccaccagggacagagatcgagagcttcttatacccgtcgtcgtcatccccgccggagatgccgccgtttacccttccgccaagccatcgtcgtcggcgtcgtccccgcattattccggacgcgagactttttacaaagttattaaaagctgtgcatcaaacaagtctatgactggatgtgtgattgtctgtgcaattgcaatcaccatctatataacatggtggtttatacatttcgtggatggatttttctctcctatctatgctcaactttgaaactgatattttaggtcttgggattcataacttgcata

SEQ ID NO: 17314 - DNA, 423 bp, Glycine max
tggaaagttatatgctttttaacatcgatggtaagcaagttccacaacagatggtcattgaagttggagacacctttaagaaaattctggaagagacagggaaagtgagggatgagcataccgaggacatttcagtttcccaagctatttcaattgtgctagataagcaccctgatctaaggcaacaaggacttgcccatgaagtgctacaatggtttatatgcagaatggaagcttggtttgctgctgatgcagatatgatttcactgaaaacctgggatcaggaacatgtcctgtctggtggtcatggactcatggtgcaaggatatgatccagttataaaagttcttgcaaaagatattgacatacgcttgaaccacagggtgaaaaagatatctagtggttacaacaaggtaatggtga

SEQ ID NO: 17315 - DNA, 397 bp, Glycine max
tcgtccacgcgttcgcccacgcgtccgcaaaatgggtgttgtggagggtctcttggcattgggtttgattctgaatgtgtgtgttgtgtgcaatggaggcacaagcagccccttcgtcaggaaagttgagaaggctgtagatatgccacttgacagcgatgtctttgctattcctcctggttataatgccccccagcaggttcatataacgcaaggtgacctagtggggaaagcagtgatcgtgtcatgggtgactgtggatgagccggggtcgagcgaagtgcgttactggagtgagaacagtgaccagaagaagatagttgaaggaaaacttgttacttataggttcttcaattacacatctggttttattcatcacaccaccatcagaaatttg

SEQ ID NO: 17316 - DNA, 288 bp, Glycine max
cccctttttcagaaaagttgagaaggctttatatattccacttgtcagcaatgtctttgctattcctcctggttataatgccccccatcaggttcatataacgcaaggtgacctattggggaaagcaatgatcgtgtcatgggtgactgtggatgagccggggtcgagcgaattgcgttactggagtgagaacagtgaccagaagaaaatatttgaaggaaaacttgttacttataggttcttcaattacacatctggttttattcatcacaccaccatcagaaattt

SEQ ID NO: 17317 - DNA, 425 bp, Glycine max
gaaaacacctaacaagcttggttggtaagttatctacaatctgcatcatggaaggtgttattctgagaagggtcattccttcggataacagttgcctcttcaatgctgttggctatgttatggatcatgacaaaaagaaagctgctgagttgagacaggttatagcagcaacagtagcaagtgatccacagaaatattgtgaagcatttcttgggaagccaaacacagagtattgtaactggattcttgactcagagaagtggggaggtgcaattgaactttcaatattagcagattattatggacgtgaaattgcagcatatgatattcagacaactcgatgtgatttgtatggtcaggaaaggaattattctgaaagagtgatgctgatttatgatggtctccactatgatgcattagtgatg

SEQ ID NO: 17318 - DNA, 418 bp, Glycine max
cccacgcgtccgaaacttgtctattgtacctgacatgaattattctaggctagtataaaacagcttatgccaaagaggagattttattgaaggtttttactccatctcattctaacatgctaatttgattcttaaaattcattttttatgtgattgtttgattacttcattgattttaccagaacaatgacataaataactctagacttgttggatcttatttttagtaaacagtgtacaaaataggaggactcttgaaggtttcttctccatgtcattttagcatatgccaattctaaacttgatagcatttgtgatgtgattgtatgcatgacttgactgcatgtcacctttagaaattttaaatttggttcttttgaaatttcttaacaagaaataagtaatctagaatagtcta

SEQ ID NO: 17319 - DNA, 300 bp, Glycine max
catttttcttcctgcgtagccacaagaatagtcaaagtggtggcttttttttattcatcgctgcttgtgtgcattccgcagtaacaaaattctgaatcctcagagcatcttgttggactttcggatgatgttggtgctggcttcatatctggtcatagtactcaacctgccacttcttctgagttgaatgtggacaggtgtagtgatttgccggctcatgatgaaattgggaactcgtgggtctcaaaagagatcagggctgatcaaaaaacattcttctttgatcttgggagcaataat

SEQ ID NO: 17320 - DNA, 417 bp, Glycine max
cccacgcgtccggtttctttcttttcaacactctctctctctctcgcaaccactgctattagcttccttctctgactcagtctttcgaatcctctcacccagaggttcgattcgtaccatgtagtggtgggatttcagcttcgccatttcttgattccaaaaaattttgtttctttttttccccctaatttgatttccccagttagggtttttaattctactcgatcgccggtttcgaatacccggaggctcgaatcgtgttgggggttttggtttttgattaaggaagtttccgttttttgtgttgggtgatcaagggttgtttgatttttttttgcgatcgagaatgggtgaggcttcaggagctggttctgctgattgtttcagccagatgatgtcgtcgatgccgggtttttg

SEQ ID NO: 17321 - DNA, 421 bp, Glycine max
cccagattcaaccagttaaacttggaacccaaggctttgaggtactattaactacattacttgctcttattttgataattgatacaattaatctcattctaggtttcaaaattgggattcggatgtatgggccttactggagcgtacaatgaccctctccaagaacaggatggcatatctgttatcaagtatgcgttcagtaagggaatcacattttttgatactgcggatgtttatggagccaatgctaatgaacttttggttggaaaggctttgaagcagctgcccagagaaaagattcagatagccacaaaatttggtattgcttcacgaggttttcctgatatgaagatcaagggttcgcctgaatatgtgcgatcatgctgtgaagctagcttgaagcgtcttgatgttgaataca

SEQ ID NO: 17322 - DNA, 242 bp, Glycine max
aaaacaattctacttaatcggtaccactcgttctgattcagaattacaatactaaggaggaggcatagaacgagtgtatctaaacgtattactcttcacttactctaacaagaaggaaggatggaaggcagaatcagaaagccctatttgatttatcggttattatcccttgatgaaaatgaaaaggcgcggtatcagctcggaatggataatcgtattcgtatacgcttttcttgggaggt

SEQ ID NO: 17323 - DNA, 407 bp, Glycine max
agagaggagagagtattggcgcttcatcaagatgggtatttctagggattccatgcacaagaggcgtgccactggtggcaagaaaaaggcttggagaaagaagagaaagtatgagcttgggcgtcaggcagcaaacaccaagttatcaagcaacaagacaatcaggaggattcgtgttagaggtggcaatgttaaatggagggcattgaggctggatactggcaattactcatggggtagtgaagcagttactcgcaagactcgtattctagatgttgtttacaatgcctcaaacaacgagcttgtgcgaactcaaaccctggtcaagagtgctattgtccaggttgatgctgctcctttcaagcaatggtaccttcagcactatggtgttgaaattggtagaaaaa

SEQ ID NO: 17324 - DNA, 404 bp, Glycine max
cccacgcgtccgcccacgcgtccgcccacgcgtccgcaaagcgggttactgtctggtcaagctaccatctctctctctctttcttagtgcctccttgccagaagttaaaatggcccaagaaactttcctattcacatctgaatcagtgaacgaggggcaccctgacaagctctgtgaccagatctccgatgctgtgctcgatgcatgcttggagcatgaccctgacagcaaggttgcctgtgaaacctgcaccaagaccaacatggtgatggttttcggagagatcacaaccaaggccaacgtggactatgagaagattgtgcgtgacacatgcaagaacattggttttgtctctgatgatgttggtcttgatgctgacaactgcaaagtcctcgtcaacattg

SEQ ID NO: 17325 - DNA, 418 bp, Glycine max
cccacgcgtccgggagggtgtaggtttggttgatttgattgttgtgcatccatcgttaagctagtggcgatcggatccagctacagcatagagatcaaggaaggaaggaaggaagatgttgggtgttataaggcacaaggtactgtctcaagtctctagtctgattcctattccatatgatttattttattttatttgcagagtattcgccctgccttctccgcaatcagacacttgtcttctgcagctaaagagattactgtcagggaggctctgaactccgcactcgatgaggaaatgtcagctgatcctaaagtgttcttgatgggtgaagaggttggggaatatcagggtgcatacaagatatccaaggggctgctcgacaagtatggccccgagagggttctcgatacttcaa

SEQ ID NO: 17326 - DNA, 420 bp, Glycine max
cccacgcgtccgggcgttggtgaatccgtttctgtctccccctcgaactcccctcgctctgcgagtttcagctgcgccaaaccaagcactactacgttggactctctgctcccaatattcattcaaaccatcatcactaagatcgaagcacgccatgtgtggcgccactgccgacatcaaggctgcacctttagctgatggagaagcagatcacgcggttcttgtgggccccgccagcgaggacgagagaaaaggagactatgactggacacaggaatggtaccctttgtatctcactctgaatgtgcccgaagatgcacctttgggtcttagagtgtttgataaacagctcgtcttgttcaaagatggcaatggccagtttcgctgttacgaagatcgctgcccccacaggttagcaaa

SEQ ID NO: 17327 - DNA, 331 bp, Glycine max
ccgattctctgaagtcatcattggtgcctcacctgtgcatcatacttttactactggaccattaccagcactggggattgacatgggtctttttccaaaaccagtaagatacccttccatttttcacctttgtttaccactaaagtactgtcgcatcttcttctccatcgatctcttaattcactgttcaatctctccttgctcagtataaaagttcctcattttgttgcaaaaggttcatgtctacttcaaatcaaaggctgattcatatgatcacatgctccaatgcaacaagagtttccacatgggtaacctttcctattcttatttc

SEQ ID NO: 17328 - DNA, 397 bp, Glycine max
gagaaagagaactcgttcttctttttacattaacattttcaatctttttcacctaacacaccatctcctttccattcctttcttccttcgtcccattctcgaattggcgtgtgcctcttgcaatcccccaaaggttttttgaagcacaagaatggacttctttactagagacataaatgaggattctatgcttagatgcccattcttgaggaacatcaatgagcctactaacttctcattctcttcacctttggctttaccaatgcctgttcgtggagctaaaggtccaatttttgaagatggtcccaattttgatttggcatttaggcttttccacgggagtgatggtgtagtacccttatctgacagatcttttcggccttcagagaagaaagtt

SEQ ID NO: 17329 - DNA, 396 bp, Glycine max
aaaccgcttctccttaatccctcccacttgttctgtttcagaattagaaaactaaagaacaagaagagaacaacggaaactaaacgtagtacacatcactaactctaacaagaaggaaggaaggaaggcagaatcagaaagccctaatcgattttcggttattatggagagatgaaaatgaaaaggcgtgggatcagcgcggaaaggataatcgtattcgtagatgcttctctcgggaggagtgtccgatctcaaatggatcctccaattcgtattctacgcgttcgtcttggcgattggactgcacgcgcttctcaagaacaccgcctccaagtacttcgaccttgacgccactttccacgctcacgctattcctggccttctcatggaccattc

SEQ ID NO: 17330 - DNA, 412 bp, Glycine max
gtttgggatgaagcatcgggttattactatgatgctgcttctgggttttactatgatggaaatactggtctttactatgatggtaataatgggatttggtattcatatgaccaccaaactcagcagtacataccttgcactgatcaaaatcagaataaagcatctaatgagtctgaaccttctaaggtatctgatggttctggaagtaaaaaggtcatttctgcaccagctactgctgttgcaccggttgagaagccagcttcattggcagatgctgtccaggctgcagcaactgctgctttagctgcagagaagaaagagaaagaaaaatcaaaggaaataaaacttgcctcaaaaagcagtatactggcaaacaagaaaaaaatgaacaatgtgttgacaatgtggaaac

SEQ ID NO: 17331 - DNA, 204 bp, Glycine max
tcgcccactcgttcgatcaatcttagtgaactggtctaacttattctccctcatatagatgccgttatgtcttgtgcacactgtttcctgtactctatgataagtactgatgatttgattgatccacactcagataatagcagtcattgagaataaaaagctttatgtcgtgtttgtagctttggtctttagttatttcccatt

SEQ ID NO: 17332 - DNA, 210 bp, Glycine max
aaggaccttatttggtatgcacagggtttcacgcctgtgatgtttgattacaagatccatgatgaaaacaattcactctacaatacccctccttgttatgggatttacatgtgtgggttggtgtttgaggacttgtttgagcaaggtgggttgggggaggttttgagggaatatcaaaagaaagctgggattctctacagtgcaattgat

SEQ ID NO: 17333 - DNA, 421 bp, Glycine max
gttcagtttcacgaccgatcctacaatggcgacagtcacgttttccttttccgctaaaaccctaactctaccttatgaccccaaaaccccaatctccaactttaccccggtaacgaatcttcgcctccctccttctatcgtgacccgaacccgcaattgtaaccggattcgggcggcgctggatggggatttctcggcgaaaaggagcagcagcagcaacaacaacgaccagagggagacgataatgttacctggttgtgactacaaccattggctgattgtgatggagtttccaaaggaccctgcacccacccgtgaacagatgattgacacgtacctcgacactcttgccactgtcttgggaagcatggaggaagctaaaaagaacatgtatgcctttagcaccaccacttacactgga

SEQ ID NO: 17334 - DNA, 419 bp, Glycine max
gaaatccaggaaaagttctttatttaagtggccatgctttggaaagttgcctacaacccgagaactgtctccctattaaggcttggcagcagcaagatatagatgacacagctcttttggattttataccatttcttgagtgtaagcattccttaagatatattgaagaatgagttcatgtttgaattattgtttttattttcacatcactccttgagtgtaagtccattcccttaagatgtgtttataaatgaattcatgtttgaagttactgtggtgactttttatgcttgtaaaagttgcactaccttctctgttatctatttgcagttgttgcccgtagtagtccacctgatataagaccagtgctagcctcttaccaaggatgtgatattccaagtgagttcatcaagcgttcc

SEQ ID NO: 17335 - DNA, 316 bp, Glycine max
ctttgggaagcttttcaagtcctcagcacccgtggagctcactgaagctgagacagaatatgctgttaatgtcattaaacacatttttgataggcatgttgtgttccagtacaactgcacaaacacgataccagagcaattgttggaacatgttattgtgactgtggatgcttcagatgctgatgaattctcagaggtgttctccaagcctctcaagtctcttccttatgattcacctggacagacttttgtggcatttgagaagccagaaggagtgccaacagttgggaaattttctaacattctgaaatttatt

SEQ ID NO: 17336 - DNA, 418 bp, Glycine max
ctacatttgtcaggtctccatcacacgggcaatacccagctgctcttccaccatacccttccccaccccacatgtacggcagcagaagtcccccagcaaatccttatgctgcttattcacccgagccggcaccagctattgcagggtcttacccggcagctcccatgaactatcctcatgcatatggcggctatggaaatgttttggctcccacttatcagcaggcttactaccgatagaaatgacaacctttgaagatggtaaccactgatatgacgaccttgatccaatttacttttgcaatgttgtttgtaatcactaaccgtttaacggtagcagttctgtgtggtaattataactactgtcccactttctgctcggcatggggagaaagtgtatttttaatggtgatcccaat

SEQ ID NO: 17337 - DNA, 420 bp, Glycine max
cccactcgtccgcccacgcgtccggttcttcataatcaggatcttcacaggctgcatctgccccagctgaaactggaacatcaacatcagagtcacagcagcaataagattgctcgtgtactgatgtttctagttatgtttaattattgttcaaagtttttccttaaactgaccgtgctgacagggaagatattttcactcaagctgtctatttactatctctgctagctcaatgttgatcgccttgtggcttgaacaagttattttattttgtgcttttgtaactcttggcttcctggttagatcagagtgatgctcagctttagtatattactttgcactgaattctaatgttacaacttgtgttttggtatatagcatttggtaaagatgttcaattaattttatataccatcaagt

SEQ ID NO: 17338 - DNA, 379 bp, Glycine max
agaaatatctccaagactccaaccgtgcttcaaatatcaagcacttttttgtagtacttgcactttcactttttttttccagtttttagttgagtagccggagttctccccttgcgccgcctgaccaatgtcgaccacaactgtatccggcggcgaccctccttctcgcggttttgatacgccgacgctggaccgggaggcggcggcgctgctccacgcgatctccgagcatggcgggtacgcgtacgtgagcatggcggtgctggcttccggcggcgacattctcgcggcggaggcggctcgggagatggcgtgggagcagctgcactcgggtccgtggcactcggtgctgccggtgtggcgcgacgcctactccatg

SEQ ID NO: 17339 - DNA, 181 bp, Glycine max
ggtgatgctccatggtgggcttagactccttaaaaccgttgttgtcataatatatatttaaacatgaaattcaaacattctgttttgtattaatgcataaatatattttgtaatcaaattgatattttgtgaactgaagctaagatgaaaaagaacctgaacaggtcacttttttccgtgt

SEQ ID NO: 17340 - DNA, 313 bp, Glycine max
gcagtgtgtaaatgtgctatgctgagctgtgagcactgattgcattagactgagacccaccattgtctattttcctgtcccaacttatgtctctctctccccaacccttaatttacctattttgcgtttgcctgaggattttcagattttgattttctcctctttttttgtaaaccttgaattttactttgctttcttttgggttgggatgggtggaatctcttgtaatttttcagggttggaaaatcaaaaggcttaatgtgtatttattttattatggtttaattaatatattagtagtattatgtagctt

SEQ ID NO: 17341 - DNA, 399 bp, Glycine max
ggattctggaattctggaaggttcttcaagtcaaacgcgagtcaatgactgaggccgcgagcctgcaagcacttatacgaagtcccgcaggtatgctggcttcctattcactcacttgggcctgtttgtaactgagggttgatctgctatgttactatcaacacccccttcgtcgaaaacaaccttgtccgcaaggttgtgaagatcacgtaagtcgtcccaaagttcccaggacgcctcctccggaggaagaccctcccattgcaccaaaacacgttttaccggcgtcatgcccgaggagtcgagtttccagtcgaggattgcgaaagggtgtacaatgggttttcatggagttcctgcaaaggagcgtctacactggcgttctttcttggttaaact

SEQ ID NO: 17342 - DNA, 375 bp, Glycine max
ccactcgttcgcccacgcgttcgcccacgcgtccgcccacgcgtccgattcaggcgtgagtgctttccctagttgtcttagattccctccactgatcgcaatttcaacaacaccctcttcgatccgctttctaaattctccacccctccgttccactgcttcgtcgcaacacgttacaataatggcttcgaagaattctcaacaagacacgcgcttagcgagaatcgcctctgcaatccgagtcatccccgacttttctaagccaggaattttgttttaagacataaccactctgcttcttgatacaaagggcttcaaagacaccattgacttgtttgttgagaggtacaaagatcaaaacatcaatgttgtctc

SEQ ID NO: 17343 - DNA, 301 bp, Glycine max
cttgctaaatataaccagctctgagaattgaggaggagcttgtgcggaagctttattcttagctaacttcgacccctgttgagccctactaaagttttcaagtggaaaaaacctggagatccccacgagtttagcaatgagattggatgcgcggttttagttgtgatcaataagtcgatagttagaacaatagtcttggtataaggaccttgccaataattttttagttctgattcacagagctaagacagttccgtcttagactttaaaagttttgatatttagctttaatactttgttt

SEQ ID NO: 17344 - DNA, 401 bp, Glycine max
atcatcccaatgaccaacttggaaaccggtgataaaatcgttaccatcagcaaaagcttcattgtctggactactttctcgattccctttgtccccaatttcagcattggacgacattctccccgacgaagaatagttcggttgattcttcaaccttctcgaactagaaaattttgcatcttcgatactgttattaacagcccccaaagtccccatgcctctcacaccagcatacactgccaattaagctttcataacatcattatggcaacccatacataaacccattcacgccctaaacaaacatgaagcctaatagtaacccccaaaataattagtctttttttttttatctctaagttgacaacataattgtactaccctacagctcaaattaaaaa

SEQ ID NO: 17345 - DNA, 377 bp, Glycine max
cacacaatggaaatggattgtcgctgcacctagagattcaattcaacacttcagaggtagtgtcgattttggagtttctccgcgtgatttcatgtgagtatgttttcaacaccgcggctgatctccttcttatttgaatgatgcatttgatttagcgctatcgacccttcatggtttatcaatcttccctcaagaaattttggtaaaattttgatcttttctaccctttctatcaacccttcttgctgcatgttgaagcgtggatacataccaaagccatggattggagcacagaattgcggggtctctgtgtttctcatgtttttcacattgatgcctatgttagtgggtttccttttagtatttcattatgatag

SEQ ID NO: 17346 - DNA, 382 bp, Glycine max
cttactggtctgcctggactgcaagagagtctgccattgagcaggagaagctattaaaggatgcttcagatgaatacataaatgcagagaatgctggttctagtgcatatgtggaaatcagtactgcagcggcaatatcatttgttgtgattgcttcttgtttcttggttatgctttacaaattaatggcatattggtttgttgaagttctggtggttttattttgcattggtggggttgagggactacaaacttgcttggtggctctgttatcatgtttcaaatggttccagcatgctgcacaaacatttgtgaaagtacctttctttggtgctgtatcatatctgacagttgctgttactcccttctgcattgtgtttgc

SEQ ID NO: 17347 - DNA, 390 bp, Glycine max
gctctgagctgttctatgttcatggtgtttgtcactttgagttcggctggggacggggtacaccctgatagtggtgctcccacaatgcctggctgttacaacaactttgtcctggttaaagtccctacttgtattgattgtgtggaaagctgtgagtattttggcgttggtgcaagatttggccctacattagaatcaaaagaaaaacatgctatccatactatagttgctatagctgacccttctgattgttgtatcaagcctaagaattatctcactgtcgaaatcattttggtgctccgaggacaatgttagttcacaaccaatgcatttatagctaaataagctttttcttcatccatcctcattataaattatcggacacaactt

SEQ ID NO: 17348 - DNA, 385 bp, Glycine max
aaagcattgaattcaaaaacttaagttcattccttgtgttttgctttcttcctcaaaaccaaacatgtcgaacacatgcggcaactgcgactgcgctgacaagactagctgcaccaagggaaacagctatggtgttattgtagagactgagaagagttacatcgagactgttgtcatggatgttccagcagctgagcatgatgggaagtgcaagtgtggcactaactgcacttgcacggactgcacctgtggccattaaggaatatgtatgaaaatgtaattgccatgtgtttggcaatacaaatatccaaataatgtaatcttcgtatgaataaatgtgtgggctgttatcctacttcaagtctgtgtagtcatgcagtctgaa

SEQ ID NO: 17349 - DNA, 421 bp, Glycine max
gtgaaacagcgcatagaagatacaaaattgagacgaggctgaacaaaaataagagtgtttagtttcccttctgatggtcgtgagtggttcctccccactaacttcgaagaggagaagggtcaccaacttttgttccaccgacatggacgctgaaactgctaaggccaagcttgctgctgtgaaagaaagatttggacgagagatccatgtttttgaaacatcagttctttcttcatcttcaaaggctgcgttatccaatgaaggagaggagacggatgacttctatgagtttactgctgaagattattacagacttttggctactaaaaaagaagataaattcttgaagactcgaaaactacgagaagcagaagaggcagctcgtaggtcaagaataaccaaagctgtaatcagaattcgc

SEQ ID NO: 17350 - DNA, 403 bp, Glycine max
ctaaaattctctgcattttcttcgtcacaacaacccttctctgattcgtcttcaatttttgtttccaaaaccttaggtcagatttctgtgtttgtcgtttctgataatctggagtgagctaggtcaagatgccgtgggtttccttgtttgtggatcacaaaagaaattgtgttcgcttggtggtgttttttcgtgtgattctgtaatttaattagctcaggtgtagtcccattaggttgcgaagcaactcttttcattaggttgttctccttttcatttccaaagctgttggggggactgaggatgtactttgcggtaacaataaagagataccaagctgtgaaggaagttggacaaattaaaatgagtgttggagttattggatacaaccaattgatgcttg

SEQ ID NO: 17351 - DNA, 399 bp, Glycine max
gctggtttcaaaccagatgatcccacgtacaccatggttattgattgcttttgtaagaagggtgatgttaagatggggttcaagttactcaaggagatgcaaagcgatggacatgtaccgggagttgtcacgtataatgcactaatgaatggactgtgcaagcaaggtcagatgaaaaatgctaaaatgctgttagatgcaatgcttaatgtgggggtggctccaaatgatattacatataacattttactagacggtcatagcaagcatggaagctctgttgatgttgacatatttaattctgagaaaggacttgttacagattatgcttcatatacagcacttgttaatgaatcaagtaaaacttcaaaagatcacctaaagagatgattgctactg

SEQ ID NO: 17352 - DNA, 329 bp, Glycine max
cccacgcgtccgggaaaactaaaagagaaaaatggattgtagtaacgagttggatatgcaagaaccgagcattgagacggataagcttagttacgaaatcttctccattctcgaaagcaagtttctcttcggctacgacgatccaaagctctggttccccaagcaaatacctcccaagccggaatctcagactccggcagctaccgccgccgtggactgcgtctccgcagtcaagaaccagcgcggcaagatatgcattctcgccatcgacggcggcggcatgcgcgggattctcgccggaaaagccctcgcctacctggaagccgcgc

SEQ ID NO: 17353 - DNA, 402 bp, Glycine max
gtaaaatgtaaacctttttgcagtgacagtgtgcgacagagattcctttcaacactagagcagttaggtttagaaccactacgtgttgatcttctgccccttattcttcttaaccatgatcatatgcaagcctattctctgatggacatcagtttggatacatttccatatgctggaacaacaacaacatgtgaatctttatacatgggagttccatgtgtcactatggctggatcagtacatgcacacaacgttggtgttagtcttcttagcaaagttggactggagcatttgattgccagaaatgaagatgaatatgttgaattggctcagcagttggcctctgacatttccgcactacaaaatttgagaatgagtctgcgaaatctcatgtacaagtcc

SEQ ID NO: 17354 - DNA, 421 bp, Glycine max
caagggagagacagaagacattgggaaactattggagaggactatgatgcacaaatatggtgtggagaacatcaatgagcacttcatgagcttcaatacaatttgtgatgctactcaggagagacaagatgctatgtataaattggtggaggaagatttggatctaatgttagtagttggtggatggaactccagcaatacttcacacctgcaagagatagcggaggaacgtggaatcccttcttattggattgacagtgagcaaagaattggtccaggaaacaaaatagcatacaagttgaaccatggagagctggtggagaaagaaaactggctgccagagggtccaataacaattggtgtaacatctggtgcatccacaccagacaaggttgttgaagaatcactcatcagggttttt

SEQ ID NO: 17355 - DNA, 415 bp, Glycine max
cacgaatatcttgttgtttggagcgatccgagaaaaactctgtaaacatgttggtttaccaggacctccttacaggtgatgagcttctctctgactccttccgttacaaggaaattgagaatggaatgctgtgggaagttgaggggaagtgggttgttaaaggagcagttgatgtagacattggtgcaaacccttctgctgagggtggaggagaagatgagggagttgatgatgcagctgttaaggttgttgacattgttgacacattcagacttcaggagcaacccgcattcgataagaagcagtttgttaccttcatgaagaggtttatcaagaatttgactcccaagctcgatgcagagcaacaggagttgtttaagaagcacatcgagggagcaactaaatacctgctctc

SEQ ID NO: 17356 - DNA, 371 bp, Glycine max
cccacgcgttcgcccacgcgtccgatttctccatttccattttctctctcacttgggaagaatcgtaagctatgggaaagtcttacccaactgtgagtgctgattaccagaaggccgttgataaggcgaataataagctcataggcttcatcgctgagaagagatgcgctcctctaatgctccgtttggcatggcactctgctggaacctttgacatgggcacgaataccggtggacccttcggaaccatcaagcacccttccgaactggctcacagtgctaacaacggtcttgacatctctgttaagctttttgagccactcaatgcggaattccctattttgatctactccgatttctaccatttggct

SEQ ID NO: 17357 - DNA, 396 bp, Glycine max
gaaaaaggtccctactaatacacatttcttaccaaaccaaattacacagagtaagagagagagattttactctgtctctctttctcttctttttcccctcgtttcgtttctttgttaatatctccccgtcaaccattgactctccgaggtaccaccaatagcaccaccaccaccgtggcggcgtaaggcttgttccttctccacgccacattttgagtttcttcaaacagcagctgcaccagcagcactagcatcaacaacaatggactccaccacacccaattgctttcacctattactccgaccgcttctgctgttcaatctccgacatcatctgtccctcctaagcccgtgaccagatccgaattcgcctacccgttcccgacttcctttttt

SEQ ID NO: 17358 - DNA, 400 bp, Glycine max
gaataatattagggttttcgataagagtcctgtgatgttgtcgccggtgaatttggtgaaacacaacagtggtttcgttgggacccccaaaacccctcgcctcgacgattcgctgtcggaatcgaagcttgagtctctccccatggatttgttggttaaaattctgtgccacctgcaccatgaccaactgagggctgtcttccatgtttctcaaaaaattagaaaagctgttataattgcaaggcagtttcacttcaattatactactccagatcgctctcggcaggagatgttaagtacaatgactcctcgtcctactgagcattggccttttttgtgcaagggtgatgggaagggagttaggattccaagcccacacacacctaaagcacctagacat

SEQ ID NO: 17359 - DNA, 424 bp, Glycine max
ctggaaggaacactttcccagatttgtatgaagactctactggagaagcatctgcttataatagcaataagagtcatagaatgagcactaaacatggtgttgaggggatgcgatctgattctgcttctaaccatagtgatcactatgaagagaagcttacagttaagcagaaaaccttgatgctgcatggttatgataacatcaatccaaagaatatacaaaggagtgaacatgtaaaatctaaaccttctagttcaatccataattcccgtgttcctatggatactgaagaacgggggttatctgctaggatggcaaaggaagagatgtttaaggggaacaggaaagcaaaaaatacatactgcgatgtaaagggagcagggatgctttcaaatgaaatcatggttgcaaaacgagctaaagt

SEQ ID NO: 17360 - DNA, 419 bp, Glycine max
ggctgtttcgcgctgccattgccccgcgagtctggtattccgctccgaccgactctagtgttcgtttgggtcagactttgacgctaaagagcttcgagaattcatggattggaactaaagttggggtttcgccatgcagtctcaatcttagacctgtcgtgtccgtttcccggcggcgcccgctcgctgctaccgtctccttcagcctccccaccgcaaagccagagcgtgcttctactggccaagaaattcccaagtgagtagtatcgcccaaatgtgtttgtcggactctacttttttctcgttggtcccttgctaattgtgtttgatgaaagcaagatggttttccaaggctataaaatcatttgcaatgtctgaattggaggcaagaaaactgaagtatctgaccactggcactg

SEQ ID NO: 17361 - DNA, 322 bp, Glycine max
ctttctcttcttctgctgctcgatcgatcgatcgatctcgtcactctcttagctaccatggcgactgagaatcctttcaatagcattttgacgacgctcgaaaagcccggtggtgctggcgagtttggaaagtactttagcttgcctgctctcaacgatcgtagaatcgatagacttccttactctgtgaggatacttttggaatctgcaatccggaactgtgatgagtttcaagttaagagtaacgacgttgaaaaaattattgattgggagaatacctctccgaagctggtggagattccattcaagccagctagagtgc

SEQ ID NO: 17362 - DNA, 409 bp, Glycine max
cccacgcgtccgagagttttgaggaagaagcatagcgatgatggcatgcagtagtagcacaatgcagagtgtgtacccgagggtgagtggagcgaatttccacgttccgctatcttccccttctctcgttcctatttacaacaacaacctttccttttcaaagctacgcaattcaattcatctcgcggcggtgccattgccgccgttaaccaaagcctctgcggggaacggcggccccaccgacgagggagtgtctttagggacgatgaagctttctttggacactgacctccagagattcgattccttgctctttcagtgggcaaacagcctttgccagggagccaatctgcccctttccgtgcctttcaaggtggacaaaatacctggtggagctagactgggttta

SEQ ID NO: 17363 - DNA, 417 bp, Glycine max
cccacgcgtccgaggaaacatcaaataaggatttgtcaacattagccaaggtagcatttgaattgcttaaatggatgattgtttgggaacctcaccttcagaaggctgtatctgtgattcttactgctgccaatgattccaactggcgaactagatctgctacattgacatatctgcgcacattcatgtacaggcacacttatattctctcaagttcaaagaagcaagaaatttggagaactgttgagaagttactagtagacaatcaaattgaggtaagagaacatgctgcagcagttttagcaggcctaatgaagggcggagatgaagatcttgcttgagatttccatgatagagcttataaggaggcaaatattgtacagaagagaaaaaaatcgagaaatgcaagttcttgat

SEQ ID NO: 17364 - DNA, 380 bp, Glycine max
  modified_base (34)..(34): a, c, g, t, unknown, or other
cccacgcgttcgcccacgcgttcgcccacgcgtncgctttcttccttctccttctcttgggtggttctcttttgatgggcgaaaacaatgaagctcattagcagcattaaccccaaaaatctcaaactcagtcccaaacgcttctttcgcaaaaaggaacgatctttagtctcacgctccgacccaccttcattcggatccggatcttcctccgacgactccaccacaaatcacaagccttccgccggtaaccaaactccgaccagcgtcctcccgggcgtctccggagactggtccgacgtcgccgccgtcgacgtgcggtgggacctcgcccaggcctttcgcctcattgaccgcgacaacgacggcgttgtcacgcg

SEQ ID NO: 17365 - DNA, 413 bp, Glycine max
gaaaaaaccgacacaaagatctagtcctagctagaatcaaacaggggcgatctcaccttcaagaacacatcgccatggcaaggaacttgcttcttgtgctttttgcagtagccaccctcctccatggctcagcagcccaaaccagacacatggtcggtgatgccacgggctggatcatccctgctggcggcgctgccacctacaccgcctgggcttccaacaaaaccttcaccgtaaacgacactctcgtgttcaacttcgccaccggccaacacaacgtggccaaggtaacgaaatcggctttcgacgcgtgcaacggcgggagcgccgttttcaccctgacctccggtccagcgaccgtgaccctgaacgaaacaggggagcaatactacatttgctcccgttgatcacac

SEQ ID NO: 17366 - DNA, 407 bp, Glycine max
  modified_base (217)..(217): a, c, g, t, unknown, or other
  modified_base (321)..(322): a, c, g, t, unknown, or other
  modified_base (324)..(325): a, c, g, t, unknown, or other
  modified_base (327)..(327): a, c, g, t, unknown, or other
ttagcatttcatgtaaagcttcctgtatagcatttattggttaggcaattcttctatcacctaaatggtgtgtgtaacaaggcagaagtgaccaattgatgtgaaaatcccatcattggcaatgcctttattggtcgaggttttcctttttccctcctccaccctacgatctgctccaatttttttcaaagtataatttgttgacaaattcactgangtcaagcttaacgttggtccccttctgatccaactctgctctcggcttgtaaatacccagttaatttttaaaaacaagtataatttttgctaattccactaacnnannanaaaaataaaataataaaaaaaaaaaatataatttaataaaatttatataattatgcttggcaagttttgctcttaatttt

SEQ ID NO: 17367 - DNA, 91 bp, Glycine max
aagtgaaagccattctgttaagtggttaactgtatcatgtcataattattattattattgaatacattgtgcaagtatttatcattttttt

SEQ ID NO: 17368 - DNA, 385 bp, Glycine max
ccctatctctcaccaacttccgctacttcctactccaaccactttcttttttcccgcagtcatgggcaaggtcaagatcggaatcaacggatttggaagaattggccgtttggtggccagggtggctctgcagagagacgatgttgaactcgttgccgttaacgatcctttcattaccaccgattacatgacatacatgtttaaatacgacagtgttcacgggcactggaagcatcacgatgtcaccgttaaggatgagaagacccttctcttcggtgacaagccagtcactgtttttggacacaggaaccctgaagagatcccatggaagtcgactggagctgacatcattgttgagtccaccgggagtttcaccgattaggat

SEQ ID NO: 17369 - DNA, 129 bp, Glycine max
catcaacgatctgcagtctaacaaaggcttcgtgaaattgccttatagcaagaagggtggtggattgccagtggaagggaaaaatccaaatatagaagaaacaggggacgatggaaattgacattgtgg

SEQ ID NO: 17370 - DNA, 179 bp, Glycine max
ctgtggctcagagtactgcatcagataagagagaaaacggctcttcatccgttgggggaaatccgaccatggtgcacgtctcctcttacaggtactatggtgagtcgcttaacaagcccccccgtccttaccataaggatcttttagacgcgtatcttaatcttgttccggagtactgg

SEQ ID NO: 17371 - DNA, 422 bp, Glycine max
gcaaggcatgtttgatggtgtgcttgacaatacaggtcggggagtcgctgatgaagaagagtatgaggctgctgatggtgattggggtgaggagcttgacatagttgatgcagatggcttacaaaatggagatgttgctgcgattttggaggatggagaggtggctgaagaaaatgatgaagagggtggatgggagatggaggatttaggcctgggcccagaagctgacactcccaaagcttctatcagtacccaatcttcagtttttgtgaccccaacacctggcatgccggtaagtcatatatggattcagaaatcatctcttgcagctgatcatgcagctgctggaaattttgatactgcaatgaggttactgaaccggcaacttgggataatgaattttgcccccctgaaatccatgt

SEQ ID NO: 17372 - DNA, 419 bp, Glycine max
cacaatctcattcgatcatcaatcctcactcgtggatttcaatctcgttcagttcctcccattttcatacacaaataattttctttatatttctgcattgctttgagtggattttgcataatcatattatcaatttttcattcattttgggatatgagtgcagaagtactcttgtgaaggttggaaaaaagaaatctcaatttgatgtatgaaccaggggtgtaagaagaagttgaggtgatggaaccccaggatgaagaagagatccataactgtttgatcaagctgagaagtaatccggaaaggcgaaaggataaggtttacattggttgtggagctgggtttggtggtgacaagcccttggctgctcttaagttgcttcaaaaagttcaagaactaaattatctggttcttgaatg

SEQ ID NO: 17373 - DNA, 282 bp, Glycine max
agaaatatctccaagactccaaccgtgcttcaaatatcaagcactttcttgttgtacttgcacttccactttttttttccaggatctagatgagtagccggagttctccccttgcgccgccgcaccaatgtcgaccacaactgtatccggcggcgaccctccttctcgcggttttgatacaccgtctctggaccggtaggcggcggcgcttgttcacacaatctactatcatggggggtaccctctcgtgagcatgttggtgctgggcttccggcggctaca

SEQ ID NO: 17374 - DNA, 358 bp, Glycine max
aaagagatcaactaatcgtggttgatgacgtttctcatctagcatggctcctatcttcaggtgtgaatgcgcaagagggcgtgtttatatctgagattggctttgctatggccgtggatactcatatggccagggagaaattggttataggatttgcaagcagagaggctcttgaagaggtggtgggaatcaaatataagttcattttgtgacccacgggtgtcagatgaatctaacgtgatggtcccctgttaatacaacaatataaatcgctgttgtgaccaatctctgactctatttgaagaacgaactgaatgaggtttacattctgtttgaaactatatttgaatttgacaag

SEQ ID NO: 17375 - DNA, 413 bp, Glycine max
ctttcatatcaaatagttgactctttgatttggcttggaattcgagacatgattaatgatcttaggaagaaaaagttgaagctacgaccagtcacatatttaagtggctcacaaggctctgaaactgatgttccacatgcatatatatggagtcctcatcttgttcctaaaccaaaagattggggaccaaaaattgatgtagtagggttttgctttcttgatcttgcgttaaactatgaacctccagagtcccttgtaaaatggcttgaagaaggagacaaacctatttacattggatttggtagcctgcctgttcaagaaccaaataagatgacacaaataattgtagatgctttggagatcactggacagaagggcatcatcaataaaggatggggaggtcttgggaattt

SEQ ID NO: 17376 - DNA, 387 bp, Glycine max
gatggtttccatggcattcggtgtcagcactgcgacttttccgaatctaaacaggtgtcgtggagtggcatatgcaagtttgagcaacaaatcaagtactacatctttgggagtgcgagttacagagggagaggggaatttgccgaagcttgttctcacttccccggccggtagtgaggctgagatatacctgtttggaggttgcattacttcttggaaagttcccagtggtaaggaccttctctttgttcgccctgactctgttttcaatgggaacaaacccataagtggaggtgttccgcattgtttttcacagtttggtcctggtccaatttaacagcacgggtttgcacggaatatggattggactgttgtcgattctgaaaa

SEQ ID NO: 17377 - DNA, 388 bp, Glycine max
ccggaccggaattgaagtgttccggcccagcgcgacccgtcacgtccaatccgatcatcaatcctaactcgaggattccaatctcgctcagttcctcgcattcccatacacaaataatgctctttatttttctgcgttgcttcgagtggatttcgcataatcatattatcatattcttcattacatcctgggatatgagtgcagaaggactcttgtgaaggttggaaaaacgaaatctgaatgtgacgtatgaaccacgggtgtaagaagaacttgatgtgatggaaccccacgatgaataagagatacatagctgtctgatcaagctaagaagcaatccggaaaggcaaaaggataaggtttacattgattgtagagctgggtttgg

SEQ ID NO: 17378 - DNA, 380 bp, Glycine max
aaatttttgacagatgccaaattgtctatgagtgaaacatatcaacagactgatgctgattctctggattctgaagaggacaccttcagggatgattgatctacagcttcaacagcagttttgggtgataaccatctttatgtagcaaatgttggaaattctaggactatattatcaaatgctggtaaaacaaatgctctctctgaagatcatataccaaatataagtgatgagcggtagagaatcgagaatgctggtggtgttatcatgtgggcaggtacttggatggtttgacgggtgctagcaatgtctcggtccttttttaaccgtatgctgaacctagtttgtatagcagaacctgtgatccaggaccagtatat

SEQ ID NO: 17379 - DNA, 420 bp, Glycine max
ggccaaatcaatcaaattctttgagttgaacacaggggccaagattccttctcttgggttagggacttggcaagctgaacctggtgttgtagctgaagctctcaccacagccattcaggttggatacaggcatattgactgtgctagtgcgtataagaatcaagcagagattggttctgctcttaagaagctttttgatgatggtgtggtgaagcgtgaggacttatggatcacttccaaactctggtgttcagatcatgcaccagaagatgtgccaaaagcattggataaaacattacaggaattgcaacttgactatcttgacctctatctgatccactggccagtccgcatgaaaagtggaacatttggactcaataaagaatatcttgagcaaccagacatttccaatacatggag

SEQ ID NO: 17380 - DNA, 184 bp, Glycine max
atcaaatctagcattacttcaccatcaacaactacagtgattaatgacgaacgggtgcagggcataacttatagggagctcctttaacttctcctttaggcttatcttgctaaatccaaatatcatctactcctattactctttatcctttatttcaaactaaatccccctacgagcactgtat

SEQ ID NO: 17381 - DNA, 394 bp, Glycine max
ggaaatatttgaggaaccctgttgtggtcaccattggcactgctggaaaggcaactgatttgatcagccagcatgtgatcatgatgaaggaggccgagaagttttccaagcttcataggttgcttgatgagcttaacgacaagactgcgattgtgtttgttaacaccaagaagaatgcggatcatgttgccaagaatttggataaggatgggtatcgcgtgactactttgcacggagggaagtcgcaggagcagagggagatcagtcttgaagggtttaggaccaagagatataatgttcttgttgctactgatgttgctggacgtgggattgacatacctgatgtggctcatgtcatcaactatgatatgcctgggaatattgaaatgtacac

SEQ ID NO: 17382 - DNA, 181 bp, Glycine max
attcaatcccacggattctaccttaggcaggtgatcttgtatatatgattattaatggggaaggtgggctggttttgaaagacaactttgagggtggggctacgtgggcatatgaagttgggtcactatcaatggtttgaaccattggacccgtggggctcgtttcaccgcggcagacgct

SEQ ID NO: 17383 - DNA, 436 bp, Glycine max
  modified_base (292)..(292): a, c, g, t, unknown, or other
cttcttatcagcaactgcaccagtgaggaacgcttccaaaagctctccagatacaggaataagaagacaaagaggaattttgggaggaaaatcaagtatgcttgcaggaaggcacttgctgacagtcagccaagaatccgtggaagatttgcaaggactgaagaatctgatgtcaagagggaatgaatgacttaaaactgatttagtaggaagaaaatagagttgagtagctatatctgatcaagctatatggaaaaactcagcagtaatatgtgattagaacttatgtggngagtctctgtttgtttgagcagatatttgctgaataaaccaggcctcaaacttcttaagctagttcatctcttatctattggattaacgtctctatagacggaaataaccttccagatatgtaaatagttttgttgaataatgg

SEQ ID NO: 17384 - DNA, 431 bp, Glycine max
tagaggcacgcgttcgaagagctgagaagacatccgaaagggagaatgaattgaaacaacaattagagcagagcatgaaagaagctgctgatagggatcaaggcgcaaacttgtatgtaaaaaatttagatgatagcattggtgatgaaaaacttaaggagctgttctccccttttaggtaccattacctcttgcaaggttatgagagacccaaatggcttaagtcgtggatcgggttttgttgcattctcgactcccgaggaggcatctagagcactcctggagatgaatggcaaaatggtggtaagcaaacctctgtatgtgactctagcccaaaggaaagaagataggagagctagactgcaggctcagtttgctcacatgcgacctgttggaatgccaccatctgttggtcctcgtgtgccaatgta

SEQ ID NO: 17385 - DNA, 444 bp, Glycine max
ggaaaaatggcagcctctgccggcggccagataactctctcgtcaaccgtgcagttacatggagtggcctgtagtaggaattggaagctagtgaagttctgtaatggggaagtcatgggacgtaagcttgtgttaaaaagtgcttatggtggcagcactaaggatgttaggcaccaccaacaacaacaacatatatgcatgtctctcacagctgacgtttctactgaatccaagttgagagacctagatatggaaagaaggaacccaaggacagtgttggcagttatactaggtggaggagctggaacccgtctcttccctctcactaagcgacgagccaaacctgctgttcctattggaggtgcatacaggctcattgatgtaccaatgagtaactgcatcaacagtggtatcaacaaggtgtacatcctcactcagtttaac

SEQ ID NO: 17386 - DNA, 460 bp, Glycine max
  modified_base (419)..(419): a, c, g, t, unknown, or other
cgccccaacactcaactcggctcgtcgctattgttgttgttcttcttctccatatcaaacagagtatagataaaatatcattgcagcttcattttcatcctccaattaattagcaatggggcacacatcccttttcactccctcttcctctcttaggttcaactctcttcttgtttcctccaccccctcttcttcttcacgctccaacagcgtttctttccccgccctctccaggaacataaggaaatcggtagaagatagaaagattaataaaaattctgctgtgaaagcagtgtatggtgatgaattttggacacctgcgaggagttcacctcaggatatttggtccataaggagtgatttgcaagtcccatcttccccttatttccctacctatgcacaaggacaagggccacccnccatggttgcggagcgtttccagagtgttataagtcagctt

SEQ ID NO: 17387 - DNA, 141 bp, Glycine max
cccacgcgtccgcccacgcgtccgaaacagaaactcataggcggggcacattctcaacccagaaccctaagagcagagcgaaagtgacaacaaacttcgcgaccgtcgcaagactcggcggcgcattagctgcatccacct

SEQ ID NO: 17388 - DNA, 432 bp, Glycine max
  modified_base (1)..(1): a, c, g, t, unknown, or other
  modified_base (4)..(4): a, c, g, t, unknown, or other
  modified_base (87)..(87): a, c, g, t, unknown, or other
nctngcttcacggtatgttgatataaagctttgccaaaatgagaggcataaatgtgatgggagaagtggatgtccctgggcatgcanaatcatggggtgctggatatcctgatctttggccatcaccttactgtagggagccactagatgtttcaaagaactttacttttgatgtcatttctggtattttgacagatatgagaaagattttcccatttgagctatttcacttgggtggtgatgaagttaatacagattgctggagtagtacttctcatgtaaaggaatggcttcagagtcacaacatgaccactagagatgcctatcaatattttgtactgaaggcccaagagatggctgtttcgaaaaattggagtccagtgaactgggaggaaaccttcaatacgtctccatcaaagctccatccaaaca

SEQ ID NO: 17389 - DNA, 433 bp, Glycine max
  modified_base (364)..(364): a, c, g, t, unknown, or other
  modified_base (413)..(413): a, c, g, t, unknown, or other
gatgatttcgaggcagggttcagagaattcgaggatgactcggaaatcgaggatgtcgatgatgaggacgatgaagaggaggaggagttgaagaagaagaagccctttgggttctctcgctccaacaacaaggctgcttctaagcctctctctcgtggagcaacaactgtgaaatctgtggaatcaaaggggcaagctgagaagtgtgccaagagaaagaggaagaaccagtatcgcggaatccgccagcgtccatggggaaagtgggctgctgagattcgcgacccaagaaagggggttcgtgtttggcttggaactttcagcactgctgaagaagctgcaagagcttacgatgctgaagcanggaggatccgtggcaagaaagccaagtgaattccctgatgagccttcangcgctgctttctcaaacgtc

SEQ ID NO: 17390 - DNA, 380 bp, Glycine max
cccacgcatgcggctacatggtcagaatacatgggtagtgatgccaactacgttctcaaaggggatccagccattgatcgagctcatgccacatacatcttatgtggctactgaactgcatttggagctacttgtaaggaagccaaggttgaaagtggatccactgatgctgttgttggtcttgtggctgatgaatataggtctgtaatagaatccaaaatgctagaagcaggtaagatcattgtaatggacacaaacgagaacacgatagcaaatggagaagcttttggaataactgacattataaatccgggtgattctaataaatctgctgcagaatcggtcaccgaactaagtggtgaaatgggtgccgactattc

SEQ ID NO: 17391 - DNA, 360 bp, Glycine max
gttttaaggttgtttgcttttgtatctcaatcttcaggttcagtttgatcttatgtcaatgaaggatttttagacaaaacccagattcacaggaaaaacccttaaagcggagaataaaaggcaacgacttttcatctctacgcaagtgattatggcggttgttgagaatgttggggccaaaatcggttcttcgagccagagtttggagaacggtgtagtgtcagcggattctggtgaggttgagaaatcgaaaaccagatgcgatcatgatatgaacaacggcgttttcaaccatcaacagcaccaagagacagtttccggtaccatgccagttcctaacggcaattttagctacaagca

SEQ ID NO: 17392 - DNA, 419 bp, Glycine max
  modified_base (25)..(25): a, c, g, t, unknown, or other
tcgcccacgcgttcgcccacgcgtncggaatcttactagaaagtaaataaaatgaacgagtgccaaatccgagagccatgtccgtggttgatatgttgaattgagaagttagtagggttccttcattcgactcaaacacacaatgagtttgtctctcattcaaggttattcttccgccgaagacgaagaccaaccccaaccccacgattccgacctcgaagattccgacgatgaagccgccgccgccgccttctggaccgccgccgcaaaccacccttctctgggcgacagatccatcttcgaccacgttccgaatcctccttctgccacgggtcttccttctgcattcgacgctttctccgaaattgcagaaccgccacaatttctgaacaacagtgtggaagagtataacaacaacc

SEQ ID NO: 17393 - DNA, 410 bp, Glycine max
cccacgcgtccgatggaaagctgctgaaaaccaaagacagaaatactagaaaggacatacaaagggaacttaggactctatccaaagaagaacgtaaaaggcagcagcttgctgtaacagatgtacttaaaagtgcagatgtaatattaactactttgattggggctttctctaaaaaactagacagcacttcatttgatttggtgattattgatgaagctgctcaagcacttgagatagcatgctggatacctatactgaagggttcaagatgtatacttgcaggggaccatcttcaacttcctccaaccattcaaagtgttgaagccgagaagaaaggcttaggaagaacgctctttgaacgacttgcagaaatgtatggagatgaaatcacatcaatgcttacaatc

SEQ ID NO: 17394 - DNA, 422 bp, Glycine max
aaatttttgacagatgccaaattggctataagtgaaacatatcaacagactgatgctaattttctggattctgaaaaggacaccttcagggatgatggatctacagcttcgacagcagttttggttgataaccatctttatgtagcaaatgttggagattctaggactataatatcaaaagctggtaaagcaaatgctctctctgaggatcataaaccaaatagaagtgatgagcggaagagaatcgagaatgctggtggtgttgtcatgtgggcaggtacttggagggttggaggggtgctagcaatgtctcgtgcctttggtaaccgtatgctgaaacagtttgtagtagcagaacctgagatccatgaccaggagatagatgaacaaattgaactgattattcttgcaagtgatggact

SEQ ID NO: 17395 - DNA, 401 bp, Glycine max
accacgcgtccggaatagaacatgagcatataaatggataccctttatattatctatctttatattatctataaagggtaaagatatccgatgtgaatctattcgtttagttctctatcggtatgtatataggtgaataatccaacatgcctttttgtgaagtaaaaaaactaccctcgatccatgcctgaaaagggttgataataagtaaaaaaaatcaatgaattcatgataaaacccttctgcgtttttttattataaatttttttgtcaataaagggatcaaggggttgggggatcaaatggtaaagttcttctgttggtaaattggaggattagaaacatgactattgctttccaattagctgttttcgcattaatagctatttaatttattttat

SEQ ID NO: 17396 - DNA, 416 bp, Glycine max
cgattgcacaaacattatttcagttccttcagattgcaagcaattggtggatggcttgggctaaccctcaaacagaaggagacctgcccaaagtaactccctcagttcttcttcttgtttatatggcccttgcttttggcagctcatggtttatatttgtaagggctgttctggtggctacatttggtcttgcagctgcccagaagctatttttgaaaatgcttagaagtgttttccatgcaccaatgtctttctttgactctacaccagctggaaggatcttgaatcgggtatcaattgatcaaagtgttgtggatcttgacattccttttagacttggtggatttgcttcaactacaatacagcttattggtattgttggtgtaatgacagaagttacatggcaagttttgctc

SEQ ID NO: 17397 - DNA, 390 bp, Glycine max
  modified_base (321)..(321): a, c, g, t, unknown, or other
attaatttggaaatgtaaaaaaaaaattgggtgtttccgatagtagtagttgtagcggtcaagccgagccgatccgatgacgcgagccactcacacactgggggttcccccaacaacacgcgcccctccccggcgaccgtaccgtattatccctcaccattcccactctttcgccttgccgtttcgctttctctctcttcttcttcttctttctctttctctttctctttctcttttccctttctctttatctctcttccaaccctaattccctttttccgatgccggactttcacgactcccttctcaccaccacgccgncgtcatcgggccccgtccccgtccgcgaagactgctggtccgaagaggccttctccacgctcgtcgacg

SEQ ID NO: 17398 - DNA, 375 bp, Glycine max
atactccttattcttctcctgcttctgcacctcactgctataccttctttcaagcaggagaaagtctctcactcctttctctttctctccacgccgccatcaccacacaaccatgccttcgctctctctctctgaccctgacacccccaaacctattgccaagaagaaaaccaaaacccagtccctcaccgatcccgacctcgatggggtttcggggaagaagacgaagaagcgcaaggcttcagatttagaacaagaagccatgccccccgccgcttacaacaacgatggggacgacgagaccagcttcgacctcgtccaacccgaacctgctttcaaagaagacgacaacaagaataagaagaaaaagaagaa

SEQ ID NO: 17399 - DNA, 436 bp, Glycine max
cacaaacaaactgtgctcttgagagttgagacataagaaaagaccatttgggaaattcaacgatctcctgaaatcaggcagcgaaataagtgcctgatgttgagagaatctgcacccttccaataatcaaagggcttatttagagccacatatcatccttgaaaatttcccagccaatttggcgccaaatgttggacctttctacatgactttgcaaccacgttgaaggaagccacaattgtctcatagtttcatcctctggaagggtgagtgagagggtgctgagtctgaaacctagttcagtgttctgcttttgaaactgcaaaaagctaaacaagggcctcctgatttggaccgtgatatatcagagcatgaaaaaggcctttctatcactacccaaccaaagcagtctctgaattatcatcatcatcaatgc

SEQ ID NO: 17400 - DNA, 440 bp, Glycine max
agagtttctcaccaaacacacacttctcttctcttctcttctcgtcattttctgtggttctgactttcttttctctaatcttctaatctcttattttcttcccccctctgttactccccgcttctctgaatccctttctgttaatcatctgtctttcaactcgtgattttttgggtttgcctcaccaaaaagattcaaactttgaaaatttttctcgaaagccaggtgttttcagaatcgagatccagcttttttttttgtttgtttttaaaaaattattattttctttcgttcagccgcgagggttgtttttgatccctcaaaagctctctttctttttttctttcttggatttaaggggttgtctattataaacctctcccatcctttcttgctgtaatatttaaaaaccacaggttgatttttttaatctaagatct

SEQ ID NO: 17401 - DNA, 364 bp, Glycine max
cccacgcgtccgcccacgcgtccgcccacgcgtccgcccacgcgttcgcctaaacctaaacatggactgaatttcccaaatccccttcccaattttcaccaaaacctaatactcccaaaccaatcttcgatcatggccgccgaatcacaacctcaactaatcgtacgttctatccattttatttgctttccatccttattattctattttccatgtgttggtttgaattttcagaatgagactattctatttccgacatgtttgttgttatctacggttttgctttgattggttttttttggattgagagtattctattgttcaggttttgttaattaatctagggtttgaatttgattgaaat

SEQ ID NO: 17402 - DNA, 442 bp, Glycine max
gtaattttgacgtgattctgttcgcctacaattaacttgaaatttgtgattaattacccttggtgtgtctttttttttgatttgtcacctttctctctcttcaggttaaggactgaatcatgtgcatctggctccaaggcatgtcgtgagaaattgcgaagggataaacttaatgagaggtttctggaattgagttcgatcttggagcctggtagacaccccaaaacagacaaagttgcattattaagcgatgcggctcgagtggtaatccaattgagaaatgaagccgagaggctgaaggaaatgaatgatgaattacacgcaaaagttaaagaattgaagggtgagaagaatgagctctctgatgagaacaataagctgaacgaagagaacgaaaagttggagaagcatgtgaaactgacaaatatacaacccagctttc

SEQ ID NO: 17403 - DNA, 395 bp, Glycine max
  modified_base (378)..(378): a, c, g, t, unknown, or other
atattttatctttattccactgaatagaacatgagcatataaattgataccctttatattatgtatctttatattatctataaagggtaaagatatccgatgtgaatctatttgtttagttttctatcggtatgtatataggtgaataatccaacatgcctttttgtgaagtaaaaaaactaccctcgatccatgcctcaaaagggttgataataagtaaaaaaaatcaatgaattcatgataaaacccttctgcgtttttttattataaatttttttgtcaataaaaggatcaaggggttgggggatcaaatggtaaagttcttttgttggtaaattggaggattagaaacatgactattgctttccaattaactgnttttgcattaattgcta

SEQ ID NO: 17404 - DNA, 380 bp, Glycine max
caagaaaggaccaaccaaaaccaagtgctttcttggagcttggtagagagagaaagtcccactttctctctcttctcttggttctttctgtgtgtgttgtgtgcgtgcgtgcgtctgagggtacatgcaaaacagtgagtttgagatagagaaagaaggagttcaagattgttgttcaattttgcaaaaactgcccatcaagtacttttgttgtttttttttcgattttgcttcttatccaacccgttcttgatttggaaggtgattccgggaaggaattgttagggtgctgctgaggctgttcatcacctatctttgtggtgttgaatttgccacttctgataaagacagaagaaagcaccggattgaaggttgagttg

SEQ ID NO: 17405 - DNA, 378 bp, Glycine max
cccacgcgtccgcccacgcgtccggaacaacaacaacaaccgagttccagcacagtatgattggcacaataatagaaggttactcactcatcattgccctaaccggagtttcaatcaggtcgcgagagcgaagcaacagtgtggttcggattggggaaggccaaccaagcctaataactatttggttcagcagcaacaggttaaggttcagagtagagcgcgtgagtttgggcacgagagtgtgaatgcgaaatgcactcgtccatctgcgtggccccctttgcaagttcagcagcaaaacaaccgggtacagtttggcggatccgggtctagggttggtggatcttctgtgaaaagggggtgtggtggaactggggt

SEQ ID NO: 17406 - DNA, 455 bp, Glycine max
cgacgcagaaggttcatccaatctccgaatcctttaatcgcattgcaaccatgtcgaggagaaaggtcagagagccaaaggaggaaaacgtgactcttggcccagctgttagagatggcgaacatgtctttggcgtcgctcgcatatttgcctcctttaatgataccttcattcatgtcactgatctgtctgggagggaaacgcttgtccgcatcactggtggaatgaaggttaaggctgacagagatgaatcatctccttatgctgctatgcttgcagctcaagatgttgctgccagatgcaaggaacttggcattactgctcttcatatcaagctccgtgccacgggtgggaacaagacaaaaactccgggtcctggtgctcaatcagctcttcgtgcccttgctcgttcaggaatgaaaattggtcgtatagaggatgtgactcccattcct

SEQ ID NO: 17407 - DNA, 462 bp, Glycine max
  modified_base (419)..(419): a, c, g, t, unknown, or other
cccacgcgtccgcccacgcgtccgcgacaacgtatcacaagctcccaatatagcaagcaggggacatgatttcttccgtgtcctttccagcgtctcttcccgccgttaacttctccggcaacgccatggcttcgccgtcgtgccgcgtcaaatcccggccaatagtcgccttcgccaccgccactgccaccgctgaagctcgctcttcctggacggagcaaccgagaccttcctatctgaactcctcttgctcttcgctttacgatatcctcggcatccccgctggcgcctctaaccaagaaatcaaggccgcgtaccggcgactagccagagtctgccaccccgacgtggcggccatcgaccggaaaaattcgtccgctgacgaattcatgaagatccacgccgcgtactctactctntctgatcccgacaagcgcgctaactacgatcggagcctattcc

SEQ ID NO: 17408 - DNA, 438 bp, Glycine max
cccacgcgtccgcccacgcgtacgcgcggattgggaaaggcagggctggttaaatggattcggtttggaactttaattgccaatgtatcagctgcttgtattatggctgcactttccagcgtgaagaatgcagtgaacaccagggattgtgatactgttgtagcaggaatacaatttggtctaatggggtgtttgagtacggtctctacattcgctgcagagtttaatgcgatgagagaaagcagtcgtcctatgagagcttatgcatatgctgccattacagttcttgtgtcattcgctttaggaatcttgatatactgtattcccgcttggacaaaggggtttgacattgacacatagcaattgagtaaggcaatcatgttttggttgaaacattgcagcttcacgacaacctccctcctgattttaaagataacg

SEQ ID NO: 17409 - DNA, 254 bp, Glycine max
cccacgcgtccgaattaagattacgtgaatttttaggtttttagggggtgaaaaaatggggggaggttgtgttgtatcatccccttgccttgatattaattgtgataattttaggtttggaatatgcgttgtggtttgagcatctgttactgttatggttgggtttttgacatctgataatgaatctgtgtactggaaggattactgggtcttggtcatccagattgaaatacctgaaaatccttgctacttat

SEQ ID NO: 17410 - DNA, 443 bp, Glycine max
ctctcacacacaccactttatatacgcacacgagagtcggaagcactactctcttcgccgcttgctctctctctctcgctctttcagctttgactttggtggaaactaaagactagtcaaaatggtgaagttcacagctgaagagctgcgtcgcattatggactataagcataatatccgtaatatgtctgtcattgctcatgttgatcacggaaaatcaaccctgactgattctcttgtggctgctgctggtattattgctcaagaagttgcaggtgatgtccgtatgactgatacccgtgcagatgaagctgagcgtggtattacaatcaagtctacgggtatctcactctactatgaaatgactgatgaagctctcaagagttttaagggagagcgcaatgggaatgagtatcttattaatctcattgactcccctgggc

SEQ ID NO: 17411 - DNA, 427 bp, Glycine max
gtttttgtttctggtcagttttgtgatcacatcagctaagtggcggcgaatttttggttgggtgcacaaagagtagccacttgggtgatttagactccttgctccgctacttcaccaagttaaataaactctgcatcccttaaatagtgtgttaccttacccgtatccatcacaggaagaggctggatagtttctctttctctctccatggatcttcaggatttccttatccgtgctcgggtcttgaggctttacagacaagcattgagaattgctggtcgagccccttcttccgctaaagctgaactgaggcagacaattaggcaagagatggaaaataatagaaactgcattgacaagcaaaggatccgtttcttgattagtgagggattggataaactgaaacgactggatgaaatgctagata

SEQ ID NO: 17412 - DNA, 322 bp, Glycine max
gttttgagagggtaatatttgagaattgagggaaccttgttagattttagaagggacattttgtgggcaaaggtggttaataatgttgataaggattgaggtaagttaatccatccaaagggtgagggagttaacaggaagagacaggacaaaggctgggaacaggcagggcacgaatggagctatcaacagaaaatggtaaagtgagaatgaaaggagagagagagagagagatctgttgtggctacgctcatgcactgcctcttccctggctctgtctctttcctattccaactccatttccctctctaattatttattt

SEQ ID NO: 17413 - DNA, 247 bp, Glycine max
ctctctcattctctctctgattcgagcgacatgcatcgttgaattcatcccatcgcggagcgtgcaaatttgtaggggagcaactattgtgctatcgctatatgctgatatcattctcttttgtgcttttattccgaaaggacagttaccaggtacttccaccgtgcccgcatacctttggacatcacacaatgaacaggcctctgataatggatatgaaggaatctgtaaattaccaagtcatttc

SEQ ID NO: 17414 - DNA, 328 bp, Glycine max
ggagaggagaggagaaggcgatgcaacccacatccggcggcggtttgctggcaaggttccgtgcagctccggcgagctggttagaatcagttctgttgaaggaagaggaagaagaagaagaccccttaagcttcactcaactgctttccactatcgatgatgctccctctcattctcaacaccaactctatggtgccgctctctcaaacaaggataaaacacctgaaatcttcatgttagaagattccgttccttgcagagtgagggctaagcgtggctgtgctactcatcccaggagtattgctgaaagggttcgcaggactcgtat

SEQ ID NO: 17415 - DNA, 440 bp, Glycine max
cccacgcgtccgcgctattctcttccatttccatttctcaattgtctttctgtattccattatcgatgttgcaattttcattcaaaattacactctcattaactaattttagaacatgtatgcaagttgttttcagctctttctgtgttgtatgctatggcatcttaattggttcgattgaataatctgttaggtctaccctagcaaaacaaaccttatactttcttatttccttggtgctttttgtagctttcagataggtttctgtgtgttaatcgaatagacctgaattatttattgtatcacaggttgtgatggcagcagcaccagcagctaccttcgctattggaaccaccggttccctcggccaaagaggaagctcgcttcctcaatcaaagtcctttgggttgaaattcaactctctgaatcatttgaagagc

SEQ ID NO: 17416 - DNA, 422 bp, Glycine max
  modified_base (411)..(411): a, c, g, t, unknown, or other
gaaggatggaaaatgaagcctcgtgtcggtggtgctcttgcagtgcacgcaccctcgtgtcagtattcgctgcaattcttctcctattccaaccaaattgcatcgctaagcaacagcaccaaccatgccctccttcatcctgcggcataattggcaacatatcgttcccatttcgcctcaaagacgacccaagccactgcggcgacacaaggtaccagttagattgcgtgaataacgcgacgctgttaaccttgttctcgggaaaataccatgtacaagatatcgattacaagagatacaaaatcaaggttagtgacgcgggtgcagtggaggactcaaattgtttcatccctcgcaatttcttatgggatggtaatttcaggcccacgggcctggtcggcccagatgatnttggatcacag

SEQ ID NO: 17417 - DNA, 450 bp, Glycine max
aagaaaaaaaaaactcaaacaccttcaagaacttgtatctttctttgttagtatttgttactgcaattttacattcttggcatctctacatatttcattagtcatggcacctcaagcagtttccttcaagtccttcgccgttgctcttattgtggcgcttttcttctccgcctccgctctggacttagtttcggggcagtcgccggtgccggcgccggcgccggcaccagatgccggagcagctggatccgtgtcgagctcggtcgccatgattggagcttccgttgtgatttcattgctcgccatcttcaagcactgaagaataatctgatgatggatcgattttgtgtgaagattattgattcgttctgcacactcagatttattggtgctgctttataatacgttacgagtgatgattattatgtacgtataaaagagagagagaga

SEQ ID NO: 17418 - DNA, 360 bp, Glycine max
gtctgtctccgatggcttcctcataccgtgaccgcacgtcggagttccggttattattggagactctgaagaagatcggaagtccggtgcaacccgagaatgctccttcgacctctcatggcgagtcgtattcgagatccgaattcaaccgaaaggcctcgcgtatcgggttggggatccacgagacctcgcagaagatcgcgaggctcacgcagctggcgaggaaatcgtccatgttcaacgatcccgcagtggagattcaggagctgactgttctgatcaagaacgagatcactgcgctcaactcggctttctttgatttgaaaccgttcataacactgatatggctgacggcggtta

SEQ ID NO: 17419 - DNA, 352 bp, Glycine max
aaatatcacaacattaaaaaacacgatgactgaaccacatcagagcgacacttctttcagggccggggtataatatctgacttgactagaaaccttctactctttaatacatactgctcagacctagatctgatggagcagcacatgatgttcaacatcggtttacacatctacacaggtcatctccaaataatggagcctaataacgagactgaatgccagaccactgaactccccattgatagcattaataattgtggcatctttcgaagagcatctaccattaacattttttacaaagtgaacaaggacatgctcttgaatcaagatcaggagaaatttttagtatcat

SEQ ID NO: 17420 - DNA, 302 bp, Glycine max
tgacaacgaatggggttacagttcccgtgtgattgatttgattgtccacattgcatccgtggcttaaagaattgagtctgagcttggatatcatcgctacaccgttccaaatttttatcttaatcgagtttattttagtgtgaattcggaataaacactttgtgttgctgtgagagatatcattgaaaaacagtgcaatatgttgagttggtagacggccttataggtttttcctctcgtaagggacgattgactattctgtttcgttatcataatcatctagtataagcaacattttgttt

SEQ ID NO: 17421 - DNA, 406 bp, Glycine max
cccacgcgtccggggtaagcaaatgaccaagatacaaaaacatgaaactggcaaggatgttgtcgcaggtgctacagatggagttggtgtagagcttattgatcatatggtttgtcagacagctaaagcagatttaaaaattcagtcaaatggacaaatttcttctaatcttgattcaaaattttgtgatgttggaagcattcaagattcacccaatccatcattaccggcaaatggtgaagacaacattagaactgtgaataattcaaatacagcatctgatggatcagaacataatggaataagccttgaccctgtaattggtgagaaggaaaatgatgcttccttacctcataatattgatgtgcctcagaatgagggtgctgtatgtgaagatacagaatgc

SEQ ID NO: 17422 - DNA, 441 bp, Glycine max
cccacgcgtccgcccacgcgtccgcccacgcgtccgctctcttgtccaaaattagggaaacgacaaggacgcaaaatgacacaatagcccttcttccctgtttccagcttttctccttctctctctccatcttcttcttcttcttcactcagtcagatccaactcctcagataacacaagaccaaacccgctttttctgcatttctagactagacgttctaccggagaagcgaccttagaaattcattatggtggcaacagctgctacttcatcatttttccctgttacttcaccctcgccggactctggtggagcaggcagcaaacttggtggtgggcctgcaaaccttggaggactaaaatccaaatctgcgtcttctggtggcttgaaggcaaaggcgcaagccccttcgaaaattaatggaaccacagttgttacat

SEQ ID NO: 17423 - DNA, 436 bp, Glycine max
cccacgcgtccggtttcttttcgtgaaacaaaagaaaacaaaagtttaggttttgtgatgtcgggcatggagaggcttcagaggatgttcgcgggtgcaggtggagcgctgggccatcccccaccggattcccccaccctcgattcctccgagcaggtctacatctcctccctcgcccttctcaaaatgctcaaacacggaagagctggggtacccatggaagtgatgggtctgatgttgggggagttcgtggatgagtacaccgttcgcgttgtggatgtgtttgcgatgcctcagagtgggaccggtgttagcgttgaagctgttgatcatgtttttcagactaatatgcttgatatgttgaagcaaactggaaggccggaaatggttgtggggtggtatcactcgcattctggatttgggtgttggctttctg

SEQ ID NO: 17424 - DNA, 426 bp, Glycine max
  modified_base (11)..(11): a, c, g, t, unknown, or other
  modified_base (234)..(234): a, c, g, t, unknown, or other
gaccacgcgtnctgcgttgtgggccccgccgagcagacaggcaaacacgccaccgatctttccggcggctccaggtcccccgagaaagtcgaagacaactacaaacaggactggtccttcttacgccgcccaaaggagatcgagaccgccgacaaagtccccgacttcgtcgacaccttctacaatctagtcacagacatctacgagtgggggtggggccagtccttccacttntccccctacatccccggcaagtcccaccgcgacgccactcgcctccacgaggagatggccgtcgatctcatcgaggccaagcccggcaacagaatcctggatgtgggctgtggcgtgtgcagtcccatgcgggccataacggcccactcgcgggccaacgtagtcggcatcaccatcaacgagtaccaggtc

SEQ ID NO: 17425 - DNA, 358 bp, Glycine max
ctttcaattgcttaccagaacaagcatggaagctacgggggaaatagcatggcattctctgcatgtggttcggaatatggaagcaaattctatgctatttatggcataacaaccaccttgggtcttcataatccctatgcaaatccaatctagaagattaaccatgtccctatgtaagtaccctgaggctgaaacagtacccctttatatacccttcaaatctattgacatgttcacccttggaggaaagcatttttgttcttattttgctccatctctgtatatcatcacaacttccaaaggcttacttactctaatatatctctgattcaagtggttctgtgagttttcttggttt

SEQ ID NO: 17426 - DNA, 450 bp, Glycine max
  modified_base (403)..(403): a, c, g, t, unknown, or other
ggccattcaaaccttcaacataaaatggaagaatccaagggttttgttggtggtgagtctcaagaaccacatccagaaatgccctctatttcttttcaaattcctatgccagggaggaatcgatctggtggtctctacccttggggatggaggcaaagagcaataataccacagcacaccgtgcgaaactctaacggggcaagtgagaacacaaatttgaaggtgtaagtcactcatggagtaataatactatgtatgaaaatgtgaaacgtttgaacagttgttgcggttgttatgttgtcttcttcattatcgtatattatcgtgcatgggtgtacgtagctcagtacctgctttgaggataaaagctttactaggcttgaatatgaatatcttcagcagnttgtattgataaatgactcatatatggaatggaagtgctacaacttt

SEQ ID NO: 17427 - DNA, 447 bp, Glycine max
cccacgcgtccggtaaaaaaaaaaaacaagtgtagaaccgaatcaatggaatcgtactttgttatttccgttagtttcgatttgcttcctcttcttcttcctctgcgcttcacatcctcagacctcaaccatcagcaccaccataccaacaacatcatcgcggcgccatcaccaccgtaccaacaacatcatcgcgcgatccaagcaacactcacaccaacagatctatgcgccacaacaccaccgcgcaacggagaagtcgcgcgcgcgcaggaagcctcaaagattgattcgcgcacacagatggaggtgcaatgatggtgtgacggcggcgcggtggtggctggtccaaggcggcgacgcgtgacgttattcgagaagaaaggggtcgcgcacgcagatctggagtctggagcgaaggacatgggcgacactgatttcttgggc

SEQ ID NO: 17428 - DNA, 441 bp, Glycine max
cacaccatcacttccttcccgctttccacgaaccttcttcttcttctctctgtcacattttgaatctcttattttcatgcctcacaatcattcacctcttcttcacgctctctgcttccttactcctcttccggagtaggctgtgagattttgaggttcatgaagaagctatttactgtcctgtgacggttgcgcgacactgatttgttgaattctaccttgcttttgaactaggctacaatcatgaattttcagcaagacaaatttgttagatttcgggattggagttcagacaggggctccgagaccaactctcctgcaattcacgtgacacgctcgggaagagttaagaatacactaaattcagtttccgagaagtttcaaaggggtttggaatctagttcggaggggataaagagatttagaaaatcattcaagtct

SEQ ID NO: 17429 - DNA, 315 bp, Glycine max
cttcaacatttgtcataccgttgtgtaagctgcataaatgtaacaccattgccctagtgccccatgacttttgcgatgcgtattttagttattttgtggccttatggatgactgtagtctcgtatttcatctaaagatttggttgtactttctacctaggattaggaaattaaatgagtcttccttttagtttagattaggacatctgattttacttagtgcagctacgtagattgtagactttctgtgacacatttgtgtttctagtcatttagatttcacattccccatctaagagtgctctttttatgtttg

SEQ ID NO: 17430 - DNA, 444 bp, Glycine max
aaacgccgcactctcttttcttcctcagaaacacatcctaatggcagagcgcggaggtggcgatcgtggcggcgaccgtggcggtttcggacgtggattcggcgggcgaggacgcggaggtgacaggggccgaggccggcgccgaggcccccgccgcgaggaagaggagaagtgggtcccagtgaccaaactgggccgcctggtgaaggagggaagaatccgaagccttgaacagatctacctccactcgctcccgatcaaggagcaccagatcatcgacacgctcgtgggtcccaccctcaaggacgaggtgatgaagatcacgccggtccagaagcagacccgggccgggcagaggacccggttcaaggccttcgtcgtcgtcggagacaacaacggccacgtcgggctgggcgtgaagtgcagcaaggaagtggcgacagc

SEQ ID NO: 17431 - DNA, 413 bp, Glycine max
ctcgacaacttggtgctcaccgacgccgatggccagggggtactttacatgaacagggagcagctcgaggagctgagggtgaagccgctctcggcctcgtcggcgtcgaagaggactctcgttccggcgcttaacatgaggctgtggtacgcgccgcacttggaattaccaactggggttgtgttgaagggtgccactcttgttgctattaggcccagcgagctatcccccaatactgcgaagaaggaggcgtcggatttgtcgtcggtttcgacggcgtttgaggagccgtataggacggctgctacaatgcttgtcaagaggaggacttattgccttgagatgaactcattctgatgcgtttgtgaggtatatacaaattgaaccctcattgtttgaatgtatgccatttt

SEQ ID NO: 17432 - DNA, 412 bp, Glycine max
cccacgcgtccgcccacgcgtccgctcactcgtgacctaacaaatttggtgcttctttttctgggcagcctcttcgatcccgctggtgctcacttcgatcccgttggcgctctcttcgattcagtttagcaggttgtgctgaggcttaattgacccttgaagcatatttcggagttttatcagagaacaaatgggatatattggggctcatggtgttgcagctctgcacagatataaatatagtggagtagatcattcctacgtggccaaatatgtactacaacccttttggagtcgctttgttaattttttccccctatggatgccttcatacatgataactcttatgggatttatggtcttactagtgtctgcattgcttggttatatatactccccacaattggacaca

SEQ ID NO: 17433 - DNA, 453 bp, Glycine max
tgtgcctgaagtttcattctttcaacaacagcaagttcagaaatcattggagcgtattctgtgcacatgggcaattcgacatcctgcaagtggatatgttcaggggataaatgatcttgttacgccatttttagttgttttcctatcagaatacttggaagggggcatagataattggtcaatgtctgatttatcttcagatgaaatctctaatgtagaggctgactgctattggtgcttgtcaaagttgcttgacagtatgcaagaccattatacatttgctcaaccaggaattcaaaggcttgtttttaagttgaaggaattggtcaggaggattgacggtaacttttttctcaggcctgttgtttttcttcaagtatatctataattgcatgaatttaaagaccccacttttgaatatggatttggatatgcattaattttaccgaacct

SEQ ID NO: 17434 - DNA, 288 bp, Glycine max
cgcagacgaacattccgctcccatcgcatctgtaacaatggaagttcgccatgcaactcttgggcgacgaacgttggaggaaattcggcaaaagagggccgcggagagattgagtaaaacctcttcgggaccagatctcacgcaggttcccagcacctccgagattgcgggaatgagcaagtccgagagcgcaaataagctctctgagacagatcttagtgctctattgtctcaattgaaaggactgcaaaagaagaacacggagttggaagaagaaaacacaaaaat

SEQ ID NO: 17435 - DNA, 384 bp, Glycine max
cccacgcgtccgccggcgccatatcgcgtatctttctctgttctattcctacgatggagttttggggtgccgaggttaaggttggtgagtctgttaaggtagatccagccgaattcgaggcatgcatacacctttctcaggctgctcttggtgaggcaaagaaagacaaatcaaatgaaccagttgttctctacttgaaagttggtcaacagaaatttgtcttgggaaccctttccagggagaaaattcctcaaatacctctggaattggttttggaaaaggagtttgagctttcccacaactcaaagaatgccagtgttcatttctgtggatacaaagcattttatgatgctggcgatgatagcgaggaagatgaatttactg

SEQ ID NO: 17436 - DNA, 424 bp, Glycine max
gccacgcgtacgggcatttatgacttgtataatggcttgactaacctattcacaaccctggctgatgcatcgtcttacgcatcagcgaaagacataactgcgcccgccaatgcgtacaccaactggcgtacgaacttgctggcattgaaccatgttttgaacaacaacaatataaactaccctgtaagaagcattggcgggagaatttgcaagagatcaatcagctcgataacaatctctctagctatggcaaacgccaagaacaactctgacagcacaagcaatatcacaagcgacaattctggttccagatagaattcgttacacttaccgtctcttctaccgcgtattaatgcgcgaaatagagtcggttcatgttccggctcaggtccatcgtgtaatttgttgcggaatagatcttcct

SEQ ID NO: 17437 - DNA, 453 bp, Glycine max
  modified_base (400)..(400): a, c, g, t, unknown, or other
cagatcaactatatttcattaaaagaaaattcggttattattaagagagttcattacttgttcctaaaattaatgggaatttggtatggctatagttgatttgttctgcttcctcttgttttgtcaccttgtactcattctctccgctggttatggaaatgggcaccaagattgtccacactcctttacttgtggtaatcttggaactttccattaccctttcaccaaggcagaaaaacctgactgtggcttgctagccatacatgattgtgataatcctcatcaacacagaaaaatgatccagctcgagctaaatggaaaaggcatagtgcttataggcgtggctcagcagaatgcgatttcaattttggatgaagattttcacaagcgtttacaacanaacccttgtggcactttgaagaataattatagtcttccttcccctttttcttc

SEQ ID NO: 17438 - DNA, 452 bp, Glycine max
  modified_base (444)..(444): a, c, g, t, unknown, or other
agcaattcgaattcccaatccaaaaccctaataccttcaaagaacctagtagtgaatcagtgatggcacctaaggcagagaagaagccagcggagaagaagccggtggaggagaagaagtcgacggtgggagacaaggctccggcggagaagaagccgaaggccggaaagaagcttccgaaggagggaggagccggcggagaaggggggaagaagaaaaagaggaacaagaagagcgtggagacatacaagatatacatattcaaggttctgaagcaggtccaccctgacattggtatctcaagcaaggccatgggaatcatgaatagcttcatcaacgacatcttcgagaagcttgctcaggaatcttccagacttgcccgctacaacaagaagcccaccatcacttcaagggagatccagaccgcggtcaggcttgtgctgnccgtgaac

SEQ ID NO: 17439 - DNA, 411 bp, Glycine max
  modified_base (17)..(17): a, c, g, t, unknown, or other
  modified_base (33)..(33): a, c, g, t, unknown, or other
  modified_base (68)..(69): a, c, g, t, unknown, or other
cccacgcgcacgctcgngcaatcaccagcgagnaagcgagacgggcccaaaaccaaaacggtgccgannagcccaaggatctctctatggattgcaagaagcgagttcgggatgactcggacgagtcagttctggaatcgcccgaggcgaatcgactgacggacgatttactctagttcttcgacgacgccgacgacgcaccgttctctcaggaccttgactccgtcatgaagagcctgcaggaggagatttccggcgtggtctcagattccggcgagtctcaagcgcacatcgggtaccttctggaggcctccgactactagctatgtcttacacccgtcggaaactaatctgcgccagaagagaagaacgtggagaccgagtaggtccgagtcgcgtctgactcgtacg

SEQ ID NO: 17440 - DNA, 440 bp, Glycine max
gaaagagagaaaaagaaaaatcaaaggacggtggtgagtgctgcgtctgcttcatcatcaggagagaagaatggcggctactgtgtcttctgcgtggtcaaagcccggcgcgtgggctctcgattccgaggaacacgaagccgaactccttcaacagaacaacgacaagccactcgccgacttcccctccctcgccgccgccgctgccaagcccaagaagaagaaggcccagacctactccctcgccgaattcaccgccaaacccgacacctcctttgccgaccaagatcccgtcgtcctccccaccggcccccgccagcgcaccgccgaggagctcgaccgcacccgcctcggtggcggcttccgcaactacggcgaccgccccaacaggaacaactccggcggcggcgacgagtctttcaattcccgctggggttcat

SEQ ID NO: 17441 - DNA, 441 bp, Glycine max
cagggatgctttcccctgcatgtttgatggaagtcggacgcctccgccagttttagatcattccaatagaacaagtttaacttcattggatggagattatgcaacaaagccagttcctgtaacttcacgagcagaaaggagcccaagagataacacaagaatgatcacatctttaccagtatctccctgttcaagtccattgcgacagtacgagccagcgcacaagagctgtttcctttctcctcctcacccaacttacactttgatggggcagaatacactcccctcatatccagtgagatcaaatgccacgttcactcttgacccttttcaggaaacttctttttacaaagcccacacgcccggtggatccccaagaagactcatttgagttgccgattgtaaatacctctaaaatcttttggtttcctcggcatgcct

SEQ ID NO: 17442 - DNA, 402 bp, Glycine max
agaaatggaagcaaaaatcgcaaaggcattggatagggttgcgcgcaatctgaagcgcaagcgagcgacccgatatgctgcacatttaagtggagcttctcaaccaatgttagggcattggtcatctcttacgtcacaaacaagcagggctgtcaaacgcatgagattgggtggatatagaaacaggctgacaaatgctggtcctcatattggacggtccttaactaggcgttttttgaattataaaaagagtgggagactggagcgtttgatgttctatgagaattgggaatggttggactttacaaaggatgtagttgacttggttaaaaaggatctttgaatttaaaaggcagcttgtgagatagaatcaaaaggggatcatcttttgtttgatatttt

SEQ ID NO: 17443 - DNA, 276 bp, Glycine max
tgggcttggagatggactacttttggaagccccggacaaggattttgaatttattagaaacacttctttcaatttgttgcaaggctgcagaatgagaaatacaaagacagagtatgtctcatgtccatcctgtggcagaacattgtttgatcttcaagaagtaagtgcacaaattcgggagaagacatcacacctccctggtgtttcgattgcaatcatgggatgcattgtaaatggaccaggggagatggctgatgcagactttgggtatgtggg

SEQ ID NO: 17444 - DNA, 446 bp, Glycine max
aaaaagcgtaacgagcgagagaggaaggaagagaagagagatagggagagcgagcgtgagaggaatatcttcgatttaggggtttcaatatcgtattcatcaaggcggcgagtgtgagatttttagagagagagaggtgagaacgctgagtgctctgctgagagattccattgccccaacagaaggaagaggacgagaaggcggatatatatatatatatatttttctttctgcttatttatcctcagagtggtggatagggattattccctctgcagcgttccgttcctttacactgtgatttgttgacgtttctgatggagcatcgaaagcttgtggttttggggattccgtgggatgccgatactgagggattaagggaatatatgagcaagttttgtgagctggaagattgcattgtcatgaaagagcggtcaactggacgg

SEQ ID NO: 17445 - DNA, 270 bp, Glycine max
accaagttcatctcctgaagaactccagtcagacaatgctggattggtggaaaccgcatctgatggcaatgcaactgtggttaataaactatgtgacagtaggatagatacaattgatggccaatcaaatcaactggagattgcaagccagacaagtgaagctgctgatttttcatatgcagatgatgatgatagtgaccaaagttggatggttaggtctttgtctgaatcaagtgtagcctgtataactggtgacttttgcgatgcaaa

SEQ ID NO: 17446 - DNA, 397 bp, Glycine max
gccatttgggagttaggttctgcacgctctgcttccagcgagtgttctttcttcgtttcaacagcttaatttgcacacgctgcttcttcagcttgagaaatggcacaagaaacctttctattcacatctgaatctgtaaacgagggtcaccccgacaagctgtgcgaccagatctctgatgcagtgctcgatgcgtgccttgaacaggaccctgacagcaaggttgcctgtgagacatgcaccaagaccaacatggtcatggtctttggagagatcacaaccaaggccaacgtagactatgagaagattgtccgtgacacatgccgcgaaattggattcatctctgatgatgttggtcttgaagctgacaaatgccaggtgttggtcaacatttagc

SEQ ID NO: 17447 - DNA, 439 bp, Glycine max
ggtgggtggagagaggaacagaacagagcaacatgaagccaccgacgaaacccatttcgagccctggtcgaaccgagaagtttccaccaccgttgatgagattcttgagaaacaatgcctcaagcagaagcagaggaaggtcaagaaccaccaccgccatgtttctgagaaagaagaacaccaacaatattgaaacacaagaaccctcttcccccaaagtcacttgcatggggcaagtccgcgttaaacgctccgcctccaaaagggtgccctccgccggcgccggaactccgaccaagtttcggtgctgctcatgggtcccacatgctctgttttttcaccgtttaataaaacccgaagtttggttcccctttcagtgcaaacaaagttggcccaaattgagggtcttacaaagaaagaaaagggattcaaagtcacg

SEQ ID NO: 17448 - DNA, 427 bp, Glycine max
aaaaaaaaaaaattaaaattaattaaatgtcaaccgaacatgttcatgtgaataatatttcggggcacaatattcctaggggtacaatattataccgtgaaacgaataccccctaagttataagattggaatcacaggcctaagttgtccaagacttttactcttcagtggaataagatgattagttgaattagtcacatctgtttggagcttagctgtaataatgccaatctatgttggagaagaaaacctagtgggataaggattttttttttgttgttgttgttgtatgtaagagaagcaaattggtgagaactgattaacaaaattatgtgacacaacacagcagtctcaacatccttttaattgggggttaaattttataactcttggaaatttggatttcttattgtgcatagacaacaag

SEQ ID NO: 17449 - DNA, 453 bp, Glycine max
  modified_base (437)..(437): a, c, g, t, unknown, or other
cccacgcgtccgcccacgcgtccgcccacgcgtccgcgaggttttgaggaagagtccgcagtgggaggagatggcggtgctgattacttacgatgagcatggtgggttttatgatcatgtggcgacgccggtagaaggggtgcctaaccccgatgggatcgttgggccccacccttattactttcggtttgataggttgggggtgagggtgcccacgtttattatctcgccttggatcgacaagggtactgtgattcatgaagcagaggggccaacaccatattctcaatatgaacattcctctatccctgccacagtaaagaagcttttcaatttaaaatccaatttcttgacaaagagagatgcatgggctggtacctttgaaaagtacttttacattcgagatactcctcgtgatgattgtccagaaactcttncagacatcaagatgct

SEQ ID NO: 17450 - DNA, 449 bp, Glycine max
ctcttacatgactgctatagccttcctgtttatccttctaatcagttatacaggcacaacggatgcacaatccggggtgtgttatggaagacttggcaacaacttaccaacccctcaagaagttgtggccctctacaatcaagccaacattcgcaggatgcgaatctacggtccaagcccagaagtcctcgaagcactaagaggttccaacattgagcttttgctagacattccaaatgacaacctcagaaacctagcatctagccaagacaatgcaaacaaatgggtgcaagacaacatcaaaaactatgccaacaatgtcagattcagatacgtttcagtgggaaatgaagtgaaacccgaacactcatttgcacaatttctagtgcctgcattggaaaacattcagagggccatttctaatgctggccttggaaaccaagtaaaag

SEQ ID NO: 17451 - DNA, 446 bp, Glycine max
ggcaaaacgattggagaattattatcccgttcttttccgtggagtcaatggaacagttgctgatgaattcatcattgacctgagaggctttaagaatactgctggaattgagcctgaagatgttgcaaagcgcctcatggactacggttttcatgcaccaacaatgtcatggcctgtgcctggcacactcatgattgagccaactgagagtgaaagcaaggctgaactagacaggttctgtgatgctcttatttccattagacaagaaattgctgagattgagaaaggaaatgctgacattaacaacaatgtacttaagagcgcccctcatccaccatcactgctcatggctgatgcatggacaaaaccatactccagggaatatgcagccttcccagctccttggctccgtgcttcaaagttctggcctaccacaggacgtgttg

SEQ ID NO: 17452 - DNA, 441 bp, Glycine max
cactttcactggaatcacaatcctgaaacaaaaacatcttagcatttaacatactactagacaacatgaccaccacattggaaagaggtttctcggaagagcaagaagctctggtggtgaagtcatggaatgtcatgaagaagaattctggagagttgggtctcaagtttttcttgaaaatatttgagattgctccatcagctcagaaattgttctcattcttgagagattcaacggttcctttggagcaaaatcccaagctcaagccccatgccgtgtctgtctttgtaatgacctgtgattcagcagttcagctgcggaaggccgggaaagtcactgtcagagaatcaaacttgaaaaaattaggtgctacccattttagaaccggcgtagcaaacgagcatttcgaggtgacaaagtttgcacttttggagaccataa

SEQ ID NO: 17453 - DNA, 327 bp, Glycine max
  modified_base (277)..(277): a, c, g, t, unknown, or other
  modified_base (312)..(312): a, c, g, t, unknown, or other
  modified_base (315)..(315): a, c, g, t, unknown, or other
cccacgcgtccgcccacgcgtccgcccacgcgtccgttcgaattttctcatcttttcggaaagagatcaacaccccagataaaaatagaagaaagccttttctgggttaatttggtaatttggtttttttcatgggtaacataggaagcagcggctccaacagccgctggagacacggcggaggcggtggcagcgggaggcggattcacccgccgcctccgccggtgatgtcgccgccggaggtaacggcgaaccgattcgtgtaccctccggccgncacgccgtatcacaactaccccgggtactacccgncgncgaccaccatgc

SEQ ID NO: 17454 - DNA, 454 bp, Glycine max
  modified_base (19)..(19): a, c, g, t, unknown, or other
  modified_base (33)..(34): a, c, g, t, unknown, or other
cgctccggaaaagctgctnctttaagcatcatnnatctatataacaatatgcaattatgtgttttttaacttacttcggaccgtatgcactcttcttcctctcctgtttgatcttttttggtagtgttttagccacttgccctagtcttcaacatttatgatttgatcgtacctgtaaatcatttggtttgcatgtagtcacgtatcttaaacttctcatcacgaaagctttaaactcaattcttggtggtttaagtaagagctttatacctgcagtttaacactcccttaaaaaaatggcttgcaatattaatgttaaagctgtgaatgggagtttgttttgcattcagctactttgacattgctgatgatggtgtaaataataatgtaattctgatgactaaattaatattatgtcaatgttcttccaatgcctaaaaattgttttgatgaa

SEQ ID NO: 17455 - DNA, 264 bp, Glycine max
cccacgcgtccggtttaccgagtcttttcgaacgtgtgacacggtttatttggtggtactgcagcttgaccagtgtgggcgctgtttgcctgattatgtagtagtttctactttggcacagtcgccaaggcatttatctagtttatctactctatccctcagtggtgcatgccgactttcagatggaggtttgcgtgcacttgtttcttctgctccggcacttagatccataaatctcagccagtgttccctttttacatcttc

SEQ ID NO: 17456 - DNA, 430 bp, Glycine max
cccacgcgtccgctagcatcgccgcttgttccttttcaagggttttgtgttctcctttgctccgtatttgattctctctctcttggtgtttttgtctctgtcttcaccaaaatttctatctttattcacattcggcaattgggttcgcttccaatttttatttcgccttcgaccaccttcggaacctttcttcccttccttcttctgcaaattagggttttatttccaattgggtaatttttaatttgggaatctcgtttattcaatttggatcaagaaatccgcgacaatgcctccgagaatagtgaagagaggtgctgcggcaaagagggcatcgaggggatcctcaaaggctgcacctgagaaccagcctgagcctgaaactacggaagtggttgtgaaaaataatcaagaaaatcccgggtgtgat

SEQ ID NO: 17457 - DNA, 248 bp, Glycine max
gtttgtctcagatcttttaacagtcgacacaacaccattgcctctctctcgctggcccgtacaaaatgtggaccaacctagccaagcgagcttcctcaaccttaaggaacaccttccgcgtttcttctttatatccgagattctgtaagccccaaacaagtaaaacgataaacccatacccatttcaggctttccctaaagccggggtgagccggtccaagtttcttttttacgaaggcttttctagc

SEQ ID NO: 17458 - DNA, 453 bp, Glycine max
cccacgcgtccgcaaccatatctattcttacaagttacatccattgagaaacatgaaggtctgccccttagcattttcaatcctttttttgtccttcaccatagaactcttcattggcattgcttcagcagcacaagaaccagtgcttgacacctcaggccagaagctgagaacaggtgtcaagtactacattctaccagtcttcagaggcagaggtggaggcctaacagtttcaagcagtggcaacaacacatgccccctctttgtggtgcaagagaagcttgaagtctcaaagggcaccccagttaccttcacaccctacaatgccgaaagtggtgtcattctaacctcaaccgatctcaacatcaagtcctatgtgaaaagcaccacttgtgataaacctccagtgtggaagctcctcaaggtgctaactggggtgtggtttttgagcac

SEQ ID NO: 17459 - DNA, 464 bp, Glycine max
aacaacaatggacctccgtgaatcgataagcaaccaaaccgacgtggccctgagcatctcagagctcctgttgtcgagagaagctcgggacaagaacctcgtgtattcgccgctgtcgttgcacgttgttctgagcatcatcgccgctggctccaagggccccacactcgatcagcttctctccttcctccgatccaaatccaccgatcatctcaactccttcgcctctcagctcttcgccgtcgtgctctccgacgcctctcccgccggcgggcctcgcctctacttcgccgacggcgtgtgggttgagcaatccctctcgcttctcccttccttcaaacaacttgtcagtgctgattacaaggccactttggcttcagttgatttccagaccaagccttgctgctgaccacaaaatatggaaaacattcaagtgtcatctttgtagtcattaccaatttaaa

SEQ ID NO: 17460 - DNA, 445 bp, Glycine max
cccacgcgtccgcttttattgaatttgcagatttgaatcaagccattgcaatgatatcgtacgatgcctcatcatcagagcctgctcaagtacgtgggaaaactgtatacctacaatattcaaataggcaagaaatagtgaataacaaaactactgcagatgttcccgggaatgtattgttggtaacgattgagggtgcagatgcacgtcttgtcagcattgatgtcttgcacttggttttttcagcctttggatttgtgcataagattactactttcgagaagacagcaggatttcaggcactggtgcaattctcagatgcagagactgccacctctgcgaaggatgctttggatggaagaagcatacctaggtatctgctgcctgagcatgtgggaccatgtacccttaggatcacttattccggacattcagatttaagtgt

SEQ ID NO: 17461 - DNA, 278 bp, Glycine max
caactccatcatgaaatgtgatgttgatattagaaaggatctgcgtggaaacattgtgcttagtggagggtctactatgtctccgggaattgctgatcgtatgagcaaggaaattggtgctcttgcacccagcagcatgaaaatcaaggtggtcgcaacctctgagagaaaggacagtgtctggattggtggctctatcgtgacatcacttagcacctgtgaacagatgtggatctctatgggcgaatatcatgaatctgggccagctatcggtcatc

SEQ ID NO: 17462 - DNA, 394 bp, Glycine max
cccacgcgtccgggaagataagataggtaccagctatcacataggttatttaatccgttatatgccacctgatatataggcatattagctagttaggtaggtatagtagtttaagttaattcaaccatggaagacagggatcactgttgttccaacaattcaacgatgatcacaacaacaaagaaaagaacgggtagaagaagtccaacatcggataagctcaagaatcaacaccgcgagaagcagtcgatgaaaccttaccgtggaataaggatgcggaagtgggggaagtgggtggcggagatcagagaacccaacaaaaggtcgaggatatggttgggttcttacacgacacccgtggccgtcgcacgtgcctacgacaccgctgtctttt

SEQ ID NO: 17463 - DNA, 442 bp, Glycine max
ctaatccctcactcttgttcttcagtctcctcctattatccgccaccgtagccgccgccgaacggatcgacgatgaagacgaccttctgatccgtcaagtggtgccggatgcggaggaccaccacctgctcaacgcggagcaccacttctccgccttcaagacaaagttcggcaagacctacgccacgcaggaggagcacgaccaccgcttccgtatcttcaagaacaacttgctccgcgccaagtcacaccagaaattggatccctccgccgtccacggcgtcaccaggttctccgatctcactccggcggagtttcgccgccagttcctcggcctgaagccgctccgccttccctctgacgctcagaaggctccgatcctaccgaccaacgacctccctaccgatttcgattggcgcgaacatggagccgttactggagt

SEQ ID NO: 17464 - DNA, 299 bp, Glycine max
cacgatactctcaccacatcactcactaaaccctaaccaaccgatacattctccaccatgaccgccatgaacgctagcaatccattctcctacaacgccatctactattaacacacccaccaacataccaacaacaacattccttccatactcaaactcaaccccattcacaacaacattcccaatctgatccacattaacaaacaacattccgaatttacaaatatccagaactacattaacaaactctcgaatcataaagctgccacccttccctctaaccctaataatatagctct

SEQ ID NO: 17465 - DNA, 402 bp, Glycine max
gaaagaaagaaagaaaaaggtagagaaggagagagagagagagagaaagaaaactgaaaaaggaaaaaaaaagataaggctaattaactacatttttggtttggtttttcttcatctcgcaggagacacgaagagacaagttacatcacatggttaaaacttgtttaaagagttttgtgtttgtgtgtgtgaaagtagtttaaggttgtgggggtggttgaagtttttagctttagctttgcagagatgtcaggtggtggatgcagcagcatagtgtggttcagtagagatctgaggatagaagacaatccagcactgacagcaggagtgagagctggtgctgttgttgcagttttcatatgggcacctgaagaagaaggacaatactaccctggcagggtc

SEQ ID NO: 17466 - DNA, 311 bp, Glycine max
ctacaatggacatatagcattttccccttcccactcagatccagtgatcgtttcttgagccgacggtgctgattcgtgggcgcggaatcttgctcggcgtctgcgtgtaagtcatctgtgaattcccttgggcaagatggctttggggaaatatgctagagtagatggttgaagatcgtcgagtcggtgttcaacggggactggtgtcatgcctgtggctctgtgcttggatggggtttggatgatgacatcatcttcaggtgcatctgtgcgtaactgagacgaaacccacgagagtacgaaccatgcta

SEQ ID NO: 17467 - DNA, 252 bp, Glycine max
atcccacgccacttgcaattccatctcggtgtttgattctctgcttcgtcctttcattcctctggcgaatcgttaatcgttcgatcgatccatctcccgcttccaatgacaacccctaccgacaacattaacaaccctgcacaggaaaaccctaccaaaaccctaaaccccaccgaaccagatccaatccttgccaccgaggacgacgccgccgccgacactaaggactccgacgccaaaaattcccggccg

SEQ ID NO: 17468 - DNA, 412 bp, Glycine max
cccggctgtatttctgctattgggggaaggaatcagaatgagtggcaccaacttagtcttaaactttagctgaatctcagttggtgaggcttaagactaattgtgattgattggtgtgaaaaggaggaaaggaaagagtgactttttttttaatattttggatcctaaattttagaagctgcatttgatctttgtatttcggagctatcaagatgggagggcaatccatcaagatgtttagtgttgaatccccaacaccaattaaaatgggtactcattctctgtatgctgctgacttgagctcctatgaagctgcatgtgttaacgatccaaacttgcaatcctttgatgtgagcattcaggagcataccaataaggtgattagttccctacctcatggggttgaggttag

SEQ ID NO: 17469 - DNA, 347 bp, Glycine max
cccacgcgtccgattcgcaccgcaaacagtgagccatggccgtctgaaagaacaagcgcatctgcaaggggaagaagggtggcaagaagaaggcagctgatccctttgccaagaagattggtatgacattaaggctccttctgtttttcaagtgaaaaatgttggcaaaaccctcgtctctcgtactcagggtaccaagattgcttctgaaggactcaagcatagagtgtttgaggtctccttggctgatcttcaaggggatgaggatcatgcattcaagaagattaggttgagagctgaagatgtgcaagggaagaatgttctgacaaatttctggggaatggatt

SEQ ID NO: 17470 - DNA, 449 bp, Glycine max
atcggattatttagcgcatatccaaagaacgtgaccacaccatggcagtgacaagtcaattgagaggccttcttgcaactctagaggctgaggaagcatcccaaaaatccaaaggtaaagtgaacacatacaccaaccatggcgatgggtttcagaacatcactggcactaagaccaacagtggtgcatattctggtgatggtaacactcatcacgccaccaacaactacggtggtggtcctgctataaataatagtggcaatttccagggacatggcaatggaggctttattggtggtaatttcgatgcctcaacgaggaactactgattaatttatgtatgatcaacttcatgtattaaatatcgtgttctgcgctacgtatactaattaataataaaattagagctgcatgctgcagctctaacagtgtgtgatatgaataattac

SEQ ID NO: 17471 - DNA, 389 bp, Glycine max
cccacgcgtgcggttctactaggattcccaaggttcaacagttgttgcacgacttgttcaacggaaaggaactttgcaagagtattaacccagatgaagctgctgcttatggtgctgcaatgcacgctgcgattctcagtgacgagggtcatgagaaagtgcaggagcttctttcgttggatgttactgctctatacactggtttggagactgcaagaggagtcatgactgtgttgattcccagaaacacaaccattgccaccaagaaggagcacgtgttctgaacctactctgacaaccagaccggtgtgtagattcatgtctatgaaagtgaacgaacgaggactcgtgacaacaatttgcttggcaaattagagttatctggaatt

SEQ ID NO: 17472 - DNA, 445 bp, Glycine max
  modified_base (374)..(374): a, c, g, t, unknown, or other
  modified_base (391)..(391): a, c, g, t, unknown, or other
  modified_base (414)..(414): a, c, g, t, unknown, or other
tatttgctgatattcaaataaggagacagctaatttccagtgccaagttgttgatggagtggactcggggacaaaacattgtattttctagtgctgctcctacggtgaatgagcttagagggccctgtgatgttgcaaacttgttgtcattgtttgggctttccaaggagcgagctaatgcggctatttctaaaaactgtaggattcttttagctaattctttaaggaaaaagcgattttacaaagagacaataagagtagaagttttatcatcagatgcagcatctcattctaaggaagaccggtatcaagagttactaaagtgggaccctatctccagtggtgaaggtgatatcctgttggatgatatgcanaaatcttctctagtctnctgtaaagcatcaaaacctgcanaagccattgacttttgctccgtggtcaaaag

SEQ ID NO: 17473 - DNA, 442 bp, Glycine max
ccttgctcttagccctcctcctcttcgccgccgtggccaccgccgcgatggcggtggccgcgtccgacgccgacgacatcctgatccgtcaggtggtgccagatgttggcgaagccgaagaggaggacaacctgctgaacgccgagcaccacttcgcgagcttcaaggccaagttcgccaagacctacgccaccaaggaggagcacgatcatcgcttcggcgtcttcaagtccaacctccgcagagccaggctgcacgccaagctcgacccctccgccgtccacggcgtcaccaaattctccgatctaactccggccgagttccgccgccagttcctcggcctcaagccgctccgcttcccggcgcacgcccagaaggcgcccatcctccccaccaaggatctccccaaggatttcgattggcgagacaaaggagccgtcac

SEQ ID NO: 17474 - DNA, 452 bp, Glycine max
  modified_base (396)..(396): a, c, g, t, unknown, or other
ggaaaactttggacaaaaaatggagtgctacacaaggccaaacaggagtgacatccacctgggagcagaggaagaagccaccatagaagcaaagaccagagagtactttgatggagtcgcaccacaacgccacacaaagcctcaacgaagtgactattcagctcaatatgtcgatgctttctccaatgcccatcactcttctttaactataccagaattaacacaattccaactcctccagaatgatccccaagagaagaaattggtgtacaatggaagtcaagtaccggaagaatttgtggaaacagagtattaccaagatctcaacagcgtggacaaacaccaccatacgactggaacaggatttatcaaagtagagaaaaatggaaatgactntcacatagaaccagataatgacactggttgccatcactcttgcaagggcaatccag

SEQ ID NO: 17475 - DNA, 344 bp, Glycine max
  modified_base (10)..(10): a, c, g, t, unknown, or other
  modified_base (88)..(88): a, c, g, t, unknown, or other
agcgagcagnccactaccgaactcatcacgagcgcgaacctgggggcggaggcggcgcagggggctctgaaaagcgacagcgacaaancggacaaggccaaagtggctgacgctgccggcgatcttctcgacgcggcggggaagtatggaaaacttgatgacaaacaaggcatagggcaatatgttgacaaggctgctgattatctgcataattaccagggtgataataccactgctccttcacagcctgcagagtctaaaggtgaagacagtggaggtgggttaggtggtcttgcaaacttggctggaggctacttcaaaaagtagttacaaagcaactaaat

SEQ ID NO: 17476 - DNA, 421 bp, Glycine max
cggacgcgtgggttcccacatttctctattttctagtatttggcacatagtgcattgtttgggccattattaatcaaccaaggaaaaacaccaccttttggcttcttctgctgttccaactgtgcattttgtgtgctgtttctttcacaaacaagcagcaacagcagccagaatgagaatggggaacctcttctggcttggcattgttgcagcacttgttttcagcttctgggttgattccttttctgcctatgaatatcaccacttcaatgaaaccgagttctctttgttggagtctcaagaacaggtacattcatccctccttgggagaacttctctcatggttggactcacagttattcaaagtgctgctggcaaaggagcagtttgcttggatggaacattgcctgcttatcatttg

SEQ ID NO: 17477 - DNA, 388 bp, Glycine max
cggcgtagacccacgcaatcgccaactactccgaagccgctcacgttatccacacaacaacactccttaaaccctaaccaaccatggcttcttccaccttgaccgcaatgtccgcttgcaagctttcctcctccgccgccatctcctccttccccacccaccgccgcaccaacgccgtccttctgtccagacgcagccgcgccgccagggtctccgccatggccaaggagttgcacttcaacaaagacggcaccgcaattaggaagctccagagcggtgtgaacaagctcgcggatctggttggggtcacgcttggtcccaagggaaggaatgttgttctcgaaagcaagtacggctcgcccaaaatcgttaacgacggtgtcaccgt

SEQ ID NO: 17478 - DNA, 332 bp, Glycine max
aagaattttgtcaatcttattggatactgtgaagaagaggatcctttcaccagagtgttgggtgttgaatatgccccaaacggaacactatttgagcatttacacataaaagaggctgagcacttggattggggaacaagacttagagttgcaacgggtatggcttattgcctgcaacatatgcaccagttggaccctcctatgacccttatcaagctgaattcttcagccgtttacctcaccaatgactacgctgccaagctttcagatttaagtttctccaatgacataacctcagctgaggcaagagccattgacatgccaatagcaac

SEQ ID NO: 17479 - DNA, 408 bp, Glycine max
atttcatcaaatttgatgcggggaatgctgctatggccactggtttaaggaacagaggccgtgtcggtgtcatcaagaacagagagaaacacaagggaagtcttgagaccatacatgtccaggatgcaactggtcacgaatttgcaactcgtatgggtaatgtcttcatcattggcacagggacaaaaccttgggcgtctcttgccaaaagcaagggtatcaagttgtctatcattgaagaggctagacagaggcttgctgcacaaaatgaaacagttgcctaaatgattatgctggtaaaatctagctactgtatctcttcggctgtctgagcataggatgatcggtgaaatgactgagcataggtttgtatcaaactttatagtacaattttgagctgctgatttc

SEQ ID NO: 17480 - DNA, 402 bp, Glycine max
  modified_base (340)..(340): a, c, g, t, unknown, or other
gtgaatccctttcccatatagaccccttcattctccccaagaggcgactgtcatgacatctcggccacttattcaacctgaaagtatggaggcagaaccatcgattccctcagattcactccgggcccagatttccaaattttctaccatgctcactgaagcacacaaaagaaagccaatccattattggattcttcttgttctcagcatcttggcaatgcttgtggcatttcctgcttccagcattctgtctcgtgtttattatgataacggtggccagagtaagtggatcatatcttgggtagcagttgctggatggcccctaactgccttaatactngttcctgtatactttatcaagtaaaccctttctacttctttgaacttaaaaactgagtctgg

SEQ ID NO: 17481 - DNA, 346 bp, Glycine max
ctttttctcaaccaaaaggggttcaattctagctagttctattacatcgtccgcgaccatgaacatggcgatcgtgcttctgtgcatggttttcgcagtttcatcagctttagacatgtcaataatatcacatgacaacgctcatgcggatagggccacgaggcgcaccgacgacgaggtgatgtcaatgttcgaggagtggctggtgaaaccacgacaggtgtacaacgcgctcggtgagaaagagaagaggtttcaaattcttcaagaacaatttgcgcttgatcaatgaacgaaactctctgaaccgaaccctacaagttgggactcaacgtgttcgctgatc

SEQ ID NO: 17482 - DNA, 372 bp, Glycine max
ggccaatgttaaagctgctgatgctaaacataacttggcggctaggatgaacaatggtaaaagagttccagctgcaaaagtgaatagtgctggctgtgtggatgatcttgaatcctttttcagcatgggctctcgatcaagcagtgtgccaaagtcaaggactccaactatggatcgtatgtatgataaccaaatgaagaacaaagggaaacctgaggtgtcaccaagagtgccatctagatcctcaacaaatgtgaataaatctccaaggaagatgtatattgatgacctgtctctgatgtttgggggttccccgtcatctgaatttcaggaggttgaaggggaaactgaataaagacgaaaagcaagatt

SEQ ID NO: 17483 - DNA, 307 bp, Glycine max
aagaacggtcgttagtctatgttcttcatgtttggcttctttgttcaggctattgtcactggcaagggtcctattcagaatgtttatgatcacgttgctgatcctgttgccaacaatgcttgggcttatgccactaactttgtccctggacaatgaggatgcctacatgcaatgcaatcttctgctcccttttgcagttcccttgtgtttaactccattttcactaatgtaactacacctgtgtatcagaaaaatctgtattagagctgttaatttgttatatattagaaatttgggttcccagaaa

SEQ ID NO: 17484 - DNA, 406 bp, Glycine max
cccacgcgtccgggagtttaggaagtgtttggttacttctgagattctgctgttccttagagagcgagcgatgacggtagcagcatgaatgggttacgctctgctagcgttaggaccctctctctccatcttcgtttctgtcatttccaaaaaacccttcctcattctcaccgttctctccagcacactgctgtggcttataagtttgattgtgctgtctggaatatggaggggggttttgcctctcaacacaacagcttggtggccttttggaatactcattttgttatctgttgcttttcaagaagccctcaggcttttctcctggaaaatatataagaggttacaagatatgttagatgcctttgctgatagaatatcaaaaccacatctgtacctgacagat

SEQ ID NO: 17485 - DNA, 394 bp, Glycine max
cgccgggatgtcgccggtgcccggagcacacgcccctatactgccgggatccaagtccaaggatgttccgccggccaccgtgttcggcgccgtgttgaatgtctgcaccagcataatcggcgccggaataatgtctcttccggcgactctcaaggtcctcggagtgattccggcgttggttctgattctcgtgattgcttttcttgcagagctatccgtggagttcctcatgaggttcacacgtgccggcgaaacgacgacgtatgccggcgtcattagagaagactttggacccttgggagcagtggcagctcaagtcgcttgttgaatcaccaatctcgggtgtttaattatgtacctaattattattgcggatgtgttttctgggaatcaa

SEQ ID NO: 17486 - DNA, 368 bp, Glycine max
gcagcatgcgcccaccgggtatactcaaacctaccacctgtctttcggattcttcttctccgtcacgaccccatgaccgcaggctcaacactctcgctagacactcccttccgcaaatggctactcacgacagcatctccacttctccaacctccgcttctgattccgtcttcaatcacctcgatcgtgctcccgaagatcctatcctcgacgtaactgtcgcttataacatagatccaagtccagttaagctcaacttgtgagtcggtgcttaccgaactgatgaaggaaaacctactgttttgaatgtaatgaggccagttgaacagcaactcataaatgacgtgacacgcatcaaggaatatatt

SEQ ID NO: 17487 - DNA, 401 bp, Glycine max
gtttttcttttctctccgtcttccgaagcttcgacaatcatagatactgctgagatgtctggggaagtttttgatggacaagatgcaggctatgtgcctgagaaccctgagtttccgcaaaaccattctgacgaatacgatggaggaaatgtgattgatgactcagggtttccgcaactgcagcctgatgaacacgataatggagggtttccgcagctgcagcctgatgaatatgatgccggagggtttccgcagctgcagcctgatgaacacgatgctggagggtttctgcagctgcagcctgatgaacacaatgcccgcaaattagcttaaggatgcaatattcctgaacataattttgacgggaatgatgttaaagggtgcctgggaacccctgattt

SEQ ID NO: 17488 - DNA, 409 bp, Glycine max
aattaccagagatttaggaaaaatctcaatatcttactagttgaagctcgtggatttctgggaaccatgtgatcaactgtgtatggcttgtatttgtataaggcttgaaaagaagagttgagaattaagactactaattaaaccagcagctggagacaaaaatagagagctgatcttttgccaggcgaagtatttggggctacagaaaaccgagtcctatcttcactgggcatttgtaagtcatatatatcacttggggttgtttgcataaataaaagctttttggtttgtcagatgctattgcaaaagcagaaaagctgtctgaagatcttaatagcaatttagtgacaaaatggttgttgaggcacattcttttctgtcaagttgcatcgatgtgtatatatacatt

SEQ ID NO: 17489 - DNA, 453 bp, Glycine max
cccacgcgtccgcatgaaagaaagaaagaaaaagctttgcagagatgtcaggtggtggatgcagcagcatagtgtggttcagaagagatctgaggatagaagacaatccagcactgacagcaggagtgagagctggtgctgttgttgcagttttcatatgggcacctgaagaagaaggacaatactaccctggcagggtctctagatggtggctcaagaacagtttggctcaccttgattcctctctcaggaatcttggcactcctctcatcactaagcgatccactgatactctttcttctctatttgaggttgttaagtccactggagccactcaactcttttttaatcatttatatgatcctctgtcacttgtcagggatcaccgagcaaaggaggttctgactgcttagggcataacagtacgttccttcaacgcggacttattatatt

SEQ ID NO: 17490 - DNA, 211 bp, Glycine max
  modified_base (26)..(26): a, c, g, t, unknown, or other
gtcacgcgatctgttgagtagacagngggctgtgaaaagatcgactgcacattgaaagtaggggagcttgaaaaggaagaggggagagagagtaggctgatagcaatcgagagctataggaattgaggaagctccagaactgcctaccccgcgtgcagccgtacaccatggtgaatgtgacgatagtgcccaggcatcacgccataataat

SEQ ID NO: 17491 - DNA, 380 bp, Glycine max
cccacgcgtccgatttttccgcccaaaacaaatgctgccttcaggctcgtcaaggggagaaagagaaaagacaaagggagcagagaaaaggacggaaagtgatgtgaaggtgtaagaaaatgggcaaagagaagagaggtagaagcttcatcgccttcaccggagctgcggcggtgcttggaattgcggcgaacctagctatcaccgcaatcaagtaccagaaggcaaaaaatgctaagaagaaagatcttgcaggttccaaggtgcgcgttgatctctttgcatcggagaatattaagtgggctgagcaaatcattgctaactcaaacaaggcccataaatctgttgcgtcggtgcctctcgacaagggtacatatgca

SEQ ID NO: 17492 - DNA, 356 bp, Glycine max
gcagcatgcgcccaccggttattctcaaaactaccacctctctattggattcttcttcttctgcaccaccctgcgatcgcagactcaacactctcgctagacacttccttccgcaaatggcttctcacgacagcatctacgcttctgcaacctccgcttctgattccgtctttaatcacctcgttcgtgctcccgaagatcctatcctcggcgtaactgtcgctcataacaaagatccaagtccagataagctcaacttgggacgtggtgcttaccgaactgatgaaggaaaacctgttgatatgaatgtagtgaggctagttgaacagcacctcataaatgacgtggtacgcaac

SEQ ID NO: 17493 - DNA, 372 bp, Glycine max
tgtttctcggcaggggatgagccaatacaaaaatgcaataccatcaccaattaatcatcctggaattagccagaaaaatgggatggtaatatttttcgaaactaattttgtggagatctgtcggagaagaaagcaaataattatcctctttccattcattcgctgttcacttggttctggtgagcgcagcagaggggaagaaagaagctgatgagaggagctcgttggatgaatatataatataaattggtttgtttgatgggcaacacttgacgaggatctttgaaaggtaaatattctcaaggcttgagccagcccgaaaaccatttaaaggccaccacccaccattctgatcccttcttcgaccaaccc

SEQ ID NO: 17494 - DNA, 467 bp, Glycine max
  modified_base (373)..(373): a, c, g, t, unknown, or other
cttgagccagtgctagatcagaacttgtacaacatggggatgaagatgacctcaacaacgtttgcatctgccactgttaatgtcctcccggccattacttttgtaatggcactcattttcaggctagagaaggtgaacttgagaaaatttcacagtgtagccaaagtcattggaacccttataacagtttcaggagctatggttatgactctgtacaaaggccctgccttccaaatcataaagggtggaggagccatcagcaaccatagcaactctagcagtactagtaccaccgaaccctctgaccagcactggatagttggaactgtttatctcatatcaagttgtgctagttgggctggcttcttcattntgcaatcattcactttgaagaagtacccggcagagctctcactgacaagcttgggatttgtgtgatgggtattattgaggggtcaatcgcattc

SEQ ID NO: 17495 - DNA, 434 bp, Glycine max
cttgagccagtgctagatcagaacttgtacaacatggggatgaagatgacctcaacaacgggggcatctgccactgttaatgtcctcccggccattacttttgtaatggcactcattttcaggctagagaaggtgaacttgagaaaatttcacagtgtagccaaagtcattggaacccttataacagtttcaggagctatggttatgactctgtacaaaggccctgccttccaaatcataaagggtggaggagccatcagcaaccatagcaactctagcagtactagtaccaccgaaccctctgaccagcactggatagttggaactgcttatctcatatcaagttgtgctagttgggctggcttcttcattttgcaatcattcacttttgaagaaataacccggcaggagctcttactgaccagctttggatt

SEQ ID NO: 17496 - DNA, 233 bp, Glycine max
tactgctagattcatcaactcggatttagttttacgcacacgacctcaacaacgtgtagcggttccactggtaatgggctcccagccattactttatgcaatggcactcattttcaggctagataatgacaactttaacaatagtcacactatagccgaagatttaggaacccttataacaatttcatgagcaaaggttcatactcattactcaggctaaacttttcatctca

SEQ ID NO: 17497 - DNA, 392 bp, Glycine max
agaaaactagacctggtgctgcccaggaagctgttaaagctagagccatgagagttcttaggcaaaaacgaatgtgatgaaggccagcagtacatgcgtgtacaatcagacgttcaatctcgatcaagttcaatttgctgctgagggcattaaagatgctcaacaaactatgacagctttgaagtctgccaacaaggagttgaagggaatgatgaaaactgtgaagatccaagacattgataacttgcaagatgagatgatggacctcatggatgtaagtaatgaaatccgagagactttgggtagaagctataatgtgcctgatgacattgatgaggatgaccttatgggtgaacttgatgcattggaattagacatgggaaatgagactg

SEQ ID NO: 17498 - DNA, 68 bp, Glycine max
ggacccctggatatgccggtggacagcgtgatgagatcgcgcgcgacatgctaacatcatatgaggcc

SEQ ID NO: 17499 - DNA, 366 bp, Glycine max
gctaaatccctagtaagccgtcatggtgaagtactcaagggagcctgacactccaaccaaggcttgcatggctagaggcgccgaccttacggttcattttaagaacactatggaaactggctttgcaatcatgaagttgcccttggataaagctaaaacgtacttggatgatattcttgcgcacaagccagccattcatttcagacgtttctgtcatggtgttggaaggacagactaaagcaaagaatatacactctaatggccaaggaaggtgtcctgataagtcagcaaaattcatacttgatttgctcagaaatgctgatagcaatgctgaagtgaaatgttcgaatgttgattctctttaca

SEQ ID NO: 17500 - DNA, 437 bp, Glycine max
gggtgaggtagaaccctgccacggtggtgactgcgcgatgggtgcctacaagtatgtttcagagctatggctcaggaagcagtcgtatggcatgcgcttcttgcagcgggtgaggtgctgggagtataggcagcaaccttccattgttcgcttgacaaggtcgacccgccctgacaaggctcgtcgcttgggcttcaaggctaagcagggctatgtgatataccgtgttcgtgttaggaggggtggccgaaagaggccagttcccaaaggtaatggttatgggaagcccacaaaccagggtgttacccaactgaaatttcagcgtaacaagaagtcagttgctgaggagcgagctggacggaagctgggtggacttagggtcctcaattcttactgggtgaatgaggactctacttataaatactttgaggtgattc

SEQ ID NO: 17501 - DNA, 111 bp, Glycine max
tctctagtgctctgcgcccattccttccattccattgtggacgcatcttaaattcacgttcacattcgctcctctgcatttgcttcatccactctactctgctctgctcta

SEQ ID NO: 17502 - DNA, 397 bp, Glycine max
cggacgcgtgggggttgttatgcgccgtaagtaatttgtttgttggattggaattgagaaggcagcaacgtggtgaaatgggtgatagataagaacaaggcgagggtgctggctcctccttggaattggaagctcctattccagagacccaaaaagaaatcccaatttcagatggcatcgcattcaacaatcagagcgcgattttccaagccatcgaggttgtggaacgagactcgttggccatcgctcagagtttcacttctctcttagatttctctagattggccctcttcgaatccacatccacctctctccatcacatgcagtgcttcaccgatgccaccggtcgccttcaggaatctgtgcttgatgcagctaccaatgggaatcgctatat

SEQ ID NO: 17503 - DNA, 224 bp, Glycine max
gtcatggtggctctcaggttgcaaactatatgtcgagaacatacccattgggccttggctgaggaaatagaatttgtgacggaagttcgaatcagcgtgagaatgaaagatggttgtcaaaagcagtacaaaaaggttagcaccaatcgtttcttaaaggtcgatcctcacgttggtggcaaagttaataactaacctcttgccccagaaactggtggctccac

SEQ ID NO: 17504 - DNA, 298 bp, Glycine max
gtggcaacaacgtacctgctgcaaagatagaaagtgatcctgaggtggaagcaaccatgtgagacgcattcagtttgatactgtggtcgatgatgttttaaattggtggaaatataatgaattgaaaatgaaatctcttcttttttttgacggtttgaaggataaaatcttgctgggactaatgtagttattctaaagactggactaaatagttaaagctgtcaaatatcattctgggtgtgttcttactgacaccaggggtccgatgacccatgtgtactgatgaaaaaagggcggc

SEQ ID NO: 17505 - DNA, 451 bp, Glycine max
atgatcgtgatgttactgtgctgaatgattttaagtatagaagcattgatggtgaccttgttggtgttgttggagattcatgggtgttggaaaccaatcctattcctgtgacatggaattctaacaaaggtgtggagaaagagtcttatggcgagattgtcacggcgcttgttaaggatgttcaagcgctgaattcttcagcaataggaacaaattcatcttatttctatgggaagcaggttggaagggctgcgaggttggcgttgatagcggaagaagtgtcttaccctaaagtgattccaaaggttaagaaatttctgaaggagactattgagccctggttggatggaactttcatagggaatgcttttctctatgaaagaaaatggcgtggacttgtttctaaacatgggtgtcagattcaactgctgattttgggtttgggatttac

SEQ ID NO: 17506 - DNA, 426 bp, Glycine max
gagaaagagaaccgtttgagaattttagagacgttaacggacttctaatccacaattcgccggaatttgggaaccggggtcgcgtccggagcctctcggcttagttagttagggtttctttttctctttcttctcttccattcggtttcgaattctcgcgattcgcgatgggggaacgacgctgaggttgaatttcaaggttctggtttttcgtcgtcgctgtggagtgaagaattctgtgttgctggtgatgtttacgccgccgagggtttggtcgggttggtccctgactccgaacaagagcggcgttcggagaggaaccgggtcgggttcggaattgggtccgaattcgggagatggagcgagcgctaaaggaaaaggtgtcgtggttgttgagaatggtgggaacttggatcgcgagggttt

SEQ ID NO: 17507 - DNA, 313 bp, Glycine max
actctcgtataaccgcttgataatcgcatagatgtcttcttacttcgaatccacaatacggcggattgatgaaaccatcgtggggttctgtgcatacacagtaacctagataggaactcttcgtatagtatcagtatatcattggatgtgctaattgctcttgcctattattctataaccacgctgctgatgaattttaagcatatggctgctcgctttccatatagatggatgcttattcagtttgttgctatgattgctctgtctagagcaactcatttcataaacctgagtacattctagatacactcta

SEQ ID NO: 17508 - DNA, 345 bp, Glycine max
cccacgcgtccgcccacgcgtccgcccacgcgtccgggcggtgatgcatgagatgataaggaaggaggtgaggagttacatggaatggaatgatggaaagtgatatttcattcaattttttaaatcctaccctttcctttttctccatctaacccctcatttttatgtcttttccaaactaaatagaccctgaagcacaggataatccaaagaggttcagaacacaagccaaagaaatttcaaatttgccatgaaatttcactttccatcattccattccatgctactactcttgtcttctctcgtctcgttcccactgtacactatccaatattattattacct

SEQ ID NO: 17509 - DNA, 402 bp, Glycine max
ctcttattaatttgtcatctttcagcagatctccctagtttttcttccaacatgagtttcaaatctcccctgcatttgctcatagtcattcttctagttttttcatttgatgtctcttctgctgctctccaaacaacatgaaggcttttgccatacaaagaaaaaactctcaacccagattacatctgataagggtgttgaggaattgagaaatggagaagaaatgttaaatatggcataaaagttcatgggagagggaaggattgatatgattagttttgattatccagggacaggaccaaacaaccggcatgatccaaagacaccagaaggaccttgagaaattaatgcttaaattttgtccagattatgagagctatgagatttatcaatggtcctaaa

SEQ ID NO: 17510 - DNA, 448 bp, Glycine max
cccacgcgtccgacttggcataccatcttacttttactttgttttcacaacatagccatgggcatctccagcaacgcttgtccttgtgattccatcatcttcgatttggacgacaccttgtacccgtcaagcaccggtattgacaagtgcgtcaagaaaaacatccaactctttctcatccagaaatgcggattctcagaatccgaagccttcaccctccgagttgatctcttcaaaacctacggaagcacccttgccggtttaagagcactatgccatgatatcaccgcagaggagtaccatggtttcgtgcacggaaggctaccttacgactccatcaaccctgatcatcacttacggaaccttctctgcaccatcaaacagagaaaaattgtttatactaattcgtgcaggattcacgcgatgaggtcgttggatagacttggga

SEQ ID NO: 17511 - DNA, 396 bp, Glycine max
ccggtcggcccacgcgtccgcccacgcgtacgacgagcgcagtaagtacgtcatctgtggaattccagggcactgtttggtaggtgaaaaaagtagacatgaacgtgatcgagatcagcaccgccgccccaccttccgccgcggccccccccaccactccttctagcccttctccagccggtgctgtcactcctcccccacagaactctggtgctgcatctcttggagttgttggagtatttgccaccctgctttcagttgccgccacttttatctattagatactccacgagagtagactagacaggagcttgcgagtcatcatcatcgctctttgattgtgtttcatgaattcaggttttctcttatgtttttgaggatgacactaaagttagc

SEQ ID NO: 17512 - DNA, 387 bp, Glycine max
acgcccaattgaaattcttccaattccaccttttttttattcaataaatcaacacccaattttcggaattctctacttgtaaatgggaatcatttttctttccatttgtcaaaccataccaatcaaccaacctcgttgcttcttgtgatcactctttgaaccaccctcatggatattgatgagtgggagtttctctctgatgatggctaccttgatttcaatgaagagggtgggaagcaaaagcaaaagcaaagttcctttggaaaattatacttaaagggtgtctttgacatggactacttttgctcatcaccaccaccaagggtgagaactcaactagtccctttgccaattcaattggaaccaagaattgtgaaagccccataa

SEQ ID NO: 17513 - DNA, 368 bp, Glycine max
cctagttcaagggtgccggtgccaacatcctgcgtgccgatgccggcgctggtgtgcttgcgggttgtgacacgttgcaggttcttgtgttcggcatgaagtacggctctggtggggcttaagttctaatgctgagtcagtactattatttgtttttagatggcgatgaaaaacaccattgagttccaagagtcttagactaattgctgccgcaaattttgttcaataaatttactagatgggatattgtcccaaaaaccgtttttaaatttcatcatgatggaaattttacatttgagaatatgatttatttgagtggcaccggaaagctttcacttggaatttccaatttatgaattcaaaattta

SEQ ID NO: 17514 - DNA, 377 bp, Glycine max
gcaaacactctgttccttccttctctcgttcgttcatggaacttcagaggcgccaagatcagagcctctcccagcggaagggccagaaacggaagctcgacgaggagcagcaccacgaggaccgccagatcttgccggcgccgcccaccgccgacgagcgcgccgcactcctatccgacgtcgccgaacaggtgagcatcctcgagtcgactttcacgtggaacgaagcggacagatccgcggccaagcgcgccactcacgcgctcgccgatctcgcgaagaatgaggatgtggtgaacgtgattgttgaaggaggcgcgattccggcgttggtgaagcatcttcaagcgccgcctctcagtgaccttggccagcat

SEQ ID NO: 17515 - DNA, 332 bp, Glycine max
agcatcactacggacgttgattatatcacatgttcctgaaactcaagcggcgccaagatcggaccctttcaaagtctgaggctcattatacttatcacgacacttaatatctctacaaggactacctgatctcgtcgtcttaatccacagttgacgaacgcacatggctaatattccacatgagcttacagagcagcatacggtcaattacaacgacgaccatcacattcaccacattcgcaaccgattgcaccacttacaagctagacgatctgtcgattattgatactctcttaaccattacatggctcggactctccattaacgccctt

SEQ ID NO: 17516 - DNA, 446 bp, Glycine max
ctgaacgcggttccgtgttcggttagtgcggcggcgcacgagcactcgagttcgacgacgtggtgttcggggaagaagaagaggaagctgacgcagtttctggaggggttgatgagggaagtgatagagaagcaagagacgctgcataggaagttcgtggaagtgttggacaagtgtgaaaaagatcgaatggcgagggaggaagcgtggaagaaggaggaactcgaaaggatcaagaaagaacgcgagcttctggctcaggaaagatcaaatgctgctgccaaagacgaagctgttcttgcttttcttagaaagtttgcagaagcagaagacacggtgcagttactcgagaaaattcaggttcaaaacgacaaacagaaaaacatgaaacaaaatggcggttattgtaatgctaatggaggtggtggtgtcgcagttgtcactga

SEQ ID NO: 17517 - DNA, 362 bp, Glycine max
cccacgcgtccggccaatccgggtaagtcccatgggtcgtatttgtagagagaaagagtggtacttcttttcaccacgggaccggtaatacccaaacggttcgaggccgaaccgggcggctggcaccggttactggaaggcaaccggggcggataagcccattggtcagcccaaaccggttgggattaaaaagctttggtgttttacgcagggaaagctcctaaaggggacaaaagcaattggatcatgcacgagtatcgtctcgcagacgtagatcggtccgttcgctaaaagaacaccctaagggtggatgattgggtgctttgccgtatttacaacaagaaaggcacgatcgagaaact

SEQ ID NO: 17518 - DNA, 412 bp, Glycine max
ggacaatgctgctgtgccgggtctagaacatttgtacacgaacgtgtgtacgatgaatttattgagaaagcaaaggcacgcgctttgaagcgtgctgttggtgatccattcaaggggggaatagagcaaggtcctcagattgattcagaacaatttcagaaaatactgaagtatattagatccggtgttgaaagtggagctactcttgaaaccggaggagatagatttggcaactcgggcttctatattcagcctactgtcttctcaaatgttaaggatgacatgctgattgcgaaggaagagatctttggcccaatgcaaagcatattaaaattcacggaccttgatgatgtgattcaaagagcacattacacacactatggccttgcagcatgggtgatcacaaaaaaca

SEQ ID NO: 17519 - DNA, 374 bp, Glycine max
cccacgcgtccgctctcacctcgttcttccaacccctctagatttgaatcaccaaacttccgggttccttctctctctctctctctctctctcttatatttgtactgtacccaaaaaagcacttcacaaagttgaaagctgaaacctcttcttcaatctacttcacgatggcggagaagcacttgcgggagctccttaaagaggatcaagaacccttccttcttaaacactacatttgggagcgtcgcatgcagctcaaaagaccttccccaaacagccctttacaacaacaactgaaaaagaaaaactcaaacttcccacttaacaaatgcttcctcacttccctacaaaacgccacaaaaatcccactctta

SEQ ID NO: 17520 - DNA, 318 bp, Glycine max
cccacgcgtccggttgatttcatttgctcttattaaactcaccaccaccaccaccaccaccgcgctctcttccattttcccgcagaacaaacacattcacatacttttccctcactttctcggcggccaaacgccataaaaatggcgtcgaaggtggcgctgatggcgctgatctacgtcgcgctcctgttctctccgacgcaatccgcggtcttcagcgtagatctacgctccgaatcgatgaaagttgcagtgctgaacctcaagccctgccaatccccgatctccgacgcgatcaacgagatgtccaaacgcaaa

SEQ ID NO: 17521 - DNA, 440 bp, Glycine max
cccacgcgtccgcccacgcgtccgggaccaaacagcatccgcggcagcgacggtaaccctgcaacaacaacacttccgctgcgaaaaatgtctctggtggcgaacgaggatttccagcacattctgcgtgtgctgaacaccaacgtggatgggaagcagaagataatgttcgcaatgacctccatcaagggtattggaaggagattcgccaacatcgcttgcaagaaggctgatgttgacatgaacaaaagggctggtgagttgactgctgctgagttggatagtgtgatgactgtggtggcgaaccctaggcagttcaagatcccagactggtttttgaacagaaagaaagattacaaggatggcaaatactctcaagttgtgtctaatgctcttgatatgaagctcaaggatgatcttgagagactcaagaaaatcag

SEQ ID NO: 17522 - DNA, 257 bp, Glycine max
cccacgcgtccgggcactccgttttagatcaagagagcaatacgatttcagcgcaacaaatgggcaaatacccacgagaggatcaaaagcacccaaaagatgaaaacaagatcaaagccacacacaccttgaactagcaagcagccgaaaccgatatccccgttttgcctgccgaacccgacgaaaaatacgagcccgcgtatcaaacacaagacaacccactacatgagacaaacgcaaaagaatcctacaccaac

SEQ ID NO: 17523 - DNA, 394 bp, Glycine max
cgcattcgtaggataaccgttgcacggtggctactgttctgctggtggctacacgcatgatgcatagccatgacgcatgatgccatcctgagtattgcactcttagggataggagatgcgctttgtgcataggcagtacactgtcatagcacccttggcaaggactagcctatctgacatggcttgtgcttgctacttagggcttatcgtgcatatgataaataccgtttgagaatgaggatatgttgccataagaatacaggtgagcaagggttagagtgatcgatgaccacacacctgagcgatgccgaactgagatctctgctgagcgtgagggcagtacctcaggatcgagctggacagtttctgggtggacaaagggtcctaaagcttt

SEQ ID NO: 17524 - DNA, 414 bp, Glycine max
gtcagaatctgagttctttgaactcaaaccctaaaaaaaacgatgtatcgttttttgtcttccattcgccatggctgtggatctgccctcacatcacttctcgcgccgaaacccacccttccattcgacgccgccctacaatctcgccgtttacctcaaaacgacggacatgttagaggattttcaagctcgaattttgattggaggaatcttattgtgaacgagaatgtgaatgcagatgattctatgcaggatgcagagaacagaaactccgaaaagtggaataatatgaggctgaatatgaatgcagatgcaaaagctcctccaaattttgtgcagaatagagggaccataaactccagaagctggaacaatatgcgacagaatttgaatgctcctccaaattttatgggg

SEQ ID NO: 17525 - DNA, 410 bp, Glycine max
agctttggctacagccctcgcaaatgctccatcataacagcagaggactatgctcggtgaagctttatacccacttgtggatcatctggaacatgatactgctgcaaaggttacaggcatgcttctggagatggaccagcctgaagttttacatctgattgagtcaccagatgctctgaaggcaaaagttgctgaagccatggatgtgttgagaaatgttgctcaacagcaaaccaacccagctgatcaactagcctcactctctctcaatgacaatcttgtgtcttagattccgttagtcatttgacaagaatctgtacaccagttatttctatcccgtacgctacccaccagtttatttgcaggtgtcttagatgttttgttttagtcagagtactaaaggagtttat

SEQ ID NO: 17526 - DNA, 446 bp, Glycine max
cccacgcgttcgtgagcatacatattccttggaagagcttaaggtgattactgaggaagcgggtgaagttagatgatcagcgtagctatgatagggttacatttactccaacagtggaacattgcagtatggcaacggttataggtctatgcttacgtgtcaagctcatgagaagcttgccttcacgatacaaggtggatatcagagtggcacctggatctcatgcaactgaagctgcagttaacaaacaattaaatgataaagagcggatagagcagctgcactggaaaacccaaaccttctgaatatggttgatgattgccttgcttcatcttatgattgaaggaacttttttcctcctccaattctccaaatgcaatgaactctgtaggtgcttttatgcctttaataaaagttggtcaactttatctgtgtttatgatattt

SEQ ID NO: 17527 - DNA, 222 bp, Glycine max
gacgaacagaccagaactgttgtcagtgggtttgtgaaatttataccactcgatgaaatgcggaaccgaaaggtcggtgttctttatatcctaaagtcagttttgatgatgggcattaaatctcaagcaatggttcttgctgcttccgatggtgatcacaccaaggctgagttggctgagcctcccagttctgctcatccatggtaatggattacattccct

SEQ ID NO: 17528 - DNA, 380 bp, Glycine max
  modified_base (359)..(359): a, c, g, t, unknown, or other
  modified_base (376)..(376): a, c, g, t, unknown, or other
cttctacattttcagcttcctcaagggcatttcgctcttcactctaattgtcttgattggcactggctggtccttcctcaaacccttccttcaggataaggaaaagaaggttctcatcattgtcatcccccttcaagtcattgccaacattgctcaggtcgttattgacgagagtgggccctttggccatgactgggttacctggaagcagatcttcctccttgttgatgtcgtctgttgttgcgctgtgctcttccccattgtctggtccatcaagaacctccgtgaggccgctaggaccgacggcaaagctgctgttaatttgatgaagcttactctcttccggcactactatgtcngtcgtatctggtacatntact

SEQ ID NO: 17529 - DNA, 429 bp, Glycine max
attgtttgttgttgtaactcgttcttcttattttgaggttctgtgtttgtgtttgttttttggctcacctgaaaatgtcttgctgcggtggtaactggagttgcggaagctcctgcaagtgcggcaacggctgcggaggctgcaagatgtacccagacttgagctacactgagtcaaccaccaccgagaccttggtcatgggagtggcacctgttaaggctcaatttgagggtgctgaaatgggtgtgcccgctgagaacgatggctgcaaatgtggaccaaactggtactgcaacccctgcacttgcaagtgaggtgttgggagagcaagcttcaagcagagatagcccttaattaggaataatgataaactattaatgtgtagctaaaaacttatgtattatgtctgtgaagggattcgtgcactct

SEQ ID NO: 17530 - DNA, 427 bp, Glycine max
cccacgcgtccgaaggagatcaagaagaaaataccgacacagagatctagtcctagctagaggcaaacatgggcgatctcacgttcaagaacacatcgccatggcaaggaacttgcttcttgtgctttttgcagtagccaccctcctccatggctcagcagcccaaaccagacacatggtcggtgatgccacgggctggatcatccctgctggcggcgctgccacctacaccgcctgggcttccaacaaaaccttcaccgtaaacgacactctcgtgttcaacttcgccaccggccaacacaacgtggccaaggtaacgaaatcggctttcgacgcgtgcaacggcgggagcgccgttttcaccctgacctccggtccagcgaccgtgaccctgaacgaaacaagggagcaatactacattttgctc

SEQ ID NO: 17531 - DNA, 357 bp, Glycine max
  modified_base (298)..(298): a, c, g, t, unknown, or other
  modified_base (316)..(316): a, c, g, t, unknown, or other
ccagaaaccaacctcaacttctgaatccgattccaaggggagctctgatgccaaagagagccagagtagtgatgtgaaggacgaattatgaggagttaagtgatatatttttatttatagaaactatgattcagacagatgatgacatagtgactgaggtaaaaaataccaagttacttctcacccctggtcaataaaaaacaaacggggagtggggggagagagacaaatgcgaggcacacatgtattactattaacttcaatttgtacaacagtgggtaatttagaattttgattntgggttgagacttcacanaaaaaaataatatttaaattaaaaaaaaaaaaggcggcccg

SEQ ID NO: 17532 - DNA, 506 bp, Glycine max
  modified_base (3)..(4): a, c, g, t, unknown, or other
  modified_base (31)..(32): a, c, g, t, unknown, or other
  modified_base (70)..(70): a, c, g, t, unknown, or other
  modified_base (72)..(72): a, c, g, t, unknown, or other
  modified_base (93)..(94): a, c, g, t, unknown, or other
  modified_base (100)..(101): a, c, g, t, unknown, or other
  modified_base (112)..(112): a, c, g, t, unknown, or other
  modified_base (137)..(138): a, c, g, t, unknown, or other
  modified_base (149)..(151): a, c, g, t, unknown, or other
  modified_base (166)..(167): a, c, g, t, unknown, or other
  modified_base (175)..(175): a, c, g, t, unknown, or other
  modified_base (177)..(178): a, c, g, t, unknown, or other
  modified_base (189)..(190): a, c, g, t, unknown, or other
  modified_base (199)..(200): a, c, g, t, unknown, or other
  modified_base (207)..(208): a, c, g, t, unknown, or other
  modified_base (216)..(216): a, c, g, t, unknown, or other
  modified_base (231)..(233): a, c, g, t, unknown, or other
  modified_base (242)..(243): a, c, g, t, unknown, or other
  modified_base (252)..(253): a, c, g, t, unknown, or other
  modified_base (261)..(262): a, c, g, t, unknown, or other
  modified_base (306)..(306): a, c, g, t, unknown, or other
  modified_base (316)..(318): a, c, g, t, unknown, or other
  modified_base (336)..(336): a, c, g, t, unknown, or other
  modified_base (344)..(345): a, c, g, t, unknown, or other
  modified_base (357)..(358): a, c, g, t, unknown, or other
  modified_base (365)..(366): a, c, g, t, unknown, or other
  modified_base (373)..(374): a, c, g, t, unknown, or other
  modified_base (388)..(389): a, c, g, t, unknown, or other
  modified_base (422)..(423): a, c, g, t, unknown, or other
  modified_base (458)..(459): a, c, g, t, unknown, or other
cgnntccgcttggtttggttggttggttgtnntggaagcccataaactccttagccagccccggcgagantnatggcagaccgttgggaggtnntgatgnntggcggcgttngcggcgggcgggcgggcggcttgcnnagggcagcccnnnaagaagaagaaccgnnttcaagananngttcagctttnncaggggggnntggatcnntggacgcngcccttctggacatnnngtccactgnnacgaactcnngtgaaganntgttcagtggcttcgcgccacgcccagaagggttccccagagangggtctcacnnncagaaagggcccatggcnccttgatnntaaaaagcttcnncgcaaanngcgaaannagggaagccaccanngcaggtgagaaagccccagaaccccagttcgcnnacccatctttccgcaaccatgggattattggtgcnnctgagaaatgattggtaagcattttcattggggagtctaccaatggg

SEQ ID NO: 17533 - DNA, 404 bp, Glycine max
tctctctctctctctctctctgttgcaaaattcgttcccctatctttctgcgtttcgagttgttgctaaagagtgatggactcaccgcccagtaatcaccacgccgtcgacggagacgccaacgacctcgttagacccttttcccaccgcgacgacgacggcaaaccccaacccctcaccggcgacggcgccagtcccggaaagatattcatagggggtttagcgagagaaacgacgattgcgcaatttcatcaagcactttggtaaatacggtgagataacggattccggtatcatgaaggaccggaagaccgggcagcctcgcggtttcggcttcataacttacgccgatccctctgtggttgatacagtgattgaagacactcacattatcaatggcaagc

SEQ ID NO: 17534 - DNA, 263 bp, Glycine max
cacaaagtcacaatggacctcctatatctcttctgcaccggagccctgctcgcccgccgcccgtactggttcgaaggcggtataggccccatccaaccaaaaggccaaccccccaaccatcttttcggcgggttcattttcggccagaaaagtcaagaccacttccaacaagaccggtccttctttcggcgcccaaaagagatccagaccgccgacaaaattcccgactttttcgacaccttctacaaactagtcacagacat

SEQ ID NO: 17535 - DNA, 218 bp, Glycine max
gaaagacatcttttgatttgacctagatcgcgtcatggatcatattcagggaatgatggcttcaggatcagatgcttttttgatgattgattatcaaaactgctagagatacgagctcggcaatccaaacgctttataagaaaggtctgatactgggggaattgaaccggattaaaaggaagcctttaggattcgggctttttggaccatggttcccc

SEQ ID NO: 17536 - DNA, 237 bp, Glycine max
cttgcggctagggttatagcgcagcttcttatatgtttaaggaagatgggtaaggaaaaggttcacatcagtattgcggtcattaggacatgtcgaagatgggatatccactaccactggtcacctgatttacaagcttggaggcattggacaagcgtgtaattgaaaggtttgagaaggaacctgctcagatgaacaagaggcctttcaaggatgcctgggtcctgaacaaactta

SEQ ID NO: 17537 - DNA, 393 bp, Glycine max
cccacgcgtacgtccacgcgatcgtccacgcgtccgcaagtatgttggggagctatggcgcgggaagcagtctgatgttgtgagagtcttgcatcgggtgaggtgctgggagtaccgccagcaaccttctattgtccgtttgacaaggtctactcgcccagacaaggctcgccgcttgggtttcaaggctaagcagggttatgtgatttaccgtgttcgtgtacgaaggggtggccggaagagaccagttccaaaaggtatttgttatggtaatcccatgaaccaaagtgttactcaactgaaatttcagcgcaacaagaagtctgttgccgaagagccagctggaatgaagttgggtggccttaaggttctcaattcatactgggtgaatga

SEQ ID NO: 17538 - DNA, 439 bp, Glycine max
ccaaggccttggctgaagttctcaagtttcatgggaacataaaaacccttaagcttggttggtgccagataggagcaaaaggggcagagtgcattgcagatgctttaaaatacaataccaccatatcgattttggacttgcgagcaaacggtctaagagatgaagatgttattgttttatgaatcaactattgcagggtgcacagagcctggctcgcagcttgaaagtggttaatgaagctttaacctctctagatttaggatttaatgaaataagggatgatggagcttttgctattgctcaagcactcaagtctaatgatgatgtagctgtcacatcactaaacattgccagtaacttcctaacaaaatttgggcagggtgctttggctgatgcgagagaccatgttttggagatgaccgaaaaggaaatcaacatc

SEQ ID NO: 17539 - DNA, 315 bp, Glycine max
attttcttgaatgattatcactctccaagggtaattttttagagtagagacaagtcagtcttctatgttcggtggcaaagcttgtatgctttgtctctagaacattatggtttagttttgcgatccagcatttcgacacgatgataattgggagaaggggatatagtgatatcttgtataattagtgttttgaactgctacgagttcgtaaaatgtattgcccctttgatttctcactcatattaacttactacattaatttctccactaaagaaatgaaattagggatatagtggagctttagtttttgttttt

SEQ ID NO: 17540 - DNA, 406 bp, Glycine max
cccacgcgtccgtgaagattccgcaacagagagtagaaaagatggcgcggttgatcacagtggtgtggtgcgcggtggcggtgctactgtgcgccgcggcgggcgcgtcgtgggtggaggaggcggcgaacccgatacgaatggtggcgggggtggaggcggaagtggttcgggtgatagggcagtgccggcgcgcgctgaagtttgctaggttcatgagcaggttcgggaagagttaccgaagcgaggaagagatgatggagaggtacgagatattcttggaaaatctatggtgattcggtcccacaacaagaacccgttgccctacactctctctgttaatcattttgctgattggacttgggaggagttcaaaagacacagactaggctgctgccaaaattgg

SEQ ID NO: 17541 - DNA, 315 bp, Glycine max
gcacagcgtacgcctatgcgtctgaaacaaagtatgaacctttagtcgaaagagcacggatccgagtgaattagctatcatcacagatgctgccatgatctcagacttcatttcatacgtgtacagtcaacagagctcagctcgataccgctgacatagatatggacgaatttgtatagacatctggtctatgtaatcgatgatgtacgatgatttcgcatcaaggttcaccgtatatatacttgacaataatgtcttatatatgctagattatgtcgattacactgtacaggcatattataagatatatctcta

SEQ ID NO: 17542 - DNA, 380 bp, Glycine max
acgaacgtatctatatattcataattgcacgttctcttttgttgacttcagttcatataatattgcatttactcagattcaggcagactttcaaattcacattaccttcttctctgatactcttactatcaaagctgactgcataaagacctgatctactattgaaagatggcatctttgagcatgacccagatcagaactgagagatgttcatatgggtttgacttagatagtgctcgaaagcgcaatgcatcatgcactcagagttatacttaaagagtacgctatacagactcatgctacacaccctgatcttactgtcactgttaatgggttgcacatgcctaaccgattcgttattggttcatgcacaccatgta

SEQ ID NO: 17543 - DNA, 312 bp, Glycine max
atctatatcgtaactgtcacagatcctgacgagtgatgaaagcctcatctttactgtctcaatagatattgctatggcagatatcgctctgttataatggtggattgacattactatatgtcattctatacataatatagtgttatgaatcattagtattttctctagatatacttaacaatcctgttatatatatgctcctatatgataatttcactctacatccataccataagtgatttcaataaccaagtctttaagctttctacacaacattcatcatctattatgaaatcctgacacaatgtatac

SEQ ID NO: 17544 - DNA, 441 bp, Glycine max
ccaactccaagatataaataagggaaaggggggaattctaggaggaggaggtagaagtagacacagaagtggcagaaagcaaaaatgttctatggccatgatgtttgatctaatgactaccctggaatttccaccaagtaatgacctgcaactaaaaatttggggggggaaggactaaggaagagcatagtttatacaacggccattgtaacttcctgccataccatgcaaaatctatggtactggcaccttcaatctcttgttcccaatgttgcaattgtacaatcatgctagtgctttaaattgaaatcaattgaaaatccatttaagcctctttcatttatgcaaattgccacagttcaaaagtgcaatattaaccatttattgaagtaattaggcacagttcttaatgttaacttctatttgaaaggaatattcttt

SEQ ID NO: 17545 - DNA, 176 bp, Glycine max
ctcaatgcatcgatcactgaaagtcgcggtgatcggcgccggcgtctcgggcctcgccgccgcgcgcgaactccgcgacgagggctacaacgtcgtcgttttggaaaagtccaatcacgtgggcggcatgtgggcctacgacccaaaaacagattccgacccattggggctcgacc

SEQ ID NO: 17546 - DNA, 364 bp, Glycine max
aaaaaaaaaaatttttgtataaatttttatttttaaaaaataaaaaaagttaaaattattattggttaaatttttatttttttatgttttttatcttttctatttatagtatctaagtttatttccctttccttgcaattactaactttttttttagggtaacctaatttaatttcacttacttcccttttaaaacgttttgattgtcaataccttgccttacccaaattaaatccctttccatcactttttcttttgcttacctgtttttattttattttatgtccctttcctattttcctttccatacatttccctaatttgaatttttactggaccttccctttttccttaatttaaaccc

SEQ ID NO: 17547 - DNA, 445 bp, Glycine max
ggcttctgcagaagtagagttccgatgctttgttggtgggcttgcttgggccaccgaccacgatgctctcgagaaagccttctctcaatttggcgaaatcgtcgaatcgaaggtcatcaacgatcgtgaaactggaagatccagagggtttggatttgtgaccttcgccacagagcaggcgatgagagacgcaattgaaggaatgaacggccagaacctcgacggtcgtaatataaccgtgaacgaggctcaatcccgtggaaaaggtggcggcggcggcagctgcggctacggaagaggtggtggtggttacggtggcggcggaggttacagccgcggtggaagaagatatggtggcggaggaggccgccgtgaaggtggttataaccgcaacggtggtggaagaggatatagtggcagtggcggcggatatggaggtggtgga

SEQ ID NO: 17548 - DNA, 389 bp, Glycine max
cccacgcgtccgcgtctttaaagggtttgatgcattggagacttctgtaggggatcgctgcgatgactggtagcatgcttacattggcatcattgcagctttgggtggcattgctgtgcttttggaggcctacacatggattgttgtgttgaagaggaggaactcagagaacaagacagcacatggtgtcaatggaacaaatgggtatggttctagaggacagcaggtgtaagggaaagtggcctcatatatactggatttttggcttgttgattctacttatatgagtttggttggtaaaacttaaacactttctgtttgtatatttgttcacttatatggagtgtatttaggacactcccagtagcttagagtctgggtttgatata

SEQ ID NO: 17549 - DNA, 440 bp, Glycine max
gaaaaagaagcccttgctgcagaaggggggtggacagttgttgtgcaccataagggtagaaagaaaactactgattctgagagtggaattgcagtgggctctgttgctcaagctgctgtagagaataaaatgaccaaaaagaaacataaagaagttggtcaagatttctatcgctttcaaagaagagaagcacagagaaatgaaatcatgacactgcagagcaaatttgaggaggataaaaaacgtctgcagcagatgagagctgccaggaaatttagaccttattagacaatgtttttggcgtacaaggttcacagtaatttttttggtggatttggcgtacaaggtacttatgtagtcttgaacttgagttatgccattgctcttaaattcaaaacgaaagttcatttatcattccaattttgtcgaaagtatttgta

SEQ ID NO: 17550 - DNA, 452 bp, Glycine max
  modified_base (352)..(352): a, c, g, t, unknown, or other
ctgaaaacaatcccgcttggattttcgtgactccctcgaacgcaatacctaataatacaatgtacctcgatctgaagacaatctcgttccccctcaccacgcaaaaccccgtcgttcccttcattgcgccaaccgtggttctcagcaacaccgccagccgctctagaggtgatgaaaaggattgctgaagaggtgatgtcacagaaccatgagaaggcatctgttcaacgaaaaaaaagggaaaagtacagttgaagagatcgaaatataatgaaaaagttactggttgaccgtggtgcaattagatttgtcttggcgggtgcaaacataatgtgtcccggtcttacatctnctgggggtgtttaggatgaagatgtaagggcaaaatgccctgtggccatcatggctaaaggaaaacagcattctcttgctattggctttacaaaaatgtc

SEQ ID NO: 17551 - DNA, 222 bp, Glycine max
gggcaatgagggcatttctctagccagactttaacttaaccccaaatcgtatcagcggaatgcgttgttgcaattttgttgcttgcttgtttgtatgtcttactaaagattgtagattgccgcttttctgtgcgttctgttttaatatccgtgaggtgcttctgtaaatttgaaacttttttaacgttacgttggaaatatactggatttattttcattgtc

SEQ ID NO: 17552 - DNA, 343 bp, Glycine max
aaaaaaacatacggaggattcaaaccttgaagttattctctttcttctttggtagctatcgctctcttgaaaaatctagatctcgttcttccttgatctacgttacgcttttagtgaccggatctgtatggatctgaaccacatctacacgccgatggtggttttggcctggtctttcatagatctgatgcatggaggctcagatctactgtacagaggtatgcgattcatgttcgtctctcttttggaatctgcttcatagaaagtcgtttggtcttccatgtcgcatgggttctgaggtatttatttttgcagatactgtacataatcgatgagaagaacg

SEQ ID NO: 17553 - DNA, 428 bp, Glycine max
cccacgcgtccgatctccattcatccaatgcaatgaaactcatagatcatgttggagatctattgcaggcttttgtggatagacgggaacaggtcagacttataaaggagctgtatggaaatcagattagagagctgtatcatagccttccctaccatatggtcgaatttgtattagatgattctgattgcaaggtgacagtcagccttagatatgcagatctcatttcggtgcttccaactcgaatttcagtgctagcctggcctatgttcaataaaaatactatgagtaggaaggaagatggactctcgggaagtcattcttccccaattcgcctaacatatgcagaagatgccttacgaaccatgagtttacccgaagcatatgcagagattgtattaaacttaccacaggcgattcggcagacg

SEQ ID NO: 17554 - DNA, 105 bp, Glycine max
  modified_base (11)..(11): a, c, g, t, unknown, or other
  modified_base (15)..(15): a, c, g, t, unknown, or other
  modified_base (24)..(24): a, c, g, t, unknown, or other
  modified_base (27)..(27): a, c, g, t, unknown, or other
  modified_base (36)..(36): a, c, g, t, unknown, or other
  modified_base (44)..(44): a, c, g, t, unknown, or other
  modified_base (65)..(66): a, c, g, t, unknown, or other
  modified_base (81)..(81): a, c, g, t, unknown, or other
ggaaaagagangggngagctaaangcncgaggaacncgaaagcngaccgggggaacaaggggganngcgcaccacaaacanccaccagcaagagccagggaggaa

SEQ ID NO: 17555 - DNA, 296 bp, Glycine max
gttgtaaacgacacctcccgtgtagttgttgctgaccaaaacgaccccacgccccatcccgagtacaaatcatgtctcaacccctcgcccccaacttcctgtcgcttccccttcttcgctccccccccgctcgttgaccttcgattcttccctcatcggagctcaaatctccgatccctcccttcatatcgcttcacggcaacctgctcttcacccatcgcaagatctagttgaatctcgaccggttcgaagctctactcactcaaattctcttcagatctggggggcttgattgc

SEQ ID NO: 17556 - DNA, 382 bp, Glycine max
accacgcgtacgagccaacacatcagaagaatcctcaattctcatttctcactgtcctttgttatttttttttttagagaaaaaaagaagttattctttcttctttttgctgaaaccccataaagcgaaatcgtaaagggtgtccttggaaaaggagtgtttcattaaaaagcagggatctttcgggagaaagataagagaaaggggtaagctttgttttggggcaatgggggatttggagaagcaggagaaggtgagagagaatgagaggcttttggagggtatgcctggcttagattttgacatgctttgttcctctagggcgtttcaaagtgcacatgggagttggggaaagcttgggggtcgggattaggaacaacaa

SEQ ID NO: 17557 - DNA, 327 bp, Glycine max
gggcattgctttgttgtgtactcaagcatcggctgcaatgaggccagccatgtctgaaggagtaagcctactcagtagcaatgacttacttgaacatatgagaccatcgatgcctatcttttttgagtcaaatttaaagccccgcaatgatatctctgcttcaactagttcctctatgactaacactactacctcaaattctataatacctgctcgatgattgagtatatgatctaaaaataaatttttgtccagttcattatcaaagatgggtataattatttgtaaatcttacttatttttatgaaaaagttacattgacattcc

SEQ ID NO: 17558 - DNA, 347 bp, Glycine max
gtagacgagtgattgcgttgcgattgacgacgacgaggaatcatgtcttccggctgcgggggtggtaagccgttcttctgccacgtgtgcagtcagaggattacgtgctccgatgagtcggaaccattctgcccgatgtgtatggaaagtttcgtagaagaatgcaaccctaacaatgccaaccctaatctcttccccgacagtgatgaatcttcggatcccgaacttcccttccaccgcttctcacttctccctctcttgctctcatcagtctctaggtcccgatccgaacccgacgtgttcgacccgatggtctttctccagaaccaccttcaggaccttcgcgc

SEQ ID NO: 17559 - DNA, 255 bp, Glycine max
gcgtccggcgaatgtgtctgcagagaaccttacggggtacccagtactccatgaaggatgttgaaatgtccaaatatgttcgtagcttgacactatttattgaagacaatcagtcaggatcagagatcactattgttcagatgaacggactgcatggtacaacagttgaaacacctgacatgaatggcttgactaagattgaggatcgttaactcctgggatgaggagattcaactttgctcctaatcacttctt

SEQ ID NO: 17560 - DNA, 393 bp, Glycine max
cccacgcgtccgatggacactactgactgggaagtcctttcttatgatggccttgctgagtgtgatgactatgacttgtgcacctgaccaaaattcaagaaagcctctgaagcatcaaggaattttcatccaagggtgcctaaacagattcttcatattccaattcaattggaaccgagaattgggaaggccccagatgaagggtcaatggaagaaaacactaaggatcatcatcgtgttgaggtccctcttgttccatcatcaccaactaccattgagaatataaaggagggattttggaggctgattatgacactgttgcacaccttttctccaagatcaaggaaattgagtcttccaaagccattgatagaggattgttggtccctgata

SEQ ID NO: 17561 - DNA, 436 bp, Glycine max
cggacgcgtgggcacgggctgccattgaagatacttatttttccaccaaggtgttcgttgggtcctatgtttctgtgtatgattccttgatctcatgtcatgaatttgtgtttttataggatacttttgagagacatcgcgtggttttcaccgttggaacttccattgcttccgttgccactgcttggttattccttgcgccatttacatgacaccaaagttgatcaaaggcttcaatctatcgaaaattctatgaaaaacaattccaatctccaacattcccaaatcaaagacattgtcgcgggttccgcttccggagcttttagtatccctgcttgtgttgccactgctggaacctacttaatcatcggggttgctcccacacttacttgcaaacaacatgctcgctttgctccttaacatatagttaggtcta

SEQ ID NO: 17562 - DNA, 352 bp, Glycine max
ggtgcacaaggttactgcgtggagaaggcaagcctccacattacgtgaaagtagattgggagtaaatgggtggatgaggatgaagatgatggtaataatcgtgaaagtggacattctaacacatgcctactataatattaataatgataacaacaacaacatcggtgttggtggtcttagaagaatcccaccaacgcaaactttaattgacagtaactgcacagtcatatcccaccttagatctacccagctcgagtcccatgcgccgaacgaatctcgacggcaaagacttatacatgttcacaggagagcaagcatgttgtctcaacgagtgccgttcagggctaacatt

SEQ ID NO: 17563 - DNA, 435 bp, Glycine max
gtctaaagcaaccacttgattacacacttgtatcgaacagtgcatctatggagattgacgaagatggtcccatctatggttggctaccaacagcacctcaaggttataaagctgtatgctatgttgtcaccacaacacccactaagccttcacttgacaaaatcaggtgtgctaggttagacctcactgaccaatgtgaggcaaattcattcatttggggttcagacaacttcaattattatgattgtagaccaagcaatagaggaactcatgcacctggtgttagagtaggcacctttgttgcacataatgggagtcctaaccctgcatctattgtttggttgagaaacaccgacgctttaccaaaatacatgcctaatctaccacaaatcaaggcaattctgcaagtttactctccagacatgtccttggcac

SEQ ID NO: 17564 - DNA, 247 bp, Glycine max
aattgctactggtggcatgccctgataatgagtggttgtgtgttgggcttgtgcgttggcgtatgaggttgtgtatgtgtggtggagaacgagaatggaagaatcatcattgatattagtcacaggtaccatcctgatatgcctgactgggaatccaaggatagccttggacaattattgttgcttacaataatcatggtcaatgtgtctttggctaactggttggaattgaagcttctggctcaca

SEQ ID NO: 17565 - DNA, 338 bp, Glycine max
cccacgcgtccgcccacgcgtccgcctgaatggggaagcacaggccctactgatgctggacagtataacaactggccagaagacactcaatttttccgcaaagaaggtggaggctgggatggtccatatggtgagtttttcctcacctggtactctcagatgctgttggaccacggtgacaggattctctcatcagccacgtcaatctttgacaacactggagtgaagatctcagtgaaggttgctggcattcactggcactatggctcaaggtctcacgccccagaactgacagctaggtattacaacacccgggtttcgtgatggctacattccca

SEQ ID NO: 17566 - DNA, 394 bp, Glycine max
gcccgccgccgccgccgccacccccaccgtgtccagcctctccggctccgatcaggagtcggcgccgcgccgccgtgcggcgcctccgccctctgggaagatctccaagaggaagtcgcgcgcctcgaagcgctcgcagacgacgttcatcaccgcggaccccgccaacttccggcagatggtccagcaggttaccggcgtgcggttcggcggcgcgccaattgcgccggcggcggtggtgaagcccgagccgcagcgcgcctcgggcctcgccaggttccccgccggcgtggggtgccttccgacgctcgacacgtcggccttcctgctggaccatcaccagcagcaggtggtgcccgcctctgttaactctgggcctggcaccgggctttct

SEQ ID NO: 17567 - DNA, 353 bp, Glycine max
agccccgctacgttggacgtgcgcgattcttcgtcaactttaacacaccgtttacagtctcaacggatacgatcaggattcgggaccgtgccgacgtgcaacgggtccgtcatatgcgaagatctacaagaacaagtcatgctcttcgaatcgttcgcatacaacattaatcactgcatactcctgcaacttacagcagatggtgcagcatgtaaccggcctgcggctcgtaagcacaccagaaataccggaccctgaggttgaacatcgagacatactcctgaggctcacaatcgttgtactcgtaaaacaaggatcatcgatcttacgtacaatgcatctaataacgagct

SEQ ID NO: 17568 - DNA, 349 bp, Glycine max
gacagataacggcagcggcatgcttaatgtttccagtctctctgtgtgtgatcatgattctgcgccgcaccttattgcggttccttcacactctgacaatatctacaagacgaagtcgtgctcatataagagctatcacacgatttttatgactgaggacatcgtcaacttacctcagaccattcatcacgaccctggcctgcaaatacggtgctatctaaactctccggatacgatcacgaagcgtgatattcatcgcgcatagagccttggcacactaagcgctaatccaaaacggcttcatactctccaatcgtccgaatgccttctggaccatcaacatcatcag

SEQ ID NO: 17569 - DNA, 392 bp, Glycine max
gctactttctttgtttcatttggttttcttccttctcacacttcccccaattcgcaaaccgaactctgtcttttcttctctgtacggcactctctcttccggcgttctgggggtcgcatcgccggcgattccccactctgcttctctcttcacccttcaattcaaccctctcgtcttcgcttcactgattccctcttcgaaaatgcttccgatcgcttgctagggttttccttctcccaaatctccgtctccgaaagaaccctgtaccttttcttcctccgattaatcaacttcctagttatggctattcgtgtaactttttccttttcgggctacgtcgcccagagcctcgccttcttcggcggcgttcgcgtcgcccattcgcgatgtgt

SEQ ID NO: 17570 - DNA, 204 bp, Glycine max
cccacgcgtccggtttttcaacaaatcagttcaggaaacgtcacttcaggtttgaaaaatgttactaatgatatgaagactaagaatcgcaccgatagaactgagttgttggggctattgaaaaagaaacttctgcaagttcacgtgtgttttctaaagctggacctctcaaatttgaacttcaaatgggccgcaaatgggtta

SEQ ID NO: 17571 - DNA, 415 bp, Glycine max
gtgatacttgctattaacgatttcttggccctgatattttctttaatcctgatatatagggcatgtgactttaccacccctttgtcagttgtaataaacaagtgcattcagtctgcgccaattgacacatggagatcattatacaataatgtactgtagtctggaggttcaaccatgttcaaggatattcacaggaagttgcaacgttatctaaaaaaaatagagaatgctcgtgtccttttatctgaagcgcgcttgaatggtgagataaaatctcagccagcatatgtcaatgtactcatcaatccaatccagagatattcagtttggcttggaagatcagtacttgcgtcaacacctgatttttttactgcttgtcatacaaaggcagaatattaagagtatggagcaagca

SEQ ID NO: 17572 - DNA, 411 bp, Glycine max
ggcatggaatgctctttatgactcgctcttggaacgttgctgttgattcttgattgttgtctatctcaactttacgtctgaagtgtcttttgagcaaggtgatgggtctggaaaagaatcctcttgtgtttttcgatgtctcaattgatggggaccctgtggaaagaattgttattcagctttttgccagtatagttcctaggacagcagagaattttcgggcactctgtacaggtgagaagggcattggagaattgacggggaaacctttgcattataaaggaacaagctttcatcgtataattagaggttttatggctcaaggtggtgatttttcaaggggtaatggcacaggtggagaaagtatatatggagggaaatttgtagatgaaaatttcaaactaacacatg

SEQ ID NO: 17573 - DNA, 365 bp, Glycine max
cccacgcgtccggttccgttgctgccatagttttagtatcatcactttatcatactcatgggaaactgtttcagaaagacagcagctgatgacaacaagattcacaagaatgagtataagactcccaccaccaataatccacgcccttctcccccagagagattggtgaaggaaacagtggaagaaagaggtgagcgtccacaaaacaacagcgttccaaagcttataaagtacacgttggatgagttgagaagtgcgaccagaaacttcagaccagacacggtcctaggcgagggtggttttggacgtgttttcaaagggtggattgataagaacaccttcaagccctcaagagttggtgttgg

SEQ ID NO: 17574 - DNA, 282 bp, Glycine max
agcccacgcgtccggttcctaagctgacattgttttagtatcatcagtacatgatactcatgagatacgtgtgcagaaagacagcagctgatcacaacaagattcacaagactgaatgtaagactcccaccaccaataatccacgcccttctcccgcaggatctttcgtgaaggaaacagtataagaaagaggtgcgcgtgctcaaaacaacaacgttccaaagcttatatagtacacgttggatgagccgataattgcgaccaggaactttagaccagaca

SEQ ID NO: 17575 - DNA, 366 bp, Glycine max
atcaattcaaataccagaggtaccactctctacttcatcgtaattcagatctcaatgaccacactctcatctttgacgtagaaggtgcgttgttgaaatcctcttcagtgttcccatttttcatgctcgttgcgtttgaagcatgagggttattaagagctattgttctgcttttagtgtacccttttgtttgtttagttggagatgaaatggggttgaagatgatggttatgatatgcttctttgggatcaaagaagagagtttcaaagtgggaagaacccgtttgccgaagtttttgttggaagatgttgggtcaaaaatgtattaagtggttaaaagaagttgccaaaaagtgggggttaacc

SEQ ID NO: 17576 - DNA, 427 bp, Glycine max
cacctatgcatatctgaagcctttgtttccatgaaagggaagggttatcagtgccgtagagatgctcacggagggttccttgatccatgaaatcgtaaaccagtatcatctcgttgttctcgtagcaataaccgatgagggaaacaagatggagatggcgaagttgagacagcatttcgatctcgttcaagaactcgttcagaccttgttgagaaccgggtttgagccttttgattgcgacacatgttgaaccgtcgtcgatgtagcctttgtacacgttgccaaagcctcccaatccaaccacaaagagttcgtcgaagttgttggtggcggctctgatttctgcgattgagaacttacggcagaggttggttggtagcgatgatgagccaccgtctcgagaagttccaccttttttattggaacc

SEQ ID NO: 17577 - DNA, 355 bp, Glycine max
aacacgcgtacgattccttcttgcaacccgcgagacggtacgagatcttgttgcttgactcgtgacgctataataataagatggccgattgtggtgctgaaagcgaaaggaaagttacgatacgaaacaatcatggcgaaaatctcgtcgggatcttacataacgcggcttcaatttcgcttgatatcgtctgccatggcttccaatcttccaaggaaaggattcccatggtgtaccttgccgctgctgtgggaaaagatggatttagttcttttcgcttcgactatgcaggaaacggtgaaagtgaaagttcatttcagtatggtaactactacagagaggttgaagatctgcg

SEQ ID NO: 17578 - DNA, 389 bp, Glycine max
gaaaaaccaaagaagattgaccatggcttcttcattgaggatctcaaggctcctctctcgttcttttctttctgctttcactactactcctttgttttctagaggcggtagtggtgctcttggtgcagggctcagtaaattcagcactgctgctgccattgaagaaccaattaaaccaccacttaaagttgaacacacccagctcttaattgatggaaaatttgctgatgctgctactggcgaaacttttccaacgttggaccccaggacaggagatgtgatttctcatgttgctgaaggtgaccatgaagatgttgatcgagcagttgcaactgctcacaaagccttctaccgcggaccttggccatagatgacagcctatgtaagac

SEQ ID NO: 17579 - DNA, 425 bp, Glycine max
cttcgtacaccgtggtggatcatacttatgatgctgttgtcgttggtgctggtggcgcgggattgagagctgctattggactttcagaacatgggttcaatactgcttgtattaccaagctcttcccaactcgttcacacactgttgcagctcatggcggtataaatgctgctttgggaaatatgactgaagatgactggaggtggcacatgtatgacactgtcaagggaagtgattggctaggagaccaggatgccatccaatatatgtgtagggaagcacctaaagcagtcattgagctagagaattacggattaccattttcccgaacagaggatggaaaaatatatcaacgtgcatttggtggtcaaagcttaaactatggaaaaggtggtcaagcttaccgctgtgcatgtgctgctgat

SEQ ID NO: 17580 - DNA, 370 bp, Glycine max
caacaatgccagtactatctgttgtgatcccccgacttaagacaaaccagctaaagtggagctttagtggagcttttgaggcaagacaatcacttattgtgagaggtctctttcctatgcttgcagatcctcgacatcctgctgaatcaacaagtgcaacaaatgagtctattcttaaagttgcccttgatcatggaaaagcattgggagttattaagtcacatgaccgggtagttgtttgccagaaacttggtgatgcatctgtggttaagattattgagcttgaagattaaactattaaagcgcattcaaccaactacagttttagtgttatttaattaattttacaactttgcctagttatttaaag

SEQ ID NO: 17581 - DNA, 238 bp, Glycine max
gtttcttcttggatcttaccctcttgtttgctaatattctcattcttctgtctctgcttcgtctccttctgaactaagagatggggttgtctttcaccaagctttttagccggctctttgctaagaaagagatgcgtattctcatggtacgtcttgatgctgctggtaagactaccatcttgtacaagctcaagctgggagaaattgtcacaaccattcccacaattggattcaatgt

SEQ ID NO: 17582 - DNA, 392 bp, Glycine max
cataagtgctgcttgaaaaagattaacatatatctttggcccattatctatagctactttggattcacagagatgtttatcactaatctactttctctttttggcgggagaaatataaaacatgttaaaggaaaagatgatgaattagatccttctgaaggcaaggtaataagtcatgagaccaatttgatccttctgttccttgtacagaccatggaaaggtcctgtcatgtttttgtttattgtttattggccacttttatgtttgtagttactataactgaaaataaccaagtactttctgttaaaaaaaaaacttcagttctagggttaaccaatgatttttacaagctttcctaaatatttaaagaaaaaaaaaagggcggcccctt

SEQ ID NO: 17583 - DNA, 324 bp, Glycine max
gtcactcgtgcggagcttccatgggcgctggtatatccaggcgtgatccacggcatcatcgacaagctaggatgctcgcaggaattggccgcatagatcgatacttggatccatactggagaccattcggcatacataattgctatgatatttgctatgatatgaaagatgtttggatcgtaatggattactgaatgtggtatagtttatgtggatgcttaactgggtacatatgatggtcattatgaatatcatatcatatatacgttcataagcacattatgtaacagtatacagatgtggtaacaggactggtaacatgac

SEQ ID NO: 17584 - DNA, 435 bp, Glycine max
ggtttttattttggtgaaaaggagcaaaggggaatcaagaagtacttaagcaaaagtcttgaagggatatctcatgtagctaatcctattgttggtcaagatttgaggaaggggaggaatctttagctcgtcaactaccaaagggtttgagcaaggaggaggaagactcattgctagggcaagtggaaatatggaggtacatgacatgcttcacggactccgtggccttgaaagctgtcatagagcttcgtatagcggacatactagaccgttatggtaaaccactatccttgtcgcaaattgtggaagaacatagaagacgcaccctccccagatgcctctcttctccagagagtcctgagagtgatggtgcgcataaagatcttcagtgcacaagaatcagagacaggagaaacccttttcggcttgacacga

SEQ ID NO: 17585 - DNA, 381 bp, Glycine max
cccacgcgtccgaactagtctaagcagaaatggcctcttcagtgatggcatctgtggccctcaaacctgcccctttcactgttgagaagtcctcagttagaggccttacctccctctcaaggaactcctcttcattcagagttgtggccagtggtggcaagaagatcaagactgacaagccttatggaattaatggtggcatggctttgagggaaggagttgatgcatctggcaggaaaggaaagggaaagggcgtttaccagtttgtagacaaatacggtgctaatgtcgatggttacagtcctatctacgacaccaaggactggtctccaaccggtgatgtctacgcctgcgggtacgactggcttggctatctgggct

SEQ ID NO: 17586 - DNA, 443 bp, Glycine max
ataagcacaagagtagctgggacttatggatatatggctccagaatatgcaatgcatggggatttgacagacaaagctgatgtctatagttttggagttgttgccttggaaattgtatctggaaagagcaataccatccaccgatccaagcaagaagcattgcatcttctagattgggcacatttattgaaagagaagggtaacctaatggagctagttgatagaaggttaggttcagatttcaatgaaaatgaggtaatgatgatgatcaaagtggcgctcctatgcaccaataccacttcaaaccttaggcccaccatgtcatcggtgcttagtatgctagaaggaaaaactatgattccagaatttgtttcagatccatctgagataatggatgaaatgaagttagaggcaatgcgacaacattactttcaaaaagaaaa

SEQ ID NO: 17587 - DNA, 393 bp, Glycine max
ctgacgcatgcgcggacacgtgggtccgggtgtatgatcaattacactgataggcgcacgagatatttagtgcaatccttatgagttgcctaactctattggctgtactagctatacatgacttgtaacctctatcttagcttaataagcatctatctggtagactaggatatctagtactagctagtgttattgtgattatcacgatactatctatctgcaatatataggtatctgtattatctgagaaatttgtgtctagttataagtgtctgggtcctggtcctgcctattgtgtcaattaaattgagaagggttgcattgtattgaatcatatatcgtatcatataaacatggcttgttcaagtggaacatcttcaaggtcattatcta

SEQ ID NO: 17588 - DNA, 320 bp, Glycine max
cgaaggactttaggttgggatttgggaattagggttattcgcgtggcgaagatgattgaggtggttttgaacgatcgattggggaagaaggtgcgcgtgaagtgcaacgacgatgataccatcggcgacctgaagaagcttgtggcggctcatactggcacaagagccaccaggatctcgatccaaaagtggtacaccatctacaaggatcacatcactttaaaggataacgagatccatgacggcatgggttctcgaactctactacaactaaacacaacaaggtgtggtttatgcgtaatatactatgtgctggaaat

SEQ ID NO: 17589 - DNA, 429 bp, Glycine max
gctcctctcacattctccttcttcttcatccttatctcttacatttcttcatcatcaggtggaaacatctcccacttctcttctttgagtttgtatttgaatttcgtcttaccaacatgaactctagttgtaattagaaaataacacttatgaaactgcatgtaaattttgttgcttcatctcattttgcatttgaaagttgtcaactttctgacgggctttgcagaagcgggatcaatcggaataaactatggaagaattgcgaacgacctacctacaccggcgaaagtggtggagcttcttaagagtcaggggctgaaccgtgtgaagctctacgacaccgacgccaccgtcttaaccgcgtttgccaactcaggaatgaaggtggtggttgccatgccaaacgagcttctcgccaacgccggcgcg

SEQ ID NO: 17590 - DNA, 421 bp, Glycine max
ctcacgcgttcgtcgacacgttcggtctgaagcaaccatggcaatggcagcgcaagcctagctcttaaccacacccgtgtgcggtctcaaagccagcgaccagtcctacgtgccatggaagcaaaactccagcctctgcttctacagcccgaagcccctcaagtgctgcacaacaatcagagcagcagccgccgacgagaccacagaggcaccagcaaaagtagaggctgcaccgctcgtggtcaccccaccagaactttgacccaaacaccccttgcgcgatctttgggggcagcaccggcgggcttctgcgcaaggcacacgttgaggagctttatgtcattacgttggactcacccagagaacagatctttgaaatgcccactggcggcaccgctatcatgagggagggtcctaacct

SEQ ID NO: 17591 - DNA, 400 bp, Glycine max
ggaaaaatatatagcttctacatcatggcatcgggcacttcaaattccggactatgctgtgtccttggatgataaagaccacctctttgccaaggttgtgagccagaaagatagtagcttaacacatatagtgtggaatccaggatctgaatttgcattctgtgattgttcttggtcaatgcaaggtaacctttgcaagcatgttgtcaaagtaaacatgatttgtgaaaatcttaaaggttatcaaccatccatgtctttccggtcttttcaagaggttttgatggatctatggaaaaagccagtggatgattcttttgcgttggatctgtcattggcttggacccatcagatgctagatcaaattcaaaaacaagttgaactgaataattctactgat

SEQ ID NO: 17592 - DNA, 436 bp, Glycine max
  modified_base (417)..(417): a, c, g, t, unknown, or other
cccacgcgtccggaacaaagtaggaagcactttacaagtccaaccttctgcatcttggtcgaaatttaaatcccctaaaactggtgaaacaaaacatactagttagtttttgtggcatataggattaaaaaataccaagcgcctaggttggactggaaaatagacttattttcataatcttgtaagttatagccaacaaaccatcagcggacaactcccaggaagacacatacaaaatatgagctttgtatgattttgtattacgaaccgcgacaatcaaaacaacggagtatgaggtctggagcatgcagcaacaaccaaaatcatcaagcatttacttaacgatcagataataatgggttaatatatttccatgtcttcagtacatatgcctcaataatgaaattcagaaactangtaggatgtcaagtggcca

SEQ ID NO: 17593 - DNA, 438 bp, Glycine max
agtgtccagaggttgaagacgacgaaaaggaggagcattatcaatagcgtcataacacacctctgcaattggatccgccacaaatcgaagagcataaatggcgttgaagttgcaaatttagagatctgaacattaatcataatcaccatcactgttcatgctcttctggttgcgctgattctcaccaatggacaagtcaagtgctctggagtacatcaaccagatgttccccaacgaggtgtctctttctggcgtggaaccgctgatgcagaaaatccagaacgagattcgcacagtcgatgccggaattctcgccgccgttcgccaacagagcaactcaggaactaaggcgaaggaggatctcgctgctgccacacgcgccgtcgaggaacttatgtataagatccgagagataaaaactaaagcggttcagagtga

SEQ ID NO: 17594 - DNA, 334 bp, Glycine max
ggctaagagtaaggaagaggaagatgggttggtcttccgcaacagcatgtgcgtcgctctcctcttcgactccgctgcctcgacttccaccgtctcgcactggcactcccattcctggttcgctttcattttcatggctttcttcatttcccactttaactttaagtgcttctcgttctcgctcctccggaataaaccctcccaatccctcacgttccgatgattccttcattcgagctgcctggacccgaagatctcgaggtgaagctgcaaagaaacctaacaggaaatcgtggaagcagaggacagacatgtacatgagaccattcttatt

SEQ ID NO: 17595 - DNA, 347 bp, Glycine max
cccacgcgtccgaaaaccctgaagaaagacacagccattgtttacttttcattgattgagccaaagctttgtattttctgcgataattttccattgggtggaagaaaggctcaacctttaattcaaaggaccagggtcttaattgaagttaatggtcatggtttgggggtccgattatctccgacttcataccggcaggtcccgccagcggggcgcggcgcgtgaccgccgacatcctgtggccgagtttgaggaagcgcttctcgaagccgctgctggacgatgatttccaggctgggttcagagaattcaaggatgattcggaaatcgaggatgttgatgacgag

SEQ ID NO: 17596 - DNA, 425 bp, Glycine max
ctcgccgccggcggatcctccgtcttcagaccagacgaccccgtcggaggcgaagcgcgtggtgaaccgctgctccggctgcaggaggaaggtcggactcaccggatttcggtgccgatgcggcgagctcttctgcgccgagcaccggtactccgaccgccacgactgcagctacgactacaaagccgccggaagagaagccatcgcgagggagaatccggtgattagagccgcgaagatcgtcaaagtctgaaaaaaaacaaaaaagaaggaaaaaacccgaacggaacggaatctcaaaacgacgtcgttgacggttgacctttcgcgcgatcgggttcaggtcacgggtttcgctttttttcttttcagatttatatatagagagaagaaaaaaaaaggtgcagataacagggttgagagag

SEQ ID NO: 17597 - DNA, 430 bp, Glycine max
cactctcatcagattcgggtcgggttagcgttatcggataacttcgcccatagattctgtgtttacggggcgaaaatgacagtattcttagccacgaggctcgtgttgcggagatccccgccgcttctctggcggcgcagcttttctcgggcggcggtagaggccgaaaaggacactgttgccgtgccgtcgcttccgttgttcgattactctccgcctccgtatgcggggcccaccgctgacgagattctggcaaagcgcagggagtatctgagtccttccatcttgcacttctacaagaatcccgtgaacatagtggagggtaagaagcagtacctgtttgacgagaaggggagaaggtacgtggatgcgtttggagggattgctacggtgtgctgcgggcactgtcaccctgatgtggtccaagcca

SEQ ID NO: 17598 - DNA, 295 bp, Glycine max
ctttcaagatgcagatcttcgtcaagacccttaccggaaagaccatcacccttgatgtgggaagctcttacaccatcgacaacgttaaggccaagatccatgacatggaaggaattcccccagatcagcaacgttttatatttgccagaaagcctctcgaggactgtcgtactctctcctactacaacatccagaaggagtcaacccttcaccttgtacttcgtattccgagctgcatgcagatcattatcaagactctcactggcaaaaccataacactagaagtcgaaagctc

SEQ ID NO: 17599 - DNA, 394 bp, Glycine max
tgtttccttgatgatagattggagatattacgtttgtacccagctgcaccacggaatgtgccacacgagtcctaagaagatgcaccggggggtggatatcatgtccaaactggcacgcctcttgtggactaattttcaaaactttaacgagacccttcattataccctaatccattagaattttggccagagagattcttgacaacccacaaggatgtagacattaaaggtcaacattttgaattaattccatttggggcaggtagaagaatgtgccctggaacttttttcggtcttcaagtaatgcaactaacgcttgctactctattgcatgggtttgacatttgaactagtgattgggaacatgtccatatgcctgaacaaattggactta

SEQ ID NO: 17600 - DNA, 438 bp, Glycine max
gcttgagagaaaaaatattccatttccagaattagtagcactagtgctctcttttgtttcgaaaaaaatggttcaacaggaagtgcgtaaaggtccttggacagaacatgaagacttcaaattggtgtcctttgttggattgtttggaaaccgtagatgggactttatagcttaggtatcacgtttgaaggtggctggagaaagttaaatatgcattagactaaaaaaatcaaatgcttatttgggcatcatgctacaaaaaaatatagattatggaagaagaagcctttaaccacctcattttgctgtacgtttgaatcgaacaggttagagttgcagattaaggtgggttaattacctacatgctggctctaagcgtgtaaagatgaccccttaggaagaacgccttgtattggaacttcacttaaaatgggggaa

SEQ ID NO: 17601 - DNA, 395 bp, Glycine max
ctcgaactccaaaaccctacgcatgcggtgacgtgaatcgctgatgcgccaaaaatgaccggaagcggaagaagtagcgttcggagcagggcgagatccctctccgactccgacgccgacgccgattctcttcgacaaaagaggcctccgctgaatcgccatagagagagaagcaaatacggaagctacattccgatatacagcaatgccaatctcaaagtgctgctcggtatctgcttcgtcgcattcttcatcatctggtttatgattcaccacctctccaattccgtaacggagccgaagcttcctcgcgccgttacgccatttcccgcgccaaagataatggaccttcctcagtttgaaggtgagcaccaggagagtttgtattggggaac

SEQ ID NO: 17602 - DNA, 413 bp, Glycine max
  modified_base (319)..(319): a, c, g, t, unknown, or other
  modified_base (388)..(388): a, c, g, t, unknown, or other
ctttgggtggatacatttcttccaatagaaagcagattgaagctgcttcagccgaagccactattgaagctacggcccaaggcattgcctcagtgctttgcgctcatggtccagaggtagagtggagaatttgtaccatttgggaagctgcttatgggttgattccattaaattcctcagctgttgatcttccagaaattgttgttgcaacaccacttcaacctcccatactctcatggaatttgtacatacccctactcaaggttctggaatatcttcctcgtggtagtccgtctgaagcatgtctcatgaaaatatntgttgctacagtggaagctattcttcagaggacatttccagctgagtccactagtgatcacaagaatanaaacaggatactattgtgtggggtc

SEQ ID NO: 17603 - DNA, 253 bp, Glycine max
ccatcctcaactaccattattattgccacccccactcgcgagtgtattggattgagatctgaaaagaatattttggcagaaaaaactcccgcgtggatctttgctcatttgaaattcgatggcgaagttcggctagggtgacaagcggtggatcgtggctgagcgccccgacggcaccaacgtgcacaactggcactgggccgagaccaactgcctcgagtggtccagaacctttttcaacaacagtttcacc

SEQ ID NO: 17604 - DNA, 383 bp, Glycine max
gccacgcggtccgatcacgcgtccggattgatgaatgatgatccccatacatcaatctgctgcatggtaagtagacttggcttccacaattcacatcgctgatgaagagtatgtgttcgtctatcttaacttgttcgggttttggattcggtagttgttagaagtaattaacgatgtaataacttgataagtgaaaggttttaatgactattggtatgtgtgtaagtgtgatgataatttccaatagaggttactcttgaaattctaagaaataatttattggtgcttatttgggaagtctttagaagtcatcactgccactaaaatagaggtttttaagatgagaaagaacaaccccaacttgaagaggacatcatgtaccc

SEQ ID NO: 17605 - DNA, 402 bp, Glycine max
ggaagacacccacccctctaagaaatgcggtcaattcctttgggaacctcagtatctgcaactcctgtaaacacctcaaagttatcacctttcagtgttaattttaagaagccaaccacctttccatctcggggttcaactcctcctcatgaattctctctctcccaatcaggattatgcagagcgagtcaagttgttgatttgttcccaactgtgtctcctgaaattattgtgcgggaggccaggttagaggactgttgggaagtggcagagactcactgcagctccttcttccctgaatattccttccctttagattttgtgcttaggatggacagattggtggccatgatggcaggattcactctaccaaacggttacaagagaatcttgttggttgct

SEQ ID NO: 17606 - DNA, 357 bp, Glycine max
acatggcgtaggtcgagttccaagatcagacgcctggtgtgatggtactcaatctccgatggacacacgcactcgaagcatgtgggtgatgcgcataggctctggctgcactctgctgtgcaaaggcacatgttgttagagaaagaatactaaaatgagtcgcggaagaagaaaacgagctcgctaagggaagagtgcaagcagtaatcttagacatgagcaaccgtgatgaatggtgatacttctgggattctaatactggaggaactgcacatgaggtagctgtcgcgtggcatacaattggctatggtgaaccctaggtagctagtgattcacaagcttcaagtggcacatttt

SEQ ID NO: 17607 - DNA, 174 bp, Glycine max
tcgtcacgccttaagaaatgcggtcaattccttagtgaacctcagtatctacaggtcctaggaacacctgagagatctgacctttcagtgttaatcttaagatgccaaccacctttccatcttgtgggtcaactaactactgatgcattctctctcactcaatcacgatcatgc

SEQ ID NO: 17608 - DNA, 421 bp, Glycine max
cccacgcgtccgagaagatgtcgggtatgggagacgggtacgtgggcaccgaccaagacgcggtgaggattcgacggttggagaagcagagagaagcggagcgtcgcaaaatccaagagctcaaaaccaagtcgacctacgccaagggccaacccggtctcctccaattcggttccagcacttccgagattcttgagactgcctttaagaaggaaactgtgggtttggtcactagagagcagtatgtagaaaagagggttaacattcagagcaaaattgaggaggaagagaaggagaaacttcagaagcaacagcatgaagaggaggagcttcaattagaaaagcgtaaaaagaggaagatcaggggcaactctcgattgtcctttgctgaggatgttgacaatgatccccaagacgacga

SEQ ID NO: 17609 - DNA, 366 bp, Glycine max
  modified_base (221)..(221): a, c, g, t, unknown, or other
  modified_base (226)..(226): a, c, g, t, unknown, or other
cccacgcgtccggtttcaagagtttgaagcaaggaggaaaaagaagtttgacaaacaaattgattcaaatgtgatgatcggttccaaaggtcttgatgagggtgttgatctatgaggtggtcttaggcttgttgatggggttctttcagttgtacatttggatgagcttctggatgtagcgtggaatactgggtgttttgtccatgccttttatttcacanatganataagtgtatggagatccctttgtcacgttgtatattattcttaattctattttctgttacccttatccagatttgcctataaatgtgctggcttgtagatgcagccaatatccagcactagactaaatttcagaatatg

SEQ ID NO: 17610 - DNA, 415 bp, Glycine max
gatacacgtcatcatggatctgtccaaagccagcttgttgacgcacctcacaaccctctgcgattctcacggacgaccttcctcgtgcgtttcaatccaggctgctctacttctcactgcccggaggaggccgcggatgagcgccttcgaagaaagcaccagcttcaaatggaacctgccatgtgcaatattaaccgtaccgaaaccgcttcaaagcccatacaatcaccttattatctaaacattatcatccccaagctcctagaacacgtgtctgcactcaccggcaacctattgaactttgactaccgaattctaaccctaatccgcgagagcgacctcgacgagtcggctctgtacacgcgccagtcgatctactccaactgccggcccaccatcttcaccattaacgccg

SEQ ID NO: 17611 - DNA, 302 bp, Glycine max
cccacgcgttcggatggttaggactctgtatgctgataaagacaacactcataccgttgtagagaatgatgctgcttgccatgttgcttaatttagttcttgcttcctttgtcttcttgagttttatcagagacggtagtgcagggatcactatctctttcattcagtcagagttgcctgcagttgacattcctcttgatcatgaaacattttcagttccaaagggttataatgcaccttaacaagtgcacattacgcaaggtgactatgatggaaaagcagtaatcatctcatgggtgacc

SEQ ID NO: 17612 - DNA, 166 bp, Glycine max
gtctgattgatgatgccgaagaacaagggtatagggaggtcagaacagtaagagtggtaagaacgaggctgacgactagaagcgatagctgttgttcaaggagcgacgggcaggactacgcgcatgtgctccggatgcttatgaacggtctgtacgaggcgatgtg

SEQ ID NO: 17613 - DNA, 386 bp, Glycine max
gctatacttgttccttttgaaggttagaagtgctacaatacaaacaatggcagctactcaggaagatgtgaagcttttgggtattgtgggaagcccatttgtgtgcaaggtccagattgcccttaagttgaagggagttgaatacaaatttttggaagaaaatttgggcaacaagagtgatttgcttctcaaatacaaccctgttcacaagaaggttccagtgtttgttcacaatgagcagcccataccaaagtcttttgggattgttgaatacattgataagacatggaagaccaaccctattttactttctgatccttaccaaagagctttggttcgtttttggtccaaattcattgatgataagggaactcaacatttcaaaa

SEQ ID NO: 17614 - DNA, 442 bp, Glycine max
cccacgcgtccgattctatgtatgtagattgattgctaagtacagaccaattatgcctgtgatatccgttgtcattcctcaactgaagacaaatcaacttcgatggacattcaccggtgcttttgaggctaggcaatctcttattgtgaggggtctttttcctatgctggcaaatccactacacccggtaagaattgctcaacatggattgatataatgatggatccaaataacatcacaaaaattcattatataaaaatcacagaacatataacgtacgtaaggtgtattaggcaaatcaaataaacataattttactagcataatgctaattcaaccagaaataatatattccaaggcccaagacaattacattttaagccctaattaacattaaaatccctatttcccggattgaaacctgccataaaatcaattaaat

SEQ ID NO: 17615 - DNA, 220 bp, Glycine max
cccacaccttctactcaagatatatatatttatatcaacacacacacatactatatcctgggtatatttcaaactttctcatctcataactaacccacttctttccacatcctctaatacatttaaatcttatgaatctgcaaacatatctactaacgctcctattcttctctcatcaaaaccacctgtacctactacatcttctactactatatcaaat

SEQ ID NO: 17616 - DNA, 420 bp, Glycine max
  modified_base (260)..(260): a, c, g, t, unknown, or other
ggtgaatcgaggtggttctaggatcatcaaatcagtgtctgcagctcttggtacgaggttttacgccaaggttgcaacagggactgacatagtctctgccgcacccaatgtttctctccagaaagctcgtacctgggacgagggcctggcttccaagttctccaccactcctctcaaagacatcttcaaggacaagaaagttgtcatctttgggctcccgggtgcatacacgggagtttgttcaaacaaacacgttcctncttacaaggagaatattgataagtttaaggctaaggggatagattctgttatttgtgtggctattaatgatccctacactatgaatgcgtgggctgagaagcttcaagccaaagatgctattgagttttatggggactttgatgggagctttcacaaaag

SEQ ID NO: 17617 - DNA, 435 bp, Glycine max
tcttgtttctcgtttaagccatcatagggaggaggggcttgtcgggtcaaacaagtgcaacagagcgagatctgagtcgtaattcggagtcccttttgaaaaaagaggtcttttttgctgtaattcacttggctctccatttgggttacttggattttgtgaggttgtcttggagttggagtcatggcagttgaggttgtgggatttgagatggttcaaggaccagtggagaatggtactggaggaaaacctgttttaaatgacaaggagaatggcaagctggaaaaagatgtgggagctgcggatgccatcaaatttgggacacatggataggaatctgcaaaaacggaagggattgatgtttcggacgtgaatgccccgaaagatgctgctgaagattgtcctgcacctaagcagattcattctttttatttt

SEQ ID NO: 17618 - DNA, 325 bp, Glycine max
acggctagaggtttggtcgacgcgcttgtcgacaacagcgcgctcgagctcctcgtgcagaagctgcaccgcttgaacgattccgatcccgacaagaacgccgccgtgtacggttccctcgccacggtggagaatatgatcgaggtgaagcccgcggtggcggagctggtttgcgagaagacgaagttgctgaagtggcttctcgggaagataaaagtgagggagtttgacagtattaagcagtatgcttccgagattttggcgattttgctgcagagttgtactgtgaatcagaagactctgggacagatgaatggggttgatg

SEQ ID NO: 17619 - DNA, 432 bp, Glycine max
  modified_base (408)..(408): a, c, g, t, unknown, or other
aattaattcccagggagttaatatctatattcaatgacaaagagctggaattattgatcagtggacttcctgatattgatttggatgacttgagagcaaatacagaatattctggatatagtggtgcctcaccagttatccaatggttttgggaggctgttcaaggtttcagcaaagaagacaaagctagattgctgcagtttgtgactggcacatccaaggtgcctttggagggttttagcgctcttcaaggaatttcaggtgcccagaggtttcagatacataaggcatatgggagttctgatcacttaccttctgctcatacttgtttcaatcaattagatttgccagagtatccatctaaacaacatttggaagagaggttactgcttgccattcatgaagcanatgaaggattcggatttggttgac

SEQ ID NO: 17620 - DNA, 443 bp, Glycine max
cgttgattgatttcatcagtattgtaatggaaggaacatgaacagaaacacgatcgattgagagtctcattcggggttagaaatgtgacatttccatggatgaaaaccctaacccctcaatccctcgcgcctcttcctcttcctctcaggaattcctcaaacaagtccaagctgccctaaagcgccatcgccctctcggtactacgcaatcgcataacgtgaggccgaagcgcgccatggtggctctacgaaaggccacgaacaagctcgaggaggatccgccgtcgatctccgacacgtgcaccggcgaaggctgcaaaaatgagccctctttgctgctggaatctctgagtgttggtgcacacaacaaggttcagtttttaactgagatcaacaatgccactgcacagccgcaagatgaagcatcgattggattcaatcaa

SEQ ID NO: 17621 - DNA, 435 bp, Glycine max
tcctgcgacaccagacagtgacagacagttcaatggtggtagcacagggaaaggaagaaggagtgttagcctcagttcactcaaccgtgttcaaagaatcagaaagccttgatggaaagtgtgttaagattgagggctatgatttcaaccgcggcgtcaattatccgttgctactcagctccatggtcacaactgggtttcaagcttccaacctcggtgatgccatccaagtcgttaatcaaatgctagattggaggctagttgatgaacccgtagctgaagattgcagtgaccaagagagggatttggagtaccgaaaatctgtgacgtgtaaagtgtttctgggtttcacttctaatcttatttcttctggtgttagagatactgcgaggtttcttcttcagcatcgcatggttgatgtagttgttacaacta

SEQ ID NO: 17622 - DNA, 332 bp, Glycine max
ctctttttgtttcttcagtttggtataaccttagccgatgtcactaggagcactagctaagttcacaggttccaaatggctcggggattgaagaagcatctcaagaggctcaatgctcctaagcattggatgcttgacaaactggttggcgcatttgcgcccaaaccctcatctggaccacacaaatctaaggagtgcctacccctcatactcatcctacgaaaccggcttaagtatgctatgacttaccgtgaaatcatcgattttctgatccatatacatgttcttgttgatggaaaaatcaagactgacaagacttaccctgcttgttt

SEQ ID NO: 17623 - DNA, 386 bp, Glycine max
cccacgcgtccgacagcattatcttaccttgcttcacaaagatatgaccccaatacacaacacacaggccaaagctctcgtcacgctcctggtacgccttctagaaacaggagggggcaatgatttggagctcaatgtttggtggatatatacaacataatctggacaaaaattcaagtatattatttaatggtcttctcaacttcaagatataggtttatagatgttaatatcattgtcctttggtggtgttctttcagttcagaacacacactttaaaaggaaaaaaaaaaacttgtggaattctggactagttctggtactcaaaactgctcccatttctgtttggagctaagaaagtacttccactttattttcacgaaaaa

SEQ ID NO: 17624 - DNA, 385 bp, Glycine max
aaggctcacttaactgcttctggttctaatgctgctggtcgttcatctgcagatgttgatggcagaaccatgtttgttagcaatgtccattttgctgacaccaaagattgcctgtctcggtattataatcccaaatgcggatgttctaaaagtgattatcgttacagatgcaacggcagggcagccaaaaggggcagctcatgtagagttcatgcgatatgaaacggcagataatgcattatctctggataacacttctttcatgtcaagaattctcaaggttattaagaaaagtgctactcctcatgaatcagctccagccatggcatggccacgctttgttaaaggttctccattcccttctgctaggttttccagacatcct

SEQ ID NO: 17625 - DNA, 392 bp, Glycine max
ttgacggatgcatccaggcgtaatcaatcacattctgtgagttggacacatgggccaagattccttctctagggtgagggacttggcatgctgaacctggcgttttagctgaagctctcaccacagccattcagggtggatacaggcatattgactgtgctagtgcgtataataatcaagcagagattggttctgctcttaagaagctttttgatgatggtgtggtgaaacgtgaggacttatggatcactttcaaactctggtgttcagatcatgcaccagaagatgtgccaaaagcattggataaaacattacaggaattgcgacttgactatcttgacctcgatctgatccactggccagtccgtatgaaaagtggtacatttggactc

SEQ ID NO: 17626 - DNA, 313 bp, Glycine max
tctctctctagcttggacgagtgaattagattcatcatcaagatgtcgtctctgatagcggaagatgtgaagagcagatcagaggtgtaccacggggacgaaatgtgccaagtgaagtccaaggagcttctcaaggaaatcgccctccccaacggccttcttcccctcaaggacatggaggagtgcggctacgacagacaaaccggcttcgtctggctcaaacaaaagaagagttacacccacaagttcgacaagatcggaaagcttgtcttctacgcgcccgatgtaactgctcatgtccaacaaggtaaaa

SEQ ID NO: 17627 - DNA, 413 bp, Glycine max
gaattctctaaaagagatctttttctgctctttgaagaaagaagggtctttgcttgattttggagatgtctctgctctcagatctcatcaaccttaacctctccgataccaccgagaaggtgatcgcagagtacatatggatcggtggatcaggaatggacctgaagagcaaagcaaggactctcccaggaccagttagcgacccttcagagcttcccaagtggaactatgatggttccagcacaggtcaagctcctggtgaagacagtgaagtgattttatacccacaagccattttcagggatccattcagaaggggtaacaatatcttggttatctgtgatgcctacactcctgctggagaacctattcccactaacaagaggcacgctgctgccaaggttttcagccat

SEQ ID NO: 17628 - DNA, 273 bp, Glycine max
gaaatggcgatggcaatggcgcttcgcaggctttcatcttcaattgacaagcctctgcgcgctctcttcaatgccggttccctctactacaagtcgtctttgcctgatgaagctgtttacgacaaggagcgacccggagttacatggccgaagcagttgaatgctccacttgaagtcgtggatcctgagattgctgatattattgagcttgagaaagctaggcaatggaaggtgctagaattgataccgtcagagaatttcacctctgtgtct

SEQ ID NO: 17629 - DNA, 427 bp, Glycine max
  modified_base (287)..(287): a, c, g, t, unknown, or other
cccactcgtcctacaagattgttttaccttgcttgacaaagatatgaccccaagacacatcacacaggccaaagctctcgttacgctgctggatcacgctctgaaaccgtgtgcgcgccatgaaacgctcgaagcgccgagtcatgattaggccgaactcgaacgtcataataaaattcctcttggtgatgcagaagcatgggtacattggtgagttcgagtatgttgatgaccacagggctgggaaaatcgtggttgaattgaatggcaggctgaataagtgtggngttataagccctcgctttgatgtcggtgtcaaagagattgaaggttggactgcaagactgcttccctcaagacagtttggttatattgtcttgacaacctctgctggtatcatggatcatgaagaggctttgagaaagaa

SEQ ID NO: 17630 - DNA, 323 bp, Glycine max
atcgtatcataaaaatctcaccctgttgtgcaactttctctctgacacacaccgaacactgaaacacacacagtgtgcagcagcagcagcatcatcaagagaagaagatggctctgcaactatgggagacattgaaggaggccatagatgcctacacggggctctccccgcccaccttcttcacccttctggccctgatcctagccctatactacgtcgtttctgggctcttcccctcttacgaccaccgtcacaacaccggctcgcgcgacttggagccccagatggagcctctgggaccccccgttcagatcggcgaggtc

SEQ ID NO: 17631 - DNA, 406 bp, Glycine max
acgcgcgattatacaaattttacgtatacacaaatgctacattgtagcgcaatgtattgatacgcgtacacccagtatgttaagatgagagcgggtccaagacgcgtatggtaggaaaggggttgtgtgatttttgaagaatcgcgtttgggagtagtcggagatggagctttcgactccgaattcttcctcgaagcacttgtccatcacgccgggttctagggttttgagaagccctctctccgacgaacagatctggaagcgcctccgtgacgcttgcttcgacgaggaatcgattaagcacaaagacaaagctgcgcttattgcttacatcgccaagctcgaagctgagatatatgatcaccagcaccacatgggccttctcatattggagaaaaaggatttg

SEQ ID NO: 17632 - DNA, 249 bp, Glycine max
tagagcgggtcctgagcctatgtcgagcgattgcgattgagtgatacaggaagaaatcccattggtaataatcccagatggagctttcgactccaaattcttactcgaaacacttgtccatcacaccgggttctaaagctttgagaagccctatctccgacgaacagatctggaagcgcctccgaaaacactggctgcgccctatgaaaggatctaagctcaaagacccagcttcgctaattgattaca

SEQ ID NO: 17633 - DNA, 307 bp, Glycine max
  modified_base (236)..(236): a, c, g, t, unknown, or other
gaaatatgaaaaagctgttgatcctcaatatcttccaacacggtctgatgttcagaaggttcttaatggctctatgaacagctttagtatttataatgtttatccaagatatttccgtgtcactggttcaggcgatgttagacctttggaagaggataatgctgttagtgctgatctcattataaatcgtgagcaacttgagtggtggggccttccgagatactaatccatcaaanttgagtagactttgtggaggtttgacgggacctatggcaatcatagtatctgaggagacaccaccgcagga

SEQ ID NO: 17634 - DNA, 434 bp, Glycine max
cttttatgaaattgatctgaacttcttttccattcttaattcatcttcaatcagcatggagaagatcacttcctctcaatttcttctcttcctttcactccttgctttatggttcacatcgattgcttttggagctgataccactcacccagaagaagtgcaagctctgaaagatatgggcaagacgcttggtaagaaggaatgggacactgacatagatccatgctcaggacaacctccctggttcacatctaaggagaacaacaatgtcacttgcaattgcactatccccggtgaaaacttctgccatgttgtaataatattgctgaaatcacaaaatcttcgaggcatgctcccacgcgaactgataaggttaccttaccttgaagaaattgacctcacacaaaactaccttaacggtactatacctaccc

SEQ ID NO: 17635 - DNA, 424 bp, Glycine max
  modified_base (353)..(353): a, c, g, t, unknown, or other
caaaatgggtggatcagtgagggacgtgaagtcgaagggcgaggtcgacgaggtggtggcgagtggctctccggttatcctccacttctgggcgtcgtggtgcgaagctttcaagcacatggaccaactcttctctcacctttccactgatttccccaacgcccgcttcttaagggtcgaggccgaagagcaacccgagatttctgaggcttactccgtctccgctgatcctttctttgccttctgcaaggatgggaagacctttgatacattggaaggagctgatccgtcaagcttagccaataaggttgctaaagtagcaagctcaattaaccctggagaatctgcatctnctggcagtcttgggatggctgcaagggcttctgttcttgaaacggtgaaagaattagcaaaggacaatgat

SEQ ID NO: 17636 - DNA, 323 bp, Glycine max
cgcgaatggtacatttaaactagagaggatctgtttgaagagatgttgcaagaacctgaagaggtagccaagaaaagaaaaaactgtcgagaactgctccgagcttatcaacaggcttttaaagtgagtgcttataatactttaatcagcattgtctagctgaagttctggattattctatatgaagtttggttctcctttaaaggtagttctacgcctttgagttcctgtggaaatgctcatgaactttgttgctcacattggtctactcacctataaaaaaagggcagccttgtgctataaaactccgtttatgcatgggg

SEQ ID NO: 17637 - DNA, 311 bp, Glycine max
  modified_base (256)..(256): a, c, g, t, unknown, or other
cccacgcgtccggaaaaagccaaaaagcctaccttgttcttatagacttggagttaactgggattggaattaagtatggagtctccaacaccaataatccctttcaacgatcaagccttctgcttttcctcactgctatattttcccacgtacttgcatccacggctgacatgaccaaacaaattatcatcataacatttcacatgtcagggataacgggatgtgaaacactcatgtggattctcattcatgactntatgtgctactttatggtcaacttgcttcttttactgctgctagccaaattcttc

SEQ ID NO: 17638 - DNA, 369 bp, Glycine max
tccactcgttcggtgtatttacctacctataccttcaagatgcagatcttagtcaagacccttaggggcaagaccatcacccttgaggtggaaagctctgacaccatcaacaacgtcaaggccaagatccaggacatggaaggaatccccccggaccagcaacgtctcattttcgccggaaagcaacttgaggacagtcgtacccttgctgactacaacattcataaggagagtactcttcactctcgtctccgactgcgaagtggcatgcagatcttcgctaagacactcaccggcaagaccataaccctagagggtgaaagcttcgactccatcgataacgtcaaggccaagattcaggacaaggaa

SEQ ID NO: 17639 - DNA, 272 bp, Glycine max
gctggaatcagtgattggggcatgctctgtgtgctggacggctgtccaaagctgaggaaacgagatgtaagggactgtccatttggcaacttaactcttctgtcaggcttggggaagtatgagtcaatgagatcactgtggatgtcagactgcaatttgacaatgaatggtgttagattgttggcccaagaaatgcctaggttgaatgttgaagtcataaaggaagaaagctatgagactcatcaagctaaaaaagtttatgtttatcgatc

SEQ ID NO: 17640 - DNA, 240 bp, Glycine max
cccactcgtccgcccacgcgtccgcccacgcgtccgctttctctctctttctaaaagcgagaggcaacaaacacataccgaaaaggcgaaaggggttttccgagtgagatctagggtttccatcgattcggagagaggatattgatagaacgacctcaacgagcaaggtcaggaagtggagtactagaacatggattcggtgccttcgaattcgcatggaaacctcgatgagcagatttc

SEQ ID NO: 17641 - DNA, 372 bp, Glycine max
gctggagaaactgaataagtatgctactgtggttcgtgttttggctcacactcagatcaggagaatgaaagggttgaagcagaagaaagcccatatcatggaaattcaggttaatggtggtagtattgcacaaaaggtggactttgcatacagtttctttgagaaacaggttcctattgatgcagtgttccagaaggatgagatgattgacatcattggtgtgaccaagggtaaaggttatgagggtgttgtcactcgttggggtgttatcccgcctccccgtaagactcacaaaggtttgaggaaagttgcttgtattggtgcctggcatcctgcaagagtttcattcactgttgccagggctggtcagaa

SEQ ID NO: 17642 - DNA, 246 bp, Glycine max
cataagtctacatgctctctcttccccttcttttcgttttctctctctaccgctacttatgatcagggcctgataatcgcagagagaaaccaatctctctgttgctcatctgtaacgaaaggttatggcctacaagataagcagaacccacttcagtcttcactatacatattaagccataaacattaacggactttagttttaagagatacatattggaagaaaaagaagcttaactatgtccgc

SEQ ID NO: 17643 - DNA, 443 bp, Glycine max
accgaaccgcaatttccacccaggcgtccgaattgttaaaggaagcgaaagaaagattgatcaaattatcgcagaggaattgaagatgggggggagagggatactgggttttgaatatggtatagttcaggccccattaggccctgatatctctgctcccccacttgttgctgcagttgccaatgctggtgctcttggacttcttagggcccctgattgggaatcgccggattacttgagggaactcataaagacgactaggaccttaactgataaacccttcggggttggcgtcgttctagcttttccttttgaggagaatttgaatgtcattttggaagaaaaagttgcagtcttgcaagtttattggggtgattgtacaaaggaattggtgaataaggctcattccgctgggatcaaaagttgtcctcaagttgggaata

SEQ ID NO: 17644 - DNA, 249 bp, Glycine max
aaccccaatgacagagagggcgcacgcgtccatctgcttgtccttcttctccctcctcatcttctctccccattcggcaaacatacaggatcggaaatcgaatctttgtttgaaacatggcttcctcctccttcctctgccccgcagcatttaccttctcacagaagccacttcaatccacttttcttcattcctcctctcttctcactctaagcattcttcctaagaaattgagaaaaccccaccaac

SEQ ID NO: 17645 - DNA, 418 bp, Glycine max
cccactcgtcctcccacgcgtccgaccttctatacttgttccttttgaaggttagaaggggcggaatacaaacaatggcagctactcatgaagatgtgaagcttttgggtattgtgggaagcccatttgtgtgcatggtccagattgcccttaagttgaagggagttgaatacaaatttttggaagaaaatttgggcaacaagagtgatttgcttctcaaatacaaccctgttcacaagaaggttccagtgtttgttcacaatgagcatcccatagcagagtctcttgtgattgctgaatacattgatgagacatggaagaacaaccccatcttaccttctgatccttaccaaagaaccttggctcgtttctggtccaaattcattgatgataagattgtgggtgctgtatcgaaatc

SEQ ID NO: 17646 - DNA, 414 bp, Glycine max
  modified_base (386)..(386): a, c, g, t, unknown, or other
tttttcagcaccaaagtttgaaacttttctcaattgggttgtagagagtttgactcatgaagggttatttttttatttttattttctctaaccaagtagaagtgcaataattaaatgtccaacatcttcttgttgttgatgtttgagattcatgtatccgattctcagtgaaatcttcttttccgggtgtatgatcaattccactgttaggcgcatgacccatttagttcaatccttctcagttgccttcctctattggttgtactacgtttcatgatttctaacccttccttagcttaataatcatctatctaaaatatcataatatcttctactagctagttttatttttattatcacaataaaatctatctgcaatatattgntatttttattttctgagaaatttgtgtc

SEQ ID NO: 17647 - DNA, 240 bp, Glycine max
cactggggaggaatggatactgaatgagttgcacgagttatgcttggcaagtcgacatgactgtgacctgtgaagtgcataaaaccagacaaagattttgggtgggtttcctttagaagtttggtttttgtatatgaacgaactattatatgattgttatatgacatgacgtgtgtattaccagtgtttttgaatgatatatggatgtcatctggctcctccaccgtctattacactagg

SEQ ID NO: 17648 - DNA, 406 bp, Glycine max
ccaagacttcactttgggacctgcttgagtccactctgacatatcagcacaggacatatgctgaagccgttaagaaagtcattgcaaaacccgttgcaagttaagctttttacagtgatggtgatgtgctacctttgagaagggtgttcttgtcttgcccaagtgttctgccatattatactggttgattttatataaaatcgtaaattttcctcctattggtttcgttagcctgtaggcaatatagcccccacatggagaagtaggaatttatacaagggcaatctgtgctctatgtaattttaatgtagagaccatgcgctgctaaacatgttgagacactttatatattacctagggaagacttttttctgtgtttttaaggatctctcgattcattgctttg

SEQ ID NO: 17649 - DNA, 406 bp, Glycine max
atactatggaatctaatccaacaaccatggacgcaaaacgcgaactcgaagtggaagacggggaactgctccacccaaacgaccacgattcaatcgtgttcggtgggcccccactcgactctatcctccccgatcacttctcccttaatcccaattccagttgcagttccaattccaattccaattcctcctccgaggtcgatcgcaacttcgacgattcctatgttgccaatcagatattcccaaattccaccctcgcaccctggaacggggattccgattccgacaccaccgtcaccaacgcccccgtggtggcgattgccgaggccgaggccgaggctttgttggaacatgatgaggaacagaaaaaaatggaaagagtggaagagaaagatgatgattaaga

SEQ ID NO: 17650 - DNA, 259 bp, Glycine max
gctagctgtaaggtgcttacataataatcatcaatatgagaaccatggttggggaactcgggtgaatgatcatacctcttgtgggagacactgaatatgtcacaattcatgatataacctaatttcggtatattgtcacaagtgatcctaggacctgaagcgccaaatgggatcataaaagggccacaatatgaccagtgcatgctacaagaatctgcacagtatagatactatctggttaacaatactttcatgtcaa

SEQ ID NO: 17651 - DNA, 407 bp, Glycine max
cttaattaacaatcaaatgtttaaggaagaatttctatgacgattcgcaaccccatgcgaggaatccgtctcctccactccttctccgtcgtcttcctctactggttctacgttttctcatgaactaactccctctcaatcccctaccctaattcctccaatttccccattttttttctaattaatcagatttgcaaaatcctaatttctctatcctaacaaaaaccccaaattcaaacaaatccaatggcttcgattccgcgtccggcgagttcgggatcttcggagggaggaggagatccggctgcgatggacgagagaaagaggaagcggatggagtcgaaccgcgagtccgcacggcgatcgcggatgaagaagcagaagctgctcgaagacctatccgacgt

SEQ ID NO: 17652 - DNA, 411 bp, Glycine max
tgcagatccaccaaccgttatggctgccttcagcggtgatgaaacggcaccgtttttcggcgttccttggcgccgcagctgccctcgtcttctcctgtatgggagctgcctatggcacagcgaagagtggcgtgggcgtggcttccatgggtgtaatgagacctgagctggtgatgaagtcgattgttcctgttgtcatggctggagttttgggcatttatggccttattattgctgttattatcagtaccggtattaatccaaaggccaaatcctattacctctttgatggttatgcacatctctcttctggtcttgcctgtggcttggctggcctttctgctggcatggctattggtattgttggtgatgccggtgttagagccaatgcacaacaaccaaaactttttg

SEQ ID NO: 17653 - DNA, 455 bp, Glycine max
gtaccgtgtccggaattgacggatgcatccactctttctgtgtcttcagtttggtataaccttagccgaggtcacgaggagcactagctagcgtcacaatcatccaaatggctaggggattgaagaagcatctcaagaggctcaatgctcctaagcattggatgcttgacaaactgggtggtgcatttgcgcccaaaccctcatctggaccacacaaatctagggagtgccttcccctcatactcatcctacgaaaccggctaaagtatgctctgacttaccgtgaagtcatcgctattctgatgcagagacatgttcttgttgatggaaaagtcaggactgacaagacttaccctgctggtttcatggatgttgtttcaatcccaaaaaccaatgagaacttccgcctgctctatgacactaaaggccgattccgtctccattctgtcaaggat

SEQ ID NO: 17654 - DNA, 367 bp, Glycine max
cttgagcgagattggagaatagattgtgttcctgtgttgtggatgatttagatagagagagaatggttggtggttaattacatcatgggtcattgtttcttttatccgaatgggttatggtttcctccatcaacaatgttcaaaagctttggtctaattgctaaagtggctctcttagcctgaaatgccaactcttttctttattctcctgctttggtttcccacctcataatattgctatcgctacttggtttccctttccataaacgcaaaacaaaagtgtctttgtccaatgaattctattttatttctctctccatgttccatctaattgttcaagggttattcatgtctggaaaaacacatc

SEQ ID NO: 17655 - DNA, 395 bp, Glycine max
  modified_base (350)..(350): a, c, g, t, unknown, or other
ctagctctgtcgttccgtcgttgccgatggcgtttcgggtgcgaagccctgacctccgctcgcgcgttcttctctctctcttgtccatcgcttccgccaatgtcttcttcgaagagcgtttcgatgacgggtgggaaaatcgatgggttaaatcagattggaaaaaagatgagaacgtggctggggagtggaaccacacctctggtcaatggaatggagacgcttatgacaaaggtattcaaaccagtgaggattacagattctatgctatttcagctgagtaccctgaattcatcaacaagggtaagacactagtctttcaattttctgttaagcacgaacagaagctngactgtggtggtggctacatgaagttgctcagtggggatgttgat

SEQ ID NO: 17656 - DNA, 474 bp, Glycine max
  modified_base (14)..(14): a, c, g, t, unknown, or other
cggacgcccttttngaaatcatacttttgaattctgcaccatacatcaatgacttgtctgtagcacgtataactggactgttgatactactcccccaacatcatatgttacagcctcatcatcttttacaagttctttaaatgtgtctgtaaacatatctttcacagaaccctgtataggtggaggtggctttggatgcaagtcggtaaatgcctgcaatcttcttgtctatggtgctggccaggtcataccatcttcctttagaattatacagccaaacctcacgtattctcttcttgttagtctatcgtctacagttcaatatggccgggcaatccttgtaatggataggaacttctgcactgaccgtgctgtcaacaactttatgaaaatgccaaattcaactgtttatatacattttgacagaataaaagtttatgtcaacatcaggactcatttaccaaataactactt

SEQ ID NO: 17657 - DNA, 374 bp, Glycine max
gtatacccaacacaaactaatatcaacatggactactacacccgcgtttcagaagttaggaagaaacctatcatggagtattccacaccacgaccaatgatgggcaactaccaccaccctaatgctcaccgtgtcctcaacgagaagattgtttatgaggaggatgtgattggaggatcccgccacaaccacatgcatcaccaccaccctgagactcatgaaagagtcaaggtggtggaatatgaacaagttcctgagaggcgcgttgtctatgaagagaaagttgcttatgacaacgatcgttactactctccaaagtattgaaattggacaaatggaagaacacctataacgtgttatcatgtggcttttta

SEQ ID NO: 17658 - DNA, 366 bp, Glycine max
cccactcttccgcgttaagctagtgtctatctgatccagctacagcatatagatcaaggaaggaaggaacgaacatgttgggtgttataaagcacaagactattcaccctgccttctcctcaatcagacacttgtcttctgcagctaaagagattactgtcagggaagctctgaactccgcactccatgaggaaatgtcagctgatcctaaagcgttcttgatcggtgaagaggttggggaatatcaagttgcatacaatatatccaatgtgctgctcgacaagtattgccccaacagggttctcgatactccaatcacttaggcttggtttactgatattggaattggcgcttcttactatggtc

SEQ ID NO: 17659 - DNA, 418 bp, Glycine max
attgaaagttcttcctggtgcaaaggttcctgctgatggtattgttacttggggatcgggtgatgtaaatgagagcatggtaactggtgaatctgtacctattatgaaggaggtgaatgcttccgttattggaggcacaataaatttgcatggcgtccttcacgtataagctaccaaagtaggatctgatacagttttgagtcagattattagtttggttgagatggcccagatgtccaaagctcccatccagaagtttgctgattatgtagcaagcatatttgttcctacggttgtttctttagcattattgacactattgggttggtatgttgctgggtctattggagcttacccagaataatggctgccagaaaatggaaatcactttgttcttgccctaatgttcgcaatatct

SEQ ID NO: 17660 - DNA, 293 bp, Glycine max
cccacgcgtccgatttggggcttttctttggaattagggcacacgcacatgcttttggttgagtgagcctcacaatcacagacagtggggaagatgtaatcccaccgagattattggttgattgattagttgattgattgataagtggtaagtgcaagggaaagtggaagtgcaagtgtttgtgtgtttgtgtaagggttttttggcatgaagggtgcgttggatcggacgaatgtggtgctccgccacttgccgccttctatttctgaggccgcccttttggcccaaattga

SEQ ID NO: 17661 - DNA, 351 bp, Glycine max
cccactcttcctcccacgcgtccgggaaagaataaattggagagagcaagagaactagttgaaaatgcagttgaatcggccccagctgatcaagtgaaaccactttacctgcaatatgccaagctggaggaggactatggactagcgaagcgagctatgaaggtttatgatcaagcaactaaggctgttcctaacaatgagaagttaagcatgtatgaaatatatattgctcgtgcagctgagatatttggtgtacccaaaacatgggagatctatgaacaagcaattgaatctggtcttccagacaaggatgtcaaaaccatgtgtttgaagtatgctgagttggaaaaa

SEQ ID NO: 17662 - DNA, 385 bp, Glycine max
tgtcattttaatcccaaccgcataataacaatttcagaattttctgggctctagagagattggcgagtttattagcggggccctttcatggtctatggcaaaggctatacttgctcctcttgagaccatcaggacaagaatggtagttggtgttgggtcaaaaaatattgctggtagtttcatagacgttatagagcagcatggatggcaaggactgtgggctggaaacatgatcaatatgcttcgtatagttccaacacatgccattgagctaggcacatttgagtgtgtcaaacgggctatgacatccctgcatgagaaatgggaacacaatgaataccccaagttgcagataggttccatcaatttcaacttatctttatct

SEQ ID NO: 17663 - DNA, 384 bp, Glycine max
cccactcgtccgcccacgcgtccgattttcttactttcctctcacgctctgccacaagactgggtctccgcaataacggaataaaaaaacaagtttaattactattatggcgccgagggatcataagacaagcaacgctaaggctaacggtaacggtaacagcggggtgaaggaggtgcattttcgtggagtgagaaagaggccgtgggggagatacgccgcggagatcagagatcccggcaagaagagccgcgtctggctcggaaccttcgacacggctgaggaggcaacgcgtgcctacgacgccgcagcacgagagtttcgcggccctaaggccaagacaaacttccctctccctttggaaaatgttaagaactcgagccc

SEQ ID NO: 17664 - DNA, 295 bp, Glycine max
cacatctcaagtcattatcatgaaccaccctggccagattggaaatggatacgcaccggtgcttgattgccacacttctcacattgctgtcaagttttctgaaatcttgaccaagattgacaggcgatctggtaaggagcttgagaaggagcccaaatttttgaagaatggtgatgcatgtatggttaagatgattccaaccaagcccatggtggttgaaactttctctgagtatcctccccttggtcgttttgctgtgagggacatgcgtcaaactgtggcttgtcgagtcatc

SEQ ID NO: 17665 - DNA, 313 bp, Glycine max
ctaacgcgtacaatatttcatataacatcacatatgactgcacatatgcagccgcatagcagacccgctaatttgctcacacatatggatgacccactattgtactcactactgtctcttgcgcttgctaacactattcataaccaagtgcctcggcaagggacgcatgcaagtacatactcaagcacatactcactcgctgagtccacagttacaaccacagttacaacccatattaattctgatagtactttgcctgctatgcaccttcataatcactttcatcattgctttgaccaatgttgtcacactt

SEQ ID NO: 17666 - DNA, 426 bp, Glycine max
cttaactagcataaaaatcacgtttgcaattctgcgtgttctttccccacccttcattatacgtacgagattcatccacccaccctctagctaccaataaaattgttcactttcactaattaattttatagtatggaaattgaagagcaaacgatgaaaatgatgatgaagtcgtcgtctaggttcagacgtatctgtgttttctgtggcaccagccctggcaagaaccccagctaccaactcgctgccatccaactcgccaaacaacttgtggagaggaacatcgacttggtttatggaagagggagcattgggttgatgggtttaatctcacaagttgtgtttgatggtggacgccacgtgttaggggtgattccaacaactcttatgccaagaaaggtatttttattttattctatttttcat

SEQ ID NO: 17667 - DNA, 467 bp, Glycine max
  modified_base (420)..(421): a, c, g, t, unknown, or other
cccacgcgtccgataacataaaatcttcctccgttcaatcttcatctctctctctctattggtgtgggttaagcaaaaatcatgggtccgatggtgctgagccaactcgccaccggtcttagcgttctagccggagcggttctggtgaaatcggttatggaccagaagcccatggcaggcccattcactcgctgccccacgtgcaacggaaccggtcgagtcacgtgcctctgctcgcgttggtccgacggcgacgtctgatgctccacgtgctccgggtcgggtcgcatggcctgcagcagttgcggcggctccggtaccggtcgacccttgccggcgaaaatcgcgattcgcccgccgaaccgcccaattaattagttcaccaattcgttgggctcgctcgctcgcttgctactactnnctttattttagcgtcagtataacattttaattttatatagcttttt

SEQ ID NO: 17668 - DNA, 245 bp, Glycine max
aatcctcttaatcttaatctcatggcttacttatacaaactaaagaaggtcttataccaccgcaacttcacacactacttcgtccttcttatccatcctcaccacaccaatactacttaccccacgttacatactgtccacacctctaacaatccttaacctattatcttatatcttacatattatatcttgcttaccaggcatgtttcaaatacactacacctatttcatcataccaacttttt

SEQ ID NO: 17669 - DNA, 367 bp, Glycine max
tccagctccagctaatcaccaatgctctcctcaactgcagcaacatctgcgtcgcgcagatcgtctccgcttcgtggtcgaacaacatctacaactctccggccgccggggctcctgcgcctcccgcggccaccgccacggacgccgctacggtgcctctccccgtcgtcgtcgccgccaacgaggacgtcgttgtctccgccgcggcagacgagaacggtgctgtacagttaaacagtagttcttattcttcatttttgaaatccgatgcaagcaaaacgattcatgccgctgaaagactgggtaggggtattgagactgatggaattaccacccctgtggttaacacttctgcctacttttttaa

SEQ ID NO: 17670 - DNA, 408 bp, Glycine max
atttttgttcgtgctagaaccaagttactcacaccattccaaggtataagttagttcgagaggtggaacagaatggggagaagactaacttccatttctgggatgcaacatgtatcaaaatctttaacaaaacggccgatcaatgttgccaagagttgattgcaagtggcgatgagatcaaggttttccctccctattttgatgaattattgggaaagacttgggctatcaagttttagtaccatgcacgatgctcaaaaaggcctacaatgtgttgctgaaccttggtaccaatatttgagagacaatgcctttagtgttggagatgagatatgtttctacttcaggcctaataaaaaagtatgaaagttgataatcagaaaacaattggcttgggatgacagtgac

SEQ ID NO: 17671 - DNA, 436 bp, Glycine max
cccacgcgtcctcccacgcgtccgataaatattccgttttgcgtttctctgcctaaaaggatggaaagatgggtcaagcactaggttgctatcaagttgatcagtcaaatgtggctatcaaggagcattttggaaaatttgatgatgtcctagaacctggatgtcattgcctgccttggtgtcttgggtaccagattgctggtagtttgtcactgcgtgtgcagcaacttgatgttcgatgtgagacgaaaaccaaggacaatgtctttgtcactgtggttgcatctgtgcaataccgagctgtgtctgagaaagcatctgatgcattctataggcttaccaacacatgggagcagatccaatcatatgtttttgatgtcatcagggccagtgtaccaaagttggagttggattctgtctttgagcagaagaatga

SEQ ID NO: 17672 - DNA, 402 bp, Glycine max
aaaatcgacaaattcagattcaaactcaagttttgaggctgattcagattctgggcgtgtgggattcataaagtcaggttcaagataaagttttagctcaattcatattctgggtgtgtgaaattggggagaaaagaattcaaatttgggggtgcaaagtggtttaatttgattaggtgtgtgttagttaacatgggtgctagtttttccattctgggtatatgcaattgaaaaattcaggttccatatctagttttgagttcaattcatattctgggggtgtgtgttaagtgttaacatgggtgctagtttttcctcttgtgtttgtgatggggatggtacccctttgagaccaatgcttggggacatacccgagagctgtgtggcattggtgttgatgta

SEQ ID NO: 17673 - DNA, 385 bp, Glycine max
  modified_base (83)..(83): a, c, g, t, unknown, or other
  modified_base (87)..(87): a, c, g, t, unknown, or other
  modified_base (354)..(354): a, c, g, t, unknown, or other
ctgactcgtccttcctccctttctttttgtccccttcaaccaatctacagccagaagctagtactcctctattcgttacaganaacntttatagagagtatcttgaatactattatcctaaaacggtatttcgaggagaggcttgtgatgatcttggaagaactttctgtgagaccgagtatcagaatggtttctactatagaaatgtgaaaaccctttttattgccatgactactgcgttttcaatgtcaaccagtactaattgtagtgttgaatgtacataggtataatgctattgatctcattttatattgattttcagtatcactataaaactttacaataattatacancttttttaaattcatttttttgttattcatt

SEQ ID NO: 17674 - DNA, 458 bp, Glycine max
  modified_base (279)..(279): a, c, g, t, unknown, or other
  modified_base (339)..(339): a, c, g, t, unknown, or other
actctacgaccttagctctgcctctgggttgaagaagcttgatgagtaccttctcccacgcagctggtcaccgggtaccaagctacaaaggatgatcttactgtttatgcagctttgccaactgctccatcagatgaatatggaaatgtttccaggtggtacaagcacattgatgctttgttgagaatctctggtgtttctggcgagggatctggtgttattgttgaaggatccctggttgcggagcctgttgcaactcccccagctgctgacactaangctgctgttgctgaggatgacgatgatgatgatgttgatttgtttggtgaagagactgangaagagaagaaggcagctgaggaacgggcagctgcagtgaaagcatctgcaaaaaaagaagagtctgggatatcatcttgtctggtggatgtaaaaccatgggatgatgaaactgacat

SEQ ID NO: 17675 - DNA, 230 bp, Glycine max
tcttccttccactcttcctacttttaaccctttcttcatcccaataagctaactttttcctacaaggtaagtattatttcacttttcctttcttcttttcttttcttcattatcatatttcaaaatcatgttcatatctcacaaattgaatattttctcatttctatttttcttctcttcttactatttcttcccctttcttttatttttatttaacaatataatatcat

SEQ ID NO: 17676 - DNA, 475 bp, Glycine max
  modified_base (55)..(55): a, c, g, t, unknown, or other
  modified_base (436)..(436): a, c, g, t, unknown, or other
cccacgcgtccgcaaaacttctctctcacactcactttctctctctataactctntctcacccgctgagggtttccttttcatcgcatcttgagtttgcaacctcgtcttgtgatttccatggagggtgctgggatggaagagaataatattattaatgatgatgataataataacaagtctgaggcgcatttgacttctgccgctgcttttgtggagggtggaattcaggacgcttgtgatgatgcttgcagtatatgccttgaagctttctgtgatagtgatccttccacggtgacgagctgcaagcatgagtttcatcttcagtgcattctcgaatggtgtcaaagaagctcccagtgccccatgtgttggcagcctatcagtctcaaagatccaacaagccaagaattacttgaggcagtggaaagagagcngaaacttatgttcaatccatctagaaatgccacaatatt

SEQ ID NO: 17677 - DNA, 465 bp, Glycine max
ctctcccattctctcgcatctcaatacccttttgatttgtgaaaggaaagcaaacatgcttgatcaggtccaacaccctacaatcatggacaaggttgctggccagctccatctccgttctggtgtttctggtattaggagttatgaaggagcctactgccaccccacaatgtaccaaagaccctcttttgggaattactcgaatgctgcattgcagtatcctgtgatgccctcatgcaaagctactatggatttgtctgctgctgcaacaactgcctcccccgtctttgttgctgctccagcagagaaaggccattttcttatagactttctcatgggaggtgtttcagcagctgtctcaaaaactgctgctgctcccattgaacgtgttaagcttttgatccagaaccaggatgagatgatcaaaactggtagactttctgagccctacaaaggtattggtga

SEQ ID NO: 17678 - DNA, 111 bp, Glycine max
  modified_base (89)..(89): a, c, g, t, unknown, or other
tctagatcgcgagccctttttttttttttttttttttttacttgtttggtcgtttcctgtcgtgtagattcagatctactttgttgcanagcagcttactttgttactttc

SEQ ID NO: 17679 - DNA, 421 bp, Glycine max
gtggattgacacatttgctgaatgggtggacctatggccctcacactttccaacttatggtggcacttactgtctccaaaatactcactgcattggtgtcatgtgccactgccataaccctcatcactctgatcccattgcttctcaaagtgaaggtcagagagttcatgctgaagaaaaagacgtgggatcttggacgtgaggttgatcatattatgagacaaaaggaagctgcaatgcatgtaagaatgcttactcaggagatacgtaagtcactcgatagacatacgattctgcataccactttggtggagctgtctaaaacacttggcttgcaaaattgtgctgtgtggatgcctaatgttgataagactgagatgaacctcactcatgaattgaatgggaggaattttaatttgac

SEQ ID NO: 17680 - DNA, 328 bp, Glycine max
cccactcttccgctgacgcgtgggtttccccccccctcttcgcgtcttttcgcaaccgagtagatcttgtatactggaatagtgtgccaatatgagctctcggtcaggcaagggacctgccgtcagaagttatcggaggagaaagacagcgttggaccttgaccttaaccgtgtaccagctggtgagaatcgtgagcaggaaggaccttcgactcattcggtgcctcgagaagttcaagttgaacagcagcagcaggctactcaacctccgatgattgacgtggaagccattgatgattatgtttgtgaatgtaccccaagggctttt

SEQ ID NO: 17681 - DNA, 202 bp, Glycine max
tcgtccactcttccgacatgtaaccatttctacatcccacatagcttaatgatcactaccaggagcgatcatcttactctaccgaactatttctatctacctaactacaccagctcaagtgcaagtgcttctcaaaaatcatgagcttaaccgcatgactctctacgacacctactcaacattcttaaccgcttctgccaac

SEQ ID NO: 17682 - DNA, 377 bp, Glycine max
tgataatgtaaaattactttaattgtcagtatataatccattttctcaactatcaattgcagagagaaattatcacttttggtgaaattgtcttgagctagttgaaaatgatttcggtgtgcactcaaagatggagtatatatgatgaatttcttttcagggatattctccactaggttcaccagcagctctcaaaagtgatattcttaagaatcctgttgtcacagagattgcagagagattggggaagacaccagcacatgttgcccttcgatggggcttgcaagcaagtcatagtgtgcttcctaagagcactaatgagtccagaatcaagggaaattttgatatctttgactggtctattcctcaagatttga

SEQ ID NO: 17683 - DNA, 427 bp, Glycine max
  modified_base (397)..(397): a, c, g, t, unknown, or other
ctcaaactcaactcatctttccttcgatccctgaatctggacgttactaaagcagccgagccatccactcaccattttaaaagccaacacagaaagcacagaaccaccacatcgttgccttcctctaaacgataaatttttgggattctgaaactagtgatacattttcttgcatgaaggcagcgtattgaggaattcagttagtgtattggaagatctagttcaacatgtcttctgtaagcaagggtgataggaaggcttccattgatgcagcatcatggctgttcaatgtggtcacgtctgtgggaattattcttgtcaataaggccttgatggctacatatggttttagttttgctacaactttaactggtctccattttgccacgacaacctngttgacactcatttctaaatcgttgggata

SEQ ID NO: 17684 - DNA, 471 bp, Glycine max
agcaaagcaaagaagtgaagagagagagagatcattctagagacagagagaaattagcgttcagtagatattagtggtgggtatgtgtgtgtgtgggtttgggtttcaagagaggagacatgcttaacttcaacccaacacttcaagtacttgcttcttcatacccttaccagatcccaaaggtcacgatctaattttaagtgattagtctgatgagcattttgaaggttacatgaagcaatttctctttttgaatcttcctgacaccgagatcaattgttcacaagttgattgcaatcactcaatggctcattcttcttatccctacggcgatccaattcttgcttatggaccacaagctattagtcatccccaaatggtaccccagatgctgggactagcatccaccagagtggcattaccacttgatcttgctgaagatggaccgatttatgtcaacgcgaaacaata

SEQ ID NO: 17685 - DNA, 309 bp, Glycine max
gagactctctctttctatctcccacagtgcacatcttgaagttgcaaagcgataatggatcgagaggtgtctttatctcctctttctcttcccatctttacttacttggcatcattctgcttccttgctatacaagactcacattcacctactacacttattgataccacaactactaagatacagcatcttcacaatgcatctgctctacttgatagttaccgatctgatactctgaacttgtaatggtaagaactcaccgcacatcttgatattcttgcaaaatacttgcataggcgcttccacgaa

SEQ ID NO: 17686 - DNA, 386 bp, Glycine max
cacacttcacttccccaacacattcttctttttttttttttttcacactcttcactcacttcgatcagcatcaattcatgtacacggcggaggttttccgcgtcttcgccgtgcgcggcggcgacgcttctccagcagtggcccccgccaccaccaccaattgcttaaaaatagtagctttcaacacacccactttccgtaacggcttgaatgcgaggtgggcgaaggcgttgacgctctgtcgctgcagcgttgactcaaagtccgtcggcgacgaagttttctcggtgactcagtcgaacaagtccgatgtggactacctcggggagagcaccaaaagtgatttgaacgtcaagttggagcatcttgaaggctttggaattgat

SEQ ID NO: 17687 - DNA, 405 bp, Glycine max
cccacgcgtccgctttcttcattctcctcggagctttgctcgttattcttctttttcttttggtttgttcgtttcgttcggaaaacgcgtatgctgtgccgtcgtttttagtgggtggatgggaacgacgtcgtgtgagtacgtgagctgggaggaggtgtttatgtcgaacgacaaggggaggagggaggttcattacttgcttaaacgacgaggcggtggctcggatctggccgttttgggaaaagagaagagcctcaaacacatgtcgtatcgctacgccattcgaaacacgtcgtcgtttcggccttactttaagctcatgtcgcgcagagaggttgttaattggttggattcaattgtttcagattcgtcttctggggatgcggctatggtgggaaaaca

SEQ ID NO: 17688 - DNA, 439 bp, Glycine max
cccacgcgtccgaaaaaattgaaaaattgaggaggcggcaacaaatgcaagcaatgcttgctgttcagaaacaacagcaagaattcggccatcaagttcctagcactaataaatcaatgaatgaaaaatgtgccatagaaatccatagtcaactctgtgatggggctgatcctgaaattgaagatttaagaacagctctagatccaccaactgagcaagatgattctaatacaatgtctctggcaattgatgatcattttgttgaagacaccatactgtacatgcttcaggatgctatatcaaagttagatgtcaaaataagactatgcattagagatagcttgttccggttggctcaaagtgcaatgcaaaagaattatgctaatgatacaagcagtacaaacaacactagcagagaagaactaaagttgctgcaaga

SEQ ID NO: 17689 - DNA, 385 bp, Glycine max
  modified_base (9)..(9): a, c, g, t, unknown, or other
ccacgcgtncgtgattaccgtgttcgtgttggaggggtggccgaaagagaccagttcccaaaggtattgtttatgggaagcccacaaaccatggagttacccaactgaaatttcagcgaagcaagaggtcagttgccgaggagcgagctggacggaagctgggtggacttagggtcctcaattcttactgggtgaatgaggactctacttataaatactttgaggtgattctggtggatgttgctcatgctgctattagaaatgatcccagaatcaattggctcgccaatccagtgcacaagcacagagagctgcgtgggcttacctctgccgggaaaagcaacatgggtttacgtggcagaggacatctatatcacaaagcacg

SEQ ID NO: 17690 - DNA, 378 bp, Glycine max
ttgaattctcgacccgagcgtccgcatgctctaattgagatgtactatgatctggtttctgggggaactgagaatcacccggttggggagagtctgaagaataaggagaccgatggctccagagttgagaaggtgttgtaagcagttcatattgcatctaataaaaacactgttcctggagatatgtctgccatgcttcctgttctcatcactgactggaacccctgctcttactcctataggatctgttgaggaggattttgttaaggtagcacatgctcttagatgcatcagtgcagttggctgtgaagattaagggtcagagcacaagaacaaagctctaggacttcttgaccgcaattcaatcatcttctacct

SEQ ID NO: 17691 - DNA, 388 bp, Glycine max
gttctggagccagggcagttggatttccacagatggcaaatgctgcagccattgcagcggccgttggtggaggtctacctgctgaaataactgggacaaatgacaggtgtacagttcttgtatcaaatcttaatcctgatagaattgatgaggataaactattcaacctgttctctatttatgggaatattgtgagaattaaacttctccgaaattaaccatatcatgcacttattcagatgggagatggttttcaagcagaattggctgtacactttctgaagggagccatgttgtttgagaaacgattagaggtcaacttcttcaagcatccgaacataacccatggtgctgacacacatgaatacatcaattcaaatctcaatcg

SEQ ID NO: 17692 - DNA, 356 bp, Glycine max
  modified_base (87)..(87): a, c, g, t, unknown, or other
  modified_base (340)..(340): a, c, g, t, unknown, or other
gcaagatagagtcaatctgctgaaaagattatcaggtgatataaatgaggaggtggagaagcataacctcatgctggatcgaatggngaatgatatggattcatcaagaggggtcctttcgggcactatggacaaatttaaaatggtattcgagaccaaatccaaccatagaatgttcacgcttgtagcatcctttgttgtgctctttcttataatatactacctcactaggtaatttgatctttcattcaactgccatctttatgttaggtccaagatgacgctatttcctctattactgtaaataatgctactacctctggctctgtaagataactgntctgtataaaggtttg

SEQ ID NO: 17693 - DNA, 420 bp, Glycine max
cccacgcgtccggagaaagagagtgaagagagaagaagatggcgtcgagcggagcggggccggtttggagggcagcggggatgacatacatcacatactcaaacatatgcgcgaatctggtcaggaattgcctcaaggaaccctacaaggctgaagccatctctcgtgagaaggtccattttgctctctccaaatgggtcgacgccaagcctgaaaaacctagtacgcctcttctcttttattactgcgcttccaccatcaatcattttattttcatattaatcgatcctctcattcccctaattaaattaccctaaatcctgcatcaccaatttgtatactttatgttcgtcataaccatctcatgctaggattcattcccgtataatgcggattaatttgtgccagatccatttctct

SEQ ID NO: 17694 - DNA, 422 bp, Glycine max
gtggtcgctggtttctggcagacagtgggtctgtgcctggagatcttttacttataataggagaggcacttacccatgctactgttggcctatgtcctgctgcatcatatagagcttctcctgattattttttgagtcctaatggtggaggaaggacttctcttgcatatagactcatgccacagggcaatgctatattagattgttccctaattgcagcagctggccatgttattccccaaagttatgttcgaatatctgtaagccaatttatggatgaccttgttgtcgaagaactgataggcaatagatgggtttataaaaacaatggataccttatggtctcgtgcaatggaggactcaaccaaatgagagttgcgatatgtgacatggtggctattgccagatatttcaatgtcaca

SEQ ID NO: 17695 - DNA, 230 bp, Glycine max
  modified_base (34)..(34): a, c, g, t, unknown, or other
  modified_base (39)..(39): a, c, g, t, unknown, or other
  modified_base (49)..(49): a, c, g, t, unknown, or other
  modified_base (74)..(74): a, c, g, t, unknown, or other
  modified_base (93)..(93): a, c, g, t, unknown, or other
  modified_base (104)..(104): a, c, g, t, unknown, or other
catacttttcattctccttaaccttttatctctncaccnaacaaccaanccctcaaagaaagacttttatttanatctgcccccaccctctanccccacctttnttattcaaaatttttcttacaactcatacaataaatcacatctcttaaatttaatcataaaaaaccttttacttattcatccctatccaaataaatatatcctttattttatacccttccccccaa

SEQ ID NO: 17696 - DNA, 448 bp, Glycine max
  modified_base (243)..(243): a, c, g, t, unknown, or other
  modified_base (374)..(374): a, c, g, t, unknown, or other
gagacactcatgtgctcttttcagatactaaggcctgcggaacacagaaagcctaagggggggtttgggagcaaaactacattcaaggcaattcttgatgctgctagagtatgaccccattgagctgacttagatcaataaagtttgtaacatagcaaaaaattgacatggacaaattgatatccgtgttcactccaatgtgaaggaagggtattacaactaccaatataatgaagaacgtangaatattatctctgctttttcttttcaagtatagctgaaagtgtttttctgtgctggcgcattctcaatatgtaccatgttgtcaacacagatttagggggtcaggttccatttttcttttctttcagctntttgatgtgagagacagttatgcaattctccttttcatatctcctgttgtattataaatggcagcatacttttc

SEQ ID NO: 17697 - DNA, 457 bp, Glycine max
  modified_base (444)..(444): a, c, g, t, unknown, or other
ataatatcaggatagcagagacttaacatcaaataatccaagtgtaagtttggctagcacgtggcgaggcatttgttctcctgacatttctgtgactcttccaaatacttcaccaaagtcctttcggtctgacaatacaatttctgaaaggtcacatgcgccaccagacccaacaaacatgcaagtgaaaggatctgcttcagatgtatttcgtgtcagtgtttccagtgccccaagtacatctagtcatggatctgcacctgatgactgtgatgctttgggggatgtatacatatggggagaggttacctgtgaaaatgttaaagttggtgctgataaaaatgtaaattatgtcagccccagggcagatgtacttctccccagaccactggaatccagcgtagttttagatgtacatcatatagcatgtggtgttagacatgnctctctagtcact

SEQ ID NO: 17698 - DNA, 321 bp, Glycine max
ctcttcccatccctcacctcaacgctgcatcttcacgtcgtctcacgaggtgcatatagtagagagggaaaatgagtcgaggaggcgcattatcatcagcgaagggaaagaagaagggtgctacattcaccattgactgtgcaaagccagtggaagataagatcatggacattgcttctctcgaaaagtttcttcaagagaggatcaaggttggtggcaaagctggtgctcttggtgacagtatcactgttacccgcgagaagaccaagatcattgtcacctctgacagtaacttttccaaacggtatttgaagtacttga

SEQ ID NO: 17699 - DNA, 307 bp, Glycine max
gccaagcgtccatacaactcaatcaacagattggtcaggccaaaggacagcattgcgttgcgaggtagggctatgcgaaacgctatgagattaggctcaagcctcaccatttggcacagccgtttgcacgtttcgtcgacgtcatacctcgacatcgtcggcatcatctttatcatcgtgctcaatgacgtcaagctcgacgctagctacgtcaccatgtcattcaccaaccaagattcctacaacgttattaaaccgtctacagtagacgaggataaaaatgatgaggatctcgtattggagttac

SEQ ID NO: 17700 - DNA, 407 bp, Glycine max
ctgtcccatatagttgttttggcaccgctgaccagacagaggtcttacgacaacgtcccacagcccggtgccatcctctactactcccagagaacttccaacggaggccttctcattactgaagccactggcgtctctgacacggctcaaggctatccgcaaacccctggcatatggactaaagaccatgttcaagcttggaaacccattgtcgatgccgtccacgccaaaggcggtgttttcttctgtcagatttggcacgttggaagagtttcagattcagtttatcagccaaatggacaagcacccatatcttctacggacaagccactcacaccccaaattcgaagtaatggcattgatcaagtacaatttacccctccaaggagattaacgactgatgaaat

SEQ ID NO: 17701 - DNA, 406 bp, Glycine max
ggaaatctaaaatccccgttcgatctcacggagacggacctctctctcgcgcggacgcgttgcgtgggctcgctcactctcagactctcgcgcaacccccctctcgtggacgcgttgttgcagatcctcgttcgttctcgctctctcgcgtgagtttttgaatttgttggtctatgtgcaggaccagccccgaactcctgctcaatccccatcgatttatccctggaagaaagtaaacaaaatcctgtagaatagctctttgtggcttttaaattgaatcgaggatgggagacgaagcaagtgaagagcatcaaaggtcgctagcagctcctttcatatttttcgtggttctcgcatttcagtttgcttctcattggattgatcactttaaagagagtggatctga

SEQ ID NO: 17702 - DNA, 345 bp, Glycine max
cccactcgtcctcccactcgtccgcccactcgtccgcccacgcgtccggccttactgagattggttggtcactataccttctctcttcagtcttcattatcacactcatcattctctaatttctctaacatggcttcaaccgcttctgaggttagccaacaagtccaatccaacaacaacagaccaattttcaaaagcgtgaaagcactaactgaatcaccagaactcacttccctcccaccctcttacacctacaccaccaactcagatgatgaaatagtggcagacccagatgaagatgatccaattcctattattgactattccctcttggtcactggaaca

SEQ ID NO: 17703 - DNA, 366 bp, Glycine max
  modified_base (303)..(303): a, c, g, t, unknown, or other
gtctagctctctggaagaccaagacgctggataaggattacgaggctctgcatgcaaggtgggagaatcttaagtccaactatgacagcctcctcaaggagaaagacaacttaaaagctgaggtggcgagcctcaatgagaaggtgcttgcaagagggaaacaagaggggcacatgaagcagcaggctgaaagtgaagaagaaacaaaaagattattgcatttgcatgaacatgaaccaccccagaggcttttactggaatcagtttcggagggagaaggatccaaagtctcttctgttgtcnggggttgtaaacaagaagatatcatttcagccaggagtgatattttggattcagatagtccac

SEQ ID NO: 17704 - DNA, 375 bp, Glycine max
gcttgatggactcaaggctggcgttagctcaagagatattgtccacattcaaaacgccgggggtcttggctatgcaatgaatacatcggaggagcttaattttgtaaaagaagttgctgccactactggtgttgttcttgacccagtatacagtggtaaggctgcttatgcaatgctgaaagatatgtctgaaaatccaaagaagtgggaaaggagaaagatcctcttcatacatacgggtggcctcctaggattgtatgacaaggtcgatcagttggcttcttttgttgggaattggcaacgaatggatgtcaatgaatctgttcctaggcaggatggtattggaaagatgttctagagaaggaaaatgaaaaa

SEQ ID NO: 17705 - DNA, 237 bp, Glycine max
ttttgttgcttcaaaaaaaaaaaaaaaattaaaaaaaaaaaaaaaaaaaaaaaaaaaaaaagaaagaattataaaaaaaaaaaaaaaaaaaaaaaaaaaaaatgggccgtccgttctaaataatccaaatttccttccgcctacatacaaccaaatagaacttcaataggctcaccaaaattaaattaactgtccgtcgttttaaaacttatttacttgaaaaacctttaaataacc

SEQ ID NO: 17706 - DNA, 129 bp, Glycine max
agtccctttcctttacttcgctcgctcgcacctctcatcacaacgcagctcgtgtcgagaccacccctccttccccctctcttctcgcgcacccggacgtccctacctcaacacacctgagagcattcg

SEQ ID NO: 17707 - DNA, 318 bp, Glycine max
gcagggaagactgtctctgggaacaatatgaggcattccaaagatggaagcagcccatcactgttgatccactatgctggtccaatgaaaacctctgaagatactccaacaaatggatctactgtgccccctggcagacgccttgttgttccactgcagatttgtgttttgcagggtttgtcttttgtgaaggctcagcttctttcaatggagtttcctgctcatgtcggtgaaactcttccgaagttggatgacttaaataacaagtctactgatgttgaatcagaaacaaaaatggacagattggtgaaaatagat

SEQ ID NO: 17708 - DNA, 361 bp, Glycine max
ggaggactgagcttctttttgtcaatggcctttaccgtcgtatatcttgtcaagccaaggcagcttggagatccctcttatttgtcatggaataggagcccaggagggcactgaccaaagaaacttgatgttcccaagatttacattgcttgtgcattatgcaaactacagttgcgtttgtaattttgtacatcaatactcatacatgctaatagttaggtgttattattatcctctaccccaaaaaaacaaaattcttttattgtttttcggtcttttgcatcagaattggtatatcttgtattttaagacaaaaattggcctatacctatatatttgctaagtacttttattcaatttg

SEQ ID NO: 17709 - DNA, 164 bp, Glycine max
gtcatgattggcataattttgccattattttatttctaggtattcacaagattgtgttccaatgcaagccattttttggctataagagtctctggacagttaaaaatttgatgcctgtacattgcaaattgaattggtgatacaggttggattatgttattttc

SEQ ID NO: 17710 - DNA, 303 bp, Glycine max
aagaaattgcagaagcagctagcaataccaattgcagcctgtgattttgcagaggggaagtggctcgtcactgaggaagagaaaacagtaagcacttctcaaagatgaggtgttatatttttgctacttgtttaggcaacaatgcagtttccatgctccatgttttattcttcatattgcttcttacctattgtacttattgacaatacatgagtacacattagaagcttccttgcattcccttgagtcatgaattggaaatcttatgtctatgtggcactgcaataaaatctattatttttt

SEQ ID NO: 17711 - DNA, 377 bp, Glycine max
  modified_base (25)..(25): a, c, g, t, unknown, or other
actcctatacttccaccacctccantattctcccttccaccacctgatcaatactattatagcaagcctccttctcaacaacactctccacctcctccttcacctcattcttcacctccaccaccacattcaccaccaccaccaacaccattttatccctatttatcaccaccaccacctcctccacttcactctcctaccccaccactttattcaccaccacctccacccccatcttcaccaccttttatagaatcaccttctcctccaccacctacaccacctttttaaaatcattcaccacctccaccatcaccacactttttcaccttaccatctctcaccatcaccatcaccacccatcttccccattcaat

SEQ ID NO: 17712 - DNA, 428 bp, Glycine max
ctcttcgagggtttgggtttctcttcctcccttggagaaaaagaagagccaccgctgcgacgccgttcgtgcatttttgaggtgccgctgtcatgtttgggcgtggtggaccaaggaggagtgataactccaaatattatgatattctcgggatttccaaaaatgccagtgaagatgaaatcaagaaggcctatagaaaggcggctatgaagaaccatccagataagggaggagatcctgaaaagtttaaggagttaggtcaagcatatgaagttttaagtgatcctgagaagaaagaactgtatgaccagtatggtgaagatgcccttaaagaagggatggggggaggaggctcgtttcataatccatttgatatatttgaatcattttttggaggagcaaagcttggtggtggtggtagttcccga

SEQ ID NO: 17713 - DNA, 331 bp, Glycine max
gtggttgaaagttaagaagtagcaaagatgtttccattcgggcacaagggtcaaaagataaaggggactatggtggttatgcagaagaatgtgttggatatcaacagcatcaccagtgttgacgggatcgtcggcaccggcttagacttcttaggcagtgcactcgatacagttacttttttagcctcctccatctccatccaacttattagtgctaccaaagctgatggtgggaaaggaaaaggtggaaaggctacaaatttgagaggaaagataacattaccaaccatatgagcttaagaagaagcatacgatgctcaatttgattggg

SEQ ID NO: 17714 - DNA, 354 bp, Glycine max
aaacaagccaagtgaaagagagaagaaaagtcaaagacaatgtcagggatcattcacaagatggaggagacccttcatgtgggaggccacaagaaggatgaggagcacaagggtgagcagcaccatggtggagaatacaaaggggagcatcatggtgaacacagtactgaatacaaaggagagcatcatgttggtgagcacaagccggagcaccatggaagagaagagcacaaagaggggttcctagacaagatcaaggacaagatccacggcgaggaaggtggcgccaccgccgagggcgagaagaagaagaagaagaaggggaagaagaagcatgaacattgccattacagc

SEQ ID NO: 17715 - DNA, 251 bp, Glycine max
ctcaaaggctgatgtgtatagttttggcatggtgcttttggaacctggtgagtgggattaggaactttgagatccaaggttctgtggttaggagtgaagagtggtacttccctggttgggcctttgataagatgtttaaggagatgagagtggaggagattttggatgggcaaattatggatgcttatgatagtagggcacactttgagatggttaataggatggtgaagactgcaatgtggtgtctgcaa

SEQ ID NO: 17716 - DNA, 436 bp, Glycine max
gttgttttttattctttcaaatacattccaaaatctcttggaaattgcgagattcactgctgatccgagcagcagattttgggttctgacccaattattcattttccccaactgggtcttgtggattttttgttggggttttaaatttcgtgttgctgggtttgaaagttatttcctttcttccccgtctggattcaactcccaagtatttgctttaattggggtatttttttatttatcagaattgttaggttgctttgaggttttccaaggcttgaaagctgaaaatgacgattagtagtcttgcacctaaggcagagaggaagaaatcaaggaagagcaaggcagttgttaatgagaatgcacccttgttgccaaaaagtcatgttcaggagagtgatgctgggtttgatgatttcaatggagcctcattttc

SEQ ID NO: 17717 - DNA, 224 bp, Glycine max
  modified_base (92)..(92): a, c, g, t, unknown, or other
cccacgctttctcccacgcgtccgcggactcgtgggtgaggagcatggcatatccatgggggagccaccaaagggggatgaggaggaccgcngatcttctttcgttctccaatccaaaggtgaatggtggcatgcggggtttcacttaacgaccgcaattgttggacccacgatacttaccctgccatacgcgttcaagggattggggtggggacttggattta

SEQ ID NO: 17718 - DNA, 151 bp, Glycine max
ttccattccatcacaatgttcaaaacataaaggagacgattttttttattcagaacaatctcttagatatcaacaccatcaccatttcttacgctatcttctgcacccacttaaacttcttatgcattacactctattcaattactttttt

SEQ ID NO: 17719 - DNA, 381 bp, Glycine max
  modified_base (89)..(89): a, c, g, t, unknown, or other
gaaaaagaaaagagagagtgagagacaaagagagagaagggaagcaaccaccataccgtgacagcgttgacaaaattagggctcattangaatggaaaatgccaccctttcacattctaaggtcatattcaatcagaaaagcaggtgcaaatttagttgaagtatgacaggttttgtgatagttgaggggtgggagggtaactttttgtcctacctagatagggatttcgatggaagagatgtcctttgcggttgcagtgccattaagagtaggtaattgtaattgcaattcagtctgtgataacccaaccacagtagttccccacatggatgtatccagatttaagctgattggggatacaaggttgttatctaattctg

SEQ ID NO: 17720 - DNA, 306 bp, Glycine max
ttgacgcgtgggctgttacggattatcatcaaagcaagttaacaaaatttgggtgcgtcctggatggacccttttgccccctctccctcaccctccactaactcctcctttttggtttttataaagcacattcccaatagaggagggtccctacacaacacaacccttcaatgacgtccatggccactttcttcgcccaaaccttcttccccttccactctctctccaaaaccttcgatacccatttcgcccctgccccgaaagtcaacgtctttgtgaacttcatggcgaggaagcacgtttggg

SEQ ID NO: 17721 - DNA, 438 bp, Glycine max
cccacgcgtccgtatttgggtacatgttatttggggattcaacccagtcagacattctgatcaattttgaccagaatgctggttcagcagttggttccttgctcaatagtttggtccgtgtaagctatgccctccacatcatgctggtgtttcctctcttgaacttctctttgagaaccaacatagatgaagttctcttccctaagaagcctatgctagccacagacaacaaaagatttatgatcctcactctggtgctgcttgtattctcctaccttgcagctatagcaatcccagatatttggtacttctttcagttcctgggatcctcatccgcagtgtgccttgccttcattttccccggctctattgttttaagggatgttaaaggtatatcaacgagaagagacaaaattattgcactgataatgattatac

SEQ ID NO: 17722 - DNA, 402 bp, Glycine max
cccactcgtccgaacctatcaagtgattcagccaatcaacggtgacccattcattggaggcggggaaaccccagttacatccagcccttttatcgcatggtacttgtccaacctgcccgcatacagaaccgcagtgagcccactactaagagggatcgaggtgggcctggcccacggataccttctggtgggcccattcgtgaaggccggtcctcttatgaacaccgagatcgccggtcaagctggctctctggccgccggtgggcttgtggtgatcctcatcctttgcctcacaatctatgggatttcatccttcaacgaatgatccccatccactgctccgtcgctgaccttgacgggccgcatgaaagagcccgatcagctccaaactgctgatgggtg

SEQ ID NO: 17723 - DNA, 359 bp, Glycine max
gccttgtactgattaacgagaatggacaaggaagtggagcttggttcccttgaaggtgaaatggccacccagcacatttcacaaccacagaagcgcaagggtggtcttgttaccatgcctttcatcattgcaaatgaggcacttgcgagggtggcaagtttgggccttttgcccaacatgatactgtatttgatggggacctacaggcttcaccttgcccaagcaacccagatacttctctggtcccatgctaccagcaatttcacacctgtggtgggtgctttcattgctgattcttatctgggtcgattcctcgctgttgggttgggttcggccatcacttttctgggaatgacact

SEQ ID NO: 17724 - DNA, 400 bp, Glycine max
  modified_base (10)..(11): a, c, g, t, unknown, or other
ggtccggaannttcccggtgtcgatcccagcgcgtgccagtaattgtttttttaatttgaaataaaatgtccgggaatcaatccacatagaattgagtgagacccctccatgggtgggagggcacatagaaatgaggagcacaatatgataacatccatggtgatgcacaaaggtgaacacaaaggagaacaccatggtgagcacaaaggtgaacacaaaggagaacaacaccatggggagcacaaggagggacttgtggataagatcaaggacaagatccatggtgatggccatgacaagggtgagaaaaagaagaagaaggacaagaagaagaaggagcatggacatgaccatcatggtcatagcagcagcagtgacagtgattagatcttatatgtt

SEQ ID NO: 17725 - DNA, 190 bp, Glycine max
tcgtccacgcgtccggactggcgtttgtttggtgtgtttttcgtgtgcgtcgaaccctcggcgttggttaattttgttttgtgttttcggatcaacttgtttcgcgttcggttgcggggatcttcggtttaggtaaatgagtggtaaatgagtggtttttgagcagaagcaagtaaaagagaaagggatt

SEQ ID NO: 17726 - DNA, 341 bp, Glycine max
cccactcgtccgctcaaacgtcccatgcattcatgttatttgaaccttgtgactgttagggctacattgtatctctggcacatactatcaaatccctactgcctacgatccttattctgatgcaaatgctgatgactcacttgctgagtcaataggagtatgtgcatattcgtgattctcagctaaatcttaattttagcctgacaaccgttcttgaatccaaatacaaattcatttctaacaccatacttatagacacatataatgagttctgaacaaatggtacagttattcacttcccataactatctcatgctattcaacttctatgttatcatgac

SEQ ID NO: 17727 - DNA, 329 bp, Glycine max
cccacgcgtccggtcttgtataattcttttctatgaccctttacacactctcttgtccaggcctaggtgtctttactgcttctatttatctttcaccatataactcttctccatcacacacacacacactactgtgctgctaaccatggcatatttcacttcttagtcttcatctctgacacacattccacccatttcagctacttattcttctgcagctttctacgattctttcgaagactcctgcagtatatgctcagagcccttcagcgttcatgacccatctactgacacctgtcgcaaacatgaatatcatctgcattgcatta

SEQ ID NO: 17728 - DNA, 387 bp, Glycine max
cttgctagggttttaggaaaagacactgtctcgcgagtgaacacaggttacagcaatgggggtcggtggtagaattgggaatttattaagacagacagcaagcaggcaggttagttcagaattgcgatcatccccttcgttttttcaggctatacgcagtatgtcatctgctccaagcacaaagctgtttatcggaggtgtttcatattctactgacgagcaaagtttgagggaagctttttcaaaatatggtgaagttgttgatgctaggataattatggatcgtgaaactggtagatccagaggatttggctatattacatacacttcggttgaggaagcatcaagtgccattcaggccttggatggtcaggacctacatggtcg

SEQ ID NO: 17729 - DNA, 318 bp, Glycine max
cccacgcgtccgaaagctagcccccagatctaacgtctaatggtttttgttaactgtgtagggtagaataccctataatcacagtcgtgaacaaaggtgaaaaaacaatgtctcactgtgccgcaaggtgtgccacaaggagtgccacgaggcttcttaacctaacgcgcgctctctccacggaggcgcgtgggcaaaagatcgagcgcatcgccacggagcttctcgacctcaacaggttcgagaggcacgatttcacggtcctctggcggctcaagatgggtctgcaccgctacagctctcctgtggctggcatga

SEQ ID NO: 17730 - DNA, 259 bp, Glycine max
ctacgcttacttccactcttcctactgaatctaacatcacgctcaataccaaatatctcttacaaagcactcgtgttaaaaccgagaaggtattactccttccgcaaatcattaacccttcactccctctgctcaaacatcacctaatacaatcaatatttacccaaactaacttttcttcaattctatacacctcaactatacaccattatacccatatacttcattaaaaacttaaacacatacttcataaaatttt

SEQ ID NO: 17731 - DNA, 347 bp, Glycine max
agaaaatcctcacccattttcttcgtagccaaacactctgaaattctcagatatggcagggcaagcgtatgtggatgatcacctactgtgtgaaatcgaatgtaaccacctcactcacgccgctatcatcagccaagacggaagcgtttgggctcagagcaccaacttacctcagttcaaacctgaggaaataactgccatcaataatgactttaatgagcctggatcacttgctccaactggattgtatatcggtggcaccaaatacatggtcatccagggtgagcctggtgctgtcattcgaaggaagaagggtcctgctggtgttactgtgaagaataccggtg

SEQ ID NO: 17732 - DNA, 328 bp, Glycine max
acgcagatattaaaggaatggtggctaggggaatatgcatcacaaggagctcaataaagccaggtgtagcaaattgctcggtggtgtatcctcctagatctttgtatcctgaacagttgacatcaatcaaagctcttcaaataggatcaaatcttgctttttgtccctcaagaacctttaattcatacttttccactatttgcaatgatgccgattaaagaaaaaaacttcttaaaacaaacattaatgcctctcttacacctgctgtttctggaaactcttaaagtattccaagtgttcaaagtgatagttaagatattaaacccat

SEQ ID NO: 17733 - DNA, 234 bp, Glycine max
gtcagagaagggacggataatgccgaagcagctgaggctcaaaggaatgaagaagctagggctgtttcttcacatttgggttcaactccagaagggctttcatcacccgcatccttggcagaagttctacgttctaccagacaaatgattgatcaacaagccggcgaatgcctacttcaactatcagggcatctggagaatcaagcaaatgtaacggatcccttgttgcggtca

SEQ ID NO: 17734 - DNA, 435 bp, Glycine max
ctcttttcaattttcaactctctttggtatttaacttccaccccaactctcctgggactggtgcatttcctgttggctcccatagagtgtggccgtcacatcccaggatcattatgagttgtggctgctttggagcctcaactctcaagaggaaaaggaatccttctcgtactcctaatgagattgatggctttccacttgataatgttaagaatttctctgataaagacctgagactggccactgataactataatccaagcaaaaagctaggacgaggaggttttggtactgtttaccagggaactttaaaaaatggacaacaggtggcagtgaagacactttcagctgggtcaaagcagggagttcgtgaatttttaactgaaattaaaactatatcaaatgttaagcatccaaaccttgttgaattggttg

SEQ ID NO: 17735 - DNA, 133 bp, Glycine max
ttccgtcgacccagcgtcgctaattgtgggagctcggctctgatgcttaagggcaaactcctgtgccgtaagtaacatggccctaggctaagggtatgacagttgacactaagtgcaagatgataccgtgtaa

SEQ ID NO: 17736 - DNA, 388 bp, Glycine max
agaagatcgaacgaaggctccttccattattccattcagcgattccatggtggcgagaggcgtgccggcgatggcggtggtggccgttgccgcccttgacttgacggaatcctccaactggtggcgggacatcaaccgctccccgctctggcaggatcgcatcttccacctcctctccatcctctacggaatcgtcgccgccgtcgctctagttcaattagttcgaatacaatggagagtgccggagtatggttggaccacgcagaaggtctttcactttctcaatttcattgtgaatggggttcggtgttttggttttgtcttccgtcgggatgtgcaaaagttgcagccagagattgtccaacatatcttacttgacatgcctagt

SEQ ID NO: 17737 - DNA, 376 bp, Glycine max
gaaaaatataaccgattctttcctttgtttgggctactggccatccgccggaagtttcgggggtaataccgatattttagcaacaaatctaataaatcttagtgtagtgttaggtgtattggttttttttggaaagggagtgttaagtgatttattagataatcgaaaacagaaaatcttgagaactattcgaaactcagaagaattacgggaaggggccattgaacagctggaaaaagcccaagcccgcttaaggaaagtcgaaacggaagcagatcgttttcgggtgaatggctattctgagatcgaacgagaaaaattgaatttaattaattcaatttatacgactttggaacaattagaaaattacaaaaac

SEQ ID NO: 17738 - DNA, 360 bp, Glycine max
ccaagttcactttggtggcagttgaacgagtttgcaaccccacacacaaaaaccaaaggctgagaaatgtcatccccctcgccggtggccacggtggtctccgccgccgcgctgtacgaccgccccaaagccgtgaaagaattcgacgaaaccaaggtcggagtcaaaggtttgatcgattcgggaatcagaaccatcccccctttcttcgtccacccgcccgaaaccctagcggacctcaagcgcggaaccaaacccgggtccgcgccggagatccccacggtggacctcgccgccgaggagagctcccgcgccgccgtggtggagcatgtccggcgggcggcgagcaccgtgggattc

SEQ ID NO: 17739 - DNA, 364 bp, Glycine max
gaaatggtactgctcgtgcaattaattggtgtggttgtattgtccaagatccacatccagcagtgcgtgctcttggatttcttcccgaagaaggtcatggtgtatatgtggcaaggtggtgtcatgggagtcctgtacatagatatggtctatatgctcttcagtggatagttgaaattaatggaaaaccaactccaaatatagattctttcgttaatgtgacaaaagaactagaacatggcgagtttgttcgtgtaaagacaattcacctcaatgggaagccacgagtcctaacattgaatcaagatttgcattactggcccacctgggaattgagatttgatcctaataatgcgatgtggca

SEQ ID NO: 17740 - DNA, 237 bp, Glycine max
acggattttgtgtgtgcgcctttgtcttgatcattgtgctgttaatagttgtttggatacagaacgggggggatgaatgtacttagagactagaatatcatattttgatgctttattttgttttgaaatgggtggtataaacattatatgcttcttgttgagaaacctatgaccatccatctttttgagattgattgaggtaagctgactttacactattttgtatgatgcccacac

SEQ ID NO: 17741 - DNA, 380 bp, Glycine max
cccacgcgtccgcccattgattccgaagagaaaagaaaagatgtttgagccacaacagctatgcactggcgcgaagaccgaggaattcgacctcgaatcaggagaaaccctctacccagggctgagcgtcggcgagaaccagctccgatggggtttcatccgcaaggtctacggcatcctctccgcgcagatcgtcctcaccaccctcgtctccgtcaccaccgttttctatactccaatcaatgacctcctcaagggcaattccaccctcctcctcatcctcctcttccttcccttcatctttttgattcccctgttgaagtaccagcagaagcatcctcataattacatcttgcttgcactcttcaccgtgtcgatca

SEQ ID NO: 17742 - DNA, 368 bp, Glycine max
tgataacagatttgctccgtcaaaccggcggcaccgccgtcatcgactgcggtctggcgacggagctgtagcgccatggcgccgacctcaatgatcctctttggagcgccaagtgcctcttttccttccctcacctcattcgccaagtgcaccttgattacctggaaaatggtgcagacattataatcacagcatcttaccaagccaccattcaagggtttaaagccaaaggctattctgatgaagagagtgaagccttgctcagaagcagtgttgaaattgcacgggaggcacgcgaagtttactataaaaattgtgctggatgtcgttcgggtgatggggatgatgatggtagaatcctcaaacaa

SEQ ID NO: 17743 - DNA, 437 bp, Glycine max
attgcagagtgttattttgagtatcagcatcaatggctccaattgcagtgggaaacgtgattgcagacggcattttggcttacttggatgaagaaaacaaaccccaaactgtctccattcactctctcgccaccggcaagaaagtcatcatctttggggttcccggtgccttcactcctacttgcagcttgaagcacgttcctggcttcattgagagagcagaagagctgaaagggaagggtgtggacgaaataatctgtatcagtgtgaatgatccatttgtgatgaactcatgggccaaaacattcccagagaacaagcatgttaagttccttgctgatggtgcagccaaatacaccaatgcccttggtcttgagcttgacctcactgacaagggtctcggcgtccgctcaaagaggtttgctcttgctgtggga

SEQ ID NO: 17744 - DNA, 450 bp, Glycine max
cccacgcgtccgctccaatgccgcagaagtacattagatgtgcgcagagtgattatggaggctacaatgtgacagagccacctattgatgcgccgcgagatcctctgtataaaactgagagggagatcctcaaggtgtacttgacaaaacactacaaaaatcgaaggaagggtgattctgagtttgtgcttgattttgaagagatttatgttattgattccaaatccaagtcaattaccagagccaaagttttggtaacagctcctggagggagaacaagagatagaaggagtgacttgcttgttatatctgatcgtgggagctccttcaaaataatacatgcgagtgaaaaagaggatccaacgactgtcatagaaaagcaggagtgggagcataagcagagagaaatggagagacatcttaagaagcttagagacttcaacatttcaa

SEQ ID NO: 17745 - DNA, 383 bp, Glycine max
cccacgcgtacgtccacgcgtccggcttaagatcacccaagagagaacctaagagacacagcacagactcacacaaagagttacaagagaaatcatcatggcatcagcagcatctgggtttgtgttgtcacttaatgttgcagctgccaccacaaactcaagggtggtcatgttcaacaccaagaacaacacttctaggtttgatgtaaaggcttcagatgagcctgcagcggcggtacccggcaccgtcacacctccagctgaagctgaagctaaaccaaagccaccacctattggccccaagagaagtgctaaggtgaagattcttaggactgaatcttactggtacaaaagcaccggctcagtggttgctgttgatcaag

SEQ ID NO: 17746 - DNA, 227 bp, Glycine max
acgcttacacttccataacttaatctatctcaatactgatctgcatccgactaccattaccccacggtcagctccttttgcttattaactctctagaaacatgccaagacaatccaaaaagtttggctccaacctctaactaaattttaaacccaataacgttccttatcactcataatgacattaacttcatcaaccaaaacttctaattaatcccatataacatt

SEQ ID NO: 17747 - DNA, 271 bp, Glycine max
cccacgcgtccggggttatggtacacatgggtatgattctcgcactaatggactgtcttggttagctgttgacagtaaatacaaaactaggggaagaagtggtggctactttggctatggcaatgagaacgcagatggtttgaacgaactgaacagagggcctagggccaagggtggcaaaaaccaaaaaggttttgcaccaactattctggcagtcaaagggcagactttgcctgcaactttaggcacagatgaagagaaggacaagact

SEQ ID NO: 17748 - DNA, 364 bp, Glycine max
actcgaacctcaattccgggctagacctacgctttcacttttatatatgaaaaaactcatactcatttcattcagccagataccatgtcccaaagaaaaagacattttacttattaacctattgaacttgcaaagggattcaaaaatttggtccaacccttaatcaatttaaaccctacaaggttcttaccactcattatgacattaactttattagtcaaaacttctagtttatcccatttaacatttgaaaaaagtcatattctgtaattacattttggtttcaaatctttcactttactcttgcttgatttctttaaaggttttatattttcacaaaagatttaactttaatttatattac

SEQ ID NO: 17749 - DNA, 210 bp, Glycine max
  modified_base (19)..(19): a, c, g, t, unknown, or other
acgcccacgcgtacgattnttattccttctttgtttcttcactttcttccatacacataaccagctcttgtcagaccgttgtcctcaaagttggtatgtcatgtcaagggtgtgctggagctgtaaacagggttttggaaaaaatggaaggtgttgagtcatttgacattgatctgaacgagcagaatgtgacagtgaaaggaaatgtgc

SEQ ID NO: 17750 - DNA, 201 bp, Glycine max
acgcccacgcttccataacttcttctgtctcaacctcatcttcatcctactactactacccaccgtctggtcctttgctgatcgagtccacaaaacatggcagacaatgaggattgaaaggataagactactcgtcggaattaattgcatgttttatctcttacaacatcaacatattcaactgcttcttgttctgattaa

SEQ ID NO: 17751 - DNA, 319 bp, Glycine max
acgaagacagatttctgcaattatacggcaacgtataaagtgctgtgttctgcggctctgttggctgtgatgcacttccggcaccgctgtttcccatagtaaggttatttccacacactcagttgtatgacacgtgtctcttgatctgtcagatttcgtcgtcgtcgtcagtacgcctccctcggccagtaaataggaaaacaagggttcacaatgtccggcccaggggtacagttgcacattcaagatcaccatgtggtgatggataatggcataatccaagttaccttatcaaatccagatggaattgtcacttgga

SEQ ID NO: 17752 - DNA, 313 bp, Glycine max
tctccatacaaatccctctctccatcgccctttgagtttgggttccaaaaggattgttccggcagtttgctactttaatactggagacaaatctgactccaaggaatcgggatggcctattctcaggcgatgggatgtgccttggcaatggcaaacagtttcactgacctctcttgcctgtggattgggttatgtgttgacaggtttgactgaagcaattgccttaccatatctcaggatcaaacctcatgtgctaagtttagattacaaggcaaatatacttttattcgatcagagcatcacaactgctgtt

SEQ ID NO: 17753 - DNA, 465 bp, Glycine max
cttccgcagctggtagtaacccccttaggatgcatctgaattaagtacacacaatctaaaacaaaggtgaacgtaacttgtgggaagagtcttagttcaatttctatataatacatctttggtgagggatgaacttgattaagcttcaaatcaaggattaatcttataagttatctaattagtcgaaacttatgggatactttaagaattgtaacggtggttaaaaaaaaactgacgtatgagggaagagtcaagtaaatatattgagtcccattctctctctatttaatttgtatcgataaatataaaaagtgttgttgattgagtttttgtggttcgtttggtttcgattgaagaacccttcttttgctccacgtttcttcactctcaaccgttcgactcgttcgatatcaaccgaattgactcaaatctctaaggaaagtgccacactgaattctctttttt

SEQ ID NO: 17754 - DNA, 207 bp, Glycine max
gaagaagaaagagaggcttggatcactaccatatctttggcaatctgtaaggcgctagagctgctggatatgttgaagaaagaggaagagatgctttctgctgttaaggatagacaatccaaggatggggataaggagttctctaaggatgttcttgatgaacgtgccaagaaagcagaagcttggcatcatgattctgcagttcgt

SEQ ID NO: 17755 - DNA, 431 bp, Glycine max
ctccttccatacatttgctgtatggtctgagagctgctcttgatctgatttttgaggaaggacttgaaaatgtgattgcaagacacagtcgtttaggcaaagcaaccagacttgctgtagaggcatggggtttgaagaattgcacccaaaaggaagagtggtacagtgacactgtgactgctgttcttgttcctgcttacattgatagtactgaaatagttagaagggcatggaagagatacaatttgagcttaggtcttggactgaacaaagttgctgggaaggttttcagaattggacatcttggcaacttgaatgagttgcaactgttgggatgtctagctggtgtggagatgatactgaaagatgtgggctatcctgtaaagcttggaagtggagttgctgctgccagtgcatacttacaggacact

SEQ ID NO: 17756 - DNA, 360 bp, Glycine max
ttcctccttgccccttctcatatctccgattccgttaactcccaaaactcgaacgctagccctaaccctaaccataaccctaaccccaactattacaattaccatcctatataagcaatcatttcgactctctttctcagctccacggctgctattctgcctatgcttaatgaaccacatctttcgctaaaacttcaccctctttacaaccttaacaacttagtcaacaccttctagccacagatcttcactaatcttccatagataaagagttctcatgaaaatcatgactttgatcaacattaaaggcaacttcctgcaactcttatatcaaatgtctattattacctaactgaactt

SEQ ID NO: 17757 - DNA, 339 bp, Glycine max
cgcttctcgaagccgctgctggacgatgatttcgaggctgggttcagagaattcaaggaggattcggaaatcgaggatgttgatgacgaggacgatgaagacgaggaggagttgaagaagaagccctttgggttctctcgctccagcaacaaggctgcttctaagcctctctctcgtggatcagcaactgtggaatcaaaggggcaagctgagaagtgtgccaagagaaagaggaagaaccagtatcgtggaatccgtcagcgtccatggggaaagtgggctgctgagatccgtgacccacgaaagggggttcgtgtttggcttggaactttcagcact

SEQ ID NO: 17758 - DNA, 313 bp, Glycine max
acgcgacagacaaacaaacaatttaccagctatacttgttccttttgaaggttagaagtgctaggatacggacaatggcagctactcacgaagatgtgaagcttttgggtattgtgggaagcccatttgtgtgcagggtccaaattgcccttaagttgaagggagttgaataaaaatttttggaaaaaaatttggccacaagagtgatttgcttcttcaatacaaccctgttcacaagaacgttccagtgtttgttcacaatgagaagcccataacaaagtctcttgtgattgttgaatacattgattagaca

SEQ ID NO: 17759 - DNA, 210 bp, Glycine max
cgcttttcaaacccgttgctggacaatgatttcaaggctgggttcaaagaattcaaggtggattcggaaatcgaggatgttgatgacaaggacgatgaaaacaaggaggagttgaaaaaaaacccctttgggttcttttgttccagcaacaaggctgcttttaagcctttttttcgtggatcaccaactttggaatcaaagggccaacct

SEQ ID NO: 17760 - DNA, 172 bp, Glycine max
gaattcccattccgacccacgcgtacgcgacaacaacaatgtcggcgaaatctagatccagttctacaacaaacatggtgactcttaggtctgggtcagttctcccgcaacgcacgcaaaacatccgataagtataccatgttgaacgccaattaccacttggtcaacttca

SEQ ID NO: 17761 - DNA, 388 bp, Glycine max
tcgaaaaaaacctaccaatggctcccgcaaaggcagagaagaagcccgcggagaagagaccggcggagaaggccccagcggagaagaagccgaaggcggcgaagaagatatcgaaggaaggaggaagcgagaagaataagaagagaacaaagaatagcgttgagacctacaagatctacatattcaaggtgttgaagcaagtgcaccccgacatcgggatctccagcaaggctatggggatcatgaacagtttcataaacgacatcttcgagaagctcgcccagtagtcatcgcgtctcgctaggtacaacaagaagcccaccattacttccagggagatccaaacagcggtgcgtttgggcctaccttgggagttggccaaacatgc

SEQ ID NO: 17762 - DNA, 367 bp, Glycine max
ctggaagaaagatcatcattgatacctatggtgggtggggtgctcatggtggaggtgccgtttcagggaaggaccctaccaaggttgacagaagtggtgcctatatcgtgaggcaggctgcaaagagtgttgtggcaaatggccttgccagaaagtgcattggccaaagtttctaatgcaatggtgttccttaacccttttcaatggttggggacacttattgaaactggaaaaattcttgccaaggaaatcctcaaaattgtaaaggaaattttcaacttaaaacttgaattgatcaccattaacttgaaccttaaaaggggtggccataggttcttaaaaacagttgttaatggacactttgaaa

SEQ ID NO: 17763 - DNA, 400 bp, Glycine max
cccacgcgtccgactgaatctaacacgaggctcatgacggaatatgtcttagagaccagtggcgttgaaaccgagaagtgaatagtcttgcggcaatgcattagcccttcattccctctgctcgaacaggagctagggcaatgtatatgtacaggaaagaactcgtctacatggttttcgaccaattttatactccagtattggcatggctatgattaaaaaaaaaaacagttagatcataaaatggttgggataagttcgtgttacaaattgataatgaacaaaatatattgttaagccctccatgataattttgggatacttggagcaccaaaattatagtggtaatgttttcaaggcttggttctgaagacagctttgaccaatttgtgtgtaaaaa

SEQ ID NO: 17764 - DNA, 314 bp, Glycine max
cctcccgttatttaatattaaatttctatgtaattgtttgttgtaataatcattaacttactcaggggccgggggttgtcctgatccatcacaacactttgtcacttaaattcaaaaaaatggcgttaacaatgtttcgtaagaacatcatcacccactacttccagtttgcttcttctttgtcttccttgcctctccattcctcaatctacaaccctctctctatgtctctgtcttcatttcatatccaaagtgttagtggtggttgtgggttgccatatttcatacctggagctgtgtattttgaacacaac

SEQ ID NO: 17765 - DNA, 254 bp, Glycine max
attccgacgctacgacctacgcgtatctcacacgcgtcctcatatgcaataatgttcgagatcatccacactatttcatagagcatcgatgtcctagaacactagattgaggatcacaaacgagtacactttgattagcaaacattttaactcgactgattactctcttaacttcacaaaggtcttcacaaacttaaacaccaccattgacagcacatttagttacttgtgtatatgatcattgactagatcca

SEQ ID NO: 17766 - DNA, 238 bp, Glycine max
acgctttttctctcattccattcacattctcaacccaacacacaacttccaaccatattctctggccacgtgctcacatggactcaaagagaaccctagagctcacgggtttatcgttggaggagctccacgtggactgtaaacacgccactgagagcctctacgtggtggtacggccagagacaataaccagctactccacggccacggccaccgaaagcggtggcaacccttcttg

SEQ ID NO: 17767 - DNA, 410 bp, Glycine max
cccacgcgtccgcccacgcgtccggtccctcctcattttccttcaggccctccttctcatgttcctgtctatgaaatgaatcctatgatgggtggtcctgtctttgcttatggacctcatgatgagtctgcatctacaacacagtcacagcctcaaaaaagtactacatctgcatcaaggccaattgggagctggcaacagtgccattctggtgtggaatctttttatggacctgcgacagggttcactgggccttttattggttcttctggaagcattccaagaattcaggggccaccacacatggttgtttataaccattttgctcctggtgggcaatttggtcaaggtggcttgagtttcatgggaaccacttatatcccctctggaaagcatccctaattggaaaa

SEQ ID NO: 17768 - DNA, 337 bp, Glycine max
aattcgcggacgactcacgcctctcttcatgcgtccatgtgagtctaatatttgcaatgcccaaaatgtaaccattcctgcacaaagccaaaaactatgatctggataaagtcactaacatgcccaatcctgatgctagtgtaacccaccatgattttaatcgcgtcaacccccacagtgatgactactctattcatggctgtgtttccaacccttattctaatcgcattgctatttgctaaatcaaatactcctgtaacagtgctgtctacgacatagcatgatgcacaataccttacccacagacacttagtgcaagtgacacatcaattctata

SEQ ID NO: 17769 - DNA, 381 bp, Glycine max
gttgggttgtcattgttggcatagcaacaagttgacactaatctaatcacctgcgctgcgtctctttgtattctacgatggacacgcgcggccacgatgaggaggagccaccgaaacctgtggttctgatcacaggatgttccacgggagggataggccacgcgcttgcacgcgccttcgctgagaagaagtgcagggtggtggccaccagcaggtcgcggtcgagcatggcggagctggaacacgaccaaaggttctttttggaagagttggatgttcagtccgatgagagcgtgcgtaacgtggttgatgctgttgtcgacaagtacggtcgcatcgacgtgctcgttaacaacgccggtgttcaatgtgtgggcccac

SEQ ID NO: 17770 - DNA, 428 bp, Glycine max
ccaaactcaagttcaccaaaagcaaccacaacaagcacttctcttatttcctatgacaccctattacagattcacaagcgcagacacttcaaatggctctggaagctcttcaatcacccagaactgccactccatcgtttagtccctttgaagaaaccaacctcagttacttggagacaccgtggaccaaaggaaagcgttctaagcgtaaccgcatggagcagcaactgcaacactcttcatgcaccgaggaagagtacctcgctctctgtctcatcatgctcgctcacggcggcgccagcggtgtccccgccgccaagcctgctgtctccgacaacaattccgcgccgctacccgccgacaaactgagctacaaatgttcggtctgcaacaaaaccttctgctcttaccaagcactcggtggacac

SEQ ID NO: 17771 - DNA, 408 bp, Glycine max
aggacttattcttcacagggaaactctactaatttgccttcaccacactcactctagagtaacattcgcagcctgcgtatatcaatttccactagcccgaacgcactcacttcaaagatttcttgagaagcgaattaacaggttggctaacagatccccttatgccttaacaaaaaaagtgattcacaccatagacaacaactcttattctgacgacactccacattatggttccttgaactagcactttctttaaggcaactaatgttaagtctgctttataagaagtggtactattctggaataacatttgcatgcatgtagaaccatacaaactcatataactatgttatagctctcgagaccatatcatatgcctaattagagaacttgaatgtgtcaactatg

SEQ ID NO: 17772 - DNA, 399 bp, Glycine max
cccacgcgtccgaaaaatcttgctagagatttcttccatcactaagccacaccggaccacggttagcaagtatcaattgggttatttttggtcatctaataaaaagcaaaattaagcaagagttactttgaagaagacttgtacaaagatgagttcagcaagcataacttgagctgtggcagcaagtgttggagttgtggaagccttgaatgaccagtgcctgtgtacgtggaacattgctttaagatcagcacaacatcaagtgaaaaaccatgtgagatccttgtctcacgataagaatgtttcttcttcatcatcttctgctgtggtttctagtagattaaaggaagatggtgcataacagtcacaggaatcattgacgaaattaatgtactttaa

SEQ ID NO: 17773 - DNA, 383 bp, Glycine max
gattaaagctcatcctaggcacaaggttttccacaagcaaatgcctcctgaaccgggttagcttgcatcaaggcttctccaatattcacctaatctacgctgcactgcgctggaagcatgtgcacatcctcattacaatgaactttgaccaccaaatgcccgtgacaactaatgacacatccaaatgcctccacttaaaaaatctaaacctaggatagctcaaacttacactcaaccaatcaatactctcacatccacagcatgtattccaagttcaagccaattaactctcctcattctgtcgcttcatagacacaaacggataatgaaaccatcagtcaacctatatagagatcaaactgaatcaacacacacgctgtttt

SEQ ID NO: 17774 - DNA, 401 bp, Glycine max
acgcattaacactcatcttaggcacaatgttgatcacatgcaaattcctgctaaagcagcaaaggttgcataatagcttctgcaatcttcacctactctactcttcactgctctggacgcatgttcacatcctttctataatgaactttacaagccaaatgcccgaatctctaatggccatccactgcccccactattcaacttcatactggaattagctggagcatcacctgaactgatcaatatgctcatcccaaaacatattaagcggcagatgggtctcagctttccgcattctgccggttcataaattcaaagggataatgaaacgatgagtcaaccgatatagttatcaatgtgaatcaacagacaggctgtttgttgcctatatataacctttt

SEQ ID NO: 17775 - DNA, 362 bp, Glycine max
cccacgcgtccgcccacgcgtccgattgaattcaaaaacttaagttcattccttgtgtttgactttgttcctcaaaaccaaacatgtcgaacacatgcggcaactgcgactgcgctgacaagactagctacaccaagggaaacagctatggtgttattgtagagactgagaacagttacatcgagactgttgtcatggatgttccagcacctgagcatgatgggaagtgcaagtgtggcactaactgcacttgcacggactgcacctgtggccattaatgaatatatactaaaatgtaattgccatgtgtttggcaatacaaatatccaaataatgtaatcttcgtatgaataaatgtgtgt

SEQ ID NO: 17776 - DNA, 151 bp, Glycine max
aattccacatccgacccacacgtacgccaatgagcaccacattgtaagattcgctagtgatgcacttactattgcaagtgatgctaggatggacaacgttgagagtagtataatttcaaatatattatccatggactttcatgcctcatat

SEQ ID NO: 17777 - DNA, 238 bp, Glycine max
tataattaggatatcactccttgacatagctctcatcgtttcaccgatctaaatatcgtgacgtgggtttaaatagacgctataagaaacctttgaactaaatcattcatcgttattagatcatactttttaccgatgacatgcacactttaattctatacatatcattctatcgtacattcatatgcttctaccttactaaatccagctcttgcaacatgtgcactacagtttattt

SEQ ID NO: 17778 - DNA, 351 bp, Glycine max
ccaatatattccattctctctgtgtatttccctacctctcccttcaagatgcacgtcttggtcaagaccctgaccggcaagaccataaccctagaggttgaaagctccgacaccatcgataacgtcaaggccaagatccaggacaaggagggtatccacacggaccagcaacgtctcatcttcgccggaaagcagtctcgaggacggccgcaccctatccgactacaacatccagaaggaatcaacccttcacctcatcctccgtctacgtggtggcatgcagatcttcgttaagaccctcaccgccaagactattaccctagaagtcgaaagctccgacaccatcgacaa

SEQ ID NO: 17779 - DNA, 421 bp, Glycine max
ctctactgcttcaccttctgctctagaaaattcagtggtgatacatggcttcggctactgtctctgtagccaaaccagcccttcaggcaaatgggaaaggcttctctgaattctctggcctccgcagctcatcaggcttccttcccttttctagaaaatcttcagaggatttccattctgtcattgccttccagacctatgcagttggaagcagtggaggatacaagaagggtgtgacagaagcaaaactgaaggttgccataaacggatttggaaggattggaaggaacttcttgaggtgctggcacggtcgcaaagactcccctcttgatgtcattgccatcaacgacaccggtggcgtgaaacaagcctctcaccttctcaagtacgattcgatcctcggaacttcgatgctgatgtc

SEQ ID NO: 17780 - DNA, 320 bp, Glycine max
accgaaccgcaattccggggtacgcctacgctttcactaaggtaagggaaggaatcaaacactagatcaatagccagagccaaagctccagaggagatgcaatgagaaaagggtcctaagcaaccacagatggtgctcgcagacaagctattacttttacggcaacccaatgtgcaagacattgacaaggtttgctacaaataagatgtcttcactcatgtcaaggaaaactatattgtccctctgtacgaaaccctagtcgctgattccatgttggacttggatcgtgccctttaggactctatgcgcgctaaaattga

SEQ ID NO: 17781 - DNA, 295 bp, Glycine max
tcttcctgatacttctatatcgccagctgccacactatcatcttattttttatattttttagttttgttttttttcatttatttattatacttttttatctatttttttctttttctctatatttttttctttattcttattatttattttcttacacattttctacttgtaactctattttataccaatctttactattatctaaataatttatttaattaaatcctgaaatctattctaaatccctcattatacaaaaaaaaaagctctaccgctcatataaatccaatctta

SEQ ID NO: 17782 - DNA, 389 bp, Glycine max
acgctttctggtagcagaagcttgcttgatagcaggtgcaaccaagaatgcctaccacaccaagtaccgtggaatgatttatgctcataacttctcatgtgaagccttgcggaaaggtgtcttcattgccggagcggttttcgttgttgcaaccatgattcttaacgtatactattacatgtacttcacgaaggcaatgacaacaccagtttctcataaggcaaatcgggtgagctccactgttggaatggctggatatgcatgatggactatggctgaaaaaggtaacaaattgagtcttaatttcagtggatatctctatgattgtcactagcaaaacggtgattttcaatttgggttttcttaggtgtttataatgtttttgtgga

SEQ ID NO: 17783 - DNA, 420 bp, Glycine max
ggacgaggttgtcacggatttggagcagctgcaggttccccatgtgaatcaaaagcgttgtgtgaatgcctctcgcggtcgtagaaaaagtgctgatgattttactcatggtagaatcgccacagcttctgtttccccgctctcacatgacattgcaaatacacgtccttgaaagctgatgcatgtttccacatgaactcaaacacgttcatatcatgcacacatgctatctaataggttttacgtatgtatatatttcaggttctgtttgtaatatgtagtcaaaatagctggaactactgcaggtactgtcttatttggctctggttagctcaattttggtgttttttatattggtataaagttttccaactttattttggtacacttgcaatgtgcagttttcacatatatagaact

SEQ ID NO: 17784 - DNA, 395 bp, Glycine max
caagaaagaaagaaagaaaaaggtagagaaggagagagagagagagagaaagaaaactgaaggaaagaaaaaaaagataagactaattaactacatttttggtttggtttttcttcatctcgcaggagacacgaagagacaagttacatcacatggttaaaacttgttaaagagttttgtgtttgtgtgtgtgaaagtagtttaaggttgtgggggtggttgaagcttttagctttagctttgcagagatgtcaagtggtggatgcaacatcatagtgtggttcagaagagatctgaagatagaagaccattacagcactgacagcaagagtgagagctggtgctggtgttgcagttttcatatgggcacctgaagaagaaggacaatactaccc

SEQ ID NO: 17785 - DNA, 427 bp, Glycine max
caaaactccactcaccgtgttaatcaaaagtacttgttttctagttgtccatacgatcccgatccatcaacgtgacaattaagatttgtgattataagaagattgaattaatgtgttgtacctcttgctatctccgcctatgcacctataagagtatgtagtttctactttgttgataaccacatgctctctacatcttacaaagaagcatcctctatagactaatgggtttgttcagaagtaagggtgtgatttataggccagtgaaggatgttaacttacgtcctgatagcactgaattctatctccaagccaatgtcaaagctccccgcatgactggaatcctggtcaagattttcacttggttcttggagtcttcaatacttggacccttgctattgtatatattgaaaggaaacaatcttat

SEQ ID NO: 17786 - DNA, 371 bp, Glycine max
cccacgcgtccgcccacgcgtccgcccacgcgtccggtgtgtgtgttttttgtgcttgggggagccttgtactgattaacgagaatggacaaggaagtggagcttggttcccttgaaggtgaaatggccacccagcacatttcacaaccacagaagcgcaagggtggtcttgttaccatgcctttcatcattgcaaatgaggcacttgcgagggtggcaagtttgggccttttgcccaacatgatactgtatttgatggggacctacaggcttcaccttgaccaagcaacccagatacttctctggtcccatgctaccagcaatttcacacctgtggtgggtgctttcattgctgattcttatctgggtcg

SEQ ID NO: 17787 - DNA, 381 bp, Glycine max
gtcaatcttttgtgcaaccttactcgaacgcctacggctgctaaatattcaaagcgtatggctcaattgtactgaatggtcaacagaatacaaagcaagctctcgtttactatgtagaatgagaatgatctatctcaaaactgtttcacatgccaacttctgcgaaccaatgcatacaaatagtgcctctaatagctgctaagatagaacaatctcagaagcacactgacatccattaagagaacatcatgccaatatcctatcagtaattagctgcagtatcgagttcaagcacaccttattaatgcttgcatctatgcactctgcaatgaggcacttgttgctataactaatgcagtagaaccatatcaggaactggat

SEQ ID NO: 17788 - DNA, 243 bp, Glycine max
ctttctgacaacataaccatcacttgatagcatgtgcaaccaagaatgcctaccacaccaaagaccagtgaaccatttatcctcataacttctcaagtcaagccttccagaaaagtctcttcattgccagaacaacactctctcatacaaccatcattcttaacacatactaatacatgaacatcaccaatgcccttacaactacactcacttatactgcataaccctgtgatcttcactttt

SEQ ID NO: 17789 - DNA, 253 bp, Glycine max
accgaattccaattcgacccacgcgtacgcgcgtttgcaatccttcgccgtcatgtgatcccatgagaacgaatagtatgtcctgctaaggacggggtatcacactttttcctgtgcccgcatgcccatctaaacactgtcttgactagagcagccacatcgacgaatccaaccatctaagtgctattcaagtctaaacacacacacttgaacttattaacttatcacatagaccactcctataccctatcgc

SEQ ID NO: 17790 - DNA, 210 bp, Glycine max
acgcaccctaacatttttcccatcaaattttatgtaaaattcccaaatctatatttaggcctttgatctgttacaccttttaccccaatcaaaaccaacacaacgcctcaaaaaaaaatcagtgcttagataaatatacactgtcacattcactgtacccatgtaccacatcattattgcatagtattatcattttaccttatcactata

SEQ ID NO: 17791 - DNA, 392 bp, Glycine max
cccacgcgtccgagatgttagagcaaaattagcaaaagatttaccctcaatatcaggggtggagtcacatgacgctaatgtagctgaaaggcaggaaggcacagaggtagtgcaaccttctatgtctgttatggcaggtcctctgctttcaatgcaggactctatgaagtctgatgaaatccttcgctctccaaacaaagatggtttggacattgtggacattgattcagtggagttaaaggatcctcaagtttggagttcatatgcccctgatatatacaatagtatatttgtcaaggagtttgaaaggagaccgtcaagtgattacatggatatgttgcagcaagatatcactccaagcatgcgtaggattctgattgattggcttgtgg

SEQ ID NO: 17792 - DNA, 309 bp, Glycine max
caattcccaattcgacctacgcgtcacgactctgacaattcttccatcaaattttttgtaaaatttccaaatctattattagtactatgatctagtacaccttttaccccaatcaaaaccaacacaacgccacacaaaaaaaacactacatagtaaaaaaaacactctcacatacactgtacccctgtaccacatcattattgcttaatattttctttttaccttatcactatacccgcttaccctgtttactctgttataattactcttgctattgggtgcccttcgttttcatttttgagaagcttt

SEQ ID NO: 17793 - DNA, 134 bp, Glycine max
acgctcacactttggcggccacagcaacaataacaatggcagcctcactacaagctgcatctacgttgatgcaacccaccaaagtgggcatggtcactcacaacctcaaatctactcaatgcatttctaaagct

SEQ ID NO: 17794 - DNA, 411 bp, Glycine max
tcgagaatatcttgagcaaccagacattcccaatacatggagagcaatggaggcactgtatgagtcacacaaggctagagccataggagtgagcaatttctcttcaaagaagcttcaagatttgttagatatagcaagagtggttcctgctgttaaccaagtggaattgcacccaggatggcagcagccaaagttgcgcgcattttgtgaatctaaagaaattcatctatctggatattctccactaggttcaccagcagctctcaaaagtgatattcttaagaatcctgttgtcacagagattgcagagagattggggaagacaccagcacaagatgcccttatatggggcttgcaagcaagtcataatgtgctttctaagagcactaatgagtccaaaatcaaaggggg

SEQ ID NO: 17795 - DNA, 266 bp, Glycine max
taattcccgtatcgacccactcatactaccacaccttcaccaaccagacattcccaattcacgaatagcaattcatacacggcatttctcaatctatactatagccataccagtattcacattctatcactaccttctctaaaacatccacaatatataaacaaccctttctgctctttaccaatttcaatttaacccactaaacttctttttaaaccacatctaacactctcaaaccctatacttccatctctctctatataatt

SEQ ID NO: 17796 - DNA, 361 bp, Glycine max
cccacgcgtccgcccacgcgtccggttgctttaattgaatacggtcagtctcttgaagaggggggaattaaaaatttggaggaaattgagaagaaagttcagttgcataggaaacggctgcaagtggagtatgggttatcagattctggtgaagatggtcaaggcaatagaagaacttcagagaggagggataggcatgatgtttcaaggaaacggcaccgaagccgtagtccaagtagtagtccacagccaacattatctggcaaagacagagatagagaacacgatttagaaagggatcgagacagacacagagattgaagtcatgatttcgatagtgaaagatgaagggaccggcaca

SEQ ID NO: 17797 - DNA, 435 bp, Glycine max
catacatctattcctcgtctccatcattttgtgttgtgctcgctctgtctctctgtctcggtaaagcgcgtttcagcacccgttaccggcgaacatggagagggttatcggcgggaagtttaagattggtcggaaaatcggaagcggttcgttcggagaaatttatattgcatcaaatatggatacctctgagattgtcgccatcaagatggaaagcaagaagaccaaacatccacagctattgtatgaagcaaagttatatagtattcttcaaggagaaagtggtattccaagtatgaagtggtgtggcactgatggagacaataatgttctagttattgatcttctgggacggagtcttgaagacttttttgtctactgcgggaggaagttttcattaaaaacagttttgatgttggccgatcagatgctgac

SEQ ID NO: 17798 - DNA, 209 bp, Glycine max
tcgacctcccacacctactcctaatcctcataatttcttttctcacaatctctcactctcggtacctgtccaattcctatcatcgccataaacccacaaacaatcccaatttcatctccatttaaactcaatatttatttcaaacatctttaacctcttcattcatataaacttatcttatatctaatattaccaacccttaatatact

SEQ ID NO: 17799 - DNA, 200 bp, Glycine max
acgtgataatgaaaatattcaattattgttcaaggaaaaaaaaaaaaaaaaaaaaaaagaaaaagaaaaaaaaaaaaaaaaaaaaaaaaaaaaaaaaaaaaaaaaaaaaaaaaaaaaaaaaaaaaggaaatactatctaatcacttaaatttaatcaacttgttcaacccatacaacaactttactatgcttaccctaaa

SEQ ID NO: 17800 - DNA, 446 bp, Glycine max
gcgcacactttgtacactccgtccctcttccctgtctctcaaatggcttccctgactgaaactttcatgtccctcgcctgtcttcccaatctagttatggtacccggtaccaggatctcccacccaagttcagtttccctctcaattaaggagggacgaagtttcccatccgttacattgcagcccataggatgtcggtttcgatttagatgtgtggcaaaaccagagacagtgaagaaggtgtgccacatagttaagaagcaattagcactaccagaggaatcatctgttactggagagtctaaatttgctgcacttggagctgattctcttgacacggttgagattgtgatgggacttgaagaagaatttggtattactgtggaagaagaaagcgcccagactatcaccaccggtcaagaagctgctgatatgatcgataagct

SEQ ID NO: 17801 - DNA, 393 bp, Glycine max
gttgtgttgcaaacagaaaggaaaaaagaagaaaataagagaaagaagaaaaatatgagtgacttgaatcgtgtttggatggcggcaacggtggcggtagcgcaaggccacaccgatcccggccacaagtgcaagacggcgctcaactccatccaccacaaccggagccgcctcttctccggcggagccctgtctgatctccggccgctgtccggcgtcgttggacctgacgtctctggcgcggcagcggggagctccgacgcgaagaatagggtgagccaagccgatgactctctgaagaaagtgatgtactttagttgctggggtcagggctgaaccacacgtgatgaacggtggagattaaagtagtcgccggagaaagtgaaccgggtc

SEQ ID NO: 17802 - DNA, 381 bp, Glycine max
  modified_base (58)..(58): a, c, g, t, unknown, or other
gttcattctctttgcgcagttccctacctctcctttcaagatgcagatcttcgtgaanacgctaacctgaaagaccatcacccttgacgtggaaagctctgacaccatcgacaacgtcaaggccaagatccaggacaaggaatgaattcccccggatcagcaacgtctcatcttcgccggaaagcagctcgaggacagccgtaccctcgccgactacaacatccagaaggagtcaacccttcaccttgtccttcgtctccgtggtggcatgcagatcttcgtcaagactctcactggcaaaaccataaccctaaaagtcgaaagctctgacaccattgacaacgtcaaggccaagatccaagacaaggagggaatcccccc

SEQ ID NO: 17803 - DNA, 376 bp, Glycine max
ctaagctctcttcttcctcgcaaactgcaaagttaactctgagaaagaaaaaccgaacgggcccttttgccatttcctgcaaaacccgtttctcttcttcaattcgcgcgtccatggcttcaccctccatcacagacgccgaaacaaagccgttttctgttctcttcgtgtgcctcggcaacatctgcataagccccgctgctgaaggagtcttcactgacttaatcaacaaaagggacctcaattcgaagttcataatcgactctgctggcaccatcaattaccacgagggaaatgaagccgattcgagaatgaaggcaacttcaaaaaggcttgggattcagataacttctatttcgaggccaatcaagccctc

SEQ ID NO: 17804 - DNA, 319 bp, Glycine max
tccacgcgtccgataaaaatgaaaattctaattaaaggaagctacaaaaatacttgagtattggcttaaagaacaaaatgtttgttatgcttaatatctttaattaggtctgtatttgtattcactccgtcctttattcacgtagttttttctcggcgaaattgcccgaagcctacgctttcttgaatccaattgcggatattatgccagtaatacccttactcttttatcttttagcttttcgtttgctacactgctgtaaattttccaacgatttctgtatttgaagtatgtgcttaaaaaaaattaagaatttatc

SEQ ID NO: 17805 - DNA, 348 bp, Glycine max
acgcccacgcgtccgccgctttctaaattctccacccctccgttccactgcttcgtcgcaacaggtgacgataatggcttcgaagaattctcaacaagacacgcgcttagcgagaatcgcctctgcaatccgagtcatccccgactttcctaagccaggaattttgtttcaggacataaccacgctgcttcttgatacaaaggctttcaaagacaccattgacttgtttgttgagaggtacagagatcaaaacatcaatgttgtcgcatgagttgaagctagaggctttatatttggtccacccattgcattagctattggagcaaaatttgtccccatgaggaaacc

SEQ ID NO: 17806 - DNA, 304 bp, Glycine max
  modified_base (269)..(269): a, c, g, t, unknown, or other
cggacgcgtgggcggacgcgtggagcgagaaatggcgatggcaatggcgcttcgcaggctgtcatcttcaatagacaagcctatacgccctctcttcaatgcccgttccctctactacaagtcgtctttgcctgatgaagctgtttacgacaaggagcgacccggagttacatggccgaagcagttgaatgctccacttgaggtcgtggatcctgagattgctgatattattgagcttgacaaagctaggcaatggaagggctagaatngataccgtcagagaatttcacctctgtgtctgtga

SEQ ID NO: 17807 - DNA, 397 bp, Glycine max
aaggtgaaaaaaaacagcaactttaacctaagacaagagagtagtatctaggaagtttcacgttccgtggagattccaactcacatcaaaatttgaggaagatctcaaccacttcactttccaagaggaggtgaggcatcatggctcaaaatggaagtggggatagagtagtggtggacaatggttttgaatccattgatgatgcatacgatcatgaacacaagctgagtcaaaagggtagcaccaaggtcaaggacgaagaagtttctttagaaaaggcgttccaacaccttctggtgccattatggatgaaccaattgacagttagagcctttctggtcagcttttcactcaacatactcttcaacttcatttggaataaactcaaccttaccac

SEQ ID NO: 17808 - DNA, 362 bp, Glycine max
  modified_base (132)..(132): a, c, g, t, unknown, or other
cccacgcgtccgcaacaacacaaggccatcatcatggcatctgcttctcctatgggaagcgaactcaagtccaccttcgctaaaactcttgtagctcccaagggcctctctgcctcttcaccactccacctnctgccttctaagaggcaatttagcttcactgttaggtccatccaatcagaaaagccaacctatcaagtgattcaaccaatcaacggtgatcccttcattggaagccttgaaaccccagttacatccaaccccttgattgcatggtacttatcgaacctccccgcatacaagaccgcattgagcccactactaataaggatcgaagtgggcctggcccatggctaccttct

SEQ ID NO: 17809 - DNA, 263 bp, Glycine max
gattattcgtttttgttttagtcatagaattttgcatcacgattgatattcctttgtctgggactgcttttaacctgacatccttgttcaactgatgaaggttcaacatgttgctaatttattttgctcatatatacttgggtttggcttttttttatgtttcttttttgggatctttgttgtaattttggcgtggttaatgtttgtgtggtgctgtgtttttaattgaacggattgcttgcacatgagcttatcgcccatgc

SEQ ID NO: 17810 - DNA, 342 bp, Glycine max
acgcgtatctgcaaattcagttcatccaaaagcaagtgtatatgcaaatgataattcttatacggattcgcaaaagcatcccttgcggccatatcttgactacattgaatatctttaccaaataatggatcctctatctgatcaagaacattttcagcatatcatgccatctaggttacaggaatttttaacaataacctatgcaacctttgatcgatactacagagactcatacttacgatacttttaaaagagattcacataaatccattcattacaaactaccaatcattcaatcattcatacacaagcttactgatcaaaatacttctattaaaacca

SEQ ID NO: 17811 - DNA, 401 bp, Glycine max
cgggaagcgaccaccgcttctgcgtgcccaccgtatctcaggtgttctttaggcccaacgggcccattaaccgaatcgcgtttcccaaggccaccctcaagaacgacggcttcgtggtggacctgagcttctacgaccttctgggaataccggaatccggttcggtaacggagatcaagaacgcctacaagcaactcgtccgaaagtaccacccggacgtgtcgcctacgggtcgggtcgaggagtacacatagaggtttattcaggtgcaggatgcctacgaaaccctgtctgatccttccagaagagctatgtacgacaaggacatggccaagggcattaacttcgccttcaacgcccgcagacgctataattaccacgatcaggtaattgaacaaaaa

SEQ ID NO: 17812 - DNA, 324 bp, Glycine max
cgatcagattctcaagtcaatggtttttttgatttagggttgcttcaaagaacacaaagtgggcttctttggaaccctagtttttttggttctcccaggtattgctgcatcgatttcctcttttagaattatttccactgataattgatccctttttgcacacttttaaaattttattatatcagtgtcaattttttaattaatggttaatattttaaatccccatattctgatttcctttttcctttcattttatctttactttttacttacttccattcattcatggaacctaaacaaaaaccctaggatgtgttaattttc

SEQ ID NO: 17813 - DNA, 409 bp, Glycine max
atttccatcttcaacttcaacacttaaactccttttagtttcaatcatccacacggcaggggccaaatctttccctatttattttcatcttattcctccctatgaccatatattataccatatttatatatcttcacatacttaataatatataataatgcacgttgtaccgacgttggtgagcatgacggcagatctagaggcctatcatcggagcctggtggaaaccgtcatcatccatcggcttacagactatgagggttggagaacccacacattcgtttactgctatgaacctgacgatggaaagggtaccttaatctgtgtcacttgtggagtttcctactttgatcttgccttgatcaaccatctcttgctcttaggttactctcttcgagtcaccgtttac

SEQ ID NO: 17814 - DNA, 228 bp, Glycine max
agaaaacaatcatcatcactaataaaattataggcacgattctggcatgtccaatggtcagcagaattagcttcattattcaaccgccaacggtgaccagagggcaaacccttgtctagccaacacgcgctgcagcttgtgctttccctgttgcttcggttcccgtcgcgactcggtcactcctcgggtattgattgtcggagctcgtgcgatccacttcaccattgt

SEQ ID NO: 17815 - DNA, 348 bp, Glycine max
ttttacttcccctatggctcgtcactccttgctcttagccctcctcctcttcgccgccgtggccagcgccgcgatggcggtggccgcgtccgacgccgacgacatcctgatccgtcaggtggtgccagatgttggcgaagccgaagaggaggacaacctgctgaacgccgagcaccacttcgcgagcttcaaggccaagttcgccaagacctacgccaccaaggaggagcacgatcatcgcttcggcgtcttcaagtccaacctccgcagagccaggctgcacgccaagctcgacccctccgtcgtccacggcgtcaccaaattctccgatctaacttcggccgagtt

SEQ ID NO: 17816 - DNA, 408 bp, Glycine max
tcgcccacgcgtacgctttgcataccaatttttattattatcattgtttcttcgtttcgtatagtctgttatcgtatctgctattaacataaaaattaaaaccaaagatgaagatgatcttaaaaaacggttcataaacgtcaagaaattttttgtcccaacaatcacatggaaaatgtaattcaattaaaatcctatgacggaggtaccttgatttattttaggatttaactcctctaatcttgatgatttatattcaaatatattcaattcctttaatatgtaagtaaggttttaaattggaataccaaaatcgtttatatcttgatatttatgagaaattactaggcaaatgaaacctatggggtggtaaacccaaaatcttgaaattttaaattaaaatatttt

SEQ ID NO: 17817 - DNA, 347 bp, Glycine max
  modified_base (223)..(223): a, c, g, t, unknown, or other
ctacgaattactttagtgtgacctcttgtcacattaaaatcaacttacgagaattaccagatcatcgggacagttaccagattagttcaagaattagaacattgaatgttgcaccaaatgtttaaattggcgaaggcttttaagaaccatcgcttatccaggtgaacatgccttaagatcagctcaacaccatctcaaaaaccatgttggctcattctctcangctaacaagctttcttcatctgctatgatatccacaacactaaaacatgagaaagcaaatcaatcataagagtcttttataactgtcatgtacttaaactgcttgcgtcccaactagatatcat

SEQ ID NO: 17818 - DNA, 279 bp, Glycine max
aattcctcgctcgacccactcgtcctaaaaaatataaaatcatcaataattaataattaaaaaataataaaaaaaaaaaaaaataaaaacgcaaaaatataacaaaaaaaacatatctatctcttctttctttatttttcttcccctttttccccatccttcttttcttcctcttctttcacatctttttccacctttatcaccttttttactttctttttcttccaatttcccctttacttactcctcttttctctctcactaacatcacttttttta

SEQ ID NO: 17819 - DNA, 297 bp, Glycine max
cttcattccccattaccatggtgcatcctatccaccaccactattatccccttcactgcaaagaacgcttctactagattcccaccttccaattcattctaccaccacaagcaacgttgatctctggataccagtgatgttcgtctcgcctgcatttgaccctacaatcacattcaaaaccaagactcttccgacattaattacaatggtacctccaaatcataacaactgatcacggcgtgagatcatgatgatgattctgatgttcttattgaatgtatatatgtgtataagtct

SEQ ID NO: 17820 - DNA, 382 bp, Glycine max
gggacacgcaaagggcgtcacagttgtcaccgacaacaccttcgctcccatggtcatctgggccgctcgtggcggctctgacgtcgtcgttcacagcatctccaagtctatcagtgggggtgctgatattattgcaggggctgtgtgcgggcctgcgagcctagtgaatgcgatgatggaccttcacgacgggtccctgatgctgctgggtccaacaatgaatgcgaaggtggcgtatgaactgtcagaaagaatccgacacttgagccttaggatgaacgagcattgtcaccgtgcgttggtgttcggttcatccttcatggctcaagaaattaaggttgcaagtgatctacccaggccttgaataccacccacagcacga

SEQ ID NO: 17821 - DNA, 393 bp, Glycine max
acggattcattccatcatggctctctccaaagccaccttcttgacgcacctcagaaccctctccgattctcagcgccgcccttcctcgtgcgtttcaatccgcctcctctccttctcctccccggaggaggccgcggcggagcgccgccgaagaaagcgccagctccgcatggaaccgcccctcttcgccctgaaccgcacccaaaccgctccaaagcccctacaatcaccctattatctaaaccctaacaaccccaagctcccggaacacgtgtctgcgctcaccggctaccggctgaaccttcacaaccccgggaaaaattctaaccctaatccgcgagaacgacctcgacgaggcggcgctgtacacgcgccactcgatctacttcaact

SEQ ID NO: 17822 - DNA, 391 bp, Glycine max
  modified_base (350)..(350): a, c, g, t, unknown, or other
  modified_base (383)..(383): a, c, g, t, unknown, or other
gcgaaaacatggctctaacacttcgttcttcaacttcttttattaatcagaaggaaaccaaagtcctcaaaggctttgacaatgcccctgcaatagttagtttttcaaaattcaagccatcatcatcattgttccggctccgggcaaaaaattccatgcaagaagctcatcacactcgtgagaaatgggagaaggtgctggctccgtcggtcgcacatagccacaatgattcaaagagagtacctgtgtatgtgatgttgccattagacacagtaacaatgggaggaagcttgaacaagcccagagcgtaaattttgggaatgcgagtttgatggcccttgagagtgcangggttgaaagtgtaatggtggatgcctggtggngtttggtg

SEQ ID NO: 17823 - DNA, 275 bp, Glycine max
gatgagccaacgatgacacgaaggtgaaccagttcaggaggtctacatatgtgctacatgggctagttgataggctgctggatttgtaacagatgctataggaatacatgccatgtttgatgctattgcagaccgaattaaggacccaagtgatggacacgcatgccaatgcttttgtggtgaaagtagatgatctagggcctggactatttgtaacacttgatttagggacaagtggatcgaagactaatgtaaccaccatcaagcaagcacag

SEQ ID NO: 17824 - DNA, 331 bp, Glycine max
tgcccttctcgttagcttgatatgataatctaaatgtttcaacactttgtttaacctgagggttttgaatttgggttctctttgttgcacattaaatcttagctgtttcataatagtgcaagggctttggaagagaaaagagctcgtttgggtttagtggaatgtgtgaatcatgagctcctgcaaccttatcctgttctgcatgaaaagcctggtgattatgttgcacatatcaaattcactgtcttgctaatgcccaatggatcagatcgtgttacgtcttactcactccaagagtttttgggtctcacccaacaaaacaattgatgat

SEQ ID NO: 17825 - DNA, 235 bp, Glycine max
aacaaacctcagaagccaggcatgatactctcctcgatccaacaccctgagggactatgggggtaatacagactcatagcgtgacaggtcactacgatccctaattcaagtgcaaaaaagaccacgtgattgctcctagtcacaacacgtgtaaaatagaattataggatatcatacataacctctgcatcaagacaaatatatcgaaagacgcgctactagacatggatctaaa

SEQ ID NO: 17826 - DNA, 365 bp, Glycine max
tcgcacaaaaagacaacacagagagaagcgtcttaataaacgctcttctctgaaaaacctgattggttctctgcatcacttctctatcgtttcgatcttcgatctctgaaaatgagagagtgcatttcaatccacatcggtcaggccggtattcaggtcggaaacgcctgctaggagctctactgtctcgaacacggcattcagcctgatgggcagatgccaagtgataagactgttgatggaggtgatgatgcttataacaccttgttcagtgaaactggagctgtgaagctcttgcctcgtgcgattttttttttatgacatctcgagcctactgagattgatgaagttaggactgagacata

SEQ ID NO: 17827 - DNA, 270 bp, Glycine max
gaccacgcatccaccatacgatattctatgcatgccatataaccttatatcattattggatctcacaccatggtctaggtcacacactgacttaagcttatcatgtggcaatgctctatgaaggaaccccacatcacactactgtacacgattatacgaggaacctgcttacagcaataggccatttcgtgctctccttgacgatgatcttattaaaactacatccggtaaccgtctcttacttgaccttaatgcaactcaccatgaagc

SEQ ID NO: 17828 - DNA, 448 bp, Glycine max
tgccgttcttgatgattttggcatggaatccatgctcgagagattgatgaatgatttcataagtcgcatatctcgagttttctacactgaaattggtggaacctcgctggactcccatcacgggtttgttgttgaatatggaatcaatcgggatgtggaacttggcttccatgtggatgatgcagaagtcaccttaaatatttgcttgggaaacgaattttctggtggagaactgttcttcaggggtgttcgatgtgatgaacatgtaaattcagatatccaaccaggggagatctttgattatccccatgttccaggacatgcaattcttcatcctggtcgtcaccggcatggcgctagacctactacatctgggaatcggatgaatttaattatctggtgtacaagttccgcttttaaagagttgaagaaatatcggaaagatttt

SEQ ID NO: 17829 - DNA, 242 bp, Glycine max
accggtccgtagtctccacgcttgcggccttttggctaagatcaagtgtagtatctgttcttatcagtttaatatctgatatgtgggccattggcccacacgatattaaatttattttttgaaggggagatcccaatgcagtagcttgctactggggttctcaagcgtcgtccttgttttgcactatagcattgtcctggcgcaccctataacataagtgtaaatatctttaatggtttagt

SEQ ID NO: 17830 - DNA, 444 bp, Glycine max
acgcacacacatactaagaagcaacaattcttctacaatggatctcctccttctggaaaagacggtcatagggctcttcctcgctgcggtggtcgccatcgccgtcttcaccctccgcggccggaaattcaagctcccaccgggcccactccccgtcccaatcttcggcagctggctccaagtcgtcgacgacctcaaccaccgcaacctcaccgatttggccaaaaaattcggtgacatcttcctcctccgcatggggcatcgcaacctcgtcgtggtttctacccctgagctcgtcaaagaggttcatcccctaatctacgcatggcgtggagttcggctcccgcacccgcaacgtcgtcttcgacatcttcaccggaaagggccaagacatggtcttcaccgtctacggcgagcactggcgcaaaatgcgccccatcatga

SEQ ID NO: 17831 - DNA, 352 bp, Glycine max
cccacgcgtccgcaatttaccagctatacttgttccttttgaaggttagaagtgctacaagacaaacaatggcagctactcaggaagatgtgaagcttttgggtattgtgggaagcccatttgtgtgcagggtccagattgcccttaagttgaagggagttgaatacaaatttttggaagaaaatttgggcaacaagagtgatttgcttctcaaatacaaccctgttcacaagaaggttccagtgtttgttcacaatgagaagcccatagcagagtctattgtgattgttgaatacattgggaaaatttgagacatggaagaacaaccccatcttaccttctgatccttacc

SEQ ID NO: 17832 - DNA, 293 bp, Glycine max
gcaaaaccctaattcctaccgcaaggtaaaaaaaaaaacagaaaaccagtggtgcgcgaggccaccgaagttcgatcccttgcaggtggtggacgtgttcgtccgagtcatcggcggcaaagtcggagcggcgagttccctcgctccaaagatcggtccattgggtctctccccaaagaagatcggagaagacattgcgaaggaaaccgcgaaggactggaaaggcctacgcgtgacggtgaagctgacagttcagaaccggcaagcgaaagtgacggtagtgacctacggcg

SEQ ID NO: 17833 - DNA, 297 bp, Glycine max
gtggagcaggaggcgaacgccaacacggcgccgttcgtggcgcgcgtgtcggagttgtgcgcttattacggcgcgctgtttgactcgctcgagtcgacgatggcgcgagagaactcggcgcgagttaggatcgatgagggactgactcggaaggtggggaactctgtggcgtgcgaaggaaggaaccgcgtggaacggtgcgaggtgtttgggaagtggcgagcgcgtatgagcatggctaggttcaagttgaagccgctgagtcagcgagtcgctgagtcgagcaaagcgcgactc

SEQ ID NO: 17834 - DNA, 396 bp, Glycine max
cggacgcgtgggcattctctagcttccaaaccctaacactcctcttcctcttccatcatgggctctggacaatgccggcgaagttcgacccctcccagatagtcgacgtcttcgtccgcgttaccggcggctaaatcggcgcggccagttccctggccccgaaaatcggtcccctcggtctctcccccaagaagatcggagaagacatcgtcaaagaaaccgtcaaggactggaagggcctccgcatcaccgacaagctcaccgttcagaatcgtcaggcgaaagtcaccgtggtcccctccgacgacgccctcgttatcaaggccctcaaggagcccgagcgcgaccgcaagaagaccaagaacatcaagcacaacggcaacatctcgctcgatg

SEQ ID NO: 17835 - DNA, 418 bp, Glycine max
cccacgcgtccggtgttttttgttcttggtcgagccttgtactgattaacgagaatggagaacgaggtggagcttggttcccttgaaggtgaaatggccacccagcacatttcacaaccacagaagcgcaagggtggtcttgttaccatgcctttcatcattgcaaatgaggcacttgcgagggtggcaagtttgggccttttgcccaacatgatactgtatttgatggggacctacaggcttcaccttgcccaagcaacccagatacttctctggtcccatgctaccagcaatttcacacctgtggtgggtgctttcattgctgattcttatctgggtcgattcctcgctgttgggttgggttcggccatcacttttctgggaatgacactgctgtggttaacagctattatcccac

SEQ ID NO: 17836 - DNA, 420 bp, Glycine max
cccacgcgtccgcccacgcgtccgcccacgcgtccggaagaagaacctgttgttgtgggtgtattacagctgccacttatggataggagcgggcaaataccagcgtttgggaattgggattacgcaaacgagttgccaatcactcagtacttcgagagtgcgagacaagctggtttagttcgttacagttcctcctccggcgaaagtgacccttacgtgcgtgcagaccgtgacctttacgccgttgattttaagaaacccattcgcaacatcccaacttctactctgaaaaaggccactcttaaaggtggacaaggtggttaaaggaagggaaaagggtaatgtgaagattaatattagaaaacaggggaaagggtgccacgtgacggaacaagcaatgaagccagtggcagcgatgca

SEQ ID NO: 17837 - DNA, 386 bp, Glycine max
cccacgcgtccgtctatctctctgacacacactcatcattttctagcaaactctctagccgcttcaaatgggctaggaaggttgaataaaaagaaaacaaaccctagcttaattaattaacttgcttgtgttgttaattaatttgttcaacatggaaggatgagtgcctgaagctgatatctctgcctttagagaatgtttgtctctatcatggaaaaatccttatgttcttcgccttgctttctccgctggaattggaggctatctctttggctatgacacatgagtcatatctggatgcccaaacaattttgtacatcatagatgatttcaaagaagcagatagaaagacgtggctgcaagaagctttaatgagtatggcactt

SEQ ID NO: 17838 - DNA, 410 bp, Glycine max
cggacgcgtgggaaaaaaaaaaaagaataatatatagaaaaaggagcatgttgattatatagaaagtaaagggcaacaatcatttttgtttaccatgggtaaggacaccatcgctgacataataacctatataagaaatgctgacatgaataaaaaaggaatggttcaaataccatttactaacataacagaaaacattgtaaaaatacttttacgcgagggttttgttgaaaacgtcagaaaacatagagaaaacgacaaatattttttagttttaactctacggtatagaagaaatagaacaaaaataaaggatcatattaaaagtttttaaatttaaaacggatcagtacacccggtctacgaatatattctaattatcaacgaatccctcgaattttaaggggcat

SEQ ID NO: 17839 - DNA, 439 bp, Glycine max
cccacgcgtccgcccacgcgtccgctctctctctctctctctctctctgttttctctctcgcgtctcacttgaaactccacaacccaattttcttttcctatgacccaattccaaatccaaatcaccaattctaattccattcttcaggagttgaattgaattcgtgatgaagagggaccacaaagatagctgcggcggcggcggcgccgccggagggactgtgaagggtgagtgttcctcaatgcagtcaaacgggaaggcgaagatgtgggaggaagagcaacagcagcagcagcagcgaaataatccaacagcaacaacaacaacaggggatggacgagttgcttgcagcgttggggtacaagggtcgggctttcgacatggctgacgtggcacaaaagcttgagcagttggagattgtcatgggttgtgcccaag

SEQ ID NO: 17840 - DNA, 384 bp, Glycine max
cttggactattcgacagcgaagtagaagctgcaagggcttatgacaaggcagctatcaaatgcaacggaagggaagcagtgaccaactttgagccaagtacttatgaaggagagctgaaatctgcagccattaatgaaggaggcagtcagaatcttgatctcaatttgggcatagcaaccccaggacctcccaaagaaaattgggggcaacttcagttcccctccttcccttacaatacacatggtggaagaagttcaatgatggaaaccaatgttagttctggaattggtaatccatctttgaaaagggggggaaaatggttgcaactgaagatcgtccttcattatggaatggcatgtctcctaatttctttcccaatgggg

SEQ ID NO: 17841 - DNA, 263 bp, Glycine max
  modified_base (163)..(163): a, c, g, t, unknown, or other
cccacgcgtccgcattaatgtgtgtttgtcacgagacccatagtgctgccaaattatagtggctctgtttctctatctgaagaagaagaagttctgaagaagcatgtgtggaagtgctatcatctcagacttcattggtgtgaagccttgccccaaacctttnccggcatgatcttgtgtcccaacctgaccctttctcttaccttcttggcttcgataccaccaacaacaacaacaaccaaccacccctttcaaaccaaaaa

SEQ ID NO: 17842 - DNA, 383 bp, Glycine max
  modified_base (328)..(328): a, c, g, t, unknown, or other
ctctctctccctctttctcgtcactagctctgtgcattcttctctcgctctctgccttcggtcacactcggcatttcctttcccaagatagtagaagatggcagacactgaggatattcaacctcttgtttgtgacaatggaacaggaatggttaaggctggatttgctggagatgatgccccacgtgctgtgtttcccagcattgtaggtcgtcctcgtcacactggtgtgatggttggcatgggccaaaaagatgcatatgttggtgatgaggcacaatctaagaggggtattttgactctcaagtaccccattgaacatggaatngtgagcaattgggatgatatggaaaagatttggcatcataccttctataatgagc

SEQ ID NO: 17843 - DNA, 386 bp, Glycine max
ctagacatcccttctacacaacataggtcatcgaacggatctcgaagacccaccatcgcgcgaaagccggtatctttcagaaaatggattcctattcgaagggtgcataaccgcatggataagctcacactaacccgtcaatttgggatccaattcggttccttacgaggtatcgggaccgaatcttggaatgtaataatatctattcatacagatacagacgaaagggttctctattgattcaaacgctctacctacgagatagggatagagaaagaggacaaaaccgaggatttcacatattacttttggtcgaaaaatcgatctgatttttatcgcactttccgctcaatgatgaaatgggccagattctacaggaccaaacc

SEQ ID NO: 17844 - DNA, 378 bp, Glycine max
acgcccacgcgtccgctttccctctgttgactggtagtttcgaaactctcttctttttccacatgttctaacggtttgctgcttctctcttcatgaagatccccaacaagcatccactattatatgcaacatggaacaactctctcaaccatcatttcaaccccatcaagtctccgaccatcttcttcattcggatagagtcccttgcattgaagtgattttgagagaaaaacaagaagaggagttggagggaaaggaagtggagtatttcaaagaaagagttgagagattggagagtgagagggaagaagttaaaggtaaatggggtcatgtttaaggctttggaatctctcacttaatcgaagggaaagcttgtct

SEQ ID NO: 17845 - DNA, 279 bp, Glycine max
tcgcacacgcgtccggagacaggtgattttagtatatcaaatttcaaatggtgagtggtgaacccaccacgggaagaaaaaaattaaaagatgatgatgagtgatgacagaggtgaggatatgtaatttagctttgtgaatactaccaaatttgtttgttcaacattatgaattatgaatggatcagtgcttgtattccttggttggattttaaatcatgatccttgaggagcaaaagaaaatctaatcatatgtacctgttggaatgaacaaaataaa

SEQ ID NO: 17846 - DNA, 274 bp, Glycine max
ggatgccattaccaatggtcatggccgtaccgtttctggttggagcatactttgcaatcgatatgttcataggtactgtggttgtgtttgcttggcagaagcttgactccaagaaggcagagttgatggttccagcagctgcctctggactaatttgtggggaaggactatggactctaccagctgcgattctagctcttgcaagaattaaacctcctatctgcatgaaattcgttcctacctagagcttcacccacaatagaacaaacaattc

SEQ ID NO: 17847 - DNA, 390 bp, Glycine max
gcagctgtgggaaaccctgaaggaagccatcgtagcctacactggcttctcgccttccaggttcttcacggtgctggcgcttctttttgccgtttactacgtcgtcacgggtctctttggctcctacgacgatcaccatcaccgccaccgccacgtcgaggaggaggaggagatgccgtctctgcgccccccggttcagctcggcgagatcacagcggaggagctcaaggcctacgacggcaccgatcccgagaagcccttgctcatggccatcaaggcccaaatctatgatgtcttcccaaattttaagcatgatggtttatggacctggtggaccttatgccctaattgctggcaaggatgctagccaagccttagcaaagatgtctt

SEQ ID NO: 17848 - DNA, 265 bp, Glycine max
ttctttagacaatgaggtgcagccaaattcattagacactggggtgcagccaaaatcgatgagcaatgggatgaagcacagtgcatctggcggtaagagtcagggaagactaactaggaaggatttgcgcttgcataagttggtatttgaagcagatgttgagccagatggaactgaactagcctactatgctcatgggcagaaactgatggctggttacaaaaagggatgtggaatcttttgtacctgctgcaatgagcaggtc

SEQ ID NO: 17849 - DNA, 434 bp, Glycine max
tctctctctcgcacgcgaaacccttgttctgttccatgctaacatatctgcagagaaaagcagacaccagaaaaggttcgttcagagacaaaaccccaacgatccaaacggtcattgagcatatcatggcgcgagtcactgagttgaatcggataggaatctgagttagtgatcggttgacgcggtcatggctgctgcgggctccaagctcgagaaggctctcggagaccaattccccgaaggagaacgttactttggcctcgagaatgtctgcaacacttgatactgcaacagcgtctttttcggacatgcactatacttctgagttccgatacgcgaacaattactagagtattatggagataacaaaagcatattggacggggaagaaaatctgttaacttgcttagccgacttattttcacagataagtt

SEQ ID NO: 17850 - DNA, 276 bp, Glycine max
attcccaatcgaccactcataaccctactcttaccatatatatacaccaatcctttactcacttaccttcatacacataaccagatatatttacacccatgtcatccaatcacccatataattacaaaattcatctataactaacaatcttctttttaacacatttctaatcctattaaacaatcacaactaacaatacaatcttcatcctacacttactcaacatttacaaactcaactaattacatattcaaatactacatcaatacatccaac

SEQ ID NO: 17851 - DNA, 386 bp, Glycine max
acgcacacaagcactacaacattttctttggtctctcattctctctatagctagatgggttctggggctttagaactacttctgatcttgggtcttctggctagctcatgcttagcacaagccccaggtgctgcacccacacaaccacccactacaaccccatcaccaccaccaccaagatcagcacctgcaccagcacccaccccgccagcaacaccaccaccagcaacaccaccaccagcagcagcaactcctacaccagcaacatcaccaccagcaacaacaccaacgccaacaccaacagctgcacctttaaaacccaacctgcttcttctcctgcaacctcaccagtcccttccgctagttctccaccagcaccaggcaca

SEQ ID NO: 17852 - DNA, 354 bp, Glycine max
aaacgtgacgtttttaactcaagacccatgttctcagtctaagcactggcatacattccgaaacattctacactatcaacttgtacaaaggtcactataactcaaaccacactctctatcactttgtataccctcacatcctctaatttgcaatcatactactcgaatcattctctctaacgctaatactttctaatccattcaaccctctatcttcatctctcatccaatactcataacatgctttcttggtacaatacgctcacttacatgctgctcttgtttgcctatacaacatcaccattgcaaacatcttggctaactaactaacacagattccaagagtttacagca

SEQ ID NO: 17853 - DNA, 286 bp, Glycine max
acgcagacgcgtggacccaaccacacgcttcatatgacatgagctcattgggtgggatacaagaggcgcacggcctttatttacttatctaggaaggtgcagcagtccatgcacagtccgagctgaagccgccaacatattcactgcatgcattggagccggtgatgtgcctagagacactcgcgtcatactggaggaagacccccctgacttatgtactatatccgaacaaacaagttgttggtacagatcacgacggcaaggcactacaagagatcattgtcac

SEQ ID NO: 17854 - DNA, 356 bp, Glycine max
  modified_base (311)..(312): a, c, g, t, unknown, or other
gcgcttcctaaggagagggagggagagattcgaattccaattagggttttctcatcatcatcgactttttcgcttatgcaaggaaggttctccttctccgatttcaatttgattgaacgagtagtgttaagattatgatattttttgagaagcttcgtttctctccttacctaagccgcttcattgccggcatcatcttgttaattttctgcaattcattccagttagtctccaatttccccattcctatacagccttagattctacgtcgttaactctctccgatatgattctatattcgatattcggtnnttttgggattgaattcaccctctctctctctctctctctctcgc

SEQ ID NO: 17855 - DNA, 347 bp, Glycine max
ctctggctactttttattcttccattatcgcttctcgtagcattttcggaacactcatggggtccagtgccggatccagctgcgtcgctctccgaaccgccgatttcgcctcctacgataaccggaaaatcggccagatccggcaatggtctccaattctcactaatctccgtactgtttccggtcttcgccaccgatcaaatactccgattagctcctacggtgtaagaacacaggttgctactctggaggaagcacgaaccggagcaactcataaagtggaatcgacgggtgcaatggtgaccggagcttccaaaagcattggaaaagcgattgcactgtcgtta

SEQ ID NO: 17856 - DNA, 430 bp, Glycine max
cccacgcgtccgcgaactccgaagcccttcagcaaccatgtcgaggagaaaggttagggagccaaaggaggaaaatgtcactcttggtccagccgttagagacggtgaacatgttttcggcgtggctcgcatctttgcctccttcaacgacaccttcatccatgtcactgatttgtctgggagggaaacccttgttcgcatcactggtgggatgaaagttaaagctgacagagatgaatcatctccatatgctgctatgcttgcagcacaggatgttgctgccagatgtaaggaactgggcataactgctcttcatatcaggctccgtgccactggtggaaacaagaccaaaacacctggtcctggtgctcaatcaactcttcgagcccttgcacgttcaggaatgaaaaatggtcctatagaggatgtt

SEQ ID NO: 17857 - DNA, 401 bp, Glycine max
ctttcttcttctcgttcttactttgacggtttctagagagagaaagtttgttatagagagagaaagcgcgctgctgcttcttctgctgctgcttcgacagtgagaagagagagagaagcgctcttctccgtaccgtttctagagagagaaactgatggccggagttaatccgaacggcgtcgccgattttccggcgacttcaacgcacggcggacagttcattcattacaacatattctgaaacctcttcgaggttacggctaaataccgtcctgcgatcatgcctgtcggacgcgtcgcctatggaatcgtttgctcgctgctgaataccgatactaatgacctggtcgcggctaataagatagcgaacgctttcgacaatcacatggacgctaaaccta

SEQ ID NO: 17858 - DNA, 351 bp, Glycine max
acgggctcacagtttcagcaggaactataaattgggatggtcctttaaggattgaagcttcttgaactggcgccaacactatgatatcgaagattgtacgcatggttgaggatgctcaatcacgtgaagcacctgtacaaaggcttgcagattcaatagcagggccatttgtatacagtgtaatgactttgtcagcagcaacatttgcattttggtattttgtaggatcacacatatttcctgatgttatgctcaacgatattgctggcccagaaggagatcctttggtgttgagtataaaactatccgttaaaaagaaatgtgtttggttgtgtcttgttcatgtgcact

SEQ ID NO: 17859 - DNA, 267 bp, Glycine max
gcgcccacacgtccggtcaaggttaggaggtagccaccaaaatggatgtaaaggcaatgccaacatttttgcggctgaatgacagagctgcggtggacaacgtggttggtgccaatccataagagataaacaataggatagatgtcgctgctgagtccactcgtgtatcactagcctagttaatcatatgtatgatattctactgttgcaagttgcatgatatgtgctcatagacatgcactgaactatggcatctgagtcaaagct

SEQ ID NO: 17860 - DNA, 375 bp, Glycine max
acgatttgtttggatatactacaaaatcagtggagtcctatatatgatgtggctgctatactcacatctatgcagtcattgctttgtgatcccaacccaaattctcctgcgaactctgaagcagctcgaatgtttagcgagaacaagcgtgaatacaatcgaagagtgagggaaatcgtggagcacagttggacagccgactaagttcatccttatatgcaggaagctttgacggcatgaattaggttgcagtggtggcacctatatataagaatgattgtgcaaactcatcaagtatatattctcttctttgggggaaattgaatgatagcatcatcttatctttaatttattgtagctactgcattgcatatg

SEQ ID NO: 17861 - DNA, 376 bp, Glycine max
  modified_base (337)..(337): a, c, g, t, unknown, or other
ttcaggcatcggatacggtctaaaatatcaggctagatgcatatccgatgtgaaggcagggacagatcacactagcttcctcgctggcactctcagcctcaaagaagaaaatgaggtacatctgattcggctttcgtcgagtggaaccgaactcttctgcgagggattgttctctcatcccaacgagatctgggaccttgtttcttgcccctttgatcaacggatcttttcaaccgtctactctaacggtgaaacgtatggggcagcaatatggcaaatccccgagctatatggcgaggttttttaaaaattcacctcagctagagagaattacctncctcgacactgattctggcaagattaaatgtattctatg

SEQ ID NO: 17862 - DNA, 278 bp, Glycine max
acgaataaattggtccttgtctcttgaattgagcatttgctgcgaaattttgaagattcaagtgttcaactttccagaagagtactgtgcttacatttatatatagcacctgaaattggctatggagttcttatactggctgtttgattggtatttgaaattctggattttggattgagttctgctcagtcttgataaggataaagtggtgtttgagagtcacggcattattcataagtagcgcgcatggatccacattccagataccgcaaacctgg

SEQ ID NO: 17863 - DNA, 353 bp, Glycine max
tcgcccacgcgtccgcaatttaccagctatacttgttccttttgaaggttagaagtgctacaggacaaacaatggcagctactcaggaagatgtgaagcttttgggtattgtgggaagcccatttgtgtgcagggtccagattgcccttaagttgaagggaggtgaatacaaatttttggaagaaaatttgggcaacaagagtgatttgcttctcaaatacaaccctgttcacaagaaggttccagtgtttgttcacaatgagaagcccatagcagagttctttgtgattgttgaatacatttgggaaattttagacatggaagaacaaccccatcttaccttctgatcctta

SEQ ID NO: 17864 - DNA, 249 bp, Glycine max
cccacgcgtccgcatttcaccagccatgctagctagttaagaaacttacatgggctacgcgtcaaacacttgctgaaacgcgctaagatgtgatcctttcgcgcactacggtaagcctacttgagctcaacgagcaaactgcacgcctcatgagagaagttgaatacagaagtggggaacaacaaagggacagcatgagcgaaatgctactcaaattcaacgctgtgcacaagatgggcacagcgtata

SEQ ID NO: 17865 - DNA, 397 bp, Glycine max
  modified_base (367)..(367): a, c, g, t, unknown, or other
  modified_base (378)..(378): a, c, g, t, unknown, or other
ctctctctgtctcctacgattcgttttgccccttttgttgccctaatttcaaccatgccgggccgtagctccggtggaagatctgcccgtcctgctcctcgggcagctcctcgtcctgctccagttcaccatgctcctcctccagcccctgctcagagtggtggtggatctatgcttggtggcattggttcaaccatagctcaaggtatggcttttggcaccggaagtgcagtggcacacagggctgtggatgcagtcatgggtcctcgtaccattcaacatgaaacagttgttacagaggctgctgctgcttgccctgcacccactgcaaatacttttggtggcgatgcatgcagcattcatacanaggcattccangatttgatgctcatggaca

SEQ ID NO: 17866 - DNA, 374 bp, Glycine max
  modified_base (314)..(314): a, c, g, t, unknown, or other
gcgcgccggctcctccgcttctttccaccgctcttctcctcctctcccacgcttccgcttctcgccgcttctggccgctaacaccctcaccgctaataacatctcgccaagaagtggactatacactgttggtgactttatgacaaagaaagaggatttacatgtggtgaaaccgacaacatctgtggatgaagctttagaaattcttgttgaaaacaggataactggttttcccgtgattgatgataactggaaactggttggtgtcgtttcagattatgatttgagagcactggactctatatcagggtttncccaacgggttaaaggataacatgtttccagaagttgacagtacttggaaaactttcaat

SEQ ID NO: 17867 - DNA, 384 bp, Glycine max
ttaaagcatgatgtactgccatatctagtccggagccaactggttagttgttaaaggttggggcagagataggctagggaatgttgtacttttaaggattctaaccttgttcatattttctaaacgagagttagaaatcagaagtattattaaatggcataccacatgcagaagaaaacagaactgaaaaggttatttctcaaagcaatcaacaaatgctatctcaaatactcgctaatgcatctgaaccaacctttcatctacgacatgcactgggtccttatggttctacttttgatcgaagaacccacaaatgctgtgtgtatattgctggaagcagcaaatactgtgctcgcttaaattctatacaagcatacactgaca

SEQ ID NO: 17868 - DNA, 416 bp, Glycine max
gcaatgaccaagccaacttacactgcaattgttcaacatgccaagaatggaaaacctgctggcatgtttgtacctacaaggaagcatgtccgacttacagctgtggatatgattacatactcaggtgcagacagtggggagaagccatttttattgcggtcagccgaagagcttgaaccttttcttgacaagattactgacgaaatgttgaaagttactttacgggaaggagttggatacttgcatgagggattgaacagtcttgatcatgacattgtgactcagctatttgaagctggctggatacaagtctgtgttttaaacagttccatgtgttggggagtgactttattggctcatttggtagttgtgatgggcacacaatactatgatgggcgggagaatgcacagacaga

SEQ ID NO: 17869 - DNA, 351 bp, Glycine max
tcgcagatttgtaaacctcatgggaggccacatatggattgagagtgagggtcctgacaaagggagcacagggtcatatataatcaaacttgagatttgcggcaatccagatccatccgatcatcaagctgcaaacagaagccaagcatacagtggaagtggtggcctcgatagatttaaacccttcatcaaagatgaagacgacactggtttttctactatacgcaatcaaagaagtttctaatatccaagacaccaacattgcatacctttcgatcacagtcgacaagatggagtacacatactttcaattcttaatatgcatgtgctaaaaagtataatttacaagtt

SEQ ID NO: 17870 - DNA, 282 bp, Glycine max
acgcagacgcgtgggcggacgcgtgggttccattggcacccacttttgaatatattactattggttctttggtacttcacttgcttccatacacataaccatgtcttctcaggtcctcaacccaatgcctccttctattcttgcctttagcacttcactcagttttagtgcgcttgatcattgtcattctgggtgctgtactttattcggctaatgttgcttgatatgggtctctgctctaagcgtatgtgctgaacttgatgagctcccaagttgattgag

SEQ ID NO: 17871 - DNA, 217 bp, Glycine max
cgcaaacaaaaaacattgcgacagttgcgacttattggagttcattcttcgcactctctcggaaaccgcttgtttccaatcatctaatcagacgatagcagactcaagaaagacgtttccttcccagatccttctagaccatttgcaaaccgtctccttccccgaatccattctccaaaccctcgatccttgaggagctccaccaccgtgacggcgc

SEQ ID NO: 17872 - DNA, 306 bp, Glycine max
tcggagagagagagaaagagacgaggagagagaaacaaagaagagtgctcccacattacatggggtgcttgcgcttggtgcaccaccaccatcaccaaccggcggcggcgactatacacccgtcgcaaccgccgcagtgtcagccgcaacccgaagttcctcgccggagcatcgatatggagaccgataacgatatgtcagctactgtcattgaggggaatgatgcacgtactggccacataatcgtgaccacaattggaggcgaaaatggggaacctaaacagaccatgagttacatggcagaac

SEQ ID NO: 17873 - DNA, 260 bp, Glycine max
aacgcaaactcttcaagagcatacaccgtgaaattccgaggccgcaaggtcaattataactccactggttgccaagatcttgccaaacaaaacaaagtgccattccttagtgacgatttggagcttgaatgctaatgaatggtcatatacatgtgccgttctaatgtaatctggaaatggtgaaaggaggcaaccttttatgcccaactgcgaattattcgctttgcgatgtacctaactgcttgaatatataccatatt

SEQ ID NO: 17874 - DNA, 362 bp, Glycine max
cccacgcgtccggtttagctcaaataattttgtgaagcatttttattggtagaaatggagagtgagtcggtgaaacgcagaattcacatgattgctgctcactttgcacccaatgatgatatttcaactacccacgttctgcctatgaactgtagtggcagtctgaactctgtgctccggagatgtgataataaggtgtattttgcacgccaagcatctgcttctcttggttattttatgaggcagacttcaattgaagagggtggctcaactggctttattggttccaaaaaccaatcccttttgtgggtgcttctgaatttgaaggtccttttaatgcaaaagcaccatgttttgctaaa

SEQ ID NO: 17875 - DNA, 305 bp, Glycine max
  modified_base (264)..(264): a, c, g, t, unknown, or other
  modified_base (278)..(278): a, c, g, t, unknown, or other
cctggctccaccagcttcacctcctccaccatctcctcctcctcctcctccattgcctgtgcttgaaacatcacctgaaaagggtgcaaactctcccattagaagaggccctggaaggcgtggaagagatcgaagagctggttcacggcaccaccgcaaagttgttgctggaagcagagagatggaaccaagttaacagttttgtttgggcgagattatattattagtagatttggttaaaattccacctacggaaatcattcngtgcagagcttgantggaaaagtgcaagatgagtgtttttt

SEQ ID NO: 17876 - DNA, 438 bp, Glycine max
gtgcaatctaagaaagagctaacaaacaaaacatgggttctttgggcacaatcaacaacgggcctcatgctgtgtgcataccgtacccggcacaaggccacattaacccgatgctaaaactagcaaaactccttcacttcaaaggctttcacataacctttgttaacactgagtataaccacaaacgtcttctcaaagcaagaggccctgattcccttaatggtctctcttcttttcgctttgaaaccattcctgatggtctacctgagactgatctggatgccacacaggatattccttttaacaaccatgtgttaggccactataagaacttggttccctcaatttaagaaccttcttactaaaatcaataactctgatgcccctacagtgaattgcataatctcggatggtgtcatgagcttcactcttgatgct

SEQ ID NO: 17877 - DNA, 298 bp, Glycine max
cgaagattgtgatgagaatgatgacaaaaatgatgaaaacattcctgatcataccaatgccgaaaatgaatgattcaggacatgagtatttcagtttcctttagaagttcaaattacaattctgatttctttgcagactgttttcggcgtatttggggttgaatgcaaattttggttaagttgtatctttagtttgttcgcctatgggtgggtgcctcttgtttcattgtatttaacttttgaagtataatctttgttattaattttttatccactcaatgctacctgattcctgctc

SEQ ID NO: 17878 - DNA, 449 bp, Glycine max
gcgaagaactcactcaaactcaacatagagagagagagagagagagagagagagagagagagagatatgaccgattacgaagagagatacgaagggaacggagaagaagaggaacttcacaattctcatcatcagcctcatcctgattcctctcctttacccacccacgacgatctcaccgattccaaatctcgccatggatctcgcgattatgacagagattcttccagaagcagagataaggagcgggagaaagggagagacagggagagaaaaagggaaaaggggagggacagggaaagggagaaaaggggtttaatggatagggattcggagagaagcagggacaaggacagagatagggataagagcaaagacagggagagggaccgggatcgtgatggtgagaatgaaagggaccgtgacagggaccgccatcatagagatcg

SEQ ID NO: 17879 - DNA, 185 bp, Glycine max
gttgaattgtgagagaaggccaaccataattgatctccctcccaccaagttcaatgattgcgaccttgggaagattcccttttgtggccggaatggtactattttgcctccgtccatggatcctagcatgtctgcttcgagattccaaatgcaggtcttcaagatgccgtcggcgcttaaccgat

SEQ ID NO: 17880 - DNA, 328 bp, Glycine max
gtgagttgggacttgtggcggcgagattgctgctgctccaaacgttacaggagagaaagcgcttctgtgccgtgaattcggatcgagatcaatgggttcagcggagaaagagccactgttaacagcggagggaactcgatcaaactcaaagcacgagtcctcctcccatgggcaacttgagagaattctctccgacgacaccctacccttcctcaaccgtgtgggacccgccacctggatcgagttgaagctcctcttcttcctcgccgcccctgccgtcatcgtctacctcatcaactacctcatgtccatgtccacccaaatcttc

SEQ ID NO: 17881 - DNA, 204 bp, Glycine max
gaaacctaacaaccccctaaccgttcctaacccatcctgccaaggccctcgaccctcgggcgaccgcaactccaaagggctgtgcctgtcgacggcgtcttccacgctcatgtcggaacccgacatccacgcgccggcgttcctgcttcaacgcccgccggtcctgcagtcggcctttgcactcttcaagcagcgatcgtggtc

SEQ ID NO: 17882 - DNA, 442 bp, Glycine max
caagattcctcgtggccccgatgttcccagtgaagctgctgactaaaaccattcagggatgatccttacgaaataatagctcctctttgtgatcattggtcgtatattggaattttcattggtataatagggttatttcttaattgcatttacaggcaagtgttcaatattttgttttacccgaacaaactaatccgtaggagcagtttcaaaattcctttttagtggcttaaagtagattggtaacatatgtaggtgccaatttttaagatgataaaaaggatgtcaacattgattataccaagtttttttaaaggctacttgcacattcatgtatgaacaattgacactggctttccattttatccaagtatattataagcatgtactttctatgtttgccaaattaatggtacagtggatttaatcaaaatcataaaaa

SEQ ID NO: 17883 - DNA, 448 bp, Glycine max
gcgtgactgatgaagaatttgcaagagaaacgattgctggtttaaatccaaatgtcattaagatgatagaggagttcccactaagtagcaagctagatactcaagcctatggtgatcatacctgtataatagcaaaagaacatttggagcctaacttaggtgggctcactgatgagcaggctatccaaaacaagaagttgttcatcttagatcaccatgactatctcattccttatttgaggaaaataaatgcaaataccacaaagacttatgctacaagaaccatatttttcttgaaagatgatggaaccctttttgttgacaccattggccattgagttaagtaagccacattctcagggtgaagaatatggtcctggtagcgaagtctacgtgcctgccaacgaaagagtggaagcttatatttggttactggcaaaagcttatg

SEQ ID NO: 17884 - DNA, 363 bp, Glycine max
acgcttatgctcttgttactgcttacaagaagtgcaaattcaatatggcccatatagacgtcttggcaccgctgaccacacaaaggtcttactacaacgacacagaaccgcatgctaaacactaatactaccagagaacttataacggaagccttctgattactgaaaccactgacgcctgtcacacggctctatgatatactcgaacccctggcatattgactaagaaccatgttgaagcttgagaacacatagtcgaacccgtatatgccaaatgcagatgtttcttctgccaaatttggcaccaagcatatgggtaaacttacatattcattgtatcacactaatggacaagcacacata

SEQ ID NO: 17885 - DNA, 437 bp, Glycine max
  modified_base (405)..(405): a, c, g, t, unknown, or other
atggttgtggactaacagattggtcccttgcttccacctatggaaagctagccatctttacaataggagcatgggccggttcatcaaacggtggagttctcgctggcctagcagcctgtggggtgatgatgaacattgtttccacggcctcagacctgatgcaagattttaagactggctaccttacattggcttcgccacgctccatgtttgtgagccaaataattggcacaacaatgggttgcataatttctccttgtgtattttggattttctacaaagcgtttcctgaccttggggttaaaggtaagtacaagtgaatatcctgccccatatgcaattatataccgtaacatggctatattgggggtacaaggttttggccatctaccaaaaaactgcctnttgcttggttacatattctttgctgctgccgt

SEQ ID NO: 17886 - DNA, 251 bp, Glycine max
cccacgcgtccggaattcgtgatgaagagggaccacaaagatagctgcggcggcggcggcgccgcactagggactgtgaagggtgagtgttcctcaatgcagtcaaacgggaaggcgaatatgtgggaggaagagcaacagcagcagcagcagcaacaacatcaacaacaacaacaggggatggacgagttgctggcagcgttggggtacaaggttcgtgctttcgacatggctgacgtggcacagaagct

SEQ ID NO: 17887 - DNA, 366 bp, Glycine max
ggaacgtggaactgcggcaaccggaatatctcacttctcagatcatatcaatccgacggggttgcagttataatggctccattcagcggcgatgagacggcaccgattttcggcttccttggagccgcagctgccctcgtcttctcctgtatgggagctgtctatggcacagccaagagtggcatgggcgtatcttcgatgggtgtgacgagaccggagctggtgatgaagtctattgtccctgtcgttatggctggagttctcggtatacatgggcttattatggctggaattatcaattgtttttttctggcctttagtcccagggccaaatcttattacctctctgatggatatgcacatatc

SEQ ID NO: 17888 - DNA, 393 bp, Glycine max
  modified_base (278)..(278): a, c, g, t, unknown, or other
ctctttccgcattttcccaattaggatgtgtcattgagacagaagaagaagaagaaattggagggggtgtgtgatcgggtcctcaggtgaagatctgaggctgttggtgtctcttttcttttctccgagttccaaagatgagcgcttctaggttcatcaagtgcgtcactgttggggatggtgctgtgggcaaaacctgtttgcttatttgctacaccagcaacacttttgctaccgattatgtgccgactgtttttgacaatttcagcgcaaatgtngttgtcaatgggagcattggggaaaaaatttctgggtttgtgggatactgcttgacaagaggattattacagattaagacctttgagttatccgggtgccgatgttttcatactg

SEQ ID NO: 17889 - DNA, 396 bp, Glycine max
gcatctcataggccgattctttagccgcttctctctttccttgtggtgttctcgtgttgcgggtaacaaaatggttgcaagtgttgacgctttgaatgacggtttgagaatcaaccgttcagttgaaccgttgcctgaggactttgatgcaacagctgtaatcatagatcccgtgccttctgcagctgtagacaatggcattctgaaggaggaggcgcagatcaataaaggaatagaaaaaagagaaatagtactgggaagaaatgttcataccacatgtctagaagtcacagagcccgaggcagatgactagatcactggtgaccgggaagctcatatggcaagtgtgttggccagatacaaaagagccttgactgaaaggacaaagcaccattt

SEQ ID NO: 17890 - DNA, 174 bp, Glycine max
acgcaacaggcaacttagtgagttgcaccccatatacaaattgctacaccctcattttcgttagggaatggacattaacgctatcgcacgataagcacttatcaacgcttatggctccattgagagctcatttgcaccaggaaagcgctacatagagactaactctgcttgtta

SEQ ID NO: 17891 - DNA, 426 bp, Glycine max
gtcctgaataccttcaggattctgacattgtgtccagtcgttttcagaggagagatgtttagggtgcttgagagcaatatcttggtttggagcatactgataatgctcctaaaagatcatatgctgttaaccagaatcgccatactttcgagaagccagtaaagatttataattaatgaaactggtattgatgagttatcgtcttgcgtgggatgaatttgccatattctgctacatctatgaggcttttgtaaaaacagggtaaatagcgaaaggctactacgtataggccacaattagtgagatcagcaatccaggtggtttctgcatgttttatattagaattgtggtatgtaattatttctgtcaacggatctgaacactgtctgacgaccacagcccgttgagctttactacttccaactt

SEQ ID NO: 17892 - DNA, 397 bp, Glycine max
cccacgcgtccgctcgcagttcccttctgctcgactcggatcggagcaaagctctcgtctggccacaatcctacgactcactctctctaaaaccctaacactccgaaatgcccgaaccggaatcgcaaaacggacacgagcaagacccggagccgcagccagaaacagaaccagtgccaacagatcaaacacaaccacaattgggaccgaaatccaaatgcacgcccgaaccagatccaaatccggatccagaatcggagccagcgccaacagaccaaacgcaagcacaatcggagcctaaatcgggatcaaaagctgatccagcgggcaacgacgcatatctgagggaaacgactattcattccaatgaaacgtatgccaatccttctcccactcc

SEQ ID NO: 17893 - DNA, 349 bp, Glycine max
aaacgacaccgttttgaccgatggtgaaagggttgcacgggcagaacctccctgacgacggggctcatgtggatgatcagctggagcgccactgcttcgctcccgatggatctctaatatacaggcctatcttcaacgatcttcagcttgccagacaggaaatgagcaaggaaagactgcattacctggaagccatggctatatattctgaggctattgcaatggtggaagagtatcagcaagccatttctgagtccaacctcagtggaatcagagatactggcaatctttatccacagcttggattgaagacctctactcaggtttatcagactttatagcatcaaat

SEQ ID NO: 17894 - DNA, 453 bp, Glycine max
cttcttgagggtaccctattgaagccaaacatggtcacccctggatcccaatctgctaaggtttcggctcaagtggttgccgagcacactgtcagagcccttcagagaaccgtgcctgctgcagttcctgctgtcgttttcttgtctggtggccagagtgaggaggaggcatccgtcaacctcaacgccattaaccaggtcaatgggaagaagccatggtcactctctttctcctttggaagggcacttcaacagagcacccttaaggcatggggcggaaaagaagagaatgtgaagaatgctcaagaagcccttttggtaagagccaaggctaactcagaggcaactctgggaacctacaaaggtaactcacagcttgctgatggtgcctcaaagagccttcatgtttcgaactacagctactgatcaatcgaagttggtgttgtttgaaaa

SEQ ID NO: 17895 - DNA, 286 bp, Glycine max
ttcccattcgaccgacgcgtacgcttgttgagggtaccctattgaatccaaacatggtcacccctggatcccaatctgctaaggtttccgctcatgtgcttgccgagcacactgtcagagcccttcatagaaccgtgcctgctgcagttcctgctgtcgttttcttgtctggtctccagagtgaagatgatgcatccttcatacctaacgccattaaccaggtcaatttgaagaatccatggtcactctctttctcctttggaaaggcactttaacagagcaccct

SEQ ID NO: 17896 - DNA, 364 bp, Glycine max
cccacgcgtccgcaattatctagggtttatacaattttcgatggcttcttcagatgttgagtaccggtgctttgtcggtgggctcgcttgggccactgacgaccaagctctcgagagagccttctctcagtacggcgaaatcgttgaaacgaagattatcaacgatcgtgagactggaagatccaggggttttggatttgtgaccttcgcctcggagcagtccatgaaagacgccatcgaagggatgaacggccaaaaccttgacggccgtaacatcactgttaacgaagctcactcccgtggtggctgctgcagctgaagcagtggaagcagtggatatggtggcggtctcaacggtcgatat

SEQ ID NO: 17897 - DNA, 375 bp, Glycine max
tcgatcattgcatttgcttgggagccaaagggccacaggtttgcagttattcatggtgataaccgtaagcctgatgttagcatttactccatgcgtactggtcagaacagccgagtttcaaaactcactactctgaagggcaagcaagcaaatgctctgttttggtcacctgctggtcgctacattgtactggctgggttgaaaggcttcaatggacagttggaattttacaacgttgatgaacttgaaaccatggctactgctgaacattttatggcaacagatattgaatgggatccaactggaagaaaattaaaatgttgcaactgcagtgacttcagttcatgaaatggagaatggtttcaatatatgggc

SEQ ID NO: 17898 - DNA, 403 bp, Glycine max
cttgacggatgctctttcaagcaaagtgcattaaacacatggaagcttttactcaaagggttatatctagatggtgggttacactttacgctcgttactctgatactcctcagaagaagtctaagcttgctcctttgcaggagagaagaatgatggaccagtgtaagatatttgcaaaagcaggtgatggaggcaatggttgttctagcttgcgcaagggaagacctgatggtggcaatggggggagaggtggtgatgtgattctggaatgctctcacagagttcgggacttgagtgggatgcaacgtcacctgaatttaaatggctgataaaggaggacctggatcatcaaaaaagttgataggtagcatgggtgctgataaaggtgcccgtgtaccgattg

SEQ ID NO: 17899 - DNA, 399 bp, Glycine max
tcggtttttgactcagggaaaacttaaaaatgctcaactgagacaaacacaagagataactttgaacataagtgacagccagagggctacacctataagtacagaaaacttactatcgagagttaataataattccgggtctaatgatagaactgtggaggatgagaatggtttttgcgaaaataaaccaaactctggtgcaaagctgcatcaactactggacacaagtcctagagctgatgctgtggcagctggttgatacagaaaaccagtaattgtactggctgatcagaggtagttttggcatatttttaaacccaagcccaaaattactactaacaatttcctgagggatggatcaactgaattttagtatctaaatccatcaaaatcagaact

SEQ ID NO: 17900 - DNA, 389 bp, Glycine max
cccacgcgtccgtggacgaatcacaaccaataaacaaagaaacagaggcagagatatatggttatgaatttctcaacagaaccctctgcctcacgcttaccattctgatctccacttcttcgctgtgcgtcgaagtgaaatttcgttgctgcaaatagtgagaattcgctgcctttggtcagagttgctccgagtgatcgcttcccctggtgcgacgaactgaaatttcgatgctgcaaatagtgagaatttgctgcctttggtcagagtggctcctagtgaccgtttcccttggtgcggaaaatcgtgaattgaaatttcgtcgctgcaaatagggataatttactgtcttaggtcagagtggctcaaagtgatcgcttcccctgaaa

SEQ ID NO: 17901 - DNA, 386 bp, Glycine max
gtgtggaaacattctgctatggattgcgctgcaatcacaacacaccaatatgtatctgcggagcagattgtgaatggcatgcatcaggcaaaggcagaacgagctgatatagaggagcttacgcttgactgcatcaccaatttccactctcaccatgacctcaaaatcattctccaaaataagccactacccgtgcttattgttaaccgaccaaaatgggaaggtggtttgtacgagggctatgagaacaagcgggtggaagcattacagcttgctgaggaattgagtgctgatttcatttaaaaggtacgttgagctgaaggcagcttcttgtcttacaaccttggtggaacatatgagaaatcataatagtcaatgcaaaatca

SEQ ID NO: 17902 - DNA, 412 bp, Glycine max
atcaccgtacggtttaaattgtatagtattttttccccactcacagactatcaatgttgcgacagtgtcacgtcatttgacatgtccatagcgtcgaacaaaactaacagcagcaaaatgagcacacccttgttccatgaattcaaaaagcaagcttatttcttcttcaaggagaaaattaagactgctagattagctctaacagatgtcacccctgcagaactgatgacagacgaggcaacatgtggaaatccatgggccccagatgccagaactctcagatcaatttcaagggatgcctttttttattaacttaaacaataatggaaggattgtggagattctgcttaaaaggttcctaaaatttgaaaggaataattgaaggatctctaacatttccttgatcgggctt

SEQ ID NO: 17903 - DNA, 266 bp, Glycine max
acccacctcggaatctaagaatgtcctaacgatatcatcacaggactaataaaccaggtatggatactcggggtgtatcctcctaatctttgttcctgaacagttgacatcatcaaactttacataggatcacatcttgctgtttgccttcagaaccttattttatacttttcactattgcaatgatgccgataacgaaataactactaaaagcagccatgaatgctcttcttacactgcctgtatctggaaactctgaaagtatt

SEQ ID NO: 17904 - DNA, 447 bp, Glycine max
gcgcccacgcgtccgcccacgcgtccgttgttccttctccttgtgatcttcttcaaccttcagagtgagaaggcacattcagaaaccacgtttctctcttcttcttcttcttcttctttttcttctctcgaggtcattattaagtattcaccatggaggcaccatctcccaccaaacccaacgacccaacaaaaccttccaacacttccaccacccttagtctggaggccggcccggcccaagcgagcccactccgaaaaatgtttgccgtggcgtccatcgccgactgcatacagttcgggtgggctctttttcctccagctctctcttctaaccccctacgttcagcttttaggagtcccccacgcggcggcctccttcatctggctctgcgggcccatcttcgggctcgtggtacagcccattgtgggctactacagcgaccac

SEQ ID NO: 17905 - DNA, 266 bp, Glycine max
  modified_base (173)..(173): a, c, g, t, unknown, or other
cccacgcgtccggtcgtcgtttttgaaatggcagcgtcgtcgtcagagaagcaagtggtggtgataggcatagacgacagcgagcagagcacgtacgcgttgaattgggctctggataactttttcccgagcccaattttcaagctcgttctcatccactccaggcccaccgncaccttcgctgtgggcttcggcggccctggtaggttcattctgttacgctcttccttttcacgctttcttcgttaattgagaatccctttctt

SEQ ID NO: 17906 - DNA, 321 bp, Glycine max
cccacgcgtccgcttcactcccattttttcaaaacattcacctctccttcagaagaaacgtgctagggactcggagcctcttccgatgaagccctggccactgagtatagcagttactctcgccctaagcccaggcccgctcctgcaggcttcaatcccgccgccggatccgggtatggtaggaagcaggagtcggaatacggatccgggtatggaaggaaggaagaaggagaatacgggtcaggatatggtggaagaaaggaggaatcagaatacggatccgggtatggaaggaaggaagaaggtgaatatgggtccggg

SEQ ID NO: 17907 - DNA, 328 bp, Glycine max
gaggcacgcgtcacgccacgcgtccggaaaggggttcctctaagtattgaaattgggccataggatttagcatatgggcaaggtcgcgctgtacgacgagataatggtgcacagattgacattgctagtgctgatttggttgcggaaataaaaaagttgctcgatactattcaacagaacctgtttgatgtttcaaaacatatacgagatgaacgcattcagatcatacacacttgggatgaatttgtgcaagctttgaaccacagtaaaatgatcttagctccttggtgtgacgaatacgaagttgaagcttatgtcaaagcgatga

SEQ ID NO: 17908 - DNA, 276 bp, Glycine max
attttaagattggttatgcatcatcacattatacgactatatgaagttctggaaaccccatccgacatatatgttgttatagagtatgtgaaatctggatagctcttttattacataatagaaaatggtctgctgcaataagattaaacccgtcatttttttcagcagataatttctggtgtggagtactgtcacaggaatatggtggttcattgagacctgaagcctgaaaatttactcttggactcaaaatttaacatcaatattgcttatttt

SEQ ID NO: 17909 - DNA, 333 bp, Glycine max
acgctacgcgtacgatccaacggcttcagagatgaaactttcgaacccactgagggagactaaagtgcggtaactcgtcctgaatatctctagtgtctagagtagcaatcgtgtcaccagatcctccaatgcgtcatcatcaacttatggataataccacctaccttacaaaatcatgttcacagtctccgtcatcaataccaacaataactaaaacaacggttaccatgacaactacatgagataccttggcttagcacctgtgtcacaaactccagaatggttatggacctagtcaccatactagggaagcttatcgacaacgttggattt

SEQ ID NO: 17910 - DNA, 353 bp, Glycine max
acgcccacgcgtacgaaaaagttgttgttgagatacatgtttgtggactgcgatagtcgagctggaagtgctgctactggtctacagtcagctcaatggcgtcttccatctgagctctgtcgccttacgtccaatcacagctcactaaaaccacccttgcaggtacaatccctctctatcaacgaagcaagtgcgatatgagcaggacgaggtctgcgtgtaaaggaattacggcctatgacagctcgatcgcgggttctactctgacacccacatgcagaaccatcttccatagagctcgaaagattgcccgacaagccggaaggggacagttattggacatggaagactca

SEQ ID NO: 17911 - DNA, 289 bp, Glycine max
acgctgcaatgttcctctcaattattgcattcattgtcggatacccgctttaccgtaactcgaacgcgtggggggagcccgtttacccggttagtgcaagtggctatgactgcatttcgacagagaaaggtgccaaatgtgtcacaccctactttactctaacgaaatgatgaactaaatgcctctatttctatggcagggaaagcttgttcacaatggacagatgaaacttatggacaatgcatcaatagttaccgaagaacatgacatcataaacactatcttatgg

SEQ ID NO: 17912 - DNA, 416 bp, Glycine max
ggcttcagcaagaaaagagggttttcagccgcagttaaagtttttgaggagctgatttccgagggcaatgaaccgggtcaagtcacctatgcttcagttataaatgcatattggcgtcttgggcaatatagcaaagcagaagaggtgtttttagagatggagcaaaaggggtttgataaatgtgtttatgcttattcaaccatgattgtgatgtatggaagaacggggagggtgagaagcgcgatgaagttggtggccaagatgaaagaaagagggtgcaaaccaaatgtgtggatctacaactacttgatagacatgcatgggaaggacaagaatttgaagcaacttgagaagcttgtggaagaaatgaagagacgaagggtagcaccggataaggtgagttacactagcattat

SEQ ID NO: 17913 - DNA, 270 bp, Glycine max
ctcatctatggacttaagtggcatatctaaacctccaaaattcatgtgaatcctactttttggtaattaaaaatgaagtttttaaacctcttgaaaggcagacttgtcaatcctgctcctgtccttcatcatggggcctggccatcctgccaccaacccaaaaccttttttttcaaagtaaccgccaccattaccaccattaccaaaaccaccattgatgtatcacccaccttgggaacacattacctaaccgttagtgtcccaaactcc

SEQ ID NO: 17914 - DNA, 428 bp, Glycine max
cccacgcgtccgatcatttagagaagcatttgaaggaaaattgtaagcacaaacacatggggcttttattgaacaagtgtgatctagttcctgcttgggcaacaaaaggatggcttagagttttgtcaaaagaatttccaactctagcattccatgcaaacattaacaagtccttcggaaaaggttcacttctatcagttctgagacaatttgctcgattgaaacgtgataagcaagcaatatctgttggatttgttggatacccaaatgttgggaagtcatccgtaatcaacacattgcgtacaaagaatgtctgcaaggttgctccaattcctggggaaacaaaagtatggcagtatataaccctaacaaagaggatctttctgattgattgtccaggtgttgtctaccacatcattgattctgaa

SEQ ID NO: 17915 - DNA, 266 bp, Glycine max
ctcttttcttacttatagacacattctaatggcacagcgctttacgtggccatcgtggccgtggagcgtgcccgtttaccgacgttagatcaagtggctatgactccaatgtgacagagaccgatgccaactccgaggcaccctacttgagtataacgaaaagatgatctcaatgaccatactggtacggctggtaaacgacgtaacaatgcacagactagaacagatgtacctgcactcaatcctcactcaagaacaccacatca

SEQ ID NO: 17916 - DNA, 331 bp, Glycine max
acgatgagttcagcgcatcatgactccgaccctcccatccgactccacttgcctgctctctcaccgagggtcttcaattccgaaccaccggagctctctcacggatcctccgcccgacccttctacgacccctccagtcccaccagcagcggttacgccgctgaaaggggcggcagcagcaccgccacaagcgtattccaagtcgatgacgtactacaccacgaaattcaagagatcaccatccacgattcccaacctttctctcactcctcctggctttccggaaaacgacacggcgatgacgatgatgcttccatttcatggaggaaaa

SEQ ID NO: 17917 - DNA, 428 bp, Glycine max
gcgaattcaagcagaaaatatggaattctacatgtccagagcatgtgttggaaaatctgaatgggggcacggaagattgtaacacagaacaggagcaagaagctattggttttaaggtgaagaatgcaatgctgtatccgcgtgaagtggagaaaggactatggccagaagattattctctttctgatcatgctagactcacagctgtgttttcaccagcaaggatgagatgttctgcctcacaaaactgaatgtacttcatggcactaatagtcttatcccacagaaaaatattcaattttgggaccagtttggtgtaagggtaaaactgaagtgatcccttttttcactttcatttttagtcccctaccaaacatgtcttgccataattagtgattaatctgtcttgtatatgtgtttggagtcaa

SEQ ID NO: 17918 - DNA, 428 bp, Glycine max
acgcaaaatgtgagcggcatcaattttcttatcaaagagggtccaaaagtcaatgcaaagttcgagctgaggccgccaccatatccactgaatggtttggagccggtgatgagccagcagacacttgagtttcactgggggaagcaccacaagacttatgtggaaaatctgaaaaaacaagttgttgggacagagcttgatgggaagtcactagaagagattattgtcacatcatacaataagggtgacattcttccagctttcaacaatgcagcacaggtatggaaccatgacttcttctgggagtgcatgaaaccaggtggaggtggaaaagccatccgggagcttctagaactgattgaaagagactttggttcaattgtaaaattcttgatgaggtcaaggctgctgctgcaacacaatttggt

SEQ ID NO: 17919 - DNA, 288 bp, Glycine max
gcaccacggatttttccttcgctacgaagatatccctctctttctttctcatagtggtcaggtttctgcgaaatcgccgatgctagaatcggagcttcacgatttatccgatgacgccgattacgccgcgtcgcagcaacaaggatctgctagcgtgatgttgcggagtgacagtgccaaacagatttcccctcggaacggtgcctaaaatggtatttccgaaggacaatgttgcaattcatccgactcaatttgcgtctgaaagattcagcggatgactgaaattga

SEQ ID NO: 17920 - DNA, 433 bp, Glycine max
cccacgcgtccgtttctttatgtgctatagaggccacgaggaaattatcatgaatgggcttgtttctgctgcttctgagattgctgctgggttggccgtaaggcttgcttctatcggacctggcgttggtcaaagcactgctgcacggcaagctgtcgaagggattgcacgacaaccggacgcagagggaaaaatacgaggtactttattgcttagtttggcttttatggaagctttaacaatttatggactggttgtagcattagcacttttatttgctaatccttttgtttaatcctaagaaaatagaaatacatatgcttttttccgaggacttgctttaccggacttgctttttccaatgctatttatcataatattccactcctataattctttattccgtcggacaagaacacaggggaaggactaa

SEQ ID NO: 17921 - DNA, 331 bp, Glycine max
actcgaacctcaattcccacctagacccacgcttccagcgtatacgctactgtcttattccaaccctctaccaaatactacattgctaccacgtgtacgtgatacacatccaccctaatttcagctcaactcttgctaaccagttacagcatgacttttaacatacacaatcatatattacatccctattctcaaacaatacgcccattcccggtccgtatcttcaatcggcatgccacaaccactatcactatcatctacacatatcgacaaagacacgccttataattagtctaaaaggcaagatccatttgtgcccataacctattcc

SEQ ID NO: 17922 - DNA, 83 bp, Glycine max
ataaaataagagacagactctgtaaaattcttgtacatgctactgctgtattctatcacaatgaaagagacaaatactgctgt

SEQ ID NO: 17923 - DNA, 137 bp, Glycine max
aatctctacatcatatcactcaatatgatcaacctaaaacttaaccccttgccttcacctttcgttgatgacaaatttatttccaccctcaataaagtaaaacctcatctccttaaaaagatgctctcccccatcat

SEQ ID NO: 17924 - DNA, 285 bp, Glycine max
ggtttgatcctactcaaggctgtcaccaaattcagccgtaccaccagcaatgggctccagcggctgccgctcctcctccttctcctgcagccgcggacggtcctcctcctcacccttgggaggaggttcgaacgatattcataactggtctttctgataacatgaaatatagagagctgcagaatctgctgagatagcttccctccttctaagcatctcaactgaatttcaaagctgataaaccaatattgtttgctctctttttcgcaccaaaccaaaaacttt

SEQ ID NO: 17925 - DNA, 332 bp, Glycine max
  modified_base (3)..(3): a, c, g, t, unknown, or other
agncaagcgtggcgcgcacccgttctgacgcacgtctctctctctctctcgccatggctatggctatgcaaagcgtgatcagaagtctccaagatcctcatcatagcaggagcaggttacaccggcaccgtcctcatcaaaaacggaaaactctcggatttaatcggcgagcttaagttgctggagaagggattggaaaaatctggggagcatgctgaaggcaaaggtgaatatgctgatgccatagctgctcaggtgcatcgcctggcgaatagaattcggcagctagcatcaaacaggccaatcacagtactgaatgggggttctgaaca

SEQ ID NO: 17926 - DNA, 444 bp, Glycine max
cccacgcgtccggaaaggggttcctctaagaattgaaattgggccaaaggatttagcaaatgagcaggttcgcgctgttcgacgtgataatggtgcacagatagacattgctagtgctgatttggttgcggaaataaaaaagttgctcgatactattcaacagaacctgtttgatgttgcaaaacatatacgagatgaatgcattcagatcatacacacttgggatgaatttgtgcaaagctttgaaccaaagaaaaatgatcttagctccttggtgtgacgaggaggaggttgaagcttatgtcaaagcgaggacaaagggtgagattggagcagctaagactctgttgcagccctttgatcaatcagaactcccagaatgcaccaaatgctttgcatcaggaaagcctgcaacaaagtggacatactggggaagaagttact

SEQ ID NO: 17927 - DNA, 338 bp, Glycine max
aaattttaaaattgattattcatcatcacattataacactatatcaagttctagaaacatcaacagacatatatatctttataaactatttaaaatctatacaactctttcattacataatattataataatcttctgcaacattattaatcccatcatttttttcatcatataatccctaatttggagtactctcacaggaatattctcttcatacatacctctatcctcataatttactcttttactcaaaatttaacatcaatacttcttattcaactttcatcaacatcattcattattttcaccttcttaaaacaaatttttgtaaccctaat

SEQ ID NO: 17928 - DNA, 318 bp, Glycine max
acggaaaaaaccgacacaaagatctagacctagctagaatcaaacaggtgcgacctaaggtagagagcacatgagcatgtcgaggaacttgcgagctgagcttactgcagtaggcaccctcctgcatggatgagcaacccaaaccagacacatggtcagcgatgccacagggctggatcatccctgctggcggcgctgccacctacaccgactgggctttcaacaaaaccttgaccgtaaacgacactctcgagttcaacttcgacaccggccaacacaacacggccacagtaacgaaatccaatgtccacacgggca

SEQ ID NO: 17929 - DNA, 429 bp, Glycine max
cggacgcgtgggctgacataatgggggtgacatggatgaaggtaccaaggagtaaccaactgggtggtcaaatcaaagatgggttgttctacaagttcacgggatttcgtgaccaggatgttgtaactttgaccaattttttccaaaacacctgtggaatatcagtataagagaagcaactttctgttatcggacgtaattggggagaagttgatctaaatggaaatatgctggctttcatgggtggttcaaagcaagcttttgaagtatctttagcagatgtctatcaaacacaggttcaagggaagaatgatgtgatcttggagtttcatgtggatgacacaactggaactaatgagaaagattcactgatggagataagtttccacataccaaattccaacacccagattgctggtgatgaaaatc

SEQ ID NO: 17930 - DNA, 272 bp, Glycine max
ttgcttttcatgtattaatttttcttatatgactattataatctgttggacctggttcaaataagttactaatataaccgatggatttaatttagttttaaattttcctgtaatttcactttttttcttatttttgaccaatattgcattaaaatttaattttcaatgaataactttgttacaaataaaattgcttctatttatctcaaatttcattacccttcactattggtttcttttaactttcttttattctttattggtatttcaat

SEQ ID NO: 17931 - DNA, 305 bp, Glycine max
acgctctcacgttactgatcgtctattcggcaaacctagctatagtattggagccgatcctacggggaggaggaacccgagcacttccagtgacgttggagacaagataactagtgaaggcaggtgtgacgatgaatgagactatctcatgaaacatacgaccaacttggtttaagattaaacactacattatcaatctgcataatcatgactacacacaaagatcatcaacaacatgactatgaacaacaccaagaatactaacaggaacatgcttaaccaaggagctgcaacagtaactgaat

SEQ ID NO: 17932 - DNA, 405 bp, Glycine max
  modified_base (364)..(364): a, c, g, t, unknown, or other
tcgcccacgcgtccgcccacgcgtccggtctcttcctactctctgtgcatagctgcgttttccgagatcgaaaggtgaggttagtaagtaacaatggtggagaaagccaagggtatgaaggaggaggttgtcactcgagagtacaccatcaacctgcacaaacgcttgcatggctgcacatttaagaagaaggctcctaaagcaattaatgagattaggaagtttgctcagaaagcgatggggacgaatgatgtaagagtggatgtgaagctcaacaaggctgtgtggagccaggggatccggaacgtgccaaagaggattatggtttgcattgctcgcaagatgaacgacgatgacgatgcanaggaagagctctattcccttgatactgtcgtcgaaatcccc

SEQ ID NO: 17933 - DNA, 431 bp, Glycine max
  modified_base (30)..(30): a, c, g, t, unknown, or other
gcgaaaactatattgaattaaaatcgctgntgagattcaaagcccctaaaatacatactgacattggttagcagaatacaaatgaattggcattcgttcgcataactagaacgttaaaagaaagacaagagggccagagattatataggatagtttttcacatatacaggccttcaagcaccccttctttcttattaaacatcactttatccttggccttcttaaagtcagcatgagtcaccttcattcgacgttctcgtagagcaagtaaaccagcttcatgacatattgcctatatatcagctacggagaattcgtctttagtcataacaaattcttccaagttgacatcatcagctaatgtcatccttgacgtgtgtatctggaagatgcgtctacttgtttcgatatcaggaagaggaaattctatc

SEQ ID NO: 17934 - DNA, 252 bp, Glycine max
gtttctccctcgtatgagtgcgtgtgtgagctatcttcttgactcttcacttatgttgactggcatggctctatgagaatccgttgctgggtaccactcgaacgttcctgcttatgcgagtttgacgtccaccaaaccaagtcctaccacgcttgactctgtgctcccaatagccattgaaaacataatcactaagatcgtagcatctcaagtgtagcccctctggagacattacatcagatcacgcggatc

SEQ ID NO: 17935 - DNA, 445 bp, Glycine max
cccacgcgtccgagctgcacaaattaatatccaacactctcaagctttccactttcaaactgtgcccgctcaatttgctttatctttccgaggtaatttcttttactttctttctgaactcaaataaatttctaatgaataccccatcctctcatatctctatgtatctgttttccctttctttgcattccatcttccaacgtcggtgcttgtctgaattaaacatatttctctgtatctgttttctgtctttttcttttttaatattcctgtttgtgttaattttcaatgtttcagagtcttgctttttcttcttcttttatcggatttttttaatagaaagattacatcatggatttttttaaaattataatctcattgatattgattgaacaatttttttgtttcataataatttggtttggatgtgatgtaacttgggttt

SEQ ID NO: 17936 - DNA, 398 bp, Glycine max
  modified_base (380)..(380): a, c, g, t, unknown, or other
gagttaacgtagaaaagcttcgtctcttgtcttcgcttctttcaattccttctcctttctagctctctctcttcttatatttccacattccacgtgaaccttctagaactataatagaaagaaaccctccattccatggctccgccgctcgaacacaacggcgtttccacgagcggtgactctcagagatccattcccacgccatttctcaccaaaacctaccagctcgtcgacgatcacaccatcgacgatgtcatttcgtggaacgattctggatcgtccttcatcgtctggaacaccaccgctttcgccaaggatttgcttcctaaatatttcaaagcacaacaacttctccagcttcgttcgccaactcaacactnatggatttagaaaagttg

SEQ ID NO: 17937 - DNA, 291 bp, Glycine max
acgcgcacgcgtccgtgccaagcttggtctctatctcatttagaggactgtggagaagtaacggcgacaggggctatcactcttatatgctagcaagctatctaagatatcccgctgcgtcataatagccctaggcttcccatatactccatttgacctacttctatacagattccattgcttcttatattggcattggatctataccattcaagggtacgggattctgacattccgaattatgcacacaaatacttcttgaagtcccttaagataactagatgcaaatat

SEQ ID NO: 17938 - DNA, 162 bp, Glycine max
tatgctcacaactttaacactgcttttcaattatacatcacactcccttttactttcaccttcaaatccaccttagaatctatagatacaacacaactctaatatactttacaaatttttttccaacttaaatacttcatacatatcaaaaaattcttctta

SEQ ID NO: 17939 - DNA, 427 bp, Glycine max
agaaacaccaagatacacaaaggattagtcacgtgtatttttaaaaatatccaaaagaacatggatggggatgtataatagaaaaagaatactaattggggctttccgctggtagaaaaaataaggcagtacttcccagaattccgatccagagtatacttccatgcaccgattaaataaataactatcagaaacgatataatcctttaatttttggaagaccccttctattttacttacacaaaaaagactacgataagaacgaagaaaaaagtgatcccccttttcttgttagtcttatatccatatttatggagatagaattcatgtcataatttaaaaaatgaacatgtataattctttttcggaatcgaaaatgatgagggagtttttgataatttgaaaagagtattttatggaagaatta

SEQ ID NO: 17940 - DNA, 339 bp, Glycine max
acgctttagggaaggatgaacgaacaactatactactattatccttattatctgcatcattgcaggtaaggctacttattataggtataagatgtcgttattatgcctcacatatggattcgatatgcctctccaacaactcagctgtttatcgattcaaagacccagcgtcccagttgtccccttccatgtctaggatatccagatccctcatcacagactcaccatcactacgcactaactgaacattcacaaggacatgaaccatgctgatcagcatcctttgtgtgcatgaacatctgccttgcttctacctgcgactggctgcacaccgtgctg

SEQ ID NO: 17941 - DNA, 233 bp, Glycine max
gaactgtcgatcatacttctactctccgaatccgctacacttgcatctcacatgggtgcaagcaccaacactagcatattgaaacccctcatatttcatcacccagagcagcttctgtattcccaccggtcttatctacgcttgcacaccaaatctaagacccactgcggagcgaattctcggccgatggtttcgaaagccacggcggctccctgagccttgaagacagaaaa

SEQ ID NO: 17942 - DNA, 277 bp, Glycine max
tcgatccttgagttgcctttctagccccaaggattcattggtgacaagcttgataccaggtgaggtttaacttgaggaagagactatatatcgaaaaatatgaatatcgtaataataatctcatactttcacatcgaagcaatatccatttcaaacggtgctaatatcatcctatttaatgactgcctaacttatttggctttctttgtccaattgccctaattgagtgcttctaacgctattccaatttattggcccaattgagcttcgttaattt

SEQ ID NO: 17943 - DNA, 375 bp, Glycine max
ggaaaattagcctcacaaaagcaaagatcaaacaaaccaaggacgagaacacgatgttgcttgaacttgcacttggtttattggttttggctctgtttctgcacttgcgtcccacacccactgcaaaatcaaaagcacttcgccatctcccaaacccaccaagcccaaagcctcgtcttcccttcataggacaccttcatctcttaaaagacaaacttctccactacgcactcatcgacctctccaaaaaacatggtcccttattctctctctactttggctccatgccaaccgttgttgccttcacaccagaattgttcaagctcttcctccaaacgcacgaggcaacttccttcaacacaaggttccaaacct

SEQ ID NO: 17944 - DNA, 402 bp, Glycine max
atttcccgtggtccccaccatctctccgcagtcatttaaatcatgctattttattgtatcggtttactctcacaaagagtctgtttgtttcctcgattcaattttccttgatatggttgtccaaatccaaccagatagattatcaaactcattctcactcattcccttcgtttgtgacggaaattggtctcctgcttagtcatatctgcatctgattttgcacgtggcgtacacccagacattctgcctgatctagttgggataaagtgtttccttatattgccaagacgagtttactgtgtggcgggagtgtttttagtttggaggcctaatatacttgtgagacagacagcttttcgactttgagtagttgggtgatagaagaaggctaaggttctttgg

SEQ ID NO: 17945 - DNA, 354 bp, Glycine max
attgacctcactcatgcatggatcactcgtcgatgctcaaaacaccaaggacatgagcctgcgctagtgccataggtctctgatcctatttgtgccttggtgaccacagccactggaaagtcataagtactgtgccatttacacaacccacgaagcccaaagcctgagattaagttgataggacacgttcatccctgaaaagacaaacttttggactacgcactcattgaacggtcctaaaaacatgggcccttatcctctatgtactgtggcttcatgccaaccgttattgccttcacacgagaattgttcaagctcttcctacaaacgcacaacgcaacttgatttaacaca

SEQ ID NO: 17946 - DNA, 375 bp, Glycine max
accgatctccaattccgagctacgcccacgcatccaaccactcgtgagtgcatacctaacacatactatgaccaacatggactactacacgggcgaggtataattcgagacttgatcctaccatattccattctacatcaaaaactattatattcacctacctacaccctcaaactcaccaaaatctcaactactatattctttataagccagttaccacaactggaaccctccacatcctcaagcatcaacacgatcctaagactaatgagatagacaaagaattaaagtctgaacaaggaactcaaagactcattatctatgaaaagaaagccatttatagacaacgaccgttactactctccaaaaccttga

SEQ ID NO: 17947 - DNA, 301 bp, Glycine max
tactccactcctactatcactcacatttacctcttacagtagacaactgtcatctttgcatatgggatcttagactactaatcatatttctattcactattatcagccacacattgatctatctaatttacttttcaacctactattttgattcttactacatccccatctctcatcttcctctacttctattccaaaatccatacaattttcatacatcatgatttatcccccatagaacatatttgaatacactataagacacttatcttaacaatttatcaaaacacagtattaccaa

SEQ ID NO: 17948 - DNA, 413 bp, Glycine max
gcgctcgtgaggctgctatggcagttcaaggaaagatggtttattctcagcgtaagaagagcagagcagggtttcgtaagcttgagaaacaacctgaatggttgaagggtggagagctccgtgattatcaacttgagggtctgaattttcttgttaacagttggagaaatgatccaaatgtcattttagctgatgaaatgggccttggaaaaactgttcagtcagtatcgatgcttggttttctacagaatgcccagcaaatccatggtccttttcttgtagttgttccattgtccactttatcaaattgggccaaagaattcatgaagtggcttcctgatatgaatattatcatatatgtaggtactcgtgcaagtcgagaggtttgtcaacaatatgaattttataatgag

SEQ ID NO: 17949 - DNA, 389 bp, Glycine max
acgcttccgcttattcgaatccccggcatgccactgaccaaccaacaccaatcattccctttcagtaccggccgcatagccacgacggcgaaagcggagctcgggacggcggtggcgcggacgggcggagccggctaccaatctgcgtccgtcgacgttcctcacgcataaggtcacagtccacgacagacaacgaggaatcgttcacgagttcgtcgtgcctgaggaccagtctatattacatactgctgaggcccagaatattaccctttcattcaacttcatgcatggctgttgtactagctgtgctgtacgtataaagaagggacacattaggcaaccagatgctcttgggatatctgccgaattgagagacaagggttatgcac

SEQ ID NO: 17950 - DNA, 416 bp, Glycine max
cccacgcgtccgcccacgcgttcgctcaagcaaccatggcaatggcaacccaagcctctctgttaacgccacccctctccggtctcaaagccagcgaccgcgcctccgtgccatggaagcaaaactccagcctctccttctccagcccgaagcccctcaagttctccagaacaatcagagcagcagccgccgacaagaccacagaggccccaccaaaagtagaggctgcaccggccggtttcaccccaccagaactggacccaaacaccctttccccgatcttcgggggcagcaccggcgggctcctgcccaaggcacaggtggaggagttttatgccattacgtgggactaacccaaagaacagatctttgaaatgcccactgtcggcgccgctatcatgagggagggtcctaac

SEQ ID NO: 17951 - DNA, 402 bp, Glycine max
acgattatgatcgactgacgatcgatcctgaattggagaaagagattggagcacaacttgatgaggaccgtgatgcaatgcttccaaagtgtgatgtaattgttatcaacacccctctcactgagcagacaaggcgattgtttgacaaaaatagaattgcgaagtgcaagaaaggtgtctagattgttaacaatgctcgaggggcaattgctgacacccaagcaattgcagatgcttgctccagtggccacgttgcatgttataatggtgatgtttggttcccacagccagctccaaaggatcattcatggcgttacatgccaaaccataccatgacttcttatatttctggcaccaccatagatgcacagttacattatgctgctgtggtcaaagacattc

SEQ ID NO: 17952 - DNA, 326 bp, Glycine max
gtcacgcgtccgttaaggtataatgagcgtcatcaattgaccagactgccactgtggcacagatgctcactctgtgagcagacgcggagctatcttctttctaggacactggagctggaactctgagaaacattgaccgaaccactacttgtgaaatttgctagaaaacccagttctgttctcgaattcgtgcccacatggctagacccttcatcagaggctccagagctcagcgcgtgtctggtctatcttggtgcctcagcatcttctgaataagccccgctaatgcaggaggcttcactgacttagcaaacaagcgggacctc

SEQ ID NO: 17953 - DNA, 389 bp, Glycine max
cggacgcgtgggcggacgcgtggtcggacgcatgggcaacaattgctccatatgaggctcggcgtgatcggcttcgatgatgaagctgtttcagttccagaaaccgtatgatcagcacgcgcagtacgtgaagatggaggagcacaatttcctcagcgcggatgaagcctgcaatttcttctaggatgaacaagcaccgacccttcaatggtactgtccagaacagtggagctgagaaaagaaacatggaaattaaaccgcttttagaaattttagtttgaaggtagaaaatgaaatactgtgcaaacgaaacagagagaacagagatcaatggctgcatggcgtggggtcggaaatgagaggttgattatgactactctcgaccgtgc

SEQ ID NO: 17954 - DNA, 438 bp, Glycine max
  modified_base (378)..(378): a, c, g, t, unknown, or other
  modified_base (381)..(381): a, c, g, t, unknown, or other
cccacgcgtccggagttatgaaatttaggttagattggactaatacttggacctactccagtcccggcttctccgccaccgcctccaagcgctgctgttcctccgagggaaagcagcctcactacgacttgtacacgcgcctcctctgcgcgtacctacgcgcttttgttccctcttatgatcttatcgcgcaccagccctaccggacttcgattctccactacggctccggctacgacggttctgttgcggcgcgggccgagttcgtggtcaacgcgcttatccacttctggctcgtggacaacgatttctcgccgctgccggcgagtgtttgccggagcctcggggtttcgtttgcggtgggggaggcgcctacgncgncggggctgggggaggtggtgaggctgtttgtgaggtactagaatttgagcaccgtcg

SEQ ID NO: 17955 - DNA, 278 bp, Glycine max
ctcacacgtcatgaaagtccttgtcttagatattgtcggctattcttataactttagccttgggagctgatatgtttacaacagactaactcattctcaatcttacaaacttctgtattaattcaacactttcattattaccactcaacacatatccatacatacaggagaagactccatattcttatcaaattaccaagcaccaatattctaatcttactattcaaaacagctccgcttattatcggactatacatatgcaatccccttattactat

SEQ ID NO: 17956 - DNA, 449 bp, Glycine max
acggttcgacacaaggccaaatatgagtgacatccacctctcagcagaggaagaagccaccatggaggcagagaccagagactactttgatggggttgcaccacaacgccacacaaagcctcaacgaagtgagtattcacctcaatatgtggatgcttactccaatgcccatcactcttcttcttcttcttctataccagaattcatgcaattccaacgcctcgagaatgatccccaagagaagaaattggagtacaatggaagtcaagtaccgcaagaatttgtagaaacagagtattaccaagatctcaacagcgtggactaacaccaacattcgacgggaacaggatttatcctagtacacaaaaatggagatgactttcacatagaacccgataatgactctggatgccatcactcttgcaagtgcaatccagcaaccaatgatt

SEQ ID NO: 17957 - DNA, 375 bp, Glycine max
gcggctctttccgatcagcttttcaggaagaggcatggaggaagcacaataagcgcatgcacgaggagtgagaggaggagatcgaaagagtggaacgaataaggcgcatgcaaagtgtgtttaacagagaaaggaataagtacaaaagaagctattagagctggatggaaagtggtcctggtgcatatgatcagcattcccaaagagaagattggtactggaaggctgatacatcctttagagacaagaggactaattatcgagaaactccaagagagagtggaaactatgcattatcacatcactactcagttttgggtcttgacaaggttagaaaaactccatattcagaagctgagattaagacagcattta

SEQ ID NO: 17958 - DNA, 385 bp, Glycine max
cctcggttacaagacaaccccaaatctcatatacctctacttcgtgctcggacatgtaccacttaccttggctatacctactaacagctatccatgcatatcattaagaacctcaaaattctcttaccagactggggtagggtctatatgcttatgggggaactccgataaaccaacatcttccagaacttgatagaagcctggatatacttgttgcaactcctggaagactgctagatttactggagagagctatagtttcattgccaatgattaggtatacatccttatacgaggcaaatataatgctggatattgattttgagccacaaataaagaagattgttgaacaaatggacatgccttcaacatctgccagacatac

SEQ ID NO: 17959 - DNA, 429 bp, Glycine max
acggtcagtctcagtggacatgaaggaccagaaaatgactataattggggatgttgatcctgtagacaggggttggaaagtttacaaaattcagtcttggcaagcttacaaaattctgtcatgttgagatactttcagttggaccagccaaagaggaaccaaagaaagaggagaagaagccagaagccaagaaagatccaaaggaggaatatgctgaacttctgaaggtagttgaagccaattattatcagactagacatctgcaatacccttattactatagcagaactgcggaagagaatccaactggctgcgttatttgctaagtattggagttagatggataataaatgagatcaatgaaagaagatggtggctggagttgagaaagatttggttctgttcttgaaatttccttttttccttttc

SEQ ID NO: 17960 - DNA, 425 bp, Glycine max
acgcaccaaagcactcgtgagtgtatacccaacacagactaagatcaacatggactactacacgggcgggtgagaagttgagagggaacctatcatggagtattccacaccacgaccaatgatgggcaactaccaccaccctaatgctcaccgtgtcctcaacgagaagattgtttatgaggaggatgtgattggaggatcccgccacaaccacatgcatcaccaccaccctgagactcatgagagagtcaaggtggtggagtatgaacaagttcctgagaggcgcgttgtctatgaagagaaagttgcttatgacaacgatcgttactactctccaaggtattgaaattggacaaatggaagaacacctataacgtgttatcatgtggctttttattaggcaggctacctagtataccaaaagc

SEQ ID NO: 17961 - DNA, 115 bp, Glycine max
acgcgcacacctttctcaacttctattccacatatctagtcctctattattctaactcatcctatggagagggagcgaatgagatcatggagcttcgttcgagcttacgagactc

SEQ ID NO: 17962 - DNA, 181 bp, Glycine max
cccacgcgtccgctcactcttacggacagcctgaaagcattactcacataaacaacaccgggtatcgggttcatcagatccttagactgcatggatgctgcatttactacattttcctacctagtgcacacggtttgttgtgccaatacacaatgtgaggatacttgactggactagcaga

SEQ ID NO: 17963 - DNA, 372 bp, Glycine max
acggtctaacgctatcagaatcaacacatcggcatatacattaacgtgctatgctgttgagttagtaaacaccgcgcctaaaatcgttcgtatcagattgaacatgtctccaagtagcacggctgatataatggctacccctgatgcagctccctggcagctcaatgtagatacatatgatgcattcataatcaggaacaataatttctacaccttattatcgcttcaactttgacacaacattaacatgcatacactctgataccacatctctgatgacaattggactaaggttactaatatatgttcatcatttgcatttaccctagccaaatttcatcaacaatgatctcttggataacttatatattg

SEQ ID NO: 17964 - DNA, 450 bp, Glycine max
ctcgtgaggctgctatggcagttcaaggaaagatggtagattctcagcgtaagaagagcaagtcaaggttgcagaagcttgagaaacaacctgaatggttgaagggtggagagctccgtgattatcaacttgagggtctgaattttcttggtaacagttggagaaatgatacaaatgtcattttagctgatgaaatgggccttggaaaaactgttcagtcagtatcgatgcttggttttctacagaatgcccagcaaatccatggtccttttcttgtagttgttccattgtccactgtatcaaattgggccaaagaattcaggaagtggcttcctgatatgaatattatcatatatgtaggtactcgtgcaagtcgagaggtttgtcaacaatatgaattgtataatgagaaacaacctgggaagccattaaattcaatgcactgttgac

SEQ ID NO: 17965 - DNA, 303 bp, Glycine max
tatttggccgacggaatggcaccacttggagttggtatgaatcaaaggagctcccaagtaattttactcaattatggacctatttaaaattaaatcatgggcttgatttctgttatagaatagatagggtttggctttcattttcagaggaatgtatatttacacctcattgcatgaatatgagagaacaaacaagcgttgacaaagtctggatggatggatgatgccaaataacatttgcatcttcaatgagccacgaccaataaaagaggttccttgctacactctcttgagcacgaacac

SEQ ID NO: 17966 - DNA, 293 bp, Glycine max
acgcccacgcgtacgaatacaatcactttgacgaaaacgctgtcgattgggctttgtaggtctagtacggactatacctgttacctaactgccactgcatcagcttcgtcgatcgaagtggagcttccatttcatagacggagacaaagatagctaggacgctcactaggctgaccctgagcatgacgaataacaagcctacttacaactgtatgttacagcctaagacacatattatgaaggactccgtgatgaatctagtagtacgggtgagcaaacatagctgcataaca

SEQ ID NO: 17967 - DNA, 332 bp, Glycine max
acgcgtccgcccacgcgtccgcccacgcgtccgctcgtcggagtacactcgccggaaaacactggtcggggtatcttctcaaacaaaatttaaaaaccaaaaaaaactaatcctcgtggtcacagtgggtttgagtgaactaaaaggaacaaaggcaatacatagagggcaacgcgattttcattcttcacaactgctatttccttttacgacgtcgttatgggaatcaaggttatgcaattgtcgcaacccgttcttcctcattccccttcttcgtctcataccctagcttccgcaatcttttccccttattcgtcaaaaacgcgaaccct

SEQ ID NO: 17968 - DNA, 223 bp, Glycine max
acgctcacgcgttcgtacagctggatcataaccgtatttgactcactgcatctgactgatccgaatgtacacctctaggaagttaattcacatcaataacgatgcctatcccactgacttttatgagacagtcgcacagtacttgttctactcgcataacaccaatcatcaatctatattgagactcgtaagatctctacataaatcatgcaattcaaatgga

SEQ ID NO: 17969 - DNA, 452 bp, Glycine max
  modified_base (301)..(301): a, c, g, t, unknown, or other
aatatataagaagatgataaggggaagcgaagcatgtaggtgtgatggagcagaagaaggcagagatagtggcagagctccaagctgtgaagcacaacagtggcaagtcctacaatcagttagcggaggagactggactcaccaacgtctatgttgctcagcttctcaggagacaggctcagctcaatccccaaactgcccctctacttcgggcagcgctgtccgacctgccccaagaccttgtttctgagatgatgagaccccctctgaggtcttatgaccctaatctcatccaagaccncactgtctataggttgaatgaatgctgtatgcatttttggggagagcatcaaagaaataatcaatgaggagtttggtgatgggatcatgtcagcattagaattctactgctcggttgataaaattaaaggagtagatggaaaggatcgtgt

SEQ ID NO: 17970 - DNA, 293 bp, Glycine max
ctccttctctctccgtccaaaagcgacgtcctcaacgcgagagcgagagatcaggcccaagggctcggagtggttccgactctctctagacttccaaactgcgcgtctatgaatatctctcatatggaactcatgttctccatcatctacggcaaactctatcctttcaacgcattctacttgtgctcacaactctgtattggtcgtactctttaagaacctcacagctcctaattctacttatgatccacatctgcgaactcgctttctgcgttcaatagctactctcacat

SEQ ID NO: 17971 - DNA, 401 bp, Glycine max
tcgcaacgcaagaaattgctcatgtcattcgatgtactactatttcagacgcgtgactgtcccacaaccaccgatgtaccgaacgtctccgccaccttcaccaatgtaccgtccatcaccgtatcaacataatcctactccttcttcaggactaggcgttagggttgccataaaaccggaatatatgatcacaccgacaactcatttatcatcacttgctggagataatccacggagcaacttccaatttgattttggattggagagaaaaattttagctgaagcagataatgataacccaaattggagcaaatttggatcataaaatattccatctaaagtttctgattcatcaacatcaaaggttactgatttggatcccattgtgagcaaatttatgg

SEQ ID NO: 17972 - DNA, 448 bp, Glycine max
tctcacacactctcttcaatttctagggttttgttattgctttgcctccattccccctttctcagagaaacaacaccttttctcttctccttcgcatctattctttgcgtttggtttttggttgattgaaagcattcacagcgtaattcgttgctgcattttaatcgatttatctaaccaggactgaatgacctaatggagtctaaaggtgggaaaaagaaatctagttatagtagtagtaaatcaattttttacaaaactcccctctgatacagcatttaatacgttagaccaaacagtggaatcaagaaattcagatctgctgcttactctaactgttctcgcaaaccattcttatacacatatcgattgatagttcgttgcatgcaaccataattttattaggaatttttcttctttgttttcaattaaatttttttgttgctct

SEQ ID NO: 17973 - DNA, 280 bp, Glycine max
ttacgcatcacaatcgattgttatttgtattctatggactacgatttcaaaagcgagtcagtcccatttccaacgatgtaccttccttcacctccaccttcacctatgtaccctccatcaccgtatcaacagaatcctacttcttcttcaatacttgacgttattgtttatataaagccttaatatattatcacaccttcatctcatttatcattacttgctctatataatccactgatcaacttccaatttgattttttattgtacaaaaaaaatttaa

SEQ ID NO: 17974 - DNA, 424 bp, Glycine max
  modified_base (370)..(370): a, c, g, t, unknown, or other
gttttctttgtcgttttctgagttgcactggcatgtatcattggaattgctgtttgctgtggcctgccctgtatcattgcacttctttatgcagttacagaccaggaaggggcatcaaaggaagacattgagcagttgtcaaaatttaaattccgaagaattgaaagcaatgagaaacttaccggtactatacaaggacctgttggaggaataatgaccgaatgccaggctgattcacctattgaacatgctctagctgaggaggatgcggaatgttgcatctgcctttcttcttatgatgatggggttgagctaagagaacttccttgcggtcaccattttcactgtgtctgtgtggataaatggctgnatattaatgctacatgccccctctgcaagattaacatcttaaaaagtagcaacc

SEQ ID NO: 17975 - DNA, 450 bp, Glycine max
cgcgtacggttctagcgcaacttcttctagatgcaagggtgatgggtatagaaaatgctcacatcagtgtggcgtcattgtccatgtcgactctgggaaatgcactaccactggtcacctgatttacaagctcggaagccttgacaagcgtgctattgagaggtttgagaaggaagctgctgagatgaacaagaggtctttcaagcatgcctgggtgctagacaaacttaaggctgaacgtgaaagaggaatcaccattgatattgctttgtggaagtttgaaacaccaaagtattattgcacagttattgatgcgcctggacatagggatttcattaagaatatgattactgggacatcccaagctgactgtgctgatcttatcattgattcgaccactggtggttgttgagctcggattttccaggatggacagactcgtgaacatgc

SEQ ID NO: 17976 - DNA, 310 bp, Glycine max
acggatagacaagaaagggcaaggcttcaaggaaaaagttatgatgagattcctggagctgaagcgtctagttataagagttgtgtcatctgttgacaaaaagttagaagtgaaaccgcggtttctggagatttttcaggaagagaattacccaacagaatttccatataaatcaaaggtagttatgctgtttcaaaggatagaaggtgtggaagtttgcctatttgagcatgtatgttcaagaatttggatctgaatgtcaatttcctaattaaacgccgcgtgtacctttcatatttggattctgtga

SEQ ID NO: 17977 - DNA, 396 bp, Glycine max
  modified_base (294)..(294): a, c, g, t, unknown, or other
ctcagatgcattacacgctccaaccagagagtgagagagagagacgagactcttagttaggtcaatttcttcaaccaccaccagcatgcaagactccggctccatgaagatctcccctctggatctcatgtccgccatcatcaagggcaagctcgacccctccaacgtctgctactactcctacaacgccgcagctgccgtcctcctcgagaaccgtcaattcctcatgctcctcaccacctacgtcgccgtcctcgtcagctgcttcgtcatcttcatctggcggagatcctnctcccccaaggccaagcctctcgaaccaccaaagcgcgttatcgagaagctttccgaaatcgaggtcgacgacggcaccaagatagtcacccatctttttcg

SEQ ID NO: 17978 - DNA, 281 bp, Glycine max
accgaacctcaatttcgagccaggcctacgcgtacgctcgaaagtatctggagcacactagcatgtatcattggaattgctggactctgcggcctagggtgtatcatggcacttctgtatgcatatacatacgcataatgcacctctaaggaagacattgagctgctgtcaatatctaaactccggttaattgtaagcaatgagaaacttaccggtactataccatgacctatttgaagcataatgaccgtatgccacgcttgttcacctattgaacatgc

SEQ ID NO: 17979 - DNA, 410 bp, Glycine max
ttagaagttgagaagatagcggaagtgaagaagggaagggatccattgcaattccatggcggcgtcgtggtcgtcgtcgtcttcaaactgaacgccggagagagtcaccgtggtcacttgccggagccagagagagtcaacagaacagaacaatctcatccctttcctctcaatccaattttcattcctttgctcaactgtgtgtagcaaggtcgtattttgttagaagatgaaacgcaagcgtgggcataagaaagggaaggcaaaaggcaccactaaccatggaagcagtagtgctaatgctaattctaaggaagaagaaacctctgggttggatgataaagatcactctggaatggaagttgacacaccttcttcgacggggacggatcagcagcataattacaatg

SEQ ID NO: 17980 - DNA, 358 bp, Glycine max
ctcagattccacgttgggcccgggtggcctggacctctcccaggccttcttcaggcgccatggacaacgccgcccctccgtcgccgaccaagcgccacaacaagatctccgtcatcggcgccggcaacgtgagaatggccatcgcgcagaccatcctcactcatgacctgaccgacgagctcgtcctcgtcgacaccaactgcgacaagctccgcggcgagatgctcgacctacagcacggctgtcgacttcctcccccgcaccaaagatccacgccctccgtcgactactgcgtcaccggcggctccgacctgtgcatcgtcaccgccggcgcccgacagatctccggcgagtcacg

SEQ ID NO: 17981 - DNA, 383 bp, Glycine max
cttctctgttacgtcctcctctcacagccacagccacagccacaaccacaaccacaaccacgacccggggagtttcagaaaccctaaccccacaataacctctcacaaactcactatttttcatcattcgataattcgaacttccaccatcttccccaaagtttgctatcatggctgggtcggcacccgaaggatcacaattcgatgctcgtcaatatgatgctaagatgaatgagttacttggaactgatgggcaagatttttttacttcttatgacgaagtttgtgaaagctttgatgctatgggattgcaggagaaccttctgaggggtatttatgcatacggttttgagaagccctctgcaattcaacaaagggggatt

SEQ ID NO: 17982 - DNA, 338 bp, Glycine max
  modified_base (261)..(261): a, c, g, t, unknown, or other
  modified_base (270)..(270): a, c, g, t, unknown, or other
cccacgcgtacggttagagacagagagagagagaaacaaaaccctaattggtgagtggcgagaatggcgcagccggcggcggcagcagcagcaacaggagcagcagtaatcgagcaagtgcagtgcttcgggcggaagaagacagcggtggcagtgacctactgcaagcgtggtcgaggcctcatcaagatcaatggctgcccgatcgagctggtggagccggagatcctccgtttcaaggccttcgagccaatccttctnctcggccgncaccgcttcgccggcgtggacatgcgcatcagagtcaaggggcggcggtcacaccttccagatctacg

SEQ ID NO: 17983 - DNA, 444 bp, Glycine max
cacccttgaggtggagagctctgacactattgacaatgtcaaagctaagattcaagacagggaaggtatcccaccagaccaacagaggctcatttttgctggaaaacagcttgaggatggccgtacccttgccgattacaacattcagaaagagtccaccctccacctggtgctccgtcttcgtggtggcatgcaaatctttgtcaagaccctcactggaaagaccatcacccttgaggtggagagctctgacactattgacaatgtcaaagctaagattcaagacaaagaaggtatcccaccagaccaacagaggctcatttttgctggaaaacagcttgaagatggccgaaccttggcagattacaacatccagaaagaatctaccctccacttggtgctccgtcttcgcggtggtatgcaaatctttgtgaagactcttac

SEQ ID NO: 17984 - DNA, 384 bp, Glycine max
caaccttgtcgacacagcatagcaaagtaacatattaagagaagaagatgtgtttggtgtgggtgtgcggggaagatgagagggtggtgtcaaggcagccagcaccgggggcctgtccttactgcagagggatgatccaagctatggacgtagagagtcagtggaatttctgtttcctacctttgtattctaagaccaagcgcaggtattactgcaccatgtgcaccagaaaactcgtccttcagtaatactgcatgatgctgatgctcatcttactttgtttcccgggttttatttactacttaatttccatgtatatgctttcgggatttgatgtactacttgtccatgtatatgtacggttttcataggatcattaggatc

SEQ ID NO: 17985 - DNA, 391 bp, Glycine max
caacaacgtaacgttgctaattgcttgcacttcccatggtcgcttcttttgtttcacattagctgtgtttgtttttgtcttagttttacacctttcctcatttccgcagtagcaacctgcgaatcaacctctctgagaaaaaaaatggcgtcgaacgggaatggcagcgttgcgaacggtaacgggagcgctaggaacggacttgcgaagattcagacgcagaagaagcatgacgggatttgtcacgacgacagcggtccaacggtgaaggctcagaccattgacgagcttcactcgctgcagaagaagaaatccgcacccaccacccccgttacggggtttcaggctcctttcgccacccttaaccgaagaagaacgtcataagcaacaa

SEQ ID NO: 17986 - DNA, 390 bp, Glycine max
cgtccggcgagcttgagaaaaaggttagtggaaatgatgtaatcttgattgccaccagcaggataggagggccaccaaataaaggttctgctgttcagcgccatagtaccagaacactcactgatgcacatgacgcaatgctggatgatattgcattgcctgctgagattgttggaaagcgagttaggtatataattgatggttccaagcattataaaagcctctttgtaccccaatgagcgaaacaataccgagtacacatggaagacttgtgctgcatgatacaggacactttcatgcataggtgtctggtgtgagtattctactaccgaggcttatgtgctatttactagctttgaattgcatcctgaattacatatggtggatgct

SEQ ID NO: 17987 - DNA, 461 bp, Glycine max
cccacgcgtccgcttcacttgacggctcttggtgcttttatgaactttcttcagggacatgtctgactcaggtttatgacacttcaggttcttctgaagggtacacttctgcagcttttcatcctgatggtcttattcttggaaccggcaccacagaatctcttgtcaagatttgggacgtaaaaagtcaggcaaatgttgctaggtttgatggacatgctgggccagtaactgccatatctttctctgagaatggatacttccttgcgactgctgctcatgatggtgttaagctttgggatctacgtaaattgaagaacttcaggaattttgctccatatgattcagaaacaccgacgagctccgtggagtttgatcacagtggatcctacctagcagttgctggctctgatataaggatttaccaagttgcaaatgtaaaatctgaatggaactgtatc

SEQ ID NO: 17988 - DNA, 408 bp, Glycine max
tcctcgctggcttattaatatgcagagatatggtcctccaccatcatatcctcatctgaaggtccctgcactgaatgctcctatcccgcctggagctagctttggctatcatcctggtggatggggcaagcctcctgctgatgaatatgggcgtacactgtatggagatgattttggtgttcaacagcaagatcagcctaactatgaggaatagccattcgataagaccaagcatcgtagagacttgtaagaggaagagcaagatgacgactacgacgaagaagaggaagaagatgaagaaacggcggaggaggaacttgaagctggtattcagtctcgtgatagtctgtcacagcactcccactggagtgaaaacacccgatgttattgacctccagaagcaactga

SEQ ID NO: 17989 - DNA, 410 bp, Glycine max
  modified_base (393)..(393): a, c, g, t, unknown, or other
cactaacctatagtctctgattattgatctcgctctgcacaagcttccccatattacattaggggactttatttaccactgcccccctttttcctagtttcgtagtatattctttgaaatttgccttagctaatgtctattttattacatgtcacatttatttgctgtcaatttcggttccaattccatggtgtctgattgatgacctatctcacccctatgatatatgtcgtgtactttatgcatattatcatttttttaattgttgtgcccaaaaataaaacgagctaataatggcagcgggaagaacttccttttattaggaatttattaagtgccgtggatataattgatgcccaattttatacttgtatgattctgcaactcttatcnttttgcttaataatttt

SEQ ID NO: 17990 - DNA, 377 bp, Glycine max
gggatgttcggggtgatgatgcagatgatcccacaacattcttagttgcattcgatgagtcagaagcacgctacttgcctcttccaactaaacttgttttaagaaaaaagagggcaaaagagggaagatcgggtgatgaagttgagcaatgtccagtacctgcaagagtgactgtaaggcgaaggtctagtgttgctgcgattgagcggaaggattctggggtatatacaagttcaaagggaaattcctttaagagagttggcttagaaatggatgatggtctcgaagaccaacatagaggtgcaccacaccaggacaattatcagtctagtggagcagaagattacatgtctgattgattatttgatgcaaatgct

SEQ ID NO: 17991 - DNA, 303 bp, Glycine max
cagcaagcagttcatattctaatgaggggtccacagatgagcaaggtcttaattgttcttggagagcgataaagattgataggacatatgacaagggtcatgaaaacaggtatgttaagttcttggtttggtttgcaacgggagtgggaggacttgaacttctgtgcgcatttgtggtttggttttttctggtgagaacaacggagcaacaagattctggtgcagatgggcgggtctacgctctggccggttttagaaaattcagttattctgagctgaaacaagccaccaaagggtttagtc

SEQ ID NO: 17992 - DNA, 374 bp, Glycine max
tttgtttctatggcttctgcagaagtagagttccgatgctttgttggtgggcttgcttgggccaccgaccacgatgctctcgagaaagccttctctcaatttggcgaaatcgtcgaatcgaaggtcatcaacgatcgtgaaactggaagatccagagggtttggatttgtgaccttcgccacagagcaggcgatgagagacgcaattgaaggaatgaacggccagaacctcgacggtcgtaatataaccgtgaacgaggctcaatcccgccgccgccaaaaacaaaaccgtcatccccgaccttcaggacatcctccaacgcttcacgtttgacaacatctgcaagatcgcgttcggcttcgacccggagtatc

SEQ ID NO: 17993 - DNA, 464 bp, Glycine max
cgattttcggtgagaaagagtggtactttttcagccctagagacaggaaataccgtaacgggtcccgacccaacagagtagccgggtcgggttattggaaagccaccggaaccgacatgatcatcaccaccgaaggtagaaaagttggcataaaaaaagccctcgatttctacattggcaaagcccccaaaggcaccaaaaccaattggatcatgcacgagtatcgactcctcgactcttcccgaaaaaacaccggcaccaagcttgatgactgggttctgtgtcgtatctacaagaagaactcgagtgcacagaaggcggtgcaaaacggcgtcgttccgagcaacgagcacactcaatacagcaacggttcctcttcctcttcttcgtcacaactcgacgacgttcttgaatcgctgccagcgattgatgaacggtgtttcccgatgccacgtgtcaacacg

SEQ ID NO: 17994 - DNA, 348 bp, Glycine max
cccacgcgtccgcattgactggcgagctgacgtagaaaactgcttgacatgggaagctcagggccggctttcaaatggattgtctattgaatatcttaacacagctgcggatgacttaggctttgctatttctatctgaaatgaaatgagaccatatgtaatcatcttagtaatttatgtttaggaacttaaattaagcttttcatgacagatattatctcaagatttgtataaaaccttgatgtaatctatgtttaggaacttaaatggtttgcaaataagtaaaccttctcattctgctaaaaaaaaaaacacctaccaaatctacaccatcaagcaaaacataaa

SEQ ID NO: 17995 - DNA, 366 bp, Glycine max
aatttttctaggggttaatccaattttcgatggcttcttcaaatgttgagtcccgttgcttggtcggtggcctcgcttgggccactgacaaccaacctctcgagaaacccttctttcagtacggcaaaatcgttgaaacgaagattatcaacgatcgtgaaactggaagatccaggggttttggatttgtgaccttcgcctcggagcagtccatgaaagacgccatcgaagggatgaacggccaaaaccttgacggccgtaacatcacttgtaacgaagctcagtcccgtggtggcggtggcggcggaggcggtggaagtggtggatattgtcgtggtcccggtggtggatatggtggtggtggtc

SEQ ID NO: 17996 - DNA, 295 bp, Glycine max
ctagatttcaacttgatacacaacttcaatatatatctgtcttataacccatactagcgacggactatttcaacttatctacaagctctacaaacactccaattcccaatcctaccctctattaccatattaaactgcactctcccacatatatcatcctcaaccactcaactaacatcatttacttaatcaccaaacttccactctactacaatcatcactctcatacctaccacaataccacatttctcaaatcataaaaccacacctgatcacataataccattatctcata

SEQ ID NO: 17997 - DNA, 440 bp, Glycine max
ctcataagctttacttaattagcaaatccaaatatggcactttcttcttcatcatcgtcaagatccatatttgctttagctttgttcactcttttgcttataggaagttcttcagctcaactctctgagaacttctatgatagtaaatgtcccaaggttttctatgccgtaaaatccgttcttcaatctgctttggctaaagaacctcgccagggagcatctatcgttcgcctcttctttcatgactgctttgtcaatggttgtgatggatcagtactacttgatggcccttcctcagagaagactgcacctcccaacaataactctttgagaggttatgaagtcattgatgccatcaagtctaaggtcgagacagtatgccccggagtggtgtcatgtgctgatattgtaaccattgctgctcgtgactctgttgcaat

SEQ ID NO: 17998 - DNA, 414 bp, Glycine max
cccacgcgtccgcaaccacttatcccctttctccttctaacgagtgaggaaaaatggcgcgtaagaagatcagagagtatgactcaaagaggttgttgaaggagcactttaagagactctctggcaaggagttgccgatcaagtctgcacaaattaccgcatcaactgatttcactgagctacaagagaaggaaccctggctttcatcttctaaattggttgttaaacctgacatgttatttggaaagcgtggcaaaagtggtttggttgccttgaatttggattttgcacaagttgtttcatttgtgaaggagcgtcttggaaaagaggttgagatgagtggatgcaaaggacccataacaactttcaattgtgaacctttcatcccacacaatgaagagttttaccttaaca

SEQ ID NO: 17999 - DNA, 345 bp, Glycine max
cccacgcgtccgtccacgcgtccgtaaattttcaattggactctaaaaaggaagtggaaacgactgctgcttatccagatatatgtttcgcaattgatgattttgactccacttttgatgctgtggttttgactgaaaaagatcattgctattgtgtagttctaaatgcacatgatggggcagcatttccgagtgaaaaggtgtccaatgattgtagtactagtgatagctcctctctgcaagtccacactatttctgcaaagaaaaaggatacatagcttacactatgctcatgatatgtgagctatcagatggtccgagatgcttatgatgctggtaggtcta

SEQ ID NO: 18000 - DNA, 194 bp, Glycine max
acgctcacgcgtacgtccacgcatcactaaatctttaattccactctaaataagaaatgcatacgactggctcttatccacatatatgatacgcactccatacaatttgactccactttagatgcttgggttcttaactgataatgatcatagctattgtcaagttctatatgcacattatggagcatcatttc

SEQ ID NO: 18001 - DNA, 356 bp, Glycine max
  modified_base (337)..(337): a, c, g, t, unknown, or other
gttttgatgcaacgctgtcactgagaaaggatctctatctacgaaggagcggaataaaacgcttgtctctgtgattaagagaatggcttcagatcggaaacttcacacttttgaggaggtggcaaagcacaaccagaccaaggattgctggctcatcatttctggcaaggtgtatgatgtcacccctttcatggaggatcatcccggaggtgatgaggttttgttatctgcaacagggaaagatgcaaccaatgactttgaagatgtggggcacagtgattctgctagagatatgatggaaaaatactacattggtgagattgatgcatcaaccgtnccactaaaacggacctaca

SEQ ID NO: 18002 - DNA, 407 bp, Glycine max
cccacgcgtccgagaattcagaatggacgtgaaagaacgaccactgaaactttactgcatggcataccttgccgcgggtcacatgatccctctatgcgacatagcccagttcttcgcctcacgtggccaccatgtgaccatcatcaccaccccttccaacgccgaaatccttcaccagtccaaaaacttccgcgtccacaccttcgacttcccttccgaagaagtaggcctccctgacggcgtcgaaaacttatccgacgtcaccgacctcgaaaaatcctacagaatctacatcgacgacaccacactgctccgcgaacccatcgagagtttcgtggagcgggacccaccggactgcatagttgccgatttcctatactgctgggtggaagacttggctaaaaagc

SEQ ID NO: 18003 - DNA, 396 bp, Glycine max
gaaaaacgcggaggttgaaattgatgctctatccatatgtctcaacatcaatggatgggaagtgatgatatcccttggtttcatggctgcagcaagtgttcgagtagcaaatgaacttggaagaggaagtgccaaagctgcaaagttctctattattgtgtcagtgctcacatcattggccatcggattccttctgtttatattcttcttattttttagagaaagacttgcatatatatttacctcaaataaagaggtggcctttgctgttggggatttgtcacctttgttgtcggtctctatattactgaacagtgttcaacctgtactctcaggagtggctataggaacaaggtggcaaagcattgtagcatatgtgaatatggggtgttatta

SEQ ID NO: 18004 - DNA, 341 bp, Glycine max
aaaaaacaaaaaactaaaaaaaaaaaaaaaatatacaaaaaaataaacataaaaaaatggagggtaaattttatccctaagctgtcataaccactcaaactaatcaattacacaagtgatcttggaagacgaacatgcccaatctataatgattcatattacttactcagttctcacatcattggccattctctttccttccatctctattcttatcattttttagataaacgctttcctatatatatacctcatgtacatacgtcatgctcaactgatggcgatttgtcaccttttttttcacactctctataacactgcattgttcaacctgtactctc

SEQ ID NO: 18005 - DNA, 468 bp, Glycine max
tctcccggtgcgaccacgcgtacgctgggataagattaaagattcaacaatggcctctgcttctgctactcttctgaagtcatcggctgttcttgacaagtgcgagtgggtcaaaggccagacccttcgacaacctgtcgtgagatgtaacccttcctcagcatcagctctcaccatcaaagctgcttcctatgctgacgagctcgtcaaaaccgccaaaacagtggcctcaccggggcgtggtattttggcgatggatgagtcaaatgcaacctgcgggaagcgtttggcatctattgggttagagaacacagaagctaatcggcaggcataccgtaccctacttgtgacagtacctggtcttggtgaatacatctctggtgccattctctttgaggaaactctctaccaatccactgtcgattgaaggaagatcgtcgacgtacttgttgaccaaaacattgttcc

SEQ ID NO: 18006 - DNA, 395 bp, Glycine max
cccacgcgtgcggtcaagggcagtgattacatcaacatcaacaactcatcaaaggcttttggtgaggatttcaatgatgggtggaagatcaccaattccaatggacccctattctctatgcctcacatcaacaacaacaacactcttgaagttggaggcttcaacaagggacgaggaatctattccaacaccaacaccaccatttgctcctaccatcctaataaccttaacatcaacgctattggaggcttcaacaagggaatctattccaacaccacatactaaccctatcttaacaacaaccaccaccacctggacgacaacaacaacctcatcagacataatctcaagggctacaagacatattttaagggtgaagatcagtttcacacacc

SEQ ID NO: 18007 - DNA, 454 bp, Glycine max
gagcaattgaacaagcaaagaaggctccttgaacaggacaaaacaaaacaaactggtcttgttgtgttgagcctaattgctatcaatattcaatattttatactattctttattcttattcttccagttatatggtttgtatttgctaatagctcccatcaaaggcccaaaaatgggtaccatcgttgaagcagataacacatataccaagatcctaggaagatggccagtcttttattatggcatgggacacatgctcaatgacataactgctgcttgttggttcacatatttattattgttcttgacagatattggactttcaccaaggaatgcagctgttgtgatgctttctggtcaagtggctgatggatttgtcaccatatttgttggtgaactgatagacaggtttggacacttcaagatatggcatggtgctggatctttattggtg

SEQ ID NO: 18008 - DNA, 327 bp, Glycine max
caaggtcttagcatggattgctcggtgcttgctcatggcatatcaacatcacctgttgctgggtcttggctggatcaggtctccgatactcaagatacattacatacaaccaatgtgatggacacggttgtataggaggctgaaaatgtgaacaacgaatgggatgacacatacaggaaaccgcatgagcacattgtggcacatgcacagtgtggataaccagatggagcaaatgatgagaaaaattctctcaccagactgaatggcattgctgaagatggctgggctacatattcattattgctcttgacacttgatctacttgct

SEQ ID NO: 18009 - DNA, 193 bp, Glycine max
cccacgcgtccgcccacgcgtccggtgatgtttcaggccatgtcaacctatggatttgggggagtccagactcttaatggtgatattaaacccgaaggttaaggtcaaaagagcattgaacgagattaacgcatctgctagattgaggttggctgcaaatgagaaggctgacgcagaaaaaatactgcagatc

SEQ ID NO: 18010 - DNA, 397 bp, Glycine max
  modified_base (268)..(268): a, c, g, t, unknown, or other
  modified_base (346)..(346): a, c, g, t, unknown, or other
gttcgacagcccaatgagctaagtgttttctacaagtttttgtatatctcacttggccttgctgggtttcttttggtcatgatcatagttcagaagcaagtgcatttctcacaaagtgagtatggtgtcagtgctggggttgtgctcttcttactatttcttcctcttgctgttgtgtttgttgaacaatataagatcagagagagtcaaaagctagcattcattgacccctccccggtcaagatagtagctgaaggagagtctgcanatggtaatacctctaacacgccaatttcaacagagattgaagaaactagatgggggcaaaaagtgttaagtccaccgnctcgaggtgaggactatactatacttcagccctattcagcttaaatatgat

SEQ ID NO: 18011 - DNA, 372 bp, Glycine max
ctagaattccaaatgggtattgataattttcccattaggtagggttttgctttctgagtaggctagattttggagttggggtttgggggatacatagacatgggttcaaaagatgagaatagtaaagcatggaaatggggtttgggtttggtatacatatttgccgtggcaacaatttggatagctgctagctttgtagtgcagtctgttgtagaagctggtgtgtcaccattccttgttacttacatctgcaattctttatttgtggtgttgattccaattgttgagattgggaggtatttggaggattcttatgggagtttatggttttggaggagtgagaagagtaatccacattcgaaaggaagggta

SEQ ID NO: 18012 - DNA, 402 bp, Glycine max
cttcacttgttctgcattgaccatagcttctctctttctttcctaattaatccttccatgcgaacggacgctctctctcatactcatagtgacacacacagcttagtttcgttgtattgtatgtgtcctttctcaattctcatcatatatctgttcaagtaccattatctttctatgttgagtgtcggcattttttgagtttctcactaccacttgttctttttttctgatacatgcatatatatacgtccagatatacagtctattcactcaaattcagtgtcacaagttctcaagattgttgtccggcactatctgcagcaccattcaattcttcactctatattggatacacacacttctagtatataccaagtgattgatgatgttgtcagcaaaatc

SEQ ID NO: 18013 - DNA, 390 bp, Glycine max
gaaatcaaaaacaagtgctaagaagctccgtgtatctattctcaaacatgtagcaccaaagccaagttggcatccaagttttataacactaatactgcatataatattattataatatacataacaacagttattgatattgttgtgattgtgtgtgattttggtgtcgtccctttttcttatgtttaaggttgtacggagtttatgtgttgattcaattcgtcgataagaaaccttagtttgatattttgattggttctgtggagagtttttatttctttggtgtggattttggtttgtgctgttgatggttgggaataacaatggccgatgaaggaaacaaaagcaataacttctattcgatcttggggttgaagaaagagtgcactg

SEQ ID NO: 18014 - DNA, 430 bp, Glycine max
cttgagagtttcatagacgctgtatcgctatatggatgctgagtactctttcttctgtttgtgatacgtgtgttttgggtctcttcaaattttggttttctctgtcactttggcttatccctcgggcttcttggattcttacccttcaggaagcttttccttgtctttcccttttttcacctaattgattttttttaaggtagaaattccgaattacaatatttcatttctaggatacaattgttttgggcaatgtccttcaatttaatatttttcaatccactcttattctccttgctttggttacctggatattcctaactaggctaattttatgtttcatgtgttgctcttaatttaacaccttttaatttatatttacttggtagaagaagaaaaaaaaaaggaaagaaatattttgttaccagag

SEQ ID NO: 18015 - DNA, 379 bp, Glycine max
cttgagagtttcatagacgctgtatcgctatatggatgctgagtactctttcttcgtgttggtgatacttgtgttttgggtctcttcaaatgctggttctctctgtacctttggcttatccctcgggcttcttggattcttacccttcaggaagcttatccttgtctttcccttttttcacctaattgatattatttaaagtcgaaatttcgaattacaatatctcattcctaggatacatattgcttgggcaatgtccttcaatgtaatatccttcaatacactcttattctccttgctttggatacctggatattcctaactaggctaatgttctctttcatgagttgctactaatctaacacctttgaacttatat

SEQ ID NO: 18016 - DNA, 458 bp, Glycine max
ctctaataacatttctaatctcattctccttctgttcaaacactctctctcatggcatcagataagacgattaggatcggcatcaacgggtttggaaggattggccgtttggtggccagggttgcccttcaaaggaatgatgttgaacttgttgctgtcaacgatcctttcatcaccactgattacatgacatacatgttcaagtacgacaccgttcatggccagtggaagcattttgatgtgaaggtgaaggactctaagacccttctctttggtgagaagcccgtcaccgtttttggaatcaggaaccctgaggaaattccatggcgtgaggttcgtgctgattatgttgttgagtcaactggtgtattcactgacaacgacaaggctgctgctcacttgaaaggtggcgccaagaaggttgacatctctgccccaagcaaagatgcacccatgtt

SEQ ID NO: 18017 - DNA, 427 bp, Glycine max
cccacgcgttcgtggaaataggcctagtgcaactactcaagaaactacttcagtggtggggatagatggcaaacttcttcaatcttttagacaatgtattttgaaactcttaaaattggaagggtctgattggttgtttaaacagaatgatggggctgatgaagatctgattgatcgtgttgctgcaagggagaaatttcgttatgaaattgaaaccacagagatgaaccgcaatcatattggagaaactcgatatctttcttctgatgggaagtcttgttcttcaatgaagaataatgaagctaattggtctagtttttccgtaacctcaatccctaactgtggagatggatgtgtatggagagcagacataataataagctttggggtgtggtgtatcaaacgtgttcttgacctctcattaatg

SEQ ID NO: 18018 - DNA, 395 bp, Glycine max
  modified_base (304)..(304): a, c, g, t, unknown, or other
cccacgcgtccgagaagatggagatgtatcagatctggagcaggagaatagcgttgggagcgttcgcgtttgttctgcttttcctatcggcctcagcagacgacgtcgttgtgctctctgaagataacttcgagaaggaagttggtcaggacagaggagctctcgttgagttctatgctccttggtgtggacactgcaaaaagcttgctccagaatatgaaaagcttggtagcagcttcaagaaagccaaatctgttttaatcggcaaggttgactgtgatgagcacaagagtttgtgcagcanatatggagtctctgggtacccaacaattcagtggtttccaaaaggatctcttgaacccaaaaagtatgaagggccacgcactgctgattca

SEQ ID NO: 18019 - DNA, 362 bp, Glycine max
gctgaatcctagctttatcttcccttcccttcaaaataatatctctgttccaaacaagtcgggcaacacactgcttctatctcaaacgcacatcgagaaatgagtttgagtaatgggaaaaccgaggcaccattgccaattagtaatggggatgagaagaagccgttcaagatcttcgtagggtatgaccctcgtgaagatcttgcctacgaggtatgtcggcactccatcttgaaaaggtcttcaatccctgacgagatcataccaattaaacagtcagatctgaggaaaagtggctagtattggcgtgagaggggccagtttgagagcactgagttctgcttttcaagattctcgacacc

SEQ ID NO: 18020 - DNA, 405 bp, Glycine max
attgaagacagacgttatactcaggcttctgaaacgtaaatatcctacatccaatgagtggggatctgaaatcattcctgcagctacgagggaaaacaatgtccaagcgtatttattcattgactattgccaagacattggaacaataaaatcattttacgatgctaacttggctcttactgaagagaatccaatgttcaaattttatgacccgaagacacgcatttacacatctccaagattcctaccaccaacaaagattgacaaattgcccattgtggatgcaataatctcccatggatgtgtcctgagagaatgcactgtccaacattccattgttggcgaacgttcacgtctggattatggtgttgaactccaggacactgtaatgatcggagctgacta

SEQ ID NO: 18021 - DNA, 343 bp, Glycine max
cccacgcgtccgcccacgcgtccgatttcctcacctccttcaaccgctgctaaattctagggttccgaaatggacgctggcggaaagatcaagaagggcgccggaggtagaaagggcggcggcccaaagaagaagccggtttcaaggtccgtcaaagccggtctccaattccccgtcggaagaattggccgttatttgaagaaaggaaggtacgctcagcgtgtcggtaccggtgctcccgtatacttggctgcagttctcgaatacctagctgccgaggtgcttgagttggctgggaatgccgcacgtgacaacatgaagaacaggattattccaagacacg

SEQ ID NO: 18022 - DNA, 340 bp, Glycine max
tctatgtcgtcgtttctcaaaaagttgcaagagttaaagcaaaaaccaaagtgagagagagagatgatgaagccatcgatgctcagatctcttcactctgccgacacccgcggcgcctcccacctctcccgccgtggctacgcctccgagccggtgccggagcgcaaggtggccgttctaggtgccgccggcgggatcgggcaacccctctcccttctcatgaagctcaaccccctcgtttccagcctctccctctacgatatcgccggaactccccgtgtcggcgccgatgtcagccacatcaacaccggatctgaagtagtggggtaccaaagtgacg

SEQ ID NO: 18023 - DNA, 353 bp, Glycine max
gaagaaagaaaaattgaaagggagaaataaaggtagcgaaaagaaggaacataaatacaaaggcatctttgttctgctgtctgatgcatgcacgtctggtcctttgatcatgaccactgagggtctcttcacatgtcgtttttgagccccatcgtgattctattctcagacacaggatagcggaggccgagaaagccggggaaaaaagtcacctttctttctttttcattttccattttcatttaaaacattaaaaaaaatctattttttctatatctggttctccacttcttttctcagtggtttggattggaggtcacagagggagagagagggttctactctctatacat

SEQ ID NO: 18024 - DNA, 376 bp, Glycine max
  modified_base (296)..(296): a, c, g, t, unknown, or other
gtttctactctcacagctgtttattttcttcctcttctcaactgtgttcgtgtgtatgcatgtgagttgaaagccagactcaaggagctgaaagacaaaagaagaaacttggatttgaatcagccaaaatttgagttacacgtaattgcaaagataagatgagtgttatgtatagtcctgttctcaattactcagatgtggagcatcagctaaggaaaaaccaagacatggattcaagtattggacatccacaacaacactgtcaccaacccaattctggactattgaggtattgntctgctccaagctcattgctgcaagcctcattgacaacaccattcatggctgtgtcaacgaggaatcggtcacaagtgag

SEQ ID NO: 18025 - DNA, 466 bp, Glycine max
gagaagctgcgcaccttttcatactagtgctgattgctgaaactgccatcgctcgccattggcacaaagatcccaacaacacttgaaagttgaaacagaaaaacaccaatccctcatcgtactgttccgttatcaattctcgtgtttaaggacacaatttgcttgatacattttcaagttttcatctccatgttttgattttgaagaataaggagtatgcaattgactactacagatatggttttactataagtggcctgtatatggttttgggtcttgcaagtgtaagcagtatggaggatattcaattggatatcagttgggacgatgctgtctgtcccatatgcttggattttcctcataacagtgttctccttcggtgttcattttatgataaaggatgtcgtgcttttggttgtgacacaaatcaattgcactctaattgtttggatcgctttaaaaattc

SEQ ID NO: 18026 - DNA, 446 bp, Glycine max
gcagctccttctagttccggtgtcggtgtgggtgtttgaatctggtgaaggatgtcaattggtccaatcaaccagggtgatgccaacggctccaaccccttcgcttcgtggggtcaattcgtggattttcctctccctccttccatctccggcttcttccccggcttggaattcggattcggattcggatcatccgtgaacacacgtgtggactggagggagactcccagagcgcacgtgtggaagctggtgcttcccggcttctccaacgaggacgtgctggttgagctccaagacgagagggtgctccaagtcagcgtggagagcggcaacttcgtcacgaggtttaaggtccccgacaacggtaacctagaacaactcaaagccaacatgcgtcacggggttctcgttgtcactgttcccaagtttcatcaacccactactac

SEQ ID NO: 18027 - DNA, 444 bp, Glycine max
tggtatcccagcagttctgctaactttgggagccttgttcgtggtggacaccccgagcagggtgattgaacgtggccgcttggaagaaggaaaaacagtgcttaaaaagattcgtggcactgacaacattgaacttgagttccaggaattgcttgaggccagtcgtgtggctaaagaggtcaagcatccattcaggaatcttctcaagcgcaggaaccgaccccaacttgtcatttccgttgccctacagatattccagcaattcacaggcatcaacgcaatcatgttttatgccccggtgctgttcaacacgttaggattcaagaacgatgcatccctgtattctgctgtgataactggggctgtgaacgtgctctccactgttgtatcgatctactcagtggacaaagtgggacgttgcattctagtgctggaagctggtgt

SEQ ID NO: 18028 - DNA, 397 bp, Glycine max
cactatcaagattggaagtttatgatcttgaactttccaaccacaatcacaatggcgcgtcgtagtagtatggttctccaaggcttgcatcaattggtatagaagccttccacatgtctctcaattgcaaacaagtgttgcagggggtgatgcttgggctacggatcatatgatggaacattatgatccaattgcaaggtatataggacttgagtcctgcatcaaaagtatgggatttgatgtgggatcattatatggccttgggatttcttcgcacaatggttagcttacctatatgtactagggtcataaatgcttttagatcgtcgaccgtcaggtaaagccgaatatatacataacattgatttaatctcttctagatataacagaacctttt

SEQ ID NO: 18029 - DNA, 330 bp, Glycine max
attcaagacagatgttttactcaggcttctgaaatggagatatcctacatccaatgactttggatctgaaatcattcctgcagctgcgagggaaaacaatgtccaagcgtatttcttcattgactattgggaagacattggaacaataaaatcattttacgatgctaacttggctcttactgaagagaatccaatgttcaaattttatgaccccaagacacccatttacacatctgcaagattcctaccaccaacaaagattgacaaatgccggattgtggatgcaataagtctccattgatgtttcctgagagaatgcactgtccaaca

SEQ ID NO: 18030 - DNA, 404 bp, Glycine max
  modified_base (5)..(5): a, c, g, t, unknown, or other
tcggncaggcgtacgctgcgctctgtacaaggctctactctactgctacaccttctgctctagaaaattcagtggggatgcatggcttcggctactctctctgtagccaaaccagcccttcaggcaaatgggaaaggcttctatgaattctctggcctccgcagctcatcaggcttccttcccttttctagaaaatcttcagaggatttccattctgtcattgccttccagacctatgcagttggaagcagtggaggatacaagaagggtgtgacagatgcaaaactgaaggttgccataaacggatttggaaggattggaaggaacttcttgaagcgctggcacggtcgcaaagactccgctctagatgtcattgccatgaacgacaccggtggcgtgaaaca

SEQ ID NO: 18031 - DNA, 373 bp, Glycine max
ggaggaaggcagcggcggacgttccggctggacacgtggcggtgtgcgtggtgcccagcaggatgaggttcatcgttcgcgccacgcatctgaaccacccgattttcaagatgcttcttgtgaacgccgaagaggaatacggcttctgcaaccacggtcctctcgctataccctgcgacgagtcactcttcgaagagcttcttcagctcgtgtcccgacccgtacccgtacccggattctgcacgctcgaggatttccagagacgctgccacatggatgattgcactggctttgacgtcgtatgagaatcgtagcacgtgcttcgtgacgagccaatttgctgaaaatacatttaatcgtaatcactaactac

SEQ ID NO: 18032 - DNA, 371 bp, Glycine max
ccgagccacgacgtcacgcgtacgcgtccgacttggtgtatggtgggggcagcgttgggctaatgggcttaatatctcggagagtgtatgatggaggctgccatgtcctagggatcattccaaaagctctcatgcctctcgagatatcaggtgaaacagtaggtgaagtgagaattgtttcagatatgcacgagcgtaaagctgccatggctcaagaagctgatgcatttgttgctctccctggaggatatggaaccatggaggagctgatggagatgataacttgggcccaacttggaatccataaaaaaccggttggtctactgaatgttgacggttactataaactgttgcttgcattatttgacaat

SEQ ID NO: 18033 - DNA, 429 bp, Glycine max
ccgaattccggtcgaccaggcgtccggtcacgcgttcgaacatgcctattctacttctcatttcaactcttttgcaattgcgatctttggttcggttttttttactcttggtaagcgtagttcggtgttggagaaccagcttccagttccagaatactgctgaacagagttcggcttcgctttattgggactcagttgtgtttctactaggttatcttctctgaattgcaaatgaatgatcgttgaaaaaccatgaagaaggtgaggagaaagatcggcaagtatgaggtgggtcggactattggcgaatgcaccttcgccaaggttaagttcgcaagaaactcggagacaggggagagcgtggctattaaagtcatggctaagaccaccattctccagcacagaatggttgaacagattaaaagagag

SEQ ID NO: 18034 - DNA, 362 bp, Glycine max
cccgttctgcatcttgatgtgaagccagagaatatactcttggatgagaattacaagggtcttgttgctgattttggtctctcaacgcttgttggaaaggatgtgagtcaagttatgacaacaatgagagggacaagagggtacttggctcctgagtggcttttggaaagaggggtgtcagaaaaaactgatgtttacagctatgggatggttctgttggagatcattggagggagaaggaatgtgtcgagggtagaggatccgagggacaggaccaagacaaagtgggagttctttcccaagattgtgaatgagaaagtgaaggaagggaaattcatggagattgtggatcgtaggttggt

SEQ ID NO: 18035 - DNA, 435 bp, Glycine max
cccacgcgtccggccaaccagtccgtcagtctactcctgcttccaaacgccccctcgctcggtgccctctccacacgcgccaccacctgctgcctcagcgacccgaaccgtaactgcaccaaccatacggacaaggaaaccatcttgctcgacggctgctacttagaacactggctcgtagtcatcgagaagcccgagggcgaccatacccgcgatgacatcatcgatagctacattgaaaccttggacaaggtcatcatacgtgaacaggaagcgaggatgaagatatattcggtttcgactaggcactactatgcgtatggagctctagtgtcatgaagagctttctatcaagcttaaagaatcgcctggagttcggtggatgcttgctgagtcttacttgaaatgtaaagaaaaggattatggatgtgagcc

SEQ ID NO: 18036 - DNA, 378 bp, Glycine max
cccacgcgtccgtctgaatctgaaacctccgtgttggtgttgcatatccaaaccggaattgggaaattgaattgttgaagggaagaagatcaagatggttctggcggagttaggtgggagcatttcgcgtgctctccagctgatgagcaatgcgacagtaatcgacgagaaggtgctcaacgattgcctcaacgacatcactcgcgctcttcttcaatccgatgttcaattcaagcttgtccgcgacatgcagaccaacatcaagaacattgtcaacctcgacgatctcgctgccggtcacaacaaacgcaggatcatccaacaagctgtgtttaacgaactctgcaaaattctggaccctgggaagccctctttcac

SEQ ID NO: 18037 - DNA, 443 bp, Glycine max
cgtacgctttcactgtgttatcaggtgcagctcacgttgattctgatatgggtactcacagggataggcagtggataaagcattgacatgattaaacactatcttttagatatgtctgcttctgctaaatagcttttgaaacttcagttagcaatattattatacttctacaatacataaatcctgtttggataattgtttggataaacacttatagaagtaaggtaaaatgaattgagcttctctcgtaagttaaaatcaacttatgcacttaacttttataaaagatttttcatttaacttttctgaaggccgaagtacataagttgattttagtttatgagaaaatcacatttcattctactttcttgtaagtatttatagagaaatttatcttaacaggatcatagtgcatgtacttatgaaataatctaatgtatgcc

SEQ ID NO: 18038 - DNA, 361 bp, Glycine max
ggagagcgtgccagaatggcttcttttgttggagccatggctattgctgacttagtgaagagaaccttggggccaaagggaatggataaaattttgcagtcaacaggtagaggacgtgaagttactgtcacgaatgatggcgctacaatcttgaagtccctccatattgataacccagctgctaaagtccttgttgacatatcataagttcaagatgatgaagttggggatggaactacctcagctgttgtgttggctggtgaacttttaagggaggcagaaaagctggttgcaaccaagattcatccgatgacaataatatcaggttttcgaatggcatcagagtgtgctcgtaatgctt

SEQ ID NO: 18039 - DNA, 460 bp, Glycine max
  modified_base (405)..(405): a, c, g, t, unknown, or other
cccacgcgtccgctcacgcgtccgctctgaggatcaaaaacttttgagagaaaaggtggagggcctgagtggagatgctggaattgagcgtatggaatctgcattatctgaaacaagatctagatactttgtagtgaaggatgacggaagtccagtgaggtctccaatgattccatctatgcccacaagcccaacttcgatttctactgctgccagctcaagtgaaagaaatatttctaatgagagtcatcataggtcaagccgagtagttcgctccctctataaggaaacaaatacttaccctggagagtctagcttctctgaacccataaccagttcagatagtcagcttggcacatcctctgagaagttgctagcagagaatgaggttctcgtaaatgaatntcttcacaagcatcaccataatgtagctgatggctttgatgtctctaatcacgtt

SEQ ID NO: 18040 - DNA, 361 bp, Glycine max
acgcccacgcgtccgctcacgcgtccgctctgaggatcaaaaacttttgagagaaaaggggcagggcctgattggagatgctggaattgagcgtatggaatctgcattatctgaaacaagatctagatactttgtagtgaaggatgacggaagtccagtaaggtctccaatgattccatctatgcccacaagcccaacttcgcttcctactgctgccagctcaagtgaaagaaatatttctaatgagagtaatcataggtcaagccgagtagttcgctccctctataaggaaacatatacttccccttgagagtctagcttctctgaacccagaaccagttcagatagtcagcttggcaca

SEQ ID NO: 18041 - DNA, 389 bp, Glycine max
ctgactttctggcttctgggttttctccctttggtcggttgagctaacagtggcatgagtcatcatcacaattaggttcaaaaaccaccactctgtgtgtttttttccttgtgtttctctcccatgtgtctccttctttgctgagaattgttgtggcagacaagggagtagcttcttctttctaagttgacatatgcacatggcttctcttggggatataggacttgcagcagcaataaacatccttagtgcatttgccttcttactggcttttgccatacttcgaattcaacctataaacgatagggtgtattttccaaaatggtatttgaagggtttaaggagcagtccattgcaagcaagggtatttgtgagcaagtttgtcattt

SEQ ID NO: 18042 - DNA, 376 bp, Glycine max
tccgacccagagcgtccggtgcgactctgtgcttagctaacgttaacagtgacttaagatggcggattctgcagatgtcgcccacgatgttgtgtccctcctgtcttctcctcaaagggactttcttcttcgcaacaacggccatcaggttaaaattgacagcttgaagggtaagaaactcggattggatatttcggcattctggtgcgggccatcgtatacatttacgccgactatggtggatgtgtacaatgaagctgcaaaaaaaggtgacttccagatcgttttcattacggctgatgaatatgatgagtccttttacggttactgtcacaagatgccatggcttgcaatgccattttctgatttagacaca

SEQ ID NO: 18043 - DNA, 408 bp, Glycine max
agcttctattctattctatacctctctttctcattgttattagttgtatagctttaaatttgctgtgcgatttacattgcatctaataaagtaaagtggttactgacacagagaagcatatatagagaaagaaagaaggccctgccctatatagctgaagcaagatgatggaaaacggtggcaaacagacatttgaagtctccaatgacacgcttcaacgagtaggttccaagagctttgatgatgatggccgtctcaaaagaactggaactatttggactgcaagtgcccacataataacagctgttattggttctggggtgctatctttggcttgggctattgctcagctaggttggattgctcgtcctgtggtgatgattctattctctattgtgacttattata

SEQ ID NO: 18044 - DNA, 347 bp, Glycine max
ctctggcgaactattcgatcactctctctctctctgttacacgctgtcatgctctccttgagttgcgccaatggcgtcgcagctgctacaatggccggggccctgacgacgacaggcatcagtagagacggcaacatcgacctgttcactaccaatgccgcaggaaaagccgaccaagatgctgacttagattcagagagcatcatgaagcgcatcaaagagctcgtgccaagacctacgcagaccctggctcgaaccaacgacctgagcctttacggactcgccatggccatggactgccaggtggtctgtgacgtgggatgctacatgtgaataacgctatagct

SEQ ID NO: 18045 - DNA, 393 bp, Glycine max
gaacgttcaagacctcatgagcgtgttgctttccttgcttgaaggaaaaactattgagggcgatgaatgttgatattgtcatcaaatcctttgtattgacagtaattcaagcaggaactgaggcaagcattactactcttatatgggcaacaagtttgatattgaataatcctagtgtactagaaaaacttaaagcagaactagacatccaagttggaaaagagagatacatatgtgagtctgatttaagtaagttaacatatcttcaagctgtagtcaaagaaactttaagattgtaccctccagctcctctctcaagacctcgtgagtttgaagaggattgcactataggtggctacactgtcaaaaagggaactcgtctaattacaaatc

SEQ ID NO: 18046 - DNA, 317 bp, Glycine max
cccactcgtccgctgacgcgtggatttttttttttttttctatcatcacataatccaggagggttctaaaatcatgaaattctctaccactcaaactattcttatattgtaacctatatcacatgatactccaaacttcaacaaacatccatgcgtcttaatactaccacaaccttcaacttaatatcacatatctctattaattctcttccaaatataagacttccataacctataactatttttagagaatttgcccctttaataatttaagtactactacgtactcaacctattctagacactgtcattactcc

SEQ ID NO: 18047 - DNA, 456 bp, Glycine max
cccacgcgtccgaagaaaactaaggaaggaaggaagagtgagcgtgaaagatgccttgggcgaggctttcagggtctccaaggctcgacgttgctattgacatgggcaatccatttctcaatctcactgttgatggtttccttaagatcggagctgtcgcagccacgcgatcagctgctgaagatacttatcatattatccaaaaggggaatatctcaagtcatgatttcgagaaaacgttgaagaagatgtgcaaagaaggtgtatattggggaactatagctggcgtttatgttggaatggaatatggggtagagaggatccgtggcaccagagattggaagaatgccatgattgggggtgcagtaactggggccctggtatctgcagccagcaacaacaagaaagacaaaattgcaatagatgccattactggggcagcaattgctactgctg

SEQ ID NO: 18048 - DNA, 364 bp, Glycine max
  modified_base (27)..(27): a, c, g, t, unknown, or other
accgtacgcgtccgcccacgcgtccgnattgttaaagatggataccaatggaggaaatatgggcaaaaggtgaccggagataacccttgtcctagagcatatttcaagtgctcttttgctcctagctgccctgtcaaaaagaaggtaaatatatataatcaaccaagtgctaactagtaactaggaaatggtttggtttgcttactcacatgttagtagggaaatggatctcaagctaagtttgtttagaacttggattggttattcaagtgcaaagaagtgtggatgatcaatctgttctggttgctacttatgaaagggagcacaatcatgctcaggtttcttcccaaatggaaacaacatc

SEQ ID NO: 18049 - DNA, 443 bp, Glycine max
gggcaatgaaaataagattgccctaagatttgacaaagtattttggcctaatgtagaactcgggggcactgttgctccgacctcttatacctgtggctattttctcaatcttcacaaagcaacaggccatcctgttcttgtctacatggtagctggaaggttcgcttatgacattgagaagctatctgatgaagcagccgcaaattttgtaatgcaacagctcaagaagatgtttccaaattcttctaagccagttcagtatcttgtgtctcgatggggaacggatccaaactcccttggatgttactcgtatgatttagttggaaaaccactcgatgtgtatgacaagcttcgtgcacctttgggcaatctattctttgggggaaaagctgtaagcttggacaatcaaggatctgtgcatggagcttactcagctggggtca

SEQ ID NO: 18050 - DNA, 286 bp, Glycine max
  modified_base (45)..(45): a, c, g, t, unknown, or other
tacatggatgactcgtataatgtcggagtcattggaagtaccttnctagcacagacgagtgaaaacaaacatcagtccattgtacacactaggggaaacttttcagagtgcagatctgcagtacttacgctgctacagacagggaaagaatcatgttcctatcaacattgtgacataggatcaactctcataccaaagcttcaggggaaattattggccacggacaaatgcttttacacatcatagttgttcggattgaagtcaagggcctatctgaccaagttga

SEQ ID NO: 18051 - DNA, 431 bp, Glycine max
cccccaccgacatggcggtactctttttggccgccaactccgccgccaagagattgtctggtggaaaggcgcgtgttctgccggacaactgtggcggcaaagcatggcaacaacgggaagaagaagaagagagttcaaaagatgaaagtttaagtgtgattccaaggttgagtttggaaggagtggagtcagggtttcagtataggttaaattattgtaggtcaaggaagcctgttttggagactataaatgaggaacctgttaggctaaggtgatcatgtaatgaaactcattcgtttatgcatcagattttattttatttttagcttcaagagagatttaattagttgaatcatacaacacttcaaaaaataaatagttgagatggtgtctcattagcatcaaatttgtacaaaactcatatacaaaca

SEQ ID NO: 18052 - DNA, 456 bp, Glycine max
cccacaccgacatggcggtactatatctggtcgccaactccgacgccaagagatcgtaggggggaaaggcgcgtgttctgccggacaactgtggcggcaaagcatggcaacaacgggaagaagaagaagagagttcataagatgaaagtttaagtgtgattccaaggttgagtttggaaggagtggagtcagggcttcagtataggttaaattattgtaggtcaaggaagcctgatatggagactataaatgaggaacctgttaggctaaggtgatcatgtaatgaaactcattcgttaatgcatcagattttattttatatttagcttcaagagagatttaattagttgaatcatacaacacttcaaaatatgtatagttgatatggtgtctcattagcatcaaatttgtacataagtgatatacatacaagtttgtgtgagatacatattgact

SEQ ID NO: 18053 - DNA, 363 bp, Glycine max
tcccacacatacattgccagcactctgttttattataaactgctccaacatgatattgagttgggatattacgcttaatatgacgactaactttctcggtatatcattcaaccagctggacaaactagaactctcaatgcttgatgaaactttaagtatattccaaatgatgaccatggtggagaggaggatgaacttgattactacttcaattatcatatgtcaacttatcctgactcttacaccatgaataagaaacatgattaacaagacttatcctacgatgacaatgatgcagcaatgactcagactcccttgaatcattatttacttcagatatatatattaatgaaccatactcat

SEQ ID NO: 18054 - DNA, 315 bp, Glycine max
cccacgcgtccgggttgtaacagtgatgaggtggacgaattgacaagaatgagatatgcttgtcctgggtggaaggaaaaaataattaattctgatttgaaaagaaaagatggtttatgccctctaacacctgaggagactgcccttacgcttaaggctcttgacattgatcagaacattcaaatctacattgcagctggggaaatatatggaggggaaaggagaatggcaagtctagcgaaggagtacccaaaattggtcacgaaggaaacgctgttggagccatccgaccttcagttcttccaaaatcattca

SEQ ID NO: 18055 - DNA, 216 bp, Glycine max
atatagtacaagcgtcagaatgtgccgttgtggctcacattatcgacgcggcataccacgtggtcgacgatgaccacgacggttaattcagcctctacgacctgcgctcattctacgctggagtctgcggacaacgagaccacgtgatccgcgcattgatgacgctggtcggcactaccttggactggctcgtggagtactaggagttcgagcgcg

SEQ ID NO: 18056 - DNA, 292 bp, Glycine max
ctcagggttacccgcgtgagcaatatcaggaatttcagtatttcgtggtgatagactttgaggctagctgtgacaaggataaaaatccccaccctcaagaaataattgagtttccatctgttatagtgagtagcatcactggccagctggaagcgtgttttcaaacatatgtgaggcccacctgcaatcagcttctgagtgatttctgcaaggatctgaccggcatccagcagattcaggtggacagaggtgttacattgagtgaggctctactaaggcatgacaaatggct

SEQ ID NO: 18057 - DNA, 248 bp, Glycine max
cccacgcgtccgtgaataccaatgcaggctatcaaggcaagaaaaaggttatttgatggcggaatttcagcagacaatagactcgtataagaaacccatgatcaaaggccgattttctaatgacatgaacaactctccatgaatgagaagtaggagctcaacctctttttagcttgttgaaacttgaaagtaatgctttatgagattgtgtttgattatttttcattggaattggttttcgttaaatt

SEQ ID NO: 18058 - DNA, 260 bp, Glycine max
gaaaagggtaaggagatgaaagaaaaagctttgcagtggaaggaattggcaaaaagtgctggttttggccctgacggatcttcatttgctaattcggataacatggttcgagatgttcttctgcgcaaaaatgttaaatattcgcattagaagaactcaaatattttaacttactccattgacgtgtgaagactctatatgttaataaccttatctacatgggaaatgaaatgtaccaagtaccaactgatgaattggat

SEQ ID NO: 18059 - DNA, 245 bp, Glycine max
acgctatagtacaagcatcaaaatgtgcccacgtttctgacattctcgaccgacattccacattgtcttattttaccacgacggcggaatcagcttctacgacctgcgctcattctacgcttgacttcaccttacaacgagaccacgttacaccgttcctttataacgctggcctacacccacttcggctgactccaccagtactaggtattcgatcgcttcttctccgatcattgcaaacccat

SEQ ID NO: 18060 - DNA, 310 bp, Glycine max
gaaaagcgtaaggacatgaaagagaaagctttgcaatggacggaattgacaaaaggtgctggttttacacctgtcggatcttcattagctaatacgtataacatatttcatgatgtatttctagtcaaaaatgttaactattcgaatcagaagaactcacatattttaacttactctataattatgtgaatactcatttttttaataaccttaccttcatccgacatgaaatgtaccacataccagcttatcatatgcataatctactaaatctttacacattcgttctaaaagatccaatcttacatac

SEQ ID NO: 18061 - DNA, 360 bp, Glycine max
gcagacgacaggtcctgctactgcaaattgccgtcttggccttcattaccgctccgggtgggctaccacgctatgggatcgatcagattcctttcctcgtccattaaattccatgattaggtcatgaagcaccgtttctcgagcagtgtctaatgacttaactgcgaacccctagctctacatctgactaagcacacgttctatcgcatatacaacgcttctctctacttcacatctgatattgagaagcggtaccacgcgaaatacggttatagagagacgatacctgttgctgcacacgatgttgctatctcaaaccatgctgttctactgaccgcaattacattgttccagattgca

SEQ ID NO: 18062 - DNA, 389 bp, Glycine max
tgaagatgaccaggcagagagcaatgccaacttatacgaaggaagccttgatggcggcgaagctcttggatttggtcctctcttccccactgaaagtgaaagatctttgatggaaagagtcaggcatgagttgaagcatgaactaaaacagggttacaaggagaagattgtggacataagagaagaaattctaagaaagagacgagcggggaagcttccaggggacaccacatcccttttgaaagcttggtggcaatcacattctaaatggccttaccccactgaggaagacaaggctagattggtgcaggaaacagggttgcaattaaagcagataaataattggttcataaatcaaaggaaaaggaactggcatacaaataacccct

SEQ ID NO: 18063 - DNA, 391 bp, Glycine max
acgcaagttgcaagagccatatgcccataccgtaatgctctactagtgtacttgatctcggaacggcaattagattatggcttgccataaaatgaggttagccctaataaggatacactgtccaaaagatgacattctatgactgggaaagctagtatctgcatattcttcatacctaacaatgtctgtatgccttgattatcataaatcaatccctttcttggggaactcttgacatatatctagatctgaataactatagtccaaaggctatcacacacagagccaaggatctgactaccaacaaatgaaatatctagcccaatcatgatgcgagacaatgagagtagctgtcccactaatctacaatatcaacactagtatgctactc

SEQ ID NO: 18064 - DNA, 467 bp, Glycine max
ccagatcccacctccctcccttcaccaaatccccaaaaccgagaaacacctcaacgagtcggcgtctaagacgcttcatttctcatacccctccgccgttacttccttcgtctcctccctcaccggcgacgccgccgacaacaaacaaccatccccggcggccacgaccacgacctcccactttcagatcacgagcctctctcacgtgtcgtccgcggggaagcctccgctttcgtcttcctctttcaagagaaagtgcagctctgagaatttaggttctggaaagtgcggtagctcctctagccgctgtcattgttccaaaaagaggaaaatgaggttgaagagggtagtgagggtaccagctataagcttgaagatggctgatattccaccagatgattattcttggaggaaatatggacagaaaccaattaaaggatcgcctcatccaaggggttactacaagt

SEQ ID NO: 18065 - DNA, 272 bp, Glycine max
ttttcctttgtttctatggctcctgcagatttatatttccgatgcttagttgatgacctggcgggggccaccgaccactatgctctctagaaagccttctctcaatttggcgaaatcgtcgaatcaaaggtcatcaacgatcgtgaaactggaagatccataaggtttgtatttgtgaccttctccacagagcatgcgatgagagacgcaattgaaggaatgaactgccagaacctttacggtcgttatataaccgtgaacgatgctcaatc

SEQ ID NO: 18066 - DNA, 404 bp, Glycine max
  modified_base (152)..(152): a, c, g, t, unknown, or other
gccatgccaatggtttatgggtggaagttgctccgtatagggaatcgggtttccctaagaggcaggtgctgtttattgatcaaacgggtgatcaaacaactcttgtttatagttcaaggtttgggggtcccgttgattgtcatgtgtcctgngattcaaagctgcatggttctatcaatttgaacaatgggaatgaattgcttaatttaaggagagatgtgaatcatgtggttggacttggacctactttggatgataaagttcatgaaaatacaggaactgatgatgacattgaaagcgagatgcatgaagacacagaagaaatcaatgcattgctttactctgacagtgatggttattccacttaagatgatgatgatgatgaagttactagcacaagacat

SEQ ID NO: 18067 - DNA, 397 bp, Glycine max
  modified_base (286)..(286): a, c, g, t, unknown, or other
gcgtccggggcagcactcagtctttacttcttccagcctaaagtccccccttcttccaattcaccaacgaacgcagagctcctgccccttcaccctgaaatcccttttgtatgtgatcataggacccttcttgtccctcgtaatatgtctctttgtcaacctcgatgcttgccgtgattgcttgggtctattcttggtgggtcaccgccgccgtgcctcttccggtgacctccatgtgtcccaagttcaacagagcggtggttctgacggtggtgtacgccacccncattggagggatcagcacttcacaatttgctctgatacaatttttagaatgtaagtttaggcctaattcaaccaaaagctagctctaagtattctaacttggctttacttt

SEQ ID NO: 18068 - DNA, 286 bp, Glycine max
  modified_base (111)..(111): a, c, g, t, unknown, or other
cgaaaaccctaggtagagagctcttcctccgtttctcacagcaatggccgccgcagcacgcccgctcgggaccgtgcaggccctcgacggtgacatggcaaccgatgcctncggcaccggtcccatccctgacctcatgaaagcctttatccggcccgacatcgtcaatttcgtacactcgaacatcttcaagaacagccgtcagccatacgccgtcagtccgcgggcctggtaacaaaacttcggccaaatcttggggtcccggccaaccgcgttccggaatccc

SEQ ID NO: 18069 - DNA, 372 bp, Glycine max
gagagagtgttcttcgtttgctaccttctcccagaaatggttacgttcaggtttcaccagtgccaggtggtcgggagggctctcccaacggaagcagatcagcatccgaagatctaccgaatgaagctctgggccaccaacgaggttcgcgccaagtctaagttctggtattttttgaggaagctgaagaaggtgaagaagagcaatggtcaagttcttgctatcaacgagatttttgagaagaacccaaccaagattaagaactacgggatatggttgcggtatcagagtaagactggttaccacaacatgtacaaagagtaccgcgataccactctaaacggttcaattgaggcaatgtacaatgaaaat

SEQ ID NO: 18070 - DNA, 161 bp, Glycine max
acgtttatactcattttttttccttctgattacaatttcaatcactactattataactgtgtcaggcttttgctaatcgatatttcaacccttaaatttatctatctgataattaaataatttaggttaaagccaaaccaaaccaaactaaccccttatcc

SEQ ID NO: 18071 - DNA, 452 bp, Glycine max
  modified_base (368)..(368): a, c, g, t, unknown, or other
aagtctttgactttgaagggaaagcctcattttgctgacttcagtttggtgccttatgattggggtggctttgtgcatccatggattgaggcactggccaagaacaaggttggcttggaggagcttaggctcaagaggatggtggtctcggatgagagcctggagctactctctcggtctttcacacacttcaagtctttggttcttgttagctgtgaagggttctacactgatggccttgctgctttagctgcaaattgcaggtttcttaggcagctggatctgcaagaaaatgacgttgaagatcacaaaggccagtggctaagttgctttcctgacaactgcacatcactggcttctcttaattntgcttgccttaaaggagatgttagtttgggagcactagagagactggtggccagatctccttacctgaagagtttaaagctgaa

SEQ ID NO: 18072 - DNA, 92 bp, Glycine max
gaaagtgcatgaaactagcatttacccagagtcagtcatatgtactcctatgggcactgtgcctaggactggggaggtgatggagaagtctg

SEQ ID NO: 18073 - DNA, 156 bp, Glycine max
agcttgagctgctcttgtactcattcttagcttaatatcatccaagagacaccctaagacacggttcacagactctctcaaagagttacaagataaatcatcatggatttaccaggatgtgcgtttgtgcagacacttaatgtagcaccctgtcat

SEQ ID NO: 18074 - DNA, 371 bp, Glycine max
acgcgtccgcttatacacactcattttaaggctgttatatatatttctgttattgaaacttaggttgtcagagctgctgaaggtcgccttcctgtatttttggatggtggtgttcgccgtggaactgatgtcttcaaggcattagcactaggtgcctctggcatatttattggacgccctgtggtgttctccttggctgctgaaggagaggctggtgtaagaaacgtgctgcggatgctacgtgaggagtttgagctaaccatggccttgagtggttgcacctcactcaaggatatcactcgtgatcacattgtcactgattgtgaccaaccttgcattcttccccgcgcattgccaagattatgaaaaat

SEQ ID NO: 18075 - DNA, 425 bp, Glycine max
agagacttgatattacagttggttgagagaattatcacatctcctaaagctcgttctatctggctgaatggggctgtcagaaggggggagcgtgttgtgcccccatgggcacttgattctctattgagagttactttccctcttccttcagcccgggtcaaggccactgaaagatttgaagctgtttatccaacattaagagaagttgcccttgccagttcccctggaagcaaagcaataaagcatcttgcacaacagatactaagctttgcaattaaagctgcaggagaagctaattctgacctatcaaaggaggcaagtgacatttttatttggtgtttgactcagaaccctgaatgttacaagcaatgggattttctttatatggataaccttgaagcaaagtgttgtgtattgagaaaact

SEQ ID NO: 18076 - DNA, 421 bp, Glycine max
  modified_base (402)..(402): a, c, g, t, unknown, or other
ggagtctccttaccggcccggtcaccatcctcggcggcgtagtcgtcgccatcgccgccgccgacgttatcttcgtcaagaatgatccattcctcaaaccagaggagaggaactatgaaaatcagcctgctaccaagtaggagaaaagagacaacagaagtttgcgttttgatgtcatttaaaccctgatttatgagctctgtatactgttttgcaagatacgctctcgctagttaataagattgagtttctgaatgaagtctggactctggagcatgggccctcagtttagaactaaccttccaatgttctagaaaactggttcatacttcagagatccttacttgtctcttttgtacaatgtcaactgcaaatgcttaatgtggtttctaatcttccatntcttttcgttatccctata

SEQ ID NO: 18077 - DNA, 327 bp, Glycine max
taatcttccgatccgcgcgtacgatgcgttatgcatgatattaccctttcagctttaaattacaccagcctccattcaagacttgtccgggttttttctgcccactgttatccacttgactcttatcttaatcaactcacaccttcagtccatcctgctcttgaataccttccatctttacaacatcacaataacactgataccctgtctgcccaagcaccagtatatgcagtacttaccaatgtacctatcatattgcctcttgattgtgatcactacatatacatcatctctgccttgagaacagctataaactccatgatatat

SEQ ID NO: 18078 - DNA, 371 bp, Glycine max
ggaagaatcactcccttatccatttgcacaccaaaccatggcctcaaccaacgctctctctggaggctccattctacgctcttccaaccgccagtctatgacccgaagagcgaaccatattggaagagtaaattaccggaaaccgaataaccgtttctccgtgaaagcctacgccaaagagattgcctttgaccagcattcccgctctgctatgcaggccggcattgacaagctcgccgacgctgttgggctcactcttgggcccagagggaagaatgttgtgttggatgagtttggaagtcctaaagtggtcaacgatggtgtcaccattgctcgcgcaatcgaacttcccgatcctatggagaaatgct

SEQ ID NO: 18079 - DNA, 414 bp, Glycine max
cggccacgcgttgtttttccatggccatctgatcaaacttttcttgattctctctctcaggttgtgctattctgagtgatgggtatgccctgccgctgttcccacacctcccacatcactgaaatcatcatcaccagcttcttccgccacaagtcttaaattacaacaatttccctcaattattcatcaaccaaccaccttaatagccttttccaatggttccttaaagatccaacttggtcggagtaaacatggcggctagtggaagttccttttccaacatcactagcttccttcgcaaccaacaaccctcttcccaacctctcgaatcttcttctttcctctttgcgtcttcaaattttggttcaagttccaaatccattgtgagttttgaaaccaaaagaaggaaagggt

SEQ ID NO: 18080 - DNA, 453 bp, Glycine max
cggatctcggtgttgccaatgcgcaccaggtgcagcatctcagaaggtcacgcccaagaaaggctaggcctcagattcctggacctcctacttcaaaaggagaaactatagagaacaacaagaaaattggtctttgggcagtgaagttaccttcagcagattcaattgtagttcgacgaacgctagggattctaacagaaaacctccatggtctccctgggctgaacgagagtgctgagacagttgagaaaagggaagccttctggtcatctgtgaagccagctcattttggtgtgaaaataggctcaaaatctttcttgggcattctccgaatcatcatggttggagttttcattggtctttatggaagtattggttttggaaagcagcttcttttgaaatttcctgaaatattcagccttggctggttcatgaagaatggcccctctgaag

SEQ ID NO: 18081 - DNA, 459 bp, Glycine max
cggacgcgtgggggaaaattagcctcacaaaagcaaagatcaaacaaaccaaggacgagaacgcgatgttgcttgaacttgcacttggtttattggttttggctctgtttctgcacttgcgtcccacacccactgcaaaatcaaaagcacttcgccatctcccaaacccaccaagcccaaagcctcgtcttcccttcataggacaccttcatctcttaaaagacaaacttctccactacgcactcatcgacctctccaaaaaacatggtcccttattctctctctactttggctccatgccaaccgttgttgcctccacaccagaattgttcaagctcttcctccaaacgcacgaggcaacttccttcaacacaaggttccaaacctcagccataagacgcctcacctatgatagctcagtggccatggttcccttcggaccttactggaagttcgtga

SEQ ID NO: 18082 - DNA, 154 bp, Glycine max
cccacgcgtccggttagccaaaaaattccatggttaaaaccttccggggactgatacgctagatggttggaatctgaattgtcttgcttgaaatggctgcttgctaaggcatgtaactctttttcagtatggctgagtctggggcattctttaa

SEQ ID NO: 18083 - DNA, 448 bp, Glycine max
  modified_base (440)..(440): a, c, g, t, unknown, or other
tttagattaaggaagtggaataaccaagaacaagagattttaaaaaaagaaaaacaaattaagaaagcatgagagagaatagatagaggatgatggtgagcacatcctctgtttccattcccagtttgttcttttcctcttcctcccattgaagcattttttcacaagcccgtgattttttcgccatctccatcatcaaatgattttctggttcgggttttgattgatgctcggaagatccgatgctgctagatcgaatttgacaaaacccacttcgtgtctgatcgaagcaacaactgggttctgtctgaattttgagataagatggaatcggatcttggcaagctcttcattgggggaatatcttgagacactgatgaggaacgtctaaaggaatattttgggaaatatggtgaggtgatagagactgtgatcatganggatcgag

SEQ ID NO: 18084 - DNA, 451 bp, Glycine max
  modified_base (392)..(392): a, c, g, t, unknown, or other
gtcaaaccctctcctcgccgtcatcgtcgcatcattggccaccatcagtttctccggctacggggtatgctgttagctatacttcacttacctgctcgtacttctgttctttatcatgaactgtgtactctattctagtgactgcaccacccagttataaatcacatggtttatgttttatggacctaattcaattttgtcaaattgttatggttcagaactcgagaaacagcacataatcaaacgtgtctgcgtaacatcttcgcatttgttaccattgaatttaatcattacctgactttgacatttgctaaaacctcgctgaaatccattgttaagctactctttagcgtgttatacaaaattctcacctttaatcatatcagaccatngttctttaataacatcaactctagatgacgatgatctaccactattataatcgctataa

SEQ ID NO: 18085 - DNA, 346 bp, Glycine max
ctcaaacctaccacctgtctttaggattcttgtacttattaaccaccctgtgatcgcagacgcaacactctcgctggacacttcctttcacatatggcttctcacgacagcatctacgctcttccaaccttcgcttatgatctcgactacaatcacctcaatcgcactcccgatgatcctatcctcggagtaactgtcgcttatgacaaagatccaagtccatttaatctcaacttgtgatctgacgcttaccgaactgatgaacgaaaacctaccgttgtgaatgtacagaggccagttgaacagcaactcataaatgacgtttcaatgcacagggaatatattc

SEQ ID NO: 18086 - DNA, 451 bp, Glycine max
gaaagacatgaaattcaaatgaagaaagccaaactaattggcatgcttgatgaggtggagcggaggtacaggcagtaccaccagcagatggagatagtgggttcatcatttgagcaagctgcggggattggttcagcaaggacttacactgcccttgcattgcatacaatctcgaagcagtttcggtgcttgaaagatgcacttgcagggcacgttcgtactgcgaataagagcttaggagaagaagattgctttggaggtaaaatggaaggttcgaggctcaaatatgttgaccatcatcttcggcaacagcgagctctccaacaattgggaatgatccagcacaatgcttggagaccccatagaggattgcctgaaagatccgattctgttcttcgtgcttggctcttcgaacacttcctccagccttatcctaaggattcggacaagc

SEQ ID NO: 18087 - DNA, 471 bp, Glycine max
tggaccgacccgtccgacagcataagccaaattttgagtaaactagtgtgcacactatcccatgcctagtgggggtggggatcctctcgttgttgggggagtaattggggatgtattggatccttttgaatattctattcctatgagggttacctacaataacagagatgtcagcaatggatgtgaattcaaaccctcacaagttgtcaaccaaccaagggtaaatatcggtggtgatgacctcaggaacttctatactttgattgcggttgatcccgatgcacctagcccaagtgaccccaatttgagagaatacctccattggttggtgactgatatcccagcaacaacaggggctagtttcggtacgtatatgatgtttttccatttttaaaacctataattgtctgtgcttaaagttaaacctattcaaaccattatttttaatttaaaattagtgagttttattta

SEQ ID NO: 18088 - DNA, 312 bp, Glycine max
cgcaaataattgctgatgctaaagggtgaacatgtttaccctgataatctctaacctgtatagggacgagaaacatcactattgagcagaaaaataaatgggattccagcttattcatgaaattgctgaagaattacaatatacctgattattgagtatcctacgaattttcgatgcatatgctattgatataatcattactcacattgtcatatatattactattatctttggatgtacctataataatgcgatgacactgagattctaacatatacatataataattacacatatccttttcaagaaata

SEQ ID NO: 18089 - DNA, 454 bp, Glycine max
aataaaaataattgtaactcatgtctaataatgcactaataactctgtaacaccaccttcatggtggcgattccagttcaaagcgactcaagcacttgttcgactcttttatcctacgcactcctccctgcttatcctgcgcatctttcacctagatcctccccttcactccttcactttcctatttcagtgggaaagaatcatgagttgtttcagctgttgcgaagaggatgacctccataaggctgctgaaagtggaggaccctatgttgtaaaaaatccagcagggaatgatggaaattatcatgcttctcaaactgcaaagcagggcactcagcctgttaaacctcagcccattgaagttcctaatatatcagcagatgaactgaaagaagttacggataactttggtcaagattctctgattggagagggatcctatggaagagtatat

SEQ ID NO: 18090 - DNA, 465 bp, Glycine max
  modified_base (449)..(449): a, c, g, t, unknown, or other
gtggtgttgctgttgcaaattgcaacactcagtcagcactgcaccactgcatttcatttccgagcttagctacaactacaagcccacgtcgctttcataaaaccacacccacctgccaccatcactttccccaaaacgcaacatcatcaaaacttaaactcagagaatcagagagagagagagagagaaatgagtgaagaagccaaaaagaacttcgccggagctctaacggcgaggcccaactccgatgagccgaaaccggcaccggtgccagctgttcccccgaagaaggtcatcatcaagagcgctgatatgatccccgacatgcagaaggaggccgttgatatcgccgtcgccgcgtttgagaagtacaatgtggagaaagacgttgcggagcagataaagaaggagttcgataagaggcatggccccacgtggcattgtatcgntggacgtaattttggc

SEQ ID NO: 18091 - DNA, 236 bp, Glycine max
ggtcttgaattaccggtcgacggcgcgtacgtcctgaacctctgcatgacgagtcccaagactaccatgctatgcgaaggaccaagcttaggggtgggtgccctgctgcagctgtgactcggggatctgcggtcaactctgaaagccctgactgactgccacaggcttctacatgctctgaacttggatcgcatgcgtccttaaaaggatctagcccttatggtaatgatgatccc

SEQ ID NO: 18092 - DNA, 384 bp, Glycine max
cgcccactcgtccggtgttttttcaaggcaggtctacttaagctaccggcggacacggctctctcgtcggaccctgtattccgccctctcgttataaatgccatcatcacgaagatcccatctttgctatttacgctgaggctcaccaaaagctctccaagcttggatttgctgatgcctaaacaacgtttaggggattgttgaagaggcatggtgcccataatatttctctaaaaaattgtctggccatggtttttaatgccaatgtcggttccccagattttacatagcttttgaatgtatcttgctggacgtaactatgattcgtaagctagtcagtcgtttctatttgtccatgatacttatggtaaattacattgttca

SEQ ID NO: 18093 - DNA, 456 bp, Glycine max
aatacacatcacggcaactcatgtctaatggtgcactaatcactctctgacaccatcttcatgatagggattccagttcagaacgactcaggcactagttccactctttaatcctacacactcctacctgcttatcctgcgcatcttacacctagatccttcccatcactccttcactatcctattccagtggcaaagaaccatgacttgcaacagctaacgcgaacaggatgacctccataacgctgctgaaagtgcacgaccctatgttgtaaaaaatccatcatggaatgatgccaattatcatgcttctcatactgcaaaccaaggcactcagcctgttaaacctcagcccatcgcagtttctaatatatcatcagatgaactgaaagcagttacggataactctagtcaagattctctgattgtacagggatcctatggaagagtatatta

SEQ ID NO: 18094 - DNA, 398 bp, Glycine max
  modified_base (257)..(257): a, c, g, t, unknown, or other
  modified_base (284)..(284): a, c, g, t, unknown, or other
cccacgcgtccggtcaagggcagtgatttcaacaacaacaacaactcatcaaaggcttttggtgatgatttcaatgatgggtggaagatcaccaattccaatggaccccttttctctatgcctcacatcaacatcaacaacactcttgaagttggaggcttcaacaagggaggaggaatctattccaacaccaacaccaccatttcctcctaccatcctaataaccttaacaacaacgctgttggaggcttcaacangggaatctattccaacaccacatcctnaccctattctaacaacaaccaccaccaccttgacgacaacaacaacctcaacagaaataatctcaagggcttcatgacatattttaagggtgaagatcagtttacacacccaaa

SEQ ID NO: 18095 - DNA, 450 bp, Glycine max
aattattttttttttttttctaatggattggcggcaattccaattacccaagggtcagcggcttaaggaaacgagtcgccaaccggatctggactttcaacgcaccttctctcacttcaaggaggggagcatacagtatcgggtcagtgtacgacaagaaccctgatgatgagatccacactgggcacgtcccagacgatgtgatccaggcggcaacacaatccggcaaatactgtgccccacatccacagactggggtatttgggccccccagaggaagtgaccaaactgcttctgccattcactctgatgcgctggaggagaatgcctggtttcgccccaccagtctcgaggatttcgagaagcctcacacccttgcttaacaaccattggaggacatcatattataatactaaattaaataaacactgagtcagcctctcaggtgtg

SEQ ID NO: 18096 - DNA, 55 bp, Glycine max
atacaccattctctctctctttctgatctatttaacgccatttcaacatacctat

SEQ ID NO: 18097 - DNA, 396 bp, Glycine max
  modified_base (314)..(314): a, c, g, t, unknown, or other
gccacgcgtacgatgaattcaaaaactaagactaatttgtagagcttcgcttgattcctgaggagcaggcatgtcgaacacatgcggaaactgtgactgcgctgacaagactaactgcaccaagggaaacagctatggtgttatagtagagactgagaagagctacatcgagactgttgacatggatgttccagcagctgagcatgatgggaagtgcaagtgtggcactaactgcacttgcacggactgcacttgtggccattaaggaatatgtctgaaaatgtaattgacatgtgttaggcaatacatatctncaaataatgtaatcttcgtatgaataaatgtgtgcctgtatcctacttcatgatctgtgtagtcatgcagtctgaatcatgt

SEQ ID NO: 18098 - DNA, 452 bp, Glycine max
gtcttacctttccattatcaaaatggctgtttcggctatcacaggagcgaggctaaccctagggatagggttggcgatacctctttcctctcccacgcgctctcgaaccgtcgcaatggccgtatccgtcgaccccaagaccgacaacaaactcactcttaccaagtccgaggaagctttcgctgctgccaaggagctgatgcctggaggtgtcaactccccagttcgtgccttcaaatccgtgggtggtcaaccaattgtgattgattcagtcaaagggtctcgtatgtgggacatcgacggcaatgagtacattgactacgtcggttcttggggtccccgcatcattggtcacgctgatgatcaagtgctttcagctctggttgaaaccatgaagaaaggaactagctttggtgcaccctgtctgctggaaaacactttggcagagctgg

SEQ ID NO: 18099 - DNA, 387 bp, Glycine max
cccacgcgtccgcccacgcgtacggtttgctctataaacctcacctccctctctcggggagggtatctctctctctctctagagcgcaccgcacaggaccgatggaaacacaatgatccaaccctaacccaagcgcctcttacatacaaggcctaccattaccatcttaattgctgttccatatgctgtcaatgatctgtctcatctatggtgataacctcctattaatgcgcatatatgtcaaaaacaattcactgcattgtgattgattcctaaaatcggtatcgtgaaaaccactaatcagcgacactataacacggcttaccttcaatccgagttgaattcaccatgggttctccatacaattgaggtcaaccctgtgtattg

SEQ ID NO: 18100 - DNA, 313 bp, Glycine max
tcgaattgacagagagtcagaagaaaaagtggaacgggtgtgtgctcctcaaacagatgatattgccaaaaccgctagcggcgaagctggctcaaatgatactgcaaatggatgatacaagctgttcccgcatacaagtcatgctgctgaagatcttctgcacaattatggtataaccgtcctcgaattactcgtgaacgctctcgccaaagctctcggtcatactgaatgcaacctgataccactgctaacttccatggagaactatgttacattacactactgagactggcataccaatctacacccaatc

SEQ ID NO: 18101 - DNA, 259 bp, Glycine max
gcgtccaggtgtctttctggcttctgggttttctccctttggtcggttgagctaacagtggcatgtgtcgtcatcacaattaggttcaaaaaccaccactctgtgtgtttttttccttgtgtttctctcccatgtgtctccttctttacttaaaattgacgcatcagacaagggattaacttcttctttcttagttgacatatgcacattgcttatttttgggatataggacttgcatcaacaattaacattcttaatg

SEQ ID NO: 18102 - DNA, 380 bp, Glycine max
gtttacaccgagcagccacacctcccgcagcttccatggttctcaaaactgaactatgccggttcagtggtgccaagatctacccaggaaagggcatcagatttgttcgtggtgattctcaggttgtcctgtttgcaaactcaaaatgtatgaggtatttccacaatcgtctgaagccttcaaagctcacctggactgcaatgtacagaaagcaacacaaaaaggacattgctcaataagctgtgatgatgaggagacgtgctgccaaaaagccttactctaggtccattgttggtgcgaccttggaagtcatccaaaaaaagagagctgagaattcaaaagttcgagatgcatctagggaagctgctcttcgtgaaatt

SEQ ID NO: 18103 - DNA, 271 bp, Glycine max
ggcgcgtccgcttataaccgatcatccgcacgtacataggtttccgtggttctcaatactgaactatgctagtgcggtggctacctgatgtacgcacaaaagggcatcagatatgctcgtggtgattctcaggatgccctcgttagcaaactgatgacgtaacgatgtcttcatacaatcgcttaagaccttcgaagattaagtggactgcattggacagaaagtgacactgaaaggacattgatacagaggctttgagaacaaggacaca

SEQ ID NO: 18104 - DNA, 436 bp, Glycine max
cccacgcgtacgggcgaacgtgatgaagagctggaggaacttcgtgcggatattgtacactggaaggaaatgtacagagaacaagtgaacttgctcgttaataagatccagacaatgggtccatcaatgggtagcgactagtttgggcgaagaaagtgctggcttgaggaacggaaagtttagtgttcaataactatttgagaagaccatgaccatgaccatgaccatgtccatgtctctgggctgcgtgtgatgtacattggcacagtaataatatattggagaatagtgccatcagcctctgaagaatgattcgttcaggtttacatcggcagatatatattttgtttgcctgggcagcaaatacggatagtctgcattgaaatgggaatgttgtatagtcagtcttttaaaacgtattcatgcttggagagat

SEQ ID NO: 18105 - DNA, 442 bp, Glycine max
gaaatatcgtttctctctcaaaggtaacaatgtcggaagctaagacccaaattgaatccatggggaggtgggtcgtcgagcacaagctccgtactgttgggtgtctatggctcagtggtattacgggttcgatcgcttacaattggtctcgacccaacatgaaaactagtgttaagatcattcacgctaggttgcatgcacaggctcttacactgggagcattagccggagctgcactagtagaatattatgatcgtaagacaggagcaaaggcttcgtaaggaattttgacaataagtagaacgcaaccaaagtaccttgaattctttataccgagggatcctagtacactacctgatatgattatagctaaatttgcaattggacttgtactgtactctattcattcttaaaataaaatactaagaaatgttaacatgcc

SEQ ID NO: 18106 - DNA, 421 bp, Glycine max
cccacgcgtccggctactcgtactagtcatagccttaatggcctctgtattgatccgaggtggggtcctcagacatgttcttctcactgcttacaagacttctgatcgagacctctcctaggtctcaaggaactcctctttatctagacttgccaacagggactgcaataacatcaataatgataagccttatgcaaccatatgatatattgagtaaaagggatcgagatgaagcatctgtcattcaaggtatgtataatggcattacatactatgtagacaaatacagggctaatgtcatcagttacagacctctttacgacgatattgactgaggtgctaccgatgatgactacgctgacgatgctactgtctagaatatctgtgctgcgacactacttgatcttttagctctgactgc

SEQ ID NO: 18107 - DNA, 361 bp, Glycine max
gctattctctcagctattcaccagagatagcttccatttttgctcatatcttactctggctgctcctgttcctaggaggatacttcccacttgataaacagataacaataactgctccatatacttttatcaacatacatttacagaagttgcaacatctatgggaatcatcactcgcaggtctgatgcttgaaaaccaagtcaaattatcaggatatttgtgacaacctttattattataattctaggattctcatataggagtatcaaactcaacagtgtcattaacaaatttgaatctcccatatagcctgctttccttcatatgatcattattacattcaagacagatatacaggtc

SEQ ID NO: 18108 - DNA, 450 bp, Glycine max
cccacgcgtccgctagtatccgatcctctgtcctctcgaagctttcatcgttcaacatattctcaccatctcagtcatgggcctgctatcttgttttaggtctaccgtcctgagaaaatgttccaaaggaagctctggcatgtcaagattcctgtatacgaacaattttcaacgaaacttgatttcgtctggtggcaatgaatcgtattatgggtattttaacaggagatcatacacttcactttatatgggaactggaactgtgggtgggattacaagtgctagaatcagggtgccaaatgtaggatgtgaaggattcatgtgctcaagtcatctgtcaatcactcaaagaaattcaagattgatccattctactagcaagattgttccaaattctgaaattcagaatataactactgagatggtgaagacaccagaggtctcaagatg

SEQ ID NO: 18109 - DNA, 409 bp, Glycine max
cccactcgttcgattgtcattgcaactcggtattcctgatgcttccatcgctcaacagactgggatcatctaacctatggcgctggtttctcggaatacgactaccgccatgcgcaaatggccaaaatgaagcgctgacacgacatgatacgtgtatacaaccactttcaaaccaaactcgatgctcgctgctccgaatatgaacacttctggatacataatcaacttatgaagcactctactgtgtataggacacatgaacaggttgtggcattacacgctgcatcacctatactctccaaactattgatgcgaatgagaaaagtccttatgaaatctatgtatcactgaaaccattggatgattgcaacgaactactagcatgaatgcctgatattgagataccatc

SEQ ID NO: 18110 - DNA, 346 bp, Glycine max
caaagattcatcctcacacgccaccgttttcacccactccacgccaccgtcgtggctccacgccggccaaaaccaccctgccaattccatttccatttttaccccttcccagcgctccgaattccaattcgccccaatcgcagttcggttctcgatctccaagaaacggagtcctaaaaatagttcttttagggtttctctgtctcggtggttttgggattgaaacttttgatccgtttaagaatgggggatcgaggtgaagacgaggatttgcaaatggcgattcggatgagcatgcagcgcgggacgccggagccgaagcgcagcaagccgcgtgacgcccgtc

SEQ ID NO: 18111 - DNA, 332 bp, Glycine max
ccacgcgtacggcctctgatacccagcaaagtcctctgtaacagctactatcatagtcacgaaggcttattttgccgcgtgcagatgacatagatcacaacacgataagcaaccgatgatgggatgtctggaactatcggaagtggcttttatgccagttattcatgtcctacttatcagtgcattgagagctttgatggcaactcactttttcgatcatattctttcaccagacattcagtaagcctcgaacaagattgagctcgtgatattcacaccttcacttagcgcatacagttttgccaaaagtgtctgactcgatgatatgacat

SEQ ID NO: 18112 - DNA, 450 bp, Glycine max
gatcaccaaagtacttgtgagtgtatacccaacacaaactaagatcaacatggactactacggccgcgtttcagaagttgagagggaacctatcatggagtattccacaccacgaccaatgatgggcaactaccaccaccctaatgctcaccgtgtcctcaacgagaagattgtttatgaggaggatgtgattggaggatcccgccacaaccacatgcatcaccaccaccctgagactcatgagagagtcaaggtggtggagtatgaacaagttcctgagaggcgcgttgtctatgaagagaaagttgcttatgacaacgatcgttactactctccaaggtattgaaattggacaaatggaagaacacctataacgtgttatcatgtggctttttattaggcaggctacctagtataccaaaagcaccactgtgcttgtactaaataaat

SEQ ID NO: 18113 - DNA, 447 bp, Glycine max
aaagagaggaggagattgcgaaggcaaagcatgccttggaaagaaagaagaagttagcagagaaagctgcagccaaagcagccatcagagcacaaaaggaagctgagaagaagcttaaggaccgtgagaagaaagcaaagaagaaatcaggtgctgcagctgtggccaaccctgaggatgaaccaaaagatgaagttgtcgaggctacagagccagaaaaggttaacgatgatgtccaagtcctggctccagtgaaggaaaaggtccaaaaggagagtggcatcaggtccaggggccgagcaagaggcccagactcgattccaaaagctattattaagcggaagaagtctaacaattacctgatatgggctgcagctgcggctttgctagtcctcctgttggcagtgcttggatacatctatcttttctgaaaagcttaaatgtaga

SEQ ID NO: 18114 - DNA, 435 bp, Glycine max
gggagcaacaacagtctcgatctgaagaaccgagagtgcgagaggaccgacacgctgatagagacagggaaatatcacgtgaaagaggtagggacaaagacagagaacgggagcgatcacgtgaacattctcatgaaagggtcagggatcgcgatcatagggaggataggcaccacatagaccgggataggaacagggacagagaccgagacagggaaagagatagagatcgtgggcgtgatcgagatagaacacgggaccgtgatcgtgagcgagggaaggaccgtgatcgggatcgagaatatgatcgacatcgtgagagggatagagattatgaagttggtgaccctgatcgaggacgctcacgttatacggagtctgattatgatcgtgttgaatctaaacatggggaaaggaatcatgactattaacctg

SEQ ID NO: 18115 - DNA, 451 bp, Glycine max
  modified_base (422)..(422): a, c, g, t, unknown, or other
ggttacttgaaaatctcgaatcgctaaatttggattaagttttcaaccgaaccgcggaaccggttgctcgacctggctaactctcaggcaagtggctcggacgctgattccagcaacacgcggctggtggttgcactgtatgacgccctaaactccggcgactccaacgccgtcgtcaagatcgtcgccgccgatctcgagtggtggttccatggtccgccctctcaccagtttttgatgcgcatgctcaccggcgactccgccgccgacaactccttccgattcgttccgcagtccatcgccgccttcggctccaccgtcatcgtcgagggctgcgactccgcccgcaacattgcctgggtccacgcctggaccgtcactgatgggatgatcactcaaatcagagagtacttcaacaccgncctcaccgtcactcgcatccacgattccg

SEQ ID NO: 18116 - DNA, 369 bp, Glycine max
atttggcgttcggagcgactgaactaatcattaatttgcactcgctgcttcagcttcgtcagccttcttttgcatcatttatatctcttgagaaatggcacaagaaacctttctattcacatctgaatctgtaaacgagggtcaccccgacaagctgtgcgaccagatctctgatgcagtacttgatgcgtgccttgaacaggaccctgacagcaaggttgcctgtgagacatgcaccaagaccaacatggtcatggtcttctgagacatcacatccaaggccaacgtagactatcaaaagattgtccgcgacacatgccgctaaattggattcatctctgatgatgttggtcttgatgctgacaaatg

SEQ ID NO: 18117 - DNA, 416 bp, Glycine max
cttgggccaaagtggaggacttgacactgagggtaatgaacttccacgtttagtctatgttggtcgtgaaaagcgtccagggttccaacatcacatgaaagctggtgccatgaatgcccttgttcgagtatctgcagtccttaccaatggacctttcttattgaatcttgattgtgatcactacataaacaacagcaaggccttgagggaagctatgtgctttatgatggatcccaatcttggtaaacatgtttgctatgtccagtttccgcagaggtttgacggtattgataggaatgatcgatatgccaatccgtatacagttttctttgatataaacttgaaaggtttggatggcattcaaggtcctgtttatgtgggtactggatgcgtcttcaacaggactagcttatatg

SEQ ID NO: 18118 - DNA, 290 bp, Glycine max
ctcacgcctacgctcaggcctggtccttgactcatacgcactccaatctaccgatccggttgccttaacaaagactgcaccgtttcaacggacgccgtcagatcttcccatgaataccatgccatcaaggtctaagggtcttactagcgcacttctcctatctacacttcactggactcactgcctagacttcagcccctctctaaaccaacgtctgcgctgtatcagcgattcctaccttctacaacatgattgctatacacataaatcgtagtagtaatactgattat

SEQ ID NO: 18119 - DNA, 453 bp, Glycine max
gagagatcgaaatttcccattggggcaatatacagatcacagagcattacagtattatgcatgctggtgctcagagcaaaggagaattttctaggcttgactatcagaccaggcaatttttaagaggtgcatcagcctttaggcgtcttgttgccaagctaccaccaagagctcattctgtgtactacagggatgaaattggcaacatttccacttctagtttatggggtgactcaaaaaagacagaactggagattgaacctaggtaccctatgtttggtggctggaaaactgcctttaccattggatatggcttgccacttcgagacttcttatttggatcggatggaaagcgcttccttaatatctcttttggtgcccctattagtgagttggtcattgacacactctttgtgaaggttgttttgccagagggttctaaagatatttcag

SEQ ID NO: 18120 - DNA, 357 bp, Glycine max
cccacgcgtccggtctgcatttgcaacaaaggccaaagttcgccgagctattgaggctgaaggaatgcccttcacttatgtgtcaagcaacttctttgctggttacttcctgcccaacttgtcacagcctggagccacagctgcccccagagacagagttattatcctaagagatggaaaccccaaagctgtttttaacaaggaagaagatattggaacttatacaatcaattctgtggatgatccaagaaccttgaacaaaattctctacattagaccaccagctaataccttgtcgtttaatgagcttgttactctctgggaaggaaagattggtaaaactcttgaaagaatcta

SEQ ID NO: 18121 - DNA, 455 bp, Glycine max
cttgattcttatctctcacactgaacactcttgtagttaatcgaatttctcattccgcagaggccgtcaacgatggccgctgaaacgattccctaccagaacggcgtcgttgccagctccaacgattccaccgccacgggcaagaaatcgcgggagaacgaccgccgccgccgccgccggaagcagaagaagaacaacaaggcatctgaggccccggttcctaactcttccgaagagagtgacgatgcgaaagagaacaacgattcaaaacagcttgttgaacaaattgaaattgagtacgtaccggagaaggcagagttagttgaaggcatggatgaagagtttagaaaaatctttgagaaatttactttcactgatgccactgctttggaggatactgataagaaggatggttcagaagaaaatgcagcaactaataagaaggctaattctga

SEQ ID NO: 18122 - DNA, 459 bp, Glycine max
catattcaccaacatctccatcttattctccatcaagcccaacatacagtcccagcagcccgtagaattctggtgtgagcccagactatagccccagttcgccccaatttagtcccagtacgggttactcaccaagtcaacctggttactcgccatcgtcgaccagccagtacactccacaaactagtgacaaggatgatagaggcactcgctgaggtaaactaacagctctgctgaagcgcaaattcatgacttaaaagtttttatcttattggatggacagcatttacgatgtaaatagtgaagaatttcttccctggagaaatgttgactgtaaaaaattcctgattctgccatctttttctcctattggttttaaattgtgaaaagaaggtctatttggccaaagttcttgtagtggccggaaactatcagatttctagaaatccctatatttta

SEQ ID NO: 18123 - DNA, 200 bp, Glycine max
gtcgacggcgcgtccgcccacgcgtccgggaaaacttaagccattccttgaccgacagtttcgaacatgatcaagatgctcggatccatatgggcatgtcgtggtcaacgattacagacccagctgtcagtagatcggctggtgtcaccaaagctgtactattcataacacccatttctcgtggcgtgcacagtgccaac

SEQ ID NO: 18124 - DNA, 361 bp, Glycine max
ctttgttcgagataaggttttccctatcaaagctgaattgttgaaaccacaggaggaaatggaaagacacataactgatctcattaaaaagagtttagaagatgttactggcatagaatttcgaatgtttatggattttctgaagagtttgagcctatttggagaaaaggctccggctgagcggatgaaagagcttattggaatcattgaagggcaagctgatttagatgcacagttcaatgtatcagatgcagatcatattgaccggttgatatcttgccttcacatggcacttccatttgttgtgaggggtgcatcaagcaacatatttctcaactatataaacatatatataatatct

SEQ ID NO: 18125 - DNA, 386 bp, Glycine max
  modified_base (73)..(73): a, c, g, t, unknown, or other
ctttgaaagggttcacgaagaagcaccaatccgctccgagttgtatgtcttgcagagctagaggatgtcaacnatgcctcgctatgatgataaatatggaaatacccgcctctatgttggacgcttgtcttcgaggactcgttcacgtgacctgaagcgtgtcttcagcagatatggaagagttcgaggcgtagatatgaagaatgatttcgcctttgttgaatctagtgatcctagagatgctgatgatgctagatacaacctgaatggacgtgatgttgcaggaagtcgtattatcgtggaatttgacaacgggggtcctcgaggcttccgggaccaggaatatatgggtcgggagacacctactggatctgggcgatgcttta

SEQ ID NO: 18126 - DNA, 462 bp, Glycine max
  modified_base (21)..(21): a, c, g, t, unknown, or other
  modified_base (31)..(31): a, c, g, t, unknown, or other
  modified_base (298)..(298): a, c, g, t, unknown, or other
  modified_base (393)..(393): a, c, g, t, unknown, or other
agcgcggtccgctctgtgttngccggctgangattcccaacgagccaccttcttcggttctcgcaaaggttaagggagggttggtaaaggaaagactcacattaacattggcgtcattggacatgtcgactcttggaagtcaactaccactggtcatttgatctacaagcttggaagtatcgacaagcgtgtgattgaaaagttcgagaaggaggctgctgagatgaacagaggtcattcaagtatgcctaggtgcttgacaaggctcaacgctgagcgcgaaagaggaattaccatngatattgctttgtggaaagttgaaaccaccaagtactactgcacagtcatcgatgcccctcgacatcgtgactttatcaagaacatgattactgntaccttccaggctgattgtgctgtccttatcattgactccaccactggtggttttgaagctggtatttc

SEQ ID NO: 18127 - DNA, 336 bp, Glycine max
cagcctatcatggcgtgagttggtgactacactatcaacataaatgtgtcagtgtgacaggtagaggctactggaggctagcacacgagtttagtacaagtatgacgctcgataatcttccagctatacctacactagtccttgtcatgatgggcctgactaatatccctggataacggtcaaaatcatgaatcctatgaactcagcttctgacgggtcatgcgaaatatgacttgatatctaattaaactggtcctgtatattgtaacacttaagacgtcagattatgagtcatatattcatccattgagtggttcactcagaatctcactcaga

SEQ ID NO: 18128 - DNA, 450 bp, Glycine max
ccgatgaatgccttcctccgctggacatgtcaaagcagccacctacccaggagttggtggcgagggatctgcacgccaacgagtggcgattcaggcatatttttcggggtcaaccgcgtagacacttgctgcaaagtggttggagtgtttttgtcagctccaagagactagttgctgcggatgcgtttatatttttaaggggtgagaatggggaacttcgagttggtgttaggcgtgcaatgagacaacatggtaatgttccatcatcagttatctcaagccacagcatgcatatcggtgttattgcaactgcttggcatgccatattgactggcaccatgttcactgtgtattacaagcccaggactagtccagcaaagtttattgctccctatgatcaatacatggagtctcttaaaaacaattataccattgggatgcggttcaaaa

SEQ ID NO: 18129 - DNA, 433 bp, Glycine max
ctcactctctctttgatcaattccacatccataacaagacatctacccagaagttgatctggggcaaactctactgcgacgaatagcggatgaggaatatgacgaagattaagaccgattatacgctcacagctagtgcaatgaaatcaaggttatatgtatagtagactagctagtcatattgcctatgtattccacatgtgtgatcattgttatcagccaagctttgagtggccatctaggatataacgaattgaccgttcatgctctcgtatcaccgctctcatatgttcgtcaatgcagttctgctacaatgatgacagagttactaacactatgtggactagcatatacaacctcagaacatggccagatcggagtatatcttcatagatcatggacagatttgctcttaactgcaattttgctattt

SEQ ID NO: 18130 - DNA, 464 bp, Glycine max
gacgcgtccgcccacgcgtccggacgtcaaggctatatcggcaggctggggttaacccattggcaggttgtgtaccaactctggctacaattccagtctggattggtctctaccaagctttatcaaatgtggcaaatgagggactgctaaccgaaggtttcctttggatcccctctttgggtggtcctactaccattgctgctagacaaagtggagctggaatttcttggctttttccatttgtggacgggcatccacctttgggttggcaagatactgcagcatatcttgttttacctattcttcttgtcgtttctcaatacgtttcaatggaaatcatgaaaccacctcagacagatccttctcaaaagaatcaacttcttattttaaagtttcttccactcatgattggctacttctcactatctgtcccatcaggactaacaatttactggtttataaac

SEQ ID NO: 18131 - DNA, 446 bp, Glycine max
cttacttcagctctgacctttcgaccacttgtttggataatccgacccttgaatgggttaagcagggcccaaaaaccccggggacctaatccttgcttccggctgttcctttgaagggtgctgctgatcaggttcagaagaccaacaactcgcaggatgtggtggctgcacaagatgattctgcaaaaaccctttccgaagagcttgcagacattgaatcccagctcaagttctttgagaccccttctttacttgatgaagcctgtgctgatgctacattggcgtctttgctcggcggagacgcaactcatgacgccgacggataccctatgaacctttggagcttcgacgacctgccttccatggcacgagtcttctgaacaccctctatctcccctattatgtaaataaagctacaagaattgtgatcgcgatgttggtgatgg

SEQ ID NO: 18132 - DNA, 401 bp, Glycine max
  modified_base (377)..(377): a, c, g, t, unknown, or other
cccacgcgtccgcgaaaactccttatggtcaccttcaaaaccagtcaaccaacgtgatgctgatctgatccatttttgggataagttccgcaaagctcctgagggttctctcaggaaaaatgcagctcagaaacaagttttggaagcaatgtctcatagaatgcatgtagacaacagtgtaaaacttattgggaagcttttatttggtattgaaaagggtccagaagtactcaacgctgttagaccggcaggatcggcacttgttgatgattggcactgccttaaaaccatggtgaggacttttgagacacattgtggatccttgtctcagtatggcatgaaacatatgaggtcctttgcaaacatctgcaatgtanggataaagaatgagcaaatggctg

SEQ ID NO: 18133 - DNA, 458 bp, Glycine max
atgcattcttctatcttcattccttccgtattactctttctctgctaaatcatttaaatttgctggctttctctaattaattccctttgttatcaaaatggctgtggctatggctgcttgcagtcttggacttcacttgagtgctgacaacaccttgagaccttttgaaaaaaccactatcttgaaggccctctctatctctgatgctactaaaccatgttacatttctcacaaaacaagattatcatcttcatcttcaggaataacaatgatcccacgagcaacaacagttattggtactgtggaggatggaaatcaaggagaggctgataccattccaactccggtagttattattgatcaagactctgatccagatgcaactgtggtcgagataaccttttgtgatcgccttggggctctttttgacactatgaatgcgttaaaaaacttggggc

SEQ ID NO: 18134 - DNA, 455 bp, Glycine max
gggatgaggatgataatggggagactggggatgatgagatgggggtcgaagatgatggggagtttgaagatgacgatgaagaagaagactatggtgctgggtatcttgttcagccagttggacagtctgatgctctcaatgctggaggagctgatgtggatggtggaaatgatgacgatggtgaagaggaggatgaagttgatgacgacgacgatgatcaggtgttgcctcctgctgactcttcccacaagatgaagagggatgatgaagaggacgtggactacgatgacgatgtggtagcattcacgaagtcacccaagaagcatcattgacttctattatatatatcaatgttcttgttctgtttcaagcttccatgtgttggaagcagggaaacctcagttttagatagaataacgattgattaagttttaggaatttagctctctcatgaa

SEQ ID NO: 18135 - DNA, 167 bp, Glycine max
ctgacgcgtgcgccgtacccgtctgcaatgcctggttattcggtcggacctgtcgcgcgacggcgaggaagataacgataacaagatcgagacgacggtcgagccggcgaacgcgccgcaccacctgcggcagcagaagcggacggatgcggcggcgcaggtgccga

SEQ ID NO: 18136 - DNA, 443 bp, Glycine max
acgcgtacgcccacgcgtccgctttctccaagttgatgacgttactttactggttgaccgtcagaatgatatgcgcttgggcattgacgatatgtcttatgaggagcttcttgcattaggggagcggattggcaaagtaaacacacgtttgtcagaggaaatgattacaagtcaaatgaagacaaaatcttatttattactagctactaatgctattaacttggatgaggcagcttccgaggaacaggaaactgattcttgcataatatgccaggatgaatataaaaaccgagaaaaaattggtattcttcaatgcgggcacgaatatcacgcagactgttcaaagaaatggttacttgtgaaaaatgtgtgccccgtatgcaaatcagaagcattgactcctggagagaagtgtgtataaaatctgaggattacatgtctct

SEQ ID NO: 18137 - DNA, 455 bp, Glycine max
cggcccagtgctcatcgaggcttaaaccctttcggcggcagcgaaaaaagtctccccgggcccagacccaaacaatgaggaagaaaaaacaagggttcagaagacccgttgtcataaaaaagccgaagcaaccgcaagagcaacccagcgttgatcctattacgggaaagaaaatccccaaaagtttcgtgttttcgcgaggcaagttgccggctcctctcaaacagcttcagatggacctcagaaagttgatgcttccatacactgctctcagccttagggaaaagaaacggaataatctgagggactttctgaatgttgctggacctatgggtgtcacgcatttcttcatattgtcaaaaactgctacttcatcttacttgaaggttgcaactacccctcaagggcccactcttacgtttaagatacatgaatactcattggccgctgacatt

SEQ ID NO: 18138 - DNA, 452 bp, Glycine max
cccacgcgttcggggtagcggaaatgacaattctttgaattctgatggaaatgctgctgatggaggggcaaaattagagaatgctgcattgtcatggtcaaagggcatctataaggacacacgcacgggtggggctacagaaaaatccgatcagaatccaaatgctgataaatttcctacattaaggagaagaaaacatctgtttgtcattgctgtggattgtgataccaattgaagccttcttgaaactattaaagccatctttgagactgctgaaaaggatagggcagatagcattgtaggtttcatataggcaacatcattaacaatatcagagatacagtcattactaatctcaagtggctcgagacccatcgatgatgatgcttatatttgcaatagtggcagtgatctatactatacatacgtcaattccggagatcgtccatttg

SEQ ID NO: 18139 - DNA, 251 bp, Glycine max
tccatcggcagttagagacagagagagagagaaacaaaaccctaattggtgagcggcgaaaggggcgcaaccggcggcggctgcagcagcaacaggagcagcagtaatcgatcaagtgcagcgcttcgggcggaagacgacagcggtggcagtgacctactgcacgcgtggtctatgcctcatcaagatcaatggctgtccgatcgagctggtggagcctgagattctccgtttcaaggccttcgagccaa

SEQ ID NO: 18140 - DNA, 451 bp, Glycine max
agaagaaacagaattgaattgaattgcgtttgcgccattgaaaatcggaagtaatggaattgcattgctccgtgaaaaaattggaaaacgagaaagcgcttgagtttctcggaggcgttcctcttctgcagaggcttccgagctcgtctctgaggaagatagctcaacttgtggatgtcaaacactgtgagccacgagagtatgttgctcgcgagggtgaacctggagatggcgtgtacttcatattggatggagaggctgaggttcttggatctgctagggccaatgatgaacatcgaccagagttccaattgaaacaatatgactactttggttatggtttgtcaaacacagttcaccaggcagatgttgttgctttgtctaagctcacatgcttagtgcttccccatgtgcactcaacactgctgcagccaaagtctatctggagagc

SEQ ID NO: 18141 - DNA, 466 bp, Glycine max
ctgaaggccgcggcagccgcggccaccgcgccacccaagaaggaccaggccaagcccggagcgcgcagcggcgcgccggcccagttgccgtcgaagccgcttcctccctctcaggctgtaagggaggctaaaaatgaaacttcttacggcggtcgtggtggtggccgaggaggtggaagaggatttggacgcggccgtggtggcggcggtggctttggccgtgatttttccaatgatgataactcatcggcccctgctaaccaaggatcttttgaaggagattctgggaatccctcagaaagacgcggttatggtggaccccgtgggccctaccgtggtggcggcagtggacgtggtcgtcgtggaggttttagcaatggtgaaactggtgatgaaggacgtccaagaagagcatttgaacgccacagtgggactggacgaggaaatgaatcaaacgggaagggtc

SEQ ID NO: 18142 - DNA, 481 bp, Glycine max
cggacttgaagggtccgacccgcgcgtccgcttccacttccaattttcaataattcacgactccttccgagatctctctctctcgcccacaggccagccatggcgaatacggggaatttagacgcggcgatagagcaattgctgaacgtggagaagcagatgaggctcgccggtgacgtggcgggtaccagaaaagcagccaccgatattttgcagctctgcttcgatgcacgagcctggaaaacactcaatgaccagattgtcgttttgtcaaaacgacgtggccagctcaagcaggctgtaacagctatggtgcaacaggctatgcaatatattgacgagacaccagatatcgaaactcgcatagaactcatcaaaacgttgaacagtgtgtctgcagggaagatatacgtggaaattgagagagctcgattgatcaaaaaacttgcaaagattaaggaagaacaagggcttatagctg

SEQ ID NO: 18143 - DNA, 377 bp, Glycine max
cgtccacgcatccggtctgcatttgcaacagggttccattttcgccgagctattgatgctgaaggaaggccttttactgatgtgtgacgcaacttctttgctggttacttcctgcccaacttgtcacagcctgtagccacagctgcccccagagacagagttattatcctatgagatggaaaccccaaagctgtttttaacaaggaagaggatattggaacttatacaatcaattctgtggatgatccaagaaccttgaacataattctctacattacaccaccagctaataccttgtcgtttaatgagcttgttactctcttggagggaaagattggtaaaactcttgaaagaatctatgttccagaaaaacaact

SEQ ID NO: 18144 - DNA, 483 bp, Glycine max
agagctatgacgtccgatgcgcgcgtccctttcgcctgaggctaccgtatcactgtcagtgtatactgacatccgagatacacctgatcgaggaagcggctacaacgctacatcgctcatatcaatccatgggtacttactggcatatctctgtcagcggagtctccgaatatgacatacaactacgacctacttcaagttgcgcttccagcccctgatgtatctctaactaatgtcacgagtcgatcacttagaccactacttgtacgaatcactctatgatgatattcagcattctatcaagtttgacacctgaatgcaccgttacattcaataaccttgacaatatgtcgctgagcgtgaagctgcttggaaggctgatcttttttgtcccgatgcaacaattgctcgtgcagatgcaacactgcatatcgatcgtgacagtctacatgtccagaaaccagtcttaatatgaactggatc

SEQ ID NO: 18145 - DNA, 85 bp, Glycine max
acagttggtgctacatcataattcccatcaaatttaattatcgatgggttagaatttcattaatttatgattttggtggtgctgg

SEQ ID NO: 18146 - DNA, 371 bp, Glycine max
gttaacactttccaatacaataatcactaactgaatattcgatcggagatgtctgccgccggcgaagaagctaacgctcccgccgtcgaaaagccggttgaggaggtgaaggcgccgaaccccgcgaaggagaagaaacctaaggctccgaaggaaaagaagccaaaacaggccaaaacagcttcacatcctccatattttcagatgattaaggaggctttgatcgctttgaacgagaaaggaggatcgagtccttatgcgatagcgaagtacatggaggagaagcacaaggcggtgctccctgcgaatttcaagaagattctaggtctgcaactaaagaaccaagctgcgagagggaaactcgtgaagat

SEQ ID NO: 18147 - DNA, 457 bp, Glycine max
attgactagtatcattaagatggctaattcctacttatccttgcttgtcttgatccttgtaggtctgctcctcacccctcaagggcttgctgatgaatctgattcttactataagccaccagtttacaagaaaccaccagtgtacaagcccaagcccaagccacccattcacaagcccaagccacccgtttacaagcccaagccacccgtttacaagaaacccccttatggtaagtacccaccagttcaagacaacgatcacttctaaaccatgcaacaaggcatgttaatgttaactatctactaaaataaagaggttcagttaacctactacgtacgttgctccttttaattcctaaatcgtaatttacaactatgtacggatgagacattcttggctagctctgcacttcaatcctttatttgtacaatgctatggccaagtcaataccatgca

SEQ ID NO: 18148 - DNA, 400 bp, Glycine max
ggtgtgaagatggacactactgactgggaagtcctttcttatgatggcctttctgattttggggactatgacttgtgcacctcaccaaaattcaagaaagcctctgaagcatcaaggaattttcatccaagggtgcctaaacagattcttcatattccaattcaattggaaccgagaattgggaaggccccagatgaagggtcaatggaagaaaacactaaggatcatcatcgtgttgaggtccctcttgttccatcatcaccaactaccattgagaatatcaaaggagggattttggaggctgattataactgtgacacttttcaacaagaatgattcaagcatgtaagatgtgtcctgttgggttgaatgagacaaggtgaagccagaaatatgcttc

SEQ ID NO: 18149 - DNA, 302 bp, Glycine max
atttttccatagcataagctaacaaaataagaaaaatgaagttgaggtcttcaatcgcattgatttgcattctggcgagtgcgagtgtgacaatttcagaatcattaagccaacaagagcaattgtcagcatatgaagttcttgagaaatacgatctcccagtggggcttcttccaaaaggtgccacagggtatgagctaaacgaaaaaaacgggcacttcacagcgtatttgaatggaacatgctacttcagcatagagtcgtatgagctaaagtacaagtccacaatcaagggatggatc

SEQ ID NO: 18150 - DNA, 276 bp, Glycine max
cacaaaatcaagcacacaagcaaattcacttctctgttctgacacacatattaaggtcccgggaaagatctagagagtgattaacatggttactttgttcacaaatgcaaggccgtatctgctgttagtggcagttcaatttgggtctgctggcatgttcatatttgcgatggatgctataaagaagggtatgagccattacgtgttcatcgtctatcgtaatgccatcgcctctgtatctcttgctcccttcgcatttgttcttgaaaggaaagt

SEQ ID NO: 18151 - DNA, 325 bp, Glycine max
  modified_base (7)..(7): a, c, g, t, unknown, or other
  modified_base (19)..(19): a, c, g, t, unknown, or other
acgcgtntcgccacgcgtncgaataatcaaaacaaacacaaccaaacccaaagcccggtcgatttggatccgatgggtgatatactgaaacaaatattggcgaagccgatccagctggcggaccaagtaaccaaagccgccgacgaagccagctccttcaagcaggaatgcggcgagctgaaggcgaagacggagaaactggcggcgctgctgcgtcaggcggctcgtgcgagttccgatctctacgagcgtcccacgcgccgcatcatcgacgaaacagaacacgttctcgaaaaggccctcctggcctaatgcgggaccctat

SEQ ID NO: 18152 - DNA, 312 bp, Glycine max
acgatttaactccattttactttcgtcattttaaaccactgcttcaaatctatttaactctttcgctctgtaatccgcgtctgtttgcgtttcacggcccacattgctgcgttctctggagtctttggcctttcaaggaaaaaatggcagagacaaaaccagacacaccgttgatgccaccatcatcgcggaaccttccagatttcaagaagtccgtgaaattgaaatatgtgaagcttggttatcattacctcataacacatggcatgtacctctttctttcccctctggtggtgctcattgctgcacaag

SEQ ID NO: 18153 - DNA, 248 bp, Glycine max
acgatttttccataccataatctaacaaaatatgaaaaatgaaattgaggtcttcaatggcattggtttgcattctggcgagtgcgactgtgacaatttcataatcatttaaccaacatgatctattgacagcatatgaagttcttgagaaatacgatctcccagtggggcttcttccaaaaggtgccacagggtatgaactaaacgaataaaactggcacttcacaatggatttgaatggaacatgc

SEQ ID NO: 18154 - DNA, 311 bp, Glycine max
cccacgcgtccgatcttcttctatgggttggcttagtcggttcataactgccgtggctttgtgtagccatcggagtgatattctcaccggagacactggggtcaaaatcaaccacactttccacctacctcaaactcgctcacctcctctgcttctccaccgccttcggcgccgctctgtgggtaacattcatcggcggcatcatcatgtttaaaaatctgccgcggcatcagtttgggaacctgcaaagcaagatgtttccggcgtatttctcgatggtgggtgtctgctgcaccgtatcggtgttcttg

SEQ ID NO: 18155 - DNA, 403 bp, Glycine max
  modified_base (72)..(72): a, c, g, t, unknown, or other
  modified_base (110)..(110): a, c, g, t, unknown, or other
  modified_base (137)..(137): a, c, g, t, unknown, or other
  modified_base (142)..(142): a, c, g, t, unknown, or other
  modified_base (175)..(176): a, c, g, t, unknown, or other
  modified_base (187)..(188): a, c, g, t, unknown, or other
  modified_base (248)..(248): a, c, g, t, unknown, or other
gcgtaacgggggaagaatgatggttactttcaagaatccgaatgagggacccaaacgaatgtgggattgaanaagggtgtaacgtgctggtttgcgcgtgcaccaaaaancctcgtcatgagaggtgaactgatatnggatngactgacgctgctcgtttcaattctgaatgcannaatatattatnntaccttaccaattattattctgtatcgggtgattgtgaattgaaaaaatctagaactatngatgttgccctgttagtctgaacactctcttgttttaaaggggaacacattctaaattattgattaccgatggttcaaaagatgttaaagcttttcgttgtgttatctggtaacaaaaagagatactgcttagtctatcaaaaaaaaaagaaaaa

SEQ ID NO: 18156 - DNA, 408 bp, Glycine max
catgtgtcgtggaacttttgtggttgcaaccactgttggagtggtggaggcgttgaaggatgaagggtattgcaaaatgaacagcacaatgatgaagttggtggctcaacatgccaagaaccacatagggtcagtaactgaggccaagaagctggcttctccttctccttctccttctacttcttcttcttcagtaacttcaaataacctgagagatgatgagaagagaaggatggcagaggagtctctcagaacagttatgtatttgagcacatggggtcctaattcttagatgtagaaaacattataaatataatttacatattacaggacaaaattgatgcgacagtagcataatttaaatgaaggtatacattacacttgtcatatgcacgttatctatatgtg

SEQ ID NO: 18157 - DNA, 399 bp, Glycine max
ggtgtggtggtggttgtcgatttttaaatggcagcgtcgtcatcagaaaaacaacgtgtggtgatatgcataggcgacagcaagcaaaacacgtacgcgttgaattgggctctggataactttttcccgagcccaattttcaagctcgttctcatccactccaggcccaccgccacctccgctgtgggcttcgccggccctggtaggttcattctgttacgctcttccttttcacgctttcttcgttaattgagaatccctttcttagtgtttgcaggaaccgctgatgtctaaactattgtaatccattgaaaaatgcccaatctcaaacgtacaattgatacaatcgaattgtttctctcttctccttcgtattttatctttttgatttgtttactt

SEQ ID NO: 18158 - DNA, 398 bp, Glycine max
gcgcaagaacaaagaactaaagcacctgggatttgtgaggattgctgctattcaaacttttgtgagtgtgtcaaatctgtatgagtacgcaaagcagaattctgggcctttgagatccgctgttggaacggttgagaacactgtaaccaccgttcttggtcctgtctgcaacaaattcaaggacttccctgatgatgtcctggtttatgttgacaaaaaggtggatgaagcttcccacaagttcgatgagcatgctccttcctttgccaagcaccttgcggatcaagccaagggtgtgattcagaaagtgatggagcaggagtgcagaactattgggggaaactgtgtatttgtgtcaatcaacattggtgtaatcggagtggatgataccattacat

SEQ ID NO: 18159 - DNA, 402 bp, Glycine max
gaccacgcgtgcgatttctgtgccaacaaaagaagatggcctcacaggtttgcaaagctgcttccagagccgcgaggtccgttctctccgcttccagagcctcccatggacgtgcggttggggctgctacggctgtttcattgagctgcaaagtgcctcttttctacggaaagaacggttctggaagtggttccgcttcatcatcatcatcatcatggatttcaggagcacttgctcttcctgccgcagcttacatgttccaagatcaggaggtgcgcgcagctgagctggagcgcactttcattgccattaagcctgatgatgaaagggtgatttaatatattgttgacgaagggcaagctggggtaaagatgatcttaagaattgcaacactatacactg

SEQ ID NO: 18160 - DNA, 406 bp, Glycine max
  modified_base (25)..(25): a, c, g, t, unknown, or other
gcgcccacgcgtccgcccacgcgtncgaaccattgtggcctcactaagggatgaagcatataagcggcctcaagcacattcaagtcttcaaggttcaagcacaaaaatggtaaccattgtgggttcttacaatgtcactcctaatcaaccaactccaaaggatccttcatggctatccgatagtgaccaaatcggtgtcctaggtcatgtagccattgtctacatatacgaagcaaatcccaacagcaacaccattgagagattgaggaactctcttagcaagcttttggtgtactactatcaattcgctggaattactgcaaagggtgataatggtgaccaagaggcttatgactaactaaccatgtatatgaacttactcagtgacagactgtcaaatgtatct

SEQ ID NO: 18161 - DNA, 305 bp, Glycine max
  modified_base (30)..(30): a, c, g, t, unknown, or other
cgcgtacgctagaattctcagatttgcggngcgagatgatgcagcagccaggacccggcatggcacctggcaccgtgggccagcaggcgcaggaacagtaccagcagcagcctccgccgcagcagcaacaaccctacgtcatgatgccgccgcagcatcaggcgccgcagcctatgtgggccccatccgcccagcctccgctgccgcagcagcctgctagcgccgacgaggtccgaaccctctggatcggggatctgcagtactggatggacgagaactatctctacacctgctttgctcatacc

SEQ ID NO: 18162 - DNA, 239 bp, Glycine max
  modified_base (118)..(118): a, c, g, t, unknown, or other
  modified_base (120)..(120): a, c, g, t, unknown, or other
cccacgcgtccggaacatgtcattttagtatttgccaacgtatatttaacattaattaatgaattatgagtaatttgatgtcaaacaaaaaaaaaaaaaaaaaaaaaaaaaaaaaaangncggcgcccaaaaaaaaaaaaaaaaaaaaaacaggcgcgcgccaacaaaagaaccgggccggcggtccaaaaaaatccaaatttactgccccgggtatgaaaccacaaaactttagaaaa

SEQ ID NO: 18163 - DNA, 412 bp, Glycine max
accaacttccgctacttcctactccaaccactttcttttttcccgcagacatggggggggggaagatcggaatcaacggatttggaagaattggccgtttggtggccagggtggctctgcagagagacgatgttgaactcgttgccgttaacgatcctttcattaccaccgattacatgacatacatgtttaaatacgacagtgttcacgggcactggaagcatcacgatgtcaccgttaaggatgagaagacccttctcttcggtgacaagccagtcactgtttttggacacatgaaccctgaagatcatgagtgatgactacatatgtgatcacgagttaccgtaggatagtgcgacattaaggggcaagacgtatatttgcccagaggtgccctttgtgtgggtacaca

SEQ ID NO: 18164 - DNA, 392 bp, Glycine max
  modified_base (320)..(320): a, c, g, t, unknown, or other
gggcggccgacgcgtccgaaaaacaccaaattacatagaatttttaggcgtaaccaaagtacgtaccaaaccgtggcatggacaaatcaatggagaaaccttcttgcagctctagaggctgaggaagcagcccaaaaatccaaaggtaaagtgaacacatacaccaaccatggcgatgggtttcagaacatcactggcactaagaccaacagtggtgcatattctggtgatggtaacactcatcacgccaccaacaactacggtggtgggcctgctataaataatagtggcaatttccagggacatggcaattgaggctnaatgggtattcatgctaacagaatactataattatgatacaactatgataatatggtttggctctatctaat

SEQ ID NO: 18165 - DNA, 373 bp, Glycine max
  modified_base (299)..(299): a, c, g, t, unknown, or other
taatttctcaacttctctgtcccttgttttttttccccctcatcttaattaattctgattcgtaagaggaactgaaactccttcaatctcttttttttcttttttctcggacaccatgattttcgatcaagggtcaatgcaatctaagtccaaccttgactgcttcctccggcgtacgacacctgttgtgccgtctcagtttcttcccaagcacgagattcgaaaccttaaccgtttgtggcacccgtgggagagagaagcggttgagtacttcactttgggtgatctatgggatcggntcccatgatctatgactgattcatacttgcaatggaacatgtagacttttctacctttcattaatttacacaca

SEQ ID NO: 18166 - DNA, 302 bp, Glycine max
gacccacgcgtgcgcccacgcctccgcgtttttgagtaagctcaaactaagaaatgaacttgcagatccgggtgcgcaatctaagagcatggccatccaaaaagattaagatcaatatgcaaaatatacaatcacatttgtggagaaaatgtacaaaccacaagctttttgtggagccagatctaggaatacctctacatcttcttgatctcacacattacaaacctcaccaaatcataccacctattgctcgacaatataaagaattgatgcgagacgatgaagctcttactcctattcaa

SEQ ID NO: 18167 - DNA, 292 bp, Glycine max
  modified_base (10)..(10): a, c, g, t, unknown, or other
cccacgcgtncgctttagagagatagagagatagagagagagagaaagaaatttagaaaagatggcagcctgcactgtctactcaacacaatctctgagcacaaattgcttcatctaaccccatcaaagacacaactgagtttctttcaccaaaagcaagtaggttttttgaggaacaacaacaggggccacagcagcagcagaagaagctatgtgataacatgtgcagcaggtgactcacagacagtggtgattggtcttgctgcaaactcacggtgtgggaagagcacct

SEQ ID NO: 18168 - DNA, 386 bp, Glycine max
ctgctttcatcatatgaggttgaaccagagagagaatataactatcaacgcggatagataggcgccatgcacgagagcagttgaagagtgctaatgggatggaggcagaaaatggcttcattttccaccaattggatgcagtcagggtgctattattttcgattatgtgataaagatactgatggtcatgtcaaggcaacaacaaactgaagacgctcgagtcacagctaatttttattctgctctagattttactgctgttgctcgtcatcttagctatgcaaatcatttaatttgaaaaatttattataccggttttaattattaaaaaaaatatgagatgtatactctattggagctgcaaccatatggttaaatacaaataa

SEQ ID NO: 18169 - DNA, 290 bp, Glycine max
atggcgcttgcaaactgtttttctttgcctttgtggtaatacagtcaatgcaacagattctggtgcgtgatgaaatcaagagacggtcacaacaagtacgcaatactttcctatgctcgatgtacacattttttaaatattggaacggcttcaatatattctcaagatgtaaatgcaatcttgagaaataacaagcactttattaaaaaaattgctagatatatgagctaattatcgtgctgtaacatctgatgcatacttaacctaaaatgtttttcttattacacctg

SEQ ID NO: 18170 - DNA, 334 bp, Glycine max
acgaaaaaggaaaagaaggacaaagatgaagaaacagacacattaaagggaaagggaaaaaatggtgatggtgaagagaagaaggaaaagaaagagaaggagaagaaaaaggaaaagaaggacaaagatgaagaaacagacacattaaaggaaaagggaaaaaatgacgaaggcgaggatgatgaagaaaataagaaaaataagaaaaaggataagaaggagaaagagaaggatcacaaaaaagaaaagaaggaggatggaaaagaagagggtgagaaagagaaaagcaaggttgaagtttctgtaagggatattaataaaaaacacaagaggg

SEQ ID NO: 18171 - DNA, 346 bp, Glycine max
tcttgctccttttcctcgtgttgttgcagaagcgattccaaatgggcttgctagaagaaaacgcctaatcattccaagaccatcctgatccgcgaggtctgggcatccaacctcgaatccgaattccagctgattcgtcaagtcatcgatgattaccctttcatttccatggacaccgaattccccggcgtcgttttccgtccccacactgtagaccccacaaaaccctacctcccaccttccgtccactaccgctttctcaagtccaacgttgatgcacttaacctgatccagatcgggctcactctcttattcaacgaattccactcgacgcaccgtattggat

SEQ ID NO: 18172 - DNA, 397 bp, Glycine max
agctttcgcagaaaaaggaatcaaatatgagtacatggaacaagatctcaccaacgggagtgctttgcttcaagaaatgaacccaattcacaagaagattccagttctcatacatcatggaagacctatctgtgagtccctcataattgttgagtatattgatatggtttgggacaacaattgtcctttgcttccctctgatccctaccacaaagctcaagccaggttctgggctgattttgtagatcagaaagtgtatcatgcttctaagagagtttggatttcaaagggagaagagaaagaaggcaaaagcttctaaagctaacaatggagattttgaacacctatttggggaccattggtagtgagtgcttatactctatgtgttatactataa

SEQ ID NO: 18173 - DNA, 251 bp, Glycine max
accactcgtccacccacacatccattattatttcatatatcacaatcccacctgctgccgtgtttaatattaatgaatgcccactacacacaaaacaccattccttataatactctcttccaacaacccaatcattctcacacccattcatctatcatatcttaatcttttccatcacacaatcaacacctcttacatttattctttaactcatacttcttaccctttttctcttaattaatctaaataat

SEQ ID NO: 18174 - DNA, 330 bp, Glycine max
cccacgcgtccgcccacgcgtccggtgatgaaggtggcgttggagatgacctcggggattgggctgagttcagaaggcgcgttggaaagaagtgctccgaaactgattccactgccttttatgagttccaagaccgacgaggaaaggcaggggatcctctctatgttctgttatgctgttggctagcagccattggtgcaggtcttctcaaaaccgaggatattctggaaggggtggctcggctccggatctccaatgacattgaatttgaggagcagagtttcatggctttgatgaatgagtaaggaaacgcaagcaacctatctctgt

SEQ ID NO: 18175 - DNA, 343 bp, Glycine max
  modified_base (13)..(13): a, c, g, t, unknown, or other
acgcccacgcgtncgtcatcatccatttgaatgaattgctgtggagacacgtctttctcaagctgtggatgattggatttagtctctgtgtaatttttatcatgtttgcttattgtacaaacgacagaataacgacttcgaagtagttgatgaagggcttctgataatttggggaaatcagatgtgatttttaagatagttggatcagattattgtggtttcattacacgtctcatttgattgatataaaggttatgtcatgctaagcgagatgtatatggcagcactgcagctagatggatttgccgaaaactaggcattgaattcagcttttggtatttac

SEQ ID NO: 18176 - DNA, 337 bp, Glycine max
cccacgcgtccgagaaacacgacttcaaaagttcagggacttgagaatgcaacaaaagacggggagactcaatagttttccaaaaagagatgccgctatattgaagagacatttagctcatttggaaacatatcttggcggcattaaatatatgacggggttacctgatattgtaataatcgtcgatcaacaagaagaatatacggctcttcgagaatgtataactttggaaattccaacaatttgtttaatcgatacaaattgtgacccggacctcgccgatatttcaattcaagctaatgatacttacctaatcataatctacaatatattgatt

SEQ ID NO: 18177 - DNA, 359 bp, Glycine max
acgcaaataaccaaaggattgaaccttctaagagcaccatggaccctgacgtcatcggcgttcggtctccaattcacgaccctccaagattccgcgagcagaacaaggtcattttgcatgatgtgattgacattgatgaccactctgaggatgtagtgataattggtgaaaaagttaataatagtaacaaagggaagacaattgacgccgttcatgatgatcatcaagttgtgaaaacggctgattatacttactctctgcctggtgtggaaaattttggatcagttagtgagattgtctcgttctaaatttcttatgtcaatatatacacaatatgcatggttattatattacatata

SEQ ID NO: 18178 - DNA, 364 bp, Glycine max
  modified_base (13)..(13): a, c, g, t, unknown, or other
  modified_base (16)..(16): a, c, g, t, unknown, or other
  modified_base (25)..(25): a, c, g, t, unknown, or other
  modified_base (325)..(325): a, c, g, t, unknown, or other
acgcccacgcgtncgnccacgcgtncgaggaaaacgagtcaattcatcatttgctctctgctctgcttgtgcaaattttaggagcggagaatccagagaaagagagatgtctggtatcgcccgtggacgtcttgccgaggagcgaaagtcatggcgcaaaaaccaccctcatggtttcgttgccaagcccgagactctccctgatgccaccgttaatttgatggtctggcattgcactattcctggcaaggctgggactgattgggagggtggatatttcccactgacaatgcacttcagtgaagattacctacagctccaggcnatcctaggttttaccatggatcttaactgtgtgttctat

SEQ ID NO: 18179 - DNA, 298 bp, Glycine max
gagaggccacgtgagtgccggccatggccgcatcgggaagcaccggaagcaccctggagggcgcggtgtatgcctgaagcatgcaccaccaccggatcctctttgacaagtaccaccctgggttcttcggcaaggtcggaatgcgctattttcacaagctccgcaacaaattctactctccgatcctcaacatcgacaagctctggtccctggttccgcaagaagtgaaggacaaggcctccaaggagaacaaggcgccgctgatcgacgtcacgcagttcgggtactttaatgttct

SEQ ID NO: 18180 - DNA, 407 bp, Glycine max
gcgagcaacctttgcttctctcattaattaattcacaaactaacttagcttccaaattcatatggagagggtgacaaagatggtatcagagaggccagtggtgatattcagcaagagctcgtgctgcatgagccacaccataaagaccctcttgtgtgactttggggtgaatccagcggttcatgagctggatgagatcccaagaggcagagacattgagcaagctctttcaaggcttggttgttctccatctgttcctgctgtcttcatttctggtgagcttgttggtggagccaatgaaaagcatgagcctacttatgtcttatcaagctaaagagagcttggtaatgaaatattatgactctcaatatacactattgacacaactttgggtttatatatatctg

SEQ ID NO: 18181 - DNA, 66 bp, Glycine max
aaaaaaaaaaaaaaaaaaaaaaaaaaaaaaaaaaaaaaaaaaaaaaaaaaaaaaagggggaggggt

SEQ ID NO: 18182 - DNA, 380 bp, Glycine max
  modified_base (115)..(115): a, c, g, t, unknown, or other
  modified_base (121)..(121): a, c, g, t, unknown, or other
  modified_base (325)..(325): a, c, g, t, unknown, or other
  modified_base (327)..(327): a, c, g, t, unknown, or other
  modified_base (329)..(329): a, c, g, t, unknown, or other
aaaaaaaccgccccgccaacacttctccttttccacatataacaacacattctacaacaaaacgacttactacaaaaaatcgtctaatctttaaaaaaccgtcctcatccccaanttcttnccatacaaaccttaatcctaattccaactcatttttcaaataatcaattattaccctttcattcccatttacaccaaataccccatcttttttttccctccttccactttataccccacaaaacccttcctcccacctttcatccactacccctttctcaaatccaactttgattcacttaaccttatccaaaacccacatcantntnttatccaccaattccccactttaccacaaccttatttaaataacttcttac

SEQ ID NO: 18183 - DNA, 411 bp, Glycine max
cccacgcgtccgcgctcactgccgaagatcattgttggcctcgcttctctctctctgcgatgcattcatttcttcgttcttctccaccatttaatacatattattatactacaaaaacataacctccagaacacatttatatattcccttgttgcatatatactttgttgttgttgttgttgttgttcttcttgtaaatggcgaatgcatctgggttcttcagcccttcggttccccacttcaaagtgagggttaagcctctcaccactgccattggattctccgccaaagtcatttgcgttgaactcaagactgaaaatcttcacgttccttttcaattcaaacagctgcacaaggtcagtattgattgcttgtggccacttaatttatacacttcaaatgtgtctatat

SEQ ID NO: 18184 - DNA, 267 bp, Glycine max
cgcacttatacctctaagattatggaattcgtgactgatcacctgaagacggaaatggggtggggtggttgactggtcggatatgcaaaacatatcacgatgcggcgcttaaagggacttaagcctttatttgcttccatattacgatgatgtgacctgcgtatatataaccagccaagaggccttgaatatcctgaacttcttgctagagagactgtgtttcagcgtagcgaaatagaagcactttaccagctcttcaaaaagatt

SEQ ID NO: 18185 - DNA, 287 bp, Glycine max
cctatttctatcgcttgcaaagatgtgtaattgaatttgcatcatggttcgtatactgtagtgtgtatgctaaccaggtgggtgaggaaaaacacgaatcgtcctgtttgtgtatcatgatgtttctagtttccccactttcccctttttagtttgtggagcggggaatgtcatttgtgtaatattataattgtttaagttgtttagccaaaaaaaaaatataaaaaagtaaatgaaatcataaaaagcacggacgtagcttgctctgaatgctgatgggatacaaa

SEQ ID NO: 18186 - DNA, 366 bp, Glycine max
cacaaatgaagatgctgcaggagagtcctcaactcagtcccaagtcccaaatgatggtactgtgagcatcaattgggactcaactcactttatcttcctcatcccaaaatacttgtcccattctagtttttggccctgtgcgactcttgattttgaaagggtttttttggaggggatggtaggataggttgattcctttctacggtgactgagatcgatttttgtagcaattgaatcaaatatggaaataaataacaattctttggaattattatggcctaaaaagataaagaatattaacgagaactaatttttaataaataaaaattataattttaaaaaaattataatttttatttttaaaat

SEQ ID NO: 18187 - DNA, 315 bp, Glycine max
cttgcgcataagccttgggcttgagccatgtttcctagttccttaaacaatcaacgctattgggttttcattttcatcatttattcttcttttccccccaacccgcttcacagaatatcagaccaacaaactaactacatgctttgtcccctaaacttaacaaaccaccaagaatgattctattccttttttcttggcaatcaacccattaaagaaaaccattttcatcatcaccttgttgtgtcttgttattgaaagatctaaatgttaagcttgttgatcaaaaaggtatgtcggttatatgccttttattct

SEQ ID NO: 18188 - DNA, 395 bp, Glycine max
ctctctctcttcggagctcaatttggccgtcaatggcggcctccgaggctctcaacggcacaaccaccacctccatcaggcacgcgttcggcaacgtcctcgcgttcttcatacttctcatgatcggcgttctcgccttctcgatccgtctcttctccgttataaagtatgagagtgttattcacgagtttgatccttatttcaactatagagtcactcagtttttgacaaagaatgggatatatgatttctggaactggtttgatgatcgaacttggtatccccttggtcgtgtaattagggggactggttctggtgactgcagagccctatgggtctgatcatacaacctctagtgaactgtgggtatgactatatttgcttgtatgcactat

SEQ ID NO: 18189 - DNA, 321 bp, Glycine max
gatggtgcgcgtgtgatttatgttgagggtgtagacataccacttattgctgtgaaaagagatggtggctacaactattttacaactgatctagcatcactttggtatcgtctaaatgaagaaaaacttgaatggattgtatatgttacagatattgggcagcaacagcactttgatatgctatttaaggcctataggcgtgcaggttggttaccaaaggatgagaatgcgtatccaaaatgtactcatataggttttggtcttgttcttggggaagatggaaaacgatttcggactcgcagaggagtgtcatagtgatac

SEQ ID NO: 18190 - DNA, 304 bp, Glycine max
atatcttctcttgagaacaagttattgttggcagggtttacagaaccacaaattttggaatgatctgtaatcaaagctaaaaagccttcatagaaaattgcttcgtcttttgcgctaaagaaggtgattaggagttcacctaaaatgcaaattgattttgattcaaatctgattgatgaagatagtctttttactgaggaagatttaaagaaaccccaacttccacctcgtgattgtgaaattgggagcacatgaaaagcctgcataaattacacctgtgggagggctgaagaagaggaaaaag

SEQ ID NO: 18191 - DNA, 379 bp, Glycine max
cccacgcgtccgcgcggcttcaaccttgtagttattctctttcttcttttttagcggtccgtctcttgaaaaatctagatctcgttcttccttgatctacgttacgcttttagtgaccggatctgtatggatctgaaccagatctacacgccgatggtggttttggcctggtctttcatagatctgatgcatggaggctcagatctactgtacagaggtgtgcgattcatgttcgtctctcttttggaatctgtttcgtagaaagtcgtttggtcttccatgtcgcatggcacttgaggtatttttgaatctgaatatcataaaaccaatcgcgtcgtgtcacgtcacctgacgatatatatgataacaatgctctcgt

SEQ ID NO: 18192 - DNA, 308 bp, Glycine max
  modified_base (10)..(10): a, c, g, t, unknown, or other
cccacgcgtncgtgctgactccttatttcctagttccgtctttcctttgcacaacacagcgtgcaccgtcgcctatagctactctctcttccttcaattcaattcctcaactctctagctcttatggaaactcaacaccaacaacccaccatcaagtctaggttcagacgcatctgtgtctactgtggtagcagccctggcaaaaaccctagctatcagctcgctgctattcagctcggaaaacaactggtggagaggaacattgacttggtttatggagggggaagcataaggttgatgggtctaat

SEQ ID NO: 18193 - DNA, 402 bp, Glycine max
  modified_base (89)..(89): a, c, g, t, unknown, or other
aacatgttttgtccaatgctctacaagaaatgttacttgctagatgcggtgtacggacagattatttctttcccggacgcacacaaggncaaggaatatctgaacgaccacaagtaatttctcttttccttcgctcctgctcctgctgctacatctggtgctccagcaactgcagccaaggaggacgaaaataatgaagaaccagctgaagagtctgactatgacatgggtttcagtctgtttgactaaattaactaatacttttgttgagtttgctttgatagaatacgtgaaaatgttacctatttagtctatttattctgctttaatcatgtacatcaacagtttaatccaagtataaacttacatttgctcttatgttaatcaaaaccatgctctttt

SEQ ID NO: 18194 - DNA, 393 bp, Glycine max
ccgggcgccacgcgccgctcttactttcaaacccactctttccccataaccctacccactccccctcgcgccgccgcgaaacggcctcttctcgtgttctccaaaaacccaatttccgacatcgtctcctccaccttctcacgcgccgaagaaggcgcgtgggacgacgagaagccgcgcgaggagtgcggcgtggtcggcatatacggcgaccctgaggcctcgcgcctctgctaccttgccctccacgcgctccagcatcgcggccaagaaggcgccggaatcgtcaccgtcaacaacaacgtcctccaatcaatcaccggcgtgctcgttcgagtttaacataaaatgacagtcccgagcttcatgcactcgtatcatgcgcatcatgta

SEQ ID NO: 18195 - DNA, 183 bp, Glycine max
atcatatctttctcaaactagaagaaatattcttccatacataatcggaaatttcacattggtggaggtgaaaaactgggctgtgcctccacctactctttacaatgccctaattacatatgccctctacgtcattccaaatgctcttgattccaacaacattgtttaaaacgtttatgtaaa

SEQ ID NO: 18196 - DNA, 310 bp, Glycine max
gctcaccccaactttttttccagtctccatctccatctccatcaagtgtaactatggctactgaaaaggttttggttgatgaaatcacttacccttccaagatcactactaccaagcccctatctttgcttggccatggaatcaccgacatggagatccactttatccatgtgaaattctattcaatcgggatttatttggagcctgaagtagttggccacttggagcagttcaaaggaatatctgcaaaggagctggaagagaacgatgagttcttcaatgatctcattttgtcgtgaaagtataactg

SEQ ID NO: 18197 - DNA, 408 bp, Glycine max
aacaaaacctacgaggaagaagaaagcacggttctattttcccattcccaaacacgggcagggttgttacccttcaacgagaacgacccgcaggacatggtcatataccaagtcctcaacgaagccaatgctctcaccaacacatttctccctcagaggcttcaccaacctcagttgtgcctcgagcccaccagaaacataacaaagaagcactacagaggagttcggcgccgcccctggggaaaatacgccgctgagattcgcgactctgcccgccacggcgccagaatatggttaggcaccttcaacgtgaaagtgcatggtataccaccggtaaatgaggtcaggttgtaattcactaatgtgtgacgatatttcaatataagacatacatctgtttatcatgtg

SEQ ID NO: 18198 - DNA, 401 bp, Glycine max
cccacgcgtccggtactttggactcatgggtgatggccaacctattggacgatacgatgatatgtgggctggatggtgtgttaaggttatatgtgaccatttgggcttgggagtgaagactggccttccatacatctggcacagcaaagcaagcaacccttttgtcaatctcaaaaaggagtacaagggcatcttctggcaagaagaaatcattccattcttccaaagtgccactctttcaaaagagtgcacgtctgtccaaaaatgttacattgaactctccaagcaagtcaaagagaagcttggtgtgtcctattatagtacaatgcaggactgatgactggatactacaacacacattaaaagtctcaagcaacaagtgtgtgtgcagtgacttatgt

SEQ ID NO: 18199 - DNA, 305 bp, Glycine max
  modified_base (102)..(102): a, c, g, t, unknown, or other
ccacgcgtgcgaagatatctcgggatgttgtcttcaatgaatacatgttggttgatgctaataaaaccaacgacccgtcagaactttcagccagaaggtttntacttaaatacttaagagcataaaggatttggagatcctttttctaacaatggaggtcttacacaggatatcttgtatggacttggagaacttgatttgtggttgctacccctgcgtatatctgatgaccacagtttataggagttcatgtatttgcaaggaaatcatcctaatgactattacaaaaatgcattgaaatattt

SEQ ID NO: 18200 - DNA, 320 bp, Glycine max
tgtaaatcagcttcttactaagatagatggtgtggagtcactaaataatgttttaggtattggaatgactaacagaaaggacatgcttgatgaagctctcttaagaccagggaggttggaagtccaggttgagataagccttcctgatgaaaatggtcgattgcaaattcttcaaattcatactaacaaaatgaaagagaattcttttctagctgctgatgtgaaccttcaagagcttgctgctcgaacgaaaaactacagtggtgcagaacttgaaggtgttgtgaaaagtgctgtctcatagttaataacatgattaa

SEQ ID NO: 18201 - DNA, 371 bp, Glycine max
ctggtttatagatctctgtgaagtcgctttataacactcaacctaagatgcagaacgaggaaggacagatcaccgagctttacattcctaggaagtgctctgccacaaaccgattgattaccgctaaggaccatgcttcggttcaggttaacattgggcatgtggatgagaatggcgtctacaatggccatttctccacttttgctctctgcggcttcatacgtgctcagggtgatgctgacagtgccctagatcgcttgtggcagaagaagaaagttgaagttaagcaacagtagacacccatgatattgtcttgttgataattacctgtaaaattagactatatgcgctgacaactattaatttgtgat

SEQ ID NO: 18202 - DNA, 331 bp, Glycine max
  modified_base (51)..(51): a, c, g, t, unknown, or other
  modified_base (93)..(93): a, c, g, t, unknown, or other
  modified_base (96)..(96): a, c, g, t, unknown, or other
attcaattcattatttttggttgaaaagatcaagtggagatcggtcatcanacgaactcgcaggggatgacaatgaggttgaatatgatactnaanaggaaaaacctttcataagtaatacccgcaaaacgaaagttgacaaagttggagtggagaagtcttcaatgtcaagcaatccatcaaattctgccagtaatagtactagtattcacgaaatgctcaaggaatttttccagcaccacttaagtatggagatgcattggagggagatgattgaaaggcgtgcttatgaaatacaaatgtttgaacagatgcttatcatgaaacttaa

SEQ ID NO: 18203 - DNA, 305 bp, Glycine max
attccattctctctgtgtatttccctacctctcccttcaagatgcagatcttcgtgaggacgctcaccggcgggaccatcacccttgaggtggaaagctctgacaccatcgacaacgtcaaggccaagatccaggacaaggaaggaatccccccggaccagcaacgtctcattttcgccggaaagcaacttgaggacggccgtacccttgctgactacaacattcagaaggagagtactcttcacctcgtcctccgtctccgtggtggcatgcagatcttcgttaagacactcacctgcaagacc

SEQ ID NO: 18204 - DNA, 317 bp, Glycine max
caaccttggaataaaaggtgaaaaaaaacagcaactttaacctaagacaagagagtagtatgtaggaagtttcaccttccttggagattccaactcacatcaaaatttgaggaagatctcaaccacttcactttccaagaggaggtgaggcatcatggctcaaaatggaagtggggatagagtagtggtggacaatggttttgaatccattgatgatgcatacgatcatgaacacaagctgagtcaaaagggtagcaccaaggtcaaggaggaagaggtttctgtggagagggtgttccagcaccttctggtcctat

SEQ ID NO: 18205 - DNA, 142 bp, Glycine max
cccacacacccacccacacgtacactgactcatcttctaccaccacctcaaacccgtggtggtgaaaataacgggggatgacgacaacgctcgaatcacttatcttttccaaactacacgtgaatggcgtcattcttgtttt

SEQ ID NO: 18206 - DNA, 63 bp, Glycine max
  modified_base (28)..(28): a, c, g, t, unknown, or other
  modified_base (39)..(40): a, c, g, t, unknown, or other
cacgcccgtaccggaggggaattaattnctcaccttcgnnccgtcatcccccacgggcggcga

SEQ ID NO: 18207 - DNA, 283 bp, Glycine max
cccacgcgtccgctttctttccgcttctgaatccgtgccctagcttcttcctcctgcgccgttgcaacagggcacacaaccttcgtcacaaacccaattcgcgagggatcggattcgccatcatggggaagaagaagaagagagtttcctcgaaggtgtggtgttattactgcgatcgcgaattcgacgactagaagatcttggtgcagcatcagaaagccaagcacttcaagtgccatgtctgccacaagaagctcttcaccgccggcggcatggccatcca

SEQ ID NO: 18208 - DNA, 323 bp, Glycine max
tcagattcgaaaagcttcagctgaacaactgtaccttgtcctcttggaaaatggggatcttgtggctgaagacaagattgataaagcacttgaaattatttctgagacttgctgggatggagatatggattcagctaaacaccaaagattaaaattctctgagattgtaggtctggaggttgggtcacttggcaacaatagtgatggaacatcaaggaaaaccagcagtaagaagcctacagacttggatgaaaatgcatcatattcctcattagttgaagcatccgggttctaatttttgttgatccaatcaggttgtgtga

SEQ ID NO: 18209 - DNA, 385 bp, Glycine max
tgttgttgtaactcgttcttcttcttttgttgttctgtgtttgtgtttgttttttctctcacgctgaaaatgtcttgctgcggtggtaactgtggttgcggaagctcctgcaagtgcggcaacggctgcggaggctgcaagatgtacccagacttgagctacactgagtcaaccaccaccgagaccttggtcatgggagtggcacctgttaaggctcaatttgagggtgctgaaatgggtgtgcccgctgagaacgatggctgcaaatgtggaccaaactgctcctgcaacccctgcaattgcaagtgaggtggaacaacttaacaaatgcctatagatatgaacataaggactaaactagtatgtgatgttcgccttggttggt

SEQ ID NO: 18210 - DNA, 300 bp, Glycine max
gcgcagattagtaccacaaaaatggagaaatagaataactgaatatcgaatagcttaaaataaggagttgggccaaatgcaatggatatgaaaaaagccaattaattctttacaaagaacaacaagtaaacgcattagataaataaatttgaaaacattgtagatgcgatcttttatcctatatttctatcaattatgcagataagaaagactcatatatttatggatgtagatccctattttaagtaaaaaaaaaaccaagtgatttcttctaattacaacaccgtataaaaaagaatt

SEQ ID NO: 18211 - DNA, 295 bp, Glycine max
  modified_base (8)..(8): a, c, g, t, unknown, or other
gctatcanaaatttggggatagggtgaagcattggatcacattcaatgagccacatacatgggccgcgcaaggatatgatgttggtctacaagcgcctggtccatgctccattctccttcacctgttttgtagagcggggaactctgctactgaaccttacattgttgcacacaatgtcctactctctcatgcaacagtagcagatatttataggaaaaaatataagaaaatacagggaggatcactaggggtagcttttgatgtcatttggtatgagccactaacaaataccaa

SEQ ID NO: 18212 - DNA, 276 bp, Glycine max
taattcctgataagggaaattctctgactgcggcatctgataatcttcgtcgttggtgtaaaaataaaggtcgcgctcaaccaaattgcccaacttccataaccacattttaaacttattacccttttccccccaacaattatggatgccatccaatcttttcaacaccacacactttgcaaaaacttcacaacacaaccttttgttctctcttgtccgcactcatacaacactttgatccccaaaaaaaatctttttcttttataaattcctttc

SEQ ID NO: 18213 - DNA, 385 bp, Glycine max
gagattttgttttgctaaattttggtcctttttatttatagaagcttcatattatgggggcgaggcatttattggcctattcaaaacttcatactatgttgaaggttgcaccagaagcattcgatagttacagttactagttaggactgacaacagtcagttagttggaagttagttcttggaagccttaccccctgtacgccaacacacatgtatatttctgtattttctgacaactgtaacaattcaatactcataataagaatttcagtttcagaaacaggatccctctcaaatctctcatttcttctttgtatctttctttctaatataacataataaaacaaagctgtacgtattaattcttatcaatatagactaacat

SEQ ID NO: 18214 - DNA, 202 bp, Glycine max
attttattactcttaaacttactctgcccattacagacacactccgtaccgcacacctgcggggcatattctaccctacgtgactacgaaacgctagagggctcactatgcctacacaggatgcccaaatgcagtgagcgccgttcatgacaaaaaacttacaatgagagggtaatcttggacatcaccaaatggtctgacc

SEQ ID NO: 18215 - DNA, 324 bp, Glycine max
atcttgacggtcgtcgggttgaggtaaaatttgcaattgaaagatcccatggatttggtggtggcgggtttggtggatcttatggcaatactccctatgatgctggagctggcactgggcatccaggtagttatggcaacactccatatggtgctgcaagtggtgggtatgacaatactggtggtggcaatgctgctggagtttatggcaggggtgaagatggtggaggtggcaattggccgagtggtaattttgggggaagcagctttggtaataactatggcgatgctggtgtctatgctggcaattctgtggagtatacac

SEQ ID NO: 18216 - DNA, 400 bp, Glycine max
  modified_base (319)..(319): a, c, g, t, unknown, or other
gttttgaatagggtagttggtagttatagttgttgtcccagatatggaagaagcggggttaggagattgttgttcctcgaattcgacgattacgaggaagagcgataagcgaaagcagcaacaccaacaacaagagaagccatacagaggaataaggatgaggaagtggggcaagtgggtggcggagattagagaacccaataagcgttcgaggatctggctgggttcttacgccacccccgtcgccgccgcacgcgcctatgacaccgccgtctttcacctccgaggcccttacgctcgccttattccaattgtgcanacacactttgaccacacagcacattcgcgttcatcgaaaagcaccagtcggccgatcaccctcaacgccttacatctgtct

SEQ ID NO: 18217 - DNA, 408 bp, Glycine max
ggaagtttaagcaaacaaaaccctttctgctcctgctttctttgttcaaattttgtgtcaggatggaaactcgggtgaagcacacacttattgtcaaagttatggttcgtactggatccatatgacaagtgacccatgttatagtgaagtttttggatgatcataactcccacatcatgacgaatgtgaaaagacctgtgatagaaggacacattctcaccttacttcactctgaaaggtaagcaagaatattgcgctatatggtctcttatttttgactttcctccaaattcaaactaaaaaatttttctttattataaataataaactaagcgtatgacctattatgttgatcatatattcaatattctgattttatttaacttcaataacatcttgttattatat

SEQ ID NO: 18218 - DNA, 458 bp, Glycine max
  modified_base (31)..(32): a, c, g, t, unknown, or other
  modified_base (41)..(42): a, c, g, t, unknown, or other
  modified_base (71)..(72): a, c, g, t, unknown, or other
  modified_base (140)..(140): a, c, g, t, unknown, or other
  modified_base (173)..(173): a, c, g, t, unknown, or other
gacgccgtcacgcttgtctacccatggttcnngtgatgganntttggcatcaacctataccccatacgagnngcaattggatatgttgttcgactggcaaacaggaaattggggtctcaccataccttcctcttgggtcntgtttagaaattttggagaatcagacgggtcanagcaataccttcacaaggcgttgagaaagacatcaggttcagctatttctgggtccgatgtgctaggcttctttctgtaacacttttttcaattcattgtgctggttgtctctattacatgctagctgatcgttacccccaccaaggaaagacatggatatgagctgtgaccaaacttcgaaacagctcgataatcattggcatactggcctactccatacactgagtatggactcacccgcacacctaaaagacttatattttactgctttaccttcctacagt

SEQ ID NO: 18219 - DNA, 369 bp, Glycine max
aggcagcaaaggtaatcatgatgtggaacagcctgctggctctctaaagtcatattgttcagtacgttttgtcacatccaagtgtagaatttgtggcaatatcatatgccattgtgaaaatcctagcaattcaacacaggtgtcatcagacatatcatccgaaggatctgaaggaagggacctaattgcacgtggtgccgattcattgagacaggattgccggactaaatgtacatcacctatggagaagaaatctgatcttgattctgatggagctgtaagttctttggacagtgaacatgtttctattctacatgactctatatgtgcttttgggagatgacatgctgttgccgtcagctttctaaa

SEQ ID NO: 18220 - DNA, 311 bp, Glycine max
  modified_base (29)..(29): a, c, g, t, unknown, or other
gcgagattatgtaccgtgttactgaaganagtttgatggaccgcctatctactataacccatctggcctgcttattgattccgcaagagggcactgtgttgacaattcatggatccatggatgaaattgtacctgcagaagatgctttagagttcgctaagttcatatctaatcatgaattgtgcttcatagaaggagctgatcatgaatatacttatcatcaagatgagttgaccagcttagttttggaattcatcaagattcatattgacaaagacaaagatacatcgaagcaggcacgaattggaaga

SEQ ID NO: 18221 - DNA, 410 bp, Glycine max
  modified_base (31)..(31): a, c, g, t, unknown, or other
acgaatccactgatgggctggacatccactngggacccctactctcatgttggtgattctgccgtgactggggatagcgaacaagcagcaaaagcatttgcagagaaacatggttgggagtattcggtcaagaagccccacacaccattgctgaaggttaaatcatacgcggacaattttaaatggaagggcccccccaaatctggtgaagagtgatttgttggtttgtattcatgttaatgtattccgtcttccggagtttcaacgtgcagcagtttttctctgcatattttcttggaaaaacaaaagttaagaatactgtgaaaaaagatgatgctggtaaaaaaaaaaaaaagcgcgttaagacaactagacctgctgcagatattaatagactaaatatatgcgcg

SEQ ID NO: 18222 - DNA, 343 bp, Glycine max
cataactactgtaactggcttgagagcaaaatctagtgtaactgagtgttgggcaacagcccgggttagacaattcttacttgcccgggtttacgttgcctccatattatatggttactttttgaagtcagtttcattgaggtaccacctagaacgaaatctctctttggccaatcatgatcttcaccttggtcataggacttccgttatgttttcttatggattcaaagatgccatctttggccacttaagtaatatgccatccttagggcaagggttaataaagccggaagaggaaattgaggacttaaaatgttatgttatgagctttcattccggatca

SEQ ID NO: 18223 - DNA, 329 bp, Glycine max
cccacgcgtccgctaaaccctaaacaactctttctcttcttccttcgctcgttgttctggctcgcgtagatcgacaatggcggagacagaaacgtttgctttccaagctgagatcaaccagctcctcagtctcatcatcaacaccttctactccaacaaggagattttccttcgtgaactcatcagcaacgccttcgatgctttggacaagattcgatttgagagtttgacagataagagcaagctcgatgctcaaccagagttgttcattcatattattccagacaagactaacaatacactgaccattgttgacagtggtattggca

SEQ ID NO: 18224 - DNA, 351 bp, Glycine max
acgctttgtgaacttgtccattcaacttcttactacttaccataaagagctatctcactgcggtcgggcttattagaacaggaaggtggtgttattagccttacacaacacctaccagatcacgtacgcgttgaattgcgctctggataactttttcccgagcccaattttcaagctcgttatgatccactccaggcccaccgtcaccttcgctgtgggcttctccggccctgtgtttgcaggagccgctgaggtcttgcctattgtagattccgatttgagaaagattggcgccagagttctccaaaccgctaaacaactttgcatcaacaaatccgcaaatgatgtgac

SEQ ID NO: 18225 - DNA, 358 bp, Glycine max
aacaaagaaaaaaaaaaacccttagccaacacaaccatcatggccacctctgctattcagcaggcagcattcactggtcaaactgctctgaagcagctcaatgagttcgtccgcaagaccggtggcgccggcaaaggtcgcactaacatgcgccgcaccgtcaagagtgctcctcagagcatttggtatggccctgaccgtcccaagtacttgggtccattctcggagcagattccatcatacctgaccggagaattccctggtgactacggatgggacactgctggattatcagctgacccggaaaccttcgccaggaaccgggagctggaagtgattcacagcaaatgggcaatgc

SEQ ID NO: 18226 - DNA, 386 bp, Glycine max
gtacttgtgagtgtatacccaacaaaaactaagatcaacatggactactacacccgcgtttcagaagttgagagggaacctatcatggagtattccacaccacgaccaatgatgggcaactaccaccaccctaatgctcaccgtgtcctcaacgagaagattgtttatgaagaggatgtgattggaggatcccgccacaaccacatgcatcaccaccaccctgagactcatgagagagtcaaggtggtggagtatgaacaagttcctgagaggcgcgttgtctatgaagagaaagttgcttatgacaacgatcgttactactctccaaggtattgaaattggacaaatggaagaacacctataacgtgttatcatgtggcttttta

SEQ ID NO: 18227 - DNA, 436 bp, Glycine max
  modified_base (302)..(302): a, c, g, t, unknown, or other
  modified_base (371)..(371): a, c, g, t, unknown, or other
cgtccgaaactttcaactcttttctccttcgcatggaagccaaatccaatgacagccgcactttctctatcaattgaatgggaaatggcgaaatgctttgccctccatcaacttctccctgcatgagttcttggcaacattctaaatctttaagagatagcgaagaaggtgcaaatggttctccaagatgaagcagttattatgcaaagtagagtttgatggttagtggttactctgagggtgagttaataaaaaagtttggtaattgctttctctctctccctgtatctcatactctcggngttatacagagacttttttgtgcttttatgagcagatttggatggtggaacttaattcaccctttaatntttccttataaaagtgcaagacaagttttatgtgcatcatcatcttatatatatatgctctacac

SEQ ID NO: 18228 - DNA, 350 bp, Glycine max
cccacgcgtccgaaagactaaagagagttgtggtgtggtggtggttgtcgtttttgaaatgggggcgtcgtcttcagagaagcaagtggtggtcatcggcatacacgacagcgagcagagcacgtacgcgttgaattgggctctggataactttttcccgagcccaattttcaagctcgttctgatccactccaggcccaccgtcaccttcgctgtgggcttcgccggccctgtgtttgcaggagccgctgaggtcttgcctattgtagattccgatttgagaaagattggcgccagagttctcgaaaccgctaaacaactttgcatcaacaaattcgcaaatgatgtga

SEQ ID NO: 18229 - DNA, 382 bp, Glycine max
  modified_base (59)..(59): a, c, g, t, unknown, or other
  modified_base (349)..(349): a, c, g, t, unknown, or other
cttttcttctaaacaaactcttgagattctctaattccgttccttccgtaggcccctanatgcggggatgaagaaccccaggaagaagaagaggccgaagccggcgcaaaagaaggtacttgaggagaacaacaaaggtgttgttgttgctgggaatgaaaacgaagaagaagagaagagaaaacgcagcgttttggaggcactggttgaggctttctccttgtcttcaatcagggaagcttccatggcctatgagattgcagggggagatcccgacagggcttcggagatcctgaggaagggttcttcggacagattcgaggattcggtctcgtgtttttcttatggntcttcttctagcggcggaagcagccgtgggggc

SEQ ID NO: 18230 - DNA, 244 bp, Glycine max
ctcctgcatatattgctccagaagtattgctgaaacaagagtatgatggcaagcttgcggatgtctggtcatgtggagtaaccttatatgtgatgctagtgggagcatatccttttgaggatcctaatgaaccaaaggactttcggaagacaattcaaagagttcttagtgtccagtattccattccggacggtgttcaaatatctccagagtgtcgccaccttatttcaaggatctttgtttt

SEQ ID NO: 18231 - DNA, 303 bp, Glycine max
  modified_base (92)..(92): a, c, g, t, unknown, or other
gggcgtggtgccccagcccaacggccgctggggtgcgcagatttacgagaagcaccagcgcgggtggcttggaacgttcaacgaggaaaacnaggcggcgcgtgcgtacgacatcgccgcgcagcggttccgcggcaaggacgccgtcacgaacttcaagccgctcgccggcgccgacgacgacgacggagaatcggagtttctcaactcgcattccaaacccgagatcgtcgacatgctgcgaaagcacacgtacaatgacgagctggagcagagcaagcgcagccgcggcgtcgtccggcg

SEQ ID NO: 18232 - DNA, 343 bp, Glycine max
caaagttcccattgatcattatatttcttttgattgtcttatatgccataccagtcattgcggccattttggctctgtatatacttgttaccattctgtttgctctcccatcatttctcatcttgtactttgcatatcctagtttggattggcttgtcagggaaattatcacttgagatcaaagctgtatttcttctgctttgcaagcattatgaatgtaactttgcctcaccttgtggccccttcatccagtgtcttctacttcgtaattggtcaacatctccatttgcagctgtatcttttatcttatattatgccagcattagacctctgattgacttgt

SEQ ID NO: 18233 - DNA, 340 bp, Glycine max
tctatatcactctacaccttcctcttcgcaatttgtgcgcactccgacaccccctcggccgggtcatattctgggatccccgacacaaaaacactatattgctccctcctctccgtcagcttcagcgaccgtattctggtccctcctctgcgagaagtgtactatgacgggctaatcttcaacatcacccacaggtatgtcccctagatgccggtgtcctactctactgaagagctctgtcaacacttcctgtggctcgaaaagagcatgaattaatggcttgtgcgctaacaaatatcaacatgaaacttttacaccacccatttacctccatacttta

SEQ ID NO: 18234 - DNA, 406 bp, Glycine max
gcataggttgcgttatatattgtactaattagcacaacaccatgaggatgaagattgttgtgatgctattgctacctttgatgtttgcactgttttcatgcacgagttctgcaaatacaactacatgccccatggacttgaattatgtgctgagaatcccatggaacacttctgcttgccacaacttccaacaaactttggcggctaaaaatggaaccgatgcaaacacttgttgcatatctctcttgtccctcttcggcataggacttgcacagcatctcaaggagacttctaaagtccaactcaaacttgcactgcttctcatcaaattcaataagttttctttttccacaactgtaactgttgacattagtggactccacattggtgaataacatctgtgaca

SEQ ID NO: 18235 - DNA, 315 bp, Glycine max
cccacgcgtccgtccatccatcccttgactaattaattatccctcacaactaccaggggccgaagagaaacaccacaagcaccgcctcttccaccaccacaaggacgaggataataagccagtagaaaccgatactggttacgacaacacatcatattccaagccttctgatgactatgactctggtttcaacaagccatcgtatgagtcttctggcggtggctatgaaggtggttacaacaaaacatcttattctagtgatgagccagcttctggtggtggctatgaaggtggatacaagaaacagtatttggg

SEQ ID NO: 18236 - DNA, 375 bp, Glycine max
  modified_base (271)..(271): a, c, g, t, unknown, or other
attcaattccaattcctcctccgaggtcgatcgcaacttcgacgattcctatgttgccaatgagatattcccaaattccaccctcgcaccctggaacggggattccgattccgacaccaccgccaccaacgcccccgtggtggcgatggccgaggccgaggccgaggctgtggtggaacaagaagaggaacagaaaaaaatggaagaagtggaagagaaagatgatgatgaggaggatgagggggaggaggaggaggaggaagaagaaaangaaaaagagaagagattggtgtggtggaagagtccttttggggtgagattggtgaccttgcttgcttcctgtggcttttgcgtgcgcgtgttttggacttttct

SEQ ID NO: 18237 - DNA, 182 bp, Glycine max
cacactacctaaaacaccactttattattttccaacctacaacttatcaacatttaccgcacgcattttataacacctttaactaatactactatcatttaacataatcaatttaatcatacactatatcatcattaatacaatttttcatataaatttattaaatttatttatattatttt

SEQ ID NO: 18238 - DNA, 395 bp, Glycine max
  modified_base (43)..(43): a, c, g, t, unknown, or other
  modified_base (56)..(56): a, c, g, t, unknown, or other
gccacgcgtacgattttcttggacggaaaggtcatgttaattntcttattgcgtantttcaggttttggcgtctaatttgcaatgtgcaacggaaaagcagtatctctataattttggcgatcgttgtcccaattacagttgcaattctacttttcattgttggcgtctacttcctacgtaagagggcaagcaagaagtataatactttcgtccaggattcaattgcagatgatcttacagatgtcggtgatgtggagtccttgcaattcgacttgcctacagttgaagctgccacaaacctaattctcggagaacaaatggcaagggttgggggtataggtgctctacgcagaatctggaaagtgcatacctctgagggtgaagtagataactg

SEQ ID NO: 18239 - DNA, 374 bp, Glycine max
tctctctctattctcatttcaatccccttcttcaacccctctctctctctccaaaacgccgggccaaaaaatggctcagaaggccgagaaaaacgacaccgactttaaggtccccgaaaccatcatcaccccctgcaccaccaccaccgccacctcgattaccgaaccttctagattcttcgacgcaaccacccccgccacgtcatcgcgctcccccaagcgatccctccccctcgacgacgaatctcagacggaccaaacggcgtcgtcggagcccaaacgcgtcgtgagccgctgctactgctgtcggggcggggctatgattcggcgtgggacttttggcacacgtctcacgcacatgtctacatcagcga

SEQ ID NO: 18240 - DNA, 452 bp, Glycine max
  modified_base (117)..(117): a, c, g, t, unknown, or other
aaagcaggttttggcaacaaaaaccccccttttaaccttggcaattggatctttccacctgggggaaagccttgtgaaacataaggtttttccagaaaggtggaatttgactagaanggatgtttggctgttgagtttatggagggtcaagctctttgttgaatagtgtttgtgttgcctttatctgcaacttttaattgaaccaatcctaccctttttatgaacatatgaaaagatcggttttttgtggttcctccactcattgttgttgaagggtctcgcgaaatcaatcaagttttgagacctgttttctggtagaggtgtaagtacaagatcttaataataaggattttgtacaaaggaaaagttgagaataagatgggggaagatggttattcttggattatgaggacaaaattttcacacactgtctgccatcgtttggatcctgc

SEQ ID NO: 18241 - DNA, 343 bp, Glycine max
cggacgcgtgggtcctactgctgcatggcttgcaaagctcacaacacaagactttgcccactgtgaacttccttcttcccatcttttcacagatgacccttctaccattcaggttgcttgcagtgttcttctcactggtgccatcactgtcttcttctttcgctctgtccagcgccgtgcaaagcgtgccaaagaattgaaatttatgtcttcaggagtgaataagtcattggataacttgaaagctataagttcaagttccatcaaagccaagagtccaccttcacctgatcaagcattgttaggggcaattatagctggtgtgattgctgttgttctctac

SEQ ID NO: 18242 - DNA, 165 bp, Glycine max
ctcacctcttcttcctcctatacttcatcatcaaacctttctcttactttctatatgggggcgctctcttcctacggcacttggacacctgtataagcgcaccaaaaccttcaccgaagaagccaataaaaaatcccaatccctgaccccttcctacttccggat

SEQ ID NO: 18243 - DNA, 434 bp, Glycine max
  modified_base (67)..(67): a, c, g, t, unknown, or other
gtttcgttttttcggcccctgtacctgctagggtttcgttgttggctagtttcttgggggagtgtanttgatagtggtgagtttctgtggtttttggagtggttgcagatttggtactttagggtattgttgaaggagagagtgtaaatgaataaaccaacaagcgacgcaattaatatggggaaaaggagcctggagggtggagaagatgatcagcccgaacgaaagaggcctgctcttgccagtgtaattgtggaagctctcaaggtggacagtttgcagaagctttgctcatctttagaacccattcttcgtagagttgtcagtgaaaaagtggagcgtgctttggcaaagttaggtcctgcaagacttagtggaaggtctcctcctaaaatgattgaaggccctgatggtagaagcttacagctgaaatt

SEQ ID NO: 18244 - DNA, 265 bp, Glycine max
cccaagccctatacaaccaaaccctaacacacacccatttgattcagtttccatggctagccgcaagggtgcatttttggctgcagtgctctgcatggttgtggtgagtgcacccatggcacatgcagctatcacgtgcgggcaggtgacgaatagcctgatcaattgcatcggttacctccagaacggaggaacgccgccgtcgggatgctgcaacggagtgaagagcctcaatgccgccggcaagaccaccgtcgaccgccag

SEQ ID NO: 18245 - DNA, 299 bp, Glycine max
  modified_base (101)..(101): a, c, g, t, unknown, or other
cccactcgttcttacataattccatattttatttacaaatatgcctataaaaacatcccgccgtctttattactaggagtgttaactacactaacttcttntctttaaattcttaatcatatttcaaatgctactacttatacaccatctaagttccctccaaaaccttttaaattatactcatatttaaattcttctttctaaaaacctttattttaactactattttaattatgaccttccatactttttttttaaattttcaaatacttatcccaaataaaacatatacttttatc

SEQ ID NO: 18246 - DNA, 270 bp, Glycine max
gacccacctacgatattttatctccactcactcatttttttaacatttgctctctatcctactccgcccggttattattaacgcatggctctaaactcttgtccttaatgatgcacatcttctataatcatatgagtattaaaatgctattaaaactttaacacctaaattaccccaaaatctcctgaggaaaattatatcttcaacatcttcttcaaatttgaacaaacaaaaaaacttgattctacacaaccaacaaattattactta

SEQ ID NO: 18247 - DNA, 463 bp, Glycine max
agtgaagctgttgagcttttttgcgagtccatttggcaaaagggttgaatgggcattgaaactgaagggtgtggagtatgagtacatagaacaagatatcttcaacaagactagtctccttctccagttgaacccggttcacaagaaggttccggttcttgttcatgcccacaaacccatcgctgagtcattcgtcatcgttgaatacgttgatgaaacatggaagcagtatccactgttgcctcgagacccttatcaaagagcacttgctcgattttgggctaatttcgctgagcaaaagcttttagatgcagcatggattggtatgtatagcagcggggatgagcagcaaaacgctgtgaaagtagccagagaagcaattgagaagatagaagaagagattaaggggaagaaatattttggaggggagaatataggataccttgacattgcacttggatgg

SEQ ID NO: 18248 - DNA, 150 bp, Glycine max
agataagactgcagcagcagaggggtctaagcccagagcttttgaaatataaaggtcctgtgcgctgtgctcgcatgattattagggaagaaggcttctgtggtctttgggctggagttgctcctactgtgatgcgtaatgggacaaatc

SEQ ID NO: 18249 - DNA, 456 bp, Glycine max
  modified_base (406)..(406): a, c, g, t, unknown, or other
catggagatacctatcaccttataactaagaactgcaatcattttacagatgatctctcttagagagtgactgggaaacaaatcccaagttgggtgaatcggcttgctaagctaggtgctttgtgcagctgtctacttcctgaaagtcttcaagtaacaagtgttatacagctacctgaataccatgaatgctcggaagatgaatttgttgaatctctttcacctgccacaccccgtgagtcaacagaaatagatgaggagcaagaaaaacaccttcttttgccatcagatagaactgaggatgttcatttcggtaaagagactcaagtgaaataagcggtgtctttgaggtgagaaataacacaggctgtcttcgcattgaatatttatccattagatttgcagngattcttttttctcaaagggttctcattcttgcatggctttctacattct

SEQ ID NO: 18250 - DNA, 154 bp, Glycine max
cgccgagcaacagtgaatttggccaccataagagcgcgcgcgcaaaggattagagtttcgaagatagcgattttggagcttccatttcgatttcgacttcgacttgcgcacaatcagttactttcgcttctcttgctgtagttcttaataatgc

SEQ ID NO: 18251 - DNA, 291 bp, Glycine max
atgggaggagttgctgagggttaggaaggagcaagaggacgtgttggttccgcttatcggacgcgggaatcaaaggcgaggcacttaatgtggctgattaagagacgatgatggcttcgttgtttcctatgttgacacgttgttggatttggaattgcctgaggagaaacggaagctgaatgaaaaggaactcgtgacgttgtgtagcgagtttttgaatgcgggtaccgacaccactttcacggcgttgcagtggataatggctaatttggtgaagtacccgcaccttca

SEQ ID NO: 18252 - DNA, 172 bp, Glycine max
aacattatatcttctacaaacagcttcttctcaattaacccctttacaaaacttccctttttgttattcccacaaacccattcttattcattctcattcttaatacttattaaacattaaatcctttccacttttcctccaaacccttattaaaaacaccttctcatttttt

SEQ ID NO: 18253 - DNA, 429 bp, Glycine max
  modified_base (323)..(323): a, c, g, t, unknown, or other
cattgtctcaaaaaccttctctttcaacaaaacctacaacaacaacaaataaagagaaattttgtagaacaatggaggcatcaaagatgaagtttttcttggttttggtgattgccatgttggcgatggtagcaactggggtttcagctgctgaggcacctgccccaggtccttcatccgatgccaccaccttctttgtacccactgctcttgcttctctctttggtcttgcatttggccttctcttctaattaattcttcaacaacctttggttatttgttacattacatatatggaattcactttgttcagaagtggttgnggtttgtgtttccgtcttctctttttttccaactcagcttgagtagtggttggtcactactctcttgtgagtagaaaggtttatttttttgaggatgcattgaatt

SEQ ID NO: 18254 - DNA, 362 bp, Glycine max
  modified_base (18)..(19): a, c, g, t, unknown, or other
  modified_base (63)..(64): a, c, g, t, unknown, or other
  modified_base (125)..(127): a, c, g, t, unknown, or other
  modified_base (187)..(187): a, c, g, t, unknown, or other
  modified_base (227)..(227): a, c, g, t, unknown, or other
  modified_base (246)..(247): a, c, g, t, unknown, or other
cgtaccgcctcacgccgnntccgcccacgcccgtccgaaactcctatcttctacccttccctnnttgttctcaaaaccggtatgggccttatctctccacaaaacgcgaagaccatcgtctactnnntccgcagcttctcttcgcacctctccaaccctcaaactctccgaaccctcgacaacctcntgctgttctccccaatgcccttctcctcgtcccctctccnctcaacccctaaactccannaacccatttccaatttccgccccgttttcctcaaatacaaccccgctgtcgtcgtccgtcgcccgttagtcgcttgtcgatctcgctttcgttcccccatgtcctctgtgtttgg

SEQ ID NO: 18255 - DNA, 283 bp, Glycine max
cccacgcgtccggtaaaaaggaaaggttaaggatgcaaggcacggaaggagagtggctgtatgccttatcatcaccagacatttataaaacctctttcccttccctcaaatcgctcatactcttccaatcttttaattttactttttttttacctttctccctccctcaataattccaaacaaaaaacaagaacaacaaagttttcgcgattgcatccaaacggatcttgaaagaactcaaggatcttcagaaggatcctcctacctcttgcatcgcccctcc

SEQ ID NO: 18256 - DNA, 86 bp, Glycine max
ccccccacccacactaccccacacttccaccaaaatcaacattttttataaaaaaaaaattataaacacccgcctttttttaaaaa

SEQ ID NO: 18257 - DNA, 430 bp, Glycine max
  modified_base (9)..(9): a, c, g, t, unknown, or other
  modified_base (12)..(12): a, c, g, t, unknown, or other
  modified_base (21)..(21): a, c, g, t, unknown, or other
ccacgcgtncgnccacgcgtncgaaaaaataaaattaagaaattttcatggtaaccattcgtgcagatgaaattagtaaaattatccgtgaacgcattgagcaatataatacggaagtaaaaattgtaaatacgggtaccgtacttcaagtaggcgacggtattgctcgtatttatggtcttgatgaagtaatggcgggtgaattagtggaatttgaagagggtactataggcattgctttgaatttggaatccaaaaatgttggtgttgtattaatgggtgatggtttgatgatacaagagggaagttcagtaaaagcaacaggaagaattgctcagatacctgtaagtgaggcttatttgggtcgtgttataaatgccctggctaaaccaattgatggtcgaggagaaatttcagcttcggaatctcg

SEQ ID NO: 18258 - DNA, 212 bp, Glycine max
  modified_base (22)..(22): a, c, g, t, unknown, or other
cggacgcgtccgcccacgcgtncgagctgatggatatgtagcatttgctgatgatgcagatgtgctgaaaggttcttgtggcaagtcacttgcttctttccctcaagggtgtttctactctacagcagttggaggattgagatgctatgagaatccaaagaataagattactgcaatacctgctgaggaagaggaaatctggggtgcattct

SEQ ID NO: 18259 - DNA, 445 bp, Glycine max
ctctactttatcaccatggatatggatatgcaccctatggcccctattcgccagcagggtctgcagtgccaaccatggggaatgatggtcagttgtatgggcctcaacactatcagtaccctccatattttcaaccgctaacaccaaccagtgcaccattcacacctactcctgctgtccttcctcagggtgaggtttccacctctgttgctgctgatcaaaagcctcttcctgttgaagcagccaatggaaattctaatggtgtctcaaatggtggcaatgcaaaaggtcgtggtccaacctcaggttatcaagatccaagatttggttatgatggagttcgctcacctatcccctggctagatgccccactattttcagatgggcaaccaaagcctgtaagtagcacaaccatcacttcttcgatatcaggtggcaacaacac

SEQ ID NO: 18260 - DNA, 250 bp, Glycine max
  modified_base (121)..(121): a, c, g, t, unknown, or other
attcaaggaaacatacgaggacattcaagaactcattgactccctctaatacttcagagcataagagggaactaattatgttgccacatctaatgccatatttcatgatatctctcatgancctttttctttcctttttaccttcctttttacccctcatcatttcccttctgagccacactttcaatccaatgtcccattcattcaatctttcatatactttactaaaactctaactttaaatttgcgg

SEQ ID NO: 18261 - DNA, 420 bp, Glycine max
cccacgcgtccgattttctgtaaaaaaaaaaaaaaaatcatgttcggatattcgggtatcggggtgggaggaaggaaagacactcccgccacggaaatttctgtggctctgtgctttgagactgaatctcatctacagtgacaacatcgatcttcttccacagtttccactttccaccaccaaatctacgttagggttcgtcttcatttcaaattcaacaacttcgccaaccacgccatggcaactcttcaatcactgcgaccttctttccgtccatcaatcccatccccaaattctcacactttcccagccactccctttaattattcccccaaatcgattggctcaaagggtggcagtgttaccgtaagacactctatcgtttctcccagggtttcggtttccaattcggagtatagt

SEQ ID NO: 18262 - DNA, 211 bp, Glycine max
cccctcccatcatgatatacactcctaaacaacatccaactttcttgagcgatcccaagacagctcactccgcttaaatatataaaaagcgcgggcccattctctttccctactttcttttacttttcatgtccccttaagaaaaacccaattccatttcaatcccttttttctttttttgttcttgctgctgattttatcaactaatttt

SEQ ID NO: 18263 - DNA, 235 bp, Glycine max
cccactcatacgtatcttaccactttctattctaaattcactctcagaaattataatcgcgcggctatctaacactgaatcagctcactattttacagataaagatgccacccgaaatgatgttaatctctccgattacaaaagaaaagtccttcttcttgtcaatgttaccttacaatgcagcttgactaattcaaactacacatagcttaatcaattgtattgaaaatacaaa

SEQ ID NO: 18264 - DNA, 423 bp, Glycine max
  modified_base (149)..(149): a, c, g, t, unknown, or other
atcatgatttagacgcctaaacaacaacaaactggccagggccgtccccaaaaaggctaactggtctgaaaaatttcaaaatcctgttagattctctttcctactttcttttacttttcatgtcgtctgaggaaaagccaagttccatntcattcctttttttctttttttgttggtgttgctgatttatcagctaatttgaaacctccactgtgcagtgatgtttctaataatgacctctgtggaacaataccagtagatggcaactttgaatccttcccgatggaaaggtatatatagtaactattgcaattcttgcctcattagtcttgctgataataacatactcttaataagtccaatgacctttggatcaaacacgtgctggtgaatatgccagtttaaccatttagaacttacaac

SEQ ID NO: 18265 - DNA, 450 bp, Glycine max
acgaccacgcgtccgattaactgtttccattcacctgaaaaagaacaccgtaaccctcttcaccggtgtggctttttatacacgcctgatctctctttcttcttcaatccatcgtttctcttcaatcgatcccactcaagcttttgcaagagtctccagcgtgtcgttctcaaagctggaacagctgtggttactcctactgatagcatactatcattgggaaaacttagaactctctcctatcaccttaaatagctaaataacacctattatgatgttatattagagacttcaggagcatatcctcttggccggcaaagactaagatatcgaacattggtcaataccaccttttcagatcttcaaaatccacaaagagatctttatcggaaagcatttgcagctctaccacaaagtactctcatcgctctctatgatatcatgtttagt

SEQ ID NO: 18266 - DNA, 397 bp, Glycine max
caaaaccagagtggttctagtaatccggtgcttctataggatgggaactagttaatggcatggcgggcgaatatctagcttcggcgctgaatcccccttatcaagagaggcaggaaatgtgcctgaaactgggtcactctctattgttgtgcttggcgcttctggggatcttgctaagaaaaagacatttcctgcacttttccatctataccggcagggattcttaccagcagatgaagttcacatttttggctattcaaggacaaaaatatctgatgatgaattgaaaaaccggttgcgtggctatcttgttccaaacaaaggtgcttcttcccaactgttggaagatgtaaagaagttttacagctgatcaaatatgtaatggctcttattattc

SEQ ID NO: 18267 - DNA, 451 bp, Glycine max
  modified_base (44)..(44): a, c, g, t, unknown, or other
tcctattttttgtaaaaaaaaaaatttaatcatttcggatttcntttatccccgggatttttaaaaacagtccccccactcaaatttctgtcgctctttcctttgaaactgaatctcatctacagtgacaacatccatcttcttccacagtttccactttccaccaccaaatctacgttagggttcgtcttcatttcaaattcaacaacttctccaaccaccccatgccaactcttcaatcactgccaccttctttccgtccatcaatcccatccccaaattctcacactttcccaaccactccctttaattattcccccaaatctattgcctcaaaaggtgtcatttgttaccttaaaacactctatcctttctcccaacgtttccctttccaattcccagtttctacccaaattcctaaaaatctctttacgtttctattttcacttcc

SEQ ID NO: 18268 - DNA, 444 bp, Glycine max
ataagcttgtccaggttagtctttctcagaatcctatagtgaaggtgaagttagaggatatgatggctgctactagtaatttcagcggggagaatgttcttttcgcgacgaggaccgggactacgtataaggctgatcttccggatgggtccacgctcgcggtgaagcggttgagtgcgtgtaggatcggggagaagcagtttgggatggagatgaatcggttggggcaagttaagcaccctaatctggcgccgctgttggggtactgcattgtggaagaagagaagttgttggtttacaagcacatgtcgaacgggacattgtattcattgttgcataagaatggtggcggtgcattggattggttgatgaggtttaggattgcattgggtgtggccagggggctcgcgtggctgcaccatggctgccaccctccgattatac

SEQ ID NO: 18269 - DNA, 131 bp, Glycine max
tctttcaaaatgcaaacatccttaactttctctacccccaacattataccatccccgcccacattttataacacccatattaccatcttttctaccaaattaaaaaccccccactcctcacctcattactc

SEQ ID NO: 18270 - DNA, 345 bp, Glycine max
cccacgcgtccgatctcgaatacccactaactcacgaaagccgggatctttcacaaaggggaggcctattctaagggtgcgtaaccgcatggataagctcacactaacccgtcaatttgggatccaattcggttccttaggacgtatcgggaaggaattttggaatgtaataatatcgattcatacacatacagaagaaagggttctctattgattcaaacgctctacctacgaaatatggatagagaaagatgtaaaaaccgaggatttcacatattactttttctcgaaaaatcgatcttatttttttcgcacttttcgctcaatgattaaaatggttcatat

SEQ ID NO: 18271 - DNA, 458 bp, Glycine max
ttggatcttatcctgttgaaccacccccaacttttttaaccatggccctcctcaatcactggggggatgacaccgtcgccggtcctcgcccggagaacggccttggcaagctccgaaagcaccacaccttcgctttccgatctgcctccggcaaggaatcagacagcggaagcgtgaaatcgtacggtgaagatttgccggaagatgcggtgagagtgacgcgaagtatcatgatcgtgaaaccacctggtggtaaccagagtccgagcggatccgctccggcttcccccgccggttctactcctccggtgtctcctttttcgggagctagagagtccttccgttttcggagaaggtcgacatcagatgcgtacgagaagacaggccagaacaaaccaagctcttcttctcctttcgatgtgtgacaaatgagcccgaccactatctcctccatatat

SEQ ID NO: 18272 - DNA, 436 bp, Glycine max
  modified_base (394)..(394): a, c, g, t, unknown, or other
aagagttctttcaaaatgcaaacagccttaaccttcgttgcccccaacgttgtgccattggcgcccacaaagagtgtctcccatattaccatctttcctaccaaattgaaagccccgcgctcctcacctcgttactctccgattagggttgcaaccgtggagcccgacacttcaactgtcgactacaactctgcgttctcagtgtttcctgcagaagcatgcgaaactgtaggaggggaagcctgcatggcggagatgtaccctgaaacgaagctacagccagaggctaagactccacgagtcgttacagagaacgttgagagagagtatcttgaatacgatgatcctaaaacggtatttcgaggagaggcttgtgatgatcttggaggaactntctgtgagaccgagtatcagaaggtgtctactagagaaatgt

SEQ ID NO: 18273 - DNA, 357 bp, Glycine max
  modified_base (13)..(13): a, c, g, t, unknown, or other
gagaagcgtacanactcgcgaacgttaacggctgtggccactcacacctttgcaacatccctgattgtgttacgattcacgacgggtgctgaacctcctgcttatcacctatctcgctatttcacttgcgaacatcataccctacacatcagaccgcgctaaggctaacatcgttgaaccacaaccctctgcatgcacagccgacagatcccccgactgcgccactacgtgcaagcttataccctttcggacaggacacagctttgacctccacccattcgaacccagatatacactaatgatcagaagaatcaacattccccacaatagaatgtgcaaggctcattccgatggtga

SEQ ID NO: 18274 - DNA, 328 bp, Glycine max
cacagacattgaaaaatggctctaacacttcgctcttcaatttcccttgtcaaccagaaagagaccgggctcctaaaagccaaagacgaggttcccaccaaagtgttttactttggaaaaaccaacccatctttccgtctcagagcaaagagttccatgcaacaaacacacgtcacacgaaacaacagctttaactccgaagtaacgatgataaacgagaaaagggagaaggttcacgctccatcggttgcacataaccacaatgattcaatgagagtgccagtgtttgtgatgctgccattggacactgtaactatgggagggactt

SEQ ID NO: 18275 - DNA, 300 bp, Glycine max
atgttcttttcacgacgaggaccgggactacgtataaggctgatctttcggatgggtccacgctcgcggtgaatcggttgattgcgtgtatgatcggggagaaacagtttgggatggaaatgaatcggttggggcaggttaggcaccctaatctggcgccgcttttggggtactgcattgtggatgaagaaaaattgtttgtttacaagcacatgttgaacgggacattgtattcattgttgcataagaattgtggctgcgcattggaatggtttattaggtttacgattgcattgggtg

SEQ ID NO: 18276 - DNA, 266 bp, Glycine max
cccacgcgtccgcttaagcttccgacgaatttggtctttctaccatttgatattgaagcgctgcttccaacagttagcagtgggataatcttctatgtggtcaataacttgagtattctttaaccgactctgacttgaacctgtacatggatcatggctagtgtctctctacatcaatactgtgaagaattttttaaccgtagtgcatttctctgatgatacagcccttattacagggagtacttattgatttgcatccctgacag

SEQ ID NO: 18277 - DNA, 315 bp, Glycine max
cttaattgccttaaggaacgttcgagaccacagaggtttctatagtcttcttctgaggagagcttgtcttctcttgctcattcatctcacttccaattaacgaacacgctttccaccaatttgaatcaccaacggctcggtctttctgcaacctcaaggttcgctctgctcttgaagccgacggattcttcaacactgtcaacaggcttgggtacacaatagcgacacaaagaccaacaagaggaagagcaagcttcatcaacggcaagtcatgggaagacaaggtacttcgaagaagtgctgaaaacgtttcaa

SEQ ID NO: 18278 - DNA, 269 bp, Glycine max
agcgcacagctgtcgtggggcgactcgctgtctggatcgggacatagacagatagggtctccgtgcggtcgctgtcattggtttggcgttcaattgatgaagaacaatgtcggtgacagcgcgtgttagtgatactgtaatagccattacggataagctcagaggttaaattggccaaactaaagttaaacgttattggcctcggaaaggtcctgaatgggctgatgatgagaacgaagaacatgctgcccctgccgatattagaccct

SEQ ID NO: 18279 - DNA, 137 bp, Glycine max
ctagagtcatcttgctgtttgtattctggctcagatggatacatagtgtctgatgacggacgaggtaaagggcctcctaatgcttaagaccatggcactgattgactctggcatactcactctggctgatgacttga

SEQ ID NO: 18280 - DNA, 287 bp, Glycine max
  modified_base (56)..(56): a, c, g, t, unknown, or other
gccacgcgtgcaggttctaagggctgctatacatactacggtacatactcaggaanatactcgggttgatgttattgtgggggggccatttttaagcccccttccaattcgccctccaatttaccctaatttaatacaaatttttatacaaaaatttgggcaacaagagggacttcctgagtaaatacatccttgaatacaacaaggttcccaagattgttcccaatgagcatcccattgcacagcccatagcgaatgctgtatacattgatgaaaacattgataac

SEQ ID NO: 18281 - DNA, 264 bp, Glycine max
acggaaattttaaaaatgactgggataaacttaagaattcaattattgaaattgaataagcgaacgatttaattggattggtcgaatggtatcaaaaaaatggagtactaactcccatttcttatttattattgaattaaccgatcaacttgctttgttatcgaacatttctttttgatttcaaaaattttccggaaaaaatttgaatctatttttatatgcgaatcaatcctactacttctggtcctgaggtttctgcgcttg

SEQ ID NO: 18282 - DNA, 252 bp, Glycine max
cccacgcgtccgcccttctccaacaagtcttttaaaaactcttccatgacttgcaaccggatggcatcgtcaccgacatgttccacccttggagtgtcgatgctgctgctaaactcggcattccgaggatcatgttccacggcgcaagttatctcgctcgctccgctgcgcactccgttgaacagtacgcaccccacttggaagcaaaattcgacaccgacaagttcgtgttacctgggttacccgataact

SEQ ID NO: 18283 - DNA, 397 bp, Glycine max
gctactcttgcaggttcttattactgctatacatactacggtacatacattggaagatactcaggttgatgttattgttggaagcctatttgtaagcacatttcagatcacccttcagataaacctaaatgtaaacaaattttattaaaaaaatttggacaaaaaaatggattccttagtaaattgcaccctcaatacaaaaaagtttccaaaaatggttccaaagatcatcccaatgaacaatcccttgcgaagagtatattcattggtgaaaacatcgataacaaaccgaaaaaacattctgattcttaccataaagccttcgcaagaacctcgactagattcatggataaatttattgatggtgctatattcgaaactgtattcacgattgatt

SEQ ID NO: 18284 - DNA, 414 bp, Glycine max
accaaaacgaaaaaacaagcgtcatcaccttcttcactccctgtttctgttggttccatccctgcattcacaccttgatccgtgatctcctaatttctcacttgaaagtatgaagcaagaatagataagtaatggcaggagcagaagcaagggctctgtggcagagaactgctaatcgttgctttgtccaagaagatgcaaaaagagctcccaagttggcttgttgccaatcttcatgtgcaacatcaaaatcagttgatgctggacctgccagtacagcagatgaatctgatcatactacagttaatgttacccattttaacaggaaatcgtcaatttctaatctatcaccagactctaggtggtggttgcatttgcaacctaattatgggtatcaaaagggtttaacatatg

SEQ ID NO: 18285 - DNA, 202 bp, Glycine max
  modified_base (8)..(8): a, c, g, t, unknown, or other
ccgttgantattacaatgacaatggtgccagggttccggttcgtgtccacaccgtgctgatcgccacccaacacgacgagactgtcaccaatgaccaaattgctgctgacctcaaagagcatgtgatcaagcctgtgatcccagagaagtaccttgatgagaagaccattttccacttgaacccttcaggccgttttgtcat

SEQ ID NO: 18286 - DNA, 264 bp, Glycine max
atgatcttctgagcttgaacagttgttgtggtccggggtcacatggagaaaagcacagaagcccaagatttccctatcgcaaaggctgccatttcattcttgcaggataatgtcccatcatcctttacttttcctggatggaacaaaggtcgcattgtttgtcagcagtcacagctgagacgaattctctcgggcactgaatcatcttctagtaggaaaaaaatggataaattagtatctttaagtaataccccattgactact

SEQ ID NO: 18287 - DNA, 285 bp, Glycine max
  modified_base (1)..(1): a, c, g, t, unknown, or other
  modified_base (3)..(3): a, c, g, t, unknown, or other
  modified_base (7)..(7): a, c, g, t, unknown, or other
ncncgcntgcaggttcttatggctgctatacatgctacggtacatactctggcagatactcaggttgatggtattgtggggagcctatttggaagcccatttcagatcgcccttcagattgaccgtaaggtgtacaaatttttatacaaaaatttgggcgacaagagggacttgctgattgaattccttcttgaatacaacaatgttcccaagattgttcccaatgttcatcacattgcacagtctatagcgaatgctgtatacattgatgaaaacattgataac

SEQ ID NO: 18288 - DNA, 380 bp, Glycine max
aggttccatccctgcattcacaccttgatccgtgatctcctaatttctcacttgaaagtatgaagcaagaatagataagtaatggcaggagcagaagcaagggctctgtggcagagaactgctaatcgttgctttgtccaagaagatgcaaaaagagctcccaagttggcttgttgccaatcttcatgtgcaacatcaaaatcagttgatgctggacctgccagtacagcagatgaatctgatcatactacagttaatgttacccattttaacaggaaatcgtcaatttctaatctatcaccagactctaggtggtggttgcatttgcaacctaattatgggtatcaaaagggtttaacatatgaacagttaaatgcatt

SEQ ID NO: 18289 - DNA, 390 bp, Glycine max
cggacggaacccagtgctattttcacttcatttcattagttgtgataatatcaaactaagcgcgaacgctgtatacctgcgcggagtatctcgcactaacaaccctcactctacgaactcgacaacctctctgttctcccgctatgcatgacgggtggcgagctatagccctaagatccaacacatttgcatgtccgacggtattctcacaacaacgctgtcgtcgacgtcgccgatgtcgctgacatctcgcttcgttccccatgtctctgtgttggagcaggaggaggacaccttctgcgacggagaccgacccagcttctcccgcgaccttaaactctttgacgggaatctccccttcaatgtcgacagtgcgcggctcgcggagct

SEQ ID NO: 18290 - DNA, 73 bp, Glycine max
cccggtcggcccagcgtccgttcaaactccgtctttccgaatcctctctttgtgataggttctggtctgctcc

SEQ ID NO: 18291 - DNA, 161 bp, Glycine max
cggacgcttgggttgcagtcgcaaaggaaaaccctagctagtagtctcagttcgtttgagacgaaaaaattggcagagggtctcgttctccacggaaccatgcgcgcccacaccgacgttgtgacggcgattgccactcccatcgacaacttcgacatgat

SEQ ID NO: 18292 - DNA, 128 bp, Glycine max
gaaaatcaaaccttctcatcgaaaaagtcacgtaacaaatttttgcattctagtaaccggacgacatatttatagacgtggtgcaatctctaaaaaacataactattactaccattggcaatatatga

SEQ ID NO: 18293 - DNA, 224 bp, Glycine max
cccacgcgtccaggcttctatttatgtctcgttccgaatcacccctcaccagtccatgctggggttgagggccaaccacatcgtgggctgacgcacgctcgatgactacaacatgccatccgactctacacagaacttatggctgcgtcatatctataccctgcagtttctcgtgcttacatttacaaatgatacttcaacggctcagacgtgcaacggtcaca

SEQ ID NO: 18294 - DNA, 463 bp, Glycine max
ataacactcgatccagcacataacaatggaaacgcagctttacgtgttttctctctagattctgctcttaaacgccgtcgttttcaaactctttttttccccttcgcttctctgtctttgtaaccgaaaggggggaaaatataattaacaccgatttcgcgaccaattcttcttctgcgttgaattgggacaacgagaaattggatctcagtttttggcaggaaataaaaattgcatttgagtgtaaaataacagagtatagtgtagggccttgttcttgatactgtgctaaatttgttggatggcggagaaatcatgcatcaagcgccttcagaaagaatatagagccctttgtaaagagccagtttctcatgttgtggctcgtccttctccaagtgatattcttgagtggcattatgtgttggagggaagtgaaggaacaccttttgcaggtggatattac

SEQ ID NO: 18295 - DNA, 211 bp, Glycine max
gacaaatcacacgttgtaaccggtgtcatgggaacttatggttactgcgccccaaaatatgcgatgactggacagctgactgtgaagtctgatgtatatagttttggggtagtcttcttggagctgattactggccgtaaagccattgacagcactcgaccccatggagaacaaaaccttgtcacatgggcacgtccactgttcagtgacc

SEQ ID NO: 18296 - DNA, 324 bp, Glycine max
  modified_base (19)..(19): a, c, g, t, unknown, or other
  modified_base (106)..(106): a, c, g, t, unknown, or other
gcggacaaagtacgacttncaacccatatcataatcttttaaaaactcttccatgacttgcaaccggccgccatctttaccgacatgtgccacccttggagtgtcnatgctgctgctaaactcggcattccgaggatcatgttccacggcgcaagttatctcgctcgctccgctgcgcactccgttgaacagtacgcaccccacttggaagcaaaattcgacaccgacaagttcgtgttacctgggttacccgataacttggagatgacgcgcttgcaattgccggattggcttaagtctccgaatcagtacactgaactgatg

SEQ ID NO: 18297 - DNA, 167 bp, Glycine max
  modified_base (17)..(17): a, c, g, t, unknown, or other
aacacacatcccattantgattccttcttataatcttttacactccacctctctcaataaactgtgcggctctttctcaaacccatttgcataatctatatcaaaacacacaatatctctcatactgatcaaaaaaaaaaaatacttcattctcctgattcaccata

SEQ ID NO: 18298 - DNA, 371 bp, Glycine max
gtaatcctaaccaacactcacacatggtttgtttttttttggatccatatccatagcaaggagggcgattatttgccaaatcgcgagttcccttttctttaaatcaaacaatcaatttagcttaagcaacatcgcaaatggaagcaatgacaagggtttcagcacaaccaacaacaacaacttctctattatacccaaccctccttttacttctgcttcttcttcttcttttgaccctaataatccccgccccactgcaaatcacactttccaattattctttcaaactttaaagttcttttacaactaccaatattgttcacaagattttaaccattctaccatcaaaaacttctaaaaatttttaaatt

SEQ ID NO: 18299 - DNA, 406 bp, Glycine max
cgtccccttggccggccccttggggaaaagtttccattgtcagggctgaaggaattgctcaagaaagggttaggtttaggcgacatggcgttcaacgccggcgagggagccatcacctggttccccggcacatggccgccgccacacgcgccatccgccaccgtcttagacttgccgacctagccatcgatgttcgtgacactcgcattcccttctcctgcgccaacgccgatctccagccgcacctcttcgacaaacgacgcgttgaaacactccataaattagacattgactaccctaacctgatgcataaatggacgcattattttgagagtggtaatccgaattgcgttgcgataaacgcgcacagcatgagttccgcgaaaaacttttggaagtggcggag

SEQ ID NO: 18300 - DNA, 358 bp, Glycine max
cggacgcgtgggtttttttttacataaattccaaaatattaatcaaataataataataataatgaaagtgccgctaatctgtgacttaatttacaagaccagagaaaatatacagaacaaacatcaacaataaggtaacatctggcatcatgttatttacagccatataggatatggccagattaatagatcttatggcatggttgatccattgtagactccaattgcttcatgaatgcacctaatcaaatgctttcaaagaccatcataggcaccaccaacgcttatgtgagctctgctcataggaacacctattgctacataaattgcatcattcaatttgcacgaatgctgcacc

SEQ ID NO: 18301 - DNA, 359 bp, Glycine max
tgaaggcgaaaaagcagaagaggcacaggacgattttgacgttttacactgcttgcttcggttttcggaagccttacaaggttctatgtgatggcacatttgttcatcaccttcttgtgaatcgaataacccctgctgacacggccattggcaatgtcctcagtgctacgatcaagctctacacaacaagatgtgttctagctgagttgaaacgacttgatagctcgtattctgaggctctagaggcatctcatatacttatagttgcaagatgtgatcatgataaacgttatatcgcatatgcttgcatcatggaagatgttggagaaaaaaattcttagcatttctttgttgctaat

SEQ ID NO: 18302 - DNA, 357 bp, Glycine max
cccacgcgtccgggacaagcgaagaatgcttcatgttgtatatcgtgttggggacttggacaggaccataaagttttatacagagtgcctaggaatgaagctcctcagaaagagggacataccagaggagaaatatactaatgcctttcttggatatgggcccgaagactcacactttgttattgaactgacatacaattatggagttgacaagtatgatatcggaactggatttggccattttggtatagctgttgatgatgttgcaaaagcagtggaactaatcagagctaagggtggcaaaataactagggagcctggtcctgtcaagggagggcgttcagtaattgcatttat

SEQ ID NO: 18303 - DNA, 390 bp, Glycine max
cccacgcgtccgctagaacactagtttgttgagcactgcgatgaggaagtggacggttgcttccgctctccttcttctctctctcctctttctctttgcagatcaaggtcgaaagtttcaggcgaatgccgagggagattccgacgagcttgtagatccacccaaggtggaggacaagatcggtgctgtgcctcatggcctttcaaccgattcagatgtcgtcaagagggaggcggagtcgatctcgaagagatctctccggagcaacgcggagaagtttgagttccaagcggaagtgtcgcggcttatggatatcatcatcaattctctctacagtaacaaggatatcttcctcaaagagttgatttccaatgcttctgatgctttgga

SEQ ID NO: 18304 - DNA, 454 bp, Glycine max
  modified_base (411)..(411): a, c, g, t, unknown, or other
cccacgcgtccgcccacgcgtccggcaccacatcgccacacaaagcctcaacgaagtgactattcagctcaatatgtcgatgctttctccaatgcccatcactcttctttaactataccagaattaacacaattccaactcctccagaatgatccccaagagaaggttggttcctaatatcatctctaattttttcttcttcataatttcactcttatagaataataacaaaagaagtaataaaaaatgaaaattgcgtcccgtcctaaccgttggactacaaacgcttgtcatgttacttagcattactttttgaacttaatataaaaataatcttgaataagtacccagattattagttatctgattcacttctgattttgagactttgagttatacaaattatgtttntcttttaaataaccttcgtatgggctagatctcgtatttattt

SEQ ID NO: 18305 - DNA, 290 bp, Glycine max
acgccacgcgtacgctttaacaacaccaccaacaatgggagcacgaaagagactctcttcttgcgaacctgcttcttcttctcctgccgcaacaaatgaaaacacaaacacaactgccaaacccaccataacagaccctccaatcgcgcctcccaaatggggtcttcttctgaagctctctctctatgtgctcccttacttgtacctactctatcaccactaccccatcgagccggagctccgaagttcgatcctcatcaacgccggaatgagcctcgaggggctcttcg

SEQ ID NO: 18306 - DNA, 454 bp, Glycine max
ctttcgcaccttgcagaatcaattatctctctcaatcgtctttcatggctcgtaccaagcaaaccgctcgcaaatccaccggtgggaaggctcctaggaagcaactcgccaccaaggctgcaagaaaatctgcacctaccaccggtggagtcaagaagcctcatcgctatcgtcctggaactgttgctcttcgtgagatccgaaaataccaaaagagcacagagcttctgatccgcaagctcccctttcagcgtcttgttcgtgaaatcgcgcaagacttcaagactgatttgaggttccagagtcacgcggttcttgcgcttcaggaagctgcggaggcttacttggtgggtttgtttgaagacaccaacctttgtgcgatccacgccaagagagtgaccatcatgcccaaggacattcaactcgcacgccgcatccgtggagaacgtgctta

SEQ ID NO: 18307 - DNA, 340 bp, Glycine max
ggaatatgccagatggcatgtttgatgtgactcatcacttattccttggtgcatgaatgcacgcatggtttgctgcagttgctgatactcgctatgctgtggttgttcctctgattggtgttcagggattaagatgggccttatacaacgataaatggcaggctcgagttaatcagttaaagcctctttttgagggtactattcattcaagcatgctaacagtggacaactgaacatatattctgaacatacttgggtacatggatacagtggctcgtgatgatttgggtaaagatgttatggacaaataagtggtggataatgtgtgggacagaatatc

SEQ ID NO: 18308 - DNA, 452 bp, Glycine max
gatcattccaatatgggcaacagaattgttatgggaaattcccttctctttatctctttcttcatcttcagctttagtttcttggaggctcaaaaggctccagcagtttatgtgtttggagactcacttgttgatgttggcaacaacaattacttgagtctctccattgaaaaggcaattcttcctcactatggcattgattttccaactaagaaacccactgggagatttagcaatggcaagaatgctgcagatttaattgctgaaaacttgggcctacctacttctccaccttatctctccctagtatctaaggtccacaacaacaacaagaagaacgtatctttcttgggtggtgttaattttgcctccggaggtgctggaatatttaatgcctcagataaaggatttaggcaatcaatacctttgccaaagcaagtggactactactc

SEQ ID NO: 18309 - DNA, 465 bp, Glycine max
cccacgcgtccgcccttccatttcaactccttctcgcgcgatagattgctctttctcctctgctcctccctttcccattcctcctttccctctcccctccgctcccccaatttcccccaaactttctccctccgccgcttcgccgccgcccctctcgctcgccctccgccgccgcctccgcccctggacgccatggcccagaaaatcggaaagtccacgcgccgccccggctcgtcctccaaggcccgcgtctacgccgatgtcaacgtcgttcgccccaaggaatattgggactacgagtccctcaacgtccagtggggggagcaagatgattatgaggtggtgaggaaggtgggtagggggaaatacagtgaggtgttcgaaggtgttcactgcacggacggtgagaaatgtgtcattaagatcctgaaacccgtgaagaagaagaagatcaagagggaaatc

SEQ ID NO: 18310 - DNA, 334 bp, Glycine max
ctaatactggacaaatggaggcaaacaaacctgagaggtagaaaattactgagcctaagactccatatcatccgatgattgatgacgacagacaactatcccatgtacgaagaagttttgatgcatatattgatgatcaacatcacacgatgcatgctgaagccatatggagtgctgtgaatgatgtagacttcagtagcagaagaagcactggacaatctggtggttgaacatcatctgaagatgtatcagaaacattggagcatgatgacgatgataggaacttgagttataaagagcacagaaaggcccactatgatgaatttcttaaagt

SEQ ID NO: 18311 - DNA, 259 bp, Glycine max
ctgtctcttaactttgatactatgctcacggatttgatctgtttcgcgtacaggaactcatacgaatgaatactgcactgggcaagggagcagcgagtgccctataagaatcactgaaccctgttgatgaccgagtggttggatagcggaaggcttctcgttagcctgagaacagcatatcactcctatatggagatgcagagcctgatagaccccatcatgcctaaaagaccactgagcgctatcttcgtgttccttg

SEQ ID NO: 18312 - DNA, 360 bp, Glycine max
tggactcatcaatttggattccagacctcatcgaaatacagatagcaaatggtacatcagcccagaggaatggagcgaaggaacttatcctacttgggcacatggtcccggctatgtggtctcacatgatatcgctaggacggtgtccaagaaattcagagagaaccatttgaagatgtttaaactagaagacgttgcaatgggaatctggatcgctgacatgaagaaggaaggtctagaagttcgctatgagaatgaggtcagagtgtaccctgaaggttgtaaggatggttatgtggttgcccattaccaaggccctagggagatgctctgtttgtggcagaagcttcaggtagataa

SEQ ID NO: 18313 - DNA, 215 bp, Glycine max
gaggagacacaccttcagtagcagcagtcatggttctcaaaaccgaactatgccgattcagcggtgccaagatctactcagggtaaggcatcagatttgttcgtggtgattctcaggttttcctgtttgctaactcgaaatggaagaggtatttctacaacaggttgatatcatcaaagctcacctggactgcattgtacagaaagcatcacttg

SEQ ID NO: 18314 - DNA, 202 bp, Glycine max
gaggagcctcagcttcaactgcagacgccatgtgtatcactacagaacgatgcacatgcatgacatccaacttttacccaaggaagggcctaccatataagcagagaccatgataatgctttgatggagtctaactacaacgcgcaacaaggctctcaacgaactgactgttcacatcaatgtgtacatgctctgtacagtg

SEQ ID NO: 18315 - DNA, 292 bp, Glycine max
atcaatcttaccacatcttgctgagactacttagtctaatagaggctctacatggcagctagagagttcatctttgtggagcttctgctggttctgaatatggccgctgtattggtgttaaactatttcgaggtttaatacttagcttagcagtcggctgtatcatattgcgacacgacagaggacaattgatgttaccctacaacttgaaaacccgctgcatattttggacttcatgggctttggcctaattacaaatatggttcatacccatctaactgtgattcaaaca

SEQ ID NO: 18316 - DNA, 205 bp, Glycine max
acgagtgatcgaagcttcacatcagtccatatccagtttatggtttccgatccatagcctacctttgacggatcgaaaccttaaatttgggattaggtttgagcaatctggttggtagaacctttggtcttagagagttaagtcttatgtctggattagacgatcaaattcttactgccttggatccttttggtgatgcaaatgc

SEQ ID NO: 18317 - DNA, 460 bp, Glycine max
cgacaacgtcaaggctaagattcaggacagggtgggaatccccccagaccagcagaggctgatgttcgccgggaagcagctcgaggacggacgcacccttgctgactacaacatccagaaggagtcaactctgcacttggtgttgcgtctacgtggtggtatgcagattttcgtgaagactcttacgggtaagactattaccctcgaggtggagagctctgacaccattgacaatgtgaaagccaagattcaagacaaggaaggcataccaccggaccagcagaagctgatttttgctggcaagcagctcgaggatggaaggaccctcgctgactacaacatccaaaaagaatcaacccttcaccttgttctccggctccggggggggttttaagctcgtagggtaaaggtggaagtgttcccaaaacatttgaagaactttgaatgttaatgggtctgg

SEQ ID NO: 18318 - DNA, 199 bp, Glycine max
atcaaatccgtggattccgacggcgacggcaacgtcaacttccccgagttcaagcggatgatgagcaacaatcgcgaaaatgctagcaatgctgaagaaaaaacagattaggccctttggatttgaattttatagataggctaggcactttcgctgcacaatctcttgactaataaatctaggtctgttatgatccgct

SEQ ID NO: 18319 - DNA, 410 bp, Glycine max
cccacgcgtccggaagagagtgaaagagaatatctgagactctgattctgagagtcgagacgagtgagtgagtgctgcttcttcttctgaatcaaatcattcatcactctctggttctgatttttctgacaccaaaatggtgaatcctcgaattccacgttcaaggatcccaactttcacacttttcacttctgctatctccatcgctctgtgcattttcttcgttctctctattctcttcactgcccattcttattcctcccatcaacaccacaacgcgggttctgacggcggtgttgcacatggatttgagtcgattaggagatccgtcctagctctgaaaacagatcctctcaagcctcggttggaccagattcgtaaactaaccgatgatcatcgctctttggctc

SEQ ID NO: 18320 - DNA, 408 bp, Glycine max
ctcacgcgtccggccacgcgtacgcccacgcgtacggtgaattaaagtatattcacatgtgcgtttctctgactaacaggattgaaagatgggtcaagcattcggtcgctaccaagtcgatcagacaaatgtggctatcaaggagcattttcgaaaatccgatgatgtactagagcctagatgtcactgtctgccatagtgtcttgggtaccaaaacgctggtattctgacgctgcaagttcagcaacttgatgttcgacgtgagaccaaacccaaagacaatgcctatgtcaatgttcatgcctctgcggaataacgacctgaggctgaaaaagcatctgatgcattctataagcttaccgacaccaaggatcatatgcaatcatacgacatagatgtcatcatggc

SEQ ID NO: 18321 - DNA, 325 bp, Glycine max
atcatgacatgtacatgaaggtcaagggtaacgttttcaagaacaaaagagttttaatggagagcattcataagtccaaagccgagaaggcaagagagaagaccttgtccgatcaatttgaggccaaacgtgccaagaacaaggccagcagagaaagaaaaattgctcggagggaggagcgattggcccaaggtcctggagaaaaagtatccgctgcacccagtgctacagctgctacagcatcacagccagcgcaagcaccaaagaaatctaagaagtgatccacatattctgatattggcttgtagaatttttgggtctggca

SEQ ID NO: 18322 - DNA, 413 bp, Glycine max
gacgagagagtcgcaggtactgcatttgttgattacaaatcactacttatgtctcagaggaggcttgggaaaaggattggactgaccgatggatttgcagcctctacaccaatagaggcagccattgtcaagcatattccaagtacactgactctgtttaacgaggctattgatgctcatacctgatcgtacgatgatcaaccaagttggagacgaaagaatgcatggctatatagaagatttcagatgcgatcttcctaccgatctacgatacatgacgctcattgaaagtaaacatactgcacacataaaccatcatagcataattgaaattcatgacataattttgccaatcgacagggcgaacttcaatgacgtgaatatcgtgtactagatgatcgacaccgatctga

SEQ ID NO: 18323 - DNA, 364 bp, Glycine max
acaccacacccttcttcttcaacttcaactacattacatgttctctccggctctccgattttctctttgagatccaaaagccttcctttttcgcactctcaattctccattctaatctctagaatccgcttcttcaattcccagctttctccacaacaacaaaacgaatcttattcggctctcaaatcccaccaccatttccttcttttctttctgtctctgtttactatattttattcattcccttttgccccgttagtgatcatcgccacaagattagttttttccgctgattcccagcttagttgattagaataactcgttatccaacgtgatctgcaactggggcatttacagaatcatt

SEQ ID NO: 18324 - DNA, 349 bp, Glycine max
cattattgaaccaccggtgggaacgagatggattacatagctggatctgactatccacagaggaaagggaaagggattgtcaattcacggatggaagtacgctcgctacaacgtcttacgcaaccatactcaagtctatgtgaagtacgctgccactatccatcacgatgctctgagctcatactgcatcgttcgctatgcaacgaattcggagactaaagattgactgaccataaatgaagattgggaatgactatgacaacaagatcgacgacgagacgacactcatggaaatcaagcttgtctgtcacatggaacatgataacataattaaaaataatgacataat

SEQ ID NO: 18325 - DNA, 237 bp, Glycine max
cccacgccaaagaaaggtaaacactgcattactaggagttttcaaatggcactagggaaaaggtagagtttgtgtcacgggaggcactgggttcctcggatcatggatcatcacgagactccttgaagatggatatgctagtaataccactatcagatgtgactgatgactcatgaaagattgtagctttctcacaaacctacctggtgcatcagaatagcttataattttcaatgc

SEQ ID NO: 18326 - DNA, 315 bp, Glycine max
gtctggatggcggcatcgcgaatcgtggcccatcctacgccctatccccaccgtcaatctccgccgtcagatgccccgacgttcctgaacctcacacttaatccaaaacggtaccgtaacctcggcattcgcgcctactttcgcggtcacgaggagaagaacacgtacgatctcgccgatcaaccccactccgtctagttgcgagccaccagcaccccctacgacgtcggttcccgagatctgctgtctctttcagcggcctttgtctacaactcagttatctgcttcgatatacgatagctctcgcctttgaga

SEQ ID NO: 18327 - DNA, 358 bp, Glycine max
cgcgtcgttccgtactagtgtcaccgctcgaatatcttgttgtttggagcgatccgagataaactgtgtaaacatgtggagctaccagtacctctgtacaggtgatgagcttgtgtttgactcgattcggaacacggctactgagattggaatgctgcgggatgatgttgtgacgcgacacagaacaggtgctgctgctgtacacctggaaaaccccctgcatattttggccttcatggactatggccttattacaaacatggtttatacctatgtaactgtgattcaaacaatcgttctcaggcatctcagatttttcacctcacttttagcttgcagaggaactggcccacacttt

SEQ ID NO: 18328 - DNA, 327 bp, Glycine max
atgcataggaatttaataaaagggatcttaattataaagtggtaggtattgataacataattcaaattaatacatgcatagaaaatatagaatatccaatccaatattgcttatttatattatttttttgatattggagtgcataacataaaggacaaaatagggattaataattcatattaatataataaatttcgatcgatttatcaaatagatatctatttgattatttcaaaaatattattattggaaattttagtaaagtaactaagaataataattaggaatttcatatttctaaattaatgtctaattctacatttaaaa

SEQ ID NO: 18329 - DNA, 299 bp, Glycine max
ggcgttgttgcagctgaagaacttgctccatatcttgatatagattccacagagggaattaaggatgatgaatcctatattttacctgtgctcttacgatttgatggtcaacctgatgttgatgaggagggaaatattctgtataggtttccatctttgcagaggacagcttctcaaaagagtaagagaaaagaatatgttggaaggagatgggcagattgcgttggaattgagaagtttttcaaggagaaaaaatggcaattcaagtaaactggcacgccagagagagcaatggtcat

SEQ ID NO: 18330 - DNA, 254 bp, Glycine max
tccggttcaaccacgcgtccgccacccttccgaaaaaaaaaaaaaaaaaaaattaaataatataaaataaaaaataaaaaaaaagggccggcccttttaaaggacccagcttaacttcccctttcttccaacttcaatgcccttcaatagggtcccttaattcaaattaattggccggcatttacaaaattattacttggtaaaaccctggggttcccaacttaaactccctgtaattaaatccccttttttca

SEQ ID NO: 18331 - DNA, 464 bp, Glycine max
  modified_base (378)..(378): a, c, g, t, unknown, or other
gtttgtgggagtactgcttatgttgcacaaacatcttggattcaaaatgggaccatcgaagagaacattatctttggtttaccaatgaacagacagaagtacaatgaagttgttagagtttgtagcttggagaaggacttggaaatgatggaacatggggaccagacagagattggagagcgcggaatcaacctaagtgggggtcagaagcagcgcatacagcttgccagggctgtgtatcaagactctgatatatatcttcttgatgatgtttttagtgcttgtgatgcacacactggcactgaaatattcaaggaatgcgtgaagggggctctgaaaggcaagaccgttattcttgttacacaccaagtagacttnctacataatgtggatcttatagtggtgatgagggacggaatgatagtccaatcggggaagtacgatgatctacttgcgtctggaat

SEQ ID NO: 18332 - DNA, 449 bp, Glycine max
cccacgcgtccgcccacgcgtccggcaacacccaatctggggctgctaaggtttcaatattaatgattggtcagcaagccatagtagatgcttatctttgccttacacatttgactgcaggaatactagttgaatccctgttcaatgcttttgcaactgctgcatttttcaagtttgtggttttctcaatatttgagatgagatatctccttgccatctggaaggcaagtaggcctttgagcaatggtgaaggttgggagacaatgagacgtgaattgtcagttttatacagccgtttctatgggatcctattgggaggcatactgctcatgtatgaattccacaatcatttgagacctattcttcttcttgtatactcattttggatacctcaaataatcaccaatgttattcgtgactcgcgcaagcctttgcatcctcattatatc

SEQ ID NO: 18333 - DNA, 376 bp, Glycine max
atacacacttggctgaggaaggtcggaaaagaaaatggagttgttcttctacacggtgttcggtggtttggccgcggttgtggcagttatggagctgagcaagaacaacaaggatcgaatcaacacctcttccgcattcaattccttcaagaacaactacctcctcgtctattccctcatgatggctggagattggctacaaggtccatatgtctactacctttacagtacatatggatacgggaaaggggacataggacaactcttcattgctggttttggatcttccatgctctttggaacaattgtcggatctctagctgacaaacaaggccggaagaaggcttgtgtgacttactggataacctacattttg

SEQ ID NO: 18334 - DNA, 382 bp, Glycine max
ttagacgccgcacgccagcaccgtcactgtttcaatcctcgaactgtgtcttcttcgctttctggtctttttattacgttttgttcatcgatccatcgccaaacatgccttccagtcacttgcttctcgaggaacctattaggatggtctccatccttgagccatccaagcctagttttttctctgcaatgacaaagattgatggtaccctgcgacctaaatctagatccgtcgaaaccatttctggttgcctcaaggctggcatgtctagtgctcgttttgacttttcatggcatgaccctgagtaccaccaggagactttggagaatttgaacgctgctatcaagagtactaagaagctctgtgcttgtatgctggacac

SEQ ID NO: 18335 - DNA, 395 bp, Glycine max
actttttctacttaccttcactgttaatccatatacgatggcagtcatggcaaccagaaccgtgtcttcaaacccaagactctcatactgcaacggaaagcccgacacatattcttcccgcgttgcgcccaccaccaaattatgactcatccaaacacggcacaatttccatgttcctaacctcactgccctacgacctacagtccttcaaattccagcccatcaaagaatccatcgtgtcacgggaaatgacgcgccggtacatgaccgacatgataacctacgcctacacctacgtcgaaatcgtctgagccggttcggccgggctgtactgcgcgtacgagctcagcaagaaccccgccgtgagcgtggccatagtcgaacagtcagtgagc

SEQ ID NO: 18336 - DNA, 294 bp, Glycine max
cccacgcgtccggtttcaccgcacgaatatcttgttgtttggagcgatccgagaaaaactctgtaaacatgttggtttaccaggacctccttacaggtgatgagcttctctctgactccttccgttacaaggaaattgagaatggaatgctgtggcaagttgaggggaagtgggttgctaaaggagcagttgatgtagacattggtgccaacccttctgctgagggtgtaggaaaagatgatggaattgatgatgcagcttgtaaggttgttgacattgtttacacattcagac

SEQ ID NO: 18337 - DNA, 434 bp, Glycine max
gagagactcatcagttctcactcgtacggcgcttttgctttgctttgcttcatttctttcatcgtcatcataaagttcgttcctttctcagttttcacccatacccagatgagtaacagcaccatctcggatctgtgtccctcctttgagtgaaaaaggttcaatctttggtctctggggctgttggggttccgtcattgaagaagaagaagaagaagggtattattgttattataatcatgtacccgaggctcatacaccctcacgatgggattgtgacgcacgatgagttgcagggtggtgctgcttccaacctctctcacgctcacaagggtgacccttgtctcgttttaacggctgatcccaagcctcgtcttcgttggactcaggacttgcatgaacgcttcgttgatgcggtcacgcagcttggtgga

SEQ ID NO: 18338 - DNA, 444 bp, Glycine max
tgataagcaggataggtttgtgttttcatcaattaaggccttggctgtggagttaacaagagaagcacatgcttatagggaaaagaaattgcccaatagggataacaagattgaccgtggatttgatcagaggcctgatttgtggcctccggcgaatagggcggataagctgtcacttcggaatcccttgctccggcatgagaagatgggatgtggttggttgggtgctatatttgagtgggagggtgttctaattgaagacaaccccgatttagagaagcaagcttggctggcactctcttaggaagaaagcaaaccctttccttctgcttttatcctcaagagaatagaaagcatgaagaatgaacaagcgatttcggaagtgctgggttggtctaaggatccggcacagctgagaagaatggcttattgaaaggaagaaat

SEQ ID NO: 18339 - DNA, 131 bp, Glycine max
ggcacgcgaccgcgaggctgatgaaatgctttccagggggtgcaatgatcagagctgtgctgcatcccaggtgcttacatctaagattcatggggcagcgcaatgtgcgacagtgcgtgccagtgctctag

SEQ ID NO: 18340 - DNA, 398 bp, Glycine max
ggcactgtggcagaagtcttaggagtgtaaaacagagacgcaaaatgaagacgattctatcgtccgagaccatgaatattcccgacggcgtgagcatcaaggttcacgctaaggttatcgaggttgagggccctcgtggaaaactcgtgcgagacttccaccatctgaacttggacttccaacttattaccgacgatggcggtaaaaggaagctcaagattgattcttggtttggttctcgtaaaacctccgtcgccattcgcacacgcctcagccacgttgagaatttgatcaccggcgtcaccaaaggataccgatacaaaatgagattcgtgtacgctcattttccgatcaacgctagcattggcaacaacagcaagtccatcgagatcagaaat

SEQ ID NO: 18341 - DNA, 324 bp, Glycine max
cctggcttcagcaaaggatctcaaagacttgaatatattctcaaagatggatgtatatgctgtgctttcactctccggcgatcaaaagaccaagactcccgtccacagaaacggcggcaccaacccaacatggaattttccggtcaagttcacttttgatgaatcggtggcgcggcagaaccgtttggccctcgaaatcaagatccgctccgagcgcgccctcgccaccgattaggacatcggccagattcacgttcctctcatggaactccttaagcaacctggcgacggtaaattctttcaacacgttagttaccagttcag

SEQ ID NO: 18342 - DNA, 285 bp, Glycine max
gggtaaccctggggagtttaccatgttagagcttgctcaggttgtaaaagaaacaattgattcaagtgctacaatagaatacaaaccaaatactgctgatgatccacacatgaggaagccagatattagcaaagcgaatgaactgctgaactgggagccaaaaatgccactgagagaagggttgcctcttatggttaatgatttccgaaatcggattctgaatgaagacgaaggagaagggatgaaataagcataatagcaaaccctgtatgtatatggagatga

SEQ ID NO: 18343 - DNA, 452 bp, Glycine max
cccacgcgtccgcccacgcgtccggagtttacaggtcttgatgttgaaatggagattaagaagcattactttgaggttatggatatagtcgatagattgtttgtcgcaatgtttgacagtttgaaccagaattgtaagaaggatctggaagctgtcgggtctcagtatccatttgaacctttgaagtatctgcggacgacactacggcttacatatgaagaagggattcagatgctcaaggatgttggagtagaaattgaaccttatggtgacttgaatactgaagcggaaaggaaattgggtcagctagtctcagagaaatatggcacagagttctatatccttcaccggtaccctttggctgtaaggccattctatacaatgccttgctacgacaatcctgcatacagcaactcgtttgatgtctttattcgaggtgaggagataatttc

SEQ ID NO: 18344 - DNA, 458 bp, Glycine max
ttttctcaatgtttcgtcaccaagaagttaccttgtgaagaaaaagcatgtgaaatttagcaaacacatcagtgctgctgctgttgcaacaacaacaacaactgaggaaattcaagagtacaaattccgcgtcttaataccttttccatgatctacttttgtctttccttcacttcacaatgatagtgtcacctgcaatgggaaaaaagagcatggaaattaaataatgaataggtgatggggatggtattgaagttgtagtgtttgtgctttaagaattttttgattctccagaataaaagttaattgtggataacattattacaataccattatctacaatcattgtttacaggtacaagcttgcatcatgggctaaagttgaaatagggagggctgctgtctattggaaaaccatgaatggccttccttcttttttaagagaaaagcttaaactt

SEQ ID NO: 18345 - DNA, 368 bp, Glycine max
ggaggagctagtgtggcttagtcgctaaatttgttacgataaagaaattaattcagcaacaaatacaatgggttctcttatggcaggatgggactctctgatcttggatcctgaatcagctacaatagagaggaatcgatcactcaccaaagaagaaattaatgcttactggagagtaaagaaggagacagagttagaacacctcagagctatgtccaaactatctgagactattcaggcccgaaaatttgaggattcagagaattctcataagtcaagtaccgtgaccttggccagcataaaagagtccttaagcatggacgttgaccagaaaagtttagagcaacttatcaagaaaaatggctggt

SEQ ID NO: 18346 - DNA, 448 bp, Glycine max
gtttttgaagtatagagatggcagagacattcctatttacctcagagtcagtgaacgagggacaccctgacaagctctgtgaccaaatctctgatgctgtcctcgacgcttgcctcgaacaggacccagacagcaaggttgcctgcgaaacatgcaccaaaaccaacttggtcatggtcttcggagaaatcacgaccaaggccaatgttgactacgagaagatagtgcgtgacacctgcaggaacatcggctttgtctcaaacgatgtgggactggatgccgacaactgcaaggtcctcgtcaacattgagcagcagagccctgatattgctcagggtgtacacggccacctcaccaaaaaacctgaagaaattggtgctggtgaccaaggtcacatgtttggctatgccactgatgaaacccctgaattgatgccattgagccatgt

SEQ ID NO: 18347 - DNA, 263 bp, Glycine max
cagattttgggcttgccaagttgaggaaaaaagaggacatggagaccatgtctaggaggaggggcacaccatggtacatggcaccagaatggatcactgcaaacccaattacctcaaaggctgatgtgtatagtttgggcatggtgcttttggagcttgagattgggattaggaactttgagatccaaggttctcagtttaggagtgatgagtggaacttacttagatgctccttggataagatgtttaaggagatcataatg

SEQ ID NO: 18348 - DNA, 180 bp, Glycine max
cacacgccaccgaaaagtaaacgctggtattacaagagcatccaaaccgcatatggaaatgggagagtttatgacacgttactcactgcttacctaggttcatggatcatgaacagacttcttgactattgatatgctggtcctacctctattcgctctcacccaagatgcaagcgtgat

SEQ ID NO: 18349 - DNA, 336 bp, Glycine max
aaaagaatggcgtccatgtttggcacatcttcgatggccttcctctcttcacgatgccactgtgcccaatcccttgccaccaattctccctctctaaccacagtgcaggtatatgggcgcatgttttgcataggaaatggatttcacggcgtcaaggctacaagtgttgctgccactcaacgtaactctgctcaacaggctcaaaagatcgcttctaaccagagcctatggctcctgtacccattatctactataacgggacaggatgagatgtagctctgccatgctctaaatgacaatgatcccaagattggctgtgtaatgatcatggtggac

SEQ ID NO: 18350 - DNA, 330 bp, Glycine max
atcacgcgtacagtatacacattgatttcaaatgtacttcgtgacattttatgctggttcagggtggctagtggtccagcatcggcttttgagattggacaaagggcttaagagcgttcgatcatggattacaactctgttcacaagtctagcctgtcaaattcaatacttcactggaatggggcttatagcaaccggattgaagaaggatcaaatgttcgatggtgacatatgtacactctacatgagtgggtatactacaatggatgttaaagttgattcatattctcatatatctacaatagtgactcgtgaatgatatatttgcat

SEQ ID NO: 18351 - DNA, 312 bp, Glycine max
tggggttacagttcccgtgtgattgattcgattgtccacattgcatccgcggcttaaagaattgagtctgagcttggatatcatcgctacaccgttccaaatttttatcttaatcgagtttattttagtgcgaattcggaataaacactatgtgttgctgtgagaagatatcattgaaaaacagtgcactatgttgagttggtagacggccttataggttcttcctctcgcaagggacgattgactattctgtttccggtatcataatcatctagtataagcaacattttgttttccaaaaacaaaaacgct

SEQ ID NO: 18352 - DNA, 358 bp, Glycine max
atttggaacaaacaacaatagaggggttgtggtgctctgtgtgctgcaatttccttttgagcttgtgtttgattcatcaaatcatcaaagatgactgtaggggcaggaatatctgttgcagatgggaacttgatggtgttggggaacaaagtgctgagccatgtccatgacaaggttcttgttacccctgcatgtggtggtgctttgctcaatggggcattcattggggttcaatcccatcacaagggtagccgcacagtctttccaattggcaagcttcaagggttgcgatttatgtgtgttttccggttcaagatgtggtggatgacgcaaagaatgggcacttgtggacaagata

SEQ ID NO: 18353 - DNA, 277 bp, Glycine max
gtgagacaacatgactgagaggtccacataccttgcctggctcaaggttacaactctgattggtgcacttgaccagattagtgagcccaagaggccctgtgacatgcaacatatgctgcaactatatgaagtgtatcattaaaggacgcttcggatctgtaacagggtgatgtgttcacatacgggataggaagcttggcatggaattcacagacgcacgaactagtctgactactgaagattgggaatgccttttacaacatgatcgtctcacaga

SEQ ID NO: 18354 - DNA, 211 bp, Glycine max
cttcattgaaacaacggacggatagtgatggataacaatgctgaatctgagaatccgcaacggaaacggaaactgattgtaattcacgtagggtagtacctccgctacatcatcttaggcagctcatatcaagtctatctcaagtacactgttcctatacaacccattgctctcttctcatacttcatcattagctgtgcaacgaattctg

SEQ ID NO: 18355 - DNA, 220 bp, Glycine max
ctcacgcgtacgaactcacttccacacgtggttaccaagaatacttgttcgtccaggaagaggcagcttatacggatttcactactgaatcggatgaccctcgtctgacgaatttctatacatgtagcacacagtctcgatctcgtgaactgtggacactagatcacaatctactcttggccaataacggactagctcgttacttacgataagatagaca

SEQ ID NO: 18356 - DNA, 360 bp, Glycine max
ataagacgaaaatgttgacagaaaggataatgcatgaatgcatcaagaagttattgggtcagtatcaggatccggatgaagaagatattgaagctttgtgcaagctgatgagtactattggggagatgattgaccatcccaaagccaaggaacatatggatgcatattttgaaatgatgagatcattatcaaacaacatgaatttatcttctaggttgaggttcatgttgaaggatgtcattgatttgagaaagaataaatggcaacaaagaagaaaggttgaaggtccgaagaagattgaggaggtgcacagagatgcttctcaagagaggctggcccaagctagtaagctgggtcgtg

SEQ ID NO: 18357 - DNA, 264 bp, Glycine max
gtaatcctagtgaacacttatcaggactcggaacccgatgcctagagagcggctgatacgttcaccatgataccaattgtgccgctgaatattccctctgctatactggaccgttaagatcccgcagatacttgcaatggcggagatctcttgtatgcttactatgatgacgatgaacgggtgtactcacactctgagttatctgccgatgatgggtcattcgctaccctatctgtgttagctgattgacagatgaatgagctt

SEQ ID NO: 18358 - DNA, 357 bp, Glycine max
cccacgcgtccgattgaatttcaatttccctaggggcttaatatctccccgcatttgtgccgagcctcattattatcatagtagatattcattccccttatctttctctcttctctctccccgcccaaaccctaactccctaccctattccgctttctctcatccatcatgaaaggaggaaagtccaagaccgaatctaagagagccgatgccaaacttgctgtgaataagaagggcgccgccaccaagactaggaaacccgccggaaaggggaaggcagcgaaagatcctaacaagccaaagaggcctccaagtgctttcttcgttttcatggaggaattcacgaaggtgttcaac

SEQ ID NO: 18359 - DNA, 234 bp, Glycine max
gaaaaacctacagagagtatggtggttttgaagatcaaactgctctgtgacggttgcatcgggaacattctaagaatcattatgaggttcaaaggtgtactatcggtgagccttgtctgaagcaaggactcgtagacagctaccgtaacactggacgtgatagacatggtgtcaagcctgaactagaagatctagcgaaacatagccgtggcgcctcttgctaagaatgacaac

SEQ ID NO: 18360 - DNA, 142 bp, Glycine max
gccacgcgtacgaacaggctgggcattacgcagatgcaagagcaatctatccttcacatcgggtacaattcattgattacaagagctgctatcacgtacctaacttgggacgtcggcactgagagcggactagctgacaaat

SEQ ID NO: 18361 - DNA, 374 bp, Glycine max
tttcgcttattttattatcgttttcctttctcccgagtgttctcctttcttgcttccttctccggccatctttatcctgatggcgtcgtctctgggaattgcttgcggtggaaacaacgccaaattagggatcccaaagcagcggtgtggttcggttcttcagccgccgtgctccctcgctatggggcgctcgacggcgagggtggggaggatcacggctgcgatggccacggccacggcggtgatgaccacggccacggcgaaggagcaagagactaccactccgatgatgatggcaatggagctgttcgggaaacgcgatggaggagccaaaaacgacgcttgtgaaggacaagaaaagcttgacaagtgga

SEQ ID NO: 18362 - DNA, 331 bp, Glycine max
ggcagtcagcattccatgcaaatgctccagttggtacttcggatttaaacaatggcaaggacaacgcaattcaagctgtctgagcttgtaaggtccggtgaagacagcagcagaattaagccttcttttggtcatttttcatttggactatcatatataattttggtttcctgatccctatcattttaatctttccattagtagccaggtatatatgggggcacttatatcaggtataacacaattttgaaaaaacacttattcaaactgaacacaagtaactcttatataaagaggttgtgtctctataggttgggatatttttagagcc

SEQ ID NO: 18363 - DNA, 84 bp, Glycine max
ctcaaacggactgacgtcctattacgttatgacctagtctggcccaatctttgacggcacagggggcatccattcggttgtatg

SEQ ID NO: 18364 - DNA, 424 bp, Glycine max
aaagagaaatggaggagactctttctctcagtctcatccacgtaaacaactcattggttttcaccaatagactacacatcatcctccatttcactgctctatgtttcttggtttactacaggctttgtttcttctttcagaatccacaaaccagacgaggaactactttgttcccttggcttcttgtttttgcctctgaaatcattctctccttcatttggattcttggtcaaggtttccgctggcaccccatttcaagaactgtgtttcctgaaaggttaccacaggatgacaagctccctctcattgatgttttcatatgcactgcagacccaactaaagaaccaactttggatgttatgaacactttgctatcagccatggcgcttgattacccgccagagaagcttcatgtgtatggttc

SEQ ID NO: 18365 - DNA, 454 bp, Glycine max
gtttttacggctagaagaatgtccagctcatcggaatatttggtattttccggccaccacccggcgaactctccggcggaaaagtccactttctctcagacttgtagtctattgagccaatacatcaaggaaaagggtaccttcggagaccttaccctcgggatgacttgcactgccgaaacaaacggttcccctgagacatcgtgtcactctgcaacaaccatggagttgtttcccacgatcatcacgcaacggaacccaactactgtggatttcctatctccccagactgcttatcctcaccactcagaggttccaatcatggttaaatcaagtgcttttaagtctatggagaaggagcctaaagctgctcagttgacgatcttttatgctgggcaagttgttgtgtttgatgattttcctgctgaaaaattggaggagataacgtcattag

SEQ ID NO: 18366 - DNA, 387 bp, Glycine max
ctcggtctcgctcttctactcatcaagcacagagttacagactcaccgatcttccgattctctttcgtcttggtttatgagctcgaaggagagacccactcttggtggcacgcggattaagacccgcaaacgaaatattgctgcgccgctggaccctgcagcattctcggatgcagtggttcagatttatttggataatgctggtgatctggaacttattggtaagagtattgaatcttcagaccttaacttttcaagatacggtgacaccttttttgaagttgctttcactgggggtcgtacacaacctggaactaacaaggctgatgaaggggaccgtcacccatactctataatagaatgtgagcctaaacgtgaagtcatttt

SEQ ID NO: 18367 - DNA, 256 bp, Glycine max
gtttttcctttcgggattggcatctatggcttctgaagtaatagagtaccgatgctttgtcggtgggcttgcttgggccaccgacagcgatgctctcgagaaagccttctgtgattatggtgagatcgtcgaatctaaggttatcatcgatcgtgaaactggaagatcgagagggtttggatcagtgaccttcgtcttggagcatgccatgaacgacgcagtcgaaggaatgaacggtcagaacctagacggtcgt

SEQ ID NO: 18368 - DNA, 193 bp, Glycine max
ctacatccttgatcgccacagtcattttctatcatcatcactttcgatgagaactgtgcttgtgctatataacttaagagttctccagattattatagtgtatacgcagctatatcgtataaggaaatcgacttagattgtgaagtgtgacctctatgatatgcattgaattgatatcgctgtacatcgcttg

SEQ ID NO: 18369 - DNA, 356 bp, Glycine max
aaaaaaaattagaaaacaatatagatacgatcttttatcctataattttatcaattgtgcagataagaaagactcatatatttatggatatagatccctatttcaagttaaagaaaaaccaagtgatttcttctaattacaacacgtgtaaaaaagaagtattggatatcatagataatctctttatcaagaattatatatcggaggatgccattctagatatggaaaactatatgaatcgaacgtatttcgattgaatggtaatctatagagaaatactaaatcgttacatatcgaatccatacatctggttcactgcaaaaactgtgacgttttatgactcatataggggtaac

SEQ ID NO: 18370 - DNA, 421 bp, Glycine max
ataaactgatcacgcggactgtctagcctcagggctactaaacaatgcacaacgacagctatgaaaggactatatctaggacggacatctaattgtatgccatgcatgtgagagagagatagaagcatatcttaagttacgtacgtagacaaccagaaattgaacctgatcgaacgaggactgtagcctaatcatgctattatgagttatgacctgatgatcaaaaactgttcgcatgaatcatagcagatatgtattacaatgaagcgcttctactatttcaaagtcaaattttggaccaatacgcctaggtctacacctggactgaaagatctacataaactgcaatttttaggatctgacaaggtgacctagtcttcatgctcatctacatgtactctctgtatagatacaactgtat

SEQ ID NO: 18371 - DNA, 262 bp, Glycine max
cggacgcgtgggggtgcaggctgtcgcaagtgattggatggcatctgctcgcgctccgtccaggatgaccgaacttatgtcaacgcagattctgatgctcagaataagcctggcagcaaccacgacaccattatttacaccgacgcgcctcataggatggagaggaatcttccagatccttctagaaccaacaggaatgcttctaccaatgcgattgaagagatctacgactgaatcccgagcttgcactaggactgcatgc

SEQ ID NO: 18372 - DNA, 213 bp, Glycine max
ctatacttcttcaatacatataatgtcaatgacaggtgtagttagagcttgctaatcagataccatggacggctacgacagctatgacttttggaaatctcaatgctcagctcgaggcttgaatctggtttggacaatctggctctgaatgattacttcattcggagcaacagatacagcttcaataagcctgatcagatgacgaactttgat

SEQ ID NO: 18373 - DNA, 454 bp, Glycine max
cccacgcgtccgcccacgcgtccgctcacaaagacacagagtgcgttcgttgacgacaaacacacacaaacacacaacaaaagctcgccggaaaatctttctccggcgacctggaattccgacgaaggtagttgcggctccttcgtcccgaaactgaggccctcaaagtataaactttggtggtggtgggtaggatctggcggtgtatgatgggatcttgcatatgcccgttggagactccggcgaggttgctttggaccacaagcttcttccgtcataagcttatgatcttctaataattaataattcacgcacacaaacaaacaaacaaacaaacaaaaaacacttcataacaacaacaacaacccttctgaaattctcaacacaagtttcaaaaaacagagtaaaagaaacagagcaaaaacacacacacaaaaacacaaacacagacacc

SEQ ID NO: 18374 - DNA, 356 bp, Glycine max
  modified_base (277)..(277): a, c, g, t, unknown, or other
agaagatggagatgtatcagatctggagcaggagaatagcgttgggagcgttcgcgtttgttctgcttttcctatcggcctcagcagacgacgtcgttgtgctctctgaagataacttcgagaaggaagttggtcaggacagaggagctctcgttgagttctatgctccttggtgtggacactgcaaaaagcttgctccagaatatgaaaagcttggtagcagcttcaagaaagccaaatctgttttaatcggcaaggttgactgtgatgagcacangagtttgtgcagcaaatatggagtctctgggtacccaacaattcagtggtttccaaaaggatctcttgaacccaaaaag

SEQ ID NO: 18375 - DNA, 268 bp, Glycine max
aataccgggccgaccacgcgtccgctcacgcgtccgatcctacatgtcaagatgttcttgagcgaaagattgatatcaggtctaggatgctacctgagcaatgactagcacagctatgtacacaattcgaacatggtcatcaataatcactggctcctatggaatcagatggccccagaaacacgacctattccatcaaactaaatactgaacgctagatgccagataatcgaataactcaatcctgtacaccgaatctgcacaacaa

SEQ ID NO: 18376 - DNA, 298 bp, Glycine max
cgcgtacgcctacgcgtacgcttgagggctgttcgcaatctggcttcaggggtaaaaagtctggatcctgggcacgcaaaatactaggagaagccggagttcagagacttcacaaatgttctaaagaaaatcagtatccagattgaaccacaaaagaaagcttggcacacgaactcggacttacttatcagcaggttgccaaatggtttgtcactacacatgggatcttccggcattcatcacaaatggaaaccaagtcatgtcttaatgctttacagcaggttactgatggcagaac

SEQ ID NO: 18377 - DNA, 163 bp, Glycine max
gtaatacataagtgcttagagagagagagagatagaggtcaggcgatgacagaggtagcatgaggtgcggtgaaaacagatcgactgcggtcccacagacggtaagcgcaacatgacaatggatgctactgtacagtataagatacaccgaagttgtggaatc

SEQ ID NO: 18378 - DNA, 359 bp, Glycine max
cgcacgcgtccggtacaagcgaacaatgcttcatgttgtatatcgagttggggacttggacaggaccataaagttttatacagagtgcctacgaatgaagctcctcagaaagagggacataccagaggagaaatatactaatgcctttcttggatatgggcccgaagactcacactttgttattgaactgacatacaatgatggagttgacaagtatgatatcggaactggatttggccattttggcatagctgttgatgatgttgcaaaagcagtggaactaatcacagctaagggtggcaaaataactagggagcctggtcctgtcaagggagggcgttcagtaattgcatttattg

SEQ ID NO: 18379 - DNA, 108 bp, Glycine max
acgcgcacgcttgtgacaaatgctatactgaatctttatatggtaggcatatacgcacgtagccgaggcatggggatgagtgactacccaagctaaagctgctgatgc

SEQ ID NO: 18380 - DNA, 393 bp, Glycine max
ccaaaccctcggcggctgccatacccgctgcgtgctctgttgtgtctcctcttctccgcttggcctctctccttcgccgttctttttagggctctctcaactcttctattagctgcttaaaccgtggcttacgactcagattccgatttagggcttgcgtttctggattctgccttccatgatgaaccagatctcgtgcctgatcatgcatcatggccactgtcgctagtcctgctgatcaagccactgatcagcctgctgagctatcgctggaaacatcagcccgaacctttggagattcctgagccaaccaataaggccactgggaatgactatggatcacttgattcaagaaatgcttctagtggtcatatcccattgcatgatccgtct

SEQ ID NO: 18381 - DNA, 396 bp, Glycine max
ctaaattctaaacactccttcgacctataatacccttctctatagtcattgttgaagctcggaagcaaaggctaaagtagatgagattctcctcaagcaaaacctagagcttccacactcctccactacttagaatattaaaagccccttccttcatcaaggtactactgttccatcttccctcaaagattggaacaacaacaggaacatgggtactctaacaactgttcctgtgctcccttctaagcttaacaagccttcgctttctccgcgttacaattctctttttccctactacggaagacgcgtcgggaagaagaacatagcaatggatcctgttgctaggttgttcgggccagccatatttgaagcctaatagcttaaggatttattctt

SEQ ID NO: 18382 - DNA, 372 bp, Glycine max
gagaagtcaattgagcttttgattcggtttacccgggctgggaagtctgcttcttatgctggtctcatgggggattcctttgggaattatggaaaagctctggtgcagatatgtgttataatcaataacatcggtgttctgattgtttacatgattataattggtgatgtgctctctggaacatcttcaagtggagatcatcactatggtatccttgaaggatggtttggtgtgcaatggtggacaggccggacatttgttgtactttttactacacttgccatatttgtacctcttgcgagctttaagcgaattgattcattgagattaacgttctgcctttcagtcgcacttgcagttgtttttctagtc

SEQ ID NO: 18383 - DNA, 52 bp, Glycine max
ctaaattctaaacactccttcgacctataatacccttctctatattcattgt

SEQ ID NO: 18384 - DNA, 398 bp, Glycine max
ctgcttgccttccaaaaacggtggtggccctaagcaaagttgtggcgattacaccagggttggctaagaactcgttccaacccttgtgatttcatttctgatttttaagattgtgatatgatggaatcttatttatgtcaattggtttagtttaatttccatatgttattgttttttttaatattaagtcaggtcccagataatttgcatcagttcacactcatgagtcacctgatcaagagctagacccggttttattgtatgtatcactgtatgtaatatctaatgatttcggctcatacttctgttgcggttgtattgtcggtgtgtatcatgtgtgccattagtttatttgatgctgataagaatcattccatgttagatgggaaataatatta

SEQ ID NO: 18385 - DNA, 181 bp, Glycine max
aaaaaaaataagaaaatgaaaaaaaaaaaaattaaatatattgtaaaaataataaaaaaaatgggaatgggtaaataactgataaataggacggcttttttaagggttccaagtttacttctaatgcttgctaaataataacattcctattgaggcacctaatttcattgaatcggccttc

SEQ ID NO: 18386 - DNA, 360 bp, Glycine max
cccacgcgtccgggaatgctggactgggcctttttgagcaggctcatttgcttgtttctgaaccttctgagaaggagaagttgaaggcttgcattgctcaggccagggaacatttgcatctagaagataacccatcacaagctttacaaccttcagataatcaggcaaacagaggatatctttttgaggggcaccttacggttgatcctgagccaccacagcctcaatggttggtgcagtcaaaccttttgaacacaactgctacactctttgctggtggatcctttcaagctccaacagcaaatgaaaccactcaagaagatgccccaaatatgcttcaagatcttctaaatagattgg

SEQ ID NO: 18387 - DNA, 176 bp, Glycine max
gacacgtctagtccattgtaggttcaactcttgttctatcgcaacattgacagtgatggaagggatcggcaactgcaaacccaggcccgattgacagaagaataacaagagcaatgtaaattaaaggccgaggaactcgaaatggcattagagaacatctctgaggtctgacttgc

SEQ ID NO: 18388 - DNA, 262 bp, Glycine max
ataagacgaaaatgttgacagaaaggataatgcatgaatgcatcatgaagttattgggtcagtatcacgatccggatgaagaagatattgaagctttgtgcatgctgatgagtactattgtggagatgattgaccatcccaaagccaaggaacatatggatgcatattttgaaatgatgagatcattatcaaacatcatgaatttatcttctaggttgaggttcatgttgaatgatgtcattgatttgagacagattaaatg

SEQ ID NO: 18389 - DNA, 257 bp, Glycine max
gtctaaggattacgtatatagaccagcctatgcctgattgcatgaagcagtacttgggacggattcagagtccgcatggggaagatatagtagcagcgtgcatgctcatgactactgttgatgagatgattgtacattctaaagccaaggtacatatcgatgcatattacgaagtgctgagatcattatctaagaacatgaatgaatcgcctacgttgatgttcatgttgaaggatgtcatcgatttgagaaagaat

SEQ ID NO: 18390 - DNA, 302 bp, Glycine max
ttggagttgtgacaagaataattgaagaacatggttaatttattctattcatcatacaagatgaactgatgataacaaggagggattctcaactgcatgccatgcatctttgtttgccatcctagtctagattaagttgtgctcccagactacaggcagctatacaagtctcgatgaggtttgtgggttaatatgtgaattatcaattatgtaagaatggtgaagatttttttgtatgtttttcaccatatatgtatcatacgaaagcgtgtcttttcaaaagatctagacttatgtaccaa

SEQ ID NO: 18391 - DNA, 395 bp, Glycine max
ctgacgcatggtatccctccagtccagctgtaattgatcagaggattcaaggcaagtctgaggtgatacctgagcatcaagtaaccagtttaggtagacattttgaaagtgaccatgattcatcaccttctcctgtcaatgcgtatggtgacaaaaatatgatatattccaaagaactggttactgtacctgaaatggatgatgaactagctatggtacctgtacaccagatgccaaagcgatctgagatcgtacagcgtcgaatactcaggcctttgactgtatatgaagtctacacactggttcaagcactcgagaaactaggaactggaaagtggcgtgatgctaagctttgtgcttttgataatgcatagcatagtgcatatgctgatttg

SEQ ID NO: 18392 - DNA, 344 bp, Glycine max
cacagaacaagctggggtggggcgacgcgctgcctggaacgggacagagacagagagggttccttccggtcgctgtaattggtttggcgttcaattgaggaagaacaatgtcggtgacagcgggtgttagtgatactgtaatagccattagggataagctcagaggtaaaattggccaaactaaagttaagcgttattggcccggtaaagttcctgaatgggctgatgatgagaacgaagaagatgctgcccctgccgatattagaccctccaaggaagctgccttggagaaagcctttcctcgtcacgaagaaaacgcttgtattgtcagaaaagacgatcgt

SEQ ID NO: 18393 - DNA, 286 bp, Glycine max
cccacgcgtccggcaggtgtacaatcggtgagccttgacggaagcaaggacttggtgacagtgaagggaacaatggacgtgaatgagatggtgtcgtacctgaacgagaagctgatgcgaaacgtggaagtggtgcctccttcgaagaaagacgacgagttgaaagagaaagaaggtgacggtggcgaaaagaatgagaaagagaaagactgtgctcatgagaataatgataaagacgttgctgcagctgccgatgttattaacaaaatggactatatgcaccaga

SEQ ID NO: 18394 - DNA, 227 bp, Glycine max
  modified_base (110)..(111): a, c, g, t, unknown, or other
ggtgggggatatcgaagggcacttttgaggctgatgaaagtcttttcacggtcatggggactctcgatggagaaatggcttcatttgactttctaaagagttcaatgganncatgttcaacgtggagggagaccggtgaaaagagacgggagatcaagaaagtgcttttcaaaggtgtttgatttgaaatggcgacggaaaaaatcaatgcttgaggaaattatcac

SEQ ID NO: 18395 - DNA, 454 bp, Glycine max
  modified_base (400)..(400): a, c, g, t, unknown, or other
gctctgtttctgtctctgtgtttgcggctgaggattccgaacgagcgaccttcttcgtttctcgcaaagtttaagtcatcatgggtaaggaaaagactcacatcaacattgtcgtcattggacatgtcgactctgggaagtcaactaccactggtcatttgatctacaagcttggaggtattgacaagcgtgtgattgagaggttcgagaaggaggctgctgagatgaacaagaggtcattcaagtatgcctgggtgcttgacaagctcaaggctgagcgcgaaagaggaattaccattgatattgctttgtggaagtttgaaaccaccaagtactactgcacagtcatcgatgcccccggacatcgtgactttatcaagaacatgattactggtacctnccaggctgattgtgctgtccttatcattgactccaccactggtggttttgaagc

SEQ ID NO: 18396 - DNA, 236 bp, Glycine max
gtgtatgatgaatttgttctccataatctaagagataatagaatagacagtattggaagtttcgacggcaaagtgccaatgtgctcctatgattatgttccaagcttggttttgccatattgtaattaagctaccttgcacttgcttgcttgtatgaatgtaaattatgttaatggtttcagaaccttggctatttaatgtatggacacggctgagattgtgaatacttctggtgg

SEQ ID NO: 18397 - DNA, 153 bp, Glycine max
acgcatacgcttgcgatgtctacatgtaccgatctatcgttcttcatgctcgtacactctcaagagctaggtgccacaatactgtggaccaatcacatgcccatctaatacaactaccatgtatatttaaactatactgatgaagccctccaa

SEQ ID NO: 18398 - DNA, 386 bp, Glycine max
acgcttcttcttatgcgattgactagtgtccaccacggtgacccatttctgaatctactgctgtggagctgatttgttcactctaatatgtgtacagtgctaaagggtaaactttggaacctagcttcctagttgaatcatcagaagcttatatgtcgaatccatatttttctggacgtttagactgtctttgatttccctgggaaatgatgatgatgctcgaagatatgggattttgaggggatgtcgatatgaatgctgcacccctcggagaaggggatattaccagacggcaaactgaaccagaggtgatagttgacgacgattatagtgatgaataaatcgatgtcaaatacctccacaggacgatgtggatggacaaaatg

SEQ ID NO: 18399 - DNA, 210 bp, Glycine max
cccacgcgtccgggctttgatacagttttcaggttgagtttgtttcgttagattagacacttttggtgatgttatggaccaccaccttttggttgaaggatacttcagcactgattttaattatgccttgcattttggtacatggaaatcatttgttgacttatctaaaaaaaaaaaaaaaaaataaaaaaacaaaaacaaaaaataaaa

SEQ ID NO: 18400 - DNA, 402 bp, Glycine max
gtcgaaccattgcctacccctgaagagatagaggaaaaatcaaggccgtacacatgcttggatgctgtaacttgtcgatgttgttgatggtttttgtacaagtagaagtctttccgtctagtagtttaatcgtgaaaactcataagtatgtcgatgtacccttttgctttagatgggtaggtgttatctttaggcaatttgcttcatgacatcttctgttcttcattttttccctaaattttggaggtagagttccaagttagatgtacagttgcagtgctattgcgttgttatgtttttactgtttagtctgtaaacctggatatccagctattatcaaaccgactactgcctggaacgctagagacagagaatttattttagttaggtgcatgccatggt

SEQ ID NO: 18401 - DNA, 464 bp, Glycine max
  modified_base (416)..(416): a, c, g, t, unknown, or other
cccttctccaacatgccaaacgacagcgttctgagtcttttcttgttcgttaccctcttgacatgccttctctgtgctaattcccacgatgaccatatcttcctaccgagtcaactccatgacgatgactcagtgagtcgcactgctaccgacccaaaccttaactacaagccggtgatcggaatcctgacccaccccggcgacggtgcctctggccggctcagcaacgccaccggggtttcttacatcgccgcctactacgttaaattcgtggagtccggaggtgctagagttattccccttatctacaatgagtcacctgagaaccttaacatgaagctcgatttggtcaatggagtgctcttcactggtgggtgggctgtttctggtccatatttggatactcttggaaacanttttaagacagctttagagaaaaatgatgctggagaccatttcccagt

SEQ ID NO: 18402 - DNA, 235 bp, Glycine max
cccacgcgtccggccacgcgttcgggggttcatagatttagggaatcgattactatactagtaataaattgtacaaaaaataaaaatataaataatataaatataaaaagaacaaacacaaattttatgggaatagtcgcggtatttaaaataaaaaatggaagtagaccaattaaaaaaggaaggagatgtttgaataaaaataatttcccttcaaggtcttaatttttgagaa

SEQ ID NO: 18403 - DNA, 469 bp, Glycine max
cccacgcgtccgaccacgcgtccgggggttcatagatttagggaatcgattactatactaggaataaattgtacaaaaaataaaaatataaataatataaatataaaaagaacaaacacaaattttatgtgattagtcgcggtatttaaaataaaaaatgaaagtagacaaataaaaaaggaaaggagatgtttgaataaaaataattccccttcaagttcttattttttgagaggacaggacaatatgaatgttttattatgctctatcaacacattaaaaagattatatgatatatctgctgtggaagtaggtcaacatttctattggcaaatagggagtttccaagtacatgcccaagtacttattacttcttgtgttgtaattgctctcttaatgggtttagccattctaattattcgaaatctgcaaaccattcccgttttcggtcagaatttctttgaatatg

SEQ ID NO: 18404 - DNA, 350 bp, Glycine max
cccacgcgtccgatggcttcatgtaccgcaccttcctccctcatgctcgtccactctcaagacctttctccctctcttcgctccttctctcacaggcccatttctagaaccaccttctctctctatcctctccttttgaagccctccaaatggctccacatagagcccaaatccaggacttgccatgccctcgtcgccgctttgtctgcagaggtccaagtgcccgaaactttcgacgacacggaggaggacgacggtgctgatggctccaccggcaccaacaccgtccccaccaccaagcctaagaaaggcaaggccgcattgcctctcaagagggacaggactagatc

SEQ ID NO: 18405 - DNA, 294 bp, Glycine max
gatcaccaaagtacttgtgagtgtctacccaacacacactaagatcaacatggactactacacccgcgtttcagaagttgagagggaacctatcatggagtattccacaccacgaccaatgatgggcaactaccaccaccctaatgctcaccgtgtcctcaacgagaagattgctcatgaggaggatgtgattggaggatcccgccacaaccacatgcatcaccaccaccctgagactcatgagagagtcaaggaggtggaatatgaacaagttcactgaatgcgcatagtcta

SEQ ID NO: 18406 - DNA, 268 bp, Glycine max
acgcgtacgcttccgcttgagtgctgatcgacgtttagtattatagattggtcagtctttatcgcgaacggtcaatttactcagacatgccgactatcaaatactgaacacattatatattcagaataatcatccacagagatccaccatcgaacgcttggctctttaactcggactaacttatcaccagattaccatatctttcggcattactcttccatgcttccctctttcatcataaatggaatccaattcttgtttctatgct

SEQ ID NO: 18407 - DNA, 181 bp, Glycine max
tcgctaatattggataaattgaggcacactagcctgtgaggctgaaaattactgatcctgggacggcatatcatcctatgatggatgatgactgttctacatccgttgatcgacgaagctttaatgcatgtattgatgatcaaaattacactagcgcatgctcaagcaatatggattgctc

SEQ ID NO: 18408 - DNA, 358 bp, Glycine max
cccacgcgtccgggacaagcgaagaatgcttcatgttgtatatcgtgttggggacttggacgggaccataaagttttatacagagtgcctaggaatgaagctcctcagaaagagggacataccagaggagaaatatactaatgcctttcttggatatgggcccgaagactcacactttgttattgaactgacatacaattatggagttgacaagtatgatatcggaactggatttggccattttggtatagctgatgatgatgttgcaaaagcagtggaactaatcagagctaagggtggcaaaataactagggagcctggtcctgtcaagggaaggcgttcagtaattgcatgtatt

SEQ ID NO: 18409 - DNA, 407 bp, Glycine max
cccacgcgtccgcataattcagctgctgcactgcaaaggtttggacagtgttacgtgcttcacgaaacatgacctctgctcacgaccttactgataatgaagatgatggacagcagcagtcagaatcaccaatgcagcccccatctgtaaatggaatatctgatccaggtattagtacccagaatgtcaatgtacagtatgcagcacctggccagcttggaactgggcatgcaatggtaccacatgtgtatccatatccagatccttactatagaagcatctttgctccctatgatacacaaccttatcccccacaagcctatagtgggcagccaatggtccatcttcagttaatgggaattcagcaagctggtgttcctctgccaactgatgcagttgaggagcct

SEQ ID NO: 18410 - DNA, 383 bp, Glycine max
ggacagggcaatttccgatcaagaataaaatgggggagaagtttttagctgtagcaactaatacgcctttttatgacgatgatggaagcttagttgggctaatttgtgtctctattgatttgcggccctttctcgaaatgaaagttccaatgcctagtgtaaggaacatcgagtcagattcagattcaggtggaacccgacctagaagtagcattacaaataaacttggccttgacactcaacagccgcttcaagcttctatagcttcgaaaatttcaaatttggcatcaaaggtgggtaacaaagttaagtcaaggatctggacgggagaaaacaatttggatcgtgaaagtgggagtggtgaaagtcatcattctgagcat

SEQ ID NO: 18411 - DNA, 473 bp, Glycine max
  modified_base (178)..(178): a, c, g, t, unknown, or other
cggtcgaccacgcgtacgcttttctctcgtcctcgcggatggagagagagaaagtttgagagaaagagcggtggttggtggttgtggtttggtgaagttcgattcgatgcgatgcgattgcgttggggattttgattctctctctctcactgtgcggtctctaattcgcttggtgcangtcgggaaccggttttcgcgcggaatggaggaacggtcgccggcggcgaattggatcccgccttgcatcaactgaatcggaggccgcggtgaagctttgcctcgttttccgctcagatctcatctgcgagattctaccaccagtattttttaaatttattttaatctctgcttatcagatccgaaacgcttctagatttaagtttatcgtctctatgcagaaagggggatttatgcggtagatcccgatgcattggatctacatctaagaaaaattagtttagttaaaaaaatta

SEQ ID NO: 18412 - DNA, 312 bp, Glycine max
aatttggttgccatgtataaaaaaatccatagaggggacttcaagtgcccaccgtggttctctctcgatgcgagaaagcttgttacgaaactgcttgatccgaatccgaatacgaggattagtatttctaaagtgatggagtcttcttggtttaagaaacaggtgccgaggaaggtggaggaggtggttgagaaggtcgatttggaggagaagattgagaatcaggagacgatgaatgctttccacataatctacttgtcggaggggttcaatttgtcgccgttgttcgaggagaagaggatggaagagatg

SEQ ID NO: 18413 - DNA, 343 bp, Glycine max
cccacgcgtccgcccttccattacaactccttctcgcgcgatagattgctctttctcctctgctccttcctttcccattcctcctttccctctgccctccgcatcccccaattgtcccccaaactttctccctccgccgctccgccgtcgcccctctcgctcgccctgcgccgtcggcttcgcccctggacgccatggcccagaaaatcagaaagtgcacgcgccgacacggctcgtactccaaggcccgcgactactccgatgtcaacgtcaatcgccccaaggaatattgggactacgagtcccttaacgtccagtggagggagcaagatgattatgacgt

SEQ ID NO: 18414 - DNA, 392 bp, Glycine max
cccacgcgtccgatcttatattgcaagacctgcgtgagcgaatgattgatatgctgtgtctggttctgattcggcgaggcctcttacggctggagtcggaattggaggaaggacaacaccattaacaggctcagatggtgtatgatggcccatgaatcacgctctctggactcagacaaaaccgtcaatgctggattctggatcattgaaggccccaaaactgtacaggattcggccaagatggagcttgaataaattcatgacaacattcgaagtccgaagaacaaaatcgacttacacatggataacgttcagaggcttaagatacatcaaataattaaaaacgctaaacttggaatttaaactacgagcaagagaatgaacttgctaac

SEQ ID NO: 18415 - DNA, 362 bp, Glycine max
agaaaacgccctacctaaaaccctaatcgctcataaccctacatatggcgtgatcgtcgttgattcgcctccgccgcaccatcgggacactctcgggcatctcccactccttgtgcgcgactcatgcggcgtctgtttcctcccccatcgggtgcggcgtttcatggagtatgcagtcaccgacgaacggtgtggatcagtcccgtacattcaggtcaagctcaatgtcactactatgttttcgatactcgcagctgcagaacaacattcctgatgagactggtcccgataccattctattcgaaggctgcgattacaaccattggctcatcgacatggaatttacagacaacaactaaccc

SEQ ID NO: 18416 - DNA, 362 bp, Glycine max
cccacgcgtccgcgccgccgcagcagcacactccgaggttgcagggtgccaatggcggccttcgaccactttgggaacatgtacgacgttgcattcaaaccccgcttgcttcaaaccctcatcagagaccacctcccggacgagaaacgccctttttcgaacccttcagaactctccaaggtcgtttcgttgatcaaaacgcactctcttctctgcgagtctttcgcagattccacgcgccccaaactcatcgaagcatggaaatccgcactcgcttgctggctcaacctcatttactccctcctttctaccaccatgccagataaatgctgggcgggtatctccctgtcggggctacttgt

SEQ ID NO: 18417 - DNA, 363 bp, Glycine max
cttactagaacgaaaaataaaagaagagcaattttccctcaccaaagaagaagaagcaaacaatggccgatcaacttaccgatgaacagatctccgagttcaaggaagccttcagcttgttcgacaaggacggcgatggttgcatcacaaccaaggagcttggaactgttatgcgttcattggggcaaaacccaactgaggcagagctccaggacatgatcaatgaagtggatgctgatgggaatggtaccattgacttccctgagttcctaaatctcatggccaggaagatgaaggacactgattctgatgaggagctgaaagaggcattccgggttttcgacaaggaccagaatgggttca

SEQ ID NO: 18418 - DNA, 378 bp, Glycine max
ggccaccgttccagggcagctcgtgtgggagatcgtgaagaaaaacaactcctttttggtcaagcagttcggaagggggacccagagcgtcgaattcagcagagagagcaacaatctctacaacctcaattcgttcaagtactctggtttggcaaacaagaaaactgttacggtacagcctgagggtaaagatcaggctgtgttgttggctacaacaaagacaaagaagcaaaacaagcctgctgcattgcttcacaaatctgtgatgaagaaggagttcaggaggatggcaaaggctgttgaaaatcaggtggcagaaaattactacaggcccgatctcaagaaagccgccctttgcaggttgaatgctgttcacag

SEQ ID NO: 18419 - DNA, 343 bp, Glycine max
gccacgcgttcgaccactcgtccgctgagatttaggaaaaatctccatctctttctagttcaagctcgtcgatttgtgagaaccatgtgatcaactgtgtatggcttgtatcgaataatgcttcataagaagagttgagtattaagattactcattaaaccatcctgttgctacgaaaattcagggctaatcttttggcatacaagtatctgcggctactgcaaacaaagtcctatcttcactgggcttctgaagtcatatgactttggatgtatgccaaagtgtaagccttatggtttgtcagatgctattgcaaatgctgaaaagctgtcttgaatatctt

SEQ ID NO: 18420 - DNA, 165 bp, Glycine max
ggctatcgttcgatggcagctaatgttcgatttcgtgaagaaaaacaactcctttgagtcgggcatttgaaaatgtgtaccgatagcgatcaaattcagtacatatagcatcactctctacatcctaacttcattcaagaactctgatttgtcaaactataaaac

SEQ ID NO: 18421 - DNA, 353 bp, Glycine max
ttcaccttgaagtatcctatagagcatggcatagtcagcaactgggacgatatggagaagagttggcgtcacacattttacaatgagctacgtgttgcccctgaagaacaccccgtacttcttaccgaggcaccactcaatcccaaggccaactgagagaagatgacccaaattatgtttgagactttcaatgtgcctgccatgtatgttgcaattcatgctgtcttgtctctgtatgccagtggacgtactacaggtattgtgcttgattctggtgatggtgttagccacacggtgcccatatatgaagggtatggctctttctcatgcaattctttggttgggacctttgt

SEQ ID NO: 18422 - DNA, 133 bp, Glycine max
gctccgtactatgaattgaaacgaagttcagcttcgcagggaggaagaaggtagtagagtggtccggcgacagtccaattattttcggagacggcacggtggtcacgtttaattagccaattgcgtacacttt

SEQ ID NO: 18423 - DNA, 286 bp, Glycine max
ctctaacctacctctttttcttctctctcaacaacttcaccttcttcctcctcgatcatgtctcacttcaagggcaagtaccatgatgagcttatcgccaatgctgcgtacattggcactcctggaaagggtattcttgctgctgatgagtcaacagggacaattggcaagcgtttggccagcatcagtgtagagaacattgaatccaacaggcgagctcttagggagctgcttttcactgctcctggtgttcttcaatatctcagtggtgtcatcctctttgagg

SEQ ID NO: 18424 - DNA, 369 bp, Glycine max
cttgaggatgttatggaagaggggggaaacattgtggactaccatggctgtgatttctttcccgagcgttggtttgattgcgtggttgtacttcaaactgataacaccgttttgtatgaccgtttgagtcggagggggtacaaagattcaaagctttcgaacaatattgaatgtgaaatcttacaagttctgcttgaggaggctaaagaaagttactcataggagaaactgattgcaatgaagagtgataatatagaagacattagtagaaatgtggcaactctgacagattgtgtcagatattggtcttttgccctcacaggtcttgacaaaaaaaaatgaggtacttttgtattatactcatttttg

SEQ ID NO: 18425 - DNA, 250 bp, Glycine max
actaaccacgatgaattgaaacgaagtaaagtgccacttggtgctacaaagtagtcgagtggtccggggacattccagtaattgtcagtgacggcactgtggtcacgtataaatagcgaattgggtacactctgtcaagtagcggacaaatagagagctcaagctaagtgtgaggatgcttgacaaacctaaatacatgtctcatctatgaaaccaacaacactgagtgaagaatgcatatcaaacccat

SEQ ID NO: 18426 - DNA, 375 bp, Glycine max
  modified_base (155)..(155): a, c, g, t, unknown, or other
cccacgcgttcgcccacgcgtccgccgcaacagagagtagaaaagatggcgcggttgatcacagtggtgtggtgcgcggtggcggtgctactgtgcgccgcggcgggcgcgtcgtgggtggaggaggcggcgaacccgatacgaatggtggcggnggtggaggcggaggtggttcgggtgatagggcagtgccggcgcgcgctgaagtttgctaggttcatgagcaggttcgggaagagttaccgaagcgaggaagagatgagggagaggtacgagatattctcgcataaccttaagttcatccgctcccacaacaagaaccgcttgccctacactctctctggtaatcattttgctgattggacttgggaggag

SEQ ID NO: 18427 - DNA, 306 bp, Glycine max
gccacaggctccttttgatcaggttaaacctgcacttcctgctcttgcccgtcttatccattcaaacgatgaagaagtattgactgatgcatgttgggcactgtcatatctttctgatggcacaaatgataaaattcaagctgtaattgaagctggtgtttgtccccgacttgttgagctgctgctgcacccatccccttcagtgctaattcctgctcttcgaactgttggaaatattgtcactggagatgatatgcagactcaggttatcatcaatcaccaggctcttccttgccttcttaatct

SEQ ID NO: 18428 - DNA, 423 bp, Glycine max
cccacgcgtccgctcattttctagcttccaaaccctaacactcctcttgctcttcgatcatgacctctccacaatgccgccgaagttcgacccctcccagatagtcgacgtcttcgtccgcgttaccggcggcgaagtcggcgcggcgagttccctggccccgaagatcggtcccctcggtctctcccccaagaagatcggagaagacatcgcctaagaaaccgccaaggactggaagggcctccgcgtcaccgtcaagctcaccgttcagaatcgtcaggcgaaggtcactgtggtcccctccgacggcgtcctcgttatcaaggccctcaaggagcccgagcgcgaccgcaagaagaccaggaacatcaagcacaacgggaacatctcgctcgatgacgtcatcgagatcgctaggggtat

SEQ ID NO: 18429 - DNA, 395 bp, Glycine max
gcagcatgtatgtagatgtctaatgggcttgtttctttcgctgaggaatcggattgatcatgattcattgatgtattgctcggtttgttatgaaaatttatcttaaggggggtctattattctcctaactcaaaaaaaaaaaacaaaaaataacaatgacaaaaaaaataaaaacactaaaactataccccaagaagatcagaaaaaacaatccactaagaaaccgacaaagactgaaagggcctgcgcgtcaccttcaagctcaccgatcataatcgtcaagccaatgtcactgtaatcccctacgtcgtcgacctcgttatcaaggcctttaaagagcccatacgcgaccgcaagatgaccactatcatctatctcaactgcaacatctcgct

SEQ ID NO: 18430 - DNA, 376 bp, Glycine max
agaaaactagacctggtcctgcccaggaagctgttaaagctagagccatgagagttcttaagcaaaaacgaatgtatgaaggccagcgtgacatgctgtacaatcagacgttcaatctcgatcaagttcaatttgctgctgagggcattaaagatgctcaacaaactatgacagctttgaagtctgccaacaaggagttgaagggaatgatgaaaactgtgaagatccaagacattgataacttgcatgatgagatgatggacctcatggatgtaagtaatgaaatccaagagactttgtgtagaagctataatgtgcctgatgacattgatgaggatgaccttatgggtgaacttgatgcattggaattagacat

SEQ ID NO: 18431 - DNA, 381 bp, Glycine max
ggcagaggagggaattaactttgtggtgaatgctaatatcgggcatgatcctttacattctgtcgataggcttcgggaggaaaataatgctattgtcttggctgtaggagccacaaaaccaagggatctcccagtacctgggcgggagctgtcaggagttcattttgctatggagtttcttcatgcaaacactaaaagcttgcttgatagcaatctccaggatggtaacttcatttctgctaagggaaagaaagttggggttattggtagaggtgacacgggcacatattgcatatggacatccattcggcatgggtgtagtagcatttgaaatctggaacttcttccttagtcaccacaaactaaggccccaagcaaacc

SEQ ID NO: 18432 - DNA, 400 bp, Glycine max
ctttctccaaacctacctttctatcttttctttttcatcggagcattatttgataccctcttgagtcctctctgcagcaacgcatttttcctcattctcttaaacaatttaacttctcctcgtttgatctgcataaaattgcattaatataaaaaatgaagaagtttgtactaaagttagatttgcatgatgacaaggataagcagaaggccttgaaaacagtttcaactctttcaggaattgatgccatagccatggatatgaaagagaagaaattaacagtgataggaacagttgatccggtaactgtggtgagcaaattgcgcaaatactggaaggcagacatagtagcagttggaccagtgaaggaacctgagaagaatgaggatcccaagaaagc

SEQ ID NO: 18433 - DNA, 343 bp, Glycine max
cccacgcgtccgcccacgcgtccgctctctttctctttctcactctcctctgatatttctatattttggtgctctgtgtctctacgatctggatccaacggtccaaaatgttcggggcttgtgctgcttgttttcccaggttttagagctccaaaccttcagatccacctcattcgtctccagatcttccttccttgataacgttttcgggttcgagaaggcacttgtttgtttgtcgtacgaaatggagactaaaccgagttcggtgatggttacgctcagttacggcgcgttgacgtgcgccgcggaagttctcgcgactttgctagcttctgctgtcgtc

SEQ ID NO: 18434 - DNA, 261 bp, Glycine max
agaagcgggaggactgcttacgttgcgcggacacgaagcattgacaccgggaccgtccaggagaacattatggaaccctgaccagtgaacagacataggcacatttaagttgtcagagagtgccacatgaagagcgtcttggacatgatggcacatgacgaccatactgagattgtagagcacggcatgaacctacccgagggtcagaagcagaacatacacatggtctacgctgtcgatgacgactataatctatatgtt

SEQ ID NO: 18435 - DNA, 386 bp, Glycine max
gggaatcttacgagttttggagctaaacacatttgtgcaggacacatatacactttttaaggctatcattttgtgagacactggtgctaatcgatgtctttgtactctttagccttgcctttttcacaatgtgtaccctttgatctaacattgaagatacaactctcactatactgactttattatatattatgcaatccctttgctacttatagctttgatttgtgagaaggacattatctaatcgtgatcaaggcagaacgatggatcatatcactactgaggccactgtttaccgatgctcaattggtccttctggcattattgatcggacaatagctttcaggggtctttattgccagtctatctcacattgtaggcaccac

SEQ ID NO: 18436 - DNA, 422 bp, Glycine max
ctcaactttcctaactttagcaaccatccaagaagttgatcagttccttgtctctccttgaattataaaaccattcacagtcttgaacccaatttcactctttgcacctcaaacaccttataagcctcaatttcacaaccaaaaatgcaaagttcaatctcacaatctgagatttgcatcactgattaccttctaccccaagaagttccatctcaatttcaatttccagatatgagcaacaataacataccaatgaaccataccaaccttcaaatgcctcaaatcacatctttctccaagccttcaaggtcctcatcaaatctaagcaaccgcaaaccgtccttgagatacatcacaatccctttcataacctcaggtcttacaacaactatgtcacaaacaacaacaacaacaacaatagc

SEQ ID NO: 18437 - DNA, 463 bp, Glycine max
caaaaccaaattgctttgcactactaaaaaactatcgtcttgctttccaagcaatcactaccatggggaactgcttggtgctgcaagagaacgttgtgaagatcgtgaaaaccgatgggaaagttcttgaatacaaaacacccatcaaagtggaagaggttctgatacaattttcaggccatgcagtatcagaatcactcacagtgctgcggtatcttgagccacatacaaaacttcttagagggcagttatattacctagtgcctctgccaccaccatcaccaaaaaccaacaagaaggtgaggtttgcggaaccagaagtccaagatgtacataaaagcaacgtggttaggattaagctggttattagtaagcaagagctgcagaatatgctgcagagtgaaaggttttcggtcagtaagaatgtgtctctagttcatgaggatttgtcttaaaagggtac

SEQ ID NO: 18438 - DNA, 422 bp, Glycine max
agaagatggagatgtatcagatctggagcaggagaatagcgttgggagcgttcgcgtttgttctgcttttcctatcggcctcagcagacgacgtcgttgtgctctctgaagataacttcgagaaggaagttggtcaggacagaggagctctcgttgagttctatgctccttggtgtggacactgcaaaaagcttgctccagaatatgaaaagcttggtagcagcttcaagaaagccaaatctgttttaatcggcaaggttgactgtgatgagcacaagagtttgtgcagcaaatatggagtctctgggtacccaacaattcagtggtttccaaaaggatctcttgaacccaaaaagtatgaaaggccacgcactgctgattcacttgctgagtttgtaaataccggaggaggaacaaatgtg

SEQ ID NO: 18439 - DNA, 317 bp, Glycine max
acgcacacgcttgcgctgggatgttaacgagctatttagagcctaggtgcacgtcattctctacggaagctaccggtaaacgtttaacaagccatctcgtagctactactacgaacgttattgctgccataatcaatctggtctgtcagtgcgaacgttgacgatggagctgatactggagggtgctgcacgtcctaagtcgaatacgtgactagagaacccacctactgaccgtagatgaacttaactggtaaagattctatcatgtttgaaaattcattcgaagaatagctcgctactgactatgcaattatgca

SEQ ID NO: 18440 - DNA, 362 bp, Glycine max
acgtagtgcaccgtgagggttgtgaagcatgcagagtagagccatggtgcacgtttctttctaccgaaacgatgggaaaacgttcaagaagcctcgtcgtccctacgagaaggagcgtttggacgccgagttgaagctggtcggtgagtacgggcttcgctgcaagagggagttatggagggtccagtacgccctgagccgcatccgtaacaacgccagatacctattgacccttgatgagaagaaccctcgccgtatcttcgagggtgaagcccttttccgaagaatgttccgttacggactccttgacgagacacataacaagctggattatgggttggcttttaccgtcgaaaactttt

SEQ ID NO: 18441 - DNA, 321 bp, Glycine max
ctttgatctgggtgagagaaacgcgtatcgatggattgggttcagtactggtctcacacggtttgttctaacaatttgtactgactgtgtattgatcgatacgggtcgctctcacctaggccagagttgcccaaactttgataacaccattcattcatcaaaagctccactgaatttacatttagtgaagtcaaaaaggggggtgaattcagaatggaagcccgaattggaaaagagtggtggataacatgaagatttgactgagaatgctgggctgacaagttcaaatagggaattaggtatgcattacccaattctact

SEQ ID NO: 18442 - DNA, 389 bp, Glycine max
cccacgcgtccgtcaacgtcgtcggtcttcccttcaggtttcgcaattcgcaatccaaagcagcttcaacctttcgtttcaatgtcactgtcttcgaagctaccgttgcatttctccggcaatgccagattcaaccgcaaccacccaaccatgttcaaaattcgagcctcaaattcaaactcttcatcttcatccaaactcgtcttatttagctccactatcgtcgtcacaacagcggtagcgaatcgcgtgctctacaaattggcccttgttcccatgaaagagtacccctttttcctcgctcagttcataacttttgggtatgtagttatatatctctcgatcttgtatttccggtaccgggcgagaattgtgaccgatgagatgct

SEQ ID NO: 18443 - DNA, 185 bp, Glycine max
ccggattccggtcgaccacgctcgtcgctgcgtgaaagacaaccttagttttaccctacaattacaacatttagttttcgttactgcacagtcaacctcaagatttctgaaggaaaatttgtttagcatgctagtgatcagaatccaaagttttctgactataatatacattttttttacccaca

SEQ ID NO: 18444 - DNA, 238 bp, Glycine max
aaaaaaaaaagaaaaaaaaaaaaatattacctttaaaaacaaaaaaaaataaaaaaaaaaaaggcaaaaaaaaaaaaaaaaatatgaaaaaaaaattaaaaataaaattctaataaggggcgacccttttaacggttccaatcttacgtacccttccttccaacgtcttaatatcttattggtcgaccctatattaattttagtggccatcgatttaaaacgttgtccactggaaaaa

SEQ ID NO: 18445 - DNA, 355 bp, Glycine max
gaaggacgttgccgttgagggcttctgcatgagccgctgtggcacccacggctctacccggaacgttaaaagtaatgcccgaaccgcatatatctgggttggaaactccgaaacacagtgccccgggcaatgcgcgtggccattccaccaaccgatttacgggccccagacgccgccgttagtttctcctaacggcgacgccggggttgactgaatggttattaacttggccacgcttctcgctggcacagttaccaaccctttcaacaacggttacttccagggtcccccaacggcgccgttagaggccgtttcggcttgcactggtgttttcggaagtgggtcgtacccgggt

SEQ ID NO: 18446 - DNA, 330 bp, Glycine max
cgtggcagtggtagttgccaaactagtagcatgaagtaagtcacgtttttctccgttttcatgtcatcacaatattaaagctttgagtttccttcagtatgggggacacttacgttttggccacaccgaagcgcaaccgttccgatgacgtggacggcggcgaggcgaagaagctgctgttgcagcagggcgaggcagacccggcggcggcgctggcgagcgcgcggcacgagttcggggagcacggcggggtgaacatgtcgatcgaggcgtctgcgacgttcacggtgatggagccggagacgatgcggcgcatgttcgccggagaac

SEQ ID NO: 18447 - DNA, 370 bp, Glycine max
acgcttattattttggttgacgttgcatttgcagagcacatggaaagcaaaatatctgatctttgtccctcgcttgcactgagtaggcaatggcggatgaagcacagtactcatcgggacccgattccgcgcccctcaagcgcaagtacgaagaccaaccctacggcatcgagcttgccaagcagcgtgctcaagaagtcgccgcacgccttctcaacgccgttcctccttcgccactcgacgccaagcgtcccaaacccgacaccggcttcgattctcttgatttgaaacctctgtattccgcatctcctacatccgtttcctacggtcaccaaggttccagcaaggaagattgatatccctaatggca

SEQ ID NO: 18448 - DNA, 338 bp, Glycine max
cccacgcgtccggccgtttccagaaaaagaaaataaaacataattttgagagatagaaagaaataaattaagaaaggaagagagtgttgtgttactgtggagtgagaggagagagagaaatgccaagtgtggctgtgaagctctacagcgtgttcttcaagttcctcttgaagcaccgtctgcacaaccgaatccaaaccactttcgaacccttcgacccgttcggcgtcacgacccgacccgaagaatccgtcgctccagcgaacccttacttctccgacggcgtcgccactaaagacatccacatcgaccccttaacctatctctacatccgaatc

SEQ ID NO: 18449 - DNA, 413 bp, Glycine max
  modified_base (357)..(357): a, c, g, t, unknown, or other
cccacgcgtccgctccttccacgaggaaaacatagtgtctccctcctcagatctaaaatctactctctttttcccttcacacggaactgtgacgatgtcgagcgacagcgacgaagacgagcttctccagatggcgctgaaggatcaagcgcagcgagatgtcaactacggcaaatcctcctccaattcccggaagcctgtcgccaactacgttcagcagcccaagaaacccgctcctccgccgaaacagtcgctgggcaaaggcagagtcgccgccgacgacgatgattccgaaatcgagatgctcagcatctccagcggcgacgaggacaacgtccaatatccggttgctgcctncaggaacaaaggcgccacggctgccgcaggcggaagaccggtgcgcgaagacgatc

SEQ ID NO: 18450 - DNA, 332 bp, Glycine max
agaagacccatctttgggagagaaaaaatggtagtagtagcacctgtcctgtcgtcactcggaaacgaaaccctagaatactagcattgcaaatccataaatacccctccctcttagcctaataaaatctatttgcaaatccaataactaaacgaaacgaaaacactttctctccgattcttagcatccaatcagaggttccatttctcttccttctttcgcaccgaagttccaatcggtaaattgcttctctctttcgtcaatcttcattccttctctctgaacaataactgtaataacgctcatgctgcgtgagctaagggtaagggttt

SEQ ID NO: 18451 - DNA, 186 bp, Glycine max
ataagacccatctttgggagagaaaaaatggtagtagtagcacctgtcctgtcgtcactcggaaacgaaaccctataatactagcatcgcacatccataaatacccttcccttttaacctaataaaatctatttgcaaattctataactaaacgaaacttaaacactttctcttcgatgcttaaca

SEQ ID NO: 18452 - DNA, 306 bp, Glycine max
agaagacccatcttcgggagagacaacatggtagtagtaacacctgtcgtgtcggcactcggagacgaaaccgtagaatactagcatcgccaatccgtaagtgcccctgcctcttagcctaataaaatctattggcaaagccactaactaagcgaaacgaagacactttctctccgagtcttagcatccaatcagaggttccatatctcttccttctgtcgcaccgaagttacaatcgatcaattgcgtctctctttcgtcaatcttgattccttctctctgaacaataactgggataacgctcat

SEQ ID NO: 18453 - DNA, 419 bp, Glycine max
gctttggaagcctgcttcggttaccctctgaacagttaaaggaaattgcttgtggtcttgaagcttctgaacaatcgttcatttgggtggtgaggaatatccataacaacccatcagaaaacaaagaaaatgggaacggaaactttcttccggaagggtttgagcagaggatgaatgaaacgggtaaagggttggttcttagaggttgggctcctcaattgttgattttggagcatgttgcaatcaaagggtttatgacccattgtggatggaactccactttgtaaagtgtgtgtgcgggagtgcctatgattacgtggcctgtctcggccgatcaattttcgaatgagaaggtgataactgatgttctgaagattggtgttcaagtgggaagcagagagtggttgacgtggaattca

SEQ ID NO: 18454 - DNA, 322 bp, Glycine max
cggaactttctcagattgacacacaccatgaaggaaagtggtttcgagaataatgatacaaagcatgctgctgctgatgcgttgtttctatattcaaaatttgcaatggcatgcattggatgtaaggctcgtccatgtgattcgaggtttcatttgatgaacgagatttcaggtatgccctattctctaaatagggagtcaccacagaatgcatcatctgctgatgcaatgggtgagtcatgcagcacaggaacagcatgacttgatagatcagacagttttcgtgcactctagttgagagtggactgtgaccaatgttttt

SEQ ID NO: 18455 - DNA, 111 bp, Glycine max
actcggtctcaattcgacccacgcgtacgcgcactcctagtggcaagtacatcccaccctgctttcatcatcccggccatcgcgcttctgggcatgcccctattgaaaccc

SEQ ID NO: 18456 - DNA, 270 bp, Glycine max
acgcgcacgcttagggtcaagcatctatcgtctgatgctctcttcaactcgatcctattgctactaggcatgctcctgttgatacctaggacggattctcaacatgatgcgatgcaatttttgaatgaatggatgacttattgactcatgcgtacaaacatcaggcagctatatcaagtttactcaaggttgcaagaatatactggacatgatcaatgatgtactaatcttgataagtatgtgcgaatgctgcatacgaccagcgtgtca

SEQ ID NO: 18457 - DNA, 324 bp, Glycine max
gctgagagagcgcgctgcggcagcaagtcctatcagtgtaagacagatgctcgtaatgaagacgatcttgaacaatgagacaatgaatattcccgacagcatgagcataacggatcacgctacagttatcgaggtagcgggaactcgtgtaaaactcgtgctagacttacaccgtctgaacctggacttgcaacttattaccgacgatggccgccaaaggaagctcaagagtgacacttggcaaggatctcgtaaaagctccatcgtcattcgaaccgcactcaggcacgtttagaatctgaacaccctaataaccaatggata

SEQ ID NO: 18458 - DNA, 397 bp, Glycine max
catgacttgattcaggacatgggcaagcgaatagaccaagaatcctcagaagatccagggaagcgaaggagattgtggttaacaaaagatataattgaagttttagaaggcaactcgggaagtagagagattgaaatgatatgtctggatttatccttatccgagaaagaagcaacaatagaatgggaaggagatgccttcaaaaagatgaaaaaccttaaaatacttattattagaaatggtaaattttccaaaggtcccaattattttccagaaagtttaagattactggaatggcatcggtatccttctaattgtttaccatctaattttcctccgaaggaacttgctatatgcaagttacctcaaagttgcattacgtcatttgggttccatg

SEQ ID NO: 18459 - DNA, 309 bp, Glycine max
agcaaagcaaagcagagccaacaacatgaagatcaaaaccaacatcaacaaccacaagaagaagaagctggcaaattagaagaatcttcagttgaaagggaagaacacacaagaacaaagagaggaagaaacgcgaatgaagggagaattagagttgccaccagggttcagatttcaccccactgatgaagaattggtgaatcactacttgtgtaagaagtgcgcgggtcaaccaatcgcggttcccatcatcaaagaggtcgatttgtacacgtatgatccatggcaactttcataaaatgggtacta

SEQ ID NO: 18460 - DNA, 276 bp, Glycine max
gcaaactaattgccgttgagctctttgaagagccagcgtagcgaacgacattggtgaatccagaggtgctgatcggcgtatacgacagcaagcagagcacgtacgcgctgtatagggcttttcatgacttattcccgagcccaatctgaaacgctcgtactaatgcgctcgaggtgcatcgacaactatcgactggcgctaaccgctcatatataccaatgggatatttcccaaaggtgcctctgatttgtcagatagtgcacgctgactgctatg

SEQ ID NO: 18461 - DNA, 412 bp, Glycine max
cccacgcgtccggataaacttaagaattcaattattgaaattgaataagtaaacaatttaattggattggtcgaatggtatcaaaaaaatggagtactaactcccatttcttatttattattgaattaaccgatcaacttgctttgttatcgaacatttctttttgatttcaaaaattttccggaaaaaaatttgaatctatttttatatgcgaatcaatcctactacttctggtcctgaggtttctgcgcttgaaaaaaaaaatctgggacgtatcgcccaaataattggtccggtactagatgtagcttttcccccaggtaagatgcctaatatttacaacgctctgatagttaagggtcgagatactgttggtcaacaaattaatgtgacttgtgaagtacagcaatta

SEQ ID NO: 18462 - DNA, 416 bp, Glycine max
cccacgcgtccgctttttctttttccatgtctcaaatgatcagaaaatcaatggaatgaagaaaatgactatccatctatctatgtagtcttgctttcaataatatctacctagatattatattatcatctcttttcccagcacaagcaccggttatagaggctagcttctaacatgctgctttttggttttatatatatttgttttggcagtacctgcttcctcaaaactactatcggttttggaatttgccccaggtagctagtttaggacacacgatttttttatctcttcaaaaatgatgtctgaagaaaccttttctgttcctcccaactccaccattagagccacctccttggttcatcatgttcatgttcaacccccaagcccaaaccctaattcaaatccagcttaga

SEQ ID NO: 18463 - DNA, 287 bp, Glycine max
cccacgcgtccgcttaatcttacgccatgaattaaaggaactgaagatcaatacgatgtcaggagcgagtgtccatgtatctatgtagatggactcttaatgagaactacctacacattatctgatcaccgtgctcaccagctcatgcatcgactatgaatgctcgcttctaacatgctccatgttgaagctatgaatatatgattatacatgaagcaagtattctactatacttttggatacctaatttgcacaatgtaactagattacatgaatcgaccaatttg

SEQ ID NO: 18464 - DNA, 344 bp, Glycine max
ggcgctcctagtggcaactacatccgaccctgcttccatcaacccggccaacgcgcttttgggcatgcccgggtggaaacccggtccccatttccaggatgatatgaagagctatgtgaatgaaggggtgagggtgttggtacatgggaagagcatagttgcggaagatgagttggacaagaggtgggaagaagttactggggaggttattgatgaagtgatcttcttcagcaagcacactgctgcctccaacaagcctgccctgactgttcaccctattggagttcctcatttgcgccaaggcgatgttcccccccaaggcggcagacctggatgggcagctc

SEQ ID NO: 18465 - DNA, 420 bp, Glycine max
  modified_base (307)..(307): a, c, g, t, unknown, or other
  modified_base (371)..(371): a, c, g, t, unknown, or other
ccttggagaccccaacgtggccttccagagcgtgccgtttcagttcttcgggcttggctctttgaacattttctccatccgtacccaagcgatgttgataagcatattttagcacgccaaaccggtctctcgagaggccaggtttcgaattggtttattaatgcaagggtgagactatggaagccaatggtagaagaaatgtacttggaggaagtgaaggatcctgagaacaacatagcttcctcagaaggggctactgatcaagacaatgatataaacccaaataatgttcaataccctccacctnctttatcatcaagatcagaggatcagaagccatcactggttcgaattgactccgagtgtgcgtnctccatcatcaacaaccacagtaccccagattacaaaaacgatccaaag

SEQ ID NO: 18466 - DNA, 297 bp, Glycine max
cccacgcgtccgcccacgcgtccgtttcgttattctcttattcatccttctcttctgaataatccagatctctttctgcccttttctccgtcacgcttttcgtgaccggatctgtatggatttgatccagatctacacgccgatggtggttttggccgggtctttcatagatctggtgcgtagaggctcagatctacggtaccgaggtgtgtgattcatgttcgtcttgcttttggaatctgtttcgtagaaaagtcgttggtcttgcatatggcatggctcttgaagtattttttt

SEQ ID NO: 18467 - DNA, 358 bp, Glycine max
cccacgcgtccgcccacgcgtccgtttcgttattctcttattcatccttctcttctgaataatccaggtctctttctgcccttttctccgtcacgcttttcgtgaccggatctgtatggatttgatccagatctacacgccgatggtggttttggccgggtctttcatagatctggtgcgtagaggctcagatctacggtaccgaggtgtgtgattcatgttcgtcttgcttttggaatctgtttcgtagaaagtcgtttggtcttgcatatggcatggctcttgaggtatttttttgcaggtacaacagagaatcgatgacaagaacgcaaattcgacggtagatccagccgattcc

SEQ ID NO: 18468 - DNA, 455 bp, Glycine max
cccacgcgtccggtttgtgctgagtttggtggatctgttttcaaacggcttgttggagaggcgctttcaaggttagatgctgtgataaggcatccaaatgcactacattctgataacataatggcatatgacaatgctgtttcagctcttggaaaaatatgccaattccatcgtgatagcataaatgcagcacaggttgttcctgcctggctaaattgcttgcctataaaaggtgatttaattgaagccaaggttgtgcatgaccaactttgttcaatggttgaaagatcggatagagaacttataagtcccaacaatcaatatctttccaaaattgttgcagtttttgccgagattttatgtgcgggaaataatctggcaaacgaacagactgttagtcggatgattaatttattgaggcaacttcaacagactttaccaccttctacacttgc

SEQ ID NO: 18469 - DNA, 264 bp, Glycine max
gccagtcgaaccccctcgcttattcggcatacacatcgtctggggctagccaccgagtgcagtgcaggcatcggaaaataatggcagagacagatctcgtcgcctcttcagatggagaaccctcgcaatcgctggcgtcgattgcggagaatcttcagcgttctgccattcaatctgctcgaactgtgcaacatagctcttcaactcatttccgagcctttcagaattttttaccagaagcagtatcacagaatagaacatatg

SEQ ID NO: 18470 - DNA, 75 bp, Glycine max
caatgttgaccaatacgtggacgctctgaacgtgcttgagaatgaactacagctcacatggttcaacataggata

SEQ ID NO: 18471 - DNA, 289 bp, Glycine max
gaacagagtctcctctctacaccttcgctgcgctgcagctcacaactgcaacttcgcacagatatacatatatattactctatggtcacacatagttaattgtatatattactactacgtagctggcttttaataggtcgtatgtaggagtaatcgatgaattcctgcatatatcgatgaagccgatttatgagattgatgttcctgtaatacgactattaccaggaaaagcgcgaagcgaaagcagcagcacctactgctcgagaagccatactgaggaataatgatg

SEQ ID NO: 18472 - DNA, 170 bp, Glycine max
cttacatggctctgcatttgacatttgagaaaggaatggtggaactttcattctgggattgtgtggggtcaagagaggagatagccagactgtcatagtttagataataggtgcgtgcctaacggtacatgaataggtcccatctgtggcaattagctctgcagatgcga

SEQ ID NO: 18473 - DNA, 469 bp, Glycine max
  modified_base (440)..(440): a, c, g, t, unknown, or other
ctttgcagtgatgcagaatctctagatgttgaacctgtgaatgaaggatgctccacttcttttgaagaggttgtagcagaaagaattcatagggccagtgtaggaggcttgcatgccttgcttccaatggctaagtatgatgctaggtttgcttcttttctctctgtaaattaattggtgatgtctaccaataattttctttcagagataagaaattttttaccactgttttctcactgtcattcatggcagaatatgaactttcttataagctgtggacgtaatcctcttatggaagatcttcctatagtacaatacagataatggtttaattcatatatatgttatcctgtcaattgaaaaaataagtgatgctaggatgtttcagtatgtgttatatcagggtagttaatcacactggatttctgtcacatggcctncccatgatgcataagcagatgtgtggtgt

SEQ ID NO: 18474 - DNA, 372 bp, Glycine max
cggaccgacccacgcgttcgcatgtgctatacttctacttaaactactagttgacttcaacaaccgggatcacgaatttcttggcgacttacgaggctaaactacatatgatcgtatcgatatcttccaattgcgcctgctgatcttcccgaacgaaatcatctttcctttcacgaaccttgaattcatttgagactcatcttcaacagtatatattccatcgcatagtacaacatgctattacgggtaatccattattgacaatccgatgcatcatggcaaacggtataactgattttcaactgtgaactgattgaactaccttgtaccgcagactacaagaaaagcctgtcccggttcaacgaactatgc

SEQ ID NO: 18475 - DNA, 437 bp, Glycine max
cttggtttccaattgcgtgcacccatgtcctcttttctctccttatcactctctgcgccctccctccacgattcttccttcctccatggaacaaagctctttcccttttctcgaagagtggcaccacgccgcttcaactcttcctctgccaagtgctccctcgaccacatccccaaacagttcagaaaggaaaatctcaaagatggattgatggaaaactacaagaatgcacctcaatctctatatggcctttctccttcacaaatggacatgttcatgacagaagataatcctatccgtcagcaatctgaaagagttacagaggaaagcatctcgtctgccaagaattatatggataatggtggaatgtggagtctatctggcatgggaaaaagtgatgcttcaaaatacagcatgagtgttagtatgtatcgagg

SEQ ID NO: 18476 - DNA, 455 bp, Glycine max
  modified_base (385)..(385): a, c, g, t, unknown, or other
ggaagaacgaacctgtttaattcccccaaatcggaagttgatcctgagaccctaaatagccggtaacgttgtgtctatgtttttgaattatggacgcgaaggatatcctgggattgcccaaaaactcgttcccatctctcgagaagaaatctcgtcctcccaaagagtctcaaagaaaaccagatggcatttcgcgcgaggtgtatgcgcttacgggcggattggcctctctcatgcctgcaattgaagcctctcagttgaagaaaaagcctcttcctctcgaaaaaatcacttggcagtggcttcctttcaccagttctgctcgtaaagataatcttcatctttaccattgggtacgagtcatcaatggtgttcctcctacggnggactattcttttgccaagtataataagtccgttgatgttatcaaatacacagatgaggagtatgacaag

SEQ ID NO: 18477 - DNA, 282 bp, Glycine max
gcctcgcgtacgaccattgtatatgtatagtgctacagaaagggtatgggacatgtacatgcgctgtctaatataggacatgagtttagctgctccatgacatatcatctgaaaacaactccactatcgtatatggtaatcaagaattatgcaataatagaactattgatgaataggaggggataatgagacaaattccaacaatcaaacgagcgacaattatgaagatatgcaaggacagattatcatgtgtgcccacttcgataattcactgcaagcgat

SEQ ID NO: 18478 - DNA, 359 bp, Glycine max
cccacgcgtccgctctagcatcttccttttatgttgggacaaccagggttcgtatactgccgcatgcatatgatctttatagagcgcacagttctgcatggtaccttgatttatcatatatatatgcaaatcatagaatggatttttattccacagcctgggacatcataatccctagtggtggtattaagtttgctctccttgtatactttcagcagagattaggcagtcggtgcattcttccaaagaggttcagagaaagtactgcttatgagaaagtaccggttattggcaatgacgatttatgatgcattgactgcactttgtaaaatgatttttatccccggacattttttatt

SEQ ID NO: 18479 - DNA, 459 bp, Glycine max
cccacgcgtccgcccacgcgtccgcccacgcgtccgcccacgcgtccgcttcgagtgaggtatttgctgcttctgatccttgctcagtttaattctaaattaccaatttcaacattaacttgtgattgcataaaccataagcgaaacgattctgaagcgcgtttgtttatgggacagggaaatggctcccaaaccgcctagtacgggtctgtttgttggactgaacaagggtcacgtcgtcaccaagaaggaattgcccccacgcccctcagatcgtaaggggaaaacaagcaagagggtgcactttgtgaggaacctcataagagaggttgctggttttgcaccctatgaaaagcgtataactgagttgctgaaggttgggaaggataagagggcactgaaggttgcaaagagaaagcttggaacccacaaacgtgcaaagaagaagcgtgaggaaat

SEQ ID NO: 18480 - DNA, 333 bp, Glycine max
ggaaaacactggtccaatcaacattgggaacccaggtgaatttacgatgattgaacttgccgagaatgtgaaagagcttatcaatccaaaagtgcagataaatatggttgagaacactcctgacgatcctcgtcagagaaaaccagacattacaaaagcaaaggaattgctgagatgggaaccaaaggtcaagttgtatgatggccttcctctcatggaagaggatttccgtcagaggcttggagttcccaagagcaactaagctccttttactccttcatttcttatcatataatcataatgaatattttgatagtaacggggatgtggatg

SEQ ID NO: 18481 - DNA, 403 bp, Glycine max
gccagaacagaaatcgcatataaaatgcgaaaagaaatgaattcaatgttcggagatctgcgcaggatctctctccgtcgaactttctttaccccgtcctcataacatatttcagatccgaaaaccagatcccgcgaactctgaagatctctattctctttccctcacctttccactcaaattcccctttccactttcccgagaaaattaactttttccgtcaattttccctccacctcttccttcttcctcacaatggctctgagcttcaacaatcgaagaatccctctcgctcttcgcattttccttctgttctccttattcttcagcctctcaccgaccttcgctcaggattctctcgttcagaacgcgaaggaagattccggcggatctgtggatctcg

SEQ ID NO: 18482 - DNA, 470 bp, Glycine max
  modified_base (289)..(289): a, c, g, t, unknown, or other
  modified_base (312)..(312): a, c, g, t, unknown, or other
cccacgcgtccgcccacgcgtccgcccacgcgtccgcccagttttgtcctttaaagctcccattatagcttccaatttctctgtgatccatatggctcttgaacctctcaggttttagaagctcagctaagcacaatagagagtttaattaggccattaacatatcatatgggtgtgactaagcctcatgtgcttatgctgttgatcatcatggttgtctcaattgcagagaaaccatcagtaatagaaggaagggctctttccttgatatctggtcaagggtactcanagatttttgcaacgctgggactngtatgcaagtgttgtgatggggttggaggtgcctgcactagtacatggacagaatcttgcaataacttgcagtggttaccttggaaatcacactagttaattattttctgtatctttccttgtattccattagctggatattgagttttgaaatatta

SEQ ID NO: 18483 - DNA, 449 bp, Glycine max
tggatctcccaggccccgaggaaggcctaaaaagagttttactgctgcgggggctccggcgctatctgccgttgccggtgcagcgcgtggtcgtggccgcggacgtccacgtggggtcttcccggtggttaggcccggccggcctcagaagctcgccgtaggaaggtccaagaatcctgtaagaaggcccgtgggccgccccaagggatcgacagctgctgcaatcacagcacataaggctgctaatgaagatctaaggaagaagcttgaacactttcaatcaaaagtgaaggagtcccttggcacgcttaagccttattttaaccatgaaagcccagtcactgcaattgcggcaattcaagagttggaagtactggcaactttggaccttaaagcgccattgagggatgagacccagcaacagccaccggcactgccacagacacaga

SEQ ID NO: 18484 - DNA, 150 bp, Glycine max
ggagcctgtgtaatggcgtagttagttcctagacttgcataattggacattatcagacttgtacctttttccccctttgtttccctcagactaatgctccctttcgtaaatttgtggaacgacatcatgtgccaagatttgcctatggcc

SEQ ID NO: 18485 - DNA, 492 bp, Glycine max
  modified_base (423)..(423): a, c, g, t, unknown, or other
  modified_base (444)..(444): a, c, g, t, unknown, or other
gaaagtgagagagtccaattatgcgaacgctttgtgatgcttgtgagagtgcggcggctatagttttctgcgccgctgatgaggctgcactttgtcgtgcctgtgatgagaaggttcacatgtgcaataagctagctagtaggcatgtgagggttggtcttgcaagtccaagtgatgtgccacggtgtgacatatgtgagaatgcaccagctttcttctattgcgagacagatggaagttccctttgtttgcagtgtgatatgattgttcatgttggtggtaaaagaacgcatggaagatatcttctgttcaggcaaagagttgagtttccaggagataaatctagtcatgctgaaaatccggcttcacaagcattggaaccaggtgaggctaaaagaggaccaaatccactttccaagctanaaaatgggagagaagcaacanaatcacaggatgcctatgggttcaacaccaggacctgatgctgatggg

SEQ ID NO: 18486 - DNA, 372 bp, Glycine max
gtatgtccctacttcagaagggcctgtgctgtgtctatgacatgggtaaccataataatgtgggctcactgaacctctcaatcacaaattaccatgccgcaaaaccgctatccaaaacagccacatattctcctctccaatacgtgacacgtggcaaaccccggaggaggatgctgaaacctatatccgcagctcttcccgatccaacgacgcttgacctcacagaaaataacgtgaaacaggttttagacgacgctcgaaaggagctgggtcaaatctttgacacctctgtaggtatgacaggagtggttgaactagctaacttggatgggccttatgagaaaaatagccttagtggtcggttttggcaca

SEQ ID NO: 18487 - DNA, 470 bp, Glycine max
  modified_base (451)..(451): a, c, g, t, unknown, or other
cccacgcgtccgtaagtgcccatttcttcttgtagtggttattagaggatttgctcgctatcatatcacagtatatatcttcttatttgtttaatttttatgtttcttaggtgaattactcaagagggctcgacaatcccacaaagtagaaaaagaggttatgttatggcgggcaaaggtgttagttcggtggctaaggcggtagcagaatatcagtatccttggcgtgagaagttggggaaatataaggatgagcttgccaagggtgtgtggggatactgggagctgggggcatggaagccgctgagtatcagtgctcggcatcgtgctagaattcgcaaggaagtcctccttgctggggaagattggccctacgatcctgaaaggaaggagatgaagaccaggaggaaaggacacaaatgtgataggatttctgccgaaaagcgcgcanacacagcgaagttgatgga

SEQ ID NO: 18488 - DNA, 394 bp, Glycine max
cccacgcgtccgcacattcttcatcacttcattcaacatttctggctcccttagctagttgggaccaatggctgctgcggttagtgctgcagtctcttttccatccaccaagtctacctctctcccaagcaggaccttcatcattaccccagacagagttgttttcaaaaaggcttcattgcaatacagagatgtttgtagcattggaatggcagtttccatcagagctcaagtcaccactgaggctacattcaaagacgtaaaagagtccaagaaacatgatgaaggtgttgttgtgaacaagttcaaacccaataccccttacgttggtagatgcctgctcaacacatagatcactggtgatgaatctccatgagaaacttgtcacatggtc

SEQ ID NO: 18489 - DNA, 436 bp, Glycine max
cttctatctggttgaatcagttttactacatcttcggcttcctctgcttggtcttcgtcatgctcatcgtcacttgtgctgaaatcaccattgtgctttgctacttccagttgtgcagtgaggattacttgtggtggtggcgatcatacctcacatctggctcttctgctctgtacctctttctttacgcaacattttacttcttcaccaagcttgaaatcacgaaattggtatctgggttattatactttggttacatgcttatagcatcctacgccttctttgttgtaaccggaaccattggattttacgcgtgcttttggttcactaggctcatctactcctcagtcaagattgattagttatagcaaccagtggtttttggataatctactacacttcttgaaggacgaaggaccggttgtgtaaggatttg

SEQ ID NO: 18490 - DNA, 419 bp, Glycine max
  modified_base (376)..(376): a, c, g, t, unknown, or other
gcgagaaatggcgatggcaatggcgcttcgcaggctttcatcttcaattgacaagcctctgcgccctctcttcaatgccggttccctctactacaagtcgtctttgcctgatgaagctgtttacgacaaggagcgacccggagttacatggccgaagcagttgaatgctccacttgaggtcgtggatcctgagattgctgatattattgagcttgagaaagctaggcaatggaaggggctagaattgataccgtcagagaatttcacctctgtgtctgtgatgcaagcggttggatcggttatgaccaacaaatacagtgaggggtaccctggtgcaagatattatggtggaaatgagtatattgacatggctganacactgtgccaaaagcgtgccctagaagcttttagatgggatc

SEQ ID NO: 18491 - DNA, 474 bp, Glycine max
ggaagaagacttcgacatccccggcggcgaggaaatggatctcggcgaagacgaggtcggcgaggagagggagatcggctctggcggcctcaagaagaagctcctcaaggaaggtcaaggctgggaaacccccgaagtcggtgacgaagtccaagttcattacacggggactttgctcgacgggactaagttcgattcgagccgcgacagggattctcccttcagcttcacgctcggacaagggcaagtaattaaaggatgggatgaaggtattaaaaccatgaagaaaggtgaaaatgctattttcaccatccctcccgagctagcttatggtgaatctggttcccctcctactattcctcctaatgctacactccaatttgatgttgagctgctgtcatggactagtgtaaaagacatatgccaggatggcggtatatttaagaagataattacctgaaggggagaaatggg

SEQ ID NO: 18492 - DNA, 440 bp, Glycine max
cccacgcgtccgcgaaaattgaaatggcgctgaggctgactactgttgtttcaagtgttggtgcattcggggaaacccaggtttaggttcagaaccagaagtgttgctgccacagttagaaacatggccttcagtgcaacctccaaggtaattgattcccatctccacgtgtgggcttcacctcaagaggctggcagattcccttattctcttggacaagaacctactttaccaggaaatgccgagtttttgctccagtgtatggaggaggcaggagtagatggtgcactcattgtgcagccaattaatcataaatttgatcatagttatgtcacaagcgttttgaataaatacccaacgaaatttgttggttgttgccttgctaatccagcagatgatggaagtgggcttaggcagtttgaagatcttgttttgaagga

SEQ ID NO: 18493 - DNA, 347 bp, Glycine max
  modified_base (223)..(223): a, c, g, t, unknown, or other
  modified_base (297)..(297): a, c, g, t, unknown, or other
  modified_base (316)..(316): a, c, g, t, unknown, or other
  modified_base (322)..(322): a, c, g, t, unknown, or other
ctcaaatttccttttgcttcctagaaagagttagttcccggaagcttctctctttgcactggcatgatttgatctccgccgtggattcgtgatggtgattttatgaacttcctcctctgccccctctttccttttctgattatcattatttttatatttaactagagagagagactcatccttccttcgagacatgagatgaggccgatgcaactgccaccgncttccgcttccggggccaaccctgcccctgcaaccaccaacaacaacaacaaggagcagcgtccccagcgccgncgcatggacctcacgctgncgctgncgcagcgagacaccaacttggcggt

SEQ ID NO: 18494 - DNA, 447 bp, Glycine max
cccacgcgtccgcccacgcgtccgccacatttctctattttctagtatttggcacatagtgcattgtttgggccattattaatcaaccaaggaaaaacaccaccttttggcttcttctgctgttccaactgtgcattttgtgtgctgtttctttcacaaacaagcagcaacagcagccagaatgagaatggggaacctcttctggcttggcattgttgcagcacttgttttcagcttctgggttgattccttttctgcctatgaatatcaccacttcaatgaaaccgagttctctttgttggagtctcaagaacaggtacattcatccctccttgggagaacttctctcatggttggactcacagttattcaaagtgctgctggcaaaggagcagtttgcttggatggaacattgcctgcttatcatttgcattcgggatatggatc

SEQ ID NO: 18495 - DNA, 451 bp, Glycine max
ccgacctgatgtgtctactgtttgtgttggattagcagctagtatgggagcttttctgctgagcgcagggacaaaaggaaagagatacagcttgccaaattcaaggataatgattcatcaaccgcttggtggtgctcaaggagggcaaactgacatagatattcaggctaatgaaatgctgcatcataaggcaaatctgaatggatatctcgcctatcacactggccaaagtttagacaagatcaaccaggatacagaccgtgactttttcatgagtgcaaaagaagccaaggaatatggactcatagatggtgtcattatgaatcctctcaaagctctccagccattagaggctgcagcagaaagtaaagaccgggctagtgtttgaacatgagaatgttgcactttaatttccaaggtataaaaaatcatagtggtagactgtaagatg

SEQ ID NO: 18496 - DNA, 457 bp, Glycine max
caattattccacaaaatttccctcaattatttctcaccatcatcaccgcctttccttctctcaggaaaaaaaaaagttaatttcttgaacccaatggcttcagagacagaggtgccggatattatttcctctgttttcgaaaggtttcaacaaaacagagacatgtctctgtttctgcccttcctcttcggcttctctgacgccaccccaggacgaaatagcgacgacccagatcacgaaactgctcccacagaagccccacaacgtcaaagaataatcttggtgaaccccttgactcagggcatggtggtgatcgacggtggttcgagcctcgaggctctgtttcgcgaattcaccaacggaaaaggtggtcgaccaccggcttctaaagagtccattgaggccttgccgagtgtggaaattggagaagtaacgaagatttcgagtgtgtggtttg

SEQ ID NO: 18497 - DNA, 413 bp, Glycine max
  modified_base (334)..(334): a, c, g, t, unknown, or other
  modified_base (346)..(346): a, c, g, t, unknown, or other
cccacgcgtccgccggtgaatctcctagaattgttgccacgatggataataatgacggcttcaatgttttggtctatccccatgcggactacgcattcatagtggcactacttatgattgttagcgagatgaaacattattttgacgaaatggtgtatttggccgccggaatggcaccacttggagttggtatgaattaaaggagctcccaagtaattttactcaattatggacctatttaaaattaaatcatgggcttgatttctgttatagaatagatagggtttggttttcattttcagaggaatgtttatttccacctcattgcatgaanttgagagaacanaaaagcgttaacaaagtctggttggatggatgatgccaaataacatttgcatcttcaatgagccacg

SEQ ID NO: 18498 - DNA, 371 bp, Glycine max
cgtttatcatctggtccacgcctctgccaaagagcttgtggaactgggtgtatacgctgtgagtgcctgccacctggcactgctggaaaccaagaactgtgtccctgctatgcaagtttgactactcatggtggcaaacgcaagtgcccttagacttaattggaccactatcctatgcatgcctttgatttatattataaaataaaaataatactatatataacatgttaattgcttaatatgtgctttaagagtaaagaatcacatcgtgaaatcaaattacccctttctcaatacgtgttgaatcatcgatcttggtttgtaattaggttgtatattcacaaaattaattagtatattgtgatgtgatt

SEQ ID NO: 18499 - DNA, 321 bp, Glycine max
accaaactcaaacccatgtcaatttcagtgactcaatttgaatttcgggcaatctgattttggcttctctggttacaatgttgcacattgctttagctgcaccggtctctcccaccgtcgtcgcttttcaccgcggagcgaagcaatggagcgcgctaattccgaattttcggagaagcaggggaatcggttcgtccgtgttctcaagttctctcaggaaacgattgcaattgcggtttttcgtttcgggagaaaatgccggcaatggaggtgttctggaggaaatatctgaacccgaaaaggagcctacgaattttgcgt

SEQ ID NO: 18500 - DNA, 404 bp, Glycine max
gcttattctctcgcattccgtggagatctagtgcttctgctgcaagacctcgctgaaaatgagggtttcgattcggaggtagacgaagatgttcggaagggctccgaagaaaagcgacagcaccaggtactacgaaatcctcggcgtttccaagaacgcttcgccggatgacttaaagaaggcttacaagaaagccgccattaagaaccatcctgacaaaggcggggatcccgagaagtttaaagagcttgctcaagcctatgaggttctgagtgaccctgagaagcgcgagatttatgatacatatggagaagatgctcttaaggaaggaatgggtggtggtggcggtggccatgatccatttgatatcttcagttcattctttggtggaagtccgtttgggt

SEQ ID NO: 18501 - DNA, 461 bp, Glycine max
gtgatatggcttgtaattctatctcccaagcagcttcaatgggcacacaaatatgcacccaaatagcttccatattctcaaagcccacccatccatacccggccccactagaccttttagtcaccgaactcacctccgttgcctctcaaaaaggcaacgtttttctatacggcgtgggccgcgagggcctcatgctcaaggccctctgcatgcgcctcttccacctgggcctctcggcccactttgtcttcgacatgaccacaccccccatagccgccggcgacctcctcatcgcctctgccggccccggcggattctccaccgtcgatgccctctgcgcggtggcgcgctccaacggcggaagggtgctgctcctcactgcccagcccgagacaaggtcttgcgtgaaacacgccaacgctgtggcttacgtggcagcgcagaccatggccgatgatgcg

SEQ ID NO: 18502 - DNA, 396 bp, Glycine max
cccacgcgtccggtttttgagaacattcgaataaaagttggacctttgcaacctctagagatcagtctaggaaaaaaggaagacaaagaaccgagtaccaaggatcctttcttcatctggttttatgttgatgaggaaatagctgttgctcgaggcaggagtggaggaactgcattttggtgtcggtgtcgtcgtgccaataactgattgtttttaactttctttccttctctacttctgagttttgatggaaagatacatgtatatatgtaaacatttaagttcagttggtggtaaacatatttgtacttgtttattgtatagctacttgtttgcataaattccaggaactaaaatatgtaattaagttgtgtttcacgataatcctactgtcgt

SEQ ID NO: 18503 - DNA, 457 bp, Glycine max
cccacgcgtccggttgggccttccctgaatagtgtttctacttttaggccgcctccaatgggtgcatatcagggttttcagggttcagatggaaattactataaccagccctcatcaatgcctatggccccaatatctcgacaataaaattcccagtcctagatcttttcggcgtaaggttgcttagaaaaagccttcatacctccacccataaccttggtatggtaatctgattcttctacagtctggtgtgcacagtaagtgctttgtaactttagttgttggctggtactaatctcctggagctagaataatttcattgtgttacaccgaagataacgggtttgtactattgttgagtagggtttatttatttctttatttatcttactgtaaaacttagcatattattattgccttgtggcttattagatgtgtggttttagagggttgtagg

SEQ ID NO: 18504 - DNA, 478 bp, Glycine max
  modified_base (415)..(415): a, c, g, t, unknown, or other
gcctcctgcagatgctctgtttgaacacccaaggctattcagagcttgtgttcccccaggaatgcatcggtttaggggcaatatatgggattatgatacaagaccccatgttatgaaaacacttggatatccattggaaatggcagacagaatcccagaaattactgaagccaggaacatagagcttggacttggattgcagctttgtttcatgcatccatcgaagtacaaatttgagcatcctcgattttgctatgagagattagaatacgttggccaaaagatacaggatttggtgatggctgaaagattattgatgaagcatttagatgctccggggttatggctacaagagaggcaccgtcatcttcttatgaacaagtattgtggaagatatttgagggccaaacatctncaccgggttattatatttgatgataaggttcaagacacttatgagcataacccgagaaagaga

SEQ ID NO: 18505 - DNA, 454 bp, Glycine max
ctcagttctctcgttagtattcttccaatctccgtcgatcaccactaacaccaccatgtcgtggctcctccgatccaccaagtcaaaactcctctcttcctcatcttcactttctagaaccttcccctctctctcacgctccggccccacacttgacctccctcagatcggagccatctctcccctccccgatctcttccaccgcaacaccgctaccatgcctttcgcgaaggaaaacgcttccggtggaaacttggccggtcttcccaaagttcctgcgaatacgcttggcagtgactctaatgcgatcaattctccgaggtacaaagcttctggactggacacgaatgtgctggctggagctagatgtgtctctggagtttgggctgcacagggtccaatgcgattggtagtcaataccgtgatggctagaagtttgaaagaagtatggaac

SEQ ID NO: 18506 - DNA, 461 bp, Glycine max
  modified_base (309)..(309): a, c, g, t, unknown, or other
  modified_base (451)..(451): a, c, g, t, unknown, or other
aaaaattctaaagacccaatctcaatacctcaaactctaaacactgcatatttaattatcatgccaccacccacccttctcccatccctcactctctcgacgaaaccctaagcttcccctttcaatctcatcagatcctttcgtggttgcgcgaaaccctaattttgaatctgcaaacatgtctgcagctatggatatgtcgctcgacgacataatcaagaacaacaaaaaatctggatccggaagttcccgtggccggatccgaccctccggttccggaccttctcgccggttccccaaccgtgccgncaaccgcgccgctccttatgccaccgctaaggcgccggaggcgacgtggcagcacgatttatatgcagatcagcaagtggctgcggcggggtaccctgctcaaggtggtcgtgcggcttccatagaaactgggactaagctntacatttcaa

SEQ ID NO: 18507 - DNA, 201 bp, Glycine max
ggcatatatatgtatacatatacctataccccgtgcttatagattatagatggagaagaaatgggcattgttctgcatgagccatatcatgccctatatatatatttttaatgtaatgaacagatgatgggttaattttgatttcatatacaacttaattgttgtgcagaaaatgtcctgatgcatcgtgagatgtttttc

SEQ ID NO: 18508 - DNA, 448 bp, Glycine max
ggaagacatgggaaaagcttgggtaggcctggtggtattgctgtgtttgattgtcacggccatcgccgaacaatgcggtcgtcaagctggcgggcagacatgtcccaacaacctatgctgcagccagtacggttggtgtggaaacaccgaagaatactgttccccttctaagaactgccagagcaactgctggggaggcggcggcggtggcggtggcggcggcggcggtgaaagtgcttctaatgtccgcgccacatatcattactatgagccagagcaacacgggtgggacttgaacgccgtgagtgcttattgctcaacttgggacgctagcaaaccttactcatggcgcagtaaatatggctggaccgctttctgtggtcccgttggtcctcgtggccgtgattcttgtggaaagtgcttgcgggtgacaaatacaggaacagga

SEQ ID NO: 18509 - DNA, 432 bp, Glycine max
gaattgctagggaagactggtggtttggttgatggcaggcattttgtcaatgaagcggctattgtcagaagtgtgaaattaattgctgagagtcttgcgaggcatatctatggacatcaaggaaagaacattcagatctttgcagacaacagtaacttggctgtcaatccttcttatgttcaatcatggttagatgttttgtcccaaacgcctcgagtagctccatttttgtcaaaaggtgatccttttgtaatggcactgaaaaaggaattagaagaccatactgatgaggtaaatctacatagagatgtgcttgatgggatgttcactttctatgattcaaccagggcaaagctgaacatatatcaggttgccagtgtcacatttgacttgctgttgcttctagtgctgggatcgtatttgattgtgctc

SEQ ID NO: 18510 - DNA, 418 bp, Glycine max
  modified_base (384)..(384): a, c, g, t, unknown, or other
  modified_base (415)..(415): a, c, g, t, unknown, or other
cttatcacaaatgacaagtttgtcagtgtgtatcaccgtgtcttatcacagaacacaggcccaagaatatctgtagcaagcttctttgtaaattcgcatgatccagctgagggtacatcaaaggtgtatggtccaattaaggaactgctttcagaagaaaacccaccaatctaccgagacactaccttaaaagagtttttggcatattattatgcaaagggccttgatgggaactcttccttgggccccttcaggttgtgaatcgaacaagggaatatactcttcattctcatcgatcgtatctggatataatttatccaaacaacaagcctctacttttattgagaatgtttaacaatttgtttgttaaaaagacattaccgnctataagaaatatgaaacacttacattattnatt

SEQ ID NO: 18511 - DNA, 281 bp, Glycine max
ttggaacagaagagacgaagcatgcgaatgcggaaaatgaggttgaagtgcggcagacgcggaatctgtagaattccaggttggaaactattgggaacagggtaacacgagatccgttaccagtgagcaaacgatgaggctaacgcagtagctggacgatacgtggtgagagaaaatagacgtgccgaagcggaacaatcatggggatcctagacgagcttgatcggatacgagagacgctgataagagctgatgtagatacgatgagaggctcatatgta

SEQ ID NO: 18512 - DNA, 106 bp, Glycine max
cacacgcgtacgttcaggccgacagggatatcagcgctccacttgcatgatctggctgactgggacagaatcgcgagctatagaaaagacgcacccaactgggagt

SEQ ID NO: 18513 - DNA, 482 bp, Glycine max
  modified_base (435)..(435): a, c, g, t, unknown, or other
gaatttcacgagtaataatttgattgattttggaaattttaagttttagatagctcatgagattcaattttctcacaattttcatcttattttatgacccatgttgatttgaacataattgacgcagttccatagttttcacgaaaattgaattagttaagttttagtgcttgaaaattcaaaattgtgtttcaaaattaaaaatgatcagattttttttaagaataaactagtaataaaataattacttaagaaattaatttatattttaataaaaaattaaattataacctaaaataaaataaagattatatgaataatttaacttaaattttgctagctgacacttcagctgtttttatataggcgttagtcttctctttggtttggccttttcaaacccaaccctcgcatggtatggttaacgtaacccanatcatatagaagacataagagattcagcaatacattgtcttcaccta

SEQ ID NO: 18514 - DNA, 464 bp, Glycine max
tgctcaccaacagcatatcttctttttgccttctcactccaacaattccctaatcccaaactcttcactcttcttcaccctcttcttttgctttcacaccaatctcagacaaaaaaaaaaaactaaaaaaaataattaagaaaccctagaaccgtgtttgggtggaggaaaacatggccaccaccaccaccagtctcggcggcggcgtcggcgtcggcggagacgaccgcgtcctcgccacggctcagcagatcgtgaagagtctcagggcggcgaaagaggatcgcgaagacatgcttatgatcttctccgccttcgataaccgtctctccggcatctccgacctcatcaacggcgacgattcgaagtcttctgatgaagaagacctcgaccgctttgaagccgcggagaaagtgattctcgctgatgcctctctctccggcgagccttcgcgtcaatccacg

SEQ ID NO: 18515 - DNA, 410 bp, Glycine max
cccacgcgtccgcccacgcgtccgcacacttgaggcctgcagagtacaagagatcaagggtgcccagaaaccgtaggactgtcaaccgtgcatatggcggagttttgtctggaagtgctgtcagggagaggattatccgagctttcttagttgaagagcaaaagattgtgaagaaggtcttgaagatccagaaggcaaaggaaaagcaagcctcaaaggcttgaatttgaacaacacaatgagacatctttttggaggacttttaggtttgagtggttatagttaatcacaaattttattagagttgtcatgttaattgtcttttattattttgcctgtttgaactctttctagagcaagtgttaactttgtcgacaatgtcattatgatacagttttggttctcaaaaa

SEQ ID NO: 18516 - DNA, 457 bp, Glycine max
gttttccaaaaggagaactgggctgcgcaagaaagccaacgaaatctgtgtgctctgtgatgctcaagtagcactgattgtgttcaatgctaaagggaagctttttgagtattcttctgaatccagcttgcttcaaagtcaaactgaaatagtactcgggaaggtttttaaattgtgcggccgtgattacaatttcgttgcaatctttggtattgtggaaaattaagaaaaatgcagctgatgttgtaacaattgcgattatgacgcggttgtgatgagttgaaaaacttgatgctgccactcatggtcacagacggtgtttccaaaccttggtgcagtaaaaagaaatgaaatagtagtaatatacatttccatacaatttcctagctaatttgttattgtgttttcattacctttttttatttattttttcctattttgggtttaatgcattcta

SEQ ID NO: 18517 - DNA, 445 bp, Glycine max
  modified_base (332)..(332): a, c, g, t, unknown, or other
aaggtcgccaaccccatcgtcgagatggacggagatgaaatgactagggttatctggaagtcaatcaaggacaagctcattttgcccttcttggagttggacatcaagtattatgacttaggccttccttaccgtgatgagaccgatgataaagttacaattgaaagtgcggaagcaactctcaagtataatgtggcaattaagtgcgcaactattactccagatgaagctcgtgtgaaggagtttggtctgaagtcaatgtggaagagtccaaatgggacaattaggaacattttgaatggaactgtcttcagagaaccaattctttgcanaaacattccccgccttggtcctggttggacaaaggcaatatgcatttggaagacatgcgtttggtgatcaatatcgggcgactgacacagtaattaaaggagctggaaagctg

SEQ ID NO: 18518 - DNA, 446 bp, Glycine max
agcagaaggaggagaagcagaaagaggagacgaagcaatggcgccggagaagccccgaaccgggtcgaggaaccctgatttggtcaggggaattggcaaatattcgaggtcgcagatgtaccacaagaggggcatctgggccatcaaggccaaaaacggcggtgttttgccccttcacgatcccaagcccaaacccgaggccccggcccagaagccgtccaagttctacccggccgatgacgtgaagaagcccctcgtcaacaagcacaagcccaagcccgcaaaactcagggctagcattactccagggactgttctgatcctgcttgctgggaagttcaagggaaagaagggttgtttcttgaagcagcttccatctggattgcttcttgtaacaagtccctttaagatcaatggggttcctctgagaagggtgaaccaatcgt

SEQ ID NO: 18519 - DNA, 478 bp, Glycine max
  modified_base (374)..(374): a, c, g, t, unknown, or other
  modified_base (425)..(425): a, c, g, t, unknown, or other
gaaggaaggtcagagtgacatctactacatcacaggtgaaagcaagaaggctgttgagaactctccattcttagagaagttgaagaagaagggatacgaggttctttatatggttgatgccattgatgaatatgctgttggtcagctcaaggaatttgagggcaagaagcttgtctctgccaccaaggaagggctcaagcttgacgagagtgaagatgagaagaagaagcaagaagagttgaaggagaagtttgacaacctctgcaaggtgatcaaggatgttttgggtgacaaggttgagaaggttgtggtctctgaccgcgttgtagattcaccatgctgtcttgtgactggcgaatacggttggaccgcanacatggaaaggataatgaaggcccaagctctaagggacaacagcatggcanggtacatgtcaagcaagaagaccatggagatcaacccttagaacccaatcatg

SEQ ID NO: 18520 - DNA, 385 bp, Glycine max
  modified_base (374)..(374): a, c, g, t, unknown, or other
cccacgcgtccgctcttcttctcttgcggctagggttttagcgcagcttcttctagatttaaggaagatgggtaaggaaaaggttcacatcagtattgtggtcattggccatgtcgactctgggaaatccactaccactgatcacctgatttacaagcttggaggcattgacaagcgtgttattgagaggtttgagaaggaagctgctgagatgaacaagaggtctttcaagtatgcctgggtgctggacaaacttaaggctgagcgtgaaagaggaatcaccattgatattgctttgtggaagtttgaaacaacaaagtattattgcacagttattgatgcgcctggacatagggatttcattaagaatatgnatactgggaca

SEQ ID NO: 18521 - DNA, 443 bp, Glycine max
gttttcattcaatcatcactgatctaagatatgtctacatctgataagtcagaagtggtggaaaggggtgctaaggatgatgaaaagccaaaggaagaacatgagaagggtggatttcttgatacagtgaaggatttcattcaagacattggtgagaagattgagggagcagttgggtttgggaagccaactgcagatgtcactgggatacacattccatcaattaatcttgagaaggcagagctagttgttgatgttcttataaagaacccgaatccggtgccaattcccctaattgacataaactacttggtcgagagtgatgggaggaaactagtttcgggattgataccagattcgggcacaatccatgcacatggagaggagacagtcaagattcctcttactttgatttttgatgacttaaggaatacctatgatga

SEQ ID NO: 18522 - DNA, 456 bp, Glycine max
aattgcttctctgctggcagaggggaaggttcccattgggattggaaggaacacaaaaattaggaactgcataattgacaagaatgcaaagatcgggaaagatgtcatcatcatgaacaaagatggcgttcaagaagcagatagaccagaagatggattttacattcgatcaggaatcacagtcatattagagaaggcaacaatagaagatggcactgtcatataaataaatgggtggaagtacttatttcatggactggtgtagtggctagcagtactagctcgaagaagcattccaaggaactttggggacagaaggatccaattgaaaaatcagcactccccttttgctatatatgcaacacataaggctctcccactgcatgtaaaaataaaatgaataaacagtgtatgaaatcaagatgcataaacgtaaataaaatgaaaatgtgaatg

SEQ ID NO: 18523 - DNA, 417 bp, Glycine max
ggtggttgtcgtttttgaaatggcagcgtcgtcgtcagagaagcaagtggtggtgataggcatagacgacagcgagcagagcacgtacgcgttgaattgggctctgattacctttttccgaaccccatttttaaggttggtcttattcaattcaagcccaacggcaacttcggtgtgggcttcgccggccctgggtttgcaagaaccgcttaagtcttgcctattggagattccgatttgagaaagaatggcgccagaatccttgaaaccggttaacaactttgcattaaccaattcgtaaatgatgtgacacgccaagtggtggaaggtgatcctagaaatgttctttgtgatgctctagataagtaccgcgctgcaatgttggttgtgggtagtcatgggtatggggctataaaa

SEQ ID NO: 18524 - DNA, 451 bp, Glycine max
gcacgaatatcttgttgtttggagcgatccgagaaaaactctgtaaacatgttggtttaccaggacctccttacaggtgatgagcttctctctgactccttccgttacaaggaaattgagaatggaatgctgtgggaagttgaggggaagtgggttgttaaaggagcagttgatgtagacattggtgcaaacccttctgctgagggtggaggagaagatgagggagttgatgatgcagctgttaaggttgttgacattgttgacacattcagacttcaggagcaacccgcattcgataagaagcagtttgttaccttcatgaagaggtttatcaagaatttgactcccaagctcgatgcagagcaacaggagttgtttaagaagcacatcgagggagcaactaaatacctgctctctaagattaaagatttccaattttttgttggtgaga

SEQ ID NO: 18525 - DNA, 413 bp, Glycine max
  modified_base (352)..(352): a, c, g, t, unknown, or other
agataaaagacacacatgtcagagaggttatgacacctcttgttgatgttgttgcaattgatgcaagttcaagcctggtagactttcatcacttgtgggtcacacatcagtactcaagggtacctgtttttgagcaacgtgttgataatataatgggtatagcatatgcaatggatctgctggattatgttcaaaagggtgagttgctagaaagtactacggttggagatatggctcacaaacctgcttattttgtacctgattcaatgtctgtttggaatcttcttagagagttcagaatcaggaaggttcacatggcggttgttcttaacgagtatggtggaactgtggngattgtaacactcgaagatgttgttgaagaaattgttggtgaaatatttgatgaaaatgac

SEQ ID NO: 18526 - DNA, 459 bp, Glycine max
ggaagcttagagagagagagagagagagagagagagaggagagagtgttggcgcttcatcaagatgggtatttctagggattccatgcacaagaggcgtgccactggtggcaagaaaaaggcttggagaaagaagagaaagtatgagcttgggcgtcaggcagcaaacaccaagttatcaagcaacaagacaatcaggaggattcgtgttagaggtggcaatgttaaatggagggcattgaggctggatactggcaattactcatggggtagtgaagcagttactcgcaagactcgtattctagatgttgtttacaatgcctcaaacaacgagcttgtgcgaactcagaccctggtcaagagtgctattgtccaggttgatgctgctcctttcaggcagtggtaccttcagcactatggtgttgaaattggtagaaaaaagaaagtggcagccaagaag

SEQ ID NO: 18527 - DNA, 449 bp, Glycine max
  modified_base (382)..(382): a, c, g, t, unknown, or other
caactttatccgatactaccgctttcaatctcatccttcgaaacccaaacttgagcttcttcgtgtttcttgctcgtggaagcaaatgacaaccgcgccctctctaactggtcccttgtcaaacgcggtcggattcagtgactggaaaaaacatgcccctttgtcagcttctctctgtaaactaagctccagttcaaatatagttgacatgaagatatctcgatgtggttgtcggaaagttggacatggccaaagatgtttccgattatatgccctatttggaggaaaaaaggacaataatgggaaaagtgatgatgttccttctaaggccggaattctaggaaacatgcaaaatctttatgagactgtgaagaaggcacanatggttgtccaagttgaagctgtgcgtgtgcagaaagaactcgcagcagcagagtttgatggttatt

SEQ ID NO: 18528 - DNA, 454 bp, Glycine max
  modified_base (398)..(398): a, c, g, t, unknown, or other
gaaagaaaaaggtagagaaggagagagagagagagagaaagaaaactgaaaaaaaaaaaaagaggataagactaattaactacatttttggtttggtttttcttcatctcgcaggagacacgaagagacaagttacatcacatgagatgtcaggtggtggatgcagcagcatagtgtggttcagaagagatctgaggatagaagacaatccagcactgacagcaggagtgagagctggtgctgttgttgcagttttcatatgggcacctgaagaagaaggacaatactaccctggcagggtctctagatggtggctcaagaacagtttggctcaccttgattcctctctcaggaatcttggcactcctctcatcactaagcgatccactgatactctntcttctctatttgaggttgttaagtccactggagccactcaactcttttttaatca

SEQ ID NO: 18529 - DNA, 489 bp, Glycine max
ggagccgacattgtgcaaaaggcactgatagctcctgcagcattgattgctcaaaatgctggaatagaaggtgaagttgttgtggagaaaataaagagtggtgaatgggaggtcggttacaatgctatggtagacaggtatgagaatttagtggaggctggagttatcgaccctgccaaggtaacaaggtgtgcattgcagaatgctgcttcagttgctggaatggtgttgaccacacaggccattgtggtggaaaaacctaagcccaaggcacctgtagctggtgccccacaaggccttaccgtttaaattttaggttattagggctacggcaaagaacagttttgtgcagaaaattgaaagagcggagagaaatataccgatgaattcgttcgtttctgtgccaagaaagtaatacaccatgaaattgctccagcatttcaacatcagtcaatctacatgcaagcagacgatgtgaaattctcctca

SEQ ID NO: 18530 - DNA, 423 bp, Glycine max
ggcgaagagatggccaccgttccagggcagctcgtgtgggagatcgtcaagaaaaacaattgcttcttggtcaagcagtttggaaggggcacccagagcgtcgaattcagcagagagagcaacaatctctacaacctcaattcgttcaagtactctggtttggcaaacaagaaaactgttactgttcagcctgagggcaaagatcaggctgtgttgttggctacaaccaagacaaagaagcaaaacaagcccgctgcattgctccacaaatctgtgatgaagaaggagttcaggaggatggcaaaagctgttgaaaaccaggtggccaaaaattactacaggcctgatctcaagaaggctgcccttgcaaggttgagtgctgttcacagaagcctcaaagttgccaagtctggtgtcaagaag

SEQ ID NO: 18531 - DNA, 348 bp, Glycine max
gatctacgtaacggtcacgcacgagctgatgccccgagccgatgactcctgaaagcgaatcagacactgatagagtattcgtgctttgacagagctcactagatcgaagacagacgctgctgtgacggaactgcagtccattggcttgggagcgtgcgttcatgccagcttgatgcgcatcatacggcccgaaaatgacgaaccttctggaagcttgcgcacgctggcgataatgtgcatcgcgagggcgctgttgaacaagattaaaccgacggtgatgttcgctgacaagggtcttgtgtggtgcatctattgaatagacctcaggggcatgatcgagaatgtctt

SEQ ID NO: 18532 - DNA, 232 bp, Glycine max
ttttggtactagaaaataataatattacggtaattacaatataatgtacaaatggtataaataattcccatttgtaacaatagaaataaaacagaagaataggagtttgaattgtatttgaaatcatttttgaaaacctgttgggttgatcaaaaccttttattaagaggcttggtaaaaagcgtaacagcaaaaagagtattgcaagcagaagttaaatatcattttatgg

SEQ ID NO: 18533 - DNA, 416 bp, Glycine max
gaaaggcttatggtggatacctaggcacccatagacgaggaagggcgtagtaagcgacgaagtgcttctgggagttgagaaagagcatacaaaaagtaaagaagagaagaaacataaagatgaagataaatcaaagaaaaaaaagaaagagaaaggggaagaggaagatgaagagggagagaagaaagaaaaagatgtaaaagataaaggggaggatggtgaagagaaagagaaaaaggagaaggataagaaggagaggaaaaaggaaaagaaggacaaggatgacaaaactgatgtagagaaggttaaggggaaagaacatgatggggaggatgctgaagagaagaaagaaaagaagataaaggaaaagaaagacatggatgacaaaactgatgtagagaaggtcaaggggaaag

SEQ ID NO: 18534 - DNA, 452 bp, Glycine max
ccacgcgtccgggagtacaataatgttgcacctgatgggtcatatgttggtaatggtcgattaggcagaaaggcattgaatgatggttcttacattgcaccgaggaggcgttcaccaggaggaagagatggcatccaaattggtcatagaaatccaagaaacattagtccaaatagatgtattggagatggttcagacttggttggagtgaggcataatgataaatttatgagaggcttgcctgaagataatatggatgctatgttcacccggtcccaaacatttgagggaatggatggtcggtttacgagagggagtaggaatttttcttccatgcagagaaggggtcctcctcgaattcgttccaagtcacccatcagatctaggagtcgctcacccggtccatggtcatctccaagaagaaggtcgcctagaagaagatcccctgatgg

SEQ ID NO: 18535 - DNA, 406 bp, Glycine max
  modified_base (353)..(353): a, c, g, t, unknown, or other
cagagctcaaaaccctagagaggaggaagagagagcgtgcaagttccggccaccaccgaccatgacattcaagcgcaggaatggaggtcgcaacaaacacggccgcggccacgtcaaattcatccggtgctccaactgtggcaaatgctgtcccaaggacaaggccatcaagaggtttctggtgaggaacattgttgaacaggctgcagtcagagatgtgcaggaagcttgtgtctatgaacaatatactcttccgaaactctatgtgaagatgcagtactgtgtttcttgtgctatccactctcatgttgtgagggttcgatcccgcactgacaggaggaaacgtgagcctncacagagattcatcaggcgcagggatgatgcacctaggcctggtcagcccggc

SEQ ID NO: 18536 - DNA, 450 bp, Glycine max
aactatcgattccctcaaagtggaacccaagcaaagaggttgagtacacaggtcaggttgttggatatgaggataactttgattcaaccaccaacgtggttgtcaccatcactccgactgataagaagtctatcactgactatggttcacccgaagagttcctctctaaggtggattatttactaggaaaacaggccttcttcggcgaaacacaagccgagggtggttttgatccaaatgcggtggccacggctaacatcttagagacggcaacacctgtgattgatgggaagccgtactattttctgtctgtgttgacaaggactgctgatggagatgaaggtggcaagcaccacataattagagcaactgtaaaagatggaaaactgttcatttgcaaggctcaagctggagacatgaggtggttcaagggaacaagaagatttgtgg

SEQ ID NO: 18537 - DNA, 446 bp, Glycine max
ggggaacggatccaaactcccttggatgttactcgtatgatttagttggaaaaccactcgatgtgtatgacaagcttcgtgcacctttgggcaatctattctttgggggagaagctgtaagcttggacaatcagggatctgtgcatggagcttactcagctggggtcatggctgcagaaaattgtgagagctatcttttagaaaaactaggccacgtggaaaagctatctctagcttctgttaggcatgaaatgcttgaaactcttatacctcttcagatctcgaggatgtgatttgttggttctcagtagtagcttttagacaatgattctggataacgcaatggcaaaatatttgccattcaatataataaaagaaataacctgttctttaaggatggtgaattggtgattggtgactatcgtccaaggtacaccattttcact

SEQ ID NO: 18538 - DNA, 447 bp, Glycine max
cagacattcttgaaaaccgtaacggggaagacgatacccctagaggtggagtcatcggtcacagtcaacagtgtgaaggcgaatatccaggacacggtgggcatcccgccggaccagctgcgcctgatcttagacggcaagcagctggtggacggccggacgatagccgactacaaaatccagaaggagttcacgcttcacctcgtgctccgcctccgcggcggcgccaagaagcgctagaggaagacctacaccaagcccatgaagatcacgcacaagcacatgaatgtcaagctcgaccttctacagatctacaaggtcgacgactccggcaaggtccagaggctccggacggaatgccccatcgccgagtgcggcgccaggactttcatggccaaccacttcgatcgccactattgccgcaagtgtggtttgacctatgtttac

SEQ ID NO: 18539 - DNA, 436 bp, Glycine max
cccacgcgtccgcccacgcgtccggttgttggaagccaaaaccctagcagccggcgagaatggcagacgttgaggttgatgtggcggcggcggcggcggcggcggctgcagggcagccaaagaagagaacgttcaagaagttcagcttcaggggggtggatctggacgcgcttctggacatgtccactgacgaactcgtgaagatgttcagtgctcgcgcacgcagaaggttccagagaggtctcaccagaaagcccatggccttgattaaaaagctccgcaaagcgaaaagggaagcaccagcaggtgagaagccagaaccagttcgcacccatcttcgcaacatgattattgtgcctgagatgattggtagcatcattggagtctacaatggcaagaccttcaaccaggttgaaatcaaacccgagatgattgg

SEQ ID NO: 18540 - DNA, 310 bp, Glycine max
ggattgaagaggtgcgaacagagagaggcagtgatgtcattattgttcttgttgggaacaaaactgatcttgtcgagaaaagacaagtctctatagaggaaggggaagcaaaagcacgtgagctcaatgtcatgttcattgaaactagtgctaaggctgggtttaatataaaggccctatttcgaaaaattgctgcagcactacctggaatggaaacactatcttctgcaaaacaagaagacatggttgatgtaaacttaaagtctacgaatgggagtgctcattctcgacctcagtcaagtggatgttc

SEQ ID NO: 18541 - DNA, 451 bp, Glycine max
cccacgcgtccgcccacagcagttttctgtttaatacgctccgtgcttttggaaatgattgccacccagatataaagagtgaaatatgcacacactttgctaattgtgagctgcgttcaatcgtcatcattgatagaggtatgattggatcaagtgaatcaactaccaactatcctggcaagattcctcgtggccccgatgttcccagtgaagctgctgactaaaaccattcagggattatccttaccaaataatagctcctctttgtgatcattggtcgtatattggaattttcattggtataatagggttatttcttaattgcatttacaggcaagtgttcaatattttgttttacccgaacaaactaatccgtaagagcagtttcaaaattcctttttagtggcttaaagtaaattggtaacatatgtaagtgccaatttttaagatg

SEQ ID NO: 18542 - DNA, 371 bp, Glycine max
ggagtctctgggtacccaacaattcagtggtttccaaaaggatctcttgaacccaaaaagtgtgaagggccacgcactgctgattcacttgctgagtttgtaaatacggaaggaggaacaaatgtgaagattgctacagctccttccaatgtagtggtgcttacatctgaaaattttaatgaggttgtcttagatgaaaccaaagatgtcttggttgagttttatgcaccctggtgtggacattgcaaaagtcttgctcctacttacgagaaaattgccacagcatttaaattggaggaagatgtattaattgcaaatctggatgctgataaatataaagatctggctgaaaagtatgatgtgagtggatt

SEQ ID NO: 18543 - DNA, 386 bp, Glycine max
  modified_base (376)..(376): a, c, g, t, unknown, or other
ttcttgtttgcttcccaagtctctcgaagcatctttctttctcttcctgcagaagctatccgtgttacttgttcccaagtctccaacaagcaaagtacatggttgatttggaaatccaggtccccagcgcattcgacccgtttgccgaggcgagagaatcagatgcccccggggcaaaggagtatgtgcacatacgaattcagcagaggaatggaaagaagagtctgacaacagtgcaagggctgaagaaggagttcagctacgagaagatcctcaaggacctcaagaaggacttctgctgcaacgggactgtggtgcaggacaaggagcttggcaagattatccaactccaaagcgaccagcgcaagaacgtatnccatttcctc

SEQ ID NO: 18544 - DNA, 447 bp, Glycine max
ggatcgcggttctccctctcctatcgtctttctcttctcttcggatctccctccattccttggagtcacaatctcaatcactgtttcttctcttctacctcgtttccctattctccctcaatttttctttcgcttccaatgacatacttttaatttttttatcaataaatcactctttttcgtggatatctatgatttttttgactaaaacattggtctttcagatctaacgtatctatgccaacacccattgcacaacatcatcttctcgttttcgtgtatcattttccaattaactgatacccttttgcctgttttattaatttattccttcttgaccggacttgattcatcacacaactgcattttttggttggttggttggttggattctattattcttttacctgaaaaataatggttatggtgaatctgggaatgcttcat

SEQ ID NO: 18545 - DNA, 451 bp, Glycine max
  modified_base (423)..(423): a, c, g, t, unknown, or other
cccacgcgtccgggtgccaattggtagtgggattgacatgtgtaattttgaggaccctttggatgtaaatcctcctgcattgatcagtttaggtggcaatgccaaattgtctgggtataatgataggattccctgtagcttgttgtccaaaagtcgtgacaatgtaccagtagttagtagagatgatgatgaaaactcttctgggtgtactcaccctataaatactgaaaccaagtcctttaggccaaagacttgtataggtaaaagaatggcttctaactttcagaaagttgctgaaaaaacaaagaattatgcactttctaacaatgatggagattggaagcgaacttacctcagcaagaggaactgcaataaacaccaaagttctcagatgaatattcctttcaaaaagaggaagctttntaattatcgctcttgtgcaaactctaat

SEQ ID NO: 18546 - DNA, 458 bp, Glycine max
gggttatcaagtaaaagccgtggctttcctttaaaacatgatgagaaaaatatccatggtgggggtacaagttatggtgcaattgaagccaaggggaatccgccgataactccagcagtgatgactcctggaggacctcttgatctcacatctgttttgttcaggaatcgtataatcttcataggtcagccagtcaattcacaagtggctcagagagttatatcccagcttgtgactctagctactataaatgaaaatgcagacatactggtatatataaattgtcctggtggaagcacatattcagtgttggcaatttatgattgcatgtcttggataaagcccaaggttggtaccgtgtgttttggagtagctgcaagccaaggagcacttctacttgctggaggtgagaagggaatgcgctatgcgatgccaaatgctcgcataacgatacatta

SEQ ID NO: 18547 - DNA, 450 bp, Glycine max
caagaaacaacaagggatttccatggaagtctcaaaagaagaagctcgagtggcacccgcacgggccctagtggcgatgctgccatcccctggcatgggccacctaatcccaatgatcgagttcgcaaagcgagtggtgtgctaccataacctggcggtgagcttcgtgatccccactgacggcccaccttcaaaagcccaaaaggcagttctggaggcccttccggactcaatttcccacaccttactccctccggtcaatctctccgacttcccgccggacaccaaaatcgaaaccctgatctcccacaccgtcctccgctaccttccttccctccgccaagcattccactccctctccgccacaaacaccctctccgccgtcgtcgtagacctcttctgcaccgacgccttcgacgtcgccggcgaattcaatgccttcccctacgt

SEQ ID NO: 18548 - DNA, 471 bp, Glycine max
cccacgcgtccgggcttgttcattctctgtttctgcactgaggcaatttggatcaaattttgtcatctttagtttgggtgattcgccccctactttttttcccctctttgtattttttaaaatattttttctttttttttgaaggtacggttgtcggaaattttttatttttttcatcgtttttgaataaataggcgaatttatgagatgggtttgggtttttatgcttaatttttcgattttgtgcaaacttttaaaatgggttgtggtggagaggtcgaatccagaatttttcattgggttttgccttgagttgactttttggggatgcagaagataactgataaatctgatgataggaccactgggggttgtgaatcaatgcaagttgggaagtgggaatgctcaagttgcataaatatgtagtcatgaattgatatttgatatttagtgtagccttttttttattga

SEQ ID NO: 18549 - DNA, 451 bp, Glycine max
gttcttctttctttttcagaacctgctctcttttttctgtttttttcttctgattttcacagatccgagcgaaactatagagaatgtcagaaacaccccaaaggaagaaagcgagcctttccccaaaacgaggtcagatcaaggctcaaatttttactagccttgtgaattcagtggcctccactatctcaaaaacaggggaatcgcttctaaacgtgattggaaatgggggcggttcaggttctgcatcttctaccccacccccaagtagtggctacaactctgaggccaactcctccgatgtcacctagaatcaatcaagtggcttttttctacgtggcttaaccaatgtttttgctggttgaccaggaacttttccgtaaactctgctactgctagtgttgtttttgagagatcacagatcttagggagcttacttcctaccctgttt

SEQ ID NO: 18550 - DNA, 323 bp, Glycine max
gcgaaacatgctctctctccacatagaccctataaaaaaacacaaacctagtcacgttgccatcctctcttctgatcctctaaaggctgcactctcttttatccctcaaaaaccaaaaccctaatggcagagcgcggaggtggcgaccgtggcagcgaccgtggcggtttcggacgcggctttggtgggcgagggcgccgaggtgacaagggccgaagccggcgccgaggtccccgccgcgaggaagaggagaaatgggtcccagtgaccaaactgggccgcctggtgaaagaaggaagaatccgaaaccttgaacagatcta

SEQ ID NO: 18551 - DNA, 438 bp, Glycine max
cacaaagagaagcattagcactaggagcagcaacaactagtctcagctgaaatggcctctggagtgatggcatctgtggccctcaaacctgcccctttcactgttgagaagtcctcagtgagaggccttccctctctctcaaggaactcttcttcattcagagttgtggccagtggcaagaagatcaagactgacaaaccttatggaattaatggtggcatggctttgagggatggaactgatgcatctggcaggaaaggaaagggaaagggtgtttaccagtttgtagacaaatacggtgctaatgtcgatggttacagtcctatctacgacaccaaggactggtctccaaccggtgatgtctacgctggcggtacgactggcttggctatctgggctgtgactctacttggtcttttagctggtggtgcacttctt

SEQ ID NO: 18552 - DNA, 444 bp, Glycine max
  modified_base (328)..(328): a, c, g, t, unknown, or other
gagaaaagttagggttcacaacttttccttttccttttgcttgcgaatctgaatcaaatgggcaatcatgcgttcattattcatcatgtcgtcggcgaagaaaatcacgctgaagagttcggacggcgaggctttcgaggtggaggaggcggtggcgctggagtcgcagacgataaagcacatgatcgaggacgactgcgccgacagcggcatccctctgccgaacgtgacgagcaagatcctggcgaaggttatcgagtactgcaagaagcacgtcgaggccgcgaatcccgaagacaaaccctccgaggacgatctcaaggcctgngacgctgaattcgtcaaggtcgaccaggccacgctcttcgatctcatcctggctgctaactacttgaacatcaagagcctgctggaccttacatgtcaaactgtagccgacatgat

SEQ ID NO: 18553 - DNA, 453 bp, Glycine max
cccacgcgtccgaagatttcagttccaaacaaaacttatcaaaatctcatatactgattcagttctatacataaccatcgagatttactatcaaaccaaaaattctcaaaatctcttcacctctgtgatgaccatggaatacagaaccttagaactcaacatcatatccgcaaaggacatcaagaacgttaacctcttctccaagatggacgtatacgccgtcgttacgctctccggcgaccctctccaccctcagggcgccaccacccacgtccacaaagacgccggcagcaaccccacgtggaactaccccgtgaaattctccgtcaacgaatcgctggccaaggagaatcgtttgtctcttgagatcaagctcgtctccgaccgcaccctcggcgacaccgttatcggcaccgtccatgttcctctcagggaactcatggacaatcccgg

SEQ ID NO: 18554 - DNA, 450 bp, Glycine max
  modified_base (352)..(352): a, c, g, t, unknown, or other
gcttcgctaactgcttacgcagtttggcatatatgcagtttcttccgagaggtaacggttggggtccactccaagttggtgaaatgtcacagcttctcatcaaccaccgcttgctcctctcttccacccccggatttgcctcgtttggcaaaaactgctcaaatttcacttaccccaaacgaggttgaagaaattgctcccaaaattcaacaagttatagaatgattgtttttgcagtgagccaaacttttgaatttggattgaactgtcttgtgtggcatgtttggacagctgcaaggtattgatcttgaaagtgttgaaccctcgatcagagcagagactgaaaacaatntgcgtggtaatgctcctgaaacatttgaccatagggacgccttgatcgcttctgtcccgagctatgaggagccttatattaaagttccgagggtctta

SEQ ID NO: 18555 - DNA, 452 bp, Glycine max
  modified_base (424)..(424): a, c, g, t, unknown, or other
  modified_base (433)..(433): a, c, g, t, unknown, or other
cccacgcgtccgcacggtgatccgtatccttttgatggtccaggtgggatattgggccatgcggtcgctcccactgatgggaggtgccactttgacgccgacgaatattgggtggcgtctggcgatgtcaccaaatcgccggtgacaagtgcgtttgaccttgaatctgtggcagtgcacgagatcgggcacttgctcggattaggccactcgtcggacctaagagccatcatgtatccttctataccacctcgaactaggaaggtgaatctagcgcaagatgatagacgggattcgaaagctctatggtatcaacccctaattattatagctaggtgttgtttgtactagaactagagttttatttcggtaatttgcattaaaggattttgaaagttatcgaggtgaaattattctaattcangaacaacanaaatagcatgtaagatatt

SEQ ID NO: 18556 - DNA, 428 bp, Glycine max
  modified_base (327)..(327): a, c, g, t, unknown, or other
  modified_base (329)..(329): a, c, g, t, unknown, or other
  modified_base (362)..(362): a, c, g, t, unknown, or other
tctctctctctctctcttcacgttcgatctttcgcttctgaatctccaacgatggtgctcgaggcgactatgatctgtattgacaattcggaatggatgcgtaacggggattactctccttctcgatttcaagcccaaacagacgccgtcaatcttatttgcggtgctaaaacccagtctaatccagaaaatacggtgggagttctcacgatggcggggaagggcgttcgtgttttggtgacccctaccagtgatctgggcaagatcttagcttgcatgcatggactagaaataggcggtgagatgaatctagcttgctgcattcangntgcacaattggctcttaagcatcggcagaacangaagcaacagcaaaggattattggctttgcttggaggtgtgaataaactgttcttctgtggtattt

SEQ ID NO: 18557 - DNA, 372 bp, Glycine max
  modified_base (276)..(276): a, c, g, t, unknown, or other
cgcgttcgcccacgcgtccgcacaaggcacattggtaataggaagaaagaaagaaagaagattaagatagggcatctcccgaaacagttgaccttgtgagatacagacacagcaccttcaattcttcatttctcaaatcgcaattcgtaaaaccataacaacacaaagtgtctcaaattcacattaaattctccctccccgaaaaggatgtcgttcgaggtggaagaggaggaggaggcgttcgagcacacgctcttggtggtgcgcgaggtgtcngtgtacaagatcccgccgcgcagcaccttcggcggctacaagtgcggcgagtggctccagtccgacaagatctggtcgggccggatccgcgtcgtg

SEQ ID NO: 18558 - DNA, 187 bp, Glycine max
atccactcaacccactattctcctttctagcacaacacaaactttatacacatacgtcatctttcaaaacaggtcaccttatcacatacagacacatcacccaccaactcttcactcctaatatctcacaacataaaaccacaacaacacagaccgtaccaatttcacataaaattcatccttccca

SEQ ID NO: 18559 - DNA, 496 bp, Glycine max
  modified_base (30)..(32): a, c, g, t, unknown, or other
  modified_base (43)..(44): a, c, g, t, unknown, or other
  modified_base (51)..(52): a, c, g, t, unknown, or other
  modified_base (65)..(66): a, c, g, t, unknown, or other
  modified_base (81)..(82): a, c, g, t, unknown, or other
  modified_base (94)..(94): a, c, g, t, unknown, or other
  modified_base (96)..(97): a, c, g, t, unknown, or other
  modified_base (105)..(106): a, c, g, t, unknown, or other
  modified_base (111)..(111): a, c, g, t, unknown, or other
  modified_base (114)..(115): a, c, g, t, unknown, or other
  modified_base (123)..(125): a, c, g, t, unknown, or other
  modified_base (131)..(133): a, c, g, t, unknown, or other
  modified_base (158)..(159): a, c, g, t, unknown, or other
  modified_base (180)..(180): a, c, g, t, unknown, or other
  modified_base (186)..(186): a, c, g, t, unknown, or other
  modified_base (194)..(194): a, c, g, t, unknown, or other
  modified_base (196)..(197): a, c, g, t, unknown, or other
  modified_base (219)..(221): a, c, g, t, unknown, or other
  modified_base (295)..(296): a, c, g, t, unknown, or other
  modified_base (328)..(330): a, c, g, t, unknown, or other
  modified_base (350)..(351): a, c, g, t, unknown, or other
  modified_base (356)..(357): a, c, g, t, unknown, or other
  modified_base (364)..(366): a, c, g, t, unknown, or other
  modified_base (397)..(398): a, c, g, t, unknown, or other
  modified_base (444)..(445): a, c, g, t, unknown, or other
  modified_base (466)..(468): a, c, g, t, unknown, or other
cgtctcgtgtcagcagcaaatttggggctnnntactccctgtnntgatccnntttattccagatnnatgtgccttggttanntgcgagtatgcncnnatgccacnncagcntanntgaatatnnntagtannncgtggcttcaaagctgggtttgaanngtagggaaatggggaagagtnggttcnaagttatntnnctcttggtggacccatatactnnngctgcagccattagcactttcactggcctggtcaacaaattcctcttggtggcttattaatcttaaagggcgtnnctttaagtttctgggatttcaaactggctaannnactcttctaataccagaacnncatanntataatnnngttgtgtgaactggacaatgtcataccaacnnaattttctttcaccaacttttggttctaattcaaggggacatatannatgaaagaaaagctagaaatnnngtatgtttaccgaattggagtgaaaatt

SEQ ID NO: 18560 - DNA, 456 bp, Glycine max
  modified_base (336)..(336): a, c, g, t, unknown, or other
aaccggcaagaacctcgtccagctggcttccaaaggcggacagaggaactccatcaacgttgttctgacatccgctgatgtggcggtcgaaggtttctgtatgagccgatgtgggacccacggctcttccgcttctcatctgaagaagaacagcaagagctacaagttcgcctacatctgggtgggaaactccgaaacccaatgcccggggcaatgcgcgtggccattccaccaacccatttatgggccccagagcccacccttggttgctcccaacaacgatgtgggacttgacggaatggtcataaacctcgccagcctccttgccggaaccgncaccaaccccttcggaaacggctacttccagggtcccgcggaggctccgctcgaagccgcgtcggcgtgccctggggtttatgggaaaggggcttaccctggttatgctggggacttgct

SEQ ID NO: 18561 - DNA, 322 bp, Glycine max
cccacgcgtccgcccacgcgtccggcggcttcaaccttgtagttattctctttcttcttttgtagctatcgctctcttgaaaaatctagatctcgttcttccttgatctacgttacgcttttagtgaccggatctgtatggatctgaaccagatctacacgccgatggtggttttggcctggtctttcatagatctgatgcatggaggctcagatctactgtacagaggtgtgcgattcatgttcgtctctcttttggaatctgtttcgtagaaagtcgtttggtcttccatgtcgcatggctcttgaggtatttttttttg

SEQ ID NO: 18562 - DNA, 417 bp, Glycine max
aaagaagaaaagaatggtaacaatagctggtggtgtgagtctttcaagccctagcagggtatttgctaatgctaagggaatagactcagcacaaaaggcccaggccgtgaggtttccagctctgtcgaggcccattcaaaagtggcctggtttggtgaagacccggcccgttcgggcgacgccggagaagatatcggagaaggtagaggagagcataaagagcgcggaggaggcgtgctcgggaggcggcggtgacgcggaatgcgcggcggcctgggacgaggtggaggagctgagcgcggcggcgagccacgccagggagaagcataagcagtctgacccgctcgaaaattactgcaaggacaatccaaagactgatgagtgccgcacctatgataattggatgactgaactcag

SEQ ID NO: 18563 - DNA, 373 bp, Glycine max
aaatttgaaaagagcgatagacaaagagagaaatggcatcggtgtccgggaaacataaaggggtttttacagaccagaagaaaaccaccgccaccaaaaaatcttccaaaaaatctccgattcccgccgcggcccaatcaccggccctcatatcccacggcggaaaacccgacctagaagatgagtacaaggaagagcgaggtggcactgcggcaattcgacctgaacatggcgtacggaccttgcctcgggatgacgcggctcgcgcggtgggagcgcgctcagaggctcggcttgaaccctccgcaggaaatcgataggctcttgaagagtggcaaggttcaaactgagtccttgtgggatggtcgcattt

SEQ ID NO: 18564 - DNA, 435 bp, Glycine max
tctgcctgattatgggactcatgctgatgggcggccatctcaagatgttgatgccagaaccagttttgttagcaatgttcattttgctgccaccaaagatggcctgtctcggcattttaatacatctggggatgtcattaaaagggattctagttacagatgcagcaacagggcagccaaaaggggcaccttatgttgagttcatgctaaaagaagcggcgtacaatgcataatctctggataacacttctttcatgtcaagaattctcaacgttattaagaaaagtgctactcctcatgaatcagctccagccatggcatggccacgcattgttaacggttctgcattcccttctgctaggttttccagacatccctttccaagaggtattcctggtgtgtttagagctcgacccccaattaaactgggtgcca

SEQ ID NO: 18565 - DNA, 408 bp, Glycine max
gtcggactcatcaagagtgttgagaagaaataccccaccggagccaaagtcaccaatgccggtgccaagaggaagtgattgcatttgggcaattttgctagcacatgtgatcatcatcgtggttactcctttatagcagttctatccttgcagagtcttaagtgttttgtttaagttatattcttaagtttctgccgatttcatgtagccgtaactttcaaaactaggtccttgatcggcggtggtcaattttcattgctgtatgcttttgatgagtactgatttttgttttgatggtaagaagagtctgagatatttcgaactttacaagcagctatatggttttagtccattttctttgctgctgacggatgtgttaagttgcaattaatttataacgagctttat

SEQ ID NO: 18566 - DNA, 146 bp, Glycine max
caaaatgggtggatcaattttggacatgaaatccaatatcaacaacaacgagttcttggcaaatcattacatttattcaacaattctaacccttatgatcataatcttacaaacatcattatcaactattcaataaccattccact

SEQ ID NO: 18567 - DNA, 377 bp, Glycine max
cgaactcgctcaggattgcaacagatccaggtgatgcacgatacactagtgcatctactgaggacgtggcgggatatggacagagaaatgctcttaatgttgctaataatatcacagtatcttctgctagaaatgagcattctgagataaattctcatatgggtacatcatggttagagcagtgtgtaacttttaaaacagcgaatatgttgcagatgtatgatactctgacatatgactccataaatagttatggaccatcctttaattataaagaaccaatctgtgtagtagcatcttgctaattcaatggatcaagtttacaagctcaatgatgctgcgcaaaattcaatgcttacttcagatgctaatgagca

SEQ ID NO: 18568 - DNA, 442 bp, Glycine max
cggacgcgtggggttttctttgcagacatatcttggatcccatttccatcaggtcagtgcgcgtatgtactgtgttcagaaaggttggtggtgactggtgattgttgaagagaataatggcaacttcaactatggatattcttcatttccaccacactcctttttattgtgaggagaatgtatacttgctttgcaaaaagttgtgcaatgatggaatagcaaatgctgatggatctgatctttttgttgctttcatttccaacgaaaagaaacagatcccactttggaatcaaaaggctagcaaaagagctgatggggtgattctattggattatcatgtaatttgcattcagaataaacaaggagctgtccctccactagtgtgggacttaaattcgactctttcttttcctttacctttaccattatatgtggctgaaac

SEQ ID NO: 18569 - DNA, 367 bp, Glycine max
ggcagattccttgccctcaatcggcgcaatatatgaccgctagaagagctagctcacatgagcttcaaccggcaccgttcactcttcgaagaactagacggctcatgatcgtacagttacagaaccctcaccactctcagcctcatcgttacggcatttgaaggctccttttctgccacctcaatgttgtcgtcttgagttgacagacctactcgtggttggaaccatcgaaatgacaatgcaagtgcacctatggctcttcattcccgcgctgattgatagatcagtggagaagcatggagtgaagatagagattacaaaataagaacggttggaaatggaagaaggatgagttggatcgatggtg

SEQ ID NO: 18570 - DNA, 117 bp, Glycine max
tcctccttcatcactaactaccattattatttccaccctcactcactcgtacattgggcgtctatctgaaaattattttatctctgaaaaaactcccgcgtccatctttgctcattt

SEQ ID NO: 18571 - DNA, 381 bp, Glycine max
gacaccatgaacattaattcacttgcccgcaaatccttggtcaatgcagacggtattatagagaaaacaggcttgtggggtaggtactctttggaaatgtctgctgttatttacaaggactgggttttcactgatcaagcattgcctaatgatcttgtcaagagaggagttgcggttaaggatccatctgctccccatggagttcggcttttgattgaggactatccttatgcttctgatgggctagagatatgggatgccatcaagtcctgggtgcatgaatatgtctcattctactacaagtcagatgcagcaattcaacaagatcccgagctccaagcttggtggaaagaacttgtccaagtgggtcatggtgatttg

SEQ ID NO: 18572 - DNA, 273 bp, Glycine max
  modified_base (82)..(82): a, c, g, t, unknown, or other
gaaggacggaccattgttggttgtcgcgtgtggaagagataccatttctactgcaagttcggtaaaacgtggagcatctganaatgcttttgatgttcagatacaaaatccaagactgcatctgaataggtttgacatggtgattacacctaagcatgattattatcctttaacttcagaacgacagaaacaggttccttggttccttcgaagttggataactgcacgtgatcctccagattgtcatgtggttctgaccatgggggcgctaca

SEQ ID NO: 18573 - DNA, 311 bp, Glycine max
cgaaggactttaggttgggatttgggaattagggttattcgcgtggctaagatgattgatgtggttttgaacgatcgattgggtaagaaagtgcgcgtgaagtgcaacgactatgataccatctgcgacctgaataagcttgtggcggctcagactggcacaagagccgacaagatccgcattcagaagtggtacaccatctacaaaggatcactttactcttaaagattactaaatccaagacggcatgggtcttgaacttttacttcacttaacacaacaaggtgtgttttatgcgtaatatactatgt

SEQ ID NO: 18574 - DNA, 422 bp, Glycine max
gcggcaacccgtccgcgcctctttctcccaatgccttccctccgcctgggcccactcggcgatcctactcccggatcaactcgcccgtgactcaccgcagagctgccccgaccctgaccccaacctctactaccagccagtcatcggaatcgtcagccatcccggcgacggcgcctccggccgcctcagcaacgccaccggcgcctcctacatcgacgtctactatgtcaaattcagtgaggccgccggcgcccatgtcgatcccctcatgtataccgagccttcggagaagcttctcaagaagctccaattggcaaatggggatctcttcactggtggatgggctaaaaatggcttatatcttgaaactgtcacaaaaatatttaagaaaattttacagaacaatgatgctggagatcatt

SEQ ID NO: 18575 - DNA, 290 bp, Glycine max
ggatatatatctccagaatatgcgatgcattgtgaacactcagacaaagctgaattctatagctctagagttaaatccttataaatagtatctatcaagagcaataccatccaccgatccaagcaagaagcattagcatcttctatattagtcacattaattgaaagtgatggacaacctaatggaactagtagataaaaggctaagttcatatttcaattaatatcactttattattataatcaaagttgcactactatgcacctataccactttaaaccttaggctca

SEQ ID NO: 18576 - DNA, 421 bp, Glycine max
  modified_base (383)..(383): a, c, g, t, unknown, or other
ggttcccatggcttcttcttcttcgattcgacccactctctcctcccttagattcttaacgccgtcatctgtttcgctctccaacccttcttctcgtatctctttctcccatcttccctctccctctgtgtctcaatccaatagttttggcctcaaagcttccagagagttgagacaacatggcaactccacgagaatcatggcatcagggcacgtgtctcaatcgatttcagctgcttcaccagaaaatgtgcttgagtgggtcaaacaggacaagcgaagaatgcttcatgttgtatatcgtgttggggacttggacaggaccataaagttttatacagagtgcctaggaatgaagctcctcagaaagagggacatacccnaggagaaatatactaatgcctttcttggatatgggccc

SEQ ID NO: 18577 - DNA, 208 bp, Glycine max
gattcacagttctgtgcaacgtttttttatcccttgcgcttatgtaccttaaccgggttggtgagaaacaagctatgtatttctgatgaatatgcatgtgaaatggattctggaggttacaccaatgaataacccagacttgttttgcccccatctaacagagaatcaatgcttcgatcattatctactgctgatggaaacaattcaa

SEQ ID NO: 18578 - DNA, 311 bp, Glycine max
agcaaacacagtcatggcctcgattcttcaatgcttactggatccgaacaacaactgatcggcccctcaggacatgacatacctctccagacggcttcgcaaatacgggctcccatatgacgatttgtacgatccttactacgatctagacgtgacggacgcgctgcatcggattcccgaagatgtgcgcgacgctcgccacgcgcgtcttacacgcgccatctatcttatcatgaagcacgagtacctccctgacaatcttcaggcaatgcaaacaccaatcaggcgctaccttcacgatatgctgactc

SEQ ID NO: 18579 - DNA, 301 bp, Glycine max
cccacgcgtccgcagacccatagagtttcacatagctccttcatcataggcattttcagggttcttccaggcacactgttaccatcaatcatatacgtctcgattctaaaatctctaaaaagatgcagctacaacatggctctgctggttaagccattaataacctatcacaagatctgatttactacgtcgccggaatgattatcgacaagtcaaaggtggtgggagaccagagcatcttttaccggcacaaaaaagatcactttggacccgttgtcaagcttgagaagttctcactcta

SEQ ID NO: 18580 - DNA, 381 bp, Glycine max
ggggaatcctctgtctacacatagaccctatataagaacacatactctattcacactgacatgctctcttctcatactataaaggctacgctgtcttatatccatcaaaaaccaaaaccctaatggcaaagcgcggaagacgcaaccgactcatctaccatcacggtctccgacgcagtttaagacaacgatggcccttatgcaacaggcgccattgccggtcacaaagtacatgacacgaggaaaatgagaaatgggtcccaatgaccatactgatccacctatttaaagatggaagaatccgaagccttgaacagatctacctacaatcgctctagatcaaagagcaccatatcatcaacacgctcgagggttccaacc

SEQ ID NO: 18581 - DNA, 329 bp, Glycine max
cgctttacacttttattcttttacgaaatcgattctgtatcgaaatctctgccaccggacagggagcgcgtacgaccttcccattgtttcctcaacgtgaacaatacaacaccacaccaccacccactaacaatacctaaagcctaacgaaccctaattcttgatcattgctcaaatctttgttccctttccatctcggagacacgaattcgccttcttcctcattttccaaacaaatttcccctccgcaactcccccaatttattcttttttttgcattttattttacccttttgaacctgaggctttttttcgacgccccccatata

SEQ ID NO: 18582 - DNA, 340 bp, Glycine max
ccccttccactctttacttggggcagttttattaacacaccattgattttatttcaactttatttggaatacggttgtatcgctgactcgaaatttttctgaacacaaatattcatgcttgttcaacctatatttcttttcatcatcaacctatttggaccaaatggttaaatttccctgcaaaaaggtcttggcataataacggattttttcctcacgtgaggttcttcaatattaaaccatccaaatcttcttcatttttaatcaagtttagtcactgtgaaaccctatattgtacctttctctacgccctatatctgaggccactaaatctttcttt

SEQ ID NO: 18583 - DNA, 403 bp, Glycine max
aaaaagtggaggattgttgaagagagagtctcgtgatttgagaaggccacaaatctccgaagtaaaagcttcaaatttcggtcacaatttaaagaaaaaggggatttatttaaaaacttttttaaataaaagaacagaacttggggtgtggcaaagcagagaaagaagaagaagaagaagaatcatttgggtgtgtttttgaagtgaaaggtgatgtcgggttcttcttcatctgggtctgaagaggaggatgaggggttcgactcttaccggaaaggagggtaccacgccgtcagagtcgccgatcagttcgccggcggcaggtacatagcgcagaggaagctcggttggggtcagttttcaacagtttggcttgcctatgatactactacatctgcatatg

SEQ ID NO: 18584 - DNA, 400 bp, Glycine max
  modified_base (367)..(367): a, c, g, t, unknown, or other
gcaggatctttatggggagcttctggataatgcacggttaaaccaaagtaaagaagttctggcagatgataaaaagcatcttgagtttctgaggttccaaactgagattcatgaaagttactcaacttttcttgaagaacttgtggagcagctctctgctgtttcttatggcgatgttatttttggccggcaagtttcactttatctacaccgttgtgttgaaacttacattcgacttgctgactggaatacactgaccaattctcgtgttcttgagcttttgccacctttagaaaaatgcttctctggtgctgaaggataccttgaacccgctgaggataatgaagcaattttggaggcttatacnaatgtgggggtttctgatgcccttgacagggct

SEQ ID NO: 18585 - DNA, 269 bp, Glycine max
  modified_base (13)..(13): a, c, g, t, unknown, or other
tcgcccacgcgtncgccactcgtacactcaattcaagatgtaccccctcaaaaaacctctggggacatggtgaaaggacttgcatctcataaaccttcctccagaaaatgcatctatcacgcattgagatgcacagtacctgctcgtctcgatcggttatcaccattgcagatactattcgaagcctgcccatgtcttaaaataggatacatccatgcaaatgacgctatacctgacgttgatcgagatgatatgaaagttcacataat

SEQ ID NO: 18586 - DNA, 152 bp, Glycine max
ctgcttatggatttcccctaaacctcccctctctcttcttcagtttcggtgcttttacattttcttcccaaaaaaaaaaatccccacaacaaaaaatggtctttcttcttttttatattaaccaatccttcaactctcccttatttcttttc

SEQ ID NO: 18587 - DNA, 410 bp, Glycine max
cccacgcgtccgcccacgcgtccgcccacgcgtccgcttggagctgcgagcactagttttcccttttccccttgtttgtttttttaggataataattgaccaattgggtatcttgtcagttgagacatttttcaagaagtagcaaagctccttctacaatatttgacttggtgctttccttttggatcttacaatgggaaacagtgaggaagagaaatctaccaagactgaaaaaccttcttcacctgtaacagtggatcaagccaatcagaccaaccagaccaatattcatgtctatcctgattgggcagccatgcatgcatattatgggccaagagtcaccatgccaccatactacaactcagctgtggcttctggtcacgctcctcacccatacatgtggggaccac

SEQ ID NO: 18588 - DNA, 418 bp, Glycine max
gatccggctgctatggacgagagaatgaggatgcggatggagtccaaccgcgagtgcgcggggcgatcgcggatgaagaagcataacctgctcgaagacctatccgacgtagcgagtcgccttcaaggcgagaacgtgcgcttagcgcagagcataaaggcgaaggatgaagcgtacgttgagatcgaagccgcgaacgacatcctcatagcacagaccatggaactcgccgaccggctaaggtttctgaactccattctcgatatcgccgatgatgtcagcggctgtggtgaatcctttgagattccgcagattccagaccctctttttatgccctgtcatatgccccaccctatgatggcgtcacctgacatgcttcctcatggatatcaaggcctgtttgcttgatttactttaa

SEQ ID NO: 18589 - DNA, 347 bp, Glycine max
cccacgcgtccgcccacgcgtccgcactactcaacacaaaaaatagtcttaattagttagggtgtcaatttgtgcctcaaattgaaactagctatagatatggccaattcccttaataaccacctgtttgttgtagtatctattctttctctcttagccttttctagcaacgcacaactatctcccaccttctatgccaaaacttgccccaaccttcaaaccattgtgcgcagtgcaatgaggcaagctgttgctaaagaagccaggattggtgcctctattcttcgcttgttctttcatgattgctttgtaaatggctgtgatggatcaatcttattggacgacac

SEQ ID NO: 18590 - DNA, 231 bp, Glycine max
gcccgctttctccactttttttagggttttctttaaattggtctctcttttggggggggctttgagttttttgtgaaaaaaaaaattccccaatacgaaaattgggctttgtgccttttttatgaaaaacataaaacctcttccaaatttgactcggggcggtccttttgggtcttaccacgggaaacactgtggaagagaaattctaccaagactgaaaaaccttcttca

SEQ ID NO: 18591 - DNA, 267 bp, Glycine max
ccatcgcttactttcagatcaactcaaaagattccaccaagaaatatagacgctagggttaggttacattagcgttagcacgcaatactttacatatatcgagagcagcttacgagacatgtagaacaacgttgaggagctcattctactgcaagactctgtttaccttatcctgctcacttcatcaaacgtgttcaacaagtacatgaaaaaatctaacagcttcaggccggaacgctcggtgagcattcgactgatgctaagttt

SEQ ID NO: 18592 - DNA, 248 bp, Glycine max
gaacacctgttgaagaaaaaaacgccctcgccctcggaacccatgaaataccctaaggagggggcattctatgaagatacgatccctaatttgcagaaatcctctcaaaagacgctttgaaattcaacgctgaactgcaaccagagttcaagagcgacatctaccatgcattacacagcacaagagatgcgaagactaatgcccatgcagggactcttccggtgtttgatccttccacccatcacatt

SEQ ID NO: 18593 - DNA, 169 bp, Glycine max
aggggttctttgctttcaagacccatgaagttcttgttccactccttgtgaaggataccttgccactcattcccacccaaaaactttttttattaattcttcaacctcaaggcttccttaatgagaatgatccaaataatacgactatttttgttggcaaattgtatcc

SEQ ID NO: 18594 - DNA, 149 bp, Glycine max
ccgacgcgttcgattagactttagttcaaaaatttaagtccaatcgttgtgtattgctctggctctcataagcgagaatcttacacacttactcctactccgactttgctatctaaactttctgaaccaatggaaagacctattgtgct

SEQ ID NO: 18595 - DNA, 419 bp, Glycine max
cccacgcgtccggtctgaatcatgtgctgcttctagctccaaggcatgtcgagagaagttgcgaagagataggcttaatgacaagtttgttgaattgggctccattttggagcctggaaggcctgccaaaacggacaagactgctatcctgattgatgctgtccgaatggtgacccaattaaggggtgaagcccagaagttgaaagacactaatcagggtcttcaagaaaagattaaagatttgaaggctgagaagaatgaacttcgcgatcagaaacagaggctcaaggcagagaaggagaagctggagcagcagctgaaatcattgaatggacagcctagtttcatgccttcccctgctgcaatccctgctgcatttgcggtgcaaggccaagcccacggcaacaagttggtacctt

SEQ ID NO: 18596 - DNA, 276 bp, Glycine max
aaatcaacaagttgagatgcagagttaattatcatgcactgaaatttcttcctgaggtagagcagatggctaattcacttgcatcaagaatgagaaaccgtactggcagttcaaatccttacatggctctgcatcttacatttgagaaaggaatggtgggactatcattctgcgattttgtggggacaagagaggagaaagccaatatggctgagtatataaaaaaggagtggcctctacggtacaagaatggttcccatctgtggcaattagctc

SEQ ID NO: 18597 - DNA, 363 bp, Glycine max
acgcggacactgacccttatgttactgaaaaccttatccctcacacctacatggtagtggacaggcttgaaactggggagcaggtcactcacaatgtgaacactcctgtggagaataaaaggaaaaccacaaatggatcttccttgactagtaacccccaatccaaggatgctgcaacagaaaggaaaaacaagacacatatgaagggcaatggtgggttgaaagaagaggacaaggctaaacaagagaagaaggaacagagaaagtgtcccgaagagcctccaacaggctatatccatgtcagagcatgaaggggtcaggcaacggatagccacagccttgctgatagggtgagaagagaga

SEQ ID NO: 18598 - DNA, 446 bp, Glycine max
attaggggggcgacccacgcttccgcccactcttacttaaaaaaccaatttcattttttcagtatagttgatccgttaatgtagtgtgaatgttgtattcccattcaaactatcttaacttatatatatacattctttacattcttctatcttgattcaaatttatggtttcgattggtgcaaacccaataatcttaatttacaatttaatatcaaaatgacttttccatctctatcaaaacaaatttaaatttaccctttaatcgtataaaaaactattttaattataatataatactatctcctttaatgaatgaattcttatcgattttctcactatcctaatttattaattatatcttctccatcaaattttttactaattataaacccattactgttttaactacatattcatttgtcaaaaaaattctatctttactaaa

SEQ ID NO: 18599 - DNA, 113 bp, Glycine max
cccgtccgaggaagtgaagtttatggctacagtcccgccttcccatgcaaaatttggggaacagaaaaggttaaattcatggtaaacccccattattaatacttcacctgccc

SEQ ID NO: 18600 - DNA, 202 bp, Glycine max
cgtccgcgagacgtagaataagaggattcgtgattgtgcaggcgagggatcgcgctgcggcgttgcctcgtttgtttcgtaccatcccacactcataatcttgctatgcatcaaccggagcctaccactgacacgtacacacatgtgaacgcgtatcgtcccttccatggctcggaagcgcatcctcatggagctcaaggac

SEQ ID NO: 18601 - DNA, 301 bp, Glycine max
cccacgcgtccgggcaatagcagcagcagcaacaacgatgatggggaattgactggggctaagcctgctcgtccgtcttacaacgcttttgagataatctcgtccttgtcgaatgggttcgatctgaggaatttgtttgagacgaggaagcggtcgccgtccatgttcatttccaagttttcggcttcggcggtgatggcgaagctggagggggtggcgaagaagctgaactttatggtgacggggaagaaggagttcgtggtgaggatgcacggggcgacggaagggaggaaggggagaa

SEQ ID NO: 18602 - DNA, 262 bp, Glycine max
ccctaacctactcctcttgctgtcttccattatgttgggaggaatgtccaactgcgactctatgaatgccttttccattcttgctgctaataataatgcctccttcacccaaagtttgatacccggcacaatggtgtaggtatctaaagatcctcacgcgcctatcatgactttaaatgctttttttcaattcaagtaggaaaaaaagaaggtgtttatctatgaacatactgacctcaaatcattgtgtgttgtgggcata

SEQ ID NO: 18603 - DNA, 174 bp, Glycine max
attggtcaatgtgtctcttggaatcaaaggtgtgccagggaattctacttttccaaggttacgttttgtttctttcaaagggtgaaaagcctgaaaattgcatttttccaaaatctggggtcttgcttaatacctggtgcctgggttttctatctgctaagtatctccttgttc

SEQ ID NO: 18604 - DNA, 426 bp, Glycine max
  modified_base (1)..(1): a, c, g, t, unknown, or other
ntccgcgacgcgtgggctaatattctatgataagtgatagtgggcattttcaggctatttgctatgatgctcttaggtagtataaaaatactactatactaatgcgagtgtttcgacgtcgtttcatcaaaatccaatactcgagctttcctaaggcaggtattgggaagtgtcaccgcacttctttcttttttttctgtagcgatttctagcgttttgtatatatagaaagtccaatagaactggaaaaggctgaagaggtagaaataagacacctatgaaatagttgatggtgcagtgatcaaaagaatggcatgtagcaaaataagcaaggctcttttcaaccttagttaaggtgatgatgtttgataaggacttataggggttggtttctaatgtaaaattatacctaagttttgggggtag

SEQ ID NO: 18605 - DNA, 296 bp, Glycine max
cttttattaaaattaagattttattttagttttgaaaaaaacaaaaaacaaataaggagagggctacaaaaaaaatgggtctgccaaattgcaaagaccaattctactgacgcatccttacgaagttacaaaacccatatattcctaccttaaataaatccactgcccgactttttacaacaagctaacttgaaaaaccaccccgtatcctaacttaaaatctttttataaaatgccttttttgccagatagtgatatagcatataggtccaaacccatctgctttcctaacaatt

SEQ ID NO: 18606 - DNA, 435 bp, Glycine max
  modified_base (405)..(405): a, c, g, t, unknown, or other
ggaaaactttggacaaaaaatggagtgctacacaaggccaaacaggagtgacatggacctgtcagcagaggaagaagccaccatagaagcaaagaccagagagtactttgatggagtcgcaccacaacgccacacaaagcctcaacgaagtgactattcagctcaatatgtcgatgctttctccaatgcccatcactcttctttaactataccagaattaacacaattccaactcctccagaatgatccccaagagaaggttggttcctaatatcatctctaattttttcttcttcataatttcacttttatagaataataacaaaagaagtaataaaaaatgaaaattgcgtcccgtcctaaccgttggactacaaacgcttgtcatgttacttagcattactntttgaacttaatataaaaataatcttgaat

SEQ ID NO: 18607 - DNA, 348 bp, Glycine max
cccacgcgtccgataagctctggtatgacgttgtggctggcccttaacctgtgcggggccgggtcatgctcagaaaactcaccaccctcaaaactattgatgaaggagaaagtagcatgctgcataagacgttgtcgatgccgtctacaccaacaaccccgatgactccgactactccatcgacaccggtatcggcccgtaaagctgacaacgtttggaggagcgtcttccatcctgggagcaactccgtcacaaagaccatcggtgctcatatgtttgacaaaccacttcccaacactcccactgtctatgactggctttacagtggggagaccagaatcaggcacc

SEQ ID NO: 18608 - DNA, 352 bp, Glycine max
  modified_base (330)..(330): a, c, g, t, unknown, or other
aggatgatgatttgtggggatctatagctgctcctgctccaaaaactgcaagacctttaaatttgaaatcagctcaaactgatgatgatgatccttgggctgccattgctgctccagcacccacgaccaaggccaaacccttatcgactggcagaggtaggggagccaaacctgctgctccaaaattaaggtgctcagcggataaaccggacatcataaggcatgtaatccaaatttccaaggaaccaaaggaacagtgaaagagctaatcttagtgctagttgcccttttcttatggtggcagtgatcatgttaaaatacaaaacccgnctctatgatatatgaattacat

SEQ ID NO: 18609 - DNA, 434 bp, Glycine max
ggatgctggaactggttttacagctcaagtttacaagttgtcaacctttttcttgcacaaggaatggataatggagcagtgggataaaaacttttacattacttctattgcagggagcaacaatggcagctctcttgtggtgatgtcaaaaggtacgcagtatactcaacaatcctacaaagtgagtgaatctttccccttcaaatggataaacaagaagtggagagaaggttttcatgtcacttcaatggccactgctggaagtcgttggggtgttgttatgtctcgaaatgctggattcagtaaacaggtggttgaacttgattttctctatccaagtgagggcatccataaacgttgggataaaggttataggattacagcaaccgcagctacattggatcaatctgctcttatattaagtattccgagac

SEQ ID NO: 18610 - DNA, 91 bp, Glycine max
cgatcccgttactagtttaacagcttaagctttcaagaggtcctccttctttctgcacatggtacacctaactcttcttatctaatacaat

SEQ ID NO: 18611 - DNA, 428 bp, Glycine max
cctctctatatttccgctttcacttattctctctcaccctccaactatgagttactacaaccagcatcagccacccgtcggtgttcctcctccccaaggttacccaccgccggaatcttacggaaaggacgcgtaccctccgtcagggtaccctccacagggaggataccctccgcaggcgtatccagcacaggggtaccctccaccctacgcgcctcctcagtacgctcagcctccgtcgtaacaacaccataattcatctggcccgggttgcttagaaggatgtttggctgctctctgctgctgttgcctgttggatgcctgcttttgagaaagaaaagagaggttgctttgcacaaattggatttgaaactgtgttttgactgtgaacatgaccattatcgctcttagtttttattattttctat

SEQ ID NO: 18612 - DNA, 261 bp, Glycine max
cccacgcgtacgtgtagacatctattgcgactgctgttgcaaactcatcatcaccatcatacttgcgtgccgttggtactgatcatattcatacttgctctggagatggtgcataacttgcaagagaacatgtcataccctctagatgatctctcacgttctattgccatacttgctgaattagaatcaggtggctcacaaatgaatcatgctcactcaggaagggaacgcaaaattcaaaggaccctactggacttgctc

SEQ ID NO: 18613 - DNA, 379 bp, Glycine max
ggaaaacatggctttactttcataagtcctaaaccatttgccgcttgacctaatttcacccggttggctaacagctttcttctgcttcttccttatactccttcagctaataagaagaaacaaatacaatctgccaccatccccaccaaagatacccataatcggcaatcttcaccagctaggcacactgtcccaccgctcctttcatgcactctcacacaaatatggccctctcatgatgttgcaattgggtcaaattccaaccctactggtcttcatcagctgacgtggccagagaaataatcaaaacgcatgatgttgttttttccaaccgccgacaacctacagctgctaaaatctttgttatggatgcatggat

SEQ ID NO: 18614 - DNA, 182 bp, Glycine max
  modified_base (7)..(7): a, c, g, t, unknown, or other
gaatttnggttcgaccccgcgtccgccctacttacctaagatttaattttggcttatgctgttaacggacttctttaaagagaggattgggatacgtgcttaacgatgcccctttttgctcttcctgcatgaaatggcatggcaaaatctcttcttgattcacctgtggatccttgtgaagt

SEQ ID NO: 18615 - DNA, 273 bp, Glycine max
cccacgcgtccgctaatatttactttggcttttcacgtggtcatactttatttcgggccagggccttctaagatgactttctcaatagcacttgctgaactggaacttagctctcattcctaacaaaaggtccttcacaacacaatcctcttgctcctaataatgaacccctttcactataatcacccaattcttctccatattgtccaaaccatttgtatatactattcctctttatatgacattgatgacctctgtacaaacttagattac

SEQ ID NO: 18616 - DNA, 300 bp, Glycine max
tcgcaaaaccatccaacaagggaaacattatattattccattttttcacttccacacgggcttgcgttcattccccattttcaactatggcctcttcagctcaattttccaccactttggtcgtactatgtctcttccaattcctagcaggtaatcatttatactcattaatttttttttttgttttaaacatgttgacttttgtaatattcaattccagttcctggatatgcaactgggtgatcttttagaagaaaatgttagctacttgtattaatggtcatgtgttatgtttaacgt

SEQ ID NO: 18617 - DNA, 362 bp, Glycine max
caatctctctttctctctttttttgtgtgtccaaaatggctcctagttctgctcggaacggggggttctatgtgcttatgctacttggtatagtgtttagcactattgatgctacctgcgctggtagcttctaccaagactttgatctaacatggggtggtgaccgtgctaaaatattcaatggtggccatcttctatcactttccctacacaaagtctctggctctggcttcaaatcaaagaaagaatacctatttgggaggattgatatgcagcttaagctcattgccggcaactttgctggcactttcactgcttactacttgtcattccaagggccaacacatgatgagattgatttc

SEQ ID NO: 18618 - DNA, 428 bp, Glycine max
cccacgcgtacggttctgcaagattgtatctattggggaatctttcgctgcctcgggctagatcttttgaaaaaatatcgaatcctcaaagtgccgatcctcctaaatccaatgtttgctctttttagcccttctctccctatatattttttcacaagcacctctttcaattctctccgtttcactagctcttattccaaagcataggaagaagaaagaggagactagtctaatatggagaccatgaatgttcaggtgatgagaagcttatcagatatggtaattaaaaaaggaccatggactgaggaagaagattctgttctgatcaactatgttaacgtccacggcgaatgccactggaactcccttgctcgctcttcaggtttaaagcgaacgggcaaaagctgcagactaagattggtcaacta

SEQ ID NO: 18619 - DNA, 402 bp, Glycine max
aaaaaaactaccatttttaggttgggctcgaaattgattgaaaaaaaatgcagaaagaagagcaagaaaaagagtatttagaatcgttgacgtgtccaagcttcaactgctactccaccgatgaactcccatgtatcgctcaaagcaggattcataaggacgacgcgtcgttttcggcctctcaaaatgacgaccctgacttcgagttcgccgcgtttcgagacgacgcctttgagttctccaacgacgacgccgttttccctctcttcaacagcgacgttgcgagggaccgccggaacagtgtctccggcggtctcgattccgacgcggcggtgctccggtttccgataaccggcgaggagcttcgaaggggtgagcacgatccctcactgtcgccgtcgt

SEQ ID NO: 18620 - DNA, 416 bp, Glycine max
cttgcattcagttagactttgatagtttgattagctctaataaggttaaggaccagagagagaaagagaaataagaagaaaaacacaagatgggttattggaagtctaaggttcttcccaagatcaagaaggttttcgagaagaatagcaccaagaaagctgctgctgctgaggccaccaagtcctttgatgagtcaaaggaggaatacaacaaagcctttgaagaaaagaagactgaacttcaaaccaaagttgttgaaatatatgaggcttcatcaactgaaatcaagagtttggttaaagaacccaaggaagctggtttgaagaagaactccacagaagtccagaaattcctagaagagctggttaaaattggtaaagaatatttgtagcccttttataagtttttatttatc

SEQ ID NO: 18621 - DNA, 418 bp, Glycine max
cggacgcgtgggcggacgcgtgggtttcgtttttttcttcactgctatttgccattgtcaggctcattctcgatggcggcgaagatttcattggcaattggtttgagaactctcttcactgtttcgggactgcttatgcttgctatcgttctttacactgacttcaccgatggtcttccgtttcgcaaagaacttctcacaccgcggatggcagcaacttagattgatttttatatcaacgatgtaactgtggcggtctggattgcttacaaggaatcaaactgaatcagctcaattctgcggattgttgtgcttgtctgccttggaagcatcactacatctgcctatattggtgagcaatttctgaagctgtcatgtcaagaatcttctcaggatcctatgtgttatgttctattgc

SEQ ID NO: 18622 - DNA, 330 bp, Glycine max
  modified_base (16)..(16): a, c, g, t, unknown, or other
cggggtacctaatatngaacacgaatcgtttctctcatctacctttgcacttgcatgacaatatcgcgaactgcgaactgcatctcaagatataacatatatactacatactatatatactatatatgatatcatgtattacattcatgcgtcacaccatacgataatgtttatgtaattacataggtagactggtgtttgaataagggtacgttggtaagttataagttgttcgtcccatatatgtgaagaagcacggtttaggcagattgttgttcctgcgaattctgacgattaccgaggaagagcgataaagcgataagcagcaac

SEQ ID NO: 18623 - DNA, 441 bp, Glycine max
tctttatataataatataaataattttaaaaaaataaaaaaaaaaaaaagaatctgtataaatataaaaataatatatataaggtacaaatagtaaatcgaggtacccattttatgataaactttccttccatttttgttcctctagtaggcctagtatttccggcaattgcaatggcttctttatttctttatgttcaaaaaaacaagattttttagatacagaaaacaaagtaaaattctggggttttttattccccaattataatactaaattcaaaaaaaggagagtaatgagtataatctttcgctcagacgatgtactgatatattctatggcggaggttcgaaaaacaagcaattttattgtgggccggtttcactttgttaggttcattggggttatttgtcgttgcaatttccacttatcttggtatggatt

SEQ ID NO: 18624 - DNA, 362 bp, Glycine max
  modified_base (121)..(121): a, c, g, t, unknown, or other
cccacgcgttcggagggttttcttcttccaccccgtctaatttctctcttctctgaagctatcagaggctagagttctcctattcagtatctcatgtgcttcaaagaatggctgttagctntactgggcttgacatagaaggcagagaccagacagaagagaacatgacaatatgacatctatctagtggagtaataatttatttgtgatggatgaaactgaagtggaaaatcccatattcatggaaattaattctgaagacacgagaaatgaaaatcaagagtttgcatcagagaaaggagaaagtagcagtgttgttttctcaagagaagcaccacttatgtaggaaagagtcaagaatg

SEQ ID NO: 18625 - DNA, 151 bp, Glycine max
cccactctttcttgttttgatgctgtgctttcactgaaaaaggatctctatctacgggggagcggaataaaacccttctctctccaattaaaagaatggcttcatatcggaaacttcacacttttgatgatgtttcaaaccacaaccatac

SEQ ID NO: 18626 - DNA, 402 bp, Glycine max
ggcagtcatcgttctgcttaagttcatagagagtgtgtgtatgatgcagcagcagcagaacgtggcattgatttggaatgggtacgggtagtgttgtcagctgatcctggggctagattggaagatattgaggatcaagcaccacctctgaggaaggaacatcgccgtgttccaagtaccgtggcaatagaggaagtaaaggctgcggcagctaaaggggaagcacctcttgaactccctttgaaaggcgctggtcaagattcttccgatgcacaaccaagggttaatggacttaatcccaaagctagcgatgccttgtctggtgaactttgggaggcaaagaaggataggatatgcaaggcttccatatatggaaagttacatggttgggacttgcgatct

SEQ ID NO: 18627 - DNA, 221 bp, Glycine max
cgattttctttgttgtttctatttccttgattgttcatgacagcctatttttttgtgtatggctagaagaaaagctggacggtaatatatggtgtggccaatgtatcagtttgaagagagctttttctatttttttggggtaatgttcggatgttgtgtgaaagatagatagataaaattaaatgtcttgatgcgtatttacttcttaaaaaaaaaaatag

SEQ ID NO: 18628 - DNA, 228 bp, Glycine max
aaccataccaatgatttctttctcatcatttctatcaatagtttattatgtcaccccttttattgaatatcatcccttacgctattattttattttatctacaacatttaaagatacaaccaatgacttttaaaaacatctcaacatcattctcctttaaattatattgaaaaacaccacattctttaaatttattcaataaccctcccactaaaacggacctacatt

SEQ ID NO: 18629 - DNA, 136 bp, Glycine max
cccacgcgtccgcgccctttttttttttttttctcaaatagtccacctttccttgtgaagagggcataacatgtgcttctataggtttatctactactattgcaacaacttttgaaggattagtttcctcctttgc

SEQ ID NO: 18630 - DNA, 159 bp, Glycine max
acacccttccgaaataatttattcaattccaaccttttaaatgacagcgatcaacctaacaatccaaggagggaaatatacaaatcacaccctcccttcatacttctcaaataatatcaaaataaatcgccttctaacatcccacttctcatttattat

SEQ ID NO: 18631 - DNA, 395 bp, Glycine max
cggagataagattaaagattcaacaatggcctctgcttctgctactcttctcaagtcatctgctgtgcttgacaagtgcgagtgaatcacatgccagacccttcgccaacctctcgtgagatgtaacccttcctcagcatcagctctcaccatcaaagctgctttctatgctgtcgagctcgtgaaaaccgccaaaacagtggcctcaccggtgcgtggtattttggcgatggatgagtcaaatgcaacctgcgggaagcgtttggcatctattgagttagagaacacagaagcttatcgggaggcataccgtaccctacttgtgacagtaccagggcttggtgaatacatctcctgggccattctctttgacgaaactctgtatcaatccactg

SEQ ID NO: 18632 - DNA, 232 bp, Glycine max
cccacacgtacccacattcatagcttaaatttacaagtgaacacactctttttcgggcatggtagctatcactcagcagaaaaatataaacctctacattacttctattacaaaacgcatctattgcacctatcttatatgtatttcaccaaatcaacacaaacatctcagtcctacacaatgacttcatcgttccccttcatacggataaacaagtacagtacataaggtt

SEQ ID NO: 18633 - DNA, 242 bp, Glycine max
aactcacatatcaaaattgaaattattaaataatttgtctgctattcattctctcgacagcggtggctactaccataacagatcatgaaccctcatcacttgccccgcacgtgctcgactacaccacctctacattctactactacacggaaaaagataacgatgatctttttcacgatcaaaacaaatcctccatctaatggctgcggttaccaacggttaaccattactgcacccaacct

SEQ ID NO: 18634 - DNA, 285 bp, Glycine max
  modified_base (88)..(88): a, c, g, t, unknown, or other
gccgccgtggccaccacctctattgctggggtcgcgttcgacgccgacgacatccttatccgtcaggtggtgccagatgttggcgaancctaatatgatgacaacctgctgaacgccgagcaccacttcgcgagcttcaaagccaagttcgccaagacctactcctccaaggaggagcacgatcatcgcttcggcgtcttcaagtccaacctccgcagatccaggctgcacgcctagctcgacccctccgccgtccacagcgttaccaaattctccgatctaact

SEQ ID NO: 18635 - DNA, 359 bp, Glycine max
  modified_base (10)..(10): a, c, g, t, unknown, or other
cccacgcgtncgattttttttttgtttctgagcctcccctcccctctctctaagatccccggattgcttgtgaatgctagaaaccctatacagattcgattggatgcgctcccatttcacatcaagggcgagcgcattcggttcttgcaagcaagcctggtactaccgctgcctcggcctcgacccctgaatttgaaccattcatcaccacctttcttcattcattcacggttttccttttcgactcgatttgttgttttttttgttttgtttccttgacgatgttgacgatgagcaagcagaagaagaaccagaacgcgaagaggctgttgataagcatcaatgtgctggtgagcgcg

SEQ ID NO: 18636 - DNA, 370 bp, Glycine max
gcaaaacctgtgatcaacaatggtttttatctccaattcaccacctacttcaaatggcggggttgaaaacacccaaactcctaaaaccacgcgaaacacataacccggcgtcaaacgcctcatcatcagcgtcactgtgctcttctcattcatcctatgttctcctcttctgcggaaatccgttataatctaccgcgcgccgctcccgttcgatcgaatcgactccttctccttccaaatcgaatccaaacccttgtccttcccatgccgttttctagccatattcatccgcttcgatttcatggtttcaaacagaaatgtatgagccgcgattgagagaaaaatgtctgacctaaatcacggcagctat

SEQ ID NO: 18637 - DNA, 430 bp, Glycine max
cttacacactctttatctctctctttctctctctcagaattttctcctctctccggggccgggtattaattggagttttctcgctcctttttctttccctgaaaacatttcatcttcgtcttgatgtccgaaaagggtccgccacttcccaaatttggtgaatgggatgtcaatgatccagcctcagctgaggggttcacagtgattcttaataacgccagggatgagaaaatgacaagcggcatcccatagtcaccaggaaagactgctactgatcctcatagcaaacctgcagtatagcctggcataactcagactaaaaaatggttttgctgcatgcaaaacccttctgccgaatcatatcatagcaatgtgtgctcctgtgaaaagcctgaacataaaaacaatgtttatgttttactagcgtcac

SEQ ID NO: 18638 - DNA, 317 bp, Glycine max
tcccggaaagtcacgtgcctcgttcaagcgcgtgatggatctccgcttcatggagaaaaacaacgcttcgggtgcgtcggtttacgggataagcgtgttcgacccggagagcatgacatgggaccgggtcgacccggtttcggattacccgtccgggctggcgctgttctgccagcttgcgagctgcgactggaagcttgtgctgatgggagggtgggaccccgcaagttacgagcctctgacagcagtgtttgtgtacgattttctcacaatcgagtgggcggcggggaaggacatgccggagaagcggtcttttt

SEQ ID NO: 18639 - DNA, 322 bp, Glycine max
cccacgcgtccgctgtttacgctatttatcttttagcactacgatactcatagaatatgctggttgtctttcaacctggtgaagggatatgttgtaactataaaatgagtcactgtctgcgcttagttagaagatattagaattatgcatctatctgtcttgcaagatgtcctgggggcatgaaatatgcacatgcgatgtttatacaactgaatattctgtacgaatttctatcctttggaaataaatatatatggtctctattgggtgtaataacaacttgatggaagaatcattttatatccgctatttgtacgaacaa

SEQ ID NO: 18640 - DNA, 379 bp, Glycine max
gcctcccgtacctaactgtacagctttacataccacaatatcacactctttcttgaggatggtgtccattatgcagctgtataataaaaactactccatttctacatatggaaaagagctccagtcccaggtttctgagaaagatacttacaggtgcacagtgtactgacaagtaactccgacagagcttgctgtacctcttgttatcgatgatcctgaaatcaacagtaatgcttccattctactcaatgggctctgttggacataaaaaagaagcaggtatgactcaaaatagctacatacagctcctggtaatttgaacaatttccactatataaccacagaccacctccctcacaatgtggctaaatgtgatata

SEQ ID NO: 18641 - DNA, 404 bp, Glycine max
tccaatttaaattttaaaaatgacttttattaacttaagaattcaattatcgaaggtgaattatttaacaattcaattggattgttcaaattgtttcaaaaaaatggagtacttactcccatttcttatttattattgaattaaccgatcaactagctttgttatcgaacatttcttttctatttcaaaaattttccggaaaaaatttgaaatctattttatttgcgaatcaatcctacttcttctggtcccgaaatttttgctcttgataaaaaaaatctggtacttttcttccaaataattgggccggtactttattatactttttccccaagttatattcctaatatttacaatgctcttatttttaatggtttaaatacttgttgttaacaaaataattt

SEQ ID NO: 18642 - DNA, 414 bp, Glycine max
ctcgatcgtatggagcatagtgattacggagacaggtaccgtgaattaccccatggagtggatcacgctctaggctgcatgaatgctgctggtctcacagccgaccatcccatcatgagtacaacagacttttggacctcccatgagtgtatgcgtttaccttatgagcatgcacttactatggaggattctactcctgggcatcattatgattgctcacactcacatgctatgggtaggggaacgtagacgccaacttgatggtgctcatgttgaattcttgagacgagttgctaatacacttcgcattaaggtgagggataagatgcgatcccgatgaacttgctaagctgctagatattctgtaccctgaaaacaagcctggaagaattacagttattgtgagaatgggag

SEQ ID NO: 18643 - DNA, 434 bp, Glycine max
  modified_base (306)..(306): a, c, g, t, unknown, or other
cttcttgagggtaccctattgaagccaaacatggtcacccctggatcccaatctgctaaggtttcccctcaggtggttgccgagcacactgtcagagcccttcagagaaccgtgcctgctgcagttcctgctgtcgttttcttgtctggtggccagagtgaggaggaggcatccgtcaacctcaacgccattaaccaggtcaatgggaagaagccatggtcactctctttctcctttggaagggcacttcaacagagcacccttaaggcatggggcggaaaagaagagaatgtgaagaaggctcangaagcccttttggtaagagccaaggctaactcagaggcaactctgggaacctacaagggtaactcacagcttgctgatggtgcctcagagagcctccatgtttcgaactacagctactgatcaatcga

SEQ ID NO: 18644 - DNA, 329 bp, Glycine max
cccacgcgtgcgacggcatggaagtggcacatattgatggctccacaaggatgggttcggggtttggggcgatgatgatatcagggcacaaggcggctcatttggcgttgaaggcgttggggaggaacaatgcaattgatggaacgtgtggagttggaagggaagaaccccagcttattttcgcttctgcagacactgaggaaattgttgatgcttaaacttacttttaaattacctagatatatagcttaacttttcttttctttctgatggggccctacttaattatgattgtaatttgggaataaatgaacaacatgtgaattatg

SEQ ID NO: 18645 - DNA, 388 bp, Glycine max
cccacgcgtccgcccacacgtacgaaccaacacaacatcaactccgccccctacggcgccggctggcgcgccctacgccgcaacctcacctccgagatgctccacccgtcacgcgtcatgtgcttctccggtacccgcaagtgggtcctacacaccctcctcacgcgcctcaaatcagattcacaatccaacgattcaataaaagtcattaaccacttccaatactccatgttctgcttgcttgtgtttatgtgctacggggaaagactcgacgatgggaaagtcagagacattgagcgcgtgcagcgacaaatgctcctgcggattataaggttcaatgtactcaatttctggcccatagtcacgcgcgtattgatcttcaaactat

SEQ ID NO: 18646 - DNA, 388 bp, Glycine max
gcgcctacgcatgcgaccatacggacgaaccatatcatcatcaattcctcccaatacggctcgggctggggcgccctatgccgcaaccacacttccaagatccttcaacacaaacgcgccatgtgcttttactgtacccgcaattgtgtcctacacaccctgctaacacgcctcatatcatattcatcaatccaacgattcaataaaagtgttagaccacttgcaatacttcatgaaaagtttgattgtgtctatgatcttatgtgaaagactcgatgatgggaaagaaagagacattgaacaagtgcaatgacaaatgctcctgctgattataaggttcaatgtactcaaattttggcccctacaaacgcacgttttatttttcaaa

SEQ ID NO: 18647 - DNA, 413 bp, Glycine max
cggacgcgtggggcaaaattgatttctgtacttcgggctcctaaatccaaggaagggtatgctgctattggtggtggctctcctttacgaaaaattacagatgaccaggcacttgcaattaaaatggctttggaagcaaagggcatctcttcaaatgtctacgttgggatgcgatactggtacccatttactgaagaagcaattcagcaaattaagagggacagaataacaaggcttgtggtactacccctttatccccagttttctatatccacaactggatcaagcatccgtgttcttgagcatatattcagggaagatgcctacttgtctaagctccctgtttccattataaactcttggtatcaacgagaaggttatattaagtcaatggctaacttaattcagaaaga

SEQ ID NO: 18648 - DNA, 322 bp, Glycine max
gcgctgcaatacttcttgcactcggttttatcttttacacactagcaaatgcacagtggtcttgtaattacagtatgatgggtgttattatgatttctggagcattgggcatcgattcttttctgggaaatcttcaagaagcaatatttaccatgaaccctgagaccacacagatggagatgctcttttgctcaactgcggtgggtttgcctttcttaatcccacctatgcttttcacaggagaattattcaaagcatggacttcattgttcacagcatacctatgtgtatggaaagctatgttttgaacaatggccacatt

SEQ ID NO: 18649 - DNA, 399 bp, Glycine max
cttctcttctccatgccactgaaagcttgaaacccacatagctagccatcaatggaatacagcaattgggctgaatctcttcaaaccgaaacccctctcccttctttcccacaaccctcatcatcatatcctcctacctattacccctcttaccctcaaaaccctaaccctaacccttcttcttctcttccccttaaccctcccggggttgatccccaaaccccattgaaccctattagctatgcggctcatgaacccgttcctggtttggtctacgctcagagccttgttggggatgattcatcttctgggtattgcttggaccataattgggttgccagagaggctgttaggcaatttggtactgaccctactctttatgcacctggcatctctttg

SEQ ID NO: 18650 - DNA, 431 bp, Glycine max
  modified_base (347)..(347): a, c, g, t, unknown, or other
gttgggccagtgtttgtgaaactactgtatgggagtggttggaagatatatctcaaaatcagattcataaaatactgcgggggcttcctactgtacggtcattgattgcagttggggctggtgctgctaagctggtttcatcaccagtacagagctacaaaaaggagcggagagtgctcaagggcgtgcagagaggtacaatggcatttcttcgaagcatttctctggaagctgttggacttggagttcatctagctgctggagcccatgatattcttctccaagcagaaagtattcttgcaagcataccttctccagttcctctgcctgtaaaagacaaatcgaanacagatgttcgatctaatcaacctaaagatgctcaagaaggaattcaacaagcttatgaaagtcttagtgatggcttgggaaaa

SEQ ID NO: 18651 - DNA, 103 bp, Glycine max
  modified_base (45)..(45): a, c, g, t, unknown, or other
actgtgtcctgcaaaatttatagttttaatataccaaatattganagctgatttggactcggttatatatgactgtttcccttatctaaaaagcaaattccgt

SEQ ID NO: 18652 - DNA, 409 bp, Glycine max
cccacgcgtccgtggagagtttgaagattcctaaagccacatggatggctgataaagaacccagctgctggcctggtacctggacaactgctgcaccggaacattccaggggtgatcatgccagtatcatacaggtaatgttacaacccccaagtgatgaaccactgactggcaaaacatcagattcaaatgccttggatttcagtgaagttgatattcgtcttcctatgcttgtgtatgtttctcgtgaaaaaagacccggctatgatcacaacaaaaaggccggggccatgaatgcccttgttcgagcctcagccataatgtccaatggccctttcatacttaatcttgactgtgaccactacatatataactctcaagcactgagagaaggaatgtgcttcatgat

SEQ ID NO: 18653 - DNA, 395 bp, Glycine max
cccacgcgtccgcggacgcgtgggttccaagctattcaaatttcaaaacaaggaaatggagtcactacttcccaagtcaatctacggtggcatcaagagttacttgagaaggcggcgctaccggcgtcttcacggcggcgccaccgtcgttagaaggaagatggcgatcatccgcttgagagggccacgtaggtattggaggatcagagcagttccaaggcttagatgggtgatgagatcaccattgacgattttgacaaagctcaagaatgcttatatgaactttatgttgaagctgtcagggaacgtacgtgctatgaacagtgataacatctttgaagtgaaacggattccaaaggctcgtcaagtgtctaagggctattctcgtgatgaat

SEQ ID NO: 18654 - DNA, 425 bp, Glycine max
cccacgcgtccggttttaggtagttggatgtgttgagatccactgctgcagaatccaattggtgaccctaaatccaagttactatgactgctcagacccaagaggagcttcttgcgcaacacctcgaacagcaaaagatccatgatggtgaacctgttgtcgaggatgatgatgatgaggaagaggatgatgatgatgatgatgatgaggatgatgaccatgccgaaggactagaaggtgatgcatctggtaggtcgaagcagaccagaagtgaaaagaagagtcgcaaggcaatgcttaaacttggaatgaaacctgtcacaggtgtcagccgagtgacagtcaagacgagcatgaatatcctgttcgttatctcaaaaccagatgttttcaagagtccaacatctgaaacttacattatattt

SEQ ID NO: 18655 - DNA, 453 bp, Glycine max
  modified_base (370)..(370): a, c, g, t, unknown, or other
  modified_base (439)..(439): a, c, g, t, unknown, or other
cccacgcgtccgctctgaactctcaatccacaaaaaagcaacatggcttcaattcgcgccttcttcacagccattgcttttgtggctcaatcatttcaaaactacatgatccagagtctgcacaaactttacaagcattatggatatgctgctgaagtgaaggacaatgaagagaaagaaagtgattattgttctgtgtgtctaagccaaatttgtaaaggggaaaaagctaagtctcttcccgtgtgcaaccacagataccatgttgattgtattggtgcttggttgaagaatcataccacatgccctctttgtaggaacaatatcactgatcatatcacccaaaaacataaacaggtgaagagcttangagaatctttgttcaatctcattcagagtttctctgatctattggtagctattctctacatgatgcttncatctaccatcact

SEQ ID NO: 18656 - DNA, 443 bp, Glycine max
ggaagcttggggtttgaatctaatcgaatctaaacgattcatcgatcgatcgatggctctggtacgagttgaactgaagcatgcggcggacggcgtaccggaagctaattgctacgccaagcccaccaagcaaggcgagggcctacgccactactattctctcaacatacacgagcatcagctcctttttcgccaaaagactcataacctcaaccgtctcgaggctcagagaaacgacctcaattctagggtgaggatgctgcgcgaagaattacagcttctgcaggaacccggctcttatgtcggtgaagttgtcaaaagaatgggcaagaacaaagtccttgtcaaggtccaccgcagaggaaaatatgttgatgacattgacaaaaatattgacattacaaagattactccatccactataggtgcactccgcaacgaca

SEQ ID NO: 18657 - DNA, 433 bp, Glycine max
cccacgcgtccgctctcgtgttctggctgcgttttctcaattcgttcccaaaacgcattggcacccacacgacggtgcagcctccctgtagctgcctcacctcaccactgcagcctcctcgccggcgaaacctccatttccggtggcgacgaacgtttaatttggccagctcctcctggaatcgcgatggtgacgcactgagaccagtggcgacgaagacacagtaagcagccggcagcggcgacggagacacactgctgaggtgacaaaagctatggcctcaaagctgcttttgaagagaaggctctttatgtttttgcaactgtcacaaccttctttttcttccattcatgcagccccaatcctttctgtaaaagcttcagaattcatgttcccctacaaggagaatgcccttcttcctcctctctcttct

SEQ ID NO: 18658 - DNA, 411 bp, Glycine max
acccacgcgacgaacagcatacgcggcagcgacggttacccttcaacaacaacactttctctgcgtgaaatgtgtctggtggcgaacgaggatttccagcacattctgcgtgtgctgaacaccaacgtggatgggaagcagaagataatgttcgcaatgacctccatcaagggtattggaaggagattcgccaacatcgcttgcaagaaggctgatgttgacatgaacaaaagggctggtgagttgactgctgctgagttggatagtgtgatgactgtggtggcgaaccctatgcagttcaagatcccagactggttttttgacagaaagaatgattacaaggatggcaaatactctcaagttgtgtctaatgctcttgatatgaaactcaaggatgatcttgagagactc

SEQ ID NO: 18659 - DNA, 448 bp, Glycine max
ggaagagagcaaatttgcacacctacaagtacaaggaagttactttcttcgtttgatggtgaattatctcattgttgttcccaacatgtttctcatcacaaggcatttaggtttggagttacttttaatgtgtgaatcaaattaaggtttctgacaattttgtactgaaaaagaaaatttggaaaattgtgcaaaccaggtattgaaatttgtagtcaacaatcactaatttcaactataatacactgctatttatgcagataattatgtggatgtaccatgattagataagattactaacctacaaaacttcggaaacctttgcaacagcccaattgtcttctattgtttgtcagcagaaagacatctgaaatcacgtgtgaaccaatatggccatacatgaaatccacacttacatacacattccttcatggctagaggaacacct

SEQ ID NO: 18660 - DNA, 454 bp, Glycine max
cgcattcacaaataaggttgaagaggtcactgccggaagaagggagcaacaccatctttcattttccggcgatctcttgtttcttccatcatcaccgttttccggcgatccctaatcctcgcaaacagaaatgacgacatcaaggcgccttgcggacaggaaggtggagaagtttgagaagaacatcacaaaaagaggatttgtgccagacactaccactaagaagggaaaagactaccctgttggcccagtgctgctcggtttcttcgtctttgttgtcattggatcatctctcttccagataatcaggacagcaacgagtggaggcatggcttaaatggagctttgttttggattttgtgtcatcttctctttcttagcctcctcgtagaaaatgctaatacttctctacatgtactgtacttgtactaaaccctgttcctgttcatgttta

SEQ ID NO: 18661 - DNA, 412 bp, Glycine max
cccacgcgtgcgctcataaatgaatatgattcaaaatcagcatatactgtagatggtcctgcaccagtgtctgcctctcttccaaaatctgctcaaacttccagggatattgatttgtctcctggccaaccattacaatctaatcaaccaactggcaaccttggtgtcattggaagaagaaatggtgctgagcatggagccattggtgataattatagtgggtcgaatgttagttctggtggagtgcgtgatcaattatataatttgcaaatgcttgaggcagcccacttcaaaattccactacccaaagactcggaacgtactacgacttacactcctaagcacccagcaattacacctcccagctatgctcaagtacaggcacctattggtaataatcctgctttttggg

SEQ ID NO: 18662 - DNA, 443 bp, Glycine max
  modified_base (420)..(420): a, c, g, t, unknown, or other
cagaaatggccaccacttctgcttcattcgcgagcttctccgtcatcttgcgaccttcttcgtccaatccccaattcttcctcttcaacgtcgctccccgaaccggaacctctcattcccgaacccgttcgactcggttcaggtgctcggccggtcagaccgggttcttcacgaaactagggcggttgataaaggagaaggcgaagagcgacgtggagaagcttttctcgggattctccaagacccgcagcaacctcgccgtcatcgacgagcttctcctctattggaacctcgccgacaccgatcgggtcctcgacgaactcgaagaggctcttttagtgtctgattttggtccaagaatcactattaaaatagtggagaatttgcgcgaggatatattttcagggaagcttaaatcanggaatgagataaaggaagcactg

SEQ ID NO: 18663 - DNA, 412 bp, Glycine max
attcggacggaacctccgccggttcttccgacgaggacaccggcgggcagacttgtcacgagtgccggaggaatgaccgcgaccgagttacttggtgtcaacggtgtgataggaggggatattgtgatagctgtttatcaacatggtactcggacatttcattggatgaaattcagaggatatgtcctgcttgccggggtatatgtaattgcaagacttgtttgcgaagtgataattcaattaaggttcggatacgcgagatacctgttctagataagttacagtatctccatgtgctgctgtcgactgtgctacctgtggtaaagcagatccactgtgaacagagttttgaagttgaacttgaaaagaagttgcgtggtgctgaaatagatcttccaagataaaattgaac

SEQ ID NO: 18664 - DNA, 391 bp, Glycine max
gatggcttcaaagttgcagaagttgcaggccacagcatctcaagcgtctcaatttgtatcgagtcgtggaactaactactacaagcaattgctggaacagaacaagcaacacattcaggagcctcctacagtagagaaatgcaacctgttggcaaagcaattgttttacactcgccttgctagtattccgagtcgtaatgagtccttttggaaggaacttgattatgccaagaatttgtggaagaacaggaaagagctaaaggttgaagatgcaggaattgctgctttgtttggcctcgaatgctttgcatggttttgcgctggtgagattgttggcagaggatttactttcaccggttactatgtctgataataaaccacttggaaagtg

SEQ ID NO: 18665 - DNA, 454 bp, Glycine max
cccacgcgtccggagaaaaagagattagagagagagagagagaggagacgaatgagacacgagagctgaacataaaggtgaggttacgtgtatctcttgaagtagtgccatgccaccccatcaataataagatcactcaatcaccaatgcatcatcgttgttggaattccagcgctgtgtttggaaattggaactggaggggcttcaggtgccataatctcaaccttagataacagattattgcacagcaaaaaccttgtaaaaggagaattagaatcacctctctctaaggatgttggaaggaaaggctatggtgaaagaaacagacatgtcaaccaagatgcagatccatgccatggcctctgcttctcaagcccttgatctctacgatgtttatgattgcatctctattgctgcccatatcaagaaagaatttgatagtgtgtacgggaaa

SEQ ID NO: 18666 - DNA, 360 bp, Glycine max
ggaactcatatacaataaatataaagctttcttgcctgaatgaagactacatacataggggggtacatgcaataagaccgggatatattggcaaccgataattcattgacacaaccaagacacctttgcataaaacggaacttaaggccgtcactaatatactgactacatggacaaacttcgtatatatttactgagggtcgctttattttaaaatataaatgattacatgctttgatgataaagagaggccgtgatacatgcacgaataaacacatatactattgtagaatgaatgctataataactgtcgcataccaccatcgttgtttgtttcattaattaacattctttatgcgt

SEQ ID NO: 18667 - DNA, 430 bp, Glycine max
ctcaatctctctctctctctctctctgaattttctcctctctccgattccttttattaatgggagtttactcgctccttttcctttccctgaaaacatttcctcgtcgtattgatgtcggaaaagggccggccacttccaaaatttggtgaatgggatgtcaatgatccaacctcagctgaggggttcacagtgatttttaataaggccagggatgagaaaaagacaggtggtaacccagattcaccaggaaagactgccactgatcctcatagcaaacctgctgtagagcctggcaaaactcaaactaaaaaatggttttgctgcatgcaaaacccttctgccgaatcatagcatagcaatggttgctcctgtgaaaagcctgaacagaagaacaatgtttgtgtaactagtgtcacagtattttctct

SEQ ID NO: 18668 - DNA, 378 bp, Glycine max
cgcgtacgatttatttttttcaattccgacttttattttttagaagaggcaaaaacaatcttgtaacggtaaaattttacactggcactaaaataccttaattttgattacaaacatatatttatataaatgttatttaacttgactacttgctcagaaattaaatctaaaaatgttaatttaataatctttttcaaatgaatatatactcatattgcattccctatacttaatatacacatttcatatatatcttataaaaatgtttgctgtcactacacattttaaataataaactaatttaataaaaatgctgaaaatttctagaatttttattttaaaatataatgccaaataaggtaaaatatttttttttta

SEQ ID NO: 18669 - DNA, 366 bp, Glycine max
  modified_base (323)..(323): a, c, g, t, unknown, or other
  modified_base (359)..(359): a, c, g, t, unknown, or other
ggaaaacactggtccaatcaacattgggaacccaggtgaatttacaatgattggggttgccgagaatgtgaaagagcttatcaatccaaaagtgcagataaatatggttgagaacactcctgacgatcctcgtcagagaaaaccagacattacaaaagcaaaggaattgctgagatgggaaccaaaggtcaagttgtatgatggccttcctctcatggaagaggatttccgtcagaggcttggagttcccaagagcaactaagctccttttactccttcatttcttatcatataatcataatgaatattttgatagtaacggngatgtggatgaacctgttaagtgttaagagatgttntatattg

SEQ ID NO: 18670 - DNA, 411 bp, Glycine max
cccacgcgtccggtcgcgacgcgacttcctccgactaggcaaccagagtgcttataaaaggaatagtagtaagcacattcatctcccctagatatgaactcagttgcaaggcgtttatcaagcttagtcagacattcaggtttcacacctgaacccttcaataatgggcatcatcaaatgcagcagctccagcaatgcagaggcataagagtgaaggtcatgggtgggaacttggaagcagcattgggattgatgcagcgtaagatgcaatcaagtgggattgagaggatgataaagcacgaacaaagattccatatcaaaaactctgagaagcgtgttttagcccaaaagaacttggagcggaagattcgatctgaagatcttgctgagaaacttatcgccattatgatc

SEQ ID NO: 18671 - DNA, 386 bp, Glycine max
atcatcccttgttttctactaacattggctgctggtgacactgtcaaatccgtgggtctagaatcttctgccgctgaaggagtatcttccaacacggaggaaaaccacctggttcagaccaatttgtctgatgggtcatccaacaagtctgtgccagcatctggacttaatgcagcgattcctagtgcaaatcatattaccatcttctataatgggagtgtttgagtctatgatggaatctctgcagagaaggagcatgaaataatgcttattgctgctgctgctgtcaagtctactgaaatgaagaagattgtgacccaaactacccttattttacccgtaccctcttgtcctttttctccacatggaatcactaacaatattgc

SEQ ID NO: 18672 - DNA, 441 bp, Glycine max
cccacgcgtccgcccacgcgtccgcggacgcgtgggtgaagattacatggcaagaagctcaaggtctgctccgaccccctcctagccacattccaagtattgtggtgattgaaggttttgaatttgaggaatatgaggaagctccagtgcttgggaagccaacaatttttaccagtgatagtgtgggtgaaaagatccagtgggctcaatgtgaagattgtttcaagtggcgcaaattgccagcaagtgcgcttcttccatcaaaatggacgtgttctgataattcatgggatccagaaagattttcttgttcagctgcgcaagagctgacagcagagcaacttgagaatttgctacctccttgtaattcagctgttcccaagaaaatgaaggccaccaaacaagatcccgataatgctgaaagctttggaaggacttgac

SEQ ID NO: 18673 - DNA, 440 bp, Glycine max
  modified_base (410)..(410): a, c, g, t, unknown, or other
  modified_base (418)..(418): a, c, g, t, unknown, or other
cttttcctgctgagagtgagaggcgttaatctgaatgggttacatccaccatggaagaaccggtctcaggcacttattcagattcagaaccgccaccggcgtggtaaaaaactccgcgagatcgcaattacgcactgcatttctctcccattcttcccctatcctcggcaacaacgtggttttttttctccacaggcgacaaattcctgcacgaaattaccgcggaggtggagaaagacaggcgcagggagcgaaacgagcgtttgcgcctcggcctcgacaccgccgacatcgacgccgagtcggagcaggactacatgggcgtggggcccctcatcgcgaagctcgagaaggaaatgctcaaggaatctgctgagctgaaccgctacgaggagcccaccgactccgangacgactncgacgaggaaaccatggacgac

SEQ ID NO: 18674 - DNA, 280 bp, Glycine max
cgcgtgcgcttttccttctcacagtgaaaagcatacatttgaatgtgttacatccaccatccaacagcgtgacgtgggcacttatgtagattcataacacacaccgccgtgataaaaaactccgcgagatcctaattacgcactgcatttctatcccattcttcccctatcctagacaacaacgtgcttatttttctccacaggcgacaaattcctgaacgaaattactgtggatgtggataaagacaggcgcagggaacgaaacgagcgtatgcgcctc

SEQ ID NO: 18675 - DNA, 377 bp, Glycine max
cccacgcgtccgatggcatcttcaccaaccttaataccctttctcctcatcttcttcctctggcactggcactttcaccgttcctactacctccccctctccgaggagaaccccgaagatgacgtcatagtctcgtcgccgaagggaaccttcaccgcagggttcagccccgtgggggagaacgcgtactgcttcgcgatatggttctgcacgcaagcgacgacaaagaccgttgtgtggatggcgaaccgcgatcaaccggttaacgggaaacggtccacgctttcgctcctcaagacggggaacctcgatttaaccgacgcgggacagttcgatgtctggtccaccaacacgctctgctcgaagacgcttgagct

SEQ ID NO: 18676 - DNA, 450 bp, Glycine max
  modified_base (373)..(373): a, c, g, t, unknown, or other
  modified_base (406)..(406): a, c, g, t, unknown, or other
cccacgcgtccgtctctctctgttaatgaccttcttgcatgctgtggctttctgtgtggatctggctgtgatggaggatatcccttatatgcatggcgatacttagcccaccatggtgttgtcactgaagagtgtgacccatattttgatcaaattggctgttctcatcctggttgtgagccagcttatcggactcccaagtgtgttaaaaagtgtgtaagtggaaaccaagtttggaagaagtcaaagcactatagtgttagtgcatacagagtcaactctgatccccatgatatcatggcggaagtttacaagaatgggccagttgaagttgcatttaccgtttatgaggattttgcttactacaaatcangagtttacaaacacatcactggttatgaactangtggtcatgcagtaaagctaattgggtggggaacaactgatgat

SEQ ID NO: 18677 - DNA, 412 bp, Glycine max
ggaggagtgaatagtgaaatgcttagagagagtctcgagaaaatagttggaaaagatgattccacgtttagtggatttgaccttgctacccttatcaggaacaaatatgggaggtcttatgatgttcagttgataaagaaggagttcatgggaagaaatctccttgcgatgaatgtcatgtggaagtacatggagcagagatccttcccattgaccgaagaagagtatattttgaggcttgatgatattgcaaacaacttaaaatgttggggagctgtgtctcatattcggaacagcctagaaaagtcgaaggaacgacctcggatagggaaggcagtaagcatttttatagatatggatgagtcgggtgctcgttccaacgagtggatctacaaatagaatgtggtactga

SEQ ID NO: 18678 - DNA, 434 bp, Glycine max
gagagtcttcccgtctcttcctcttcacttcttataccggcgcccccaaacgacgccgttggctgttctcttatgtaaacgccgttcgagaacaaaccaaaaaaagaaaagaaaatcagttattgccgttgttgttttgtttccggttcggtttatttcaatggatcgggcggcgttgacggttggaccgggcatggacatgccgatcatgcacgacagcgaccgttacgatctggtacgcgacatcgggtccggaaatttcggcgtggcgaggctgatgcatgataaacaaaccaaagaactggtcgccgcaagtacatcgaaaggggtgataagattgatgaaaatgtaaagagggaaatcattaatcacaggtctctgaagcatacttacatttgtagatttaaagaactttaatgtttttggagtgtctt

SEQ ID NO: 18679 - DNA, 375 bp, Glycine max
caatcgtagccgtcgcactttgcgttttctgcgtcatctccgattccccgacaatggccagccaaatgagcaagaagagaaagttcgtagctgatggagtgttcttcgctgaactgaacgaggttctgacaagggagttagccgaggacggatactccggcgtggaagttagggttacgccgatgcgcaccgaaatcatcatcagagccaccagaacccaagccgttctcggtgagaagggaaggagaatcagggaacttacctcggtggttcagaagaggttcaagtttcccgagaacagtgttgaactttatgctgaaaaggtcaacaataagggtctttgcgctatagcacaagctgagtctctccgctaca

SEQ ID NO: 18680 - DNA, 439 bp, Glycine max
  modified_base (391)..(391): a, c, g, t, unknown, or other
  modified_base (397)..(397): a, c, g, t, unknown, or other
caccaaagtacttgtgagtgtatacccaacacaaactaagatcaacatggactactacacccgcgtttcagaagttgagagggaacctatcatggagtattccacaccacgaccaatgatgggcaactaccaccaccctaatgctcaccgtgtcctcaacgagaagattgtttatgaggaggatgtgattggaggatcccgccacaaccacatgcatcaccaccaccctgagactcatgagagagtcaaggtggtggagtatgaacaagttcctgagaggcgcgttgtctatgaagagaaagttgcttatgacaacgatcgttactactctccaaggtattgaaattggacaaatggaagaacacctataacgtgttatcatgtggctttntattangcaggctacctagtataccaaaagcaccactgtgcttgtact

SEQ ID NO: 18681 - DNA, 447 bp, Glycine max
  modified_base (342)..(342): a, c, g, t, unknown, or other
agataatgtcattagccggcaaggtaatatcccaaagccaaaacacctctgcatgtgctcacactcataaccagcaagggaatcatccttcctttgttcctaatgtctcccctcaagcaccgtccagaccaattgtttgtgaactgccaattgctaggaaagtttcacttcatcggttcctttctaagagaaaagatagaattgcttccaaagcaccatatcaaataaacaatcccaactctgcttcaaataagccggctgaatccatgacatggctaggattaggtgctcaatcaacacaattctgagtgcatttgcagttttgagtagttttagcctctnttttttttatatatatttgattttgtagttctttgtcgttttaacttctactctagactttgatagatattagtagtagttgaaagcttcaatttttatgattgc

SEQ ID NO: 18682 - DNA, 439 bp, Glycine max
ttcatctatctggatattctccactaggttcaccagcagctctcaaaagtgataggcttaagaatcctgttgtcacagagattgcagagagattggggaagacaccagcacaagttgcccttcgatggggcttgcaagcaggtcatagtgtgcttcctaagagcactaatgagtccagaatcaagggaaattttgatatctttgactggtctattcctcaagatttgatgaccaagatctctgaaattaagcaggaaaggctagttaaggccagtttttttgttcacgagacctatggtgcctataggagcattgaagacttctgggatggtgaactctgagcaatatgcatctttgagacgttgaaaaatacattgctcctagagcaaatttattctgccttatacccactagttgtagtgattcaagtgagattttg

SEQ ID NO: 18683 - DNA, 450 bp, Glycine max
gttacgtcttcacaaacccttggatcacagtgttagggttcttcaattttctccgattggcgtcaaacatcacacaccacccaccaactatacgtcagcattgaaccctaaaatacatgactcagaagcagagaaccagaatcccagattccatggaaacccagtacgaggagagtgagaaagacgagtcttcctctgcttatagttcctcacaagacgaggaggaagagatagagactgagctggctgatgtaacgtatgaggagttgcagaaagcacgctcgaatggggcacatgcatttttccagatacccaaagaagacataaaattaaaaagggctaacatgaataggccaatggaagctagtagcaagaagccagttactgtgtttagagaggtcatgcaagctccaaagaaggttgacgtgatccacgatttgaatctctttg

SEQ ID NO: 18684 - DNA, 398 bp, Glycine max
cccacgcgtccgcccacgcgtccgcccacgcgtccggcaaaaacccaacacaccacactcgggcaatcaatcaatggcggaaccttcctcctcgaagcccgccgtccctctcctgaaggacgagctggacatcgtgatcccgacgatccgcaacctcgacttcctcgagatgtggcggcccttcttcgagccctatcacctcatcatcgtgcaggacggagaccccaacaggaccatcaaagttcccgatgggttcgattacgaactctacaaccgcaacgacatcaacaggatcttgggtcccaaggcctcctgcatctcgtttaaggattctgcttgtcgctgctttgggtacatggtgtctaagaggaagtacatctacaccatcgacgacgact

SEQ ID NO: 18685 - DNA, 452 bp, Glycine max
ggaaaagaatggaggccatttgttccaagcaccttatgacatcccttgtcataattcttgcttctagtttgaccttatcacagggtgccaagaaaggcagtgacagtgaaaggccataccaagaagcgagcacggtgttcattagaacatcttgcagctccacgacctatccaagactctgctacagctccttagtgaagcatgcagacttgatccaaacaaaccgtgtggttctgacaggcacagccctgaatgtgacccttgcgtctgccaagtcgacctcggcaatgatgtcgacgctggcaaagaggcaaggcctgaagccaagagaggttgcagcgatgaaggactgtgtggaggagttggctgactctgttgatgagctcagaaggtctatttctgagatggctcaactaacaccctccaattttgagatgacaatgagtgacgta

SEQ ID NO: 18686 - DNA, 444 bp, Glycine max
  modified_base (367)..(367): a, c, g, t, unknown, or other
cccacgcgtccgtttctctctttgaccaattctaaacccaaaacaaaaaataaaaatggagggggatctgaagcagaagctgttgagaagaagaaaggaagaggaagaagaagaagaagaagagttatcattggccaagagggtgtggaatgagagcaaggttatgtggatagtggcggcaccagccatattcacaaggttttccacctttggaatcagtgttataagccaagcttttgttggccatattggttctaaggaattggccgcttatgctctcgttttcaccgttctcattaggttcgccaatggtgttctgttaggaatggcgagtgcgttgtcaacactttgtggacaagcatatggngcaaaagaatatggcatgaagggagtgtatcttcaaagatcatggatagttttgttcttaactgcaagctggcttct

SEQ ID NO: 18687 - DNA, 442 bp, Glycine max
cttttctcttctccctttttctctctgtctctctctctcggtctcgctcttcttctcatcaagcacagagttacagactcaccgatcttccgattctctttcgtcttggtttatgagctcgaaggagagacccactcttggtggcacgcggattaagacccgcaaacgaaatattgctgcgccgctggaccctgcagcattctcggatgcagtggtccagatttatttggataatgctggtgatctggaacttattgctaagagtattgaatcttcagaccttaacttttcaagatacggtgacaccttttttgaggttgctttcactgggggtcgtacacaacctggaactaccaagcctgatgagggggaccgccacccatactctataatagagtgtgagcctaagcgtgaagtcatttaccatctgtaatctacatac

SEQ ID NO: 18688 - DNA, 376 bp, Glycine max
caaaaccctgaagaaagacacagccattgtttacttttcattgattgagccaaagctttgtattttctgcgataattttccattgggtggaagaaagtctcaacctttattcgaaagagcaaggatctgagttgagttgagtgatcatgtgtggtggtgcgattatctccgacttcataccggcaggtcccgccagcggggcgcggcgcgtgaccgccgacatcctgtggccgagtttgaggaagcgcttctcgaagccgctgctggacgatgatttcgaggctgggttcagagaattcaaggatgattcggaaatcgaggatgttgatgacgaggacgatgaagacgaggaggagttgaagaagaagccctttgg

SEQ ID NO: 18689 - DNA, 369 bp, Glycine max
cccacgcgtccgatctttatataataatataaataagaatgaaaaaatgaaaaaaaaaaaggaaaggggaaaaaaaaaagaatctatataaatataaaaataatatatataaaggacaaaatagaaaatcgaggtacccaatttaatgataaactttccttccattttatgttcctatagtaggcctagtatttccggcaattgcaatggcttctttatttctttatgttcaaaaaaacaagattttttagatacagaaaacaaagtaaaattctggggttttttattccccaattataatactaaattcaaaaaaaggagagtaatgagtataatctttcgctcagacgatgtactgatatattctat

SEQ ID NO: 18690 - DNA, 439 bp, Glycine max
  modified_base (425)..(425): a, c, g, t, unknown, or other
cccacgcgtccgcaagaacattagcttcactgtttgggatgttggtggccaggagaagatgggtcccttgtggaggcactacttccagaacacccagggtcttatttttgttgtagacagcaatgatagggacagagttgttgaggccagagatgagttgcataggatgttgaatgaggatgaactgagagatgcagtattgcttgtgtttgccaacaaacaagatcttcctaatgcaatgaatgctgctgagattaccgacaagttgggtctacactctctcagacagcgccactggtacattcagagcacctgtgcaacctctggggagggcctttacgaaggtctggactggctttccaacaacattgccaataaagcttaatgcctttgggagtcttgcggattggtaattctggatgcangggtgaacattatc

SEQ ID NO: 18691 - DNA, 438 bp, Glycine max
tgttgatcgagtctgactcatggcggagattgaactgaaaactgcacctgctgggtttcgttttcctacaacaaatcaaaccagacattgtttcactcgctacatagagtttcatagatgcttggcagcaaagggtgaaaactcaggtgaatgtgagagatttgctaaatattaccgctccctttgcccgggtgaatgggttgaaaggtggaatgaacagagggagaatgggacttttccaggacctctttgaaatcatgtggcacttggatatccttccgaggcatgagaagtctttaacattctattctcttcagttgttgagtaattgtgaataaggcagtttgtggatattcattacttcacaaatggttgaagccattttgattttaaagttgatttaattgttctgtggatacgcatctgagttacggaact

SEQ ID NO: 18692 - DNA, 252 bp, Glycine max
  modified_base (76)..(77): a, c, g, t, unknown, or other
aaaaaaaaaaaaaaaaaaatttttaattttaaaaaaaaaaaaaaaaattcgtaatgttgaaattttgaaattggannaaaaataaaataaatattatttataaatttttaatatattatttataataaatttttaaatttattaattaattttattttttatataaatattatattattatttattaattattattttattattatttttaataattaaaaattatttttttttatttttttatttattttt

SEQ ID NO: 18693 - DNA, 420 bp, Glycine max
taatatttttatataataatatttataatattaaaaaaaaaaaaaaaaaattgtaaattgttaaattttagtagtttttatttaaaaaaaaattattttatttaatttattttttatatttttatttattttttaaatttattaatttataattttattatttatattttattttttttttttattttataatattaatttattattttatatttatttatattttttaataaatataaatattatttattttatttatttaatttttttttttttatatatatttatttttttaatttttaatatttattataatttattgttttatttttattttatttatatttctttcaatttttatatattttattttaattaatatttatttttttataaatttatattatttttttttttttt

SEQ ID NO: 18694 - DNA, 396 bp, Glycine max
cgatcttattacgtgaccttgcttttcccaatggtgttgccttaagcaaagacggctcatttgttctggtagcagaaaccgctacttgcaggatcttgcagctttggcttggtggacctaaggctggccaagtggatacatttgcggttctgcctggtttcccagacaatattagaagaaattcagaagggcatttctgggtggctctgcatgcaaagagaagccctttcgcgaagtgggtttcttccaatccttgggtgggaaaggcattgcttaagattggatttaatttcaagcagctgcacacatcatttgcagggtggaagcctcatgctgctgctgtaaagctgagtgataaaggagagatattagaagtcttggaagattgtgatggga

SEQ ID NO: 18695 - DNA, 292 bp, Glycine max
cttctcttgaggacgaacaagctagcttgattgcctagacaacaatttgattcacattttgcaaattgaagtagcttgcttaatgtactactactatatatgtgcaattatttgcaaattggctttggtccagaaaatgatcaccaatgttgtgatcatgtgggaaatcttgtgtgatatgtattagtgtaatgcttcaaaaatagagtgaacaatatatgtgtagttaactagttatagatattggatagagttcttcatccatttgaataaaggacttttgccgaactac

SEQ ID NO: 18696 - DNA, 140 bp, Glycine max
taaaacaaacaaactaaattcttttacattacaacaaaaaaaaacacatctcgcttcctttaaatactagccccccctcccacaacaatataaattcaactattaacacaataacctttccccacaaaatcatcaccaat

SEQ ID NO: 18697 - DNA, 445 bp, Glycine max
gtagtttcatccttggccaatctgcatggttggactcttgagaatctaaaccttgatggtgtcaaaaatatcagtgatgctagcttgatggcaattgctgaaaactgtgcattgctatgtgatcttgatgtctccaagtgcacaatcactgatgctgggattgcagtcctggcacatgccgaacagattaatctgcaaatcctttctttgtcaggttgcactttggtctcagacaggagcttaaccgctctgagaaaattaggccacacccttttgggactaaacatccaacactgcaatgcaatcaacaacagcacggttgacacacttgtggagtttctctggaggtgtgacatcctctcctgagctgaaagaagaactaatctcacttgcaatttaagccaggatcacatcatgcaagaagcttgtatgcttagtgttgcac

SEQ ID NO: 18698 - DNA, 445 bp, Glycine max
agagagttgtggtgtggtggtggttgtcgtttttgaaatggcagcgtcgtcgtcagagaggcaagtggtggtgataggcatagacgacagcgagcagagcacgtacgcgttgaattgggctctggataactttttcccgagcccaattttcaagctcgttctcatccactccaggcccaccgccacctccgctgtgggcttcgccggccctgtgtttgcaggagccgctgaggtcttgcctattgtagattccgatttgagaaagattggcgccagagtcctcgaaaccgctaaacaactttgcatcaacaaatccgtaaatgatgtgacagcagaagtggtggaaggtgatcctaaaaatgttctttgtgatgctgtagataagtaccgtgctgcaatgttggttgtgggtagtcatgggtatggggctataaaaaggcgggtt

SEQ ID NO: 18699 - DNA, 291 bp, Glycine max
ggatttattggacaaataaggttcattccatttattgcattttttggtttgttggtgttgtaaattttatacagccacacaggattggtatagtatatatttcataactgttgtatgtttttacacatggtgttggtgaaattttttgattactttggggtttctcttttagttgggaggagaaccttatgttaatcttttgtaagattctgttaattttttcctgtcttcacaattgttcactatcaaaatagtaaagtttcacaagaaatgtgaattatttttgctttt

SEQ ID NO: 18700 - DNA, 438 bp, Glycine max
aaacccccctctctctactcaaactaaccactctgtttctcttgctctacttttgccctgtgtccagtggaacaaatcttcatccaaattaggttttgttttggagaaatgtatgcagagactggtcttttcttcccatatttgcacaacgtctctcacggccttcatcagcttgaggagtactgcaaaacccagaagtccaatgcttcaatggatgaccttgttcagtcttctgccatgtcagagtatgatttggcagctgagggagatctgttcaaagctcctgaacctattattgaagagccaatcatggacatgtcagcggccatctcaatgatgtcttgtggggaagatgtctcgtcacaaggactaaagtccactgatattgatattctttaaaatgattcagttttgagtgaggtgttctatgaatgtgaa

SEQ ID NO: 18701 - DNA, 409 bp, Glycine max
  modified_base (323)..(323): a, c, g, t, unknown, or other
gaccgtactatctcgttatcaagaaaacgataaatcctgcggcgggacagtaccaactgacgcacatcattccctctctcttcggatctcacagccgccgctcacggcggtgccgccgttgcactcgccgctgctctctcttcgatctccccctcgccgatactgagaaggtaaagtccttaacgatggtcgaagtctctggtagtaagacttgtggcactttggctctttctggaggttgatgaaggtgacatctccgatgtagcggtttcgttgagtgaaatctgtgttgaagagtaagctgttgtcatgtgagaactttntaagagtttttttgattttacagaatttactatgattgtttatggaaaaaactcttctctgcaacatcaagtgctggcattcgaca

SEQ ID NO: 18702 - DNA, 440 bp, Glycine max
cccacgcgtccgtgacactcttctctccttaaagccaccacattctgataccctggtgatcaatcaaagtgaagatcagcatagaatgcttgtttgattctatttcattgctatggataagtacgaggctgttaaggatttgggagctggcaattttggggtggctaggctcatgaggaacaaggtcaccaaggagcttgtagccatgaaatacatcgagcgtggccccaaggtttcttcttttatacaatcacttcatcaatttatgatttatcccaacccttttgtgtgtttattattatattaagcagttaaagagatggtagaacttgatgcagaactgaacaaagacttatgtttgttaattattctcctatgatttgtgaagtttatttctatgtaccggtttacgctcaacccatcagaaatcatatgacttt

SEQ ID NO: 18703 - DNA, 451 bp, Glycine max
acgcttgatcatcctggtgttggaagggttccaaaggctttagaaggagagcaagtggtagcagggtgaccaacttgactttcttatgatgctggtgaagctatccaagggtggataccacggaaggcggatacttttgagaggtttcataaaattggccaaggaacctacagtactgtgtataaggctcgtgatttgactgaccaaaagatcgttgcattgaagagggtacgctttgataattgtgatgctgagagtgtcaagtttatggcaagggaaatccttgttctgcgtaagcttgaccatccaaatgtaataaagttggaaggcttgataacatcgcagacatcttggagcttgtaccttgtttttgaatacatggaacaacgatcttacaggacttgcatcaagtcctagcattaatttttctgaaccacagggtaaaatgctt

SEQ ID NO: 18704 - DNA, 391 bp, Glycine max
cccacgcgtccgcccacgcgtcctttctatccagaaccagacctcgttagttgcgtgtcttggattcttttggtggatcaataaatgttaatccttaattgttaatattttgttagtgtggaattgtggtaactaaatgggtttttcaatttgggcttagatacaaccatggttggtcacactgtcgcagagattttggttttgtttctgattaagttcacgttggatcaagttgggttcaaattggactctctatgcctacttgctctgtgtctgatattttgcctgcctttaacgaattaagcttcaagagtcaacggcgttgcattataaaaacgtaaaaagagcatggaagggagagaagcaagcaaacaaaactgatcgatcaaat

SEQ ID NO: 18705 - DNA, 394 bp, Glycine max
  modified_base (348)..(348): a, c, g, t, unknown, or other
gaggaaccctagctagggtttggaagaagctgatccgagaagatggtgcagcgtctcacctaccgcaaacgccacagctatgctaccaaatccaaccagcacagagtcgtcaagactcccggtggcaagcttgtttatcagaccacgaagaagagggccagcggacccaagtgccctgtcactggaaagaggattcaagggattccacatttaaggccagcagagtataatagatcaaggttacacagaaaccgaaggactgtgaaccgtgcatatggtggtgtgttgtctggcagtgctgttagagaaagaatcattcgagctttcttggttgaagagcaaaagatngtgaaaaaggtcttgaagatccaaaaggacaaaggaaaacaagctt

SEQ ID NO: 18706 - DNA, 371 bp, Glycine max
cggacgcgtgggggggatgaaaaacttgatactgaagaggcaaggcgagggagaaaaacagagcgtggattctctgcttctggttctgcaacaaggaagccatgcctcaaaaatcgcatcggctagggttttgaaatcagtcgccgtagacgcggaatcgaagctgctgttagcggagaaggaaggtttagtatccgaattgctgaatctaatcacgccggagaaagatcctgatcttattgagaactgtttatcgtgtctggtttcaatttcgacgccgagacggagcaagatgaagctggtgcgtctcggaacggtgaaggtgttctcgaaccttctttcggctccgggcctgagcgtgtcggtgaaag

SEQ ID NO: 18707 - DNA, 434 bp, Glycine max
  modified_base (411)..(411): a, c, g, t, unknown, or other
cccacgcgtccgaaaaatggaatctaaagagtccatctttgtgaagcttttgctgattctgcatttgtccgttctctgtgtttcacaggattttgatttctactactttgttcagcagtggccaggatcatattgtgacacgacacagaacagctgttgctaccctacaactggaaaacccgctgcagattttggcattcatgggctttggcctaattacaaagatggttcatacccatctaactgtgattcaaacaatcgttttcagccatctcagatatcagacctcactagtagcttgcagaggaactggcccacactagcatgcccaagtgggaatggggttcaattctggacccacgaatgggagaaacacggcacttgctctcagtcagtccttaaacaacatgnactatttgaaacagctctcgatc

SEQ ID NO: 18708 - DNA, 419 bp, Glycine max
cgaaatcccaatcttaatcgcaagcaattcctctctctgagagaagctctcgaaattcttgtgatactcgtagaattttaatggcttgttcatcatccgattcaaaaaaaccagtgacgtcgctgttgttcttttccttcctaattccgataccttccgattctctttccgccctacgcatactcgatacttgttcatctctctctttctcaaattccgattcctttttgtagcatacacaccgtactagcccaactaacaaaccaaacaaaaccgttaccatgggaaaacgtaattctcaacgtaaaagtgctgcgatgttcgatagtgatgacgatagtagcgtgacttcgtcgtcaactgctcgttctgatttgatgtcggtgtctggggctgaagatgttcaatttgttcaagat

SEQ ID NO: 18709 - DNA, 405 bp, Glycine max
gtctgccacaacacacagtcgcacacagcgcatgaatataagcagagtaaacgtaatgtggaagagaggcttggtcggcgccgtgggtggtctccggcggccatattcgtcaggaggtggcggcatctcctcctccgtgaactcaatgctcctccgctccctaaaggatcactatcaagaagtcgccaaaatgaacatgccccctaaagtgagtgctccatcgccgttcacgatcgtgaagggagctctggactcgcacggtccggttctgaagcgcagctacggcaacgaagaggtgagcatctatgtgatgcggttgttgacccccgaggacgaggattccgccatcgaccagctcttcatccacgtcgatgtctccaaacctcagcagaacgaatccttgat

SEQ ID NO: 18710 - DNA, 168 bp, Glycine max
gagggtcgacgcacgcgtacccctacgcgtgcggacaaaatgcattctgcaaaacgatttagaatccaaaatctcgagttgggaacataaaatggtacctttggatccaaatactttatattaatcattattgatgaatctcaactaggcctaccgtccttgtgtaag

SEQ ID NO: 18711 - DNA, 352 bp, Glycine max
cacaatttgctttcgtttgttgttgttgttgtttctgttccttctcttgttccttaaactctttgtttcaaacatccttagaaaaggtaaaaatttaaaaaaaagaaaagaaaatggtggctgtggtttcccaagaaaatgttgcggcattggtttctcgtaccggtagggagttgcaacgttatagaaaaggtcgtcgccaagttgtgggatgcataccgtacagatttaagattggggagaagacttccttggatgttgtttctgatgaattggaagttctggttattagttcccagaaaggaaaagggatgctatttccaaaggaggctgggaattagacgaataaaaa

SEQ ID NO: 18712 - DNA, 422 bp, Glycine max
acagattgtgaagaagaacgaaactggctggaccttccgcgagacgtggtgtgcacgattttccagaagctgggcgcaatcgaaatcctgacgcgcgcccagcgcgtgtgctccgtgtggcgcggcatctcgaaggagcctctcctgtggcgcaccatcgacatgcgcaattcgggcgacattgaaaccaacttcgtgttcttggccatgtgccaccgcgcaattgactacagctccggccacttgctccatatcaacatcgagtatttcgccaccgatgatctcctccgccacatcacccattctacaagtaatctacgaagcctacgtcttgcatgttgctaccaaatttcagatgaaggattgtgtgaaattgcaaaagagcttcctcagctggaggagcttgatatatcaatcagcag

SEQ ID NO: 18713 - DNA, 426 bp, Glycine max
cagcgatcgaagtttcacatcagtcttatccagtttagggtttcggttccttacgctacctttgacgtatcgaaaccttaaatttgggattaggtctgagcaatctggttggtagaacctttggtcttagagagtcaagttttatgtctggattagacgatcaaattcctactgccttcgatccttttgctgatgcaaatgctgatgactcgggtgctgggtcaaaggagtatgtgcatattcgcgttcagcagcgaaatggtaggaaaagcctgacaaccgttcagggattgaaaaaagaattcagctataacaagatacttaaagacgttaagaaagagttctgttgcaatggaacagttgttcaggacccagaactaagacaggttattcaacttcaagtgatcagaggaagaaatgttctac

SEQ ID NO: 18714 - DNA, 410 bp, Glycine max
  modified_base (290)..(290): a, c, g, t, unknown, or other
cccacgcgtccgttccactctatatccatcgtcaacagtgaagtgcgaatactcagcaactggagctggggaaccttgtctctactcgctctcgtccccgccggagatccaccatggccggcaaccccgccaccacttcctcctccgcattatctcccgagaaatttaatttcaatttctcccccgataacccctcccgaatcaccctcacttcggatcaggtcaaccactgcacccaagccctcaacattctgaaggagaagctccacgctcctaacgtgatcactcangagttcgcacacttgcaggcgaacaggataacgccgagcgagatgaggagaagatgcaccgtcgcgtatgacgacgtcaatttgaggaaaaaccgatacaccgacgttctgccatttgac

SEQ ID NO: 18715 - DNA, 359 bp, Glycine max
atcgcattgaatccattttcgtcaaacataacataacatgtctaatcatcatcattcctccaatcccttcgcatcatgctcatgcactcactccgattccgattccgactcagtgagttgcttcgtcaccgatctcttcgaaactcgcctatgctcctgcgacgacgacactgacataaaccccttttccgacgtcgtttgcgacctccaccgtacggagcatgtgttagggttagggtttggcgttgaaattgatccccatagccaaacgaatggggataatcatcatcgtgatcgggttttcgatgctgatagagttttcaatttcacggtgggggatggttcgagcggggttaggg

SEQ ID NO: 18716 - DNA, 297 bp, Glycine max
tttacgcaaacataacataacatgtataattttcataatgactccaatcccttcacatcgtgctaatgcactcactcgggttccgattccaactcaatgagttgatacatcaccgatctgttagaaactcgcctatgctcctgctacaacgacactgacataaacccattttccgacgtcgtttgcgacctccaccgcacggaacatgtgttaggattagggtttggcgttgaaacagatccccatagccaaacgaatggggataatcatcatcgtgatcgggatttcgatgctgat

SEQ ID NO: 18717 - DNA, 445 bp, Glycine max
  modified_base (395)..(395): a, c, g, t, unknown, or other
  modified_base (420)..(420): a, c, g, t, unknown, or other
cgtcgggaccgtgggttgtgaggcgagggtaaggtcgcgttggttgcgtcggtcggcgctgtcctctgttctcgttttggtgtcagaccgaaccctagctcgatcgaaccatgtcgaccaagcaaggtggaaaagctaagcctttgaagaaactaagtctgataagaaggattacgacgagattgatgtggctaacattcagaagaaaaaggaagaggagaaggcgctaaaggagttgaaagccaaggcgcaacagaagggaagctttggaggttctgggctcaagaaaagtggaaagaaataagggctctttatcatgattgtatgcattcaatattgagccctgtaattacagttgctaccatgataacttctcttattattgtggcctactntattgctaatgtgtactgaactgangtatgtcgtgatgtaagctgcaata

SEQ ID NO: 18718 - DNA, 446 bp, Glycine max
ctctcttcttcagtggtggaagctactagaacactagtttgttgagcactgcgatgaggaagtggacggttgcttccgctctccttcttctctctctcctctttctctttgcagatcaaggtcgaaagtttcaggcgaatgccgagggagattccgacgagcttgtagatccacccaaggtggaggacaagatcggtgctgtgcctcatggcctttcaaccgattcagatgtcgtcaagagggaggcggagtcgatctcgaagagatctctccggagcaacgcggagaagtttgagttccaagcggaagtgtcgcggcttatggatatcatcatcaattctctctacagtaacaaggatatcttcctcagagagttgatttccaatgcttctgatgctttggacaagattaggttcctctccctcacggataaagaagtgttggga

SEQ ID NO: 18719 - DNA, 274 bp, Glycine max
atataattctgatactggagacttttagagaccgacatgggatgcaaagacgggggtgcgtggcaagtgttgagcaaactgggcacatattatgacccgacaagatatatgctcttctaggaatataagctgtcatgatcccagatgccgattggtttcagcctatgatccacctaagccttgcgctggatgagaataagaactgtccatactttaattggaacggtgactgatacaacacaactggggatttagcattgaaaactctgactga

SEQ ID NO: 18720 - DNA, 299 bp, Glycine max
  modified_base (20)..(20): a, c, g, t, unknown, or other
ggggcgacccacgcgtgcgncaaaaccattagattcatgggttttttaactctcactaattacttgattttttggctcattttaatcagctgctatatgggtgtaatctctgtgaatgataccatcacatcaaccagattcatcatggaccctgagactataatctcaagcaacggtgacttcaagctaggattcttcagccctgaaaaatccacacatctttatgtagctatctgcgatctcgctgaaacctacatcatatggatagccaatatagaccaaccacttattgatttatt

SEQ ID NO: 18721 - DNA, 420 bp, Glycine max
ctgacactttcggccccacggactgtcactcacatcaccaaagaaattaaaaggccttctgggggttccagattaatctatgcctctaaatacaatacaaagctgaaaaaacgcaataattaccatacaaaatcagtataattgtaaacagcctgatggatcactatggttctcctgaacgaagcttgtcaatgatcccaacccacaaataccaatcccaatcgaaccaggaccctaacctctttctgcaacaacaccaacagtttatccagtcacaaccttttcaacaagcactagcgcctcaatctccatttcaacagcagcagcagcagcgtcttctacagcaacagcaacaacaacaacatccgcagaaccttcaccagtcactggcctctcactaccatctcttacacttggtgg

SEQ ID NO: 18722 - DNA, 441 bp, Glycine max
gccaacatagcattacccatggtgctaaccgggttattactctattctcgctccgtaatctgcatgctcttcctcggtcgtgtgggtgagcttgccttagctggtggctctctcgccattggattcgccaacatcacgggctattctattctctcgggcctcgccatgggcatggagcccatttgcggccaggcttttggggccaaaaggttcaaacttttgggtctcgctatgcagaggacaatcgtcttgcttcttctaacttcagttttgatttcattcttgtggctcaacatgaagaaattattgatcctatgtggccaacaagaagacatcgccaccgaagctcaatctttcatactattttctattcccgatcttgtagcacaatcattgctacaccctttgagaatctacttacgaagtcaatctataacccta

SEQ ID NO: 18723 - DNA, 348 bp, Glycine max
  modified_base (347)..(347): a, c, g, t, unknown, or other
ccgggtgtagttgagctccatgtacattggcagattgtctacacgttgtagtcctcgggtcgttgaaaaggttgaggtgcatttcaggaaatatcaccaatggtggtttgataatttgcatattgacctgcaggcaaggcctgagttaggaatcgtgttgtttgaaactggtagatagttatcatgccattttgtttttacagcagttatgacattgcaatattgtaatcgtgtatatgtatgttatattttatgtattttacctcgtgggatttgtaataaattttgtttaagttaaagaacttttgaaatataatttaattaagtacttttgaaacatggtacana

SEQ ID NO: 18724 - DNA, 439 bp, Glycine max
gtttatatcttgcctctcacaaggtctatggtggagaggcaaggatttcaactgtgagggaattatttcctctgatggaagacaagaagagccttgcttcatctgaagagcgttctcagataaagggaaaagcttctctattagctgcacttgactactatgttggcttgcatagtgacatcttcatctctgcttccccaggaaatatgcacaatgcattggttggacaccggacatacttgaacttaaagactataaggccaaatatggcattgatgggtcagcttttcctgaataaaaccatagagtggtcagagtttcaggatgcagtggttgaaggtcaccaaaatagacaaggggaactaaggctgaggaagccaaaacaatcaatatatacgtatccagctcctgattgcatgtgccaagcttagtagtgact

SEQ ID NO: 18725 - DNA, 440 bp, Glycine max
aaaaaaaaaaaaaaagcgagagaagagtgcatagcaagcttagaagagcaaagggtgtgtgtgatgttgttggacattcattcatttcaatctcaatcacatggcttgttcttctccctctcactcatatctcacacatcttcctcttcatccctctcaccaaggtgatagtgagaagcgcgtggaggacgattaatcccgcgttccgattcacatcgtgacggcggcgtcacaacttcccgtcgaatttctggaaccctcccctcaatcgaagctcggcatcggctttgactgctagggcgttgacttgtgccgcaaaggcactctctgcgtaatgcagcttgcgtttacggatgctgtctacttggttgatgcgattgaagggggagaggagcttatcatagcgtgtaagcctgcacttgtatctaattacatcacaa

SEQ ID NO: 18726 - DNA, 447 bp, Glycine max
cccacgcgtccgcccacgcgtccggtgctttactaaggcacgtgagcagctattcgagaaggctgttacgccgagcgacgttgggaaattgaaccgtttggtgataccgaagcagcacgcggagaagcactttccgttacagagctctaacggcgttagcgcgacgacgatagcggcggtgacggcgacgccgacggcggcgaagggcgttttgttgaacttcgaagacgttggagggaaagtgtggcggtttcgttactcgtattggaacagtagccagagttacgtcttaaccaaaggttggagccggttcgttaaggagaagaatctgaaagctggtgacacggtttgttttcaccggtccactggaccggacaagcagctttacatcgattggaagacgaggaatgttgttaacaacgaggtcgcgttgttcggaccggtcgg

SEQ ID NO: 18727 - DNA, 447 bp, Glycine max
  modified_base (425)..(425): a, c, g, t, unknown, or other
cccacgcgtccggacgaggacgaagaggtaatgagtctaaagttggaaactgagagtttgagtgtacccacaaaacggcaatcaagaaggaacacaccattgcctagcagaattagtggtgcatcatctccttctctgcctgatcatggcattcgaaatcatccagagccataaatcatggacaccaaggaatcatatcattattttggaccgaccacaaccacgaccacataggctagtaggatggatagatgaaccatggatgtgtgcatatgtaacataaactgagaaagcaagctagtgtgatcagcacaaactgtgaggtagagattattattatttcgaattttgttaatagtgaatttgttcccttacaccacggaatgctgtaaattatccaagagctgaatcatggtttagatcgnggtatattttttttttttcttt

SEQ ID NO: 18728 - DNA, 316 bp, Glycine max
atcctatgaacactcattatcctcttctctaacaaagccatagtacgacacttttagttcattagttctgcttatcctatggataccattcgtaccaccaccatcacccgcgtgcaacaaacaaccccaacaaagaaaaccaagcccaaaaaataaagcctcaccccttccatacgcaacacaaacaccaaaagtgggctacatactaaaatagtgtatttgctgaaataaaatgtactatagatacagattactcgccatacagtcaacaaatgttacattattctattaaaattatgactgttaattatttttc

SEQ ID NO: 18729 - DNA, 421 bp, Glycine max
cgcattctcaatacccttttgatttgtgaaaggaaagcaaacatggttgatcaggtccaacaccctacagtcatggacaaggttgctggtcagctccatctccgttctggtctttcatctggtattagaagttatgatggagcctaccgccacccagctatgtaccaaagaccctcttttgggaattactcgaatgctgcattgcagtttcctgtgatgcccacatgcaaagctaccatggatttgtctgctactgcaacatctgcctcacccgtctttgttgctgctccagcagagaaaggccattttcttttagactttctcatgggaggtgtttcagcagctgtctccaaaactgctgctgctcccattgaacgtgttaagcttttgatccagaaccaggatgagatgatcaaaactg

SEQ ID NO: 18730 - DNA, 439 bp, Glycine max
  modified_base (382)..(382): a, c, g, t, unknown, or other
cccacgcgtccggcggcagcgacggtaaccctccaacaacaacacttccgctgcgaaaaatgtctctggtggcgaacgaggatttccagcacattctgcgtgtgctgaacaccaacgtggatgggaagcagaagataatgttcgcaatgacctccatcaagggtattggaaggagattcgccaacatcgcttgcaagaaggctgatgttgacatgaacaaaagggctggtgagttgactgctgctgagttggatagtgtgatgactgtggtggcgaaccctatgcagttcaagatcccagactggtttttgaacagaaagaaggattacaaggatggcaaatactctcaagttgtgtctaatgctcttgatatgaagctcanggatgatcttgagagactcaagaaaatcagaaaccaccgtggtttgaggcattactg

SEQ ID NO: 18731 - DNA, 438 bp, Glycine max
cccacgcgtccgcccacgcgtccgcccacgcgtccgtgttgttgtaactcgttcttcttcttttgttgttctgtgtttgtgtttgttttttctctcacctgaaaatgtcttgctgcggtggtaactgtggttgcggaagctcctgcaagtgcggcaacggctgcggaggctgcaagatgtacccagacttgagctacactgagtcaaccaccaccgagaccttggtcatgggagtggcacctgttaaggctcaatttgagggtgctgaaatgggtgtgcccgctgagaacgatggctgcaaatgtggaccaaactgctcctgcaacccctgcacttgcaagtgaggtgttgggagagcaagcttcaagcagagatagcccttaattaggaataatgataaactattaatgtgtagctaaaaacttatgtattatgtct

SEQ ID NO: 18732 - DNA, 413 bp, Glycine max
cccacgcatgcgcccacgcgttcgaccacgcgtgcgtgttattgtaactctgggttcttccggtgtggggcagtgttagtatctcactttactctctcctgaaaatgatttgctgtgttggtcactgacgcctcggtaactaactgcaagtgcggcaacagctaccatacgctgcaagatgtacccaaacttgagcatctctgagataaccaccaccaataccttggtcatggtagtggtacctgttaaagcacaattactggatgctgaaatggatattccccattagaactatggttgcaaaagtagaccaaactgatgctgcaacccctgcacttgcatgtgaggtgttgggagaccaagctttacccatatatagcccttaattaggaattatgataaactattaatgt

SEQ ID NO: 18733 - DNA, 404 bp, Glycine max
cagggtggctttatgatgtctcagacttctctgctcttccaggaaggggcatggagtgcttggtagatgggaggcgtattttggttggtaaccggaagctgctggaggaaaatggcataaatatttctacagaagtcgaaaattttgtagtagagcttgaagaaagtgcaaagacagggatactagttgcatatgatgatatattaattggagtcttagggattgcagacccactaaagagagaagctgctgttgttatagagggcctacagaaaatgggagtcatacctgtgatggttacaggagataactggagaacagctcgagctgtagccaaagaggtgggcattcaagatggtagggcagaagttatgcctgcacgaaaggctgatgatgctggatca

SEQ ID NO: 18734 - DNA, 431 bp, Glycine max
  modified_base (5)..(6): a, c, g, t, unknown, or other
  modified_base (12)..(12): a, c, g, t, unknown, or other
ccggnncggaanaaccgggcttcaggtcgttgccgccctctctctctctctctctctctctctcttaccctcctttcaaccaaacccttaacactgtcgaatctcacttctctgtttcgaatctcgttgaagtgcagagctcactgctcttcaccaatctcagatctgttactcgaaaactctattcatggcgcatggagcgtacctttcgattttcttttaattctagggattggatgctaatcggatttgagttttttattggatttttaattggtgttgtggttttgaggcattgatttgacacgaatattgagtggaagctgaagtcaggttcgagttacttcgtgaatgctgtgtggtaatgttggttatctggtggttaccacgtttggattcccaagggctctggtctttgattttgatgggaa

SEQ ID NO: 18735 - DNA, 280 bp, Glycine max
cgcaaacacaataattgtatagtttttagtctgtcgagaactcattcatgatctgtgatatttgttaaagagagagcgacagacagagagagagaggatgggttgttgccaatcatctatcttgctgatagtgggagagaggtagactcaccctgaaatggtgaaggaaagggtaaaggaaaaagagcaagcgttctgtaaccactaaaggcatgctgctgtatgagagctcgacggcgagaaagacgtggttgatttctcgttctcggtgttctcactt

SEQ ID NO: 18736 - DNA, 433 bp, Glycine max
gtggcattgtagggactagggattgtttcacagaacacctctgaaattcaaatcccttttttttgtttgatattaatctatggtaggatatagaatctgaagctgaaaaaaggggttaattgttttgcagaatcagtataattgtagagagcgagatggatcactatggttcttctggaggaagctggacaatgatcccaacccacaattcccaatcccaatcgaaccaggaccctaacctctttctgcaacaacaacaacagtttctccagtcacaaccttttcagcaagcactagcgcctcaatctccatttcaacagcagcagcagcagcgtcttctacagcaacagcaacaacaacaacagccgcagaaccttcaccagtcactggcctctcactaccatctcttacacttggtggagaatttggctga

SEQ ID NO: 18737 - DNA, 439 bp, Glycine max
cccacgcgtccggtctttgtatcacgaaaactatacgattcgattccttgttttcaatgggcgaccttcttgaattctcaatcttcttcttcttcgagaagccgctggagttacgatactctcaagaatttccgtgagatctctccgctggttcagaatcacatcaaacgggtttattttacgttatgttgcgctgtggtggctgctgctgttggagcttttcttcatgttctgtggaacattgggggttttctcaccacgttggcttccattggaagcatggtttggttgctatctacaccccctgttgaagagcaaaagaggttgtctctgttgatggcttcggccttgtttcagggcgcttgcattggacctctgattgatttggctattgccattgatcctagccttattggtagtgcatttgtggcaacttctt

SEQ ID NO: 18738 - DNA, 439 bp, Glycine max
caaaacttgaaatcaaatcaggagcgggggaaaaagaaaagagagagaagtagggttcgaaaatggcaggagaatcatcagagggcgaagaagaaaccaagttaagcggagggagcttattgctgaccgttgacgacgacttaacggaaatgggaaagaaagccgcttggagcgtcagttcctgcaaacccggtaacggcgtttcctctctccgtgacgacaatctcgaaacctattggcaatccgacggagggcaaccccatttggtcaacattcagtttcaaaagaaagttagacttcagttgattgtgctgtacgtggatttcaagcttgatgagagttacacgccgagcaaagtttccatccgtgccggtgatggttttcacaacttgaaggagattaagaccgtggaactcgtgaagccaactgggtgggttta

SEQ ID NO: 18739 - DNA, 438 bp, Glycine max
cccacgcgtccggtgtggcgtgggtagataaagagtgtatctggattctgatctgaatataggggcacgcataaaagggaacgaacgtaatggctgcagcagcgttgctcgaacttgatcgagttctcaagtccaagaaggaaatgttgacgcctcgggaagcaaatattcttctatcgtggaaatctaaatctctgatggatctcgctgccggtgcacttggtgggaccgcaactgcaggggctgcaacttggaaactcaatggactatttcgaatatgcctttcagcaggatttggtacttactgtggaccgcggatgtttaatagatcctcgtattctcatgcagatcagattcttacaatggatggtagtatattacagaaggagttagcgaatataacggtgacaaaataccagaatgatcctttgctaatgc

SEQ ID NO: 18740 - DNA, 438 bp, Glycine max
gcaccacattcacctgaggcttccaaagcaatggcttcccttgcagcatccactgctgctggttcccttggcatgtcagaaatgcttggaaaccccatcaacttcagtggtgccacaaggccagctccatctgcttctagtcctgcctccttcaagactgtggctcttttctccaaaaagaaggctacaccaacacctccaaaaaaagctgctgctgctgctcctgccaatgatgagcttgccaagtggtatggtcctgacagaaggatcttcttgcctgagggtctcttggaccgatccgaaatcccagagtacttgaccggagaagtccctggagactatggttatgacccatttggtcttagcaagaagccagaagactttgccaaatatcaggcatttgagttgattcatgccagatgggcaatgcttggtgct

SEQ ID NO: 18741 - DNA, 435 bp, Glycine max
cccacgcgtccggacacagacacggtgcattccagatatgcatggagtctctctctctgtgtgaacacgcaaaagaccattgattgtccgagagaacgcaagcactgacatcagtactccatatatttgctactctgcatgaacataacattcatacttaagttttgctggttgtgtgtgtgttttttgttcttggtcgagccttgtactgattaacgagaatggacaaggaagtggagcttggttcccttgaaggtgaaatggccacccagcacatttcacaaccacagaagcgcaagggtggtcttgttaccatgcctttcatcattgcaaatgaggcacttgcgagggtggcaagtttgggccttttgcccaacatgatactgtatttgatggggacctacaggcttcaccttgcccaagcaacccagatac

SEQ ID NO: 18742 - DNA, 423 bp, Glycine max
ctcaagtctctcgaagcctctttctctctcttctagaagctatctgtgtttggtgttactaggtctccaacaagcaaagtacatggttgatttggaaatccaggtccccaccccattcgacccgtttgccgaggcgagagaatcggatgcccccggagcaaaggagtatgtgcatattcgaattcagcagaggaatgggaagaagagtctgaccacagtgcaagggctgaagaaggagttcagctacgagaagatcctcaaggacctcaagaaggagttctgctgcaacggaaccgcggtgcaggacaaggagcttggcaagatcatccaactccaaggcgaccagcgtaagaacgtctgccacttcctcgttcaagctggccttgtcaggaaggaccagatcaagattcatggtttttgacc

SEQ ID NO: 18743 - DNA, 447 bp, Glycine max
caacaagggaaacagaatattattccattttttcacttccacactttcttgcattcattcccgattttcgactatggcctcttcagctcaattttccaccactttggtcgtactatgtctcttccaattcctagcaggttcatattcaacgacattcacaattgtgaacaagtgcagctacacagtttggcccggcattttaaccggcgccggaacctcaccgctctccaccaccggcttcgtcttacaacccggcgagtccaacgtgatcaccgtgccggccgcctggtccggccgcctctgggggcggaccgtctgcacccaagacgccaccggaaaattctcctgcgtcacaggcgactgcggctcctccgccgtggaatgcaacggcgcaggagccgccccgtcggccacgctcgccgagttcacactgaacggcgccggcgg

SEQ ID NO: 18744 - DNA, 439 bp, Glycine max
ccacgcgtccgtaacctccgaagcatggcaactcgaagagtaagatgcatgcagtgcggaaggcccctgctagtgccaattgaagttgcctatagcattcctttgatgtgttatggatgccaagctagcagacccaattatcattttgcaaacaatgttacacctccatttgttaattatcaccctgctcctggctatgcacataggatacgacgtaaccaattcaattatcctcggccattgccactgacgccgccaccaactccattgaaccctccttcttcctatggcaacaagagggctgtcttagttggcattagttattgcaatcagattaacaaccttaaaggttctgtcaatgacgctcagagcatgaaatactttctcattaacaagatgggtttccctagtgactccattcgcgtcctcacagatgatc

SEQ ID NO: 18745 - DNA, 440 bp, Glycine max
ctcatctataccgagcctccggagaagcttctcaagaagctcgaattggtaaatggggttctcttcactggtggatgggctaaaagtggtttatattttgaaactgtcacaaaaatatttaagaaaattttagagaagaatgatgctggagatcatttcccattatttgccacctgcttaggctttgaactcataacgatgatcataagccaggacaataatattcttgaagagtttagtgcatcaaatcaggcaagtactcttcaatttgtggagaatgcaaatatcggagaaagtgtctttcaaagatttcctccagagttgttagggaagatgagtacagattgtcttgtcatgcaaaaccatcgttatggcatatcccctggaaagcttctgaataatccaaagttgtctagtttttttgagatcttgacaacttg

SEQ ID NO: 18746 - DNA, 427 bp, Glycine max
caagggaaacagaatattattccattttttcactgccacactttcttgcattcattccgcattttcggctatggcctcttcagctcaattttccaccactttggtcgtactatgtctcttccaattcctagcaggttcatattcaacgacattcacaattgtgaacaactgcagctactcagtttggcccggcattttaaccggcgccggaacctcaccgctctccaccaccggcttcgtcttacaacccggcgagtccaacgtgatcaccgtgccggccgcctggtccggccgcctctgggggcggaccgtctgcacccaagacgccaccggaaaattctcctgcgtcacaggcgactgcggctcctccgccgtggaatgcaactgcgcatgagccgccccgtcggccacgctcgcctagttacac

SEQ ID NO: 18747 - DNA, 93 bp, Glycine max
cccacgcgtccgcccacgcgtccggtttgaatgaatacttttgtagggaaattcttgtagtggcatgtaatctcaatcttgatgaattttgtc

SEQ ID NO: 18748 - DNA, 448 bp, Glycine max
  modified_base (397)..(397): a, c, g, t, unknown, or other
agcgcattatagcacaccacacaaaaaagcaaagcagaaaacaactgttacttacacacgccatgggtatgggtatgggtatgggtatgggtaaatgagtggtaaatgagtggtttttgagcagaagcagttaaaagagaaagggattcagcgaagatgacatcggttggtgtggcaccaacttcgggtttgagagaagccagtgggcatggagcagcaggtgttgatagattgccagaggagatgaacgatatgaaaattagggatgatagagaaatggaagccacagttgttgatggcaatggaacggagacaggacatatcattgtgactaccattgggggtagaaatggtcagcccaagcagactataagctacatggcagatcgtgttgtanggcatggatcatttggagttgtcttccaggctaagtgcttggaaactggtg

SEQ ID NO: 18749 - DNA, 366 bp, Glycine max
  modified_base (342)..(342): a, c, g, t, unknown, or other
atcgctttttttgtcagtacgcggattatcctatctttctctagcagtagatagatccgccaggaggatgcaactccggatcgggctactactacgatctcgggattagtagggatgcctccttctctgatattcgcactggctaccgaaaactcactatgaggggggacccggacaaaagggctcttaatcccgcaaccgccggcgatagccaagcgccggtttcatcaaatgcaagaagcctactcagttctctccgatcagtctaaaaggtcaatgtacgatgcggggctctacgatcctttggaggaagaagaccaaaatttttgtgacttcatgcangagatgatctctatgatgaacaat

SEQ ID NO: 18750 - DNA, 412 bp, Glycine max
gccttatctatctaatatactatacaaaaagttcttatcagtgacagagtaaaggaggcataccgatgacgatggcgatgacggcgtcgcacttgcggtgcggttgggggtggaggccaacgccgaatcagcagcagcaacgacgtcgtatggttccggtggtgtgttccatcgctatagagaacgcgaagaacaaagagagagcgaaactgaagaagctcttcgatgaagcgtacgagaggtgccgcactgctctcaccgaaggcgtttacttcactgtacaacaattcaccgacgctctcgacaagtacgacttcaacgccgaaatgggcaccaaggttaagggcactgtttttgccacggataacaatggagcttatgttgacattactgctaagtccacggcctactt

SEQ ID NO: 18751 - DNA, 439 bp, Glycine max
acgcccacgcgtccgcccacgcgttcgagtccttgcattgtacattatccaaaagggacgagtggaaatcactttggattctgatttattgtcttgtccaaatgcctacagcctcaagcctgacatccaaagtgaggatgatgtacagagcggaaaagaactgtcaatagagaagcctgagggaagctattttggtgaatgggcccttcttggtgaaaatattggttccttgagtgctgttgctgtgggtgatgttgtatgtgctttactaacaaaggaaaaatttgaatctgttattggctccttacaaaagatttctcaggaagatcacaagtcaagggattattctagaaattatgaattttcatccctcgataaggtccagctctcagatttggagtggagaaagacactatattccactgactgctctgaaata

SEQ ID NO: 18752 - DNA, 442 bp, Glycine max
gtttctagttcaaaattcttattacaagcattcttgccctggtagtatgcgccttgttttatgaatttaggagaacactttgtggcaatacaaataaaatctgtaatgcacctcaagcaccacgtgcatggcctatcattggccatttgcaccttttgaatggtcatcaactcacacacaaaacactcggcatgatggctgagaaacatggtccaatcttcacaataaaacttgggtcatacaccgatctagtattgactaaatgggagatggccactgagtgtttcactgtacatgacaaagcattctccaccataccatgtgttgcagactcaaaactaatgggctacaactataccatgtttggcttcactccatatgagtcttactggcgtgaggtaaggaaattaactaccatataacttgttctaacaatcgtctt

SEQ ID NO: 18753 - DNA, 438 bp, Glycine max
ttcacctcatgtcagatcacaaccacaagatatccaattccgctgtcaatgggagtgattcgctgaatggtcacatcatatccactacagttggaggaaaaaatgggaagcccaaacagactaaaagttacatggcagaatgcattgtggggactgggtcatttggaattgtcttcctggctaaatgcttggaaactggcgagccagtggccattaagaaggttttactggacaaaagatataagaatcgtgagctacagttaatgcgcttgatggatcatccaaatgtgatctctctgaagcatcgtttcttttccactacaagtgcagatgaactttttcttaatttggtgatggaatatgttccagagtctatgtatcgagtctcaaagttctatagtaatactaatcagagcatgccacttatttatgtaaaac

SEQ ID NO: 18754 - DNA, 442 bp, Glycine max
tttccttctccttctccttgcctaatcgtttcatttctcccacgagactcacggatatcatgctcatgcttcgtctcagtctcacaggacccaatataaataagaagcttctaaatctcttcactatctgggttagtggaagaattctgtggtgaagtaaagtgactaattgccttaaatcagaaacgacatcaagttccatggaagaagagcatcaatgttctagaagtggtgaagaaccacagacacaggaactggatggagaagatcaacagctgcagcatcaatgccaacaacctggagctgaagagaaacttgtattgcaatttatggattcaatggataactacctatccctctttgatgtagtgtcctccacccttcgacagggatggtttgacttagctagtgctcgacattccatgggtgcttctcgcattaa

SEQ ID NO: 18755 - DNA, 446 bp, Glycine max
gactcgttcttcttcgtcgttatcttcttcttttgttgtttgtgtgtttgttttttctctcacctgaaaatgtcttgctgcggtggtaactgtggttgcggaagcgcctgcaagtgcggcaacggctgcggaggctgcaagatgtacccagacttgagctacaccgagtcaaccaccaccgagaccttggtcatgggagtggcaccagttaaggctcaattcgagagtgctgaaatgggtgttcccgctgagaacgatggctgcaaatgtggagctaactgcacctgcaacccctgcacttgcaagtgaggtgttggagagctaaagcttcaagcagaaatggcccttagaaataatgataaaaactatatgtagtttcaaaacttcaaaattatgtagtatgtattatgttgcactctggtgttttgtgtctaaacaaacaccct

SEQ ID NO: 18756 - DNA, 447 bp, Glycine max
cccacgcgtccggtttgtccatatccatatcaagactttaaaattgtgaagtaacaagaaatgtgtttattatccaaccaagagaaaaatgataatatttttccctaatgctgttatggataatttatcttgttggttttttgtgtagtaagtatatttgtaaatgaacgagatgtataatgtttagaagcttcattaatattttattcttgggctctatatatagagcataagtgcaatacaaaaattcaaatactaacattatgctaatcttataatcagactgataatttcctaaatctaaatgataagatcatatccttgtctttatctaaacagtatcttaaaacaacctaaattcctaaaaataaattcaaattcaaattacagtcatttaggcatatgttttcattatataatttacaattacttgaatgccattgggct

SEQ ID NO: 18757 - DNA, 413 bp, Glycine max
cagcaaaaccaaaataacactccagatggttcaggagaggtgcctttgaagcgtaaacgtgggcgtccacggaaatacccaaagccagattcagaggagagttcctatatcctagttagtcaaaatagaaggcagaatcctgttcgtgctgaacaagctccagtacctcctggatttgaaggggttaatggaaatcaacagcttcaaaggggtcaagagaatcattcaaataatgcaatggtgggccagctagtttccggcgtaattgaggctgcatttgatgcatgatatttgcttagtgttagagttggtgattctaatactactttgagggggctaatcttcaagcctggacgatacgtttctatatcacctgataatgatgttgctccgagtgttccaatgatccaaag

SEQ ID NO: 18758 - DNA, 448 bp, Glycine max
cgctgttgttgttgctgcaccaccgaacaacttcccctgtaaatcgcgtttcgtttgtgcagggttttaaaagatggctgatgctgaggacattcaacctcttgttgttgataatggaactggaatggtcaaggctggttttgcaggtgatgatgctcctagggccgtgttccccagcattattgggagaccacgccatactggtgtaatggttgggatgggtcagaaggatgcttacgtgggtgatgaagcccaatcaaaaaggggtatactcaccttgaagtatcctatagagcatggcatagtcagcaactgggacgatatggagaagatttggcatcacacattttacaatgagctacgtgttgcccctgaagaacaccccgtacttcttaccgaggcaccactcaatcccaaggccaacagagagaagatgacccaaattatg

SEQ ID NO: 18759 - DNA, 428 bp, Glycine max
  modified_base (320)..(320): a, c, g, t, unknown, or other
cccacgcgtccgcttttgtgtttttctgcagatgtctcggtgggaagtagttgatgttcttgttcttgttcttgattcgtgaaagaagaactgaaagcatgaagctctccttctccgtcccatcatccaaaccccactcgaagcccaaagccgtctccaacaccttcgacgacaattccacctcccaaaacgacaccggcggaaccaaatacctcatcaccgaattcgacccttccaaacccgctcccacctccgtccccaaaaccctaattcccccaatccaaaaccaatggcaacccttcaagaagatgaagaatctncacctccccaccgccgccgacgtcgaatccctcgccttcgaactccacaccgacggggaccaacccgaatccgacatctcctacggcctcaacgtccgtgccgacaat

SEQ ID NO: 18760 - DNA, 436 bp, Glycine max
ctcacccaccctccatacacactctctctgagtcggtcgagttgaatcggtgtgagtcagtgaccgagtcgaaccatgtcggacgaagaacaccatttcgaatccaaggccgatgctggagcctccaagacctatcctcaacaagccggaaccatccgcaaaaacggttacatcgtcatcaagggtcgtccctgcaaggttgttgaagtttctacttccaagactggtaagcacggtcatgccaagtgtcactttgttgggattgatattttcactgccaagaagcttgaagatattgtgccctcttctcacaactgtgatgttccccatgtgaatcgtactgattaccagttgattgacattgctgaggatggatttcttagcttgcttactgaaaatgggaacaccaaggatgacctgaagcttcctactgatg

SEQ ID NO: 18761 - DNA, 435 bp, Glycine max
ggcatcgaaagaggaagcataagggcaactgttctgatagaaacacttcctggagtgtttcgaatgaatgaaattttgtatgaactgaacgaccattcagtgggtttgaactgtgggcgttgggattacattttcagttatgttaagaccttccaagctcatccagatcgcctcttaccagatagggtcctagttggcatgactcaacacttcatgaaaagttattctgatcttctcatcaggacgtgccacaggcgcggcgtgcatgctatggtaggaatggcagcgcagattccaatcaaagaagatccagtggctaacgaggtagcactggaacttgtaaggaaggacaagcttatagaagtgaaggcagggcacgatggaacttgggctgcgcaccctggtctcattccagcctgcatggatgatattaac

SEQ ID NO: 18762 - DNA, 352 bp, Glycine max
cggacgcgtccgcccacgcgtccgcccgaatatagagcatatcaagagcaagttctcagcagcagctttgggtttgcacaggctctgagtgagataagctatcaacttgtctctggtggaaccgagaatcacctggttttggtgaatctgaagaataagggtattgatggctccagagttgagaaggtgttggaagcagttcatattgcagctaataaaaacactgttcctggagatgtgtctgccatggttcctggtggcatcaggatgggaacccctgctcttacttctagaggatttgttgaggaggattttgtcaaggtagcagagttttttgatgcaacactgaaga

SEQ ID NO: 18763 - DNA, 443 bp, Glycine max
cccacgcgtccggataaaactccctttataacttctgagttactgatacaaaggcacaactgttcatccatgaaaatcagttttgtttataaacatatacaaataattaggtggtgaaattgaaacaagtaaacctccaaaaaccagtaaccactccgtatattatcttattggcaaagtactcaatcatcagcactagcaacagccatgggagaggtagacccagctttcatccaagacctagaacacagaccaaagctctccataatccaagctgaaggaattcccataattgacctctctccaatatccaaccacacagtttcagatccatcttccattgaaaacttagtgaagcagatagggagtgcatgcaaggaatggggtttcttccaagtaaccaaccatggggtgcccctcactctaaggcaaaacattgagaa

SEQ ID NO: 18764 - DNA, 435 bp, Glycine max
gtttttctttttctcttctcactgcatcgcttcaggttcttctgaaaagatgggtcgcgtggatgttggtaacttggattcacgagtcactgagagagatctcgaagacgaattccgcgttttcggagttattcggagtgtttgggttgcacgtagaccacctggttatgcttttattgactttgatgaccgcagagacgcacaggatgctatccgtgaattggatgggttttcctcaactagctagttaagtcttctttttggcctatggggcaagcagatgctgctctctctttcttctacttctgccttggcctgcagtaatggttttttcttggttgtgtcttcgtcaaagtctgctgctttgtacagtttgactacttctactactactgcatgtaaagagaattaagaatgtgaacacaggggatttgc

SEQ ID NO: 18765 - DNA, 437 bp, Glycine max
atttcttttgttttatttttggtgtgggagtgggatggatgttctaccatatgtattacaggaattctttgatattaatgacgaatcattaattttttcttacagtaatatagttaaatcaaagttatttaacttgactacgtactgagaaattaattttaaaaatgttaagttaattgtctgtttcagttgatgatataggcatattgtatgtcctatagttaacttacacattagttatatatctcatcaaaatgtttgctgtcaccacacatttaacaaaaaaaacaaatgtaaagaaaaggctgaaaattgaaagttcttcatttaacaataaaaggccgaaaaaggttaaaataatatttggataaatacatagtgctgcaatagtaatgcttctctaacatctaaatcagtggcaaatacagagaggtaac

SEQ ID NO: 18766 - DNA, 420 bp, Glycine max
gtcgctcgtaaaagtgacaagtgacaacaaaaccccactctaccagtccccctatcttaagaaaactaagcgtaatccattttcccaacatcgcatattgcacgacacgagcgttgagacagtaaccacgatgtccaaactatagacaagatgaaaacgttggaaatgagtctattagcaggtgcttacgttcaaccccgcttcccttgtaactacaacccaacgctttccgcatcttgcagaacccaaaagacagcaacttcactaaccgtaacaactcccaagaaaacagaaaaggcgttattcactgagtcattcgatcaaacacgtgacgcgcaacctctccccgaaaagaagaagagggtgttcttcttagacgttaacccgctctgttacgaaggaagcaaacccagcttgcac

SEQ ID NO: 18767 - DNA, 439 bp, Glycine max
cgcaaccctcgcgcttccgccgccacactcgtcggagcacactcgccggaaaagactcccgggcaaaaaaagaaaacctcaaagactaacccgagtcgttatagtgggttggagtgaacgaaaagaaacaaaggcaatacaaaaagggcaaacacgaatacacggttttcattctttcaccactcttgtttccttttacgacgtcgttatggaactcaagtttatgcagttttcgcaacacgttcttcctcattccccttcttcatctcaaaccctcgcttctgcactctcttccccttcatcgtccaaaacgcgaaccctagtgtgtcgtttcgtgaatcgctcgagcctctttccgaccaccacccgccttcttcggagaaccaaatcgtttgagcaccacgcgcttttcacgcgcagggggagtttgagaagggct

SEQ ID NO: 18768 - DNA, 437 bp, Glycine max
  modified_base (61)..(61): a, c, g, t, unknown, or other
acggtatttccctacctctcccttcaagatgcagatcttcgtcaagaccctcaccggcganaccatcacccttgaggtggaaagctctgacaccatcgacaacgtcaaggccaagatccaggacaaggaaggaatccccccggaccagcaacgtctcattttcgccggaaagcaacttgaggacggccgtacccttgctgactacaacattcagaaggagagtactcttcacctcgtcctccgtctccgtggtggcatgcagatcttcgttaagacactcaccggcaagaccataaccctagaggttgaaagctccgacaccatcgataacgtcaaggccaagatccaggacaaggagggtatccccccggaccagcaacgtctcatcttcgccggaaagcagctcgaggacggccgcaccctcgccgactacaaca

SEQ ID NO: 18769 - DNA, 330 bp, Glycine max
cccacgcgtccgcccacgcgtccgacaccatgtggttgaaagcctgctgggatgattgttgtggttttatgtgtatatatattggtgttgtggttgttatactgaagtggaggagagggtgaaaaagttacctgatgcacattgagacgacatcgattgagtccatgtgcaaaattggtttttgtttgtgtggaagtctctagcttcctgtgatgtaatgttataatattaccttgtagttgtaaggagaaagcaatttggcgctttcttataagaaaacaacccaatgtaataacataaggtatattaattcaatcatgttttgctttt

SEQ ID NO: 18770 - DNA, 445 bp, Glycine max
acgctttcttgcaaaaatacggtatcaagttgaacgatgcgattctcgctgaggataagcacaaacctgtgtatgaagaattggctaacaatcctaatgtggagtacattgctggaggtgctactcagaattcaatcagggttgctcagtggatgcttcaagcaccaggtgccacaagttacataggttgcataggaaaggacaaatttggagaggagatgaagaagaaatgtacacttgatggtgtaaaggttaactattatgaaatcgacaatacacctactggaacttgtgctgtttgtgtggttggcggtgaaaggtcccttgttgccaacttatcagctgcaaattgctataagtctgagcatttgacgagaccggaaaattgggcattagttgaaaaggccaagtatttctacatttctggctttttcctcactgtatc

SEQ ID NO: 18771 - DNA, 430 bp, Glycine max
catgcgcccccctataaaaccctctctcatattattattattattcattccagggtctcttgcaccacttgaagattctccttttcaaatttcaacctttttcccccaaaactaacaaacccctcttcttctcaatcattgcatggctcttcactgattctataataataatttcagattcgtttttcgttttttgttaccatggagttgatttcaggtctaccagaggacgtagcccgagactgtttgattagggttccctatgatcaattcccggcggttgcttcagtctgcaaaggctggagcgcggagattcactcgccggactttcaccgtcggaggagaaccaccaaacaagcccagaaaatcctcgtcacggttcagtccaagatagactccgataaaacccgaaccggtttgctcgcgaagt

SEQ ID NO: 18772 - DNA, 441 bp, Glycine max
caaactctcgcatcaatcttcgtttctttagagagagagagagagagagagagcgcggtgtcggaatcgtgttctccgattgcaccggtggttcgatttatggtcgtcggagaatcgccgatctcgctgagagtttcgaatcgcaccggtgaccggaggagatggtgaattccatggtggaacgcgccacgagcgacatgctcatagggcctgattgggccatgaacatcgagatctgcgacatgctcaatcatgaccctgggcaagcaaaggatgttgttaaaggtataaagaagcggattggaagtaaaaattcaaaagttcaacttcttgcactaactttgttggagacaatcataaagaactgtggagatattgttcacatgcatgttgcagaaagagatgtgcttcatgagatggtgaaaatagtaaagaaaaagc

SEQ ID NO: 18773 - DNA, 439 bp, Glycine max
ggatcgtgatgggatttccaggctgggcagtagatgcttgtcagctgtcagtgcatacgataatactctagagaatatagagacattagatgctgcccaggccaaatttgatgatatcctcaattctccttctattgatattgcttgtcagaagatcaaaagcttagcaaaggcaaaggaacttgattcttcattgatattgttgataagcagtgcttgggctaaagcaaaagaatctacaacaatgaagaatgaggtgaaagatataatgtaccaattgtacagggccacaaagagcagcctaaggagtattactccaaaagaaataaagctactcaaacatttgttgaacatcattgatcccgaggagcgattctctgcattggcaactgctttcacccctggtgatgaacacgaagccaaggaccctaatgctcta

SEQ ID NO: 18774 - DNA, 455 bp, Glycine max
aattccggtcgcccacctccgacgattccacccatcttgattccaactccactcccggaatcagttcgatagctcattatatgtgtcgaatgaccaattaatcagcaatgctcaccaaacccaaagcactataatgatcatggcaccgttgggttagctcttggtcctctaatcatcgacatcagggttcatgctggcagctcttctgctataaatccttttgatgattggtcccacaacagggacaagggggctgatgaattcttttcggaagaagaaatccgcttcagaagtcacgagatgctagagaatgaagatatgcagcagttgcttcgcctcttcagcatgggaggtcatggctccatgagtgctgaggatggcttttcattcccatcattcatgccatctcccagtataccgaactatgatgaggatcgctctcgcccaggcagagc

SEQ ID NO: 18775 - DNA, 440 bp, Glycine max
cccacgcgtccgatatatatatatatatatatatatatatatatattatttaatttcacacggaaaagcgattatttaattttgttggaattttgaatttataagtatgcagtagtatttaatatattaagtttttttcttcttctcagaaacgccccttcatattattacagaatcccctaaatgtgggttcgacgccaggcaagggtttcaaaaacttctatttatattacgggggattattattttcttataggttatgcttttctcttgtcataagccaagtaaaagtgctttttcttctttttttgaaagattgattctgaagttcccacaacaaaaacacaaactttactcgttccagaaaaggcattggtgcagatcgggggattattatcaatatatgattagagacaaatctacaatataataatgacatt

SEQ ID NO: 18776 - DNA, 448 bp, Glycine max
ctctttgcaacacaacaaaaaaagacaacacagagagaagcgtcttaataaacgctcttctgtgaaaaacctgatttcttctcttcttctcttctctttcgtttcgatcttcgatctctgaaaatgagagagtgcatttcaatccacatcggtcaggccggtattcaggtcggaaacgcctgctgggagctctactgcctcgaacacggcattcagcctgatgggcagatgccaagtgataagactgttggtggaggtgatgatgctttcaacaccttcttcagtgaaactggggctggaaagcacgtgcctcgtgcgatttttgtagatctcgagcctactgtgattgatgaagttaggactgggacataccgccaactatttcatcctgagcagctcattagcggaaaggaggatgctgcaaacaactttgcccgtggccactata

SEQ ID NO: 18777 - DNA, 446 bp, Glycine max
gccacgcgtccgcaaatctggatttttgaaagaaataattcgaagacgaccatggattggacatgctatggttggctttattttagagagatgtggaagtgccaagtcagactttcgacgagtggaagcacttgaattggtaatggaaatattgaagtcactgtcaacagggaatagtgatgaacagaatgcatcgaaaaagattcttaagaacagtttggataaactttctcatctgttgaaagaattagtgactaatatgccaagtaaaccagcaaggcggacagaggtacagaagttttgtgttaaggccttggagattttgtctaagcttaacctcaccaagaattttgtgaaaactttggcacctgatactcaagctgcccttgaggcgcaacttggtgagcaattcattagtttgaagaagctggaaaaataaactacac

SEQ ID NO: 18778 - DNA, 446 bp, Glycine max
aggatatctgtaacttttattgataaggatggtgaggagaagcatatcaaagtccctgttggaatgtctatgttagaagctgctcatgaaaatgacattgaactagaaggcaagagctttgattttataattctattatttcacctcaagatttcggtcttctgaattctgcttttttttttctcttttaaatgtttgagatagccagttggtcatatttgatccatctagccaccccacctgttgggttaatttttatttttttagtttttttagttttgctagaattacttttcattttgatagtctgcctttactttggaaaaagctcgccaaaaatgagactgtttctaataggtttagactcactacacttttacttgcctactttagagacaagttcacttgagaagaacattatctcctcctttgcttatgatggatat

SEQ ID NO: 18779 - DNA, 351 bp, Glycine max
gtcaaaacctgtgttaaaggtgggtcagccatactttactgacactctctatggcaatctggatcaaatttaactatggctactgaagagggtttggttgacgaaatgacttaccataccgcgatcactactacttatcccctatgtctgcttggccatggaatcaccggcctggagattcacttcatccatgtgaaattctattcactcagggttgatttgtagccaaaactaataagtgacttggaccagtataaaggataatctgcaaaggagctgtgcgataatgaatagtgtttcaatgctctaatttttgactacgtggagaaacctattagactggtagtgatc

SEQ ID NO: 18780 - DNA, 439 bp, Glycine max
aaaacatctcaatgggttcttcttctattacaacatcgcccgcaaccatgaccatggctgcgatcgtgctcctgttcacggtctttgccgtttcctccgccctagacatgtcgataatctcgtacgacagcgcccacgcggacaaggccgccacgttgcgcaccgaggaggagctgatgtccatgtacgagcagtggctcgtgaagcacgggaaggtgtacaacgcgctcggcgagaaggagaagcgcttccagatcttcaaggacaacctgcgattcatcgacgaccacaactccgcggaggaccgaacctacaagctcggactgaaccggttcgctgatctcaccaacgaggaatacagggccaagtacttgggaaccaagatcgatcccaaccggaggctcggaaagaccccgagcaaccgctacgcgccacgtgt

SEQ ID NO: 18781 - DNA, 374 bp, Glycine max
tataaatgtagttgtgaaagctaaaatgaggaagagatggcagatgttggagaggaacatcgtgatagctattaaaaaacctctattacaatttgagtatttagatgctcaaagtcttcgaggcttaaactggtttgattcctttattttgttggttggcatgtgtatttagttctcaaactctaaattttggtcattaactatgaatgtctttacttgtaggtatttctttttcggcatgcatctgcgtactataatctatgttaggcgcatgttaaaacttcaaaacgcaatcttgctacctgttatatgcgtgctgggaccaaactgcttcatgccactttctgggatatatatttcgttgctattcttat

SEQ ID NO: 18782 - DNA, 422 bp, Glycine max
gttgaatcatctgcaccagacaccgattcattcgaccaaaacataagcatgtccggatctgacatggcggggagggagcaattcacggttgggatgcacaaaccccaacaacaacaacaacaacaacaacaacctcagcttcatcaaaacatgcgtatggactatgctgctgacggcactgctgttttcgcccctccgaccgttaccgttaacattaacggcggagattcctctccagcggtgccttcgggcctgggcctgccccagccccagcccatgatggttaactcccccgaaccaattaagagaaagaggggaaggcccaggaaatatgggcctgactgtggcatgaccttgggggctttgaagaccaccatttcttcctgcggcggcgtgccggttgggcagtccggtggggcatt

SEQ ID NO: 18783 - DNA, 434 bp, Glycine max
ggggaaacgaaatctgtaaattcacgtggaataccatctgggtcagatttggggggaggcgttgcagcatcttctgttcctggtttatctccaagttcatcagtttgttcactgtcttctgaaaaatcaactctgaatcccaatgcaaaggaattcaagcttaaccctaatgcaaagagttttattccatcgcctgctcggcctcccactccagtgtctgatggttccttctattttccaactaacgtaactactgtaccaagtatgccaggcatgcccgtgggtattggaattggacctacttttgctgggccacaacctatcatatataatcctcaggtagcacaaatgccgtctcaaggatattttcatccgaatgcaccccagtatggacagcttcttggtcatcctaggcaatctttatacatgccgag

SEQ ID NO: 18784 - DNA, 445 bp, Glycine max
gtttttgaagtatagagatggcagagacattcctatttacctcagagtcagtgaacgagggacaccctgacaagctctgtgaccaaatctctgatgctgtcctcgacgcttgcctcgaacaggacccagacagcaaggttgcctgcgaaacatgcaccaaaaccaacttggtcatggtcttcggagaaatcacgaccaaggccaatgttgactacgagaagatagtgcgtgacacctgcaggaacatcggctttgtctcaaacgatgtgggactggatgccgacaactgcaaggtcctcgtcaacattgagcagcagagccctgatattgctcagggtgtacacggccacctcaccaaaaaacctgaagaaattggtgctggtgaccagggtcacatgtttggctatgccactgatgaaacccctgaattgatgccattgagcca

SEQ ID NO: 18785 - DNA, 437 bp, Glycine max
gaaaaagatatctagtggttacaacaaggtaatggtgacggtcgaggatggcaggaactttgttgctgatgctgctatcataactgttcctattggaatcctaaaagcgaatttgattgaatttgaaccaaaacttcctgattggaaggtttcagcaatttcagatcttggtgtgggcaatgaaaataagattgccctaagatttgacaaagtattttggcctaatgtagaactcttgggcactgttgctccgacctcttatacctgtggctattttctcaatcttcacaaagcaacaggccatcctgttcttgtctacatggtagctggaaggttcgcttacgacattgagaaactatctgatgaagcagctgcaaattttgtgatgcaacagctcaagaagatgtttccaaatgcttctaagccagttcagtatc

SEQ ID NO: 18786 - DNA, 447 bp, Glycine max
attttataatccttctccatcttttctcttgagccttccttcccacaccaatcttctccacgacttcacgcaaccttaaatccaacccaaaaccaaaagaaacacacacactcagaaacaccaagagaaggtacttgtttttttttcttttcttttcttttctctgttctgttctgtcacaacttagtacttcacatcctttgctttgttatcttcttcacatgttgcttttgttgcttgtcttgtcctttgagctgagtgatgattgattccctttcagtagcagaaagatgggttgccgttagtttctatgactttcgatgttatgtatgtgtgagtgtgatagaaagttagaaactacaacaactcatgtttttcttttaaacctttttatttggtatgtttttcttcttcttcctagctagttaatttgatctcttcctgatt

SEQ ID NO: 18787 - DNA, 435 bp, Glycine max
ctctcctcctcgatcccaattccactagggattcaattccgatgcgattccgagcttgttagatccacgacaacgtttcgtttcccagattcttttgtaaaaaaaaataatcttcctttgcccaacaggtaagttggaaaaaaatggaccatgacaagactgggtgccaagctcctcctgaaggtcctatattgtgcatcaacaactgtggattttttggaagtgcagctaccatgaatatgtgttctaaatgccacaaagacatgttgctgaaacaggagcaggccaagcttgcagcatcatccattgggaatattatgaatgggtcttcaagcagcactgaaaaggaacctgttgttgccgctgctgctgctaatgttgatatcccagttattccagtagagcctaaaactgtctctgtgcaacctttatttg

SEQ ID NO: 18788 - DNA, 334 bp, Glycine max
tgctctctgagcttgaaaaacacgctacgaccggattctttcttttcaacacccgaattcgggttgactctcttgcaatctcattcctcaagatcgctttcgctgcttactcaggaattatgtcttttccgcggcattatcaagctgaagatcggggtctacatattggttactggtccaccgttgatggaaacacctatcgtgaccacaatccgaaaagaagcatcgaacaattattataacaagaattgttacattgacaatgataaccgcacaactatggctgaccattttaagttctacaatgctgatcatgctaactatgctagatatg

SEQ ID NO: 18789 - DNA, 406 bp, Glycine max
gaatacaaatatatctaatcctcacaataaaagccggtaacagagtttactagatagaagagaatcttaaaattccaattccatataataaaaacttcagtgtccttaataaaataggcaatttggaaaacacttgagaaaatggaaggacaaactaaaacggcccagtacatccacaattcataacagacatgaatgcctaaaatcccagtaccaaagagatattagcaacaaacaccttctcccttcaaaaagatatggaggagaagttcaattctaattagcagtaaaatatttttactggtcatccggtttcggcgctgcttctttaatttcatctgctccatcgtcctgcatgtcagaggtccaaagtgtgaggttatcacgaaggagttgcatgatcaaa

SEQ ID NO: 18790 - DNA, 425 bp, Glycine max
gccgagattccgtgagttgcaaaaatgaagacgattctttccaccgagaccatgaacatcccggacggcgtgagcatcaaagttcatgccaaggtcatcgaagttgagggcccccgcggaaaattggtgcgagacttcaagcatttgaatctcgattttcagctcattactgacgaaaacggtaaaagaaagctgaaaatcgacgcgtggtttggttctcggaaaacatccgccgccattcgcaccgccttgagccacgtggagaatcttatcaccggcgtcaccaagggctaccgctacaaaatgaggttcgtttatgcccattttcccatcaacgcaagcatcggcaacagcaacaagtctattgagatccgaaatttccttggcgagaagaaggtgaggaaagtcgacatgcttgatggcgt

SEQ ID NO: 18791 - DNA, 424 bp, Glycine max
ctcacacacacacaaagtgactcttccgatgatgttaatcggcgacggtgccggttgccgggaagtcctcgtcggcgttaaattagatcctcgcagccgcgaattgctgacgtgggctctcgtcaaggtcgccgagcccggcgacctcgtcattgcgcttcacgtcctcgactccatcactgagggaacggcatcgctgttatctctcgtgaagacgttcgattccgttctcggcgtttatgaaggcttctgcaacctaaaacaggttggtctgaggcttaaagtgtgtcgcggaggttcggtaaggaaggcgttggtgcaggaggcaaaggcgtttggcgtttccaccgtgattttgggaacttcgaaatcttatcatactattcgttcttccgcgtgggttgcgaaatactgcgcaaagaaa

SEQ ID NO: 18792 - DNA, 439 bp, Glycine max
ggccgattgttctatgttgaaaagactgaccatcaatgatgctatacttggcaggggtattgaggagatatcagtcaatcacgacaggctgtgtcatctccaattgacaaagtgccgtgtgatgcgtatagcagtcaggtgcccacaacttgaaactatgtcattgaagcgcagtaacatggcacagactgcgctcaattgcccccttttgcaagagcttgatataggctcttgccacaaacttcctgattctgctattcgttcagctgttacatcatgctcgcaattagtttctttggacatgtctaattgttcgagtgttagtgatgaaacattacgagaaatatccatgaattgtgctaaccttagttttcttgatgcatcgtactgccccaacctattcttggagactgttagactgccaatgttaacagttctg

SEQ ID NO: 18793 - DNA, 444 bp, Glycine max
aaaaaatcgtagttggaggcgccgcactccactccactccaatcaatcagatactagcgatggggaggaagcgaaaggtagcaccgaaatcttctgtatccgccgagcccccgctgaagcaacaccaaccaaaacccgaaaatgccgctcaggaatacgaagaagaggtcgaagaggaagttgaggaagaagaggtagaggaagaggtcgaagaggaagaagaagaagaggaggacgaagaggacgaggaagaagaagaagaagaccaaaaagaccaataccagcaccaacaacaacagcaagacgaagacgacgacccgatctccaagcttctggaaccgttgagcaaggaccagctcctcatccttctctgcgaggcggcggccaagcaccaagacgtggctgagaggatccgaagggcggccgacgaggatccggtgcacc

SEQ ID NO: 18794 - DNA, 395 bp, Glycine max
  modified_base (354)..(354): a, c, g, t, unknown, or other
accaatcgtccaatttattgccaagcagcgggcatagtgcaggtgatactccaccacataagcaatctgcatacgatgaggcagctgaatatcaagctatatctgtcataatgcctgacctgccttttgagcaactggttactgaaattcacacgaggatccatgctacgtctgctaccatggataccaacattgacagcaacatgtcaggtgacattgctccaaccaaggatccaagcggcaagcttgatgacatagatcatgcgatcgatcaaccgaacattttgattaatcctctgcatgctgcacaggctcattctcaggatagctcgacatctgctcactaaactgcanactgtactgaaactgacatagtgcatgagctgctgcatgtc

SEQ ID NO: 18795 - DNA, 443 bp, Glycine max
gctctcttggactcagttcagtttcacgaccgatcctacaatggcgacagtcacgttttcggtttccggtaaaaccctaactctaccttatcaccccaaaaccccaatctccaactttaccccggtaacgaatcttcgcctccctccttctatcgtgacccgaacccgcaattgtaaccggattcgggcggcgctggatggggatttctcggcgaaaaggagcagcagcagcaacaacaacgaccagagggagacgataatgttacctggttgtgactacaaccattggctgattgtgatggagtttccaaaggaccctgcacccacccgtgaacagatgattgacacgtacctcgacactcttgccactgtcttgggaagcatggaggaagctaaaaagaacatgtatgcctttagcaccaccacttacactggatttcagt

SEQ ID NO: 18796 - DNA, 446 bp, Glycine max
agaatccataaaacacacaaaaactcagggtagggcagagagagagagagaaatgggaggttgggctatcgcggtgcatggtggcgctggtgtggaccctaatcttccactcgagcgtcaagaagaagcgaaacaacttctcacgcactgtctcaatcttggaatctctgctctaaattctaatcttcccgccatagatgtcgttgaacttgtggtgagggaattggaaacggatccgctgttcaattcgggccgtggatctgccctgacagaaaaaggaacggtggagatggaggctagcatcatggatggtccaaaacgacgatgcggcgccgtttcgggtcttaccaccgttaagaacccgatctcgctcgctcgtttggttatggacaaatccccacattcctatctcgccttctccggagccgaagaatttgctaggcaac

SEQ ID NO: 18797 - DNA, 448 bp, Glycine max
cgacttgttcacatcaagtgcaacagtgagagctttaccttgtgggcattacatgcattcatgttgctttcaggcatacacttgtagccactacacatgtccaatctgcagcaaatcactgggagatatggcggtttactttggtatgcttgatgctttattggctgctgaggagcttcctgaagagtacagggaccgctatcaggatatactctgccatgactgtgatagaaagggcacttcacgcttccactggttatatcacaaatgtggatcttgtggctcatacaatacccgggtaatcaagagtgaggcagcaaattctagctgcctttagtatgcttattttttgtaatgaaagtacagagcttgtaaatatttgtatagccaatccaattttccccaaaccaggaaactggttacctttcattttatacacaatgcgagt

SEQ ID NO: 18798 - DNA, 299 bp, Glycine max
  modified_base (10)..(10): a, c, g, t, unknown, or other
cttattccangatctatttacattacctgcataactaactcgagcagtattactaaagagggcggatgagaaggaagattttgggttgcgtctacacttgtgctatcctgaaaaccctggaacttatattgatatcattctagtttgatcttatgattctaatcacttgcttcagaaaccctatcggcacgaccctgttagttcttaagcttgaatatcactcttttatggaatccaagtgaaccgtgtaccttttgcggtcgatagctaacaggaatcttgtgtgtcatctgcaaaca

SEQ ID NO: 18799 - DNA, 435 bp, Glycine max
cgacaatctggtcattgagggttttgtcaaaacgacgtggccagctcaaacaggccgtaacagctatggtgcaacaagctatgcaatatattgatgagacaccagatatcgaaactcgcatagaactcatcaaaacgttgaacagtgtgtctgcagggaagatatacgtggaaattgagagagctagattgatcaagaaacttgcaaagattaaggaagaacaagggcttatagctgaagctgctgatttgatgcaagaaattgcggtggaaacttttggtgccatggccaagactgagaaaattgcattcattctcgaacaagtccgtttgtgtctagatcgccaggattatgttcgtgcacaaatactctcaagaaagattagcccaagagtatttgatgccgatttatctaaggaaaagaaaaagcctaaag

SEQ ID NO: 18800 - DNA, 440 bp, Glycine max
agaaaaaagtcacagcaaagcagaaaacagattcctcaaattttagtctcaaactaaaacttggtatcaacagaaaaaaaaagaaccaaattttctatgggaacatccatatggaattgaaatgaagggaaggcataaggaggagaagaacttactttgcaggtggttttgcagggtcgttggctcgagaaggaggaggaggtgcagcagtggtagtcttctctgtagacgcagatgaaggtgaatctgaggcagagtcatcactggaagaaagattaagcttcaaatcaacagaagcagtttcagagaagcctctctttccaccactgcccttgaccgttgttgactcgttgtgatcactcgcagacccgccagggaggccgagtcgcaactcggtttcttcgaagttaatcatctcctcgtgcttggttttcttttct

SEQ ID NO: 18801 - DNA, 439 bp, Glycine max
ttcgtcaattccaacaacaccacaatgggaagaagaccggcgaggtgttacccgcggataaggaacagaccggacccgaaatcccttttctgccgcggcgtgccggagccgaagatccgaatctacgacgtgggaatgaagaagaaaggcgtggacgagttcccgttctgcgtgcacctggtctcgtgggagaaggagaacgtctccagcgaggctttggaggcggcgcgcatcgcatgcaacaagtacatggccaagttcgccggaaaagatgccttccacctgcgcgtgagggtgcatcccttccacgtgctccgcatcaacaagatgctatcgtgcgccggggccgacaggctccataccggcatgaggggcgcctttgggaagccgcacgggacgtgcgctagggttaacattggtcaggtgctgctctcggtga

SEQ ID NO: 18802 - DNA, 440 bp, Glycine max
ctgcattgcttaaacctcatgaaagaatcatggcacttgatcttcctcatgggggccatctggctcacggatatcagactgataccaaaaagatatctgcagtctcgatattttttgagacaatgccatatcgattgaatgaaagtacaggatacatcgactatgaccagatggagaaatctgctacactcttcaggccaaaattaattgttgctggagctagcgcttatgcacgtctctatgattatgaacgtgtacgcaaggtttgcgataaacagaaagctatactattggcagatatggcacacatcagtggattggttgcagctggtgtcatcccatcaccttttgattatgctgatgtagttactaccacaactcacaagtcacttcgaggaccacgtggagctatgatattctacagaaaaggggttaaagaa

SEQ ID NO: 18803 - DNA, 442 bp, Glycine max
gaaaattctcccagttttaaacttgcccagagaaactttgttgaaagtatggcaggatattccctggtgtgctactttctgcaggtgaaggataggcataatgggaacctcctattggatgaagaaggtcatatcatacatatcgattttggcttcatgctttccaattcacctggtggtgttaactttgaaagtgcacctttcaaattaacacgtgaacttcttgaggttatggattctgatgctgagggtgttccaagcgagttctttgattattttaaggttttatgcattcaaggcttccttacttgccgcaagcatgctgagcgcatcattcttcttgttgagatgttgcaggattcagatttcccatgctttaaaggtggtgctcggacaatacagaacctacgaaagcgattccatctcagtttaactgaagagc

SEQ ID NO: 18804 - DNA, 443 bp, Glycine max
  modified_base (57)..(57): a, c, g, t, unknown, or other
ctcagtcctacgatacgattctcttccgcctcccttcccttcaactccacggcgcanatccgaggagtgtgggaaaccctaattcattcctctttgcttcttctatctctattcctctaacaccagtgatggcaggtttggctccagaaggatcgcagtttgatgctcggcaatatgattctaagatgaatgaattgctttccgccgatggacaagaatttttcacttcatatgacgaagtctatgatagttttgatgcaatgggccttcaagaaaatcttctgagaggcatatatgcttatggttttgagaggccttctgcaatccagcagaggggaattgttcctttctgcaagggtctggatgtgattcagcaggctcagtctggaactggaaagacagcaacgttctgttcaggaattttgcagcagcttgactatgga

SEQ ID NO: 18805 - DNA, 415 bp, Glycine max
gccacgcgtccgtgaagagggacatatatggtcctactactgtggagattgtgactttgatgtccatccggaatgtgcattggaaaaggaggacaaagaaggaagcaaagatgatgccaaggaagaaaagtccaaagatgaatgggtttgtgatggagaagtctgcaaaaaagcctaaaagctgcttgtcaagggttttggtgatgaataatctgaatatttggatgaagtattgtgaacgcccttcctagtatgttttatgagttgtgcagaataatctgaatatttggatgaggtattgtgaacgcccttcctagtatgttttgtgagttgtgcagaataatctgaatatttggatgaggtattttgatgttaattatggtctttaatatatatggtataatggtttactctt

SEQ ID NO: 18806 - DNA, 442 bp, Glycine max
aaagaaatggcttctgttctgctttcagcactgtatgctgatgtcatcagccctgcacagagtagggatgggttttttatgcttattgaatcttctgatgatcttgctgtggatatactggatgcagttgacatccttgcattattcttagcacgagctgttgttgatgacattcttcctccagcctttcttgccagggctaggaaggctcttccagaatcttccaagggagttcaggtaatccaaactgctgaaaagagttatctctcagctccacaccatgcggaacttgtggaaaggcgatggggtggtagcactcacataactgttgaagaagtgaagaagaagataggtgatttacttagagaatatgtggatagtggtgacacattggaggcctgtagatgtatacgtgagttgggggtttcattcttccatcatg

SEQ ID NO: 18807 - DNA, 434 bp, Glycine max
  modified_base (363)..(363): a, c, g, t, unknown, or other
  modified_base (379)..(379): a, c, g, t, unknown, or other
ctcagcgatggtgttggatccgccgcccttcctcccgtcgacaaagtccgcctacctccaaggcggcgacgccacggccttcgatgaggaagatctctacagccgcctcaaatccctagtgcgtcagctcgagttcgtcgacatccaggaggagtatgtgaaggacgaactgaagaatctcaggcgcgagctcctccgcgcgatggaggaggtgaagcggatccagtcggtgccgctcgtcataggccagttcatggagatgatcgaccagaacaacggcatcgttggatccaccgcaggatccaactactacgtcagaatcctcagcactatcaaccgcgaattgctcaagccttctgcttncgtcgcgctccaccgncactccaacgcgctcgtcgaggtgctgccgccggaggccgactccagcatctcgc

SEQ ID NO: 18808 - DNA, 439 bp, Glycine max
gcgttcgatttatttacaacaacaagggcttctgtgcctgaaccaaaaatctcccttcgggccttatggttcggggcgtccttcaccatcattgcgcatgcaattgttcctcaaaacgaaaccttcaaatttgagaactcaggtgaacttggaccctacatcgttgagtacggtgcagattacagaatgataagcatcttcaactctccattccaagttggtttctacaacaccaccccaaatgccttcactctagctttgcgtgtagggctccaacgctcggagcacctatttcgttggggttgggaggccaatagggccaacccagttggagaaaatgccactttctcacttggcactgatgggaaccttgtgttggcagatgctgatggcagaattgcatggcaaactaacactgccaacaagggtggtgtgggct

SEQ ID NO: 18809 - DNA, 433 bp, Glycine max
tgggagtgggaagtgtttaaaaatttattctgggcatgtgaatagagtatactgcataactgccacattttctgtgactaatgggaaatatattgttggcggttctgaagatcactgtgtttatatatgggatcttcagcagaaattggttcagaaacttgaaggccatacagacactgtaatatctgttacttgtcacccaacagagaacaaaattgcttctgctggtctcgctggtgatagaactgtgagggtttgggtacaggattcctgaataatatcgaaactgtatggggatgttgtctttcttctagatttcaactacatgcctatgcatgtctgatttcaatattagacactattaaacatacaagttgatctcatgttggcactagttccgtttttggtattatttgtaaatatagtttttcat

SEQ ID NO: 18810 - DNA, 434 bp, Glycine max
  modified_base (321)..(321): a, c, g, t, unknown, or other
  modified_base (390)..(390): a, c, g, t, unknown, or other
gtaagtcctatcagtttccacgtaagtctccaaaatcagaaacactcgaagctgttcaatggagatagatggcaacgttctcgcggccaagtcgctggtgcgcttcggtgtgcagcacatgttcggcgtggtggggattccggtgacgtcgctggccaaccgcgccgtctcgctcggtgtcagattcattgcttttcacaacgagcagtccgcgggctacgccgcctccgcctacggctacctcaccggccgccccggcgtgttcctcaccgtctccggccccggctgcgtccacggcctcgccggcctctccaacgcctncgtcaacacctggcccaccgtcatgatctccggctcctgcgaccaaaacgacgtcggccgcggcgattntcaagaactcaaccagatcgaagccaccaaacccttcaccaaac

SEQ ID NO: 18811 - DNA, 440 bp, Glycine max
ctttgacaaaccggagtttgccacggtcaacattcagcgtgatctgttctatggttacgatactctcatggagaatgtctctgatccttctcacattgagtttgctcatcacaaggtcacgggaaggagagacagagccaaacctctgccattcaagatggattctcgtggttcatggggcttctctggagctaatgaagggaacccacagatcagtgccaagtttgttgcaccatgttatatgatgaacaagattgagattgataccaaactccctgtagttggtgaccagaaatgggtagtatggatatgttccttcaatgtccccatggcacctggtaagactcgctccattgtttgcagtgctcgaaacttcttccagttctcagtgccagggcctgcctggtggcaagtcgttcctagatggtatgagcattgga

SEQ ID NO: 18812 - DNA, 441 bp, Glycine max
tgacattttgcgtgaaatttgaatacatatcagattcaatttttatgcacagataaaatttggacagaccttcaaagcaagcttcttcatctggttcattgctctaaaccatttcatcctaattaaaacagcactgtctggatgcttgtctgatgcttcaccaccttccttcaaccaagggtgttcgaaaaatatggaatggggtgatgacagcatcaatcagtagttaaactatcagaatgcaaatgggtgaaaatagttaccaagggcatcagcagttgtaatgcattccttagggtcacaagtcagcatttttctaaccaaatcttttgcagattctgaaatagagggccatggctcgttgtccatatctaacattccttccaaaatagcatcaaacatgcctttttcggtttctgaagttgaccaattcattgatat

SEQ ID NO: 18813 - DNA, 436 bp, Glycine max
  modified_base (328)..(328): a, c, g, t, unknown, or other
cactgacacggcaactagcacccctgctgtagttgctgccagcaatagcagtggctccactggagtctcatcttcatctcccacaacttcatttttcaaatttggatctaccccttcagcaccaacaagtttacttgtgtcatcttctggctcagaaccgctagaaaacaagagtggcacagggagtgtcatttttggaagctcttctgctgcaattggaagcacagggagtgacatttttgggtttagtaccccagcaatgaccggaaatagccagtctctgggttctgtctttggcactacaagtgggtctgtccctggtactcangtatcttctggtactagtggtttttccacttcatctgagagtcagtcggtggcatttggttcatctgcatcagcctcattgtttgggttgactgggagcacaactttt

SEQ ID NO: 18814 - DNA, 425 bp, Glycine max
gtcaagtctggatatggagcttcgaatgtttcagatcattgatgatgatgatcagcaagaagcagagaagagacctgagttggtatccattggatggcttctggattattttattcatgagctttccagcagaaataattttgagtttctacaagctgttatgaggctatttttgaagatccatggtgagacaattcggcagcagtcatgcttacaagaaaaggcaaggaagcttctagatattcaatgcatggtatggcagagagtagataaattatttcaaagttcgaggtgtgtgattgcctttcttagtaattcccaaatttaggtgacaaaccttcaacttgcaaccctcgagagatagcaaaggcaacttgtgaggtcatgtatttggtttggacttttcattggattgatagaaaagt

SEQ ID NO: 18815 - DNA, 479 bp, Glycine max
tcccggcgccacgcgtcgagacaacactactcactagctaacaatttcataagcctgccatggcttcctcgtgtgcttgctctgccattgcagctgttgccatctccacaccaagttcccagaagaatggatcactcttgggaagcacaaaagcttcttttcttagtgggaggaaactgaaggtgaacagttttacagcaccagttggagcacgatccagcactacagtgtgtgcagttgctgagcctgataggcctctgtggttcccaggcagcacccctcctccatggctagatggcagtttgccaggagattttggctttgatcccctaggtcttggatctgatcctgagagcctgagatggaatgtccaagcagagcttgtgcactgcagatgggccatgttgggagctgctggcattttcatcccagaattcctcacaaagattggtatcctgaacaccccttcatggtacact

SEQ ID NO: 18816 - DNA, 375 bp, Glycine max
  modified_base (16)..(16): a, c, g, t, unknown, or other
  modified_base (89)..(89): a, c, g, t, unknown, or other
cgcagaacaacaactnactcactaagctaaacaatttcatcaagcctgccatggcttcctcgtgtgcttgctctgccattgcagctgtngccatctccacaccaagttcccagaagaatggatcactcttgggaagcacaaaagcttcttttcttagtgggaggaaactgaacgtgaacagttttacagcaccagttggagcacgatccaccactacagtgtgtgcagctgctgaacctgataggcctctgtggttcccaggcagaacccctcctccatggctagatggcagtttgtcaagagattttggctttgatcccctacgtcttggatctgatcctgagaccctgaaatggaatgttcaagtacagcttg

SEQ ID NO: 18817 - DNA, 455 bp, Glycine max
cccacgcgtccggggagtttgaaaaagctgatgatgttgatgctgagaatcattctagtcaggctaaaaagcaaagaaatgagtgtgaaagtgatgccttgacaatgcctgaggatagaggtttatgctctattgtgactggtattgctgctgaacatgtggaggaaaatttagaaacgaaagaggttcatgaccaacctgccagagaggaacttcccaaagattcacctagtgtcctttcacaagaaatggataagcatcttgattctaaagggtcaaaattgattgccatggaagcggaggaggctgaggagtgcacctctaccactgcagatgcttcttccatgtcttctgcagctgtgtcagatgcagatgctaaggttgaatttgatttaaatgaagggctcaatgcagatgatgggaaaagtggcgagttcaactgcagtgcacctgct

SEQ ID NO: 18818 - DNA, 449 bp, Glycine max
gagacactcatgtgctcttttcagatactaaggcctgcggaacacagaaagcctaagtttgcttttgggagcaaaactacattcaaggcaattcttgatgctgctagagtatgaccccattgagctgacttagatcaataaagtttgtaacatagcaaaaaattgacatggacaaattgatatccgtgttcactccaatgtgaaggaagggtattacaactaccaatataatgaagaacgtaggaatattatctctgctttttcttttcaagtatagctgaaagtgtttttctgtgctggcgcattctcaatatgtaccatgttgtcaacacagatttagggggtcaggttccatttttcttttctttcagctttttgatgtgagagacagttatgcaattctccttttcatatctcctgttgtattataaatggcagcatacttttcg

SEQ ID NO: 18819 - DNA, 461 bp, Glycine max
aaaggagctcatcaaatacaagggatatcaggttcctccagcagaactagaggccttgctactgactcatcctgctattttagatgccgctgttatcccgtatccagataaggaagctgggcagcatccaatggcatacgtggtgaggaaggctggaagtagcttatcagaaactcaagttatggattttgttgcaggacaggtggctccgtacaagcggattcgaaaagtggcatttatttcctccatacccaaaaatccatctggcaaaattcttcggaaggatctcatcaaactcgcaacgtctaaactctgaatagatgagctttttcgtaatatattttttctatcggagttggacaagtgaggaaataatctttagctccttttttgctgtaattttctggcttgtttacttttgctgctttcatattatctgttctttgttcaacagtctattg

SEQ ID NO: 18820 - DNA, 372 bp, Glycine max
cccacgcgtacgctctatataacccttcacatttactctattctttatcttaaaggacttttgcatggaggaaagcaagaaacgagtccgggacgagtccaagtactcacccgagttccaaacttatctggtcgactctaccgagtctgaaagttaacgggtcgactcacctgagtctaagattcggcgagttgactcgttcgagtctcaacttgactcggaccttgacttggaagtgcgtatacaagacgacattgttaacatacttgacgacgccgataatgtgcctgagcgtgactcggtgcaaggtcttgactcagtgatcaaaagcttcgaagatgagataaacgcttctggttcggattctggttc

SEQ ID NO: 18821 - DNA, 379 bp, Glycine max
  modified_base (365)..(365): a, c, g, t, unknown, or other
  modified_base (374)..(375): a, c, g, t, unknown, or other
cccacgcgtccgcaaacatcatgggcatcagcagcaggagcaggaaccgcaatcacctcatgggggacaatgatctgtttatgttgtaatggttcatggcttgctctttgaggatgttttaacggatctttcagctggcaagtaatcgtgtttgtaggagaagccttggctggtttacttgctgcatttgtgcaagctctgaagaagatggcttcatttttataattttatttagttttctttttcctggcatattaagattttttagtgtgtaaaccttcgaacccaattgtgcgcttgtaaaattgttactttgaagaaacaacttttgaacgtttaatacattatcgacgtgcatgcatttncttgaaaannaaaa

SEQ ID NO: 18822 - DNA, 441 bp, Glycine max
atcgaacatggctaagtatcattcaagtgggaaaagctcttgcatgactgctatagccttcctgtttatccttctaatcacttatacaggcacaacagatgcacaatccggggtatgttatggaagacttggcaacaacttaccaacccctcaagaagttgtggccctctacaatcaagccaacattcgcaggatgcgaatctacggtccaagcccagaagtcctcgaagcactaagaagttccaacattgagcttttgctagacattccaaatgacaacctcagaaacctagcatctagccaagacaatgcaaacaaatgggtgcaagacaacatcaaaaactatgccaacaatgtcagattcagatacgtttcagtgggaaatgaagtgaaacccgaacactcatttgcacaatttctagtgcctgcattggaaaacat

SEQ ID NO: 18823 - DNA, 120 bp, Glycine max
  modified_base (73)..(73): a, c, g, t, unknown, or other
aaaaaaaaaaaaaaaaaaaaaaaaaaaaaaaaaaaaaaaaaaaaaaaaaaaaaaaaaaaagggggggggaaantggggggggtccgtttaaaggatcaaagtttatgtaacggggggggg

SEQ ID NO: 18824 - DNA, 475 bp, Glycine max
  modified_base (425)..(425): a, c, g, t, unknown, or other
  modified_base (440)..(440): a, c, g, t, unknown, or other
tcgcccacgcgtccgccaccctccgccacgcgtccgcttttttgctattttatccctcctttgatgattatcatccctttcgtatctctatgtttagggggaggtaacagtgcatggggtgtagaagaataggggaaaagatgagaaggaggcactgctacttggtaattaaggttgttgacagaagatagagagcacagatgatgatatgcatattatataatatatagcagggaactcatgatgaattgtgcatcttactcctttgtgctctctatacttctgtcatcaccttcagcctccatttctcactattccccctctacaccaactgttagctagtgtagtatatacttcgtttctatctactggaactataattcatatataaattactttaataagcctgttcatatataataatntgatgttcaccctgngtatttattacctagctagctagttttctcttcta

SEQ ID NO: 18825 - DNA, 449 bp, Glycine max
tcaatgggaaatcaggtcatgattctgctggccaatctcccatagtgagtgtacctaaaagtacttcagctgctaaggacactggccatcaagaaaatgtccaacctcaagcagctgttgttgcagcagcatcctcccctagtcaaacctctggctcagttactaccactgaccaaggaaagtctgtgtcaagttctgatcaacttcaaacttctgtatccaatgtccattcctctttggatcttgtagtagcatcatctgtctcccggaatcctggtgtgagtggtgcaattagtagggaagttgggagcaactggatatctgccggaccaaatcatgttaaaggaaataaagttggtcatgaagttaatgatttatcggcatccaagaatgaaaaatatgggtccatgaattcaacgagcaaaacaaatgccccacagaagtcaaat

SEQ ID NO: 18826 - DNA, 449 bp, Glycine max
cggatccatacactcccagaaaacatttttcattctatttctcagcaccagtcagcaacaacaacatccctttcctttccacaagacaccaaacaaagttcacagctttttttgttctttcacctcgattcacgaactgggtcatcctctgattgtggattattggatttcattttgagctacaccacacccccaagactttgactttcaacccaaaaccagctctttgtggtttgccaggttgccagttactgtgatatcataatggattccccacaatctgttgtgtcacccttcaagagctcagtgttgggtgagggtgagaagcacaagtctgatgttttctcaagaaactctagtcctttgtccaaggacattgaagtgaatggcaaggaagtagtcatgtcaaatgtagaggagtttcttggagtgcttgatgtttacataca

SEQ ID NO: 18827 - DNA, 325 bp, Glycine max
aaaaacgggggcggcccacgcgtacaaaaattcatacacttccacaaaacatttaattttcaactcacaataaacaatcagcggctgcggcatacttaacctttccacaaaacaccaaacaaaaattacatctttttttgtactttcacctatattcacgaactgtaccatcctcttatttaatattatcgtatttcattttaatctacaccacacccccaatactttgacttttaaccaaaaaccaactcttttattaattgccatttaaccagttactattatttcaaaattcattccccacaatctgttaagttacccttca

SEQ ID NO: 18828 - DNA, 442 bp, Glycine max
tgagaaccaaacacgacgctgcgccttgtgtagttgcccaacgccgcgccaccaggtttttccatcaaaagcttcttcttcttcttagaatgtttacttttatgctttttctgtggtatgctatctatcaatctcgttgtatgccttttctttctgtttctgctttctctttccataggatatggtgtttcttcaattgattctgctctaagattctctgtcaacaagtttctttcatttaggaaccgattcatgcctctttaggcacatgaacactttttttttttttttatttaggattttttcaatgaaataaacctaagcatattttgagcagtagggttttttttttttttttatccacaggagtctaagatagtttaaggggacttaacttacgcaccatgtgtttgctcaatcaattgagttagacctccttaac

SEQ ID NO: 18829 - DNA, 312 bp, Glycine max
  modified_base (230)..(230): a, c, g, t, unknown, or other
cttcggtcacttatttattatttaggtaaccaccccaaaaaaggaaaggaaaagggaaggaaccggtgccaccaaaaaaggaccaaaaaaaatccaattcatcgatgggggggaaatctgccggggttggaattttgctggcgttgatcgccgccgcttggtgtctgttaactccagcgaggggcgaattcgacgacaatatatgatgagctcctggcgcacgggtcttncggtggggcttcttccaaaagggaatagcgaaagtacttcgatgaaacgcgacgaagcggggaagttcgaaggtgtgggatg

SEQ ID NO: 18830 - DNA, 450 bp, Glycine max
  modified_base (348)..(348): a, c, g, t, unknown, or other
ctttgtcaccaccacgggtaacaaggacatcatcatggttgaccacatgaagaaggggaagaacaatgccattgtttgcaacattggtcactttgacaatgagatcgacatgctggggctggagaactaccccggcgtgaagcgcatcaccatcaagccccaaaccgacagatgggtcttccccgagaccaatgtcggcatcattgtcttggccgagggtcgtttgatgaacttgggatgcgccacaggacaccctagttttgtgatgtcctgctccttcaccaaccaggtcattgctcaacttgagttgtggaaagagaaaagtaccggcaagtacgagaagaaagnttacgttttgcccaagcaccttgatgagaaggtggctgcactttaccttggcaaacttggagctaaactcaccaagcttagcccggcccaagctgattacat

SEQ ID NO: 18831 - DNA, 494 bp, Glycine max
  modified_base (30)..(30): a, c, g, t, unknown, or other
  modified_base (41)..(41): a, c, g, t, unknown, or other
  modified_base (53)..(53): a, c, g, t, unknown, or other
  modified_base (310)..(310): a, c, g, t, unknown, or other
gaccgcccgaatcccggtcgaccacgcgtncgccacgcgtnctgccacgcgtncgagaccaatcatatagctgctggcaggcttattttgagcgtgaagatcttgaaaaagagtccccaagagcagacatagagaggctgattctggagactggtggtgtaaaatccctaataggatgcttgcatgggatttcaatcatgcacaaagtaaagaagggtgacatgaatctgagcaaggatgtgaaatcagaagaaggtgagagaatgtgtcccatacctgatggattgccaaaatctgctgatgaacttanggaagaggagcaagcaagaatgcctgattcaccatacactaagcttcttaggaccatgggcaggcaccctgcatggtactctcctgcccctgaccatgaaacagattgatgaatgatgattcccatacatactaagctcaaagggaatgaatatattctctttgagggaacaagtaataacata

SEQ ID NO: 18832 - DNA, 450 bp, Glycine max
  modified_base (1)..(1): a, c, g, t, unknown, or other
  modified_base (9)..(9): a, c, g, t, unknown, or other
  modified_base (12)..(12): a, c, g, t, unknown, or other
  modified_base (21)..(21): a, c, g, t, unknown, or other
ncacgcgtncgnccacgcgtncggaaaattgagctttgggtggataaaacagaaaaccttcgctctcaggctcaagatttcaggcagcagggaaccaagattaggagaaagatgtggttccaaaacatgaagataaagctaattgttctgggtatcataattgccttgattctcattattgttctttccgtttgtggtggcttcaactgtggtaaatgagtcttcccacatcctggcttcaactgtggtatttgtctcctcacttgataagattggtgctagcagattgccattgcctctactgtcaacatagtgcttttgactttttgggatttacattcttccgacttctccgatgatgaatattatatggcattgcttgtatagtgtgaattatttagcctttatcatcttgtctccatagcataatgctaatctgtcattctctat

SEQ ID NO: 18833 - DNA, 398 bp, Glycine max
aaaggaaaaatgtttgagggaaagggctgtttggttttcaaaaccgggggcgttggcagcaatcgcggtggtagcttgcgttgggcttacaaaggcccaacccgaggccaggttcaagtgcaacagcgcgaacatccccacgtgtcgcgcgctcataagctactctcacccgaacaccaccaccctcggcgacatccaaaagctcttcaacgtgaaacacatactcgacatcgtgggagccgaacaacctccaagcaacgccacaaaaacatacgcggtgggccccaacgaggttgtgaaggtccctttcccgtgcaggtgcagcaacaacacgggactctcggaccgtgttccgctgtacaggatcaaaaagggggacacgctgtactacatcgcga

SEQ ID NO: 18834 - DNA, 417 bp, Glycine max
aataacttagtttcgtttttcttactcactcaccgccgggatgtcgccggtgcccggagcacacgcccctctcctcccgggatccaagtccaaggatgttccgccggccaccgtgtccggcgccgtgttcaatgtcgccaccagcataatcggcgccggaataatgtctcttccggcgactctcaaggtcctcggagtgattccggcgttggttctgattctcgtgattgcttttcttgcagagctatccgtggagttcctcatgaggttcacacgtgccggcgaaacgacgacgtatgccggcgtcatgagagaagcctttggacccttgggagcagtggcagctcaagtcgctgttgtaatcaccaatctcgggtgtttaattatgtacctaattattattgcggatgtgttttc

SEQ ID NO: 18835 - DNA, 426 bp, Glycine max
actatttcttcttcttatcttcaaaccctaaatcggggcctcgtcaattaaccaccaaagtgatcgaactcaataccctaaaagccatggcccaatcccatggatccatccttactcgatcagcgtggtccttcaatctcgaatcggagttcgacttaatccgatccgtcatcgattcgttccctctcatctcgatggacaccgagttccccggtgtcgtcttgcgtaccgacgccggcgacccctgcttccgtcacctgcaacccgtggcgcactacgccgtactcaaagccaacgtggaccgactgcacctgattcagatcgggcttaccctttccgacaacgccggaaaccttgccaccctcggcacctacaacgccttcatgtgggaattctaacttaaagatttcgacgttgcgcgtgacg

SEQ ID NO: 18836 - DNA, 456 bp, Glycine max
cccacgcgtccgcccacgcgtccgcccacgcgtccgcccacgcgtccgcccacgcgtccggaaccaccataacatcattctgcccttccctcgcgtttcaacaccgataacccgcaaaaatctccattgatctgcgcctcctgttccatggcaaagctgcctgtggaatacaacggcgactgcgccaccaccgcctcagcatccgcctccgcagccgcggagtctcagagatccattcccacgccgtttctcaccaaaacctttcaactcgtcgacgaccaatccatcgacgatgttatttcctggaacgacgacggatcaacgtttatcgtctggaaccctaccgtcttcgccagagacttgcttcctaaatatttcaaacacaacaatttctctagcttcgttcgccagctcaacacttacggattcagaaaagttgtacctgatcggtgggag

SEQ ID NO: 18837 - DNA, 457 bp, Glycine max
cccacgcgtccgcccacgcgtccgtttacgcgtccgcccacgcgttcgcccacgcgggcggggccaccataacatcattctgcccttccctcgcgtttcaacaccgataacccgcaaaaatctccattgatctgcgcctcctgttccatggcaaagctgcctgtggaatacaacggcgactgcgccaccaccgcctcagcatccgcctccgcagccgcggagtctcagagatccattcccacgccgtttctcaccaaaacctttcaactcgtcgacgaccaatccatcgacgatgttatttcctggaacgacgacggatcaacgtttatcgtctggaaccctaccgtcttcgccagagacttgctttctaaatatttcaaacacaacaatttctctagcttcgttcgccaactcaacacttacggattcagaaaagttgtacctgatcggtgggagt

SEQ ID NO: 18838 - DNA, 448 bp, Glycine max
aaaccttattggcgtcgtagcagaactcaaaagttaacatccttaatctcttcaaacacggttgttcatagcatatggaaacgaggatgttgcggctttcgattcaacgagtgaggaagttgaactttctgaggcctcagatctctgctttgggaaggtcccatttgtcaactgctgctgaaccatcttccagtaagagcaatccacctagggttccaaatcttattgggggcagttttgttgactcaaaagcatcaactgtcattgatgttataaacccggcaacccaagaagttgtttcacaagttcctttgtcgacgcatgaagagtttaaggcagctgtatctgcagcaaaggaagcatttccatcatggcgtaacactccaattacaacacgccaacgtgttatgttgaagcttcaagagcttatacgcagagatatggataa

SEQ ID NO: 18839 - DNA, 476 bp, Glycine max
  modified_base (246)..(246): a, c, g, t, unknown, or other
  modified_base (384)..(384): a, c, g, t, unknown, or other
cgggtcacccacgccgtccctaattcttatttcttcatcggtcgaatcttcttcttctaaaaatgccaatctttgtgaaaaccttggccgggaagaacattaaccttggaggggaagtcttccgcccccatcgataccgggaaacctaaaattcaaaacagggaagggatccaacctgaccagcaaaaactaatttttgcgggtaaacaactggaggatggtcgaacctttgccgactacaacatncaaaaggaatccactctccacctcgtccttcgcctcaggggtggcatgcaaatctttgtcaagactttgactggcaagaccatcaccctcgaggtcgaatcctcggacaccattgataatgtcaaggccaagatccangacaaggagggtatccctccagatcagcagaggttgatatttgctggtaaacaacttgaggatggaagaacccttgctgattacaatattca

SEQ ID NO: 18840 - DNA, 389 bp, Glycine max
ctctaataacatttctaatctcattctccttctgttcaaacactctctctcatggcatcagataagaagattaggatcggcatcaacgggtttggaaggattggccgtttggtggccagggttgcccttcaaaggaatgatgttgaacttgttgctgtcaacgatcctttcatcaccactgattacatgacatacatgttcaagtacgacaccgttcatggccagtggaagcattttgatgtgaaagtgaaagactctaagacccttctctttggtgagaagcccgtcaccgtttttggaatcaagaaccctgaagaaattccatggggtgaggttggtgctgattatgttgttgagtcaactggtgtattcactgacaaggacaaggc

SEQ ID NO: 18841 - DNA, 440 bp, Glycine max
atttttcttcatcccccaaagtttcaatctttgtattcaattcaccctttctctctctccatggccacttgtgttgatgccccaacccctctttctcggaagcctaacgggtcccaatccgatgatcattccttcaattacatgaaattctgccgacccactttctctgatcgcgttccctgcatacccatttgcaagaatcgtgacactgccttcacacgcgtggaggagtttgacacatgtgtggaggataatgatgatattgaagttgaggttgtggagggtgttgatctttggttgaagattcaagaagaggcaaggttagatgttgatcaagaaccaattttatccagctactatttcagttccattttgtctcacaaatctttggagagtgccttggccaaccacctctccacaaatttgagcagcttgagcct

SEQ ID NO: 18842 - DNA, 438 bp, Glycine max
ctttcttttcttctcgcagagcgaaatcccaatcccacacaaatggcatgctcagccacctctgcttctctcttctccgcaaaccccacacctctcttctctcccaaatcctccctctccctccctaacaactctctccacctcaaccctctccccacgcgcccttctctctccctcacgcgcccctcgcacactcgccgctccttcgtcgtcaaagcctcctccagcgagcttccgctagttggaaacaccgcaccggatttcgaagcagaggctgtgtttgaccaggagtttatcaacgtgaaactatctgattacattgggaagaaatatgttgtgctcttcttctacccgttggacttcacttttgtttgtcccacagaaatcactgctttcagtgaccggcatgcagagttcgaggcactaaatactgagata

SEQ ID NO: 18843 - DNA, 448 bp, Glycine max
aaaaagtcaccttcttttcgcaaatccctttcccttttacactctcccttctcttcttcggctccctctccgtctccgcccaaagcggccaccgcgacgacgacgacgacgacgacgcggacgccggaggcgacgccacccccaacctccgtgctcggtccttgattctcgcaaaggtgtggtgtttgatcgttattttttttgctacttttgtatcgggcgtttccccctacattctgaaatggaacgaggggttcttagttctggggacccagtttgctggaggagtgtttctgggaactgcaatgatgcattttctcagcgacgctaatgaaaccttcggggacttaactcgcaaggagtaccccttcgcgttcatgctcgcgtgtgcagggtacttgatgaccctgctcgctgatgctgtcatttcctcggttttgaagaatac

SEQ ID NO: 18844 - DNA, 375 bp, Glycine max
ctttgtcaccaccacgggtaacaaggacatcatcatggttgaccacatgaagaaaatgaagaacaatgccattgtttgcaacattggtcactttgacaatgagatcgacatgctggggctggagaactaccccggcgtgaagcgcatcaccatcaagccccaaaccgacagatgggtcttccccgagaccaatgtcggcatcattgtcttggccgagggtcgtttgatgaacttgggatgcgccacaggacaccctagttttgtgatgtcctgctccttcaccaaccaggtcattgctcagcttgagttgtggaaggagaagagtaccggcaagtacgagaagaaagtttacgttttgcccaagcaccttgatga

SEQ ID NO: 18845 - DNA, 322 bp, Glycine max
  modified_base (293)..(293): a, c, g, t, unknown, or other
acctttcccaggccgacttcggccgcctcgagatcgagctggccgaggttgagatgcccggcctcatggcctgtcggaccgagttcggcccctcccagcccttcaagggggcccgcatcaccggctccctccacatgaccatccagaccgccgttctcattgagaccctcaccgcccttggcgccgaggtccgctggtgctcctgcaacatcttctccacccaggaccacgccgccgccgctattgcccgcgacagtgccgccgtcttcgcctggaagggtgagaccctccangagtactggtggtgcaccgagcgcgccct

SEQ ID NO: 18846 - DNA, 450 bp, Glycine max
cccacgtgccggttcttcaatcttctagagagagagagagagagagagagagagatggcgttgaatcctcaactgtttccaaatggaatgcccgttcctttcgtgaacgagatgtttgtgttggccagagacggcgtcgaattcgaggtcgataagattcctgcctctggcaatcatgggggtaatctcaaaacaaagggaatcgtgtatttgtcgaatattcggatggtcttcgttgctaaaagtccagttggacacttcactgcttttgatatgcctttgctttacatccatggtgaaaagtttaaccagccaatatttcactgcaacaatctctctggacatgttgaacctgtggtcccaaatgaccaacacagagctctttactcaacacactcatttaagatcttattcaaagagggaggctgtggaaccttcattccccttttc

SEQ ID NO: 18847 - DNA, 456 bp, Glycine max
gtcctctgaaaacaacagtaactggagttgagatgttcaagaagattttggatcaaggacaggctggtgataacgtgggtcttcttctccgtggtctgaagcgggaagacattcaacgtggtcaggttagttgaggagatctagcttttgctttttgttagacatcatagctgcatgcaagagaactgtatattatctgtatttgtttcgataaaatttatagaatttcgaattcaaattactaaatttgagaaagcactttcccaatgctgctttctattgaaaaggtgattgccaaacctggttctgtaaaaacatccaagaaatttgaggcagagatatatgtactcacaaaagatgagggagggcgacacactgctttcttctctaactacaaacctcagttttacttgaggactgctgatgtcactggaaaagtagagttgcccgaaaatg

SEQ ID NO: 18848 - DNA, 456 bp, Glycine max
agtaaatcgaggtacccattttatgataaactttccttccatttttgttcctctagtaggcctagtatttccggcaattgcaatggcttctttatttctttatgttcaaaaaaacaagattttttagatacagaaaacaaagtaaaattctggggttttttattccccaattataatactaaattcaaaaaaaggagagtaatgagtataatctttcgctcagacgatgtactgatatattctatggcggaggttcgaagaacaagcaatttattttgggccgttttcactttgttaggttcattggggttattgttcgttgcaatttccagttatcttggtatggatttgttctttatttctgagaaaattagtgatttttcttttattccggactttatttattttccatttattccactaaagagacccacgatggctttttatggaaatcgc

SEQ ID NO: 18849 - DNA, 428 bp, Glycine max
aagggcacttttttccccttgtgattttggtgtccaccaggcactgttacctcacacatcaagaggcaatgcaattctcctcctacacttattgttattggtgctggaatatcaggaattgctgctgcgcgttgtctccatgatgcatcttttaaggtgattgtattggagtcaagggataggataggtggcaggatttatactgattactcatttggctgtccagtagatatgggagcctcatggctacatggtgcttgcaatgagaatcccttggcaccattgatacgcgcattaagacttacactctatcatacaagtggtgataactctgtcatatttgatcatgacttggaaagctgtatgctatttaacattgatggtcatcaagtccctcaacacattatgatggaagtggagacacttac

SEQ ID NO: 18850 - DNA, 408 bp, Glycine max
aaaaaaacaaaaacagaaacaaaagatggttcatcagaggcaaaacaacatccatgttcttgttcttccataccctgcccaaggccacatcaacccccttgtccaattcgcaaaaagattagcttcaaagggtgtcaaagccacagttgccaccacccactacactgccaactccatcaatgcacccaacatcacggtcgaagccatctccgatggtttcgaccaagccggcttcgcccagaccaacaacaacgtgcaactcttccttgcctccttcagaacaaacggctccaggaccttgtctgagctcatcagaaaacaccaacaaactccctcccccgtcacctgcattgtctatgactcatttttcccctgggttctcgacgtggcgaagcagcatggcattta

SEQ ID NO: 18851 - DNA, 374 bp, Glycine max
cccacgcgtccgcccacgcgtccgcccacgcgtccgcccacgcgtccgatttcgtataacatttcatttcacttcacttagggtggtgcatttgcaaccctttaatttcctcacaaaaatggaggaacgtagtttgtactcactagtgtttcttgtgcttgctttggctattgtgaacaaagtgcatgggcaagggacgcgtgtagggttctattcgagtacatgcccacgcgctgagtccattgttaagtccacagttacaacccatgttaattctgatagtactttggctgctgggttgcttcggatgcacttccatgattgctttgtgcaaggttgtgacgcttctgttctcattgccggttctggcactg

SEQ ID NO: 18852 - DNA, 373 bp, Glycine max
cttccgcctattgtagccaagaaaggaaggaaggaaacccttgcttaccttttcaacttttaagaagccaatttttggtaaaacacttactgggtaaaaaatcacccttggaggggggaggtcaaataccataaataatggaaaggccaaaattcaagaacagggaaggatcccaccaaaccaacaacgtctcatttttggtggcaagcaacttgggggtggacgtacacttgctgattacaacattcaaaaagagtccactctacacttggtgctccgtcttcgtggtggaatgcaaatctttgttaagaccttgaccggaaagacaatcacccttgaggtcgagagctctgacaccattgacaatgttaag

SEQ ID NO: 18853 - DNA, 429 bp, Glycine max
  modified_base (26)..(26): a, c, g, t, unknown, or other
  modified_base (399)..(399): a, c, g, t, unknown, or other
agtcgttcctaaatggtatgagcatngggacttcaaacaaagtatatgatggagacatgattgttcttcaaggccaagagaaaatcttcctttcagaaaccaaagaaggtggagacattaacaaacagtatacaaacatcaccttcacaccaacacaagcagatcgctttgtcttggcatttcgaaactggctaaggcggcatggcaatggccaaccagaatggtttggcaacagcagcgaccaaccattgccatcaactgttttatcaaaacgtcagatgttggatagatttgaacagcacactctcaagtgttcatcatgtaaagcagcatatgagggattccaaacatggcagaaagtcctaattggtacaacagttgtgttttgtgcaacatcanggatcccatcaaatgttcaagtgcgtgtac

SEQ ID NO: 18854 - DNA, 451 bp, Glycine max
  modified_base (416)..(416): a, c, g, t, unknown, or other
  modified_base (425)..(425): a, c, g, t, unknown, or other
cccacgcgtccgttcttgatctccattacgacacagacgacggcttcgaagtttttcaattccagctctattccctctcttccgttccacctcatcaacaaaagattttcggagccgaacaagatactccagtggtcaatgactctgatctcgtcgccatttctgacaaactacgactagtctcggtcaacgactccgaaccggaaccaagcgctgccgatttgttgaaatccgatgaggaattggccagactcttgcaggcagaggaggaagcgctaatgttgcagtagtatgtggcaagccaaaatcctcgagaatttgatagtggagtacggccctactagtcaagtcctcatgttgcagcagtatgggctatatttttttgcggaatatgatattaaatgcataattgactntcatgctgntcttggttccagaatgggatggagca

SEQ ID NO: 18855 - DNA, 414 bp, Glycine max
  modified_base (122)..(122): a, c, g, t, unknown, or other
atggaaccaaaagttttcagggctttgcttcatttatttatagagacactctaatagatgatgaagagctctttatgtcacgttcatcattcttgccttggtatctgaatcatttgctgcanagttgttagctgctgcagaaaagtatggtttgccaagacttaaactgatgtgcgagtctgtactttgcaaagacatctccatagattctgttgcctatattctggctcttgctgatcgttatcgtgctacagaattgaagtctgtctgtctacaattttctgctgaaaaccttgtcgctgtgatgcaatctgatggttttgagtatcttaaggaaaattgtcccttgctgcaatcagaactgctaaagactgtggcaggatgcgaggaggaatttagtggagaaggaaagtg

SEQ ID NO: 18856 - DNA, 445 bp, Glycine max
tctttttctcagaagcaaaggttttgaatttcagttatggccttttgctgtctttttgtttgtattgttttgaaaaaaattggatattttttcagggtattggagtggttaaacaacctactatggaaggaggttcaaagcctcctcctcctcctatgttggagagaagggcaaggcctcaaaaggatcaagctttgaactgtccaaggtgcaattcaaccaacaccaaattctgctactacaacaactatagcctatctcagccaaggtacttttgcaagacatgtataaggtattggactgagggtggttctctcagaaacgttcctgtcggtggtggctctagaaagaacaaaagatcaacctcatcagcgccaccaccatcatcagcatcagcacaagcaaagaagcttcctgatctcacaacacctaatttccctcaatc

SEQ ID NO: 18857 - DNA, 455 bp, Glycine max
catagtctttcggtccttccttccttcctccgctctagtgtatgccactctggttaattatcatacccccttctaggcatagttcttctccctctgttctctattctacactgtgaaaccaagatgaaggtagcatttgtagctgttctacttatttgccttgtcctaagctcctccttgttcgaggtgtcaatggccggttctgctttctgctcctccaagtgcgcgaagaggtgttctagggctgggatgaaggacaggtgcacgaggttctgcgggatttgctgcagcaagtgtaggtgtgtgccatctgggacttatgggaacaagcacgagtgcccttgctacagagacatgaagaactccaagggcaagcccaaatgcccttgattgttaatttcaccatgcatcaacttcaatctcaaacctttgaatccttcactcttgctagctga

SEQ ID NO: 18858 - DNA, 461 bp, Glycine max
  modified_base (450)..(450): a, c, g, t, unknown, or other
gtgtggaaacattctgttatggtttgtgctgcaatcacaacacaccaatatgtatctgctgagcagattgtgaatggcatgcatcaggcaaaggcagaaggagctgatatagtggagcttaagcttgactgcatcaccaatttccactctcaccatgacctcaaaatcattctccaaaataagccactacccgtgcttattgttaaccgaccaaaatgggaaggtggtttgtacgagggcgatgagaacaagcggttggaagcattacagcttgctgtggaattgagtgctgatttcatagacgttgagctgaaggcagcttcttgtcttccaaccttggtggaacatatgagaaatcataatagtcatggcaaaatcattgtttcctgctatgtggatggcaccacccctccgcatgaagtactacttcaacttgttgaactaatgcangctactggagc

SEQ ID NO: 18859 - DNA, 374 bp, Glycine max
gataaagttgctgcaaaccttgtccgacttctctcatataacaataagaatttcttagagaccgggttaattgttggtggatgggataaatatgaatgtggacaaatttatggagttcctctgggtggaacaatagtacaacaaccttttgctatcggaggatctggctccagttacttgtatggtttttttgaccaagcctggaaagagggaatgaccaatgatgaagctgacgatttattaaaaaaagctcgttcactggctattgctcgtgatagcgcaagtggttgggttgtcctaacagtcataataaactcagagtgagtgaccaggaatttctaccctggcgaccaacttacattatggcacgagga

SEQ ID NO: 18860 - DNA, 168 bp, Glycine max
gcgcgagtttcaactcggtgtagcaatggcgatgatgctaggggtgcagaagaacacactgtacgtgggagggttagcggaggaagtgaacgagtcgatcctccacgcggcgttcattcccttcggcgacatcaaagacgtgaagacgccgcttgaccaagccacgca

SEQ ID NO: 18861 - DNA, 398 bp, Glycine max
catggtttccctttccaccaccccttttctccccttcactgcaaaaaacgcttctactagattcccacctcccaattcattctcccgcaacaagcaacgtagtaacagggatcacaggaaggttgtctgcgcctgcatcgcacctccgcagaacttcaagagccaggactcttccgccattaatttcaatggttcgtccaaatcagaacaactgagcacggcgtgggatcatgaggatgattctgatgttcttattgagtgtagagatgtgtataagtcttttggggaaaagaaaatcttaaatggtgtcagcttcaagattagacatggtgaagctgttggaataattggtccttctgggaccggcaaatctacagttttgaagattattgctggac

SEQ ID NO: 18862 - DNA, 353 bp, Glycine max
  modified_base (1)..(1): a, c, g, t, unknown, or other
  modified_base (39)..(39): a, c, g, t, unknown, or other
ntccgtgagcgtgaaagatgccttcggcgaggctttcanggtcaccaaggctcgacgttgctattgacatgggcaatccatttctcaatctcactgttgatggtttccttaagatcggagctgtcgcagccacgcgatcagctgctgaagatacttatcatattatccgaaacgggaatatctcaagtcatgatttcgagaaaacgttgaagaagatgtgtaaagaaggtgtatattggggaactttagctggtgtttatcttggaatggaatatggggtagagaggatccgtggcaccagagattggaagaatgccatgattgggggtgcagtaactgcgactctgttatct

SEQ ID NO: 18863 - DNA, 435 bp, Glycine max
  modified_base (269)..(269): a, c, g, t, unknown, or other
  modified_base (305)..(306): a, c, g, t, unknown, or other
gtttctaaggagagggaaggggagaatccaattccaattaagggtttcttaatattattcactttttgttttattccaaggaaggtcttcttcttccaattcaaattgaatggaccaagtagtggtaaaatattatattttttgaaaaactttggttcttttcttaactaaacccgtttaatggccggcttatcttggtaaattttttgcatttatttcaagtaagcttcaaatttccccattctatacagccttagattctacgtcgntaactctctccgattgattctatattcgatattcgnntgattgattcactcctctctctctctctctctctctcgctttcgattcgacgcctgaacaagtgaacatggaccctaatcacctcttcttcacgcatttccgcgatggtgctattgcctcacgcattga

SEQ ID NO: 18864 - DNA, 450 bp, Glycine max
gctggcacaagttcagatcggaggagcagtcgaggaaggggatcttatatacctcctggtccaccaaatggaactcataagcctggagtgcatcctgctggatatcctgtgccaagggttcctttgcctccttttcatggtggtccccaatctcaaccatatgccattccatctcgcggggcagttcatggacccgttggggcagttcctcatgttccatctccagggagtcgaggttttggggctgggagaggtaattctggtgctccaatcggcaatcatctaccacatcaacaaggcacccaacagcctattgggaatattggatctacatttaacttccctgctctagagaatcccaacagccagccatctgttggtggtccatcatctcaacctgggtttgccaacaatatgcctgttcaaggtgctggccaatcatttcgagat

SEQ ID NO: 18865 - DNA, 332 bp, Glycine max
gtgagtattcagctcaatatgtggatgctttctccaatgcccatcactcttcttcttcttcttctataccagaattcatgcaattccaacgcctcgagaatgatccccaagagaagaaattggagtacaatggaagtcaagtaccggaagaatttgtggaaacagagtattaccaagatctcaacagcgtggacaaacaccaccatacgacgggaacaggatttatcaaagtagagaaaaatggaaatgactttcacatagaaccagataatgacactggttgccatcactcttgcaggtgcaatccagcaaccaatgattgggttccttct

SEQ ID NO: 18866 - DNA, 461 bp, Glycine max
attgagtttgagtttcagccatggtatctgtttctctgctcttattcctatctttctttgccttctttgcaccctctgaatctcacgacaaagtctcgttggaattgtactacgaaagcttatgcccctacagcgccaacttcatcgtgaatcacctcccaaaaatcttcaccccagatcttgccccaatcgttcacctcaaactcgttccttggggcaatgccaaactccgtgccaacgccacctttgactgccagcatgggccatatgagtgcttgctgaacacagttgaagcctgtgcaattcacatctggcctcaactcagcaaacattttcctttcatctactgtgttgaggatctggtgtttcagagtaagcgtgaggaatgggaatcttgttttgagaaactggatcttgattcggaacctattaatcagtgttataatagtgaacatggaaaa

SEQ ID NO: 18867 - DNA, 400 bp, Glycine max
atttttcttctctcccttctttctctctctctctctctgaccattctcttcttcttctttttcttctcctctctctctctcccctccgccatggctgaggataaggagatgtctacctctgtcatcaatgggaatgattccctaactggtcacatcatatctacaactattggaggcaaaaatggggaacccaaacagactattagctacatggcagaacgggttgtaggaactggatcatttggaatcgttttccaggcaaaatgcttggaaactggggaggcagtggcaattaaaaaggttttacaagacagaagatacaagaatcgtgaactgcagttaatgcgtgtgatggatcatccaaatgtgatctctttgaagcatttgttcttttcaacta

SEQ ID NO: 18868 - DNA, 214 bp, Glycine max
cctttttgcgtgaagggtcgcgtctactgtgacccttgccgtgctggttttgagaccttaacaaccacctacattgccggtgctgagattatgttgcaatgcaagagcagggttagcaacgaggttgtgtacaccaagaaagggtacactgactcaactggagcatacacaatgtacgtggacgagggatcacgcagatcaaatatgcagtgcc

SEQ ID NO: 18869 - DNA, 440 bp, Glycine max
  modified_base (386)..(386): a, c, g, t, unknown, or other
cgagtttattgagtctttaacaagagtcatgcaaaaggggttctttgaatcacgcgcttatgctgtgttcttgttgaaatctatttccgaagtggctgaaccagtgcaactattgcatctaagacaagaactttttgtcgaactggtacaagtcctgaaggatcaaatttcacagaagacatcaaaggcgacccttcaaaccctgatccaattctctccttgggggaggaacaggatcagagctgtggaagcagctgctgttcctgttttgattgagcttcttctcgattgcaaggagagaaagccttgtgagatgatgctggtgttgttggagctgctatgccagtgtgctgagggaagagcagaacttttgagccatgcagcangtcttgccattgtgtccaaaaagattctaagggtttcgactttggcgaatgata

SEQ ID NO: 18870 - DNA, 443 bp, Glycine max
  modified_base (361)..(361): a, c, g, t, unknown, or other
cttcctacttgaagaaagtaggatacaaccctgacaagattccttttgttcctatctctggttttgagggagacaacatgattgagaggtccacaaaccttgactggtacaagggtccaactctgcttgatgcacttgaccagattagtgagcccaagaggccctctgacaagcccctcaagcttccccttcaagatgtgtacaagattggaggtattggaactgtgccagtgggacgtgttgagaccggtgtcttgaagcctggaatggtggtgacttttgcaccaactggactgacaactgaagtcaagtctgtggagatgcaccatgaatctcttacagaggcacatcctggtgacanatgtgggattcaatgttaagaatgttgctgttaaggatttgaagcgtggttatgttgcctcaaactcaaaggatgaccctgc

SEQ ID NO: 18871 - DNA, 410 bp, Glycine max
gatgtgagccggccaaagccaatgaccgccttttggtcatctctggctcatagctttaccaagcgcccaatgaagggaatgcttaccggtcctgttaccattcttaactggtcctttgttagaaatgaccaacctagatctgataccacctaccagattgctttgtctatcaaggaccaagtggaataccttgaaaaggctggcatgactgttatccaaattgatgaaactggtttgagagaaggtcttccactgaagaaatcagaacaagctcactacttggacttggcttgccatgccttcaaaatcaccaatgtttgagtgcatgataccacgcagatacacactcacatgtgctactcgaacttgaacgacatcatacacttcatcatcgacatggactccgatgt

SEQ ID NO: 18872 - DNA, 443 bp, Glycine max
ccacgcgtacggaaatgtcctttttggctagttgtcaaaatctcgttcctcgaccttgggtcattgatgatcttgacactttcaaattgaaatggagcaagaacccatggaagaaggttatcatatttgttgataactctggtgcagatatcattttgggtattatgccatttgcaagagaactacttcggcgtgggagtcaggttgtattggctgctaatgacttaccatccatcaatgatgtgacttgttctgagctagttgaaattatatcaaagttaaaggatgaagatggacagcttgtgggtgtcagtacttcaaatctcttaattgcgaactctggcaatgatttacctgtcattgatcttacaagagtgtcacaggagcttgcttaccttgccagcgatgcagatcttgtcatcttagaagggatgggtcgtgga

SEQ ID NO: 18873 - DNA, 453 bp, Glycine max
  modified_base (10)..(10): a, c, g, t, unknown, or other
  modified_base (13)..(13): a, c, g, t, unknown, or other
  modified_base (22)..(22): a, c, g, t, unknown, or other
cccacgcgtncgnccacgcgtncgctgaattgagttcactgtccacaagtttcgccccaacactcaactcggctcgtcgctattgttgttgttcttcttctccatatcaaacaaagtatagataaaatatcattgcagcttcattttcatcctccaattaattagcaatggggcacacatcccttttcactccctcttcctctcttaggttcaactctcttcttgtttcctccaccccctcttcttcttcacgctccaacagcgtttctttccccgccctctccaggaacataaggaaatcggtagaagatagaaagattaatataaaattctgctgtgaaagcagtgtatggtgatgaattttggacacctgcgaagagttcacctcacgatatttggtccataaggagtgatttgcaagtcccatcttccccttatttccctacctatgca

SEQ ID NO: 18874 - DNA, 443 bp, Glycine max
gtaggttttgaggaccctcgtgtaacacttactgttggtgatggagttgcatttttgaaggatgttccagaaggaacttacgatgcaggtatagtggattcatctgaccctattggtcctgctcaagagctgtttgaaaagcccttttttgcgtccgttgcaaaggctctccgtccaggaggtgttgtgtgtactcaagcagaaagtatatggcttcatatgcacatcattgaggacattgtggctaattgtcgccaaatattcaaaggttctgtcaactatgcatggaccacaggtcctacatatcctagtgggatgattggttttatgctttgctcaactgagggtcctcttgttgatttcaagcatccagtgaatcctttaagtgagaatgatagtcaacagtcaagaccattgaaattttacaattctgagattcatac

SEQ ID NO: 18875 - DNA, 398 bp, Glycine max
  modified_base (257)..(257): a, c, g, t, unknown, or other
gccctatctcatagggtttccaccctctctctcatgcatttttgctgtcacgagttcttctttgccgttgccctcttattctttgctgtatttggagccttcttttgtgtggaacagagcagatttcacctccctgggttttttgaaccgtgcccatgtctaaagttttcagctttaccggaaatgatgatttctaccatgggggccctatttatcctaacccgaaggaaccatgtctcttcttgtctcttggccgncaagttgatgtttaccttcctcttcagaagaggtctcgcttcagtgttccatttgatatcagcggagaatggtttgagcaagaagcagagccaaagacatctattgaatctttgccagatgaatgcctctttgagatcctt

SEQ ID NO: 18876 - DNA, 434 bp, Glycine max
ggcgagtcaaaagttggtgctggcattgatcagggccgcgaggccaaccttccgaaaccaaaacgacaaaatcgcctttgccgttcactcctccttcctcgcctctggttatgtccttacagctacgggtccccaggccctctccgacgatgcgttttctgacccatccaatgacgaggtgtccgttgatcactggaacgagctgaacgacgagtacgcgttcgtttacgcgaatccagaaaagggttcggagaaagtgcttgtcaagtgcctcgtgatgaacgacaaattgctcgttcatgctttgactcaagggtcgtcggagcctttgagccttgagattgatgttggggattatgctgaagaggatggaggcagcaattattctcagcagttcaagaattggataagcttgtgaagagatagatgggata

SEQ ID NO: 18877 - DNA, 423 bp, Glycine max
  modified_base (370)..(370): a, c, g, t, unknown, or other
cccacgcgtccgaaagcattgaattcaaaaactaagttcatttcttgtgctttgctttattcctcaaaaccaaacatgtcgaacacatgcggcaactgtgactgcgctgacaagactaactgcaccaagggaaacagctatggtgttatagtagagactgagaagagctacatcgagactgttgacatggatgttccagcagctgagcatgatgggaagtgcaagtgtggcactaactgcacttgcacggactgcacttgtggccattaaggaatatgtatgaaaatgtaattgccatgtgtttggcaatacaaatctccaaataatgtaatcttcgtatgaataaatgtgtgctgttatcctacttcanggtctgtgtagtcatgcagtctgaatcatgtccagttcctgtcatagttatta

SEQ ID NO: 18878 - DNA, 452 bp, Glycine max
atcgatttgaaggcaggaggtaagtccaagaagaccaaacgtacagcccccaaatcgaatgatatttacctcaagctcctcgtcaagctgtaccgttttcttgttcggaggactggtagtaacttcaatgccgtcatcctcaaacgccttttcatgagcaaggtcaacaagcccccgctatccctctctagattgattcgttacaccaagggaaaggaggataagatagctgtggtagtcggtgccgtgaccgatgacattagggtgtatgaagtccctgctctgaacgtaactgccctgaggttcactgaaactgccagagctagaattgagaatgctggtggcgaatgcctcacctttgatcaactggctcttagagctccactcggccagaatacggttcttcttagacgtcccaagaatgcccgtgaggctgtcaagcactttggacc

SEQ ID NO: 18879 - DNA, 459 bp, Glycine max
gtaggttttgaggaccctcatgtattacttactgtcggacgatggactctcatttgtggagggttttccttaaggaacttaccatacaatcatagaggattcatctgaccctattggtcctgctcaagagctgtctgaaaaactctttattcgtccaattcaaatgctttcccacaagaagattgtttgtaactaaacagaaagtatatagtcttatatgcacatcattgaggacattgtgtctaattgtctctaaatattcaaatgttcatttcaactattcatgaaccacagtttctacatattactaatggaataaacgctttattacatttcttaactgatgatactctttttgttttcacaccttctagagaatactttaaacgacgaatttattgaacaatcaaaactttcgaaattttacaattcttaaaaacatacaccaatttttttttt

SEQ ID NO: 18880 - DNA, 287 bp, Glycine max
cttgaatggatcaaactgtacgtgctaccattctgattctacatctgttgtaggaggcgggggcaattcttcttgacggaatggcaaaccatgcactatgtaattacaaagagtatcacacacatttagaccattgtcgtattcatcaacaacatggaatcaaacatctactttagggccgcatatgctctgacctactgaaggaatttctaactcaacgattgaataccatggatatcttgcatgctcttacatacctgaaaagatgattcatacaccatctacat

SEQ ID NO: 18881 - DNA, 343 bp, Glycine max
caggatctcaaacactgatcctggtgcccaaacatatcgtggggccagaaaaacatgaaatgcgggggtgcctccgccctcatctgggaaggaatgatctcaagttaacttgagatatgcacttaaaaaaatttgttaggcgattcccgtatggttcgtatgtcatttgttttctaactttgtaccatacaatgttatttgcaatagaattgtgtctcttatgtttgtctctagcaattttagctcactgactgccctggttctttttgttccggtgcatctgtattatgcttttgattgtaagcagtattgaacagctagttctcattatttataagaaatt

SEQ ID NO: 18882 - DNA, 361 bp, Glycine max
  modified_base (13)..(13): a, c, g, t, unknown, or other
  modified_base (25)..(25): a, c, g, t, unknown, or other
gcgcccacgcgtncgcccacgcgtncgctctgaggatcaaaaacttttgagagaaaaggtgcagcacctgagtggagatgctggaattgagcgtatggaatctgcattatctgaaacaagatctagatactttgtagtgaaggatgacggaagtccagtgaggtctccaatgattccatctatgcccacaagcccaacttcgctttctactgctgccagctcaagtgaaagaaatatttctaatgagagtaatcataggtcaagccgagtagttcgctccctctttaaggaaacaaatacttcccctggagagtctagcttctctgaacccagaaccagttcagatagtcagcttggcaca

SEQ ID NO: 18883 - DNA, 439 bp, Glycine max
caaaataaaaaaaaagaaaaaatgtttgcagggaaaggggctgtttggttctcccaaccgggggcgttggcagcaatcgcggtggtagcttgcgttgggcttacacaggcccaacccgaggccaggttcaagtgcaacagcgcgaacatccccacgtgtcgcgcgctcataagctactctcacccgaacaccaccaccctcggcgacatccaaaagctcttcaacgtgaaacacatactcgacatcgtgggagcgaacaacctcccaagcaacgccacaaaaacatacgcggtgggccccaacgaggttgtgaaggtccctttctcgtgcaggtgcagcaacaacacgggactctcggaccgtgttccgctgtacaggatcaagaagggggacacgctgtactacatcgcgacgacgacgttcgcgggtctgatgaagt

SEQ ID NO: 18884 - DNA, 469 bp, Glycine max
  modified_base (63)..(63): a, c, g, t, unknown, or other
cgaatcccgggcgccacgctccgccacctccggcactgggatcgaacagatctctgttccganaccaccgcctttgccaggggtcatgaagtccttttatctactgtttgtgattaacagtaataaaattaattcagttcttttcattcaagttaagttgttccattctttgccaccttttgccgccgagtgatcgaaccgaaccaacgaaccaggctcgcgagctgcactgcaacaagcttttttgcgcatacaagtttggtgacgactcacttctgcaccgagccacctccaactacactttttttattattattctctgccggcgtggctttctttcttcttttataaaagtcatatcataatcataataatattacatcgagtttttggagagaaaaaaaggggtcgaacgagtgtatcagaacatacgtgaagactgcgaatataggaacccaatcctaattct

SEQ ID NO: 18885 - DNA, 460 bp, Glycine max
gtaggctgttccattgtatctttcggaaatggctccagctaagaaccgaggagcagtgaaccaactgtttcagttcacaacttgtgctggaatcttaattgcaaacctagtgaattactttactgaaaaaatccatccctatggatggaggatatctctgggtttggcaggtcttccagcatttgcaatgcttgttggaggtatttgttgtgctgagacaccaaacagccttgtggagcaaggaaggttggataaagcaaaacaagtattgcagagaattagaggtaccgagaacgttgaagccgaatttgaggatcttaaagaagccagtgaagaagcacaagctgttaagagcccgtttaggacactcctcaagaggaagtacaggccacaactgatcataggtgcattggggattccagcgttccagcagctaactggcaataactccatcctcttc

SEQ ID NO: 18886 - DNA, 371 bp, Glycine max
cccacgcgtccggctttcttttccttcagggttaagcggtgagatttgcgaatctgagaaatggcggattcttctcgggaggagaacgtttacatggcgaaattggcggagcaggccgagcgttacgaggagatggttgagttcatggagaaagttgcaaagactgtggaagttgaagagttgacggtggaagagaagaatctcctctctgtggcttacaagaacgtgattggtgcgaggagggcttcgtggaagatcatatcctccattgagcagaaggaggagagcaggggcaatgaggaccacgtggccattataaaggagtacaggggcaaaattgaggctgaactcagcaagatctgtgatgggat

SEQ ID NO: 18887 - DNA, 358 bp, Glycine max
cccacgcgtccgattggacttgagaataaaatcattttacactttgaaaatgtgttttggcctaatgtggagttcttgggagtagttgcagatacatcttatggatgtagctacttccttaatctccacaaggccgccggtcatgctgttctggtttacatgccttctgggcagcttgccaaagacgttgaaaagatgtctgatgaagcagccgtcaacttcgctttcatgcagctcaagaagattcttccagatgcttcttcaccgattcagtatcttgtgtctcggtggggatcagatataaattcactaggttcatatagctacgatgcaattgggaaaccccatgaactatatg

SEQ ID NO: 18888 - DNA, 370 bp, Glycine max
attcaggctgcacatgttcagtcagaacgggcgaccaacacctgccagcaattactgaatgtcaacaacattccatcattagctgagcagagctcaaaggaaattcaaacctccatgactcctgcaagttttaatatttctagtgaaagggagcaatcggctccattaatgtacacaccacaagtgtcattttctcaaaaatctggacacattgaggaagatccacgcaagtctgcagctgctgcagtggcagcaaaactgactgcttcaacatcctctgcgcagatgctatcttatgtgttgtcatccctagcatcagaaggtgtgataggaaatccaatgaaagaatcttcagcagattatcactctg

SEQ ID NO: 18889 - DNA, 439 bp, Glycine max
gggcccacgcgtacgcttttgggctttatctccgcctatgacccacatatggcttcgtgacgcgtgctggaggacctcaaggatttgcagaaggatcctcctacgtcatgcagcgcaggtcctgtggctgaagacatgtttcactggcaagccacaatcatgggacctgctgatagcccatatgcaggtggtgttttcttagtttcaattcattttcctcctgactatcccttcaagccaccaaaggttgctgttcggactaaggtgttccacccaaacatcaacagctatggcagtatatgtattgacattctgaaggaacaatggagcccatctctaaccatttacaaagaactatagtcaatttgctcattgttgacggatcccaaccctgatgatccacttgtacctgagattgcacacatgtacaagaccgaca

SEQ ID NO: 18890 - DNA, 387 bp, Glycine max
  modified_base (66)..(66): a, c, g, t, unknown, or other
gtaaaaagtcactgtctactgatgctcatttttcaagatcatcaaagttggaggaaaaagagaaanagcacaagcgggatttggatggatctaaagagaaggaaagatacagggagaaatacatgggaaaatccattcaagaacttgaccttagtgactgtaaacgttgtactcccagctaccggcttctgcctgcagattatccaattcctacagctagtcagagatctgagcttggtgctcaagtcttgaatgaccattgggttttttttacttttggaagttaggattacttttttaaacattttttttagttttttgtatttattattttttgtatataattgtatttttttcttatttttattttgtactttttttattttt

SEQ ID NO: 18891 - DNA, 417 bp, Glycine max
cccacgcgtccgcccacgcgtccgtaacaattaagctctctgatctagttttcttgtcaattgattgatgatttggctgattgcactatttagatttattttccctaacacttttattgtggtattcatggaaaatgaattgagttcggattattcttgttgattattgttttgtctatgccctcttctgtatatcatctgtgtctgttctgttctaccatttttcttgttatcttttctttttattattattttctttctttttattttttttcttttgtatttctcttacttttttttatttttctttcttgtcttttcttttttctttcttttttcttttttctttcatttctttttttttattttctattttcttctattttttttttttttttttctttctttctttttctt

SEQ ID NO: 18892 - DNA, 313 bp, Glycine max
  modified_base (30)..(30): a, c, g, t, unknown, or other
tcggcacaatttctctctttcttttggtgnccaatatggctcctagttctactcacagtactgggttctatgtgcttaggctagttggaatagtgattagcactatggttgctacctgtgctggtagcttctaccaagactttgatctaacatggggtggtgacctgtgcttagatattcaatggtggccagcttctatctctttcccttgacaaattctctggctcttgctttctaattcaataatgtatacctattttggaggatttgatctgcctgttttgttcttttcttgttatcttttcttatttct

SEQ ID NO: 18893 - DNA, 261 bp, Glycine max
  modified_base (66)..(66): a, c, g, t, unknown, or other
ggccgaccgacgcgtccggctcttaatctctccctcttaccctttaccttcttccattctaacccngtcctcaaaccctgagccacccattttctgctccggcttcttgatccccaaaccccattcacgcttcttcaaaaccccaccaaggtgcgttttcactcctgcctttccaatcccctccaaaaacactaactttgggtcccagtttctgaaccctactagcctcaccttttagctcttcttcctccatactttttc

SEQ ID NO: 18894 - DNA, 180 bp, Glycine max
  modified_base (120)..(120): a, c, g, t, unknown, or other
caacccgtcggttaattcaagccccacgtttccacaaacaactatggctttggcaccagcagctgccacctcgtcctttatggaaacgcgtctcgtggaggctcactccggagcggggcnagtgcactcccgattcggcttcggcaagaaaaaggctcccgccccaaagaaagccttcag

SEQ ID NO: 18895 - DNA, 304 bp, Glycine max
  modified_base (4)..(4): a, c, g, t, unknown, or other
  modified_base (69)..(70): a, c, g, t, unknown, or other
  modified_base (82)..(82): a, c, g, t, unknown, or other
  modified_base (118)..(118): a, c, g, t, unknown, or other
  modified_base (120)..(120): a, c, g, t, unknown, or other
cggncgaccacgcgtccgctgatttgttcaaatgtttgatgccgaatttgatgcagttgtttcaaaagnngaagacaagggntctatgtgacggttttgatgaagctgaggcacacangnaagacgccaaacttgagagctctagtaaatcaataatttcctgtaaaaacagcaatggtaatgatgaatatggatcttgttatgagatcacatctaacagtatgctagattttgtaggaatagattaaagactttttccttaatattttttataattttgtttcttttttatttattttctctt

SEQ ID NO: 18896 - DNA, 371 bp, Glycine max
cccacgcgtccgaacagagtaacatacactttaaaaagctggattaaaaatgatcgacaaataaagaaaagaagggcgtccaagcaaatatataataagaccagtcatggctaatgagaaaaacaatatgataaattgataccctttgcactgttggttatatcagatagagatccccagagcttggaatctatcctttgcaaaaacaaatcaaagcttgccacaagctctgtctgtctccctctgttgtgctctgcttcaggagccaacaaaatccaatattaaaccttgatattgcaatattacaaatatcctaatccaatccaaacttggcaaagtctaaatgaataataattacccattgaaggctt

SEQ ID NO: 18897 - DNA, 338 bp, Glycine max
tcgcccacgcgtccttagcagataatatttttgatgtgtggctgatgaacgattattgggacgtgtttttttgggtgaggcattagattttttttttttttcattttaattacattttctttttgttttattttactttttttttttttattttatgtctttattttttttttttttttattatttctaattacaattttcttttttatttttttccatatttctcttttttttttctatttattttttctttattttttatttttatactctttttttttttttttttctttttttttttttttttctattattattttttctatttttatattttt

SEQ ID NO: 18898 - DNA, 468 bp, Glycine max
tcgccaagatccattacaaggaaggtatcttctctgaccagcaacgtctcattttcgccggaaagcaacttgtggacgggcgtacgctttcttactacaacattcagaaggagagtactcttcacctcgtcctccgtctccgtggtggcatgcagatcttcgttaagacactcaccggcaagaccataaccctagaggttgaaagctccgacaccatcgataacgtcaaggctaagattcaggacatggagggtattctcccttaccagcaacgtctcatctttgccgtaaagcatcttgaggactgactcactcttgcttacttcattattcagaacgatttaactttttcatcttttttttcttttttttttgtaatctattcattatcttttattttatactttttatctttataatctatttttctattttactttttattttttttatatactttttttattt

SEQ ID NO: 18899 - DNA, 276 bp, Glycine max
tcggccacgccttcgggcaggaacaccccggcctggtttggatggggtctctgtacctgcagtcccactgatcaacgtgctggggtatttttcacattttgtgatcacggaggtattgcttgtttaccttcaaagaaagttattcacaggggttctgtttaagcacaccactttcacagtgttctttaacatttctttgttcaccactggattaactgcaactatgctgttatggccaacaatcaccgaacacattcacctgacacgcaatgtgca

SEQ ID NO: 18900 - DNA, 406 bp, Glycine max
attttgagatttttttattgtttgatgtgtaccgattttaagattggatctcttttgattgagctgtttgagatttctttcttctttctctctctctctctctcttttggttggtgactgtgttgaattatcttatgatgtttccaatccttgtttgttttgtaggtgacccagtttaaaatttgagatttttttcttgtttgatttgtacccatttgaagattggatctcttttgatttggctgtttgagatttctttcttcttctttttttctttggtggctggtgacagtgtgttgaattatcttatgatgtttccttttaagcacttgttgctggatttcaatcatttcactccatttattgatatatttgttttttatttttgcatatttttttgaatatg

SEQ ID NO: 18901 - DNA, 420 bp, Glycine max
gttgaatacaaattttgggaaaaaaattgggccacaagaatgatttgcttcttaaatacacccctgttcacaaaaaaggtccagtgtttgttcacaatgagcaccccctatcacagtctcttgtgattgttgaatacattgatgagacatggaagaacaaccccatcttaccttctgatccttaccaaaaaaccttggctcgtttctggtccaaattcattgatgataagattgggggggctgcatcgaaatctgttttcacggctgatgaaaaaaaacgtgagaagaatgttgaagaaacatatgaagctcttcagtttcttgagaatgagctggaggacaagaagttttttggaagaaaagaatttgggttggtagatattgctgctgtcttcatagcattttggatcccaatttttc

SEQ ID NO: 18902 - DNA, 251 bp, Glycine max
tccgcgaggtagaacgacgacccccttctgcgttttgaccttcaatctcaatcatggccaaagctggagggggcaagggaccaataaatgaacaagcagtagcaaatatgtatgctgcaatgaggtctgagctcaaccaaatttactccaaaataactgaactggagatggaagttagtgagcacacattggttaccaatgccattcaaccacttgaccaatctagacgatgctatcgtatgattggaggg

SEQ ID NO: 18903 - DNA, 311 bp, Glycine max
gtctattcgttcttttgctgaggcctctatggcaactgctttagagaaaaagtggccactgtatcttagcaccaaaaatacaattctgaagaaatatgatggaaggtatacaattcattattagcttattcatttaatatttttcaaaaacttttactgcattgatcgctgtttaattatattcatttattggttgtagattcaaggacatatttcaagaagtttatgaggcaagctggaaatcaaagtttgaggctgctggtatatggtatgagcatcgactcattgatgatatggtggcgtatgcactt

SEQ ID NO: 18904 - DNA, 461 bp, Glycine max
  modified_base (306)..(306): a, c, g, t, unknown, or other
cttccggcttaacggcctgaaaccaaggaggatccttttgaaacttttttgccagttaaaaaggagactaatgcaaaccctggagactgtaaattaaagtcaaggactttttttgatgatgatcaaaaggttgatcacatgaatgaggaaaccgctgaggatgaaaaaatgttggttccaaaagctgttgcaagtgttaagtctgaaaatgaatcgggtgaaaaaaatcctgagttatcctcaggtgtggataatgagaaccagattagtgcagagaaatcaacaggtactggtatactagtgcanaagggctctccagtttctgaaaactgtgagtctttgtatttaaaaaaggagtcacctacttctggtaatgctgtaatggtatccagggatgaaaatgctgatgacacgaagtcagttgtgattgagcctgatgaaagaaaacaaggcaggattta

SEQ ID NO: 18905 - DNA, 265 bp, Glycine max
aaatcccgggggggaccaacgcgtccgcccacgcgtccgcccacgcgtccgcccacgcgtccgattgttctcaaaacagctgaccaaacgccattatctgctttgaatgcatcaaaattgcttcatgaggctggacttcctcctggcgttctgaatgtaatatctggctttggtcctaccgctggtgctgccattgctagtcacatggacatagataagcttgctttcactggttcaaccgaaactggaaaagttgtccttgaat

SEQ ID NO: 18906 - DNA, 462 bp, Glycine max
ggtgtatccgccccactcctgaagagctggagaattttggtactccggacttcactatatacaatgctggacagttcccctgtaatcgttatactcactacatgacatcctccactagtatagatcttaatcttgctaggagggaaatggtcatcctcggcacacaatacgccggggaaatgaagaagggtcttttcggtgtcatgcattatctcatgcctaagcgccaaatcctctccctacactctggatgcaatatgggcaaagatggggatgtggcactcttctttggactctcaggtaccggaaagaccactctttcgaccgatcacaataggtatctaatcggagatgatgaacactgttggggtgacaatggtgtctccaacattgaaggtggttgctatgccaaatgcattgacctctcacgggagaaagagccagatatttggaatgcaatca

SEQ ID NO: 18907 - DNA, 300 bp, Glycine max
ctctaacctacctctttttcttctctctcaataacttcatcttcttcctcctcgatcatggctcactttaagggcgggtaccgtgattagcttatctccaatgctgcgtacattggcactcctggaaagggtattcttgctgctgatgagtcaacagggacaattggcaagcgtttggccagcatcagtgtagagaacattgaatccaacaggcgagctcttatggagctgcttttcactgctcctggtgttcttcaatatctcagtggtgtcatcctcttctaggaaaccccttaccat

SEQ ID NO: 18908 - DNA, 248 bp, Glycine max
gacaggcctttgccccctctcttcaaggccggttccctctactacaagtcgtctttgcctgatgaagctgtttacgacaaggagcgacccggagttacatggccgaagcagttgaatgctccacttgaggtcgtggatcctgagattgctgatattattgagcttgagaaagctaggcaatggaaggggctagaattgataccgtcagagaatttcacctctgtgtctgtgatgcaagcggttggatc

SEQ ID NO: 18909 - DNA, 369 bp, Glycine max
cccacgcgtccgcccacgcttccgaaagcacttagtgcttttcaataattacgaaaaaccaagagcgagtgttgttgttgtttgctccaggctttaccagggaatgaatagagatgagaggctttcggttgaagagaactgagttaagcggcgaagccaaacgcagaatcggcggcagaaattgccaccggaagcacgtcgaagacgggtgaaccaaacacaaaattccatccaccacttcttttttcaatccccaacttaaatcttggaagaaaatcttaatttctaaattggaattttttatcactactgttagatttgtaaaaataaacaatttaaatgttagaagagttgttttttttttctttt

SEQ ID NO: 18910 - DNA, 391 bp, Glycine max
  modified_base (46)..(46): a, c, g, t, unknown, or other
  modified_base (65)..(65): a, c, g, t, unknown, or other
  modified_base (69)..(69): a, c, g, t, unknown, or other
  modified_base (71)..(71): a, c, g, t, unknown, or other
  modified_base (73)..(74): a, c, g, t, unknown, or other
ccggtcgaccacgcgtccgggtttacttttcaggttatcagggggncccatactcttttgtgctnccgncngnngcacgaccggcttacaatgcagtgaagtacagaccaaatggtgctgctggaggaaagctccagaacagcaaggaggagcggagtaactcattgaccatgggtgttgcagatgagcatataggattggttgttggtcgtggtggaaggaatattatggaaattagtcaggctagtggggcaaggataaagatatcagaaagaggtgattacgtatctggaacaaccgataggaaaggtaccattacaagatcccagagagcaattcttacagctgaatttatgtattgcaaaaggtgctaatgcacccagaggggggt

SEQ ID NO: 18911 - DNA, 448 bp, Glycine max
  modified_base (34)..(34): a, c, g, t, unknown, or other
  modified_base (50)..(50): a, c, g, t, unknown, or other
  modified_base (58)..(58): a, c, g, t, unknown, or other
tgataatgatgggttcaaacccaaaaccccttgngcacttttctcttctnctcccggncctggtttctgcctcaaccgaatcgctgagagttgaaatccaatccgggcacaccaaatgcatctccgaggatatcaagagcaattccatgaccgttggcaagtaccaaatcgttagccccaacgagggtcaacctctgccagatgcccacagattcaccgtcagggtgacttcgtcttatgggaacaactatcactacggggatcgcgttcagacggggcagtttgcgtttgctgcagtggaggctggagattacatgacttgcttctgggctgtggatcacaaccctgtggaaacgttgactgtggtttttgattggtatacttgtgtttgtgtctatgtaattgtactaattttgttataatggctatttttttctcttctattctt

SEQ ID NO: 18912 - DNA, 381 bp, Glycine max
  modified_base (90)..(90): a, c, g, t, unknown, or other
  modified_base (93)..(93): a, c, g, t, unknown, or other
cccattcgtccgcaccatttcatcattattcttatctcattctctaacctttcgctctgccgtactcactctctggtttgctgatcatcntanatgaaccaacacttctagtctctcttactttataaccatgtaaaaatgagtcacctaatgaaaaattagtagcttcttgttgtgctttttattttgtttgtgttgagataaatttgtttgtttgtttggtattgttttgtgttttatgaattattatatgggtttatttatgtgtagtttttttatttgttggtttatgttttgttttttgttatttgttttattttattttatttttttatttattgtttattttttttttattttttttttgttgtaatgtttttt

SEQ ID NO: 18913 - DNA, 300 bp, Glycine max
  modified_base (95)..(95): a, c, g, t, unknown, or other
  modified_base (105)..(105): a, c, g, t, unknown, or other
  modified_base (108)..(108): a, c, g, t, unknown, or other
acgcgtccgaagatgtcaagctattgcattctgtctgctataggcctaatttcaaatgttacactacgcgcaaccagcgtcttctggtggtgctntagcgatatnaangagcggtttgaaattctctccttgtctggttcatatataacaactgagaatggattaacaaagagcagatctggtgggatgagcatctctttggccgctccagatggtcgagtaatggggggtggattggctggttgcttgtagctgcaggttctgtgcaggttgttgtggctagttttgttcctggtcatc

SEQ ID NO: 18914 - DNA, 405 bp, Glycine max
  modified_base (32)..(32): a, c, g, t, unknown, or other
  modified_base (41)..(42): a, c, g, t, unknown, or other
  modified_base (44)..(45): a, c, g, t, unknown, or other
  modified_base (47)..(49): a, c, g, t, unknown, or other
  modified_base (51)..(52): a, c, g, t, unknown, or other
  modified_base (60)..(60): a, c, g, t, unknown, or other
  modified_base (62)..(62): a, c, g, t, unknown, or other
  modified_base (67)..(68): a, c, g, t, unknown, or other
  modified_base (98)..(99): a, c, g, t, unknown, or other
  modified_base (106)..(106): a, c, g, t, unknown, or other
tcgcggacgcgtttttgaccaccgacttttanggtcatagnncnncnnnanngcacgagngngtggnnatttttggtatgttgtcgctggatacttgnncacaacnctcacaaacatttcatgggtgtgttggatattctccaagtcagttacagctcaacatatttttttaggcatgaggggccttggagttggtgctctcacatttgatttgtctgtctttgcattatttttgttcaatcttttaatcttacccttttttgctattgcaaattttttttgtggttatgcatttattttctacttggtaatttctttcattattattttttttttaattgataaatatttccatatagttttattttttctttttataattttttatctccttatttctattat

SEQ ID NO: 18915 - DNA, 326 bp, Glycine max
  modified_base (51)..(51): a, c, g, t, unknown, or other
tacggaaaatggaatgggatttgtttttactttttgctgctaggggttatnttttgtctgttgattacactttcaagcaaatttgcttttaccgcgtttgattctctgttggacttttcgttcttttttttttttcctatattttatttctatctctttatttttttctttgtttctttttatcttgtttcttttttctcttttttctcattctttctctctttttttcttttttctttttcttttcttttttttcttccttcttattttctctcctttttcttcatttcattctcttttctttctgatctcttactttctatttt

SEQ ID NO: 18916 - DNA, 403 bp, Glycine max
cccattaatcaaaacccctttttttcaaccttatttttctccataaaccctagattcaacgagcccgtctgaccaagctcgaagctcacttcacaaaaaaacacttcttttcccctctccgaggttgtcgtgtcggagcatatccatgttgttccctcgaggaaattgtttttttttcataacatttgaatctcgttttgcttgttttgtcatttttattatgtatttcatttttctttcttttcttcttcttctttctttttttttatttatcttttattttttctattatatcttctttttttttttttattcttttatttttcattactctttatcttttcttttataatttcttctttcttaatttatcatttctttctccttttctattatcttcttt

SEQ ID NO: 18917 - DNA, 285 bp, Glycine max
  modified_base (109)..(109): a, c, g, t, unknown, or other
cgaccacgcgtccgcccacgcgtccgattttgttcctcacctagtttccaaccctgttgtccggagccaccattgtgcgctccggcaatgttcttcccggtggcgatcntcccttaaacccaccacacttcaaagtcatgggtattccatgggacgacgtcgttgtgatccagcaagggaaggatcacatttagccctgcatcgtcaccgtcaattgccccgacaaggctggtctcggctgtgatctttgcagaatcatcctcgagtttcggcttctctattacc

SEQ ID NO: 18918 - DNA, 268 bp, Glycine max
  modified_base (8)..(8): a, c, g, t, unknown, or other
  modified_base (12)..(13): a, c, g, t, unknown, or other
  modified_base (50)..(50): a, c, g, t, unknown, or other
gcaagagngagnncctgttcctgtgcacgcgtcgcaaggcacctcttatncaccaccaccacagccaccgcgttcgccgtcactttacccaaaccctcatcactctccctctcatcgcgtcgattcctcttccctctctcccatgccatcgtccctccctccacccgcgtcgccggaatccggtgccgcgttaaccgcgccggagactcggcgtactcaccgctgaactcggggtcgtcgtcttcttcgtcaacgaccccccccccac

SEQ ID NO: 18919 - DNA, 415 bp, Glycine max
  modified_base (15)..(15): a, c, g, t, unknown, or other
  modified_base (27)..(27): a, c, g, t, unknown, or other
  modified_base (35)..(35): a, c, g, t, unknown, or other
  modified_base (58)..(59): a, c, g, t, unknown, or other
  modified_base (73)..(73): a, c, g, t, unknown, or other
  modified_base (97)..(97): a, c, g, t, unknown, or other
  modified_base (102)..(102): a, c, g, t, unknown, or other
  modified_base (113)..(113): a, c, g, t, unknown, or other
  modified_base (115)..(115): a, c, g, t, unknown, or other
  modified_base (117)..(117): a, c, g, t, unknown, or other
  modified_base (188)..(188): a, c, g, t, unknown, or other
cacaacactattctncttttcagcaanggcgtggntggattctggacgggaaccccannaaggcactttttanatgtatgatcgacgctccctactncatangctcgcatctntncnagaagctcatgtccgaaacccctcacaccgtcctcgccctcgacgtctacaactacaagatcaaacacctnctcgaaccctccgattccccctgggccggccgcatcaccttccaccgcctcaacattcaaacacgactctcgcctcgaaagccttatcaagattgcagatctcactattaatctggccgccatttgcacttccgcggattacaacacccgccctctcgacaccatttacagtaatttcattgacgcgccttcccttgggaaatactgatcccagaacaacaaacctc

SEQ ID NO: 18920 - DNA, 432 bp, Glycine max
gtttgaagattcttacagacaaattagctgctgctctgctgactattagtgcaaaagaagacttactaaagcaggattctaaagttgcagaagaagccgtctcaggctgggagaaggctgaaaatgaagtgtcatctttaaaacaacagcttgatgctgcaaggcagaagaactcaattctcgaagatcgagttggtcatcttgatggggcactcaaagagtgtatgaggcagcttcgacaagctagagaactgcaagagcaaaagatggttgaggctgttgtgaatagttctcgtgactgggaatccaaaaaatctgaacttgagaggaaagttgcccagtttgaggctcaacttcaaacagctaaagcagatgctgctgcgtcaattccatttgatcttcaccagagactagaggctgtgcagaatgaga

SEQ ID NO: 18921 - DNA, 263 bp, Glycine max
  modified_base (15)..(17): a, c, g, t, unknown, or other
  modified_base (29)..(29): a, c, g, t, unknown, or other
  modified_base (37)..(37): a, c, g, t, unknown, or other
  modified_base (46)..(46): a, c, g, t, unknown, or other
  modified_base (49)..(49): a, c, g, t, unknown, or other
  modified_base (51)..(51): a, c, g, t, unknown, or other
  modified_base (80)..(80): a, c, g, t, unknown, or other
  modified_base (95)..(95): a, c, g, t, unknown, or other
  modified_base (101)..(102): a, c, g, t, unknown, or other
  modified_base (117)..(117): a, c, g, t, unknown, or other
cccattcgtccgacnnnttttacttaccngttctctnaccccaaanacnanggcagccatggcaacctgaacccgcgctncagaccccaaactcncaaacnncaacggaaagcccgncacatattcttcccgcgtcgcgcccaccaccaaattatcctcatccaaacttggcacaatttccatgtccctaaccccaccctcctacgacctccagtccttcaaattccagcccatcaaagaattcatcgtgtcacgggaaatga

SEQ ID NO: 18922 - DNA, 147 bp, Glycine max
  modified_base (55)..(56): a, c, g, t, unknown, or other
  modified_base (60)..(60): a, c, g, t, unknown, or other
  modified_base (67)..(67): a, c, g, t, unknown, or other
gcaacgccttccgctacttcttcaaggctcgcttcaaagttcttaccctcaccanngaanagtgctncaggggcatatctcgcagccatgtgtattactcttcataagtttacttgtctaccaaaatcacctctgaaaattagagac

SEQ ID NO: 18923 - DNA, 298 bp, Glycine max
ttatttaatactataaataagattaatttaatatttaaaaaaaaggattctttataagtttaaaggtaatatgtatagggggcaaatagtaaatcgaggtacccattttatgataaactttccttccatttttgttcctctagtaggcctagtatttccggcaattgcaatggcttctttatttctttatgttcaaaaaaacaagattttttagatacagaaaacaaagtaaaattctggggtgttttattccccaattataatactaaattcataaaaaggatcagttaacttatat

SEQ ID NO: 18924 - DNA, 334 bp, Glycine max
  modified_base (46)..(46): a, c, g, t, unknown, or other
  modified_base (52)..(52): a, c, g, t, unknown, or other
  modified_base (59)..(59): a, c, g, t, unknown, or other
  modified_base (66)..(66): a, c, g, t, unknown, or other
  modified_base (104)..(104): a, c, g, t, unknown, or other
  modified_base (107)..(107): a, c, g, t, unknown, or other
  modified_base (118)..(118): a, c, g, t, unknown, or other
cggactcgtgggctgacttttgggctgaaaatgatatgtttttacngacaangacaganacagganaatgtaaatttttgtaaagcacatagaacaaaaacaanaanaattatatcanagagatacttgagaagggtattctgttacatttttgcacctcaccttacctcatattctttcatggctgttcagatcagaaatgcatttcttcctgtttcacacgactgttattttgtacaatcaaaacttaaaatgctgccctattaatttttgtttataattttctaagtatacttctcatcttaaaatttcaatgactcaatttttttctttt

SEQ ID NO: 18925 - DNA, 264 bp, Glycine max
  modified_base (30)..(30): a, c, g, t, unknown, or other
  modified_base (43)..(43): a, c, g, t, unknown, or other
  modified_base (47)..(47): a, c, g, t, unknown, or other
  modified_base (49)..(49): a, c, g, t, unknown, or other
  modified_base (94)..(94): a, c, g, t, unknown, or other
  modified_base (97)..(97): a, c, g, t, unknown, or other
  modified_base (104)..(104): a, c, g, t, unknown, or other
tcgcactcatggaccccaaaaacgtgatancttttctggttcncagncncgattacggggccttgttcactgacctcaggactcggcttatccncancctctcngtgttctccctatgcatcttcggcacctcctctctttcaaccatcaccgacctcaaccccttcgtcgttattctctccgggggcccccaatctctccacaccccggacttcctctccccccccatgaatcaattttattaatattatatttttttaagtc

SEQ ID NO: 18926 - DNA, 393 bp, Glycine max
cccacgcgtccgcccacgcgtccggatcaatgaagctctctgatctagttttcttttcaattgattgatgattttgctgattgcagtatttagatttattttccctaacacttttattgtggtattcatggaaaatgaattgagttcggattattcttgttgattattggtttgtctatgccctcttctgtatatcatctgtgtctgttctgtcctaccaaattgtttgggataaggctggtagatttcattgctgctaattttattgtaattgcttgggtgacgttttacttttaatagttttttttttttggttctgggggggaccataattgcaggacattcatggaaatgatttgagtcttaaatattacagcgggaaggttctactga

SEQ ID NO: 18927 - DNA, 212 bp, Glycine max
gcacaatttctctctttctttttgtgtccaaaatggctcctagttctactcacaaggctggggtctatgtgcttatgctagtttggatatttattagcactattgttgctacctgtgctggtagcttctaccaagacttttatctaacatggggtggtgaccgtgctaagatattcaatggtggccagcttctattctttttcccttgacaa

SEQ ID NO: 18928 - DNA, 204 bp, Glycine max
gcggctctcaatctcttctttctaccctttacctttctttcataccaaccccctcctcaaaccctaagccagccatttccttctccttgttcttcatccccaaaccccattcacgcttttccaaatccccaccaaggtgctgtcttacgcctgcctcgccaatcccttccaaaaacacaaacttatgtttcccagttttttaac

SEQ ID NO: 18929 - DNA, 279 bp, Glycine max
gcgtccacgcgtccgtccacgcgttcgaaaaaaacaagattttttagatacagaaaacaaagttgggttcgggggttttttattccccaattattatactcattactctcagacgatgtactgatatattctatggcgggggttcgaagaacaagcaatttattttgggccgttttcacttttggtaggttctttgtgggttatgttctgtatcatattttcagatatttttggtatggattatgttccttatattttgtgaatatattttgttttttc

SEQ ID NO: 18930 - DNA, 60 bp, Glycine max
ctcacaccaggcgcacgttagcacaaactatcatggccacggcaacagcagctgccatct

SEQ ID NO: 18931 - DNA, 188 bp, Glycine max
gtgaattccaatttcaacgtttcaaattgcatactgttcttctcttcctctcggtgtctgcactgactgcatgtcgtcgataacgggcattcaaggccaaccttctgaggttacggttggttttgtgcttcaaggttgaagacacaaaatggatttcaaggctagatccctacgtttgtgttgagtat

SEQ ID NO: 18932 - DNA, 432 bp, Glycine max
  modified_base (88)..(88): a, c, g, t, unknown, or other
attcccttaaagtggaaggtctccgaggcattgtaactgtgcctgccaagctggagtctagcgtccctcgtctttgcctatggagtanatctattttttactcagattgctccttctaggacttacgattcactaactgaagatttcagctatgctctacttctttctacaattggtgcacttgtcgctgcaatatttgtcacttggggtttatcccagaggaaagatctacaagagaaatggagattgtccggccttcatttttgccttgcaatctcttagttttaaggtttaagttaggttattttgattctttgttttgtttttaattctaattttttaaatttttgtagctttgattggcaaagtcactttataatttcattattttattatttgcatttattctttattgtatttttttatttatta

SEQ ID NO: 18933 - DNA, 147 bp, Glycine max
cccacgcgttcgaacagagtaacatacactccaaaaagctggattaaaaatgatctacaaaggaagaaaagaagggcatttcatctaatatataattagaccagtcatggctaatgagaaaaaacaatttgataattgatacccttt

SEQ ID NO: 18934 - DNA, 90 bp, Glycine max
cccacgcgttctgagcatagaaaagcttttatgtttgggtgatgaaagattattgggacggggggtccttaatgaagcaaaataatttta

SEQ ID NO: 18935 - DNA, 254 bp, Glycine max
ccaagatccaggacaaggaaggaatccccccggaccagcaacgtctcattttcgccggaaagcaacttgaggacggccgtacccttgctgactacaacattcagaaggagagtactctttacctcgtcctccgtcttcggggtggcatgcagatcttcgttaagacactcaccggctagaccataaccctataggttgaaagctccgacaccatctataacgttaaggccttatatccaggacaaggagggttt

SEQ ID NO: 18936 - DNA, 412 bp, Glycine max
  modified_base (24)..(24): a, c, g, t, unknown, or other
  modified_base (41)..(41): a, c, g, t, unknown, or other
  modified_base (45)..(45): a, c, g, t, unknown, or other
  modified_base (49)..(49): a, c, g, t, unknown, or other
  modified_base (53)..(53): a, c, g, t, unknown, or other
  modified_base (93)..(93): a, c, g, t, unknown, or other
  modified_base (179)..(179): a, c, g, t, unknown, or other
tcgcccactcgttttcccacgctntctgtttaaatgcaacnacancagnccanggcagccccctgtcctacgtgattctgccttgcgatgganagaaccgggcaatgggttttctccccagaaatcccaaccgatgttattgttgcagttggagaatccactttttttttctatatgtntattctggcggctaagagtaactacattagattagtgattatggtattataggagagtgacctatctagaattgtagttttccaacattccttgagggcattgagtctttttttattcctttttatatttctattgtttctttttgatatatctctttttttatctcttttgtttttttctttttttttttatttatcatttttttttctccttttttttttcttgttttttt

SEQ ID NO: 18937 - DNA, 64 bp, Glycine max
  modified_base (7)..(7): a, c, g, t, unknown, or other
tcctaancgtgctaaaaggattttggctaatcgtctatcagctgctcgctcaaaagagaggaag

SEQ ID NO: 18938 - DNA, 242 bp, Glycine max
accgaggcgaccgacgcagtccgtaaacctaacccagcattgctattttattcattccatggctttgcccaaccagcgagaccgggtattaggctaggggaaactcgttatcgtcggcgatggtggcacaggaaagacaacctttgtgaaaaggcatcttaccggagaattcgagaagaaatatgagccaaccatcggtgtggaggttcacccattggattttttcacatactgtggaaaga

SEQ ID NO: 18939 - DNA, 190 bp, Glycine max
cccagagtcaaccaagcaaacatttaaccaatggctccgaggttccaaaattcggatccgggtgcattggccgtagggtagcgaacaaaaaccccttacaagaacagcatgacatatatgttatcaaacacgcatacaggaagggaatcacatgctttgatactgcggatgtttatggagccaatgctaa

SEQ ID NO: 18940 - DNA, 199 bp, Glycine max
tttcttattttcttattttttttatttttgtttttttttttttttttttttttattttaaattattttatttctttttttatattttttttctttctttttttttttttttctttttatttattttttttttttttattttttttttttatttttaattttttttttttatttattttttttttttctatttttttttt

SEQ ID NO: 18941 - DNA, 298 bp, Glycine max
  modified_base (79)..(79): a, c, g, t, unknown, or other
ttttctttcttctattttttttatatcctttttttatttcttcttttcttcctttatttttttttttttcttcttactncaattaatattttttttctttttttttttttttttttttttttttttttttttttttattttcttctttttttttttttttttttttactttcttctttttttttcttttttttattttttttttttttttcttttttttttctttttatttttttttttttttattttttttttttttctttttttttttttttatttttttttactttttttttttt

SEQ ID NO: 18942 - DNA, 107 bp, Glycine max
aattccgaagggaaagagatgttttttatgggtaatgtcgcccgcaaaagccaggtcctctatcggaatcgatttggaacgactactcttgctcgcctgtggcaaca

SEQ ID NO: 18943 - DNA, 251 bp, Glycine max
cccacgcgtccgggaggagttcatatgacatttactaggagctgcccaaaattgctctgccgctcttagcggcaagcacaagcgcacctatactgttcttcctccaacgaaagactggagaaaagaaggtatagtgagttcagttaaagatcaaggcagctgcggatcatgctggacattcagcacaactggggctttagaagcatcctatgcacaagcatttggtaagagtttcttttcttttgagcatc

SEQ ID NO: 18944 - DNA, 274 bp, Glycine max
gtaaaaagtcactgtctactgatgctcatttatcaagatcatcaaagttggaggaaaaagagaaagagcacaagcgtgatttggatggagctaaagagaaggaaagatacagggagaaatacatgggaaaatccattcaagaacttgaccttagtgactgtaaacgttgtactcccagctaccggcttctgcctgcagattatccaattcctaaagctagtcagagatctgagcttggtgctcaagtcttgaatgaccattgggtatctgtgac

SEQ ID NO: 18945 - DNA, 371 bp, Glycine max
ctcgtgtcaaaagaagcatttcgtttatcgttttctaaaaaaaatggaattgatgtgtcattgttcgttctttccgcttccggcttataatactaacacgacctgttcgctttctctaaagtacgctctcgttgttctcaaccaaagcctcccgagatttgctcttcttctttgggaccacgctcaagtgcgagtttgtgctgattgaggtgcctttttgttgttatgatgaattgccttctttttctctctatctactacctttccatgttctgactaggtacttgccttatttatttttatgtcgaccatgcttttttcttccatctattttattttgtctttatacttcttattctgcttttatctta

SEQ ID NO: 18946 - DNA, 289 bp, Glycine max
aaaaaaaagaaagaaaagataaaaaaaaaaaaaaaaaatgagaagaaaaaaaaaaaaaaaaaaaaaagaaaaaaaaaaagaaaaaaaaaaaaaaaaaaaaaaaaaaaaaaaaaaaaaaaaaagaaaaaaaaaaaaaaaaaaagaagaaagaaaaaaagaaaaaaaaaaaaaaaaaaaaaaaagaaaaggaaaaaaaaaaaaaaaaagagaagaagaaaaaaaaaaaaaaaagaaaaaaaaagaagaaaaaaaaaaaaaaaaaaaaaaataagaagaaaaaaaaagaaaa

SEQ ID NO: 18947 - DNA, 284 bp, Glycine max
aaaagccgcttgatcctgcagaaacgccagtggagtatttcccagaaaactcgtgtgatcctcgtgctgccatttctggaaccttggatggtaatggaagatggctgggaggaatttttgacaaagacagctttgtggagacactagagggatgggcaagaacagttgttacaggaagggcaaagcttggaggaatccctgtgggaatagttgctgtagaaacacaaacagtaatgcaaataatacctgctgatcctggtaagcttgatttttacgagagggtt

SEQ ID NO: 18948 - DNA, 264 bp, Glycine max
acttctcattttacttttttttttttttctcttctcttttatccttttctttctttcttatttttctttcttttttatctttttcttttttctttttatttctttctttttcttttcttctatttttttattatttttttcattttttcttttttactcttatctttcttcctctttttttttaatttttctttttttcttactatttttttcttttttttcttctttctttttttctcttttcttttttctctttattttttt

SEQ ID NO: 18949 - DNA, 310 bp, Glycine max
gcagtatcgctatactcttcatttcatggctttgcccaatcagcaaaccgtggattacccgagtttcaaactcgcgatcgtcggtgatggtggcacaggaaagacaacctttgtgaaaaggcatctcaccggagaattcgagaagaaatatgagccaaccatcggtgtggaggttcacccattggattttttcacaaactgtggaaagattcgattctactgctgggatactgctggacaggagaagtttggtggctttaaagatgtattctatattcatgggctatgtgctattataattgttgatgtt

SEQ ID NO: 18950 - DNA, 225 bp, Glycine max
agcgtttggacgccgagttgaaactggtcggtgagtacgggcttcgctgcaagagggagttattgttggtccagtacgccctgagccgcattcgtaacaacgccagaaaactattgacccttgatgagaataaccctttccttatcttttagggtgatgcccttttttgtagaatgtttcttaccgactctttgttttgacacataataagctgtattatttttt

SEQ ID NO: 18951 - DNA, 314 bp, Glycine max
  modified_base (265)..(265): a, c, g, t, unknown, or other
atttaacaatccctttctatttataagcagggagaattcctgtatatgttaaattgaattggatttgtgttttacatgttgcttgtaggctttatgttttgtctgttgattacactttcaagcaaatttgcttttaccgtgtttgatgctctgttggacttttgttctcttgtaagataccaatattttttttttccttttgcaaatttagcttgtctctatgagcagcaatagtttaactgtctcattgatttttcttacccanaaaaaaaaattatatttttatataaatattttatattttatattttttt

SEQ ID NO: 18952 - DNA, 342 bp, Glycine max
cacagcaacacctgaaaaaggaagggttagtgagtgtgtgtgtggaaattgtcatcgctcggaagagcaacaacaactagtacttaaagagacagagagtgtgcacatcaatgtctgctcaggtcggtgtcaggacacgagcccaagccgcattagccatggaagctgttagttctgctgaaccatcatccaagagaaagaagatcagcaacagtactaaccaagagccaaaactcttcaagactccgagaacgagttcttcctccgctgtcaaaccagcgacggtgacggagatggttcagccggtgtcgccggagattgttcaacaacgcttcctgagcc

SEQ ID NO: 18953 - DNA, 114 bp, Glycine max
acaatgaactcgttttgtgaccactctaatataataaggcatattgtattgctttcatacactaagaagggatttttataccacttctatatttcaccttaatacaaaacacac

SEQ ID NO: 18954 - DNA, 427 bp, Glycine max
  modified_base (116)..(116): a, c, g, t, unknown, or other
ctcttgtactgtacgtacatgttattgagcatcatcaaatatggcaccacccactgaccggagagtgatagcttcggaaggctttgatctgatagacaagttttgtggaccatcancaccaagaaggcccaataatatgaatggggtattttctgcaagacaaggacgtttggtggttcaagtgcccaatgatgagttggaagagcctatgagtgtcatcaatagcagagaggctgcagctcgctatggtgggattatgattgtgaattatcccaaaaagccaaaacttggtagatcattcaaaccttgatcattttggtttaaatataatatatacttattgcttctattatactataatgggtctgtttctagtataggccatctcatatttaaattatattaatgttattatgatcagcatata

SEQ ID NO: 18955 - DNA, 475 bp, Glycine max
  modified_base (95)..(95): a, c, g, t, unknown, or other
gaccaagaaaggccagcttaaggtcaaggtgaatacagtgcttggttcaactgcgcgaccggtaacatttaaacttgtcctttcttttagcacangttcaaaatattcaactattattgacatgcaattatcttctttattaccaataaattggatttcatgttttttattttttttctaataattttttttttgtcttcttttttttttatcttttttatattttttttttaattttttttttttatttatatattttcttttcatcctttaatttatttatctttcatttttttttatttattatttttctatttttttatttatattttcattttcttttttatatattttttttattacttatttttttattattatttattatttttcttctctttatcattctttttcttcttctcttctttaattttttcattcttattattctttttattatttttttttataattt

SEQ ID NO: 18956 - DNA, 381 bp, Glycine max
aacgcctccattatcagtcctttttcaggcttggtttttacctaaccctacaatgggccgagtcttccagttagggtttttctcttttatcaaattcttttaaatatataaacacttattatttttttcttatttctcatttataatttatttttattttttctacttattttttttttacttattattttcttttttattttctctttttatattactcttatttatatattttttcctttttttttttttattttttattttttatattattattttttattattttatctattatttatttatttttattttttattatatttattttatttatttttaatatatttttttatattattatattttttttttattttt

SEQ ID NO: 18957 - DNA, 431 bp, Glycine max
cgggtcgaccacgcggtccgccacccgtccgattttgttcctcacccagtcaccaaccccgttgtccggagccaccattgtgcgcgcgcggcaatgttctttccggtggccatcgtcccttaaacccaccacactttaaagtcatgggtatttcatgggacgacgctcctgtgatccagcaaggggaggatcacaatgagccctgcatcgtcacccgcaattgccccgacaaggctggtctcggctgtgaactttgcagaaacaatctcgagttcggtctccccattacccgtgctgatattttcacggatggaagatggtgctacatccactattgggttcttgcacatccagcatcgctcaacgttgattgggagagtttgaagactctgctcctttcagcttgcccttcatgtttgctttcctatcac

SEQ ID NO: 18958 - DNA, 426 bp, Glycine max
cccacgcgtccgcccacgcgtccgtcttcattgtgatataaagccagataatatgttggtaaatgagtctaaaaatgttttgaagctttgtgactttggcaatgccatgtttgctggtaaaaatgaagttacaccatatcttgtgagtcgtttttatcgtgccccggaaataatacttggcttgccatatgatcatccattggatatttggtctgtaggttgttgtttgtatgagttgtatatagggaaggttcttttcccaggtcttacaaacaatgacatgctacggcttcacatggaactgaagggtccttttccaaagaagatgctgcgtaagggagcatttactgaacagcattttgatcaggatctgaattttcttgctactgaaggggatcctggtacaaaaaagaccataaagcggct

SEQ ID NO: 18959 - DNA, 351 bp, Glycine max
aacataggtaggggcaatttgaaaattgacatatcagatgagcttgcccggattgctgatatggtaaccaggtacgattgctcgaaacaggaagttgaaagagtgattgttagctatgagggtgatcttgatagggctgcagagaccttgagagagttgaaacttgatccaccatctgctccaccaaaaccagaaggaaaccggtgatcctcctattattaacaatgttaagcagtcaagagttgcaagtcagaagctaaggccacaaacaaaacccattcctttaccaaatcaacccaaaaaagatgacaaggattttaactatacaaaggctgcattgactattggagt

SEQ ID NO: 18960 - DNA, 279 bp, Glycine max
gtttgaagattcttacagacaaattagctgctgctctgctgactattagtgcaaaagaagagttaggaaagcagcattctaaagttgcagaacaagccgtctcaggctgggagaaggctgaaaatgaagtgtcatctttaaaacaacagcttgatgctgcaaggcagaagaactcaattctcgaagatcgagttggtcatcttgatggggcactcaaagagtgtatgaggcagcttctacaagctagagaactgcaagagctaaagatggttgatgctg

SEQ ID NO: 18961 - DNA, 354 bp, Glycine max
cccacgcgtccgtgtgtgtgttttgaagagcgaaacagaagcagaagctctttgtgggtgtgctatttttggaattttctgctctttatctcatttgaaaaccccagctttctgaggctcgtgatcttaattgtgaagatggattcaaattcaacaaatgagaatctgcataacattttttttgtttcagattgagcttaactttaagtcttgttattttcaaaaatttcatgctctatttaacctttttctaaaattttacatgatttgtaagagtctaatacctaacatttttttagggttttataatattgactatatttttatcccttcttaaattggattatcttttaa

SEQ ID NO: 18962 - DNA, 369 bp, Glycine max
cccacgcgtccgactttttctacttaccttttctcttaatccaaatacgatggcaggcatggcaaccacaaccctctcttcaaaccccaaactctcattcttcaacggaaagcccgtcacatattcttcccgcgtcgcgcccaccaccaaattatcctcatccaaacaaggcacaatttccatgtccctaaccccacccccctacgaccttcagtccttcaaattccagcccatcaaagaatccatcgtgtcacgggaaatgacccgccgctacatgacccacatgataacctaccccgacacccacctcctaatcgtccgaacccgttccgcccggctcttctgcgcctaccaacctaacaagaaccc

SEQ ID NO: 18963 - DNA, 154 bp, Glycine max
attggtgctaaaggtaacatctataaccggatggagaaagaaactgatgctaaaattgtgggttgtagtataggatcagtgaaagactttaaacttcaactaaataggtatttgaaaccttatcctttaaagaatgtacatttgcatgcgttaa

SEQ ID NO: 18964 - DNA, 407 bp, Glycine max
cccacgcgtccgcggacgcgtgggttttcgaactgatggcgaacagttcctcaagtatccaccacctaaagtgatgcaggtcgacaagtctgcatggatgactgatgaagaatttgcaagagaaacaattgctggtttgaatccaaatgtcatcaagattattgaggagttcccactaagtagcaagctagatactcaagcctatggtgatcatacctgtataataacaaaagagcatttggagcctaacttaggtggtctcactgttgagcaggctatccaaaacaagaaagttgttcatcttagatcaccatgactatctcattccaatattgaggaaaataaatgcaaataccacaaagacttatgctacaagaaccatattttttttaaaaatgatggaactt

SEQ ID NO: 18965 - DNA, 235 bp, Glycine max
ggaatactacagagaattggggtagcatatttggttgccgcactgtgtgaaatttggctcagagagtgatgatactgttaattcaggaccatccctgttaaggaagtatcggtaccagtgggctgtggctttgattctttctttcctttatctttgcttgctatatggattgtacgttcctgattgggtgtatcaaattcaaacagaaccttcttcagagccaaaaacattttca

SEQ ID NO: 18966 - DNA, 405 bp, Glycine max
cggacgcgtgggcggacgcgtgggctgaaaatgaaagttataactgacaatgacagatacagaagagggaaaattatagtaaatgacataaaacaaaaacaagaagaattatatcagagagatacttgagaagggtattctgttacatctttgcaccttacctcacctcacatgctgccatggctgttcagatcaaaaatgcattccttcctgtttcacacgactggtaggttgtacaaccaaaacagaaaaggctggcctatgaatttctggttttaatctttcaagttgactgctcattcaaaatttggaagacacaactggcctttttctggttcctggcttgtgccaagttatgcatggctaaatatgggctggtactctgggtatgcagaggatacattg

SEQ ID NO: 18967 - DNA, 420 bp, Glycine max
gcggcacgcgtccgctctaacctacctctttttcttctctctcaacaacttcaccttcttcctcctccatcatgtgtcactgcaagggcaagtaccatgatgagcttatcgccaatgctgcgtacattggcactcctggaaagggtattcttgctgctgatgagtcaacagggacaattggcaagcgtttggccagcatcagtgtagagaacattgaatccaacaggcgagctcttagggagctgcttttcactgctcctggtgttcttcaatatctcagtggtgtcatcctctttgaggaaaccctctaccagagcacagctgcaggcaagccctttgtgaatgtcttgaaggaagctggtgtgcttcctggcatcaaggttgaccagggcgcactctagcttgctggaactaatggag

SEQ ID NO: 18968 - DNA, 302 bp, Glycine max
  modified_base (220)..(220): a, c, g, t, unknown, or other
ggagaacaagaagaaaaaaccgacacaaagatctagtcctagctagaatcaaacaggggcgatctcagcttcaagaacacatcgccatggcaaggaacttgcttcttgtgctttttgcagtagccaccctcctccatggctcagcagcccaaaccagacacatggtcggtgatgccacgggctggatcatccctgctggcggcgctgccacctacaccgnctgggctttcaacaaaaccttcaccgtaaacgacactctcgtgttcaactttcgcaccggccaacacaacgtggccaaaggt

SEQ ID NO: 18969 - DNA, 346 bp, Glycine max
  modified_base (60)..(60): a, c, g, t, unknown, or other
gcgcccacgcgttcgatcttctgcgaggcatatatgcttatggttttgagaggccttctnctaggcagcggaggggaattgttcctttcttcaaaggactggatgtgattcaacaggctcagtctggaacaggaaagacagcaacattttgttctggaattttgcagcagcttgattatggattggttcagtgccaggctttggttttggcaccaacaagggagctagcacagcagatcgagaaagttatgcgagctcttggtgattacttgggagttaaggtccatgcttgtgttggtgggacaagtgttcgtgtggatcatctcattcttcaagctggtgtcca

SEQ ID NO: 18970 - DNA, 260 bp, Glycine max
gcaaaaacagaatcactctgttctctctgttcaaacagagtttgcataatactcagtgacagcacttttcttcctttcttcaacttcattacaaaactcttactcttatttcatgcttccaaatataaaaacctttttactattattttctataccaacactttctttctttatttacaaagttaatttctccttttagttagtcacacaaaacaaaacactttatttgtttcttcatctaccctttcacaaattgactt

SEQ ID NO: 18971 - DNA, 419 bp, Glycine max
gcagcatcgctatactcttcattccatggctttgcccaatcagcaaaccgtggattacccgagtttcaaactcgttatcgtcggtgatggtggcacaggaaagacaacctttgtgaaaaggcatctcaccggagaattcgagaagaaatatgagccaaccatcggtgtggaggttcacccattggattttttcacaaactgtggaaagattcgattctactgctgggatactgctggacaggagaagtttggtggcctcagagatggatactatatccatgggcaatgtgctattataatgtttgatgttactgcccggctaacatacaaaaatgttcccacctggcaccgtgatctttgcagggtctgtgaaaacatcccaattgttctttgcggtaacaaggttgatgtcaagaaca

SEQ ID NO: 18972 - DNA, 281 bp, Glycine max
  modified_base (49)..(49): a, c, g, t, unknown, or other
  modified_base (87)..(87): a, c, g, t, unknown, or other
  modified_base (89)..(89): a, c, g, t, unknown, or other
tccttggtaaaagagtttaaaaaagcaacttttcaactgtacccctaanggatgaggtccgtgaaaatactaggctatttatcttcnanacatactctataatacaccaactcatttacatgggagttcttgcttagaagttaaattttaattatgaggaggcttagagatggattgttaatttcattctgagctcaaatctttgatccaaaattgatttctaatacttgatctattattattgaacctatttttcttaaatatttttatcatcttttttt

SEQ ID NO: 18973 - DNA, 294 bp, Glycine max
cacaccaacattcactacacacactctaataccttacgattttcaaggttgatagagcacgattgtttattacagtctttataagattaccttctaaccaaatcggaatgaccttatctacatgatcctctctatcacccattgtcaaacaccaacctttttgcataaaaactattctttacgcgtgatgggatcattaccttagagtgctgatgactgaaaataaaccccttgatcacattaacaccggttctccagtctcttcactgattcaacatgcagaagaaccattat

SEQ ID NO: 18974 - DNA, 248 bp, Glycine max
cactcatggaccccaaaaacgtgaaatcggacctggttctcattctcgattacggtgcccagtacacccaccttatcactcgccgcatacgcaacctctcggggatctacctaagcatctacggcaccatctgtctttcaaccatcaccgacctgaaccccttcgtcagcattctctccgggggccctcactccgttcacaccccagactccccccccccccctatgaatcaattttactaatattat

SEQ ID NO: 18975 - DNA, 368 bp, Glycine max
caacaattgctgctgcagtttatcttagaatggcaggaaggccacctgtgcttcgggctcaggcacctttcttacacagagaacttcctatatatgctagattcttttggtaatcggtcatataaacccaatcctcggctaactcgtgtgctagacattatcttcatcctgcatgcagaacatgaaatgaattgttctacatctgctgtccgacaccttgcatcaagtggcgttgatgtatacactgctattgccggggctgttggagctctatatggaccacttcatggtggagctaatgaggctgttcttaaaatgctgagtgaaattggaactggtcagaacattccaaagttcattgaaggaaa

SEQ ID NO: 18976 - DNA, 431 bp, Glycine max
acttcttcttcaaaaacacacaaacacactacactttgtctctgttctgtgtgtgcgagaaagggcggtggcaatggcgcttcgcaggctttcatcttcaattgacaagcctctgcgccctctcttcaatgccggttccctctactacaagtcgtctttgcctgatgaagctgtttacgacaaggagcgacccggagttacatggccgaagcagttgaatgctccacttgaggtcgtggatcctgagattgctgatattattgagcttgagaaagctaggcaatggaaggggctagaattgataccgtcagagaatttcacctctgtgtctgtgatgcaagcggttggatcggttatgaccaacaaatacagtgaggggtaccctggtgcaagatattatggtggaaatgagtatattgacatggcttaaa

SEQ ID NO: 18977 - DNA, 361 bp, Glycine max
ttctttcttaatgcctcctggccaggggttaaaatggcccaagaaacttttctattcacatctgaatcaatgaacgaggggcccccttacaagctttgtgaccagatctcctatgctttgcctcaatcatgctttgagcaagacccttacagcaagggtggcttgttaaccttcaccaaaaccaacatggtgatgggtttcggagagatcacaaccaaagccaacgttgactattagaagattgtgcgtgacacatgcaggaacattggttttgtctctgatgatgttggtcttgatgctgacaactgcaaggtcctcgtcaacattgagcaacagagtcctgttattgctcaaggtgtgc

SEQ ID NO: 18978 - DNA, 212 bp, Glycine max
agaaattgccacctgaagcacgtctaatactggtgaaccaaacacaaaattccatccaccacttttcttttcaatccccaactcaaatctgtgaagaaaaatctaatttctaaattgtaattcttagcactactgctagtaataataaaaaaaaacaattataaagttgtagaggggttttttttctttttttcggttgttttacttttaaa

SEQ ID NO: 18979 - DNA, 161 bp, Glycine max
gtgttaacttctacaggttatcagggtgttctttacacatatgtgcttccgtctgttgcacggccggcatacaatgcagtgaattacacaccaaatggtgctgcttgaggaaagctccataacagcaaggaggagcggagtaactcatttaccatgggtgt

SEQ ID NO: 18980 - DNA, 430 bp, Glycine max
gcgtacgcgataatgatgggttcaaacccaaaacctcttgtgcacctttgtctgcttctcctggtccggttttgttcctcaaccgaatccctgagatttgaaatccaatccgggcacaccaaatgcatctccgaggatatcaagagcaattccatgaccgttggcaagtaccaaatcgttagccccaacgagggtcaacctctgccagatgcccacagattcaccgtcagggtgacttcgtcttatgggaacaactatcactacggggatcgcgttcagacggggcagtttgcgtttgctgcagtggaggctggagattacatgacttgcttctgggctgtggatcacaaccctgtggaaacgttgactgtggattttgattggaaaacgggtgttgcggccaaggattgggcaaaagttgcttaaaaag

SEQ ID NO: 18981 - DNA, 472 bp, Glycine max
tcgcccacgcgtccgcttttattacaggtttggtctcagggttcactttaatagcaggggcagtgtctatttaataattttgatatttaaatgtttcatatagtgtactttctataatttatattaatatatttatagaatttttattttttttcttttattgtatttttttttttttttttatattttttatttaattttatttttttttttatttttttttattattttattatattatttatttattttttatttttttttttatttttttttttttttattttgttctatttttttatttttttattttttttttttttattttattttattttattttattttaatttttttttttttttttttattttttttttatcatattatttttttatatttttttattttttttatatttttttttttaattttttatttttttattatttttttttatttattttttttt

SEQ ID NO: 18982 - DNA, 358 bp, Glycine max
cttgttctactttttattatcactgttgcatttatttcagatatttagtatttgcgtacgagtttgttctttagtttaaacacagacaagacgactctttatggcggctataaccaatttgaacttttcttccttgtgtaaaaaaaggttttgtgtgcgtttgtgcgtgttggagttggctttttgaagtgggtgcatgctgaagttatatgtgtatgtgaaagatgaagaacaattgagattaagaaaagggttacgacgtttaccagagttacagacagcattacacgttgtcaatgccaatgattgtttttggtttgaacagaaagaatgagatgtcagtctatttttttgcttt

SEQ ID NO: 18983 - DNA, 425 bp, Glycine max
cccacgcgtccgcaccacaccaccattattcatatctcattctctaacctttcactctgcggtactcactctctactttgctcatcatcgtagatgaaccaacacttctagtctctcttactttataaccatgtaaaaatgagtcacctaatgaaaaattagtagcttcttgttgtgctttttattttgtttgtgttgagataaatttgtttgtttgtttggtattgttttgggttttatgaattatttgatgggtgaagaaggagaagtggtgagaaagcaaggacaaaagggtgttggtggagataagtggtacttggatagctgcttacaagactgtaaatattggtgctgtttaatacacgaggctagttctttttcgatgggtcctttggagtgaaaatccttggctttttagctttttt

SEQ ID NO: 18984 - DNA, 383 bp, Glycine max
aaggatgtcaagcaatttgcattctgtctgcaaatggcacaatttcaaatgttacactacggcaaccgactttttctggtggtactttaacatattaagggcggtttgaaattctctccttggctggttcataatataacaacctggacaaattggattaaacaaaagagccaaaatcctggtgggaatgagcatctcttttggccgctccaaaatggtcgagtaaattggggggtgggattggctggtttgcttgtagctgcaagtactgtgcaagttgttgtggctagttttgttcctggtcatcagctggagcaacagaaaccaaataagccgagagtggagcatatattaaatgctgctccgacgtatgttaaccctac

SEQ ID NO: 18985 - DNA, 374 bp, Glycine max
cggacgcgtgggtgaccaccgactttcacgggcaaagttcttctttattgcactagtgtggagtttttcgtggtatggtgtccctggatacttgttcacaacgctcacaaacatttcatgggtgtgttggatattctccaagtcagttacagctcagcagatagggtcaggcatgaggggccttggagtttgtgccctcacacttgattgggctgccgtggcatcattcttgttcagccctctaatctcacccttctttgccattgtcaatgtttttgtgggctatgcattaattgtctacgtggtcattcctgtatcatacttggtgcctaatgtgtacaatgcccataggtttcccattttctccttacact

SEQ ID NO: 18986 - DNA, 265 bp, Glycine max
gagagagagagagagagagaagcgttaatcttaatgggttacatccaccatggaagaaccggtctcaggcacatactcagattcataaccgccaccggcgtggtctcaaacttcggcagatcgcaatcgcgcgctgcattcccctcccatttccctatccttggcaacgtgctttttttttttaacaggcgattaataccttaacgaaattactcgataagttgaactctacttgcgcagggagcgaaactagcgtttgtgcctt

SEQ ID NO: 18987 - DNA, 341 bp, Glycine max
cccacgcgtccgggcttagctacattcgttctcatgtaagaggtgcacttcccattgtagagccggttgatcctgcagaaagaccagtggagtatttcccagaaaactcgtgagatcctcgcgctgccatttcgggaaccttggatggtaatggaagatggctcagaggaatttttgacaaagacagctttgtggagacactagagggatgggcaagaacagttgttacaggaagggctaagcttggaggaatccctgtgggaatagatgctgtagaaacacagacagtaatgcagataatacccgctgaatccgagccgcttgattcttacgagagggtt

SEQ ID NO: 18988 - DNA, 392 bp, Glycine max
  modified_base (21)..(21): a, c, g, t, unknown, or other
atctgaaacaagcatggagtntggaaatggtgaattcagctcataggagctaaagaaaatagaggagggcgataaacttgctgaaattgccatggccgatcctaagcgtgctaaaaggattttggctaatcgtctatcatctgctcgctcaaaagagaggaagatgcggttcatttctgaattagagctcaaagtacaaacacttcatacagagacaaccacatttgtctactcagtttaccaaattacaggtgtgtacggtctgagttgagccataattctcttttctttcaggttttaataatattttattgtgtggaataatgtttgctttctagcattcatttattcttttttttcctttcttttgatgtgcttgtctacagatggat

SEQ ID NO: 18989 - DNA, 373 bp, Glycine max
caaacctaacgcagcatcgctattctcttcattccatggctttgcccaaccagcaaaccgtggattaccctagtttcaaactcgttatcgtcggcgatggtggcacaggaaagacaacctttgtgaaaaggcatctcaccggagaattcgagaagaaatatgagccaaccatcggtgtggaggttcacccattggattttttcacaaactgtggaaagattcgattttactgctgggatactgctggacaggagaaatttggtggcctcagagatggatactatatccatggacaatgtgctattatcatgtttgatgttactgcccggctaacatacaaaaatgtttccacctggcaccgggatctttgcag

SEQ ID NO: 18990 - DNA, 417 bp, Glycine max
taaatattccggtttgcgtatctctgcctaaaaggattgaaagatgggtcaagcgctagggggctatcaagttgatcagtcaaatgtggctatcaaggagcattttggaaaatttgatgatgtcctagaacctggatgtcattgcctgccttggggtcttgggtaccagattgctggtagtttgtcactgcgtgtgcagcaacttgatgttcgatgtgagacgaaaaccaaggacaatgtctttgtcactgtggttgcatctgggcaataccgagctgggtctgagaaagcatttgatgcattctataggcttaccaacacaagggagcagatccaaatatatgtttttgatgtcatcagggccagggtaccaaaggtggagttggattcctgcttttgagctgaagaatgttttat

SEQ ID NO: 18991 - DNA, 315 bp, Glycine max
aggaataattacagggtccactgatggcctgctacgtttttgggaaaatgatgatggaggtatacgctgtgcaaaaaatgtaacaattcacaatgctgccatattatctatcaatgctggggagcactggttaggcattggagcagctgataattctttgtcgctcttccaccggccccaaaaaagacttggtggttttcctggcactggtgttcaaaatggctggttgaccaatggccatgtctttgttactgtgggttgttttggtcaggtgtgttgctttagacttggaaaggaaaaggatatgcagcggtg

SEQ ID NO: 18992 - DNA, 383 bp, Glycine max
gaacaaagcacttagtgctattcaataattacgaaaaaccaacagcgagtgttggtggggtttggtccaggctggaccagggaatgaatagagatgagaggctttcggttgaagagaactgagttaagcggcgaagccaaacgcagaatcggcggcagaaattgccaccggaagcacgtcgaagacgggtgaaccaaacacaaaattccatccaccacttctcttttcaatccccaactcaaatctgggaagaaaatctcaatttctaaattgtaattcttagcactactgctagtagtagtaaaaaaaaacaattagaaagtagtagagtgtttttttttctttttttccgttggtttacttttaagatgggtgagaagagc

SEQ ID NO: 18993 - DNA, 273 bp, Glycine max
cccacgcgtccgcccacgcgtccgcccacgcgtccgcgtcattcctttccttattggcttggtagcatacaatgaatcacaaggcacctagtttttttctggggatggatgtgaagagaatcatgggtggtgatagagatgggaacaccaattgggtgattaatgaagatggtgaataagatagcaatgattcattatccattggactcaactcaatggactttatgtgcttgtcttttttattagagcttaactaggtctctttaatttttt

SEQ ID NO: 18994 - DNA, 187 bp, Glycine max
cccacgcgtccgtgaacgtctgggttgccctcatgggcgccttcctcatcttgctggcttggcgcctctgtcatgcctacttctttcttcccttacacctggtttccttcgccactctgcttatggttctgctcatgattcttacctgttttccccaacaagccttttttcaccctcatccttcaac

SEQ ID NO: 18995 - DNA, 137 bp, Glycine max
actctaagtccttagtgcaaattttattcttccagttagttatacttacaaaattttgtgtttggcttaaaatacacatactctactattttatattattttattccacttactactctcccaaataaagtattttt

SEQ ID NO: 18996 - DNA, 102 bp, Glycine max
ccaacccttcttaaaacaacaaaagttttgtttttttgccaccaaaaacaactccctccagggtctggaattttaaaagaaaaaaattttttatttaattta

SEQ ID NO: 18997 - DNA, 363 bp, Glycine max
ttccggtaactttttaattcctaaattctctaaaattcgaaattctaatttcgttagggaaaagaaattggttgtttataagtgagtatttcttgaaaaagccagggtccttctatcggaatcgatttgggaacgacgtactctttcgtctgcgtgtggcaacacgatcgtttttaaatcatagccaacgatcaaggtaacaaaactaccccatcctactttgctttcaccgacacaaaacggttgatctgcgatgctgctaaaaaccaagttgctattaacccaaccaacaccgtttttgatgctaaacgttttatttgaaagcgttttttctattcatcaatacaaggttacattaaattt

SEQ ID NO: 18998 - DNA, 335 bp, Glycine max
tatctcacgccgaagaccgtgcgttgaaatcttgcaaggacgagatccaagcatcgggggttgtgcttcccagaatggacgctcttcttactatcatcaagatacaaaatggaatatcgacggaccagtggtagtgcaggaaaccggttgccgtgacagaagacaatctataagggaacaggcatatcaggactctcttattgaggatttgtcacaagattttttgtttgccaatcaaccacaggccaacagaaaatgttgatctggacaacgtaaagcaagcatcttttgacacacagataacatcatctaatattggctttaagcttcttcaa

SEQ ID NO: 18999 - DNA, 392 bp, Glycine max
cccacgcgtccgggaggagttcaaaagacacagactaggagctgcccaaaattgctctgccgctcttaacggcaaccacaagctcaccgatgctgttcttcctccaacgaaagactggagaaaagaaggtatagtgagttcagttaaagatcaaggcagctgcggatcatgctggacattcagcacaactggggctttagaagcagcctatgcacaagcatttgggaagagtatctctctttctgagcagcagctagtggactgtgctggccctttcaacaactttggctgccatggtgggttgccatcacaagcctttgagtacattaaatacaatggtggactagagacagaagaagcatatccctacacaggaaaagatggtgtctgca

SEQ ID NO: 19000 - DNA, 326 bp, Glycine max
ggagattcacttcatccatgtgaaattctattcaatcggggtttatttggagccgggggtaggaggccacttggaccagttcaaaggaaaatctgcaaaggagctggaagataatgaagagttcttcaatgctctcatttctgccccggtggagaagtttattagacttgttgtgatcaaagagatcaagggtgcacagtttggggtttagattgagactgcggttagggataagttgtttgctgatgacatatatgaggaggaagaataagtatctttgtaaaatgtttatgaatttttttagtccaagtacttttataaacttt

SEQ ID NO: 19001 - DNA, 421 bp, Glycine max
ctcgtgtcaaaagaagcatctcgtgtatcgtctcctaaaaaaaatggaattgatgtgtcattgttcgagctttcttcttccgccggagaatcctaacacgacgtgttcgctttctctaaagtacgctctcgttgttctcaaccaaagcctcccgagatttgctcccctgctttgggaccacgctcaagtgcgagtttgtgctgatggaggtgccaatagggtgtatgatgaaatgcctcttttcttccctcatcaacaaccttcccatgttcgcaccaggtacaagcctgatgtaattaaaggggacatggattcaatcaggacagaagtacttgacttctatgcaaagctgggaactaagataattgatgagtctcatgatcaggacaccacagatttacacaaatgtgtggcatacata

SEQ ID NO: 19002 - DNA, 373 bp, Glycine max
cacaatccttcgatttgctttcttcaacgcacccacttatatttcttaaactagttttccagagagccgggagcactgtacggtgccgatccaatatacaggtctgtaaagccttgtttgggacttcccaaagacccccacctttcccttgattgatatgttttgcaaagcgtatactcttttgcatgcaaaatcgccctcgtcgattcccactctttccaaacacttaccttggcgcacctgaaattacaagtcgccacaactgcccacggtgttcttaaaactggctttaacaaaaacgacgttttcctactgctcgctcccaacagcatccactaccctatattctatcttgctggcaccgccattggcg

SEQ ID NO: 19003 - DNA, 261 bp, Glycine max
cccacgcgtccgcagtttttacatttttttttttttataatttggatgatggttaggcacatatctgagaatttttacgaatatcacacccattgtcccttatagggttcgagtatccttttttgaaaaacaagttcgggttaacattctcgtctattggagatattgatctgttatatatggtgtccatactttctcttattttttatcattgaaagaaataggaaattgaatcagattatgttcaactttttgcactga

SEQ ID NO: 19004 - DNA, 431 bp, Glycine max
cccacgcgtccgggtggatcaaataattcgggggacgatgagaggggtagaatcgaagaaggtgaacgtagcttcggcggtaaccggtggccacgacaagagactttggccttgttaaggatacgctccgatatggacgtggcgtttcgagatgcaagtgtcaagggtcccttgtgggaagaagtatccaggaagatggcagagcttgggtatcacagaagctccaagaagtgcaaagagaaattcgagaacgtgtacaagtaccacaagagaaccaaagaaggccgaagtgggaaacaagatggcaaaacctatcgtttctttgatcaactacaagcccttgagaaccacttttcaacaccccaattttccaacccttcaacaaaaccctcacaatcagcaccatcaagagtagtagcattatcggtgtc

SEQ ID NO: 19005 - DNA, 325 bp, Glycine max
cccacgcgtccgggcttagctacattccttctcatgtaggtggtgcacttcccattgtaaaggcgcttgatcctccagaaagaccagtggagtatttcccagaaaactcgtgtgatcctcgtgctgccatttctggaaccttggatggtaatggaagatggctgggaggaatttttgacaaagacagctttgtggagacactagaaggatgggcaagaacaagtgttacaggaagggcaaagcttggaggaatccctgtgggaatagttgctgtagaaacacaaacagtaatgccaataatacctgctgatcctggtcagcttga

SEQ ID NO: 19006 - DNA, 371 bp, Glycine max
gtccgggtgattcttattggggatcccgccagcccactttccggaagctctgagtcgcctcaaggcaaagatcttcacacccccccctcttcgcttctcttgtccgcagaaagctctccgccgcttctttccatctttcataccatggtggggttcaccatcaccccccgggtttataaattcaaattcaaattcaaattgtctctcttgagtctcaactcacttacccacaatcttttccacactgtaatgtgatcccttcgcaccaccttcgaatggatccctgggacaacaattccatcgcctttttgcacttcaaccaagcgctccaaaccaacccaatgatcctgcattttacattccctgaattc

SEQ ID NO: 19007 - DNA, 409 bp, Glycine max
gggcgaccacgcgtccgcacgcgtgcgccaaaaggagcataagcagccgatttatacaagtaaaggcaaacgaagctgcccaaattggctgggggagaaggatatcaaccacatttaatacctgatctctctgcacgtacttaatgtggcaccaagcaaattaatcgtacgagcaatgaaagcaccagctatcttgtctgaaactccgaggaactagccatccaaaacactcacttcactaactctcaaagacaggagagtagtacttagtgatcaaaaacttctgtttaagcacatagtgaaatttgagtactgagctttggtggctctgttctgcgcttaatatattcagcagaaaactccatgtgatgttggagtggatactgataatgagatactacttttgctg

SEQ ID NO: 19008 - DNA, 449 bp, Glycine max
  modified_base (23)..(23): a, c, g, t, unknown, or other
  modified_base (51)..(51): a, c, g, t, unknown, or other
  modified_base (53)..(54): a, c, g, t, unknown, or other
gtggatttcaatctcgtttagancctcccttttttatttttaaataaaggncnntatatttgtgcattgctttgagtggattgggcataatcatattatcaatttttcattcatttaaccaggggtgtaagaagaagttgaggtgatggaaccccaggatgaagaagagatccataactgtttgatcaagctggttgctttattgttccttaccttgggttatctttctagttactgtctttaatgcagcatcaatgctagtgaaggaattgactctattgttgataatgcattacagagaagtaatccggaaaggcgaatggataatgtgtacattggttgtggagcttggtttggtggttacaagcccttggctgcttttaaattgcttcaaagagttcaagaactaaaatatcttgttcttgaatgctttgccgacctaacttttt

SEQ ID NO: 19009 - DNA, 389 bp, Glycine max
gcgagctatcattcactttccccatccatccattttccgattcctaaccctaatcctccatcagcgatttgactcgattgtctcgcggtctgttatttccttcaaagcaaaacaattccatcgatgaatcgggcgtcgcagctttcgtgataatgatcttggcgctgcgaatcgattgcatgggtttggagaatgccggagcttcttagtggaccgcgacgacgtcgtgctccggttgctcgtaaaagctccgaaccaccgtcttcggccgggagatactgtaagactcgcgctgcattcgccagataggcactggcggttgagaggccaataactcgtttggcggcctaaaaagaggagaattcccttataataatatccgatcacac

SEQ ID NO: 19010 - DNA, 350 bp, Glycine max
  modified_base (49)..(49): a, c, g, t, unknown, or other
ctcatgttgaattcttgagaggagttgctatttcacttggcatcaaagngagtggtaaaatggtacccgatgaacgggttaagcttataaatattctgaaccctaaaaacaagcctggaagaattacagtcattgttatgaatgggagctgagaatatgcgagtgaagctttcacatcttattatggcagttctcatagcaggtcaaattgtcactttggttagtgaccccatgcatgggaacaccattaaagctccattttgacttaaaacccgctctttttattcaataaagtcttaacttcagttctatttcttttgtttttgcatttttcatataatagaagctta

SEQ ID NO: 19011 - DNA, 301 bp, Glycine max
gcccaaccatccgtcgccacgtggtggaatgtgtcccaaaaatactaccaactcataaagtgatcaccaaaactgggcctcagtctcggtacccaaatcctcgactagaactactccctaggaaaattactcaccaacgacaacattgttagtttagcatccaagggtgccttgaaagactccatcaacgttgttctcacattctcggacgtaaccgttgaaggatttctgtccagtatgttcgggacccatggctcctctgtgggttcttgcaagtttgcttacatttgggtggggaact

SEQ ID NO: 19012 - DNA, 245 bp, Glycine max
  modified_base (27)..(27): a, c, g, t, unknown, or other
  modified_base (103)..(103): a, c, g, t, unknown, or other
cccacacgtccgcacacattattttgngtccttcctcactctaaaaccgccattggcattgggatagcgaagaaggggaggtccgtaaccacgcgccttgacnaagtggatcgaaccatgtactcgactttctgcagcaccgtcaacttcttctctcatctttacacccactccatgaatcaacaaaaactcttatttcaggccggtgaacgacactcttttgaaaaattgtatcattggattct

SEQ ID NO: 19013 - DNA, 81 bp, Glycine max
gttcgcccacacgtccgaagctaataagcctacagtctgttgacatgttcccacacacccctcatagtgaatgtgtttgcg

SEQ ID NO: 19014 - DNA, 313 bp, Glycine max
gcgcccacacgtccgtccacgcgttcgtttatgtttatccttttttctctcctataaaaacaccgacacacggatttttacaacgggtgcgtgatctgactcacaaatcatcctcctattcctcggtcgtagcctgttgttccctctttcatcttttttcgccgtcacaacatccactaccatggtcgaaaccagactcggcgcctcttctttcaagcgttctctctctttgccttcttctgcgtccaacaccaaactatccaatgtgtcttaggatttctctgttgcggctctcgtcaacgaatcttgaacc

SEQ ID NO: 19015 - DNA, 272 bp, Glycine max
cgacgcacgcgtgcgaaccggcccaatttagcataagcccagcatgttcaccttaacagcagcagccacctcctccgtcatggggacacgcctactggaggcccactccaaaacggaacggatgcaagcccggttcgggtttggcaagaagaaagccgccgccccgaagaaagtttccagggggtcgggctctagcttctataggcccctgtggtattcgggcgccaaggtgcccgaataccagtatgtgtgccttgtctgtgactacggat

SEQ ID NO: 19016 - DNA, 351 bp, Glycine max
ctcagatattgttaaaaaagcaattgaaaattcagagctatttgtgatgaagcctcaaagagaaggaggaggtcttgtaccacttaaactttgactcaacactgttggaaaaaaatgtccgggagagaaacttacacaatgagctgtaattacttttcaggaaacaatatttatggtgatgagttgagggaaaccctccttaaattacaggaagcaggttctcaagaagatgcagcatacattcttatgcagaggatattttccgccacttctccagcaattttggtgcgtgatggtaattgggatacgggtcatgtcatttcagaagctggaatatttggtacttattta

SEQ ID NO: 19017 - DNA, 409 bp, Glycine max
  modified_base (51)..(51): a, c, g, t, unknown, or other
ggctatggaaatgagaatgtagatggctggtttgaactgtacagaggcccnagggccaagggtggcaggaaccaaaaaggtggtgcaccaactattttggcagtcaaagggcagaacttgcctgcaagtttaggcaccgatgaagagaaagacaagactagtaccgttccggaccgtgatcagtataacaaagctgattttccagaagaatatactgatgctaaattttttgtcatcaagtcttacagtgaggatgatatccataagagtattaagtataacgtgtgggccagtacccaaaatggcaacaagaagcttgatgctgcatattatgaggcacaacagaaactctggggctgccctgtttttctttttttctcagataataccagttggcaatttgtggggc

SEQ ID NO: 19018 - DNA, 354 bp, Glycine max
gtttcaaacctgcaatgctcccctccccttttaggtcctcctccattgattccgaatatggatgtacatagcacgcgtgcggattttgaccaaagctaaacattattctgatgatactgttttttcaccttgcacctgcaggttgttctgtgaatttcgagtttttaaactacacagcaatcacaagcaaatgcaaaggaccccggttccctcccaaagaatgttgtggggcttttaaagaatttgctttgcccttatgccgatgtattaaatgatttaacgaatgagtgtgcatcaaccatgtttagttacattaatctctattgaaaatacccttctggcctcttttttagt

SEQ ID NO: 19019 - DNA, 284 bp, Glycine max
  modified_base (94)..(94): a, c, g, t, unknown, or other
cccactcgtccgcgtttctggcttttcgggtttagcaatggccggaaaacatgtcggcttgggtttactggcttggctcgctggaatttcaaanaatcatctctactatattatgttttatattaatgtacttactttacttttttttttttactcttcatcattaacttttctcttaccattttctttgttgttcttcataattttctcttacatattctgttttttgtcctgtctaattctctttttttatttttttttttaccatattctcttttttcttt

SEQ ID NO: 19020 - DNA, 187 bp, Glycine max
acggcaagcgctctctttctttgcttttccttccccctttcagtttcttcaacgctgcaactatccatggcagaccgctggctcagacccgaggtgtatccactgttcgctgcgggtggtgcctgctgtgggatctgtggataccaattggttcgtaatatctttatcaaccctgttatttattgtg

SEQ ID NO: 19021 - DNA, 307 bp, Glycine max
cccacgcgtccgcccacgcgtccggaaaaaaagcaactacatcagtccatggcaacccccaaccctaccagattctcccttgccatggagagaaccgggcaatgggttttctccccagaaatcccaaccgatgttattgttgcagttggagaatccactttttctctccataagtttattctggcggctaagagtaactacatcagaaaagtgataatggaatcagaagagagtgacctaacaagaatagagatttccaacataccttggaggacaagaagctttttaagaaagccgcgaaattttg

SEQ ID NO: 19022 - DNA, 147 bp, Glycine max
caaaactaggatcactcctctagctagccagaaatggttctgaaacttgtttatagggaccggtgtgataatagggcggatttaatcattaacatgtgcacaatatcaaaatcaggctataatatctgcacatatttagaaagtgac

SEQ ID NO: 19023 - DNA, 163 bp, Glycine max
  modified_base (47)..(47): a, c, g, t, unknown, or other
cccacgcgtccgcccacgcgtccgctttcaatcttcacttctctctntctctcaaaacacaccaaaccaaccattcattcattcattcatagtttcattcaacaaatcaaataatatcaaacaaataaatgtcacctaacaatcctttcacgattgttcccga

SEQ ID NO: 19024 - DNA, 275 bp, Glycine max
acgcgtcacgctacgcgtacgtacatgcgttcgctgctacaacaaacaaacaaacaccaccaacaacaacgactggggtttattttcaccctcgaatccacactttctttacaccgcgtttggatctccgtaaacaataccatgcatttaccgagggaatatcgaatacgtatatccaaccatcggtgtggaggttcacccattggattttttcacaaactggggaaagattcgattttactgctgggatactgctggacaggagaaatttggtt

SEQ ID NO: 19025 - DNA, 351 bp, Glycine max
gcgcccacgcgtccgaaataattggtcctgtactttatgtttcttttcccccaggaaaaatgccgtaatatgtacaactctctggggggtaagggtccaaatactattggtcaacaaattaatgtgacttgtgaattacagcaattattatgaaataatcgaattagagctgtatctattattgcgacagaaagtctaatgagaggaatgtaagtgattgacacatttgcttccctaattgtttcatgtagttggagcttactctattgacgaattttttatcgttctttggatagccctcattgtattatttaatgtaccttgtaatatactttcctactatcaatcttc

SEQ ID NO: 19026 - DNA, 229 bp, Glycine max
gctgaagaggcattgcagaagctaaatgggacaacgattggcaagcaaacggtccgtctttggtggggtcgtaatccagcaaataagcagtttagaatggattttggcagcccttggactggggcatattacggggcccctatgtatgatggttatggggtatgcattgtcccctcgtcatgatcccagcatatatgctgctgcttatggtgcttacccccttttatgg

SEQ ID NO: 19027 - DNA, 359 bp, Glycine max
  modified_base (109)..(109): a, c, g, t, unknown, or other
  modified_base (115)..(115): a, c, g, t, unknown, or other
cccactcgtccgcccacgtttccgagccctttgtatattctttgaggacaacaaggcggggctcaagttcgacgtcggagggggcggaggcaacaacaacagagggggngggggngaccgggatgcggagaaggaagaaggtcccttgtcggagtggttgaatttcacttttgatgacgcaaaaacggtgcttgcggctctcgcaatttcgcttgcgtttcgatcattcgtggcggagccgaggttcattccttcgctgtcaatgtatcctacattggatgttggagatcgaattattgttgagaaggtttcattactattttagaaaaccatgttcaagttacatattgatatttaaa

SEQ ID NO: 19028 - DNA, 455 bp, Glycine max
cccacgcgtccggttgaggatgtatgcaacttgtcaacagcttcaggtgcaggcccaagctcatgcagctgcagccagtggcgattcttggccacacagaattgaggttgcatatgccaccatcaatagctcttgcaagccgagggcgtctacagggtctcagacttcaacttgcacttcttgatcgggagtttgatgatctagattatgaaactttaagagctctagattcagataatgtttctactgcaccctccatgaccgaggaagagataaatgctcttcctgtccacaaatacaaggtttctggtcctcaaagtggtagttcctcaatgcaacaaacatcatcttccactcctgctgagaagaagcaagataattcaactgctgttgggagcatgaaagcctctgatgatgagctcacttgcagtgtatgcttggagcaagttgatgtt

SEQ ID NO: 19029 - DNA, 222 bp, Glycine max
cttatgcaaagctcaatttcaccttctgcggtaatacccagaagaagatagtgatgcttgggctattttctactggcgaaacgactatacaatacaaatatcacatttgataatttttatccaccgttcctacaattgatcttaatgtggagaaagtccattatatctttgttattttcacatttatattattgttagtatacttatttaattcttatttct

SEQ ID NO: 19030 - DNA, 407 bp, Glycine max
  modified_base (45)..(45): a, c, g, t, unknown, or other
gttcatgaagggaatacatgtattttagttttttataagtgcctngagtacatttacagaagcttcatattaaaggcctgagtggctgatctcaataggagaacaatgcctaacttttgtagggaaaatctgagcgattggataccccacctccaaataataagtggtgtaaaagcataaatagcaacgttgttatcggacaccatgaaaaaaggaagaaaaaaagtcctctgttgttccaattcgctcatggtggggactgggaatggtacaacttattaattattattgtacctttagaaattgtaatgatcatgaattattttctgtgaagtttatttggtcctttgtgttaaatcatcgatggttgcctatcatgggccaaggattcaactctctactgttgt

SEQ ID NO: 19031 - DNA, 342 bp, Glycine max
ggcgacccacgcgttcgcgcacacagaaatcagagtgcctttcgattctatttccaagcttcaaacccaggcatcggggtttcgtacacgggggacgcgtttcgccaccaaccttaactcacaccgtaccctctcctgcacaaaacgccgttcccttcccctgtgctccttcaccgcacaacctttgaaccaaaccttcgccgttggatcttcattgcttcaacactggaaccttaccaatcgccacgtcaccgttcttaacgtcttttcctgcgcgaccgctatatgtgcaacgtggctgttttgcttcccgatttcgacgcttctggcttttaagaaagc

SEQ ID NO: 19032 - DNA, 428 bp, Glycine max
atttccttccatattctctgttccgaacacgttacagtttcataccatcaatcttcccccaaattattcattcctgtgttgtggcccattaacaatattaatcaatccaattaatttccatgaccatgtccataacactcttactccaagccaacccctcccacttgaaatggaaccagttaccttcccttccacgtcgcacaaggcccgaccgtttcactccaatacccgactcgaaacgccgcgtttcaagcgtcaaatgtatctcctcgtcgcggaagccggataacacgtttagtttgcagtccccgtgggaggttctggcgagcacggtgtctaacacgctgaatgcgctgaagaaaccggccataactgcggtgttggtggggctgttataaatgtacgaaccaacttgcgccttcacggca

SEQ ID NO: 19033 - DNA, 382 bp, Glycine max
  modified_base (35)..(35): a, c, g, t, unknown, or other
  modified_base (43)..(43): a, c, g, t, unknown, or other
  modified_base (64)..(64): a, c, g, t, unknown, or other
  modified_base (72)..(72): a, c, g, t, unknown, or other
  modified_base (76)..(76): a, c, g, t, unknown, or other
aggaaaaaaggggcgacgacgccgacgaccagcgnccgggcanggcaattttatatttcttccncagggcanctgngaacgccacatgttcaatggcccaggggcatggccatatccatgcacaaccactttcactttcttcttctcacttcccaattaatattagaccctccacccatcatcacgttcatgtctctcacaatcacaaatggagagcaaaagtgtcaattttcacttccttcttgaagaaaggcaaagatgctaagatcatcaaggaagaaatgcctgaggccattgcaccgcctgaacgaggggccgatgccactccccaagaccagcaaacaaatgaacagattgcgcgggaaacctgagcaataactcc

SEQ ID NO: 19034 - DNA, 454 bp, Glycine max
  modified_base (55)..(55): a, c, g, t, unknown, or other
  modified_base (59)..(59): a, c, g, t, unknown, or other
cccacgcgtcctgtgaagcagcagattgattttcggtttttataatgcagatctncganaaaaccctggctgatttgaccatggccctggaatactaaagcatcaacaccattgacaatgtcaaggctatgattcaagacaaggaatgcattcctccggatcagcaatgtatgatttttgccggaaagcaacttgtaaatggaaggaccttggcctattacaacatctataatgaattaaccctttattttgtcctcaagctttgttgttgtcattaaataacctttctctattgttttggctttgcaaattcaatcattacaagatgatttgccgaatatgcgtattctcctcttcacccaattgcttttaattgttttactaagaatttctgtaatattaattatttaaggtcttataattaatattatgtaaatttgtgtgttatattttt

SEQ ID NO: 19035 - DNA, 425 bp, Glycine max
  modified_base (326)..(326): a, c, g, t, unknown, or other
acaacaacaactgaggaaattcaagagtacttgcttcttttatgggctaagtttgaaatagggagggctgctgtctattgggggaccatgaatggcctccctccttcttcaggagaaaagctaaaacttttctataatccagctgcaactcaacttgtccctaatgaagaatttggaattgcttttaatggaggttttaatcagccaattatgtgtggtggtgagccaagggctatgcttagaaaatatcgaggcaaagctgatgccccaatatattccattcagatatgcattcctaagcatgctttgaacttgatcttttcatntacaaattggagtagactgggatggtccatatagactacaatttcaagttcccaaggcattacagaacatgccaattgacttctttaataagggcttgg

SEQ ID NO: 19036 - DNA, 420 bp, Glycine max
cccacgcgtccgctcctccttccacctagctttggtgttatttaaaccaagtgacccctcctttctcttgttaacaggtaggggagttggtgagtaatggcaggaggacaactaggagtgcttaatgcactcgatgtggcaaaaacacaatggtaccacttcactgctattgtgatagctggaatgggattcttcactgatgcctatgatcttttctgcatttcccttgtgaccaagttgttggggaggttatattacacagacataacgaacccgaagcctggtgttcttcctcctaatgtgcaagctgctgtgactggtgttgctctatgtggcactttagccggccaacttttctttggatggcttggtgacaagttgggaaggaaaagggtttatggcttaacttctatgcttatg

SEQ ID NO: 19037 - DNA, 343 bp, Glycine max
  modified_base (81)..(81): a, c, g, t, unknown, or other
aacgcacatcgctatttttcatcatgtcttgttaaccagcaaaccgggatagggtatttaaactcgtatggtcgcgaggtncacaggaaagacaacctttgtgaaaaggcattaccgggaattcgagaagaaatatgagccaaccatcggtgtggaggttcacccattggattttttcacaaactgtggaaagattcgattttactgctgggatactgctggacaggagaaatttggtggcctcagagatggatactatatcaggacaatgtgcttttcatgtttgatgttactgcccggcaacatacaaaaatgttccacctggcaccggatctttgcatgg

SEQ ID NO: 19038 - DNA, 323 bp, Glycine max
aaaaacgggccgacccacgcgttcgcggacgcgtggtcacaaatactattctcaattttcagggacaaaatgtaatatggtgttatgtatctattggtcggggagcatctacttaaactcaagttgtgaataccttacaagaaagaggagcaatggaatacactattgtagtatctgaaacagcggattcttcatctacattacaatacctctccccttatacatgagcaactctgtcttaatattttatttaccgtgaactccacactttaatcatttattacgatctctttaaacaagcacaggcttattgtcaaatgtct

SEQ ID NO: 19039 - DNA, 371 bp, Glycine max
cgtcgctccgcaccagtttcaccgtacgaattttttgttgtttggagcgatccgagaaaaactctgtaaacatggtggtttaccaggacctccttacaggtgatgagcttctctctgactccttccgttacaaggaaattgagaatggaatgctgtgggaagttgaggggaagtgggttgttaaaggagcagttgatgtagacattggtgcaaacccttctgctgagggtggaggagaagatgatggagttgatgatgcagctgttaaagttgttgacattgttgacacatttagacttcatgagctacccgcattcgataagaagcagtttgttaccttcatgaagagtgttattaaggaatttgacttc

SEQ ID NO: 19040 - DNA, 320 bp, Glycine max
ctcatgcaactgtagcaagggaagaaccatttcaatgttcatctacccgaaagcaaaagggggagaagctttaattgacttgcctgccctgccccacaacaatagacactttgtctatctagacagcacctttatacctttcttgaaaaattacttaagtttatagctccctatattcacttattaatgcagcaaaatgtgatactgatagtgatacaatcatacaattgaatatgaacacggcatcgttacgtacttttatgttagcacttttgaaattcaacctctttcagaaagctgcttgcaaactctttacctta

SEQ ID NO: 19041 - DNA, 319 bp, Glycine max
  modified_base (116)..(116): a, c, g, t, unknown, or other
gaaaagagggtcgaccgcacgcgttcgcccacgcgtccttcacaacagtggtttgtgtttccaaaaagagagagtggaaaagatggcgcggttgatcacagtggggtggtgcacanatactgaactattattctccgcggccggtgcgtcttgggtggaggaggcggctaatcctatacgaatggtgttttgtctttatgccgatgttgttctgttgatcggggagtgccggcgtgcgttgaaattatctaggtttgtgagcaggtactgtaagagttatcaaatctttgaatatatgaacgataggtactatatattt

SEQ ID NO: 19042 - DNA, 277 bp, Glycine max
  modified_base (19)..(19): a, c, g, t, unknown, or other
aaaaaaaaaaaaaaaaaanaaaaaaaagaaaaaaaaaaaaaaaaaaaaagaaaaaaaaaaaaaaagaaaaaaaaaaaaaaaaaaaagaaaaaaaaaaaaaaaaaaaaaaaaaaaaaaaaaaaaaaaaaagaaaaaaaaaaaaaaaaaaaaaaaaaaaaaaaaaagaaaaaaaaaagaaaaaaaaaaaaaaaaaaaaaaaaaaaaaaaaaaaaaaaaaaaaaaaaaaaaaaaaaaaaaaaaaaaaaaaaaaaaaaaaagaaaagggagaaaaaaaaaa

SEQ ID NO: 19043 - DNA, 446 bp, Glycine max
cccacgcgtccgcccacgcgtccgtatagcttggttttatgttgctggctctcatttggaagtttgactttccaccctttatggtgctgattatcgctatcctaaatgatggtactattatgacaatttcaaaagatcgtgtaaaaccatcacctctgccagatagctggaagctagcagagatatttactactggagttgtgcttggaagttacttggcaatgatgacagttatattcttttgggcggcatacaaaacaaactttttcccgcgagtgtttggagtcccaagtcttgaaaaaactgctcatgatgattaccggaaacttgcctctgcaatctattctcaagtgagcactattagtcaggctcttatatttgtaactcgatctcgaggttggtcttatgttgagcgtcctggtttattgctggggtttgcttttgtt

SEQ ID NO: 19044 - DNA, 368 bp, Glycine max
aaagccatggatgcaaaaggcgatagcgcttatcctatcaattatttctcatcgattgaacgttgaagccaacttgggtgagtttaatgaattcaccacacctctatttgatgacccagaaggatcgctctcttttgtcatgcctggatctttcaaatctggaggagaatctaattctgacaatcttttataacaatggtactacgattggttctgtaataacttaatatctatgtttttcttaattgtgaagatataactgtccggtttgtgttaaatttgcaaagccggattaatttcatgaccatgcaaatccttaagaaggatgcgagattgtcttgatgattttataaattataaattgcgcg

SEQ ID NO: 19045 - DNA, 204 bp, Glycine max
  modified_base (8)..(8): a, c, g, t, unknown, or other
  modified_base (13)..(15): a, c, g, t, unknown, or other
  modified_base (20)..(20): a, c, g, t, unknown, or other
  modified_base (26)..(26): a, c, g, t, unknown, or other
  modified_base (38)..(39): a, c, g, t, unknown, or other
  modified_base (62)..(62): a, c, g, t, unknown, or other
  modified_base (64)..(64): a, c, g, t, unknown, or other
  modified_base (70)..(71): a, c, g, t, unknown, or other
  modified_base (82)..(82): a, c, g, t, unknown, or other
  modified_base (86)..(86): a, c, g, t, unknown, or other
  modified_base (91)..(91): a, c, g, t, unknown, or other
  modified_base (106)..(106): a, c, g, t, unknown, or other
  modified_base (125)..(125): a, c, g, t, unknown, or other
  modified_base (131)..(131): a, c, g, t, unknown, or other
  modified_base (135)..(135): a, c, g, t, unknown, or other
  modified_base (143)..(143): a, c, g, t, unknown, or other
  modified_base (156)..(156): a, c, g, t, unknown, or other
  modified_base (159)..(159): a, c, g, t, unknown, or other
  modified_base (170)..(170): a, c, g, t, unknown, or other
  modified_base (179)..(180): a, c, g, t, unknown, or other
  modified_base (186)..(187): a, c, g, t, unknown, or other
  modified_base (192)..(192): a, c, g, t, unknown, or other
cccagcgnccgannnaacanaagagnaacatagcgggnncacaggccaccgacgaggagggncnccaccnncagggcaccgncgcnggcgncaagaaaaccgcacnagcgcgccggcggcaccancgacgncacnggccggangcagggcaagacngangccaacgccancaaacgccnncgcccnncccgncgaaggcaccaa

SEQ ID NO: 19046 - DNA, 432 bp, Glycine max
gccaagtctttcaaaaagctgatctaaggaataataacctacacgaggtcttcgtggaagaagataccattgccacttgccacatgccaagcgatcaggtgaatgttacttatgatgttaattactctacgtccatctcactcttaatttcttaacacgagtcctttagtcaattgctttttagtttttaccccttttgaaattccaatctcattccaactttgcacaaacatttttcctagcggtggaaaattggatttttttttttttttttggatatatagaaatattggtgaagtggtctttattaagagttgatggaacccaatgcactaggtggtggaatattttctaacataagttgtggtttgctaggagtagaaaaccctttacagccgctacaacaacaacaacatcctaacctttaaaacc

SEQ ID NO: 19047 - DNA, 415 bp, Glycine max
  modified_base (21)..(21): a, c, g, t, unknown, or other
  modified_base (45)..(45): a, c, g, t, unknown, or other
cggacgcgtgggcggacgcgnggtttgaattttgttcagctcagnggatgccaggcgaggaatttgctgatcaacggttttaatcagatgcatgaacccttcaagtacatgattgaattatgcttggcaaaggttgaaaaagtctataatggattctctccgcgacccatctcatcatatttcgtggaggagttgaattatctatatttgaatagtcattgcctggacaagtcttcttaagttttacaaatcaaccttggtcgtcatccataaaagtttagtttgatatttctttcttgtaaggatttaattaagctttttctccttaaatttaggttacttctgtttttggccttcacatatattttttttaggtcctaaaattatgaaagatgttctttttactttcttttgc

SEQ ID NO: 19048 - DNA, 438 bp, Glycine max
  modified_base (18)..(18): a, c, g, t, unknown, or other
  modified_base (39)..(39): a, c, g, t, unknown, or other
  modified_base (53)..(53): a, c, g, t, unknown, or other
gcacaagaatagaacatnggcattttttgattccagagnggagacacccaaantatcacaggttccttgcaagttggtggagaaagacttgcacaaaggcagcaaaggtaatcatgatgtggaacagcctgctggctctctaaagtcatatttttcagtacgttttgtcacatccaagtgtagaatttgtggcaatatcatatgccattgtgaaaatcctagcaattcaacacaggtgtcatcagacatattatccgaaggatctgaaggaagggacctaattgcacgtggtgcccattcattgagacaggattgccggactaaatgtacattatctatggagaagaaatctgatcttgattttgattgaacttgaaattctttgtacagtgaacaattttgtcctaattctcaacatgtaaactctactactgattc

SEQ ID NO: 19049 - DNA, 447 bp, Glycine max
cccagacttccacacgagagaaggagtctcttaatcttatggaagtcccagaagcagataaaaccttgggcttggacatggccaagggcagcgcattctgcaagatgggtgaaggttggacatgcatcataactaaaactgaggggcctgatgctggcaaagttttcgttaaatgtggtgaaaattgcacctgtaccattgagggcgaagcagtgtcccaagaattgaatttgccacctgatgttgtgagcagcagtggcagtggagcattctgcaagtgtggtgaagggtggagttgtgtcattttcaggactgaaggccctgatgcaggctctggcaagggctttgctgaatgcgctggacagtgttcttgtactattgatgacaaatccacctaagataaacgatgagtgcatctatgatataatctgatggttatttttctct

SEQ ID NO: 19050 - DNA, 413 bp, Glycine max
caagcattggagaggcattaaaccaaggacatgggcaccatattcctgtgatattggctatgaacgatttctaggccctgagattttctttaatccccagatatatggcagtgactttaccacccctttgccagttgtaatagacaagtgtattcagtctgcgccaattgacacaaggagatcattatacaagaatgtagtgttgtctggaggttcaaccatgttcaaggattttcacaggaggttgcaacgtgatctaaaaaaaatagtggatgctcgtgtacttttatctgaatcacgcttgaatggggagataaaatcgcagccagtggaggtaaatgtactcagcaatccaatccagagatttgcatgttggtttggaggatcagtgcttgcattaacacctgaatttt

SEQ ID NO: 19051 - DNA, 448 bp, Glycine max
cggacgcgtgggtccaaatccaaaaaaatcatggagcttttgtactacctcacccttgtgctactgtttgtgtccttcgtctgtgtctcttttttcatcattttctacaggcatcgttctccgttcagcgtccccaacttgccgccggggaaggcggggtttccggtgatcggcgagagcctggagtttctgtcggcgggacggaaggggcttccggagaagttcttctccgatcgcatgacagagtactcttccaaagtgttcaagacctccatcttaggggagcctacagtgattttctgtggagccgcatgtaacaagttcttgttttctaacgagaacaaacacgtcatttcgtggtggcctgaaaatgtcaagaagttgttcccaacgaatattcaaacaaactctaatgaagaagccaagaagttgagaaacattcttcctc

SEQ ID NO: 19052 - DNA, 397 bp, Glycine max
  modified_base (49)..(49): a, c, g, t, unknown, or other
acgatatggacaccaaacatccaaggggggtttttggttatggaaaggngcacaaagcaaaggcgcacacacgtgaaattctagccgtgaagaaacaccaaaaaatccaaaaaggggaagcgcccaatattaaagctttcacaagtgaaaatcaagcgtggataaacattcgacatcgtaacattgtgaaagcatatgggtttagagccaactcacaatcctcatttgaggagtatgagttatcggaaaaggcaagcattgataggagtgtaaaagatgatgaacaagcaatatcattggattgggatccgaacactaaagccattaagggtggagcaaatgctgtatattatatgcatcaagactgaccacctacaaaagtgcattgagagatatc

SEQ ID NO: 19053 - DNA, 415 bp, Glycine max
gcgcgttgttcaggttggatacaggcatattgtttgtgcttttgcgaataagaatcaagcaaaggttgggggtgatctgaagaggggttgtgatgatcacgtggtgaaccgtgaggacttatggatcactatcaaactctggtttggtgacttttagtaattgtgatctctttttgaatattgagaaagatagtatgtgtttggaccaagatggttgctgaatgaaggatcctttgattagttggctatatttttaggtgtgcagatcatgcaccagaagatgtgccataagcattggataaaacattacaggaattgcaacttgactatcttgacctctatctgatccactggccagtgcgcatgaaaagtggaacatttggactcaataaataatatcttgagcaaccagaca

SEQ ID NO: 19054 - DNA, 454 bp, Glycine max
  modified_base (30)..(30): a, c, g, t, unknown, or other
  modified_base (36)..(36): a, c, g, t, unknown, or other
  modified_base (57)..(57): a, c, g, t, unknown, or other
  modified_base (66)..(66): a, c, g, t, unknown, or other
ggaaaaaccgggccgacccacgcgaccgcncaaccnaaagaagacatcgcattttgngttattggntgatgacagcaaggagatcgaagagcttcttaatttggctcctgaaaaggttctactaaaatggatgaattttcatctccagagagcaggttactagaaaactgtcagaaattgttcttctgatgttaaggatggagaggcctatgcttatctgcttaatgtccttgctcctgaacattgcagtccggccaccttggataccaaggatgccagtgaaagggcaaatctggttcttgatcacgcagagagaatgggctgcaaaagatacttgaccccaatggatgttgcagatggtacttcaaatttgaatcttgcttttgttgcacaattgtttcattatatgagtggtttatctacagacactaaaaagaatgtcatgctgagatga

SEQ ID NO: 19055 - DNA, 417 bp, Glycine max
cggacgcgtgggtttgcctcttgtcgcaatttgatcgaagctatctacccttccatggcggcaggactctccaccgccgcaatcttaaagccctacaatctcgtccaacccccaatccctctttctaaaccaaccacatcactcttcttcaaccccttaagatgtttccatcacagtacaatccttcgagttcgacccagaagaagaatgagcggcttcaccgtttgcgtcctcacggaggattccaaagagatcaaaacggtcgaacaagaacaagaacaagtgattcctcaagccgtgtcagcaggtgtggcagagaagttggcgagaaagaagtcccagaagttcacttatctcgttgcggctgtcatgtctagctttggcatcacctctatggcagtctttgccgtttattat

SEQ ID NO: 19056 - DNA, 397 bp, Glycine max
caaaggcatcctcaatctcaccaaatgctgttttggaagcagctacctcaaactgggtaattcatatataaagcaattagactagatggagggaggtggaagttacgataccactcttctgttgagacttgagagaaagtggggtgttgaagccacattggacacacatgttttaatttcctactcttttatcagtagctgacctccaatgtgtatggaaatttcaattcatacggaagttcatctgcagtccctattgctttcttgtacaatatttgcaacttgctgtatagtatagtttgtgtagtgagggagaaagagccaccataggatctttggtctgctaataaactcagatttgtgctttcacttaaaaaaaaaaaaattaaatttattt

SEQ ID NO: 19057 - DNA, 393 bp, Glycine max
cccaaacgttaactcagacgaagtttcaatttgtgaagaagaaacaaaaccgaacctctcgaaactctccaacggggccacccgattcatcgcatttcgcaggctgcaatggcgacgttcgaactgtaccgcaggtcgacgattggaatgtgcctgacggagacgctggacgagatggttcagaacggcactctaagccccgagctcgcgattcaggttctggtccagttcgataagtccatgactgaggctctggaaacgcaagttaagagtaaggtctccatcaagggacatctccatacatatagattttgtgacaatgtttggaccttcatcttacaagatgctttgttcaagagcgaagacagccaagagattgttggacgggttaaa

SEQ ID NO: 19058 - DNA, 443 bp, Glycine max
gaaggaagagaagaagttcagaacaaaaacacaacaattaagaagtaactctctttctttctttctttctttctttctctcggggtgaagttgttctctttaatggcgaagtcaaagaacaatgctaagaagttgtcctacatatcagttccatctcagatcatcaactccatatcatcatcttctctgcaatctcttcttgactctcccaagaagtcttcaaggaacaccaacaacaacaggttctttatcttcttcaccaacagcaccagcaccatcatcttcagaaaacaaagactctggtttttcacactctttctctttggtttccttggcatgctcaagtttggcctcacccttcacacccctttccccccctacccatgtgccaccacaacccttctgccacagaacatgatcttaaccaccccacattcaaagtc

SEQ ID NO: 19059 - DNA, 334 bp, Glycine max
tgaaaactcataattcttatcttcacacatagtgctagtgcgctgggcctgcatctggggcctctctcttcctcatcctcatatttcattcactttgggggtcaaaatggcttctctcttcttctcttcttttattaattaattacagaaattgtcagtttctaaatcagtgcttgccgagagaaagagaatattactatataaggcggatcactcaacaaaccaatgggtctacagctggccctgacatgatgaaatcttaagttactaaggttggccatttgagctaagcaataagcatccatttaataaaattgcgacctggtgtgaggac

SEQ ID NO: 19060 - DNA, 347 bp, Glycine max
  modified_base (21)..(21): a, c, g, t, unknown, or other
  modified_base (38)..(38): a, c, g, t, unknown, or other
  modified_base (40)..(40): a, c, g, t, unknown, or other
cccacgcgtccgcccacacgncctttttattttaatgncngaaacaacacaaactacacgtgatttcaggtgattgcgggctgggaaaataaccctaataaatagggctttaattgcccatcataaatggcaagttaagccaaatttaatttactttacctcacgtcatcaatcaatttgcttgcaattccttctcttctgttatagtgagcaacccaaattgctttaatgccacaagcattgatggttgtttttctattacaataaaatgcaccttcctaatcttcataattactcaagttaacatactgttttttttaatcctacctttttgaaaaataacaatt

SEQ ID NO: 19061 - DNA, 409 bp, Glycine max
cggacgcgtgggtttcgatttgagggaacagtacaagtttgtgaggatcggttaacccaactgcacaggtagtcactaaaagaatggagtctcacgatgagactggatgccaggctcctgaacgccccattctttgcattaataattgtggcttctttggaagagcagctaccatgaacatgtgttccaagtgttacaaggacatgctgttgaagcaggagcaggacaattttgcagcatcgtcggttgaaaacattgtgaatggcagttccaatggcaatggggctgtgactactggtgctgttgatgtacaagttgaagctgtggaggtcaagactgtctctgctcagagttttgtagattcattcttctgtgaggagttggagatgtaagccctgaacagtttcat

SEQ ID NO: 19062 - DNA, 442 bp, Glycine max
ctcttaggtttttggctctttgcagaatcttttagtgttacatacctagctatcacctcaatggattgctattttggaaacggtaatcctaacccttattaccatcactctgccgtagtgaacatggcatctccctcctccgagttcatgttatctgattatctcgtgttggaagatgctcttgttgttgatcatcatcaagagtcttggtcacaaagcactgaaactgaatcgtcggagaaagcaacctccagcgatgcaagtcatgggttcggtgatgcaacctccaacaccaacatgcatatgcaagtgcttcttaattatctcgagttattttatttttttcattaaacaagaaaatggtatatcgcgtattctatgctaatttatgtgtgcgcaagtacgcatatatgttcattaatcttcttgggattttaatttg

SEQ ID NO: 19063 - DNA, 267 bp, Glycine max
ctgagaaggaatcacacatgagaaattttggtgggatctcggcaatttaaatttggtccaaaaatagtgagaaagaaaaccatggtttatatagttttcatgtccttcctaacggtggcgcaccaaagggggtcaggtgagtttatgcggttcacggaaagtcatggcggcggtggtggcggtgaccgcgatggtgaatatggttatggacatgatgatggtagaggtggtgggggtggtggttcactagggttggtttttaaccaa

SEQ ID NO: 19064 - DNA, 197 bp, Glycine max
tttgcgtttcccacatctcttttcgcgaaaaaaaaaaagagtcacttttctattttgtgcccccttttgtggttctctgaaacgcgttaagggttctgtttgtgttattgggtcaataatggggtcctgtttttttaaaaaatacggccttaatttttgctgtctgggggtgatttgatttttttggtgaatgaatt

SEQ ID NO: 19065 - DNA, 444 bp, Glycine max
  modified_base (36)..(36): a, c, g, t, unknown, or other
cccacgcgtccgctttttttttgccctatcttttanggttcccgcggattcaaaccttaatgcttctattactctctttctgtgatgcgttcttgctctcaacaacaatcacacaccgccatcgaagccttcgttcttttcttcttcgttctcctttttgctctcgttcgagggttctttcgtggggaacactgcagatttcaccacccgggtcttattcatccgtgcccatgtccaaagttctcggcttttccggagttgacgatttttgccctatgggatcaatatacgccaaccccaaggaagcaaggttcttcttgtcccttggccctcaagttgatgtatactttcctcctcggaagagatcgcgtgtcaatgctccattcgtttttatggagaatgggtcgagcataaacagaaaacctctattgaagccttgccaga

SEQ ID NO: 19066 - DNA, 418 bp, Glycine max
  modified_base (17)..(17): a, c, g, t, unknown, or other
  modified_base (105)..(105): a, c, g, t, unknown, or other
  modified_base (233)..(233): a, c, g, t, unknown, or other
ccagaatggggtgtgtnggatgggacccggtttgcgtgcttggtccaccccaaactgggcacctcgccaggttcgagtttaagaggcgcctcgagagagacgcanatgcccgcgaagccttccaacgtcaagtccgtgaagagaaagaacgccgtcaatcccttcgacaatctcgtcctcttcccgatactccgcaagacctcattgaatacttccttgacactgaagctcangagattgagtttgagattgcaagaatgagaccaagattgaatgaggaattctttgcgcaactcaaattcgagttaggacagcttcgattcgctgttaacaaaacacagctcatggaggacagacagattgagctggaggctctagagaaagccatactagaaggattagaagcctatgataagat

SEQ ID NO: 19067 - DNA, 198 bp, Glycine max
  modified_base (9)..(9): a, c, g, t, unknown, or other
  modified_base (14)..(14): a, c, g, t, unknown, or other
  modified_base (16)..(16): a, c, g, t, unknown, or other
  modified_base (19)..(19): a, c, g, t, unknown, or other
  modified_base (27)..(27): a, c, g, t, unknown, or other
  modified_base (33)..(33): a, c, g, t, unknown, or other
  modified_base (36)..(37): a, c, g, t, unknown, or other
  modified_base (39)..(40): a, c, g, t, unknown, or other
  modified_base (42)..(42): a, c, g, t, unknown, or other
  modified_base (44)..(46): a, c, g, t, unknown, or other
  modified_base (66)..(66): a, c, g, t, unknown, or other
  modified_base (73)..(73): a, c, g, t, unknown, or other
  modified_base (79)..(80): a, c, g, t, unknown, or other
  modified_base (120)..(121): a, c, g, t, unknown, or other
  modified_base (126)..(126): a, c, g, t, unknown, or other
  modified_base (129)..(130): a, c, g, t, unknown, or other
  modified_base (137)..(137): a, c, g, t, unknown, or other
  modified_base (142)..(143): a, c, g, t, unknown, or other
  modified_base (162)..(162): a, c, g, t, unknown, or other
  modified_base (166)..(166): a, c, g, t, unknown, or other
  modified_base (179)..(179): a, c, g, t, unknown, or other
  modified_base (183)..(183): a, c, g, t, unknown, or other
  modified_base (185)..(187): a, c, g, t, unknown, or other
  modified_base (193)..(193): a, c, g, t, unknown, or other
cccacgcgnccgcnanccncaactagngaaatnccnncnncncnnnccacgagccaacaacaacancagggangcgagnncggggcccaaaaaaaaggcccgggagaaggagaaggaagnngaaancgnngaggganacaannaccgacagcagacgggcancagnggagggggaaaangaanannnagagcngcaaa

SEQ ID NO: 19068 - DNA, 347 bp, Glycine max
  modified_base (5)..(7): a, c, g, t, unknown, or other
  modified_base (9)..(9): a, c, g, t, unknown, or other
  modified_base (15)..(16): a, c, g, t, unknown, or other
  modified_base (18)..(19): a, c, g, t, unknown, or other
  modified_base (37)..(37): a, c, g, t, unknown, or other
  modified_base (49)..(49): a, c, g, t, unknown, or other
  modified_base (52)..(53): a, c, g, t, unknown, or other
  modified_base (59)..(59): a, c, g, t, unknown, or other
  modified_base (65)..(66): a, c, g, t, unknown, or other
  modified_base (68)..(68): a, c, g, t, unknown, or other
  modified_base (80)..(80): a, c, g, t, unknown, or other
  modified_base (92)..(92): a, c, g, t, unknown, or other
  modified_base (105)..(105): a, c, g, t, unknown, or other
  modified_base (122)..(123): a, c, g, t, unknown, or other
  modified_base (130)..(131): a, c, g, t, unknown, or other
  modified_base (133)..(135): a, c, g, t, unknown, or other
  modified_base (137)..(137): a, c, g, t, unknown, or other
  modified_base (140)..(141): a, c, g, t, unknown, or other
  modified_base (144)..(144): a, c, g, t, unknown, or other
  modified_base (152)..(152): a, c, g, t, unknown, or other
  modified_base (159)..(159): a, c, g, t, unknown, or other
  modified_base (163)..(163): a, c, g, t, unknown, or other
  modified_base (172)..(172): a, c, g, t, unknown, or other
  modified_base (179)..(181): a, c, g, t, unknown, or other
  modified_base (195)..(197): a, c, g, t, unknown, or other
  modified_base (218)..(218): a, c, g, t, unknown, or other
  modified_base (221)..(223): a, c, g, t, unknown, or other
  modified_base (226)..(226): a, c, g, t, unknown, or other
  modified_base (234)..(234): a, c, g, t, unknown, or other
  modified_base (247)..(247): a, c, g, t, unknown, or other
  modified_base (249)..(250): a, c, g, t, unknown, or other
  modified_base (254)..(255): a, c, g, t, unknown, or other
  modified_base (257)..(259): a, c, g, t, unknown, or other
  modified_base (268)..(269): a, c, g, t, unknown, or other
  modified_base (282)..(282): a, c, g, t, unknown, or other
  modified_base (287)..(287): a, c, g, t, unknown, or other
  modified_base (291)..(291): a, c, g, t, unknown, or other
  modified_base (294)..(294): a, c, g, t, unknown, or other
  modified_base (302)..(302): a, c, g, t, unknown, or other
  modified_base (307)..(308): a, c, g, t, unknown, or other
  modified_base (322)..(323): a, c, g, t, unknown, or other
  modified_base (333)..(333): a, c, g, t, unknown, or other
cgcgnnncnaaacannannagactcgagcgtaacgangaaggcaacacngcnngggccnggggcnncngcgccggggagncgggacacgcanagcaaccgaaccncggcaacgagacacgcnnccaccgnngnnngnggnncgncgaggaancaacccnacancccgaagcncgagccnnnaagccgaaccaaannngaaagggcgcggaaggacccnccnnngancgaaaaanccgagagagagancnnagannannnggcaacgcnngaaggagaccaanccganagcngcnggcaggcnaaaanngagccgaaagaacnngaaaaagagnccccaaaagcagac

SEQ ID NO: 19069 - DNA, 389 bp, Glycine max
  modified_base (9)..(9): a, c, g, t, unknown, or other
  modified_base (31)..(32): a, c, g, t, unknown, or other
  modified_base (75)..(75): a, c, g, t, unknown, or other
  modified_base (80)..(80): a, c, g, t, unknown, or other
  modified_base (85)..(85): a, c, g, t, unknown, or other
ccggaaaanctgggaagacccacgcgtccgnntcaggctatggatactgataacatttcttttaaacttttaaangaacntaaanctagtggaaaaagatataggtgtaccgggaaggatataaaaatacgtgatcttatggaagcggctgatgtggacaaaagtggaaccatagactatggggagtttattgctgcaacagttcatttcaacaaactagagcgtgaagaacatcttattgcagcattccaatattttgacaaggatggtagtgggtacattacagttgatgaactttaacaagcttgtgcataacaaaacatgattgacgctttttttgaaaacatctttagagaaggtgatcaagataatgattgaaggattgatta

SEQ ID NO: 19070 - DNA, 443 bp, Glycine max
  modified_base (30)..(30): a, c, g, t, unknown, or other
  modified_base (34)..(34): a, c, g, t, unknown, or other
gagctactgttgtcattgctgggttgtacnctanatttgagcgtccagagaagatagatgagatcatataccctgggatatcttcatttctgatgcttatcaaggataacgataggcatgttaggcgagctgctgttttggctataagcacatttgcacacaataagccgaatctcatcaaggggcttcttcctgatctgctgcctcttctatatgatcaaactattgttaagcaagagctcataaggacagttgatcttggtccttttaagcatattgtggatgatggacttgaattgaggaaggcggcttttgaatgtgtagacacattgctggatagttgccttgatcaagtgaacccggcatcattcattggtccttatcttaaatctggtttggatgatcattatgatgttaaaatgccatgccacctgatactcttc

SEQ ID NO: 19071 - DNA, 426 bp, Glycine max
  modified_base (26)..(26): a, c, g, t, unknown, or other
  modified_base (141)..(141): a, c, g, t, unknown, or other
cgggtgcgaccgcacgcccgtccganaatttcttggttacatacaaggttcttttagttttcttgttcattcatgtaacatcaatctgcgaaacatggtgccgatatagcaacggccactgtgaactggcacttattacangtcccgccattctcttcggcggagcaacctacgctactcgccctcacagtcactcgcggaagaagcctgctgttgctgcctcttcggaatcttgtggaagattctggttgcactcattgtcctcgttggcctcgcggtcctcatcttctggctggtggttcaaccctcgtcctttaagtttcacgtcacggaagccgacctaacacaaattgattactataccaacaacaactcccttgattacaacatggttcttcaacttcactgcacacaaccccaataaga

SEQ ID NO: 19072 - DNA, 436 bp, Glycine max
ccaagttgccttaatactctgaaatcatagatcactttcttaaacacctttcagatgatgtgtccttgcccacgcttcaaaccctttctctatctgaactcactcacaagaacaccactgcttcaacttcaaaccccaaaatcgaatcaaactttcccaccatcactcactccgaaacacacctcaaccacttcacagcaccacccattcaaggtttcctacctcgtaagcacttgtggcttctccgtagaaaccgctctcaagatctccaagttcacccaattcaaaacccccgaaaaacccgattcaatcatcgccttattcagaagccacggtttctccaacacccagataatcagcattattagaagagcacccaatgttctctcatgcgacccccacaaaaggattttcccaaagtttgaatttttacgct

SEQ ID NO: 19073 - DNA, 454 bp, Glycine max
cccacgcgtccgctttgtcttcttttgggaacggtggatggacatgcagttgccaacacagtactacacagctctgctttacacgatcactacgatcgtattactactgctaatagtatattatgactacatcagcagatggtacaaacatcgtcagaaggtcaacctcgtaagggatcacgaagaagagaaaaaaccattgaagccaccgaaacccactaacaaatctggaatcccaataccaaatggctcacccaaggcagcacctagacaggagtactattatatgtcagcaagatcattggctgggagtggcactccaccctggggaatctacatgagagctgctaaaagtggtccttcagccatcgaatcgatcgatgactcttctttcgatgacgaaacacctcctgcttcctcaaataattctgcatcccaagctatgccaatccca

SEQ ID NO: 19074 - DNA, 285 bp, Glycine max
cgccaaaccgccgattccgttgagcgtttctatcgtagcgttcaagaaggaggcagtggctggtggtgttggttgtggtggaggtggttttgctgatcatttgtggtagagggtaggaaagaaaaaaaagttgaaaatgagttcagacagccgcagcaggagcagaagcaggagtctaattgaccgtaagatccgctctgatcgattttcctattgtgatgcaccttacaggagagatttacgttggggtttcagtcctgacaatttgtgcaagaactgtaagag

SEQ ID NO: 19075 - DNA, 421 bp, Glycine max
  modified_base (21)..(22): a, c, g, t, unknown, or other
cttcccccattttttcctctnncttcctcgcttatctttctccagaaaattaggatctgcttcagatgtagtgtttccctgggccaaatcacgagtccattgagtttgattttgtggatgaaaagcatagatagggcttttgcaaaactctccaatgtttcttgaaattatatgaccatgcgtcgaattcgtatgctgcactccttctccgtcgtgttcctctactggttctacgttttctcatgaactccctcttaaatccgtgattaattagatctatctccttagttaatccttgtcttttccaataattaattagatctgcgtcttctttttggattagattcttttttggttctgttatcaaatctaataaaaaatctccttctcggaaatggcattaccgatccaacaacaacaa

SEQ ID NO: 19076 - DNA, 398 bp, Glycine max
  modified_base (121)..(121): a, c, g, t, unknown, or other
gaaaacgggccgacccacgcgtgcggttccatgaaacttctgcaatcaatcttcttttaaaattgcaacaaaaatacatacaacggaactcatgcaatttcaatgggggcgagagctaacngaattgagtgtgtttgaagtgattatgggtcctatgaggatgctgaataacagaaagaaaggacagcagaagaagttttgttaacctataccgtatttattatatctatatttaccaatttttttcttgccattccatacgatagagcgaatagttcgtattaggtgtttttaacccccacgcgatcttattatggatggtccaaccagcattatatgattgggaataacatcacaaaattggatgatgatgatgatgatatattccataactgtct

SEQ ID NO: 19077 - DNA, 456 bp, Glycine max
aaccggcccaatttagcatatagcccagcatggccaccgcaacagcagcagccacctcgtccttcatggggacgcgcctcctggaggcccactccggggcggggcgggtgcaggcccggttcgggtttggcaagaagaaagccgccgccccgaagaaagtttccagggggtcgggctctagctccgataggcccctgtggtatccgggcgccaaggcgcccgagtacctggatgggagccttgtcggagactacggattcgacccatttgggctagggaagcccgccgagtacctgcagttcgagttggactcgctggaccagaaccttgcgaagaacgtggctggggacatcattgggaccaggaccgagctcgcggacgtgaagtccacgccgttccagccctacatcgaggtgtttcggctggcaaggttccgcgagtgcgagctcattcacg

SEQ ID NO: 19078 - DNA, 321 bp, Glycine max
ctcagatattgttaaaaaagcaattgaaaatccagagctatttgtgatgaagcctcaaagagaaggaggaggtcttgtaccacttaaactttgactcaacactgttggaaaaaaatgtccgggagagaaacttacacaatgagctgtaattacttttcaggaaacaatatttatggtgatgagttgagggaaaccctccttaaattacaggaagcacgttctcaagaagatgcagcatacattcttatgcagaggatatttcccgccacttcttcagcaattttggtgcgtgatggtaattgggataccggtcatgtcatt

SEQ ID NO: 19079 - DNA, 379 bp, Glycine max
ggctatggaaatgagaatgtagatggcttgaatgaactgaacagaggccctacggccaatggtggcagaaaccaaaaaggttttgcaccaactattttggcagtcaaagggcagaacttgcctgcaagtttatgcaccgatgaagagaaagacaagactagtaccgttccggaccgtgatcagtataacaaagctgattttccagaagaatatactgatgctaaattttttgtcatcaagtcttacagtgaggatgatatccataagagtattaagtataacgtgtgggccagtacccaaaatggcaacaagaagcttgatgctgcatatcatgaggcacagcataaacctggtggctgccctgtttttctcttttttt

SEQ ID NO: 19080 - DNA, 452 bp, Glycine max
gtttcaaacctgcaatgctcccctccccttaggaggtcctcctccattgattcccaatatagatgtacatagcacgcatgccaattttgaccaaagctaaacattagtctgatgatactgttttttcaccttgcacctgcaggttgttctgtgaatttcgagtttttaaactacacagcaatcacaagcaaatgcaaaggaccccggtaccctcccaaagaatgttgtggggcttttaaagaatttgcttgcccttatgccgatgtattaaatgatttaacgaatgagtgtgcatcaaccatgtttagttacattaatctctatggaaaataccctcctggcctcttttctagtgagtgtcgtgaaggaaagtttggtcttgcttgtcctgcagtgccaccatcatcagtttcagcagatgacactgcaaataaagctttacactggtcatt

SEQ ID NO: 19081 - DNA, 416 bp, Glycine max
  modified_base (337)..(337): a, c, g, t, unknown, or other
cccacgcgtccgcgtttctggctttgcgggttgagcaatggccggaaaacaggtcggcgagggtttaccggcgaacctcgctggaatgtcaaagaatcagctctacgatatcatgtctcagatgaaggtacttacaatacttcttctttttcactcttcacgaagaacaacacgctaaccatttcgtttgttgtccctcagaatctgatcgaacagaaccagcaacaggccaggcagatcctcatccaaaatcctatgttaaccaaagcgcttttccaggcacaaattatgcttggaatggtgcaagcaccttaagtggtatgcttttttgctttcntttgatgtctttttaacaaccatccatcagtagaaatttggatgacaaaaaatatttgccttctaggttccaaaagttc

SEQ ID NO: 19082 - DNA, 428 bp, Glycine max
gtattctttgaggtcatgactattcttcacattcagcatgaaacaagacaccatatgagatttgaattagtaaaagatgacattgaaaaacaaagaaagaaataaaagaaaagaaaagaaaagaaaaggagtggctttgcagtatatcatctgtgacatgcaaggcaataacatttcaggttccacccaataagtaggttttttctacataacctctgaatttactggatggtgggaccggagaatatttcatgtttaacaactacaatccatctcaccttgaaatctgtgaacctagcattctgcatggtattatgtcggcatctagatgatacggcccgaacctgctgcctccttggtattaaaagaggtaagccgtatttctaaagtcaaaaacgggcctattggctgaacttttattaattttt

SEQ ID NO: 19083 - DNA, 324 bp, Glycine max
agggtcttgatattcgattggggcacagggttacaaaagtagttaggcgatataatggagtaaaggtaactgtggaaaatgggaaaacgttttttgctgatgctgctgttattgctgtcccacttggggtgcttaaagcgaagaaaatattgtttgagccaaagctttcataactggaaagaagctgccattgctgatcttgggattggacttgagaataaaatcattttacactttgaaaatgtgtttttggcctaatgtggagtgcttgggagtaattgcagatacactttatgaatggagcttctttcttaatctccacaa

SEQ ID NO: 19084 - DNA, 283 bp, Glycine max
  modified_base (18)..(18): a, c, g, t, unknown, or other
  modified_base (41)..(41): a, c, g, t, unknown, or other
  modified_base (43)..(43): a, c, g, t, unknown, or other
cttctcaccatctgaacnttaagattatcattttttacacnanccaccttctcctggcattgtatacctgaacaaagcgaggtgcagagacttttccgattcctggaagaagagaagagaaaacctaaatcacatatccatggcggaagaacaccgatgtgaaccttcctaaggttaccgactctgcgttaacaactgcggctttttcggtagcaccgccacgatgaaccttttctccaaatgctttaacgcgattcctttgtatgttctataaataactttt

SEQ ID NO: 19085 - DNA, 450 bp, Glycine max
cacgcgtatgcgcaaactttaacttgtgtttaaagttttgagaaaatttcaagcacaaaaaatggcggagaagaaagtggtgatcctaggatgcggtgttgcctgtgccaaccttgcaaaaactatacaacgtcaagccaacgtcacccttattgatccgaaggaatattttgagattccatgggcaagtttgaggggattggttgagccaacttttgctgaaaggatagtgatcaaccatagagagtacttcaaaaagggtaaccttgttgtatccagtgctgtcaacataactgaaactgcagtggtgacttgaagattgccagcaaattgcctatgactatcttgttattgccactggacacacaaaacctattctcaaaaccaggagtgaaagacttgacctattccaaagagaaaatgcaaagatcaaatctgcaagttgagttt

SEQ ID NO: 19086 - DNA, 361 bp, Glycine max
  modified_base (9)..(9): a, c, g, t, unknown, or other
  modified_base (16)..(16): a, c, g, t, unknown, or other
  modified_base (27)..(27): a, c, g, t, unknown, or other
  modified_base (101)..(101): a, c, g, t, unknown, or other
gcgtccgcnacgcgtncgccacgcgtncgcccacgttttcggtcggaacagccctgcatactacagtgctccgcggcgaggatacggcggtggtggccgangaggaggaggaggaggaggaggaggagggtccggcaggagggggttcggtggaggcaggcgcagggacagcaatgggagcctcttggttcgaaacattcccctagattgcagacccgaggagcttaatgtgccttaacagcgattttgacctgatcgagacgcctacatacccaaggatgattactctggagaacctcgaggctttgcctttgtgcaggttgtggatacctatgatgcctcaaaggcacaggaccatatg

SEQ ID NO: 19087 - DNA, 377 bp, Glycine max
aaatggtgtcgctgaaactgcagaagcggttttccgcttgcgtgctcaagtgtggcagaggaaaggtgtggcttgaccccaatgaagtcaacgaaatctccatggccaattctcggcaaaacatcaggaagttggttaaggatgggtttatcatcaggaagccaaccaagattcactcacgctcgcgtgctcgtaggatgaaggaggcaaagaagaagggccggcactctggttatggtaagagaaagggtacaagggaggcgaggctttccaccaagatactttggatgagaaggatgcgtgtgctcaggcggttgcttcgtaagtacagggaatcaaagaaaattgacaagcacatgtaccatgatatgtacatg

SEQ ID NO: 19088 - DNA, 252 bp, Glycine max
ggctcggaaccttcgacaccgccatcgaagctgtcatgtcctacgaccgagccgccttcaggctccgcggctccaaggccaggctcaacttccccctcgaagttaacaccgcggcggagaccgtctccgtcgccgccgtcgacgtcgagaggaagcgccgccgcgaggaggaggaggtggtggtggatgatgtaaaggcggtggtgaagaatgagaaaataacggagcatgatgtgagttggtttaagggga

SEQ ID NO: 19089 - DNA, 350 bp, Glycine max
cccacgcgtccggaaacggggaatcattgtctgcgtctgtaaattgtaaattgcatcatccctgaagctgaacctcaaaaccgtagctgtccgcctgtctgcaacggcgtcgttatgatcagttgagaatccaaaggaatcgagtcgaatcatctgaccggcgacagttatgtacagagagcgaggaggcgtcggatccaaatcggaggtaacttccgttgatcggaagcgaatcaacgacgtcctcgataaacagcttgaacgttcctcgccttccacatccagagccgccgccatcaacggcaaggaccgctccttctctttcctcttagccgccgccaaagactccc

SEQ ID NO: 19090 - DNA, 335 bp, Glycine max
atatacggcatcgttaccatggtctacaagattgaaaattgcagctggagctgcaaagggtggagcctttctacatgaagcaaagaaaccagtcatctatagagattttaaagcttcaaacatcttgttagactcggattataatgcaaaactttccgattttggcttggccaaagatggtcctgaaggagatgacacacacgtttcaactagagtcatgggcacacaaggctatgcggcctcagaatacatcatgacaggacacttgacaggcatgagtgatgtgtacagttttggagtcgtgctctttggagcttctaacatgacgaaagtca

SEQ ID NO: 19091 - DNA, 162 bp, Glycine max
  modified_base (92)..(93): a, c, g, t, unknown, or other
  modified_base (97)..(97): a, c, g, t, unknown, or other
tcggcttgctgaacacagatgaagctcttgcaatttacatctggcctcaactcaacagacatttttctttcatctactgtgttgaggatctnntgtntcaaaataagcttgaggaatgtgaatcttgttttgagaaactggatctagattttgaacccatta

SEQ ID NO: 19092 - DNA, 390 bp, Glycine max
cgcgtccgtttttgtttatcccttcttctctcctataaaaacaccaacacacaaatcttcacaacatttgcatgatctgactcacaaatcatcctcctattcctcggtcgtagcctgttgttccctctttcatctctcttcgccgtcacaacagccaccaccatggtcgaaaccagacgcggcgccttttcttccaagcgttctctctcttcgccttcttctgcgtccaacaccaaacgatccaaggtgtctgaggattcctctgtggcggctccggtcaacgaatcttgaaccggaaatgaatctggggaaccggagctacgaccctctgatctgccagataccgcgtcgttgaaggtcgcgggtggtttgtgattaggcctccttctg

SEQ ID NO: 19093 - DNA, 297 bp, Glycine max
  modified_base (15)..(15): a, c, g, t, unknown, or other
  modified_base (21)..(21): a, c, g, t, unknown, or other
  modified_base (44)..(48): a, c, g, t, unknown, or other
  modified_base (50)..(53): a, c, g, t, unknown, or other
  modified_base (56)..(57): a, c, g, t, unknown, or other
gcggggccgccctanaaatanaaaaaaaagttttaaatttttgnnnnngnnnnttnnggcggacctggtttcattggataggggttgggcaataaaactctccttaaactacaggtacattggcaattttttttgctcaaaaagtaattcacacacaacatataaaaaatggtaactgattatacatcaatattgtgcgagaaaaaaaataaaaattgtttttagaaagatttcataattacaagatttagaagccggctgttagcttttttaaataaaatggacagggttcaactt

SEQ ID NO: 19094 - DNA, 389 bp, Glycine max
cccacgcgtccgggcatggccttatcctctcccttcctcatttcagctgtgaacgccacatgttcagtaccccatttccatttccatttccatgcacagccactttcactttcttcttctcacttcccaattaatattagaccctccacccatcatcacgttcatgtctctcacaatcacaaatggagagcaaaagtttcatttttcacttccttcttgaagaaaggcaaagatgctaagatcatcaaggaagaaatgcttgaggccattgcaccgcttgatcgaagggctgatgccactccccaagaccagcatacaattgatcagattgcgcgggaacttgatgcagttactccaatatatgagcccctcaaaactaacctactcga

SEQ ID NO: 19095 - DNA, 362 bp, Glycine max
gcgcccacgcgtccggtgtatcatcatatggaggagcggcattaaaaatgcagatcttcgtgaaaaccctggcggggtagaccataaccctcgaggtctaaagcagcgacaccattgacaatgtcaaggctaagattcaagacaaggaaggcatccctccggatcagcagcgtttgattttcgccggaatgcaacttgaagatggaaggaccttgtccgattacaacatccataaagaatcaacccttcaccttgttctcatgcttcttggtggcattatcgagccttccctcatggctttggctcgcatatacaaccaggaacaagatgtttttgccgcatattcttttgctcgttctgta

SEQ ID NO: 19096 - DNA, 342 bp, Glycine max
acaacaacaactgatgaaattcaagagtacattgctccatcatgggctaagtttgaaatagggaggggggctgtctattggaaaaccatgaatggcctccctccttcttcaggagaaaagctaaaacttttttataatccagcttctactcatcttgtccctaattaagaatttggatttgcttttattggaggttttaattatccaattatgtttggtgttgagccatttccttttgcttaaataattttcaagccaaaacttaatcccccaattatattccatttcatatattcaatttcttaataatcttttttactatcattcttttcttttacaaaa

SEQ ID NO: 19097 - DNA, 317 bp, Glycine max
cccacgcgttcgctccttcttccacctagcagtggtgacaaccaaaccaagtgtcccctccggtctcttgttaacaggtagcagagttagtgagtaatggcaggaggacaactaggagtgcttaatgcactcgatgtggcaaaaacacaatggtaccacttcactgctattgtgatagctggaatgggattcttcactgatgcctatgatcttttctgcatttcccttgtgaccaagttgttggggaggttatattacacagacataaccaacccgtagcctggtgttcttcctcctaatgtgcaagctgctgtgac

SEQ ID NO: 19098 - DNA, 423 bp, Glycine max
aacgcagcatcgctattctcttcattccatggctttgcccaaccagcaaaccgtggattaccctagtttcaaactcgttatcgtcggcgatggtggcacaggaaagacaacctttgtgaaaaggcatctcaccggagaattcgagaagaaatatgagccaaccatcggtgtggaggttcacccattggattttttcacaaactgtggaaagattcgattttactgctgggatactgctggacaggagaaatttggtggcctcagagatggatactatatccatggacaatgtgctattatcatgtttgatgttactgcccggctaacatacaaaaatgttcccacctggcaccgtgatctttgcagggtctgtgagaacatcccaattgttctttgcggtaacaaggtttgatgtcaagaaca

SEQ ID NO: 19099 - DNA, 298 bp, Glycine max
cgtctctccgcaccagtttcaccgcacgaatatcttgttgtttggagcgatccgagaaaaagtctgtaaacatgttggtttaccaggacctccttacaggtgatgagcttctctctgactccttccgttacaaggaaattgagaatggaatgctgtgggaagttgaggggaagtgggttgttaaaggagcagttgatgtagacattgttgcaaacccttctgctgagggtggaggagaagatgagggagttgatgattcacctgtttaggttgttgacatttttgacacatttatact

SEQ ID NO: 19100 - DNA, 318 bp, Glycine max
cccacgcgtcctcccacgcgtccgctctcttcttcttcttcttcttcttgcacgtaggggtcgaatccacaaaaataatggccttaaattacaacattgccctcgccttctctacggttctcacgctgcttctccttcccttaccaacccttggggagctcgtgcaggatcagccactattcctcatgtaccacaacggccaactcctgaaggggcgcattaccgtcaatcttatttggtacggcaccttcaccccgatccaactgtccataatcgaggacttcataaacttactaagcagcgcgccaaactcgccgt

SEQ ID NO: 19101 - DNA, 295 bp, Glycine max
cccactcgtccgcccacgcgtccggctggtgcatgcaccatggattggcctctaaggctcagaattgcaattggagcggccaaaggattagcatggcttcatcatagctgcaatccccgcattatccaccgaaacataagctctaaatgcatcttgttggatgctgattttgagcccacaatttctgattttggccttgctagattgattaaccctattgatacacatttgagtacttttgtgaatggggatgttggggatttatgttatgtcgctcctgaatttacataaactt

SEQ ID NO: 19102 - DNA, 296 bp, Glycine max
cccacgcgtccgccacaacagtgggagggagatccaaaaagagagagtggaaaagatggcgcggttgatcacagtggtgtggtgcgcggtggctgttctattattctcctcggccggtgcgtcgtgggtggaggatgcggctaacccgatacgaatggtgtctggcgtggaggcggaggtggttcgggtgatcggggagtgccggcgtgcgttgaagtttgctaggttcgtgagcaggttcgggtagagttaccaaagcgaggaagatatgaatgagaggtacgagattattctcg

SEQ ID NO: 19103 - DNA, 410 bp, Glycine max
  modified_base (10)..(10): a, c, g, t, unknown, or other
cccacgcgtncgaaataattggtccggtactagatgtagcttttcccccaggtaagatgcctaatatttacaacgctctgatagttaagggtcgagatactgttggtcaacaaattaatgtgacttgtgaagtacagcaattattaggaaataatcgaattagagctgtagctatgagtgcgacagaaggtctaatgagaggaatggaagtgattgacacaggagctgccctaagtgttccagtaggtggagcaactctaggacgaattttcaacgtgcttggagagcccattgataatttaggtcctgtagatactcgcacaacatctcccattcatagatctgcgccctgcctttatacaattagatacaaaattagcccttttttgaaacaaggaataaaagtagta

SEQ ID NO: 19104 - DNA, 400 bp, Glycine max
gccacgcgtgcggggaaatggatcatattcagccgaacataaaccaattctaaggcattacaaagctgcccatatctgctattccagaaagatctcaacctcattctatacctgatctctctgcacgtactttttgtggcaccatgcagattaatcttacgatcaatgaaatcaccagctatcttgtcttaaactccgatgaactagtcatacaaaacactcacttgactaactctcaaagacaggtgagtagtttttagtgatcaaaatattctgtttaagcacatatcgaaatctgagtactgggctttggtggctctgttccgggcttaatttatccagcagtaaactccattggatgttggtagggatactgatgatgacatactacttttgctgg

SEQ ID NO: 19105 - DNA, 458 bp, Glycine max
gtggatttcaatctcgttcagttcctcccattttcatacacaaataattttctttatatttctgcattgctttgagtggattttgcataatcatattatcaatttttcattcatttaaccaggggtgtaagaagaagttgaggtgatggaaccccaggatgaagaagagatccataactgtttgatcaagctggttgctttattgttccttaccttgggttatctttctagttactgtctttaatgcagcatcaatgctagtgaaggaattgactctattgttgataatgcattacagagaagtaatccggaaaggcgaagggataaggtttacattggttgtggagctgggtttggtggtgacaagcccttggctgctcttaagttgcttcaaagagttcaagaactaaattatctggttcttgaatgcttggccgagcgaactcttgctgatcgtt

SEQ ID NO: 19106 - DNA, 293 bp, Glycine max
agctatcattcactttccccatccatccatccaccgaaccctaaccctaatcctccatcatcgatttgactcgattctctcgctgtctgttatttccttcaaagcaaaacaattccatcgatgaatcgggcgtcgcagctttcgtgataatgatcttggcgctgcgaatcgattgcatgggtttggagaatgccggagcttcgtagtggaccgcgacgacgtcgtgctccggttgctcgtaaaagctccgaaccaccgtctccggccgggagatacgtcaagactcgcgctgc

SEQ ID NO: 19107 - DNA, 279 bp, Glycine max
ctcatgttgaattcttgagaggagttgctaatccacttggcatcaaggtgagtgataagatggttcccgatgaacttgttaagctgatagatattctgaaccctaaaaacaagcctgggaaaaatacagtcattggtaaaatggagctgagaatttgccaagggaactttcacattttaatcaggccattccgaaaacaagtcaaaatttcacttgggtttatgaccccattcattggaacaccattaaagctccatttggacttaaaacccgctcttt

SEQ ID NO: 19108 - DNA, 434 bp, Glycine max
gcccaaccatccgtcgccacgtggtggaaaggtacccaaaaatactaccaactcataaagtgatcaccaaaactcaccctcactctcggtacccaaatcctcgacgagaactactccctaggaaaatcactcaccaacgacaacattgttagtttagcatccaagggtgcctcgaaagacgccatcaacgttgttctcacatcctcggacgtaaccgttgaaggattctgttccagtaggtgcgggacccatggctcctcggtgggtcctcgcaagttcgcttacgtgtgggtggggaactcggagacgcagtgcccgggccaatgcgcgtggcccttccagcagcccatttacggcccacagaacccgcccttggtcgcgcccaacaacgacgtgggcctggacggaatgtgtatcaacgtggctaccctatt

SEQ ID NO: 19109 - DNA, 150 bp, Glycine max
  modified_base (22)..(22): a, c, g, t, unknown, or other
cttctattgttgtttgtgtgtntgtttatttctctcacctgataatgtcttgctgcggtggtaactgtggttgcggaagctcctgctagtgctgcatcggctgcggaggctgcaagatgtacccaaacttgagctacacccagtcaacca

SEQ ID NO: 19110 - DNA, 312 bp, Glycine max
agataacaaaaatcgaaacattactcgttttttatttccccaaaatgatcaaggttatgagattgaatcgactaaaaaatgaaatgaatcatttcatattgatagtattgctatgcttagtgtgcgactcgttagttttttagaacggttccaatctaacaaatttataaaccggttcatcgtataaatgaattaaaaaagaactaatttccaacgcatcgcttcggattttctagatcttaagaactagtcctaacataaaactatattaaaaatgatttattatgcgcaactgaacttttgtgaagcata

SEQ ID NO: 19111 - DNA, 135 bp, Glycine max
gtggattgtattagaggtggactggacccataactgcatcctacttctcccacgcgcaccagtttcgatggtgtgtaagctcctacccttaaatctatcaagagcagtttccctcacactattattgccacagat

SEQ ID NO: 19112 - DNA, 304 bp, Glycine max
acgtccacgcgtacgcacacattttctagtgtccttcctcactctaaatccgccattgccattgggatggctaataagcgaaggtccgtggccactcgccttgactaagtgtatcgaaccatgtactcgactttctgcagcaccgccaactccctttctcatctatacacccacgccatgaaccaacataaactctcattccaggccggtgaacgacacgctcttgaaaaattgtatcaatggattctcaggcaacagcgagatggatctaggctgaccaccattgatattgttccccatttgc

SEQ ID NO: 19113 - DNA, 285 bp, Glycine max
gatgagctagtgcaaacggaccacacgaggattattcatatatcattctctaaccgtgcactatatccctctcattcactctctagctagactcctcatcatcgtacaagaaccaatgcttgtactctctgttactttttaaccatcgttgaatgaatcacctaaggaaaaacgagtagcttacagcagagcgggttatctttgacctgtgttgtgaacgagataaatcgtgcttgtgtataggtgagtgcatgaagaattaagagatgggtgaagcgggtgaac

SEQ ID NO: 19114 - DNA, 374 bp, Glycine max
aagattttgacacctaacatcccattgtggtcggaggacacggaaatgttcacaaagcaaaggcgcacactggtcatattctagccgtgtagaaacttcatttagtccaaaatggggaatcgcccaatattaaagctttcacaagctaaatatcaagctttgataaacattcgacatcgtaacattgcgaaatcatattggttttgttctcattcacaatcctcatttgtggtgtatgagttcttggaaaaggcaagcattgattggattgtaaaagatgatgatcatgcaatatcctttgatcgggatcccaacactaatgccattaagggtggagcaaatgccgtatcttatatgcatcatgactgttcacc

SEQ ID NO: 19115 - DNA, 345 bp, Glycine max
cgttgttcatgttggatacaggcatattgactgtgctagtgcgtataagaatcaagcagagattggttctgctcttaagaagctttttgatgatggcgtggtgaagcgtgaggacttatggatcacttccaaactctggtttgttgtctcttagtaattgtgatctctttttgaatattgagaaagattgtatgtgtttggaccaggtcgggtgctgaatgaaggatcctttgatttgctggctatatttttaggtgttcagatcatgcaccagaagatgtgccaaaagcattggataaaacattacaggtattgcgacttgactatcttgacctctatctgatc

SEQ ID NO: 19116 - DNA, 327 bp, Glycine max
ctcaaccttaagaagacacctcagcttgtggaattggttgatgacagcgaggagatcgaagagcttcttaatttgtctcctgaaaaggttctactaaaatggatgaattttcatctccagagagcaggttacgagaaaactgtcagaaatttttcttctgatgttaaggatggagaggcctatgcttatctgcttaatgtccttgctcctgaacattgcattccggccacctttgataccaaagatgccagtgaaagggcaaatcttgttcttgatcacacaaagagaatgggctgcataatatacttgaccccaatggatgttgca

SEQ ID NO: 19117 - DNA, 445 bp, Glycine max
cggacgcgtgggtttgcctcttggcgcaattcgatcgaagctatctacccttccatggcggcaggactctccaccgccgcaatcttaaagccctacaatctcgtccaacccccaatccctctttctaaaccaaccacatcactcttcttcaaccccttaagatgtttccatcacagtacaatccttcgagttcgacccataagaagaatgagcggcttcaccgtttgcgtcctcacggaggattccaaagagatcaaaacggtcgaacaagaacaagaacaagtgattcctcaagccgtgtcagcaggtgtggcagagaagttggcgagaaagaagtcccaaaagttcacctaatctcgttgcggctgtcatgtctagctttggcatcacctttatggcagtctttgccgttaattatagattctcctgcaaatggagggtggag

SEQ ID NO: 19118 - DNA, 375 bp, Glycine max
ttctctcccaccactttttcctctctcttcctcgactagctagccacacaaaatgaggatgggcttcagatccagtgcctccctgtcccaaatcacgagaccattcattttaatcacgtgtttgatacacataaattgggctctcgctaaactcttccaattttttctataaactatatgaccttacgaccaatccttatgcttcactccttcttcgtcccttctctcttctgtgtctactttgtcgcataaactctctcccaaatttcgaattcattatatctttcttccttatttcctacttgttctttccatttagataattatatatgcatcttccaattttacattatttatctttttttttcctatctt

SEQ ID NO: 19119 - DNA, 333 bp, Glycine max
gattccggtcgccacgctccgaaggctctaatctacaatgctgaatgaagcactcctatactgggtatcatatataaagcattagactagatggaggaggggaagtacgataccactcttctgtgagacttgaaaaaagtgggtgttgaagcccattggaacacatgttttaatttctactcttttatcagtagctgacctccaatgtgtatggaaatttcaattcatacggaagttcatctgcagtccctattgctttcttgtacaatatttgcaacttgctgtatagtatagtttgtgtagtgagggagaaagagccaccataggatcttt

SEQ ID NO: 19120 - DNA, 453 bp, Glycine max
  modified_base (348)..(348): a, c, g, t, unknown, or other
cccaaacgttaactcagacgaagcaccaacagaagaagaagaaacaaaaccgaacctctctaaactctccaacgtcgccacccgattcatcgcatttcgcaggctgcaatggcgacgttcgaactgtaccgcaggtcgacgattggaatgtgcctgacggagacgctggacgagatggttcagaacggcactctaagccccgagctcgcgattcaggttctggtccagttcgataagtccatgactgaagctctggaaacgcaagttaagagtaaggtctccatcaagggacatctccatacatatagattttgtgacaatgtttggaccttcatcttacaagatgcnttgttcaagagcgaagacagccaagagattgttggacgggttaaaatagtggcgtgtgactcgaagttgctcacacaataatgtgcctaatttctgccattgtcg

SEQ ID NO: 19121 - DNA, 247 bp, Glycine max
aacctactttgcccctctcacgctttacttgtcgcgtatcaaacgatgttcaatggggctgttgcagatggacccacaacctgctgagaagcatgatatctggcctgtgctctctactccactgctactacttatctagttttcatgaaaaatcacacgtaagatggtggatcaattgccacacatgcacattatcagtcgcagaatcttcagacgtgttgtagcaacagtttattttaaacaccct

SEQ ID NO: 19122 - DNA, 377 bp, Glycine max
gaaggaagagaagaagttcagaacaaaaacacatcaaaaaagaagtaactctctttctttctttctttctttctttctctcgttgtgaagttgttctctttaatggcgaagtcaaagaacaatgctaagaagttgtcctacatatcagttccatctcagatcatcaactccatatcatcatcttctctgcaatctcttcttgactctcccaagaagtcttcaaggaacaccaacaacaacaggttctttatcttcttcaccaacagcaccagcaccatcatcttcagaaaacaaagactctggtttttcacactctttctccttggtttccttggcatgctcaagtttggccttaacctttacaccccttttccccc

SEQ ID NO: 19123 - DNA, 394 bp, Glycine max
cccacgcgtccgcccacgcgtccgtatagcttggttttatgttgctggctctcatttggaagtttgactttccaccctttatggtgcttattatcgctatcctaaatgatggtactattatgacaatttcaaaagatcgtgtaaaaccatcacctctgccagatagctggaagctagcagagatatttactactggagttgtgcttggaagttacttggcaatgatgacagttatattcttttgggcggcatacaaaacaaactttttcccgcgagtgtttggagtcccaagtcttgaaaaaactgctcatgatgattaccggaaacttgcctctgcaatctatcctcaagtgagcactattagtcaggctcttatatttgtaactcgatctcg

SEQ ID NO: 19124 - DNA, 379 bp, Glycine max
tcgcccacgcgttcgtccacgcgttcgagccctcagagattccggcgaggacttcaaggcggtgctcaagtgcgactacagtggtggcggatgcggctgctactgttggggtgggggtgaccgggatgcggagaaagaagaaggtcccttgtcggagtggttgaatttcacttctgatgacgcaaaaacggtgcttgcggctctcgcaatttcgcttgcgtttcgatcattcgtggcggagccgaggttcattccttcgctgtcaatgttttctacattggatgttggagatcgaattattgctgagaaggtttaatactattttagaaaaccatgtgcaagtgacatattgatttttaaaaagccctcggtgcttaag

SEQ ID NO: 19125 - DNA, 404 bp, Glycine max
cccacgcgtccggttgaggatgtatgcaacatgtcaacagcttcaggtgcaggcccaagctcatgcagctgcagccagtggcattcttggccacacagaattgaggttgcatatgccaccatcaatagctcttgcaagccgagggcgtctacagggtctcagacttcaacttgcacttcttgatcgggagtttgatgatctagattatgaaactttaagagctctagattcagataatgtttctactgcaccctccatgaccgaggaagagataaatgctcttcctgtccacaaatacaaagtttctggtcctcaaagtggtagttcctcaatgcaacaaacaatatctttcactcctgctgaaaagaagcaagataattcaactgctgttgggagcatgaaag

SEQ ID NO: 19126 - DNA, 355 bp, Glycine max
cccacgcgtagctctttgacaccttcttcggcaacaccgagatgagggttgtgatgcttggtcttgatgctgctggcaaaacaactatactttacaagtttcacattggagaagttttatccaccgttcctacaattggtttcaatgtggagaaagttcagtataagaatgttattttcacagtctgggatgttggaggacaagagaaactaatgccactttggaggcactactttgacaacacagatggcctgattttatgttgttgatagcccggaccgtgagagaattggtaaagcaaagcaggaatttcagacaatcataaatgacccatttatgctcaatagtgtcatct

SEQ ID NO: 19127 - DNA, 351 bp, Glycine max
gttcatgaagggaattcaggtatacgagtctctgataagttccttgagtacatttacagaagcttcacattaaaggcctgagttgctgatctcaataggagaacaatgcctaacttttgtagggaaaatctgagcgattggataccccacctccaaataataagtggagtaaaagcataaatagcaacgttgttatcggacaccatgaaaaaaggaagaaaaaaagtcctttgttgttccaattcgctcatggtggggactgggaatggtacaacttattaattattatttgtacctttagaaattgtaatgatcaggaattattttctgtgaaattttatttggtccttt

SEQ ID NO: 19128 - DNA, 371 bp, Glycine max
cgcacacagaaatgcagagtgccctgcgattccatttccaagcttcaaacccaggcatcgttgttccgcacacgaaccacgctttcgccaccaaccttatctcacaccgtaccctctcctgcacaaaacgccgttcccttcccctgtgctccttcaccgcacaaccttcgaaccaaacctccgccgttggatctccatcgcttcaacactggaacctcaccaatcgccacgtcaccgttctcaacgtctttgcctgcgcgacggcgatatgtgcaacggggcctgttttgcttcggtgattccgacgctcctggctttcaagaaagcagcggagtcgatggaaaagctcatgggttccacgggggaggaac

SEQ ID NO: 19129 - DNA, 378 bp, Glycine max
cggacgcgtgggtccaaatccaaaaaaatcatggagcagttgtactacctcacccttgtgctactgtttgtgtccttcgtctctgtctcttttttcatcattttctacaggcatcgttctccgttcagcgtccccaacttgccgccggggaaggcggggtttccggtgatcggcgagagcctggagtttctgtcggcgggacggaaggggcttccggagaagttcttctccgatcgcatgacagagtactcttccaaagtgttcaagacctccatcttaggggagcctacagtgattttctgtggagccgcatgtaacaagttcttgttttctaacgagaacaaacacgtcatttcgtggtggcctgaaaatgtcaag

SEQ ID NO: 19130 - DNA, 420 bp, Glycine max
gtccgatttccttccatattccttggtccgaacacgacacagtagcataccatcaatcttcccccaaattatggattgcctcttttttccccattaacaatattaatcaatccaattaatttccatgaccatgtccataacactcttactccaagccaacccctcccacttgaaatggaaccagttaccttcccttccacgtcgcacaaggcccgaccgtttcactccaatacccgactcgaaacgccgcgtttcaagcgtcaaatgtatctcctcgtcgcggaagccggataacacgtttaatttgcagtccccgtgggaggttctggcgagcaccggggtctaacacgctgaatgcgctgaagaaaccggccatagctgcggtgttggtggggctgtttttaatgtacgatccaactt

SEQ ID NO: 19131 - DNA, 451 bp, Glycine max
  modified_base (293)..(293): a, c, g, t, unknown, or other
gagctactgttgtcattgctgtgaagtactccatagttgagcgtccagagaagatagatgagatcatataccctgaaatatcttcatttctgatgcttatcaaggataacgataggcatgttaggcgagctgctgttttggctataagcacatttgcacacaataagccgaatctcatcaaggggcttcttcctgatctgctgcctcttctatatgatcaaactattgttaagcaagagctcataaggacagttgatcttggtccttttaagcatattgtggatgatggactngaattgaggaaggcggcttttgaatgtgtagacacattgctggatagttgccttgatcaagtgaacccgtcatcattcattgttccttatcttaaatctggtttggatgatcattatgatgttaaaatgccatgccacctggtactctccaaactagc

SEQ ID NO: 19132 - DNA, 402 bp, Glycine max
aatttcttggttacatcaaggtacatattttctgttcattcattaactcatctgcaaacatggccgataagcaaccccacttgaacggcgcttattacggtcccgccattcctccggcggagcaaccacgctaccgccctcacagtcaccgcggaagaagctgctgttgctgcctcttcggaatcttgtggaagattctggttgcactcattgtcctcgttggcctcgcggtcctcatcttctggctggtggttcaaccccgttccttcaagttccacgtcacggaagccgacctaacacaatttgattactataccaacaacaacacccttcactacaacatggtcctcaacttcactgcacgcaaccccaacaagaagctaatcatatactacgacaaag

SEQ ID NO: 19133 - DNA, 389 bp, Glycine max
cctttcagatgatgtttccttccccacgcttcaaccctttctctatctgaactcactcacaagaacaccactgcttcaacttcaaaccccaaaatcgaatcaaactttcccaccatcactcactccgaaacacacctcaaccacttcacagcaccacccattcaaggtttgctacctcgtaagcacttgtggcttctccgtagaaaccgctctcaagatctccaagttcacccaattcaaaacccccgaaaaacccgattcaatcatcgccttattcagaagccacggtttctccaacacccagataatcagcattattagaagagcacccaatgttctctcatgcgacccccacaaaaggattttcccaaagtttgaatttttacgct

SEQ ID NO: 19134 - DNA, 460 bp, Glycine max
cccacgcgtccgctttgtcttcttttgggaacggtggatggacatgcagttgccaacacagtactacacagctctgctttacacgatcactacgatcgtattactactgctaatagtatattatgactacatcagcagatggtacaaacatcgtcagaaggtcaacctcgtaagggatcacgaagaagagaaaaaaccattgaagccaccgaaacccactaacaaatctggaatcccaataccaaatggctcacccaaggcagcacctagacaggagtactattatatgtcagcaagatcattggctgggagtggcactccaccctggggaatctacatgagagctgctaaaagtggtccttcagcccatcgaatcgatcgatgactcttcttccgatgacgaagcacctcctgcttcctcaaataattctgcatcccaagctatgccaatcccacgttc

SEQ ID NO: 19135 - DNA, 391 bp, Glycine max
cgccaaaccgccgattccgttgagcgtttctaccgtatcgctcatgaaggaggcagtggctggtggtgttggttgtggtggaggtggttttgctgatcatttgtggtagagggtaggaaagaaaaaaaagttgaaaatgagttcagacagccgcagcaggagcagaagcatgagcccaatggaccgtaagatccgctctgatcgattttcctatcgtgatgcaccttacaggagagattcacgtcggggtttcagccgtgacaatctgtgcaagaactgcaagagacctggtcattatgcaagaaaatgccctaatgtcgcaatttgccacaactgttgcctccctgggcatattgcttctgaatgtacgacaaagtcactgtgctggaac

SEQ ID NO: 19136 - DNA, 446 bp, Glycine max
cttcccccattttttcctctttcttgctcgcctagctagctccagaaaattaggatctgcttcagatctagtgtttccctgtcccaaatcacgagtccattgagtttgattttgtggatgaaaagcatagatagggcttttgcaaaactctccaatgtttcttgaaattatatgaccatgcgtcgaattcgtatgctgcactccttctccgtcgtgttcctctactggttctacgttttctcatgaactccctcttaaatccgtgattaattagatctatctccttagttaatccttgtcttttccaataattaattagatctgcgtctcctttttggattagtttcttttttggttctgttatcaaatcaaataaaaaatctccttctcggaaatggcatcaccgatccaacaacaacaacgctcgactactacaagttctggat

SEQ ID NO: 19137 - DNA, 422 bp, Glycine max
gttccatgaaacttctgcaatcaatcttcttcgaaaattgcaacaaaaatacatacaacggaactcatccaatttcaatggttgcgagagctaacggaattgagtgtgtttgaagtgattatgggtcctatgaggatgctgaataacagaaagaaaggacagcagaagaagttttgttaacctataccgtatttattatatctatatttaccaatttttttcttgccattccatacgatagagcgaatagttcgtagtaggtgtttttaacccccacgcgatcttattatggatggtccaaccagcattatatgattgggaataacatcacaataggggatgatgatgatgatgatgatcgccataactgtctccatactcttgggaaatgttcagagcttcgaccgccggtagtttgtgtg

SEQ ID NO: 19138 - DNA, 343 bp, Glycine max
tgaaaagtactactattttctcttctcttgtctattcccctaacgcgttgcttcttcatttgcgtggttttttaacatttgaaaactcataattcttatcttcacacatagtgctagtgcgctgggcctgcatctgtggcctctctcttcctcatcctcatatttcattcactttgtgggtcaaaaggtctcctctcttcttctcttcttttattaattaattacagaaattgtcagtttctaaatcagtgctagcagagagaaagagattttaactttttaaggcggatcactcaacaaaccaatgggtctacagctgtccctgacatgatgaaatcttaat

SEQ ID NO: 19139 - DNA, 401 bp, Glycine max
aaatgccatggatgcaaaaggcgattgcgatgatcctatcaattatttctcatcattgaactttgaagccaactttggtgagtttaatgaattcaccacacctctatttgatgacccagaaggttcgttctcttttgtcatgcctggatctttcaaatctggaggagaatctagttctgacaatcttttataacaatggtactacgattggttctgtaataacttaatatctatgtttctcttaatcgtgaagatataactttccggtttgtgttaaatttgcaaagccggtttaatttcatgaccatgcaaatccttaagaaggatgtttgatttttcttgatgattttataaattataaatggcgccgtcactttaatccattttttatttccaaattc

SEQ ID NO: 19140 - DNA, 320 bp, Glycine max
cccacgcgtccgattttaacatatgagtaacatagcgggttcacaggccaccgacgaggatgttctccaccttcacttcaccgtcgctggcgtcaagatttccgcactagcgctccggcggcaccatcgacgtcactggcctgatgcatggcaagactgatgccaacgccatcatacgccttcgcccttcccgtcgaaggcaccaagattcgtgtcattgcccatttttttttcatatttctgaattccattcatgtgcttcaagtcctctcttgattcacacctgttggattttctgtggaacaagtatgggatgaata

SEQ ID NO: 19141 - DNA, 283 bp, Glycine max
ttccggtcgaccacggcgtcggcaagtcttaaaaagcgatctaagatatacctacacgaggtcttcgggaagaagatacattgcacttgcaatgccaagcgacaggtgatgtacttatgagtaatactctacgtcatctactctaatttttaacacgagtctttataattgcttttagtttacccctttgaaattcaatctcattcaactttgcaaaacatttttcctagcggtggaaaattggatttttttttttttttttggatatataaaaatattgggg

SEQ ID NO: 19142 - DNA, 418 bp, Glycine max
cggacgcgtgggcggacgcgtgggtggaaattgaggcagctcagtggatgccattcgaggaatttgctgatcaaccttttaatcagatgcatgaacccttcaagtacatgattgaattatgcttggcaaaggttgaaaaagtctataatggattctctccgcgacccatctcatcatatttcgtggaggagttgaattatctatatttgaatagtcattgcctggacaagtcttcttaagttttacaaatcaaccttggtcgtcatccataaaagtttagtttgatatttctttcttgtaaggatttaattaagctttttctccttaaatttaggttacttctgtttttgtccttcaaatttattttttttagtcctaaaattatgaaagatgttctttttacttcctcttgcggttt

SEQ ID NO: 19143 - DNA, 420 bp, Glycine max
gcacaagattagatcattggcaacaaaagatgccagagtggagacacctaaattatcacagattccttgcaagttgattgagaaagacttgcacaaaggcagcaaaggtaatcatgatgtggaacagcctgctggctctctaaagtcatatttttcagtacgttttgtcacatccaagtgtagaatttgtggcaatatcatatgccattgtgaaaatcctagcaattcaacacaggtgtcatcagacatatcatccgaaggatctgaaggaagggacctaattgcacgtggtgccgattcattgagacaggattgccggactaaatgtacatcacctatggagaagaaatctgatcttgattctgatggagctgtaagttctttggacagtgaacatgtttgtcctagttctcagcatgt

SEQ ID NO: 19144 - DNA, 444 bp, Glycine max
  modified_base (10)..(10): a, c, g, t, unknown, or other
cccagacttncacacgagagaaggagtctctcaatctcatggaagtcccacaagcagataaaaccttgggcttggacatggccaagggcagcgcattctgcaagatgggtgaaggttggacatgcatcataactaaaactgaggggcctgatgctggcaaagttttcgttaaatgtggtgaaaattgcacctgtaccattgagggcgaagcagtgtcccaagaattgaatttgccacctgatgttgtgagcagcagtggcagtggagcattctgcaagtgtggtgaagggtggagttgtgtcattttcaggactgaaggccctgattcaagctcttgcaagggctttttttaaatgcgctggacagagttcttgtactattgatgacaaaaccacctaagattaaacgatgagggcatctatgatataatctgatgggtatttt

SEQ ID NO: 19145 - DNA, 397 bp, Glycine max
caagcattggagaggcattaaaccaaggacaggggcaccatattcctgtgatattggctatgaacgatttctaggccctgagattttctttaatcccgagatatatggcagtgactttaccacccctttgccagttgtaatagacaagtgtattcagtctgcgccaattgacacaaggagatcattatacaagaatgtagtgttgtctggaggttcaaccatgttcaaggattttcacaggaggttgcaacgtgatctaaaaaaaatagtggatgctcgtgtacttttatctgaatcacgcttgaatggggagataaaatcgcagccagtggaggtaaatgtactcagcaatccaatccagagatttgcaagttggtttggaggatcaatgcttgca

SEQ ID NO: 19146 - DNA, 462 bp, Glycine max
  modified_base (2)..(2): a, c, g, t, unknown, or other
  modified_base (47)..(47): a, c, g, t, unknown, or other
tntcatgctatgggatactgataacatttctctcaaacacggcaatngaactcaaagctggtctaagaagatatggttctacccttaaggatatagaaatacgtgatcttatggaagcggctgatgtggacaaaagtggaaccatagactatggggaggttattgctgcaacagttcatctcaacaaactagagcgtgaagaacatctcattgcagcattccaatattttgacaaggatggtagtgggtacattacagttgatgaacttcaacaagcttgtgcagaacaaaacatgactgacgcttttcttgaagacatcattagagaagttgatcaagataatgatggaaggattgattatggtgaatttgctgccatgatgcataaaggcaacgctggaattggtaggaaaactatgcgcaacagtctgaatttaagcatgagagatgcaccaagtgctc

SEQ ID NO: 19147 - DNA, 455 bp, Glycine max
gctcggaaccttcgacaccgccatcgaagccgccaaggcctacgaccgagccgccttcaggctccgcggctccaaggccatcctcaacttccccctcgaagttaacaccgcggcggagaccgtctccgtcgccgccgtcgacgtcgagaggaagcgccgccgcgaggaggaggaggtggtggtggaggatgtaaaggcggtggtgaagaaggagaaaataacggagcatgatgtgagttgttttagggggatgccgttaacgccgtctatgtggaccgggttctgggacagtgacgtcaaggatattttcaacattccgccgttgtcgccgttatctccttttggattttcaccgctcgtggctgtgtgaaattccaatttaggactgcgttttttcgggttttagtacttacagcgtccttctgttcagggatgagtacattggacatttgacg

SEQ ID NO: 19148 - DNA, 406 bp, Glycine max
cccacgcgtccggaaacggggaatcattgtctgcgtctgtaaattgtaaattgcatcatccctgaagctgaacctcaaaaccctagctgtccgcctgtctgcaacggcgtcgttatgatcagttgagaatccaaaggaatcgagtcgaatcatctgaccggcgacagttatgtacagagagcgaggaggcgtcggatccaaatcggaggtaacttccgttgatcggaagcgaatcaacgacgtcctcgataaacagcttgaacgttcctcgccttccacatccagagccgccgccatcaacggcaaggaccgctcctcctcttccctcttagccgccgccaaagactcccgctccgcctccgtcaccgcccctatctccaagaattccaacgcttccgacgaggaa

SEQ ID NO: 19149 - DNA, 311 bp, Glycine max
atatacggcatcgttaccatggtcaacaagaatgaaaattgcagctggagctgcaaagggtctagcctttctacatgaagcaaagaaaccagtcatctatagagattttaaagcttcaaacatcttgttagactcggattataatgcaaaactttccgattttggcttggccaaagatggtcctgaaggagatgacacacacgtttcaactagagtcatgggcacacaaggctatgcgggcccagaatacatcatgacaggacacttgacagcaatgagtgatgtgtacaagtttggagtcgtgctcttgg

SEQ ID NO: 19150 - DNA, 442 bp, Glycine max
gcttgctgaacacagttgaagcctgtgcaattcacatctggcctcaactcagcaaacattttgctttcatctactgtgttgaggatctggtgtttcagagtaagcgtgaggaatgggaatcttgttttgagaaactggatcttgattcggaacctattaatcagtgttataatagtgaacatggaaaacagttggagctacaatatgcagctgaaacaagtgctctggagcctcctcacaagtatgttccttgggtagttgtggatggagaaccactctatgaggattatgagaacttcttaagctatctttgtaaggcttataaaggcactgtttcaccccaaagttgcacccaagcatcatacctaagagaagtgaatgcaaagcctaagcattcggtttgctacaaggacagtgggattatgctaacatgggaaaaagt

SEQ ID NO: 19151 - DNA, 174 bp, Glycine max
  modified_base (50)..(53): a, c, g, t, unknown, or other
  modified_base (57)..(59): a, c, g, t, unknown, or other
gccgattccggtcgaccacgcgtcgcggccccttttttttttttttattnnnntttnnnggcaacgaggtattagaaaaattgatcaaaacttcttaaactacagtcattgcatttttgcaaagtattccccacattaaaaaggactgtatcataatttggcggaaaaataaaa

SEQ ID NO: 19152 - DNA, 234 bp, Glycine max
cccacgcgttcgccacgcgtccggctaatcttaatgtcttaatctacagatgctacaggagatttcagttgtttacaagctttgaagatttccctaatgaattgggctttaattgcccatcataaatggcaagttaagccaaatttaatttactttacctcacggcttcatgcaatttgcttgcaattccctttcttctgttagagggagctacccaaatttccttaatgccac

SEQ ID NO: 19153 - DNA, 396 bp, Glycine max
cggacgcgtgggtttcgatttgagggaacagtacaagagtgtgaggatcggttaacccaactgcacaggtagtcactaaaataatggagtctcacgatgagactggatgccaggctcctgaacgccccattctttgcattaataattgtggcttctttggaagagcagctaccatgaacatgtgttccaagtgttacaaggacatgctgttgaagcatgagcaggacaattttgcagcatcgtcggttgaaaacaatttgaatggcagttccaatggcaatggggctgtgactactggtgctgttgatgtacaaatttgaagctgtggaggtcaagactgtctctgctcagagttctgtatattcatcctccggtgagagtttggagatgaaagcc

SEQ ID NO: 19154 - DNA, 434 bp, Glycine max
ctcttatgtttttggctctttgcagaatctttgagtgacacatacctagctatcacctcaatggattactattttggaaaccttaatcctaacccttattaccatcactctgccgtagtgaacatggcatctccctcctgcgagttcatgttatctgattatctcgtgttggaagatgctcttgttgttgatcatcatcaagagtcttggtcacaaagcactgaaactgaatcgtcggagaaagcaacctccagcgatgcaagtcatgggttcggtgatgcaacctccaacaccaacatgcatatgcaagtgcttcttaattatctcgatttattttatttttttcattaaacaagaaaatggtatatcgtgtattctatgctattttatgtgtgcgcaagtacgcataaatgttcattaatcatcttgggatt

SEQ ID NO: 19155 - DNA, 245 bp, Glycine max
ctgagaaggaatcacacaagagaaattttgggtggatcttggcaatttaaatttggtccaaaaatagtgagaaagaaaaccatagtttatatagttttcatgtccttcctaacggtggcgcaccaaagggggtcaggtgagtttatgcggttcacggaaagtcatggctgcggtggtgtgcgttgacagctattgtgaatatggttatggacattattatggtataagtggtgtgggtggtggtt

SEQ ID NO: 19156 - DNA, 398 bp, Glycine max
ttttgtctctctctctcctcacgccaaaccacaccagcttcgtgccttcatctcctcactttctcattggtggaattacttttgtctcttcctctctgatcttccacaggctcctattatcccttttgctttcccaatccttttcgcgaaaaaaaaaagttcactttctattttggcccccttttgtggttcctgaaacgcagtaagggttccgtttgtgatattgggtcaataatggggtcccgtttttctaaaattaccgcctcaatttttgcggtctgggggtgattgattttgtggtgaatgaattgtactggatgaggtggttctgtgttttcaattttaatttcatcctctttttttaaaggtggtgttgttaatttctaaaatttgattcc

SEQ ID NO: 19157 - DNA, 299 bp, Glycine max
acgccacgcgttcgttatttttgccctatctattatggttcccgcggcttcaaaccttaatggttctgttactctctttccctcatgcgcccttgctctcaacaacaattacacaccgtcatcgaaaccctcgctctttatcttcttcgttctcctttttgctctcgatcgagggttctttcgtggggaacactgcagatttcaccacccgggtcttattcatccgtgcccatgtccaaagttctcggcttttccggagttgacaatttttgccctattggatcaatataccccaaccc

SEQ ID NO: 19158 - DNA, 433 bp, Glycine max
  modified_base (244)..(244): a, c, g, t, unknown, or other
ccagaattgtgtgtgttggatgggacccggaaggcgtgcttggtccaccccaaactgggcacctcgccaggttcgagtttaagaggcgcctcgtgagagacgcatatgcccgcgaagccttccaacgtcaagtccgtgaagagaaagaacgccgtcaatcccttcgacaatctcgtcctcttcccgatactccgcaagacctcattgaatacttccttgacactgaagctcatgagattgagtntgagattgcaagaatgagaccaagattgaatgaggaattctttgcgcaactcaaattcgagttaagacagcttcgattcgcttgtaacaaaacacagctcatggatgacagacagattgagctggatgctctagagaaagccatactaaaaggattagaagcctatgataagatgcaaggtgaactcgt

SEQ ID NO: 19159 - DNA, 453 bp, Glycine max
cccacgcgtccgctatcctcaactagtgaaattccttcttctctttccacgagccaacaacaacatcattgatgcaatttctgttcccataaataatgcccgggagaaggagaaggaagttgaaatcgttgagtgatacaattaccgacagcagacgggcatcagtggaggtggaaaatgaatatttagagctgcaaacttggtctgatctccctactgaactcttggaattaatactatcccgtttaagtctagatgataatgttcgagcttcggttgtttgtaagagatggcattctgttgccacttttgtatgtgtggtaaaccaatcaccatggctaatgtattttccgaaatttggtgactggtatgaattctatgaccccgcgcaccgcaaaacctattccatctagttgccagagttgaaggggatctagagtttggtacaccaaa

SEQ ID NO: 19160 - DNA, 423 bp, Glycine max
cgcgtttctaatcattattagactcgatctcaacgatgaatgcaacactgctttgtccttgttcttctgctcctctgattctcgacacgcatagcaaccgaacctcggcaacgagacacgcttccaccgttgtttgttgttcgtcgaggaatcaaccctacatcccgaagctcgagccttttagccgaaccaaatttgaaagggccgttaaggaccctcctttgatcgaaaaatccgagagagagatcttagattattgttcaacgcttgaaggagaccaatcctatagctgctggcaggcttattttgagctgaaagatcttgaaaaagagtccccaaaagcagacatagagaggctgattctggagactggtggtgtaaaatccctaataggatgcttgcatgggatttcaatcatgcaca

SEQ ID NO: 19161 - DNA, 431 bp, Glycine max
aaatggtgtcgctgaaactgcagaagcggctggccgcaagcgtgctcaagtgtggcagaggaaaggtgtggcttgaccccaatgaagtcaacgaaatctccatggccaattctcggcaaaacatcatgaagttggttaaggatgggtttatcatcaggaagccaaccaagattcactcacgctcgcgtgctcgtaggatgaaggaggcaaagaagaagggccggcactctggttatggtaagagaaagggtacaagggaggcgaggcttcccaccaagatactttggatgagaaggatgcgtgtgctcaggcggttgcttcgtaagtacagggaatcaaagaaaattgacaagcacatgtaccatgatatgtacatgaaagtgaaaggtaatgttttcaagaacaaaagagtcttgatggagagcattcac

SEQ ID NO: 19162 - DNA, 418 bp, Glycine max
tctacacagctctaatatggtgcagggttctagctttcttagttgcttcccaagctctacgcatagtgacattttatgctacgcagcttcctggtccaaactatcattgccgggaggggtctaaacttgctacactgcctcgtccggatagtgtctttgaagtcctcttgattaattttccacaagatgcgatatatggatgcggtgatttgatattttcatcacacatgatctttactctagtctttgttaatacatatcatagatacggcacacgaagatgtataaagcagctagggtggacacttgcagtgtgtcagtctcttttgataatagcatcacgcaaacattacacgggtgatatagttgttgcctggtatacggtgaaattggtggtatttttcgttgagaagaaatt

SEQ ID NO: 19163 - DNA, 431 bp, Glycine max
cccactcgttcgcccactcgtccgtccacgctttcgataccttaacaatcctccaggcagagtcctcactcttgctgtcaccctcacacttggttggcccttgtacttggctttaaatgtttctggaaggccttatgatagatttgcttgccactatgacccatatggtcccatttactctgatcgtgaacgacttcaaatatatatatcatatgcaggagtacttgcagtatgctatggccttttccgtcttgccatggcaaaaggacttgcctgggtggtgtgtgtttatggagttccattgctagtggtcaatggatttttggtgttgattacattcttgcagcatactcaccctgcattgccacattacaacttctctgagtgggacctggttgagaggagctttataccacagtggatagagatta

SEQ ID NO: 19164 - DNA, 361 bp, Glycine max
  modified_base (115)..(115): a, c, g, t, unknown, or other
tgaataccgggtcgacggcgcgtccgttaaaactatttataccatcccttctggctgtagtggcagtgttggaagaagaaattgtaaggcttgaagagcagggggtgcatgtcanacaggatttgtaccatgaagctgtctacatgtcatcttctatgaggaaattggaaaattcagtttccgctccttctaacatgtcaaatccaacaatggatagtcccaatttggataaattgatatctcttacccaaacaactggttattcatcagcaacatttgcatctaatcctaccacaacacttcctgatgattatatacaagggtaagagaaccaattcctgtactaattttttcaagaaca

SEQ ID NO: 19165 - DNA, 330 bp, Glycine max
cgctctcatgctcaagatttcaggcagcattttaccaatattaggtgaaagatgtggttccggaacatgaagataaagctaatggttctgggtatcataattgccttgattctcattattgttctttccgtttgtggtggcttcaactgtggttaatgagtcttcccacatcctggcttcaactgtggtatttgtctcctcactttataagattgttgctagcagattgccattgcctctactgtcaacatagtgcttttgactttttgggttttacattcttcccacttctccgatgatgaatattatatggcattgcttgtttagtgt

SEQ ID NO: 19166 - DNA, 128 bp, Glycine max
acggacgcgtgcgcacttactctcaagcaaatagatagtatcccatgcgaggattacgattgaggtcatggtcctgtgcttgtctatttgaacctgccagttcccacttaaacattccattgtgacgg

SEQ ID NO: 19167 - DNA, 354 bp, Glycine max
gcgttttgctgctgttattatgaggatcagggaaccaattactactgcactcatttttgcatgtggcaagatggtctgcactggagctaagagtgagcaacagtctaaattggcggcaaggaagtatgctagaattatccaaaagcttggtttcccagctaaatttaaggattttaagattcagaacattgttggctcttgtgatgtcaagttccccattcgacttgagggtcttgcctattcccatagtgctttctcaagttatgaaccagagctgtttcccggactaatctatcgcatgaagcaacccaagatagtcttgcttatatttgtcttcggaaaaattgttctgac

SEQ ID NO: 19168 - DNA, 399 bp, Glycine max
ccgtatcttaccgatccatatatacacacacatatccattttcattcaacatttttatttttgatttttttgtatccgtgtaagtgatccacacattttcatttttcacattaaattaggtgaatacacgcattattattttttatgtacccattcgcgtgcgatagaattttctagagcaagagatttcggcgtaatgggtccaaacgctgcggcggcgtaacaagcggaatagctcctaattgacggctacacttacttcaaaaaagaccgtttctgtgccgccatctacgcttacaccgaggcgattacgctgtgccctaatgttccggtttattggacgaatcgcgcgctgtgccatcttatgcgcaatgattgtgtgagagtataggaagattc

SEQ ID NO: 19169 - DNA, 339 bp, Glycine max
cccacgcgtccgggcatatatagtaggggagcatggggatagttcggtggcgttatggtctagcattagcattgggggtgttgcggttctgagctttttggagaatcaacagattgtgtatgagaaagagacgttggagaacatacacaagtcagtgatagacagtgcgtatgaagtgatcaagctgaaagggtacacttcatgggccattgggtactctgtggctaacctggcccggtcctttatcaggaaccagaggaagattcaccctgtgtctgttctggcttaaggcttttatgggatcgatggagaagtgttcctgagtttgcctgcaatgat

SEQ ID NO: 19170 - DNA, 275 bp, Glycine max
gagcagagtaccttgtgtatacataaaacagtttttagccgttcgtgttgaagaatcaagcaggaagccagaatactgagcaattaaatttttgtatcaagggggacaaacggagatagtagccgttgatgtggctcatgttgggtcttcaaactggagcttcatgagcagaatcgactgggcagtgtgggacacaagcagggttccccaaggtgcatttgcaatttaagttagtggtaacggcagggtatgatggctagtggatttgggcaaaa

SEQ ID NO: 19171 - DNA, 318 bp, Glycine max
tagtaagccgcaatggtgaagtactcaagggggcctgacaatccgagtaagtgttgcaaggctagaggcgccgaccttagggttcattttaagaacacaagggaaactgcctttgcaatcaggaagttgcccttggtcaaggctaaaaggtacttggaagatgttcttgcccacaagcaggctattccattcatacgtttttgtcgaggtgttggaaggacagcccatgctatgaatagacactctaatggccaatgacggtggcctgtcaagtcatcataattcattcttgatttgctcaaaaatgctgatagcaat

SEQ ID NO: 19172 - DNA, 174 bp, Glycine max
gcgcgaaaatatattctaatgtcaaacgcaactcttctatttctatctgcatgagttttcactgagaatgtgcacactgccaacagtgttatgctatctctaatgtttttatcattattgatcataagctttgatgtttttgatgcagcaattttcctttggagggtacaattt

SEQ ID NO: 19173 - DNA, 301 bp, Glycine max
gaaataatgtccgggatcatccacaagattgaggagaccctccatgtgggagggcacaagaaagaggagcacaaaggagaacaccatggtgagcacataggtgaacacaaaggagaacaccatggtgagcacaaaggtgaacacaaaggagaacaacaccatggggagcacaaggagggacttgtggataagatcaaggacaagatccatggtgatggccatgacaagaatgaaatgaaaaaattataataatataaataaaataataaataaaaaaatatttatattttttaaaaaatta

SEQ ID NO: 19174 - DNA, 262 bp, Glycine max
cggccgctaatttctctaacatggcttcaaccgtttatgatgttagccatcaagtccaatccaacagcaacagacgaattttcaaaagcgtgaaagcactaactgaatcaccagaactcactttcctcccaccctgttacacctacaccacccactcagatgatgaaatattggcacacccagatgaagatgatccaattcctattattgactattccctcttggtcactggaacacctgatcagagggccatgaccatcca

SEQ ID NO: 19175 - DNA, 276 bp, Glycine max
  modified_base (67)..(67): a, c, g, t, unknown, or other
ctttgaatgaggatgctgctaataatgatcaattggattctctggacagcccacaagactgaagcangaggtatatactattatagggcggtgacaggagaatcaacatatcataaaccttctggctttaaaggggagtctcaccaagtttctgctcagcccactccagtttcaatgattgatttgcctggtactgattggctgttggtctacactagcgatggaaaaaaatattactacatcaatcttaccaagactagctgctggcaaatccca

SEQ ID NO: 19176 - DNA, 382 bp, Glycine max
tttcatttctcagagagtcttcccgtctctttctcttcacttcttataccgtcgcccccaaacgacgccgttttctgttctctgatgtaaacgccgttcgagaacaaaccaaaaaaagaaaagaaaatcagttattgccgttgttgttttgtttccggttcggtttatttcaatggatcgggcggcgttgactgttggaccgggcatggacatgcctatcatgcacgacagcgaccgttacgatctggttcgcgacatcgtgtccggaaatttctgcgtggcgaggctgattcatgattaacaaaccaaggaactggtcgccggcaagtacattctaaaggggtgataagattgatgaaaatgtaaagaggggaatcattta

SEQ ID NO: 19177 - DNA, 252 bp, Glycine max
  modified_base (71)..(71): a, c, g, t, unknown, or other
  modified_base (229)..(229): a, c, g, t, unknown, or other
gtagttagggcgatataatgggagtaaaaggtaactgtgggaaaatgggaaaaacgtttttttgctgatgnctgctgttatttgctgtccccacttgttggtgcttataggcgaagaaaaatattgtttgagccaatagcttccagactgtgaaggaaagctgccattgcttgatcttgggatttggactttgagaataaaatcatttttacacttttgaaaatgtgtntttggcctatatgttggagttct

SEQ ID NO: 19178 - DNA, 312 bp, Glycine max
cttctcaccatcgttctttattattatcatcccctcctcttccttccttctcctctcattccatacctcaacaaaacaaggttcagagacttttccgattcctggaagaagagaagagaaaacctaaatcacagatccatggcggaagaacaccgatgtgaacctcccgaaggtcaccgactctgcgtcaacaactgcggcttcttcggtagcaccgccacgatgaacctctgctccaaatgctacagcgcgatccgtttgaaggagcaagaaaaagcgtcgacgaaatccacaatcgaaaccgcgctctct

SEQ ID NO: 19179 - DNA, 215 bp, Glycine max
gttgtcaactgattaaactatgaattgaacagatacatttggcatgctccgaaatggaatcggtggatctaatagcggagttttggtttgtgtaccttatagcatgaatgaatcagtgtcgtttgcatgccatcaagaatcctagtgttttaaagtcagtggatagagaacataatctttctctactattcactttatatacttcactctttttc

SEQ ID NO: 19180 - DNA, 418 bp, Glycine max
  modified_base (10)..(10): a, c, g, t, unknown, or other
  modified_base (96)..(96): a, c, g, t, unknown, or other
tccacgcgtncgtccacgcgttcgtccacgcgttcggtcggaacagccctgcatactacagtcctccgcggcgaggatactgcggtggtggccgangaggatgaggaggaggaggaggaggagggtccggcaggagggggttcggtggaggcaggcgcatggacagcaatgggagcctcttggttcgtaacattcccctcgattgcagacccgaggagcttcgcgttcctttcgagcgatttggacctgttcgtgacgtttacatacccaaagattattactctggagaacctcgaggctttgcctttgtgcagtttgtggatccttatgatgcctcataagcacagtaccatatgaacagacagatttttgctggaaaggaaatatctgtaattgtggctgaagagacgagaaaaag

SEQ ID NO: 19181 - DNA, 366 bp, Glycine max
cataactagcaaaaaaatggaccttctcctattttgccttaaccttaacaccattgctattgcatcaatcctttctgtaatcggcgttatgtgtgtttctatatcgtaaaaattctcgtgggaaagatgctccagtagtgtctggtgcatggccaatacttggtcacctctcattgctgaatggttcacaaacaccacataaagtgttgggtgctttggctgacaagtatggacccttattcaccatcaagctcggtatgaaaccggctttggtactcatcaactgggaaatgtctaaggaattgttcaccacaaacgaccttgccgtttcatcttgccctataactcttttccgttgaattaatt

SEQ ID NO: 19182 - DNA, 192 bp, Glycine max
tcgcccactcttcttcccacgcgtccgtagtctcttagagaggtattcaatattaaaggaatggtttgtctaatgtgtgagcgattagcttaaatatttaaaattatttgtcaaagatacacttatgttacacccaccaactccacttttactttcaagagaatttttacaggcattttatattaatgggta

SEQ ID NO: 19183 - DNA, 371 bp, Glycine max
tcgtaaaaacaacctaattacatagatttttttaggctgtaaccaaagtatcgtaccaataccatggcatgtgacaatgtcgaattggagaaaccggtgcttgcatctctatgaggcttgaggaagcatgcccaaaaatccaaaggtaaaagtgaacacattacaccataccatggcgatgtggtttcaagaacatcatctggcactatataccaacaagtggtgcatatttctggtgatggtaacaactcatcacgccaccaacaactacggtggtggtcctgctataaataatattggcaatttccagggacatggcaatggaggctttattggtggtaattttcgatgccctcaacgagggactactg

SEQ ID NO: 19184 - DNA, 372 bp, Glycine max
  modified_base (53)..(53): a, c, g, t, unknown, or other
actcattctttcattctcattgccttcacattgatagacaagaaacaatgaantggtaaccctgagggtttgctcaaggggtctcaagatcctcaaggctcacttcaccgctccgtctagcgtgcgccgcgttctgattagcgcgcctctctccaccgatctcctgtcaaagtacaacgtgcggtccattccggttcgcatggactacgaggtttatgtcgtgaggggaacctacattggccgcgagggcaaagtggtccaggtctatctccgcatgtgggtcatccacatctagcgcatcacccgcgagaaggttttacggcttcaccgttaacgttggcattcacccttccatgggtgtcttcaccaatc

SEQ ID NO: 19185 - DNA, 359 bp, Glycine max
cccacgcgtcctaataggttttgtttaagtttttgaaggcaaaggaggtttcagaagcaatgggtgattcgaagaggaggactgtcattataaatataaattggttttggaagaaagtgaaccaacaaaagaacaggtatcacttttatgaacacaactatactttcaactttaactccggggctcaaagcgaacatgaaagcatgccttacaggttttcatctacgtttgctgctcctggtctacgccagaatgaatcatgttacatattcatcactagtatacatttccactttgataataccttttaacatgtatattgtttcccataaattgttacattgattgtaattttttta

SEQ ID NO: 19186 - DNA, 314 bp, Glycine max
gcacagtaagagaaaactcttggggtggattctggggtttgtagcaggggcactggggggaaccttatcaggattcgtgttttctttgatgttcaagctcgctctcgcgttgatcaaaggaagaggaaggaaagcggggcctgatatctatagtccattgatcaagaaagcagaagatttggccttcttggaaaaagaagaaggaatcgcgtcgttggagatcatcgggcgcggtggctgtggagaggtctacaaggcagagttaccgggaagcaacgggaaaatgatcgctattaagaaaatcgttcagcctc

SEQ ID NO: 19187 - DNA, 389 bp, Glycine max
gtttcgacggcgagtactgtcgcaacctcttctactcgcgcgtgggcaaaaccacctggccgtactgctccggcgtgtggagcggaaaagaatgggtcctccccgagatccacgacgacgatatcgtctccgccttcgagggtaactccaacctcttctgggccgagcgtttcggcaaacagttcctcggcatgaacgatttgtgggtcaaacactgcggaatcagccacaccggcagcttcaaggatctcggcatgaccgtcctcgtcagccaggtcaatcgctttgagaaaaatgaaccgccccgtcgtctgtgttgggtgcgcctccaccggtgacacatcgggcggtttattcgcctattgcgctttcgctgccattcctttcat

SEQ ID NO: 19188 - DNA, 346 bp, Glycine max
accactcatccgaaaacacaatggtaatgtgtgtatctttgaacgggacagcgatctctaaagctggcgttcactatgacgggggtattgaaggcttcatccaaggctatcaacaagtcttttaccaccgctctactgaccacatattaacccctgaatcccctgcaataacacctaccctagaacctgcttaatgagaaacatcttacagagccgcttacaagatcgcttcgaaagcagattcagaaacctcgttagtgtacttggaactatgggacaagcaatactacacgaaggattaccctgacctttatactgaccctaccgctacatcttcagccatgtt

SEQ ID NO: 19189 - DNA, 423 bp, Glycine max
tcgcccactcgtccgcccacgcgtccgatttttcttctctcttatctcttggttgcgtggcagacgaaatgattttgtgtgtttgggtctcttttaagttggaaatcttgggcttcagctgccatggtactttctgcaaataattgtcagcgcatggtatttcatatcagtcgtgggtaatttgtttgaaagctatttcatctctttaaagaaatacaagtctcttcattcgggaaaggttcggtaccttgccattgtcatagaaagtgaagaagcttatcagatttccaaagttgttaaactttcgcagtggcttgactctattggtgtaaagaatgtgtgcctttatgacatgaatggagtattgaagaagtctaaggaaaccatgtttcaaaaattgaagaatgcaaaatccattgagtg

SEQ ID NO: 19190 - DNA, 348 bp, Glycine max
tcgcccactcgtccgctattcttcaccactatttttttcacttctatcacactttcctgtatttgtggctatgattttagaagatagtgacgcgggattcaacaagggctgaacttggtcttcttgttttatatttgggcaaggctgtagctagggacaataatatgcacggctatacaatatgtgtttcaaatttttgagtaatggggaacctggttctgctcattatgttgtcaaaacaaccagcttgtcactaaatgtactccgtcgtttttaagtttgttaattgtcctacatgctttgataatttcaacaccacatggtactccccttcctttatcttttttg

SEQ ID NO: 19191 - DNA, 398 bp, Glycine max
gagatatacaacatggctatatctacatcagaaagaatggcatcagtctcgaaaaggattacccttaccgtggtgacgagggtaaatgtgactcaaataagaaaaatgctattgttactattgatggccacggatgggttcctacccaacttgaggaagccttgaaacagggcattgcaaatcagccagtggccgtacctattccagcagacgactatgaatttcaatattatacatcaggtgtattcaaagggaaatgcggtacagaattaaatcatgctctcctgcttgtggggtatggtacagaaaaagatggagattattggatagcaaagaattcatatagtgataaatggggagagaatggctatatcagaatacaaagaaaactgagcact

SEQ ID NO: 19192 - DNA, 395 bp, Glycine max
  modified_base (39)..(39): a, c, g, t, unknown, or other
  modified_base (72)..(72): a, c, g, t, unknown, or other
  modified_base (101)..(101): a, c, g, t, unknown, or other
tagacgggtcgcagcccagcgcgattcggaacacacagntttgatcgatgatgttataacgttttgccacantcttcttactgcaaccacggccatggtcnttcttgtccctggggccatgtttcccttcaagtaataactttccctttatctcttccaagacctctccaattttcgtttacccttcctccaagccgtgatgatgcttttcgattcagacttccaaagaaaaaaacattgcttccaattcttagtgatcgctgcctctctctttcccctctttcctaagatgctgcgatggggctggtgctgagtgcttgcactggctttggatggaccacggtttcagggatggaaggccccttctgtcctgcttttgttatggattgctaatt

SEQ ID NO: 19193 - DNA, 224 bp, Glycine max
cccacgcgttcgaagttttcactcacggttttctctgtttgttgttcaaccacggtacttctctctgggtttggttcatctgccaacgtgaccgggtatacttccttctataattaactttatcaaaatcaaacttttatgtttctgcttgtcttaattacttctctttcttttgactaatattattacactattgtctttgaattttgttcctttcctctttt

SEQ ID NO: 19194 - DNA, 378 bp, Glycine max
ctttggtgagctgctacgggatctaagatcttaacttggtgttgccaacagtatctccatgggaatcacttcggggggtatctgtcattaattgccctggatttggcaatgcctccctctctgtattgggaaagctgtgccctcagcttcagcatgttgaattgagtggactcgagggagtgacagatgcatggcttcttccactccttgagagttccgaggctggtttggttaaagtgaaccttagtggttgctcaaacgttaccaataaagtagtttcgtccttggccaattctgatggttggactcttgagaatcttaaccttgttggttgcaaaaacattatttgatgctagcttgatggcaattgctgaaaac

SEQ ID NO: 19195 - DNA, 335 bp, Glycine max
gagagtgtgcacatcaatgtctgctcaggtctgtgtcaggacacgagcccaatccgcattaggcatggaagctggtgagttctgctgaaccatcatccaagagaaagaagatcagcaacagtactaaccaagagccaaaactctccaagactccgagaacgagttctttctccgctttcaaaccatcgactgtgacggagattgttcatccggtgtcgccggagatggttcagcaactctgtctgagccctaccttcagtgaaattccggcgtcttgctgtttcagcaacggatccatttgcctctatcatgacaggatcaagctcttagatttt

SEQ ID NO: 19196 - DNA, 376 bp, Glycine max
ctcagttctctcgttagtattcttccaatctctgtcgatcaccactaacaccaccatgtcgtggctcctccgatccaccaagtggaaactcctctcttcctcatcttcactttctagaaccttcccctctctctcacgctccggccccacacttgacctccctcagatcggagccatctctcccctccccgatctcttccaccgcaacaccgctaccatgcctttcgcgaaggaaaacgcttccggtggaaacttggccggtcttcccaaagttcctgcgaatacgcttggcagtgactcttatgcgatcaattcttcgaggtacaaagcttcttgactggacacgaatgtgctggctggagctagatgtgtctct

SEQ ID NO: 19197 - DNA, 430 bp, Glycine max
cgcatacgtatcgagccatcctcacaagcttttgttcttcaccgcgctccacccttcttccctctcccgtcgtcccctccaatgggaatgtgtttgtgacttcatatgctggtagttgacattttgaaattgtaactgtggtgggagcaataatatattttgacatcatcatggagatacagacttgtggcatgccgattgactccttgctagagaaagtgctttgtatgaatattctgtcgtctgattacttcaaggagctctatcgattgaaaacgtatcacgaagttattgatgagatctacaatcaagttgatcacgtggagccatggatgactgggaattgtcgcggtcctttaactgcattttgtcttttgtacaagttttttactttgaagctcaccgtcaagcaaattcacgggcctgttaa

SEQ ID NO: 19198 - DNA, 441 bp, Glycine max
atgatagtgacaagagaatccctgacatgaccataataaacaggcagcttggatggaatcccaagactgcactttgggacctgcttgagtccactctgacatatcagcacaggacatatgctgaagccgttaagaaagtcattgcaaaacccgttgcaagttaagctttttacagtgatggtgatgtgctacctttgagaagggtgttcttgtcttgcccaagtgttctgccatattatactggttgattttatataaaatcgtaaattttcctcctattggtttcgttagcctgtaggcaatatatcccccacatggagaagtaggaatttatacaagggcaatctgtgctctatgtaattttaatgtagagaccatgcgctgcttaacatgttgagacactttatttattacccaaggaagacttttttctgtgttttt

SEQ ID NO: 19199 - DNA, 365 bp, Glycine max
  modified_base (46)..(46): a, c, g, t, unknown, or other
tctctcggacactgtttctcaagctgttattctttgtgtaatattnaaaataagatacgtttaggttaattttttccgtgggttcatggtttaattatgtatttccgtatttgttataaattattaaatataattgaagtttcatttataaatggaaaagccttcttctcattacttggtttcaagtgagaaaaaatggactagggtttacactcaatcctataatattaatttcttggaaagccctgttgtgattgaggattacatttttttgatcatatttctatcattatactcctttttttcaaataaactcttgatttgtgtttattttttttttttttggtctaatcctataatgtatt

SEQ ID NO: 19200 - DNA, 309 bp, Glycine max
  modified_base (14)..(14): a, c, g, t, unknown, or other
cccacgcgtccggnggtttatttaagtggttcttctcatggatagaggactgtggattcgaacagttccctaccttcggattgcaagcttggaagcaaacattctacttcgattttagtatgacttttgtgggagcagggatgatttgctcccatcttgtgaaccggtctttgctccttggagctgtgctctcttttggggtcatgtatccgctcattgatcggcttaaaggagactggttccctgacaatttataagaaactaacatgaagggcttatacggttacaagttttttgtttccattgctc

SEQ ID NO: 19201 - DNA, 430 bp, Glycine max
tgaattcccgggatatctgtgtatcaattttctctcaacatcctatgtttgctgctgtttacatctgatcagagttcatatatatggcgaataaactgaatataaggctaggagaaccaactctggtgccaccagcagaagaaacggaaaagggtctttactacttcctttcaaaccttgaccagaacatagcacatccagttcgaacggtttacttttataataagtctgcatgtagagggaacgaggaagcagcacaagtaataaaggatgctttgtcgaaggttcttgttcactattaccctatggctggaagattggccataagttcagaagggaaactgatcatagagtgcacaggtgagggtgttgtgtttgttgaggctgaagaaacaaactgtgtgataaaagacctgggagaattgacaaa

SEQ ID NO: 19202 - DNA, 448 bp, Glycine max
cgtttctctctctctctctctgtgttataaaatcaaaattgagtgagtgaaggtggttgtggcgactcagatcgattgattgcggttgcaaccatcatctatggtgcgcccgcggccgatcattgattagctgtagttgcgctgtctcactgctttcatctcacgcgcgcacgttactcgaactgaatgtcatctttttttcggtgggccccgccacttgcgggtttatcaagtaacctaataagatatttattattttaagaaaataagcatcgataaatctttattaatttgaaataggaaataatatactacctacgtccgaatatatataatcgtcccgatacacatatgattttttaattaattcacatcttttacgaaaattgattaatttaaccagtgacattaataattttgtaaaaatattctaaaaatatttgttaaa

SEQ ID NO: 19203 - DNA, 379 bp, Glycine max
aagccattggtgagttccaacttctttcatgtgtttctttgcttgtagcttccctgagggatatactatcatatatctcagtatatcctttttcttttgattttttgtttagttgaagttggatcagtgtgccacaatgttaaacacacttcacttgtgattgggatcgggatctttctcttatatccactattccttgttttatttaatgtggatttagtgatttactgaggaatacacccttcattctttctcacttgcttacttctcattcggttcaatgatctattggtttttgtagtcagtacatccccctctttgctttacgaatgcttttgtgattattactatagcaaatttggaatattttattacttgg

SEQ ID NO: 19204 - DNA, 381 bp, Glycine max
aaccctacttatacttacccccttttctctcttaccttatcacctaatccttatcctgccagaccatattaccatgtgggcctgcgcatcttccctcgcactcccaaccctcactctccgaacccgacaacctctatgttctccccaatgcttctcctcgtccctctccctcacacccaacaacaaacccatttccatttctgctgtttttctcaaaccaacaactctgtcgtcgtctcgcttcgttccccacgtcgtggtgtcgtcggatttggggcaggaggaggacaccttcagtgacggagactgccccagctttttccccgaccttaagctctttgtcgggaatttttcgtttaacgtctacagcgctcagctcgc

SEQ ID NO: 19205 - DNA, 340 bp, Glycine max
cttaaaataaacaaatgtttctctttctctctttctgtgtttgaagaacaaaacgacacttcgtctcaatttcttcggtgcttctgagagagaaagaaagtgagggacttggagagaatttctgtcataacagctcattgagtcaccaatcaaccatgtctcttgggtatgccgagaagctttcctacatataatatgtgggcaacgttggaatggtcgaatatttcgacccatcccatgttttgcgagagaatatagatcaacttgcttttcatgtataaaaagaggtagcttctagtggtgattactggtgcaggaatatcaacttcttgtgggattc

SEQ ID NO: 19206 - DNA, 270 bp, Glycine max
ggtcgacggatgcgtccaggcatgcgttcaggttacgaagtctgaaccatttttctttttatgacatgaaaagatgagggaacaaagttttggagataagatgcatggaataacaaactgtaggtctcactgcaactagcagacacaaacacattcatttcatgtgagtctacaatcaaccatagctctagggtatgcagagaagctttcctacataaaagatgagggaaacgttggaatggtcgaatatattgacccatcccatgtttt

SEQ ID NO: 19207 - DNA, 309 bp, Glycine max
tcgcggacgcgtggttgtagactggtgtgctggtttgctgcagacactgatgctattggactgaatggattggaccagggggtactgctcccttttggtcatggtcttatggtccgtggctacttgcctgttgtaaatagcctatccaagggtcttgatattcgattggggcacatggtcacaaaagtagttaggcgatataatggagttaaggtaactgtggaaaatgggaaaacgttttttgctgatgctgcttttattgctgtcccacttggggtgcttaaggcgaagaaaatattgttttgagcc

SEQ ID NO: 19208 - DNA, 409 bp, Glycine max
tccacgcgtacgaactggttcactgtacttgtattttttcccattacagtcacgcacaccatgaacgtcgcttctgggctcttgttccctcatctctactgtacaccctacgcttcatttcttctattctctcttctacttctgtctctgcaaaagttcaagccatttatcttcacttcgtttcatctcatagtcctacacctattcacaattccaacaactcttacaccaaacacacatgcttctttttaagtactccatatctcaacctctggttctggttcttcaccatgaaccaataacttcaacctcgtacttggcgtttgtttttgtgtttgtgcctgtcttggtacatggcgtaccatatccacaaccttttacagcatgacctttcactccaccatttcct

SEQ ID NO: 19209 - DNA, 379 bp, Glycine max
  modified_base (1)..(1): a, c, g, t, unknown, or other
nggaaatttatcagttactgaaattgtggtgctctgttgatcatgttaaagaatgcagtcatgaggaacatgattcagacgctgagaaagctgcttctaataattcactggaggatactccaaagaagtcttttgcatccattgtgaatgcactaaaagaaaatgctgctcccttccatgtgagggtttcccctgtgaaacttcttgaacaaccacgtgtttctagtatacctgcaccagaagcaccatctcctatcactgacagtccaccagaaaagaataatgaggaaggaagttaggcttatgcaatatttgttgcaaatttgcccatgaatgctacagttgaacagcttgaacgtggttttcagaaaattgggcc

SEQ ID NO: 19210 - DNA, 371 bp, Glycine max
cccacgcgtccgcttttttgttgttgtggtgtttcatttgtgaaactaacaacaacacaagggcatcatcatggcagctgcttgcccaatggcaagccaactcaagtccaccttcactaggactcttgtagctcccaagggcctctctgcctcttcaccacttcacctcgtgccttctagaaagcaatttagcttcactgttaaggccatccaatcagagaagccaacctatcaagtgattcagccaatcaacggtgacccattcattggaagcctggaaaccccagttacatccagccctttgatcgcatggtacttgtccaacctgcccgcatacaaaaccgcagtgagcccactactaaaagggatcg

SEQ ID NO: 19211 - DNA, 436 bp, Glycine max
cccacgcgtccgatagggttgaggagaatatctgctgcctcatgcttggctggcacactaggccactcatcgctacctccgcttggaagcttccctcctccagcgagtctagtggcttgactcagtgaatgtaaaactatagattaattggacttgttccagtgaactgagtcagtgaccgagtcagtgagccttccaggcagcaagaggataaataaatgagagggtgaacaaaaaaaaaaaaaaaaagtaaaaagaaaacccaaagaaagactgtaatttgtaatttgtgctctcataattaccgtttctcctctttagtgttttgttttcctttctctaaattattattattatataaattggttaattcttcaggattattatgtccttttcgttttttttaatattttttatttccattttattttttatc

SEQ ID NO: 19212 - DNA, 388 bp, Glycine max
gtggaatccgctcatggacccttcttctcctttttcaggggcctcaagtgaacatcaaaggttaaaactggcaaatcgacaacgctgccgaactgaagttttaagctttgatggcagcattcttagatcttatgctttaactcctgtttatgaagctgctacaaggcccattgaagaagctactcaagccaacacaataaaagctgaaacagatgagtgtgatagtaaagaagtaatccttcctggagtaaatcttatttttgacggttctgagttgcatccgtttgatatatgtgcctgccttcaggcacgtcaacctatttctttaatagcagaagcaacagctggctcatcatctttagcaaccaaataattctgcaattaacat

SEQ ID NO: 19213 - DNA, 454 bp, Glycine max
cggacgcgtgggcggacgcgtggggcagtgtctcaacttttagccaagtacttatgaaggagaaatgaaatctgcagccattaatgaaggtggcggtcagaatcttgatctcaatttgggcatagcaaccccaggacctggtcccaaggaaaattgggggcaacttcacttcccctccatcccttacaacacacatggtggaagaagttcaaagatggaaaccaatgttaattctggaattggtaatccatctttgaaaaggatggttgtaactgaagatcgtccttcattatggaatggcatgtctcctaatttctttcccaatggggaaagagcagagagaatcggcattgatccttcaaaaggactccccaattgggcgtggcaaacacatggccaggtcaatgctaccccagtaccatcgttctttgctgcagcatcatcaaggattctc

SEQ ID NO: 19214 - DNA, 440 bp, Glycine max
tccttataatatgttgcatcaaagggattggcctcaccttgctcctaatgataaatgaacctataaggtcagccatcaccatcatatgcaaaagattcaaaggcttgattattggtagtatagctttctgagaagggaggagctgcattgatgattaccctgtaattcactcaaaaggattattgaggaagtatatgaagaagagtatatggagctagattacaatcttagtcagtagtgtgtatcctgtgggagatttacaaacttattggtacacatctctaattcctgtcacctaattgtatgacgagaattctggcttatttcttctggtctgcctagacagctgattctaaagtaaattcttaactggttctctgattcataaattatagattcctattatattgtgtaatcctgaatgtgttaactctcttttt

SEQ ID NO: 19215 - DNA, 442 bp, Glycine max
cattgacccatggcaatattggctcacatgatttacagggtactcagacgtcgtgttcttggaatagtgatgcaaaaccctgggatattggaggatggtattctacatcatatgcacgtgttgaatccacagaactgtagaactctcttggaattgatggttctggataaacacctaattgtgaagaagatgcatcaaaatatgttagatgggggaccctccttacttccggaacttatcggaagcaaatccagtcaaccgaagttgatatgccgagagcatttcttcgccaatcccatgagtacttccttgttgtagggaatctgtggtattgacattaaacattagtacttgttatataaaaaacatatttataggaaaatttggatactggtttaagttatatttgggaagaattgtaacttaagcaatcctagtaaat

SEQ ID NO: 19216 - DNA, 436 bp, Glycine max
cccacgcgtccggaatcagaggaaaaaatcacataatttcgaattcaaaatttgaattttcgtgtataaaacgaagagaagagaatggaatcggaggatttggtgaagcaggaattggaggaattgcagaaacaattggggaagaagctaaaatttgaagcctctatttcgtctctaaaatctcttctccaacgcacttacccatcatcttccccagcgcttcgcaaatccttttatttggttatatgccgagttgctactgtgttgaagaccaggtatacagcaccaggtttctggaatgctggactgggcctttttgagcaggctcatttgcttgtttctgaaccttctgagaaggaaaagttgaaagcttgcattgctcaagccagggaacattttcatttaaaagattacccatcacaagctttacaacctt

SEQ ID NO: 19217 - DNA, 304 bp, Glycine max
caacactcatatccttatcctgtttctttcaatggaagtcatttctgcttctagcttgaatgccaacgctccgatgttcgtgccactcgcctatctgacggtggaggatttctccgaccagtggtgggacctcgttcactcctccccctggttccgcgactactggctccgcgagtgcttccaagatccccagttccaaaacgacgacgctttcgacttcgactttgacctatatctccaagatgaagatgaaagggtacgaaaggaatggaaggaggtggtgtctttggtgctgctgaaatgg

SEQ ID NO: 19218 - DNA, 306 bp, Glycine max
ggtcgaccacgcgtccgggctttctttattttcttctccctcttccttcttcttgtttcatctagcacttacatatcatcgctgcttgcgaccaaggcaaggcttcctatctctccaaagctctctaaactggatttatggcatgttggtatgagctattctcgccttaaaaacgtggtttgttcactagcaaacctttaagcgttctaatttaaaagatgtagcatgccggggcgccatcttcacaaagcaaccttgcacgaatgtgtatttactgcggcaaatcctcgtggtgctttattggct

SEQ ID NO: 19219 - DNA, 444 bp, Glycine max
ctgaccgagtccgagaggcatcatggcgactctggattccgacgtgaccgtgtttccggccggcgaatcctccagcggcgccggtccttcttcgtccaccaagaagccgaagcgtttcgagatcaagaagtggaatgcggtttccctctgggcttgggatattgtcgtggataattgcgctatttgtcggaaccatatcatggatctctgtattgagtgccaggccaaccaggctagcgccactagcgaggaatgcactgtagcttggggagtttgtaaccatgcttttcacttccattgcataagccgatggctcaagacccgtcaagtatgtcctctagataatagcgagtgggaatttcagaaatacggtcactagaactttgatgcggctgatctactttcaacttggacattgggattgtagcatttttatcaaattta

SEQ ID NO: 19220 - DNA, 274 bp, Glycine max
gtgaactgatttcgttatcagaacttgaattgttggattgtgatacaggatataacgaatggtgcaatggaggacgtatggactatgcatttgagttcattatcaacaatggcggcattgattctgaagaggattacccttaccgtggtgttgatggtagatgtgacacatataggaaaaatgctaaggttgtttctattgatgactacgaagatgttcctgcctatgatgagttagctttgaaaaaggctgttgcaaatcatcccgttagtgt

SEQ ID NO: 19221 - DNA, 367 bp, Glycine max
ggcatcttcttctggtagtttagacacctcttcaagtgcaaactccttcaccaacttcaccgggctccacacacccgggcatgacgacttctttctctgaccttcttgcttctcccacagacaacaacaaaccaccacatggtggtggtggtggtttgtctgagaaaactgtctctggtgtccccaaattcaagtccacaccaccaccttctctgcctctctttccccctcccatttctcctttttcctacttttctattcctcctggtttgagccctgcttagctttttgactcacccgtttttcttaactctttcaacatttttcctttttcaacaacttgaacatttttttttcggaactttaa

SEQ ID NO: 19222 - DNA, 227 bp, Glycine max
aataagcggggcgaccgacgcgtccgttcttctgtcctctccacatgagtttttttttctacttaaagatacttgtatacagggcattggtattcagtgcacgcacaggagctcccatatctcttctattctattacagttagacatcctcttatggttgttgtcactgctgatataaatcttattgtttacaacttgcaaaaccctcaatttgattttaagagtat

SEQ ID NO: 19223 - DNA, 282 bp, Glycine max
  modified_base (45)..(45): a, c, g, t, unknown, or other
  modified_base (51)..(51): a, c, g, t, unknown, or other
atttacttgtttcgaactccgcttttttgttttttactcagacgncacctntatggttttggtgcaagtttcaatagtcatagggaattattttatcatcaaattatattctcgttttggattaaaaataccgatctaattttattattatctttggaattgtttttatttttgtcattcctaaagacataactatttcctgtatatatgttataatattaaggaaattttttatatttcttctatttattaaagcaattcatcattatatttttttatact

SEQ ID NO: 19224 - DNA, 370 bp, Glycine max
tcactgtgagagcggcgaagaagaagaagaacaataatgaaggacgccggaaagagccacaaggcgaatgcaaagctgtcgccggagacgcggaaggatcggaaatcggcgacggggctgagtggatcgccgaagaagggaggccacggcgggaagttcacgtggatcggcaacggctacgagaacgtctagatggagcacggtgctatggacgccaaggacccgaacttcgaggatccagcggagatcgccgccgtgtgatcgcggtggtttccggtgacgagatctgtacatactaataattgctaagagacgcgggtttcgaattcaataatatgaagcaagtaggagaagaagcgctttctgtgat

SEQ ID NO: 19225 - DNA, 412 bp, Glycine max
ggattctcaccaaccagtggccccaaaactcttctcgctttagggaaacattgcaggagtatgctcgagaagtggaaaagctagcttacaagttgttggagctgatttcactgagcttgggtttggatgctgaaaaattccatggctgtttcatgaaccaactcagcatggtgaggctcaattactatcccacatgccctttccctgatttggcacttggtgttggtcgccacaaggactccagtgctttaactgtgcttgcccaagatgatgttggaggattacaagttaaaagaaaatcagatggagaatggattccagttaaacccaccccaaatgcatttattatcaatgtgggggatatagttcaaggttggagcaatgacaagttttaaagcgtggagcacaaggt

SEQ ID NO: 19226 - DNA, 329 bp, Glycine max
gcagtttcaaagagaggatttgggattgggtttgcgagggattgcgctgcgtctcttcctcgggtctttcgattcatgcctcaggcataaggttccaatccaacaacctcagcctcacactcacacatacactcatctgaacgcgtatcgtccctcccatggcttcaaagcgcatcctcaaggagctcaaggacttgcagaaagacccaccaacttcttgcagcgctggtccagtttctgacgacatgttccattggctagcaacgattatgggtcctgccgatagtccttatgctggaggtgtattcctagtcactattcactttcct

SEQ ID NO: 19227 - DNA, 397 bp, Glycine max
  modified_base (99)..(99): a, c, g, t, unknown, or other
gcgctataattgaaatagataacccggccagtgtctaaaggttattggcgcagctgtttgacttggctctgagggcaactgtgccggatgagcgagatnttttgccgttaattgatgcttgtgctgttaaaggtggcgtataatttggtgattatcaatgtaataatgcaatgggtattttttctaagatgaagggaaagcatactggttttaggggttccccatcatttgttcatgctatcgttaacaatcttccttcatttgtaatgatttaattcttgctcttataattttcctgtatattttaattttttattgtgtcaataaattttttgcttgatttcttatatataattgcttatttaattgtattcaaatttttgtgcactttttattt

SEQ ID NO: 19228 - DNA, 439 bp, Glycine max
gtgaagagaagaaggaaaagaaagataaagagaaggagattaaaaaggaaaagaaggataaagatgaagaaacagacacattaaaggaaaagggaaaaaatgatgaaggtgaggatgatgaaggaaataagaaaaagaaaaaggataagaaggagaaagagaaggatcacaaaaaggaaaagaaggataaagaggagggtgagaaagaggatagcaaggttgaagtttctgttagggatattgatatagaagaaataaaaaaagaaggtgaaaaagaagataaaggaaaggatggtgggaaggaagtgaaagagaagaagaaaaaagaagacaaagacaagaaggagaagaagaaaaaagttactggaaaggacaagaccaaggatcttagcactctgaagcaaaaacttgaaaaaaataacggaaaaatacaaccact

SEQ ID NO: 19229 - DNA, 293 bp, Glycine max
ctgactcgtgggcggacgcgtgggtggtcttagaggatataattgaatacaatgatcttgtaaagtcagttcccgatgggaactgttcaaataatgatgaacacaccaatattcagacagttcatccagataaacaaaaggatgtgccccccaaaaatggtaaatgcaaaataaaagtacataattctgtttgaaatatagatatcacggttcatattaaggacaggcaatcttgtactttgagcatatactgttttgactttgttatagactagattaactggcagaagttc

SEQ ID NO: 19230 - DNA, 256 bp, Glycine max
tttctttttttatcaactctaccttactttctaatccaaaccccaatactttcgtcagatttttcccccttaagcacgtctaaaacgggttatccaaacacataattccatccaccacttttcttttcaatccccaactcaaatctgtgaaaaaatctcatttttaaatattatttttacactactgctagtaataataaaaaaaaacaattataaagcatcagaatgtttttttttccttttttcctttctttta

SEQ ID NO: 19231 - DNA, 394 bp, Glycine max
gaacaaagcacttagtgcgtattcaataattacgaaaaaccaacagcgagtgttgtttttgtttggtccaggctggaccagggaatgaatagagatgagaggctttcggttgaagagaactgagttaagcggcgaagccaaacgcaaaatccgctgcagaaattgccaccggaagcacctttatgtcatgtgcaccattcacagtattacatacacgcacttctatttttaataccgaactcaaatctgtgaagaaaatctcaatttctaaattgtaattcttagcactactgctagtggtttttgaaaaaaacacttagaaagttgtggagtgcgaattcttctgtttttcgttagttttacttttaaagatgggtgtgaagagcaacgtttg

SEQ ID NO: 19232 - DNA, 334 bp, Glycine max
cccacgcgtccgtccacgcgtccgtttgatttaaagtctgcacgccaggtatcagagcttagactcagaaataaccgggtgcaaaagatatggcatggctcactaccaatcccagatttgtgcttcagtaaattgcactccttgattgtggacggctgccaatttttatcagatgcagtactacctttcaatttacttcgtttgttaactgaattggaaacattggaagttcgagactgcgattctgtgaaaaccatatttgatgtgaaatgttcaagacaagacagaatattgacaactttggaaccaaccatttttcccctcccttttcctt

SEQ ID NO: 19233 - DNA, 206 bp, Glycine max
tctcccacgcttcctttcaaactcctattgtagattgtatacctgcctaaccatttttctggctttggttgcactggcatggcgaatcggaataatttgagtttttcttcttcttaaaatatcaagcagcattggagaccaacttcttttcttttcaactgaaatggttctctttttatccttagttagcagaacctatttccaat

SEQ ID NO: 19234 - DNA, 409 bp, Glycine max
gaaaaaaaaaactcatacaccttcatgtacttttatctttctttgttagtatttggtgctacgattttacattcttgggatctctacatatttcattagtcatggcacctcaagcagtttccttcaagtccttcgccgttgctcttattgtggcgcttttcttctccgccttcgctctggacttaatttcggggcaatcgccggtgccctctcctttctcctttacctttttctttttttctatttttctggtccccttttttgtggtattttgttcattcttttttattttctttggtttcattgttcttttcttctatttaatttttataaatatttgttcttatttctttttttttattattttttttttttccttatcgttcatttatttcgctttttttttttt

SEQ ID NO: 19235 - DNA, 315 bp, Glycine max
ggtcgaccacgcgtgcgccactcgttcgccacgcgttcggattctttatttttatttattaattgttactgtgttactgtacaggattggctacttatggagagaaagagtggtacttcttttcaccacgggaccggttttacccaaacggttcgaggccgaaccgggcggctggcaccggttacttggttgcaaccggcgcggattagcccattgtgtatcccaaaccggttgggattaaaaaagctttggtgttttacgcaaggaaagcttctatgggacaaatacattttgttcatgcacgtgtatcgtttt

SEQ ID NO: 19236 - DNA, 285 bp, Glycine max
cccacgcgtccgcttttgtgtgctgttgatttatcccaagggctcaaagcaacagcatccacgaggaggtggtaccaaaattcctcatcctcccccaacaccactaccaacaacaagggaattccaacaacaacaacatgggagagaacaaaccatcagaggttaaggatttccagatagtggtagctgcttataaggactagagcaagaatcaccaacagtttgcaccaaagaagagttccaacaaggacaggcacaccaatgttgatgtcagggggaggagga

SEQ ID NO: 19237 - DNA, 376 bp, Glycine max
cgcttcttctattcactctgttacggtgcaacctatcagcctgcaaatccaatggcttcagagaagaaactttcgaacccaatgagggagataaaagtgcagaagctcgtcctcaatatctctgttggcgagagtggagatcgtctcaccagatccgccatggtgttggaacaacttattggccaaaccccagtgttttccaaagcaaggtacactgttcgttcctttgggattagaagaaatgagaagattgcatgctatgtcactgtcagaggtgacaaggcaatgcaacttttggagagtggtttgaaggtgaaggaatatgaacttctcaaaaggaatttcagcgatactggttgctttggctttggtattc

SEQ ID NO: 19238 - DNA, 231 bp, Glycine max
ccgggttggaattacgcgttcgaacattcgttcatttacacttatgtccacttatcatccacaatattgaggagaccctccatgggggatggcacgcgaaagaggatcaccaccgccctcaccatggttagctcataaatgatcacaaaagataacaccatggtgtgcacaaatgtgaacacataggagaacttcaccttttcgagcacaaggagggacttgtggattaca

SEQ ID NO: 19239 - DNA, 392 bp, Glycine max
  modified_base (356)..(356): a, c, g, t, unknown, or other
gcaacacacacttcaatttatcagcatggcctccgttcagtgccacaaaacctgcaaagtgagctgccaacaggaaaaccagcacgcctcgtttgggcagaaagtttctgacttgttcaaagggcatcaacataatgaccacagctccaattatgccacccaaaccaaagtgctttcccagtcagggtcagggttaggccccttcaccaccaaaactcaaacacaatgcggttgcccccaaacacatctcagtaccactcatggctccaacacaaaatgccatggccatggccaagggagaattaagagggagcacaagagagggatgctgcataacatcaaagatcgcttatcangtgacaccatcagcgacagcagcgacagcgagagcg

SEQ ID NO: 19240 - DNA, 330 bp, Glycine max
gcaacacacactccaatttatcagcatggcctccgttcagtgccacataacctgcaaagtgagctgccaacaggaaaaccagcacgcctcgtttgggcagaaagtatctgacttgttcaaagggcatcaacataatgaccacagcttcaattatgccacccataccaaagtgctttcccagtcagggtcagggttaggccccttcaccaccaattctcaaacacaatgcggttgccctcaaacacatctcaataccactcatggcttcaacacaaaaagccatggccatggccaacggagaattaatagggagcacaagagatgtatgct

SEQ ID NO: 19241 - DNA, 396 bp, Glycine max
  modified_base (305)..(305): a, c, g, t, unknown, or other
  modified_base (360)..(360): a, c, g, t, unknown, or other
ctttgaatgaggatgctgctaataatgatcaattggatgcctggacagcccacaagactgaagcaggaattatatactattataatgctgtgacaggagaatcaacatatcataaaccttctggctttaaaggggagtctcaccaagtttctgctcagcccactccagtttcaatgattgatttgcctggtactgattggcggttggtctccactagtgatggaaaaaaatattactacaacaatctaaccaagactagctgctggcaaatcccaaatgaggtggctgaattgaaaaagaagcangatggtgatgttaaaaaagatcatttaatgtcagtttcaaatactaatgtattgnctgatagagggtctggaatggttactctgaaatgct

SEQ ID NO: 19242 - DNA, 441 bp, Glycine max
  modified_base (409)..(409): a, c, g, t, unknown, or other
tttcatttctcagagagtcttcccgtctcttcctcttcacttcttataccgtcgcccccaaacgacgccgttttctgttctcttatgtaaacgccgttcgagaacaaaccaaaaaaagaaaagaaaatcagttattgccgttgttgttttgtttccggttcggtttatttcaatggatcgggcggcgttgacggttggaccgggcatggacatgccgatcatgcacgacagcgaccgttacgatctggtacgcgacatcgggtccggaaatttcggcgtggcgaggctgatgcatgataaacaaaccaaggaactggtcgccgtcaagtacatcgaaaggggtgataagattgatgaaaatgtaaagagggaaatcattaatcacaggtctctgaggcatcctaacatngttagatttaaagaggtaattttaacacctac

SEQ ID NO: 19243 - DNA, 283 bp, Glycine max
cgtcatatttcagagagtgttacactcacctcactttggcctatcataccgactggccacaacgactccgcacactgtcatctcatggaagcgcgcaccgagggcaggcacaaaaaggaacagatgctcaggtgttgccgatgctgcattgccctcgggacggtacataacaatggatcgggcgacgtagacgggtgtaccgagcatggacatgcacctgatggacaaaggtgtcggttcacaactgatacaacacacatggttcggaaatgtcaactgatca

SEQ ID NO: 19244 - DNA, 300 bp, Glycine max
gaaataatgtccgggatcatccacaagattgaggagaccctccatgtgggagggcacaagaaagaggagcacaaaggagaacaccatggtgagcacaaaggtgaacacaaaggagaacaccatggtgagcacaaaggtgaacacaaaggagaacaacaccatgtggagcacaaggagggacttgtggataagatcaaggacaagatccatggtgatggccatgacaagaatgaaaagaaaaaataaaaaccaataaatgctaaaacacaaaaagccatggccatggccaaaggagaatta

SEQ ID NO: 19245 - DNA, 383 bp, Glycine max
cttatttctctaacatggcttcaaccgcttctgaggttagccaacaagtccactccaactgcagcagaccaattttcaaaagcgtgaaagcactaactgaatcaccagaactcacttgcctaccaccctcttacacctactccaccaactcatatgatgaaatagtggcagacccatatgaagatgatccaattcctattattgactattcccgtctggtcactggaacacctgatcagagggccttgaccatccacgacttgggcaaggcttgtgaggagtgggggttcttcatgctcatcaaccactttgtgtcaaagaccatcatggagaaaatggttgatgaggtttttgctttcttcaatcttagagaggaggagaag

SEQ ID NO: 19246 - DNA, 425 bp, Glycine max
gagcagagtaccttgtgaatacaaaaaacagaatttagccgttcgtgttgaagaatcaagcaagaagccagaatacttagcaattaaatttttgtatcaagggggacaaacggagatagtagccgttgatgtggctcaggttgggtcttcaaactggagcttcatgagcagaatcgacggtgcagtgtgggacacaagcagggtaccccaaggtgcattgcaatttaggttagtggtaacggcagggtatgatggcaagtggatttgggcaaagaaggtcctacctgctgattggaaaaatggacttatatatgattctggccttcagataacagacattgcacaagagggttgctccccctgcgacgatggaacctggtcatgattcattgctttgctgctgaagaataactcacatatacaca

SEQ ID NO: 19247 - DNA, 342 bp, Glycine max
cttatgacagcgctgactgcataatatacaatgaataactggaggcgaggtacgagagaacataggaaacaactgctacttgacggcttcaggaccgaggcacctaaaaacggaccgactgggaaagtcgacggatagtgcattcacaatcgagaagtggtaacagacacatgataaaacgcatctgctcaggagaaaaggaaaccaagaagatgatcattttggacgtttcctgactgaaggggggtgtacccggacggacaagaagcccaaatctccaagccattgactgcggctcgaaaggctagaatgggatagatcaacttagctaacattcaatga

SEQ ID NO: 19248 - DNA, 371 bp, Glycine max
agagacattgtggttacccatagtctcatattgtgtcatacagcaaaaaattcagcaacacagaacaatgggttctcttatggcaggatggtattctacccacatggatcctcaatcagccacacttaaaaggaaccgctcactcactaaggatgaaattgatgcttactggaaatcaaagaagaagatagaggaagaacaccttagagctatttccaatgtgtcagagactattcaggctagcaaaaacacagagcctgaaaagaagttgcagaagtcaatgaccatgccagttacccgtgcacgggactacttaaatatggtggacattgacacaagtttggagcacctattttagcgaaatggctggt

SEQ ID NO: 19249 - DNA, 227 bp, Glycine max
tcgaccatgcgtccgacgtatatctagtcgtttggagcgacccgagttacactctgtgtgacatgttggtttaccaggagctccttacaggtgatgagcctctatgcgactccttccgttacaaggaaattgagaatggaatgctgtgggaagttgatgggaagtgggtcgcctaaggagcaggtgatgtcaacattgtggcaaacccttctgctgagggtagacga

SEQ ID NO: 19250 - DNA, 375 bp, Glycine max
tcgtccacgcgtccttccacgcgtccttgtagattttgatgcccctttttttacatctggttacgtgataatagttgaggtgaaagagtttttaaacagacttctttcccgttttaactactcattaacagctttgttctgtggttccacataatcactctctgaggctggaaatattcagttgtttaaatcctatctgactgatttgtcatgggcttgtcagatattgagtaatttcttatttttgatggatttttgttgtttattttttttattcattttttaatatttacaatgatctttttaaattttatttttcatctttttttttttgatatttaaataatttctttttatgtgacatctattttttta

SEQ ID NO: 19251 - DNA, 357 bp, Glycine max
atgagttccatacagagttgacactttacagatatcatcaagtgtatacaatctgagaaagtgaggtttcgaggggtgaatctttccggccttcacctctctaaactggatttatcttatgttgatttcagctatgcttgtcttaaaaacctgttcttctgacttgcaaagcgcctatgtgcaaagtttctagatgttgatgccgctggctacttcttttacaatgcaactcttcatgattgtgaatttactgcaccaaatgtttggaaggcgtttttgtcttttgcttgccttcaaagtgcatatcttcaagatgctttgttattagactcttgcttttttgaataagttctttat

SEQ ID NO: 19252 - DNA, 409 bp, Glycine max
gattgacatcccttacgcatcttcagaagacttgctgcgatatcatctaggcctgaccaattgtcaccacatgcaagggaaagatgaacctcacatactccaaccttcgaccccttgaagtgttcatgtgcagcattgtgcgcaagatggggtatggtgaaggcttccagtggctaatccaatacatcaagtagagtccttattcattcttagttcccctttctcttgtcaactagccctgtctgcagttacatcagaagataattgacctttgtttttgcttttgatgatttttgattggattatttgatacaactgcagtgatattacatgataaaatttgtatcttcaaagattttttggggggaatgttcttctttgaaatacttaattctcctttaagattgtt

SEQ ID NO: 19253 - DNA, 334 bp, Glycine max
cccacgcgtccggtgagtgtgtgctttgcggctgcaagaggagatgacttgttgttacatcaattactcaaacggggcatggatgcaaatgaatccgacaacaatcgaaggacagctttgcatatagcggcatctcaaggaaaagagaactgtgtttcgcttctgttagattatggggcggatcccaacattagaggttgttctacgtgcagatttggaaggtaatgtgccactatgggaggctatagtggaaggacatgagtcaatgagcaagctgttatcagagaatggagcaaacttgcaatgcggggatgtgggtcaatttgcatgtaat

SEQ ID NO: 19254 - DNA, 437 bp, Glycine max
cctcactccagccacacgcctcagtagaccatggcctcattgggtgggttacaaaatctaagcggcgtcaattttcttatcaaaaaagagggtccaaaagtcaatgcgaagttcgagctgaagccgccaccatatccactgtatggtttggagccggtgatgagccagcatacacttgagtttcattgggggaaacaccacaagacatatgtggaaaatctgaaaaaacaaattgctgggacagagcttgatgggaaatcactagaagagactatagtgacatcatataataagggtgacattcttgcagctatcaacaatgcatcacaggtatggaaccatgacttcttctgggagtgcatgaaaccaagtggaggtggaaagccattcgggtagcttctaaaactgattgaaagaaactttggctcatttgaaaa

SEQ ID NO: 19255 - DNA, 415 bp, Glycine max
tctacacagctctaatatggtgcagggttctagctttcttagttgcttcccaagctctacgcatagtgacattttatgctacgcagcttcctggtccaaactatcattgccgggaggggtctaaacttgctacactgcctcgtccggatagtgtctttgaagtcctcttgattaattttccacaagatgcgatatatggatgcggtgatttgatattttcatcacacatgatctttactctagtctttgttaatacatatcatagatacggcacacgaagatgtataaagcagctagggtggacacttgcagtgtgtcagtctcttttgataatagcatcacgcaaacattacacggttgatatagttgttgcctggtatacggtgaatttggtggtatttttcgttgagaagaa

SEQ ID NO: 19256 - DNA, 442 bp, Glycine max
ctcagttctctcgttagtattcttccaatctccgtcgatcaccactaacaccaccatgtcgtggctcctccgatccaccaagtcaaaactcctctcttcctcatcttcactttctagaaccttcccctctctctcacgctccggccccacacttgacctccctcagatcggagccatctctcccctccccgatctcttccaccgcaacaccgctaccatgcctttcgcgaaggaaaacgcttccggtggaaacttggccggtcttcccaaagttcctgcgaatacgcttggcagtgactctaatgcgatcaattctccgaggtacaaagcttctggactggacacgaatgtgctggctggagctagatgtgtctctggagtttgggctgcacagggtccaatgcgattggtagtcaataccgtgatggctaagagttttgag

SEQ ID NO: 19257 - DNA, 405 bp, Glycine max
ctcaaacgtatcgagccagcctcacaagcttgggttcttcaccgcgctccacccttcttccctgttccttcgtcccctccaattggaatgtgtttgtgacttcatatgctggtagttgacattttgaaattgctactgcggtgggagcaataatatattttgacatcatcatggagatacagacttgtggcatgcctattgactccttgctagagaaagcgctttgcatgaatattctgtcgtctgattactctaaggagctctatcgattgaaaacgtatcacgaagttattgatgagatctacaatcaagtttatcacgtgcagccattgatgactgggaactgtcgcggtccttcaacctcattttgtctcctgtacaagttctttactatgaagcttaccg

SEQ ID NO: 19258 - DNA, 433 bp, Glycine max
atgatagtgacaagagaatccctgacatgaccataataaacaggcagcttggatggaatcccaagacttcactttgggacctgcttgagtccactctgacatatcatcacaggacatatgctgaagccgttaagaaagtcattgcaaaacccgttgcaagttaagctttttacagtgatggtgatgtgctacctttgagaagggtgttcttgtcttgcccaagtgttctgccatattatactggttgattttatataaaatcgtaaattttcctcctattggtttcgttagcctgtaggcaatatagcccccacatggagaagtaggaatttatacaagggcaatctgtgctctatgtaattttaatgtagagaccatgcgctgctaaacatgttgagacactttatatattacctagggaaagactttttct

SEQ ID NO: 19259 - DNA, 230 bp, Glycine max
agaaaaagcgtgcgctcatctatcgtggaaatatttaatgtcaatgaatatcaggaagtctccaggcgggttgttaacgtacgcatttcatatgttcaaaattgaacccctgcaagtgaaaacaataaattctgtttccaacttctataaaaacgccaacttctttaacttaaagttcttattcaacatattctattttatgtacttattgagctccaaactctacctta

SEQ ID NO: 19260 - DNA, 288 bp, Glycine max
  modified_base (15)..(16): a, c, g, t, unknown, or other
  modified_base (28)..(29): a, c, g, t, unknown, or other
  modified_base (92)..(93): a, c, g, t, unknown, or other
  modified_base (109)..(110): a, c, g, t, unknown, or other
  modified_base (122)..(123): a, c, g, t, unknown, or other
  modified_base (144)..(145): a, c, g, t, unknown, or other
  modified_base (184)..(186): a, c, g, t, unknown, or other
  modified_base (227)..(228): a, c, g, t, unknown, or other
  modified_base (271)..(271): a, c, g, t, unknown, or other
ccttgtacccttggnnctttaaatagtnnttctggaagaggccttaatgatatgaaatttgcttggtccactattgatcccattattggtcnnccatttatcttctganntcgtgaaccganncttcaaatattattatatcanngatgcccaggagtaccttgcatgtattgcctatgtgccnnnttttccgtcttgggccatggcataaaaggacctttgcctgnnggtggtgtgtgggtttaatgggaagttccaaattgctaagtanggtcaatggaaattttt

SEQ ID NO: 19261 - DNA, 446 bp, Glycine max
gcgttttgctgctgttattatgaggatcagggaaccaaaaactactgcactcatttttgcatctggcaagatggtctgcactggagctaagagtgagcaacagtctaaattggcggcaaggaagtatgctagaattatccaaaagcttggtttcccagctaaatttaaggattttaagattcagaacattgttggctcttgtgatgtcaagttccccattcgacttgagggtcttgcctattcccatagtgctttctcaagttatgaaccagagctgtttcccggactaatctatcgcatgaagcaacccaagatagtcttgcttatatttgtctccggaaaaattgttctgacaggagccaaggttagagatgagacttacacagcttttgagaacatatatccagtgcttactgagttcatgaaaaaccaacaatgattactac

SEQ ID NO: 19262 - DNA, 389 bp, Glycine max
gctttagccatcactaacactcagtctctgtattggggctgagggcttcgggtaacgtttagggttcacgagtttaagatatcatgggtaaagagaaggttcacattaacattgtggtcattggccatgttgactctgggaagtcaaccaccactggccacttgatttacaagcttggaggtattgacaagcgtgttattgagaggtttgagaaagaagctgctgagatgaacaagaggtcattcacatacgcctgggtgcttgacaagcttaatgctgtacgtgagagaggaattaccattgatattgcattatggaagtttgtaaccaccaaatactactgcactgtcatttatgctccagaacattttgatttcatcaagaacatg

SEQ ID NO: 19263 - DNA, 418 bp, Glycine max
cttgacgatataaatcatttgaaaaataaacgtattcgttcggtagcagatctattacaagatcaatttggattggccctggttcgcttagaaaatatggttagaggaactatatgtggagcaattagacataaattgataccgactcctcagaatttggtgacttcaactccattaacaactacttatgaatctttttttggattacatccattatctcaagttttggatcaaactaatccattgacccaaatagttcatgggagaaaattgagttatttgggccctggaggattgacggtgcgaactgctagttttcggatacgagatatccaccctagtcactatggacgcatttgtccaattgacacgtcggaaggaatcaatgttggacttattggatctctagcaattcatg

SEQ ID NO: 19264 - DNA, 439 bp, Glycine max
tgaaaactatagataccagcccttctggctgaagtggcagttttggaagaagaaattgtaagacttgaagagcaggttgtgcatttcatacaggatttgtaccaggaagctgtctacatgtcatcttctatgaggaaattggaaaattcagtttccgctcctcctaacaagtcaaatccaacaatggatagtcccaagttggataaattgaagtctcttacccaaacaactggtaattcaacagcaacatctgcaactaatcctaccacaacactccctgatgataatagacaagggaaagagaaccaatcctgtactaattcttccaagagcaggaagcaatccttcaaccaaacgaacaaaactccaattaaaaaaattaacaatcaatcactgcagaaaaagttggatcatccaaaaaagaaggtgtgtcatgtga

SEQ ID NO: 19265 - DNA, 428 bp, Glycine max
ccgtaacttaccgatccataaatacacacacataaccattttcattcaacatttttattttttatttttttgtatccgtgtaatatccacacattttcatttttcacattaaattaggtgaatacacgcattattattttttatgtacccattcgcgtgcgatagaattttctagagcaagagatttcggcgtaatgggtccaaacgctgcggcggcgaaacaagcggaaaagctccgaattgacggcaacacttacttcaaaaaagaccgtttcggtgccgccatcgacgcttacaccgaggcgattacgctgtgccctaatgttccggtttattggacgaatcgcgcgctgtgccatctcaagcgcaatgattgggagagagtagaggaagattctcggaaggcaattcagttggacagcaattca

SEQ ID NO: 19266 - DNA, 395 bp, Glycine max
cccacgcgtccgggcatatatagtaggggagcatggggatagttcggtggcgttatggtctagcattagcattgggggtgttccggttctgagctttttggagaatcaacagattgtgtatgagaaagagacgttggagaacatacacaagtcagtgatagacagtgcgtatgaagtgatcaagctgaaagggtacacttcatgggccattgggtactctgtggctaacctggcccggtcctttatcaggaaccagaggaagattcaccctgtgtctgttctggctaaaggcttttatgggatcgatggagaagtgttcctgagtttgcctgcaatgattggtagaggagggatactgggtgtgaccaatgtgcacttgaatgaagaggagacac

SEQ ID NO: 19267 - DNA, 413 bp, Glycine max
cgctctcatgctcaagattttaggcagcatggatccaagattagtgagaaagatgtggttccaaaacatgaagataaagctaattgttctgggtatcataattgccttgattctcattattgttctttccgtttgtggtggcttcaactgtggtaaatgagtcttcccacatcctgacttcaactgtggtatttgtctcctcacttgataagattgtcgctagcagattgccattgcctctactgtcaacatactgcttttgactttttgggatttacattcttccgacttctccgatgatgaatattatatggcattgcttgtatagtgcgaattatttagcctttatcatcttgcctccatagcataatgctcatctgacattctctataattcaggtgggagtttcatca

SEQ ID NO: 19268 - DNA, 119 bp, Glycine max
ccctcgcatgcggacgtatataggctggaagcatgcgaattgttcagaggcgtgtgggtccagcacaagcagagggggcgtattctgctctgagctatattgaccatgaacagaatgag

SEQ ID NO: 19269 - DNA, 308 bp, Glycine max
ccctcactcgcaagcaaatagattgaatccctggcgaggagaaagatggaggggatggaacaggatgtgtcgatgggagcgaacaagttccgacttagacagcccatggtgacggcggcgctgagcacaagacgtctgcagggactaccacgatccgtggcgggctccgctggttgacccaaccgagtttacggaacgggcgttttacacatcagggattgcatagtttgcggccacttttctgtttctctacatcaccgtctgaaccgtgatgggagtcgccggggctaagactatacagagtaccg

SEQ ID NO: 19270 - DNA, 306 bp, Glycine max
tttcgttcagatcgttacaatctgaaccaggaggttctagaagctggttgagttcgttcggaggcgagcgcgagaggccggtgtaggagcgcaaaggatggtccataacggttcacgatctttcctgttcaccggtggccgcagcttccatggtcacgcctttcgtcgcttcgcccggttcggaccgggtgagctgctccaaccccggctcgaggctcattcttcgtcctatcgacggcacgtggaagccctgtgggaggctcgaggcgtggcgcgaacgcggcggctcctacagcctcggctacc

SEQ ID NO: 19271 - DNA, 442 bp, Glycine max
cataactagcaaaaaaatggaccttctcctaaattgcctaaaccttaacaccattgctattgcatcaatcctttctctaatcttcttatgtttgtttctatatcgtaaaaattctcgtgggaaagatgctccagtagtgtctggtgcatggccaatacttggtcacctctcattgctgaatggttcacaaacaccacataaagtgttgggtgctttggctgacaagtatggacccttattcaccatcaagctcggtatgaaaccggctttggtactcagcaactgggaaatgtctaaggaattgttcaccacaaacgaccttgccgtttcatctcgccctaaactcgtcgccgttgaagtcatgtcttacaaccaagcctttgttggcttggcaccgtatggaccctattggcgcgagttacgtataattgtcacgttcgag

SEQ ID NO: 19272 - DNA, 403 bp, Glycine max
ctcggacactgttgctcaggctgtctagtcaggaggtaatatttaaaataggatactttagtttaattatttcctttttttcatggtttaattaggtatttccgtatttgttataaattattaaatataattgaagtttcatttataaatggaaaagccttcttctcattacttggtttcaagtgagaaaaaatggacgagggttaacactcaatcctataatattaagttcttggaaagccctgttgggatggaggataacattttattgatcaagttctatcattagacacctctatacaaataaactctagatatgtgtattttttttttttttggtctaatctagaatgtattgacattgaatctttttgaagtgcaataaattctagaaatgtgcaat

SEQ ID NO: 19273 - DNA, 434 bp, Glycine max
cccactcgtccgcccactcgtccgtaggcacccagagaggtattcaatatgaaaggaagggttgacgaaatttgcatcgatgagctgaaatatttaaaatcagttgtcaaagagacactaaggttacacccaccagctccacttttacttccaagagaatgtggacaggcatgtgagattaatgggtatcatataccagtcaaaagtaaggtaattgtgaatgcttgggcaattggaagagatccaaagtactggagtgaagcagagaggttttatccagagagattcattgatagctctattgactacaaagggactaattttgagtacattccatttggtgctggaagaagaatatgccctggcagcacttttggtttgatcaatgttgaggtggcacttgcatttttgttgtatcactttgattggaagct

SEQ ID NO: 19274 - DNA, 409 bp, Glycine max
tcgtccacgcgttcgcgattctccaccactattcccttcaccccaatcacactttccggtagttgttgctattagtgtagaagatgagtacgctggatgcaacaagggctgaacttggtcttcttgttttatatttgggcaaggctgaagcaagggacaaaatatgcagggcaatacaatatggttccaaatttttgagtaatggggaacctggtactgctcagaatgtagacaaaacaaccagcttggcacgaaaagtcttccgtctctttaagtttgtcaatgacctacatgctttgataagtccaacaccacatgggacacccctccccctagctctgttgggaaagtccaagaatgctctactctccactttcttgtttcttgatcaatttgggtggcttggcag

SEQ ID NO: 19275 - DNA, 452 bp, Glycine max
gagatatacaacatggctatatctacatcagaaagaatggcatcagtctcgaaaaggattacccttaccgtggtgacgagggtaaatgtgactcaaataagaaaaatgctattgttactattgatggccacggatgggttcctacccaacttgaggaagccttgaaacagggcattgcaaatcagccagtggccgtacctattccagcagacgactatgaatttcaatattatacatcaggtgtattcaaagggaaatgcggtacagaattaaatcatgctctcctgcttgtggggtatggtacagaaaaagatggagattattggatagcaaagaattcatatagtgataaatggggagagaatggctatatcagaatacaaagaaaactgagcacttgtaaatttggaaacgggggttactatcccattataaaagtcaccgatcaacaa

SEQ ID NO: 19276 - DNA, 417 bp, Glycine max
gcacagtaagagaaaactcttggggtggattctggggtttgtagcaggggcactggggggaaccttatcaggattcgtgttttctttgatgttcaagctcgctctcgcgttgatcaaaggaagaggaaggaaagcggggcctgatatctatagtccattgatcaagaaagcagaagatttggccttcttggaaaaagaagaaggaatcgcgtcgttggagatcatcgggcgcggtggctgtggagaggtctacaaggcagagttaccgggaagcaacgggaaaatgatcgctataaagaaaatcgttcagcctccgaaagacggtgctgagttagcagaagaggacagcaaggttctgaacaagaaaatgaggcaaattcgatcggagatcaacaccgtgtgacaaattatacacag

SEQ ID NO: 19277 - DNA, 432 bp, Glycine max
gtttcgacggcgagtactgtcgcaacctcttctactctcgcgtgggcaaaaccacctggccttactgctccggcgtctggagcaaaaaagaatgggtcctccccgagatccacgacgacgatatcgtctccgccttcgagggtaactccaacctcttctgggccgagcgtttcggcaaacagttcctcggcatgaacgatttgtgggtcaaacactgcggaatcagccacaccggcagcttcaaagatctcggcatgaccgtcctcgtcagccaggtcaatcgcttgagaaaaatgaaccgccccgtcgtcggtgttggttgcgcctccaccggtgacacatcggccgctttatccgcctattgcgcttccgctgccattccttccattgtgtttttgcctgctaataaaatctctcttgcccaacttgttc

SEQ ID NO: 19278 - DNA, 381 bp, Glycine max
gccacacattcgaaaacacaatgttcatgtgtggatctgggtttgggacagcgatctctcacgctgacttacactatgacgaacgtatcgaaggctacatcaaaggctatcgacaagtcttttacgaccgctctactgaccacagatgaaccgctgaatcacctgaaataacacctaccctggagcctgcttaatgagaaacatgttacagaactgcttacaagaacgctacgaaagcagattcagaaaccgcattagtgtacttggaagtataggacaagcaatactacctgaatgaataccctgacctttatactgaccttaccgccacatctgcagccattgcttatataatggcatatatagcaacttccgacatga

SEQ ID NO: 19279 - DNA, 366 bp, Glycine max
actcattctttcattctcattgccgtcacagagagagacatgaaacaatgaagtttaaccctagggtttcctcaagccgtcgcaagagccgcaaggctcacttcaccgctccgtctagcgtgcgccgcgtcctgatgagcgcgcctctctccaccgatctccggtcaaagtacaacgtgcggtccattccggttcgcaaggacgacgaggttcatgtcgtgaggggaacctacaagggccgcgagggcaaagtggtccaggtctatcgccgcaagtgggtcatccacatcgagcgcatcacccgcgagaaggttaacggctccaccgttaacgttggcattcacccttccaaggttgtcgtcacca

SEQ ID NO: 19280 - DNA, 432 bp, Glycine max
cccacgcgtccgcatgggtggtggagaagttaagggaggcaaaggaggttgcagaagcgatggctggtacaaagaggaagactatcattagaaagataaggggggatgggaagaaggtgaaccaacataagaacaggtttcagtatgatgaacacaactatgctctcaactccaactccggagctcaaagcgtacatgaaggcatgcctcacaggttctcatctacgtttgctgctcctggtcgacgccagaacgaatcatgatacatattcttcactagagacaatgccagttggatagaacctataaacatgtatattggtgcccaaaattgtttacatgattgtaatacttatattgaaagtatcatacattgagagaagagtgaataccattgttctttaataaattaaattccacgttttatcaaaa

SEQ ID NO: 19281 - DNA, 438 bp, Glycine max
gaacacacagtttgatcgatgatggaaacgttggccacatcttcttctgcaactcttccatcttcttcttctcccttttccattttcccttcaagaagaacttccctttatcctcccaagactctccaatttcgtttaccctcctccaagcgtgatgatgctttcgattcagactccaaagaaaaaaacaagcttccaattcttagtgatcgctgcctctctctttcccctctttccaaagatgctgcgatggggctggtgctgagtgctgcgacgggcagaggatggaccacgggttcagggatggaaggcccctctgttcctgcagttggtagggatagcgaatcggggacggggaacatctccactttcccttggtctctcttcacaaaatcccctaggagaaggatgctggtggctttcacctgtaccatctgt

SEQ ID NO: 19282 - DNA, 394 bp, Glycine max
aagtaatccacccacgggtttcttggagttgtgatcaactacgttacttctgtcttggttttcttcatcttccaccttcacctggtttacttccttcgataattaactttatcaaaatcaaactttgatgttcttgcttgtcttaattacttctctgtcgtttgacgaatagtattacactattgtctgggaattttgttcctttcctcttttctgaattccgtttctctgaaaagaagtttatcataaacacgttggaatggcaaggaactacttctaacaagaacatgatcttgagaagagaagagctgaggctgctaggattagggagaaatacccagacaggattccggttattgtggagaaggccgaaagaagtgacatcccaagtatt

SEQ ID NO: 19283 - DNA, 438 bp, Glycine max
ctttggtgagctgctacgggatcaaagatctgaacttggtgttgccaacagtatctccatgtgaatcacttcggtctttatctatcagtaattgccctggatttggcaatgcctccctctctgtattgggaaagctgtgccctcagcttcagcatgttgaattgagtggactcgagggagtgacagatgcagggcttcttccactccttgagagttccgaggctggtttggttaaagtgaaccttagtggttgcacaaacgttaccaataaagtagtttcgtccttggccaatctgcatggttggactcttgagaatctaaaccttgatggttgcaaaaacatcagtgatgctagcttgatggcaattgctgaaaactgtgcattgctatgtgatctcgatgtctccaagtgtgctataaccgatgctgggattgaaa

SEQ ID NO: 19284 - DNA, 435 bp, Glycine max
gagagtgtgcacatcaatgtctgctcaggtcggtgtcaggacacgagcccaagccgcattagccatggaagctgttagttctgctgaaccatcatccaagagaaagaagatcagcaacagtactaaccaagagccaaaactctccaagactccgagaacgagttcttcctccgctgtcaaaccagcgacggtgacggagatggttcagccggtgtcgccggagatggttcagcaacgctgcctgagccctacctccagtgaaattccggcgtcttgctgctccagcaacggatccattggcctcgatcaggacaggatcaagctcttagatctggaggtggagagcgcgcaagttgaaacgtcgacgtgcaatggtggtcatgaaattgagaggagagagatgaaacgttccagcgagcttcgcgagaattctca

SEQ ID NO: 19285 - DNA, 413 bp, Glycine max
tcgtccactcgttcgcccacgcgtccgatttttcttctctctaatctcttggttgcgtggcagactaaatgattttgtgtttttggttctcttttaggttggaaatcttgggcttcagctgccatggtactttctgcaaataattgtcagcgcatggtatttcatatcagtcgtgggtaatttgtttgaaagctatttcatctctttaaagaaatacaagtctcttcattcgggaaaggttcggtaccttgccattgtcatagaaagtgaagaagcttatcagatttccaaagttgttaaactttcgcagtggcttgactctattggtgtaaagaatgtgtgcctttatgacatgaatggagtattgaagaagtctaaggaaaccatgtttcaaaaattgaagaatgcaaaat

SEQ ID NO: 19286 - DNA, 414 bp, Glycine max
ccattggtgagttccaacttctttcatgtgtttctttgcttttagcttccctgagggatatactatcatatatctcagtatatcctttttcttttgattttttgtttagttgaagttggatcagtgtgccaaaatgttaaacacacttcacttgtgattgggatcgggatctttctcttatatccactattctttgttttatttaatgtggatttagtgatttactgaggaatacacccttcattcttcctcacttgcttacttctcattcggttcaatgatctattggtttttgtagtcggtacttccccttctttgctttccgaatgcttttgtgattattactatagcaaatttggaatatttagttacttggaaaagctaaaaaaaactcaacttttggtatgggtaagt

SEQ ID NO: 19287 - DNA, 408 bp, Glycine max
aaccctacttctacttcccccctttgctctcaaaccttatcacctaatccgtatcctcccaaaccagaaaaccatgtctacctccgcagcttccctcgcactcccaaccctcactctccgaacccgacaacctctatgttctccccaatgcttctcctcgtccctctccctcacacccaacaacaaacccatttccatttctgctgtttttctcaaaccaacaactctgtcgtcgtctcgcttcgttccccacgtcgtggtgtcgtcggatttggggcaggaggaggacaccttcagtgacggagacggccccagcttctcccccgaccttaagctctttgtcgggaatcttccgttcaacgtcgacagcgcgcagctcgcggagctctttgagagtgccgggaatgt

SEQ ID NO: 19288 - DNA, 439 bp, Glycine max
cttaaaagaaacaaatgtttctctttctctctctctgtgtttgaagaacaaaacacacttcttctcaatttcttctttcttctgagagagaaagaaagtgagggacttggagagaatttctgtcataacagcacattgagtcaccaatcaaccatgtctctggggtatgccgagaagctttcctacatagaagatgtgggcaacgttggaatggtcgaatatttcgacccatcccatgttttgcgagagaaaatagatcaacttgctatcatgataaaaaagagtaagcatctagtggtgtttactggtgcaggaatatcaacttcttgtggtatacctgattttcgaggtcccaagggaatttggacacttcagcgtgaatgtaaagccctgcctgaagcatcactgccatttcatcgtgcatcgccaagcatgacac

SEQ ID NO: 19289 - DNA, 449 bp, Glycine max
cccacgcgtccggttccgaagtctgaaccagaatcctacgaatgacatgaagagatgagggaacaaagttttggagataagatgcatggaataacaactctcgctctcactgcaactgcaaacacaaacacattcctttcttgtcctctaagatctcttctaccacttacccctccatcgaattgttgcatacccacttgtaaatttagctatggaattcgtttcaaccattctcagtggaagcaccaaaaaacagaaagatggatcaacagaaatagaacgatggttgtgagagcaaggcgtatcgagtctccgtatgaagttttgggcgtgtctccatccgcaaccgtcgaccaaataaaaaaggcctatcggaaacttgctctcaagtatcatcccgatgtcaataaagaggataaggcacaggagaaagttatgaggataaaaca

SEQ ID NO: 19290 - DNA, 406 bp, Glycine max
  modified_base (21)..(21): a, c, g, t, unknown, or other
  modified_base (29)..(29): a, c, g, t, unknown, or other
  modified_base (49)..(49): a, c, g, t, unknown, or other
aataacaccaacgaaagccgnggcactcncaagggaaagagagaaagangcggccaatatcaagagactacttgaggaaggggacttggtgatttgccctgaatgcacaacttgtatagagcctttcctcttgaggttcagtacactatttgctgaactcactgataggattgtcccagttgctattaacacaaagcaaagtgtgttctacagaaccacggtttgcggacacaagttgttggacccgtactttgtgttcatgaatccaatgccaacatatgagatcacttttttgaaccatctttccaaggagctcacattgcatggaaggaaatcagctattgaagttgcaaactacattcatagggctcttgcacggacttttggatttgagtgcacaaatttt

SEQ ID NO: 19291 - DNA, 437 bp, Glycine max
cggacgcgtgggtgtagactggagggctggtttgctgcagacactgatgctatttcactgaaaggatgggaccaggaggtactgctccctggtggtcatggtcttatggtccgtggctacttgcctgttgtaaatagcctagccaagggtcttgatattcgattggggcacagggtcacaaaagtagttaggcgatataatggagtaaaggtaactgtggaaaatgggaaaacgttttttgctgatgctgctgttattgctgtcccacttggggtgcttaaggcgaagaaaatattgtttgagccaaagcttccagactggaaggaagctgccattgctgatcttgggattggacttgagaataaaatcattttacactttgaaaatgtgttttggcctaatgtggagttcttgggagtagttgcagatacacctta

SEQ ID NO: 19292 - DNA, 366 bp, Glycine max
cacgaatatagtgttgtttggagcgatccgagaaaaactcggctaacatgtgggtataccaggacctacttacaggtgatgagcttctctctgactcctttggttacaaggaaattgagaatggaatgcttgaggaaagcgatgggaagcgtgttgttaaatgagcaactgatgtagacatcggtgcaaacccttctgctgagggtggaagttaagacgagggacttgatgacgcagctttcaaagtcacagacatctatgacacattaatacttcatgatcaaccgctattcaatatgaaacagattagaacctccctgaagaggagtatcaaaaacttgactcccaaactggatgcagaacaac

SEQ ID NO: 19293 - DNA, 450 bp, Glycine max
cggacgcgtgggcggacgcgtggggcagtgaccaactttgagccaagtacttatgaaggagaaatgaaatctgcagccattaatgaaggtggcggtcagaatcttgatctcaatttgggcatagcaaccccaggacctggtcccaaggaaaattgggggcaacttcacttcccctccatcccttacaacacacatggtggaagaagttcaaagatggaaaccaatgttaattctggaattggtaatccatctttgaaaaggatggttgtaactgaagatcgtccttcattatggaatggcatgtctcctaatttctttcccaatggggaaagagcagagagaatcggcattgatccttcaaaaggactccccaattgggcgtggcaaacacatggccaggtcaatgctaccccagtaccatcgttctctgctgcagcatcatcaggattc

SEQ ID NO: 19294 - DNA, 441 bp, Glycine max
tccttataatatgttgcatcaaagggattggcctcaccttgctcctaatgataaatgaacctataaggtcagccatcaccatcatatgcaaaagattcaaaggcttgattattggtagtatagctttctgagaagggaggagctgcattgatgattaccctgtaattcactcaaaaggattattgaggaagtatatgaagaagagtatatggagctagattacaatcttagtcagtagtgtgtatcctgtgggagatttacaaacttattggtacacatctctaattcctgtcacctaattgtatgacgagaattctggcttatttcttctggtctgcctagacagctgattctaaagtaaattcttaactggttctctgattcataaattatagattcctattatattgtgtaatcctgaatgtgttaactctctttttc

SEQ ID NO: 19295 - DNA, 415 bp, Glycine max
cccacgcgtccgcttttttgttgttgtggtgtttcatttgtgaaactaacaacaacacaaggccatcatcatggcagctgcttccccaatggcaagccaactcaagtccaccttcactaggactcttgtagctcccaagggcctctctgcctcttcaccacttcacctcgtgccttctagaaggcaatttagcttcactgttaaggccatccaatcagagaagccaacctatcaagtgattcagccaatcaacggtgacccattcattggaagcctggaaaccccagttacatccagccctttgatcgcatggtacttgtccaacctgcccgcatacagaaccgcagtgagcccactactaagagggatcgaggtgggcctggcccacggataccttctggtgggcccattcgtg

SEQ ID NO: 19296 - DNA, 232 bp, Glycine max
cccacgcgtccgatagggttgaggagaataacggctgcctcatgcttggctggcacactaggccactcatcgctacctccgtttggaagcttccctcctacagcgagtctagtggcttgactcactgaatgtaaaactatagcataattggacttgtcccagtgaactgaggcagtgtccgagtcagtgagccttccatgcagcaggatgataaataaatgagacggtgaac

SEQ ID NO: 19297 - DNA, 429 bp, Glycine max
gtggaatccgatcatggacccttcttctccaatttcaggggcctcaagtgaacatcaaatgttaaaactggcaaatcgacaacgctgccgaactgaagttttaagctttgatggcagcattcttagatcttatgctttaactcctgtttatgaagctgctacatggcccattgatgaagctactcatgccaacacaataaaagctgaaacagatgagtgtgatagtaaagaagtaatccttcctggagtaaatcttatttttgacggttctgagttgcatccgtttgatataggtgcctgcctacaggcacgtcaacctatttctttaatagcagaggcaacagctggctcatcatctttagcataccaaatagttctgcagttaacataggttacaccacttcgaagtgcatgaatggtaatgctact

SEQ ID NO: 19298 - DNA, 407 bp, Glycine max
cccacgcgtacggactggttcactgtacttggatcttttcccattacagtcacgcacagcaacaacgtcccttctcttctcttcttccgtcatctctactgtacaccctacgcttcatttcttctattctctcttctacttctctctctgcaaaagtacaagccatttatcttcacttcggttcatctcatagtcctacacctcttcacaattacaacaactcttacaccaaacacacatgcttctttttaagttcttcatatctcaacctctggttctggttctccaccatgaaccaataactacaacctcgtacttggcgtttgtttttgtgtttgtgcctggcttgccacatggcgtaccatatccacaacgtttcacagctagacctttcactccaccatttc

SEQ ID NO: 19299 - DNA, 434 bp, Glycine max
tggaaatttatcagttactgaaaaggtggtgcctgttgatcatgttaaagaatgcagtcatcaggaacatcattcacacgctgagaaagctgcttctaataattcactggaggatactccaaagaagtcttttgcatccattgtgaatgcactaaaagaaaatgctgctcccttccatgtgagggtttcccctgtgaaacttcttgaacaaccacgtgtttctagtatacctgcaccagaagcaccagctcctagcactgacagtccaccagaaaagaataatgagattggaggtaaggcttatgcaatatttgttgcaaatttgcccatgaatgcaacagttgaacagctggaacgtgttttccagaaatttgggcccattaaacgggatggcattcaagttagaagtaacaagcatcaacaatcttgttttg

SEQ ID NO: 19300 - DNA, 413 bp, Glycine max
cattgacccatggcaatattggcacacatgatttacagggtactcagacgtcgtgttcttggaatagtgatgcaaaaccctgggatattggaggatggtattctacatcatatgcacgtgttgaatccacagaactgtagaactctcttggaattgatggttctggataaacacctaattgtgaagaagatgcatcaaaatatgttagatgggggaccctccttacttccggaacttatcggaagcaaatccagtcaaccgaagttgatatgccgagagcatttcttcgccaatcccatgagtacttccttgttgtagggaatctgtggtattgacattagacattagtacttgttatataaaaaacatatttataggaaattttggatactggtttaagttatatttggaag

SEQ ID NO: 19301 - DNA, 444 bp, Glycine max
cgtttctctctctctctctctgtgttataaaatcaaaattgagtgagtgaaggtggttgtggcgactcagatcgattgattgcggttgcaaccatcatctatggtgcgcccgcggccgatcattgattagctgtagttgcgctgtctcactgctttcatctcacgcgcgcacgttactcgaactgaatgtcatctttttttcggtgggccccgccacttgcgggtttatcaagtaacctaataagatatttattattttaagaaaataagcatcgataaatctttattaatttgaaataggaaataatatactacctacgtccgaatatatataatcgtcccgatacacatatgattttttaattaattcacatcttttacgaaaattgattaatttaaccagtgacattaatatatttgtcaaaattattcttaaaattattt

SEQ ID NO: 19302 - DNA, 429 bp, Glycine max
ctgacgcgtgggcggacgcgtgggtggtcttagaggagaaaattgaatacaatgatcttgtaaagtcagttcccgatgggaactcttcaaataatgatgaacacaccaatatccagacagttcagccagataaacaaaaggatgtgccccccaaaaatggtgaatgcaaaataaaagtacataattctgtttgaaatatagattttcttcttaatattaaggacggtcaatcttgactcttgagcatatactgttttgactttgttatagactagatgaactggcagaagttcaattctatttcttctacttcatttctattgctgcagtgttcccctgttttccttttttctatatattttcttttgggatgtttttttttctggtttttttttcctgcattcattggtttaatacacaaagaaattg

SEQ ID NO: 19303 - DNA, 446 bp, Glycine max
ggattctcaccaaccagtggccccaaaactctcctcgctttagggaaacattgcaggagtatgctcgagaagtggaaaagctagcttacaagttgttggagctgatttcactgagcttgggtttggatgctgaaaaattccatggctgtttcatgaaccaactcagcatggtgaggctcaattactatcccacatgccctttccctgatttggcacttggtgttggtcgccacaaggactccagtgctttaactgtgcttgcccaagatgatgttggaggattacaagttaaaagaaaatcagatggagaatggattccagttaaacccaccccaaatgcatttattatcaatgtgggggatatagttcaggtttggagcaatgacaagtatgagagcgtggagcacatggtggtggtgaatacagagagggaaaggttttcaatt

SEQ ID NO: 19304 - DNA, 448 bp, Glycine max
gcagtttcaaagagaggatttgggattgggaaggcgagggattgcgctgcgtctcttcctcttctctttcgattcatccctcattcataatcttccaatccaacaacctcagcctcacactcacacatacacacatctgaacgcgtatcgtccctcccatggcttcaaagcgcatcctcaaggagctcaaggacttgcagaaagacccaccaacttcttgcagcgctggtccagtagctgaggacatgttccattggcaagcaacgattatgggtcctgctgatagtccttatgctggaggtgtattcctagtcactattcactttcctgcggattatcctttcaaacctcccaaggttgcctttaggactaaggtgtttcatgcgaacatcaacagcaatggtagcatttgtcttgatatccttaaggagcagtggagccctgcact

SEQ ID NO: 19305 - DNA, 413 bp, Glycine max
ctataattgaaatagataacccggccagtgtcaaaaggcaattggcgcagctgtttgacttgtctctgagggcaactgtgcccgatgagccagatgttgtgccgttaattgatgcttgtgctgctaaaggtggcgtaaaatttggtgattatcaatgtaataatgcaatgggtatatggtctaagatgaagggaaagcagacaggatttaggggtcccccagcaattggtcaggctatcgttaacaatcttcctccatctgaaatgatagattcgcgctctgtagctggtcctggatttgtcaatgttgtattgtcaaagaagtggatagctgagagcctacagagaatgctaattgatggtatcaattcatgggcacctcgacttccagtcaaagaggctgtgattgatttt

SEQ ID NO: 19306 - DNA, 433 bp, Glycine max
ctgaccgagtccgagaggcatcatggcgacactggattccgacgtgaccgtgtttccggccggcgaagcctccagcagcgccggtccttcttcgtccaccaagaagccgaagcgtttcgagatcaagaagtggaatgcggtttccctctgggcttgggatattgtcgtggataattgcgctatttgtcggaaccatatcatggatctctgtattgagtgccaggccaaccaggctagcgccactagcgaggaatgcactgtagcttggggagtttgtaaccatgcttttcacttccattgcataagccgatggctcaagacccgtcaagtatgtcctctagataatagcgagtgggaatttcagaaatacggtcactagaactttgatgcggctgagctacttccaacttggacatttggattgtagcatttc

SEQ ID NO: 19307 - DNA, 288 bp, Glycine max
atttactagtcccatacgcatctcagatgcacttaactcatacgtcaccgtgatttcttccggggaagcctcgctcatcacatctaataattcatgcaccaaaatacctgctcggtgttagatcgaaaataccgacacaatttcatatcagccttggactatgtgtcaatataatcactccgaaagacataaccatatcatggatatatgttaaataaccagggacaaccatgcgagctccactggcaaggaaagcaatgcatcatcatatgattgtgagcatgctta

SEQ ID NO: 19308 - DNA, 420 bp, Glycine max
tcactgtgagagcggcgaataagaagaagaacaataatgaaggacgccggaaagagccacaaggcgaatgcaaagctgtcgccggagacgcggaaggatcggaaatcggcgacggggctgagtggatcgccgaagaagggaggccacggcgggaagttcacgtggatcggcaacggctacgagaacgtcgagatggagcacggtgctatggacgccaaggacccgaacttcgaggatccagcggagatcgccgccgtgtgatcgcggtggtttccggtgacgagatctgtacatactaataattgctaagagacgcggttttcgaattcaataatatgaagcaagtaggagaagaagcgctttctgtgattgattgttatagatctgatctgtctctggaatttggtagtggcatggcac

SEQ ID NO: 19309 - DNA, 439 bp, Glycine max
tcggaacaaagcacttagtgctattcaataattacgaaaaaccaacagcgagtgttgtttttgtttggtccaggctggaccagggaatgaatagagatgagaggctttcggttgaagagaactgagttaagcggcgaagccaaacgcataatcggcggcagaaattgccaccggaagcacgtctaagacgggtgtaccaaacacaaaattccatccaccacttctcttttcaatccccaactcaaatctgtgaagaaaatctcaatttctaaattgtaattcttagcactactgctagtagtagtaaaaaaaaacaattagaaagtagtagagtgtttttttttctttttttcgtttggtttacttttaagatgggtgagaagagcaacgttggcggcgacgcgattaacacgacactgcttcacgggaagtacgagct

SEQ ID NO: 19310 - DNA, 433 bp, Glycine max
cccactcgtccgcccacgcgtccggagatttcaaagtctgcacgccaggtatcagatcttagactcagaaataacccactgcaaaagatatggcaaggctcactaccaatcccagatttgtgcttcagtaaattgcactccttgattgtggacggctgccaatttttatcagatgcagtactacctttcaatttacttcgtttgttaactgaattggaaacattggaagttcgagactgcgattctgtgaaaaccatatttgatgtgaaatgtacaagacaagacagaataatgacaactatggaaccaaccatcttccccctcccttttcctctcaagaaattggttttacagcggctgccaaatctggagaacgtttggaatgacgaccctcatagaattctcaggatgcaacttctacagcaagtacatg

SEQ ID NO: 19311 - DNA, 402 bp, Glycine max
cccacgcgtccgttcaaactcctatggtagaggatacctgcctaaccagggttctagctttggaggcacttccatttccaatcttaatgataggagttttgcttctcttgaaaatagcaggcggcaagggagaccaactgcttctctttgcaactgtaatggtactcttgatatccttagtgagcagaaccgatgaccaagggcctcgaagttgaaaaatcaaatttcaactgaaaataattctgtggatagtagtaaaaatagtgcatctactgccaagttccaaaatgaatcactcaatcggtcagattttgccacagattacaaggatgccaaattttttgtcatcaaatcttacagtgaagataatgttcacaagagcattaaatatggtgtctgggc

SEQ ID NO: 19312 - DNA, 435 bp, Glycine max
gaaaaaaaaaactcaaacaccttcaagaacttgtatctttctttgttagtatttgttactacaattttacattcttttcatctctacatatttcattagtcatggcacctcaagcagtttccttcaagtccttcgccgttgctcttattgtggcgcttttcttctccgcctccgctctggacttagtttcggggcagtcgccggtgccggcgccggctcctgcaccagatgccggagcagctggatccgtgtcgagctcggtcgccatgattggagcttccgttgtgatttcattgctcgccatcttcaagcactgaagaataatctgatgatggatcgattttgtgtgaagattattgattcgttctgcacactcagatttattgttgctgctttataatacgttacgagtgatgattattatgtacgtataaa

SEQ ID NO: 19313 - DNA, 394 bp, Glycine max
  modified_base (25)..(25): a, c, g, t, unknown, or other
tcgtccacgcgttcgcccacgcgtncggattcttaatttttatttattaattgttactgtgttactttacaggattggctacttatggagagaaagagtggtacttcttttcaccacgggaccggaaatacccaaacggttcgaggccgaaccgggcggctggcaccggttactggaaggcaaccggggcggataagcccattggtcagcccaaaccggttgggattaaaaaagctttggtgttttacgcaaggaaagctcctaggggacaaaagcaattggatcatgcacgagtatcgtctcgcagacgtagatcgctccgttcgcaaaaagaacaccctaaggttggatgattgggtgctttgccgtatttacaacaagaaaggcacgatcg

SEQ ID NO: 19314 - DNA, 430 bp, Glycine max
cccacgcgtccggaatcagaggaaaaaatcacataatttcgaattcaaaatttgaattttcgtgtataaaacgaagagaagagaatggaatcggaggatttggtgaagcaggaattggaggaattgcagaaacaattggggaagaagctaaaatttgaagcctctatttcgtctctaaaatctcttctccaacgcacttacccatcagcttccccagcgcttcgcaaatccttttatttggttatatgccgagttgctactgtgttgaagaccaggtatacagcaccaggtttctggaatgctggactgggcctttttgagcaggctcatttgcttgtttctgaaccttctgagaaggagaagttgaaggcttgcattgctcatgccagggaacatttgcatctagaagataacccatcacaagctttac

SEQ ID NO: 19315 - DNA, 425 bp, Glycine max
cccacgcgtccgggggtttatttaagtggttcttctcagggatagaggactgtggattcgaacagttccctaccttcggattgcaagcttggaagcaaacattctacttcgattttagtatgacttttgtgggagcagggatgatttgctcccatcttgtgaactgttctttgctccttggagctgtgctctcttttggggtcatgtatccgctcattgatcggcttaaaggagactggttccctgacaatttagaagaaactaacatgaagggcttatacggttacaagttttttgtttccattgctcttatcctgggtgatggcatatacaatttcaccaagattctaatttctacagtcctcaatgttaatgaaagaatgaggagcgagaataataaaaatgtagctgctgatcggcacgag

SEQ ID NO: 19316 - DNA, 459 bp, Glycine max
atatctgagtctcaattttatgccaacatcctaggtttgctgctgtaaacatctgatcagagttcatatatatggcgaataaactgaatataaggctaggagaaccaactctggtgccaccagcagaagaaacggaaaagggtctttactacttcctttcaaaccttgaccagaacatagcacatccagttcgaacggtttacttttataataagtctgcatgtatagggaacgaggaagcagcacaagtaataaaggatgcttcgtcgaaggttcttgttcactattaccctatggctggaagattggccataagttcagaagggaaactgatcatagagtgcacaagcgagggtgttgtgtttgttgaggctgaagaagcaaactgtgtgataaaagacctgggagatttgacaaaacaacctgaccttgaaactcttggaaaactggtttatgata

SEQ ID NO: 19317 - DNA, 438 bp, Glycine max
gtgaagagaagaaggaaaagaaagataaagagaaggagaagaaaaaggaaaagaaggataaagatgaagaaacagacacattaaaggaaaagggaaaaaatgatgaaggtgaggatgatgaaggaaataagaaaaagaaaaaggataagaaggagaaagagaaggatcacaaaaaggaaaagaaggataaagaggagggtgagaaagaggatagcaaggttgaagtttctgttagggatattgatatagaagaaataaaaaaagaaggtgaaaaagaagataaaggaaaggatggtgggaaggaagtgaaagagaagaagaaaaaagaagacaaagacaagaaggagaagaagaaaaaagttactggaaaggacaagaccaaggatcttagcactctgaagcagaagcttgaaaaaattaaacggaaaatacaaccac

SEQ ID NO: 19318 - DNA, 277 bp, Glycine max
gttattagtactgaaggcttttgcttgatagaactgagagggctaatcagagacatcctatgaagatacatgcactgcattattctgacatacttgcgccgcgtgatatgctcactccataggaaggatcaagggatcttatacaggaactgaacaatcatctgatacctctactatacaatattatagaatactattggattgatatgaaagaattatatgggattgaccggtacaagacaaatgagatctaatgtgacgcgactgatgagttcta

SEQ ID NO: 19319 - DNA, 332 bp, Glycine max
cccacgcgtccgtcctaagattagtgtggctgcttatttcaacaagaggcacactgagaggaaccagaagacttcttatagtattactgttcactgatgtgtgcattggttggcctggttcaatgcctgatgatcaggtgttggaaaaaagtgccctttttcaaagggctaatggggggcttctgaagggggattggattgtgggtagttcagggtaccctttgatggattgggttttggtgccttatagccagcagaatctgacttggactcagcatgctttcaatgagaagattggggaggttcagaaggtggctagggatgcttttgct

SEQ ID NO: 19320 - DNA, 81 bp, Glycine max
agagacattgtggttacccatagtctcatatagtgtcatacagcaaaaaattcagcaacacaaaacaatggggtctcttat

SEQ ID NO: 19321 - DNA, 439 bp, Glycine max
cccacgcgtccggaagaacgcagaagccacgatgagtggcagagccattatctcctgtttctctcctccttcaacaactccatgctctgcccccattccagtactctcgcgccgaaaccacctcctccatgcaactccaccttcgccacacctcctctcgcggcggagccacctcgttgttgccggcggcggcggcgggaagacgtgggcaaatgtgaagtccgagaagaacgtgtccgagtcccccaagtacgaggatgatgccgtggttcagaaggcacgtgatttggataacgtggaagaggaagccaggtggtggcaagtgttccccaagagatgggtcattgtggttctctgcttctcagcttttcttctatgtaacatggatagggtaaatatgagcattgctatacttcctatgtctgcagagtacaactgg

SEQ ID NO: 19322 - DNA, 412 bp, Glycine max
cttcttctctggtctctggcttccttggtacgggaagaactcaatcttgtccatttccctggggtttttctttcttcgatctcttcaccttcctttcgaccactctcttatcaccgctcgctttcttaactagagccctctccggtgagggtttctccaggtgtggtttgatttacagtttctgatgctgaagaaataaaaaagcttgaaggcttttgctcttctgtgtgaaaaatgttggaaagtggtgcgaaattcccaggaataatagatctcaacaaaaataataacaactactatgatttctctcaaggcttttaccataagcttggggagggtaccaatatgtcaattgacagtgttgggagcttgcatacaagtaacggcggaagatctgttgcgatgtctatcg

SEQ ID NO: 19323 - DNA, 439 bp, Glycine max
cccactcgtccgcccactcgtccgtgaagatgatgatgcccctttgttgacagctgatgacaacataaaacttgaggttaaagaatgtgtaaacagactactttcccggtttaacgactcattaacagctttgttctgtggttccacagaatcactctctgaggctggaaatattcagttgtttaaatcctatttgactgatttgtcatgggcttgtcagatattgagtaagttggaaattatgagggagtttgttgagtattggtttgatgcatcggataagattgtcaaggtgcttgaacaaggaagttctacaactgaagtaattgagataaaattaagagctattgaggtgacatcaaaggttttagaggcaattgggtatggcactgttatattgccaactgcaaaacgccttcaggtcttgaaagtgtggctt

SEQ ID NO: 19324 - DNA, 390 bp, Glycine max
caacactcatatccttatcctgtttctttcaatggaagtcatttctgcttctagcttgaatcccaacgctccgatgttcgtgccactcgcctatcggacggtggaggatttctccgaccagtggtgggacctcgttcactcctccccctggttccgcgactactggctccgcgagtgcttccaagatccccagttccaaaacgacgacgctttcgacttcgactttgacctagatctccaagatgaagatgaaagggaacgaaaggaagggaaggaggtggtgtcgttggggctgctgaaatggcgaatctgtggaggaggatgggcccatgcgccgaggtatgtggaaaaggcccccaagtttgtgaagcccaaggtgagcccacgggc

SEQ ID NO: 19325 - DNA, 427 bp, Glycine max
acgaatatcttgttgtttggagcgatccgagaaaaactctgtaaacatgttggtttaccaggacctccttacaggtgatgagcttctctctgactccttccgttacaaggaaattgagaatggaatgctgtgggaagttgaggggaagtgggttgttaaaggagcagttgatgtagacattggtgcaaacccttctgctgagggtggaggagaagatgagggagttgatgatgcagctgttaaggttgttgacattgttgacacattcagacttcaggagcaacccgcattcgataagaagcagtttgttaccttcatgaagaggtttatcaagaatttgactcccaagctcgatgcagagcaacaggagttgtttaagaagcacatcgagggagcaactaaatacctgctctctaagattaaagat

SEQ ID NO: 19326 - DNA, 333 bp, Glycine max
gatagtctttcgttacgcggagcgatacgacgagctctgttttcacatatgcctgtacaatgacaccactagcgggggtgagctgatccttaaatactccaacctcaaggcaattgaaaagtggatgcgcatcataagtcgcaggaaagtgtatggtgaaagcatccagtggctaatacattgcatcaaacccagtccctattgattcttaattccactttgtattgtatactacccctgtctacggtgacatcataagatacacgtccttactttatgctcaacacgatttctgattgaatcatttgatacacctgctgagatggtacatga

SEQ ID NO: 19327 - DNA, 438 bp, Glycine max
cccacgcgtccggtgagtgtgtgctttgcggcagcaagaggagatgacttgttgttacatcaattactcaaacggggcatggatccaaatgaatccgacaacaatcgaaggacagctttgcatatagcggcatctcaaggaaaagagaactgtgtttcgcttctgttagattatggggcggatcccaacattagaggttgttctacgtgcagatttggaaggtaatgtgccactatgggaggctatagtggaaggacatgagtcaatgagcaagctgttatcagagaatggagcaaacttgcaatgcggggatgtgggtcaatttgcatgtaatgccgttgaacaaaacagtctcaacttgctgaaggaaataatgcgctatggaggagatatcacgcttccaaacagcaacacatggaccacagccttgcacgttgc

SEQ ID NO: 19328 - DNA, 181 bp, Glycine max
gctgacacacatccgctcctgtgttctgctgataaataacgaggtctcaatgcagcatatttaaagggcggtatgaccattatgcctataactcacgcaacaccacttccatcaacatgggaatgccaacatcaacagcctgggagagtacacacccttacacgttaaggattaccagata

SEQ ID NO: 19329 - DNA, 88 bp, Glycine max
cgaggacatgataaggccctcgtttcctaatagggggcatgagtattgctgctggtaggaacggatcatagagcctctaattccaccc

SEQ ID NO: 19330 - DNA, 251 bp, Glycine max
atgagttccatacatagttgacacgaacagatatcatcaagtgtatacaatctgagaaagtaaggtttcgaggggttaatctttccggccttgacctctctaaactggatttatcttatgttgatttcagctatgcttgtcttaaaaacgtgtttttttcacgagcaaaccttcaatgtgcaaaatttcaaaatttttatgccaagggctccatcttttacaatgcaactttgcgtgaaatggaatttact

SEQ ID NO: 19331 - DNA, 317 bp, Glycine max
ggctttctttattttctccttcctcttccttcttctcgtttcatcttccactgcttgtgatcgctgcttgcaccaatccaaggcttgctatttctccaaagcttctgctctttcatctggggcatgtgggtatggctctttggcactagacataagtggcggacaccttgcagctggtgtggcttctctcttcaaagatggagcagtttgtggtgcctgctttcagataagatgcaagaacccaactctatgcagcaaagaaggtaccagagtggtattgactgatcttaatcacaataatcaaactgattttgtgc

SEQ ID NO: 19332 - DNA, 425 bp, Glycine max
gtgaactgatttcgttatcagaacaagaattggtggattgtgatacaggatataacgaaggatgcaatggaggacttatggactatgcatttgagttcattatcaacaatggcggcattgattctgaagaggattacccttaccgtggtgttgatggtagatgtgacacatataggaaaaatgctaaggttgtttctattgatgactacgaagatgttcctgcctatgatgagttagctttgaaaaaggctgttgcaaatcagcccgtcagtgtagctattgaaggagggggcagggaatttcaattatatgtatctggtgtattcactgggagatgtggcacagcactagatcatggtgtcgtggctgttgggtatggtacaactaatggtcatgattattggatcgtaaggaattcatggggt

SEQ ID NO: 19333 - DNA, 433 bp, Glycine max
ggcatcttcttctggtagtttagacacctctgcaagtgcaaactccttcaccaacttcaccttctccacacaccctttcatgaccacttctttctctgaccttcttgcttctcccacagacaacaacaaaccaccacatggtggtggtggtggtttgtctgagagaactggctctggtgtccccaaattcaagtccacaccaccaccttctctgcctctctctccccctcccatttctccttcttcctacttttctattcctcctggtttgagccctgctgagcttcttgactcacctgttctccttaactcttccaacattctgccatctccaacaactggagcatttgttgctcggagcttcaattggaagagcagttccggggggaaccagcgaattgtcaaagaagaagacaaaggcttctcaaatttc

SEQ ID NO: 19334 - DNA, 428 bp, Glycine max
tgcttctgtcctctccacatgagtctttttggctacttttagatactgggagacaaggcagtcaaatccagtgcacacacagcaactcccagagcgctgctatgctatgacagtgagacatcctctgatggttgttggcactgctgatagaaatcttattgtttacaacttgcaaaaccctcaggttgaattcaagagaattgtttcacccttgaagtatcaaacaaggtgccttgctgcattccctgaccaacaaggtttcttggttggatcaatagaaggaagagttggggtgcatcatttggacgatagtcagcatggtaaaaacttcacttttaaatgccatagagagggcaatgaaatatactcagtcaactttttaaactttcatcctgtacaccacacatttgcaacttctggttctgatg

SEQ ID NO: 19335 - DNA, 423 bp, Glycine max
attcaacacgccataattgcacccttttgaaaacttgtaacgttgattaaatgatggcttgcgtttctaaaccttgtcacggaaaaaagatgattttggctacgaatttcaagacgattctagaatgagattagtagcatcggcagcagagacagtgtgattgtgctctccctcgtatgttaccaccagcatagctggatcatccaaagctctttccacatgttttcgcgctggacaccctctcacactactgcacttgtagtaacccctgcaattatcattcccaaaaccaaaaaattaacacccatgaccacttctcaaattcaataggtacttcagaaacgcataaaagaaaccaaataattgggtccacctttaattttggaattcaatgagaaacctttaaggtaaatgggttgtttt

SEQ ID NO: 19336 - DNA, 386 bp, Glycine max
cccacgcgtccgatcgtcttttgcatattatttgcgccatcgtcgagagaagcgtgagagacttctcgtttatgatgagagctaagatagtttagttgtcaagtcataaatcagtatcatcactttaaatttcattagaagctgtcaaaatgtcacggaagggtttgatggagcaagacctgagtaagttggatgtaacaaagttgcatccactttctccagaagtcatatctcggcaggctactattaatatcggcactataggtcacgtggcccatggcaagtcaacagttgtgaaagcaatatcaggtgtccagactgtgcgtttcaaaaatgagttggagcgtaacattacaatcaagcttggctatgcaaatgcaaaaata

SEQ ID NO: 19337 - DNA, 355 bp, Glycine max
ggcatttgagggttgaagccatatttttcagttaccacacctttgccttctgtaggtggagacacacagttatactcccctcagcaatttccatacactgggccaccttattatcatcagctggttcctcctagcttaccatatcttaattcacctactccagtttcacagccagagctcaccagcctggtaggtattgaccaacaagttgataacatgttttttggaccaagagcgggctatccgtcagtgggatcttttggtagaggcaactttcctgtagcacctggttcctttggctttcatgaatcccaacaaggatttgaaggatcaagatctggtggaatctggtcag

SEQ ID NO: 19338 - DNA, 351 bp, Glycine max
acaaaccaaagagaagttgagactgttgatgattactcacatcatggcaaaactcaagatgattcatctgcagtgcaaactaatattgctgaatcatctataaaaaatatgggtgatgacaagagagatcctttacaagcacaaacttataatcaagatttggaatcttctctgatggataaagaagctgttgtggacacacaaactctggatcgagacatggttgggagtgatgcacatcatctggataaacccctttgttcaatccccacagaagaaaatttggaagggggtgtagttgaaagtcttgagactgggttaagtagtttaaagggttccttaacaatggaa

SEQ ID NO: 19339 - DNA, 275 bp, Glycine max
gaccgtccggattccggctcgcccagctcccattctttagatgtgcgtttcttttgcatccataatagcaaacagtggggtctagggtatcaaatgatgtcatccaccctggtaccaccttgaaggcatcacacagttgatgtctgccacatgcagatgctgatactaagttagcttctagaactgaagagcattcacattatagtacagaaggtgggaataatggcatcctatctggcactgctacttcaaatcctaacaatgacctgagaaca

SEQ ID NO: 19340 - DNA, 221 bp, Glycine max
gattcacctccctgacccctttctattttccttttatcgccggatcgatcattcaggggaattttgccagtattggggggtgactaaattgatctatgatctgaatggacagaggatgccagagttgataagtggagctagaaggtcgaaacggcttggatatctatagcctgtgccactgcctgttgatcaaggagagaattgtcaatatcctgctgctc

SEQ ID NO: 19341 - DNA, 202 bp, Glycine max
cctaagggacccgggaagccagactgataccgctctttgcgcacaatctgaacgtgaatccggctagaatgcctgcaccggcacgagctccgtgacctcaccgttagaggattgcgacacctagggcggcgaccaggaagaacctatgtttcatatggcacagcgtcgcatctctcaaaacgaggaaggcgtatgcaacttg

SEQ ID NO: 19342 - DNA, 347 bp, Glycine max
gcagaagggttcctcactctcttcatctgattgaacaaaatgtacacctcgaggaagaaaattcacaaggataaggatgccgagcccactgaatttgaggagacagttggacagtacttgttcgacttggagaacaccaatcaggatctgaaaagtgacttgaaagatctctacataaaccaagctattcaaatggatgtggctggtaatcgcaaggctgtagtcatctatgtgcctttcagattgaggaaggcattccgcaagattcatcttcgacttgtcagagagttggagaagaagtttagtgggaaggatgttgtcttgattgccacaaggaggatcgtgcg

SEQ ID NO: 19343 - DNA, 328 bp, Glycine max
gcagaagggttcctcactctctccattttgattttctaaaatgcacacctcaaggaagaaaagtgtacaaggttaagggggccgagcccacttaattttaggagacagttggacagtactttttctactatgtagaacaccaatcaggatctgaaaagtgacttgaaagatttctacataaaccaagctattttaatggatgttgctggtaatcgtaaggctgtagtcatctatgtgccttttagattgaggaaggcattccgtaagattcattttctacttgttatatagttggagaaaaaatttagtgtgaaggatgttttcttta

SEQ ID NO: 19344 - DNA, 316 bp, Glycine max
cccacgcgtccggaagatgttgatctagcagttgcagctgctcgcaaagccttcgaccgcggaccttggccaaagatgacagcctatgaaagacaaaggatattgctgcgcgctgctgatctgtttgaaaagcacaatgatgaccttgctgcactcgagacttgggataatgggaagccatatgaacagtctgctcaaatcgaaattccaatgctggttcgcctatttcgatactatgctggttgggcagataagattcatggtctcacagttccagctgatgggccatatcatgtgcaaacattgcatgaaccca

SEQ ID NO: 19345 - DNA, 311 bp, Glycine max
gattcacctccctgatccctttctattttccttagcttgccggatcgatctgtgagaggaattttgccattatttgggggtgactgaagtgggctatgatttgaatggagagaggatgccagagttgagaagtggagctagaaggtcgaaacggcttggagatcttcagcctggtccactgcctgttgatcaaggagagaattggcaacaacctgctgctccgaatcgaactatgaggagagttggaggtggtagaggaagaagtggtaatgccacagctgtaggcaaagggccatcaccagctgtaccca

SEQ ID NO: 19346 - DNA, 368 bp, Glycine max
atgaaacaacatatgtttccagtgacttgaatcgatttggttggcccaaacagctagaaagggaaccctctcctccgaataatgtggaccgtgttccaagtggtagaatggggggaaatttgataccatctgtgtattctgatccacaaaatggtcaaagaggcagtcaaaaggccagaactgcaaatgaatatgattacctaggaccaacatatgaacaggatagaacgagaaaaacaagtaagagggtggataacaaccaattatctgccgtgggggacaagaggaagatagaatctcgtgttaaacttgtggatgaattgcattttgaggctaatcattctgatcctgacgataatttaaatgcc

SEQ ID NO: 19347 - DNA, 371 bp, Glycine max
tctaaccacaaaaccttgctggtttctcctgttataaacctgctggctgctagaaatgagagggagagtgtgcaaatagctatccgaccaaaggtttcatggggtggttctagtgttgcagggactgtgcagattcagtgtagtgacctatgttccacatctggagacagactgattgttgggcaatcactgctgttgcggcgggtggtgcccattttaggtgtacctgatgctcttgttcccgttgatcttccagtcagtcaaataaacctatttcctggggagactaccgctctttggatatccattgacgttccaagttctcaacctccagggcaatatgaaggagagattgtcattactgctataaa

SEQ ID NO: 19348 - DNA, 188 bp, Glycine max
tgcaaggggaggactgaagtttactgtttgcaaaacatgggattgaagggtgtactattttaggcttgtaatttatattaacttgttaactgccagcacaaattgaagctaggtaggaatactattggaatgcacaatctgattactatctttatggatcaattttgtaaacttttgaaagagtatat

SEQ ID NO: 19349 - DNA, 323 bp, Glycine max
cccacgcgtccggtttccaatattatgggtgttgatccaaaaccctttgatcctaaaacatatgtggaagaggatacttttgtaactgatgaatctggaaccagaaaacgcatacgtttggagaacaatattgtacgctggaggactactagaaatcctgatggcacaacatcttgtgaaagcaacgctcgctttgtgagatggtctgatggcagcctgcagctattaattgggaatgaagttcttgacatatcagtacaagatgcacagcatgatcaagcacatcttttccttagacatggaaagggaatcctccaatcaca

SEQ ID NO: 19350 - DNA, 274 bp, Glycine max
cccacgcgtccgtcaacctttaaactctccaaacgatgttagctgcaaaccccaccttaaaaatcgaagctttatgatcaccaccctagtgttgtgttggtgatgaatcctaggagcagcttgtgttcttctctgttcatgttcatcaccttgttggggcttcatgtgtacttcgcttcgtcgcaggtcgaagactacgtgagatgtctacggggcatcgaggacactgtctccgaccctcaggctcggctcgccacgtggaggttcgacaaca

SEQ ID NO: 19351 - DNA, 298 bp, Glycine max
attattacatcttcttgcaccccttattattttattacgccgagcaaacacaggatcgttttcatcgaccaacgggaagaacaaaattagcgttatggttctcttcctttctcggaactaggcttgcaaattcatatacccttttcttttttccaataaggttgcaaaggatttgttccccaagcagttggagaacatgatgtctctggtctctcctcggactggcaggcattcgcagtgctataacacaggacttggacaaacccctgcaagcatttcttccaaatactaaaacatt

SEQ ID NO: 19352 - DNA, 281 bp, Glycine max
acgatggcctaagccgcatccttcaccattttgtctctcctactcctccaccgccacctgcgcctccccctcgccctggcgcgtgcagctcacctcctccctccgcgcccgcccgctgcgccggctgggcttcgccgcggcggacccgctgctcgcggcgagtgtatcggtgcgcgtggcggcggtgagaggaggaagaaagggcgccaggggggcggtgtctatggcgaataagagcgtgggggacctgaacgcggcggacctgaatgggaagaaagtct

SEQ ID NO: 19353 - DNA, 340 bp, Glycine max
aggaattcaggaaggtgttcaacaaggaacattccgacaacaaagcagtgtctgctgtgggcaaagctgctggagcaaaatggaagacgatgtctgatgctgaaaaagcaccttatgtggcaaagtctgagaaaaggaaagtggagtacgagaagaacatgagagcttataacaagaaacaggcggaaggtcctactggtggggatgaagaagaatctgagaagtctgtatctgaggtgaatgatgaggatgatgacgaggaaagcagtggcgaggaggaggatgacgattagagaatggactgatgataatagcatttatgtaagttctgatgattttg

SEQ ID NO: 19354 - DNA, 350 bp, Glycine max
cggaccgtgggcgcatctagcgtgtataaagaaagatgatgagttaaggtggagtgtactcgtaatggtcacgttcctgtttctctgttttggcttggacccctgcaagtcaaagcctctaattctgtttccgccttcgtcaaaacgccatctactcaacagaatcgcgttttctccaaatcctattgcccctactgtttgcgcgccaaacgcttgcttgctgaactcaatgaaaacttttgtggtggagctcgatttgcgagatgatgggtttcaaattcagagtgttcttctggattgaaggtagaaggacagcccgaagtgtttggaatggcagcatattggggatc

SEQ ID NO: 19355 - DNA, 360 bp, Glycine max
cgcagagccgctttctttgtttttggtactgagagattaccaaaacaaacccacgaatttttggtgtggcagatcacgattcctcagaaaactgtaatggcttttatgtcggaggtcaacatgagcttctctcactacatggatgatgaatatgagaaactcttccggagaatgaaccctcccagggttgtaatcgataatgaagcctgcaagaatgccaccgttatacgggttgatagtgcaaacaagcatggaatacttcttgaagttgtacaaatcctcactgatctaaacctcatcataactaaggcttacatttcttctgatggtggatggttcatggatgtttttaatgttact

SEQ ID NO: 19356 - DNA, 322 bp, Glycine max
atttcttctcatcttctttttcttcttattaatattattattccgtgcaaacacagcaacatcttcatcaccaacgcgaagaacaagattagcgttatgggtctcttcctttctaggaatttggcttgcaaattcatatacccttttcttttttccaataaggtttcaaaggatttgttccccaagcagttggagaacatgatgtctctggtctctcctcgtactggcaggcatttgcagcgctatgacaaaggctgtcgccaagttgtgggatgcattccttacagatacaaaaacaatggaacacaggataaggaattag

SEQ ID NO: 19357 - DNA, 390 bp, Glycine max
  modified_base (343)..(343): a, c, g, t, unknown, or other
ggtgatcttatggatagtttttgtgtgtattgatgaacatttcaatgaagagctaaagtatgtttcatgattatgcatgtcactattgtattgtatatatgcacatgtgtctatgagcgtctcaatttagcttctctcccattgatgtctttcttagacaggtagaaaaataagcaggagagagttgaatgtgtaataatcaagcagaggtaatgactctcagttaattacctgtgtgtccttatgctttttctgtttatgcatgcttcgatatgtatggatattaagatattttcaggtggtatagattctaccatttttattttttttaaaaaaaaatatntccttaattttattacttattatattttatatatttatcattatata

SEQ ID NO: 19358 - DNA, 378 bp, Glycine max
cgatatttggaggagcaggttcgtggtgattaccttcaacatgtgcttaagcttttgtcttcatgctcccctgatgttctggaaccaataaggcagagcattttactgggtggtcaatcattaaaatctttagagcctttagtcattaaagcagtggtggagtcactagttgaaaagtcagttgaggacttgagacaaatgaaggggataacagcaacctataggatgactaataaacctctacctgtgaggccttcaccatatgtttcaggggtattacgtccccttaaagcttttttggatggggagagagctacaagatatttggccagtgaaattaggaataaaatactcctttgtgctgcaactgagattact

SEQ ID NO: 19359 - DNA, 396 bp, Glycine max
  modified_base (361)..(361): a, c, g, t, unknown, or other
atgaaaccaaaaaccaaattcaacactgcccttttaatacttttctgttttcagagccccagcctcacacaagttcaattttttgtcacccttttctgattatatccttgtcctcttctccgagcaataaaaaaaccttcttctttctctttactgcgtgctcctctgcgtgaaactgggacacccctttagccctctttcgctctttgcctgccaaaggctttaactttgtcactttagctccgtacaatatgtgccccatgtcacttctttggtctaattcctcaaattgagcaactgggtcgtgcttacttggtttttgttgatggctgagaacgtttgacttgtgtttcccacaagnttgattcttttggttttggtctttttcccttttta

SEQ ID NO: 19360 - DNA, 305 bp, Glycine max
  modified_base (281)..(281): a, c, g, t, unknown, or other
cccacgcgtccgtggagaggatatatacaagtacttgggtctcaaggaaggaaaatcatccaaaaagtttagaagaagatgagatcatatcactgccaatgagtgaattaatgcgacggataaatgaatcatatgaagccatgaaaaattgaggatagactgagatgtcaagcaacttgtgcgttgtagtacaattttgagcaaatttttgcattaaattaaaaaaaattgtatactaattgattgactatataaacaattttctagttatatttttgcgnaaaaaaaaacaatacaaaagaaaa

SEQ ID NO: 19361 - DNA, 368 bp, Glycine max
gtatgttggaaaagcccagataaaatttgagcgtgaacaagaactgaaaggacgatttgagcagagcataaaggaagctgctgacaaatatccaggtttgaacttgtatctcaagaacttggatgatacaatcagtgatgaaaaacttaaggaaatgtttgccgactatggtacaataacttcttgcaaggttatgcgagacccgactggaatcagcagaggatcaggatttgttgcattttcaactcctgaggaagcaactcgagctcttggtgagatgaatggtaaaatgtttgctggaaaacctctgtatgttgcccttgcccagagaaaagaagagagaagagcaaggttacaggcacaatttt

SEQ ID NO: 19362 - DNA, 359 bp, Glycine max
gcttcagcggctatgcctcgttaattcttccgatcttatttcacatttcatttccccatttttctcgcatttccttcaattagggtttcttttttcttagctgttgcaattgattttcattttactcacctggttcggttttcacatttgtttaaacttgttacacctctgtcacgattgatgtggtccagacttgatgctttgatcccatcattaatgaccacagtgaagttcaaatgatgcttgtttcctggccatttctatagttttgtgacgtgattgagaatgtggaactttgcatctagtttaattgctggaagtgtgggtctgaaaaatgattctccaaaaccaactcactc

SEQ ID NO: 19363 - DNA, 340 bp, Glycine max
cggacgcgtgggcggacgcgtgggcggcaacgcccatcaaaatttagtggatcagactactctactgatgaaggagatagtctagttcagaaaagaaatcatggaatgcatagcaaacgccatcgacaatcagaatctagtgaatctgacttgtcaagtgatgacgctccccataagaaaggccacagaaagcaccataaacatcacaagcgatcacataatgtggagctgaggttgtctgattctgattatcgcagtcatggtcaaagaagcagatcaaagtcattggaagaaaattctgaagatgaaagcaaaaaaagatcaatggataagaagtctg

SEQ ID NO: 19364 - DNA, 358 bp, Glycine max
aggaccttattgggaatgtctagggtttcacgcctgtgatgtttgattacaagatccatgatgaaaacaagtcactctacaatacccctccttgttatgggatttacatgtgtgggttggtgtttgaggacttgttggagcaaggtgggttgggggaggttgagaggaagaatcagaagaaagctgagattctctacagtgcaattgatggcagcaaagggttctataaatgccctgttgagaagtctgtgagatctttgatgaatgtgcctttcactttggagaaatcagagctggagggtgagtttatcaaggaggctgctaaagagaagatggtgcagctcaagggacataaatc

SEQ ID NO: 19365 - DNA, 404 bp, Glycine max
gttcttgccaaacttgaattggtatactgtcgggtcctttccacagaaaatatacttatggggagtcttatctcataaatatggattctgaaagcatcagcttgccagagaagattcggttagtcttgtttagcctatgtgatctactgatgacaacagttactcacatttcttcttatcatgttaaacaacaagcagaatttctgtggcagaaagtagggaatgatttgaatgtaatgactcttcaatggttaaaacaaaaatcagaattcagccagaaccaaaacctggacattttggaactggggaacatgaaagataactattcaagtaatcaagtattatgggatcgctgtgcggatccccaaattgatatctgattgctttgcacaggaaaaactcaa

SEQ ID NO: 19366 - DNA, 347 bp, Glycine max
ggattttcagttcctcacatgcactttttgtgaagccagtgaagaggcagatgatggggaagagcaagggattgagaattgcatgccaagccaccagcatttccgctgatagagtccctgacatgggcaaaagacagctcatgaatcttcttcttcttggagccatttcactccccactgctggaatgcttattccctacacctacttctttgtccctccaggttcacgttcttcagctggcggtactgttgccaaggatgccgatggaaatgatgtaattgccgagaattggctcatggcacatggacctggtgaccgaacccttacacaaggattgaaaggagat

SEQ ID NO: 19367 - DNA, 264 bp, Glycine max
ctcacgcgggagcatacgcgttaatgtcatctttgctcaacacacacgttatacacctatttggggtgggatcacgcgttgaaaaacattcaaaaagccggatgcgagagtatggtaaaagctaggagacaactaatggaacgcaaccctgacacaaaatgagacaacgagccgtctgattcggctgaggcaaccaactcaaatgttcaaacttcaacgctatctgcatcatatgcaccctgatactatgcatccatccttaaa

SEQ ID NO: 19368 - DNA, 361 bp, Glycine max
cggacgcgtgggcggctccgttaggttttcctttcgcgtgtttgctcggaactactcctccactcatcgtttaaaatgtctgacgtggaagagtttcgttgcttcattggtggccttgcatggtcaacgtctgatagaaagttaaaggatacatttgaaaagtttggcaagcttattgaggcaaaggtggttgttgacaagttctctgggcgttctcgtggttttggatttgtcacatttgatgacaagaaagcaatggacgaggctattgatgctatgaatgggatagatttagacgggcgaactattactgttgatagagctcagcctcaacaaggatcaactagagatgatggtgatc

SEQ ID NO: 19369 - DNA, 391 bp, Glycine max
cccacgcgtccggaacaatttaagcgccttcttggagtcaaaccaacgcctaagaaggaactgagaagtacacctgctatatctcacccaaagtcattgaaattgccaaagaattttgatgcaaggacagcttggtctcagtgtagcactattggaagaattctagatcagggtcactgtggttcttgttgggcatttggtgctgttgaatcattgtcagatcgcttttgcattcattttgatgtaaatatctctctctctgttaatgaccttcttgcatgctgtggctttctgtgtggatctggctgtgatgggggatatcccttgtatgcgtggcaatacttatcccaccacggtgttgtcactgaagagtgcgacccatattttgatc

SEQ ID NO: 19370 - DNA, 383 bp, Glycine max
ctagcttggactatgggttcaagggtgctgattttgccatggcttcttactgctctgaactccaatatcttgcaaatccagtaactagccatgtccaaagtgctgagcagcataaccaggatgtgaactctttgggtttaatttcatccagaaagacaaatgaagctatcgagatccttaagctcatgtcttccacattcttgattgcactttgccaagcgattgacttgaggcatttggaggagaatttgaaaaactcggtcaagaacactgtgagccaagtttccaaaaggattcttaccacaggtgtcaatggagaactccatccttcaagattttgtgaaaaggatctgctaaaagtgggtgatagggagtacgtattt

SEQ ID NO: 19371 - DNA, 384 bp, Glycine max
aatacaacagcaacatgatggtttcagtttcttgagggtactaatatgaacagaatctcctctcaacacctttgccttgctgcagttcgcaactgcaactgcactcaaatataaatatatatacatatatatatatatatatatatatgtattacttcatggtcacacatagttaagtttattaattactaggtagctggttttgaatagggtagttggtagttatagttgttgtcccagatatggaagaagcaggtttaggagattgttgttcctcgaattcgacgattacgaggaagagcgataagcgaaagcagcaacaccaacaacaagagaagccatacagaggaataaggatgaggaagtggggcaagtgggtggcgg

SEQ ID NO: 19372 - DNA, 367 bp, Glycine max
agcaaattttccctcatttattctcctctcctcacaaatcacttcccttattcaataccaaatcaaattattccttctcaatcgattctcttcggccatgtttgcttacagggttttgtcccgttcctctgccaccctttctcgaagcttcacccttttctctgtttcacgaaattcccaacctttctccaccaacctctccaataacttcaattccctccttcacccatctcccaacaagctgattccagttcaaaccaattttctgaattcaatgaatccatcattgacttcgagatttggattttcttcaacggcctcacatgaacatgcaagtgaaggagcaaaggtatctgatcagtctgaa

SEQ ID NO: 19373 - DNA, 406 bp, Glycine max
  modified_base (333)..(333): a, c, g, t, unknown, or other
ctccatattaccaactcaactattggcattgaactgaagacaactaagggtagaggtggttatatgaaaaacatcttcatttctgacgcaaaattggaaaatatttacttgggtatcagcatgacgggaagctctggctcccatccagatgacaagtacgatcctaatgcagttccggatgttggtaatgttacttttgagaatgtgattggtacaaatattgctattgctgggaatttttcaggaatagttgattcgcctttcactcctatctgtcttttgaacgcgaccttttcttccagttctgagtcatcatctccttcatggttttgntctgacataatgggaatctccgaggaagtgtttcctgagccatgtccctgactgcagaacacgtattcaaact

SEQ ID NO: 19374 - DNA, 403 bp, Glycine max
cccacgcgtccgagcattttgtggttcgcattccagatagattaccacttgatgctgctgcacctcttctttgtgctggcatcactgtgtatagccctctcagatattatggacttgacaagcctggtctgcatgtgggtgtggttggtcttggtggactaggccatatggctgtcaagtttgccaaagcttttggtgctaaggtcacagtaataagtacttcaccaaacaaaaaggaagaagcaatacaaaatcttggagctgattcctttctaataagccgggaccaagatcagatgcaggctgcaatgggtactttggatggtattattgacacagtttctgccgttcatcctctcttacctctcattggtttgctcaagtctcatggaaagcttgtaat

SEQ ID NO: 19375 - DNA, 374 bp, Glycine max
cccacgcgtccgcccacgcgttcgcttacgcgtgggctagcctgcacatcaaggcttctgctgaacagttctatgatgttttttgcaacaagccacacactattgccaacatttcaccagaaaatattcagtcagttgaagttcataaaggtgaatggggcaaagagggatcaatcgtctcctggaactatttacatgagggaacagtttgtgtagccaagcaagtgcttgaaggcatagacaaggaaaataacaaaatgacaatgaaggtcatagagggtgacgtgctgggactctacaagagcttcaagtctaatttgcaagttacttcaaaaggaaaaggcagcgtaatgctttgggcaatggaatacgag

SEQ ID NO: 19376 - DNA, 389 bp, Glycine max
cccacgcgtccgggatggtttgcgaacaaaagataaagagcgtatacttgttcttgcggctacaaatagaccttttgatcttgatgaggctgttattaggagacttccacgaagattgatggttaatttgcccgatgctccaaacagagaaaaaattgttagtgttattttagcaaaagaagaattggcacctgatgttgatttcgaagcaatagcaaatatgactgatggatattctgggagtgacctaaagaatctatgtgtcacagcagctcactgtccaataagagagatcttggagaaggaaaagaaggagagaagcttagcattgactgagaaccaaccattacctcagttgtgtagcagtaccgacattcgtcccttaaaga

SEQ ID NO: 19377 - DNA, 324 bp, Glycine max
ataaaagaaacccaaaatctttctctttctctcgttcgctttccgtatccatatatatcccaaaccctaccggtaggttccccaattcttcaacaccccgtggaccggtgctctgcttcttagtagttcgtacggtttttccgtcgattgcctccgaaacgatgtcgtatcgcccaagcgggaactccaggaccgaggtccgccggaaccggtacaaggtggcggtggacgcggaggaaggtcggagacggcgagaggacacgatggtggagatccgcaagaaccgcagagaagagagtttgcagaagaagaggcgcgaggggc

SEQ ID NO: 19378 - DNA, 358 bp, Glycine max
aaattccaaacacatgtaattgtgtgccgcctcattggaccagcccagaccctcaccgaaccgacacccttgtctcttttcctctcttctcttctattcctaaattgtagttctgttttgccagtgattgaagctagttagaacaagatgttgcagctactctacactgcgattttctccgaaatgcttttgattctcacgctcgtcttcaaaaccccactgagaaaactcgtcatcgtttccctcgatagtgtgaagcgcggtcgcggtcccgtggtggtttccaccgtgggcgccacattgatggtggttctcgctttgagcctctacagcatggccaagaaccagcaacgcaccc

SEQ ID NO: 19379 - DNA, 354 bp, Glycine max
gcaagtgccattttattttgccctacctcctcgattctagggtttcaacaatggcgctgttccttctctacgaatccgcttcgggctacagcctgttcgaggttcacggcgtcgatgaaatcggccagaacaccgaagcggttcggaactccgtttcggacctcaacaggttcggcaaagtcgttaagcttcgctccttcaaccctttcacttccgctctcgatgctctcaaacagtgcaacgccgtctccgaaggcatattaactgatgagctgaggactgtcttggagaccaacttgcctaaagtgaaggaaggtaagaagtccaagttcagtttaggtgtgtccgatccta

SEQ ID NO: 19380 - DNA, 410 bp, Glycine max
tgatccagtgaggcgcatttcaaccaatcatggtgttttttccgaccaaaagagaaggcaatgaataaattaatgaactcaaactaaaacaccaaggaaaaaaaaacacaaaatataaaacacaaaacacaaacaaagagagagaaagaacaaagactgttttgtttctctaagttgttgttgcagttagcttcccgagcaccgtgtggtcgggtattgtattgtattgagagagtgatttgtaggttctttctgatcactgtggtgcgtccattgaagaggaaacatcaaacatgggttggattccctgttctggatattctggcactaagaacaaagttgagaagatggaagttcaggatagtctcgttggtcagatcaaagccaccccaggaaagttgaaaaggaat

SEQ ID NO: 19381 - DNA, 418 bp, Glycine max
  modified_base (401)..(401): a, c, g, t, unknown, or other
cttagcttagccttctcctattctggacctctgtcccttcctcttgattagggttctaattatgttatgaaccttccatgcttttatttttcttttaaaaaaagaataaagaaaaccctacatatgggtttgtggggtatattcagtcttcaatatcatggctctctttgtattcttccacagctttcttgaactgcatccaaagagttcctttgcatgcatgccatggcactcttactcccaaatcttgttttgcggttcaataaagctgtgggaagatacagatagggtcaacaacggactagcttatctcaaactccagattcttctctaaatcttcctatccaattatatatagggataaaattattgcaaagtattttttttcctttttcttttgngatttgacttaatttaa

SEQ ID NO: 19382 - DNA, 375 bp, Glycine max
cccacgcgtccgtgaaatctgggggctggcaggattcttttgaagatgaaccatctcaaaatggcagtttggcatatactgctcaaaatgggggactaaatacacctcatacagtagtcaatcaaactatgtctatcatacctatctctgcaggtggtgctcctggagctgttcctggtcccacgacaaacttaaatataggaatggattattggggtacaccagcttcatccaacattcctgcacttggcagaaaggttccatctactgcagttgctggagggatggttaccgttggatctcgggatagtgctcagtcacaactttggctacaggatgaaagagagcttaaaaagcaaaagcggaagcagtcta

SEQ ID NO: 19383 - DNA, 362 bp, Glycine max
gggcggtatactttctgcgcttcttggcggcgacgcggcggcggcggcgtcttcgccggagagttctacttctagagtctcctccttccactcgtcgccgcgctggcagctctacttcaacgagatcaaagataccgataagctcgtaaatccctagatctcgattttcccccaattttttctctatgcgctggatctgaatattttccttgaaaactaggttgtgatagatttctcggcgtcgtggtgcggtccttgcaaattcatagagccagcgattcacgccatggccgacaagttcaacgacgttgacttcgtcaagatcgacgtcgacgaattacctgatgtggcgcaggagtttc

SEQ ID NO: 19384 - DNA, 387 bp, Glycine max
tcaagacacactttgctagaccaaattggcgcagtgttttcaaacacactgcactcaaacaccctgggaaaagagttggtgttttctactgtggggcgcacacattggttggagaacttaagaggctttctcttgacttttccaggaaaaccaacaccaagtttgattttcataaagagaatttttaaattcttttatcatagttcgtatttttttttccaactgtaacgtatgtagttgagggaaagtttctagttatatatagtttgttggggtttttttctttggtactagagctaggtagataagcagctagctgcattcaattagagttgtatacatgtataaaaaaattcattttgatataaatgaaatggttacgttggt

SEQ ID NO: 19385 - DNA, 377 bp, Glycine max
cagggaagagaaaggactagagacagaggaagcatatccctacacaggaaaagatggtgtctgcaaattctcagctgaaaatgttgctgttcaagtccttgactctgtgaatatcaccttgggtgctgaagatgaactaaaacatgcagttgcatttgttcggccagttagtgtggcctttcaggtggtgaatgggttccatttctacgagaatggagttttcactagtgacacttgtggtagcacttcccaggatgtgaaccatgccgttcttgctgttggatatggagttgaaaatggtgtcccatattggctcataaaaaattcatggggagaaagctggggtgaaaatggctacttcaagatggaattgggga

SEQ ID NO: 19386 - DNA, 374 bp, Glycine max
  modified_base (346)..(346): a, c, g, t, unknown, or other
agcacttagtgctattcaataattactaaaaaccaacagcgagtgttgtttttgtttggtccaggctggaccagggaatgaatagagatgagaggctttcggttgaagagaactgagttaagcggcgaagccaaacgcagaatcggcggcagaaattgccaccggaagcacgtcgaagacgggtgaaccaaacacaaaattccatccaccacttctcttttcaatccccaactcaaatctgtgaagaaaatctcaatttctaaattgtaattcttagcactactgctagtagtagtaaaaaaaaacaattagaaagtagtagagtgtttttttttctttttttcgnttggtttacttttaagatgggtgagaag

SEQ ID NO: 19387 - DNA, 378 bp, Glycine max
caacacctttgccttgctgcagttcgcaactgcaactgcactcaaatataaatatatatacatatatatatatatatatatatatgtattacttcatggtcacacatagttaagtttattaattactaggtagctggttttgaatagggtagttggtagttatagttgttgtcccagatatggaagaagcaggtttaggagattgttgttcctcgaattcgacgattacgaggaagagcgataagcgaaagcagcaacaccaacaacaagagaagccatacagaggaataaggatgaggaagtggggcaagtgggtggcggagattagagaacccaataagcgttcgaggatctggctgggttcttacgccacccccg

SEQ ID NO: 19388 - DNA, 342 bp, Glycine max
cccacgcgtccgcttcttataaaattggaaaatccttgattttgcttcgttactactgggagagtttacgagaagtatcaaacccataaaagacgtttcttcaacatcattgaccttcgttgaatttaattcgttcaaaacggcgttgtgtttccggcaataccacgacggaaggcccagaggccccctttggaaaggaaaaaagctcattggcaaagaagcgctttttgtcatatcggggtttaagaggtttaacgatgacgaggataagcttcacaagttcatcaaaactcacgttctcagactcttgaagatggacatgatcgctgttctcactgaact

SEQ ID NO: 19389 - DNA, 420 bp, Glycine max
cccacgcgtccgccgaaatctcatatctggaaaaactgccgctgagagtttggacattaactttaaagtgagctctgctttggtggaaatagtgaaaagaataactacaaaacctcgctatataattgcaaagggtggtattacgtcttcagatcttgctacaaaagcccttggtgcaagatgtgcgaaaatagttggtcaagcacttgctggtattcccttgtggcaattaggccctgaaagtagacaccctggagttccttacattgtcttcccaggtaatgttggtaacagcacagcattggcagaagttgtaaagtcctggactagtccaatcagacttacattaacaaaagaaattcttaataatgcaaaaaaaggtggatatgctggtggagcatttaattgatataattttga

SEQ ID NO: 19390 - DNA, 338 bp, Glycine max
cacacacccatctcctccatccttgttctccacaattctagctacctagcgcaaaaattgtagtcatgttggggaagaggccccagccactgatcggaaaaatctccgaattattggtctccggcggtcgtgccgccgtgcttttcgatgccctcggaagccctagaagcccgtttgacatgatgaacttaaagatgcaatcaccaaagggcctaaaaagctatgaccttggtggtgttggtctaggaattgtggtggcccttgataaatcatcatccgaggaacaaggccatgtttgcacatcaaattcaaaccgatccgtaccaatcccagttact

SEQ ID NO: 19391 - DNA, 387 bp, Glycine max
accatggcggctgcgtttacaagtacaagtgcaacactgagactgtcaaatgttggagagagcagaggtttgcagctgcgtaagtgtaaccctaatcctaataagctgaaggttatgggggggtttggaggttgttctggagtggcagtgggtgtgagagaaagaaaaggaattggaagggttagggttcgggttcgggcgagttcttcgtcggacgaggcagtgagtgcgcagtcaaaagtgactcagaaagtattctttgacgtcagtattggaaatccagttgggaagcttgtgggacgtattgtgattggactgtacggcgacgatgtcccccaaacggccgaaaacttccgtgccctttgtactggagagaaaggctttggc

SEQ ID NO: 19392 - DNA, 426 bp, Glycine max
aaacagaggctacgtacgatcaaattaattaatatggcggaagtgaggaacaaacaagtggttctgagggactatgtgagtggttttcctaaggaatccgacatgaacatagttgaaggaaccacaatattgaagcttccacaaggttccaatgatgtgcttctaaaaaatctctacctttcctgtgacccttacatgagaatgctcatgaccaaggtggaaggcctcgacgtgtttggcacctatacacctggctctccattaacagggtatggagtgtccaaagtcctagaatctggacacccagattacaagaaaggtgatttagtgtggggatctacaaaatgggaagaattcagcttggtgtccccaactcaaatacttttcaaaattgagcacaccgatgttccgctttcatattatact

SEQ ID NO: 19393 - DNA, 353 bp, Glycine max
cccacgcgtccggtttcgaatagattatcctaagtctttgggaatagtgctgcaatggcttcaagtcaggaggaggtgacccttttgggagctactggaagcccatttgtgtgcagggttcatattgccctcaagttgaagggagttcaatacaaatatgtcgaagaaaatttgaggaacaagagtgaactgcttctcaaatccaacccagttcacaagaaggttccagtgtttattcacaatgagaagcccatagcagagtctcttgtgattgttgaatacattgatgagacatggaagaacaaccccatcttgccttctgatccttaccaaagagccttggctcgtttctg

SEQ ID NO: 19394 - DNA, 394 bp, Glycine max
cttggatcttaccctcttgtttgctaatattctcattcttctgtctctgcttcttctccttgtaagttctctcgctcgctctctccgcctgtttcttctccttgtggactgtaagagctgaactaagagatggggttgtctttcaccaagctttttagccggctctttgctaagaaagagatgcgtattctcatggtaggtcttgatgctgctggtaagactaccatcttgtacaagctcaagctgggagaaattgtcacaaccattcccacaattggattcaatgtggagactgtggaatataagaatattagctttactgtatgggatgtgggtggccaagataagatccgtcctttatggagacactacttccaaaacactcaggggctta

SEQ ID NO: 19395 - DNA, 384 bp, Glycine max
atcttattttaacatgttatactgggttttggaaccagattccctaaaagcttctaacaatgagagtatgggtggatcctttcaatataattttaatgatagtcttaatcttcaggagcgtcaatctctgtcaaaaattaagggaaacaattctagtcttgactgttttgcaaacaatattccacattccaagtcgaaagcatctcctaaatcattttcacaaactacagtacttgatggcctccaacatgttcttagtcaggctgagaatgatttcctatacatggttgagcaggaaatggaggaacgtccagatttagtttcgattggatcttgtgttttacttgtgcttcttcatgggaatgatttgtacacacttaatct

SEQ ID NO: 19396 - DNA, 392 bp, Glycine max
cttgatcggatgggagcagatccatggaaagtgttaaatcaggctagatctaagcttcggcatcatagtgctgccatacaagttccaataggattggaagatgattttaagggactagttgatcttgtgcagttaaaggccttctatttccatggttcaaatggtgaaaatgttgtcactgaagaagtgcctgcagatatggaagccttggtggcagagaaaagacgtgaactcatagaaaccgtgtcagaggttgacgataaacttgctgaagcttttcttggtgatgagaccatatcagctgctgatcttgaggaagcagttcgtagggctaccatagcccagaaatttataccagtattcatgggtagtgctttcaaaaataaaggggt

SEQ ID NO: 19397 - DNA, 327 bp, Glycine max
attcaaccaaaaatcaaactaacaaaatgaacacaaacaaggtctttacagtgtctgatatcatcaccccgagttcttctagttctgccgttgacccaccgacactgtccctggggctatccttttcatctgaccaaagacagacatcatcaagacattcagctttacatgccatacaatgtttcagcaatggagaaagcatcattagtgttgcttgagattatggtccttggattcacatattaattacatatactaatctttctctagtttcctgtctttttggtgggagaaagagaaagaggttgaaggaaagggtgatggatt

SEQ ID NO: 19398 - DNA, 392 bp, Glycine max
aaactttttgctttgcaaatggctgctgcaactgctgcaactgcttcttggatgcgattcaaaggcggcaaggaaaggaagctaaccaagatgaataaatccaggattaattgctcttattcttcttcttcttctgtgatagatccttacaagaccttaagaataaaacgaggtgcctctgaatctgaggttaggaaggctttcagacagctcgctctgcagtaccatccagatgtgtgcagagggagcaattgtggggtgcagtttcacgaaatcaacgaggcttatgatgttgtgatgtccaaattgagaggagaatcaaatgaggcagaatcgtatgaggcttattatgatgctggaggcatgatgagccacttgagggaatgaacgat

SEQ ID NO: 19399 - DNA, 372 bp, Glycine max
cccacgcgtccgattttctctctcacttttcaagaatcgtaagctatgggaaagtcttacccaactgtgagtgctgattaccagaaggccgttgagaaggcgaagaagaagctcagaggcttcatcgctgagaagagatgcgctcctctaatgctccgtttggcatggcactctgctggaacctttgacaagggcacgaagaccggtggacccttcggaaccatcaagcaccctgccgaactggctcacagcgctaacaacggtcttgacatcgctgttaggcttttggagccactcaaggcggagttccctattttgagctacgccgatttctaccagttggctggcgttgttgccgttgaggtcacgggt

SEQ ID NO: 19400 - DNA, 390 bp, Glycine max
cccacgcgtccgcccacgcttccgctttctcttcctcttcctctgtgaatggggtttctgccttttttaacggcaatttcgaatcgattcgattgggtctctcaaagttttgattgcacagtttgcgaagatgcctcgtcccaaaagaaaagctgccccaccaatcacttcctctgatgttgattcttctcttcgcaccgaaccaaagaaatcaactataaagcaatttgatcgaatagataacttatttgagtcatatgcaaataagtcattgggtttaattgacccagacgggattgaagcactttgtaaagatgggcatgtggaccacacagatggtagaatgctcattacttgcttggaaaattgaagcttaaaaacaagggtttt

SEQ ID NO: 19401 - DNA, 314 bp, Glycine max
cccacgcgtccgctttggattccctttcagacacttcatctggggtcacccgaccaattttcaaagaatggggcggctcaacagccctcttagattggctcgaatcacccactgcccacatcttaaaaattaacgttccaggattcagcaaggaagacataaaggtgcatattgaggatgggaatattcttcacatcaaaggggaagtttggagagaggagcctcaagcaaaggagaaggatactgtttggcatgtggctgagagaggcactgggaagggagggttctcatgggaaattgaattgccagagaat

SEQ ID NO: 19402 - DNA, 377 bp, Glycine max
gggtttttggctacggttcactggtgtggaaccctggattcgattacaatgagaagattataggtttcattaaggactacagacgcgtgtttgatttagcgtgcattgatcaccggggaacacctgaaaacccagcaagaacttgcacgttggaggagaaggaaggggctatttgctggggagctgcttattgtgttcgaggaggccctgaaaaggaaaaactggctatgcagtatttggagcgacgggaatgtgaatatgacagaaagactcttgtaaacttcttcaaggaaggagattcactgcaccctactttaactgatgtaatagtattcacatctactccagacaaagtgaacaacaaatactacctggga

SEQ ID NO: 19403 - DNA, 361 bp, Glycine max
aacaacttctgctacttcctactccaaccgcacttctgctccgcaattatcatgggcaaggtcaagatcggaatcaacggatttggaagaattggccgtttggtagccagagtggctctgcagagagacgatgttgaactcgttgccgttaacgaccctttcatcaccaccgattacatgacatacatgtttaaatacgacagtgttcatggacactggaagcatcacgatgtcaccgttaaggacgagaagacccttctcttcggtgacaagccagtcactatttttggacacagaaaccctgaagagatcccatgggggtcaactggagctgacatcattgttgagtccaccggagttt

SEQ ID NO: 19404 - DNA, 362 bp, Glycine max
cccacgcgtccgcccacgcgtccggtctggggcttcaatgacctgtgctggttgccagggtactggcatgaaggtgtctattaggcaccttggtccttctatgattcagcagatgcagcatccttgcaatgagtgtaagggtactggagagacaatcaatgacagagacaggtgccaacagtgcaaaggagagaaagttgttcaggagaagaaagtacttgaagttgttgtggagaagggaatgcagaatggacagaagattacattccctggtgaagctgatgaagcagtatgttgagctttgataccaacaccgtgctggattatggaaattaggctgaccttgatcttttttttgtttg

SEQ ID NO: 19405 - DNA, 424 bp, Glycine max
cccacgcgtccgtttgtcctttacagttggaaccatgagcgagattggcctggaacaggatccttttatgagaacatggattctgggggagaatgtggtgtgttggcacagactatgttctacacccctgcttctaacagggctaagctttggtatggcgacatgacttcatacatttcttcaaattataatcaataaattagcgaattgttagatttttcccgtttagaaaggttatcttcttttgggtttaatgatttgagcatgaagaaagtgaatcaccaagaattacaaatgccattcaataaagagtaaataatcaaattgaggctttgaaataattttataccaaagtccaccaatgcttttggtattaaagctttaggtagaaaatacttcacagaattaatcagggttttggaaa

SEQ ID NO: 19406 - DNA, 366 bp, Glycine max
aagagaatggttgggatgcctgacatggatagtctcattaagaagcctgacgttttatcatttcacatagccagtaaaatacctgtgtctgagtctacaaggcaggaatttttggatattgatagcattgcatataggctgcgtagggaaattgaattactagagagcattgatcttatccggtgtaaaagctgtgaggtaatcattgtctaaccaaagccccacagttttgcacttcttattgcttgtgaataaatatagaggcaatttgggattgtacaattctgtttcaactttcatcaaatgcagaaaatactgtttcttcctctttttttaccttaaaatttgcagactataattgcaaaa

SEQ ID NO: 19407 - DNA, 156 bp, Glycine max
acgattcaacacgccataattgcaccccgttgaaaactcgtaacgttgattaaatgatggcttgcgtttctaaaccttgtcacggcaaaaagatgatctctgccaccatatttaagacgattctagaatgagattagtagcatgggcagcagagac

SEQ ID NO: 19408 - DNA, 157 bp, Glycine max
cgcaaagccgctttctttgtttttggactgagagattaccaaaccaaacccacgaattttgggtgtggcaattcacgattcctcagaaaactgtaatggctttgatgtctgaggtcaccataaccttttttaactccatggttaatgattttagaaa

SEQ ID NO: 19409 - DNA, 465 bp, Glycine max
attcaacacgccataattgcaccccgttgaaaacttgtaacgttgattaaatgatggcttgcgtttctaaaccttgtcacggaaaaaagatgattttggctacgaatttcaagacgattctagaatgagattagtagcatcggcagcagagacagtgtgattgtgctctccctcgtatgttaccaccagcatagctggatcatccaaagctctttgcacatgttttcgcgctggacaccctctcacactactgcacttgtagtaacccctgcaattatcattcccaaaaccaaaaaattaacacccatgaccactcctcagattcaataggttctcagaaacagcatataagaaacaaattaattgggtccactttaaattttgaaatcaagtgagagacatataaaggtaaatggatgattttaaagaaaaaaaatgttacgggattcgatccactttactaat

SEQ ID NO: 19410 - DNA, 148 bp, Glycine max
ctcactcgtacctgaaggcgctcgcttgatagatcctgagagggcaagcacatagacatccgttgaagaacaggcactgcattattcggacatacatgcggcgacgtagacgctcacaccatatgacggatcaatggatcttatacag

SEQ ID NO: 19411 - DNA, 360 bp, Glycine max
acgcccacgcgtacgttctaagattagtgtggctgcttatttcaacaagaggcacactgataggaaccagtagacttcttatagtattactgctcactgatgtgtgcattggttggcctggttcaatgcctgatgatcaggtattggaaaaaagtgcccttttttaaaaggctaatgggtggcttctgaaagcggattggattgcgggtagtttatggtaccctttgatggattgggttttggtgccttatagccatcataatctgacttggactcattatgctttcaatgacaagattgtggaagttcagaaggtggctagggatgcttttgctctgttgaaagggatgtggaattgtc

SEQ ID NO: 19412 - DNA, 365 bp, Glycine max
caaggaagaaaatgatttgatgatgataagattcttgcgggctcgtagtttggatgtggagaaggcttcggcaatgttccttaagtacttgaaatggaagcgttcatttgttccaaatggttgcatatcaccgtcagagattgccgaagatattgcacaggacaaggtgtttacgcaaggactcgacaagaagggtcgacctatagttgttacctttgctgcaaaacattttcaaagcaaaaatggtgccgatggtttcaaacggtatgtggtgtttgttcttgagaagctttgttcaaggatgccaccggggcaagaaaagtttcttgccattgcagacattaaaggatgggcatacgtaaaca

SEQ ID NO: 19413 - DNA, 373 bp, Glycine max
  modified_base (11)..(11): a, c, g, t, unknown, or other
  modified_base (23)..(23): a, c, g, t, unknown, or other
ctgatccttgncctcttccatcngcttcaaaaaagaaaggactgcgtgatggggaaaagttattgtatgctgccatgtctggccttggggatcttttgtacgacaaagatgctgtatacataaatattaatgatcaccttgttcaattctcaaaagttgatgaaaactctgctatgacgagtaaaggaaagggtggagatattggggaggatttggtgaaatcgctacagaatatcaaatactcaattaatgaaaaactagagaacagctttatcaatatttttggtcaaaagacaaatgtgtcatcagaagctctaggtgatgcacatggcacaaacaaggaagttgaaccaaatggcaaaacaaaaacttt

SEQ ID NO: 19414 - DNA, 372 bp, Glycine max
atctgcattgtctatcctcttctctttttgaggtcccaaaaacaaacttagaaaatgttcaaattaatgctgcaagaaacaccactcaattatttccccaactttgaaaccacgaattttgaaactgaagagaaaatagtctcaaattgcgtttgaatatggctataagctgcggcaaacaaggattcttgctatggcccgcttttcacactagagaatccaccacagcgtttccacctccactaagcctctcacttaaactcccaccgcaatcacattcaaaagtcaagagggttgttaaaatgtctgcaactgaagtcacaagcctctagatatcataccaatactttgcaataaagccttctgagcacc

SEQ ID NO: 19415 - DNA, 398 bp, Glycine max
cccacgcgtccgtgaagaagatggtggttgcaatgatgcttatatttcttctaatttctacgcaaatggagagcgttgagcccgatgctgcagattgcttggatggttgcactactgcctgtgttcaaagcgactcgaggcttcaagcacggtgtgatcgcaagtgcagcattagatgcggtccagattccacaatcaaggaggacatgggttgagtatgtaaagtcacagcgcaagcaagcagtgtctgcttgaccaacaccgtgtcttttttagtccttgcttatatatgatataacattttaaagtcttcccgatgctgtagtagcatccaaataaacatggatgatagacagctttttaagatcaaatttgttagggtagatgctttgtaactt

SEQ ID NO: 19416 - DNA, 393 bp, Glycine max
ggagggtgcacgttggcatcatcaagttataaaagaaaagaaaagaaaaaaagaaggttggagttagatacacacacatcacaaaaagaaaaaaaaaaaaaagaagctacattgcttcttgttggagacatcaaacatggcaactggtgccaccccagatggattattctggtcagtgtatgaagggtgcatatcctgctacgataactgcgtcgagcgacgaccctaccaccgtaactgtggctgtgcactccataacaagtcacttattaattgcacgcacaagcttccaaggtgtaacaatgtgtcataccctatgaggagggcatggagtgaaggaagcttggtcttggcagcttcttcttcttctccttctcaagttgcaactggggg

SEQ ID NO: 19417 - DNA, 344 bp, Glycine max
cccacgcgtccgtcacattcatccacttttcttcaaagtcttcatctcatatcctctttgttgtgtcctcacacgagtgtaggaacggcattattgtgatggagagccaggatctttcttcgccaccccacgtggacgcatctcgaccgtcccttgggttccccttgggcactgcccttctcttgatcatcatcttcaccttgagtggcgtcctctcttgctgctaccattgggatagggtgtgttccctccgtcaatctttctctgattccgaaccccaaatgccttcctcacccaccaaatctaagcactccaaggaattgaagcaaaacaggggacaaagc

SEQ ID NO: 19418 - DNA, 325 bp, Glycine max
ctcgctttcgggctccccatgttctgtcagattgcgggtgtcgggttcgaccttgtcgtaatgggcgggtgggacccagattcgtggaaagcgtcgaattcggtttttatatacaacttcctgtcggccaaatggcgccgtggggccgacatgccgggtgggccccgcacgtttttcgcctgcgcgtcggatcagaatcgcacggtttacgtcgcgggcggacacgacgaggagaagaacgcgctgaggtcagcgcttgcgtatgacgtggccatggacgtgtgggtcccgctccccgacatgtcgcgtgagcgagacgagtgca

SEQ ID NO: 19419 - DNA, 349 bp, Glycine max
cccacgcgtccgctctctctcaccaatgccttcctagaacgaaaaaaaaaagaagagcaattttccctcaccaaagaagaagaagcaaacaatggccgatcaacttaccgatgaacagatctccgagttcaaggaagccttcagcttgttcgacaaggacggcgatggttgcatcacaaccaaggagcttggaactgttatgcgttcattggggcaaaacccaactgaggcagagctccaggacatgatcaatgaagtggatgctgatgggaatggtaccattgacttccctgagttcctaaatctcatggccaggaagatgaaggacactgattctgaggaggagctg

SEQ ID NO: 19420 - DNA, 361 bp, Glycine max
cccacgcgtccgaggttgaccagctgttgaacaaccctttctttggcgcggtatagggcatatgaacgaagcttatcagatatttccccatctcatggatgccaatggaaactcaattaaagccaaagcaaagttagtgcgctagttgagaggtatttattttccctccaaccattccaatactaactaactgtatttattttcttgctccctttcatttccgccattcgatactcttccatggaccttccgcttctcagcaagagtcttcaattctctctaagaaacaaaaactaccttctcctaattgccttgttcggtgcctccggttacgctgcctacaattcaccctatgtcgctc

SEQ ID NO: 19421 - DNA, 358 bp, Glycine max
ggaacattgctttccttggttctggaattttgctggtgaagtatattgttgctgttttggcagcaatttatatgcctcaggtgaatataaactttcaggcgttggttactcgtaccggctcatacaatttttgcaataagcttgatttaccagggttgttttgtatgtatcgtcattggctattgtgaaggaggagatatgccgaggcaattaaaaaggccaacgacgttcattttcttgaagaggttggtcgttcttttataaagtgaattgaccgaacaaaaagatagaggaagcaaaagaacatcacctagatgaagatgctcttgataccacttgatgtagctccattggagct

SEQ ID NO: 19422 - DNA, 382 bp, Glycine max
gggagttgaaagaaagaaagtaaggatgggagtgacaccgaaaattgctcgttcgatgctctcttccgacttcgccaatttggcttccgaggctcagcgcatgctccacttcggcgccgattggctccacatggacatcatggatgggcattttgtccccaatttaactattggcgctccagttattgaaagtttgagaaagcacacaaagggatatttggattgtcaccttatggttacaaatcctcttgattatgttgagcccttggcaaaagctggtgcttctggttttacatttcatgtagagacatcaaaagataactgggaagaacttatccaaagaatcaagtcacatggcatgactcctggtgtagcattaaag

SEQ ID NO: 19423 - DNA, 373 bp, Glycine max
gtggcttgccaactaattttgattctacttactgctatgcattgggttatggtgctgcagccctccttcaaagtgggaagactggattaatatcatcggttggtaatttatgtgctcctgtagaagaatggactgttggtggaactgcactcacttcattgatggacgtggagaggagacatggtaaattcaagcctgtgatcaagaaggcaatggtggagcttgaaggggcacccttcaaaaagtttgcctccttgagggatgagtgggccctaaaaaattgctacattagtccaggtccaattcaattcactggcccaggatctgatgcaattaatcacactttactcttggagcttggtgcacaagctta

SEQ ID NO: 19424 - DNA, 375 bp, Glycine max
ggaagatcaacctaatgtgacccctgtattcttctatgactgttaattcaaagtcagaccttgacaattcattgatattgtatcaggaaatgatcatggaattatttacatcgagggataaaatggagcagcagttattgcagatagcaaatactgtatatggcatgctgacaatgaaatagactctacatcgaatcgaagtatcaatcctaacttaaggattctaatttattaccattttcttttgctactctcatagagtgtagagtttagatattgtacagtgttaacaatcttatggggaagtgaaatcctttttcaaccacaaatagaatgtcacccacagtgagcttcaaattggtgatattctttcct

SEQ ID NO: 19425 - DNA, 470 bp, Glycine max
  modified_base (387)..(387): a, c, g, t, unknown, or other
gggagttgaaagaaagaatggaaggatgggagtgacaccgaaaattgcgccttcgatgctctcttccgacttcgccaatttggcttccgaggctcagcgcatgctccacttcggcgccgattggctccacatggacatcatggatgggcattttgtccccaatttaactattggcgctccagttattgaaagtttgagaaagcacacaaagggatatttggattgtcaccttatggttacaaatcctcttgattatgttgagcccttggcaaaagctggtgcttctggttttacatttcatgtagagacatcaaaagataactgggaagaacttatccaaagaatcaagtcacatggcatgactcctggtgtagcattaaagcctgngacccccattgaagaggtttatcctctggtggaagccggaaatcctgtggaaatggttcttgtgatgactgtagaaccgggat

SEQ ID NO: 19426 - DNA, 456 bp, Glycine max
  modified_base (249)..(249): a, c, g, t, unknown, or other
ctagcttggactatgggttcaagggagctgaaattgccatggcttcttactgctctgaactccaatatcttgcaaatccagtaactagccatgtccaaagtgctgagcagcataaccaggatgtgaactctttgggtttaatttcatccagaaagacaaatgaagctatcgagatccttaagctcatgtcttccacattcttgattgcactttgccaagcgattgacttgaggcatttggaggagaatntgaaaaactcggtcaagaacactgtgagccaagtttccaaaaggattcttaccacaggtgtcaatggagaactccatccttcaagattttgtgaaaaggatctgctaaaagtggttgatagggagtacgtattttcctacattgatgacctctgcagtgctacatacccattgatgcaaaaacttaggcaagtgcttgtagatcatg

SEQ ID NO: 19427 - DNA, 352 bp, Glycine max
aatacaacagcaacatgatggtttcagtttcttgagggtactaatatgaacagaatctcctctcaacacctttgccttgctgcagttcgcaactgcaactgcactcaaatataaatatatatacatatatatatatatatatatatatgtattacttcatggtcacacatagttaagtttattaattactaggtagctggttttgaatagggtagtaggtagttatagttgttgtcccatatatggaagaagcaagtttaggagattgttgttcctcgaattcgacgattacgaggaagagcgataagcgaaagcagcaacaccaacaacaagagaagccatacagaggaat

SEQ ID NO: 19428 - DNA, 204 bp, Glycine max
cggacgcgtgggcgcatcgagcgtggagaaagagaaggatgatgaggctcaggtggagtgtactcgtagtggtcacgttcgctgtttctctgctatggcttgtaccgctgcaagtcaaagcctctaattctgtttccgccttcgttcaaaacgccatttattccaacatgaattgtcgttgtcttcaaatcctattgcccctac

SEQ ID NO: 19429 - DNA, 154 bp, Glycine max
acgcgcacgcgtccgatcgtgcgccgcctaagtgtgcaacccaacgcctgagaaggggctgagcagtacacctgttatgtgtgacccaatggcatagaagttgagacagaagtcagaagcatggccagaaaggtcacaaggagctgctatagtg

SEQ ID NO: 19430 - DNA, 201 bp, Glycine max
cccacgcatccgcttattataccctatcactcacttcacctatcttcagtcacctttattgaaagaatgatccacctcaacatccctcttacattgactcgaattacccactccccacatcttacacattaacgttccacgattcagcactgaagacataaatctgcacattgagcatgataatattcttcacatcaaact

SEQ ID NO: 19431 - DNA, 315 bp, Glycine max
acaaaccaaagagaagttgagactgttgatgatgactcacatcatggcaaaactcaagatgattcatctgcagtgcaaactaatattgctgaatcatctatgaaaaatatgggtgatgacaagagagatcctttacaagcacaaacttataatcaagatttggaatcttctctgatggataaagaagctgttgtggacacacaaactctggatcgagacatggttgggagtgatgcacatcatctggataaacccctttgttcaatccccacataagaaaatttggaaaggggtgtagttgaaggtcttgagact

SEQ ID NO: 19432 - DNA, 415 bp, Glycine max
aagagaatggttgggatttctgacatggatagtctcattaagaaaccgggcgttttatcagttcacataggcagtaaaatacctgtgtctgaatctacaaggcaggaatttttggatattgatagcattgcatatatgctgcgtaaggaaattgaattactagagagcatagatcttatccggtgtaaaagctgttacgtaatcattgtctaaccaaagccccacagtttttcactttttatttccttgtaataaatttataggcaatttttgattattcaattctgtttcaactttcatcaaatgcagaaaatactgatacttcctctttttttaccttaataattgcagactataattgtacaaataagtgattattttatcatgtcaagtcatggtcctcttaaagcatatt

SEQ ID NO: 19433 - DNA, 453 bp, Glycine max
  modified_base (398)..(398): a, c, g, t, unknown, or other
ggaagatcaacctaatgttacccctgattcttctatgactgttaattcggagtcagaccttgacaattgattgatattgtatcaggaaatgatcatggaattatttacatcgagggataaaatggagcagcagttattgcagatagcaaatactgtatatggcatgctgacaatgaaatagactctacatcgaatcgaagtatcaatcctaacttaaggattctaatttattaccattttcttttgctactctcatagagtgtagagtttagatattgtacagtgttaacaatcttatggggaagtgaaatccttttccaaccacaaatagaatgtcacccacagtgagcttcaaattgttgatattcttccctggccttttacaatacaattggttntaaggtatgtcactaggtcaatggtagggctgttattcagtgaccaattttctag

SEQ ID NO: 19434 - DNA, 350 bp, Glycine max
aaactttttgctttgcaaatggctgctgcaactgctgcaactgcttcgtggatgctattcaaaggcggcaaggaaaggaagctaaccaagatgaataaatccaggattaattgctcttattcttcttcttcttctgtgatagatccttacaagaccttaagaataaaacgaggtgcctctgaatctgaggttaggaaggctttcagacagctcgctctgcagtaccatccagatgtgtgcataaggagcaattgtggggtgcaatttcacgaaatcaacgaagcttatgatgttgtgatgtccaaattgagaggagaatcaaatgaagcagaatcgtatgaagcttatta

SEQ ID NO: 19435 - DNA, 347 bp, Glycine max
gcagaagggttcctcactctcttcatctgattgaacaaaatgtacacctcgaggaagaaaattcacaaggataaagatgccgagcccactgaatttgaggagacagttggacagtacttgttcgacttggagaacaccaatcaggatctgaaaagtgacttgaaagatctctacataaactaagctattcaaatggatgtggctggtaatcgcaaggctgatgtcatctatgtgcctttcagattgaggaaagcatttctgaagatgaatgttcgactggtcagagagttggagaagaagtttaatgggaaagaatgttgcttgattgccacaatgaggatcgtgcg

SEQ ID NO: 19436 - DNA, 138 bp, Glycine max
  modified_base (115)..(115): a, c, g, t, unknown, or other
gcacaaggggccctcactctctccatcggatcgaacacaacgtacaccacagcgcagaaagagcacaaggagagaggatgccgagcccactgaatcggaagagagagaaaagcantactggatccacgaggagaacac

SEQ ID NO: 19437 - DNA, 373 bp, Glycine max
cccacgcgtccggaagatgttgatcgagcagttgcagctgctcgcaaagccttcgaccgcggaccttggccaaagatgacagcctatgaaagacaaaggatattgctgcgcgctgctgatctgtttgaaaagcacaatgatgaccttgctgcactcgagacttgggataatgggaagccatatgaacagtctgctcaaatcgaaattccaatgctggttcgcctatttcgatactatgctggttgggcagataagattcatggtctcacagttccagctgatgggccatatcatgtgcaaacattgcatgaacccattggtgttgccggtcagatcattccgtggaacttccctcttgtcatgtttggctgga

SEQ ID NO: 19438 - DNA, 231 bp, Glycine max
gattcacctccctgatccctttctattttccgcagcttgccggatcgatctgtgagaggaattttgatattatttgggggtgactgaagtgggataggatttgaatggagagaggatgccagagttgagaagtgtggctagaaggtcgaaacggtgttgagatctattagttgtgtcatctgtctgttgatcaaggagagaattgggatctatttgctgctccgaatcgaa

SEQ ID NO: 19439 - DNA, 232 bp, Glycine max
atgaaacaacatatgtttccagtgacaagaatcgattcggttggcccaaacagctagaaagggaaccttctcctccgaataatgtggaccgtgttataagtgatataatggggggaaatttgataccatctgtgtattctgatccacaaaatggatatagtatgcagattaatttggcattactgcaaatgaatatgattacctatgaccaacatatgaacaggatagaacg

SEQ ID NO: 19440 - DNA, 375 bp, Glycine max
tctaaccacaaaaccttgctggtttcgcctgttataaacctgctggctgctagaaatgagagggagagtgtgcacatagctatccgaccaaaggtttgatagggtagctctagtgctgcagggactgtgcagattcagagtagtgacctatgtagcacatgtggagacatactggttgttgagcaatcactgctgttgcggcgggtgtagtacattttaggtgtacctgatgctcttattagcgtagatcatacaatgaagcatatgaacctattttctggggagactaccgctctcaggatattcattgactttccaagttctcaaccttcagggcaatatgaatgatagattgtcattatcgtgataaaatca

SEQ ID NO: 19441 - DNA, 456 bp, Glycine max
cacacacccatctactgcatccttgatctccacaattctagctacctatgacaaaaattgtagtcatgttggggaataggccccagccactgatcggaaaaatctccgaattattggtctccggcggtcgtgccgccgtgctttacgatgccctcggaagccctagacgcccgtttgacatgattaacttaaagatgcaatcaccaaacggcctaataagctattaccttgatggtgtccgtctacgaattgcgctggacctcgataaatcatcatccgaggaacaaggccatgtctgcacatcaaattcaaaccgatccgaaccaatcccagttactaaccaacgtgcgtttcaaaagggtgctaatgaaattcccgctggaagctccgaggattacacgtttgtgacataccatgtacctaacagcaataccatcactaacgcttattatgatg

SEQ ID NO: 19442 - DNA, 97 bp, Glycine max
  modified_base (1)..(1): a, c, g, t, unknown, or other
nccacgcgtccggtttccaatattgtgggtggtgatcccgaaccctgtgattctaaaacagatgtgggacattgtacttttggcactggtggatctg

SEQ ID NO: 19443 - DNA, 344 bp, Glycine max
tatcttctttacctatctttctctctcatctatgtcccaaaaactaactgataatttctacaaattaatgctccaataaacaccactcaatcatttccccacctatgaaaccactaattattaaacttactagaaaatagtctcaaatcgcataccaatatatctataaactgcagcaaacaacgattctacctattacccaattttcacactatataatacaccataacctatacacctgcactaatcctctaacttaaactcccaccgcattcacattcaaaaatcactcaaggttgttaaaatgtatgaaactgatgacacaagctctaatatatcatact

SEQ ID NO: 19444 - DNA, 434 bp, Glycine max
ctgatccttgtcctcttttatctgccgcaaaaaagaaaggactgcgtgagaaggataagttattctatgctgccatgtctggccttggggatcttttgtacgacaaagatgctgtatacataaatattaatgatcaccttgttcaattctcaaaagttgatgaaaactctgctatgacgagtaaaggaaagggtggagatattggggaggatttggtgaaatcgctacagaatatcaaatactcaattaatgaaaaactagagaacagctttatcaatatttttggtcaaaagacaaatgtgtcatcataagctctatgtgatgcacatggcacaaacaaggaaattgaaccaaatggcaaaacagaagcttttgataaatatcatcctgaggctgttataactggtgaagataataacaaaatggattttgat

SEQ ID NO: 19445 - DNA, 255 bp, Glycine max
acgcccacgcgtccggaacaatttaagcgccttcttggagtcaaaccaacgcctaagacggaactgagaagtacacctgctatatctcagccaaagtcattgaaatttgcacagaattttgatgcaaggacagcttggtctcagtgaagcactattggaagaattatggatcagggtaactgtggttcttgatgggcatttggcgctgttgaattattgtcgtgtcgcttttgcattcattttgatgtaaatatc

SEQ ID NO: 19446 - DNA, 431 bp, Glycine max
ggtgatcttatggatagtaaatgtggtattgatgaacatttcaatgaagagctaaagtatggttcatgattatgcatgtcactattgtattgtatatatgcacatgtgtctatgagcgtctcaatttagcttctctcccattgatgtctttcttagacaggtagaaaaataagcaggagagagttgaatgtgtaataatcaagcagaggtaatgactctcagttaattacctgtgtgtccttatgctttttctgtttatgcatgcttcgatatgtatggatattaagatattttcaggtggtatagattctaccatttttattttttttaaaaaaaaaaattgagcacccaaaacaaaattctattcaatctaataaaggttaaagtgatgcaaaagcaagattgggtcaagccttatgcatacctctata

SEQ ID NO: 19447 - DNA, 248 bp, Glycine max
caacacctttgccttgctgcagttcgcaactgcaactgcactcaaatataaatatatatacatatatatatatgtatatatatatgtattacttcatggtcacacataggtaagtttattaattactaggtagctggttttgaatagggtagttggtagttatagatgctgtccgggatatgggagaagcaggtttaggagattgctgttcctctgatttgacgattacgaggaagagcgattagcga

SEQ ID NO: 19448 - DNA, 460 bp, Glycine max
aaattccaaacacatgtttcggtgtgccgcctcattggaccagcccagagcctcacctaaccgacacccttctctcttttcctctcttctcttctattcctaaattgtacttctgttttgccagtgattgaagctagttagaacaagatgttgcagctactctacactgcgattttctccgaaatgcttttgattctcacgctcgtcttcaaaaccccactgataaaactcgtcatcgattccctcgatagtgtaaaacgcggtcgcggtcccgtggtcgtttccaccgtgggcgccacattgatggtggttctcgcttcgagcctctacagcatggccaagatccaacaacgcaccctcgatgccgtcatagtcaaccccaccgaccaaatccttatgtccaagcacatgctcaaagcttctctcatggggtttctgctgatcctctctctgatgattg

SEQ ID NO: 19449 - DNA, 467 bp, Glycine max
ataaaagaaacccaaaatctctctctctctctcgttcgctttccgtagcgatatatatcccaaaccctaccgttaggttccccaattcttcaacaccccgtggaccggtgctctgcttcttagtagttcgtacggtttttccgtcgattgcctccgaaacgatgtcgtatcgcccaagcgggaactccatgaccgaggtccgccggaaccggtacaaggtggcggtttactcggaggaaggtcgtagacggcgagaggacacgatggtggagatccgcatgaaccgcatagaatagagtttgcagaataagaggcgcaaagggctccaacctcagcagatgcctgcgtccgttcactctagattggttgagaagaagttggaacatctaccatcgatggttactggtgtttggactgatgataataacctgcagctcgaagcgacgacgcagtttcggaagctgctt

SEQ ID NO: 19450 - DNA, 461 bp, Glycine max
agcacttagtgctattcaataattacgaaaaaccaacagcgagtgttgggtttgtttggtccaggctggaccagggaatgaatagagatgagaggctttcggttgaagagaactgagttaagcggcgaagccaaacgcagaatcggcggcagaaattgccaccggaagcacgtcgaagacgggtgaaccaaacacaaaattccatccaccacttctcttttcaatccccaactcaaatctgtgaagaaaatctcaatttctaaattgtaattcttagcactactgctagtagtagtaaaaaaaaacaattagaaagtagtagagtgtttttttttctttttttcgtttgttttacttttaagatgggtgagaagagcaacgttggcggcgacgcgattaacacgacactgcttcacgggaagtacgagctgggccggctgttaagccacggaaccttcgcg

SEQ ID NO: 19451 - DNA, 155 bp, Glycine max
acgcgatctttggaggagcaggttcatggtgattaccttcaccatgcgcttaagcatgggtcttcatgctcccctggtgttctaggaaccaatcatgccgatcataatagtgggaggtcaaccactaaaatctgtagagcctgatagtcattaaa

SEQ ID NO: 19452 - DNA, 448 bp, Glycine max
atgaaaccaaaaaccaaattcaacaccgcccttttaatacttttctgttttcagagccccagcctcacacaagttcaattttttgtcacccttttctgattatatccttgtcctcttctccgagcaataaaaaaaccttcttctttctctttactgcgtgctcctctgcgtgaaactgggacacccctttagccctctttcgctctttgcctgccaaaggctttaactttgtcactttagctccgtacaatatgtgccccatgtcacttctttggtctaattcctcaaattgagcaactgggtcgtgcttacttggtttttgttgatggctgagaacgtttgacttgtgtttcccacaagtttgattcttttggttttgttctttttccctttttaatccttcggtttataggtgtattagttcagtttttctgcttggtataccctg

SEQ ID NO: 19453 - DNA, 350 bp, Glycine max
cccacgcgtccgtggagaggatatagacaagtacttgggtctcaaggaaggaaaatcatccaaaaagtttagaagaagatgagatcatatcactgccaatgagtgaattaatgcgacggctaaatgaatcatatgaagccatgaaaaattgaggatagacttagatgtcaagtatattagtgcgttggagcacaattttgagcaaatctttgcattgatttaacaaaaattgtatacgtatggactgactatgcaatgcagttattaggatatttgaatgaatcaaattgagcaactgggtcgtgcttacttggtttttgttgatggctgagaacgtttgacttgtgttt

SEQ ID NO: 19454 - DNA, 147 bp, Glycine max
gtatgtcggaaaagcccagcaaaaatccgagcgtgaacaagaactgaaaggaccatctgagcacaacagaaaggaagctgctgacgaatatacaagtgagaacttgtatctcacgaactgggatgatacaatcagtaatgaacaact

SEQ ID NO: 19455 - DNA, 205 bp, Glycine max
gcttcagcggctatgcctagctaactcttccgaccttatttcacattatattccccgccttctctcgcatgtacttcaagtaaggcttctctgatcttatctgtggccactgattctcactatactcacacggtccgatttctacatactgcgaacctctgtgcacctgtgtggtacacgaggtgagccatacttgactctttga

SEQ ID NO: 19456 - DNA, 356 bp, Glycine max
aataccctaccgacccacctactccaccctcctttttaaaatccaatatccttatatccttcgtactacttaggtaattttctaaaaatatttaacccataaaataccattcttcaacatcattgaccttccataaatttaattcgatcaaaacatagtcatgtatcctgcaataccactactgaatgcccaaaacccccacttacaaattaaaaaacctcattttccaaaaaaccctttttgccatatagacgtttaaaaagtttaacgatgactacgataatcttaccaacttcatcaaaacttactttatcatactctttaatatagacaattatccctattcttactgaact

SEQ ID NO: 19457 - DNA, 289 bp, Glycine max
cggacgcgtgggcggacgcgtgggcggcaacgcccatcaaaatttagtggatcagactactctactgatgaatgagatagtctagttcagaaaagaaatcatggaatgcatagcaaacgccatcgacaatcagaatctagtgaatctgacttgtcaagtgatgacgctccccatattgaaggccacagaaagcaccataaacatcacatgcgatcgcataatgtggagctgaggttgactgattctgattatcgcagtcatggtcaaagaagcagatcaaagtcaatgg

SEQ ID NO: 19458 - DNA, 419 bp, Glycine max
catcaactttacctagctttaaaaaacaacttcaactacacacctattggaatctttatacacctatgtatacatatatatatatatattacttcatctccacacatattcaattccattaatatctaataaacataactacaataagaaactacttatatttagaaatattacctactataataaatactaatttaccagatccctcctcctactattcgaccataacaactaacatctattaacgaactcaataactccaacccctctacaatccattcacaggactaactataatcaaatcacacacttaatctacttatattacaaaaccccataatcttctatcaatatccaaattcttatctcatcacactaccatctcacacacatataccaacttcaatatccaccatcta

SEQ ID NO: 19459 - DNA, 465 bp, Glycine max
cccacgcgtccgcccactcttccgcttcctcttcctcttcctctgtgaagagggtttctggcttttttaacaacaatttcgaatcgattcgattgggtctctcaaagttttgattgcacagtttgcgaagatgcctcgtcccaaaagaaaagctgccccaccaatcacttcctctgatgttgattcttctcttcgcaccgaaccaaagaaatcaactataaagcaatttgatcgaatagataacttatttgagtcatatgcaaataagtcattgggattaattgacccatacgggattgaagcactttgtaaagatgtgcatgtggaccacacagatgttagaatgctcatacttgcttggaaattgacagctgacaaacaaggttatttttccaaggatgactggcgaacagggctcaaatgtttaggggctgacactctaccaaaattaacaaaggctattaa

SEQ ID NO: 19460 - DNA, 417 bp, Glycine max
cccacgcgtccgcccactcttacgcgtactcatgatctaaccttcagagcaatgtttctactgaacagggctattatgttttttgcaacaagtcacacactattgccaacatatcaccacaaaatattcaatcacttcaacttcataaacgtgaattgagcaaataccgatcaatcatctcctggaactatttacatgacggaacaatttgtctatccaagcaagtgctttaaagcatatacaaggaaaataaccaaatgacaatgaacgtcatacattatgacttgcttacactctacaagaacttcaaatctaattacaagttaactccaacggaaatggcaacctaatacttatggcaatttaaatccagaaacaacatgaccacatttcttacgcttatacctttttacaact

SEQ ID NO: 19461 - DNA, 162 bp, Glycine max
acgctcacgattcatcatacgcgtgaatgacctcgtggctcgacgcacccgttatgtacctagtctggggtgaacctcgctgccatgctgcatgtccgaagctcgctatgaggattattgttaaagctatgtgcctatatatggaactcgatacagacgcat

SEQ ID NO: 19462 - DNA, 245 bp, Glycine max
cggacgcgtgggcggctccgttaggttttccttccgcgtgtttgctcggaactactcctccactcatcgtttaaaatgtctgacgtggaagagtttcgatgctgcattggtggccttgcatggtcaacgtctgatagaaagttaaaggatacatttgaaaaggtttgcaagcttattgaggcagaggtggttgttgacaagttctctgggcgttctcgtggttttggatttgtcacatttgatga

SEQ ID NO: 19463 - DNA, 358 bp, Glycine max
cagggaagagaaaggactagagacagaggaagcatatccctacacaggaaaagatggtgtctgcaaattctcagctgaaaatgttgctgttcaagtcctggactctgtgaatatcaccttgggtgctgaagatgaactaaaacatgcagttgcatttgttcagccagttagtgttgcctttcaggtggtgaatgggttccatttctacgagaatgtagttttcactagtgacacttgtgttagcacttcccatgatgtgaaccatgccgtgctagctgttggatatggagttgaaaatggtgtcccatattggctcatataatattcattgcgagaaagctggggtgaaaatggctac

SEQ ID NO: 19464 - DNA, 430 bp, Glycine max
aaggaccttattgcgaatgcacagggtttcacgcctgtgatgtttgatgacaagatccatgatgaaaacaattcactctacaatacccctccttgttatgggatttacatgtgtgggttggtgtttgaggacttgttgtagcaaggtgggttgatggaggttgagaggaagaatcacaagaaagctgatattctctacagtgcaattgatggcagcaaagggttctataaatgccctgttgagaagtctgtgagatctttgatgaatgtgcctttcactctggagaaatcagagctggagggtgagtttatcaaggaggctgctaaagataaaatggtgcagcttatgggacatagatcagtgtgaggtatgacggcttctatttacaatgccatgcccttggctggtgttgagaagttggtggctttca

SEQ ID NO: 19465 - DNA, 408 bp, Glycine max
ggcatttgagggttgaagccatattccccagttaccacacctttgcctgctgtaggtggagacacacagttatactcccctcagcaatttccatacactgggccaccttattatcatcagctggttcctcctagcttaccatatcttaattcacctactccagtttcacagccagagctcaccagcctggtaggtattgaccaacaagttgataacatgttttttggaccaagagcgggctatccgtcagtgggatcttttggtagaggcaactttcctgtagcacctggttcctttggctttcatgaatcccaacaaggatttgaaggatcaagatctggtggaatctggtcagactgctcaaaaccatctgaaagacagagatctttgatgcctctatcgccatct

SEQ ID NO: 19466 - DNA, 349 bp, Glycine max
gggtttttggctacggttcactggtgtggaaccctggattcgattacaatgagaagattataggtttcattaaggactacagacgcgtgtttgatttagcgtgcattgatcaccggggaacacctgaaaacccagcaagaacttgcacgttggaggagaaggaaggggctatttgctggggagctgcttattgtgttcgaggaggccctgaaaaggataaactggctatgcagtatttggagcgacgggaatgtgaatatgacagatagactcttggaaacttcttcaaggaaagagattcactgcaccctactttaactgatgtaatagtattcacatctactccaga

SEQ ID NO: 19467 - DNA, 326 bp, Glycine max
aacaacttctgctacttcctactccaaccgcacttctgctccgcaattatcatgggcaaggtcaagatcggaatcaacggatttggaagaattggccgtttggtagccagagtggctctgcagagagacgatgttgaactcgttgccgttaacgaccctttcatcaccaccgattacatgacatacatgtttaaatacgacagtgttcatggacactggaagcatcacgatgtcaccgtttaggacgagaagacccttctcttctgggacaagccagtcactatttttggacacagaaacccttgagaagatccatgggggtcaac

SEQ ID NO: 19468 - DNA, 326 bp, Glycine max
cccacgcgtccggccacgcgtccggtctggggcttcaatgacctgtgctggttgccagggtactggcatgaaggtgtctattaggcaccttggtccttctatgatgcagcagatgcagcatccttgcaatgagtgtaagggtactggagagacaatcaatgactgagacaggtgccaactgtgcaaaggagagaaagttgttcaggagaagaaagtacgagaagttgttgtggagaagggaatgcagaatggacagagtgatacattgcctggtgaagctgatgaagcagtatgttgagctttgataccaacaccgtgctggatta

SEQ ID NO: 19469 - DNA, 321 bp, Glycine max
cccacgcgtccgtttgtcctttacagtgggaaccatgagcgagattggcctggaacaggatccttttatgagaacatggattctgggggagaatgtggtgtgttggcacagactatgttctacacccctgcttctaacagggctaagctttggtatggcgacatgacttcatacatttcttcaaattataatcaataaattagctaattgttagatttttcccgtttagaaaggttatcttcttttgggattaatgatttgagcatgaagaaagtgaatcaccaagaattacaaatgccattcaataaagaagtaataatc

SEQ ID NO: 19470 - DNA, 153 bp, Glycine max
cgggtcggcccagacctacgcgcacgcgtacgcgcacgccgacaggttggagcttcaaaaactgccgcctagaggtcggacatctggtttaaagggagctctgctttgccggaaatcgtgaatggagtaactaatgcaccttgctatctaaga

SEQ ID NO: 19471 - DNA, 343 bp, Glycine max
ctccatattaccaactcaactattggcattgaactgaagacaactaatggtagaggtggttatatgaataacatcttcatttctgacgcaaaattggttgatatttacttgggtatcagcatgacgggaagctctgtctcccatccagatgacaagtactatcctaatgcagtgccggatgttgggaatgttacttttgagaatgttgattggttcaaatattgctattgctgcgaagttttcacgaataattgaatcgccgattactactatctgtcttttgaacgcgacctttttcttgcagatctgagtcatcatctacttcatggtcttgttctgacat

SEQ ID NO: 19472 - DNA, 460 bp, Glycine max
ggattttcagttcctcacaggcacttcttgtgaagccagtgaagaggcggatgatggggaagagcaagggattgagaattgcatgccaagccaccagcatttccgctgatagagtccctgacatgggcaaaagacagctcatgaatcttcttcttcttggtgccatttcactccccactgctggaatgcttattccctacacctacttctttgtccctccaggttcaggttcttcagctggcggtactgttgccaaggatgccgttggaaatgatgtaattgccgagaattggctcaaggcacatggacctggtgaccgaacccttacacaaggattgaagggagatcctacctatcttgttgtggagaaagacagaacccttgcaacatttgcaattaatgccgtgtgcactcatcttggatgtgtcgtgccatggaatcaagcggagaacaagttcat

SEQ ID NO: 19473 - DNA, 229 bp, Glycine max
cccacgcgtccgggatggtttgcgaacaaaagataaagagcgtatacttgttcttgcggctacaaatagaccttttgatcttgatgaggctgttattaggagacttccactaagattgatggttaatttgcccgatgctccaaacagagaaaaaatggttagggtaatttaagcaaatgaggaattgccacctgatgttgatttcgaaccattagcaattttgactgat

SEQ ID NO: 19474 - DNA, 468 bp, Glycine max
agcaaattttccctcatttattctcctctcctcacaaatcacttcccttgttcaataccaaatcaaattattccttctcaatcgattctcttcggccatgtttgcttacagggttttgtcccgttcctctgccaccctttctcgaagcttcacccttttctctgtttcacgaaattcccaacctttctccaccaacctctccaataacttcaattccctccttcacccatctcccaacaagctgattccagttcaaaccaattttctgaattcaatgaatccatcattgacttcgagatttggattttcttcaacggcctcacatgaacatgcaagtgaaggagcaaaggtatctgatcagtctgaacaagccgaagctgcggatcaaaccaaagaatcagatgtagagattgaatgtgatctgtccagggatgatttgataaagcttgttgctgagaaggaacaact

SEQ ID NO: 19475 - DNA, 384 bp, Glycine max
tcttacgtccacgcgtacgcttctttaaaaattgtacaatccttgattctgcttcgggactactttaagagtttacgagaagtatcaaacccataaaagacttttcttcaacatcattgaccttcttttaatataattccttcaaaacgtcattgtctttcctacaataccactacatactgcccatagtccccctttataaagtaaaaaagctcattgactaataagcgctttttatcatatcaaagtttaaaaagtttatcgatgacgacgataaccttcacaagttcatcactacttacgttctcagactcttgaatatcgacattatcgctgatctcactgaacttgaactccaataacaattttctctctctctcatta

SEQ ID NO: 19476 - DNA, 399 bp, Glycine max
acgtgatccagtgaggcgcatttcaaccaatcatggtgttttttccgaccaaaagagaaggcaatgaataaattaatgaactcaaactaaaacaccaaggaaaaaaaaacacagaatataaaacacaaaacacaaacaaagagagagaaagaacaaagactgttttgtttctctaagttgttgttgcagttagcttcccgagcaccgtgtggtcgagtattgtattgtattgagagagtgatttgtaggttctttctgatcactgtggtgcgtacattgaagaggaaacatcaaacatgggttggattccctgttctggatattctggcactaagaacaaggttgagaagatggaaggtcaggatagtatcgttggtcagatcaaagccaccccaagaa

SEQ ID NO: 19477 - DNA, 157 bp, Glycine max
gatgctgaaacatctgaccatagggacgcctggaccgcttatgtcccgagctattaggagccttatgttaaagtgccgagggtcttaagcctggactaaaggtcaaattgcttagatgagctatatggtataatgaaaaatatattcagactatgat

SEQ ID NO: 19478 - DNA, 447 bp, Glycine max
cttagcttagccttctcctattctggacctctgtcccttcctcttgattagggttctaattatgttatgaaccttccatgcttttatttttcttttaaaaaaagaataaagaaaaccctacatatgggtttgtggggtatattcagtcttcaatatcatggctctctttgtattcttccacagctttcttgaactgcatccaaagagttcctttgcatgcatgccatggcactcttactcccaaatcttgttttgcggctcaataaagctgtgggaagatacagatagggtcaacaacggactagcttatcttatactccagaatcttctctaaatcttcctatccaattatatatagggattaaattattgcaaaagattttttttcctttttcttttgggatttgacttaagtttaatcattttcagatttaaaccatcgacttt

SEQ ID NO: 19479 - DNA, 369 bp, Glycine max
cccacgcgtccgtgaaatctgggggcaggcaggattcttttgaagatgaaccatctcaaaatggcagtttggcatatactgctcaaaatgggggactaaatacacctcatacagtagtcaatcaaactatgtctatcatacctatctctgcaggtggtgctcctggagctgttcctggtcccacgacaaacttaaatataggaatggattattggggtacaccagcttcatccaacattcctgcacttggcagaaaggttccatctactgcagttgctggagggatggttaccgttggatctcgggatagggctaagtcacaactttggctacaggatgaaagagagcttaaaaggcaaaggcggaagc

SEQ ID NO: 19480 - DNA, 155 bp, Glycine max
gggcggtatactttctgcgcttcttggcggctacgcggtggcggcggcgtcttcgccggagagatctacttctagagtctgctcctttcactcgatgagaggctggcagctctacttcaacgagatcaaagataccgtgaagctcgtatatccct

SEQ ID NO: 19481 - DNA, 245 bp, Glycine max
tcaagacacactttgctagaccaaattggcgcagtgttttcaaacacactgcactcaaacaccctgggaaaagagttggtgttttctactgtggtgctgtctcattggttggagaacttacgaggctttctcttgactttttccaggaaaaccaacatgtagttggattttcattattagtattatgaaattcttgtatcatagtttgtatttatgtttccaactgtaacgtatgtatttgaggg

SEQ ID NO: 19482 - DNA, 463 bp, Glycine max
gttcttgccaaacttgaagatggtaaactgtcgggtcctttccacagaagatatacttatggggagtcttatctcataaatatggattctgaaagcatcagcttgccagagaagattcggttagtcttgtttagcctatgtgatctactgatgacaacagttactcacatttcttcttatcatgttaaacaacaagcagaatttctgtggcagaaagtagggaatgatttgaatgtaatgactcttcaatggttaaaacaaaaatcagaattcagccagaaccaaaacctggacattttggaactggggaacatgaaagataactattcagttaatcagttattatgggatcgctgtgcggatcccaaattgatatctgattgctttgcacaggaaaaactcaattggccaaatgatttggatcagatgaatactaaaggatggaatgatttgtctataatta

SEQ ID NO: 19483 - DNA, 347 bp, Glycine max
cccacgcgtccgtcacattcatccacttttcttcaaagtcttcatctcatatcctctttggtgtgtcctcacacgagtgtaggaacggcattattgtgatggagagccaggatctttcttcgccaccccacgtggacgcatctcgaccgtcccttgggttcacccttgggcactgcccttctcttgatcatcatcttcaccttgagtggcgtcctctctggctgctaccattgcgatagggtgtgttcccttccggaaactttcttctgattcgaatcccaaaaggctttcttaaccaacaaattttaacacttccagggatttgagccaaaccggggacaaagctt

SEQ ID NO: 19484 - DNA, 242 bp, Glycine max
ctcgctttcgggctccccatgttctgtcagatagcgggtgtcgggttcgaccttgtcgtaatgggcgtgtgggacccagattcgtggaaagcgtcgaattcggtttgtatatacaacttcctgtcggccaaatggcgccgtggggccgacatgccaggagggccccgaacagttttcggctgcgcgtcggatcagaatcgcacggtttacagatgaggcggacacgacgaggggaatgacgc

SEQ ID NO: 19485 - DNA, 447 bp, Glycine max
  modified_base (412)..(412): a, c, g, t, unknown, or other
cccacgcgtccgctctctctcaccaaagccttcctagaacgaaaaaaaaaagaagagcaattttccctcaccaaagaagaagaagcaaacaatggccgatcaacttaccgatgaacagatctccgagttcaaggaagccttcagcttgttcgacaaggacggcgatggttgcatgacaaccaaggagcttggaactgttatgcgttcattggggcaaaacccaactgaggcagagctccaggacatgatcaatgaagtggatgctgatgggaatggtaccattgacttccctgagttcctaaatctcatggccaggaagatgaaggacactgattctgaagaggagctgaaagaggcattccgggttttcgacaaggaccagaatgggttcatctctgctgctgagctccgncatgtgatgaccaacctcggggagaagctcaccga

SEQ ID NO: 19486 - DNA, 247 bp, Glycine max
cccacgcgtccgaggttgaccagctgttgaacaaccctttctttggcgcggtatagggcatatgaacgaagcttatcagatatttccccatctcatggatgccaatggaaactcaattaaagccaaagcaaagttaagtgcgctagttgagaggtatttattttccctccaagtattacaatactaactaactgtatgtatactcttgctagctatcattttcgccattcgatactgtttcatggac

SEQ ID NO: 19487 - DNA, 205 bp, Glycine max
acgggaacattgctttccttggttctggaatttagctggtgaagtatatagtttctgttgtggcagcaatttatatgcctcacgtgaatataaactttgagacgttggttactcgtaccggctcatacaatttttgcaatgagcttgatttaccagggttgaatgggatgtatcagtatcggcgtttgggaaggacgagatatgc

SEQ ID NO: 19488 - DNA, 447 bp, Glycine max
atggcctcagccgcatcctccaccactttctctctcctcatactccacgcacacctacgggtccccctccccctcgcgcgtgcaactcacctcctccctccgcgcccgcccgctgcgccgactgggcttcgccgcggcggacccgctgctcgcgacgagtgtagcgtcgcgcgtggcagctgcgagaggaggaagaaagggcgcgaggggaatagcgtcgatggcgaagaagagcatgctatacctgatcgcggacgacctgaatgcgaagaaggacttcgtcaggaccgacctcaacgtcccgctcgacgacaaccagaacatcaccgacgacaccagaatccgcgccgccattcccaccatcaaacatctcatccaaaacggcgccaaagtcattctctccagccactagaagcggccgaagggtgtcactcccaaatacagctt

SEQ ID NO: 19489 - DNA, 346 bp, Glycine max
acggtggcttgccaactaattttgattctacttactgctatgcattgggttatggtgctgcagccctccttcaaagtgggtagactggattaatatcatcgattgagaatttatgggctcctgttgaagaatggactgttggtggaactgcactcactggattgatggacgcgtagaggagacatggtctattcaagcctgtgatcaagatggcaatggtagagcttgaacgggcaccctttcaaaagggtgcctacttgagggatgagtgggccctaaaaaattgctacattagtccaggtccaattcaatacactggtccaagatcttgtgcagttaatcacac

SEQ ID NO: 19490 - DNA, 471 bp, Glycine max
attctttaggttgtgctgatgctttgagcatccataatttgcaaacaagcggttctatggtatcaaatcatgttatcaaccctggtagcaccttgaagtcatcacaaagtatatgtctgccacatgcagttgctgatactaagttagtttctagaactgaagagcattcacattatagtacaaaaggtgggaataatggcatcctatctggcactgctacttcaaattctaaaaatgacctgaaaacatctgttctaaaagtttctggtcaacttataggatcaaggttgtctaaaccctttccatcagctgttgggagttatattactggaaaatacagtgataagggtctttttccatatgatttgattgtcaagctttataattggaacagagaggagttggaaccatttggccttataaactgcggaaacagctgttatgctaatgctgtactccagtgcttggcat

SEQ ID NO: 19491 - DNA, 168 bp, Glycine max
tgcaaggggaggactgaagtttactgattgcaaaacatgggattgaagggtctactattttaggcttgtaagttatattaacttgttaactgccagcacaaattgaagctaggtaggaatactattggaatgcacaatctgattactatctttatggatcaattttgt

SEQ ID NO: 19492 - DNA, 238 bp, Glycine max
acgaccatggcggctgcgtttacaagtacaagtgcaacactgagactgtcaaatgttggagagagcagaggtttgcagctgcgtaagtgtaaccctaatcctaataagctgaaggttatgggggggtttggaggttgttctggagtggcagtgggcgtgagagaaagaaaaggaattggataggttatggttcgggttcgggcgagttcttcgtcggacgaagcagtgagtgcgcagt

SEQ ID NO: 19493 - DNA, 344 bp, Glycine max
aaacagaggctacgtacgatcaaattaattaagatggcggaagtgaggaacaaacaagtggttctgagggactatgtgagtggttttcctaaggaatccgacatgaacatagttgaaggaaccacaatattgaagcttccacaaggttccaatgatgtgcttctaaaaaatctctacctttcctgtgacccttacatgagaatgctcatgaccaatgtggaaggcctcgacgtgtttggcacctatacacctggctctccattaacagggtatggagtgtccacagtcctagaatctggacacccagattacaggaaaggggatttagtgtggggatctacaaa

SEQ ID NO: 19494 - DNA, 256 bp, Glycine max
acgcccacgcgttcggtttcgaatagattatgctaagtctttgggaatagtgctgcaatggcttgcagtcaggaggaggtgacccttttgggagctactggaagcgcgtttgtgtgcagggttcatattgccctcaagttgaagggagttcaatacaaatatgtcggagaaaatttgaggatcaagagtgaactgcttctcaaatccaacccagttgacaatgaggttccagtgcttattcacaatgagaagccca

SEQ ID NO: 19495 - DNA, 385 bp, Glycine max
cttggatcttaccctcttgtttgctaatattctcattcttctgtctctgcttcttctccttgtaagttgtctcgctcgctctctccgcctgctactgctacttgtggactgtaagagctgaactaagagatggggttgtctttcaccaagctttttagccggctctatgctaggaaagagatgcgtattctcatggtaggtcttgatgctgctggtaagactaccatcttgtacatgctcaagctgtgagaaattgtcacaaccattcgcacaattggattcaatgtggagactgtggaatataagaatattagctgtactgtatgggatgtggatggccaagataagatccgatgcttatggggacactacttgcaaaacactc

SEQ ID NO: 19496 - DNA, 456 bp, Glycine max
atcttattttaacatgttatactgggatttggaaccagattccctaaaagcttctaacaatgagagtatgggtggatcctttcaatataattttaatgatagtcttaatcttcaggagcgtcaatctctgtcaaaaattaagggaaacaattctagtcttgactgttttgcaaacaatattccacattccaagtcgaaagcatctcctaaatcattttcacaaactacagtacttgatggcctccaacatgttcttagtcaggctgagaatgatttcctatacatggttgaacaagaaatggaagaacgtccagatttagtttcgattggatcttgtgttttacttgtgcttcttcatgggaatgatttgtacacacttaatctaggcgacagtagagcagtggtggcaacatgcatcacagataacagtttgaatgcgaatgagagattgaaggc

SEQ ID NO: 19497 - DNA, 425 bp, Glycine max
cttgatcggatgggagcagatccatggaaagtgttaaatcaggctagatctaagcttcggcatcataatgctgccatacaagttccaataggattggaagatgattgtaagggactagttgatcttgtgcagttaaaggccttctatttccatggttcaaatggtgaaaatgttgtcactgaagaagtgcctgcagatatggaagccttggttgcagagaaaagacgtgaactcatagaaaccgtgttagacgatgacgatgaacttgctgaagcttttcttggtgatgagaccatatcagctgctgatcttgaggaagcagtttgtagggctaccatagcccagaaatttatatcaggattcatgggtagagctttcaaaaataagggggttcagccacttttggatggtgtaattagttattt

SEQ ID NO: 19498 - DNA, 156 bp, Glycine max
attttgctttcgcttgttatttggttatttgttttcatatacaaccaaaatttaagctagcgaaatgaagacgagctacgtttattctgtgtctgatactattatgtgcagggcttatcgtgccgccgttgacccactgactctgtccctggggct

SEQ ID NO: 19499 - DNA, 459 bp, Glycine max
ttccactttccgggttttttattcgatatttcttgttccaatgatcgagcacttttttgggttccttgaccgtctcgcgcgccctgtccccgatgatccccttgctcacactgctcatttgccttccgaaccatctccacctccggcctccatggattccgacgcctcctacagctccttcacctcaccatccaatgattgctactactacgtcctcgactaagacgatccgctgatccatatagcatactgcctcatctgccactattaggatatcatttccaactttcataccccctgctcctttaactacattcttaactatgcttacaaaaagtgtgtccagcattgctgtcatgataaatgagacatatcttgtcatatatttcatcatccatatcaaccttcatatactgccctcccacctcattctaatcccttataaactaccattgatat

SEQ ID NO: 19500 - DNA, 325 bp, Glycine max
cccacgcgtccgattttctctctcacttttcaagaatcgtaagctatgggaaagtcttacccaactgtgagtgctgattaccagaaggccgttgagaaggcgatgaagaagctcagaggcttcatcgctgagaagagatgcgctcctctaatgctccgtttggcatgggactctgcttgaacctttgacaagggcacgaagaccggtggacccttcgagaccatcaagcaccctgccgaactggctcacagcgctgtcgacggtcttgacatcggtgttaggcttttggagccactcaaggcggagttccctattttgagctacg

SEQ ID NO: 19501 - DNA, 239 bp, Glycine max
acgcgagggtgcacgttggcatcatcaagctataaaagaaaagaaaagaaaaaaagaaggttggagttagatacacacacatcacaaaatgattaaaaatctaatgaatctacattgattctcgttggagacatcaaacatggcatctggtgccaccccagatggataattctggtaaaggtatgaaaggtgcatatcctgctacgataactgtgtctagctacgaccttaccaccgta

SEQ ID NO: 19502 - DNA, 392 bp, Glycine max
cccacgcgtccgggaaatgaagtctttttttttagcacagttaacagacgaggctggggcatctgaagtcattgagactgtgaagctgctagttaaagatgctaaattgccggacattgaggtggtgcggatcttgtgggatgttttaatggatgctgttcagtggtctggaaaaaatcagcaacagaatgccaatgcagcccttcgtcaggtaaaaacttgggcagaattgttgaatacattctgcaccactgggaaacttgagctggaactgatgtacaaagtacagatgcaatgctatgaggatgctaaactgatgaagctgttccctgagattgttagatctctttatgaccaggatgtgctggctgaagataccattcttcattggt

SEQ ID NO: 19503 - DNA, 400 bp, Glycine max
ctttgcttccccttagtcaaactttagttcacaccatccatcctctctctcttgtcttcttctgttctctagtggcctgctcttgtttcttagaatccgtacggtctaatcaacacaacaaaatggatgcaattagttgcctggatgagagcaccaccaccgagtcactctccataagtcaggcgaagccttcttcgacgattatgtcgtccgagaaggcttctccttccccgccgccgccgaacaggctgtgccgcgtcggtagcggtgctagcgcagtcgtggattccgacggcggcggcgggggtggcagcaccgaggtggagtcgcggaagctcccctcgtccaagtataagggcgtcgtgccccaacccaacggccgctggggctcgcaaattta

SEQ ID NO: 19504 - DNA, 388 bp, Glycine max
cccacgcgtccgcccacgcgtcttctctttctccccacgctataaaatccccccactccttcttgcttcacacagcatatctttctcttgttccttctccttgtgatcttcttcaaccttcagagtgagaaaacacattcagaaaccacgtttctctcttcttcttcttcttcttctttttcttctctcgaggtcattattaagtattcaccatggaggcaccatctcccaccaaacccaacgacccaacaaaaccttccaacacttccaccacccttagtctggaggccggcccggcccaagcgagcccactccgaaaaatgtttgccgtggcgtccatcgtcgccggcatacagttcgggtgggctcttcagctctttttttaacc

SEQ ID NO: 19505 - DNA, 415 bp, Glycine max
  modified_base (385)..(385): a, c, g, t, unknown, or other
cccacgcgtccgaactacatggtctcttgaaaacgacccgtttcctccctcgcacggatccacccgaaatctgagattccttcgaattgttaactctctttcagtttcaagttggaaactttttcgattttcgctttctggaggtgtgaattgttgtttgaaagtcacaagcaatggtgaaggacactgcgtattatgacatattaggtgtcaattatgatgcatctgctgcagagatcaagaaagcttattatgtcaaggctagaattgttcaccccgataaaaatcctgaggatcctaaggccgcagaaaactttcagaaacttggtgaggcttaccaggttttaagtgatcctgggaagcgtgcggcatatgatgagcatgngaaggagggagtaccacaagattccatgat

SEQ ID NO: 19506 - DNA, 414 bp, Glycine max
atttaactggtttcatgcttattgatgttgctgtggaactggaagatgacctattttttgcagacttgagcaagcaaatttctcaactaattatggatgaagatgaagacccccttcctacttgtcctcctgattctcttcagacttttcctggatcaatctatcctcctccacagtctggtttcctctacgagcaggctttgataagacaaagcaaagggacaggggtgtttatcccccaatctacacagcctagaaggaagcacaggaaaggaagatcaagctcaaacgctaagtatcaaaagcagactcaagatacaaaaacggtttctcaagttcctataacaagttctttcaaacccaaaaatggttgaagatatatatattttcccacaaattaaactgcataagttc

SEQ ID NO: 19507 - DNA, 397 bp, Glycine max
ctcgcctataaaatgtccgccactgtttcactctgcgccacttccagaacaactttggcatcatcgaagcccgtcgcgagaagaagctgcttcgtcgcggttcccaaaatcgcgtttcccaagctccgtttcaaacccgtcgctatggctacgctcggcgctcgcatggtggccgccgcacccaccgtcactccgccggcctcgctcgacttcgaaacctccgttttcaagaaggagaagattaacctcgctggacacgacgagtacatcgtgaaaggagggagggatttgttccctctggtgcagggtgctttcaaggggattaagcagattggcgtcattggatggggttcggagggacctgctcaggcacagaatttgcgggactcgcttgctg

SEQ ID NO: 19508 - DNA, 422 bp, Glycine max
  modified_base (351)..(351): a, c, g, t, unknown, or other
  modified_base (391)..(391): a, c, g, t, unknown, or other
cgaacagctagccatggcttctcactctcatagttgcatcattttggctttgttcattgctatttccttctcaagcatggacatggcattagcaacacgccatctctcacctttcccaccactgccacctttgccagcaaccccaccattattgccaccattgccacctgtgccaacagtcccaatcccaattacactgccacctttgccaccaactccaccattgccaccaactccacctttgcctaggattacaacctagctcctgagcacttgcagttggatacatacataacatataataagtaaacaaataaaagcactaatctcttctctccatttcgattcagntctgctttcctgcatgcatgccgtttcctgctttcaatangtgatatatacatatacacacacatatgctg

SEQ ID NO: 19509 - DNA, 414 bp, Glycine max
ggccatataatttttttttatttgaattaatgtccgggatcatccacaagattgaggagaccctccatgtgggagggcgcaagaaagaggagcacaaaggagaacaccatggtgagcacaaaggtgaacacaaaggagaacaccatggtgagcacaaaggtgaacacaaaggagaacaacaccatggggagcacaaggagggacttgtggataagatcaaggacaagatccatggtgatggccatgacaagggtgagaaaaagaagaagaaggacaagaagaagaaggagcatggacatgaccatcatggtcatagcagcagcagtgacagtgattagatcttatatgttaagcaggtgtacggtacgatggtagtgaggagccagaatccctcttcctgctttatgatataat

SEQ ID NO: 19510 - DNA, 386 bp, Glycine max
agaacacaaaaccatggtgtcaccattttctctcttagtaactttaatcctcttatgatcagtttcattggcagctgcagcttcacttgaagaaaactttgtccaatgtctcagcttctattcagacaaagcagctccattttatgcatcaatttacactccacaaaatgcatcattcaacaagatccttgaatcctctgcacagaacctaaggtatttggtgccttcagcgccaaaacctgagcttatattcacacccttgactgattcccatgtccaagtggcagtgacttgctcaaagaagcttggtattcatctgagaattcggagtggtggccatgactatgaaagactctcatatgtttctgaagttgagtccccctttt

SEQ ID NO: 19511 - DNA, 411 bp, Glycine max
  modified_base (378)..(378): a, c, g, t, unknown, or other
  modified_base (402)..(402): a, c, g, t, unknown, or other
ctcgcctataaaatgtccgccactgtttcactctgcgccacttccagaacaactttctcatcatcgaagcccgtcgcgagaagaagctgcttcgtcgcggttcccaaaatcgcgtttcccaagctccgtttcaaacccgtcgctatggctacgctcggcgctcgcatggtggccgccgcacccaccgtcactccgccggcctcgctcgacttcgaaacctccgttttcaagaaggagaagattaacctcgctggacacgacgagtacatcgtgaaaggagggagggatttgttccctctgttgcagggtgctttcaaggggattaagcagattggcgtcattggatggggttcgcagggacctgctcaggcacagaanttgcgggactcgcttgctgatgcnaagtctgat

SEQ ID NO: 19512 - DNA, 261 bp, Glycine max
atccagttgtggcataaattgcatattatatatggtccctggtgactaccaccttgtcatgcttcagagtttaaagataagtgtcattgtataatgaaaattgctcctagttgggttggtatgatgtattaaataagttagaagttgctgtaaatcacgtaagaatatcatggcctgaattgtgtgtatcacagacataaataacgatcatatattgatagttcatagttacatattgtattgtaaaaaaaaaaaacaaaa

SEQ ID NO: 19513 - DNA, 354 bp, Glycine max
caccatcgggcccagcaccaattccttttccctctcccccaaattagggtttctctctgggaatgtgattcagcgcgcggcagcatcaatggcggagaagagattcggcgtgatagggtacgctctggcgccgaagaagcagaacagcttcatccgcgactcgctggtgagcctagcgaaatcgcgagggattgagctcgtgcgcgtggactccgacaaccccctcgcggatcagggccccttcgactgcgtcctccacaagctctacggcgacgactggaagcgccagctccaggaattccacaccctctacccaaacgccgtcatcctcgacgcccccgaagcgatcgagcg

SEQ ID NO: 19514 - DNA, 237 bp, Glycine max
caaggaagaacatgatttgatgatgagaagattcttgcgggctcgtagtttggatgtggagaaggcttcggcaaggttccttaagtacttgaaatggaagcgttgatttgttccaaatggttgcatatcaccgtcagagattgccgaagatattgcacaggacatggggtttacgcgaggactcgacaagataggtcgacctatagctggtacctttagtgcacaacatcttcaaag

SEQ ID NO: 19515 - DNA, 474 bp, Glycine max
cccacgcgtccgtcaacccccaaacgcccaaacgatgttagctgcaaacgccaccttaaaaatcgaagctttatgatcaccaccctagtgttgtgttggtgatgaatcctaggagcagcttgtgttcttctctgttcatgttcatcaccttgttggggcttcatgtgtacttcgcttcgtcgcaggtcgaagactacgtgagatgtctacggggcatcgaggacactgtctccgaccctcaggctcggctcgccacgtggaggttcgacaacacaacctccggtttcatctgcgacttcgagggcgtgtcatgctggggccgaagggagaaccgtgtcttaggtttggacctccgagatacgaagctttcgggtaataagatccctgaggctttgaagtactgtggaaagagcattcaaaggttggatcttgcttcagattcttttacttcgaagatcccacgtgagatatgca

SEQ ID NO: 19516 - DNA, 288 bp, Glycine max
cccacgcgtacgtcaactttcaaacgcccaatcgatgttagctgcaaacgccaccttaaaaatccaagctttatcatcaccaccctagtgtactgttgatcatgaatcctactaacagcttgtgtacttctatgttcatgttcatcaccttcttattgcttcatgtgtactctgcttcgctgaaactttaacactacttaagacgtataccgctcatcgacgacactctcttcgaccctcacgctgctcattccacgtgaactttcaacaacacaacctctcttttca

SEQ ID NO: 19517 - DNA, 237 bp, Glycine max
acgcccacgcgtacgcgaagaagatggtggttgcaatgatgcttatatttcttctaatttctacgcaaatggagagcgttgagcccgatgctgcagattgcttggatggttgcactactgcctgtgttcaaagcgactcgaggcttcaagcacggtgtgatcgcaagtgcatcattatattgcggccaaattccacaatcaaggaggacatgagttgagtctgtaaagtcacagcgc

SEQ ID NO: 19518 - DNA, 375 bp, Glycine max
cttgagctattttatcattatcaccgtcattgccaattctcctctatagcttgtgtgagtatagaaataagagatggaagagagagtgagtggatgtagccacgtcttaatggttccatacccaagtcagggtcacataaacccaatgctccaattcagcaagcgcttgagcaccaaaggagtgagagtcactatggtcacaaccattttcatttccaagtccatgcatcttcaatcttcttccttgttaggaaatgttcaacttgatttcatatcagatggctgtgatcaaggtggttttggtcaagctggtagtgtgtcaacctatttatctcgcatgcaagaaataggtttcaataactttgaggaactcat

SEQ ID NO: 19519 - DNA, 413 bp, Glycine max
cggccggattcccggggaaaggataaagggttggttcttagagttgggctcctcagttgttgttttggagcatgttgcaatcaaaggggttatgacccattgtggatggaactccactttggaaagtgtgtgtgctggtgtgccaatgattacgtggcctctctcggccgagcaattttcgaacgagaagttgataactgatgttttgaagattggtgttcaagtggggagcacggagtggtggtcgtggaattcagaatggaaagatttggtgggaagagagaaggttgaatcaccagtgaggaaattgatggtggagagtgaagaggcagaggaaatgacaacaagagccaaagagattgcagataaagcaagaagagctgtggaaaaaggtggaacatcttacgctgatg

SEQ ID NO: 19520 - DNA, 386 bp, Glycine max
gcgcaacgaaagagaaaatgagtaggtgtttattttgtggtaacgggtctgcgctgattcacaatatgaatttgttgatatgaccaattcataatgcattaaaggtgaggggcaacaatagaagttgtggcttgcgtgttcaggtttctatggtggactcttcctccgctgatttcaccagacgcatcgaacgagcttggtcaatttctaagcaaccaaggccaatcgtgtgttcgtcttgcgactcaaaagggcatattgaatgtaaatggtgtgcgggtactggtttttttattcttggtgataacatgctttgtgaagtcccatccagagacactacctgcattatttgcacttgaaagggatcgatgtgctgttctgattgt

SEQ ID NO: 19521 - DNA, 408 bp, Glycine max
  modified_base (7)..(7): a, c, g, t, unknown, or other
ggaaaanccggggcgccgccacgcgtccgctttatttagagatgcgaccaaagcgtggtttctttccgacagacaagagcgacagggttgtttttgatggcagaatagagaaacaagaaagtgaagcgtgttagttagttagtagttggtgcgctgcgttgtgagttcgaaagtgaatctaggagaagaaggagtaaacaacacaaccaacaaacatcttcgatcttattctagggtttcaattgtgatgtgaatctaatgaatgtaacgggaaaagactgtagatagatgagctccagcaatttgacggggtttgtgttggccgtgctttccagcgctttcattggctccagcttcatcatcaagaaaaagggtcttcaactcggcagtgccaatggcccacgtgcc

SEQ ID NO: 19522 - DNA, 379 bp, Glycine max
cccacgcgtccgctgtaattcatcagttgattcaaggcaactctgacatgttacctgagcatcaagtaaccagtttaggtagacattttgaaagtgaccatgattcagcaccttctcctgtcaatgcgtctgttgacaaaaatatgaaagattccaaagaactggttactgttcctgaaatggatgaggaactagctatggtacctgtacaccagaagccaaagcgatctgagatcgtccagcgtcgaatacgcaggcctttttctgtagatgaagtagaagcactggttcaagcagttgaaaaactaggaactggaaggtggcgtgatgttaagctttgtgcttttgataatgcaaagcatcggacatatgtggattt

SEQ ID NO: 19523 - DNA, 412 bp, Glycine max
cccacgcgtccgctctccttctttttttttctttcttcttcttccatctctttttttctgcttaagggctacaaaaggtctcttcttcttctcctcctattgaactttggtcatcacacgagaaaacccacgtctggatcttctggtgtaaaggccattagaagccttttagaaattttcaaattgagttggtgtatagtgttgaagggggtgaaatttggagcccagtttgttacttcatttgaaaggtcatagtttgaaccctctttttctggagatttacctgggaaaagatgatgatgtttgaagatatgggattctgtggcgatttggatatgttatgtggttctcttggggatggggatattgctgtgagacaaactgaaccggatcctgtagttgaggatgacta

SEQ ID NO: 19524 - DNA, 397 bp, Glycine max
  modified_base (375)..(375): a, c, g, t, unknown, or other
agaaaagttagggttcacaacttttttttttccttttgcttgcgaatctgaatcaaataatcaatcatccattcgttattcatcatgtcgtcggcgaagaaaatcacgctgaagagttcggacggcgaggctttcgaggtggaggaggcggtggcgctggagtcgcagacgataaagcacatgatcgaggacgactgcgccgacagcggcatccctctgccgaacgtgacgagcaagatcctggcgaaggttatcgagtactgcaagaagcacgtcgaggccgcgaatcccgaagacaaaccctccgaggacgatctcaaggcctgggacgctgaattcgtcaaggtcgaccaggccacgctcttcgatctcatnctggctgctaactacttgaaca

SEQ ID NO: 19525 - DNA, 359 bp, Glycine max
  modified_base (25)..(25): a, c, g, t, unknown, or other
  modified_base (338)..(338): a, c, g, t, unknown, or other
ggtacttgctcacagatatattttnttttttgtctccatcattttctcgagagctttcagtttctgtgggtcatctttcttcttcttaatctttccccccctctctgtaacatcccgcttctctgaatccctttctgctaatcatctgtctttcaagctaagattttctggtttgtcttttaattcaccaaaaagcaaacttagaaggatttttcgaaagccaggtgttttcagaaacgagatccaggttttattgtcgaatttcgctagtcatattaatatttcatcatttttttttcctttgaaaccagccaagagggttatttttgatccctcanagctaatttctcattttcttt

SEQ ID NO: 19526 - DNA, 403 bp, Glycine max
  modified_base (379)..(379): a, c, g, t, unknown, or other
cccacgcgtccgggcatttgtccactggtatttgggtgaaggaatggaagaaggtgaattctctgaagcccgggaggatcttgctgcccttgaaaaggactacgaagaggttggagcagaaggcgaagaagaagaagaagaacccgatgattactcaaagtagtcaatcattcatcaccagctaccttacctacatctaccttctttcctctgtctaatgtctatccttgtccattgaattttaagcatctttctgttgtgtgctagctctgttagtgttgggtgagataattgctttcctcatgagaagcagtggtttatttgtcagtttgaatcacttttaagtttcagtgaaagagcaaaataaaggatagcgtangagtgctgcagtttccattactta

SEQ ID NO: 19527 - DNA, 293 bp, Glycine max
caaaaacgcggggggtttttctaggcaggaggggcgattccaaagtccaactagttcttcattcacacgagaaacaactgcatcgccaaactctacaaaagagaaggatgcacttttatctaaaagtgacgacgaaacatgcccaatttgccaagaaaagctcggcaaacagaaaatggtttttcaatgtaggcatgtcacatgctgaaaatgcacgaaatatatgacgaaactttatattatcattctataactgtggatatagacttaataaaaagcatttgtcttcacct

SEQ ID NO: 19528 - DNA, 384 bp, Glycine max
atagggttttccccggcgggatcagtcccgtaatcccttcttcatcctgttttcctaaaaaattgagagtccagccgcaacgggccttgagctctgacccctacgttctggaactcgccgaaaccctagaagactccttcccctcctctccctccaccccactcgctctccagaacctgcgactctcctactgccaatccctcctctacactccatggccctcccgccgagacgagcccttccgcttcaccgacctctccttcatccgccaatcccgcatcctccccggctgccccaccatcttcctcctcactcccacctgccaccttcccaacgacgtctacgtcggctccctctcctgctgcttcccctctctcctccaac

SEQ ID NO: 19529 - DNA, 316 bp, Glycine max
cccacgcgtatcggaaaaaagtgtttattaatccattggaacaaaaccaaacttggttattgctgcggctgctggggcttgcacagacatagccactcaccctctggatacagcctattcaaagatgcagacaagagaatatgcaaagtctaacaggctactgaagacccttacagacagaaaccggagtgacgcatcacatagcctcaggattttcttgctgctgacatcaaaccctgcaattcaatatacaccgtttgatcagctcaaacaacgagcactgaagaatagacaaaacaatgctgataaacgaaca

SEQ ID NO: 19530 - DNA, 404 bp, Glycine max
cccacgcgtccgggaaatgaagtcttctttaacagcacagttaacagacgaggctgatacatctgaagtcattgagactgtgaagctgcgagttagagatgctaaattgccggacattgaggtggtgcggatcttgtgggatgttttaatggatgctgttcagtggtctggaaaaaatcagcaacagaatgccaatgcagcccttcgtcaggtaaaaacttgggcagaattgttgaatacattctgcaccactgggaaacttgagctggaactgatgtacaaagtacagatgcaatgctatgaggatgctaaactgatgaagctgttccctgagattgttagatctctttatgaccaggatgtgctggctgaaaataccattcttcattggttccgaaaaggaa

SEQ ID NO: 19531 - DNA, 396 bp, Glycine max
cccacgcgtccggctgcttcaggtgcttgttctatctataataattaagaattctgttgtccctcggttaaaatcttggatacgtaaggttgtcttagacaatgatgatgaacaattaaagaaaactgacaacaaaccgacactgatggaagaagctgcgcaagctgcaaaatcagctgcagctgcagctgcagatgtggcaaaagcaagccaagaaatgctggcttcaaaaggtgaagagaggagatactttgtggaagttgtgagccttttagataaacaagtacaagaaatgaagtcaatgacaaatgccataagaaggttggaagggcaagaagatcttcaaatcagtcaaacaagttcgaagcaactgattgtgaatggaaaaacagacta

SEQ ID NO: 19532 - DNA, 384 bp, Glycine max
  modified_base (24)..(24): a, c, g, t, unknown, or other
cccacgcgtccggcactctcttcnatttttcttgaaacagatttgacagctgagcaacgactgatggtggagacaatattgaaaagcagcaatttgttggctaccctcatcaatgacgttttggatctttcacggcttgaagatggcagtcttcaacttgaagcagcaacatttaacctccattctttgttcagagaggtccttaacttgattaagcctgttgcatctgttaaaaagttatcactcacttcacatgtagcctcagatttgccaatgtatgccattggtgatgaaaaacgtctcatgcaaactattttgaatgttgttggtaatgctgtgaagttctcaaaagagggttgcatttccatcactgctttcggtgca

SEQ ID NO: 19533 - DNA, 331 bp, Glycine max
  modified_base (71)..(71): a, c, g, t, unknown, or other
gaaaaaaggcgggggcgacccacgcgtccaatttggttttccccggcgggagatagtttccgtaatccctncaacatcccggggggcgaattaaatgggagggggggcgaaacgggccttgagctctgacccctacgttctggaactcgccgaaaccctagaagactccttcccctcctctccctccaccccactccctctccagaacctccgcctctcctcctgccaatccctcctctccactccatggccctcccgccgagacgagcccttccgcttcaccgacctcttcttcatccgccaaacccgcatactccccggcttccccacc

SEQ ID NO: 19534 - DNA, 416 bp, Glycine max
cccacgcgtccgcccacgcgtttggttcttggcctggcaatttgtaggaggttcgtaaatcttatggaagggcatatttgggttgaaagcgaaggtattggtaaaggatgtacagtcacttttattgtaaaacttggaatcccagaccgatcaaatgaatttaagctaccttttgtacctaaagtaccaggaaatcatggatctacaaactttgctgggctcaaagttcttgtcatggatgacaatggggttagcaggacagtaacaaaaggacttcttatgcatttaggatgtgatgtaacaactgcaagctcaagtgaagaatgtctgcgtgttgtttctctggaacatgaagtggtcttcatggatgtttgtacagggttagatggttatgaacttgcagtccgtatacatga

SEQ ID NO: 19535 - DNA, 356 bp, Glycine max
cacgattctgtccactctcatgtgtgcccctcgttctgtttattcctgggacattgtcgtccagcgtgtcggaaacaagcttttctttgataagcgcgatgggtcgcagctcgatttgctctctgttcatgaaacctcgcaggagccattgcctgagtcgaaggatgatattaactctgcccattcgttgagcgttgaggctgcttatatcaaccagaatttctctcagcaggtgcttattagggatgggaataaggttacttttgatgaggctaacccttttgctaatgaaggtgaggaggttgcttctgtcgcttataggtataggaggtggaagcttgatgatgatatgtatc

SEQ ID NO: 19536 - DNA, 293 bp, Glycine max
atttcttactttcctctcacgctctgtccaaaactccgtctccgcaataacggaataaaaaaacaagtttaattactattatggcgccgagggatcataagacaagcacgctaagctaacggaacggtacagcggggtgaaggaggtgcattttctggagtgagaaaaagccggggggagatacgccgcggagatcagagatcccggcaagaagagccgcgtctggctcggaaccttcgacacggcggaggagcagcgcgtgcctacgacccgcacacgagagttcgcggcct

SEQ ID NO: 19537 - DNA, 397 bp, Glycine max
  modified_base (384)..(384): a, c, g, t, unknown, or other
gggttttggcttaaaggaatattccgtggggtgatcatagtttttaccctgttcttatgatgggtgactcagaggtggcaaagttcggcttaaaagtcgggaagaatgagaaaaatgggttcccaaggggactagatcctgcaatatccaagttttttgtgcagctccaaagtgttgttaagtctcgacttagtagattagcaaaacaggatggaatgagtttgatgagttctgtccaaagaaaaggggataagtctttcagttactctgaagctgaactaaatgagcaactgcaagcatggagagaaaatccatcttgggttgacaagcctccactaataaaggtcactgctcccaaaggttctcttttgcaccttgatgtanaagttgatgttgg

SEQ ID NO: 19538 - DNA, 187 bp, Glycine max
ctgaagccttctcttaccttgtttctttactagccactggaaaggttgttatacatccaatcccttgaatcaaataaaagggataggcaatttttctgtgtgtctagtaaacttcacattctgtgcaaatcagagtttagataaaaactcaaaaaaatataatgaacttcatttttacattcttagt

SEQ ID NO: 19539 - DNA, 413 bp, Glycine max
agacttttcctccttctggagcttatggcaagatcaccgctgcttccgggcctcctcgtgacgctgatgattcattttcaaaacctgtatctggttctgatgaaccgcagcagggtggttggtttcagacttttacaattgctgcttacaaaccatactttgatgttgacacttcagatgttctagagaggattatcgactcactatttccatttagaggatctttcaatgaaaaaactgctaccaaccctgatttgtatggtccattctggatttgcactaccttgatatttgtagcggcatctattggcacctttgtgacatatatagcgcacaagctaaagagcaaagaatgggattatgacataaatctggtgacttggtctgcttgtttggtttatggctatgttacc

SEQ ID NO: 19540 - DNA, 422 bp, Glycine max
gtctctgccgtcacaaaaaagataaatgtctccgtgtcgtcgtgactaacagtgtgagtgagtgtttgtgtaaatcggggaaattgttgggctattcaagagatcggcagcggcgtcatgggtggagatggagccacggcaaacgcggaggcgcagtacgccacggcgaagatatcggtgtggtgggacatcgagaactgccacgtccccaagggttcggatccgcacgcgatcgcgcagaacatcagttccgccctcgttcgcatgaactactgcggccccgtctccatctccgcctacggcgacaccactcgcatccccgcctctgtgcagcacgcgctctccagcaccggtatcttcctcaaccacgtccccgccggcgtgaaagacgcaagtgacaagaaaatcttggtgatatgctg

SEQ ID NO: 19541 - DNA, 402 bp, Glycine max
gatcaagaggtggatgaggaggaagcctccctctttgacatgctctggttactacttgcaagtgttgtatttgtgccaatatttcaaaagattcctggaggcagtcctgttcttggctacttggctgctggtatcttgattgggccttatggtctctccatcattcgtcatgttcatggaacaaaagcaatagccgagtttggagttgttttcctgttattcaatattggcctggagctctctgttgaaaggcttagttcaatgaagaaatatgtctttggattaggctctgctcacgttttggtgactgctgtagttgttggcttggtggctcattatatttgtggtcaagctggccctgctgctattgtcattgggaatggcttggcattatcatcaact

SEQ ID NO: 19542 - DNA, 416 bp, Glycine max
atttctaactaattattgtgcttattattattgttgagaaagaaaagaatggcaaaggtaataaaattctttgagttgaacacaggggccaagattccttctgttgggttaggcacttggcaagctgagcctggtgttgtagccaaagctgtcaccacagccattctggttggatacaggcatattgattgtgctcaagcgtataacaatcaagcagagattggttctgctcttaagaagctttttgatgatggtgtggtgaagcgtgaggacttatggatcacctccaaactctggtgttcagatcatgcttcagaagatgtgcccaaagcattggataaaacattgcaggatttgcaacttgattaccttgacctctatctgatccactggccagtgcgcatgaaaaagcgatc

SEQ ID NO: 19543 - DNA, 425 bp, Glycine max
  modified_base (387)..(387): a, c, g, t, unknown, or other
gcaaacatcaaccagcgctctatggtttgtttaagggacaccgagattgcaatgggtgcgtaccaacctcatcatacctgggcaagaagccagtatcatcctcgtgggcaaatccatggatataggatgtcactttgggctgaacatacgggtacgattgaagactgcttcttacaaccagagagccttgaatgtgttagtaggattagaacaatgggtgagctgaactggaagcaatttgcatcaaatgatgtaacagaaatgacagggcatctgctcaagtacccggtagaagtcgatcgaaagggtaaggtaagatccctcccgggccacgaagagtttccggatgtgggaggaaagattgtaggatcattcattgccattcangagaatctaaccatttgattacttttttacattcactt

SEQ ID NO: 19544 - DNA, 368 bp, Glycine max
cccacgcgtccggaaaaagaaaaaagtgattatagtttcacttcggccttatccagtttagggtttcgggtctctaccctatctttcacgtatcgaaaccttaaatttacgatcaggtctgagcaatctggttggtagaacctttggtcttagtgagtcaagttttatgtctgaattagacgatcaaattcctactgccttcgatccttttgctgatgcaaatgctgatgactcgggtgctgggtcaaaggagtatgtgcatattcgtgtacagcagcgaaatggtaggaaaagcctgacaaccgttcagggattgaaaaaggaattcagctataacaagatacttaaagacgtcaagaaagagttct

SEQ ID NO: 19545 - DNA, 413 bp, Glycine max
agagactgcagaaatgaaccccactaatggtattgaggtagaaaagattccagcaaatcatgccaaggagaaactagtgattgaggatgatggtaaattcaatcaagaagaagcaaaagggatcgaagaagcaacaaaaacactgttactaaatactgcaacagagagcctaacagaggaagaagtccaggaaatattgcccactcctgcaattgtccaacgtgacacaaagcaaatcatgcaacaacaaacacttcacaatgatgaatcagaagcaattgataaggaaaagagctgcataccagaaaatgaacttgacagaaagttcattgctgttgaggaatctgatcaacctgaaaccaaggccaatgctggcatagtaaaagaagaacaagcagacaaccaatcacaag

SEQ ID NO: 19546 - DNA, 387 bp, Glycine max
catccctttcatttcgatctccattctccctgacactcctctctctgtatccgagttctagggttttggggatagaaagcataaatcacgtacacgacgtcgtttgatttgagggcggcgcaagatgccggggcaccgctcgaagtcggagaagcacgacgtcgacggcggcggcggtgagaagcagctccggcgggacccctacgaggtcctcggcgtctcgcgcaactccacggatcaggaaatcaaaaccgcgtaccgcaaaatggcgctcaaatatcatccggacaagaatgctaatgatcctaaagcagctgatatgtttaaagaggttaccttctcttataatatcctgtcagatcctgataaacggcgtcaatacgactc

SEQ ID NO: 19547 - DNA, 400 bp, Glycine max
ggcgtcgagaccagaggtgattgcgccgcctgagattttctacgacgatgccgaagctcgcaagtacacctcttcttcccgtattgttcaaattcaggcgacgctgtcagagagagctcttgaactacttgctttgcctgatgacggcgttcctaaattactccttgatatcggttgtggatcgggacttagcggtgagacaatctcggagaatggacaccattggattgggcttgatatttcagcatcaatgcttaatgttgcggtggagcgagaggttgagggtgaccttttacttggtgacatgggccagggtataggaattcgtcctggagttatggatggggccatcagtatatctgctgttcagtggttatgcaatgctgataaaacctctcac

SEQ ID NO: 19548 - DNA, 338 bp, Glycine max
gccaaccgcagctcctacagcatgggtccttttctctccctccgccgcgccaggcaggttcttggggccggcaaggtcacgctcttcttagttctttttgctctctccatcgtcgtttttgtctcctccagactcagttcgtggatgggatggaaccctcaccactcctcttcggtttactccacttcaaggggtggctatactgtgcttataaacacttggaggcataaatctcttctgaaacaaactgttgctcattatgcatcctgtcgaagcgctgaagcaatacatgtggtgtggagtgaaagtgaacaaccatccgagaggctcaaaacata

SEQ ID NO: 19549 - DNA, 392 bp, Glycine max
cccgcggtcgccccccaagctcaaatcccacccaacattgttctcacatggcctgcgctagccctcaacgacaaccctgctcttcaatccgcaaaaagaggcccgggtcgtcccaaaaagattgcaggacccgtaggtgtgagcccgggcccgatggtgccgggcagaaggggtcgtccacctgggaccgggagatctaagctgcccaagaggcctggccgtcctcccaagcccaaatccgtgtcggcgatctccagtgggctcaaacgacgtccgggccgcccacccaaagccgaatccaacgtaaacgtcatccccttcgcagcccctgttgctcccggcctgcccacagtgcagcccatcgttcctactgcttccgtgcccaatggatc

SEQ ID NO: 19550 - DNA, 376 bp, Glycine max
caaaaactaagttcatttcttgtgctttgctttattcctcaaaaccaaacatgtcgaacacatgcggcaactgtgactgcgctgacaagactaactgcaccaagggaaacagctatggtgttatagtagagactgagaagagctacatcgagactgttgacatggatgttccagcagctgagcatgatgggaagtgcaagtgtggcactaactgcacttgcacggactgcacttgtggccattaaggaatatgtatgaaaatgtaattgccatgtgtttggcaatacaaatctccaaataatgtaatcttcgtatgaataaatgtgtgctgttatcctacttcagggtctgtgtagtcatgcagtctgaatcatgt

SEQ ID NO: 19551 - DNA, 403 bp, Glycine max
ctcagaaacctagcatctagccaagacaatgcaaacaaatgggtgcaagacaacatcaaaaactatgccaacaatgtcagattcagatacgtttcagtgggaaatgaagtgaaacccgaacactcatttgcacaatttctagtgcctgcattggaaaacattcagagggccatttctaatgctggccttggaaaccaagtaaaagtttccactgccattgatactggtgccttggcagaatcattcccaccatcaaagggttccttcaaatctgattatagaggagcatatcttgatggtgtcatcagatttctagtgaacaataatgccccattaatggttaatgtgtactcttacttcgcttacactgcaaaccctaaggacattagtcttgactatgcac

SEQ ID NO: 19552 - DNA, 265 bp, Glycine max
aaaaataatactatatataacatgtttttggtgtatatatgtgctttaagagtaaagaataacatcgtgaaatcaaattacccctttttcaatacgtgttgaatcatcgatcttggtttgtaatttggttgtatattcacaaaattaataagtatattgtgatgtgattaattcccttctctgttatggtgtacttgccttccctgtattgtccatctccatcgtctgtctattaataagaattcttatgtgatattttcatttc

SEQ ID NO: 19553 - DNA, 390 bp, Glycine max
cccacgcgtccggacaaatcctagagtttttcctttggttgaaagagagggacctgggagggtcacaaacatgggagaggagaatgttaaacaaccgttgttggagaggaagtactacaaggactgcccaggttgtaaagtggatcaagccaaagagttgagtgagggaaagggtgtacctgttaaaaatctttttatcatgtggatggtggtgctgtgtgctgcactgcctatatcatctctctttccattcctctatttcatggtaagggatttcaatattgcgaaaacagaagctgatattagttcttatgctggttatgttggctcttcattcatgcttggcagatgtttgacatctgtattatggggaattgtagccgatcgcta

SEQ ID NO: 19554 - DNA, 387 bp, Glycine max
cccacgcgtccgcggacgcgtgggctgcaccatcgtcctgcatgtcagaggtccagagggtgaggttatcacacacactttctctctctctctctctcacccagatcttgtagcaatggcgagcgctcccactccacgcgaagagttcgtgtacatggcgaagctggcggagcaggccgagcgctacgaggagatggtggagttcatggagaaggtctccgcctccgccgagagcgaggagctgaccgtggaggagcgtaacctcctctccgtcgcctacaagaacgtgatcggcgctcgccgcgcctcctggcgcatcatctcctcaatcgagcagaaagaggagagccgcggcaacgaggaccacgtcgccgtcatccgcgacta

SEQ ID NO: 19555 - DNA, 387 bp, Glycine max
cccacgcgtccgcccacgcgtccgtaggcacccagagaggtattcaatatgaaaggaagggttgacgaaatttgcatcgatgagctgaaatatttaaaatcagttgtcaaagagacactaaggttacacccaccagctccacttttacttccaagagaatgtggacaggcatgtgagattaatgggtatcatataccagtcaaaagtaaggtaattgtgaatgcttgggcaattggaagagatccaaagtactggagtgaagcagagaggttttatccagagagattcattgatagctctattgactacaaagggactaattttgagtacattccatttggtgctggaagaagaatatgccctggcagcacttttggtttgatcaat

SEQ ID NO: 19556 - DNA, 359 bp, Glycine max
ctttcttgtaacttcaacaaacggctgcttcttcaattcaagttctctctttttgtttatttcatttgtttattttctctctcttttctttttctatttgatttcattgtttgtgtgtctgttttccttatcattgtgtctctatgacagaacagaactctcttgggtgttggtgttggtgagggatctgaggcaaaggtgttgatgatatgggagcgtgtgtttcaactccacaagggtgcgtgggagggaggttgagctcttccaagaagaaaaccagaaagagaaggagagagggactcagaagaagagttacttctcggttgtgtaaggaatcatcggagaaagttgatgtggca

SEQ ID NO: 19557 - DNA, 359 bp, Glycine max
cccacgcgtccggtggtggcaatgtgttaccaatatcatatcatatattctttcatcttcttgggttagggttctacacttgcaatctcctttcacacccacccacccttcaaccatttcaattccttccctcacccaaaccgcactatcgttcttcgacacggtcctgtttattaagcggtttggataaaagaatagaagcgtaaaatggccttcgtagcacatcaacctcagggtttgtttgtgacatcttcctcgaggcgtttgccatggagcaaaaggctgaagttgaagcagtgtttaacaaaacatcacatgattggaagaactgaccggcattgcctagtaaagtggaatgc

SEQ ID NO: 19558 - DNA, 409 bp, Glycine max
gttgttgaggcggggctagataaatcaaagggaccattcgcttcatttattgtgcagaatggcaccctcagacggggagatatagtagtttgtggagaagcttttggaaaggtgcgggctttatttgatgatggtggaaagcgggttgatgaagctacaccctctatacctgtacaggttattggattgaataatgttccaattgctggtgatgaatttgaggttattgaatcccttgatactgcacgtgaaagggcagaaactcgtgctgagtcattgcgtaatgagcgtatttcagcaaaggcaggggatggaaaggtcaccctttcttctttagcttcagcagtttcgtcaggaaagctgtctggactagatttgcatcaactaaatattattttgaggttgatct

SEQ ID NO: 19559 - DNA, 317 bp, Glycine max
  modified_base (37)..(37): a, c, g, t, unknown, or other
  modified_base (60)..(60): a, c, g, t, unknown, or other
cccacgcgttcaaccacgcttacagccacgcgtttgnataatttatcaatccaattattnctggtgcttcttttatggctgcgtgggctggccctaagacttgcttctattggacctggggttggtcaaagcactgcttgtctgaaacattggctaatggttcacccaccacatcaggctcctcgaaaaatacgacaagctacattgcgcaaatggcttttgacataagctatcacaatactttggctgggtgtctcattacacactgacatttcctaatcctttacattactcctaaagctatagaaattcatatc

SEQ ID NO: 19560 - DNA, 324 bp, Glycine max
cccacgcgtccggaattcacggttaattccttccttaacagtgatcttgatgataacatgggttttggctggaaggcatgactaacacaatcttggacatgaaatcggcatatcatgtgttgatgaagtgtttatcttattatctttgtacaggacactttaaatagatgctgtttttttccttgtttttccctgttattttcttgatggaatttgtttggactcggactcggactcgagtaggtttttagagattttatttgagggtttttgtcctgcaagtgtaatctattggacaatttaatgaacagttagtttattata

SEQ ID NO: 19561 - DNA, 393 bp, Glycine max
cccacgcgtccgcccacgcgtctgcctactcgtccggtcggaacagccctgcatactacagtcctccgcggcgaggatacggcggtggtggccgaggaggaggaggaggaggaggaggaggagggtccggcaggagggggttcggtggaggcaggcgcagggacagcaatgggagcctcttggttcgtaacattcccctcgattgcagacccgaggagcttcgcgtccctttcgagcgatttggacctgttcgtgacgtttacatacccaaggattattactctggagaacctcgaggctttgcctttgtgcagtttgtggatccttatgatgcctcagaggcacagtaccatatgaacagacagatttttgctggaagggaaatatctgtag

SEQ ID NO: 19562 - DNA, 422 bp, Glycine max
ctctaatagaaatatttctggacgtgaatgaaatatgatccagtatttcttataaacaaccttttattatacccaccactgcctccatttttgtgccttttaaatcagtgtaacaaaactgtggaccttcttgttatactctgttggccttgacaaccatctacaagttttcaaggaaaagattcactatattgccctatctcatgccaatttctgaatcattgtgtggctattttttatgtgcatgatgtttgcataaagagatataatatgattctaagctgcatgagtctattatgtctacaatatcttctttttgcaggatggagaggcttatgcttacttgcttaatgctcttgccccagaagtggcaggcccatctgccctaaacacaagtgatccaacagaaagggcaaacatgg

SEQ ID NO: 19563 - DNA, 418 bp, Glycine max
ctgaccgggaaaagaaaaaccagctttcttcaagcacctagatttcctctctctctaaatggcgttctcttcttttctcggcagagtcctcttcgcctccgttttcatcctctccgcttaccaagaatttaattcttatggagttgatgggggacccgcagcaaaagcactcagaccgaagtttgatgcctttgcacatcaagtacattctaaagttggctttcaacttccagatattgatatgaaatttttagtggctggggctattgctctcaagggccttggagggattcttttcatactcagcagctcttttggagctttccttttgcttttgcatcaagtgatcactactccaatactgtatgatttctacaattatcacagtgaggacaaagaatttatccaacttttcatc

SEQ ID NO: 19564 - DNA, 410 bp, Glycine max
  modified_base (361)..(361): a, c, g, t, unknown, or other
ctctagtcgacttgggtctcgcccttctttttcttctagtcacagtcacagggtcaaccgcttcagattatcgtctcttctatgtggcacctccacctctcgctccgttcatcagatggaagaactttcagctgaacttcgggttgattcagcaagggattttgatggtgaaattcagaaagacactgaggaatcgtctttatcatatacagaagctagaattagctccagtcgccctgctgaaactgcaaccctatctgatatgagaactgagttccatgggaatactagtgttgaaggttcttctagaaacgttgcaacaaatagtcagaggaactgcttgtctgaacatgaggagctngtccctccttatcaggtaagtgctggtcatactggtcatgaatcatata

SEQ ID NO: 19565 - DNA, 413 bp, Glycine max
ctcaagcttcttgaaagtcagttggttcctttaaccgagcaacaattgatgggcatctacaacttgcagcagtcatcccagcaggctgaagatgctctttcccaagggatggatgcattgcagcaatcactgtctgagacattggctaatggttcacccagcacatcaggctcctcgggaaatgtggcaagttacatggggcaaatggctatggccatgggaaagcttggtactcttgatgggtttcttcgccaggctgacaatctgcggcagcagacattacaacaaatgcttcgaatattaacgaccaggcaatcagctcgagctcttctcgccatcagtgattatttctcacggctgcgagctctgagttctttgtggcttgctaggccaagggagtgaagcatttcaca

SEQ ID NO: 19566 - DNA, 387 bp, Glycine max
cggaatcaaaagcaagtgctaagaagttccgtgttcctattctcaaacctgtagcaccaaacccaagttgtcatccaagttttataatactacatatattattattatacgatacataacaatagtattaatattgttgtgattgtgtgtgatttttggtgtcgtccttttttcttatattaaggtggtacggagcttatatgtgttgattcaattcgtcgacaagaaaccttagtttgatatttgattggttctgtggagagttttcctttggtgtggttggtttgtgctgtttttggttgggaataggaatggctaatgaaggaaagaaaagcaataacttctattcgatcttgggcttgagcaaggagtgcactgaattggagc

SEQ ID NO: 19567 - DNA, 417 bp, Glycine max
cttttctctctctttctctcaggctcagctctaaaaacttgtcttcaatattctgtttttcttatcagtctttggttttctagatcagatggaggaaagcaagaaaaacccttctcaacttaacagattccaggatgatggaatgcacgatcttgacatagttgaatggaaaaagaaaagaaaattacagagtgatcagttggatttgattagacctaaacataaatgctgggttggaagtttctcctctgaacatgcttcagtgtttgataaaaatccagttttagagagcatgcacaaccacacagttgaaagctccaaacatgaatctgccaaagacagcaatagttttatggaagactgtgatactgccatgtctgtaaatgaagaagccaaacacgagacagattgtggaag

SEQ ID NO: 19568 - DNA, 414 bp, Glycine max
tcttaataaccgattcttcatctggttcttctcaatatgcatgtgcatcaccctcactgccctcacccttacctacttatatggtttgcaaatggtcaccccaaacgacgtttgggataattcattattcagcatggttggagtcgttatttttatttggatcatacttctaggaatcgtcgtaattttcctctccctacgcctacttttttggattgtcactaaatgccggaataaaaaacaaactgaacaaggagaagatcaaaaccaaagtaaacaagaagatccaaaacaaagtacaggagaagatgcaacctagttctgctcatccatcaggccatgcatcgcatatcaaccttccttacttgtggactattttacattgttaagcaatattattaatcatacataaat

SEQ ID NO: 19569 - DNA, 379 bp, Glycine max
  modified_base (14)..(14): a, c, g, t, unknown, or other
  modified_base (16)..(16): a, c, g, t, unknown, or other
  modified_base (43)..(44): a, c, g, t, unknown, or other
  modified_base (50)..(50): a, c, g, t, unknown, or other
cccacgcgtccggntncgcttttttattattcttagaggccgnngatcgngtgcgggaaatgttctgcgggtgcacgggcacagcacgtgctcacaaagctggtgaattccactgggattccttttctcccaactccgatggggaaaggaattttacctgacacccacgcacttgcggctactgcagcaaggtcactagcgattgggaagtgtgatgtggcgcttgtggtgggagcgagactcaactggcttctacacttcggtgaaccaccgaaatggtctaaggacgtgaaattcatcttggtggatgtgagcgaagaggagattgagctgaggaagcctcacttaaggttaattggtgatgccaaacacgtgattg

SEQ ID NO: 19570 - DNA, 373 bp, Glycine max
gtttcggagctatggcgcaagttgcattctgatgttatgagattcttgcagcgggtgaggtgctgggagtaccgccagcaaccttctattgtccgtttgacaaggtctactcgcccagacaaggctcgccgcttgggtttcaaggctaagcagggttatgtgatttaccgtgttcgtgtacgaaggggtggccggaagagaccagttccaaaaggtattgtttatggtaagcccaccaaccaaggtgttactcaactgaaatttcagcgcagcaagaggtctgttgccgaggagcgagctggaaggaagttgggtggcctcagggttctcaattcatactgggtgaatgaggactcgacttacaaatattttg

SEQ ID NO: 19571 - DNA, 402 bp, Glycine max
ggcttctcaaggccatggtttcataatgtgtctgcaatggaatggctttctttcaggttgaatttactttcaaattttgtttttgccttctcactggtcatgctagtgagcctccctgaaggaataatcaatccaagtattgccgggttggcagtaacatatgggatcaatctgaatgtgttgcaagcttcagttatatggaacatatgcaatgcagaaaacaagatgatatcagttgaaaggatccttcaatatacaaatataacaagtgaagcacctcttgtgattgaagacagcaggccgccaagcaactggccagatactggaacaatatgtttcaaaaatttgcagatacgttatgccgaacatctaccatctgtattgaaaaacatcacttgcaca

SEQ ID NO: 19572 - DNA, 397 bp, Glycine max
gtgaattacgtttgaaaatgcacggtcggcctcgcaaagcgttgaagcaagaagatgaagccgcttcagcagccaaagctgaaaagcttcgttcactccaagctcagttcctcgccaatcaccacaatcacatttatagcaaggaagcgttagatgtgagcgcgaagcttctagaagtgaatccagagtgctacacagcttggaattacagaaagctcgccgttcaacatcttctctctaactccgattccgatcctcactctatcttcgatgacgagctcaaactcgtggagattgcgctgaggaagaatttcaagtcttacggcgcgtggcatcatagaaaatgggtactcagcaaggggcattcgtccatagacaacgaaatgcgccttctgaa

SEQ ID NO: 19573 - DNA, 387 bp, Glycine max
ccctttctctctctcattctcttctccatttcgcgtaagaaacacattttagttgctactaatgggaactgttgaagctgcaaacaaggatgcaaatggaagtctcctagagaaaaatccttcagttgtttttgtgttaggtggcccaggaagtggaaagggtacccaatgtgcaaatattgtccaaaattttgggtatactcatctcagcgctggtgatcttctgcgagcagaaatcaaatctggttctgaaaatggtacaatgattcagaatatgattaaagaaggaaaaattgttccctctgaggtaacaattaagctcttacaaaaagcaatgcaggaaagtggcaatgacaaatttcttattgatggttttccccgcaatga

SEQ ID NO: 19574 - DNA, 425 bp, Glycine max
gaataccggcgcgagccacgcgtccgaaaaattcttaaggatggccacagcagtagtaatttcaactttgaaactgttgcgccgatgttttttgggggatatgggagacccttttctcaccaatctcattccagtaaaacttgaagacccctcatcaggacttgatatgggttcaaacttctcagaacaaagcagcttctgcaagtttctggagtgctttgattttgaagcagaagtggtaggtctcacttctcatcataaggtccaaagctccattgcaacaagtccaccccagaatttcaattttccagaagaaccaatggtgtcaatgaaaaaggaagcaacatgttatgcaacaaggcattacagaggagtgaggagaaggccatgggggaagtttgcggcagagattctcgaccccaaaa

SEQ ID NO: 19575 - DNA, 384 bp, Glycine max
cccacgcgtccgcctagattcagccacagttggaaaaaaaaaaaaagttgttcgagatggcacgtacgaagcaaactgctcgtaagtccacaggaggaaaggcacctaggaagcagctcgcaaccaaggctgcacgtaagtctgcaccaactactggtggtgtgaagaagccacatcgttatcgtcctggtaccgttgctcttcgtgagattaggaaataccagaagagtaccgagcttttgatcaggaagctccccttccagaggctggttcgtgaaattgctcaggacttcaagactgatctgcgtttccagagccatgctgtgcttgcattgcaagaagctgctgaggcataccttgttggactctttgaggatactaatc

SEQ ID NO: 19576 - DNA, 389 bp, Glycine max
gcttgcttgagttgccaactttaagtttgtcaatttccgtgctgcttggttggttgcaattgcaagtgaacaattggctagtgtgtactagttttgaatcacaatggcagaggatgatggttacacgaaagatggaacagtcgattactgtggaaatccagctaataaaaaggaaactggaacctggaaagcctgcccctatatcttaggaaacgaatgttgtgagagattggcttattatgggatgagcacaaacctggtgctttatttcaagaaccggctaaatcagcatagtgctactgcttccaagaatgtctctaattggagtggaacttgctatatcacaccattgattggggcatatttggctgattcctaccttggaagat

SEQ ID NO: 19577 - DNA, 398 bp, Glycine max
gggaagaagaacttagctacaagctattgaaggatcaaagagaatggctcaagcaatggcatcaatgactagcttacgtggttcctctcaggctgtgttggaaggtagccttggctccacacgcttgaatgtggggagtggaagcagggtggcctcagtcacacgtgcagggttcacagttagagcacagcaacaacaagtgaatggtggtgaggtacaaagtagccgtagggcagtgctttcacttgttgctgctggtttgaccactggctcttttgttcaagctgtgcttgctgatgccaaacctatcaaagttggaccacctcccccaccttctggcggattacctggaacattgaactcagatgaaccaagagaccttaagctgccattgaaag

SEQ ID NO: 19578 - DNA, 396 bp, Glycine max
gccatgtcttcctctctcgctcttccttccactcccttcttcgccaatggaacaagaatcttcgctctcaagcactctctccctcgctctagggtttccatgagcgtctccgctggatctcaggcttccgttcaccaggctttgttcgccgattacaaggcctccacttcattcctcttcccgggccagggtgctcaagctgttggaatggggaaagaagctcaaaatgtgcctgctgctgcggttttgttcaacaaggcaaatgacattttggggtttgatcttcttgatatatgcatcaatgggccaaaagaaaagttagattccaccgttattagccagcctgctatttatgtcacaagtcttgctgctatagagctacttcgtgcacgtgaa

SEQ ID NO: 19579 - DNA, 419 bp, Glycine max
agggttttagcgcagcttcttctagatttaaggaagatgggtaaggaaaaggttcacatcagtattgtggttattggccatgttgactctgggaagtccactaccactggccacctgatctacaagcttggaggcattgacaagcgtgttattgagagatttgagaaggaagctgctgagatgaacaagaggtctttcaagtatgcctgggtgcttgataagcttaaggctgagcgtgaaagaggaatcacaattgatattgccttgtggaagtttgaaaccaccaagtactattgcacagtcattgatgcccctggacacagggatttcatcaagaacatgatcactgggacatcccaagctgactgtgctgttcttatcattgattccactactggtggttttgaagctggaatttc

SEQ ID NO: 19580 - DNA, 431 bp, Glycine max
  modified_base (25)..(25): a, c, g, t, unknown, or other
  modified_base (46)..(46): a, c, g, t, unknown, or other
  modified_base (48)..(49): a, c, g, t, unknown, or other
  modified_base (77)..(77): a, c, g, t, unknown, or other
  modified_base (87)..(87): a, c, g, t, unknown, or other
gaaaacccggcggcgacccacgcgnccgggtacttaccaggaaacncnngtgggtagttttacgagaccaaggccanggggaagggncattttaagggggggctgtgcatgccgagtagctgtggggaatgttagtatggaggaaaagcaaatcttccaaaatgttcaactgagtgttaatttccttgtctctttgttgaaaaagaactggcaaaatgtgagtagtagtccactatcaatattttgttaagtcattgcttctggtgccttcttttttgatgtgattttcttaaaggtatatgttcttggttctgttttattattggggtaattaaaaaactctgctactataagaatagtctttgatatcagatgtggcatggattgaatccatgcttattacaggctttatcttttgcttatatggttat

SEQ ID NO: 19581 - DNA, 419 bp, Glycine max
ggtgaagtcaacaaagaaagaattataagctttctccgagaaagcttctgttcacgtcagggtccggggtaggcttcttcattgagattgggttggtgttcagtgtgaatgcatttccagtgagataagagaaaaggaacgaggggaagaagcgacttatattaagaaatattaatatacttaatttaatattaatgttcgggtacccccctccggctcgtagttgagaagagctttcgtttaggaaagggctaaatgggtgcgatccctctcgttgagagtcaagggtctcctggagtagaaggcacatcctggatctattaagccggcaagggttcagcattggctttcacgaccgcaaaggggccatctctcagtcggagtagataagatagatatacttaatttaatatctttta

SEQ ID NO: 19582 - DNA, 376 bp, Glycine max
caaacccaaccctagattgagagtaaatatccccaaaaacaaaacacacatctctttcattctctccctcaccaaaccctagattgaaagaaaccctaacacaccatgggaacacccgagacatcgcgcgaaccctgccccgatcgcatcctcgacgacataggcggcgccttcggcatgggagcggtgggtggctccgccttccattttctcaagggtctctacaattcccccaagggcgatcgcttcgtcggcgccacccaggccgtgcgcctcaacgccccccgcgtcggcggcagcttcgccgtctggggcggcctcttctccgccttcgactgcaccatggtctacgcgcgccagaaggaggacccctgga

SEQ ID NO: 19583 - DNA, 404 bp, Glycine max
atttgtattggtttagaggaacatagttcgaggaacagccaacacatgtatggtagggagttccaatcgatgttggacggactcgacgaggaagggtgtgttgaagaaccggggtatcaatctgagaagaagcgtcgtctaagtgtggatcaagtgaaggctttggagaagaactttgaggttgaaaacaagcttgaacctgagaggaaggtgaagcttgcccaagaacttgggttgcaacctagacaggtagccgtatggttccaaaaccgtcgagccagatggaaaaccaaacaattggagagagattatggtgtactcaaagccaattatgatgctcttaagcttaactttgacaccctcgatcaggacaacgaagccttacgaaagcaggtagaataata

SEQ ID NO: 19584 - DNA, 442 bp, Glycine max
agaacacaaaaccatggtgtcaccaatttcacacttagtaactttaatcctcttattatcagtttcattggcagcttcagcttcacttgaagaaaactttgtccaatgtctcagcttctattcagacaaagcagctccattttatgcatcaatttacactccacaaaatgcatcattcaacaagatccttgaatcctctgcacagaacctaaggtatttggtgccttcagcgccaaaacctgagcttatattcacacccttgactgattcccatgtccaagtggcagtgacttgctcaaagaagcttggtattcatctgagaattcggagtggtggccatgactatgaaggactctcatatgtttctgaagttgagtccccttttcataattgttgatttgtccaagcttcgtgccatcgacgttgatatagaagacaacac

SEQ ID NO: 19585 - DNA, 462 bp, Glycine max
  modified_base (421)..(421): a, c, g, t, unknown, or other
gcctacttcttttgagaaatttgccaatggggtcaagcagcaggcaaatatcaagggagtggacaggctaactgctaaggtgggagtggtggagataggaaagggtgtccgtggaactagtccaaccgggaagagaatttccgtgggaaacccgatcagaaatttggttcagggaattgagcttggagctaaggcgctgcgtaagagctgggaagggaatatggaagtcaagaagaaagatacatccaaattaagggccgccaagtgtgatcctaagccagagactcctaggagaagtacttcaagtgaaaagtttccctctaaagaagagagcaagatgcaaccgcagacaaagtcctccaaagaagagcacaagactcaaacatctataaagagagttattgtcagtggaacaatggangaacaagaataaccaagtaagcaaagagtttctgttggaaa

SEQ ID NO: 19586 - DNA, 455 bp, Glycine max
  modified_base (244)..(244): a, c, g, t, unknown, or other
atccagttgtggcataaattgcataagaatatggtccctggtgactaccaccttgtcatgcttcagagtttaaagataagtgtcattgtataatgaaaattgctcctagttgggttggtatgatgtattaaataagttagaagttgctgtaaatcacgtaagaatatcatggcctgaattgtgtgtatcacagacataaataacgatcatatattgatagttcatagttacatattgtattgtnaaaaaaaaaaaaaaaaaaaaaaaaaaaaaaaaaaaaaaaaaaaaaaaaaaaaaaaaaaaaaaaaaaaaaaaaaaaaaaaaaaaaaaaaaaaaaaaataaaaaaataaaaaaaaaaaaataaaaaaaaaaaaaaaaaaaaaaaaataattggggggggcccctttaaagaaaccaagtttaactcttttgaatggttacacgtttttttttt

SEQ ID NO: 19587 - DNA, 446 bp, Glycine max
caccatcgggcccagcaccaaaccccttcccctctcccccaaattagggtttctctctgggaatgtgattcagcgcgcggcagcatcaatggcggagaagagattcggcgtgatagggtacgctctggcgccgaagaagcagaacagcttcatccgcgactcgctggtgagcctagcgaaatcgcgagggattgagctcgtgcgcgtggactccgacaaccccctcgcggatcagggccccttcgactgcgtcctccacaagctctacggcgacgactggaagcgccagctccaggaattccacaccctctacccaaacgccgtcatcctcgacgcccccgaggcgatcgagcgcctccacaaccgaatctcgatgctgcaggtcgtgtcggagctccgaattgaggaccgacccgagacctttgggatccccaagcagattgtga

SEQ ID NO: 19588 - DNA, 122 bp, Glycine max
  modified_base (12)..(12): a, c, g, t, unknown, or other
  modified_base (16)..(16): a, c, g, t, unknown, or other
  modified_base (41)..(41): a, c, g, t, unknown, or other
  modified_base (46)..(46): a, c, g, t, unknown, or other
  modified_base (50)..(50): a, c, g, t, unknown, or other
  modified_base (53)..(53): a, c, g, t, unknown, or other
  modified_base (55)..(55): a, c, g, t, unknown, or other
  modified_base (70)..(70): a, c, g, t, unknown, or other
  modified_base (72)..(73): a, c, g, t, unknown, or other
  modified_base (81)..(81): a, c, g, t, unknown, or other
  modified_base (85)..(85): a, c, g, t, unknown, or other
  modified_base (88)..(88): a, c, g, t, unknown, or other
  modified_base (90)..(91): a, c, g, t, unknown, or other
  modified_base (99)..(99): a, c, g, t, unknown, or other
  modified_base (102)..(103): a, c, g, t, unknown, or other
  modified_base (109)..(109): a, c, g, t, unknown, or other
  modified_base (111)..(111): a, c, g, t, unknown, or other
ccagagcaaccnccgngccggagagcagcgccggcaacacncggcncaanacncnggaaccgggagcccngnnagggcgcngganccncnncaacaacnacnncaacancnacaacaaacag

SEQ ID NO: 19589 - DNA, 417 bp, Glycine max
ctagtcccaaagagctaacaagagatttaagaccggcatggctaatgaagaggaacagaaaaaccacctcttcggcatcaaagatctcggtcacaagactctccttcagagtgatgcactctatcagtatatacttgaaaccagtgtctatccaagagagcacgagtgcttgaaagagatacgcaagatgactgcaaaacacccactgaacatcatggcaacaccagcagacgaaggacaacttctgagcatgcttgttaagctcacgaattcaaagaacgccttggaaattggtgtattcactggttactctctgctctccactgccctggctcttccccctgatggaaagatcttggctttggatgtgaatcgcgaatactatgagttaggattgccaataattcaaaaagctga

SEQ ID NO: 19590 - DNA, 418 bp, Glycine max
  modified_base (23)..(23): a, c, g, t, unknown, or other
ccattactagcacttctgattcngtgagtcttagtggaggatttgaagccctggatgaaaaacccaagtgctcggatggtgaaaataaagacactaataatgatgaagaattgccatctcttgagctcagtttaaagaggcttagaggagttgaagatgctggtattgcaattcaggatgacaggaatgttttaagacgttctgatcagtctgctttctcaaggtacaatgcagccttaaaccctaagaaatctcccactggatgtgttggaagcaattctcctcataataatagcttagaagttacaaagaaagattcatctcacgatattcaatctcattctagcggcaatcctcctaaccaaaactcaaatggtgctagcaataacattgatatgggttccactactaataatgc

SEQ ID NO: 19591 - DNA, 395 bp, Glycine max
ggtggatagtggtagtcgtagtttgcatggaggaggaagcggaagaaacgaagagcgcagtgagaatattcgtcggaggattggcgggagccgtgagcgccgaagaccttcgaagcttattcgcgtctctgggctccgtccaatccgtccaaaccatccgaaccaaaggtcgcagcttcgcctacctcgacttcctatccgaccccaaatccctctccaagctcttcagcaagtataatgggtgtctgtggaagggtggaaggctgaggctggagaaggccaaagaagactatcttgtgcgtttgaagagagaatgggaacaaggcgctctagatgatgctactcaaaaaccacctgctgctgctattgaggaggaaattcccagcaccacacac

SEQ ID NO: 19592 - DNA, 362 bp, Glycine max
caaactccaacatggaagtggtgtaaagtgggggtggaatattggggttggtaggtggtcttgcacaagagtttctcaagcaaaagcttgatgacaatgatgagggatatgcaaagcctgcattggagacaaaagtggaaagtaagcaagaggcatatgctggaccaaccaaacgtggccttccggatggtgggatattgatgagtggatgtcagaccgaccaaacttctgccgatgcaagtcctgcaggaagcgctgccagtgcttatggagcttttagcaatgcaatacaggctataattgaggagactgatggtgcaatcacaaaccaagaacttgttcaaaaggcaagagagaagctg

SEQ ID NO: 19593 - DNA, 400 bp, Glycine max
cgttctccctcttttctctcaccatcttaaagcgcttttttttttttttttttcttctacctccgtttctccgtctccacatttctccttcacgaactcccgatttttcttcctcttcaatctcgtccctctctgtctctccatccttaaatatacacaacatcttctaaggagaaaggggttccgaaagttacgataaaataaaaatggatccaaacgcggtgaagtccactctctccaatctggcgtttggaaacgtaatggcggcagctgcccgtgattatcagaaggaattgcatgctcaagagaagacacatgcatcaagttcagtacatcaggaggttgaccttgacgagttaatggatgatcctgagttggaaaaattgcatgcagataggat

SEQ ID NO: 19594 - DNA, 395 bp, Glycine max
aggccaaatgtagtgaatactatttattttctcatgcgcaaacgcaagggtctcttcttcagcagatagattgtaacggagcatgtgctgcgaggtgccgtttatcatctcgtccacgcctctgccaaagagcttgtggaacttgttgtagacgctgtaactgcgtgccacctggcactgctggaaaccaagaagtgtgtccctgctatgcaagtttgactactcatggtggcaaacgcaagtgcccttagacttaattggaccactatcctatgcatgcctttgatttatattataaaataaaaataatactatatataacatgttaattgcttaatatgtgctttaagagtaaagaataacatcgtgaaatcaaattacccctttttcaatac

SEQ ID NO: 19595 - DNA, 380 bp, Glycine max
  modified_base (21)..(21): a, c, g, t, unknown, or other
  modified_base (31)..(32): a, c, g, t, unknown, or other
  modified_base (45)..(45): a, c, g, t, unknown, or other
  modified_base (359)..(359): a, c, g, t, unknown, or other
cccacgcgtccgcccacgcgnccggagatannttctccatcattnaacaacctcacaggctggtttaagttgagggtggcgcataatcgcttagagggaccaattccaactggagggcagtttttaagcttccctagttcaagttttgagggcaacctggggctttgtagggaaattgattctccttgcaaaattgtcaacaatacaagtcccaacaattcttctggttcttccaaaaaacgtggtagaagcaatgtccttggcataacaatcagtatagggatagggcttgcactgcttcttgcaattattctgctaaaaatgtcaaagagggatgatgataagcctatggataactntgatgaggaactcaatggtag

SEQ ID NO: 19596 - DNA, 244 bp, Glycine max
aaaaaaaaaaaaaataaaaaaaaaatatattttataaaaaaaaaaaaaaaaaaaaaaaaggggggattttatggaggagggggagggtaaatccacctttgtgcggccgctcttctttttccaaccttccttccccgtccatcgcaattccatatcttttctttatttttgcccaactaaaattctttggccgcccctttttttcccaattccttgcagtccccttccttaccctcccttaata

SEQ ID NO: 19597 - DNA, 291 bp, Glycine max
gctactcaatcaggttgtgaatgtcggtgagaatgacacagatcatgatacacatgatgatggacgtggttatggaggatgcttttgggcctgatgcatatacatattcatagaacttgtatataaaagtgctgatatagatactgccatatatttaactagctcatttgagacataatttgatgcaaacatgattacatgtgtgaagccatatacgaactcacttaccaaatttcttgaaagacaattggaaagcttaaatgtgaactatgttggacatgatgtgtatga

SEQ ID NO: 19598 - DNA, 399 bp, Glycine max
ctcaaatctgtgaagaaaatcttattttctaaattgtaattcttagcactactgctagtagtagtaaaaaaaaacaattagaaagtagtagagtgtttttttttctttttttcgtttgttttacttttaagatgggtgagaagagcaacgttggcggcgacgcgattaacacgacactgcttcacgggaagtacgagctgggccggctgttaggccacggaaccttcgcgaaggtgtaccacgcgcgccacctgaagacgggaaagagcgtggcgatgaaggtggtgggcaaagagaaggtggtgaaggtaggcatgatggagcagatcaagagagagatctcagccatgaacatggtgaagcacccaaacatcgtgcagcttcacgaggtcatggcga

SEQ ID NO: 19599 - DNA, 461 bp, Glycine max
ggccatataatttttttttatttgaaataatgtccgggatcatccacaagattgaggagaccctccatgtgggagggcacaagaaagaggagcacaaaggagaacaccatggtgagcacaaaggtgaacacaaaggagaacaccatggtgagcacaaaggtgaacacaaaggagaacaacaccatggggagcacaaggagggacttgtggataagatcaaggacaagatccatggtgatggccatgacaagggtgagaaaaagaagaagaaggacaagaagaagaaggagcatggacatgaccatcatggtcatagcagcagcagtgacagtgattagatcttatatgttaagcaggtgtacggtacgatggtagtgaggagccagaatccctcttcctgctttatgatataatacaaataaaatagcgattccggaaatcatgtctgtagctgctctttt

SEQ ID NO: 19600 - DNA, 450 bp, Glycine max
gtcattgaccatgttgtcacagataaaaggaaaactccgctacttaaagggtgtggttcaatctaagcaaaaactgcaattcgaaagtccaactagttcttcattcacacgagagacaactgcaacgccaaactctacagaagagaaggatgcacttttatctaaaagtgacgacgaaacatgcccaatttgccaagaaaagctgggcaaacagaaaatggtttttcaatgtgggcatgttacatgctgtaaatgtaagaattatatgaggaaactttatattatcattctttagttgcggttatagatttaataaaagtcatttgtcttcacctagcaacttaagctgttaggagaattagttcttgacattgttttagagcctcaatgatcaagtaacgtagagtttgatccttgttcattcttctaaacaaaactttgaattttaca

SEQ ID NO: 19601 - DNA, 401 bp, Glycine max
  modified_base (330)..(330): a, c, g, t, unknown, or other
atagggttttccccggcgggatacagtcccgtaatcccttcttcatcctgttttcctaaaaaattgagagtccagccgcaacgggccttgagctctgacccctacgttctggaactcgccgaaaccctagaagactccttcccctcctctccctccaccccactccctctccagaacctccgcctctcctcctcccaatccctcctctccactccatggccctcccgccgcgacgagcccttccgcttcaccgacctctccttcatccgccaatcccgcatcctccccgtctcccccaccatctccctcctcactcccacctcccacctncccaacgacgtctacgtcggctccctctcctcctcctccccctctctcctccaacgagtctcccatttcat

SEQ ID NO: 19602 - DNA, 135 bp, Glycine max
cccacgcgtccggaaaaaagtggctataaatccattggaacaaaagcaaacttggttattgctgctgctgctggggcttgcacagccattgcgactcagcctctggatacagcctcttcaaagatgcagacaagt

SEQ ID NO: 19603 - DNA, 454 bp, Glycine max
cccacgcgtccgggaaatgaagtcttctttaacagcacagttaacagacgaggctgatacatctgaagtcattgagactgtgaagctgcgagttagagatgctaaattgccggacattgaggtggtgcggatcttgtgggatgttttaatggatgctgttcagtggtctggaaaaaatcagcaacagaatgccaatgcagcccttcgtcaggtaaaaacttgggcagaattgttgaatacattctgcaccactgggaaacttgagctggaactgatgtacaaagtacagatgcaatgctatgaggatgctaaactgatgaagctgttccctgagattgttagatctctttatgaccaggatgtgctggctgaagataccattcttcattggttccgaaaaggaacaaactccaagggcaggcaaacctttgtgaaggcgctcgaaccctttgtt

SEQ ID NO: 19604 - DNA, 393 bp, Glycine max
cccacgcgtccggctgatgaaggtgctggtacaactataataattaaaaattgtggtctccctcggataaaatgttgcatacgtacggttgtcttaaactatgatgatgaacaatttaggagaactgacaacataccgacactgatggaagaagctgcgcaagctgcataatcagctgcagctgcagatggagatgtggcaaatgcaagccaagaaatgctggcttcaaaaggtgaaaagaggagatactttgtggaaaatgtgagccttttatataaaccagtgcacgaaatgaaggctatgacgaatgtcatatgatggttggaagggctagaagatcttcatatcagtcaaacaagttcgaagcaactgattgtgaatggaaaagcatac

SEQ ID NO: 19605 - DNA, 457 bp, Glycine max
cccacgcgtccggcactctcttcattactacaggaaacagatttgacagctgagcaacgactgatggtggagacaatattgaaaagcagcaatttgttggctaccctcatcaatgacgttttggatctttcacggcttgaagatggcagtcttcaacttgaagcagcaacatttaacctccattctttgttcagagaggtccttaacttgattaagcctgttgcatctgttaaaaagttatcactcacttcacatgtagcctcagatttgccaatgtatgccattggtgatgaaaaacgtctcatgcaaactattctgaatgttgttggtaatgctgtgaagttctcaaaagagggttgcatttccatcactgctttcgttgcaaagcctgaatcctttagagatgctagaattcctgactttcttccagtgccaagtgataaccacttttatttgc

SEQ ID NO: 19606 - DNA, 254 bp, Glycine max
gccacgcgtgcggatcactattcacttattcgcataatcggccaaaatgtagactcgcctaggggctcatgggccactaactgaagattccgatcagtgggctcctaagactggtcagagtcaggctctttgtacaacacaacatggtgggcctaaggctacagatggcgcacataataacactgtatgaggaaactggcactatgccctgaacagacctggttctactcctgacaaagaacatctaatgaaaa

SEQ ID NO: 19607 - DNA, 411 bp, Glycine max
gcgcttgagctattttatcattatcacctccattgccaattcttctctatagcttgtgtgagtatggaaataagagatggaagacagagcgagcggatcttgccacctcttaatggctccataccccaggcagggtcacataaacacaatgctccaattcagcaagcgcttgagcaccaaaggagtgagagtcactatgggcacaaccattttcatttccaagttcatgcatcttcaatcttcttccttgttaggaaatgttcaacttgatttcatatcagatggctgtgatcaaagaggttttggtcaagcatgtagtgtgtcaatctatttatctcgcatgcaaaaaataggtgccaataactcgagggaacttataaaaaaatacaactcttcagatcaccctattga

SEQ ID NO: 19608 - DNA, 450 bp, Glycine max
  modified_base (42)..(42): a, c, g, t, unknown, or other
  modified_base (368)..(368): a, c, g, t, unknown, or other
cccacgcgtacgcccacgcgtccgctacacaactaagctttntctctctttcggggtcctctgggacattgtgacccgccactctcaccaccgagcaggagctttccgtcatcgttgccgcccttaccaacgtcgtcgccggctccacctccgcctgcagctccttctccctccccgaattccgccttccacagacctctgatcctctcgccgccgcctgcctaatgccgccgccgccgccgactagcatggacactcgtcgcgagagcaacatcgcacgatgcctgggatgcaactttttcccggaggagaaaaagaagcagaagagggccaagaagaagtacagaggcgtgaggcagaggccctgnggaaagtgggccgcggagattcgtgaccctcgtcgtgctgcccgggtctggctcggcacgttcggaaccgccgaagatgccc

SEQ ID NO: 19609 - DNA, 446 bp, Glycine max
ctttgcttccccttagtcaaacaaagtaacacaccatccatcctctctctcttgtgttcttctgttctctagtttcctgctcttgtttcttagaatccgtacggtctaatcaacacaacaaaatggatgcaattagttgcctggatgagagcaccaccaccgagtcactctccataagtcaggcgaagccttcttcgacgattatgtcgtccgagaaggcttctccttccccgccgccgccgaacaggctgtgccgcgtcggtagcggtgctagcgcagtcgtggattccgacggcggcggcgggggtggcagcaccgaggtggagtcgcggaagctcccctcgtccaagtataagggcgtcgtgccccagcccaacggccgctggggctcgcagatttacgagaagcaccagcgcgtgtggctgggaacgttcaacgaggaagac

SEQ ID NO: 19610 - DNA, 446 bp, Glycine max
cccacgcgtccgcccacgcgtccgcccattctccccacgctataaaatccccccactccttcttgcttcacacaacatatctttctcttgttccttctccttgtgatcttcttcaaccttcagagtgagaaaacacattcagaaaccacgtttctctcttcttcttcttcttcttctttttcttctctcgaggtcattattaagtattcaccatggaggcaccatctcccaccaaacccaacgacccaacaaaaccttccaacacttccaccacccttagtctggaggccggcccggcccaagcgagcccactccgaaaaatgtttgccgtggcgtccatcgccgccggcatacagttcgggtgggctctccagctctctcttctaaccccctacgttcagcttttaggagtcccccacgcggcggcctccttcatctggctctgc

SEQ ID NO: 19611 - DNA, 444 bp, Glycine max
cccacgcgtccgaactacatggtctcttgaaaacgacccgtttcctccctcgcacggatccacccgaaatctgagattccttcgaattgttaactctctttcagtttcaagttggaaactttttcgattttcgctttctggaggtgtgaattgttgtttgaaagtcacaagcaatggtgaaggacactgcgtattatgacatattaggtgtcaattatgatgcatctgctgcagagatcaagaaagcttattatgtcaaggctagaattgttcaccccgataaaaatcctgaggatcctaaggccgcagaaaactttcagaaacttggtgaggcttaccaggttttaagtgatcctgggaagcgtgcggcatatgatgagcatggaaaggagggagtaccacaagattccatgatggaccctacaactgtatttggaatgattt

SEQ ID NO: 19612 - DNA, 439 bp, Glycine max
  modified_base (27)..(27): a, c, g, t, unknown, or other
  modified_base (43)..(43): a, c, g, t, unknown, or other
gcgtgcgagaacacaaaaccatggagncaccaattgcacactnaggaactgcaaacctctaattatcagggtcattgggggcttcagcttcacttgaagaaaactttgtccaatgtctcagcttctattcagacaaagcagctccattttatgcatcaatttacactccacaaaatgcatcattcaacaagatccttgaatcctctgcacagaacctaaggtatttggtgccttcagcgccaaaacctgagcttatattcacacccttgactgattcccatgtccaagtggcagtgacttgctcaaagaagcttggtattcatctgagaattcggagtggtggccatgactatgaaggactctcatatgtttctgaagttgagtccccttttcataattgttgatttggccaagcttcgtgccatcgacgttgatatag

SEQ ID NO: 19613 - DNA, 400 bp, Glycine max
ctcgcctataaaatgtccgccactgcttcactctgcgccacttccagaacaactttctcatcatcgaagcccgtcgcgagaagaagctgcttcgtcgcggttcccaaaatcgcgtttcccaagctccgtttcaaacccgtcgctatggctacgctcggcgctcgcatggtggccgccgcacccaccgtcactccgccggcctcgctcgacttcgaaacctccgttttcaagaaggagaagattaacctcgctggacacgacgagtacatcgtgaaaggagggagggatttgttccctctgttgcagggtgctttcaaggggattaagcagattggcgtcattggatggggttcgcagggacctgctcaggcacagaatttgcgggactcgcttgctgatg

SEQ ID NO: 19614 - DNA, 454 bp, Glycine max
cgaagcagctagccatggcttctcactctcatagttgcatcattttggctttgttcattgctatttccttctcaagcatggacatggcattagcaacacgccatctctcacctttcccaccactgccacctttgccagcaaccccaccattattgccaccattgccacctgtgccaacagtcccaatcccaattacactgccacctttgccaccaactccaccattgccaccaactccacctttgcctaggattacaacctagctcctgagcacttgcagttggatacatacataacatataataagtaaacaaataaaagcactaatctcttctctccatttcgattcagttctgctttcctgcatgcatgccgtttcctgctttcaataagtgatatatacatatacacacacatatgctgttcttttcttttcaatcttccgcgtattttc

SEQ ID NO: 19615 - DNA, 454 bp, Glycine max
cccacgcgtccgggcatttgtccactggtatgtgggtgaaggaatggaagaaggtgaattctctgaagcccgggaggatcttgctgcccttgaaaaggactacgaagaggttggagcagaaggcgaagaagaagaagaagaacccgatgattactcaaagtagtcaatcattcatcaccagctaccttacctacatctaccttctttcctctgtctaatgtctatccttgtccattgaattttaagcatctttctgttgtgtgctagctctgttagtgttgggtgagataattgctttcctcatgagaagcagtggtttatttgtcagtttgaatcacttttaagtttcagtgaaagagcaaaataaaggatagcgtaggagtgctgcagtttccattacttaaaagaaatcagatgtttattttatcttttgcaataatatgtttaaaatata

SEQ ID NO: 19616 - DNA, 393 bp, Glycine max
agagactgcagaaatgaaccccactaatggtattgaggtagaaaagattccaggaaatcatgcgcaaggagaaactagtgattgaggatgatggtaaattcaatcaagaagaagcaaaagggatcgaagaagcaacaaaaacactgttactaaatactgcaacagagagcctaacagaggaagaagtccaggaaatattgcccactcctgcaattgtccaacgtgacacaaagcaaatcatgcaacaacaaacacttcacaatgatgaatcagaagcaattgataaggaaaagagctgcataccagaaaatgaacttgacagaaagttcattgcttgtgaggaatctgatcaacctgaaaccaaggccaatgctggcatagttaaagaagaac

SEQ ID NO: 19617 - DNA, 254 bp, Glycine max
atacactgtacaaattatccttattaatggtattgaggtagaaaagattccacgagattttgggaaggataaactagtcattgaagatcattgtaaattcaatcaagaataagctaaaggtatcgaataagcaacaaaaacactcaccacaatcacttctgcatagatcctaacatatgaataagtctcccatatattgcccactcccgcacttgtccaacgtgtcataaatcccatcatgctacaccaaacac

SEQ ID NO: 19618 - DNA, 449 bp, Glycine max
catccctttcatttcgatctccattctccctgacactcctctctctgtatccgagttctagggttttggggatagaaagcataaatcacgtacacgacgtcgtttgatttgagggcggcgcaagatgccggggcaccgctcgaagtcggagaagcacgacgtcgacggcggcggcggtgagaagcagctccggcgggacccctacgaggtcctcggcgtctcgcgcaactccacggatcaggaaatcaaaaccgcgtaccgcaaaatggcgctcaaatatcatccggacaagaatgctaatgatcctaaagcagctgatatgtttaaagaggttaccttctcttataatatcctgtcagatcctgataaacggcgtcaatacgactcagctggctttgaggctgttgaatcagacaaccaagagttggagttagatctttcaagtctgg

SEQ ID NO: 19619 - DNA, 453 bp, Glycine max
  modified_base (428)..(428): a, c, g, t, unknown, or other
ggcgtcgagaccagaggtgattgcgccgcctgagattttctacgacgatgccgaagctcgcaagtacacctcttcttcccgtattgttcaaattcaggcgacgctgtcagagagagctcttgaactacttgctttgcctgatgacggcgttcctaaattactccttgatatcggttgtggatcgggacttagcggtgagacaatctcggagaatggacaccattggattgggcttgatatttcagcatcaatgcttaatgttgcggtggagcgagaggttgagggtgaccttttacttggtgacatgggccagggtataggaattcgtcctggagttatggatggggccatcagtatatctgctgttcagtggttatgcaatgctgataaatcctctcacaaccctcgattaagattgaaggcctttnttacatctctatataaatgcttatc

SEQ ID NO: 19620 - DNA, 426 bp, Glycine max
gccaaccgcagctcctacagcaatcgcccctttctctccctccgccgcgccaaacagttcctcggcgccgccaagttcaagctcttcttagttctttttgctctctccatcgtcgtttttgtctcctccagactcagttcgtggatgggatggaaccctcaccactcctcttcggtttcctccacttcaaggggtggctatactgtgcttataaacacttggaggcataaatctcttctgaaacaaactgttgctcattatgcatcctgtcgaagtgctgaagcaatacatgtggtgtggagtgaaagtgaacaaccatccgagaggcttaaaacatatctgaataagattgtggttttgaagtctcagaaagctcataaaccaaactttagatttgacatcaatgcagatggtgagccaaacagc

SEQ ID NO: 19621 - DNA, 425 bp, Glycine max
cccgcggtcgccccccaaagctcaaatcccagcccaacactgagctcacatggcctgcgctagccctcaacgacaaccctgctcttcaatccgcaaaaagaggcccgggtcgtcccaaaaagattgcaggacccgtaggtgtgagcccgggcccgatggtgccgggcagaaggggtcgtccacctgggaccgggagatctaagctgcccaagaggcctggccgtcctcccaagcccaaatccgtgtcggcgatctccagtgggctcaaacgacgtccgggccgcccacccaaagccgaatccaacgtaaacgtcatccccttcgcagcccctgttgctcccggcctgcccacagtgcagcccatcgttcctactgcttccgtgcccaatggatctcccaggcccagaggaaggcccaaaaagatt

SEQ ID NO: 19622 - DNA, 451 bp, Glycine max
tcgcccacgcgtccgcccacgcgtccgggacttggcctggcaatttgtaggaggttcgtaaatcttatggaagggcatatttgggttgaaagcgaaggtattggtaaaggatgtacagtcacttttattgtaaaacttggaatcccagaccgatcaaatgaatttaagctaccttttgtacctaaagtaccaggaaatcatggatctacaaactttgctgggctcaaagttcttgtcatggatgacaatggggttagcaggacagtaacaaaaggacttcttatgcatttaggatgtgatgtaacaactgcaagctcaagtgaagaatgtctgcgtgttgtttctctggaacatgaagtggtcttcatggatgtttgtacagggttagatggttatgaacttgcagtccgtatacatgagaagtttacgaagcatcaagatagaccactga

SEQ ID NO: 19623 - DNA, 403 bp, Glycine max
caacgaaagagaaaatgagtacgtgtgtatcttgtggtaacgggtctgcgctgattcacaataagaattaggggatatcaccaattcataatgcattaaaggtgaggggcaacaatagaagttgtggcttgcgtgttcaggtttctatggtggactcttcctccgctgatttcaccagacgcatcgaacgagcttggtcaatttctaagcaaccaaggccaatcgtgtgttcgtcttgcgactcaaaagggcatattgaatgtaaatggtgtgcgggtactggtttttttattcttggtgataacatgctttgtgaagtcccatccagaaacactacctgcattatttgcactggaaagggatcgatgtgctgttctgattgtcaaggaacaggctttcatgc

SEQ ID NO: 19624 - DNA, 386 bp, Glycine max
ctttatctagagatgcgaccaaagccaaggcccgttccgacagacaagagcgacagaattttaattgattgcaaaatagaaaaaaaagaaagtgaagcgtgttagttagttagtagttggtgcgctgcgttgtgagttcgaaagtgaatctaggagaagaaggagtaaacaacacaaccaacaaacatcttcgatcttattctagggtttcaattgtgatgtgaatctaatgaatgtaacgggaaaagactgtagatagatgagctccagcaatttgacggggtttgtgttggccgtgctttccagcgctttcattggctccagcttcatcatcaagaaaaagggtctccaactcgccagtgccaatggcccacgtgccagtgttg

SEQ ID NO: 19625 - DNA, 455 bp, Glycine max
cccacgcgtccgctgtaattcatcagaggattcaaggcaactctgacatgttacctgagcatcaagtaaccagtttaggtagacattttgaaagtgaccatgattcagcaccttctcctgtcaatgcgtctgttgacaaaaatatgaaagattccaaagaactggttactgttcctgaaatggatgaggaactagctatggtacctgtacaccagaagccaaagcgatctgagatcgtccagcgtcgaatacgcaggcctttttctgtagatgaagtagaagcactggttcaagcagttgaaaaactaggaactggaaggtggcgtgatgttaagctttgtgcttttgataatgcaaagcatcggacatatgtggatttgaaggataaatggaaaacactggtgcacacggcaagaatatcccctcagcaaaggaggggtgaacctgttccccaa

SEQ ID NO: 19626 - DNA, 445 bp, Glycine max
cccacgcgtccgctctccttcttttctcttctttcttcttcttccatctctttttttctgcttaaggtctacaaaagttctcttcttcttctcctcctattgaactttggtcatcacacgagaaaacccacgtctggatcttctggtgtaaaggccattagaagccttttagaaattttcaaattgagttggtgtatagtgttgaagggggtgaaatttggagcccagtttgttacttcatttgaaaggtcatagtttgaaccctctttttctggagatttacctgggaaaagatgatgatgtttgaagatatgggattctgtggcgatttggatatgttatgtggttctcttggggatggggatattgctgtgagacaaactgaaccggatcctgtagttgaggatgactacagtgatgaagaaattgatgtggatgaactcga

SEQ ID NO: 19627 - DNA, 444 bp, Glycine max
agaaaagttagggttcacaacttttccttttccttttgcttgcgaatctgaatcaaataatcaatcatccattcattattcatcatgtcgtcggcgaagaaaatcacgctgaagagttcggacggcgaggctttcgaggtggaggaggcggtggcgctggagtcgcagacgataaagcacatgatcgaggacgactgcgccgacagcggcatccctctgccgaacgtgacgagcaagatcctggcgaaggttatcgagtactgcaagaagcacgtcgaggccgcgaatcccgaagacaaaccctccgaggacgatctcaaggcctgggacgctgaattcgtcaaggtcgaccaggccacgctcttcgatctcatcctggctgctaactacttgaacatcaagagcctgctggaccttacatgtcaaactgtagccgacatgatc

SEQ ID NO: 19628 - DNA, 420 bp, Glycine max
ggtacttgctcacagatatatttttttttttgtctccatcattttctcgagagctttcagtttctgtggttcatctttcttcttcttaatctttccccccctctctgtaacatcccgcttctctgaatccctttctgctaatcatctgtctttcaagctaagattttctggtttgtcttttaattcaccaaaaagcaaacttagaaggatttttcgaaagccaggtgttttcagaaacgagatccaggttttattgtcgaatttcgctagtcatattaatatttcatcatttttttttcctttgaaaccagccaagagggttatttttgatccctcaaagctaatttctcattttcttttccgggactgaagaggttgtctatttgaaatctccttcatcctttcctttcttgttgaaaa

SEQ ID NO: 19629 - DNA, 456 bp, Glycine max
cccacgcgtccggaaaaagaaaaaagcgatcatagtttcacttcggccttatccagtttagggtttcggttctctaccctatctttcacgtatcgaaaccttaaatttacgatcaggtctgagcaatctggttggtagaacctttggtcttagtgagtcaagttttatgtctgaattagacgatcaaattcctactgccttcgatccttttgctgatgcaaatgctgatgactcgggtgctgggtcaaaggagtatgtgcatattcgtgtacagcagcgaaatggtaggaaaagcctgacaaccgttcagggattgaaaaaggaattcagctataacaagatacttaaagacgtcaagaaagagttctgttgcaatggaacagttgttcaggacccagaactaggacaggttattcaacttcaaggtgatcagaggaagaatgtttctaccttcct

SEQ ID NO: 19630 - DNA, 455 bp, Glycine max
ctgaccgggaaaagaaaaaccagctttcttcaagcacctagatttcctctctctctaaatggcgttctcttcttttctcggcagagtcctcttcgcctccgttttcatcctctccgcttaccaagaatttaattcttatggagttgatgggggacccgcagcaaaagcactcagaccgaagtttgatgcctttgcacatcaagtacattctaaagttggctttcaacttccagatattgatatgaaatttttagtggctggggctattgctctcaagggccttggagggattcttttcatactcagcagctcttttggagctttccttttgcttttgcatcaagtgatcactactccaatactgtatgatttctacaattatcacagtgaggacaaagaatttatccaacttttcatcaaatttactcagaatatggctctcttcggggcattgg

SEQ ID NO: 19631 - DNA, 457 bp, Glycine max
ctctagtcgacttgggtctcgcccttcttcgtcttctagtcacagtcacagggtcaaccgcttcagattatcgtctcttctatgtggcacctccacctctcgctccgttcatcagatggaagaactttcagctgaacttcgggttgattcagcaagggattttgatggtgaaattcagaaagacactgaggaatcgtctttatcatatacagaagctagaattagctccagtcgccctgctgaaactgcaaccctatctgatatgagaactgagttccatgggaatactagtgttgaaggttcttctagaaacgttgcaacaaatagtcagaggaactgcttgtctgaacatgaggagcttgtccctccttatcaggtaagtgctggtcatactggtcatgaatcatatagtgatagtagcaacacagctagtacttcatttgtagaacagcagtct

SEQ ID NO: 19632 - DNA, 451 bp, Glycine max
ctcaagcttcttgaaagtcagttggagcctttaaccgagcaacaattgatgggcatctacaacttgcagcagtcatcccagcaggctgaagatgctctttcccaagggatggatgcattgcagcaatcactgtctgagacattggctaatggttcacccagcacatcaggctcctcgggaaatgtggcaagttacatggggcaaatggctatggccatgggaaagcttggtactcttgatgggtttcttcgccaggctgacaatctgcggcagcagacattacaacaaatgcttcgaatattaacgaccaggcaatcagctcgagctcttctcgccatcagtgattatttctcacggctgcgagctctgagttctttgtggcttgctaggccaagggagtgaagcatttcacagctccattagtggacttctttcatacctgaccccctta

SEQ ID NO: 19633 - DNA, 455 bp, Glycine max
cggaatcaaaagcaagtgctaagaagttccgtgttcctattctcaaacctgtagcaccaaacccaagttgtcatccaagttttataatactacatatattattattatacgatacataacaatagtattaatattgttgtgattgtgtgtgatttttggtgtcgtccttttttcttatattaaggtggtacggagcttatatgtgttgattcaattcgtcgacaagaaaccttagtttgatatttgattggttctgtggagagttttcctttggtgtggttggtttgtgctgtttttggttgggaataggaatggctaatgaaggaaagaaaagcaataacttctattcgatcttgggcttgagcaaggagtgcactgaattggagctaaagaatgcttataggaaacttgcaaagaaatggcacccagatcgttggtcagccaccgggaattta

SEQ ID NO: 19634 - DNA, 446 bp, Glycine max
caaaaactaagttcatttcttgtgctttgctttattcctcaaaaccaaacatgtcgaacacatgcggcaactgtgactgcgctgacaagactaactgcaccaagggaaacagctatggtgttatagtagagactgagaagagctacatcgagactgttgacatggatgttccagcagctgagcatgatgggaagtgcaagtgtggcactaactgcacttgcacggactgcacttgtggccattaaggaatatgtatgaaaatgtaattgccatgtgtttggcaatacaaatctccaaataatgtaatcttcgtatgaataaatgtgtgctgttatcctacttcagggtctgtgtagtcatgcagtctgaatcatgtccagttcctgtcatagttattaacagccatggttgtggcattctatatatggttttatagtagataaaaa

SEQ ID NO: 19635 - DNA, 442 bp, Glycine max
cacgattctgtccactctcatgtgtgcccctcgttctgtttattcctgggacattgtcgtccagcgtgtcggaaacaagcttttctttgataagcgcgatgggtcgcagctcgatttgctctctgttcatgaaacctcgcaggagccattgcctgagtcgaaggatgatattaactctgcccattcgttgagcgttgaggctgcttatatcaaccagaatttctctcagcaggtgcttattagggatgggaataaggttacttttgatgaggctaacccttttgctaatgaaggtgaggaggttgcttctgtcgcttataggtataggaggtggaagcttgatgatgatatgtatcttgttgcgaggtgtgaggttcatagtgttgttgacgtgaacaagcagaggtcgttccttactttgaatgcgttgaatgagtttgat

SEQ ID NO: 19636 - DNA, 383 bp, Glycine max
attttcttactttcctctcacgctctgccacaaaactccgtctccgcaataacggaataaaaaaacaagtttaattactattatggcgccgagggatcataagacaagcaacgctaaggctaacggtaacggtaacagcggggtgaaggaggtgcattttcgtggagtgagaaagaggccgtgggggagatacgccgcggagatcagagatcccggcaagaagagccgcgtctggctcggaaccttcgacacggcggaggaggcagcgcgtgcctacgacgccgcagcacgagagtttcgcggccctaaggccaagacaaacttccctctccctttggaaaatgttaagaactcgagccccagccagagcagcaccgtcgagt

SEQ ID NO: 19637 - DNA, 455 bp, Glycine max
cccacgcgtccgcaagctaagatctgggctttggcttaaaggaatattccgtggggtgatcatagtttttaccctgttcttatgatgggtgactcagaggtggcaaagttcggcttaaaagtcgggaagaatgagaaaaatgggttcccaaggggactagatcctgcaatatccaagttttttgtgcagctccaaagtgttgttaagtctcgacttagtagattagcaaaacaggatggaatgagtttgatgagttctgtccaaagaaaaggggataagtctttcagttactctgaagctgaactaaatgagcaactgcaagcatggagagaaaatccatcttgggttgacaagcctccactaataaaggtcactgctcccaaaggttctctttgcaaccttgatgtagaagttgatgttggcctaccccctgatgcagtatataatatagtgat

SEQ ID NO: 19638 - DNA, 187 bp, Glycine max
ctgaagccttctcttaccttgaaacaaaccgagccactggaaaggttgttatacatccaatcccttgaatcaaataaaagggataggcaatttttctgtgtgtctagtaaacttcacattctgtgcaaatcagagtttagataaaaactcaaaaaaatataatgaacttcatttttacattcttagt

SEQ ID NO: 19639 - DNA, 450 bp, Glycine max
agacttttcctccttctggagctcagggcaagatcaccgctgcttccgggcctcctcgtgacgctgatgattcattttcaaaacctgtatctggttctgatgaaccgcagcagggtggttggtttcagacttttacaattgctgcttacaaaccatactttgatgttgacacttcagatgttctagagaggattatcgactcactatttccatttagaggatctttcaatgaaaaaactgctaccaaccctgatttgtatggtccattctggatttgcactaccttgatatttgtagcggcatctattggcacctttgtgacatatatagcgcacaagctaaagagcaaagaatgggattatgacataaatctggtgacttggtctgctggtttggtttatggctatgttaccattggtcctctttgcctgtatgtaatcctcaaatatt

SEQ ID NO: 19640 - DNA, 447 bp, Glycine max
gtctctgccgtcacaaaaaagagaaaagtctccgtgtcgtcgtgactaacagtgtgagtgagtgtttgtgtaaatcggggaaattgttgggctattcaagagatcggcagcggcgtcatgggtggagatggagccacggcaaacgcggaggcgcagtacgccacggcgaagatatcggtgtggtgggacatcgagaactgccacgtccccaagggttcggatccgcacgcgatcgcgcagaacatcagttccgccctcgttcgcatgaactactgcggccccgtctccatctccgcctacggcgacaccactcgcatccccgcctctgtgcagcacgcgctctccagcaccggtatctccctcaaccacgtccccgccggcgtgaaagacgcaagtgacaagaagattcttgttgatatgctgttctgggcagtggacaatcctgca

SEQ ID NO: 19641 - DNA, 449 bp, Glycine max
gatcaagaggtggatgaggaggaagcctccctctttgacatgctctggttactacttgcaagtgttgtatttgtgccaatatttcaaaagattcctggaggcagtcctgttcttggctacttggctgctggtatcttgattgggccttatggtctctccatcattcgtcatgttcatggaacaaaagcaatagccgagtttggagttgttttcctgttattcaatattggcctggagctctctgttgaaaggcttagttcaatgaagaaatatgtctttggattaggctctgctcaggttttggtgactgctgtagttgttggcttggtggctcattatatttgtggtcaagctggccctgctgctattgtcattgggaatggcttggcattatcatcaactgctgttgttctgcaggttttacaggagagaggtgagagcacatcacg

SEQ ID NO: 19642 - DNA, 456 bp, Glycine max
atttctaactaattattgtgcttattattattgttgagaaagaaaagaatggcaaagttaataaaattctttgagttgaacacaggggccaagattccttctgttgggttaggcacttggcaagctgagcctggtgttgtagccaaagctgtcaccacagccattctggttggatacaggcatattgattgtgctcaagcgtataacaatcaagcagagattggttctgctcttaagaagctttttgatgatggtgtggtgaagcgtgaggacttatggatcacctccaaactctggtgttcagatcatgcttcagaagatgtgcccaaagcattggataaaacattgcaggatttgcaacttgattaccttgacctctatctgatccactggccagtgcgcatgaaaagcggatcagttggattcaagaaggaatatctcgatcaaccggacatt

SEQ ID NO: 19643 - DNA, 456 bp, Glycine max
gcaaacatcaaccagcgctctatggaaggaacaagggacaccgagattgcaatgggtgcgtaccaacctcatcatacctgggcaagaagccagtatcatcctcgtgggcaaatccatggatataggatgtcactttgggctgaacatacgggtacgattgaagactgcttcttacaaccagagagccttgaatgtgttagtaggattagaacaatgggtgagctgaactggaagcaatttgcatcaaatgatgtaacagaaatgacagggcatctgctcaagtacccggtagaagtcgatcgaaagggtaaggtaagatccctcccgggccacgaagagtttccggatgtgggaggaaagattgtaggatcattcattgccattcaggagaatctaaccatttgattacttttttacattcactttgctggccattaggataggaataggatgaat

SEQ ID NO: 19644 - DNA, 451 bp, Glycine max
ctctaatagaaatatttctggacgtgaatgaaatatgatccagtatttcttataaacaaccttttattatacccaccactgcctccatttttgtgccttttaaatcagtgtaacaaaactgtggaccttcttgttatactctgttggccttgacaaccatctacaagttttcaaggaaaagattcactatattgccctatctcatgccaatttctgaatcattgtgtggctattttttatgtgcatgatgtttgcataaagagatataatatgattctaagctgcatgagtctattatgtctacaatatcttctttttgcaggatggagaggcttatgcttacttgcttaatgctcttgccccagaagtggcaggcccatctgccctaaacacaagtgatccaacagaaagggcaaacatggttcttgagcaggcagagagattagattgc

SEQ ID NO: 19645 - DNA, 449 bp, Glycine max
gttactcaccaggaaactcttgagtcaaaggttaacgagtccaaggccatggttaaatttcaacttaagaaggtgctctgcatgggagtagctgtggggaatgttagtatggaggaaaagcaaatcttccaaaatgttcaactgagtgttaatttccttgtctctttgttgaaaaagaactggcaaaatgtgagtagtagtccactatcaatattttgttaagtcattgcttctggtgccttcttttttgatgtgattttcttaaagttatatgttcttgtttctgttttattattggtgtaattaaaaagctctgctactataagaatagtctttgatatcagatgtggcatggattgaatccatgcttatcacaggttttatcttctgcttatatggttatgtagatgatgacaagattcttttgtacatgtctcttctttctgttt

SEQ ID NO: 19646 - DNA, 447 bp, Glycine max
  modified_base (415)..(415): a, c, g, t, unknown, or other
ggtgaagtcaacaaagaaagaaaaaaagctttctccgagaaagcttctgttcacgtcagggtccggggtaggcttcttcattgagattgggttggtgttcagtgtgaatgcatttccagtgagataagagaaaaggaacgaggggaagaagcgacttatattaagaaatattaatatacttaatttaatattaatgttcgggtacccccctccggctcgtagttgagaagagctttcgtttaggaaagggctaaatgggtgcgatccctctcgttgagagtcaagggtctcctggagtagaaggcacatcctggatctattaagccggcaagggttcagcattggctttcacgaccgcaaaggggccatctctcagtcggagtagataagatagatatacttaatttaatatctnttattatatattttaatataataaagaaaatc

SEQ ID NO: 19647 - DNA, 423 bp, Glycine max
caaacccaaccctagattgagagaaaaatccccaaaaacaaaacacacatctctttcattctctccctcaccaaaccctagattgaaagaaaccctaacacaccatgggaacacccgagacatcgcgcgaaccctgccccgatcgcatcctcgacgacataggcggcgccttcggcatgggagcggtgggtggctccgccttccattttctcaagggtctctacaattcccccaagggcgatcgcttcgtcggcgccacccaggccgtgcgcctcaacgccccccgcgtcggcggcagcttcgccgtctggggcggcctcttctccgccttcgactgcaccatggtctacgcgcgccagaaggaggacccctggaactccatcgtcgccggcgccgccaccggcggctttctctccatgcgcc

SEQ ID NO: 19648 - DNA, 453 bp, Glycine max
cttttctctctctttctctcaggctcagctctaaaaacttgtcttcaatattctgtttttcttatcagtctttggttttctagatcagatggaggaaagcaagaaaaacccttctcaacttaacagattccaggatgatggaatgcacgatcttgacatagttgaatggaaaaagaaaagaaaattacagagtgatcagttggatttgattagacctaaacataaatgctgggttggaagtttctcctctgaacatgcttcagtgtttgataaaaatccagttttagagagcatgcacaaccacacagttgaaagctccaaacatgaatctgccaaagacagcaatagttttatggaagactgtgatactgccatgtctgtaaatgaagaagccaaacacgagacagattgtggaagttcatacttatatgtaaatagggtaagctatatcga

SEQ ID NO: 19649 - DNA, 453 bp, Glycine max
ctcagaaacctagcatctagccaagacaatgcaaacaaatgggtgcaagacaacatcaaaaactatgccaacaatgtcagattcagatacgtttcagtgggaaatgaagtgaaacccgaacactcatttgcacaatttctagtgcctgcattggaaaacattcagagggccatttctaatgctggccttggaaaccaagtaaaagtttccactgccattgatactggtgccttggcagaatcattcccaccatcaaagggttccttcaaatctgattatagaggagcatatcttgatggtgtcatcagatttctagtgaacaataatgccccattaatggttaatgtgtactcttacttcgcttacactgcaaaccctaaggacattagtcttgactatgcactttttaggtctccttcggtggtagtgcaagatggttcacttggttaccgt

SEQ ID NO: 19650 - DNA, 318 bp, Glycine max
  modified_base (265)..(265): a, c, g, t, unknown, or other
aaaaataatactatatataacatgttaattgcttaatatgtgctttaagagtaaagaataacatcgtgaaatcaaattacccctttttcaatacgtgttgaatcatcgatcttggtttgtaatttggttgtatattcacaaaattaataagtatattgtgatgtgattaattcccttctctgttatggtgtacttgccttccctgtattgtccatctccatcgtctgtctattaataagaattcttatgtgatattttcatttcncaaaaaaaaaaataaaaaaacaaataaagatagaatcaaaaaatttaaagata

SEQ ID NO: 19651 - DNA, 448 bp, Glycine max
  modified_base (417)..(417): a, c, g, t, unknown, or other
cccacgcgtccggacaaatcctagagtttctcctttggttgaaagagagggacctgtgagtgtcacaaacatgggagaggagaatgttaaacaaccgttgttggagaggaagtactacaaggactgcccaggttgtaaagtggatcaagccaaagagttgagtgagggaaagggtgtacctgttaaaaatctttttatcatgtggatggtggtgctgtgtgctgcactgcctatatcatctctctttccattcctctatttcatggtaagggatttcaatattgcgaaaacagaagctgatattagttcttatgctggttatgttggctcttcattcatgcttggcagatgtttgacatctgtattatggggaattgtagccgatcgctatggccgaaaacctgttatagttatggngattattgcagttgtcattttcaacacatta

SEQ ID NO: 19652 - DNA, 452 bp, Glycine max
cccacgcgtccgcggacgcgtgggctgcaccatcgtcctgcatgtcagaggtccagagggtgaggttatcacacacactttctctctctctctctctcacccagatcttgtagcaatggcgagcgctcccactccacgcgaagagttcgtgtacatggcgaagctggcggagcaggccgagcgctacgaggagatggtggagttcatggagaaggtctccgcctccgccgagagcgaggagctgaccgtggaggagcgtaacctcctctccgtcgcctacaagaacgtgatcggcgctcgccgcgcctcctggcgcatcatctcctcaatcgagcagaaggaggagagccgcggcaacgaggaccacgtcgccgtcatccgcgactaccgctccaagatcgaggccgagctctccaacatctgcgacggaattctcaaactcctcgacacgc

SEQ ID NO: 19653 - DNA, 445 bp, Glycine max
cccacgcgtccgcccacgcgtccgtaggcacccagagaggtattcaatatgaaaggaagggttgacgaaatttgcatcgatgagctgaaatatttaaaatcagttgtcaaagagacactaaggttacacccaccagctccacttttacttccaagagaatgtggacaggcatgtgagattaatgggtatcatataccagtcaaaagtaaggtaattgtgaatgcttgggcaattggaagagatccaaagtactggagtgaagcagagaggttttatccagagagattcattgatagctctattgactacaaagggactaattttgagtacattccatttggtgctggaagaagaatatgccctggcagcacttttggtttgatcaatgttgaggtggcacttgcatttttgttgtatcactttgattggaagcttccaaacggaa

SEQ ID NO: 19654 - DNA, 444 bp, Glycine max
ctttcttgtaacttcaacaaacggcagcttcttcaattcaagttctctctttttgtttatttcatttgtttattttctctctcttttctttttctatttgatttcattgtttgtgtgtctgttttccttatcattgtgtctctatgacagaacagaactctcttgggtgttggtgttggtgagggatctgaggcaaaggtgttgatgatatgggagcgtgtgtttcaactccacaagggtgcgtgggagggaggttgagctcttccaagaagaaaaccagaaagagaaggagagagggactcagaagaagagttacttctcggttgtgtaaggaatcatcggagaaagttgatgtggcagggttgcctgattgttcctttgctaaccccactttccaaggaagtattgaagaggcatggtttgattccattgcagtatttgact

SEQ ID NO: 19655 - DNA, 443 bp, Glycine max
cccacgcgtccggtggtggcaatgtgttaccaatatcatatcatatattctttcatcttcttgggttagggttctacacttgcaatctcctttcacacccacccacccttcaaccatttcaattccttccctcacccaaaccgcactatcgttcttcgacacggtcctgtttattaagcggtttggataaaagaatagaagcgtaaaatggccttcgtagcacatcaacctcagggtttgtttgtgacatcttcctcgaggcgtttgccatggagcaaaaggctgaagttgaagcagtgtttaacaaaacatcacatgattggaagaactgaccggcattgcctagtaaagtggaatgcttgtttaagtttagggcctccttgcttttgtgtatccaagttcaaacctttaaggatttcaggcttcaaaggcagcacccaaaa

SEQ ID NO: 19656 - DNA, 449 bp, Glycine max
gttgttgaggcggggctagataaatcaaagggaccattcgcttcatttattgtgcagaatggcaccctcagacggggagatatagtagtttgtggagaagcttttggaaaggtgcgggctttatttgatgatggtggaaagcgggttgatgaagctacaccctctatacctgtacaggttattggattgaataatgttccaattgctggtgatgaatttgaggttattgaatcccttgatactgcacgtgaaagggcagaaactcgtgctgagtcattgcgtaatgagcgtatttcagcaaaggcaggggatggaaaggtcaccctttcttctttagcttcagcagtttcgtcaggaaagctgtctggactagatttgcatcaactaaatattattttgaaggttgatcttcagggatctattgaagctgtcagaaaagctctggagat

SEQ ID NO: 19657 - DNA, 446 bp, Glycine max
cccacgcgtccgcccacgcgtccggaaattatcatgaatccaattatttctgctgcttctgttattgctgctgggttggccgtagggcttgcttctattggacctggggttggtcaaggcactgctgcagggcaagctgtagaagggattgcacgacaaccggaggcagagggaaaaatacgaggtactttattgcttagtttggcttttatggaagctttaacaatttatggactggttgtagcattagcacttttatttgctaatccttttgtttaatcctaaaaaaatagaaatacatatccttttttccgtggacttgctttaccggtcttgctttttcgaattctatttatattaatatttcactcctataattctttatccgttcggacaagaacacaggggaaggactaattgaaaggtgaagaattcacatactgatt

SEQ ID NO: 19658 - DNA, 332 bp, Glycine max
cccacgcgtccggaattcacggataatcccttccttaacagtgatcttgatgataacatgggttttggctggaaggcatgactaacacaatcttggacatgaaatcggcatatcatgtgttgatgaagtgtttatcttattatctttgtacaggacactttaaatagatgctgtttttttccttgtttttccctgttattttcttgatggaatttgtttggactcggactcggactcgagtaggtttttagagattttatttgagggtttttgtcctgcaagtgtaatctattggacaatttaatgaacagttagtttattatacggcactc

SEQ ID NO: 19659 - DNA, 205 bp, Glycine max
  modified_base (21)..(21): a, c, g, t, unknown, or other
gcgtacggcaaacatcaaccnacgcgtccggaatctcatgctgatacattcattaacacatatcttgctgcggactctgataatacctgtgaagcatcccataacacattcttgtacataaattcaggatattatgagctcatgtaccggttaacttattatatctattcgacactctctaaatagatactgaatacttccatgt

SEQ ID NO: 19660 - DNA, 449 bp, Glycine max
agggttttagcgcagcttcttctagatttaaggaagatgggtaaggaaaaggttcacatcagtattgtggttattggccatgttgactctgggaagtccactaccactggccacctgatctacaagcttggaggcattgacaagcgtgttattgagagatttgagaaggaagctgctgagatgaacaagaggtctttcaagtatgcctgggtgcttgataagcttaaggctgagcgtgaaagaggaatcacaattgatattgccttgtggaagtttgaaaccaccaagtactattgcacagtcattgatgcccctggacacagggatttcatcaagaacatgatcactgggacatcccaagctgactgtgctgttcttatcattgattccactactggtggttttgaagctggaatttcaaaggatggacagactcgtgaacatgctct

SEQ ID NO: 19661 - DNA, 286 bp, Glycine max
ccggtcgacccacgctccgccaacctcaaaacttcacatggaaggtgatacgtatttaacaacctaaataatagggaaaatcgggggaatctaaggcttagagggccccctccctcgaagacattctttctcttccctatacaaatttgatgtcatcctgaggctttccaggaaaatcacttcttgccatttattaacaattcatggccaacaattcttttgcgccttctaaaaacgtcgtgaagcacctccttgcatctcaataatatacaacagggctccactg

SEQ ID NO: 19662 - DNA, 238 bp, Glycine max
gctactcaacaggttgtgaatccggtgagaatgacacaaatcatgatacacatgatcatggacgtggctatggagcatgcttgagggcctgatgcatatacatattcatagaaagtcgatatgaaagagctgatatagaaactaccgtatatgtaactagctcatgtgagacaaactgcgatgcaaacatgatgacatgtgtgaagccacatacgaactcacttaccaaatttcttga

SEQ ID NO: 19663 - DNA, 432 bp, Glycine max
ctcaaatctgtgaagaaaatctcaatttctaaattgtaattcttagcactactgctagtagtagtaaaaaaaaacaattagaaagtagtagagtgtttttttttctttttttcgtttgttttacttttaagatgggtgagaagagcaacgttggcggcgacgcgattaacacgacactgcttcacgggaagtacgagctgggccggctgttaggccacggaaccttcgcgaaggtgtaccacgcgcgccacctgaagacgggaaagagcgtggcgatgaaggtggtgggcaaagagaaggtggtgaaggtaggcatgatggagcatatcaagagagagatctcagccatgaacatggtgaagcacccaaacatcgtgcagcttcacgaggtcatggcgagcaagtccaagatctacatcgccatggagctcg

SEQ ID NO: 19664 - DNA, 439 bp, Glycine max
atttgtattggtttagaggaacatagtccgaggaacagccaacacatgtatggtagggagttccaatcgatgttggacggactcgacgaggaagggtgtgttgaagaaccggggtatcaatctgagaagaagcgtcgtctaagtgtggatcaagtgaaggctttggagaagaactttgaggttgaaaacaagcttgaacctgagaggaaggtgaagcttgcccaagaacttgggttgcaacctagacaggtagccgtatggttccaaaaccgtcgagccagatggaaaaccaaacaattggagagagattatggtgtactcaaagccaattatgatgctcttaagcttaactttgacaccctcgatcaggacaacgaagccttacgaaagcaggtagaataatactccttccaaaatataaacaaatttcgattattta

SEQ ID NO: 19665 - DNA, 448 bp, Glycine max
tcttaataaccgattcttcatctggttcttctcaatatgcatgtgcatcaccctcactgccctcacccttacctacttatatggtttgcaaatggtcaccccaaacgacgtttgggataattcattattcagcatggttggagtcgttatttttatttggatcatacttctaggaatcgtcgtaattttcctctccctacgcctacttttttggattgtcactaaatgccggaataaaaaacaaactgaacaaggagaagatcaaaaccaaagtaaacaagaagatccaaaacaaagtacaggagaagatgcaacctagttctgctcatccatcaggccatgcatcgcatatcaaccttccttacttgtggactattttacattgttaagcaatattattaatcatacataaataaacaaatttgtctttagtgtacgtctcatagca

SEQ ID NO: 19666 - DNA, 450 bp, Glycine max
cccacgcgtccggtttcgcttctcagacacgcggagaggccgttgatcgtgttcggaaaaggagctgcgtatgcacgtgcagagcacgtgctcacaaagctggtgaattccactgggattccttttctcccaactccgatggggaaaggaattttacctgacacccacgcacttgcggctactgcagcaaggtcactagcgattgggaagtgtgatgtggcgcttgtggtgggagcgagactcaactggcttctacacttcggtgaaccaccgaaatggtctaaggacgtgaaattcatcttggtggatgtgagcgaagaggagattgagctgaggaagcctcacttagggttaattggtgatgccaaacacgtgattgaggttttgaacaaggagattaaggacgatccgttttgcttggggagcacgcatccttgggtggaggcgatt

SEQ ID NO: 19667 - DNA, 431 bp, Glycine max
gtttcggagctatggcgcaagaagcagtctgatgttatgagattcttgcagcgggtgaggtgctgggagtaccgccagcaaccttctattgtccgtttgacaaggtctactcgcccagacaaggctcgccgcttgggtttcaaggctaagcagggttatgtgatttaccgtgttcgtgtacgaaggggtggccggaagagaccagttccaaaaggtattgtttatggtaagcccaccaaccaaggtgttactcaactgaaatttcagcgcagcaagaggtctgttgccgaggagcgagctggaaggaagttgggtggcctcagggttctcaattcatactgggtgaatgaggactcgacttacaaatattttgaggtcattctggtggatgttgcccacagcgctgttagaaatgatccaagaatcaactg

SEQ ID NO: 19668 - DNA, 447 bp, Glycine max
ggcttctcaaggccatggtttcataatgtgtctgcaatggaatggctttctttcaggttgaatttactttcaaattttgtttttgccttctcactggtcatgctagtgagcctccctgaaggaataatcaatccaagtattgccgggttggcagtaacatatgggatcaatctgaatgtgttgcaagcttcagttatatggaacatatgcaatgcagaaaacaagatgatatcagttgaaaggatccttcaatatacaaatataacaagtgaagcacctcttgtgattgaagacagcaggccgccaagcaactggccagatactggaacaatatgtttcaaaaatttgcagatacgttatgccgaacatctaccatctgtattgaaaaacatcacttgcacatttcctggaaggaagaaagttggtgttgtaggacgtaccggtagt

SEQ ID NO: 19669 - DNA, 445 bp, Glycine max
gtgaattacgtttgaaaatgcacggtcggcctcgcaaagcgttgaagcaagaagatgaagccgcttcagcagccaaagctgaaaagcttcgttcactccaagctcagttcctcgccaatcaccacaatcacatttatagcaaggaagcgttagatgtgagcgcgaagcttctagaagtgaatccagagtgctacacagcttggaattacagaaagctcgccgttcaacatcttctctctaactccgattccgatcctcactctatcttcgatgacgagctcaaactcgtggagattgcgctgaggaagaatttcaagtcttacggcgcgtggcatcatagaaaatgggtactcagcaaggggcattcgtccatagacaacgaaatgcgccttctgaatggttttcagaagatggatcctcggaattttcacgcctggaattaccg

SEQ ID NO: 19670 - DNA, 446 bp, Glycine max
ccctttctctctctcattctcttctccatcgcgcgtaagaaacacattttagttgctactaatgggaactgttgaagctgcaaacaaggatgcaaatggaagtctcctagagaaaaatccttcagttgtttttgtgttaggtggcccaggaagtggaaagggtacccaatgtgcaaatattgtccaaaattttgggtatactcatctcagcgctggtgatcttctgcgagcagaaatcaaatctggttctgaaaatggtacaatgattcagaatatgattaaagaaggaaaaattgttccctctgaggtaacaattaagctcttacaaaaagcaatgcaggaaagtggcaatgacaaatttcttattgatggttttccccgcaatgaggaaaaccgggcagcatttgagaaagtgacaggaatagagccagcatttgtcttatttt

SEQ ID NO: 19671 - DNA, 451 bp, Glycine max
aaaaattcttaaggatggccacagcagaagaaatttcaactttgaaactgttgcgccaatatctcttgggggatatttcagacccttttctcaccaatctcattccagtaaaacttgaagacccctcatcaggacttgatatgggttcaaacttctcagaacaaagcagcttctgcaagtttctggagtgctttgattttgaagcagaagtggtaggtctcacttctcatcataaggtccaaagctccattgcaacaagtccaccccagaatttcaattttccagaagaaccaatggtgtcaatgaaaaaggaagcaacatgttatgcaacaaggcattacagaggagtgaggagaaggccatgggggaagtttgcggcagagattcgcgaccccaaaaagaaagggagcagggtgtggcttggcacatttgacactgagattgatgctgc

SEQ ID NO: 19672 - DNA, 412 bp, Glycine max
  modified_base (10)..(10): a, c, g, t, unknown, or other
cccacgcgtncgcctagattcagccacagttggaaaaaaaaaaaaagttgttcgagatggcacgtacgaagcaaactgctcgtaagtccacaggaggaaaggcacctaggaagcagctcgcaaccaaggctgcacgtaagtctgcaccaactactggtggtgtgaagaagccacatcgttatcgtcctggtaccgttgctcttcgtgagattaggaaataccagaagagtaccgagcttttgatcaggaagctccccttccagaggctggttcgtgaaattgctcaggacttcaagactgatctgcgtttccagagccatgctgtgcttgcattgcaagaagctgctgaggcataccttgttggactctttgaggatactaatctgtgtgccattcacgctaagcgtgtaac

SEQ ID NO: 19673 - DNA, 442 bp, Glycine max
gcttgcttgagttgccaactttaagtttgtcaatttccgtgctgcttggttggttgcaattgcaagtgaacaattggctagtgtgtactagttttgaatcacaatggcagaggatgatggttacacgaaagatggaacagtcgattactgtggaaatccagctaataaaaaggaaactggaacctggaaagcctgcccctatatcttaggaaacgaatgttgtgagagattggcttattatgggatgagcacaaacctggtgctttatttcaagaaccggctaaatcagcatagtgctactgcttccaagaatgtctctaattggagtggaacttgctatatcacaccattgattggggcatatttggctgattcctaccttggaagatattggacaattgctgttttttcaataatttatgctattggaatgacactcttg

SEQ ID NO: 19674 - DNA, 442 bp, Glycine max
  modified_base (35)..(35): a, c, g, t, unknown, or other
  modified_base (45)..(45): a, c, g, t, unknown, or other
gggaagaagaactgagctacaagctaaggaaggancaaagagaanggctcaagcaacggcatcaaagactagcttacgtggttcctctcaggctgtgttggaaggtagccttggctccacacgcttgaatgtggggagtggaagcagggtggcctcagtcacacgtgcagggttcacagttagagcacagcaacaacaagtgaatggtggtgaggtacaaagtagccgtagggcagtgctttcacttgatgctgctggtttgaccactggctcttttgttcaagctgtgcttgctgatgccaaacctatcaaagttggaccacctcccccaccttctggcggattacctggaacattgaactcagatgaaccaagagaccttaagctgccattgaaagataggttcttccttcaaccattgtctccaactgatgctgcacaa

SEQ ID NO: 19675 - DNA, 443 bp, Glycine max
gccatgtcttcctctctcgctcttccttccactcccttcttcgccaatggaacaagaatcttcgctctcaagcactctctccctcgctctagggtttccatgagcgtctccgctggatctcaggcttccgttcaccaggctttgttcgccgattacaaggcctccacttcattcctcttcccgggccagggtgctcaagctgttggaatggggaaagaagctcaaaatgtgcctgctgctgcggttttgttcaacaaggcaaatgacattttggggtttgatcttcttgatatatgcatcaatgggccaaaagaaaagttagattccaccgttattagccagcctgctatttatgtcacaagtcttgctgctatagagctacttcgtgcacgtgaaggaggtcagcagattattgactcagttgatgttacatgtggtttaag

SEQ ID NO: 19676 - DNA, 459 bp, Glycine max
cccacgcgtccgcccacgcgtccggagaaattcctccatcatttaacaacctcacattcttgtcaaagttcagtgtggcacataatcgcttagagggaccaattccaactggagggcagtttttaagcttccctagttcaagttttgagggcaacctggggctttgtagggaaattgattctccttgcaaaattgtcaacaatacaagtcccaacaattcttctggttcttccaaaaaacgtggtagaagcaatgtccttggcataacaatcagtatagggatagggcttgcactgcttcttgcaattattctgctaaaaatgtcaaagagggatgatgataagcctatggataactttgatgaggaactcaatggtaggccacgcaggttatccgaagcacttgcttcctcaaagttggtgctttttcagaattcagattgcaaggatcttacagttg

SEQ ID NO: 19677 - DNA, 414 bp, Glycine max
aaaccaaaccccaaaacagcagagcaaccaacaaagtcataatagtattacccacccgccgcagactgaaaaaacaaaaccagatacaatcgcagaataataatgccagaacactcttcatagttgttcatacagtacatagttattctcacaccaaaaccacgtcaacaaattcaaaaactgtgtcaccttccttggtgtgttaatgttaatgcatcaccaccacaagccagagcttcacatcggaaaagagaacccccacctctcttccgatgacgccgccacttcaactccacaaacccatttctcaattcaggtttcaccttgctcgccccatccacctgcaccaaactcaccaaacacgccgttccaccatgaacgcttctgcaacaagagaataatacccatcatgac

SEQ ID NO: 19678 - DNA, 262 bp, Glycine max
cccacgcgtccgaacgattaaaaaagtattagcagttttccctcaccaaagaagaagaagcaaacaatgggcgatcagcttaccgatgaacagatctccgagttcaaggaagccttcagcttgttcgacaaggacggcgatggtttgttctctctctatctctctcacgttttgtgtatttgatttgatttgatttatgcgttcgcggtttttgcagatcggggttcctttttgtgataatggattacgaaaattagatgaa

SEQ ID NO: 19679 - DNA, 381 bp, Glycine max
cccacgcgtccggaaacttttaggcattacttggttgttcctgtggcgcacattcctactgttaaatatcttcagaggaaaactgacgactattctttgggtaaagaaactgatagctgttgtcacttcagattataagatttatgtatgcatatgttcaaatttctactgtttcaatctatttcatgattgcctattttatacagtgagtcacatgttagaggtggggaagacgttattaaatagagatgcacctcagtcccagcagtacaggtattttagttgcttacaacttacatgggcaatgcttattatttttgtttgtcgagtttcttgtgaaattagattattgacacatgatgttgggttcaattgcatttg

SEQ ID NO: 19680 - DNA, 394 bp, Glycine max
aaaataaccaaaccaatcaataatacatcatgatcataatcgaagctcccatcgccgtcagattccacgccaccgccgccattcgctccgccgccgcaccttcacctcgtactctctctctcacttctctttttttttcttcttccatttactttcgctgactcggcttagctttgattctgacttacggaatgtgatgttgtgagaagtttcggagattgtttcgaaacaaaaaacggcggcgttttgcagtgttcgaatggactaacagtagttgttgttgtgcattcgttcattgactagtctgcactttttggcagataataaccgttcaatgtggagcgccgatgacgtgaacggtgtgcgttatgccgcttcgtgcaggctcgcatgc

SEQ ID NO: 19681 - DNA, 302 bp, Glycine max
gcaaaacatgctgctggatttaaataagaaaatttcaattagacggatcagtaaaagcttggattttgacagtttgaatatcagattcagggagaactgcagattggccaagagtagaagtcattcatcaagtagaagcaaggagatatcttttaataggattttctctaagcttccagtcattgattttgatattgacaaagaaagagcattgaacgtgattgacagactggatgtggtcagataatttgaaagtttgcccgatcgcctttgaaatgaatggaaaggagaaataatacatg

SEQ ID NO: 19682 - DNA, 268 bp, Glycine max
aaaaccattcaattcaaagaagttggctgttttgtccgcacaccgccaccgcactttgtccgatcctcacagggttgcctccggcatgtctccggccgccggagtcagcgtccccctcctgggggattccaaaggaacgccgccgccggcttccgtccccggcgcggtgttcaacgtggccaccagcatagtcggcgccggaatcatgtcgattccggcgatcatgaaggttctcggcgtagttcccgctttcgcgatgattctcgtg

SEQ ID NO: 19683 - DNA, 422 bp, Glycine max
cccacgcgtccggaggaaagaaagatgttttttaacggatatgggtatcaagggacatcatcatttgagcagacatttcgatgttactctgcttcgtttattgaaaagcccgaaattgaaaatggtgataaaattataatgcctccttcagtccttgaccgtctagcatttctacgtatggattatccaatgatgtttgaactcagaaatggtgcttctgagagggtttctcattgtggggttctggagttcattgcagatgaaggaactatatatatgccatactggatgatgcagaatctgcttttgcaagaaggagacatcgtaagagtgaaattcgtatcacttccaaagggaacatatgttaaattacagccacacacaaaggacttttttgatatttccaatccaaaagctatctt

SEQ ID NO: 19684 - DNA, 434 bp, Glycine max
gtgatctccaaaatgcagagcacagttttctctctctccccttccctctctctcccaaaacaacctctcaaacgctctgtctctgtttccacttccaaactcaacgtcattctcactccctcttcattcccatgtcaaccatgttctcttgcttattctccatctttcaaactcgctccctcacactttcaccccttccatgccagagcaacctccgtgccggagagcagcgccggcaacactctgctcaatactctggaacttggagccctgtttgggctctggatcctcttcaacatctacttcaacatctacaacaaacaggtcttaaaggtctaccatttccctttaaccgtaagcacccttcagttcgctgtggggtctctcttcgtagcattcatgtggagtttcaatctctataagagacctaaagt

SEQ ID NO: 19685 - DNA, 442 bp, Glycine max
ctagtcccaaagagctaacaagagattcaagaccggcatggctaatgaagaggaacagaaaaaccacctcttcggcatcaaagatctcggtcacaagactctccttcagagtgatgcactctatcagtatatacttgaaaccagtgtctatccaagagagcacgagtgcttgaaagagatacgcaagatgactgcaaaacacccactgaacatcatggcaacaccagcagacgaaggacaacttctgagcatgcttgttaagctcacgaattcaaagaacgccttggaaattggtgtattcactggttactctctgctctccactgccctggctcttccccctgatggaaagatcttggctttggatgtgaatcgcgaatactatgagttaggattgccaataattcaaaaagctggagtggctcacaagattgatttcaga

SEQ ID NO: 19686 - DNA, 445 bp, Glycine max
ccattactagcacttctgattctcagatgcatagtggaggatttgaagccctgtataaaaaacccaagtcctcagatattgaaaataaagacactaataatgatgaagaattgccatctcttgagctcagtttaaagaggcttagaggagttgaagatgctggtattgcaattcaggatgacaggaatgttttaagacgttctgatcagtctgctttctcaaggtacaatgcagccttaaaccctaagaaatctcccactggatgtgttggaagcaattctcctcataataatagcttagaagttacaaagaaagattcatctcacgatattcaatctcattctagcggcaatcctcctaaccaaaactcaaatggtgctagcaataacattgatatgggttccactactaataatgcttacgctaaatctgcagttataagtga

SEQ ID NO: 19687 - DNA, 445 bp, Glycine max
  modified_base (400)..(400): a, c, g, t, unknown, or other
ggtggatagtggtagtcgtagtaggcatggaggaggaagcggaagaaacgaagagcgcagtgagaatattcgtcggaggattggcgggagccgtgagcgccgaagaccttcgaagcttattcgcgtctctgggctccgtccaatccgtccaaaccatccgaaccaaaggtcgcagcttcgcctacctcgacttcctatccgaccccaaatccctctccaagctcttcagcaagtataatgggtgtctgtggaagggtggaaggctgaggctggagaaggccaaagaagactatcttgtgcgtttgaagagagaatgggaacaaggcgctctagatgatgctactcaaaaaccacctgctgctgctattgaggaggaaattcccagcaccacacactcttncgagtcaaataccaaacacctcaatattttctttcccagattgag

SEQ ID NO: 19688 - DNA, 449 bp, Glycine max
  modified_base (403)..(403): a, c, g, t, unknown, or other
caaactccaacatggaagtggtgaaagtgggggtggaatattggggttggtaggtggtcttgcacaagagtttctcaagcaaaagcttgatgacaatgatgagggatatgcaaagcctgcattggagacaaaagtggaaagtaagcaagaggcatatgctggaccaaccaaacgtggccttccggatggtgggatattgatgagtggatgtcagaccgaccaaacttctgccgatgcaagtcctgcaggaagcgctgccagtgcttatggagcttttagcaatgcaatacaggctataattgaggagactgatggtgcaatcacaaaccaagaacttgttcaaagggcaagagagaagctgaagaactccggtttcactcaaaaaccgggactctattgcagngatcatcatgttgatgctccttttgtgtgttgatctgttctcatct

SEQ ID NO: 19689 - DNA, 443 bp, Glycine max
cgttctccctcttttctctcaccatcagaaagcgcttttttttttttttttttcttctacctccgtttctccgtctccacatttctccttcacgaactcccgatttttcttcctcttcaatctcgtccctctctgtctctccatccttaaatatacacaacatcttctaaggagaaaggggttccgaaagttacgataaaataaaaatggatccaaacgcggtgaagtccactctctccaatctggcgtttggaaacgtaatggcggcagctgcccgtgattatcagaaggaattgcatgctcaagagaagacacatgcatcaagttcagtacatcaggaggttgaccttgacgagttaatggatgatcctgagttggaaaaattgcatgcagataggattgcagctcttaagaaagaagcagagaaacgggaggaatggaag

SEQ ID NO: 19690 - DNA, 451 bp, Glycine max
cccacgcgtacgaatttttccatataaatatgcacatgcacaaacgcaggggtctcttcttcagcagatagattgtaacggagcatgtgctgcgaggtgccgtttatcatctcgtccacgcctctgccaaagagcttgtggaacttgttgtagacgctgtaactgcgtgccacctggcactgctggaaaccaagaagtgtgtccctgctatgcaagtttgactactcatggtggcaaacgcaagtgcccttagacttaattggaccactatcctatgcatgcctttgatttatattataaaataaaaataatactatatataacatgttaattgcttaatatgtgctttaagagtaaagaataacatcgtgaaatcaaattacccctttttcaatacgtgttgaatcatcgatcttggtttgtaatttggttgtatattcacaaaattaat

SEQ ID NO: 19691 - DNA, 421 bp, Glycine max
gaaccaacacaaagatggaatggaagggaataccgttcttgtgcaggttgatggatagatagggatgttggggggaataatagagcgggaaaataaaaagacaacatacataacgctctctcacagcggttgctttataccattgtctatatcataagacgggagttcgtctacactgatcacttgttagagcatgaattcacaatgcccataatttgttcactaaaaaacgatgaacgtgtacgaaccgagccaccaaatcagtatgagggagagaacgcttttgaagtaatggtaatttaagtgcacccatgcctctaattgatgagacagacatgaagtgtgatagtcagccagaggatgcttgtcatgcgatactacgagaggcctagaattatgatcaagaagctaacaaacctac

SEQ ID NO: 19692 - DNA, 382 bp, Glycine max
  modified_base (86)..(86): a, c, g, t, unknown, or other
cttcttcttcctctttctttttctttttctgcacccacaaatcaaaacggcccttttccaaccgaattgtggtccataaaccctanattcaacgaacccgccgaccaagctcgaacctcacgtcgcaaaaaaacacttcttttcccctctccgaggttgtcgtgtcggagcatagccatgttgttccctcgaggaaattgatgatttttcataacattggggtctcgttttgcttgtggggtcaccttgaaggagggaaaagtaacgagctttggggctgaatcgtggtgggtctgttgagtattcataaatctggaactacgatggcggggaacgtggtcaagttctgcactgctctgcgtggaatgggcttcgatcatga

SEQ ID NO: 19693 - DNA, 412 bp, Glycine max
caaaatttccctcaattatttctcactatcatcaccccctttccttctctcaagaaaaaaaaaagttaatttcttgaacccaatggcttcagagacagaggtgccggatattatttcctctgttttcgaaaggtttcaacaaaacagagacatgtctctgtttctgcccttcctcttcggcttctctgacgccaccccaggacgaaatagcgacgacccagatcacgaaactgctcccacagaagccccacaacgtcaaagaataatcttggtgaaccccttgactcaaggcatggtggtgatcgacggtggttcgagcctcgaggctctgtttcgcgaattcaccaacggaaaaggtggtcgaccaccggcttctaaggagtccattgaggccttgccgagtgtggaaatt

SEQ ID NO: 19694 - DNA, 307 bp, Glycine max
  modified_base (264)..(264): a, c, g, t, unknown, or other
  modified_base (280)..(280): a, c, g, t, unknown, or other
aaccaaagccccctctggctttggtccttcgctagggttcggggattcaccatttcccatttcgtcgcttcttatttacccccagaaatcccatgatcctcttctctcgtttcgacacttctcaacttctgagggaaattcaatgcagctgtttctgaggggtctcatgtgatttctgtggttctggttcggtttatcgcggatcttgaggaggcttttgctgaggtctgtgactctgtgacaatgccttctacagaaaatcanggctcttcgtcgtcgntttcctcgtttggccgttccatatttg

SEQ ID NO: 19695 - DNA, 281 bp, Glycine max
gtatggacaggcagatttggcgtttatggaaaaagaggagctgacggggaaccgttaaatggatggtgagcaacatatcaagcatggctgtgttaattgaacacagtttccttgaagcatacggtggagaatcaagagatggctcttcaactgcaaaattctccactggggacataatatccttgaactcagcagtcaccactactaatgacctcaatgacctttgctacgcggtcctagccattttaaggtcacgctttgcaaaaatggaaggcataacc

SEQ ID NO: 19696 - DNA, 310 bp, Glycine max
aaaacattctcatcatttttccaacttaatggctctgcttctgatagtacccatttcactggtaaccctctggctcggttacaccctataccagcggctacgcttcaagctccctcctggcccacggccctggccggtagtcggtaacctctacgacataaaacccgtccggttccggtgcttcgctgagtgggcgcagtcttacggccctatcatatcggtctggttcggttcgaccctaaacgtcatcgtttcaaactcggagttggccaaggaggttctgaaggagcacgatcagcagctggcggga

SEQ ID NO: 19697 - DNA, 325 bp, Glycine max
cctgcattgagcccaaatgatgaagttattccccatggttttatttttgcaacattcatgttggcttcaatgttgggaagctcgcttgcatcgaggttgatgtcccgttcttcactccgagtagagagctatatgcagattgttttcgcagtttcttctgctgctctgatgctccccattttgaccacgttcttggtagttccctccggagtgaaaggtggaagcatctcattctctggttgcattcagcttcttggcttctgtgcttttgagagttgtgttggcatattctggccatccattatgaagatgagatctcaataca

SEQ ID NO: 19698 - DNA, 370 bp, Glycine max
gcgaatacagcctcactgacttcatctggcctttgaagtatctcaaggttggaaagtatgagaagaggattgatgacatcttgaacaagttcgaccctgtcgttgaaagggtcatcaagaagcgccgtgagatcgtcagaaggagaaagaacggagaagttgttgagggcgaggccagcggcgtcttcctcgacactttgcttgaattcgctgaggacgagaccatggagatcaaaattaccaaggagcaaatcaagggccttgttgtcgactttttctctgcagggacagattccacagcggtggccttctctagtttggttgaatttattaatcatgtgcacttcaatttgaatgaattccaataata

SEQ ID NO: 19699 - DNA, 433 bp, Glycine max
caaagctttgacagttgttcatcgattatggtctgaggtgcctggaaagctgaaagattacatatgtcgtcccaagttcaatggatatcaatctctgcatactgttgtgatgggtgaaggcaaggttccccttgaagtacaaattcggaccaaagatatgcatttacaagcagaatttggatttgctgctcattggagatacaaggaagatgattgtcagcattcttcatttgtgcttcaaatggttgagtgggctcgatgggttgtcacctggcagtgcgaagcaatgagtagagattgttcatctgttggatatgctgattcagtcaatcccccatgcaagttcccttcccatgctgatgattgcccatattcttacaagcctgattgtggtcaaaatgggcctgtgtttgttatcatgattgagaatgat

SEQ ID NO: 19700 - DNA, 313 bp, Glycine max
cccacgcgtccggcttgaaatcctatgtcaacattaggcactggctgcatttcatgtagatgaaaacaaatggggtgttaatgttcaaactttatctggttcccctgctaattttgcagtatacactgcagttcttaaaccacatgatcggataatgggtttggacttgcctcacggaggacatttgtctcatggattcatgacacccaaaaaaacgtgtatcagccacatcaatttattttgaatctatgccttatcgacttgatgaatcaacaggtcttattgattatgatatgctggagaaaactgctac

SEQ ID NO: 19701 - DNA, 386 bp, Glycine max
  modified_base (32)..(33): a, c, g, t, unknown, or other
  modified_base (38)..(41): a, c, g, t, unknown, or other
  modified_base (52)..(52): a, c, g, t, unknown, or other
cccggggcgacccacgctccggaggagggtgnnctggnnnngttatttttcnccccacgaaaaacaagagcgcccaacgatagtgatcatgggaggaatttgaaaggtcgaaacttgagcatctgggatcgcgaaattggggattttggttaaaagggtataatcttcggaactgattgatggcaaaactgtacgtgaaggcggtgccaccggcggatctgaacaggaacacggattggttcacgtaccctggcgtttggaccagttacatcctcatccttttcttttcttggatcctcgtactctctgtctttcggtgttctcctggcatcgcttggaccaatcgtaatctcgcacactttgctggaacatatgactttttttac

SEQ ID NO: 19702 - DNA, 400 bp, Glycine max
  modified_base (283)..(283): a, c, g, t, unknown, or other
gacaaaccctaacatattttatccttgtatctatcaccatcgtcctggtcctccggcacatgcttctgcgcctgaatactttgtcctccaggggaacacaacttataaagacgatctatatttaaggaagaggacagggatgcgtcggtggctttgttgcacatgtcaggtggaagagtcttacccatcaaatgaaaatgagcacctgaaaagcccaaggaattatggagatggaaatcaaaaaggctcaaaggtgtcagctcctgtcaagcctgaaacacanaaggcaccttcacctattgaagctccagccttatctttagatgagctgaaggagaagacagacaactttggttcaaaggcattaatatgttaaggaacgtatggaagggtgtattat

SEQ ID NO: 19703 - DNA, 415 bp, Glycine max
cccacgcgtccggtttgggtattggagtgattgacgctgcgtctcttcctcttctctttcgatccatcccggattcctaatcctccaatccaaccacctcagcctcacactcacatatacacatatctgaacgcgtatcgtccctcctatggcttcaaagcgcatcctcaaggagctcaaggacttgcagaaagacccaccaacttcttgcagcgctggtccagtagctgaggacatgttccattggcaagcaacaataatgggtcctgctgatagtccttatgctggaggtgtattcctagtcactattcacttccctccggattatcctttcaagcctcctaaggttgcctttaggactaaggtgtttcacccgaacatcaatagcaatggtagcatttgtcttgatatcctg

SEQ ID NO: 19704 - DNA, 428 bp, Glycine max
  modified_base (344)..(344): a, c, g, t, unknown, or other
  modified_base (347)..(347): a, c, g, t, unknown, or other
cccacgcgtccgttccaaccaagcccatggtggttgaaactttctctgagtatcctccccttggtcgttttgctgtgagggacatgcgtcaaactgtggctgtcggagtcatcaagagtgttgagaagaaagaccccaccggagccaaggtcaccaaggccgctgccaagaagaagtgattgcatttgggcaattttgctagcacatgtgatcatcatcgtggttactcctttatagtagttttatccttgcagagtcttaagtgttttgtttaagttatatttttaagtttctgccgatttcatgtagccgtaactttcaaaactaggttcttgatcggcggnggncaattttcattgctgggttgttttgatgagtacctgtttttggtttgatggtaagaagagtctgaaatatttcgatttcac

SEQ ID NO: 19705 - DNA, 344 bp, Glycine max
ctctaccctcccttccctccactttcctccctcttcttcttttgcttctgtttttgaggcgaagaacgatggaattgtaatgctgggaatataattggagaattgggggaggagtaagggaggaaatcatacacaatgcccgagttccccttgagctcgaggttggaaagggtgcaaaatagcttgagagagaatggttctctggtgtatctcaatgtgtatgatcttacacctgccaacaattatctttacgcctttggggttggaatctttcattcgggcataaaagtgcatggtatggaatatggctttggagcacatgaatacccaacaagtggtatatt

SEQ ID NO: 19706 - DNA, 153 bp, Glycine max
ctctaacgtccgttctctccactgtgtaacctcttattctataaggtcaacctttggggcaatgcctaatggctgcgggccacgccgaatataattggacaattgaggaaacaatgaagaagaagatgatgcagatctcacactataagatta

SEQ ID NO: 19707 - DNA, 459 bp, Glycine max
  modified_base (55)..(55): a, c, g, t, unknown, or other
  modified_base (76)..(76): a, c, g, t, unknown, or other
cggaatcggcacgacccacgcgtcctgaagaagagaattgagagagagtttgaangttcttttctacacagctccnaaatacgagggggagtaattaggtgtgcgtgcgatcccatagatctgaataaatgacaaatgtatcattcaaagaatgttcctagtgcaagtttaattggtggtaattcattaagtcatggtcagcacatagattgtggtggcagcacaatggatcctggcagtggaggaaatggtcttagcaacaactctaatctcacctcaaaacaacgtttacggtggacacatgaattgcatgagcgctttgtgatgcctgggctcaacttggtgggccagaacgtgccccacccaaaaggctgctcaaaattattggtgtacaacgcttgaccatttaccattgtaaaaatcatttacagaaataccgacttgcaaaatatttacctg

SEQ ID NO: 19708 - DNA, 228 bp, Glycine max
  modified_base (45)..(45): a, c, g, t, unknown, or other
  modified_base (52)..(52): a, c, g, t, unknown, or other
gagagcagaaaacggaacgggcacttttacctggtatggcgccanctctaanacattggctgggccgagggtagaagatgggctgacataatcaagccaggctgtgtcaacactgaccccatctttcccaacaacaagctcaccggaaccgatgtgggttaccctggtggcctttggtttgacccccttggttggggaaccggttctcctcataagatcaaggacttg

SEQ ID NO: 19709 - DNA, 435 bp, Glycine max
gtgcctccgtctttttcatccctaattccactctacacccttcgacgcgattcctattctgatcgttagtggggcaagggctgtgggtgaggatgaatttgcaacaagttggacagcctaaatcatctaatggatatggttgttggaaatctgaaaaagaaggggcaactaagtctgataataagatcccgtctggaaagtcaaatgccagcagcagattagcaagtgtagtgactggcaataaaggtggtagttatgggagtccttcacatgatcgattagtatatttaaaaacatgccttattgggcagcatgtgaaagtccagtgaaaaatggatctatatactttgggatatttcatgcaacaaattcttgccaagattttggaatcattttgaaaatggcttacttaacaaacgatgctgctttgcaagg

SEQ ID NO: 19710 - DNA, 357 bp, Glycine max
cccacgcgtccgcccacgcgtccgcttcacaactttgctttttctctctttcaatggcctcttcttccttctcccccgccactctcaccaccgagcaggagctttccgtcatcgttgccgcccttaccaacgtcgtcgccggctccacctccgcctccagctccttctccctccccgaattccgccttccacagacctctgatcctctcgccgccgcctgcctaatgccgccgccgccgccgccgagcatggacacttgtcgcgagtgcaacatcgcaggatgcctgggatgcaactttttcccggaggagaaaaagaagcagaagagggccaagaagaagtacagaggcgtgaggc

SEQ ID NO: 19711 - DNA, 326 bp, Glycine max
cccacgcgtccgcccacgtttccggtttgggattggacttgcgtcttatggtattcgccttcacctcgtggtttcggtttttttttttcacttttccgccgttgcccagtcggccactctcatggccaccgatcaaatcaccgcgtcggcgccctcggagagaggcgccggaggcaaactccgaaaaccgccgccgagaaagccgcttcctagcccttactcgcgtccgccggaggccacccgccgccgttggatttcgaagctcgtggatcctgcctatcgcctcatcgccggcggagccactcgtattctcccctctttcttct

SEQ ID NO: 19712 - DNA, 298 bp, Glycine max
  modified_base (227)..(227): a, c, g, t, unknown, or other
aaaaaaagctccaccaatggcgggttacagagccgacgacgactacgactacctcttcaaggtggtcctgatcggcgattccggcgtgggcaagtccaacctcctctctcgcttcaccaagaacgagttcaacttggagtccaagtccaccattggcgtcgagttcgccacccgcaccttgaacgtcgattccaaagtcatcaaggcccagatctgggacaccgcangccaagaaaggtatcgtgccatcaccagtgcatactatcgtggggcagtcggtgcacttctcgtgtatgat

SEQ ID NO: 19713 - DNA, 358 bp, Glycine max
atcgactcgtacctcgttgctggtaccgatggcgtgggaacgaaggtgatgcttgccttcgaaactggaatccacgatactattgggattgacctggttgcgatgagtgtgaatgacattgttacttcgggggcgaagcctttgtttttccttgattactttgccactgggcaccttgacgtggacgttgctgaaaaggttataaaaggcattgttgatggttgtaagcaatctgattgtgttcttttaggaggagagactgcagagatgcctggtctctataaagaaggtgagtatgatcttagtggctgtgcaagtggcattgtgaagaaagattctgtaatcaatgggtcaaaca

SEQ ID NO: 19714 - DNA, 328 bp, Glycine max
aagacacagccattgtttacttttcattgattgagccaaagctttgtattttctgcgataattttccattgggtggaagaaagtctcaacctttattcgaaagagcaaggatctgagttgagttgagtgatcatgtgtggtggtgcgattatctccgacttcataccggcaggtcccgccagcggggcgcggcgcgtgaccgccgacatcctgtggccgagtttgaagaagcgcttctcgaagccgctgctggacgatgatttcgaggctgggttcagagaattcaaagatgattcggaaatcgaggatgttgatgacgaggacgatg

SEQ ID NO: 19715 - DNA, 305 bp, Glycine max
cccacgcgtccgcccaactcaatttttctctcatccggcccaatttagcataagccgagcatggccaccgcaacagcagcagccacctcgtccttcatggggacgcgcctcctggaggcccactccggggcggggcgggtgcaggcccggttcgggtttggcaagaagaaagccgccgccccgaagaaagtttccagggggtcgggctctagctccgataggcccctgtggtatccgggcgccaaggcgcccgagtacctggatgggagccttgtcggagactacggattcgacccatttgggct

SEQ ID NO: 19716 - DNA, 385 bp, Glycine max
ggagggggcagggaatttcaattatatgtatctggtgtattcacggggagatgtggcacagcactagatcatggtgtcgtggctgttgggtatggaacagctaaaggtcatgattattggatcgtaaggaattcatggggttctagctggggagaggatggctacatcagattagaaagaaatcttgctaacagcagatcaggcaagtgtggaattgcaattgagccatcttatccccttaagaatggtccaaatccccctaatcctggaccatcacccccttcacctgtgaagccgccaaatgtctgtgacaactactacaactgtgctgatagtgctacttgttgctgtatttttgagttcggaaatgcttgcttcgagtggg

SEQ ID NO: 19717 - DNA, 410 bp, Glycine max
gcgcttgtgttgtttttgtgtctcattaatcccacactcagtcactattgctccagcctccacctgctgaaagaaactcctaattgtcaattgttgtaaagaaaagaactgaaaacactgacactgttattctctgaattttctcaccatctacaactgaagttttaaccaatatggaaactgaaaagtctaatgtttcaaaggctgaagaatttaaactccttgccaatgaagtgttcaatgctcgaaaatactcccaagccattgatctatatacacaagcaattgagctgaacagtcaaaatgcagtttacttttctaatcgtgcctttgcccatcttcggcttgaggaatatggtagtgcaatacaagatgccacaaaagctattgaaattgatcctaaatattcg

SEQ ID NO: 19718 - DNA, 429 bp, Glycine max
atcactggtaaagaatatgcaagaaacagtgtattattagaaagtacataaaattactgtatcatttaatcataaatcagtcacatttgataacttttataaaagcaactttcaaaaattatttttgaggataatttctgatttatggataatgtaaaactttttacaataaaagtgtatgaaaaataaactcctacaatgataaaaaaaaatgtgcaaggagtgtattattagagactctgttgcatttctcatcatatatataatatatataagtaaaaataatttcatattaattaaaaaaagcaattaacataatttacttttactaatcttaagtaaaaaaaaagttatttttaaaatgtctttcattataaagtactttatatcatgaataaaaaagtcattgaaaataggattagaattaaa

SEQ ID NO: 19719 - DNA, 260 bp, Glycine max
  modified_base (143)..(143): a, c, g, t, unknown, or other
cccacgcgtccgggaacaccgggcggtctgaaccggcagggtcttccgggggaccggaagccggacggcggcgacaagaaggagaagaagttcgagccggcggcgccgccggcccgcgtgggccgtaagcagcgtaagcaganaggcccggaggcggcggcgcggctgccgacggtgacgccgctgtcgaagtgcaagctaaggctgctgaagctggagcgcataaaagactacctcttgatggaggaggagttcgtggc

SEQ ID NO: 19720 - DNA, 306 bp, Glycine max
  modified_base (54)..(54): a, c, g, t, unknown, or other
cgagaagccaaaaaatggtggccgttttgaagaaagcaatgatccgcgacgtancgctacaagtcgtttgcatttccctcactattttcagcttcctctggatgcacggcctccctcaaaacctctacgccaagctccgccaccgtcctccaaactctcgcgccgtccaagccaagcgccacttcgtccaaggcgcacagctcctcgcccaagccagaagatccaaaagcgctttcgccgcaacctccctcgccaaacaggccctagccgaggccgagaaggccctcgcgctcgaccccaaagacg

SEQ ID NO: 19721 - DNA, 317 bp, Glycine max
cccacgcgtccgcccacgcgtccggccttttcttttcttcttcctctgtcttgtcttcaacctcgttttcttttcttcgtcttctatcaccgattccgattcgctactctttcttcttcttccttttttattgatcctctctgcgatcacgaattttcccattttctccgtttcctcggcgaccaaacggaggagaagaacgcagttctgaaaacgattggaaaatgctgggaactgcactgcaattcagcggcgttcgcggcgaggatcggttttacattccggtgaaggcgaggaagaaaccagatcagcgggaa

SEQ ID NO: 19722 - DNA, 355 bp, Glycine max
  modified_base (305)..(305): a, c, g, t, unknown, or other
  modified_base (311)..(311): a, c, g, t, unknown, or other
  modified_base (321)..(321): a, c, g, t, unknown, or other
cccacgcgtccgcgctggtttccaattattttcaggagaattgctgaggtgaaggctaatgaaaggaggaaagctctggaagagatcttgtatgcattggtagtgcagaagttcatggatgctaatatttctttgataccctctgtaaccccagatctttctggtaaggttgatttgtggccaaatgaagatggtaaacttgagctgcttcactcacacgaagcatatgagatgattcaaaaccacctggctctcattctcggtaacagagctggagatttaacatcaatagctgaaatcagcanattcanggtagggcangtctacgcagcatcagtgatgtatgggtattttc

SEQ ID NO: 19723 - DNA, 418 bp, Glycine max
  modified_base (282)..(282): a, c, g, t, unknown, or other
  modified_base (401)..(401): a, c, g, t, unknown, or other
ctttagtggaacttggtttaagcaaatgcgttggagtgaccaacaagggaattgtgcagctagtatctggctgtggctatttgaagatacttgatttgacttgttgtcgcttcatatctgatgcagcaatctctactatagcagactcttgtccagaccttgtctgtctgaagctagaatcttgtgatatggtgactgagaattgtctttatcaacttggattaaattgctcgcttctcaaagagcttgatcttactgattgctctggtgttgatgacatanctctaagatatctatcaagatgttcagaacttgtaagattgaaattaggattatgcacaaacatatcagacataggattggcacacattgcttgtaactgcccaaaaatgactgaactngatctctatcgatgtgt

SEQ ID NO: 19724 - DNA, 435 bp, Glycine max
cccacttcctccaaagacatcatttttattaccaatcttccaatttcagagaaaattctttgtgggcatctcttaattaaaaaaatgtcaagcttccccaacacggtggcggaaggccgcaggtccagcaaggcaccggaaaaatccactttttctcagacttgcagcctcttgagccagttcttgaaggagaaacgtgcttctgctgattccacctttcgaattggtgggaaaatggaacccatagcgagtaccaagggtttgttaggaagcctgcaaaactctgatggggctttgaaactaagcgcttctgccatggaatttcttccccagcttgtggaaaacccctgcattaaaaagtctagatcacagggaccttgaactccccaattgacaatattctatgcttggaaaatgttgtgtttgatgcctttt

SEQ ID NO: 19725 - DNA, 428 bp, Glycine max
  modified_base (334)..(334): a, c, g, t, unknown, or other
gggcacagaaatatggattgaaaatcatccttgatcttcatgctgcacccggttctcaaaatggttttgagcacagctcttcaagagatggttcacaagaatggggaaaaacagatgaaaccattcaacaaacagttcatgttatagacttcctaactgcaaggtacgcaaaatgccaaagcctttatgctgttgagctaataaatgagcctctctcacctggtgtgacactagaggccttgaacaagtactataaggctggttatgaagcagtgcgcaagcactcttccacagcttatgtggtgttatcaaataggataggacccttcaatcnctaggaactcttcccttttgcaaatggccttatgcgatctgtgattgatgttcactaatacaacctcttttcaagatgtatttaatgacatgac

SEQ ID NO: 19726 - DNA, 444 bp, Glycine max
  modified_base (412)..(412): a, c, g, t, unknown, or other
ttgacattgataagcactctgaatggttgttatttcattccctgggttcattacaagggtcggcaaggagatttctgcattttggtcatggacatgcttgggcccagtctttgggatgtatggaattctgttggtcaacaaatgtcaccaaatatggttgcgtgcattgcagtagaggcaatatcaattcttgagaagctccacttgaaagggtttgtgcatggagatgtgaaacctgaaaactttttgcttggtcaacctggatcagctgaagataagaaggtatatcttattgatcttggtctggcttctaaatggaaggatgcatcatctgggctacatgttgattatgatcaaaaacctgatttatttaagggaacaataaagtatgctagtggacatgcacatttangtaggactggaagtcgaagggatgaccttgat

SEQ ID NO: 19727 - DNA, 418 bp, Glycine max
cccacgcgtccgcacttcaccaccactttctcctttctccttcttcctcctcctttctgcttcttcattctctcctgccctcttgagcttttctttttagcacggaacatgtgagtgccacaaagggtttgagactttttgaggctttctctcactctaataagtcctaacctcattcacctcttgggtggtgtggtctataatgtaatttatcatttgtgcaaattttttctcagatctatccaacttctcttttttgtccttttattctgtttggaaatcgtcatcatcaccatttgatttgcagggccataaattttctgctttgtttttaactcttccacaccatttccattttttcttcttcttcttctctgggttttttttttcctgtgaaaaaaaaattgagttctttttg

SEQ ID NO: 19728 - DNA, 373 bp, Glycine max
gtgagagtctgagatcgcttttctctctttcgatcttccttttccgcatttctcaacaatcgtttccaatcccacgctaatggcaaatagtgagacttgttgttcaactcagcttattgatggagatggtacattcaatgtttttggggttgaaaatttcatgaaggaggtgaagttggctgaatgtgggctttcatatgccgtagtttctataatgggtcctcaaagtagtggcaagagcacactgttaaatcatttgtttggtaccaacttcagagagatggatgctttttaaggaaagtctcaaacaaccaaaaggaatctggatggctagatgggctggcatagaaccttgtacacttgggatggattt

SEQ ID NO: 19729 - DNA, 428 bp, Glycine max
ataatatcaggatagcagagacttaacatcaaataatccaagtgtaagtttggctagcacgtcacgaggcatttgttctcctgacatttctgtgactcttccaaatacttcaccaaagtcctttcggtctgacaatacaatttctgaaaggtcacatgcgccaccagacccaacaaacatgcaagtgaaaggatctgcttcagatgtatttcgtgtcagtgtttccagtgccccaagtacatctagtcatggatctgcacctgatgactgtgatgctttgggggatgtatacatatggggagaggttacctgtgaaaatgttaaagttggtgctgataaaaatgtaaattatgtcagccccagggcagatgtacttctccccagaccactggaatccagcgtagttttagatgtacatcatatagcat

SEQ ID NO: 19730 - DNA, 265 bp, Glycine max
  modified_base (18)..(18): a, c, g, t, unknown, or other
  modified_base (83)..(83): a, c, g, t, unknown, or other
ctttggaatgcagcattnttgtttcttttggctgaaggttacatactcggggccatggctatgccaggggggctatacattgnatctattttagttggcatgtgctatggagtgaggcttgccattacagtcccaacagcctcagagttatttggactcaaatattatggtctcatatacaacattctcatccttaaccttcccttgggttctttccttttctatggtctgcttgctggcatactatatgatatggaggcaacta

SEQ ID NO: 19731 - DNA, 373 bp, Glycine max
cccacgcgtccgcccactctttctctttcttgaagaatgagtcatctgctgaaacatatactatggacatggatgctttacataaaaataatcctcccggtgatgttccatttcaaacaaataagtgctccaaggatagtcaaaactcgcttacttctcaaggtgcaacaatttctgctagagagaaaaccatagcaaaatcagtgaatacaacaatactagatataaaccaagagcctcaagagcttcttactgatgaaagtcctgtggttgacagggagactagcacatcaagaacccacagccttgatttggatcactttttttctcatgcagatgagcatgctatgtcaagttctggcaatagtttttt

SEQ ID NO: 19732 - DNA, 424 bp, Glycine max
cccacgcgtccgcccacgcgtccgccctacgcgtccggtcctcttttctcggctccctttttctctctggcgctctctctcggtctcgctcttcttctcatcaagcacagagttacagactcaccgatcttccgattctctttcgtcttggtttatgagctcgaaggagagacccactcttggtggcacgcggattaagacccgcaaacgaaatattgctgcgccgctggaccctgcagcattctcggatgcagtggtccagatttatttggataatgctggtgatctggaacttattgctaagagtattgaatcttcagaccttaacttttcaagatacggtgacaccttttttgaggttgctttcactgggggtcgtacacaacctggaactaccaaacctgatgagggggaccgccaccca

SEQ ID NO: 19733 - DNA, 421 bp, Glycine max
tttcattcacccttggtgtgaaacagatgatttgctgctgtaacaaaatggatgctactacacccaagtattccaaggccaggtatgatgaaattgtgaaggaagtctcttcctacttgaagaaagtaggatacaaccctgacaagattccttttgttcctatctctggttttgagggagacaacatgattgagaggtccacaaaccttgactggtacaagggtccaactctgcttgatgcacttgaccagattagtgagcccaagaggccctctgacaagcccctcaggcttccccttcaggatgtgtacaagattggaggtattggaactgtgccagtgggacgtgttgagaccggtgtctttgagcctggaatggtggtgacttttgcaccaactggactgacaactgaagtcaagtc

SEQ ID NO: 19734 - DNA, 432 bp, Glycine max
ctccaaagtttcggtgctttcggatataacactacctattcagccgccatgcacactctcctccgatccactctcaggaccaagactgcttcatctttagcatatgctgtggtttccagaagtgctcacgaaaatctccttcaggctcccttattgtctagatcaaatagcactgaggcttcattggcaaaggataattcctctaatgatgtaaaaaatggtcaagggtacaaaggtcatagtatgcttgctcctttcacggctgggtggcagtcttctgatttgcaccctctgatcatagaaaagtcagagggaagctatgtatatgacattaatgggaagaaatatcttgatgcacttgctggtctatgggccacttctttagggggaagtgagccacgcctttgtgatgctgccgttgcacaactaaag

SEQ ID NO: 19735 - DNA, 422 bp, Glycine max
  modified_base (143)..(143): a, c, g, t, unknown, or other
gcccacgcgtcgggtactttcttgctaaacagaaggcgaagggcagacacactttttgttttttgggaagcgagaaaaaaaaatgttggggatcttcacagttccgggtgtctgccccggagagctggtggctgccggcacanaacgccgtcgccgaagacgacggcggggaagctgctgaaccggttcgtggagaacaaggcgtcggcggtgtcgctgaggtgggagaacacgtgcagttggcttacacgcaccacaacgagtcaccgtggcatcccagatcatttgctggtaaggatgaaatattctgcttggttgagggggctctaaacaattgggcagcctgagacaaccgtatggactggcccaagtcagccaatgaagtggttttggggattgaagcttacaaagctttacgggat

SEQ ID NO: 19736 - DNA, 390 bp, Glycine max
gtccctttttacagagtcatgactatggctggagctttgagtctctcccaattcccagttcgtgggtctgtttctttgcccaaaagaagaatacccagaagaagcttttgcattaggggcatgtcagaaatctcttccactttttctgtgagcacccaacaagaagaaccaacttctaatgcttcgtcagtgacaattgcacctccccccaacttcaagccccctgagcctaaacgctttgcaatcagacctgacaagaccagtgaagtatttggagctttgcttcctttgctctttcgctttgctaccggagttttcgtttctgggtattctttttcaattgtttctaacgatgaaattcctccagatgaatatgctttggaacttaat

SEQ ID NO: 19737 - DNA, 424 bp, Glycine max
  modified_base (290)..(290): a, c, g, t, unknown, or other
agaaaacagcatcgaacccgtcgtagcagaaaaacttgtcaccatggtttcttccgacaaggatccacgagaggatgtccttcaagcctggtacatggatgatagtgatgaagatcaaagactcccccaccacaaagaacccaaggagtttgtctcgttggaccaacttgctgaacttggagtccttagctggaaactagatgctgataaccatgaaaatgatccagagctgaagaagattcgtgaagagcgtggttacacctacatggatgtttgtgaagtctgcccanaaaagttgccaaattatgaacagaaaatcaaaagcttctttgaagagcatcttcacactgatgaggagatccgcttttgtgctgctggaagtggctattttgatgttagggatcgcaatgaagcttggattcgt

SEQ ID NO: 19738 - DNA, 228 bp, Glycine max
acataactatcttgtgtgacaaacggatgcatactggatacaggtgtggaggataacatacactaatacaacggaggaacggtttcttaccattgcgttgaggagggctgaggcttattgaaatatttaaattggaaagcaagattgaatcaacggtacacatttattaatagaacgaacctatacgcttcctactgagaatgtttggtgcgtgtcactcaatctaga

SEQ ID NO: 19739 - DNA, 343 bp, Glycine max
cccacgcgtccgtgctactctttactttgtcctatttacagatgccgacaacgtcatcccaaaggctcttgattccggcaagagtgttgaaaacgttgagggaaatggtggcccaggaaccatcaagaagatcactttccttgaggatggagaaaccaagtttgtgctgcacaaaatagaaagcattgatgaggcgaacttgggatacagctacagcgtggttgggggtgctgcattgccagacacggcggagaagatcacattcgactccaaattggttgctggtcccaatggaaggtctgctgggaagctcacttgtcaatacgaaacaaaaggagatgct

SEQ ID NO: 19740 - DNA, 390 bp, Glycine max
  modified_base (235)..(235): a, c, g, t, unknown, or other
  modified_base (278)..(278): a, c, g, t, unknown, or other
  modified_base (280)..(280): a, c, g, t, unknown, or other
  modified_base (308)..(308): a, c, g, t, unknown, or other
cccacgcgtccgataagctaccttgctagtttccatcatcgtatctgttagtatttccaaatatacacattttctattttattcatagaaatctttaacttgagaagcattacatggcgctgacgatgatggcggcgatcggcatcggcatgaagcaagagaagaagatgccggcgacgccggcgccggagaacgagctgaagaagcggaatgaggagctcgagaaggagctcanagagagcaaggagagggaggagcagatgaagcgcgaactccanancgcgtgggagaagctgcgcgtggccgangaggctgaagagaggctctgctcccagctcggagagctagaagcagaagccgtttaccacgcgcgggactaccacgcgcgca

SEQ ID NO: 19741 - DNA, 330 bp, Glycine max
gacccagcgtccttgcaatcaaatattgtttctctttctcaaaccctaccctactggcaaagcaaatcttggtcggaccctcaccacaaaaccatcacccttgagtggaaagcttgacaccatcgacaacgtcaaggccaagatccatgacaaggaatgaattcccccggatcaacaacgtctcatctttgccggaaagcaactcgaggacggccgtaccctctccgactacaacatccagaaggagtcaaccctttaccttgtccttcgtcttcgaggtggccatgcaaatcttcgtcaagactctcactggcaaaaccataaccctat

SEQ ID NO: 19742 - DNA, 398 bp, Glycine max
  modified_base (350)..(350): a, c, g, t, unknown, or other
cccacgcgtccggtaatttctttctgtaacctcatgccatgctcactcagttactcatttttcttgcaccgcctattgtgcgtgaaatgaaatatatcatttgcggaatctctccacggagcaagttttgggcaggtttgagttttagtgtttgaagcattcaaatgatcttgagttggagttggagttggttatcttagtggcttggatgttagatgcctgaagcctgcgttggaggattgcaattgcatactaaagagggttcattgttcatagcttaacaccaaaaagtgtgggcacatgctacagctacatacccgaaaaaaattacatattctttgtatatgtgntatatttgggtttgataattccattggtaaatgtgatttttctaactc

SEQ ID NO: 19743 - DNA, 430 bp, Glycine max
  modified_base (404)..(404): a, c, g, t, unknown, or other
ccatggaaggccaaaattccgccatataaacatgccattgcagcctatagtgttgccatagcgggcctcccttcacaaactgtctatggtggttggcaaaaatctgcaatggcgctgccatttaacaacattgacacttagtagggtaaacttgttagtaatttgtataaaggtacgattttcggatctaagccgcaccagctgtcacatttgggatcataattgaatattatcattaactatatcttgttttgatattttggcttaaaaaaaagctatatcttattttattgtataatggtgttaattattttcgtgatttgctggtgttggtgaatgttttattttttggttgatgcaagcatgggagtgctctcctgggaaagagttcgcatggaacttgntatccctctttactacttctggaatg

SEQ ID NO: 19744 - DNA, 416 bp, Glycine max
aacactctctctcctccttcacctatattggtttcaaccaaaccaagtgtcccctcctttctcttgttaacagggggcagagttagtgagtaatggcaggaggacaactaggagtgcttaatgcactcgatgtggcaaaaacacaatggtaccacttcactgctattgtgatagctggaatgggattcttcactgatgcctatgatcttttctgcatttcccttgtgaccaagttgttggggaggttatattacacagacataacgaacccgaagcctggtgttcttcctcctaatgtgcaagctgctgtgactggtgttgctctatgtggcactttaaccggccaacttttctttggatggcttggtgacaagttgggaaagaaaagggtttatggcttaactcttatgcttatg

SEQ ID NO: 19745 - DNA, 412 bp, Glycine max
  modified_base (277)..(277): a, c, g, t, unknown, or other
agaaattaagtgaggagttgagattgatgatgaagtctgctatgtgtgcagtggtggttgtagcactgcttcttctggcggaggtggggcccatggctgaggctgtgacatgcaccccaacagagttgagtccgtgtcttccagcaatcacttccggtgctaaaccttccaatgcttgttgcacgaagctgaagcagcaaaaaccatgcttatgtggctacctcaaaaacgctagcttgaagcagtatgttaactctcctaatgcccgaaaaaccgntgcttcttgtgggattccctttccaacttggtaattaattaaaccttcttataattaaaagtgggggatatatatatatatatagataaacagtttaatttatacacactgtgatcctacaaagcattttgacac

SEQ ID NO: 19746 - DNA, 394 bp, Glycine max
  modified_base (29)..(29): a, c, g, t, unknown, or other
caggacccagacagcattgttgcctgtgntaacatgcaccaaaaccaacggggtcatggtcttgggagaggtgacgaccaatgccaatgttgactacgagaagatagtgcgtgacacctgcaggaacatcggctttgtctcaaacgatgtgggactggatgccgacaactgcaaggtcctcgtcaacattgagcagcagagccctgatattgctcagggtgtacacggccacctcaccaaaaaacctgaagaaattggtgctggtgaccagggtcacatgtttggctatgccactgatgaaacccctgaattgatgccattgagccatgttcttgcaacaaaacttggtgctcgtctcaccgaggttcgcaagaacgggaccttgccttggctg

SEQ ID NO: 19747 - DNA, 335 bp, Glycine max
actcacttcacacaaaccaaagttaattaattaccaacacaaaatggatggaggctgtgtcacagacgaaaccaccacatccagcgactctctttccgttccgccgcccagccgcgtcggcagcgttgcaagcgccgtcgtcgaccccgacggttgttgcgtttccggcgaggccgaatcccggaaactcccttcgtcgaaatacaaaggcgtggtgccgcaaccgaacggtcgctggggagctcagatttacgagaagcaccagcgcgtgtggctcggcactttcaacgaggaagacgaagccgccagagcctacgacatcgccgcgctgcgct

SEQ ID NO: 19748 - DNA, 405 bp, Glycine max
  modified_base (381)..(381): a, c, g, t, unknown, or other
agcacagacacagaaaaatggctctattacttcgttcttcaatttcccttgtcaaccagaaagaaaccaaactcccaaaagccaaagacgaggttcccaccaaagtgttttactttggaaaaaccaacccatctttccgtctcagagcaaagagttccatgcaacaaacacacgtcacacgaaacaacagctttaactccgaagtaacgatgataaacgagaaaagggagaaggttcacgctccatcggttgcacatagccacaatgattcaatgagagtgccagtgtttgtgatgctgccattggacactgtaactatgggagggactttgaataagccgagagcaatgaatgctagtttgatggccctgaaaagtgcangagtggaaggagtgatggtggatg

SEQ ID NO: 19749 - DNA, 289 bp, Glycine max
gaaaggctagttaaggccagtttttttgttcacttattacctatggtgcctataggagcattgaagacttctgggatggtgaactctgagcaatatgcatctttgagacgttgaaaaatacattgctcctagagcaaatttattctgccttatacccactagttgtagtgattcaagtgagattttgagaagtgttactattgatggtaacaccgaataagtagccaagagttatttttcatttaatgattgtatcttttattcaatataataaagtgagttgagtgaa

SEQ ID NO: 19750 - DNA, 182 bp, Glycine max
ccggaatcccgggcgacccaccgtccgggaaaccctcctacaaagctcctttcgcgttgccccccacacgcacaattggtcggtgtccactctcgggcgccgcgcatgaccgccggcgtcatgcaccacgacgtctccgcctgcatggttctgccgcgcatgcgtataacctctggacacaa

SEQ ID NO: 19751 - DNA, 440 bp, Glycine max
ataaggttgacaggctttatgggtggtaaacatgtcgcaatgctccaattgttaaagcaatgaagcagcagactaaggatgtccaaaatgagtttaatatgaggctcactcagactattactgaattcaaagaacaagggctgaataccgagttgtattataaaaacaaagaaatgggagaaacattcagcattgtgcctacaagtgcaataagtggtgaaggaattcccgatttgttattactattgattcaatggacccaaaaaacaatggttgagaaacttacatacagtgaagaagtgcagtgcactgttttagaggtgaaggtagttgaaagccatggaactactattgatgttgttttaagtaatggtgttcttcatgaaggagaacaaataagtgtctgcggaatgcaaggtccaatttgtaccacaattcga

SEQ ID NO: 19752 - DNA, 409 bp, Glycine max
  modified_base (342)..(342): a, c, g, t, unknown, or other
cccacgcgtccgcttttctgatcatctcttatgggtttgaatgatgcatgtaaaatgttgtaggaaagagagggacctgtgagtgtcacaaacatgggagaggagaatgttaaacaaccgttgttggagaggaagtactacaaggactgcccaggttgtaaagtggatcaagccaaagagttgagtgagggaaagggtgtacctgttaaaaatctttttatcatgtggatggtggtgctgtgtgctgcactgcctatatcatctctctttccattcctctatttcatggtaagggatttcaatattgcaaaaacagaagctgatattagttcttatgctggntatgttggctcttcattcatgcttggcagatgtttgacatctgtattatggggaattgtaaccgatc

SEQ ID NO: 19753 - DNA, 339 bp, Glycine max
cccagcgtccgaacaacacaggcgcttagcaaacgcaaacgcaaacgcaaacgcaaacgcagagcgtgatccattgacgaagatggtgcagcgtctcacctaccgaagcggacagctatgccaccaagtccaaccaaacagggtcgtcaaaacccctggtgggaagctcgttatcagactaccaagaagagggccagcggacccaatgccccgtcactggcaagaggattaagggattcacacttgaggcctcagagtacaagaggtcaaggttacccagaaaccgtatgactgtcaaccgtgcatatggtggagttttatctggaagtgccgtcaggg

SEQ ID NO: 19754 - DNA, 384 bp, Glycine max
ttccaactccatttacgatttcactgtcaaggacatcagtggaaatgatgtgagtctgaatgattacagcgggaaggttctactgattgtgaatgtcgcctctcaatgtggtttgacacagacaaattacaaagaattgaatgtattgtacgagaagtacaagaatcaaggatttgaaatcttggcatttccgtgcaaccagtttgctggacaggaaccaggaaacaatgaagaaattcaggaagtagtttgcacaaggttcaaggctgaatttcctatctttgataaggttgaagtcaatgggaagaatgcagtgccactttacaagtttttaaaggagaagaaagggggaatatttggcgatggtatcaagtgggacttcac

SEQ ID NO: 19755 - DNA, 179 bp, Glycine max
  modified_base (12)..(12): a, c, g, t, unknown, or other
atccaatcctcncctccataattttccaacaaaatctcaaacataataaataaaaattacatttttattcacaaaaatatctggattcatcttgttctcattttgcccccttttttcttctgctctcccgaatcataaaccctaatcattgtttgggatttcacaggaaagaaatttaa

SEQ ID NO: 19756 - DNA, 397 bp, Glycine max
agaagattgaacttaaacttattcatcttgaaagaaagaaagaaagaagatgggaattgcagtgggaggtgttgatttgctgagtgaaaaagcggcgatgatgagagagtgtctgcagaagagtgaaaccatcacagacaacgtcgtcaccattctcggttccttcgaccaccgtctctccgccctcgaaaccgccatgcgtccaactcagattagaactcactctattaggaaggctcatgagaatattgataggactttgaaggctgcggaggttatattggctcacttcgatcaatatcgtcaggcagaagcaaaaatacttaaagggccacatgaagacttggaaaactatcttgaagcaattggtaagttgagaaacaacattcaatttttt

SEQ ID NO: 19757 - DNA, 422 bp, Glycine max
gaagaaaacaaaatggattatacagtttctgcgttgaggtctttgatgggttctcactctccggcgctgggtgccttactggtgccctctgaagattatcacctgagcgaatatgtgtctgcacgagacaagcgccgcgaattcgtttccggcttcactggaagtgccggcttggcacttataacaaagaaagaagcactgctgtggacggatggacggtattttttgcaggctgagaaagaacttagtgctgggtggaagctaatgcgaattggtgaagatcctgctgtagatatctggatggccgataatttgccaaaagaagcatccgttggggttgatccctggtgcatttcaattgatactgctcaaagatgggaacgtgcttttgccgaaaaacaacaaaaacttgttccaacctt

SEQ ID NO: 19758 - DNA, 377 bp, Glycine max
  modified_base (357)..(357): a, c, g, t, unknown, or other
ccttactcactagcctaatttgctcctttagcctcactcctgctctcttctacgtcaaatcctaagaaacccatttgaaattttaaatctcgttctggctaattccatgttcattgtttactatacctcaccactccaagggtctcataaatttcttctgcttccaactctgctgcagaaaaagaaactgttggttctagatacaagtgggtttccagagtagaagtgaggctattgggcatgagataaacagcaagcaccatcatctacgacccttttgactatattataagcaacacaaaaatggagagtgacttgagctgggagcagaacacgctcataaatgagctaattcangggatggaggtagcaaggaa

SEQ ID NO: 19759 - DNA, 290 bp, Glycine max
  modified_base (219)..(219): a, c, g, t, unknown, or other
atggcaactatgactggtgtgagcctttcatgccccacggttttcttcaacgcatcagcctcaccgcaaaacgcgcatgctgtaaagttctcacttccacccagccaagcagtgcgaccgggtagtatcaagttgggtcgcgtgatgaggatccgacccgttcgcgctgcgcctgagcgcatatcggagaaggtggaggagagcataaagaacgcgcangaggcgtgcgccggcgatccgactagcggcgagtgcgtggcggcgtgggacgaggtggaggagctgagcgc

SEQ ID NO: 19760 - DNA, 425 bp, Glycine max
ggaatcttggaagcccacgatggatcaagaggactatctgacattgaggaggggacagatagtaaaagctgtgccgctgagatgggaaatgtatctgaagtcccaaaatcctcagtatcagctgagaaggtggaaggaatcttggaatcccaggatggatcaagaggactagctgacattgaggatgggacagatagtaaaagctgtgctgctgagatggaaaatgtatctgaagttccaaaacccctagtatcagttgagaaggtggaaggattatctaaggaaggtatagttggcagccaagcaatagtgcaggtatcagaagaatctgaaactgttacgggagatggaattgatgttactccagattgtttggctgtgccagaaactgtgtcaaatgatggggcttcatctttgtgctcttc

SEQ ID NO: 19761 - DNA, 435 bp, Glycine max
  modified_base (13)..(13): a, c, g, t, unknown, or other
  modified_base (26)..(26): a, c, g, t, unknown, or other
cccacgcgtccgnccactttttagantttgtttgaaggcatctaaggagagaaaaatgcacgatttctgggggacgatcccctacggattgatgttagtgggtggtggactgttcgcctacataagcaaagggagcatcgcttctctcgccggaggcgccggctccggtttgcttctcatcgtcgccggctatctcagtctcaatgctttcggcaaacgaaaaaactcttacctcgctctctttctcgagaccgtttgtgcagccatactaacttgggtcatggggcagcgatatttggaaacatccaagattatgcctgctggtcttgttgctggaatcaatgctctcatgactctgttttatctctacaaattagcaactggtggcaaccatctccccaccaaggctgagtgatgatataatgatatatcata

SEQ ID NO: 19762 - DNA, 435 bp, Glycine max
  modified_base (407)..(407): a, c, g, t, unknown, or other
caaagattggtgtctcgaacactccttcatggtactcagctggagagctggaatacttgacggacactactaccctgttcatagttgagctctttttcattggctgggccgagggtagaagatgggctgacataatcaagccaggctgtgtcaacactgaccccatctttcccaacaacaagctcaccggaaccgatgtgggttaccctggtggcctttggtttgacccccttggatggggaaccggttctcctcagaagatcaaggacttgagaactaaggatatcaagaatggcaaactggacatgcttgctgtcatgggtgcatggttccagcacatctacactgccaccggtcctattgacaacctctttgcccaccttgcagatactggccatgctaccatntgtgctgctttcacccctaagtgaaaag

SEQ ID NO: 19763 - DNA, 449 bp, Glycine max
gtgcctccgtctttttcatccctaaccccactccacacccttcgacgcgattcctattctgatcgttagtggggcaagggctgtgggtgaggatgaatttgcaacaagttggacagcctaaatcatctaatggatatggttgttggaaatctgaaaaagaaggggcaactaagtctgataataagatcccgtctggaaagtcaaatgccagcagcagattagcaagtgtagtgactggcaataaaggtggtagttatgggagtccttcacatgatcgattagtatatttaaaaacatgccttattgggcagcatgtggaagtccaggtgaaaaatggatctatatactctggaatatttcatgcaacaaattctggcaaagattttggaatcattttgaaaatggctcacttaacaaaggatgctgctttgcaaggaaaagaatctggt

SEQ ID NO: 19764 - DNA, 460 bp, Glycine max
  modified_base (22)..(22): a, c, g, t, unknown, or other
cccacgcgtccgcccacgcgtncgcttcacaactttgctttttctctcttgcaatgtcctcttcttccttctcccccgccactctcaccaccgagcaggagctttccgtcatcgttgccgcccttaccaacgtcgtcgccggctccacctccgcctccagctccttctccctccccgaattccgccttccacagacctctgatcctctcgccgccgcctgcctaatgccgccgccgccgccgccgagcatggacacttgtcgcgagtgcaacatcgcaggatgcctgggatgcaactttttcccggaggagaaaaagaagcagaagagggccaagaagaagtacagaggcgtgaggcagaggccctggggaaagtgggccgcggagattcgtgaccctcgtcgtgctgcccgggtctggctcggcacgttcggaaccgccgaggatgccgcccgggccta

SEQ ID NO: 19765 - DNA, 325 bp, Glycine max
ctcatacttcctattactcgttcttctgatgaacccacaaataaaaacggggcttttacaggcgaagttttctccataaaccctagaataaacgaaccgaccgaccaagcttgaacctcacgtggaaaaaaaacactgatttttccatctccgagggtgtcgagttagagcatacccatgttggtctctcacggaaatagatgattttacataacataggggtaacgcttcgctcgtggggacacatcgtaggagggaaaagtgactagcacaggggatgaatcgtgggatgcaagttgagtatgcatgaaaatgggacgacgat

SEQ ID NO: 19766 - DNA, 414 bp, Glycine max
aaaccaaaccccaaaacagcagagcaaccaacaaagtcataatagtattacccacccgccgcagactgaaaaaacaaaaccagatacaatcgcagaataataatgccagaacactcttcatagttgttcatacagtacatagttattctcacaccaaaaccacgtcaacaaattcaaaaactgtgtcaccttccttggtgtgttaatgttaatgcatcaccaccacaagccagagcttcacatcggaaaagagaacccccacctctcttccgatgacgccgccacttcaactccacaaacccatttctcaattcaggtttcaccttgctcgccccatccacctccaccaaactcaccaaacacgccgttccaccatgaacgcttctccaacaagagaataatacccatcatgac

SEQ ID NO: 19767 - DNA, 187 bp, Glycine max
gcgaaatcgaataagaaatttggctcaaagcctgaaagacaaagcctcggggttcgatgaggggctattcacgaatcgacacgtgtcctccgttcgcgtgcacgtgctacgcgccatcacgcacgccctcgacgagccgccctaagaggaaacaattttcgacgtcctagaggtgaggtcccaccag

SEQ ID NO: 19768 - DNA, 293 bp, Glycine max
ctcacgcgtgcgaacgaaaaaaaaaagaagagcaattttccctcaccaaagaagaagaagcgggctatggccgatcaacttaccgttgatcagatttacaaggtcaaggaagccttcggtttgttcgacaaggacggcgatggggcgttctatgtctctctctctcaagttatgcgtataagagctgatttgatttatagcgtcgaggtttttgcagatcggagatcctttttgtgataatggaataggaaaattagatgaattctgattctatatcacaatgctttttttgt

SEQ ID NO: 19769 - DNA, 448 bp, Glycine max
  modified_base (10)..(10): a, c, g, t, unknown, or other
cccacgcgtncggaaacttttaggcattacttggttgttcctgtggcgcacattcctactgttgaatatcttcagaggaaaactgacgactattctttgggtaaagaaactgatagctgttgtcacttcagattataagatttatgtatgcatatgttcaaatttctactgtttcaatctatttcatgattgcctattttatacagtgagtcacatgttagaggtggggaagacgttattaaatagagatgcacctcagtcccagcagtacaagtattttagttgcttacaacttacatgggcaatgcttattatttttgtttgtcgagtttcttgtgaaattagattattgacacatgatgttggtttcaattgcatttgctgcccctaattaatgattgcacttataaggttatataacttcttgtgcacattctgttttacactc

SEQ ID NO: 19770 - DNA, 334 bp, Glycine max
gacataaccaaaccaaccaataagacatgatgatcataatcgtagctcccatcgccgtctgatggcacgccaccgacggcattcgcatcgcaggcgtaccttaccagaactatctctgtcactactctttattattctacttacatttactttcgctgactcggcttatgtttgattctgactcacagaatgtgatgttgagagaaggttccgagattgatgcgaaacaaaaaacggctgagttttgcagtgttcaaatggactaacactagtggacgatgtgcattcgatcattgactagtctgcactttttggcagataataaccgttcaat

SEQ ID NO: 19771 - DNA, 406 bp, Glycine max
gcaaaacatgctgctggatttaaataagaaaataccaattagacggatcagtaaaagcttggattttgacagtttgaatatcagattcagggagaactgcagattggccaagagtagaagtcattcatcaagtagaagcaaggagatatcttttaataggattttctctaagcttccagtcattgattttgatattgacaaagaaagagcattgaacgtgattgacagactggatgtggtcagataatttgaaagtttgcccgatcgcctttgaaatgaatggaaaggagaaataatacatgtagacatggtagtgggtttcctttctgtgcatatgcaacgttcttgctgcaagcgttgaatgccatatttttgccgcacctttggtactttggattctcattgg

SEQ ID NO: 19772 - DNA, 384 bp, Glycine max
acaaaaaccattcaattcaaagatagtaggctgccaggcaccgcacaccgccaccggactgtctccgatcctcacaattttgcctccggcatgtctccggccgccggagtcagcgtccccctcctgggggattccaaaggaacgccgccgccggcttccgaccccggcgcggtgttcaacgtggccaccagcatagtccgcgccggaatcatgtcgattccggcgatcatgaaagttctcggcgtaattcccgctttcgcgatgattctcgtggtggccgtgctggcggaactgtccgcggacttactgatgcgggtcacgcactccggcgaaacgacgacgtacgctggcgtcatgagggaggcgttctgatcgggtggagca

SEQ ID NO: 19773 - DNA, 393 bp, Glycine max
ggaagaaggaaaacctagctgagattagaaaaagcatcaaatggcatatgagaatgccaaaagttctaaaatccttaacaaaccccccagcaacgtgcacgtaaataaaacccataagtcataagccccctaatcttcacctcatctcgatttgggaagcgaaaaatcataaaaccaactaagaacagagcaagttttgcttctgcgtcgtcccctgattccggcaattgtatcccgtgaggtgtgacttgtaagctgctacagtaagaaaaggaacagaagaaacccgaattgttatatttttttgccgaaggattacctggaagcaatcatggatgttgatgcacagccaacgatggatgaaacaattttggttggtgatgatttaatgac

SEQ ID NO: 19774 - DNA, 426 bp, Glycine max
  modified_base (11)..(11): a, c, g, t, unknown, or other
  modified_base (28)..(28): a, c, g, t, unknown, or other
  modified_base (42)..(42): a, c, g, t, unknown, or other
gacccacgcgnccgatcacctataaaanggccgccactgctncactctgcgccacttccaaagcgtctttctcatgagcgaagcccgccccgagaagaagctgcttcatcgcgcttcccaaaatcgcgtttcccaagctccatatcaaacccgtcgctatggctacgctcggcgctcgcatggtggccgacgcacccaccgtcactccaccggcctcgctcgacttcgaaacctccgatttcaagaaagagaagattaacctcgctggacacgacgagtacatcgtgaaaggagggagggatttgttccctctgttgcagggtgctttcaaggggattaagcagattggcgtcattggatggggttcgcagggacctgctcaagcacagaatctgcgggactcgcttgctgatgcaaagtctgata

SEQ ID NO: 19775 - DNA, 458 bp, Glycine max
cccacgcgtccggaggaaagaaagatgttttttaacggatatgggtatcaagggacatcatcatttgagcagacatttcgatgttactctgcttcgtttattgaaaagcccgaaattgaaaatggtgataaaattataatgcctccttcagtccttgaccgtctagcatttctacgtatggattatccaatgatgtttgaactcagaaatggtgcttctgagagggtttctcattgtggggttctggagttcattgcagatgaaggaactatatatatgccatactggatgatgcagaatctgcttttgcaagagggagacatcgtaagagtgaaattcgtatcacttccaaagggaacatatgttaaattacagccacacacaaaggacttttttgatatttccaatccaaaagctatcttagagaccactttgagaaaattttcctgcttgactac

SEQ ID NO: 19776 - DNA, 420 bp, Glycine max
gtgatctccaaaatgcagagcacagttttctctctctccccttccctctctctcccaaaacaacctctcaaacgctctgtctctgtttccacttccaaactcaacgtcattctcactccctcttcattcccatgtcaaccatgttctcttgcttattctccatctttcaaactcgctccctcacactttcaccccttccatgccagagcaacctccgtgccggagagcagcgccggcaacactctgctcaatactctggaacttggagccctgtttgggctctggatcctcttcaacatctacttcaacatctacaacaaacaggtcttaaaggtctaccatttccctttaaccgtaagcacccttcagttcgctgtggggtctctcttcgtagcattcatgtggagtttcaatctctat

SEQ ID NO: 19777 - DNA, 376 bp, Glycine max
tgtatatatataggtgcacataccattggtactacagcttgccagttcttcagtaacagattgtacaacttcaccgcgaatggtcctgacccttccatcgacccttcatttctttcccaactacaatcactatgccctcaaaacggtgacggttcaaaacgagtagcgctagatacgggtagtcaaaccaaatttgatttatcttactatagtaatttgaggaattctcgtggaattctgcaatctgatcaagcactatggagtgatgcttccacaaagacaactgttcagaggtacttgggcttaataagagggttacttggattaacattcaacgtggaatttgggaagtctatggtgaaaatgggcaacattg

SEQ ID NO: 19778 - DNA, 349 bp, Glycine max
gacgagcgagaaaggaagacagaggaacgacgagcacagcactacacagctccgaaataggggggggagaaatgggggatgcgccggatctccgagatctgaataaatgacaaatgtatcattcacagaatgtgcctagggcaagttcaattggtggtgattcattaagtcatgggcagcacatagattggggtgtcagcacaatggatcctggcagtggacgaaatggccttagcaaccactcttatctcacctcaaaacaacgtttacggtggacacatgaattgcatgaacactgtggtgatgctcgtgctgaactcggtgggccacatcgagccacacccaaaag

SEQ ID NO: 19779 - DNA, 442 bp, Glycine max
gtatggagcatggcagaggcggtcgagtaaggaaaaagaggagctgacctcaacccttaaatcaatgttaagcaacatatcaagcatggctgtgttaattgaacacagtttccttgaagcatacggtggagaatcaagagatggctcttcaactgcaaaattctccactggggacataatatccttgaactcagcagtcaccactactaatgacctcaatgacctttgctacgcggtcctagccattttaaggtcacgctttgcaaaaatggaaggcataaccgctggcctttgcttcaagggacaaagcaaacccagagtggtgtgcattcatgtctggaagtctctccatttttgttactcttggattctcaactctgaccacagaaattggatgatgccatatcttgaacgcttctctatcaacatgaagtatgatatt

SEQ ID NO: 19780 - DNA, 447 bp, Glycine max
aaaacattctcatcattcacccaacaaaatggctctgcttctgatagtacgcatttcactggtaaccctctggctcggttacaccctataccagcggctacgcttcaagctccctcctggcccacggccctggccggtagtcggtaacctctacgacataaaacccgtccggttccggtgcttcgctgagtgggcgcagtcttacggccctatcatatcggtctggttcggttcgaccctaaacgtcatcgtttcaaactcggagttggccaaggaggttctgaaggagcacgatcagcagctggcggaccggcaccggagccggtcggcggcgaagttcagccgcgacgggaaggatctcatttgggccgattatgggccgcactacgtgaaagtgaagaaggtttgcacgctcgagcttttcacgccgaagcgcctcgagtccct

SEQ ID NO: 19781 - DNA, 445 bp, Glycine max
cctgcattgagcccaaatgatgaagagattccccatggttttatttttgcaacattcatgttggcttcaatgttgggaagctcgcttgcatcgaggttgatgtcccgttcttcactccgagtagagagctatatgcagattgttttcgcagtttcttctgctgctctgatgctccccattttgaccacgttcttggtagttccctccggagtgaaaggtggaagcatctcattctctggttgcattcagcttcttggcttctgtgcttttgagagttgtgttggcatattctggccatccattatgaagatgagatctcaatacattcctgaggaggccaggagcaccatcatgaactttttccgcattcctctgaacatttttgtgtgtgttgtgctgtacaatgttgatgcattccctatcactgttatgtttggcatgtgct

SEQ ID NO: 19782 - DNA, 465 bp, Glycine max
caaagctttgacagttgttcatcgattatggtctgaggtgcctggaaagctgaaagattacatatgtcgtcccaagttcaatggatatcaatctctgcatactgttgagatgggtgaaggcaaggttccccttgaagtacaaattcggaccaaagatatgcatttacaagcagaatttggatttgctgctcattggagatacaaggaagatgattgtcagcattcttcatttgtgcttcacatggttgagtgggctcgatgggttgtcacctggcagtgcgaagcaatgagtagagattggtcatctgttggatatgctgattcagtcaatcccccatgcaagttcccttcccatgctgatgattgcccatattcttacaagcctgattgtggtcagaatgggcctgtgtttgttatcatgattgagaatgataagatgtctgtccaagaatttagcgcaaactc

SEQ ID NO: 19783 - DNA, 466 bp, Glycine max
cccacgcgtccggcttgaaatcctatgtcaacaaagggcactggctgcatttcatgtagatgaaaacaaatggggtgttaatgttcaaactttatctggttcccctgctaattttgcagtatacactgcagttcttaaaccacatgatcggataatgggtttggacttgcctcacggaggacatttgtctcatggattcatgacacccaaaaaaacgtgtatcagccacatcaatttattttgaatctatgccttatcgacttgatgaatcaacaggtcttattgattatgatatgctggagaaaactgctactctgtttcgtccaaaactcattgttgctggtgctagtgcttatcctcgggacattgactaccctcgtatgagaaaaattgcagatgaagtaggtgcttttcttatgatggatatggctcatataagtgggcttggtgctgcatctgtactttc

SEQ ID NO: 19784 - DNA, 434 bp, Glycine max
  modified_base (302)..(302): a, c, g, t, unknown, or other
gaggagggtgtgtttctggtttttggaaatttcagcccccatcgaaaaacaagaagccccaacgatagtaatcatcgaaggaatttgaaaggtcgaaacttgagcatctgggatcgcgaaattggggattttggttaaaagggtataatcttcggaactgattgatggcaaaactgtacgtgaaggcggtgccaccggcggatctgaacaggaacacggattggttcacgtaccctggcgtttggaccagatacatcctcatccttttcttttcttggatcctcgtactctctgtcttcggntgttctcctggcatcgcttggaccatcgttaatctcgcacactttgctgtaacatatgacttttttcactggaagaaaggaactccatttgcagaggaccaagggatctacaatagattgacttggtgggag

SEQ ID NO: 19785 - DNA, 425 bp, Glycine max
gaggagggtgtgttactggcttttggaaatttcagcccccatttaaaaacaaaaagccccagggatagtaatcggggaacgaatatgaaaggtcccatcttgagcatctgggatcgcaaaattggcgattttggttaaaaaggtataatcttcggaactgattgatggcaaaactgtacgtgaaggcggtgccacctgcggatctgaacaggaacaccgattggttcacgtaccctggcgcttggaccaaatacatcctcatccttttcttttcttggatcctcgaactatatgtcttcggttgttctcctggcatcgcttggaccataattaatctcgcacactgtgttgtaacatatgacttttttcactggatgaaaggaactacatttgcagaggaccaagggatctacaatagattgact

SEQ ID NO: 19786 - DNA, 455 bp, Glycine max
cccacgcgtacgcccacgcgtccgggacttggcctggcaatttgtagggcgttcgtaaatcgtatggaagggcatatttgggttgaaagcgaacgtattggtaaaggatgtacagtcacttttattgtaaaacttggaatcccagaccgatcaaatgaatttaagctaccttttgtacctaaagtaccaggaaatcatggatctacaaactttgctgggctcaaagttcttgtcatggatgacaatggggttagcaggacagtaacaaaaggacttcttatgcatttaggatgtgatgtaacaactgcaagctcaagtgaagaatgtctgcgtgttgtttctctggaacatgaagtggtcttcatggatgtttgtacagggttagatggttattaacttgcagttcgtatacatgagaagtttacgaagcatcaagatagaccactgatagttgc

SEQ ID NO: 19787 - DNA, 382 bp, Glycine max
gacaaaccctaacatagcattatgctaagagtctatcaccatcgtactgggggtccgacacatgcttctccccctgaatactttgacctccaagggaacacaacttataaagacgatctatatttaaggaaaatgacagggatgcatcggtggctttgatgcacatgtcatgtggaacattcttacccatcaaatgaaaatgatcacctgtaaagcccactgaattatggtgatggaaatcaaaaaggctcaaaggtgtcaactactgtcaagcctgaaacacaaaaggcacctccacctatcgaagctccagtcatatctttagatgaactgaaggagaagacagacacatgaggtgcaaatgcattaatatgtgaaagat

SEQ ID NO: 19788 - DNA, 455 bp, Glycine max
cccacgcgtccggtttgggattggagggattgacgctgcgtctcttcctgggctctttcgatccatccctcattcctaatcctccaatccaaccacctcagcctcacactcacatatacacatatctgaacgcgtatcgtccctcctatggcttcaaagcgcatcctcaaggagctcaaggacttgcagaaagacccaccaacttcttgcagcgctggtccagtagctgaggacatgttccattggcaagcaacaataatgggtcctgctgatagtccttatgctggaggtgtattcctagtcactattcacttccctccggattatcctttcaagcctcctaaggttgcctttaggactaaggtgtttcacccgaacatcaatagcaatggtagcatttgtcttgatatcctgaatgagcagtggagccctgcactcaccatctctaaggtact

SEQ ID NO: 19789 - DNA, 430 bp, Glycine max
  modified_base (10)..(10): a, c, g, t, unknown, or other
cccacgcgtncgttccaaccaagcccatggtggttgaaactttctctgagtatcctccccttggtcgttttgctgtgagggacatgcgtcaaactgtggctgtcggagtcatcaagagtgttgagaagaaagaccccaccggagccaaggtcaccaaggccgctgccaagaagaagtgattgcatttgggcaattttgctagcacatgtgatcatcatcgtggttactcctttatagtagttttatccttgcagagtcttaagtgttttgtttaagttatatttttaagtttctgccgatttcatgtagccgtaactttcaaaactaggttcttgatcggcggtggtcaattttcattgctggttgtttttgatgagtactgttttttgttttgatgggtaagaagagtctgagatatttcgaatttcac

SEQ ID NO: 19790 - DNA, 234 bp, Glycine max
  modified_base (25)..(26): a, c, g, t, unknown, or other
  modified_base (30)..(30): a, c, g, t, unknown, or other
ggaacataaggcgggcaagagagannggancttctctcttaaatggacgggggcgaacaggggctcccttcggccaccaccgtcgccgccgccggctataccaacgtatctcctcctccgctcgatgatactgtcggggcttcacactgacctgatgtttcctaacaacacgctgatcggaaacgtggaaggtaacccctgagtccataggaaaaaccccatcacgagcacaat

SEQ ID NO: 19791 - DNA, 60 bp, Glycine max
tttaaataagaaaataccaattagacggatcaataaaagctttgatttttaaaggggggg

SEQ ID NO: 19792 - DNA, 422 bp, Glycine max
ctctaccctcccttccctccactttcctccctcttcttcttttgcttctgtttttgaggcgaagaacgatggaattgtaatgctgggaatataattggagaattgggggaggagtaagggaggaaatcatacacaatgcccgagttccccttgagctcgaggttggaaagggtgcaaaatagcttgagagagaatggttctctggtgtatctcaatgtgtatgatcttacacctgccaacaattatctttacgcctttggggttggaatctttcattcgggcatagaagtgcatggtatggaatatggctttggagcacatgaatacccaacaagtggtatatttgaggtcgaacccagaagctgtcctggcttcatcttcaaatgttcagtattgttaggcacgaatgatatgtcttattc

SEQ ID NO: 19793 - DNA, 440 bp, Glycine max
  modified_base (390)..(390): a, c, g, t, unknown, or other
ctctaccgtcccttccctccactttcgtacctcttattcttttgcttctgtttttgacgcgaagaatgatggatttgtaatgctgggaatataattggagaattgggggaggagtaagggaggaaatcatacacaatgcccgagttccccttgagctcgaggttggaaaggatgcaaaatcgcttgagagagaatggttctctggtgtatctcaatgtgtatgatcttacacctgccaacaattatctttacgcctttggggttggaatctttcattcgggcatacaagtgcatggtatggaatatggctttggagcacatgaatacccgacaagtggtatatttgaggtctgacccagaagctgtcctggcttcatatgcaaatgttcnagattgtgaggcaagaatgatatgtcttattcagaatgtcgttctttcat

SEQ ID NO: 19794 - DNA, 458 bp, Glycine max
aaccaaagccccctctggctttggtccttcgctagggttcggggattcaccatttcccatttcgtcgcttcttatttacccccagaaatcccatgatcctcttctctcgtttcgacacttctcaacttctgagggaaattcaatgcagctgtttctgaggggtctcatgtgatttctgtggttctggttcggtttatcgcggatcttgaggaggcttttgctgaagtctgtgactctgtgacaatgccttctacagaaaatcagggctcttcgtcgtcgttttcctcgtttggccgttccatatttggtgccaggcaggagcaggttcattctgtggaagcaagtaatgaatctgattcctgtaatttagagcttggattgttccagaagcatgttacagatcggtttcaagacctttctgcggctagtgatgaggaatttctctcaattggatggat

SEQ ID NO: 19795 - DNA, 406 bp, Glycine max
gcgcttgtgttgtttttgtgtctcataaatcccacactcagtcactattgctccagcctccacctgctgaaagaaactcctaattgtcaattgttgtaaagaaaagaactgaaaacactgacactgttattctctgaattttctcaccatctacaactgaagttttaaccaatatggaaactgaaaagtctaatgtttcaaaggctgaagaatttaaactccttgccaatgaagtgttcaatgctcgaaaatactcccaagccattgatctatatacacaagcaattgagctgaacagtcaaaatgcagtttacttttctaatcgggcctttgcccatcttcggcttgaggaatatggtagtgcaatacaagatgccacaaaggctattgaaattgatcctaaata

SEQ ID NO: 19796 - DNA, 461 bp, Glycine max
atcactggtaaagaatatgcaagaaacagtgtattattagaaagtacataaaattactgtatcatttaatcataaatcagtcacatttgataacttttataaaagcaactttcaaaaattatttttgaggataatttctgatttatggataatgtaaaactttttacaataaaagtgtatgaaaaataaactcctacaatgataaaaaaaaatgtgcaaggagtgtattattagagactctgttgcatttctcatcatatatataatatatataagtaaaaataatttcatattaattaaaaaaagcaattaacataatttacttttactaatcttaagtaaaaaaaaagttatttttaaaatgtctttcattataaagtactttatatcatgaataaaaaagtcattgaaaataggattagaattaaatgaaaaatattttaagaataataacattaaat

SEQ ID NO: 19797 - DNA, 472 bp, Glycine max
  modified_base (267)..(267): a, c, g, t, unknown, or other
  modified_base (285)..(285): a, c, g, t, unknown, or other
cccacgcgtccgggaacaccgggcggtctgaaccggcagggtcttccgggggaccggaagccggacggcggcgacaagaaggagaagaagttcgagccggcggcgccgccggcccgcgtgggccgtaagcagcgtaagcagaagggcccggaggcggcggcgcggctgccgacggtgacgccgctgtcgaagtgcaagctaaagctgctgaagctggagcgcataaaggactacctcttgatggaggaggagttcgtggcgaaccangagaggctgaagccgcangaggagaaggccgaggaagacagatccaaggtcgatgatctccgaggttctcctatgagcgttggtaacctagaggaactcattgacgagagtcatgccatagtttcgtcctcggtggggcccgagtactatgttggtatcttgtcttttcgtcgataagatcagctcgagcctggatgcgctattt

SEQ ID NO: 19798 - DNA, 413 bp, Glycine max
cgagaagccaaaaaatggaggccgacgagaagaaagcaatgatccgcgacgtagcgctacaagtcgttttcatttccctcactattttcagcttcctctggatgcacggcctccctcaaaacctctacgccaagctccgccaccgtcctccaaactctcgcgccgtccaagccaagcgccacttcgtccaaggcgcacagctcctcgcccaagccagaagatccaaaagcgcttccgccgcaacctccctcgccaaacaggccctagccgaggccgagaaggccctcgcgctcgaccccaaggacgccgcctcgcacctcctcaagtccatggcgctcgacctccagggcttccgcaccaacgcgctcgacgcgctcgacgccgcgttgtcccctctcgccgcggggtccctc

SEQ ID NO: 19799 - DNA, 468 bp, Glycine max
  modified_base (9)..(9): a, c, g, t, unknown, or other
ccacgcgtncgcacttcaccaccaccttatcctatctccctgttcttcattctatgtgcatgtaaactctctgcgtgcctatggaccttttctttttagcacggaacatgtgagtgccacaaaacgttagagactatacgacgctatctctcactctaataagtcctaacctcattcacctcttgggtggtgtggtctataatgtaatttatcatttgtgcaaattttttctcagatctatccaacttctcttttttgtccttttattctgtttggaaatcgtcatcatcaccatttgatttgcagggccataatttttctgctttggttttcaactcttccacaccattttccattttttcttcttcttcttctctggtttttttttttcctgtgaaaaaaaaattgaagtctttttggctaaacctccaaacagatccaactatggaaatgtaaaattttcaattt

SEQ ID NO: 19800 - DNA, 461 bp, Glycine max
ctttagtggaacttggtttaagcaaatgcgttggagtgaccaacaagggaattgtgcagctagtatctggctgtggctatttgaagatacttgatttgacttgttgtcgcttcatatctgatgcagcaatctctactatagcagactcttgtccagaccttgtctgtctgaagctagaatcttgtgatatggtgactgagaattgtctttatcaacttggattaaattgctcgcttctcaaagagcttgatcttactgattgctctggtgttgatgacatagctctaagatatctatcaagatgttcagaacttgtaagattgaaattaggattatgcacaaacatatcagacataggattggcacacattgcttgtaactgcccaaaaatgactgaacttgatctctatcgatgtgtacgtattggagatgatgggctagcggcactaacgagtggatgc

SEQ ID NO: 19801 - DNA, 466 bp, Glycine max
cccacttcctccaaagacatcatttttattaccaatcttccaatttcagagaaaattctttgtgggcatctcttaattaaaaaaatgtcaagcttccccaacacggtggcggaaggccgcaggtccagcaaggcaccggaaaaatccactttttctcagacttgcagcctcttgagccagttcttgaaggagaaacgtgcttctgctgattccacctttcgaattggtgggaaaatggaacccatagcgagtaccaagggtttgttaggaagcctgcaaaactctgatggggctttgaaactaagcgcttctgccatggaatttcttccccagcttgtggaaaacccctgcattaagaagtctagatcacagggacctgaaactccccaattgacaatattctatgctggaaaaatgttggtgtttgatgccttttcgccggagaaggcgacggaggtcatggaga

SEQ ID NO: 19802 - DNA, 468 bp, Glycine max
  modified_base (337)..(337): a, c, g, t, unknown, or other
gggcacagaaatatggattgaaaatcatccttgatcttcatgctgcacccggttctcaaaatggttttgagcacagctcttcaagagatggttcacaagaatggggaaaaacagatgaaaccattcaacaaacagttcatgttatagacttcctaactgcaaggtacgcaaaatgccaaagcctttatgctgttgagctaataaatgagcctctctcacctggtgtgacactagaggccttgaacaagtactataaggctggttatgaagcagtgcgcaagcactcttccacagcttatgtggtgttatcaaataggataggaccctcaaatcctanggaactcttccctcttgcaaatggccttatgcgatctgtgattgatgttcactactacaacctctttcaagatgtatttaatgacatgactgtccaacagaacattgatttcatctacaacaatcgctcat

SEQ ID NO: 19803 - DNA, 468 bp, Glycine max
ttgacattgataagcactctgaatggctgctatggcattccctgggttcattacaagggtcggcaaggagatttctacattttggtcatggacatgcttgggcccagtctttgggatgtatggaattctgttggtcaacaaatgtcaccaaatatggttgcgtgcattgcaatagaggcaatatcaattcttgagaagctccacttgaaagggtttgtgcatggagatgtgaaacctgaaaactttttgcttggtcaacctggatcagctgaagataagacgctatatcttattgatcttggtctggcttctaaatggaaggatgcatcatctggtctacatgttgattatgatcaaagacctgatatattcaggggaacaataaagtatgctagtgtacatgcacatttatgtaggactggaagtcgaaaggatgaccttgagtcactggcatacacactaatattt

SEQ ID NO: 19804 - DNA, 468 bp, Glycine max
cccacgcgtccgcacttcaccaccaccttctcctttctccttcttcctcctcctttctgctggttcattctctccttccctcttgagcttttctttttagcacggaacatgtgagtgccacaaagggtttgagactttttgaggctttctctcactctaataagtcctaacctcattcacctcttgggtggtgtggtctataatgtaatttatcatttgtgcaaattttttctcagatctatccaacttctcttttttgtccttttattctgtttggaaatcgtcatcatcaccatttgatttgcagggccataatttttctgctttggttttcaactcttccacaccattttccattttttcttcttcttcttctctggtttttttttttcctgtgaaaaaaaaattgagttctttttggctaagcctccaagcagatccaactagggaaatgtaaaattttcaatt

SEQ ID NO: 19805 - DNA, 465 bp, Glycine max
gtctctgccgtcacaaaaaagagaaaagtctccgtgtcgtcgtgactaggagggtgagtgagtgtttgtgtaaatcggagaaattgttgggctattcaagagatcggcagcggcgtcatgggtggagatggagccacggcaaacgcggaggcgcagtacgccacggcgaacatatcggtgtggtgggacatcgagaactgccacgtccccaagggttcggatccgcacgcgatcgcgcagaacatcaattccgccctcgttcgcatgaactactgcggccccgtctacatctccgcctacggcgacaccactcgcatccccgcctctgtgcagcacgcgctctccagcaccggtatgtccctcaaccacgttcccgccggcgtgaaagacgcaagtgacaagaagattcttgttgatatgctgttctgggcagtggacaatcctgcacctgctaattttttatta

SEQ ID NO: 19806 - DNA, 324 bp, Glycine max
cccacgcgtgcgaccacgcgtacggatggggattggacttgcgtattatgggagtcaccttgagctcgtcataacggttgttatttttcactttttcgccagagcccaatcggccactctcatggccaccgatcaaatcaccgcgtcggcgccctcggagagaggcgccggatggcaaactccgaaaaccgccgacaagaaacacctttcatagcccttactcacgtccgccagaggccacccatcagcgttggatttcgaagcttgaagatcctgcctatcgcctcaatgtcggcggagccactcgtattttcccctctttct

SEQ ID NO: 19807 - DNA, 460 bp, Glycine max
  modified_base (289)..(289): a, c, g, t, unknown, or other
caaaatttccctcaattatttctcaccatcatcaccccctttccttctctgaagaaaaaaaaaagttaatttcttgaacccaatggcttcagagacagaggtgccggatattatttcctctgttttcgaaaggtttcaacaaaacagagacatgtctctgtttctgcccttcctcttcggcttctctgacgccaccccaggacgaaatagcgacgacccagatcacgaaactgctcccacagaagccccacaacgtcaaagaataatcttggtgaaccccttgactcanggcatggtggtgatcgacggtggttcgagcctcgaggctctgtttcgcgaattcaccaacggaaaaggtggtcgaccaccggcttctaaggagtccattgaagccttgccgagtgtggaaattggagaaggtaacgaagattcggagtgtgtggtttgtttggaggagttt

SEQ ID NO: 19808 - DNA, 464 bp, Glycine max
ggagggggcagggaatttcaattatatgtatctggtgtattcacggggagatgtggcacagcactagatcatggtgtcgtggctgttgggtatggaacagctaaaggtcatgattattggatcgtaaggaattcatggggttctagctggggagaggatggctacatcagattagaaagaaatcttgctaacagcagatcaggcaagtgtggaattgcaattgagccatcttatccccttaagaatggtccaaatccccctaatcctggaccatcacccccttcacctgtgaagccgccaaatgtctgtgacaactactacagctgtgctgatagtgctacttgttgctgtatttttgagttcggaaatgcttgcttcgagtggggttgctgtcctcttgagggtgcttcctgctgtgatgaccactacagttgctgccctgcagactatcccatctgcaacac

SEQ ID NO: 19809 - DNA, 446 bp, Glycine max
  modified_base (14)..(14): a, c, g, t, unknown, or other
cccacgcgtccggnggacatgcccgcgaaacagaagggcgaaggggcaaacacaactttgggggggcgaaggagagcgagagagaaaaaaacggcggggatcttcagcagttccgaggtgtcgccgccggaggagctggtggctgccggcagcagaacgccgtcgccgaagacgacggcggggaagctgctgaaccggttcgtggagaacaaggcgtcggcggtgtcgctgcaggtgggagaacacgtgcagttggcttacacgcaccacaacgagtcaccgtggcatcccagatcatttgctgttaaggatgagatattctgcttgtttgagggggctatagacaatttgggcagcctgagacaacagtatggactggccaagtcagccaatgaagtggttttggtgattgaagcttacaaagctttacgtgatcgagcaccata

SEQ ID NO: 19810 - DNA, 461 bp, Glycine max
gtccctttttacagagtcatgactatggctggagctttgagtctctcccaattcccagttcgtgggtctgtttctttgcccaaaagaagaatacccagaagaagcttttgcattaagggcatgtcagaaatctcttccactttttctgtgagcacccaacaagaagaaccaacttctaatgcttcgtcagtgacaattgcacctccccccaacttcaagccccctgagcctaaacgctttgcaatcagacctgacaagaccagtgaagtatttggagctttgcttcctttgctctttcgctttgctaccggagttttcgtttctgggtattctttttcaattgtttctaaggatgaaattcctccagatgaatatgctttggaacttaatggcgttaccataaaagaaacagcaaaattaggccctcgcccagagaagcctattgagatatatgaatttga

SEQ ID NO: 19811 - DNA, 458 bp, Glycine max
  modified_base (290)..(290): a, c, g, t, unknown, or other
agaaaacagcatcgaacccgtcgtagcagaaaaacttgtcaccatggtttcttccgacaaggatccacgagaggatgtccttcaagcctggtacatggatgatagtgatgaagatcaaagactcccccaccacaaagaacccaaggagtttgtctcgttggaccaacttgctgaacttggagtccttagctggaaactagatgctgataaccatgaaaatgatccagagctgaagaagattcgtgaagagcgtggttacacctacatggatgtttgtgaggtctgcccanaaaagttgccaaattatgaacagaaaatcaaaagcttctttgaagagcatcttcacactgatgaggagatccgcttttgtgctgctggaagtggctattttgatgttagggatcgcaatgaagcttggattcgtgtgtgggtcaagaaaggaggaatgatcatcttac

SEQ ID NO: 19812 - DNA, 432 bp, Glycine max
acataactatcttgtgtgtcaaacggatgcatactggatacaggtgtggaggataacatacggtaatacaacggagaaacggtttctgaccattgcgttgagcagggctgaggcttattgaattatttaaattggaaagtcagattgaatcaatgatacacatttattaatggaacgaacttatacgcttcctactgagaatgtttggtgcatgtcactcaatctagaacgtataatacttgatgcgatgattctcatagcatagtgacaagatcttatatggaaaactgatgatgtgagccttaacagcacttatgaatgctgtattaatatagcacagagatgtgctcaatgtgtacgaaacatgaaacatgtatttatacaggtatgagtcctggtggttggaaggtactggttgaatactatgatagc

SEQ ID NO: 19813 - DNA, 466 bp, Glycine max
cccacgcgtccgtgctactctttacaaggccctagttacagatgccgacaacgtcatcccaaaggctcttgattccttcaagagtgttgaaaacgttgagggaaatggtggcccaggaaccatcaagaagatcactttccttgaggatggagaaaccaagtttgtgctgcacaaaatagaaagcattgatgaggcgaacttgggatacagctacagcgtggttgggggtgctgcattgccagacacggcggagaagatcacattcgactccaaattggttgctggtcccaatggagggtctgctgggaagctcactgtcaaatacgaaacaaaaggagatgctgagcccaaccaagacgaactcaaaactggaaaagccaaggctgatgctctcttcaaggccattgaggcttaccttttggcccatcccgattacaactaatcctcttcaacttacttgttatca

SEQ ID NO: 19814 - DNA, 406 bp, Glycine max
cccacgcgtccgataagctaccttgctagtttccatcatcgaatctgttggtatttccaaatatacacattttctattttattcatagaaatctttaacttgagaagcattacatggcgctgacgatgatggcggcgatcggcatctgcatgaagcaagagaagaagatgccggcgacgccggcgccggagaacgagctgaagaagcggaatgaggagctcgagaaggagctcagagagagcaatgagagggaggagcagatgaagcgcgaactacagagcgcgtgggagaggctgcgcgtggccgatgaggctgaagagaggctctgctcccatctcggatagctagaagcagacgccgtgtaccacgcgcgtgactaccacgcgcgcatcgtctccctcatgga

SEQ ID NO: 19815 - DNA, 451 bp, Glycine max
  modified_base (10)..(10): a, c, g, t, unknown, or other
cccacgcgtncggtaatttctttctgtaacctcatgccatgctcactcagttactcatttttcttgcaccgcctattgtgcgtgaaatgaaatatatcatttgcggaatctctccacggagcaagttttgggcaggtttgagttttagtgtttgaagcattcaaatgatcttgagttggagttggagttggttatcttagtggcttggatgttagatgcctgaagcctgcgttggaggattgcaattgcatactaaagagggttcattgttcatagcttaacaccaaaaagtgtgggcacatgctacagctacatacccgaaaaaaattacatattctttgtatatgtgttatatttgtgtttgataattccattggtaaatgtgatttttctaactcgtgtgcagaaaaccagttataggatttgtctcattggcgacatgaacttctga

SEQ ID NO: 19816 - DNA, 263 bp, Glycine max
agtacttcttagaagtattcttcaaacatcgttgtattagaaagtacatggtgtctctcctgaaaatgtcttgctctcagtcatatctgatgactccgaaacacatagctttgcaaaatcatatgtgagggtcttcacatatttacagattttagctacatcgtttcaaccaccacggacacctaattaattgcaatgatactaattaaaaatgaactcgaacagctcttataagagacttttcgacgataatgatgatgttt

SEQ ID NO: 19817 - DNA, 448 bp, Glycine max
ccatggaaggccaaaattccgccatataaacatgccattgcagcctatagtgttgccatagcgggcctcccttcacaaactgtctatggtggttggcaaaaatctgcaatggcgctgccatttaacaacattgacacttagtagggtaaacttgttagtaatttgtataaaggtacgattttcggatctaagccgcaccagctgtcacatttgggatcataattgaatattatcattaactatatcttgttttgatattttggcttaaaaaaaagctatatcttattttattgtataatggtgatcattattttcgggatttgctggggtcggtgaatgttttattttttggttgatgcacgcatgggagtgctctcctgggaaagagttcgcatggaacttgttatccctctttactacttctggaatgctgtttctagaaatgagc

SEQ ID NO: 19818 - DNA, 296 bp, Glycine max
ttcatagggggcctttcttcacaaactgtctatcgtctttggcaaaaatctgcaaccattctaccatctaacaactttttcacttattctaacaaacttgtcactaatttgtataaaggttctattttctgatctaatccgcaccatgctgtcacatttgggatcataattgaatattatcattaactatatctcgttttgatattttggcttaaaaaaaagctatatattattttattgtataatggcgataattattcccgtgcatttctggctgattttgaatgttttatttt

SEQ ID NO: 19819 - DNA, 411 bp, Glycine max
atcgactcgtacctcgttgctggtaccgatggcgtgggaacgaacgtgatgcttgccttcgaaactggaatccacgatactattgggattgacctggttgcgatgagtgtgaatgacattgttacttcgggggcgaagcctttgtttttccttgattactttgccactgggcaccttgacgtggacgttgctgaaaaggttataaaaggcattgttgatggttgtaagcaatctgattgtgttcttttaggaggagagactgcagagatgcctggtctctataaagaaggtgagtatgatcttagtggctgtgcagttggcattgtgaagaaagattctgtaatcaatgggtcaaacattgttgctggtgatgttattattgggcttccatctagtggagttcactctaat

SEQ ID NO: 19820 - DNA, 413 bp, Glycine max
aagacacagccattgtttacttttcattgattgagccaaagctttgtattttctgcgataattttccattgggtggaagaaagtctcaacctttattcgaaagagcaaggatctgagttgagttgagtgatcatgtgtggtggtgcgattatctccgacttcataccggcaggtcccgccagcggggcgcggcgcgtgaccgccgacatcctgtggccgagtttgaggaagcgcttctcgaagccgctgctggacgatgatttcgaggctgggttcagagaattcaaggatgattcggaaatcgaggatgttgatgacgaggacgatgaagacgaggaggagttgaagaagaagccctttgggttctctcgctccagcaacaaggctgcttctaagcctctctctcgtggatc

SEQ ID NO: 19821 - DNA, 455 bp, Glycine max
cccacgcgtccgcccaactcaatttttctctcaaccggcccaatttagcataagcccagcatggccaccgcaacagcagcagccacctcgtccttcatggggacgcgcctcctggaggcccactccggggcggggcgggtgcaggcccggttcgggtttggcaagaagaaagccgccgccccgaagaaagtttccagggggtcgggctctagctccgataggcccctgtggtatccgggcgccaaggcgcccgagtacctggatgggagccttgtcggagactacggattcgacccatttgggctagggaagcccgccgagtacctgcagttcgagttggactcgctggaccagaaccttgcgaagaacgtggctggggacatcattgggaccaggaccgagctcgcggacgtgaagtccacgccgttccagccctacaacgaggtgttcgggct

SEQ ID NO: 19822 - DNA, 410 bp, Glycine max
cccacgcgtccgaacaacacaggcgcagacgcaaacgcaaacgcaaacgcaaacgcaaacgcagagcgtgatccattgacgaagatggtgcaacgtgtcacctaccgaaagcggcacagctatgccaccaagtacaaccaacacagggtcgtcaaaacccctggtgggaagctcgtttatcagactaccaagaagagggccagcggacccaaatgccccgttactggcaagaggattcatgggatttcacacttgaggcctgcagagtacaagatgtcaaggttacacagaaaccgtaggactgtcaaccgtgcatatggtggagttttatctggaagtgccgtcagggagaggattatccgagccttcttagatgaagagcaaaagaatgtgaagaaggtgttgaagat

SEQ ID NO: 19823 - DNA, 456 bp, Glycine max
ttccaactccatttacgatttcactgtcaaggacatcagtggaaatgatgtgagtctgaatgattacagcgggaaggttctactgattgtgaatgtcgcctctcaatgtggtttgacacagacaaattacaaagaattgaatgtattgtacgagaagtacaagaatcaaggatttgaaatcttggcatttccgtgcaaccagtttgctggacaggaaccaggaaacaatgaagaaattcaggaagtagtttgcacaaggttcaaggctgaatttcctatctttgataaggttgaagtcaatgggaagaatgcagtgccactttacaagtttttaaaggagaagaaagggggaatatttggcgatggtatcaagtggaacttcacaaagttcttagtaaacaaagaaaaggaggttgtggacagatatgcacctaccacctcacctctgaaaatcga

SEQ ID NO: 19824 - DNA, 459 bp, Glycine max
  modified_base (421)..(421): a, c, g, t, unknown, or other
acggttgttttttctggtgttagtgttaggtcgaatcttaatcctgtagctgatcgttttgtatccatgcttgctcagtgtggattttatcctctcctccataattttccaacaaaatctcaaacataataaataaaaattacatttttattcacaaaaatatcgggattcatcttgttctcattttgcccccttttttcttctgctctcccgaatcagaaaccctaatcattgtttgggatttcagaggaaagaaatttaaacagagcacgaagatgaagggtctcttcaagtccaagcctcgcactcctgcagatgtagtgcgccagaccagagatcttctgctctttgttgatcgcagccccgaaacccgcgaaagcaaacgtgaagagaagatgtccgagctatttaaaaatatcanggagctaaagtcaattctgtatggaaatagtgaatctg

SEQ ID NO: 19825 - DNA, 457 bp, Glycine max
agaagattgaacttaaacaaaaacaacacgaaagaaagaaagaaagaagatgggaattgcagtgggaggtgttgatttgctgagtgaaaaagcggcgatgatgagagagtgtctgcagaagagtgaaaccatcacagacaacgtcgtcaccattctcggttccttcgaccaccgtctctccgccctcgaaaccgccatgcgtccaactcagattagaactcactctattaggaaggctcatgagaatattgataggactttgaaggctgcggaggttatattggctcacttcgatcaatatcgtcaggcagaggcaaaaatacttaaagggccacatgaagacttggaaaactatcttgaagcaattgataagttgagaagcaacattcagttttttggtagtaagaagggtttcaagagtagtgatggcattgtcgtgcatgctaataatttgcta

SEQ ID NO: 19826 - DNA, 457 bp, Glycine max
  modified_base (5)..(5): a, c, g, t, unknown, or other
ccggnccggaccacgcgggccgacacacgcgtgcggttgaatacctatgggaacacacggcactggctgcattgctgtgaaggggaacactctgggtggttgtgtgcatacttgatgtgcttcccatactaatacctgagcgtacactggagtgcttaaaccacgtgatcggataatgggtctggactagcctcacggacgacatgtgactcatggcttcatgacacccactgctgcgtgcgtctggcccgtcaatttatcatgcagctatggctcatcgacttgatgaatcaacaagtcttattgattatgatatgcgggagaaaactgctactgtggttcattcaacactcattgctgccggtgctagtgcttatcctcgcgacatagactacactgctctgagataaattgcagctgaagtacgtgctcttcttatgatggatatggcttatat

SEQ ID NO: 19827 - DNA, 425 bp, Glycine max
atggcaactatgactggtgtgagcctttcatgccccagggttttcttcaacgcatcagcctcaccgcaaaacgcgcatgctgtaaagttctcacttccacccagccaagcagtgcgaccgggtagtatcaagttgggtcgcgtgatgaggatccgacccgttcgcgctgcgcctgagcgcatatcggagaaggtggaggagagcataaagaacgcgcaggaggcgtgcgccggcgatccgacgagcggcgagtgcgtggcggcgtgggacgaggtggaagagctgagcgcggcggcgagccacgccagggacaagcaaaaggaaaaggactccgacccgctcgagaattactgcaaggacaacccggagaccattgagtgcaaaactttcgaagactgagcatgcatgcttcgttcgtacgtgag

SEQ ID NO: 19828 - DNA, 460 bp, Glycine max
ggaatcttggaagcccaggatggatcaagaggactatctgacattgaggaggggacagatagtaaaagctgtgccgctgagatgggaaatgtatctgaagtcccaaaatcctcagtatcagctgagaaggtggaaggaatcttggaatcccaggatggatcaagaggactagctgacattgaggatgggacagatagtaaaagctgtgctgctgagatggaaaatgtatctgaagttccaaaacccctagtatcagttgagaaggtggaaggattatctaaggaaggtatagttggcagccaagcaatagtgcaggtatcagaagaatctgaaactgttacgggagatggaattgatgttactccagattgtttggctgtgccagaaactgtgtcaaatgatggggcttcatctttgtgctcttcagcagcaggaagtgaacatgtggacagcttgtctg

SEQ ID NO: 19829 - DNA, 418 bp, Glycine max
aacactctctctcctccttccacctagcagtggtgacaaccaaaccaagtgtcccctcctttctcttgttaacaggtagcagagttagtgagtaatggcaggaggacaactaggagtgcttaatgcactcgatgtggcaaaaacacaatggtaccacttcactgctattgtgatagctggaatgggattcttcactgatgcctatgatcttttctgcatttcccttgtgaccaagttgttggggaggttatattacacagacataacgaacccgaagcctggtgttcttcctcctaatgtgcaagctgctgtgactggtgttgctctatgtggcactttagccggccaacttttctttggatggcttggtgacaagttgggaaggaaaagggtttatggcttaactcttatgcttatg

SEQ ID NO: 19830 - DNA, 457 bp, Glycine max
ataatatcaggatagcagagacttaacatcaaataatccaagtgtaagtttggctagcacgtcacgaggcatttgttctcctgacatttctgtgactcttccaaatacttcaccaaagtcctttcggtctgacaatacaatttctgaaaggtcacatgcgccaccagacccaacaaacatgcaagtgaaaggatctgcttcagatgtatttcgtgtcagtgtttccagtgccccaagtacatctagtcatggatctgcacctgatgactgtgatgctttgggggatgtatacatatggggagaggttacctgtgaaaatgttaaagttggtgctgataaaaatgtaaattatgtcagccccagggcagatgtacttctccccagaccactggaatccagcgtagttttagatgtacatcatatagcatgtggtgttagacatgcttctctagtcact

SEQ ID NO: 19831 - DNA, 433 bp, Glycine max
ctttggaatgcagcatctaagcttctaatggctgtaggttacatactccggggcatgactatgccagggtccctatacatagggtctattttagttggcatgtgctatggaatgaggcttgccattacagtcccaacaacctcaaatttatttgcactcaaatattatggtctcatatacaacattctcattcttaaccttcccttgggatctatcattttctatggtatgcttgctggcatactctatgatatctatgcaactacaacaaagggaggaggcaacaccttttattgtacgacaatgttacaggctaacctatgttgtcatgactggagcttgcattgttggcttcttcttatacaatttgttgtgaatcatttactagaactattacacaaagatttccataatcaataaatccttagcaaca

SEQ ID NO: 19832 - DNA, 408 bp, Glycine max
cccacgcgtacgaccacgcgtccgaatgcctgatgaatgagtcatctggtgggacagatactatggacatggatgctttacataacaattatcctcccggtgatgttctatttcaaacaaatacgtgctccaaggatagtcaaaactcacttacgtctcaaggcgcaacaatttttgcttgagagaacactcttgcatactctgagactacaacaatactagatattaaccaagagcctcaagagcttcttactgaggaaagttctgtggtagacagggagactagcacattatgaacccacagccttgatttggatcactttctttctcatgcacatgagcatgctatgacatgttctcgcaatagttgtttaagaacagacccaagcagcagatgggtcaaaagac

SEQ ID NO: 19833 - DNA, 456 bp, Glycine max
cccacgcgtccgcccacgcgtccgcccacgcgtccggtcctcttttctcggctccctttttctctctgtctctctctctcggtctcgctcttcttctcatcaagcacagagttacagactcaccgatcttccgattctctttcgtcttggtttatgagctcgaaggagagacccactcttggtggcacgcggattaagacccgcaaacgaaatattgctgcgccgctggaccctgcagcattctcggatgcagtggtccagatttatttggataatgctggtgatctggaacttattgctaagagtattgaatcttcagaccttaacttttcaagatacggtgacaccttttttgaagttgctttcactgggggtcgtacacaacctggaactaccaagcctgatgagggggaccgccacccatactctataatagagtgtgagcctaagcgtgaa

SEQ ID NO: 19834 - DNA, 448 bp, Glycine max
tttcattcacccttggtgtgaaacagatgatttgctgctgtaacaaaatggatgctactacacccaagtattccaaggccaggtatgatgaaattgtgaaggaagtctcttcctacttgaagaaagtaggatacaaccctgacaagattccttttgttcctatctctggttttgagggagacaacatgattgagaggtccacaaaccttgactggtacaagggtccaactctgcttgatgcacttgaccagattagtgagcccaagaggccctctgacaagcccctcaggcttccccttcaggatgtgtacaagattggaggtattggaactgtgccagtgggacgtgttgagaccggtgtcttgaagcctggaatggtggtgacttttgcaccaactggactgacaactgaagtcaagtctgtggagatgcaccatgaatctcttac

SEQ ID NO: 19835 - DNA, 409 bp, Glycine max
cccacgcgtccgcttttctgatcatctcttatgggtttgaatgatgcatgtaaaatgttgtaggaaagagagggacctgtgagtgtcacaaacatgggagaggagaatgttaaacaaccgttgttggagaggaagtactacaaggactgcccaggttgtaaagtggatcaagccaaagagttgagtgagggaaagggtgtacctgttaaaaatctttttatcatgtggatggtggtgctgtgtgctgcactgcctatatcatctctctttccattcctctatttcatggtaagggatttcaatattgcaaaaacagaagctgatattagttcttatgctggttatgttggctcttcattcatgcttggcagatgtttgacatctgtattatggggaattgtagccgatc

SEQ ID NO: 19836 - DNA, 358 bp, Glycine max
ccacgcgtccgaaaaataaaggaatgcttttgcgcttaaagccaacatctgctgatgtagtttatagtgaggtcaaggaagtgagttaattgatgacaaatcaactcaactcaaagatgttggttctgtgtcacccatatctctggcccgaaagaagtttatggtagatatgctgctcatctgaagaattcactgggaaatggtggagctaaatctcgaatatctcttatttaaaagggaagtacttttggattggaattctacctcgtgcatccattggagtttcgaacatgttctttctgataaccaaccaggcaggctgagaggtcaatatttgaaaagaagtaattggggagac

SEQ ID NO: 19837 - DNA, 399 bp, Glycine max
gaaaaacggactgcatcttcaacctctcgcattccaccgcgaccaaagatcgtctctgtttcaaaccagttctgttttgatcctctgcgacttgtttctctgcttctgcgagctagctattgttcggaaaagcaatggcaagtgcgttgagtagcagagttgaatctgttcgaaactctccctcattaagattttctctcaactgcatcagagcccttagctcttcttcttcttcttcttctgctgctgctgcggtttcttctggtgagaaccctaataaatcaaagcgaaggaagaagaagaacttgttcgaggtggctcagttcttacctaactggggaatcggctaccacatggcttagactcactggaatgaagtttcttacgaaatcactaaaa

SEQ ID NO: 19838 - DNA, 328 bp, Glycine max
ctctaactcgcgagcgtgtgcgtattacatgcaccgcaagacgctcgcgcagctgctggagttcgcgcgcacggtcgagagggacgctgacggcggcggcggttccgacaccgaaccgcctacggcgcatttgaagaagcgccttggcagctccaggaggcgtggcaacggcggatatcggcgtggctccgcgtcgctgccggacgtcacggcgatctccggcgggttcgacggggaagagaagcggaacgggccagtgcacgtcgacgggattcctgtggggttgccaaggttgcacacgcttcgtgaaggaaaatcatctcaatct

SEQ ID NO: 19839 - DNA, 403 bp, Glycine max
cccattttcaaccacatgaccactatggagcctaagttccctctcaaccatgcaactacaacatatggaggagcaccaaatttgggttattgcttagaccctttatcttgtgacagaaaaatgttaaaagctgttttgaatcaaatcacaaagatggaaaggaatccacttaaccaaagtctaaaagggtcaccaagcttaggagaaggaagttcagagagttatttatctgaagtggggatgccccacgtgtggaattactgatgtgagactttagtacttaaaccctctcctccacctatgccaccatgaaattttttttttaaaaaaaaaacaagaaaaaaaaaggtataagggggaagataaaatcaatccattgttttaagtcatggtgagtacttat

SEQ ID NO: 19840 - DNA, 387 bp, Glycine max
ctttcctttcactttgttgtttgtttgtgttatcttgacttttgaaacgtgagactgagaatggaacgtggggttcttgatagtatcattaataggctgcttgaagtcagaggcagaccagggaagcaggtgcaactttctgaggctgagatcaagcagctttgtcttgtctccagggatatcttcttgaggcagcccaacctcttggaactcgaggcaccaattaagatctgtggagatgtccatggtcaatattccgaccttctgcgactttttgagtatggtggattgcctcctcgttctaattacttgtttctaggggactatgttgatcgtgggaagcaaagtttggagacaatatgtctccttctggcttataaaataaaa

SEQ ID NO: 19841 - DNA, 400 bp, Glycine max
cccacgcgtccgcccacgcgttcgttgtcgcgtgggtttgccttgtgccgtttgtgttgttttcgggacgaagaagaagatggtgtcaggttctggaatctgcgcaaagcgggtggtggtggacgcgcgccaccacatgctgggtcgtctagcctccatcgtggcgaaggagcttctgaacggccagaaagtggtggtcgttcgctgtgaagagatttgcatctcgggcgggctggtgaggcagaagatgaaatacttgaggttccttcgcaaacgcatgaacaccaaaccctcccatggccccatccacttccgtgccccctccaagatcttctggcgcaccgttcgtggaatgataccacacaagacaaagcgtggggaagctgctcttgctcgtttg

SEQ ID NO: 19842 - DNA, 465 bp, Glycine max
tgtatatatataggtgcacataccattggtactacagcttgccagttcttcagtaacagattgtacaacttcaccgcgaatggtcctgacccttccatcgacccttcatttctttcccaactacaatcactatgccctcaaaacggtgacggttcaaaacgagtagcgctagatacgggtagtcaaaccaaatttgatttatcttactatagtaatttgaggaattctcgtggaattctgcaatctgatcaagcactatggagtgatgcttccacaaagacaactgttcagaggtacttgggcttaataagagggttacttggattaacattcaacgtggaatttgggaagtctatggtgaaaatgggcaacattgagttgaaaaccggtaccgatggtgaaattcgcaagatatgttctgccatcaactagatatatagccacttcaaacaattaataattaaa

SEQ ID NO: 19843 - DNA, 459 bp, Glycine max
cccacgcgtccgtccacacgctgcttccgattgaaggcatctaaggagagaaaaatgcacgatttctgcttcacgatcccctacggattgatgttagtgggtggtggactgttcgcctacataagcaaagggagcatcgcttctctcgccggaggcgccggctccggtttgcttctcatcgtcgccggctatctcagtctcaatgctttcggcaaacgaaaaaactcttacctcgctctctttctcgagaccgtttgtgcagccatactaacttgggtcatggggcagcgatatttggaaacatccaagattatgcctgctggtcttgttgctggaatcagtgctctcatgactctgttttatctctacaaattagcaactggtggcaaccatctccccaccaaggctgagtgatgatataatgatatatcatatatttgcttactataatacagatat

SEQ ID NO: 19844 - DNA, 459 bp, Glycine max
  modified_base (389)..(389): a, c, g, t, unknown, or other
agaaatttaagtgaggagctagagaatgatgatgaagtctgctatgtgtgcagtggtggttgtagcacttcttcttctggcggaggtggggcccatggctgaggctgtgacatgcaccccaacagagttgagtccgtgtcttccagcaatcacttccggtgctaaaccttccaatgcttgttgcacgaagctgaagcagcaaaaaccatgcttatgtggctacctcaaaaacgctagcttgaagcagtatgttaactctcctaatgcccgaaaaaccgttgcttcttgtgggattccctttccaacttgttaattaattaagccttcttataattaaagtgtgggatatatatatatatatagataaacagtttaatttatacacactntgatcctacaaagcatcttgacacaagcattcaataagatttcaccactttatcgcaacattttaacatg

SEQ ID NO: 19845 - DNA, 442 bp, Glycine max
caggacccagacagcaaggttgcctgcgaaacatgcaccaaaaccaacttggtcatggtctgcggagaaatcacgaccaaggccaatgttgactacgagaagatagtgcgtgacacctgcaggaacatatgttttgtctcaaacgatgtgggactggatgccgacaactgcaaggtcctagtcaacattgaacaccagagccctgatattgctcagggtgtacacggccacctcaccaaaaaacctgaagaaattggtgctggtgaccagagtcacatgtttggctatgccactgatgaaacccctgaattgatgccattgagccatgttcttgcaacaaaactcggtgctcgtctcaccgaggttcgcaagaacagaacctgcccttggatgaggcctgatgggaagacccaagtgaccgttgagtattacaatgacaatg

SEQ ID NO: 19846 - DNA, 438 bp, Glycine max
  modified_base (337)..(337): a, c, g, t, unknown, or other
  modified_base (371)..(371): a, c, g, t, unknown, or other
actcacttcacacaaaccaaagttaattaattaccaacacaaaatggatggaggctgtgtcacagacgaaaccaccacatccagcgactctctttccgttccgccgcccagccgcgtcggcagcgttgcaagcgccgtcgtcgaccccgacggttgttgcgtttccggcgaggccgaatcccggaaactcccttcgtcgaaatacaaaagcgtggtgccgcaaccgaacggtcgctggggagctcagatttacgagaagcaccagcgcgtgtggctcggcactttcaacgaggaagacgaagccgccagagcctacgacatcgccgcgctgcgcttncgcggccccgacgccgtcaccaacttcaagcctnccgccgccttcgacgacgccgagtccgagttcctcaactcgcattccaagttcgagatcgtcgacat

SEQ ID NO: 19847 - DNA, 407 bp, Glycine max
agcacagacacagaaaaatggctttaacacttagctcttcaatttgccttgtcgaccagaaagaaaccaaactcccaaatgccaaagacgaggttcccaccaaagtgttatactttggaaaaaccaacccatctttccgtctcagagcaaagagttgcatgcaacaaacacacgtcacacgaaacaacagctttaactccgaagtcacgatgatgaacgagaaaagggagaaggtttacgctccatcggttgcacatagccacaatgattcaatgagagtgccagtgtttgtgatgctgccattggacactgtcactatgggagggactctgaataagccgagagcaatgaatgctagtttgatggaccttgaaagtgcatgagtggaaagagtgatggtggatgct

SEQ ID NO: 19848 - DNA, 415 bp, Glycine max
  modified_base (213)..(213): a, c, g, t, unknown, or other
ggaaacgcctccctacaaagtctcccccacgcgccgcccccccacacgcagcaatttgtcggtgtcccactctcggccgccgcgcatgagccgccggcgtccatgcaccacgacgtctccgccctgcatggcttcctgccgcgcatgcagtataacctctggaacacaattgagcacaacgcggcggcgcgtgaggccccacgcgccacccangggctgtcgctgagtctgcacggggaccacatgcgcgcgtcaccgtcctcggcttccggggcctccaacggcggcggcgtggcggggattcagagcgtgctgttaagctccaagtacttgaaggccacgcaggagcttctggatgaggttgttaatgttaacggcggaattagggttgaacacgcgaagaagctgaacttcg

SEQ ID NO: 19849 - DNA, 472 bp, Glycine max
  modified_base (416)..(416): a, c, g, t, unknown, or other
ataaggttgacaggctttatgggtggaaaacatgtcgcaatgctccaattgttaaagcaatgaagcagcagactaaggatgtccaaaatgagtttaatatgaggctcactcagactattactgaattcaaagaacaagggctgaataccgagttgtattataaaaacaaagaaatgggagaaacattcagcattgtgcctacaagtgcaataagtggtgaaggaattcccgatttgttattactattgattcaatggacccaaaaaacaatggttgagaaacttacatacagtgaagaagtgcagtgcactgttttagaggtgaaggtagttgaaggccatggaactactattgatgttgttttagttaatggtgttcttcatgaaggagaacaaatagttgtctgcggaatgcanggtccaattgttaccacaattcgagctttattgacacctcatccgatgaaggaact

SEQ ID NO: 19850 - DNA, 400 bp, Glycine max
cccacgcgtccggtgcactgtttgaaagggctgttagtctgagcctcccaccgaaaaagatgaagttcttattcaaaaagtatctttattatgagaagtcccaaggtgatgaagaacggattgaatctgtgaagaggaaagcaatggaatatgtcgagagtactagggcttgatataaattcaccactgctttagttttgaattcttcaacttgcagccactctggagtctaagctggatatcttaagaccaagctttgtgttagataaggcatgacaactaaacagtacatgttttcccaaatcacctggagacagtatttgatcttggttgcctctgtaaatggagtggttctaacactacctaatagtgtgctgctaagtgctaatgtgctttgtgc

SEQ ID NO: 19851 - DNA, 424 bp, Glycine max
gtgtgctctctgtgtggtgtgttcgttcactgcaacaacaacaacaacaacggcgaacgccaacgcaaacgcgaacgcgaataagagcgagaacattctcttcagctcaacccttttctttttcgatggctaatcggcacacgattattctaatgcagacctcgcagaacagagcaactaggacgttcatggattatgaatccataactcaggccatggatggcatatgtgcactgtatgaaaggaaactgaaggagttgaatccggctatcagaaatctctcttatgacattactgatctctacaacttcatagatggtcttgcggacatgaatgccctagtgtatgatagttcaattcacgcttacttgccgcatgatcgactgtggatcaagcaacgaacatttcaacatttgaagaaatt

SEQ ID NO: 19852 - DNA, 386 bp, Glycine max
  modified_base (189)..(189): a, c, g, t, unknown, or other
aattcggtcgcccacgcgtcgttacctatagcacgcactcttgtctatctccttttgtgtaaagaagacacacccgttctaatcattattagactgactcaacgatgaaggcacactgcttcgtcttgtctggtcctctgattctcgacacacatagcaccgaacctcgtcaacgatgagacacgcttncaccgtgttgttgtctcgaagaaccaccctacatcccgaagctcgagccttttaccgaaccaagtttgaaagggccgtaagaccctcctttaatcaaaaatctgagaaagagatcttagattattgtaacgcttgaggagaccaatcatatagctgctggcggcttattttgagctgaagatctgaaaagagtccca

SEQ ID NO: 19853 - DNA, 371 bp, Glycine max
aaaaaaagaaaagaaaaaggatttgattcagtcacaacaaaaaaagaacaaaaaaaatccaaatcatcgatgggtggtaaatctggcgtggtttggattttgctggcgttgatcgccgccgcttggtgtctgttaactccagcgagggcgaattcgacgacaatatatgaggagctccgggcgcagggtcttccggtggggcttcttccaaagggaatagcgaagtactcgatgaacgcgacgagcggggagttcgaggtgtggatgaaggaagcgtgcaacgcgaagttcgagaacgaggtgcactacgactccaatataaagggtgttcttggctacggtcggatcggggaattatccggtgtgtcggc

SEQ ID NO: 19854 - DNA, 401 bp, Glycine max
cccacgcgtccgcccacgcgtccgctgatacttgctctggtcatagtttgctgtttttgtcagtgcttaagttctggcaacgataccattacaccaggccaattcatcagagatcctcacactctcacctcagctaatagtgccttcaagctaggattcttcagccctcaaaattcttcaaatcgctacctgggaatctggtatctctctgactccaatgtcatatgggtagctaacagaaaccagccactaaagaagagctcttccggaactgttcaaatttctgaggatggcaatctcgtggtattagatagcaacaaaagggctgtttggtcaacaaatttgacacataatattgcaaccaattcaactgccaaacttttagagactggaaatctagt

SEQ ID NO: 19855 - DNA, 415 bp, Glycine max
cccacgcgtccgctagatcgttcacggccaccaccaggtaagacgcctcccaacatccccaatttttttttttttttttttcttgatgagcttcttttttgcagtgataaatgagagtttgatttgatagactttcatcacatgtccatgaatataacatttccagtaatttgaatctgactaaagactgttttattaattttcagattattttttaatttatttttaatgaactttagaaaaaaaattagtttattataggaaattttacggtgaatttcagaataaattttcatatgatacgactttattaaataaaaagtatctctatactattttattgctaatttacaaatatctcatttttttatatttatggaaaaaaaattggtttcttattataagaataataatt

SEQ ID NO: 19856 - DNA, 398 bp, Glycine max
cggacgcgtgggccgccaaatcaaataaaatggatactgaaatcgttgagagcattgatgtcacagatgatgcaaggagttttagctgggcagtggacagcgccataaggagtgagactgggtccatttttggagaatctcgtgtccgtagctttgcttcgttagtggacagtgccataaggagtagtagtgctactgaagcagatttggaatcatcccctgtccaggcagaagacagggcgatgaggagtagtagtagtggaactgatttgggaacatccccttttcatgtttttgctacggcagcgggtatgaggactgttgctgccacccagagttaccgagaattatttaacctgttagagcttatactgataatacttttattgattaatgag

SEQ ID NO: 19857 - DNA, 410 bp, Glycine max
ctctcttttttctaccttagattccttctccaacaatggctctcgccgtttccactacttcttcctcttcagcagctgctgcagcttctagctccttcttctctcgtctcggatcttcctccgacgcaaaagctcctcaaatcggttcgtttcggtttccggagaggtcgcttgtttcgtctgttgttgtcaatgtaactcaacgacgctccttggtgaggccactcaacgccgaaccgcaacggaacgattctattgttcctcttgcagcaactatcgttgctcctgaggttgagaaggaagaggaagattttgagcaaatagcgaaagaccttgaaaatgcatctcctcttgaaattatggatagggccctcgagaaatttgggaacgacatcgctattgcatttaat

SEQ ID NO: 19858 - DNA, 341 bp, Glycine max
acttactgtactcttgcaagccaccgtctctaagatcttgtttacaaacaaaggtagtagatcaaggccagtggcgagtggagtgatattcatggatgcattggggagagaacacagggtatacctgaagcagggtcccaagagcgagataattgtctcagctggtgcactgggaagcccacagcttctaatgttgagtggaataggagcagaacgtgagcttaggaaacacaacattgatgtggtgttgaatcagcccttggttggacagggaatgtcggataacccgatgaacgctatctttgtcccgtcccctgtccccgttgaggtatccctcatag

SEQ ID NO: 19859 - DNA, 385 bp, Glycine max
aggttcttcaaaatgatattgatttgctaaatcccccggctgagcttgagaggaggaaacacaggctcaggcgtgttgttcagtcaccaaactctttcttcatggatgttaagtgccagggttgcttcaacataaccactgtctttatccactctcagactgttgttgtatgcggaaattgccagaccgtcttgtgccagccgacaggcggccgggcaaggctaaccgagggatgctcctttatgaagaagggagactgagtggtgtgccatctttttttgtctgtgattggagagtttcaggaatgccttcttttgttttggatatggtatgctaattgtcttaaatttgtaagacttgagtctacatacttatccaagacact

SEQ ID NO: 19860 - DNA, 378 bp, Glycine max
ctcacctttctcctaaaacatctccagtgggttcttcttcttctattacaacaacgtcgtccaagaccatgaccatggccatggccacgatcctgctcctgttcacggtcttcgcggtttcatcggccctagacatgtcgataatctcgtacgacaacgcccacgccgccacgtcgcgcagcgacgaggagctgatgtccatgtacgagcagtggctagtaaagcacggcaaggtgtacaacgcgctcggagagaaggagaagaggttccagatcttcaaggacaacctgcgattcatcgacgaccacaactcccaagaggaccgaacctacaagctcggactgaaccggttcgcggatctcaccaacgaggagtaca

SEQ ID NO: 19861 - DNA, 269 bp, Glycine max
ggaagctggaggaattaggatttggttttttagtgggtgaaaaaatggggggaggttctgttggagtaatatcatccccttgatattaattgtggtaattttaggtttggaatatgcgttgtggtttgagcatatgttactgttatggttggttggtttccgtgttactcctgtcctgtggttctcgtttttgacctctgataatgaatctgtgttcttgaaggaatgaaatgaatggcaagaaattatgatcctaagatttttacatt

SEQ ID NO: 19862 - DNA, 385 bp, Glycine max
cccacgcgtccgcccacgcgtccgagccactctctccgtccggcccgaccgtctctcgcccggttcggtgtttcccagaccaccggttcagcctccgctgcgaaaaccaatcgcggcgcccgagccgtggcgcgccgcggcgccgcggatacgcatcaggacggtggcgccggtccaggcgagctcgcgcgccgatgactccgcgccgttcgagatgtcggtggagaacgcgctgaagctgctgggcgtgtcggagggcgcttccttcgacgacatactccgcgccaaaaacgcaatcgtcgccaattgcaaagatgaccaagatgccattgctcaggttgaggctgcatacgacatgttgcttatgcagagcctaacctcacgt

SEQ ID NO: 19863 - DNA, 330 bp, Glycine max
gaaaaaccaaagaagattgaccttggtttcttcattgaggatctcaaggctgctctgtcgttcttttctttgtgctggcactactactcctttgttttctagaggcggaagtggtgctcttggcgcagggctcagtaaattcagcactgctgctgccattgaagaaccaattaaaccaccacttaaagttgaacacacccagctcttaattgatggaaaatttgttgatgctgctactggcaaaacttttccaacgttggaccccagtacaggagatgtgacttctcatgttggtgagggtgaccatgaagatgttgatcgagcatttgc

SEQ ID NO: 19864 - DNA, 408 bp, Glycine max
ctaactcccgaccctgttcccctctcgtatccgtcatgaaaggaggaaagtccaagaccgaatctaagagagccgatcccaaacttgctgtgaataagaagggagccgccaccaaggctaggaaacccgccggcaaggggaaggcagcgaaagaccctaacaagccaaagaggcctccaagtgctttcttcgttttcatggaggagttcaggaaggtattcaacaaagaacatcctgaaaacaaagcagtgtctgctgtgggcaaagctgctggagcaaaatggaagaccatgtctgatgctgaaaaagcaccttatgtggcaaagtctgagaaaaggaaagtggagtacgagaagaacatgagagcctataacaagaaacaagcggaaggtcctactggtggggatg

SEQ ID NO: 19865 - DNA, 387 bp, Glycine max
gtcaggctggtcctggattccagttatttggttctgatgcggatgtgtctgatgcgttggtccatctgcagcatggtcctatgaattgctcctcgtcactaaatggttatgcattggctcccaatactgctttgggatctggtagtatcttgcaagagtcctctgctggtcggtcagatgctgatttgaatggtggtttggtggacaatcctttggcctttggtggagatgatccctcacttcagatttttctccccacaagaccagcagattcatccatgcacaatgaattgagagatcaagcaagtgtggctaatggtgtctgcactgaggaggattggatatccctcagtcttggaggtgggactggtggtaacaatggtgatg

SEQ ID NO: 19866 - DNA, 384 bp, Glycine max
cccacgcgtccgaagactgaaagattccatatcacaaatatattctaaacttgaggacataaaggtatctgctgagtcagacctgcggcaccatgtttcccttgttgtccatcctatgcagcaggctctgaatgctgccttgttacactatgaggctgacatcaggaaaagaaatgcaagaggacagaagcctaacggttatgtttagttggagaatgtttcgctctctgcactgcgagcatcatactataacaatttaggaatgtatattccatcaattttgccgtgaacacaaacccgaatggccatttatatcgtgatgaaaaaaatgaatttccatgagaattagtcagcaacagtcttaattgatagttaacatgtaac

SEQ ID NO: 19867 - DNA, 419 bp, Glycine max
cccacgcgtccgattttcaatgggttcggaataggcgaacgggaaagcaggcgacgacaccaacaaataacaacgaatgactaaaacaaacccaacttcatcgtcatcactcccttaatctccacactctggaagaaccaaattgcgaaaatgggattgattacggtggtgaaggagttgtggagggctttctttttcctttgctcactacaattctggagaatggcgttgctctggactttctctattctttattcttattaccaattgttcaaagattccttatcccattcccagtatttcaaacctctaattcctgagaaatgttccctcttctctcagaaactcgtgtcctatcccaggtgctcccctttcacaactacttttaggcctgtctgcgtcatcactggtgcaacgtc

SEQ ID NO: 19868 - DNA, 403 bp, Glycine max
gaagctttaagttaggacaagctagaaggtacggatattaattttctgtacaattcacaagaaaaatagcagtgccaattgtaataatatgtacatcaagcatctaaaggctttcataaatcatctttaaattcctacagagggagcaaaaaagcaaacaagaaataacattttctagtcatcagccaaggaaacccttccagtttcatacagatgatacatccaaagaggttcaatcaactcctttgcataggttaatttctccagctcatcatcattttcttctgcaatttccctctctatcctgggaaatatttcttgcagagaagagagcatcatgtcacccaatcccggtcatcaggtttaaacaacttaagacatacaaaccacaagagtcctaatg

SEQ ID NO: 19869 - DNA, 391 bp, Glycine max
caagtccttgctttgactttcctatttcaacctctcttgtaactcacactgcttttgctaaaacaacttcaaacttttagcttttgtcagtactttcaaatcaaaggaaactccttatactcaaaaagagtttgcaatggggttaactaggatgtgttattttggtagttgtcaagttcattccgtttgtaagagttagataccattttagaagctaattctcaagccatccgtaaaggaagttcttgcagttcacagtctatatttattgtatgatgtaacaatccatctgttgattttgcatgttatcagtcctccttcaattgaacctgttatgtttaggcatatatcagttgcgttttgatatgttcaattatggattcgttatgct

SEQ ID NO: 19870 - DNA, 388 bp, Glycine max
cccacgcgtccggtactttggactcatgggtgatggccaacctattggacgatacgatgatatgtgggctggatggtgtgttaaggttatatgtgaccatttgggcttgggagtgaagactggccttccatacatctggcacagcaaagcaagcaacccttttgtcaatctcaaaaaggagtacaagggcatcttctggcaagaagaaatcattccattcttccaaagtgccactctttcaaaagagtgcacgtctgtccaaaaatgttacattgaactctccaagcaagtcaaggagaagcttggggctgttgatccctacttcatcaagctagcagatgccatggttacttggattgaagcttgggatgagcttaacaacaacaca

SEQ ID NO: 19871 - DNA, 400 bp, Glycine max
ggaatgggtggtggtggcggtggccatgatccatttgatatcttcagttcattctttggtggaagtccgtttgggtcaggtggtagcagtagaggacggaggcagaggcggggagaagatgtggttcatcccctgaaggtctctctggaggatctttacctcggaacttcaaagaaactctctctttcacgaaacgtgttgtgctcaaaatgcaatgggaagggctcaaagtctggggcttcaatgacctgtgctggttgccagggtactggcatgaaggtgtctattaggcaccttggtccttctatgattcagcaaatgcagcatccttgcaatgagtgtaagggtactggagagacaatcaatgacagagacaggtgccaacagtgcaagggagaga

SEQ ID NO: 19872 - DNA, 404 bp, Glycine max
  modified_base (377)..(377): a, c, g, t, unknown, or other
gggaactgccctacccttttactttatattcactcacaacaagggcacaaaaaaaaaaatgaacaagtcttctggtgctgtttttctcgcacgctctcggcatacgatgttttcgtttcctaattagtagcagcgagattctgaggttgtcgtgaccaaggccatggaactgaaatttgttctctttctgctccttctgcttgctgttgctggttatggactcgcttccaatgcgacactgaacgagacttgtggatacttcgatggttctctcaatagggaccctaaagtgccttgtccaattggttggattatggaccctaacaagaccaagtgctttctccatgttgggaggcctcaatcttggaatgactcanagacctgttgtagtaagtatggtggac

SEQ ID NO: 19873 - DNA, 379 bp, Glycine max
  modified_base (10)..(10): a, c, g, t, unknown, or other
cccacgcgtncggttggggtaggtggtggtggcgccgaaccgcaatggagaagccatcgtcgtcgtcgtcgtcgcgaagaaaatcgagcacgaaggtgaaagcttcaaccgatgcgaacacgaacctgagcatgctcaacgaggaccttctccagaacattctagcgaggcttcctgctctgcatttcgcttccgcagcttgcgtcagcaaatcatggaactctctctgcaatcgcatcctcactcgccccaaactctcttccgcgatttctctcaacccttcgctccccgatgctgtcaacgaggttgttcacaaggttctttcggagccaattcgaccccatttcgctattgccaatatcggaactggattcagcac

SEQ ID NO: 19874 - DNA, 358 bp, Glycine max
gttcttgtgaacaacatggcgatggctttcaaaatggccactactgggatgtgggtgacggatgagtgcaagaactctttcatggaaatgaagtggaagaaggtcatagatacatatcttcaagatcgatgagaagtcaaggcttgtcaccgtgataaggtgggtggtcccggcgagagctatggtgatctcgccgctccttgcccgacgatgattgtagatatgccgattcgactttgatttcgtcaccgtcgataactgccgcagagcaagatcttttattgcatggtctccaacagcatcaaggatagacaaagatgcttacgcaacatcaagatggtctgagaagactctggat

SEQ ID NO: 19875 - DNA, 402 bp, Glycine max
gaagaatacaagcataatatatgagtgttttcagggcgaacttgaggttgtgaaagagattcctaacaaagtgatctctgataagaaagaaaacagtgaaaaccaaaacaatgctgagaaactttcagatggggtgaatgagcgatatgcatttgtcaaagaaacttcaaaaatgccatttctaatgttaggattggacttgccaccacctcctcttttcaaggatgtgatggaaaaaaatataataccacaggttccactctttaacatactaaagaagtttgatggtgaaactgtcacggaggtggtccgtcctcatatagcaaggatgcagtatcgtgttaccagattgcccaagtatatgattctacacatgcgtcggtttactaagaataatttttt

SEQ ID NO: 19876 - DNA, 408 bp, Glycine max
tgaaaatgatgcttctgtagtggatgctttgtctctaaaaagaatcactagaatacacaaggcgttggactcagatgatgttgagcttgttaaacttcttttgaatgaatcagacattactttggatgaagccaatgctctccattatgctgcagcctactgtgaccccaaggttgtttctgaggtacttggtttgggactggctaatgtcaatcttcgaaattctagggggtacacagtgcttcacattgctgccatgcgtaaagagccttccattatagtatccctacttacgaaaggggcttgtgcatcagatttgacttttgatggtcagagtgctgttagtatttgtaggaggttgacaaggccaaaagattatcatgcaaaaacagagcatgggaaagaaac

SEQ ID NO: 19877 - DNA, 422 bp, Glycine max
cacccctcgcttttgctcactattttacctttctctccctcactgtatctgtgatctttgagaatctcatttgcatttgtatcgcaaagtggagtcacttgtgcttgataaactcccaaatggtcaatcctactacacttaaacactgttaccgacttcatctagctttagcccatcttcatatgttgggccattttttatctccttcaactcattatcaaatggttgcgatgtagaatcccttcttttctcatcaagaggcgtctctctggttcattagaaacacaatccccatttcttaagatgaaggattgctagatgcttattgaaaatggttgcagctgtgtaaatcactggtaatgtcacagtaattgctggccagttcaagaaatccgagtcttaacacaatttcaaattttatt

SEQ ID NO: 19878 - DNA, 378 bp, Glycine max
  modified_base (329)..(329): a, c, g, t, unknown, or other
cccacgcgtccgcaaattcaacagttttttcagttttagacgctgaaaattcaacaaagaaaactacacacactgacacaaacaaacaccaagcttgaaccttccctccccatgtttgaattttgctctttcccccaactaacctttagcctccatttccccgaaaaatatccccgcggcgaactaaaccacttcaaatgaccaaaatgcccttcaccttcgtcaaatttccattccacatcctcctcttcctcgtcctctcgctgccctccccggtaatttcgcaggaccagcaaacaaccctcctcggcatcaaacgacaattcggngaccctcccgccctccgctcatggaaatcctcgtcgccgccgtgcgcat

SEQ ID NO: 19879 - DNA, 99 bp, Glycine max
ttttgttgttattcattctctatgaatggacaatgggtggaaatggatccttatttgtgcaatagagatggatgtaaatgatgtattgtatgactctca

SEQ ID NO: 19880 - DNA, 351 bp, Glycine max
gaggggcttatagatttagggaatgtgtttactatactagtaataaattgtacaaaaaataaaaatataaataatatgaatataaaaagaacaaacacaaattttatgtgattagtcgcggcatttaaaataaaaaatgaaagtagacaaattaaaaaggaaaggagatgtttgaataaaaataattccccttcaagttcttattttttgagaggacaggacaatatgaatgttttattatgctctatcaacacattaaaaagattatatgatatatctgctgtggaagtaggtcaacatttatattggcaaatacggagttttcaagtacatgcccaagtacttattact

SEQ ID NO: 19881 - DNA, 429 bp, Glycine max
cccacgcgtccggaagaatggtggatttactggattccctattcttggggttgagtggcaaaaaatggaaaagcctgatctgcgaatggcaacgggcatgaaacctgaccagaaaggtgtgcgtattagaagaattgatcctactgctccagaatctaaggttttgaagccatcagatgttattcttagttttgatggggttgacattgccaatgatggaacggttccattccgtcatggagagcgcattggtttcagttatctcatatcacagaaatatactggggataatgcagcaatcaaagtactgcggaattcagacattttgaaatttgacatcaaacttgatagtcacagaaagcttatttcagcacacagcaagggcaagcctccctcatattatattattgctggaattggttttacaac

SEQ ID NO: 19882 - DNA, 406 bp, Glycine max
caagattcagcaagtgcgttttggattcagagaccgaaatacttcgagatggcccgtacaaagcaaactgctcgtaagtcaactggaggaaaagctcccaggaagcagcttgcaaccaaggctgcacgtaagtctgcaccaacaactggtggtgtgaagaagcctcatcgttatcgccctggaactgttgctcttcgtgagattaggaaataccagaagagcactgagctcctaatcaggaagcttcctttccagaggttggttcgtgaaattgcccaggatttcaagactgatctgcgtttccagagccatgctgtgcttgcattgcaagaggctgctgaggcataccttgttgggctctttgaggacactaacttgtgtgccattcacgccaagcgtgtgacta

SEQ ID NO: 19883 - DNA, 361 bp, Glycine max
ggcccttcatcggtgctccgtcgtctcggggaacttctggagcgtcgcggccccttcactacggcctccggctgcccgcaagtccaacgtcttctttggcgcccgttatgggttgggattgagattaggttatggatgggttcttggggaatttatttataggtcattggctttaaatactattcatgtgcttttgccacatttttagtttttcatatctattaacccttttgtagataaaggaaaactttttttttttttgtcaggttaaattgtagtgattgaattgaagttaagcttaattattctttattgtatggttaaagtctttagagagaaaagactcaaaaggaagggagcg

SEQ ID NO: 19884 - DNA, 400 bp, Glycine max
agatatctatttagatctcagaaaaacagtgtttcatttcaattcattcagtcttattattattagggtttggcgattcagagagaaagagaaatgggagaacgaaaaggaatcccaattgctctggggctcttggcgatgctcctcttcttcattgcttcttcctcttcctctcacctcgttcgtgcttccgatgacgccgacgacgcgatcttctacgagtcattcgacgaggattttgacggacggtggattgtgtccgacaaggaggattacaacggtgtctggaagcatgctaagagtgatgggcatgatgattatggacttcttgttagtgaacaagcccggaaatatgctatagtcaaaaaacttgacgagcctgtcagtcttaaggatggaa

SEQ ID NO: 19885 - DNA, 417 bp, Glycine max
aaaaatgtttgctagtggaagtgatgtctgctctgtcaaactgtggagtatgagcgagagaaattctctgggaaccatctggaaacctgccaatatatgctgtgttcagttctctgcttactcaacaaatcttctattttttggatcagctgattacaaggtttatggttatgatcttcgtcacactagaatcccttggtgcacattagctggtcatggcaaagctgttagctatgtaaaatttatagattctgaagcagttgtctctgcttccactgacaactctttaaagctttgggacctgaacaaaaccagctcttctggtttgtcatctgatgcttgggccatgacctttaaaggtcatagtaatgaaaagaaattcgtgggattatctgttttggatggatacattgcatg

SEQ ID NO: 19886 - DNA, 371 bp, Glycine max
cgagatcatagtatcatattcaatatcatttcataccaaacacatggctttggaagctctcaactcaccaacaacaaccgctccatcttttccctttgacgacccaactattccatgggcgaaacgaaaacgttcaaagcgttctcgcgaccatccttctgaagaagagtacctcgccctctgcctcatcatgctcgctcgcggcggcaccaccaccgtcaacaaccgccacgtcagccctccaccgccacagccacagccacagccgacaccagatccttccaccaagctcagttacaaatgctccgtttgcgacaagagcttcccctcttaccaagcgctcggtggacacaaggccagtcaccggaaac

SEQ ID NO: 19887 - DNA, 427 bp, Glycine max
gttttggttccgcagaagattctgaattctgatgctctagtgcgattccatgggagaggtggtcatcatgagtggagagaagaagtcagttagagtggagggggtggagaaggaagatagtggtggaagtgggagcaaggctggtgaatttaaggggttgatgaggtgggagaagttcttgcccaagatggttttgagggtgctgttggttgaagcagatgattccacaagacaaattattgccgcgcttctcagaaaatgcagctacaaaggttatgtgatggggatctgggttcaatgaaagtctaaggatctaatggctcctttccacttgctttaagagtcttggcagtctggaaactacaggcttacatgatagtgatacaattattttcttacatgatatgattattttcagttgtctatt

SEQ ID NO: 19888 - DNA, 363 bp, Glycine max
tgaaaagtttgattcttcgataacaaaagactatgattttcaccttcttgatggccgttcaatcagggttcccttcatgacgagcaggaagaatcagtttattagggcttttgatggtttcaaagtccttggtcttccctacaagcaaggtgaagataagcgccaattcaccatgtactttttccttccagaaacaaaagatgggctgttagctttggctgagaagttggcttctgaatctgggttcttggaacgcaagcttcctaataacaaattggaagtaggagacttcaggatcccaagattcaaaatttcttttgggtttgaagcctctaatgtgctgaaggagctgggagtggtttt

SEQ ID NO: 19889 - DNA, 379 bp, Glycine max
ggagcttttcgtgggggttggtgcttcgagggtgagggatttgtttgagaaggcgaaggggaaggcgccgtgcattgttttcattgatgagattgacgccgttgggaggcagagaggggcggggctaggaggtggaaatgatgagagggaacaaactattaatcagcttcttactgagatggatgggttttctggtaattctggtgttattgttttggctgccactaacagaccggatgttcttgattcggcgttgttgaggcctggccggttcgataggcaagttactgtggatagacctgatgttgccggcagagttaaaatccttcaggtgcattctagaggaaaagcgcttgcaaaggatgttgattttgaaaaa

SEQ ID NO: 19890 - DNA, 375 bp, Glycine max
  modified_base (298)..(298): a, c, g, t, unknown, or other
gaaaggtttcgatgcttttacaaactttatttcgctccaaagttcctttgcaactgaaaaataaaaataaaaatgcaccgatatatcaccgtccatgaaagaaaagcgtgctcttcatttgaagcatccattttttcttttgaccccagcttcagctatctaggtttagggttttgcttcaactttactcattttcccgggaaacaccatttagaatgttaccatctttctttttaattatgttgctgactcgttctcaaaatttggtctttcgctatagaatcatgttaggaacagntttagtttctttttattattgtaaatttcgttacttctgaatgcgtaaatttgtgtttgtcttttggtgccacaatt

SEQ ID NO: 19891 - DNA, 422 bp, Glycine max
atagatttgaaccatttcataatctgaagccttttttttttttcttgttgcgatcgaattgtgacggagatggcggcgccgaacaggatcgaacgcgcccaccagatgtaccgcgacggaagttacgaggaggcgttagggttctacacggaagcaatcgccttggccaagaccaaccctcagaagatcgctttgcatagcaaccgagccgcgtgctatctcaagcttcacgatttcaaaaaggcagcagaagagtgtacttcagtgcttgagcttgatcacaagcacagtggggcattgatgctgcgggctcaaacgctagttaccctgaaggagtaccattcagcactttttgatgtcagcagacttttagagttgaatccatcttcagaggtttatcaaaatcttcaagctcgtttgaa

SEQ ID NO: 19892 - DNA, 397 bp, Glycine max
cccacgcgtccggctgtgcctctcctctcgctgcgttttccaatggcggccataacccgcctcctaaatcgcacctcttccctctcttccgtggcgcgtggattctcatctcacgcatcgccgccgcgcaaggaggagaggaatgtccagtgggtgttcctgggttgccccggcgtcggaaaaggcacctacgccagtcgcctctgcaacctcctcggcgtccctcacatcgccaccggcgatctcgtccgccacgagctcgcctccaacggccccctttcttcccagctatcagaaattgttaatcaaggaaaattggtgtcagatgaaatcatcataagtttattgtcaaagaggctggctgatggggaagctaaaggagaatcgggatttattc

SEQ ID NO: 19893 - DNA, 430 bp, Glycine max
agattcttcagccaaagtagaagctgctcacagttccagaaccccttctggaatttcaaaaactagtccttcatctgttccttccaacttatctattctgtcatatagtgaagcaagtgatttctcaaatcttccaacaccaaggtctgagggcgaaatcttgtcttccccaaatcttaaggcctttaccttcaatgagctaaagaatgccaccaggaactttcgcccggacagtcttcttggtgaagggggatttggttatgtttacaaggggtggattgatgaacacacatttacagcttcaaaacctggatcaggaatggttgttgctgttaagaaactcaaacctgaagggttacaaggtcataaggagtggttgactgaagtggactaccttggacaactacaccatcagaatctggttaaattg

SEQ ID NO: 19894 - DNA, 384 bp, Glycine max
caaacttcaacttgtaatcaagggagatagaaaatttcaagcacaaaaaatggcggagaacaaagtggtgatcctaggaggtggtgttgccggtgccaaccttgcaaaaactatacaacgtcaagccaacgtcacccttattgatccgaaagaatattttgagattccatgggcaagtttgaggggattggttgagccaacttttgctgaaaggatagtgatcaaccatagagagtacttcaaaaagggtaaccttgttgtatccagtgctgtcaacataactgaaactgcagtggtgactgaagatggccagcagattgcctatgactatcttgttattgccactggacacacagaaccaatccccaaaaccaggagtgaaag

SEQ ID NO: 19895 - DNA, 370 bp, Glycine max
cccacgcgtccgccacgcgtccgcccacgcgtccggtgatttccattgccgccaccgattacccaccaactgatatacataacctcttcacctttccctccttccctaatttatcactaaaaaaacaaacaaataaaaaaaaagtccactaagttggggcacgtcacccatctcgcccttcccctcgctcatctcaaatccatgcttcggaattagggtttccattcggatttcgtaagtctggtgcccaatttcgtgactccgagcgacgtaaaaggggaagggaaagggatgaggatttggggatcggagatcgtgttcgccatattgctctgtgggaccctttcatgcaccgctcaagctcatcaca

SEQ ID NO: 19896 - DNA, 381 bp, Glycine max
cccacgcgtccgcccacgcgttcggttatagtgagtgatgttaaagatcaaggcagctgcggatcatgctggacattcagcacaactggggctttagaagcagcctatgcacaagcatttgggaagagtatctctctttctgagcagcagctagtggattgtgctggccgtttcaacaactttggctgtaatggtgggttgccatcacaagcctttgagtacatcaaatacaatggaggacttgagacagaggaagcatacccctacactggaaaagatggtgtatgcaaattctcagctgaaaatgttgccgttcaagtcattgactcggtcaatatcaccttgggtgctgagaatgaattaaaacatgcagttgcattt

SEQ ID NO: 19897 - DNA, 427 bp, Glycine max
atggaatatggggaaattggtcaaattagaatgcagggcttgaatcattttcagcaacaaacagcaccatatgaatgatactgaccttgctggggggagggaagaataatttgcatgtctcttctattatggaaattaaaggtggaattttcagcttagtttggttctatgaactaattaattccttttcgaccatatcaaactagtagtacactgcagaaattaatcgtctacacattaacactgattggttttcctgtgacaaatcagtgtgtggacactttaatttggtcccttaaattagtgttcatcagtatctttaaatggcgaataatcagaagaattgccctgcacatttagttagttcaatgtgcacacttcgacttcacagcatttcaatttcagtcattccattttcatatcttat

SEQ ID NO: 19898 - DNA, 365 bp, Glycine max
gggaattggctttggaacagactatgtaatgacataacctcactctttgaaaagcatatctgctggttctgatgttaataagccatctctgattgaatccccatcatcccgagaaaagcatagctgttctaattggtttccaagtaccccgaatggccaagacaagcatggttttactctggatgatgcatctgcaaatgagaagggaacatggcagatgtggagtacttctccacttgggcaagaaggtttaggtttagttggtggcgcaggaagctggctgttatcctcacaaaggatcataccaaacaatgatgattttgtgctttcttcatctcagaagactatggctcctctttttaaca

SEQ ID NO: 19899 - DNA, 402 bp, Glycine max
gtctgggcagaggttttcttctaccttgctgagaacaatgtcctttttgagggtattctccttaagcctagcatggttacacctggagccgagtccaaggacaaggccagtcctcagacagttgctgattacaccctcaagctccttcacaggagaattccccctgctgtccctggaattatgtttttgtctggtggacagtctgaggttgaagctaccctcaatttgaatgccatgaaccaatctccaaacccgtggcacgtgtcattctcgtatgccagagccctccaaaacactgccttgaagacatggggaggccgcccagagaacgtgaaggcagcacaagatgcactcgcattccgtgccaagtccaactcactcgctcagcttgggaagtacact

SEQ ID NO: 19900 - DNA, 396 bp, Glycine max
cccacgcgtccgcgcagtgactaaaccaaacctctcactcgccgtcgtagggtttctcctttcgtttagcaacaacaacaatggttgcagccaagaaaaccaagaagacccatgagagcatcaacaacaggctcgctcttgtcatgaagagtggaaaattcaccctcggttacaagacggttctcaaatcacttaggagctccaaagggaaattgattatcattgctaacaactgcccccctttgaggaaatcagagattgaatactatgctatgttggccaaggttggagttcatcattacaatgggaacaatgtggatttgggcactgcatgtggaaaatattacagagtgtgctgccttagcattattgatcctggtgattctgatatcatca

SEQ ID NO: 19901 - DNA, 362 bp, Glycine max
cccacgcgttcgcaacaacacgtggtgccgtttctggagccgtggtggcggtggtgccggtgccggtgccggtagaggggtggtggtgaaggcggagaaagtctgtaattattggattcaggggaattgtagttatggagagaggtgcaagttccttcacacttggagtgtgggggatgggttttctttgctgacccagcttgaagggcatcagaaggctgtgagtgcaattgcctttccctctggttcagataagctgtataccggaagcactgatgagactgcaaggatttgggactgccaatctggaaagtgtgtaggtgtgatcaatcttggtggtgaagtaagttgtatgatcagtg

SEQ ID NO: 19902 - DNA, 420 bp, Glycine max
cctttcgctacttgcttcacctttcttcataggaagaccaaattcttcctcaacaaaccaagaatcaaggagatgatgggtgcatgctgcaagagaagacaatccaacataaaattattctcttcaagttctgacctgtcaacctcttctttccttcacatgaagctctccactcagtttcatcaagttttcaagcttattgacactaatggggatgggaagatctcaatcaatgagctcagtgaattgctctcaagccttggatacaacaagtgcactgctgtcaaggaagctgaaggcatggtgaaagtgttggacttcaatagagatgggtttgtggacttggatgagttcatgattgtcatgaatggcatggaagaagaaaaagaagagaaatttggaagtggcatggagcatgat

SEQ ID NO: 19903 - DNA, 257 bp, Glycine max
tcggtgattaccaacaaatacagttattgtgtccctggtgcaagatattattggggaaaggtttttatggacgtggcgtgagacactattccaaaagcgtgccctgtaagcgtttaaattggatcccgctaaatggcgaatgaacgtgcaacctcttgtcattgtcttctgcaatattccatgtctacactgcattgatttaacctcatgaaataatcatggtacttgatcttcctcatagaggccatatttcttat

SEQ ID NO: 19904 - DNA, 420 bp, Glycine max
ttgatcttgatgagcctgtagcagatgatttgatggggttttatgagcggatgggtgatacacttgcacatcagtatggtggttctgctgcacacaacaagattttctctgagaggaggggccagtggagagctgcaacacagtctcaggagttttttaggactcttcaacgctattatagcaatgcatacatggatgctatgaaacaggatgcaatcaatgtattcctggggcattttcagccacaacagggcaagcctgctctatgggagttgggttcagatcagctctatgatgcaggaagacatggagatgatgatgcaaggtcatttttcaaaagatccttctcagatggaaacattcttaatgaaagttctacaccgatgtcagcccccaatgccaagcacgaaaaaattccca

SEQ ID NO: 19905 - DNA, 421 bp, Glycine max
cccacgcgtccggggcgggtttggttcagtttttaagggctggattgatgagcattcacttgctgctaccaaaccaggaataggcaagattgttgctgttaagaagcttaaccaagatgggctccagggtcacagagagtggttggctgaaataaactatcttggccaactacagcatcctaaccttgtcaagttaataggatactgctttgaggatgaacatcggcttctggtttatgaatttatgcctaagggtagcatggaaaatcatctattcagaagaggttcttactttcagccattctcttggagtttgcgaatgaaaatagcactaggggctgcaaagggtcttgcttttcttcatagtacagaacataaagtcatataccgtgattttaaaacgtcaaatatcctactcgat

SEQ ID NO: 19906 - DNA, 379 bp, Glycine max
gtctgagtggtggaagtgatgctgagggtggcgctgcgatggaactcgatttggaggccaatggcttctctgccactaactcccttcacatgccaaaatctccacacgctaaaccctatgcctcgatgtcgcaccttcaagcttttttgtcgaccttcttcttccgccgtcgcgcacacctcgcctcctctctccggcgacctggaccgctacctccgctgctccatgccgcagaactcgccgctccgagtcgcggttcttgtcagcggaggcgtcgatagcagcgtcgctctccggctgctccacgccgctggccactcctgcaccgctttctacctcaagatatggttccaagaagatttcgagaacttttggtctg

SEQ ID NO: 19907 - DNA, 390 bp, Glycine max
gaaaattaacatatgtgaagttgctttttattcaagcttctcgaacgtttactggagcctagacatgcttctcggtgttcttacctgtgaagattccaattcagtttttttaccttcaatttttccgccattttgctctttgttcagttgttgtttttccttctgaggcttatttgtgtggcttatcagattctggctcattttgcatgtgctatttaccttcaaagttgtatgttgagtgaattcttttctgggttttctctgttgcttcatctttttgttcttttgggttgcttaaattttgaaactttttgcactttcgatttccatatgcatttggggcattactattcactacatatttattgttttcttttttctaatgggaat

SEQ ID NO: 19908 - DNA, 357 bp, Glycine max
  modified_base (200)..(200): a, c, g, t, unknown, or other
gtcttttttttactctctctctgtctctctctaccttttcgtcgagatccctcagggatccactaactgaaggagaaatggggttgacattcaccaagcttttcagccggcttttcgccaagaaggaaatgcgaattctgatggggtctcgatgcactggtaagaccaccatcctgtcaagctcaaacttggagagacgntccacaattcccaccattgggttcaatgtggagactgggaatacaagaacattatttactgtctgggatgttggtggccaggacaagattcgtccttgggaggcctacttccaaaacacaagggtctcatttttgtggttgcagcaacgcagggaca

SEQ ID NO: 19909 - DNA, 423 bp, Glycine max
cccacgcgtccgcgcgctcgttcccgccgtcgtcgaccgcctcggcgacgccaagcagcccgtccgcgacgccgcgaggcggctccttctcactctcatggaggtttcatctcctacaataattgttgaaagagcagggtcctttgcatggacaagcaaaagctggagagtcagagaggaatttgcgcgaacagtcacatctgcaattggtctattttcatctactgagcttccccttcaacgtgctattcttcctcctattttgcagttgctgaatgatctgaatcctgctgttagggaaacagctattttgtgtattgaggaaatgtatacacaagctgggtcccaatttcgtgatgaacttcagcgccacaatctcccttcatctttggtgaaagctattaatgccaggctagagggaat

SEQ ID NO: 19910 - DNA, 311 bp, Glycine max
cctattctcaagtttctctctgtttcttcctacttcatgctatagcacttacaatactcaacaataacctaaccaaaccaaaccaaaccaaaacccttatctggactcacttcacacaaaccaaaggtaattaattaccaacacaaaatgggtggggggtggggcacaaaccaaaccaccacattcagcgactctcttttcgttccgccggccaaccgcgtcggcagcgttgcaagcgccgtcgtcgaccccgacgggtggtgcgtttccggcgagggcgaatcccggaaactcccttcgtcgaaatacaa

SEQ ID NO: 19911 - DNA, 381 bp, Glycine max
cggacgctgggccgccacaccacagtccatccgacaccagatccttccaccaagctcagttacaaatgctccgtttgcgacaagagcttcccctcttaccaagcgctcggtggacacaaggccagtcaccggaaactcgccgccgccgccgaagaccaaccccccagcaccaccactttctccgccgccgccaccagctccgtctccggaggtaaggcccatgagtgctccatttgccacaaatccttccccaccggacaggcccttggcggacacaaacgttgtcactacgaaggtaacggtaacggaaataacaacaacagtaacagcgttgtcaccgtcgcctcggaaggcgtggggtccacccacactgtcagtcac

SEQ ID NO: 19912 - DNA, 393 bp, Glycine max
cccacgcgtccggtttgacatgctactaagacaatctcttcgcccagatcacataaaaatgtttgttttggatgaggctgatgaaatgctttcacgtggtttcaaggaccagatctatgacatcttccagctactgccaggtcaaattcaggttggagtgttctctgctacaatgccacctgaggccctggagattacaaggaagttcatgaataagccagtgagaatcctggtaaagcgtgatgaattgacgcttgagggtatcaagcagttttatgtgaatgttgataaggaagattggaaactggagacattatgcgacctttatgagactttggctatcactcagagtgtcatctttgtgaacaccaggcgcaaggtggactggctcac

SEQ ID NO: 19913 - DNA, 379 bp, Glycine max
cacaaacccgtccctcacactctccataccctagcggcactacacactagttctatcgctatctccccaagatgtcgagcgccgatcccgagcacagagaagaggaggaggcacccgccgttggcgacgacgaggacaccggagctcacgtcgctccaatcgtcaagctcgaggaggttgctgtcaccaccggcgaggaggacgaagatgcaatcctggatctcaaatcgaagctttaccggttcgacaaggacgggaaccagtggaaggagcgtggcgccggcactgtgaagttcctgaagcataaggcttccggcaaggttaggcttctcatgaggcaatccaagacgctcaagatctgcgctaatcatctcatttt

SEQ ID NO: 19914 - DNA, 399 bp, Glycine max
cccacgcgtccgttctggagctcagggcaagatcaccgctgcttccgggcctcctcgtgacgctgatgattcattttcaaaacctgtatctggttctgatgaaccgcagcagggtggttggtttcagacttttacaattgctgcttacaaaccatactttgatgttgacacttcagatgttctagagaggattatcgactcactatttccatttagaggatctttcaatgaaaaaactgctaccaaccctgatttgtatggtccattctggatttgcactaccttgatatttgtagcggcatctattggcacctttgtgacatatatagcgcacaagctaaagagcaaagaatgggattatgacataaatctggtgacttggtctgctggtttggttta

SEQ ID NO: 19915 - DNA, 415 bp, Glycine max
ggaaataaagattaggattaggtgttgcgcagtcgcaggcatggccatggctttggtgagcctcaacaccattcatacatcgccttcttctttttcgttttcatctcccaaaccttattcttcctccaactatgcaccacctctcaccctccttccacgatttcggaggcacctcgttcgtatggctcccgacgaggagaagatgactcgccgttcccctctcgatttccccatcgtatggtttccctaatcaaattcattctaagcttattttttgtaattttactttcagtaagtgctgcgaatttggattcggattcgccgtcaccctgctatgtttattgcctgattacctcaattctttgttgaaggataattgatttactgttattacatttccttgcttctaactaaa

SEQ ID NO: 19916 - DNA, 403 bp, Glycine max
cccattttcaaccacatgaccactatggagcctaagttccctgtgaaccatgcaactacaagatatggaggagcaccaaatttgggttattgcttagaccctttatcttgtgacagaaaaatgttaaaagctgttttgaatcaaatcacaaagatggaaaggaatccacttaaccaaagtctaaaagggtcaccaagcttaggagaaggaagttcagagagttatttatctgaagtggggatgccccacgtgtggaattactgatgtgagactttagtacttaaaccctctccttcacctatgccaccatgaaattttttttttaaaaaaaaaacaagaaaaaaaaagggataagggggaagataaaatcaaaccattgttttaagtcatggtgagtacttat

SEQ ID NO: 19917 - DNA, 355 bp, Glycine max
gcgtccgcttaccttgcactttgttgcctgggtgtgttatctagactctgggaacgttagactgagagtggaacgtgaggttcttgatagtatcattaataggctgcttgaagtcagaggcagaccatggaagcagaggcaactttctgaggctgagatcatgcagctatgtcttgtctccagggatatcttctggaggcagccctacctcttggaactcgaggcaccaattaagatctgtggagatgtccatggtcaatattccgaccttatgcgactgtatgagtatggtggattgcctcctcgatctaattacttgatagtaggagactatgatgatcgtgggaagcaaagt

SEQ ID NO: 19918 - DNA, 488 bp, Glycine max
gtcgacccgcgcgtccgcccacgcgtacgcccacgcgtccgcggacgcgtgggtttgccttgtgccgtttgcgttgttatgggtacgaacatgagggtggtgtcaggttctggaatctgctcaaagcgcttggtggtggacgcgcgccaccacatgctgggtcgtctagcctccatcgtggcgaatgatcttctgaacggtcagaaagtggaggtcgttcgctgagaagagatttgcatctcggtcgggctgatgatgcagatgatgaaatactcgaggttccttcgcaaacgcatgaacaccagaccctaccatgggcccattcacttccgagccccctccaagatcgtttggcgcaccgttcgtggaatgataccacacaagacaaagcgtggggaagctgctctcgctcgtttgaaggctgatgaaagaatccctacttcatatgacgagaccgagagaatggatgttcctgatgcactcaatgt

SEQ ID NO: 19919 - DNA, 388 bp, Glycine max
  modified_base (9)..(9): a, c, g, t, unknown, or other
ccacgcgtncgcacaaattttatgtgattagtcgcggtatttaaaataaaaaatgaaagtagacaaataaaaaaggaaaggagatgtttgaataaaaataattccccttcaagttcttattttttgagaggacaggacaatatgaatgttttattatgctctatcaacacattaaaaagattatatgatatatctgctgtggaagtaggtcaacatttctattggcaaatagggagtttccaagtacatgcccaagtacttattacttcttgggttgtaattgctctcttattggtttcagccattctaattattcgaaatctgcaaaccattcccgctttcggtcagaatttctttgaatatgttcttgaattcattcgagacgtga

SEQ ID NO: 19920 - DNA, 419 bp, Glycine max
aaattggagagagatcaagattctaatttgggttcttagattacatagtttttgtgagagtgagtgatagttttttttttttttttatatacaaatataacgaattgagtgctgaggaaaaaaaatgtctgccatggtagaggggtggaagggggagctgacaaagctcagagagaaagttgtcatggcccggaagagcctcttttccaaaggcaaagaggggtcagaagaagaagaaagagtcgtggagaaggaggctcacaaggctatcatggctgttcagagagacagcactcatgaaaccatgtcagaggcaacagtgtgtttgcttatggatagatttgtgccatgctgacgcatgtgcatgtgtgtgctaagtgctcaaaatgtggtgtttattatatattgtggacgattta

SEQ ID NO: 19921 - DNA, 360 bp, Glycine max
cgctattctactcgcaagcatttcatatcaagagaagagaatggcaggagcagaggggctaaacagagaacagtacgtgtaccttgcgaagctgtcggagcaggcggagcggtacgaagagatggtggagttcatgcagaaggtggtggtggggtggacgccggcgtcggagctcacggtggaggagcgcaacctcctctcggtggcctacaagaacgtgatcgggtctctgcgtgccgcgtggcgcatcgtgtcctccatcgaacagaaggaggaagggcgcatgaacgacgaccacgtgtccctcgtgaagcactacagatccaaggtcgagaacgagctcacgcatgtctgcgccag

SEQ ID NO: 19922 - DNA, 406 bp, Glycine max
cccacgcgtccgcccacgcgtttgcataatttaagcaagaaaaggacagagaattaggcttgtttgcaatatttgatggccacttaggccatgatgtagcaagctatttgcagaaccaccttttccaaaacatcttgcaacagcatgacttttggactgagacagaaagcgcagtgaaaaaagcttacgttgaaacagatgagaaaatattggaacaagaacttgtgttggggcgaggagggtcaacagctgtgactgcaatacttattgatggtcagaagcttgtagtagcaaatgttggtgactcaagagctattatctgtgagaatggaaaggcaagacaactatcagtggatcatgaaccaagcaaggaaaaaaaatcgattgagaggcgtgggggttttgt

SEQ ID NO: 19923 - DNA, 433 bp, Glycine max
aatttgaaggcagaggtggcaaggggagcaaaacttaaatgcagtaaatgtaatctaaagggagctgctcttggttgctatgtcaaatcctgtagaagaacgtatcatgttccttgtgcaatggacatctcagattgccgttgggatcatgaggattttctcttgctctgtcctgtccattcaaatgtcaaatttccatgtgagaaaatcaggtccaagaaaaaggcaacacagaagcatcccactttttctcatctgccatctcatcactcaaatcgtcttgaagcttcccaggatgctagtaaaaaattggtattttgtggatctgctctatcaaatgaagaaaaggtatttttgatcaattatgcaagcaaggttggtgctactgtgaccaagttctggacctcaaatgtcacccatgtaattgcagcaa

SEQ ID NO: 19924 - DNA, 398 bp, Glycine max
atactttatataagtggactatttataaatccaatacaaggttgaaattctaggattaatattcatgttggcggtgtcacctttgaggagcacaagagatgaagggcaaggagagatgatggagagtttctcgattggaaccgatgattttgctgacctttcagaagggaacttgcttgaaagcatcaacttcgatgatctcttcatgggaatcaatgacgatgaagatgtcttgccggatctggagatggaccctgagatgcttgctgagttctccctcagtactgaggaatcagatatggcctcatcatcagtttcagtggaaaataacaacaaatctgcagataacaacaacaacaatgatgggaataatatagttactactgagaaacaagatg

SEQ ID NO: 19925 - DNA, 387 bp, Glycine max
cccacgcgtccgtgggttcactagaaagaggcacaactgttataattgtggacttgtgcactgccattcatgtagttctaggaaagcattaagagctgccctggctcctaatcctgggaagccatatcgtgtttgtgattcttgttttgtaaaattgaacaaggttgcagaattgggcaacaataatcggaggaatgctatgcctcgtttgtcaggtgaaaacaaggacagattagagaagcctgagctaagattgaccaagacagcagtcccttctaatatggatttgataaagcaacttgatagtaaggcagctaaacaggggaagaaggctgatacattctctctggttcgcacctctcaaccacagtctttgctacagctcaa

SEQ ID NO: 19926 - DNA, 373 bp, Glycine max
aaaatgtggaagagaacgggttttgtataagaagcagttcaattgatcaactcagatttcagggacctaagtctagctgctaatagactcgcccatcatgccatcaaacttggtggcattggctttggagcctcttttttcggattgtttgctgccattgctgctatttatctgttgattttggatcgtacaaactggaaaacaaatattctcacagcactactcattccatacattttcttcagcttgccttcattaattttcgacgtcttcaggggagagcttggaaaatggattgctgcagttgctgttgtattacgccttttccttccaagacacttccctgattggctggaattgcctggtgctctga

SEQ ID NO: 19927 - DNA, 294 bp, Glycine max
  modified_base (13)..(13): a, c, g, t, unknown, or other
tcgcccacgcgtncgatgccacctgatatataggcatattagctagttaggtaggtatagtagtttaagttaattcaaccatggaagacagggatcactgttgttccaacatttcaacgatgatcacaacaccaaagaaaagaacgggtagaagaagtccaacatcggataagctcaagaatcaacaccgcgagaagcagtcgatgaaaccttaccgtggaataaggatgcggaagtgggggaagtgggtggcggagatcatagaacccaccaaaaggtcgaggatatggttgg

SEQ ID NO: 19928 - DNA, 380 bp, Glycine max
acacgcgtccgcacaaattttttgtgtttagtcgcggcatttaaaattaaaaatgagagtagacacataaaaaaggaacggagatgtttgaataaaaataattccccttcaagttcttattttttgagaggacaagacaatatgaatgttttattatgctctatcaacacattataaagattatatgatatatctgctgcggaaagaggtcaacatttctattggcaaatatggagtttgcaagcacatgcccaagtacttattacttcttgggttgtgatagctctcttattggtttcaaccattctaattattctaaatctgctaaccattcccgctttcggtcagaatttatatgaatatgtacttgaattcattcg

SEQ ID NO: 19929 - DNA, 397 bp, Glycine max
gcctctccctctacgatatcgccggaactcccggtgtcgccgccgatgtcagccacatcaacaccggatctgaggtagtggggtaccaaggtgacgaagagctcggaaaagctttggagggtgcagatgttgttataattcctgctggtgtgcccagaaagcctggaatgactcgtgatgatctttttaacatcaatgctggcattgttaagacactgtgtactgctattgctaagtactgccctcatgcccttgttaacatgataagcaatcctgtgaactccactgttcctattgctgctgaagttttcaagaaggcaggaacgtatgatgagaagagattgtttggtgttaccacccttgatgttgttagggcaaaaactttctatgctgggaa

SEQ ID NO: 19930 - DNA, 351 bp, Glycine max
agcctacgtcgtggccgtgtcggcgtatgacatgcaccgcaagacgctcgcgcagctgctggagttcgcgcgcacggtcgagagggaggctgacggcggcggcggttccgacaccgaaccgcctacggcgcatttgaagaagcgccttggcagctccaggaggcgtggcaacggcggatatcggcgtggctccgcgtcgctgccggacgtcacggcgatctccggcgggttcgacggggaagagaagcggaacgggccagtgcacgtcgacgggattcctgtggggttgccaaggttgcacacgcttcgtgaaggaaaatcatctcaatctggttcctttaagagaagtct

SEQ ID NO: 19931 - DNA, 424 bp, Glycine max
gcctacgcactgcggagagagaaatttattttccgagataaccagttttctggtttgattcatcaatggcaactgcgaggaccgtgaaggatgtttcgcctcacgatttcgtgaaggcttatgcttcccacctcaagcgttccggcaagatggagcttcctgagtggaccgatattgtaaaaacagcaaaatttaaggagttggctccatatgatcctgactggtactacattagggctgcctcaatggcaagaaagatctatttgagaggtggtcttggtgttggtgctttccagaggatctatggtggaagcaaaagaaatggaagccgtcccccacatttctgcaagagcagcggtgcaattgccagacacattctgcaacaattgcaaaacatgagcattgttgagattgatacaaaaag

SEQ ID NO: 19932 - DNA, 378 bp, Glycine max
tcggtgatgaccaacaaatacagtgaggggtactttggtgcaagatattatggtggaaatgagtatattgacatggctgaaacactatgccaaaagcgtgccctggaagcgtttagattggatcccgctaaatggggagtgaacgtgcagcctctgtcagggtctcctgcaaatttccatgtctacactgcattgcttaaacctcatgaaagaatcatggcacttgatcttcctcatggtggccatctttctcatggatatcagactgataccaaaaagatatctgctgtctcaatattttttgagacaatgccatatagattgaacgaaagtacgggatacattgactatgaccagatggagaaatcagcaacactt

SEQ ID NO: 19933 - DNA, 468 bp, Glycine max
acttacccttaatagcacgcactctctgttctcatctcctctttgttgtagaagaagaacacacgcgtttctaatcatggttagacttgatctcaacgatgaaggcaacactgcttcgtccttgttctggtcctctgattctcgacacacatagcaaccgaacctcgtcaacgatgagacacgcttccaccgttgtttgttgctcatcgaagaaccaaccctacatcccgaagctcgagccttttagccgaaccaagtttgaaagggccgttaaagaccctcctttaatcgaaaaatctgagaaagagatcttagattattgttcaacgcttgaaggagaccaatcatatagctgctggcaagcttattttgagctgaaagatcttgaaaaagagtccccaagagcagacatagagaggctgattctggagactggtggtgtaaaatccctaataggatgcttgcatg

SEQ ID NO: 19934 - DNA, 373 bp, Glycine max
  modified_base (65)..(65): a, c, g, t, unknown, or other
aaaagaaaaaggaaagaaacagttttaacatataaagaacataaaaaatccaaatgatctatttntaggagatctgacgtggtttgaattttgctggcgttgatcgccgccgcttggtgtctgttaactccagcgagggcgaattcgacgacaatatatgaagagctccggacgcagggtcttccaatggggcttcttccaaagggaatagcgaagtactcgatgaacgcgactagcggggagttcgaagtgtggatgaacgaagcgtgcaacgctaaattcgagaacgaggtgcactacgactccaatataaagggtgttcttggctacggtcggatcggggaattatcctgtgtgtcggcacaagaactct

SEQ ID NO: 19935 - DNA, 355 bp, Glycine max
cccacgcgtggcgccacgcgtccgctgatacttgctctggtcatagtttgctgtttttgtcagtgcttaagttctggcggcgataccattacaccaggccaattcatcagagatcctcacactctcacctcagctaatagtgccttcaagctaggattcttcagccctcaaaattcttcaaatcgctacctgggaatctggtatctctctgactccaatgtcatatgggtagctaacagaaaccagccactaaagaagagctcttccggaactgttcatatttctgaggatggcaatctcgtggtattagatagcaacaaaaaggctgtttggtcaacaaatttgacacataata

SEQ ID NO: 19936 - DNA, 458 bp, Glycine max
gtccgcggacgcgtgggccgccaaatcaaataagatggatactgaaatcgttgagagcattgatgtgacagatgatgcaaggagttttagctgggcagtggacagcgccataaggagtgagactgggtccatttttggagaatctcgtgtccgtagctttgcttcgttagtggacagtgccataaggagtagtagtgctactgaagcagatttggaatcatcccctgtccaggcagaagacagggcgatgaggagtagtagtagtggaactgatttgggaacatccccttttcatgtttttgctacggcagcgggtatgaggactgttgctgacacccagagttaccgagaattatttaacctgttagagcttatactgataatacttttattgattaatgagtttgttaaacaagcttatgggattgtgttacgcatgaattaagaatgccatacac

SEQ ID NO: 19937 - DNA, 406 bp, Glycine max
gatccactcttcggcctttcagcaggtgctcagctctagctcctcttctctcgtctcggatcttccttcaacgcataagctcctcaaatcggttcgttcggcttccggagaggtcgcttgtttcgtctgtgttgtcaatgtaacttaacgacgctccttggtgaggccactcaacgccgaaccgcaacggaacgattctattgttccttttgcagcaactatcgttgctcctgaggttgagaaagaagagtgagattttgagcaaatagctaaagaccttgaaaatgcatattctcttgaaaatatggatagggccctcgagaaatatgggaactacatcgctattgcatatagtggtgctgaagagttgctttgattgagatgcacatttgacgggtcgacccta

SEQ ID NO: 19938 - DNA, 281 bp, Glycine max
acttactggactgttgcaagccatctgcgtctaagatcttgctgggttacaaatttaggtgggcaacgtcatcggggagtgaagtgatattcacagatgcattgaggagacagctctgaatattcctctaacatgatcctaatagctatatatattgtctcacttggagcactgagaagcccacagctcttaatgctaagatggactgtgaacagaacactgagcttactatacacaactttgatgtcctgttgaatctacccttgtttgtacatgtaatt

SEQ ID NO: 19939 - DNA, 420 bp, Glycine max
ctcacctttctcctaaaacatctccagtgggttcttcttcttgtattacaacaacgtcgggcaagaccatgaccatggccatggccacgatcctgctcctgttcacggtcttcgcggtttcatcggccctagacatgtcgataatctcgtacgacaacgcccacgccgccacgtcgcgcagcgacgaggagctgatgtccatgtacgagcagtggctagtaaagcacggcaaggtgtacaacgcgctcggagagaaggagaagaggttccagatcttcaaggacaacctgcgattcatcgacgaccacaactcccaagaggaccgaacctacaagctcggactgaaccggttcgcggatctcaccaacgaggagtacagggccaagtacttgggaaccaagatcgatcccaaccggatgc

SEQ ID NO: 19940 - DNA, 343 bp, Glycine max
tcgagccgcgcgtcagggaagctggaggaattaggattaggttttttattgggtgaaaaaatggtgggaggttctgttggagtaatatcatccgcttgatattaattgtggtaattttaggtttggaatatgcgttgtggtttgagcatatgttactgttatggttggttggtttccgtgttactcctgtcctgtggttctcgtttttgacctctgataatgaatctgtgttcttgaaggaatgaaatgaatggcaagaaattatgatcctaagatttttacaaaaaaaaaaaaataaaactttaaaataaaaaattaaactaaaattgtgtaactttaaaaa

SEQ ID NO: 19941 - DNA, 371 bp, Glycine max
cacgcgtccgagccactctctccgtccggcccgaccgtctctcgcccggttcggtgtttcccagggcaccggttcaggctccgctgcgaaaaccaatcgcggcgcccgagccgtggcgcgccgcggcgccgcggatacgcatcaggacggtggcgccggtccaggcgagctcgcgcgccgatgactccgcgccgttcgagatgtcggtggagaacgcgctgaagctgctgggcgtgtcggagggcgcttccttcgacgacatacttcgcgccaaaaacgcaatcgtcgccaattgcaaagatgaccaagatgccattgctcaggttgaggctgcatacgacatgttgcttatgcagagcctaactcagcgt

SEQ ID NO: 19942 - DNA, 205 bp, Glycine max
cccacacgatcgaccatgcgctccgtcattgatgatctcaacgctcctctctcgatcgcttctttctgcttgcgctgactactcctttgttttctagaggcggaagtggtgctcttggtgcatggctcagtaaattcagcactgctgctgccattgaagaaccaattaaaccaccacttaaagttgaacacacccagctcttaat

SEQ ID NO: 19943 - DNA, 466 bp, Glycine max
  modified_base (412)..(412): a, c, g, t, unknown, or other
cgcgtacgctaacgcccgaccctgttcccctctcgtatccgtcatgaaaggaggaaagtccaagaccgaagctaagagagccgagggcaaacttgctgtgaataagaagggagccgccaccaaggctaggaaacccgccggcaaggggaaggcagcgaaagaccctaacaagccaaagaggcctccaagtgctttcttcgttttcatggaggagttcaggaaggtattcaacaaagaacatcctgaaaacaaagcagtgtctgctgtgggcaaagctgctggagcaaaatggaagaccatgtctgatgctgaaaaagcaccttatgtggcaaagtctgagaaaaggaaagtggagtacgagaagaacatgagagcctataacaagaaacaggcggaaggtcctactggtggngatgaagaagaatctgagaagtctgtatctgaagtgaatgatgaagatgatgat

SEQ ID NO: 19944 - DNA, 475 bp, Glycine max
  modified_base (29)..(29): a, c, g, t, unknown, or other
cgaccgacgcgtccgcccacgcgtggggngcactgtttgaaagggctgttagtctgagcctgccaccgaaaaagaggaagttcttattcaaaaggtatctttattatgagaagtcccaaggtgatgaagaacggattgaatctgtgaagaggaaagcaatggaatatgtcgagagtactagggcttgatataaattcaccactgctttagttttgaattcttcaacttgcagacactctggagtctaagctggatatcttaagaccaagctttgtgttagataaggcatgacaactaaacagtacatgttttcccaaatcacctggagacagtatttgatcttggttgcctctgtaaatggagtggttctaacactatgctatagtgtgctgctaagtgctagtgggctttgtacagcataaggtgagttgtgaatgcgtcaaatgagcacgagaaaacctttgagatgaaatat

SEQ ID NO: 19945 - DNA, 471 bp, Glycine max
  modified_base (66)..(66): a, c, g, t, unknown, or other
gtgctctctgtgtggtgtggtcgctcagtgtaacaacaacagcaacaacaacgaacgccagcgcanacgcaaacgggaataagagcgagaacattctcttcagctcaacccttttctttttcgatggctaatcggcacacgattattctaatgcagacctcgcagaacagagcaactaggacgttcatggattatgaatccataactcaggccatggatggcatatgtgcactgtatgaaaggaaactgaaggagttgaatccggctatcagaaatctctcttatgacattactgatctctacaacttcatagatggtcttgcggacatgagtgccctagtgtatgatagttcaattcacgcttacttgccgcatgatcgactgtggatcaagcaacgaacattccaacatttgaagaaattagcacactgattaacccctaaactattggcaatttaatgtaaagaaaat

SEQ ID NO: 19946 - DNA, 483 bp, Glycine max
  modified_base (117)..(117): a, c, g, t, unknown, or other
gccacgcgtgcgagaaaataagggaaagcttttgcgcttaaggccaacatctgctgatgtagtttatagtgaggtcaaggaaggtgagttaattgatgacaaatcaactcaactcanagatgttggttctgtgtcacccatatctctggcccgaaagaagtttagtggtagatatgctgtctcatctgaagaattcactggtgaaatggttggagctaaatctcgtaatatctcttatttaaaagggaaagtagcttcttggattggaattcctacctcgggtgccataccatttggagttttcgaacatgttctttctgataaaccaaaccaggcagtggctgagagggtcaataatttgaaaaagaagtagattgagggagacttcagtgttctcaaggagattcgtgaaacagttctacaattgaatgcacccatccatttggtagaagagttgaaaactaaaatgaagagttctggaat

SEQ ID NO: 19947 - DNA, 491 bp, Glycine max
gaagctttaagttaggacaagctagaaggtacggatattaattttctgtacaattcacaagagaaatagcagtgccaagtgtaataatatgtacatcaagcatctaaaggctttcataaatcatctttaaattcctacagagggagcaaaaaagcaaacaagaaataacattttctagtcatcagccaaggaaacccttccagtttcatacagatgatacatccaaagaggttcaatcaactcctttgcataggttaatttctccagctcatcatcattttcttctgcaatttccctctctatcctgggaaatatttcttgcagagaagagagcatcatgtcacccaatcccggtcatcaggtttaaacaacttaagacatacaaaccacaagagtcctaatgccattccaaagtccttctggtctagcccaattactgaagaacccatgaaaattacaccgactgcattcattatactgggaattttttt

SEQ ID NO: 19948 - DNA, 467 bp, Glycine max
caagtccttgctttgactttcctatttcaacctctcttgtaactcacactgcttttgctaggacaacttcaaacgtttagcttttgtcagtactttcaaatcaaaggaaactccttatactcaaaaagagtttgcaatggggttaactaggatgtgttattttggtagttgtcaagttcattccgtttgtaagagttagataccattttagaagctaattctcaagccatccgtaaaggaagttcttgcagttcacagtctatatttattgtatgatgtaacaatccatctgttgattttgcatgttatcagtcctccttcaattgaacctgttatgtttaggcatatatcagttgcgttttgatatgttcaattatggattcgttatgctgttcctcaacctactgtaactgtcctatgctacttagttaatctagtccctacttgggtcacctcatctttgattt

SEQ ID NO: 19949 - DNA, 346 bp, Glycine max
cccacgcgtccggtactttggactcatgggtgatggccaacctattggacgatacgatgagatgtgggctggatggtgtgttaaggttatatgtgaccatttgggcttgggagtgaagactggccttccatacatctggcacagcaaagcaagcaacccttttgtcaatctcaaaaaggagtacaagggcatcttctggcaagaagaaatcattccattcttccaaagtgccactctttcaaaagagtgcacgtctgtccaaaaatgttacattgaactttccaagcaagtcaaggagaagcttggggcttgttgatccctacttcatcaagctagcagatgccat

SEQ ID NO: 19950 - DNA, 471 bp, Glycine max
ggaatgggtggtggtggcggtggccatgatccatttgatatctggagttcattctttggtggaagtccgtttgggtcaggtggtagcagtagaggacggaggcagaggcggggagaagatgtggttcatcccctgaaggtctctctggaggatctttacctcggaacttcaaagaaactctctctttcacgaaacgtgttgtgctcaaaatgcaatgggaagggctcaaagtctggggcttcaatgacctgtgctggttgccagggtactggcatgaaggtgtctattaggcaccttggtccttctatgattcagcaaatgcagcattcttgcaatgagtgtaagggtactggagagacaatcaatgacagagacaggtgccaacagtgcaagggagagaaagttgttcaggagaagaaagtacttgaagttgttgtggagaaaggaatgcaaaatggacagaagattaca

SEQ ID NO: 19951 - DNA, 470 bp, Glycine max
gggaactgccctaccctctttactttaattgactcacaacaagggcacaaaaaaaaaaatgaacaagtcttctggtgctgtttttctcgcacgctctcggcatacgatgttttcgtttcctaattagtagcagcgagattctgaggttgtcgtgaccaaggccatggaactgaaatttgttctctttctgctccttctgcttgctgttgctggttatggactcgcttccaatgcgacactgaacgagacttgtggatacttcgatggttctctcaatagggaccctaaagtgccttgtccaattggttggattatggaccctaacaagaccaagtgctttctccatgttgggaggcctcaatcttggaatgactcagagacctgttgtagtaagtatggtggacatttagtgtcattgacatcgcttccggagctacaatttgcccagggcctatgcggtgaatctataa

SEQ ID NO: 19952 - DNA, 501 bp, Glycine max
cgaccgacgcgtccgcccacgcgtccggttggggtaggtggtggtggcgccgaaccgcaatggagaagccatcgtcgtcgtcgtcgtcgcgaagaaaatcgagcacgaaggtgaaagcttcaaccgatgcgaacacgaacctgagcatgctcaacgaggaccttctccagaacattctagcgaggcttcctgctctgcatttcgcttccgcagcttgcgtcagcaaatcatggaactctctctgcaatcgcatcctcactcgccccaaactctcttccgcgatttctctcaacccttcgctccccgatgctgtcaacgaggttgttcacaaggttctttcggagccaattcgaccccatgtcgctattgccaatatcggaactggattcagcactgccaagactttgtgccttaatagacagtcgttgggatccaatattcctgttattgttaccgttgcgagtggtattatgggaagggatgctggaaccgatgagttta

SEQ ID NO: 19953 - DNA, 494 bp, Glycine max
tcgaccggcgcgtccgcttctgtgctgagacaacaatggcgatggctttcaaaatggccactactgggatgtgggtgagggatgagtgcaagggctctttcatggaaatgaagtggaagaaggttcatagatacatagtcttcaagatcgatgagaagtcaaggcttgtcaccgttgataaggtgggtggtcccggcgagagctatggtgatctcgccgcctccttgcccgacgatgattgtagatatgccgtattcgactttgatttcgtcaccgtcgataactgccgcaagagcaagatcttcttcattgcatggtctccaacagcatcaaggataagagcaaagatgctctacgcaacatccaaggatggtctgagaagagctctggatggaatcagctatgaagttcaagccaccgatccagccgagatgggattcgatgtaattcaagacagagccaaatagatgccccctttttttaaagtgggaatc

SEQ ID NO: 19954 - DNA, 460 bp, Glycine max
  modified_base (279)..(279): a, c, g, t, unknown, or other
cgaccgacgcgtccggaagaatacaggcataatatatgagtgtgttcagggcgaacttgaggttgtgaaagagattgctaacaaagtgatctctgataagaaagaagacagtgaaaaccaaaacaatgctgagaaactttcagatggggtgaatgagcgatatgcatttgtcaaagaaacttcaaaaatgccatttctaatgttaggattggacttgccaccacctgctcttttcaaggatgtgatggaaaaaaatataataccacaggttccactctntaacatactaaagaagtttgatggtgaaactgtcacggaggtggtccgtcctcatatagcaaggatgcagtatcgtgttaccagattgcccaagtatatgattctacacatgcgtcggtttactaagagtaatttttttgtcgaaaggaatcctacggtagtcaactttctgtgaagacct

SEQ ID NO: 19955 - DNA, 487 bp, Glycine max
tgaaaatgatgcttctgtagtggatgctttgtctctaaaaagaatcactagaatacacaaggcgttggactcagatgatgttgagcttgttaaacttcttttgaatgaatcagacattactttggatgaagccaatgctctccattatgctgcagcctactgtgaccccaaggttgtttctgaggtacttggtttgggactggctaatgtcaatcttcgaaattctagggggtacacagtgcttcacattgctgccatgcgtaaagagccttccattatagtatccctacttacgaaaggggcttgtgcatcagatttgacttttgatggtcagagtgctgttagtatttggaagaaggttgacaagggccaaagattattatgccaaaacagaacatgggaaagaaacaaaccaagatcgggtttgcatcgatgttcttgaaagagaaatgaagaggaatccaatggctggggatgcctgtatgtc

SEQ ID NO: 19956 - DNA, 346 bp, Glycine max
  modified_base (33)..(33): a, c, g, t, unknown, or other
cgcctcgaccgacgcgtccgcacccctggagtnttgctcactatgttacctttctcttccttactgtatctgtgatctttggggaatctatttgcggtggtatcgcaaagtggagtcacttgtgcttgatcaactcccaaatggtcaatcctactacacttaaacactgttaccgacttcatctagctttagcccatcttcatatgttgggccattttttatctccttcaactcattatcaaatggttgcgatgtagaatcccttcttttctcatcaagaggcgtctctctggttcattagaaacacaatccccatttcttaagatgaaagattgctaaatgctta

SEQ ID NO: 19957 - DNA, 441 bp, Glycine max
acgcccacgcgtccgcaaattcaacagttttttcagttttagacgctgaaaattcaacaaagaaggctacacacactgacacaaacaaacaccaagcttgaaccttccctccccatgtttgaattttgctctttcccccaactaacctttagcctccatttccccgaaaaatatccccgcggcgaactaaaccacttcaaatgaccaaaatgcccttcaccttcgtcaaatttccattccacatcctcctcttcctcgtcctctcgctgccctccccggtaatttcgcaggaccagcaaacaaccctcctgggcatcaaacgacaattcggtgacccttccgccctcgggtcatggaaatcctcgtcgccgccgtgcgcatggtcgtgaatccgatgctccggcggcttctgaacggagctccacctcgccgggaaaaaca

SEQ ID NO: 19958 - DNA, 470 bp, Glycine max
caagattcagcaagtgcgttttggaagcagagaccgaaatacttcgagatggcccgtacaaagcgaactgctcgtaagtgaactggaggaaaagctcccaggaagcagcttgcaaccaaggctgcacgtaagtctgcaccaacaactggtggtgtgaagaagcctcatcgttatcgccctggaactgttgctcttcgtgagattaggaaataccagaagagcactgagctcctaatcaggaagcttcctttccagaggttggttcgtgaaattgcccaggatttcaagactgatctgcgtttccagagccatgctgtgcttgcattgcaagaggctgctgaggcataccttgttgggctctttgaggacactaacttgtgtgccattcacgccaagcgtgtgactattatgcccaaggatattcagctggcaagaaagattcgtggtgagcgtgcttgagttggtgcgtt

SEQ ID NO: 19959 - DNA, 411 bp, Glycine max
cgaccgacgcgtccgcccacgcgtccgaagactgaaagattccatatcacaaatatattctaaacttgaggacataggggtatctgctgagtcagacctgcggcaccatgtttcccttgttgtccatcctatgcagcaggctctgaatgctgccttgttacactatgaggctgacatcaggaaaagaaatgcaagaggacagaagcctaacggttatgtttagttggagaatgtttcgctctctgcactgcgagcatcatactataacaatttaggaatgtatattccatcaattttgccgtgaacacaaacccgaatggccatttatatcgtgatgaaaaaaatgaatttccatgagaattagtcagcaacagtcttaattgatagttaacatgtaacgtagaattactt

SEQ ID NO: 19960 - DNA, 386 bp, Glycine max
cccacgcgtgcgattttcaatgggttcggaataggcgaacgggaaagcaggcgacgacacgaacaaataacaacgaatgactaaaacaaaccgaacttcatcgtcatcactcccttaatctccacactctggaagaaccaaattgcgaaaatgggattgattacggtggtgaaggagttgtggagggctttctttttcctttgctcactacaattctggagaatggcgttgctctggactttctctattctttattcttattaccaattgttcaaagattccttatcccattcccagtatttcaaacctctaattcctgagaaatgttccctcttctctcagaaactcgtgtcctatcccaggtgctcccctttcacaactacttt

SEQ ID NO: 19961 - DNA, 413 bp, Glycine max
cgccgagatcgtagtatcatattcaatatcgtttcataccaaacacatggctttggaagctctcaactcaccaacaacaaccgctccatcttttccctgtgacgacccaactattccatgggcgaaacgaaaacgttcaaagcgttctcgcgaccatccttctgaagaagagtacctcgccctctgcctcatcatgctcgctcgcggcggcaccaccaccgtcaacaaccgccacgtcagccctccaccgccacagccacagccacagccgacaccagatccttccaccaagctcagttacaaatgctccgtttgcgacaagagcttcccctcttaccaagcgctcggtggacacaaagccagtcaccggaaactcgccgacgacgccgaagaccaaccccccagcaccacca

SEQ ID NO: 19962 - DNA, 471 bp, Glycine max
aagaggatgcggcttgcgcagctctcaggcttatttctgaacggccatggccatcgctccaggcttcttttaaaacgcagttccgcggatactcagacccactgagccccgccgagtctgctgcctcaaatcaatgccatgaagacgatgcaaggaaaagtggtatgctccacgaacgacaagacggtcacaacggaactggtcctgctatcccctcacccaaagtacaagacgcgcgtgacgaagaagaagaagtaccaggcccacgatccctataaccaattcaatgtcggctacatcgtccatctccacaagaccaggcccatcagcaagaccaatgcctttctcgcactccacgttcccaacatgtcctccaacaagccctagccccaacccgatgagctttccattcccttcgaatcccagccccaggcctagattccagagttacacctcaatttcaactctcta

SEQ ID NO: 19963 - DNA, 468 bp, Glycine max
tcgacccgcgcgtccggttttggttccgcagaagattctgaattctgatgctctagtgcgattccatgggagaggtggtgatcatgagtggagagaagaagtcagttagagtggagggggtggagaaggaagatagtggtggaagtgggagcaaggctggtgaatttaaggggttgatgaggtgggagaagttcttgcccaagatggttttgagggtgctgttggttgaagcagatgattccacaagacaaattattgccgcgcttctcagaaaatgcagctacaaaggttatgtgatggggatctgggttcaatgaaagtctaaggatctaatggctcctttccacttgctttaagagtcttggcagtctggaaactacaggcttacatgatagtgatacaattattttcttacatgatatgattattttcagttgtctatttgccataaagaatttctattattga

SEQ ID NO: 19964 - DNA, 464 bp, Glycine max
tgaaaagtttgattcttcgataacaaaagactatgattttcaccttcttgatggccgttcaatgagggttcccttcatgacgagcaggaagaatcagtttattagggcttttgatggtttcaaagtccttggtcttccctacaagcaaggtgaagataagcgccaattcaccatgtactttttccttccagaaacaaaagatgggctgttagctttggctgagaagttggcttctgaatctgggttcttggaacgcaagcttcctaataacaaattggaagtaggagacttcaggatcccaagattcaaaatttcttttgggtttgaagcctctaatgtgctgaaggagctgggagtggttttgcctttctccgttggaggtttgacagaaatggtggactctgctgtgggtcaaaacttgtttgtttccgatatatttcataagtcttttatagaaagtaatg

SEQ ID NO: 19965 - DNA, 356 bp, Glycine max
  modified_base (15)..(15): a, c, g, t, unknown, or other
ggagcttttcggggnggatgatgcttcgagggtgagggatttgtttgagaaggcgaatggggaggcgccgtgcattgttttcattgatgagattgacgccgttgggaggcagagaggggcggggctaggaggtggaaatgatgagagggaacaaactattaatcagcttcttactgagatggatgggttttctggtaattctggtgttattgttatggctgccactaacagaccggatgttcttgattcggcgttgttgaggcctggccggttcgataggcaagttactgtggatagacctgatgttgccggcagagttaaaatccttcaggtgcattctataggaaaagcgcttg

SEQ ID NO: 19966 - DNA, 421 bp, Glycine max
  modified_base (169)..(169): a, c, g, t, unknown, or other
  modified_base (246)..(246): a, c, g, t, unknown, or other
  modified_base (284)..(284): a, c, g, t, unknown, or other
aataaaaatgcaccgatatatcaccgtgcatgaaagaaaagcgtgctcttcatttgaagcatccattttttcttttgaccccagcttcagctatctaggtttagggttttgcttcaactttactcattttcccgggaaacaccatttagaatgttaccatctttctttntaattatgttgctgactcgttctcaaaatttggtctttcgctatagaatcatgttaggaacagttttagtttctttntattattgtaaatttcgttacttctgaatgcgtaaatntgtgtttgtcttttggtgccacaattaaattattggaaaaaaaaatgccttgcttttgctgcttgatgtgggcccatccatgcattctgttcttcctgaaaatgagaaagtctgcttcatgctagtacaggaaaagc

SEQ ID NO: 19967 - DNA, 218 bp, Glycine max
  modified_base (106)..(106): a, c, g, t, unknown, or other
  modified_base (130)..(130): a, c, g, t, unknown, or other
cgagccgcgtgctatctcaagctttacgatttcaaaaaaggcaggcagaagagtgtacttcagtgcttgagcttgatcacaagcacagtggggcattgatgctgcnggctcaaacgctagttaccctganagagtaccattcagcactttttgatgtcagcagacttttagagttgaaatcatcttcagaggtttatcaaaatcttcaagctcgtttg

SEQ ID NO: 19968 - DNA, 370 bp, Glycine max
cccacgcgtccggctgtgcctctcctctcgctgcgttttccaatggcggccataacccggggcctaaatcgcacgtcttccctctcttccgtggcgcgtggattctcatctcacgcatcgccgccgcgcaaggaggagaggaatgtccagtgggtgttcctgggttgccccggcgtcggaaaaggcacctacgccagtcgcctctgcaacctcctcggcgtccctcacatcgccaccggcgatctcgtccgccacgagctcgcctccaacggccccctttcttcccagctatcagaaattgttaatcaaggaaaattggtgtcagatgaaatcatcataagtttattgtcaaaaaggctggctgatgggg

SEQ ID NO: 19969 - DNA, 440 bp, Glycine max
  modified_base (333)..(333): a, c, g, t, unknown, or other
agattcttcagccaaagtagaagctgctcacagttccagaaccccttctggaatttcaaaggctagtccttcatcggttccttccaacttatctattctgtcatatagtgaagcaagtgatttctcaaatcttccaacaccaaggtctgagggcgaaatcttgtcttccccaaatcttaaggcctttaccttcaatgagctaaagaatgccaccaggaactttcgcccggacagtcttcttggtgaagggggatttggttatgtttacaaggggtggattgatgaacacacatttacagcttcaaaacctggatcaggaatggttgttgctgntaagaaactcaaacctgaatggttacaaggtcataaggagtggttgactgaagtggactaccttggacaactacaccatcagaatctggtaaaattgattggatact

SEQ ID NO: 19970 - DNA, 454 bp, Glycine max
  modified_base (1)..(1): a, c, g, t, unknown, or other
  modified_base (10)..(11): a, c, g, t, unknown, or other
  modified_base (16)..(17): a, c, g, t, unknown, or other
  modified_base (19)..(19): a, c, g, t, unknown, or other
  modified_base (22)..(22): a, c, g, t, unknown, or other
  modified_base (70)..(70): a, c, g, t, unknown, or other
  modified_base (73)..(73): a, c, g, t, unknown, or other
  modified_base (76)..(76): a, c, g, t, unknown, or other
  modified_base (86)..(86): a, c, g, t, unknown, or other
  modified_base (91)..(92): a, c, g, t, unknown, or other
  modified_base (98)..(98): a, c, g, t, unknown, or other
  modified_base (106)..(107): a, c, g, t, unknown, or other
  modified_base (143)..(143): a, c, g, t, unknown, or other
  modified_base (145)..(146): a, c, g, t, unknown, or other
  modified_base (149)..(149): a, c, g, t, unknown, or other
  modified_base (161)..(161): a, c, g, t, unknown, or other
  modified_base (163)..(164): a, c, g, t, unknown, or other
  modified_base (182)..(184): a, c, g, t, unknown, or other
  modified_base (196)..(196): a, c, g, t, unknown, or other
  modified_base (208)..(209): a, c, g, t, unknown, or other
  modified_base (223)..(223): a, c, g, t, unknown, or other
nacgcaaacnncaacnngnaancaagggagagagaaaagagcaagcgcagaaaagggcggagaagggagnggnganccgaggaggnggcgnngccggngccaaccnngcaaaaaccatacaacggcaagccaacgacaccctnannganccgaaggaatananngagaaaccatgggcaagnnngaggggaacggntgagccaactgnngctgaaaggatagngatcaaccatagagagtacttcaaaaagggtaaccttgttgtatccagtgctgtcaacataactgaaactgcagtggtgactgaagatggccatcagattgcctatgactttctttgtattgccacttgacacacagaaccaatccccaaaaccaggagtgaaagacttgaccattacaaaggagaaaattgcaagatcaaatctgcaagttcagttttgattgttggggg

SEQ ID NO: 19971 - DNA, 327 bp, Glycine max
cccacgcgtccgccacgcgtccgcccacgcgtccggtgatttgcattgccgccaccgattgcccaccaactgatgtacataacctcttcacctttccctccttccctaatttatcactaaaaaaacaaacaaataaaaaaaaagtccactaagttggggcacgtcacccatctcgcccttcccctcgctcatctcaaatccatgcttcggaattagggtttccattcggatttcgtaagtctggtgcccaatttcgtgactccgagcgacgtaaaaggggaagggaaagggatgaggatttggggatcggagatcgtgttcgccata

SEQ ID NO: 19972 - DNA, 476 bp, Glycine max
gcgtcagcccacgcgtccgcccacgcgtccgggaatagttagtgatgttagagatcaaggcagctgcggagcatgctggacattgaggacaactggggctttagaagcagcctatgcacaagcatttgggaagagtatctctctttctgagcagcagctagtggattgtgctggccgtttcaacaactttggctgtaatggtgggttgccatcacaagcctttgagtacatcaaatacaatggaggacttgagacagaggaagcatacccctacactggaaaagatggtgtatgcaaattctcagctgaaaatgttgccgttcaagtcattgactcggtcaatatcaccttgggtgctgagaatgaattaaaacatgcagttgcatttgttcggccggttagtgtggcctttcaggtggtgaatgggttccatttctacgagaatggagtttacactaatgacatttgccgtagca

SEQ ID NO: 19973 - DNA, 377 bp, Glycine max
tacagggagaggtctcagtgcaatgattttccttggccctacatattaccaaagactgaaggatatggttgatgataagatccattctcgtggaaggggtccagtgcagatcctcacaaggcaacctgctgagggacgctcacgagatggaggtctccgatttggagagatggaacgagattgcatgatagctcatggagctgctcactttttaaaggaaaggttgtttgatcaaagtgatgcttacagggtccatgtatgtgagcgttgtgggttgatagctattgcaaatctcaaaaagaattcttttgagtgcagggggtgcaagaacaaaactgacattgttcaggtttatattccttatgcttgtaagcttc

SEQ ID NO: 19974 - DNA, 488 bp, Glycine max
tcgaccgcgcgtccgatggaatatggggaaattggtcaaataagagtgcagggcttgaatcattttcagcaacaaacagcaccatatgaatgaggactgaccttgctggggggagggaagaataatttgcatgtctcttctattatggaaattaaaggtggaattttcagcttagtttggttctatgaactaattaattccttttcgaccatatcaaactagtagtacactgcagaaattaatcgtctacacattaacactgattggttttcctgtgacaaatcagtgtgtggacactttaatttggtcccttaaattagtgttcatcagtatctttaaatggcgaataatcagaagaattgccctgcacatttagttagttcaatgtgcacacttcgacttcacagcatttcaatttcagtcattccattttcatatcttattaataagaatggaatatggcaatatgctgaaaatttgtagcaacg

SEQ ID NO: 19975 - DNA, 470 bp, Glycine max
gcccttcatcgtgtgctccgacagtccgtggtgaacttcctggagcgtcgccggccccttcgggtacggtcctcccgggtgcgccgtcaagtccaacgtcctctccttctggcgcccgtttcatgggtttggtgatttgagattagggtttatggatgggttcttggtggaatttatttataggtcatttggcctttagaatactattcatgtgcttcttgccacagcatttttagcttctttcactatctcatttaagcccttttgttagataaaggaaaactttttttttctttctttttgacagcgtttaaatttgtaggtgatttgaatttgaagtttaatgtcttaatttattctttatctgctattggtttaaaagttctttaggagagaaaatgacatcaaaaagggaaagggaagcggttgatagagtagaggatgaagggcttgataatgagtcgaaaagg

SEQ ID NO: 19976 - DNA, 444 bp, Glycine max
ctagtggaagagatgactgctctgtcaaactggggagtatcagcgagagaaatgctctgttaaccagggggaaacctgccaatatatgctgtgttcagttctctgcttactcaacaaatcttctattttttggatcagctgattacaaggtttatggttatgatcttcgtcacactagaatcccttggtgcacattagctggtcatggcaaagctgttagctatgtaaaatttatagattctgaagcacttgtatctgcttccactgacaactctttaaagctttgggacctgaacaaaaccagctcttctggtttgccatctgacgcttattccatgacctttaaaggtcatagttatgaaaagaatttcgtgggattatctgctttggatggatacattgcatgtggttcataatctaatgaggtgtactgttatcacaaat

SEQ ID NO: 19977 - DNA, 408 bp, Glycine max
cctttcgctacttgcttcacctttcttcataggaagaccaaattcttcctcaacaaaccaggaatcaaggagatgatgggtgcatgctgcaagagaagacaatccaacataaaattattctcttcaagttctgacctgtcaacctcttctttccttcacatgaagctctccactcagtttcatcaagttttcaagcttattgacactaatggggatgggaagatctcaatcaatgagctcagtgaattgctctcaagccttggatacaacaagtgcactgctgtcaaggaagctgaaggcatggtgaaagtgttggacttcaatagagatgggtttgtggacttggatgagttcatgattgtcatgaatggcatggaagaagaaaaagaagagaaatttggaatggca

SEQ ID NO: 19978 - DNA, 390 bp, Glycine max
ttgatcttgatgagcctgtagcagatgatttgatggggttttatgagcggatgggtgatagacttgcacatcaggatggtggttctgctgcacacaacaagattttctctgagaggaggggccagtggagagctgcaacacagtctcaggagttttttaggactcttcaacgctattatagcaatgcatacatggatgctatgaaacaggatgcaatcaatgtattcctggggcattttcagccacaacagggcaagcctgctctatgggagttgggttcagatcagctctatgatgcaagaagacatggagatgatgatgcaaggtcatttttcaaaagatccttttgatatggaaacatttttaatgaaagttctacaccgatgtcag

SEQ ID NO: 19979 - DNA, 421 bp, Glycine max
ggccacgcgtccggggcgggtttggttcaggttttaagggctggattgatgagcattcacttgctgctaccaaaccaggagtaggcaagattgttgctgttaagaagcttaaccaagatgggctccagggtcacagagagtggttggctgaaataaactatcttggccaactacagcatcctaaccttgtcaagttaataggatactgctttgaggatgaacatcggcttctggtttatgaatttatgcctaagggtagcatggaaaatcatctattcagaagaggttcttactttcagccattctcttggagtttgcgaatgaaaatagcactaggggctgcaaagggtcttgcttttcttcatagtacagaacataaagtcatataccgtgattttaaaacgtcaaatatcctactcga

SEQ ID NO: 19980 - DNA, 489 bp, Glycine max
gtctgagtggtggaagtgatgctgagggtggcgctgcgatggaactcgatttggaggccaatggcttctctgccactagctcccttcacatgccaaaatctccacacgctaaaccctaggcctcgatgtcgcaccttcaagcttttttgtcgaccttcttcttccgccgtcgcgcacacctcgcctcctctctccggcgacctggaccgctacctccgctgctccatgccgcagaactcgccgctccgagtcgcggttcttgtcagcggaggcgtcgatagcagcgtcgctctccggctgctccacgccgctggccactcctgcaccgctttctacctcaagatatggttccaagaagatttcgagaacttttggtctgagtgcccctgggaagacgatttgaagtatgctaaagatgtttgtaatcaggttgatgtaccgttagaagttgttcatttaaccgatgaatactggaacaatgtggtttct

SEQ ID NO: 19981 - DNA, 412 bp, Glycine max
acatatgtgaagttgcataaaggcaagcttctcgaacgtttactgtagcctatacgtgcttctctgtgaggttacctgtgaagattccaattcaccttttttaccttcaatttttccgccattttgctctttgttcagttgttgtttttccttctgaagcttatttgtgtggcttaccacattctggctcattttgcatgtgctatttaccttcaaagttgtatgttgagtgaattcttttctggattttctctattgcttcatctttaagatcttttgcattccttaaattttgaaactttttgcactttcgatttccatatgcatcattcgcatcactattcactacatatttatgattctcttctttctagatcgtaatcgtatcgttatgatttattctttacatgca

SEQ ID NO: 19982 - DNA, 472 bp, Glycine max
  modified_base (440)..(440): a, c, g, t, unknown, or other
gcgtccgctctcttctttttactctctctctgtctctctctacgctttctcgttcgagatccctcaagggatccactaactgaaggagaaatggggttgacattcaccaagcttttcagccggcttttcgccaagaaggaaatgcgaattctgatggtgggtctcgatgcagctggtaagaccaccatcctgtacaagctcaaacttggagagatcgttaccacaattcccaccattgggttcaatgtggagactgtggaatacaagaacattagtttcactgtctgggatgttggtggccaggacaagattcgtcccttgtggaggcactacttccaaaacacacagggtctcatttttgtggttgacagcaacgacagggacagagttgttgaggccagagatgagttgcacaggatgttgaatgacgatgaactganagatgcagtattgctcgtatttgctaacaaac

SEQ ID NO: 19983 - DNA, 475 bp, Glycine max
cccacgcgtccgcacgctcgtccccgccgtgcgtcgaccgcctcggcgacgccaagcagcccgtgcgcgacgccgcgaggcggctccttctcactctcatggaggtttcatctcctacaataattgttgaaagagcatggtcctttgcatggacaagcaaaagctggatagtcagagaggaatttgcgcgaacagtcacatctgcaattggtctattttcatctactgagcttccccttcaacgtgctattcttcctcctatatcgcagttgctgaatgatctgaatcctgctgttagggaaacagctattctgtgtattgaggaaatgtatacacaagctgggtcccaatttcgtgatgaacttcagcgccacaatctgccttcatctttgctgaaagctattaatgccaatctagagggaattcaaccaaaagttcactcttcagatggtatttctagtggttataatgctgg

SEQ ID NO: 19984 - DNA, 375 bp, Glycine max
cgaccgacgcgtccgcctattctcaggtttctctctgtttcttcctacttcatgctatagcacttacaatactcaagaataacctaaccaagcgaaaccaaaccaagacccttatctgcactcacttcacacaaaccaaagttaattaattaccaacacaaaatggatggaggctgtgtcacagacgaaaccaccacatccagcgactctctttccgttccgccgcccagccgcgtctgcagcgttgcaagcgccgtcgtcgaccccgacggttgttgcgtttccggcgaggccgaatcccggaaactcccttcgtcgaaatacaaaggcgtggtgccataaccgaacggtcgctggggagctcaaaattaccaa

SEQ ID NO: 19985 - DNA, 490 bp, Glycine max
cggacgcgtgggccgccacagccacagccacagccgacaccagatccttccaccaagctcaggtacaaatgctccgttggcgacaagagcttgccctcttaccaagcgctcggtggacacaaggccagtcaccggaaactcgccgacgccgccgaagaccaaccccccagcaccaccacttcctccgccgccgccaccagctccgcctccggaggtaaggcccatgagtgctccatttgccacaaatccttccccaccggacaggcccttggcggacacaaacgttgtcactacgaaggtaacggtaacggaaataacaacaacagtaacagcgttgtcaccgtcgcctcggaaggcgtggggtccacccacactgtcagtcacggccaccaccgcgacttcgatctcaacatcccggcctttccggatttttcgaccaaggtcggagaagacgaggttgagagccctcaccctgtcatgaagaagcctc

SEQ ID NO: 19986 - DNA, 488 bp, Glycine max
  modified_base (30)..(30): a, c, g, t, unknown, or other
  modified_base (32)..(32): a, c, g, t, unknown, or other
tcgaccgacgcgtccgcccacgcgtgcggntngacatgctacgaagacaatctcttcgcccagatcacataaaaatgggtgttttggatgaggctgatgaaatgctttcacgtggtttcaaggaccagatctatgacatcttccagctactgccaggtcaaattcaggttggagtgttctctgctacaatgccacctgaggccctggagattacaaggaagttcatgaataagccagtgagaatcctggtaaagcgtgatgaattgacgcttgagggtatcaagcagttttatgtgaatgttgataaggaagattggaaactggagacattatgcgacctttatgagactttggctatcactcagagtgtcatctttgtgaacaccaggcgcaaggtggactggctcactgacaagatgcgaagcaatgaccatacagtctcagccacccatggagacatggaccaaaacactcgcgatatcatcatg

SEQ ID NO: 19987 - DNA, 451 bp, Glycine max
cacaaacccgtccctcacactctccaaaccctagcggcactacacactagttctatcgctggctccccaagatggggagcgccgatcccgagcacagagaagaggaggaggcacccgccgttggcgacgacgaggacaccggagctcacgtcgctccaatcgtcaagctcgaggaggttgctgtcaccaccggcgaggaggacgaagatgcaatcctggatctcaaatcgaagctttaccggttcgacaaggacgggaaccagtggaaggagcgtggcgccggcactgtgaagttcctgaagcataatgcttccggcaaggttaggcttctcatgaggcaatccaagacgctcaagatctgcgctaatcatctcattatgcctacgatgagtgtgcaagagcacgctggaaacgagaaatcctgcgtttggcatgctagggatttgctgat

SEQ ID NO: 19988 - DNA, 406 bp, Glycine max
cccacgcgtccgttctggagctcagggcaagatcaccgctgctgccgggcctcctcgtgacgctgatgattcatggtcaaaacctgtatctggttctgatgaaccgcagcagggtggttggtttcagacttttacaattgctgcttacaaaccatactttgatgttgacacttcagatgttctagagaggattatcgactcactatttccatttagaggatctttcaatgaaaaaactgctaccaaccctgatttgtatggtccattctggaattgcactaccttgatatttggagcggcatctattggcacctttgtgacatatatagcgcacaagctaaagagctaagaatgggattatgacataaatctggtgacttggtctgctggtttggtttatggctat

SEQ ID NO: 19989 - DNA, 436 bp, Glycine max
  modified_base (315)..(315): a, c, g, t, unknown, or other
  modified_base (406)..(406): a, c, g, t, unknown, or other
acggggaatcggctttggaacagacaatgaaatgacaaaacctcagggtttgaaaagcatatgggctggttctgatgtggataagccatctctgattgaatccccatcatcccgagaaaagcatagctgttctaattggtttccaagtaccccgaatggccaagacaagcatggttttcctctggatgatgcagctgcaaatgagaagggaacatggcagatgtggagtacttctccacttgggcaagaaggtttaggtttagttgatggcgcaggaagctggctgttatcctcacaaaggaacataccaaacanggatgattttgtgctttcttcatctcagaagactatggcttctctttttaacaaagaagataacataattatcagtacccattctccacanaatgtatgtcttcctaatggccaaagtggt

SEQ ID NO: 19990 - DNA, 390 bp, Glycine max
agatatctatttagatctcagaaaaacagtgtttcatttcaatgcattcagtcttattattgttagggtttggcgattcagagagaaagagaaatgggagaacgaaaaggaatcccaattgctctggggctcttggcgatgctcctcttcttcattgcttcttcctcttcctctcacctcgttcgtgcttccgatgacgccgacgacgcgatcttctacgagtcattcgacgaggattttgacggacggtggattgtgtccgacaaggaggattacaacggtgtctggaagcatgctaagagtgatgggcatgatgattatggacttcttgttagtgaacaagcccggtaaatatgctatattcaaaaaacttgacgagcctgatagtct

SEQ ID NO: 19991 - DNA, 435 bp, Glycine max
  modified_base (40)..(40): a, c, g, t, unknown, or other
  modified_base (45)..(45): a, c, g, t, unknown, or other
  modified_base (57)..(57): a, c, g, t, unknown, or other
  modified_base (60)..(60): a, c, g, t, unknown, or other
  modified_base (69)..(69): a, c, g, t, unknown, or other
  modified_base (95)..(95): a, c, g, t, unknown, or other
  modified_base (98)..(98): a, c, g, t, unknown, or other
  modified_base (101)..(101): a, c, g, t, unknown, or other
  modified_base (118)..(118): a, c, g, t, unknown, or other
  modified_base (120)..(120): a, c, g, t, unknown, or other
  modified_base (123)..(125): a, c, g, t, unknown, or other
  modified_base (127)..(128): a, c, g, t, unknown, or other
  modified_base (132)..(133): a, c, g, t, unknown, or other
  modified_base (142)..(143): a, c, g, t, unknown, or other
  modified_base (149)..(149): a, c, g, t, unknown, or other
  modified_base (167)..(167): a, c, g, t, unknown, or other
  modified_base (171)..(172): a, c, g, t, unknown, or other
  modified_base (179)..(179): a, c, g, t, unknown, or other
  modified_base (184)..(184): a, c, g, t, unknown, or other
  modified_base (186)..(186): a, c, g, t, unknown, or other
  modified_base (197)..(198): a, c, g, t, unknown, or other
gaccgacgcgtccgcccacgcgggggcaacaacacgtgangccgnggcgggagccgnggnggcggaggngccggggccggagaccggagaggggnggnggngaaggcggagaaaggcngnaannnanngganncaggggaanngcagcnatggagagaggagcaagngccnncacactnggagngngggggatgggnncactatgctgacccagcttgaagggcatcagaaggctgagagtgcaattgcctttccctctggtacagataagctgtataccggaagcactgatgagactgcaaggattagggactgccaatctggaaagtgagtaggtgtgatcaatcttggtggtgaagtagagagcatgatcagaggaagccctaggggcagagtagggatacccaattttggcaaggcctagaacacacaaaa

SEQ ID NO: 19992 - DNA, 486 bp, Glycine max
  modified_base (459)..(459): a, c, g, t, unknown, or other
ccacgcgtgcgcacaaattttatgtgattagtcgcggtatttaaaataaaaaatgacagtaggcaaataaaaaaggaaaggagatgtttgaataaaaataattccccttcaagttcttattttttgagaggacaggacaatatgaatgttttattatgctctatcaacacattaaaaagattatatgatatatctgctgtggaagtaggtcaacatttctattggcaaatagggagtttccaagtacatgcccaagtacttattacttcttgggttgtaattgctctcttattggtttcagccattctaattattcgaaatctgcagaccattcccgctttcggtcagaatttctttgaatatgatcttggaattcattcaagacgtgagcaaaactcaaatttgagaagaatatggtcccggggttccttttattggaactttggtactatttatttntggttctaattgggcgggggctctttt

SEQ ID NO: 19993 - DNA, 466 bp, Glycine max
tcgagccgcgcgtccgaaattggagagagatcaagaaacataaggggttcttagattacatagtttttgtgagagtgagggatagttttttttgggttgttatatacaaatataacgaattgagtgctgaggaaaaaaaatgtctgccatggtagaggggtggaagggggagctgacaaagctcagagagaaagttgtcatggcccggaagagcctcttttccaaaggcaaagaggggtcagaagaagaagaaagagtcgtggagaaggaggctcacaaggctatcatggctgttcagagagacagcactcatgaaaccatgtcagaggcaacagtgtgtttgcttatggatagatttgtgccatgctgacgcatgtgcatgtgtgtgctaagtgctcaaaatgtgttgtttattatatattgtgtacgatttagttgataattaagagaatgaggtttgtaatgg

SEQ ID NO: 19994 - DNA, 437 bp, Glycine max
acgcaaatccgatcaagagaagagaatggcaggagcagaggggctaagcggagaacagtacgtgtaccttgcgaagctgtcggagcaggcggagcggtacgaagagatggtggagttcatgcagaaggtggtggtggggtggacgccggcgtcggagctcacggtggaggagcgcaacctcctctcggtggcctacaagaacgtgatcgggtctctgcgtgccgcgtggcgcatcgtgtcctccatcgaacagaaggaggaagggcgcaagaacgacgaccacgtgtccctcgtgaagcactacagatccaaggtcgagaacgagctcacgcaggtctgcgccagcatcctcaacctcctcgactccaacctcgtaccctccgtcttcggcagcgagtccaaggtcttctacttgaagatgaagggcgattaccacc

SEQ ID NO: 19995 - DNA, 473 bp, Glycine max
cccacgcgtccgcccacgcgtccgcagaatgttagcaagaaaaggacagagaattaggcttgtgtgcaatatttgatggccacttaggccatgatgtagcaagctatttgcagaaccaccttttccaaaacatcttgcaacagcatgacttttggactgagacagaaagcgcagtgaaaaaagcttacgttgaaacagatgagaaaatattggaacaagaacttgtgttggggcgaggagggtcaacagctgtgactgcaatacttattgatggtcagaagcttgtagtagcaaatgttggtgactcaagagctattatctgtgagaatggaaaggcaagacaactatcagtggatcatgaaccaagcaaggaaaaaaaatcgattgagaggcgtgggggttttgtatcaaacattccaggagatgtccctcgaatagatggacagctggcaatagcaagggcttttggtgac

SEQ ID NO: 19996 - DNA, 472 bp, Glycine max
cgcgtcgaccgacgcgtccgaatttgaaggcagaggtggcaaggggagcaaaacttaaatgcagtaaatgtaatctaaagggagctgctcttggttgctatgtcaaatcctgtagaagaacgtatcatgttccttgtgcaatggacatctcagattgccgttggggatcatgaggattttctcttgctctgtcctgtccattcaaatgtcaaatttccatgtgagaaaatcaggtccaagaaaaaggcaacacagaagcatcccactttttctcatctgccatctcatcactcaaatcgtcttgaagcttcccaggatgctagtaaaaaattggtattttgtggatctgctctatcaaatgaagaaaaggtatttttgatcaattatgcaagcaaggttggtgctactgtgaccaagttctggacctcaaatgtcacccatgtaattgcagcaactgatgcacatggagcat

SEQ ID NO: 19997 - DNA, 510 bp, Glycine max
  modified_base (414)..(414): a, c, g, t, unknown, or other
gctgtaccgggccgcaatcgatactcgatagaagtggactatttataaatccaatacaaggttgaaattctaggattaataggcatgttggcggtgtcacctttgaggagcacaagagatgaagggcaaggagagatgatggagagtttctcgattggaaccgatgattttgctgacctttcagaagggaacttgcttgaaagcatcaacttcgatgatctcttcatgggaatcaatgacgatgaagatgtcttgccggatctggagatggaccctgagatgcttgctgagttctccctcagtactgaggaatcagatatggcctcatcatcagtttcagtggaaaataacaacaaatctgcagatgacaacaacaacaatgatgggaataatatagttactactgagaaacangatgagggtattggtatagcagccaattcttcttctgattcgggttcgagtcgaagggaagagaatgtaagcaagaatgatgaatcagtggtgatg

SEQ ID NO: 19998 - DNA, 384 bp, Glycine max
  modified_base (133)..(133): a, c, g, t, unknown, or other
tcgaccgactcgtccgcccacgcgtgcgtgggttcactagaaagaggcacaactgttataattgtggacttgtgcacggccattcatgtaggtcgaggaaagcattaagagctgccctggctcctaatcctgngaagccatatcgtgtttgtgattcttgttttgtaaaattgaacaaggttgcagaattgggcaacaataatcggaggaatgctatgcctcgtttgtcaggtgaaaacaaggacagattagagaagcctgagctaagattgaccaagacagcagtcccttctaatatggatttgataaagcaacttgatagtaaggcagctaaacatgggaagaaggctgatacattctctctggttcgcacctgtaaaccac

SEQ ID NO: 19999 - DNA, 427 bp, Glycine max
  modified_base (297)..(297): a, c, g, t, unknown, or other
  modified_base (342)..(343): a, c, g, t, unknown, or other
aaaatgtggaagagaacgggttttgaagaagaagcagttcaattgatcaactcagatttcagggacctaagtctagctgctaatagactcgcccatcatgccatcaaacttggtggcattggctttggagcctcttttttcggattgtttgctgccattgctgctatttatctgttgattttggatcgtacaaactggaaaacaaatattctcacagcactactcattccatacattttcttcagcttgccttcattaattttcgacgtcttcaagggagagcttggaaaatggatngctgcagttgctgttgtattacgccttttccttccaagacacttnnctgattggctggaattgcctggtgctctgattcttcttatccgtgtagctccttctctaattgcaagcacctttagagacaaca

SEQ ID NO: 20000 - DNA, 371 bp, Glycine max
cccacgcgtccgatgccacctgatatataggcatattagctagggaggtaggtatagtagtggaagttaattcaggcatggaagacagggatcactgttgttccaacaattcaacgatgatcacaacaacaaagaaaagaacgggtagaagaagtccaacatcggataagctcaagaatcaacaccgcgagaagcagtcgatgaaaccttaccgtggaataaggatgcggaagtgggggaagtgggtggcggagatcagagaacccaacaaaaggtcgaggatatggttgggttcttacacgacacccgtggccggcgcacgtgcctacgacaccgctgtcttttaccttcggggtcccaccgggcgcctt

SEQ ID NO: 20001 - DNA, 390 bp, Glycine max
gcctctccctctacgatatcgccggaactcccggtgtcgccgccgatgtcagccacatcagcgccggatctgaggtagtggggtaccaaggtgacgaagagctcggaaaagctttggagggtgcagatgttgttataattcctgctggtgtgcccagaaagcctggaatgactcgtgatgatctttttaacatcaatgctggcattgttaagacactgtgtactgctattgctaagtactggcctcatgcccttgttaacatgataagcaatcctgtgaactccactgttcctattgctgctgaagttttcaagaaagcaagaacgtatgatgagaagagattgtttggagttaccacccttgaagttgttagggcaaaaactttctatg

SEQ ID NO: 20002 - DNA, 462 bp, Glycine max
  modified_base (404)..(404): a, c, g, t, unknown, or other
gcctacgcactgcggagagagaaattgaggtttcgagataaccagttttctctttgattcatgaatggcaactgcgaggaccgtgaaggatgtttcgcctcacgatttcgtgaaggcttatgcttcccacctcaagcgttccggcaagatggagcttcctgagtggaccgatattgtaaaaacagcaaaatttaaggagttggctccatatgatcctgactggtactacattagggctgcctcaatggcaagaaagatctatttgagaggtgggcttggtgttggtgctttccagaggatctatggtggaagcaaaagaaatggaaaccgtcccccacatttctgcaagagcagcggtgcaattgccagacacattctgcaacagttgcaaaacatgagcattngtgagattgatacaaaaggaggtaggaaaaatcacttctaatggtcgaagggatcttg

SEQ ID NO: 20003 - DNA, 479 bp, Glycine max
  modified_base (430)..(430): a, c, g, t, unknown, or other
tcgaccgcgcgtccgggaaataaagattaggattaggtgttgcgcagtcgcaggcatggccatggctttggtgagcctgaacaccattcataggtcgccttcttctttttcgttttcatctcccaaaccttattcttcctccaactatgcaccacctctcaccctccttccacgatttcggaggcacctcgttcgtatggctcccgacgaggagaagatgactcgccgttcccctctcgatttccccatcgtatggtttccctaatcaaattcattctaagcttattttttgtaattttactttcagtaagtgctgcgaatttggattcggattcgccgtcaccctgctatgtttattgcctgattacctcaattctttgttgaaggataattgatttactgttattacatttccttgcttctaactaanatcaaccaatcaatattggctccggtttagatgcaatgctagtttctgg

SEQ ID NO: 20004 - DNA, 474 bp, Glycine max
  modified_base (398)..(398): a, c, g, t, unknown, or other
cgtccggtctgggcagaggttttcttctaccttgctgagaacaatgtcctttttgagggtattctccttgagcctagcatggtgacacctggagccgagtccaaggacaaggccagtcctcagacagttgctgattacaccctcaagctccttcacaggagaattccccctgctgtccctggaattatgtttttgtctggtggacagtctgaggttgaagctaccctcaatttgaatgccatgaaccaatctccaaacccgtggcacgtgtcattctcgtatgccagagccctccaaaacactgccttgaagacatggggaggccgcccagagaacgtgaaggcagcacaagatgcactcgcattccgtgccaagtccaactcactcgctcagcttgngaagtacactggtgagggtgaatccgaggaagccaagaaaggagtgttcgtcaaaagctactcctactaagatgtt

SEQ ID NO: 20005 - DNA, 468 bp, Glycine max
  modified_base (450)..(450): a, c, g, t, unknown, or other
cccacgcgtccgcgcagtgactaaaccaaagctctcactcgccgtcgtagggtttctcctttcggttagcaacaacaaggatggttgcagccaagaaaaccaagaagacccatgagagcatcaacaacaggctcgctcttgtcatgaagagtggaaaattcaccctcggttacaagacggttctcaaatcacttaggagctccaaagggaaattgattatcattgctaacaactgcccccctttgaggaaatcagagattgaatactatgctatgttggccaaggttggagttcatcattacaatgggaacaatgtggatttgggcactgcatgtggaaaatattacagagtgtgctgccttagcattattgatcctggtgattctgatatcatcaagacactacctggcgaacagtaaagtattatttgaagttccttgcttgatattntctgtttttagttgattc

SEQ ID NO: 20006 - DNA, 471 bp, Glycine max
acggctctctctctctcgctctttcagctttgactttggtggaaactaaagactagtcaaaatggtgaagttcacagctgaagagctgcgtcgcattatggactataagcataatatccgtaatatgtctgtcattgctcatgttgatcacggaaaatcaaccctgactgattctcttgtggctgctgctggtattattgctcaagaagttgcaggtgatgtccgtatgactgatacccgtgcagatgaagctgagcgtggtattacaatcaagtctacgggtatctcactctactatgaaatgactgatgaagctctcaagagttttaagggagagcgcaatgggaatgagtatcttattaatctcattgactcccctgggcacgttgacttctcttctgaggttactgctgcacttcgtattaccgatggagctcttgttgtggttgattgtgtggaaggagtttgtgt

SEQ ID NO: 20007 - DNA, 431 bp, Glycine max
  modified_base (395)..(395): a, c, g, t, unknown, or other
gatttcttcattgttttgctctaaaaatggagagagattttctgggtctgagctcaaaagaacgattggctatgatgaaggaagagatgaatattgatattggaagcaaagacacaggtttcacaaatggagcagtggtaaaatggcccttcatgaacaaagtatatgtccatcctcttttgatgtcattcaatcctcctcaggtgaattctgtgaaccatcctcatggtatgaagatgttttcagttcccaatcaagcaatttcagtttccatgggacatccatccctaaagaatcattttgcaactgttggtcagaatatgaatgttgctactgtgaagcaaccactactcggaggaatacctgttacggtgcctcattcagttcatcccatntgtggtgcttgtgctggaatgaccgaaacacgcgtg

SEQ ID NO: 20008 - DNA, 464 bp, Glycine max
ggcagtccagctgctcgtgctggtatacatcaaggggatgaattgattgagataaatggtgagaggcttgatggcattgatagtgaaactgcagcacaaaggcttagagggaatgctggaacaactgttacagtaaaggtcaaagactcaggaacaagatcttttatccgagaggtcaaacttcctagggagtatattaagctctctccaatatcaagtgccatcatccctcatagatccccagatggtcatttcacaaaaactggctatgtgaaattgtcagccttctctcagactgctgctgaagacatgaggaatgccattcaggaattggaaaatcaaggagtacactcgtacatattagatctacggaacaatcctggtggtttggtaaaagccggccttgatgttgcacagatgtggttagatggaaatgagactctagtgaacacaatcgatagaga

SEQ ID NO: 20009 - DNA, 362 bp, Glycine max
gggttatcggagaggcgtgaggagtacattgatgaggatgagttgttgaacatgccgaatttggtcgatgaaatggccagaggaatgcaggttagtccccttaggatcacttcctattcttcagatgattcgcctgggaattctgatggagataacctttggagttataccctttgatcactgatttgttgtttgttcagtgagtgagtatggtaatttgttttgtgtttgtttgaaagttcgagtcttgattatgtatgttcaaccttgttaaatatttgaaaggagggctttataacgggattgtgggaatacttgtggtctcgtacaaaagaaaaatgctttgaagtgtgttggggttg

SEQ ID NO: 20010 - DNA, 438 bp, Glycine max
gagaaaatgaacgcggagtttcctatacttttggtgctgacagggtgacagaattccttcagaagcatgatcttgatttgatttgcagggcgcatcaggttgtagaagacggatatgaattctttgctaacagacaacttgtaactatcttctcggcacctaattactgtggagagtttgacaatgctggtgctatgatgactgttgatgagacacttgtgtgctcttttcaaatattgaagccagtagaaaataaaaagcctagtaagtttggctttgggagcacaactacagttaagcagagtacaacaaaagccaagttccagcaatcattttttggtgctaaagcatgacctgatgagcgcgagtacaattagtaaatgtttggtgcatagccaaagttgacttggaagaaggtgtatcagtgttcgcttcaat

SEQ ID NO: 20011 - DNA, 310 bp, Glycine max
acacttttgagttgcattgttgcatcaccgcaagtccacaacatggctgcgactgccgctgcaggcatagcttccttgttttcttcttctattaacagtgtcaaatgtcttcgttcctccaagaactgctccattatagacccccttataaccacagtgccctcaaaccgtggcatgtttgtgtcacacttggtggaacctttgtccattgggggtgccattaattcgcacaagttgtgggggcctagaatttctgctgctgttgcacaagaagaagctgttagtgtggctgatgatgaagtagatgatg

SEQ ID NO: 20012 - DNA, 383 bp, Glycine max
ccactcgtcctcggtcgccgctttctatctcactcatatcctatatacacattactctttatccatatcatcaaagggatttccataaggtccatattttaccatcaatctacctgtctgattcacatcctgactccactctctcaacttacgctaaactctcacaaacactatcctcaatccaatctctcaaacttcctaagcttgctattcacctacttgcactctcaaatccctttatacctaatacatccccaaattgccaattcacatatacttgctacatcaaattcacacccttatctaacactgcttactgatacatactgaattccattctataatcgtacaatcaacgaatacacatcgacatattacatcta

SEQ ID NO: 20013 - DNA, 420 bp, Glycine max
  modified_base (406)..(406): a, c, g, t, unknown, or other
gtcaggttctcttttagctaacctgattgggaatctggctttccctttgctcttgattggaggattgttccttctctcgagacgatccggagggatgggaggtcctggtggccctggatttcctcttgcttttggtcaatccaaagccaagtttcaaatggaaccaaacaccggagtgacatttgatgatgttgctggggtggatgaagccaagcaggactttatggaggtggtggagtttttaaagaagcctgagaggtttactgctgttggggctcgcattcctaaaggagttcttcttgttggtcctccaggaactgggaagaccttgttagccaaggctattgctggtgaagctggtgttccatttttctctatatcaggttctgagtttgttgagatgttntgtggtgttggtgc

SEQ ID NO: 20014 - DNA, 481 bp, Glycine max
  modified_base (291)..(291): a, c, g, t, unknown, or other
  modified_base (309)..(309): a, c, g, t, unknown, or other
  modified_base (432)..(432): a, c, g, t, unknown, or other
ggaaatagctttcctcggttataaccttcaaggtggaaagaaaaacccacccactatcccgattccaataaataccttgctgtctatattttcgcacaataccctctcacccttcaacgatgagttactacaatcagcagcaaccacccgtcggtgttcctcctccccaaggttacccaccgccggattcttacggaaaggacgcgtaccctccgccagggtacccgccgcaaggaggataccctccgcaagcgtatccagcacaggggtacccttcaccctacgcgcctnctcagtacgctcagcctncgccgcaacaacaccagaattcatctggcccaggttgcttaaaaggatgtttggctgctctctgctgctgctgtctgttggatgcgtgcttctgagaggagaagaggttgctttgcacaaatnggatttgaaactgtgttttgactttgaatatcgtcgttagtttttatta

SEQ ID NO: 20015 - DNA, 455 bp, Glycine max
ggcttgttcttctccctctcactcatatctcacacatcttcctcttcatccctctcaccaaggggatagtgagaagcgcgtggaggacgatgaatcgcgcgttccgattcacatcgtgacggcggcgtcgcaacttcccgtcgaatttctggaaccctcgcctcaatcgaagctcgtcatcggctttgactgcgagggcgttgacttgtgccgcaaaggcactctctgcgtaatgcagcttgcgtttccggatgctgtctacttggttgatgcgattgaagggggagaggagcttatcatagcgtgtaagcctgcacttgagtctaattacatcacacaagtgattcatgattgcaaacgggacagtgaggtctctgatttatttgattgctttcttccttgcttgctctggcccctcttttgtatatgttgaaatttgtggaatgtttattcaa

SEQ ID NO: 20016 - DNA, 391 bp, Glycine max
gcgtaggctacgtcatgctaatactgatctttttatggctgctgctactcctcctaccaatctgtcaatcattccgagagctctaccaagaggaagcttgtaccgaattcttcatcagcctaattgtcagattgatgagacacgaacaattgctatgcctctggatgtggctagccgcatgaattgcttacacaccagcacactctactattgttcatcgagatctaacgtctccaaatcttttaggtgataagaactggaatgataatgtatgtgactactggttgtcacatgtgaagcacagcactgattttgcatacatgtcaactgctggaacgccggaatgcatggctactgaagatctccgcaatgagccctcagatgagaaatg

SEQ ID NO: 20017 - DNA, 463 bp, Glycine max
cccacgcgtccgcaaattataatgcaaagcttgctgatttggggctggcaaaggacagaccggcacgtgagaaaagtcatgtctccaccagggtaatgggaacctatggatatgcagctcctgaatatcaaaccacaggaaatctgagtgccaagagtgatgtcttcagttttggagtagtcctgctggaaatgttatctggcaggagggctgtggacaagaatagaccatcaggacaacacaatttggtggaatgggccaaaccatacttagccaacaaacacaaacttttgcgtgtgttggataatcgccttgaaggccaatatgcattagatgaggcatgtaaggtggctaccctctctctgcgatgccttgcaacagaatccaagttgagaccaaccatggacgaggttgtcacggatttggagcagctgcaggttccccatgtgaatcaaaatcgtct

SEQ ID NO: 20018 - DNA, 454 bp, Glycine max
  modified_base (339)..(339): a, c, g, t, unknown, or other
cccacgcgtccggttgccgagcacactgtcagagcccttcagagaaccgtgcctgctgcagtgcctgctgtcgttttcttgtctggtggccagagtgaggaggaggcatccgtcaacctcaacgccattaaccaggtcaatgggaagaagccatggtcactctctttctcctttggaagggcacttcaacagagcacccttaaggcatggggcggaaaagaagagaatgtgaagaaggctcaggaagcccttttggtaagagccaaggctaactcagaggcaactctgggaacctacaagggtaactcacagcttgctgatggtgcctcagagagcctncatgtttcgaactacagctactgatcaatcgaagttggtgttgtttgaagagactaatgcgagtaggaatcggtattatgggtacaacaaccgaatttcttggtgataagtatta

SEQ ID NO: 20019 - DNA, 458 bp, Glycine max
aaaaaagccaattaattctttacaaagaacaacaagtaaacgcattaaagaaaaaaattagaggacaatatagatacgatcttttatcctataattttatcaattatgcagataagaaagactcatatatttatggatatagatccctatttcaagtaaaaaaaaaccaagtgatttcttgtaattacaacacgtataaaaaagaattattggatatcatagataatctctttatcaagaattatatatcggaagatgcgattctagatatggaaaaaaatatgtatagaaagtattttgattggatgggaatcaatagagaaatactaaatcgttccatatcgaatccagaattttggttcttttcaaaatttgtgatattttatgacgcatataggggtaactcgcaggttataccaatcaaattacttcttatgtcttctaatgaaatcaaaatg

SEQ ID NO: 20020 - DNA, 251 bp, Glycine max
cccacgcgtccgctctttctctctctctgtgatcttatctccttttaattgttcactcacccggttacactggttgatgcaaaaaaccatggtaccctctatggttggtggttgctgacactcttaatagtcgcaaagtaggtgactagcagtaccttgtaattgaaggaccctgcagttttttttaatggaccggacctaggttggtaaggaatgggattatgggaagcttacccaagtgaccgatttgg

SEQ ID NO: 20021 - DNA, 276 bp, Glycine max
gctcgaccgcactcgtccgctcacgcgtcctatcttcctttacaactacatccttaaataataataaggacctactataaggcttctttccatcattgtggtggtacatctatcctattactgctacttaatacaaaaacacatcatatctcaaaaccacatgacaatctcttacattcaaaaaatgcctgttacaatcaaactacaacagcatatataaagactactatgaactatcatacaaacactgtatgatatactgaaacgtttaatact

SEQ ID NO: 20022 - DNA, 477 bp, Glycine max
aaaagttcttatcagtgacagagtaaaggatgcataccgatgacgatggcgatgacggcggcgcagttgcggtgcggttgggggtggaggccaacgccgaatcagcagcagcaacgacgtcgtatggttccggtggtgtgttccatcgctatagagaacgcgaagaacaaagagagagcgaaactgaagaagctcttcgatgaagcgtacgagaggtgccgcactgctcccaccgaaggcgtttccttcactctccaacaattcaccgacgctctcgacaagtacgacttcaacgccgaaatgggcaccaaggttaagggcactgtttttgccacggataacaatggagcttatgttgacattactgctaagtccacggtctacttgcctcttcatgaggcttgcatccacagaattaagaatgtggaagaagcaggcataatttctggcgtgagagaggaatttatgatcattgat

SEQ ID NO: 20023 - DNA, 446 bp, Glycine max
  modified_base (367)..(367): a, c, g, t, unknown, or other
acggtgaactgtgaacatcatcatcacaattaatatgagtagtgcaacaagcaaggcttggatggtggcaactagtgttggagccgtggaggctttgaaggaccagctgggtgtgtgcaggtggaactatgttttgagatgtgctcagcagcacatgaaaaaccactttagatccttgtctcaagcaaaaaatgtttcttcttcatctgctcttgttgcaagcaaattaaagggtgatgagaaggctaaaaaggctgaaaagtccttgaggactgtcatgtacttaagctgctgtggtcctaactgatcttaaaggagagagattatcttacatgctggggattaattgtgatttgaaatgaatatngctttgtgtaaatagagatatgatagattgtatgaaaattgtaatgccaaacaatattaattaatatactattcaatga

SEQ ID NO: 20024 - DNA, 336 bp, Glycine max
cgcacgcgtgcggccacgcgtccggtcaaacacagtaacagaccatcctgcgctgtgttctctggtttagatctcgagatggcttatctcttgggtcttagaatccgtacaatctaatcaacataacatagatggatgcaagcagttgcatggatgagagcaccaccactgagtcactctctataagtctttctccgacgtcatcgcctgagaaagcgaagccttcttcgatgattacatcgtcagagaaagcttctcttgacccgccgacgtcaaacagactatgccgagttggaagcacagcgagcgcagtcctggatcctgatggcggcggca

SEQ ID NO: 20025 - DNA, 412 bp, Glycine max
  modified_base (21)..(21): a, c, g, t, unknown, or other
cactcttccttaaacttttancacctgctaaatcatcttatctactattgcctttatagcctcatttaaaaaatggtgtccctctcacatactaactcctactcctttatcttttccattacattatcttattcttactctttcaactccaactcaactaaatttaactatattcatacatcatcctctaataaacttcctaattaattcattcaacactcataatttaatcctttgaattaatatcatcctatatattctccacctaccttattcttcttaaatctttcaatcatattaatcttttaatattctacatctttttaaatacttttatttttaattcctaaatgtcatctatttttcttaacacatcaatataccttctctttatcatcaattcatacaacac

SEQ ID NO: 20026 - DNA, 368 bp, Glycine max
cccacgcgtccgctgactcgtgggtccgctttatagagtataaaagatgtcgcgtttgatcgacagtttttagtgcgcggtggccgtgctactgtgcgccttagctgtctcttcttgggtggatgaggctgctaacccgatactaatggttgctactgtacaaactgatgttattctcatgatacgtcatttccagcactctctgaagtttgctatgttcatgatcaagttcttgaaaagttaccgaaacgaagaatatatgatgcacatgtactaaatattctcgcaaaaccttacgttcatacgctcccacaacaagaaccgtttgccctacactctctctgataatcattttgcttattgtactt

SEQ ID NO: 20027 - DNA, 480 bp, Glycine max
cgcgtacggtttgaactttcctttcacccatgagaaatctcttctgggacacttaaagttttttccttgaaatcctgatgctgatagctttaagaattggagacaaggtaggactggctttcctttggttgatgcaggaatgagagaactttgggcaactggctggattcacaacagaataagagtaatagtttccagttttgctgtgaaaatgttgcttctaccctggaaatggggaatgaaatatttctgggacacacttcttgatgctgaccttgaaagtgatatcttgggttggcagtatatctcaggaggcttaccagatggccatgagcttgaacgcttggacaatccggagattcaaggggttaaatttgatccacaaggtgaatatgtgagacaatggctacctgagttggcaagaatgccaactgagtggatccatcatccttgggatgcaccgcttactgttcttaaaac

SEQ ID NO: 20028 - DNA, 467 bp, Glycine max
caaagatgaagtttttcttggttttggtgattgccatgttggcgatggtagcaactggggttgcagctgctgaggcacctgccccaggtccttcatccgatgccaccaccttctttgtacccactgctcttgcttctctctttgttcttgcatttggccttctcttctaattaattcttcaacaacctttggttatttgttacattacatatatggaattcactttgttcagaggtggttgtgttttgtgtttcgttcttctctttttttccaactcagcttgagtagtggttggtcactactctcttgtgagtagaagggtttatttttttgaggatgcattgaattggagatttggagtgagggaggaagagaagtagatgatacaatataggctctttttggtgggttttctggattattatcattattcatattcttatgtaacaaattcattattattcctc

SEQ ID NO: 20029 - DNA, 463 bp, Glycine max
cgctggtggataacgaaatttcttagacaaaatacaaggatcagaaccgttgaatcaagttgaggaagatggcacgagtctctggaggaagatcaacactgaaccctaacgcccctctttacattcctgccgcgtttcgccaagtggaggatttctctccggaatggtggcagctggtgacgacgctgacatggtaccatgactactggctaagccagcagcacgatgagggagccttctacggcgaggacgacgggtttgatggcaatgatgtcgttgatttgcttcctgattcgtttgatcttgatgctggcgaggatctttttgaagagtttataagatcttctgaatcccaagaagaaactggacccaaagtaactgcatgaggcttagagatgaacccatttaaagaatctacctaccaacctaagagactggacccaaagccttagctttaggtcag

SEQ ID NO: 20030 - DNA, 440 bp, Glycine max
cccacgcgtccgaagggatctagctgctgcatttgaaaagcattttttgacatatggaggacgtggacatttgtattaacagtgcggggattagtagttctgtaccattccgtgatgatcaaacggatggcacccgaacatggagatacactgttaatgtgaatttcactgctgttattgattccactcgccttgcgattaaaatcatggaagcttccaaaaggcctggtgtgattatcaacttgggttctgcttctggtctttatccaatggtggctgacccaatttacagtggctctaaaggtggtgttgttatgttttctagatcacttcgtctatacaaacgtcaaggaattcgagtcaatgtgctttgcccttgagtttgtgaaactgagatgggaaattagattgatcccaagatcattaatttgagtgggggc

SEQ ID NO: 20031 - DNA, 412 bp, Glycine max
cccacgcgtccgaatttcatggctattccatctcctaaaattttcctccgcttaacattcttgttctcacattctatagctgtgaagtcctccaatgtttccacaaccccaacattgcatgcaaccttcccatttcctgaagttagcagcttcaattcatctaagctttcaatctcaataaacataaatccaaacatcatcaacacccttcttcagtccctccaagcagcaatatctgaagccacaaaactatctgatctattaaacaacgctggacataacatcatagagaacaaaataggagcagtccaagactgtagagaacttcaacaatccaccttagcttccttaaaaagatcactatcaggaatccgttcccaagacttcagaaaactagttgatgcaagaacct

SEQ ID NO: 20032 - DNA, 299 bp, Glycine max
acacccacgcgtccaaatctctttaccattccaattctcaaaatctctctaaagttaacattctaagactccttctctacacgggctaaatactccaatgattccacaatccccacattacatccatgctccctattcactgtactagtcacctaaacaatatatctcacccgcacctaaataaacatataccctaccatcatcatcactcttatgacaccaatcctagcaccagcatcaaaaacctcactactcttacatctatataaccacacttgacttaacatcttttcactcac

SEQ ID NO: 20033 - DNA, 409 bp, Glycine max
acgcccacgcgtccggagattaccaccctatggattaagaacctcaagaagcgcggccacgtaaagacccttctataccgtatcggaacgcaccgtatgcaccccgtctgccgatgaaacgccagtcgcatgcatcaccacacgatcctgttcgacaagtaccatccgggcttattcggtaaggtgggaatgaactacttccataagcttcacaataaattctactcccccatcgtcaacgtcgaaaagctatgatctctcataccccaagactcgaatgaaaaagccctaaaatcgaaagacactgaccctctaatcgacgtcacacatcacagctacttcaaggtcctaggaaactgtgctctgccccacaatcagccttttagtgataaagccaagcttatttcca

SEQ ID NO: 20034 - DNA, 467 bp, Glycine max
cccacgcgtccggaaacttggagcagctgcaaaatcatgttatctgctattgcctttggaggctcagcgaattggtggttgcgctgtcacgggcgaacgcctactcctttatcttttccggtttcagtgtcttattcttcctctttcaactccaactcaactaagttcaactatattcatagagcatcctctgaaggacttcctaatgagttggttgaagactcaaaatttgttcctttgaatgaggaggatcctatatatggtccacctgccttattgttgttgggctttgaagcagatgaagctttgaagattcgacagcttttgaaagagttggatggtgaattcctaaaggtcatctattgtactgaagacatgattatgcgttcgctttgtgaggcaatgcatacaacacaacccaatgtagaagatgtcaagatagccaagtcactttctcggatatgctt

SEQ ID NO: 20035 - DNA, 428 bp, Glycine max
cccacgcgtccgcagatgttgttactgtcaattccactgatggaaacaatcctactaaggtgggttctgtgcctaagttcctcttcatatgtggatcaaatgttgtccaaaaaggccttgctagtggtgtcacaggtatggctggtcttggcagaactaaagtttctcttccttctcaatttgcctcagctttcagctttcatagaaaatttgccatttgcttgagttcttctactatgacaaatggtgtaatgttctttggtgatggcccttacaattttggttatttgaactcggatctctccaaggttctaactttcacccctctcatttcaaaccctgttagcactgctccaagttatttccaaggggagcccttaatggaatactttattggggtgaaatctattaaagtctcagaccaaaat

SEQ ID NO: 20036 - DNA, 477 bp, Glycine max
cccacgcgtccgcccacgcgtccgaatttttttctgtcctcttttcctctcagaggagccgctgagtctgctcaggtgttccttgtcaagagatccttttgtttttgaggtgtgaagggaaagagaaaaaagatgaatcagtgtggttatcagcagaagaaggccttgacaagctgtgaggagatgaggatggaatctgtggtgtgccctaaacctcgaagattgggcctgttgaaccactcaacctttgataaccacatcagacccttgaggccaccctttatcaactaccaatcagaaattgaagattcaggagttggggctgagcttatggacattattctccccaagagatctggggggcaagtggcttcatcaccgccatttttctgtggatctccacctagcagggcttcaaaccctgtgatccaagatgagcaatttggtagtaatggtaatgagagttttggttcattt

SEQ ID NO: 20037 - DNA, 361 bp, Glycine max
cccacgcgtccgcccacgcgtccgcagtctccactttctgagaagagggccaaattagagttggattattagggtttaaccgttcctccccttccttttcaccataatcaacatcaacctcttccaaatcccaatggatccgaccaagaagcgcaagctcgacgagaacggcttcatcaacaacgactcctccgagcccctcaagctctccccctccgacgcccgcaagctcatcgagcgcttcaccactgaccagctcctcgacatcctccaggacacggtggcgcgccaccccgacgtcctcgctgccgtgcgcgctgtctcagaccccgacgtctcccagcgtaagctcttcatccgc

SEQ ID NO: 20038 - DNA, 432 bp, Glycine max
cccacgcgtccggggagatggcccaaaacttgtgagagaacttttcagagttgccgatgatcgtggctccttctattgtattcattgatgaaatcgatgcagttggtacaaaaaggtatgatgctcactcaggtggagaacgtgagattcaaaggaccatgttagagttgctgaaccagttagatggttttgattctagaggagatgtaaaagtgattctggcaaccaacagaattgaaagtcttgatccagctttgctacggcctggtcgaattgacaggaagatagaatttcctcttcctgatatcaaaacaaggagacgcatctttcagatacacacatcgaggatgacattagctgatgatgtcaacttggaagaaatttgtatgactaaagatgaattctctggagctgatatttaaggcatatgta

SEQ ID NO: 20039 - DNA, 413 bp, Glycine max
tggagatgaggtttaccagacaaatatatatcaggatgaacgacccttcattagttctagaagggttttgatggacttggggccacctataagcaaggaagtccagcttatttcttttcactccgtgtcaaaaggttattatggtgaatgtggacagcgaggtggatattttgaaatgaccaacattcctccagagacagttgatgagatctacaaggttgcatcaatatcacttagtccaaatgttccagcacaaatatttatgggagttatgctccatccacctcaacctggagatatttcttatgacaaatttgttagggagagcaccggaatacttgaatcactgagaagaagagcaaggctaatgactgatggattcaacagttgcagaaatggggtttggaatttta

SEQ ID NO: 20040 - DNA, 439 bp, Glycine max
ctgaaaaggaacctgttgttgctgctgctgctaatattgacatcccatggattccagtagagggtaaaactgtccctgtgcaacctttatttgcttcaagtccagaggggagtgttgaggcaaagccgaatgatggaccaaaacgttacaacagctgcaacaagcgagttagtttgacagggtttaatcgtcgatgtggtgaccttttttgtgctgtacatcactactcacacaagcataattgcccatttgattaccgcactgacggtcaagatgctatagctcaagcaaacccatttgtcaaggctgaaaagcttgataagatctaagatttgaagttgaagttccatgccctgaaatgaagctatgcacaatttcatcatgaaatgatccgagtatccttcacattttatacggtgtcatattataatggtatatg

SEQ ID NO: 20041 - DNA, 386 bp, Glycine max
ctaagtgtcccttcaaagtgtacccttccactaactgctcagcggtgccggaagcattcagcagagggggtgcaatatcaagtctatgggtcactagtactagtagtggtgtggaaagattaattatactatgagaagtgaagaaatattatacttaattagaaggaaataaagtgtatggattgtgtgttacgatccaacgatcgaaagccttgaagtatatcaacaataaaagatatcccttcaattaatttatcattttctctgcaaggctgtagtgatatatgaaagtgaagtatgaacatctaatgagtataaatgcaaaaaatatataattaagcgtatgtaaaaaaaaaaaaaaaaagataatgacaaatagattaaac

SEQ ID NO: 20042 - DNA, 461 bp, Glycine max
cccacgcgtccggtcgctactcatggaatacttctgatggttttgtatagccatcaagtgatgttgaggattctagtgatgctgatagcttaagtggcagcagtagttgtttgagcaatcgacaagatgaagtgggagatgaatgtgggggtcttaccgagtttgattctggcacatctgtcaattactcttttagtaatttctcctttaagaatctctcccagcttgcatcaatcaactatgatctcaccaagggatggaaagatgacccggcaacgaactctagtgcatagctgtatttattatcctgtgtcaaagttcagaatttggttttcgacctatgatccaagcaattttgggggcataaacacctttgtcatttgtataccttgtacatatttaaaagttcaaaatggttcaagatgtactctttgcttgttagtttacaaggcaacaatggg

SEQ ID NO: 20043 - DNA, 371 bp, Glycine max
  modified_base (10)..(10): a, c, g, t, unknown, or other
cccacgcgtncgccggctgagaaaatagcgactcagaaacacgctcgtcttcacgatcctgcgattccgctctccaacgagtctgcgcaggatgaaaaatcgggaggctagccgtcggtgaagaatcgcgcgattcgccaggaaatcgcgattcaagcacgattcatccccgatacagagattcaaccacaattcaggaaaaaaaaaaacgagacaaactccgtttcgtatcaatagaagctggaatcgtatcgaatcgcgagatacggatcgtgaatcaagtctctgggtgatggctggttcagaacctgtaagtgcagagggagagagtatggctgtggatgctgccccaaggaagccccggattctac

SEQ ID NO: 20044 - DNA, 384 bp, Glycine max
ttaaaccttgttgcggttgatgataaggccagactgaagccaacgaaactaatgaagccccacgctccggcttctgctttcgtcactcgtctcccgcacgtgccttacttccgcggcgccactgccgcacgtgccgcgccatcggaccctcctcatgacgcccccggaggcctcgaattccgccgcgtctcgaccgccaaacgccgccgcgtcagcctttccgtctgccacgcgagtcgcgtcaccgccgcctcgaatcccggtggttccgacggcgacggcgatactcgagctcggagcagccggcgcggcgtgctgatggcgccgttcttagtcgccggcgcatcaatcctgctctcggcggcgacggcgaaggcggaagag

SEQ ID NO: 20045 - DNA, 418 bp, Glycine max
cagaaaacgccagaaatccaacttaaaaaaaaaagctacaaccaacaactcgcgaatagaaccacgaaattatagctaattagctaattatccattaaacactgtcagagcaatccgaaaggaaaaaaagagaaaaaacatagccaactccgttccgcatgatataaaagtttaatcaacctcctccattttgctgccctcagcatcagcttcagcctcctcctccagtgggggcatatcagcatcagcttcagctgcatcctcgtcgatgctcagtccaagcttcaacattctgtggatcctgtttccaaaagtgttgggttcgtcaaggctgaaaccagaagtgagaagagcagtctcgaacagcaacagaacaaggtccttcacggatttgtccttcttgtcaacatccgcacgc

SEQ ID NO: 20046 - DNA, 389 bp, Glycine max
acggttgctttgtcggtgggctcgcttgggccactgacgaccatgccctcgagagagccttctgtcagtactgcgaaatcgttgaaacgaagattatcaacgatcgtgagactggcagatccaggggttttggatttgtgaccttcgcctcggagcagtccatgaaagatgcgatcggagcgatgaatggacagaacttggacggccgtaatatcactgtcaatgaagctcagtcccgcggtggctgcagcggctgcggcggatgaggaggaggatacaatcgtggtggccgtggatatggtggtcgtagtggcggtagcggtggcggtggtggataccgtatccgtgacagtggttatggctgtggctattgtggtggtggtagtggt

SEQ ID NO: 20047 - DNA, 306 bp, Glycine max
tctacacttacaccatcaaatctaaatgccttctctctcacctacaatgacagaggataacatttcatgattgtttaaaaaataaactgatctaatctcttctgctaaactactctgcaaaattcaaactcataaaaccactgttgaaactgaatatatcgaagaaagttttactgccaaaataatccttgatgatgtcgcaaaagaaattaaagttattgaagtaattgctccaacttttgaaaattaatgtgatattgcaaaattcaaagattaccaaccttcaacatcttaaccaaattaacc

SEQ ID NO: 20048 - DNA, 444 bp, Glycine max
ttcaggtttcagccttgatgatcccaacacatttgcttcgaggattcacaggatgttgaaggggggtcttagcattgatgaggatgacaatggtggagacgatgttgatatgcccccattggaagaggacggtgctgaggagagcaagatggaggaagtggactaaatgccaaaggtctcgtgttaaatgaattgtggttcgtgtctgttaaatggtggtggatgcagaagtcttttagttttatctttctttttgttttgtttttttgagatatatagggtttttactttttaagtttttgtgatgtgaaaaaaatgtgtctgtcagtctgtgtgttgcatctacctacttttgtcagtaattgttctggatataacatcttttgtcagtaattgttctggatataacatcaatgaaggagaacaagtattacttcctcaaaa

SEQ ID NO: 20049 - DNA, 250 bp, Glycine max
ttcacgcgtccggcatcctgatcggaaaccgtcttctgcggctactgtcgagcatgcatgaacgacgtctttcagggatgggatggtcagaggaagcggctgtgatatagttcaagttgaaggcggtcacattgtgcgctccacaaggcataaggaccgtcacatcaaagtgtgcactctcaaaggccctattgaccgacgagtgaggttatcggcccacaccgccatccaattttacgacgtccaggac

SEQ ID NO: 20050 - DNA, 419 bp, Glycine max
cttaagctgataaaacccccttgttgagagctcttcagcatccagaggccttagctacaactgacgctaggagaggaattccattgctgatgctgttattagttcattgtcacaaagtggaagagagcaccatgaggaaacacactactctgatccatgaactagtccaaggaaaggaactaacaatgcaccttactaaccatctgcatacatcttatgcaatgtcccatcagaccaatgaattgtgtgttgataaaatacttttgtctcatgagaaagcactgaccatgctgaactggtgctctattatgggagaggccaataccaccagtggcaacatcatggattaccattggacttttacaaatggtggaagccccagacgtgaggtcgttgaccgtgaatttgaacacaaagct

SEQ ID NO: 20051 - DNA, 461 bp, Glycine max
  modified_base (417)..(417): a, c, g, t, unknown, or other
cccacgcgtccgaaaacggcgtcgtttctctaactcctctgggttccgtcgtgcttcaagtcagaccgtgaattcggttccgcgtgcgaatggaacttacaccgtttcggatttcatgacaaagaagcaagatttgcatgttgtcaaaaccaccaccaccgttgatgaagctttggaggctcttgtaaacaacagaatcagtggtcttccggtgatcgatgaggactggaatctggttggagttgtttctgattatgacttattggctattgattcgatatcaggaggtcctcaaagtgatgcaaacttgttccccgacgtcgatagtacttggaaaacgttcaatgagttacaaaagctgcttagtaagactaatggccaagttgttggtgacttgatgactccaactccacttgntgttcatgaatcgactagtcttgaggaagctgctaggcttgtac

SEQ ID NO: 20052 - DNA, 435 bp, Glycine max
tgatgaggtctaccttggacagagggacaatccaaattggactgatgacgcaaaggcaattgaggcctttaagaagtttggaaacaagctgaaggaaattgaggacaaaatctcagggaggaacaagaattcaagccttaggaaccgtaatggaccggcgcagatgccctacactgtgcttcttcctaccagtggggaaggccttactttcagaggaattcccaacagcatctctatctaatgagagtgtgtggtgtgtggtagtgtggttttctttccttccaacgtacctctcattgacaaataaacgtgcaaacttatgtgtgcataattttcttatgtatgcttaagttttgtaattggatgctatctagtttttcatatctaatagggtgttgtgtcaaaaaaaatacactagttgttcatgaatataat

SEQ ID NO: 20053 - DNA, 248 bp, Glycine max
attgacatttacgaagtcaacaaaaaaacaattttaaataaaaaaaaaaaaagaaattcaataaagaccatttttaacaattcgaaccgcgattaaaaaaaacaaaaatcgccacttctttaaaaaactccaattttagtcctccttacttcaacagcataacccttttttcattctaccaaaatttaattaactagcccttattttaaaacttcataactggtaaaaacctggtttttaccaaatta

SEQ ID NO: 20054 - DNA, 401 bp, Glycine max
ggatcatctggcattgatgatggagcttcttgggatgatgcctcgcaagattgcacttggtggatgctattcccgagattttttcaacagatatggagatttgaggcacatccgtcggttgcgtttctggcctcttaataaggtgctgacagagaagtatgatttcagtgaacaagaagcaaataacatgaccgatttccttcttccattacttgattttgtccctgaaaagaggccaactgctgctcaatgccttcagcatccttggttcagtgcaggtccccagactcttgagccctcattgactgctgtgaagcatgatgctattgaaggggaaatatctgaaaaaatgcagaaggaaaaagctgagcaagaggctgtggaagttggcatggggaata

SEQ ID NO: 20055 - DNA, 469 bp, Glycine max
ctctgatcactctagctgttgcaaatttctactatttttcaatggcttctgcagatgttgggttccgttgctttgttggtgggcttgcttgggtcaccggcaacgatgccctcgagaaagccttttcaatctacggcgacatcgttgaatcgaaggttatcaacgaccgtgagactggaaggtccagaggattcggatttgtgaccttcgcctcagagcagtcaatgaaagatgcgatcgcaggaatgaacggccaggaccttgacggtcgtaacatcactgtcaacgaagctcagacccgcgccagccgtggtggtggtggaagcggtggtttcggaagtggtggtggatacaaccgcggtagcggtggatatggtggtggtggtggctgcggcggatactgtggtcgtcgtgaaggtggatacaaccgtaatggtgggggtggaagtggaggatacggcggtggtag

SEQ ID NO: 20056 - DNA, 477 bp, Glycine max
ctcttgttcgctactccatttgccgcctctggaactccgaacgttgaacatggacgctgcgaaagaagaatttctcagagactttggtgaacactacggctaccctaacggccccaagtccgttgatcaaattcgagctactgaattcaagagattacaattacaagatcttgtatacttggatcatgctggggcaactctatactctgacctgcaaatggaatctgttttcaatgatctcactactaacctatacgcaaatcctcacagccaaagtgactccagttctgcaactcttgacattgtcaagaacgcccgccagcaagtccttgactactgcaatgcatcttccaaagaatacaaatgtatatttacttctggggcaacagcagcgctgaagctggtaggagaggcttttccatggagttgtaacagtagttttatgtatacaatggagaatcataatagcgttcttgg

SEQ ID NO: 20057 - DNA, 422 bp, Glycine max
aaacaagaccaactacccacctatggcggcctctgttgtagtgtctacctctctgtctgtgtgtgtcaactatggcgatcatcgtcgtccatccatttccgctctctcttgtcattcgaattccatcaccaaaacaaacctaaaactcagttcgcaatgtttctccaactcgaattcggtagccccgatttattgccgcaagtttgttgctcgcacttcaattggagaaaacgagagcgagagcgagaaggagttagggttcgtgggggaggactctgcggtgtttgaattgggcaaacagaaagtatcttcgtggatttatttcaccgctattttgggagtcgttctctatgttcttaacgtcgcatggattgataattcaactggctacggcaaagcttttattgacgcccgttcaacgc

SEQ ID NO: 20058 - DNA, 416 bp, Glycine max
cactgacctaaccatttcattatagtcttgaatcaaaggtgacggccttccatggcttccgggggtgcttcctctggaattacagctgctaccatctctacgccaaattccccgcagacgaatggatcatgacgttgtttacttagaggaaagaaattgacggtgaactaggctagagcacctgttgaaggacgatcgattgccactactgtgtcgcgcagttgctgcacctgacagacctctatgagctcccaagcagcacccctcctgcatggcttgatggcactgtaccatgagacttcagctctgaccctcttagtcttggatctgacccgcagagtatccgatggaatgttcacgcagagctagtgcactgcaaatgggccatgtttggtgctgctaacattttcattgca

SEQ ID NO: 20059 - DNA, 420 bp, Glycine max
cccacgcgtccgcacatttttagttgcaactaatgggaactgttgaagctgcaaacaaggatgcaaatggaagccggctagagaaaaatcctacagttgtttttgtgttaggtggcccaggcagtggaaagggtacccagtgtgcaaatattgtcgaaaattttgggtatactcacctcagtgctggtgatcttctgcgagcagaaatcaaatctggttctgaaaatggcacaatgattcagaatatgattaaagaaggaaaaattgttccctctgaggtaacaattaagctcttacaaaaagcaatgcaggaaagtggcaatgacaaatttcttattgatggttttccccgcaatgaagaaaaccgtgcagcatttgaaaaagtgacaggaatagaaccagcatttgtcctattttttg

SEQ ID NO: 20060 - DNA, 386 bp, Glycine max
cacaaacttctatcccatctccgtttcagctctttcctgaagaacatgggcgaatcttttggggttgatattgctgaatcactgctggggaaacttgcttcttatgcttatgaagaggcttctcgagcctacggtgtgtatgaggatctgaaggggatcaaagacacattgtcaattgtgaaaggggtgctgttggatgctgaggagaagaaggagcacaagcatgggttgcgcgaatggctcaggcagattcaaaatgtttgcttcgatgctgaagatgtgttggatgaatttgagtgccaaggctcgcaaaagcaagttgttaaagcttcaagcagcgtcagggttaaggtaggccacttcttttcttcatctaattcgcttgg

SEQ ID NO: 20061 - DNA, 459 bp, Glycine max
  modified_base (358)..(358): a, c, g, t, unknown, or other
  modified_base (434)..(434): a, c, g, t, unknown, or other
cgaatatcttgttgtttggagcgatccgagaaaaactctgtaaacatgtgggtttaccaggaggtccttacaggtgatgagcttctctctgactccttccgttacaaggaaattgagaatggaatgctgtgggaagttgaggggaagtgggttgttaaaggagcagttgatgtagacattggtgcaaacccttctgctgagggtggaggagaagatgacggagttgatgatgcagctgttaaggttgttgacattgttgacacattcagacttcaggagcaacccgcattcgataagaagcagtttgttaccttcatgaagaggtttatcaagaatttgactcccaagctcgatgcanagcaacaggagttgtttaagaagcacatcgagggagcaactaaatacctgctctctaagataaagatttccaattntttgttggtgagagcatgggtgatg

SEQ ID NO: 20062 - DNA, 244 bp, Glycine max
acgcccacgcttccatgctatttactagacacgtttttcataaccaacatttcgagattgttctgacgaacatacatgtgcatcactgttactgaacttaccctgatatacttatatagagtgcacatggacactccaaactaattatgagataattcattatccagcaacatttgcatccataataacattcccatcatactgctaagaatcatcagaacactcctattcctacgcctacttt

SEQ ID NO: 20063 - DNA, 454 bp, Glycine max
tgcaaacgaaaatagcgaagctagcagtgaacgaaactccgaagccactgcgcagagtgctggaagacaacatcatttctgtgttacggtcatgcggaacctgcacgcagctgcaccagatctaagcccagatagtgtgacccacgtaatccagggcaacgattacgtcaccccgagtttcgtcacagcatgggcgcgcctcggcggaattcgccacgcccgcagagtgttcgtcaaaacggcgcaaccaaacggcgccacgtggaacgccacgttccgagggtacgcccaagccgagtgccacctcgacgtggtcgtttcgttcgcgcgcatgcaccgcgccggcgcgttcccgaactgcttctagttccccatggtagtctagtcttgcgcctatgcgaacgccgtgaaagaaggagaacaagttcgctgcgttgtaaccaaacgcgggttt

SEQ ID NO: 20064 - DNA, 477 bp, Glycine max
cccacgcgtccgcccacgcgtccgcccacgcgtccgcccacgcgtccggagaaaaaaaaaggcatgtctctcaaggttgtaacagtggtgtttttgctggcaacaatagtagtagccagtgattacactagtttcacctataatggattccaatcttctcatttgtaccttgatggcagtgctgagttcaccaccaatggcatggttaagctcaccaatcacaccaagcaacaaaagggtcatgctttcttcccaagtccaatagtcttcaagaacaccacaaatggaagtgtgttttctttctccaccacttttgtttttgccataaggtctgagtttcccaatttgagtggccatgggattgcctttgtggtttctccaacaaaagaggttccacattctcttccaagccagtaccttggcctctttgatgacacaaacaacggcaacaacagcaaccatgtttttggggtggag

SEQ ID NO: 20065 - DNA, 406 bp, Glycine max
  modified_base (347)..(347): a, c, g, t, unknown, or other
  modified_base (381)..(381): a, c, g, t, unknown, or other
cccacgcgtccgctcaagcattggcaggcagtggaaatggagcagcggttagcaaacacatggagaatgcctcttgacgacaagaaattcatagaaactgctctcctttccgacctccgactcgacggccgtcgcccctccgactaccgcaagctcaccgtcaagctggccaagcaagacggctccgcggaggttcatttgggccaaacccacgttatgaccttcgtcaccgcccaactcgtccgcccctaccgagaccgccccaacgagggctccctctccatcttcaccgagttctctcccatggccgacccctccttcgaccccggcccgccctccgacgccgncgtcgagctcggccgtgtcgtggaccgtggcctncgcgaaagccgtgccatcgacactg

SEQ ID NO: 20066 - DNA, 145 bp, Glycine max
acacgagtctccccaccatcaacaatctccatactcaccctccctaacaatctcaccattctccattcaaatctccaatcaatcactattcatactccatacatacattcaaccaccatccaccaaaaaaaaactcgacacaaac

SEQ ID NO: 20067 - DNA, 474 bp, Glycine max
acggtaactgcagcagcgctgagtcgagggcgttcagtgttcaccacagtttacacacgagtacgcattttctcttctcaagttctcagagtgtgcagagaaaatcatggtggacgcagcagaacgtatgtacttggaggatgacgattcatcactcatgaaaactattaagggggcaacaactggtttagttgctggcactatctgggggaccgtagttgccacctggtatgatgtccctcgtgtagagagaaatgttgctcttccacggctgattaggactttcaagatgatgggcaactatggtttgacctttgctgccataggaggagtctacatatgtgtggagcagttggtgcaaaactataggatgaagatggaattagtcaatggagctgttggccgatttgatgctggtgcaactattctgggttacagatgaaggagcatcaaaactgcactttctgctggatc

SEQ ID NO: 20068 - DNA, 478 bp, Glycine max
acgtaatgcgcgacacagttcccttaatagaattatctagacctctaacagcacagctgaagtggtatgctagagtgatagaaattgaaagtgacagtgatcagagactcctgatctgccagaaacctttcttcaagagacaggcaagctaaaaagaattgatggcctgaagaaactagaccattatatacatatattcattttccataaagttcatttattaccatagagctccaaaagcgggggttgaaaattttggacataaaaagaaaacaacatatagaggaaaaagtgtatccttgtcaatgataccaccacatcatctatgtagccgtaaggtgtacatagggccatgtaattaccaaacaagccacagagcagatgagaaactagtatactggtaggttaatttacttttccatgtgatacacataaacaatattaagattgggaacatggtgataagttattgttgtaa

SEQ ID NO: 20069 - DNA, 401 bp, Glycine max
cgggaaggtcgtggtgtacgacccctgaaagatcacatctatctccacttgaatcacttgcccgcagatgtgctcgaagagagacttcctggcatctctgaaactgctgctatttttgctggtgtggatgttacaaaggaacccattcctgttttgccaactgtacattataacatgggcggtattcccacaaaccattatggagaggtggttaccattaaaggtgacaatccagatgcagtggtttctggattgatggctgctgaggaaacggcctgtgcatcagtccatggtgccaataggcttggtgcaaattcacttctcgatattgttgtttttggtagagcttgtgcaaatagagttgcagaaatccgtagaccaggagagaaacaaaagcctct

SEQ ID NO: 20070 - DNA, 408 bp, Glycine max
acgactcagtctttcattctcattgccgtcacatatagagacacgaaacaatgaagtttaacccgagggttttcacaagccggcgcaagatccgcaaggctcacttcaccgctccgtcgagcgtgcgccctgtcctgatgagcgctcctctctacaccgatctccggtcaaagtacaacgtgcggtccattccgcatcgcaaggacgactaggttcacgtcttgaggagaacctacaagggccactatggcaaagcggtccacagtctatctccgcaagtgggtcatccacatcgagcgcatcaccctcgagaaggttaacggctccaccgttaacgatggcattcacccttccaaggttgtcgacaccaatctccgaatgtacaacgaccgcagatccttgctctat

SEQ ID NO: 20071 - DNA, 391 bp, Glycine max
atcatagcctttctttcgtagctactactacttgagtttcattaattctttggttcaaaaaagcttagttgttggtagagattgaaaattaggaaaatggtgagtgttgaagagattcgtaaggcacaacgtgcacaaggccctgccaccgtgatggctattggcacggccactcctcccaactgcgtggatcagagtacctatcctgactattatttccgcatcaccaacagtgaccacatgaccgagctcaaagaaaagttcaagcgcatgtgtgataagtcaatgattaagaaacgatacatgtacttaaatgaagagatcctgaatgagaatccgagtgtttgtgcctatatggcaccttcattggatgcaaggcaagacattgtgg

SEQ ID NO: 20072 - DNA, 310 bp, Glycine max
gctacagaactcctgatcctgtcactgggaaaagaaactactcttacatggatgctgttagaggttatcttggttataaaaggacatgtgtagctggcttccttcaatttttgactttgtatggtactagtattgcttatgtactaaccacagcaactagtctgagtgcaattctgagatcaaattgttatcacaagaaagggcatgaagctccttgtaaatatggtggcaatctgtatatggcactgtttggacttgttcagattgtaatgtcattcataccggatctccataacatggcatgggtttc

SEQ ID NO: 20073 - DNA, 323 bp, Glycine max
cccacgcgtccgcccacgcgtccgagcattatcaaaagcaagaagaactgggctaagcagaaggggcctcttcagtgatggcatctgtggccctcaaacctgcccctttcactgatgagaagtcctcagttagaggccttccctccctctcaaggaactcctcttcattcagagttgcggccagtggtggcaagaagatcaagactgacaagccttatggaattaatggtggcatggcttttagggaaggagttgatgcatctggcaggaaaggaaagggaaagggcgtttaccagtttgtaaacaaatacggtgctaatgtc

SEQ ID NO: 20074 - DNA, 411 bp, Glycine max
atacgcttgcgtcttcaggaaattagaggcgttccaccaaacttaaaacaattcatggcaagagaagatatattctaagcttggtcgagttcaaacatgttgtcaaatcatgaattgcatgatgcttgacaaactgaattcatgtttccaggatcaactattccacactggttcaatcaccaaagtagcggaccttcaagttctctctggtttcataataaattccctgacaaagatctttgtatacttctaacacgtctagaatccatagatctagatgatattcccatgcccaacgtgttcatcaatggcatactttgtaagatttcttctaggaactatcacataagaaagctttacatgatcttgcataaaatgaatgagaccactgtgaaattacatacagaggta

SEQ ID NO: 20075 - DNA, 429 bp, Glycine max
cccacgcgtccgcctcattccagccacacgcttcagaagacatggcctcattgggtgggttacaaaatgtgagcggcatcaattttcttatcaaagagggtccaaaagtcaatgcaaagttcgagctgaagccgccaccatatccactggtaataagacctagagtttgcatgtttacaagagaattcattgtgattttctagtggagctatatttctaatgcacattgaagaaagaatacttagcttttatagttttcaaatttacattctattgaaactttggttagtcttgctttaataaagaaacttaaaaatgaaacgatacatggacataggcatctcaatacatgcatggactaagtactttggttactcttattttctggtcatcatggatccgaagctataatctaacttaacacacaca

SEQ ID NO: 20076 - DNA, 483 bp, Glycine max
gattggactatttgcttttcctttccaatacttatcaaatggagcacacaatgactacaatgaattatttaaagaaacagatttcaagatgaagacatcctgaatgtaaaacattttgcattcttagtggataagaattaatccttctataaatggcgttcacatttttttttcttttgtgcaatttcgctccccaatctgttatattcctccaaatccaaaagaatggcacaaacggtttcttctaataaccaaacaaattgcattgctttttacaccatagccatcctttcttgtttggttttgatgatctcttcctctctctcattcaagaaattgcaacaataatttgagaccctctttcaatgtaccttgctgcctcttctgcatcatattaagatccttaaaatacgtatgctgaaaataaaccttgacaaaaattttgatacattttgcatcttctctgatacaaattttaatttt

SEQ ID NO: 20077 - DNA, 313 bp, Glycine max
acgtttcactcctgattatgaacactggaaacgtttaatgtcccagtcttatctagaatctatggtaatttattaatcaaatgtgcgcaatgtcatcgatatgaagtctatctatcgagcatttgctgcagctttgatagatttcaacgtttgggtcataaatgtgcttacaatatactcccctcatacttcttcccattatattttaacgatgtctattcaatatatatcatcattcgtgtgaatcatttaccacctatcctactacctatgatctcctccatgcttatcaatctctttaaaacttaacaaa

SEQ ID NO: 20078 - DNA, 406 bp, Glycine max
cccacgcgtccgaaaagagattagagagagagagagagaggagacgaatgagacaagatagctgaacataaaggtgaggttacgtgtatctcttgaagtagtgccatgccaccccatcaataataagatcactcaatcaccaatgcatcatcgttgttggaattccagcgctgtgtttggaaattggaactggaggggcttcaggtgccataatctcaaccttagataacagattattgcacagcaaaaaccttgtaaaaggagaattagaatcacctctctctaaggatgttggaaggaaaggctatggtgaaagaaacagacatgtcaaccaagatgcagatccatgccatggcctctgcttctcaggcccttgatctctacgatgtttatgattgcatctcta

SEQ ID NO: 20079 - DNA, 386 bp, Glycine max
tgacgagtttcatggcatcaaactatggtggtttacacacaaagtaagcaacactccacataggtacatcccttagggttattacggatcctcagacgagaaaaggttctacaagctaacattccataagcgccaccgagatattgataccatgtcttacataaagcatgttttggatgaaggaaaggatattgagatgagaaacagacagttgaagctttacacctacaatactattactgattggtatggttacaagcaatcaatgtggagccacattgtgtttgaacaccctgccacttttgaaacactcactatggatccgagaaagacggaggatatacttatagaccttgcgatgcttaacaagggaaaggattattatg

SEQ ID NO: 20080 - DNA, 390 bp, Glycine max
ggagtgctcttctctgttctctcaattccttcccaatccaatggattctgcgttctccatcacgaccaatgcgcacgtggcgcttttcagagtgctccaccgtcatttccacggagctcctaaacgcgtcttgcttcgctgcaacctcaaacgccttattgcttcctacagtagcagcaactgctgccgcattccgtgttctttcgcctccgcaccgtcgccttcctcgctcggatccttccgcggactactcccgcgaacgccgccgtgcagtccgcgctgcatttcctttgcttctcctgccggcggtggaaatggcggcgctggaaccggagacggtggtggaggtggcggttctggcggggagtccggagatgttaatctcaaact

SEQ ID NO: 20081 - DNA, 366 bp, Glycine max
  modified_base (355)..(355): a, c, g, t, unknown, or other
aactcccggctcggccgactcctcctaaatagttcactacgattatggcagctcgcattctatgcaggctactaagacactctctcaagaataacaatactatcaaagctgctccaaaacttaactcactattacgacaccctccagcaccaataaacactaacataatacctacactgcgcatatttacagaactaatcactgcacattttctaatacatctcacacacaacctcacatataagcaataatactaagctgcaataggtaacacatttacaacatattaaccctgctcataataatggattactaatgaaacttaaaaataaaacgatacattcacacatgcatnttaatacattc

SEQ ID NO: 20082 - DNA, 269 bp, Glycine max
gttttgcctgttaaattatttgttccttttgcataattcccaaatgctatgctgtcaatagagaagttttgtaaaattcatttatacaatttccttagttaatgataccctcactttatttctgctcccgttctcggttttaccatgaaccaaatgtgctgtcgacattttcaagattacctacctgtctgggtggttgtattcaaaagaaaattatgaatacactattgaaaaactacaacaacaaacaccgtcatacaaacaaaact

SEQ ID NO: 20083 - DNA, 424 bp, Glycine max
gttgaaaagaaaccctagcaagtggagcaatggcagacgttgaagtcgatgtggcggcagcagcagcagcagggctgccgaagaagagaacgttcaagaagttcagttttcgaggcgtggatctcgatgcacttctcgacatgtccaccgatgaactcgtcaagatgttcagtgcccgcgctcgtagaaggttccagagaggcctcaccagaaagcccatggccttgatcaagaagctccgtaaagcgaaaagggaagctccaccaggtgagaagccagaaccagtacgcacccaccttcgcaacatgattattgtgcctgagatgattggtagcattattggagtgtacaatggcaaaacctttaatcaagttgaaatcaaacctgagatgattgggcattatcttgctgagttttctatttc

SEQ ID NO: 20084 - DNA, 360 bp, Glycine max
tctctctctgagactgagaatccgatccttcgtttctgaaattctcccgagatggacgagaacgtgctcgacgatattatccggaggctcctcgcggcgaagaacggtagaacgacgaagcaggtgctgcttaccgaggcggaaattcgtcaactctgtgtttcctccaaagagatctttctcagccaacctaatcttctcgaactcgaggctcctattaagatttgtggagatgttcatggccaatactcagatcttttaaggctgttcgaatatgggggatacccgcctgaagcaaattatttatttctcggagattatgttgatcgtggtaagcagagcatagagacaatatgctta

SEQ ID NO: 20085 - DNA, 491 bp, Glycine max
cgcgtacgcttcaatcctttcgttattctcttattcattcttctcttctgaataatccagatctctttggacccttttcggcgtcaggcttttcgtgaccggatctgtatggatttgatccagatctacacgccgatggtggttttggccgggtctttcatagatctggtgcgtataggctcagatctacggtaccgaggtgtgtgattcatgttcgtcttgcttttggaatctgtttcgtagaaagtcgtttggtcttgcatatggcatggctcttgaggtatttttttgcaggtacaacagagaatcgatgacaagaacgcagatccgacggtagatccagccgattccgcttgttcgatcgctacagacccctgtatcggatcattaagcagcgtgtctcgcgcgttctacacgtgttgccgatctcggatgttgttaaattagtttatgatgtgaagctattgaatggaaaatatttggatgtatga

SEQ ID NO: 20086 - DNA, 411 bp, Glycine max
cccacgcgtccgttaagatcaccaaagtacttgtgagtgtatacccaacacaaactaagatcggcatggactactagacccgcgtttcagaagttgagagggaacctatcatggagtattccacaccacgaccaatgatgggcaactaccaccaccctaatgctcaccgtgtcctcaacgagaagattgtttatgaggaggatgtgattggaggatcccgccacaaccacatgcatcaccaccaccctgagactcatgagagagtcaaggtggtggagtatgaacaagttcctgagaggcgcgttgtctatgaagagaaagttgcttatgacaacgatcgttactactctccaaggtattgaaattggacaaatggaagaacacctataacgtgttatcatgtggcttttt

SEQ ID NO: 20087 - DNA, 433 bp, Glycine max
gaacgattttgcaatggatttgaagaagtgttgagtcagtatagggaaggggttcctaatatgcgacttgcaggtcctacttcatttgcaccaattgttgaaatggccatgacaatagttgagcagagtggaggccagtaccatgttttggtgatagttgcagacggccaggtaacaagaagcattgacactgagcgtgggaggctaagtccacaggagcagaggactgtggatgccattgttgaggccagtaaatttcctctttcaatcatattggttggtgttggggatggtccttgggacatgatgaaagagtttgatgacaatattccaactcgggcctttgataattttcagtttgtgaatttcacggaaattatgtcaaagaatattcctccttctcgaaaagaagcagcatttgcacttgcagcac

SEQ ID NO: 20088 - DNA, 406 bp, Glycine max
cccatttttcacaccaccaacacaagatgtttctccacattgtgttcctcctttgccttctcgcatccacttcccatgccactgtccaagacttctgtgtggcagacctcaaaggtgcagacacccctgcaggctacccctgcaagccacctgctaatgtcacttcagatgactttgtgtacactggcttagctgaagctgcaaatgtcacaaacataatcaatgctgctgtgaccccagcttttgttgctcaattcccaggtctcaatggccttgaactatctgcagcaaggttggaccttggtcctagtggtgttatcccactccacactcatccaggtgccaatgaactactcattgtgcttcaaggtcacatccttgcttgattcatatcttcaggtaacat

SEQ ID NO: 20089 - DNA, 215 bp, Glycine max
aaccaaaaccatctgctggtgctggaaaatgatctgccaattctgttatttttatgtagaatttagttttgtcagtcactgttttgggtatgtgttgtttttccctgtagtgtagctagttcttctaagaggatcttgtcatgtggttgatattaaagcaccaagtataggctttcttttcagtcttagagaatatctttgaaaattttggatgt

SEQ ID NO: 20090 - DNA, 438 bp, Glycine max
  modified_base (16)..(16): a, c, g, t, unknown, or other
  modified_base (108)..(108): a, c, g, t, unknown, or other
caactgtagtagattntttttcctaattattaattttttattataagatagaagtcgagatgttattatagaaaattgagttgagtattattccgatccactacctgngttatatttgttttgcattttgaattttcatttacatttttttacataaacatatatacgcgcgggtaatgggtgaagctggaattgaaatccttgtgtagttgttgcagtggaagacaaagaagatcaaataaatgggtctagctttaaccgtcggattcctcggccttctcattctatttcacgccgcttattcaactattcagtgtatcctaaaactgattatcaaactagttttgctttttgagtgttggggatcttggatctcaaatttgggtctgattttttgtgcagacaggggcgtgttgaagatactgaagagagttttca

SEQ ID NO: 20091 - DNA, 465 bp, Glycine max
ctgaaattttcttccctcgtgatgctcttacccttcccacaggctatcataagcggaaaagcggggagtcagaccaagctcacataatgacttcaggaaacctattagttgagatcttaaatgatctgaagcatgcattctggccttttcaacatgatcacaccaaaactttattcttgagggcggcaactgctgctaactgtgttgacagatctgattttgttggagaaagtggctcacaaattgcattagctaaggctgctcaacataggctagatcgaggtgtttggaccagtgtgcgttttggggacatgaagcgatctttgtcggcatgtgaacgtcttatcctgttgaaaaatgatgcaaatgagttaagagattacagcattcttctctatcattgtggattatatgaacagtcactggaatacctgacgaaataccgagatctgaagaactcatcta

SEQ ID NO: 20092 - DNA, 367 bp, Glycine max
acgcgtcggcacacttgtttcactttctttgtaaacccataactacacacaacctttctctctcttttacagaaacctgagctataaaccagatcaaccttacctctctccacttcttactactgtgaagtttgagtttgtggtgtgcaagatatgaaggattttaccatttaaagagatcaacttgttaagtatatggagaagaaagagatggctgtgaaaactgaggatgcggttgggtcctcttctttcccttgttataattattcaaacctttatccattctcgaacgcgtttgatttctctgaggttgaaaagagctctttagggtttatggagttactgggtgtgcaggactatagtcctc

SEQ ID NO: 20093 - DNA, 365 bp, Glycine max
  modified_base (18)..(19): a, c, g, t, unknown, or other
  modified_base (30)..(30): a, c, g, t, unknown, or other
acgcgtcggccacgcgtnncgccacgcgtncgaactttcatcatgggctaagtttgaaaataggaaggctgctgtctattggaaaaccatgaatggcctccctccttcttcaggagaaaaagctaaacttttctataatccagctgcaactcaacttgtccctaatgaagaatttggaattgcttttaatggaggctctaatcagccaattatgtgtggtggtgagccaagggctatgcttagaaaatatcgaggcaaagctgatgccccaatatattccattcagatatgcattcctaagcatgctctgaacttgatcttttcatttacaaatggagtagactgggatgggccatatagactac

SEQ ID NO: 20094 - DNA, 390 bp, Glycine max
  modified_base (8)..(8): a, c, g, t, unknown, or other
  modified_base (352)..(352): a, c, g, t, unknown, or other
  modified_base (365)..(365): a, c, g, t, unknown, or other
cacgcgtncgcgacgtcttctacaacaaggacagggtcattgagatcaatgtgcgcaccgatcccaatgcgctggtggatctcaccgaggatgctgaggttcaggccgagtttttgtacacggttaagtggaaggagactaacacgccattcgagaagaggatggacaagtactcgcagtcttcatcgctgccgcatcatttggaaatccactggttctcgattatcaactcctgtgtgacggtgttgctcttgaccgggttcctcgccaccattttgatgagggtgctcaagaatgattttgtcaagtatgcacatgatgaggagtctgcagaggatcaggaagagactgngtggaaatatatncatggggatgtgtttaggttcccca

SEQ ID NO: 20095 - DNA, 265 bp, Glycine max
gtgttctacattacacaatatcccttcgatcaccgtatttacagatctattactgccactgggggtctgtggctttggtgaatttgataatcatctatatatccaacaggccatcgtgactctgaccggaatgctgctgacagatgaacatgcgtatgatggaccctcgcttctcctgcttgagagagtacagccgagtgacatagctaagttctacagaggtttatgcaagaaactgactgaatcaaccactgatgatgaatct

SEQ ID NO: 20096 - DNA, 391 bp, Glycine max
  modified_base (14)..(14): a, c, g, t, unknown, or other
  modified_base (84)..(84): a, c, g, t, unknown, or other
tcctgtcctttttnagttaacaccatctctctctctcttgtgccctttgtaggatttttgaaatgggtctccccaaccaccaanaaaaggataacaataacaatgataaggttgtggatgacggatatgttggaggaggaaagtctttcggttcagtgtcgtgttccatttgcctcgaggttgttgccgataatggggatagatccttgtctaagcttcaatgcggtcatcaatttcacctccattgcattggttcaccattcaacataaaaggagcaatgcattgccctaattgtcggaagattgaaaaaggtcaatggctatatgctaatggttggcgctcatatccttaatttaacatggatgagtggactcacgattaggatcttta

SEQ ID NO: 20097 - DNA, 423 bp, Glycine max
ctcctctcttgtctgtgcaatcaaaacaacaacattcattcatactgatcacttgcttgcctattgcacattcttcatcacttcattcaacatttctctctcccttagctagtttttaccaatggctgctgcggttagtgctgcagtctcttttccatccaccaagtctacctctctcccaagcaggacctccatcattaccccagagagagttgtattcaagaaggcttcattgcaatacagagatgtttgtagcagtggaagggtagtttccatcagagctcaagtcaccactgaggctccagccaaggttgaaaaagagtccaagaaacaggatgaaggtgtggttgtgaacaagttcaaacccaagaccccttacgttggtagatgcctgctcaacacaaagatcacttgggatgatgc

SEQ ID NO: 20098 - DNA, 370 bp, Glycine max
  modified_base (8)..(8): a, c, g, t, unknown, or other
  modified_base (17)..(17): a, c, g, t, unknown, or other
  modified_base (36)..(36): a, c, g, t, unknown, or other
  modified_base (53)..(53): a, c, g, t, unknown, or other
gcgtacgnccacgcgtncggccttcacaagattggntttgtattccaccggantaaaagaagggagggggggtcatgttctgatgatgaggagattctgtctccacatgataacattaggtcagagaatgctaaggggatgattgctgtgaagtttgtcatggacgagaacatttccggctttcaaactggtaaggttcatgcagaagggggatcaacagaagggagtggtcctgagagccctgccagtgccaagggaaatgtgaaggatatggcgaagaatatttttaaacatgcagaaaaatccgctcgtggcttgaagcacgttctttcttgtaaatcaaggaaattgaaatttaaaggtgagtctc

SEQ ID NO: 20099 - DNA, 386 bp, Glycine max
gattacgtttgcattgagttgcgctgttccttcctcctgttgttcgtatttatttcatttacgccgccgtcgtctccgccgcagagagcgatgtcttccgtcgaaacggagatggagccactcacgtcgggggccagcaaccgcataattccgctcctcaaggccctcagagcctccctcatcttcgtctacaccttcttcctctccttcctcctcttcgtcctcccccgccgccgccgcctctcccccgcggcggggccgccctctccgaagaagcatttgaggcggcgctggctcgtgcgcgaggaggaggacacgtgccgcagaagggcgctggcgcaggacgtgggaatgggtcgcgacgaaaggtggtaccgctggagcac

SEQ ID NO: 20100 - DNA, 242 bp, Glycine max
  modified_base (96)..(96): a, c, g, t, unknown, or other
  modified_base (212)..(212): a, c, g, t, unknown, or other
  modified_base (219)..(219): a, c, g, t, unknown, or other
acgcattgatgatggtttacgtgtggagcaaacttaatcctttcattcacatgagcttcctgggtctctttactttcactgctgcctaccttccanttgggtctcttggggttctctgtactcgttggtgctagtgcttgggtggatctactgggaatgattgctggccattcatattattttcttgaagaatgttaatcctcggatgacangtcgtangccacttaaaacaccctcattca

SEQ ID NO: 20101 - DNA, 419 bp, Glycine max
tccagtccaagtcttgggtcagtagagcacataagtgccactgaaaaactaaagaaagaagaagagaagaaaaggcgtcaactagaagcagagttgaaattaatagaagaagagactgcaaagagagttgaagaagcaatccgtaagagagttgaagaaagcttgaaatctgaggaggttcaggtggagattgaaaggcggttggaagagggacggaagagacttaatgatgaagttgcagctcaacttgaaaaagaaaaggaagctgctattattgaggctaaacagaaggaggagcaagcccgtaaagagaaagaagatcttgaaaggatgcttgaggagaaccggaggaaggttgaagacgctcagagaagggaagctttagagcagcaaagagggaggaagaaagattaaagagc

SEQ ID NO: 20102 - DNA, 441 bp, Glycine max
gcaattttcccagaaaattcatccaacattctctaggcagccaaagacttcccaccgggaacagatccgctctcctcgctgcctccgtcgccgacgcgtcggccaccgctgcttacctttcctcctccgcaaaactctctctccaggacggtggggctcagagagaccacggcggatcctcgccggcggcgagttcggcgtcaacggagaagttcgcgccgcggttcgacgggttgcggttcattgaaacgctgattactgcgcacagatgaacgcgcggtgttcaaacgcgcttttggggttttttttttaccctaatcttttttgatcttgcactgtctaaaaaattgaggaaaattaataacgtgggagatgtttaattgtttttctaatgatgatttgccatttgggcttttgggttgaggaatggacagaaaattg

SEQ ID NO: 20103 - DNA, 402 bp, Glycine max
cttagccgaggtcacgaggagcactagctagtttcacaatttccaaatggctaggggattgaggaagcatctcaagaggctcaatgctcctaagcattggatgcttgacaaactgggtggtgcatttgcgcccaaaccctcatctggaccacacaaatctagggagtgccttcccctcatactcatcctacgaaaccggctaaagtatgctctgacttaccgtgaagtcatcgctattctgatgcagagacatgttcttgttgatggaaaagtcaggactgacaagacttaccctgctggtttcatggatgttgtttcaatcccaaaaaccaatgagaacttccgcctgctctatgacactaaaggccgattccgtctccattctgtcagggatgatgaagc

SEQ ID NO: 20104 - DNA, 402 bp, Glycine max
  modified_base (344)..(344): a, c, g, t, unknown, or other
gtatttgctctgctaatttgtatttctttttggtgaattgctgctaactttcattcttgtgttctttgtggtttttagtttcaggatgctggaaattcatgctcacactgagtcctgcagggctgctcgattcatcaacggtggacgtgcgatcttgacaggttctccggattgcttaatactggctacagatgtggaaactggatctacaattgctcgtcttgatgatgctcatgagtgatcaaatttcctgcaattacacctttgtcatgatttgggttacagtagattcacaagtatcttcattgctttagaatttgtttgtggtttttgttgtgatgcanggctgcgataaatagattgataaacttgactgagtcaactgttgccttcggagatgat

SEQ ID NO: 20105 - DNA, 383 bp, Glycine max
ctttattgcatactcctttcttcatgagaaatgatataatgtcaaagtgtgctggactagcgcaatttgatgaagaactttataaggtaactggtgaaggagatgacaaatatctgattgcaacagctgagcagccactctgtgcatatcatttagatgattggatccaccctacccagctaccattaagatatgctggatattcatcatgctttcgtaaagaagctggatctcatggtcgagacactctaggaatattccgagtccaccaatttgagaaagtggagcagttttgcctcactagcccaaatgacaatgattcatgggacatgcatgaggaaatgcctaaaaacttttaagatttttacaagcgtttaaccttt

SEQ ID NO: 20106 - DNA, 353 bp, Glycine max
  modified_base (11)..(11): a, c, g, t, unknown, or other
gcgcgtacggnggagatgatggttacttcaatatccgaatagggacaaacgaatgtgggattggagaggagttaactgctggtttgccttccaccaaaaacctcgtcagagaggtgactgatatggatgctgacgctgctgtttcattctgaatgcaaatatattattaccttaccaattatattctgtatgggtattgtaattgaaaaatcagaactagatgttgcctgtagtctgaacctctctgttttaaggggaacaatctaaattatgattacgatgttcaaagatgttaagcttttgttgtttatctgttatacgaaataagagattaactgctatagttactattc

SEQ ID NO: 20107 - DNA, 406 bp, Glycine max
actagtatggagtgtttagccatttgaacaaaaataccgtaatgaagaggtgcggagaaacattcacacaccaaacaaaaactgttattaaaaaaaccatttggtggtgtggccaccatttaaatcatggaggaagaaagagctccatcggcagcagtatcctgcgagaggccaaattaagaacgattggattcaagcttatgagaatcagagtagaagaccaaactctttatatgtaaaggttaacatggaaggggtagccataagaaagaaaatcaatctgatgcttttcaattcttatcagacacttacaagcagattgatcagcatgtttgctaaataccaaaaatttgaggaagttggaaaaagttacacactcaactttcaaaacgaacaagggattggc

SEQ ID NO: 20108 - DNA, 438 bp, Glycine max
gattttgtgagcccaggtggcttgattcaattaaaccatggtaggcctcagcctctccaatatgtggtcagtgcggcctttttggctgccctatatagtgattatcttgatgctgctgatacacctggatggtattgtggacctaatttcttttcaaccgacgtgctccgtagctttgccaagtcccagattgattacatccttggaaataacccaaggaaaatgagttatgtcgtaggttttggtaatcattacccaaaacacgtccaccatagaggagcatctgtaccgaagaacaagatcaagtatagctgtaaaagtggatggaaatggagggacacttctaagccaaacccaaatacaattgttggtgccatggtttgccgtcctgacaagcatgaatgctttcatgatgttcgtacaaactacaattacaca

SEQ ID NO: 20109 - DNA, 425 bp, Glycine max
aaacaacactgcaggcacctttagatttttattttcttcactgttcacacacgatttcctcgtttccttgcacattatcctttacctttttttaaacaagccagcccagcttgcttctgttccttctcttctaaccagtatcacctacacggtgtgtgtgtcccttcatcctggaaattagagccacaaacataacacattccgctttgactttggaggcaggtttttgtgctttgtctggttcccaatcaccgtgatatcatggaatccccacaatctgttgtgtcaccattcaagaggtctgtcttgggtgatgcagagaagtataggtctgatgttctgtctaaggacattgaagtcaatggaaaggaacgtgccgtgtgtaatgtggaagaattcattggtgttgttgatgtttacattca

SEQ ID NO: 20110 - DNA, 340 bp, Glycine max
agcgaccgaagtatcacatcaaccttatcctgattagggttccggttacttaccctacctgtgacgttgcgaaaccttaaatttggcattaggtctgagcaatctggttggcagaacctttggtcttacagagtcaagtattatgtctggattaaacgatcaaattcatactgccttcgatactttcgctgatgcatatgctgatgactctgctgctgactcaaaggattatgtacatattcacgttcatcagcgaaatgagtagaaaagcctgacgaccggtcagggattgaaacaagaattgagctatgacaagatacttaacgacgttctgaaagac

SEQ ID NO: 20111 - DNA, 446 bp, Glycine max
  modified_base (9)..(9): a, c, g, t, unknown, or other
ccacgcgtncgtagggttcacaacttttccttttccttttgcttgcgaatctgaatcaaagagtcaatgatccattcattattcatcatgtcgtcggcgaataaaatcacgctgaagagttcggacggcgaggctttcgaggtggaggaggcggtggcgctggagtcgcagacgataaagcacatgatcgaggacgactgcgccgacagcggcatccctctgccgaacgtgacgagcaagatcctggcgaacgttatcgagtactgcaagaagcacgtcgaggccgcgaatcccgaagacaaaccctccgaggacgatctcaaggcctgggacgctgaattcgtcaaggtcgaccaggccacgctcttcgatctcatccttgctgctaactacttgaacatcaagagcctgcttgaccttacatgtcaaacttgtaccgacatgat

SEQ ID NO: 20112 - DNA, 438 bp, Glycine max
ggtcgggacgcgtgcgcttgtgttctcttgttcattcatctcacttctaattaaggaacaagctttccaccgatttgtgtcaccaatggctcgctctttctccaacctcaaggttctctctgctcttgtcgccgacggattctccaacactctcaccaggcgtgggtacgcagtagcgacacaaagcgcaacaagaggaggagcagcctccatcagcggcaagtcaggggaagacaaggtactaggaggaggtgctgaaaaggtttcgtgggtcccagaccctgtcactggttactacaaaccggagaacatcaaaaaaattgatgttgctgagctgagagccactgttttgggcaaaaaattcaaccactaggctctacttaatttcaataattaacctttttggtctcacgtgaatatgttatatgatatatgaag

SEQ ID NO: 20113 - DNA, 451 bp, Glycine max
gcgaatccaaaatccaattacgaagaatgggacatgacactataacacaacaagaacagcattttgccctaatcccactcgcgggactcggaattaacaactagagtgcccaaaagtcaacaatttcgattcttgccccgttcatcatcattacttcttcttcattcattcccccaaccttttctcgtctctctatcagaggggatctatgaccaactgatgatggatggtggctgggtattcacctgaatttgttcattcgtgataccctttgattgagtatccgagcaggttaggaagaatttagttggggaattataattttgctgtgagtggaataagaatcttgattagggtctgtttgttttcttggaagtcttgattttttttcacttgaattgtggctttaatacattacattttgtgaaagttgcttcttgatattgggttt

SEQ ID NO: 20114 - DNA, 444 bp, Glycine max
gtcgctatgccatggagattagttctgctgcctacaagaacttttggcgctttgacatggagagcctccctgcagatctcatccgcaggggaatggccgtacctgacccaacacagccacatggtctaaagctcatattggaagactacccttatgcagctgatggaatactaatctggtctgcaatagaagactgggttcgaacctatgtgaaccattactaccctcactcaagccttatatgcaatgacaaagagttacaatcttggtactctgagtcaatcaatgtaggccatgctgatctcaggcatgaaagttggtggccaacattgaacaatagtgaggatcttgtgtccattctttccacattgatttggaatgcatctgcacaacatgctgctctcaactttggccagtacccttatggtggctatgtgcctaatc

SEQ ID NO: 20115 - DNA, 279 bp, Glycine max
ttgatcctggagaagggcttgatagccctctctctctctgctgctgcaattcagacgatttgtcttcacatggaagcattgcttgcttgaaggacgcctttgtctcaaaagagttggaattttcgggttttttgtgggattggagatttagagagtgcccttgcactccctgttttatttcatcaccatgattgcccactgaactatagtaccaagtacccaaatgaagatcaagttctcaaccaaaagatagagattgattctgggccaaaatgtgag

SEQ ID NO: 20116 - DNA, 454 bp, Glycine max
  modified_base (27)..(27): a, c, g, t, unknown, or other
  modified_base (29)..(29): a, c, g, t, unknown, or other
  modified_base (37)..(37): a, c, g, t, unknown, or other
ggccgaccgggcgtacggtgggcatgnanaaacctgnattggacttctggcagcactacatcttcagcatattaatgcgcttagttcttcacagaagttaactgcgtgaagaagggccacaactgcgtgaagggtttatcttcaatggcatcaatccattgtcggcattctagtatatgtgaatatgagagctacaatttcgtagaaattgtgtcggtgtctaaatcgttgattgttttgcaaaattttgagaatgctagtttgttctgtagtacaaccgtccaagtatgaatgaatcaatacgtattgtatggtcctaaatccctataggtattgtctttttttgttcaatggccccaatatagtctcttttctagttagtttttcctggtctcagaatcatgttattagaaccatgtgattttgtaatagaataaaaagttaccaaaaattt

SEQ ID NO: 20117 - DNA, 404 bp, Glycine max
  modified_base (88)..(88): a, c, g, t, unknown, or other
tcgacccgcgtacgggcatcttcttctggtagtttatacacctctgcaagtgcaaactccttcaccagcttcacctgtctccacacanccctttcatgaccacttctttctctgaccttcttgcttctcccacagacaacaacaaaccaccacatggtggtggtggtggtttgtctgagagaactggctctggtgtccccaaattcaagtccacaccaccaccttctctgcctctctctccccctcccatttctccttcttcctacttttctattcctcctggtttgagccctgctgagcttcttgactcacctgttctccttaactcttccaacattctgccatctccaacaactggagcatttgttgctcggagcttcaattggaagagcagttccgggggg

SEQ ID NO: 20118 - DNA, 423 bp, Glycine max
  modified_base (55)..(55): a, c, g, t, unknown, or other
gtagggctttacagtgtttctcttccttcttcttcttcttcttcttcttcttcgntgaatcgcgattgttctgtgcgagagaaagaagagagagatcgaaaatggcgttggctttcgacgagttcggaaggccgttcataatcctgaaggagcaggagcagaagagcagactccgaggattggacgctcagaaagccaacatctccgccggcaaagccgtggctcgcatcctccgaacctccctcggccccaaaggcatggacaagatgctccagagccccgacggcgacgtcaccatcacgaacgatggagccacgatccttgaccagatggacgtggacaaccaaatcgcgaagctgatggtggagctctcgcggagccaggactacgaaatcggcgacggaaccaccggcgtcgtcgtca

SEQ ID NO: 20119 - DNA, 207 bp, Glycine max
  modified_base (58)..(58): a, c, g, t, unknown, or other
  modified_base (124)..(124): a, c, g, t, unknown, or other
cggtagaaatttacagaatttctcttccttcttcttctttttcttctacatcttccanaaatgccgatttgtctattctaaagaaacaacacacatatctaaaatttctttttctttctactanttcttaatgcctttcataatccttaatgatcattatcataatatcatactcctactattttactctcataaaaccaacatctt

SEQ ID NO: 20120 - DNA, 220 bp, Glycine max
  modified_base (14)..(14): a, c, g, t, unknown, or other
tcttgatgatgcanatgatgatgctgaggatgaacaagaaaatgaaaatgacttagaagtgacagaagaagctgagcctgttctccggaagcctcctgaaccaccagtggttacaaaaagaagctgaaaggcaactttctaagaaagaattaaagaaaaaggggcttgaagaacttgaagcttgtttggctgagctaggatacacaccgaaggaacccac

SEQ ID NO: 20121 - DNA, 349 bp, Glycine max
aacccttccatcgtagtttccacatttctcctaccgaatagtcaaaactacccactcacccaggtaggcacaggcagcgatggacgtaggagccggcaacaatcattccccggaagccgtcatatcgcggtggaaattcgcggtgtcgcagcagtaccagcacatgctggacaaaacgacgccgcacgttctccggcggtggatcgggtgcctggtggttgccgccgtgtacgtgctccgcgtgtacttggtccaaggcttctacatcgtctcctacgccctcggcatttacatcctcaacctcctcatcggcttcctctcccctcaggtcgatcccgagattagcgac

SEQ ID NO: 20122 - DNA, 465 bp, Glycine max
ttcaccattgtcaccgggtgctattgtggggcacgtgaatttgtggctgcaactagaaaaacgggacctgatgacatattgaattctgcagtagctggatttggaactggtgctcttctagggcgtctccaaggtggtcaacttggtgcaatccggtactctgtcatgtttgctgttgtggggacaacagcagattttgctatactgaaactgaaagatgctttgagagatcacactaaaacaatataccaacacattgagaattcaaagaagagtggaacttggttaaaattgccggaatggttcccaatccaagtactcgacgaggaagctcttgctgcaaaacgtgctcaagaagagcagttccttcagcagagggcaaggattcgcagcctaagggaagaagaatcttgagaacttcaattttttggtgatgtatgcgctcatcttggagtaagtgaggag

SEQ ID NO: 20123 - DNA, 423 bp, Glycine max
cccacgcgtccgtattgcgaatgtgttatcctccatgaacctaatcgagaagacgcatacaggaaacacaagaaaaccagcattcaggtggttgggtgtgaggggaaaaacatggggtggatcagttgacttggctcaaaattcaaatgtcaaagagtcacggaaaaggatgtttggaactgacattggaaacataagttttaaaaggaacaaagttgatttgtccatggatggccagaattctaaaatgcaaaatcaacacgaaaatattagtccacgagctcagttagagaaaatcatcataaaaaaaagatgctaagcagacttcagagagctatcagtttggcccttttgctccagcttatgtgcccaaagttggaacctctgaaaataatagtgtgaaaaaggtgcatgactgggaca

SEQ ID NO: 20124 - DNA, 434 bp, Glycine max
ggaaggccggtcgaccacgcgtccgtataaataaaccttgtccaaacacgttgattctctccttaaacctcacaattcgtcctggcggtagcaaactcctttctttatttcctcaagatataaagataacctaaaatagcattatatttgctgaatgcaaaattaaaaattccttggaattgcaaccaatatgattgtaattacatctgacttgcattacatcaaattggatcaaacagtattagcatacattgacaatggagaaactcttaatctctagcatgtaaagcatttatggttgacttatgttcctcgatagcattttgtgaatgtcatcattgatgattatgcaagtgggcgttgggagttttaatatattttatgttacgtggtgagatgccatttggatcatggagagaaaatgaacttgatac

SEQ ID NO: 20125 - DNA, 416 bp, Glycine max
  modified_base (17)..(17): a, c, g, t, unknown, or other
  modified_base (34)..(34): a, c, g, t, unknown, or other
  modified_base (71)..(71): a, c, g, t, unknown, or other
  modified_base (90)..(90): a, c, g, t, unknown, or other
ccgaatcccggtcgacnacgcgtcgccacgcgtncgcttgttgttgttgttgttggaagccaaaaccctancagccggcgagaatggcanacgttgaggttgatgtggcggcggcggcggcggcggcggctgcagggcagccaaagaagagaacgttcaagaagttcagcttcaggggggtggatctggacgcgcttctggacatgtccactgacgaactcgtgaagatgttcagtgctcgcgcacgcagaaggttccagagaggtctcaccagaaagcccatggccttgattaaaaagctccgcaaagcgaaaagggaagcaccagcaggtgagaagccagaaccagttcgcacccatctccgcaacatgattattgtgcctgagatgattggtagcatcattggagtctacaat

SEQ ID NO: 20126 - DNA, 420 bp, Glycine max
ctcacactgaacactcttgtagttaatcgaatttctcattccgcagaaaccttggacgatggccgctgaaacgattccctaccagaacggcgtcgttgccagctccaacgattccaccgccacgggcaagaaatcgcgggagaacgaccgccgccgccgccgccggaagcagaagaagaacaacaaggcatctgaggccccggttcctaactcttccgaagagagtgacgatgcgaaagagaacaacgattcaaaacagcttgttgaacaaattgaaattgagtacgtaccggagaaggcagagttagttgaaggcatggatgaagagtttagaaaaatctttgagaaatttactttcactgatgccactgctttggaggatactgataagaaagatggttcagaagaaaatgcagcaac

SEQ ID NO: 20127 - DNA, 268 bp, Glycine max
ccgggtcgaccgcgcgtacgcttgatcatattacaggaggcatgtcgaagatccttttggtctgtaaatggaccgtagatagttcatatcggttacgaagacgaggaaaatccaaaagtgatggaagcatatgaacaactgggatccttgttggttcacagtagcagtgccaaagaaccaattaatgattccaacaaagaattattttggattaacaatcaatgacccttccattttttttcattaaaacctttgtattcttaataag

SEQ ID NO: 20128 - DNA, 403 bp, Glycine max
  modified_base (17)..(17): a, c, g, t, unknown, or other
ggtcctctctgagattntgctccaaaaccttccccttcatctgatttgcagagactaacccaagaaaggaccaaccaaaaccaagtgctttcttggagcttggtagagagagaaagtcccactttctctctcttctcttttttctttctgtgtgtgttgtgtgcgtgcgtgcgtctgagggtacatgcaaaacagtgagtttgagatagagaaagaaggagttcaagattgttgttcaattttgcaaaaactgcccatcaagtacttttgttgttttttttttcgattttgcttcttatccaacccgttcttgatttggaaggtgattccgggaaggaattgttagggtgctgctgaggctgttcatcacctatctttgtggtgttgatttgccacttctgat

SEQ ID NO: 20129 - DNA, 410 bp, Glycine max
  modified_base (31)..(31): a, c, g, t, unknown, or other
  modified_base (52)..(52): a, c, g, t, unknown, or other
cccggtcgaccacgcgtgggccaggcaagcnccactaaccaccacacctctnctcgttcacgctacccctttctgctcttcttctacgtttcaagttttaaaagtataaagatggcagagacattcctatttacctcagagtcggtgaacgagggacaccctgacaagctctgcgaccaaatctccgatgctgtcctcgacgcttgcctcgagcaggacccagacagcaaagttgcctgcgaaacatgcaccaaaaccaacttggtcatggtcttcggagaaatcacgaccaaggccaacgttgactacgagaagatagtgcgtgacacctgcaggaacatcggcttcgtctcaaatgatgtgggactgggatgccgacacttgcaggtcctcgtcaacattgagcagca

SEQ ID NO: 20130 - DNA, 414 bp, Glycine max
ttcaacgatggctacgaattcgattacctcatcctccttccgattagtaacaacgagaatcgctctctggctcttccgaaaaaccccacctctcctttcattccccacaaaaccctttttctcaaaacccatcaccttccagagacttcaaccaacaccaccaccacaatcatcatcatcatcaacatcagcatcccttcaacccatcgaagacctacctccgaagctccaagaaatcgtgcacctcttccaatccgtccccgaacccaaagccaaatacgaacagctcctcttctacggcaagaacctcaaacccctcgaaccccaattcaaaaccaacgacaacaaggtccaaggctgcgtctcccaggtctgggtccgagcctacctcgacccgaaccgcaacgtcgtcta

SEQ ID NO: 20131 - DNA, 453 bp, Glycine max
atcgatgctcgaatcctggatgccctgtcaaaaagcatgtggaaagggcctctcatgattcgaaagttgtgataactacctatgagggacagcatgatcatgaaatcccccctggaaggaccgtcactcagaatgcagctacaaatgctcgcacaacggccagtaatggcaaggctggaaccaaatctgagggtaatattactgatgatacaggggaacgaagcggcttgggctcagcaagcagattaacagagcaactaaatggcgagtcaattactaagtcaaaggctggtgatatggttgagttttgtgtgatcagcctttctaatgagggtcctgaaattaaattaagtgagcaacaacaacaaaaagataattcagctactaaagacgattctgtcagcaatgatgttataagccattcaagttctgggagtctgtgtagatcaaatg

SEQ ID NO: 20132 - DNA, 483 bp, Glycine max
ccgaatcccgggcgacacgcgtgcatgaattcacgagttttctatggaaacgattccatttatgtgctgcttagacttcatcagagattgtgtgagaggatacaatcagcaaagattaactcatcatctgctgataggaaatggaaggcttcaagtgatacaagctccaccgatcaatatgacaggttcatgaatgccctttacagtttgctggatggttcttctgataatacaaaatttgaggatgattgtcgagctataattggaattcaatcatatgtcttattcacattagacaagttgatatataaacttgttaaacagcttcaagctgttgccgctgatgagatggataccaagcttttacaactatatgcatatgagaaatcgagaaaacccggaaaatttgttgacatggtttatcatgaaaatgcccgtgttcttctccatgatgagaacatatatcgtattgaatattcacct

SEQ ID NO: 20133 - DNA, 393 bp, Glycine max
ttcttagctccagagtgcatgtgcgaaagcacaaccataaactattctcaagcttaactctccgatccttcatgagtctattgctaaagagatcaatgaaaatcctgaggcacgatgggaggctgctataaatcctcatttctccaattatacagttgaacaatttaagcgccttcttggagtcaaaccaacgcctaagaaggaactgagaagtacacctgctatatctcacccaaagtcattgaaattgccaaagaattttgatgcaaggacagcttggtctcaatgtagcactattggaagaattctagatcaaggtcactgtggttcttgttgggcatttggtgctgttgaatcattgtcagatcgcttttgcattcattttgatgtaaa

SEQ ID NO: 20134 - DNA, 392 bp, Glycine max
  modified_base (12)..(12): a, c, g, t, unknown, or other
  modified_base (39)..(39): a, c, g, t, unknown, or other
cccacgcgttcnaaaacaaagattaaaaaaatcccttanccaacacaaccatcagggccacctgtgctattcagcaatcagcattcactggtcaaactgctctgaagcagctcaatgagttcgtccgcaagaccggtggcgccggcaaaggtcgcactaacatgcgccgcaccgtcaagagtgctcctcagagcatttggtatggccctgaccgtcccaagtacttgggtccattctcggagcagattccatcatacctgaccggagaattccctggtgactacggatgggacactgctggattatcagctgacccggaaaccttcgccaggaaccgggagctggaggtgattcacagcaaatgggcaatgcttggtgcccttggctgcacc

SEQ ID NO: 20135 - DNA, 459 bp, Glycine max
  modified_base (92)..(92): a, c, g, t, unknown, or other
atcaggttgttaaaatgatggagactgatgaatcggttccttcaatacctgaaaggccaatcgctcttgttgctggaaggcttgatattganagatctgtgagtagtagtggctctggtcagctctctagtccaacgggttatcgatcatatactatagaaagtgatcgccaatcttctaattctagggatgaaagaagctcaagctctaggattttgagtacagattgagattgagtgtcaggaaagtaatttgtttgtacatttagtttatagaatgctgtttttttcttgtagtgttttccgttactaaatccaaattggatgtacaaattttgattcttgctagagtttatatgatggcaagcaagagagtatgatcaagttttgctgaattaagtgtcacagtactgttgtatcagaagcaattcttcaattcattttaagaatcttcttttgc

SEQ ID NO: 20136 - DNA, 181 bp, Glycine max
  modified_base (73)..(73): a, c, g, t, unknown, or other
ctgcggcaatagagagtagagagtaaacataaaatctgatgcgcgagtggctggtgaaggcagctactgcganggaaaggaaacatttttaacctccaaatccattgccggttccttaagcccatccaaaaaacttggccaggttctttttccgccttgccaatttcgtcggtcttaggtt

SEQ ID NO: 20137 - DNA, 443 bp, Glycine max
gtgtatatggttgccgctgatactgcgtagtcttattctctctccatcaccactgtaaaccgtaattaaaaaaatcttaaaatatcttccttctttctttcttcttctttgctcacactgatacagttactccatcgaattctctctcccctctcttcaaaacgcgctgattctgggaactccccgatttttggtttcgagtttttcgcttcttgcggagaaaaatcgcgtctttctcatcgaactcgtcttccacactgaaattctacttcgcttttgctcttttactacagtttatacagatatacatcaaaactaagtttcatcagctttcaccctcatggctggattgttgcttggtgatgcctctcatcatggaacttctcaaggtgtttctcagagatactctgaagagaagctggaagatggttcgaggtggtact

SEQ ID NO: 20138 - DNA, 435 bp, Glycine max
  modified_base (11)..(11): a, c, g, t, unknown, or other
  modified_base (339)..(339): a, c, g, t, unknown, or other
ggccacgcgtncgaacaacctgaactgcttcaaaaagctgtcagaaagaaacttcaccttgaggattatgtgtgagcagtttcagaacttacttaaaatgggtcccatcagccaggtcttttctatgctaccaggatttagtgctgaattaatgccaaaaggccgtgagaaggaaagccaggcaaaaattaaacgttacatgacaatgatggactcgatgacaaatgaagagttggatagttcaaacccaaagctcatgaatgagtcccgaatgatgcgaatagctcgaggttctggtcgtccagttagggaagtaatggaaatgttagaagagtacanacgtcttgcaaagatatggagcaaaatgaaaggggctaaaatacctaagaaggtgaaatgagcgccttatcccgaaatatgaatgctcaacacatg

SEQ ID NO: 20139 - DNA, 284 bp, Glycine max
  modified_base (73)..(73): a, c, g, t, unknown, or other
  modified_base (144)..(144): a, c, g, t, unknown, or other
  modified_base (163)..(163): a, c, g, t, unknown, or other
  modified_base (183)..(183): a, c, g, t, unknown, or other
gtttttgtacggagggaaagagtataataaagacttttttaattaattacatgattgtgtgtacacatttcanggataactgcaaatgttctttatgcttttcaaaggatgaatattgtgattatttatttggttatgtgattnttattcccaacattgattntgttttaaatattttagaangcttaatgtcactttcgatccattatgtttcgcagttgtttctcactggtacattaagttaaaaagtgtcattctggtccttcaaatttttacaatgctgc

SEQ ID NO: 20140 - DNA, 351 bp, Glycine max
  modified_base (4)..(4): a, c, g, t, unknown, or other
  modified_base (16)..(16): a, c, g, t, unknown, or other
  modified_base (30)..(30): a, c, g, t, unknown, or other
attnttctttcatcancctttggaagattntggagaaagcatttacaatttccatgtgggttggattgaatcaacatgagcaacagaaaagataatactgatgatgagtctagtgaaagaggtatattttcacatctaggctatccaagtgcaccaccctaccctcctccacatggatacccaccatcaggctatccacctccaggagggtatcccccaacagcctatccaccaccagcatatccgcctcccggagtatatccgcattccggttactatccttccgaatatccacctgcatatccgcctccgggagggtatccacccactacttatcctcattcaggatat

SEQ ID NO: 20141 - DNA, 368 bp, Glycine max
  modified_base (11)..(11): a, c, g, t, unknown, or other
  modified_base (353)..(353): a, c, g, t, unknown, or other
  modified_base (366)..(366): a, c, g, t, unknown, or other
cccggtcgacnacgcgtcgtgattgaggatcccgccacaacccatgcatcaccaccaccctgagactcatgagagagtcaaggtggtggagtatgaacaagttcctgagaggcgcgttgtctatgaagagaaagttgcttatgacaacgatcgttactactctccaaggtattgaaattggacaaatggaagaacacctataacgtgttatcatgtggctttttattaagcaggctacctagtataccaaaagcaccactgtgcttgtactaaataaattcctgcttatatatactggccattatgttatatataaaaatcatatgcatgccgtttatataaataaagctatngttgaataataanaa

SEQ ID NO: 20142 - DNA, 409 bp, Glycine max
  modified_base (9)..(9): a, c, g, t, unknown, or other
  modified_base (12)..(12): a, c, g, t, unknown, or other
  modified_base (68)..(68): a, c, g, t, unknown, or other
ccacgcgtncgnatgcatctatggccgacaaagaatctccgagattccttcaagcattcatacctcanagggctcgaatggaactaccagagaatgaaagcggaaaaggaccaacaatcttcaacggaacagaaacttctggagaacgaaaaccaggatcagagcaacaacggtgacgcacccaacctccttaattgcgaagctggctcggtctcttccctgttccaggaactgggtgtggttctctcttgctgctactgctgcttttgctgtggtgcttgtgttgatgagaaataaggagctacatggcagtgcttctattctatcctcgatgctcttggtgaaaaattgtgcatagtacagtgatcaaagtttgtacatctgggtattgattttcttatcattattt

SEQ ID NO: 20143 - DNA, 362 bp, Glycine max
  modified_base (11)..(11): a, c, g, t, unknown, or other
gcccacgcgtncgtatgcctgtcaccgatggatcatctcatatccttggaagaagctcattagctgtacatgcagctcctaaagcggaagggcaatactctgagcaacaatcttctcagcttccacctgatgtggagtctgttttgctgcaacaagtattgaatctgacaccagagcaattaagttccttgccaccagatcagcaacaacaggtccttcagctccagcaggctcttcggcgagatcagatacagccctcataacagggaactcatcaacaattcaaaaatagcatcaacttatttgtatactagcatttgctgtagattagcttcagaatatcaaaattctttcaaccacta

SEQ ID NO: 20144 - DNA, 330 bp, Glycine max
  modified_base (70)..(70): a, c, g, t, unknown, or other
  modified_base (214)..(214): a, c, g, t, unknown, or other
gcgtcggaaacaccaaatacacaagggattagtacgtataattttaaaatatccaaagaacatgtatatntgtgtataatagaaaaggaatactaattggggctctccgttggtagaaaaaataaggcagtactccccagaattccgatccagagtatacttccatccaccgattaaataaataactatcagaaacgaaataatcctttaattnttggaagtccccttttattttacttacacaaaaaagactaggataagaacgaagaaaaaagtgatcccccttttctggttgtcttatatccatatttatggagatagaattcatgt

SEQ ID NO: 20145 - DNA, 451 bp, Glycine max
  modified_base (20)..(20): a, c, g, t, unknown, or other
cgtgcgtctaagcactctanctgttgcatatttctactatttttcaatggcttctgcagatgttgagggccgttgccttgttggtgggcttgcttgggtcaccggcaacgatgccctcgagaaagccttttcaatctacggcgacatcgttgaatcgaaggttatcaacgaccgtgagactggaaggtccagaggattcggatttgtgaccttcgcctcagagcagtcaatgaaagatgcgatcgcaggaatgaacggccaggaccttgacggtcgtaacatcactgtcaacgaagctcagacccgcgccagccgtggtggtggtggaggcggtggtttctgaagtggtggtggatacaaccgcggtagcggtggatatggtggtggtggtggcggcggcggataccgtggtcgtcgtgaaagtggatacaaccgtaatggttggggtgga

SEQ ID NO: 20146 - DNA, 464 bp, Glycine max
ttctcataattataagagaacacttgcttccaaagatgttcaagcctaaccatcgtcaagaagtagatgcttctggttatgaggaaattattggtgctccacatggttcactgagggataaggagccagatactgatactgatggaagctcggaagacttttacgatgcagagatattggatgagatgacaaccaacaggggagagttgaaacttagaactgtaagcagcttcaatgatagaaaccacagcttcagtgaagacagacacactcaggtttatcctggaaatgctgtctgaatatggtgaaatctcactgcaccaaccattttttaggatgcagaaaggatttgggataatagtatgttcctctgtaaaggagtgctcataattttttgtgtggtccgttaaggttgaagatgatcttctgtggaacaagaaaggattcaatcggtgaaagagatg

SEQ ID NO: 20147 - DNA, 355 bp, Glycine max
  modified_base (33)..(33): a, c, g, t, unknown, or other
ccacgcatattttcacgcttacgtctttcgcancctcccacggaatcttgtaaaaaaatattgaatcctcaaaattcccatccttctaaatccaatgtttgctctttttagcccttctctccctatatattttttcacaagcacctctttcaattctctccgtttcactagctcttattccaaaccaaattaagaagaaactgcaaattattataatatggagaccatgaatgtacaggttatgagatgcttatcacatatggtaattaaaaaaggaccattcactgaagaagaagattttgttctgatcaactatttcaacgtccacggacaaagccactggaactccctcgct

SEQ ID NO: 20148 - DNA, 189 bp, Glycine max
  modified_base (17)..(17): a, c, g, t, unknown, or other
  modified_base (72)..(72): a, c, g, t, unknown, or other
acgcgtcgccacgcgtncgctaattcagccacgtcagcagctctgacaaccagacttgaacgagtatgccanagctgaagattagtaattttcttccaccttcaagattaatattgatccaccaatcacgcgtcctgatgtgacatatatatagggcttcaacttgccctcttcacctatgctaatttg

SEQ ID NO: 20149 - DNA, 183 bp, Glycine max
cccacgcgtccgccataacaaacaatttcacgatttctctttctctccccttctgaaatttggagggtttcgattctcttcctgcatttgcatcccaactttagatgtccagtaccccaataacagaatttctgttcatcattttctgccttcctttaatagctggagtggaaatggccatcc

SEQ ID NO: 20150 - DNA, 412 bp, Glycine max
  modified_base (79)..(79): a, c, g, t, unknown, or other
ccgggtcgccacgcgtacggcaagttccattgatcgacatctacagaatcaacgatctccaagtgggtctgagctctcntgggaacccatccttcccaatcccttctcagatcacaacctccctcgcttacaatttctgcaaatggggcgcagtcattctcgcccttgtcgccaccttcggcagcatcatcaacagagtcactatcttcatcatccgcttccgcgccaaagccccttctctcccatccctaaccctaaacgacgacaatttttacacctcctcctcctctgacgacgacgacgacgacgataacgacgacgacctaacctactcctcttccgagcccgaagacgagccctccgcgtcttccagtttcatccgtttggacgactatttccgactcagaggaac

SEQ ID NO: 20151 - DNA, 218 bp, Glycine max
  modified_base (94)..(94): a, c, g, t, unknown, or other
acggtcgggtgaaggcgaaaaccaaatcaagatgctgagagtgggcgcaaagaggctgttgggagcgacgtctttgggcgttagggttcccccnaggctgtaccacgagagggttgtggatcactacgacaacccccggaacgttggatcgttagacaagaacgacccgagcgtggggacggttttggtgggggcgccggcgtgcggcgacgtgatga

SEQ ID NO: 20152 - DNA, 413 bp, Glycine max
  modified_base (11)..(12): a, c, g, t, unknown, or other
  modified_base (23)..(23): a, c, g, t, unknown, or other
ggccacgcgtnncgccacgcgtncgccaccattagcgtgcaacaaagaacccccacaaagaaaagcaagccgaagaaaaagaacacccctcacccagtgaaggtagtgtacatatccaaccccatgaagatcaagaccagcgcatccgagtttagggctttggtgcaagagctcaccggccaggacgccgagtccccgccagatcccacccgcttccacggcctaattcaccctgattcctcctcttctgtcgatcacatcaaagaggaggaggacaatgttcacagtgtgaattgtgttgttcctcccgcagtcgccgacgaaaatatgagcctcgccggctgctacgaggaggaacaacaacaacagccttcctcgatggagagtataaataatttcgagccgctggacga

SEQ ID NO: 20153 - DNA, 393 bp, Glycine max
  modified_base (40)..(40): a, c, g, t, unknown, or other
attcccgggcgaccacgcgtccaaacagagtcacaagacnaccctcgaccgaacgttttcagggtgatagacacggggttcgggcaatcttaagaagattaccgtgtgccaaatgggaaggacgtggtcgacatcatcctctctcgcacccagcgtcaaacaccaaccgttgtgcacaaatgctttggttggtgcgtgatgggatcagtgacaaagtggggagaagactgaaaataaaccaatagatcacataaagaaaggatgttaagtgtcagggctgcttcaacatgcagaagaagcatcatccaggcaaattgcatttgggttaacatagaatgaggtaaaagaatgacaagatgcatgggaagaaagggataaggattttgagaagca

SEQ ID NO: 20154 - DNA, 234 bp, Glycine max
  modified_base (33)..(33): a, c, g, t, unknown, or other
  modified_base (68)..(68): a, c, g, t, unknown, or other
gtgtttagaagcagagatgcaaggaagggcggncggcggagaatcctaggatttcgagccttatgacnattacttgatttacaatgtcagaaccttcgactccgacgccgacgcttctccacctcaacctaagctcaaatccgccatcacccccgccgccacttcctctctctccgccccgaagaagaccaagggccgcggattccgccaggacactgacgccaaccgcaacac

SEQ ID NO: 20155 - DNA, 378 bp, Glycine max
  modified_base (92)..(92): a, c, g, t, unknown, or other
  modified_base (358)..(358): a, c, g, t, unknown, or other
acgatttgaaggtaatggagtgatagaaatagtgtgatggatggatttcacattcaggtcttttgtggactacaaagaaaagaaatgggtanggattcctggggaatacatacagtataggatgcagtggcctcatttttttttttttccttttctcttttaattttttttaccttgctctgattaattactcgtaaagcataactatttggtgaagatctgtgccatccatcctgcttcatttgatgttttttgttagctaggtcagttttgcacagctagatgtcagttacctggatgttgtgatcacaccgatccaacatttgagtttttgttcaaggaccatgctgacatttanggtccatgtggttcatgtaa

SEQ ID NO: 20156 - DNA, 368 bp, Glycine max
cccacgcgtccgatgatcatgagcgagaagtgtttgaagaagaagaagaagaaggagaagaagagggggaagttggtggagtgagagtggccagtgtagaagaggaaaatgcggcggcgattgcggagattgtgggtgatttttcagggttttctacttcgaatgaagatgattcttctagcactagcactggaccaaggtctaataatatatctcccaatgggagaatcaagcgtgttattaccgcgggtaactggcagaagggtgagcttttggggcgaggttcgtttggttctgtttatgaagggatttctgaagatggattcttttttgcttgtaaagaagtttcactacttgatcaagggaat

SEQ ID NO: 20157 - DNA, 370 bp, Glycine max
aatctgaatctggatctgaatccgatgcatctccttcttctctgcaagatcttctcaatcctgcggactgtgacttggtgttatgaatcaaccatcagacaaatcaaaccatgaggaggcgagcgttaacagaataagaacaggattgctgagttggcttgcaggattgggcccttggatgatcctgttgggaatatgctttttctgttaggataattgtttgcaattctggtattgctagctttctctaaaacctgcaaaaaaaggaacgaataattagcaaatgaagcttataaattgtcaacccatgtcatgaatttgcaagcaaaaatacaaagttcttttccttatcttatccctttctttgaag

SEQ ID NO: 20158 - DNA, 328 bp, Glycine max
  modified_base (86)..(86): a, c, g, t, unknown, or other
  modified_base (88)..(88): a, c, g, t, unknown, or other
  modified_base (297)..(297): a, c, g, t, unknown, or other
aatcaacttcgttacaatgtgtccaaaggcatctccatcgatatcaaaccttgacaaaaggggttcggatggctttgatcagatananaaccactatgatcgattcaaaagaaatcaagtccccctacttgaatggctattattgtgaatagcaacaatgaaaagccatttggtgggggctaataatattaccaacaatgaaaagccaaagccaccacgtcgtaattggggtggtagatcatcggtttcaattaagttgtgtcaactaggtgtaagtatacaactacttaggtttgntctgattttttcccttttagtgctacatact

SEQ ID NO: 20159 - DNA, 417 bp, Glycine max
  modified_base (22)..(22): a, c, g, t, unknown, or other
  modified_base (336)..(336): a, c, g, t, unknown, or other
cgaccacgcgtggccacgcgtncgccacgcgtccggcacgcataggtcctctgttaccctattggatctggcttttcggaggatatggagtgttcctgaagctttgatcactgctgagatgggtaccatgttccctgaaaacagtggttatgtggtttgggtttcgtctgctttgggtccctattgggggtttcaacaaggttggatgaaatggctgagtggggtgatagacaatgcattatacccagttctatttcttgactatctgaagtcaggaatccctgctttaggtggtggattgccaagagttattgcaacatggggtcttactatagntctcacttacttgaactataggggtatgaccattgtgggatgggttgctgtttgtttaggggttttctcactcctcccttt

SEQ ID NO: 20160 - DNA, 354 bp, Glycine max
  modified_base (6)..(6): a, c, g, t, unknown, or other
  modified_base (42)..(42): a, c, g, t, unknown, or other
agggangacaaataccgcttctttatgttcgaagacagtganaaaaacaggaaatgtggatatgttgctcctccaaattatcaccttttcaacaaattatttgatgaaggcagaaccaaggtatggcctccgggttcacttgaagaaaaggtgcatactttagtgaataattgggagatggaaatgttccacaaggaggatttcaaggataacagatcagtggacccagagaaatacactttcagcctaaacggaaagaagcctattagttttgaagagaaaaagaagcttggaagaaggtatatttcactgctgcaaacctctataccaaaaaaactgaagccttacaaccca

SEQ ID NO: 20161 - DNA, 326 bp, Glycine max
  modified_base (2)..(2): a, c, g, t, unknown, or other
  modified_base (308)..(308): a, c, g, t, unknown, or other
gntgaggatcatgaatggtggtggaggtctttcctttgtgttggatcaactggcttgttcatggacggctattgcttgtattactactatgcacgatcagatatgtctggttttatgcaaacttcgttcttctttggttacatggcctgtatctgctatggcttcttcctcatgctcggtagcgtaggattccgtgcctccctgctctttgttcgtcacatataccggtccatcaagtgtgagtagctggggtttgaaggtgttggtaaagttcatattatttctgttaggagaagagaaaagggtcntgtattatttttttcttt

SEQ ID NO: 20162 - DNA, 336 bp, Glycine max
cccacgcgtccggttgttaccaacaaaagaatcaacgagaaatatcatctcattgactcaagaaatggacgaattcaaatcgagcttcagtggagaactccttgataatggctggtaccagttgcattgcacacacaaatttccagcgtacataattgtgtaaagcaatttttcttctgataaggtttggatgaaagccttcaaacttgatttctcattattgttgataaaaacaataacgtcagtgactcaatactgtcttacgagttacgctcccatagaatgttgttcataactctattgataatttgatattcaagttctgttcctctgttt

SEQ ID NO: 20163 - DNA, 459 bp, Glycine max
gcgataactattccatttctttccaccccacagtttctgaattctgggtgttgagtttcattttgggcatttttttttatctcccttggatgtgttattttcaatccaaaagaccatgcaaaaaactatatttgagaatctgaaagagtgactaggtggtctatctgatcttgtgaagtttgtgtttgtgtgaaaggtgtgaggcttattattcagaagagtttgtgtttgttcacataattgattgtggtgtggtgtgtgtcggtggcaatggaggcaagtttggtggagaggggtagagagagagctggacatgttaacaaggttggttatgttagaagggtcattgcaaagaagaagaaacagctttatcgaagggttaagagacctgagttgagtgtttcaaagacacttcaccaattatttgattcatgcagagaagctttcaaaggccctggc

SEQ ID NO: 20164 - DNA, 395 bp, Glycine max
gagtctcttgtgattgttgaatacattgatgagacatggaagaacaaccccatcttgccttgtgatccttaccaaagagccttggctcgtttctggtccaaattcattgatgataaggtttttggtgctgcatggaaatccgttttcacagctgatgagaaagagcgtaaaaggaatgttgaggaagcaattgaggctctgcagtttcttgagaatgagataaaggacaagaagttcttggaaggaaaggagattgggttggtagatattgctgctgtctacatagcattttgggtccctatggttcaagaaattgcagggttggagttattcacaagtgagaaatttcctaagctccacaattggagccaagaatttttgaaccatccaattgt

SEQ ID NO: 20165 - DNA, 319 bp, Glycine max
  modified_base (11)..(11): a, c, g, t, unknown, or other
ccggccggaancccggtcgacacgcgtccgtgaattgtcaatgttcagcagcagcagcatcaacaacaacattcttctacctaggccagaagaaattactgtgtaaattttatgtatggtagttgaaattataagagcatatgtagactaggcgaaatagatgaaaaagattgttcattttctgtgctcattctaactaatttcaaacatatatagtatgcttgcttgtagacagttttttctttcttgtgttaactgttaaataaatatatagcatgttttactaaatatatatatctctacatacttcgagttctaa

SEQ ID NO: 20166 - DNA, 308 bp, Glycine max
cggacgcgtgggctcctcctcttcgccgccgtggccaccgccgcaatggcggtggccgcgtgcgacgccgacgacatcctgatccgtcaggtggtgccagatgttggcgaagccgaagaggaggacaacctgctgaacgccgagcaccacttcgcgagcttcaaggccaagttcgccaagacctacgccaccaaggaggagcacgatcatcgcttcggcgtcttcaagtccaacctccgcagagccaggctgcacgccaagctcgacccctccgccgtccacggcgtcaccaaattctccgatctaac

SEQ ID NO: 20167 - DNA, 382 bp, Glycine max
ctctgtcctggcttgcttgtggttgaaatcttaattgagttttctgaaattatgtgcgattaggaattttgatgttaaatttgcacacttataaagaattaaagatgatttctgtgatggttggtttgtgacatgcttctgtgccggaagatgttgatttgggtgcccctccttagagtagttccggtcattggcatacttcatgacaagaaagcattcaaacctgttctaaatccagctgaagtggaagcagtatttgatgcacctttggaaatgtttctcaaggataaaaatcggacgcacgatgagagggagtggatgggagagaagtactttgtgcatttctttgactatggcatcgggcataaaaaatatatcatat

SEQ ID NO: 20168 - DNA, 405 bp, Glycine max
  modified_base (149)..(149): a, c, g, t, unknown, or other
  modified_base (364)..(364): a, c, g, t, unknown, or other
tgaacaactaagatttaacctggatcaaacataggtgccttacagtgaagtgtagaaaagacctgagagaaatttctgaggcggttccattgggatgtagcaggtggtagatactacaatggattggatacttttatggaagtatgctncacacctccaaagattaaaaatctaacctgacgcacccaacaaccctttggtagggaatctccaagtcatcatgaattgagggtaacaaggctggcaaaggctaatatcaggatgctatttaaatatcaataatgtagcccttcttgatgttggacttcctagatatttggttggttaaaatttttaatttagacttgtatactattttatatgncacagattattatgagcagtttcgaaggcatgacttgagtt

SEQ ID NO: 20169 - DNA, 388 bp, Glycine max
gattgtgtcccgcctttgtaaatacaattgggacactactaggattgggaagaagggtctttacattttgagtttggcaaatagatattgcaactacctttgtataaatctatttctgaagaagcaattacaactttcaagggatgatagcattttgtggcataaggattaaggaggcataaaggaccaattgctttggaatattcactcatgacaaggcacaaggtcatgcgtgtatgccaacacatagtaatgatgtgtgtttttattcagtaggcaactggcagatcgggttttcccttgtcacttttgtataattattttggaagaatttatgatgtcaaagttattgtttaatattaatggcgacattgtatttattatttgt

SEQ ID NO: 20170 - DNA, 370 bp, Glycine max
  modified_base (356)..(356): a, c, g, t, unknown, or other
gcgacgcgtgggcgacgcgtgggcggacgcgtgggcatagtcctcactcttgctgtcacccgcacactgggttggcccttgtacttggctttaaatgtttctggaaggccttatgatagatttgcttgccactatgacccatatggtcccatttactctgatcgtgaacgacttcaaatatatatatcagatgcaggagtacttgcagtatgctatggccttttccgtcttgccatggcaaaaggacttgcctgggtggtgtgtgtttatggagttccattgctagtggtcaatggatttttggtgttgattacattcttgcagcatactcaccctgcattgccacattacacttnctctgagtgggact

SEQ ID NO: 20171 - DNA, 311 bp, Glycine max
ggttagacactcgcttcgatactctctcctaggtgcgaagctatggaggaagaaaattcagctgagtgaggcactgactgagaagatgttcaaccataatgctgctgaggctcatgatgcagatcataaaccccacatgtgcgatgctgtgatcgatctcttgcatgagattcactctgcaatctacaaaatgcaagctggatgccagatctcataccagagctagcacggtatgggatttcgtcaattcatgtgaaagttccatttggcaaggcaattgaatctagtacttgacaacctacgatatcttg

SEQ ID NO: 20172 - DNA, 405 bp, Glycine max
  modified_base (11)..(11): a, c, g, t, unknown, or other
gcccacgcgtncgcagaagttgacttggagacaatagtcttgttcttcagatctctggtttttggtttcctggccatggcggaatcatttctcttcagcattgcagagtcactcctttcaaagcttgcttcgcaggcttatgaagaagcttctcttgtgctgggtttgtacgaccatctcaaaaaccttaaagacaccctatcattagtccaggctgtcctgttggacgctgatcaaaagcaggagaagaaccatgagctgcgggaatggctgaggcagctcaaacgtgtcttctttgatgccgaaaatgttctagatgaatttgaatgccaaacactgcaaaaccaagttatcaaagctcatggtaccaccaaagacaaggtaagtcacttcttatcaacttct

SEQ ID NO: 20173 - DNA, 442 bp, Glycine max
actgaatgtgctgtgtatctttggacagttttcatgttccattgcaatggttggtgcgtcgcttggacactaacggctgtgtgtggtactaacatatgccttcgccaggtaacagcgaaggcagtgtatggagccattgccaagtataaagtgactcattcttgtgcatcaccagtggttcttaacacactaattaatgccccatctgaggacaccattcttactctaccccatgttgtgcatgtgaatacagctggggctgcacctactccttctgttctttccggcatgtctgaacgtggatttcgtgtcacacacacttatggtctctcagaaacctatggcccctctgtctactgtgcctggaaaccataatgggaatcacttccccctgaaaaccaagcccggctcaatgcaagacaaggtgttaggtacattggct

SEQ ID NO: 20174 - DNA, 385 bp, Glycine max
caagctcccaatatagcaagcagcaaacatgatttcttccgtgtcctttccagcgtgtcttcgcgccgttaacttctccggcaacgccatggcttcgccgtcgtgccgcgtcaaatcccggccaatagtcgccttcgccaccgccactgccaccgctgaagctcgctcttcctggacggagcaaccgagaccttcctatctgaactcctcttgctcttcgctttacgatatcctcggcatccccgctggcgcctctaaccaagaaatcaaggccgcgtaccggcgactagccagagtctgccaccccgacgtggcggccatcgaccggaaaaattcgtccgctgacgaattcatgaagatccacgccgcgtactctactctttct

SEQ ID NO: 20175 - DNA, 405 bp, Glycine max
cccacgcgtccggcgaaatcagttttctacaatgggaaggaaaaagacagaggatgctggccgatcggcgaaggtaaaggctggtagcaaagatcctcctaagaaggaaaaaatttctgtgtctgccatgctggccagtatggatgaaaagcctgataaacctaaaaaggtcccttcttcctccagtaagccgaagccgaaatctgctccaaaagcttccacatacaccgacggaattgatcttcctacatccgacgatgaagatgatgatgatctcttggaagagggggaagccaaaaagtccagtcagcagcatcaaagggttgatttgaaaccacttgatgtgcctattgctgataaagagttgaaaaagcgcgaaaagaaagatcttttagccgcacatgc

SEQ ID NO: 20176 - DNA, 275 bp, Glycine max
  modified_base (61)..(61): a, c, g, t, unknown, or other
attatcagtcctttttcattcggggtttttacctaaccctacaattcggcgatcgttccantttaaatttttcgctttcatcgaatagctgtttatatataaaccctattccccctattcaccatgggaattgaatatataaataagaaaaaagccaaaaaaaaagaagtttaaaaagttttattttaaataagtaattctgttatttttcctgtttcttgactcaggaacttatctttttccacggaaaatcatttacaatattaactctaaat

SEQ ID NO: 20177 - DNA, 176 bp, Glycine max
caagccgtttccaaatctgggaataagacttcattctgggtggatgaagcaccgcaatcgaaaaacattcctttagaaagtgcacctgttgcctcagaaaacatgccttcagaatctgcaactgttgcctcagctgaacctgaaaacaatccttcacaagctgcaatttttgattc

SEQ ID NO: 20178 - DNA, 473 bp, Glycine max
acgcccatttccataatcactttttcctacttgcttgtccatccatcccttgactaattaattatgcctgacaactaccaatggccgaagagaaacaccacaagcaccgtctcttccaccaccacaaggacgaggataataagccagtagaaaccgatactggttacgacaacacatcatattccaagccttctgatgactatgactctggtttcaacaagccatcgtatgagtcttctggcggtggctatgaaggtggttacaacaaaacatcttattctagtgatgagccagcttctggtggtggctatgaaggtgggtacaagaaaacaggttattctggtggcattgatgagacttctggtggctatggcgctggtggtggtggatactctgacgtcactgatggtggctacggcaaaccaagtggtggctatggcgccgcttgtggtggtggtgtgtaccctgacact

SEQ ID NO: 20179 - DNA, 387 bp, Glycine max
  modified_base (320)..(320): a, c, g, t, unknown, or other
acgccttagttcccaaccttacattattaactgcaccaactcatctgcctctaccaaacaaaactgcacagcataaccctctggctaaaaccctctctctgtctcccttccttctcatcttcaccaccaccaatggcgtcgccgccgccaccaccttctctcctcctcctcttcctcaccctcgtcgccgccacggcttcctccctcacctgcaccacccaaaagctcacggactccaagaacaacctctactccaactgcctggacctgcccgcgctcgattccttcctccactggactcacgaccccaccaacgcctncctctcggtggccttcgcggcggcgcccgccaactccggcggctgggtgtcctgggggatcaacccc

SEQ ID NO: 20180 - DNA, 449 bp, Glycine max
  modified_base (41)..(41): a, c, g, t, unknown, or other
  modified_base (52)..(52): a, c, g, t, unknown, or other
  modified_base (353)..(353): a, c, g, t, unknown, or other
tcattaatcaaccaccaccttaacacatcagctctatgatntccatcttcanccacttggaagtctctcattcccagaactgcagcttttctttgctcccagtaaaaagcactaattctaagcccaacacacaatccacttcctactccgctgagtccaaaaccgccataaaagtttccaatctatcacaaccctgtgtatccaagcaaaacccgccccttttgaggcccagatttgcgccttacttggactgattacactgctttgaatccattgtacccttctaaattgatttcttcagtctccaatctcaattcagatggcataaaaatcatacgcgattcaattcaatntatttttacttaatagtttaattagtagtttataaagctatgtactgtactcgaaagattaaatgaataattacaaaaattaaattacaatcttcc

SEQ ID NO: 20181 - DNA, 134 bp, Glycine max
ccccaaaccctaatatcactctccttctatactccattttactaaatcatactaccttcaactcaaattccatttatacaccaccatctccgactactaccacctatacaaccacctaaaatcccttcatctcc

SEQ ID NO: 20182 - DNA, 431 bp, Glycine max
cccacgcgtccgctcaaatcctctgttaggatataaaaattagggttttgcatttcgggtcaggcagactcagacatgggaggaggcaatgcccagaagtcaaagatggctcgcgagaagaacctcgagaagcagagggctgccgctaagggaagccagttggattcaaacaagaaagccatgtctattcagtgcaaggtgtgcatgcaaacatttatatgcaccacatcagaagtgaagtgcaaggagcatgctgaagccaaacaccccaaatctgatctccatgtttgttttcctcatcttaaaaagtgaaagagtgcatgttgagacatgatatatcaatatatggcctgttatatagtctctatccacagagatcttcaatttcttttataacaaatatgcctgggtggttgggtcttggggggtat

SEQ ID NO: 20183 - DNA, 217 bp, Glycine max
cacgcatccacataaactctcccttaagcttttacaatctaagaaagaactaacggacaagacactttttaaaagggcacatcccacaccaatcctcatactaactccatacctaaccccccacaaaaccacattaaccccatactaaaactaccacaactcctatcacttcaaaacctttcacataaccaacaataacaccatacataaccacaaa

SEQ ID NO: 20184 - DNA, 358 bp, Glycine max
gactcgcatactgtttctactttctacgatagacatgggatacgcacgtgccttgggaggcaagacagcagtagccttctacagctgcgtaagcagaagagcaaggtggttctgtgcagctgatgatgctttcctctgccatggctgcgacactttggttcattccgcgaaccagttagcaagcatgcacgaaagggttcggcttcaaactgcttcctcaaaagtaaccaccacgcacgcatggcacagtggattcacacgcaaggcaagaaccccgcgtcacaacagcaagcactttgcgctgcaacagcgtctcaaagacgaagttctcttcaacaacaccagtgttcttcccctc

SEQ ID NO: 20185 - DNA, 187 bp, Glycine max
accttatcatctcaaaatctcttcttcaataattcctttctcttttccttcttgatattttaaacacgctaaaacctaatagatccttcttaaatgttacccacaatcattcacctcttcctttccctaaacaccttcccatatgttcatttccacccaccattacgaactattgactactacctca

SEQ ID NO: 20186 - DNA, 467 bp, Glycine max
  modified_base (432)..(432): a, c, g, t, unknown, or other
acggtgcaacgccattgcacttggcagctcgtcatagacggtctgaatgtgtacatattctattggacaggggtgctcttgtttgtgcttcaactggtggatatggctgtcctgggagcactcctctacatctagcagctagagggggatctatagattgcattcgtgaattgttggcatggggtgctgatcgtcttcaacgcgatgcatctgggcggataccatatatggttgctctgaaacacaaacatggagcctgtgcatcattgctaaatcctacatctgcagaacctcttgtctggccgtctccattgaagttcatcagtgagcttaatcctgaagccaaagctttattagagcaagcattgatggatgcaaacagagaaagagagaaaaacatattgaaagggagttcttactctctgccatctncatcacattctgatggggtagctgataatatgtct

SEQ ID NO: 20187 - DNA, 462 bp, Glycine max
  modified_base (451)..(451): a, c, g, t, unknown, or other
acgtttttctatatggaagcctgtttggttacgggggaagatcatcctgcggggggcttactgcgtcggaggaggcccgcgacaagatgatattctccggcggcggtgaccgcgacgaggccgatctctacctccaagctgtcgacgaaatccagcgctctctctcctccgtctccgtctccgtctcctccgacaaagttaactccgccatccagatcgccatggcccgcttagaagacgagttccgcaacatcctcatctcccacaccaaccccttcgacccctcctccgaagacgaaccctcccaaaccctagactctctttccaccacctcttccccaaaacaccctctcaccaacgaagaaacaacagaagaagaatccgactccaaccataacaccatctctactcctcttttccgtttcaacagtgacggcgcttgcttctctgntcgctcttctg

SEQ ID NO: 20188 - DNA, 224 bp, Glycine max
gaaaagttttgggcttgagattgagttagattactcttcagcgaggatggaatatcagctcggagtcttttgaggtagaggatttcactgctagacaagtttattagaaacttttgtaggctgtgcaaccttagctttagtatccatgctgtccttccataacaagtctggttgaatctcattttttcctgtaaaaatgacttttcggtggatatcatcatctg

SEQ ID NO: 20189 - DNA, 123 bp, Glycine max
tacatctatctcttcttcttcaatacaaacaatttcaaaattttcttctaatgcttttcctaacaaaatccttaaatatattttctataactcacattctaacctatatctttcaacctcata

SEQ ID NO: 20190 - DNA, 471 bp, Glycine max
  modified_base (57)..(57): a, c, g, t, unknown, or other
acgaagttagagtatacaagtgatgtacaacggttacctcctgatcttgcttttgtncttgaattgcgtccatacctacattcataagatggtatcaaagcatatccaaaattaatccaaagggtcacctaccatagttatccactcacctcaccccttgcttctttgggatgggaattggatctttgaaactaaagatcacatttcaatattaaaattgagatagacaatgggaagagatggtaaaacaattctagatcaaatcttgcaactggtacaatagatgcagtgaacagctcaacctggaaagaaaagaaagcaaaaacaggccctgagatggggatagagggaaaaaattgaaaacgaagcataattcatattgtaaaaagacaatatcactaatggaatgaatgtttagaggtttattccgttatcaagcatactgcatccaaatgaatggtcagtcacaaa

SEQ ID NO: 20191 - DNA, 462 bp, Glycine max
  modified_base (345)..(345): a, c, g, t, unknown, or other
  modified_base (419)..(419): a, c, g, t, unknown, or other
acgcccacgcgtccgatttttgttggttcgagtgagcgagggaagatgtactctagagattcatggggtggtccgttggagataaacgcgacggactcggcaacggaggacgagcggagccggaacctgcaggacgtggacagggcggcgctgtcgcgtcccttggacgagacgcagcagagctggctcctaggccccggcgagcagaagaagaagaagtacgtcgatctcggctgcatcatcgtcagccgcaagatcttcaagtggaccctcggcaccctcctcttcgccgccttcctcgccggcctcattgccctcatcgtcaacaccgtcccccgccaccgncacaaacacccccctcccgacaactacacccttcgccttcacaaggccctcatgttcttcaatggccaacgatncgggaagttaccgaagcataacaatgtgtcttggaggggaaac

SEQ ID NO: 20192 - DNA, 410 bp, Glycine max
gctcgtacgattcgtctcagtacttgttctccgaaaccgattcggttccttacatagatctggattactcggccaggtatcctaagacggagcagaaaagttccgccaccgccgacggcgtcgttccggtgcatagcaacttcgagccgttcacctacggttacaagtacaacactactctctcacagtcacagtctcatatgagccagagtgtatcttctccgtcgtcgatggaagttggagttgtgccggacgggaacactatgtcggagatatcgaactgcagctacagcaaagtggcacctgtgacggtgactgcgcatttctcggcggcggataaggaagctagagtgttgaagtacatggagaagaggaagaacctaaagttcgagaagaccattcgttacgca

SEQ ID NO: 20193 - DNA, 437 bp, Glycine max
  modified_base (181)..(181): a, c, g, t, unknown, or other
  modified_base (314)..(314): a, c, g, t, unknown, or other
  modified_base (350)..(350): a, c, g, t, unknown, or other
  modified_base (404)..(404): a, c, g, t, unknown, or other
  modified_base (410)..(410): a, c, g, t, unknown, or other
  modified_base (413)..(413): a, c, g, t, unknown, or other
  modified_base (423)..(423): a, c, g, t, unknown, or other
cacacatacacccacacttccgcctatacttatacccatacctaaaaaacctaaagctaaggttaattcatcatgcccacattcctctcttcttactccttaaccttctaaactaaccttatatcctttaccaacaaatatctttcaaatcatctttcacaatcaatatctttcaaccttnacacctaattttcctcaaatcaaccaatcttatactacatataactcttctatattaccaccttccacttattatcaaaacattcatctttctacctcaataacctatatttcaaacatcataatctcaattnaaacacattaaccaacatatccatatctactttcantctttcaaccccactcacatcattcattccatccatcatttcttaatcaaaatnctcctntanctaacctcantataaaacattttc

SEQ ID NO: 20194 - DNA, 411 bp, Glycine max
caattttcattttcatgcctctcagattcactggattatgttttttctgtcgcacaagccctgtttcttcttcagtggaactcctattccttgttgcaatcgaaaagggtccctttgtctgttcttgtctactgttgttgatgtctattactgttgctgatgggaattggcttgtgattgtgaacacacccaattcctcgccattgcaacacacccactcgtctttctctaaacgcagatgggataaggagttttctgagctccagagtggatagtatctgaatcagattcataacataacaattcaattgtggttttttgatattttggaatcaatggattcttcacaagggtctaccattgctggtttcgtggacaatgcatccattaagagaaatgagtctagttttg

SEQ ID NO: 20195 - DNA, 392 bp, Glycine max
aaagttttattcctcctaaactctatcgcctatatccacaattcttaaattctttgctaagctttattataaaaatgaacattctctctccacaacatattcctcaaaatcttcacactcatccttcatcctaagctcaactctatatacgtcccaatcttctcaaacattttctccctctaactcccaacttaatcctcattctcacattacacattcctctctacaattacaattttaacaccaactattcacctctctttacatatacttccccaatcattcccaatcttcctatttatcatatcactacaacttaaacaactctcaattcaaacctattccctatttattatcatctactaaatcacttcattacttaacctctatta

SEQ ID NO: 20196 - DNA, 441 bp, Glycine max
  modified_base (349)..(349): a, c, g, t, unknown, or other
cacacttcctcccactcttccgcctatacttatacccataccttaaaaacctaaagctaagtgttttccatcatccccacattcctcacttcttactcgttaaccttctaaactaaccttatatcctttaccaacaaatgggtttcaaagggtctttcaaagtcaagaactttcaacctttagacgtaattttccttaaagcaactaatcttatactgcatataactcttgtatatttccaccttccacttattatcaaaacattcatctttctacctcaataaggtatgggtcacacatctggatgtcaatggtaatgcattaaccaacatatccagatctactttcnatcttttatcccactcaaatcattcatcccatccatcatttcttgatcaaaatggtcctttagctaaccttattacaaaacattttctggat

SEQ ID NO: 20197 - DNA, 293 bp, Glycine max
ttaaagttgaataatatctgctgagcatgaaaagttccccaaccatgaaggcaatcgttgtgttcattttactcttggcctctatttttttccttcccagttcaactcttgctcgacaactggaggtggtgacaggcggtacccagaaccctaataatcccgcttttaaatgtagccgccgcggcagttataggccttgcgccccatctaactcgccaccaagaccaccatgtaatgggtacattaggtcttgccacatcgcatcggcaccaagaccaccatgtaatcagcat

SEQ ID NO: 20198 - DNA, 462 bp, Glycine max
  modified_base (350)..(350): a, c, g, t, unknown, or other
cttctccaccatctcttcgcccataacctaattagtgctcaatcacaaatcatcaatttctcgatgggcatgatgatgatgatgggttcaaacacaaaaccccttgtgcacctttctcttctaattttggttctcttttcttcttcaaccgaatccctcagattcgaactccaatctgggcacaccaaatgcatctccgaggacatcaagagcaattccatgaccgtgggcaagtaccaaattgttaactccaacgagggtcagcctcttcccgattcccacagagtcaccgtcagggtgacttcgtcttatgggaacaactatcactacggggatcgcgttcagacggngcattttgcgtttgcggcagtggaggctggagaatacatgactatgctttgtgctgtggatcacaaccctgtggaaacgttgactgtggattttgattggaaaacggtgttg

SEQ ID NO: 20199 - DNA, 277 bp, Glycine max
gactcgaacggtgaagaagcacagggagtagcggcattgaatatgcagatcttcgtgaaaactctggcagcgaagactataaccctggaggtcgcgagcagcgacaccatcgacaatgtcaaggccaaaattcaagacaaggaatgcattcctccggatcagcagagtttgattctcgccggaaagcagcttcaagatggaaggacccttgccaattacaacatccataatgaatcaacccttcatctcgtactcaggcttcgcggtaacatcattg

SEQ ID NO: 20200 - DNA, 301 bp, Glycine max
gggtaaggctacggtcgggtggtgatcatgaaacttcaagaatacttaagctcacagactcgttgtggacaaacatatcattgactacagttgaggacttgtcctttgctaatttaaaggatgttaaggatgtgtatcaattgaatgatggttttccactattaaaacatctgcatatccaagaaagtgatgaattgttgcacatcattaactcaacagagatgtcgactccctattctgcatttcctaatttggagactctggttcttttcaatctatctaatatgaaagaaatatgcta

SEQ ID NO: 20201 - DNA, 312 bp, Glycine max
acgctcaatctcccactaaatgccaagctccagctcctgtatcatgcgccgtatcctggggctcgactccatcatcaaactgaaaacaacccttttctcagaactcttctgcgcactgtgtgacctaggcacctacatacgcatagatctagccttatccttagtgaacaacttagacctcaccaccacactgatcttcactgctctctacaacattgtcaccagtctcctcttcggcctcctcatgccggtccagaccatgaagtacatcatcaacgtcatcatctccgcagcgacctccctaaccatccc

SEQ ID NO: 20202 - DNA, 361 bp, Glycine max
  modified_base (305)..(305): a, c, g, t, unknown, or other
tccgggtccggccgcgcgtgcttccacgcgtccgcttcttccttcactttcgtttggggtaaagggcacagcttctgcaacccagcctaggtctcaagaagctggcggttatgatgacgtttttatgcagcagagcttgctctttgatgatagtctgaaggatttgaagaatctgagagcacaattatattcagcagctgaatattttgaactctcatactccaacgatgaccaaaaacaagtagtggtagaaacattgaaggattatgccatcaaagctcttgtaaatacagtggaccatttangttctgtgacctacaaagtaaatgatttgttggatgagaaagtcgttgaggtttct

SEQ ID NO: 20203 - DNA, 440 bp, Glycine max
  modified_base (50)..(50): a, c, g, t, unknown, or other
  modified_base (89)..(89): a, c, g, t, unknown, or other
  modified_base (91)..(91): a, c, g, t, unknown, or other
  modified_base (205)..(207): a, c, g, t, unknown, or other
  modified_base (237)..(238): a, c, g, t, unknown, or other
  modified_base (248)..(248): a, c, g, t, unknown, or other
  modified_base (262)..(263): a, c, g, t, unknown, or other
  modified_base (284)..(285): a, c, g, t, unknown, or other
  modified_base (307)..(308): a, c, g, t, unknown, or other
  modified_base (350)..(352): a, c, g, t, unknown, or other
  modified_base (415)..(416): a, c, g, t, unknown, or other
gacgtgtgaatttcattaggcgtggagaatttcgcagaaagcgttacatnacagatatttagaaattcttatatatcgaattggagtgngngtccagattgatggcgagtaggcttgtttaaatgcacttggaggctcgtaagtggttaggtatagtatttgttgattaatcttaaggaattgggaatggacaaatgcatttcgnnngttggcgggtccccggttttcctttttgannaatatagttngcttcaaagtcgtnngttaagaacctttttgctgcnnaagttgtgaatacaaattattnngggttattaaatgtttgacttggtaaaacgtgcttactgcannngcttggaaattgtgttattgaaggaagaaatcccttgaaaagaattgattgggcttttagcanngaatcaaaatttaacgtttttgtt

SEQ ID NO: 20204 - DNA, 452 bp, Glycine max
  modified_base (390)..(390): a, c, g, t, unknown, or other
acgcaggaaccctataagcaagatagaatgagtgtgcgactgtggaaatatgtgtccaccttttggcatgtttcaagggagaggcttcatcaaatatattccaaacttagacaggagcaaaatgaggcaggggttggcccctctcacgctaatgggtcagtatctgtttcatttagcagaaatggaaatccattccatcgccatatggagagccagagaggattaaaaaatatggctccctatcaaatgccagaaccagttgataatactgggaaatctgaggcatggaaacgaagaagaagaactgaaagtgacaatcatttccagggtcagccaccacctcaaaggaccttaagtaatggaatccggattactgatcctaactcactncggatcctaagtgctgggccatcggacaaacgctttgctagggagaaaccttataggacaca

SEQ ID NO: 20205 - DNA, 406 bp, Glycine max
  modified_base (60)..(60): a, c, g, t, unknown, or other
  modified_base (66)..(66): a, c, g, t, unknown, or other
ctgagaatttggactactgctagttctgggttccgccgcagtgcctcgtctactactgcntggtcntatttcctacaccctttgaagcaaagtttccgcctttgtcctacgactcctttttgttcccgtacggttctcccgttgattccaccgttggtggctccagctagaccgatagcgactaggaatatcaactcgttgccgagttaactcgccacttaactcgctcctctcttcaacctgacaccgagtctgtgggtcggtttgtgtctggttctcctcaatccacgctttgcgcgtttggaagtgggtgtagttgctgcaaagggtcgagccagggtagcccatatggtgtttgcaagttgtcctctgcgaagaccacttgggatctgctgcatgctgcttc

SEQ ID NO: 20206 - DNA, 403 bp, Glycine max
aatccaaaatctcttcaaacagcttagctttcaatttaagttccacaatatatagttaggtcttttctataggttatggacaacttcatatcaattgctttgacctcgataagtgcaatgtgtgccacatatatgacgaatattaaaacaatctgattctgcatttttacaaatgcataattattatacatgctagatgctatggcaaacttgaacctattaatatggttctatgattatataacttatctcgttcatactctcctccttcacctttctgcttatttccactcatatgttgtacaatcaaacctactacatatagcctcttgactcattttccttattccatgtttataccataaacttgcttatctcatctaaatataattcatcctattta

SEQ ID NO: 20207 - DNA, 458 bp, Glycine max
cccacgcgtccggcgagaaacagtttgagcgtcatgtggagacagagcgctttattggtgtgcgtgttattactagtccagcaaatttgtgctaccagtgagcaagagcatgcttgccccccttcttcctgtggcaaaatcacccacataacttatccatttcgattaacaggcgacccaaaaggttgcggtgacaaatggtatgagctagcttgtgaaaataatgttacggtgttatatttgtactctggaaaatatcatgtgcaggctatcaactacaacaatctcacaatccgtgtggtggatccgggtgttcaacagccatattgctcctccattcctggctacttcttgtctcaatcaaatttcagtgcaattgatgaaggggatccatacctagcctttcaaaatcgagattattcttggaagtacgttttccagcatatagttttcttaaa

SEQ ID NO: 20208 - DNA, 281 bp, Glycine max
ttcacttctctagtctgttcataacatcactaaaaacagcttccgaaagatttaccataatcgtctcttctcgatctcaaggcatccatctctgtatcacataactcatgctctgtatcacagtactattcccatcaacacttttctctcactatgactcatgttctcgacgccaccaccaccctcggtgccgttccaccaacagtacgacttcaccgaccgcaatattcggtttgatacctacttctacatggccataggtaattctaccagtccatcta

SEQ ID NO: 20209 - DNA, 442 bp, Glycine max
ttatcaactcactcatcaatctcgtttggtctcactaactattacttcatcatgtcgtcgagcgcaggtggtcaagtcatcaaatgcaaagctgcggtttcatgggaggcagggaagccacttgtgattgaagaagtagaggtggcaccaccacaagctggtgaagtgcgtttgaagatcctctacacctctctttgccacactgatgtttacttctgggaagccaagggccaaactccattgtttcctcgtatatttggtcatgaagctggagggattgtggagagcgtacgtgagggtgtgactcatctcaaaccatgggaccatgcccttccagtgtttaccggggagtgtggagaatgccctcattgcaagtcacaggagagcaacatgtgtgatcttctcaggatcaacactgataggggtgtcatgatccatgaca

SEQ ID NO: 20210 - DNA, 369 bp, Glycine max
acgcaaacaatggagttcccacactcccttcgatgtcaatacggcatcccttctcaccgtctctttccctacaatttcatccctgaaaaccatgttcactggacagaaacccctgactctcacatattctcagctgacatccctggtgtgaagaaagaggagcttagagtggatgttgaggactcaaagtacctcataatcagaactcaagcagtggataaatccacagaacctgcgaggaagtttgagaggaagtttaggctgccatggagggttgatcttgatggcatctctgcagggtatgaagattgagttttaactattacagttccaagatcacttagtagaagtttctacattgacccttct

SEQ ID NO: 20211 - DNA, 451 bp, Glycine max
cccacgcgtccggtgctgtgtttcagttgcaagccttacgcgctatggtacaggctgatccggaaatattgcagcctatgctacaagagcttggcaaacaaaatcctcatcttatgcgattgattcaagagcatcaagttgacttccttcgcctaattaatgaacctgttgaagggggtgagggaaatatactgggacagctggctggtgccatgccgcaagcagtgactgtcacccctgaggagcggcaagcaattgagcgtctcgaagcaatgggttttgatcgtgcaactgtattggaggtgtactttgcttgtaacaaaaatgaggagctggctgccaactaccttttagatcacatgcatgagtttgatgaataattagatctcctttacaatttgtcaaaatatttgtttaatgtttcctttagaatggtctttgttatgtaatg

SEQ ID NO: 20212 - DNA, 232 bp, Glycine max
gcgaaatacactgaatgcagcattcatagtaatgtctgtaattataaggctagcatatcatactagatcagggtgtcatagtactaccatgcgtcgctgacacctcatttgtcgcataaagacgactgttgacagaagactcctctgacgtaacatcacctgattccgaatagtattcttctaacccctgcatgatacactactacaaccctgtttaattgttcgacctcat

SEQ ID NO: 20213 - DNA, 417 bp, Glycine max
cccacgcgtccgcaagatctatatgataaggcagcttcaaagttcaaagacataaagctttacgacggcttcttgcacgaccttctgtttgagcctgagcgtgaagagatagctcaggacattatcaactggatggaaaagagattatttactatttgaaaatgttagtatatatatatatatatatatatgggggggttaataggaaagggaagacacaagggaagaaaaagggatgccatgtttgtaagtgtagaaaattgaagtcgccctgggaaatggggggaggcggatgcagataggtttattcatcttttcattttagtgttttgaatatatgtattgtgtgaagatctttgttttatcaagaaacttgtacattttatagacttaaatatttcagtagtgtttccattt

SEQ ID NO: 20214 - DNA, 478 bp, Glycine max
acgcccagatctcgggttccaatcgtcgagcgatgtccaaggcacgcgtctacaccgatgtcaatggtctgggccccaaagagtactgggattacgagtccctcaccgttcaatggggtgatcaagatgattatgaggttgtgcgcaaagtgggaaggggaaagtacagtgaggtttttgaaggcataaatgttaatagcaatgagcgttgtgtaatcaagattctcaagcctgtcaagaaaaagaagattaaaagagagataaaaatacttcagaacctttgtggggggccaaatattgtcaagcttcttgatattgtcagagatcagcactctaaaactcctagcttaatatttgagtatgtcaacagtacagattttaaagttttgtatccaaccttgactgattatgacatacgctattacatatatgagcttcttaaagccttagattactgtcattctcaaggcataatgca

SEQ ID NO: 20215 - DNA, 480 bp, Glycine max
gcgtacgctaaacctaaacctaaacataaacggtatgtttaaatcccctgcccaattttcactagaacgtattactcccaaaccaatcttcgatcatggccgccgaatcacaacctcaactaatcgaagagagaagagaggagcaagaacttaagtacctggaatttgtgcaattcgcgaccatccaggccctgatgcgctgcaccatcctctactcctacgccaaggagcgcgcgggtcctctgaagcccggcgtcaacaccgtcgaggaggccgtgaagaccgtcgtggctcctgtctacgacaggttccacctcgtccccggcgaggtcctcaaatacgccgatcgcaaggtcgccgaattggaccgtcacgttccctacaacgtgaagaaggtctacttccaagcccgctccgtcgtctacgaagtcctccgtgatggtgtctacgcctacaccaaaatcgtttactcgaagtatg

SEQ ID NO: 20216 - DNA, 465 bp, Glycine max
cccacgcgtccggaaaaaaggttttagatcgtaaaaactaatcactacgaaaacaagggatagcgaagatggctctgcccaaagctaaggagatcgtgtcgtccaattccgtcgtcgttttcagcaaaacctattgccctttctgcgtcgatgtgaagaagctcttcggtgacctcggtgccaattacaaggccatcgaactcgacactgaatccgatggaaaagagctccaagcagcattagttgagtggacggaccatcgaaccgtgcctaatgtgtttattggtggaaaccacattggtggctgtgactcaacaactgccctgcacactcaggggaagctggttcctctgctgatatctgctggagctgttgccaaatcaactgcttaaaggatctcccatttctaggttatgcagttaaataaaaataaaaacccaagtagttgggtcggttatataattc

SEQ ID NO: 20217 - DNA, 301 bp, Glycine max
acgaagtccttcctcctagagacccactgtgtgcctacttcagagcccgctatgaaaggcttgctgcttcaaaatagtcttatttaaggatatttgttgaacaacttgtgtcttgttgagttattgctgtttgaatttcatgtaaaatgatactagctatatgtaaatcccagaaaaaaaaaaaaaaagaatcctaggatcttgttttcgttttggccatttcagttaataaagaaattatatttttcgaaaaaaaaaaaaaaaacacacataaaaaaagataatgaaaatatacatataa

SEQ ID NO: 20218 - DNA, 472 bp, Glycine max
  modified_base (399)..(399): a, c, g, t, unknown, or other
acgcgcccctctttacattcctgccgcgtttggccaagtggaggagttctctccggaatgggtgggtctggtgacgacgctgacatggtaccatgactactggctaagccagcagcacgatgagggagccttctacggcgaggacgacgggtttgatggcaatgatgtcgttgatttgcttcctgattcgtttgatcttgatgctggcgaggatctttttgaagagtttataagatcttctgaatcccaagaagaaactggacccaaagtaactgcatgaggcttagagatgaacccatttaaagaatctacctaccaacctaagagactggacccaaggccttagctttaggtcagttagatgatatgtttgcatcatgttatccgtagcttcaactntctgtaacttcttgtataggcaaaggtttcaaaccttcaatctatccttctcttgcttttgccaaaatgttat

SEQ ID NO: 20219 - DNA, 350 bp, Glycine max
aaattctaattaaaaaacatattgttattttctaaaaacaatgctaggatcttttaattaatttctcttatttatattcactcctactttattcaatcatatttctcaacaaaattcccaacctacgcttcttcaatccaattctaatattatccatatacccttacttaattctctagctcttgatcgcaacctacttaaatcctctattaatcttaattcactaactctcaaaaaacacttaaacttatcacaacactaaattaaacattttaacaatttaaactatcaaactaacattaaatctcaattatagattccaatattgaaatttttaatatatcctaaaa

SEQ ID NO: 20220 - DNA, 442 bp, Glycine max
tttgaatacttcttatgcaactatagtgaggctgagagattggtccataattaatcaaaatgtgggctatattccacaaagcttttgctcatccacctgaagagctcaacagccctgcatcttacaaaggttccaagaagcctaaggttcccgaggaaactctcaaagatttcctttcccaccatcctcacaacacttgctctatgagctttggtgatgctgctgttctagcttatgtccgtcctgatcaatctttctctcgtcatcaaaggctgttttgtgggatcgatgacatatattgtctcttcttggggagcttgaacaacttgtccctactcaacaagcaatatggattgtcaaagagtactgatgaggcccatgtttgtattgaagcttacaagacactccgtgacccgggtccataccctgcagatcaagttgt

SEQ ID NO: 20221 - DNA, 357 bp, Glycine max
attgatatattttaattacttgctgtggggttataatttttccacatctgtattatttcctgtttataattatttgcttcttttatccacgaaaggcaaaagagttagcatttaggatgggaaaaacaattgagttgtatggattccctacatctgtgaatgtgtctgatgtaaagacatttgtagagcagtatactggtgaatgaactgtgttcgccattaaattaagacatggaaaaggtcatgttccaagagcatttgcaattattcaattcaccaccgcaaattctgctacatctatgatgtccatagctaacagcattttgagaacattgcggtatggaacctcctatttaa

SEQ ID NO: 20222 - DNA, 326 bp, Glycine max
acggcgatggacctcggaacctatgaagtgcgagatggagtggacattctaggaagatgcgatgggtagtttgcaaaaatcctcacaaaagacgctttgaaattcgttgctgagctgcaacgtgagttcaggagcgatatcaagcatgcattagagagcataagagaggcaaagaagaagtacaatgaagggactcttccggggtttgatcctgccaccagtcacattagagaccaggagtggctgtgtgcacctgttccaccagctgctgctgataggaaagtggagatcactggccctgtggacagaaaaatggtcatcaatgc

SEQ ID NO: 20223 - DNA, 442 bp, Glycine max
  modified_base (410)..(410): a, c, g, t, unknown, or other
acggttttccttccctcacaccatcatcttcggccttgtctttccgatcattatttcttgcgtcctgggcctcgtcgttgggcctgagtagcaatgcgacgaccatctacgaggtcctgagcgagcacgggctgcccatgggcctgttcccgcagggcgtgcgggagttcgcggtgggcgaggatggtagcttctgggtgcgcctcgacgaggcctgcaacgccaagttcgagaacgagctgcattacgagcgcaacgtctccggccacctcagctacggcatgatcgacgccctctccggcctcgaggcccaggatctcttcctctggttccaggtcatgagtatccgcgtcgacgtccccagcaccggcctcatctacttcgacgtcggcgccggcttcaagcgcttncccttgtccctcttcgaaaccccgcccgaatg

SEQ ID NO: 20224 - DNA, 332 bp, Glycine max
  modified_base (323)..(323): a, c, g, t, unknown, or other
acggttttgtgtttcacatttaaagcaacactgattagaaaggaaagtgaagttgagagggtggtgaggaagaacaagaaatgggggttggttcccaggatgccatcaagcagttccaggcattcattgaccaagttgaggagcctttgcgaacaacgtttcagaatgttcatcaagggtttgtcaccgaaactttaatgcggtttctaaaagcaagggactgggatccttgcaaggcacataaaatgttggttgactgtttaaattggagggtgcaaaatgagattgacaatatattatctaaaccaattgttcctgctganttatacaga

SEQ ID NO: 20225 - DNA, 397 bp, Glycine max
gcgtcaacgaaggcggcttctctcgtctcgtctctgcttttctcctttcgctttcgcttttcgtgtggccgccggtaaggcaattcgatacctctgaaccctaaccagacgcagccaccgttttgggtttccatccccctctcatactttgcctgattgctttcatgtttcgtttctctcttttcatttcaatttttatacggttcgccgttgattgtatcgagcaaaaaagtaaagaaaattataattgatttttgtcttgtggtttttttattgattgattagggttgtgtgaatcattgaaaaaaatattgaatcctccgttctgatttttttggagggttagggtttggaaatttggggattttttagggtttggggttgatatacgtttctc

SEQ ID NO: 20226 - DNA, 378 bp, Glycine max
cacaggaaatagtatcttcgtttgttcaatatgtttggttcatcaggcatggcacaggaatcgggtgtgttcatggttagccagacaattggcagtgttttgtgctgcaaatgtggaattccaatgcaacccaatgctgctaatatgtgtgtcaagtgtctgcgatcggaagttgatattacagaaggactgctgaagcgtcttgtgctggtgcattgccctgagtgtgagagttacttgcagccaccaagaagttgggtcaagctgcagctggaatcaaaggagttgctgacattttgcttgaagaaattgcagaagaatttgaattcgaataaagtgaagttggtgcatgccgagtttatttggactgagccccat

SEQ ID NO: 20227 - DNA, 406 bp, Glycine max
cactgctcttgcttctctctttggtcttgcatttggccttctcttctaattaattctgcaagagcctttggttatttgttacattacatatatggaattcactttgttcagaggtggttgtgttttgtgtttcgttcttctctttttttccaactcagcttgagtagtggttggtcactactctcttgtgagtagaagggtttatttttttgaggatgcattgaattggagatttggagtgagggaggaagagaagtagatgatacaatataggctctttttgttgggttttctgtattattatcattattcatattcttatgtaacaaattcattattattcctcattgtactttctttatatggggtgtgacaatgtaatcttatggtggattggtttggtttc

SEQ ID NO: 20228 - DNA, 411 bp, Glycine max
cccacgcgtccgttttatttcaggcacaagcaacaatttgtgtcagcaaggctttgaagtggtggaagaagaccctaaagcctaatatgattgagatccactcggcacaagaactggtccattctttgctcaacgctggtgattcattggttgtggttgatttctattcacctggttgtggaggctgcaaagcccttcatcctaagatctgtcaaatagctgaattgcacccaaatgcaatctttcttaaagtcaactacgaggaactgaaaaccatgtgtcacggtttgcgaattcacgtgttacccttcttcagattctatagaggtgcggagggtcgagtttctagcttcagctgtaccaatgccactatcaagaaatttaaggatgctttgacaaagcatgggaatg

SEQ ID NO: 20229 - DNA, 256 bp, Glycine max
cccacgcgtccggtgaaagcatgtcctcggaggttactttaagggatgtcccaccgggagcttgcaaggctatgcttaactttttatatgatgggcaattgaatgacaaagttatagattctggtgctttgttgctccaactccttctattagctgatcaatttggagtgacttttcttcaacaagaatgctgcaaaatgcttttagaatgtctctcagaggactcagtatgtccactcctccaagtggtttcttc

SEQ ID NO: 20230 - DNA, 286 bp, Glycine max
tcttacacccacgcttcctctaaccccttatcctacgcttttaccctaacttatctctcatttaagtctgcttcatatacactgaacttaatcctatacaaccaacatattcaccaatacctacaatctccctctacctacctaactcaatcaatattatcaattcaaatcttacaatctacaacacaacaatattacctcataaatattaaagaatctacctcaaaccactcactctatacactaatccaaatcatctactcaaagatcccacatatacttatca

SEQ ID NO: 20231 - DNA, 362 bp, Glycine max
acggcccaggcctccgagacaacagtgtacttgggatagttataataactctgccccatggtctcgggtaggaagctccaacagtaacagttctgccagagttcagcagaagtttactaaagaaaaccgaggttctacaagagaagagcatgttgacaattttcattatcaagatggccgaagaaatgaggtttattttgatgatagaacagcaaattctgagttgtccagtgcacctcctttgagctcctttaagagtaggacctcttctgaaagctcatgggatggatcatcagccaaatcctcaaaatcaactagggagagaagggggaggaaaaatacttcctcaatagcatctcctg

SEQ ID NO: 20232 - DNA, 360 bp, Glycine max
acacatctttgtgtttcaaaaatggaaccgaatggcaaccaactcacctctttcttccaccagcacgagcaacagcaccaacaccaccagccgccgccaccaccgcagaccacggcgtctccgaccaacgggctcttgccgaacgcggatgggtcccacatactttacccccactctgtggcgttcgctgtttcgtcgcagcttgaaccggcgaagcggaagcgcgggcggccgaggaagtacagaacgccggagcaagctctggccgcgaagaaagccgctacgacgttgtctcattcgctctctgtggacaagaagccccactaccctgcgttcccttgctccaagaaatcccattcc

SEQ ID NO: 20233 - DNA, 237 bp, Glycine max
attccagcctcggccgactcttacgcaaaaaaaactcttattaaatttcaatttggtctaaactttctcttaatgctaatgggtataggctcaaattatctactgccacataatatccatctactaaccacttcatcacgactctaccacatacgccatcccaacaacaatcgtcatcactcactatcgttccatccctttcatcatcatcatcgccatcatctctgaccacaaacc

SEQ ID NO: 20234 - DNA, 268 bp, Glycine max
gcaaattgcaaaatcaaaactttagagaacctatcgattaggtatgtcttcttccgatgttgattatgtgaatggcgctttggaatcatacaaataaaccccaacgtgtttcatcatcgattcacccaaattcaacgaaacaacatcctcatatcaatggagccatcggatccaactcacgcttctccagatgaatttgattctctgatggaagaactagaatctgcccatgaacatgtgcatgaccgtattacgcgccttgaaacga

SEQ ID NO: 20235 - DNA, 407 bp, Glycine max
  modified_base (369)..(369): a, c, g, t, unknown, or other
aaaaaattgataacatcacacagcattaggatgtatcagcaacaagggtcagatccgacaaagcaatcaccggcaaccggttttccggtgagctatagcaattcaacaacgtattcgaccaacgaggcttcctacgctccagtcccacctccccagcccaaacctcttgtcgattggtccaccggcctctgtgactgcttctccgaatgtggaaactgttgcatgacgtgttggtgtccatgtgttacctttggccgagttgcagaaattgttgacaagggatccacatcatgtggtgctagtggggctctgtatacgctgatttgctgtgtcattggctgtggctgcctatactcttgcttctaccgncccaagatgagacgacagtatggtctaaagggaaatgg

SEQ ID NO: 20236 - DNA, 426 bp, Glycine max
  modified_base (394)..(394): a, c, g, t, unknown, or other
gccattgattctgtgttcgatccgctgagagaattcgcaaaggacagcgtgaggctcgtgaagcgcgtgccacaaacccgatcgcaaagaattctccaaggttgccgtccgtactgcaattggtttcgtcgtgatgggattcgtcggtttcttcgtgaagctcattttcattccaattaacaacatcattgtcggatctggttaggatgaagggaactacaattgcctcagaattcaagttgtcaagcaaaaggaggtagacagagttcccacatcaatagatcattttatgcccccaatcttagttctgttttcatttttgttttttcttatatctggaagcgttactttagatgtaaaattttatttatcctttgttagaccttgacacatntgtttgatttaagataaggaggaaaaaacaat

SEQ ID NO: 20237 - DNA, 351 bp, Glycine max
acgtgatcatagtcgtagacatgatcagaagcgtatagtgatattagatcagatggattgatactgtcagcaaaatgcagaaagattaaacatcacgttgttcccacagtactaatgatgtatcatacacctgtcaaatccatgacatcatattgcatctaggctcatcaccatctctcttcagccctgcctaatacaccaattgtttgaaagccatcactaaatgccattcaactgcccatgatcatagccaaccttaacccacatagcacttagatctttgacgacacttccggccacatacaagctggaaaacatatggcgctttacactgcgcttgcttgctcatac

SEQ ID NO: 20238 - DNA, 438 bp, Glycine max
acgcccacgcgtccgagatgatcttgaaagagcagtggatgatggagtgaacacttacaaggccgtgtgcagggatagccgctttgtacctggagctgcagcaactgaaattgagttagctaaaagggtgaaagacttctccttcaaggagacagggttggatcagtatgctatagcaaaatttgctgaaagttttgaaatgattcctagaactttggctgagaatgctgggttgaatgcaatggagatcatatcttctctgtatgcagaacatgcatctggaaatgccaaagttggcattgatttggaagaaggcgtatgtaaggatgtctcaaccttgagcatttgggatctccatgtgactaagttatttgctcttaaatatgctgcagatgctgcatgcactgtactacgtgtggaccagattattatggcaaa

SEQ ID NO: 20239 - DNA, 465 bp, Glycine max
  modified_base (445)..(445): a, c, g, t, unknown, or other
ccaagtctcagaaacgtataggaagatgtgtagtttggttttgttgtccgtgttattgctcggtctccaacgtcctctctcatccttctcagccaactccgaaggaaacgctcttcatgctttgagaagcaggctttctgaccccagcaacgtgcttcagagctgggacccaaatctcgttaatgcttgtacttggtttcatgttacctgcgactccaacaatcacgtcattcgcttagacttgggcaattctaagctctccggaactttgggaccagaacttgcccagctaccccacctccaatacctggagctctacaagaataacataagtggcaacattcctcgggaactttctaaattgaagaaccttattagtatggatttgtatgacaaccaatttcatggcaaaatccccaagtctttttgcaaacttgactcactntaatttctacgcctaaaaca

SEQ ID NO: 20240 - DNA, 424 bp, Glycine max
  modified_base (356)..(356): a, c, g, t, unknown, or other
  modified_base (383)..(383): a, c, g, t, unknown, or other
  modified_base (387)..(387): a, c, g, t, unknown, or other
gtgtttgcggctgaggattccgaacgagcgaccttcttcgtttctcgcaaagtttaagtcaggatgggtaaggaaaagactcacatcaacattgtcgtcattggacatgtcgactctgggaagtcaactaccactggtcatttgatctacaagcttggaggtattgacaagcgtgtgattgagaggttcgagaaggaggctgctgagatgaacaagaggtcattcaagtatgcctgggtgcttgacaagctcaaggctgagcgcgaaagaggaattaccattgatattgctttgtggaagtttgaaaccaccaagtactactgcacagtcatcgatgcccccggacatcgtgactntatcaagaacatgattactggtacctnccangctgattgtgctgtccttatcattgacttcaccactg

SEQ ID NO: 20241 - DNA, 420 bp, Glycine max
  modified_base (395)..(395): a, c, g, t, unknown, or other
gatgaaacgaacacttcagaccagtcccacatacaaccatcccaagctgaagttctggtttgaaatcttcaaactaagaagtactcctttccagagtacatggagaaaatgagcgaactaaaagttcttatcatgacaaattatggttttcatccctgtgaacttgaaaattgcaaactacccagctctgtatcaaacctgaaaagaatcagactagagcggatttctgttccccacgtaggggcattgaaaaatcttgaaaagttatccctctacatgtgtagtaacataagtcagatttttgaaaatggtaccatcccagtttcagattcatttccaaaactatcagatttgaacattgactattgcaaggatatggtggaattacctactgngatctgtgatatttacccactaaag

SEQ ID NO: 20242 - DNA, 289 bp, Glycine max
  modified_base (285)..(285): a, c, g, t, unknown, or other
  modified_base (287)..(288): a, c, g, t, unknown, or other
gcggttaacgatggctctgatgggcggttttgctagaataaacaataatgagatcactgttttagtaagtgatgcggaaaagggtagtgacattgatccacaagaagcacagcaaactcttgaaatagcagaagctaatttgaataaggcggaaggcaagagacaaacaattgaggcaaatctagctcttagacgagctaggacacgagtagaggctatcaatgtgatttcataacaagttgatgcgtccgaatatcggaataactaaaaaaaaaaaaaaaccananna

SEQ ID NO: 20243 - DNA, 338 bp, Glycine max
  modified_base (317)..(317): a, c, g, t, unknown, or other
gaattaaaccatggagtgtggcagcaagtgttggaattgtggaggccttgaaagaccgaggcggatgcaggtggaatcatgccttaagatcagctcaacaccatctcaaaaaccatgttggctcattctctcaggctaacaagctttcttcttctgctatgatatccacaacactaaaacatgagaaggcaaatcaatcagaagagtctttgagaactgtcatgtacttaagctgctggggtcccaactagatatcataagcccaacaacaaaatattcttttctcttttcaattctaggaatcaagcaagcttaantagtctcaaatgatgatgagt

SEQ ID NO: 20244 - DNA, 317 bp, Glycine max
gaagacccggggcgaccgacgcgtacgcccacgcgtccggagaatttctatggtgctctaacacggaacttatctacggcttcgatgagggaggaagtagtgaagcctgcaacacacgtcgttgggagctcttattataaaaccataaagaatggcttcaatgacacaacaactgatattcagaccaaagcttcttttaagtatgctgcttcgagaggggtagtatggaacgccatttttatatgtcaatggattcttgttgcctgatactggagctgctgttgactacaagacttggagaaaggtcattgacccat

SEQ ID NO: 20245 - DNA, 311 bp, Glycine max
  modified_base (172)..(172): a, c, g, t, unknown, or other
  modified_base (201)..(201): a, c, g, t, unknown, or other
cccacgcgtccgcccacgcgtccggcttgatgggaaatcactagaagagattatagtgacggcatataataagggtgacattcttccagctttcaacaatgcagcacaggtatggaaccatgacttcttctgggagtgcatgaaaccaggtggaggtggaaagccatccggngagcttctagaactgattgaaagagactntggctcatttgaaaaattccttgatgagttaaaggctgctgctgcaacacaatttggtcaagatgggcttggctggcatatagagcaagcaaatttgatggggaaaatgc

SEQ ID NO: 20246 - DNA, 401 bp, Glycine max
  modified_base (342)..(342): a, c, g, t, unknown, or other
gggggcgaccgacgcgtacgctcatatcctcaatcaccccccctctcactctctcttcccttcctctggtggcgagagtggggactcctgctaggaagaggctgatgagagacttcaagaggctgcaacaagacccgcctgcagggatcagtggtgccccccaggataacaacataatgctgtggaatgctgtcatatttggtcctgatgatactccatgggatggaggcacgttcaagttgacactccaatttactgaggactatccaaataaaccaccgactgtacgatttgtgtctcgcatgtttcatccaaatatttatgctgatggaagtatttgtntggatatattacaaaattcagtgaagtcctatttatgatgtggcctgctatactcacat

SEQ ID NO: 20247 - DNA, 462 bp, Glycine max
ccactcttctaatgtctagttctgagagcacaaacgcgagaactagaacagcgtcatggttggctaccccattctttgttatcgttctcccggtggccgtggctgcgcttctctaccggctcgaaccattcaagccggttcttttgccggtccagctgggccggtccaccgtggcggttccggctcgtaacggccacatgcaagatggatcggaacgtgtgggtgagggacacttggagggcccggaagacttggcctacgacgctgcggcacgtgtcgtttataccgggtgtgaggatgggtggatcaagcgagtcacggtgaatgactcggtggttgactcggcggttgaagattgggtcaacacaggaggaaggccacttggactagttttgaagccgaatggagaactcataattgctgatgcggaaaagggactgctgagagtgtcaagtgagaagg

SEQ ID NO: 20248 - DNA, 440 bp, Glycine max
cttgagttggaagtcatggcgattggtaatgataatcagccacaacaatctgaaggcaaagggtggaatttgttcaagcttccctttcgccattcaacttcaactcctcacaatcacaatcaagtttccacctccaattctgtttcttcctttgccaaatcgctcctcccctcaccacgtcgtcttaagcttgatccttccaacaagctctacttcccttatgagccgggcaagcagggtaggagtgccatcaggattaaaaacaccagcaaatccaacgtagctttcaagtttcaaacaaatgcacccaagagttgtttcatgcgccctcctgggggcattctggcaccgggcgagagtataattgcaactgtgttcaagtttatagaacatccattgaataatgaaaagccagaaaaaactggactcaaattcaaaat

SEQ ID NO: 20249 - DNA, 263 bp, Glycine max
cccacgcgtccgctagaagcattagcactaggagcagcaacaactagtctcagctggaatgggctcttcagtgatggcatctctggcccttaaacctgcccctttcactgttgagaagtcctcagtgacaggccttccctatctatccaggaactcttcttcattcagagttgtggccagtggcacgaatatcaagactgacagaccttatgcaatcaatggtggcatggctttgacgtatggatctgatgcatctgtcatgt

SEQ ID NO: 20250 - DNA, 361 bp, Glycine max
ctcacgcgtccgttgaaaccaaaatctccaatactagacatgtcaactctaatccggagatggcaatcatatcatacacactatactacttctatgattctggttgaatcctacatactgttaacactcatgaataaccattctgtagagccacgaatccggtctagattctcaactatcagaagagcatgagaaccttctacagcagcgataatgggaattccaattccaattcccattttatctccggtcatgtcgccgtttattgctgctgcggatgagaacaccaacacaaataacatcaacaacaatgggaagacaaagtcaccgaatttgcgcggtagcaacgacgacggaatgc

SEQ ID NO: 20251 - DNA, 486 bp, Glycine max
  modified_base (379)..(379): a, c, g, t, unknown, or other
  modified_base (389)..(389): a, c, g, t, unknown, or other
gcggttgatcactctgtcttctctttctctctggtcatttgatgtctctccccaccaaacggtcgagcaccgctggttcctccctgtcgccgccacctcctatgaaaaaggccaagtccctcctcctccgctcctcctccgacgaccacgacgccgttttggacccttcctccatgcctctcgacgacgatctccccaatgcccgcgccgccaatctcgcccgcaagaaagccaccccgccccaacccgccaagaagctcctcatcaagctccacaaagctaaaccaacattgcccacaaatttcgaggaggatacatgggcaaaactaaagtctgccatttgtgctatatttttgaagcaacctaactcttgtgactnggagaagctntatcaggctgtgaacgatctctgcctttataaaatgggtggaaatctttatcaacggattgaaaaggagtgtgaagcacatatatctgctgcactgc

SEQ ID NO: 20252 - DNA, 369 bp, Glycine max
  modified_base (124)..(124): a, c, g, t, unknown, or other
  modified_base (144)..(144): a, c, g, t, unknown, or other
  modified_base (147)..(147): a, c, g, t, unknown, or other
aatcactctatcttctctttctctctgtccagtttatgtctctccccaccaaactttcagtcacggctttttcctacctgtcgccgccacctcctattaaaaaagccaaatccctcctcctacnctcctactccaacaaccacnacnccttttttgacccttcctccattcctctctacaactatctccccaattcccgctccgccaatctcgcccgcaagaaagccacccctccccaacccgccaaaaatctcctcatcaagctccacaaagcttaaccaacatttgccacaaatttccaagaagatacatgggcaaaactaaaatcttccatttgtgctatatttattaaacaacctaactcttttt

SEQ ID NO: 20253 - DNA, 372 bp, Glycine max
cttcttctctggtctctggcttccttggtacgggaagaactcaatcttgtccatttcgcttgggtttttctttcttcgatctcttcaccttcctttcgaccactctcttatcaccgctcgctttcttaactagagccctctccgttgagggtttctccaggtgtggtttgatttacagtttctgatgctgaagaaataaaaaagcttgaaggcttttgctcttctgtgtgaaaaatgttggaaagtggtgcgaaattcccaggaataatagatctcaacaaaaataataacaactactatgatttctctcaaggcttttaccataagcttggggagggtaccaatatgtcaattgacaagtgtgggagcttg

SEQ ID NO: 20254 - DNA, 379 bp, Glycine max
cataccatcattcactaaattcatatgggtttgtctccattggttactcattttggccggccgaatatgaaaggggggctaacataccttacattatcgcaactcaggcgatcaaggagcgaaacatcattcacaaggtcacatcttcattaactgcatcaattattgttgaacatgtaatttatgaaaatgtcgatagtgaagtcatttgtatttttccttctatagagtaagtgtttctacaccttgtatttgagagagctgcatatattgagcagtctgaagctctgctataagatgaacagtcacctactaaatcggatagttttacaggcatgaagaaaaacaatgcatcttacaaatctagaaaaagtggatc

SEQ ID NO: 20255 - DNA, 309 bp, Glycine max
acgtagggatcaagtactaccttctttgggtgatggaagatgatgccttggcatcatgcgactccgttttatatcaaagttctgttacaaccttttgaatctttatgaaaaatccatttaattgttttcatgagtgtgtatttgtgtgtacgtatgtattctagtatgctatatatgcacttagtatgtatgtatgtattctactttgtgcgtatgtatgtatgtctggattgactaattgtttaagcttctaatcaacggtttttgctaattcatggcaaaaaaaaaaccaaaaaatttacaaaaacc

SEQ ID NO: 20256 - DNA, 267 bp, Glycine max
taccgatgaaggtgtaaaggcattgaagagttctacagccattgtgttacaccctggtcggagtacgattaccttgaatctaccacctcagaaaccaggatcttatgttctcggagttcttactgggcagattgggcatttgaggtttagatctcatagtttttcaaaagtgggtcccgctaatagtgttgatttaataagtattgaaaagccagttaacccaatcttgaaggtgtcaaaccttgaagccctggttatccttaatcc

SEQ ID NO: 20257 - DNA, 345 bp, Glycine max
cccacgcgtccgcccacgcgtccggtgaaaggtaaagcaaacatgcttgatcaggtcgaacaggctacaatcatggacaaggttgctggccagctccatctccggtctggtgtttctggtattaggagttatgaatgagcctactgtcaccccacaatgtaccaaagaccctattttgggaattactcgaatgctgcattgcagtatcctgagatgccctcatgcaaagctactatggatttgtctgctgctgcaacaactggctgctcctgctttggtgctgctccagcagagtaaggccattttcttatagactttctcatgggaggtgtttcaccatctgtc

SEQ ID NO: 20258 - DNA, 349 bp, Glycine max
acgcccacgcgtccgcgagaatgttgggtaactattgggttacaataaaagacatggaaaccaggcactgaaatatgcatatctattagttttgggccaaatttagaacaccaaggaaaaaaatgatcttgctgactcaacaagtgcacccacttctcaccttttcctctacctataagtctaattctccattgcacccccatgttcaactcaaggttggggttggtgtggttaccccattttcccaagtgcccattatgcccttttgcaaaggaaggccttacaggaggaggaggaaggggagcaggtgttcctcttctgctgcagcacaagctccgttgccacctga

SEQ ID NO: 20259 - DNA, 419 bp, Glycine max
ggaaggcgggggcgacgacgcgtccgtgatttgcagcaagctcttgagctgcaaagtttgaggctaatgggtctgcaacttgtggagatcaagaagcatcaccagcgtgcactctccactggaagcccaattccttcccccactcactctcctaacatgttcaaccaaaatattgttccttcttttcacatcaattcagaatccccaaaggagagtggttcaacttctgctccagctagtactgcatcagtttctgctggtcaacagccggtcaacatttctgttggcaaggaagtggttgtcaatggcgagaatggatataaagaaagcaatggcaagcagaactctagtcatgacgattgggatttgcaagaatgtttggagcataatcttcctgatagcccttttgcttccccaac

SEQ ID NO: 20260 - DNA, 277 bp, Glycine max
  modified_base (11)..(11): a, c, g, t, unknown, or other
cttacacttgnactattcatgaatacgctaatttaacactcaggtcatctcccatataaatatagctaattaaccagattgttgagggattctttaggtggtaaaaccaaaactatcattattgccacaatatccccttccattcactgtctggaataaacccttagtaccttggattatgcacaccgtgcctaaaatatcaagaacaaaccatagattaatcacaaaatgatgaaatctgcaatgattaatgatttgtattcagaaattgacagac

SEQ ID NO: 20261 - DNA, 413 bp, Glycine max
cccacgcgtccggcttgccgtcaacaacgattcctttcggttttctgtttctctggattcgggttcatttttacggctaccagaatgtccagctcatcggaatattcggcattttccggcccccgcccggccaagtcgccggccgagaagtccactttctctcagacttgtagtctattgagccaatacatcaaggaaaaaggtgccttcggagaccttaccctcgggatgactcgcacccccgatacttacggttcccctgagacatcgtgtcactctgcaacaaccatggagttgtttcccaccatcatcaagcaacggaacccaactactgtggatttcctatctccccagagtgcttatcctcaccactcagaggttccaaccatggtcaaatcaagtgcatttaagtc

SEQ ID NO: 20262 - DNA, 366 bp, Glycine max
  modified_base (353)..(353): a, c, g, t, unknown, or other
gcgctgccaacacattgatgagtactgctatctcagccttcccatctctcctttcttcctcaaaatccagatttgccaccgcagttcctctttctagctttggtgtcaccaatgcctcttcttctcgcttttctatgagtgctgactggatgccaggccagcctagacctccttaccttgatggttcagcacctggtgactttggattcgaccctcttcgtcttggtgaagtaccagagaatcttgagaggttcaaagagtcagaactcattcactgcagatgggccatgcttgctgttccagggattttggttccagaggcattgggcttaggcaactgggtaaaggctcangaatgggcagcag

SEQ ID NO: 20263 - DNA, 186 bp, Glycine max
ccttccctaaatataccttcacattctcctcctctgtctgatactcctctaaaactctactttcatttaaataaaaactttcccctttattatattaaccaccattatatttcttttcaccaaaatcctatcacatcatcttcatatcatcttcctttcctattaccttcttctattttctccatc

SEQ ID NO: 20264 - DNA, 465 bp, Glycine max
  modified_base (5)..(5): a, c, g, t, unknown, or other
ggaantaccgggccgaccgaggcgtacgcccacgcctccttccaaatcaatcaaattctttgagttgaacacaggggccaagattccttgtcttgtgttatggacttggcaagctgaacctggtgttgtagctgaagctctcaccacagccattcaggttggatacaggcatattgactgtgctagtgcgtataagaatcaagcagagattggttctgctcttaagaagctttttgatgatggtgtggtgaagcgtgaggacttatggatcacttccaaactctggtgttcagatcatgcaccagaagatgtgccaaaagcattggataaaacattacaggaattgcaacttgactatcttgacctctatctgatccactggccagtccgcatgaaaagtggaacatttggactcaataaagaatatcttgagcaaccagacattcccaatacatggagagcaat

SEQ ID NO: 20265 - DNA, 407 bp, Glycine max
cccaacacgacgagactgtcaccaatgacgaaattgctgctgacctcaaagagcatgtgatgaagcgtgtgatcccagagaagtaccttgatgagaagaccattttccacttgaacccttcaggccgttttgtcattggtggccctcatggcgatgctggtctcaccggccgcaagatcattatcgatacttatggaggatggggtgctcatggtggtggtgctttctccgggaaggaccctaccaaggttgataggagtggtgcttacattgtgagacaggctgctaagagcattgtggcaagtggacttgccagaatgtgcattgtgcaagtgtcttatgccattggtgtgcctgagcctttgtctgtgtttggtgacacctatggcactgggaaggatcatgat

SEQ ID NO: 20266 - DNA, 265 bp, Glycine max
cccacgcgtccgcaaacttttcacaaaattaaagagacccagttgatttttttctctttaggctgaggtattttgaagcatcgaacatgctacaacggcggcttctggagacggagctgagcatgccaccgtcgtacggcggcagcggcggaaacaacacgcgcgacacgttcatcagcgacgcgaacttcgacacaaacatggtgatcaatcctggcggcgctgctgtgcgctttgatatgcgcgctgggcctgaactccatcg

SEQ ID NO: 20267 - DNA, 464 bp, Glycine max
  modified_base (43)..(43): a, c, g, t, unknown, or other
  modified_base (81)..(81): a, c, g, t, unknown, or other
  modified_base (113)..(113): a, c, g, t, unknown, or other
  modified_base (132)..(132): a, c, g, t, unknown, or other
gacgcaccgattgacataaccctataccctaatccctaatcancccgaccccagcatggtgaagaataaggtggcccggtngtggctcaacagctctatatgtgtcctcatcnatcgccgtcgtcccctccnctcctccgccgtcgccagcccccttcgaacagcccaccgcgtccctccgtctcccgcccgtcgtgacccccctttgaacccaccgcctccgcgtcctccgtcgcctccctccgtccacgatcctccgccgacgcagagaatcgatgattcgccgcgggaagatcacggcgacggctttcgttccgcgcacgatgtgtctcgccaggcgcaattgctggccgagttgtcgaagaaggtggtggatatgagcgagttgcggagcctcgcgtgtcaaggtattcctgatgctgctgggatacgttctactgtgtggaagcttttgcttggatatc

SEQ ID NO: 20268 - DNA, 343 bp, Glycine max
cccacgcgtccgcacgcctcagtagaccatggcctcattgggtgggttacaaaatctaagcggcatcaattctcttatcaaaaaagagggtccaaaagtcaatgcgaagttcgagctgaagccgccaccatatccactgaatggtttggagccggtgatgagccatcagacacttgagtttcattgggggaaacaccacaagacatatgtggaaaatctgaaaaaacaaattgttgggacagagcttgatgggaaatcactagaagagattatagtgacatcatataataagggtgacattcttccagctttcaacaatgcagcacaggtatggaaccatgac

SEQ ID NO: 20269 - DNA, 360 bp, Glycine max
  modified_base (247)..(247): a, c, g, t, unknown, or other
  modified_base (320)..(320): a, c, g, t, unknown, or other
  modified_base (346)..(346): a, c, g, t, unknown, or other
  modified_base (353)..(353): a, c, g, t, unknown, or other
gtggaaagagggaaccgtacaaagaagataacgctaacgcggtgaccctttttgtgtgttgacattaaagaatggagaaagagggatgaaagaagattttgggaaggaaatataaaacatttattcattgtcaccaaattttgttccctgcaagagagagaagaagaagttgttgggttgagttgggtttggattggatttctaatctaatctatacctttctttttcctatgcttttaaggcacanatccttctcccttctctcttctttcttcttcttctcctgacccttattattattccttgcccttaccctttangcaagggaaggaagaaagaataactnatatatnatcttta

SEQ ID NO: 20270 - DNA, 407 bp, Glycine max
ccggggcggccgacgcgtacgcccacgcgtcctcccactcgtccggtccagattagtaccacaaaaatggagaaatagaatagctgaatatcgtatagctcaaaataaaaatttaaccaaatgcaattcatatgaaaaaagccaattaattctttacaaagaacaacaagtaaacgcattaaaaaaaaaaattagaaaacaatatagatacgatcttttatcctataattttatcaattatgcagataagaaagactcatatatttatggatatagatccctatttcaagtaaaaaaaaaccaagtgatttcttctaattacaacacgtataaaaaaaaattattggatatcataaataatctctttatcaagaattatatattcgaagatgccattctagatattg

SEQ ID NO: 20271 - DNA, 466 bp, Glycine max
  modified_base (436)..(436): a, c, g, t, unknown, or other
gaccgagccattcttcctttagcatcaaagataagaggcaaaccggttaggatcagtgcagagagagagaatgggacttggcttgtttttctcttttatccacttggtaacttcggctattgtcgaatccgtaaggcgaaggagagcaatcaaggagggatatcttaacaatgccaatggtgtgttgcatatgtctgcaatgtggcttttcccacaactttgcttgggtggaatagctgaagcattcaatgcaataggccaaaatgagttctattacacagagtttcctaggaccatgtccagtgttgctgcttccctttctggactgggaatggctgcaggaaaactggtgtctagttttgtcttcagcgttgtacaaaatgctacttcaagaggggggaaaagaggttgggttttggataacattaacaagggntcgtatgacaagtactactgggttatttct

SEQ ID NO: 20272 - DNA, 194 bp, Glycine max
caccatcttaaaaaccattttttctcattctctcaatctaacaaactttcttcttcttcttttatatccacatcactttaacattttaaagcaaatcaatccgaataatcttttataactttcatttacttaagcttctttcttcccaactatatattatcttccccacaacaaaaatattcttttctcttttc

SEQ ID NO: 20273 - DNA, 325 bp, Glycine max
caagagccttctctttgttccgttccgcgaccatgtctcatgagacatgcccttgcgtaaagaacttccttcttttggattctgatgggaaacgtgtcgcagtcaaatacttctctgaagactgggcaacgaatagtgccaaggaaaattttgagaaagttgtcttcaacaagactcagaagaccaatgcccgcacagaagcggaaatagcaatgtttgagaataacattgttgtttacaagtttgtccaagatcttcacttctttgttaccggtggtgattatgaaaatgagcttatcttagccacagttctgcaggcattttt

SEQ ID NO: 20274 - DNA, 310 bp, Glycine max
gccatgttgaatgttactttcatgtgcaggtctagcatatttgacgccaaggccggaattgctttgaatgacaactttgtaaaacttgtttcctggtatgacaacgaatggggttacagttcccgtgtgattgatttgattgtccacattgcatccgtggcttaaagaattgagtctgagcttggatatcatcgctacaccgttccaaatttttatcttaatcgagtttattttagtgtgaattcggaataaacactttgtgttgctgtgagagatatcattgaaaaacagtgcaatatgttgagttggt

SEQ ID NO: 20275 - DNA, 367 bp, Glycine max
cgcgtaaccccacgcgtgcggctggaagaatatggcttcatttgtttctacccactgtatcctgcctagcggggttggatttgtgcatgaccaagatcgttcttgtggtagaactaacactttgcatcttcaaaatgctcctaaaagccctagctctctctcctttttgctctccgtgcgagcttcagaaagtagatcagatgccgttgttgttcagagcaagggtcgatcgtctttttctcaaacagctgctgtgaggcatcttacaggttctgttaccagagcccatggactttcgtttgctgtggttgttgctagatttaaatgaaattgtaccaaaccgctctttgaaagtgctttgggtact

SEQ ID NO: 20276 - DNA, 359 bp, Glycine max
aaaaacaagagcaaattgggatcgaagaatttgaagaacaccacaagcaagatgcatgttggtgtggtgctcaacacgcaatcctactgcagaggcctagaacctccttcatcttctccttccgtcgtttccaacaagggaacaaggactttgagtttcaggaggctgctgctgcgtccttctcttgggattcatttatcgcgtagctttgctttaaagtgtgttgttactccgaacccagctgtggaattgccattaactgctgaaaatgtaaaaagtgtattggatgaaattcgaccctatctcattgcaaacggtgggaatgtggctttacatcaaattgatggcaatgttgtgcg

SEQ ID NO: 20277 - DNA, 385 bp, Glycine max
ctttttctctctcttccctcttcaatcttcacattttctctatggaaaatcatgggaacgagcgaatcttggaccagtccttttacttcaacacttaacgggtcgactcgcccgagtctaagattcgtcgagttgactcgtccgattcgggtattaactcgtccgagtctcaactcgaatcggtcctcgactcgtcggaggtgcagctacaagacgacatttttaacatgcttgacgacacggacaatgtgcccgagcgtgactcggtgcagggtcttgactcagtgatcaaaagcttcgaggatgagataaatgctccaggttcggattctggttccggtgacccggcccaggaacccgactccggggagctacaatctaactt

SEQ ID NO: 20278 - DNA, 265 bp, Glycine max
cccactccttcggtcggtacctgatatttcttgagttgcaaaaattaaaacaatggtttcggctgagaccatgaacatcccgtacggcttgtgcttcaaggtttatgccaaggtcatcgaagttgagggcccctgtggaaaatctgttcgagacttcaagcacttgaatctcaattttgagcttatcactgacgaaaacggttaattgaagctgaatgtggacgcctgcttcagttctcgaaaaacatccagcgccattcacacc

SEQ ID NO: 20279 - DNA, 401 bp, Glycine max
  modified_base (19)..(19): a, c, g, t, unknown, or other
  modified_base (66)..(66): a, c, g, t, unknown, or other
  modified_base (202)..(202): a, c, g, t, unknown, or other
  modified_base (320)..(320): a, c, g, t, unknown, or other
  modified_base (330)..(330): a, c, g, t, unknown, or other
acgctttcgcgtctcagcnctccagtttcggatcttctcccttctcttcaccaatttccaggattntgaaaaatggcgagattccaaaccgaggattgatggaagccagtgttcaaccaagggtcgatcatgcttcgtccagggacccagcgggcacactttttaactgtgaagggtggtcgatgcttaagatggtgatgcnagaaaggggtcgttctgatggtcctcaatttcccgccaaatgccgaattggctgaatgggtttggttggtggaatgagacttggaatggatcattattcactggccagaaattgatcnaagtggatantgatgaaaagaggggtgctacttgtgacccttgcgcaatgcccaaaattgacatgttcaaaaggatcaatg

SEQ ID NO: 20280 - DNA, 352 bp, Glycine max
gacccacgcgtgcgcccacgcgtccggtgttagggaggacaaataccgcccctttatgcgcgaagacagtgagaagaacagcaaatggagatatggtgctcctccaaattatgacgttgtcaacaaattatttgatgaaggcagaaccaaggtatggcctccgggttcacttgaagaaaaggtgcagactttagtgaagaattgggagatggaaatgttccacaaggaggatttcaaggataacagatcagtggacccagagaaatacactttcagcctaaacggaaagaagcctattagtttggaagagaaaaagaagcttggaggaaggtatattccactgctgcaaacc

SEQ ID NO: 20281 - DNA, 314 bp, Glycine max
cccacgcgtccgcctgccgctactttccctttcccggttaatctgctcccgagtttgctcagtcatgaaaccccaaccctaatcctaatcccaatcctctcatccttcaatttaaacccccattcccattgctatcttgtcatttttcccgacaaattgtctctccctcttccgtttcattctcacaatttcaaacatgaatcgtgtatcggtgttccggtagagcatatgacgaaggaggttatcggaactgcgaatcgattgcatgggtttagagaatgccagagcttcgtaaaggagtgcgacgtgggcgt

SEQ ID NO: 20282 - DNA, 409 bp, Glycine max
ccgaattgaattccggggccggccgacgcattcgcaccatactaattggtttggctggttcaattctgaccaacaccttttaattttcgacttgcttgaattttattggaagccatggattgttcatcatggattaacacttccttggatctcaacattaatccccgcagagttcatgaagaagttcccaaggaggtagaaagcgagcttttctctttgggaatgaccaagtttaacgtggaagaagagtctactagtgacttggaagaggaactgaagcgggtgactgcagaaaacaagaagttggccgaaatgctctcagtggtgtgtgagaactacaacactttgagaaaccatttgatggaatgcatgaggaaaaatggtgaaaacgaggtcagcccaacatcaa

SEQ ID NO: 20283 - DNA, 450 bp, Glycine max
  modified_base (16)..(16): a, c, g, t, unknown, or other
acgcgtccgcccctcntccgcttttctgttatcgccatggatttcgagagtagaaggcttcatgggctgatctccgttgttgccatcgttgctcttagcttcacagctgaaaaatgcagggaacttgttggggaggaggggtcatctcagagtggaaagtttacgatcttaaattgcttcgatatgggttctggaactgtagcatgtgctgtcaaggaaggtgtgaagctctatttttacaatattaggtcttctcatgctgaaagagcaaggagccaagcaattgagtctgcccttgttgatgctgttgctcatgggatgtccccaacggattctgcaaaacatgctcaaaaagaaggtaagaaggctgcaaacttggcttcccgtcaagccaagcggattataagtcccatcatttcttctggattggacctttttgaggctttttac

SEQ ID NO: 20284 - DNA, 304 bp, Glycine max
cccacgcgtccgttccttttgaaggttagaagtgctacaatacaaacaatggcagctactgaggaagatgtgaagcttttgggtattgtgggaagcccatttgtgtgcagggtccagattgcccttaagttgaagggagttgaatacaaatttttggaagaaaatttgggcaacaagagtgatttgcttctcaaatacaaccctgttcacaagaaggttccagtgtttgttcacaatgagaagcccatagcagagtctcttgtgattggtgaatacattgatgagacatggaagaacaacccca

SEQ ID NO: 20285 - DNA, 376 bp, Glycine max
cccacgcgtccggttttgcattaccctcagaggaccaactcttgggattatccgtggggaggcacattttcttgtgtgccaccatcgacggcaagctatgcatgcgagcctacactccaacaagtagtgtggatgaagtgggtttctttgatctactcatcaaggtgtacttcaaaggtgtgcatcccaagtttccaaatggaggactcatgtctcaacatttggactctctacccattggatccatgttggacgtgaagggcccattaggtcacatagaatacaccggaagaagcaacttcatggttcatggaaaaccaagattcgccaagaggttggccatgttggctggtggaactgggatcacgcccattta

SEQ ID NO: 20286 - DNA, 428 bp, Glycine max
gcgctgcattccgcagggtgagagtgtagacggggaatagaattgtgttcatctatgaaagaagagaacgacacaaactataagatcatgaaacggggaatttagtttttggagaaaaggaagtaaagacacactccctcctcctcctcctcctgctctgtctccggcttcaatttcggattccaaattgagttgatttcggagattataaattttcttttacttttttatttttgcgaaaaaatggaagaggcaaaggcattgcaccagcaacaacaacaacaacagcagcagcaacaacttctgctacaacaacagcagcaacaacaacatcaacaacattatctgctcttacagcagttgcagaagcagcaacagcaacaacagcaagctgccgccatttctcgcttcccttccaacattgacgc

SEQ ID NO: 20287 - DNA, 303 bp, Glycine max
  modified_base (87)..(87): a, c, g, t, unknown, or other
ctaaggcttattttccttttcttttagaattcgaacacgctttgcgtcttcaaagggaagaggatgggagaatggaaggacactgangcttacgaggaagagctcatcgactacgaagaagaagaagaaaaagctcccgattccgctaaacccgttactgaatctggcaagaagggttatgttggcatccatagttcgggatttccagacttactgttgaaaccagagcttcttcgagccattgtagattcaggatctgagcatccttcagaagtgcaacacgaatgcatccctcaagcaatc

SEQ ID NO: 20288 - DNA, 363 bp, Glycine max
gccacttcaagtttggtatcttcttgttcttctctggctgggtcctcgtcatgtctgtctgcgtgcttttcctgttgcccgagactaataatgtccccatcgaagagatgaccgagagagtgtggaagcagcattggttctggaagaggtttatcgatgatgccgcggatgagaaagtagcccatgtctctaatggtaatggatttgatccaacctccaggttgtaaatcatttgcattgagtattttagactctagagtaagtacagtacatgcttatgtgggttagtaacaaattaagcaagttatttttttatttcccccaccccatccatgttggtggcctatgcctgcaacaacattc

SEQ ID NO: 20289 - DNA, 289 bp, Glycine max
tgaatctcagaattctctaaaagagatctttttctgctctttgaagaaagaaggggctttgcttgattttggagatgtctctgctctcagatctcatcaaccttaacctctccgataccaccgagaaggtgatcgcagagtacatatggatcggtggatcaggaatggacctgaggagcatagcaaggactctcccatgaccagttagcgacccttcagagcttcccaagtggaactatgatggttccagcacatgtcaagctcctggtgaagacagtgaagtgattta

SEQ ID NO: 20290 - DNA, 353 bp, Glycine max
gccatcctgcattatctgtttagctcaaataattttgtgaagcatttttattggtagaaatggagagtgagtcggtgaaacgcagaattcacatgattgctgctcactttgcacccaatgatgatatttcaactacccacgttctgcctatgaactgtagtggcagtctgaactctgtgctccggagatgtgataataaggtgtattttgcacgccaagcatctgcttctcttggttattttatgaggcagacttcaattgaagagggtggctcaactggctttattgctcccaaaacccatcctggtgctgctgcatctgaaagtccttctaatgcaagagcaccatgtttt

SEQ ID NO: 20291 - DNA, 419 bp, Glycine max
gcggtttattagtattattatcactagctacctgctatcaaagcatcacaaatggcttctacagacaaggctggcggcgaccctgaatacagaacatcttcaactccagctcctgctggtgttgattactttaaatttgatgtcatcctaaggtttctattgtttgcagcatcactggtagctgttgtggtgatcgtcactgctaatcaaacagaggttattcgtgttccacagcctgtgccatggccagccaagttcagatactcaccagcctttgtttattttgtagctgcattgtccgttactggcctctacagtatcattacaacacttgcatcactctttgccagtaacaagccagccctcaaaaccaagttgctcctttactttatcttatgggatgcgctgatattggggat

SEQ ID NO: 20292 - DNA, 394 bp, Glycine max
gaacccttcgcttactatttcaagggtagtgctcttaatttgttccctgttgaccgaccctaatccttaccatcctttggtcccttaaattgcccacatgttcaagacagacacgaacaagttccagtcaactgccacaaactgtacccagaaatatgccatgggttaagtgaccttgtggtatgtttgagggagagcctttctactctcagtgtttaggtctctcagcccttgtaggaatatttgtcgttttaaatcatgattaaagcccctccagttgaagatgaatgggggaaaacgtttctcctgctgtttgtattgcaaatgttcatggtaatttagaacagtgaaatgtttgcccaattaaaagttatgctcaagtttttaaccgttc

SEQ ID NO: 20293 - DNA, 426 bp, Glycine max
gcgcccacgcgtccgtccatttcaaccgacacgccactacccttctctcacaaatctatttccggtccagtccctcagagagagcaagatcacccttctatagagagaaaacacacacacacacacacaaaacaaaactcttaaagagggtgaagattttttggaacagaataagagtatggcccttacaaaacaaatcttgggttcttcattgctagagaggtccatgtttgttccttcttcttccccttcatcacttctcaaccaaactcggttcttagttcctttggagaacaagagagttgtgagggtgaagagagctgcaaagtttcctgtggcagctataagtgaggatttgatgaaaggttcttcttcttctccttcatcatcatcatcttcatccccctcttcttcttctcttctggg

SEQ ID NO: 20294 - DNA, 393 bp, Glycine max
gtgagaatttgccaaagaagaagaagaagaaacatggtggaaggttagagagtgagagagtgtgaagcatggaagtgggtatgcttccaatctcagcttcaaagagaggaaaactcttggctgctggttacaccactctcgatgccattgctcgtgcctcccccacccaccttgttcgagatattgatgtttctgagagtgaagccacggaaattctgaatcttgcaagcaaacctagtgctttggagagaccgaatgggtctcacactgctgttgttggtgatctggataacatccttggtggaggaattaagtgcaaagaagtcactgaaataagtggagttccaggcattggtaaaacacaaattgggattcaacttgcggtaaatgttc

SEQ ID NO: 20295 - DNA, 418 bp, Glycine max
  modified_base (386)..(386): a, c, g, t, unknown, or other
cccacgcgtccgaaagaatgtttacttaagggatatctggccatccactcaagaaattgcagaggctgtccaatccagtgtgttgcctgacatgttccgaagtacatatgaagctattaccaaaggtaacactatgtggaaccaactacaagttcctgctgagaccctgtactcatgggaccccaagtcaacatatattcatgaacctccatacttcaagggcatgaccatggatcctcctggagctcatggtgtgaaagatgcctattgtctgctgaattttggtgacagtataacgaccgatcacatttctcctgctggtaacattaacaaggatagtcctgctgcaaaataccttctggagcgaggtgtggaacaaaaagacntcaactcttatggaagtcgtcgtggcaatgat

SEQ ID NO: 20296 - DNA, 276 bp, Glycine max
  modified_base (49)..(49): a, c, g, t, unknown, or other
aattctttatctctatataatgacctaatcttatacctcatccaccaantaatggcaagagtcattcaaaccataaccccatactctacactctaactatccccacacatccctaccaccgttcatatcaacttactttaacaaataaaaacctacccactcactctacaccctatcacatatcaacaaatgtggaagagatcataaataactctcataactcatacaccgcacatcctaccatcggtcattacttttctctcttgaacaaaccat

SEQ ID NO: 20297 - DNA, 468 bp, Glycine max
tgctatttgtcttggtactgctaagggtcttgcatttcttcatgaagaactttcaccacctattgtacacagagacatcaaagctagtaatgtactacttgacagagatttcaatcccaaaataggtgattttgggctggctaaattatttccagatgacatcactcacattagcacaagaattgctggaacaactggttacttagcaccagaatatgcattaggtggccagttaaccaagaaggctgatatatacagctttggggttcttatacttgaaataattagtggcagaagcagtgccagaaggacaaacgggggaggatcacacaaattcctcttggaatgggcctggcaactttatgaagagaggaaattgttggagtttgtagatcaagacatggaagaatttcctgaggaagaggtaattaggtacatgaaggttgctcttttctgcacacagtcagc

SEQ ID NO: 20298 - DNA, 366 bp, Glycine max
  modified_base (331)..(331): a, c, g, t, unknown, or other
atgcctcaacgaggaactactgattaatttatgtatgatcaacttcatgtattaaagatggggttctgcgctacgtatactaattaataataaaattagagctgcagctctaacagtgtgtgatatgaataattacttgagaggggggatacgacacaccttcttgagttcataaatttcaattccgatctttttggttgtggtgtattattaataacaatttgttattattaattattaagtgacttctataataacaatttgttaactttactacttcctctactttgttataaatgtatctttctgtgttaagttgaggtcttctttntatatattaataaaattgtattaaattttatgcac

SEQ ID NO: 20299 - DNA, 409 bp, Glycine max
gcccgcgccgccctccagacctccgccatcgaggccaaatgcctctccgtctctggtgagggctcccacctctccgccctcctctgcctcctcctcgccgcgctcccgcgcctcttccccgccgacgccgccctctccgccaccttctgcctccgcgggctctgggctctccagagcggcctctccctctacgccgacgccttcatccccgagggctgccaccgcctcctcgacgtcaccagcggcgtcgagggctccacacagtgcgatctggacgagtccaagctccgcgccgtcgccatccttgatctcgcattcttgatccacgccatcatcgtggtcctaatcgtgctcctcacttatgccctcttcgccagaagcttcggcgggaggaggctcggatcctatg

SEQ ID NO: 20300 - DNA, 299 bp, Glycine max
aaaaaaaaggcgaaaattggaaaggggaatgaacctttttccctgggggggggcatacaatacattttttaccccccttttttttgcccaaattgccctttttgggggaatgaataaaaaaaagtaaagaaggcttgttacccccttcctcatttggggtagttgggaaggccccaaaccttaagggggaagtgggcccaaataaccccccaaatgcccccaaaaaaaaaccccccggggaacttggcccccccataaaaaatttggaactgatcgggctcctttttggggccccttaa

SEQ ID NO: 20301 - DNA, 397 bp, Glycine max
cacacaattccaattcctctggatctcgtctcgatcgatagatctcgaacatgagcactggggagcttctcaacatcgaacctctcgaactcaagttcccctttgagctgaagaagcagatctcatgttctcttcaattgtccaataagaccgatagctatgtagccttcaaggtgaaaacaaccaatccgaagaagtattgtgttcgtccgaacactggggttgtcacgcctcgatctacgtgtgatgttatcgttaccatgcaagcgcaaaaagaggctcctgctgatatgcaatgcaaggataagtttcttcttcagagtgtaaaaactgttgatggtaccagtccgaaggatatcactgcagacatgttcaacaaggaggcaaggcatgtggt

SEQ ID NO: 20302 - DNA, 466 bp, Glycine max
ctcgcaagcggagccccaatttctccttcacgaaccctaattcactcttcccattcgaaatctcgatcaccttttcgattcaacctttctctcctcgctaatctcttcgttcgcctcgcacatcaaggtgagggattgaaattgaatcctcaagatgccagctacagcaggaagggttcgcatgcctgcgaacaatagggttcacagcagtgcagcgcttcaaacccatggtatatggcaaagtgccatcggctatgatccttatgcacccaataaggaagacaagaaggattcttctcaaaatctgccaaatgcagagcctgatgctgagaatgcatatgctagcttccaggggcttctacagcttgctaagataacaaatgctgaggtggatgtatcccgtggggcctgcaaaaagtgtggccgtgttgggcacctcaagtttcagtgcaagaactatgtgaaa

SEQ ID NO: 20303 - DNA, 446 bp, Glycine max
cccacgcgtccggtggttcacacttcacacggagaacggagtcggaggatccgttttcgcgggccggcaaccccaccgagtaacaaacgaagaatctctaccctcttcgctttcacttctcgccaagtttagttaagcaaccagacaatgaagcacactgacaatggagctttcaactcggaacacaaagttcttcttcaccaatccattgcccgttacttgaaacacagtggcttctacaaaaccctaaaaaagtttcgctctgaagcgcaattcgagaaaaatgatttgaagggatccccagttgatctggaagaaatgtgcctcaagtattttgaaatatgtggcaaagatgccaagtcaaatcttaatgatcagaatgagcaaggtgtcaacagcaaaaacaaagaagagggtaaatccaaggaaaagaaaaaaagaatagc

SEQ ID NO: 20304 - DNA, 384 bp, Glycine max
atggcttctgcttctaatgccatcatccaatgcacctcttcttcttcttcttcgtttgagtatgacgtgtttgtgagcttccgcggtgaatacacacgcaacagcttcaccgcttttctttttgaagctctgaaaaaacaaggcatcgaggccttcaaagatgataaagatatcaagaaaggcgaatccatagcaccagaacctatacgaaccattggaaggtcttatggtttccctggtggcctttccaaaggcctttccttcctaaactggtgcctgcgtgaactagcacatatctggaattgctttcaaccatctaccagacatcttctggctattttctatgatgttgatccatcacaagtgcgaaaactgagtggagac

SEQ ID NO: 20305 - DNA, 452 bp, Glycine max
tcggctttgatttctctctcctcgactcgatcccaattccactagggattcaattgcgatgcgattccgagcttgttagatccacgacaaggtttcgtttcccagattcttttgtaaaaaaaaattcttcctctgcccaacaggtaagttgtaaaaaaatggaccatgacaagactgggtgccaagctcctcctgaaggtcctatattgtgcatcaacaactgtgggttttttggaagtgcagctaccatgaacatgtgttctaaatgccacaaagacatattgctgaaacaggagcaggccaagcttgcagcatcatccattgggaatattatgaatgggtcatcaagcagcactgaaaaggaacctgttgttgctgctgctgctaatattgatatcccagttattccagtagagcctaaaactgtctttgtgcaaccctttatttggttc

SEQ ID NO: 20306 - DNA, 363 bp, Glycine max
  modified_base (9)..(9): a, c, g, t, unknown, or other
  modified_base (16)..(16): a, c, g, t, unknown, or other
ttcctctcnatctcgnttttatttttagatctcgaacatctacactggggaagttttcatcatcaaactttttaaacaaaactacccattttatctaaagaatcaaatctcaacttctcttcaattgtccataaataccctatactatctatccttctaggcgaaaacaccctttcctttaaaatataaaaaaaaaatccaacacagttgttgtcacccctcaatcttccttttattttatcattaccattctaacacataaatatgcttccctctaattttcaattcaatcatttatttttttttcacatttatcaatctttttatattaccattcccaataatatcactgcatacattttc

SEQ ID NO: 20307 - DNA, 396 bp, Glycine max
  modified_base (30)..(30): a, c, g, t, unknown, or other
ccggggggacgactctttctgttgttgtanaactcgttcttgttcttttgatgctctgtgtttgtttttgtaaagtcgggcacctgaaaatgtcttgctgctgtgttaactgtggttgctgaagctcctgcaagtgcggcatctgctgcggaggctgcaagatgtacccagacttgatctacactgtttcaaccaccaccgagaccttggtcatgggagtggcacctgttaaggctcaatttgagggtgctgaaatgggtgtgcccgctgagaacgatggctgcaaatgtggaccaaactgctcctgctacccctgcacttgcaagtgaggtgttgggagagcaagctttaagcagtgatagcccttaattaggaatatatgataaactattaatg

SEQ ID NO: 20308 - DNA, 454 bp, Glycine max
cccacgcgtccggagagagagagagaatttcatatacatgctatgatttttctttttgaagtgcattaaaatgaatgagcagaaaccttgtttttctttggtctcactttagctagcatagttatacaatttactgattgatggaagctgttattattgtttatttggtttttttaagtatttgatttgatgattcaaatgtgaaaaaacaaaattgtgcacatggtttcgtgcaatttttatatggccacatggagtatctaagtatagaagtatttgatgcccggtcattatcattacttgatcatgaaatttttattaacagcaaccaggcattgggggtgaagtagtgccacaccaggataactcgtttctttatactgaaccacaaacgtgcaccgggctgtggctggccctagaagatgcaaacatattaaatggttgcctttgggca

SEQ ID NO: 20309 - DNA, 462 bp, Glycine max
acgcgtacgcttgcttccacgcgtacgcattcacccaatttttttctgtcctcttttcctctcagaggagcctctgagtctgctcaggtgttccttgtcaagagatccttttgtttttgaggtgtgaagggaaagagaaaaaagatgaatcagtgtggttatcagcagaagaaggccttgacaagctgtgaggagatgaggatggaatctgtggtgtgccctaaacctcgaagattgggcctgttgaaccactcaacctttgataaccacatcagacccttgaggccaccctttatcaactaccaatcagaaattgaagattcaggagttggggctgagcttatggacattattctccccaagagatctggggggcaagtggcttcatcaccgccatttttctgtggatctccacctagcagggcttcaaaccctgtgatccaagatgagcaatttggtagt

SEQ ID NO: 20310 - DNA, 401 bp, Glycine max
cccacgcgtccgaagaaacgggccacacaaaaatagtggtgcctactttgtttgacataatggctcaactgcagaagcaacaaaacttctgctttgtccttcttctctttgtggcactgggtatagcttatgctagagaagcttttgaagttagcttccaacagaactacaagattgcatggggaaagcatcatatcttctttctacagcatggtagagaagttcaactctcaattgataagacttcaggggctggtttcagatcaaaattggagtatgcttctggattcttccaaatgagaataaagatacccaacaaggactgtagaggagttgtgacagccttttatctgacttcaactgcctataaacatttgggaagcaaacatgacgagattgac

SEQ ID NO: 20311 - DNA, 385 bp, Glycine max
cgcagagatggacgcatatcacaggcttccgatgtgagtaacttgcctgctccttttgacgctgttgatgttcagaaacaaaagttcgcagcaaagggtctcaacactcaagacctcgtcacccttgtcggtggacatagcattggtactacagcatgccaattcttcagtaatagattatacaacttcactgcaaatggtcctgactcttccatcaaccctttatttctttctcaacttagagcactctgcccacaaaatagtggcggttcaaaccgagtggctcttgatacgggtagtcaaaccagatttgacacatcttactttgctaatttgaggattggccgtggaattctgcagtctgatcaagcactttggaatgatc

SEQ ID NO: 20312 - DNA, 398 bp, Glycine max
cccacgcgttcgggaagtcgatgcccaccctatccgagctatgaagctttctgtctcacctgttgtgcgtgttgctgttcaatgtaaggttgcatcacatcttcccaagcttgttgaaggtcttaagcggttggctaagtcagatcctatggttgtttgtaccattgaagagtctggtgaacacattgttgctggtgcaggagagcttcatcttgagatctgtctgaaggacttgcaggatgattccatgggtggagctgagatcatcaaatctgaccctgttgtgtcattcatggagactgttttggagagatcatgccgcaccgtgatgagcaaatcacccaacatgcacatccgtctgtacatggaagcaagaccattggaggaaggtcttgctg

SEQ ID NO: 20313 - DNA, 356 bp, Glycine max
cccacgcgtccgggtcaacaccgtattgaaaacagttgagccgacagaaagctctttgcggagctggaactccgaggaatttgggtctctgggtgaaaagcccaccatcctggtctccgagagacttggagaggcaggactgcaggtgttacgcggtgttggacacgtggaatgcgcgtatgagctctcgcaggaggagttgtgcacgaagatctcgtgctgtgacgctcttatagtgaggagcgggacgaaggtgacaagggaagtgtttgaagctgccaaaggaaggttgaaggttgtgggaagagccggcgtggggattgacaacgtggatttgcaagcagccaccgaatttg

SEQ ID NO: 20314 - DNA, 392 bp, Glycine max
cccggacttcctccccctcctccgcgcctcctccctcccctaccagctcaccgccccggccgtcgcgctcctcctcgtcttccgcaccgaggcctcctactcccgcttcgtcgaggggaaaaaggcctggaccatcgtcatcgccggcaacttcgccatcaagcacgcgctcttacactacatcattgccttccccattgcgcttaagtgccacgtgctgtatggttcggatgttaggagtgatcttcagcatttgctagaagtggatgatctggcggtggtcatgaattcgaagcaccggcctcgctgcattattgagtttatatcgcagagcatccgtttactgaaattggaggagtctagaagaaatgccctggaatcaaagatgactt

SEQ ID NO: 20315 - DNA, 299 bp, Glycine max
aaactttcctcccaccttgagttttacctactatgaatcacataatggctcagctgcacatacaacaaacctccttctttccccttcctctatttgtgacactccttataacttatactctataagcttttataaatagcttccaacataactacaatatttcataatgaaagcatcataccttctttctacatcatcttcaataacatcaactctcaatttataatacttcaggaacttgtttcatatcaaaaatctaatattcctctgtattctttccaatcagaataaaaattccc

SEQ ID NO: 20316 - DNA, 349 bp, Glycine max
aaactctgaaaccctcaactcaaatccaatcctttggtgggtttcgaattggagggcaacgaaattctaaacacatggactcagctctgtcgcggttgcatctccacaatctccctcctctttcctccgccgctcaccgccctctcttgcagcctctcgccgccgccgcttctttctaccgctcttctcctcctctcccacgcctccgtctctcgccgcttctcgctgctaacaccctcaccgctaatgacgtctcgccaagaagtggactatacactgtcggtgactttatgacaaagaaagaggatttacatgtggtgaaacccacaacatctgtggatgaaagctt

SEQ ID NO: 20317 - DNA, 396 bp, Glycine max
cttcaattcaataatttagtaaaaatgttgtcttctctgctgaacccttccttcaccaccagccttccaatccattcaattttaatccctaataaccgccgcgcctccaccgtagtatcatgcacctcctcacacctcaccaccaacaaccactcccatgtttcttcgccgccgaacatcaaggacgaggcccgccgccgccccgcggcggagaacgacttcacggcgaagtacgtccccttcaacgccggcttcgactcgccggaaacctactcgctcgacgaaatcgtgtaccgcagccgttccggcggactcctcgacgtgcagcatgacatggaggctttagggcgcttcgacggcgcgtactggcgcgcgctgttcgactcgcgcgtgggg

SEQ ID NO: 20318 - DNA, 382 bp, Glycine max
  modified_base (55)..(55): a, c, g, t, unknown, or other
cccacgcgtccgcaacgcagtcctttttctatttgtatgtttgtatgagactganaaagatagagagatagtgtgtgcagaagatgtggctattcggcagaaaaggggcttctgggttttcatcatcatccactgcagagcaagtcactgaaggaattgatggaactggtttcactgccattgtcacaggggcatccagtggtattggcactgagactacgcgtgttcttgctttgcgtggtgtccatgtgattatgggtgtgagaaatatgcttgctgctaaagatgtcaaagaaacaatactcaaggagattccctccgctaaagttgatgccatggagttagatctcagttcgatgaagtctgtcaagaaatttgcatc

SEQ ID NO: 20319 - DNA, 357 bp, Glycine max
  modified_base (95)..(95): a, c, g, t, unknown, or other
tcgtcttaccagaggaagaatcctcagaacctgtaaatccatcaaaggacaacatggatgattgcacacttctgctttcttcaattgaatctgangagaatgtgaagttaccagtctcagctaaaatcaaacaccaaattggaaagcttttagtcaactccaatttcagagccatattttcaccagcaactcttggagcgattgttggctttattgttggagtagttccccagatacgtaaattgatgattggcggcgatgcttcacttcatgtgattcaagactcagttaccatggttggtgaagcagccgtcccagttataacccttataatgggagcaaaccctccttaaaggt

SEQ ID NO: 20320 - DNA, 465 bp, Glycine max
ggcctaccatgattgaagtggctgaggagctagatcttatcaggcgcagtgggtgggcgaccatggaggaaaccatatgcatggcttcttcggttgggtccgtgtgttcatcgcctcgaaatggaagtgttaattcacttagaggtgttagttttgagagagctgcaggacttgggagtgagacattgattgttccccacaagactgatgtttttttgcaatcaattgaggaggtgaaggacagctctcctgtgtctgtgcatgatagttggttaagtggaactagctcaccttcaacaaatagcttgttaggacatgtagttcagtgacatatatacttattttgggtggaacacctattatttgaatggcaaaagtcattaatgttttccttttctcttttggaggtgtaggatataaccattttggtgtatgattggcaccaagattctgctttcggttttc

SEQ ID NO: 20321 - DNA, 475 bp, Glycine max
  modified_base (17)..(17): a, c, g, t, unknown, or other
gcgaaagaatgcattanagctctagataatgaccaagggcatatacctttcagaggaagtaaattgactgagagttctgcgagattcatttgtcggtgattcgcgcactgtaatgatatcatgcatttcacctagctcaggttcatgtgagcatactcttaacacattaagatatgctgacagagttaagagcctgtcaaaagggaacagctctagaagggatcccctttcctcctcaaaccttagagattccactgtgttgcctggctcttcagtcttatctcgtgatgaaaccatggaggatgaaataacttatgtttctagtgacaagaatcgatttggttggcccaaacagctggaaagagaaccctctcctccaaacaatgtaaaccgtgttccaagtggtagaatggggggaaatttggcaccatctatgtattctgatccacaaaatggtcaaagaggtagtcaaaat

SEQ ID NO: 20322 - DNA, 462 bp, Glycine max
cccacgcgtccgtcttgatatctaaaaggagcagggtagcccatcattgacaatatctaaggtgtgtgctctccatttgctccctattgaccgatccaaacccagatgaccccttggtgcctgaaattgctcatatgtacaagacagacaggtccaagtatgaaacaactgctaggagctggactcagaagtatgcaatgggctagcatgttggaataaggcattgtattataggataggacgtgatccttccatttttaaaagacattaatgtataatctatcttttcattcccgctgttgacatattgaggataggtaacagtgcggtgcggaggattttttagtttgtttgtatgaaacttctcttgtgagtgctgggaattgggaaatacatgtagctgatattcttctgtgtgttccaatttatttatctttacatactatgcttagtatgctaaaa

SEQ ID NO: 20323 - DNA, 360 bp, Glycine max
  modified_base (241)..(241): a, c, g, t, unknown, or other
ccggaattgaattcccggcccgaccgacgcatttttttttcaaaccactcaaatattggcaagcactcctagcattccatcacacataaaagctggggcttattctgaatatgggaacacaaaaaaaattctcaaatttgaatctaacatacctataccagacatcaaggaagaccaagtcctcatcaaggttgtggctgcagcccttaacccaatagattataagagggctcatgggttnttgaagaacactgattctcctttcctactgttccggggtacgatgttgctggtgtggtggtcaaagtgggaagtcaagtgagtaaattcaaagttggggatggggtttatggtgacatc

SEQ ID NO: 20324 - DNA, 455 bp, Glycine max
cccacgcgtccgcagaattaaaatatttctttgagtcaagtcctttagcatcaggcagtgtaaaaaaatgggtttccgtataccaggtattattagacaggcatcattttctacagccaaagcaactcacaaggaacttgaagtcccaaaaggctatcttgcagtctatgttggagataagatgaagcggtttgtgattctggtatcatacttgaaccaaccttcatttcaagaattactgagtcaagcagaagaagagtttggatatgatcatccaacaggcagtctcacaattccttgcaaggagaatgagtttctaaacctcacttctcgcttgagtgagctatatatcatgctttaattgagactcaaacagattagttgagccaaatttgtacaagaaggaacttcttttattgtgatacttccaatttttttcttttataattcaactg

SEQ ID NO: 20325 - DNA, 67 bp, Glycine max
acgcccacgcgtccgcccacgcgtccgaaaaaaaaaaaaaaaaaaaaaaaaaaaaaaaagaggaagg

SEQ ID NO: 20326 - DNA, 446 bp, Glycine max
catcaaggtctggcaggtaggaaagagtctcaaacttcttcttgccaactggtggcgacacgtgcatgcattgcactcttccaccgttgctagcaatggaggtaatgtcattgttggtctttctggtggggaagccagccatggacttgaggccagtgaatggagcaaccatgccggcaccggcacggttgacagtggtaacagctggggaagagatcattgaggaagccatttggcaaaggaagtagaataccttcttaggaagggatggattccttgcttggaattcgagttggagcacggtttcgtgtaccgtgagcacaacaggtcaccaggatactacgatggacgctactggaccatgtggaagctgcctatgtttggttgcactgatgcttctcaggtgttgaaggagcttcaagaggctaagactgcataccccaacg

SEQ ID NO: 20327 - DNA, 338 bp, Glycine max
  modified_base (250)..(250): a, c, g, t, unknown, or other
  modified_base (304)..(304): a, c, g, t, unknown, or other
gtgcgattcgtctggaaatcgcgattcaagcacgattcaggaacaaaaacgagacagcctcggattcgtatcgaatcgtgcgatacgtatcgtgaatcgaagcaaatgaagattgtttcagttgcagttaggtcaatcagtgctaatttgccaaaccagtttcatcagagccacttgctcagaagtctttccacttggaaatttacagataatgcaactggtaatcggcagtttaacaattcagaatctnctgaggagtctgagcagtttggtggaaatcgtgggaaatatgcccaacttgatntcatatttgaaaagtttaatcaacagggaatggc

SEQ ID NO: 20328 - DNA, 388 bp, Glycine max
cgaccgcgcgtgctgccatgtggctgatgctgcatcaggagaagctttaggtctatgttgtggccactgaagagtggcacagtgtatatgacttcttggaagtcccgttcggctatgtgggactcaattggagggaccatgtcgtcattgacaagagatactttcgcccctctgaagtcgataacctcaaaggggacgcttccaaggccaagaaagtgcttggttggaaacctaaagtggggtttgagcagcttgtgaagatgatggttgaccgggacattgagatggctaataaagagaatgttcttgttgatgctgcctacattgatgcttatcaacaaccttgaatctcatcttcaacttgatgaaaatggggttttgctgtttt

SEQ ID NO: 20329 - DNA, 410 bp, Glycine max
  modified_base (348)..(348): a, c, g, t, unknown, or other
  modified_base (352)..(352): a, c, g, t, unknown, or other
cgatgagttactacaatcagcagcaaccacccgtcggtgttcctcctccccaaggttaccgagcgccggattcttacggaaaggacgcgtaccctccgccagggtacccgccgcaaggaggataccctccgcaggcgtatccagcacaggggtaccctccaccctacgcgccttctcagtacgctcagcctccgccgcaacaacaccagaattcatctggcccaggttgcttagaaggatgtttggctgctctctgctgctgctgtctgttggatgcgtgcttctgagaggagaagaggttgctttgcacaaattggatttgaaactgtgttttgactttgaatatcngcgntaggttttattattctatgttgatttacatttcggggatatgaaatattggttccgaa

SEQ ID NO: 20330 - DNA, 266 bp, Glycine max
ggcctttgtaatcggttgtttttatcttcatcagagaccagactgcttttccctccgttcgtacttcttacagatgcttaattgggtttatgaacacacatgatgattaaggattcggcaagcataatgtatattttcggagtctcttttaagtgcttggttataatcacaaaattgtgcttataaataagctttgtgctggatctatttcaaacttactagtgcacatgatgtggtggtgtgaaatgtttgatactttgattctc

SEQ ID NO: 20331 - DNA, 367 bp, Glycine max
cggacgcgtggggttgcggcgccacctgttcaagtcttcattcctccttgtcctagaccttgcgattacaattaattcaaagacattttgataaacaactgttccaatatcgactcttgtggatgagtagattgcttgtaaataaaaggagctgcaagaaagtgtggcaggggagttcaatttggagaaatggaacgccacaactgcttgtacatggagctgcatatcttctgtatgataggttgcacacttgatatgattatcacattgctgatgtttgttcaatttgtggaagcatgcttacaacaacattcatcaaaccttaaaattggccagttcgtaagattggtgtgcttccccctggaag

SEQ ID NO: 20332 - DNA, 254 bp, Glycine max
  modified_base (92)..(92): a, c, g, t, unknown, or other
gcaatcgtcaccggctcgtcccgcggaatcgtccgagaaatcgcgcttcacctcgcctcactcggcgcgcgactcgtcgtcaactacacctncaactcgggccaagccgactcaatcgcggggcaaaataacggcgggttcggcaacaagaaaacgggcggcgtcctggtccaaggccgcctggtccatcccggttaagggaagtcgctcttcgactcgggcgagcgcgccttcgactcggcgatccacattct

SEQ ID NO: 20333 - DNA, 381 bp, Glycine max
  modified_base (250)..(250): a, c, g, t, unknown, or other
acgcaaataacattccttctggatagagaatctataagctttttgctcatagcctcacaagcgcgcttgcgttctctttttcccattgttagtggtttttattgatttctgggtcagtgtggttttttcctgttccacgagtttggtcaagtttccagtgaatttgttaggtgtgatccatgtagccgatctcacctagtgggataaggctttgttgttgttgttgtggtggtggttttgtgattattgngctgccatggatctggttggatcttctggtttgagtcctacagggtccaagtgaaagtcaaagtttcgttttttatggggtgagtgattcagctgctgaatgagtttgaaatggtgggtcaagtttagctg

SEQ ID NO: 20334 - DNA, 369 bp, Glycine max
gcgttttctcacaatttccctgttcttgaagggcacagaagagggtttcttttcgtttcgtttgaatggggagcgaagaggagaacggcgaattctacctgcgatactacgtcgggcacaagggcaagttcggtcacgagttcttggagttcgagttccgccccgacgggaagctccgctacgccaacaactccaactacaaaaacgacaccatcatccgcaaggaggtttacctcacccccgccgttctccgcgagtgccgtcgcatcatctccgagagcgagattatgaaagaagatgataacaactggccggaacctgatcgggtggggcggcaggagctggaaattggtattgggaacgagcaca

SEQ ID NO: 20335 - DNA, 426 bp, Glycine max
cccacgcgtccggttatcaagcccatgctcgacttcctccgccaaaccggttcctacctaagggtgaatgcctatccgttcttcgcttacgctgcaaactctgataaaatctctttagactacgcgctgttcaaggaaaaccctggcgtggttgattcgggtaatggtttaaaatacaccaacttgttcgacgctcaaatcgacgccgtttttgctgccatgtcagcagtcaaatacgacgacgttaagattgcagtttcggaaactggttggccttctgctggggactctaatgagattggagccagccccgacaatgcggcgtcgtataacggaaacttggttaagcgcgtcttgagtgggagtgggacacccttgaagcccaatgagtcactcgacgttttcctcttcgcgcttttcaatgag

SEQ ID NO: 20336 - DNA, 426 bp, Glycine max
  modified_base (22)..(22): a, c, g, t, unknown, or other
  modified_base (84)..(85): a, c, g, t, unknown, or other
  modified_base (100)..(101): a, c, g, t, unknown, or other
  modified_base (160)..(161): a, c, g, t, unknown, or other
  modified_base (223)..(223): a, c, g, t, unknown, or other
  modified_base (290)..(291): a, c, g, t, unknown, or other
gccgtgatttataggctcatanaatcaggtgggcgcatgtagtatattgggtatgtgccctaatcaatctgtggagccagatgnnggagggtgacattanntggaattcaaagggcgcccatctaaagtcgaagggcgggtttattctgactcgaaacannatacgagtgtggatgccctgccggtgtgtagtagtattacaattaaaaggttatgaattttntgttcgagcaagagatccccgtaataattttttttaagttacctatttcttggtgcttatcatttanntttgcctggttgttaaacaagcgtggatgaaatgggatttcaccttgagggaaacgaagcttattctacaaatgaactatttccaaccgagaatattattattttgggtattataattaacgtaaatccctctct

SEQ ID NO: 20337 - DNA, 264 bp, Glycine max
cgccgactcggttgctatcagcgagtgagagtgagtgagtggttctcttgcagcaacaaggtttagtgacaccaaacagacgggaaatgggtcgtggggtcagtgctggtggtggacagagttccttggattatctctttggcagtggggtacctgccagcagtgcaaatggtgctcgcactcaaaatgcaagtgctccttcaccaccggttgataagcaaagtccagcaccagcaccagcaccagcacctgcacctgcagaag

SEQ ID NO: 20338 - DNA, 295 bp, Glycine max
aaaaaggaagcaaaggagcaagatgaggaagctcatggaaagaagcaccaccatgtctttggctgaagcataagcaaccaattatgatcatattccttctacttgtcttatatatatatatgctttcggcttatatatatatgtgtgtctctaagttaatcatcttccagcttattttgggagatcagtatggtttggagaatgtttccttgaaaagggttgctctatatatgcatgtgtcctggggtaagggttagttacatacaatagtatatacttcaatggggtgggaatc

SEQ ID NO: 20339 - DNA, 244 bp, Glycine max
  modified_base (75)..(75): a, c, g, t, unknown, or other
attccagcgacgcccgacgcatacgactgcttgcttcgtttctgcaaacgatcatactattcccagcactagcanaactggtggggaggcgataaatagaaacgctacttcttccccaacatctacttttcaatcaaatacttgtggccgcaccacttcccaaatttagaatccttcctttaacacatgttacagtgccaccacaactgccactacggaatcaacaccatcattcagctctaaa

SEQ ID NO: 20340 - DNA, 411 bp, Glycine max
gcgagagaggcttgcagaagacattgatgctgccatcaagaggatctcagatgaagcatatgaaattgcggtggagcatataaggaacaaccgtgaggccattgacaagattgtggaagtccttctggagaaggagactctgagcggagatgaattccgtgctatattgtctgagtttgttgaaattccagctgaaaaccgtgttgctccttcaactccagtaccagccactgtttgaatagcctatatatgtaacatctttcatatgtattatcttagaatacagaatgccctctgcagcctgctccatatttgtgaatgattaaagattctaccttactttttcattttttgtagtggtgacaaatgacaacagagagtatgtataaaaaaaaaactgtttttaggtgt

SEQ ID NO: 20341 - DNA, 275 bp, Glycine max
cccacgcgtacggttccattcgtgaaactaacaaccacgcaaggcctttatcatggcagcgggttgcccaaaggcgacgcgacactcaaggccacctacgctaagactatcgacgatcccaaagacctatatgactcttcaccactcgaccataccgccttctgaatatgccatgaacttcactgttgaagccatccaatcagagaatccaacctatcagtgtgaaccagacaatcaacggtgacccatacattgaaagacctgacaccccacat

SEQ ID NO: 20342 - DNA, 453 bp, Glycine max
acgctaactgctagctcaatggaggcggtatggttagcccgaacgtggcggcgccggtgaggtgcccttctcgctttgatctaagttatactaacgctctctcgtttacacccaaaagggccccgacaatggcttcaggggagcaaaaagcaccaccccaaacccaaaggttgcaaatttatcccaatacaaattctggggtctcacctttctggagagagaagtatgaaagagaagccaagaggtattgggatgttttctacaagctccacaaggacagagttagttttttcattagtatttattgtgtttttggtctctgtcaatacaaattttgttgctcacttgtgtattcaatcaatactatttgtgattgtggtgcctctcttttgaaaaaggcaaaaattgtgtattattaataataaaaaactgtcattaacactaggagtgtaa

SEQ ID NO: 20343 - DNA, 445 bp, Glycine max
attcccggtcgacgacgcgtacgcgatcttggaccgattacctcggcctgagcgttggctggacgctctccaatgccggcgtcggctgggaggccttccgctacgggccgcaaaccgtcaacgtagcggaattggaggtggtgagcggcaaaggcgaaaccttagtctgttccgaatcacaaaattcggaactcttcttcgccaccctgggaggattaggccagttcgacatcataactcgcgctcgagtcccggttcaacaagccccggacatggtgagatggataagggtggtgtacacagaatttggcgacttcactcgagacgcatagtggctggtgactctccgagagggtgatggttttgattacgtggaagggttcgtttatgtcaacagtgacgacccttgcaacggctggaccaccgtccccgtgggccccaacca

SEQ ID NO: 20344 - DNA, 388 bp, Glycine max
cgcttttggaactttccatgggaaattcttacatacccaagtcattcaacccaaaagacgttggaccatcgcttgatgaactcatcgtcgaaccctatttcaccaggttttcttctgaatgatgaatcaaagtgaggtaaccaggaagagacttttttcacttgccctaagattatggatatttagaaggagtggtagtttagaggagagaacatatcaatagtgcttccgcaatgaccacatcaacattagtggcaacattctgctagtggaggtgcacttcacatgggcaatatgagaatggtaatatggtttgcatatggaatcattgaaataaatgggttttctttttttgggaaagacattttataatgatgaactaaaacaa

SEQ ID NO: 20345 - DNA, 377 bp, Glycine max
ggcaaacgcattaagttacaaatctgggatacagctggtcaggagcgatttcgaactattaggacagcttattaccgtggagccatgggtatcttgctcgtttatgatgttactgatgaagcatctttcaacaatattagaaattggattcgcaacattgaacaacatgcttctgacaatgtaaacaagatacttgtgggtaacaaggctgatatggatgaaagtaaaagggctgtgcctacctccaaaggtcaagcccttgctgatgagtatggtatcaagtttttcgaaaccagtgcaaagacaaacatgaatgttgaggaggttttcttttcaatagcaagagatatcaagcaaaggcttgctgacacagattc

SEQ ID NO: 20346 - DNA, 453 bp, Glycine max
aatttccggtcgaccgcacgcgtgacgccacgcgtcctgtaggtaaacatttgtggtattgtattttgtaactacctcatttttaaggttctgggccaccgtaacttgcagcctgactctgaagctcagcttctgactattcactttgaatggaatggtgtcctaaaatctgtatccagcactttggttggagtgagccctgaatttgaaattgctttgtataccctgtgtttctatgttggtagggaggataaccacattcagcttggtccatatggggttaatatcaagtgctatcgattgggtgatcgaattggatctgttttccccattgcagattcttgaattttcagtttccatcattggtaatagttgttccctatgaaatcgtttgttatgcatacttgagaacttgtaactcatgggtttaaaagcaacaataccaattagatc

SEQ ID NO: 20347 - DNA, 302 bp, Glycine max
gcggcaacttcattccattcccaattcccactgaactcaccaaaccctattcagcatttcccccaagtcaccgtgacaccatgggctcctccgcgatggtgttggacccgaaaccctcatcggagcctccgccgttcctcccgtcgacgaaatcggactaccttcaaggcagcttcggcggcgacgccaccgcctccgacgaggacgacctctacagccgcctgaaatccctccagcgccagctggagttcatcgacatccaggaggagtacgtgaaggatgagcagaagaatctcaagcgc

SEQ ID NO: 20348 - DNA, 398 bp, Glycine max
gcgtttatattcaaacatggcaagatcgccaaactcagcattcaatgactgattctacttctccgaacttgataacatctttgcataccaactcccacaaaacaaagtttccttctttaccagggaagaaaactctgtacaccaaacttaatttctcattttctattccgttcaataaatcgatacgtgtgaaatccattgacacgaccatatatgatcaacttatagcctatcaagacttgtacaatattataacgctgcagaatagttcatatattataagagtaacattgtaaagtgaaaactgcagaacacttgaccttactcctactgcatttgatgcaatatcatagagttttggaaaagtaattatcaaatgtttcaagaaagaaaaatga

SEQ ID NO: 20349 - DNA, 370 bp, Glycine max
ggagccagaggacaccctttatgaaggttccatatccagagatctagttgctgaagtggctgtggaggcattggcttatcctgaggcattttataaagttgtggaaatagtgtctcgccctgatgctcctaaacgcccataccatgacctttttggttccataaggcaacaatgatgcctgagatttggacttgattgcagattagcaaatgttgatttgctttatggtggcaaatttgtatctcaactgtgttcctatgtgtgttgtttcattcaattggtacactagaataatgtgtaaatatttcagtatatctttaaatttattctcctacctgccaaattaaaggttggtagataattcagcact

SEQ ID NO: 20350 - DNA, 401 bp, Glycine max
  modified_base (314)..(314): a, c, g, t, unknown, or other
cccacgcgtccgcagaacgcttctcctgctcctcaaagcgcatcgtctgatgctgctgttgggcctgacgcttctcagaatgaccaagatgccaaaaaccctccaaggtataatgcattgatttttgaagctctatcagcactgaaagatagtaatggatccgacatgaatgccattattaaattcatggagcaaaaaaatcatcaggtaaaccaaaattttaaaagggcattaagtacacggttgaggaggcttgttagtcaagggaaacttgaaaaggtaccaaatggttacaaggtgaaaaaggaagcctncttcgggacaaagtcaccttcaccaaaagcaaaggatgtccggccttcacaaccacaacggcaatcttcagcttctctctttatgac

SEQ ID NO: 20351 - DNA, 399 bp, Glycine max
ctctttctcttcgagggtttgggtttctcttcctcccttggagaaaaagaagagccaccggtgcgacgccgttcgtgcatttttgaggtgccgctgtcatgtttgggcgtggtggaccaaggaggagtgataactccaaatattatgatattctcgggatttccaaaaatgccagtgaagatgaaatcaagaaggcctatagaaaggcggctatgaagaaccatccagataagggaggagatcctgaaaagtttaaggagttaggtcaagcatatgaagttttaagtgatcctgagaagaaagaactgtatgaccagtatggtgaagatgcccttaaagaagggatggggggaggaagctcgtttcataatccatttgatatatttgaatcattttttg

SEQ ID NO: 20352 - DNA, 269 bp, Glycine max
cagaaacccataaaggggtctccatatccaagggggtactatagatgtagcagctcgaaggggtgtttggcaaggaaacaggttgaaagaaacagatcagacccaacaatgttcatagtgacttacactgctgagcacaaccaccctgcacctactcacagaaactctcttgctggttccacacgccagaagccattggcacctcaaacagccaccaccactgaagaagactctgaaaagagcaagagcttcacaaaacccacttcccc

SEQ ID NO: 20353 - DNA, 312 bp, Glycine max
cgaccgcgctgcgaaacccagctctgatgttcataggctgggcttttcggacacgaagaataagaagggtcatgagcgcatctgcagaaagcatgaacgagaagaagggttgatgatcaagccccagagcttcactccccccatcgacacctcccaatggcccattctcctcaaaaactactatcgcctcaacgtccgcaccggccactacacccccattccctccggctactcccccctgaagcgccccctctccgagtacctcaaatacggcgtcctcaacctcgacaagcccgccaacccttcctccca

SEQ ID NO: 20354 - DNA, 450 bp, Glycine max
cccacgcgtccgtgaaattcgaacaatgattttttcattttctttttaatacttttttggtggagactccctaagaatctgtcgatatttccaattaaatcttcttgttcctgtgaaggtcctataaaaaaaagggctatgccctttctttactcagaagggccttattccaagttccaccaaacaagtttttattcatttgaaacatctttttttccgaatacaagaaaaaattcatttcaatttcaattatttctataagataaaatcgatatagatagattttatcttatagaaataattgaaaaatacattcaattatgtcttcgcgtatcaaatattttcttttcatatcgatgcgtacgatatttttccagccattaattgatgggaaaccgaaactttcacttaccggtttttctttttaataatggatttcaatttttttta

SEQ ID NO: 20355 - DNA, 445 bp, Glycine max
  modified_base (79)..(79): a, c, g, t, unknown, or other
  modified_base (126)..(126): a, c, g, t, unknown, or other
aattaaccgggtcgagccgacgcgtgacgctcggtgggagggtacgattgggccgatctgatttttactcccgacgggnaagagccgtggaggacagatgctggtgtacagtttcagctcttcatnctcgcttgcttagcgaagggactcgacgttagggctgctttttgagttgacgcttttggatcagagtgggaaggagagacacaaggtgcatagccattttgagaggaccctcgagagtggaccctacacgttaaaataccgtggtagcatgtggggttacaagcggttttttaagagaacagcactagagacatcagattaccttaaagatgattgccttagtgttaattgtagtgttggtgttgtgaagtcacacacagagggccttaaattatataaaatccaaattccgtcttctaacatggttaaccaatttgga

SEQ ID NO: 20356 - DNA, 460 bp, Glycine max
gtcgaccacgcgtgcaatagtgaactttttgattcctaaattctctagaattcgaaattctaatttcgttaggggaaagagattgtttgtgtgtgagtgagtatggctggaaaaggcgagggtcctgctatcggaatcgatttgggaacgacgtactcttgcgtcggcgtgtggcaacacgatcgtgttgaaatcatagccaacgatcagggtaacagaactaccccatcctacgtggctttcaccgacacagaacggttgatcggcgatgcggcgaagaaccaggtcgctatgaacccaaccaacaccgtttttgatgctaaacgtttgattggaaggcgtttttccgatgcatcaatacaaggtgacatgaaattgtggccgttcaaagtgattccttgcccttcttaaaaacctatgattgtggtgaactacaagggggaggagaaacaagttttcg

SEQ ID NO: 20357 - DNA, 317 bp, Glycine max
tgatgccgtacgtagtaaagcatataacaaaattcggaggtttaggtgtggctggcatgaagcatgtttatgtaagcaatgtatagtttgctttatttccatgttacattttgtgctatatataattgttaacactcgttgtggttctgattgctagacattcaagggtctaatgtgggtccttaaggtgttcattaattttgaaccctgtaaacaactgcaacactacccatgtggttgattctctacatttgtatcttttgctctataatctgtaaaaaagtcttctcctagatagaatgtgctcccttaccaaa

SEQ ID NO: 20358 - DNA, 292 bp, Glycine max
cggtcttggaccgattacctcggcctgaccgtcggcgggacgctctccaatgccggcgtcagcggccaggccttccgctacggcccgcaaaccgtcaacgtaacggaattggaggtggtgagcggcaaaggcgaaaccttagtctgttccgaatcacaaaattcggaactcttcttcgccaccctgggaggattaggccagttcggcatcataactcgcgctcgagtcccggttcaacaagccccggacatggtgagatggataagggtggtgtacacagaatttggcgact

SEQ ID NO: 20359 - DNA, 259 bp, Glycine max
acgcgcaggactttacgttgcatcagcattattctaacgatgcgacataggcgggtttacgaccctgggatatggtcgcgataatggcactgactgaagacaccattcaacaatcttagaaatctggattcgcaatcatactcaacatgctcctgacagtagtcactagatacttgtggctcacacggctgatatcgcttaaatgtaaaggactacgcctacctgcaaaggtcgagcccttactgatgagtctcgtatc

SEQ ID NO: 20360 - DNA, 460 bp, Glycine max
cccacgcgtccggcatctctcgctttgtgttggaagaggggaatcgtagatctgatttctggctttcttttaataataattttgtgatcagaattattgagctgaagaaaagacaatgggattgtgggaagcttttctcaattggctacgcagccttttcttcaagcaggaaatggagttatctctaataggacttcagaatgctgggaagacttcccttgtaaatgtagttgctactggtggatatagtgaggacatgattccaactgtgggattcaatatgaggaaagtgacaaaagggaatgttacaaataagttatgggatcttggaagacaacctatgttccgcaacatgtgggaacgttactgtcgtgcccgttctgctattgggttaatgtgtgatgccgccgatccagataacattagcatatcaagaagtgagcttcatgatttgctgagc

SEQ ID NO: 20361 - DNA, 444 bp, Glycine max
gagagagagggctgcgctgcagctgcagctgcacctgcagaatcttttatcagcgatagcagcaatgtcttcgtcgaaagatgcagacccaagcctgggttacctgactcgcaaggacacggaggtgaagcttccgcgtccaaccagggtcaagaacaaaacccccgctcccattcaaatcaccgccgagcagattctccgcgaggcacgtgagcgtcaagaggccgagatccgccctcccaagcagaagatcaccgaccccaccgagctcggtgagtaccgtctccgcaagcgcaaggagttcgaagacttaatccgccgcgttcgatggaacatcggcgtctggatcaagtacgcgcaatgggaagaatcgcagaaggacttcaaacgcccgcgttccgtctgggagagagcgttggaggtggattacaagaaccacaccct

SEQ ID NO: 20362 - DNA, 371 bp, Glycine max
cccacaggcacgctgagcatggaacacagaaccctagaactcaacctggcttcagcaaaggagctgaaagacttgaatatattctcaaagatggatgtatatgctgtgctttcactctccggcgatcaaaagaccaagactcccgtccacagaaacggcggcaccaacccaacatggaattttccggtcaagttcacttttgatgaatcggtggcgcggcagaaccgtttggccctcgaaatcaagatccgctccgagcgcgccctcgccaccgataaggacatcggccaggtccacgttcctctcatggaactcctcaagcaacctggcgacgggaaatccttccagcacgttagttaccaggtcagaaa

SEQ ID NO: 20363 - DNA, 280 bp, Glycine max
ggatgatggtgcagtcagtagtataagcaaagtggaaaccttccaagaaaagtgttgggcatagtgctcacgagaagcaagtctgggtccataaatcttcttcagggtcataaaatatctgcgtcagggcatcattcctgctatggtctccgtataggacgtaatcctcaactaattcaggtcaacctgagtctgagcgacttgaaagagcctctgcacaataaagggaatgcaaagttacagacctcgttgacatgattattacttgaaacagattggc

SEQ ID NO: 20364 - DNA, 221 bp, Glycine max
acggtgaaagcgaactcaaggcttagcatatccttgcgaagcttatcacaacctatgtcggttagagacatagcaaggacttgagatgtttgtgctctcactgttatttcagagcatgcacagcagaacgaccgtgacagtttcacactctaactatgggactcgccagacttgctagaccacatgatgatcctcgccggatcatgcaaacacacatctta

SEQ ID NO: 20365 - DNA, 266 bp, Glycine max
cccacgcgtccggtttcgaatagattatcctatgtctttgggaatagtgctgcaatggctggaagtcaggaggaggtgacccttttgggagctactggaagcccatttgtgtgcagggttcatattgccctcaagttgaatggagttcaatacaaatatgtcgaagaaaatttgaggaacatgagtgaactgcttctcatattcaacccagttcacaatggatgtatcagtgtttatctacaactagaaacccatatcaaattctc

SEQ ID NO: 20366 - DNA, 476 bp, Glycine max
acgcccacgcgtccgccgaccccaaacgctcgaagaaaaaagccaccgaatcttcttctggcgcgaccatctgcgacgacgagatggacgaggacgggaagaagtccggcgattactcgaagaagtttcagagactgcggagcgaggaggacgaactcgccattctgaagggcgtggttgagttcacatcgaaaacagggctggaccctcttaagttccccaatgccaacgctttccacgatttcatgaataagtcgcttcacgtggaatttttcagcgaccagctgaaggagaagctccgaatgctcaagaagaagttcgagacccaggcaggaaaagggaagaatggagatgcccctaagttttccaaaccgcacgatcagaaattctttgaattgtccaaaaaggcttggggaagtgaggatggtggtgtagccaatggctccgtggagaagcccaagtccaatgggaatgct

SEQ ID NO: 20367 - DNA, 262 bp, Glycine max
  modified_base (244)..(244): a, c, g, t, unknown, or other
ctgtgggaaaattggttgggaggaccttctgatcatgaaagtgctccagttggtagaattcgtggattttattttcctgaagatgacaacgtgtacagtgttgaactcagggaacttcttaataggagaagtgtctctaacctccttcgcagcagttttcgtgagagtcttgatcagttgatacagtcatatgttgaaaggcaaggtcatgctaacattgactgggaatttcaagaaacaactncttcttctgcctcagtag

SEQ ID NO: 20368 - DNA, 434 bp, Glycine max
  modified_base (318)..(318): a, c, g, t, unknown, or other
  modified_base (376)..(376): a, c, g, t, unknown, or other
  modified_base (379)..(379): a, c, g, t, unknown, or other
gcaaaagagaggaacagaacagaactgagagaagcaagtgaaacactcaatcacctaggctagaatcgtctcgtcttcattccttttttttccggtttagagaattgaaaagatttcattgataattgagcaaacacaatgagtgctccacctcatcatgatgatgacgacgacaacgaagaagttttccttgatgagtctgacatcatccatgaagttgccatggataatgaagatcttcctgacgctgatgatgattctgaactcctcgaagaggatgaggatggtgattttgtgcacaaattcactgctcatacncgggagttgtactcagttgcctgcagcccaacagatgcagacttggtggctactgcangcngtgatgacagaggatttctctggaagattggccaaagggattgggcttttgagct

SEQ ID NO: 20369 - DNA, 369 bp, Glycine max
aataaaacactaagatccttataagtttccctcgatcggcgaaaatatgtctggtttccttagcaacgtctttggtttcaacggaaacaacaatggcactgaggatgcctttaaaaactcaagaggaggaggacaagacttcaaggacgcggagttcaacactggtgtgcaagttgccaaggggagacacgctccttgcagtggtaacagtgggactaaaagtgcttttaacaactctggttcgggaaaacaggatttcggaaatgctatgtttaacactggtgctaggtactactaatttatataagaccttcctcttggaggggctggcttcaaaacatacatataatcataggtatgggaataaaa

SEQ ID NO: 20370 - DNA, 352 bp, Glycine max
gcgcccacgcgtccgtgattttactgtaacatgaaatatggcttctggttctatgccaccttctggtacgggttcatctcaaggtggcaactctgttctcaagagaagacgggaatatgataatacaaatgatttctcacgtggaggttcattccctgctatttcaacaattgctgaaagttcaagcacggtaacaagaagaacggcgaatacagtatacgattacgaatacagaacagagaacgtgaaagtagtggaggaagaaccgatgagaaaatacagaggagtgagacagaggcccatgggaaaatgggctgcggaaataagagaccctttcaaagctactagggtg

SEQ ID NO: 20371 - DNA, 353 bp, Glycine max
gcgcccacgcgtccgctgattcattcacccaggttttgtgtttctgtcctctattcctctcagagcatccggtgaatctgatcaggtgttccttgtgaagagatccttacgtttttgaggtgtgacgggaaagagataacgtaaaagatgaatcagtgcggttatcaccataagaatgctttgacacgctgtgacgagatgaacatggaatcaatggtgtgccctagaccacgaagattggacctgttgaaccactcaacctttgatgaccacatcataccctggaggccaacctttatcaactaccaatcagacattgaagattcaagactctgtgctagactcttggacat

SEQ ID NO: 20372 - DNA, 389 bp, Glycine max
ggagaagtggtgagaaagcaaggacaaaggggtgttggtggagataagtggtacttgtatagctgcttacaagactgtaaatattggtgctgtttaatacacgagactagttctctttcgatggtcccttttgagtgaaaaaccttgtcttctcagctttctttcgagagatcttaaagacattgactaacaacaataaagtggatcaatcaaaagacttacttcttcttctaacaacaataagatcacatctttcccactcatgaagagacttaacagctcagattcttccagtgccctcatgacaatttgtccatcaacagaggaacatagtccgaggaacagccaacacatgtatggtagggaagtccaatcgatgttggacggac

SEQ ID NO: 20373 - DNA, 427 bp, Glycine max
ccactttcaagtcagttacaaagaaacaagtgacaatgacaagaacctcctaatatgcagtggtgagttgttctatgttcctcagcgccttatcagcgattttgttgagcttgttaaccttgtgggggacctagaaatccatcagaaggttgcaattcctatgttctttgtctccctagattctcctcagaattttgaccccgttcttgatagaatgatctacaagcaaaatcccactgcaaattccaccactctttattctgccaaagtccctgctgttcatccattgagtgtatcaagtgagccagactttataaagcctatcagaattatggcagaaggggatccactcctgattgaattagtttgaaagtagaactctttcttactggtaatacctacctgaccagagaagatgccagaaaca

SEQ ID NO: 20374 - DNA, 423 bp, Glycine max
cccacgcgtccgcccacgcgtccgcttccttgtttcttttaagatatttttggtcacataggttatggtctgcctctgcgtagtgcttcaacagccccctgctcgctcgatcatcttgattattttttaagccttttaaatgcccaacatcttgttcttgatgtttgagattgatgtatccaattcttagtgaaatcttcttttccgggtgtatgatcaattctactgtgagacgacgcaggacccatttagttcaatccttctccgttgcttttctttactggctctactacgtttcatgatttctaattattattaattaaataaaagcctattatatctcttcttacatatttttatctgggtctgggtcctgcgtagtccatttttggttttggtaagtatttggtactactatgacta

SEQ ID NO: 20375 - DNA, 317 bp, Glycine max
ctcttttgaaccttcgtgcttccttccacgatccttctactctcatcaaaccccaagtgatagaaagctgaaaaaagggtttctgaaatatcagctaatgttactgagtgcgtaatcattgagatctgccttcatcttggggtgattttgttgatgggtgcttgctggagtaataggattaaggctgtgagtccttccaatacagggatcacttctagaagtgtcagcaggagtggccatgacatcagctcaaatagcacgagctcatcagcctacatacccgtcacttctcggagtgagggtgagatctcgcaatc

SEQ ID NO: 20376 - DNA, 392 bp, Glycine max
acgcccacgcgtccgcattggtgactgttctagcataactcaacgtaaaatcatggatgagatgagagccatatttgaggctgcagacaaaaataactccggcaccttaactattgaagaattccaggaggtgatggatgacattatcttaagatatccacaagttgagcaatatctaaagcagaagcatctgcgtgattttaccactctgtggaaagatttgcaagggaatgaaagcaaggaaatagacatccaagcgtttaagctggccctttctcatgcagattcacaggtgaagagtctgccagcaactgctcaggttgctgcccaacagggtgcatatctagctaggtgctttaatcgcagggatcatactgaagagaatcctgaag

SEQ ID NO: 20377 - DNA, 248 bp, Glycine max
gcggtaaagactaaagagagttgtggcgtggtggtggctgtcgctattgaaatggcagcgtcgtggtcagagaagcatgtgatggtgataggcatatacgactgtgagcagagcacgtacgcgttgaattgtgctgtggataactttattccgagcccaatttgtaagctcgttcttatgcactccaggcccacctccacctacactgtgagcttctcctgccctgagaggtttattctgttacgctc

SEQ ID NO: 20378 - DNA, 322 bp, Glycine max
tcgcttacaccatgtgatttgaatgcagataatgtctatagtccaactgctggtgcagcggtagcgagtcatatggatgttgacaagctagcattcactggatctaccgagactggaaaagttgtgcttggattggctgcgcaaagcaatttgaagcctgtgacattggaacttggagggaaatcacctttcatagtgtgtgaggatgctgatgttgaccaggctgtagaacttgcgcactatgctttgttctttaatcaggggcaatgttgctgtgctgagtctcgtacctttgtacatgagcatatctatgatgaggtct

SEQ ID NO: 20379 - DNA, 387 bp, Glycine max
  modified_base (74)..(74): a, c, g, t, unknown, or other
gcggtttgttacaaggctctactctactgctgcacttggtgctctagaaaattcagtggtgatagatcgcgtcngctactctctctgtagccaaaccagcccttcaggcaaatgggaaaggcttctctgaattctctggcctccgcagctcatcaggcttccttcccttttctagaaaatcttcagaggatttccattctgtcattgccttccagacctatgcagttggaagcagtggaggatacaagaagggtgtgacagaagcaaaactgaaggttgccataaacggatttggaaggattggaaagaacttcttgaagtgcttgcacggtcgcaaagactcccctcttgatgtcattgccaataacgacacccgttgccttaaac

SEQ ID NO: 20380 - DNA, 410 bp, Glycine max
gtagaacactgcgactcttcacacttttcttcttcccttcgtcttcagcttctgcttcttcggttgttgctgcttcaaaacagtgagaaaaatatggggttctcctcctttctgggtcgcgtcctctttgcttccctcttcatcctctcagcatggcagatgtttaatgaatttgatgacactggtggacccattgcaaaggagttgattcccaagttcactgttctgaagagaaatttatcctccaaactgggggtaaagacaccagatattaatgtgcggtcagtcattgcctctatcatatttctaaagggggttggaggaattctattcgtgcttggcagtacatttggatcttatcttctgctcttgtatctggggctttctactccaattctatatgattttta

SEQ ID NO: 20381 - DNA, 438 bp, Glycine max
gtcgccggcgccgcggcggccggatacggcctcggctcccgcttcggcggaagccgctacggtgcgctcggtggagctgtcgccctcggcgcggccggcggtgctgcggcgtacgctctgaacgcggctgctccgcaagtcgccgccgtgaatttgcacaactacgtcgccgcgttcgacgacccttcgaagctgaagaaggaagagattgaggccattgcgtccaagtatggtgtgagcaagcaagatgaggcattcaaaactgagatttgtcatatatattccgagtttgtatcttctgtgcttcctcctggtggtgaggaacttaaaggtgatgaggttgataggattgtcagcttcaaaaattttttgggaatggatgacccggatgctgctgctatgcccatggaaatgggaaggaaatttttaaggcaaagg

SEQ ID NO: 20382 - DNA, 407 bp, Glycine max
gcgaaaacagcatcgaacccgtcgtagcagaaaaacttgtcaccatggtttcttccgacaaggagccacgggaggatgtccttcaagcctggtacatggatgatagtgatgaagatcaaagactcccccaccacaaagaacccaaggagtttgtctcgttggaccaacttgctgaacttggagtccttagctggaaactagatgctgataaccatgaaaatgatccagagctgaagaagattcgtgaagagcgtggttacacctacatggatgtttgtgaggtctgcccagaaaagttgccaaattatgaacagaaaatcaaaagcttctttgaagagcatcttcacactgatgaggagatccgcttttgtgctgctggaagtggctattttgatgttagggatcgc

SEQ ID NO: 20383 - DNA, 343 bp, Glycine max
  modified_base (75)..(75): a, c, g, t, unknown, or other
  modified_base (321)..(321): a, c, g, t, unknown, or other
gcgtgattaaatgaatcggggtattgcctggcatcaagtcataccctggaatgaaataagacagagtaacgttcntcttaaattccttggtagttacataatacaattttagatattcattgaaaaaaatgttgacttgaaccttttctgaatgccaggaggattgcacaagtaaaagagaaccaatgtcaaattgctgtagaagatgttatgtacttgctgattttttacaagttttctgagatcagggtccctatggttccaaagctttctagttgtctttataatggcaggctagagatattgccttctaaggactgngaactagagtctattcatagct

SEQ ID NO: 20384 - DNA, 354 bp, Glycine max
gctgcctgaatgaaatgagagaacatttccagtatgcatgccctctctgctcaaagtcagggtgtgacatgtcaaaggtttgggagaaatttgaccttgagattgctgctacacgaatgcctgagcaatatcaaaataaaatggtttggatcctgtgcaatgactgtggtaaaacttctcacgttcagttccattttgtggctcaaaagtgtccgaactgcaaatcctacaacacacgacaaacatgaggcggagcatgtggccacgattattcattggcttcatcaaaagccttcactcgagagctctcttgatgttgtcgtgacttgtgaaagcagtgaaaatagatgtgca

SEQ ID NO: 20385 - DNA, 296 bp, Glycine max
cttacgcctacggtcacacagaatatcacgtgtctgtatctacactctgcgtcatctatatgggagtcattcttatatatcagtcgtacatccttgtacatggggactgaagatcattgcaagttctatatcacgaggcaatttgctagctcatatgatgaccaatgcgatcttactcctcatggcttgaagaccttctcttgccgatctcttgctgcaaacgatcattctgagctgttaatgtagctgtgccacgactgcgacatggaatgcagcatcacttttgtaagacagcg

SEQ ID NO: 20386 - DNA, 390 bp, Glycine max
  modified_base (371)..(371): a, c, g, t, unknown, or other
cccacgcgtccgggatcttatcatatcatattgcaaggccgattctgatgattcattgtccgaaggaaatgcaggttctattaatgtcagcaacattttaactggcaagtgtcttgcaaagataagagcaagtaatggcttacccatggtgaaggaatgcagttgcagcgatgacaattgttcaagtagtgcttgcaattcagggaaacgaaagcgttcctccagaattaggagcacagttgcggaagccttggaagacattactgctctcttctacgatgaagagcgcaacgagatctataccggcaataggctcggtctggttcatgtctggtctaactaaagcactgttaaacttattcttgccttgnggtttctcattagcattta

SEQ ID NO: 20387 - DNA, 212 bp, Glycine max
gaaagactgcaacgactcacgaaagtggctaccatcagtactacaatcgcaccgagagacgcagtgatttgatagacccaatcattgccattaactgaatgtacaccttaaatcccgtttaatatctactgcgttcgttactttctaacgggcagctatatcatcttatgaacatatctgagtatttcacccgagaaataagggatacgtat

SEQ ID NO: 20388 - DNA, 410 bp, Glycine max
  modified_base (304)..(304): a, c, g, t, unknown, or other
cgggggttcaatcacaatggcttccgcagtgagggtggctttgagatccttcggtagtcgggctagaagcttcgtcaagagctcaaccacgccgtttgtgttcacttcgtcttccgcatcgtgcatctctcgtgcttcgagggttttgtcggttatgataagcgttgattcgttgatgcctcttcacagtgctgtcgctaatgctaggctcacctccaatatcgccttcgattccacctgctggagctcgctttctcgaggtactacttctctccttgttattttactcgttttgagttatctntttgcgcaataatcgcaattaacaatgatcttatggatgatggatatgttctagaacacacacacgcatgcttgcgtaattgcttctttttttttataaaaataat

SEQ ID NO: 20389 - DNA, 341 bp, Glycine max
  modified_base (305)..(305): a, c, g, t, unknown, or other
ggggaatggttcctccctcagttgcttccttcctcttgtgtccacccagttcccccgttcagtttccattcaataattcaaacaccagttaatggctacccttctattccaccacaattcgcctcagatattctcttcctccttcttcttctcacagcattaaacgccgtcgttttcatgactccataattcaccggaagcagaacaacaacaagaagcagcagcagcagcgcgagttcacatgggattgggaacaaccgcgagaagcagaagaagaatcgtcatcgaagaaggttctagaacangaacacacaacaacaccaacaacgccgatgccgatg

SEQ ID NO: 20390 - DNA, 379 bp, Glycine max
gcggtggcattgtgggcggagcaatggccggaaaacaggtcggcggcgagggcctatcggttaacgctgggtggaatgtcgaagaaccagctctacgatatcatgtctcagatgaagagtttgatcgaacagaaccagcaacaggccaagcagatcctaatccaaaaccccatgttaaccaaagcgcttttccaggcacaaattatgcttggaatggtgcaagcacctcaaacggttccaaaagttcagccaatggttccgcagaacaatctgcagtcagtacaaccaacacaaaaaccaaatattcagcctgctccattattgcctgggcttggtggtgcacaggatcaagcaggtgtatctcaaacccagattcctc

SEQ ID NO: 20391 - DNA, 376 bp, Glycine max
cccacgcgtccgcttcgccgtttcagctgaagagccatccgcaggtaagcaatggttaagcagaataatgttatccccaatgggcacttccggaaacactggcaaaactatgtgaagacttggtttaatcaaccagcccgaaagaccagaagacggttggctcggcagaagaaggctgtcaagattttccccaggcctactgctggatctctcaggcctattgttcatggccagactctgaaatacaacatgaaagtcagagccgggagaggattttcactggaagaattgaaggctgcaggaattcccaagaaacttgctccaactattgggatttctggtgatcaccgcagaaagaatcgttctttggagagtc

SEQ ID NO: 20392 - DNA, 439 bp, Glycine max
cagatatgaaatcctaggctacgaaaacgcgaataaagcatgaaaaggcaattttccccatggactagatacgtgtacacggtggtctttattgttggtgatgaagacgaggatgtggaggtcgtagccgggagggtggtacaagaacggagtggaaggaaagctacgaagaagatgagtaaaaaatctgatacagagggtgcaccgtataaccatgtgcacaaaattaatcctatgatatataaaagtgatccacaataaatccctaacacaactagactagtccaccttaacttttttgaataaaatagtttaattatcaattaactttatcaaaaagacaactttttatactataattaatgtactggacaaaacttaatttgataaaaccattaacttcacctattcccttaacatttattaaaaggtatttaag

SEQ ID NO: 20393 - DNA, 356 bp, Glycine max
  modified_base (287)..(287): a, c, g, t, unknown, or other
cgaaacagtttccatctctctcacaaaatgacaacaatatcaaattgctcccttctcttcctgttcctggtcctctccaccctccacatagcttccaccctctcaacccccaccaacttcatcaagtcctcctgcagcaccacccagtacccagccctctgcatccagtccctctccgtctacgcctccaccatccagcaagacccccacgagctcgtccagacagccctctccctctccctcaaccacaccgaggccaccaaaaccttcgtcgcaaaatgcaacanattcagaggcctcaaaccgagagaatacgctgccttgaaggactgcgctgaagaaatcagtgacagcgt

SEQ ID NO: 20394 - DNA, 363 bp, Glycine max
acggaggaccagtatatattacatactgctgaggcccagaatattacccttccattcgcgtgcgggcatggttgttgtactagctgtgctgtacgtataaagaatggaaagattaggcaaccagaggcactagggatatcggccgaattgagagacaagggttatgcacttctttgtgtgggcttcccaacctctgatgttgaagtggaaactcaagatgaagatgaggtatataggcttcaatttggacgttattttgctcgaggaccattgtaaagagatgactatgccttggagttggccatggctgacgagtaagcaatgtataaaatctgacaattattggaacaaagaatgtgaata

SEQ ID NO: 20395 - DNA, 400 bp, Glycine max
ctcctccaccaaggtctgcaccagcacctgcttttggtccatcctctgaaccagctactttgattgttggagaaaccgctggctggattgttcctggcaacgcttccttttacacagcttgggcctctggcaaaaacttcagggttggagacgtccttgtgttcaactacgcatcaatacacacaacgtagaggaggttacaaaggccaacttcgatgcttgcagctcagcctctcctattgccactttcaccactccacctgcgagagtgaccctcaacaaatctggtcaacatttcttcatctgtggaattccagggcactgtttgggaagtcaaaagcttgccatcaacgtcaccggcagcaagaacggcaccccacctttcggcgcgggccccccc

SEQ ID NO: 20396 - DNA, 391 bp, Glycine max
cccacgcgtccgcccacgcgtccgctttaaccgaaacccctagttctattcacgcgattccggagaaccagagcgtcttctccagagaattgaacttttctgagtatggtttcgacccaaagactgggaacaatcagaatcaccattctctgaagccggaatccggcgagattctcagcttcggcgagagcaagagaacctcctacggcggcgtcaatgggaattccaattccaattcccattttttctccggtcagtcgccgtttgttgctgctgcggatgagaacaccaacaaaaataacatcaacaacaatgggaggacaaagtcaccgaattcgcccggtaccaccgacaacggattgctttccttaacttccggcgggatttttcc

SEQ ID NO: 20397 - DNA, 458 bp, Glycine max
gacgcccacgcgtccgcccacgcgtccggtaacgcatagctttcaattggagaaaaagagtgttaggataggttacatgctatctgctagagctctcagcattatttggggtgacactgagcaatactggaactggacaaccgataccaattccaggtcagacccttcagtttttctattgtaatttttggatcatggttagtgtatctgcctatcatgatttctgggatattctattttttctgcaacgagataattgcaattataactgtcatgttaccagtgatatctggctagtaatctacgaactattctagcagaatttaaattaaaaaaataaaaaaaaacgtcttactgtgtttggatggagtatttcaaaatttcaggaaatttaaaattcaggaaaattaaaatgcatcaattaaatccttgaatttttaaaattccttctttgaata

SEQ ID NO: 20398 - DNA, 289 bp, Glycine max
  modified_base (245)..(245): a, c, g, t, unknown, or other
  modified_base (248)..(248): a, c, g, t, unknown, or other
gtggaaatgtcgggatcggaggacgagggaggagaagagtacctcttcaagatcgtcatagggggagactctgcggtgggcaaatccaaccttctctcccgctacgcccggaacgagttcaacatgcactccaaggccaccataggtgtcgagttccagactcagtgcttggaaatcgactccaaggaagtcaaggctcagatttgggacaccgccggccaagagcgattccgcgccgtcacctncgnctactaccgcggcgctgtcggcgccctcattgtctacgaca

SEQ ID NO: 20399 - DNA, 323 bp, Glycine max
gcacagaagaagaagacgaagaagaagaagaagaagaacgatagtaatggaaatcaagcccggtttgtcagcactcgttaccggtggtgcctctggaatcggcaaaggtcttgcactagctcttgcacagaagggtgtatttatcacgatcgtggatttctctgaagaaaagggaagacaagctgcaatcctcgtcgagaaaattaactccaattttcattctaagttaggatttccgtctgccatatttgcgaaatgtgatgtgagtaatgcaagggatctagctgctgcatttgacaagcattttttgacatatggaggac

SEQ ID NO: 20400 - DNA, 375 bp, Glycine max
  modified_base (283)..(283): a, c, g, t, unknown, or other
cccacgcgtccgcccacgcgtccgggtagttggtagttatagttgttgtcccagatatggaagaagcaggtttaggagattgttgttcctcgaattcgacgattacgaggaagagcgataagcgaaagcagcaacaccaacaacaagagaagccatacagaggaataaggatgaggaagtggggcaagtgggtggcggagattagagaacccaataagcgttcgaggatctggctgggttcttacgccacccccgtcgccgccgcacgcgcctatgacaccgncgtcttccaccttcgaggccctttcgctcggcttaacttccccgaattgctgtcccaggacgacgacgtttcgacccaacaacagggcaaca

SEQ ID NO: 20401 - DNA, 383 bp, Glycine max
cccacgcgtccgcccacgcgtccgggaaagtccaacttgcaaaagagcttggcttgcggccaaggcaagttgctatatggttccaaaaccgaagggcaaggttcaagaccaagcagctagaaaaagactatggcgtgttgaaagctagttatgacagactcaaaagtgactatgaaagtcttgttcaagagaatgacaagttaaaagcagaggtgaattctctggagagcaaattgattcttagagataaagagaaggaggagaattcggatgacaagtcatctcctgatgatgctgtcaattcttcttcaccccacaacaccaaggagcctatggattaattaattatttcaaaaaatgcaccaccaccaccaccatctgaa

SEQ ID NO: 20402 - DNA, 302 bp, Glycine max
attcggtcgaccacgcgtccgtgaggtggaactaccctcaattggaatgccatgaaccaatctccaaacccgtggcgcgtgggattctcgtatgccagagcccttcaaaacactgacttgaagacatggggaggcctgccagagaacgtgaaggcagcacaagatgcactcgcattccgtgccaagtacaactcactcgctcagcttgggaagctcactggtgagggtgaatcccaggtagccataaaggagttgttcgtcaaaagctactactactaagatggttgcagtgaacatgatac

SEQ ID NO: 20403 - DNA, 318 bp, Glycine max
acgttcaaaagctacaatgggaggttttggaagccaaaattggtaactggattcatttcatgcgtattgctgtgaaagtgttgtttgctgctgaacggaaagtttgtgatcagatatttgaaggatttgactcacttagtgatcagtgttttgctgaagtaactacaaacagtatttccatgctacttagttttggagaagcaattgccaaaagcaagagatcacctgaaaagttatttgtacttttggacatgtacgaaatattgcaagagattcatgcagagattgaaatactctttaaaggctcagcttgcacta

SEQ ID NO: 20404 - DNA, 346 bp, Glycine max
cccacgcgtccgcccacgcgtccgtccaaacccaccacaccaccattattcatatctcattcgctaggctttcactctgccttactcactctctactttgctcatcatcgtagatgaaccaacacttctagtctctcttactttataaccatgtaaaaatgagtcacctaatgaaaaattagtagcttcttgttgtgctttttattttgtttgtgttgagataaatttgtttgtttgtttggtattgttttgtgttttatgaattatttgatgggtgaagaaggagaagtggtgagaaagcaaggacaaaggggtgttggtggagataagtggtacttgtatagct

SEQ ID NO: 20405 - DNA, 381 bp, Glycine max
gttgacctcatctacttcgatggaattcgcgtcttcttcatcatccttcccaaaatccaaagcccgatggacatacgatgtgttcatcaattttagcggagaagatctccgtaagaatttcatttctcatctctcttatgccctttcaaaagctggaatcaacactgtccttgacggccaacaaatggagctggaagaactaatcaaaccagaaaagtctcagatctcaatagttgttttctccaaaagttatactgaatctacttggtgtcttgatgagcttgcaaaaatcattgaaatccatgaaacttatggccaaagagttgtggtcgtattttacgaaattgacccatcccatgtacgtgatcagaagggagattt

SEQ ID NO: 20406 - DNA, 417 bp, Glycine max
ctccgtctctctactctcttattctcaacgtcaaacccaaaaccccttcttcttcttcttctctcgcgccgcaataataatactaaaacatgtccaactctgacggagccactaacgccgtccctcccaacgacgccaacaacaacacaatcgttgagtaccagcagcgaaccaccaccaccaccgccgccgccgccgccctcgccgtcaagaaaccgccttccaaggaccgccacagcaaggtcgacggccgcgggcgccgcattcgcatgccgatcatctgcgccgcccgcgtcttccagctcacgcgcgagctcggccacaagtccgacggccagaccatcgagtggctcctccgccaggcggaaccctccataatcgccgttaccggttccggaacaactccggcaagctttt

SEQ ID NO: 20407 - DNA, 352 bp, Glycine max
cccacgcgttcgcccacgcgtccgcagagaactagtctcctactctcacccgcaagaaaagggtggcgtctcacatcgttggatacccccgtatgggtcccaagagagagctcaagttcgctctcgagtctttctgggatggcaagagcagcgccgaggatttgcagaaggtgtcttctgatctcagggcatccatctggaagcagatggctgatgctgggatcaagtacatccccagcaacactttctgtcactatgaccaggttctcgacgccaccgtcaccctcggtgccgttccaccaatgtacggctggaccggcggcgagattgcgtttgatacctacttctgcat

SEQ ID NO: 20408 - DNA, 324 bp, Glycine max
attagtccctactcaacacgcaatatggattgtcaaatagtactgacgaggccatgtttgtgattgaggcttataagactcttcgtgaccggtgtccataccctgcgaatcaagtggtcaaggaacttgatggcagttttgctttagctgtctatgacagcaaggttggcagtgtctttgcagcactgggttctgatggatgagtgaagctgaatcggggtattgcaactgatggatctgcggtgatctctgatgatctagaagtcataaaagagggttgtgccaaatcctttgctacctatgcacagggtgtatgtttcacag

SEQ ID NO: 20409 - DNA, 306 bp, Glycine max
cccacgcgtccgcccacgcgtccgggcctgtcggcgctgccggaccagcgcagatccgacgggatgctcctgacgccgtgcgggacgccggcctacgtggcgccggaggttctgaagaagaaggggtacgatgggtcgaaggctgatatatggtcctgcggggtcatcctctttgctcttctttctggctatttgccctttcaaggtgagaatgtgatgagaatttacagcaagtctttcagagccgattatgcgttccccgaatggatttcccctggggctaaaaacttgatctccaatttactc

SEQ ID NO: 20410 - DNA, 187 bp, Glycine max
gtttaataaatggctgtacatttttttacttataatatgatcacaattaacaaccatgcacagcctgaccatgcacaaccttaaaaaaatgtacagccatttattaaggttgtgcatggtaaggttgtgcatggttggtaatggtgatcatattataagtaaaaaaatgtacagccatttattaatc

SEQ ID NO: 20411 - DNA, 275 bp, Glycine max
caaacacagacagacagagagagagaaagagaaccaaaccaaataaagctcttggttggttgacccttgtgcttattttttgttgctgagaaagagcaaagaagaagaataagaagaaggttttgatcggatgcgatgagcacacaaggacaagtgattgatgaggcggttctggatgacataatccggcgcctaacggaggtccgattggcccgacccggaaagcaggttcagctctccgagtctgagatcaagcaactttgcgtcgctttcag

SEQ ID NO: 20412 - DNA, 432 bp, Glycine max
  modified_base (352)..(352): a, c, g, t, unknown, or other
gcggcttcgctcgctcgctcgctctctcttcccttaccctctgctgcggcgaaaaccgatacgagaccgttggccgttgaatgaatcttccaccacacgattcgatcaatctcaatggcgtgttttgattggtaaagtacgcgcgacggaacgaggcatggcagaagtggctaaaccgagttctgtgcctccgagctctcatcgaattggttcaggacctttgaaaagtggatctttggttagaaagaagacaccgtcagaacttaggggagagttgttgaagcgggcaagtaatgtggaccttactgatgaatctcaatccaccttggctgatcctacgaagaccactgangtggacaatggatttaaaaaacaagttatggaagcccctatatcacagacacacgggtgatgaagatttgtgcaaaaagc

SEQ ID NO: 20413 - DNA, 379 bp, Glycine max
  modified_base (10)..(10): a, c, g, t, unknown, or other
cccacgcgtncgcttttctctctgaatactctctactcaatacattgcgctctagtctcgtgtcaggatattaattttaggttcttcgttacgcgttgtgttgcgttgtgcgtgagaaagtgcgcgtggtgaaaaagcatggcttctcagctcctgagacgaaccttcggaagtcgtttccttgcaaaccctagggccttctcctccgctgcttccactccgatccgcgccactctcttccccggcgacggcatcggccccgagatcgccgattccgtcaaacagatattccaagcagctgatgtcccaatagaatgggaagagcactatgtaggaactgaaattgaccctagaacgcagagctttctgacatgggaaa

SEQ ID NO: 20414 - DNA, 369 bp, Glycine max
agcaaatgcagaaagaatttataaaacacatcaaagtataattcgctttatttcaaatttacacaagtattttcatactagaaatccgaattcacataattcttgtgacatctcctttttgtcacaagcatatgtattttttaatttattacacacccgaattattaacataaacatctataagttaagatctgtttttcaatatcatggaatttttttttttctgaaaaatgaaataaaggattctttttttggagcacaaggaatatttcattataaattaaaacataataaccctctcaattctgtaataaatcaatggacaaattggttaaaggatcattattatcaatatgacttatctaaaag

SEQ ID NO: 20415 - DNA, 205 bp, Glycine max
cccacgcgtccgcttaaaattccatttagggacttcccaaacacgtcactaatcgtatcagcaatgcaccatgcgcttgagctgcaatggatgccgcgttctccgcagagggtgcaccactgagtgccccattcgcatctccctccaatggatcaattcccctaactcccaatccaacgcaaccctcttccttgcaaagttctat

SEQ ID NO: 20416 - DNA, 251 bp, Glycine max
atttctagcaatggccaagatcaaggggtacgagctgatgcataagacgaatgctcatcttctttatcaactcaaagacctgaaagcggagcttggcttgcttcgtgttgctaacgtcaccggtggtgcccctaacaagcttctccagatcaaggtggggaggttgaacattgcccatgttttgacggagatttctcataagcagaaggctgcgttgagggatgcctacaagaataagaagtacttgccta

SEQ ID NO: 20417 - DNA, 187 bp, Glycine max
tctactcgttcgtccactctgtctgtatttcttggtcgaggtatcacactcagaagccacataataacagagtgcctcctctaacaacactctatcggcatgaattatgagctcgaaggcacgaccgactgttctgggcccgcggataaagaccacgacccaacatattgctccgccgatagaccct

SEQ ID NO: 20418 - DNA, 254 bp, Glycine max
  modified_base (68)..(68): a, c, g, t, unknown, or other
  modified_base (71)..(71): a, c, g, t, unknown, or other
gggggcgaccgcacgcgtacgaaaataatccatcatccaatgtattattttttctcctctacttctanaangatgtgagagaggttcatagtcagatagaagtacacgaggcaaaataatccatcatccaatgtattttttgtacatagaatcatcctctcttactgtaaaagcttaaattgaaatggaaaatttcgatctagaaaagatctatatggccaatcaatcaccactataataaaaaggattttact

SEQ ID NO: 20419 - DNA, 367 bp, Glycine max
aaaactcagaaccctaactatatccatggcatcgggtggaacagaagcttttccagattggggtaaacactgccagcaccgcgattgcaaccagctcgattttcttcctttcacctgcgacggttgccaacagatcttttgtttggaacacagatcctacaagtcccacgcgtgcctgaaatccgaccacaacagcagaaaggttgttgtttgcgaagcatgttccatgtccatcgagaccaccggccatgtgggacaagacgaggaggcaatcttgcagaagcacctcaagtctggtaattgtgaccctaccaagaagaagaaaccaatttgtcccgtcaagcgttgcaaggagggtttgacgttt

SEQ ID NO: 20420 - DNA, 153 bp, Glycine max
acgacggcgacctacgcgtacgcccactcatactcttgtatgagatgttaatatctaatcctccttcctcgattgaagaggggggcattgaggatgagctcatctacatccctctttttgccgacaatgattttctatcacatacgcatacac

SEQ ID NO: 20421 - DNA, 458 bp, Glycine max
atcgcgaagactagatctgatctgagagaatggctcctcggtctagcagcaaggacgcccgggaccttttccgcgctctttggtctgcttatgctgcaacccccactaatctcaagatcattgatctctatgtcatctatgccgtattcaccgctttcatccaggttgtttacatggctttggttggatcatttccatttaactccttcctatcaggagtactttcttgtgtaggaactgctgttcttgctgtttgtctcaggatccaagtgaataaagagaataaggaattcaaggatcttgcacctgagcgcgcttttgcggattttgttctctgtaatttggtgcttcatttggtgatcatgaacttccttggttaaattgggtttgtgtggccggtggtggttctgattgaacccttggataataaaaattaaatagtagtatacctagacttt

SEQ ID NO: 20422 - DNA, 478 bp, Glycine max
  modified_base (420)..(420): a, c, g, t, unknown, or other
  modified_base (456)..(456): a, c, g, t, unknown, or other
agctaagaggcgcagccgtagcaaaagctcgtggaattgctagcaatggcgaggatcaagggttacgagctgaggcagaagacgaaggctgatctgctgaatcaactgaaggacctgaaggcggagcttgccttgcttcgtgttgctaaggtcaccggtggtgcccctaacaagctttccaagataaaggtggtgaggttgaacattgcccaggttttgacggtgatttctcagaagcagaaggctgcgttgagggatgcctacaagaataagaagtacttgcctctcgatctccgccctaagaagaccagggctattcgcaggaggcttactaagcaccaggcatcattgaagacagagagggagaagaagaaagagttatatttcccactaaggaaatatgctatcaaggtgtaactntagagcaatcttatcggttaattggacatttacctnctttatactcgacaagttttga

SEQ ID NO: 20423 - DNA, 280 bp, Glycine max
aatccttattgtatttgatcagccaaggatattatcttgtcacagttgtcagaattgtctagactgtgacttaaatcatttgaagaggccaagcacacaagctctatggagaaagaggcagcgctactctggaaactcggcatgaagatcatttccccaggaacacattcgaatacaccgtggctgcactcctctacttgttcgcttggcctcttcacatgatctaagtcacagtctagacaattctgacaaccgtgacaatgaaatatccttggctgat

SEQ ID NO: 20424 - DNA, 213 bp, Glycine max
ctaaacttcacttcacactctcactttaggttcaatttttagtcatattcacccctttccggataagttactatcattttaacgaccatcctacaactctctcaatggtattcacccatagaatactaacaattacaatcaccaatatgttaacctggaattctacatacttcacagctcttgaatgagacacatgaactcatactatctatt

SEQ ID NO: 20425 - DNA, 353 bp, Glycine max
aattacccgggttcgagcccgacgcgtcacgtaatccgttattgtaatttgaatcatgccataggagtattatctatgtcacgagttgtcacgaattcgtctaagactgggatcttaaatcatttggagagaggcccaagcatcacaagctctatggagaagagaggcaacgtcatactctgagacatcatcatgaatcctcatttcccacaataacacatattgaatacactcgtggctccactcctctactcgtttgcttggcctcttcacatgatctaagtcacagtttagacaattctgacaaccgtgacatgataaaatccttgcctaatcaaatactttagggattc

SEQ ID NO: 20426 - DNA, 105 bp, Glycine max
  modified_base (1)..(1): a, c, g, t, unknown, or other
  modified_base (13)..(13): a, c, g, t, unknown, or other
nccacgcgtccgnccacgcgtccggttacaccgctgggaataatcttcgcggagaacacaaagtggctttttttggcatatttgatgggcacggtggtgcaaaag

SEQ ID NO: 20427 - DNA, 323 bp, Glycine max
agctaaaacaatacttcaggccagaatttttgaatagattggatgaaatgattgtcttcaggcagctcacaaaactggaggtgaaggagattgctgacataatgctcaaagaggtgtttgatagactgaaggtgaaagatattgaacttcaagtgacagaaagattcagggacagagtggtggaggaaggttataaccctagttatggagctagacctctaagaagagccataatgcgacttttggaggacagcatggctgagaagatgcttgccagagagatcaaggagggcgactctgttataagtgatgttgattctgat

SEQ ID NO: 20428 - DNA, 244 bp, Glycine max
aatccttattgtatttgatcatgccactactatatcttgtttgcttaccttcaacaaatcaatgatccactcaaccccattcccattcccaatccacctctttctcttttcttcgcaaaacgccccattctcaacccatcaatttcagtctctcttcctttcacttttcacgcctatcccttatcacaaccaaacacacccttaacctcacttccacacatgccttcacttccgaacaacaaac

SEQ ID NO: 20429 - DNA, 341 bp, Glycine max
cgtgcacattgctgagagaatgcgcagaaaaaatgcatcattgccaatgataaggggtggagaaggagtcactcctcttcacttggctgtgttacaaggaagaagtgaaatggcttggtatctgtttgataaaactagagaaacactgtacgatgatgattggtttcaagtgtttctcatttgtgtaaactctcgactttatgaactggccctggaaatgctcaatcagaaggaatcgctagcttttgctcggggtgataacgatgagacagctttgcatgttttggctcgaaaagccttggattgtggttgccgaagtccgctacgatatccaaaacacg

SEQ ID NO: 20430 - DNA, 343 bp, Glycine max
gctatccattcctgcccctggtcaaataggctatggttggatggctttctcaacctgagactggtgccttactgcaaaggagctatctgatctaagaaatcattcgctataagggactgaatttgagaactgacatttattagatactttttcaacaatcgtgacattttccctctcactactgctataatccgactgtatgtaaaacaggtccattatgcacaactcatagtattggagctgtatgtaaaataactacatcatgtatattgtgcttccatattccccttttgagaaaaaagattcttgatatagaaattttggcactcatcttttcgattat

SEQ ID NO: 20431 - DNA, 371 bp, Glycine max
gtaaaatcttggtcctcctcatccacaacacaaagatcaaatcctacgcaacgtgtggttaaaccaaacccgcgtgctccttttccatttctcatttccttcaagtacttcagttctcagcacaccacatcacctttgcagcagcctccataatattccaattcatcaccctcttttcaatattcccttattatcgctttgattcgctgatttttttaattctttacctcaattttaataagaatcagtttttgtagttatgatttgttgtagtaagattaattaactattcagattcagttattgccagctttgatttcttttttattgttcttaaattaggtttgcaagtaaaccccaaccccaaaccc

SEQ ID NO: 20432 - DNA, 437 bp, Glycine max
catcaaagtttcacttcagccttatcccggttaaggtttcgggttttgacccaacctttgacgtatgcgaactcttaaatttcggatcaagtctgagcaatctggttggtagaacctttggtcttagagagtcaagttttatgtctgaattagacgatcaaattcctactgccttcgatccttttgctgatgcaaatgctgatgactcgggtgctgggtcaaaggagtatgtgcatattcgcgtacagcagcgaaatggaaggaaaaggcctgccaaccgttcagggattgaaaaaaagaattcagctataacaagatacttaaagatgttaagaaagagttctgttgcaatggaacagttgttcaggacccagaactaggacaggttattcaacttcaaggtgatcagaggaagaatgtttctaccttcctggtcc

SEQ ID NO: 20433 - DNA, 394 bp, Glycine max
  modified_base (31)..(31): a, c, g, t, unknown, or other
  modified_base (302)..(302): a, c, g, t, unknown, or other
cccgggggggccgaggcgaacgaagatgtcnaagcgtggtcgtggtggttggttggggaacaagttccgcatgtcggggggtgttgcattggcggcgacggtgaactgcgccgacaacacgggggcgaagaacctctacatcatttcggtgaaagggatcaaaggccgtttgaaccgtcttccctctgcctgcgttggcgacatggtgatggccaccgtgaagaagggaaaacccgatctgaggaagaaggtcttgccagctgtcatcgttcgccagcgcaagccatggcgcccaaaggacngcgtctacatgtacttcgaagataatgctggtgttattgtcaatcccaagggagaaatgaaaggttctgctatcactggtcccattggaaaa

SEQ ID NO: 20434 - DNA, 377 bp, Glycine max
  modified_base (160)..(160): a, c, g, t, unknown, or other
  modified_base (341)..(341): a, c, g, t, unknown, or other
caaaacctaaaaaatttattttcataccatccaactcaacaattgctgctcgtttaattattaccaccaacctcaaacaaacaaaaatcaataacttatccactcttctcaccatttatcttcaacactccttttccaaaatctaacaatttccatcctnattaaaactccacatccaacaataacaatatacacattcctaattcaaaaaatcatattaaaatttccttcaatattaacaaattttataaactgcatacaatcataacaacataaaacttattatcatcaattcatcaacaatatgaccaataaatatttactttatctccctttaccanctatactatctactcctcttttttaccatataataa

SEQ ID NO: 20435 - DNA, 373 bp, Glycine max
ggccaatgctgacatagtaaaacaataacatgctcacatccaatcacatgtatcagggggggtgagagagattgcgaactatatcacatcacaaggacatctggcatcagaaagcactacacaattaagttttatgaatgaacacaagacagtacacgcgtcaacttagaatttacaaatcaaggatccaagcgaaatcacagcacaggaatcaacaaactgccaacaattgactgatcaagagatacaaaaatcagaaaccgaaagtgtgtatgaaaattacgcccttcaaacattacccaatacagcatctgtacgtattgaaacttataaaagcattcaagagatacatacagaaacaaaattcgctgtg

SEQ ID NO: 20436 - DNA, 470 bp, Glycine max
cccacgcgtccgatctcaccactaagtttattattatcaaaaccaaaagctagcaggctacgttgcaaagcaacacatggcttctacagacaagcatggcgacactgaatacagaacatcatcttcaactccagctcctgcgggtgttgattactttaaatttgatgttatcctaaggtttgtgttatttgcagcatcactggtagctgttgtggtgatcgtcactggtaatcaaacagaggttattcttgtgccacagcctgtgccatggccagccaagttcagatacacaccagcctttgtgtattttgtagctgcattgtccgttactggcctctacagtatcattacaacacttgcatcactctttgccagtaacaagccagccctcaaaaccaagttgctcctctactttatcttatgggatgcgctgatattggggataatagcctcagcaacaggcacagctg

SEQ ID NO: 20437 - DNA, 500 bp, Glycine max
  modified_base (4)..(4): a, c, g, t, unknown, or other
gaanacccggggcggccgacgcgtacgggcccttgcccttggcgctgatctgattctttactccttaacaaaatacatgggtgggcagcatgattcccttggtgggtgcataagtggttcaactaaggtggtttcgcaaattcggactttgcaccatgttttgggtggtacacttaacccgaatgctgcatacctattcatcagaggcatgaaaacgctgcatcttccgtgtacagcagcagaattcaacaggaatgaggatggccgaacttttagaggcacatcccaaggtgaagcgggtctactatccaggcttgccgagtcatcctgaacatgagcttgccaagaggcagatgactggtttcggtggtgttgtcagttttgagattgatggagatctacataccacaataaagtttattgattcactgaaaatcccttatattgcggcctcgtttggtggctgtgagagcattgtggatcaacctgctattttgtct

SEQ ID NO: 20438 - DNA, 470 bp, Glycine max
  modified_base (371)..(371): a, c, g, t, unknown, or other
cttcagaagacatggcctcattgggtgggttacaaaatgtgagcggcatcaattttgttaggaaagagggtccaaaagtcaatgcaaagttcgagctgaagccgccaccatatccactgaatggtttggagccggtgatgagccagcagacacttgagtttcactgggggaagcaccacaagacttatgtggaaaatctgaaaaaacaagttgttgggacagagcttgatgggaagtcactagaagagattattgtcacatcatacaataagggtgacattcttccagctttcaacaatgcagcacaggtatggaaccatgacttcttctgggagtgcatgaaaccaggtggaggtggaaagccatccggngagcttctagaactgattgaaagagactttggttcatttgtaaaattccttgatgagttcaaggctgctgctgcaacacaatttggttcaaggtgggct

SEQ ID NO: 20439 - DNA, 215 bp, Glycine max
caacaacccccccgccacccttcacgatttcctcgcccgcctcgaagacgagctccgcaagatccacgccttcaaacgcgaactccccctctccatgcttcttttaaacgacgcaatttcagttctgaaggcggaatcgcagaaatgcagggtcgcgcgtgattctgcgccggtgctggaggagttcattccgttgaaaaaggagcgtggtgatc

SEQ ID NO: 20440 - DNA, 338 bp, Glycine max
  modified_base (334)..(334): a, c, g, t, unknown, or other
  modified_base (336)..(337): a, c, g, t, unknown, or other
gtgtagaattattatggacgataaaattctctctctgatccaagtgcatacgtaccccgggctcaggctcgatggtatatatgaatttaattatatgtgttaattaatataaagtcttttaattataattatcacgaggtatatattaattgtttctttttcttttctctatagttgttcctagaattctcaatttgttatgttgttatgaattgtaggaaattagttgatctacttagttgtgatttgtaaattggtgcgtgacgatgatccatcattttctgcatctaactgtatttagtggtgatgaattgaagcacgttattgtttgtgntnna

SEQ ID NO: 20441 - DNA, 451 bp, Glycine max
cgtacgcttaacagtgccaaccaaggaataagggattaaaattgtccgttttgcggactcaaaacgttccgtttttggagaagataccaatgaaaaaaagttggtgaaaggaaggtgtagtagtgatggtgatgaatcaagagggattagagtgaagctaaagatgacaaaggaagaagcggcacgtttgctatcaaaatgcaaagaaggaggagttctcgagttcaaggatgttgctcgtgagcttgtggccctcccactgaaccgagttagtgttgtgtctgctttacacgaacgataatgatgcattgctcaaggtcttttatataaactcctatctcaatatgtttcattaagttgtattagtgaaagattcaaaaaactatatatatatatatatatatatatatatatgtagctgggtactctaggaaaattttaaagtttatgc

SEQ ID NO: 20442 - DNA, 305 bp, Glycine max
  modified_base (131)..(131): a, c, g, t, unknown, or other
gcgaaaaccaagagatggttagaggaaacaccttatatgaaaaatatcattcttatgctcggccttgttggtacctgcatggtgattggagatggtattcttacaccagctatatctgttttatctgccgntggtggcatcaaagtgaatcacgctgatttgagtaacgaaataattgtgctggttgctgttgtaatattaggtgggttattcaacatgcaacattatggtacaaaataaagttggttggctatttgctccaattggcccttctttggtttcttctaattggaggcataagaata

SEQ ID NO: 20443 - DNA, 178 bp, Glycine max
ctttcctcaaccttctttcttcttatatatcgaacatggctaagtatcattcaagtgggaaaagctgttccattactgctatagccttcctgtttattcttctaatcacttatacaggcacaacagatgcacaatccggggtatgttatggaagacttggcaacaacttaccaacccc

SEQ ID NO: 20444 - DNA, 420 bp, Glycine max
acgcgtacgatcacaaccgccatgctcaactagcttgaactgtatatttcgatattcaaatgggggacggccacaaatacccgagtgtcacgccttcaaccttacctcgccaaaagaaaccctccatacgacgatatcatggagctgctatggcacaacggccaggtcgtggtgcatagtcagaaccaacgttctctgagaaaacttccgccggtgaccaactcccacgactcctctcccgccggtccttcaatgactagagagattcgaccgctggtggagaatttcaatcagcatctcttcatgcacgaaggcgaaatggcttcgtggcttcactatcctatcgacgacgactagcctgcgttggatcaaagcttcggcgccgattttctctattctccgcctacgacggctaacaac

SEQ ID NO: 20445 - DNA, 468 bp, Glycine max
attaagatcaccaaagtacttgtgagtgtatacccaacacaaactaagatcaacagggacgactacacccgcgtttgagaagttgagagggaacctatcatggagtattccacaccacgaccaatgatgggcaactaccaccaccctaatgctcaccgtgtcctcaacgagaagattgtttatgaggaggatgtgattggaggatcccgccacaaccacatgcatcaccaccaccctgagactcatgagagagtcaaggtggtggagtatgaacaagttcctgagaggcgcgttgtctatgaagagaaagttgcttatgacaacgatcgttactactctccaaggtattgaaattggacaaatggaagaacacctataacgtgttatcatgtggctttttattaggcaggctacctagtataccaaaagcaccactgtgcttgtactaaataaattcctgcttatata

SEQ ID NO: 20446 - DNA, 326 bp, Glycine max
cgtacgcaaagtaccatggcttctgcgggtgttgatttccgatgctaagttaataacactcggtggggcttctgacaacgtgggagctgtacaaagccttctcttagtacggtgacttctatgaatcgaagattatcaacgatcgtgagactggaagatccaggggatttggatttgttaccttcgccttcaaggattcaatgagggatgcgatcgacgggatgaactgtcagaaccttgatggacgcaacatcactgtgaacgaagctcagtcccgctgaagccgctgtggaagcggtggctgttacagaagtggcggttgatac

SEQ ID NO: 20447 - DNA, 473 bp, Glycine max
  modified_base (329)..(329): a, c, g, t, unknown, or other
ggaaaaatggtttcgctgaaactgcagaagcggctcgccgcgagcgtgctcaagtgtggcagaggaaaggtttggcttgaccccaatgaagtcaacgaaatctccatggccaattctcgccaaaacataaggaagctggttaaggatgggtttatcatcaggaagcccaccaagattcactctcgctcacgtgctcgtcgaatgaaggaagccaagaggaaaggacgtcactctggatacggtaagcgtaagggtacaagggaggcaaggctttccactaaaattctatggatgaggagaatgcgtgtgctcagacgcttgcttcgcangtacagggaatctaagaagattgacaagcacatgtatcatgacatgtacatgaaggttaagggtaatgttttcaagaacaagagagttttaatggagagcattcataagtccaaagctgagaagggcagagagaagaccttgtc

SEQ ID NO: 20448 - DNA, 226 bp, Glycine max
tttctctcaaacatttttcctttctaaccactaacaaactcaacggggccgtttcataacaaatgtgcgcccccaataatcccctaaactacttatacaggctcatcacatacactatcccatctctttaaatgcacaatcatcatcagcatacccaccactaattactttacgtcactcatcaatcaaaccaaccttcccaacatgcaaatttaccatccaagcc

SEQ ID NO: 20449 - DNA, 280 bp, Glycine max
ccgggccggccgacgcgtacgcccacgcttcctctttgctgaaactgtatttttatgggctgcatattatttgctggtgttggtgcttttcaaacatatagttgctccctattcgtactagttatctattgaacgcaatgactcatcctggcagaaggctttcagtgacattaggtgcaataaaaattacctatattgaaggaaccaccacatgcaatgttataatccttggaataaaacaaatttaatatattcagtccaggttgctcttcaaatacta

SEQ ID NO: 20450 - DNA, 394 bp, Glycine max
ctcattcactggcctcaaggcaagcgcaggcaaagtgagtgccgccgcagttaaagtctcagctccgcaagccacaaagttctgcggcatcaaagctttcctcaaagacgttggaatcgctgttgtggccactgcttcgagcgcagttctagctagcaacgccatggccattgaagtgttactgggcactgatgacgggtctctggttttctcttccaactctttctccggggcccctggggaaaagatcgtgttcaaaaacaacgcaggtttcccccacaacgttgtgttcgacgaggacgagattcctaacggcgtggatgcagggaaaatctccatgagcgaagaagaccttctcaatgcggctggtgagacttacagcgttactttggat

SEQ ID NO: 20451 - DNA, 477 bp, Glycine max
cccacgcgtccgaaagaactgaaacaagtcagacaactaaagctaaaaagcctaccgggcctgctcccttagagaagcatgtggctcgttggggtgatgagtctgatgaagatgaagataaagataaaaatgaagaagaacctgtgagaacaaaggaggaagaggagctgatactgaaggctgagaaggcaaggaaggaggaagaggaggcaaagttgaaggaaaagcggaggctagaggagattgaaaaagctaaggaggcactgcagagaaaaaagcgtaatgcagagaaggcccaacaaagggctgccttaaaggcacaaaaagaagctgaactgaaagagaaggaaagggagaagagagcaaagaagaaggaaagaagaaagacatcttctgctgtcactgctgagaatacagaacaagaatctgctcataccacagaaactctaacaagtgtggaagaaagtgacctgactg

SEQ ID NO: 20452 - DNA, 469 bp, Glycine max
cccacgcgtccggtttctctgcctaataggattgaaagatgggtcaagcactagggggctgtgaagttgatcagtcagatgtggctatcaaggagcattttggaaaatttgatgatgtcctagaacctggatgtcattgcctgccttggtgtcttgggtaccagattgctggtagtttgtcactgcgtgtgcagcaacttgatgttcgatgtgagacgaaaaccaaggacaatgtctttgtcactgtggttgcatctgtgcaataccgagctgtgtctgagaaagcatctgatgcattctataggcttaccaacacaagggagcagatccaatcatatgtttttgatgtcatcagggccagtgtaccaaagttggagttggattctgtctttgagcagaagaatgatatagcaaaggctgtggaggaggagcttgagaaggccatgtcaacctatggatttgagatagt

SEQ ID NO: 20453 - DNA, 477 bp, Glycine max
  modified_base (411)..(411): a, c, g, t, unknown, or other
agaaacatggcttgagaaggtcaggttgtccgcgtccacaccggtgatgcgtggaaccagcggctggggaatggaaaagactcccaaaaattgattgtggtggattttactgcttcctggtgtggtccatgccgttttattgccccagttctggcagagattgctaggcatactcctcaagtgatcttcctcaaagtggatgtggatgaagtgaagcctgttgcttaggaatattccattgaggccatgccaaccttcctcttcttgaaagaatggcaagatcgtggataaggttgttggtgctaagaaggaggagctgcaactcaccatagccaagcatgtatctgctgctgctgcttcttcttgaagtgaagtatcatcatatgaaagaagatcaagaataatgcattntaatgttttcaagtcagtttgcatgttttctctatggatattgagttggcagaacattgagtgatg

SEQ ID NO: 20454 - DNA, 477 bp, Glycine max
  modified_base (72)..(72): a, c, g, t, unknown, or other
attttcttctggaaatctcgatcaccataatgctgcttttcttcaagctgatctgctggaggtagtggactntataaatgatgcaattgtatcaatggactcttttgttagtgcatacgaaccagcagctgttttcttctcttgcccagttgaaatgagttatgggaatgaggaactgctgagcctccttgcccgattgcatgattcacttattccatcattgcaaaagggattccgtatgatttttgctgacaaacaagatggcacagtatctaatatcttagtaagtttgaagatgttaaaaattagattggtaaagtttggttggcaactattgcacttgtgctatctaagtgatgaagtgttcaaagatagcatccctcttctagctgccacaaagatgtttcctgccaatgtagaggacccagtcatcagagctgatattcttgttcaaacatttagagagatcaattcagt

SEQ ID NO: 20455 - DNA, 342 bp, Glycine max
tgatatagttggcctttgtgcattgaggttcttaatctcccaagatttgctttctgaaagtttattgaagtccatgtatgtttcttttcttgcgggatgcttccggtcagtgcgttttggtttagaggaagctcatggaaaaggacaagcattgcagttcaactggttatatgagaaaggagcctttgtctgggattctgaaggcaaagtctctgttgattctaccaagattgaaagagcagttgaaagcctgagcagggagatactcaccatacaagccaatggtgataaaaagactgctggtttgcttcttctgaaatactgtgtgttgacagaaccact

SEQ ID NO: 20456 - DNA, 362 bp, Glycine max
gcgcaacaaacaaagagggtttgccttgggcccgttgtgtttgtttccggaccaaaaaaaaagagggggtgaggtcttgaatcttggccaaaccggtggtggttgacccccccccacccatgctgggtcgtctagcctccatcgtggcgaaagagcttctgaacggccagaaagtggtggtcgttcgctgtgaagagatttgcatctcgggcgggctggtgaggcagaagatgaaatacttgaggttccttcgcaaacgcatgaacaccaaacccttccatggccccatccacttccgtgccccctccaagatcttctggcgcaccgttcgtggaatgataccacacaagacaaagcgtggg

SEQ ID NO: 20457 - DNA, 390 bp, Glycine max
  modified_base (1)..(1): a, c, g, t, unknown, or other
ntccgcaaaagctattggtatggggaactcatttcaaaaaaagggggcactacttttttgacttgggcctgctttggaagaaaaggtggatgggtcaaatccaaggggaccaaaacaaaaaaccgaagctttggctggcttatctaatgcatttggttcatcttctgaaaaagcatcccgtttggcacaaaataaattggatgggttagggccaaggggaccaaagcaaaaggcaaaaactttaaccggtttaaactctgcatttaattcaatatctgggacgaagacttttacttctaggccatcctgaagaagtcaaggatcacaaagagctgcagcagtagctgctctttcacagttcttatggctgaaaagaaaaaatcaccggat

SEQ ID NO: 20458 - DNA, 278 bp, Glycine max
ctcagtcgcttctcgaaccctactttcttccgcggtgattgcatttgaattcctgtaatggggattgataatatttttaaaaatgaagctagtgaagaaaaaggagagcgtgccagaatggcttcttttgttggagccatggctattgctgacttagtgaagacaaccttggggccaaagggaatggataaaattttgcagtcaacaagtagaggacgtgaaggtactggcaccaatggtggcgctacaatcttgaaggccctccatattgataaccc

SEQ ID NO: 20459 - DNA, 299 bp, Glycine max
ctcacgcgttcgtccctctgttttgtatcgtattgaactgaggcccacttctatcgagagggaggtgtttccaaagattgctttcaagaaaaagctataatgcaatggtcctgccagaatttttgatggacattggacaaccgatggattatattgctggcctaaagctttacctgcactcattgaggaagaagtcatcttctaagttggccaatgactctcaaattgtagggaatgtcattgtggatgagacatccaaaatttgcgaatgatgcctcattgtacctgatgtttctatt

SEQ ID NO: 20460 - DNA, 445 bp, Glycine max
  modified_base (79)..(79): a, c, g, t, unknown, or other
ggaaaacccgggccggccgacgcatacggatggtttgtaccataccacaccgattcgattatggatgtcgccgtctccncaaaggctcggtgtcaatactatacacacgctataaccatttgcaagaactaaaggccttctactaatccaaagctggagttaaaggcctgatctactccggcatcaccaaactcccaaaaattttcgtccggccgccagaagacctcgccgccgtccacccaatatccgacaaccctgccggtgcccagttcacgatccccataattgacctcgacggccttaccggcgagcgctccagcatggtggctgcagtccggcgggcggccgagacggtggggttctttcatgtggtgaatcacagaattccgctgaaggtgctgaaagatacgatagcatctgtgcatgagttccactagctgccaca

SEQ ID NO: 20461 - DNA, 461 bp, Glycine max
gcgtccgcccacgcgtccggtgacctgcaacaacagaattataaggtgggtggggttgaagggtgtctgttgtttttgctgggatgccagcacttctcctaactttgggagccttgttcgtggtggacacccccaacagtttgattgaacgtggccgcttggaagaaggaaaaacagtgcttaaaaagattcgtggcactgacaacattgaacttgagttccaggaattgcttgaggccagtcgtgtggctaaagaggtcaagcatccattcaggaatcttctcaagcgcaggaaccgaccccaacttgtcatttccgttgccctacagatattccagcaattcacaggcatcaacgcaatcatgttttatgccccggtgctgttcaacacgttaggattcaagaacgatgcatccctgtattctgctgtgataactggggctgtgaacgtgctcttcact

SEQ ID NO: 20462 - DNA, 472 bp, Glycine max
ctttcaggtgtatttgtgttctaattatctattttagaagaacatggaactacaaggtatgggtccaagtaggtaaatttgaaatcttatttctttgtactgatacttgtggtttgcataataatgtttcattgttttgcaaatgatgtaattcaataatcaaaataatcatacttccaaagacatatagtatcatttttaggggaatttagtttatacaagatattcatcttggtaataagatgccgtgacactgatgctttggtaattaactatattttgttattctttacgagacccacacaattattctagaaacagaatattaaaactagtagagcgtgtgtgctataacagttaacagaatttaatgctttctaatttgtttttgctccttttctttagacaaccatgctggcctgcgactaaatataacgaataagactgaggatttcacccctgttaattaatt

SEQ ID NO: 20463 - DNA, 474 bp, Glycine max
  modified_base (10)..(10): a, c, g, t, unknown, or other
cccacgcgtncggcacgaatatctttgttgttggagcgatccgagaaaaactcttgtaacgtgttggtttaccaggacctccttacaagtgatgagcttctctctgactccttccgttacaaggaaattgagaatggaatgctgtgggaagttgaggggaagtgggttgttaaaagagcagttgatgtagacattggtgcaaacccttctgctgagggtggaggagaagatgagggagttgatgatgcagctgttaaggttgttgacattgttgacacattcagacttcaggagcaacccgcattcgaatagaagcagtttgttaccttcatgaagaggtttatcaagaatttgactcccaagctcgatgcaaagcaacaggaagttgttaagaagcacatcgagggagcaactaaatacctgctctctaagattaaagatttccaattttttggtggtgagagcatgggtgat

SEQ ID NO: 20464 - DNA, 399 bp, Glycine max
catgtgaagtgggcgtggaaaccttagaaatctagcatctggcctggtaactcaacaatgggtggggggaaacttgccacccggggaaacaaacaagaatcaataactgatccacttttgtcaccatttatctgcaacgtgccttttccaaagtctaacaatttccatccagatgaaaactccaggtccaacaataaggatatagacattcctaatgcaaaaaggtatgggagtttttccttcaatatttgtaattgtgggaactggtaagttagcataacaagagaaaacttatagtggggagtgcatgagcagcatgacgtatagaagatttactttttctccctttggtggctttgctatcttctgttcttttttgcgggttaatgaggcttggaa

SEQ ID NO: 20465 - DNA, 288 bp, Glycine max
  modified_base (260)..(261): a, c, g, t, unknown, or other
gtgttatgggagataaattgttatcaacatttcaaagtccttctgggtccattcaaagaagaaaagggagtaggttgcctgaaaatatctacataaatattgacctcattcctaaaactgcaagaccttctattacatgcctcgctgttggaatgaagaagattgttaccacacacaataccaatgatatcagattatggaaattcaaaagcaagatttcttttgtaaattaagtatttaataccctgtacactgaatannattgtggattattttatagctgacatc

SEQ ID NO: 20466 - DNA, 474 bp, Glycine max
caaataccatttcattcattcttacatattgcttaattttatctgaattttgaaacgcctgctgaatggctttttcaagagttgcattgttaatatgcacggtaattgggtattttgtgattgcctctgcgggcaatttttaccaagattttgatatcacttggggagatgggcgtgctaagatactcaacaatggcgagcttctcactctgtctcttgacaaagcctctggctcgggtttccaatccaagaacgaatacctttttggtaaaattgatatgcaactcaaactagttccaggcaactctgctggcaccgtcacagcctactacttatcttcaaaaggagcaacatgggatgagattgactttgaattcttgggtaatttgagcggtgagccatacatccttcacaccaacgtgttcagccaaggcaagggcaatagggagcaacaattctacctctggtttgacc

SEQ ID NO: 20467 - DNA, 460 bp, Glycine max
acggttggaaggaaaatctgggtgcaagtcaagctctttaaagaatccctggcatcaagttcccggagagacattccaaaccttctggttctgcacctgagattcaagcttcgtcttcaacaactgatgccagtctagcgttctttaaaagttcaaatgcctcatcctcagttggagggaaggcctctcttcaacccaaaagaactccagtgtccaaagaggagattgaagcaattttgttgggtggcagcttctaatcgagcttgtccaagggcagactatattgtgcactcatttttttggatctaattcgtcattttccaaagtttatggttctcttttgttgccaagtgttggcataaacaatacaccgagtacaattgtcaataattgatatactcgttgaattttccacttatggaaatcgaatattgactctggacaaaaagagtttcaagtt

SEQ ID NO: 20468 - DNA, 473 bp, Glycine max
gcgccaaaacctcttctgtatattttttccttcttcttgtgatcattcctctcatttgggggcgcggtgctgtttgtgatcaacctgcaaattctgatctttttcccttcctgattcggattcggataccctgttgcgtttttctttctgggtgtgttttatttcggccaaagtttctgttttgcatagtgggaagtttaaaaagggattaattctatgtgggcatcgttcatattggcaaatcaatgttaactctatcatcagtgtggttatgaagtaatatggaagtgctccttgcgcgcatagctcatcaacgacaacatcaaggacaatagcatgtcgttttacattggtcgtgaggcttcaaagctatggaagagaatttgtgcagagacgactacagaggtcaacctccttgctgagaatggaagtaccttctggctggtcttgtttgtcagtatatacatggtttg

SEQ ID NO: 20469 - DNA, 381 bp, Glycine max
cccacgcgtccgcccacgcgtccgcccacgcgtccggtccacggacttcagagaaaagatgggtacattgcaaagacaattgatgaatgtgagattttccggaagtgccatgaaactgactggagaaatagaagaggaaatagttaatgtctctatcgatgatgttgttttgcaacttaagaatggtaaggatgaagaatttgcggttgcacttttgagactaaaggagttcatgagcagtgaaagactggatggtggcttgattgatgaggaaagcaactctttccattcttttcaatcgtctaggttcatgtaaggctgacaataggttgaccatcattcgattgctaagaagtattgctttaggaaatgatgagaaaa

SEQ ID NO: 20470 - DNA, 297 bp, Glycine max
  modified_base (4)..(4): a, c, g, t, unknown, or other
gaanacccgggccgaccgacgcgtaccgcaaaaccttaagtatcggatcaggttttagtaattttgttggtagaacctttcgtcgtagggtgtcaattattatggctgaatcacaccatcaaattcctactgccttcgatccttttgctgatgcaaatgctaatgactcgtttgctgtgtcaaaggagtatgtgcatattcgcgtacagcaacaaaatttaatgaaaagcctgacaactcttcagggattgaaaaaagaattcaactataacaagatacttaaatattttaacaaag

SEQ ID NO: 20471 - DNA, 456 bp, Glycine max
  modified_base (403)..(403): a, c, g, t, unknown, or other
  modified_base (417)..(417): a, c, g, t, unknown, or other
cagacggcttcgcaaatacgggctccgatatgacgatttgtacgatccttactacgatctagatgtgaaggaggcgctgaatcggcttccgaaagaggtggtggacgctcgccacgcgcgtcttaaacgcgccatcgatctttccatgaagcacgagtacctccctgacaatcttcaggcaatgcaaacaccattcaggggctaccttcaggatatgctgactcttgtgaagagggagagagccgaacgtgaagcattgggaggtttgcccctatatcaacgatccattccttgagtgcattaattattttgattgaagtgggaaggttaaattgtattgatgttgtgatagaatgttttcttttaaagaagaaaatatggacaagctttgtggtataaactntataatgaatgcantttttaatggtatcaacctggcgcaggcattttattaat

SEQ ID NO: 20472 - DNA, 450 bp, Glycine max
aaagagatcacatagcagaatggcttctactcaatgtttcttgcaccaccatgctcgtacgacccctgccagatccccatcacaacgcatcatggttagcaccaagcctaaccagcttgtttgcaaggcacagaagcaagaggatattgatgtcagcccaatctctcgccggttagctctaaccgtgctcattggtgctgctgctgttggctccaaagtccaacctgctgatgcagcttatggggaagctgccaatgtgtttggaaagccaaagacagacacagatttcctgccatacaatggagatggattcaaactatcgattccctcaaagtggaacccaagcaaagaggttgagtacacaggtcaggttgttagatatgaggataactttgattcaaccaccaacgtggttgtcaccatcactccgactgataagaagtctatcac

SEQ ID NO: 20473 - DNA, 443 bp, Glycine max
aaaaaaaggaacaataataataaatgtagcatgggaagaaaaaaaaaaaagagaaagggaggggggaaataaggtgggccaagtcgtctagaaacctcaacattttttagagggattttgctattaaaatttgacttgagtgacggtgtagattataatagtattagcatatatatctctatcgtatgtactacgagagtttgatgggtttggagtaatttttatttttatgttggtgactcattaatattgagttggcataattcctctaggaggggagagggattttgcaacatgttactgtgggagagtaaatgagagaagaaaaagaagggaaacactgaaacagtggtagaagaatttaatgtgatttgttctttgtaacctgtgagtgtggaagaaaacaagtgagttgcgggctggaattcaaaagttgcattaat

SEQ ID NO: 20474 - DNA, 484 bp, Glycine max
cccggggcgaccgcacgcgtacgatcccatacaattatttaaacagctttttcttcttaataaaggcactttaaaacagggtcgtttaatactaaagttgcgtaccccctatcctccggatctttattctcttgctctctcaaatgtaacacgaacatcaaaaacagtctgacatttagtccattctttaacatattcattctaacatgtattattttttccaaaaatttcttcatctatatttaacttaatcttaatgaaaataaagatactgctcttcaaatttatttgcctatttaaaaacaaatatccttccttatcatgtatatggattcaaactatcaatataccatcaatttaacctccgccccactctataaaatccaaactttcttactcttacatgccaacatatatttcttttatacaccaacctaaatttaactaacattccgactttttacaactttattacttacaaaac

SEQ ID NO: 20475 - DNA, 445 bp, Glycine max
ctctggtctctggcttccttggtacgggaagaactcaatcttgtccatttccctttgggttggctgtcttcgatctcttcaccttccattcgaccaccctcttatcacagctcgcgttaacttaagccctctccgttgagggtttctccaggtgtggtttgattttcagtttctgatgctgaagaaataaaaaagcttgaaggctttgctcttctgtgtgaaaaatgttggaaggtggtgcgaaattcccgggaataatagatctcaacaagaataataacaactactatgatttctctcaaggcttttaccataagctgggggagggtaccaatatgtcaattgacagcgttgggagcttacagacaagtaacggcggaggatctgttgcgatgtctatcgataatagcagtgttgggtccaatgattcccatactcgcatgtt

SEQ ID NO: 20476 - DNA, 491 bp, Glycine max
cgaatcccggtcgaccacgcgtccgttctgtctgagtcaagctttttggttaatctctccagaatcattcataaaaccttggtgtagctccgagctactggtttgcaatccaaccatattgaaatttgctgaaatgctttccctcaatggtagatctgtgaattacaccaagggaagtttcatctttcccggtgctcagccctatccccatcgcaacttttctgaggaagttgctattcttgatggctactttggcaagcttagtgcaagaagcaatgcttatattttgggtggccaagacaaatcacagaactggcatgtctactctgcttctgcagattctgtaactccatgcgacaatgtttacactctagagatgtgcatgactggcctggatagagagaaagcacaggttttctacaaagaacaatctgcttcagctgccattatgactgttaattctcgcattagaaaaattcttccagattctg

SEQ ID NO: 20477 - DNA, 447 bp, Glycine max
  modified_base (90)..(90): a, c, g, t, unknown, or other
ccctaacatagcatcatcctaaggcacatccttctccccctgaatacttggccctccggggggacgcgacttataaagacgatctatatntaaggaagaggacagggatgcgtcgggggctttgttgcacatgtcaggtggaagagtcttacccatcaaatgaaaatgagcacctgaaaagcccaaggaattatggagatggaaatcaaaaaggctcaaaggtgtcagctcctgtcaagcctgaaacacaaaaggcacctccacctattgaagctccagccttatctttagatgagctgaaggagaagacagacaactttggttcaaaggcattaataggtgaaggatcgtatggaagggtgtattatgcaaccttaaacaatggaaaagcagtggctgtgaaaaagcttgatgtttcatctgaacctgaatcaaataatgagtttt

SEQ ID NO: 20478 - DNA, 469 bp, Glycine max
tttttctctctctcactctctttggcttccatcttcgtcaccacccgcactatgcaatcccgaggggttcttgattccaccatccgtaagtgatttgtggtgaaacctaagtttctgggctggttttgtggaatctggtgaagttttggattttgggggtgttggttgagtagagtgggtgaattggattggactagttggttgaagtttggtgcaagtgagttgagatatgagtgtggtggggtttgacattggtaatgagaactgtgtcattgctgtagttaggcaacgtggcattgatgttttgttgaattatgaatccaaacgtgaaaccccggctgtggtctgcttcagcgagaagcagcggattttggggtctgctggtgctgcttctgctatgatgcacatcaagtccacaatatctcaaataaagagactaattggaaggaagtttgcagaccctgatgtg

SEQ ID NO: 20479 - DNA, 430 bp, Glycine max
  modified_base (4)..(4): a, c, g, t, unknown, or other
  modified_base (113)..(113): a, c, g, t, unknown, or other
gaanacccggggggaccgacgcgtacgcccacgcctccggaaccaccaactgtttactttatggatcgatccccaatccttccgagagagcctttcataagggatgtcatccncacgaatttgctgatacaggcaatgtaccaagtgtctgtcttgcttgtgctcaatttccgaggcataagcatactgtgtctgagccatgacagaaaagctcatgcaatcaaagtgaagaatactttgatattcaatgcatttgttctctgtcaaatctttaatgaatttaatgctcgaaagccagatgaattcaacatattcaaaggagtcacaagaaactacctctttatgggtatcattggattaacggtttggcttcaaatttgcatcattgaatttcttggcaagtttacaataacaagtgagcttaatttga

SEQ ID NO: 20480 - DNA, 441 bp, Glycine max
  modified_base (420)..(420): a, c, g, t, unknown, or other
ggccggtggtgcgaatttcgtgcagagggttctctcttacgtggtgaatgaagtgggtgtgaatggtcttgccaacagccctgcatttcagaggtttgcagtgaggacatcaaaaagaattggagatatttctaacaaagctgttcagaagaggcaggagctagctgagcagatcaaggacatctcaaaaaatatggagtcattcaagaaccagtaattttggtattcttgctacattgctgaagttaatggagtcctgattttctttagccaaagatgttgctggtgacaaggctgggtgtttgtaaatttcttttgttgtaatatattttggttcttaactcgtgatctcaaaagttgggatgcaagggtttttcagtttgcttggtgaactgaaaacaggattaggaggatattatngctagtttacgatactatcac

SEQ ID NO: 20481 - DNA, 395 bp, Glycine max
  modified_base (10)..(10): a, c, g, t, unknown, or other
  modified_base (21)..(21): a, c, g, t, unknown, or other
  modified_base (239)..(239): a, c, g, t, unknown, or other
  modified_base (334)..(334): a, c, g, t, unknown, or other
cccacgcgtntcgccacgcgntccggccacggttggctttcttaaaacacatggatggcggggataatcgtgccaacaactttgtctctaggtccatgaccatgggttacggcacttcctaccacagaactagtttaaggaacaacaacaacaacaacaacaacaacgtttctgtttcttcaccaagatctgcgagattctacgacgccagattcgaagatcaacaccacccccacttnctctccgcttgtttcctctgcaaaaaatctctcggggacaatagagacatcttcatgtatagaggggacacaccgttttgtagcgaagagtgcangcaagagcagatggagatagacgaagcccaagagaagaataggaacctttcttcatcgatg

SEQ ID NO: 20482 - DNA, 438 bp, Glycine max
cggacgcgtgggtgaagaccaccactctcttctggcggcggcgtgccggttgggcagggcgggggggcatttacagcggggcctctttcggattcggcctcagctggtaccgtgaagcgcaggggcagacctcgtggttctgtcaacaaaaataagaagaatgatagctctaactcctctaagcattctgggccaggatcttggtttactccgcatgtcattacggtgaacgctggagaggatttgtcagcaagaattatgacaatttcccagagtacttcaagaaatatttgcatcttaacagcaaatggagccatatctaatgtgacacttcgacaacctgcctcatgtggtggaactgcgacttatgaggggcgatttgagatcctatcacttcgaggctctttttttcgcgcttgaacttaaaaagcttggggg

SEQ ID NO: 20483 - DNA, 330 bp, Glycine max
cacgcgtacgcccacgcgttcgctttccttcttcttctttttcttcttccttcatagcaaaagccgtgggcgcgagacccgagagtggaaaagaccctccacaaccaccttcacgtggctttctggccacagtacaagaaatcacaagaatctatagttcactgccacctagaccttctattgaagaagtagaagctgccacgtccactggggacaccctcaacaacgaggagcaaatcaaacttaacgaaatctcaatgcaacaacaaccttctcacgatgatgtccctcaagacctcttctctgtcctgccacaactcaaaaagacta

SEQ ID NO: 20484 - DNA, 397 bp, Glycine max
  modified_base (360)..(360): a, c, g, t, unknown, or other
tctcacttcaagggcaagtaccatgatgagcttatcgccaatgctgcgtacattggcactgctggaaagggtattcttgctgctgatgagtcaacagggacaattggcaagcgtttggccagcatcagtgtagagaacattgaatccaacaggcgagctcttagggagctgcttttcactgctcctggtgttcttcaatatctcagtggtgtcatcctctttgaggaaaccctctaccagagcacagctgcaggcaagccctttgtgaatgtcttgaaggaagctggtgtgcttcctggcatcaaggttgacaagggcacagtcgagcttgctggaactaatggagaaaccaccactcanggtctagatggccttgtcagcgttgtgccaagtacta

SEQ ID NO: 20485 - DNA, 408 bp, Glycine max
  modified_base (321)..(321): a, c, g, t, unknown, or other
  modified_base (361)..(361): a, c, g, t, unknown, or other
cccacgcgtccgcaattctccaagcttctcaccaagaaacaacatgcctgagatgcgctccccaagccttcttgacttcccttcccttgctctaagccctgttacaccattgaatgatgacccttttgacaagtcctccccttcattggggaactcgtcagaggaggataaagccatagctgaaaagggcttctacttgcatccctctcccatgaccactccaagagactcagaaccacagctcttgccgttgttcccagttacctcacctagagtctcatcacaatcaccttcttgatcttgatgagatgaaaagagatngtgttcctgtgctgtggatgattggttaattacatcatgnggtttttatttttgatttgaatatgggttatgggttcctctatcaac

SEQ ID NO: 20486 - DNA, 331 bp, Glycine max
  modified_base (49)..(50): a, c, g, t, unknown, or other
  modified_base (321)..(322): a, c, g, t, unknown, or other
gcacgcccacgcgttcgcaaaaaagaggcaaacattttatgtgaaatanntgttcaacaaactgcacaagcgtagagtgtctcttgagcagtaataagaccagctgtcgaagggatggctccaaccgatgtaatatcgtacagcagaggcatataacatgcatggagaattcaagctacatttcgagggggtctggttatttattaaattatattgtggaccatttgcgaattatgatcggattatctcaatggtgtatgggagatcaatttttctcttccctattggcaaagagacgtggaacatcttgacgagaattannaatactttt

SEQ ID NO: 20487 - DNA, 400 bp, Glycine max
  modified_base (195)..(195): a, c, g, t, unknown, or other
gaattattgtcttcacatttgagcctaattgttaaggcttcaggttttttcttaccttgggctggctggaagcatttcaaataactgttctgtgaattgttatgtagttgggccagaacacactgtcttggagtctttggaatttgatttggttacaattgaagcagccacaaacaatttttctgaagaccgcangattggcaaagggggttacggagaagtgtacaagggaatccttcctaaccgagaggaagtagctgtaaagagattatcaacaaattctaagcaaggagcggaggaattcaaaaatgaagtgttgttaatagcaaaacttcaacacaaaaatttggtgaagataggtaggattttgcccagaagacagagaaaaaatacttattta

SEQ ID NO: 20488 - DNA, 419 bp, Glycine max
  modified_base (349)..(351): a, c, g, t, unknown, or other
gagggtccgacccacgccgtacgacacttaaagatgctaaagtcacaccctcttcgtgttaaattggaagtgagaaagtgcgaatttgctgcagggcgtgtgatattttatagacaatacatggtggtcttgttatgcttcagctggtaagggcttgatgaaaaatataaaacaaaagaggttgaaggggaatagccttggggaagaagtcttaacgaagttaaatgagcatttgcaaatggggaaaggaagaattctctattcaatcttcaaggacgtggtgagaaaagcaaaaagaaagctaatacttccggacttttcaaaggcgaatatcaaattattccacttnnnctagtcgaaaagaagggcaaagagaggctcctcagagagagctctcttttggggaaagaagcttgtga

SEQ ID NO: 20489 - DNA, 298 bp, Glycine max
agaagacgagttgaaaaaagtcacggcacgtggtatcagagatatatctcaaatctacacaaggcttcttactaggctctgggtgatgggcactaaaaaaatggactacatttggttcacacatggtgtcatatttccactgctccatacacagccgcatggggtataagatgttatatacaggggagaccagttgatttgactcctgagctagaggaggctgctacaatgtatgcagtcatgcgagatacacagtacatgcagcaagatatgttcaaggaaaagttctggaatgact

SEQ ID NO: 20490 - DNA, 398 bp, Glycine max
cccacgcgtccgcattactattggatctggaactaatatacaagacaattctcttgttcatgttgccaagtctaatttaagtggaaaagtcttgccaactatcattggagataatgtcactgtaggtcatagtgctgtgttacaaggatgtactgttgaggatgaggcatttattggcatgggtgcaaccttgcttgatggtgtatatgttgagaaacatgccatggttgctgctggagctcttgtcaggcagaataccaaggatcccttatggagagggttgggggaggtaatcccggcaaggttcttgagaaagctcacagaagatgaaatgaccttcttctcacaatctgccttaaattattctaatttggctcaggctcattctgcttgaaatg

SEQ ID NO: 20491 - DNA, 305 bp, Glycine max
  modified_base (284)..(284): a, c, g, t, unknown, or other
caaccctcttctattgatattttatcctaattaattggatttagccattttgattgtcaatgacttatatttagttggttttctattgtgcttgcttcagtaccatccagacgtgtgcagagggagcaattgtggggtgcagtttcacgaaatcaacgaggcttatgatgtgcgttacatatcctgcaactacccttttctctaaatttcagttgcatatttatttgcaccgcgtagaatgaaaacataaaactgctagttttatatatgaattgtgatcatcntccaattagcataagtcaaac

SEQ ID NO: 20492 - DNA, 367 bp, Glycine max
  modified_base (287)..(287): a, c, g, t, unknown, or other
atttcaacactggggtgatggtgatggatttggtgagatggagagcgggcgactacacaaggaagattgagaagtggatggagattcaaaaggagagaaggatctacaagttggggtcactccctccctttttgctggctttcggtggtaatgttgaggccattgaacatagatggaaccaacatggtcttggaggggataatgtaagaaatagttgtaggactctgcatcctggtccagttagtttgctacattggagtggtaaagggaaaccatggactaggctngatgccaagatgccttgctcagtggattttctttgggcaccttaatatctctacataccccatcaccatacataccatca

SEQ ID NO: 20493 - DNA, 463 bp, Glycine max
aatttgtaattatattattacacacatatatatatagttgaggaataaaacaaaggctctgatatcaaagcagacacagctagctattcacaatggccctgcgggttcatttctcaatagtttccatagcggttttggctctatgcacttctgcagattacttttcggctaattttagctatgctggtccaaatggacctgagtactggggaagcttgagtccatcttatgcagcatgctcacatgggaaatctcagagtcctgtggaacttatgaagactgatattgtcatcaacaagcagttgaagaatctaaacagaaactaccttcctaccaatgccacacttgttgacaacatattcaacattggggtgcactttgaaggaaaagtaggggatattaatataaatggaaaaaattactccttaaaacaattgcactggcattctccatcagagcacat

SEQ ID NO: 20494 - DNA, 410 bp, Glycine max
gggctttctaggcttgcattgacagaaacatctcatatctcaaccgccccacaagggactgcaggttatgtcgatccccaataccaccagaactttcagctttctgataaaagtgatgtctacagttttggagtggttttggtagagataataactgccatgaaagtggttgattttgctcgacctcgaagtgagattaatttagctgcacttgctgttgataggattaggagaggtgctgtagatgagatcatagaccccttccttgaaccacatagagatgcttggacactgtattctattcataaagtggccgagcttgcatttagatgccttgcttttcatagtgacatgaggcctactatgatggaagtagcataagagctagaacacattagacgcagtggatg

SEQ ID NO: 20495 - DNA, 471 bp, Glycine max
gtcgaagcatgccgttagggacaaaaatcagctgcttttcctggtacttaagtttgcagagggcattgctgtggttgacctaaaagattcttacccaaatgtgatggaagacttgcaggtaaattatttcttttagttaattgttttgcatgaaaatgaaaatttcttggcattcatttttcggtaacattggtggaattttgattatagatatatatgttcaactctcacattgccttgggctctttgagcaactattgatatcttacagatttgatttcttcatgtgcatagttaatttttggaagagtcatgtgtgctaaaatcacgaatcagtatgacagaagctcaactaatcaaatgttattggcaataccatggatgaatataaaaatcaaatatttcaggggacaaagaaaacagtataagtaaaaattagtttaaaaactagttatgcctacttgtggtctt

SEQ ID NO: 20496 - DNA, 482 bp, Glycine max
  modified_base (59)..(59): a, c, g, t, unknown, or other
  modified_base (396)..(396): a, c, g, t, unknown, or other
  modified_base (446)..(446): a, c, g, t, unknown, or other
acgaagtgcttgaattggttgaattctaagaaacccaattcagttctttatgtcagctntggaagcttggctcggttaccctctgagcagttaaaggaaattgcttatggtcttgaagcttctgaacaatcgttcatttgggtggtgaggaatatccataacaacccatcagaaaacaaagaaaatggaagcggaaactttcttccggaagggtttgagcagaggatgaaggaaaaggataaagggttggttcttagaggttgggctcctcagctgttgattttggagcatgttgcaatcaaagggtttatgacccattgtggatggaactccactttggaaagtgtgtgtgctggtgtgccaatgattacgtggcctctctcggccgagcaattntcgaacgagaagttgataactgatgttttgaagattggtgttcaagtggngagcaaggagtggtggtcgtggaattcagaatggaa

SEQ ID NO: 20497 - DNA, 447 bp, Glycine max
agacaatggagaggtgttggatgaaggcgtgcaggggtattctttgattttcaaagggagtggagttgaagaattgactcgaaagtttgaggaagaaacagggctagagggaatcattgtgtgtaatcggagtccattgaatggaaagctttatcctcttcgcttgcagcttcctccaaacactgtcaccatgcgggttgttttggttcttcccttgtcaaatttggcaagagactttgaggaacaaggcttactgtgagaagccttaaaattttccaacgaagacctatgtatatgtactgatcgaagccagttcagaatttaagaattaatgtgttctagtccattgcatttattaagcagagttcatcgtggtcctgtgtgggaagcttagcgttgtcatgggatgggtcataaatgaaataatcctttatcaatgacatgtgc

SEQ ID NO: 20498 - DNA, 439 bp, Glycine max
cccacgcgtccgcccacgcgtccgcccacgcgtccgggaagatgagtttgagggcatcagagatagcgaagaagttgaatctgcaacctcacccagaaggtgggttttacgtggagacattccgagaccattccgtccagctttcgacctctcagctcccccccgaatacaaagtggatcgccctgtatcgacctccatctattttctcgttccttctgggagtgtgtctcgcctccatcgcataccctgcgccgaaacctggcatcattacatcggcgaccctctcaccgtatgtatatcttcatctctctctttcttttttaacctaatctgatatgaattgtattgcaagtagtggaattgaatgagaaagatgggagcgtaaaattcacttgccttggatcagatctgactcagaatcaagtgccgcagtacacg

SEQ ID NO: 20499 - DNA, 246 bp, Glycine max
cccacgcgtgcgccgagtccaggttccgctgtagatcgtagcacaaatatgtacgtgctaatgtatcgctagaaagactaacgtatgtcctgcaaggatgcatggacagactgaagtataagggataacggatactatgtacggtacagactctcgagccgttgaagtcctagatcggctcatataccggtgcatcaaacgtaagtacattcggcgtgaacagctcattcgagagtgcaccattct

SEQ ID NO: 20500 - DNA, 430 bp, Glycine max
caaatgtgcctggtcaattaggggaccgaatttcataactgagtgctttaggggaagaagaagcgaaacacagtgtcagtatctgagttttttcttcaaactcaaaccctaacaaacaaaaaccatgtatcgttgtttctcttccattcgccatggccgtggatcttccctcgcatctcttctcgcgccgaaacctgcacttccattcaacgccgctctacgacctcgccgtttacctcaaaacgacgggcatgttagaggattttctagctcgaatttagattggaggaggcttattgtgaacccgaatgtgaatgcagatgcaaatgctcatccagaatctatgcaggatatagaggaaagaaacttcgaaaagtggaattatatgagaccgaatatgaatccagatgcaaatgcttcttcaaatttt

SEQ ID NO: 20501 - DNA, 354 bp, Glycine max
  modified_base (117)..(117): a, c, g, t, unknown, or other
cccggtcattggtcctcatcacaaccacaatgtgaacctcgtttgacaaacagcttctttcacggagctactcactggcagtgatcccaacaaagggtgtgatgaggctaataacancatgatgttcaacaaagcagcatgtagactgcaatggggttcatcaacaacacctatggactactttctggggctttcctcttctagaacaacgacacacaatcacaatcaccttcatcatcatcaatattcttcatcttcttctagtgggttcttattggcacaaatgcaactaggacattctgttcctgaggcaatgaatcatgtttcaggattcaacaacaatgtgagtggtga

SEQ ID NO: 20502 - DNA, 455 bp, Glycine max
gcgtccgcccacgcgtccgctgacaagctgaggtcattggtgcgaaaatggcaaactctaattgaagcccatgtggatgtgaagacaactgataactacacattgaggatgttttgcattggatttaccaagagaagagctaaccaagtgaagagaacctgctatgcacaatcaagccagattagacagattcgtaggaagatgagggagatcatgaccaaccaggcaacatcctgtgatttgaaggagttggtccgcaagtttattcctgagattattggaaaagagattgagaaggcgacatctagtatttaccctttgcagaatgtgtttgttcgtaaagtcaagatcctgaaagcccctaagtttgatcttgggaaactgatggaagttcatggagattactcagaggatgttggtgccaaagtagacagacctgctgatgaaataatggc

SEQ ID NO: 20503 - DNA, 392 bp, Glycine max
aaagattctaaagaaatataactaatattctttagaataatcaaaaagaatattaaattcaaataaattttagatagaaaaaagacttaaaaaggaggatttgaaatgcgagatctaaaaacatatctttccgtggcaccagtagtaagtactctatggttcggggctttggcgggtctcttgatagagatcaatcgtttttttccagatgcattgatattcccttttttttcattctagttattgacacggaaaggggtgaagaagattatagatccaattaagtattaaatatatgtaattaatatgtaattaatctcctcttctttatttcgtcttttatttcttcttttttttacaattgtaatagaataagttaggaaagagaaaga

SEQ ID NO: 20504 - DNA, 369 bp, Glycine max
cccacgcgtccgcgtaacgcattcaccacgatggtgaccaaagcgatggaggtggtgaaggatctggacgtgaagcggtacatgggtcggtggtacgagattgcgtgcttcccgtcgaggtttcaacccagtgacggcaccaacaccagagccacctacactcttcgagatgacggcaccatcaacgttcttaacgagacttggagtggcggcaaaagaggtttcattgagggcactgcttataaggctgatcccaacagcgacgaggccaagttgaaggtcaagttctgggtgccttcctttttacccatcattcccgttactggggattactggcttttgtacattgaccaggattatcactatgct

SEQ ID NO: 20505 - DNA, 428 bp, Glycine max
caattccaaattttcagtttcttcctcgcttttctgcaaaatcatctaaatccgtttctgatcctgaatcatcagtttttcccttgaaagatgggaggtggcaaggacaaacacaatgaagaagagaaaggagttttctcacatctggctcatggagtagctcaagctgctcatggttaccctccaggggcatacccttcacctactggggcataccctccttaccaagggtacccacctgctcatggctacccttcacaaggtggctatcctccggctggttattcccctgctggctatcctcctgctgctggtggttacccccctgctggttaccctccacatggttatcctggatcatctgctccacatggatctcatgcgcctgggcacggcggtatgggggcattgcttgcttgtggtgctgc

SEQ ID NO: 20506 - DNA, 427 bp, Glycine max
gggctaatgtccaagtcttttggggatccatatatgggttgggctccttttgtagaagatgttgttgttactcaccagacacggacgggattgccagaagagactttccctaactacgacctctgggagaaccctctgacaccctgcatgtgtagagcctgattacagcaattttatcgataacaatgggactttactcaagatgcatttgggagaaatatgccatctaagttatgaattctatctatctacagggtaaacgacggaatctgggctcctgtcaatgcaagctttgaggtaggaggggcagtaaatagaaatttgaagcagtgatattggcttgaagggaatgagattggactggtggttatcactttaatgaacagatttcctattctgagtattctctttgccgagaccaggtgga

SEQ ID NO: 20507 - DNA, 403 bp, Glycine max
  modified_base (148)..(148): a, c, g, t, unknown, or other
  modified_base (388)..(388): a, c, g, t, unknown, or other
ctcgttcaatcaccagcgattaagcgtgtctctcctaataccaaaacgctaccgttttgctcttttatttctctatggattgcaagaagcgagttcgggatgactcggacgagtcagttctggaatcgcccgaggcgaagcgactcanggacgatttactcgagttcttcgacgacgccgacgacgcaccttcctctcaggaccttgactccgtcatgaagagcctgcaggaggagatttccggcgtggcctcagattccggcgagtctcaggcgcagatcgggtaccttctggaggcctccgacgacgagctaggtcttccacccgccggaaactcgtcggcgccggaggagaagaacgtggagaccgagttggtccgagtcgcgtntgactcgtccggaat

SEQ ID NO: 20508 - DNA, 244 bp, Glycine max
cggacgcgtgggcggacgcgtgggtgcttggcagatcgttgcacagattcctccatcctagggtagtgctagaaagagtaaagtatgtcctgcaaggatggtagcagaaacggaatcggaatggataacgggaagtatgtccgttacacgcctgagcaggttgaagccctagaaaggctctatcacgattgccccaaacctagttccattcgccgccagcagctcattcgcgagtgccccattc

SEQ ID NO: 20509 - DNA, 164 bp, Glycine max
cacaaagagaagcattagcactaggagcagcaacaactagtctcagctgaaatggcctcttcagtgagggcatctgtggccctcaaacctgcccctttcactgttgagaagtcctcagtgagaggccttccctctctctcaaggaactcttcttcattcagagt

SEQ ID NO: 20510 - DNA, 195 bp, Glycine max
gcctatacgaacctaattcattatttcagggttattaattagaacccaagggaagaaggcgggtaggtggaaaccaaaaatggcaatggaaggtttttttggacaccaaatatttttactttcattttttggctggaaggataaaaaaatggtatggttcaaccttaaacttatttggatggaactggtaatagc

SEQ ID NO: 20511 - DNA, 172 bp, Glycine max
aataccggttgggccggtcctaccggatatcttgatctggtagaagggatgccaggttctgctcaatccctttggtccacttcatgttcgcaagaatttattaatcgccacatgacataatcaaatggacttttagcaattttttttttacatatattttttccttttttta

SEQ ID NO: 20512 - DNA, 425 bp, Glycine max
acgcgtacgcgtacgcgattgttagtgtggacgatttggaagatataattggggggcatgtatggttgggttccatttgtatacttggtggaatctggcatatcttaaccaaaccttttgcatgggctcggcgtgcacttgtatggtctggagaagcttacttatcttatagtttaggtgctttatctgtttttggttttattgcttgttgctttgtctggtttaataataccgcttatcctagtgagttttacgggcccactgggccagaagctatttcagctcaagcattacttttttagttagagaccaacgtcttggggctaatgtaggatctgctcaaggacctacaagtttaacgtaatatcttatgcggtccccgacaggagaagttatttttgggggaaaaactatgccgttttggg

SEQ ID NO: 20513 - DNA, 434 bp, Glycine max
aaaaagtttctctgactcttggcagcgcgaagcttggaggagcaccgtttgtcatggcggggccacgatcggaaactgaatccgctgagaaaagaacattcctttcacaattttactctcactatctcggaaaccgaatccacgctctctatccctacttctccacaaatttcttgtccaccttcgttctccgcttcagatcaacgcagcgtcgggaatgtctccctcttccgctaccttcctcttcactcgacgctgccttgttcatgaccaagagatctagagtgcatgatgttttggaggatatattagagcgtgttttgataaatttgcatagcgtccaaaagaatctgcagttctggcaggccagagctaagaggtcagattccgagaaggcacgtttcatgatatttgagaggggtccaagggctttt

SEQ ID NO: 20514 - DNA, 451 bp, Glycine max
caaaggcggcatctgaagcatcttcaaagtttggaccagccttggcttcaggttcaggtgtctttgtgtttgagaaggtgtccactttcattgttacagaagaaaaagaagttgaagcccctcctgcagtagaaactaaaacagaagaagaaacaagtagtgttgtcaaagagagggagacagtggttgaagaagaaaaaaaggaagaggaaaaaccacaagcagacgagacaagtgatgagaaaaaagtggaagaaaaacaagctgagactgctgctaaagaggaagagaaacctgctgaaccagcagaaccaccaaagccttgaaaatttcgttctgaacagaagctatatatatgtagctgcttcatgaagatgcagaagatcatatacgtgcattcttagtttgcatatagtccaaaattgtcacataccattcccttattctttta

SEQ ID NO: 20515 - DNA, 285 bp, Glycine max
ttttgaattaaattgaccatgcggtaacatcttatgggcaacctacctagccatctgaaatgggtgattttcgtgaattccttgtaacatatatacatcatactgcagactatgccaaaggaagacggagaagatctatgaagctccttatctatctgatgatcgttctgacaaaaaatcactggtaaaactgttaaaatttatccatagacacaatgaacagacagaggagatactcaacatgtgatagtgatagctatttcttagattccgtgctagatttat

SEQ ID NO: 20516 - DNA, 453 bp, Glycine max
ctagtgtgcacccttgttgccttgcgtgcgccggttgcgcagccccctatcgtgcgcatgcgggccaatcacctgaccgaaactactaacaccggcatgacaatcgttcaccagcgccacagaacccagatctcgggttccactcgcccagccatgtccaaggcgcgtgtctacaccgatgtcaacgttctccgccccaaagagtactgggattacgagtctctcaccgttcaatggggtgatcaagatgattatgaggttgtgcgcaaagtgggaaggggaaagtacagtgaggtttttgaaggcataaatgttaatagcaatgagcgttgtataatcaagattcttaagcctgtcaagaaaaagaagattaacagagagataaaaatacttcagaacctttgtggtggcccaaatattgtcaagcttcttgatatggtcagagatcagcac

SEQ ID NO: 20517 - DNA, 446 bp, Glycine max
gttctgaaaccactctcgcgtcgttaccatgccgcaaggggattacatagaacgccacagaggagactatggctaccgtctcgatcacttcgagcgtaagcgcaagaaagaggcacgtcaagttcacaagcgctctgcaattgcccagaaggctctgggtattaagggcaaaatgattgccaagaaaaattatgctgaaaaggcgcagatgaagaagactttggctatgcatgaagaatcatcgtctaggcgcaagactgatgataatgttcaggatggagctgttcctgcatatcttcttgatcgtgataacacgaccagagcaaaggttcttagcaacaccattaagcaaaagaggaaggagaaggcagggaaatgggatgttcctctacctaaggtacgtcccgtggctgaagatgaaatgttcaaagtggtccgaactggta

SEQ ID NO: 20518 - DNA, 407 bp, Glycine max
tccaaaatttccacgacgaggcaccgcaatggacgaaccgaacgacgcacaagacaacagggaactctacgcgctcttgaatgagtattcagaagcttccgatgaagaaattcgcagagcgtatcgtcaatgggcgcaagcctatcataccgataaataccaagctcctcacatgaaggatattgctacggagaactttcagcgaatatgcgaagcgtatgagattctttcagatccaaataaaaggcagatctatgatatctacggcatggaggggttgacctctggtttggaacttggtccaaagcttaatggaactgaagagatcaaggcagaactcgagagattgaagaggatgaaggaacgcgagataatggcggcgcattttcaacccttcggtacaattg

SEQ ID NO: 20519 - DNA, 397 bp, Glycine max
actatatataggtttttatagggtatcctttgtgtgaaactcaagagacctcgttttcaggggattttctgtttgatgtccataaggattatcaattatgttatatatggtctgggatacagtcttgacttacagtttttaacttggttgttttcattgttatggcaaaaaaaaaaaaacaaaaaaaaaaaaaaaaaaaaaaaaaaaaaaaaaaaaaaaaaaaaaataaaaaaaaaaaaaaaaaaataaggacaacacttatgaacgttcccaacatcgaacccctcctgcctaccttatacatcgccattactgcgacccaaacacatgtcattaggccgaatctttacaccgaagtggctggggaacccatggcgttaccctacttaattacctt

SEQ ID NO: 20520 - DNA, 448 bp, Glycine max
  modified_base (346)..(346): a, c, g, t, unknown, or other
  modified_base (375)..(375): a, c, g, t, unknown, or other
cccacgcgtccgaaaacatagtactattaaagagagatatcaaagcataaggcaaaagcatattcttccaaggttttattcttttctatttctaaaacagcgtttgcttttgtgtttggtcttagacgcagcacgcccccaccactgtttcaaccctcaaattgtgtcttcttcgctttctggttttgattaggttttgttccatttgaaacaatattcatcgatccatcgccaaacatgccttctagtcacttgcttcttgaggaacctattaggatggtctccatccttgaaccatccaagcctagttttttctctgcaatgacaaagattgttggtaccctgnggcctaaatctagatccgtcgaaactatntctggttgtctcaaggctggcatgtctgtggctcgttttgacttttcatggcatgaccctgagtaccaccagg

SEQ ID NO: 20521 - DNA, 334 bp, Glycine max
gcattattttgaggataatgtgaaggaaatcctaaattttcgtggatttaattctgaaattggcctccaaattcttgttgataaatcactcataaccattagttacgggaagatttatatgcatgacttgttgagagatttaggcaagtgtattgttagagaaaaatcacctaaagagccaagaaagtggagtagactatgggattgtgaagatctctacaaatttatgtcgagcaataaggaagcaaaaaatctggaagccatagttgttgaagatgaaccagggatgttttctgaaacaacaatgagatttgatgctctatcaaaaatgaaa

SEQ ID NO: 20522 - DNA, 303 bp, Glycine max
tgcagatcttcgtcaagaccctcaccggatagaccatcacccttgaggtggaaagctctgacaccatcgacaacgtcaaggccaagatccaggacaaggaaggaattcccccggatcagcaacgtctcatcttcgccggaaagcagctcgaggacgggcgtaccctcgccgactacaacatccaaaaggagtcaacccttcaccttgtccttcgtctccgtggtggcatgcagatcttcgtcaagactctcactggcaaaaccataaccctagaagtcgaaagctctgacaccattgacaacg

SEQ ID NO: 20523 - DNA, 369 bp, Glycine max
  modified_base (276)..(276): a, c, g, t, unknown, or other
attttatccaattgaaattttaaaaatgactgggataaacttaagaattcaattattgaaattgaataagtaaacaatttaattggattggtcgaatggtatcaaaaaaatggagtactaactcccatttcttatttattattgaattaaccgatcaacttgctttgttatcgaacatttctttttgatttcaaaaattttccggaaaaaatttgaatctatttttatatgcgaatcaatcctactacttctggtcctgaggtttctgcgcttganaaaaaaaaatctgggacgtatcgccaaaatattggtcccgtacttaaaggaacttttcccccaagtaagaagcctaatttttaccacgctttt

SEQ ID NO: 20524 - DNA, 228 bp, Glycine max
attttatccagttgaaatcattgaactgacttggataaacttaagaatgcaattatggatagggaatcagtgaacacttcaattggattggtctaatggtatgaaaaaaatggagtactcactccgatatattattgattattgcattaacctgtcaactcgctctgtaatggtgcacttctttccgatctcaaaacttatgcagaaaacagcagaatctatctggat

SEQ ID NO: 20525 - DNA, 307 bp, Glycine max
cccacgcgtccgcccacgcgtccgctggttccgtaagaaaagaaaggatgggagtgaagtaaaaattaacatgaaatgaactttttgatagagggccaaaatggcatttcgtttatttattttattaagttagtgttacatataagatgtctgtaaaaatataaattatgaagttgtatatataaatatatgtttgctgctgaagatttttcattcgtgaatgaaaccgagaaaaaatgaacaaaaaaaaaaagaaagaaaatcacaacaaaatgaccgttacacttgccagcaacctaaataaaaa

SEQ ID NO: 20526 - DNA, 443 bp, Glycine max
  modified_base (416)..(416): a, c, g, t, unknown, or other
ctcactgtgtctgtctatgtgtctcttacacccttccattttctccttctcttcctcccatggtgtaattgctccaactatggccgtggacctcatgacgacgggttgcagccgaaacgacaacatcaatagtttcacaaccaaagccgaggaaaatgccgtccaagaagctgcttccggcttagagagcatcgagaagctcatcagactcctctcgcaaacccaaacccaaacccgccatcaaatcaacaacaatagctctaatgaaatcgccatcgccatggactgcaaggtcgtcgctgacgtggcagtctccaagttcaagaaggtcatatccctcctcggccgaacccgtaccggccacgccaggttccgacgcgcccctctccccaaccaaaaccaacacactcaacctncctccgaaccacccgtgttccacgcta

SEQ ID NO: 20527 - DNA, 392 bp, Glycine max
  modified_base (289)..(289): a, c, g, t, unknown, or other
agcatcgtcaggcaaatgcaaaggcaatggccgcttcctcactgttttcccctgttctcccgtacaccaaattctcctcctcaactctgcgcttcacgaactcaaaaaattccatctttgccctctcgtgttcttctccgaagagcattcctgtgacggagaaggaggtgctccaagccatagctgactccgacggcaagaacctcccatgcgtcagaacctacgacaacgacctgtctcagctcactctcgtcggaaccgtcgatttcaaccaagctttgacggccgncgccgtcgacggcggtgaagtcgcctacgatcacatcgacgccggcttggacgccatggtcgtcgaaaccgtgttccctgctccttctagcgaccacgccact

SEQ ID NO: 20528 - DNA, 449 bp, Glycine max
gtgaaaacgaatggaggttgatgatcgagagagagcttttgggccgggagattatgaatgttatagcatgtgaaggttctcagaggattgagaggcctgagacatacaaacagtggcaggttaggaatacgagggctggtttcaagaagctccctctgaatgaggaattaatggccaaattgaggactgcgttaaaggaatggtaccacagattttgtcttggatgaagataacaactggttgcttcaaggttggaagggccacattttgtatgcttccacttgttgggtgccagcataatgagatgctactggactgggttcagaactcatactatactgaaggttttggtatccttggtttggctacctctacttgcttaaccttcaggtgctgtgatgaagatggcaacaagctttgcacgaaagtacttggtaaaactatggcac

SEQ ID NO: 20529 - DNA, 227 bp, Glycine max
gaaaaagacatttgtcaatgtttgaaagtattgaaaattatctagaacaaaataacttgatgcctattagatattcatacaaggaagttaagaagatggcgggaggttttaaagacaagttgggtgaaagaggatatggctctgtgttcaagggaaaattgcgtaacgggtcttgtgtggcaataaagatgttaggtaaatcaaaaggaaatggccaagattttatt

SEQ ID NO: 20530 - DNA, 332 bp, Glycine max
cccacgcgtccgctgacaagctgaggtcattggtgcgaaaattgactacttcaaaatgacgtggtgcctatcagatactcatactaggctgtgaacatgacgacctcaggttataccgtcattgcgctttaatgatgatatgcctatagcatcactgtgaaagtgcatgacgtgcttcgagctataattgacttcttcggcaagtacctccgatgcgtccaagcctacatcaacgacctggctaacatcactctaacatgttctgacaatataatccaagctatggcattctgcgtccatgactgaaaacgagctctcgtctatcacatcat

SEQ ID NO: 20531 - DNA, 443 bp, Glycine max
cccacgcgtccgatccctctaatcactctagctgttgcaaatttctactatttttcaatggcttctgcagatgttgagttccgttgctttgttggtgggcttgcttgggtcaccggcaacgatgccctcgagaaagccttttcaatctacggcgacatcgttgaatcgaaggttatcaacgaccgtgagactggaaggtccagaggattcggatttgtgaccttcgcctcagagcagtcaatgaaagatgcgatcgcaggaatgaacggccaggaccttgacggtcgtaacatcactgtcaacgaagctcagacccgcgccagccgtggtggtggtggaggcggtggtttcggaagtggtggtggatacaaccgcggtagcggtggatatggtggtggtggtggcggcggcggatacggtggtcgtcgtgaaggtggatacaa

SEQ ID NO: 20532 - DNA, 434 bp, Glycine max
cccacgcgtccgaaattctcaactttcctaactttagcaaccatccaagaagttggtcagttgcttgtctctccttgaattataaaaccattcacagtcttgaacccaatttcactctttgcacctcaaacaccttataagcctcaatttcacaaccaaaaatgcaaagttcaatctcacaatctgagatttgcatcactgattaccttctaccccaagaagttccatctcaatttcaatttccagatatgagcaacaataacataccaatgaaccataccaaccttcaaatgcctcaaatcacatctttctccaagcctccaaggtcctcatcaaatctaagcaaccgcaaaccgggcttgagaaacatcacaatcccttcattaccttaggtcttacaacaactatgtaacaaacaacaacctcatcaacaa

SEQ ID NO: 20533 - DNA, 250 bp, Glycine max
tgcatgcgtactctaatattgggctcaggacctgtgtttgcactgctggaatgtcaaggatgtgcatcatctcatttcaaggtctgaatttgtcaccacttaaatccgaacttgttctctgtacgatcgtctaattctatatgggtaatcgagagctatcccatctacatcgagatacgggacactagacaaacccgactatcttcagagtcacctgcattgaaagagtgtcctagttgtaactaacata

SEQ ID NO: 20534 - DNA, 431 bp, Glycine max
ctttctctctctcaggcgttctactgaggaataaagttgattctgaatatgaactgtgggggtcttcatccgaacgcctttgcagactgtgaagagatgagaggccctgtgaattttgttgaacagaaggagcctgtcatttgccctaagccgcgccgagttgtggttgtatctaacatgcctatgaggcattcgagatggcatttcaatccacaggctgagggttctgactcaaaatctggggcagagctattagagataatgtttaagaaggagagccatggagaggaattttcaaatcacgtagcttcatcttctccattatcttgtgggtctcctgctgtccgagctgcatatcccttagtccaggatgctcgattcggagatgaaaagctttgttcgacattattaatttcatcgccctcaagttt

SEQ ID NO: 20535 - DNA, 431 bp, Glycine max
cccacgcgtccgcccacgcgtccgcaacaacaaaaaaagaagaaaattttagaacaatggaggcatcaaagatgaagtttttcttggttttggtggtttccgtgttggcgatggcagcaactggggtttcagctgctgaggcacctgccccaggtccttcatccgatgccaccaccctctttgtgcccactgcttttgcttctctctttgttcttgcatttggctttctcttctaattttccaacaaccctttggttatttgttacatatataatgtgcagaggtggtggttgtgttttgtgtttcgttcttcacttttttttccaactcaacttgagaagtggttggttggtcactactctcttgtgagtagaaaggttttttttttttgaagatgcattgaattggagatttggagtgaggaaagatga

SEQ ID NO: 20536 - DNA, 432 bp, Glycine max
caccgattacccaccaactgatatacataacctcttcacctttccctccttccctaatttgtcactaaaaaaacaaacaaataaaaaaaaagtccactaagttggggcacgtcacccatctcgcccttcccctcgctcatctcaaatccatgcttcggaattagggtttccattcggatttcgtaagtctggtgcccaatttcgtgactccgagcgacgtaaaaggggaagggaaagggatgaggatttggggatcggagatcgtgttcgccatattgctctgtgggaccctttcatgcaccgctcaagctcatcacatcactgccagcacctgcccggctcgctccatcctcgatttcgtgttaaggttttcagatttcacatgccaactttccaattctcttggatccattgccgtcaccgagggagatg

SEQ ID NO: 20537 - DNA, 360 bp, Glycine max
gggacagtttggaggacctacagaggatgttcgtggagatggtgggggaagatcatggccatgggatcggctttgacttgaaccaggatcagacggctgggaagcgaggacgcgtaaatggatcaaagggcaacgcgctcaagcgcagcaactcccgcagttagtgtgccgtactgaatccgtcttgtaattttcttacttgacattggatgatgattgaaatgaaaatccttttggtgggattaaattaagatttgctgaacaactactaggacattagtaatgctgtaccttagttatggaacaatacaatacaccaagtgcgactgtgcaaattgtgctttgcattctagtactaaa

SEQ ID NO: 20538 - DNA, 446 bp, Glycine max
ctttctctctctcaggcgttctactgtggaataaagttgattttgaagatgaactgttatggtcttcagcagaacgcctttgcagcctgtgaagagatgagaggccctgtgaattttgttgaacagaaggagcctgtcatttgccctaagccgcgccgagttggggttgtatctaacatgcctatgaggcatttgagatggcatttcaatccacaggctgagggttctgactcaaaagctggggcagagctattagagataatgtttaagaaggagagccatggggaggaattttcaaatcaggtagcttcatctcctccatttttttgtgggtctcctccgggccgagctgcaaatcccttagtccaggatgctcgtttcggagatgaaaagctttgtccgacattattaatttcatcgccctcaggtttactatctccatcatc

SEQ ID NO: 20539 - DNA, 414 bp, Glycine max
cttacaacttctgttacactcggcatatgctccacctctcactcaagtaattactcctaagggttatattagtcttcaaatccgtatactctctacactgacagaaacccttctgtttctggtcatatggtctctttcagaacctgctctcttttctctgttagtgtcttctgatttatacagatccgatccaaactatagagaatgtcagaaacaccccataggaagacagcgagccttaccccaaaacgaggtcagatcaaggctcaaatgattactagccttgtgaattcatcggtctccactatctcatatacaggggaatcgcttcgaaacgtgattggaaatgcagccggctcatgttctgcatctgttaccccacccacaagtaatggctacaactctgaagccaac

SEQ ID NO: 20540 - DNA, 449 bp, Glycine max
cggacgcgtgggggaaaactctggacaaaaaatggagtgctacacaaggccaaacaggagtgacatccacctctcagcagaggaagaagccaccatagaagcaaagaccagagagtactttgatggaatcgcaccacaccgccacacaaagcctcaacgaagtgactattcagctcaatatgtcgatgctttctccaatagcccatcactcttctttaactataccagaattaacacaattccaactcctccagaatgatccccaagagaagaaatcggtgtacaatggaagtcaagtaccggaagaatttgtggaaacagagtattaccaagatctcaacagcgtggacaaacaccaccatacgactggaacaggatttatcaaagtagagaaaaatggaaatgactttcacatagaaccagataatgacactggttgccatcactct

SEQ ID NO: 20541 - DNA, 278 bp, Glycine max
atcgcacatactctcataatggttgatctaatgtcatataatataatacaatctgggttaggggttattatactcaacctcaacgttaaatgcatcacatgatgtgttcatgatcaactgcttgattgactcttgatacacatagattcctatactcaacttagatacacgctcacgacgatatttgttgtacgtcgaggtatctacattacatacctatgctcgagcttattatccgaacctaatttgaaaggaccgttaatgacatctcatttgat

SEQ ID NO: 20542 - DNA, 410 bp, Glycine max
ctgaacataagttcctgtactgatttggaagagataccagattctattgtaaaactttctaagctaagacttcttgacctctcaaactgcataagcctttcaagtttaccagaggacattggtgatctatgtaatctcaggaatctcaatatgacaagctgtgcaaggtgtgaattgccatactcagtaaccaatcttgagaatttgaaggtggtggtatgtgatgaagagacagctgcttcatgggaagcattcgaagctatgcttccaaatctgaagttagaggttcctcgagtcgaggttaacttaaactggcttcattctattagctcctaagacatgacctggttcatgggaagcatttgaaactatgattccaaatctaaagtttgaggttcctcgagttgatg

SEQ ID NO: 20543 - DNA, 338 bp, Glycine max
gaatcacgctgatttgagtaacgaagtagttgtgctggttgctgttgtaatattggttggggtattcagcatgcatcattatggttcagataaagctggttggctatttgctccaattgtccttctttggtttcttctaattggcggcataggaatattcaacatctgtcaatatggcagcagtgttctaaaagctctttcaccattgtatatataccgctatctacaacgagaaggcaaagatggatggctttcccttggtggcattttgctcagtataacagggacagaagctctttttgctgacctagcacactttccagtttcttgtgtacaga

SEQ ID NO: 20544 - DNA, 452 bp, Glycine max
ggaaaaccctagctagtagtctcagttcgtttgagagagaaaaaatggcagagggtctcgttctccgcggaaccatgcgcgcccacaccgacgtcgtgacggcgattgccactcccatcgacaactccgacatgatcgtgacggcgtcgcgcgacaaatccatcattctctggcacctcaccaaggaggacaagacctacggtgtcccccgtcgccgcctcaccggacattctcacttcgtccaggacgtcgtcctctcatccgacggtcagttcgccctctccggctcctgggacggcgagctccgcctatgggacctcgcggctggcacctctgcccgccgcttcgttggccacaccaaggacgtgctctccgtggcgttctccatcgacaaccgtcagatcgtgtcagcctctcgtgaccgcacgatcaagctgtggaacaccctgggt

SEQ ID NO: 20545 - DNA, 461 bp, Glycine max
atccttctcttctgaataatccagatctctttctgcccttttctccgtcacgcttttcgtgaccggatctgtatggatttgatccagatctacacgccgatggtggttttggccgggtacgacaaaccttcgatcgtattttgctttatataggtacaacagagaatcgatgacaagaacgcagatccgacggtagatccagccgattccgcttgttcgatcgctacagacccctgtatcggatcattaagcagcgtgtctcgcgcgttctacacgtgttgccgatctcggatgttgtaaaattagtttatgatgtgaagctatggagtggaaaatatgtggatgtaggagatttcgggatgaatggcctcaaaacgctttgtcgtttgtggctattgagtcctgagtgatcttgtcatccgacctttgccatgacaggtgcgcttgcatggcaggtcaaa

SEQ ID NO: 20546 - DNA, 406 bp, Glycine max
attggaaatgaagcatggtacccctgaatctccttccttccatcgactgggtccaagaggcacttgaatatcaagttacatacatttctgtggtgaaagcctagcctattatttctatgaatcaaacgcgagagcaacgtcctttatgaaatgcttagtgagcatacaatacaggatgaaaacttgacataaacatgtttaatttgattatgataagcgaatccttttttttatatatatttttaaatattttataccctttgtcgtggcattttgatttggtttctctttatggtaatactactaattaaatattatgttgaatgggttggttgtgcgtttggttggttgcttttttaacctttacataactggtttattaatttggggcctatgatctgtatct

SEQ ID NO: 20547 - DNA, 437 bp, Glycine max
gtaaataccatgactatgaccacaagtgaaccattcatgtcaaacatgcatgtgacttttcatatatctcataataaaaccgcaagccattaatgtcaaaatataataacagactaataaactcaacaaggaggagaagatgtcgactccggactaggaagagactgatgagggaattataaaagattgcaacaagaatcctacagctggcatcagtggggctccccaagacaataatattatgctttggaatgctgttatctttggcccagatgacaccccttgggatggaggtacgtttaagttgacacttcagtttacagaggattatcctaataaaccacctactgtgcgctttggttctcgaatgtttcatcctaacatttatgcggatggcagtatatgcttggacattttacaaaatcagtggagcccta

SEQ ID NO: 20548 - DNA, 436 bp, Glycine max
gagataacttggatgtggtgtcatgttctgtatgtcagatgggtgttttaattcgggatgctcacaagtgcaatgcatgccaaggttattgtcacgagggctgttcaacaagatcaacagtctcggcaaatgaagttgagtacttgactacatgcaagcaatgctaccatgccagattacttgctcagaaagagaatactaatgaatctccaaccagtccattactcctacaaggacgagagaataactctgggacatttttgaatggatcaaggcctaaatctcatgatcaagtactgaaatcttccaggacaaaggctaataatcccaacgtgaaacatgttactcctgtgacggctttgaaaggaacaaaggctaaatattatgaacaagaaccgacttctaccaagacaaaggataataatcattttggcac

SEQ ID NO: 20549 - DNA, 445 bp, Glycine max
gatgatttgattttgatttggatggttgcgccagaggaataattaataacactaataggataggtttgtggggaaaattggaagcatcgatcggaaaatgcaatccttatcgttaagtatgagtctgaggagtagtagtttagcgaattttctgttgctgagttcagagacgagagtgagaagaagaagaaggagtgtcatcgtagcgtgtgctttggagggagacagtggtagcagtagcacaagctcctttctctctcggacccaaacctacgcccttcttaagcaacaattgcaagtggctgctaaatctgaggattacaaggaagcagctagaattcgagactcgttgaagcaatttgaggacgaggagcctgttttgcgtctgaggagactattgaaggaagcaattgctgaagagagattccaggatgctgctagttac

SEQ ID NO: 20550 - DNA, 441 bp, Glycine max
gaaaaactggttcttttcgcgttgcgttttcttggtctccccgtcgattcttcttctgaaggttaatacttcggaacttttagtttcctctcctggcttctggttggagtttccggcgaccttgtcggagattttgttgtttatttttcgcaccccttgtgaaacttctcaaagaaaactaagaatgtttcttgttgattggttctatggaattttggcgacccttggtctgtggcaaaaggaggcgaagattttgttcctagggttagataatgctgggatgaccactttgcttcacatgctcaaagacgagagactggttcagcatcaacctactcagtatcccacttcggaggagttgagtattgggaagataaagtttatggctttcgacttgagtggccaccagattgctcgtagggtctggaaggactattacgc

SEQ ID NO: 20551 - DNA, 395 bp, Glycine max
  modified_base (301)..(301): a, c, g, t, unknown, or other
cccacgcgtccgcccacgcgtccggcataactgaacaaacaaagcaaccctatgtcgaaggtggtttgtgtcaccggagccagtggcgccattggatcatgggtggccctcctgctcctccagcgtggttatacggtccatgccaccgtccaagacatcaaggatgaaaatgagacgaaacatttggaggaaatggaaggagcaaagagtcgtctccatttttttgaaatggatcttcttgacatcgactccattgccgctgccataaagggttgctccggcgtaatccacctcgcatgtnctaacatcatcggtcatgtcgaagatcctgagaagcagatactggagccggcgataaaaggaacagttaatgcgttgaaggcggcaaaggaagc

SEQ ID NO: 20552 - DNA, 452 bp, Glycine max
cccacgcgtccgttacaataaaaacactcaaaagaggagaaaaaaagaagaaaagaatggtaacaatagctggtggtgtgagtctttcaagccctagcagggtatttgctaatgctaagggaatagactcagcacaaaaggcccaggccgtgaggtttccagctctgtcgaggcccattcaaaagtggcctggtttggtgaagacccggcccgttcgggcgacgccggagaagatatcggagaaggtagaggagagcataaagagcgcggaggaggcgtgctcgggaggcggcggtgacgcggaatgcgcggcggcctgggacgaggtggaagagctgagcgcggcggcgagccacgccagggagaagcagaagcagtctgacccgctcgaaaattactgcaaggacaatccagagactgatgaatgccgcacctatgataattgatgactg

SEQ ID NO: 20553 - DNA, 279 bp, Glycine max
aagaataatttttgtatcacgttgaattgatcatgtaaaaaattacaaatgaacatagaagaaacaaaatagaaggaggggaggaggagaatcatggaatattgtacgtgtgcagctgcccatgcttctctagcttggttgccgagtaatattagttgcacctccacattcattgttttatcatcagaaaacctcacattaaaattcttttatattcatttaatagtaagaagatgcttaaaggaggttgcataaaaaaaaacacaatgatatctaaaa

SEQ ID NO: 20554 - DNA, 390 bp, Glycine max
  modified_base (335)..(335): a, c, g, t, unknown, or other
ggataagagagagaaagcagggtgcgtgtttttagagagagagagaggaggaatcaggcgaattgtgtgtggtttggtttggggcatggaagggctgggcatgctgaagcagctcattggtcagcttcagcagctcttggacacttaccagtctcaatctcattcttcttctactctcattcttcaacctcctcacactctcctctttcaacaacaacaccccagatggacgacctcccttgacattgaggatagctctgtagatgacttatgtggccttgtaatgacagctagaaagtctggcagtttcaggatgtcagatcctgtaaagcctncaccttctaagaagtctcgaagagacagaagcaggggcaaatcatctggaagatc

SEQ ID NO: 20555 - DNA, 453 bp, Glycine max
  modified_base (406)..(406): a, c, g, t, unknown, or other
cccacgcgtccggccaccgcaagcaacaatgacgtcgccgccgccaacgacggtcccgtgatgagccttatcaacaagcgcctccgcgctctccgcaagaagctgaaccgcatcctcgccatggaagaggccgtcaccttgggcaagcccttgaacaaggagcaggaagaggttctacgctccaaaccctccgtcctcgccctcatcgatgagctcgataagctccggcaacctctcgccaccgctctctccgaagagctccaaatcaacggcacgtcttctcaaaaccctcgccacgagaccgagaccgaaaacgaaaccctagctgagagctccggctcgactgagccgaactcgaactcgaggaacgacgtcgttgtggaggaccttgctaatttgctctatnttggttcacttttcgatgtgaagagtgactttgcgtccacgatgctt

SEQ ID NO: 20556 - DNA, 422 bp, Glycine max
ggtggttggcggattaaccctaatttgtatgaagaagggaaggtttgccttagccttctaaatacatggacaggcagaggaaatgaagtatgggatcctaaatcttctagcatccttcaagtcctagtttcactgcaaggcttagtactcaactctaagccttacttcaatgaagctgggtatgataagcaggttggaacagccgaaggagagaaaaattcattgtcatacaatgagaatacctttttacttaactgcaagactatgatgtatcttatgaggaaaccccccaaggattttgaagtgctcatcaaagaacattttaggaggcggggtcataacatccttaaggcttgtgatgcatatatgaaaggttacttgattggctcgctgactagagatgcctctgtaagtgaaaagag

SEQ ID NO: 20557 - DNA, 410 bp, Glycine max
ctgttatgtacacattgttagccaagagttgcattaaaactgttcacatcatttgtttttgcatggactgaagttcataagaaatcaatcattagtaatatagtatgtgaagaccaagagggacactgtgaacgagccatgttaaaatcagtcagatgctcccatgtaatatatgattatgcagtccaaaatgatctgttagtgtatcattattaatttattatagaactataatatttatataaatattttaattttcgttaaataaaattattataccagcagaagttagtataattcaaactgttagtattacacgactttttttttagaataattaagacaaagctagtttgtaaaagaacatgattaagtgaaagcaatacaaaatgttgaaacaaagtcagttg

SEQ ID NO: 20558 - DNA, 450 bp, Glycine max
  modified_base (366)..(366): a, c, g, t, unknown, or other
cccacgcgtccgaaaaagagttctttcaaaatgcaaacagccttaaccttcgctgcccccaacgttgtgccattggcacccacaaagagtgtctcccatattaccatctttcctaccaaattgaaagccccgcgctcctcacctcgttactctccgattagggttgcaaccgtggagcccgacacttcaactgtcgactacaactctgcgttctcagtgtttcctgcagaagcatgcgaaactgtaagaggggaagcctgcatggcggagatgtaccctgaaacgaagctacagccagaggctaagactccacgagtcgttacagagaacgttgagagagagtatcttgaatacgatgatcctaanacgtaagatatataggaatcaattcagatacactcttattatagaggtttttaaagtgacaactaaatagaaatcatcatggac

SEQ ID NO: 20559 - DNA, 414 bp, Glycine max
gaagaacatacagtgatcgagtgcgtattcggattgttgggtactggattcgcgatcgtggcggctgattcatcggctgtgcacagcattctcgtccacaagtacaacgaggacactatcatgcttctctatttccacaaactcatcgacgttcgcgatcagctcggatacagggttcaattcactgagtacattcagaaaaacgtctgcttgtatcagatccgtaacggcatctatattaccaccgtcgactacgccaatttcacacagggcgaacttgccactgctctacgcaagaacccatactctgtgaacatacgttttgctggccatgacaaacatacaggcccttgactgcactatattgactacattgcaacgcttcagatgcttgaaaagggagctcatggttat

SEQ ID NO: 20560 - DNA, 426 bp, Glycine max
  modified_base (371)..(371): a, c, g, t, unknown, or other
  modified_base (385)..(385): a, c, g, t, unknown, or other
  modified_base (413)..(413): a, c, g, t, unknown, or other
agtttctcgacgagggtttctcgctggggaagtcactaaccagcaagaacctcgtcgagctggcatccaaagggggacagaggaacgccatcaacgttgttctgacatccgctgacgtggcagtcgaaggtttctgtatgagccgatgtgggacccacggctcctcctcttctgcatctcacgtgaagaagaacaacaacggcaagaactacaagttcgcttacatctgggtcggaaactccgaaacccaatgcccggggcaatgcgcttggccattccaccaacccatttatgggccccagagcccacccttggttgctcccaacaacgatgtgggacttgacggaatggtcataaacctcgctagcctncttgccggaaccgncaccaacccattcggaaacggttacttncagggtcccgcgg

SEQ ID NO: 20561 - DNA, 439 bp, Glycine max
gttcagttctgaacggaaaagcaccgtcgcaccttctctgaggcttctattgtctgtcgcgagtgtccatggtgagggttagtgtgctgaacgatgctctgaagagcatgtacaatgctgagaaaaggggaaagcgccaagtcatgattcggacatactccaaagtcattatcaaattccttttggtgatgcagaagcacggatacattggagagtttgagtatgttgatgaccacagggctggtaaaatcgtggttgaattgaacggtagactgaacaagtgtggggttattagtccccgttttgatgtctgcgttaaagagattgaaggttggactgctacgcttatgccctcaagactagttgggtatattgcattgactacctctgccggcatcatggatcactaataagctaggagaaaaaatgttggtggtaa

SEQ ID NO: 20562 - DNA, 449 bp, Glycine max
aaaaacttaagttcattccttgtgttttgctttcttcctcaaaaccaaacatgtcgaacacatgctgcaactgcgactgcgctgacaagactagctgcaccaagggaaacagctatggtgttattgtagagactgagaagagttacatcgagactgttgtcatggatgttccagcagctgagcatgatgggaagtgcaagtgtggcactaactgcacttgcacggactgcacctgtggccattaaggaatatgtatgaaaatgtaattgccatgtgtttggcaatacaaatatccaaataatgtaatcttcgtatgaataaatgtgtgtgctgttatcctacttcaggtctgtgtagtcatgcagtctgaatcatttcaagctcctgtcttaggtaatataacagccatggtatgtggcattctatggtgtattagactaaaataagtg

SEQ ID NO: 20563 - DNA, 417 bp, Glycine max
  modified_base (382)..(382): a, c, g, t, unknown, or other
attcatcactagaagtgttggatgcatttctatttctaactaattattgtgcttattattattgttgagaaagaaaagaatggcaaagttaataaaattctttgagttgaacacaggggccaagattccttctgttgggttaggcacttggcaagctgagcctggtgttgtagccaaagctgtcaccacagccattctggttggatacaggcatattgattgtgctcaagcgtataacaatcaagcagagattggttctgctcttaagaagctttttgatgatggtgtggtgaagcgtgaagacttatggatcaccttcaaactctggtgttcagatcatgcttcagaagatgtgcccaaagcattggataaaacattgcangatttgcaacttgattaccttgacctctatctgat

SEQ ID NO: 20564 - DNA, 452 bp, Glycine max
gcgggtctttcaaaaaaaggattagcttattttaataaatacatccaaccaaccccaatccttttaccgattaacatcttagaagatttcacaaaacccttatctcttagttttcgacttttcggaaatatattagctgatgaattagtagttgttgttcttgtttctttagtacctttagtagttcctatacctgtcatgttccttggattattcacaagcggtattcaagctctcatttttgctactttagctgcggcttatataggtgaatccatggaaggccatcattgaccagttttctacaaaatagtccttttcgtttagcttgccgcacatatattgcggctcaatataatctacttagtaaacatctatatctatctacctatatctatatagatataggtagatagatatagatagatattcgattagcatatattagcata

SEQ ID NO: 20565 - DNA, 401 bp, Glycine max
atcaaaaggtctgttagttcagacaaaggagaagaagcaactgagagtaaaaaggtcatatatgaggatgtgtctttggaaagaggttctttcttgggtgcaacaagccatgagggcattccgtgctcagaatttagaaagtgccaaatcaagactcaatctctgtgcagaggacattcgtgatcagttagaaaaagttggtaacacttcagagttatgttcacagctaggagcagtcttgggtatgcttggtgactgctgccgagcaatgggtgatgccagttctgcagttgcttattttgaagaaagtgttcaatttttgtcaaagttgccaaaagatgatttggagattacccatacactttctggttcacttaacaaaaattggagatcttaaatat

SEQ ID NO: 20566 - DNA, 452 bp, Glycine max
gcttctctgattacaaaaatcacttttggggagatggggaggttcgaaaaccatgttgtcaaaggaggcatcaagttgccaattgggttcaggttttgtcccaccgatgaagagcttctccttcactacctcaagaagaaggcgtttgctcaacaattacccgcttcagtcatttcagagtttgacgtgtttcagactgagccatggaaacttccaggtgaattgagggaaaataggtacttttttagcaatagatcaaatggaaacatcaagagacctgctggttctgggtgctggaaatctgtaggcaaagaaaaacaaatcatccattcagagagcaatcaagtaattgggatgaaggaaacactgtttttttgcaaagggtcccatgagacaagaactcagtgggtcatgcacgaattgcgccttgtagctttctacccatgtcagat

SEQ ID NO: 20567 - DNA, 442 bp, Glycine max
gctttacgcatgaggcagaaagaggaattcatcactgagtttcatgatcaaataaggggagatcaagaaagagagaatgaaatggaaaaacctgaagatggtcatatggacaatttctttgatgatggttttgattcttatctgctttctggttcagcagaaaactgggtaatgccaattacagatgattcaagtgatgtcaaaacccttcaaggagattcctcagttcactgtgtgggtgaatttcctaagaaggattttaagattaagcgcattgaggattgggtagttggtttgcagcattgtggaccacctctagaggaaacaaatgaagatttgtctaaagttattgaacctttagttgatgttaacacagtaaatggcgtgacagctgccagtgtggataataaggtcactccaagaatggaagcagctaaaagat

SEQ ID NO: 20568 - DNA, 272 bp, Glycine max
ctcaattgaaactatgaaatcaacacacgccatgtgtgacgctctgaaaggcgttacataggccatcttgcaaatgaattggcaggtgtacatgccataattgcaaaaaagcatgcaagtctttgagagacagaatgagaagatggaatggacatacgagatgatgggcgatgccgtagatgatgcttagctaggagatgtagatgaagaggaaactgtagacctttgttaccaagtccttgatgtgattctcattgacatttaccaagatc

SEQ ID NO: 20569 - DNA, 438 bp, Glycine max
  modified_base (353)..(353): a, c, g, t, unknown, or other
caaaaacttaccgatttttcgagcaattggaagctttagacggaaaccactcacttcttcctccgacaacaaccgttggtgatgatgttgtcctgaacgcggttccgtgttcggttagtgcggcggcgcacgagcattcgagttcgacgacgtcgtgttcggggaagaagaagaggaagctgacgcagtttctggaggggttgatgagggaagtgatagagaagcaagagacgctgcagaggaagtttgtggaagtgttggacaagtgtgaaaaagatcgaatggcgagggaggaagcgtggaagaaggaggagctcgaaaggatcaagaaagaacgcgagcttctggctcangaaagatcaattgctgctgccaaagacgaagttgttcttgcttttcttagaaagtttgcagaagcagaaggcacggtgcagttac

SEQ ID NO: 20570 - DNA, 447 bp, Glycine max
cccacgcgtacgcttcttttgaggaagttaagttcactggttcaagtatttcgggatccacaaggtggggacgtaaaggattgggatttcgatggagactgacagacctgacggccggactcccaatcaactgagacccctggcctgctcctgctctatcctgcatcgcgcccatggctcggccagttgggctcaaggagaaaccaaagtgcttgctgccgtttatggacccaaggcggggaccaagaagaatgaaaaccccgaaaaagcatctattgaagttatttggaaacccaagactggacaaattggaaaattggagaacgagtatgagatgatattgaagagaactttggagagcatttgcattcgaacgatatatcccaacaccaccacttcggatatagtccacgttgtacacgatgatggtgctcttcttccatgtgc

SEQ ID NO: 20571 - DNA, 443 bp, Glycine max
cccacgcgtccgcttctgtcccgtctgacaaattatctcatgtgtacactgccattttgaagcctgacaatgagttgcaaattttgattgatggggaacagaagaagaaggtaaatttcttatctgctgatgattttgaaccccctcttatccctcccaagacaatcccagatcctgatgataaaaaacctgaggactgggatgagagagagaaaattccagactcaagtgcagtaaagccagatgactgggatgagaatgcacccttggaaattgttgatgaagaagctgagaaacctgaaggatgggacaatgaacctgaggagatagatgatccagaggcaacaaaaccagaagattgggacgatgaggaagatggtgaatgggaagccccaaagattgagaacccaaaatgtgaagcagcccccggttgtggtgagtgg

SEQ ID NO: 20572 - DNA, 217 bp, Glycine max
  modified_base (72)..(72): a, c, g, t, unknown, or other
  modified_base (179)..(179): a, c, g, t, unknown, or other
  modified_base (197)..(197): a, c, g, t, unknown, or other
cggacgcgtgggcggacgcgtgggtccgtattagaattcggggtgtttcaaaaccggaacgaacgtggcctncttcttccccagcaaaacctcatttcccaaaaaccaaaacccctctctgtctctctctccctctaacactctcacacacttccaccatggcggcacttaagcttctnctctcccaagctcgccgncattccttccccaaacgcgc

SEQ ID NO: 20573 - DNA, 368 bp, Glycine max
ggaatgaccataatttatctctgcatgtcatcgggcccgctgcctctggtgcctctgattcacacacttctgattctagtaataattataataccacggttactactagtgccacggggactatctcagctactgcagaaacagacccaaaagggaaacgtccaattcgggagggttagttagcttagtctagcttcactatattgctgttattctttttgcaatgtaagtatgtgtggtgttgaactaagtagaatgtaaatagatcgaggctataggaatggcgatcgaggcttaagtgaattcttattctttaattaatgttacaagtgagaaattatgtaatctctcattttccatggtttaca

SEQ ID NO: 20574 - DNA, 306 bp, Glycine max
attctaaagtgtttgttgttggatctggtgctttgggatgcgaatttttaaaaaatcttgctctcatgggagtttcttgtggaagtcaggggaagctcactattactgatgatgatgtgatagagaagagtaacttaagcagacagttccttttccgtgattggaatattggacaggccaagtccacagttgctgcttcagctgctgcagctataaatcctagttttaatattgaagctctacaaaatcgggttggttctgaaactgagaatgtgttaatgataccttctgggaaaacttgagtgt

SEQ ID NO: 20575 - DNA, 404 bp, Glycine max
atcagaaacgaagaagaagaagagagtcagcgcagaaaaccctagaaacaaaacatggcggaaaaattagcccccgaaaagcgtcacagcttcgttcacaacggtcaaaaggtgttcgagtgggatcaaacccttgacgaggtcaatatttacataactcttcctcctaacggtcattccaagcaattctactgtaagattcagtccaagcacctcgaacttggcatcaaaggcaatcctgcgtatctcaaccatgatcttactagcccggtgaagacagattcttctttttggaccttagaggatgacataatgcacataacactgcacaaaagagataagggtcagacatgggcttctcccatattaggtcagggtcagttggacccttacgctactgatct

SEQ ID NO: 20576 - DNA, 446 bp, Glycine max
cccacgcgtgcgcaacactatgaccctctcactatcagtctcactaactcccttaacttagtgaaaactcaaaacactttgcagtttcactatgagctaccacaagcgccaacagcacgacccatgggttgcacggcgtccaagctcgcaaaccaggacaccgtgcagccggtgcaagggagcggaaccacctcatgaacgaggcggtctacgcgcgccatgacctctctgatgtccactgcgactactgccggaccgtctgcctcatcggctccgtcctctccagcttatccgtctgcgaatccgtctacagttgcgaccacactctcgacgtcttccataacaaactccaacaccaccaacaacaccgtcgacaacaccgttagttaacccttcaccttcgcctacgctagcgacaaaactcgccagcagcaacacacggcggc

SEQ ID NO: 20577 - DNA, 443 bp, Glycine max
cccacgcgtccgcccacgcgtccgtagattagagattgagagggaggagtacgtggaaggcattttgacctatcgctcgcgcgaaaccaaatctctttgtttctcttaattcctttatagtagcaagtgaagttgaagttgcaggtgtgtgtctcatggcgtctgttattcctcgatgccttcctcccccaattccaattgcacaccgacgaaaggcgcaggtggtgaaatcgtgtcaccaaaacgagagctctgcttcggctcacacagaccactcctcaaatccaaaggaactccgagtaacagtttccaggcgtaattgtctctcatgtttgtgttctactatagttttgattagtgattgcgccatgcctatttttttaccaaaggcattcgctgctgatggaaatggaatcatggaaaaacctgtgtgcagaaattgc

SEQ ID NO: 20578 - DNA, 368 bp, Glycine max
ctcattccctcagatctactgcacgtgtatgggaccatagtagcgagggctgtgcctaaatatctctatactgatatctctcatctcatctatatctcgtattactgccttgctccctatctggcgaccaatatatgatgtgatgaaacacagctatagatacaacgtgcatgtatgtggctgctaatcccagagctactaccctcagagatgactggttcgaaaccccgctactgggacaatgtgtgataggatattataccacagaaatcaaagacgcaattatcagaccgaatcgcattacatgctacggagctgtggtacattcggccgttgtttaaagcagcatagccggacactagcttcaa

SEQ ID NO: 20579 - DNA, 436 bp, Glycine max
cacactactacttctccctctctccctctctaatagtaacagtaatagtaatatacataacataaccaatggaagcacgtgcaggagccaatcaacgtattgcaagaatctctgctcatcttcagccttcaaatttccaggaagggagtgatgttcttcttaagagaggtgagtgcagagcaaaaggtggggcacctggattcaaagttgcaattttgggggctgctggaggaattggtcaatccctttctttgctgatgaagatgaacccattggtttcagttcttcatctttatgatgttgtcaacacccctggtgtcacagctgatgttagccacatggacactggtgctgtggttcgtggctttctggggcagcaacaacttgagagtgcactcactggcatggacttggtaatcatacctgctggggtgcc

SEQ ID NO: 20580 - DNA, 213 bp, Glycine max
cggacgcgtggtcgtacacgagcatccgacattacaattcactggctatcaaaaccggaaccgacacacactcacttcttgaccatcttaacctcatctactatataccttatcgtctaagagtctctatctcgatctaacactataacacactgctaggaattcggcacttaagcttagtctttgacaagctgaccgcctttacgtccccaa

SEQ ID NO: 20581 - DNA, 381 bp, Glycine max
gaagatgcagcttcgtcgatcttgcttcttctttcatcattttgcatcgcgttaggggtggcagattttcaatttcccttcttttcgctacctttctcgcatagaatctcgcaattcctacgttgttccgtttccgcaactcatcaattcgaaagttattgcttcacaaggtgaatttgcatttaggaggttgagcatgtcataaaggaaaaaaatggaggtcgaggtgccaatctcgcttgatttgaataatcaacttcagccagagaccgtagtttcagttcaaaatggggatcctggagtttcctcttctgttgccaatgctgttaacccgcaacaagccgcttcaaaaaaaccgggcaagcactgggctgcatggac

SEQ ID NO: 20582 - DNA, 445 bp, Glycine max
cccacgcgtccggtttgaatcgtgaaaatgttcagaaaccagtacgacacggacgtgacgacatggagcccggcggggaggctgttccaggtggagtacgcgatggaggcggtgaagcagggctcggcggcgatagggctccgatccaagacccacgtggtcctcgcatgcgtcaacaaggctaactccgaactctcatcgcaccagaagaagatcttcaaggtcgacaaccacatcggcgtcgtcatcgtcggcctcaccgacgacggccgcgtcctctaccgctacatgcgatccgagtgcatcaactataactacacctacgagtcaccggtccccgtaaggagactcgtcgttcagctcgcggataaagctcaagtttgcacccagcggtcatggaaacgttcttatggagttggactcctggtaactggattagatgaat

SEQ ID NO: 20583 - DNA, 384 bp, Glycine max
gtcttcttctctaaaataaaaaaccctactttctgaacctttcaccgcatcgccaccgatgccctatctccactaatcaaagaaaagaaaatgagtagacgctcgagcagaactgtctacgttgggaatctacccggtgatatccgtgaaagagaagttgaagatttgtttctgaagtacggacacataacacacatcgacctaaaggttcccccaagaccacctggttatgcatttgtagagtttgaagatgctcaagatgctgaggatgcaattcgtggtcgtgatggctatgattttgatggccaccggttacgggtggagcctgcccatggtgggcgtggtcattcatcctcaaaagatcggcacaatagtcacagcaat

SEQ ID NO: 20584 - DNA, 268 bp, Glycine max
gttgcgtggtcgtcacgcacgggtaggatggttgcgaggcgttatgtgaaaacggtgcgttgaaagtggcaccgttcgaggctgatcaggttgatcccaccggcgccggtgactgttttctcatcgggtttgcagcgacgattgtgaggggcctgcccgtgcctgatgcggctctggaagggaacttcttcggatccattgctgtagctccagtaggacacgccaagcttgacttcaacttgattcagatggttaaggatgagatgca

SEQ ID NO: 20585 - DNA, 378 bp, Glycine max
  modified_base (302)..(302): a, c, g, t, unknown, or other
gacaacgttgttgaacagcgaatattcgaggctgttcggcgaagacacggacttgtacaaccgcattgtgttgggcgccctattgccgcactctgtgtggggcccactcccgcgcttcctccagacgtggcttcgcaattacctcggcggcgttctcctctacctcctctctgggctcttgtggtgcttctacatttattattggaagcgcaacgttcatgtccccaaagatgctattccctctcaaagagccatgctcttgcaaatatctgttgctatgaaagccatgccgtggtactctntacttccaactgtttcggagtacctggtagaaactggctggacaaagtgctatcctagattatataatgttggttg

SEQ ID NO: 20586 - DNA, 211 bp, Glycine max
gccaattattcttaagactctctctttctgtcccattgtgagcattcttactcctggtctcttccgcgagatatccaggaatgcttattccccaattgcttctttacaggccttactgtgcatagcttctgagtgtctttggggctgtggcttaattattaattttaacttcatgggttgaattcgtgggggttccaccattgttggagga

SEQ ID NO: 20587 - DNA, 205 bp, Glycine max
attgaacttgcctttttctgatgcagttggaaccttttcctttggtcttctttccgtctctggccctctggttaatggtaatgctggtgggacttaaggaccaggggttgcttcttcccttttggtttcaaaggaagagaattttcaattttcaatttttcattgggttctctgaaatggagagagatttcatgcgtctcaactt

SEQ ID NO: 20588 - DNA, 316 bp, Glycine max
cccacgcgtccggctagctaccctctcttttggggtatttcttttcattctccaaaaactctttaattttccttcccttttctgtgctattctctcctcactggtcaaaaggtttgtgggattttgctaatttggtgcaaatctgattcctttgacaaatccctcttgatctcctggcttattgaaaactactacaattccgagttgctttttttccctagttgcttttctgggccttgaaatcttgcttggagaaggctcaattttggtggaaacctctaccacaagaaagcatagtttttttgggttaatcata

SEQ ID NO: 20589 - DNA, 450 bp, Glycine max
caaccaaaaccaaaaccagaagataacaattaaaccgttcttcttcgattcaagttcgaagaagaagcgatgagttcgggtagcagccacagcagtgagaaggagaaggagaaacagagggtgagtcgcacgtcgctgatactgtggcacgcgcaccaaaacgacgccggatcggtgcgcaagctcctccaggaggatccctcgctcgtcaaggccagggactacgacaaccgaacgccgctccatgtggcgtccctccacggctggatcgacgtcgccacgtgcctcatcgagttcggcgccgacgtcaacgcgcaagatcgctggaaaaacacccctctggcggatgcggaaagagctaagaagagtaatgtgatcgagctcttgcaatcgcatggaagattgtcttttgggcaaaatggaagccatttcgagccgaagccggtagcg

SEQ ID NO: 20590 - DNA, 433 bp, Glycine max
cccacgcgtccgcccacgcgtccgttgttccttctccttgtgatcttcttcaaccttcagagtgagaaaacacattcagaaaccacgtttctctcttcttcttcttcttcttctttttcttctctcgaggtcattattaagtattcaccatggaggcaccatcttccaccaaacccaacgacccaacaaaaccttccaacactttcaccacccttagtctggaggccggcccggcccaagcgagcccactccgaaaaatgtttgccgtggcgttcatcgccgacggcatacagttcgggtgggctctccagctctctcttctaaccccctacgttcagcttttaggagtcccccacgctgcggccttcttcatctggctctgcgggcccatcttcgggctcgtggtacagcccattgtgggctactacagcga

SEQ ID NO: 20591 - DNA, 334 bp, Glycine max
cccacgcgtccggccatttgtatatttgatgatgttgctgagcacggtcgtgaagccgctgttaaatattatgattcttttcttccattcttactcgaagcttgcaatgatgaatatcccgatgttcgacaggctgctgtttatggtgttggtgtttgtgctgagtttggtggatctgttttcagcccccttgttggagaggcactttcaaggttagatgctgtgataaggcatccaaatgcactacatgctgataacataatggcatatgacaatgccgtctcagctcttggaaaaatatgccaattccatcgtgatagcataaatgcagcac

SEQ ID NO: 20592 - DNA, 435 bp, Glycine max
aacaaaactaaagaaagcggtttcacagaccgagaaatcccaatcctatggcagaggaagggaaacccgatgaacagctctttcagcttctctccaatcttctccaccaggtggaatcactgacgaatcaagaagaagttgagctgcgttctaaaattgaaactcttggattagaggttacaaaagttccttcaaagtcaacgcagcaccttaacgagttggaaatagctgaggagttggataaattatcagcaagattggataatcttgatgagatgatatcatcatcaatggcttcagatccacaggtgcagtcactcttgagtgatacagccgatgtgtggatgccagttatcactgctacttctgaagaaaggcgcaacttcacagcggctactggagacagcaccctccaaactgatgtggaaaagtcta

SEQ ID NO: 20593 - DNA, 447 bp, Glycine max
  modified_base (397)..(397): a, c, g, t, unknown, or other
ttcttcttcttctctcgcgccgcaataataatactaaaacatgtccaactctgatggagccactaacgccgtccctcccaacgacgccaacaacaacacaatcgttgagtaccagcagcgaaccaccaccaccaccaccgccgccgccgccgccctcgccgtcaagaaaccgccttccaaggaccgccacagcaaggtcgacggccgcgggcgccgcattcgcatgccgatcatctgcgccgcccgcgtcttccagctcacgcgcgagctcggccacaagtccgacggccagaccatcgagtggctcctccgccaggcggaacccttcatcatcgccgctaccggctccggcaccactccggcgagcttctccactgtctccgaccacaagcccctncttccttcccctacccccttcatcctggcaaacgcattcgccctgacgac

SEQ ID NO: 20594 - DNA, 139 bp, Glycine max
aacagatctaatgcacacacaatgaccttaaatcacaacaatgtcctagtcttatctgcggtgctcacgctgctcttctatctactactgacactacgcgagctcggagaggaacatccgctagtcctgcagtaccaca

SEQ ID NO: 20595 - DNA, 326 bp, Glycine max
gagaaaggcgtggacgagttcccgttctgcgtgcacctggtctcgtgggagaaggagaacgtctccagcgaggctttggaggcggcgcgcatcgcatgcaacaagtacatggccaagttcgccggaaaagatgccttccacctgcgcgtgagggtgcatcccttccacgtgctccgcatcaacaagatgctatcgtgcgccggggccgacaggctccagaccggcatgaggggcgcctttgggaagccgcaggggacgtgcgctagggttaacattggtcaggtgctgctctcggtgaggtgtaaggatgctaacagtcaccatgc

SEQ ID NO: 20596 - DNA, 432 bp, Glycine max
caacggacaagcttcgttctggcgaagaatggcggcgccgggctcatccgccggcggcggcggagggacggcgaaggctacggtggcggagcagatctcgcaggcggtgcagtccacctccaacctcctccaccttatgcggcactcttctcctgcccaggctcaactggttaagcttcctaagaatcttttggcaaaggtttccaccatcaagaatacagagcaggttttggagcagttgcctggggtgatatcatctcttgacgcacacatggaaaatgggttgcaaaatgttccacatctaaagaccgtggttcaggtactttcaaatatggaaagtagccagcttagcttgctatcccgaccccatcctctccagaaggaacttgaaccaggaaaccaatctcaaggaaccggttaaagaatctcatg

SEQ ID NO: 20597 - DNA, 363 bp, Glycine max
caattttctagggtttatacaattttcgatggcttcttcagatgttgagtaccgttgctttgtcggtgggctcgcttgggccactgacgaccaagctctcgagagagccttctctcagtacggcgaaatcgttgaaacgaagattatcaacgatcgtgagactggaagatccaggggttttggatttgtgaccttcgcctcggagcagtccatgaaagacgccatcgaagggatgaacggccaaaaccttgacggccgtaacatcactgttaacgaagctcagtcccgtggtggcggtggcggcggaggcggtggaggtggtggatatggtggtggtcgccgtgggtggatatggtggtggtg

SEQ ID NO: 20598 - DNA, 461 bp, Glycine max
tctgaatcttgttcctgcctgggaaaacaacgattctatcatatgaatcagcgctgtttggggttgtctcctactcctacaccctgaattgaagcccgcctttgttttcctccaattcacttcttcgctagctcctgcttccacattccctttcccggattcgaactataatggcttgtgggagtaagagcgggaaaagtgagatcagtgaaggaggtgcaaatgattcagtggctgtgggagatgtgatatttgtcaagcttcgcggtagctcatggtggcctgtacaggttgttgatgaaaatagtgttaataagagtgttaaaccgagcaaacggaccaaacgattgccgggagacatccttgttaggcattatggaagctatacatactcatatgctgatcctattaaatgtcgtgatgagtttaagaggatacttgaacgtaatgatggttctctc

SEQ ID NO: 20599 - DNA, 308 bp, Glycine max
cggaaaatctccttttgggatgaagtttcactaaacccttgtttttttctctttgcctttctctccttcttctgctccttgtcgacagtgtaagatcttttctcgccctcatttttggtccacaaattgtgctccacgcactcattaggttaagagaatccagcataaaagggcaagtcatgggttttaaatttatttatttttaaagtgttgaatttgaagggtcagaatgagatgtttcatatatatcttggatctgtctccttgaatgccattatgtttgtagccttcatttgaggtaaaggaaa

SEQ ID NO: 20600 - DNA, 433 bp, Glycine max
aaaaaactcaactttgaaattcttaaaaccctaactggtccgaaccattggagccaccgtgcaatagttcctcctctcactctctccctcaacacaccattgattttggtttcagctttatttggaagagggttgtaacgctgacgtgaaatttttctgaagacaaagatgcaggcttgtacaacgatgagttctttgcagcaacaacctatttggaccaaagggttaaatttccctgcaaaagggtatggcagcaataacgggtttctacctcaggtgaggttctgcaatattaagccatccaaagcttctcatgttgaagcaagtttagtcactgggaagccgtcatctgtgcctttctctgtgcctgaaattggaggcgacggaagtagcttcctggactatggcttgagtgaagctgatcctgatgttc

SEQ ID NO: 20601 - DNA, 365 bp, Glycine max
gtcagtactagctgaggggtgtaaataagtgacttttggaccatgcaattgcaattttccttatgtgaaaagtgattatctataattaatttgtgttctatatttgactaagatcctgcaaccataggaagcacttatcgcttgtaattttcaatgatcaaaattttacatttgttcttttttgttggcttcttcatctgtggcaattaagtttctatcacggaatacaaaagatggctcctatttcaagaatctacccaagtcaagtgccattaagctcattgatttcgggagtacatcatttgaacatcaggatcacagttatgttgtttcaacaagacactatcgtgcaccagaagttatct

SEQ ID NO: 20602 - DNA, 460 bp, Glycine max
aacccccaaaccttcatccgtcgatgcccactggatggctctgccatccgagcctcaccggcgtcgccgccacaaccacatctccaccttcctccaatccaccgcctccaacttcgcctctctcttcaaccccccaaaccctccctctctagcactccctcacccgccctcctccttctccctccctctcttcttcgcgccgccgctctcctcctccaccgccgttgactctgccactgccgagcccgctcgccctgccgcgaaatcggtccgcatagcgcggctcggcgccaatgggaagggcggcggcgggcctgtgttcgtggggcaggtgttcagcatgtgcgacctctccggtacgggcctcatggccgtttcgacgcacttcgacattcccttcatttcgaaaagaacccctgagtggttgaaaaaagtatttgcagcaatcaccaagagtgag

SEQ ID NO: 20603 - DNA, 212 bp, Glycine max
ttaatttagagtgggttttttcatttgaaggtgctgcagctactactgtggcacaacattgggcttttagttgaatcaggtttgttttcagcatattatttttgttgtgtatcacggtttaatttttttttccaccacaaaagataagtgtgggttcgcgtgctgaaatgctatgggtacttcttaattcttatgggtatgtttgatagttc

SEQ ID NO: 20604 - DNA, 332 bp, Glycine max
  modified_base (320)..(320): a, c, g, t, unknown, or other
agatgaggaagtcgcccgtgtatatattgctgaagtggtgcttgcattagagtatttgcgtgtcactgcgtgtggttcatcgtgacttgaagcccgacaatttattgatagcacatgatggtcacatcaagttaacagactttgggctttctaaagttggtctcatcaacagcacagatgatctgtctggtccagcagtgaatgggacatcactacttgaagaagatgaaactgatgtatttacatccgcggatcaaagggaaaggagggagaaacgttctgcagtgggcacacctgattacttagccccagagatactnttgggaactgga

SEQ ID NO: 20605 - DNA, 357 bp, Glycine max
cggacgcgtgggttggagttggacttatgggctacatgggaaacaaggggtcagtttggagtagtatgtctctctttcagtcacgtatgtgctttgtttgttcccatttgacttctgatcagaaggaacgggctgaacatatgcgaaactctgatgttcattaaattctaatacgcacttgcttctcatcatctgtatttgacgcagatcaaccactgactataccatctcatgaccagattttctggttccaagatttgaattatcgtatcaatatcatggatgctgaggttataaaattggtggctctaatgaagtgggatgagttgaagaactatgatcagctactcacagaat

SEQ ID NO: 20606 - DNA, 314 bp, Glycine max
  modified_base (302)..(302): a, c, g, t, unknown, or other
cccacgcgtccggtttcttattacagtagttgacgcggcactgcacagtagtagagaaaagctaacgcgtgtaaatgaagtagtgagtagagcaagagcgacaaagagagtgccaggtgtgtgaaggagctcgttacttgggatccagttgttgttattcttaatcggagatcgcagcggcggattgcatgagcggcggatcggaggcggtgtgagcagaggatcgaaagatgtctgcgatcatagtgtgcgggaagagatcagcgctgttccaagaccttccttccaagaggatccgttgntcctcttcttct

SEQ ID NO: 20607 - DNA, 350 bp, Glycine max
gccacatctgctttaaaagcctgtacttttgaacctctctcgtgatcactctaatatggtgggggtggttttgaacgatcgatttgtgaagaaggtgcgcgtgaagtgcaacgacgatgataccatctgcgaccttaacaagcttgtggcggctcacactggctcaagagccgtcaagatccgcatccagaagttgtacaccatctacaatgatcacattactctcaaggattacgagatccatgaccgcatgtgtctcgaactctactacaactctacacaacaaggtgtgccttatgcgtaatatactatgtgcttctaatgggataagcgcttaatgtaattctgac

SEQ ID NO: 20608 - DNA, 243 bp, Glycine max
gcctcaacaacccagttgagtaactaacatagttcatgtgaagaacaagcatgtgctactaagaggactagtgcaccgaccatgcgaacgaatccgacctgaatatcggcgaaagtaccataccattacaacttccacatggtcccaacgatgtcttgctcaaaaatcatgcacttgtctcgccatccgcatatgaagaatatcatcaacaagccccaaagccctctcaatagacatgcttac

SEQ ID NO: 20609 - DNA, 376 bp, Glycine max
acagagaagagaagttgatgtcaacagcagatgctcctcctccgttccaagaagcagcgcgatgcgtcgtgtgcaattgcagtttcaacaccttcagaagaaggcatcactgtcgatcctgtgggagaacattgtgcaatgaacattcatcagatcaaatggctataccacaattcggcatttactcagatgtacgagtatgtgctgatcgtttcaacgactaacagtctgggaaggatgaaccacagactgcttcagagggacgcacagtgtcacagatccactttctaaatgagacctcgacacatatgttgattcaacgtccataccaactgcagagaataagcttgtgttgggcatttaagagtcgtaatgt

SEQ ID NO: 20610 - DNA, 401 bp, Glycine max
cccacgcgtccgtgttcacaatgagaagcccatagcagagtctcttgtgattgttgaatacgttgatgagacatggaagaacaaccccatcttaccttctgatccttaccaaagagccttggctcgtttctggtccaaattcattgatgataagattgtgggtgctgtatggaaatctgttttcacggttgatgagaaagagcgtgagaagaatgttgaagaaacatatgaggctcttcagtttcttgagaatgagctgaaggacaagaagttttttggaggagaggaatttgggttggtagatattgctgctgtcttcatagcattttggatcccaatttttcaggaaatatcatggttgcagttattcaccagtgagaaaattcctatactctacaaat

SEQ ID NO: 20611 - DNA, 244 bp, Glycine max
ctcttcttctcttgcggctagggttttagcgcagcttcttctagatttaaggaagacgggtgaggaaaaggttcacatcagtcttgtggtcattggccatgtcgactctgggaaatccactaccactggtcacctgatttacaagcttggaggcattgacaagcgtgttatcgagacgtttgagaaggacgctgctgacatgaacacgaggtctttcaagcatgcctgggtgctggacatactt

SEQ ID NO: 20612 - DNA, 354 bp, Glycine max
gccgcatatgcagcaaaagcctgcacttttgaacctctctcgtgatcactcttcttcctggctgtaaatttgtaaccttcacacttttcagaacacccagaagctctagcctcaccagcaccacatattgctagctagcgactccgagatgccaagcaaagaggattcacctttagtagaagcaaagcttccactattagaagctcaccctttaacagatgaaagagaacaagaccaaagtttcccacgaaggttttggcttgagtcaaagaggctttggcacatagtaggcccttcaattttcagccgtattgcatcctactccatgttagtcataacacaagcctttgcagg

SEQ ID NO: 20613 - DNA, 452 bp, Glycine max
agagctttgtgaaacataaagttaaagcagggcatattgcagagggagcaaaccgaatatttgaaaacttgttctactttttattatcactgttgcatttatttcagatatttagtatttgcctacaagtttgttctttagtttaaacacagacaagacgactctttatggcggctataaccaatttgaacttttcttccttgtgtaaaaaaaggttttgtgtgcgtttgtgcgtgttggagttggctttttgaagtgggtgccatgctgaagttatatgtgtatgtgaaagatgaagaacaatagagataaagaaaaaggtaacgacgtttaccaaagttacagacagcatcacacgttgtcaatgccaatgatgttttctggtttgaacagagagaaggagatgtcagccatgatctctgctttgacacatgtggtttgtggagaagatg

SEQ ID NO: 20614 - DNA, 208 bp, Glycine max
atcaatcaataacataaataacacttcttcttgccttttaatatatttctctctcttcccgtcgtggttcacctttcaacacttaattagagaccacccaatttccttgccgatctttttccaggggaaagtttggatggtttgtggtaagaagtaaaattttggtgaataaccggaaaggtgaaggtggacctggattatatggata

SEQ ID NO: 20615 - DNA, 347 bp, Glycine max
ccatcttcaacttcaacacttaaactccttttagtttcaataatccacaccccaaacccggggctttccctatttattatcatcttagttttccctaggaccatatattataccatatttatatatcttcacatacttaataatatataataatgggtgttgtacggacgtgggagagcaggagggcggagctggaggcctttcgccggagcctggtggcagccgccggcatccagcggcggaaagacgatgagggggggagaacccacaagtttgtttcctcctatgaacatgatgatggaaagggtaccttaatctgtgtcacttgtggagtttcctactttggt

SEQ ID NO: 20616 - DNA, 345 bp, Glycine max
gaacatttttcaattttcatgactttctgaaggatggaaaatgaagcctcgtgtcggtggtgctcttgcagtgcacgcaccctcgtgtcaatattcgctgcaattcttgtcctattacaaccaaattgcatcgctaagcaacagcaccaaccatgccctccttcatcctgcggcataattggcaacatatcgttcccatttcgcctcatagacgacccaagccactgcggcgacacaaggtaccagttagattgcgtgaataacgcgacgctgttaaccttgctctcggtaaaataccatgtacaagatatcgattacaagagatacagaatcaaggttagtgac

SEQ ID NO: 20617 - DNA, 203 bp, Glycine max
agcatatataggacgttatacaccatcaatgcatgtatctcgttactctgctcatggtaggggcttttatacctagacttatcgttatgatgccacaaggtgagatgaaccctatttaatgtggaacttttggatctgctgccaggggtgcatatcctgtgactgctttcagatgatattagacggttgatctggtggatatt

SEQ ID NO: 20618 - DNA, 444 bp, Glycine max
gtcgtcgtcgttaattcgcctccgccgcaccatcagaacactctcgggcatctcccactcgttgtccgcgactcatgcggcgtcgttttcctcccccatcgggtgcggcgtttcatggagtttgcagtcaccgaagaagggtgtggttcagtcccgttcattcaggtcaagctcaatttcacttctatcttttcgatcctcgcagcggcagaacaacatccccgatgagattggtcccgataccattctcttcgagggctgcgattacaaccattggctcatcgtcatggaattcaaagacaacaacaaaccctctcccgaagacatggttcgcgtttacgaagagacttgtgccaagggtcttaacatcagtttggaagaggccaagaagaaaatgtatgcgtgcagcacaacaacttacataggccttcaggcagtcatgac

SEQ ID NO: 20619 - DNA, 452 bp, Glycine max
ccgactacctttgttcttcacctttctccctctctatatataccctcaaaacaaaccctccattatcaaatctcccatattgttcttcaattctctccaacgttaacaaccttcattccatcctcgtatcggttattattaattttaattccacgtaatgggcaactacgtttcatgcaccttggcgcctcctttgatgaagaattccaaggccacgagggttatcatccccaccggtgaagtcaagcaattcaaagagatcgtgaaggctgcggaactcatgctcgaacaccccaactattttttggtcaattctcgttctttgcatataggaagaagattctctgctctcggtgctgatgaagagttggagttcggcaacgtgtatatcttcttcccgatgaggaaagtgaactcttttgtcacctgccctgacatggcaatactcttct

SEQ ID NO: 20620 - DNA, 251 bp, Glycine max
cagacgtgcgcacgctgtgcgtactcggtgaatagaataagtatggctaccgtcccaggagggtttatatgggcggtcgtaatgaagaacaactctttcttggtgaaagagctctgatggggcactcagatcgtgcagtacaactgagagccctacactctttacaacttcaacactttcaagtacttagttttggcatacaagaataactgacaatgttcaaccttgtggtaacgaccagtatgagttgc

SEQ ID NO: 20621 - DNA, 407 bp, Glycine max
cccacgcgtccgcccacgcgtccgcccacgcgtgcggcaaaatgttcggggcttgtgctgtgggttttcccaggttttagagctccaaaccttcagatccacctcattcgtctccagatcttccttcctggataacgttttcgggttcgagaaggcacttgtgttgtttttcgtacgaaatggagactaaacagagttcggtgacggttacgctcagttactgcgcgttgacgtgcgccgcggaatttctcgcgactttgctagcttctgctgtcgtcaaagcctcgcttttggccccagatctctaccggctgctattgatcaacacgcctactgccaaaggagagagcaaaattcagagtgaagacaagcaacgtgatgcataaggagaacatgggtacgatgat

SEQ ID NO: 20622 - DNA, 413 bp, Glycine max
  modified_base (369)..(369): a, c, g, t, unknown, or other
  modified_base (387)..(387): a, c, g, t, unknown, or other
cggacccgtggccgcgcactctctcttttctctcttaacacaaaaaccctatcgttcttcggggtttcgccgattctcgccatgccgaaagccaaatccgacgccaaagccgccgatagccggttgaagcgcaagggcgctggtgctggaaggaagcaatcgaagaaagctgctaaggatcctaacaagccaaagagacctccaagcgctttcttcgttttcatgtccgagttcagagagcagtttaagaaggagcatcctaacaacaaatccgtcgctgttgtcggtaaagctggtggtgacaaatggaaatcgctgtctgatgctgaaaaggcccccttcgttgccacggccgaaaagaagaaacangagtatgagaaaactatnttggcttacaataagaaattggaggg

SEQ ID NO: 20623 - DNA, 435 bp, Glycine max
tttctcttctcaatgtctcaagtgtgccgagaaaatcatggtggacgcatcagaacgtagatgcttggaggatgatgatccatctctcatgaaaactatcaagggcgcaacaactggtttagtggctggaactatctggggtactgtagttgccacctggtatgatgtcccccgtgtcgagagaaatgttgctcttccagggctgattaggactatcaggatgatgggcaactatggtttgacctttgctgccatacgaggagtctacataggtgtagagcagttggcgcagaactatacgatgaagagggatttagtcaatggacctgttggctgatttgatgcaggtgcaactattctggggtacagatgaatgagcatcaaaaccgcactatctgctggatcagcatatgcattcacatatgaattccttga

SEQ ID NO: 20624 - DNA, 347 bp, Glycine max
  modified_base (66)..(66): a, c, g, t, unknown, or other
  modified_base (77)..(78): a, c, g, t, unknown, or other
ataatctaccaatttgctggactaatagtaaattgaggcaaaaaatggaatctaaagagtccatcnttgtgaagctnntgctgattctgcatttgtccgttctctgggtttcacaggagtttgatttctactactttgttcagcagtggccaggatcatattgtgacacgacacagaacagctgttgctaccctacaactggaaaacccgctgcagattttggcattcatgggctttggcctaattacaaagatggttcatacccatctaactgtgattcagacaatcgttttcagccatctcagatatcagacctcactagtagcttgcaaaggaactggccacac

SEQ ID NO: 20625 - DNA, 464 bp, Glycine max
ataaatctcaccacattctgctgagactaattactcgaatagaggcacaaaatggaatctagagagtccatctttgtgaagcttatgctgattctgcattcgtccgttctctgggtttcacaggattgcgatttctactactttgctcagcagtggccaggatcatattgtgacacgacacagaacagctgttgctaccctacagctggaaaacccgctgcagattttggcattcatgggctctggcctaattacaaacatggttcatacccatctaactgtgattcaaacaatcgttttcagccatctcagatatcagacctcactagtagctcgcagaggaactggcccacactagcatgcccaagtgggaatggggttcaattctggacccacgaatgggacaaacacggtacttgctctcagtcagtccttagacaacatgactattttgaaacacctct

SEQ ID NO: 20626 - DNA, 426 bp, Glycine max
acccgtagaaacctgtgacactctggttctcttgcggctagggttttagcgcaggtggggctagatttaaggaagatgggtaaggaaaaggttcacatcagtattgtggtcattggccatgtcaactctgggaaatccactaccactggtcacctgatttacaagcttggaggcattgacaagcgtgttattgagaggtttgagaaggaagctgctgacatgaacaagaggtctttcaagtatgcctgggtgctggacaaacttaaggctgagcgtgaaagatgaatcaccattgatattgcttatgggaaagttgaaacaacaaagtgttattgcacagttattgatgcgcctggacatatggatttcactgagaatatgattactgggacatcccaagctgactgtgctgatcttatcattgaa

SEQ ID NO: 20627 - DNA, 422 bp, Glycine max
aaagaactggttacaagcctcttaagtgaaacagtgctggccaagcaaaatgggtcttggcgtgatcgggttcgtcaaacttagaatttgcacccttaaagttgatgctgataatagaaaagttggctgaatgttgaatgaagttgagctttaaccatgtctaaagcattcaattttgcgttgctcagtctgtatatggtgtgagatgggctttaaccgtgtatacaacttgtatctggttcctatgcaactggcattattttcaagcctataatcactagtgaggtaagctatgtgttactgtttatcatttttagagggggaagcagagtgatgtgtgaaacgccatttgtcttttgtgtaattccagtttcatagttaagtatttagaaggaaaactttgcaataggatgatgctattc

SEQ ID NO: 20628 - DNA, 368 bp, Glycine max
cccacgcgtccgcaaattttggtccaattgcaactgtttaaatattgttactatagtctacgacatgcttgacttgggaagagtgtaacaaagtacctgatgcatgtgtttactaaaagaatatatgtatgtgtgtaatggttttcaactttggttttatgtaataaattgattgtgagtccgtaattgatcattgaagtaatcgtatgtaattcttactttaaaaaagaggaggattctatcgtcaattgaacagaaagaagaagctaaagggaacgatgtgagtgtgaagaggataaaagagtataggcagaaggtggagtctgagttgtccaatatctgcagtgatatcatgacttgtattgatg

SEQ ID NO: 20629 - DNA, 449 bp, Glycine max
  modified_base (358)..(358): a, c, g, t, unknown, or other
  modified_base (405)..(405): a, c, g, t, unknown, or other
ggctggagaaaattgagaacctccagagtcatgacaacacagagatttatgaaaaggcgggcaagattcttgagacatactggttggaggaggaagatgagactatgcctccaggggatgcttctcagtcagggttcaactttggtagcagtgacgctcctactgtgccatccggtggattcaactttaattagaagatattcatgctctactggggagttttgggtggtctatccgtaaagtcctccattatgacgcgacagcagttgggggataagtcaacgtcttgtcattgtcctaatgtccttgggtcgtacgaagtccagcaagttaatacatggttgctggactggcttgngttttttgcaatgcctggtatttcatatctcatggtgtaaaatgctntgtggctatatttttttgccaccgtagagaatactagagtcttc

SEQ ID NO: 20630 - DNA, 255 bp, Glycine max
gtctcgcgaacattgagagcctacagagtgttgacaacacagcattgtatgaaaaggcgggcacgatccttgagacatactggttggacgaggaagatgagactatccctccataggattcttttcagccatgcttaatgtttggtagctgtgactctcatactgtgccatacagaggattcaactttaattagaagatattcatgctatactggcgagtttcgcatgcggtatccgtatagcactgcatgatga

SEQ ID NO: 20631 - DNA, 426 bp, Glycine max
cagcgttagaactctcgtgtcttctttaaccctcaatcagcaacgtgcgccctcctggggtcaagctcagtcagcactgcaccgcaaatttttctttgcccctttcgatgagtaacgccacagactccgccggcgagatcccaccggagacgaggtccgccgagagtgacggtggtgggccccggcccacgattaagatcaatgttacgcacggttcctctcaccacgatttacacctcccggcccaatcaacttttggggatgttaagaaactccttgtcaataaaactggtttagagcctgcagagcaacgacttttcttcacagggatagaaaagggtgataaccagcgtttgcaggctgaaggtgtaaaggataagtcaaaaacttatcttttggaaggcattggtagcacagagaggaaac

SEQ ID NO: 20632 - DNA, 371 bp, Glycine max
attatatcgtttacaatgttcctttaccccctaacgactatccatccagctcatggacattgtgaatgaaaagcctgagttgtttgccgtttccattgatccaaatttctctttttatctgcacaatgattttctgtctgtctttcccaacaaaaaggagccccatggcatcatactgcatagaaacaaacgccaatatggaaaattagatgagctttctgcaatatgctctgccatggaaggtgttaaagtaattaatggattggaatgtaagatagcttgcagctcatctaagatttcttatgttcttgacacacaagaatttttcttccgaccaagaaagaatagacgaacgccttcagggaccacaa

SEQ ID NO: 20633 - DNA, 333 bp, Glycine max
attttattgtcatggctgagctgtcaagagattgtagctgcagaaaatctcttgtactgctttggaatgattttggagttcattgcgttcattctgttgcggatcaaacaccccgacgcatcccgaccttacaagataccggggggaactgctggagcaattatcatgtgtatccctacgacaatattgattggtgtggtgttgtttttctccacccttaaagtaatggttgtaagccttattgctatggcaattggccttctgatgcatccttgtctcaaatttgttgagaagacgagatggatgaagtttaccatagttctgaactccctg

SEQ ID NO: 20634 - DNA, 328 bp, Glycine max
caaaaaagaaaatgatgctcggagagcaccatcgcgcgaatccaacggttcacgtgccaccgtggccaacccacgacgatccaacggccgagatgtactccgcgtttttaacaaacgacgtcaatgctggtgagtactctccgtactatcttcaagaagcactaacggctctgcagcgttttctgccgtctaacgaaacggacgctgactcggacacggaggctcaacccgacgcggcggtggacgcgtactcgtgcgaccatttccgcatgtacgagttcaaggtccgtcgatgcgcacgtggcaggtcacacgactggacggagtg

SEQ ID NO: 20635 - DNA, 315 bp, Glycine max
  modified_base (1)..(1): a, c, g, t, unknown, or other
  modified_base (160)..(160): a, c, g, t, unknown, or other
ncgccacgcgttcggattcttcttcataaccatattattggataaaaattttaaatatcttatacacatgtcatagtttggttatggtggaattaaaatcattctatttgggttcattagctgtgctaaaatacgaagaagacattgctatgtatactgntaaagcggcaaatgatccaagaacatgcaaccgcgtcgttatttatcggccacagaagaatatcatatcacagaatgagttgacatcattgtgggagcaaaaatgtggtcagacttttcacaaggctttcatttcggaagaagaaattgtcaagc

SEQ ID NO: 20636 - DNA, 434 bp, Glycine max
cccacgcgtccgcccacgcgtccgcccacgcgtccgttttatcttccgttccatgtctatgcactgaaatggcgtccatgtctacgtgcatcactgtgatccccacttgtgggctaccgcggcggctactttccttcaccccgaagcagccaatatcactcccttgcgtgattggaggagtcccgaaaagagtatgggattctagggttttggtggcgaggccggggggcgcagtggaaagcgaccagttgccttcggatgtgagaaagcgaacgatggatgccgtggatgggtgtggagggagagtgaccattggggatgtggctagcaaagctggccctaacttggattaaggccagaaagctcttcaagctcttgctgctgatgcggatggctttttagagggttctggggaaggtgacgttccggatgga

SEQ ID NO: 20637 - DNA, 421 bp, Glycine max
  modified_base (351)..(351): a, c, g, t, unknown, or other
  modified_base (361)..(361): a, c, g, t, unknown, or other
aatggatgagtttttaagtggatttcattgggccaatgaacttgtgtgatgaatgaccatggagtctgtggagtgtgcttagtttttttgatgggttagttaatggatatgacctgaggtgggtgagttctctctgtttagataagttctgtgtaatattgtatgagtctttttggtggttgggataatattataactgaatttgtttaatgtggtggaatgaaaggaatgattgattgatgagacaatttgaggcgctgtgacagtgattctgttaagatcttttttaaattgtcataataagatatggcaaatatgttgtgcatcagttttttttttttagcaaagttngtgtatgctntttagttattctctaaatgaaaatattgataatacagaatggtcattatgtttcttttaa

SEQ ID NO: 20638 - DNA, 423 bp, Glycine max
atgcaacccaccccctaaaactccaaaacacccacctgtcccaaagccacctttcccaaagcaagcatgttgccccagagacactattaagtttggtgtgtgtgctgatgtgttaggtttgatcaacgtgcatcttgggaagccaccaaagaccccatgctgcaacctcattgagggtctcgctgatcttgaatctgcagtgtgcctctgcactgctctcaaagctaatgtgttgggcatcaaactcaatgttccagtgaacttgagcttgctactcaactactgtggaaagggtgttcccaaaggtttcgtctgctattaatgaataaacacttctataatgtgtagtttcctaatgtaaagtatgtctcaaggttctatttcgctatagtcgatattcatcatgctttgtactttgtactt

SEQ ID NO: 20639 - DNA, 398 bp, Glycine max
aattgccttaaggaacgttcgagaccacagaggtttctctagtcttcttctgtggagagcttgttttctcttgtgcattcatctcacttccaattaaggaacaagctttccaccaatttgaatcaccaatggctcgctctttctccaacctcaaggttctctctgctcttgtcgccgacggattctccaacactctcaccaggcgtgggtacgcagtagcgacacaaagcgcaacaagaggaggagcagcctccatcagcggcaagtcaggggaagacaaggtactaggaagaggtgctgaaaaggtttcgtgggtcccagaccctgtcactggttactacaaaccggagaacatcaaagagaattgatgtgctgagcttagaaccacggttttgggc

SEQ ID NO: 20640 - DNA, 411 bp, Glycine max
cccacgcgtccgaaaagattgggctttggaatgtgggcaaaactgcacatcacgggaatgcatgttgaagggaaggtcttagttggggtgaagtttctcccaacatggccttttattggccgtttgcgtgtatgctttgttgaacctccatattttcaaatgactgtcaaacctatgtttactcatgggcttgatgtgactgaacttccaggcattgctgggtggctagataagctgctgtctattgcttttgaacagacccttgttgagcccaacatgctggttgttgatgttgagaaatttgtttcaccacaacaagagtcttggttcaaagtgaatgagaaggagcctgttgcttatgcaaaagtggaagttattgaagcatctgagatgaagccatctgatctaaat

SEQ ID NO: 20641 - DNA, 386 bp, Glycine max
cttttctttttgtgaggctttccaaatttgggcagtatttgtatttacccttccactgagtttttctttcttgggacatagaaattgacagaagagagtgagcacacagaggcacttggtatagtatatatactattgcttttgcgtgctcacttctctttctgtcaacttccagtgctggaaaattccttacaattctggctctgctttgttccaaattccaaatccaaacaaaccccaaccccaccccagacacactctcgatctttctccacactctgatgaactgaagaacatcaatggcttcttcagcagatataggatgaagagttggattcatcctaatcactaaacatacatggattgagaagatgtcattttatatt

SEQ ID NO: 20642 - DNA, 367 bp, Glycine max
cccacgcgttcgcccacgcgtccgcaaaacaggagctccgagaggttcaagccatggggatggacctagctgaagggttcagcagttaaggaaaagagacgaagattttgagctcggaaccattgcgatggccatggcttccaaccatcttcgaaacctcaatcgcatctccatccaccattttcaggctctcctcaacgatactaccaggttcttctccgacgctgcttcttcattgcctcaaccgcaacctccctcatcatccttgaagcacaatgagctcgccaagttcgccgccatcgccgatacctggtgggattctgaaggcccctttaaaccattgcatgtgatgaatcctacgagactt

SEQ ID NO: 20643 - DNA, 326 bp, Glycine max
  modified_base (36)..(36): a, c, g, t, unknown, or other
  modified_base (294)..(294): a, c, g, t, unknown, or other
gttattcttctagaatcacgagaaagacttgatggncgtattcacactgactactcattaggcgttctgatgacctgggtgcatcgtggttgcatggagattgcaaggagaatccactggctccattgattgggaagctgggactacctctgtaccgtactagtgaggataattctgtcctttatgaccatgatttggaaagctatgcactttttgatatggatgggaatcaagttccccaagagttagttacaaaaattggtaaaatatttggagtgattatagaagagacanataatgtacgagaggaattcagcgaggatatg

SEQ ID NO: 20644 - DNA, 430 bp, Glycine max
  modified_base (341)..(341): a, c, g, t, unknown, or other
acgctttggttcacgcctacggatcagtcaactcagataactttaacatccatccagaaagcagcgcgattcgtggattgtagttgagtgctttatccaggtcacagagctcataggacaatggggagctctctagctacgcctatacactctatatgatggctcaattcaacaagcggaactggcaacttcaacatgaccatgatagatgtgcatctgtcattacgtaggatcctaagacaattcatgttaatttcagttttcagatttccactacattctcataccaatcacccataccctccttcgaatgcgacacatggcatatttctccaagcctncacagtgctcatcaaatctacgcatccagaacaccgagcttgactaacatcacaatcccttacatagactcatgtcttacgacaactat

SEQ ID NO: 20645 - DNA, 351 bp, Glycine max
  modified_base (155)..(155): a, c, g, t, unknown, or other
cttcagagaaacaacggagggaaggagatggaaaacaatgctgaatctggaaaatccaaaagggaaagggaaagggattccaattcacggagggaagtacgttcgctacaacatcttaggcaaccatttccaagtctattccaagtacgctcccnctctccaacccgttggtcgcggcgcatacggcatcgtttgctgtgcgacgaattcggagacgaaagaaggagtggcgataaagaagattgggaatgcctttgacaacaggatcgacgccaagaggacgctcagggaaatcaagcttctctgtcacattggaacatgataacataataaaaattaaagacataattc

SEQ ID NO: 20646 - DNA, 405 bp, Glycine max
gagtgatacacatcacattttctcaaagtaatttattaattaataaataaatggcggcggcggcagcagtgacggtgctactcccacctaggattccgaccgccaccaacgttacccgctgctctgctttgccttctctgcctcctcgcggcaccaacactaaaaccactttgctcttatcttccctcaaccacttctcagtgtcccgaaaatcttctctgcttcagaccagagcttcttcagaggaatcatcctcagtagatgccaatgaggtgttcacagatttgaaggaaaagtgggatgctctcgaaaacaagtccacagtacttgtttatggtggtggggctctagctgctgtttggctatcgtcgaatctcgtgagcgccatcaactctgtgtccttgc

SEQ ID NO: 20647 - DNA, 335 bp, Glycine max
gaacacagcaactgaaattggtgctctttagcttcaacaatctctcatgcaacgcatcagccgaatctagtggcatatctcagccttcactttcacaacactgccaaaaaaaaagaagtagaaaaaaagaaaccctttacttctttttagggacgcaggtcgtgtttgtcttgttttggctgctgacactatcatagttttttgttaggtgaaatcaagcccactaatgtgtgtacgcattagagaagggcattgaaacaaagtgtgatttctggtggagcttgattagtcatcttctatgctgtctttggtaacagaaaacatgggcttactct

SEQ ID NO: 20648 - DNA, 387 bp, Glycine max
cccacgcgttcggtaaataatctccatccacatcaaactagacttaccctacctacctggtggttaaaggcacaccaaccccaccaaaactattagcatcatctactttctagcttattgttcaagagttgtgatcaagaatgagttcaacaagccgtgcttggacttggaccgtggcggcaagtgttggagtggtggaggccttgaaagaccaaagtatatgcaggtggaacagtgtgatgagatcagcacaacaacatgctaaacataatatgaagtctttgtctcagaccaagaagctttcttctcaatcatctgttatggcttcagccaaattgaaagatgagaaagcttagaagtcagaggagtccttgagaaccgttatgt

SEQ ID NO: 20649 - DNA, 419 bp, Glycine max
  modified_base (391)..(391): a, c, g, t, unknown, or other
  modified_base (393)..(393): a, c, g, t, unknown, or other
gaccaagccttccggtacgtgcaaggtgaaatattagggtggaatccatgactggccggggttacaagctgaagggaagtttgacccaaatgaccaagaaatattagaacatttggaggcaaaagtggcgtctgatgcatgcaagcttcatccccttattgacgagttcataccaacgcttgaaggcgaaaatgggatctgttatacacacccagaaaagctaccaggtgcttcatgttttacttaatttattttattttaattattttttgtctaattaattagtatagtttcgtgttttagaatacttattgcatatacacatcattgaattctcatttattgggagacacgtcttgatgtgcacgataccgcatgcatgaaattaatngntttagcaatgaaatgatttttttttc

SEQ ID NO: 20650 - DNA, 408 bp, Glycine max
ctctctttctctttctcactcactctcactctctgtcacggacagacagagaaaaactcaggcgcccacgttcacacttccctcacaccatcccttactgttccttcttcttcttcttcctttgtttttttctcttaatggaatgatggaacacaacatcatcgttaacaacaacaacgtgatcgcaccgtttgtcataaaaacctacaacatggtgaacgatcccaccaccgataaactcatcatgtggggcccagccaacaacagcttcatcgtccttgaccccctcgacttctctcactccctccttcctgctttcttcaagcacaacaacttcttcagcttcgttcgacaacttaacacttatgggttcaaaaaggtggatccggatcggtgggaattcgcaaa

SEQ ID NO: 20651 - DNA, 320 bp, Glycine max
cccacgcgttcggaaacattctaacacgcattacccagctttacattcatttttgttcgtgagttccaatggctggggaggctgcttccttggttcctgcttcttttcctattgctaaagagggaaagtctggtgtatctctcagggacaccacaatgtttggtgtttcattgtctgatactctcaaatctcacttcagctctccctcatcgacttgcaaaagggaattccaactcaaatttggccctttgagggttcagtcagtggcaacaactactccaggagtcaccaaggcttcaccagaaggcaagaaaactttt

SEQ ID NO: 20652 - DNA, 436 bp, Glycine max
cccacgcgtccgtttttttcttccaacgctcctcctccttctcatagccttcgccacctgtgtctccggccgccgtgacctcgtcggagactttctccggctgccctccgaaactgataacgacgacaacttcaagggcacccggtgggccgtcctcctcgccggttccaatggttactggaattacagacatcaggctgatgtttgtcacgcctatcaaatattgaggaaaggtggtctgaaagaagaaaatattattgtttttatgtatgatgacattgcattcaatggggaaaacccaaggcctggagtcatcattaacaaaccagatggaagtgatgtttataaaggagttccaaaggattacaccggcgaagatggtactggtgataacttttttgctgctttacttggaaataagtcaacactgactggt

SEQ ID NO: 20653 - DNA, 404 bp, Glycine max
ctagcttccaaaccctaacactcctcttcctcttcgatcatcacctctccacaatgccgccgaagttcgacccctcccagatagtcgacgtcttcgtccgcgttaccggcggcgaagtcggcgcggcgagttccctggccccgaagatcggtcccctcggtctctcccccaagaagatcggagaagacatcgccaaagaaaccgccaaggactggaagggcctccgcgtcaccgtcaagctcaccgttcagaatcgtcaggcgaaggtcacggtggtcccctccgccgacggcctcgttatcaaggccctcaaggagcccgagcgcgaccgcaagaagaccaagaacatcaagcacaacggcaacatctcgctcgatgacgtcatcgagatcgctagggttatg

SEQ ID NO: 20654 - DNA, 409 bp, Glycine max
cccacgcgtccggtttgtttagtaaaaatcgaaaaatctgaagcaaaagaaacggcagacacagtgagcttagaatcattcaggataaaggttaacccctttttcaagggcccctgccaagaggttgctcaatttggttcggaattattgggggaatattttcctgatcaaaacttaaatctggaaaaagtgcacactgcaaagcttgttgctactaatctatgccttgttgcgttctacttttctgatttagatggatgttacttccctgggttcaaatagcaatacccaaaccgaccaacaccctttgttgatggagcagccagaaacccataacggtcatcagcatgtaattgacattacaaggaatggtgaagctctaactacgtcatctcgaatgatcaatact

SEQ ID NO: 20655 - DNA, 360 bp, Glycine max
cttaacaacagcacaaagcgggttactgtctgttcaagctaccatctctctctctctttctgagtgcctccttgccagaagttaaaatggcccatgaaactttcctattcacatctgaatcagtgaacgaggtgcaccctgacaagctgtgagaccagagctacgatactgtgctctatgcgtgcttggagcacgaccatgacagcaagtgcgactgtgaagacctgaataagaccaacatggtgatggttttcggagagatcacaaccaaggccaacgtggaactatgagaagattgtgcgtgacacatgcaggaacattggttttgtctctgatgatgttggtcttgatgctgacaac

SEQ ID NO: 20656 - DNA, 269 bp, Glycine max
gcaattcaaacttcacggcgtgcatcatcatggctcgtctcgcgatcgctgtcgccgacgtgctcctggtggccatatacgcctgcaccgatacggcgcgtccctgcaggaccttcataatcttcatctactagatccgcatccctaaatccaacaccttctgcactagcaccgtgatacgatcctttacccctatgtacatcaacgactaacccaacggtaaaaccttgtactactacgaacatttatttcaccaaggcacttaactt

SEQ ID NO: 20657 - DNA, 334 bp, Glycine max
caacagcatcggcggcgacagtcactctccgacaacaacacttccgcggcgaaaaatgtctctggtggcgaacgaggatttccagcacattctgcgtgtgctgaacaccaacgtggatgggaagcagaagataatgttcgctatgacctccatcaagggtattggaaggagattcgccaacatcgcttgcaagaaggccgatgttgacatgaacaaaaaggctggtgagttgagtgctgcagagttggatagtgtgatgactgtggtggcgaaccctaggcaattcaagatcccggattggtttttgaacaggaagaaggattacaaggatgga

SEQ ID NO: 20658 - DNA, 439 bp, Glycine max
cccacgcgtccgagagcatggagtgtggcaactagcgttggagttgtggaggccttaaaagaccaaggtatatgtaggtggaatcatgctttaagatcagctcaacaccatctcaaaaaccatgttggttcattctctcaggctaacaagctttcttcttctgctatgagctccacaacactaaaacatgggaagacaaatcagtcagaggagtcattaaggactgtcatgtacttgagctgttggggtcccaattagatgccataaggccaataaaaaaattggatctttctctttcaatttctaaaaatgaaacttaatctcaaaagattattatgggtgagatttctggggtcatactggataggattgaaagattgcttggctgatgtgacaatcaagttggaaattttggtaaatgattatggttaacattggc

SEQ ID NO: 20659 - DNA, 217 bp, Glycine max
ccggacttaattgctggaccgacgcatgcgtaccatcgatctatctgaaagccttcaaatggtatcatcggatatcggatactggataccggaggttctgcttagcgtcagtggttgtattgtgccgctgaatgcggcgctgcatgctaacgcagtcgtgaatacggcctacatggccttctacgccgtttattcaatcgagtaactgtacacggac

SEQ ID NO: 20660 - DNA, 368 bp, Glycine max
cccacgcgtccgcccacgcgtccggtaaaggagtaaacactcattttttatcatccgaagatatgtgtggcatcatattaatcttccatttataaatatatcaaattggcctccaaagatatgtgcagtatcaaacgtcggtaaatgtcacatttttgccatcagattggtccttgaaagaccactgttggcattaatcatttgaagtacgaatttaatgtcacgaataaatggaaggctaatgtcatgttgcgtatatctttgaagggcaaaaaatgagcttttactctattaaggaagtgaactgagtattatcaatattaaatttcttttgtcctggctaaaataagctctcaaatgggttttga

SEQ ID NO: 20661 - DNA, 393 bp, Glycine max
gcagatcttcgttaagacactcaccggcaagaccataaccctagaggttgaaagctccgacgaccatcgataacgtcaaggccaagatccaggacaaggagggtatccccccggaccagcaacgtctcatcttcgccggaaagcagctcgaggacggccgcaccctcgccgactacaacatccagaaggaatcaacccttcacctcgtcctccgtctccgtggtggcatgcagatcttcgttaagaccctcaccggcaagactattaccctagaagtcgaaagctccgacaccatcgacaacgtcaaggctaagattcaggacaaggagggaatccccccagaccagcagaagctgatcttcgccgggaagcaactcgaggacggacgcaccc

SEQ ID NO: 20662 - DNA, 418 bp, Glycine max
cccacgcgtccggagagactgagacagtgatatggcgtatctgagattctcacacgcaggagcacagccacacctcacactagggtttccttcaccacctcaatttctctctattgctgctccaaaattctctccctcgtcttctaccatcaggtgcaaaggttttagtagattgatagtgaatcagaggctggtgactgtttttgcaacaaatcccaactctgtaggtgaaaaatcacccacagaaggatcagatgtaaatgaaactagcaatgctgctcaaggacctcctctccttactattctggctggattctttgtcctttttgttgtttgttggagcatttggtccattataacgtggctgataagtttaatagttaatgtacctgctccaaaataaattttattgtaatgt

SEQ ID NO: 20663 - DNA, 259 bp, Glycine max
ttaaccctatctcaaattcattcagattctcccttcccctttttgatttttcttagaaaactcccaacttcgaatcaatatgaagaaagtggtgctaaaggtggaactccatgatgacaaaatcaagaaaaaggccatgaaagcagtatctggtatttcaggggtagagtcagtctcagtggacatgaaagaccagaaaatgactataattggggatgttgatccttgaacaagaggtggaaaagttacaaaattcagt

SEQ ID NO: 20664 - DNA, 356 bp, Glycine max
actagctgcagtgactgagctcaatttcaacatgattggcttcatgggggctatgatatcaaatttggcatttgtcttccgcaatatattctcaaagaaagggatgaagggaatgtctgttagtggaatgaactactatgcttgtctttccataatgtcactgttaattctgacaccttttgccattgctgttgaaggccccaaggtttgggctgcaagctggcaaacagctgtatctcaaattggtcccaattttgtatggtgggtagctgcacagagtgtcttttaccacttgtacaatcaagtctcatacatgtctcttgatcagatttctcccttaacatttagcatttgaa

SEQ ID NO: 20665 - DNA, 452 bp, Glycine max
cccacgcgtccggataagtactactataatagtataactaaggaaggagtaagggtgatggtggttctgatctgacttttggcggtgtgggagtcacgagagcagcaaggggaagtcacaagagtcacaagaatggagagaggttcgggcaagctgagcaggaagaaaagtggtggtggaaacggacaggttctagacggttctaatattatggagttggttggaaaccagcaagttttcaccaccttcgtggaccataagtttcacgagttagacacagacaaagatggcaaactctctgtcaaagagctccaacctgctgttgctgacataggagctgctcttggtttgcctgctcacggcactaaatctgattctgatcacatctattccgaggtgttgaatgaattcacacatgggaagcaagaaaacgtgagcaagaatgagttcaa

SEQ ID NO: 20666 - DNA, 455 bp, Glycine max
cccacgcgtccggggcagctcgtgtgggagatcgtcaagaaaaacaattccttcttggtcaagcagtttggaaggggcacccagagcgtcgaattcagcagagagagcaacaatctctacaacctcaattcgttcaagtactctggtttggcaaacaagaaaactgttactgttcagcctgagggcaaagatcaggctgtgttgttggctacaaccaagacaaagaagcaaaacaagcccgttgcattgctccacaaatctgtgatgaagaaggagttcaggaagatggcaaaagctgttgaaaaccaggtggccaaaaattactacaggcctgatctcaagaaggctgcccttgcaaggttgagtgctgttcacagaagcctcaaagttgccaagtctggtgtcaagaaaaggaatagacagggcgtgagagtcgctggtagggagtgaaaggg

SEQ ID NO: 20667 - DNA, 356 bp, Glycine max
gaccaagccgtccggaaggataaggatggttgaattttcaggctccaatgggaattcaggaaagttgggtttggattgcagatgtgtttattttaatggcctatatatgccgtgggaatgaagaaaatctgaggtggatattcaggttttccaatccctcggattgctatgctttatatgttttccttacgtttatctgtataatttaaatagaactaggagtattgagcttcttttgtttcatctgtattggattgctatgcatacatttggtaagtgattgtgtctactttgtacttcttcagtttcttggttcttgtaatgatctgaaaaccatggcaattaaattgaagagc

SEQ ID NO: 20668 - DNA, 432 bp, Glycine max
  modified_base (14)..(14): a, c, g, t, unknown, or other
  modified_base (345)..(345): a, c, g, t, unknown, or other
tagaagaaaatgtngacagaaaggataatgcatgaatgcatcaagaagttattgggtcaggatcaggatccggatgaagaagatatttgaagctttgccaacctgatgaactcttttgggggagaatatgcatcttccagaccccgagcatatggatgcatattttgaaatgatgagatcattatcaaacaacatgaatttatcttctaggttgaggttcatgttgaaggatgtcattgatttgagaaagaataaatggcaacaaagaagaaaggttgaaggtccgaagaagattgaggaggtgcacagagatgcttctcaagagaggctggcccaagctagtangctgggtcgtggtccaggcaacaatccacctcgaaagatccctatggattttggtccaagaggatcatcaatggtatctcctaatgc

SEQ ID NO: 20669 - DNA, 295 bp, Glycine max
gtagtacacaacagcgtcagatccggctcagtcattgctgcatacaacgatgagaggatggaagtagtgcgacgtggagtgtcagtcttgatgcgcactgagtgatctgtaggacgtcttttaaagagaggagtgcatacagagctggagtgcctatggtgccagatcaaagtgatgctagagcacaatattacgtcacgaatttagtcggctatgcaactgtatacgcactatgatgagaatgcttctgcaaagcctaggtacacccgtgaaaatagtgatggtgattactaca

SEQ ID NO: 20670 - DNA, 428 bp, Glycine max
aaaaaatagtataagtgaaagaaaaaagtaatctttttaatattctcttcccattaccagtgtgtgtttttttaatggggtgtgtcagagtctgtttcctatgattctgtctctaggtctgtagattagatcagaattgaatccaagtggtgcagaattcagagcagcatttggtgtccaaaagaagaggagtaataggagagaggtgataaaggtgtcaagaatggggatacctggtgttgatggagaattgaagaagattttgaacgctaacatggacgaagctggtgctagaaagccttcacgttaagctttcaaggatattcaacttggaattgatcatatattggttaagaccccatgtgatggaataaaaaatggaagagtcatatgagaagagctcaaaaggcctagaaatcttctgcaaa

SEQ ID NO: 20671 - DNA, 468 bp, Glycine max
  modified_base (228)..(229): a, c, g, t, unknown, or other
gcgctttgatcactgtttttcaaaagttggggttaacaaccaccccttattcctaacattagggtatttggaaacctggtttccaagttttggtgggggcctcctggggctaatataaaacccagaaaaatttttacctaatttcggccaaggggttcctccgttttttccacttcccagtcacaatatgcagacagcgttgaatctgaagcaggagctgatactatnngactataaatcttaaccgatgaagagtggaagaagcggctcacaaatgaacagttctatattactcgtcagaagggaactgaaagagctttcactggggagtactggaatactataaaccccgggatttaccattgcatatggtgccacacacctttattcgaatcatctactaagttcaatagtggaactgggtggccattctattaccagacaattgggaaaaatgtgaaatcaaag

SEQ ID NO: 20672 - DNA, 318 bp, Glycine max
cccacgcgtccgacttgctcacagatatatgtttatctgtctccatcattttctcgagagcggggattttctggggtgcatctttcttcttgttaatctctccccgcctctatgtaacatcccgcttatctgaatccctttctgctcatcatctgtctttcaagctaagatattctcagtagactatgaattcagcataaagcaaacttacaaggctttttcgaaagccatgtgttctcagaaacgagatccatgttttattgccgaatttcgctagtcatattaatataccatcattgattgttcctttgaaaccag

SEQ ID NO: 20673 - DNA, 337 bp, Glycine max
ctttggtcactcttcttctcttgcggctagggttttagcgcagcttcttctagatttaaggaagatgggtaaggaaaaggttcacatcagtattgtggtcattggccatgtcgactctgggaaatccactaccactggtcacctgatttacaagcttggaggcattgacaagcgtgttattgagaggtttgagaaggaagctgctgagatgaacaagaggtctttcaagtatgcctgggtgctggacaaacttaaggctgagcgtgaaagaggaatcaccattgatattgctttgtggaagtttgaaacaacaaagtattattgcacagttattgat

SEQ ID NO: 20674 - DNA, 416 bp, Glycine max
  modified_base (368)..(368): a, c, g, t, unknown, or other
  modified_base (379)..(379): a, c, g, t, unknown, or other
cccacgcgtccgaaaattgataacatcacacagcattagtatgtatcagcaacaagggtcagatccaacaaagcaatcaccggcaaccggttttccggtgagctatagcaattcaacaacgtattcgaccaacgaggcttcctacgctccagtcccacctccccagcccaaacctcttgtcgattggtccaccggcctctgtgactgcttctccgaatgtggaaactgttgcatgacgtgttggtgtccatgtgttacctttggccgagttgcagaaattgttgacaagggatccacatcatgtggtgctagtggggctctgtatacgctgatttgctgtgtcattggctgtggctgcctatactctngcttctaccgncccaagatgagacgacagtatggtctaaagggaaatg

SEQ ID NO: 20675 - DNA, 467 bp, Glycine max
aaaaaaaaaaaagagatgggaatttggaatagcgggggggttcactaggatcctgcactccgggaagccggaccagttcatggatgagatccccacttttgttgctcagcctttgcctgctggaatggatcagggttacatagtccttaacagaccatgggcatttgtgcagtggcttcaacaagcagatattaaagaagattacatattgatgtcagagccagaccatataattgtcaaacctatacccaacttagccagagatgggctaggagctgcgttccctttcttttacattgagcctaagaagtatgaaacagtgctaaggaagtactttcctaaggagaaaggaccaatatccaatattgatccaattgggaattcacctgttattgttgggaaggaattcctcaagaaaattgctcccacttggatgaatgtttctctggcaatgaagaaggatcctg

SEQ ID NO: 20676 - DNA, 427 bp, Glycine max
cccacgcgtccgaacaattatgaagtaggaaatatgattgctgaagcattgagcagagttggtagaaagggtgtcgtgacccttgaggagggaaagagtgctgataacagtctgtatgttgttgaggggatgcaattcgaccgtggttatatttctccatacttcgttactgacagtgagaaaatggctgttgagtatgagaactgtaagttgctgttagttgacaaaaagataaccaatgcacgggatcttatcaacatactggaggatgctattagaagtggacaccctatattgattattgctgaggatattgaacaagaagctttagcaactcttggggtgaacaaacttagaggatcacttgagattgcaacacttaaggcccctgggtttggagaagcgcaagaccagtaccttgatgata

SEQ ID NO: 20677 - DNA, 233 bp, Glycine max
accacgcgtacgaacacgcgtacgaccacgcgttcgagtgcatccaaagccgttgaagaagggtcactgttttgagtttgtccgcgaaggaaagaaactctatatctagctatccttatggatcggtaccagaaggtatacaagccaacagctcaaactgcaatctatgaaaacgagatccggattactgacatgctacgatgcgtaactacattacttacgccatgagcttg

SEQ ID NO: 20678 - DNA, 285 bp, Glycine max
  modified_base (270)..(270): a, c, g, t, unknown, or other
  modified_base (280)..(280): a, c, g, t, unknown, or other
gttgcaggaaaaatggtttcgctgaaactgcaaaaccggttcgcagccagcgtcctcaagtgtggcagaggaaaggtttggcttgaccccaatgaagtcaacgaaatctccatggctaattctcgccaaaacataaggaagctggttaaggatgggtttattatcaggaagcccaccaagattcactctcgctcacgtgcccgccgaatgaaggaagccaagaggaaaggacgtcactctggatatggtaagcgtaagggtacaagggangcaaggcttnccact

SEQ ID NO: 20679 - DNA, 275 bp, Glycine max
gcgacacatacggttagcatagtaacaatcgaaaaatctcacgcacacgcaatggccaacacaggtagctctagaatcatacatgattaaggttaatctccttctgtaacgccccgctcatatgaattgctacatgtggatcataagactatgacctaatgatatccgtgagcaagactcatagctggtaaaagtgcaaagtgaaaagcttgtcagatcctaaaccaagcctcgttgcatcctactgttcagaaatagatagatgctactatcct

SEQ ID NO: 20680 - DNA, 259 bp, Glycine max
gtgactgctctcattctatcttcctcaatggttctaatttaatttgacatgcatacattggagtggacggaaccacaaactcagggtgatctattatctcctagggcaggacacactggtatcactattgatgaaagctggctgatagttcgaggtcgagataatacatgtggttgccctgaaaccctggtattagacatgtctaagcttgattgatcagtattcactgttgtcaagcacaaagattcactttctaatg

SEQ ID NO: 20681 - DNA, 58 bp, Glycine max
gcaataccagttgttattataaggcacagcacattaattcacttaactattacaccta

SEQ ID NO: 20682 - DNA, 373 bp, Glycine max
  modified_base (343)..(343): a, c, g, t, unknown, or other
gcgcccacgcgtccgcttcttctatgggttggcttagtcggttcataactgccgtggctttcttagccatcggagtgatattctcaccggagacactggggtcaaaatcaaccacactttccacctacctcaaactcgctcacctgctctgcttctccaccgccttcggcgccgctctgtgggtaacattcatcggcggcatcatcatgtttaaaaatctgccgcggcatcagtttgggaacctgcaaagcaagatgtttccggcgtatttctcgatggtgggtgtctgctgcgccgtattggtggctgcctttggctaccttcacccgtggaaaactttctncaccactgagagataccaacttgggttttt

SEQ ID NO: 20683 - DNA, 461 bp, Glycine max
caactacgcatacgaagtatgcaaggactgtaacgatgtcctttaaactattcggccgaccgttgagtgaaaataaaataggggaaagtagcatgtcgaaaaagcccgcttgctggaaagcggataattccaaaaaataatgggtgaagtaggttacttatgaatagaatgttaatttcaaatcggagtcaaaggctgggttacatgatcaaatgttttaaccgcaatcgaatatttgtaagagcttgtgagactaaaagaaatcgatatcaagagttacctcttacagccactattacactagatgtaatatgtatgactaaacgagttctaagggtaaatatactagttgtagtagtaactgtgggattgcctaagtcttcaaagagatatggtaacggaggattaataataacagctactaaaataggagtttttagtaatacgtctaaagtaatgtt

SEQ ID NO: 20684 - DNA, 85 bp, Glycine max
gaattcccatatcgacgcacgcgtacgcttgaatgtaacctatacccactactaattcaccgatcaccctctctacacacggcaa

SEQ ID NO: 20685 - DNA, 364 bp, Glycine max
gaaattgacggtgaattttgtgttatttgacagttaaaggaagaaatgggtgtctctgcagattagacattatagtgtgaactccaaactctgtaaccctcaactcaaatccaatcctttggtgggtttcgaattggagttcaaccaaattctaaacacatggactcagctctgtcgcggttgcatctttacaatctccctcctcttttctacgccgctcaccgtcctctcttgcagtctctttgcgacgccgcttctttctaccgctcttatactcctcttccacgcctccgtatattagtcgcttctcgctgctaacaccctcaccgctaatgacgtctcgccaagaagtggactatacact

SEQ ID NO: 20686 - DNA, 337 bp, Glycine max
attttccagcaagccaagctacacttcggctctcgtacggtgcttccttcagtttccgccgccgatggcgactgcggcggcgctcttttctcgcctccgccgctcgcggccgtcctcctccctctccctcctatctacttcacgtgtcctctcctctgctctccctcctccgcttcccgctcctgcatcacctcactctccaaccctcgcctttctcgacgcgttccgctcacgcgctttctcctctcacatttccgacaatcgagaaccggagctgaactcgttcggtgtcgactcaccgcttaactcggagcttctgaaagtgattgctgatact

SEQ ID NO: 20687 - DNA, 367 bp, Glycine max
  modified_base (304)..(304): a, c, g, t, unknown, or other
cgcgtcgcttcgcaccagtttcaccgcacgaatatcttgttgtttggagcgatccgagaaaaactctgtaaacatgttggtttaccaggacctgcttacaggtgatgagcttctctctgactccttccgttacaaggaaattgagaatggaatgctgtgggaagttgaggggaagtgggttgttaaaggagcagttgatgtagacattggtgcaaacccttctgctgagggtggaggagaagatgaaggagttgatgatgcagctgttaaagttgttgacattgttgacacattcagactttangagcaacccgcattcgataagaagcagtttgttaccttcatgaagaggtttatcaagaatttg

SEQ ID NO: 20688 - DNA, 358 bp, Glycine max
catacaccatcaacttcttcttcttcttcttcttcttcttcttgcgttttttattgttcattcaatttctttttcttctctcatcatctcaaccaacaaatcatttaattgcaatcatctatggcgtctttcgacccgaacgtagattcaagtaattccgacacgttgcgagaatccaatcacaagaagcgcagaaaaatcggagaccacgccgccggcgatctcgatttcgccgccgacgtcccttggagatccgacgtggagcagcggatctactcccgccgtctcgtgtaggctctccgtcgcactccgtcatcggcgaccaagcctagagccgccggccaggtccgcgagacct

SEQ ID NO: 20689 - DNA, 236 bp, Glycine max
  modified_base (202)..(202): a, c, g, t, unknown, or other
aaaaaatggcttctagttcagaatctcaatctcagtctaaaccgctccaagaccgagttgcaatcgtcaccggctcgtcccgcggaatcggccgagaaatcgcgcttcacctcgcctcactcggcgcgcgactcgtcgtcaactacaccttcaactcggcccaagccgactcaatcgcggcgcaaatcaacgccggttccgncaccacgacaccgtgcgccgtcgtggtccaagcc

SEQ ID NO: 20690 - DNA, 353 bp, Glycine max
aaaacacgtccgctacgtcagtgtaatactactactcttaacagcgtcatgactaggccgcggaacggatgcggtgcactggacgaatttatggaccaaaggatcgatacggccgctcaatcggctcggtagacatcgtcaggacacgagagtgattgctacagcgcactagtttacagttgacacaagcgcactaagatgagctaccacagcccaggccatctcggtcgaacaaaacggtgacagatcggatgatgcggagacccagttcgaactcgaacgctgcaagtgtgacctatcgatccaaatgcccttcaggatatcaagctagatgtaccggacaagttactaca

SEQ ID NO: 20691 - DNA, 268 bp, Glycine max
acgcaagctctgatagacagtacgatcttactctgcttggtcttacaacggatgccggatcttgctctagattttctctcgatccgtgggagaacgattcgtaaagcaaaaaaatggtaaaagaacatactagcacattctatcgatcgaaccagtcacagaggaaggcgagcgatacctctacatctagtgacgataccgaagaaattcatctcgtggactaatcgccaagtgtgatgagcacctatctagatcatgaagagattta

SEQ ID NO: 20692 - DNA, 406 bp, Glycine max
ctactggactatcaagaggattagcggccaaaggtatctatccagcagtagatcctttagattcaacgtcaactatgctccaacctcgaatcgttggtgaagaacattatgagactgcgcaaagagttaaacaaactttacaacgttacaaagaacttcaagacattatagctatccttggcttggacgaattatccgaagaagatcgcttaaccgtagcaagagcacgaaaaattgagcgtttcttatcacaaccttttttcgtagcagaagtttttaccggttcgccaaggaaatatgttagtctagcagaaacaattagagggtttaaattgattctttctggagaattaaatggtctttctgaacaagccttttatttggcaagtaaaatcgatgaaactac

SEQ ID NO: 20693 - DNA, 171 bp, Glycine max
ttcgtatttagaggccatgtctcccttgtgacaatgtgtgctgctgctcatgtctgatcttgagtactatcttgaggataagtcaatgctttattaatacagtgcgatgcatcaggtgtttttgatgaacaatactatattaccttgtgcgtaatgtgtatgactcttacc

SEQ ID NO: 20694 - DNA, 428 bp, Glycine max
ctcacgcgttcgaataattgtgaggcgagggtaaggtcgcgttgtgttgcgtcgtgtcgtgcgctgttcctctgtttctcgtttttgtgttcagaccgaaccctagctccgcatcgcaaccatgtcgaccaagcaaggtggaaaagctaagcctttgaagaaacccaagtctgataagaaggattacgacgagattgatgtggctaacattcagaagaaaaaggaagaggagaaggcgctataggagttgaaagccaaggcgcaacagaagggaagctttggaagttctaggctcaagaaaagtggaaagaaataagggctctttatcatgattgtatgcattcaatattgagccctgtaattacagttgctaccatgataacttctcttaatattgtgggctactttattgctaatgtgtactgaac

SEQ ID NO: 20695 - DNA, 424 bp, Glycine max
atttaaaaacccggaccgtcgtatcgttccaccggcgccgtcaacctccaatgctcgaaccagcatccttccactcaaccgcgcacttgcactcgtcggctcaagctaccaccgcagcacgcctcagccgccgccagttaacaagcatttgctcataaagaaggaaggaagatggtgtttgggcaagtagtggttggtcctcctggctctggaaaaacaacttactgcaatggcatgtctcagtttctcagtcttattggaaggaaggttgctggtatcaatttggatcccgctaatgattcggtgccctatgaatgtgctgtgaacatcgaggatctcgtgaaactaaatgatgtaatggtggaacattaggttggaccaaatggaagtcttgtgtattggatggattatcttgagaaaaata

SEQ ID NO: 20696 - DNA, 343 bp, Glycine max
ctactgggcacctacaagggacgatcgtgttggcgtctgcaatggaattttccgcactgacaatgttcctaaggatgacattgtcaagcttgttgacaccttccccggccaatctattgatttctttggtgcactcagggctagagtatatgatgatgaggtgaggaagtggatttctgttgttggtgttgacttcattgggaagaagcttgtgaactccaaggaaggacctccaacctttgaccaaccgaagatgactttgagcaagctcttggagtatggtaacatgcttgtccaagaacaagagaatgtgaaaagagtacaactggcaaacaagtacttg

SEQ ID NO: 20697 - DNA, 334 bp, Glycine max
  modified_base (21)..(21): a, c, g, t, unknown, or other
atacgcaaaaggccacacaanaaaaggacattagaaagaaagtccgggagcaaccacaagagggaggagaccctccatgtgggagggcacacacgagaggagcacaaaggagaacaccatggagagcacaaaggagaacacaaaggagaacaccatggagagcacaaaggggaacacaaaggacaacaacaacatggggagcacaaggagggactagcggctaagatcaaggacaagatccatggagatggccatgacaagggtgagaaaaagaagaagaaagacaagaagaagaaggagcagggagatgaccatcatggccatagcaccagca

SEQ ID NO: 20698 - DNA, 359 bp, Glycine max
ggaaggtataggaagcagacgcaagatcatgagcaagagcgaaagcagtagagaatatggaaggagaagagggttctcagcagccacagatggtgctcgcggacaagctattccttctccggcaacccgatgtgcaagacattgacaaggttcgctacaaagaggatgtcttcactcatgtcaaggaaaacgatatggtccctctgtacgaaaccctagacgctgattccgtgtaggacttggatcgtgcccttttggactctatgcgcgctaaaattgacgacgagctcaacaagcttgacgaaaagattgctgatgccgaagaaaacttacgagagagtgaaattcgcgaggctcat

SEQ ID NO: 20699 - DNA, 440 bp, Glycine max
ctttctccgcgtcgtttcgcaaccgacgtgcatcttggatacgggaacagtgtgccaataggagctctcgggcaggcaagggacctgctatcagaagttaccggcggagaaagacagctttggaccttgaccttaaccgtttaccggctggtgagaatcgtgagcaggagggaccttcaactcaggcggtgcctcaagaaattcaacttgaacagcagccacaggttactcaacctccgatgattgacgtggaagccattgatgatgatgttgttgaatgtaccccaagggcttttgctgaggctaaaaacaattcaagaagaattcgtaggaagactgtagttgatattgatctagaagatcagactaggcgcaacaaacgccgaagagaattgccaaatctgattattaattgtgataagtatataaatttggaaggc

SEQ ID NO: 20700 - DNA, 239 bp, Glycine max
acgcccacgcgttcgtccacgcgtccgaaggactttaggttgggatttgggaatataggttattcgcgtggcgaagatgattgaggtggttttgaacgatcgattggggaagaaggtgcgcgtgaagtgcaacgacgatgataccatcggcgacctgaagaagcttgtggcggctcaaactggcacaagagcctgcaggatccgcatccagaagtggttcaccatctacaaggatcaca

SEQ ID NO: 20701 - DNA, 450 bp, Glycine max
acgcaaggtctggtctttcaccaccatcagcagcaacatgcaaatagtaccgacacgtcgaaacgtcggggaattgatggcatgtcaggtagcgccctccagatacagccaacagggcgctacctggagggcccactgcatccggctttttgggcggcgatcagctggcagcagctgctgcacgagccatacaaaaccaagggcggggacggaagaagtctcacgctcagattgatcgaagacgggagcgaaatcgaattctggcacggcgaactcgccttcgcaaaaagttcttcttcgaatcgcttcagaaggaaataatggatttgcagcgtgaaaatctagttctcaaggagctggtcaaggtcaacattagcggggaagaaggaaagaaaatattggaagggtgcaatgccgtcgagaatcttccattgtctgttctggaagctt

SEQ ID NO: 20702 - DNA, 151 bp, Glycine max
tcggcagtattataatagaaagaggactcacagtttaagagatagggagctatagccatgatgaggaaaactttcaaagaggtgaaagcaaaagaattcttcttttccttttttatatatacttgggtgctaaactgtgtgagttcattga

SEQ ID NO: 20703 - DNA, 359 bp, Glycine max
acgctgacgctatcgaatcaactatcatgtcagccgacgagcaccacttcgagcaccatgccgaggccagagcctacaaaagatactctcaaaaagacggtaccataggcaagaacagctacatgaacatctacggccggatctgcagggttgcctacgttgctactgacaaaactgctaagcacagtgacgctcactgtcactctgagggaaacgatattggcactgacaagaaaactgacgatatactggccgatattgacaactgtgatgacacccatgagaatcgtactgagtaccggactaatgaccatgccaatgatagagcttagagtcgacttactggaaatggtaacgct

SEQ ID NO: 20704 - DNA, 443 bp, Glycine max
cacgcgttctttttattatcacttttgcatctatttcagatatttagtatttgggtacgggtttgttctttagttgaaacacctacgtctctacgtggctgctatacccaattttaactttaattatcttccctttgtgtgaaaaggttttgtgttagagttggctttttgaagggcgtgcattgtgaaattatttgtgtatatcaatgatgaagaactatagataaaatggtaacgaagtttaccaaagttacatacagcagcaccactcgttgtcaatgccaatgatgttttccggttttaaccagatagaatgagatgtcagccatgatcaatgcttttacacctgtgggtttgtgagattaattctttgttcatcacaatattggatatactaatagtgcaaatgttggtggtggtggtgttgatgatgtttcatatat

SEQ ID NO: 20705 - DNA, 424 bp, Glycine max
  modified_base (328)..(328): a, c, g, t, unknown, or other
  modified_base (406)..(406): a, c, g, t, unknown, or other
ataatgtgagcaaggatgtgaaatcagaagaaggtgagagaatgtgtcctatacctgatggattgccaaaatctgctgatgaacttagggaagaggagcaagcaagaatgcctgattcaccatacactaagcttcttaggaccatgggcaggcaccctgcatggtactctcctgcccctgaccatgaaacagattgatgaatgatgattcccatacatactaagctcaaagggaatgaatatattctctttgagggaacaagtaataacatagtggagtagctataatacccctatgtgaatggaatgagtgtatattttgggctttntctacaaatgtaactagtaattactttgcataactcctaatgttatatatgtttcaaggagtgataagttaaattggnggacaatatactttcatc

SEQ ID NO: 20706 - DNA, 339 bp, Glycine max
cccacgcgttcggtggctcctggcggcacgtgtggcggtatcggctataaataaaggggtctctcttatgttctaagtttgaagcggcgccaccatagttggtgtagctagcgagggagggatatagggggaagcgtttattcattcattaagatggcatcggagcttcaattgcccccaggcttcagattccatccaacggaccaggagctggtgttgcactatctctgccgtaaatgcgcgtcgcagcctatcgccgttcccatcatcgccgaaatcgacctctacaaatacgacccttggacctacccggtaacattatcttcaacttctgatata

SEQ ID NO: 20707 - DNA, 401 bp, Glycine max
agttcatctccgttaagattctccagttgctgtttccgattctatcactcgtgttgtgcgcgtgcatagtgaatactcgtgcttgaacgagaaattaattgttaatttccaagtatgaccagtgtggttggtgtgagagcgatgccacgatctagttccgccatgcaccaccaccgtcagagctccgataactgcatgttcgacgctcacggaaggcggttacactctgcggcttacgcgcaggagctcgggactcgatcttcgaacttgaggagaaacgacgatgatcgtgttctaaccagtggcttgcttgatctgcattcgtgcgataccgagcttttacctgagggacaaaggtttgatggctacgaatcgattctttttggcaacaaacttgtacc

SEQ ID NO: 20708 - DNA, 462 bp, Glycine max
ccatcgagtagcaacaatgtcgaagcgaggtcgcggaggatcggcagggaacaagttccgcatgtcactgggtctgccggtggttgcgacggtgaactgcgccgacaacaccggcgcgaagaatctatacatcatatcagtgaaggggatcaaggtaaggctgaaccggttgccgtcagcttgcgtgggtgacatggttatggccaccgtcaagaagggaaagcctgatctccgtaaaaaggtgctccccgccgtcatcgtccgtcagcgcaagccgtggcgcctaaaggacggggtttacatgtacttcgaagataatgctggggtcatagtgaatcccaagggtgaaatgaaaggttctgctatcactggtcctattgggaaggagtgtgctgatctgtggcccaggattgcaagtgctgcaaatgctattgtttaagctgggtttttagtttatgtaat

SEQ ID NO: 20709 - DNA, 314 bp, Glycine max
acgcctacgcgtccgcccacacgtacgacttaatcaaatcagggtgtaaatcaacttgcgtggaagagaaaaaagaaacagacgaacgagaagaaagaaaacagaacagacaaaacgagacgagaacaagctatacattatatgaatgaatctgatcactggaaggctgaaaacagacgacaggctgtagagtgcttgccatggatctggagctggcctagaacgaaaacactgatctgcgcaaaaagaagctcatggccgacaaggatcgaagtggaatgcagatgcgcatagaggaggggggagacatgtac

SEQ ID NO: 20710 - DNA, 391 bp, Glycine max
acggtcaaattaattgcggcgctgtcttcctggagctgagatctatggagggtaacttgcaaagatctggcctgcggcgtcgccggagaattttgtgcgtctaggtttctcccgtcaagcgttttaccagcggtacgggactctgtgtttagaagtcgagtctcggaccggttttttgttgctgtgcccggaaggaaagatggaccacgcgtgccacaaacgttcccatgaaaagaagaagctctttctggtgcacaaccgtgttttggctcggccgaagaacgactgcccacgggtctggggtgtatctgatcttcttgacctaaagaacgggaatcaagtcgccgctttcgttgaagcaaagatcgaagagcttgatccaaaggcgaaa

SEQ ID NO: 20711 - DNA, 429 bp, Glycine max
gttctagcaagtgttgcaatggaagcagagtcggataccaagcagcagcagacgatggaaggaagttattcccaaactatgcaaattgatccgaaaagggctcgatttccatgctccgttgtgtggtcaccacttcctgtgatctcgtggttcattccttgcatcggtcacattggcatctgcagagaggatggagtgatattggattttgcagggcctaattttgtgtgtgtggacaattttgcatttggagctgccacccgctatattcaaattcccaaagaaaagtgttgcgttcctttagtccagtctgtgtacaatggtgaggaacactacattcaagatgaaactaaaggagatttgaggacttgggatgatgcactaaagaaaagcactcaagaattccaacatttatcttacaatctcttt

SEQ ID NO: 20712 - DNA, 364 bp, Glycine max
gatgtagtggtgcttaccgtggctccggcatcggtatgtgcctgtgactacctctttttgggctggatcaccatcaaatcccacaaaggtgctttgacgagtgacgagcgtgctcagcagaaccgtgatcggaatcgtaagcactcaaggtctactagacttcgcagaaaggcctacgtgcaaaagttgcgcgaactcgtctagggttctgattccgaacgtacggaagaagtactactaaggatatttgcaatacagcatcttgcggataagcaaaacgttctgaaaaaggttgtgcggaacttattacagtttggttccaactactaatcggactatcgcaagtttagtaccattttataag

SEQ ID NO: 20713 - DNA, 251 bp, Glycine max
cggacgcgtgggctagagaaaaagatatgggtcatgatcatgaatggtctgaaagaaagcatcgtgatgatagaaaaacgggcagagaacgatcccgtgaccgtgaacgatctcgagaccgggatcgtgatcctgaccgttaaaaggatctccgtgagcgttacaggcacagagaagatagggatgggtatgcagatcatcataagttcagagaccgggaagcagagcacgatgatgaatgggagaaggga

SEQ ID NO: 20714 - DNA, 360 bp, Glycine max
acgattacgcgtgcggtgagggtgcacgttggcatcatcaagctataaaagaaaagaaaagataaaaagaaggttggagttagatacacacacatcacaaaaagaaaaaaaaaaaaaagaagctacattgcttcatgttggagacatcaaacatggcaactggtgccaccccagatggattattctggtcagtgtatgaagggtgcatatcctgctacgataactgcgtcgagcgacgaccctaacaccgtaactgtggctgtgcactccataacaagtcacttattaattgcacgcacaaggttccaaagtgtaacaatgtgtcataccctatgaagagggcatggagtgaaggaagct

SEQ ID NO: 20715 - DNA, 461 bp, Glycine max
ttgttttctgtatctaaaaaatcttgtttttttgaacataaagaaataaagaagccattgcaattgccggaaatactaggcctactagaggaacaaaaatggaaggaaagtttatcataaaatgggtacctcgatttactatttgtaccttatatatattatttttatatttatatagattctttttttttttttttatttttttattcttatttatattattatataaagatagtctataatcactagaatttctatatatttatacttagtatataataattctagtgattatagctaagccaatatatatcataatataatatacccttttcttattcaaagaatttatggctatgccttatcatttttagtcaaagaaaagaaattatggaattgaaataactcactcagaacgccctttaaaagattacgcggtacgattgaatcaaataagccct

SEQ ID NO: 20716 - DNA, 328 bp, Glycine max
gttccaagataatacctatggataacatttgcagatcaggcatttgggagttatctgatgatattttaactaagattttagcttctatgggcccaatggacctcactagggtttctgcaacatgtcatcatttaagatccttggctgcttcggtaatgccttataccaagttaaatctgtttgctcatcagaggacagcagttgagtggatgttgcatcgtgagcgaaatgctgagcttttgccacatccgttatttgtagctctgtcaactgaagatggctttagtttccatgtatatactgtaactggtgatattgttactgggga

SEQ ID NO: 20717 - DNA, 415 bp, Glycine max
aattgctttgcatgggacttgatactacatggagaggaataccttgtgcaaacgtcgttggttcattcaacaaaacttcttcctttaatacagcgaagctggttgagtacaatccagtccacattgtatcattatgagagatggagcgccagactggtgctagactgattcttacagctggcgctaatgataccatagtgcctgactacgatgatgaacccactagagatatagcgtatgtgcttgtagtcaatggattatcatatgcagatgttagaatatgatagagctaaagacagtggagacagttcaattacattgccactctttgattcaacaagtctacgatctcttaactcatgtgaagagacaatagctaatacctacagatgactgggctcttttgaagagaacg

SEQ ID NO: 20718 - DNA, 269 bp, Glycine max
actacgcgtccggttggagtgagcgaagaatatgtattctagagattcatggggtggaccgttggagataaacgcgacggactcggcgacggaggacgagcggagccggaacctgcaggacgttgacagggcagcgctgtcgcgtcccttggatgagacgcagcatagctggctccttggcccctgcgagcagaataagaagaagtacgtcgatctcagctgcatcatcgtcagcctcaagatcttcaagtggaccctctgcacaatcc

SEQ ID NO: 20719 - DNA, 460 bp, Glycine max
attgtttaaacctaattctcatttcttcatcgttcgattcttctcctcctaaagatgcagatcttcgtgaaaactttgaccggtaagaccatcacccttgaggtggagtcctccgacaccatcgataacgtgaaagctaagattcaagacaaggaagggatcccacctgaccagcagagacttatctttgcgggtaaacagcttgaggatggtcgaacccttgccgactacaacattcaaaaggaatccactctccacctcgtgcttcgcctcaggggtggcatgcaaatctttgtcaagactttgactggcaagaccatcaccctcgaggtcgaatcctcggacaccattgataatgtcaaggccaagatccaggacaaggagggtatcccttcagatcagcagagggtgatatttgctggtaaacaacttgaggatggaagaacccttgctgattaca

SEQ ID NO: 20720 - DNA, 417 bp, Glycine max
  modified_base (362)..(362): a, c, g, t, unknown, or other
ggaatgcttggtcaggctggcagtggcaagcttcgtgtgtctgttggtcaaagcaaacttgcagcaaaagttgctaaaaaatttaaggaaaagaattatggtagtagtggtgctacctctggtttgacatcaagtcttgcattcacaccagtgcagggtattgagctgacaaatccacaggctcatgcacaccaacttggtagtggaactcaaagcacttatttctctgaaacaggaacattttcaaagatcaagaagacatgaaaccatgcatgaatgcaaattcttgttcaatgcctggattattcttggtgtccaatgcctaaaaattgttgattccgatggatattactttatatgtntattggagatttttgaagaataaccatgtatgttggtgatacgttcccttggata

SEQ ID NO: 20721 - DNA, 354 bp, Glycine max
ctcaccactaagtttattattatcaaaaccaaaagctagcaagctaccttgcaaagcaacacatggcttctacagacaagcatggcgacactgaatacagaacatcatcttcaactccagctcctgcgggtgttgattactttaaatttgatgttatcctaaggtttgtgttatttgcagcatcactggtagctgttgtggtgatcgtcactggtaatcaaacagaggttattcttgtgccacagcctgtgccatggccagccaagttcagatacacaccaacctttgtgtattttgtagctgcattgtccgttactggcctctacagtatcattacaacacttgcaccctctt

SEQ ID NO: 20722 - DNA, 438 bp, Glycine max
  modified_base (372)..(372): a, c, g, t, unknown, or other
gtggaactcttggcctttctacagcaactgtcaaacttttgagtagtgatggtagcacacatgttgcttgttctgttggtacaggaccagtggattcggcatacaaggctgtggatctgattgtgaaggagccagtaacacttcttgagtactcaatgaatgcagtcacggaaggcatcgatgcaattgccactacccgggttgtgattcgtggggagagtgaaacaagtactagtactactcatgctttaactggagaagctgttcttcgaacatttagtgggactggagcgggaatggatgtcgttgtttccagtgtcaaggcctatattgctgcactaaacaagatgttgggtttcaaggaaacatctncatctgctgaaaaaattccagtttcttcattgaagatttgagaatttgtgttgctgctttggtaac

SEQ ID NO: 20723 - DNA, 394 bp, Glycine max
aaaaaaaaaaaaactttcgaaagattttatccaattgaaattttaaaaatgactgggataaacttaagaattcaattattgaaattgaataagtaaacaatttaattggattggtcgaatggtatcaaaaaaatggagtactaactcccatttcttatttattattgaattaaccgatcaacttgctttgttatcgaacatttctttttgatttcaaaaattttccggaaaaaatttgaatctatttttatatgcgaatcaatcctactacttctggtcctgaagtttctgcgcttgaaaaaaaaaatctgggacgtatcgcccaaataattggtccggtactagatgtagcttttcccgcaggtaagatgcctaatatttacaacgctttgat

SEQ ID NO: 20724 - DNA, 231 bp, Glycine max
ttcacgcgtccgactacgcgtaggtttactttaactgtgatgttatgaatgagttatcttgacttttgaaacgagagactgagaatggaacgtggggctcttgataggatcattaatagggtgcttgaagtcataggcagaccactgaaacatgtgcaacattatgaggctgacatcaaacagctctgtcttgtctacaaggatatcttgatgaggcagaccaacctgttg

SEQ ID NO: 20725 - DNA, 450 bp, Glycine max
  modified_base (311)..(311): a, c, g, t, unknown, or other
accacgcgtccgctcattcgctctctctacactaatcaatggacgactctcacaacaggaagcgactaaaccaccaattgacaatgcacccgcgactttgttgataactcctacgacactcacgcacttgactagacccagattaaactctcaggcgtagacccggaccttttcaacatgctcaatgatgcctagaacgtcacggatcgtgaccctaccatgcaaggtcttgactactgaatcaagagttacgaggaagaaatactttcttcggttacgaacccaaatctaagcgccgaagcagaagtgtntaatgcgaacctagggtacttgctggaagcatacgacgactagctatggttgccagcggcggtagcgcccggcgaggatgcgacagatccataaacacttgattcgggccgacttggatctgacggagtgcaactgact

SEQ ID NO: 20726 - DNA, 381 bp, Glycine max
gtggtaatgttgcaaaggactatttaagtagaatggagaaagaagtcgggaagaagattaagttgcggtctcctcaagcaaattcagcatttcagaaactgtttgggcttccacctgaggaatttctaatcaacgatttcacctgtcatttgaaaagaaaaatgcccctgcagggcccgctatttctatcagcaagaataattggatttcatgcaaatttgcttggaaataagacaaaattcttttttctttgggaagatattgaagacattcaggttattcctactacattctcatcaatggggagtccaataattgtcataactcttcggaagggtagaggtgtaaatgcaaggcattgttgcaaaacacaagatgaac

SEQ ID NO: 20727 - DNA, 91 bp, Glycine max
caacacgccctcaagttcagccaaatgttccatttgataccaaccacacagggaaactattatgtgttgaatgacatattccggttgaact

SEQ ID NO: 20728 - DNA, 233 bp, Glycine max
gagatattgccttctaaggactgggaactagagtctattcatagctcgtaagttttggatatgataagggaacacataactactgtaactggcttgagagcaaaatctagtgtaactgagtgttgggcaacaacccaagttagacaattcttacttgcccgggtttacgttgcctccatattatatggttactttttgaagtcagtttcattgaggtaccacctataacggaa

SEQ ID NO: 20729 - DNA, 435 bp, Glycine max
cggacgcgtgggcgaaacaggtggggtcgtacaaagcgaaggaacgtctgtggaagacgcgtgctgtcgattctgtcctgcaggaacattctggatacctccagtcgattcaaaggtcgttgacggctaccaataacagcccgtggaagcgtaacgacttgttcctacccaacgaacgtatctggagtacacctcgtccctctcagatccgaacgcattcgcagtattcggacccctttccccatcaagagcgtcttcggcgccaacccacggaagccgaaattcgaccagacgcggttcttgcaacgctcgattgggaacccttcgaacgagcctggacctcgcctttgccagcccatgtgaccacggctattgctcgggactaatactactggacaccgaatgttcccacgtaccgtgctatggaaaaacgtt

SEQ ID NO: 20730 - DNA, 387 bp, Glycine max
tcgcccacgcgtccgcttctcagtgctttgactaacacgacgtcgtgatgggatttttgaaaaggatagccggatatctagggtttggaaaccacgaacacgattccaaggatgaggcccgcgatggtcaacctcgtaccacacaacctcgtaaaggcttcagtgtccctgcccaggtcgtcgtcgatcgcccccacctcgctcccgttctcactccttctacttccggcgacggtggaattcaaggtctggattggtatgtaaagcgtcttaagatggatgaagatggtgatttagcagatgaattccttgatgaggtttcattatagagcccagaaggacatgcagtagatcatcttaaaaccaggccaaggttaaacccaacaa

SEQ ID NO: 20731 - DNA, 344 bp, Glycine max
tccacgcgtccgggcacttctaatgatcattttgtgcattcgtctagtgctggaccattctttacagtgtctgtcataattggaggaagaaggttggtgtaaatatgacagacaaacatttcatgttgatgctggttttattgatcttacaatgggaagtggacaagggcatcacaagcgtaagagccctggaattccttcagtctacgagggaggcagtactagtagatactttaatgctgggagttcaactgatcttcctatatcttcagaattggggcaagagaagccaaatattgattctcaatatatgccctgggatcattttactatgacacccacat

SEQ ID NO: 20732 - DNA, 391 bp, Glycine max
tccacgcgttcgagagcttgcacctattggtatcttctacaatatcctctcatagtgctctggttcttcttcattttcattatcaagatgtctttgctttcggatctcatcaacctcaatctctcagaatccacagaaaagatcgttgctgagtacatatgggttggtggatctggtatggacctcataagcaaagccaggactcttcctgggccagtgagtgaccctgcaaagcttccaaagtggaactacgatggctctagcacagaccaagctccaagggatgacattgaagtcatgctatacccacaagctattttcaaggacccctttaggagaggcaacaatattcttgtgatttgtgatgtttacacccccgcttgtgagccac

SEQ ID NO: 20733 - DNA, 460 bp, Glycine max
  modified_base (390)..(390): a, c, g, t, unknown, or other
gaaatcccaatcccacacaaatggcatgctcagccacctctgctgctctcttctacggaaaccccacacctctcttctctcccaaatcctccctctccctccctaacaactctctccacctcaaccctctgcccacgcgcccttctctctccctcacgcgcccctcgcacactcgccgctccttcgtcgtcaaagcctcctccagcgagcttccgctagttggaaacaccgcaccggatttcgaagcagaggctgtgtttgaccaggagtttatcaacgtgaaactatctgattacattgggaagaaatatgttgtgctcttcttctacccgttggacttcacttttgtttgtcccacagaaatcactgctttcagtgaccggcatgcanagttcgaggcactaaatactgagatattgggtgtttcagttgacagtgtgttctcgcaccttgcatggat

SEQ ID NO: 20734 - DNA, 461 bp, Glycine max
  modified_base (405)..(405): a, c, g, t, unknown, or other
atttgagtgtggttcttcatttcggacattcatatcttcttcgtcctctgaatcaagtttcgactttatttgagtagttttgctctttccttccaaaatgagccggccaatggaggaagatactgctggtaagaatgaggaagaggagttcaacaccggaccactatctgtactcatgatgagtgttaaaaataatactcaggtactgataaattgtcggaacaacacaaagctgctgggtcgagtaagggcttttgacaggcactgcaacatggctcttgaaaatgtcaggtagatgtggactgaagtgccaaagactggtaaaggaaagaaaaagtcccagccagtcaacaaggattgattcatcagcaaaatgtttctgcgtggagattctgtcatcattgntcttaggaatcccaaatgagattctgtcatcaacttgtataaagaaatggctctgt

SEQ ID NO: 20735 - DNA, 280 bp, Glycine max
cgcatagtcactaaacatttggaaagccttatccaggtatgttaagcaagtcgggtgcgtgatgtgcataggggtgtaaatttctattcacatttatgctgttctacagtgttgtcacatagtggctatcgcggcactatcaaatttctattcacatttattcttctgctggacatggcttaaaaattcggaaacaggatttaatatcccattccaatactggtccagcaatattagggatgggttctgtgcttaaggggggctgggggggcttagagta

SEQ ID NO: 20736 - DNA, 439 bp, Glycine max
  modified_base (397)..(397): a, c, g, t, unknown, or other
cacgcgtccgtccacgcgttcatccacgcgttcgggatccagtttgtttacaggctacggcacaatcgccataaccgaaaccaagaagtcccccttctccgtcaaagtcggcctagcccagatgctccgcggcggcgtcatcatggacgtcgtcgacgccgagcaggcccgcatcgcggaggaggccggtgcctgcgcggtgatggccctggagcgtgtccccgccgacatccgggcccagggcggcgtggcccgcatgagcgatccgcagctcatcaaggatatcaagcgggccgtcaccatccccgtgatggccaaggcccgcatcggccacttcgtcgaagcccagatcctcgaagccatcggcatcgactacgtcgacgagagcgaggttctnaccctcgccgacgacgccaaccacattaacaaacacaacttc

SEQ ID NO: 20737 - DNA, 358 bp, Glycine max
ctccacttttcaatcaaatcaattccaatgtcggctctcttctccttcatcttcccatccagctgaaaagggaggagagagtgtttgcgttgcggcaatggaggaaccgagcaaactgaagcgtgccatgattgattcctgggctggggcaatttctggtggaatatcacggacagttacctcgcccctcgatgttattaaaattcgattccaagttcaactagagcccacatcttcatgggctttattacggaaggatttggctgcagcatcaaaatacactggtatgtttcaagcaaccaaggacattcttagagaagaaggcgtacaggggttttggcggggaaatgtgccggca

SEQ ID NO: 20738 - DNA, 347 bp, Glycine max
  modified_base (12)..(12): a, c, g, t, unknown, or other
acgaagaagcanacggagtagcggcattaaaaattcagatcttcgtgaaaactctgacggggaggactataaccctcgaggtcgagagcagcgacaccatcgacaatgtcaaggccaagattcacgacaaggaaggcattcctccggatcatcagcattagattttcgccggaaagcatctcgaagatggaaggactctggccgattacaacattcaaaaagaatcaacctttcatctcagcctcatgctaagtggtgacatcattgatccttaactcatggctttggctcgcaaatacaaccaacacaagatgatttgccgcaagtgctatccccgtctgcattct

SEQ ID NO: 20739 - DNA, 400 bp, Glycine max
ctgaattatcgtgttttgatcagaatctgattagaaaatcacataatttcaaatcggagcgctcgtgtaaaaaaaggaagagaataaaatggaatcggaggatttggtcaaacaggaattggaggaattgcagaaacaattggggaagaagcaaaagtttgaagcttctgtttcgtctcttaaaacccttcttcaacgcacttacccatcagcttacccggcgcttcgtaaatccttttattcagttctatgccgacttgctactgtgttgaagaccaggtatacagcaccatgtttctggaatgctggactgggcctttttgagcaagctcatttgcttgtttctgatccttatgagaaggaccacttgaatgcttgcattgctcacgccaaggaacat

SEQ ID NO: 20740 - DNA, 431 bp, Glycine max
cagcgatcgaagtttcacatcagccttatccagtttagggtttcggttccttaccctacctttgacgtatcgaaaccttaaatttgggattaggtctgagcaatctggttggtagaacctttggtcttagagagtcaagttttatgtctggattagacgatcaaattcctactgccttcgatccttttgctgatgcaaatgctgatgactcgggtgctgggtcaaaggagtatgtgcatattcgcgttcagcagcgaaatggtaggaaaagcctgacaaccgttcagggattgaaaaaagaattcagctataacaagatacttaaagacgtttagaaagagttctgttgcaatggaacaggtgttcatgacccaagactaagacaggttattcaaactcaaagtgatcagaggaagaatggttctactttc

SEQ ID NO: 20741 - DNA, 398 bp, Glycine max
taattaccgggccgaccgactcgtacgtatggatccaccacgctcactgtcaatccattaataaccaaaagttttatttctataaaggcaacttcccatccttccgtggcatttattctgaatgactagctccaataacgctttcactttgactcaagctgagtacgctgccatatggtatcgcgtctactacaatggcaactgttttttgaccctatcataactcgttatagccttgttggatatttatcccaatcttaatcacaagcctgccatcatgcggtcttacaatgtcatcaacaaaaatgactattgtttcataaataataactaaatccgctatcttctgctcttcatacactactacaattaatttgtggaccaatttttaaatctat

SEQ ID NO: 20742 - DNA, 216 bp, Glycine max
gcgcttcacgcaagagtaaacttttacgctccattccgttctttcacgatgggaaaccaaaaggggctgggcgtctccaactatcgcgaaacccgccgggctttgtacgctgtgagctccagaggacttacatgctatgccgcgactgtctagacctacactttgttctatgaacattgctgatgctcatgatgatacgatttcatccgaagctag

SEQ ID NO: 20743 - DNA, 465 bp, Glycine max
ctctgacgtcactgatggtggctactgcattctcaagtggtggctatggcgccgctggtgggggtggtgtgtaccctgacactaccactgatggtgggtacagcaaaacaagtggtggtgggtatgatgatgaggttgactataagaaggaagagaagcaccacaagcatcttgagcaccttggtgagttaggtgctgcatctgctgctgcttacgccttgcatgagaagcacaaggcagagaaagacccagagcatgctcacaggcacaagatagaagaggaggttgcagcagcagctgcagtgggatctggtgggtttgccttccatgaacatcatgagaaaaaggaagcaaaggagcaagattaggaagctcatggaaagaagcaccaccatctctttggctgaagcataagcaaccaattatgaacatattccttctacttggctatatatatatatgctt

SEQ ID NO: 20744 - DNA, 395 bp, Glycine max
acgctcacgcgtacgctctaatcactctagctgttgcaaatttctactattattcaatggcttctgcagatgttgagttccgttgctttgttggtgggcttgcttgggtcaccggcaacgatgccctcgagaaagccttttcaatctacggcgacatcgttgaatcgaaggttatcaacgaccgtgagactggaaggtccagaggattcggatttgtgaccttcgcctcagagcagtcaattaaagatgcgatcgcaggaatgaacggccaggaccttgacggtcgtaacatcactgtcaacgaagctcagacccgcgccagccgtggtggtggtggaagctgtggtttcggaagtggtggtggatacaaccgcggtagcggtggatatggtggt

SEQ ID NO: 20745 - DNA, 433 bp, Glycine max
tcgttcacgcgtccgattttcaaaagcttttgtgagaaaaatgctgatggccaatcaatgctggcgtctacgctaattccacagccatattccatgaatcatgcattcctcgaggaggatgtcaatatgtcttttggcagcatgctattacacagacttactttgggtgaaaatggtgatcttgagacttgttgcagagctgctagtgttctatctcatatgttgaaggaccatctccaatgcaaggaaagggttttaagaattgaaattgaggcagcacccatgcaatctttaggagctccagagccactaatgcatcgaatggtgaaatatttggctgttgcttcttccatgaaattccatgatggaaagtctagtacatcaggaaactcttatgttcaggccattatcttgaaattactgattacctggc

SEQ ID NO: 20746 - DNA, 250 bp, Glycine max
tctgcaacaacttcttcttgagtgttttctcagttcctcacatcatgtaccgctttgcaacctccctcgcctccaaagctagaattgccaggagcagcactcaacagattggaagtagggtcacttggaacaggaattatgcggtcaaagacattaattttggtgtggaagctcgagctctgatgcttaaaggtgtcgaatagctcgctgatgccgataaagtaacaatgggcctctaggggcgtaatgt

SEQ ID NO: 20747 - DNA, 355 bp, Glycine max
aacacgcgtacgcctacgcgaaggtttaggcagggtctagagagaggaaaacgttggccggagaacacgaccggaaagcgaatatatgctgattccagaaatgtctagcatcaagtcctcacaccaaagataggataccagcgcccacatactattaacgcacaacccaaagttcaggaccaatgctactggacctctgacctcaaaacggtgcacttgcaggtaccaacatcatggacagcaccaatcgccaaggaagaagaatgtgaacaagctagcaaagcaggcaataatggcactagctgctgtagtgcaaacactggcgacagctcatgatgcatcatccgccaagact

SEQ ID NO: 20748 - DNA, 391 bp, Glycine max
cccacgcgtccgtttcgcgctcgctctgttgtgaatagagattcatcacttccactcggcccattctccgctttcttcaaatcgtaaacttttttgggattgaagaccgaatcgaaattttcagggtacaatggcttccaacatctcgcccgctgcctttgataaagaacaggtaggcattcttttctcttcctccaactttggtaaaactgatctggtggttgatgtggttaatttgataccccaatgtggtttcaagtttaaattttcttttttgggtgttatttgattatttagtttttggatgtggttcaataattcatgtggtcatggagcagatatttggaatggctgaaaaggagatggaatataaggttgaattattcaacaa

SEQ ID NO: 20749 - DNA, 359 bp, Glycine max
acggactatcgaaggatgagattgagaagatggtccaagaggcggagaagtacaaggccgatgatgaggagcacaagaagaaggtcgacgcaaagaatgctttggagaactatgcctacaacatgaggaacaccattaaggatgagaagattgcatcaaagctttctgatgacgacaagaagaaaatcgaagatgccatcgagagtgctattcagtggttggatggaaaccagctagcggaagctgacgagttcgaagacaagatgaaggagcttgagagcatttgcaacccaatcattgcctaaatgtaccagggtgcaggtgctcccgacatggctggaggcatggatgaaagatgt

SEQ ID NO: 20750 - DNA, 322 bp, Glycine max
tcgctctgacgtcactgatggtggctacggcatttcaagtggtggctatggcgccgctggtgcgtgttgtgtgtaccctgacactaccactgatggtgggtacagcaaaacaagttgtggtgggtatgatgatgaggttgactataagaaggaagagaagcaccacaagcattttgagcaccttggtgagttatgtgctgcatctgctgctgcttacgccttgcatgagaagcacatggcagataaagacccatagcatgctcacaggcacatgatagaatatgaagttgcagcatcagcttcagtgggaactggtgggttt

SEQ ID NO: 20751 - DNA, 462 bp, Glycine max
acgacttttccttcgattttttagatagttccacaagaccatagaaaacttctagcatccaggggcttgtattgacctgacgcagacgaaaagcgggatcgcaatcggttttgcatttaccgcaaacaggaggagtcctgtggcgttcggatcaatcgcacggcgccaagcttaccgttgtcgtttgggtgctggtggcgcacgaggcccctcgtcgaattgcacattgacgaaacacaatggcgaggcaatttcgaagaacaaatggtttgcacggtccccatacgacgggtcagatcagcgcatggattgccctgttggcaaccttggtgcaatttttgctcgtcgtttctccaatactgtcgttggaagctttcatccctgttacagttgtctttgtgggcctcgtgagtggttccttttactacggataccttgcgcagttcattgattcaatggaca

SEQ ID NO: 20752 - DNA, 460 bp, Glycine max
  modified_base (210)..(210): a, c, g, t, unknown, or other
cgattggagtaccttttacctttctggttgaaaaccggccttcaacctaacctcaaaaaagggattcgggattgcaagctaacatccaatctgaaaatgcacaagttgaaaatgaaagtgctattactgtagaaaattcatattttggacagataatatcaaactcactcattttactttgttatgagaatgaattgagcctacactctntaaattttgtgattgagggtagcagtaagtacatacgaaaggtgaaccttgtacaacgatgctgctggactacaactttcaagaaagatgagaaagagtgtgttttggttcttctgtatcaaagtggagacattgaattaaggtccttgccagctttggaagtgttgggagaaagctctttaatgtcgatcctcagatggaactttgaaaccaacatggtgaagacgatattgtcttcatcaaatggaaa

SEQ ID NO: 20753 - DNA, 213 bp, Glycine max
gcatccccgaaatctttaggaagaaattcttgcaatcgaagatgagaggtgattgattagtttgtgttgtaaattattatgtgagctacagtcaagagttcattaattcattaaacgtatgtacttgtctcatagaaaagttgaaatgaactataaatttttagggttaattaacattttaatccctgcaaaatacatattttttactcctaa

SEQ ID NO: 20754 - DNA, 407 bp, Glycine max
ggaaagttttcaaagccaagcaaatacgagctttacccaattttcttgctgttgaattttgcactgttcaatcttcaaaatcacatttttctcgatcttcaccttctgggttgctttttttttttctcttcttcttcttcttcttcttttgttttcgctatggaatcgaaaaacctgcgaggtttacgctggggaagcagtcgtcgcttgccccagaacgccataacaaagaagcagagctccaaaaagatggggaagctgttgatcagggtgtgaggttgatgtattcggcattcgaaggcgatgtggatggaattcgcgaggcgttggagtctggtgtgagtgtgaattacaaggatattgataatcgcactgctctttatgttgcggcgtgtgagggcttcact

SEQ ID NO: 20755 - DNA, 66 bp, Glycine max
cttcgatcattcttccgtcccttccgtttcaacaccggtcaaccgttaaaattccccttgattttg

SEQ ID NO: 20756 - DNA, 365 bp, Glycine max
cccacgcgtccgaaagaattggaggggagataattggggttgtaccagccgcgccgccaggtgtggttgtggatgaggacgatatgaaagttgattatgagcatgagaaggagaatccgagggagagggatagggagaggagttttgtgaaggagagtagggaggagaaggaggagaggatgcatcgcgagaaaattcgtgaggagaggaggaaggagaggtagagggagaggatgttgtaggccaaggatgctgctatggggaagaggagtaagattacgcgggatagggatcgtgatattagtgaaaaggttgctctagatatggcctgtactaaaccagagactgaggttatgtatgatgag

SEQ ID NO: 20757 - DNA, 448 bp, Glycine max
cctagccactctcccggcgtcacgatgcagatcttcgtgaaaaccctaacgggtggaacgatcacgttggaggtggagtcttcggacaccatcgacaacgtgaaggccaagatccaggacaaggaaggcatccctccggaccagcagcgcctcatcttcgccgggaagcagctggaggacggccgcaccctcgccgactacaacatccagaaggagtccacgcttcacctcgtcctccgcctccgtggcggcgccaagaagcgcaagaagaagacctacaccaagcccaagaagatcaagcacaagcacaagaaggtcaagctcggcattcttcagttctacaaggtcgacgattctggaaaagtccagaggctccgcaaggagtgccccaacgccgagtgcggcgccggcaccttcatggccaaccacttcgaccgccactactgcg

SEQ ID NO: 20758 - DNA, 411 bp, Glycine max
  modified_base (400)..(400): a, c, g, t, unknown, or other
ctgtcactcaccgaccctccaccgcaacccatatataaataccacttttgaacccaaccaaacacgcgcgatcgcaatggccatggctcttcgcagactcaacaaacctttctccaacgccacttccatttatcgccagtcctcttcgctctccgctcacgaaaaacacaaatctcgcgccgattggataaagcagctcaacgatcctctcgaggccatcgatcccgagatcgccgacataatcgaactcgaaaaggcgcgtcaatggaaggggttcgaacttataccttcggaaaatttcacgtcgctgtcggtgatgcaagcagttggatcggtgatgacgaataaatacagtgaaggatatcctggtgctagatactatggaggaaacgaatacatngacatggctga

SEQ ID NO: 20759 - DNA, 436 bp, Glycine max
cttcctaccaaaaggcaccttctaacttgcttaagatctttttgcaaggaggccaaaaaaatatctggcaggttgcgaaaaaagggttgaccccctctcagattggtgtcattctcagagattctcacggtattgctcaggtcaatagcgtcactggcagcaaaatccttcgcatcctcaaagctcacggacttgcgcctgaaattccagaggacctgtaccatttgattaagaaggcagtttcaattaggaagcatcttgagaggaacaggaaggacaaggactccaagttcaggttgattcttgttgagagcagaatccaccgacttgctcgctattacaagaagactaagaagctcccaccagtctggaagtacgaatcaacaactgctagcactctggttgcttagagaatgtatcaactttcatgggtttt

SEQ ID NO: 20760 - DNA, 436 bp, Glycine max
  modified_base (57)..(57): a, c, g, t, unknown, or other
  modified_base (60)..(60): a, c, g, t, unknown, or other
  modified_base (72)..(72): a, c, g, t, unknown, or other
ctggaagaacctcttcacgaaagtgcgaaacttgatcagtgttggacgcgccttctnctncgcctccgccgncgccaacgccatgggtgacgttcagatccacaagaccaaactctgcatcatcggaagcggtccctccgcccacacagccgccgtctacgccgctcgagccgagctgaagccgatcctcttcgagggctggatggccaacgacatcgcccccggcggccagctcaccaccaccaccgacgtcgagaacttccccgggttccccgacggcatcctcggcggcgagctcatggaacgctgccggagccagtcgctccgcttcggcaccgagatccacaccgagaccgtctccaaggtcgatttctcgaaccgtcctttcagggttttcaccgattcccgaaccgtcgaggccgaatccgtcatcgtc

SEQ ID NO: 20761 - DNA, 449 bp, Glycine max
  modified_base (435)..(435): a, c, g, t, unknown, or other
cccacgcgtccgtctagctatctcgcatgctccctctcacttccacttccaggcataggctgttggaagtgctgtcctctaggaaagttgaagtcggagaccgtcttagccattcagctggcatttctactgctacaaataactatgctgccaaaggatatgcttccgatcgaatatttgctccttatactgtttacaagggcaaagctgcattctcgttgatcccttgtcttccaactttcactaagttgaattctgggactgttgtagttgatcgacgtggttcaatcatgatgactttcatgcattctattggagagcgcaaatatgactgggagaaaagacaaagatttgctctctcagcaactgaagttggttctttgataacaatgggcgctcaagattcctgtgatttctttcatgacccttcaatgntatcaagtaatgct

SEQ ID NO: 20762 - DNA, 278 bp, Glycine max
gttaaggttccagggatcaaaagattggcttgaaccaaaataagcacggctcttttcaacgttagggaaggtgatgatcttagatacggactcatagggttcggtttctaaggtaaaatgatacctaagttttgggggtggaggctatgtaaatagtggctcaatgcggttgcggatgaggtcagatgaaaatgtacttcttggaaaatacgtggcttgtgtatattatatgaaactagaatatcaagatgtattgattattaccatcaacgattata

SEQ ID NO: 20763 - DNA, 370 bp, Glycine max
ctcacgcgtacacaaaaaatgagattgtggcaaaacaggaagcttctgcttatatgtgaagaaaagctgcagatctgcacaaatgaggatgccaaagccggtgcatatatacgaacgagaaagctgaattgctatctgaagagcatgagccaggaaactatagttacaaagcatacacatttggtaggagagagcataaagattaaccgatcaagtgacactgaagaacttgaacaggtaccagaatgacacactgagaagaaattaaacatcaacgattatggtaatttcatacaggaggaataacaagagatggaaaacgaaactgaaacgcacttgacttaaactgcaacagaaagtgtaccataag

SEQ ID NO: 20764 - DNA, 265 bp, Glycine max
gaaaactaaggaaggaaggaagagtgagcgtgaaagatgccttgggcgaggctttcagggtctccaaggctcgacgttgctattgacatgggcaatccatttctcaatctcactgttgatggtttccttaagatcggagctgtcgcagccacgcgatcagctgctgaagatacttatcatattatccaaaaggggaatatctcaagtcatgatttcgagaaaacgttgaaaaagatgtgcaaagaaggtgtatattggggaacta

SEQ ID NO: 20765 - DNA, 260 bp, Glycine max
ttgcgttttaaccttaagttccggtcttttcgttcttttaaccaatttcaaggtttggaaaaagggcaatttccaacccaggttggaggaacccggggtcaacaaaggtcgatcaggtttcgtccagggatagcgggcacacttaactgtgaagtggtcgtgctagatggtgatcagaaaggcgtctgaggcctaatccgcaatgcaatgtgatgttggtgtatagctggatgtcatatcctgcagaatgacatggttat

SEQ ID NO: 20766 - DNA, 278 bp, Glycine max
cttcaaccagcatctgcgcttacttcttataccgtctacatttccatttccgtctgcaacatacatacatagctaggttcagagaacgacattgatcaacgctccctactctttgtttacagggtccaacctagatcctgtatctacgccttgcctttccaacgatcctgttatgcctcgatttccaaccaaaagcatgacgagatcgtgagggaaattctgcaataaaaccggcaaatgttcacatacgctcttacattctttcccattttgtgcat

SEQ ID NO: 20767 - DNA, 380 bp, Glycine max
cacgcgtccggcaaccagatggtcttttgcataggaatgcaattggtgaagctgaagaaaatcccaaatcgactgctattgacacttcccaagcagatagggtggcaatggaagaagatgatattaatgaaataggagaagaagagaaagaaaaattaaatgacgtagattacttgacagggaatccacttcctaatgacattctcttatatgctgttcctgtttgtggtccttatagtgcagttcagtcttacaaatatcgggtgaagataattcctggaccggcgaagaaagggaaagctgcaaaaactgctatgaacctattcagccacatgtcagaagcaacaactccggagaaggagttgatgaaagcctgtaca

SEQ ID NO: 20768 - DNA, 356 bp, Glycine max
cccacgcgtccgaaagttagggttggtaccttggtttttggctggcaaatctgaatcgagtaataatcaatcatcataatgtcgccggcaaaaaaaccactgaaagttcggcggcagcttcgaggggacagcgtgcctgatctaacataacacatatcgagacgactgcccacgggatccttgcaacggacagcaatctggcaaggacgatctgaagagcactgaggcgcaatccaaacaaacctcgagacactaaagctggacgccatttgtaggtcgaccagccacctttgactatctggtgcactatgaaataaagctgtggactactgcaactgaccgcatgacaaggagac

SEQ ID NO: 20769 - DNA, 409 bp, Glycine max
cgtttatttcaccggattgaacctgggcctttaaaagggtaccccttatattaatcatccttatatggtctataaaggggtaaagatatcccatggggatctatttggttagttttctatcgggatgtatataggtgaataatccaacatgcctttttgtgaagtaaaaaaactaccctcgatccatgcctcaaaagggttgataataagtaaaaaaaatcaatgaattcatgataaaacccttctgcgtttttttattataaatttttttgtcaataaagggatcaaggggttgggggatcaaatggtaaagttcttttgttggtaaattggaggattagaaacatgactattgctttccaattagctcgttctgcattaattgctatttcatttattttattgatta

SEQ ID NO: 20770 - DNA, 406 bp, Glycine max
ttcccttggtcaggatgacattaaaccgggttattttaacgtattgtgcccctgggtggcttgttgttgtggaacctttcttcatggtctggggaacattggggggtttctcaacaacttggcttccatggaagcatggtttgggtgctatctacaccccctgttgaagagcaaaagaggttgtctctgttgatggcttcggccttgtttcagggcgcttccattggacctctgattgatttggctattgccattgatcctagccttattgttagtgcatttgtggcaacttctttggcttttgcttgcttctctgcggcagctttagttgcaaggcgtagggagtacctctaccttggtggttggctttcttctgggctgtccattcttatgtggttgcactttg

SEQ ID NO: 20771 - DNA, 452 bp, Glycine max
  modified_base (321)..(321): a, c, g, t, unknown, or other
tcggccaagccttcggttgctaccaacactgaacttaacccaaccttggcaaagttgattcgggaaaggtgattgaaattggccggttcggttagaactgaaggaaagggtcctgtgagaagaaagaagaagcttgtccacaggacaccaaccacagatgacaaaaggcttcagagcaccctgaagagaataggggtgaatgccatccctgctattgaagaggtcaatatctttaaggatgacgtagttatccagtttctaaatcccaaagttcaagcatccattgctgctaatacttgggttgtcagtggttcaccgcanacaaagaagttgcaggatatactccctagcattatccaccaattaggaccagataacttggaaaacctgaagaagctagccgagcaattccagaagcaggctcctgaaggggccgctggttcaaccacagc

SEQ ID NO: 20772 - DNA, 301 bp, Glycine max
gacccacgcgtacgcatacacttttttaaatatataatttttatttttgcaacacattctctattccgcgcctcgttttaatttctacacctctaaactcaacctacaatacacaatataagcacctcttaataatttatttaaaactaatcaaatactaatttaactcattcccaaatcccttcccaacatacattacaataacacccttcaaacttgtaaaacactatcttctaaaaacaatcaaaacagatctcccacatcacactctcactccatctattattaaccaccactttta

SEQ ID NO: 20773 - DNA, 406 bp, Glycine max
gccgccgttgcggaaaaaccgccggagaagaaaaggagcagcctaagaatgacacggagagaaagctcgaggaggtagcccccaagaaagacgacggacccatccctgtcgtttacaaactcgacttgcattgcgagggatgcgtcaagaagatcaaacgcacctgtcgccacttcgaaggtgtggaaaccgttaaggcggatctatcgtcgaacaaggtgactgttaccggtaaaatggacgccgagaagctgcgagataagattgccgagagaacaaagaagaaggttgatatcatatcagctccgccgaaaaaagaagccgccgttgcggaaaaaccgccggagaaaaaggcaaaagacaagaaacctgaggagaaaaaaccagaagaaaaacctaaaaagag

SEQ ID NO: 20774 - DNA, 429 bp, Glycine max
  modified_base (415)..(415): a, c, g, t, unknown, or other
gttgaatcgcgattgttctgtgcgagagaaagaagagagagatcgaaaatggcgttggctgtcgacgagttcggaaggccgttcataatcctgaaggagcaggagcagaagagcagactccgaggattggacgctcagaaagccaacatctccgccggcaaagccgtggctcgcatcctccgaacctccctcggccccaaaggcatggacaagatgctccagagccccgacggcgacgtcaccatcacgaacgatggagccacgatccttgaccagatggacgtggacaaccaaatcgcgaagctgatggtggagctctcgcggagccaggactacgaaatcggcgacggaaccaccggcgtcgtcgtcatggccggcgcgcttctcgagaaggccgagcgccttctcgagcggngaattcaccccatc

SEQ ID NO: 20775 - DNA, 442 bp, Glycine max
ccacgccttccggcaggtcttggtgattacttgggaggtaaaggccattcctgggttggggggaccagggttcctgagggtcaaccccttctccaagctggtgtccatactgttgttggcactcctgggcgagtgtttgacatgctgcggaagcagtctcttcgcccagattgcataaagatgtttgttttggatgaggctgatgaaatgctttcacgtggtttcaaggatcagatctatgacatcttccagctgctgccatccaaaattcaggttggagtgttctctgctacaatgccgccagaagcccttgaaattacaaggaagttcatgaataagccagtgagaatcctggtaaagcgtgatgaactgaccctggagggtataaagcagttttatgtcaatgttgacaaagaagagtggaagctggagacattatgtg

SEQ ID NO: 20776 - DNA, 456 bp, Glycine max
ctctttgcacctcagcacagtttcccatcgaaaactagcccatctttttccctcgtaccttttgcttcagcaacaacaacatcgtcgtcacaaatctagagatagatagatagatagagagaaacggttgaattgaagatgaaaatcactgtcatgactgctgatgaacaaatcatcacgttagatgtggatccccacgaatctgtggaaaacgtcaaagcattgctcgaggttgagacaagtgtgcctcttcaacaacagcagcttctgtttaatgggaaggaagtgaggaattctgagaagttgagtgctcttggtgttaaggatgatgatttgctaatgatggtgtctggtgctggcgctactgcttctagtggatctacgaatgatttgagcttaaatgctgatggatctgctgtcaaccctggttctttccagcagcacattagacatgat

SEQ ID NO: 20777 - DNA, 456 bp, Glycine max
gcaagtcgaaaagatcatctctccctctctctcacacatcccagccatgagcctgtgcggtataggcagaaaccagagaacattccgcccgaaaaaaagtactccttctggaagtaagggagctcaacttagaaaacatattgatgccacgttgggtagtggaaatctgagggaagcagtaaagctacctcctggggaggatttaaatgagtggctagctgtcaacactgttgatttcttcaaccaggtgaatctgctttatggtacccttacagagttctgtactcctgagaattgtcggacgatgtctgcaggacccaagtatgaatatagatgggcagatggtgtacaaattaagaaacctattgaggtttctgctccaaaatatgtagaatacctaatggactggattgaagcacagcttgatgatgaatccatattcccacagaagcttgg

SEQ ID NO: 20778 - DNA, 385 bp, Glycine max
  modified_base (347)..(348): a, c, g, t, unknown, or other
aaaagcttgcagagatactgaaaaatagactcaaccaatatgttcaaggaaacaaagagggttttgttaatgatgcagaagctgaagtagcccggctatctaatgcagcttatggggttgatatgttgaataccattggctacatatacgcaaggcaggcagcaaaagagctagggaagaaagcaatttatttgggtgtgccttttattgctgagtggtttagaaacaaagggcactctattaaatctcaagttacagcagcaacaggggcaattgctttaatccaattgcaggaggatatgaaaaagcaactcagttcagaaggcgactatactgaagaagagctnngagatacatgcaaatcacaagaaataaatgatgacta

SEQ ID NO: 20779 - DNA, 426 bp, Glycine max
gcctggtgccgttggtgttgttttcggaacgaaaaaaaaaatggtgtcaggttctgaaatctgcgcaaagcgggtggtggtggacccccgccaccacatgctgggtcgtctagcctccatcgtggcgaaggagcttctgaacggccagaaagtggtggtcgttcgctgtgaagagatttgcatctcgggcgggctggtgaggcagaagatgaaatacttgaggttccttcgcaaacgcatgaacaccaaaccctcccatggccccatccacttccgtgccccctccaagatcttctggcgcaccgttcgtggaatgataccacacaagacaaagcgtggggaagctgctcttgctcgtttgaaggtttatgaaggaatccctcctccatatgacaagaccaagagaatggttgttcctgatgcact

SEQ ID NO: 20780 - DNA, 444 bp, Glycine max
  modified_base (423)..(423): a, c, g, t, unknown, or other
gtttcgaaccgcatggtccactctgcttaactccgctcccacttcttctccttccttctctcggatcatcactcctcgtttcgctttcgctccaatcactcgcatctctctccgaaacggcgtccgtagcaaggcgatcgaagcagtgaagttggagaatggaaggccgagcgcgagcgagttcgtagtcagcggaagcggaaacgcaattccgagttacgtcgtggcgccaaacgcgcgtgttcaggatttggttaaccgaaacgacactcgcctccggatattctccggcactgccaatccggctcttgctcaggaaattgcatgctacctgggcctggagctaggaaaaattaagataaagcgttttgctgatggtgagatatatgtccagctgcaagagagtgtcagggggtgtgatgntgttcttgtgcagcccacatg

SEQ ID NO: 20781 - DNA, 457 bp, Glycine max
  modified_base (111)..(111): a, c, g, t, unknown, or other
cccacgcgtccggttgaatgccctctttgtatgtagtatcttaaccaccttattaataactcatatgtatatatatcctcttaacatacatcctccaaatacacacaacanaatcataaacaacactgcaggcacctttagatttttattttcttcactgttcacacacgatttcctcctttcctttcacattatcctttacctttttttaaacaagccagcccagcttgcttctgttccttctcttctaaccagtatcacctacacggtgtgtgtgtcccttcatcctggaaattagagccacaaacataacacattccgctttgactttggaagcaggtttttgtgctttgtctggttcccaatcaccgtgatatcatggaatccccacaatctgttgtgtcaccattcaagaggtctgtcttgggtgatgcagagaagtataggtctgatgttc

SEQ ID NO: 20782 - DNA, 462 bp, Glycine max
cttcgggcatgcagatctttgttaagacccttacccgccagactattaccctagaagtcgagagctgcgacgccattgacaaccgtaaggcttaaaatcaagaccagggaggtattcccccaaaacaacaaaagcttatctttcgccgccagcaacttcaaggccggcctacccttgcttcctccaccatcaaaaaggggtaactctcaacttggtgtgcgtcttcgtggtggtatgcagatcttcgtcaagacccctacggtaagactattaccctcgaggtggagagctccgacaccattgacaatgtgaaagcgaagatccaggacaaggaaggaatcccaccggaccagcagaggcttatttttgctggcaaacaactagaagatggaaagaccctcgctgactacaacatccaaaaagagtcaactcttcacttgggtgtgcgtcttcgtggggggt

SEQ ID NO: 20783 - DNA, 190 bp, Glycine max
cttcggtaaaaaaattaaaaccggggcggcttattctgaccgatttgaatgttggcctttgttcccccccttattgttggaggtattcgaacctgaaccggggttgcaaatttaaaaggccttttttaaacattggaaggtagggtcctcttttttgcccgttgccacgggccgaaaccacaactttttg

SEQ ID NO: 20784 - DNA, 447 bp, Glycine max
  modified_base (411)..(411): a, c, g, t, unknown, or other
  modified_base (415)..(415): a, c, g, t, unknown, or other
acggcgtcggccaacgcgtccgccaacccgtccggcaatttttttaactccacaaagttatttctgaattatgctgaaaatgaaatggtcaggattaaagcagatgagagaaaagccttgtaccttgtaaaagaagttacagagtactttcatgggaatgcaacaaaggaagaagcccaccctctcagaattttcatgattgtaagagactttctgaatatcttggatctagtgtgcaaagaagtggaaaagatgcactgatagaatcgttggtggttctggcagatccttccgaatacctccaaatgcatcattacctgttctcaacagatacaatcatccaaagcaggatagaagctcagatgaggagagctcatccccctagtgttgtgaatatgaaagataccatangctntcagactaacagtgaaagtaaatgaatgaatg

SEQ ID NO: 20785 - DNA, 204 bp, Glycine max
ggaaactgtttaaagtaaacaccttatcgcatatgctttaatacctgaaataaaggggaggctttctatccttgggagtttgtcaactttaactgaaaataaactaattcacacccttccagaaccaaataatgtctttactaaacacaccaaaatttttttccaaaggaatcctttaaaattttaccatccatattttctttc

SEQ ID NO: 20786 - DNA, 430 bp, Glycine max
attaccaacatcggttatttatataatcgatgttggtaattttacgttaacatcgggttggtaaaaaccgatgctaacaataatactatcaacgtcggtacttttaacatcggttcaaaaaccgatgttaaaagtcataaataatcgatgtagaaaacatattttctaatattcttgatttgattctactggttcccatggtcaccccaatcatcgatccaagtcaagactcaagcaaccctcttcaccttcatcattcagatgggtctggcctcgttctcacatctcaaccccttgatcataagaattacataacctagagcagagcaatgaaggtagtgctctttgtcaaggacaaaatagcattcattgatgacacccttctgaagcctgacgaagacgctcctacctatgctgcttggacgggtgc

SEQ ID NO: 20787 - DNA, 418 bp, Glycine max
  modified_base (371)..(371): a, c, g, t, unknown, or other
cccaaccttgagtggtatccaaaggttttgaattgactcctatagaatgtctccaatttgtgcgttacacggtgcaaataaagtgtgtaaaggtgtttcgtattgttttcacttgcttgggaagggaaaagaatatttgtggaggattgattgtgtcctctttgtgaaaaacctttctgtgttgtaaaaaattacacatgtaagtctagcttttttgtattaacagaaaaaggtctggtttttgttgttgtggtagggcatgatggttgtccacatataaaacatttggtttatttagtgacactgtaactgcccctttcattgagatagggatgtaggtgtaaactgttatgttcatgcgtggatgattntataacaggcaaggcatgcatcttgaagaaagcatgattatttgtcc

SEQ ID NO: 20788 - DNA, 400 bp, Glycine max
gagactgatgggcaatccaaaccagaacttgttcaaagggcaagagagaagctgaagaactccggtttcactcaaaaaccgggactctattgcagtgatcatcatgttgatgctccttttgtgtgttgatctgttctcatctgatgcagagaaagagagaataatatgtgttgtttatagtctgcttgtgtattgctgtatagttggagactcaaaatgaagttaatgttttcatccagttatcatatgctgctctattatcaggaattatattccttcaacattttagcccttgttgtgtctttgctgctacatgaccattgtgctgggagaccaaactatcagagcaagttccatgcaccaaaccacagattttggctttggaagtctgaatatattg

SEQ ID NO: 20789 - DNA, 325 bp, Glycine max
agccttccggttaattccaatttgaccttaatatgttcggatggattttttttaacgggcccccccaccgggcttaattcctaacccaatcaattcaaaatttggttgaaattagtcgggccccccgcatttcaatcccggtacctttgccattattggcccaactatgctagttaaatggtgtggaagtaataataatggtcatcttttgtcgatgggaataaaatcttcaagtactcaactgacttggcctttttgctctatcattcaagtcaattattgtgcagtagcctgctgcagctacaaattgcatgcttagatactg

SEQ ID NO: 20790 - DNA, 232 bp, Glycine max
tccggttgatgctttcttgaaaccctatttcttggaggcttatcgtcctttcaaaaaaagaaatctattttttgtcccgggaggggttaaaaatgtaaaattcaaaggcatttaaacccatcctggggaggattgggttggtgctccaaacacttaaattttctgtgaaggggagcctttggaaaaaaaagatgaaaaaagactggaccaaatttggtattattatttgggt

SEQ ID NO: 20791 - DNA, 462 bp, Glycine max
tcggccacgcgttcggttggctggaagctttattaagtcgcaagcattttttaatcaatggtgggccttgattggttaccttaacatgggggttattaccatcaatggtattggctgaaaagaaatctggtgagaaagaaggagaagataaaggggttattggggccatcaaatccttatttgatcctaatgagaaaacaaagtctggaaaggtgttgccaaaagcttacttaaagtcagcaagagaagtagtgaaaacaatgcgtgaatctttaaacgaagtcactgatgataatgctaaatttagacggactgcagactcagcaaaggagtcaattcgggagtatttgggcagttggaggggaaatcagactgttgctcaagaagaatcatatgttattttggaaaaagtaatcagatctttggcaaacttttactcaaaggcagggccatcagctccac

SEQ ID NO: 20792 - DNA, 429 bp, Glycine max
tcggttcaattttaaatccaaacaaattccaaggcgggtttttttttcttttattttccattccggctgagaaggaagaaaaaagtgtttcctttccgccattgaaggaaccgaccaacctgaaccgggccttgattgattcttggcctgggccaatttttggtggaatttaacggccagttacctcccccttcgatgttataaaaattcaattcagggttagcttagagcccacatcttcatgggcttattacggaacgatttggctgcagcatcaaatacactggttgtttcaagcaccaaagacattctagagaagaagcgtcaggggtttggcggcaaatggccgcatgctatgttatccatatcagcttacatttaagtttacacagtgagaacttgccttgttttcaatcaagatacattatt

SEQ ID NO: 20793 - DNA, 434 bp, Glycine max
gtggtgaggttgagaagattcctgggttcgatttcgcagactggttgaagaacacggtttcggagaatgatttcgttgtgatgaatatggatgtggagggtactgagtttgatttgattccaagattgtttgaaactggggctatctgtttggtggatgagatttttcttgagtgccattacaataggtggcagaggtgttgccctggacagaggagccccaagtatgagaaaacttatgatcagtgcttgcagctcttcacttctctcagacaaagtggagttcttgttcatcaatggttttaattaactttgtagaattgcctgatggatgatgggtcaaaccctatatgcatgttcttagcttctgcatgtttcttctttttagttttcttatttttttcccaagccaatatagaagagagagagtgagag

SEQ ID NO: 20794 - DNA, 262 bp, Glycine max
acgacccacgcgtactaataaattcatatcattttacacactttcctttctttttaaaagttctataccacgacgcgcttaattatccaaggtacatctccctacctttttaacttgtctcttcacacattttgttaattctttacaactaccattttcactcacgtataactgttctactgtctccaataaaaatttaaattcatctctctctcacaataataaattcacaacaatctcatcttacaacaaacatttcttc

SEQ ID NO: 20795 - DNA, 457 bp, Glycine max
cccacccgtccgtaataatcaaaccaggaggggggggatggtcctacatcctctagtagggggtgcggtggaggagatatacaacatggctatatctacatcagaaagaatggcatcagtctcgaaaaggattacccttaccgtggtgacgagggtaaatgtgactcaaataagaaaaatgctattgttactattgatggccacggatgggttcctacccaacttgaggaagccttgaaacagggcattgcaaatcagccagtggccgtacctattccagcagacgactatgaatttcaatattatacatcaggtgtattcaaagggaaatgcggtacagaattaaatcatgctctcctgcttgtggggtatggtacagaaaaagatggagattattggatagcaaagaattcatatagtgataaatggggagagaatggctatatcagaatacaaa

SEQ ID NO: 20796 - DNA, 443 bp, Glycine max
attgtcatctcttcttccaccaaactttcggagttttctttggttaattagtaaaaaatggcttaattaatttgtccttccagaggatcgaatgagatagaaagggtactggaggggcaattaattaattaatctctagtgagtatatatataaatatggagagcctggaagaaagagtgtttatgttgatgaatgaacaatattattattccaattccaatgtatcagatcagctgcatatgcatcatcatcgctctgtgtctgtggagaatctaaacctatggtgggaaaacaacaccgactccgatgactcagccgagcgaattttgtattgggaatctcagatctcactgcttcagctgcttgaaggctaactcttcggattgcatcacctgtttgagaagacgagtggttgacgggctctgcgaaagaggattcagta

SEQ ID NO: 20797 - DNA, 444 bp, Glycine max
ggaccgtgcaggacgtatgcatggggacatttcgtgcttgttttgtatataaagagatgtgcatcgccaccgattacaaaactaaatcaatcgaaggtatgtgcatcttaatccaaatgtggatatgagaacgatgcacgactttggctccaaagaggactcctctcgtaatagaaaataaatcactcggacacaggtggttgcgacgtgaaaatcaacatattgacaatgatgatctgatagtttttcgtcacaaattggatatcatgaaacgatataaggtaagaagatcataatgtatttgttaaataataaataatatgtcatgtctcagtgaaaattagcaactgtgttgttgtatacagtttctgtggaagccttacacagcaactgttatgtcactgttgccttcaatttgtttggttggaagtgtaacgtggtggc

SEQ ID NO: 20798 - DNA, 451 bp, Glycine max
  modified_base (324)..(324): a, c, g, t, unknown, or other
gtttgcttctcaagtctctcgaagcctctttctctctcttctaggttcgtttctctctccgcctcgttcttgtttcttcggtgattttatgtgtgtgtttgtgtataacggtggtcgtgtgttttgagtagcttgaaacacgtttgacgaacgatgttttactacgttgttgtgtcttgtttattttaaatcatagtcttgtaagttcgtagatcgtgaatttgcttatgatttatttcttagatataaaaaattatggggttttgttggggattttatcatgataaaataaaagctttctcttttcttgaatgaaattggctntttttgtaacttttgttctgttttgttatgattttttgtttagcaccttcctattgattcctgattccgggagtttgatgattggccttcattaggtattataatttgtggatttgattataaatat

SEQ ID NO: 20799 - DNA, 417 bp, Glycine max
cccacgcgtccgctctttcaccattaaagcaattaggaaagaggtttttgattgaagctggcgatatgaggaaggggaacaagaagaagaacaagctggtgtggatgatagcgacgccgtttagggtgttggggaaagcgagggacatgtacgtgagcagcataacgaagtgcggtcacaacatgaattacagcaaccccgtggatgctgctggcagattccaggctttgcccaggagttacagtgctgccacgtcacgctccgacaacaacgaggatttcgccgaacttttgagagcggcttccgccaggactttgggcaacataatcgatgtagatttggttgtaaaacagcaggcccaaacccagacccggcccgtttcctcaaatgggttgcccaagtcgacgagcgttggca

SEQ ID NO: 20800 - DNA, 279 bp, Glycine max
tgtacggcgtcgaaccggggaagaaagcctttttcgatctacagccacatcgttgaatcgaaggttatcaacgaccgtgagactggaaggtccagaggattccgatttgtgaccttcgcctcagagcagtcaatgaaagatgcgatcgcacgaatgaacggccaggaccttgacggtcgtaacatcactgtcaacgaagctcatacccgcgccagccgtggtggtggtggaggctgtggtttcagaagtagtggtggatacaaccgcggtagcggtgga

SEQ ID NO: 20801 - DNA, 449 bp, Glycine max
attttatccaattgaaattttaaaaatgactgggataaacttaagaattcaattattgaaattgaataagtaaacaatttaattggattggtcgaatggtatcaaaaaaatggagtactaactcccatttcttatttattattgaattaaccgatcaacttgctttgttatcgaacacttctttttgatttcaaaaattttccggaaaaaatttgaatctatttttatatgcgaatcaatcctactacttctggtcctgaggtttctgcgcttgaaaaaaaaaatctgggacgtatcgcccaaataattggtccggtactagatgtagcttttcccccaggtaagatgcctaatatttacaacgctctgatagttaagggtcgagatactgttggtcaacaaattaatgtgacttgtgaagtacagcaattattaggaaataatcgaat

SEQ ID NO: 20802 - DNA, 345 bp, Glycine max
  modified_base (1)..(1): a, c, g, t, unknown, or other
  modified_base (269)..(269): a, c, g, t, unknown, or other
ntccggaaagatgagttttgagggccttcaaaattagccgaaaaatttaaatcttccaccctcacccagagaggtgggttttaacctggagaccattccgagaaccattccgtccagctttcgacctctcaacttccccccgaatacaaaatggatccgcctgtatcgacctccatctattttctcgttccttctgggagtgtgtctcgcctccatcgcataccctgcgccgaaacctggcattattacattggcgaccctctcaccgnatgtatatcttcatctctctctttcttttttaacctaatctgatatgaattgtattgcaagtagtggaattgaatg

SEQ ID NO: 20803 - DNA, 434 bp, Glycine max
ccaagccttccttgaagaaccaacagaaggggtttggaaatggaaatccaagtaatggggaagagcggggttcttgtgggggggggaactgggtacatagggaggaggatagtgagggcaagcctggcactgggccatgagacctatgtggttcagaggccagagttgagcctccagatagagaagctgcagaggctcctctccttcaagaagcaaggtgctcatctcattgaggcctctttcaatgatcacaagagccttgttgatgctgtgaagcaggttgatgttgtcatcagtgccatctatggtgttcacatcaggagccacagcatcactctgcaactcaaacttgttgaggccatcaaagaagctgggaacgttaagcgtttcttgccttctgaaatttgcctagacccagcaaggatggggcatgc

SEQ ID NO: 20804 - DNA, 428 bp, Glycine max
  modified_base (344)..(344): a, c, g, t, unknown, or other
gatttgccatggtagcctgttttagaactgtttctttaatttcagtgttgatagtatggataatagggaagaaaaggatcaatccaggtggagacactgacaaggttgaactggagtaaattcctgtcagctcttacagtggagttcatcctgaggttgacaaagaggctagcctagtggtattgttcccaaataaaacatatgaaatcaaggaccttaccatatttgaaatattaaaggccactgaaaatttcagtcaggcaaacataataggatgtgggggttttggtttggtttataaagcaacgttaccaaatggaactacagtggccatcaagaaactntcaggagatttgggtcttatggaaagggaatttaaagcagaggtggatgctttgtccacagcacagtatgaacatctggttgca

SEQ ID NO: 20805 - DNA, 455 bp, Glycine max
gggatttgctgttcgcatgaccaaggaaattagtgctcttgcacccagtaccatgaaaatcaagggggttgcacctcctgagagaaagtacagtgtctggattggtggttctatcttggcatcacttagcaccttccaacagatgtggatctccaagggtgaatatgatgaatctgggccagccatcgttcatcggaagtgcttctaaagttgggtcaagtcgagctggatggtgatcaagttcttcatgcacccagtcctgtgccatatttcagtaaagtttggttgacttatttggtatttgaagctttgggtttttaatagatatatctagtttaatgaatggatttgtaagttgagtatgttataagtttctccgttaggtcaccttggaagccagactttttatgcaattggcggatggtattggaaccttgtaggttctgcttggtttg

SEQ ID NO: 20806 - DNA, 479 bp, Glycine max
gaattcccggatttgggcatggttacctgggattcaatagtgataggggaccattgggcgccattaaagaaggcaggggtggctggggtgaccgatcattaaaagaggggcttaaaccacttaatcaggagatccatttgcttaagcagctttcacaatccaacattggtcaatactttgggagggatttgggagaagaaacactttcccgttatttggaatatgtctctggtggttctattcataaattacttcaggaatatggggccttcaaggagcctgttattcaaaattataccaggcagattgtctctggactttcctatcttcatgggagaaatacagtacataaggatatcaaaggggctaacatactagttgatcctaatggtgaaatcaagctggcagactttggaatggctaaacatataaattcttcttccttcatgcttttctttcaagggagtccatactggatg

SEQ ID NO: 20807 - DNA, 440 bp, Glycine max
  modified_base (285)..(285): a, c, g, t, unknown, or other
  modified_base (403)..(403): a, c, g, t, unknown, or other
ctttgtaatgacctgtgattcagcagttcagctgcggaaggccgggaaagtcactgtcagagaatcaaacttgaaaaaattaggtgctacccattttagaaccggcgtagcaaacgagcatttcgaggtgacaaagtttgcactgttggagaccataaaagaagctgtaccagaaatgtggtcaccggctatgaagaatgcatggggagaagcttatgatcagctggtcgatgccattaaatctgaaatgaaaccaccctcctcttagactccagtttaagcagntcctttccttccctctcaattctcaaattggtatattaataaaagtgagaaagtttaggcttgtgcttttattttgtgtgaatgtaatatactttgtgtacgtagacttggctattgngagttgctaggttgggaagtgtttcgcattcaacaat

SEQ ID NO: 20808 - DNA, 399 bp, Glycine max
gccacactttgtatttcactcgggactacgatcattgctacaagaatgaaagaaaggcggggggcctggcaacctatcacgtgccatatggagtgcacattcggggaagattcgatgcaaaattcgcaaaaatgcttgcaaaagatgcttcgaaatacgctgctgaactgcaacgtgagctccagaacgatatcaagcatgcattaaagcgcacattagaggccaagaaaaagtgcaatgaaaggtctattgcagggtttgatcctgccatcaatgacatcacaaagcacgtctgagtgtgtgcacctgtttcaccacctgttgctgatactaaagctgatatcaaatgccctgtcaacagaaagatggtcataaatactgtcaactatgcagttaact

SEQ ID NO: 20809 - DNA, 383 bp, Glycine max
ctttcttcttttttagctatccctctcttgaaaaatctagatctcgttcttccttgatctgcgttacgcttttagtgaccggatctgtatggatctgaaccagatctacacgccgatggtggttttggcctggtctttcatagatctgatgcatggaggctcagatctactgtacagaggtgtgcgattcatgttcgtctctcttttggaatctgtttcgtagaaagtcgtttggtcttccatgtcgcatggctcttgaggtatttttttttgcagatactgtagataatcgatgagaagaacgcagatccagccgcttccgcttgttcgatcgctacagacgcttgtatcggattattcatgattgattcataagcagcatg

SEQ ID NO: 20810 - DNA, 449 bp, Glycine max
ccaacccgtccggtctaacttgttaagtgttaggtgtaaaacttctaccatacacttgtgagtagtaaaatttacatcggttgcaagaaaaagtattgttaacactcaaattttgttataaaattcaacggttgaaaatttagtagaacgattaatttttatgttagttgaatgaggtgaagattaatataagtgaatatagaattgatgacgtatcaatattaatcaaataaagttagtcaaatatgaacaaggtcattacatatatctacactattagtcgaatgatagaatttgactaatattaatgttagttgaatgagaatgagaccaattcagttgattgtgcagctaaataatcttcaatatttactaagcatgaaagttagcttaacatggataagatcaaatatattacctacaatgttagtcaaatggtagaattcggt

SEQ ID NO: 20811 - DNA, 153 bp, Glycine max
ggcaagtaccatttttatcaatcttatcacccttttgcattgcacctacaaaagggccaccccgtcttcccttctcaacttggacttcatctaattcaatactacaacttctggatcacttaattgaattgaattatcttcaaaaagagagaa

SEQ ID NO: 20812 - DNA, 383 bp, Glycine max
  modified_base (54)..(54): a, c, g, t, unknown, or other
  modified_base (56)..(56): a, c, g, t, unknown, or other
  modified_base (58)..(58): a, c, g, t, unknown, or other
gtatttcttcatcggttgttcaagtaaatggccttcgtcaccactgctgaaatntntnatgcggaccgccagttaattttgagtggggaacttcttgcccttcagccagtttttcagatttacggtcgtcgacaggtcttctctggacctatagttaccttgaaggtgtttgaagacaatgttttggttcgtgagttccttgaagagaaaggcaatggaagagtgcttgttgttgatggaagcgcgagtttacgctgtgctatattgggtggcaaccctgtggtacaagctcaaaacaatggattggcaggtattgttgtgaatgggtgtattaaaaatgtggaataaatcaatggttggtgatattggaattgagaggccct

SEQ ID NO: 20813 - DNA, 181 bp, Glycine max
  modified_base (69)..(69): a, c, g, t, unknown, or other
cacccacgcctcacaagcctctatctactcactatatatacatacttaaactctctattacatcccaanataacccgccccgcaattatacacacactatcctcaaccttcaactaaaaccctacaacaaaacttattaaatctacccctaacataactaaaaacattatatcaacaaccc

SEQ ID NO: 20814 - DNA, 425 bp, Glycine max
cccacgcgtccgctcttctcccacctaaaaggataattccaggtgatgcatcgaggggccgtagtgatacattgctgtttgaagatgaattagagaaggcaagcaatgcacttcttgctcgagcgtggtcacccgggtggagcaatgctaacaaggcattgacaacattcataaatggtccactgattgagtactcaaaaaaccgcaggaaagcagacagtgccactacctcacttctctcaccccatttgcactttggtgagttgagtgtcaagaaggtcttccatctagtccgcatcaaacaagttttgtgggccaacgaaggaaacaaagctggtgaagagagcgtgaacttgttcctcaaatctataggtcttagagaatattcaaggtacattagtttcaaccatccctacagtcatgaa

SEQ ID NO: 20815 - DNA, 440 bp, Glycine max
aaaatggtggtttaattctatgttgtttaataggaagttagaatacaggtgtgaatgaaggaaatcaatggatagtcttggtcctattgaaaataccagtctaagggaagaccctaaaattttaaccgatatagaaaaaaaaattcacagggatttggattatttagaaatggaaggttttttttctagcgatctgaatactgtttctaagaatgatgatgatcattacatgtatgagactcaatttagttttaacaataatattactagtttcattgatagttgcattgagagtttcaatttaggtgatattgacaaatacaatgatatttatttttatagttacatttttttgaagggcagaaattgtagtgaaagcgataattctagtactagtataataactagtacgaatgatacaaatgatagtgattccacta

SEQ ID NO: 20816 - DNA, 398 bp, Glycine max
cccacgcgtccggtttaccgtatagaccacaacacgcgaacaacacaaagacatcaatctgttgttgttgttgttgttgtttttccagaatggacccttgtccttcatcgaacacgaacaccgtgaacggtttctacacgttcgtgagccggggaatggaggagctggagcgagccttcctagccaacaacaacttcatctccgtccagttcctccagaaggtggtgtccctcctccgctccctccacacccagctcacccttctcgtccacaagctccagctccccctcggcgacaagtggctcgacgagtacatggacgagacctccaagctctgggaaacctcccacctccttaagtccgccatctccaacttcgaacctttctactcacagggc

SEQ ID NO: 20817 - DNA, 297 bp, Glycine max
gtcacgcgtccggtcacgcgtccggagaacaacaagacattcctagccttcaacggactaggtctttttacaacttattcatctgaagtgctcatcttatcccactatttggggcacccatttctctatgggagaagcacccacattgcttgctgaatacgtacacgatagtgctcccaatggccttgaattgaaaaacgtaacttggaaaacaactgctacagttggcgataaggcctatgtcattggtggagctgataatggaactttgtgcattgaagttcaaatttttgaccg

SEQ ID NO: 20818 - DNA, 401 bp, Glycine max
acgcccacgcgtccgggagattacaaagaggggtattatattggagttgaaaaaggtgaggatggtccacattcgaagaagcctttttatggaccgaataactggcccgcaccagatgttctgcccgggtggagggagaccatggaaaagttccatcaagagacattagaagtggggaaagcagttgcaaagatgatagcccttgcacttgatctggatgctaattattttgatcggccagaaattcttggagagccaattgcaattctgcgtttgctgcactatgaaggtcaagtttcagatccctcgaaaggattatatggagctggagcttataccgactttggtttaattacactgttagcaacagatgatgtcccaagtcttcaaatatgccaaga

SEQ ID NO: 20819 - DNA, 342 bp, Glycine max
cttttctctccgtgggttgaacttgaagaacctctgaaaatcctttctttctttgatcgagcactctctctctctagatctgatcaaatctccgaacatattccctccaaatatcattttccttaaccaaaccaaaccctaaccctttctttctgtatgaaacctgattcccccccaaaagccttatatttgagaacatttgtaaattctttacgtagtctaaggtagaatttttctgtaacattttaagagcttgaaatcgtgagatgaatcacaacaaccacaatatagcgaggtacccttccagaatggggattggtctcggaggttttaatcccaacc

SEQ ID NO: 20820 - DNA, 184 bp, Glycine max
acgaaagggatgccttgcgcggcactgctgcaatcaatctcactgataggcttcaccaggttctgtcgtgggcaaccggtgcagttgaaatcttctttacgcgcaacaatgctctttgagccagctgtacattgacatatctgcagaggattgcataccttgatgttggaatctatccatgcac

SEQ ID NO: 20821 - DNA, 182 bp, Glycine max
cccacgcgtccgcccacgcgtccgtggatttttacgacattcctagctccgacgacctagggcttttgacaactcaccattctggaatgccttttcatcgatctataaggggcgcttatggctttataaaacggccaatcaaaccacaaaccccataagtctggcccaatcctaccttggtt

SEQ ID NO: 20822 - DNA, 447 bp, Glycine max
  modified_base (350)..(350): a, c, g, t, unknown, or other
cgcgttgcgatctattccaattccatgacgacaccaccgtcttcctcctcagcttcgcactcgcgattcgcctattcaaacccttcctcctcctcctacttccccgttccctttcaccttcagcaacccgcaaccactcactacgctgcgccctacgtcgccgccccctccgtgcaaatccccgctcctcccgtcgtcggccccattgctcccgcgccggttcccggcgtgtactccgccgtgccgcaatatcaggcacagcagttatttgagagggatgcgcagataataacgccggaggctcttgagaatgttaaggcagcgattgcgagcagcgacgtggaacacanaactgatgccaaaaagaaagcggttcctcgcaaagctgctggccaagcttgggaagatcctatccttgcggagtggccagaagatgattatcggctc

SEQ ID NO: 20823 - DNA, 362 bp, Glycine max
gctttttcatttttggtgggtttttttctcgttcttatttgtagcatattttaaggtttggttgaaggggttttagcagctattaatatctgtgttgttccatttggaggaccaacagaacatacaaaggttgttctttttgttcttgttaaaaagatgccaactttgattacatctaggtttcttttgcttgttggagagtcactccacatgagaaggggtttggccacttctaggtctgttttattgcacactagtagtgtccagtgtatgagccaagtggaacctcatcatggttccgtcaccctctctagcataggtttgcaaactgaaactgaacctagaaacagaagccaaacaaa

SEQ ID NO: 20824 - DNA, 424 bp, Glycine max
cccacgcgtccgcgctgctgccgaaacccttccggaaccctaaggtaagtgagtaatcagtggttgagaatggtggagaaggcgaagggtagaaaggaggaggtggttacacgtgagtacaccattaacctccacaagcgcctccatggctgcacatttaagaagaaagctcctaaagctattaaggagataaggaaatttgcccaaaaggccatggggaccaatgatgtgagggtggatgtgaagttgaacaagtttgtctggagccagggaatcaggagtgttccaaggaggattagagtaagaattgctcgcaagagaaatgatgatgaagatgccaaggaagagctgtactctcttgttaccgttgttgagatccctaaggacgagctcaaagggttaggcactaaggttatcgatgacg

SEQ ID NO: 20825 - DNA, 283 bp, Glycine max
aaggtgcaacctttccagtctcttgattttgctccatggccaaccaaggatttgatctccctttctacgaaaaaatttggttcaagcgaacatttcaaagagtgatggacaccttcattttagttctcctcctattgcttcttagttaccgaattttctcatccaacaacttcactttcccatggttccttgctttcttatgtgaatcttggttcaccttcacttggattgtgattctcaacgccaagtggagtcctgcagtaaccataacccacccagatcg

SEQ ID NO: 20826 - DNA, 357 bp, Glycine max
ctcacgcgtgcaggccagccaactttatttgttcactatccacctcttaggtggctcaaaaccaccccatgtcacgttgggccacatggcggacaaatatggtcccgtcttcaccttgcgtctgggtgctcacaaaacgttggttgtgagcaattgggaaatggccaaacagtgctttaccgtcaacgacaaagcgtttgctagccgtcctaaatcagtgtcctttgaattgttgggatacaactattccatgattgggttcatcccttacggttcttattggcgtcacgtgcgcaaaattatcacgctggagcttctctctactcactgcatagacatgctcaagcacgtgatggt

SEQ ID NO: 20827 - DNA, 299 bp, Glycine max
  modified_base (7)..(7): a, c, g, t, unknown, or other
  modified_base (9)..(9): a, c, g, t, unknown, or other
  modified_base (90)..(90): a, c, g, t, unknown, or other
acccacntnaccttccactcgtcattttcactttttacgcgcctcaaaaccaccccgagtcgctttttatcacatatcgcacacatattntcccctctttaccttacatatgggtgctcacaaaacatagcttgttatctatttttaaatggccaaacagagctgtaccgtcaacgacaaaacctatgctagccgttctaaattattatcctttgaattgctgggatacaactataccatgattgggttcatccattacatttcttataagcacttcatacacaaaattataaagctat

SEQ ID NO: 20828 - DNA, 293 bp, Glycine max
aggaagcagaacgctctgtgatggtaaatgtgggaggtcctgaaaatggcgctacatccatggagatgaaaagtgaagacatcgatagagatgaatagagatgggagtcagtcaaagcagaatgaatttctgacctagatggtactttatcagggctgactatatgcttgactcaggtcaccaacacaactcagctgcttgtgacgttagcaatcaacttcatttgctgtgcatacgttggagtgactattcggtacactataatgagaaatatggatgatgttcaacttaag

SEQ ID NO: 20829 - DNA, 455 bp, Glycine max
gccggccttagccccttgggaaccgttttgtgggttgtggcgttggaccgaagggccaggaggctggtcgagcaggcctttccctccaattaacatcgtggtttggccgatgtcatggtgaagaaaataaactgctcacctggatttacggctgtgttcttgggaagcagggttaatcacaagaatcaaattccgtctgttttcttgtatgcaattcaacataagatttataaatatacctatgctccaatcacaattacttttgctaagcttggcttgttgaaaactaagcagttctgaggtatttgttgccttctataatgtgaccattttgtgcttgactagtgacaacaaatcttgctagttgacgtcaatgtttggtgaaaaattatgtaaagtagcataagccgccacaacatttgaagagaaagctgaaaacaaataaaggctatcat

SEQ ID NO: 20830 - DNA, 368 bp, Glycine max
gccacgcgtccggttcgggtggttataaaattagggactgatcctattctccggacaataaaaaaacttgcagtcgtgcctgcttaaccggcatttttcctctctctttaactcaggaggttagtacgtggatggttcaaacaggttaccaaagctgagggaagaggtagatttgctcggattcagaggaggctacttgttatagaggttaagaaaaggattatgcagtaccaaaattatgttgatcaagggttggagagagatgcacaatatatgtttggattggcactctataccctggatcgcctgtatcagtctgtcaagtggcacgcagaagctactggagagtggggacggggtagtgcact

SEQ ID NO: 20831 - DNA, 419 bp, Glycine max
  modified_base (2)..(3): a, c, g, t, unknown, or other
  modified_base (17)..(18): a, c, g, t, unknown, or other
gnngaggaccaaccganntttcatgttcctagcagcagcagcaatggaggccgtattggaagcgatctttcgttatcaatgtccgatcaacaacaatggcaagccgggcctccacatttgttagcaactgctgcagcatcatcaggattcccacagcaaattagaccctcccaaggttggctgcagaaaaatgggttccactctctcatgagaccctcatgaccatcctcaagattttttctaccatgccattttgcattttgaaaaataatctccccctactatttgttttgtgaacatgtacaagtgaaagtgaatgcagtttagattattattatgtaatgtccaacctcccccttctttaggaagcccatacataactgtaactttactattggggtgaaagacaagaagggatg

SEQ ID NO: 20832 - DNA, 446 bp, Glycine max
  modified_base (383)..(383): a, c, g, t, unknown, or other
cccacgcgtccgcccacgcgtccgctactttctcttctctcttgtcaccaacctcgatggaaatagacatggacatggacttctccggttacagcacaatcaccaacacaatcccctcttctgatgatgactatggttgcaactggaaccattggtcccccgtcgtcaactgggacgccttcaccggcgcccacgacgacttccaccacctcatcgactccatcatgtgcgacagcgccgccgcggaggaggacaacctcagccccgacgatcacgccgccagcaactcccccttcgcctccgtcacggaggaggaggacgacgacgccgacgaagaaaccggccccgtcgacgattccaagggcctgagagtcgtccatctnctgatggccgccgcggaggccctcactggtgctcccaagagccgcgacctggctcgagtgata

SEQ ID NO: 20833 - DNA, 220 bp, Glycine max
acgcccacgcgtgcgaaaaggttcacatcactattgcggttattggccatgttgactctggcaagtgcagtaccactggccacctgatctacaagcttgcaggcattgacacgcgtgttattgagagatctgagaaggaagctgctgagatgaacaagatgactttcaagtatgcctggatgattgataagcttaaggcttaccgtgaaaaaggaatcac

SEQ ID NO: 20834 - DNA, 196 bp, Glycine max
gttttctatgagcacaatctccaagctgttcatgaaccggttttggattggtttggtgtggcaaattcccataggaatgtctctggtgaggaagagtctgacttcaagagtggagaatgttgaggaaagccttgacatgtcagtgttggacttgcctgagttggccttggattgcattcttgagaggcttcccccc

SEQ ID NO: 20835 - DNA, 437 bp, Glycine max
ggccactcttcttcttcccacgctcctccttctcatacccttcgccaccctcgtctccgcccgccctcacctcgccggagactttctccgactgccctccgaaaccgataacgatgacaacgtccagggcacccgctgggccgtcctcctcgccggttccaatggctactggaattacagacatcaggctgatgtttgtcacgcctatcaaatactaaggaaaggtggcctgaaagaagaaaatattattgtttttatgtatgatgacattgcattcaatggggaaaacccaaggcctggagtcatcattaacaaaccagatggaagtgatgtttatgaaggagttccaaaggattacaccggcgaagatgttactggtggtaacttttttgctgctttacttgaaaacaagtcggcacttactggtggcagtggga

SEQ ID NO: 20836 - DNA, 454 bp, Glycine max
aaagcattgaattcaaaaacttaagttcattccttgtgttatgctttcttcctcaggacggagacatgtcgaacacatgcggcaactgcgactgcgctgacaagactagctgcaccaagggaaacagctatggtgttattggagagactgaaaagaagtacctcgagaactggtggcatggatgttccaacagctgagcatgaagggaagtgcaagggcggcactaactggacttgcacggactggaactggggccattaaagaatatgtatgaaaatgtaattgccatgtgtttggcaataccaatatcccaatgatgtaaacctcggatgagataaatgtgtgtgctgttattctactctaaggctgtgtagtcatgcagactgaatcatttcaaggtcctggcttagataatataacacccatggttgaggcattctatggatcattagac

SEQ ID NO: 20837 - DNA, 422 bp, Glycine max
gatgggatgaaacatcaaacataccacgtcctgagagagtttcacaatggaagatagagcctgctcttgctcctcttgctctgaatcctctaccaatgcccaggcctaaaaggcctcgatctaatgtggttccatcatccccagattcctcggttcttactcgtgaaggtatggataggttgcttttaaatatttgatatttatttgagtctcatctttgcttaacatatgtaattatgtgaagcctgatctgatatcggagattcacagcttctaaaggtagcgtagatcctttgccaacaagtgggtttcaaagggtcttgcaaggtcaagaactttcgaccttgagaggtaatcttgcttgaagccacgaatcttatacggcagataagtactgtgtgtggccacctgccacggatgat

SEQ ID NO: 20838 - DNA, 83 bp, Glycine max
  modified_base (66)..(66): a, c, g, t, unknown, or other
gattatcctaagtctttgggaatagtgctgcaatggcttcaagtcatgaggatgtgaccgtactcntagctactgcaagccca

SEQ ID NO: 20839 - DNA, 437 bp, Glycine max
  modified_base (160)..(160): a, c, g, t, unknown, or other
  modified_base (261)..(261): a, c, g, t, unknown, or other
  modified_base (305)..(305): a, c, g, t, unknown, or other
cccacgcgtacgtttctctctctagaattctcagatttgcggggcgagatgatgcagcagccaggacccggcatggcacctcccaccatgggccagcagccgccgcaacagtaccagcagcctccgccgcagcagcagcaaccctacgtcatgatgccgncgcaggcccaggccccgcaggccatgtgggccccctccgcccagcctccgcctcagcagcagcccgccagcgccgacgaggtccgaaccctctggatcggngatctgcagtactggatggacgagaactatctctatacctgctntgctcacaccggcgaggttacatcggttaaaagaattcgaaacaagcaaactagtcaatctgaaggttatgggtttattgagtttaatagtcgtgctggagctgagagaattcttcaaacatataatggggc

SEQ ID NO: 20840 - DNA, 225 bp, Glycine max
acggagagggaaaataagcctggaaacgatggaagatgatgacgcagcgattgaggtgaggagcgcatgtgtgtcccagagccagaggtggaggattccagctgctgttgcccaatttgcttgcgatcattccttcaactttactacctcgacaaatgttttcataagttctgcttcaattgcattttacgctggaccaaagtggttgctagcaagcaccgttct

SEQ ID NO: 20841 - DNA, 386 bp, Glycine max
cccacgcgtccggttttacaaaagaataaaccgagtattcttcattgatgcaattcccaagtcgccgtcaggcaaaatcttgcgcaaggatctaagagcaaagatagcggcaagtgttccaaaatgaaattaaaccaaacccatcatgttatggtgttattatacgatgcccgcataagcaagcttcaacacaaaaggaagaggcgctgttgcttgatcccgctagcttttacgtattttctcttacgtaacaaccgtgtataagttaccagtgtgattttcttacagaactatcttctgtaaagatttcaatctgtcaaggactttcaccttctataatatcaaattatattctttttttataaaattatatttaattgcaaaaa

SEQ ID NO: 20842 - DNA, 419 bp, Glycine max
aacatctttctctctccgaacagatcacactatggccacctcaagcgccaaatcagtccgtgatttgaccgttaaagatgccaagggaaatgatattaatcttggtgactacaaaggaaaggtccttatcattgtcaatgttgcctcacaatgtggcttgactaattcaaattacactgagctcaatcagttgtatgagaaatacaaacagaaaggtctggaaattctggcatttccatgcaatcagtttggggcacaagaacctggatctaatgaacagataccagaatttggttggactcgcttcaaggcttaatttcccggttttgacaaggttgatgtgaatggtgacaaagctgcttcactgtacaagtatctaaaatcaagcaaaagtggactctttggggatgggatcaaat

SEQ ID NO: 20843 - DNA, 183 bp, Glycine max
acccacacgtacgcgcgattcacatggtccaccacttccattgcctttcacgacacacagcactttgattttagggtctgacaaacatcgagaagctcaatcgactgcagaaaatgagcttccatctatctatatgtcagactactatcattccctgaacctagagattatatgatcgcaatc

SEQ ID NO: 20844 - DNA, 257 bp, Glycine max
cgaggctcatgataaaccaatctgcattgcgtcgctaacacatagtccttgcattcgttggtccgatacccattgatgacaactatccactgacgactatgatcatccaatctatctatacgtacacgactactacgtacactgtgcctagatcttatgctactcggattccaatttttctatgacatgcacttgattatgggaatgctcgacacaagcactgatgttggacccacctgtatcaaacgggttgctta

SEQ ID NO: 20845 - DNA, 416 bp, Glycine max
tccacgcgtccgctctgccgcatccgcgggaagatgcacaagaaggtgtggatcggcgccggagacatcatcctggttggactcagggactaccaggacgacaaggctgacgtcatcctcaagtacatgcccgacgaggccaggctcctcaaggcctacggcgagctccccgataccactcgccttaacgagggcatcggcgccagcttggacgaggaggacgacgccaccgccaacgactacatcgagttcgaggatgaggatattgataaaatctaatccctctctcgccctcaattatcattcatataatatcatcatcatatctggctctagcaatatttcgttatctgcttgtctgcaactctgcgggttggatttcggtttataattgtgcactattatttcaataaccc

SEQ ID NO: 20846 - DNA, 453 bp, Glycine max
ggatcttggccgacacttctatggcagttcacgttagcctgcatcaagatgggaaggcctgatttggcacaaaaagcagttgattcagcagagaaaaggctttcagcggatagatggcccgaatattatgatacccggaacggaaggtttattgggaagcaatcacggttgatgcagacatggaccattgctggtttcgtgacctcaaagatgcttctagagaatccagaaaaggcatccttgttgttttgggaagaggattttgaacttcttcagaactgtgtctgcaagctaagcaaaagtggtagaaggaagtgttcccgttttgctgcaaggtctcagtttattgtttaatagggaggaacagagagtcattgtttgaactcttgagtaatgtaggtgaactaatttattacaataataactgattgatgccacttttcagaattaatc

SEQ ID NO: 20847 - DNA, 456 bp, Glycine max
  modified_base (419)..(419): a, c, g, t, unknown, or other
caccgggtaaacatgcttaattctgaaggagaacttaaaataagttttggctatggatgcgatagagatagaggtattccttgtgaagttgtcagtggctgcaaaatccttcctggagtatgtagaacaagcagtttctcctgcttgtcaggtgcagccttaagtgcatatgctacattagcaaacacaaacatctgcaatggtaagataggagaagaaatccttccaagttgggactctcctacttcatttcgaaaggtaacctcttcgccaagtctttcaaagctggacatactatcatcctcccccccgaatagtttgccttaccttagctgcagtccttctactgtaagtgatatcctggaatatgactcttgcacattaaaatccatgagtgatccttccagaagtgaccgttntcttaatgctaaggaagttcatgtagcaagaggagct

SEQ ID NO: 20848 - DNA, 451 bp, Glycine max
  modified_base (300)..(300): a, c, g, t, unknown, or other
cccacgcgtccgcatacatatgttctagatactatagagcacctgagctcatatttggcgcagctgaatatacttcagccattgacatctggtctgttggatgtgttttagctgagctgctgcttggacagcctctgttccctggtgagagtggagttgatcaacttgttgagatcatcaaggttctgggcactccaacaagggaagagattaagtgcatgaaccctaattatacagaatttaaattcccacagattaaagcacatccatggcacaagatcttccataagcgcatgcctncaaaggcttgtgatttggtatcaagactactacaatacttccctaacttgcggtgcacaacttttgatgccttgacgcattctttcttcgacgagcttcgtgatccaaatactcgcttgccaaatggccgattcctttcaccactatttaa

SEQ ID NO: 20849 - DNA, 377 bp, Glycine max
gcggcatctcgtccgacacatctctgacaggggtcttatacctgagtcgaaactggaaggcatgggtcactacaaaaggcacctgattctgcacagaataagtggtcagcaccttaagtgctcgcatgttatgatgacaccatcgaaaagtctattgagtagccattaccagtgatgcaaaccttgacccaaaatatattccctacccttgatatgcatgcttagaattccgaacaggcattcatgctgggataggcagatgcaattctacttctgcagaactgtgtctgccaactttgcaatacttctaaaaggtaatatgccccttgagctgatacgcgctatggtataatttcactgggagcaacagattatga

SEQ ID NO: 20850 - DNA, 459 bp, Glycine max
  modified_base (393)..(393): a, c, g, t, unknown, or other
gacggcacgcgtccggccacgcgtccgcgtgtattcatttggagttttgcttgttgaacttgtcacaggaagacgccggattgagccaaaatttgaactcagggagcgaatcacggcaagatgggctatgaagaggttcattgagggagatgctatctcagtcttggacccaagactggaccagattgctgcaaatactttagcactagaaaagatccttgagctagctttacagtgcttggctccacgtagacaaagtaggccaactatgaagagatgtgctgagatcctttggtccatccgcaaggatatcagagagcagctatccgcttcaaatttccgctcattttccacttcttcccaaagaagcacctcattgaaagagtgagaatngctaaagtgcaacactagcatcaaagaatgttaagttaggacaagccatggccttgggagagaaaa

SEQ ID NO: 20851 - DNA, 182 bp, Glycine max
ccccccttttcgccttgcagcagtgatcgagatgctgggaaagacgaggaaggtggcagcgcgtggcgaatccgtggcggcgaactacgccttcggtccctccgaagatgacgtaatcatcaagcacaggcttctcacgcgcaccaccaccaccaggggcgaccctcccttgaagaaccttc

SEQ ID NO: 20852 - DNA, 433 bp, Glycine max
aatgaataatgttggtctatagtgcgcacacatgctgatgctgtagattgacgaagaagcagtgggccaaccgcgataatctctacatattaatataatctttctcgtcacctgagagaaatagaaaatgtggagtcgcgcaagaacccttttccttcgcgtcctggaacctcctaatcacaacaacgcttcgctttcccaaacatttacccctggattctccttccacacgctctcgcacttccaggaggccctggtagtggaaaaggtacacaatgtgcaaaaattgttgaaacctttggatttaagcatctgagtgctggagatcttttgagaaaggaagatggttctgatagtgaatatggctcaatgaatatgaataccattagaggaagaaaaattggtccatcaagaatgactggcaaattgattc

SEQ ID NO: 20853 - DNA, 421 bp, Glycine max
  modified_base (372)..(372): a, c, g, t, unknown, or other
cggcagaaaccctagtagtagttttgaaagggaaggaaagatgcagatattcgtgaaaaccctgaccgggaagacaatcacccttgaggtggagtcaagcgacaccattgacaatgtcaaagccaagattcaggacaaagaagggattcctccggatcagcagaggttgatcttcgccgggaaacagctggaggatggccgtaccctcgccgattacaacatccaaaaagagtcaacattgcatcttgttttgaggcttcgtggtggtattattgagccatctttgatggcactggcgaggaaatataaccaggataagatgatctgccgcaagtgctatgcccgtttacacccccgtgctgtgaactgcangaaaaagaagtgtggtcacagcaaccagttgaggccaaagaagaagatc

SEQ ID NO: 20854 - DNA, 383 bp, Glycine max
tgctctgctattaccctgtttcctgtggcacaaatttccatctagctctcctccgaattagggggtgttctggagaaatgtatgcagagactggtcttctcttcccatatttgaacaacatctctcacggccttcatcagctcgaggagtactgcataacccagaagtgcaatgctgcaatggatgaccttgttcagtcttctgtcatgtcacagtatgattgggcagcagatggagatctgttcaaagctcctgaacctattattgaagagccaatcatggatatggatcccatgacagccaccatcttcatgatatcttgtagggaagatgtctactgacagggactaaaatccactgatattgatattcttcaaaatgat

SEQ ID NO: 20855 - DNA, 303 bp, Glycine max
tgaaaattcagcatacaccgattgggaacaagatcagattctcttatcgtggctccaatcgacgctttcaattttcatcctatctcgaattatcagatgtgttcattcatatcagctttaggagcaaatccatgagtactttcaaaagcaaacacgtgcgaaagctaggattctttgaacagaactcagaactacaatgcttgagtagaaaacaatgcgtgagtttcttctatgcattaaattcatagtcgatgtgcttggatcgtgtggaattcttgttctttcgcgtgaacaccttgacgc

SEQ ID NO: 20856 - DNA, 413 bp, Glycine max
acgcggacgcgtgggtcagaattctctaaaagagatctttttctgctctttgaagaaagaaggggctttgcttgattttagagatgtctctgctctcagatctcatcaaccttaacctctccgataccaccgaaaaaggtatcccaaaagtccatatgatccgtggatcccgaattgaccctaagaaccaaacaaggacttttccaagaccaagtagccacccttcatagcttccccagtggaactattaagggtccaacacaagtcaagctcctggtgaatacagtgaagcgaatttatacccacaagccattttcaaggatccattcccaaggggtaacaatatcctggatatctgagaagcctacactcctgattgaaaacctattcccacttacaagaggcccgcttct

SEQ ID NO: 20857 - DNA, 353 bp, Glycine max
acgctcctgctcgatcccaattccactagggattcaattccgatgcgattccgagcttgttagagccacgacaacgtttcgtttgccagattctttcgtaaaaaaaaataatcttcctttgcccaacaggtaagttggaaaaaaatggaccatgacaagactgggtgcccaacctcctcttaaaggtctatattgggcattaaccactgtggattttttggaagttcaaataccatgaatatgtggtctaaatgccaccaagacatgttgcttaaacaagaccatgccaagcttggagcatccttcattgggaatattattaatgggtcttcaagccgcacttaaaaggaacc

SEQ ID NO: 20858 - DNA, 412 bp, Glycine max
acgcccacgcgtccgcttatagtcgtcctactagtgatagtttatgttgtattggcatttgttggccatgggcctgcgctaccatcttgtttttaagtgaaggattggcaagtgaattctatgtgtgctttcttgtcttcttcagcttgcagaggtcacttctttattatctgccattggtatgcagacttccatttcttcaacttaatttctgggttggccacttttgtgctaataaatttcttggaatagattcaagtggtttgggtcggatttttcattatgacacttgaagggcaaaaaaaaaattaaaaactattggatcatggtatttattggattctcctaccagcccaaagatttggattgaaccagaaaatggctgagattttgattgaaaaaaccttaaagt

SEQ ID NO: 20859 - DNA, 192 bp, Glycine max
accggaccggagttccgggctacgacgtacgcgtctgctcactcgtactacaagtcaggagtcagtgacaatgctattcctcgcttagcatggccacggggaccattcacatgacagaggctaccgttcatgagggtggtctcactatggccgacgagcatattggtgagcaccgtgccatgacatgcactg

SEQ ID NO: 20860 - DNA, 427 bp, Glycine max
acgcccacgcgtacgattccattatctctgagtatttccctacctctcccttcaagatgcacatcttcgtcaagaccctcaccggcaagaccataacccttgacgcgtaaagctttgacaccatcgacaacgtcaaggccaagatccaggacaaggaaggaatccccccggaccagcaacgtctcattatcgccggaaagcaacttgaggacgggcgcactcttgctgactacaacattcagaaggagagtactcttcacctcgtcctccgtctccatagtggcatgcagatcttcgataagacactcaccggcaagaccataaccctagaggttgaaagctccgacaccatcgataacgtcaaggcccagatccaggacaaggatggtattcccccggaccagcaacgtctcatcttcgccggaaa

SEQ ID NO: 20861 - DNA, 446 bp, Glycine max
cgcgcgtgtatattagcgatgccggatgaagaagtagtggagctcaagttccgtctctacgatggatccgacatcggaccattgcgttacttcactgcctacactatcgtcatgctcaacgaccgcatgtttgcatgactggcccaaatactagaagattataccaacggcagcagatgatataaagctgataagtgctggcaaaatgctggagaaccacaagacagttggccagtgtagagtaccttttggcgagcttcccaaatgggttataaccatgcatgttgaggttcagccatctttgctcaaagcatagacagagaaaaaagttgatgaggtgcccagaaaacatatatgtgcatgtacgatattgtgagaatccgttgtcgtcatcatcatcatgaagagttaagctgctgatctcgccctaggtgtatgctgggata

SEQ ID NO: 20862 - DNA, 434 bp, Glycine max
tcacgattcatccaaactgaaatggcggcagtagtatcagcatcttctcatctattgtttgttcttcgttcacaaccattatcatcatcaccctctttcatttctcttctcaaacctcttcttgtttcttccccctatgctgtatctacaccccttcggcatatccaagttccaccgcttcgaaaacctctcttctctacttcctcttccccctcccttaccgtttctcaagatagtgaagaattggaagaaaaagagattgcagacgatgatgatgaattggagactccaagaagagattttgaagatacccaattgggtcccacttgctcaccgttggagagaaagaggaaagaaagtgtgaagttggaagttccgagtttgaatgtgaaagaaaggaaggagcttgcgtcttatgctcacagtttggggga

SEQ ID NO: 20863 - DNA, 320 bp, Glycine max
acgcgttaaagctcatagatacctggaggatgttttggcccacatacaggccatccctttccgaggcttgtgtggcggagttgggaggacagcctaggctaagagcagacactccaatggtcaaggactctggaccgtcaaatcaggtaagttcatcctagatttgctgacgaacgctgagagtaatgctgaagtaaaaggttcggatgtcgatgctatgtacatttgccatgtccaggttaatcaaccccatatgcaaaggcgtccaacctccaaagctcatggagaattcaaccctaacttgtattttcaataccaaa

SEQ ID NO: 20864 - DNA, 409 bp, Glycine max
  modified_base (214)..(214): a, c, g, t, unknown, or other
  modified_base (235)..(236): a, c, g, t, unknown, or other
tgatgatgttgttatttgttggttaaggtggggatgtaaggccattgaaaagggaaattgatgtttggttcagaaaggaagcataattggttcacatggtgttttgtttgaggcaacaatggcatttgatttgtctaataaaggagatgttatgaggttcacttgtcaattgaagaaacatgcatttgttctggtcacgacaaaaattccgtgngagacatgaatatcatcggannaataagcccctagaagagagaataaagatgcttcatattgtacaaccttcatcattaaagttgtaagcattgtcaatggaaattcgtaacacattaaatctttatataccttagtaagttgtaaagagaggtttaaaccagagacttaatgctttaaaagatggaaaccaaga

SEQ ID NO: 20865 - DNA, 306 bp, Glycine max
  modified_base (253)..(253): a, c, g, t, unknown, or other
cggacgcgtgggcttgcgtggggttggattcccaaattcatttcggttcctaattctcaatccgtcttcgattctaattctgattggccacacacgcaaaagggttgaaaatagtgggacttgattcactggaggtgtaaaaggatgctatcaactccacttgctgccgctctagagcaactagtgatatgctcattggtccagactgggcaatcaacatagacttgtgtgatatcattaatatggaccctgngcaagccaaggatgcttttgagatactcaagaagcgtttgggcagtaaaaatc

SEQ ID NO: 20866 - DNA, 273 bp, Glycine max
  modified_base (179)..(179): a, c, g, t, unknown, or other
caaagttgggctacggtcaatttagaattatcactatcgtctcggacgatttgtcctccaaatctacttacttgaaaggggtaccttgaatgcgaaagatggaacagcgtgtttaggcatgcatggttccaagattgattattggactccatgtccatcaactgaactagaagtgactncaaaagggtttgtcaaaacctttttttgcagctgaccacacctcagccctgatgaaaaagctgttaccctaatggtttgcaagcccttaaccct

SEQ ID NO: 20867 - DNA, 433 bp, Glycine max
  modified_base (204)..(204): a, c, g, t, unknown, or other
acgcgcacgcgttcggtaaaataacaataacagaggaagacagacaattacacagttgcaatgggagtagcagctacactctagagaaatggctactctatcaagctgcatcgctacgccgaagaatcccaatacccactgactctcaggttcctcattgacgatggacagatgcttcttgaacatcagctccagagaacactntccaggttcctctttaaagactaaagcaacacgtaacccagcacttggtattccagcaagtggtgaaggttgaagaaccaggtagtgaagtggctttggtggtgggtttggactgggaagactaattgctggagcattgggatggccatatgcaccttaaattagcaagggactaactggagctgacaataaagacttaatgaggaaactttcaaaattcatgtatgat

SEQ ID NO: 20868 - DNA, 391 bp, Glycine max
ggagaaactgcgaaaatggcatcggagtcaggtcaaagtcccaatccttcttggtttacgggcaaaaggcttcttatgatattttgtctcattaacatgctaaactatgtggatcgaggagctatagccagtaacggtgtcaatggaagtcttgcaacttgcactgactctggaatttgtacaggtggcagtggaattcatggggaatttaacttgaacaattttcaaaatggagtcctggcatctggctttaatggtggaacctctaatggcttcccaatatttggttattttggccaaaggtaccattcatttcggcttaatggtggtggaatggctggttggaccttaacgataactggatgtgggaggtcggtccaattttgggcta

SEQ ID NO: 20869 - DNA, 462 bp, Glycine max
acggttggttctaaggttagttgtgcttgctgtggctgttgtgaacacagtgcaatggaatggagaaggcacgcgtgtagggttctattcgagcacatgtccacgtgccgagtccattgtcaggtccacagtggaatcccaccttaggtcagaccctactttagctggtccaatacttaggatgcacttccatgattgctttgtgcgaagttgtgacgcttctgttctcataaccggtgctggcactgagagaacagcggggccaaaccttagtttgagaggatttgatgtcattgacgatgctaaggctaagatcgaagctctgtgccctggtgttgtctcttgtgctgatatccttagccttgctgctcgtgattctgtagttctgagtggtggactaagttggcaagtgcccacaagacgcaaagatggaagggtttcaattggatcagaagccttaac

SEQ ID NO: 20870 - DNA, 443 bp, Glycine max
  modified_base (229)..(229): a, c, g, t, unknown, or other
caattgtcgtgaatgtgattataatatagttattttatttgcaattcaaagatagtaaaatctgtttataatatataaactatatatttattaatagtgtaaaaaattatattaccttttaattataaatttattataattagtaagtttgttgaatttactattaatgatttttggaataatatttttgagtctttttgttttaaatattgatcgactttgttgactnattaattcttttgaaaaattaattagctatctttagtagtactaatatttttctttccgcaaatttgaatcccatttaatacatgtgggttaataacttttaatggagggtgaatgtaaatttttggtgctagttgtgcgtagaaattaaattaattaagtaattaatttattaataatttttttaattggggttcaggaaaaatagggtgaaa

SEQ ID NO: 20871 - DNA, 223 bp, Glycine max
acgcatccattgaataatgaaaagccagaaaaaactggactcaaattcaaaatcacgagcttgagaggtgaaaggaccaattgattatgtccctgaaatgtttgatgagctgaaggatcaagtaacagtggagcagattttgcaggttgtttttcttgatccagagcgtaactgtcctgctttggaaaaactgaagcttcagctggttgaggctgatgctgct

SEQ ID NO: 20872 - DNA, 332 bp, Glycine max
gtacgcgtgcgttctggcgtgcggtccctactgtacgtccgatccactactcacatcctaataacaggcatgtgcgtttcacaagcatacagcatggccgatggatctatcactagacattccgactacgaatagaccatgaggacactggcaattacggcaaaaagcactttcatatttaccaaaacggcttcattgttggaaaatcgactaatgtgacctacctaaaaccgccaagaagtggaccaatccgttttccactcaaaccctgggccaaatttatggggccggattaaacaacaaccattccaagttctataatgcatgtaatt

SEQ ID NO: 20873 - DNA, 462 bp, Glycine max
cccacgcgtccgttcaccggtaccctttggctgtaaggccattctatacaatgcgttgctgcgacaatcctgcatacagcaactcgtttgatgtctttattcgaggtgaggagataatttcaggagctcagcgtgttcatgtgccagaatttttggaacaacgtgcagcagcttgtggcatcgatgtcaaaacaatatctacatacattgattctttcagatatggggcaccaccacatggtggctttggagtaaggttggagcgtgtagtgatgctcttctggggcctgaataacattcggaaaacatcactcttttctcgggacccacttaagattgcgccatgataaaatcatattccaacaggtaattgctcaaatatttagcctttacaatttttttatggtgaatcctgaaaacattatttaaattcctagccttggagcttatacccaccgtgat

SEQ ID NO: 20874 - DNA, 67 bp, Glycine max
acctacacgtacgcgtgcgccgacgcgtgcggacacgactctcgttgagtacactacgcataaccca

SEQ ID NO: 20875 - DNA, 460 bp, Glycine max
ccgggctacgacctcacgcgtccgtgcttgcttgagttgacaactttaagtctgtcaatttccgagctgcttggttgggtgcaatggcaagtgaacagttggctagagagtactaggtctgaatcacattggcagaggatgatggatacacgaaagatggaacagtcgattactgtggaaatacagctaatagaacggaaactggaacctggaaagcatgcccctatatcttaggaaacgaatggtgcgagagattggcttattatgggatgagcacaaacctggtgctttatttcaagaaccggctaaatcagcagtgctactgcttacaagaatgtctctaattggagtggaacttgctatatcacaccattgattggggcatattaggctgattcctaccttggcagatattggacaattgcttgtttttcaataatttatgctattggaatgacac

SEQ ID NO: 20876 - DNA, 454 bp, Glycine max
  modified_base (264)..(264): a, c, g, t, unknown, or other
agaagtgttggatgcatttctatttctaactaattattgtgcttattattattgttgagaaagagaagaatggcaaagttaataaaattctttgagttgaacacaggggccaagattccttctgttgggttaggcacttggcaagctgagcctggtgttgtagccaaagctgtcaccacagccattctggttggatacaggcatattgattgtgctcaagcgtataacaatcaagcagagattggttctgctcttaagaagctntttgatgatggtgtggtgaagcgtgaggacttatggatcaccttcaaactctggtgttcagatcatgcttcagaagatgtgcccaaagcattggataaaacattgcacgatttgcaacttgattaccttgacctctatctgatccactggccagtgcgcatgaaaagcggatcagttggattcaagaagg

SEQ ID NO: 20877 - DNA, 226 bp, Glycine max
acgattacacaaagcacgggccttgtaaattttcttgatgaacaatgggacgtacattgttcaggatagccaaatatagagaattgtgaacccttttgggatactattggatcagataacacgctgcacaagtcaggcaatttcatgtgcactatccacgaagctcgtgtaattagctattacggcttctgaagttgcatcgtgctggttgaatgctccatattaa

SEQ ID NO: 20878 - DNA, 441 bp, Glycine max
cggacgcgtgggagcgagtccacagcgtggaggagttcgagtcggcgctcgaatccgccaaagacaggcttgtggtggtggaatacgctgccagcgacagcgaggagagcagccagatataccctttcatggtggagctgagccgcagctgcaacgacgtggagttcatcctggtgatgggcgacgagtcggagaagacgaaggagctcctgaagcgggagaaggtggagaatgtgcctcacttcagcttctacaagagcaaggagaagatacacgaagaggaagggattggtcccgacatgctggtaggggatgggctatactacggggacaaccactctggtgtggtgcaactgcacaacgtggaggacgtgcagaagctcatagaggaccacaagctggatcacaagctcatcgtgctcgatgtgggtctcaaacatt

SEQ ID NO: 20879 - DNA, 453 bp, Glycine max
tgtcatcatccgcagctgctgttattcgcaccgcaaacaaacagtgagccatggccgtcggagagaacaagcgcatctccaaagggaaaaagggtggcaagaagaaggcagctgatccctttgccaagaaggattggtatgacattaaggccccttctctttttcaagtgaaaaatgttggcaaaaccctcgtctctcgtacgcagggtaccaagattgcttctgaaggacttaaacatagagtgtttgaggtctccttggctgatcttcaaggggatgaggatcatgcattcaagaagattacgttgagagctgaagatgtgcaagggaaagaatgtcctgaacaatttctggggaatggatttcacaactgacaagcttgagtcattggtgcgaaaatggcaaactctaattgaagcccatgtggatgtgaagacaactgattactacaca

SEQ ID NO: 20880 - DNA, 425 bp, Glycine max
  modified_base (234)..(234): a, c, g, t, unknown, or other
  modified_base (269)..(269): a, c, g, t, unknown, or other
gaaatcattcattgattaccatatttccttttctctcttcttccttccttccttccttccttcgacaaatgttgcactctcactctcaccatcaccaccttctcttctccagtctccctcttcgtctctcactcaccaccacccatcacaactcttctttaccatctcttcattttctccacagacccatcatcaccaccaccaccacaacaactactgtttcagccattcctnctactgctgcatggcttgcaaagctcacaacacangactttgcccactttgaactcccttcttcccatcttttcacagatgacccttctaccattcaagttgcttgcaagtgtcttctcactggtgccatcactggcttcttctttcgctctgtccagcgccgtgcaaagcgtgccaaagaattgaaattt

SEQ ID NO: 20881 - DNA, 171 bp, Glycine max
  modified_base (110)..(110): a, c, g, t, unknown, or other
acgcgtcgccgtacgacagcatacatgcggatgctccgtcggcgtggccacccaagttcgtgagtgccgggaccaacaaggagaaggaagaagatttactcgccattaanggctcaaagctgtctaacagacccaaaaatagacctaaattcattcaacgaaccttcaatc

SEQ ID NO: 20882 - DNA, 197 bp, Glycine max
acgctttctccgacaacagggcagacaacgtgattcgctcttatcttcaaatcaacgacagaagcgacggacgataataggagtgagagaagatggcgttcgcgttcatgaagctgctcaacaggatgcttgcgaagaatgaaatgatgatcctgatggatggtctcgatgctgcaggtatgacaaccatctggtac

SEQ ID NO: 20883 - DNA, 341 bp, Glycine max
acgcgatcagaaatgttatcagaaacattggccatccctgcactactccttgtaatactcattgtgatgctatcctctgtcttgttccatcttcaagatgaaagaacaaatccaccaggtcctaaacccctcccaattattggtaaccttcacatgctggggaaactcccacatcggtcccttaaagccctttaccaaacattatgtacccataatgctcataaaagttgggacatgtcccaaccgctgtagtttacatccctgaaactgcagagctattcctcaaaacccatgacactatcgttgctagcaggccaaaaactctagcttcagaatacatg

SEQ ID NO: 20884 - DNA, 326 bp, Glycine max
tggaacaaacgatgctcccgcactacatgaggccgatattggtcttgcaatgggtgtccaaggtacagaagttgctaaagagagctctgatatcattattttggatgacaattttgcttcagttgtgaaggttgtcaaatgggggcggtctgtatatccaaatattagaaaattatccaagtttaacttaacattaattataaccacaattggtataaatggtagtggttcatttaacaacggtgaccttccactaaatacagtacaagttctttgggttaatcttattatggatactcttggagcattaaccttggcaactgaac

SEQ ID NO: 20885 - DNA, 386 bp, Glycine max
  modified_base (370)..(370): a, c, g, t, unknown, or other
tcgcggacgcctgggcggacgcgtgggtaaacagtgacgatgaaagcaatgacagcagcgacaacgtttgatgtctctgccgcttgcttccgtgcccctccttcttgttcaccgaatccatgccacaccagttgttcagctataaactgcctgaatccttacatgggacgacggataaccgttgctggtacacctaagtttcaagcttccgagggaagcatctctgcacgggaatctggaggctgttagagtcccaacttcagtgcctgtgcgtgtagcatacgaacttcttctagctggtcatcgatatttggatgtaaggactccagacgagttcaatgctggacacgctcctggcgcaattaacatnacctatatgttcagag

SEQ ID NO: 20886 - DNA, 265 bp, Glycine max
tcggatactttgaatgatcacactggggagttaaataggctttcaggggtgaagcctgctaacgttgaagatatgtttggatcgctcgatccatcaatttcgtctaaataccatggaatctcacttgatgttgcatgacctcagttacaggctgcaaccggaatccaaatgcgccataatgggaaccagcagctaggatggtattcattcagccattccactttgaatgtgactggatcgcgggccttcatgcttgaacaatctg

SEQ ID NO: 20887 - DNA, 373 bp, Glycine max
cccacgcgttcgcgcttacgctgcaaactctgataaaatctctctagactacgcgctgttcaaggaaaaccctgtcgtggatgattcgggtaatggtttaaaatacaccaacttgttcgacgctcaaatcgacgccgtttttgctgccatgtcagcagtcaaatacgacgacgttaagattgcagtttcggaaactggttggccttctgctgaggactctaatgagattggagccagccccgacaatgcggcgtcgtataacggaaacttggttaagcgcatcttgagtgggagtgggacacccttgaagctcaatgagtcactcgacgttctcctctatgcgcttttcaatgagaaccagaaaacgggtccc

SEQ ID NO: 20888 - DNA, 229 bp, Glycine max
acgggcgaagaaaatcacgctgaagagttcggacggcgaggctttcgaggtggaggaggccgtggcgctggagtcgcatacgataaagcacatgatcgaggacgactgcgccgacagcggcatccctctgccgaacgtgacgagcaagatcctggctaacgttatcgagtactgcatgaacaccgtcgaggcccccaatcccgaagacatgccctacgaggacgatctc

SEQ ID NO: 20889 - DNA, 442 bp, Glycine max
cccacgcgtccgaaaaaaactatgcaagcttctctcatccgaaccggctccgtgccggtccagagcacggttctccccggttcaccgcgagtctcactcacgcgccaagcctccttctccggcgacaagagccacgcgcattctcccaggttttcaatccattcttcccactccaacaaccgcagatcctcgtcggagcgcgacgacgagaatttcggcgttcgccgggatctgaaccgaaccggatcgccctcgttttcaccaaatcgtaccctcacgaaaaaagactttcctcttccacgcccgctccggccaacctcgaaatccgcccgaagatctaccattcggagaaggagaccgtggattccaccgcggtgcgcctattaccggcggaaacggcggcgagaggatgaaaatcggcgcgtactacgaggaaatgttg

SEQ ID NO: 20890 - DNA, 439 bp, Glycine max
gcctgattattcttatcttacgagactatttcgggacctattcatccgagaaggggatcagtttgattatgtatttgattggactatgctgaagtatcctcaaattggatccagttctagagcccgaccaagtgggaaaccagtcataaaccccggacaatcaggagacagaatagaacggccttcagggggtttctcaggtgctgttgaggcatttgcaaggaggaatggctctggacttgttctgcaaagtgagcattctaggcataggtcttcagatgatgtgccatcttccaaagacgtgcaagctgattctgagaggcctcgcagctcttctcgtaatggcagttcttcaaaaaagcctgtcttgtcaagcagccggccaagctcttctggtgagccaagtgaaagccgtactagccgactggtcttaagcagt

SEQ ID NO: 20891 - DNA, 452 bp, Glycine max
cggacgcgtgggtgtttctgtctctgtgtttgcggctgaggattccgaacgagcgacctgtgttcgtttctcgcaaagtttaagtcatcatgggtaaggaaaagactcacatcaacattgtcgccattggacatgtcgactctgggaagtcaactaccactggtcatttgatctacaagcttggaggtattgacaagcgtgtgattgagaggttcgagaaggaggctgctgacatgaacaagaggtcattcaagtatgcctgggtgcttgacaagctcaaggctgagcgctaaagaagaatcaccattgatattgctttgaggaagtttgaaaccaccaagtactactgcacagtcatcgatgcccccggacatcgtgactttatcaagaacatgattactggtacctaccaggctgattgtgctgtctttatcattgacttcaccactggt

SEQ ID NO: 20892 - DNA, 426 bp, Glycine max
cccacgcgtccgggaagaccggaatagccaaccaaacccgtcgtcgtctagttatctatctccgccaccagcgaaaaccccaaaaccctagaattcaagaatcgaaagcaatggacttcgacgagtacgattacttggagaaaacagtggaggagcaagaggaccacgacagcagcagggagaagagggagaaggagaaagagaaggagaaggagagggaaagagaaagaagggagagggaacgggaacgggaagagagagagaggtctcggaggagtaggagtcgttccgagagagaaagagaaagagaacgggatttcgacaccagagatagcaggagatttagggacaaaaaagaggcagcggagcccgaggcagatccagaaagggatcagagaactgtttttgttaccagatgcccttaag

SEQ ID NO: 20893 - DNA, 353 bp, Glycine max
acgcccacgcgttcgtccacgcgtccgtccacgcgtccgctatacactttcttcaacggttaaggcctgggtgtactcgttgtatgttattatttttcgcgcaccagacagcccgagcgcaattgatggactctattgtaagacacacgcattgccagcgaagaagagcttgatagtttacttaaccgactatgatgctgtgacattcatactgatggacgacgctactaccgtgctacatgtacttagagtaggggaaactatgtatcaagcgacaattggatggcttatgatctgggtaaaaagcgcaactgggatctcttactccagggaggatcaaatgctatggcgga

SEQ ID NO: 20894 - DNA, 244 bp, Glycine max
actactcgtgctgcattggccaaacgtatcttattcgatgcgcatcctgccatactgagacaagtcatgcctcatgagctagcctgctctgactggcctatcctgacgacatagctcttgcgagatctgatataatgcgcatgaacctgcgtgattccacgtgcagagtccacgtgcaaggcatgcttctacaggatctaccgaagcatcacatcgcatactctatggctgtatatgtgatata

SEQ ID NO: 20895 - DNA, 452 bp, Glycine max
gtggtgtacttggttgatgcttatgacaaggagagatttgctgagtcaaaaaaagagctggatgctctactctctgatgaatctttagccagtgtcccttttcttgtccttgggaacaagatagatattccatatgctgcctcagaagaagaattgcgctaccatttgggcctgactaacttcaccacaggcaagggtaaggtaaacttggccgactcaaatgtccgtcccatggaggtattcatgtgcagtattgtgaagaaaatgggttatggggatggtttcaaatgggtttcccagtacatcaaatagtcccttagcaagagatggcttggtaactcatttctagaagtttgtttctctagttgagatttggaggtgttgttgggacaaaattgctgttaaagaaattgcagtatatttcaacttttatttatataaaatgactggga

SEQ ID NO: 20896 - DNA, 257 bp, Glycine max
cgaattccagttcgacccacgcgtacgcttagtttcacttcttggaggagtcaaatgctgaactgctttgtaaggtttgagtgtctagtgattggatcagtataggtggatctggttcatagagttcttcaaggattcaagtgaccattcaatgctattgggatctatctactcgatgaagctgtctatgtccctatctgcaccttatagcaatatggggcattcttgtgtatacactagctttgatgtagtcttct

SEQ ID NO: 20897 - DNA, 383 bp, Glycine max
acgaaaaacaaaataaataaaaaaaaactataaaaaaaaaaataaagataaaaaaaaataaaaagcggaagggaagaacagaatcaacggattagaaaaaaatagaacaaaagaaaaccggagggcctctttaaagaaaccatgctgaactcgctgccgttcacgaccctagcattaccatagagtacctgacatacatgttaatgtacgacattttacatggacactatggaaaaccatgcataccaatttaatacattgtataaatcccgatttgccaagctgtattattagacacaaggcccctgccgatagcccttgccaaaaaattggaaccctcattggcgaatgggaccccccctttatcggcgcattaaacccgg

SEQ ID NO: 20898 - DNA, 319 bp, Glycine max
ttcccgttcgaccacgcgtacgcgaaatcttaagcttgcagattttggactgacacgatcattttctaatgaccaaaatgcaggtctgagtaatcgtgtcattacgttatggtacacaccacctgagttgctgataggaacaacaaattttgtgccagctgaggatatgtaggtctgttgggtgcattttggctgagcttgttcaaggaaagcctattttaccgggaaaagacaagcagaaccaataaattaaactttttgactgattttaagagccgaaggaattgcatggccttgtgatctcaagaatccctattat

SEQ ID NO: 20899 - DNA, 283 bp, Glycine max
accggactcggaattccgggtacgactacgcgtacggtgacgattaaagcaatgacagtgacgacatcgtttgatgtctatgacgattgatggcttgcgtactccttctagttcaccgaatgcatacaccacctgatcaactgatatgaccatcttattctatactaatagcaccattctattactgtgtctgtatctctgtctgactctttttatggttatccaactttgcagggatcatacgagcaggactacagatttaaacttactagatgcttacaag

SEQ ID NO: 20900 - DNA, 351 bp, Glycine max
acgcaacttctgctacttcctactccaaccgcacttctgctccgcaattatcatggggaaggtgaagatcggaatcaacggatttggaagaattggccgtttggtagccagagtggctctgcagagagacgatgttgaactcgttgccgttaacgaccctttcatcaccaccgattacatgacatacatgtttaaatacgacagtgttcatggacactggaagcatcacgatgtcaccgttaaggacgagaagacccttctcttcggtgacaagccagtcactatttttggacacagaaaccctgaagagatcccatggtggtcaactggagctgacatcattgatgagtc

SEQ ID NO: 20901 - DNA, 396 bp, Glycine max
acgggctagctaagcgaagctaaaaccaaactcttcagcagtatggtcttgcttacctggctcggctgcttttgctttcttcaccaccacaaccaccatgtattctgccactgcctccaacactttcttccttctctcttgtttccttctcttctgtctcctctcagctacttcctgtgtttccatgttctctggtattgagacaggagatttagaaaaaagagatgatttgtttccacagattctaacagacgaagcagttgcaaggctttatgagcttgggaaggtgagtgatgctagtggttatttggaaaggacattcttgaatcctgcatccatgaaggcaattgatcctattcgtaaacggatggaagattcttgtttgagaacttgggt

SEQ ID NO: 20902 - DNA, 470 bp, Glycine max
ggcatccgttcggcgggaaacaagaacaacgatctcttctgctgggttttgctctgcttgctgccaaaatttttgggaactccatttgccttcatcaactttctcttgattcaggccattgacaggagtccatcggcggtgggagttttgggaaacttcggggtggttaacctatagtctttattagtttggtcatcatcagcagcagcatatttagatcccttattgttgagtggtgtgagaaatggtgtcctctcagttttctggtttgactatggctggctacaaacctgcacagactcagttactctttcctgcaaaccttcctgatactgtgaacacggagcatattgagctggatttctctgatgtctttggtcctgttacggtagatttgaataacattgattccactactggtgagcccctagaagaagtgaacgagctttgttatgatgacccgccagtga

SEQ ID NO: 20903 - DNA, 266 bp, Glycine max
acgcccacgcgtccgctcctctgttccattacggtttccttttctccctcggagcttccaatgcgagaatgcaattcctcaatacctgcacactttctcgttcggaaagctcgcgaattcgaaagacatcgacggctccacgtgatacgtttgcttcctatctggttatcaatgtcggctactagtgcacttgcatctttgaccgtattaccaccagtgagaacaggtggccaccacattgcacagaatgttgtatcacattgagc

SEQ ID NO: 20904 - DNA, 387 bp, Glycine max
acgcccacgcgtacgctatctctgactacctagtgctctacgtctatgcctctctctcaaaaatggatgcggttcgattctacggttttgttttgctgctgcctacgttccccccttctcataaacaacgcgtcttctcttctgcttcgtatctattcttggctttggctttgggtggattaaaggcctcacagcattcggtgcggcattttaatccatttattccaacaaggcttaatgaacctatggagtctaaaggtgggaaaaagaaatctagtaatggtcgtactcaatcattggtctacgaaacttccctctgataccgcattgaagaccttagaccaaacggtggaatcaagaaattcagatctgctgcttacttcaact

SEQ ID NO: 20905 - DNA, 439 bp, Glycine max
ttgagggtttatttgatctacggaaaatagccagggctacatcaggattcgttggtgctgatgtggcggctctggttgacaaggctggtaatcttgctatgaagagaataattgatgaaaggaaacgtgaattatctcaagatctcacgagtgagcatgctgaagactggtggagggaaccttggtcggttgaagaaataaacaagcttgccatcaaaatgtccgatttcgaggaagcagctaataaggtgcaaccttcattaagaagagaaggttctctttcattcctaaatgtaaatgggacgacgtttgaaggcttgatcctttaagaaaagaagttgaacgttacattggtagacgtattaaatatcctgaagattatgaagagcttggggtggatctcgagacaggatttttgctttatggacctcctgggtgt

SEQ ID NO: 20906 - DNA, 51 bp, Glycine max
tccacgcgtccgaaaaaaaaaataaaataaaaatataatacttaaagaata

SEQ ID NO: 20907 - DNA, 433 bp, Glycine max
caacagtgggagggagatccaaaaagagagagtggaaaagatggcgcggttgatcacagtggtgtggtgcgcggtggcggtgctattatgcgccgcggccggtgcgtcgtgggtggaggaggcggctaacccgatacgaatggtgtatggcgtggaggcggaggtggttcaggtgatcggcgagtgccggcgtgcgttgaagttcgctaggttcgtgagcaggttcgacaagagttaccaaagcgaggcagagatgaaggacaggtactagatcttctcgcagaatctcacgtctatccgatcccacaacatgaagcgtttgccctatactctatctggtatcattttgctgattggacttgggaggacttcaaaagactcagacttggagctgtccaaaattgctctgtcactcttaacggtaaccacaggc

SEQ ID NO: 20908 - DNA, 456 bp, Glycine max
  modified_base (355)..(355): a, c, g, t, unknown, or other
  modified_base (437)..(437): a, c, g, t, unknown, or other
  modified_base (448)..(448): a, c, g, t, unknown, or other
cccacgcgtccgcccacgcgtccgcttctctctttcaccaatcaacacaaactaagtgcttccgtctgttgaaagcgatagcaatggccacgaatccaatcgaagcggggaacggcgacgctgctcccaaccctaacgcgactaccaaatcctccgtgtacctgcaagactcggaggagctgaagcgagtcttcagccgcttcgacgccaacggcgacggcaagatctccgtctcggagttggacaacgtcctccgctccctcggatccggcgtcccgccggaggagctccagcgtgtcatggaagaccttgacaccgatcacgacggcttcattaacctctcggagttcgccgncttctggcggttcgacaacggggacggcggcgacaccgaagctcacgatgccttaaacctgtacgatcaggacaagaacggnctcatatccgncacggagc

SEQ ID NO: 20909 - DNA, 416 bp, Glycine max
cccacgcgtccggcaattttcgggatcctgagagcaatgctgattttgaggttcaggagaaggtgtctctgctggagtggtttgcaaatgaatacaaacggtttggttgcactcttgagtttgttaccaataaatcacaagaaggttcacagttttgcagaggtttcggtgggataggtgggatcttgcgttaccagcttgatatgcgatcatttgatgatttttctgatgatggaggcgtgtatgatgattctgaatagcaatcactgaaaaacttcctaccactggtgcaggaaaggggagccaagatacctgcaccaatatgggaagtggaaggtggtgcacctgctgcagctcctccttcttcatgtctgtctctggtgttgcatacagtgtttgaatgtgaatcgagatgc

SEQ ID NO: 20910 - DNA, 363 bp, Glycine max
cgagaggagaggagagaagagaggaagttttggggtttgaatctatagaatagaatcaaaccgaattgaaagaagatcgatcgatcgatcgatggctctggtcggagttgaagtgaagcatgcggcggagggcgcaccggaggagaattgctccgccaagcccaccaagcagggcgagggcctccgccactactattctcacaacatccacgagcatcagctccttctccgtcaaaagacgcataacctcaaccgtcttgaggctcagagaaacgagctcaattccagggtgaggatgctgcgcgaagaattacagcttttgcaggaaccaggctcttatgttggtgaagttgtcaaagtcat

SEQ ID NO: 20911 - DNA, 426 bp, Glycine max
gcggccaaggttgtgatgcatcagtactattggatgatacatcgagtttcacaggtgagaagacggcatgtgccaacgctgattcgattagaggctttcatgtaatagacaccataaaatccaccacggaaacctcataccctgatgttgtttcttgtgctgatatccttgctgtaacaactagagactccgacgttgctcttggtgtaactacttcgactgtacaattgcctagaagagacttctccacttgcagttcaagttgctctcactcacactctccacaaccctcttgaatgcatagggactattaaagcttccattatattgtgtatgttacaaccgagggattttgtatggctactgaatcactgatagtttcgaagtactgcttggtaagtatgaatacacatagcaatgcatatt

SEQ ID NO: 20912 - DNA, 428 bp, Glycine max
  modified_base (272)..(272): a, c, g, t, unknown, or other
gaatctgattatgttcgttggaaccacgctaacccctgcattttacatttttaatataaatgggttttatttatttattaatttttctttaaaccttaagaaaaagtagattaagcgattagcatagcaaatttgaggcttgcttaatgctttcttcatcatcgggttagggtttttgcagttctttcatttcgaaaccctcgtcgattcaccttcactatctgcttctctcctaaatctcacgctatggggagcaaaggccgcatgccgcncgcccctcacctacggcgcccgcacccgccgggccccgccgcgatgccgcatccgctcgcggggccgttcgatctgctcccgccgccgcaggtgatggagcagaagctggcgtcgcagcacgcggagatgcagcgcttggccacggagaaccagcg

SEQ ID NO: 20913 - DNA, 419 bp, Glycine max
gccagatctatgacgtgtccaatggcaggaatttttatggtcccggaggaccatatgcaatggttgcaggaaaggaatgtagcagagcccttgcactcctgtcttttaaacctgatgacattaatgggaacctcgaaggtttaggtgaggaagagcttacaattttagaggactgggaatttaaattcatagaaaagtatccgaaagttggccagctcattgcagaacaaagaactcggcaaaatgagttcaaagaacaaactcaagacaatttggacaaccctaatgaatgcaaggaggaagaaaaatagtaaccattatattgtataggttacaaccgagggattttgtaaggctactgaatcactgatagtttcgaagtactgcttggtaagtatgaatacacatagcaatgcata

SEQ ID NO: 20914 - DNA, 253 bp, Glycine max
cccacgcgtccgcgtggctgagccaaagagggagcaggataattacatggaggtggcaaaccgtttgaggacaaagggaacccatgtaaagggaattgtgaatcccacccagcttttcaactggattaacaaggtattatgacctggatttttcttttgtgttgtgcctctaaacgcatgaatcaatgatcaattgtattatttgcacagcttagtttgaatttgatttaagtttggggattttgttgttacc

SEQ ID NO: 20915 - DNA, 422 bp, Glycine max
  modified_base (368)..(368): a, c, g, t, unknown, or other
cccttctctctctctctctctctcttccaaccttttctctgtttcttctaaaagtctcagcggagcataacataacccttcttcatcttcttcttatgtgattgacttgtgtccaccacggtgacccatttctgtatcttctggtgaaaagctaatttgttcactctaataagtgtacagtgctaaagggtaaactttgaaacctagcttcctagttgaatcatcagaagcttataagtcgaatccatatttttctggacgtttagactttctttgatttccctgggaaatgatgatgatgcttgaagatatgggattttgtggggatttggatatgttttctgctccccttggagaaggggatattnaccgccggcaaactgagccagaggtgatagttgaggatgattatagtgatgaag

SEQ ID NO: 20916 - DNA, 446 bp, Glycine max
cccacgcgtccgcccacgcgtccgcgccagactgagaggaagagagagggagattctttgtttggtaccttctctcggaaaaatggttacgttcaggtttcaccagtaccaggtggttgggagggctcttcccacggaagcagatcagcaccccaagatctaccgaatgaagctctgggccaccaacgaggttcgcgccaagtccaagttctggtattttctgaggaaactgaaaaaggtgaagaagagcaatggccaagtgcttgccatcaacgagatttttgagaagaacccaaccaaaattaagaactatggtatatggttgcggtatcagagtaagactggttaccacaacatgtacaaggagtaccgtgacaccactctaaacggtgcagttgaggcaatgtacaatgaaatggcttctcgtcacagggtcaggagccctt

SEQ ID NO: 20917 - DNA, 401 bp, Glycine max
aaacaagcccttatcacaactctatctaacaaattacataggacaggcccaaaaccaaaagaagcttctttgtctctcgtgccgattctccaccactattcccttcaccccaatcacactttccggtagttgttgctattagtgtagaagatgagtacgctggatgcaacaagggctgaacttggtcttcttgttttatatttgggcaaggctgaagcaagggacaaaatatgcagggcaatacaatatggttccaaatttttgagtaatggggaacctggtactgctcaaaatgtagaccaaacaaccagcttggcacgaaaaggcttccggctctttaagtttggcaatgacctacatgctttgataagtccaacaccacaggggacaccccttcccct

SEQ ID NO: 20918 - DNA, 447 bp, Glycine max
gtgagtgtatacccaacacaaactaagatcaacatggactactacacccgcgtttcagaagttgagagggaacctatcatggagtattccacaccacgaccaatgatgggcaactaccaccaccctaatgctcaccgtgtcctcaacgagaagattgtttatgaggaggatgtgattggaggatcccgccacaaccacatgcatcaccaccaccctgagactcatgagagagtcaaggtggtggagtatgaacaagttcctgagaggcgcgttgtctatgaagagaaagttgcttatgacaacgatcgttactactctccaaagtattgaaattggacaaatggaagaacacctataacgtgttatcatgtggctttttattaggcaggctacctagtataccaaaagcaccactgtgcttgtactaaataaattcctgcttatata

SEQ ID NO: 20919 - DNA, 461 bp, Glycine max
cagtttgggggatggaagtcgacttgcccttttctggttctccccaaaaaaatagattttcatgattttttgaccccatttttaaagaactaaaaaaaaaaacgaaacaatttcaatttttcacttttcgagttctaaaagttttaagtgaaaaattgaaattgtttctaactatcttaatagaaaaagcaaaaaggattagcaaaagtattatcgaaagtattcttaaaagtattctcaaaagtattctaagcctaacgaaaataaaacaatttttcaaattgctatttattaaatttaaattcaaaaagatagatgaattgagcgaaaataaaaaagattcaacaatttataagaataatccaatgatttctgaaacaaccatttcaattcaatcgataaattcagtaaaatggtcattgaaaaaaaaaaaattaaggatcttaatgctaaaagaaaag

SEQ ID NO: 20920 - DNA, 361 bp, Glycine max
  modified_base (223)..(223): a, c, g, t, unknown, or other
ctttcttcttttttagctatccctctcttgaaaaatctagatctcgttcttccttgatctacgttacgcttttagtgaccggatctgtatggatctgaaccagatctacacgccgatggtggttttggcctggtacgataaatcttccatcggagttttgctctgtataggttcgattcatcggtattagcgtcttgatattggtattttcatttggcatatnaggtcttcatagatctgatgcatggaggctcagatctactgtacagaggtgtgcgattcatgttcgtctctctttgggaatctgtttcgtagaaagtcgtttggtcttcatgtcgcatgcttcttgagaatttttttt

SEQ ID NO: 20921 - DNA, 408 bp, Glycine max
acgggccaaaatcgtgacatcttcatgtacagagggaacacaccattttgtagcaaagagtgcggacaggagcaaatagagattgatgaggcaaaggagaaaagttggaagctttcttccaaaaggggtgtgagacaatcagagaccaatcaaaattccacacccaataaggctgtaagaacaggcacagttgcagtggcctaatcataatcaaacaaagaataatcatgacatgatgatgatgatgaatggggaaagggtccaatttttgaagtaaaaaaaagattgaatattggaaatggaaaaattccaaaggaagaaatgcaatcatgaataatccatgaagattctgataacccgggatgaatcttcaattcgctgcctttgtaaagaaaaaaaagtttggtt

SEQ ID NO: 20922 - DNA, 457 bp, Glycine max
ggcctgttcagtgatggcatctgtggccctcaaacctgcccctttcactgttgagaagtcctcagttagaggccttccctccctctcaaggaactcctcttcattcagagttgtggccagtggtggcaagaagatcaagactgacaagccttatggaattaatggtggcatggctttgagggaaggagttgatgcatctggcaggaaaggaaagggaaagggcgtttaccagtttgtagacaaatacggtgctaatgtcgatggttacagtcctatctacgacaccaaggactggtctccaaccggtgatgtctacgctggcggtacgactggcttggctatctgggctgtgactctacttggtcttcttgctggtggtgcacttcttgtctacaacacaagtgctttggcgcaataaactttgcaaatcgatgttttaagctcaaacttagtccat

SEQ ID NO: 20923 - DNA, 346 bp, Glycine max
gcaaccttcacctatgaatcgtttatgctgacagtcctgccattcctaatagcttaggaaatgaatggtgtgtgtgtggttggtagggtttgtaaatggccaggctgtatttggtttgaaaatgtgtggtcgaattactttactattgccagcctttaatatgctagtactccctgttgttttactctataagtaaccagatccaaaatactatggttttcaaaaaaaaaaaaaaaaaaaaaaaaaaaaaaaaaaaaaaaaaaaaaataaaaaaaaaaaaaaaaaaaaaaaaaaaaaataaaaaaaaaaataaaaaaaaaaaaaaaaaataaaaaaaatttataat

SEQ ID NO: 20924 - DNA, 262 bp, Glycine max
  modified_base (249)..(249): a, c, g, t, unknown, or other
tgaaattttaaaaatgactgggataaacttaagaattcaattattgaaattgaataagtaaacggtttaattggattggtcgaatggtatcaaaaaaatggagtactaactcccatttcttatttattattgaattaaccgatcaacttgctttgttatcgaacatttctttttgatttcaaaaattttccggaaaaaatttgaatctatttttatatgcgaatcaatcctactacttcttgtcctgangtttctgcgcttg

SEQ ID NO: 20925 - DNA, 412 bp, Glycine max
ggcaatttgtggggcttgctgagatgattggtcctgttgattttaacaagagtgttgagtattggcagcaagacaagtggaatggttgctttcctcttaagtggcacattgttaaggatgttcctaacaatttgttgaggcacattaccttggacaacaatgagaacaaacctgtcactaacagtagggatacacaagaggttatgttggagcctgggctgaaattaattaaaattttcaaggaatataccagcaagacatgcattttggatgattttggcttctatgaggctcgtcagaaaactattttggagaagaaagcaaagcaacaattcccaaagcaggtatgggaagggaaacctgctgatgagaagattgagataaatggggaagttaatactcaaaaatctga

SEQ ID NO: 20926 - DNA, 443 bp, Glycine max
gtgatatcctcatttgagcaagctgctggaataggctcagcaagaacgtacactgcgcttgcggtgcaaacaatttcgaagcaatttcggtgtttgaaggatgcaataacggggcaaatcagagctgcaaacaagagtttgggagaagaggattgttttggtgctaaaattgaaggatctaggctcaaatatgtggaccatcatctaaggcaacagagggctattcagcaactgggaatgatccatcacaatgcttggagaccccagagaggattgccagagagatcggtttctgttctgcgtgcttggctctttgaacactttcttcatccttaccccaaggactcagacaagcacatgcttgctaaacaaacagggcttaccaggagccaggtttcaaattggttcattaatgctagagttcggctttggaagccaatggt

SEQ ID NO: 20927 - DNA, 440 bp, Glycine max
ctcggaggacacaaggccagccaccggaagctcgccggagaaaaccacccgacctcctccgccgtgacgacgagttcggcgtcgaacggtggtggtaggacccacgagtgctccatctgccacaagacgttttcgacaggacaggccttgggaggacacaaacgttgtcactacgaaggcggtaacagcgccgtaaccgcctctgagggagtggggtccactcacacaggaagccaccgcgatttcgatctcaacctcccggcttttccggacttctcagcaaggttcttcgtcgatgacgaggttaccagtcctcatccatccaagaagtcccgtttcaatttgaccatacccaagattgaaatccctcaatactgatccatagatccaaaaaaattattcagtgtttttttatatatttttttaagttatttgggatt

SEQ ID NO: 20928 - DNA, 431 bp, Glycine max
  modified_base (274)..(274): a, c, g, t, unknown, or other
  modified_base (276)..(276): a, c, g, t, unknown, or other
  modified_base (394)..(394): a, c, g, t, unknown, or other
cccacgcgtccgcacaaatattgcagcctatgctacaagagcttggcaaacaaaatgcccatcgaatgagattgattcgagaccatcaagctgacttccttcgcctgataaatgaacctgcagaaggtgctgaagggaacatattggggcagatggcttctgcgatgccacaagcagtaaccgtcactcctgaggagcggcaggcaattgaacgtcttgaagcaatgggttttgatcgtgcaatcgtattggaggtgtacttcgcttgtaacananatgaggaattggctgccaactaccttttggatcacatgcatgagttcgaggaacaatagatctcctttcgaatttgccaaattatttcgtgtcatcttttttctcgatgggtctttgntacatactatgtttaatgaggtaatgcttttgataat

SEQ ID NO: 20929 - DNA, 457 bp, Glycine max
  modified_base (332)..(332): a, c, g, t, unknown, or other
cccacgcgtccgcccacgcgtccgtctcggggagaatcacccagaaagagttatctaaaagctgttaaaaaagtggcaaagacagagaaagatgctcaaataagacttcaactttatgagccatctgaatttcatgtggtgaacccattgaagaagacaagggtagggaaccccgttgggtacaaattggttcccggtgccacagcagctagcctgctggatccagaagatccaccacagaaaagagcagcttttaccaacaaccaattatgggtcactccttacaacaaaagtgagcaatgggctggtggcttatttgtttaccagagcanaggcgatgatactcttcaagtctggtccaacagggatcgtccaattgagaataaagacattgtgttgtggtacacaatagggttccatcatataccctgtcaagaggactaccctatcatgccta

SEQ ID NO: 20930 - DNA, 337 bp, Glycine max
  modified_base (321)..(321): a, c, g, t, unknown, or other
  modified_base (330)..(330): a, c, g, t, unknown, or other
cccacgcgtccgaattcccaccgcaaggtaaaaaaaaaaaaaaaaaaccagtggtgcgcgatgccaccgaagttcgatcccttgcaggtggtggacgtgttcgtccgagtcaccggcggcgaggtcggcgcggcgagttccctcgctccaaagatcggtccattgggtctctccccaaagaagatcggagaagacattgcgaaggaaaccgcgaaggactggaagggcctccgcgtgacggtgaagctgacagtacagaaccggcaggcgaaggtgacggtggtgccctccgccgccgcgcttgtcatcaaggcgctgaangagcctganagggaca

SEQ ID NO: 20931 - DNA, 454 bp, Glycine max
gttcttcttttcaagttcataaacttcattggcagcttcaccatattccaaagagatcatcggtatgagatatgtgtcttctgagtatgatgatgaagaagaagaaattcaagaaagttactcttatgtccatgattctattgagtcagatcatctagtagcagacatcatttgtggtggagagacccttttgtttgtgcacaagaaccagcctcagaggactcattcttcttctgatgaattcacaagcccccgggatagccttgctgaagacttagaagaaaactattcaacagaaaccttgtcttttcacaagtcacctttggtttcagactttgaaaatgaacaagatgcagaagaatttccagcagaagatgctgattctgttccaaattctgtcccagctgaaagcaggcccacatcgcccatcacactgaacctctacaaaagcgac

SEQ ID NO: 20932 - DNA, 440 bp, Glycine max
  modified_base (359)..(359): a, c, g, t, unknown, or other
  modified_base (365)..(365): a, c, g, t, unknown, or other
gttcgatttcgcagactggttgaagaacacggtttcggagaatgatttcgttgtgatgaagatggatgtggagggtactgagtttgatttgattccaagattgtttgaaactggggctatctgtttggtggatgagatttttcttgagtgccattacaataggtggcagaggtgttgccctggacagaggagccccaagtatgagaaaacttatgatcagtgcttgcagctcttcacttctctcagacaaagtggagttcttgttcatcaatggttttaattaactttgtagaattgcctgatggatgatgggtcaaaccctatatgcatgttcttagcttctgcatgtttcttctttntagttntcttatttttttcccaagccaatagagaagagagagagtgagagtgagagttctttatttttaaaaattctctac

SEQ ID NO: 20933 - DNA, 445 bp, Glycine max
  modified_base (334)..(334): a, c, g, t, unknown, or other
  modified_base (395)..(395): a, c, g, t, unknown, or other
  modified_base (415)..(415): a, c, g, t, unknown, or other
aaagagttctttcaaaatgcaaacagccttaaccttcgctgcccccaacgttgtgccattggcacccacaaagagtgtctcccatattaccatctttcccaccaaattgaaagccccgcgctcctcacctcgttactctccgattagggttgcaaccgtggagcccgacacttcaactgtcgactacaactctgcgttctcagtgtttcctgcagaagcatgcgaaactgtaggaggggaagcctgcatggcggagatgtaccctgaaacgaagctacagccagaggctaagactccacgagtcgttacagagaacgttgagagagagtatctngaatacgatgatcctaaaacggtatttcgaggagaggcttgtgatgatcttggaagaactntctgtgagaccgagtatcanaagggtgtctactagagaaatgtgaaaacc

SEQ ID NO: 20934 - DNA, 362 bp, Glycine max
accaaggcaccatgtaaaagctgcttgaaggatgctaacatctctatcaaggatgttgatgaggttcttcttgttggagggatgactcgagttcctaaagtccaagaggtggtttcagagatctttggaaagtctcctagcaaaggagtaaaccctgatgaggcagttgccatgggggcagcaatccaaggtggtattctacggggggatgttaaagagctactactcctagatgtaacaccactctctctcggtattgagactttgggtggtatctttacaagattgatcaaccgcaacactactattcctactaggaagagtcaggtcttttcaacggagctgacaatcaaactcaggta

SEQ ID NO: 20935 - DNA, 437 bp, Glycine max
cccacgcgtccgcccacgcgtccgcccacgcgtccgcccacgcgtccgcccacgcgtccgagcaaatgtaaggcaagttttcgaagatagtctgggccaactcttctgcaccgtgcctttgcttgaataatgaattgtcaggggtaaatttatgtgtggatccataaaaaaaaggtagtaactttaagttagatcttcttttcgaattccatagtatgcatatcatttaaatgcaacagagcaatacatctgtggtcgtatcttagtccgagtaatgaatgatcttttgtttaattgagtaatactacattggtctgtggcaagaataattgtataatgctacatttgtggtcgtatcttcttttcgaaatccatagtcttttgaactatgcattggtctagctagtgacttcaaatgccgtgacttttttaatccc

SEQ ID NO: 20936 - DNA, 425 bp, Glycine max
gaaaaggtatagacatctggctgcaatttaagtatgttgctgcactaaccatccactactctgacatcccaatagccccaaaagactgcttgtttatatatatatatatatatacatatatatatatatttatttatttgaatttcacaataacatacctcataccttgtagttgggctttgtgaagggttttggttttctgtttgggaggctggcagcacagctgcctttgtatggttatcatcagtacccctggtactgtagcttctcttattaataaatatatatattttctgccttccaaaaaaaataaaaaaatctaataataaaatattttattaaatactaaatttataaaggaaaaaaaaggaaaatttccacaaaataaataataattatggtaatggtgaaaggcaaaattaata

SEQ ID NO: 20937 - DNA, 315 bp, Glycine max
cccacgcgtccgctcatttcttctcatcttctttttcttccctttaaaattattattccgttgaaacagaacaacaacttcatcaccaacacgaagaacaagattagcgttatgggtctcttcctttctaggaatttggcttgcaaattcatatacccttttcttttttccaataaggtttcaaaggatttgttccccaagcagttggagaacatgatgtctctggtctctcctcgtactggcaggcatttgcagcgctatgacaaaggctgtctccaagttgtgacatgcatttcttacagatacaagaacaat

SEQ ID NO: 20938 - DNA, 432 bp, Glycine max
cccacgcgtccgcacaactacaagaaagaacttccttataaccaaaaccaacaacaactatggcgaagttatcagaagcactacgatgatcagggtcgcaaggtcgacgagtatggcaatgttgagaggcaaactgacgaatatggcaacccggttcatgccactagtgtcacttatgtagccaccaaaagtgttggtggctacaatgatgacgctaataagcaacatgatattactggtgtctatcccgagaaagacaccggtagacatcattttggtcgtggttacgacggtgacactaacaagcaacatgatgctactggtgtttatcccggaatagacattggtagagatcatgggactaccggtgtttatggcctaaacaccgacagacatcatggaacttctggggtgaatcccgggatagacacc

SEQ ID NO: 20939 - DNA, 398 bp, Glycine max
gaaaaccctaaccattccaatgtgctatcgcaattacctctctgcactccaatgacgcgctgctgcggcattcggattccgtgatctgattggcgattgggatccaatcttcatcaatccgattttgttgaaatggagcactatgatctgcaaagacaaagaagggagatgaaaaataaaggaaggaatgttgtgtggtcaattgcgatggataagtgtctaattgaagccctggcagctcaggcaaaacgtggaaacaaaattgacaaatgtttcaatgaaaatgcatacacggctgcctgtgtagcagtaaacacttgcttcagcttgaatttgaataatcagaaagttatcaaccgtttgaaaacaattaagaagaggtatagagtaataaaaga

SEQ ID NO: 20940 - DNA, 430 bp, Glycine max
  modified_base (411)..(411): a, c, g, t, unknown, or other
ctcgtttgttctcattttatcttttttctctctctaaaattctagagcgagaaaagggagagagatcaaagtggtgcaacagttcaattgatgaacaagtgattgactattgatatctccttttgactttccaattcatgttctcaatttccctttgatttctccttctgggatttttttcccctccccctcctcaatttgatactcattttttgaaggtttcacactggaacaattgttggaaaaaaaaatctccaatggttgagtttttcttgttctctgtttggtcttaaatgtgccatcatgatcatcaaaagcatatgaacaacaaagtggggtttgcaaggagtaatgttcattggattggtgaaccaatatttttccagaattggcattatctttggaggattngatattttctggtgatcat

SEQ ID NO: 20941 - DNA, 394 bp, Glycine max
ctttccaaaggatgttgttgacttggttaagaaggatcttgaagtcaagaaggcagctgtggagatagaatcaaatgggtatcatcttttgtttgattttttacatctgcataaggtggaccttaaaactggcttgcaacaacctatagctttgattgatgaggcagggtgctgttttttccccgaaatctatgctgcttctgatgaaaaaccttataatttgagcaaacaggaatgtggaagaagtccggactcatatgcatctaacgaaataaaattacatttagaagttgaaataaatggtgtggatcaatccaggttgagtgagtgcagtggggagtccaatgctctagttaagggtattcaaattgatactaaacaaaactgctgtcaa

SEQ ID NO: 20942 - DNA, 131 bp, Glycine max
caaaattgttgattaagaatgttgggtggttaaacagttcattacagcttccttgtaagttgtaacacagaaatacatatagacttgtatataaacttatcaattaaaatgacatttgtggttaagtgtat

SEQ ID NO: 20943 - DNA, 412 bp, Glycine max
cccacgcgtccgctttttcctactttcttctccatccatcccttgactaattaattatccctgacaactaccaatggccgaagagaaacaccacaagcaccgcctcttccaccaccacaaggacgaggataataagccagtagaaaccgatactggttacgacaacacatcatattccaagccttctgatgactatgactctggtttcaacaagccatcgtatgagtcttctggcggtggctatgaaggtggttacaacaaaacatcttattctagtgatgagccagcttctggtggtggctatgaaggtgggtacaagaaaacaggttattctggtggcattgatgagacttctggtggctatggcgctggtggtggtggatactctgacgtcactgatggtggctacggc

SEQ ID NO: 20944 - DNA, 447 bp, Glycine max
aaagaaatagtatctgggtacccaggatattgtagttgtaagatgggttatctcaattgagtggtgtcatcttcaagccaggttcatgttgcagatgatgcaattgtgagcggcgggggtctaagtcacaatggaaaattcagctacgggtatgctagctctcctggcaagagatcttcaatggaagatttttatgagacaagaattgatggtgttgaaggtgaaattgttggccttttcggagtttttgatggtcatggtggtgctcgtgctgctgagtatgtcaagaaaaacctgtttagtaatttgatcagtcacccaaaattcatttctgacaccaaatcagcaataactgatgcatacaatcatactgacactgagttgctgaaatcagaaaatagccataacagagatgcaagatcaactgctttcactgctattttaggt

SEQ ID NO: 20945 - DNA, 411 bp, Glycine max
cccacgcgtccggtgccatcctgcattatctgtttagctcaaataattttgtgaagcatttttattggtagaaatggagagtgagtcggtgaaacgcagaattcacatgattgctgctcactttgcacccaatgatgatatttcaactacccacgttctgcctatgaactgtagtggcagtctgaactctgtgctccggagatgtgataataaggtgtattttgcacgccaagcatctgcttctcttggttattttatgaggcagacttcaattgaagagggtggctcaactggctttattgctcccaaaacccatcctggtgctgctgcatctgaaggtccttctaatgcaagagcaccatgttttgctaaacctgcaagggcagaatcagtctttacaaattcagtggt

SEQ ID NO: 20946 - DNA, 434 bp, Glycine max
cgctaattaacccttttctccccagcattcaatttctattagtatccaaaccttgattgcgttgttggattttcttgtgggtagggggtttctcctctctttctctgcagtttgatggatcgggaaggaggatccaacgccggatcttgctactactccgttctcgggattcgtagggatgcctccttctctgatattcgcactgcctaccgcatactcgctatgaggtggcacccggacaagtgggctctgaatcccgcaaccgccggcgaagccaagcgccggtttcagcaaatccaagaagcctactcagttctctccgatcagtctaaaaggtcaatgtacgatgcggggctctacgatcctttggaggaagaagaccaagtccgtaaagttttttcctttcattttttttcaattactatttttataag

SEQ ID NO: 20947 - DNA, 435 bp, Glycine max
  modified_base (307)..(307): a, c, g, t, unknown, or other
  modified_base (313)..(313): a, c, g, t, unknown, or other
  modified_base (330)..(330): a, c, g, t, unknown, or other
ataaagctaaggagaaatattgagaagcaggaagaagcaagttatggcgacgaagcagcttccgcagatcgccattctgggagctggtatctttgtgaagactcagtaccttccgagactctccgagatctctcatcttttcattctgaaatccatttggagccgcactcaggaatcagctacagctgccgtagacatagctcgtaagcattttccccaagtagagactaagtggggagataacggttttgatgacatcattcacgatggatcaatcgatgctgttgccgtggtcttggctggacanaatcangttgacatctcactcangttgctaaaggctggtaaacatgtgctttaagaaaaacctgcagcattctgtacaagtgaattggaagctgcattggctaactacaaatctatttcttctgatgc

SEQ ID NO: 20948 - DNA, 403 bp, Glycine max
  modified_base (74)..(74): a, c, g, t, unknown, or other
  modified_base (77)..(77): a, c, g, t, unknown, or other
  modified_base (157)..(157): a, c, g, t, unknown, or other
gccctccccagccattaactgaaaaaaaaaaccaaaaaaccaaaaatactacaaattgttttcagtttctccgncgncgcacaaccaccaccttcttcgttcggatctccggcggacctactatccctactactactctactctatttacacgggangaacaaaaactattccccttccccaaaaaaaaccccaaagcggctcgggtaggggttaagtttggaccatttcgtggaatctaatttttcattcggaaaaatctaattttgaggccgcgagatggccgagattcaagtgcagcatcagagtccggtgtcggcgggttcttcttcaaacggcggcgtggcgaacgccccgaacaacgcgaaccagttcgtgacgacgtcgttgtacgttggcgatct

SEQ ID NO: 20949 - DNA, 390 bp, Glycine max
  modified_base (339)..(339): a, c, g, t, unknown, or other
  modified_base (348)..(348): a, c, g, t, unknown, or other
  modified_base (357)..(357): a, c, g, t, unknown, or other
catggatccagtgagcgtgtggggtaacacgcccttggcgacggtggatcccgagatccatgacctcatcgagaaggagaagcaccgccaatgccgcggcatcgagctcatcgcctccgagaacttcacctccttcgcagtcatcgaggccctcggcagcgccctcaccaacaaatactccgagggcatgcccggcaaccgctactacggcggcaacgaattcatcgaccagatcgaaaacctctgccgctcacgcgccctccaggccttccacctcgacgcccaatcctggggcgtcaatgtgcagccctactccggctcccctgccaacttcgccgnctacaccgncgtcctcanaccccacgaccgcatcatggggctggatctccc

SEQ ID NO: 20950 - DNA, 384 bp, Glycine max
  modified_base (341)..(341): a, c, g, t, unknown, or other
gtaagaacttgtttttctttctcaaactgctccttactagatttgaagaggaattgggcatggtgagttaggcacatggttatttgctttatttttgtcatatagctcttatgttaaactctgcttcgaacttgtcttgtaaaaaaaattgatggtgtaatttgtaaatccgtttccaataagttgttattgttgacataatgtgcataaagttaagtggtgtgttgcattattactaaatgtaatgaggacttaatcatttgcggtgagacagttactgctaatataattcacaaaaatttatgtgacatacataatattttctggcattatttcagcanatcttgcaagccaagatcaccaatttgaaaatatctgcaaaaa

SEQ ID NO: 20951 - DNA, 453 bp, Glycine max
aaggtatagattagattagaaatccttctcccttctctcttctttcttcttcttctcctgacccttattattattccttgcccttaccctttaggcaagggaaggaagaaagaataactatattattatctttattgtaatctatctttttattataattataattataattattgttgttattattccttaaatatggattcgccgtgtctctccaacgattcggtttctggattcaaagacaaggagtcaatggttgacccctttttggtcgaggctctccagaaccctcgtcaccgcctcaccattttgaggatggagctggagatccagaagtttttgaataatgctgatcagctgcattttgagtttcatcatttcccttcttcctatctccgactggctgcacaccgtgttgctcaacactacaacatgcaaacaatggttcaagat

SEQ ID NO: 20952 - DNA, 442 bp, Glycine max
gtgatacagaggtagtttctgaaaccacaaaggctggtggcctacgtggaaaattgaataaggtggtgttggcttacagtggtggcttagacacatcagtcattgttccatggctgagagagaattatggttgtgaagttgtttgcttcactgctgatgttggccaaggtataaaggaattggaaggtttagaacagaaagccaaagccagtggagcctgtcaattagtggtaaaagatttgaaggaggaatttgtcaaagattatatatttccttgcctgcgtgctggtgcagtttatgagaggaagtatttgcttgggacctcaatggctcgccctgtaattgcgaaggccatggttgatgttgccaaagaagttggagctgatgccgtttcccatgggtgtacagggaaaggaattgatcaggttcgattagagctcac

SEQ ID NO: 20953 - DNA, 421 bp, Glycine max
cccacgcgtccgcgtgtccatagttgcaagttatctaagcccagtttgtgtttcactgacacgccgtttccagtaacaacaaaacatcatgctttctcgcccctcacatcaatttttctgtttctgagatccgcgccttctcttcactttcagatggttctgtctctgtagctcggaatcagacgacaggagaatttgctgggggagagtttcaatttttcaaatcctgtcgttgattcatttgggggaggaggatggaaagaaagtgaataaccttctggaaatgaatagaggggaaggagcgaatgatggtttttctggacctggaccaaatgattcgcttcttactggtcttattgatgatgttgccttgaattgacttgcttggcttactggatccgattatgccgcactatcgtgt

SEQ ID NO: 20954 - DNA, 426 bp, Glycine max
agcgagcgagcgagcagtttcaaagagaggatttgggattgggaaggcgagggattgcgctgcgtctgttcctcttctctttcgattcatccctcattcataatcttccaatccaacaacctcagcctcacactcacacatacacacatctgaacgcgtatcgtccctcccatggcttcaaagcgcatcctcaaggagctcaaggacttgcagaaagacccaccaacttcttgcagcgctggtccagtagctgaggacatgttccattggcaagcaacgattatgggtcctgctgatagtccttatgctggaggtgtattcctagtcactattcactttcctccggattatcctttcaaacctcccaaggttgcctttaggactaaggtgtttcatccgaacatcaacagcaatggtagcaattgg

SEQ ID NO: 20955 - DNA, 442 bp, Glycine max
ctagttccacggatgcgggttgttaagggaacaggcaaagctatcaattacttgacccctcccagaatcttacttgctttgatcactgcttggttacggcaaggtcgctggtttgatgatcagggaagagcattatatgcagctgaagcagaccgacttcgtaattgggccgaagatcgagcccggttttctttcactgatgcaatggaaatgtacacagagaacacctggttatcagtcttctcactttcagttgtctgtgccttcataattctttccagcacaggcagcaatttgcctggaacatgacgatgtattgctggcaatgcaaaaatgcatttgcttttgtggacaggtaattggtgcctgaaatcatcaagacaatagaatgaatctaaagtctaagttataaacaaagtggatctggttttttcccaccatg

SEQ ID NO: 20956 - DNA, 288 bp, Glycine max
gaaaaactgtaggaaagtgatagcacagaataggaggggagctgagctgacgatgattcagtatgagagcgagtataaaatgtgggacagctgcatgatcgataaacaggagttctcgccggagagagaagctgtgcctgaatcatttgatgatgaagttaactcagagatagaagaaggtggtgagagctttgatgagatcaatggatatgctgtctcagagaacactgatgagagcgggagcccaccatctggacaactgctattgaagaagaagaagaaaccttt

SEQ ID NO: 20957 - DNA, 437 bp, Glycine max
cttcgctagataccgtgtcttttgtactcattattgggtctgcaaacaaagacaaggagagagagaaagaattgatggaatagaaaaaggaaataaaagaatgaattggagaccacacactccaccgttctcatctaaaacttgcctctcactggttctctccatggaatagaaaaaatataaacgatacatccaaaggaagagagatagagaaaaaaaaacttgataagtgatttaataggaaagaaagagagaaagaagacattgaggagaaaatgatatggaagaaaaaataaataatgtttataagagttgaacgaaacaacaaggacaagtagttagtgtggagtgtacacttcaacttgttctaaaataaataaaattattttgttaattttgtttacacaatatgttaattattttctcaaatttttttt

SEQ ID NO: 20958 - DNA, 438 bp, Glycine max
cccacgcgtccggttatcaacccactcttagtactgaaatgggttctttacaagaaagaatcagcttctaccaaagaggggtccataacttctattcaagcagtttatgtacccgcagacgatttaaccgatcctgcgcctgctacgacatttgcacatttagatgctactactgtactatcaagaggattagcggccaaaggtatctatccagcagtagatcctttagattcaacctcaactatgctccaacctcgaatcgttggtgaagaacattatgagactgcgcaaagagttaaacaaactttacaacgttacaaagaacttcaagacattatagctatccttggcttggacgaattatccgaagaagatcgcttaaccgtagcaagagcacgaaaaattgagcgtttcttatcacaaccttttttcgtagca

SEQ ID NO: 20959 - DNA, 378 bp, Glycine max
gaatcttgttgaaattttggaaaaccagaatccaatagatgttgcgaaatacatgaattttgtcagtgccccccaagctggtgctatagctacattttcaggcacaacacgagacacctttgaaggaaaaacagtcatggagttgagatacgaagcttatgttccaatggcaatacgctgtatcaagtcaatctgctcatctgctagagcatcctggaacctacattccattgctgccgctcatcgtctaggcacagtgcctgttggtgaaacaagtgtctttgtcgctgtctcatctgtccacagggccgatgcactggaggcttgtagattttttatagatgagataaaagcacaagttcctatttggaaaaagga

SEQ ID NO: 20960 - DNA, 455 bp, Glycine max
  modified_base (272)..(272): a, c, g, t, unknown, or other
ttcaagtttcatatatgggattccctggaacaactggggctacttacatagactacggagtgactgatgagtttgtttcaccactagggtatgcaaatatatattcagagaagattgtacatctcccccattgctactttgtaaatgattataaacagaaaaatcaagatgtgttagatcccaactgcccacacaaacgatcagattatggtctacctgaggataaatttatatttgcatgcttcaatcaactgtacaagatggatcctganatatttaatacatggtgtaatattcttaaacgtgtacccaacagtgcactctggctcctcagatttcctgcagctggggaaatgagactgagagcatatgctgctgcacaaggggtacaaccggatcaaattattttcacagatgttgccacgaagaatgaacacatcagaagaagttcttta

SEQ ID NO: 20961 - DNA, 435 bp, Glycine max
  modified_base (337)..(337): a, c, g, t, unknown, or other
acaacaacaacgacgacgacactttgacacacctaaccctccaaattcctatctctcttcgaatggaatccgcagctctgtcgcgcataggcctggcgggcctggccgtgatgggccaaaacctagccctgaacatcgcggaaaaggggtttcctatctccgtctacaaccgcacagcctcgaaagtggacgagaccgtagatcgggcccgcaacgagggctccctccctctcacgggccaatacacccctcgcgacttcgttctctcccttcagcgccctagatccgtcatcatcctcgtcaaggccggcgcccccgtcgaccaaaccatcggcgncctctccgaccacctcgaccccggcgactgcatcatcgacggcggcaacgagtggtacgagaacaccgagcgccgcatgagcctcgtcgccgacaaag

SEQ ID NO: 20962 - DNA, 439 bp, Glycine max
tttccttctgtctctctctgacctctgatatttctatattttggttctctgtgtctgtacgatcaggatccaacggtccaaaatgttcggggcttgtgctgtttgttttcccaggttttagagctccaaaccttcagatccacctcattcgtctccagatcttccttcctggataacgttttcgggttcgagaaggcacttgtgttgtttttcgtacgaaatggagactaaacagagttcggtgacggttacgctcagttacggcgcgttgacgtgcgccgcggaatttctcgcgactttgctagcttctgctgtcgtcaaagcctcgcttttggccccggatctctaccggctgctattgatcaacacgcctactgccaaaggagagagcaaaattcagagtgaagacaagcaacgtgatgcagagggagaagatggt

SEQ ID NO: 20963 - DNA, 433 bp, Glycine max
aaaataaaaggagactcaaaaaagagttctccgtcaactgaatctccatcatttttccccttgcgcttcttcgtgttttttcttctctctcacttttgcttcttcacgatccactctctctgtttcgttgtggtggtgctgatcgcctgcgttcatggtgatcgagcatgacattgagagctgcgggagcagagcggtgcaatcttcgcacgcgcaccaccctcggcaccaccggcagaagctggaggtgtccaatgaggtccttcgacgaattcaggaatcggattgcgaggaggcgcacgttccaggcttcgacgatcagctttggctccacttcaatcgccttccggctaggtacgcattggatgtgaatgtggagagggcagaagatgttttagctcataagaggttgcttaagttggcggaggaccct

SEQ ID NO: 20964 - DNA, 382 bp, Glycine max
  modified_base (349)..(349): a, c, g, t, unknown, or other
cacaaagagaagcattagcactaggagcagcaacaactagtctcagctgaaatggcctcttcagtgatggcatctgtggccctcaaacctgcccctttcactgttgagaagtcctcagtgagaggccttccctctctctcaaggaactcttcttcattcagagttgtggccagtggcaagaagatcaagactgacaaaccttatggaattaatggtggcatggctttgagggatggaactgatgcatctggcaggaaaggaaagggaaagggtgtttaccagtttgtagacaaatacggtgctaatgtcgatggttacagtcctatctacgacaccaaggactggtctncaacccgtgatgtctacgctggcggtacgactg

SEQ ID NO: 20965 - DNA, 423 bp, Glycine max
atcatatatggctagtagttgtttctccatgacaacaccaatcttcaaaattcgcttcttcgtgattcttatgctttattgggataagttcatctcaattgtcctctgacttttactccacaacttgtcctaatgcgctttcaaccattaagagtgcagtggattctgctgtgagcaatgaggctcgcatgggggcttccctcctacgtcttcatttccatgattgttttgttcaaggatgtgatgcatcagtgctattgaatgatacatcaagtttcacaggtgaacagacggcagctggcaacgttaattccataaggggttttggtgtaatagacaacatcaagtctcaagttgagagcttatgtcctggtgttgtttcttgtgctgatattctcactgtaactgcaaaggaactctgtg

SEQ ID NO: 20966 - DNA, 428 bp, Glycine max
gatgcacaaggcttgcctattgatggaaatagaaatgttctttaccagcgtgtacagaaagcaaggagaataaatcgatctcgtggtaggcccctttgggttcctcccgtggaagaggaggaagaagaggtggatgaagagctggatgcattaatttcacatataaagctggaggaaggaaatacagagttctggaaacgtcgctttttaggagaaggcttaaatggtgatcaagaaatgccaacagatgcagctgaatcagaggtccctgaagttctggatgacgttgatgctatagaagatgcttcaaaagaaggtgaagatgatgaaacggatgatgatgaggaggaagcataacaggcataagaagaagtagaaccagcagagaacctagatgtaaacaggattaaggagaacgaagttgaagc

SEQ ID NO: 20967 - DNA, 285 bp, Glycine max
gattgacttgtgtccaccacggtgacccatttctgtatcttctggtgaaaagctaatttgttcactctaataagtgtacagtgctaaagggtaaactttgaaacctagcttcctagttgaatcatcagaagcttataagtcgaatccatatttttctggacgtttagactttctttgatttccctgggaaatgatgatgatgcttgaagatatgggattttgtggggttttggatatgttttctgctccccttggaaaaggggatattaccgcccggcaaactga

SEQ ID NO: 20968 - DNA, 333 bp, Glycine max
  modified_base (123)..(123): a, c, g, t, unknown, or other
gtgataaatatggaagtagaggtgaaaaatcagagcatcaaaagaaaaccccatctaaatcaaaatcagaacaatttgatgggagtgggcccttacgaggaaattacaaggagtatgattcanaaggaaaatcaccatctgattctggatctgctgaagttaagcatcatttgagtgatggagaaaatgctaccagtgaagaaaattctaaactctttggagatgtgtttcaggaaccaattagaactgcaaaggactcaacaatcctgaatgataacgggacactgacttcagtgaatggtaaccttcagtcagaaaagtcaagtgaaaatg

SEQ ID NO: 20969 - DNA, 374 bp, Glycine max
cccacgcgtccgattcaaacaaccccttcttcactttcattcaaaaccaaagtcccacaccgaggaaaaccataaaattttagctctccacgtgtatttgaatcaaagtcttttctaatggtaggtgttgaatttggttaaccagtcttggaggtaatgctaatagtaattgctaagtgcttacaacaatgtttttcactttcttagacaattttcttttctccaacaccatgttcttgctgttgttgcttgtgaaaccgtattattaatcagtttatttatctgttcttccctgttatgtcttaatttgcataggtagatgtatagaactgattgttactccttggtgatttgagggtcttgcgttttgaagt

SEQ ID NO: 20970 - DNA, 405 bp, Glycine max
atgagactcgtgaaaagatgattcaggaaagaaaatctatggaacaacagcttccgaaacaggctagcaagtccaatgatttaacaacaaatgggacagttatgttgcccaagtctcatgatggagccttgaagaatgaatcagctactacagatgaagcaggacaaaaggagaagctggtagaagtgaatggatcaactcaagcatctgaagactgttcaaagaactgctaaacccgtgacagtgcaagacaagagagtggttaaagaatgtagcttccagtatcccctccccctcttttcaatcccttttcatacattcctttagtatggagcgagttttggtgttttcttgttccttgttatccctgtttattttgtttgtccttgggattctaatggatgt

SEQ ID NO: 20971 - DNA, 382 bp, Glycine max
  modified_base (354)..(354): a, c, g, t, unknown, or other
ctttgagggatggaactgatgcatctggcaggaaaggaaagggaaagggtgtttaccagttggtagacaaatacggtgctaatgtcgatggttacagtcctatctacgacaccaaggactggtctccaaccggtgatgtctacgctggcggtacgactggcttggctatctgggctgtgactctacttggtcttttagctggtggtgcacttcttgtctacaacacaagtgctttggttcaatagactttgcaaatcgatgtttaagttataacatagtccatgtaactatctaaaaatgaagaactattcgtgaagtactttgtggatatgttccttctgttctataaatgantggatgtgaaaaaaacttttttgttagt

SEQ ID NO: 20972 - DNA, 429 bp, Glycine max
  modified_base (412)..(412): a, c, g, t, unknown, or other
ggagttgtaaattaagagcatggctgcacaagctcttgtatcatcatcttctcttaccttctgggcggaggctgcaagacaaagtcttggaccaagatcactccaatctccatttggcttctccagaaaagcctcctttcttgttaaggcagctgctaccccccctgtcaagcaaggatcagacagacctttgtggtttgcatcaaagcaaagtctttcttacttggatggcagccttccgggtgactatggatttgaccctctgggactttcagaccctgaatgaacaggagggttcattgagccgaaatggctagcatatggtgagataatcaatggtcgttatgcaatgttgggtgcagttggtgcaatagcacctgaaattctatgcaaggctggtctgatccctcangagacagcactcccatg

SEQ ID NO: 20973 - DNA, 432 bp, Glycine max
  modified_base (243)..(243): a, c, g, t, unknown, or other
  modified_base (252)..(252): a, c, g, t, unknown, or other
atatattctcgccggccaaaattaaaattaaaattaaattaaataaaaaccctagcttcgtttttctctttctctctctctctctaactactctgtttctctctctacggtagatcggcggcgaggaggatatggacgacgacgacgagatccagtcgcatccttcgccggcgagcggatcccctccgtcgtcgccgagggcgaacggtcggataacggtgacggtcgcggctccggcgccgncaccaccgncgaacagtctggcatagcgctttccaatcagcaacccgccaaagggaaccggcgaagaagaagccgccgccgccgaagggaagattgctggagcgaaggtgcgacggccgtgctgatcgacgcgtggggagagaggtatctggaactgagcagaggaaatctgaagcagaagcactggaa

SEQ ID NO: 20974 - DNA, 450 bp, Glycine max
gtcagggagtgatcactgatcctcaccttttaccacacacctacttccaaacccacatgagggataacatgaccatgactgccactactgatcaatggatgcagttctatcaacaacctctaatggatagccatggccatgatcatgatcatgatcatgatcatcatgctttggcaccaaacaccacagaaggcttctctagttcttccactcctaccatgccttcatcagagagcaatagcatcttgagccaattgagtccaaagggtaatgtatccaaaccaataagaagaaggtctagagcctctaagagaaccccaactacacttctcaatgccaaccccaccaattttagagcattagtacaacaattcacagggtgtcctcgcacaaccatgtcaacactaggggtccataagggccctattaccttgaattttcaacaaggaa

SEQ ID NO: 20975 - DNA, 438 bp, Glycine max
  modified_base (203)..(203): a, c, g, t, unknown, or other
atcgttttctacataatacaaacctctctaatttttgaagcttattatacccaatctcgatatgcagatcttcgtgaaaaccctaactggcaagacgatcaccttggaggtggagtcctctgacaccatcgacaacgtgaaggccaaaatccaagacaaggagggcattcctccggatcaacagcgtttaatcttcgccgganaacagctcgaagacggcagaaccctcgccgactacaacatccaaaaggagtccaagcttcaacttggtccttcggcttcgcgggcggatgcaaatcttcgtcaaaacccttactggcaaaacaatcacgctagaggtggagtccttcgacacaatcgataacgtgaaagccaagattcaagataaggaagggattcctccggatcaacaacgtttgatcttcgccggaaaacaac

SEQ ID NO: 20976 - DNA, 356 bp, Glycine max
  modified_base (266)..(266): a, c, g, t, unknown, or other
cccacgcgtccggtccccaagacccccgagatctcatccttgctttctgctgctcctttggagggtgctgctgatcaggttcagaagaccaacaactcgcaagatgtggtggctgcacaagatgattctgcaaaaaccctttccgaagagcttgcagacattgaatcccagctcaagttctttgagaccccttcttttcttgatgaagcctgggctgatgctacattggcgtctttgctcggcggagacgcaactcatgacgccgncggaaaccctatgaacctttggagcttcgacgacctgcctttcatggcaggagtcttctgaacacccttaatttcccttttatgaaatta

SEQ ID NO: 20977 - DNA, 462 bp, Glycine max
  modified_base (438)..(438): a, c, g, t, unknown, or other
  modified_base (456)..(456): a, c, g, t, unknown, or other
tttgcattggagcaacaattgcacacagcaagacaagagctgagtcatgctttgtatcagcatgatgctgcttgccgagttattgcaagactaaaaaaggaacgagatgaagctaggtccttacttgcacaagcagagaggcagttccctgtttctgcaccaaatgccataacagcaaatgcccccgtcctgagcaatgggaaaagagctgctgaggatgaggatctggctcctggtgcaaagaaaattcatcctggaatatcttctagcataatttctgagctaactgattgcaatgctgctctttcccagcagagaaagaagcgacagattcctccaactttggctcctgtcgaagctctagaggcatatacccagatatctagtcatccctttcacaaaacaaacaaacaaggcattatatctctggatatcctntattctaaggacttaatngcaact

SEQ ID NO: 20978 - DNA, 370 bp, Glycine max
caaacaaacaaacaccaccaacaacaaccactcctcttctttttcaccctcgaatccacgctggctttacaccgcgtttggatctccgttaaacaaaaccattaaaatgtagcgagagaaaaacaaaaccgcaaaagaaaatcagttaatttattaattttatttttttatggctttccacgaccatctccagcacgaaatagcgttccagcgtttcacggaggagcaagagttgaccgagaacagagacatgcagcagaggctcccaccttcgacatggctcaacaacgttaacgcgcgtcaacagaatttcctcgacaccgagaagagcgtggatcggaacaaccgaaagcgagagcaattgcgaatc

SEQ ID NO: 20979 - DNA, 402 bp, Glycine max
ccacggtatatcaacaagaagagacaaaattattgcactggtaatgattatactagccgtggttacaagtgtgcttgccatttccaccaacatatttaatgcttttagtagcaagtcataaatacaagctggttctctcttttctccccttctctctctctctctctctctctctctctctctctctctctctatatatatatatatatatatatatatatatatatatatatatatattatagaaaaatgtatttggggagagagggtgtgactggggagattctaggggcaatttggttgctgcggcgattgtgttacttgtgtaatttggatgccttgattattgtagaattcatatgtcttgcggcagcatttctatgtaaagtagcaaatactatta

SEQ ID NO: 20980 - DNA, 411 bp, Glycine max
  modified_base (401)..(410): a, c, g, t, unknown, or other
gtgacaaccatcattggaggaggtgactccgttgccgctgtggagaaggttggacttgcagacaagatgagccacatctccactggtggtggtgccagcttagagcttcttgagggaaagcaactccctggtgtccttgctcttgatgatgcttgagcaaaaatcattcgttcctttgaagtttgtgctttatattattattatggttgggtttcagccaacagtggattaaggtacaatgagagctgcgagctcttgctcctgtagaggcttaatataggataggtttcaaaataagagggttttgtggcatccttggtgttgcattgagctttgatctaattgttcttgaacaatgttcatttccaaatgagtttactttgttggttaaaaaaaaaaannnnnnnnnna

SEQ ID NO: 20981 - DNA, 434 bp, Glycine max
attttctttactcaaactttctttcatgacaacctaacagtataagagggggaatttataataagcaagcgtgtgttgagattaaataacacggaaatatgaaaactcagaaactgtgactcattcctctttgactccgattccgcattgcattttccttgtgttacactctcccttcctcttttctttaatcattcgtcttttcaaaaccttaaaccatactaccacatatatattaaaaaaacaaactactataacctattgaaccccccaaatcaactactattccttaatttcttaaatccatggtttcttcctccgaccaaacacactattgagctaattaagacggaaccatgtcgccgatgaagttctgggttacgcagcccaacaaacaacacgccgtgaagctgacccaattgaagctcgaatta

SEQ ID NO: 20982 - DNA, 455 bp, Glycine max
  modified_base (427)..(427): a, c, g, t, unknown, or other
cccacgcgtacgaccacgcgtccgcaacagcttgaaaaggctgccataaatcatgggcgacagattgtcaggtttactcagcggaatatactaagggtgtatccaaaaggtactcgcattgactcatcaaattataacccattaattgggtggatgcatggagctcagatggttgcatttaacatgcaggggtatgggagatctctttggttgatgcatggaatgttcagagccaatggagggtgtggttatgttaaaaaaccaaattttctattggagactggtccagatgacgaggtcttcaatcctaaagctaagttacctgtgaagactactttgaaggtgactgtatatatgggggaaggatggtactatgatttcaagcatacacactttgatcaatattcacctccagacttctacacangaatggggattgctggagtccctaatga

SEQ ID NO: 20983 - DNA, 155 bp, Glycine max
  modified_base (3)..(4): a, c, g, t, unknown, or other
  modified_base (135)..(135): a, c, g, t, unknown, or other
  modified_base (149)..(149): a, c, g, t, unknown, or other
cgnntccgcttttgtctcaatttcgtaccgcccctcaacccagccgtgaatggacccctcgtctccgccacccgcgcggcgcacccgcatacccctccgtctaccccacttcccaggagccacctccgagccgcnctgcctccgcgtantccccc

SEQ ID NO: 20984 - DNA, 441 bp, Glycine max
  modified_base (361)..(361): a, c, g, t, unknown, or other
gacagacagtggcaatgcatggaggggacagtatgaagataactcagctgcctcctttaataggtaaaggaaggatgtcaaatgctgacacttaagagagatcaacttgtgcatttcaattggtggagaaccaacttaacctaataaaacttttggttggtgattctcaaatgaaaagtacacatgcatttcaaatgatgcagtttattggggtattgtagaagaggtggactcacataactgcatcctagttttcttcaccacatcacttttgatggtgtctagtttagatcctcaaatatagcaagagcagtttccgttactactgatgccacagatcctatacctttggaatcaactnttcttgtggttgttggattaagatttctttttcattttttgcaaggtacagcagaatagggcagctagtgtataatatga

SEQ ID NO: 20985 - DNA, 277 bp, Glycine max
cactgatcctttcatttgcaaattgcaaatgcagaaaggaaaagcggattctgtctccatccggagttcccttcctgaagatgttgccctcaaaattgcttcgctgcttcaggtgcgggatttgtgtgccttaggttgttgttcgaggttctggagggaactctgcttctcagattgcatttgggagtctcttgtcagaaacagatggcccttactctcttccttccatttcccttcttcttccactcattctcccaatttcaagaagtggaggaaa

SEQ ID NO: 20986 - DNA, 227 bp, Glycine max
tccctgaaaaaaaaattgaggaaggagagtgttagaaggagagataagaagaagaggagaatgatacctacccagcaagcaggatgtagagaaaaaaaaaaaagattaacaaactgttgatttgatttattttgatctgcttctgctgggtggttgtcaatgtctgcacctatgatcattgaccatatggcgatattgttaccataaactgaatcaacagcaattat

SEQ ID NO: 20987 - DNA, 80 bp, Glycine max
aagtactaagttgagagtaaaaatagagaagtgaatgtgtcataaccagtatcattatactggggacgactactgattat

SEQ ID NO: 20988 - DNA, 167 bp, Glycine max
  modified_base (70)..(70): a, c, g, t, unknown, or other
aagtcaatagatagttagcaatgtatgatatatgaaatgtgaagttgagcacattgtatgcagagttganaccggcaaactcggcctaactcgtgtcgagcattttctttttccgcgtttgctccattctttcattggtcttctggctcttaattattttctatctc

SEQ ID NO: 20989 - DNA, 137 bp, Glycine max
cataaatgctatgtataatttaaatctaaatgaaagctccatcaaacaagtatttaatgctcgtgaaaagggcagatagatgtaaagaattgagttaatgcagaacttgttatcgagtttgcgacattcattgattg

SEQ ID NO: 20990 - DNA, 236 bp, Glycine max
aaaaaaaaaaaaaaataaaaaaaaaaaaaaaatataaataaaaaaaaaaaaaaaaatatataatgaaaaagtaaaattaaattgaggagtaatattaaataatatatttttatataaaattaaatttaaatatatttatataatttttattttacatgaatctatttttttaattattatttaaaaccttcatacattaaataaattaaaaatttgtttaaattatattagtatat

SEQ ID NO: 20991 - DNA, 419 bp, Glycine max
  modified_base (387)..(388): a, c, g, t, unknown, or other
caggtagctgcctcacgatccattcaaagcacccctttgtgccccacttctggatctgcacgtgacagagcccaaaacctgttaaagcctccatcttttgcttccaaggtgtttccttttgtagggaacaacaacaaacgctccaaactcagcctcagaggccttcagatcagtgcaaggaaatcagccccttctgaagtcatccccgtgtcacccgaagatgatccaaagattgaggagcatttgcaacatttacgtggggtgcagccatttggtgagaactctgttggtatgtggtctaagcccacgtttaggcgcaaaacgaagatagtgtgtactattggaccttctaccaatacgagggaaatgatttggaagctggctganngctgcatgaatgttgcctcgttgaatatgtc

SEQ ID NO: 20992 - DNA, 357 bp, Glycine max
ggaacttaaaagcctagatgattatgttgaaaacatgggagaaaaccaaaaggctatctttgacctagcaactgacagcttgaagagtgcaaagactgctccatttttggagaaattggttcaaaaagatattgaggttctttatttggttgaacctattgatgaggttgccattcagaacctacagacctacaaagaaaagaaatttgttgatatcagcaaggaggatttggaattaggtgatgaggatgaggtcaaagagagggaaaacaagcaagaatacaacctactctgtgattggataaaacaacaacttggtgacaaggtggccaaagttcaaatctcaaatcgcttgag

SEQ ID NO: 20993 - DNA, 382 bp, Glycine max
tcggtccggaattccgacgctacgccccacgcgtccgcttatggtagtgccgtagtggcactttgtttacttcgaagttggcaatgctacatagattatggttatcattgcaagctagtatgaatacatgtgaaaaaaatcggtggttttgtaattaatgcttatcatataatatggtcattgaggtattagtacgcttacattgcggtattagtccttgattttgtttgatgtaaaatgctagttttccataaaccaaagattgtggaactttcatcacatttacctggggtgcatccatgcttggagaactctaggatgatctcgactaagcccacgtgtaagctcttaatgaatagaagtttgacctattgtacctttt

SEQ ID NO: 20994 - DNA, 305 bp, Glycine max
atcattttctctcttctctgcttcttcttggtcaaatcttaagagctgaggagaatcaatcgggagaaatatgtctggtatcgctcgtggacgccttgctgaggaacgaaagtcatggcgcaaaaaccatccacacgttcgtatcactacttccttctcttttttctctgcttttatttcatcaatttcatttccccctttcgttacaatcaatgcttggtgctctcaatttttttagggtttcgttgccaagcccgagactctacctgatggcaccgtaaatttgatggtcttgcattgcacta

SEQ ID NO: 20995 - DNA, 277 bp, Glycine max
actgtggttccattgtatatcagcaaccttaatactgccttctaacaaacagaaaagacattgaacttcttagaaggcagtactgtggttccattgtatatcagcaaccttaatactcatgcttcgatttttgtactatatataagatgtaattatgttagggagatgcacaaaacaaccgaataggtttgtactaaatttctaacgaaatgcatgtaaaattttcagttccattggtttataaaaaaaaaaagagcaaaaaaaaaaaaggaagaac

SEQ ID NO: 20996 - DNA, 122 bp, Glycine max
  modified_base (14)..(14): a, c, g, t, unknown, or other
  modified_base (46)..(46): a, c, g, t, unknown, or other
  modified_base (60)..(61): a, c, g, t, unknown, or other
  modified_base (111)..(111): a, c, g, t, unknown, or other
  modified_base (113)..(114): a, c, g, t, unknown, or other
gcgaccattttcanctctccgtattcgcagaagtttcactttcaanaattaatcggaagnncaacgtgaaatgcatatcaataatcaagatgtgattaattaattagtaananntagcacaa

SEQ ID NO: 20997 - DNA, 297 bp, Glycine max
caatggttattggtcatgagtgtgctgggatcatagaagaagttggtagtcaggtaaagagtttggtgcctggtgaccgtgtggcaattgagcctgggatcagttgttggcattgcaaccattgcaaacacggtcgatataacttatgcgatgatatgaagttttttgctactccaccagttcatggttccctggctaatcagatagtgcatcctgcagacctatgttttaagctgccagacaacgtgagcctagaggagggagcaatgtgtgaacccttaagtgttggtgttcatg

SEQ ID NO: 20998 - DNA, 441 bp, Glycine max
  modified_base (379)..(379): a, c, g, t, unknown, or other
  modified_base (387)..(387): a, c, g, t, unknown, or other
cgcatgaaaagcggatcagttggattcaagaaggaatatctcgatcaaccggacattcccagcacatggaaagcaatggaggcactctatgactcaggcaaggcaagagccataggagttagcaatttctcttcaaaaaagcttcaagatctcatgaatatagcaagagtgcctcctgctgttaaccaagtggaattgcacccaggatggcagcagccaaagctgcatgcattctgtgaatctaaaggagttcatctgtctggatattctccactgggctcaccaggagttctcaaaagtgacattcttaagaatcctgttgtgatagagattgcagagaaattggggaagacaccggcacaagttgcccttaggtggngactgcanacaggtcatagtgtgctgcctaagagcactaatgagtccagaatcaagggaaac

SEQ ID NO: 20999 - DNA, 440 bp, Glycine max
gtgatctgcaacaagcaagatctgcgagaaaaacaacaaacaaaacaatggcgagtcggttcgggttatcgtcttcgtcttcctctgcgtccagcatgagagttaccaacacgcccgcgagcgacctcgccctcaccaacctcgccttctgttccccctccgatctccgcaatttcgccgtccctggccacaataacctctacctcgccgacgtcgccgattccttcgtcttatctctctctgctcatgacaccataggcagcggtcagattgcgttgaatgccgttcaacgccggtgtgccaaagtttcttccggtgattccgtacaagtgagccgatttgtgccgcctgaagatttcaacctcgcactgctaactcttgaattggaatttgttaaaaaggggagttagagtgagcagattgatgctgttctactggct

SEQ ID NO: 21000 - DNA, 398 bp, Glycine max
cccacgcgtccgcccacgcgtccgcccacgcgtccgaacaatattaggagcagagaagatgctgttgaattggtggatcctaccattgcaaagcatgtcaaagaggatgccatgaaggtgttgaaaatcgcaacactgtgcaccgggaaaattccagcttcaagaccctcaatgagaatgttggttcaaatgctggaagaggcagatccatttaccacaaccaaaatgattgtgaccattgatgcttaaataagttgctccaaagaaggacaatttttctctcaactgcagacttttgagttttccactttggtaattaagcagctcataaagtgaggctgagaaggggtgataaatactagtaaatatgaaaacatgccttgatcttgggttcaatt

SEQ ID NO: 21001 - DNA, 362 bp, Glycine max
  modified_base (289)..(289): a, c, g, t, unknown, or other
cccacgcgtccgggagccagttttggtgtcatattatcatacactattaaactcgttcctgtgccggaaacggttaccgttttccgcgttgagaagactcttgaaacgaatgtcactgccactgaccttgttgtgcagtggcagaaagtggcgccaaatactgatgataggcttttcatgaggctgttattgcagcctgtgagttccaaggttgtgaagggaacaataactgttagagcctcggttgtggctttgttcctcggaggggctaatgaggttgtgtcgattntggctaaacaattttcgcttttagggataaaaaaggagaattgcactgaagtgagttggattaattctgttct

SEQ ID NO: 21002 - DNA, 407 bp, Glycine max
cccacgcgtccgcccacgcgtccgcccacgcgtccgtcgcattgcacaagcactctctctttgccttggcctttttcaggtttcaacgctccaactatccatggcaaaccgctggctcagacccgaggtgtatccactgttcgctgcggttggtgctgctgttgggatctgtggattccaactggttcgtaatatctgcatcaaccctgaagtcagggtgaacaaggagggaaggaaggcaggagttttggagaactttgctgagggagagaagtatgccgagcacttcctgaggaagtatgtgcgcaacagaactccggagattatgccctgcatcaacagcttcttcgctgacacaagtcgcaactaagatgctttgaataaacaaaggttaatgtgagatatta

SEQ ID NO: 21003 - DNA, 348 bp, Glycine max
cgtgtgtctcatgaaccattacataaactctttacctttgtttattcataactactatatatgtatatagaccctccttaaacccttttcttcaacagccaacaaaaaacaagtctttttctgaaaacttaatttctctctgattttctccctcacttttatttctctctttctggattattctctctgtgtagattgtggcgtgttctcgatgatgatgatgatgagccgcagcggcgccaaccgggtagcgaacaccgcaatgtttgtggcgaagggtttaagcggcgaagttggtggtttaagagcattatatgggggtggtgtgaggagtgagagcactttggc

SEQ ID NO: 21004 - DNA, 448 bp, Glycine max
gttgaggttgctgagaaatctacattgcaaagtcagctggaggaaattgaagggaaactggcacaagctgaatctagactaaatgaagaggttgaaagtgttcaagctgctgcttctcaacgagaagcagatttaagttcaaagttggaagactatgcacaaaaattcaatgatagaaatgtattgaatgataaggttgcagaacttgagaaagagttgcaacttgcacgggatgctattgctaaccagaaaggagcagagtcccagaagttggaactagaagcagcattgaagaattctcttgaagaacttgaactaggaaaatgatatctctctttacagaaacaagtgacagatctagagcagaaattgcaagtcgctggtgataaatcctcagtcaagggcgatgagggtgttgatcagaaagaagggttggaagtaaaatcca

SEQ ID NO: 21005 - DNA, 402 bp, Glycine max
tggttcactttgcaggcacaaggcctcgatatcactgcagaggactaccacgggtgagaatgatctattaattatcttctagtgatcatcactttcatttttctctctctcccaagtctaaacttttcgttcttctcactccgaccaagtttcgtgcacggaaggctaccttacgactccatcgacactgatcatcagttacggaacctcctcttgagcatcaaacaaagaaaaattgtatgttactactctataatggatattttctttattattattgtattctaatcatcctaatatttttgcttttatcaggtttttactaattctgacaggattcacgcgatgagggcgctggataggcttggggtcaaggactgtttcgagcaaatcatatgcttc

SEQ ID NO: 21006 - DNA, 359 bp, Glycine max
  modified_base (351)..(351): a, c, g, t, unknown, or other
  modified_base (354)..(354): a, c, g, t, unknown, or other
gttcgagatagaggaagatgaccttgaagcttcacagctatatcctgattataattacacatgcattgaccaacttcttgatatatttcttgttgatcctccaccccctgcatctgctgctttcgaataattaaagccctttcaagtttgttaaaatgaagtttgtgatcttccaaataccgctgactaaagcataattgtatttatctttgaggataagatttgttagtccaatctaggttttgctatgttctctaaataagattggtatagtatactcatgtaccatataaagaacaagcttgcataagaatttgattgtgtatcttgtgattaagaattacaccgatnaanaaaaa

SEQ ID NO: 21007 - DNA, 455 bp, Glycine max
cttctgtgaatgagccagtcactgaggttggaggagacagtaacaagaacacaactgacaacggaaaagctgtggatgagttggtcactgaggttggaggagacagttacaaggacacaactgacaacaaaaaagctgcggatgagttggtcgctgaagttggaggagacagtaacaaggacacaactgacaacaaaaaagctgtggatgagttggtcgctgaggttggaggagacagtaacaaggacacaactgatgacaaaaaagctgtggatgagtcggtcaatgaggttggaggagacagtaacaaggacacaactgacaataaaaaagctgtggatgggtcagtcactgaggttggaggagacagtaacaaggacacaactgacaacaaaatgggagtcaaacatgaatagattatgtaaattcttgtgaactggcttgggtggctaatc

SEQ ID NO: 21008 - DNA, 337 bp, Glycine max
acgcaattatttcacaaaaaatattccaaccagtttacaaatgttctctttatatttttgcttggtgctaaacggtgaacccagaaaagcttgtagggaggaggaaccgagagaaaatgatggatcaaacagaatggtcaggctttaacaccaaatgattccttactccctaacagagtgaactttgtacagtacatgttttttcttttcgtcgttaatactaacctatcacaagccgtttgtctttgtcaaactatgtattttgtaacatttttctttcttatgagctgtatagcagtcaaaatgctttcctcttctaaaaaaaaaaataaaagct

SEQ ID NO: 21009 - DNA, 349 bp, Glycine max
acgcattcactagatggacctgtgtattgatggacgagctttcatatgtctgctgtgggtcagtgagtttattttaagattttgtttgagaaatatggtattggcttagattagagacaatggatttactggaatgaggctactattaggattgacttacgtgcacttgcttagaatatgatgagatatgatatcgctttacaagcgtttcttcaacttaatttctgggttgtccacttttgtgtagtaatttttggatagattcaagagggggggcgttttaggttccgagtcttgtagggctgcatgcaaagtcatagctattgtattgtgcaccttaatgcaattt

SEQ ID NO: 21010 - DNA, 88 bp, Glycine max
cggacgcgtgggaaaaaaaaaaaaaaaaaaaattaaaaaattaaaaaaaaaaaaaaaaaaaaaagaaaaaaggaaaaaaataaaaggg

SEQ ID NO: 21011 - DNA, 222 bp, Glycine max
ctacgacctacgcgtcacgtccacgcgtcagatctgtcgcatcctcagggtgctgcacaacgtgggtggaaagtagcggaaaaatatacgggttgctcgcaaaggctccccgctctacaggatccaagctgacgtacgcatgactcccaactagtaccgcttgcttagggcctactaaaatctatacgctaccactcgactcacaaacgtctgccttggaaa

SEQ ID NO: 21012 - DNA, 219 bp, Glycine max
  modified_base (12)..(12): a, c, g, t, unknown, or other
acgccacgcgtncggaaaggcaaataagtctaagtcaatattggcttggcaaaacaacaagaacttaatgtgggggccttgaaaacatttattaaaatggttttattattccaggccagaaccggccgttattccttttgggaggtattaaccaaaataagggcttgctttttgtggaagcaatcctttgggccgaaaaaagggtgaaaaagtggatgc

SEQ ID NO: 21013 - DNA, 393 bp, Glycine max
acgtgaaaatatcggtgcttaatgtggggaccttgctccttcttcgggttggaatgagcgaaaactaaattgtgttagctataaatcaggatgcgtggaacttgaagctttgaaagcaaggagcagctacagtcatatttgaatgccagttttgaagttaaaatgttaaattataattcacgagttagataagtgattgtacttggcactagaattttttagtttttctaatcttatattcaatctgtctcggagttaattatgcctatgcttctttgtaccaaatatagcttttggcctttacacaggcttaataataattagaagaaacaacactttccattcaaaaaaaaaaaaataaaaaaaggcggccgttctagatgatccaagctt

SEQ ID NO: 21014 - DNA, 407 bp, Glycine max
gaaataatgtccgggatcatccacaagattgaggagaccctccatgtgggagggcacaagaaagaggagcacaaaggagaacaccatggtgagcacaaaggtgaacacaaaggagaacaccatggtgagcacaaaggtgaacacaaaggagaacaacaccatggggagcacaaggagggacttgtggataagatcaaggacaagatccatggtgatggccatgacaagggtgagaaaaagaagaagaaggacaagaagaagaaggagcatggacatgaccatcatggtcatagcagcagcagtgacagtgattagatcttatatgttaagcaggtgtacggtacgatggtagtgaggagccagaatccctcttcctgctttatgatataatacaaataaaatagcga

SEQ ID NO: 21015 - DNA, 444 bp, Glycine max
  modified_base (415)..(415): a, c, g, t, unknown, or other
tacatgtgtgggttggtgtttgaggacttgttggagcaaggtggcttgtgggagggtgaggggaataatcagaagaaagctgacattctctacagtgcaattgatggcagcaaagggttctataaatgccctgttgagaagtctgtgagatctttgatgaatgtgcctttcactttggagaaatcagagctggagggtgagtttatcaaggaggctgctaaagagaagatggtgcaactcaagggacatatatcagtgggaggtatgagggcttctatttacaatgccatgcccttggctggggttgagaagttggtggctttcatgaaggattttcacgcaaggcatgcctaaaggagtaacctcaatctgaaacaaatacttgcattgcataaacctaatgcctaaaggattntatgctaataaaatgtttgtctggtattc

SEQ ID NO: 21016 - DNA, 248 bp, Glycine max
gacccacgcgttcgaagaactgtcgtctgttggcatagtttgtttttacaaagtgcaaaacgagaattggggagggcttaatattatgagatgctgaaattaagagtaatgtaacaaaaactgtacatgacgaagataaacggttttaagaaggggataagaaaaatcaaaataaaagatatcatatctaaactgcttaatgctatatgttgataatatcgttgaatgtatgttcatggcatctgatg

SEQ ID NO: 21017 - DNA, 288 bp, Glycine max
tagtgaatacgtgatatctcacaaggcctatgcgagggtgggattgctagggaacccgagcgatgtctactacggcaaaacgatagcgttaagcgtcgccaacttcttcgccaccgtcacgctgcgtcccttcgaccagttaatccttcaaccccactctctgcacgatctccttcatttctcatcgagtcctcaattggtcaacaggttgagctcccaaagttactatggaggcgtgcgattgcttatggctatttgcaatgtcttctacgcgtattgcagagagaa

SEQ ID NO: 21018 - DNA, 453 bp, Glycine max
tacacgcgtccgcagtttcaagtcgcagaaatgaacggtggcgcctttgattttatcgaagaaaacggaaacgggagcgactcggactcgaattctgatgacgcgccggagtactaccagccgatctacgtcgtggaagacagtgggagttaggacgacgagcacgacggtgaattcggacacctcccgaacggttttgccgcgcacggcgtggtggagaacgggatctcgtctttggatctgaacgacattacagagaagagcagcagcgacgaggaggaagaagaggatgaagagaggatcagagagttgttcgagagatcgtcgagagaagacgagaaccggcggaatgcaccacttattgttgagaacgcgaccagagttatggaagcgatgcgcggagtggccttcgccggaatggttccccgatgggctggtccagatgctgatgat

SEQ ID NO: 21019 - DNA, 180 bp, Glycine max
aaaaaaaaagaaaaaaaaagagaaaaaaaaaaaaaaaaaaaaggaaaagagaaaaaagggcgggcgaacaaaaaggaccaagcttacgtaggcaagcaagcgaagacagggcggccgcaatagaggcaccaagctacaatgcactggccggcgacgtacaagggcggcactggggaaacc

SEQ ID NO: 21020 - DNA, 96 bp, Glycine max
tgcagatggttgtattcttagttttgttaatggctacctttgtcactactgctctttggtgatttaattctgatacacttcagactttttagataa

SEQ ID NO: 21021 - DNA, 194 bp, Glycine max
  modified_base (146)..(146): a, c, g, t, unknown, or other
acgtacgttgggtcctggatcggcggtaccatttcggtggtggttggttttggataagtacggtttttggtttggatggtaaaagtctgaaatttcaaaattcacaagcagccatagggttgtagtccatttcctttgctgctgangagggatgtctaaaattgcatttaatttataaggaagttttgcaaaaa

SEQ ID NO: 21022 - DNA, 439 bp, Glycine max
gaccaacccttccgcgaccccttggttccggttcaaatttatggcctaaaaccccttaaccagaactggaagtggctttcaaagcacttgggaagctgatatttgacattggattgatgttggcatatcactgcgatcaatatgtatccaaagggatgaaaattcacaaggatgaaggtctggaatcaatacttcgttgctcccgctgtcataaaggacgtttgctatattattttccttcacaacagggagtcccagatggcaactctttgtcttcttggtgtggatggcatactgaccacggttcactgacaggtctgacttgtggtatgtttacgagagatggtgtagaaattgcttgccctgatagtgcttgctggcctctatattcgaacaagaaataatcaaaattatcaaagttgtctattggaaaagatga

SEQ ID NO: 21023 - DNA, 179 bp, Glycine max
atgagtgacagcattacactgtactaaaaagcactgggtgatttttttgggttgttaacgttggaaagtagttatacatgggctttttctctctcacagattgcttttatgtgttggatattgagatgaataactataggccttctcgctctccagatatattattttttagtacttta

SEQ ID NO: 21024 - DNA, 431 bp, Glycine max
taaaatcgtgtcttctactctgtactgagacatggccgaggaagaagaagaagaagaatgggagctcagcgataagcagaaagtggaaatcgcgaaatggttcctactcaattctcctcccggagaaatccaatacgttgccaaagatgtgaaatccattctcaacaacgacgatttgtacaaggaagccgcttccgaggcttttctcttttacaacaaatcgcacttgatttcccttccaatgtccaaccgaagcggagacgtactggttacttcttttggtgagcttgagggtaatgcatttcttgaacctaggactgcgcaagtagcaattgttgatcatgttaaacaagcatgtacagaggtgagacctgccacagacgaagaacttccatctccatatatcgaagaatttcgatgcaatctggatg

SEQ ID NO: 21025 - DNA, 338 bp, Glycine max
taagagtagtgtgaataataatattgggaaagagaatgagagttccaatgttggggcttttgatgtaaataggcttcagaagcttaaaggaaaaaaagggaatgggaacgggaagaagaaagatgctcttgttgttgctgctgccaagggagagcccaaaaaggtggataagccaaacagggtttggggatcaaccggcgccgcaaaccaaactggactttactgatcacgtggatggagatggggatagaagcgctgactttttggctaaggagcaaggagagagtatgatggataaagaagagattcttagcagtgatagtgaagttgaaaatgat

SEQ ID NO: 21026 - DNA, 250 bp, Glycine max
gacggacgagcagaagaccataactgtgacacggcacaagagagtgactgtctttctgggtgtcatcatgctttctatcgcagaggagttcatcatctttaacgacgaagtcaaataacaatgctaactaattgtcctacatatgatggccatttcaaatcatcagctacgtatcatcatattctgtggaatctctacttggctctcgcaaggagtcatcgagggacacccaccaccacaggctctttat

SEQ ID NO: 21027 - DNA, 438 bp, Glycine max
tatgaagcccccttcgtcatttctgcaagccatggaagagtatgtcaaagatgctccccagggaccaatagttcgaaaggatcaggctattgagaacaaagaagttttggctattgaatacaaaaagacaacagaagtggaagaggaatgtccaccctcaccctcaccccctccacctccaccttctgaacctgtgaaagtggaagcaccaccagtacaaccacctcctgatctgttggtaattactctttttcttttgtgtttgctctagccctatttttggtataattcagattgttgactagttctactagtaatgatttatatataacaatgctgctttagctgcactaacaaatttctcttctgctggctatactaattagaatttggaggatcctgttccagctgctgcagaggtggaagagaagaatgcat

SEQ ID NO: 21028 - DNA, 434 bp, Glycine max
  modified_base (392)..(392): a, c, g, t, unknown, or other
gggtgatgatcgagagagagcttttgggccgggagattatgaatgggatagcatgtgaaggttctcagaggattgagaggcctgagacatacaaacagtggcaggttaggaatacgagggctggtttcaagaagctccctctgaatgaggaattaatggccaaattgaggactgcgttaaaggaatggtaccacagattttgtcttggatgaagataacaactggttgcttcaaggttggaagggccacattttgtatgcttccacttgttgggtgccagcataatgagatgctactggactgggttcagaactcatactatactgaaggttttggtatccttggtttggctacctctactagcttaaccttcaggtgctgtgatgaagatngcaacaagctttgcacgaagttacttggtaaaactatggcac

SEQ ID NO: 21029 - DNA, 395 bp, Glycine max
gcgaaaaaagtgtagtgggaaatggcaggtgcggttgcaggaggagggtatggggacgcgaaccggatgagagactacgtgttcaaggtggtgctgataggggactcggcggtggggaagtcgcagatactagctcggtttgcgaggaacgagttcagcttggactccaagtccaccatcggtgttgaatttcagacgaggactttggttatcgatcacaagaccgttaaggctcagatctgggacactgccggccaagaacgtacaacaagcctcagttcaaaaccgttgcctatcttgagatttagagcacgcagacagaagtcagaacaagctgcgatggactaatccgtgaaatggctgcatgggcaatctatgcaaatggttcatacttg

SEQ ID NO: 21030 - DNA, 280 bp, Glycine max
cacaggtacactctaaccggttattcaactcttcatccaattcaatgcaatgctgaggaaggaaactcaccactagcttcttcaaccaccatcaacaatgaggtattattcccaattcaaacacttatcccatttcctcaaaaccctaacctgactaccccaaaaccctaccttagattctgcacgtatctcacagaaccttccaccgtgttcattctacgcgcgtgactactgcagcaatatctgcgcaatgctgtctcaagaatccgaaaaagctacc

SEQ ID NO: 21031 - DNA, 328 bp, Glycine max
ttcatctgaatttccattctcagataaccaattcatactcagaatggtgccatctccaatgtgcacatacactaaacactgacaaaactatgtgaatacttggtttaatcaaccatcccaaaagaccagaatacagttatctcaacagattaagactgtcaatattatccacaagcctactgctggatctctcacgcctattgctcatggccaaactctgaaatacaacatgaaagtcatagcccgtaaaggattttcactggaagaattgactgctacaaaaattcccaagaaacttgctccaactattgggatttctgatgatcac

SEQ ID NO: 21032 - DNA, 337 bp, Glycine max
  modified_base (291)..(291): a, c, g, t, unknown, or other
  modified_base (296)..(296): a, c, g, t, unknown, or other
tattgcatctgcaccaccaaaaaaattaataaaacaggtaccgagttttttaaaactaagttaattaattttagtaatatctccataaaattaaaataacttaagtaataattgtatttaataacaattcataattcatactccggtccacttctaactaaattagacaacccaacagaagtagatttttttaaataaaaaaatattaatagtgtacccaatttatccttgaatgatgtaaagacattaaaatctaaaaccattatccatcactgtcaaaaaaaaaaaaanaaaanaaaaaaaaaaaaaaaaaaaaaaaaaaaaaaaaaaagggcgg

SEQ ID NO: 21033 - DNA, 91 bp, Glycine max
gcgcgcagagcacatgtccgtgttattgtaaggatttaggatcgtctatggtcctcaaaaaaagggaaaaggtttaattaaaaagggagcc

SEQ ID NO: 21034 - DNA, 447 bp, Glycine max
acggtggttttgacactcatgtcttataaagaggcagaaaattctcaaggagacagttataagagcaccaagtatccacaatgaattgggaaaatgtagaactgccccagttaaggctgaattgaatcctatactgttgatgttgagagacaccaagccctatacaactggtgtgcgagttggtaaaggttttcaagcagaagttcttgactggtcaggcccgataaaaagtgatgaagatgcccttcctgaaccattggaaattagtccttcagaattttataaattgctgggagaaaatacgagaaatcctactaaacttagttccattggtaattgggttaaatgtcaggagattatagatagagccaatggaactatatgtggaaagtggcgcagggctcctctttttgaagttcaaactgatgcctgggagtgcctttgtgc

SEQ ID NO: 21035 - DNA, 371 bp, Glycine max
  modified_base (94)..(94): a, c, g, t, unknown, or other
  modified_base (306)..(306): a, c, g, t, unknown, or other
  modified_base (326)..(326): a, c, g, t, unknown, or other
cccacgcttcctcccactcttccgaaaggattgattgaaggaagagcggtgggtgagtgacggaggatgcatgtctactacggctacgtcttcngcgtcgtgggaggaactgacgctgaaagtgaaatggatcggcaacgagtacaccgtcagagtctgcgccgacgacaccgtgggcgaactcaagcgccgaatctgcgagctaaccaacgtcttaccccttcggcataagctcttgtaccccaaactcggttccaaactcaacgacgactctctcttcctctcccaactccccctaaactcctntctcaagatgaccatgatcngtactacggaagaggacttgctcgtggatcccgtggagtcccctg

SEQ ID NO: 21036 - DNA, 341 bp, Glycine max
aagaccaaaaactgatacgtttcgtacagtttttaatatcagttcactttaagaatacatctatctctgcttctgcaagagaaacaattggaagggttgcttctggtgctgttgctaagaaaatccttaaagaattttctggaactgagattctggcctatgtctctcaagttcataagattgttcttccagaggacctgattgatcatgacactctgactcttgatcagattgagagtaacattgttcgatgtccagacccggagtatgcagagaagatgatatctgcaattgatgctgtgcgagtgagaggtgattctggtggtggtgttgtgacatgc

SEQ ID NO: 21037 - DNA, 338 bp, Glycine max
gttttattgaaaatactactatcttatctttcaagcaggattcccaaatagttcgaaccaacaccgatgcaaaatcctatggataaaaaatacacctattcaaggaccaaataacagaatttcaacatcaggccaggctttcccacaatgtgtctttgatcactgggacatgatgtcttcttacccatttgagactggatcacaatctgcacaacttgtaaccgacatccgcaatatgaatggcttgaaagaacagatgactcctctctacgagtttgaacacaagctttaaattgtttgaactatttaacttacttttgaacttaaccgaatttatt

SEQ ID NO: 21038 - DNA, 381 bp, Glycine max
  modified_base (371)..(371): a, c, g, t, unknown, or other
  modified_base (376)..(378): a, c, g, t, unknown, or other
gcttacaataagaaattggaggggaagaattcagaggaagacgagtctgacaagtcaaagtgtgaagtcaatgacgatgaggaagatgaggaggaggaggatgatgatgacgacgagtgaagatggtgatacaagatgaagcgtaggaggatgtgggaaaagaaaattgttttgcatagtagttgttgggtttagaatttcataggatggttcccaacccacatccctttatgataattagtttctgaatttttattttgtcctcccttactagggttagattagcgcacaatcgtaattagggttcagtatcatgatcatgtacttaaaagtcaatgctatgatacgtttcaattctattctcgaagaanaaaannnaaa

SEQ ID NO: 21039 - DNA, 221 bp, Glycine max
acgcggacgcgtgggcggacgcgtgttcggacgcgtgggttgtggcctactttattgcgaatgtgtactgaactgaggtatgtcgtgatgtaagctgcaataagttaattgtctgtagctttattgtatccccttcatggggttctgataattacatccttttagtagtgttgtggatttggcatagacttgttcaagtaaataatggcatggcttgcgaa

SEQ ID NO: 21040 - DNA, 350 bp, Glycine max
acgcgtcgcccgtcattgttcgaatggggaacaacaacaacaatccttcttcttcttctacttcttcttgacaaccagtttgagttcaactcacccttgtgcttttcttcttctctctctgtttagtgttttagtctttacctttcgcacacaaaaacacatatacacacttgtctctctctagaaatcacgcaattatcatataccccgatttttctttcactttctttccatttatcacccaccaaactaccaacttaatgtttctttttgctaagagagaagcacaaacaaactgtgctcttgagagttgagacataagaaaagaccatttgggaaattcaacaatc

SEQ ID NO: 21041 - DNA, 155 bp, Glycine max
ggtaaatggtgttggatagaagatatgcagcatgcacaaacacgcaaatattaatagagaaaggcttgttgtatgggaatttggcacaccattccggaaaccttatttgccaaaagaaaaaggttgtgattaatatatatattttaatccaaaaa

SEQ ID NO: 21042 - DNA, 137 bp, Glycine max
  modified_base (65)..(65): a, c, g, t, unknown, or other
ttttgttgttattcattctctatgaatggacaatgggtggaaatggatccttatttgtgcggtanagatggatgtgaatgatgtattgtatgactctcaaaaaaaaaaaaaaaaaaaaaaataattttgaatgataa

SEQ ID NO: 21043 - DNA, 318 bp, Glycine max
gatacattgttcatgaacggacttatatactctataagaagtctttcaacgagcaggtcatacaaatgaggattataaacacacaagtagtgctcttgacacatgactcagaaaactcagctctgaagctgccattgaataaccaattaaaccaccacttaacgttgaacacacccacctcttaattgatggaaaaatcattcatgctactactggcaaaactataccaacgttgtaccccattacacgataagtgatttctcatgctgcttaaggtgaccattaatatgtcgatcgatcaatatcatcttctcgcaa

SEQ ID NO: 21044 - DNA, 488 bp, Glycine max
  modified_base (332)..(332): a, c, g, t, unknown, or other
gtcaggctgggcctggattccagttatttggttctgatgcggatgtgtctgatgcgttggtgcatctgcagcatgggcctatgaattgctcctcgtcactaaatggttatgcattggctcccaatactgctttgggatctggtagtatcttgcaagagtcctctgctggtcggtcagatgctgatttgaatggtggtttggtggacaatcctttggcctttggtggagatgatccctcacttcagatttttctccccacaagaccagcagattcatccatgcacaatgaattgagagatcaagcaagtgtggctaatggtgtctgcactgangaggattggatatccctcagtcttggaggtgggactggtgttaacaatggtgatgctttcactcaaaaagggttgaattctagacatcaaatcccaaccgagaaggtgccacgaatactttggatgatactgcttctttaactcctgggatgaatg

SEQ ID NO: 21045 - DNA, 358 bp, Glycine max
taagaaaatgtggcttgtgcatttcttttccccatttctgaacggccatgggcatggctccagccttctgtgggaacccagttcggcggtgactcatacccactgggccccgccgagtttgctgcctcaaatcaatgcgatgaagacgatgcagggaaaagtggtgtgctccacgaacgacaagacggtggcagtggaggtggtgcggctggcccctcacccaaagtacaagaggcgcgtgaggaagaagaagaagtaccaggcccacgatcccgataaccaattcaatgtcggcgacatcgtccagcttcagaataccaggcccatcatcaagaccaatgcctttcttgcactcccc

SEQ ID NO: 21046 - DNA, 341 bp, Glycine max
tacagggagacgtctcagtgcaatgattttccttggccctacatattaccaaagactgaagcatatggttgatgataagatccattctcgtggaaggggtccagtgcagatcctcacaaggcaacctgctgagggacgctcacgagatggaggtctccgatttggagagatggaacgagattgcatgatagctcatggagctgctcactttttaaaggaaaggttgtttgatcaaagtgatgcttacagggtccatgtatgtgagcgttgtgggttgatagctattgcaaatctcaaaaagaattcttttgagtgcagggggtgcaagaacaaaactgaca

SEQ ID NO: 21047 - DNA, 271 bp, Glycine max
gtatacaatgtgcatgaaatgactgatggactgtataaaaggtagatgagcgagaactcatacaaatgaggattataaacacacaaaaagtgaacttgacacatgactaagaagactaagaactgatgctacaatggaagaaccaagcaaaccaccacttaaagttgaacacacacacctcttaattgacggaaaatttgttgatgctgctactggcaaaactttaccaacgttggaccccaagacaggagatgtgatttctcatgttgct

SEQ ID NO: 21048 - DNA, 413 bp, Glycine max
  modified_base (288)..(288): a, c, g, t, unknown, or other
  modified_base (380)..(382): a, c, g, t, unknown, or other
gaaaggctagttaaggccagtttttttgttcacgagacctatggtgcctataggagcattgaagacttctgggatggtgaactctgagcaatatgcatctttgagacgttgaaaaatacattgctcctagagcaaatttattctgccttatacccactagttgtagtgattcaagtgagattttgagaagtgttactattgatggtaacaccgaataagtagccaagagttatttttcatttaatgattgtatcttttattcaatataataaagtgagttgagtgaanaaaaaaaaaaaaaaaaaaaaaaaaaaaaaaaaaaaaaaaaaaaaaaaaaaaaaaaaaaaaaaaaaaaaacaaataaaaaacaaaaaaaaaannnaggggcggccgttttaaaggatccaagttta

SEQ ID NO: 21049 - DNA, 376 bp, Glycine max
ataagggttgaaataaaactgcattatcttaattcttaggtagtaataagctacattgaaacaacaaatctagttgacgacacaacagcagcaaataaaagaatacacatgtagatactaattatgacaaatcatgaatcataaaaaatgtccaacaagatgaagatccatgtcaatttttaagtgggttcattctctccctcagatagtagagtttggcccttctcactctcttcttgtcaagcacctttatctcctttatgttaggtgaatacagagggaataaagatttaattccaaccccagccacctgcctcctaattttgaatgtagtattgagtccaacattacgccttgcaataacaatgccttttat

SEQ ID NO: 21050 - DNA, 201 bp, Glycine max
atggtaactaatggcagatccaagtgtggattggtaccataccattgctatcaaacaatgcttgagctaaatagttcattcaacttagaacagaatgatggaatcaacgattcccttaaataaaaaaaaaaaatttatgcgattcaaactctgataaatttgctgatgatactcaatctggaactccaaaaacaccttatt

SEQ ID NO: 21051 - DNA, 269 bp, Glycine max
tttagcggggaaaaaaaagggacacaaaaaaaaaaaaaaaaaaaaaaaaaaataaaaaaaaaaaacggggcgggcgacttaaaaagaaaaactgtaagtaccctggcatggaagaaagaaaagatgaagtcgtgaacgcaaatgcaagagaatgagcggaagaatacaaaagaggaactggaaaaacagctgagagacagaactgaaagggaggaaaacataaagcgcgaactacagatggcgtaatagagaaaaggcccggaccaaga

SEQ ID NO: 21052 - DNA, 345 bp, Glycine max
ctctctatgttctatcataccttttctttgtggatacaaatgttcgcgaagaccatcacagatatgatcatcataatttaggtaaaaagctctggcaccatacaataaaccatggcaaagacccatgacatgaaaagaattaccaagaatcagcaattgtgaatcttaacggctagcattttaaatacactcagaccctcgacaactacctcatacagaacgattaaacgcttgaacttatgattcgcgtactacatagcatgcagatcatggtaaacactgtcactgcgacaaacattactctatatttccaaagctcagagactatagacaacctcaaggaca

SEQ ID NO: 21053 - DNA, 432 bp, Glycine max
taaaattctagggttccgaaatggacgctgacggaaagatcaagaagggcgccggcggaagaaagggcggcggcccaaagaagaagccggtttcaaggtccgtcaaagccggtctccaattccccgtcggaagaattggccgttatttgaagaaaggaaggtacgctcagcgtgtcggtaccggtgctcccgtatacttggctgcagttctcgaatacctagctgccgaggtgcttgagttggctgggaatgcaccacgtgacaacaagaagaacaggattattccaagacacgtgcttttggcagtgaggaacgatgaggagttggggaaattgcttgctggagtgacaattgcacatggtggcgtgcttccaaacattaaccctgttttgttgcctaagaagtctgagagggcttcaaggaacctaaatc

SEQ ID NO: 21054 - DNA, 311 bp, Glycine max
  modified_base (38)..(38): a, c, g, t, unknown, or other
aaaggggggaaataaaactgcattgtgttaattcttangtaataataagctacattgaaacaacaaatctagttgacgacacaacagcagcaaataaaagaatacacatgtagatactaattatgacaaatcatgaatcataaaaaatgtccaacaagatgaagatccatgtcaatttttaagtgggttcattctctccctcaaatagtaaagtttggcccttctcactctctttttgtcaagcacctttatctcctttatgttaggtgaatacagagggaataaaaatttaattccaaccccagccacct

SEQ ID NO: 21055 - DNA, 265 bp, Glycine max
gggcgacccacgcgtccgcgttcttctacagcaatttttaaattttttgaagaaagagaaaaaacaggggattgcacatgtgaaagcgtggctgcgcactcaactgacgttgctgaaactcctacaattgcagcaacagctgcggaggctgcaagatgtacccagacttgatctacaccgagtcaaccaccaccgacaccttggtcatgggaatggtaccaattaacgctcaattcgagagtgctgaaatgggtgttcccgccta

SEQ ID NO: 21056 - DNA, 380 bp, Glycine max
  modified_base (222)..(222): a, c, g, t, unknown, or other
taaaattctagggttccgaaatggacgctgacggaaagatcaagaagggcgccggcggaagaaagggcggcggcccaaagaagaagccggtttcaaggtccgtcaaagccggtctccaattccccgtcggaagaattggccgttatttgaagaaaggaaggtacgctcagcgtgtcggtaccggtgctcccgtatacttggctgcagttctcgaatacctanctgccgaggtgcttgagttggctgggaatgcagcacgtgacaacaagaagaacaggattattccaagacacgtgcttttggcagtgaggaacgatgaggagttggggaaattgcttgctggagtgacaattgcacatggtggcgtgcttccaaacatt

SEQ ID NO: 21057 - DNA, 460 bp, Glycine max
tattagtattattatcactagctacctgctatcaaagcatcacaaatggcttctacagacaagcctggcggcgaccctgaatacagaacatcttcaactccagctcctgctggtgttgattactttaaatttgatgtcatcctaaggtttctattgtttgcagcatcactggtagctgttgtggtgatcgtcactgctaatcaaacagaggttattcgtgttccacagcctgtgccatggccagccaagttcagatactcaccagcctttgtttattttgtagctgcattgtccgttactggcctctacagtatcattacaacacttgcatcactctttgccagtaacaagccagccctcaaaaccaagttgctcctctactttatcttatgggatgcggtaattaatccaataaatcattctttttcaccatgctattcatcttctcttctcaaactaa

SEQ ID NO: 21058 - DNA, 364 bp, Glycine max
taaagaaagaaagttccgagttcataaaaaattaaaaaaaataaaaagaaaaaaaaataaaaagagaaaaaaagaaaaaataataaaaaaagtaaaaaaaataaaaaaaaaaaaggacataaaaaagcgccaagtggtcgtcataaggagaaagttcggtgaacttgctgagggctaggcctgaggtgtcttattgagggctacgctagaattatctaatgaccaggaccttggatatgaaaattatttaagagccaatgatggtccttgttgaggactttttgtctgcagggacaaattccacagcggaggccttctctaatatggctgaatcttattaattatgtgcacttcgatttgaatg

SEQ ID NO: 21059 - DNA, 393 bp, Glycine max
  modified_base (16)..(17): a, c, g, t, unknown, or other
  modified_base (39)..(40): a, c, g, t, unknown, or other
  modified_base (42)..(42): a, c, g, t, unknown, or other
  modified_base (47)..(49): a, c, g, t, unknown, or other
  modified_base (52)..(52): a, c, g, t, unknown, or other
  modified_base (54)..(54): a, c, g, t, unknown, or other
gaaccaacacaaagannggaaggaagtggtttgttttcnncngcggnnngananaagagcggctttgttggcaggagagatgtgagcacacaaaataataagacaacatacataacgttttctcaaagaggttattttattttattttttttatcataagacggcagtttgcctgcactgatcagttcttagagcatgaattcagcatccccgcagtttgttttctcaagaaagatgaatgtgtacgatccgatccaccaaattagtatgtggggagaacgcttcaaaagtaatggaaatttaagtgcaaccatgcctttaattgatgagacagacatgaactttgataatcagtcataagatgcttttaatggtatactgggagaacctaat

SEQ ID NO: 21060 - DNA, 398 bp, Glycine max
  modified_base (370)..(370): a, c, g, t, unknown, or other
tattagtattattatcactagctacctgctatcaaagcatcacaaatggcttctacagacaagcctggcggcgaccctgaatacagaacatcttcaactccagctcctgctggtgttgattactttaaatttgatgtcatcctaaggtttctattgtttgcagcatcactggtagctgttgtggtgatcgtcactgctaatcaaacagaggttattcgtgttccacagcctgtgccatggccagccaagttcagatactcaccagcctttgtttattttgtagctgcattgtccgttactggcctctacagtatcattacaacacttgcatcactctttgccagtaacaagccagccctcaaaaccaagntgctcctctactttatcttatgggatgc

SEQ ID NO: 21061 - DNA, 337 bp, Glycine max
taaagaaagaaagttccgagttcaaatatataataaaaaaaaaaaaaaaaaaaaaaaaaaaaaaaaaaaaaaaaaaaaagagggggaaaaaaaaaaaaaaaaaaaaaaaaaaaaaaaaaaaaaaaacaacaaattggagtgtcattaaaagggagaaaaatagaatttcctatgatatcaaataaaaaaaaaataaaaagaggggaacaaaaatttaattaaattgggggggccttataaaaaagaaaactttgaaaacccggcggataacaaaaaaaaacctccctaaccgatactcccattataaaaaacagccaaatggcaaaaaacccccccc

SEQ ID NO: 21062 - DNA, 351 bp, Glycine max
  modified_base (69)..(69): a, c, g, t, unknown, or other
  modified_base (71)..(71): a, c, g, t, unknown, or other
  modified_base (114)..(114): a, c, g, t, unknown, or other
cggcgcgacgccacgcgtccggcctacttattttgagaaatgcgccatgggtgttttcagcacgcaaanancaacggaggggacaatctgacggctaggggggcactcctcganataggaaagggtgtccgtagaactagtccaaccgggaagataattttcgtgagaaacccgatcaaaaattttattcagggaatcaagcttggtactaatgcgctccgtctgagctgagacaggaatatgggactcaagaagaaagatacatccctattcagggcccacaaatgtgaacctaaggcagagactcctaagacaagtactttcaaaagaaagacttcctttcaaaaacag

SEQ ID NO: 21063 - DNA, 317 bp, Glycine max
tatacaattttccccttctttatacaatcccttaatcccttcttaatactgtcttttttaaaaatcttgagtcccttcacaactttccttaaactcttacccctactctctctaacttacctaaaccctataatactccttcccctcctcttcctacaccctactccctcttcataacctctcacttttctactaccaatccctcatatccactccatttccctctttactctactatcctctttctcttcacctacctattcttcatctctcaatccctcattcttcccattttccccaccatctttctccttact

SEQ ID NO: 21064 - DNA, 223 bp, Glycine max
gctggttcctctgctgatatctgctggagctgttgccaaatcaactgcggaaaggatctcccatttctaggttatgcagttaaataaaaataaaaacccaagtagttgggtcggttatataattcaggtcccagaaactaatgtgtgtattcctgtgtgattctctttaaactacaactctgtcaaacaagtctattgctgaatgaagttatttttgtttaca

SEQ ID NO: 21065 - DNA, 335 bp, Glycine max
cccacgcgtccgtaccaatatgaacagaatctcctctcgacacctttgctttgctgcagctcgcaactgcaacttcccacaaatataaatatatattacttcatggtcacacatagttaattttattaattactactaggtagctggtttttaataggtagtaggtaggtgtaatcgttgtcttcctgcagatatggaagaagcgggtttaggagattgttgttcctctaatacgactattacgaggataatgcagaagcgaaagcagcttcaccaacaacaagagaaggcatacagaaggaataaggataaggaattgggcaaggtggttgccg

SEQ ID NO: 21066 - DNA, 305 bp, Glycine max
gatcctgaaacatctgaccatagggacgccttgatcgcttctgtcccgagctattaggagccttatattaaagtgctcgagggtcttaagcctggactaaaggtaaaattgcttagatgagctatttggtatagggaaaaatgtcttcaaactattattgtgtactttgaacgctgaatctcttggttctttgcgaccctgatcttaattttgcatctttaggagggacacaaagctaatgcagggcggccgatctaaacgatccacgcttacttacgtgtgcatggataaggatacctcttcta

SEQ ID NO: 21067 - DNA, 400 bp, Glycine max
cccacgcgtccgtaccaatatgaacttaatctcctctcgacacctttgctttgctgcagctcgcaactgcaacttcccacaaatataaatatatattacttcatggtcacacatagttaattttattaattactactaggtagctggtttttaataggtagtaggtaggtgtaatcgttgtcttcctgcagatatggaagaagcgggtttaggagattgttgttcctctaatacgactattacgaggaaaagcgagaagcgaaagcagcagcaccaacaacaagagaagccatacagaggaataaggatgaggaagtggggcaagtgggtggcggagattagagaacccaacaagaggtcgaggatctggttgggttcttacgccacccccgttggcggc

SEQ ID NO: 21068 - DNA, 223 bp, Glycine max
gctggttcctctgctgatatctgctggagctgttgccaaatcaactgcttaaaggatctcccatttctaggttatgcagttaaataaaaataaaaacccaagtagttgggtcggttatataattcaggtcccagaaactaatgtgtgtattcctgtgtgattctctttaaactacaactctgtcaaacaagtctattgctgaatgaagttatttttgtttaca

SEQ ID NO: 21069 - DNA, 427 bp, Glycine max
tacctcttttgttgaggatgatttttccctgtttattctgataaagaatgaggtgatgataagtttatttaaagctcttgatgattattctgttgataatagaggtgatgtaggttcttgggttcgtgaggctgcattggatggcctagaaaaatgtacatacatgctctgtaagatagacaagtcagtttgtttgtctggaagatcagatggaaatgaaattgaacctattgcatatccttcgattgatagcatgcttaagaacaaccgagagctttttttattcaatgaaaatcttgctaccaatttagttggaggaatttgtaagcaagctgtggagaagatggataaactgagagaagcagcagcaaatgttctctgcagaattttgtacaaccagatgattcatattccatatatacctttc

SEQ ID NO: 21070 - DNA, 437 bp, Glycine max
taaaaacaccaaattacatagaatttttaggcgtaaccaaagtacgtaccaaaccatggcattgacaagtcaattgagaaaccttcttgcagctctagaggctgaggaagcagcccaaaaatccaaaggtaaagtgaacacatacaccaaccatggcgatgggtttcagaacatcactggcactaagaccaacagtggtgcatattctggtgatggtaacactcatcacgccaccaacaactacggtggtggtcctgctataaataatagtggcaatttccagggacatggcaatggaggctttattggtggtaatttcgatgcctcaacgaggaactactgattaatttatgtatgatcaacttcatgtattaaatatcgtgttctgcgctacgtatactaattaataataaaattagagctgcatgctgcagctc

SEQ ID NO: 21071 - DNA, 379 bp, Glycine max
ggatggatcaaaagtgggttatttcaaggttaagaaagaggaacgaagaacgaaacgggtttggatacgggttggggttgtggttacggttttggttggggttggggttattattattggggtcgggttttgcgtgacgagatggaaaaagaagagaggggtgaaggaagaggattggggttcgcccggcccgtataagaatctcgaatccgcaagttttagatccattgaaatgagcaatagtaacagtgccaacgaatgacgcatggggtgacgcatgtgctcttagttgacaattggtggggtccatctaatctaatgtttgttttcttgtggtgttgaggtccggagaaaaggtaccggattgtgttggttttct

SEQ ID NO: 21072 - DNA, 176 bp, Glycine max
ggatggatcatttgtggtttatttcaaggttaagaaagaggagcgaagaacgaaacgggtttgggtacgggttggggttgtggttacggttttggttggggttggggttattattattggggtcgggttttgcgtgacgagatggaaaaagaatagaggtgtgaaggaagaggatt

SEQ ID NO: 21073 - DNA, 61 bp, Glycine max
cccacgcgtccgtacaatcttcctataaaactaaaacacccgcacctaaacagctgagaac

SEQ ID NO: 21074 - DNA, 426 bp, Glycine max
taattaattatccctcacaactaccaatggccgaagagaaacacgacaagcaccgtctcttccaccaccacaaggacgaggataataagccagtagaaaccgatactggttacgacaacacatcatattccaagccttctgatgactatgactctggtttcaacaagccatcgtatgagtcttctggcggtggctatgaaagtggttacaacaaaacatcttattctagtgatgagccagcttctggtggtggctatgaaggtgggtacaagaaaacaggttattctggtggcattgatgagacttctggtggctatggcgctggtggtggtggatactctgacgtcactgatggtggctacggcaaaccaagtggtggctatggcgccgctggtggtggtggtgtgtaccctgacactaccactg

SEQ ID NO: 21075 - DNA, 297 bp, Glycine max
  modified_base (283)..(283): a, c, g, t, unknown, or other
cccacgcgtccggatatatctagtttaatgaatggatttgtaagttgagtatgttataagttgctccgttaggtcaccttggaagccagactttttatgcaattggcggatggtattggaactttgtaggttctgcttggtttggtttttccttttattcgattttcatgttgtggccaagaattaggtgcctcgagttaggaggacgatagtctaagcatcttttctcacagggatttttgagtcagtttctgtttatatttattatatgcataattggttnttatgtttgcaaaa

SEQ ID NO: 21076 - DNA, 165 bp, Glycine max
tataatcacctaattacatataatttttaggcgtaaccaatgtacgtaccaaaccgtggcgttgacatttcaattgtgaaaccttcttgcagctctataggctgatgatgcatcccatatttccaaaggtatatgtaacacttactcctaccatttctatggttt

SEQ ID NO: 21077 - DNA, 122 bp, Glycine max
ggggggggggcataaatcaccgccttgttagtccgtgttgaaatggcaacttttttttttaatctgcccggggtggatttttttatttatatactatcaataccgtttggtggccgcccaac

SEQ ID NO: 21078 - DNA, 242 bp, Glycine max
cccacgcgtccgaagctaataagcttacagccagttgacatgttcccacacacccctcatattgagtgtgtttgccttctggagcttcagtaatctgtgatcaattaaaacgttccatttcaaggggattacaagcttaatacaagatgcaactcaaggttgggtcttcaaggtgattgataggaaaactcatacttttatgctgcaaagtgtgcctaatgctttgcctacccaaaactact

SEQ ID NO: 21079 - DNA, 329 bp, Glycine max
taattatttatcctttacaactaccaatggccgaagagaaacacggcaagcaccgcctggggcaccaccacaaggacgaggataataagccagtagaaaccgatactggttacgacaacacatcatattccaagccttctgatgactatgactctggtttcaacaagccatcgtatgagtcttctggcggtggctatgaaagtggttacaacaaaacatcttattctagtgatgagccagcttctggtggtggctatgaaagtgggtacaagaaaacaggttattctggtggcattgatgagacttctggtggctattgcgctggtggt

SEQ ID NO: 21080 - DNA, 268 bp, Glycine max
  modified_base (9)..(10): a, c, g, t, unknown, or other
  modified_base (49)..(50): a, c, g, t, unknown, or other
  modified_base (58)..(58): a, c, g, t, unknown, or other
  modified_base (88)..(88): a, c, g, t, unknown, or other
  modified_base (95)..(95): a, c, g, t, unknown, or other
aaaccacgnngccccccgcacgtttttcttttcgcgaaacaaacgaagnncaaggggnctggtacaaatggacccggaaccgcgccanaaacaanatatcatgcctaagcacgcgaagccccagctacaactaaactagttaacaggaaaaagcacacgaaatatgggagatcaattaccacacatccacattatacagtcccaaacaacatcagcggtaggagccccatctgagtgtacacaccctacacccgagagagatggacga

SEQ ID NO: 21081 - DNA, 157 bp, Glycine max
  modified_base (5)..(5): a, c, g, t, unknown, or other
ataanttaatttaaaaaaaaaaaaaaaggtatatgtttaggggggcatggaacacggccttttaaaactgtgttgaaaaggcaacttttttttttaaactgccaggggttgaattttttatttatatactatcaatacagttgggtagcagcccaac

SEQ ID NO: 21082 - DNA, 362 bp, Glycine max
cccacgcgtccgaagctaataagcttacagtttgttgacatgttcccacacacccctcatattgagtgtgtttgccttctggagcttcagtaatctgtgatcaattaaaacgttccatttcaaggggattacaagcttaatacaagatgcaactcaaggttgggtcttcaaggtgattgataggaaaactcatacttttatgctgcaaagtgtgcctaatgctttgcctacccaaaactactgcatcagtgtacaaatacaaaatcattattaatggtggtaacattggcaagcatgcatggatcacattgttgcaaccttgtaaaaagtttctcatacatttccatttatgcagagcccaa

SEQ ID NO: 21083 - DNA, 317 bp, Glycine max
ggattcttgagtcagacatttttacattagcatgaaacaagacacaatgagatgtgaattagtaaaagatgacagtgaaaaacaaagaaagaaataaaagaaaagaaaagaaaagaaaaggagtggctttgcagtatatcatctgtgacatgcaaggcaataacatttaggttccacccaataagagttttttctacataacctctgaattactggatgggggaccggagaatattcatgttaacaactacaatccatctcaccttgaaatttgggaacctagcattctgcatggtattatgtcggcatttaaatga

SEQ ID NO: 21084 - DNA, 131 bp, Glycine max
tactgcactttatgggttgtgaagcatgcataaaacagccatggtacacatttctttctacggaaacgattgtaaaacgttcaataaccctcgtaatccttacaagaaggagcggatggactccaagttga

SEQ ID NO: 21085 - DNA, 224 bp, Glycine max
  modified_base (91)..(91): a, c, g, t, unknown, or other
aaaggctgcactctcttttatccctcaaaaaccaaaaccctaatggcagagcgcggaggtggcgaccgttgcagcgaccgttgcggtttcngacgcggctttggtgggcgagggcgcggaggttacaggggccgaggccggctccgtggtccctgtcgcgaggaataggagaaatgggttccagtgaccaaactgtgtctcctttttaaggatggaagaattct

SEQ ID NO: 21086 - DNA, 302 bp, Glycine max
gcgatctttatataataatataaataagaataaaaaaataaaaaaaaaaaaagaatctatataaagataaagataatatatataaggtgcaaatagtaaatctaggtacccattttattataaactttccttccatttttgttcctctagtaagcctagtatttccggcaatttcaatggcttctttatttccttatgttcaaaaaaacaagattttttagatacagaaaacaaagtaaaattcttgggttttttattccccaattataatactaaattcaaaaaaaggatcaattaactta

SEQ ID NO: 21087 - DNA, 316 bp, Glycine max
  modified_base (38)..(38): a, c, g, t, unknown, or other
  modified_base (57)..(58): a, c, g, t, unknown, or other
  modified_base (60)..(60): a, c, g, t, unknown, or other
cggttgattctcttatggttgaaccccgccgttggccntttttttcccgaaaagccnncngagccgcctttcaaagggcaaaagtctttccatatccaccccccttttttcgtttcctccttgctccgccagaaaagctctcccgccgccttcctttcccatctctccaatcaccatggtgtgggtttcaccatcacccccggtggtttatcaaattcaaattcaaattcaaattgttctctcttgaagtctcaactcaacttcacccacgaatctctttccaacactgttaatgttgatccctccagcaccacct

SEQ ID NO: 21088 - DNA, 161 bp, Glycine max
cttgttctactttttattatcacttttgcatttatttcagatatttagtatttgcgctacaggtttgttctttacgttaaacagatacaatactactctttatggcggctataaccaatttgaacttttcttccttgtgtaaaaaaaggttttgtgttcgt

SEQ ID NO: 21089 - DNA, 274 bp, Glycine max
aagcttgccagagggaacttcctttaccccatgaatacagaaaccagaagctaaaattgtgagtccaagtataggagcggtggaggcctttaaacaccaactaagtaggtacagatagcactacccttcaaagacactacatcaacatgcaaagaacaacatcatatctcatagtcaagctaggaaattgtcctctgcatcctctgctgcggtttccaacaaggtcaagagaaccaaagaagagcatatggcgaaagtcatccaattcaattgc

SEQ ID NO: 21090 - DNA, 375 bp, Glycine max
  modified_base (34)..(34): a, c, g, t, unknown, or other
  modified_base (54)..(54): a, c, g, t, unknown, or other
  modified_base (56)..(56): a, c, g, t, unknown, or other
gtgaattccaattcaacgtttcaaaacgcagtcntttcttctcttcctctcggngnctccgctgacttcatgtcggcgataaggggcatccagggccaacctcttgaggttacggtggtttcgtgctccaagttgaaggacacagaatggatttcaaggcaagatccgtacgtttgtgttgagtatggcagcacaaagttccgaaccagaacctgcacagacggcggaaaaaatccggtattccaagagaagttcatcttccccctcattgaaggccttcgggagctcaaatgtcttgtttggaacaacaaaactctcaccttggacgatttttatggaagcgggaagattccatttgcaccaaggttttttttt

SEQ ID NO: 21091 - DNA, 336 bp, Glycine max
gcaacattggtgtcaagaccggttctcagggtgaaattcgcaagatatgttctgctattaattaattaaggcaaatattaatcagtatccttataatattgattaaggaattaaaaaaatatttaaaattatattaatcatcacttaaggatactggttaataagactaattaattaattgcatacttttctgagaggtgccaagattaaacttctatacacctccttaattaaatctatgccagaaaaactttgctttataagtgaataaagcaataattaaaaatattgtggacaatgatataaaaagaaataaaaatcatttaagatctgtta

SEQ ID NO: 21092 - DNA, 452 bp, Glycine max
  modified_base (404)..(404): a, c, g, t, unknown, or other
taaactttaggtatattcgtcaaaattcaaccaatttttacaatcatcttggtcactaagtgacatctgatgcccataattgtacaatgcacacggggtttgttagggaatggtatgtagtggatctcggttgagttgaacctgcttttggttctttcttgacaaatcacactttatcttttttccctattgttcttgtaatttgtgccttcagaggtcagagaatgttcttatgaattattataactcatcagtcactcatgatgagtgccaagtagcagatgataatgaggggatgatgattattatgtgctactgatgattttcatgttttactgcagcactatgtcggttcaatctggtacgggggaacccactagataaatttatattcactatatctntttgcatggacccattgaatgggtttttattcataatagctcttcatg

SEQ ID NO: 21093 - DNA, 451 bp, Glycine max
  modified_base (260)..(260): a, c, g, t, unknown, or other
  modified_base (311)..(311): a, c, g, t, unknown, or other
cgagtttcaacttgcgagactggttaaatgagtttaggaagaaagagctgaacctaaagcgtattacttatctaagtggatcttacactcacccttttgatgtgccccatggttatatatggagccctcacttagtccctaaaccaaaagactggggacctaagattgatgtggttggattttgtttccttgaccttgcttcaaattatgtaccaccaaaatcgctagtagattggcttgaagagggagaaaaacctatntatgttggatttggtagccttcctttacaacaaccagaggaaatgacgcanattataattcacgctctggaagaaacagggcagagaggtgtcatcaacaaaagctggggtggtcttgggtctttggcaaaacaaaaaaatctgtgtatttattggacaactgtccgcatgattggctgtttccccgatgc

SEQ ID NO: 21094 - DNA, 458 bp, Glycine max
  modified_base (448)..(448): a, c, g, t, unknown, or other
cccacgcgtccgaaacagttactcaaatgtcgcagtctctgcacgtaaagacttcatcaacatttatacgacttcacttttttttttttttgaaggattatacgacttaattcactgagtagctcgagtggtggggtagcaatatattggaccagaacataactcatgaatatacaagcaagttagccggctcaagttcaaaataagaatttttaccatgatactatgggtcaaaacataacaagagaggggagcatctcagctcaagatttcatggatgtaacttccgggaatgtgttgaccgcgtcggtgacgcaataccgcgtcacccacaataacggtgacgtacaattgcgtaactggcgttgacgttacagtccccactcttcccccttatttatattttcacctctatcctgcactaatcctctcctcccccacacacgtntttctctctc

SEQ ID NO: 21095 - DNA, 73 bp, Glycine max
ttaaaggggccaagcttaacggcgcctgccttcgacgtcataacttttttataggggcacctaaattaaatta

SEQ ID NO: 21096 - DNA, 328 bp, Glycine max
cggacgcgtgggtccgtccaaggctaaatactggcgagagaccgatagcgatacagtgtttgagagggataggagaagggaaaaggaaagagatagaagtagggacagaacaataggtggcaagagagatagagacccggagaatgaaagggatgataagaatcgggaaaggcgagatgatagatatgggcacaaagacaggagacaagaaaaggaaagagataggagctgggatacagtgtttgagagggataggagaagggaaaaggaaagagattgagtgggaacacaaaaggggaaaggaacgtgaaaggagccgtgagaggta

SEQ ID NO: 21097 - DNA, 171 bp, Glycine max
cgtctgaatatagcaacttgaccaagtgttaatgtgccggaaaatcttacagaaaaaaataataataatcgagaaactatagagaaacccttatcacagaagggaagtatcatgagaggcaaaacattaataaaaaactttgtatctacatgattccgctaattccgtgcg

SEQ ID NO: 21098 - DNA, 349 bp, Glycine max
cccacgcgtccgtacttgctatggaagtcagtcaaatggtgacacagggaatgtgggaacgcgactccatgctgcttcaacttcctcatttcacaaaggatctggctaagaaatgccaggagaacccagggaagagtatagaaactgtgtttgatttattagaaatggaggatgaggagaggcaaaaattgttgggcatgtcagatttgcagttgttggatattgcccgattttgtaaccgattccctaatattgatttgtcatatgaggtgctggacagtgacaatgtgcgggctgtggaggttgtcactgtgctggtcactcttgagcgggattttgagggaaagac

SEQ ID NO: 21099 - DNA, 57 bp, Glycine max
cccacacaatcgaccacacttccaccaaatcttacattataacactatttaaaatat

SEQ ID NO: 21100 - DNA, 341 bp, Glycine max
cccacgcgtccgcccacgcgtccggttgggaagcagacagatgaaaaatgtttgtcagggtaaagattggttggatgggtgttgaactaaaatcaaaaggagcattcagtttctgggatcacaattcaccagctcttgggaatgttacttggaacttctccaccatcaccccacaaagcaaagcacaaaaacgggaaaaatacatttattcagacccccttgtacataaattctccattttttttctttcaacaatttggttgtttattgtaatatagaaatggttgtttaaaacatgtccccgctagacatgttttgttaatgagactactagctttcaa

SEQ ID NO: 21101 - DNA, 339 bp, Glycine max
cccacgcgtccgcaccactaggaatggaagtccagggcggatacctgatgatctaaactggggtcacatagattatggctgctggctatagacatagctgagcgtagtgaacttgatagcacacctagcggcgtctatgataggtacatataacagacccgagggaactctgcgctgcaaagcgcgttaacgggtacattgcatgtagtcacactatacatcacataggaagttcacttcactcgtacaccagtttggcacctacactgaatgctcaagtggcagatccaagcatgaacgacgtagaaatgttatgataaccagagctattacgtgtca

SEQ ID NO: 21102 - DNA, 299 bp, Glycine max
cccacgcgtccgcccacgcgtccggagagatcagggaatgtggaattcggttgaaatgagctagtatttggattggatcttggtgtaaagagaacaaaaaaaaaaaaggagaaaaggagttaggtgttgcagtaagtaaaaagtaagccgaatgatggatgataggatattggagggttaatgagtaggtgtaaggaaaattcttgttccattgctattccagtatgattttttcatatattttgtaatataccaacttctgcttttcaattcaaaggaaacaattgattgacaaataa

SEQ ID NO: 21103 - DNA, 220 bp, Glycine max
tttaacatacaggatatatataatagtttgcattcattttgttgagtttgttttcttttgggggtcatgcgttcaaatggtacatgcttctttggactaaaaccaaagattgtggcattgctttcaaatcgttttcttttgtgggtcgtgctttcaaatggtacatgttgttgagtgacggtattcattttcattttgcaagattgtggcattgctttta

SEQ ID NO: 21104 - DNA, 62 bp, Glycine max
ccacccacccttttctttttgtaaattggttctttgaaaggaataatatatattgatttcca

SEQ ID NO: 21105 - DNA, 443 bp, Glycine max
  modified_base (410)..(410): a, c, g, t, unknown, or other
tatgaagtcaatgattttggaaacataatactacaataatatatagggatcaaccacgattgcataaagaagctcaaggtggagctaaaattaagagcaccggaaaaaaaggatcaattcatctgataaaaaaaatgaagttgcgaatggcgagaggggaagtttatctaagggtctcagcaatactggttttggtattaacagcatgtttggttgctttagatactcaaaccaaggttgtgttcttatctattgagaagaaggctacatgcagagacttgaacgctctcaagatcttggtgtatgttacatctgcgtctgctggttataatctgcttctattgtgcaaacactccatttggtctagaaaaaacttcaaagggtcttatctatgcatggcttggatttgnttcttgttggatcagatcgccgtgtacatgaca

SEQ ID NO: 21106 - DNA, 479 bp, Glycine max
cccacgcgtccgcccacgcgtccgtacaaaagcaatatggaaacggagtcactattgcctaagccaacttatggtggcataaagaggtacttgagaaggaggcgctaccaacgcctcgacggcgatggcggtgccaccgctaccaccggtggaaagaaaacaaagatgattaggtcaagaagaagaagcccacgtaggcaatggaggatcaaggcaattccaaaattgacatggatggttaggtcacccttgaagatgatggcaaagctaaaaaatgcttacacaaacttcatgttgaattccatgagcacggacaacatatttggtaccaaaaggattccaaaggctgatcctcatcaagtgtctaagtattataccggtgatgcgtttgaggccaggctcatttttgagatttcaaaggccttggttgcgtctcatgaactatatcctgtacattaattattggttctacttctttt

SEQ ID NO: 21107 - DNA, 249 bp, Glycine max
gacatctgtgaaatagtttgagaaaaagaatggtgtagcaaaataagcaaagttcctttcaaccaaagtacaagaagatgaggaacattataggtttggtttctagagctattatacctaagttttgggtggtgggtgtaaatagtggcttggggaagaagacagtgacaatgtactctttacaaataggtggattgtctatatatggaatggtgaaataataaatagtactaatagtttttcttaaaa

SEQ ID NO: 21108 - DNA, 457 bp, Glycine max
  modified_base (298)..(298): a, c, g, t, unknown, or other
  modified_base (355)..(356): a, c, g, t, unknown, or other
  modified_base (376)..(376): a, c, g, t, unknown, or other
  modified_base (387)..(387): a, c, g, t, unknown, or other
aagaagttcagatctgctgcttactccaactgcatccgcaagccatcctgagattccctaggttgtgtgacgacatagcccccgtagtcttgcatctgctatattattctagtctcttcttttcccttttcttgttctcttccttgcccttttgttctctctacctatacagcaagactttgtttctttttgagtcaagatggctggctcagctattggtttcgaaggctacgaaaaaagacttgagatatcattttttgaaaatggtgtgtttgctgaccccggaagattaggcctncgagcattgtccaaagaccaatgggacgagattcttaaaccagcagagtgcactatnngtgcatcactttcaaatganttatgtgactnctatgttctgtcagagtcaagcctgttcgtctatccttataaaattatcatcaaaacttgtgggactacc

SEQ ID NO: 21109 - DNA, 416 bp, Glycine max
  modified_base (364)..(364): a, c, g, t, unknown, or other
tattctcgcaaaacctcaggttcatccgctcccacaacaagaaccgcttgccctacactctctctgttaatcattttgctgattggacttgggaggagttcaaaagacacagactaggcgctgcccaaaattgctctgccactcttaacggcaaccacaagctcactgatgctgttcttcctcccacgaaagactggaggaaagaaggaatagtgagtgatgttaaagatcaaggcagctgcggatcatgctggacattcagcacaactggggctttagaagcagcctatgcacaagcatttgggaagagtatctctctttctgagcagcagctagtggattgtgctggccgtttcaacaactntggctgtaatggtgggttgccatcacaagcctttgagtacatcaaatacaat

SEQ ID NO: 21110 - DNA, 286 bp, Glycine max
tagtgcaccgtaagggttgtgaagcaggcagagaagagccatggtgcacgtttctttctaccgaaactatgggaaaacgttcaagaagcctcgtcgtccctacgagaaggagcgtttggacgccgagttgaagctggtcggtgagtacgggcttcgctgcaagagggagttatggagggtccagtacgccctgagccgcatccgtaacaacgccagatacctattgacccttgatgagaagaaccctcgccgtatcttcgagggtgaagcccttctccgaaaaatg

SEQ ID NO: 21111 - DNA, 277 bp, Glycine max
acgcatatgctgaatatgtgtatagaacaagggattacttttcgtggctattgaccataatagggctatgtcacatcaaggcccttatgatatcagactcgcataagttataaggcctagagtggcgccaggttcttgaggattataggctatcacatccagatattacctgacttgatccttcagatgccatacaacatttactcagccggcagaacatgcttcacgctagacctgatatgaacctatctgagtcccatggcatcattggtgcacc

SEQ ID NO: 21112 - DNA, 268 bp, Glycine max
tccatggattgttgaagagaatagaagcaacgtagcagcaacgggtttaattattctgctcttctttaatatttttctctctagaacactagtaaaatgtgtttactttattgatctagtgccaacgtgtactttctattgataaattgatgattcaagtttattagacatgacgacgaggcagacacagtcaaagggccggcgatctagagggcccaagcttacgtacacttgcatgcgaactgatagctcttctatagggtaacct

SEQ ID NO: 21113 - DNA, 449 bp, Glycine max
aagcccttctccgaagaatgttccgttacggactcctcgacgagacacagaacaagctggattatgtgttggctctcaccgtcgagaactttctcgaacgccgcctccaaaccctcgtcttcaagtctggcatggccaagtccatccaccacgccagagtcctcatcaggcagaggcacatcagggttgggagacaggtggtgaacatcccatcgttcatggttagggttgattcgcagaagcacattgacttctcactgaccagtcctcttggtggtggtcgtccaggacgcgtgaagcgaaagaaccaaagggctgctgctaagaaggctgctggtggagacggagatgaggaggatgaagattaaattattaatggcttctgatatttatagaccttgtgctcgtttttttatctgtgtcggtagacattttagatttttgaaatg

SEQ ID NO: 21114 - DNA, 279 bp, Glycine max
ctgcagcattgatcgccactgtcattctccgtcatcgtcgctttcgatgagtactgtgtctgtggtgtgaaagcgaagagttctcagatcattatgcgcatgctcaacactatcgtttatggccatctgctgagcttgttagctgtgacctctatcatgggcattgaatcgatatgggactacatctcttgcaagaaggccgatgttggcatacgctctagggcatccgagcttactgatgcatacatgcatcgtgtgatctctgctatagcgatacct

SEQ ID NO: 21115 - DNA, 193 bp, Glycine max
  modified_base (52)..(52): a, c, g, t, unknown, or other
  modified_base (59)..(59): a, c, g, t, unknown, or other
taacaatttcacaagtgctattttcagtacattttcttacttgtgataatanaaaaatnaacgcccagtttgaacgtgttctcaagtatttcgatgaacatggggatggtaaacttccccactctttccttttgaaccgcctttccatgatgggtggtgagttattgttcaaagacgctcaaaagttgattga

SEQ ID NO: 21116 - DNA, 332 bp, Glycine max
taaaccctacttctacttccctttgttctcaaaccttatcccttatcctcccaaaaccggacgatgtctacctccggggcttctctcgcactcccaaccctcactcttcgaactcgacaacctctctgttctccccaatgcttctcctcgtccctctccctcacccctaactccaaacccatttccatttccgacattttactcaaaacaacgctgtcagacacaactcccatgtcactgtcaactcacattctttcccatgtctctgtgttggagcaacaggacgacaccttctgcgacggagacagaccacagcttctcccgccacctta

SEQ ID NO: 21117 - DNA, 294 bp, Glycine max
ggaacacttcagaatattatcgatcattacctaagactaagaaccgctgatagtcatggcaggacaccaagacgcgttggtcctacaaacaccaacagtgttagcgaatcttgagggaaagtggtgtaaacaactatttacgaacggatggtaattgaataaaaatatgggaattaccaacgatgatagacttaacttaacttctcagagcttaatcaattgtatgagaaatgggcgggcggtgtacaggatacaagcttatgtacgcgcgcatacgacggggttcatgttcta

SEQ ID NO: 21118 - DNA, 456 bp, Glycine max
atcggctcccagaatatttggaatgttacaaactgatctgtgaaagaaaggtcaaacccttggatttggttgcccttttgaaatccctaggagaagaaaaatgcatagtttttacaagatctgtggaatcaacacatcatctctgcaaattgctaaattgttttggtgatctgaaaattggtatcaaggagttttctggtctaaaacatcaacgggtaagaagcaagacagtgggtgaatttcggagaggggagtttcaagtgcttgtatcttctgatgcaatgactcgtggaatggatgttgaaggggtaagaaatgtcattaattatgacatgcccaaatacacaaagacgtatgttcatcgagctggtagaactgcaagagctggccagactgggcgttgcttcacattgatgtcaaaagatgaggttggaggatttaagaagttgatgaaaa

SEQ ID NO: 21119 - DNA, 276 bp, Glycine max
ccttccggaaaggaccatggatcatcctttctgcatatttatccatccatcttcattgatggtttttaaagttagggtgctcagtaattgttaaaagtgtgtagatgacttaatgtgttgcttcagttgtgttgactgttttttgtaaatcagtgttttcccctccaaagacctaatttgtactattttacaagacatttgtgccataaattgaaatttgtaattatatatgttcccacaaaaataatattgaataccatgttattgatgcattaa

SEQ ID NO: 21120 - DNA, 323 bp, Glycine max
cgcattgcttcgcctcacaacagcagctgcagcagcaatggctcccaaacgaggtggagagggcgcctgctcttgccgctaagaagaagcctgtgaaggtcacgaatcctttgttcgagaagcgtccgaagcagttcagaatcagaggggcgttgccttctaagagagacttgactaggttcgtgaagtggccatagaatgttcaaattcataggaagaagaggattcttaatcataggttgaaggtttctccaactttgaaccagtttaccaaaactcttgacaaaaacctatcaacaattttgttcaaattactttttaag

SEQ ID NO: 21121 - DNA, 153 bp, Glycine max
  modified_base (31)..(31): a, c, g, t, unknown, or other
  modified_base (59)..(60): a, c, g, t, unknown, or other
acatacacttattcattttctcccttacttntaattttaccactttatcatgctcatcnnaaacccgccgctttttaacaccaaaaatccacaccctttttccccaaaatattctatcacaaacttcataccacacacccatcttattaatta

SEQ ID NO: 21122 - DNA, 71 bp, Glycine max
taaaggatccaaccttacctacccgtgcatccaacgtaatatctcttttatagggcaacctaaattcaatt

SEQ ID NO: 21123 - DNA, 293 bp, Glycine max
taaaaacactcaaaagaggagaaaaaaagaagaaaagaatggtaacaatagctgggggtgtgggtctttcaagccctagcagggtatttgctaatgctaagggaatagactcagcacaaaaggcccaggccgtgaggtttccagctctgtcgaggcccattcaaaagtggcctggtttggtgaagacccggcccgttcgggcgacgccggagaagatatcggagaaggtagaggagagcataaagagcgcggaggaggcgtgctcgggaggcggcggtgacgcggaatgcgcg

SEQ ID NO: 21124 - DNA, 240 bp, Glycine max
cccacgcgtccgggtagtgcagcatggaaccaagcagaggacactggctcgtaaagtctgggcttggcattccttagctgtgaagagaacatgtagttgttgaatgtgtttgtagctcatacttcatgtactgtaccattaggaacaatttttcagcatgagtttatttttatatagcttcaccaaagttttgtcacatacaaatacaatccaattcatgatgattttatattttgagta

SEQ ID NO: 21125 - DNA, 309 bp, Glycine max
  modified_base (10)..(10): a, c, g, t, unknown, or other
  modified_base (18)..(18): a, c, g, t, unknown, or other
  modified_base (22)..(22): a, c, g, t, unknown, or other
cccacgcatncaaccacncgtncgcccacacttccgaagagagtgagagttatagaaatgggggtcgggttttttggtttggggataatgcgcaacgctatggcaatcaatcttctacgccatggcttcaaagtcactgtttggaacagaaccctctccaagtgtgacgaactcgtgcaacatggtgcttcagttggagaaaccccaacaactgtagtcaagaaatgcaagtatacaattgcaatgttatctgatccttctgctgctttatccgttgtgtttgataatgatggtgttcaatgagcatat

SEQ ID NO: 21126 - DNA, 472 bp, Glycine max
tccacgcgtccgcactttcactggaatcacaatcctgaaacagaaacatcttagcatttagcgatactactagacaacatgaccaccacattggaaagaggtttctcggaagagcaagaagctctggtggtgaagtcatggaatgtcatgaagaagaattctggagagttgggtctcaagtttttcttgaaaatatttgagattgctccatcagctcagaaattgttctcattcttgagagattcaacggttcctttggagcaaaatcccaagctcaagccccatgccgtgtctgtctttgtaatgacctgtgattcagcagttcagctgcggaaggccggaaagtcactgtcagagaatcaaacttgaaaaaattaggtgctacccattttagaaccggcgtagcaaacgagcatttcgaggtgacaaagtttgcacttttggagaccataaaagaagctgtaccagaaat

SEQ ID NO: 21127 - DNA, 267 bp, Glycine max
tgaaaatgtaattgccatgtgtttggcaatacaaatatccaaataatgtaatcttcgtatgagtagatgtgtgtgctgttatcctacttcaggtctgtgtagtcatgcagtctgaatcatttcaagttcctgtcttagttaatataacagccatggttgtggcattctatggtttattagactaaaataagtgtaaatctccgttcaataatcccttttccacagctaaaaaaaaaaatctaaaaatactactcctaaaaaaaatag

SEQ ID NO: 21128 - DNA, 275 bp, Glycine max
aaaaagaacagaaataatttatatcttcttaaagaacaaaatgtttgttatgcttaatatcgggaggttggtctgtatttgtattcactccgtccttgattcaagtagttttttctcggcgaaattgcccgaagcctacgctttcttgaatccaattgtggatattatgccagtaatacccttactcttttttcttttagctcttgtttggcaagctgctgtaagttttcgatgatatctgtaatttgagtaatgtcttagaacaaaaagagagt

SEQ ID NO: 21129 - DNA, 369 bp, Glycine max
tacacttcatgggccattgggtactctgtggctaacctggcccggtcctttatcaggaacgagaggaagattcaccctgtgtctgttctggctaaaggcttttatgggatcgatggagaagtgttcctgagtttgcctgcaatgattggtagaggagggatactgggtgtgaccaatgtgcacttgaatgaagaggagacacagaggcttagagattcggccaagaccattctcgaagtacagactcagttgggtatttgaattttctgcgatgggtacttgctctttttttcctttaattttcttttgaacttcccaccaacatgatgtggtttcgcctaaattattagtagtacttgctactgttag

SEQ ID NO: 21130 - DNA, 224 bp, Glycine max
acacctcagacatcctatcactcatccctctatatctctcgctcacttaatatacctataacggcggatttatttaccaaccggtacttgctctacatccatattcttctataacgtgtcgtattatatcttcgcttattaatatcaatacttaccatcctgtcttatattctatatccactcacaattccacacatcatactacaccgaatcataaagttcaa

SEQ ID NO: 21131 - DNA, 421 bp, Glycine max
atgcgcgcgtacgtaacctcaggcttccgctcgggcatattaccatcgtatatttatcgagtattatatgcagcagcatgccaatgtcttatgaatctatggagttttcacttacttgctgatgagaggcacctacacatgtattcatgaacggccatagttttgagaccggtcttactgcgaccttgataaaaagaatttgacaagctacagaaatattgacaacatggatgatcttcgacctggtgccatatatcgtggtgtgagctgaaagcatgtacatggcgtggcccatgtatcagctaccatacaatgtctggagaactgtggtgatgactgttcacatctatgatgtatgcgcctcactaaccttgaattgtattccgtttaagatttgataatgccggttatagctttatat

SEQ ID NO: 21132 - DNA, 317 bp, Glycine max
caagaagaggttagctactactggagcaaactttgcaagagcatacaccgcggaattcgggagttgcaagttccctgagaacttcactggttgccaagatcttgccaaacaaaagaaagtgccattccttagtgacgatttggagcttgaatgcgaaggaaaggacaaatacaagtgcggttctaatgttttctggaaatggtgaaaggaggcaaccttttatgcccaactgcgaattattcgctttgcgatgtacctaactgcttgaatatataccatatttttctgcattgctttcagttaaaaaataaagattt

SEQ ID NO: 21133 - DNA, 380 bp, Glycine max
tagagctaaatgacttgaagatacgatacaggctcgatggaccacttatactccatggaggcacatgcacattcaaagcaggacacaagattggaattgttggaaggacaggcagtggaaagtccactcttatcagtgctttatttcgtctagtggagccggcaggtggaaaaattgtagtcgatggcgtagacatatcttctatcggccttcatgatttgaggtcacgttttggtgttatacctcaggatcctaccctttttaatgggactgttaggtataatttggaccctttagctcaacactctgatcacgagatatgggaagttcttgggaagtgtcagttgcgagaaaccgtccaagagaaacaagaaggcctg

SEQ ID NO: 21134 - DNA, 341 bp, Glycine max
aattctgtaaatatatatgtatatgatattacggtcaataatgatgcactcacaaacttttctacacctttactatttaaggtaaaaaaatctctaataaaccttttattaccacattttactaaattaatatttcactttaaaaaaatcctataattttacataaaaacttatcaatttttaaattcaacttacttaacttctaaaattactatcaaacatactctctttattccaaattacaacttctactttaaaccattaattctcaccattaacacatacttttaaattaatcttcacactttactcatcacaatttctcatttacacttttttat

SEQ ID NO: 21135 - DNA, 301 bp, Glycine max
  modified_base (57)..(57): a, c, g, t, unknown, or other
tacagcttgcttacacaaaaagccacctctgacctctctttcttcctttcagtgcanaagctcccctgcatgaccgtacaatctagtatggttagtaatctacaatgcttcttgtcttaaagccaaagcattaagttaatgtcttttcattagaccaaatgggtaaggcttccaaatggtttcgcggccttctcggtctcaaaagaccagactcgccgtcttccaaagaaaaacgccgctggaccttcgtcaagtcctacagagaaaaggactccacccacatcgtagccggcatcccccg

SEQ ID NO: 21136 - DNA, 234 bp, Glycine max
tagagtcatcactgatcctcacccttgaccacacacctactgccaaaccgcggatgatggagcacatgaccatgactgccactactgatcaatggatgcagttctatcaacaacctctaatggatagccatggccatgatcatgatcatgatcatgatcatcatgctttggcaccaaacaccacagacggcttctctagttctaccactcctaccatgccttcatcacagagca

SEQ ID NO: 21137 - DNA, 278 bp, Glycine max
agaccatatgcaacttatatcattgtggatttgaaacccggaaaagtgcattaaaaaaacgagaaaagtaaaatccaaatccaaaacataatgacaagacaggttattatctaaacttcaaaagggtcttcgcaaaattaaaaacaacccattacaattgggcctgttaaatcaatttcctaaattttgggtccagaaccgtttccactgccagcaacaggaccatcctcatccatggctccacccgcatcaccaccaacttcttggtacatctttgc

SEQ ID NO: 21138 - DNA, 167 bp, Glycine max
cccatttaatttttttttaatttaaaatattttccttattcttctaaataattaagtaaagcctcgttttacattgcacaacgtataatatctccaaatataacacccttattaactcacaaattaacacacaagagaacaccatatttagcacaaatatgaacaca

SEQ ID NO: 21139 - DNA, 207 bp, Glycine max
taaaaacaaggatatcaggaaatttctggatggtatttatgttagtgagaagggagcaatgctggaatagtagatgttgaaaacaacgagtaccttgatggtttaatttggggaccttttttggtaactcgttcagattggattttacaattttgtgttggcaaactttttcttatgggaatattttttttgaaatcggtacttctt

SEQ ID NO: 21140 - DNA, 337 bp, Glycine max
tatacacataaatccactgcgtttttgcattaccacactctgtacctcacataaggctacagtcaccataacatctatcaggaccgtcaatcataccactaactgctgataaagaacaaccttgactgctatcaacctaatacaaatcggtctcactctaaccgacgccgacgataaccttcccgatctgtccggaaaccttttcatttgggaatttaacactcgtgacttcgacgttacgcgtcacacctacgcacttgacttcatcgatgtactacctcataaaggaatctatactctgcattacgccatcgaacatgtaaattccacccacttc

SEQ ID NO: 21141 - DNA, 135 bp, Glycine max
acgtaaaagtcctgacccctaacctactatgacctaacactctgcaacttctcagccatgggcatggcgatcgtttgtcgatgatcacctacatgagtcacattccatgaaccagctcatctcatcccgctatca

SEQ ID NO: 21142 - DNA, 395 bp, Glycine max
caagcacgattctagtcacaatatatcttttatgatggacaggatacagattttgccacactggaggatgcggttcataagccttctgacaacggtgtgtgaagcaagaattatcaaccaaggttcctgcaagctatgtgacattttagattccaatgcacataaaatttatgtatataaagatggacactgaaatcaaatcaggcatttcatttagtcctttgtactgtatactagtagtatgttgctggccatcatttgttgaaaacttaaaatgttagaaatagtaaaagggtgacaaattgtaataatgtatttatcaaacatttaatcagctcgtttgaattcacgatttgatgtggtatgagatgaactaattaatttttttttctaaa

SEQ ID NO: 21143 - DNA, 413 bp, Glycine max
ctttcatcatgcatcaataacaacagggcaccttctgcgccatcaattctccaaggcaaagggtttgtcactcaaagagctggggctaaaaacaagcgttggtgccaataaacttcaagttattaaagcagctgcacgcattgatacagaagtagtttctgaaaccacgaagggtggtggcctacgtggaaaattgaataaggtggtgctggcttatagtggtggcttagacacatcagtcattgttccatggctgagagagaattatggttgcgaagtttgttgcttcactgctgatgttggccaaagcataaaagaattggatggtttagaagcaaaagccatagccagtggggcttgtcaattagtggtaaaggactcgaacgaggaatttgttagagagtacatatttc

SEQ ID NO: 21144 - DNA, 333 bp, Glycine max
attgaagttgaagtcttgcccttctctcttcaactccaaacacaagacatcatcatgcatggctgcctccgtctccactgtcggagctgtcaacagagctcttttgaacctgaatgggtctggacctggggtttcagctcccagttcatccttctttgggagcagcttgaagaaggttattggctcaagggtccccaacacaaagatttcctctggaagcttcaagattgttgctgtagaagagaagaaagagattgaagagacccagcataccgacaaggacagatggaagggtcttgcctatgatatctcagacgaccaacaggacatcac

SEQ ID NO: 21145 - DNA, 357 bp, Glycine max
aagccccataacattctactagatgaaaacttcaccccaaaggtctctgactttggattggcaaaattatatccaatagataatagcattgtcccaaggacagcagcatgaggaacaattggatatatggctccagaattgttttataataatattgggggaatatcccataaggctgatgtttatagctatggaatgttgttgatggagatggcaagcaagaggaaaaatctaaatccccatgcagagcgttcaagtcaacttttctttcccttacggatttataatcatattggagatgaggaaagatatagaaatggaagatgtcacagatgatggaaaagaaaatgattatag

SEQ ID NO: 21146 - DNA, 233 bp, Glycine max
agggcaatgagggcatatctctagccagactttaacttaaccccaaatcgtatcagcggagggcgttatggcaataatgctactggctggcaagaatgtctgactaaagattgtatatagccgcttaactgcgcaatctgttttaatatccgtaaggtgcttctgtaaatttgaaactttaataacgttacgacagaaatatactgaatttattttcattgtcaaaagctaac

SEQ ID NO: 21147 - DNA, 316 bp, Glycine max
taacacacacaaacagagagctatgtacgatcaaattaattaagatgggggaagtgaggaacagacaagtggttctgagggactatggaagtggttttcctaaggaatccgacatgaacatagttgaaggaaccacaatattgaagcttccacaaggttccaatgatgtgcttctaaaaaatctctacctttcctgtgacccttacatgagaatgctcatgaccaaagtggaaggccttgacgtgtttggcacctatacacctggctcttcatttacagtgtatggagtgttcaaagttctagaatctggacaccc

SEQ ID NO: 21148 - DNA, 168 bp, Glycine max
  modified_base (7)..(7): a, c, g, t, unknown, or other
atatgtnttaattatattttttttgaataaattaaactattaataatcgtgaaataaataacaatgcttttacagtatatatatacctatatcaaaactttatatgtcaatcaacctaaattatactttcttccactttataaaactcttcataaatcaaaataaaaa

SEQ ID NO: 21149 - DNA, 289 bp, Glycine max
aaagacagggccgggcgccgcgccgctctgaggccagcctcctactgagaacagtccctcccttgtgcgggtcgcacggctagccgcaggttcggccacgtcaaatccattctctaaaaaagcagggagcagagctctctcttcgccgacgacgcaaaaaggagctggggaggaaaaagctgctgccttttgcgctggagattcgtgatcaaggcttctcattttcccaggctgcttccccttccgcatgaggagcgtcctgagactaaggaaagagcctggaaaatgg

SEQ ID NO: 21150 - DNA, 451 bp, Glycine max
ctcaagttcgccgaaggagggaatccatggcttcggacattgaacaatcacgttggaagacaggtgtgggagttcgatggtaagcttggatcgccgcaagatctcctcgagattgagaaagctcgccagaattttcacgataaccgctttacccacaaacacagcgctgatctacttatgcggatgcagttcgcaagagagaacccaacacgtgaagtcttgcccaaagtcggagttaaggatattgaggatgtgacccaagagattgtgacaaaaacattaagaagggccgtaagtttccattcaactctccagtgccatgacggacactggccgggagattatggaggtcccatgtttctgatgcctggcttggtaattactctgtctatcactggggcgttgaatacagtcttaactgaagaacatagaaaggaaatatgccgttacc

SEQ ID NO: 21151 - DNA, 251 bp, Glycine max
aacaaagatgctcgactcacgaaaaccacaagccttcttaacgttgtctccgccaccaagaggccctcttactactatgccatctaatcatctacttgtacctaacgatctctaaatgacaactccgttaccctacaagcattcactaacatcgggagacaccattacctatataactttctcctcagactcaaagaccccaaatactaggattatatctacacctttgaacgactctactatcctaaaac

SEQ ID NO: 21152 - DNA, 337 bp, Glycine max
aaattatttatttttttcatttgggggggtttctttgtacgggtatctatcatttttttttttttattttattttttttattaaaaataaattgttttttcctctataggatcctttcttcaaaaaaaaaaatgcttcctcacacttaaatttcccttaaaaaaaataccatttggggtaaaaaaaaaaaaaaataaatgcggggaaaaaaaaaaaatgtccaaccccccccccctttaaaaaaaaaaacccacccaattttttttttttaatgggacaccccaaaaaaaccccccccccccaaagtgtgaaaaaaaaaaatgccaaaacccccccc

SEQ ID NO: 21153 - DNA, 399 bp, Glycine max
aagcttcgaaccaaatcttattgagaaaatgtctggtcgtggaaagggtggaaagggttggggaaagggaggtgccaagaggcacaggaaggttcttcgtgacaacatccagggcatcacgaaacctgcgattcgtaggttagcgagaagaggtggcgtgaagaggatcagtggtttgatctacgaggaaaccacaggagttctgaagatattcttggagaacgtgattcgcgatgctgtgacctacactgagcacgctaggaggaagaccgttactgctatggatgttgtttatgctcttaagaggcaaggaaggaccctctatggttttggagggctaaaaagtttaagggttattggattctattgcagcgaaaaaatacctgttcttttaatccg

SEQ ID NO: 21154 - DNA, 271 bp, Glycine max
ttttaatataaggattgatagtttatagtatatgatgtgattcaaaaaaaaaaaggattgccttatgtagcaggcgaagacaaatggtagattatacaatgtgcatggaagggcttatatacttcatataacgtagataaatgagaccttattgaaatgatgattatcaacacacataaagaaacttataatatgagttctagttaccacattgtaatgtttatagaatgagatgagaattccattattatgatgatctattttgttactt

SEQ ID NO: 21155 - DNA, 395 bp, Glycine max
aacgggtcaaattaagactggagctccatgcaggtcagagcgtcttgctaaatacaaaagcttcattgtctggactactttctcgattccctttgtccccaatttcagcaatggacgacattctccccgacgaagaatagttcggttgattcttcaaccttctcgaactagaaaattttgcatcttcgatactgttattaacagcccccaaagtccccatgcctctcacaccagcatacactgccaattaagctttcataacatcattatggcaacccatacataaacccattcacgccctaaacaaacatgaagcctaatagtaacccccaaaataattagtctttttttttttatctctaagttgacaacataattgtactaccctacagctc

SEQ ID NO: 21156 - DNA, 376 bp, Glycine max
ggtttggtgcgcttgaaagcaaaaaatatttacactctccatcctattattgaaactagtttttagacgatgaaaaaagtctactgttgcaatttgctttataagagtcggtatttttacaaactattatgtgcaccataatccagttaaaagaggaagtataagaaaattcgactgccaaaatcggagttactgggcaccacttagcgcagaaagaatctataaaatgccgaccaactcagaaatatcaaacactcagctggtaaccaacatggcaacatccattgttcatctcaatactgtcatataagtgcagccagcattgctccaaggtctgtcaatgattcaagagtgctggctatttgagccattggag

SEQ ID NO: 21157 - DNA, 383 bp, Glycine max
tttggttttgggtttttttcttgctgtcatataacgttagttattttgtttattagtcattctgttttccccccttttttatatctttgtttcttctgcttttacctcaaaataaatacggtatatggtatatagtaattatattcctgttttattttttcaaggaaggtatatctctttcaatttttcccttttagtcctagatgttttcatttgttatttcattaaagtaattttctttatttctcttcgaagatacggtgaaaggtcttcctacatggattcatgttttaaggtttttagctaagttcttcattattatttggtgcagataaaaaaatattgttggtaatatgtcttcttttttttacttgatttgcgtt

SEQ ID NO: 21158 - DNA, 270 bp, Glycine max
ccaaaattcacgatctgctttacagtgttccttccaaagcagacagtcagggtaatgagcgccacccttttcggacaaatccctgagagtccattgtgtttgtaatgccaattatgttagctgttgtagctaagtcacctttgaacaatttaggatgagccacttttatggcaatgtaatcaccatcttcatcaattttatctgcgttttgatattggaaaaagcttcaatatatgtttggaactctaaccattattaaaaaaaaaatat

SEQ ID NO: 21159 - DNA, 259 bp, Glycine max
tcactaccttattcttaaaaggtatcaacatccgcatatttttaatagagggaaaggggccttcctaaatattttttaatcttatttttttcatgtttaacatatgaagcaactgcttcaacagcccctgtaaacactgcagaaaaaaaaacaaattaatgcacattcaccctgcaactaccacagtaataataacccccaaagtaactgctaacccaatcccgtaccctccttccatcactccctattacaactaccc

SEQ ID NO: 21160 - DNA, 360 bp, Glycine max
tccactcgtccgatcagagcctacagacacgttaaccctttcaatcccttgcacaaagggacggtaactgggcccttgcatacgggtacttcagtggaaaactttcagagaggaacttcaatcataaaatctcacggagggaatatcctaacaagtgtatctggattatagccaacatgaaaattcttacaaccaacaattgtcgatatttctgccgatgctcctgtagataaccaataattgtttactccagttctgaatgttatgaaattacagactctatactaagcatatgcctttaacaattctgtacctcatggattacataagtcacatctttacccaaatacctggaactat

SEQ ID NO: 21161 - DNA, 109 bp, Glycine max
ataggtttttattttatactatatattttatttaataaaatattttttaatttttttaatcttatttctaatatatatttcatattatattatattttattagattatt

SEQ ID NO: 21162 - DNA, 339 bp, Glycine max
tcggccaaaacatcgcgtgggaccagaagagcatgaagtccgggtttgcctccgcccgtgatctgggagggaatgatctcaagttaacttgagataggcacttaaaaaaatttgttagggattccggtatggttcgtatgtcattggttttctaactttgtaccatacagtgttatttgcaatagaattgtgtctcttatgtttgtctctagcaaaaaacaatacactggccgtaattttacaacaaaaggactggcgatttacaggatccaagcttacttacccgttcatgcgacattatagttttgctatagggccacctaacttcaatgccctggc

SEQ ID NO: 21163 - DNA, 201 bp, Glycine max
cccacgcgtacgtaactgactatagcgacgttcttaaactgctgctaactgaggaagacgaggataccatttagcgtgaacctgacaacagcccatgtgcagcagaatatatcgggatccaaaagatcttaagatgcagttccatgatggccctttaataacgatcaattcgctcaatcttggaaaggaatcctagggaaa

SEQ ID NO: 21164 - DNA, 323 bp, Glycine max
acatatgaagggtcatgtgaagacacgggtgcataaacgctaactagaccaacaaacaaatgcatggccagtcatgtcaagaacatgatcagtagcatcaaccgctcatttctcaataatggtgaaattaactgtgccaacataataactgccaccacaagaatcaatacttggatataattgacatggaacagaaattaatttcaatgtctgctctgtatataggattgatagtctctcggaatatgtgcatcataagtccttggagagtcaacaatcactgaaacagaacaatggatctagaaaaagatgtggacttattt

SEQ ID NO: 21165 - DNA, 251 bp, Glycine max
ggaaaaaatgagatcataggtacctaaaaataagaaaaatgatctcaactgggtgaagaatgaagatccattagctatgttaggaattgtgtcgacatgtaaggactaaggacccctagtagaaaattcttgtttcattgctattgtagtaggatttttttgtatgtctgtgaaatattatattatattatattatatatatatatatatatatttttttttaattttcaaaaaaaaaagaaaaaataaaa

SEQ ID NO: 21166 - DNA, 357 bp, Glycine max
aatccctaatctaaatagtaacccgtcaaagtttctaaatttttctccattaccacttttagttatcaagtaaaaatgttaactaattacataatagcagtaaattgtcatctcataaaaaaatttgacaaaaaattcatgtgtaatttttttagataaattaaatttttaatctcttgtcttgaagaacaatttatgacatcatactagtaaatgagagattaaaaacataatttaacaaaaaattatatgtatttatcctattaaaattcttgatgacatgataagctatggacgataaatagtattggtatgttattagttagtattggtattttacaacatcaactaaaagtc

SEQ ID NO: 21167 - DNA, 124 bp, Glycine max
tggacatttaagagggactcttgggtataaatttgttactccactccaatactttttgtgtatgacatttgtaatttgttagagttagatttataacatgacacacataaacttgcacgtgatt

SEQ ID NO: 21168 - DNA, 72 bp, Glycine max
aaaaaaaaaaaaaactaaaaaaaaaaaaaatttataaacaaaaaaaaaaaaaaaaaaaaaagtgaaaataag

SEQ ID NO: 21169 - DNA, 446 bp, Glycine max
tatgctttcaagtagtaccaattgggcactttgtttagtgtcttcattttttttttcatcctcatcaaattaaccccctaaacatcatttagctagctagccaaattaattattaattaggcaaataatgggaaacccagaatccaatttgccacccggttttaggttccacccaaccgatgaggagctcattcttcactaccttagtaaaaaggtagcatccatacccttgcccgtttccatcattgcagaggttgatatctacaagttagatccatgggacttaccagctaaggcaacctttggggagaaagaatggtatttttttagtcctagagaccgaaagtaccctaatggtgcaaggccaaacagggcagctgcttcaggttattggaaggccactggcactgataagaccataatgacatcattgcaaggaggagcac

SEQ ID NO: 21170 - DNA, 332 bp, Glycine max
gacaaatccacctaagataaacgatgagtgcatctatgatataatctgatggttatttttgtcgtgattctgctacaggtttgtaaaattaattgtattgaagaaggggacaattatgatcagtagtatgtgtggtcaagtgtatgtatgatatatatactatgatggttggtttacttccactctgatacatgtttgctacataagttgtatggaagaagtgagtgcaccatcttcaggataatgcgtgatcaatgataaaggaaacgagggactgccatgactatagaagatcctgaaaaagggcggtcgttctagaggatccaagctta

SEQ ID NO: 21171 - DNA, 407 bp, Glycine max
  modified_base (313)..(313): a, c, g, t, unknown, or other
tatcttacccttctctcctccaacagatctctcaaaccctgatttcttcagtctcttccacttcggttgacctcgtatgcggtgtcccttacactgccttacccattgctacatgtgtctctcttgctcagaacattcccatggtcatgcgccgcatagaaatcaaagattatggcactgctaaagctattgaaggcgatttcaagcctggccaaagttgcttaatcattgaggatttggttaccagtggcacgtcagttttggaaactgcggcgccattgcgtgctgtgggattaaagatcagtgatgctgntgtgttgatcgatagagagcaaggtggcagagaaaacttggaggagaatggcatcaagctgcatgcaattattaaattgactgaaatggtgaaa

SEQ ID NO: 21172 - DNA, 343 bp, Glycine max
ccggacctgccgtcccggaacgaccgcacgcgtccgaagcattcggaatttaataaagacccatgagaagaagcctcgcgagtccatacttcgtcaggagtttgctaatgccatagatttcattaataaagatttatccgaggagaacaggcttaggttgcttcattgggatctgcacaaacattttcagagctgcgctcgctaacgtcgttgagctcacttggcaaagtggctgcatatgcattgacattaacacggtgtatctattgtcaaacgaccccaaccttgataccatatgaaagcttgaagtggcgaagtacagatgttgatgatggtacctttt

SEQ ID NO: 21173 - DNA, 294 bp, Glycine max
tgaaccaggatcagacggctcgtaagcgaggacacttaaattgatcaaaatgcaacgcgcccaatcgcaacagctggcgcagttagtgtgccgtactgaatccgacttgtaattatcttacttgacattggatgatgattgaaatgaaaatccttttggtgggattaaattaaatttgctgaacaactactattacattagtaatgctcttccttagttattgaacaatacaatacaccaagtgcaactgtgcaaattgtgctttgcattcaataaaaaatattataaattatt

SEQ ID NO: 21174 - DNA, 420 bp, Glycine max
aacttggtcaagaagtgccttgagctcttctttgaaattgcagagaacaaggaggattacgagcaagttctatgaggctttctctaagaacttaaagcttggtatccatgaggattcccagaacaagggaaagattgctgaattgctcaggtaccactccaccaagagtggtgatgagctgacaagcctcaaggattatgtgaccaggatgaaggaaggtcagagtgacatctactacatcaccggtgaaagcaagaaggctgttgagaactccccattcttggagaagttgaagaagaaagggtatgaggttcttttcatggttgatgccattgatgaatatgctgttggccagctcaaggaaatttgagggcaagaaagcttgtcttttccaccaatgagggtctcaaaacttgacag

SEQ ID NO: 21175 - DNA, 453 bp, Glycine max
tctgacttgggtataggggctaaagactaatcgaaccgtctagtatctgtttccttccgaggcttccctcacgataggtggagcccgtaggcgagttctatcgggtacagccaatgattataggcatcgcgtggcgcaacgcccatcacctattcgcaaactttaagtaagcaggacggcgtgcatgctatgatgagccgagccacgaaatcgagagctccaagtggaccatctttggtcagcggaactgccgatgctggatgcaccgaaagtcgggctacagagcctaactgtgcgctatcctagatcccacacagggtgttgtgcgattagagacagcacgacactggtcatggaagtcgaactccggtaagcagagggtaacagctaacctgccgaatcacctagccacgaaactggatggccctgatgcgcgctacctatacccggcct

SEQ ID NO: 21176 - DNA, 439 bp, Glycine max
tgaagagctgcgagaactaggttctggtacctttgggactgtgtatcatggaaagtggagaggaacagatgttgctattaaaagaataaagaagagctgcttcactggtcgatcatctgagcaagagagactgactgtagagttctggcgggaagctgacattctttccaagcttcatcatccaaatgtggttgcattttatggtgtggtacagcatgggccaggaggaacaatggccactgtggcagaatatatggtggatggttctcttaggcatgtattacttcgcaaggataggtatcttgatcgtcgcaagaggctgataattgcaatggatgcagcttttggaatggaatatttgcactcaaaaaacattgtgcattttgacttataatgtgacaatttgctagtaaaactgaaagatcctttacgttcaata

SEQ ID NO: 21177 - DNA, 351 bp, Glycine max
  modified_base (281)..(281): a, c, g, t, unknown, or other
tttcttattaactacaggttttattgcaagattaagccctttgttcaactcaacttctggacattcaatagcttcagatagttcaagtttaaaatttgaatccattgtactaccctcattcaagctaaatgtatcagaatcagttgtgataatttcagaactgttgtcatcaatgctaccattcgagacaaaagtggatgactcaaaattatcacagccagaaagatcaggtgatttcctgacatttctattcctttgtgcacatacactctgagctgcantggttgatgggttaccagcactctttccactatcattacaagggcacacacagttttgagcccgtgatga

SEQ ID NO: 21178 - DNA, 407 bp, Glycine max
  modified_base (338)..(338): a, c, g, t, unknown, or other
tacacatcacattttctcaaagtaatttattaattaataaataaatggcggcggcggcggcagtgacggtgctactcccacctaggattccgaccgccaccaacgttacccgctgctctgctttgccttctctgcctcctcgcggcaccaacactaaaaccactttgctcttatcttccctcaaccacttctcagtgtcccgaaaatcttctctgcttcagaccagagcttcttcagaggaatcatcctcagtagatgccaatgaggtgttcacagatttgaaggaaaagtgggatgctcttgaaaacaagtccacagtacttttttatggtggtggngctttagttgctgtttggctatcgtcgattcttgtgaagcgcatcaactctgttccctgctttccaaag

SEQ ID NO: 21179 - DNA, 378 bp, Glycine max
cgcctcttttcctctccgtctccgacctccgatcctccctcgccgagacatcctccgacggtggcagaatcgtaattttccgcggcaccgtcgacacacctcgaaaaccttgagacccggtgtcttggtttctcgcaagtccagcgataacagcgtcgttcttcaaagaactcaaacgagtttttatctgatctctggagaaatatggctgccaatttctggacatcatctcattacaagcatcttctggatcaggaagatgtggatgtggtgaatacactcgacaaggaaaagggtattacactgggagggatttaagcttattaaagatgcacatggctaattatattttgaaattggctcaacaagtaaaagtga

SEQ ID NO: 21180 - DNA, 401 bp, Glycine max
atcccacgcgtacgcccacgcgttcgcccacgcgtccgtatgactctagcagtctatacacatgcgaccgaggaccgggacacttgaactgtcgactacaactctgcgttctcagtgtttcctgcagaagcatgcgaaactgtaggaggggaagcctgcatggcggagatgtaccctgaaacgaagctacagccagaggctaagactccacgagtcgttacagaaaacgtttagagagaatatcttgaatacgatgatcctaaaaccgtatttcgaggaaaggcttgtgatgatcttggaagaactttctgggagaccgaatatcaaaaaggtgtctactaaagaaatgggaaaaccctttttaatgccatgactactgcggtttcaatggcaaccaataa

SEQ ID NO: 21181 - DNA, 341 bp, Glycine max
gatggatatctgcagaattcggcttaagcagtgttaacaacgcattttacgcggttgctcacgcccctaccaactgcactcttggcatcactttcaacccagacaatcctatgaaaagcgttctactgctataatcttatctaacttttcaacttacacttgatttactttaaccaacactttcacttgacattattctctccaccttcgccgatgaccatactttccttgacctcactctgatcactggacatacactctctatcaacatcaccattgaacacaccattgttgatatcaccacagatagctatctgactaccaacaatacccgtcttaac

SEQ ID NO: 21182 - DNA, 459 bp, Glycine max
tggatatctgcagaattcggcttaagcagtggtaacaacgcattttacgcggtgacgttattccgttgcctgcggccatcccggattcgtttcagtgatcaagatttgtcttactgatcatatcatgggaaacttactttgtttagctcaagtggatcaatcaactgttgctattaaggagacttttggtaagtttgatgatgttctggagccaggttgtcattgtgtgccttggatatttggaagtcagattgctggacatcttactcttagggttcaacagttagatgtcaagtgtgagaccaaaactaaggacaatgtctttgtcaatgttgtagcatcgatacaatatcgtgctctatctgaaaaggctagtgatgcatattacaaactcagcaatacaagggcccaaatccaggcctatgtttttgatgttattagagccagtgtcccaaagct

SEQ ID NO: 21183 - DNA, 399 bp, Glycine max
atggatatctgcagaattcggcttaagcagtggtaacaacgcatagtactttttttttttttttttttttttttgtgcaatttggaaagatttcagaaaagattctctattcagcagttaaatacaaagttaagcaaactgcacacgtgtttagttttatcttgtctaatacccaatgatcagcaactcagtcattacgaattcacagtacattaaaacgaacatagcttgatgttttccttcctttcttccattaacttccaactttactaatgaccatacttctggaactcccactcactgttgtcaagagggcacacttgacgagtcttcagccagcgactgatgcagtgaaagtgaaaagcatggtttcagacaccccaagcaacagttcacttc

SEQ ID NO: 21184 - DNA, 242 bp, Glycine max
atggatatctgcagaattcggcttaagcagtggtaacaacgcattttacgcggggatataacaaagtaacaacctgtctacatctctgcaacaaaagcttaccagcttaccttctagaaccttccataacaccgattaaaccgttcgttaatcaccgcaatggctgccgttaagcgtatctcctcattcatcgctgatcaagttatagtgattgcagtcagacgtggatttgcgagtgctgc

SEQ ID NO: 21185 - DNA, 195 bp, Glycine max
gatggatatcttcagaattcggcttaagcagtggtaacaacgcagagtactttttttttttttttttttttttttggttgataatgataccatttataaatatatatatatataactaactcaacacattacccccatttatagtggcaatgattcaaacattaaccaaacccgaaccccatccttaaccccaaa

SEQ ID NO: 21186 - DNA, 221 bp, Glycine max
gatggatatctgcagaattcggcttaagcagtggtaacaactcatattactctgcgaccaacaaccttaactagaaagcatcctaggaaagctatcgtttcccacaactttaatcactacagttctaaaatggcaaggaccgtaatgatggttttatgtgcggcgttcgcttgcattgtgaatgtttcaccctattcaaaagctatcactttgtgtcaaat

SEQ ID NO: 21187 - DNA, 304 bp, Glycine max
atggatatctgcagaattcggcttaagcagtgttaacaactcatattacttgttttttttttttttttttttttgttgaaatttaacatatgtataaatatttaaccatacattcacacaatttaaaattctcacacatttaaaaacacaaatatttttttcaaccattttattaataatttatttacaactattcttacaactattattttaattattactacaacacttttctattgattaagtactccaataattattttaaaaattttttttttaaaatttttaaaacactatttttttt

SEQ ID NO: 21188 - DNA, 335 bp, Glycine max
atggatatctgcagaattcggcttaagcagtgataacaacgcattgtacgcggggatcaccaaaagcaccaccatgtcttcttcgcaaagcaaatcctacgactaggtgtcacgcgcccgaaacaacatcaaacccctcattaaaaagccccaactccattcgcacggcctgtttcttcgcttctccctcccttaaccaattcctccaatatgcaatcctcgccaacggcttcattattaacctaatccaaaacctctgtgccaagttcctgcctaaagaacccttttttttaacaaacacaccgttcaacatcttgttggcccttaacccttac

SEQ ID NO: 21189 - DNA, 393 bp, Glycine max
aagcgtcttaataaacgctcttctctgaaaaacctgatttcttctgttcttctcgggtctttcgtttcgatcttcgatctctgaaaatgagagagtgcatttcaatccacatcggtcaggccggtattcaggtcggaaacgcctgctgggagctctactgcctcgaacacggcattcagcctgatgggcagatgccaagtgataagactgttggtggaggtgatgatgctttcaacaccttcttcagtgaaactggggctggaaagcacgtgcctcgtgcgatttttgtagatctcgagcctactgtgattgatgaagttaggactgggacataccgtcaactatttcatcctgagcagctcattagcggaaaggaggatgctgcaaacaact

SEQ ID NO: 21190 - DNA, 395 bp, Glycine max
gatggatatctgcagaattcggcttaagcagtggtaacaacgcattttacgcggggaccttcataccggaaataaggattcttcggcagtcactaactatgttctatatttctttacctggatctcaattacattgttggacgtatgatgttttaagcatcgatggtgtacccactaagtctctaatgcctcagtggtaccctaactattatagaataatgtaatccccacccccattctctgaatctttcctcgctttttgctcgactcatattgcgttaagaacatgaactactttatgttttgatatcagttccatattccactgtaattacatgacacgacttatttctcccatcaaagcaaccccttcttattcattaacatactttacc

SEQ ID NO: 21191 - DNA, 317 bp, Glycine max
gcgaaaaagctaacaagaaattcaaggccctcacggcgaataacgcggaccaaaaccaggacctactgagagacataaacatcgggaacaacaatccaaccaacactgatccaccacaccagaacataatcaaaaccacggaatacccaaaataacacgtgaacataaaagacacacacaacatcactaacgtacacctactcaacaagatggacacacacgccgtcatttcactacaccagaacactctatacaatcacacgtattccaaccacatcttaaaaaacgccggattcaccgagtactagaacaacccc

SEQ ID NO: 21192 - DNA, 360 bp, Glycine max
gatggatagctgcagaatgcggcttaagcagtggtaacaacgcattttacgcggtgacaccgacaaagatgtcttgggtaaccgcgacagcagcactagacacgcatactgcgtttcacactaaggacacggtcgaatcagcggagttgtcctcatccgacgataatgcctccttgtcagctggatcggatgatgaatcggaacgattgagtggaacggaggacacaggaaagaagcagactcgtcagggccgtgattggcgaccaaagagcacactgcacctcaagatcgcgcgtggcgaaaaattatctgcggtcgagcgactggcttcgcgtaccttgttaccagaggagtactaca

SEQ ID NO: 21193 - DNA, 453 bp, Glycine max
atatctacagaattgggcttaagcagtggtaacaactcattttacgcggttattgacattaaacatttttagctaatctgaaattccaccatgaaacctaacacgttcatcatcttcatcatcttcttcttcacaatcaccacttgttcatcatcaactgattcagttgagatcattccttttaaagaagcgtataaagttcaagtaacagtttactatgaatcactctgtccatactgttaaaacttcatcgtcaattacctgatcgatgtgttcaatgaatgtatccattcaatcgcttatgtaaaactgtttccttatggcaactctaaagtcaactccaactgcaacatcacttgccagcatttttaacaaaattgtttgcttaacactttttaagcttgttcaatcaatacttgccctgatgttcatgatcactttcctttcatcttt

SEQ ID NO: 21194 - DNA, 301 bp, Glycine max
tggatatctgcagaattcggcttaagcagtggtaacaacgcattttacttggttttttttttttttttttttttgttcaaccggtgaattataagatgttcttcaatcacaacttcatcaatcaatcaatcaatcaataaatcaatctcaaacaagatgatttatgatttatggtctaattcaacaattttttgatgataatccctaatctcaaattttttcaatcatcacaaacatcaaattaatcattatccaattcaaatccttacaatttttcccgctttaaccaccggatttttcc

SEQ ID NO: 21195 - DNA, 278 bp, Glycine max
atggatatctgcagaattcggcttaagcagcggtaacaactcattttactatttttatttttttcttaaattatgtttaactggacattcatgatgttagtcatattatatacttttcaaatccttcttacttatacaattcaacaccaattaaaaatccaattatacccttcacttgttatttttaaaacaaccaaaaaaattaatgttaccaataaaaatataatttaccaagtcaattggagcttttacaaagaacaaacattaaaatgaattac

SEQ ID NO: 21196 - DNA, 436 bp, Glycine max
agtgcgagggatatctgcagaattgggcttaagcagtggtaacaacgcattttacgcggggattattcaaactaataaatgcacacaattgtcttttcaacaaaggagtgattttgatcttgattacaagccctaataacacaagttggttgaatcaattcatttgtgttgtttagttagttgtgtttgctgtaccgtaaagcagcgtcgtgcatgcaactctttctttcattcattctctctttaatcttattcaatctttatctttaagcatgcactttatcccttcatcttaaatcaatcttcaacttcaaacaccaaacatcaattcagcgttttcgtaacgcgaattggcagcaaacatcactcggattaagtagtagtatacggcttatgaacgacaagcattctgtgaattgttccacctagaggacac

SEQ ID NO: 21197 - DNA, 241 bp, Glycine max
atatctgcagaattcggcttaagcagtggtaacaacgcagtttacgctgtggtgaatgatctacattcactgacagctcagatcaaacttcatctcttgatttcgatatgggtttcatccaatttccaaattccattaacttctaacaccaatcgttcccaacttatcaagattttacacttcttcctatcttcgctattttcttcctcactgttcgttttttcctctacaggttcatttt

SEQ ID NO: 21198 - DNA, 431 bp, Glycine max
tgtgatggatatctgcagaatcctgcttacgcactggcaacaacgcagagtactcctagatttcacattgaactacagattaatgggtactatgggactactatctgctatgcatacgttggagataccagtatggtcaacggatgaatgtgacttgggaagtacagctgacatcatgaactatacctatatcaacgcgtactttgactactacataaggactatatgactggaatgtaagcgattgacacatgagctatcctaagtgtaccagaacatggcgcagctgctatacaaacagctaacgtactagcagagcccattactaatggacgtgctgtatatactcgcacatcatctgctattcatagatcttggcctgactttatacaatgagatacaaaaggatccatctttgaaacatcaattaa

SEQ ID NO: 21199 - DNA, 350 bp, Glycine max
aagcaatggtggcgctcctagtggcaactacatccgaccctgcttccatcaacccggccaacgcgctgttgggcatgcgcgggtggaaacccggtccccatttccaggatgatatgaagagctatgtgaatgaaggggtgagggtgttggtacatgggaagagcatagttgcggaagatgagttggacacgaggtgggaagaagttactgtggaggttattgatgaagtgatcttcttcagcaagcacactgctgtctccaacaagcctgccctgactgttcaccctattggagttcctcatatgcgccaaggcgatgttcccccccaaggcggcagacctggatgggca

SEQ ID NO: 21200 - DNA, 163 bp, Glycine max
taagatcatccggatttacgacactggttgactctagtacgacgagcaccagcatatggttcacgaagcggtgtattaccaagccgaagctgaggagcacatgtcgacggtcgacctgaagaacgctttggagaaccatatgtacaacattatgaacaccatt

SEQ ID NO: 21201 - DNA, 329 bp, Glycine max
gcgtaagcagtgctaacaacgcagagtactttgcatctgtttatgatttattttactgggctgtgaatcaaacatgcttgatgccatacttgttaagattctattagtatccaggatacaagtcgacttctacaagctgacttataagatgagagagcagagctctgtctaatcgaaggaaatgaggttatcgcagatacataacattaaattgactagattacccaattttccatgaggtagaagcggtggttagaactgcacttgtaaagatgtaatctacagaagagtggactaatccaaccattcatgcaggtacaatgaaaagt

SEQ ID NO: 21202 - DNA, 411 bp, Glycine max
  modified_base (322)..(322): a, c, g, t, unknown, or other
taacttccagccaaatatggagggaaaccgcaactgctatgctgatgagcattacctgccaaccttggttactatgcttgatcctggtggaatcgcaaattggtcggtaacatatgttgattggtctgaaggaaaatggcatccaagatcattcagagctcgggatattacttatcaagtcatgaaaaacatagcatatattgacgaaagtccacattttacaagtgatgcatagagaacagtggtgattacaccttgcatgttgaacggctcgaaacgatcatgttatctatttgccaggaagtttttgccagaaactcangatagattgatccaactctactctaattctacaatattctaaagtattaatgattctcatcattctttggtgatccaacaccatgtgat

SEQ ID NO: 21203 - DNA, 367 bp, Glycine max
cgtcacgtgtgatggatatctgcagaatcctgcttaagcagtggtaacaacgcatagtacgaagatcacacacaacattcatgcactcacaggccactcgggaaaaactacatcacatatcaacgaaattaatcaattcttaactctttaaaacaacgctcgagccgacctgcctgtgccaccactactatgggacgcaggactgtcaaagtacgctgacatgtatgcacgacaaaggcgacaggatcgcttgttaaagcattcaaacgggccgtatggggaaaatatcttctggcgtagaggtgatcggtggacgccagcacaagccgtaatggcgtgggtgacggagcaacgatggtataactat

SEQ ID NO: 21204 - DNA, 447 bp, Glycine max
aagcgtacgatgaagacattgctcgagatctgcctctagtgcatggaccggggtctagccagggtataacatagaggaaaccactctttagagcccagatgtaggagaagagtagaaatccttacgatgggtaatgcctatgttcctgaattgactttctgagagaacgcttgttcaacattctcaacggatgcaaagattgagaagaaaagaaagattgtgcagtatatggagaggctcgataggactcttgcctcgcctgatcttgcaaatgatgagatgctcaaaaagcttgtccgaagtcaactcccaccttctttagaacctgaaggttaaggatttagagcataattattagaaaccaagactgcggaggtgtctcactttcttggtatgttgaaggagtgcttcttcagatgatagccgaagatcttatacattacacac

SEQ ID NO: 21205 - DNA, 250 bp, Glycine max
cgacccactcgtccgagcccgtcaagcatggctattggtgcatgagaaaaccacgaggggtctcgagtacgaactcagggacactgttcaggccgactttcaacggtctcgagatctatctggccgacgttgagactccctggctaaacgtctgtctgaccgagctcttaccgttccagagcttcaagggggcccgcatcacctgctgcctccacatgaccatatataccgggcgtctcattgagaccct

SEQ ID NO: 21206 - DNA, 456 bp, Glycine max
cccacgcgtccgacacccccaattcccgaaaccctaaccctacctcctcgcagccatggctgagaaacgaaagcttcgatcctctgaccccgaacccaccaaacccatcgagccacagcaacaggaccaagagccagttgaactcgaccaacagcaacaacaacccaaccccaaacaaaccctagaagatcctaacacgatggccgtcgacgaatcaaaacaggaagaagaagaagaagaagaagacgaagaaccccaaaacgccgaaagcgaagaagaggaagaggaagctgaggaacaacaagaggagcggccaccagaaaccctagaagagcaacaggatccagaaaccctggcggctgcaaaccacgccgaagtgaacggcggcaatgaaggaaacaacgaagaagaggaagaggaggatctcactctctcgtcacgcaagccgtggatatg

SEQ ID NO: 21207 - DNA, 264 bp, Glycine max
ttagtaaaaatctacaaattccttattcctatgtccattttacacacatcattcgcttcaacaattttttgtgttgcccaaaattggtccaaaacatataattgtaaatgcaaaacaattaatctggtatcatcctatcttccggacataagattcacaagattttgattttcgtagaaagaaccaacatcccaatcgtcggtagttgaagaaagtgtcataagagcaaccacaatagatctcatacttggacggagttgggga

SEQ ID NO: 21208 - DNA, 222 bp, Glycine max
tgactctgttaccaagagcaagtttgacaacttgtacgggtgccgtcactctctccctgatggtctgatgagggctactgatgtgatgattgctggaaaggtggctgttgtggctggatatggtgatgttggcaagggttgtgctgctgcattgaagcaggctggtgctcgggtcatcgagactgagattgaccccatttgtgcccttcatgctctcatgga

SEQ ID NO: 21209 - DNA, 415 bp, Glycine max
gagaggaagcggtgaactgcctcacccaatgcgcttggaacaacaagcttaacgccatcttggatcgccttgctaccctcactccagcacccatatcgactccgcttcccatggctgcttcccacctctctgccaacagcaagccccatgccccctccttcgatctccatcgcagtggcaaccactcagaccattatgccaactccacctcccatagctgcttcccatctcccttcatcgatcacaatcctatttttttctctctttgtctctctcgctctcgctcctgtgacgaccagaggagcgttcgagatcacggcctctctctccatctctgtcgtgatccttcttggaccctccgttctcgtcgtcgcccctcgacctcttgctctgtctgtcatcggcatcaacgttc

SEQ ID NO: 21210 - DNA, 408 bp, Glycine max
attggagatcctcctattgtcgttcttgatgagccatccacaggtatggatcccattgccaaaaggttcatgtgggatgtaatatctaggatctcaacaaggcgaggaaagactgcagtaattcttactactcacagcatgaatgaagctcaagccttatgtaccagaatagggataatggttggtggacgattacgatgcattggaagtccacagcacctaaaaacaagatttgggaatcatctggaactaggggtcaaacctactgaagtgagttctgcagacttgcaaaacctctgccaagctattcaagaaagacttcttgatgtcccttctcatcctagaagcttacttaatgaccttgaaatttgcattgggggcactgactccgtcacatcaggaaataca

SEQ ID NO: 21211 - DNA, 425 bp, Glycine max
ctttaagacgatcaagggggaacggaaaacgcgtggcgcgcatccttgagcttctcttctcttctcttctctgtcgtgagtcaccatggtgagggttagtgtgctgaacgatgctctgaagagcatgtacaatgctgagaaaaggggaaagcgccaagtcatgattaggccatcctccaaagtcattatcaaattccttttggtgatgcaaaagcacggatacatcggagagtttgagtatgttgatgaccacagggctggtaaaatcgtggttgaattgaacggtagactgaacaagtgtggggttattagtccccgttttgatgtgggcgtcaaagagattgaaggttggactgctaggcttctcccctcaagacaatttgggtatattgtattgactacctctgctggcatcatggatcatg

SEQ ID NO: 21212 - DNA, 446 bp, Glycine max
gacgacagaagggataattaaatacataaatgtagctaaactgtaatttttcaacgtaatatttgtaattaaatatttttattttcacaattgaaaaacaattcataagctaaaaattatatttgtataaaacacaatacgtaaattgaacacaaaatatgccaaattcaaaggttcatatacagatctttacataccaaagaagtacagtgtttttttttacataagtagaaatacagtgctatgtgcccctgttaaatcccaagagccaaaactaattaaatacctgagattataggacttgtaacattactctaattaataaacattacgattaacaatgtggaatgattaccactatggcaatggcccaccgcccaagatattaggagaaatatgcatctggtatgaaggatttaagtgtcggcaaaatggttttttatact

SEQ ID NO: 21213 - DNA, 160 bp, Glycine max
ttaagggactctcttaacatgcaatcaacacgtacaattagaaaatttttaacggccattaaaccattcctctctctaatactattgcttcctaccttattgcctctcttttccttctccaaaattcaaatccctatcaatcgtctcacatacaaacgca

SEQ ID NO: 21214 - DNA, 421 bp, Glycine max
attgttatttagattttatttattggtgcttagggtttattgtttgttatactgtcattttgtcaaattttgttatctgaagtaagaaatattatcttattcttatcatctaaaacttctaagttctcaatggcttatgttgttcgtgtaaaaactttagtattctcaaccaataaaaaataaccataaacataatttttaagataattattataaatatcaacaaatttatgttatacgatgatttgtgattaggtcatttaaactattttacattgagaatatataacctattctcaatttcttaatccaaatgcaatcctttgttctgactaaaatttaactctatgttttggtccgagaattgtgagttattcatgaatgttctaggcttctagagaaactgttgaatgtaaaatac

SEQ ID NO: 21215 - DNA, 395 bp, Glycine max
ggtatcacaggggtttattttgaaaccctaaagtttgcccccttacacgtttttttgtcttcttttttctcccatctttgtttcgagaagcatttgacgaagagaagagacagtgaatcgcggtttcaattcaacccacttcatctcaggtgtttgaagttgagataaaaatgagcggaacagagaaagcaggatcaggaaccaccaaaacccccgccgatttcctcaaatccattcgtgggaggccggttgtcgtcaagctcaattctggtgttgattacagaggtatacttgcttgtctagatggctatatgaatattgcaatggagcagacagaggagtacgtcaatggacaactgaagaacatgtatggtgacgctttcatccgagggaat

SEQ ID NO: 21216 - DNA, 421 bp, Glycine max
ggttctagtgtgtgattgtttgttgttgtaactggttcttcttcttttgttgttctgtgtttgtgtttgttttttctctcacctgaaaatgtcttgctgcggtggtaactgtggttgctgaagctcctgcaagtgcggcaactgctgctgaggctgcaagatgtacccatacttgagctacactgagtcaaccaccaccgagaccttggtcatgggagtggcacctgttaaggctcaatttgagggtgctgaaatgggtgtgcccgctgagaacgatggctgcaaatgtggaccaaactgctcctgcaacccctgcacttgcaagtgaagtgttgggagagcaagcttcaagcagagatagcccttaattaggaataatgataaactattaatgtgtagctaaaaacttatgtattatgtc

SEQ ID NO: 21217 - DNA, 388 bp, Glycine max
ttttaagggggagcaagagtgaagggcgaagggaatggctcccaagggtttaatccttttggctgtgttatgcttctcagcactgttactgagtctttgtcttgctgaggataatggactcgttatgaacttctacaaggaatcatgccctctggctgaagacatcatcaaagaacaagtcaagcttctttacaagcgccacaagaacactgctttctcctggctcataaacatcttccatgactgtgctgttcagagttgtgatgcttcactgttgctggactccacaagaaggagcttgtctgagaaggaaacagatagaatcttttggttgaaaaatttcatgtacatttataccatcaaagaagcttttgaaagggaatgccca

SEQ ID NO: 21218 - DNA, 386 bp, Glycine max
gaagattgggtggtggaaatggaatcggcagctgaaaaccctaattacccggcggtggactacaagcgaccttccatcttgtcatttcctcggaggcccgccctcagagttacatccgagttcgatagtgaaagcgcagtcttcttccataagatttcctgcaagttgttggacagccttgccaagttcaagttttcgttcaaccacagcggtaagggcggcgacatctccgaacctcaattcagctttgtctccaagcaccttatcctccactacgacctcgaagaccataatgctctcgttaagacctccatcgatcttgctcccagtttgcaactcactgcttctcatgatctcaaggctcaacaaggagaggttaccgtgct

SEQ ID NO: 21219 - DNA, 436 bp, Glycine max
cggataaggacgttttgggagaaggtgataacaccaagcttgatattcagattaagttggacaaggaaaagaaaattctctcaattcgagacagaggtattggtatgacgaaggaggatttgataaagaatttggggacaatagcaaaatctggaacttctgcatttgttgagaagatgcaaacaagtggagatctcaatctgattgggcagtttggagtcggcttctactctgtttatctcgtggctgactatgtcgaagtcattagcaagaataatgatgataaacagtatgtatgggaatcaaaagctgatggagcatttgcaatttcagaagatacatggaatgaacctttaaggcgtggaactgagattagattacaccttaagggaaaggctggggaagtcttgcaggaatctaaactgaatgaattggt

SEQ ID NO: 21220 - DNA, 336 bp, Glycine max
gaggggcctaagagggaaagtgcgtgtttggaggcgttggatttagagagctttttattaggtaactgaagatgaagagtgccacgtggtggagtgttgaaggagacgggccggatctgcggcctggtccctctaatcgaacggctataatggaaaaggacttttcctgaacacgtggaaggaaaccgtccattccatgtttccaacaaagtctaatagtaattcatgtgaatatgaggtgctgcttctggttccgcatcctaccagaagctgcaaatgcctcttatctaagggatattgaataaactcgtccttaattacttttctttctgaaaa

SEQ ID NO: 21221 - DNA, 308 bp, Glycine max
aaacggccaaaaggagtgccatctgggtctgacaaaaggcacatcacattgaaaattatctgacctatagtacaccatagactctggctcagcctgcattgtacaatgagggactgtcctttgtttatctagtgggcgttgcttatgacttctttgcatcactgaaacaaaacaaagcagcgaagatggggtcgcattaacacaaacccaggacccatgatacacagacataagacacattggcacaaaacctcttgcacactcaaggttctaaaaacactccacgaccatgatttgggccgcaatat

SEQ ID NO: 21222 - DNA, 431 bp, Glycine max
gtgggttctttgtttgaggacactcccgaggcttgaagaatagagcacaccgaacagttccgtttcttggagaaagcagccattgtggcagaagatgattttgagacaaatttatgtggttctggaccaaacccatggaaattatgctcactaacaagggtagaggaggtgaaaatgatggtgagacttctgccagtgtgggccacaaccatcatattttggaccatttacgcacagttgatcaccttttcagttgagcaagcctccaccatggaaaggaatattgggagtttccaaatccctgcaagctctgtcacagtcttttttgtggctgcaatactaatcactctggctgtctatgaccgactcatcatgcccctttggaaaaagtggaacggcaaaccaggtttcactgacctacaaaggatagc

SEQ ID NO: 21223 - DNA, 439 bp, Glycine max
gactcgttctagtgtgtgattgtttgttgttgtaactcgttcttcttctttggttgttctgtgtttgtgtttgttttttctctcacctgaaaatgtcttgctgcggtggtaactgtggttgcggaagctcctgcaagtgcggcaacggctgcggaggctgcaagatgtacccagacttgagctacactgagtcaaccaccaccgagaccttggtcatgggagtggcacctgttaaggctcaatttgagggtgctgaaatgggtgtgcccgctgagaacgatggctgcaaatgtggaccaaactgctcctgcaacccctgcacttgcaagtgaggtgttgggagagcaagcttcaagcagagatagcccttaattaggaataatgataaactattaatgtgtagctaaaaacttatgtattatgtctgtgatggttttcg

SEQ ID NO: 21224 - DNA, 518 bp, Glycine max
  modified_base (29)..(29): a, c, g, t, unknown, or other
  modified_base (35)..(35): a, c, g, t, unknown, or other
  modified_base (79)..(79): a, c, g, t, unknown, or other
  modified_base (84)..(85): a, c, g, t, unknown, or other
  modified_base (166)..(167): a, c, g, t, unknown, or other
  modified_base (192)..(192): a, c, g, t, unknown, or other
  modified_base (230)..(230): a, c, g, t, unknown, or other
  modified_base (237)..(238): a, c, g, t, unknown, or other
  modified_base (250)..(251): a, c, g, t, unknown, or other
  modified_base (285)..(285): a, c, g, t, unknown, or other
  modified_base (379)..(380): a, c, g, t, unknown, or other
  modified_base (393)..(394): a, c, g, t, unknown, or other
  modified_base (500)..(500): a, c, g, t, unknown, or other
  modified_base (503)..(504): a, c, g, t, unknown, or other
tagaacggaccttgtaggaatacatcttnggatcntgtcgatgtgtggttatggcccaaagtcctacctcatcggtcancttgnngtggaattaggagaaagctgtagcgtattattcgcgggcccaatccaattggagaaaccgggcaccctcaactaacattannagaacttttcatacctggcggagtncttcaactggaggtacctgcagaacaaggtgcgagcanccttatnnaatggaaaaatnntcaattcaatgaagaatttggttcattcctacancgtacccacgtcatgggcatttcctgcttttctaaatgttatatagaaatttgtatgttacctaaattgaaaagtggtgaatattataccatannatgtgactattcnncaccaaaaagttttcttattttagttcaaaaccaatcaatatgtaaaaatccagaacaaagtaaattgcccgagaaattcgcgccaggaacccatacacttttaanttnntaaaagaaaaagtt

SEQ ID NO: 21225 - DNA, 430 bp, Glycine max
  modified_base (207)..(207): a, c, g, t, unknown, or other
ggggcttgctgagatgattggtcctgttgattttaacaagagtgttgagtattggcagcaagacaagtggaatggttgctttcctcttaagtggcacattgttaaggatgttcctaacaatttgttgaggcacattaccttggacaacaatgagaacaaacctgtcactaacagtagggatacacaagaggttatgttggagcctgngctgaaattaattaaaattttcaaggaatataccagcaagacatgcattttggatgattttggcttctatgaggctcgtcagaaaactattttggagaagaaagcaaagcaacaattcccaaagcaggtatgggaagggaaacctgctgatgagaagattgagataaatggggaagttaatactcaaaaatctgaagttagctcggaattgctcaaggagtct

SEQ ID NO: 21226 - DNA, 404 bp, Glycine max
gacccacaaactccacaagtgtcacaagtcataagtcgttagagagagtttgtgtgtgtttttgtgtgtcaccttggtgcatacaacacaagatggaggaccaaaatggtagtggtaagttgagccaagggcttcgcaaggtgaagccttaccttgctatattgtcccttcagtttggctactcagggatgtatatcatcactatggtttctttcaagcatggcatgagtcattggatactctcagtgtaccgtcatgtagttgctgctattataatagtcccttttgcacttgtccttgaaagaaaaataagaccaaagatgactcttcccatcttcctgaggatagtggcacttggtttccttgagccagtgctagatcagaacttgtacaacatggggatg

SEQ ID NO: 21227 - DNA, 430 bp, Glycine max
gagtgtgtgagttcattaacatatacaaatgctgtgtgttgtgttgtgtacttgtgttaattgtgttgttgttgtaggaaatttaagtgaagagagaatgatgatgaagtctgctatgtgtgcattggtgcttgtggcactggttgtggttgaagtggggcccatggctgaggctgcggtgacttgcaacccaacacagttgactccttgtcttccggcaattaattcaggttctgcaccttcgagtgcttgttgccagaagctgaaggagcaaaagccatgcttctgtggctacctcaaaaaccctagcttgaagcagtatgttaactctcctaatgccaaaaaaaccgttagttcttgtggtattgcctatccaacttgttaagcacctcttatatatatatataaaatgtgtgaacaatatatatat

SEQ ID NO: 21228 - DNA, 419 bp, Glycine max
gacacaccggaaatcaaatggaaccttcgttgcttaggtaattgaggttccgtaccattccgtaagtcaaaaaggggatgattttgtaatccgcagggttccgtaacattacggaaagaaaacaagtatcgttacgaaattcgtaagtttccgtaactttacgaaaaaagaatcaccaaaaaacagcagaggggggtgtacttagtaaaaatgggggtgcaaatagcacccacgcccacttgggccctccggaatattcctccagaaggcggttgcttctggaggaagcaaccctgctcgcctgggcgagctgggcggcaaccacctcccctattttgctataaataggggaggaagtgaagaaagaaggggttcagccccttaggcacttctctctctttcgaatttgcttggaaaaa

SEQ ID NO: 21229 - DNA, 415 bp, Glycine max
gacattacaccgaaatttgaatgctcataaatctcctcactccttgcgactagaacagaaatcaaacaaacgaaggagagaaagcttaaactcgtgagttcgtgcactgcttcttcttcttcttctttgcgagcgtcttcgaagaaacaacacgaaaatgtcggtgctgatcgtgacaagcttaggggaccttgtcgttgatttgcacaccaacaaatgccccttgacctgcaaaaatttcttgaagctttgcaagattaagtactataacgggtgtctatttcacactgttcaaaaggattttactgcccaaactggcgatccaactggcacgggaactggtggtgattctgtttacaagtttctttatggtgatcaagctcggtttttcagtgatgaaattcatattgatctg

SEQ ID NO: 21230 - DNA, 404 bp, Glycine max
ggtctgtgtcgtggaagtgggttggttcataattccggcgctctctgagatcgtggagaatctcgtaatttgaagctaccaccatttgccaaagttgagatttttacgcacttaagagtaaatgcaagaactttaagaaagattaggtactgggtatcttgtattccaactcaataagatagtggggaggaaagagatatggccgtcgctagcaaaaccagaaatatgcttgaaggtctggtaaaagaaggatcattgaaatggttgcttggcaagaagagttactttggtgaagaatttgaagagatggaaaattctccttctgctgggaagaactttatacgagagctctctcctgttgcaaacctagttgttcgtagatgctcaaagtcgatgaagacata

SEQ ID NO: 21231 - DNA, 424 bp, Glycine max
ggttcactctgcatctgactcctatagtttcctcggctaattccatatccccgttttccttcactcttgaaccccgattcatttccaccagcacaagaagcatggctgcaatatcaataccttctcacatgaaagcttggacatactctgagcatggaaaatccaaggaagttctcaagtttaatcagagtgtggctttgcctgaggtgaaggaagaccaggtcctcatcaaggtcgctgctgcttcccttaaccccattgatcataagagaatggaaggctatttcaagaacagcgactcccctttacctactgctccgggttatgatgttgctggagtggtggttaaagtgggaagtgaagtgaagaaatttaaggttggggatgaaagttatggtgatatcaatgtgaaagctttggaata

SEQ ID NO: 21232 - DNA, 379 bp, Glycine max
ttactccaagaagaaagaaaaaaaaaaatcgaccgccgcttctttatcgtgatacgtgggtctgtgtccctctaatttcaagatccaccacattctcagttcttccctggtcgaaggaagcaaaatttaagctggtacagtttctttctataaagcagcatgtccctgagtacttccaaagtagtttttcaggttctgtccagggctgtgcctcaaactgagtataatgattctcttgtgaactcttcagaattagcattacattcccgttttagagtaaaatgtatgaataaaagatcctcaacgcataaggatttcattgaatgttctaacatgcttcaaaatacgttaagaactcaacaatttcagtggatgggtg

SEQ ID NO: 21233 - DNA, 427 bp, Glycine max
gatggaggcgtgtatgatgattctgaatagcagcactgaaaaacttcctaccactggtgcaggaaaggggagccaagatacctgcaccaatatgggaggtggaggtggttgcacctgctgcagctcctcctcctccatgtctgtctctggtgttgcagagagtgtttgattgtgaatcgagatgctctgcccccaaggtgctcctttctgatacgagttaccttgtccttctaacatgcacactctggcaccacatattcctgcaaagcttctggcagcacctgctcccctgctctctactacttacacccagaaaagcaagaacaaaaacatgtttattagagaaacactatgcagaaacagtgatgggtaatccagatgatttgtcacatgcaatgttttctaggatgctccagcatataccctg

SEQ ID NO: 21234 - DNA, 414 bp, Glycine max
accacgtcctttccagcattgagtaattcatctcacatgcggtaaacttcttgcttagatagtagatggcttgctcctttttcctagaatcatcgtgctgacccaacacacaccccatagactcgtccaacacggtcatgtacagaaaaagaggtcttcctgttacaggtggcatgagcaccggggggtttgcgagactctgtttgatcttctcgaaggcctcttggcagtcactgttccacaggaccgcctggttcttacgtaatagcttgaaaatgggctcacaggtaggggtgagttgcgagataaatctcgcgatataattcaacttgcccaagaatccccgaacctgcttctccgtgcgtggttccggcattttaaggatggccttcactttctcgagatctatctcta

SEQ ID NO: 21235 - DNA, 437 bp, Glycine max
  modified_base (427)..(427): a, c, g, t, unknown, or other
gaaaaacattgaggcgtagctggagaaactgaagaagtatgctactgtggttcgtgttttggctcacactcagatcaggaaaatgaaagggttgaagcagaagaaagcccatatcatggaaattcaggttaatggtggtagtattgcacaaaaggtggactttgcatacagtttctttgagaaacaggttcctattgatgcagtgttccagaaggatgagatgattgacatcattggtgtgaccaagggtaaaggttatgagggtgttgtcactcgttggggtgttacccgccttccccgtaagactcacagaggtttgaggaaggttgcttgtattggtgcctggcatcctgcaagagtttcattcactgctgccagggctggtcagaatggataccaccaccgaactgagttgaacaagaaggtntacaagcttg

SEQ ID NO: 21236 - DNA, 436 bp, Glycine max
  modified_base (16)..(16): a, c, g, t, unknown, or other
  modified_base (19)..(20): a, c, g, t, unknown, or other
  modified_base (42)..(42): a, c, g, t, unknown, or other
  modified_base (47)..(47): a, c, g, t, unknown, or other
  modified_base (431)..(432): a, c, g, t, unknown, or other
gaggaaacaaggcatnggnnaatatctctagcaagggcgagngaatnagaaacaacatcaagatgtcgtctctgatagcagaagatgtgaagagcagatcagaggtgtaccacggggacgaaatgtgccaagtgaagtccaaggagcttctcaaggaaatcgccctccccaacggccttcttcccctcaaggacatggaggagtgcggctacgacagacaaaccggcttcgtctggctcaaacaaaagaagagttacacccacaagttcgacaagatcggaaagcttgtctcctacgcgcccgaggtaactgctcatgtccaacaaggtaaaattaccaaactcaccggggttaagaccaaagaactcttgctctggaatggaggcaactgctgactgtgaactctcttctcttcactaccttgaagggannagac

SEQ ID NO: 21237 - DNA, 270 bp, Glycine max
  modified_base (253)..(253): a, c, g, t, unknown, or other
ttacgaggcgcgggtgcacgcgtcgcaaaacaagcggttgccggtgcaaattgtgctgcacgcgctttactacgaccagttgcggctgaggagcggggcggaggagcgtgacgtggagccggagaagaatcagcttcagatggacgtgtccttggtgagggagaacgaagagttaagaactgaactaatgaagatgaagatgtacatttcggatttgcagaataagaacactaataatgacgcgaaccctcangtacatggaacgacgtc

SEQ ID NO: 21238 - DNA, 370 bp, Glycine max
  modified_base (29)..(29): a, c, g, t, unknown, or other
gatagcagcatcatacaaagcatggaatncaaaaacttaagttcattccttgtgttttgctttcttcctcaaaaccaaacatgtcgaacacatgcggcaactgcgactgcgctgacaagactagctgcaccaagggaaacagctatggtgttattgtagagactgagaagagttacatcgagactgttgtcatggatgttccagcagctgagcatgatgggaagtgcaagtgtggcactaactgcacttgcacggactgcacctgtggccattaaagaatatgtatgaaaatgtaattgccatgtgtttggcaatacaaatatccaaataatgtaatcttcgtatgaataaatgtgtgtgctgttatccc

SEQ ID NO: 21239 - DNA, 446 bp, Glycine max
gatctcacgtaatacattttctcatatatatctcacatggctattctttacacattaaattccatatggcaaacctaaagacacaccttgtccttaatatgaaggatgttgtgatagttaaaccctccaagcccacaccatctgaacttctttctttgtccaccattgacagtgatccagttctcaacattctgtgtcaaaccatttacgtctacaaagcaaatcttgattccccaaatgatcaactagaccctgtaaatgtgataaaagaagctctctcaaaggccttggtttactattatccacttgctgggaagatagtaacatttgatgatggaaaacttggaatcaactgcaatgctgatggagttccattcttggaggcaactgctgactgtgaactctcttctcttcactaccttgaagggattgatgttccaactgca

SEQ ID NO: 21240 - DNA, 331 bp, Glycine max
ggtagcacttctctctctctctctctctctctctctctctctctatattcttatctcttcccccactttctctcttttttctgtttcttcttctcagggtgccctctctcactttgtgactgtagcaggcagctcaggtgttccttgttaagatctgtggtttggttttcgggaggaaacaaaaagaggaaaaatggatagctacagctactatgggtaccaagagaagaacaccttgacaaactgtgaggagacgaacatggaatcagtgatttgccccaaacctcgccgattgggtctcataaaccactcttccatcaacacgcaaatc

SEQ ID NO: 21241 - DNA, 84 bp, Glycine max
taaaggttttttacttatctctctctctctctctccccgggcctttttctaaatacttatcgccccccccactttctctcttat

SEQ ID NO: 21242 - DNA, 420 bp, Glycine max
ggagacacagagcgagagagaatcgtaacaaaagcggtaaccggaataagttgtctctacgatttgagccatggcaacaacaacaccctcaaaccgatcatcagaggcgtttgctctcatggcaatcctcagcactctgctttgcacggcggtggcggcgaaggagagcgtgtacgagatactccccaagtacggcctcccgagcggtctgttaccggacaccgtcaccgactacacgctcgacgaggacgggcaattcgtcgtcgttttggcgaagccctgctacatacagttcgattacttagtttactacgagaccaagatctccggcaagctcagctatggctccatcaccaacctcaaaggcattcaggtccagcgcctcttcatctggttcaacgtcgatgagatcaaagtcga

SEQ ID NO: 21243 - DNA, 418 bp, Glycine max
ctctagttaaatttgggttctaaattaagacatgaagaaacaaaacttttacaaaccatctggttttgtttactaaatgcttctgtgattgctcgttaagggcttgagtagttagcagctcaaaagtccataaaatgttgacaacaaaatttgatttacgctttcttaatttctaatgagttttagagcagctggatgcatgagtgactccaaaaaggttctttctttcaaataaccggggagttatttgtcagtggagtagaagttatattttttccagagataagcccctcttcttttgtatttggttcttattaataatttgaagttaaatttatatttgaagtagaaaattcgagtaaattgaactacacagcatgctaattttgtatgtcaacactattattgcatgcgtagt

SEQ ID NO: 21244 - DNA, 388 bp, Glycine max
gattcctgatgatgctcccgcctttctttttggtttattattattatggtttcactacaatatctcttttatgtttatatacactattagttttatgtatgagtagttggtttgctcatcttgaagcatatggaatagtttgacttgactttgatgatattgcagtgaaacactcttatctttttgtgaaaattggtgtatgacttggttttgaattgaatgcatgattgtgatgagcttatgttttctttcatgagtttagcaagtgtgtatgttagacaaagaaagaacaagaatgtgaacttgcaattagaaatgttagtcagtagacaaattgattgagaaagaaaaacttgaaccataacccggtaagagtgtgatcttaaac

SEQ ID NO: 21245 - DNA, 421 bp, Glycine max
tgtgtgatctgattggatcaagctcaacctaactggggggtgcatttactatctgcgatttaaatatgtcaacatctgataagccaaaagtggtggaaaggggtagcagggatgaaaaacacaaggaagatgatcaagaggaggggaagggtggattcattgagaaggtgaaggatttcattcatgacattggtgagaagattgaggaagctattgggtttgggaagccaactgctgacgttactgcgattcacattccatcgattaatcttcacaaggcagatcttgttgttgatgtgctcatcaagaacccgaatccggtgccaatccctctgattgacatagattactttgttgacagtgatgaaaggaagctagtttctggattgataccagatgcgggtaccattcgtgcacatgg

SEQ ID NO: 21246 - DNA, 424 bp, Glycine max
ggtctctttttgcgaagaagagtgaaagagaaaatgcgggactctgattttgagagtcgagtgagtgaatgctgcttcctctgaatcaaatcattcatcactctctctggttctgagtttctgacaccaaaatggtgaatcctcgaattccacgttcaaggatcccaactttcacacctttcacttctgctatctccatcgccctctgcattttctttgttctctctcttctcttcacttcccattctgattcatcccatcaataccaccacacaggttctgatggtggtgttgcacatggatttgagtcaataaggagatccattctagctctgaaaacagatcctctcaagcctcggttggaccagattcgtaagcaagccgatgatcatcgctctttggctcttggttattcttcctatgc

SEQ ID NO: 21247 - DNA, 430 bp, Glycine max
ggtggcagttgtgtgacacagaagtgaagctagagcttcatagtttcttcttcttttctcaccttccttctctcccttcagacaaagggacaaaaaatcagtgtgtgagagagagagagagaaattccaaaaccatgtcccacagtcatctaagtttcgcctttgggattctaggtaacattgcctccttcgtgtgctttctggcaccactaccaacattttatagagtttgtaagaagaaatcaaccgaagggttccaatcaattccatatgtggctgcactcttcagtgcaatgctttggatcttttatgcctatgtgaagaccggagaaacgcttcttatcaccatcaatgcattcggttgcgtgattgagacaatttaccttgccgtatttatcacttactgcccgaagaaagctaggatgtcgac

SEQ ID NO: 21248 - DNA, 196 bp, Glycine max
ggagaagaaaacataagatatggcaatgttcacgtacgacgttgaaacggttcaatcatggttggcactgagcagacttcacatactgatccacttagtggcagtgttgtcgctgtgttactaccgcataactcacttgttactggagacctcaacagcgccatggcttctgatgaccgtaacgaacttttttttt

SEQ ID NO: 21249 - DNA, 422 bp, Glycine max
  modified_base (350)..(350): a, c, g, t, unknown, or other
tctatgcattttattgtgtaacatattcaggtctacccatctatgcatatagatgaatatgaccttgtgtagtatgtttgaaataatatgcataggttttatttgcttatgttctttgttcaatattaggaacaaaaattctcagaaagccaataactttgttttccttcattagcatgcttaaaattttcgaatgtcagctttggagactccaactagctcttggtgaacaaactgaaattaccactactagaaaaattgcatactacatcagttaattaggccaatctacaccggtttacgaccgtcgttgtaagcggtgtcgtaaaaagggtaggttattttacatncgttctaggaaaacccgtgtagaatgtcatagctattctatatcaaattcttgaaagaccttcgtagaatgg

SEQ ID NO: 21250 - DNA, 342 bp, Glycine max
agagtgagtgagtgagtccttaagcttctgcaacgagggagactcttttgttctgcagtgcatgcacaaggaattaaatataaaagggttttagaaaaagctgtgctattaaatgttactctatattttccgttcacggtgctgtttgaaatattaggaggcatgatattataataatattaggaggcatgttattataacatcatgatccacggtgctgtttgaaaaccttgaagtagctgctcttcattacgtatagtctttattgcattattacaagatatgaaaactgtacaaaattcttccaataatttacttcataattttaccattaaaagtgga

SEQ ID NO: 21251 - DNA, 417 bp, Glycine max
atattagggagttgggcatctttatatttagttcatgactcttatgctttgatcaggttgtacattcatgcttaattatatgataattgggatatggtttgttcactaccatagtaataaggtgtagttatgtatattaattgatagttgttcaaatttatgttataccaagctaatgcattgagtaacactgcactgagtctagtgttgaaactcaggtagacaaatccactatgcctgcaaatacaaaggatgcattatatcaaagcttgcctcctaatataaaattagctctacgttccaaattaccatccctccgtgctgtagaagagataagtgtagcctatatcacatatgagatgcataaaaaattacattggttggttcccatggccattaacacatccaaagcacata

SEQ ID NO: 21252 - DNA, 441 bp, Glycine max
gactcacattccttcccaatttctcccacgagagcgtatcacaagctcccaatatagcaagcagcaaacatgatttcttccgtgtcctttccagcgtctcttcccgccgttaacttctccggcaacgccatggcttcgccgtcgtgccgcgtcaaatcccggccaatagtcgccttcgccaccgccactgccaccgctgaagctcgctcttcctggacggagcaaccgagaccttcctatctgaactcctcttgctcttcgctttacgatatcctcggcatccccgctggcgcctctaaccaagaaatcaaggccgcgtaccggcgactagccagagtctgccaccccgacgtggcggccatcgaccggaaaaattcgtccgctgacgaattcatgaagatccacgccgcgtactctactctttctgatcccgacaagcgc

SEQ ID NO: 21253 - DNA, 393 bp, Glycine max
gacagggggagaacaagcacgagcatggtcttgaacgtgggcctggcagaccaaaacaaggagacactaaaacacatgctagcgtgacctatatagttaaagaggatacgggaccatagcaactgaggctgagccttaataagagtgtctgtctctggctactgaactatctcagtgtttcctatgtggctatgtggtgatctattaatgcatgggagaaacatctatgccaaatgggacacctatagagatagatagagagagagctagagagggtggttagattgaaaagacacaacgctagatgacttgtgaaagatgagagcctatcctgcttggaagagagcctttcagttccgacccattagaacttgtatcatgtagaggaagatg

SEQ ID NO: 21254 - DNA, 299 bp, Glycine max
  modified_base (240)..(240): a, c, g, t, unknown, or other
ggttctagtgtgtgattgttcgtcgatgtaactcggtcgtcttctttggacgttctgcgtttgtgtttgttatatctctcacctgaaaatgtctagctgcggtggtaactgcggatgctgcagctcctgcacatgcggtaacgtgtgctgatgctgcaacatgtacccagacttgacctacactgagtcaaccactaccgagaccttggtcatgggagtggcacctcgtaatgctcaatntgagggtgctgaaatgggtgtgctcgctgataacgatggctgcaaatgtggaccaaact

SEQ ID NO: 21255 - DNA, 391 bp, Glycine max
tcaagagaaaggagtgcctgcattttggcttactgctatgaaaaacaatgaagtgttggctgaggagatttcagagcgtgacgaaggtgctcttaagtatctcaaagatatcaagtggagcaggatagaaaaccctaaaggattcaagcttgactttttctttgataccaacccttattttaccaattctgtcttgacaaaaacatatcatatgattgatgaggatgaaccaatattggagaaagcaattgggactgaaattcaatggcacccaggaaaatgtctgacacagaagattcttaagaaaaaacctaagaagggttcgaagaatgctaaaccaattaccaaaactgaaaaattgtgaaagcttctttcatttctttcacccccc

SEQ ID NO: 21256 - DNA, 441 bp, Glycine max
ggatgcatctcgtttctctctcttagttcaaatttcgaagggggaagcagcaaaactaaagcccaaaaacccataccaagatgctcctccgaagccactgttgctacctcggcataatcgccgggctagcagtgttcctcgcaacgacgtcgttcgccgacgcgcaatcctgcaacggcatcctcgtctcatacgcctacaccggcggcctgcggttgccgcccaacgtctccgactcggctaagcagccgtaccggttcgagtcgacggtgacggttctcaacaacggcctcgacgagctcaagtcgtggaaagtcttcgttgggttcgaccacgacgaggttgtggtctccgcctccaatgctgtgctcgccgacggcaccacccttcccgccgtcgtcggaaacggcaccgtcttcgccggtttccccatgactgatc

SEQ ID NO: 21257 - DNA, 225 bp, Glycine max
  modified_base (198)..(198): a, c, g, t, unknown, or other
ggagtctggagactgaaagacgcatcagaatttaagaaactatcgagccattaaagaaattagaggcttatgtttatcctcccacttagtatatagcatcacaagtaaagatatatatcactttttccccccttataatatcctaatacgaccatttttaaggcgaaaaccaattattttactaattatgtacgaatnttaagaattatccctccccctacatac

SEQ ID NO: 21258 - DNA, 368 bp, Glycine max
gataccaaactatggcttcttcttctccttcgtccctctgagtggacactgccaaagacctttcccactcgtttagtgaggttcatgtcatcatcggtcccatgttcgctggcaagacaactgcccttcttcgtcgcatcaaatccgaactcaacgctgccaataatgtggcgttgttaaaatcgagcaaggatacaagatatgcaattgactcggttgtgacgcacgatgggattaaatttccttgttgggcgttaccggatctgttgtcgttcagagaaaaatacggagaggatgcttatcaaaagttggatgtgattggcatagacgaagctcagttttttgtagatctatacgagttttgctgc

SEQ ID NO: 21259 - DNA, 411 bp, Glycine max
ggtttccatatggctattaccgggtgggatgaaactgtgtcaagagaaatggagctcatggtcaaggagaaaggcatcaactcttttaagtttttcatggcatacaaaggagctcttatgatcaatgatgagcttcttctggaaggatttaaaaagtgcaagtctcttggtgccttagctatggtccatgcagaaaatggagatgctgtgtacgaaggtcaggaaaaaatgatagaacttggaataactggtcctgagggacatgctctttcacggcctgcagtgttggaaggagagacaactgcccgtgctattcgtttagctgattttgtgaacactcctttatatgtggttcatgtaatgagcattgatgcaatggaagaaattgctaaggcccggaaatcacgacaa

SEQ ID NO: 21260 - DNA, 245 bp, Glycine max
ggaggagactgagaaaacagaagaaaacaaaggggaagacacagtttctgcgttgaggtctttgatggtttctcactctccgccgctggatgccttagtggtgccctctgaagattatcacctgagcgaatatgtgtctgcacgagacaagcgccgcgaattcgtttccggcttcactggagtgcccgcttggcacttattacaaaaaaagaaacacttgtttggaccgattgaccgtatttttt

SEQ ID NO: 21261 - DNA, 366 bp, Glycine max
gacccttcccagtgatcaattcaacgatgttagggcagttgctgatattcacgcgcggagggctcatcctctggacctgcaaccacctcagcaacgccctgaggggatctccgatcgacacgttgatccgatcctgcctcctggaggagcgatccggtgcggcctccttcaactacgacgcacctggagccgcatactctctcaaatggaccttccacaacgacctaggtctcgtctttgtcgccgtctatcaacgcgtcctccacctcttgtacgtcgacgatttgctcgccgccgtcaagcgcgagttctcgcgcctctaccacccccaaaaaaccgcctaccgagattttgacgagatctttc

SEQ ID NO: 21262 - DNA, 433 bp, Glycine max
  modified_base (122)..(122): a, c, g, t, unknown, or other
  modified_base (241)..(241): a, c, g, t, unknown, or other
gagacacaatgatgtgttgagcgccacgagtaagttgagccagataatactactactagtaagtcgcaccggtttctgcttcctacattgccatggaagccaagctctgggaggctcgtctnttctctccaacactccctcttcttcctcctactcctcgtcttccttctctcaatcttcactttccctcatcatcaacttcaacgctccacctagctcgcaattctgtctcagataccgntcccattcaaaatgaggaaaaggaacaaactctgtcttctgtcaaacctacttactcccccactcttcccaatcgagacctacgaacccctcatagcgggtaccatttcgatgggactactcgcaaattcttcgagggttggtacttcaaagtctccattcccgaacggaggcagagcttttgcttcatgta

SEQ ID NO: 21263 - DNA, 384 bp, Glycine max
ggaaattgaatccaaccagcaacccaaagattaaaaatctatattagatcttttttttttttttgtacataaaattcatttcacaaccaattgcaatcacattcatgttttgcatctttgcgaatctaatgaataagtctcacataattaggatcttcgagtcgaacacttgattcataaaatctacttacttcttctgtcttggctcgagatctaaaccaaacacagaagaatccaattctgattatcattctgcaaaaactgaattggcttgcttttgactttcgtataaatggctaagactatcgaggcactttgttctattatatactgatttgcaggttcaaaaagaatcacttctattttattaaaacaattactcaa

SEQ ID NO: 21264 - DNA, 437 bp, Glycine max
ggcacaaaattacaatccaaaacaaaacagagcaaagagagagtgtgtgaaaagtgaaacaaaaaacagaacaacaatggcgacacttaaggttcctcagcctcttccccccgttgcagatgattgtgagcagctccgaaaagccttctcaggttggggaactaacgaggagctgattgtatcgatcttggctcataggaatgctgctcagaggaagcttatcagagaaacttatgcccagacctatggagaagatctcctcaaggccttggacaaagaactcacgagtgattttgagaggctggttcatctttggacacttgattctgctgaacgtgatgcatttttggcaaacgaagcgactaaaaaatggacttcaagcaatcaagttctggtggaaatagcctgcactaggtcctctgaacaattgtttgctg

SEQ ID NO: 21265 - DNA, 401 bp, Glycine max
ggcgaagacgacagaagggggagtgatactgctttgcattgattagggtttaggaagcggttctttgagtgaaacacgaaggaggaatggcgtctctgagaagtggagcttcttcgttgttgactcggctatccaaatcgcttcttcttcattccaaaaaccctaatcctcattctcagttattactcccttctctctcacggctccccggtgcgatttctccccaaaacgacgccgaattcccccacaaacaaggctttctctacccctgtggcctcccctctctccgcttcttcttacctcaaggggacgctccttcatcagatgatcctatgcttttattccccaaaagaacgtatcaaccaagcgttattcgacggaagaggaaccatggatttttt

SEQ ID NO: 21266 - DNA, 276 bp, Glycine max
gagagtgatccttctacactaactaaagccgacgagcgtgagagagaaaccctagcaaaaatgccggctggtcacggtttgagatcccgcaccagagattccttctctcgtcccttcaggaagaagggtaccatcgccctcaccacatacctcagaacctaccacgtcggcgattatgtcgacgtcaaggttaacggcgccgtccacaagggaatgcctcacatgttctaccgtggccgtaccggtcgcgtttggaatgtcaccaaacgtgctgtt

SEQ ID NO: 21267 - DNA, 408 bp, Glycine max
  modified_base (326)..(326): a, c, g, t, unknown, or other
  modified_base (331)..(331): a, c, g, t, unknown, or other
attccctagtggatggtgcctcccctctcctgggctcctttgccttccgctgcatctccatggtgaaaaatcaccattgaaggacctcattggagctcaaagatccagcctccatagaatcttcacaagcaagcttccatcactggccctgatgcaggctctacagcatagataaggaatgctctatgctctaagcggaaaaacctgtaagaactagagctgctgatgctggagaagtagatggggcagatacagagggagctgaggtagaagcttgagcaggggcaagagcagaagatggtggggccttggatcaaactagcctnggatntctgggttccctgaaaagtgaccggaagggtcatcgaggttccaacaatttcttttaatataaagccaaaaaataaa

SEQ ID NO: 21268 - DNA, 441 bp, Glycine max
atatgatggaagcagaaaaaaattgtgttgggggagaatttgctttgctatattcatttattgcattggaaaaacattaggtatgccctatttctcttttcaaaggaacatggggaggtggtgggcatatatccttttcactttgcaccccaccgttgcattgatctctttgtgcacatgatggaacttaggctgcacaacagtgtacatgtcaaatacaagatattcctttccgctatggaatatttgccattttcttctatggatgattccaagggaaattttgaagacattattcagagaattttgttgagatcccgagagatcaaggttggcaaatacgataacctgtcagatgttgcagaacaacacagactgcagagtcttcaaaaagctaaagtcatccagtggctttgctttacaccaccatcaacaattact

SEQ ID NO: 21269 - DNA, 127 bp, Glycine max
gacaccaacaccaaaacacgcccactattatggcttcctttgtatccttcctagtgctgcttcttgcagcccttatcctcatgcctcaagggcctgctacttactacaaaccaattaaaaaaccacc

SEQ ID NO: 21270 - DNA, 446 bp, Glycine max
  modified_base (62)..(62): a, c, g, t, unknown, or other
  modified_base (85)..(85): a, c, g, t, unknown, or other
  modified_base (102)..(103): a, c, g, t, unknown, or other
  modified_base (113)..(114): a, c, g, t, unknown, or other
ggttctaaggtgtgtgattggtttgttggttgtaacctcgtgtcgtgtcttcttttgttggntcttgtggtttggtgtttgtttntttcttctcaacctgannaaatgtcttnngctgcggtggtaacctggtggttgcggaaagctcctgcaaagtgcggcaaccggctgcggaggctgcaagatgtacccagacttgagctacactgagtcaaccaccaccgagaccttggtcatgggagtggcacctgttaaggctcaatttgagggtgctgaaatgggtgtgcccgctgagaacgatggctgcaaatgtggaccaaactgctcctgcagcccctgcacttgcaagtgaggtgttgggagagcaagcttcaagcagagatagcccttaattaggaataatgataaactattaatgtgtagctaaaaacttatgtattatgtct

SEQ ID NO: 21271 - DNA, 446 bp, Glycine max
  modified_base (13)..(13): a, c, g, t, unknown, or other
  modified_base (113)..(113): a, c, g, t, unknown, or other
  modified_base (227)..(227): a, c, g, t, unknown, or other
gacacaacactgnctctctctcttctctttctctgcgtggctctgaaaaaccagaacaagctctggagaaaccgccacataaaaaagaaaagaaaacgcatacctaaccgcanacggtaaccccattatgccatgcttcacaccacacccctctcttctcttccttcttctcacccttctctctatttccttcttctctccttccaccgctgcaagaacctcttctntccattccttacgtatttcagatggagtcgaggatggtggtgagggagagtactaccacgaggtactaccatggaaaacgaggagatccatggctgaagaagaggccacgagcaacacgtctctgatattggctcagagaagaaccacaaggaaggaccctttggataactacaaccattacaccggtggctggaacatcagcaatcgccactacattg

SEQ ID NO: 21272 - DNA, 434 bp, Glycine max
ggttctagtgtgtgattgtttgttgttgtagctcgttcttcttcttttgttgttctgtgtttgtgtttgttttttctctcacctgaaaatgtcttgctgcggtggtaactgtggttgcggaagctcctgcaagtgcggcaacggctgcggaggctgcaagatgtacccagacttgagctacactgagtcaaccaccaccgagaccttggtcatgggagtggcacctgttaaggctcaatttgagggtgctgaaatgggtgtgcccgctgagaacgatggctgcaaatgtggaccaaactgctcctgcaacccctgcacttgcaagtgaggtgttgggagagcaagcttcaagcagagatagcccttaattaggaataatgataaactattaatgtgtagctaaaaacttatgtattatgtctgtgatggttttc

SEQ ID NO: 21273 - DNA, 440 bp, Glycine max
agggttttgcatttcgggtcagacagactcagaggtgggaggaggcaatgcccagaagtcaaagatggctcgcgagaagaacctcgagaagcagagggctgccgctaagggaagccagttggattcaaacaagaaagccatgtctattcagtgcaaggtgtgcatgcaaacatttatatgcaccacatcagaagtgaagtgcaaggagcatgctgaagccaaacaccccaaatctgatctccatgtttgttttcctcatcttaaaaagtgaaagagtgcatgttgagacatgatatatcaatatatggcctgttatatagtctctatccacagagatcttcaatttcttttataacaaatatgtctgtgtgtttgtgtcttggggggtaaggagagacgagaggggataattaagtaagttttccattgattaagcgtga

SEQ ID NO: 21274 - DNA, 437 bp, Glycine max
gaaggtgcaagagtttgttgtgagctataagctgggttatcgtgaggagaatatgaagttgtttgttttctttgttgctgcagtagttttggtagcatggccatgccatggcgcaggctaccaaaggttccctctccgaatgaaaactggctatggtgagcgttcttcggaggtaaaatgcgcaagttttaggcttgctgtggaagcacacaacatccgagcctttaaaaccattcctgaagagtgcgttgaaccaacaaaggactacattaatggcgaacaatttagatcagactctaaaacagttaaccaacaagctttcttttatgctagtgaacgcgaagtccatcacaacgacatatttatattcggcatagataacaccgtactctctaatatcccatactatgaaaaacatggatatggggtggaggaat

SEQ ID NO: 21275 - DNA, 303 bp, Glycine max
ataccgttactgtataacgagagttcattgtgaaaaaatctacttactaaactaaatattggatgggtagagccaaagagtgtgaactgtacaagttaacaataacattaattaaattaataaaaaatgaaaagaaagaaaggctccggtgtatagaaaggacctgcccgtttctaaaaaaaatcatagaaacgatggaacccacccattttttatatatgtcctaatttatttactattacttactatgttttttgatatctagtatcaatacaatttattattttgaggttgaatatttag

SEQ ID NO: 21276 - DNA, 283 bp, Glycine max
  modified_base (176)..(176): a, c, g, t, unknown, or other
gacaccaacacatccattcattgtcttagggtgagcaatgtcttcctctttctccatccatttcttcctcctcctctcaatagcccttttctcagtttgttgcttagcagcatctcaagctcccaccaccaaatcacacccctatatccttcccattaagaaagaccccgcaacanatttgtactacacttcagttggcattggaactcctaggcacaactttgatttagtcattgatctttctggtgaaaacttatggtacgattgtgacactcattacaac

SEQ ID NO: 21277 - DNA, 323 bp, Glycine max
gattcaggacaaagagggtatcccaccagaccaggagaggctcatctttgctggaaagcagctagaagatggccgaaccttggctgattacaacatccaaaaagaatctaccctccacttggttctccgccttcgtggtgggatgcaaatctttgtcaagactctcactggaaagaccatcacccttgaggtggagagctctgacactattgacaatgtcaaagccaagattcaggacaaagaaggtatcccaccagaccaacagaggctcatttttgctggcaaacagcttgaagatggccgaaccttggctgattacaaca

SEQ ID NO: 21278 - DNA, 214 bp, Glycine max
ttttactagtgtaagattatttattcattcaaccgcaattttttaatatttcgttacaacctctaaaacaaatatattattaatttgaaaacaaaatccataaataatatttccttaaaatatctcttttacttctttacatctttcactttttttatatttactctttctataatcaccattaccttttatttttccatttcttacttttttt

SEQ ID NO: 21279 - DNA, 328 bp, Glycine max
tatcatcatcaagacatcaaaacatctttctgggacataggagtcatttgactgaatccatcaactgaaagatccttcaattatttctcgtccttggaaaattcttttttgcaagaatcaactgcttctttcattctcccttgctacaaggttgtgaaaacaagacgacgatggttacctcatagccctacactggggcaatgaggggcatcgtgcatgagcctcaagtgaacctaggggcagattagaagttctcactcaataggttcccaactacaaagtcatgacgaaagacaacgattggtaccttcaaaccttacactgtggc

SEQ ID NO: 21280 - DNA, 390 bp, Glycine max
gaaccgtcccaatttttttctaaattcttgaattcccattcaattctgggaggtgtttaaatggaggttcctattcttttttggtgccccctgcattattgaccattggattcgacatcgagattaatctaacaatcaataatacttccacccagtctgaagttgctacaacaataatagacttccacaaaattctccttaatgatactgtaatatatatagagcataacttgcatgcatagttgttgggttttatatggatctctacagtgagtttgtatagatctagaagtaaatctaatggtgtgaaatgtgaataggtttgagattttgtttctcttgatttgtgtaacataatccatactgttctggtaaatgcttaatatttct

SEQ ID NO: 21281 - DNA, 427 bp, Glycine max
  modified_base (71)..(71): a, c, g, t, unknown, or other
aaatctgaaacgttaggtgttttgagacattatgggtgttccacaacgttctgcaataatccacatattantaatactagcttcccgattgattctgtttgttgcagcgaatggttagaggaggcatcaccaaagcaagcttgttgcttctcgggtcatgcaggggagctaagagagcaaaaagtggactcagcaaattctcaggcactgctcaacctgcagaaagctctggaggagtttcaaagagtggtgggaagatagaggattcagctttctggatcccacacccacgcacaggaatttactttccaaaaaggcatgagtgggtgatggatgatgttccagaggatgcagctcgtttaaaccagacttattggttcaaaaatgttgatggtgttgaccaccccatacactaaccataatatat

SEQ ID NO: 21282 - DNA, 341 bp, Glycine max
gttgcgtggactccaacaaggaccttatcaatgggtgacagtggactatctactgggaaacttgctaaagcattattcacaaactgttgcccttgttgatcttggaggtggatctgttcaaatggcttatgcattctcaaatacagatgctgcgaaagctccacgagcaccgaacggagtgtaatcatacataacggcgatgttccttaagggaaagaaatattacctctatgttcacagctactttcgatactgtatgctatcatctcgtgcatatgctttaaaagatcgtgaatatgaaaatccttgtattatggctcgctctgatgggtattacgtat

SEQ ID NO: 21283 - DNA, 407 bp, Glycine max
ggcctccattcgggactgtaactagccgcagcacgaggagcggcctcaggaggagaaggatgtctcacaggaagttcgagcacccaaggcacggttcactggggtttcttcccaggaagcgtgctgctcgtcacaggggaaaagtgaaggcattccccaaggatgacccatccaaggcacccaagctcactgcattcttgggttacaaggccggtatgactcacattgttagagaggtcgagaagccaggatcaaagcttcacaagaaggaaacttgtgagcctgttacaattattgagacccctccaatggttattgttggtgttgtgggttatgtgaaaactccacgtggtctccgaacattgaacactgtctgggctcagcatttgagtgaggaattgaaacgt

SEQ ID NO: 21284 - DNA, 344 bp, Glycine max
tattcacaagatgcgtgccactgatggcaagagggaggcgtggacgtataagagaaagtatgagcttggtcaacagcctgctaacactaagctgtcaagcaacaagacagtcaggaggatccgggttataggtggaaatgtgaagtggagggcactgatattggatactggaaattactcctggggaagtgaagctgtaactctcaagactcgtatactatatgtggtttacaatgcctcaaacaacgagcttgtgcgtactcagactcttgtaaaaagtgctattgttcaagttgatgctgctccattcaaacagtggtaccttcagcactatggtgttgaga

SEQ ID NO: 21285 - DNA, 423 bp, Glycine max
gcattacatgtttgattagaatgatccttatcaggcttatgggtatgttaacaatctttcggatgagttaaaatatgaaatcagatttatcctttcataaagaacaactcgagtgataagctaagcttccataacatacttaatggaaaaatcacagaactttgacgagaattaagtttttagtttcaaatgtatttcaaagcattttaatacttaccttttcacatatttttatatgtgtggaatctttcctcaatttaaggataagcaggaataattgatgacataagttctgataggtaatagcactgtagattaagacattaagttattggcttgtattttagatgtcattagattatgtttttgagagaattctaaccgctccatggaataataatacatgtcaacttaatttttttt

SEQ ID NO: 21286 - DNA, 391 bp, Glycine max
tggatacgattgtttttggtacagaagttcctataaaaatgggaaatgccctacctttgagtgcggtttgaactattgatttacgtaattggaagtaaccaactaggtttacggcgaaacctagaaatcgatcactgatccaattggagtacctctacaggatagacctcaacagaaaactgaagagtaacggcagcaagtgattgagttcagtagttcctcatataaaattattgactctcgagatatagtaatatggagaagacaaaattgtttcaagcaccgacagaaccggaagcaccctttgtttcaaagtttcaaagaggggaggacgggttattcacatttcatttgatggtcagaggcgaattgaaagctaagctgtggtaat

SEQ ID NO: 21287 - DNA, 364 bp, Glycine max
cgattttcttaacaatcaatcaacacgggcaattgcaatattcacatactcaattaagccataaatttctctaagcttatccttgctttccttcttgcctcgcttcttctccttaatcttgatgatgctgatcaatcagcacatgtacaaactcaagggtctcttatgaagaagataaattgtaatggaacatctgctactaagtgcctgttatcatctcgaacacgtctgtgcaaaaaagcctgtggaacttgatgtaaacgctgcaactgcttaccaactgtcactgctggaaaccaaaaaaagactccctcctatgcttatttgactactcatggaggcaaacacaaaagcccttaaactt

SEQ ID NO: 21288 - DNA, 425 bp, Glycine max
caaaatggataattaagggattaataaaaaatgaatggatgtgtagaattaccaaaatacacaaaggattaataacgtatatttttaaaaatatccaaaagaacatttatatttatgtataatagaaaaagaatactaattggggctttccgttggtagaaaaaataaggcagtactccccagaattccgatccagagtatacttccatccaccgattaaataaataactatcagaaacgaaataatcctttaatttttggaagtccccttttattttacttacacaaaaaagactaggataagaacgaaaaaaaaagtgatcccccttttcttgtttgtcttatatccatatttatggagatagaattcatgtcataatttaaaaaatgaacatgtataattctttttcgtaatcgaaaatgat

SEQ ID NO: 21289 - DNA, 405 bp, Glycine max
  modified_base (35)..(35): a, c, g, t, unknown, or other
catttcgttatacttctatttcatctaaaaggganaggcggatttatctatcagcactatgcaggaagaaaagattggcgaacgaattgttgctcttcagcagcttgtttcaccatatgggaagacagatacatcttctgttctaaaggaggcgatggaatacataggattccttcataaacaagttaagctgcttagtgctccataccttgaaagttcaccagcagccaagatgcatggtgtggagccatgcagcctgaggagtagaggcttatgtcttgttcctgtgtcagatactattggagttgctgagagcaatggtgcatatatctgggcccccattaagactactacttctcctaaatttgagaaggatgtctcccaatttcattgacaaaattttct

SEQ ID NO: 21290 - DNA, 408 bp, Glycine max
taatgagtgtcatcatcaaaaagggggagaatgtgaatcatgcaggttttgatgatgtcgaaaaaaattcacttgataatgattgtcatcatcaaaaaaggggagaatgtgaatgcatgaatacatgattttgatgatgccaaagaagaatcaaacacggttgcttcaaaggataagcattgcttcaaaattaatgcaaggttgcttcaacaaacaaagccttgcttcaagattaactcaagatcaagccttgcctcaaaataaagtgtttccaagacatccaaggctctggtaattgattaccaggcagtgtaatcgattaccagaagacaattttgaaaaatagttgttaaaaatgggggttttgaatttgaattttgaacctgtaatcggttaccagatgtttgt

SEQ ID NO: 21291 - DNA, 415 bp, Glycine max
ggatcaccaactagccaatgacaagaggaccaggccttattgtaagaatatggccaagagccaagactatttcttcaaggagttctctagagccattaccttgctctcagagaacaaccctctcactggcacaaagggtgaggtcagaaagcagtgcaatgttgccaacaagcaccatgatcaggacccttgaattttcctccccttgtctatgatcgaggaagaaaatctgtaatatattatgcaaaaaataattaaggtcttttcctttaaatgggctggttcaatgaaccgagaccactgcatgttcatggggatgggaggattaagaggctatgttttttaatcttccgatgttactgttgttttttttttaatttcaataaggatattatatatgtagtactatgcaagt

SEQ ID NO: 21292 - DNA, 424 bp, Glycine max
gaggtaccctgtcaacgttctcatccaccagcatgaatacggacacacaccttgctttcctttctatagagacacacagagagagcaataaacacccttcaatggctaccactaccactaaagtttacattgtttactattctatgtacggacatgttgagaagctagctgaagagattaaaaaaggagctgcttctgttgaaggagtagaagcaaagctatggcaggtacctgaaacactgactcaagaggtacttgggaaaatgggagcacctccaaagagtgatgtaccaattattacacccaatgagctacctgaggctgatggcttattgcttggattccccacaagatttggactgatggctgctcaattcaaagctttactggatgcaactggaagtctatggcgcacacaggcact

SEQ ID NO: 21293 - DNA, 338 bp, Glycine max
agtcatggaaacgttcccaacgggggggtactccaccgtaaagagcctcaagttagggcgcgccacgctagaatgcgccgagtgccttaacgagttcgaggaggtcgaaacgctgtgtatcattccaaattgcagccacgtgttccactccaagtgcatcgacgcgtggatcgccaatcactccacttgtaccgtgtgtcgcgccaatctttttcccaaacctgatgaccacgattttgatcctatccaaattccggatccagaacaacccgttatatcatcaccgactcgagccgaaactgggggctctaattctcggtctacgaatttgattgatc

SEQ ID NO: 21294 - DNA, 426 bp, Glycine max
agggctatagctcagttaggtagagcacctcgtttacacgagcgccaatgtttttttcagaggagtttcatcttgtaatcaaaagagtttatcttatagtaagaaatcgatgtcttactccattttaaggaacaaaacaagagaacaatagcctgacaaagggtttagccataaaatcgaatccatcattgatttgagatattgataaggtgaatactcatttctcgtcaatgctaggcataatgcgggtatagggacctaaaaaagattatcttttcttcctatcttatgaactttaaagtgtatgaagtgtcatttcctatcttagattttaattttagtaggtagataaagagtccatttaacttaagttgatctaagccagaagcagacctacgtcaagataatccttctttgaagcacttt

SEQ ID NO: 21295 - DNA, 404 bp, Glycine max
gaggccaaaaaaaacgcaacacaaatcgaaggggggcatgctgttgtgtgcgacactgctggatgtgttgagttgagacctttaaactcaactcaacattttcatctctttctctctgctaatttctagggttttgcctttccccaattcccacaaaatgggggtctctttcaaggtgtccaaaaccggcactaggtttcgccccaagtcgattccccaacttcaagatggctcatccgacaattccaagtcccagagtgatcttgttgaggctggtgaaaacattgctcagattccccagtcatctgtttcatctgaaactttttcattagcagatagggaagcttctttcacattgaacctgtttccagatggttattctattggaaaaccctccgagaatg

SEQ ID NO: 21296 - DNA, 407 bp, Glycine max
gattactgacctggcctctgtggactacacccaaagagtcaaaacaccaacccaccaattaatccttccttcaagcattatctcacaatgtcttcaaacctcaccattgaacaaaggctcgaacagctgcaaaaggcaaaggaaagagcacaaccccaaccacccaaaggggccaaaatccaacgggtagcacatcatctccgagaccgaaagcatttcaccaagcattacgagccgaaactgatgtcattgggtcccatccatcacggtgctgaaaaactgcagctgggagagcagtgtaagcaaaggtgggcagcaacgtacatcgaaagcactggaaaaaccccacaaactctacacaaaaaggttgtggacgattttgaaaaccagaagaagttgtttgacga

SEQ ID NO: 21297 - DNA, 397 bp, Glycine max
gtctggtcaagacaaccattagaagagttatgacttttagaaaaacttaaaaaccaatttgaaaaagtcaaaaactatttgaaaagttacatcttttgattttattcagaaacaatcattggtaatcgattaccaaatcagtgtaatcgattacacaaggcttttatgtggaaggatgtgactcttcacatttgaatttgaatttcaacattcaaaggtactggtaatcgattaccaaaacattgtaatcgattatagtttttgaaatcaattggaacgttgtaaattcatttgaaaactttttcgaatctattttgctactggtaatcgattacaacaatctggtaatcgattaccagagagtaaaaactctttggtaaacatgttttgagaaaaa

SEQ ID NO: 21298 - DNA, 395 bp, Glycine max
ggttctagtgtgtgattgtttgttggtgtaactcgttcttcttcttttgttgttctgtgtttgtgtttgttttttctctcacctgaaaatgtcttgctgcggaggtaactgtggttgcggaagctcctgcaagtgctgcaacggctgctgaggctgcaagatgtacccagacttgagctacactgagtcaaccaccaccgagacctttgtcattggagtggcacctgttaacgctcaatttgatggtgctgaaatgggtgtgcccgctgagaacgatggctgcaaatgtggaccaaactgctcctgcaacccctgcacttgcaagtgaggtcgtgggagagcaagcttcaaacagagatagcccttaattaggaataatgataaactattaatgt

SEQ ID NO: 21299 - DNA, 165 bp, Glycine max
gagacctcaggtctggctgttataccctgtaaggggtattgggtaaaatgaagttgctaaatgaaacgaagcgatcgttttaaaggatccaatcttacatacaccagcgtgcgacgccatagtctctcttatcgtgccacctaaattctattgactggccggaac

SEQ ID NO: 21300 - DNA, 386 bp, Glycine max
atattaagccaccatacaagaaaccaccttatgggaagtaccgtccattttaagacaacacccatgcctaaagcaagcaatgaggtctattatctacttaataaataagaggaactgctttgtgttttctagcattgtgatttacaacttcgtagcaatgcatattcttgactcttgcatgcacttcaatccttcgtagcattaatgatgtggccaagtcatcatgagcatcatacttatttctttgtgaatgtaaatcaaaattataagagagaaaatggtgcttttgtactacagattactataaataaaaaacttttatggctttcaaaaaaaaaaatttttaattaaaatattatgcggccgctttataagatccaagctta

SEQ ID NO: 21301 - DNA, 392 bp, Glycine max
gactttcaatctctactgtttctacccccaactgcggatttggcctaatgaagagacccatgtctaacaagaacttctttcacccaacgcacctttcattgaggattctacccagcaatcgttcttctattcacacaccaaaattcaatgcacttcccaaagatgtcccatccaatgtacccaaactcactgcatttttctattgcaatgcacgttatgacttatattgttctagaaagccataatccaggatcaaagctccacaagaaagaaacttttgagcctgttacaatcattgatacccctccaaagcctcctgtcgctttgagatttatgtgttaactccacctggactcccaccattgaacactgtcattgcacaacattttaat

SEQ ID NO: 21302 - DNA, 357 bp, Glycine max
cgaaaggaatcagaatcgcttggtggtgatttaataacaaaatctgtgtaactatcatccatacgtcaaataacagaacacatgtataattcaaggtgaaaatgaacataaattgacatgtaatgacataacttgtgttcttacttgatactcgcaaataattctacaatctgacacacgcttatgtctacgatctctaacaactgtacacctactataaccagaaactctgagcccaacgattgggattactatataaaggtaattaacacttatatgctcaatattaacaacgagcattatgagtgcatggcgactctcttgttcgacattacctacactgactgctatacactt

SEQ ID NO: 21303 - DNA, 410 bp, Glycine max
  modified_base (384)..(384): a, c, g, t, unknown, or other
ggttctagtgtgtgattgtttgttgtcgtaactggttcttcttcttttgttgttctgtgtttgtgtttgttttttctctcacctgaaaatgtcttgctgcggtggtaactgtggttgcggaagctcctgcaagtgcggcaacggctgcggaggctgcaagatgtacccagacttgagctacactgagtcaaccaccaccgagaccttggtcatgggagtggcacctgttaaggctcaatttgagggtgctgaaatgggtgtgcccgctgagaacgatggctgcaaatgtggaccaaactgctcctgcaacccctgcacttgcaagtgaggtgttgggaaagcaagcttcaagcaaagatagcccttaattaggaataatgatanactattaatgtgtagctaaaaactta

SEQ ID NO: 21304 - DNA, 331 bp, Glycine max
gttatgatcctctaattggccaaattgccgtttgtggaatataataccacttttggaacttcatgccattcacactgaattatcttttgttattaaatgggaaccggtttgagcgcttcagcttgaacacaaatatgcatttatgctcacttgtcgctgccaattcaaatatccaaagttcaaatcccccaatgctatcaataaaagcattattcctcttcataaatactgctattataaactaggtttgcaccccacattcctcagtaaaatttaacgcccttgtcaaaagccatcaaaaaatgttgtcaaaaaagaacttatttttgcc

SEQ ID NO: 21305 - DNA, 396 bp, Glycine max
gacaacagatggggagaacatatcgtgggaaaacaacaccggcttcggggactcacccgagagaactttgtattggaaatctcaaatcgcactgcttcaggaaattttagagcgataccatttaagtggatcaaaattgacacgagaggttggtcgaattataaaagaggtgaaagcttcggatttttgcagctgtttgaaggctaactcttgggattgcaccacctgtttgagaagacgagtggttgatgggctctgccgaacaggattcagtaccaacctttgcatttcataatgggaaaccacaaaaaaatttccaggaggctgtcacgagtatattgaggtgattgcaaacacatcaacaatgaagaagattcattttcttgtggaattgga

SEQ ID NO: 21306 - DNA, 425 bp, Glycine max
  modified_base (393)..(393): a, c, g, t, unknown, or other
gatcacttattaattgtgttaagaaatttaagtgaggagctagggaatgatgatgaagtctgctatgtgtgcagtggtggttgtagcacttcttcttctggtggaggtggggcccatggctgaggctgtgacatgcaccccaacagagttgagtccgtgtcttccagcaatcacttccggtgctaaaccttccaatgcttgttgcacgaagctgaagcagcaaaaaccatgcttatgcggctacctcaaaaacgctagcttgaagcagtatgttaactctcctaatgcccgaaaaaccgttgcttcttgtgggattccctttccaacttgttaattaattaagccttcttataattaaagtgtgggatatatatatatatatagataaacagnttaatttatacacactttgatcctacaaagca

SEQ ID NO: 21307 - DNA, 423 bp, Glycine max
gaaccctgggaacagcatctccacactcatttcgaaattatgaagcactaatgaaattaacacaaccaaaaaaatttagaaacagaagaaacatatcaataacttaagtcacatacattctgacaccaaaaaaaggaaaggaacttgagccacattctgtccctggtggactcaagaagagtctttcataggacagttaaaattatagcttgcaaaaagggttcactagcaaacattgcaatggcctcaacctcttctgctctcactatatcctcttcttccacccttcttgatggcaaggctccaagacagtcaccagctgcttcccctcaatgtgtgagcctcccccctccccctttgcactctcagaaccgttcatggaagaccactgcttattgtcgcaaggttgctcgaaaaggtatg

SEQ ID NO: 21308 - DNA, 439 bp, Glycine max
aacagacgacagaacgggtcttacaagacgttatgaaaatcgtgtggaactcatttttcgggattttgtgaaattcaattacacgggtttccatacaccattttaatgtcttcccattcgtacaaaggcacctgcttctacacgcgatgccctcccttatcgttccacattggggcttatcactcgacccgttgcatcctccgatgaaatccaattgcacatctatccctgtatcaacttccacgactaaatcaccagacttcgtggtcaaattaaaaaattgaaaaatgttgcttaacagatacgctcataaatcatgtttcaaacaaattatcttgaacacgcgcaaatggttatgatacaagctcaagctctggtcaagaataacttaagaagattgaacactagcatctttaaaaatgcttccaacaatattgtt

SEQ ID NO: 21309 - DNA, 326 bp, Glycine max
cgacagagaccgattttttccttattgatgatccatctgacattgcatcatttgaaacctcttgtgctactccacttggataaattcctaacgcatagtattcaaaaatccttgttcttcatgaacttattgactatcaatcctacgatagtaggcaattcaccaacactatagatatatcttacgataagagaatccttagcagcaactcaaatacaaaatgtgaagcctttcttcttgatattagtccatctccaccaatggaagagaatatgaagtgtgaacaagttcgccttatttgtgagtcaatgatgaatatagatctc

SEQ ID NO: 21310 - DNA, 395 bp, Glycine max
agaagatttgaatgttgaacatgggaagtatgaatcaaagctaaaagatatttctgctaatctacaagcgaaagaagatcaaaatttgaaaaaaggtggtggtcaaaaaatcagccgtggacagaagggaaagcttaagaagataaaggagaagtatgctgaccaggacgaggaagaaaggagcatccgaatggcattgttagcttcttctggaaaatcaatcaagaaggaagagacatcatctgaaaatgatacattggaccaagggaaaaaacctggcagtggtccttctgacgctccaaaagtaccttctgatgctccaaaaatatgttacaagtgtaagaaagcaagtcactttatctcggattgaaggagcaaccaaatggtcttttgca

SEQ ID NO: 21311 - DNA, 150 bp, Glycine max
gacgatgagtcgatttgataactaaggtattggggttcgtgatattgatccaatttgatatcatcgaaatccaatttataccattgttgaattaattatcgatgaaagatttatcatctctatgggattaaatcccgaattttttattgg

SEQ ID NO: 21312 - DNA, 419 bp, Glycine max
acacacacacatcccagccatgagcctgttcggtgtaggcagaaaccagagaacattccgcccgaaaaaaagtactccttctggaagtaagggagctcaacttcgaaaacatattgatgccacgttaggtagtggaaatctgagggaagcagtaaagctacctcctggggaggatttaaatgagtggctagctgtcaacactgttgatttcttcaatcaggtgaatctgctttatggtacccttacagagttctgtactcctgagaattgtcggacaatgtctgcaggacccaagtatgaatatagatgggcagatggtgtacaaattaagaaacctattgaggtttctgctccaaaatatgtagaatatctaatggactggattgaagcacagcttgatgatgaatccatattcccac

SEQ ID NO: 21313 - DNA, 422 bp, Glycine max
gacagagaggcaaatataaagaagaagagaaatgggaaaatagagtactttggtgaagaacaggagatttcctcattcttagtttgtctcacaacaaagcagcttcaaaacgagggaagtattcataaaggagaatacagagaggcaaatataaagaagaaaagaaatgggaaaatagagtacttgctgaagaacaggagctttcctcattcttagtttgtctcacaacaaagagatgtaattgtacctagtacaagaaaatcaaggtcaaagcatggacgctgtgtcatccgcactactagagccagtaactaattctgtgttggatctgattaaaaagcaagtggattacatccgttataggcaaaactttgatgaactacgcgagtgtgtaaagcagcttaaacttgtaaaggagaaag

SEQ ID NO: 21314 - DNA, 430 bp, Glycine max
ggtggtagttgtgtgacacagaaattaagctagagctacataggttttttcttttctcaccttccttctctcccttcagacaagggacgaaaaatcagagagagagagagagagagagagagaaattccaaaaccatgtcgtcccacagtcatctaagtttcgcctttggggttctaggtaacatcgcctccttcgtgtgctttctggcaccactaccgacattttatagagtttgtaagaagaaatcaaccgaagggttccaatcaattccatatgtggctgcactcttcagtgcaatgctttggatcttttatgcctatgtgaagaccggagaaatgcttcttatcaccatcaatgcattcggttgcgtgattgagaccatttaccttgccgtatttatcacttactgccccaagaaagctaggatgt

SEQ ID NO: 21315 - DNA, 421 bp, Glycine max
gatattctaggatgaaatctcacatctctggtgaaagctctctgggcaatgagttgaggagatccgtcagcgagaagcttcatcacgttgatgaggccgatgctgccaagcaaggtagggttctaaagtatatacaaactgagaagcgacggaggaggagccaccgtgcagaagaccccataagaaccttgatgttcttaggctctatgaatcacacgtgacatatgatattattaatgaggtatttgggcctatagccttggtgttgaaattaattaaccccctttgactaattgggggtgaaaaatcaaaaccgaaattcatttcaattgtcacatatatgttaatacagcagtgatgtaaatatgtcatggaccttcatatctatagctagaagtatcccttacttcagatgattata

SEQ ID NO: 21316 - DNA, 384 bp, Glycine max
aggcgtacgaaccgatgcaaagacgacttatggggccaacaccaaaacttaatgtatgggcactgtggactatgccttggggcaagactcacacactcactctctgtcacttccgatacactcctgcgctgccaaaccacgatatgtagtggaggattaccaaccagaaaagcgtccgccgaagggccaacgtgcatactactctgtctgaaccttgatgcttttaatctacatatatgacacgtgtcccatgaaactatcaacgtagtatctgctcatcaacaacatgtgttggaatttaatgaccaataccgtcatattgatgattgataatgactatcgagcatcattttcaaacacacatatacgtgaattctatgaaga

SEQ ID NO: 21317 - DNA, 408 bp, Glycine max
acaaaacgtttaaaaggcatctcttaggatcaaatctaacatttattgtgggggcactgtggacaatgagttgaggagaacccacacacataatcttcatcacgttgataacgccgatgctgccaaacaaggttgggttctaaagtatatacaaactgagaagcgaccgacgaagagccaccgtgcataataccccataagaaccttgatgttcttaagctctatgaatcacacgtgacatatgatattattaatgaagtatttgggcctatagccttggtgttgaaattaattaaccccctctgactaattggaggtgaaaaatcacaaccgaaattcattttcattgtcacatatatgttaatacagcactgatgtaaatatataatggaccttcatatatatagc

SEQ ID NO: 21318 - DNA, 404 bp, Glycine max
  modified_base (364)..(364): a, c, g, t, unknown, or other
gacagagagagggggttgggggtggagggattgacgctgcgtctcttcctcttctctttcgatccatccctcattcctaatcctccaatccaaccacctcagcctcacactcacatatacacatatctgaacgcgtatcgtccctcctatggcttcaaagcgcatcctcaaggagctcaaggacttgcagaaagacccaccaacttcttgcagcgctggtccagtagctgaggacatgttccattggcaagcaacaataatgggtcctgctgatagtccttatgctggaggtgtattcctagtcactattcacttccctccggattatcctttcaagcctcctaaggttgcctttaggactaangtgtttcacccgaacatcaatagcaatggtagcatttgtc

SEQ ID NO: 21319 - DNA, 416 bp, Glycine max
tccatccctccatttcttacgttaggtaattgagtatgcttgtttagaatgttgatgctatattatctcaaatttcttttaaactaggctcggccgtgttttgctaggtactaaaattatttattttgatgtgtttgtgggtttcaattctcctatattaatccttttattttgtcaaaacaatctatgcccagtaacttttctctcaagtgtgcatccaatacgataatcatgttgaattgatgcttgattcattcatgtgcaaatgatacttagagaacacgatgatgctatttttactgaaaactatgatttttttaatttaacattttatcaaagcctgaatcttttaatacaggatcagatttatacaattttaattaatgtttctccatgatgaaattacactaataaaa

SEQ ID NO: 21320 - DNA, 387 bp, Glycine max
attaaagtgtgggatatatatatatatatagatggacagtttaatttatacacactttgatcctacaaagcatcttgacacaagcattcaataggatttcaccactttatcgcaacattttaacatgatgcggtaataaagtaaattcttgttgaatatttggataacgatgttatatactcatagtttgtgtgtataaattaaacttatatttattatttactctatatatgtcactctacgtttgtgtgatatattatacagttaagtatttagctatctttgaatatgttaaagatgatcatatcagataaagctctctaaagttgaatatgaccaagatacatgttgtatccaagggaatatatgtggttagaagctattaat

SEQ ID NO: 21321 - DNA, 427 bp, Glycine max
gacgcacttagcaatcaatcaaaacattcccaatagcaataatgtacacatcttcaattaagctccttctcctatagccatggctctttctaagcttataattgcttcccttcttgcgtcgcttctccttcttcatttcgttgatgctgatcaatcggcacatgcacaaacgcaggggtctcttcttcagcagatagattgtaacggagcatgtgctgcgaggtgccgtttatcatctcgtccacgcctctgccaaagagcttgtggaacttgttgtagacgctgtaactgcgtgccacctggcactgctggaaaccaaaaagtgtgtccctgctatgcaagtttgactactcatggtggcaaacgcaagtgcccttagacttaattggaccactatcctatgcatgcctttgatttatattataaa

SEQ ID NO: 21322 - DNA, 381 bp, Glycine max
ggttgtagtgtgtgattgtttgttgttgtaactcgttcttcttcttttgttgttctgtgtttgtgtttgttttttctctcacctgaaaatgtcttgctgcggtggtaactgtggttgcggaagctcctgcaagtgcggcaacggctgcggaggctgcaagatgtacccagacttgagctacactgagtcaaccaccaccgagaccttggtcatgggagtggcacctgttaaggctcaatttgagggtgctgaaatgggtgtgcccgctgagaacgatggctgcaaatgtggaccaaactgctcctgcaacccctgcacttgcaagtgaggtgttgggagagcaagcttcaagcagagatagcccttaattaagaataatga

SEQ ID NO: 21323 - DNA, 431 bp, Glycine max
attataaacataccaattattaaactccagcttgtactggaaaattgtattaaaacttatttcaaggagaattcgtttttgtgtaaaaatgctctttacataagtaatttataattactgtacttaatttatacttctggtgtgatgcaggtgattgatagagtctggactgtcaacttagttaggatctcttaccttaaaatgatgttattgcatgcttattacttagaaaaatgattattagaaaattgatgtgatattacgtatagtggtgatatttttgtacagagtaaacaattgcgtataagttgttttttaaattggttatacaagaaatcaatctaaaaatatttttaaataacttttttttaacaaaatgatgatacaaaatgttgacattttttttaatgttgaaatccttgactagattt

SEQ ID NO: 21324 - DNA, 428 bp, Glycine max
cccacgcgtccgggacaccacacaccacacacatagtagctattatactctctagagtaagggcgggggctgctataattttctaataatggcgaaagacgttgagcaggtcacagagcaaggtgaatactccgcgaaggactaccatgaccctcctccggcaccgttgatcgacccagatgagctcacaaagtggtccttgtacagagccgccatagctgagttcatagcaacactcctttttctttacatcaccgtgttgaccattattggctacaagagacagagtggcaccaaaatccccggtaacaccgaatgtgacggcgttggcattttgggcatcgcttgggccttcggtggcatgatcttcatacttgtttactgcactgccggaatctctgggggacacatcaaccctgcggtgacat

SEQ ID NO: 21325 - DNA, 403 bp, Glycine max
catttatattttattttatttttaatttttataggttgaagttataggaattaaaaatataagaatgaaaaaattatatagactaaaaatattatttttaaaattataagaattaaaagaaattaaaatgtaaatgataaagattaaaaagattatttttaaattaaaaaaaaaaataaaaatcatgaatcaaataatcaaatgagtaatttaatcttttataattaatttgtcaagagaatccattagcatttgtcttttttatttaatgaacaatataaaatataaccaagcatataagggattgtatatactatgttttgtgcttaatttggtttaatttgagtgataattactgatatttaattatgggtttggaattggcagaaggtactacaagtgc

SEQ ID NO: 21326 - DNA, 375 bp, Glycine max
gagttttgagtttcgggatctgtggagatagagaaagcgccatggattcttcttcacacatggcttcgcttccggaagatatcatcaccgacgagcatttacaacagcaaactcaacccgcctcagcctctgctttcgcttccgttcctcagcgcccgccaactaagagctcttcagaaaaatatgcacctttagattggtccgtgtattttgacaaagaagacgatgttgcaattcccgaatcgaacgatgtttttcatgtttacacggcaagaactgagggtcccgttgtattctgtttacacggtggtggttattctgggctttcttttgctgtctcagcaagtaaattaaagagaaagctatggtagttgc

SEQ ID NO: 21327 - DNA, 352 bp, Glycine max
  modified_base (344)..(344): a, c, g, t, unknown, or other
gagagtgagatataggatcactggagagcttacttcaatggcggtttcttctctctctgttactcctctttcgctctcaaattcttccccctctctatcttccaagccaaagttaccatctttgtgttttctctctggcaacaacaccacattgagggtaacatgcccaaaacctctgcactcatccactgttgttcatgttgctaccgaagcgttggattcatcccctgatcccttggacccacctccagaaacccttgatgatgactctgacgccaccacctttgaggttggtgacttgcggactcctagcacttcaacaattagcattggtggcgatgcanatacaatg

SEQ ID NO: 21328 - DNA, 271 bp, Glycine max
cgaatgtgcaaaacttcgtaatgagctgtaaactgggttattgtaaagcgaatatgacgtcctacgaacactatgacgctgcatcacatgcggtaccatggccatgccatcgcgcacgctaccaactgttccctttccgaatgaaaactacctctggttagcattcttgcctggtaaaatgcgcaaggtctatgcttgctagacaagcacacatcatcactgccctttacaaccattcctgacgagtgcgttgaaccaacacaagactaca

SEQ ID NO: 21329 - DNA, 416 bp, Glycine max
gactcgagtgcgcgtctatgccaaagagagtgagtgagtatggtttcaaattccaatcggaagaaatcggaatcggaaaaaatgggaggtggcggcggcgatcacggccatggacacggacacggtgatttcaggaacaaggtctggagtatgagcggtggcccttactgtcgcccaaagcactggaagcgcaacaccgccattgccatgttcggcgttgtcctcatctgcatccccatcgctatgaaatccgctgaactcgagcaacgaccacatcaccctgttcgccccatcccttctcaactctggtgcaagaactttggaactaaagactataatgataatgatccatgattcatcaattgcatcactggtgttcacatcatgtcaagcaacatttatttgttaaatgctga

SEQ ID NO: 21330 - DNA, 230 bp, Glycine max
gggtcaaaatctcggatttatcgcttctagctcgctgtgtggcaatttctgtcgctttgctctgattctgattttatgtgttccaatgtctctctggcttgcatacgccattcttattttcagatcagcatagcctagccggttagatatggcagtcactatggcactaatgaccacgcagcattctgctcacctacatctacctttttatttaacattttaacttttca

SEQ ID NO: 21331 - DNA, 217 bp, Glycine max
ccttgacaggctcatgctcaatatgtaacacggggcgcttgggggatgtgaatatcaaccccggcattgcctcactatttgattcttgatgcgaagaagaaatggggctaacgcgctaatatcgcactgtgcgtacattacgatagcaaaacagacgctggtgacactctggcatatcacaagacggacgatatgtcttattatcattaacaatatg

SEQ ID NO: 21332 - DNA, 390 bp, Glycine max
  modified_base (93)..(93): a, c, g, t, unknown, or other
  modified_base (96)..(96): a, c, g, t, unknown, or other
  modified_base (99)..(99): a, c, g, t, unknown, or other
  modified_base (102)..(102): a, c, g, t, unknown, or other
  modified_base (106)..(107): a, c, g, t, unknown, or other
  modified_base (149)..(149): a, c, g, t, unknown, or other
  modified_base (165)..(165): a, c, g, t, unknown, or other
  modified_base (186)..(186): a, c, g, t, unknown, or other
  modified_base (204)..(204): a, c, g, t, unknown, or other
  modified_base (240)..(240): a, c, g, t, unknown, or other
  modified_base (315)..(317): a, c, g, t, unknown, or other
gcctttcctgatttcttggatgatttgtcctataggataatttgtgaaacaaccaagcccgcttatcttgtttcataagatgatgttacacgngcncgnaancagnngaaatttttactttttcttctcttattttgaacatgcccagnggctgtttatattgtncgtcagctttttttttaccgncgaagaattctaaccgcngaatttttttctataattgatgctttttattccacnacaatttttctttttgcgaaccgatttatctttgacaaggatgtttttattgcttccacgttttctattcattgnnngcctttttacaactttttcctactctttacccactggaaccgctattaatttattatatttttttttgcctca

SEQ ID NO: 21333 - DNA, 421 bp, Glycine max
ggttctagtgtgtgattgtttgttgttgtaactggttcttgttcttttgttgttctgtgtttgtgtttgttttttctctcacctgaaaatgtcttgctgcggtggtaactgtggttgcggaagctcctgcaagtgcggcaacggctgcggaggctgcaagatgtacccagacttgagctacactgagtcaaccaccaccgagaccttggtcatgggagtggcacctgttaaggctcaatttgagggtgctgaaatgggtgtgcccgctgagaacgatggctgcaaatgtggaccaaactgctcctgcaacccctgcacttgcaagtgaggtgttgggagagcaagcttcaagcagagatagcccttaattaggaataatgataaactattaatgtgtagctaaaaacttatgtattatgtc

SEQ ID NO: 21334 - DNA, 417 bp, Glycine max
  modified_base (363)..(363): a, c, g, t, unknown, or other
gatttcctcatgcatgaacctcttgatgtaatcggcatgattctacctcaatacattatttcatttcctaatttccctccttaaataaggacaatatcattcaaattttcctaattaaataaggatcatatcttcccaaattttccaaaatcagaagcaaaaaatatatagaaaattcctaaaataaaacaaaaaatatttttaaaattaccgtaaaagataagattgtcatttttgacaccctaatttattaaatgaagtgatgatgttatggcatttgtaccttgttttaagtaggggctgatatcagtagtttggttatcagcaaaaaaaggtgtctccgagtatctcataaagcacacnaggggattgactcccctaccgtctgtatttggaagacaatcttgtatgccgctc

SEQ ID NO: 21335 - DNA, 417 bp, Glycine max
  modified_base (358)..(358): a, c, g, t, unknown, or other
attggtctgaaatatctattaattttgttattggtaattaatttttgttaaaaaatttaattgattatttttgttgaaatatttcttattaattatatttttttatttacagaacttaaatctcttgtttaaaaagaagattaagatccaacaccttgtttaaagagattaaaaaatttgatatcactaccaattgactttttggtaaatatgtaggatgtataataatgataattagagtttttatgaaaaatcttttaggggcaaaaattatttttaagaaatatatatacgacttttctagaatacgtggaggcacagctaacaagaagctggagtaaggtccaccatgtcttgngctaatacaacataaaccccttcactttctttaaattgcaataatcacatgcatcgcat

SEQ ID NO: 21336 - DNA, 325 bp, Glycine max
taaagcacggtcttctacattttccaattcacaatacaattgctacaatttcaactccataagatgatttggccgtgtcctataaaattattgtacttagaacgttatcccattctatttccaatatagctacgtttgttctaaaacatcaacggggtttctgtagaaatcctatcgtactcttgtgcattgtattagaatatatgcagttcatttgcctcaataatcttctcagcattgccgttgtaaattgatttgtatgtattattccaagaatagaactaattctctatttttggtttaaataatatttgtatttcctttc

SEQ ID NO: 21337 - DNA, 272 bp, Glycine max
ggcacctgttaaggcttaatttgagggtgctgaaatgggtgtgccggctgattacgatggctgcaaatgtggaccaaactgctcctgcaacccctgcacttgcaagtgaggtgttgggagagcaagctttaagcagagatagcccttaattaggaataatgataaactattaatgtgtagctaaaaacttatgtattatgtctgtgatggtttttcgtgcactctggtgttttgtgttaaacaaacattcttaaaataaaagaggtcatgtt

SEQ ID NO: 21338 - DNA, 414 bp, Glycine max
gatgtttctttactaaccattgaggagggtatgggtgaggtgaaagccacagctggtgacacccatcttgggggtgaggattttgataacagaatggtgaaccactttgttcaagagtttaagagaaagaacaagaaggacataagtgggaaccccagagcacttaaaaggctgaggactgcttgtgagagggccaagagaacattgtcatccactgcccagaccaccattgaaattgattctctctatgagggaattgatttctactccactgttactcgtgccagattcgaagaactgaacatggatctctttatgaagtgtatggagccggtggaaaaatgtttgaaggatgctaaaatggacaaaagaagtgatgatgatgttgtccttgttggtggttctaccagaatt

SEQ ID NO: 21339 - DNA, 351 bp, Glycine max
acgaacgacagagaagactggctccaggctaacgctattcgttatcttttgggagactggggggcgtacatacgaggagtactgcatatactaacttattatattaactcaagggatggctggactcgcacctgttgtatcacaaggcgatgctcgagcatatgaatatagaacgagagacttacttttatatgatggacatgactggcacacatgctatgactagggtaatgatagctattacactatctgtctgcacgataatcttagcaagtgaatggacacatatgattgttagaagccatttttcattcagtaaacggggatacttccctcttgcaagggacttga

SEQ ID NO: 21340 - DNA, 411 bp, Glycine max
ggtttaaatgttttcgctaatcgagataacttgggacagtgggaagaaaataaaggtccttgtcttcttctacgctacaattttggtaacatgacaatgccatgcgtacgatatgtttcctctacaaatgaacactggctattatgcccgtactccgaaggtctaatgcgcatgttgtaggcttgctgtggaaacacacaacatctttggctttgagaccattcctgattagtgcgttgaagcaactaaggactacatccatgacgaacaatatagatcagactccaaaacaattaaccaacaagcttacttttatgccagagacctgaaagtccatactaaagacacatttgtgttcaacatagatgacacacgactctttaatattccatactacaaaacacatctata

SEQ ID NO: 21341 - DNA, 338 bp, Glycine max
aaaaaaacaacatatgggtttttcatatagaatacaacatagggttacagtggaaatattacaaccgctcgggacttctaaaatctaaatatcatcaaagtacacaaattagaacggattgcatgattgcattctataatgatatcatcatctatacagtaatctctacaacacgcaagtcactaaacttaaactactatgcaaaaacatgccctaatgtctactatattgtggccaaggcatgaaaagatgccactgataggaacaaaacttttccagtagcaattctgcgaatgcacttccattaatgattacaaacctggtgctatacctctctg

SEQ ID NO: 21342 - DNA, 363 bp, Glycine max
ggtggtttgacatagggacttgagggaaatcgtggaggctattaaggagaatttcgatgacgcggcttccgctggggatcaggtttctgagatgcttgagatcagtagggcgcagcttgatcggagcttcaagcaattgaggaaaactgtgtatcactcgagtagcatattgagcaacttaagctcgagttggacctcgaaaccgccgctggcggttaagtaccggctcgacaccggttcgctggatgaaccgggcggtccaaagagtctctgctccactttggaacgcctcttggcgtgggagaagaagctctacgaggaggttaaagctagaaaacgtgtgaagattgaacattaaaagaa

SEQ ID NO: 21343 - DNA, 426 bp, Glycine max
ttttaagggtctcgtatgacattactgatctggtcaacttcatagatggtcttgcagacatgagtgccctagtgtatgatagttcaattcacgcttacatgccgcacgatcgacagtggattaagcaacgaactttccaacatctgaagaaattagcacactgattaatcccttaacttttggcaatttaatgtaaagaaaatcgagaatggccgagagcctgtctgttatgtgggctatatactccgttggctatgtaatacgaatattgcaaatgctggcaggtaattataatatcaacagctggtactgctttagtttcataaacaaatgattgtcgttggcatggttgtgtatcttctatgtctgcaagacttgtcttttttaaaaatcttaatcttgtagttgtaatattaaatagtgagt

SEQ ID NO: 21344 - DNA, 337 bp, Glycine max
ggatcttgtaatgaatagtgatggcacttgccaaggagtgattgccttgaatatggaggatggaacactacatcgtttcaaagctgcttcaacaattttggccacagggggttatggtagagcatacttctctgcaacctcagcacatacttgcactggagatggcaatgccatggttgcacgtgctgggatccctcttgaggatttggagtttgtacaatttcacccaacaggtatatatggagcaggttgccttatcacagaaggatctcgtggtgaaggtggaattcttaggaatagtgagggtgagcgatttatggaacgatatgcccctact

SEQ ID NO: 21345 - DNA, 401 bp, Glycine max
  modified_base (337)..(337): a, c, g, t, unknown, or other
  modified_base (382)..(382): a, c, g, t, unknown, or other
  modified_base (384)..(384): a, c, g, t, unknown, or other
  modified_base (389)..(389): a, c, g, t, unknown, or other
gatgagccagatgtgtcttgggttaactcacttgtgaaggatgctccaccggaatccggtgaatctggtgaatacagtgtggaagatcagcgaaagctactgcaatgccacaatggaacagatgcgattccagcatggttggagcaattgtacttggaccaggagcaaatggtggcatgattgcaatttcgtggcttgcggtagcaactccttttgcaactcaacagtttatttatttgatgaattttttgaattttatagaatttagttagatgacaattcgcaaaagggatcttaaaatagcctaccaaggctataggatgtagaagttgggcangaagcaagttttctgcttcagtaactcaatgattccatttttttntnctganctattttctttc

SEQ ID NO: 21346 - DNA, 293 bp, Glycine max
agaagtggatatacatagatgctcgaaggaaatcttgggtgctcttactgagaatttcgatgacgccgcttccgctggagatcaggtaactcagagtctaggatcagctatggcgcagcttgatcgaagcttcaagcgattcaagaaaaccgtgtatcactcgagtggcctattgcccagctcaaacggtagcatgaccgcaattccgtcgcttgcggtagcaactccttttgcaactcaacagcttattgatctgatgaattttttgaatttatagaaattagttagatgac

SEQ ID NO: 21347 - DNA, 180 bp, Glycine max
tgtcttgcaaatcgttcgtctgactcgggtgtgggggctgaaagactaatctaacgcgtctagtatctggttacctccgaagcttccctcaagatatctggagcccgtgggcgaattgtatagcatactgcctatgatcactaggcatatacggcccctcgacatggacctattatgaaa

SEQ ID NO: 21348 - DNA, 388 bp, Glycine max
ttttgttggaatacatcttggatctgtcgagggggttatgtccaaagtcctactcatggtcactcggtggaattaggagaagctgtaggtgttattgcgggccagtccattggagaaccgggcactcaacttacattaagaacttttcatactggtggagtcttcactggaggtactgcagaacaggtgctagcaccttataatggaaaaattcaattcattgaagatttgattcatcctacacttacacgtaatgggcatactgcgtttctatggtatatagatctgtatgctactattgacagaggtgatattatacataatgtgactattccaccaaagagttttctattagttcaaaacactcaatatgtaaaatcacaacaag

SEQ ID NO: 21349 - DNA, 373 bp, Glycine max
  modified_base (349)..(349): a, c, g, t, unknown, or other
gatcgtatttcatttcatttccctccccccactcgcaccgtttacgccaaacaaaccctaaatctctctcgtcttcttcttcttcttcctccttcaaccatgagagagatcctgcacgttcagggaggccaatgcggtaaccaaatcggttccaagttctgggaggtgatatgcgacgagcacggcatcgatcctaccggaaagtacaacgacgaaggcaacagcggcatccaactcgagaggatcaatgtctattacaatgaggcctctggcggaaggtacgttccgagagccgtacttatggatctcgaacctggaaccatggacagcatcagatctggcccctacngcaagatcttccgccctgacaact

SEQ ID NO: 21350 - DNA, 356 bp, Glycine max
ctagtagggccgccaggcccatcagtcaacgcggactatacatattgacattccattttcaaagcagcttaatgattaattattgaggcacatattgatggaatcagtattattttctcacttgcttaaactatatagatactatttctatttatataaatcatattttatttattatctataatattatataatattattatggaaatatatcattaataactttttaaatattatcgattatatttaatcatgtttaatgttttttaaaacagaattaaatctttattaaatattatttatactttttattttatttcgaaaattttaatctcttcttttcttgtaaatttttt

SEQ ID NO: 21351 - DNA, 397 bp, Glycine max
tcagtatggagatgcagtaatggaggctttcgtcgaagcctttagtggttctgttcttgggaaaggctacatactgaaaacgtatttctttcctggtcagagaacttctagccacatacaaatacatggtgcaccacacgtttacaaggttgatgaattccctgtgtatagcatggcaactccaaccatctctggtgcgaaggagatactatcctatttgggtgctaagcctaaagcaaatgtctcatctgctcaaaaagtgatattgactgatctgagagaggaagcagttgtctatatcaaaggcactccctttgtcctaagggagttgaacaaacctgttgatacactcaagcatgttggaatcacttgtcctgcagtggaacacatggaagca

SEQ ID NO: 21352 - DNA, 430 bp, Glycine max
ccattcttgaatgttactatatatgttagttttagtttgtctatatgattcctgttggatttcctgatgagatgttcacagataaaaatatgatttataaaatataataacacttaatattttgcgctgctaacacgtctctatacacctataaattttttccttcttttcttttgtctgtatacagcaagtttgaaaagaagaagtcaaaattttcagcagcaaccacatgatgatcaaatctgcacaaattcattgaccatattatgcattccaacatcgttttagaaattttacagctaggagaatattatattaaaaaaattaatttaatataactcaacaattgttattttatttttttcatatcaataataaaattatttatcagaaatttataatcgaatatttttaacattttcttcttaat

SEQ ID NO: 21353 - DNA, 351 bp, Glycine max
gaccattcaccacacacatagtagctattatactctgtagagtaattgcggaatctgctagaattttctaataatggcgaaagacgttgagcaggtcacagagcaaggtgaatactccgcgaaggactaccatgaccctcctccggcaccgttgatcgacccagatgagctcacaaagtggtccttgtacagagccgccatagctgagttcatagcaacactcctttttctttacatcaccgtgttgaccattattggctacaagagacagagtgacaccaaaatccccggtaacaccgaatgtgacggcgttggcattttgggcatcgcttgggccttcggtggcatgat

SEQ ID NO: 21354 - DNA, 247 bp, Glycine max
ggcttcgcttgagcagacttaacaacagcacagagcgggttactgtctgttcaagctaccatctctctctctctttcttagtgcctccttgccagaagttaaaatggcccaagaaactttcctattcacatctgaatcagtgaacgaggggcaccctgacaagctctgtgaccagatctccgatgctgtgctcgatgcatgcttggagcaagaccctgacagcaaggttgcctgtgaaacctgcacc

SEQ ID NO: 21355 - DNA, 244 bp, Glycine max
gactgagtgtagtaatcaatcatcttttgtttgttcttcagtactttagtgtgtgatttaattccaagattttgagaatgtctagctgtgggtgtggaagtagctgcaactgtggcagcaactgcggttgcaacaagcactcttttgacttgagctatgttgagaagacaaccacagagactcttgttttgggtgttgggtctgtgaaagcccaattggagggtgctgaaatgggtgttgcaac

SEQ ID NO: 21356 - DNA, 340 bp, Glycine max
gacataatcataatccttccagagttccaaagtcctcagacatgaaagggtctttatatgttgctgatgcccacatgttagccacttcttctctttctatgagtaataaagccaacaacccttttgttcttccttgtcaaacccttgtctctcatagtagtgtgagagatttgagcttcaaggtcagcatttcttggccttaccatgcttcttgtattgtgcaacgacaaaagaatagtaataacagtggttttgttgtggtagggtgtgcaaaatggggtttggaagctgagatgaaaccacaagaagatgatgaggaaaagggtaggagtagaatggc

SEQ ID NO: 21357 - DNA, 266 bp, Glycine max
catttgcttgcgtctaaatcgcgatgaaggaagcggccgaactgagatgcaaacctttgttgtaaaactcttcagggcgaacatctaaacagcaagctttccactaacaaaccacttacactatggcattgatattacaagcatcgatgcataaagcgagaatatggaatcatatgctgtgctatattaaaacattgctgaaataccttaagactcaactgtgaccacaagcctacgatcgtgtgcattgctctcgaagctgataa

SEQ ID NO: 21358 - DNA, 431 bp, Glycine max
  modified_base (404)..(404): a, c, g, t, unknown, or other
gatttctccatttccattctcaactgcgcggtgaggaagtgttatacagaaagtgcgagagccaccgtcttctcttctcagagcttggctttgcttatcgattctctctcctctcatctttctcattcaaggtttgtaaaagatggccgatgctgaggatattcaaccccttgtttgtgacaatggaactggaatggtcaaggctggatttgctggtgatgatgctcccagggctgtctttcccagtattgttggccgacctcgacacactggtgttatggttgggatgggtcaaaaggatgcctatgttggtgatgaagcccaatcaaaaagaggtattcttactctcaagtatcccattgagcatggtatagtcagcaactgggatgacatggaaaagatcntgcatcacacattttataatgaacttt

SEQ ID NO: 21359 - DNA, 105 bp, Glycine max
  modified_base (24)..(24): a, c, g, t, unknown, or other
cgtattaagcgaccaaatgcttcngggagttgagggaaatttatatccggggatgcccgatataagtcaacctttcgaactgctgctgaatccacgggcaggctt

SEQ ID NO: 21360 - DNA, 237 bp, Glycine max
cggacgcgtggggctgctagagacacagtgggaggatccctgagttgtgaattcaacgatggttgttgttggaagggagcccaaggtggaagggcttactcggcttgtcttgatgactatagaaaaggttgtacatgttcacctgggttcagaggtgatggagtccagtcatgttaagatatctatgagtgcaactagaaaacattctgtcaattcccatgttgcaaatgcaaaaac

SEQ ID NO: 21361 - DNA, 409 bp, Glycine max
gaagacgacagaaggggaatattgtattttgtgctaatgtgaaaatccctctcaatggacagacttcatgtcctccgcttcctgaaagatcaccacttcggaaggaaagatcagacaacagaagcgagttgttgagagctacgttggtggaacatcaccgaatcgaatcgaataatcaaacatgacttgtccttccatttcgatttaaaccccgagacgatctatcgaagccacttcaaagattattcttagatcgcttcgatggtcgatcactacaacaagctggttaaactagcggcgagggctttctacgatgatctgacgagtaaaggagagaatcaacccaaatctggaaggagtgataacagaggaatcgctgtggtgattctcgatgccctcacgaggcgac

SEQ ID NO: 21362 - DNA, 375 bp, Glycine max
atttatatttctatcaagttactatctatgggaattaaattcctcgtggaatattgaagaagccatgtctacagctgggcaggtcatcaagtgcagagctgcggtggcatgggaagcagggaagccactgtcaatagaaaccatagaagtggcaccaccccagaaaggtgaagtgcgtttgaggatcctcttcaactccctttgccgtagtgatgtttattggtgggatgctaaggaccagactcctctagttcctcgtatcttacgccacgaagcttcatggattgtggagagcgtgggcgagggtgtgacacatctgaaaccaggtgaccatgcacttccaatattcactggggagtgtggtgaatgcactta

SEQ ID NO: 21363 - DNA, 307 bp, Glycine max
cttcttcatgtggatgatgctgatcaatcggcacatgcacaaacgcaggggtctcttcttcagcagatagattgcaacggagcatgtgctgcgaggtgccgtttatcatctcgtccacgcctctgccaaagagcttgtggaacttgttgtagacgctgtaactgcgtgccacctggcactgctggaaaccaagaagtgtgtccctgctatgcaagtttgactactcatggtggcaaacgcaagtgcccttagacttaattggaccactattctaatgcatgccttgatttatattataaaataaaaa

SEQ ID NO: 21364 - DNA, 435 bp, Glycine max
gggtttctgaatgtctctgcagaggataagactggtggtgttaagaacaagatcacgatcacaaacgacaagggtaggttgagcaaggaggagattgagaagatggtgaaggatgcagagaggtacgaggcagaggatgaagaggtgaagaaaaaagtggaggctaaaaattcgcttgagaattacgcgtataacatgaggaacacgataaaggatgagaagataggagggaagctgagcccggatgagaagcagaagattgagaaggctgtggaggatgcgatacagtggttggagggaaaccagatggcggaagtggacgagtttgaggacaagcagaaggagttggaagggatctgcaaccccatcattgctaagatgtaccagggtgctgctggacctggtggagatgttcctatgggtgctgacatgcct

SEQ ID NO: 21365 - DNA, 171 bp, Glycine max
gagtgcacaagtgagtttgttgatcgagataactagaaacagtgtgatgaaaatgaaggtccttgttttcttcgttgctacaattttggtagcatggcaatgccatgcgtacgatatgttctctctccgaatgaacactgcctattgtgcccgtactccggaggtgaaatg

SEQ ID NO: 21366 - DNA, 395 bp, Glycine max
ttctataaggggacttttcgctagatccagccccatcatggcttcgtagaatctagaagctcttgccgccactccctctgatgctgatgctcctaccatatttgacaagatcatcaataaggagattccttctactgtggtttatgaggatgacaaggtgcttgccttcagggacataactcctcaagctcctacacatattcttatcattcctaaattcaaagacgggttaagtggtctatccaaggctgaggagaggcactttgagattcttggccgccttctgtacactgccaagctggttgcgaagcaagaaggactcgacgacggcttcaggattgtaattaacgatgggccgaaaggatgccaatcagtttaccacattcatgtgcacc

SEQ ID NO: 21367 - DNA, 399 bp, Glycine max
agatgacaacacaacggagggcgaaatataactgggcctaaataatggtcccacataacgtcaaatgggcaagtctggatgtgaagatcctcgcaggcctgaaaaagaggactagtatgttgcttctcaaagcaagaggctagatcttccactgaggactttctgtgctcatgagcgagatagattgcaatgcagctagcaaatcatttcaacagaaagcccgcttctgggagatgagtgaaaggcactgttctatccgaggccactgatatatgcatgtgtagatcaggatcaaggatcattgcactctgagtcactccacaagactcgggtcaaggcaagacatcattcaaggtcaactagacccttctctttaaccaaagatagcaagagatcatc

SEQ ID NO: 21368 - DNA, 359 bp, Glycine max
gatgatcagcagggagaattaggtttttagggtttacaccgagcagccacacctcccgcagcagccatggttctcaaaactgaactatgccgattcagtggtgccaagatctacccaggaaagggcatcagatttgttcgtggtgattctcaggttttcctgtttgcaaactcaaaatgtaagaggtatttccacaatcgcctgaagccttcaaagctcacctggactgcaatgtacagaaagcaacacaaaaaggacattgctcaagaagctgtgaggaagaggagacgtgctgccaaaaagccttactctaggtccattgttggtgcgaccttggaagtaacccaaaaaaagagagc

SEQ ID NO: 21369 - DNA, 306 bp, Glycine max
cttctgttcactggtcacaggaagcaccctggagagccagcatctaaaacgtgtcatcctatacatctctcttcttcacccttctgtttgattaacacttcaataagaggagaacgaacactccgtttaattaccaatggaattgaagaagcattttctttcatgccaactaggaattggatgctcataaggcgtattgattgaacagatatttactgtagtagacttacaaacgatagccaagcaagctattgtgttctctgtcaatgattcactagaatggaaggactctcccaaaaggctcat

SEQ ID NO: 21370 - DNA, 231 bp, Glycine max
gtttatacaaactctcatgctgttttccacgtgcaaactttaaatacactctgacagtctctgcacctaattaaaaaaaacttaactgacatataaacatagccatcgttatgtctacacaaccaatgctagttcggtttcctagtattaaagacttactgtatgacacatttaattgtcacaggtactaacacaatcctctgaattccacaaatctcacctagactgcaa

SEQ ID NO: 21371 - DNA, 88 bp, Glycine max
atgacaacacgacgggaggggaaagtaactgggcctaaatcagggcgacgtggagggggtaattataaaatgcaggtgtgcatatgga

SEQ ID NO: 21372 - DNA, 144 bp, Glycine max
gtttcttacttggactgagagcaagaaaatcgggttggttacgccgcatccaccagcatctgataaaaggtcactgatgacatgtgactgctggccatcatggtgttgctgttgctgaggtggttcacggacgctcacgtcaaa

SEQ ID NO: 21373 - DNA, 404 bp, Glycine max
  modified_base (27)..(27): a, c, g, t, unknown, or other
gatttttaagaagagaaagtggcatcncttaggtgcagatttttatacagacacaggctgtaaaaaattccgaccccagcccttcactcttctctctgcagcggacgagcacttttgatctagtacctgctatccctatgtataagcatggcaagtatttttaaacgttgtgacatccattcttgttaggagttgttataaagctattcatccctgctcaatattctacaccccaagacagagaaggacaatagagatcaactaactatcccaacttgccaatataaactgtgaagagtttctataaatgcacgacttctagcatactgttgtttgattaaccaagttcttccatattggttgaggaagcctcgagtcaatatttagtttttgctaccatctgt

SEQ ID NO: 21374 - DNA, 364 bp, Glycine max
agagaacaccacagaggggctggcactttgtcactgcaaagggaccccgaggtcggggaggaatggatggccacaaggaacctatgttactgactatgccaggtgcgaacacgactgaacgtgcaccaaccacaccatcacgaagaatctgtacatgatatgccacaaggacatcaagctagctctgaaccccctgaatgcagctaggctcagcaacatactaatcatctacggctaaagcacaaagtctgatctgcccaaaagagcgctaccaaatataatcaaactctagctcctgcctatgacctgaaaggaccaagtgtacatgtacttcagagatactactggggatatacttaatccc

SEQ ID NO: 21375 - DNA, 430 bp, Glycine max
gaatgcaaggaagagaaagaaatttgtttctctctggagagtctccgctgaactttttggtttcttgaagatgtcgttactctccgatcttatcaaccttaacctctccgacatcaccgataaggtgatcgccgagtacatatgggttggtggatctggcatggatatgaggagcaaagcaaggactctctcgggactggttaatgacccttccaagcttcccaagtggaactatgatggttccagcactggtcaagctcctggacaagatagtgaagtgatcttatatccacaagcaatttttcgggatccattcaggaggggtaacaatatcctggttatgtgtgatgcttacactcctgctggggaacccattcctaccaacaagagaaataaagctgcaaagatattcagtaatccggatgttgct

SEQ ID NO: 21376 - DNA, 381 bp, Glycine max
  modified_base (323)..(323): a, c, g, t, unknown, or other
  modified_base (354)..(354): a, c, g, t, unknown, or other
  modified_base (373)..(373): a, c, g, t, unknown, or other
ggactacaaatcagttttctacttgaatcttcgtggtccttcttttattctccttgagctcgaatattcactatggcagatgaggtggttctgctagatttctggccaagtccatttgggatgagggtcaggattgcacttgctgaaaagggtatcaaatatgagtccaaagaagaggacttgcagaacaagagccctttgctcctcaaaatgaacccggttcacaagaaaatcccggttctcatccacaatggcaaacccatttgtgaatctctcgttgctgttcagtacattgaggaggtctggaatgacagaaatccctngttgccttctgacccttaccagagagctcangctagattctgggctgacntttgtgac

SEQ ID NO: 21377 - DNA, 421 bp, Glycine max
gattcagcgcctcctcgtcttcaatcctttcgttgttctcttattcatccttctctgctgaataatccagatctctttctgcccttttctccgtcacgcttttcgtgaccggatctgtatggatttgatccagatctacacgccgatggtggttttggccgggtctttcatagatctggtgcgtagaggctcagatctacggtaccgaggtacaacagagaatcgatgacaggaacgcagatccgacggtagatccagccgattccgcttgttcgatcgctacagacccctgtatcggatcattaagcagcgtgtctcgcgcgttctacacgtgttgccgatctcggatgttgtaaaattagtttatgatgtgaagctatggagtggaaaatatgtggatgtaggagatttcgggatgaat

SEQ ID NO: 21378 - DNA, 361 bp, Glycine max
gattttgaaatggaaggagagaaagaaaatccgggtggttacgccgctttggtgaactccttctgcgaaatcacttcctcttccaaggaagaagctcttttctttttggagagccacaatttcgacctagacgctgccgtttcgactttcctcgacaacgccaacaaccccctcatccctctcaacgacgaccttgccattcccaaccccaacgccgtttcccctccctcagattctcactctccggacttcaacccttctcgctcgccgtctccgtctactttgcccacccgcaccccctacgagctccgatcccgtaggtctctcggcaagaaacccttcaccagtcgccaaggcaaaa

SEQ ID NO: 21379 - DNA, 327 bp, Glycine max
atggcactgagatgggccctttaccatttaattcaatcttggactttgtgagcgaaatttatcaggtcagtttgaccaaattttttttttttgatcagcaaagataaaatatattaataaaagtaccagaggtactaaggttacaaggaaacataagccaacagtcaactggttcccaaatcagactatagtcagtctctataggaaccagaaactggatacaatacagaatgtaatttctactagtgaatctatctgtactaccccctctactaaatgaaggctgatggtaggtttgacgaccaatgattgaaggggatcgtgaaa

SEQ ID NO: 21380 - DNA, 255 bp, Glycine max
ggggggtttttacagcttactgaacatatcaaacagcggaccatttaggatgaacttgcgccgatataattaagatagcaaagcgaaactagaggggcatgctgaaacataacaaatccaggggccgtgagccacaatgagattctcgagatgtacacggattacatagatccaagctacaagtgtactaactacaatcttgaagagcaagccaaggcaataattgctccacgcatcaacaatgagatggattca

SEQ ID NO: 21381 - DNA, 412 bp, Glycine max
tttctgacggcgaaagagcgtattagaggctgagttgccaacactcctcaattctcggtaatcatatgacaactaagacccattttattttgcataaatcatatttctgcatttcaaaatttagtcatataaacaatgaaatgataaaatccaaagaataagccatctgcggacgcttgggcaaaaaagcttaagagctcttcttttttggatcaacattctaatacctcttttgattgatcatcctgattgaccactgcgatgccaatcttgttgatcacgtcggattatcagttttcaggatactcctgcaagttacaaggcctaaaacagtaatgttggggaacatacctgcgacaaccacatattgaaatattcatcattatcatgaagctacaagaatacctggttt

SEQ ID NO: 21382 - DNA, 169 bp, Glycine max
ccttaagatggggttactacaacctgatcaacgccgcagcaaggcggcagctcttctaaaacgtcgaggagtaaatgttaaaggcttgttgaaagctgctccagagcgggaagaaccccaaccccacatagattgcacaggacatctgcaggtttggcatgtgaatgga

SEQ ID NO: 21383 - DNA, 310 bp, Glycine max
gggacctcttaggggttcagcaaacaccacatagaggggggtcttacactaacacacagcccatgacacaagttatgctcaacaactcatgagagctgaccactgcacgccggtcagacaaaaacttttctccatcgtcatcctaaatgaaatcacaggaatacattaaccgcatttgctaaaccaacaagaggacatggctcatcacaccactgaaccggaaatgaccaatctcaccatattggtactctcaacaacaatcgatcgtaaaagcacttccactaccactattgaatctatatactctacc

SEQ ID NO: 21384 - DNA, 411 bp, Glycine max
tgttgtttgatcgcggaatttctttgtttctgggtttccggaatatgagtagtgcggcttgttttaatggatcctattgaaagtacagaacataaaatggatctgtcatcttgatagagatggttttatcccgtcagatatttattctagtatctggagcacggaatatagaaaatggattctaaaaatattagaactatgattcatactaaatatttagacctcgcaaccggacttaaaaaacttttcaaagagttttaaaaataaattgaataattttcattcttttaagtttccggagcttatctttattttgatcaaaggacaaacgtttcctttaatttttttcattatatctattcattgaataagggatgatccaacagttcttactcagggaaatttttggac

SEQ ID NO: 21385 - DNA, 326 bp, Glycine max
gagttccacctagtagcaacaatgtcgaagcgaggtcgcggaggatcggcagggaacaagttccgcatgtcactgggtctgccggtggcggcgacggtgaactgcgccgacaacaccggcgcgaagaatctctacatcatatcagtgaaggggatcaagggaaggctgaaccggttgccgtcagcttgcgtgggtgacatggttatggccaccgtcaagaagggaaagcctgatctccgtaaaaaggtgctccccgccatcatcgtccgtcagcgcaagccgtggcgccgaaaggacggtgtttacatgtacttcgaagataatgc

SEQ ID NO: 21386 - DNA, 439 bp, Glycine max
tgtaagaagaaacttctctcaaaatccctttcttgtgtcgattagggtactttcacaccagagtcgttcgagtacttcaccttctttctctctaagcgcaaaacctcgtactgtttttggcggttaaggatgtcggggaaaggagcgaaggggttgatcacaggcaaaacctccgccgccaacaaagacaaggacaagaagaaacccatctcgcgttcttctcgtgccggccttcagttcccagttggtcgtatccaccggcttttgaagtcaaggacaaccgctaatggtagagttggggccacagctgctgtctactctgctgctatcttggagtatctcactgctgaagtattggagctggcagggaatgctagcaaggatctcaaggtcaaacgtattactccccggcatttacaactagcaatccgcggggatg

SEQ ID NO: 21387 - DNA, 381 bp, Glycine max
gagagagaagagggtcagagtgagaaagagagagagagagagagaaactgagagaaattcgcaaaccctaatttcggaaagatcggcgatggctgcctccaaggatcgcgagaacttcgtctacatcgccaagctcgccgaacaggccgagcgatacgaagagatggtggaatcaatgaaggacgttgcgaatctcgacgttgaactgactgtggaggagcggaatttactttctgttgggtacaagaatgtgattggtgctcggagagcatcgtggagggtcctgtcttccattgagcaaaaggaagaaacataaggggacgagttgaatgcgaaagcgattaaggagtacaggcagaaggttgaattggagctttcaaa

SEQ ID NO: 21388 - DNA, 417 bp, Glycine max
gagagttcattccatacacagaaagaagaacaacgctaagaaagcagaatagggaaaaatacatcgatagaggaaaattaattgaagggtgctactactacgaccttctatatcattaatgattgaaattcgtgttggaattgtcttgtaggtgtagtagtgataataagagaggatcatatatatattagtagtgctagaaattaattgaagtgtgtaatagaatagagtgtgatagagagagatatggggagaggaagggtgcagttgaagaggatcgagaacaagatcaataggcaagtgacgttttcaaagagaaggtctggtttgctcaagaaagcacatgagatctttgtgctttgtgatgctgaaatggcccttatagtctttttcaccaaaggcaaactttttgagtac

SEQ ID NO: 21389 - DNA, 119 bp, Glycine max
gatttaaatgagaatactagaaaatgtcgaatggactgcagaatttgcagatatactggttaagtccaaagaggccattgatattcctagtgaggagcagcaaagttctgaacaagctt

SEQ ID NO: 21390 - DNA, 395 bp, Glycine max
ggttctggagaataacggaggagttacgatcggacggtcctccttcgcttactgcgtcgcgatctgcgatcgtgattttccggaggatgattccgactccagctccgactcctccatcggaaggaacagcatctcgtcggaagattcctccgaccgggaagacgccgtcgaagttgaggttcagagttccttcaaaggccctttggataccatcaatgatctagaggaagatttacccgtcaagaaaggcatatctaagttctatagcggcaaatccaagtccttcacaagcttagcagatgctgcagctgcaagttctatggaagagatagtgaagccagaggatccttatgctaagaaacgcaagaacttaatagctcgtaactcctcaattg

SEQ ID NO: 21391 - DNA, 382 bp, Glycine max
tatgggtccactaataaagtttttcctgaaatgggaacacctcaaaacatccgtgttaaactcaatgttgttaatttgatgcagcaatcaaaatagttgacagtggtcttcccgtaatattagctcaaagatttcgattcacagccctaaatttaaaaatttagaagcaagggcttacaacattgatcatttggtatgaatggattttaaggaataacttcactcatgactaaggcctatcaaaaaagttcagcacaagttcaaaattaacagcacaaaagtagaattgtagttacgatataccccttaaagtattatctactcctttctcctatttgaagcaatattttcattgaaactaatggccccttgacaaatcttt

SEQ ID NO: 21392 - DNA, 406 bp, Glycine max
atgatttcaaaagctgccaaatggttatggtcgtggcagatcgaggaatagcagctatttctaacagtgattgtatacctataattgttaatatttaataaattatgataattaaaaccaaggcaatataataaaataaaattagaagtacacataaagttgaaccaattgagtttaaattctaaccattagccactagctcatggataagttgttgtaatagttaattccttcttgatttatacctccacttagctttccttcggtaaatatatagtttattaaaaaaaatagttaatgggaaattaacatccaactaggcaaaatttagttcaaattagacattgctttgtttgcaattaacttacttgggagaatccttgaccaataaatggaaaatctatat

SEQ ID NO: 21393 - DNA, 333 bp, Glycine max
  modified_base (309)..(309): a, c, g, t, unknown, or other
gaagcatagcagcatcatacaaagcattgaattcaaaaacttaagttcattccttgtgttttgctttcttcctcaaaaccaaacatgtcgaacacatgcggcaactgcgactgcgctgacaagactagctgcaccaagggaaacagctatggtgttattgtagagactgagaagagttacatcgagactgttgtcatggatgttccagcagctgagcatgatgggaagtgcaagtgtggcactaactgcacttgcacggactgcacctgtggccattaaggaatatgtatgaaaatgtaattgccatgntgttggcaatacaaatattcaaat

SEQ ID NO: 21394 - DNA, 358 bp, Glycine max
gatatcagggagggagtgtgtgtgtacgcccagcgcttttaaacacaacaccctaccctctgcttcgttcccatgtcgtagtcgccgtgcaagtgaaaatgttgcactgcctttgggtggtggacttctgaataggccggggttgtttccctgtctatgtattgtcacgagattgagagatctgctgtgattaggttttgatttcaactcactgatggagtgcaacaaggatgaggctataagggcttggcagattgctgaaaataagatgcaagctggtgactttgaaagggggctgaaatttgctacgaaagcccaaaggctgtttcctgagaatcagaacattcttcaaatcctt

SEQ ID NO: 21395 - DNA, 341 bp, Glycine max
gcgtgtctaactcacttgcctcagcttgatagagtatggtcacaagagtgaagtgcaatgggaaaaaaggtacactgtgctggcttcgcaacttgcttgttgtttagtgcccatgaccaactcctcaaacgggcacatggtactatgcaaaatccatggattacaccatgtgacaacctacaaaaatggcctatctatagggatgggatggacataaaatggcccatctattggcagctttcttgagtccaagtaatgtgctgaaacttaggagtttggatggcttgtgactcatgttttataattctatctttaggaaaagtgaatgttttattgatttg

SEQ ID NO: 21396 - DNA, 299 bp, Glycine max
gaagcagggcaccatcatacaaagcatggaatccaaaaacttacgtccacgtcaactgaacagactcattccgaaaccaaacatgggaacacacgcagaacagcgactgcgcgacagactgctgaccaaggaacagcatgggtattgaagacgagagagtacatcaaaccggtgcatggagttccagcgctgacatgagggaagtgcaagtgtggcactaactgcacttgcacggactgcacctgtggccattaaggaatatgtatgaaaatgtaaatgccatgtgtttggcaatacaa

SEQ ID NO: 21397 - DNA, 325 bp, Glycine max
gtctacagggagggagtgtgtgtgtacgcccgagcctttcaaacacaacaccctaccctctgcttcgttcccatgtcgtagtcgccgtgcaagtgaaaatgttgcactgcctttgggtggtggacttctgaataggcaggagttgtttccctgtctatgtattgtcacgagattgagagatctgctgtgattaggttttgatttcaactcactgatggagtgcaacaaggatgaggctataagggctaggcagattgctgaaaataagatgcaagctggtgactttgaaggggggctgaaatttgctacgaaagcccaaaggctg

SEQ ID NO: 21398 - DNA, 304 bp, Glycine max
  modified_base (26)..(26): a, c, g, t, unknown, or other
ttaaaaaaaccacaggcccccaaaancctgaaaccaatccaccgccgccggaaccttcaatcccatccgcaccggccgccgtggaagaaacggcagctcctgttacggcaacaacgtctcaaccaagcgctgaaatcgtcgtccctcttgcgttagctccgaagcgacagcgccgtccaagcgttcgtctaggggagatcggcgaccaacgtgccttcgcacacggccactaattgcacatgcgacgcccgagcatgcctccatggagctggcttactcctaaagaatcttcaaaaacctcaaa

SEQ ID NO: 21399 - DNA, 324 bp, Glycine max
cgataagacgacacaagggggtggaatttctggttcttctccttccaccatcgcgatgggggctttcggattttcattttatcctcagttcttgcaccctcgtcacctgcaatagattctttcttgcaatcgatcattgaagaacacaacatttcaattcctctctcgatttgttttgcaagttcgataatcgaaagtgcctggtgattacatgttgtgtttacatatgagttgtttgtgaaaatgagaacgcatgggcactatggggatacatctgacaacacttgtgttgggggtagccagatgcatcatatggctggtcaa

SEQ ID NO: 21400 - DNA, 55 bp, Glycine max
  modified_base (11)..(11): a, c, g, t, unknown, or other
  modified_base (44)..(44): a, c, g, t, unknown, or other
  modified_base (47)..(47): a, c, g, t, unknown, or other
  modified_base (51)..(51): a, c, g, t, unknown, or other
  modified_base (54)..(54): a, c, g, t, unknown, or other
taccgctagtnagaattcatacagaagggtgggcgccccaaaanacnacanaang

SEQ ID NO: 21401 - DNA, 454 bp, Glycine max
accactcctccagaatattacagaagggattgttacaagaagcatggttatcctcttgagcataaataccataagtctcaaagctcaaacatcaataaaatgaatatgttgaaagactgaaatgaagttgactccttaacaatataaggctctaatggccctactacagcaacaaggctcaagtcacaacaattcacatgtgaatcaaattagtacaataactggttccaacaatgcacacaaaggtaatgccttatccattacttgtattgtaagcaagacaggttctgatgaatggatcattgactcatgagccactgatcatgttataacttttccctaatttgttttcttcttgttagaaagaataaattccataatattgtaaaacttttccaattggtccacacaattcacttataactttattcctttctcaattcaatttttcttt

SEQ ID NO: 21402 - DNA, 413 bp, Glycine max
ggtgttagttcatcctctctcactcctttttttctccttttctaatcctttcacttcactcatcttttttcccccttttccctattttcatcttcttttgcatttttctccgactccgtttcatgcattttcccgctgcttaaggaccatcctccaataccacgccgcttcttcttcctagggtttctctgaaccaattcctatggccatcagaggcgtcgatttcaagtggtacgatggctttttcttgttcatgctcgccaccagtgtgtatcctttctcaattcagcttctgaattttcctaattttgctgccattctacattttcacttgcctcatcattccttccttctctagccactttctaatttaatcttaatctggtctgtgagaaacattgaaaaaataaata

SEQ ID NO: 21403 - DNA, 303 bp, Glycine max
ggttttacactaaagatggatctcattcagagggggaaggttagaaccgctgtggtgtccgctctacaacatgcttgcaccgatgatatctcaacaaacgtcgccaccggctataggctagcttgagctgcacatacacaagcagctaacatcactctcaatcacgaactctttgaatgacattacttctatccctctcgaagatatgatgtttattcaatatcatccaccaagtatgtactatgcacattgcctaagatgcaaaaactttcaaaagaagtacgtgtagccattccaaatagc

SEQ ID NO: 21404 - DNA, 283 bp, Glycine max
ggtgttagttcatcctctctcactcctttttttctccttttctaatcctttcacttcactcatcttttttcccccttttccctattttcatcttcttttgcatttttctccgactccgtttcatgcattttcccgctgcttaaggaccatcctccaataccacgccgcttcttcttcctagggtttctctgaaccaattcctatggccatcagaggcgtcgatttcaagtggtacgatggctttttcttgttcatgctcgccaccagtgtgtattctttctca

SEQ ID NO: 21405 - DNA, 427 bp, Glycine max
tctataagggagtgaagaaaaagcgcatactaggtttgttataaatgcgatttgagtgtcataaaaaggaaaagaggagaggcggggcggagcagaaacgaatggcagatcagagcgagcattcgaaaacggcgttgcctccggaggaccaggaccgtcccgttcgggtatacgcggatggcatctacgatctcttccactttggccacgcccgctcccttgagcaagccaagaaatcgtttccgaatacatacttgcttgttgggtgttgcaacgatcaagtcacccacaaatacaaaggcaaaactgttatgacagaggccgaacgatacgaatccctgcgccactgcaaatgggtggatgaagttattcctgatgccccctgtgttatcaatcaagagtttcttgacaagcacaacattgacta

SEQ ID NO: 21406 - DNA, 395 bp, Glycine max
ggacacatattccctttggcctgggttgcacttcccaaattagataatctaaagcaaacactgaaatcattccgtatgatatagcttctctctaaatctgagttcttaacttcctcagatttgatcccatcccagtcattctttgaatcccctatcagtgtcaatttctacaaactttataaggaagctggatcatgctatctagtttgaaatttggaggttgctagttaaagtgttcttttggatggtaaatttggtgcttcatgtctggtgaaacaggatctgagttgtgatcagttttagtccataagtaggttttcaccaaaaaagaaaagtccataagtaggcagtgaaaggtatattttggatttgcattattttaaactgataaatga

SEQ ID NO: 21407 - DNA, 308 bp, Glycine max
tctctctttcgagggttctttcgtggggaacgctcgagattttaccacccgggtcttattcatccgtgcccatgtccaatgttctcggcttttccggagttgacgatttttgccctatgggatcaatatacgccaaccccaaggaagcaagtttcttcttgtcccttggccctcaagttgatgtatactttcctcctccgaagagatcgcgtgttaatgctccattcgtttttgatggagaatggttctagcaaaagcagataacctctattgaagccttgtcagatgagtgtctttttgacatcttt

SEQ ID NO: 21408 - DNA, 304 bp, Glycine max
gagtggtggatatgatttatgtttccactaccacccgacttgtgatgttcaaatgggatgatgtttgcggattgatgatagagagactgatctcgcttatgctataaaatgagataatgaaggatcactggagaaatcgggggagggtgagtgctatctgactgaaccagatatggggtgataagccattgaataggaactgccggccatcagagaacagctatgtggacagatgcagtggatacagctttagtgacctatacaccacgagcaatcaacactatggtgatctccattgacaatt

SEQ ID NO: 21409 - DNA, 292 bp, Glycine max
tttttgtgtggtcgggctattatatatatatctatctatattctatatatagatatatcggttaggttatcaagtattaatctgaaataaataagaatggctgcttctaatacttataataattactacaaattctaataattactacaaaagggatatatgttagataaaatagattaattaatctatttcacaaaaaaataatgtatccatagcacagtttcgtcttataatacctcgggtgctaatgaaactattttagtgaaatttaactgtctcaattccccggcga

SEQ ID NO: 21410 - DNA, 92 bp, Glycine max
ctggtggcccaattccatacatggtagactcaagaggaactcctgttgtgcctcaggttgagggatcttcctcaactgtcctgtcatcttat

SEQ ID NO: 21411 - DNA, 356 bp, Glycine max
gaacagaagaataatcaaatttctcagatctatccgacgtcgtcgcagatccaccaaccgttatggctgccttcagcggtgatgaaacggctccgtttttcggcttccttggagccgcagctgccctcgtcttctcctgtatgggagctgcctatggcacagcaaagagtggtgtgggcgtggcttccatgggtgtgatgagacctgagctggtgatgaagtctattgtccctgttgtcatggctggagttttgggtatttatggccttattattgctgttattatcagtaccggtattaatccaaaggccaaatcttattacctctttgatggttatgcacatctctcctctggt

SEQ ID NO: 21412 - DNA, 425 bp, Glycine max
  modified_base (407)..(407): a, c, g, t, unknown, or other
gacatttgcaactgaaaaggggacagatgattatatgcaatgatattaccaatgggattacattaagttatagtttttggcaagtaaatatagaagttaaatcagttaatatggtccatattccttaaaacaacaaaaaagaacatatattttgacgtactggttggatgagtttgcaatggtttggcttaaaatatggtttgtctatctgaggtgtctttattaataatggagggtaggtcactgttaaagatgtaaaccattggttgcatgtgtctgtatatgcaagtatgtctatatatttactatatttttgtacagattatactaacaaattagttgtctgaacatccaacattttcttttcatgcagctatgggacttggataatattctacaaggctcangaaacacacaaagtaatg

SEQ ID NO: 21413 - DNA, 366 bp, Glycine max
gaagcagccatccacatttatactaagatttcatatcatggcttggggatcaagttcctcttcctcttcctcttcctccaattacgatgtgttcctcagcttcagaggtgaagacacacgtcatgcttttactggccatctctacaaagctcttcatgacaagggaatccacactttcattgatgatgagaagcttcaaagaggggagcaaataacacgagcacttatggaggcaattcaagattccagagttgccatcactgtgctttctcaaaactatgcttcttcctcgttttgtttagatgaacttgcaaccatccttcactgtcaccagaggaaacggttgctggttataccggtctttta

SEQ ID NO: 21414 - DNA, 335 bp, Glycine max
gttcttgaatgcggggagggactaatccaaagggctgaactctctcgtggtaacacactaacaccatgggcacaacagaccagagcccgtcggatactgcagatgcttgcactaactggagctggcatgtgatacgctgggtgcttacgcttctgtgcaccctcaggtgacgacactgctggaattataacgctagatccgagattgtactactacatgcatcgggggtgaataacattcatttgcgaaggaagtgtaggtgattaattatgggtcatgagtaggctaaaaaactgtgattggaaaactctattatgctgtaagcgcatggtctg

SEQ ID NO: 21415 - DNA, 347 bp, Glycine max
gatcctaaatttttttaattggtttttcattggccactggttcgttctttttttttccgccacacctaactgcagggcacctggatttgacttttcccccccttttattttctgttgctaattctcagctcttctccacacggttcatgctttccttccttcgcctttcgtgacgtgcaatccatgttgttcacctttcttctaggttcttcattatgagagtgaagaagggagtgacgtcgtgctgatgtgtatagcttgaaacttattcaataaagcagttgataaaaatgacttttgggccattggattggtatagtcgcccaattgcaaatggagtatggaca

SEQ ID NO: 21416 - DNA, 390 bp, Glycine max
ggacttagtttcatacactccctcctgtttgattgcgaaaatgtggaagagaaggggatttgaagaagaagcagttcaattgataaactcagatttcagagacctaagtctagctggcataggctttggagcctctttcttcggattctttgctgccattgctgctatttatctgttgattttggatcgtacaaactggaagacaaatattctcacagcactactcattccatacattttcttcagcttgccttcattaattttcgacgtcttcaggggagagcttggaaaatggattgctgcagttgctgttgtattacgacttttcattcctagacacttccctgattggctggaattgccaagtgctttgattcttcttatcgtcgt

SEQ ID NO: 21417 - DNA, 412 bp, Glycine max
tcttgttggttacgattttggtctgatggtgggtgggaattgggcccattttttgctataatagatttttatgccaaaaacacattttttgaatttttaaaggatttagcttacttttaaaaaaaagaagtaaattggtcattttttaattatactggactaggtcaaaatagacttttacactaaaaacacattttttttaatgtctttaaggattttgcttacttttttttttaaaaaaaaaatgaccacaaaagaagacaatggccattttctaattgtcgtggcccaaaggctaaaattttatgtataataataacaataatcataatacttatcaattttaacataaatattatattgaaggaacaaacattaaaacttaatgagaaatacatttattaagagacta

SEQ ID NO: 21418 - DNA, 380 bp, Glycine max
gatattgatccttacactgggtaccaaatattgcaaagcaattcatgccatgataatagcagcagccagggaaccactatttcttttgaaaccagcaaggagcaatactttacccttgaatcatccccagcaatcaatgatctcataggttgtgattctccttcctatgctagtgtatcatccaataggagtcctttttctccacaagcttctcattcagaccagcatcagtcatcagacaacacctatggatcaccaacaagtgcacactctagatatgatgatgacggctacgaattgaagaacaagcttagagaactcgaaatttcgttgttggggcctgattcaaacattgttgatagttggcactgctcctacaa

SEQ ID NO: 21419 - DNA, 355 bp, Glycine max
gacctcacccagttgcagaaagaaaagaccatcaaagtttcacttcagccttatccggtttagggtttcggtttttgacccaacctttgacgtatcgaaaccttaagtttcggatcaggtctgagcaatctggttggtagaacctttggtcttagagagtcaagttttatgtctgaattagacgatcaaattcctactgccttcgatccttttgctgatgcaaatgctgatgactcgggtgctgggtcaaaggagtatgtgcatattcgcgtacagcagcgaaatggaaggaaaagcctgacaaccgttcagggattgaaaaaagaattcagctataacaagatacttaaagatg

SEQ ID NO: 21420 - DNA, 311 bp, Glycine max
gacgacagaaggggtcgagaagaaagaccccaccgtagccaaggtcaccaaggtcgctgtcaagaagaagtgattgcatttgggcaattgtgcttgcacatgtgatcatgatcgggggtactcctttatagtagttgtatccttgcagagtcttaagtgttttggttaagttatatttttaagtatctgccgattttatgtagccgggactttgaaaactagggtcttgatcggcggcggtcaattatcattgctgtttgtttttgatgaatactgttttttgttctgatcgtacgaacagtctgacatat

SEQ ID NO: 21421 - DNA, 402 bp, Glycine max
caaaagccacaggtggataatacctctacccaggctgatggcaaagacgaacctgttaggagcaatggagggcatggccaactgcatgtatacccttcactactgccaactgccattcctgagaaattgaatgaggatccttctgataaattaaggaaaggccatgggattgtgggaaattccgaaaatagaaataatggctcgatcaggacatctgatgggcagagtaatagtgggcatagttatcagaagcaatcagatagtgaagagaattcagggaaatcttctggacagacctggagacaccctaatgtaaatagttcttccgattgcttggttaccatgtcagctcatgtttctggtacaaaaacatcaccgcataagcttggatttgatttgcat

SEQ ID NO: 21422 - DNA, 364 bp, Glycine max
tatatctagaataaaaagtaacagatttcaatttttttagaaataaaaaaattattcaaaatttttatatttgtaaaaatgaaaaacatattttaacaaaaaaaaacagtaacaattaggttattttttatactaaaatcacattttttttaatcttaaacaaaatagtccttatactagcatatttaattatactcagttcaaatgtaatcattttttactttaataaatggctttgttttatattattaaatatgtgtcacaacatatatattagaaaaattgtatgatatgcctttttttttactttgttaataaatgcctttgttttgagtattctttgtcaatttttaggctcttaacc

SEQ ID NO: 21423 - DNA, 419 bp, Glycine max
ggttctagtgtgtgattgtttgttgttgtaactcgttcttcttcttttgttgttctgtgtttgtgtttgttttttctctcacctgaaaatgtcttgctgcggtggtaactgtggttgcggaagctcctgcaagtgcggcaacggctgcggaggctgcaagatgtacccagacttgagctacactgagtcaaccaccaccgagaccttggtcatgggagtggcacctgttaaggctcaatttgagggtgctgaaatgggtgtgcccgctgagaacgatggctgcaaatgtggaccaaactgctcctgcaacccctgcacttgcaagtgaggtgttgggagagcaagcttcaagcagagatagcccttaattaggaataatgataaactattaatgtgtagctaaaaacttatgtattatg

SEQ ID NO: 21424 - DNA, 396 bp, Glycine max
  modified_base (352)..(352): a, c, g, t, unknown, or other
  modified_base (383)..(383): a, c, g, t, unknown, or other
gacaaccaaaatcattgacatcctaaagcattcgtagttcaaaaattccatcttcaatttacaagtctttttggacactctgtccctaatttcaacacatacaacaatgggttttcgtttgcctggtatcagaaaggcatcattttctgcaaaccaagcatcttcgaaagccgtggatgtggaaaagggctaccttgcagtctatgtcggagagaaaatgaggcggtttgtgatccccgtatcttacttgaacaaaccctcattccaggacttgttaagtcaggctgaggaagagtttggatatcatcatcccaacggtggcctcacaattccttgcagtgaagatgtcttncaacataataacttctttcttgaattaatanatggcaatttttt

SEQ ID NO: 21425 - DNA, 381 bp, Glycine max
  modified_base (144)..(144): a, c, g, t, unknown, or other
gggcccctaacaatcctatcggtaatttccttggctgcctcaaatgtcattggactagatttttctgtgtgggtcatcttccacttcacatgtcgtctaatggaagatggacgatcaataattgtgtcagtgctcttggattgngttgtttcctctaattgtttctttttcttgtcatccataaacttttattctagaaaagcataacctccacgagacaacacgtgagggacaatgttttgtttcttaatggcctgcgccatctttcaaacatcttgtaatagttacagattaagataacttaatatgtttgacaataatgcgtaaatatgaagtttataaacaatcaaaatcaactaaccctcccatgaaggatctcta

SEQ ID NO: 21426 - DNA, 360 bp, Glycine max
tggtgagagagcgagcgagcgagcagtttcaaagagaggatttgggattgggaaggcgagggattgcgctgcgtctcttcctcttctctttcgattcatccctcattcataatcttccaatccaacaacctcagcctcacactcacacatacacacatctgaacgcgtatcgtccctcccatggcttcaaagcgcatcctcaaggagctcaaggacttgcagaaagacccaccaacttcttgcagcgctggtccagtagctgaggacatgttccattggcaagcaacgattatgggtcctgctgatagtccttatgctggaggtgtattcctagtcacttattcactttcctccggatta

SEQ ID NO: 21427 - DNA, 393 bp, Glycine max
  modified_base (337)..(337): a, c, g, t, unknown, or other
gtttaaggttgaaaaccaagaaggggtggcaaatttggaggaaatccttgcaaattcagatgcatttatggtggcacgtggtgaccttggaatggaaattccaatagagaagatatttctcgcacagaaagtgatgatttacaagtgcaacatccaaggaaaaccagttgtcactgcaacccagatgttggagtcaatgatcaaatctcccaggccaaccagggccgaagctactgatgttgccaatgcagttctggatggcacagactgtgtgatgcttagtggtgaaaccgctgctggagcctatccagaccttgctgttcaaacaatggctaanatatgcattgaagcagagagcactcttgactatggtgatgtgttcaaaaagattat

SEQ ID NO: 21428 - DNA, 426 bp, Glycine max
ttgtttccttttcaattggtgtatgaaaaaggatggcatttaccagttgaaatggaacacaaggcatattgggctctgaaatttctgaactttgatgagaaggcatccagggagcatagaaagatccaattgttggagctaaaagaaatgcgattaacagcttatgaatcctcacgactttaaaaagagaaagtcaagacatatcatgataagaaattgttgaagaaagaattcaaactgggacaagaggtactactttttaattcaagattgaaattatttcctggtaagctgaagtccaaatggtctggaccctttgttatcaagaaagttcgatcttatggtgcaatagagctatatgacccataaatctaaacttcaaatagaacatgggttgtaaatggccagaggttaaaactgtaccat

SEQ ID NO: 21429 - DNA, 271 bp, Glycine max
ggtgggtggaactggaagaacctttgataatcctttggttggttcatcgaccactctgtctgtatagatctgtgcaaatctccgaacatttccgctccaattatcatttcactgaacagaaccaaaccctaaccctgtctttctgtatgacgcctgattcccccccagaggcgttgctgttgagtcgatttgtaaatgctttcggaagcttaggttagaattttttgagacgatctcatggttttgaatcggtgagatgaatcaccacgac

SEQ ID NO: 21430 - DNA, 356 bp, Glycine max
ggcacttagcaatcaatcaacacttccaattacaatatacacatcttcaattaagccatgactctctctaagcttatagttgcttcccttcttgcctcgcttctccttcttcatcttgttgatgctgatcaatcggcacatgtacaaacgcaggggtctcttctgcagaagatagattgtaatggagcatgtgctgcgaggtgtcgtttatcatctcggccacgtctctgcaaaagagcctgtggaacttgttgtagacgctgcaactgcctgccacctggcactgctggaaaccaagaagtgtgtccctgctatgctagtttgactactcatggtggcaaacgcaagtgccctta

SEQ ID NO: 21431 - DNA, 411 bp, Glycine max
  modified_base (313)..(313): a, c, g, t, unknown, or other
  modified_base (341)..(341): a, c, g, t, unknown, or other
  modified_base (372)..(372): a, c, g, t, unknown, or other
gacacaaagacaaggagacaaaacaaactaaacgtgaatcccattggtttctctcttctcagcctcgcttctctagcacttgtctcgattgtcatagcccaagaaagagcccctcacgggcttgtttacgagaacccagaagccttttcaccatcagcatataacttctttcaccccaatgaacgaaagcccgagacaaaagacccttgtgctgcatcaaaacgctcaccaatgcctttagcagcacaagtggaagctactgaaattcatgaaagcaaggcctcaacccctcaaggaagtaagaaacaattgngagctggtagcgtagctggcattatctntggtgttgcttttgttgtgcttttagcattnggggtctaccatgtgagggtcactcgccgagccaacatg

SEQ ID NO: 21432 - DNA, 456 bp, Glycine max
acgacagaaggggaatctccaactaaatactattcttcaatttgaagcgtgtctgtagttggttgaagcactgtggtattgttctggttttggtctccgaggtttgtatcggaatccgatgtattatgcaaaagaagctgcgcatgtcgaccccattttcgtagcacatggctgccgctgataacaccaacccaaaggattattacaaagtgctggaggttgaatatgatgcaaccgatgaaaatatcaaattaaattaccgaagactcgcgttgaaatggcatcctgacaagcacggaggtgatagtgctgttactgcaaaatttcaagagattattgaagcttacaatgtattaagtgatcctgccaagcgtttggactatgatttaactgggatatgtgagattgaaaaatatagcttgcaggaatatcttgccagatttaaaagcatgattc

SEQ ID NO: 21433 - DNA, 53 bp, Glycine max
  modified_base (49)..(50): a, c, g, t, unknown, or other
gagacctcaggtcaggcggggctacccgctgagtttaagcatatcaatnngcg

SEQ ID NO: 21434 - DNA, 360 bp, Glycine max
ttatctgaattgacgaatccttacatgacttagtgatgattaccggtgaccaagctttgacagcttgccatgttgctagccaagttcatattatatcaaaaccaacattaatccttggcccgacacgaaatggtgagggatataattgggtgtcccctgatgagactgaaaacattcactacagtgagaaagaggtcgagtctttatcagaaactcatgatctctgtattgggggtgattgcattgagatgttgcaacagacatcagctcatcttcgagtcattccttatgttaaggtttttgctagagttgctcctgagcaaaaagaacttatcatgaccactttcaaaacggtgggac

SEQ ID NO: 21435 - DNA, 405 bp, Glycine max
gttccggcaggctgccacgagataccagagggagacgtgggtgaaggtgttgtattatttgagggacgaggggttgcatgccagtggggggttttcatccggggtgtccaagagtgctctcagggataggtttaagactttcaattccatgtttgaggaggttcacaggacgcaggcggtttggttgataccggattcacagctcagggaggagctgaggatatctatatcggagaagctcattcccgcgtataggtcgtttcttgggaggttcaggagctacattgagagtgggaggcatccggagaattacatcaagtactctgtggaggacctggagtattgctgtttggacttcttcgaagggattcttgtttccagcacttgaaaaagagatctgaatga

SEQ ID NO: 21436 - DNA, 428 bp, Glycine max
cactctcccactcttatggaaaccatttgctcctaaccgcaacgttcctgtgacctaaagaaaataaaataaaacaagattaatggctgtagaaatgaaccaatttgatcttttgatcaaattttatccaaatattaataaataccttatttgttatattttactaaaatatctattcttttttactaaaaatttgattaatcacactgagaatttttttatattcacaaaatttaaatccaatatttgcttaagagattcactcaaatattttttttaccctctcaatttgagacattttgtttttagtctcttaatcaaattcacaaaattttaattttggtccctcaacttcattttataagactatgcttttttttttttaagtttctgaaattcactcaagggaactaaaaacgacattatgt

SEQ ID NO: 21437 - DNA, 429 bp, Glycine max
tgtttctgcctatgatgagttagccttgacgaggcgcgttttatatcagcccgtgagcgtttctattgaaggagggggcagggaatttcaattatatgtatctggtgtattcacggggagatgtggcacagcactagatcatggtgtcgtggctgttgggtatggaacagctaaaggtcatgattattggatcgtaaggaattcatggggttctagctggtgagaggatggctacatcagattagaaagaaatcttgctaacagcagatcatgcaagtgtggaattgcaattgaaccatcttatccccttaagaatggtccaaatcccccctaatcctggaccatcacccccttcacctgtgaaacccccaaatgtctgtgacaacctactacagctgtgctgataatgctacttgttgcttgtatttt

SEQ ID NO: 21438 - DNA, 448 bp, Glycine max
  modified_base (30)..(30): a, c, g, t, unknown, or other
  modified_base (92)..(92): a, c, g, t, unknown, or other
  modified_base (135)..(135): a, c, g, t, unknown, or other
  modified_base (189)..(189): a, c, g, t, unknown, or other
  modified_base (197)..(197): a, c, g, t, unknown, or other
  modified_base (224)..(224): a, c, g, t, unknown, or other
ggtgtattgtttgttgttgtaacctcgttncttcttcttttgttgttctcgtgtttgtgtttcggttttttctctcacctcgaaaatgtctntgctgcggtggtaacctcgtggttgcggaagcctcctgcaagntgcggcaaccggctgcggaggctgcaagaatgtaccccagaccttgagctacanctgagtcnaaccaccaccgagaaccttggtcatgnggaagtggcacctgttaagcgcttcaatttgagggtgcctgaaatgggtgtgcccgctgagaacgatggctgcaaatgtggaccaaactgctcctgcaacccctgcacttgcaagtgaggtgttgggagagcaagcttcaagcagagatagcccttaattaagaataatgataaactattaatgtgtagcttaaaacttatgtattatgtctgggatgggtttc

SEQ ID NO: 21439 - DNA, 439 bp, Glycine max
agaaggggagggtgaccagtgaacacaatacagggcagcatcgccatgggattgagtattctgagaagcacttccatttccactcctatctcttcctccaaatccaaacccattttctcaactcttgttcgttcatctttcgcctccatttcccccacaaagtgtgttactcccaccactcttttcgtttctgccacccccttcttcaccgcctcacccaagcgcggctttcgtggtgggattgtggccatggccgccgctggctcgctccgcaaatcagaggaagagtggcgcgcagttctctcccctgaacagtttcgtattctcaggcaaaagggcaccgagttccctggaacaggagagtatgacaagttctttgatgagggagtttacaactgtgctggttgtgggacacctctctacacgtccttaacaaaat

SEQ ID NO: 21440 - DNA, 432 bp, Glycine max
ggactcgtcgcgctttacaaattgtcaggctgcgactctgtgggaatcattaataaacatgggaaaagactcgaagccaaaggagtcaggagggaagggaaaggggaaacaggctgcaagtggaagtgatgagaatgcttctaagggaaaaggaaagggtgggaaaggtggagatgggcttggtacttgcacctatgtcaaagcaaggcatatcttatgtgagaaacaaggtaagatcaatgaagcctacaagaagctgcaggatggttggctttgcaacggagataaggtcccaccagctgagtttgcaaagatagctcaagagtattcagaatgtccttcaggaaagaagggtggagaccttggatggtttccccgaggaaagatggctgggcccatttcacggtgttgccttcaacacaccctgtggag

SEQ ID NO: 21441 - DNA, 190 bp, Glycine max
ggagtggatttattgctgatgtgcatgacacccgtggagaggtgtttgcacaatgccaacctggttcaaacttccgaacatgatgttggactagagcggggatctactaggattgccaaggactaacacgtggcgccggacttattcaacagaaaggaacttatgctgaatatgaacccaaacgaaactg

SEQ ID NO: 21442 - DNA, 412 bp, Glycine max
ggacagcgggaataacgtattaacatcaacaggcctcgctttgagaaatcagacggcggagagaatgggtttatcactcttacggtgggttctgccgctgactctgttgctcacccgcgccctaggtttccaatcggacgagcttctcctcgacgacgaagagttcggcatcgaaggaggacgaacctcctttgattccgattcgcatgcaccttccaccgcctccacctcgaggaagaggctttccgactcctcctccgattccaagatccagttccctctccaacacgctttcggcgactccgatttctccgacgccggcaacttctccgctcgcctcaagacttggagccacggcgcccagacgctgacgaagctgcggtttaagcgtgatcttttgactgacgttgag

SEQ ID NO: 21443 - DNA, 53 bp, Glycine max; identical to SEQ ID NO: 1282

SEQ ID NO: 21444 - DNA, 407 bp, Glycine max
ctcaaccctgtcttttggtaattgattacgctttctggtgatcgattaccagagtcttgcgtgtcttgaaagcacattgttttaaggcagggcttggtctttagtgaatcttgaaacaaggctttgtttgttgaagcaatcttgaattattcttgaagcaaatgcttatcatttgaagcagccttgttagattcttctttgaccttcatcaatatcatgtatacatacattcacatctcctacctgaaagcacatttgtagagattgagagatgtttgacactttgaaaaccaatagagaattcggtcatttcatgttacggaatggtggtaaaatgaaggttgaaggcatatggagtgtgaggatgaagctttacgatggtgtcatgcgaactttctcatatgtga

SEQ ID NO: 21445 - DNA, 440 bp, Glycine max
agggtatgggctcgtcagcctgtataccacaggtttgatgcacttgtgctgaccgcatgtatgctggaatactgctaaacactcgccttgcttgcccttcgtcttccatactttcaagtccttttagtgaaatcagcagcgcagttttgtgctgcttctgttgttattgccttggaagacttgcacaagaatggtgttctctacagaggtgtgtcacctgatgttttgatgttggaacaaactggacatatacagctggtggacttcagatttggaaaacagctttctggtgagagaacattcacaatttgtgggatggcagattcactggctccagagattgttttgggaaaaggccatggtttccctgctgactggtgggcgttgggagttttaatatattatatgttacgtggtgagatgcccattggatcatggag

SEQ ID NO: 21446 - DNA, 443 bp, Glycine max
ggcattgtgaaattaatagagagacataaaaaataaacatatattgagaatggagggttgtgtgaagaagttgctatgccttgttgggtttgtggtgcttgtgagtactattggtggggtggagagtgctggtgaatgtgggaaatctacaacccctgataatgaggcttataagcttgcaccatgtgcctcagcagcacaagatgagaatgctagtgtttctcagagttgctgtgctcaggtgaagaaaattgggcagaaccctagttgcctctgtgcagttcttctctctaacacagccaaaatggctggcgtcaaccctcaagttgctgtcaccatccccaagcgttgtaacctggttaatcgccctgttggttacaagtgtggaccttacactctgccttgaaagagttaaggttgttgctgaaaacaaagatgacagg

SEQ ID NO: 21447 - DNA, 363 bp, Glycine max
gggacatcccaagctgactgtgctgttcttatcattgattcgaccactggtggttttgaagctggtatttccaaggatggacagactcgtgaacatgctctgctttcattcacccttggtgtgaaacagatgatttgctgctgtaacaaaatggatgctactacacccaagtattccaaggccaggtatgatgaaattgtgaaggaagtctcttcctacttgaagaaagtaggatacaaccctgacaagattccttttgttcctatctctggttttgagggagacaacatgattgagaggtccacaaaccttgactggtacaagggtccaactctgcttgatgcacttgaccagattagtgag

SEQ ID NO: 21448 - DNA, 268 bp, Glycine max
  modified_base (235)..(235): a, c, g, t, unknown, or other
atatacctcaggtatttaagaagtcaaagatagtggaatacagtatcaaagaaaatatggtttcaccaggaaaaggagaggttagtaaatctggtatcacttaatgtagtatgtagcacttcagttttttgttctgctaaaaagttcaagtgcttgcttgcttgatctcttactggaaggtccaaattgacgaatgttgcatacagatattaattgacaataagcaatactacanattcttgggggaaggatataaatatggtatcac

SEQ ID NO: 21449 - DNA, 419 bp, Glycine max
ggttgagagcaaaacactgcaaaccccttcggcgggttgtccttacgttgttattaagaagcgtaacgcattcaccacgatggtgaccaaagcgatggaggtggtgaaggatctggacgtgaagcggtacatgggtcggtggtacgagattgcgtgcttcccgtcgaggtttcaacccagtgacggcaccaacaccagagccacctacactctccgagatgacggcaccatcaacgttcttaacgagacttggagtggcggcaaaagaaggtttcattgagggcactgcttataaggctgatcccaacagcgacgaggccaagttgaaggtcaagttctgggtgcctccctttttacccatcattcccgttactggggattactggcttttgtacattgaccaggattatcactatgct

SEQ ID NO: 21450 - DNA, 447 bp, Glycine max
ggattcacaacagctactccagctcttttgcatcgctcggagcagaagctgctgctgcagcttattaaagaaagaaagcctccaagacaagatggttgagaaggatggcgttggcagcaagtatcttcaacaaacacttaacgtctccatcgacatgcatcaacacggaatctctaagtgtttcgacgacgatggtccgcccgaaaagaaccgggacggtgtggacttcaagtgcacacataataactgcagtgattgggtctggggtgctatctctggcttgggctatagctcagcttggatggattgctggtcctattgtcatggttatcttttctgccatcacttactacactttcacttttctcgctgattgttaccgcaccggtgatcctgtaactggtaagagaaactacacttacatggacgctattcagtctaactttg

SEQ ID NO: 21451 - DNA, 267 bp, Glycine max
caaacaaagggagggttgcctttgaaaagccgcatgaaactaagcgggagggttaacatggctcaggtagctgatataaaagaggtgtaaggatgctaacagtcaccatgctcaagaggctctgcgcagggccaaatataagttcacccggccgacatatgaacattcgttagcatataatggagatttacaaatttcaatctaagtgagcacacaaagttgaaacatgataacagaagtgtgccggatgggatcagtgccaaagat

SEQ ID NO: 21452 - DNA, 448 bp, Glycine max
  modified_base (3)..(3): a, c, g, t, unknown, or other
  modified_base (147)..(147): a, c, g, t, unknown, or other
ggnctattagtatggaccaatcttactaagcgtgtcttggagataaatataaaatcgggaacctgattcggggcatcctagcttttttttactggtacccatttagcagtttttttaaaataccggaaaatattccttatgggtatntttcagttataaaccagtagaattagttttttcatttcagcagtacctttttttcccgtaaaaccgcactcctttagtataatttgttttcattagcatccttttatgaacgcttgttatcgtcgatggtatacgtacgttgtttacaaatatacaatgaagttcggtggctcttgattgctggagaaaaagaggtgtgtatttttttaaaaacatatgatccgtatgaccatacgaattatcaatccgtgtgttttgaatgtttttaaaaaattataattaattttaaattttttataca

SEQ ID NO: 21453 - DNA, 404 bp, Glycine max
cggatagacgagatgaaaacgttggaaatgagtctattagcaggtgcttacgttcaaccccgcttcccttgtaactacaacccaacgctttccgcatcttgcagaacccaaaagacagcaacttcactaaccgtaacaactcccaagaaaacagaaaaggcgttattcactgagtcattcgatcaaacacgtgacgcgcaacctctccccgaaaagaagaagagggtgttcttcttagacgttaacccgctctgttacgaaggaagcaaacccagcttgcactctctcgggcggtggctctctctgtttctcgagcaagtcagccataccgaccctgtcattgctgtaatgtcccaactctactcatttttcaaaagatgacatttagatgcaaatgcttactt

SEQ ID NO: 21454 - DNA, 435 bp, Glycine max
ctcaaattagcatggctgtcacggttgcattcttgaatttgatcatcatgttttcagtagtctctacaagcaagtcactgagcttaaactactattcaaaaacatgccctgatgtggaatgcatttgttgccaaggcagtgaaggatgccactgctagggacaaaactgttccagctgcacttctgcgaatgcacttccatgactgtttcgttcgggggtgtgatgcctctgtgctgctaaattcaaaaggaagcaacaaagcagaaaaagatgggccaccaaatgtttctttgcatgcattctatgtcattgatgcagcgaagaaagcactagaagcttcatgccccagtgtggtctcttgtgctgacatccttgctctagcagcaagggatgcagtttttctgtcaggaggacctacatgggatgttcctaaa

SEQ ID NO: 21455 - DNA, 371 bp, Glycine max
  modified_base (322)..(322): a, c, g, t, unknown, or other
aaggtgaaccgatcaatggatcaattacagaagatggatgagagttgagtgaaaggaatcatattgaggatgcaacaacaaagcaactgtacattttgctttgttctgagaaagctttatatgtctattcattggtgcatgcgattcatggggttaaaaaggtgctatacaagaaaaagtttcattcctctacgtgttgctgggcatcaacattttgcagtccttctgatgttggccttatactcattttcactagtggaaaagtagaattaaggtctttgccagagttatacctgattgtggagacttcaattagaggttntaattattctcctacaaaatgaagtcattttctgacagccagatatgct

SEQ ID NO: 21456 - DNA, 405 bp, Glycine max
  modified_base (280)..(280): a, c, g, t, unknown, or other
gacgcacgcatcgaaagaaagagagagaagaaggggaagaagaaaagaggggtcttcgaagaaaccatgagtatcctctctctctaaactctctcagattcgatcctctcttctcttctttcaattccgcttccctcgcactaaatgacagggtttcctggccctcgccgcgatcacgcttcttcttcctcctcctcgcacaattccaacagcagtggtagcaacgtatttaatttgcttgcaaggagggagatctcaccccgaacaagatatgtggcanaatggcattggggagaacccggtgaagcttcaaaatcaaaggctattccttattctcgtcctaaaaaagaagttgtgagagatgcaagacgtggtctcctcttatgggttgaggctgagtcattg

SEQ ID NO: 21457 - DNA, 376 bp, Glycine max
  modified_base (275)..(275): a, c, g, t, unknown, or other
  modified_base (346)..(346): a, c, g, t, unknown, or other
gcttgatgagatggacagagctctgcatgatgcattgtcaattgtcaagagaactcttgaatcaaaatacggtggtagctggtggaggtgctgttgaggcagcattatcagtttatttagagtaccttgctacaactttaggatctcgggagcagttggctatagcagaatttgctgagtctctgttaattattccaaaggtgctttctgttaatgctgctaaggatgccactgagctggtcgcaaaattacgggcctaccaccattcagcacanactaaagccgataagaaacatttatcaagtatgggtttggacctttctgaagggaaatcagaaacacttgnaggctggagtcattgagcctgccatgagca

SEQ ID NO: 21458 - DNA, 295 bp, Glycine max
gcatctagtctcagcgactgtcccaactgctgcgggccagtaaaatcaacggacatggcagactaattcttcattgacaaatctcaacagaataacactatctgtggtaggaactatgcatacgaaaacgctatgaaggacaatgtactgaatttgatgcttattcaagcacccacacactatctaccacaagcgcaccatctccaatacatttgccataggaaaggctccaattgaaaatcatttttgtaccattgagatgggtgccaaacttgacaaccatagcctgatatga

SEQ ID NO: 21459 - DNA, 110 bp, Glycine max
  modified_base (8)..(8): a, c, g, t, unknown, or other
cccacacntcctaattcaaacggccactttttttttttttttaaacttatttttttacaccgccccggttttatctttactcccacttttcaattaacacctatcccttc

SEQ ID NO: 21460 - DNA, 426 bp, Glycine max
  modified_base (378)..(378): a, c, g, t, unknown, or other
gacagacagacagacagacagagtgagtttgtgacgaatcctctgtcgtcatctcaacctctctgcatttgtgcgttgcattgcacatatctctcaaaactttgttctggttctgtgactcttactattttcgtgtgtcttgcatttggatcattatctgtcacctgagaaacccacctcagagattcacctaacaccccttcttttgattttgaaccccttccatttcaatcaaaacctctctcatcgtcttctattctacatacaattctacccttttcttcactctgcttttctgacaaaagtgttggttgaacttgattctttcttcatccatttaattgggaaccagcgaaagcacgatgggagatgtggcanaggacctaacagctgggactgttggaggggcagcacaactgatagttg

SEQ ID NO: 21461 - DNA, 380 bp, Glycine max
  modified_base (223)..(223): a, c, g, t, unknown, or other
  modified_base (326)..(326): a, c, g, t, unknown, or other
  modified_base (348)..(348): a, c, g, t, unknown, or other
ggattcgtcagttcattgacttgcccacagtgagaatgaggatgttgcgaacgacaatactgcaattcgctgcgttgcaggttttgtttattctgttgggtgttggtgccgattacataccgccttcgagatttgatggcttcgtctacgggaaggggaacttgaatttgttggatacggttttgatagaagcgttttatgacccagtgtgcccagatagcanggattcccggcctccactcaaacaagctcttcatcactacgcttctcgggtttcgctccttcttcacctccttcctctaccttaccatgacaaatgcttttgntacgtctcgtgctctgcacatngtgaacaatttgaacgcatctgcaacgttccc

SEQ ID NO: 21462 - DNA, 321 bp, Glycine max
ggaccggctatttctattctagctggtactgacgtaaggttatatgtgtagggtatggatgcatgttttaagatgcctgtaatagcacaattctttgtcttttgacagtgcttactgtgaactgtacttgcatgtatatatgtaaaataaagctaatgctaaaaataatggaacatgttgaaattgataaatttaatatagatacttttagtattcaaacaaaacacagagtggaagacattaatgtatttgtttgtttgggtctttgtggatggagattaattcaagctaagctttatgaataaactgacttttgaagga

SEQ ID NO: 21463 - DNA, 362 bp, Glycine max
gatttcaattcattcagtcttattattattagggtttggcgattcagagagaaggagaaatgggagaacgaaaaggaatcccaattgctctggggctcttggcgatgctcctcttcttcattgcttcttcctcttcctctcacctcgttcgtgcttccgatgacgccgacgacgcgatcttctacgagtcattcgacgaggattttgacggacggtggattgtgtccgacaaggaggattacaacggtgtctggaagcatgctaagagtgatgggcatgatgattatggacttcttgttagtgaacaagcccggaaatatgctatagtcaaaaaacctgacgagcctgtcagtcttaaagat

SEQ ID NO: 21464 - DNA, 368 bp, Glycine max
gacctcacccagttgcagaaagaaaagaccatcaaagtttcacttcagccttatccggtttagggtttcggtttttgacccaacctttgacgtatcgaaaccttaagtttcggatcaggtctgagcaatctggttggtagaacctttggtcttagagagtcaagttttatgtctgaattagacgatcaaattcctactgccttcgatccttttgctgatgcaaatgctgatgactcgggtgctgggtcaaaggagtatgtgcatattcgcgtacagcagcgaaatggaaggaaaagcctgacaaccgttcagggattgaaaaaagaattcagctataacaagatacttaaagatgttaagaaaagagt

SEQ ID NO: 21465 - DNA, 64 bp, Glycine max
  modified_base (37)..(37): a, c, g, t, unknown, or other
gacacacatttactcactcactgtgagagcggcaaanaaaaaaaaaaaaaaaaaaaaaaagaag

SEQ ID NO: 21466 - DNA, 367 bp, Glycine max
gccaccaccaccatcaactcaatatgagagtcctcgttcaagagaactgttgtccaaaccaatatcaggaaaaccttgtgaggtttcaaaactgaaagacagtgactgtaagctatttggcatctcacttcttagtagccgccccattgcatcagagccttctctatcacaaagaaatgttacaagtgagtcagttggtcacatgcatacagcatcacaccatcaacgtgcaattgaaaacgatcagaagtctgagcattctaggggttcaaaaccagctgatggtctgctgattgatgaccacgaaaaggtgttacaaacttctcagccacatcttgaagatgtacaagcaaaatctcatagtggt

SEQ ID NO: 21467 - DNA, 417 bp, Glycine max
  modified_base (53)..(53): a, c, g, t, unknown, or other
gacgcacttagcaatcaatcaaaacattcccaataacaataatatacacatcnttcaattaagctccttcttcctatagccatggctctttctaagcttataattgcttcccttcttgcgtcgcttctccttcttcatttcgttgatgctgatcaatcggcacatgcacgaacgcaggggtctcttcttcagcagatagattgtaacggagcatgtgctgcgaggtgccgtttatcatctcgtccacgcctctgccaaagaagcttgtggaacttggtgtagacgcttgaactgcgtgccacctggcactgctggaaaccaaaaagtgtgtccctgctatgcaaagttgactactcatggtggcaaacgcaagtgcccttaaacttaattggaccactattctatgcatgcctttgg

SEQ ID NO: 21468 - DNA, 428 bp, Glycine max
atattactatggttcgagagaaaataagagtatctactcggacactacaatggaaatgtgttgaatcaagaatagacagtaaacgtctttattatggacgctttattctgtctccacttatgaaaggtcaagccgatacaataggcattgcaatgcgaagagttttactcggagaaatagagggaacatgtatcacacgtgtaaaattagaaaaaataccacatgaatattctaccataataggtattgaagaatcagtacatgaaattttaatgaatttgaaagaaattgtattgagaagtaatctgtatggaactcgggacgcgtctatttgtttcaaaggtcctggatatgtaaccgctcaagacatcattttaccaccctctgtggaaatcgttgataatacacaacatatagccaacgtaaca

SEQ ID NO: 21469 - DNA, 404 bp, Glycine max
ggcaccgcttgagcagacttaacaacagcacaaagcgggttactgtctgttcaagctaccatctctctctctctttcttagtgcctccttgccagaagttaaaatggcccaagaaactttcctattcacatctgaatcagtgaacgaggggcaccctgacaagctctgtgaccagatctccgatgctgtgctcgatgcatgcttggagcaagaccctgacagcaaggttgcctgtgaaacctgcaccaagaccaacatggtgatggttttcggagagatcacaaccaaggccaacgtggactatgagaagattgtgcgtgacacatgcaagaacattggttttgtctctgatgatgttggtcttgatgctgacaactgcaaggtcctcgtcaacattgagcaac

SEQ ID NO: 21470 - DNA, 431 bp, Glycine max
gaacacttctctagctatcattgctcttcagctgtcttctttccaatacctcgttcaatagctccaaggttctgagttgcaagctaacatgggtgagatagctttaccaaatggcattagcaatggcaatattaatggagtcaatggacaaagccattctcttaatggttacaggaagagttgttggtatgaagaagagattgaagaggacttaagatggtgctttgctctcaatagtatattgcatacaggagctagccagtaccaaggcattgcattgttggacacaaagccctttggaaaggctttggtaattgatggaaagcttcagagtgcagagacagatgaatttatctaccacgagtgtctagttcatccggctctgcttcacaatcctagcccaaagaatgtttttattatgggaggaggag

SEQ ID NO: 21471 - DNA, 87 bp, Glycine max
actacaaaccggacattgaaacatcaacaacatgcggtctcacgggagggaacacaacaagatacaaacataactttgtacaaccaa

SEQ ID NO: 21472 - DNA, 427 bp, Glycine max
gagagtgactcagcaaaaccctaggtgttctcacactctcgttccgtctttctccaacaatggaagttccttcggaagcgccgtcgtctaccggcaccggtgaaaccataagcaaaaatgcgctgaagcgggaactcaagaacaaacagagagaagaagatcgcaagcgcaaggaggaggagaaggccaaaaaggcagctgaaaagcttgaaatgcagaaggataaggataacaaatctgcacctgctgatgaagatgatatggaccctactcaataccttgagaataggctaaagtatcttgcagttcaaaaggcagaagggaataacccttatcctcacaaattttccgtcactatgtctcttgatcaatacatcaaggaatatggaggtttaagcaacgggcagcacctcgaggatgtctctgt

SEQ ID NO: 21473 - DNA, 308 bp, Glycine max
ggggagaaggactatacattactgtgttcttgggctgtcctcattccctacattcaccactcatttatcttatagctatattctgatacatacactgctttgaatccatctccactagcggtttctgttgagagctttaacaaagacttcaagctcatggggtttgagaggattgctgctattcaaacatttgtgattgtgacaaatctgtatgagtacgcaaagcaaaattatgggccttagagatcctctagatgaacggcttagaactctgttaccaccatactttgtcctgtgtgcagcaaatt

SEQ ID NO: 21474 - DNA, 222 bp, Glycine max
tacattaagctgttgtctcgagcctggacaattgggttcatgaaaagaagatatcttgacaaaatggctcgctacaaaagccaacctaaacaatgctggcttacacacatgggatctggttattctaatggatccacatattatcacttcaaatgcacttaaatactaatcagcattcatagagaatctgatgaggcggggatacaaaattggtggaatctt

SEQ ID NO: 21475 - DNA, 423 bp, Glycine max
gagtttttggtgttccatttttcttcctccatctttatcttaaacataacttgaactctccattccttaaattttagctacgagctagttccgacacagacaaagcaatggcaaagaccgagttagaggtgactgttgagagcaagaacaaagacctcaagcacctggggtttgtgaggattgctgctattcaaacatttgtgattgtgtcaaatctgtatgagtacgcaaagcagaattctgggcctttgagatccgtcgtaggaacggttgagaacactgtaaccaccattctcggtcctgtctgcaacaaattcaaggacgtccctgatgatgtccttgtttttgttgacaaaaaggtggatgaagcttcccacaagttcgatgagcacgctcctccttttgctaaacacattgcggatc

SEQ ID NO: 21476 - DNA, 351 bp, Glycine max
gcctctcattgaaaaacaaaattaatcatcttacttatttattgtccgaaaatggttgatttacattggaaatcaaagatgccaagttccgacatgccttccaaaactctaaaactctctctctccgacaacaagtccttaccctctttgcaactacccttccgcaccacagatatctctcacgccgcaccttctgtttgcgccacttacgactactatctccgtcttcctcaactcagaaagctttggaactcctcagattttcctaattggaacaacgaaccaatcttaaaacctatcttgcaagctctcgaaatcaccttccgctttctctacatggttctctccgat

SEQ ID NO: 21477 - DNA, 407 bp, Glycine max
tgtggaatttgtgagagctcctgacatatatcagtgtgatttgcttgacttgcctgctgttgggcaactggagaaggatgccaaatatgctctgttatatcagcttcttaagatttttcttacccagaggctagatgcatacttagaatatcaagctgcaaattccaccttgttgaaaaactatggccttgtgcctgaagaatgcatttccaaaatgaggctgatgtcattgatggatcttacctctgatggttctggccaaattccgtatgaacttattagggacacacttcagatcaatgatgatgaagtggaactatgggtggttagagcaataactgccaagttaattgactgtaagatggaccaaatgcatcaatcagtagttggtagtcatcctactgatc

SEQ ID NO: 21478 - DNA, 391 bp, Glycine max
gaagcttatgtcatagttactctgatagggtcgggactgaagggcaagcagttggtggtgtacccctgccaaacactttggagggccctcagttttgcccacaaccacaacccttgcattttgcggtgggaagagcccctcctgctatggatgaaaagggaaagttggatcagatagaggaaagactaagggccgttgaaagaggcaaagattatgccctcgctgacgtggaagatttgtgcctagtacccgacgtggtcattcctccaaagttcaaggtatcggacttcgataaatacaaagggactacctaccccaagaatcacctaaaggtgtagtgcaagaaaatgggaacatatgcgaaagatgacaaattgttgatgcatttctt

SEQ ID NO: 21479 - DNA, 365 bp, Glycine max
ggttctagtgtatgtgattgttgtgactcgttcttgggcgacgttatcttcttcttttgttgattgtgtgtttgttttttctctcacctgaaaatgtcttgctgcggtggtaactgtggatgcggaagcgcctgcacagtgccgcaacacctgcgcacgctgcaagatgtacccatacttgatctacaccgtgtcaaccaccaccaaaaccttgttcatgcgcgtggcaccattttaggcttattacatccgtgctaaaatcggtggaccccattagaaccaccattgctaatgctgagctaactacacttgcagaccctgctcttgcaagtcttgtgtttgataactaaaacgtgaatcaaaat

SEQ ID NO: 21480 - DNA, 435 bp, Glycine max
gtaatgtagtatagtctgaattatatcatatgtgtttcagtaaacttaatagtatgacaacgcattcatttcctatgcattgattcgatttctgatactatcggagtgaaaaaagtagatctaaagaaaaacgcgggttggattatattagtaacaagtaaattctttgtacgtaaaaagttccaagattttgttggacagaataacaattgcaaagtttgagatcacccagaaagcattatcaattttaaaagcctactcgggtattgagcgtttatcaaagtttacttaataagaacttaattttttttttttttttcaataaagaatagtttgtaacttcggaaaaagagaatctagtttattttcttacatagaatcctcatatatgtgtgaataacacatacattttttctatagatacattcgaaatct

SEQ ID NO: 21481 - DNA, 353 bp, Glycine max
  modified_base (300)..(300): a, c, g, t, unknown, or other
gatgcatagcaattcccaattcctaatggtttaaaccggattctcatttcttcatcgatcgattcttctcctcctaaagatgcagatcttcgtgaaaactttgaccggtgagaccatcacccttgaggtggagtcctccgacaccatcgataacgtgaaagctaagattcaagacaaggaagggatcccacctgaccagcagagacttatctttgcgggtaaacagcttgaggatggtcgaacccttgccgactacaacatccaaaaggaatccactctccacctcgtgcttcgcctcangggtggcatgcaaatctttgtcaagactttgactggcaagaccatcaccctcg

SEQ ID NO: 21482 - DNA, 390 bp, Glycine max
ggattttcacatcttcaagatactaagaaggaaggaaggcggggaagtgagaagtgtaatggcttctgagagggaatgttttgacctctctggacccttacatttaacttatgttgactgggataatgcatatcatcgaaagtcggttgctgctagtttggtccaaggtgtttatgttctagagaaggacaggcaagaacggcgtgaaggtcctgatgctcttacactgccttggtgggcgttcttccactttaagttgttttgttcgcttgtcgatgatgttgattcttccatctttggtgctatttatgagttcaagcctccatcatctatgtgcaatgacaccttacatagaagtccacgttatgtaattgcctttcgagggactat

SEQ ID NO: 21483 - DNA, 314 bp, Glycine max
atatatctacagcaacactacactggcccatcggcggaaaaaaactatggccatggttatgtcgctacttcacttgttaatcactagcgtttacgctaagtgggggggcgcagccttcactgggagagatgctactatctgtggggagctgagagaattgaactaaccaaccgaacaaaacatgaggcctgtgagaatgaataaaaatatgatttggcattagaatatacacatgacgagttacaacgttggtggatttgatagacgataaacacaatgtaaaataatggatatgagtcactagcactaaaaac

SEQ ID NO: 21484 - DNA, 296 bp, Glycine max
taatgcacaatttgataataaagacttggtggttgaatatgctgatataaagcactctataatatatatatatatgcaaaaaacttgacatgaaatatcaagcaatgccaacactataactatggacaaatgcacaaatattctatttctatttaaatatggaataacagcacgttagatttacaacagatatggggttgaggtcaaattccccactgcagttcctactatttcagctgacaacattaatagctgccatctatttatgagtcttgactccttctaaccatccataa

SEQ ID NO: 21485 - DNA, 403 bp, Glycine max
gtggcaaaaagggtcttgctgccaatcctcaccgttctgttgatccagttttggctgcttcagctgcagttatcagcttacagggtattgtctcccgcgaagcaaatccattggattctcaggttgtctctgtgacttcgtttaatggacgcaacaatcttgacatgatacctgactcggtggtcctattggggactttcagagcgttctctaacaccagcttttaccagctacttgaaagaatagagcaggtgattgtggaacacgttagtgtctacagatgcttggcagaagttgacttctttgaaaaggagtacacaatttaccctcccacggttaatgataaccgaatgtatgagcatgtgaaaaaggtgtccattgatttgctgggtcataagaattt

SEQ ID NO: 21486 - DNA, 380 bp, Glycine max
ggacgcggaaacacgctcgtcttcacgatccagcgggtccgctctccgacgagtctgcgtaaggtgaagaatcacgaggccagccgccggtgaagaatcgcgcgattcgtctggaaatcgcgattcaagctcgattcatctccgttatagagattcaaccacgattcaggaacaaaaacaagacaacttccgattcgcttcagtagcagctagaatcgtatcgaatcgtgcgacacgtatcgtgaaccattgaagatgataaaacaatcataccacggaattcattggttgaagttaaccagtcgggtcttcttatggaaactataatcgacattactcctcgtgatcctattccaacaccttccggtggacctcttgac

SEQ ID NO: 21487 - DNA, 259 bp, Glycine max
  modified_base (236)..(236): a, c, g, t, unknown, or other
agtaagctatgatgacatatctggtcttcggattggattggttttccaaagtgctgcactctttgattctttgactgttcgtgaaaatgttggttttctcttgtatgaacactcaagcatgtctgaggatcagatatcagagcttgtcacggaaaccttggctgcagttggattgaagggagttgaggatcggttgccttctgagttatcaagtgggatgaaaaaacgagatgctntagctcgatctattatttgtgac

SEQ ID NO: 21488 - DNA, 255 bp, Glycine max
  modified_base (15)..(15): a, c, g, t, unknown, or other
gatcgacagtgccgntttgcccccattggccaattcggccactcttctctgaaaaagcctccagcctccttcttcatccatcttccctctccaccaaaatcctccgcggttcgttccgttattcatcgaaccgttctctcaagtctcgtacttggcttagttcacaactcgaaacttcaccgaacgcattccattcaccaattcgtccaagtctcgtatcaatcactcaatccgtctcgtggaggttggagagat

SEQ ID NO: 21489 - DNA, 445 bp, Glycine max
  modified_base (429)..(429): a, c, g, t, unknown, or other
aggggacgcaccgattcatgcttcaaggcgggatcggaagcttgccgtgaaaaattgcgaagggagagactcaatgaaaggttctgtgacttgagctctgttttggagccagggagacctgtgagaacagataaaccagctatacttgatgatgctatcagagtcttgagccaacttaaaaccgaagcccaggagctcaaaaaaacaaatgaaaaattactagaggaaataaaatgtttaaaggcagagaaaaacgaactacgcgaagagaaacttgttctgaaagcagataaggaaaggattgagaagcagttgaaggccttgcccgttgcaccagcaaggtttatggctccacctgtaactgctgctgctgcagcatatcaagcaggggtgaacaagatggccgtatattcaaactatggctacatnccaatgtggcaatatt

SEQ ID NO: 21490 - DNA, 429 bp, Glycine max
tttgaaggggatcacaaaccaaacaacttctggcacatacaggactctctctctctctcttattgcatggccgccaattccagtagccgagggatcaccgccttagggaagcgagtcgccaaccggatctggacttccaacgcacctcctctcacttcaaggaggggagcatacagtagcggctcagtgtacgacaagaaccctgatgatgagatccagtctgggcaggtcccagacgatgtgatccaagcggcaacacaatccggcaaatactgggccccacatacacagactggggtatttgggccccccggaggaggtgaccaaactgcttctgccattcactctgatgcgctggaggagaaagccttgtttcgccccaccagtcttgaagaattcgagaaacctcacaccctttcttaacaacca

SEQ ID NO: 21491 - DNA, 430 bp, Glycine max
gatgatgatgatgatggaaacaacacaattggtcgggtatgtgaaacactctgcccatttcgctctggagatggaggctgcagatggccaaatggtggctgtgctcaactaggtagccagtatgttggtctgaaggcaaattttgatgcatttgaccaactatcaattaatgatagttatttcaagtctgagtgaacagggaatttacttcctaaaagactccgatagtgaacagtcgcataatcaattttggtttctttaagctatgaggatagttgttaattctttttaacactcctcgtgatgaaaaaatggggagaagtagtggaccctgtcattttgattgggtttcgggaattgtacaggctataagagttggctggagatcatcttggtgcatatgggaatgcattgggttgatacgcatcat

SEQ ID NO: 21492 - DNA, 375 bp, Glycine max
gacacgcaactgggtctgactgcggtttgctctacgcctctccctctctctcaaaaatcgttctcttcgattttagggttttgttttgctgctgcctccgttccccccttctcataaacaacgcgttttctcttctgcttcgaatctattctttgcttttggttttggttgattcaaggccttcacagcattcgttgcggcattttaatcgatttatccaagcaggactgaatgaactaatggagtctaaaggtgggaaaaagaagtctagtagtagtagtagtaaattattgttctacgaagctcccctcggatacagcattgacgacgttagaccaaacggtgtaatcaaaaaattcacatctgctgcttact

SEQ ID NO: 21493 - DNA, 430 bp, Glycine max
  modified_base (42)..(42): a, c, g, t, unknown, or other
  modified_base (48)..(48): a, c, g, t, unknown, or other
  modified_base (361)..(361): a, c, g, t, unknown, or other
aggctttgcaacggcaacagactaaggggtttctcgctctanccctanggtttcgttctctactaccgttctttcatcagatcgctgccgtttctggcgtcattccgataattcggcggcatgaagctaacagtgaagactttgaaagggagccatttcgaaatcagggttcaaccctccgatactgttatggctgtcaagaagaatattgaagatgtacaaggaaaagataattacccatgtggacagcaattgttgattcacaatggtaaggttttgaaagatgaaactacattagtagagaataaagtctctgaagatggctttcttgttgttatgcttagtaagagtaaaacatcangttctgctgcagcttcatctgttcagcctgccagtaatcctcctacgactgtatcaacgtcaaattcca

SEQ ID NO: 21494 - DNA, 159 bp, Glycine max
cagcttagacatgttcaactggacaatagccatgcccaggagcagacacagactcagtcacagtgccacaatggcaaagctactgcctactgattagcactctgataccatgtatgctcaatgtttgtgatatgaatctgaataggatattgcatgacc

SEQ ID NO: 21495 - DNA, 328 bp, Glycine max
gctactaccaaattttctttcaaacaaacgcagtttctctctctctctctcgtagttcaattcaattcaattcaatatgatgcagagactctcttctgccactactactactactactcgctctgccttgctgcgctacggtggcggcgcacttcgccgggacgtgcttgctcccatttactcttctcacttagcagctaagtcacaggcgggtgaaaatgacaccaaagcagctagatggttttctattatgagctctgatagatccacatttgattactcaaacttgaaaagggatttgttctttggcaaacgatatgaatcaact

SEQ ID NO: 21496 - DNA, 349 bp, Glycine max
gatcacaaaccaaacaacttctaacacatacactgctctctcggtctctcttattgcatggccgccaattccagtagccgagggatcaccgccttagggaagcgagtcgccaaccggatctggacttccaacgcacctactctcacttcaaggaggggagcatacagtagcggctcagtgtacgacaagaaccctgatgatgagatccagtctgggcaggttccaggcgatgtgatccaggcggcaacacaatccggcaaatactgggccccacatccacagactggggtatttgggcccccctgaggaggagaccaaactgcttctgccattcactctgatgcgctgg

SEQ ID NO: 21497 - DNA, 399 bp, Glycine max
gggcaaataggcagtctgctgcgaggtcaaaagagagaaagatgcgatacattgctgagcttgaaaggaaggtgcaaacattgcaaacagaagcaacatctttgtctgcacaattaactctcttgcagagagatacaaatggcttaaattctgagaacagagaactgaagctgcggttgcaaaccatggagcaacaagttcacttgcaagatgcattaaacgatgcattaaaagaggaaattcagcatttgaaaatattgactgggcaagttatggcacctaatggaggacctatgatgaagcttgcttcttttggaggggggcagcaattctatcccaataatcatgtcatgcacactcttttagctgcacaacagtttcaacagctacaaattcacc

SEQ ID NO: 21498 - DNA, 307 bp, Glycine max
  modified_base (23)..(23): a, c, g, t, unknown, or other
gaatggtcttttgtagattctgncttcagcttgggagtatgcggagcttccaatacgacctggagaggaagaggttgttcgtaagttaattaatcaccagaggttttcctttgaaaaccccaaggttacagatccgcatgttaaagctaatgctttgcttcaggcccatttctctaggcaatttgttggtgggaaccttgcattgcaccagaacgagatgcttctttctgcaaatagactgcttcaggctatggtagatgtgatatcgagcaacatgtggctgagcctggccttacttgctatggaa

SEQ ID NO: 21499 - DNA, 441 bp, Glycine max
ggaaatcgagaagaagaagaagaagaagatggagaagtatgagatctggagcaggagaatagcgttggcagcgtttgcgtttgctctgctgttccaatcggcctcagcagacgacgtcgttgtgctctctgaagataacttcgagaaggaagttggtcaggacagaggagctctcgttgagttctatgctccttggtgtggacactgcaaaaagcttgctccagaatatgaaaagcttggtagcagcttcaagaaagccaaatctgttttaattggcaaggttgactgtgatgagcataagagtttgtgcagcaagtatggagtctctgggtacccaacaattcagtggtttccaaaaggatctcttgaagccaaaaagtatgaagggccacgcactgctgaatcactttgtgagtttgtaaatacggaaggaggaacgaa

SEQ ID NO: 21500 - DNA, 428 bp, Glycine max
gacacaccaacacatccattcattgtcttaatgttagcaatgtcttcctctttctccatccatttcttcctcctcctctcaatagcccttttctcagtttgttgcttagcagcatctcaagctcccaccaccaaatcacacccctatatccttcccattaagaaagaccccgcaacaaatttgtactacacttcagttggcattggaactcctaggcacaactttgatttagtcattgatctttctggtgaaaacttatggtacgattgtgacactcattacaactcatcatcctacagacctatagcttgtggctcaaagcaatgccccgaaattggatgtgttggttgcaatggccccttcaaaccaggttgcacaaacaatacatgccctgctaatgtaatcaaccaattagccaaattcattta

SEQ ID NO: 21501 - DNA, 375 bp, Glycine max
ggaatacaaaccataagcaacaacaacgcaccattcgataacggcttctggttctttaacgaagaaacctttctctttgcgcgtgtcccgttctcttctgcaatcctcctccatccccactgtgtgatctgatcctaaaccttatagccatgactaccatggagattaagctatggaatgacaagcgcgaaagagaaatgtatgacaactatggggagctttatgccattatcaaagccactgataggcttgagaaggcctatgttagagatataatttcaccgcatgaatatgagttggagtgccagaagctcatagctcatttcataaccttagcttccactcttaaagacactgcgcctagcattgagcgat

SEQ ID NO: 21502 - DNA, 408 bp, Glycine max
ggttctagtgtatgtgattgttgtgactcgttctgcttcatcgggatcttcttcttttgttgtttgtgtgtttgttttttctctcacctgaaaatgtcttgctgcggtggtaactgtggttgcggaagcgcctgcaagtgcggcaacggctgcggaggctgcaagatgtacccagacttgagctacaccgagtcaaccaccaccgagaccttggtcatgggagtggcaccagttaaggctcaattcgagagtgctgaaatgggtgttcccgctgagaacgatggctgcaaatgtggagctaactgcacctgcaacccctgcacttgcaagtgaggtgttggagagctaaagctttcaacagaaatggcccttagaaataatgataaaaactatatgtagtttcaaaac

SEQ ID NO: 21503 - DNA, 394 bp, Glycine max
agaagacgacagaaggggggaattccatggcgacgagtgggtcaggggcaaagcatgggatggtgattggaatcgacgacagtgatttcagcacgtacgctctccaatggactctggatcacttgctatcccctgcaaatgttcctaagttcaagatttttcttgtttatgccaagccttatgttgcctctgctgtcggctttgttggccctggagccgctgaggtgttacctgttgttgaggtcgatttgagaaaaacagctgccaaaatcactgaacgtgctacagaactatgcaagaagaaatccgtaaatgacgtagccagggaagtgctagaaggtgatcctagaaatgttctttgcgaagcagtggataagcaccaagcttcaatgtt

SEQ ID NO: 21504 - DNA, 427 bp, Glycine max
  modified_base (391)..(391): a, c, g, t, unknown, or other
agaagggggcctaacatttggaggttacctccaatcaaagatggaatgcatgaaatgtggagggaaatctgagtgtcaagaaaggatgatggatctgacagttgagatagaaggggagataacaaccctggaggaggcccttcaacagtttacaagtgctgagactctggatggagaaaacaagtaccactgtgtcaggtgtaaatcttacgagaaggccaagaagaaaatgacagtttcggaggcacctaatgttcttactattgcattaaagagatttcaagcgggaaagtttgggaagctcaataaacctattcggtttccaaaaatactggacttggcacctttcatgaatgggactagtgatttgcctatatacaggctatatggngtagttgttcacctggatatcatgaatgctgctttt

SEQ ID NO: 21505 - DNA, 425 bp, Glycine max
tgtgttttaatctacatggatgaaaacaatttagttaacgatggaatttatgttcaattctgattatatacaaaaattctttaagccaataattgaacccattttatgataaactttccttccatttttgttcctctagtaggcctaatatttccggcaattgcaatgacttctttatttcttcatgttcaaaaaaacaagattttttagatacagaaaacaaagtaaaattctggggttttttattccccaattataatactaaattcaaataataatcatatatcgtaaataaaattagtcttcgaccactaaaaaaaaatagcaaaagctttatctaaataaacatgcatcacacgtcattagctcctatgttttgcttaatgtaactctagtctttgtgatgcctgtgagtgtaactacct

SEQ ID NO: 21506 - DNA, 225 bp, Glycine max
ggacattgtgttgattcgagacagaaaaaggggttagggtttgttcttgtgatcgaagcttagcgatgcaaaatgggtggatcagtgagggacgtgaagtacaatggcgaggtctattaggttgtggcaaagtgcttttcgtttattcctcacttttgggcgtcttggtgcgaattttccaagctcatggaccaactttttttttaactttccacttattttccc

SEQ ID NO: 21507 - DNA, 106 bp, Glycine max
ggacgtcgtttcttttgctgctcaatgcggtagcggacaatctttagaaattgttaagaacttttccattttagcatttattttttaaaattatttgttggtttta

SEQ ID NO: 21508 - DNA, 403 bp, Glycine max
ggggggtaggtcctgggggggaagttatagacacctttccatactttgtgtctggagtacttcacttaatttcctctgcagtattgggctttggcggtatttatcatgcacttttgggacctgagactcttgaagaatcttttccattcttcggttatgtatggaaagatagaaataaaatgactacaattttgggtattcacttaatcttgttaggtataggtgcgtttcttctagtattcaaggctctttattttggaagtatatatgatacgtgggctccggggggcggagatgtaagaaaaataaccaatttgacccttagtccaagtattatatttggatatttattaaaatcaccttttgggggagaagggtggattgttagtgtgggcgatttgga

SEQ ID NO: 21509 - DNA, 401 bp, Glycine max
  modified_base (335)..(335): a, c, g, t, unknown, or other
ggcgaacaaagaaagaaccttttgcttttctttttttccctctctctccctccgaaaagaactgattctctctctctctgtgccttttatcttttttctttctttcttttttaacagatcgttcttcttcttcccactcactctcactctctgtgttggtgagatgggtatgtcatggctgtgctgctgagaatggctcagcctcacaatggcaacaccaacaacacttcaaaccagcaattggtactccatgactttctgggtatgaggcccgccgccgattcccccaaaaccgccgatgtcaggttaccggagccttcggccttcggctcttncaccggaggacgcggtcccttcttcgccaccttcgacatcgcttccgaaaaacaggtaggaaatca

SEQ ID NO: 21510 - DNA, 428 bp, Glycine max
cccacgcgtccgagacgacagaagggccggatcctgtagcgaactccctccattgcattttgccctggaaaaccagtctctcaatgcggttgtgatgagtacaactttcaatgatcaaatgtcctataagattgtgttagtcttcggtgaactccctaaccttttgtttaaagtctacaactctggttctagctgttgggaagatgaggctgcgctgaggaggaatgttgatgacaattccatggattgtgattcaaccgatgatgacaatgttgtgtacttccttagcaagggctgaactgtggtggtgagtaacatgcaaagaaacccgtctaagcagtattcgtcggttattactaacaaagacggtcaggaaatagtgtattttctcagttcttcggggacggtagtagcttgcaatttgacat

SEQ ID NO: 21511 - DNA, 416 bp, Glycine max
atgtgaaatctggtttgctttttcatggatccttgatcagtttcccaaatggtatcccattgatcgagaaacataccttgatcgtctttcaatcaggtatgagcgtgaaggtgaacccaacatgcttgctccagtggatgtctttgttagtactgtggatcccatgaaggaacctcctttggttacagccaacactgttctttcaatcttggccatggattacccagttgctaagatatcgggttacatttctgatgatggagcttcaatgtgtacatttgaagccctgtcagaaactgcggagtttgctaggaagtgggtaccattctgcaagaaaatttctatagaacctagagcaccagagatgtactttagtgagaaaattgattacctcaaggacaaggtgcagcccacct

SEQ ID NO: 21512 - DNA, 341 bp, Glycine max
cgggacatcacagcaatggagtgattcggagttaggagcgactgaactaatcattaatttgcactcgctgtttgagcttcatcacccttcttttgcatcatttatatctcttgagaaatggcgcaagaaacctttctattcacatctgaatctgtaaacgaaggtcaccccgacaagctgtgcgaccagatctctgatacagtacttgatgcctgccttgaacaggaccctgacagcaagggtgcctgtgagacatgcaccaagaccaacatggtcatggtcctccgagagatcacaaccaaggccaacgtagactatgaaaagattgtccgccacacatg

SEQ ID NO: 21513 - DNA, 404 bp, Glycine max
atgatggcgaaaccgaattcaatttctaaacaaacaaaaaatcaatcaaaacaatttagtttttgaagaaagaaaaaacttacaaaataatagtttcttttttttaggaaatacaaaataactgtttctaaagattacaaatattgaacactttagtctttccaatcatttgagtaaacatttttaggcaccaatttagatcactaatgattttgtcatgaactaaatacacaattcactttttttaatttactcacatagcgtttgaaccagtagttaatgaatagtattgatgagatgtatagaattatcaatgattcaatgtattattattctattttgtatttaccgctaagaaaattttagattcgtgagaaatatttgctataggctcttaacgtagg

SEQ ID NO: 21514 - DNA, 420 bp, Glycine max
ggtgtagttccaccgagtagcaacaatgtcgaagcgaggtcgcggaggatcggcgggaaacaagttccgcatgtcgctgggtctgccggtggcggcgacggtgaactgcgccgacaacaccggcgcgaagaacctctacatcatatcagtgaaggggatcaagggtaggctgaaccggttgccgtcagcttgcgtcggagacatggatatggccaccgtcaagaagggaaagcccgatctccgtaagaaggtgctgcccgccgtcatcgtccgccagcgcaagccttggcgccgaaaggacgagtgttacatgtacttcgaagataatgctggtgttatcgtgaatcccaagggtgaaatgaaaggttctgctatcactggtccaattggggaggagtgtgctgatctgtggcccaggat

SEQ ID NO: 21515 - DNA, 220 bp, Glycine max
gcttgttggattgcaaaatcttcttgttcaggggtctccggactgggagtagagcctatgtgaggttctacgcacttccagatgttcaggcgatggacgatgatatagccagttaacctgtgccgccttgtggacaaatatattattggccaggatgaatcacactgacttgtgaaacagtcctattggcagcgggataaggtatgactgtttattatca

SEQ ID NO: 21516 - DNA, 416 bp, Glycine max
gacctcgccttcagcttccacaatcctatcgcacatctttctcagttctacgatggagttttggggtgccgaggttaaggttggagagtctgttaaggtagacccagccgaatttgaggcatgcatacacctttctcaggctgctcttggtgaggcaaagaaagataagcctgaaccggtggttctctacatgaaagttggtgaacagaaatttgtcttgggaaccctttccagggagaaaatccctcaaatatctctggaattggttttggaaaaggagtttgagctttcccacagttcaaagagtgccagtgttcatttctgtggatacaaggcatattacgatgccgataatagtgacgaggatgaatttactgatagcgatgaggatgatgaggatgttccattgataacac

SEQ ID NO: 21517 - DNA, 418 bp, Glycine max
ggtagtttgatcgtggaatttctttgtttctgtatttccggaatatgagtaaagtctatgattggttcgaagaacgtcttgaaattcaggcgattgccgatgatataaccagtaaatatgttccgcctcatgtgaatatattttattgtttaggaggaattacacttacttgttttttagtccaagtagcaacgggatttgctatgactttttattatcgtccgaccgttactgaagcttttgcttctgttcaatatataatgactgaagctaactttggttggttaatccgatccgttcattgatggtcggcaagtacgatggtcttaatgatgatcctacacgtatttcgtgtgtatctcacaggcggatataaaaaacctcgcgaattaacttgggttacgggtgtagttttggc

SEQ ID NO: 21518 - DNA, 414 bp, Glycine max
agaaggggaaggtgcaagagtttgttgtgagctataagctagtttatcgtgaggagaatatgaagttgtttgttttctttgttgctgcagtagttttggtagcatggccatgccatggcgcaggctaccaaaggttccctctccgaatgaaaactggctatggtgagcgttcttcggaggtaaaatgcgcaagttttaggcttgctgtggaagcacacaacatccgagcctttaaaaccattcctgaagagtgcgttgaaccaacaaaggactacattaatggcgaacaatttagatcagactctaaaacagttaaccaacaagctttcttttatgctagtgaacgcgaagtccatcacaacgacatatttatattcggcatagataacaccgtactctctaatatcccatact

SEQ ID NO: 21519 - DNA, 229 bp, Glycine max
ggtggcagttgtgtgacacagaaattaagctagagcttcatagtttcttcttcttttctcaccttccttctctcccttcagacaaagggacagaaaatcagtgtgtgagagagagagagagaaattgcaaaaccatgtcccacagtcatctaagattcgcctttgggattctaggtaacattgcctccttcgtgtgctttctggcaccactaccaacaatttatagagt

SEQ ID NO: 21520 - DNA, 161 bp, Glycine max
acgtgtccgcacacgcgtgcacacgtttgagagaagacaacgagaaggtgctactagtgtgtgagtgctatatgctagaacatcgtcatgtgattatgaaggtgtgcgtttgctttgtggctgcactctcaccggaaacatggttcctccattgttaactg

SEQ ID NO: 21521 - DNA, 431 bp, Glycine max
  modified_base (268)..(268): a, c, g, t, unknown, or other
agaagacgacagaagggcaataaaatatctcatatatttttcaaaaaatgatactattttagtgattaaaatcatttaagagtacatcttcaatgttgttatgtaccaaatacaaaaaaaaagtacattttaaatcagattaattatctttatctaaatatctaagaaatatttttatccttttgcatatttaactattggtgatatttaaaatcgtatttttttgtagccaaaattagttttttatagtaattctacttgattaatnttaaaaatataatatccacagtgccattcacatttcacaatttaaataatgtaataaatttttatttcataatattctatttcattttattttctctcatttcattccaataatctagatattacaagttctgattcacgcctatactgcataataggacatt

SEQ ID NO: 21522 - DNA, 381 bp, Glycine max
gaaaggcagtagtagtgttactttccaatttgaattgttccattttcatttctttcgcaaaagttgcaactacttcctcagaaaaaaagtttctaagttaaggaaatccagagagacaaaaatggccggtgacggtgcagctacatgcatagacatcctccttgccatcattctccctcctcttggagtctttctcaaatatggctgccaggtggagttctggatttgtttggtgctgaccctttttggttatatacctggaaatatctatgctgtctatgctatcaccaagtgatcaccctttaactttgtgtggacaataaacaaatgtcatgggcgtttctgtctttcaactcaaatattaggggttctttaatatat

SEQ ID NO: 21523 - DNA, 204 bp, Glycine max
tgtgagagcgtgacatggaccactgtcggtataaacattggcgacacgtgttaatctgataaggcacgataacattgggcgattggattgaatagaacctcaaaaaaactgcggtgggtctataagattcaagcttaccatcgcgtgcatgcaacgtcatagctcttttatagtgtcaactaaattcagactactggtgcggtg

SEQ ID NO: 21524 - DNA, 358 bp, Glycine max
gatcttccttctgttgtggagaagtacatgaatggggaattggaactggagaaattcatcactcacacagttccattctcagagattaacaaggcttttgattacatgctgaaaggggagtccatcagatgcatcattcgaatgggggagtaaatctatatcagaccaataatgacatgacatggtccctgttgggggactgagttctctttctggttgtgaaaagaagaaaataaatttcatatatgatatatatccctttaggattattgaatttgtgaaaacttgtgagtttgagtgtagagaatgatagggcctttgctgctgttattgtctaatgcatgataaataaaatgtc

SEQ ID NO: 21525 - DNA, 229 bp, Glycine max
ttatatactacagatgggggcataaaagagaggtgaggtgaactcccgtggtttgtggtaatgttgcatcgacacgtatcaactacaataatcgcatcgaagaagcagttttcggagcatatcatcgtctacgaaaatgaacgtatcatatgtctcgaagcatattcaacacatggtgcggatcatccgtcaggaagctgctgaaaaagccaacgagatctctgtctcc

SEQ ID NO: 21526 - DNA, 420 bp, Glycine max
gagtgcacaagtgagtttgttgatccagataactagaaacagggtgatgaaaatgaaggtccttgttttcttccttgctacaattttggtagcatggcaatgccatgcgtacgatatgttccctctccgaatgaacactggctatggtgcccgtactccggaggtgaaatgcgcaagttggaagcttgctgtggaaacacacaacatctttggctttgagaccattcctgaagagtgcgttgaaccaacaaaggactacattaatggccaacaatttagatcggactctaaaacaattaaccagcaagctttcttttatgctaatgaacgcgaagtccatcacaacgacatatttatattctggatagataacaccgtactctttaatatcccatactatgaaaaacatggatatggggt

SEQ ID NO: 21527 - DNA, 222 bp, Glycine max
gaatcgtgttacaaatataaaagtctatttgcgctgatcgggtggtttttgaatggtaatcactcacctctttcatacacgtgtgtaggctggttgagaagccatggccgaggatgtggagtgcctacgcgctggcaacatggatatgcctgaggaggaagaggatgagagtccaatcctgaaggttgtcgtggaaaaagagattcgcaaaatggcgttgag

SEQ ID NO: 21528 - DNA, 420 bp, Glycine max
gactgttctcttctcttctcatcatttttattttttccaatcaaaccaaacaaaacataagcaccgctcttttctctccgaaatccccatctcccttcacttctgagctctggacgagatcccagatctcaccatctttcacgcactcttccatcagattcaccctttcgtttaacgcaaactcataacttgaaggttaatggctgctccaccagcaagggctcgtgccgattacgattatctcataaagcttctcttgatcggtgacagcggtgttgggaaaagttgcctccttctgtgtttctccgatggttctttcaccactagtttcatcacaactataggcattgattttaagataagaaccattgagcttgatggcaaacggatcaagctccaaatttgggatactgcagggca

SEQ ID NO: 21529 - DNA, 416 bp, Glycine max
agcagatagattgtaacggagcatgtgctgcgaggtgccgcttatcatctcggccacgcctctgccaaagagcttgtggaacttgttgtagacgctgtaactgcgtgccacctggcactgctggaaaccaagaagtgtgtccctgctatgcaagtttgactactcatggtggcaaacgcaagtgcccttagacttaattggaccactatcctatgcatgcctttgatttatattataaaataaaaataatactatatataacatgttaattgcttaatatgtgctttaagagtaaagaataacatcgtgaaatcaaattacccctttttcaatacgtgttgaatcatcgatcttggtttggaattaggttgtatattcacaaaattaataagtatattgtgatgtgattaattccc

SEQ ID NO: 21530 - DNA, 306 bp, Glycine max
ggtggcttcgtgtcacagtgctgaataataatggtgatggcttcgtagttgtaagttgtgataataataacagaaaacgaaaccctcaaacgaagggaacaatgcgaatataagtgagagaagaatatatcaatatcgtctccaaatacgacgtcgttcaggttggagttttagcacaagatgtctctgagaataaaagcagtagtagataagtttgtccaagagttgcaggaagcgttagatgctgatattcatgataggatcatgaaggacagaaagatgcaaagttacatttaaggacgtgaa

SEQ ID NO: 21531 - DNA, 391 bp, Glycine max
gcgggtgcgggaggacgacggcgggggacacaaagaatcgaagtcatagttagaagatttagacgtttatccgtgattcggatagttctaatattacacttgcgctaaaagatgtgtttgattccgagagtctttggtggcagaaggagcaatgttttggatcctttgtctctccatgtgagggaccctactaaggatttatctttaaccactattctttctgctgagaaatcagcgttcgagagcacacgagtggattgtaaggagacaccagaagcacacgtgtacaaagctgatattccagggctgaacaacgaggaagtgatgctgtagatttaatatgacagaattcttcagataattctagagaggaacgttgagaaggaagaca

SEQ ID NO: 21532 - DNA, 414 bp, Glycine max
attgttagttactcgttgggttttttcaggccatttaccgtttagtgatttatatgaatcattaatatttctttcatggactttttccattttttatatggttccttgcttcaaaaaatctaaaaactactatttaaatacaataataacaccaagtgttatttttacccaaggctttgctacttcagggcttttaacgaaaatgcatgaatcgttaatattagtacctgctttacagtcccattggttaatgatgcacgtaagtatgatgatatagggttatgcaactcttttatgcggatcattattatcagtggctattttagtcattacatttcaagaactcatacaaattattggtaaaagcaagaatttctattttttaaatgaatcattttcttttgctgaaatcaa

SEQ ID NO: 21533 - DNA, 403 bp, Glycine max
gaaataaaattcaagtatcgaagaagaagatggctttaggtgttcctgctcttccgttgacatacgtggctcacgttctggcagttgttgccagcgtcttggtcgtggtctgggtcgtcaatttcaggggtggcttggcttgggattctgataacaagtccctcatcttcaacattcatccagttcttattgttattggcttactagttcatgggggtgaagctattataagttacaaagcttttcccctaaagaaggaagtgaagaaattgatacaccttgttttccatgccatcgcattaatattgggaatagttggaatttatactgccttcaagtttcacaatgaaagtgggattgccaatctctacagcttgcattcatggcttggaattggggttat

SEQ ID NO: 21534 - DNA, 422 bp, Glycine max
caagttgttatactggtcccaacccgagaattggcattgcagacttctcaagtgtgcaaagagcttggaaagcacttgaaaattcaagttatggttacaacaggtggtaccagcctgaaagatgatataatgcgcttatatcaaccagttcatttactagttggaactccaggaagaatattagatcttgccaagaaaggtgtttgtattctgaaagattgtgctatgcttgttatggatgaggccgataagcttctgtccccagagtttcaaccttctatagagcagctgattcattttcttcctacaactcgtcaaatcttgatgttttcagcaacatttcctgttactgtaaaggatttcaaggataggtatcttcgaaaaccttatgtcatcaaccttatggatgagctaactctgaa

SEQ ID NO: 21535 - DNA, 421 bp, Glycine max
gaaagaaggcgattcgtattcggtgagctggtccgtttcctagacgaaatggggtaagaattgaaagcatgatgattgattgatgggagcagcgaaccatataatttaatttaatttgtgtccacatgagaacgtcgtgacctgcattttctatctcgcaacaccgcgataatggacatcagtggaaatgatgtgagtctgaatgattacagcgggaaggttctactgattgtgaatgtcgcctctcaatgtggtttgacacagacaaattacacagaattgaatgtattgtacgagaagtacaacaatcaaggatttgaaatcttggcatttccgtgcaaccagtttgctggacaggaaccaggaaacaatgaagaaattcacgaagtagtttgcacaaggttcaaggctgaatttccta

SEQ ID NO: 21536 - DNA, 420 bp, Glycine max
  modified_base (408)..(408): a, c, g, t, unknown, or other
gacacttactagtagtaagcatggagtcctcaaagatctatgcttacctcttcctctgcatgatctttctctcttccgccactcccattctcggttgtggctactgtggcaaaccccccaaaaagcacaagcctggtaaaacaccaaagacacccaaaacacccgttgttaagccaccagtcaccatccctcccattaatgttcctcccgttgttcttccaccaatagtgaagcccccaggtattctccctccaattccaattattaacccaccaaccacaccagggaagggagggaacactccatgcccaccaccaaagtctcctgcgcaggctacgtgccccattgacacgctcaaacttggtgcctgtgtggatcttcttggagggttggttcacattggttagngtgaccctgttg

SEQ ID NO: 21537 - DNA, 410 bp, Glycine max
gagtgcatcatcgtcaacaaatggggaaaataaggggtctgtgaaactgttcaatcgcctctacatacgcgtgctcaagtgcggcaaacgtatggtttggtttgacccgagtgaagataacgaaatctccatggccaattttctttgtaacatcaccaagatggttaacattgggtatattgatacgaatcttactgatattcactcactatcacatgctcgtgggattattgacgcatacaggaatgttcccctctccaattatggtaaacgtaagggtacacgggaggcacagcttaccaccatgatactctggatgagaaggatgcgtgcgctcatacggttgcatcgaaagaacagggaatgaaaaaatatacgacatgcacatgtaccatgataagtgcatgaat

SEQ ID NO: 21538 - DNA, 411 bp, Glycine max
ggggctcaagctttatttcacgtagcttacttgaccgtctgctcaattggaatagttttttgctatgttcgcatgcaagtgtgacgatccattaatgcccttatctgcttagaaagaaccggcgtcatccaaacatggtgaagaggtggcaactggatcaataatagctgaaacttatacttcacagtaatgggcttgcccatctgctcaagcttgtaatgtattctagaagatgcttaactccacttactgctattaaacgatcgatttcatgaaaggagggagggaatacttcatgcgcaccaccaaattctagtgcgcaggatacattctttattgacacgctcaaacttggtgcctgtgtgtatcttcttgaagggtttggttacattgtttttgggtgaccctttt

SEQ ID NO: 21539 - DNA, 276 bp, Glycine max
agggggacagagagatagagatagggagagtgctggatcatagacgcgaaaacttcaatcacaacatcaacacttgaatcctgatattcagagtagggtctctctattcttaaatgatccaagggaaggtagtatgataacatgacttaacaccgagctcccatatcttgcctcatactcatctatagctatctcaacctatttgtctttgccagcgactctgtttgatgctaatccccaatgactgaaccttgcaaggtcattcacgatctaaat

SEQ ID NO: 21540 - DNA, 350 bp, Glycine max
ggcaaaacttggaagacccaccgtggcatacatgatggaagtgacagtgactctgaatgagttgatttgcattcttggacaagaactgtctgtcctttgatgagatctacttcagcaaatattttcgttgattctctacaaaacttaaaggttgttacagatcctaattaaggcttatagagttacattatccataatgattcataggttcatatgatcaggctcacatcactattataggaactctgatagcacagaatctgagccatgggatactggctacagagctgtcaatgtgtccagcgtacttgagacccaatgtgttctactgcaacctgaaacgttccata

SEQ ID NO: 21541 - DNA, 411 bp, Glycine max
gacagatggataagttttggtagcggtgtgatgagagaccaaaaaagcgcgagcaaatcttcacacttggaaccttaaattcaattaaggttctctctcttgtaaaatgctccaagggaagggagttttataacatgacctagtaacgattcaccacatcatgcgtgccactcctctttaactctctcatcctttttctctttccgtgtcaccctctttcaggttaatttgcaatgactgaaccttccaaggtcattcacgttcgaaatgtggggcacgaaatatctgaaaatgatttacttcagctgtttcagccttttggagtcataacaaagcttgtcatgctgcgtgcaaaaaatcaggctcttatcaaatgcaagatgttccttctgcagttaatgccttacaatt

SEQ ID NO: 21542 - DNA, 406 bp, Glycine max
ctgccactctagaaccagggtttttttttaatcaattccaatgtatagttgtcatggagaaacttaatctcttcactcatggaacttagccatttttctttctccttactagctaagacaactttaagagtttttggatcttcctctaaaacttcactggcagctaccaaagcaaatgctattagatgagcatatccatacctttcaggttgttcgattgcccttctggttctatctcgagctagtatattgccagcttcttcttgatgtttttctatagatttctcttcatcaagaggccaattaacaacttgcgttatagcatgctagacctcagtctccaccttaaaatttaatttttcagagccagtttccttactctgatcagtgctagactgaaccatgc

SEQ ID NO: 21543 - DNA, 313 bp, Glycine max
gactgggggatgaggcgatggcccgaggaacgggtgccaatattcgcattgccaacaaatttttgaatggagaagttgcacctaaaactatatatattccttctggggagaagttgtcagtctttgacgtggcagagaaatacaagagtgaacggcatgatatgattatcttggctggtgctgagtatgggagagtaagctctcgtgattgggctgcaaaggggcctatactactggacgtgaaagttgccataccaaacagttttgaaaggattcaccgaagtaatttggagagaatgggtataattccttt

SEQ ID NO: 21544 - DNA, 53 bp, Glycine max; identical to SEQ ID NO: 1282

SEQ ID NO: 21545 - DNA, 219 bp, Glycine max
gtactcgaataaccgaagtaagggtagagctagtacgtgcaacaaaccccgacttctggaagggatgcatttataacataaaaggacaacacaggctctgtctggtgctatgctgacacatgaagactctttagatcatgaggtctttgcgacgcagcacattatgcgagacagttgtcctaaaaactttcaatggtaggatagcggcctaccatgctg

SEQ ID NO: 21546 - DNA, 345 bp, Glycine max
ggggctaaaagctaaaaatcatggaagtactgaaattagcatggctgttacggttgcattcttgaatttgatcattatgtttatagaactcactacttgcaagtcactgtgcttaaactactattcaaaaacacgccctgatagtgtaatgcattgctgccaatgcagtgaaggatgccactgctagggacataactgttccaattgctcttctgcggatgcacttccatgactgttttatttggagctgtgatgccgccgggctgttcaagtcgaaaggaagtagcatagtataaatagataggccaacaaacgattctttgcatgcattgcatgtcactgatg

SEQ ID NO: 21547 - DNA, 335 bp, Glycine max
gggaagagtggagtaaggacgtgtgttagctggttaatgaggagtcctgatattcttcttcgtcttcatcggaaccctaaccccttcggaatcggaagaagaatcattaatggaaggagtgctgtccgcgaacgagcaacagagcatggtctcttccttcctcgaggtcgctcagggccagaccgtcgagactgcgcgccagttccttcaggccacaagttggaagcttgaggaggctcttcagctgtttctgataagaagtgaaagtggggcagtgccgattccggtgccgcctccgccggtgttgcacactccgcctttggaaaatgtcgatt

SEQ ID NO: 21548 - DNA, 346 bp, Glycine max
gatcccaatcagaaaaagttagggtttgtaactgtgtcttttgcttgcgaatctgaatcgaataataatcaatcaatcatcatgtcgtcggcgaagaagatcacactgaagagttcggacggcgaggctttcgaggtggatgaggcggtggcgctggagtctcagacgataaagcacatgatcgaggacgactgcgccgacagcggcatccctctgccgaacgtgacgagcaagatcctggcgaaggtgatcgagtactgcaagaagcacgtcgaggccgcgaatcccgaagacaaaccctccgaggacgatctcaaagcctgggacgccgatttcgtcaaggtcg

SEQ ID NO: 21549 - DNA, 224 bp, Glycine max
cacacgcgttcggagagaagacgacagatggggagatagagagtatcggtcgtcaccatgacttttaagcgcaggattggaggtcgcaacaaacacggtcgtggtcacgttaagtttattcgatgctccaactgcggcaaatgctgaactaaggacaaggctatcaagaggtctcaggtgaggaacattgttgaacaggctgcagtcatagatggctatgaggc

SEQ ID NO: 21550 - DNA, 397 bp, Glycine max
ggcattatatttgagttcaaacaaatcaaagccatggccacctccaacttctctattgttctctccgtctccctagccttctttttggtgctacttaccaaggcacactcgaccgataccgtttctttcaccttcaacaagttcaacccagtccaaccaaacattatgctccaaaaagatgctagtatttcatcctctggggtgttacaactcaccaaagttggcagcaacggcgtgcccacctcgggatctctcggtcgtgccctttacgctgccccaatccagatttgggacagcgaaaccggcaaggtagccagctgggctacatcctttaaattcaacattttcgcacccaacaaatcaaactcagctgacgggcttgccttcttcttgcacc

SEQ ID NO: 21551 - DNA, 382 bp, Glycine max
ggcagcgcttgatttgaggccaggcaagccccactcaaccaccacacctctcctcgttcacgctacccctttctgctcttcttctacctttcaagttttaaaagtataaagatggcagagacattcctatttacctcagagtcggtgaacgagggacaccctgacaagctctgcgaccaaatctccgatgctgtcctcgacgcttgcctcgagcaggacccagacagcaaagttgcctgcgaaacatgcaccaaaaccaacttggtcatggtcttcggagaaatcacgaccaaggccaacgttgactacgagaagatagtgcgtgacacctgcaggaacatcggctttgtcttaaatgatgtgggactggatgccgacaact

SEQ ID NO: 21552 - DNA, 406 bp, Glycine max
gccttgtgcattcatgacttttggaggctacgctgaattcttaatgattccttcaaaacatgctcttccggtgcctagaccagatcctgaagttgttgccatgcttacatcgggattgactgcctcaattgctctagaaaaggcaggacagatggaatctggaaaagtggtccttgttactgctgcggcaggaggaacggggcaatttgctgttcagctagcaaaattagcaggaaatacagtggttgcaacttgtggaggtggggcaaaagccaagcttctgaaagatttgggagttaacagagtcataaactatcatagtgaagatgtaaaaactgttctaagggaagagttccccaaaggtattgacatcatctatgagtctgttggcggtgacatgttaaac

SEQ ID NO: 21553 - DNA, 411 bp, Glycine max
ttagtggagtggagaatcaagaccatcttgagaagaaagtgaatggaggggttgatgcctctgtgaagggaaagatggcatcttcctgaaagagggtcttttttcaagctgttgtatggttctcttggcatagagtgtctgaaacaatggggatgctctctccttgaacttgagaacagtgaagaagagaagtctgtaacatatgagaatcacaaatagagctgctaagtcccaccacttggaatggtttaattcaatgcctaacatgtgtgtgatgacgtattctgcactcaattttgggtcaccaggtaacagaggatcaaactcaagcccaagcaagtcattcttgtaggaaccctgcaatgcattaattatatatatttcaaatcataaaatcaatataatgcatca

SEQ ID NO: 21554 - DNA, 440 bp, Glycine max
  modified_base (369)..(369): a, c, g, t, unknown, or other
ggtgatagataaatcaaaatggcttgagggggcttcgttatccatcttgctaaactttagtaccagagtttgcagactgagtggctcggtgagttagtgagcgaaaacgatagatagcattaccatgttggttggataactgaagtgagtgatgatttcaacttcaagcatggctttgctttctttactacccaaaacggcaccgcatgccctttccctcacaaacccttcctcttccactcccctcatcttacctttcagtttccaatgtttgcctcaccctcttccttctcctctctcttccctcaaagctacttttttccaacgggggcaacatttgggccggaaagcccctgtttcctcaggccnttgaagaagaagatgacgacgacgacaacaaatgggttgactgggaggacctgattttggaggacaccgtt

SEQ ID NO: 21555 - DNA, 441 bp, Glycine max
tttaattctgaaaagtaaaggcgaaagactttaggtggggtattgggaattagggttgttcgcgtcacgaagatgatcgaggtggtgttgaacgatcgattggggaagaaggtgcgcgtgaagtgcaacgacgatgacaccatcggcgacctgaagaagctggtggcggctcatacgggcacaagagccgacaagatccgcatccagaagtggtacaccatatacaaggatcacatcactctcaaggattacgagatccacgacggcatgggtcttgaactctactacaactaaacacaaggtgtgttttatgcatgatatattactatgatctgggaatgggatgaggcgccaaatgtaattttgacttgcgaaagtccctatgattcgaataatgtacattcccgaatgatattgggtattacataccgatgacaccct

SEQ ID NO: 21556 - DNA, 429 bp, Glycine max
  modified_base (397)..(398): a, c, g, t, unknown, or other
  modified_base (400)..(400): a, c, g, t, unknown, or other
gcacatgtgagtttgttgatcgagataactagggacggtgtgatgaaaatgaaggtccttgttttcttcgttgctacaattttggtagcatggcaatgccatgcgtacgatatgttccctctccgaatgaacactggctatggtgcccgtactccggaggtgaaatgcgcaagttggaggcttgctgtggaagcacacaacatctttggctttgagaccattcctgaagagtgcgttgaagcaacaaaggaatacatccatggcgaacaatatagatcagactccaaaacagttaaccaacaagcttacttttatgccagagacctcgaagtccatcccaaggacacatttgtgttcagtatagatggcaccgtactctctaatattccatactacnnanaaaaaaaaatatataaatttaattatgcg

SEQ ID NO: 21557 - DNA, 369 bp, Glycine max
gatctctttttaagtttgttgtctctagtcgaacccatgccagtctcagctagtccagcgccactgttaggggatcgactgtgtgaaaatggatttgagtgtgttaaaattctccctgccaccaatgatgcacatggaggagtcattgtggacttaaaggagcctttgcactccgaagtttttgctactttgcttagatcttcacttttacattggaagcaacagggaaaagatggtgtttggatcaagtttcctattgagcttgttaatcttgttgaaactgcagttaaggagggtttttggtaccaccatgcagagccaaactatctaatgctagtttactggattcccaaaactgactgcacaata

SEQ ID NO: 21558 - DNA, 185 bp, Glycine max
gaccgctgttacacgacgactgattgattcgggcccatgtcgacatcagatggttacacccgactgatgacgacatcaagtgtctgaaactggatgacgacatgaagagatacttcatgtcagcgcagactcactgctgagagtcagcatgtgcttaaaggagcctttgcactaccaaattcttg

SEQ ID NO: 21559 - DNA, 418 bp, Glycine max
gctgacgtttattatctctcatctagctgaatgtcattggtttgacaggctttaaaggttgattcaacaaggatgctcattgctgaaggtggagtcaacaatcttgcttctttgcacaataattatgccaatggacccaatacctcatctgaaaaaggcatactagttaactatactccgactgcaaatcattctaactcagatctagagaagctccaaattctttcagattcaaaaaagatattatctcaaactgccctagctgctttgatacgaaagatgaatgaattggtaaaacttttcattgctttcttctaattacaagaatgattatactttatatctattctcagtagctatgcatgggcacactgaggacatacacttgatatactagaagaacatatatacatgttcc

SEQ ID NO: 21560 - DNA, 405 bp, Glycine max
gatttattcggcgagtgtcatttccttcccttccctcacgatctgaggaagacaccaatcttctctccacgcccttcttgggtaaccgtctgaagtgcagcaatggcagatggattgcattcgcagcatccatcggtagttcagaagttatctggacagtcttatcttgtgtccaggcttgctcctaatcactccagaaactgttctaccactggtagctacttcaatggaggtttgcagtcttcaggtttggttccagtcacggcacacgcgccggctgagaaaggggtgtctggattttcgttggatttcctgatgggcggagtgtcagcggctgtgtccaagacagatgcggctgcaatcgaacgagttaagctgctcatccacaaccaggatgaaatgatc

SEQ ID NO: 21561 - DNA, 421 bp, Glycine max
  modified_base (355)..(355): a, c, g, t, unknown, or other
ggaggacttatggactatgcatttgagttcataatcaacaatggcggcattgattctgatgaggattacccataccgtggtgttgatggtagatgcgacacatataggaaaaatgctaaagtcgtttctattgatgactacgaagatgttcctgcctatgatgagttagccttgaaaaaggccgttgcaaatcagcccgtgagcgttgctattgaaggagggggcagggaatttcaattatatgtatctggtgtattcacggggagatgtggcacagcactagatcatggtgtcgtggctgttgggtatggaacagctaaaggtcatgattattggatcgtaaggaattcatggngttctagctggggagaggatggctacatcagattagaaagaaatcttgctaacggcagatcaggca

SEQ ID NO: 21562 - DNA, 292 bp, Glycine max
gacggacttatggtctatgtgttagagtacatcataaagattcgggtgattgattatgatgaagagtacccgttccgagagactaatgatggatgctactcatatttgatagatgctaatgtatgctctatcgatgactaatataatgtcggtgcatttgattagataatcttgataaaggatgtagcatatctgacagtgatcgttgttatttttggaaggagaagggaattttaataatatatatctatcgcgttcacgactagatgtggatcattactatatcatgttg

SEQ ID NO: 21563 - DNA, 469 bp, Glycine max
ggccgcttttttttttttttttttttttttttttttttattatttaatttttgcaattggatgaataaaattgggggttggggctgaaacctatgccttttcagctgcaccaatttatttcatttttagggtttggtgaactatatatattttcgtcaaaatgaatgaaagggacttttgacattcttttcaaatacgtgagaaagcttatctcagggttcctgttgaaccaaattctgacttatcaaggttgattccttgtggcgtcaccgtgacttatcttccatctctggaagtggcgtctctctccgtcaacatttctgtatcaaacgttctgccccgtaaggttcacgtcagaaggggatacagaaggggtgtggggagcaggagttatttagatgaaacttgagagagggaacaggtctgtgtattctgttaaatagagatattaaaagtaaggaggggtcat

SEQ ID NO: 21564 - DNA, 415 bp, Glycine max
ggactctgcagcagcaactttaaacgccgaagaaagttcatccaatctccgaagcccttcaccgcattgcaaccatgtcgagaagaaaggttagagagccaaaggaagaaaacgtgactctgggcccagctgttagagatggcgaacatgtctttggcgtcgctcgcatctttgcctccttcaatgataccttcattcatgtcactgatctgtccgggagggaaacacttgtccgcatcacaggtggaatgaaggttaaggctgacagagatgaatcgtctccctatgctgctatgcttgctgcacaggacgttgctgccagatgcaaggaactgggcataactgctcttcacatcaagctccgtgcgacgggtggaaacaagacaaaaacacctggtcctggtgctcaatcagc

SEQ ID NO: 21565 - DNA, 373 bp, Glycine max
gggtgcaacttatatatctggggggcaacttcacttaatgtcaattagttttaagctgaaatctaacatggtattagagcccatagcccatcttggttctcgcctattatagtaggcttgcatgttctgacagacatctgtggaggggggtgttaggaagtttcacattgtctgcctcaattctcagggtgcaacttatatatctattgtgtaactttacttaataccaattgattttaagttgaaatctaacagaaggaaggggtaggggggcaattaaagaagcaatgccaaggcatgcttgtgccttttgctggaagataagaaaaagaaattacagtgttagataatttaagaatcaaatgtaaaattt

SEQ ID NO: 21566 - DNA, 433 bp, Glycine max
gacactaaaaaaaaaaagaaaaaaaagtcttaatttgtttcttgttttctctgtcgtttcgttcccttaatctttgatctctgagttacaagttataacaaaagaaataaacaacacatataaatatttgtaagaaaatatatatatgatcatgggttttcttcacaaactatgggacgaaacgttggcgggtccagcaccggaaacgggtctggggaagctccgaaagtacaactcgttctccggcggaagctccgtccggtcaacggtggcggagcatgttccgataagtcgcagcatcaccattgttcgcttccaatctggtttcggaaccaccaccaccacctctgctccttctgcgcctaccacccctcgcacccccttgactccggaggcaccaggcggtgatttcaagaagctcacgaggagaaaa

SEQ ID NO: 21567 - DNA, 315 bp, Glycine max
ggcgattgttgagttgacgagtgaagaatgaatgagagagagtgtgtgtgtgtgtgattcacattctgatcttgaatcgaatgcatctacaacttcatggctgcggcgatgaggatcgatttatgtcttctcacttttgtcaccgtcagaatgattataggcgctctctctcaattggacataatacaaagatgggaaaactctaacggcaccgattctttgccatttaaaaaattgcttgaactcgaaactgatcgtcactttaaattgccaaaaggtgttcctttttggattattgacacggaagcagaattc

SEQ ID NO: 21568 - DNA, 426 bp, Glycine max
ggactctgcagcagcaactttaaacgccgaagaaagttcatccaatctccgaagcccttcaccgcattgcaaccatgtcgagaagaaaggttagagagccaaaggaagaaaacgtgactctgggcccagctgttagagatggcgaacatgtctttggcgtcgctcgcatctttgcctccttcaatgataccttcattcatgtcactgatctgtccgggagggaaacacttgtccgcatcacaggtggaatgaaggttaaggctgacagagatgaatcgtctccctatgctgctatgcttgctgcacaggacgttgctgccagatgcaaggaactgggcataactgctcttgacatcaagctccgtgcgacgggtggaaacaagacaaaaacacctggtcctggtgctcaatcagctcttcgtgccc

SEQ ID NO: 21569 - DNA, 315 bp, Glycine max
gaagtacaattcaagtatcgctgaagaagatggctttaggtgttcctgctctttcgttgacatacgtggctcacgttctggccgttgctgccaccgtcttggtcgtggactgggtcgccaatttcacgggtgtgcttgcttgggattctgatcacacagtgcctcatcttcagcattcatccacgtcttattgatattggcttactaggtcatggcggcgaagctattataaattacagagctttttccctacctaacgaagcgaagagattgacacaccttgtttgccatgccatcccattaatacttgggata

SEQ ID NO: 21570 - DNA, 345 bp, Glycine max
  modified_base (306)..(306): a, c, g, t, unknown, or other
gatcatctcatatttctcatcaagttactatctataattaattaaattcctcgtggaatattgaagaagccatgtctacagctgggcaggtcatcaagtgcagagctgcggtggcatgggaagcagggaagccactgtcaatagaaaccatagaagtggcaccaccccagaaaggtgaagtgcgtttgaggatcctcttcaactccctttgccgtagtgatgtttattggtgggatgctaaggaccagactcctctgtttcctcgtatcttaggccacgaagcttcagggattgtggagagcgtgngcgagggtgtgacacatctgataccaggtgaccatgcac

SEQ ID NO: 21571 - DNA, 337 bp, Glycine max
cgccgaaggagaagacccttctgcttcccgatcccgccaagcctcctgccaaggcgcaagtggtgggatggccacccgtgaggtctttccggaagaacatgttcgcagcccaaaagagcagcggcggagaggaaagcgaaaagagcagccctaatgcaagctttgtcaaagttagcatggatggagcaccttacctccgcaaagttgacttgaagatgtacaagagttacccagagctctctgatgccttgggcaaaatgtttagctccttcaccattggaaattgtgaatcccaaggcttcaaggatttcatgaatgagagcaagttgatggatct

SEQ ID NO: 21572 - DNA, 236 bp, Glycine max
acagaaggagaccaccaggttatgtcataaatcgtaacctcggacttagaaggggaagggcccagccttgatgtctatcgaaaacggtaggtctgtataccgaccaagctgaccgtgaagatcatacattcactctacaaacgtgcttgcttatgtctatcacaacactgatcgctgctgacattcctatggtgacatccatgggtggatgcggttctccgggcgtggactgctcc

SEQ ID NO: 21573 - DNA, 330 bp, Glycine max
gacactcactctttgactcttcgtcgtctcaaatctcttcgttccttcgattcgttccatttcttccaaaatggccaaagacccagttcgcgttctcgtcactggagctgcagggcaaattgagtatgctcttgtccctatgattgctaggggagtgatgttggatcctgaccagcccgtgatcctccacatgcttgacattcctgcggcagcagagtcattgaatggggataaaacggacttggtggatgctgcattccctcttcttaaaggtgttgttgccacaactgatgtggtcgaggcatgcactgatgtcaatattgccgtgat

SEQ ID NO: 21574 - DNA, 439 bp, Glycine max
atcaaagacacatgtcaaaaatggaacttcatgtaaaataaactatggaactggatcaatatctggtttcttcagtcaagataatgataaagttggcagtgctgttgtcaagcatcaggatttcattgaggctacccactaaggaagtcttacctttctgtcagcaaaggtcgatggaatactgggacttggatttcaggagatctcagcagaaaatgctgagcccgtatggttcaaaatggtggatcaaaaacttatcaatgagaaggtgctctctttttgactcaatggggatccgaatgccaaaaaacgtggtgaattagcatctggtggtgttgacccagagcacttcaaaggagaccacacttatgatccaattactgaaaaacgttactgacagattgaactgtgagattttctcactggatgcgattcaaca

SEQ ID NO: 21575 - DNA, 422 bp, Glycine max
ggcagacagcaataatcaattcaattacattacatagctgcctgcaagcaccaacctccttctactctcttctcctctttttctctctcgcgcccaattcaccttcaccgattcactctctctctccccacctcctccctaatttccgtcaaatccttgatcggaacagacgatcggaagcgaacgccactccgtgccggagtcttctagaaggtggattggacttccataatttcaatgaatatttgttagcttcttcgaaaataacttgatggaagacaaggaagaaccaaaagagataaagatatctggtaatgaattagatactgatgaaataatacagagtggtgtaaaacaatttgttgagagtcctcatcacgaaaatgtaaattctagcagcagttttggggttgaacttatag

SEQ ID NO: 21576 - DNA, 446 bp, Glycine max
taatcataatttataattgtcatttttatttggaggcgtggttttctggaaaaaaaattggtcacagagttggcagaactagaaaggaagctcaaaataaggctgctgaggattctatcaaacatttggcaggtaagatattctaaattttttcattgtgacttgctatagtattatctagtctacatttttttgccttttgtaatttttgtcccctccaaaaaatacatatggtagtttatatttttaaaaaaattcaaaacatcaaaagcatagcctgccttgttaaatcaacctattggcttgatattgaggtttagttaatgatgttttaagctcatgcatggtcctgccatcaataaaaactcagtgtataccttgttagagatctaaaaccatttttgggcattcttcttatagctttagctttctaagggagttgatct

SEQ ID NO: 21577 - DNA, 426 bp, Glycine max
tattattcattattaaaaactaatgtaaatgttcaagtttgttcattattatttattaaagaaatcttcacctaagtttaagggattgtcggggcatggcgaatcggccccaaccttaaaaagatttatttacaatttttttaatgttgttaaaataaattatttagcttctactaggactggaaataagtcgagtcaagtcaagctttattaggcttgaattcggcttgagttgaatacgcaaggcttgagcttgactcattacctgacatagactttttttaaaggctcgactcggattacataaaagtctggcttggcctacgagcctatttaaaagtctacctaaagacgtctttaaccaattaattgttttaaaacctagtgaaatactaactaaaaaacgaaacttataaaatttcatat

SEQ ID NO: 21578 - DNA, 318 bp, Glycine max
ggactgtcaagctgactgactcggctctggagtgtggctgcgtcactgattcaacttatcagaacattctattttctcaatcagctgaaagggactgcctctgcgaacacaccaacgtctgctacgccttctcctgttctaagccggcgaagtctatcaaagagattatcaaagtccaggagaactctgtccatgtgtagcttgccctaaacgcgcttctaattagctctatatctcaccgtatattagacatgcacacacactcctaaaagctcaggtgcgatatgatagatatcttagcatagcgatgctcattac

SEQ ID NO: 21579 - DNA, 411 bp, Glycine max
  modified_base (74)..(74): a, c, g, t, unknown, or other
gaaggatgcttcttcaattccctttccttttttcttagctttgaagaccaactcatttcaacttaacccatcanaaccatcgctctctattttcgtcctttctacctttctccgatcccaatccctaatctttctctcttcaaactctaattttttcatctggggagatcggctgacgaatcgagaggatctcatcgctcgcaagggattagggtttcaatcgatcgcatcacatatcacaatcatgtttagccggatgttcggtaaacctaaacaggaaaccaatgctgttgccactttggacaagctaaacgagacacttgaaatgctggagaaaaaggagaaagtgctccttataaaggtggcagcagaagttgaaaaggccaaagaattcacaaggtggaagaacaa

SEQ ID NO: 21580 - DNA, 419 bp, Glycine max
gaagaaaagacacgttagcgagtctaaggaatgagaatggcgctatcttcatcttcatcaccaccgcttcttcccttcgatctccaacggcaccgtttagttagcctcaaaccctatactcgttctcgttcttctcagtctcagcacaccgtcaccgtcaccgtcaccgccgctaaagctaaagcttcttctgctactccgttagtttactccaccagacaagggtttgacaccgtcaacattgccgaagatgtcacccagttgattggaaatacgccaatggtgtacctcaataaagttacggaaggttgtgtggctaacattgctgcaaaacttgagtctatggaaccttgccgaagtgtcaaggacaggtaggttatacttttattcatcagaagaagattaatgctaacaatacc

SEQ ID NO: 21581 - DNA, 379 bp, Glycine max
  modified_base (357)..(357): a, c, g, t, unknown, or other
  modified_base (360)..(360): a, c, g, t, unknown, or other
  modified_base (369)..(369): a, c, g, t, unknown, or other
gggcacctttttggattccacgggggacactgtaaagaaaaaggaggaagaaacaccattgtatcacttaccgcatggacattgttccaaagacactcttttgtctatcacagaaatctacaccatttataccacacctcgctcgatgtgattatagtgattattacacgatatatactcttatcatgcgctatacgcagtacatatgagctgtgttttttgcccttgtgtgtgaataatatagctgtggaacactctgacttacacactgaggtgagacactatgttgtgctctgatatgtgagctctccactgagactgtgttatatgtaaatgagctctattattttgcgtctnccnaataaaaangacacaaaaa

SEQ ID NO: 21582 - DNA, 395 bp, Glycine max
gcatggagaacatgaagatgaacaacgatgaaaggtttgcacaaaagggtgtcccagttcatagccaggttatgaagatcaagcaagagtcagagaaaattgttgattggtctcctggcaagccagagataagatctgttcttcgcgaaataagccggcaaatttcccgatcgccgttggggatctccggccaaccgatttcagttggtgagtcataggttcagtatatggttaagggtttttggattagtgtgttgatgtacacaggtggaagagggaggttctgtttgcttcccctgctcctgttctgttttcctctgttttttggtcagagaatatttaggcatttagctatattctccactttttttcttttttctttttgttggatataa

SEQ ID NO: 21583 - DNA, 266 bp, Glycine max
cgaaggcctaagctaccaggagctcgctatctacagagtatccctctctttctctctctgtctgtgcaaaagctacgactctgtggtagactcctttagattaggcagtaagcttttatggggagtgtaaatggatgcttcgccgaggattagatcaacttgatcttacttgaaataatttagaaattttgacggactccgaaactaattctagagctctcccagaacaccatcagaatacgtgtgagattcagacccttgatgca

SEQ ID NO: 21584 - DNA, 413 bp, Glycine max
  modified_base (398)..(398): a, c, g, t, unknown, or other
ggtgttaagaaatttaagtgaggagctagagaatgatgatgaagtctgctatgtgtgcagtggtggttgtagcacttcttcttctggcggaggtggggcccatggctgaggctgtgacatgcaccccaacagagttgagtccgtgtcttccagcaatcacttccggtgctaaaccttccaatgcttgttgcacgaagctgaagcagcaaaaaccatgcttatgtggctacctcaaaaacgctagcttgaagcagtatgttaactctcctaatgcccgaaaaaccgttgcttcttgtgggattccctttccaacttgttaattaattaagccttcttataattaaagtgtgggatatatatatatatatatagataaacagtttaatttatacacactntgatcctacaaagca

SEQ ID NO: 21585 - DNA, 245 bp, Glycine max
  modified_base (55)..(55): a, c, g, t, unknown, or other
ggcaccgcttcatcactatcaccatcccaaaaacggcgtgtgcttctgttcgttntccaaatctcctctatgtttctgaatcttcccttcgctgttgcagagatggcttcgcggtgctggccttctgatgctgagctaaatgaattgagagagagagtttcgaaaatagtggatctgaataaagaagaagttcgagttgtggtatcttcctatcgaatatgtcccttgggggcacacattgatca

SEQ ID NO: 21586 - DNA, 347 bp, Glycine max
atagaaacaaggattgaagcttgccttctcagggaaagaggaagtgaagaaacataagcaggactagtgaggcacacaaggaagaagaacatgcaaaagggtacaaaactgaaagaagaaagggtagccatttgtgagaaaaatggtttagaggagtagcatatgaaaggaaactaatacactatgagagtgaaatagcaatgacaacatttcatagaccttaaaaagttaaactgattatacactaacaggattgataaggtgatttctctaatgaagagtatagaaagctagcataacactaacagcatccaatgttctctttctttctcttcccttaacacttt

SEQ ID NO: 21587 - DNA, 373 bp, Glycine max
gactcatggcaacaaaacctcgtttggcttatctggctggcatttttgttcttcttctagttgtcttcacttctgtgacggcacaatccccagggccagaatcttcatcactccacgacaccttccttcaatgcctcaccaaatacacaaaaaactcctcatctcaactctccaacatagtcttcgctaacaccaaccccaagttccccactgtcctccaaaactacatccgaaacgcgcgtttcaacacctcctccaccccaaagccttcactcatcgtcactccccagaaagaatcacacgtccaagccactgtaatctgcgccaaaagcgttaacattcaactcaaaatcagaagcggaggtcatgacta

SEQ ID NO: 21588 - DNA, 451 bp, Glycine max
aagacgacagaagggtaagtactgatggctaggtagccagctaaaaatattggataatttatgtgagaaatcttagaattctgatgagtgtttctctagacacgctaattaacttggcggaagacttagctagcagcaccaagaaaagaaaaggagagggtttatgttgttttcacatatatatacatgcacatgcatatgcagtcactaattatgaaatgtaccgtgattttggtatactgaaattcctggaatgggaggggttgctagctccctgtaaagattggatagtagtataggattatacttgcagagatttaagttagcttaattaattataggattcataaaagttggggagggggtatatatataatgtatattggatattgtgtagccagttatgtagatggatttgaatgatttcttttgatttgatgctatatatatt

SEQ ID NO: 21589 - DNA, 418 bp, Glycine max
ccaccggagggggagtagtaaaaaaaaaaccatttggaaggaagtcaagggttttttttgctttttttcgttggcttaccttttaacatgggtgaaaagagcaccgttggcggcgacacgattaacacgacactgcttcacgggaagtacgagctgggccggctgttaggccacggaaccttcgcgaaggtgtaccacgcgcgccacctgaagacgggaaagagcgtggcgatgaaggtggtgggcaaagagaaggtggtgaaggtaggcatgatggatcagatcaagagagagatctcagtcatgaacatggtgaagcacccaaacatcgtgcagcttcacgaggtcatggcgagcaagtcccagatctacatcgccatggagctcgtccgcggcggcgagctcttttcacagatcg

SEQ ID NO: 21590 - DNA, 155 bp, Glycine max
accacgcctcacgacagatgagagaagcgacggaaggcgtgtttatgtatgaaatactggtagctgggaaacagcgaatggctctgtttgtttctcttagctcgcttgatggcttgtctacaaaaataaccgtggccactatacagataacacga

SEQ ID NO: 21591 - DNA, 389 bp, Glycine max
gataacatacaagaaaactatcataagtgaccaaaaaagacaacctttggggaatcataaaattcttcagaatggctcgcacaattacaattgcagcaatgtgtcttcttctctcattagtgtccctctgtgtcaccaccaacgcattaatgccatacacacgtagcaccctctgggacatgatgctccaatccgaggacccatttggaatcttggaacagaacccattcaacaacatacccaacatcagaggaggagccgagactctcgccctggcacgtgcggattggaaggaaacccccagcgcgcacgtgatagtgctggacctacccgggatgaaaaagaaggacgtgaagatcgaggtggaggagagtcgcgtgttacgtatc

SEQ ID NO: 21592 - DNA, 416 bp, Glycine max
attgatattgctgttaaagcagcacgtcaggcatttgactcgggtccatggcctcgcttgccaggctctgaaagggcaaaaattatgatgaaatgggcatacctagttgatgaaaatatagaagaactagcagcattagataccattgatgctggaaagctatactatattaataaggtagcggaaattccttcagctacaaatgcgttacggtactatgcaggtgctgctgataaaattcacggtgacgtattaaaaatgaacggggatttccatgcttatacacttttggaaccaattggtgttgtgggacacataattccatggaatgcccccagcctctcatttttcatcaaggttagcccttccttagctgcaggctgtactatggtcctcaaacctgctgaacaaacacc

SEQ ID NO: 21593 - DNA, 420 bp, Glycine max
gggggtggtggaaagaaaggcgctaaaagcagggggcggagaattggtgagtaagatagccgctacagaagagaaacaagaagcaaatggcttctttccatctcagaagattagtaagcagcgttcttaactcgcgggtgcaaacaaatccccttttgaccttcaggtgcttctgttctcctcctgttacacctttcacttcccatgctagttacgaccctaactccatccacttgtccaaccaagaaagcaaaagacgcttgttcaacaggctattatacagaagcaagcagcgagggttcctcgaactcgatttggttctcggaaaatggggtaaaggacattattaactccttggatgaatatcgcgttcgagctctcattcttctcctcgacttggagaatccagatttatggaag

SEQ ID NO: 21594 - DNA, 411 bp, Glycine max
gatacccataattcgcacgcacgcacgcacgcacttgttctgactcagtgcttgtgttggacgcagaagaaccagaaaagaaaaacaagcacgaggagatgattaacttcgaagaaaccgagttgcgactcggcctccctggcgggtctgcgagtgatcacaacgagtcaacaacggtcaagggcagtggtggaaagagaggcttctctgaaactgcttctgttgatttgaagcttaatctttcttccagtgatgactctgcctcagattcaccttcatctgcgtctacagagaagactaccactgctgcacctcctcctccttctcgagccaacgaccctgcaaaaccacctgcaaaggcacaagtggtgggttggccaccagttaggtcatttagaaagaacatagttc

SEQ ID NO: 21595 - DNA, 436 bp, Glycine max
gaatactatattacttatagttaatagaaaagatgatgattttaaattgcagtaaaaatattgagtctcattttctatgtataagaattaagtgaaaaaaatgaattaaattataggtagaagttgttgtttttcccaaggttggttgattagtcatcctgtcttgaagcgggcgtaaaagaccaaccctttttaaattaaattttcaatatcatttgtatgaattagcatatatatattaacataaataacataaataagggattaataaaaaatgaatggatgattagaaacaccaaaatacacaaaggattagtaacgtatatttttaaaaatatccaaaagaacatttatatttatgtataatagaaaaagaatactaattggggctttcccgtggtagaaaaaataaggcagtactccccagaattccgat

SEQ ID NO: 21596 - DNA, 431 bp, Glycine max
ctatgtgtccaaataattttcctggacagttgcgacgtagtggtattatgggaccaaacataccaatgcgaccttttggtcctcacagtggtgttgaatctgttatttctggccctgagtttaatgagattaatgcgctccacaaatttcaggatggtagctccaagagtagcatgggtccaaactggaaaaggccatctcctcctgcaccagggatgctttcttctcctgcaccgggtgctaggcttcctacaagatcaacctcgggtgcatgggatgtgcttgacataaaccatattccaagagattctaaacgttcaaggatagatggacccttgcctgttgatgaaggcccatttcctttgaggaatatagatgatcggtggttagctctagagcagacatatgggattgacccagctattgatgga

SEQ ID NO: 21597 - DNA, 432 bp, Glycine max
gacaacacaacttgctttcacggatgtgggcgtgctctctcaatgtctaatatttgcttcttctctctccctctttcaaattctcacaaaaacatggtggctttggtttctcaagaaaacgttgttgcattggcttctcgtacgggtacggagttgcaacgctatagaaagggtcgccgccaagtcgtgggatgcataccatacagatataaaattggtgatcaaactcccttggacgcacaagaagaatcagaagtgctggttatcacttctcacaaaggcacagggatgctatttcctaagggacggtgtgaattgcacgaatccaaaaaggaggcagctatgcgagaaaccatagaggaagcaggggtgcgaggcactgttgatggtaaatagagcaagtggagtttcaagagcaagacacatgataca

SEQ ID NO: 21598 - DNA, 387 bp, Glycine max
atagaaattctagtgattatagactatctttatataataatataaataagaataaaaaaataaaaaaaaaaaaagaatctatataaatataaaaataatatatataaggtacaaatagtaaatcgaggtacccattttatgataaactttccttccatttttgttcctctagtaggcctagtatttccggtaattgcaatggcttctttatttcttcatgttcaaaaaaacaagattttttagatacagaaaacaaagtaaaattctggggttttttattccccaattataatactaaattcaaaaaaaggagagtaatgagtataatctttcgctcagacgatgtactgatatattctatggcggagggtcgaagaacaaagcaat

SEQ ID NO: 21599 - DNA, 412 bp, Glycine max
agtacctgctcgatgattaattatgtatatgatgcacatgttagaggggcagaatgatgttatagagcatacagatgcatgataagtaattaaagtttgttgtgatgattaattggtagttgtaattagttattcctggtagcactctttggtagtgttggatgtttgtataaatgccatacatagatttgttgcactgaatcaataattgatttcattcggtctttctgttctctcagttttcttttatagtattagagctctcaattcagagctcagccagggtttgttttccatggtgagaaaccacaattcttcttcctgtcatttgcataaccaaaatcagaatggttcaaaatggatctgttcttaatcctttgcaaaaagaagttcctttggaaagtggcatcaa

SEQ ID NO: 21600 - DNA, 341 bp, Glycine max
ggactcgttgtgaatcaacataaatattccgttttgcgtttctctgcctaaaaggattgaaagatgggtcacgcactaggttgctatcaagttgatcagtcaaatgtggctaccaaggagcattttggaaaatttgatgatgtcctataacctggatgtcattgcctgccttggtgtcttgcgtaccagattgctggtagattgacactgcgtgtgcttcaacttgatggtcgatgtgagacgaatacctaggacaatgtctctgtcactgtagctgcatctgtgcaataccgagctgtgtctgagaaagcatctgatgcattctatatgcttaccaacac

SEQ ID NO: 21601 - DNA, 376 bp, Glycine max
atgattactgggacatcccaagctgactgtgctgttcttatcattgattcgaccactggtggttttgaagctggtatttccaaggatggacagactcgtgaacatgctctgctttcattcacccttggtgtgaaacagatgatttgctgctgtaacaaaatggatgctactacacccaagtattccaaggccaggtatgatgaaattgtgaaggaagtctcttcctactcgaagaaagtaggatacaaccctgacaagattccttttgttcctatctctggatatgagggagacaacatgattgagaggtccacaaaccttgactggtacaagggtacaactctgcttgatgcacttgaccagattagtgagccca

SEQ ID NO: 21602 - DNA, 402 bp, Glycine max
ggtaccaaagctgaatagccgttcgtattgtcgcagagaaagaaaaccctagctcaccgtttcaagatgcaaatcttcgttaagaccctcactggtaagaccatcactctcgaagtcgagagttcagataccatagacaatgtaaaggccaaaattcaagacaaggaagggatcccaccagatcagcaacggctcatttttgctggcaagcagcttgaggatggacgtacccttgctgattataacatccaaaaggagtccactctccacttggttcttcgtctccgtggtgggatgcaaatctttgttaagaccttgacgggaaagacaatcacccttgaggtcgagagctccgacaccattgacaacgttaaggctaagattcaggacaaagagggtatc

SEQ ID NO: 21603 - DNA, 324 bp, Glycine max
gttactagggtttgattgatgggtgacgcagggggttcttacaggaccaatgggagcgccctcctctagaggtaactacccatgaccacccaaagcctaataccattccccaactctctttattttctgaaaggctgacgacctgatcttattacttgccttgcctccttccatgccaaacttataatcccataacgagaagtggactttgaatgcccagatgattttttcattgttaacaaggctaaagaataaggcattgaactttcctactcgtgcaaggatggttctttcgattcatgtgctgggaaaatttataaacgt

SEQ ID NO: 21604 - DNA, 445 bp, Glycine max
  modified_base (367)..(367): a, c, g, t, unknown, or other
ggattcatcaatattttcttctcatcgcttaatttggaagtgttttccttcattaatttctcatccaaatatatattcacttcattctcttcttggctaccttggcagtttaacttcacgtggctttgcatgatgcagattccaccaagaatggccacttcattttctgccaactctcccaatattgcagcaaacaaggtactactatatcaattaattaataagagaataatattcataaataatttctaccatcatgcacgttacctgtcttactcttgcaaagagtaatatacctttcaaacattttagaaaggtaaattgaacagcgttcttttaatatttaacacatctaaatttacaaggngtctaacgtgtcaaataattaatcataactactatacttatcctccatctttttccttcaaaatttgaataaacatgg

SEQ ID NO: 21605 - DNA, 414 bp, Glycine max
  modified_base (381)..(381): a, c, g, t, unknown, or other
gacactaaaaaaaaaaagaaaaaaaagtcttaatttgtttcttgttttctctgtcgtttcgttcccttaatctttgatctctgagttacaagttataacaaaagaaataaacaacacatataaatatttgtaagaaaatatatatatgatcatgggttttcttcacaaactatgggacgaaacgttggcgggtccagcaccggaaacgggtctggggaagctccgaaagtacaactcgttctccggcggaagctccgtccggtcaacggtggcggagcatgttccgataagtcgcagcatcaccattgttcgctcccaatctggtttcggaaccaccaccaccacctctgctccttctgcgcctaccacccctcgcacccncttgactccggaggcaccaggcggtgatttcaa

SEQ ID NO: 21606 - DNA, 403 bp, Glycine max
  modified_base (380)..(380): a, c, g, t, unknown, or other
cattatcattttactcatatttttgtttgaaaacatattatttggcttgaaagatttgtaaattcaaggaaccaataacgtatatatttatatatggatttcatatgcatatttgtgaaatgttttattaaattaatctatagaccaatatatgaaatgtggtacttttgatagtgaccaaaattcaaattactatgagcttcatgtgtgtgtgtgcgtgtgtgtgttgtcatctttatatttataagtacattcagtgagttatcagttctttttgtttatcatggacatacctaattatatattaaaaggactatgaaattgctttaaagttatctattgtccatgattgatttcatatagctaaatataatagctcntacatgtatcaaggtcacaatac

SEQ ID NO: 21607 - DNA, 219 bp, Glycine max
gccacaagaccacacaaggtgctccttttcattccaagacatagcaaacgaaccaatgtgtttgttcatttacatcatcaaaatgagtcctaacaacgatggtagcggcacctgtagctctaggtttttgaaagtgactagtgcagcttcctctacagccgccttttccgacggtttatatgccattctttcatcctcaacctctgctagctctgacat

SEQ ID NO: 21608 - DNA, 425 bp, Glycine max
gatagcgtttttcattgtgcattattcaatggccaccacagcagctctatccggaaccatggtgagcacctccttcatgaggaagcaacctatgacgaccaagagcctaaagacattccccaacgctctttttggtctgaaaggtggacgaggtggtcgtgtaacttgcatggcctcgtacaaggtgaagctcataaccccagaaggagaagtggagtttgaatgcccagatgatgttttcattgttgacaaggctgaggaagaaggcattgaacttccctactcgtgcagggctggttcttgcgtttcatgtgttgggaaaattgtgaaaggtgacgtggaccagtcagatggtagcttccttgatgatgaacaaatagaaagtggatgggttctcacctgtgttgctctacctaggtcagacg

SEQ ID NO: 21609 - DNA, 411 bp, Glycine max
ggcacaggtgcaagttgagattttgattgttgttgggctcccaaattcccaaaacagtgatgatcttaagtaaaagaaatgtttttggcaccaagggaaaaatgggtatagatttcatgattttggtgttaacattgtcatggttttgtctgactactatatgcgtctcagctacaaaacaagcatacccaccaacaccacaaccgaaccagaacctaaggtttgaccaaaatggagaattcaagatattgcaggtggcagatatgcactatgcacatggcaagaccacgcattgcttgaatgtgctcccttcccagaatttttcttgctctgacctcaacaccactatctttcttaacagaatgatcaaagcggagaaacccaatcttattgtcttcactggagataata

SEQ ID NO: 21610 - DNA, 333 bp, Glycine max
attgatattgctgttagagcatcacttcaggccttagactcgagtccatggcctagcttgccaggctctgaaagggcagaaaatatgatgaaatgggcatacctagttaaggaaaatatagaagaactggcagcgtttgataccattgatgctggaaagctatactctattaatgcggtagcggaaataccttaatctacaaatgcgttacggttctatgcaagtgctgcttttaaaattcaccgtgacgtattaaaaatgaacggggatttccatgcttatacactcttggaaccaataggtgttgtgggacacataagttcatggaaagcc

SEQ ID NO: 21611 - DNA, 387 bp, Glycine max
gatattgaagcttatgtataacattttgatttgattctctgtagtctttccaattcacgaaatgctaatatgttatgtatcagtgagatgacagaatgagcttgagtgcccgagaatattcgattcaattcaaataaaatttgttcacccacagcaaatggttaactaacatattttgtggtaatttttctcttctaataaaggtattttttcgaaaatgaacaaaacaatatataatctaaagattaatttttcatttaaaatctactaatgcttaatatttttttcttctattttctttgaatattagcaatgtttttaaaaatagaagtatactaagaagacaaacatgttcaactatacttaagagacaaacaaattataaaa

SEQ ID NO: 21612 - DNA, 312 bp, Glycine max
ggttctagcgtctgtgattgctgagactcgttcttcttcgtcgatatcttcttcttttgctgctggtgagatagttttttctctcacctgaaaatgtcttgctgcagtggtaactgtggttgcagaagcgcctgcaagtgcggcaacggctgaggaggctgcaagatgtccccagacttgagctacaccgagtcaaccaccaccgagaccttggtcatgggacaggcaccagttaaagctcaattcgagagtgctaacaagggtgtacccagtgagaacgatggctgcaaatgtggagctaactgcacctgc

SEQ ID NO: 21613 - DNA, 402 bp, Glycine max
  modified_base (319)..(319): a, c, g, t, unknown, or other
gtttgcatatatatatatatccagcataagatgtttgaaattgttttatctatgaatactattggtaggcccattaatgcataaaaattaacgatggagagaaaattcgtttcaaacctaaatatatgcataaagacccaaaattaataataaaagaatataatgaaaaatcattatcttttcgttaatcattcaacacttatctttcttgagtgagcaatgagtaagatgcatgttttctgtctctagtgaagggatcttgtagggacattcaactcttatcttttttttagttgcatcgatcatgatcttctcatanatactcatcttagggacattcaacttcgtgaaaaatagctaaagcgaagagaacaccatgtgattaaattcttgcattttgtt

SEQ ID NO: 21614 - DNA, 396 bp, Glycine max
  modified_base (333)..(333): a, c, g, t, unknown, or other
  modified_base (342)..(342): a, c, g, t, unknown, or other
gatagagatgtgtggggctatatatctttgggttactttaagcagaccactaaggctggggagattgggtcatcaactatgcctcacaaagtgaatcctattgattttgagaacagcgaaggtaatctaggtgtagctaatggaggtctgtctcatctaagcatgaagttgccgatttcacgttggcagagggacttgactgattcaactgtcttaaggaacatgggtataggtataggtcattctcttcttgcctacaaaagcacacttcaaggaatagggaagcttcaggttaatgaagctcgcttgagtgaagacttgaaccagtgctgngaggtgctngctgaaccaattcagactggtatgcgaagaaatggtgttcctgagccttatgag

SEQ ID NO: 21615 - DNA, 422 bp, Glycine max
gtgtgtcaaacgaaaagttatttggttgtttaagattacctggtgtctatgttcttgactaatcttttacatacatgttcaaaatttaccattaacgaaaaaaaattaatactatgttgtgcagaaattaatcttgatcataatagtactgaatcatataataatttctcgtgtgttttttatatttctctttattacaataccaatttttttttgcatgcagtgacaagcaaataaattggaaaaaaaacaaacgaatgaattaagaaactagctatgatggacatagaaaagcagaaagggtaaaggtgttggaaatggaattgcaagactgtgtgacatgaaggggaaaagagttgaacttttactgcagtaatgggaaattcatactgaaacaggtatgcttctagaatgaagaaatg

SEQ ID NO: 21616 - DNA, 402 bp, Glycine max
gatagaaagtgcttttgctctcatggtggccttcctcataaacatctgcgttatttctgtaagtggcactgtttgcaattcttcaaatttgaatgctgaagatcaactgagctgtcaggatttggatctgaacaaagcctccttcctactcagaaatgtcttggggaaatggagctcaaaactatttggaattgctttgcttgcatcgggtcaaagttctactattacaggaacctacgcaggacagtatgtcatgcagggatttctggatttacgactggagccatggattcggaatatgttaactcgttgcttagccatagttcctagtttgattgttgcagtcattggtggctctgctggggctgggaagctcataataattgcatctatgatcttatc

SEQ ID NO: 21617 - DNA, 446 bp, Glycine max
  modified_base (318)..(318): a, c, g, t, unknown, or other
  modified_base (409)..(409): a, c, g, t, unknown, or other
gacccttttgctttctttatccaataataataaccccgtttttccctctccatacccttttgcttttctttatccaataataagaacttcccacgagtggctttaactggtctggtctggtctggtcggacacacaaaaatattagtatggagaaggtgagttttgtgaagaatggagagcttagattgcctccggggtttcgtttccacccgactgatgaggagccggttttgcagtacttgaagcgcaaggtcttctcctgccctctgccagcctctatcattcctgaggttgatgtttgcaagtctgatccttgngatttgccaggtgatttggagcaagagagatacttctttagcaccaaagaggccaaatatcccaacggaaatcgctctaacagagccacanattcgggttattggaaggcaactggcttggacaaaca

SEQ ID NO: 21618 - DNA, 381 bp, Glycine max
gattgttcgagatcttgacttgttttcctattgcgagtcctgcttgcttccattcccggtcaagtgtcatgtgggttatgtcccctctggtgaaagagttgttggttaagcaagctctctcgtgttgctgatgtatttgcaaagcgacttcaagagcctcagcgtctggcagatgaggtgtgttctgctttacatcagggaataaggccagcaggtgttgctatcatacttcaatgttcacatatccactttccagacatagaatcagtctttcttgactcaaattatcaagggtgggtgaagatacttgtttcttcaggttctggggtttttgagaacaaaaatgcagatgtatgggctgatttctttggtcttcttaaa

SEQ ID NO: 21619 - DNA, 147 bp, Glycine max
cacataattgcaagaatacaaggttacttcttttgtatctaatgttgaaaaccattttttgctggaaggctctttaatttgtagcacttttggagtccaaagttccgaacacacggctgtctgaataacgattttgaattttttgcc

SEQ ID NO: 21620 - DNA, 421 bp, Glycine max
tactgattcaggatctcaggaaatgcaacccaatgtgatgaacaccaatatatgttccaatcatgaagaatgtgaaggacgttcttcacagataaagctgactaagggtttcacagcaaaggagtccgtgaaggggcacatggtgaatgttgtaaaaggattaaagttgtatgaggatgttttctctgaatcagaaatctgcaagctgactgattttgtgaatgagattcatgctgctggccagaacggggagctctcaggtgaaacttttatactattcaacaaacagatgaagggaaacaagagagagctgattcagttgggtgttccgatatttggacagataaaggacgataccaaaaacaacatagagccgattccagcacttcttcatgatgtcattgatcaccttattcaatgg

SEQ ID NO: 21621 - DNA, 404 bp, Glycine max
ggaaaagaagtacttcttcaagcattcaactgggagtccaacaaatacaactggtggaataatttagaaggcaaagtttctgacatagctaaagcaggatttacttcagtctggttgccaccaccaacccactccttctcacctgaaggttatactccgcagaacctttactctcttaatagtaaatatggttctgagcgtcagttaaaagctttacttcaaaagatgaagcaatacaaagtaagagcaatggctgacatagttattaatcatcgtactggcaccacccaaggacgcggagggatgtataatcgttttgatggaattccattaagttgggatgaacgtgctgtgacatcagattctggaggactgggtaatcgaagcacaggagccatttttca

SEQ ID NO: 21622 - DNA, 369 bp, Glycine max
ggcaccgcttgagcagacgtaacaacagcacaaagcgggttactgtctgttcaagctaccatctctctctctctttcttagtgcctccttgccagaagttaaaatggcccaagaaactttcctattcacatctgaatcagtgaacgaggggcaccctgacaagctctgtgaccagatctccgatgctgtgctcgatgcatgcttggagcaggaccctgacagcaaggttgcctgtgaaacctgcaccaagaccaacatggtgatggttttcggagagatcacaaccaaggccaacgtggactatgagaagatgtgcgtgacacatgcaagaaccattggtttgtctctgatgatgttgtcttgatgctg

SEQ ID NO: 21623 - DNA, 376 bp, Glycine max
ggattccaataatagaaggagcatgtccatcaccaccttccctctcctcctcctcctctcgccggcgatcaccgccaccccgacggcgtacgagatgctggagagctttcactttccggcgggtattctccccaagggagtgaccggttacgagctggatccgtccagcggcaaattcagcgccgatctgaacggttcgtgcagtttctccctcgaaggttcgtaccagttgagctaccagaaaaccatcaccggctacgtatccgaaggcaggctcaccgaactccgcgggattagcgtgaagatcctcttcttctggctcaacattctcgacgtcgttcgcgtcggcgaagacctcgatttctcccgtcgcgtc

SEQ ID NO: 21624 - DNA, 309 bp, Glycine max
  modified_base (282)..(282): a, c, g, t, unknown, or other
atcaaagaagaagtggtgcagaaggtattgaaaaccaacgtgtctgccctggtggagcttaacatgctcaaaaaccttgctggttctgctgtcgccggtgctcttggtggatttaatgcccatgctagtaacattgtttctgccatctttatagccactggccaagatccagctcaaaatgttgagagttcccattgcttaaccatgatggaagccgtcaatgacgggagggaccttcacatctcagtgaccatgccttccattgaggtgggtactgttggnggtgggactcaacttgcatcccaatct

SEQ ID NO: 21625 - DNA, 399 bp, Glycine max
gggtgcaactcatatatctggggggcagcttcacttaatgtcgattaggtgtaagctgacatctaacatggaattagagcccatagcccatcttggttctcgcctattatagtaggctagcatgttctgacagacatctgaggaggggggtggtaggaagtttcacattgactgcctcaattctcagggtgcaacttatatatctattgtgtaactgtacttaataccaactgattctaagttgaaatctaacagaaggaaggggtaggggggcaattaaagaagcaatgccaaagcatgcttgtgccttttgctggacgattagaaagagaaatatacgctgttagataatatatgaatcaaatgcacaaatatagaatatacttagcatattacata

SEQ ID NO: 21626 - DNA, 380 bp, Glycine max
ggtggcagagagcgaacccaaaactagagctaccttcccttcaaaccttccactcttctctccttttccaatcaagggaataatatttcttagagatattccgaaaccatggctcacgccaatcctatgatttttgttgttggaattctaggtaaccttgtctccttctgttgctttctagcaccagtaccaacattctatcgagtttgtaagaagaaaaccacggaaggtttccaatcacttccttacgtggctgcactcttcacttcaatgctttggatattttatgcttacataaagacgggcgaaatacttctcatcaccattaacgcattcggttgtttcatagagacaagttaccttgtcatctatatcactta

SEQ ID NO: 21627 - DNA, 428 bp, Glycine max
gaccaaaatactcctcttggcatcttgtgttgtgtccctcttttaagctatttccttctcttaacacaattggttgtgccaattgccatagtcaccaaccaattaacaaaggtatatatatcatcatatcatcaccaaatgaaaaatattgggttgctttttcttgtggggggggctacttttgtggtggcagccacagctggtagcttttaccaagactttgaaataacgtggggtggtgagcgtgccaaaatctatgagaatggaaaccttctcacactctcccttgacagagcctctggctctggctttcgttccaaaaaagagtacttgttcggaaaaattgacatgcagctcaagcttgtgccttgtaactctgcttgaacagtaactgcctattatttatcttctatggggcctactcatga

SEQ ID NO: 21628 - DNA, 405 bp, Glycine max
gatagcagcatcatacaaagcatagaattcaaaaactaagctcatttcttgtgcttcgctttattcctcaaaaccaaacatgtcgaacacatgccgcacctgtgactgcgctgacaagactaactgcaccaagggaaacagctatggtggtatagtagagactgagaatagctacatctagactgttgacatggatgttccaacagctgagcatgatgggaagtgcaagtgtggtactaactgcacttgcacagactgcacttgtggtcattaaagaatatgtatgaaaatgtctttgccatgtgtttggcaatacaaatctccaaataatgtaatctctctatgaataaatgtgtgctgatatcctacttcagggtctgtgtagtcatgcagtctgaatcatgt

SEQ ID NO: 21629 - DNA, 292 bp, Glycine max
tcgcggacgcgtgggctgggataagacaacagaacggagggcaccgcactggaataatgagaatggatgctaggcttatgcaatatttgttgcaaatttgcccatgaatgcaacataggcacagctggaacgtgcttacaagaaatttgggcccattaaacaagatggtattcaagttagaagttatatgcaacagcactcttgttttggctctgtgcaatgagaatcttcttcttcaatgcagagcgcaattgaggcctcacctgccgttaccttaaatggacggatactt

SEQ ID NO: 21630 - DNA, 128 bp, Glycine max
tggcactcaggaccttgactgcgtgaggactagctggcatgaggagattcacggcctctcttcagagaacggctagtctcaagcgcgaatcggatacctacaggaggtctctgaccacaatgttgggc

SEQ ID NO: 21631 - DNA, 70 bp, Glycine max
gattgcagctagcgagcaagaaaacggatgcgcgaacgcggctttctttcgccttgcttgttgctttact

SEQ ID NO: 21632 - DNA, 78 bp, Glycine max
ggcagcgcttgatttgaggccagtcaagcctgggggaatttctacacctgtgttgggtcaccctacccttttctgctc

SEQ ID NO: 21633 - DNA, 342 bp, Glycine max
  modified_base (304)..(341): a, c, g, t, unknown, or other
gatgatgaggaggaggaggaagaggaggaacatccgggtgaggtgtccattggaaagaagatcttcagattttttacaacgtgatggaagtagttatatcacaaatagatatacatatgtcatcattccttatttaggagattaggcatgtaatattacttcggagtaacttccatgtttgttttggcatttattactggcagatgagaagcattgttctgctgcctgtgttctcaataactgttctcttgcgaaaagatttgctgcttaagaaaggatggtgcttgcttcttcccaaaattgnnnnnnnnnnnnnnnnnnnnnnnnnnnnnnnnnnnnnnc

SEQ ID NO: 21634 - DNA, 327 bp, Glycine max
gatgttgcatcgtctcacctaccgcaaacgccggggctattctaccaaatccaaccagcacatattcttcaagactcccggtggcaagcttgtttatcataccacgaagaagagggccagcggacccaattgccctgtcactggaaagaggattcaagggattccacatttaatgccagcagagtataatatatcaaggttacacagaaaccgaaggactgtgaaccgtgcatatggtggtgtgttgtctggcaattgctgttagagaaaagaacatttcgagcttttcttggttgaagagctaaataattgtgaaaaaaatgtctt

SEQ ID NO: 21635 - DNA, 126 bp, Glycine max
gattattgccgtcgaaaaacccctttttttggagggacctatttaccatataatttttataggttaaataaaaatttttaccgggtaggtttcttaaaaaatggatatttaaaatttatttattta

SEQ ID NO: 21636 - DNA, 405 bp, Glycine max
  modified_base (339)..(339): a, c, g, t, unknown, or other
gagggtttggttattaaggttttcgctcaccggtgggccatccaaccccccaaaaaaaaaccaaaattcccgcccaccagacatttcaaatcaaaaaaaaatttgccaaaaaaattaagccaaacaagcctattcccttcttggatccgcatgaggaccgacaacaccatcaggtacaacgcgaagcgccgtcactggcgtcgcaccaagcttggattctgaggtgcttgctgtgcctcggttctgtttatccaattaattagtgtttttattttcttgagccaaaaacaatgctttggagattttaatattttgcattttgttccaagactatattgngtaaggaacttattgtagttcagactaatggtggggttggtcacctttttttaaaagtattttgga

SEQ ID NO: 21637 - DNA, 253 bp, Glycine max
cggctttatttcatatgaggagctcctcgtgccacgggaaacatacttgctgaaaaactaatccatttctgagaaggcattgcctatagtttgtcaacctcaagctattttccggattcgtcctgtgaatcgctgtacggtaactattactggtcatgctgaaactgtactaagtgttaccttcatttcttgatggtcgacaactggcaagtgattctgttaatactgctgtactatttttggactcgaccac

SEQ ID NO: 21638 - DNA, 403 bp, Glycine max
tcttgagcacccgacgttggatgaaatttcggggttgctagctgaaagccttccatgcaatgctacttttttcttgacctacgtggcccttaaatttttcattggctatggtcttgaactgtcccgaatagttccccttattatctaccatttgaagagaaaatatctttgcaagactgaagctgagttgaaagaagcttggcgtccaggagatcttggttatggaactagagtttctggtgacatgctgattgtcacaattgtctactgttactctgctattgctcctgtgataataccatttggtgctctatattttggcctaagaatgcttgttctgcgaaatcatgcactcaaagtctatgtaccaacatttgaaaattatggaagaatgttgccacac

SEQ ID NO: 21639 - DNA, 258 bp, Glycine max
gggcacagcaacagggagggaggaataacatgagatattcatggttggcatgtataaagcaggatataatgttgccgttgcccttgtagtactataagtatgaccaagtaaaaaggggagctagcaagagaaaggatcagatagcacttgtatttgattgatgagttaatggaagaatatctcaatccattagctgttacacatctttttcaacaaacactcaaaagcttatgcatccatcaaaattctcaatgggtc

SEQ ID NO: 21640 - DNA, 393 bp, Glycine max
gattgaatgcatgcacattaggcaactgcggtgccactttcagccctgctttttcattctttcaaggttgcacgcatatcatgctggcatctactctaaaagtaacaagaaagtctcctgatgtttggcaaagcgagcttagtgtttcattatgagttgctagggcccccttcgtttggatatatagcattttgtggtaaaggttactttgttttacatgttgagggagggaggaatgatgataagcaattctagtttctgcttttgaattcataataatattggtggtctacgtctctttttgatgatgctattatttaactgtcaagtgtgtgtgaatgaaaaaataaatggagtgcgaatggttattggaaaaaaataatatatttcttc

SEQ ID NO: 21641 - DNA, 408 bp, Glycine max
gagtttcttgaatggctagcagatgtaggccttttgtggtgaacagaggcctgatgaagctttagcggcggctgaagttcctcagcttccaatgactagcagtgttggctcacacaaagcccccaaatccttgttgtcttacaaaaagcctaggattgaagtcctagatgaagatgatgatgagcacttcaccgtaccagatctcggataaagcacatggtcatgtaaacaattgcctgaatcattaggcagtaggttgactagttgtatatgcatactaggtgcagatgttaatgaactcttcaatgtgcctggtctagctgaagctcaggaccatgaggactattgcatgaatcttgttattgatgagctgtatatgcatactttttttatgacagttagtaatga

SEQ ID NO: 21642 - DNA, 314 bp, Glycine max
gcgctagctaggcaatccctttacttaatctgagaattgatctcttgctaccagatctgcccttacggatctgttgaagggaggattgaaaaaaaaaaaacaaggcatatttcatatatggtggtagggaggggatggcctctcatcagcggtaggaagatccaagttaggagtttgtacaggggagaatcggtcttgaagcttagttgaaggttacggaaaagggaaaggaagtgtttggctagggggtctccaccttttttggataggggataggaaacgagccaaccggcgaacagttagttaccgaacac

SEQ ID NO: 21643 - DNA, 225 bp, Glycine max
ggaaaagcaccatatcattagagcacggtgtttttctactaaagacctcttttctctacctagggtaatatcattaatcaatggctggcactatctttggataccctttcagacacttcatctggggtcacccaccaattttcaaagaatggtccggttcaacagccctcttaaatggctcgaaatcacccactgcccacatcttaaaaattaacgttccaggat

SEQ ID NO: 21644 - DNA, 98 bp, Glycine max
gacacacactggacctttatcgatgtctggagggtaagcctcatctttgctgagatccttcttagaaagccaatcttgcctgagactgagactctcaa

SEQ ID NO: 21645 - DNA, 419 bp, Glycine max
  modified_base (383)..(383): a, c, g, t, unknown, or other
gatatatggagtgtgggttgtgtactggttgaattatgcactggtgaagctttgtttcagactcatgaaaatttagagcatctggccatgatggagagggtgcttggtcctataccacagcagatgttaaagagagttgaccgacatgcagagaagtatgtccgaaggggtagattggactggccagagggtgcagcctcacgagagagtattaaagctgtaatgaagcttccccgactacagaacattataatgcagcatgttgatcattcagctggagatcttatacatcttttgcaggggctacttagatatgacccctttgaaagacttacagctagggatgctttgaggcattccttctttactagagatcaacttangagatgattttcatgtatttgtaaacgattggtctg

SEQ ID NO: 21646 - DNA, 408 bp, Glycine max
tttgcatatattccaccaattgttttacaaaaaaaagaggtgttacctttcaaatatacttaaatgactttttatggtaatttttttttctaaatgctcattcatgactacttttatgttttgtgataattaaaaaaatttacagatcctctggaagagctatgcttcataagagagccaaagtagaatttcacccccttggtgttatcggtgccattgtgtcgtgaaactatcctttccacaatatttttaaccctatgttggcagcagttttttctggaaatggcgttgtgattaaggtataaaatgacttaatatctgctatctacctatctaaaatggttcattccttgatgcattacatttttttaagaataaacattgttgactgatattgcttcacggtga

SEQ ID NO: 21647 - DNA, 243 bp, Glycine max
ggcatttcaaaaaaacaaagaaggatatgaaagcgcggcttcttcttcttcagctgctgctgctgctgctgcttcaacttcccaacaaatatttcaacacactctctcatttcttcaatttccgttacgtaaagccactttctcaaacctcaatttcctgttgttgcggctgaagctggcgagagactaatcttggggaattttggatctgtttgccgtgaaaccctaatttcttccttgtga

SEQ ID NO: 21648 - DNA, 93 bp, Glycine max
ggctgcaggaaaattaatgcccctttcattttgtgtgcatctgtagtatctatcaccaatcaattccactcttcttcccatcaaacaacacat

SEQ ID NO: 21649 - DNA, 386 bp, Glycine max
gtcttgtttaatggccatttagatgtaactcggggaataagtaggaaaattttgtacaatattaagtcttgctattttatttgaatgattgccctcaacatttgcagatatgtccaaattggcaatggttaccagcttatcagagacccaaagagacgaactcgaaaattggcaaatgaaaaagttagatggagcctgcacactgccagacagcgattgtcgcgaaagcagaagtattgtcagttttttactagatttgggaaatgtaacaaggatggatggaagtgtccttatattcatgatcccttaaaaatcgctgtctgtactaagttcctgaatggcttatgttctacttccaactgcaaattgacacataaagttttcta

SEQ ID NO: 21650 - DNA, 223 bp, Glycine max
ggtaatgtgaagatgttggttaaaattcacacaaatgtgtttgtcccatttgcgttcccagtccgactggcacacaagattgagggttgttttgagttgagtaagtacgtgttatttacgcgttcttccatatctttattatttttagtggataacgattaatcccattttattttttttaataaaaaaataaagctgtcgctctttaggatccaagcttact

SEQ ID NO: 21651 - DNA, 136 bp, Glycine max
ttacttttgtgataagactacagatggtttcggttgcgaagacgacagaagggtactgctgctataatacgacagaatggtacttctgttataagacgacagatgggtactgttgttatatgacgacagaagggta

SEQ ID NO: 21652 - DNA, 235 bp, Glycine max
ttaaaggaactgatatgctaagacaactatggggtactgggtgcatattacaagatacactcacctattcgacaaaacgatagaaacggatcagatccttagctaatcattagaccatacgtaatatatgtcatatgattaccagccgatagagtgtgggaagagatcgccacaacaaatacgttcgtgactctggcgacctctacatagattttctgatcgtactaacagaacc

SEQ ID NO: 21653 - DNA, 420 bp, Glycine max
gacttggttactctatgttttactgcatttcatggttttaactcaactttttgtggccttctgtttcttgtatcgaccatttaaatgaaataacaaaaggaggagatagaggaaatcaactggtggctccatttgtgcttggtgctggttttatcctgtaactggatctgcttaatttctatcctagctttcttattttgaaatagttgaagtctgttcctgtatggtggaaagttgcccagtgctaactgcgttgttcttaaatttaatctctgcgtaacttacatccagaccattgatttattgaccacccatgtgatgtgtttttgaatttgaatgttgatgcagactccatatggtcctcctttcgcacttattcaaggaacattggaatcctatgggtctatgttcaaggatatt

SEQ ID NO: 21654 - DNA, 87 bp, Glycine max
ttacgggtacttctgctataagacgacccatgggtaccggtgtgagatcactagagattggtccgcctattatacgacatcaaacgg

SEQ ID NO: 21655 - DNA, 209 bp, Glycine max
cttcactacatggtgcattcaagggaagctacgagatggatcagtgtgtgtgaaaaggctgtggacgtagcatgcattctaagaggaagcatactgacgccggttctgattgaaacacttgctgcagtgcttcaaatggatgaaatactatatgagctgaaagagcatctgctgggtataaactgcggacgttgagattactatttcag

SEQ ID NO: 21656 - DNA, 395 bp, Glycine max
aacagggacttggttactctatgtgctactgcatttcatggttctaactcaactttttgtggccttctgtttctcgtatcgaccatttaaatgaaacttcaaatggaggagatggaggaaaccaactggtggctccattccttcttccttcttggtttatcctgaagctcgatctgctcaatttctatcctaccttccttatttctaaatactagacaactgttcctgtataggggaaagctgcccatcgctaactgcattgaacttaaatataatctatgtgttacttacatccacaccattgttttatttaccacccatgtcatgtgtttctgaatctatatgttgatgcgaactccatatggtcctcctttcgcacttattcaaggaacatt

SEQ ID NO: 21657 - DNA, 255 bp, Glycine max
gatcgacgatggcgaataccctacaacgcgccctacgcgccaccatggcccggcggttctccaccgacgcattggccgaaattaaacgaggcgagatcggaatggtttctggaattcctcaagagcaccttcgtaggagggttgcaatttactctcctgctagaactgcatctcaacagggatctgggaaggttggaaaatggaagatcaacttcttatctacccaaaagtggaaaaatcactgatgggctgaca

SEQ ID NO: 21658 - DNA, 383 bp, Glycine max
gacaccgagtcgcagaaaaagaaaaaagcgatcatagtttcacttcggccttatccagtttagggtttcggttctctaccctatctttcacgtatcgaaaccttaaatttacgatcaggtctgagcaatctggttggtagaacctttggtcttagtgagtcaagttttatgtctgaattagacgatcaaattcctactgccttcgatccttttgctgatgcaaatgctgatgactcgggtgctgggtcaaaggagtatgtgcatattcgtgtacagcagcgaaatggtaggaaaagcctgacaaccgttcaaggattgaaaaaagaattcagctataacaagatacttaaagacgtcaagaaagagttcttgtgcaatggaac

SEQ ID NO: 21659 - DNA, 363 bp, Glycine max
taatgtgagcaaggaaataagctttggggactctggacttgatgagggtagcaatggtcaacaacaaccaatgccaagaaggtgcacacattgcttggctcagaggaccccacagtggagggcaggaccattaggtccaaagacactatgcaatgcatgtggagtgaggtacaagtctggtaggttgctaccagagtataggccagccaagagtcctacttttgtgagctacttgcactccaaattccacaagatagtcatggagatgaagatgtctgtttactccatttctaatgaacaataataatgggggttttttagaggtatatttttaatgtaaaaaaaaaattgcaaattttaagg

SEQ ID NO: 21660 - DNA, 380 bp, Glycine max
cgaagaacaagtcaagtatcgctgaggaggatggctttaggtgttcctgctcttccgctgacatacgtggctcacgttctggcagtggctgccaccgtcttggtcgtggattgggtcgccaatttcacgtgtggctctgcttgagattctgataacaagtgccttatcttcagcattcatccacttcttattgatattggcttactaggtcatggcggcgaagctattataaatgacaaagattttttcctacataacgaagcgtagaaattgacacaccttgttttccatgccatcccattattacttggaatagatggaatgtatgctgtcttcaaggttgacaatgaaagtgggactggcgatctctacagcttgca

SEQ ID NO: 21661 - DNA, 225 bp, Glycine max
ggaatttcactgatggagacagacaaaggtgaagctcaagctcaggattggagaggcagaccctccaaccctgccaaacacggtggaatgattcccgctgcttttgttcttgggttgcaagcttttgagataatggcaatagccgcagtggggaacaatctgataacctacgtgacgagtgagatgcacttccctttgtccaaggctgccaacctagtcactaac

SEQ ID NO: 21662 - DNA, 389 bp, Glycine max
gacaccgagtcgcataaaaagaaaaaagcgatcatagtttcactggggccttatccagtttagggtgttcggttctctaccctatctttcacgtatcgaaaccttaaatttacgatcaggtctgagcaatctggttggtagaacctttggtcttagtgagtcaagttttatgtctgaattagacgatcaaattcctactgccttcgatccttttgctgatgcaaatgctgatgactcgggtgctgggtcaaaggagtatgtgcatattcgtgtacagcagcgaaatggtaggaaaagcctgacaaccgttcagggattgaaaaaggaattcagctataacaagatacttaaagacgtcaagaaagagttctgttgcaatggaacagttg

SEQ ID NO: 21663 - DNA, 238 bp, Glycine max
gggttcggagttagcacagcgaattggcattaatgaagttgctgagagcattatggctttcaacaccaattacaaggacacgggtctttttggtgtttatgctgttgccaagcctgatagcttggatgattcgtcttatgctataatgtatgagacaaccaagttggcttatcgcgtttcataagatgatgttacacgtgctcgtaatcagttgaaatcttcactgctactacacata

SEQ ID NO: 21664 - DNA, 214 bp, Glycine max
cacctggagtatgcgccacctggcaaattgaagcggggcacccttaataccttgtactaacatgtgtcttgatctaccgcgaattggtgcccaataaagtagcttttgatttcactggcactggccgcgggggcgaaactcactgtcacccctcatgacacgtggaatgcattgaacttgacaaatgagtgtacgagagaacaggatttgatgg

SEQ ID NO: 21665 - DNA, 407 bp, Glycine max
cagaatgtagagagagctgctggaatgtatgctcctctgccttatgccttagcacaggtcttttgcgaaataccatatgtgtttctccaaactgtttattactcactcatagtgtatgcaatggtgagctttgaatgctacgtggagaagtccttttggttcttctttgtcagctccttctctttcttgtacttcacatattatggaatgatgactgtgtccatcacaccaaaccaccaagtggcatcaatctttgcagcagcattctatggactctataatctcttctctggtttctttatcccaagaccgaaaatttctaaatggcgggcgtggtattactggatttggccagcggcatggacagtgtatggattaattgactctcaatatacagatatagacga

SEQ ID NO: 21666 - DNA, 148 bp, Glycine max
aagatacaatttgcatcattcatttagattgtgaatcaaagcatcaaatttcctaacacattgacgtaaaacaaaggatttccaaacacattgacataaagcatcggattccctaacaccctgacgcaaaacaaaagatttcctgaca

SEQ ID NO: 21667 - DNA, 402 bp, Glycine max
gagaacttgaatggctagcagatgtaggcctttgttggtgaacagtttcctcatgaagctttagcggcggctgaagttcctcagcttccaatgactagcagtgttggctcacacaaagcccccaaatccttgttgtcttacaaaaagcctaggattgaagtcctagatgaagatgatgatgagcacttcaccgtaccagatctcggataaagcacatggtcatgtaaacaattgcctgaatcagtaggcagtaggttgacgagttgtatatgcatactaggtgcagatgttaatgaactcttcaatgtgcctggtctagctgaagctcaggaccatgaggactattgcatgaatctgtagattgatgagctgtatatgcatacttctcttaggacagtaagt

SEQ ID NO: 21668 - DNA, 223 bp, Glycine max
cgtgcgtgctaattgccaataattggaattacaaacagaataatgaaattttttaaaaagaaaaaagaaaatcaaaatttcatcattgctattctatttacaagttctaacaggtaaaattaaattaagagctccgtaaagtcccctacacttcgaaaatgtggctacccgattcaactgaacaattccacaaccttgcaatttgcattgagcacggaaaatg

SEQ ID NO: 21669 - DNA, 169 bp, Glycine max
agggactactcccgaatatagagcatatcaagagcatgttctcagctgcagctttaaatttgcacaggctctgagtgagagaagctatgagcttgtctcttgtggaaccgacaatcacctggttttggtgaatctgaataataaagttctttatggctccagagttgag

SEQ ID NO: 21670 - DNA, 371 bp, Glycine max
gaaggcatctgaaagggtaaacgtggaaacctttattaattgtttttggtcccttttttcctattagcctttcgaatataacattccctcttcctctctattcgcctccctttaactccacggtgcagatccgaggagttaccccttagctttttctctttccttattctatttcaaacttccaccagtgatggcaggtttggctccagaaggaacacaatttgatggtcgccaatatgatgctaagatgagtgaattgctttccactgatgggcaagaattcttcacctcatatgacgaagtctatgacagctttgatgccatgggattgcaagagaatcttctgcgaggcatatatgcttatgggtttg

SEQ ID NO: 21671 - DNA, 254 bp, Glycine max
ttgttcatgcatcctccaccagctaatcttattcggagtcccatgaattaatcgtcgttcatgcatcctccaccattgtgtctggatccccacgaatggattgcctagcgctgttcgtacatccttcatcatcaaatcttattcggagccccatgaatagattgacgttcatgtatccttcaccatcgtgtccgaagcaacacgaattgattccctagcgctgttcgaggaacctccatcatcatatcttattc

SEQ ID NO: 21672 - DNA, 184 bp, Glycine max
gactcgaagggactactcccgaatatagagcatatcaagagccagtgctcagcggcagctttaaatttgcacaggctctgagtgagagaagctatgagcttgtctgtggtggaaccgacaatcacctgcttgtagttaatctccataataaagtttttgattgctcctgagatgataaggtgtt

SEQ ID NO: 21673 - DNA, 181 bp, Glycine max
gactccaccccttttggttcacgttctaaccaaagtgcaacggctattgttctttggctcctatgatccactacaatatcacatttcctcttactctatattcatgtccatttaactccacgatgcagatccgcacaaccaaccccttcactattactgtttccttatcctatttcaaact

SEQ ID NO: 21674 - DNA, 275 bp, Glycine max
aatgctggtgatctggaacttattgctaagagtgttgaatcttcagaccttaacttttcaagatacggtgacaccttttttgaggttgctttcactgggggtcgtacacaacctgtaactaccaagcctgatgaggtggaccgccacccatactttataatagagtgtgagcctaagcgtgaagtcattttaccatctgtaatctacatacaaatgattttgcggctaatgccatttctcatcaagaacctataaaatgttatgcggaaattcct

SEQ ID NO: 21675 - DNA, 267 bp, Glycine max
ggcgaagagtgaagagaatggctcccaagggtttaacctttctggctgtgttaatatgcgtttcagcactgtcactgagtccttctgttgcgggggaagggcaaaataatggccttgttatgaacttctacaaggaatcatgccctcaggctgaagacatcatcacagaacaagtcaagcttctctacaagcgccacaagaacactgctttctcctggctcaagaacatcttccatgactgtgctgttcagagatgtgatgctttac

SEQ ID NO: 21676 - DNA, 356 bp, Glycine max
actagttagctttacccctgcctttgcatcactttcttctcttgcaatgatccatttttggtgcctctgtgtgaagccatggtttgaagtccctcttcaaccttgaggacaaggttgattttccagcggtaggtaatgatagcaacaccagttgtaacatgtcccataatagacccaagaggactactaagaagtccatccatttacgtgattacgtgtcccataacagttggagaatatcccatcacatatcattttgttactactacatatcattctattattgccttttatccatcatccatttccgttgtaaccgtttcagtgtaagtttgttagtcatgtagtggtagctg

SEQ ID NO: 21677 - DNA, 398 bp, Glycine max
aacacttcagcgcttcactgctgctacacttgagcatggaatgcaccctcctgtggcaccaaaaccagagtggcgtgccctcatggatgagatggctgtcattgctacagaggagtatcgctccattgttttccaggaaccccgtttcgttgagtacttccgatgtgctacacctgagctggagtatggaagaatgaacattggcagtcgtccgtcaaaacgaaagccaagtggaggaattgaatcacttcgtgcaatcccttggatctttgcttggactcagactaggtttcatctacctgtatggcttggctttggggcagcatttagccatgttattaagaaagatccaaagaatctccaaatgcttcaagatatgtataatcaatggcctttct

SEQ ID NO: 21678 - DNA, 187 bp, Glycine max
cactctacccctcgtgcttcttctcctattaaaagagcctccgcttttggtctaggcctctacgaattcacgactgggaccattttgtttcgactacagaaacatgcctatctagagtagcaaggtggatagtcctaacgtggactgcacacagtctgagtaacattccttgtactactatgaaacc

SEQ ID NO: 21679 - DNA, 235 bp, Glycine max
ggcgcccatggtgtaagcgagaacactatgggggcggaaataaaaaaccatagaatagatagagttattactccctataacatgtggcaatgatttggagatggcagacttaccaaggtatcttcatgcctgttcgaacacagggaagcttgtcttcttggcaatataggtgtctggaggaatcgtcttgcagattttggcatgtgccttgtataataacttggggccgatgctg

SEQ ID NO: 21680 - DNA, 412 bp, Glycine max
ggcacaagtgagtttgttgatcgagataactagaaacagtgcgatgaaaatgaaggtccttgttttcttcgttgctacaattttggtagcatggcaatgccatgcgtacgatatgttccctctccgaatgaacactggctatggtgcccgtactccggaggtgaaatgcgcaagttggaggcttgctgtggaagcacacaacatctttggctttgagaccattcctgaagagtgcgttgaagcaacaaaggaatacatccatggcgaacaatatagatcagactccaaaacagttaaccaacaagcttacttttatgccagagacctcgaagtccatcccaaggacatatttgtgttcagtatagatggcaccgtactctctaatattccatactacaaaaaacatggatat

SEQ ID NO: 21681 - DNA, 174 bp, Glycine max
gaatggaaaagtgagaagtgaagagaatgcgggttgtttgttgctccaattcaggcgtgagtgccactcttccatctttcccttgtcccagattccctccactcattgcaatttcttcgatccgctttctaaattccacacccctccgtttcactgcttcgccgcgacaagtta

SEQ ID NO: 21682 - DNA, 226 bp, Glycine max
ggggatgtgaagctacttcaccactccaaacccaccacaccagcattattcatatcttattctctaacctttcactctgccttactcactctctactttgctcatcatcgtagatgaaccaacacttctagtctctcttactttataaccatgtaaaaatgagtcacctaatgaaaaattagtagcttcttgttgtgctttttattttgtttgtgtcgagataaat

SEQ ID NO: 21683 - DNA, 396 bp, Glycine max
gttgtataatgaaaaataattgcataattgtctattgtaatgggaaatagaaaatggggaagaaaagacccggagaacacataatctccaatgtctataaattagtactcacaatgttgagcaaaaacaagatttactggggttgtccatttcattgtgaactaaataacgctttgctaattatgcctgtggcttcaatatatcgatctacgcacctagagatgcaactgctttcactcccaccgaggcttgaacctggttttgtaacacacttctcaaaacactttcttcccactgtctgcaaaataaaagtgagcggaattgtagcaaatgagacactgaacaaaatcagtactcaataattatccacatttttcaagaattacaagtagctgg

SEQ ID NO: 21684 - DNA, 216 bp, Glycine max
cactagagacaacgggagctccaactcactttatgataccgcagcataggatgcctttgttagtgatctccaccttgtctactacggatgtgaggtcactatctctggcaaagtggccgaatgaggaagatacactgattgtattgaccctgaactctgtcagcagaatgctcaatacagacaaccctgttgggcttaagaaaagcacctaatctt

SEQ ID NO: 21685 - DNA, 413 bp, Glycine max
gaagtccataactgggaggttatgggttaattcggaattaattagtttaaaaatcatcattttgcgtgcgacttgaaagacatgattagattagctgtggattcttacatccgccattttttctagtatatagaaatgaacatgctcttgactcgacatcgtttgttctgttccactagaacttattgttttggggacgggaaagcagttgatgatgtaagttgatgatgtaaatagtacatgatggagctcgagtttattcatttatcaggggcaagtatctaaggttagtaaaaattaataagttagaaaaacttcgtaagtttatttttgatagaaaaatagaaaggatccaatttgagcaatgttcaaaaaaatggttggaattagtaaaactgttttgatcaaaagtg

SEQ ID NO: 21686 - DNA, 301 bp, Glycine max
gacttcatcaagcacaagtaaacaaaaccactgtaatttttcgaccaccattgcaaatggccgcactgaacctttgccgcatggcacttcgatcctcgaaacttctctatcgcccttataatcttctctccgttcagttgcagatgcagatgcaaccctctttttctcccctcactcgaaagatgagcacggatgcgcagagtattgctttccaacttaatagttctggattgttgaagactcagggccttattgcatggaaatggagtgaagcttatgatgggtaaaccataaaagttta

SEQ ID NO: 21687 - DNA, 267 bp, Glycine max
tggtgtataggaccactttctttacatgacaagttattcttggaaagggctgggagagatggtaatgagacatcactggatgaatctgaatgtctaaattttctttcttccaacaagccttgttctgtgatctatgtctgttttggaagcttgtgtcgcattaatgcttcacaactaaaggagattgctttgggcttggaagcatcaagccaccccttcatttgggtgattggaaagagtgattgttctcaagagatagagaaatgg

SEQ ID NO: 21688 - DNA, 225 bp, Glycine max
ggtctcggttcgaatcaacataatgattacgatgcgcgtgtctctgcctaaaaggattgatagatggcatacgcactcatgatctatcatgtagatcagtcgaatgtatctaccaaggagcatatttaaatattcgttgatgcactatatcctggatgtcattgcctgcctaggtgccttgcataccatattgctggtagatcgatactggatgtgcttcaactt

SEQ ID NO: 21689 - DNA, 260 bp, Glycine max
aactcgaaagtacggcttcgagaatttcccaatttgtacatctttgggacctttgagatgccttcacatgtgattttaatctctgtcacactataatgagaggtcctacataatgacaacgaatctttacactgaaggttgtctaattcagacaacactagttcttagatctatggatgattcatacactcagaacagacttgagcgtctggcttaaaaaagaaatcattttggggcacaagcatcttcatctattttag

SEQ ID NO: 21690 - DNA, 383 bp, Glycine max
gacactatggccacctcaagcgccaaatcagtccatgatttcaccgttaaagatgccaagggaaatgatattaatcttggtgactacaaaggaaaggtccttatcattgtcaatgttgcctcacaatgtggcttgactaattcaaattacactgagctcagtcagttgtatgagaaatacaaacagaaaggtctggaaattctggcatttccatgcaatcagtttggggcacaggagcctggatctaatgaacagatacaagagtttgtttgtactcgcttcaaagctgagtttcccgtttttgacaaggttgatgtgaatggtgacaaaactgctccactgtacaagtatctaaaatcaagcaaaagtggactctttgggga

SEQ ID NO: 21691 - DNA, 413 bp, Glycine max
gaccgcgctcggattcgttatcgttctggtttagagatctttgcgaaggaggattacagcgctcaaccaaagatgctcaacgaggaaggacagatcactgagctttacattactaggaagtgctccgccacaaacagattgattaccgctaaggaccatgcttgggttcatatcaacattgggcatgtggatgagaatggcgtctacaatggccatctctccacttttgccctctgcggattcatccgtactcaaggtgatgctgacagtgctctataccgcttgtggcagaagaagagagttggaagtaagcaacagtggacacccatgatagttagctacttcggtatgtattaatttctactcttgctagagatattggagcactatgattgtcgttttgagcacaaata

SEQ ID NO: 21692 - DNA, 176 bp, Glycine max
aaccattcacttgttaaccaagttatgcctcctaaggaccaactgtttgcctatttcaaggctcgggctcaaagcctcgctgctaaaagaaagaattaacaaagactcagaattcccaaggagattttaatattgtagaaagtgaaagctacttactatctatgtttagttttcgt

SEQ ID NO: 21693 - DNA, 248 bp, Glycine max
gacatttacggaacctctattgatgtctgctcagtgcggttcatttccgctgagaatcttgatataaagccaatcttccctgggactgaatgtatcaaccagctgaaactaattataaagcgttcttggaagccagcatgaatctcatcttgagtttattgataatgcaaaagcaaggaggtttatcaaatcactgccctatactagggtcagacacttctctcagctatacccacaagcagatccat

SEQ ID NO: 21694 - DNA, 253 bp, Glycine max
ggaggagactgagaaaacaggagaaatcaaaatggaagacacagtttctgcgtttaggtctttgatggtttctcactctccgccgctggatgccttaatggtgccctctgaagattatcacctgaacgaatatgtgtctgcacgagacaagcgccgcgaattcgtttccggcttcactggaagagccggctttccacttattacaaataaaagaacactgttgttgactgattgacggtatttttttcaagct

SEQ ID NO: 21695 - DNA, 276 bp, Glycine max
atgatattaaacataagctggatggaagagttatggcatggatatagcttgatatgcaataggagatggtacagagtgaattggattctgagaatgttgagttcacagtgattgatgatgtgggtagtgaaagcctaggtcctggcattcgtagagaactttcattttcacgttggtgtgatgatgatggaaggatccatttggatcagcaattaggtaatgaagatgctggtgtataaaatgactccgattttgagttaccgttttcctgaaaag

SEQ ID NO: 21696 - DNA, 317 bp, Glycine max
agagtgcatctttccatttctgatttctgtggcatttaggaacctaagagagaataccaaatatctattagtttttccttcctgtgaaaattgtaatatataatttaatttctctaagtttattgccaacaggtgaacaagatttgggagtcattagaaaagtatacaaagaagcttgcccgtgctgaagcagtatatgcagggtcgaaaacaactgccaaaccagaaggaacaagacctacaaacaagactggcttccttggatttgttgtaaaaaggtggataccatagaatattgcaacgagaagattatgaac

SEQ ID NO: 21697 - DNA, 311 bp, Glycine max
ggaattgaggagtaccccacaaagtttgttgtttgatacaattcaaacagtttttggtgcaccaattaatcagaaagcatttcgcaactggaaagaatcatttcaagcagcaacacgggagcttcaacgcatttatggaaaggaagaacttaacctataagtcccaaccctttgtgaaaacgtaacttgggatagattctagtgtgcatagtaagatatgtctatttttaccattttcctgtgtcttttatatggctccgcaaccttcagtaatgtgctcctttggatgccttgcttaaaatattcgaagc

SEQ ID NO: 21698 - DNA, 92 bp, Glycine max
ataagggcacctttacgatctttccatgaaccatatccttgcggaacacgtggaagctttcaagtgtaaacttacaatcaataagactgtaa

SEQ ID NO: 21699 - DNA, 283 bp, Glycine max
gggggcgaggtagccagagagtgatacaatacagagtgcgttgttgctccttcgccacaactccctgccaacatgggtatctccagagattctatgcacaagaggcgtgccactggtggcaagaagaaggcatggaggaagaagagaaagtatgagcttggtcgccagcctgctaacactaagctgtcaagcaacaagacagtcaggaggatccgggttagaggtggaaatgtgaagtggagggcactgagattggatactggaaattactcctggggaaagt

SEQ ID NO: 21700 - DNA, 242 bp, Glycine max
gatacctcaggtcatgcagggctacccgatgaggttaagcgtatcattcagctaaaaaaaaaataaaaacaccaattaatcaagcggcctctctaaacgatccaagcttaattacacgtgcatgcaacgtagttgctcttctataatggcaacgaaaatcaattcacttgacgccgaattacatcgtagaaactggctaaacattgacgttacccaacataatcggcttgcagcatatatac

SEQ ID NO: 21701 - DNA, 172 bp, Glycine max
cagtatgaggttttttcattgttctctgtttgtgtttaaccttaacaagcgatcgattatattcttacaatttattgttcggtagtctgatgctggatttcttttaactttttgaaggtgatgcacaggatgcattctaataagacaagaggctagagattgatcattggaa

SEQ ID NO: 21702 - DNA, 316 bp, Glycine max
gacaaggtgcctttgataagtgacatattaaaatccatacttgttccaagaagtgacgaaagactgcgagacagggagaggtctttgtcgaggtcgcaatctagcatcaaatgctcttgttactctagatccctttattccacacccccaaatctatatgataaattgtctcctcaacctttttgcattgtatacatccatctctgtattcctccaatttgttttagttttttatagatatgccattccttttttaagctctttgaagataggtttttttctctatagttctagttgatcaccttatttctttttc

SEQ ID NO: 21703 - DNA, 339 bp, Glycine max
ttcttattgggatatatggagtgtgcgttgtgtactggtttaattatgcactggtgaatctttgtttcatactcatgaaaatttatagcatctggccattatggagagggtgcttggtcctataccacagcagatgttaaagagagttgaccgacatgcatatatttatgtccgaatgggtttattgtactggccatagggtgcatcctcactagagagtattaaaactgtaattattctttccctacttcacaacatttttatgcagtatgtttatcatttagcttgagatctttattcttcttttgcaggagctacttattattttacctctttgaa

SEQ ID NO: 21704 - DNA, 366 bp, Glycine max
ggaactcataatattcatcactagaagtgttgggtgcatttctatttctaactaattattgtgcttattattattgttgagaaagaaaagaatggcaaagttaataaaattctttgagttgaacacaggggccaagattccttctgttgggttaggcacttggcaagctgagcctggtgttgtagccaaagctgtcaccacagccattctggttggatacaggcatattgattgtgctcaagcgtataacaatcaagcagagattggttctgctcttaagaagctttttgatgatggtgcggtgaagcgtgaggacttatggatcacctccaaactctggcgttcagatcatgctttaaaagatgt

SEQ ID NO: 21705 - DNA, 410 bp, Glycine max
cttctttgggatcagcttgaagaaggttattggctcaagggtccccaacaccaagatcccctatgagtacattatcactggacttcgccagtaagtaatcactaatcacatatttacatatttatgatcagtttgtataaacttaaaataagtcattttaaaaaataaagactgcttctgccactatacccaactataagtgatgaaagaaccaatgttgaatgtctaaaataatcgatgttaaaagtattttttctaatagtgatgaaagaagaagcaggaacaaaaataaaattgaaagaaagataaagacaaaaatgaagagtttattaaacataacactatataataaccaacatgatgacttgatctctacaaaattgtgcattagtatattgtgtgatggaagc

SEQ ID NO: 21706 - DNA, 384 bp, Glycine max
acagaagggctagtgacattgatgttacttttgatgatattggagctgttgaaaaggtcaaggatacatggaaggagttggtgatgcttcctttacagaggcctgagcttttttgcaagggacaattaaccaagccctgcaaaggtatcctattatttggtccccctggaactggtaaaacaatgcttgcaaaggcaattgctactgaagctggtgctaacttcatcaacatttttatgtcaagtatcacatctaagtggtttggtgagggtgagaaatatgtgagagctgttttctctctggcgagtataaattcacctaccgttatatttgttgatgaagttgacaacatgttgggtcggagggaaaacccaggagagcatg

SEQ ID NO: 21707 - DNA, 413 bp, Glycine max
attcccgttaatgatgtgataacagctggaccgggacccagttcctttgttcaacacgttacaataatggcccatttttctctctcccctctctcctgtgcaccttctcctctaccaccacgccgccgaatctttctctctcctcctcgagccgccgcatcttccgccaccgacgtcgtttccacttccacttccacttcatcttctgcttcgaatttcgcgcccaaagtcgttgtcaccagagagcgcggcaagaacgccaagcttatcgctgctctggtacgcgcttctgttcactcacttcacatttcgcacctacgatttgttttcctacaactgcattgcaatgtgcttaaccttagtcactcgaactccaaccagctagttgtgtccgttttttttttccgagtctc

SEQ ID NO: 21708 - DNA, 418 bp, Glycine max
  modified_base (413)..(413): a, c, g, t, unknown, or other
gaaggtgcaagagtttgttgtgagctataagctagtttatcgtgaggagaatatgaagttgtttgttttctttgttgctgcagtagttttggtagcatggccatgccatggcgcaggctaccaaaggttccctctccgaatgaaaactggctatggtgagcgttcttcggaggtaaaatgcgcaagttttaggcttgctgtggaagcacacaacatccgagcctttaaaaccattcctgaagagtgcgttgaaccaacaaaggactacattaatggcgaacaatttagatcagactctaaaacagttaaccaacaagctttcttttatgctagtgaacgcgaagtccatcacaacgacatatttatattcggcatagataacaccgtactctctaatatcccatactatgaanaacat

SEQ ID NO: 21709 - DNA, 394 bp, Glycine max
gaccacttcctactacacaagaactagctataggcctcaattagttattatattaatttggtctaagtagttgttattacttgtgtagtagttcttctccaatggctgatttaggttcagcctcttccaagagaatgtggtgttccgttccagaaagaatgcagcttcacttggccatgttggccttgcagtttggctatgctggattccatgttgtctcaagagctgcacttaacatgggcgttagcaagcttgttttcccagtctatcggaacatcattgccttgcttctgctccttccctttgcctacttcttggaaaagaaggataggccagccatgactttaaacttcgtctgccagttctttcttctggcacttgtcgggattacagc

SEQ ID NO: 21710 - DNA, 404 bp, Glycine max
aagacgacagaagggatttattttattgtaagttttctgctaatgacgtgtacattctccctgtttcttacccagatgtagcacttgtcacatctttgagggatggaatgaatcttgtaagttacgaatttgtggcctgtcaagataaaaagaaaggggttctcattctcagtgaagtaattactgaaactttatagtgtatttgtctacttttaatttctcaaatcaggctatgttaatgttgaataattaagaaagaaaagattcaaaagctagtagttggaactttcctcctacagtctgttttcctgtggtcatcgcacctgtgataaattgagtaaccgaccaaaagttcatgaattcggtgcccgaaacaaccctcccttcttataaacatatgccct

SEQ ID NO: 21711 - DNA, 280 bp, Glycine max
gaccaaaatactcctattggcatcttgtgttgcgtccctcttttaagctatatccttctcttaacacaattggttgtgccaattgccatagtcaccaaccaattaacaaaggcttatatatcatcatatcatcaccaaatgaaaaatattgggttgctttttcttgtggtgggggctacttttgcggtggcagccacagctggtagctgttaccaagactttgaaataacgtggggtggtgagcgtgccaaaatctatgagaatggataccttctcacac

SEQ ID NO: 21712 - DNA, 339 bp, Glycine max
gagtgtgtgagttcattaacatatacaaattctctgtgttgtgttgtgtacttgtgttaattgtgttgttgttgtaggaaatttaagtgaagagagaatgatgatgaagtctgctatgtgtgcattggtgcttgtggcactggttgtggttgaagtggggcccatggctgatgctgcggtgacttgcaacccaacacagttgactccttgtcttccggcaattaattcaggttctgcaccttcgagtgcttgttgccagaagctgaaggagcaaaagccatgcttctgtggctacctcaaaaaccctagctagaagcagtatgttaactctcctaatgc

SEQ ID NO: 21713 - DNA, 191 bp, Glycine max
aggcgtgcgaacaggtgagagacgactgaagggggaccgtaatcattgcatcttcacgctccacactggagcgctaaggacgttgaactgctgttactcacacacgccatgggtgaatgaatggtttttgagcaacagcagttaaaagagaaaaggggttcaccgtatatgacatccaatgttacgtaccc

SEQ ID NO: 21714 - DNA, 307 bp, Glycine max
tcactctcatggtgtagcacgagcatgaataacttggtcctatctgttgttccgaaattcgtaaaactgcaaactctaatcctgcgtcaagacaagcctcaactagaggataatgctgacgagactattgcaaaatgctgtcatgaactgcagattctggatctcagcagaagtttcaagctgactgatcattcactctatgaacttgcccttggttgtcgagatcttacaaaactcaacatcagtggttgttcagcatttagtgacaatgctctgccttaccttgccagtttctgcagaaaactga

SEQ ID NO: 21715 - DNA, 329 bp, Glycine max
gagtgtgtgagttcattaacatatacacaaactctgggtccaggggccaaccaaggctattctactatccatcattggcagccacatcttcccttagtactagaaatgaggctgcaacaactgaacttgttctttctgctgctttgtgttgccaaagcaaacggatctctgatgccattcatggatcctcccatcactctcttggctgatctctggtccgatcgctttccagacccgcttcgcgtgctggaacatattccgatcggggttgacaaagatgaagcatccatggccatgtcacctgctcgagtggactgcaaggagacccc

SEQ ID NO: 21716 - DNA, 306 bp, Glycine max
ccacgcgaacaccaacgcgtgcgacgaggtatagaccactgatgggtgtcttattgtgtgacagaatcaaaccatacagacctttcctgacttaatcttactccttttaaatgcattgagccagactctaacattgagttaatgaaataaaccactctacattatatgtactgaagagcgaaatttttatcctcgatcttaaaaatgggcaactgttctcaagatgtgaaataactgctgaagactgtgataatactaacactacccaatgtacttaccccctcagcaagagaacaactaagtgac

SEQ ID NO: 21717 - DNA, 338 bp, Glycine max
gaaagttgattgggataaatgggttgatgaagatgaggagcaagataataaacctgcagcatctgatatggactttggtgacattgatttttctaagatgagcatgggagggggtgagggattggattttgatgctgcaggcaatgatgatgatgatgagagtgacacagaagaggagtttgcaacagaagcatctgctagtaaagaacaagattcgaaagatgctgtaagcagctatccaattccaaaggatgcacctgatactaaagcataaacaattcgagaatggtgaaccataacatagctttgactatgtaagggctagacaagcttttctg

SEQ ID NO: 21718 - DNA, 248 bp, Glycine max
acgtgtgcgtacaggtgcgagaggaccacatacgggagtatttgattttggagcagatgaggccataggtcgtatggtggcagctggacctatacaacagacgggtatacctcaagcccagcggtgctatttgttgggttttagcgaatccccttcttccccgttgcgcttatggttgtgggagtaaccgatatatcctcacaacccaaccctattgaattgatatgtttgaagtagagcatcctaag

SEQ ID NO: 21719 - DNA, 131 bp, Glycine max
atttcagaaccatttgaaccatcaccctttatgcctggaggcactagaggttttgtagatgacttcaattcaattagcagaaagcaggagagaggagaagcagattctgatgcatcacttttcttaccttc

SEQ ID NO: 21720 - DNA, 298 bp, Glycine max
gacaccactgacggtccaattgttggtacaggacccatatgatggccgtattgagtttcctttcctccggttcgggctttttcagcccgtaaccggaagcactcagtgttggcttggcgtcctgccatgggaacaaacacaacacaaggctccttgtgaattgtgatgacgtgaccagtgaccaccattcatccatccatccatcctcaacacaacgatccaccatcactcctttctttttcccatcccaagaaacaaagaaaccagtcccactttaattatttttattaacccattc

SEQ ID NO: 21721 - DNA, 408 bp, Glycine max
attactcatgttggttcctaaggtatggttctgtcatgttgggggtttgaaaacaaaaggtaaaataaactatggttgaaactagacaaaataaacactaaaagaggtgtgaaagataaggtaaaaactaattggtaaaaggcaagctatctaggcggtttgacaatggagggtaaaggaaataagctatgaaaataagcaagaaattaaagtgcaagaaatgcaaactaggcggattcttagaatggtttgattaacctatttaagggttccaacaaaacaactactattctaaggggaaaatggctaaaattattacacacaaatggaaatagggtgacctaatggaagcttccaaattactttcaattaaagggcttttttgtttcaaattttgaaagccaagca

SEQ ID NO: 21722 - DNA, 396 bp, Glycine max
gatcttaagcttgttctctctctctctctcttgttacacattctacattctctctctattatttttcaccctttttctctcttttgcaaagaaaacaatttaattaagtcaatttgtaccaaaatggcttctcaagtttgtgaaactttggctttcatcaacggtgatgatgggttgaaaatcaacggtgctcttctaatgtccctgatggaagagccatcaccaagtgatgagagtgatgatgatcgattggatagcttgattaggtcctttgaagctgaaattagtggaagcaagatgggggatcatcatgattcatcatccatagggtcagaaatattgatgagcaataatattatagaagagtgtgcatctcaatcatggaataataacatg

SEQ ID NO: 21723 - DNA, 243 bp, Glycine max
acaggtgtgcgaacaggtgcgagaggacagcagatggttgttgtatattttggctgaagatgctttatactcatggtttctgtgtgtggacgatgtttatgtatcttgacactatatattggcactctacgtttgagtgatattaattgtacagtcaagtatttattatgtatgtttgaatacggcgtatacactggtatacatgtggcgttcaccgaattatgggtcttgagctatatacat

SEQ ID NO: 21724 - DNA, 286 bp, Glycine max
ggtgtgggatgagaagatgatgaggaaacattggtagaagaaattggagagagagagagagagagagggttggattggttttcttcttcctcttcctaaagagaatctaatctcaatcctcattacacacatatctacagatttcttcattcctctctcaatcttttctgttttcttttcccctctttgacatcctcgttttcgccgaaacaaaaacaactaagattttgttttttgttgtatttttcttcctgttgttatttgactcggttgtctgaatcagttg

SEQ ID NO: 21725 - DNA, 172 bp, Glycine max
  modified_base (38)..(38): a, c, g, t, unknown, or other
  modified_base (67)..(67): a, c, g, t, unknown, or other
  modified_base (85)..(85): a, c, g, t, unknown, or other
  modified_base (103)..(103): a, c, g, t, unknown, or other
  modified_base (118)..(118): a, c, g, t, unknown, or other
  modified_base (124)..(124): a, c, g, t, unknown, or other
  modified_base (141)..(141): a, c, g, t, unknown, or other
  modified_base (163)..(163): a, c, g, t, unknown, or other
ggggccacaggcacaacacacgacacacacagagcggnagcggcgacaccaagaccggagaaagaanggcgaaaacgacgccgangcagcacgcaacacggcnccacgacggaacccnagcgcncaaccaggcgaagaaancgaaggaggaaaagaaggaggngacccacaa

SEQ ID NO: 21726 - DNA, 376 bp, Glycine max
  modified_base (298)..(298): a, c, g, t, unknown, or other
  modified_base (351)..(351): a, c, g, t, unknown, or other
gaaccccccattactcacttttcatccttcgatcatacacttagttgcttccaattaagatggttctgctagagaagctctgggatgatgttgtggctggccctcaacctgagcgtggccttggcaagctcagaaaactcaccaccctcaaaactattgatgaaggagaaagtagcaagctgcagaagacgttgtcgatgccgtcgacaccaacaaccccgatgactccgacgactccaacgacaccgggatcggcccgtaaagctgacaacgtttggaggagcgtcttccatcctgngagcaactccgccacaaagaccatcggtgctcagatgtttgacaaaccacttnccaacactcccactgtctatgactg

SEQ ID NO: 21727 - DNA, 161 bp, Glycine max
ggtttatgggttggtttacaatgggcttctctaggtgagattgtggagaatctcgcaatttcttatttaccagattttccaaatttgagatatttacgcacttagagtaaatgcaagaactttaataaagaatgggtattgggaatcttgttttccaactc

SEQ ID NO: 21728 - DNA, 323 bp, Glycine max
  modified_base (285)..(285): a, c, g, t, unknown, or other
ggaaatgggttggtttacaatgccttcgctatctgagattgtggagaatctcgcaatttctagttaccagattttccaaatttgagatttttacgcacttagagtaaatgcaagaactttaagaaagattgggtattgggtatcttgttttccaactcaataagatagtggggaggaaagagatatggctgtaggtagcaaaaccagaaatatgcttgaaggtctggttaaagaaggatcatttaaatggttgcttggcaagaagagttacttttatgaagaatntgaagagatggaaaattcttcttctgctgggaagaatt

SEQ ID NO: 21729 - DNA, 429 bp, Glycine max
acctttgaatcacctttgattcaccatgaagctttgcttctacatgatcccattcgtaacatccctaattatcgacttctcggtggctctcacactacgacatttcactcaacatcattgttgataaaaaatctccataggtatccttttctacgacctcgatcactagctttgacatcactcaactgctcttaagatcattgactatcctcacaaaccaacaccaaacattttagcatgctttgtcctaacctaaacactttctaaggaaccttctaagaaggcaaccattccaatacttcctccagtcgaaccttcttaaatgtaaatttcttaaattattaggtatttgaaagtaaatgcctcctggtggtattaggaggacccaataatttctttaagtcaccctccactggataatctcatgcc

SEQ ID NO: 21730 - DNA, 249 bp, Glycine max
atcacgttcaataaagaacgataatcggcatcaggatgcaaatcagtactatatatgcagcgtacatatttacaacgctatggtggttaaggatagggatatattgttgatcaacaaatcaacgtgagttgtgaagtatattaattattaggaattattcgatttagaacttttactgttaggttgattaatgttttatgagtagctttaatgttattgacacatgtttattatctttttgaggcctgt

SEQ ID NO: 21731 - DNA, 397 bp, Glycine max
agggaatatgtccactgcattacagcaaattccagggcggactcctttaaccactgacatcaaaggagaagttaatttaggtgccactccaaagagtttgcctatggatacatcagtttatcgacaagcaattttacaaacaaaatctgggctaggcagtccaggaataaatcaaggagttacaagtcttccattgaagggttggcctctagcatctggaattgatcaactaaaacctaatttcggtgtacaagcttctaagcccaatttgacaacccagaaccaatttgttttggcatcacaacggcaacaagccttggcacaagctcaggcacaaaataaccttgggaattctaattatggtgacatggatcctcgtagactttctggtctttct

SEQ ID NO: 21732 - DNA, 414 bp, Glycine max
  modified_base (252)..(252): a, c, g, t, unknown, or other
gggtgaaggtgtatggtccaacctatggatcccccaagagggtcctggtgtgtctgattgagaaggaaattgagtttgaaacagtgcatgttgatctcttcaagggagagaataaggaacctgagttccttaagctgcagccatttggatcccttcctgttattcaagacggtgattatactctctatgaatctcgtgcaataatcagatacttagctgagaagtataaagaccaagggactgacttattgngaaagacaatagaaaaaaaaggtctagtggaacaatggcttggaatggaagcctataactttcaaccaccactctacaacttgggtattaatggtctggttgcgccattaacgggggcttcttcggaccaaaaagtgattgaagaaagtgattaaaagattg

SEQ ID NO: 21733 - DNA, 260 bp, Glycine max
gatccccaatcagagagaaaagttagggttcacaacttttccttttccttttgcttgcgaatctgaatcaaataatcaatcatccattcattattcatcatgtcgtcggcgaagaaaatcacgctgaagagttcggacggcgaggctttcgaggtggaggaggcggtggcgctggagtcgcagacgataaagcacatgatcgaagacgactgcgccgacagcggcattcctctgccgaacgtgacgagcaagatcctggc

SEQ ID NO: 21734 - DNA, 258 bp, Glycine max
aggtggaaagctctgacaccatcgacaacgtcaaggccaagatccaggacaaggaaggaatccccccggaccagcaacgtctcattttcgccggaaagcaacttgaggacggccgtacccttgctgactacaacattcagaaggagagtactcttcacctcgtcctccgtctccgtggtggcatgcagatcttcgttaagacactcaccggcaagaccataaccctagaggttgaaagctccgacaccatcgataacg

SEQ ID NO: 21735 - DNA, 217 bp, Glycine max
  modified_base (16)..(17): a, c, g, t, unknown, or other
  modified_base (32)..(33): a, c, g, t, unknown, or other
  modified_base (71)..(72): a, c, g, t, unknown, or other
  modified_base (94)..(94): a, c, g, t, unknown, or other
  modified_base (96)..(97): a, c, g, t, unknown, or other
  modified_base (107)..(108): a, c, g, t, unknown, or other
  modified_base (207)..(209): a, c, g, t, unknown, or other
gtaatgataacctganntaacatagagaaganngtgggagaaggaagcccttagtgagtgtgaagaattanngaaaagaagaaacatgaataanannttggtaatgnnaatttccttgggtcaccgaagggccttatgttgaagctgcttgagaaaaatttcgaaattggaagtctggaaccttgaaccaagaccataagaatcttnnngcaacaat

SEQ ID NO: 21736 - DNA, 344 bp, Glycine max
gatcagaggaagaatgtttctaccttcctagtccaggctggtatcgtgaagaaggatcatatcaagattcatggtttctgagcggttggagtcttaagtgtcaaattttacctgcctgactatgtgttaggcataatatataatctgagtcgtgtggatgtgattgtggtatttctaatgtgttcttatgttttaccatgtgatgtgggattatggatttcagaacattgtgggttatttgctttgaagacttatttgaaaacggtttaatcaagggaaaaaattaaaaaaaaaaaaaaaaatgccggccgttttaaagaatccaacttacctacccctgcctt

SEQ ID NO: 21737 - DNA, 384 bp, Glycine max
  modified_base (37)..(37): a, c, g, t, unknown, or other
cggacgcgtgggaaaaccaatgtcatgggaagagagngacctacagctacaagccaaggggcaagccaggatgcagtacctgtctaacttggtggctagaagatccattgtcccaattgcctcagggagacaaatcacacagagccctacatacatagtgagggccaagtttggtaccccagcacagaccctcctcttggccatggacactaacaatgatgctgcctgggtcccttgcactgcctgtgttggttgctcaacaaccacaccctttgctccttccaagtccaccactgtcaagaaagttggatgtggtgcttctcagtgcaaacaggtacggggcctcacttactacggaagcgcgtgtgcattcaactggaccta

SEQ ID NO: 21738 - DNA, 196 bp, Glycine max
ggcagttcaattccaatatattccattctctctgtgtatttccctacctctcccttcaagatgcagatcttcgtcaagaccctcaccggcaagaccatcacccttgaggtggaaagctctgacaccatcgacaacgtcaaggccaagatccaggacaaggaaggaatccccccggaccagcaacgtctcattttcg

SEQ ID NO: 21739 - DNA, 216 bp, Glycine max
  modified_base (6)..(6): a, c, g, t, unknown, or other
  modified_base (9)..(9): a, c, g, t, unknown, or other
  modified_base (14)..(14): a, c, g, t, unknown, or other
  modified_base (27)..(27): a, c, g, t, unknown, or other
atttgnggnatggntgagactagactngctatgggttttgctggccaacttgctgctggccttggctgttttaagttcattgacttagacacaccacttctgttgtcagatgatccagttcttgaaggctatgaagtttctggtgccacttataagttcacaaacgctaggggacatggtggattccttcactgggacaaccttgcttaatgtaaa

SEQ ID NO: 21740 - DNA, 194 bp, Glycine max
  modified_base (9)..(12): a, c, g, t, unknown, or other
  modified_base (15)..(16): a, c, g, t, unknown, or other
  modified_base (18)..(18): a, c, g, t, unknown, or other
  modified_base (28)..(28): a, c, g, t, unknown, or other
  modified_base (31)..(31): a, c, g, t, unknown, or other
  modified_base (38)..(41): a, c, g, t, unknown, or other
  modified_base (48)..(49): a, c, g, t, unknown, or other
  modified_base (56)..(56): a, c, g, t, unknown, or other
  modified_base (70)..(70): a, c, g, t, unknown, or other
  modified_base (72)..(72): a, c, g, t, unknown, or other
  modified_base (76)..(76): a, c, g, t, unknown, or other
  modified_base (89)..(89): a, c, g, t, unknown, or other
  modified_base (107)..(107): a, c, g, t, unknown, or other
  modified_base (110)..(110): a, c, g, t, unknown, or other
  modified_base (113)..(113): a, c, g, t, unknown, or other
  modified_base (119)..(119): a, c, g, t, unknown, or other
  modified_base (128)..(130): a, c, g, t, unknown, or other
  modified_base (145)..(145): a, c, g, t, unknown, or other
  modified_base (148)..(148): a, c, g, t, unknown, or other
  modified_base (162)..(163): a, c, g, t, unknown, or other
  modified_base (166)..(166): a, c, g, t, unknown, or other
  modified_base (181)..(181): a, c, g, t, unknown, or other
cttcaaacnnnnccnncncagagacacnacncggggannnncaaccgnnggcaagncacaaagacagcancncagngaacaagaagcangcagcaaggaaccaggancancancaaagngcaaaacannngagaccggagaccangancagcaaccgaggannccnccaaagcgccccccngagaagagacaac

SEQ ID NO: 21741 - DNA, 111 bp, Glycine max
  modified_base (2)..(2): a, c, g, t, unknown, or other
  modified_base (5)..(5): a, c, g, t, unknown, or other
  modified_base (16)..(16): a, c, g, t, unknown, or other
  modified_base (49)..(50): a, c, g, t, unknown, or other
  modified_base (80)..(80): a, c, g, t, unknown, or other
gnagngaccggggganggcaggggaaaaagaaaaagggccgaaaccaannaaggaccaagacaaaggggggcacaagaangggaaagagaagaaagacaaggcaaggaaag

SEQ ID NO: 21742 - DNA, 378 bp, Glycine max
tcataatgacggtgttcaatttgatttggttgagggtgctatgtctgctaataatccagcgttggttgctgtgagcgaagtgatacaacacaatgagcataaagaaatcctgttgctgtcattaggaacaggaacaataaaagctgaggagaagttatctggcatctttgatggcttgtgtcaacttgagtggctagttagcagcactaacgtttttagtgaggctctatatagtacaaacatgatccactactatcttgccacagtgtttccaggtgttttgcctgcggataactatcttcgaattgaggagtataacctggatccatccatggaagaaatggataatgctgacaagaaaaacatggattatcttgt

SEQ ID NO: 21743 - DNA, 423 bp, Glycine max
ggttctagtgtgtgattgtttgttgttgtaactcgttcttcttcttttgttctgtgtttgtgtttgttttttctctcacctgaaaatgtcttgctgcggtggtaactgtggttgcggaagctcctgcaagtgcggcaacggctgcggaggctgcaagatgtacccagacttgagctacactgagtcaaccaccaccgagaccttggtcatgggagtggcacctgttaaggctcaatttgagggtgctgaaatgggtgtccccgctgaaaacaatggctgcaaatgtgaaccaaactgttcttgcaccccttgcccttccaattaaggggttggaaaaccaaccttaaaccaaaattacccttaatttaggattatggttaactatttatgtgttgcttaaaacttatgtattatgtctgggat

SEQ ID NO: 21744 - DNA, 295 bp, Glycine max
atcattggaagctacagtgatgggaatcttgttgcatctttattggcttataaaatgggagttacacagtgcacaatcgcgcatgcacttgagaagacaaaatatccagattcagatttatattggaagaaatttgaggataaataccacttttcatgccaatttactgctgacctaatagccatgaataatgctgattttatcatcaccagtacataccaggagattgcaggaacgaaaaatactgttggccagtatgagagccacgctggttttactcttcctgggctctata

SEQ ID NO: 21745 - DNA, 389 bp, Glycine max
ggttcttaatccatttacttttagatgcggttttgaatatagcttttgttagaaaggaatttattgtgctgtgttattaccacacacaatacctttatttataataagaattgatacatcataagggaaacctaataatgaagattaaataaggaaatccctaattttagctatacaattaaagcatatcaatcatatcctaattgtatatttcacactaccctcaagctagagcattgtcacataataatttggtatggtgaaacgtttccaattttatcttttggagaaagtgccttaatgatgggaacttaaattcaactgctggcatgacacaatacttaacttcggaactagatttaacaaccgatttttgcttcttgaacttt

SEQ ID NO: 21746 - DNA, 185 bp, Glycine max
cggacgcgtgggaaaaccaatgtcatgggaagagagtgtcctacagctacaagccaaggaccaagccagggtgcagtacctttctaacttggtggctataagatccattgtcccaattgcctcagggagacaaatcacacagagccctacatacatagtgagggccaagtttggtaccccagcac

SEQ ID NO: 21747 - DNA, 256 bp, Glycine max
atgtattttttagctattattggatttaaaattgaaggtcaacttcaattattaaaataaattttaaaccaaaaataatataaaatagcatttatgatagtgtccttaattaaggttgttccattttttgtgtaaaaatatatatcagacatgacaaaacagcaagcacattttggaggagctgaagcataccatgtgtggttaataaaacttattgaaaaagcagctaaaaaacatgtgccctgccttataatat

SEQ ID NO: 21748 - DNA, 249 bp, Glycine max
gaaaaccaacaagacaacaacaactacaacaactacaactcttccctctctccttaacactgtttcatgcaaaaccatttctagggttttcggttttctcgccattcttcaattctcgcgctccggcatcgcttcgccatggcatttccgaccaaaaagctcatcgacgcccccaatgatgttgtgactgatttaattgaaggtttggtgaaaacatatcctgaactacagaatttaaatggttttctt

SEQ ID NO: 21749 - DNA, 327 bp, Glycine max
gaataatttttgattcttttcccctagattcaggcgcagtttcggaggagaagaaaatagtcgttcgagatggcccgtacgaagcaaactgctcgtaagtccacaggaggaaaggctcctaggaagcagcttgcaaccaaggctgcacgtaagtctgcaccaactactggtggtgtgaagaagccacatcgttaccgtcctggtaccgttgctcttcgtgagattaggaaataccagaagagtaccgagcttttgatcaggaagctccctttccaggggctggttcgggaaattgttaaggacttaaaaatggttctgcgtttcaaa

SEQ ID NO: 21750 - DNA, 284 bp, Glycine max
gacgaaaatgtggaagagaacgggttttgaagaagaagcagttcaattgatcaactcagatttcagggacctaagtctagctgctaatagactcgcccatcatgccatcaaacttggtggcattggctttggagccttttttttcggatggttggctgccattgttgttattaatttgtggattttgaatcgaccaacctgaaaaccaatttttttaacagaattattatttcattccttttttttaacttggctttatttaattttaaactttttaaggggaa

SEQ ID NO: 21751 - DNA, 355 bp, Glycine max
gaatcacagtggtgtcttatcgctgtggttttgatcgtcttccgtctcttatatttctttttttttttttgtcttcgccgcacgccgaaacaatggccggaaaaggagagggtcctgctatcggaatcgatctcggaaccacctactcttgtgtcggtgtgtggcaacatgaccgagttgaaatcatcgccaacgaccaagggaacagaacgacgccgtcttacgtcggcttcactgataccgagcgtctcatcggtgatgcggctaaaaaccaagtcgccatgaaccccatcaacaccgttttcaatgccaaaaggttgattgtccgtaaattcagtgactcctttgttcaaag

SEQ ID NO: 21752 - DNA, 191 bp, Glycine max
gacccacaaactctacaagtgtcacaagtcataactcgttagagagagtttgtgtgtgtttttgtgtgtcaccttggtgcatacaacacaagatggaggaccaaaatggtagtggtaagttgagccaagggcttcgcaaggtgaagccctaccttgctataattgcccttcaatttggcttcttaaggatg

SEQ ID NO: 21753 - DNA, 346 bp, Glycine max
attatcgacaagcgcatcaccccgcgctttatccgctatgttcgctgggacctctgcctgggcatctttcgggtggtgctcggcgcggttgcgatgatgagctttgccgcggcggtctttgccggacagcccgaattcggcaactacaccgacgcactcggcaccgtcgtcgggctggaaaaatacgccggccggcttcccgcgatcctgttcgctcttgcgttgctcgaggccagtattatctggtgccgtggtcgtatcgttcgggactgcctttgctatcggcgacgtgttttcgttcaagccctctttgctttgcaggccgaaggatgcaaaggggtttatt

SEQ ID NO: 21754 - DNA, 358 bp, Glycine max
aaacaccaaagggggctttgtgaaatatctgatacacatttcactggtatggagacgcacgcattttaatgacaatgactaactggttgtacttattgggtgaagttgttaagccacgttgggatcgtggagattgcaccacttacaccagggtcgagaggccttcccataatagggaatcttcatcaactagatagtccttctcttcatgagcagctatgggatctctcagagaaagatgggcctttattttcccttcaatacggattaaggccatccatagtagtttgctctccacaattggccaatgatgcaaggaaagacaatgaccttgggtgctgaggacgaccttaattac

SEQ ID NO: 21755 - DNA, 151 bp, Glycine max
  modified_base (5)..(5): a, c, g, t, unknown, or other
  modified_base (11)..(11): a, c, g, t, unknown, or other
  modified_base (13)..(13): a, c, g, t, unknown, or other
  modified_base (24)..(24): a, c, g, t, unknown, or other
  modified_base (28)..(28): a, c, g, t, unknown, or other
  modified_base (36)..(36): a, c, g, t, unknown, or other
  modified_base (40)..(40): a, c, g, t, unknown, or other
  modified_base (42)..(42): a, c, g, t, unknown, or other
  modified_base (63)..(63): a, c, g, t, unknown, or other
  modified_base (67)..(67): a, c, g, t, unknown, or other
  modified_base (70)..(70): a, c, g, t, unknown, or other
  modified_base (73)..(73): a, c, g, t, unknown, or other
  modified_base (100)..(100): a, c, g, t, unknown, or other
  modified_base (103)..(103): a, c, g, t, unknown, or other
  modified_base (106)..(107): a, c, g, t, unknown, or other
  modified_base (122)..(122): a, c, g, t, unknown, or other
  modified_base (125)..(126): a, c, g, t, unknown, or other
  modified_base (130)..(132): a, c, g, t, unknown, or other
  modified_base (134)..(134): a, c, g, t, unknown, or other
  modified_base (136)..(136): a, c, g, t, unknown, or other
  modified_base (138)..(139): a, c, g, t, unknown, or other
  modified_base (147)..(148): a, c, g, t, unknown, or other
ggaancaaaangnaagccaacagnaaanccagcggnaccnancaaacgcaaggaaacaccagngaanaangcnaaagaaaccaacaaaaagaccaaggcnggnggnnggaagaagaagaaanagnnggcnnngngncnngacaaggnnaga

SEQ ID NO: 21756 - DNA, 305 bp, Glycine max
gacctcaccgagtcgcagaaaaagaaaaaagcgagcatagtttcacttcggccttatccattttagggtttcggttctctaccctatctttcacgtatcgaaaccttaaatttacgatcatgtctgagcaatctggttggtagaacctttggtcttagtgagtcaatgtttatgtctgaattagacgatcaaattcctactgccttcgatccttttgctgatgcaaatgctgatgactcgggtgctgggtcaaaggagtatgtgcatattcgtgttcagcaacgaaatggtttgaaaagcctgac

SEQ ID NO: 21757 - DNA, 367 bp, Glycine max
acgacagaagggcaattttccaatttctgcaggaaatatctcatgcctgtgggttggccagaaatgctgataaaggtggtagtcccacaaatgatttgctcaatatcagtcaaggtcccgagattaaagacaagattgtacttgatggagatgcatcatgcctcctactggatgagtatttactgcaaacacaagtcactgctggtacagttcagggggctatcttggatgatgtgaccaccccaagctctcctgatggaatttcatgctataacgatgctttgctatcctggatattttcatgttcacctatttggggatcagttgacatcatggctgcggaccagagaagataacctaaataagg

SEQ ID NO: 21758 - DNA, 318 bp, Glycine max
  modified_base (259)..(259): a, c, g, t, unknown, or other
ggaccatcaataacattggccagtgtatcagaggttttagcatttgcagttgggagttttatttccatgcctgcaattcgtgtgttctccatgtttgctgcattggctgttcttttggacttcctcctgcaagttaccgcttttgtagctctgatagttcttgactccttacgggcagaggataagagagttgattgttttccatgcataaaagtacatgcggaccctgatataggaactggacgaagaaaacctggtntattggctcgatacatgaaggaggttcatgctcccattctgagtatttgggggagaaaa

SEQ ID NO: 21759 - DNA, 396 bp, Glycine max
ttactgtttactattgtgctgtgctggctttctggtagcttaatgacttttggatattgattttatctaagtaaccaatatatactttatggaaattatggaaggttactctgtttatgctttccttgacctagcgttaagtaatcaatattttatcttggatttaagttgtttcaagctaattgtggtgaagttctgtcaaatattactccatattcttcatttcttttctctgtcatataaacctgtgttgttgataacagatcatataaatttggacttaaactttgaattgatgatgtgccagtgtgataatttctgatttttgggattgagttctttggtattagtttggaaattattctttctcttcagatttagttcacattgttgtct

SEQ ID NO: 21760 - DNA, 374 bp, Glycine max
  modified_base (7)..(7): a, c, g, t, unknown, or other
acgcgtncccgacagtatgacaatacttcaaataggacactaaatactttcggcctgtggaggatacaggggggctcagttagcgagaaatcacacaaatgatcagctgacaaataactacatgaaggggaaaaaaaaacaagccgtacttgatggagacgcatcatctctcctactgaaatagatattactgcagacactcataactgttaccctctgcacaaggagcgtatattgacagatgtcaccaccccaagctctgctgatggaattccatgctataactaggctatgctatccagaatattgtcatgttcacctacagcagatcagcattcatcatgggtgcagaccaccaccgatgaactaaataa

SEQ ID NO: 21761 - DNA, 314 bp, Glycine max
ataaatgaacgaaattgaccatgatcgtataatgaatatgaacgaaattgatcatgatcgtataatgaatatgaatgcataataataatcgaaatcaaaagaatgtaataaataatgatcaggttctaaatcatataaaagttggctctgataccaaatgttgggaaaactatgccaataatatatattttataaaaatttagaacgccgataaaatacttgttgaagtcatcatcaaaaagatgagaatggtctatgcatactacaacctgtagaaacccaaaagccaagccttcgcttgcgtgatcacactc

SEQ ID NO: 21762 - DNA, 337 bp, Glycine max
  modified_base (266)..(266): a, c, g, t, unknown, or other
aattatgttatcactaaagacctcaatccaattatgcctcactagtttctacattttgacttaaaataaaaatattttaaggaacgattggataatgaatcaactaaataattatccataagtaattgatccaaatgaaattaaggaaccattgtaacaattattttatgataaatatagtgatacacttaaatttgttataagtaggataagagaatgtagctaagattagtcttttgtttataaataaaatacgaattcaccgngtttattattagtattcttatctcttaacaaggttgaaatcttgttttggactatgttaagaatatcatat

SEQ ID NO: 21763 - DNA, 304 bp, Glycine max
tgaactaataaagtgatatgttgagtgtgggcgattatatcatgtttatatgttgttcttgttacaagggaacataatgtctattagttgttagactacaattgagaatgagttagtacaataagaggaataatattacatgagttaaggtaaatgtctagagtgtcctagagcattaatgatgttagattgatcttgttaaatacttttaagtgtttgatagagaagagtatgttaggtcctgacgaccagtcttctcatctattttggatttgatgaataacaataagtataaattactgat

SEQ ID NO: 21764 - DNA, 410 bp, Glycine max
  modified_base (343)..(343): a, c, g, t, unknown, or other
cccacgcgttcgcccacgcgtccgcccacacgttcgtccacacgttcgtaccggtgtgagaggacacacacaaagggaatatgtgtttactctaaacacctccacccaatagcgccacaagtagtctacactttgactcataataaaaatattttaaggagcgactgggtaatgaatcaactaaataattatccataagtaattgatccaaatgaaattaaggaaccattgtaacaattattttatgataaatatagtgatacacttaaatttgttataagtaggataagagaatgtagctaagattagtcttttgtttataaataaaatacgaattcaccgngtttattattagtattcttatctcttacaagggtgaaatcttgttttggactatgtttagaatatca

SEQ ID NO: 21765 - DNA, 380 bp, Glycine max
gatagcagcatcatacaaagcattgaattcaaaaaggaagttcatttcttgtgctttgctttattcctcaaaaccaaacatgtcgaacacatgcggcaactgtgactgcgctgacaagactaactgcaccaagggaaacagctatggtgttatagtagagactgagaagagctacatcgagactgttgacatggatgttccagcagctgagcatgatgggaagtgcaagtgtggcactaactgcacttgcacggactgcacttgtggccattaaggaatatgtatgaaaatgtaattgccatgtgtttggcaatacaaatctccaaataatgtaatcttcgaatgaataaatgtgtgctgttatcctacttcagggtctg

SEQ ID NO: 21766 - DNA, 345 bp, Glycine max
gaacaacaaacatcgaccacgggtgcttgtcgggggttctcaaatccaaaacctcgattcactcgattgggcgtgtgccttgtcgtcgccttcgtcatggcgacgctgctaagaaaactgtgcaaatcgtcgacgatgaagcgatccggctctcactctcaccctcaccctctgccgttctcggaacaagcacgcccatacttccctcttggcgccttcgaccctctacctgccgacatactcatgcaaatcgaccgtctcttaggccccaaacacgctgccagactctgcctcgtttccaagtcttgacggtcactcgtcttcgacaacaccctgtgggcccac

SEQ ID NO: 21767 - DNA, 358 bp, Glycine max
ggatgttggacttgctgccaatgttgctatcattgatttaatttagactgcttatgatcttgggaaacctttcctttaatgtgctattcagctctacattccttcgatacgaatttcaaacatgaggatccgcatatggaaacactgatattggactaaggtttcgatgtttctattaacgacttcatcatcggaccagcgaacgaggcgaggaacgcctgcgccatgatacggggtggaatcgagtatatatagttaagaaatgtggtatttatattactgcctaaccttagctgtagatcattaacttgatccaatagttactggcttattggggcactgtggtgttgttcaatac

SEQ ID NO: 21768 - DNA, 330 bp, Glycine max
aattatgttatcactaaagacctcaatccaattatgcctcactagtttctacattttgacttaaaataaaaatattttaaggagcgcttggagaatgagtcaactacataattatccatatgtaattgtgccccatgagattaatgagccatctgtgcacctattttatgatgaatatagtgatacacttaaatttgttataagtaggataagagaatgtagctcagattagtcttttgtttataaataaaatacgaattcaccgcgcttattattagtattcttatctcttacaagggtgaaatcttgttttggactatgttaagaata

SEQ ID NO: 21769 - DNA, 390 bp, Glycine max
gatagcagcatcatacaaagcattgaattcaaaaactaagttcatttcttgtgctttgctttattcctcaaaaccaaacatgtcgaacacatgcggcaactgtgactgcgctgacaagactaactgcaccaagggaaacagctatggtgttatagtagagactgagaagagctacatcgagactgttgacatggatgttccagcagctgagcatgatgggaagtgcaagtgtggcactaactgcacttgcacggactgcacttgtggccattaaggaatatgtatgaaaatgtaattgccatgtgtttggcaatacaaatctccaaataatgtaatcttcgtatgaataaatgtgtgctgttatcctacttcagggtctgtgtagtcatg

SEQ ID NO: 21770 - DNA, 406 bp, Glycine max
ggacaccacaatgtaggggttccacctagaaaacgtcaattgttaagtcttacctacaacaaatactttgtaatataattagtcgatcaaagtgtgatcatacctagatagaggggtgtgttgaaagtcccacataacagatagtcatgagaaaaatgagacatattaaagtctcacatcgaataaagatagtgtcgaaataaattatatagatgaggagtaattctcaccttacaagttgattttgtgaaaattgcaagtgtgagatatgtgtgataatgtgacgtgagaaggttaattgaagaacaaattcagtagtttgctcttgcttcattttcgagttatactgaaccaatctcagacaagctccttccagatttgctttctcaggagcaacatgtttcta

SEQ ID NO: 21771 - DNA, 344 bp, Glycine max
  modified_base (286)..(286): a, c, g, t, unknown, or other
ttaagagggaatctctctctttatttctttgactctctcagagccaaaattttccaaactcctcaactctcatcagatatcaaccatctctctctctccaaactcaaatacctttctgttctgctcttcaatttattcatctctgacaccctcttaattctgcttccagttcctctgagtgatgggtatgatctctcctcactcccacaattcccacattatagtaatcctcatcacctgcttctttcgtcataaattctagatcaaactccactccctgatcctnccttttacttcttatgtagcatgtatgaactcaaatcatcaaatgaatatgacccttt

SEQ ID NO: 21772 - DNA, 419 bp, Glycine max
gatcacttcatagtaagcactatggaaaaaacgacgggcattcatctatggctaccctcattgctcccagcaaccactctacccaagaagacgctgaggctctcagaaaggctattgaaggatggtgcactgatgagaaaactgtcatagaagtattgcgtcatagaactgtttatcagaggcagcacatcagaagagtctatgaggaaattttacaggaggatcttgtgaaacgcctagagtctgagatcaaaggagactttgagaaagccgtgtaccgagggatactagaacctgcagatcgtgatgctgttgaggccaatgttgccatcaagaatggcaaaaactacaatgtcattgtggaaatcgtcactatcctctccccggcagagctcttggccatgagacgcgcttatatc

SEQ ID NO: 21773 - DNA, 427 bp, Glycine max
gatggcagcaaagaaggtgtgtgtaacacgtgctggaggattcgtagcgtcttggcttgttaagcttcttctttccaaaggctacattgtccatggaactgtgagagaccctgaacctgctactcagaaatatgaacacttgctcaaactccacggagcttctgaaaacctcactctcttcaaggcagatctcttgaactacgaatctcttcgctcagcaatttctggatgcactgcagttttccatcttgcttgccctgtaccctcaatcagtgttcccaaccctcaggttgaaatgattgagcctgctgtgaaaggaacaactaatgtacttgaagctagccttgaagctaaagtgcaacgacttgtctttgtatcatctttagctgctatttccaatagccccaatttgcctaaagataaagtg

SEQ ID NO: 21774 - DNA, 414 bp, Glycine max
ggttctagtgtatgtgattgttgtgactcgttcttcttcgtcgttatcttcttcttttgttgtttgtgtgtttgttttttctctcacctgaaaatgtcttgctgcggtggtaactgtggttgcggaagcgcctgcaagtgcggcaacggctgcggaggctgcaagatgtacccagacttgagctacaccgagtcaaccaccaccgagaccttggtcatgggagtggcaccagttaaggctcaattcgagagtgctgaaatgggtgttcccgctgagaacgatggctgcaaatgtggagctaactgcacctgcaacccctgcacttgcaagtgaggtgttggagagctaaagcttcaagcagaaatggcccttagaaataatgataaaaactatatgtagtttcaaaacttcaaa

SEQ ID NO: 21775 - DNA, 321 bp, Glycine max
ttatggcctggtgtctcagatttgacaggatcttttagactttataggaaatcagtgcttgaagatatcattagttgctgtgttagtaaaggatatgtctttcaaatggaaatgatagtacgggcatccagaaaagggtaccatattgaagaggtcccaatcacatttgttgatagagtatttggaagttcaaagcttggtggatcagagattgttgaatacctaaagggcctagcttatctcttggtgacaacataaaaggataaatcataacaactcgatataccttacattttgggggaaaaaaaagggatataaatt

SEQ ID NO: 21776 - DNA, 271 bp, Glycine max
agactacggattgggggatacaatacgtgttcctacccaaaacaaaaattaaatgtgtggaacagttggaggagatcaataatttatataggtccatcgaccatagaagatacgataaacccaaggcaatgattatgcgggatcggacctatgggatactagcgtcgataggtctgatgcacatagaggcctagatctgatgctagggccttgatatacgctggcaaaactaccatgcttcacatgctcgatgatgagagattagtacagc

SEQ ID NO: 21777 - DNA, 430 bp, Glycine max
tctgaggggatcgcacttcaattgcaatcaaggtaattcattggctttgcgcagatccctacctctcctttcaagatgcagatcttcgtcaagaccctcaccggaaagaccatcacccttgaggtggaaagctctgacaccatcgacaacgtcaaggccaagatccaggacaaggaaggaattcccccggatcagcaacgtctcatcttcgccggaaagcagctcgaggacggccgtaccctcgccgactacaacatccagaaggagtcaacccttcaccttgtccttcgtctccgtggtggcatgcagatcttcgtcaagactctcactggcaaaaccataaccctagaggtcgaaagctctgacaccattgacaacgtcaaggccaagatccaagacaaggagggaatccccccagaccagcaacgtc

SEQ ID NO: 21778 - DNA, 309 bp, Glycine max
  modified_base (276)..(276): a, c, g, t, unknown, or other
agccggcacagtgggaatgttgcaattggggtccacaactggtggtttcagaggagcttctgggttaatgcctctgggcttgaatttggaacaagctgccttcctaagacaccaagttaacgttgacgacgacgttgttcatgttaatgttgatgatgccaccatccaccaacatcacctcactctccataacaacaacacctcctcatcaccctcttccactgcaccaatcaccgatagggattctatgcatatgaggggcttattttccgcgtntggacaactgcatactcctatccgccccacgct

SEQ ID NO: 21779 - DNA, 245 bp, Glycine max
ggatatttgttgcgaaattttaaaattggagggaacaagcaaagtcgaagcggcgcatggcggatccggcagatccaatcattgaagtagaagaagtagaggaggatggtaccacgcaccaccctgctgctacttgacacgagttttttgatttatcaacgacagctgatccgagttacataatctccttgataagaaagcatttgccgttggattctgcttctcggagaagcttgagagaagtt

SEQ ID NO: 21780 - DNA, 427 bp, Glycine max
cgagacatagtctcttcacgatcttaattcactcatgtacactatctaacttacataaatagttcgtcctagttagatcagttcagttttttttccaataaaaaaatgtctctttaaaagactcatgtatggtattttcctcactgcatacaagaaaaaatacaagaatctaaaggtggttaataaaatacaaaagaaatatcagaaaataattaaagcaaaacaacacacaaatactaaaattgttaagcgtagcataatttttagcaataaaagtgatttaattgaattgaatataaacatgagtaatgaaatgaaccactcacggcaattgagatataagcatgtttactgttcacaggcccgactgtgaagccagtatatgcagccatagctccatgaacagcaccatgtgcaagaagagtgc

SEQ ID NO: 21781 - DNA, 401 bp, Glycine max
acgacagaagggggtgtgagagagcgagcgagcgagcagtttcaaagagaggatttgggattgggaaggcgagggattgcgctgcgtctcttcctcttctctttcgattcatccctcattcataatcttccaatccaacaacctcagcctcacactcacacatacacacatctgaacgcgtatcgtccctcccatggcttcaaagcgcatcctcaaggagctcaaggacttgcagaaagacccaccaacttcttgcagcgctggtccagtagctgaggacatgttccattggcaagcaacgattatgggtcctgctgatagtccttatgctggaggtgtattcctagtcactatccactttcctccggataatccttccaaacctcccaaggttgccttta

SEQ ID NO: 21782 - DNA, 265 bp, Glycine max
ggtctaaaaagggggcgtaatgtgaattctattgtgtgcaacgtagtgttttcccacgaggcaacaaggaaacaataatctcatattcccaaaacttgagctttattacgttgtttctgtagatggacaagggtagaaccgaggtggtgtctgctttgcagtttgcatgcaccgatgatgtctcaactaatatagccaccgacgagaggctaattagagctgcacataaacagggtgcgaacatcattctgattcaggagctttt

SEQ ID NO: 21783 - DNA, 435 bp, Glycine max
gaagacgacagaaggggattccttcatgccaatccttcaccactaggatggtcccaagttccgtcttgagctgaatgtgcccgaggcgttgtctcttctggatatttttgcagaacaagacaccttcaatgacactttcgaggctttgccggcataaaaggagattaatagcaaataatgcaacaagaatatcactcacagagacaatagataattagaggtttcggttggtttgaaagttatattaagtatggacttaagaagagagtccgaaagacaaaacataatgaatatatagcggagggcgcttggatattcaacaacctatatataatgtattactggtactattgtatagaggatggtccattataagtattatacacatatatactaagagaatagaatcagaatgaactattttgcatatgggtt

SEQ ID NO: 21784 - DNA, 253 bp, Glycine max
gacgagaacaaagtgagcaacttcccttctttcagagtcattcaaaatgaacgaacttaaaaaacaatgcagtttcaaggtgtttaagcatggtagtcccgagggttcacccattgtctaaataaaggtgcacacgatctaaacaagtcctacttgttaccaagtaacacacattaaggtcgcttgtatgatgatcacactctactcattaatattataccatcttagaactaggagatcacatgtccaagga

SEQ ID NO: 21785 - DNA, 293 bp, Glycine max
  modified_base (164)..(164): a, c, g, t, unknown, or other
atcattgaagacgttcgaccacacggtggaatcaagaagttcagatctgctgcttactccaactgcatccgcaagccatcctgagattccctaggtcgtgtgaggacgtagcccccttagtcctgcatctgctatatttttctagtctcttctcttctcctttntcttgttttcttccttgcccttttgttctctctacctacacagcaagaacttggttctttttgaagtaagaagggtggcttaacttatggtttcgaaagctatgaaaaaagacctgggatatcattttt

SEQ ID NO: 21786 - DNA, 273 bp, Glycine max
tgagggggttctagtgtgtgattgtttgttgttgtaactcgttcttcttcttttgttgttctgtgtttgtgtttgttttttctctcacctgaaaatgtcttgctgcggtggtaactgtggttgcggaagcttctgccagtgcggcaactgctgcggacgctgcatgatgtacccatacttgtgctacactgagtcatccaccaccgacaccttggtcatggtagtggcacctgttaatgctcattttgtgggtgctgagactggttttccccc

SEQ ID NO: 21787 - DNA, 308 bp, Glycine max
gatcctacgaacgctcctcacttgcagaattcaaagaaggcgtcttcataaacgcctttattctccgtttccgtttccttcccggaattcgatttttcatctctgaaaatgagagagtgcatctcgatccacattggtcaggccggtatccaggtcggaaatgcttgctgggagctctactgtcttgagcacggcatcgggcccgatgggcaaatgccaagtgacaaaacagttggcggaggtgatgatgctttcaacactttcttcagtgagactggtgctggaaagcacgtgccacgtgccgtctt

SEQ ID NO: 21788 - DNA, 329 bp, Glycine max
ctgcgatacgaccacagaatggatatttattaaaatagctctaaagatgggggcttaatatcaattacatctgtaaaaggcatccccaatggttaggagaaaaaaatgcttataaactaccattaatatcaattactacgcactaatggcttaaagagtttgagctcttgatttacaaatattgtgatctcaagtccttcaagtccgctgcattgttagatttacttcatctgaatgtattattcgatttaataaagaatctttatcatttatctatggcgtccattactaactaatatgagactttttagtgcaactggacatctttg

SEQ ID NO: 21789 - DNA, 343 bp, Glycine max
taccagtaaagagaacgtacttgggtgtggttctttttgaaacgtatcaataatctagacccatgcttcgagttgtttcatgccataaataaactctaacacttaagaaatctgtcggacaggcggattcacacctcttacaaccaacacagtcctctgttcttggggcagaagctatttgtttagctttacatccgtcccaaggtatcatttctaatacatccgttgtgcaggctcggacacattgagtacatcctatacatgtatcataaatttttactgaatgtgacattggatcgtaatccttgaacatcaaaaattcaacattttaaatttagtaaac

SEQ ID NO: 21790 - DNA, 369 bp, Glycine max
gaaaccttcatgttgtagtgcgggggggcttctcatttctatgccgttccatggatcgcgaaggaggatccaacggcggatcttgctactactacgttctcgggattcgtagggacgccttcttctatgatattcgcactgtctaccgaaaactagctatgaggtgtcgcccgaacataaggtctcagaatcctgcaaccggtggcgaatccaatcttaactttcagcatatccaagaagcctactcagttctctccgatcagtgtagatggtcaatgcacgacgcagtgctatacgatccttaggaggaagaacaccaagaactttgtgtctacatgcaggataagatctcaatgatgaacaatgcaa

SEQ ID NO: 21791 - DNA, 269 bp, Glycine max
agaagatctggtgctggatactgcaatcagagactgggtgttgatccctctctctgtggttatggttctcattggtgtgctccgttactttgtttctaagcttatgcactcttcacaaacccttgtggccaaaatggttaaagaaggccaggtgatggttaaacctcggaatttacgtgctggggcaaatttaattctatccaaggcatttcgcgctcgcaaaatttatttctgtaacgaggaaaatggtctgttgtttgtccaaaggg

SEQ ID NO: 21792 - DNA, 212 bp, Glycine max
gattccactgagtgtagtaatcaatcatcttttgtttgttcttcagtactttagtgtgtgatttaattccaagattttgagaatgtctagctgtgggtgtggaagtagctgcaactgtggcagcaactgcggttgcaacaagtactcttttgacttgagctatgttgagaagacaaccacagagactctttgttttgggtgttgggtctgtg

SEQ ID NO: 21793 - DNA, 159 bp, Glycine max
aggcgctgtgtgttatgctcaagtgaagacgagactattaaacacatttttttggactgcatagtcgcaaaaaaaatatggcagcaggtttgtctttggctggatgttccgattgtggaaggggaagttattcatgtctacatttattgatttttggat

SEQ ID NO: 21794 - DNA, 282 bp, Glycine max
  modified_base (29)..(30): a, c, g, t, unknown, or other
cccacgcgtccgaattcgagcggcccttnntttttttttttttttttttttttttggccaattctatttattctttctaataataaaaaatattctaataactaataataaaaaggaaaataaagattcatttgaatattataaaataaccaattattgaacaaaacaagattctttagttatatatgtaaaaaaaaaatggtttatttataagaatacatattccattctatatcaaaacaaaatataaaaatttggaatagattctttgaaatctcaaaa

SEQ ID NO: 21795 - DNA, 417 bp, Glycine max
ggttctagtgtgtgattgtttgtggatgtaactcgttcttcttcttttgttgttctgtgtttgcgtttgttttttctctcacctgaaaatgtcttgctgcggtggtaactgtggttgctgaagctcctgcaagtgcggcaacggctgctgaggctgcaagatgtacccagacttgagctacactgagtcaaccaccaccgagaccttggtcatgggagtggcacctgttaaggctcaatttgagggtgctgaaatgggtgtgcccgctgagaacgatggctgcaaatgtggaccaaactgctcctgcaacccctgcacttgcaagtgatgtgttgggagagcaagcttcaagcaaagatagcccttaattatgaataatgataaactattaatgtgtatctaaaaacttatgtatta

SEQ ID NO: 21796 - DNA, 339 bp, Glycine max
ctatgcattgattcgatttctgatactatcggagtgaaaaaagtagatctaaagaaaaacgcgggttggattatattagtaacaagtaaattctttgtacgtaaaaagttccaagattttgttggacagaataacaattgcaaagtttgagatcacccagaaagcattatcaattttaaaagcctactcgggtattgagcgtttatcaaagtttacttaataagaacttaatttttttttttttcaataaagaatagtttgtaacttcggaaaaagaagatctagtttatttttcttacataagaatctcatatatgggggaataacacatacattttt

SEQ ID NO: 21797 - DNA, 365 bp, Glycine max
gaaaacaccatcatctacaacgcctcgaatccacacagttctactctacgctctaaaccctctctctctctctctctcgatctatcatggctttgcccaatcagcaaaccgtggattaccctagtttcaaactcgtcatcgtcggtgacggcggtacaggaaagacaacgttcgtgaaaaggcatcttaccggtgaattcgagaaaaaatacgaaccgaccattggagtggaggttcacccattggatttcttcacaaactgcggaaagattcgcttctaccggtgggaatccggtggaccaaaaaaagttggggggcctaaaaaaggatattatattcatgggccatgggccaatattatggtt

SEQ ID NO: 21798 - DNA, 331 bp, Glycine max
tcttaaggggaatacaccatcatctacaacgggtcgaatccacgcagttctactctacgctctaaaccctctctctctctctctctcgatctatcatggctttgcccaatcagcaaaccgtggattaccctagtttcaaactcgtcatcgacggtgacggcggtacaggaaagacaacgttcgtgaaaaggcatcttaaccgtgaattcgagaaaaaatactaaccgaccattggagtggaggttcacccattggattttcttcacaaactgccgaaaagattctgcttcttactgttagggatactgcttgtacaaagaaaaaatttggt

SEQ ID NO: 21799 - DNA, 397 bp, Glycine max
ggttctagtgtgtgattgtttgttgttgtaactcgttcttcttcttttgttgttctgtgtttgtgtttgttttttctctcacctgaaaatgtcttgctgcggtggtaactgtggttgcggaagctcctgcaagtgcagcaacagctgcgcaggctgcctgatgtacccagacttgagctacactgagtcaaccaccaccgagaccttggtcatgggagtggcacctgttaaggctcaatttgagggtgctgaaatgggtgtgcccgctgagaacgatggctgcaaatgtggaccaaactgctcctgcaacccctgcacttgcaagtgaggtgttgggagagcaagcttcaagcagagatagcccttaattaggaataatgataaactattaatgtgt

SEQ ID NO: 21800 - DNA, 312 bp, Glycine max
cactgtcattattgatgaaaaacagacccggtttactccagggcaaatatcttactcaatcatcttcaacaatcccacactttcactccttctaatagaacaccccccctcaaatcaaccctcttactaccctccccattcattcatacaaaactctctcctctaccacactcctttaaaccacaaacagtccaataaaacccaaatcaccaaaccattcgacctatttacagcctccaccaattaaaagacccaatcccacatccttcatttccaactgactttacagagtaacccaaacgctcttatacc

SEQ ID NO: 21801 - DNA, 323 bp, Glycine max
gaggataaaatatcacgggatcgaattgaattaagatatttgaaaagcaaagctaagaagaaatgagaaaataaaaaggatagcatatcatatgatatcagaagtgagtgtctcataatggaagcataacagcgaagtgatccaaagaagaagaaggatgcaggagaactactcataccaatcgtatccagattccggcgagtcctcaccacgatccagagagatagacttcgacaaccctcctccatgggacgaccaaaactacaaagccaagttcatgtgcaactacggcggcaagatcctacctcgctcccacgacaacc

SEQ ID NO: 21802 - DNA, 278 bp, Glycine max
ggttaaaatcagaacttgtttactgcattttatttattttcttcaatcattctttaacttccacaaggtttgggtaatcaatgagtatatacaaacttaaatcaaaatacttaatagcatggcgatacatttatacaaaacttctaccccaagcacacgcaatggagccgtagacagtcaagtaaaatccaatccacgaaatcatttgatctattgacagcatcgttgtggtaaaagccgtaatgccagaggaatcattaccgcagggcatagagggg

SEQ ID NO: 21803 - DNA, 178 bp, Glycine max
tctatgggaatgtttaaatatcttttatcgaattgaattaaggtatttaataggcaaagttcataagaaatgataaaataaaatcgatagcatatcatatgatatcataagtgagtgtctcattatcgaagcatctcctagttacctactcaagtagctataataattcttgactcct

SEQ ID NO: 21804 - DNA, 281 bp, Glycine max
ggttgtgcactgtcatgaaagaggatgaagagacgctgcagaatcaacggcaaatcactgactcgtccctctccaccgagtcacgcacttccactccttctgatggagcgccacccaacttgggaacccttagttctccgttcctcgtttttgcatgaccttgccactcatatgcagggaagctctaccgcacgtaagggtggaaaagctgagagtaaggtgtctgctcagcctcctgatgaggaaactgttgtaaaagatgcagttgaggcccctaaaaa

SEQ ID NO: 21805 - DNA, 385 bp, Glycine max
ggttctagtgtgtgattgtttgttgttgtaactcgttcttcttcttttgttgttctgtgtttgtgtttgttttttctctcacctgaaaatgtcttgctgcggtggtaactgtggttgcggaagctcctgcaagtgcggcaacggctgcggaggctgcaagatgtacccagacttgagctacactgagtcaaccaccaccgagaccttggtcatgggagtggcacctgttaaagctcaatttgagggtgctgaaatgggtgtgcccccttagaacgattgctgcaaatgtggaccaaacttgctctgcaaccccttcacttgcaagtgaagtgttgggagaaccaacttcaaaccaaaatagcccttaattaagaattatgattaa

SEQ ID NO: 21806 - DNA, 219 bp, Glycine max
gatgagattatctaacaaagcattgaattagaaaactgaagttcattccttgtgttttgctttcttcctcaaaaccaaacatgtcgaacacatgcggcaactgcgactgtgctgacaagactagctgtatcaagggaaacagctatggagtgtattgtatatactgacaagagttacattgatactgttgtcatgtgatgtccagcagctgagcatgat

SEQ ID NO: 21807 - DNA, 372 bp, Glycine max
ggcagcgcttgatttgaggccaggcaagccccactcaaccaccacacctctcctcgttcacgctacccctttctgctcttcttctacctttcaagttttaaaagtataaagatggcagagacattcctatttacctcagagtcggtgaacgagggacaccctgacaagctctgcgaccaaatctccgatgctgtcctcgacgcttgcctcgagcaggacccagacagcaaagttgcctgcgaaacatgcaccaaaaccaacttggtcatggtcttcggagaaatcacgaccaaggccaacgttgactacgagaagatagtgcgtgacacctgcaggaacatcggcttcgtctcaaatgatgtgggactggat

SEQ ID NO: 21808 - DNA, 332 bp, Glycine max
tatggtgagtgttgctatttaatttgatgaatttggggtttggttcaaattattattgtgaagctttgttagcagcagtagcagacacaagaattaatttcgatcacgcatctctcataaccctatttattattattgaaattattttttattcgacagtgacagatagaccctcatggcgggtcactgcttcttctgtctctctctctctcttctcaattatggagggattggattggatgcattgcctgatgcaaccactgccagaaaaaaaaaaaaaaatttgtcgaaatttcattggaatcaaaatcaaattttcgagccttactttg

SEQ ID NO: 21809 - DNA, 323 bp, Glycine max
cttgggattgtgaaatcaacagagaagcatttgactaatagagagacataagcataatattgagaaataatggagggttgtacttattgtgtgaagttgctatgccttgttgggtttgtggtgcttgtgagtactattgcaggggtggagagtgctggtgaatgtgggaaatctaccaccccagataatgaggcttataagcttgcaccatgtgcctcaacagcacaagatgagaatgctagtgtttctcagagttgctgtgctcaggtgaagaaaattgggcagaacccatgctgcctctttgcaagtttgctcttcaacac

SEQ ID NO: 21810 - DNA, 290 bp, Glycine max
cccacgcgtccgaagacgacaacagggggtggttcgagtttctaattgattggagtaatggggggtggggctcaaattattgttctgaaactgtgtttgcaccatctcccacacacaaaatgtattgctgcggaggcaactgttattacccaagctcctacaatgtgaattattttttattccagctgcaacatatacacactcatggcgggtcacttgcttattctgtctctctttctttttttttaatttattggacggaattggaattgggattcatttggctggat

SEQ ID NO: 21811 - DNA, 255 bp, Glycine max
gacaccaaaccaaagttagagtgagcaacttccaacaccatagtgaaatggcttccaaggctgcacttctcttgagtgtcaaagatctcttcttcaccgtggttagctccacatatgtgccatgcaacccaccccccaaaactccaaaacacccacctgtaccaaatccacctttcccaaagcaagcaagttgccccaaagacactattaatattggtgtgtgtgctgatgtgttaggtctgatcaacgtgcaac

SEQ ID NO: 21812 - DNA, 317 bp, Glycine max
ggttctctgatggcaaggcaagcgcttgtcctgtgtgtgttctgactatgcttcttggcaagagttagatcggacgaggattgcgtgtacacggtgtacgttcggacgggttcgatcatcaagggaggcaccgattcagtaattggtctgaagctatacaacaagtccggctacggcatatacatcaccaacctcgaggcatggggcgggttaatggatccgggtcacatctactacgagcggggcaaccttgacatattcagaggtagaagcccttgcttggaagcacccgtttgagaagccaacctaacttctga

SEQ ID NO: 21813 - DNA, 309 bp, Glycine max
gtggcaaaaagggtcttgctgccaatcctcaccgttctgttgatccagttttggctgcttcagctgcagttatcagcttacagggtattgtctcccgcgaagcaaatccattggattctcaggttgtctctgtgacttcgtttaatggaggcaacaatcttgacatgatacctgactcggtggtcctattggggactttcagagcgttctctaacaccagcttttaccagctacttgaaagaataaagcaagtgattgtggaacaaggtaatgtctacagatgcttggcaaaaattgacttctttgaaa

SEQ ID NO: 21814 - DNA, 312 bp, Glycine max
gtatgaggtatatgtatgaaccccgtatatccatcctcatggggatggtgaaaggagggccccaattggtagaaaaaaacccgcaactcctgggggttttcctgcacatggaagaagaagtagaaatagggaagaaatatagtgataattagattcttttgcgtctgtctaaatagtatagaatatagaaactgtatcttcgtctttacaagaaaaaggaattattatttttatcacgtttatttaaaataatccttttttagcgaatcatttattagaaaaataaaataacttaacacaaaagccggaaaa

SEQ ID NO: 21815 - DNA, 287 bp, Glycine max
atacacataaccatgtcttctcagactgttgtcctcaaagttggtatgtcatgtcaagggtgtgctggagcagtgaacagggttttgggaaaaatggaaggtgttgagtcatttgacattgatctgaaggagcagaaggtgacagtgaaaggaaatgtggagccagatgaagttctgcaagccgtttccaaatctgggaagaagactgcattctgggtggatgaagcaccacaatctaaaaacaagcctttagaaagtgcacctgttgcctcagaaaacaagccttc

SEQ ID NO: 21816 - DNA, 362 bp, Glycine max
agaagggtcattctgagtaaggccatggcatttgttatgtaacatttcatgcataggcctcattgtgtgctagtccaaaaccgaaatttgtcatgtacagtcaacaacaatgcactttggtcaatcgtaaacactattttaactatttttgttttgagaaacaagatatttgactaaaaactttttgcccatgtaagttataaatttctggtactaaaaaagtaactctagcatggtatttaggggggaattatgttacttaacatttgcctaaaaatcaacaaacaatatttgctaaaaaaaatcacacaatttttcaaacttcgaaaaagaatcagataaccaaattaggttggtgggat

SEQ ID NO: 21817 - DNA, 379 bp, Glycine max
gattccactgagtgtagtaatcaatcatcttttgtttgttcttcagtactttagtgtgtgatttaattccaagattttgagaatgtctagctgtgggtgtggaagtagctgcaactgtggcagcaactgcggttgcaacaagtactcttttgacttgagctatgttgagaagacaaccacagagactcttgttttgggtgttgggtctgtgaaggcccaattggagggtgctgaaatgggtgttgcagctgagaacggtggctgcaactgtggatcaagctgcacctgcgacccatgcaactgcaagtgaggtcaagatttataaccttgaagcagagataactgtaatatatgtatcaacaaataataagaattacgt

SEQ ID NO: 21818 - DNA, 227 bp, Glycine max
cccacgcgtccgcacaggtgcattacgacgtctgaagggggcggccgtcagcgggccgatgactagagctaccttgccttcaaacattccactcttctttactttgccaatcctgggaataatatatattctagatattccgaaaccacggctcacgccaatcctatgatttttgctgtaggaattctaagtaacacatgacttcttactgttgctttctagcacca

SEQ ID NO: 21819 - DNA, 265 bp, Glycine max
  modified_base (97)..(97): a, c, g, t, unknown, or other
tacggctgctataagactattgaagggattccaatccattttgcatatgataatattatttagtaatttagggtgttacaaatgaattttttatcangagagttagataaaggtgataaaggtaatcattataaaatggatgtggtagggtgtaaatggtaaatatattcccaacacaatcaaatgacgaatccatatctacgttagagacttttctttctagagttttttttcgaatgctttttctttaataaataaactatgc

SEQ ID NO: 21820 - DNA, 381 bp, Glycine max
atacgaattgagagaattttttttaccaatgtagtattaacttatttaatgatgaataatttttaatcatgaacaagcatgtaaatctttgatacttttaccttgcttgtttttgtcacacgtcacttctagcttgatcccacatatttttagtctttctacatgttcaattttttctatttttgcttcgcattttactggcatagcaaagagtggtcaatatgataatcaaaataattagccaagcaaaagtgaaaaccatattgaaatttggaattctgtgggaaaaaaatgtcaaggcaatatgtgaaggttcttaattttatggtcttcaagaacatatggggggttttaagtaagccctggtttaaggattaaaaa

SEQ ID NO: 21821 - DNA, 309 bp, Glycine max
actgagggtgaaggggagcaacaagccatagcaagttgaaagactttgagaatgcattcttccgtcactggaatgctatcatctctgctgttcctgagaagaatggcaggatggtataaatcagcaattctgtgtccaaggactgcatttctcatgaaatttggcaaatagaaatcctcgtcaggagttggatgctcgttgataggttcctttcctgaaagcaattccagcaaaatcacaccgaggctataaatatcactctcttcacttgcatccttcattttgatgaactcaggtgccttggaaccc

SEQ ID NO: 21822 - DNA, 245 bp, Glycine max
ggttctagtgtatgtgattgttgtgactcgttcttcttcgtcgttatcttcttcttttgttgtttgtgtgtttgatttttctctcacctgaaaatgtcttgctgcggtggtaactgtggttgcggaagcgcctgcaagtgcggcaaccgctgccgaggctgcaagatgtacccatacttgagctacaccgaatcaaccaccaccgataccttggtcatgggagtggcaccagtttatgctcaatt

SEQ ID NO: 21823 - DNA, 303 bp, Glycine max
atgtgagaatttacattggcaagaatctactgctcaagtagatgagttgcagcatttgccaattgaatcactagattgtcaatcgtcattaagtgctgatgttgaaagaggggacaacactgagcaaaatcttgatgtgatgccaactgaagataatgctaatgaaattacccaacaaagcttgcgaattgaagattcagagcattgtaataatgaagaattcagtgaggtgcataatgagcaatctgagttaggtgatataaataatagtgaaaactattcttcaaattacaatattcatat

SEQ ID NO: 21824 - DNA, 136 bp, Glycine max
tgtgagggggcttcagaacgtacgacggcgcgtctggtgtatgttcttatgttatcggcgtcatttctccatttatataaacttatgaaaaagctttaatagatgacacctttgtcagcgttcacatcactgctaa

SEQ ID NO: 21825 - DNA, 281 bp, Glycine max
acatgcgaatagaaggactagagcaccaaatgaattcaaatactggaagaccttatggtggcaacaaaagggtcaatgatggatcgaaccgaatagaggggcaagacagaattgagggagtaaaactcaatgtatcatcttttaaagtcaagagtgacccagacgcctaccttacctgggagatgaagattcagcatgcattctcctacaatgattatccggaagagcagaaggtgaagttagcaatagctacattctcatattatgcccttgtttggtga

SEQ ID NO: 21826 - DNA, 330 bp, Glycine max
ggttgaaagaggaaggaagaagaaatcgttttatgtgagtaacagaacaacacatcatagacagacacaacattagtatctttcaactgttgctctgcttctgcacacagagaatggtgtgggtggggaaacagagatgatctatctgtgttcacagcaccactgtttccctgcctcacccttatgtacaagaacaagaataagcacacacacccgccacaacgctatagtcaccacttctaagaactcacaattttttttctcggatatggggagtcttgctcttgaaaccgaggatgtaaatctagatttatacctttcgctggggct

SEQ ID NO: 21827 - DNA, 419 bp, Glycine max
tataccatgtataaaacatccttttaagtgttccaggtacacgacatttaattgcttaattcttaaacacatcttatatcctttaattgaaaaagttaactaattgttttccgcagtaattctgcaattcaagaaggaacaagttttcattcgaaatttaatgacatttaaacgatacagatatccgataatgtacatggttactactttctattagatggcataaaaggccataaaatatggatgtttgtgacaaaatatatgcttgctagtttcataacatactaacgtctacaaataacttcattacgcttcacaatacccaaattacacacagaagattcttgatgaagaatgttatctataggtggctctacgaagcccatgttagccctaatcatgaagagatcaccttcatg

SEQ ID NO: 21828 - DNA, 296 bp, Glycine max
  modified_base (282)..(282): a, c, g, t, unknown, or other
acagaagggatttaagcgacaactgcgctgaatgataaagatcccctacccccgttgcggggctccccttgccctttcttggttggtaaaccaaccagcgatttacaacaaacaagtctttcctctccctatggtcgagatactagtaacctcatttgtcttttttaaggggagcagagctatttttcaaagtagcctatgttgaataacaattaacttttactctttggaaatccaacgtccagtgatgtccaatttatgctatcagatactaggaatatngtctttgatagtct

SEQ ID NO: 21829 - DNA, 392 bp, Glycine max
ggttctagtgtatgcgattgttgtgactcgttcttcttcgtcgttatcttcttcttttgttgtttgtgtgtttgttttttctctcacctgaaaatgtcttgctgcggtggtaactgtggttgcggaagcgcctgcaagtgcggcaacggctgcggaggctgcaagatgtacccagacttgagctacaccgagtcaaccaccaccgagaccttggtcatgggagtggcaccagttaaggctcaattcgagagtgctgaaatgggtgttcccgctgagaacgatggctgcaaatgtggagctaactgcacctgcaacccctgcacttgcaagtgaggtgttggagagctaaagcttcaagcagaaatggcccttagaaataatgattaaaacta

SEQ ID NO: 21830 - DNA, 189 bp, Glycine max
gggccgagatttaggctctcttacttcccatacgctctgatgctactgtgctgcggcggcttgacgactgcttggttttccgctcttgtccaccattgactctgcagcatttccataggagccgcctgcttcgactttatgaggataatacaatctattgaacttcatctataggatcatgaacttgac

SEQ ID NO: 21831 - DNA, 161 bp, Glycine max
gacggcagatcgagacgcggatcattattggcgaggtctgacaacaggtgtctgttgctctcaagaacctccccgagcattcttgtgcttgtataacggctgggaacccttgaacgaagagccaccgagctctgcgttggttgctaaatacaacatcaatt

SEQ ID NO: 21832 - DNA, 426 bp, Glycine max
atgtattctaagctacaagggctatagctcatttgggtagagcacctcgtttacacgagcgccaatgtttttttcagaggagtttcatcttgtaatcaaaagagtttatattatagtaagaaatcgaagtcttactccattttaaggatcaaaactagatatcaatatcctgacaaatggtttagtcataaaatctgatccatcattgatttgagatattgataaggtgaatactgatttttcgttaatgtgttgtataatgcgggtatagggacctaaaaaagattatcttttcttcctatcttatgaactttaaggtgtatgaagtgtcatttcctatcttagattttaattttagtaggtagataaagagtccatttactttaagttgatctaggccagaagcagacctacgtcaagataatc

SEQ ID NO: 21833 - DNA, 289 bp, Glycine max
gtgctgcatctttgcgattctcaactttctttcgctggaaaacccatcagagcatgaggagagagaaacttccctgcccttccatttccctcttgagttcttcgcctttgctttcgatcctttgctataagagaacctagttcctctcagtgttgtccttttcaagttccctttcttttctttcatattcactctctcttcctaaccgcccgatgcactttggtttttgaaactaatgtggttggtaattgctccgattgtgaactggttctgttggaatatccaaaat

SEQ ID NO: 21834 - DNA, 86 bp, Glycine max
gactccaaatttactccctaaacatacaatgcggggtccgacaacaagtttatattgctctcaatacccctcccaagcattcttct

SEQ ID NO: 21835 - DNA, 212 bp, Glycine max
aggaggacatgatggttatgccattataactcgctcgttcacacggtaatgtttttgagatgcctgaaacactgcaagtgaatcgtactatgatgaaagatggacactacagaattgcagttggggatccaagcctgggccacctgattgctcgaggaccaagttccaaccaaatgcgtaagctagaataataaactatcacagttatacat

SEQ ID NO: 21836 - DNA, 358 bp, Glycine max
atatgggacccgatattacaatgaatttgcaggtccattgtgaatcgggaataagcgatgttactacaatttttgaatggtattatgatccaagagcaatcttgatcggaccaataacaatttcatgttatttatcatctattatcttttcttatgttaaaatactttcatctctgatgtttttagtaactttcacttttgtctttttcttttaaaaataccttgatcctttatattgacacttacgtcagtttgatgcttacatagttagtgtttaaacattaaaacagtttattttaatatattgccaattttatcaaaaataaattacttttaggctcaattcataatttggcct

SEQ ID NO: 21837 - DNA, 357 bp, Glycine max
gtgccaaagagaaagagatagagaaaaaatgatgagtgttaatgtggtgtttgtataattgggatatccaaatataactattatgatattaaatagcatagttgattgtaatgaacaatgttttacatctacaattaatgaaccaaatcaatcctatacaattgtttagagtttaacaaattcttaagaagtaccccacacctccccaacaaatttaaaacattacggtgaaaggttggaataaataaaggaaccttgttccctcagtaacgggcaaagaaagaagttgtacatgtaggttaatgatgtatcatatgtactaaacactggcatataaaatgttcatgggatggagag

SEQ ID NO: 21838 - DNA, 218 bp, Glycine max
gtgacctttttcttgctccgatggctaaattctgactcttgttcttcggtctcctcctattctccgctgccgtagccaccgtcgaacgaatcgacgatgaagacaaccttctgatccgtcaagtggtgtcggacgcggaggaccaccacttgctcaacgcggagcgccacttttacgtctttaggacaaaagttcgtcaagacctacgccacgcagga

SEQ ID NO: 21839 - DNA, 238 bp, Glycine max
cccacacgttcgtacgcgagaagactgatgttttggggtgcttgctttgactagattctctggcttcttccacacatactcacatttctttttacccttttataatgggttttttgataatgctgtaatcttgtgtctttcacaattgtcaaaagagtggtagtagcaatctgtctccgtcccatctgttataaaacttggtttctcaatgtaagtgtcattttcattcactatatcc

SEQ ID NO: 21840 - DNA, 214 bp, Glycine max
gaaacatcataatgaaaaaaaaagaaaattacgacgtgggtctacaatctttgtgtctgttacttagtatcagtaagataggctttgtttcctccacatgagaagagaaagtgagaaactaccaatggttcttatttaaagcaaataaatattgaaagacaagaggtaacagataaatagagtgtgtgaataataataagtagttgtagctggg

SEQ ID NO: 21841 - DNA, 337 bp, Glycine max
tggcaatcatagagaagctattagatggcacaagtttggataattctgctttggggtgcttagcagattgcttggaactgtactctgatgcagcatggacaatactgaattccgtaggtgttttcttgtctgggaattatgatgtaactaggatttggatgagttcagctatggaagcagcatcaacatgccaacaaggttttactgagagaggtgaagcttctcctttgacacaggagaattataatctctttcagttgtgtggtattgcactttgcattattcatttggctacaacctgagtaccttattctcaattattccacaaaataatttg

SEQ ID NO: 21842 - DNA, 184 bp, Glycine max
caacacaacagaagggggtttgtgaacgctgtgactcggtcttgttcaccgttatcttcttgtttagtcgcctgtgggtatgacaaactctgacctgagaaacgcctcgctgcgctcgtaactgtcggtgccgaagctcctacaagtacatcaaccactcggtagcctgcatgatgtacccata

SEQ ID NO: 21843 - DNA, 345 bp, Glycine max
gagtctcgatcagtttcattcattggaagatatgggaacattagaacaaattgatgcccctcaaaccaggtcatcatcatcttcatcttcttccattgatagcaacaaccacccttctaggactaggactccaccaccctcttccccttcatcaagtgcctgcagaaacagaactgatttgagcactgacctcagacttggtcttagcatctctccttcttctcaatctgaattacccttcaattcaacaccaaaggaggaaagttttgactggccaccaattaagtctatattgaggagcaccctttgggggaaacaaaaccattttaaccaaagaccctcctt

SEQ ID NO: 21844 - DNA, 158 bp, Glycine max
aggcggcaatcatataacatctattatatggggcaagagtggataattctgctttggggcgcttatcagatttctcgtaacagtactctgatgcaccatggacaatactgaattccgtaggtgtgttcttgtttgggaattattatgtaactaggatt

SEQ ID NO: 21845 - DNA, 161 bp, Glycine max
tgttaataataataattggattccaaaatcgtagcgtatcgttggtgcgattgaacgattcgatgggaagaggattattctagagcttgcccactggccgccgtctgtttttcaccccggaagattttcttgctggaacctctatccgttcttgaactttt

SEQ ID NO: 21846 - DNA, 305 bp, Glycine max
ggtctcagcgctagtgtgagtgtgagtccgtgacacacttatccacctactttcatttgagccactcttctcagtccaaaacagtttctcgttttctcatctgaaaaatgaggagcatctttgtccttctccttgttctgggtttgtttaagtatgcatttgctgaagaagggttttgctctgctccttcggaatcgaaatcaaagcctctctattggaaagtggataaccccactctctcacctatccacctttaagatttgcctggatccacacgcaatggttataaaaaggaatcatgcttt

SEQ ID NO: 21847 - DNA, 271 bp, Glycine max
cctttagcaaaatattttcttttatattgcttctaacaagtggtgtttctgttcttggcttaataggatctgtttattataggtgcaagtaatagaccagatttgatagacccagcacttctgcgccctggtcgatttgacaaactgctatatgtcggagttaactccgatgcatcttacagggagcgggtcctgaaagctcttacccgaaagttcaaattgcatgaagatgtctcactttactccatagcaaaaaaatgtccaccaaact

SEQ ID NO: 21848 - DNA, 232 bp, Glycine max
gacccagagaggaggaagctttgagagagagagagggaggagggagagtgtggacgctccatcaagatgggtatttctagggattccatgcacaagaggcgtgccactggtggcaagaagaaggcatggagaaagaagagaaagtatgagcttgggcgtcaggccgcatacaccaagttatcaagcaacaaaactatccggaggattcgtgttctacgtggcaatgttaaat

SEQ ID NO: 21849 - DNA, 292 bp, Glycine max
  modified_base (238)..(238): a, c, g, t, unknown, or other
gaatgcacaccacatagcaaaacctcaagtaccttctccttcacattccctcagcactttctgtattcaaaacttttggcattgtttccaatatcctaacttgagactatatatatagcagcatatatatatatataatggatagggtgacacagatggcatcagagaggccagtggtgatattcagcagaagttcatgctgcatgtgccacaccatcaaaaccctcttcagtgactntggagtgcatccaaatgttcatgaacttggtgaaataccaagaaggaaggacat

SEQ ID NO: 21850 - DNA, 221 bp, Glycine max
gaggcaatgagagagagagaaaagcgtgaatcatgtcggacgaagagcatcacttcgattctcaggcggatgcgtgagcgatcaatacgtatcctcagcaggctggtaccattcgcatgaatgtctacatcgtcatcaaatccaagccttgcaaggttgtagaggtctctacgtcaaagacaggcttgcatggacatgcaaagtgtctcttttgtgcattt

SEQ ID NO: 21851 - DNA, 305 bp, Glycine max
ataaaaaaaagagggcattacggtgattacccacccaactatccaatccatcaaccatgtaacgtaggctttaagtgatagaaattaaaaacagcaccatcttcacggcatgtcttctcttctcttctctccctccatcttcaaacttgccttttattacctctcaatgccactccctttttctcttcactctcactctctccaacattctccataccttcttattccactttgttttttccgcaactggttttaaccaaaatgccggtttatttaaattaagccctttttttttctttttgaat

SEQ ID NO: 21852 - DNA, 246 bp, Glycine max
ctgcgatgacaacagacgggggatctagtgtgtgattgtttgttgttgtaactcgttcttcttcttttgtcgttctgtgtatgtgatcgatttttactctcacctgaaaatgtcttgctgcggtggtaactgtggcagcggaagctcctgcaagtgcggcaactgttgcggaggctgctagatatacccagactttagctacactgagtcaaccaccaccgatacctctttcttgggagtggcacc

SEQ ID NO: 21853 - DNA, 432 bp, Glycine max
  modified_base (414)..(414): a, c, g, t, unknown, or other
gcggcaacggctgcggaggctgcaagatgtacccagacttgagctacactgagtcaaccaccaccgagaccttggtcatgggagtggcacctgttaaggctcaatttgagggtgctgaaatgggtgtgcccgctgagaacgatggctgcaaatgtggaccaaactgctcctgcaacccctgcacttgcaagtgaggtgttgggagagcgagcttcaagcagagatagcccttaattaggaataatgataaactattaatgtgtagctaaaaacttatgtattatgtctgtgatggttttcgtgcactctggtgttttgtgttaaacaaacatccttagaataaagtggtcatgtcttgcctttcagcaagttcaagtgttttggacttgtgatgggtgtgttaaagctcatggntgcttctttttttttttt

SEQ ID NO: 21854 - DNA, 236 bp, Glycine max
ttcaacagggtcatcattgtcgatgtcttaggaccttggtcatgcccatggcgtctttattcagatcaaggggatatgcatctactgtcacataaatggggagaagggccggataatgccaccgcgaagcgctttcatactccagagattaattcgaggagcttatctatgtccagaatatgcatggtggaatgagacaggacacttgccatgcttaccctgaggcagggagcttt

SEQ ID NO: 21855 - DNA, 377 bp, Glycine max
  modified_base (244)..(244): a, c, g, t, unknown, or other
ccatttaccaagtatgcgttgactatatccccagtggcaatgagtctggaggagttgataccatcaaaccatgccaagtcttatctatattccatcttcatcagaacagggttggtactttctaccctggttattggtctctcagttcccttttttggtctggtgatgtcattgattggatcattacccacaatgcttgttactttgatactaccctgtgcttgtttcctaagaatcttgcggngcaaagtgacacgaacacaggcagcactttgcattacaattatcacagtaggtgttgtatgttctgcttttggatcatactccgccctttgccgagattgtgaagagtttgaggggatgaagttttgagactc

SEQ ID NO: 21856 - DNA, 374 bp, Glycine max
gtattatatttgtatcacatataactatttagtttcaaggtttatgaatgataaaatatcaatattttttagtccaaattaatattttaatttgaaaacttaaagtagaattaaaaaatataaaatatgagttgcataattttttgtttatcatttgaacaaatttatgcattgtttaggagaaaaattatagatgagttgtttaagtatgatgtgatattggggggactactaaaattattttaatataacataagataaaatacctaaatgggaatataaaagctcttataattctaacaagaatatatttaataaaattatatgttatatattctaggaaaatcaccaacacacgttcattattctgacat

SEQ ID NO: 21857 - DNA, 429 bp, Glycine max
ggggtctctcaagcaaagcttgaggcaactagaaactctaggagctcaaagggctggtcttgaagatatgcttaaagagatgaaaagaaaggatgatatattaccaaagttgatgacatccaccggttcttatgatgatctcttcaagaaggagatagcaaaatatgaccatatttgtgaagaaatagctcaaaatatcgaggcgcaagagcaattgttgctgcagatccaggctcaaaatgatgagttctctgttatcttcaatcttgaagattacaaagcttcacgtgaaaaagcctacaagcagattgaagctgccatagcaaaatttagagaaataaaggacaacatcaatgaagggttaaaattctatgttacgctgcaggatgcaatcacaaatgtaaagcagcagagcaacgactttgtgat

SEQ ID NO: 21858 - DNA, 418 bp, Glycine max
catactgaaggcgacttcgatgtaatgaataggggtcaacatgaatctaatacacatattgtaaatgaatttgacagacacaatcacacttttattataacagagactcactccccacttgaaacacctataccacctggaaggattagagtaaatgttacaatcccaaaagtgtgattgtggtgaatatcaggctaaacaccttaacccgttctcacgtcatggctgcctgtcaatctatcaatgttgatcctatgacctatgtgccgatgatattcactctacaacacatcttgcacatctatgacaactactttggtctattgccacacgaatcaatgtggccagaatatgaaggagatcagtgcagtcctaatgcaaggagaaacaggactgtaaagggtcatcccgtttcaac

SEQ ID NO: 21859 - DNA, 422 bp, Glycine max
gagtcttgtgtgagtactcatttgtatttttttttaatgttgaacactcaaatttctagtctatcaatacattattattatggagtaaaatccatttatattgataccattaaataatttcagtttcattttctttttttgttaattttacataaattccacctaacaataaataattttttggactatttctcgatttgtacgtgtcatccttgtgcagtggccatactaataataaataataatgtatattggttaaattattttataatttccattatttttacttttcttcaaacaaagcgtgagttcctcttagaaaacaacaaccgctttataaatagcttctcgcacttaggaagggttgagtatgttagaaatagattcatgaatttgaaatgagtattaaacaattaaagtat

SEQ ID NO: 21860 - DNA, 188 bp, Glycine max
caaaaaacaacgaaaggggattcgagtacgaatgccaatctaaagtgtatgggttattactacagggattatgcatttaaaactatacggtagaatcagacgctttacaggattctgactgacacactctagcgagctacataacaaatatattcttgtgtctactaaaaataatttacagcacatga

SEQ ID NO: 21861 - DNA, 295 bp, Glycine max
gattctagtgtgttaaggacacaaagagggtctggtacctataactcgggagctcatggataatctaaacattactatacgactgaagatgaacaactacggaggaacccgtgcacgagtcggcatttaatcagcggaaacgagacactgaaaacccccgacatctctgtaaaaaagatactctctgataatgaccagcaaaaacattataaggtgtgctccacctgcaacagtgtaggttctgacgtgtctaaagagaagaacataactgatcgtgttctttatgtttgtaccc

SEQ ID NO: 21862 - DNA, 420 bp, Glycine max
  modified_base (49)..(49): a, c, g, t, unknown, or other
cccacgcgttcgcaagtagaaaaattgtgtgaatggattgatgtattantctaaaacttggttcactcttaaaggaaacatcttaattttatcttctcacgagtgaattgaatgttactaatatttactctatcaggatatatgaatttgactgatttttggctttgctgttctgatttgagttgtgttggggactgaaaactagacaacatttggatggttgtctttatatatgcagctcttagatcttcatatgcaattaccgttatgcacttgataatatcaatttcttgtgtcaagtggttgagtatgtgaatgtgcacaggtgtggcagatgagaactggaccacgtctcttatctatccagtgtgctaaaggctgcagattgtacagcccacatacagggttggatcattatca

SEQ ID NO: 21863 - DNA, 54 bp, Glycine max; identical to SEQ ID NO: 3720

SEQ ID NO: 21864 - DNA, 312 bp, Glycine max
  modified_base (256)..(256): a, c, g, t, unknown, or other
gctaaattatctatgcgctccctaaatcttgattcgccctctcttccatcaaggagcatgagatgcggagaagagaattctaacacaaaggagacatctgcaagcacgaggagcttataagtggagcttacagtccctgttgctgttaaaaaaatggaagctgtttcaacctctcataccacttcatgttcggaggacatagcattatcttttaagtctttgggatgacggtttccaccattaaactatgaattgnagctgtaaaaaaaatggatgctgtttcaacctactgaagaggatgctactcattaa

SEQ ID NO: 21865 - DNA, 415 bp, Glycine max
ttctgacgggggagctacaaataaattaaaggcacatcatttacagaatatggagtcccacacttccgcacgagagaaggagtctctcaatctcagggaagtcccagatgcatataaaaccttgggctcgtacatgttcaacggcagcgcattctgcaagatgggtgaaggttggacatgcatcattactaattctgacgggcctgatactcccaaagatttctctaaatgtgtttaaaattgcacctgtgccattgagggcgaaacagtgttccacgaattgaatttgccacctgatgttgagagcatcagtggcagtggagcattctgcatgtgaggtgaagggtggagttgtttttatatcatgactgaaggccctgatgcacgctctggccagggctattgctaatgctct

SEQ ID NO: 21866 - DNA, 255 bp, Glycine max
aggtatacctgcgagagtgaaatgagaaggtaaatttgtaagactcaaatacaagaaagcagttatgggaaaggtaggaattattgaaggattgattgataagggtgattggatgacttgtctcatcatggactatatatgtaagcactatattctaattgaaatcacaaaccatttttattagtaagaaggactattggaattaccatcaaacaccataaaatgagttttacatgcgcagatgtatggtgtgca

SEQ ID NO: 21867 - DNA, 355 bp, Glycine max
gatagtgattgcagttccagacagtgtcgaagaagaagaagaagaagatggcattgggtgttcctgctcttcccctgacatacgtggctcacgttctggcacttgttgccagcatcttggtcgtgctctgggtcctcaattttaggggtggcttggcttgggattctgataacaaggccctcatcttcaatgcagctattataagctacaaagcattacccctgaagaaggaagtgaagaaattgatacaccttgttttccatgccatcgcattaatacttggaatagttggaatttatactgccttcaagtatcacaatgaaagtgggattgccatctctacagcttgcatcat

SEQ ID NO: 21868 - DNA, 426 bp, Glycine max
  modified_base (152)..(152): a, c, g, t, unknown, or other
gctactcctcatatatattgagaaattattagatgattttaaattattatatgtccatgatttcgaccaatctaattttcgtatgacactaatcaaatttttgtaatgtactgactagaaagaattattaattgtcatgtatacattagtanctactagtagctagagatcatgatagtaccaaactacttaataacttaaggataaaataaaatttagatgtagttcttttggagttttaactcggtaagtctttatcatacggataattaagctgaaatttcaattctaataaaaaaaataccaaaaagttatataagaaagtagatttgtcctatttttttattttttttgagaggagttatgtcctaattcttgtcgctcacttttaatcctgatagtttttcaatagctaaaatgatttct

SEQ ID NO: 21869 - DNA, 434 bp, Glycine max
gttccaatttcctctcttctgacaggaattcctggaagtggatatcttagtcatgcaatcaatctgtatctacgctataagccttctcctggagatttacagtactttctggagtttcaaattccaaggcaatgggcacccatgttttgcgagctgcctctcaggcatcagaatagaaagactgcttctccttccctgcaatttagtttcatgggtccaaagcttcatataatctctacacaggtggtaagtgaacaaaaacctgtggttggcatgcgcatgtacttggagggcaggaaatgtgacagacttgctttacatataaatcatctttcaagcctcccaaataaaatgatcctctcttcaggaacctcaaccttgagtacaccatcgatgtggcgaggatctgatgataatgaatccagtgatcaatt

SEQ ID NO: 21870 - DNA, 422 bp, Glycine max
  modified_base (29)..(29): a, c, g, t, unknown, or other
gatattgattttagttccagacagactcnaagaggaggaggaataatatggcgttgggtgttcctgctcttcccctgacatacgtggctcacgttctggcacttgttgccagcatcttggtcgtgctctgggtcctcaattttaggggtggcttggcttgggattctgataacaaggccctcatcttcaatgcagctattataagctacaaagcattacccctgtataatgaagtgaagaaattgatacaccttgttttccatgccatcgcattaatacttggaatagttggaatttatactgccttcaagtattacaatgaaaatgggattgccaatctctacaacttgcattcatggcttgtaattaggggtattgtcctttattgcattcaatggatatatggggttgtgatctttttt

SEQ ID NO: 21871 - DNA, 192 bp, Glycine max
atttttcaggataaaattggctttatagcaccaacaataaaaaaaaaaaaaaggaaaatgtgaataaggagaaagataaaaaacaatcttaaaacaaaaaaaaactgggcggcccctctaaaggatccaaacttacatacccgcgcatgcgaagtaataatttttttattgggtcacctaaattaaattaaa

SEQ ID NO: 21872 - DNA, 446 bp, Glycine max
  modified_base (429)..(429): a, c, g, t, unknown, or other
cgacagaaggggaggagctagagaatgatgatgaagtctgctatgtgtgcagtggtggttgtagcacttcttcttctggcggaggtggggcccatggctgaggctgtgacatgcaccccaacagagttgagtccgtgtcttccagcaatcacttccggtgctaaaccttccaatgcttgttgcacgaagctgaagcagcaaaaaccatgcttatgtggctaccctcaaaaacgctagcttgaagcagtatgttaactctcctaatgcccgaaaaaccgttgcttcttgtgggattccctttccaacttgttaattaattaagccttcttataattaaagtgtgggatatatatatatatataaattaaacttatatttattatttactctatatatgtcactctacgtttgtgtgatatattatacagntaagtatttagctatct

SEQ ID NO: 21873 - DNA, 361 bp, Glycine max
gtatccattttacaatagcactaaaatattggccacaccggttgtgaagtctcgtccttcatgacggagtcgggttgaagtgattcttacatttgttatccctattgatgctgccatggtgcttttcacttttggtatatgtcatgtcatgataaagcaagcaaagagtctgaaacaattatggaggaaaacgaattactctgaaggcggagatgatactgattctataaacttacggggataagagatagttatcggtcggataatgggacaataatgcaaggcttggttgaaaacgttagattgctaagctgtgtagtgatgaagactctgatgcattcatctacctttttgggcttcg

SEQ ID NO: 21874 - DNA, 382 bp, Glycine max
ccaacgcatgcgaacagctacaaaatgacgacaaagtgtgatgtgattgcagaaacagttggggcactgattgttgtgactgagaaagatcccacaaatgacactgcgacatacaccacgacaaagatgcatacaggtctctcaacagacaaattgcagggcttacactccacatacttgttacacgctgctgaaacaacaaaaaccatgcttatatggctacctcaaaaacgctagcttgaaccaggatgctaactatactaatgcccgaaaaaccgctgcttcttgtaagatggcgtctccaactagttaaataattaagccttcatataattaaagtgtgggatatatgtatatgtctaaagtacactcatctttatta

SEQ ID NO: 21875 - DNA, 338 bp, Glycine max
  modified_base (305)..(305): a, c, g, t, unknown, or other
  modified_base (312)..(312): a, c, g, t, unknown, or other
  modified_base (314)..(314): a, c, g, t, unknown, or other
  modified_base (320)..(320): a, c, g, t, unknown, or other
agggattcctgttggggtatcatccactttgacaaattttctttcaactccacccctcccaattcggtcttttcttccccttttttcaatgtatgcggggagcaagagtaggatggttgtttaaagaagcctgatagatatatcaagataatttatgaagtgacgttaggaatatctttattgcagtttctaaacagtcaacttattgagttattattaggagtagtagtagctatgctagtcttgtgcgtccatttaaacactattaaaagataccacaggatgattaaagaaggtgaaaattnttgtcgntntaaaanaaaacttatatatattat

SEQ ID NO: 21876 - DNA, 389 bp, Glycine max
tgagggcagttgcttaaggactgcataagaggggttgcatgcagaccttaggcttaatctttcagatagggagttgtcataagaagacgaccgtccaaaacattcaattctctatacaagcccataattttattcgtcataccaaattgcatcacaggtaaacacgggctggttgacgctgaccaagatagagatacaagaggaaggatcagaggatccatccgtgagatctattaacaatgaagctagagtgctaacactcatctacagaggatgacaaacatatgcatggtggctctggaagcagatatataagtgctgaactgggaggagaacattgagagaaatctcaatgagattctcattggtggacaggatctgtacacaga

SEQ ID NO: 21877 - DNA, 425 bp, Glycine max
gaacacttaagcggtaaaaagaagagggaagataagtttgctttagtttggcgtgtgtaattggtagagcgagaaacagagaaatggacgattacacttagggaaatgatggacctgaagacactggtcactccactctcgagaagaaaggcgtcctatgcaggatccgtgtacatacacaccttagggccgaactcagggcgagtgtgttcgaagccatcgaataagaagatcgtgtgattgagaaggaacaatgtctacctcctgcattgctaggtagttgcaacgatcgagctaagcagcttcacgcttcttcttcagggagacttcttacggcaatgatatgtgaataccttgactgggcgcagctcagttatacgctaaaagtttatcttccggaatgtaatttggagaaagatttttgg

SEQ ID NO: 21878 - DNA, 296 bp, Glycine max
attttcttatgagctggataagaaggggggcatggggatcttatgtttagactctaaaaaaggtttattttttaagaggacaaccgtctacttcatttttttatctatggacgcgaatatattgatttgtcattttaatatgcataacatgtaacatgatgtgatttatgacgttcacgataatgatacaaaagcagggttcaaggggtcgatgcatgagatatatagagctgatgtgagagagcgatcactgtcttacttctaggacaaaactttggtgcaacgatccatatgct

SEQ ID NO: 21879 - DNA, 308 bp, Glycine max
ggtgtctcttagattcaacatagtttattaaatatgctaacaacttaatgctagctgatcatcaatttagacaaaagcttacaactatgacttaacaaacaattaactatttttacatataatcatataactatacaatattaattgtaagaacgttaaatatattttccttgattttcactataaaagaaaatttataataatctaagtttgggtttcagctaattagctgcccagaaaccatgaaaacctagaggaaaatttaagtggcttggaatttctattctcgcaacaagggcattatctgc

SEQ ID NO: 21880 - DNA, 392 bp, Glycine max
gaagagcatagagatcatgacaatacttctgtggttgaggagcctgaaagcatacaggagaagattattcaacagacaggcaccactcctagtgcagctgaaccaaaggaagcaagtaataaggatgatcaatctcagatttttgatgaagagcatagagatcatgacaatacttctgtggttgaggagcctgaaagcatacaggagaagattattcaacagacaggaaccactcctagtgcagctgaaccaaaggaagcaagtaataaggatgatcaatctcagatttttgatgaagagcatagagatcatgacaatacttctgttgttgaggagcctgaaagcatacaggagaagactattcaacagacaggaaccactcctagtgcagc

SEQ ID NO: 21881 - DNA, 432 bp, Glycine max
gatccacatcacaaaaattacaacaccaatctcacccatttcaaaaaaaggccgttagtgttactattcgtaaaatggccactcttgttctttaccaattctttctcaaactcttgctcctaatttcagtctttcagctttcctttgctgctaggagactcaaccagctggttcaggaccagtcacagttactccattaccacaacggtcctcttctatacggcaaaatcgccgtgaacctaatctggtatggtcacttcaaaccatcccaaaaggccatcatcaccgatttcgttacctcactgtcatacccatcgtctcagagcagccagccatctgttgccacgtggtggaaaaccacggagaagtactaccacctgagtcccaagaacaagaaggctgcttcttctctttctctatcactgggcgatc

SEQ ID NO: 21882 - DNA, 229 bp, Glycine max
gacgggagggggttctagtgtgtgttacaggtgcgactcgtcctggttattcgggatcgtcttcttttgatgcctaggatatatcatttttatatcacccgaaaacgtcttgctgctttggtaactgaggtgtgccgtatcgccttcgtgtgccgcaacggatgcagaagctggagggttgccccatgcttgaccttcaccgtaataccaaccaacagagagcttggtc

SEQ ID NO: 21883 - DNA, 422 bp, Glycine max
gaataaacaaggtacaccaataaacaattgcaatctctttaaacaaaaaaataaaaataatcttggtatgcattttgcaactcatctagactatggtatagctgtgtgtgtcattttgtgctagacccttcaccatggaagagaagtcaaacgtggttgaatattttgcaatagcctatataagatggtaagggtaaaggaccaaatgttcaagatttgtgcatgccctttaacatgtgcctagtttggcttatgttacaaggcaattcatgatgggtgcaagaccttggctatctgagaaggagacagagaaatagaggcagcaggaaattacttccctctttcaaactgcaatttcttccactataagttgccagagaggaccagttgaagtgtgtggtacacattacacaatgtgaaat

SEQ ID NO: 21884 - DNA, 423 bp, Glycine max
gtatcttgctaacacccctatcatcaatgcaaggggaggatgtcaacctttttcataccttgcccatggtggtgctagaggtggcattatcatcagtcatgatttattgtttttaacttgcaatggacaatagccccaagactagagaaggtagtgttttgtttttcggatcaagcaataaaacaaacaaagggctttaatgaaaaagtgtgcaaagggtattttaatgatcttgacagggaaaaatgagaagttagggatgaagaagggttgaaagagaaggtggttttgaagatgaagagggattgagagaaaaacatcaacgattttgttaggattcttatttttatctgtagttttggatactttatatttaacatcaagtatttcatgaaggcaaatattgtctaaaacatataatct

SEQ ID NO: 21885 - DNA, 438 bp, Glycine max
  modified_base (341)..(341): a, c, g, t, unknown, or other
  modified_base (409)..(409): a, c, g, t, unknown, or other
gaagagaaggaagcatcgttttatgcagctacagaaacaggctttgatgaccttgtgtcaaagtggatcccacagccaagcaagcatataataaaaactgatatccctcaggaggctcttatggtaacagagtttgctcgtttggtggcagatatcaaattcaacaactcaaaacctgagaagaagtggccaacaattagtaggaaaactcaactggtattggatgctgtgaaggcttcaattgagaggggttttgagcctgttcagattcaggaatgagatgtatgtattgtttctgtggcttgttgaactgaggtctttgttccattagtgcatctcanaagtcatttctattttatttgtatttttaagcagtcattgctgacctgtgcatagaggaggaatgcanggtctgaagactcttacacaatgcacatt

SEQ ID NO: 21886 - DNA, 425 bp, Glycine max
  modified_base (385)..(385): a, c, g, t, unknown, or other
gtggaagctacaatgtgaacttctttagggtagtgtggaggactgcatatgtgattatcactgccgatgtagctatgttactcccattcttcaatgactctttggcccttattggtgcactctctctctggccattgacggtttacttacctatagagatgtacattaagaagtcaaatatgcacagattttccttcacctggacttggctcaagatattgagttgggattgcttgatcatttctattatctcacttgtggattccatccaaggcctttcggttagtatcaagaaatacaagcccttccaagcagaacaatagaactttcatacttagtattccggcttgtgccaagagtttctattgagggcgacaaaattcgnattactatgttttgaaataggtgccatatattcaattctc

SEQ ID NO: 21887 - DNA, 350 bp, Glycine max
tgccacgcgtccggctgaaacttgggcggtatttatttttgatagattattgatatatgagatgcaattggcaaatttcgcaatgtgcatgtttggatcttttttggttctaggcttcaaacattatctagatttgatgaattaatcctcagagactgaagcatttgttgaagtccattgttaattgtgtatttcttattgtttttcttttttggcatttttatttttttaaattatcattcaattcgagagtgtcttgaatactcgacttgtatgaatatacatcatatttcagaagtttttttgtttttgaaaaaaaaatccaaaaagaagaagaaaacaaaaaatat

SEQ ID NO: 21888 - DNA, 428 bp, Glycine max
  modified_base (230)..(230): a, c, g, t, unknown, or other
gaagagaaggaagcatttttttatgcagctacagaaacaggctttggtgaccttgtgtcagagtggatcccacatccaatcaagcatataataaaaactgatatccctcaggaggctcttatggtaacagagtttgctcgtttggtgtcagatatcaaatacaacaactcaaaacctgagaagaagtggccaacaattagtaggaaaactcaactggtattggatgctgngaaggcttcaattgagaggggttttgagcctgttcatattcaagaatgagatgtatgtattgattctgtggcttgttgaactgaggtctttgttccattagtgcatctcaaaagtcatttctattttatttgtatttttaagcagtcattgctgacctgtgcatagaggaggaatgcatggtctgaacactcttacac

SEQ ID NO: 21889 - DNA, 328 bp, Glycine max
agacttgaatcacagtggagccttatacctgagcgaggccatggtgaccttgctctgtcgtagatctctaccttctctacgccgaacgccgaaaccatggccggaaaaggacagggatctgctctcagaatggatctctgaaccacctactcttgcgcagcagcgtggaaacatgaccgaattgaactatcttcaacgaccaacggaacagaaccacgccgccttcatgctattcactgacaccgagcgtatcatctgtgaagcggccaataatcaagtcgtcatgaaccccatgaacaccgaactcgatgccaagaggctgaatggc

SEQ ID NO: 21890 - DNA, 449 bp, Glycine max
cgagaagaccacagaaggggatagcagtccctcattctcgtcatgtcacgtttctctcgggacctggaactcaacacactcgtcgaaactctggatctgttcttcttctgcttctgagagagaacatcctattatcttctcaatctcattctctaccagagagtaaaccctaagaacaaagaaatatggtttacaccatctcgggaattcgatttccggtttttccttcgctgcacaacttgagcttccgtggcgatcgcagaactgcgtctcttcccgtttttctccgaaacaactccttctctcggaaaacccttgctgtaaaatcttcccatgattctgattccttgtcttctgcgattgccgaatctgataaagtacttattcctcaagatcaagataactctgcattcttgacagatcaacttgaaactcctgatataacctca

SEQ ID NO: 21891 - DNA, 228 bp, Glycine max
ggaaaaccatagcacaatacctcacgtgcctctggataacttgcatcttgggcaaatcacaattttaacaacggtaacgggacccgtcaacggcctacgacgaccggaaagctacctatttttctctttttgtaaacacacgcgcgctggcttttggggtgaattttacgatttggtggtccctgtggtgggatccctttcttgttttggccgaaccgacaaggtttt

SEQ ID NO: 21892 - DNA, 394 bp, Glycine max
ttggggaatataccataacacaatatcctcacgtggctctggcataacttccatctgtggccgaatcacaactttcaccaccgtcaccggcaccgatcaccgccctacgacaaccggtaatctctctctctctctctctctctaacacacgcgcgcttgctttttgtgtgaatcttacgattttgctgttcctgttgttggatccctttctttctttcgccgaaacgacgatgcttttctagatccaactcgtcaatagtcttttcccttaattgttcggatcaatttattcgccttctattttggagcttcgtgtgtgaatcgctaaactgtggcgtgtggttgcttgtttgaaggcaagacacttggacatctgaatcattggtataaaaat

SEQ ID NO: 21893 - DNA, 419 bp, Glycine max
gttgtataatgaaaaataattgcataattgtctattgtaatgggaaatagaaaatggggaagaaaagacccggagaacacataatctccaatgtctataaattagtactcacaatgttgagcaaaaacaagatttactggggttgtccatttcattgtgaactaaataacgctttgctaattatgcctgtggcttcaatatatcgatctacgcacctagagatgcaactgctttcactcccaccgaggcttgaacctggttttgtaacacacttctcaaaacactttcttcccactgtctgcaaaataaaggtgagcggaattgtagcagatgagacactgaacaaaatcagtactcaataattatccacatttttcaagaatgtacaagtagctggagcaaatcaattgcacctcgag

SEQ ID NO: 21894 - DNA, 426 bp, Glycine max
gttgtataatgaaaaataattgcataattgtctgttgtaatgggaaatagaaaatggggaagaaaagacccggagaacacataatctccaatgtctataaattagtactcacaatgttgagcaaaaacaagatttactggggttgtccatttcattgtgaactaaataacgctttgctaattatgcctgtggctttaatatatcgatctacgcacctatagatgcaactgctttcactcccaccgaggctttgaacctggttttgtaacacacttctcaaaacactttcttcccactggctgcaaaataaaagtgagcggaattgtagcagatgatacactgaacaaaatcagtactcaataattatccacatttttcaagaattacaagtagctggagcaattcaattgcacctcgagacttttt

SEQ ID NO: 21895 - DNA, 258 bp, Glycine max
gaactctacagagggggttttcaccacgcccaccaacaaacaattgtattctcttggaacagagctatcaacttaacctacatatgcgttcacgcaactcacctcaactccagtgtagcatgactgtgtcaattcgagcaataccctacaccatggaagagaccccctaagagggtgcgtatttcgccttcgccgatataacatggcccgggttaaggaccaactgctcatgatctgagcatgccctttaacatgccc

SEQ ID NO: 21896 - DNA, 381 bp, Glycine max
gacaccaaacgagccatttgggagttaggttctgcacgctctgcttccagcgagtgttctttcttcgtttcaacaccttaatttgcacacgctgcttcttcagcttgagaaatggcacaagaaacctttctattcacatcttgaatctgtaaacgagggtcaccccgacaagctgtgcgaccagatctctgatgcagtgctcgatgcgtgccttgaacaggaccctgacagcaaggttgcctgtgagacatgcaccaagaccaacatggtcatggtctttggagagatcacaaccaaggccaacgtagactatgagaagattgtccgtgacacatgccgcgaaattggattcatctctgatgatgttgtcttgatgctgac

SEQ ID NO: 21897 - DNA, 415 bp, Glycine max
cagggttgataccgtcttaaaagaaattgaagctgtgcccgagcaaaagcccctttatatgggcaatctcaatctcttgcatcggcctctaagaaacggaaaatgggcagttacttttgaggagtggcctgaatcagtatatcctccttacgcaaatggccctgcatacataatttccagagacattgttactttcatcatatctcaacacaaggagaggagactgcggctctttaaaatggaggatgtaagcatgtgaatgtgggttgagagatttaacaacacggtggccgccgttcagtactctcacaactggaagttttgtcagtatggatgcatggagggctacttcactgcacattatcaatcaccaaggcaaatggtctgtctatgggacaagttgacaagaggtcgt

SEQ ID NO: 21898 - DNA, 304 bp, Glycine max
  modified_base (128)..(129): a, c, g, t, unknown, or other
  modified_base (132)..(132): a, c, g, t, unknown, or other
gaagaagaagcattgtgcgactgaaaaaaggtcttagatcgtaaaaactaatcactactaaaacaagagatatcgtatatggctcctcccaaagctaatgggatcgtgtcgtccaataccgtcttcannganatataaatctattgacctttgtgcgtagatttgaacaagctactagatgacctatgtgctaattactaggcgctcttaatagactcttaatattatggaaaggagtttgaaataccattaggtgagaggactgatcgtctaacctagcataatatgcttatcggcagaaacc

SEQ ID NO: 21899 - DNA, 106 bp, Glycine max
gaaaaaaaagaatttggtgacggagctaccgttctagagggtccaaacttacttacgcgtacatccgacatcataaatattctatagtaccaacctaaattcaatt

SEQ ID NO: 21900 - DNA, 301 bp, Glycine max
caacggataatgtcgccatgccaacgcctggctaggaagagggttgagactaatagcgctcagccgaaaaatactattaatggagaagattttgtatggcaacctgctttataaggagagcaaaaagaggcatgaaatacttctattgccatatggacctgtgaagaagggtatcaccggcggaattatcgacaaaaacatgtaaacggtggtgagtatgccacattctataataaactcacacagactatgtgtgtgggacatacaccagtagcacgatggtgttagggtctggtgacag

SEQ ID NO: 21901 - DNA, 365 bp, Glycine max
gggattgcagtgaacctggtaacatacatgatctcaatcatgcatctgccaagctcaactgcagccaatactgtgactgactttatgggcacatcatttctcctgtgtttgctgggaggttttctagcagattccttccttggcagatacaagacaattggaatctttgcttcaatacaaacgctgggtactgctacattagcagtctcaacaaaattgccagggctacgtccaccaccttgccatgctaacagtgacagttgcaaacaagccaacggattccaaatgggaatctagtacttgtcactgtaccttattgcactaagaactggtggcctgaagtccaatggttcatgatttggttc

SEQ ID NO: 21902 - DNA, 404 bp, Glycine max
gttgtataatgaaaaataattgcataattgtctattgtaatgggaaatagaaaatggggaagaaaagacccggagaacacataatctccaatgtctataaattagtactcacaatgttgagcaaaaacaagatttactggggttgtccatttcattgtgaactaaataacgctttgctaattatgcctgtggcttcaatatatcgatctacgcacctagagatgcaactgctttcactcccaccgaggcttgaacctggttttgtaacacacttctcaaaacactttcttcccactgtctgcaaaataaaggtgagcggaattgtagcagatgagacactgaacaaaatcagtactcaataattatccacatttttcaagaatttacaagtagctggagcaaat

SEQ ID NO: 21903 - DNA, 378 bp, Glycine max
cccacgcgtgggaacagattgagagcctacagcgtcctattacaatggaagcgggctcgattgttctaatggatttattatggtctgatccaacagaaaatgatagtgtggaagggttgcgaccgaatgctcgaggtcctgggttggttactttcgggcctgatcgtgtcatggagttctgcaataacaatgatcttcagttgatcgttcgagctcatgagtgtgttatggatggctttgagcgctttgctcagggacatttaatcacccttttctcagcaactaattattgtggtaccgctaataatgctggtgcaatcttaattttgggtagagatctagtggtagttccgaaactcattcatcctttaccccctg

SEQ ID NO: 21904 - DNA, 444 bp, Glycine max
cggacgcgtgggaacagattgagagcctacagcgtcctattacaatggaagcaggctcgattgttctaatggatttattatggtctgatccaacagaaaatgatagtgtggaagggttgcgaccgaatgctcgaggtcctgggttggttactttcgggcctgatcgtgtcatggagttctgcaataacaatgatcttcagttgatcgttcgagctcatgagtgtgttatggatggctttgagcgctttgctcagggacatttaatcacccttttctcagcaactaattattgtggtaccgctaataatgctggtgcaatcttagttttgggtagagatctagtggtagttccgaaactcattcattctttaccccctgcaatgtcatccccagaagcatcatcggaacgtcttatataggatacatggatgcaggagctgaatg

SEQ ID NO: 21905 - DNA, 412 bp, Glycine max
gctccttctccatcctaaatcgaatagatagataggtgaaaatggcgcagtgtgtgaccaacacattcgtgcaaggaaaaccctttcttccagttgcagcagctcccactaaaaatgttcggagagcggttcagtgcggtgtgtggtgcaagaagaaggagatacacccgcaattctacgaggaatcgaaggtgtactgcaacggggagctggtgctgacgacaggtgggacccagaaggaatacgtggtggacgtgtggtcggggaaccaccccttctacctcggaagccggtcggcgtctatggtcagcgacgaccaggtcgagaagttccgcaagaagttcggggagctcaaagagatcatggagattcctgttctcaagggagagattgttatcccctcaaggcgcaa

SEQ ID NO: 21906 - DNA, 211 bp, Glycine max
gaagagattgtagaaacagttagtgaagagattgttgagactgagaaagatgtcaacaaagtgcatggcattccagttgaggaagatgatacaaagagtgtactgaaggacagaatgaatgtatatataccgctcagacgtgagaaatgctatataaaacaatagagagggttatttcagtagttagaaaatgtggatttcatcccctcgg

SEQ ID NO: 21907 - DNA, 177 bp, Glycine max
  modified_base (72)..(72): a, c, g, t, unknown, or other
tttggttttttctaaataaaaaacataattggggccaggtttctttataaagggactcatacttattctcanactcaaatcttttctttcactgaatgacttaccactctaaataattttcaatcctgtcacatctcattctttttcattacaaaatatatatcacccacaaatcta

SEQ ID NO: 21908 - DNA, 413 bp, Glycine max
tccaacaggcaaatttgcttcggtgaaaggaacaggttatgatttccttaagccacaaactgttggaagcaggatcaatcaattggctgaaaccaaaggctatgacatcaactatgttcttgatggtgagaagggccaaaagatcaagctagcagctatagtgcaggataagaaatcagggagagtgttggagttgttcacaaatgctcctggtttgcagttctacacttgtaactatgttaaggatttgaagggaaaaggtggatatgtgtaccaatctcattcaagactatgtttggagtctcaagccttccctgattcagtgaatcagcctaatttcccttcaacaattgtgacaccagaaaagccttacaagcattatatgctttttaagttttccaccaaaaatccct

SEQ ID NO: 21909 - DNA, 408 bp, Glycine max
cccacgcgtccggaaaaagcctctaaatgtggctagctaataacggcaatgttcctttttggctctattgctgaagctggtctaaaattctgcaattatccaaaaggggggaaaaagggccttaaaaaacattgaggctttgctgtggcattgttattctgaaaaaaactttttattgcaagcaaggaccctcatttccaagctaactgaggagaaaaactctgccattcatcaaaatatcaagcttcagcaagaactggaactgttgagacgcgaagccaaaagaaaccaaagagggattccattcatttatgtatttcttgcgggcttgatcggcatcattttgggatacctattgaaaagaacatggccaccaccgtgttacacattcttcagtttctttgatgc

SEQ ID NO: 21910 - DNA, 439 bp, Glycine max
gagtgtatgtgattgttgtgactcgttcttcttcgtcgttatcttcttcttttgttgtttgtgtgtttgttttttctctcacctgaaaatgtcttgctgcggtggtaactgtggttgcggaagcgcctgcaagtgcggcaacggctgcggaggctgcaagatgtacccagacttgagctacaccgagtcaaccaccaccgagaccttggtcatgggagtggcaccagttaaggctcaattcgagagtgctgaaatgggtgttcccgctgagaacgatggctgcaaatgtggagctaactgcacctgcaacccctgcacttcaagtgaggtgttggagagctaaagcttcaagcagaaatggcccttagaaataatgataaaaactatatgtagtttcaaaacttcaaaattatgtagtatgtattatgttgcactctgg

SEQ ID NO: 21911 - DNA, 335 bp, Glycine max
  modified_base (312)..(312): a, c, g, t, unknown, or other
ggttgaatgtagaacgctgctgccgaaacccttcccgatccctaaggtaagtgagtaatcggtggttgagaatggtggagaaggcgaagggtaggaaggaggaggtggttaccagagagtacaccattaacctccacaagcgcctccatggctgcacatttaagaagaaagctcctaaagctattaaggagataaggaaatttgcccaaaaggccatggggaccaatgatgtgagggtggatgtgaagttgaacaagtttgtctggagccagggaatcaggagtgttccaaggaggattatggtaaagaatngctcgcaagaggaatgacgatga

SEQ ID NO: 21912 - DNA, 437 bp, Glycine max
ggatgtccgcatgcatattagccgagtaaaatttgttctatactcgatgcagggttttggcaaaacccaaatgtccgccaattggtgttgagtggaattcttcgatcaacaacacaatgaaagggttttctagttcaagccaaactttgtggttgaagaatagcaggccatcatggtactcgatcccaggatgggaagtgggattggtgcaaatttgctgaagcttatcttgaaaagaagaactagtggtaaaatgtttgtgcatggcatcgatgaagatgaagtggggtgtggagagtatcatgcactgaccactggtgggaggaggtattctggataaggcatctgtgacaacattcgtttttccgaacttgtattggatcgtgtagtcgtaacctagtagcttggagagataattttgttgttctagcgtctta

SEQ ID NO: 21913 - DNA, 156 bp, Glycine max
ttggggagttttgtcgcagcattccatacgaggccgaatggaagagtttttgttgggtttggaagctaaataaggtttgcgttgaaaaaaaaaaaaatgggaagagaaaaagagacaacaaaggtagcttacacaatggaacatcttgtaaccttt

SEQ ID NO: 21914 - DNA, 296 bp, Glycine max
  modified_base (252)..(252): a, c, g, t, unknown, or other
gaatcattgcatcgtaggagtctcttattctcctttgtgatggaaagatagaaaccctcatcgtccaagcacgcgttctttttaatctctctctctcaacaaatatttgtgggtagattcaattcaccatgtcgagctcatcggagtactctgaattttgcggccagaaaccggctaggtcgccggagaaatcgagcttctctcagacttgcagtctgccgagtcaatacatcgaggagaagggtagcttcngagatcttaccctcagaatgacatcatgtgggtcacctgagaca

SEQ ID NO: 21915 - DNA, 212 bp, Glycine max
  modified_base (175)..(175): a, c, g, t, unknown, or other
cggttgtaagaccaccggaggggccattctttaatcttaaacacttggaaggaaaatatagttgcccacttcttccattatctcattttctattacatcggcatgatgaaaccttgtatattatactctaaaatttagaatcattcttaatttggtataattatactaaatattntactggtcgatatgggaaatgcactgatcacggatac

SEQ ID NO: 21916 - DNA, 105 bp, Glycine max
  modified_base (40)..(40): a, c, g, t, unknown, or other
ggttctagtgtatgtgattgttgtgactcgttcttcttcngtcgtatcttcttctttggttgtttgtgtgtttgttttttctctcacctgaaaatgtcttgctgc

SEQ ID NO: 21917 - DNA, 314 bp, Glycine max
tcccgttcgacgactacagacgacgactctatggggttctagtgtatgtgattgctgggagtcgttcttcttcggcggtatcttcttcttttgttgtttgtgtgtttgttttttctctcacctgaaaatgtcttgctgcggtcgtaactgtggttgcggaagcgccttcatgtgcggcaacggctgccgatgctgcattatgtacccagacttgagctacaccgattcaaccaccaccgataccttgttcatgggagtggcaccagttaaggctcaattccagagtgcttaaatgtgtgttcccgcttagaacg

SEQ ID NO: 21918 - DNA, 402 bp, Glycine max
gatagcagcatcatacaaagcattgaattcaaaaactaagttcatttcttgtgctttgctttattcctcaaaaccaaacatgtcgaacacatgcggcaactgtgactgcgctgacaagactaactgcaccaagggaaacagctatggtgttatagtagagactgagaagagctacatcgagactgttgacatggatgttccagcagctgagcatgatgggaagtgcaagtgtggcactaactgcacttgcacggactgcacttgtggccattaaggaatatgtatgaaaatgtaattgccatgtgtttggcaatacaaatctccaaataatggaatcttcgtatgaataaatgtgtgctgttatcctacttcaaggtctgtgtagtcatgcagtctgaatca

SEQ ID NO: 21919 - DNA, 318 bp, Glycine max
gaatacaacctcaaaaagagttctttcaaaatgcaaacagccttaaccttcgctgcccccaacgttgtgccattggcacccacaaagagtgtctcccatattaccatctttcccaccaaattgaaagccccgcgctcctcacctcgttactctccgattagggttgcaaccgtggagcccgacacttcaactgtcgactacaactctgcgttctcagtgtttcctgcagaagcatgcgaaactgtatgaggggaagcctgcatggcggagatgtaccctgaaacgaagctacagccagaggctaagactccacgagtc

SEQ ID NO: 21920 - DNA, 345 bp, Glycine max
  modified_base (316)..(316): a, c, g, t, unknown, or other
gaattcttggggaatctgagcggtgacccatacattcttcacaccaatgtgttcagtcagggcaaaggcagcagagagcaacagttctatctgtggttcgacccaactgcagatttccatacctattccattctttggaatcctcagcgcataatcttctcagtggatgggaccccaataagagaattcaagaacatggaatcaaaaggagttgcattcccaaaggaacagccaatgaggatatactctagtctatggaatgctgatgactgggcaacaagaggtggacttgtgaagacagattggacacaagctncattcacagcatcatatagaaatttcaat

SEQ ID NO: 21921 - DNA, 97 bp, Glycine max
gacgcgctgctatgcgcaatgcctggtagagagaacgtgtggcgcatgaagccaactgtcgattctactccctctagagatgcgcatgttcgtgaag

SEQ ID NO: 21922 - DNA, 330 bp, Glycine max
ggcacttagcaatcaatcaacactggaattacaatatacacatcttcaattaagccatgactctctctaagcttatagttgcttcccttcttgcctcgcttctccttcttcatcttgttgatgctgatcaatcggcacatgtacaaacgcaggggtctcttctgcagaagatagattgtaatggagcatgtgctgcgaggtgtcgtttatcatctcggccacgtctctgcaaaagagcctgtggaacttgttgtagacgctgcaactgcgtgccacctggcactgctggaaaccaagaagtgtgtccctgctatgctagtttgactactc

SEQ ID NO: 21923 - DNA, 387 bp, Glycine max
ccacgcgtgcgaccacgcgtgcgggtgcgtgaatacgacggatggagttgctaaggaacatcggtggcataaacctgaatgtggacagttctaactgcacaccaacaaggctacttcactaaagtgttttatctcttccttgatcatacatggaagcgtggatagctgggatggaagtgacttacattgaatcggagctccacactcttctgatcagaatgaccatcaccacaagacaaagcgttctgccagaggtgatgatgaaagcttgaaacgtgagagcagtgctcgacgccatagctctacgtagaagaagcctagagtgaatagggcaattgaggtgcccgctatcagcatcaaactagctgatctacatactgatgatta

SEQ ID NO: 21924 - DNA, 389 bp, Glycine max
ggaggctaggagaagagaagtgttcccttagaagaatagtgtaaaatggcatcactcaaagctgagaaacctgttgaaaaatcttgttgctctcaaccatctgcaggacaggtgaagaaagagtcttctgccaaacctagttcaggcacttccaaagccccggtctcgaaaccaaccccaaagaatattccaagccagactaggtagaaggcaagcagcaataaataagctgaagatgcaagagtaaaaagtacgaaagactaaaaaataatagttgttgcacttggaattatgggaagagtcctaaggatactgttatatggtgctcttcaaccatggttataagtagtgctattaatgtctgtaccacttgcttatgttaatttctc

SEQ ID NO: 21925 - DNA, 332 bp, Glycine max
ggtggatgagatgtgaaacttcgcagctgatcaccatcgccttcttcctccccttgtttctaaccaatcttcaaattccatgtttttttaggtatgaaactttatttccttcctttttatttttcgttttaactttttataatctttcaattatccttttttttccctctctcgagattatatgcaatgtttgccttgctatggattctccaatatttcagaaatctaactatctaactgtaaaatatgcttttgcatcccttttttccgtctttgggtttattaggcttcgattattttcatgtgaattaacttcataagaactatttcgt

SEQ ID NO: 21926 - DNA, 341 bp, Glycine max
tcctgttttcaataaatcttatatgttgtatcattcttatgatggcagcttgcacagaaagaattgcagaagatcaacatgtacaaggcacccagggataaacttgtctgtattctgaattgttgcagggttattagcaacttgctgcttaatgcttcggttgcttccagagagaatcctccaggagctgatgaatttcttcctgtgcttatttatgtaaccataaaggtaatccaatgttccattacaaataatacatgcataattttcgagtagaaataatttggcttgatagaatgaagttattactttctgcactttctttaaaatatgggtatgac

SEQ ID NO: 21927 - DNA, 306 bp, Glycine max
gaagctcaatagagagaactcaattgaatcatcaaatgaggacagtgatttcgcgcttgatccattccacgccttccatttccaggctcaatgccacggtagtgtcaatcagcgggagaaatctctgcacagattctaacaaagttgatgggccattcaaagttgaagaagcagagactgtaaatgtgcctccactcccaacagaaaagttgcttgtgttgggagggaatgggtttgttggatcacacatttgtagagaagccttataccgtgatttgtctgttgcgagtcttagcaggtctggta

SEQ ID NO: 21928 - DNA, 320 bp, Glycine max
  modified_base (255)..(255): a, c, g, t, unknown, or other
  modified_base (292)..(292): a, c, g, t, unknown, or other
ggaagatgagggttggaaggaagagaggaacccagagagataaagctgttggaaaaagctgaaagtgaggtaaccgaaagaggaaaaaaaaagctttttaatttccttcctctattctattctcttagtcttaggtacccgtatctatcatcatcttctctagcgagctcagagctcatcctgctccttctcttaattctattatcatacaactaagaatgatcgacatgttagtgatccataactcattacctnccacttctgatgccgagaatggtactgctgctactgncactaataaaaggaagagaaggcctgca

SEQ ID NO: 21929 - DNA, 341 bp, Glycine max
atggtagaggatgcacgaacagcgctaggcaatcaatttgtggggctccggacttgatggtggaggatgcatgaacaacgctaggcaatcatttcacggggctctagagtcaatgatggaggatgcacaaacagcgctaggcaatcaattcgtggggctccggactcgatggtggaggatgcatgaacaatgctaggcaatcaattcatggggctctggactcaatgattgaggatgcatgaacagcgctaggcaatcaattcgtggggctccggactcgatggtagaggatgcatgaacaacgctaggaaatcaattcatgggggctcagactcaatgat

SEQ ID NO: 21930 - DNA, 389 bp, Glycine max
cggttgcaagagaccaactgagggggactaacccaaaaccaacctactccaaggaagtcccctaatcagaaccagagatggacaccaaacccaccgagatcagcagcggcaagatgttcggaggttacaacaagagattcaagcatttcagccttaccctgggatgctccatgaacttccacatctacttgcctccatctccttctgcctctcacaaattccctgtgctgtactttctctctggcctcacttgcaccgacgagaacttcatattcaagtcgggtgctcagcgtgccgcttacgccgagggtgttgccttggttgcccccgacacttctgcgagaggcttgaatgtggaaggagaagcaaacaactgggaccttggagta

SEQ ID NO: 21931 - DNA, 332 bp, Glycine max
ggattagatctcaaattattatttctactgaaaactacagccatcgatcgaatttgctgcaattaacataatagcagaatcccttttccaacctttcttctcttcagatcggatcagatcagaatcccaccgccatggatttcatgaaggtcttcgatcaaaccgttcgagaaataaagagagaggtgaatctgaaggtgctcaaggttccggaaatcgaacagaaggtgctggatgcaactgataatgaaccttggggtcctcatggtactgtgctggcagagatttcacaggctaccaaaaaatttactgaatgccaaatgatcatgaat

SEQ ID NO: 21932 - DNA, 395 bp, Glycine max
  modified_base (379)..(379): a, c, g, t, unknown, or other
caaaatgacaacaacatggatcctcagcgtaaagcattttatgaatacttctcagctctcatggagccatgggatgggccagctcttatagcatttactgatgggcactatcttggagcaaccttggacaggaatgggctgcgaccaggccgcttttatgtcacccacagtggacgagttgtaatggcgagtgaagttggggttgtagacattcctcttgaagacgtgagtcagaaaggaggactaaatcctggcatgatgcttctagtggattttgagaagcatattgttgtgaatgatgatgccttaaaggaacagtattcattggcaaggccatatggggatggctcaaaagcagaagtagaactcaaaacatagntgattctgtcatgaat

SEQ ID NO: 21933 - DNA, 437 bp, Glycine max
  modified_base (385)..(385): a, c, g, t, unknown, or other
gatacttcaaaatccaaatctagcgattaattatagtttaggcagcaaattatggaatcccatgatgaggagcatgctgccaaactacttagagctcaaacccacatatggaatcacatatttagcttcataaactccatgtcccttaaatgtgtggttgacttaggcataccagatatcatacacaactatggccaacccatgccactctcaaacctcattgcttcactaccaatccacccatccaaaacttgcttcgtccattgcttgatgcgaatcatgatccattctggctttttctctcaacaaaaccatgacttggagaatgagctagaagccaagtatgtgctaaccgatgcatctgtactattgcttaaaaaccatncgctgagtgtgacaactttcttgcatgccatgcttgatccaattttgacaaa

SEQ ID NO: 21934 - DNA, 307 bp, Glycine max
gaccggcttgaccgtggtattcaagaatctcagaaggtgttaatcgaaactcagtccgagatcatcatgctcgaggatagaaccgagtttgggcacgaggaccctcacgaattcgacacgtaccttgaagaacaactgggggattacctagttccccaggatgataaggttattgaaaagacaatcgcagaggtgctaccaaagagagttatatgtgtttggaagccaagataatcgccacagcctatagcatggagtcctctgaggagtgcatggtactcgagggattactggatcaacactgatt

SEQ ID NO: 21935 - DNA, 380 bp, Glycine max
gtcccaaggtatcatttctaatacatccgttgggcgggctcggacacattgagtacatcctatacatgtatcataaatttttactgaatgtgacattggatcgtaatccttgaacatcaaaaattcaacattttcaatctagtaaacttgtaaacgaatttatatatattagataccagatgaatcaatgatttataaaaattttgataatcaaaatatacttatagattaattaataataagagaatagaaccaagatactttgatttcttatctttgttttcgcaaacatgattctaatttatatatcatatatggctatgctaatttgaattcattaatagtccacacaaaatttaatttttcctttttttaatttt

SEQ ID NO: 21936 - DNA, 153 bp, Glycine max
gaacaaagaaacaacgcttcatatacccaacttgcgggttcttttcatctgtatacaatctaaatcctcctaaatactcctccctctttaacccatccaatcttacttacccatcccaacgactttccatactcttctttattatcacttaaa

SEQ ID NO: 21937 - DNA, 397 bp, Glycine max
tcggccacgcgttcggccaagccttcctaccggttgtaagaaaactacaaaaaggggatcggcttttggtattaattcctccggattgggtcaaaaacatctctcgaatgagttattcaactgcagggatgaatcgaaaaatcactctctataggttctacctcctctgtgttatgaagagaatgaatctctttatcgaaggatcataaaagaatgggtccagacctcttgcgggaataatttggaagatccaaaacctacaatagctgtatctactagcaacaacatactggaggcagtcaatcaatatagattgatccgaaatctgattcaaatccaatatatcacccatggttacataagaaatgtttcgaatcgattcaattgcaacttcgaa

SEQ ID NO: 21938 - DNA, 275 bp, Glycine max
atctaaaagaaagactaaaagttttatatattaagaaataaggagatttgattaacaaaatcttgtaagactatctattcttatttgagttttgcttttattactcatgttatttagacaaatagttgataattatgagtttggatatttatttaattaatccttgataatccatataaatctatctatgtgggcaatgacaataaaattatagtaaataagcttttaaaacttttaaactatagctatagattgattttcaaatcgttttatgt

SEQ ID NO: 21939 - DNA, 295 bp, Glycine max
gaccccaaaggggtttttaaggaccacaccattgaaaattttggacctagaaccaaagaagggaccggttcatgatcaatacgatgatcttgttggttctttttcttcttcttcttcttcaacatcatcttctgtttctggaatttcaagtgggtcatcattggaatctgattcttttgaagaagtaacatcctctgcctcctcttcttcatcatcagcagctgatgatcaacttgtagttgtagctgatccattgggtgacatgacttctctctttcaacaacttcccatcaag

SEQ ID NO: 21940 - DNA, 293 bp, Glycine max
ggttgaggaaattttttggaaggaaaacaaaaattcgatccgaatgtattagatctcaaatcatttctactgaaaactacagccatcgaattccctgcaattaacataagcataacccctttccaacctttctcctcttcagatcggatcagatcagatccaccgccatggatttcatgaaggtcttcgatcaaaccgttcgagaaataaagagagaggtgaatctgaaggtgctcaagattccggaaatcgaacagaaggtgctggatgctactgataatgaaccctggggt

SEQ ID NO: 21941 - DNA, 342 bp, Glycine max
gggagaccgaaagaccggaacataaggcgggcaagagagttcgtttcttctctcttcaatggaaggcggcgaacaggttctcccttcggccaccaccgtcgccgccgtcggctatcccaacgtctctcctcctccgctcgctgatcctgtcggtgcttccgatctcgctgctgctgcctcggacgacgttgttgcggaacctgaaattcacgcgctgatttcagacgaagagcacgatcacgatcacgatcacgagcatgagcatgagcatgaccatgacctcgagcacgatcacgagcatgagcatgaccaccacgaggaccgcgatgatcacgcccgcgt

SEQ ID NO: 21942 - DNA, 308 bp, Glycine max
gatattgatggtacccctgcttatgaagtcactgaatgagggttcttaccaaatgacagatgcttttctttactaccctacaagtctacctttccattccgacctacatctggttggagcacgaatctctcatcttgtaacacactacatctaacattaatcaaacctattgccctttgcaatatgcagtggagtattgactgatgctggcgggcaaaatatcaaagagctttcttctctagtgtgcttaaatatatctcaaaacagcttcctcactgacaaaaccctggagttaatttctgcgctta

SEQ ID NO: 21943 - DNA, 383 bp, Glycine max
  modified_base (210)..(210): a, c, g, t, unknown, or other
aggggacctttccacctttcaatttcattaggaaaggccaaaactgagcctcgaggaagataactacgatggaaccaggaggattggttgattccaacggcgttgctatcgttgctgttggtttcattttttccgccgttgagttacggagttgttcctcctcgtcctctgctcaataagctgtcggagggcaaatatctcaacactcangagctctggttcgaccaaaccctcgatcacttctctccctatgatcaccgacaattccggcaacgttactatgagtttctagactatttccggattcccgatggaccaatttttttggtaataggtggtgaaggtatattgaatggggtagcaaatgactatcttgctgtact

SEQ ID NO: 21944 - DNA, 299 bp, Glycine max
  modified_base (279)..(279): a, c, g, t, unknown, or other
gcacgtgaggcacgagaaatttattatgataggtgcaccaaagattcttctgactttatgagagatgaaagatataggaaacgtcccattttaattgcagcttctgtgggaagctatggagcgtatttggctgatggctctgaatatgttggggactatggtgatgcagttactgtccagacactgaaagattttcacagggaaagagtaaagattcttgttgaggctggtgctgacttaatagcctttgaaacaattccaaataagctggatgcacangcttatgctgaacttctcga

SEQ ID NO: 21945 - DNA, 245 bp, Glycine max
aagaatgtatttacaagaaggaaccactgctagctgggacattttgaacctgagttaaagtcagcatcaaacacttcggatcagttaaaaaaacaattatttcatctaatattttttttcacgtatcatgtgtgtgatgattgacatatgggtcaacatgtgccaacatcaaatattgtatgatgtttccttacatgcaatatatcattaattaattgacagaacttattttatgttttattttc

SEQ ID NO: 21946 - DNA, 120 bp, Glycine max
gatttctgtttctctaagataaacaacatgtgatggggtttttattgaagtgaaccaaattgatttatctcccatatcctaatttgcaatgatgtttgtttattctgcactgtccattat

SEQ ID NO: 21947 - DNA, 361 bp, Glycine max
  modified_base (94)..(94): a, c, g, t, unknown, or other
  modified_base (348)..(349): a, c, g, t, unknown, or other
gggcccacttaaaagcatggttcctgactatgaaaatcaggcaacaacacagggaattccatctgtaagctgaagcatccttcatggacatatnttacactctgccatgtgaaacatgctaaggagatataagggtggttggatgattaagatagaagggaatgggggaaaggtcgcgggttcgattccccagctaacaaattaacaactaacatttgccgataaaaaaaaatgtgaaacatgctaacaactgattcttgattgtgtgtatattttttttttcagggaggtacttttacaggaatggaaacaacctttcagggaatgcatctggctgagaaatacttnntcccaacacaac

SEQ ID NO: 21948 - DNA, 224 bp, Glycine max
ggcctactgatggggttacatgaccagaggaaaatattttcttttaataaaggaaacttataatcgaaacgaaaaatcgccatgaatcccaaaatcctcttcgtgtttgctctgcttctgaatctcgtatccaattcgttccaaaaccctaacccttgaacccccatatcaacgtcatcgcatgctcacgtggtgctcatcatccacggcttacccggcggtct

SEQ ID NO: 21949 - DNA, 266 bp, Glycine max
ggctgctcaaccttttctttgtttctctcacttggtgggtctctctctaaaagctcaggactcagattgtgccctttttgacaaacctctgctctttgattccagggaatgtttagatgcagttgcaaatggatactctatttatttatttgtgggaatgatttactgtcttgtaatgcaatgtggggtttaagggctgattttggctttgtctgtgtgattcttattcagttggcttctcagaagtgggttagtgaaagttttta

SEQ ID NO: 21950 - DNA, 334 bp, Glycine max
  modified_base (319)..(319): a, c, g, t, unknown, or other
gctagatagagagtttcgttcgtcaccatgacttttaagcgcaggaatggaggtcgcaacaaacacggccgtggccacgtcaagttcattcgatgctccaactgcggcaaatgctgtcctaaggacaaggctatcaagaggtttctggtgaggaacattgttgaacaggctgcagtcagagatgttcaggaggcttgtgtctatgaacaatacacgcttccgaagctttatgtgaagatgcagtattgtgtttcctgtgctatccactctcatgttgtgagggttcgatcccgcactgataggagaaagcgtgagcctncacagcgatttatca

SEQ ID NO: 21951 - DNA, 266 bp, Glycine max
ggaacttgggctgcgcaccctggtctcattccagggggcatggagattttgaacaacaacatgggcaatgcttccaaccagatagacacagtgaaacgcgaagatggggcaaacatcaccgagcaagacctcttgcagataccaagaggagcccgcaccatggaaggtctcagattgaacacaagggtgggaattcagtacgtggcggcgtggctcaccggaagcggtttggtgcctctatacaacctcatggaggatgctggcac

SEQ ID NO: 21952 - DNA, 277 bp, Glycine max
attattatggatcgcaatacggggtctctcgctgggtactatcttcaattcttcatcacagaactcttggttccaagttccagcaacatcatcactattgtgtttatgaaacgttatttgcttatttatttaagtttgaatgctgatgggagcgtttttggttttggaattgatgtttcgcctaactctgattgtctactgagtcatgacagtgaccttccctgccatagacacagatgaagtgatatgctatatcattttgtaattctctctctct

SEQ ID NO: 21953 - DNA, 188 bp, Glycine max
gaccttcacagaagcaattaatcatattcctctctgattctcactatagacacaaaacccttcccatcctaattaaggtgaaaatgaaggcatcacccattgcttggttcactttggtggttgtgtttcttgtggctgaagttcaagtttcaatggcagtgacatgcagcccagtgcagctgagtgca

SEQ ID NO: 21954 - DNA, 214 bp, Glycine max
  modified_base (30)..(30): a, c, g, t, unknown, or other
atctccatgcaattgatcagtgctactcanactgatggcagttgaaatgggaaagttggaaaagaagtctatttggaaaaacatcttccgaccttgccaacgtttggagcaaggcaggattgcgtcagtattttctttgaatgggatgctagttttggaattccaggagcattttacattaaaaaactttattgaactgatgagttttttccct

SEQ ID NO: 21955 - DNA, 262 bp, Glycine max
gggggggaagttatagacacctttccatactttgtgtctggagtacttcacttaatttcctctgcagtattgggctttggcggtatttatcatgcacttttgggacctgagactcttgaagaatcttttccattcttcggttatgtatggaaagatagaaataaaatgactacaattttgggtattcacttaatcttgttaggtataagtgcgtttcttctagtattcaaggctctttattttggaggtatatatgatacgt

SEQ ID NO: 21956 - DNA, 158 bp, Glycine max
cccacgcgtccgtctgcgtgagacaacacaacggtgatcgcgggctgcgaggataggaaagcgctagtaataagaatagcgttggatgacggatcgccatgcctcgcatactgtattacttttgcagagctcacaacaccgaaccttcattcccgact

SEQ ID NO: 21957 - DNA, 325 bp, Glycine max
ggatggtcaccttcctcaagggggttgtggatgaatgggggactgtttccaaggagtggggaatggaggctatgccaaccttcctgttcttgaaagaaggcaacctggtggacaaggttgtgggtgccaagaaagaggagctgcaattgacaatagccaaacatgccgcaattgctgctgcttgaagtgccatatgaatatgttaagaataatagactattgtcttcgagtcagtttgcttttattactattaatctgttattgggtctgtttgcatgatttcagaacggatttagagttagtaaaacatggatgggttatgtgg

SEQ ID NO: 21958 - DNA, 394 bp, Glycine max
agggtgtcatcactgtcaaacacaagaaaagagaatttcaattttcgacatacctattctattatatagaaatagacatatatgaagaaattaataatttaaacatgcacaagaattgatgcttgcttgatgggaccaaactaagtaaaggcacgcgcagcacaactcaacgcaatggagtgagttgcttatgagcatattgagaaaaaaaggcagaggctgaagcagaaacaaaaccccactttttcatggccaatatcattggcatgagcagaagaagaagaacaacgacgactcaacaactatgccacagaatggttcaccatgtcaacgtccacttgaacctgttccatagggtgtcctttcttggtcggttcatttgggacaggatgct

SEQ ID NO: 21959 - DNA, 266 bp, Glycine max
gtccgcggagacgtcggaggcggcggtggtggtggcgaacgaccagctcttgctctacagaggattgaagaaggccaagaaggagagaggttgcacggccaaagagcgcatcatcaaaatgcctccgtgcgccgccggcaaacgcagttccatataccgcggcgtcacgaggcacaggtggactggtcgttatgaagcgcatctttgggataagagtacgtgggaccaaaatcatattaagaagggaaagcagtttacttggggcg

SEQ ID NO: 21960 - DNA, 323 bp, Glycine max
tattatacaaaaaaaatccatcatagacactaatgggattagattcttggtgttcatagacaaactttggatttccgatctcaggtaagatcggttcatgatcatgggatccttgtttatcaaactccaagggctgcttcacaaaatgtacttctaatgaattgctccatagatcctatatctatctatatgaagaagaaatcatccgacggcggggattcttatttgtacaaaatggtacttccaaccttggaacgagtattgaagaaaataacgattcttctttacccttttgaagttgttcttgccggatcgggtcgcct

SEQ ID NO: 21961 - DNA, 278 bp, Glycine max
gaccaaaccaaagtaagagtgagcaacttccaacaccatagtgaaatggcttccaaggctgcacttctcttgtgtttcaatgttctcttcttcaccgtggttagctccacatatgtgccatgcaacccaccccccaaaactccaaaacacccacctgtcccaaagccaccttccccaaagcaagcaagttgccccaaagacactattaagtttggtgtgtgtgctgatgtgttaggtttgatcaacgtgcaacttggaagccaccaaaaccccatgct

SEQ ID NO: 21962 - DNA, 261 bp, Glycine max
gatccttatctggcagactagtatccgatcctctgtgcggtctaatctttgatcgttcaacatattctcaccatctcagtcatgggcctgctatcttgttttaggtctaccgccctgagaaaatgttccaaaggaagctctggcatgtcaagattcctgtatacgaacaattttcaacgaaacttgatttcgtctggtggcaatgaatcgtattatgggtattttaacaggagatcatacacttcactttatatgggaact

SEQ ID NO: 21963 - DNA, 319 bp, Glycine max
ggggttgcgttgcgtcgagggactcagcttcttcttcttcgtcttcttcttcttcttcttcttcttcttcctcttctcgttcttctctcatccattccatggagcttcagaggcgtccagatcagtgcctcccggtgaggaaagggctgaagaggaagctagaggaggagttcgatgacgacccacagatctccgctcctcccaccggtgacgctcgcgacgccctcctctctgacgttaaggaacaggtttccctcctcgattccaatttctcctggaacgaacacgatcgtgccgtcggcaagcgcgccacgcacgc

SEQ ID NO: 21964 - DNA, 323 bp, Glycine max
gaagcatagcagcatcatacaaagcattgaattcaagagacttaagttcattccttgtgttttgctttcttcctcaaaaccaaacatgtcgaacacatgcggcatctgcgactgcgctgacaagactagctgcaccaagggaaacagctatggtgttattgtagagactgagaagagttacatcgagactgttgtcatggatgttccagcagctgagcatgatgggaagtgcaagtgtggcactaactgcactttgcacgggactgcaacctgtggccatttaaggaatatgtaatggaaaatggtaattgccattgtttttg

SEQ ID NO: 21965 - DNA, 271 bp, Glycine max
atacgacagaagggcgaaggagataattttgggggccccggctttttaatcccctgattgagggtccaaccgaatggccatttcatttctttgactcgctttcaagtcaacatttcattgccagcaagctttttggtgtactcgggtatctcatcatatacacacgacatcttccatatatcaacctattgcctgtgcatatgcggtggagtattgactgatgctggcggccgcatatcaaagagctttcttctctagtgtgcctaaatat

SEQ ID NO: 21966 - DNA, 261 bp, Glycine max
tctttaggaggaggttctcaggtactcaattccgggcagagccttttcatatactgcagctgacggtaaaaaatctattgtggcacctttgagaagatgtggtggtaagccaacatcaaaagcccgagaccattttatgttgaaacgtgatcgcccaccacatgttacgattctttgtctactatgatatgctgcagctagattacctggaagtattggcactagagcagatgtttgtactttaattcgtgattctcaata

SEQ ID NO: 21967 - DNA, 292 bp, Glycine max
  modified_base (257)..(257): a, c, g, t, unknown, or other
  modified_base (259)..(259): a, c, g, t, unknown, or other
gctctcttccactctctccctctttcctatcacactttctagatagctagcctgtaagatatatatatagatatttcatatatatcctatggtccgtgagtgcccttgttctgtaccaaccctttcttccacatgttgagtttcagcatcgtcctctcttgagtccccatatcaaatacccatcgaattcaaccccccatataacaaatctcctcccatcccatttttcagcaccaaagtttgaaactttctcaatngngttgaggagagttgactcaaattttattttcta

SEQ ID NO: 21968 - DNA, 69 bp, Glycine max
  modified_base (34)..(34): a, c, g, t, unknown, or other
aggaatggtacctttgtttccttgaaggccaaanaaaaagagagaatttaaaaaaggggagggggcggc

SEQ ID NO: 21969 - DNA, 254 bp, Glycine max
gagaccatatcttattcaaggaacatgatttagaaaactgccaggcccacccatattcattctctcaaaacttccaaccatgaactgaagcgccacacatacccacttcctccaaagacatcatttttattaccaatcttccaatttcagagaaaattctttgtgggcatctcttaattaaaaaaatgtcaagcttccccaacacggtggcggaaggccgcatgtccaacaaggcaccggaaaaatcccacttt

SEQ ID NO: 21970 - DNA, 341 bp, Glycine max
  modified_base (305)..(305): a, c, g, t, unknown, or other
gaacgcaaactgtcatcttgtcattcaccgagaaagtcgtactgattcctcttcatctttcgttaaagcgagtacttttcgttcttgatctgttggttacgatgtcgtattcaaggagatctaggtattctccttctccttctccttctccatacaagcgatacggtaggtctgtgtccaggtctctctcaatatcaagatccagaagccgttcaaggagtttatcaagagatgcagaaaatccaggaaacaatttgtatgtgacaggattgtctcctaggattaccaagagagaactggagaanacatttgctgctgaaggaaagtgatagatgccatct

SEQ ID NO: 21971 - DNA, 108 bp, Glycine max
gctcgctcactgtgatacagcaaattaacgggagcgggagccttatacagaggcttcgaatcctacctcgaaagaccaatcgtcgtatctcaggaatcgcaatcgcca

SEQ ID NO: 21972 - DNA, 419 bp, Glycine max
gggtgtagtttagtgacatttgcagtagtagccagcaggacgaggaaaatgggtagtgtggccccaaggttccgcttcctcctggccactcccttccctcttctccgccgccggcaccaccaccaccaccgcaacctcttcctcctctccacccattccctccccttatcttccttctctttctctctcaaactcaaagcctcccaatcccaagcttccgcccctaacacctctccctgccctgagtggtcctcattcctctcccacatctcctccgccggctacctcccctccctccccgaccaagccttcaccgccgccgccgaacgtctctcctactccttcctccgcgacgccaccgcctgcctcgccttcgcacgtgaccgtcctaaccttctcaggttgctttctacgagaga

SEQ ID NO: 21973 - DNA, 333 bp, Glycine max
  modified_base (222)..(223): a, c, g, t, unknown, or other
ttgggtttggataggaggatcaatctttgcatccctcagcaccttccagcagatgtggatgtcgtaggtggattgtgatgagtctggtccattctttgtccacagtaagtgcttcatagttcaaagtaaatgctttaattgtgtgttatttgtttagtatgtgctgtttggagtctgtgtcatgtcttgcgaactttgttgcattgtgtaaggggtgtgatnngatgggcagggatattcggagagcttgatgtatcatatattgtgtggcatccctctggatggggcgggcacagaattgttgagaagcatttttcatcttggaattcatct

SEQ ID NO: 21974 - DNA, 394 bp, Glycine max
gagtgcttcgcggacacagaaccgagcttgcagcagcgatttctcatttcatttttcacacttcaacaatggcgaaaaccttcaaatacatcatcctcggtggaggagtttccgctggttatgcggcgagggagtttgccaaacagggcgttaagccaggggagttggctatcatttcgaaagaagcggtagcaccttatgaacgtcctgctctgagcaaggcttacctttttccagagtcccctgctagacttcctgggttccatgtctgtgttggaagtggaggagaaaggttgcttcctgagtggtacacagagaaagggatagagttaattcttagcacagaaatagtaaaggtagaccttgctgcaaaatctctgatcagtgctggagg

SEQ ID NO: 21975 - DNA, 413 bp, Glycine max
ggttaaggtcaaagatgaagaagaacttgatgctgatgatgacacagcttgccatttggattctattcttgacatgaatagcgaggcctttaattggaatattgctgagtcagagtcacctgcacaggcacaagaagatgaagtgagtaaagtgagaaccaataagaaggacatatttttgaggctaaactatgaagaagtcattactgcttgggcaagtcaaggttctccatggactacaggaaccccacctaagttcttcaactccgatgattgctggctagacttggtaacttctattcaaccctctttgcttatgcagcagaatcttcttgtgtgtttggtttgacttatttttatgagaataaatttttcagttttcttatagtatcatagccgatctcatatatatc

SEQ ID NO: 21976 - DNA, 351 bp, Glycine max
  modified_base (25)..(25): a, c, g, t, unknown, or other
gggtgtagggtattgacatttgcantactatccggcactaggaggaaaatgggtagtttttccccaatattccactttcttcttgccactcccttctcttttatacggcgtcggcaccaccacctccaccgtaacctattattactgtccacccattccctccccttatcttccttcacttttttttttaaacttcaagcctaccaatcccaagctttcgtccctaacaccttttcctgcccttgagtggtcctcatttctcttccacattttcttcggcgggtaccttccctgcctcccctaccaaacctttcatcggctctcccgaacgtttcttctacttcttttctt

SEQ ID NO: 21977 - DNA, 350 bp, Glycine max
gagtgcttcgcggacacagagccgagctggcagcagcgatttctcatttcatttttcacacttcaacaatggcgaaaaccttcaaatacatcatcctcggtggaggagtttccgctggttatgcggcgagggagtttgccaaacagggcgttaagccaggggagttggctatcatttcgaaagaagcggtagcaccttatgaacgttctgctctgagcaaggcttacctgtttccagagtcccctgctagacttcctgggttccatgtctgtgttggaagtggaggagaaaggttgcttactgagtggtacacagagaaagggatagaggtaattcttagcacagaaata

SEQ ID NO: 21978 - DNA, 412 bp, Glycine max
acctacagcgttgcatgacataaatggggatagtgacaaggatgattatcaacatcggtactattaatgggttgcctaacctcacaattactgtcggggacaaacctatgacccttacatattggaagacattgaatgaggactagggatcgcatgagcgagatgatgactgatgtgtattatgagcgatgaacatgcctacttcgcggtgtcctctttgcggttgggagaagaccatgataaggggtttttatacacaaattccatctggttagctttcgaggagggtatgacaacgctgacgcactggacattcaacaggttatattgcgtatgcatcaactaccgctgatgaggattgtgaaaaagccatttgggacgacgatattgcaggtgaacattatgaattctg

SEQ ID NO: 21979 - DNA, 200 bp, Glycine max
gccctcatggctgaacaatcttccaactccatttacgatttcactgtcaaggacatcagcggaaatgatgtgagtctgaatgattacagcgggaaggttctactgattgtgaatgtcgcctctcaatgtggtgtgacacagacaaattacacagaattgaatgtattgtacgagaagtacaagaatcaaggatttgaaat

SEQ ID NO: 21980 - DNA, 434 bp, Glycine max
agaagacgacagaaggggtattcaactatgtaaatcagctgtgcgagagcttgccgagtccaaatggagagtcagtagtagactgtaatagcatttatggattgcctaacatcacgtttactgttggagacaaacctttcaccctcactcctgagcagtatattctgaaaactggagaaggcattgcagaagtttgccttagtgggtttattgcttttgacattcctcctccacggggtcctctctggattcttggggatgttttcatgagggtatatcacaccgtctttgactatggcaatctccgagttggttttgccaaagctgcctaacaagacatgttggagattatatagggcatgttttaataagctcgttattgtattgtaaataagctttctgtaactactatggcacagggttacattatagat

SEQ ID NO: 21981 - DNA, 399 bp, Glycine max
gaatggtcttggtgtgaaccatagcaatggcaacttcttcaaccacgctattgctatcatcactcacacttggaagcaccccatcaatcaactcccgaaacctctcattttttttgcttcaaaatcgttctttgaatcgacccaagaagcgagtttccttcgttgttcaagcagccaagcccactgttggtggaaattccaaaggtgcagcctcaatttaagcctccgtttcttgggttgactaagactgcagaaatatggaactctagagcttgcatgattggaatcattggagtttttattgtagagtttgtgagtattttatattgcattttagtttcacgtatacaataatgcttttaagcttttgaattgataaaactgtgttggtataatgag

SEQ ID NO: 21982 - DNA, 405 bp, Glycine max
gagcccggtgaacatccagacgatgtggttgtcattaagtacgtgccttatgtaggggacagcaagagggccatggatgagtacacttctgagatattcatgggtggaaagaacacaattgtgttgcacaacacatgtgaggattcactgttagctgctcctattatcttggacttggtccttcttgctgagctcagcactcgaatcgagtttaaagctgaaaatgagggaaaattccactcattccacccagttgcgaccatccttagttacctgaccaaggcccctctggttccaccgggtacaccagtggtgaatgcgttgtcaaagcagcgagctatgctggaaaacatcctgagggcttgtgttggattagctcctgagaacaacatgatcctagagtac

SEQ ID NO: 21983 - DNA, 335 bp, Glycine max
ggttgtagatagcgaaccccatactagaggtggcttccgtacaaacgttccagtcttctctgctttaacaatcaagggaataataattattagagatcttccgaaaccatggctcacgccaatactatgatttttgttgaaggaataataggtaaccttgtctccttctgtcgctttatagcaccaataccaacattctatcgagttcagcagaagaataccacggaaggtttccaatcacttacttacgtggatgcactcttcactataatgcgctggatatggaatgcttacatacaaactggcgaaatagttagtatgaccataacacattc

SEQ ID NO: 21984 - DNA, 382 bp, Glycine max
taagcatcaagagtaaaagtataattgatttgagtgataagtttgatagaagtttagaaagaaaaaaaagtttaaaagtgacatttttttgttgttgaatgtttctaggcgtcattttcgcccgataaaaaaagttccggttaacgattgaaattagctaccaatatcaatcactattttcattccctcgctttttctgaaatgtgcaattttttttattattaatttgacattcaatatttataaaatgctaatgtaacaatatatagtgttgatagaaaagtgcaaatgtggagttagaattggtgctggaatttgagtcattatatatttcaaataatgcaatctagatcttcctctttttcaaatatccaacagttaa

SEQ ID NO: 21985 - DNA, 318 bp, Glycine max
cgggctgtagctcacttaggtggaggccctaggttacacgagcgccaatgtttttttcataggagttatcatcttgtaatcaaaagagtatatcttatagtaagaaatcgatgtcttactacattttaaggaacaaatcacgagaacaatagcctgtccaagggttcagccataaaatcgaatccatcattgatttgagatatagataacgtgaatacttatttatcgacaatgctaggcataatgcgggtatagggacctaaaaaagattatctattcttcctattttatgaactctaaagtgtatgaagtgtcatt

SEQ ID NO: 21986 - DNA, 359 bp, Glycine max
gggtgtttaaaattaacaccgatcctgttctctataggagacacagagcgagagagaatcttaccacatgcggctaccgggataagttgactctacgatttgagccatggcaacaacaacaccctcaaaccgatcatcagaggcgttagctctcatggcaatcctcagcactctgctttgcacggtggaggcggcgaatgagagcgtgtacgagatactccccaagtactgtctcccgagcggactgttaccggacaccgtcaccgactacacgctcgactaggacgggcaattcgtcgtctttttggcgaaaccctgctacatacaggtcgattacttattttactacgagaccaaga

SEQ ID NO: 21987 - DNA, 407 bp, Glycine max
ggtattaggagagaagcatgtgaaggaggaggcaagaagcaagaaggaagtgttgtgggaggagagaggcagaggtgcaatcaccagagtggaagcgccaaacggtcctccccggctttccattttttctcttctgataaaattttagttcatcccagttgcgcataatcactcagattgagattgaatttaaagttaaattcggaaaaacgaacttgtgccactgtacatttacagatctgcggcttcgggctagcctgtgtagatctagtgtccgtaaagcggttaccatttcaccactcaccactacgaagatggaaagcgaaaagaaatcgtcggcaatatctgatgtgggagcatgggccatgaacgttgtcagctccgtcggaatattatggccaacaaac

SEQ ID NO: 21988 - DNA, 412 bp, Glycine max
caatttgggttttattggatcatggagatgagatatctaaagataaatgcggtcttaattagtgattattaggagtcagaccacaggaaggcgaaattgaaggcagtgtcgtcaaattaagttggttggctcaccatttttctcacatgaatattgatgaggataacgttgagcaattacaaaggtttacccgtgcgtggatccttcgattcataggaggtgtcctctttattaacaaaagtagtagcagagtttccttaaggtacctacaatttttacgtgactttgaacagtgcagcacgtatgcgtggggacctgccgtgcttgcgtatttatatagaaagatgtatgttagccacgacgaaagtttcgcatatgactcatcccaatcgccatattcaattgcaatgac

SEQ ID NO: 21989 - DNA, 404 bp, Glycine max
attttcttatgagctgggtaagaaggtttgcatttagatcttatgtttaaactctaaaaaatgttttttttttaggaagacaaccatatttttcatttttttctctataaatttttatatttttatttgtcattttaatatacataacatgtaacatgttttgatttatgaggtttaagataatgatacaaaagtttggttcaatgtgtagatgcaggagatttatagagcttatgtgtgtttgtgttcacttttttatttttaggacaaaactttggtgcagttttgtatatgcttttagtgttgttctttaattagaataggagtttcaccttggtaacaaacattaacattagatggaaacctttactacatggtttacgtgagtaaaactcaaattttga

SEQ ID NO: 21990 - DNA, 211 bp, Glycine max
cactcagagtgtcatttttgtgaataccagtgtcaaggtggactggctcactgacaaaatactaagcaatgaccacacagtctctgccacccatggtgacatggaccaaaacacacgtgatattatcatgcgtgaattccggtccggctcttctcgagttctcattaccacgaaccttctggcccgaggtatcgatgtgttacaagtgtct

SEQ ID NO: 21991 - DNA, 197 bp, Glycine max
agtttgttattagctgcgttagaaggattgcgcgtatagcttatgtgtaaactctacaaaatctattttttttagtgagacaaccacatttttcactctttttctctctaaaacttcataaaagtatttgtcattttaatatacataacatatgacaagttgtgatttatgaggttatagaaaatgattcaaaagat

SEQ ID NO: 21992 - DNA, 384 bp, Glycine max
gattgaaaaggcgcccaagcaagtgtgttctggcgccgtcgtcgctgacaactcgcaaaccacaatgcctaagcagatccacgagattaaggatttccttctgacggcacggaggaaggatgcgaggtcggtgaaaatcaagaggagcagggatgtcgttaagtttaaggttcgatgctccaagtatttgtacacgctttgtgtctttgatcctgagaaagccgataaattgaagcaatctcttcctcccggtttgagtgttcaagacctgtataggcgctgagtgcggcagcgcgtgtttgtttatcattttgttgcctcatgctctatattatgaggcttgcttttatattttggtaaattgtatgaggatatgcttgtttt

SEQ ID NO: 21993 - DNA, 394 bp, Glycine max
gagcattccaaagtgcacaggggagtaaaaggattgagtggttgtgatccaataaaccctaactcaatattggttgaagattgtgatgttctagtcccagcatctcttgggggtgtcatcaatagggaaaatgcaaatgaaatcaaggccaaatttattgtggaagcagctaatcacccaactgacccagaagctgatgagattttgaagaagaaaggggttgtgatcctcccagacatatttgcaaattcaggaagcgttacagttagctactttgagtgggttcagaacatccaaggtttcatgtgggatgaagagaaagtgaacaatgagctaaagacctacatgaccaaaagtttcataaatgtgaaagaaatgtgccaaacccatgaat

SEQ ID NO: 21994 - DNA, 398 bp, Glycine max
gaagttttaagtgatcctgagaagaaagaactgtatgaccagtatggtgaagatgcccttaaagaagggatggggggaggaggctcgtttcataatccatttgatatatttgaatcattttttggaggagcaagctttggtggtggtggtagttcccgaggtagaagatagaagcatggtgaagatgtggtgcattctttaaaggtttccttggaggacgtttataatggcacaacaaagaaactatctctttctagaaacatattatgcccaaaatgtaaagggaaaggttcaaaaagtggaactgctggtaggtgttttggatgcaaaggcactggtatgaaaattacaagaaggcagattggactaggcatgattcaacaaatgcaacatgtctg

SEQ ID NO: 21995 - DNA, 349 bp, Glycine max
gatggaaaccaacttgttgaggctgtcgaatttgaggataagatgaaggagttggagagcatttgtaatcccatcatatcaaagatgtaccatggtgctggtggtgatgtgggtggagccatggatgaggatggtcctgctgctggtagtggaagcggttctggacccaaaattgaggaagtctattaagcagaagattctcatgggtagtttttgtatttggtcatagaactttttgtaaatttatataacagcgtgtcattatgtttttattgcgattttatttttctcttttttttttaatgtacttttccccggttctacttgaacaatgatataagtttttgcc

SEQ ID NO: 21996 - DNA, 336 bp, Glycine max
  modified_base (325)..(325): a, c, g, t, unknown, or other
gaattgtagaatcggaacaaggaagaatattaattgatgattatgatgttgcacagtttgggcttgctgatttgcgtaaagatcttggcattataccacaatctcctgttctcttttcaggaactgtgagatttaatctcgatccattcaatgaacacaatgatgctgacctctgggaggctctggagagggcacatttgaaggatgtgataccgaggaattctttggggctggatgctgaggtatctgaggcaggcgagaacttcagagtcgggcaaaggcaacagttgagtctttcccggtctttattgcgtagatcgaaaanattagtacttg

SEQ ID NO: 21997 - DNA, 254 bp, Glycine max
tgagaaaccagaaggggattggagtgtgaggatcactttttgagcgtgtttttgggattcgcttggttttgttcaaatagaagagacaactgatgagtataatgaagtaacctaggaatctaaaggtgtccactcacactggtgcttatctcatttaactgcttacaattactaagcgtctgaggacgtcaatcaatacggattctgacgaggtccgctataccattctgtgacggattttttatatgtcaacg

SEQ ID NO: 21998 - DNA, 392 bp, Glycine max
catccatggccaaactaccaccaccatggccagggtaacaacaaaaaagcctcttcttcatcatttcttcagttcccatcatcaacccaacctgtgatgatgggaaaagatgcttcttgccctaaggtggtggtagagttgcagcagaatggtggtgatggcaaagtgttctctccctcttctgcaaatacagctgtgtcccagcctaacacctctcagaaaagaactgctcctgctccagtggtggggtggcccccaattcgttcattcaggaagaacctttcaagcagcagcagtgcttctaagccaccaccacctcctgagtctcaggctgagcagcagcacaacaaggttgctggtaaaaaacctgttgacaactatgctaataataa

SEQ ID NO: 21999 - DNA, 406 bp, Glycine max
gaaatgaattagcgttgccattctcatcctcggctgtctctctctctccaccattgccatggatccttacaagctccggccatccagcgccttcaattctcccttctggactacaaattctggtgctcctgtttggaacaacaactcctctttaaccgttggagctagaggtccaattctgcttgaggattatcatcttgtggagaagcttgcaaactttgacagggaacgtatcccagaacgtgttgtccatgccaggggagctagtgcaaagggtttctttgaggtcacacatgacatttctcacctgacatgtgcagatttccttcgagcccctggagttcagacgcctgtaattgttcgtttctcaactgtcattcatgagcgtggtagccctgaaaccttg

SEQ ID NO: 22000 - DNA, 382 bp, Glycine max
tctccagcagtgatacttgggtgggcgtctagacaattttccccaatggataagttctctcaagaatttggtccgagtgtttctaaaatggagccggttagaagaggatcctctggtacatcttcaagatttgccaaatctaagacatcttgagtttcttcaagtttatgttggtgagacattgcatttcaaggcaaaagggtttcctagtctgaaggtgttaggccttgatgatttagatggactgaaatcaatgactgtggatgagggagcaatgcctggtcttaaaaagctcatcatccagcgctgtgattcattgaagcagggaccattaagcattgaacacctaacaaaactaaaatcaatagagttttttgatatg

SEQ ID NO: 22001 - DNA, 201 bp, Glycine max
cggtatgcactgaggccgttgttgtcaatggcggtacaagctcttccgccggcagcaatggcgacaccccgtaaataacagaccccctgtgtaatatgtttaaaaggaaccatgtttgtgaaattgtttctaaatcaagccctgtatagtaaatatgtcgagattaaagagtctttacttaagcccgttatacaatacaca

SEQ ID NO: 22002 - DNA, 404 bp, Glycine max
ctttgacgtcgacggggaggaattcggtggttgaatcaaagattgatggtaaatggggtaaagggctggagtatgctgacaaggacagttctgcgaagcttgtggttgaggaaaagggaaatgaagaaaaccagcaccgttttaattatagggacatttctccaccagaattgttgcaggaagatggaaaaactttggctgcagaaacattaccagcatggggggtggatgaggaccaagaagctaagattgtggaagatgttgacggcaatcaattgagaagtgtggtactagggaggcatgagcttaattcaatatctgatgatttgaaaaggggttctcctgtggctagtgatggaagttctgattcatatacagattttggttcgacatctgattcttaa

SEQ ID NO: 22003 - DNA, 406 bp, Glycine max
gaacgagaagaaggtgaagtcgaagaagtgaaggggttgagtgttttcttcttgtttggatctgagagagaagagcgagcgatgacggtctttcatttcttcaactgcgccattctcaccttcggcccccacgccgtctactattctgccacgcccttatctgagtatgatacactcggaacctctatcaaagccgctgttgtttatcttgcaacggcattagtgaagcttatttgtctagctacttttctcaaggtttcggagagtgatagctttgatccgtatcaggagtttttgaaggcattaataggctttatagatgttgctgggctttattttgccttgacccagttgactcacaggaacatctctcagaatcataaatttcaagctgttggacttggct

SEQ ID NO: 22004 - DNA, 359 bp, Glycine max
ctatcccatattaccaaaacaagcactaattggatataaagaaatctcaatatttgaaactaaaatcagtgaaccggtttgttattctttccgccactctcccgacaacaatagcaaatttaacaagtacaaaatcgaaacagaaatctcactacttatgagggttaaagagtaagcaaacaaacactggtacgaacaatgatagtgtgttgaacacgagtttccaactgttacttcacgaaaacaaagcgggacagaatcggaaagagtaagtccaagttgggggaaagaaagaaacatagaggattctaggttttatttagcgaaaacaaatttgacaaaaacaaaaaaaaaacagt

SEQ ID NO: 22005 - DNA, 396 bp, Glycine max
caagttaccattcaacagcccttttcttgatgatctgctcatgtgagcataggtccatacatgcagatggtccaaaagccaaaatttaacatgtccgacttcaatgagttagcatcccctctagtgattggaaaacactagtagaaaagagaaaaatacaaacaatttgtgggtcccaccatgttggtgggtcccacattgtttgtgtctcctactggtattttctagtatcaaagatgagttgttttcgggttcaattacctgaacactgtatagattttccctttttgtgataactgtgtatagatgtttcattgctctacaaatgcaggtagatttccatacaattatatacttggtaatatcttgcagtgtgtttggatgtggtatttaaac

SEQ ID NO: 22006 - DNA, 298 bp, Glycine max
  modified_base (107)..(107): a, c, g, t, unknown, or other
  modified_base (237)..(237): a, c, g, t, unknown, or other
atggtttgtttttttggcaatgcaagagaagttcgactcaagtcattacgaattgatcatatctcttcctttcctttatcgtttcatttagaatatatggtcaccgngactctgtcactcctttctcttatgccggttcctgtccgtacaattgtttcatttgcatagacctcttgctctgtctctttcactctttcttactcctgctcggccaggcagaggttgtcttttttatantatatctgttatttttgtattttttctctgcggttccaaaacttacggtgacatgcggtgc

SEQ ID NO: 22007 - DNA, 414 bp, Glycine max
ggaaaactgaaaagtaaaggcgaaagactttaggtttggaattgggaattagggttgttcgcgtcacgaagatgatcgaggtggtgttgaacgatcgattggggaagaaggtgcgcgtgaagtgcaacgacgatgacaccatcggcgacctgaagaagctggtggcggctcagacgggcacaagagccgacaagatccgcatccagaagtggtacaccatatacaaggatcacatcactctcaaggattacgagatccacgacggcatgggtctcgaactctactacaactaaacacaaggtgtgttttatgcatgatatattactatgatctgggaatgggatgaggcgccaaatgtaattttgacttgcgaaagtccctatgatttgaataatgtacatccccgaatgatat

SEQ ID NO: 22008 - DNA, 399 bp, Glycine max
  modified_base (389)..(389): a, c, g, t, unknown, or other
gatcttcataaatcctaacaagtacacgggacccagcatcagtatgtgttggtcaacacacacacagtttgagttagagttggatggacatggaatggtgcctataagaatcagagaaagagaaaggatccacaacattaggttgaagaggaaaaagttggaggacattccggaggaaaccgagcttcctattgatactaatccagcagagcttgaagaagcgagccttcacttggaaacagatttggaaatactgagccgagccatggatatgggactttgggcactctgcctcggtttcggctatatccttttcagagctcactttcgcccactttcttgacaaaaattcgttcaattattatgtacctcgcaaatagcaaatgttnttgcgaaaca

SEQ ID NO: 22009 - DNA, 277 bp, Glycine max
cgatacgggggcgcgaagacgagactagggatcaccctcatgatcactatgctactatgcagatagatgatgcctgcgtaccaagggagaggggtgatgggcataaagatatggaggagtggcatcgtgtgaaacagttccatgaagaacacctacccaagcgtgaaagagaaaaaggacgaagttctgtaagacgtggacgacgggctgaacataaactttttgagaaagaataccgattcagagaagcaatgcggcacaatgaccaattgaagag

SEQ ID NO: 22010 - DNA, 389 bp, Glycine max
atattcttggtgtttcagcatttgaattggaacccgaagctaattgctgctctgtcatgtgtgtgcaaatggtttgacgatctttcaaagcaagttctatggaaagaattttgtaaaacgagagctccgaagatgatgcttgatctgcaatctagtggaagccacagtgttgatgggaactggagggctctggggaagcttcttatattctgttcaggttgcaggcaaggcagtttgttcaataacgttcaggttcctggccattttgttaacaagactcgattttctagaacatcaggaaagagctttctcatgccacaatgcataaatgatgttttgtatgtgtctgatccttgtgagcatattggccaaagtgaagagggcgattt

SEQ ID NO: 22011 - DNA, 412 bp, Glycine max
gagatgaagtattggatccacgaaagagggatgacctgcaaagagctagagataaccctgatgatcaatatgctactaggcagaaagatgatgcctgggtaccaagggagaggggtgataggcagagagatagggaggagtggcatcggatgaaacagtcccatgaagaacacctacccaagcgtgaaagagaagaaggacgaagttctgtaagaagtggacgaggggctgaacataaactttctgagaaagaataccaatccagagaagcaatgcggcaaaatgaccaattgaagagaagggatagaattcaggatgaaagtccacatcataaggggcgagatgatgcttctgcccgtggaaatcaatatactactgaggaaaggcgatctaggcaagaaaggtcaagtag

SEQ ID NO: 22012 - DNA, 383 bp, Glycine max
gagattaagtattggatccacaaaagagggatgaggtgcaaagagctagagataaccctcatgatcaatatgctactaggcagaaagatgatgcctgggtaccaagggagaggggtgataggcagaaagatatggaggagtggcatctgatgaaacagtcccatgaagaacacctacccaagcgtgaaagagaagaaggacgaagttctgtaataagtggacgaggggctgaacataaactttctgagaaagaataccaatccagagaagcactgcggcaaaatgaccaattgaagacaatggatagaattcatgatgaaagtccacatcataaggggcgagatgatgcttctgcccctggaaatcaatatactactgaggaa

SEQ ID NO: 22013 - DNA, 225 bp, Glycine max
aaggaactttgaacttgaactcttggcaaaataattctgtttcctacttcactgcaaaataatgaactatcccttggctgtgtaatttgtgctctgtttgtacagattaaaaatattatttttccttgtatattgtaaaacattgatgtgtgggtttatactattgttctagctgattttcatataacttgtatatttaaaaaacattaatctgtcaggtttata

SEQ ID NO: 22014 - DNA, 409 bp, Glycine max
ggcagccgagaaaagaaaatcctcacccattttcttcgtagccaaacactctgaaattctcagttatgtcgtggcaagcgtatgtggatgatcacctactgtgtgaaatcgaaggtaaccacctcactcacgccgctatcatcggccaagacggaagcgtttgggctcagagcaccaacttccctcagttcaaacctgaggaaataactgccatcaataatgactttaatgagcctggatcacttgctccaactggattgtatatcggtggcaccaaatacatggtcatccagggtgagcctggtgctgtcattcgagggaagaagggtcctggtggtgttactgtgaagaagaccggtgcggccttgatcattggcatttatgatgaaccaatgactccaggtcaatg

SEQ ID NO: 22015 - DNA, 376 bp, Glycine max
tacggttgtgataagactacatagcggggttctagtgtgtgattgaatgttgagggaactcgacacacttactttggtggactgggactggcgacgtttatactctaacaacaaaatgtcttgcttcgatggtaacatgtggaagatgaagctcctgcaaatgcagaaacaactgttgaggcttattgatgtacaaacacttgagctacactggctcaaccacacatcgagacctcaggaatgcaagactgacctgttaatacatcaatttgaagattctaaaatggattaacgatcttataactaaggctcgaaatgttgaccaaacagatgctgcaacatgtgcacttgatatatgaggtgttgggatgagcat

SEQ ID NO: 22016 - DNA, 404 bp, Glycine max
gtacgatatgattataattaatctttgaagctctatttttgtatttctctacttgtattattctattgtttactctctgttatgcaatgaatgactgacaaatgtctgaaaattccatagatgagatattgtgattcatgatattgtctagtagtaggaacgaggaaggtgaagtaaatacctatcctgatttgtattgcttctgaagacaaagaaggaagcaatagatgtttaggagattgagggcattttgtttcaaagattggcactttatgccttctgcttatcaggaggggtgttaaccatttgggatgctagagtaactacacagttgattttctcttcacgaatctatcactctgtatgttttgctggatagaagtcatagacattggtagctaatg

SEQ ID NO: 22017 - DNA, 356 bp, Glycine max
gtcgagaaaatttattgaacccaaaaggagagaactttgtttggtttgtgtttcattttgttgtggttttctgtaagattaaatggctgaggttctgaccaaggcgagattggtttcctcttcttcttcctcatggcatggggttggtcaacggcatcatcgaagggtttcaacggtttccaacacttgtaacttcagttcttgctgtgcaaagctctcttctatgattattacccctcaggttctcagatcttggtcctcttcttctgagtttcacggtataaagcttggctttcatgtaaatagatgattacccaatagggtcaattcgcgcttgagagcttcaactggggctc

SEQ ID NO: 22018 - DNA, 394 bp, Glycine max
ggattcgcacctcaccacaacctcgctttctgggctccgtccgtgcggcctgggaagcaatggcatggagaggaaatcttttgaaaaacataaaagaacttcggtttttgatgtgccagtcatcacctgcaagctcacccacaagggcttttgtggaaaggaattataaggaactaaagacattgaacccaaaattgcccatattaatccgtgagtgcagtggagttgaaccccaattatgggcaagatatgatttgggtgttgagaaaggcatcaaattggaaggcttgtcagaggcgcagatctttaatgcacttgaagatttggtaaaagcaggacagtctatgaaagcttgatattgctgcttatgcactgtctgaagtggaataaatgc

SEQ ID NO: 22019 - DNA, 373 bp, Glycine max
ggacttcaacatctaattacatgcatggatgaacattgtaatgaaagaaatggcaaaaagggtgatattgcctgatattgaaattattcttgaacttgtgctagaaaaaatatattaaaaaaaaactgaatgattcatcttggatttctataatgtatgatatcaaaacctgctctgcaattgcggcacagaaagattcataccccgtctcgtctccttttttttttttttggtttttcttaaaaaaagttcaggtgacttgaactcttgagattcacttcatagcgtccacgttaatcttgtatctaccggcattggtggttgccaacggttagctaggtccagtagcttcacttcacaactaataatggtt

SEQ ID NO: 22020 - DNA, 405 bp, Glycine max
ggagaatggatggagggaaacgaggcacgattctggtcgggaacgacgacggtgtcgatgctcctggcttaagagcattggttcactccctcgtcaacgccaaccttttcaacgttctagtgtgcgctcctgatagcgagaaatcagctgttagccacagcatcacttggctccatccagtagctgttaagcaagtacagatcgagggaaccaccgcatttgctgtttctgggactcccgctgattgtgcttctctagggatttccaaagctctctttcccacagtacctgatctggtggtcagtggcataaacaagggtagcaactgcggttatcacattgtttactcaggcactgtagctggagctcgagaggccttcttcaatgatatactttctatctcca

SEQ ID NO: 22021 - DNA, 379 bp, Glycine max
  modified_base (275)..(275): a, c, g, t, unknown, or other
catattacaaagaggtgacttgcacattaccatcccccacaaggaaacttgcaaacaagtttttctcaatagtttccccctcaccatctcacgcaatccttctaataacatatgtaaacaagataagtgttaatgggtcaccttgtatgtaaattttttgagcgaaagattcataaatatttcagcaacatcaaatggtacttgattgtaaacatttccttaattcaatagaatcactttttattaaaacccaacctcttcatatagaacaaganattccaattaatcaaataataggtttttcataatctaactttaaagatagactttttcttttttcctttttctttatcaatggtattattcacccgccacacac

SEQ ID NO: 22022 - DNA, 356 bp, Glycine max
agaaaaaagactacaggttgtgaccttcagatattttcaactgcccggttccttttgttaggaaaatataggcaaaaagaaaacgagtattaatataatgaacgggtaggaactccactttctcactcaaccgagtccattcacagttcctttggcaatggcaactcacagactcgctttgatcatccaaaacccttcgaacgacgacgagcttttgctcgtgaagcagtcgcgttcacccaaattccacgatgaagaatacgactctttcttcgattctgatctttgaaacttgccctcggtgcatttgaacccgttgcttgcaaaatcagagccaccggttgagtttgaacttg

SEQ ID NO: 22023 - DNA, 59 bp, Glycine max
ttcggttgttaaaattactacacatgggcacgggtgccagaacacgacagaatggttct

SEQ ID NO: 22024 - DNA, 289 bp, Glycine max
aaaacgacagaactggagagcatccttcacaacaggagcaagctgatcccaacctattctcttatcatgtttcacacttgaacactagcgaggaccattagatacattatgctctggggcggagtgtccaccgattataccgcgcgggagtttgtcaaacaaagcgcttagccaggggagtgggttataaatacgaaagaagaggtcacgccctatgaactcacttgtcttagcaaggcctaccatttttcagagtcccctgctagacttcctatgattcaacactttg

SEQ ID NO: 22025 - DNA, 423 bp, Glycine max
ggaggaacaatacctaaacctacagatgctccagaatcttttagattgctagttcgagaattacgatctttagctatggaactgaatcatttccttgtatccgagaagaacttccggattcataggaaggaagcttaattggactgaatcagaatttttattctatgattgatcagtataaacatcaacaactccgaattggatcagtttctcctcaacaaataagtgcttgggcaaaaaaaatcctacctaatggagagatagtgggggaggtaacaaaaccctatacttttcattacaaaaccaattaacccgaaaaagatggattattttgtgaaagaatttttgggcctataaaaagtgggatttgtgcttgtggaaattatcgagtaatcagagataaaaaggacgacccaaaatttt

SEQ ID NO: 22026 - DNA, 72 bp, Glycine max
ctcttagaaaagcttcaccgatctgacagcagctctagctcttcaagtgaggaggaaggagaagatggaggg

SEQ ID NO: 22027 - DNA, 408 bp, Glycine max
tatgggacgttgtactctactcagaagtaacaaatcatttaacccataacttcatgtgattcatgtcatatgggagtcaaaattaatgggcaatttgtagcagactatgatgcatgcatgtagcccatggattatggatagcaatgagcagctagtattttccaaaacaggggaaagaaaaatatgcagctacacagtgtcctttttatcacttttgaacttggactctcatttctttcaagtgatatagatgttgcattgttcagctcaaacgataaaaattattctaacataattttaaaaagctaacctaggtttctatcccttttccaaaagttaattcgaatggttggctttgaccaataagtatttcttatttttttaaaaaggccaaaaataaactttaag

SEQ ID NO: 22028 - DNA, 383 bp, Glycine max
  modified_base (309)..(309): a, c, g, t, unknown, or other
  modified_base (314)..(314): a, c, g, t, unknown, or other
tgtgacacacgtatgaataaaaatcaagctcttttctttctagtttctttctagtaactaacgctagctatgcaagatacatcaaaacccagttgatcatgttgtgtatagctctatagcctcagttggaaaagacacatagaagaagatactgcatatgattggagaggacaattcaacatgcgggtcgacacagagaaaacaggtggaacacaaaatccacatggactgtctatatccatagaggcaaagcttaaggggaaaaaatttctttaagttgcttggggatggaattctctctcttcattncattntatgtgcattgggtaatcttgtgcttgtaattaaaccacatgtaacttttatgtattcacttttatgga

SEQ ID NO: 22029 - DNA, 384 bp, Glycine max
  modified_base (345)..(345): a, c, g, t, unknown, or other
ggtgttcattgtgtatcgcaatgccattgctgcattggcccttgctccctttgccttgatctttgaaaggaaagttagaccaaagatgacatggactgtcttcatacagatattagtacttggatttcttgagccagtggttgaccaaggattcactttcttggggatgcaatacacttcagcttcctttgcatccgctgttatgaataccgtgccctctgtaacctttgtgcttgcagtaattttcaggttagagcatataaaaataagggaattacgcagtcaagcgaaagtaattggaaccttagtaacctttgctggggctttgttaatgacactatacanaggcccctcaatcgacctatgtcatcattcaaacacaac

SEQ ID NO: 22030 - DNA, 398 bp, Glycine max
gataccatctttcgtggaattagtgtgataacttggttagacctaatctgttaattgtcattaaatgtcatccctggaatcggattttgttgttggttgtaacatagtaatcagattgaagaggacgattaagttaatcagagcaggggagaccactctaagttcccatttgcttcagtatgctaaataaaacatcagtttgctgttgttgtacaggccctgtcattggttttcagaaaacaatatgccatgacgttctctgagcgtaactgattgcaatttgcagaagaccattgaagcacgtgaccacaattttttagttgctcaattacgtatcaaattctgattacactgtcattatattgttaaatgcgcaagcagtatacacttggttcaat

SEQ ID NO: 22031 - DNA, 314 bp, Glycine max
ggttggatttgctcctttgacatctcgtggctctcagcaatacagggccttgagtgttccagagctgacacagcaaatgtgggattcaaagaacatgatgtgtgctgctgaccctcgacatggccgctacctcactgcctcagccatgtttagaggcaagatgagcaccaaggaagtcgacgaacagatgatcaatgtgcagaacaagaactcctcctactttgttgagtggattcctcacaacgtgaaatccacagtctgtgacattcccccaactggcttgaagatggcttcaacattcattggtaactcta

SEQ ID NO: 22032 - DNA, 350 bp, Glycine max
ggctttcgacaattccaaagtcttagcaacctgcggccgctacaactaaaaaagccctttgctttcttttccactcctcacattggctcttttatcactatcagatttagggtcccttctgccatactgcacacgttgaagatggcagcaacatcattttctggcatgcaatttgcaatgtcaagatcatgcattcctgcatcacaaaagattgcagatgctggtgccgtggttcttggcggcaagtccaagattggatcgtggaataaacttgcaagtgcatgtcatattgcatcagtgcaacctttcaggcggggcttcacttcatcgtccataaaatctgttaaaag

SEQ ID NO: 22033 - DNA, 381 bp, Glycine max
ggttctagtgtgtgattgtttgttgttgtaactcgttcttcttcttttgttgttctgtgtttgtgtttgttttttctctcacctgaaaatgtcttgctgcggtggtaactgtggttgcggaagctcctgcaagtgcggcaacggctgcggaggctgcaagatgtacccagacttgagctacactgagtcaaccaccaccgagaccttggtcatgggagtggcacctgttaaggctcaatttgagggtgctgaaatgggtgtgcccgctgagaacgatggctgcaaatgtggaccaaactgctcctgcaacccctgcacttgcaagtgaggtgttgggagagcaagcttcaagcagagatagcccttaattaggaataatga

SEQ ID NO: 22034 - DNA, 272 bp, Glycine max
aagatcgaagagatgaagaggttcttgttgaagcgggaaaaatagcggaaaaacgcctacctcccaaggttgctgaacagtctcagttggttgcttctaatgctggtgcagaagctacagagagggctgtccctggtgaaaccatatctccatcaaatgtgcaaattccaatggctgttccagataatgcatctactctagcttctcttcgtatgcttcgtgtatatttgagaacatatgcccttgaacaaatggtgcaagcttggaacgca

SEQ ID NO: 22035 - DNA, 265 bp, Glycine max
agcgagacctcaggtcaggcggggcggccatcttagattaagcatatcaataccctgcaataatatatcacaccaaaaaaaaaaactatgcggcccctttatatgaaccaagcttacgtactcgcgcattcgacttaataacacttctatagtgtaacctaaatgaaatgcaatggccgataattaacaacatcgcgactgggaaaacactgacgaaacccaactaaatcgctttgaataacattcccttttaaccagctgttgt

SEQ ID NO: 22036 - DNA, 376 bp, Glycine max
gaacctaaaaaatattcactaagatttatttcccttattttattcatttattctttgttcctagtctttatcttataatttctcattgcttgcccggtaattcaagatcaacttggaaaatttgcaagatttgggatgaaatctggtcggatcttgctttgtgggatggggattttggtgggtcttatttcaatacaaagctcttcctctctcaatcccatctccctctcttcttcttcttcttcttcttcataacacaaacacaaaacataaacctttcttccaaccaaccttttttccaattcattctttggttcttcaaaaatcttcaatccattttcaccttttcacaaatggggatggctgcaaaagtcac

SEQ ID NO: 22037 - DNA, 289 bp, Glycine max
gatcacttcatagtaagcactatagaaaaaacgacattcattcatctatggctacccttattgctcccagcaaccactctccccaagaagacgctgaggctctcagaaaggcttttgaaggatgggggactgatgagaaaactgtcatagtaatattgggtcatagaactgtttatcagaggcagcaaatcagaagagtctatgaggaaattttccaggaggatcttgtgaaacgcctagagtctgagatcaaaggagactgtgagaaagccgtgtaccgatggatact

SEQ ID NO: 22038 - DNA, 397 bp, Glycine max
  modified_base (359)..(359): a, c, g, t, unknown, or other
  modified_base (369)..(369): a, c, g, t, unknown, or other
  modified_base (376)..(376): a, c, g, t, unknown, or other
gacttcacttttagttctctctctccctggtcctttgagcttcaagaagttgttcctgtttgttgtagcagttcctgtccttaatttcttcaaccttctcaacacataaccaccttggtctgtgtttgtttgtgtgtgcttattacttggtctcttcatattgtacatataaaaattatggatgatgaatatgccaagcttattagaaggatgaacccaccaagggttgtgattgacaacaatgcctgtgaaaacgccactgttattcaggttgacagtgtcaacaaacatgggattctcctcgatgttgtccaagttatatcagatatgaaccttgtaataacaaaagcctacatctnctctgatggngtgtggntcatggatgtgtttaatgtga

SEQ ID NO: 22039 - DNA, 146 bp, Glycine max
gtagttgcaggggttcgtcgtttacccttccctaaagtatctggtgtgctttgttcggtaataacgaaaaacgatgggagctgaaactgaattatcacaagaaaagccagcacaagataggccaggctgtctttaagaacagtctt

SEQ ID NO: 22040 - DNA, 436 bp, Glycine max
gacgacagaaggggatgaaagatcaatttgcaaattacgttgtacaaaaggtgctggaaacttgtgatgatcaacagcgcgagctgattctttcccgaattaaggttcatttgaatgcattgaaaaagtacacctatggaaagcacattgtctctcgtgtagaaaaacttgttgcagctggaggtacatgttccgtgtcattcctaaatttgtagtctgacacatttttatttttcaccatccatgtgtgcattaagagcaatttcattgatagcatgctcctacatgataaatgcattacacgagatacatgcatggaaaccaagccattctgctgcttctaattgtgttatgatatgcacatttaatttcaagcttatggttatcatatgtgaagtatttatgatatataagtttatgaaccggtcatgtattt

SEQ ID NO: 22041 - DNA, 233 bp, Glycine max
gacgttattttgggacaaggccaagaaccaggacaagggtgtaattttttctgaccagcaacgtctaattttcgccggaaagcaacttgaggacggccgtacccttgctgactacaacattcaaaaggagagtactcttcacctcgttcttcgtctccgtggtggcatgcatatcttcgttaagacactcaccggcaagaccattaccctatatgttgaaagctcctacacca

SEQ ID NO: 22042 - DNA, 324 bp, Glycine max
gacatgttaaatttccattatagcttttccttcataaggtctgcttaggattagaattgtagttgctaccatacactgtgtaatagttttgcttggtgaagttcataaggggaccgtgcgtttaatggcgttacctgataattgcagggagcgtgtaacatgaatgcgttacgtaataattgaaggggcgtctaacatggatcggtccaaaatggtaacatcacatgggtctgagaatcagttttgttttataggttataattatatgatatttgtgtgaaatatcttttagctttttttatctctttttaattatatttgttt

SEQ ID NO: 22043 - DNA, 374 bp, Glycine max
gtccatcatctgaccgtagcccacagaaaagaggtgacacatctcccgacaatgataggttgagtagaagccctgcaagggaccctgaagataggggctatgacagccctaaagttaatggtcgtagtggcagccctagctgtagccccagggatgatgacaggagccccattgacgatgacaacaaccaccgccactcgccaagaggcagcgagtcaccttaagtatttctcagagaaagaactctgtatgtggcctataatttatatctgctttggttatctgatgcactttgctgtgaagatcggggcaatttttagcttaaaagagaaactttatgaattgtttatgggtatgaagaaacggttttatgt

SEQ ID NO: 22044 - DNA, 172 bp, Glycine max
gggtttggaaagaaaatagaaatatttatgcggtggggaccaatatctagtgccctgcaagacaaagaaagaagggagagaagaagttgttgggttgagttggattggatttctaatctaatctattcctttcttttttcctatgcttttaaagcacaaacccttttttctt

SEQ ID NO: 22045 - DNA, 356 bp, Glycine max
gaagaaaggaagaaacataccgaatgagagcatcaaactcttcttcttcgatttccattgcgaagcgttacttcttcttcttctttctcttcattttcttcgctcttcgatcttcgtccggggactgctccgaataccaccaccaccactcgccgatggccacgatcggaggcttacacgactcccaaggctctcaaaacagcgtcgaaaccgaagccctcgctcgattcgccgtagacgaacacaacaagaagcagaattcgcttctggagtttgctagggtggttagggcacaggaacaggttgttgctggtaccctgcatcaccttactcttgaggctattgaggctggtgag

SEQ ID NO: 22046 - DNA, 386 bp, Glycine max
caagattaaccctaatgccccacttgacaaagttgctattgtcagctgtggattctgcacaggttttggggctactgtgaatgttgcaaaaccaaagcctaataatactgttgctgtctttggcttacgagctgttggtcttgctgcctgtgaaggggcaagggtttctggtgcatctagaatcatcggggttgatttacttcccaatcgatttgaacaagccaaaaaatttggggtcactgattgtgtaaacccgaaagatcacaacaaaccagtccaagaggtcattgctgaaatgactaatggaagagtagatcgtgctattgaatgcacttgaagcatccaagctttaatctcagcatttgaatgcactcatgatggttggg

SEQ ID NO: 22047 - DNA, 330 bp, Glycine max
ttgaggaaagaaacaagagaattaggtttgaggaggagactagggataagattgatgaaaaggagagggaaattaagggttacagacagaaggttgagggattggagaaggttgctgctgagaaaaaaacagaattagatgagttggttaaacagaaattgaggttggaggaatcacttagagaatctgaggagaaagtgactggtttggagtccagtattcttcaattgcgtgaggaagcaaaggaagccgagagggtgatcatatcgctgaatgaaaaggcggtggagacggttgagacaatcgacagaggtttgaatggtgtacatg

SEQ ID NO: 22048 - DNA, 91 bp, Glycine max
ggttgctgctgcttagttgaaacttgtatggtgattagctattaagaggaaagaagaacgaaaaaaacagtttaaccgctacagccttctc

SEQ ID NO: 22049 - DNA, 358 bp, Glycine max
gataactctctgtagcgaaaagtcagcgccttcttttgtctctctctctcaaaaaaaaaattccacacactgcagagtttgtctctctatggcggaagattgggatctacatgcggtggttagaggctgctccaccgttacatcatcctcagtgtcttcttcttcatctccttcttcctctggttttgcctcttcttacttccaccctgaagctgcagtttcttcttcttcttcttcctattctggcttcaacatcttcaagggtgaacaaggaataagccaagttttgtcgctctctgcgtacccctttgaagcaaggagctccattgaggaattgcatgagctttgcaaacctttt

SEQ ID NO: 22050 - DNA, 356 bp, Glycine max
gaacaaagcgaagaagaagaagaagaaacaccctgtacccttcttacatcttctaatttatttttctgaggacttttttatttttatttcttcgtttccaccattttctgttacgccaaactgcgtctgcgacgcgaattgtgattagtgaacggtgaatgttgaggatctgctactttttgaacattgaataaggtctatcagacaaggatttgacagaatttgtcagaatcaaattgttaattctcttctgaagatttcattcgttcgtttgcgatatttgaaggtgctcgttaatttctagttttagagatacatttttctctcgaaaatcgacgaatttcggaactctggac

SEQ ID NO: 22051 - DNA, 357 bp, Glycine max
ggcattgtaggtgctgttacataatacatgttggatgttggttgccagttggataatcgttgatgcttattatgcagtagaggtcattggacaatattgtaatccttgttgctatctattgttatgatttatgaagcaccgtttggtatcttcatttgagaattttgatatgctagggggattattctttgatgttctgacatgaatgggtgctaaaaatggataaagattgcttgtacctccacattctctctgattttacagaataggaaaacattctacattttctgagctatccattgtttgttgatagcccttatgttattgggaattatattcaaagattcagcttcggaa

SEQ ID NO: 22052 - DNA, 386 bp, Glycine max
gagagtgtgtcagagaaagtgccgctattacctactggggtgacaagtagtgttcatgagttggctttgatgatgaataataatgataataataagaataagtcaattgggatagtgaacaggaatccaaagtggtcggataagttcaatgagatgaccaacttcgatgatgttaatgtggcagcacaatcatcactgcctccaaggccaagggtggcaaggttgattccatcagcacctgctgcagcttctttcaatttcaatgcttatgagtactattggaggaccaagtctgcatcaccaaaaggtacaagtagtgttaaccttaaccaacttgaccaagagaaactgaagagcaggttgttgtgtctggggcatgaatacaa

SEQ ID NO: 22053 - DNA, 353 bp, Glycine max
cattctttgatcatacacttagttgcttccaatggggagggttctgctagagaagctctgggatgatgttgtggctggccctcaacctgagcgtggccttggcaagctcagaaaactcaccaccctcaaaactattgatgaaggagaaagtagcaagctgcagaagacgttgtcgatgccgtcgacaccaacaaccccgatgactccgacgactccaacgacaccgggatcggcccgtaaagctgacaacgtttggaggagcgtcttccatcctgggagcaactccgccacaaagaccatcggtgctcatatgtttgacaaaccacttaccaacactcccactgtctatgact

SEQ ID NO: 22054 - DNA, 394 bp, Glycine max
gacttatctaaaagtagatggtccagattagtaccacaaaaatggagaaatagaataactgaatatcgtatagctcaaaataaagatttaaccaaatgcaattcatatgaaaaaagccaattaattctttacaaagaacaacaagtaaacgcattaaaaaaaaaaaattagaaaacaatatagatacgatcttttatcctataattttatcaattatgcagataagaaagactcatatatttatggatatagatccctatttcaagtaaaaaaaaaccaagtgatttcttctaattacaacacgtataaaaaagaattattggatatcatagataatctctttatcaagaattatatatcggaagatgcgattctagatatggaaaaaaatatg

SEQ ID NO: 22055 - DNA, 380 bp, Glycine max
aatattttcttatatgaaacacaactggctcaaagaaatgggaaaagcaatgatactcagaatcacatacaggaacaaaacaccatgttcatttgcaggaactttattcacgagcaagggagcaagaagaggagatcctctccctccgtgaacagattggcattgcctgtatgaaggaactgcagctgttgaatgagaaatgcaaactagagatgcaattctctgaactaagaatggcagttgatgagaagcaaaatgaagccatctcatacgcttctaatgattttgctcaaagaaaaagttatcttgaagaaaatttaaaacttgctcatgatttgaaagctgtagatgatgagagatacatcttcatgtcatctatg

SEQ ID NO: 22056 - DNA, 382 bp, Glycine max
ggttctagtgtgtgattgtttgttgttgtaactcgttgttcttcttttgttgttctgtgtttgtgtttgttttttctctcacctgaaaatgtcttgctgcggtggtaactgtggttgcggaagctcctgcaagtgcggcaacggctgcggaggctgcaagatgtacccagacttgagctacactgagtcaaccaccaccgagaccttggtcatgggagtggcacctgttaaggctcaatttgagggtgctgaaatgggtgtgcccgctgagaacgatggctgcaaatgtggaccaaactgctcctgcaacccctgcacttgcaagtgaagtgttgggagagcaagcttcaagcagagatagcccttaattaggaataatgat

SEQ ID NO: 22057 - DNA, 324 bp, Glycine max
gactctcttagcgctcaagcgggggattcccaataacaataatatgcgcatgttcaattaagctccttctactatacccatggctgctactaagctcataattgcttccctacttgcgtcgattctacttcttgatttcgtagatgctgatcaatgggaacatgcacaaacgcacgggtctattcttcatcagatagattgtaacggagcatgtgctgtgaggtgccgataatcatctcgtgcacgcctttgccaaagagcttgtagaacttgtggtagacgctagaactgcgtgccacctggaactgttggaaaccaagaagt

SEQ ID NO: 22058 - DNA, 406 bp, Glycine max
gagggtgggcttcaagcagagagcacagaccgaaacgccccatcaaaccgttagtttcacagccggtaacacacgaaacgaaaggaaccaaccacccacaggccaaagcacaaaccctacacttctcctaagtcctaacccccgagagagagagaaatggatactgacgcagtgggaagcgaagggtactctccgctgaaggaattaagactggaaattgaagtaaaggaaggaactttctctctctgcttttggctatatttgacgagtttcactacatttcctgttaccattatccaacacggttttttctgttttctccgaaagtgcttctttttcttgttacttgatgataaataagagaaatccatatgttaccaatttttttctttatcatgaaaaagct

SEQ ID NO: 22059 - DNA, 359 bp, Glycine max
gctcgtctcgtggaagtgtaagcaagcaaaaccctggcggcgcctgctttctttgttcgtgttttgcatcaggtgcgaactcaccctattgatttctatccacagctgatccttcttctctaattaatttattattatttttcatgtattgttctcgcttcactgcttcttatttggctccgtcatttgaaattgttttcttttaattcgagtttcaaattttcaatatctgttactgtgtttatgatttcaatttcatggtggaattattattgctttctacgtgacgttgaatttgtactgtatgtgttgatcttttgttctaaattgtgtcgcatagtgtttgtggcttgtttggt

SEQ ID NO: 22060 - DNA, 424 bp, Glycine max
  modified_base (402)..(402): a, c, g, t, unknown, or other
atgaatacttaacaataatacttacatccattgatccacacaagtgagggccataactatgttttttggattgtctgcttcccaatattatatatatccatccctgcatataaatgcaacttttctatattgtgatatgaaggaccacacaccatgttccgcaacagtgatctcacgccaagagctttagttggacgaaaaatctttctagctctttgcccctataagtacaatagatctaccatgcatatatggcaattaactaccttgggtgatattttaatatcagaataagtacaaaggcatccaggccataatcacactttcactttattaattttataacaacttgcatattgctaagaaaatggtacatttttttttcttgtaccacttattaancttttaattatttttttttaaa

SEQ ID NO: 22061 - DNA, 274 bp, Glycine max
ggtggctcatagcgcacccaaaactagagctaccttccgttctaaccttacactcttctctcctttaccaatcaatgcaataatatttcttagagatattccgaaaccatggctcacgccaatactatgattttttgtgatggaattctacgtaaccttgtctccttctgttgctttctagcaccagtaccaacattctatctagtttgtaagaagaaaaccactgaaggtttccaatcactttcttacgtggctgcactctgcacttcaatgc

SEQ ID NO: 22062 - DNA, 258 bp, Glycine max
agaatatgaaaaagaaaaaaaaagattctaaagaaatataactaatattctttagaataatcaaaaagaatattaaattcaaataaattttagatagaaaaaagacttaaaaaggaggatttgaaatgcgagatctaaaaacatatctttccgtggcaccagtagtaagtactctatggttcggggctttggcgggtctcttgatagagatcaatcgtttttttcagatgcattgatatccccttttttttcatctag

SEQ ID NO: 22063 - DNA, 352 bp, Glycine max
agacctcatggaccatcagacattggatgaacatgctgtgaggttgcaagcagaggcagtccatctggcaaagcttcaataccttcattatctaatccgatcctcaaactccttgagcaccaacaagtcctatgaccaaagtgccaccaccaacatggaacctgcagctttcagtttgttgaactcaatctccaatgtgaaagagaatccagtcatgttgcaaccagctgatgatactcctgctgcctcattgtctgatggcattgatagctctcaaccactccaccacccgaacgtgctacctcatcaccttttagagccacaagtctcttttagctatcaatcatgtttg

SEQ ID NO: 22064 - DNA, 423 bp, Glycine max
ggctcggcttctcagctgtcactatactctacgagtctcttgctcacgcctcacaatgaaaccctaaatccttttgtgtcagtttccttcctaatcgctgctcagccatcaccgtcgcgactcgcgaggagacacgttccatcttctggcaccccctcttccgattccggcgttccctcttctagttctggagtttactcgacgtccttcatcaaagtttccggggtctgttcgaggtgcgtttctgtttatgcgttcagactccatagcttacttttctgctttcatggtttttttagtttcacgaaagaacatagcagatttatttttgcttttatttcatgctctggtgtttcttctcttattaatttttaatttatgatttactgctttccttttaattggtgcccgtgacatactctg

SEQ ID NO: 22065 - DNA, 385 bp, Glycine max
ggctcacatacatcacaactatgtccttgggaatgcttggatcccgagcgatttcattggcatcgaaacgattcctctgcaccaatgccgcttccgcttcccctcctcttccccctcctccttccgccgcctctcccagccgctggagcttcctcaaatacgccctcgtcggcgctctcaccggaggcactgtctttgccggttacgcctcttacgcttacagcttggacgaaatagaacagaaaacgaggtcgctccgtgaatcggccaagtacactgctggtgatggagtcactgctcttgataaatttcaaggtttgctatactcaactgcaatgaacagtcctgctaaagcagtagagctttatttggatgcacgaagggt

SEQ ID NO: 22066 - DNA, 220 bp, Glycine max
catccaggcccgatcatgtccgatggtacgcagagataaattatggtcattttgcgccttgtgtcaaccaagaggagcgaattcgacagtatcaggatgatgttggtcgttcagtgctgatcattttcaaaatttttgcaagttccgctggcggggaaattgaccgaccgaatggtgtttcgctcgaacgaaatagtgtcttatctttactttcctttta

SEQ ID NO: 22067 - DNA, 324 bp, Glycine max
gatagcagcatcatacaaagcattgaattcaaaaactgaaggtcattccttgtgttttgctttcttcctcaaaaccaaacatgtcgaacacatgcggcaactgcgactgcgctgacaagactagctgcaccaagggaaacagctatggtgttattgtagagactgagaagagttacatcgagactgttgtcatggatgttccagcagctgagcatgatgggaagtgcaagtgtggcactaactgcacttgcacggactgcacctgtggccattaaggaatatgtatgaaaatgtaattgccatgtgtttggcaatacaaatatt

SEQ ID NO: 22068 - DNA, 396 bp, Glycine max
ttcaatttttcgtctctaattcaaaaccgaacgtgaaacttttgtttcattcggctcctttacagaaaaaattaagagatggaaaatcaaaaaattgacccataacatctatgtcagcctttttgttttgtatgaataagtttaaaacatcttgctttttagatgatccctctagaagagcagtattataataatctatgttttttttctagttacttcgttctctatttctatttaatagaatctttaggaaaagcataaaatttctgtcgagctaaaaaaatgtagatgtctctagtaaactaaaagaatcgtttaatagctattttgcttcaatctctactatacaaaaaaatggaagatttagttacgattagaaagaaactttctatatat

SEQ ID NO: 22069 - DNA, 330 bp, Glycine max
ccacgcgtacgaccacgcgagcgggcgtgtgctataagacgacagaaggggaccaaggcactcgctttcacttcaaattgattggatggggctctattacttcaacggatacgccgggctagctcatgtaattaggaagtgttaattcaaagtgagacaccgtctgcttataaataaccttcttaccgatatatcatgatttccaactctttagatacaaaatctgaatactctcagaagaactgtaaccactacataccgcaacataaactttgtagagtcactttgaaatcaaatcgacactgatcatcattgctatatagcgaatat

SEQ ID NO: 22070 - DNA, 332 bp, Glycine max
  modified_base (271)..(271): a, c, g, t, unknown, or other
ggatctcaacggagccctctcttcaggtcaccatctagactgcaatcatggctgatggaccacagcatccatcagttgttcagaagctagctggacagtcttacctggtgtccaggcttagccccaactttaactctaggaattattctgcaactggttcttacgtcaatggcggaatgcactcgcctgggttggctgttgtgtcacctgtatctccagttactgtgcatgctccagcagagaaaggagtgagtggatttctagtggattntctgatgggtggagtatccgctgctgtatcgaagacagctgctgctccaattgaacgagtc

SEQ ID NO: 22071 - DNA, 323 bp, Glycine max
ttaaggttttatgggtggccaaattttcggtgctggtgttattattgtagtttcttttctgctgatcctctgtggcatggttgtgggactgacagtgatatattctgcttgaaaagtctaaagagaacacttgacgacccctacaattatttgcaatcctggaatttcaataacaatacagaagggtatatatgcaagtttactgggttgagtgttgcaccctgatgaaaacaagtcttgaatctcaaactgtcaaacatgggaccaagggccccttcctcgcggattcagaattgtcaacatgacaggattagatttttcgc

SEQ ID NO: 22072 - DNA, 388 bp, Glycine max
ttggggattaatcaaattgatgtagtatcgttgttcacaaacattaaacatgatgggtgaacggcaaaatcttccttggttttagaactcacattaaaatataattctctagaattcattataattgaaaaatgaaatattatagcatagtgactaaaaaaatgttgaactaaaaggacaatggtttagaattttaacatgatacttacagttccaccaacagtgggatctggtgtatgtagaaaacttatgaagttgcaagcaactccacccagtatgtagatcaagaaaaatgtaaatgaaccatagcctttgcaaacttgaggcccaaatgttaaaagggcccaacaactgacagccatgtgaaatattcctgcatgctgcatat

SEQ ID NO: 22073 - DNA, 57 bp, Glycine max; identical to SEQ ID NO: 410

SEQ ID NO: 22074 - DNA, 122 bp, Glycine max
  modified_base (115)..(115): a, c, g, t, unknown, or other
tgtacctccttccaagtaaaaagaatcgcttgatttcccctttagaaagaactacgtaggtctgatttcctcttcgatggagggtgcgtaggagcaagagccccgcttttgtcgnaccccta

SEQ ID NO: 22075 - DNA, 398 bp, Glycine max
gttgtttatcaatttaggcgccttcacagtaagaagctgcagcacacttttcgattttattcccaccattggaggacttgggcagcttgctttatacaggctgcttggcgccgatataagaaaaggatgactatgaaagacctcagtttgagggaaaccattcctttagacgaagcagtagctggtgagagaaaacatggggactattctgctggttcaaattcaactcagactaaattgaaccttggggctacaattcttgcttcgagatttgctgctaacacacgaagaggggctctgaagatgaaagatgacatgccccagttacagaagcctgaagaacctgacttttccactgaagctgacgatgattagttacacttattcagtggcatttg

SEQ ID NO: 22076 - DNA, 399 bp, Glycine max
tgtctgccgctctctgagaaaaacagatagtgtgggagagagaagagcggaagagaaaatgacgaccaggttcaagaagaacaggaagaagagaggtcacgtcagcgccggacacggccgtatcggaaagcaccgcaagcatcccggaggtcgcggtaacgccggtggcatgcatcaccaccgtatcctcttcgacaagtaccatcctggtttcttcgggaaggtaggcatgcgctacttccacaaacttcgcaacaaattctacaatccgatcatcaacatcgacaagctgtggtccctcctcccccaggaggccaaagacaaggccaccgccgacaaggcacccttgctcgatgtcacccagttcggttactttaaggttttgggtaaaggggtttt

SEQ ID NO: 22077 - DNA, 235 bp, Glycine max
  modified_base (4)..(4): a, c, g, t, unknown, or other
gtcncgctcttcttcggcgatatctacttcgtgtgatgtttgagagcttgatatttctctcacatgaaaatgtctagcatgcggaggtaactgtggttgcggaagcgcctgcacgtgcggatacggctgcacgaggctgcaagatgtacccagacttgcgctacaccgagtcatccaccaccgagaccttggtcatgggaccggcaccagttattgctcaatgcaagagtgctct

SEQ ID NO: 22078 - DNA, 392 bp, Glycine max
ttctaccaaaccaaaggaagagtgggcaacttccaacaccatagtgaaatggcttccaaggctgcacttctcttgtgtttcaatgttctcttcttcaccgtggttagctccacatatgtgccatgcaacccaccccccaaaactccaaaacacccacctgtcccaaagccaccttccccaaagcaagcaagttgccccaaagacactattaagtttggtgtgtgtgctgatgtgttaggtttgatcaacgtgcaacttgggaagccaccaaagaccccatgctgcaacctcattgagggtctcgctgatcttgaagctgcagtgtgcctctgcactgctctcaaagctaatgtgttgggcatcaacctcaatgttccagtgaacttgagctt

SEQ ID NO: 22079 - DNA, 380 bp, Glycine max
gtaatgtttttccaaaccaaacaaagagagggcaacttccaacaccatagtgaaacggcttccacggctgcacttctcttgtgtttcaatgttctctccttcaccgaggttagctccacatatgtgccatgcaacccaccccccaaaactacaaaacacccacctgtcccaaagccaccttccccaaagcaagcaagttgccccaaagacactattaagtttggtgtgtgtgctgaagtgttaagtttgatcaacgtgcaccttgggaagccaccaaagaccccatgctgcaaccttattgaggatttcgctgatcttgaaactgcagtgtgcctctgcactgctctcaaagctaatgtgattggcattaacctcaatgt

SEQ ID NO: 22080 - DNA, 390 bp, Glycine max
cggtaaacatcatgttcccatgcagcaagggagacaacatgaaggttatcataagtaacaaatggatatcaatgaccattacaaagatttcattcaaaatacaagggagaagatgatgagaagcgtcacaaacattggttggactcatcagagcaaccatgcggctgcacctgaacatggcgaggctcagaacaagaacgaaagccatttttctgagattattcagcgtgctaggaagaagctcagaactacaacaactgttagaaagaataataattagtccaagaaagagtaagactcaccacaaattaagaaaggttaattattagtattgacgtttgttggtttggtgtaggaaaagtgttgagcatctaatctaggttattgttc

SEQ ID NO: 22081 - DNA, 297 bp, Glycine max
  modified_base (72)..(72): a, c, g, t, unknown, or other
ttaatgttttatcaaaaacaaaacacaagccgggggaaggggatataaaaagggaaacaaccagcataacgncagggaccagccacaagatgggggagaccttccatgtgggagggcacattaaggaggaagagcataatggtgagcaccatgctggagaatacaaaggggagcaccatggtgaacacaagtatgagtacaaaggagagcatcattggtgaacacatagctggagagtaccttggtgagcacaagccacagcacaaagaggggtacctaagacaaagtcaaggacaa

SEQ ID NO: 22082 - DNA, 367 bp, Glycine max
gtacaaatggtacttcgaacttggaacgagtatgaagaaattaacgatacttctttaccttttgagttgttctgccggatcggtcgctcaagacctttggtctctacccggacctgatgaaaaaaatgggatcacatcttatggactcgttgagaataattctgatctagttcatggcctattagaagtagaaggcgctctggtgggatcctcacgtacagaaaaagattgcagtcagtttgataaggatcgagtgacattgcttcttcggtccgaaccaaggaatcccttaaatatgattcaaaatggatcttattctatcgttgatcagagatttctctatgaaaaatatgaatcggagtttgaa

SEQ ID NO: 22083 - DNA, 398 bp, Glycine max
tgtgagcataaagaaacatctcaatctcaaaagaagcatctcgtgtattgtctcttaaaaacaatggaattgatgtgccattgttcgagctttcttcttccgacggagaatcctaacacgacgtgttcgctttctctaaagtacgctctcgttgttctcaaccaaagcctaccgagatttgctcctctgctctgggaccacgctcaagtacgagtttgcgctgatggaggtgccaatagggtgtatgatgaaatgcctcttttcttacctcatcaacaaccttcccatgttcgcaccacgtacaagcctgatgtaattaaaggagacatggattcaatcaggacagaagtacttgacttctatgcaaagctgggaactaagataattgatgagtctca

SEQ ID NO: 22084 - DNA, 402 bp, Glycine max
ttttacagattgggaccaaagcgatggaggtggtgaaggatctggacgtgaagcggtacatgggtcggtggtacgagattgcgtgcttcccgtcgaggtttcaacccagtgacggcaccaacaccagagccacctacactctccgagatgacggcaccatcaacgttcttaacgagacttggagtggcggcaaaagaggtttcattgagggcactgcttataaggctgatcccaacagcgacgaggccaagttgaaggtcaagttctgggtgcctccctttttacccatcattcccgttactggggattactggcttttgtacattgaccaggattatcactatgctgtcattggccaacctttcaggaattatctttggatattgtccaggaagaaccata
